United States Patent Application Publication US 2015/0232836 A1 - sequence listing, part 22

SEQ ID NO: 807587 - DNA, 15 bp, Homo sapiens
ccattcatagagcag

SEQ ID NO: 807588 - DNA, 15 bp, Homo sapiens
cattcatagagcaga

SEQ ID NO: 807589 - DNA, 15 bp, Homo sapiens
attcatagagcagat

SEQ ID NO: 807590 - DNA, 15 bp, Homo sapiens
ttcatagagcagata

SEQ ID NO: 807591 - DNA, 15 bp, Homo sapiens
tcatagagcagataa

SEQ ID NO: 807592 - DNA, 15 bp, Homo sapiens
catagagcagataat

SEQ ID NO: 807593 - DNA, 15 bp, Homo sapiens
atagagcagataatg

SEQ ID NO: 807594 - DNA, 15 bp, Homo sapiens
tagagcagataatgg

SEQ ID NO: 807595 - DNA, 15 bp, Homo sapiens
agagcagataatggc

SEQ ID NO: 807596 - DNA, 15 bp, Homo sapiens
gagcagataatggca

SEQ ID NO: 807597 - DNA, 15 bp, Homo sapiens
agcagataatggcac

SEQ ID NO: 807598 - DNA, 15 bp, Homo sapiens
gcagataatggcaca

SEQ ID NO: 807599 - DNA, 15 bp, Homo sapiens
cagataatggcacag

SEQ ID NO: 807600 - DNA, 15 bp, Homo sapiens
agataatggcacaga

SEQ ID NO: 807601 - DNA, 15 bp, Homo sapiens
gataatggcacagat

SEQ ID NO: 807602 - DNA, 15 bp, Homo sapiens
ataatggcacagatg

SEQ ID NO: 807603 - DNA, 15 bp, Homo sapiens
taatggcacagatgt

SEQ ID NO: 807604 - DNA, 15 bp, Homo sapiens
aatggcacagatgtc

SEQ ID NO: 807605 - DNA, 15 bp, Homo sapiens
atggcacagatgtcc

SEQ ID NO: 807606 - DNA, 15 bp, Homo sapiens
tggcacagatgtcca

SEQ ID NO: 807607 - DNA, 15 bp, Homo sapiens
ggcacagatgtccag

SEQ ID NO: 807608 - DNA, 15 bp, Homo sapiens
gcacagatgtccagc

SEQ ID NO: 807609 - DNA, 15 bp, Homo sapiens
cacagatgtccagca

SEQ ID NO: 807610 - DNA, 15 bp, Homo sapiens
acagatgtccagcaa

SEQ ID NO: 807611 - DNA, 15 bp, Homo sapiens
cagatgtccagcaac

SEQ ID NO: 807612 - DNA, 15 bp, Homo sapiens
agatgtccagcaact

SEQ ID NO: 807613 - DNA, 15 bp, Homo sapiens
gatgtccagcaacta

SEQ ID NO: 807614 - DNA, 15 bp, Homo sapiens
atgtccagcaactat

SEQ ID NO: 807615 - DNA, 15 bp, Homo sapiens
tgtccagcaactatt

SEQ ID NO: 807616 - DNA, 15 bp, Homo sapiens
gtccagcaactattt

SEQ ID NO: 807617 - DNA, 15 bp, Homo sapiens
tccagcaactatttt

SEQ ID NO: 807618 - DNA, 15 bp, Homo sapiens
ccagcaactattttc

SEQ ID NO: 807619 - DNA, 15 bp, Homo sapiens
cagcaactattttct

SEQ ID NO: 807620 - DNA, 15 bp, Homo sapiens
agcaactattttctt

SEQ ID NO: 807621 - DNA, 15 bp, Homo sapiens
gcaactattttcttc

SEQ ID NO: 807622 - DNA, 15 bp, Homo sapiens
caactattttcttca

SEQ ID NO: 807623 - DNA, 15 bp, Homo sapiens
aactattttcttcac

SEQ ID NO: 807624 - DNA, 15 bp, Homo sapiens
actattttcttcact

SEQ ID NO: 807625 - DNA, 15 bp, Homo sapiens
ctattttcttcactt

SEQ ID NO: 807626 - DNA, 15 bp, Homo sapiens
tattttcttcacttt

SEQ ID NO: 807627 - DNA, 15 bp, Homo sapiens
attttcttcacttta

SEQ ID NO: 807628 - DNA, 15 bp, Homo sapiens
ttttcttcactttaa

SEQ ID NO: 807629 - DNA, 15 bp, Homo sapiens
tttcttcactttaat

SEQ ID NO: 807630 - DNA, 15 bp, Homo sapiens
ttcttcactttaata

SEQ ID NO: 807631 - DNA, 15 bp, Homo sapiens
tcttcactttaatat

SEQ ID NO: 807632 - DNA, 15 bp, Homo sapiens
cttcactttaatatg

SEQ ID NO: 807633 - DNA, 15 bp, Homo sapiens
ttcactttaatatgc

SEQ ID NO: 807634 - DNA, 15 bp, Homo sapiens
tcactttaatatgct

SEQ ID NO: 807635 - DNA, 15 bp, Homo sapiens
cactttaatatgctc

SEQ ID NO: 807636 - DNA, 15 bp, Homo sapiens
actttaatatgctca

SEQ ID NO: 807637 - DNA, 15 bp, Homo sapiens
ctttaatatgctcag

SEQ ID NO: 807638 - DNA, 15 bp, Homo sapiens
tttaatatgctcagg

SEQ ID NO: 807639 - DNA, 15 bp, Homo sapiens
ttaatatgctcaggc

SEQ ID NO: 807640 - DNA, 15 bp, Homo sapiens
taatatgctcaggct

SEQ ID NO: 807641 - DNA, 15 bp, Homo sapiens
aatatgctcaggctc

SEQ ID NO: 807642 - DNA, 15 bp, Homo sapiens
atatgctcaggctca

SEQ ID NO: 807643 - DNA, 15 bp, Homo sapiens
tatgctcaggctcac

SEQ ID NO: 807644 - DNA, 15 bp, Homo sapiens
atgctcaggctcact

SEQ ID NO: 807645 - DNA, 15 bp, Homo sapiens
tgctcaggctcacta

SEQ ID NO: 807646 - DNA, 15 bp, Homo sapiens
gctcaggctcactac

SEQ ID NO: 807647 - DNA, 15 bp, Homo sapiens
ctcaggctcactact

SEQ ID NO: 807648 - DNA, 15 bp, Homo sapiens
tcaggctcactactg

SEQ ID NO: 807649 - DNA, 15 bp, Homo sapiens
caggctcactactga

SEQ ID NO: 807650 - DNA, 15 bp, Homo sapiens
aggctcactactgat

SEQ ID NO: 807651 - DNA, 15 bp, Homo sapiens
ggctcactactgatt

SEQ ID NO: 807652 - DNA, 15 bp, Homo sapiens
gctcactactgattt

SEQ ID NO: 807653 - DNA, 15 bp, Homo sapiens
ctcactactgatttt

SEQ ID NO: 807654 - DNA, 15 bp, Homo sapiens
tcactactgattttg

SEQ ID NO: 807655 - DNA, 15 bp, Homo sapiens
cactactgattttgg

SEQ ID NO: 807656 - DNA, 15 bp, Homo sapiens
actactgattttggt

SEQ ID NO: 807657 - DNA, 15 bp, Homo sapiens
ctactgattttggtt

SEQ ID NO: 807658 - DNA, 15 bp, Homo sapiens
tactgattttggttt

SEQ ID NO: 807659 - DNA, 15 bp, Homo sapiens
actgattttggttta

SEQ ID NO: 807660 - DNA, 15 bp, Homo sapiens
ctgattttggtttaa

SEQ ID NO: 807661 - DNA, 15 bp, Homo sapiens
tgattttggtttaat

SEQ ID NO: 807662 - DNA, 15 bp, Homo sapiens
gattttggtttaatt

SEQ ID NO: 807663 - DNA, 15 bp, Homo sapiens
attttggtttaattc

SEQ ID NO: 807664 - DNA, 15 bp, Homo sapiens
ttttggtttaattca

SEQ ID NO: 807665 - DNA, 15 bp, Homo sapiens
tttggtttaattcag

SEQ ID NO: 807666 - DNA, 15 bp, Homo sapiens
ttggtttaattcagg

SEQ ID NO: 807667 - DNA, 15 bp, Homo sapiens
tggtttaattcaggc

SEQ ID NO: 807668 - DNA, 15 bp, Homo sapiens
ggtttaattcaggcc

SEQ ID NO: 807669 - DNA, 15 bp, Homo sapiens
gtttaattcaggcca

SEQ ID NO: 807670 - DNA, 15 bp, Homo sapiens
tttaattcaggccag

SEQ ID NO: 807671 - DNA, 15 bp, Homo sapiens
ttaattcaggccagt

SEQ ID NO: 807672 - DNA, 15 bp, Homo sapiens
taattcaggccagtg

SEQ ID NO: 807673 - DNA, 15 bp, Homo sapiens
aattcaggccagtgt

SEQ ID NO: 807674 - DNA, 15 bp, Homo sapiens
attcaggccagtgtt

SEQ ID NO: 807675 - DNA, 15 bp, Homo sapiens
ttcaggccagtgtta

SEQ ID NO: 807676 - DNA, 15 bp, Homo sapiens
tcaggccagtgttaa

SEQ ID NO: 807677 - DNA, 15 bp, Homo sapiens
caggccagtgttaat

SEQ ID NO: 807678 - DNA, 15 bp, Homo sapiens
aggccagtgttaata

SEQ ID NO: 807679 - DNA, 15 bp, Homo sapiens
ggccagtgttaatat

SEQ ID NO: 807680 - DNA, 15 bp, Homo sapiens
gccagtgttaatatg

SEQ ID NO: 807681 - DNA, 15 bp, Homo sapiens
ccagtgttaatatga

SEQ ID NO: 807682 - DNA, 15 bp, Homo sapiens
cagtgttaatatgac

SEQ ID NO: 807683 - DNA, 15 bp, Homo sapiens
agtgttaatatgacc

SEQ ID NO: 807684 - DNA, 15 bp, Homo sapiens
gtgttaatatgacct

SEQ ID NO: 807685 - DNA, 15 bp, Homo sapiens
tgttaatatgacctg

SEQ ID NO: 807686 - DNA, 15 bp, Homo sapiens
gttaatatgacctgg

SEQ ID NO: 807687 - DNA, 15 bp, Homo sapiens
ttaatatgacctggt

SEQ ID NO: 807688 - DNA, 15 bp, Homo sapiens
taatatgacctggtt

SEQ ID NO: 807689 - DNA, 15 bp, Homo sapiens
aatatgacctggttt

SEQ ID NO: 807690 - DNA, 15 bp, Homo sapiens
atatgacctggtttt

SEQ ID NO: 807691 - DNA, 15 bp, Homo sapiens
tatgacctggttttt

SEQ ID NO: 807692 - DNA, 15 bp, Homo sapiens
atgacctggtttttc

SEQ ID NO: 807693 - DNA, 15 bp, Homo sapiens
tgacctggtttttcc

SEQ ID NO: 807694 - DNA, 15 bp, Homo sapiens
gacctggtttttcca

SEQ ID NO: 807695 - DNA, 15 bp, Homo sapiens
acctggtttttccag

SEQ ID NO: 807696 - DNA, 15 bp, Homo sapiens
cctggtttttccaga

SEQ ID NO: 807697 - DNA, 15 bp, Homo sapiens
ctggtttttccagaa

SEQ ID NO: 807698 - DNA, 15 bp, Homo sapiens
tggtttttccagaat

SEQ ID NO: 807699 - DNA, 15 bp, Homo sapiens
ggtttttccagaatg

SEQ ID NO: 807700 - DNA, 15 bp, Homo sapiens
gtttttccagaatgc

SEQ ID NO: 807701 - DNA, 15 bp, Homo sapiens
tttttccagaatgca

SEQ ID NO: 807702 - DNA, 15 bp, Homo sapiens
ttttccagaatgcat

SEQ ID NO: 807703 - DNA, 15 bp, Homo sapiens
tttccagaatgcata

SEQ ID NO: 807704 - DNA, 15 bp, Homo sapiens
ttccagaatgcatac

SEQ ID NO: 807705 - DNA, 15 bp, Homo sapiens
tccagaatgcatact

SEQ ID NO: 807706 - DNA, 15 bp, Homo sapiens
ccagaatgcatactc

SEQ ID NO: 807707 - DNA, 15 bp, Homo sapiens
cagaatgcatactct

SEQ ID NO: 807708 - DNA, 15 bp, Homo sapiens
agaatgcatactctg

SEQ ID NO: 807709 - DNA, 15 bp, Homo sapiens
gaatgcatactctga

SEQ ID NO: 807710 - DNA, 15 bp, Homo sapiens
aatgcatactctgat

SEQ ID NO: 807711 - DNA, 15 bp, Homo sapiens
atgcatactctgatt

SEQ ID NO: 807712 - DNA, 15 bp, Homo sapiens
tgcatactctgattt

SEQ ID NO: 807713 - DNA, 15 bp, Homo sapiens
gcatactctgatttg

SEQ ID NO: 807714 - DNA, 15 bp, Homo sapiens
catactctgatttgg

SEQ ID NO: 807715 - DNA, 15 bp, Homo sapiens
atactctgatttggt

SEQ ID NO: 807716 - DNA, 15 bp, Homo sapiens
tactctgatttggtg

SEQ ID NO: 807717 - DNA, 15 bp, Homo sapiens
actctgatttggtga

SEQ ID NO: 807718 - DNA, 15 bp, Homo sapiens
ctctgatttggtgaa

SEQ ID NO: 807719 - DNA, 15 bp, Homo sapiens
tctgatttggtgaag

SEQ ID NO: 807720 - DNA, 15 bp, Homo sapiens
ctgatttggtgaagg

SEQ ID NO: 807721 - DNA, 15 bp, Homo sapiens
tgatttggtgaaggg

SEQ ID NO: 807722 - DNA, 15 bp, Homo sapiens
gatttggtgaagggc

SEQ ID NO: 807723 - DNA, 15 bp, Homo sapiens
atttggtgaagggcc

SEQ ID NO: 807724 - DNA, 15 bp, Homo sapiens
tttggtgaagggcca

SEQ ID NO: 807725 - DNA, 15 bp, Homo sapiens
ttggtgaagggccag

SEQ ID NO: 807726 - DNA, 15 bp, Homo sapiens
tggtgaagggccagg

SEQ ID NO: 807727 - DNA, 15 bp, Homo sapiens
ggtgaagggccagga

SEQ ID NO: 807728 - DNA, 15 bp, Homo sapiens
gtgaagggccaggag

SEQ ID NO: 807729 - DNA, 15 bp, Homo sapiens
tgaagggccaggagg

SEQ ID NO: 807730 - DNA, 15 bp, Homo sapiens
gaagggccaggaggt

SEQ ID NO: 807731 - DNA, 15 bp, Homo sapiens
aagggccaggaggtg

SEQ ID NO: 807732 - DNA, 15 bp, Homo sapiens
agggccaggaggtga

SEQ ID NO: 807733 - DNA, 15 bp, Homo sapiens
gggccaggaggtgat

SEQ ID NO: 807734 - DNA, 15 bp, Homo sapiens
ggccaggaggtgatt

SEQ ID NO: 807735 - DNA, 15 bp, Homo sapiens
gccaggaggtgattc

SEQ ID NO: 807736 - DNA, 15 bp, Homo sapiens
ccaggaggtgattca

SEQ ID NO: 807737 - DNA, 15 bp, Homo sapiens
caggaggtgattcac

SEQ ID NO: 807738 - DNA, 15 bp, Homo sapiens
aggaggtgattcaca

SEQ ID NO: 807739 - DNA, 15 bp, Homo sapiens
ggaggtgattcacag

SEQ ID NO: 807740 - DNA, 15 bp, Homo sapiens
gaggtgattcacaga

SEQ ID NO: 807741 - DNA, 15 bp, Homo sapiens
aggtgattcacagat

SEQ ID NO: 807742 - DNA, 15 bp, Homo sapiens
ggtgattcacagatg

SEQ ID NO: 807743 - DNA, 15 bp, Homo sapiens
gtgattcacagatgt

SEQ ID NO: 807744 - DNA, 15 bp, Homo sapiens
tgattcacagatgtt

SEQ ID NO: 807745 - DNA, 15 bp, Homo sapiens
gattcacagatgttg

SEQ ID NO: 807746 - DNA, 15 bp, Homo sapiens
attcacagatgttgg

SEQ ID NO: 807747 - DNA, 15 bp, Homo sapiens
ttcacagatgttgga

SEQ ID NO: 807748 - DNA, 15 bp, Homo sapiens
tcacagatgttggag

SEQ ID NO: 807749 - DNA, 15 bp, Homo sapiens
cacagatgttggaga

SEQ ID NO: 807750 - DNA, 15 bp, Homo sapiens
acagatgttggagat

SEQ ID NO: 807751 - DNA, 15 bp, Homo sapiens
cagatgttggagata

SEQ ID NO: 807752 - DNA, 15 bp, Homo sapiens
agatgttggagatag

SEQ ID NO: 807753 - DNA, 15 bp, Homo sapiens
gatgttggagatagg

SEQ ID NO: 807754 - DNA, 15 bp, Homo sapiens
atgttggagataggc

SEQ ID NO: 807755 - DNA, 15 bp, Homo sapiens
tgttggagataggcc

SEQ ID NO: 807756 - DNA, 15 bp, Homo sapiens
gttggagataggcca

SEQ ID NO: 807757 - DNA, 15 bp, Homo sapiens
ttggagataggccat

SEQ ID NO: 807758 - DNA, 15 bp, Homo sapiens
tggagataggccatc

SEQ ID NO: 807759 - DNA, 15 bp, Homo sapiens
ggagataggccatcc

SEQ ID NO: 807760 - DNA, 15 bp, Homo sapiens
gagataggccatccc

SEQ ID NO: 807761 - DNA, 15 bp, Homo sapiens
agataggccatccca

SEQ ID NO: 807762 - DNA, 15 bp, Homo sapiens
gataggccatcccag

SEQ ID NO: 807763 - DNA, 15 bp, Homo sapiens
ataggccatcccagc

SEQ ID NO: 807764 - DNA, 15 bp, Homo sapiens
taggccatcccagcc

SEQ ID NO: 807765 - DNA, 15 bp, Homo sapiens
aggccatcccagcct

SEQ ID NO: 807766 - DNA, 15 bp, Homo sapiens
ggccatcccagcctg

SEQ ID NO: 807767 - DNA, 15 bp, Homo sapiens
gccatcccagcctgg

SEQ ID NO: 807768 - DNA, 15 bp, Homo sapiens
ccatcccagcctggg

SEQ ID NO: 807769 - DNA, 15 bp, Homo sapiens
catcccagcctggga

SEQ ID NO: 807770 - DNA, 15 bp, Homo sapiens
atcccagcctgggat

SEQ ID NO: 807771 - DNA, 15 bp, Homo sapiens
tcccagcctgggatt

SEQ ID NO: 807772 - DNA, 15 bp, Homo sapiens
cccagcctgggatta

SEQ ID NO: 807773 - DNA, 15 bp, Homo sapiens
ccagcctgggattac

SEQ ID NO: 807774 - DNA, 15 bp, Homo sapiens
cagcctgggattact

SEQ ID NO: 807775 - DNA, 15 bp, Homo sapiens
agcctgggattactt

SEQ ID NO: 807776 - DNA, 15 bp, Homo sapiens
gcctgggattactta

SEQ ID NO: 807777 - DNA, 15 bp, Homo sapiens
cctgggattacttat

SEQ ID NO: 807778 - DNA, 15 bp, Homo sapiens
ctgggattacttatt

SEQ ID NO: 807779 - DNA, 15 bp, Homo sapiens
tgggattacttattt

SEQ ID NO: 807780 - DNA, 15 bp, Homo sapiens
gggattacttatttg

SEQ ID NO: 807781 - DNA, 15 bp, Homo sapiens
ggattacttatttgt

SEQ ID NO: 807782 - DNA, 15 bp, Homo sapiens
gattacttatttgta

SEQ ID NO: 807783 - DNA, 15 bp, Homo sapiens
attacttatttgtac

SEQ ID NO: 807784 - DNA, 15 bp, Homo sapiens
ttacttatttgtact

SEQ ID NO: 807785 - DNA, 15 bp, Homo sapiens
tacttatttgtacta

SEQ ID NO: 807786 - DNA, 15 bp, Homo sapiens
acttatttgtactaa

SEQ ID NO: 807787 - DNA, 15 bp, Homo sapiens
cttatttgtactaat

SEQ ID NO: 807788 - DNA, 15 bp, Homo sapiens
ttatttgtactaata

SEQ ID NO: 807789 - DNA, 15 bp, Homo sapiens
tatttgtactaataa

SEQ ID NO: 807790 - DNA, 15 bp, Homo sapiens
atttgtactaataaa

SEQ ID NO: 807791 - DNA, 15 bp, Homo sapiens
tttgtactaataaat

SEQ ID NO: 807792 - DNA, 15 bp, Homo sapiens
ttgtactaataaatc

SEQ ID NO: 807793 - DNA, 15 bp, Homo sapiens
tgtactaataaatct

SEQ ID NO: 807794 - DNA, 15 bp, Homo sapiens
gtactaataaatctg

SEQ ID NO: 807795 - DNA, 15 bp, Homo sapiens
tactaataaatctga

SEQ ID NO: 807796 - DNA, 15 bp, Homo sapiens
actaataaatctgac

SEQ ID NO: 807797 - DNA, 15 bp, Homo sapiens
ctaataaatctgacc

SEQ ID NO: 807798 - DNA, 15 bp, Homo sapiens
taataaatctgacca

SEQ ID NO: 807799 - DNA, 15 bp, Homo sapiens
aataaatctgaccag

SEQ ID NO: 807800 - DNA, 15 bp, Homo sapiens
ataaatctgaccaga

SEQ ID NO: 807801 - DNA, 15 bp, Homo sapiens
taaatctgaccagag

SEQ ID NO: 807802 - DNA, 15 bp, Homo sapiens
aaatctgaccagagt

SEQ ID NO: 807803 - DNA, 15 bp, Homo sapiens
aatctgaccagagtt

SEQ ID NO: 807804 - DNA, 15 bp, Homo sapiens
atctgaccagagtta

SEQ ID NO: 807805 - DNA, 15 bp, Homo sapiens
tctgaccagagttaa

SEQ ID NO: 807806 - DNA, 15 bp, Homo sapiens
ctgaccagagttaat

SEQ ID NO: 807807 - DNA, 15 bp, Homo sapiens
tgaccagagttaatt

SEQ ID NO: 807808 - DNA, 15 bp, Homo sapiens
gaccagagttaattg

SEQ ID NO: 807809 - DNA, 15 bp, Homo sapiens
accagagttaattga

SEQ ID NO: 807810 - DNA, 15 bp, Homo sapiens
ccagagttaattgag

SEQ ID NO: 807811 - DNA, 15 bp, Homo sapiens
cagagttaattgagg

SEQ ID NO: 807812 - DNA, 15 bp, Homo sapiens
agagttaattgaggg

SEQ ID NO: 807813 - DNA, 15 bp, Homo sapiens
gagttaattgagggt

SEQ ID NO: 807814 - DNA, 15 bp, Homo sapiens
agttaattgagggtt

SEQ ID NO: 807815 - DNA, 15 bp, Homo sapiens
gttaattgagggttt

SEQ ID NO: 807816 - DNA, 15 bp, Homo sapiens
ttaattgagggttta

SEQ ID NO: 807817 - DNA, 15 bp, Homo sapiens
taattgagggtttaa

SEQ ID NO: 807818 - DNA, 15 bp, Homo sapiens
aattgagggtttaaa

SEQ ID NO: 807819 - DNA, 15 bp, Homo sapiens
attgagggtttaaag

SEQ ID NO: 807820 - DNA, 15 bp, Homo sapiens
ttgagggtttaaagc

SEQ ID NO: 807821 - DNA, 15 bp, Homo sapiens
tgagggtttaaagca

SEQ ID NO: 807822 - DNA, 15 bp, Homo sapiens
gagggtttaaagcaa

SEQ ID NO: 807823 - DNA, 15 bp, Homo sapiens
agggtttaaagcaaa

SEQ ID NO: 807824 - DNA, 15 bp, Homo sapiens
gggtttaaagcaaaa

SEQ ID NO: 807825 - DNA, 15 bp, Homo sapiens
ggtttaaagcaaaac

SEQ ID NO: 807826 - DNA, 15 bp, Homo sapiens
gtttaaagcaaaaca

SEQ ID NO: 807827 - DNA, 15 bp, Homo sapiens
tttaaagcaaaacag

SEQ ID NO: 807828 - DNA, 15 bp, Homo sapiens
ttaaagcaaaacagc

SEQ ID NO: 807829 - DNA, 15 bp, Homo sapiens
taaagcaaaacagca

SEQ ID NO: 807830 - DNA, 15 bp, Homo sapiens
aaagcaaaacagcat

SEQ ID NO: 807831 - DNA, 15 bp, Homo sapiens
aagcaaaacagcata

SEQ ID NO: 807832 - DNA, 15 bp, Homo sapiens
agcaaaacagcatat

SEQ ID NO: 807833 - DNA, 15 bp, Homo sapiens
gcaaaacagcatatc

SEQ ID NO: 807834 - DNA, 15 bp, Homo sapiens
caaaacagcatatct

SEQ ID NO: 807835 - DNA, 15 bp, Homo sapiens
aaaacagcatatctg

SEQ ID NO: 807836 - DNA, 15 bp, Homo sapiens
aaacagcatatctgt

SEQ ID NO: 807837 - DNA, 15 bp, Homo sapiens
aacagcatatctgtc

SEQ ID NO: 807838 - DNA, 15 bp, Homo sapiens
acagcatatctgtct

SEQ ID NO: 807839 - DNA, 15 bp, Homo sapiens
cagcatatctgtcta

SEQ ID NO: 807840 - DNA, 15 bp, Homo sapiens
agcatatctgtctac

SEQ ID NO: 807841 - DNA, 15 bp, Homo sapiens
gcatatctgtctact

SEQ ID NO: 807842 - DNA, 15 bp, Homo sapiens
catatctgtctactt

SEQ ID NO: 807843 - DNA, 15 bp, Homo sapiens
atatctgtctacttt

SEQ ID NO: 807844 - DNA, 15 bp, Homo sapiens
tatctgtctactttg

SEQ ID NO: 807845 - DNA, 15 bp, Homo sapiens
atctgtctactttgc

SEQ ID NO: 807846 - DNA, 15 bp, Homo sapiens
tctgtctactttgct

SEQ ID NO: 807847 - DNA, 15 bp, Homo sapiens
ctgtctactttgctc

SEQ ID NO: 807848 - DNA, 15 bp, Homo sapiens
tgtctactttgctca

SEQ ID NO: 807849 - DNA, 15 bp, Homo sapiens
gtctactttgctcaa

SEQ ID NO: 807850 - DNA, 15 bp, Homo sapiens
tctactttgctcaaa

SEQ ID NO: 807851 - DNA, 15 bp, Homo sapiens
ctactttgctcaaat

SEQ ID NO: 807852 - DNA, 15 bp, Homo sapiens
tactttgctcaaata

SEQ ID NO: 807853 - DNA, 15 bp, Homo sapiens
actttgctcaaatat

SEQ ID NO: 807854 - DNA, 15 bp, Homo sapiens
ctttgctcaaatatt

SEQ ID NO: 807855 - DNA, 15 bp, Homo sapiens
tttgctcaaatattt

SEQ ID NO: 807856 - DNA, 15 bp, Homo sapiens
ttgctcaaatatttt

SEQ ID NO: 807857 - DNA, 15 bp, Homo sapiens
tgctcaaatatttta

SEQ ID NO: 807858 - DNA, 15 bp, Homo sapiens
gctcaaatattttac

SEQ ID NO: 807859 - DNA, 15 bp, Homo sapiens
ctcaaatattttaca

SEQ ID NO: 807860 - DNA, 15 bp, Homo sapiens
tcaaatattttacaa

SEQ ID NO: 807861 - DNA, 15 bp, Homo sapiens
caaatattttacaaa

SEQ ID NO: 807862 - DNA, 15 bp, Homo sapiens
aaatattttacaaat

SEQ ID NO: 807863 - DNA, 15 bp, Homo sapiens
aatattttacaaata

SEQ ID NO: 807864 - DNA, 15 bp, Homo sapiens
atattttacaaatac

SEQ ID NO: 807865 - DNA, 15 bp, Homo sapiens
tattttacaaataca

SEQ ID NO: 807866 - DNA, 15 bp, Homo sapiens
attttacaaatacaa

SEQ ID NO: 807867 - DNA, 15 bp, Homo sapiens
ttttacaaatacaac

SEQ ID NO: 807868 - DNA, 15 bp, Homo sapiens
tttacaaatacaaca

SEQ ID NO: 807869 - DNA, 15 bp, Homo sapiens
ttacaaatacaacag

SEQ ID NO: 807870 - DNA, 15 bp, Homo sapiens
tacaaatacaacaga

SEQ ID NO: 807871 - DNA, 15 bp, Homo sapiens
acaaatacaacagat

SEQ ID NO: 807872 - DNA, 15 bp, Homo sapiens
caaatacaacagatt

SEQ ID NO: 807873 - DNA, 15 bp, Homo sapiens
aaatacaacagatta

SEQ ID NO: 807874 - DNA, 15 bp, Homo sapiens
aatacaacagattat

SEQ ID NO: 807875 - DNA, 15 bp, Homo sapiens
atacaacagattatg

SEQ ID NO: 807876 - DNA, 15 bp, Homo sapiens
tacaacagattatga

SEQ ID NO: 807877 - DNA, 15 bp, Homo sapiens
acaacagattatgag

SEQ ID NO: 807878 - DNA, 15 bp, Homo sapiens
caacagattatgaga

SEQ ID NO: 807879 - DNA, 15 bp, Homo sapiens
aacagattatgagag

SEQ ID NO: 807880 - DNA, 15 bp, Homo sapiens
acagattatgagagt

SEQ ID NO: 807881 - DNA, 15 bp, Homo sapiens
cagattatgagagtg

SEQ ID NO: 807882 - DNA, 15 bp, Homo sapiens
agattatgagagtgg

SEQ ID NO: 807883 - DNA, 15 bp, Homo sapiens
gattatgagagtggg

SEQ ID NO: 807884 - DNA, 15 bp, Homo sapiens
attatgagagtgggt

SEQ ID NO: 807885 - DNA, 15 bp, Homo sapiens
ttatgagagtgggta

SEQ ID NO: 807886 - DNA, 15 bp, Homo sapiens
tatgagagtgggtaa

SEQ ID NO: 807887 - DNA, 15 bp, Homo sapiens
atgagagtgggtaat

SEQ ID NO: 807888 - DNA, 15 bp, Homo sapiens
tgagagtgggtaata

SEQ ID NO: 807889 - DNA, 15 bp, Homo sapiens
gagagtgggtaataa

SEQ ID NO: 807890 - DNA, 15 bp, Homo sapiens
agagtgggtaataat

SEQ ID NO: 807891 - DNA, 15 bp, Homo sapiens
gagtgggtaataata

SEQ ID NO: 807892 - DNA, 15 bp, Homo sapiens
agtgggtaataatat

SEQ ID NO: 807893 - DNA, 15 bp, Homo sapiens
gtgggtaataatatc

SEQ ID NO: 807894 - DNA, 15 bp, Homo sapiens
tgggtaataatatct

SEQ ID NO: 807895 - DNA, 15 bp, Homo sapiens
gggtaataatatctg

SEQ ID NO: 807896 - DNA, 15 bp, Homo sapiens
ggtaataatatctgg

SEQ ID NO: 807897 - DNA, 15 bp, Homo sapiens
gtaataatatctgga

SEQ ID NO: 807898 - DNA, 15 bp, Homo sapiens
taataatatctggaa

SEQ ID NO: 807899 - DNA, 15 bp, Homo sapiens
aataatatctggaat

SEQ ID NO: 807900 - DNA, 15 bp, Homo sapiens
ataatatctggaata

SEQ ID NO: 807901 - DNA, 15 bp, Homo sapiens
taatatctggaataa

SEQ ID NO: 807902 - DNA, 15 bp, Homo sapiens
aatatctggaataat

SEQ ID NO: 807903 - DNA, 15 bp, Homo sapiens
atatctggaataatt

SEQ ID NO: 807904 - DNA, 15 bp, Homo sapiens
tatctggaataattg

SEQ ID NO: 807905 - DNA, 15 bp, Homo sapiens
atctggaataattgt

SEQ ID NO: 807906 - DNA, 15 bp, Homo sapiens
tctggaataattgtt

SEQ ID NO: 807907 - DNA, 15 bp, Homo sapiens
ctggaataattgttt

SEQ ID NO: 807908 - DNA, 15 bp, Homo sapiens
tggaataattgtttt

SEQ ID NO: 807909 - DNA, 15 bp, Homo sapiens
ggaataattgttttt

SEQ ID NO: 807910 - DNA, 15 bp, Homo sapiens
gaataattgtttttt

SEQ ID NO: 807911 - DNA, 15 bp, Homo sapiens
aataattgttttttt

SEQ ID NO: 807912 - DNA, 15 bp, Homo sapiens
ataattgtttttttg

SEQ ID NO: 807913 - DNA, 15 bp, Homo sapiens
taattgtttttttgt

SEQ ID NO: 807914 - DNA, 15 bp, Homo sapiens
aattgtttttttgtt

SEQ ID NO: 807915 - DNA, 15 bp, Homo sapiens
attgtttttttgttt

SEQ ID NO: 807916 - DNA, 15 bp, Homo sapiens
ttgtttttttgtttt

SEQ ID NO: 807917 - DNA, 15 bp, Homo sapiens
tgtttttttgttttg

SEQ ID NO: 807918 - DNA, 15 bp, Homo sapiens
gtttttttgttttgt

SEQ ID NO: 807919 - DNA, 15 bp, Homo sapiens
tttttttgttttgtg

SEQ ID NO: 807920 - DNA, 15 bp, Homo sapiens
ttttttgttttgtgg

SEQ ID NO: 807921 - DNA, 15 bp, Homo sapiens
tttttgttttgtggt

SEQ ID NO: 807922 - DNA, 15 bp, Homo sapiens
ttttgttttgtggtt

SEQ ID NO: 807923 - DNA, 15 bp, Homo sapiens
tttgttttgtggttt

SEQ ID NO: 807924 - DNA, 15 bp, Homo sapiens
ttgttttgtggtttt

SEQ ID NO: 807925 - DNA, 15 bp, Homo sapiens
tgttttgtggttttt

SEQ ID NO: 807926 - DNA, 15 bp, Homo sapiens
gttttgtggtttttt

SEQ ID NO: 807927 - DNA, 15 bp, Homo sapiens
ttttgtggttttttt

SEQ ID NO: 807928 - DNA, 15 bp, Homo sapiens
tttgtggtttttttt

SEQ ID NO: 807929 - DNA, 15 bp, Homo sapiens
ttgtggttttttttt

SEQ ID NO: 807930 - DNA, 15 bp, Homo sapiens
tgtggtttttttttt

SEQ ID NO: 807931 - DNA, 15 bp, Homo sapiens
gtggttttttttttt

SEQ ID NO: 807932 - DNA, 15 bp, Homo sapiens
ttgagatggagtctg

SEQ ID NO: 807933 - DNA, 15 bp, Homo sapiens
tgagatggagtctgg

SEQ ID NO: 807934 - DNA, 15 bp, Homo sapiens
gagatggagtctggc

SEQ ID NO: 807935 - DNA, 15 bp, Homo sapiens
agatggagtctggct

SEQ ID NO: 807936 - DNA, 15 bp, Homo sapiens
gatggagtctggctg

SEQ ID NO: 807937 - DNA, 15 bp, Homo sapiens
atggagtctggctgt

SEQ ID NO: 807938 - DNA, 15 bp, Homo sapiens
tggagtctggctgta

SEQ ID NO: 807939 - DNA, 15 bp, Homo sapiens
ggagtctggctgtag

SEQ ID NO: 807940 - DNA, 15 bp, Homo sapiens
gagtctggctgtagc

SEQ ID NO: 807941 - DNA, 15 bp, Homo sapiens
agtctggctgtagcc

SEQ ID NO: 807942 - DNA, 15 bp, Homo sapiens
gtctggctgtagccc

SEQ ID NO: 807943 - DNA, 15 bp, Homo sapiens
tctggctgtagccca

SEQ ID NO: 807944 - DNA, 15 bp, Homo sapiens
ctggctgtagcccag

SEQ ID NO: 807945 - DNA, 15 bp, Homo sapiens
tggctgtagcccagg

SEQ ID NO: 807946 - DNA, 15 bp, Homo sapiens
ggctgtagcccaggc

SEQ ID NO: 807947 - DNA, 15 bp, Homo sapiens
gctgtagcccaggct

SEQ ID NO: 807948 - DNA, 15 bp, Homo sapiens
ctgtagcccaggctg

SEQ ID NO: 807949 - DNA, 15 bp, Homo sapiens
tgtagcccaggctgg

SEQ ID NO: 807950 - DNA, 15 bp, Homo sapiens
gtagcccaggctgga

SEQ ID NO: 807951 - DNA, 15 bp, Homo sapiens
tagcccaggctggag

SEQ ID NO: 807952 - DNA, 15 bp, Homo sapiens
agcccaggctggagt

SEQ ID NO: 807953 - DNA, 15 bp, Homo sapiens
tggagtgcagtggta

SEQ ID NO: 807954 - DNA, 15 bp, Homo sapiens
ggagtgcagtggtac

SEQ ID NO: 807955 - DNA, 15 bp, Homo sapiens
gagtgcagtggtaca

SEQ ID NO: 807956 - DNA, 15 bp, Homo sapiens
agtgcagtggtacag

SEQ ID NO: 807957 - DNA, 15 bp, Homo sapiens
gtgcagtggtacagt

SEQ ID NO: 807958 - DNA, 15 bp, Homo sapiens
tgcagtggtacagtc

SEQ ID NO: 807959 - DNA, 15 bp, Homo sapiens
gcagtggtacagtct

SEQ ID NO: 807960 - DNA, 15 bp, Homo sapiens
cagtggtacagtctc

SEQ ID NO: 807961 - DNA, 15 bp, Homo sapiens
agtggtacagtctcg

SEQ ID NO: 807962 - DNA, 15 bp, Homo sapiens
gtggtacagtctcgg

SEQ ID NO: 807963 - DNA, 15 bp, Homo sapiens
tggtacagtctcggc

SEQ ID NO: 807964 - DNA, 15 bp, Homo sapiens
ggtacagtctcggct

SEQ ID NO: 807965 - DNA, 15 bp, Homo sapiens
gtacagtctcggctc

SEQ ID NO: 807966 - DNA, 15 bp, Homo sapiens
tacagtctcggctca

SEQ ID NO: 807967 - DNA, 15 bp, Homo sapiens
acagtctcggctcac

SEQ ID NO: 807968 - DNA, 15 bp, Homo sapiens
cagtctcggctcact

SEQ ID NO: 807969 - DNA, 15 bp, Homo sapiens
agtctcggctcactg

SEQ ID NO: 807970 - DNA, 15 bp, Homo sapiens
gtctcggctcactgc

SEQ ID NO: 807971 - DNA, 15 bp, Homo sapiens
ctcggctcactgcac

SEQ ID NO: 807972 - DNA, 15 bp, Homo sapiens
tcggctcactgcacc

SEQ ID NO: 807973 - DNA, 15 bp, Homo sapiens
cggctcactgcacct

SEQ ID NO: 807974 - DNA, 15 bp, Homo sapiens
ggctcactgcacctc

SEQ ID NO: 807975 - DNA, 15 bp, Homo sapiens
gctcactgcacctct

SEQ ID NO: 807976 - DNA, 15 bp, Homo sapiens
ctcactgcacctctg

SEQ ID NO: 807977 - DNA, 15 bp, Homo sapiens
tcactgcacctctgc

SEQ ID NO: 807978 - DNA, 15 bp, Homo sapiens
cactgcacctctgcc

SEQ ID NO: 807979 - DNA, 15 bp, Homo sapiens
actgcacctctgcct

SEQ ID NO: 807980 - DNA, 15 bp, Homo sapiens
ctgcacctctgcctc

SEQ ID NO: 807981 - DNA, 15 bp, Homo sapiens
tgcacctctgcctct

SEQ ID NO: 807982 - DNA, 15 bp, Homo sapiens
gcacctctgcctctt

SEQ ID NO: 807983 - DNA, 15 bp, Homo sapiens
cacctctgcctcttg

SEQ ID NO: 807984 - DNA, 15 bp, Homo sapiens
acctctgcctcttgg

SEQ ID NO: 807985 - DNA, 15 bp, Homo sapiens
cctctgcctcttgga

SEQ ID NO: 807986 - DNA, 15 bp, Homo sapiens
ctctgcctcttggat

SEQ ID NO: 807987 - DNA, 15 bp, Homo sapiens
tctgcctcttggatt

SEQ ID NO: 807988 - DNA, 15 bp, Homo sapiens
ctgcctcttggattc

SEQ ID NO: 807989 - DNA, 15 bp, Homo sapiens
tgcctcttggattca

SEQ ID NO: 807990 - DNA, 15 bp, Homo sapiens
gcctcttggattcaa

SEQ ID NO: 807991 - DNA, 15 bp, Homo sapiens
cctcttggattcaag

SEQ ID NO: 807992 - DNA, 15 bp, Homo sapiens
ctcttggattcaagc

SEQ ID NO: 807993 - DNA, 15 bp, Homo sapiens
tcttggattcaagcg

SEQ ID NO: 807994 - DNA, 15 bp, Homo sapiens
cttggattcaagcga

SEQ ID NO: 807995 - DNA, 15 bp, Homo sapiens
ttggattcaagcgat

SEQ ID NO: 807996 - DNA, 15 bp, Homo sapiens
tggattcaagcgatt

SEQ ID NO: 807997 - DNA, 15 bp, Homo sapiens
ggattcaagcgattc

SEQ ID NO: 807998 - DNA, 15 bp, Homo sapiens
gattcaagcgattct

SEQ ID NO: 807999 - DNA, 15 bp, Homo sapiens
attcaagcgattctc

SEQ ID NO: 808000 - DNA, 15 bp, Homo sapiens
tcaagcgattctccc

SEQ ID NO: 808001 - DNA, 15 bp, Homo sapiens
caagcgattctcccg

SEQ ID NO: 808002 - DNA, 15 bp, Homo sapiens
aagcgattctcccgc

SEQ ID NO: 808003 - DNA, 15 bp, Homo sapiens
agcgattctcccgcc

SEQ ID NO: 808004 - DNA, 15 bp, Homo sapiens
gcgattctcccgcct

SEQ ID NO: 808005 - DNA, 15 bp, Homo sapiens
cgattctcccgcctc

SEQ ID NO: 808006 - DNA, 15 bp, Homo sapiens
gattctcccgcctca

SEQ ID NO: 808007 - DNA, 15 bp, Homo sapiens
attctcccgcctcag

SEQ ID NO: 808008 - DNA, 15 bp, Homo sapiens
ttctcccgcctcagc

SEQ ID NO: 808009 - DNA, 15 bp, Homo sapiens
tctcccgcctcagcc

SEQ ID NO: 808010 - DNA, 15 bp, Homo sapiens
ctcccgcctcagcct

SEQ ID NO: 808011 - DNA, 15 bp, Homo sapiens
tcccgcctcagcctc

SEQ ID NO: 808012 - DNA, 15 bp, Homo sapiens
ccgcctcagcctccc

SEQ ID NO: 808013 - DNA, 15 bp, Homo sapiens
cgcctcagcctcccg

SEQ ID NO: 808014 - DNA, 15 bp, Homo sapiens
ggtgcccaccaccac

SEQ ID NO: 808015 - DNA, 15 bp, Homo sapiens
gtgcccaccaccaca

SEQ ID NO: 808016 - DNA, 15 bp, Homo sapiens
tgcccaccaccacac

SEQ ID NO: 808017 - DNA, 15 bp, Homo sapiens
gcccaccaccacacc

SEQ ID NO: 808018 - DNA, 15 bp, Homo sapiens
cccaccaccacacct

SEQ ID NO: 808019 - DNA, 15 bp, Homo sapiens
ccaccaccacacctg

SEQ ID NO: 808020 - DNA, 15 bp, Homo sapiens
caccaccacacctgg

SEQ ID NO: 808021 - DNA, 15 bp, Homo sapiens
ccaccacacctggct

SEQ ID NO: 808022 - DNA, 15 bp, Homo sapiens
caccacacctggcta

SEQ ID NO: 808023 - DNA, 15 bp, Homo sapiens
accacacctggctaa

SEQ ID NO: 808024 - DNA, 15 bp, Homo sapiens
ctggctaatttttta

SEQ ID NO: 808025 - DNA, 15 bp, Homo sapiens
tggctaattttttat

SEQ ID NO: 808026 - DNA, 15 bp, Homo sapiens
ggctaattttttatt

SEQ ID NO: 808027 - DNA, 15 bp, Homo sapiens
gctaattttttattt

SEQ ID NO: 808028 - DNA, 15 bp, Homo sapiens
ctaattttttatttt

SEQ ID NO: 808029 - DNA, 15 bp, Homo sapiens
taattttttattttt

SEQ ID NO: 808030 - DNA, 15 bp, Homo sapiens
aattttttattttta

SEQ ID NO: 808031 - DNA, 15 bp, Homo sapiens
attttttatttttag

SEQ ID NO: 808032 - DNA, 15 bp, Homo sapiens
ttttttatttttagt

SEQ ID NO: 808033 - DNA, 15 bp, Homo sapiens
tttttatttttagta

SEQ ID NO: 808034 - DNA, 15 bp, Homo sapiens
ttttatttttagtag

SEQ ID NO: 808035 - DNA, 15 bp, Homo sapiens
tttatttttagtaga

SEQ ID NO: 808036 - DNA, 15 bp, Homo sapiens
ttatttttagtagag

SEQ ID NO: 808037 - DNA, 15 bp, Homo sapiens
tttagtagagacagc

SEQ ID NO: 808038 - DNA, 15 bp, Homo sapiens
ttagtagagacagcg

SEQ ID NO: 808039 - DNA, 15 bp, Homo sapiens
tagtagagacagcgt

SEQ ID NO: 808040 - DNA, 15 bp, Homo sapiens
agtagagacagcgtt

SEQ ID NO: 808041 - DNA, 15 bp, Homo sapiens
gtagagacagcgttt

SEQ ID NO: 808042 - DNA, 15 bp, Homo sapiens
tagagacagcgtttc

SEQ ID NO: 808043 - DNA, 15 bp, Homo sapiens
agagacagcgtttca

SEQ ID NO: 808044 - DNA, 15 bp, Homo sapiens
gagacagcgtttcac

SEQ ID NO: 808045 - DNA, 15 bp, Homo sapiens
agacagcgtttcacc

SEQ ID NO: 808046 - DNA, 15 bp, Homo sapiens
gacagcgtttcacca

SEQ ID NO: 808047 - DNA, 15 bp, Homo sapiens
acagcgtttcaccat

SEQ ID NO: 808048 - DNA, 15 bp, Homo sapiens
cagcgtttcaccatg

SEQ ID NO: 808049 - DNA, 15 bp, Homo sapiens
agcgtttcaccatgt

SEQ ID NO: 808050 - DNA, 15 bp, Homo sapiens
gcgtttcaccatgtt

SEQ ID NO: 808051 - DNA, 15 bp, Homo sapiens
cgtttcaccatgttg

SEQ ID NO: 808052 - DNA, 15 bp, Homo sapiens
ccatgttggccaggt

SEQ ID NO: 808053 - DNA, 15 bp, Homo sapiens
catgttggccaggtt

SEQ ID NO: 808054 - DNA, 15 bp, Homo sapiens
atgttggccaggttg

SEQ ID NO: 808055 - DNA, 15 bp, Homo sapiens
tgttggccaggttgg

SEQ ID NO: 808056 - DNA, 15 bp, Homo sapiens
gttggccaggttggt

SEQ ID NO: 808057 - DNA, 15 bp, Homo sapiens
ttggccaggttggtc

SEQ ID NO: 808058 - DNA, 15 bp, Homo sapiens
tggccaggttggtct

SEQ ID NO: 808059 - DNA, 15 bp, Homo sapiens
ggccaggttggtctg

SEQ ID NO: 808060 - DNA, 15 bp, Homo sapiens
gccaggttggtctgg

SEQ ID NO: 808061 - DNA, 15 bp, Homo sapiens
ccaggttggtctgga

SEQ ID NO: 808062 - DNA, 15 bp, Homo sapiens
caggttggtctggaa

SEQ ID NO: 808063 - DNA, 15 bp, Homo sapiens
aggttggtctggaac

SEQ ID NO: 808064 - DNA, 15 bp, Homo sapiens
ggttggtctggaact

SEQ ID NO: 808065 - DNA, 15 bp, Homo sapiens
gttggtctggaactc

SEQ ID NO: 808066 - DNA, 15 bp, Homo sapiens
ttggtctggaactcc

SEQ ID NO: 808067 - DNA, 15 bp, Homo sapiens
tggtctggaactcct

SEQ ID NO: 808068 - DNA, 15 bp, Homo sapiens
ggtctggaactcctg

SEQ ID NO: 808069 - DNA, 15 bp, Homo sapiens
gtctggaactcctga

SEQ ID NO: 808070 - DNA, 15 bp, Homo sapiens
tctggaactcctgac

SEQ ID NO: 808071 - DNA, 15 bp, Homo sapiens
ctggaactcctgacc

SEQ ID NO: 808072 - DNA, 15 bp, Homo sapiens
tggaactcctgacct

SEQ ID NO: 808073 - DNA, 15 bp, Homo sapiens
ggaactcctgacctc

SEQ ID NO: 808074 - DNA, 15 bp, Homo sapiens
acctcaggtgatccg

SEQ ID NO: 808075 - DNA, 15 bp, Homo sapiens
cctcaggtgatccgc

SEQ ID NO: 808076 - DNA, 15 bp, Homo sapiens
accatgcctggcctg

SEQ ID NO: 808077 - DNA, 15 bp, Homo sapiens
ccatgcctggcctgg

SEQ ID NO: 808078 - DNA, 15 bp, Homo sapiens
catgcctggcctgga

SEQ ID NO: 808079 - DNA, 15 bp, Homo sapiens
atgcctggcctggaa

SEQ ID NO: 808080 - DNA, 15 bp, Homo sapiens
tgcctggcctggaat

SEQ ID NO: 808081 - DNA, 15 bp, Homo sapiens
gcctggcctggaata

SEQ ID NO: 808082 - DNA, 15 bp, Homo sapiens
cctggcctggaataa

SEQ ID NO: 808083 - DNA, 15 bp, Homo sapiens
ctggcctggaataat

SEQ ID NO: 808084 - DNA, 15 bp, Homo sapiens
tggcctggaataatt

SEQ ID NO: 808085 - DNA, 15 bp, Homo sapiens
ggcctggaataattg

SEQ ID NO: 808086 - DNA, 15 bp, Homo sapiens
gcctggaataattgt

SEQ ID NO: 808087 - DNA, 15 bp, Homo sapiens
cctggaataattgtt

SEQ ID NO: 808088 - DNA, 15 bp, Homo sapiens
ctggaataattgtta

SEQ ID NO: 808089 - DNA, 15 bp, Homo sapiens
tggaataattgttaa

SEQ ID NO: 808090 - DNA, 15 bp, Homo sapiens
ggaataattgttaat

SEQ ID NO: 808091 - DNA, 15 bp, Homo sapiens
gaataattgttaata

SEQ ID NO: 808092 - DNA, 15 bp, Homo sapiens
aataattgttaataa

SEQ ID NO: 808093 - DNA, 15 bp, Homo sapiens
ataattgttaataat

SEQ ID NO: 808094 - DNA, 15 bp, Homo sapiens
taattgttaataatt

SEQ ID NO: 808095 - DNA, 15 bp, Homo sapiens
aattgttaataatta

SEQ ID NO: 808096 - DNA, 15 bp, Homo sapiens
attgttaataattat

SEQ ID NO: 808097 - DNA, 15 bp, Homo sapiens
ttgttaataattatt

SEQ ID NO: 808098 - DNA, 15 bp, Homo sapiens
tgttaataattatta

SEQ ID NO: 808099 - DNA, 15 bp, Homo sapiens
gttaataattattac

SEQ ID NO: 808100 - DNA, 15 bp, Homo sapiens
ttaataattattaca

SEQ ID NO: 808101 - DNA, 15 bp, Homo sapiens
taataattattacat

SEQ ID NO: 808102 - DNA, 15 bp, Homo sapiens
aataattattacatt

SEQ ID NO: 808103 - DNA, 15 bp, Homo sapiens
ataattattacattg

SEQ ID NO: 808104 - DNA, 15 bp, Homo sapiens
taattattacattga

SEQ ID NO: 808105 - DNA, 15 bp, Homo sapiens
aattattacattgat

SEQ ID NO: 808106 - DNA, 15 bp, Homo sapiens
attattacattgatg

SEQ ID NO: 808107 - DNA, 15 bp, Homo sapiens
ttattacattgatgg

SEQ ID NO: 808108 - DNA, 15 bp, Homo sapiens
tattacattgatggc

SEQ ID NO: 808109 - DNA, 15 bp, Homo sapiens
attacattgatggca

SEQ ID NO: 808110 - DNA, 15 bp, Homo sapiens
ttacattgatggcat

SEQ ID NO: 808111 - DNA, 15 bp, Homo sapiens
tacattgatggcatt

SEQ ID NO: 808112 - DNA, 15 bp, Homo sapiens
acattgatggcattt

SEQ ID NO: 808113 - DNA, 15 bp, Homo sapiens
cattgatggcatttt

SEQ ID NO: 808114 - DNA, 15 bp, Homo sapiens
attgatggcatttta

SEQ ID NO: 808115 - DNA, 15 bp, Homo sapiens
ttgatggcattttat

SEQ ID NO: 808116 - DNA, 15 bp, Homo sapiens
tgatggcattttatt

SEQ ID NO: 808117 - DNA, 15 bp, Homo sapiens
gatggcattttattg

SEQ ID NO: 808118 - DNA, 15 bp, Homo sapiens
atggcattttattgc

SEQ ID NO: 808119 - DNA, 15 bp, Homo sapiens
tggcattttattgct

SEQ ID NO: 808120 - DNA, 15 bp, Homo sapiens
ggcattttattgctg

SEQ ID NO: 808121 - DNA, 15 bp, Homo sapiens
gcattttattgctga

SEQ ID NO: 808122 - DNA, 15 bp, Homo sapiens
cattttattgctgag

SEQ ID NO: 808123 - DNA, 15 bp, Homo sapiens
attttattgctgagc

SEQ ID NO: 808124 - DNA, 15 bp, Homo sapiens
ttttattgctgagca

SEQ ID NO: 808125 - DNA, 15 bp, Homo sapiens
tttattgctgagcaa

SEQ ID NO: 808126 - DNA, 15 bp, Homo sapiens
ttattgctgagcaag

SEQ ID NO: 808127 - DNA, 15 bp, Homo sapiens
tattgctgagcaaga

SEQ ID NO: 808128 - DNA, 15 bp, Homo sapiens
attgctgagcaagaa

SEQ ID NO: 808129 - DNA, 15 bp, Homo sapiens
ttgctgagcaagaag

SEQ ID NO: 808130 - DNA, 15 bp, Homo sapiens
tgctgagcaagaaga

SEQ ID NO: 808131 - DNA, 15 bp, Homo sapiens
gctgagcaagaagaa

SEQ ID NO: 808132 - DNA, 15 bp, Homo sapiens
ctgagcaagaagaat

SEQ ID NO: 808133 - DNA, 15 bp, Homo sapiens
tgagcaagaagaatc

SEQ ID NO: 808134 - DNA, 15 bp, Homo sapiens
gagcaagaagaatct

SEQ ID NO: 808135 - DNA, 15 bp, Homo sapiens
agcaagaagaatcta

SEQ ID NO: 808136 - DNA, 15 bp, Homo sapiens
gcaagaagaatctaa

SEQ ID NO: 808137 - DNA, 15 bp, Homo sapiens
caagaagaatctaac

SEQ ID NO: 808138 - DNA, 15 bp, Homo sapiens
aagaagaatctaaca

SEQ ID NO: 808139 - DNA, 15 bp, Homo sapiens
agaagaatctaacat

SEQ ID NO: 808140 - DNA, 15 bp, Homo sapiens
gaagaatctaacatg

SEQ ID NO: 808141 - DNA, 15 bp, Homo sapiens
aagaatctaacatga

SEQ ID NO: 808142 - DNA, 15 bp, Homo sapiens
agaatctaacatgat

SEQ ID NO: 808143 - DNA, 15 bp, Homo sapiens
gaatctaacatgatg

SEQ ID NO: 808144 - DNA, 15 bp, Homo sapiens
aatctaacatgatga

SEQ ID NO: 808145 - DNA, 15 bp, Homo sapiens
atctaacatgatgaa

SEQ ID NO: 808146 - DNA, 15 bp, Homo sapiens
tctaacatgatgaat

SEQ ID NO: 808147 - DNA, 15 bp, Homo sapiens
ctaacatgatgaatg

SEQ ID NO: 808148 - DNA, 15 bp, Homo sapiens
taacatgatgaatgg

SEQ ID NO: 808149 - DNA, 15 bp, Homo sapiens
aacatgatgaatggg

SEQ ID NO: 808150 - DNA, 15 bp, Homo sapiens
acatgatgaatgggt

SEQ ID NO: 808151 - DNA, 15 bp, Homo sapiens
catgatgaatgggtt

SEQ ID NO: 808152 - DNA, 15 bp, Homo sapiens
atgatgaatgggtta

SEQ ID NO: 808153 - DNA, 15 bp, Homo sapiens
tgatgaatgggttat

SEQ ID NO: 808154 - DNA, 15 bp, Homo sapiens
gatgaatgggttata

SEQ ID NO: 808155 - DNA, 15 bp, Homo sapiens
atgaatgggttatag

SEQ ID NO: 808156 - DNA, 15 bp, Homo sapiens
tgaatgggttatagc

SEQ ID NO: 808157 - DNA, 15 bp, Homo sapiens
gaatgggttatagca

SEQ ID NO: 808158 - DNA, 15 bp, Homo sapiens
aatgggttatagcat

SEQ ID NO: 808159 - DNA, 15 bp, Homo sapiens
atgggttatagcatc

SEQ ID NO: 808160 - DNA, 15 bp, Homo sapiens
tgggttatagcatca

SEQ ID NO: 808161 - DNA, 15 bp, Homo sapiens
gggttatagcatcag

SEQ ID NO: 808162 - DNA, 15 bp, Homo sapiens
ggttatagcatcagg

SEQ ID NO: 808163 - DNA, 15 bp, Homo sapiens
gttatagcatcaggt

SEQ ID NO: 808164 - DNA, 15 bp, Homo sapiens
ttatagcatcaggtt

SEQ ID NO: 808165 - DNA, 15 bp, Homo sapiens
tatagcatcaggttt

SEQ ID NO: 808166 - DNA, 15 bp, Homo sapiens
atagcatcaggtttg

SEQ ID NO: 808167 - DNA, 15 bp, Homo sapiens
tagcatcaggtttgc

SEQ ID NO: 808168 - DNA, 15 bp, Homo sapiens
agcatcaggtttgct

SEQ ID NO: 808169 - DNA, 15 bp, Homo sapiens
gcatcaggtttgctt

SEQ ID NO: 808170 - DNA, 15 bp, Homo sapiens
catcaggtttgcttt

SEQ ID NO: 808171 - DNA, 15 bp, Homo sapiens
atcaggtttgctttg

SEQ ID NO: 808172 - DNA, 15 bp, Homo sapiens
tcaggtttgctttgt

SEQ ID NO: 808173 - DNA, 15 bp, Homo sapiens
caggtttgctttgtt

SEQ ID NO: 808174 - DNA, 15 bp, Homo sapiens
aggtttgctttgttt

SEQ ID NO: 808175 - DNA, 15 bp, Homo sapiens
ggtttgctttgtttt

SEQ ID NO: 808176 - DNA, 15 bp, Homo sapiens
gtttgctttgttttt

SEQ ID NO: 808177 - DNA, 15 bp, Homo sapiens
tttgctttgtttttt

SEQ ID NO: 808178 - DNA, 15 bp, Homo sapiens
ttgctttgttttttt

SEQ ID NO: 808179 - DNA, 15 bp, Homo sapiens
tgctttgtttttttg

SEQ ID NO: 808180 - DNA, 15 bp, Homo sapiens
gctttgtttttttgt

SEQ ID NO: 808181 - DNA, 15 bp, Homo sapiens
ctttgtttttttgtt

SEQ ID NO: 808182 - DNA, 15 bp, Homo sapiens
tttgtttttttgttt

SEQ ID NO: 808183 - DNA, 15 bp, Homo sapiens
tgtttttttgttttt

SEQ ID NO: 808184 - DNA, 15 bp, Homo sapiens
gtttttttgtttttt

SEQ ID NO: 808185 - DNA, 15 bp, Homo sapiens
tttttttgttttttt

SEQ ID NO: 808186 - DNA, 15 bp, Homo sapiens
ttttttgtttttttc

SEQ ID NO: 808187 - DNA, 15 bp, Homo sapiens
tttttgtttttttcc

SEQ ID NO: 808188 - DNA, 15 bp, Homo sapiens
ttttgtttttttcct

SEQ ID NO: 808189 - DNA, 15 bp, Homo sapiens
tttgtttttttcctc

SEQ ID NO: 808190 - DNA, 15 bp, Homo sapiens
ttgtttttttcctct

SEQ ID NO: 808191 - DNA, 15 bp, Homo sapiens
tgtttttttcctctt

SEQ ID NO: 808192 - DNA, 15 bp, Homo sapiens
gtttttttcctcttt

SEQ ID NO: 808193 - DNA, 15 bp, Homo sapiens
tttttttcctctttc

SEQ ID NO: 808194 - DNA, 15 bp, Homo sapiens
ttttttcctctttct

SEQ ID NO: 808195 - DNA, 15 bp, Homo sapiens
tttttcctctttctt

SEQ ID NO: 808196 - DNA, 15 bp, Homo sapiens
ttttcctctttcttg

SEQ ID NO: 808197 - DNA, 15 bp, Homo sapiens
tttcctctttcttga

SEQ ID NO: 808198 - DNA, 15 bp, Homo sapiens
ttcctctttcttgat

SEQ ID NO: 808199 - DNA, 15 bp, Homo sapiens
tcctctttcttgatg

SEQ ID NO: 808200 - DNA, 15 bp, Homo sapiens
cctctttcttgatgg

SEQ ID NO: 808201 - DNA, 15 bp, Homo sapiens
ctctttcttgatggt

SEQ ID NO: 808202 - DNA, 15 bp, Homo sapiens
tctttcttgatggtg

SEQ ID NO: 808203 - DNA, 15 bp, Homo sapiens
ctttcttgatggtga

SEQ ID NO: 808204 - DNA, 15 bp, Homo sapiens
tttcttgatggtgat

SEQ ID NO: 808205 - DNA, 15 bp, Homo sapiens
ttcttgatggtgatt

SEQ ID NO: 808206 - DNA, 15 bp, Homo sapiens
tcttgatggtgattt

SEQ ID NO: 808207 - DNA, 15 bp, Homo sapiens
cttgatggtgatttc

SEQ ID NO: 808208 - DNA, 15 bp, Homo sapiens
ttgatggtgatttct

SEQ ID NO: 808209 - DNA, 15 bp, Homo sapiens
tgatggtgatttctg

SEQ ID NO: 808210 - DNA, 15 bp, Homo sapiens
gatggtgatttctgt

SEQ ID NO: 808211 - DNA, 15 bp, Homo sapiens
atggtgatttctgtg

SEQ ID NO: 808212 - DNA, 15 bp, Homo sapiens
tggtgatttctgtgt

SEQ ID NO: 808213 - DNA, 15 bp, Homo sapiens
ggtgatttctgtgtt

SEQ ID NO: 808214 - DNA, 15 bp, Homo sapiens
gtgatttctgtgttt

SEQ ID NO: 808215 - DNA, 15 bp, Homo sapiens
tgatttctgtgtttg

SEQ ID NO: 808216 - DNA, 15 bp, Homo sapiens
gatttctgtgtttgt

SEQ ID NO: 808217 - DNA, 15 bp, Homo sapiens
atttctgtgtttgtg

SEQ ID NO: 808218 - DNA, 15 bp, Homo sapiens
tttctgtgtttgtgt

SEQ ID NO: 808219 - DNA, 15 bp, Homo sapiens
ttctgtgtttgtgtg

SEQ ID NO: 808220 - DNA, 15 bp, Homo sapiens
tctgtgtttgtgtgt

SEQ ID NO: 808221 - DNA, 15 bp, Homo sapiens
ctgtgtttgtgtgta

SEQ ID NO: 808222 - DNA, 15 bp, Homo sapiens
tgtgtttgtgtgtat

SEQ ID NO: 808223 - DNA, 15 bp, Homo sapiens
gtgtttgtgtgtatg

SEQ ID NO: 808224 - DNA, 15 bp, Homo sapiens
tgtttgtgtgtatgc

SEQ ID NO: 808225 - DNA, 15 bp, Homo sapiens
gtttgtgtgtatgcg

SEQ ID NO: 808226 - DNA, 15 bp, Homo sapiens
tttgtgtgtatgcgt

SEQ ID NO: 808227 - DNA, 15 bp, Homo sapiens
ttgtgtgtatgcgtc

SEQ ID NO: 808228 - DNA, 15 bp, Homo sapiens
tgtgtgtatgcgtcg

SEQ ID NO: 808229 - DNA, 15 bp, Homo sapiens
gtgtgtatgcgtcgg

SEQ ID NO: 808230 - DNA, 15 bp, Homo sapiens
tgtgtatgcgtcggc

SEQ ID NO: 808231 - DNA, 15 bp, Homo sapiens
gtgtatgcgtcggct

SEQ ID NO: 808232 - DNA, 15 bp, Homo sapiens
tgtatgcgtcggctt

SEQ ID NO: 808233 - DNA, 15 bp, Homo sapiens
gtatgcgtcggcttc

SEQ ID NO: 808234 - DNA, 15 bp, Homo sapiens
tatgcgtcggcttca

SEQ ID NO: 808235 - DNA, 15 bp, Homo sapiens
atgcgtcggcttcag

SEQ ID NO: 808236 - DNA, 15 bp, Homo sapiens
tgcgtcggcttcaga

SEQ ID NO: 808237 - DNA, 15 bp, Homo sapiens
gcgtcggcttcagag

SEQ ID NO: 808238 - DNA, 15 bp, Homo sapiens
cgtcggcttcagagc

SEQ ID NO: 808239 - DNA, 15 bp, Homo sapiens
gtcggcttcagagcc

SEQ ID NO: 808240 - DNA, 15 bp, Homo sapiens
tcggcttcagagcca

SEQ ID NO: 808241 - DNA, 15 bp, Homo sapiens
cggcttcagagccat

SEQ ID NO: 808242 - DNA, 15 bp, Homo sapiens
ggcttcagagccatt

SEQ ID NO: 808243 - DNA, 15 bp, Homo sapiens
gcttcagagccattc

SEQ ID NO: 808244 - DNA, 15 bp, Homo sapiens
cttcagagccattct

SEQ ID NO: 808245 - DNA, 15 bp, Homo sapiens
ttcagagccattctt

SEQ ID NO: 808246 - DNA, 15 bp, Homo sapiens
tcagagccattcttt

SEQ ID NO: 808247 - DNA, 15 bp, Homo sapiens
cagagccattcttta

SEQ ID NO: 808248 - DNA, 15 bp, Homo sapiens
agagccattctttat

SEQ ID NO: 808249 - DNA, 15 bp, Homo sapiens
gagccattctttatc

SEQ ID NO: 808250 - DNA, 15 bp, Homo sapiens
agccattctttatca

SEQ ID NO: 808251 - DNA, 15 bp, Homo sapiens
gccattctttatcat

SEQ ID NO: 808252 - DNA, 15 bp, Homo sapiens
ccattctttatcatt

SEQ ID NO: 808253 - DNA, 15 bp, Homo sapiens
cattctttatcattc

SEQ ID NO: 808254 - DNA, 15 bp, Homo sapiens
attctttatcattct

SEQ ID NO: 808255 - DNA, 15 bp, Homo sapiens
ttctttatcattctt

SEQ ID NO: 808256 - DNA, 15 bp, Homo sapiens
tctttatcattcttc

SEQ ID NO: 808257 - DNA, 15 bp, Homo sapiens
ctttatcattcttcc

SEQ ID NO: 808258 - DNA, 15 bp, Homo sapiens
tttatcattcttcct

SEQ ID NO: 808259 - DNA, 15 bp, Homo sapiens
ttatcattcttcctt

SEQ ID NO: 808260 - DNA, 15 bp, Homo sapiens
tatcattcttccttt

SEQ ID NO: 808261 - DNA, 15 bp, Homo sapiens
atcattcttcctttt

SEQ ID NO: 808262 - DNA, 15 bp, Homo sapiens
tcattcttccttttc

SEQ ID NO: 808263 - DNA, 15 bp, Homo sapiens
cattcttccttttcc

SEQ ID NO: 808264 - DNA, 15 bp, Homo sapiens
attcttccttttcct

SEQ ID NO: 808265 - DNA, 15 bp, Homo sapiens
ttcttccttttccta

SEQ ID NO: 808266 - DNA, 15 bp, Homo sapiens
tcttccttttcctag

SEQ ID NO: 808267 - DNA, 15 bp, Homo sapiens
cttccttttcctagg

SEQ ID NO: 808268 - DNA, 15 bp, Homo sapiens
ttccttttcctaggg

SEQ ID NO: 808269 - DNA, 15 bp, Homo sapiens
tccttttcctagggc

SEQ ID NO: 808270 - DNA, 15 bp, Homo sapiens
ccttttcctagggca

SEQ ID NO: 808271 - DNA, 15 bp, Homo sapiens
cttttcctagggcat

SEQ ID NO: 808272 - DNA, 15 bp, Homo sapiens
ttttcctagggcata

SEQ ID NO: 808273 - DNA, 15 bp, Homo sapiens
tttcctagggcatat

SEQ ID NO: 808274 - DNA, 15 bp, Homo sapiens
ttcctagggcatatg

SEQ ID NO: 808275 - DNA, 15 bp, Homo sapiens
tcctagggcatatgc

SEQ ID NO: 808276 - DNA, 15 bp, Homo sapiens
cctagggcatatgcg

SEQ ID NO: 808277 - DNA, 15 bp, Homo sapiens
ctagggcatatgcgg

SEQ ID NO: 808278 - DNA, 15 bp, Homo sapiens
tagggcatatgcggc

SEQ ID NO: 808279 - DNA, 15 bp, Homo sapiens
agggcatatgcggcc

SEQ ID NO: 808280 - DNA, 15 bp, Homo sapiens
gggcatatgcggcca

SEQ ID NO: 808281 - DNA, 15 bp, Homo sapiens
ggcatatgcggccag

SEQ ID NO: 808282 - DNA, 15 bp, Homo sapiens
gcatatgcggccagc

SEQ ID NO: 808283 - DNA, 15 bp, Homo sapiens
catatgcggccagca

SEQ ID NO: 808284 - DNA, 15 bp, Homo sapiens
atatgcggccagcaa

SEQ ID NO: 808285 - DNA, 15 bp, Homo sapiens
tatgcggccagcaaa

SEQ ID NO: 808286 - DNA, 15 bp, Homo sapiens
atgcggccagcaaag

SEQ ID NO: 808287 - DNA, 15 bp, Homo sapiens
tgcggccagcaaaga

SEQ ID NO: 808288 - DNA, 15 bp, Homo sapiens
gcggccagcaaagaa

SEQ ID NO: 808289 - DNA, 15 bp, Homo sapiens
cggccagcaaagaat

SEQ ID NO: 808290 - DNA, 15 bp, Homo sapiens
ggccagcaaagaatc

SEQ ID NO: 808291 - DNA, 15 bp, Homo sapiens
gccagcaaagaatca

SEQ ID NO: 808292 - DNA, 15 bp, Homo sapiens
ccagcaaagaatcac

SEQ ID NO: 808293 - DNA, 15 bp, Homo sapiens
cagcaaagaatcaca

SEQ ID NO: 808294 - DNA, 15 bp, Homo sapiens
agcaaagaatcacat

SEQ ID NO: 808295 - DNA, 15 bp, Homo sapiens
gcaaagaatcacatg

SEQ ID NO: 808296 - DNA, 15 bp, Homo sapiens
caaagaatcacatgc

SEQ ID NO: 808297 - DNA, 15 bp, Homo sapiens
aaagaatcacatgcc

SEQ ID NO: 808298 - DNA, 15 bp, Homo sapiens
aagaatcacatgcca

SEQ ID NO: 808299 - DNA, 15 bp, Homo sapiens
agaatcacatgccac

SEQ ID NO: 808300 - DNA, 15 bp, Homo sapiens
gaatcacatgccact

SEQ ID NO: 808301 - DNA, 15 bp, Homo sapiens
aatcacatgccactt

SEQ ID NO: 808302 - DNA, 15 bp, Homo sapiens
atcacatgccacttt

SEQ ID NO: 808303 - DNA, 15 bp, Homo sapiens
tcacatgccactttg

SEQ ID NO: 808304 - DNA, 15 bp, Homo sapiens
cacatgccactttgg

SEQ ID NO: 808305 - DNA, 15 bp, Homo sapiens
acatgccactttggt

SEQ ID NO: 808306 - DNA, 15 bp, Homo sapiens
catgccactttggtg

SEQ ID NO: 808307 - DNA, 15 bp, Homo sapiens
atgccactttggtgt

SEQ ID NO: 808308 - DNA, 15 bp, Homo sapiens
tgccactttggtgtt

SEQ ID NO: 808309 - DNA, 15 bp, Homo sapiens
gccactttggtgttt

SEQ ID NO: 808310 - DNA, 15 bp, Homo sapiens
ccactttggtgtttc

SEQ ID NO: 808311 - DNA, 15 bp, Homo sapiens
cactttggtgtttca

SEQ ID NO: 808312 - DNA, 15 bp, Homo sapiens
actttggtgtttcat

SEQ ID NO: 808313 - DNA, 15 bp, Homo sapiens
ctttggtgtttcata

SEQ ID NO: 808314 - DNA, 15 bp, Homo sapiens
tttggtgtttcataa

SEQ ID NO: 808315 - DNA, 15 bp, Homo sapiens
ttggtgtttcataat

SEQ ID NO: 808316 - DNA, 15 bp, Homo sapiens
tggtgtttcataatc

SEQ ID NO: 808317 - DNA, 15 bp, Homo sapiens
ggtgtttcataatct

SEQ ID NO: 808318 - DNA, 15 bp, Homo sapiens
gtgtttcataatctc

SEQ ID NO: 808319 - DNA, 15 bp, Homo sapiens
tgtttcataatctcc

SEQ ID NO: 808320 - DNA, 15 bp, Homo sapiens
gtttcataatctcct

SEQ ID NO: 808321 - DNA, 15 bp, Homo sapiens
tttcataatctcctg

SEQ ID NO: 808322 - DNA, 15 bp, Homo sapiens
ttcataatctcctgg

SEQ ID NO: 808323 - DNA, 15 bp, Homo sapiens
tcataatctcctggg

SEQ ID NO: 808324 - DNA, 15 bp, Homo sapiens
cataatctcctggga

SEQ ID NO: 808325 - DNA, 15 bp, Homo sapiens
ataatctcctgggag

SEQ ID NO: 808326 - DNA, 15 bp, Homo sapiens
taatctcctgggaga

SEQ ID NO: 808327 - DNA, 15 bp, Homo sapiens
aatctcctgggagag

SEQ ID NO: 808328 - DNA, 15 bp, Homo sapiens
atctcctgggagaga

SEQ ID NO: 808329 - DNA, 15 bp, Homo sapiens
tctcctgggagagat

SEQ ID NO: 808330 - DNA, 15 bp, Homo sapiens
ctcctgggagagatt

SEQ ID NO: 808331 - DNA, 15 bp, Homo sapiens
tcctgggagagattg

SEQ ID NO: 808332 - DNA, 15 bp, Homo sapiens
cctgggagagattga

SEQ ID NO: 808333 - DNA, 15 bp, Homo sapiens
ctgggagagattgac

SEQ ID NO: 808334 - DNA, 15 bp, Homo sapiens
tgggagagattgacc

SEQ ID NO: 808335 - DNA, 15 bp, Homo sapiens
gggagagattgacca

SEQ ID NO: 808336 - DNA, 15 bp, Homo sapiens
ggagagattgaccag

SEQ ID NO: 808337 - DNA, 15 bp, Homo sapiens
gagagattgaccagc

SEQ ID NO: 808338 - DNA, 15 bp, Homo sapiens
agagattgaccagca

SEQ ID NO: 808339 - DNA, 15 bp, Homo sapiens
gagattgaccagcag

SEQ ID NO: 808340 - DNA, 15 bp, Homo sapiens
agattgaccagcagt

SEQ ID NO: 808341 - DNA, 15 bp, Homo sapiens
gattgaccagcagta

SEQ ID NO: 808342 - DNA, 15 bp, Homo sapiens
attgaccagcagtat

SEQ ID NO: 808343 - DNA, 15 bp, Homo sapiens
ttgaccagcagtata

SEQ ID NO: 808344 - DNA, 15 bp, Homo sapiens
tgaccagcagtatag

SEQ ID NO: 808345 - DNA, 15 bp, Homo sapiens
gaccagcagtatagc

SEQ ID NO: 808346 - DNA, 15 bp, Homo sapiens
accagcagtatagcc

SEQ ID NO: 808347 - DNA, 15 bp, Homo sapiens
ccagcagtatagccg

SEQ ID NO: 808348 - DNA, 15 bp, Homo sapiens
cagcagtatagccgc

SEQ ID NO: 808349 - DNA, 15 bp, Homo sapiens
agcagtatagccgct

SEQ ID NO: 808350 - DNA, 15 bp, Homo sapiens
gcagtatagccgctt

SEQ ID NO: 808351 - DNA, 15 bp, Homo sapiens
cagtatagccgcttc

SEQ ID NO: 808352 - DNA, 15 bp, Homo sapiens
agtatagccgcttcc

SEQ ID NO: 808353 - DNA, 15 bp, Homo sapiens
gtatagccgcttcct

SEQ ID NO: 808354 - DNA, 15 bp, Homo sapiens
tatagccgcttcctg

SEQ ID NO: 808355 - DNA, 15 bp, Homo sapiens
atagccgcttcctgc

SEQ ID NO: 808356 - DNA, 15 bp, Homo sapiens
tagccgcttcctgca

SEQ ID NO: 808357 - DNA, 15 bp, Homo sapiens
agccgcttcctgcaa

SEQ ID NO: 808358 - DNA, 15 bp, Homo sapiens
gccgcttcctgcaag

SEQ ID NO: 808359 - DNA, 15 bp, Homo sapiens
ccgcttcctgcaaga

SEQ ID NO: 808360 - DNA, 15 bp, Homo sapiens
cgcttcctgcaagag

SEQ ID NO: 808361 - DNA, 15 bp, Homo sapiens
gcttcctgcaagagt

SEQ ID NO: 808362 - DNA, 15 bp, Homo sapiens
cttcctgcaagagtc

SEQ ID NO: 808363 - DNA, 15 bp, Homo sapiens
ttcctgcaagagtcg

SEQ ID NO: 808364 - DNA, 15 bp, Homo sapiens
tcctgcaagagtcga

SEQ ID NO: 808365 - DNA, 15 bp, Homo sapiens
cctgcaagagtcgaa

SEQ ID NO: 808366 - DNA, 15 bp, Homo sapiens
ctgcaagagtcgaat

SEQ ID NO: 808367 - DNA, 15 bp, Homo sapiens
tgcaagagtcgaatg

SEQ ID NO: 808368 - DNA, 15 bp, Homo sapiens
gcaagagtcgaatgt

SEQ ID NO: 808369 - DNA, 15 bp, Homo sapiens
caagagtcgaatgtt

SEQ ID NO: 808370 - DNA, 15 bp, Homo sapiens
aagagtcgaatgttc

SEQ ID NO: 808371 - DNA, 15 bp, Homo sapiens
agagtcgaatgttct

SEQ ID NO: 808372 - DNA, 15 bp, Homo sapiens
gagtcgaatgttctc

SEQ ID NO: 808373 - DNA, 15 bp, Homo sapiens
agtcgaatgttctct

SEQ ID NO: 808374 - DNA, 15 bp, Homo sapiens
gtcgaatgttctcta

SEQ ID NO: 808375 - DNA, 15 bp, Homo sapiens
tcgaatgttctctat

SEQ ID NO: 808376 - DNA, 15 bp, Homo sapiens
cgaatgttctctatc

SEQ ID NO: 808377 - DNA, 15 bp, Homo sapiens
gaatgttctctatca

SEQ ID NO: 808378 - DNA, 15 bp, Homo sapiens
aatgttctctatcag

SEQ ID NO: 808379 - DNA, 15 bp, Homo sapiens
atgttctctatcagc

SEQ ID NO: 808380 - DNA, 15 bp, Homo sapiens
tgttctctatcagca

SEQ ID NO: 808381 - DNA, 15 bp, Homo sapiens
gttctctatcagcac

SEQ ID NO: 808382 - DNA, 15 bp, Homo sapiens
ttctctatcagcaca

SEQ ID NO: 808383 - DNA, 15 bp, Homo sapiens
tctctatcagcacaa

SEQ ID NO: 808384 - DNA, 15 bp, Homo sapiens
ctctatcagcacaat

SEQ ID NO: 808385 - DNA, 15 bp, Homo sapiens
tctatcagcacaatc

SEQ ID NO: 808386 - DNA, 15 bp, Homo sapiens
ctatcagcacaatct

SEQ ID NO: 808387 - DNA, 15 bp, Homo sapiens
tatcagcacaatcta

SEQ ID NO: 808388 - DNA, 15 bp, Homo sapiens
atcagcacaatctac

SEQ ID NO: 808389 - DNA, 15 bp, Homo sapiens
tcagcacaatctacg

SEQ ID NO: 808390 - DNA, 15 bp, Homo sapiens
cagcacaatctacga

SEQ ID NO: 808391 - DNA, 15 bp, Homo sapiens
agcacaatctacgaa

SEQ ID NO: 808392 - DNA, 15 bp, Homo sapiens
gcacaatctacgaag

SEQ ID NO: 808393 - DNA, 15 bp, Homo sapiens
cacaatctacgaaga

SEQ ID NO: 808394 - DNA, 15 bp, Homo sapiens
acaatctacgaagaa

SEQ ID NO: 808395 - DNA, 15 bp, Homo sapiens
caatctacgaagaat

SEQ ID NO: 808396 - DNA, 15 bp, Homo sapiens
aatctacgaagaatc

SEQ ID NO: 808397 - DNA, 15 bp, Homo sapiens
atctacgaagaatca

SEQ ID NO: 808398 - DNA, 15 bp, Homo sapiens
tctacgaagaatcaa

SEQ ID NO: 808399 - DNA, 15 bp, Homo sapiens
ctacgaagaatcaag

SEQ ID NO: 808400 - DNA, 15 bp, Homo sapiens
tacgaagaatcaagc

SEQ ID NO: 808401 - DNA, 15 bp, Homo sapiens
acgaagaatcaagca

SEQ ID NO: 808402 - DNA, 15 bp, Homo sapiens
cgaagaatcaagcag

SEQ ID NO: 808403 - DNA, 15 bp, Homo sapiens
gaagaatcaagcagt

SEQ ID NO: 808404 - DNA, 15 bp, Homo sapiens
aagaatcaagcagtt

SEQ ID NO: 808405 - DNA, 15 bp, Homo sapiens
agaatcaagcagttt

SEQ ID NO: 808406 - DNA, 15 bp, Homo sapiens
gaatcaagcagtttc

SEQ ID NO: 808407 - DNA, 15 bp, Homo sapiens
aatcaagcagtttct

SEQ ID NO: 808408 - DNA, 15 bp, Homo sapiens
atcaagcagtttctt

SEQ ID NO: 808409 - DNA, 15 bp, Homo sapiens
tcaagcagtttcttc

SEQ ID NO: 808410 - DNA, 15 bp, Homo sapiens
caagcagtttcttca

SEQ ID NO: 808411 - DNA, 15 bp, Homo sapiens
aagcagtttcttcag

SEQ ID NO: 808412 - DNA, 15 bp, Homo sapiens
agcagtttcttcagg

SEQ ID NO: 808413 - DNA, 15 bp, Homo sapiens
gcagtttcttcaggt

SEQ ID NO: 808414 - DNA, 15 bp, Homo sapiens
cagtttcttcaggta

SEQ ID NO: 808415 - DNA, 15 bp, Homo sapiens
agtttcttcaggtat

SEQ ID NO: 808416 - DNA, 15 bp, Homo sapiens
gtttcttcaggtatg

SEQ ID NO: 808417 - DNA, 15 bp, Homo sapiens
tttcttcaggtatga

SEQ ID NO: 808418 - DNA, 15 bp, Homo sapiens
ttcttcaggtatgat

SEQ ID NO: 808419 - DNA, 15 bp, Homo sapiens
tcttcaggtatgatg

SEQ ID NO: 808420 - DNA, 15 bp, Homo sapiens
cttcaggtatgatga

SEQ ID NO: 808421 - DNA, 15 bp, Homo sapiens
ttcaggtatgatgag

SEQ ID NO: 808422 - DNA, 15 bp, Homo sapiens
tcaggtatgatgaga

SEQ ID NO: 808423 - DNA, 15 bp, Homo sapiens
caggtatgatgagaa

SEQ ID NO: 808424 - DNA, 15 bp, Homo sapiens
aggtatgatgagaaa

SEQ ID NO: 808425 - DNA, 15 bp, Homo sapiens
ggtatgatgagaaac

SEQ ID NO: 808426 - DNA, 15 bp, Homo sapiens
gtatgatgagaaact

SEQ ID NO: 808427 - DNA, 15 bp, Homo sapiens
tatgatgagaaactg

SEQ ID NO: 808428 - DNA, 15 bp, Homo sapiens
atgatgagaaactga

SEQ ID NO: 808429 - DNA, 15 bp, Homo sapiens
tgatgagaaactgag

SEQ ID NO: 808430 - DNA, 15 bp, Homo sapiens
gatgagaaactgagg

SEQ ID NO: 808431 - DNA, 15 bp, Homo sapiens
atgagaaactgagga

SEQ ID NO: 808432 - DNA, 15 bp, Homo sapiens
tgagaaactgaggac

SEQ ID NO: 808433 - DNA, 15 bp, Homo sapiens
gagaaactgaggaca

SEQ ID NO: 808434 - DNA, 15 bp, Homo sapiens
agaaactgaggacaa

SEQ ID NO: 808435 - DNA, 15 bp, Homo sapiens
gaaactgaggacaag

SEQ ID NO: 808436 - DNA, 15 bp, Homo sapiens
aaactgaggacaagg

SEQ ID NO: 808437 - DNA, 15 bp, Homo sapiens
aactgaggacaagga

SEQ ID NO: 808438 - DNA, 15 bp, Homo sapiens
actgaggacaaggag

SEQ ID NO: 808439 - DNA, 15 bp, Homo sapiens
ctgaggacaaggaga

SEQ ID NO: 808440 - DNA, 15 bp, Homo sapiens
tgaggacaaggagaa

SEQ ID NO: 808441 - DNA, 15 bp, Homo sapiens
gaggacaaggagaaa

SEQ ID NO: 808442 - DNA, 15 bp, Homo sapiens
aggacaaggagaaac

SEQ ID NO: 808443 - DNA, 15 bp, Homo sapiens
ggacaaggagaaaca

SEQ ID NO: 808444 - DNA, 15 bp, Homo sapiens
gacaaggagaaacag

SEQ ID NO: 808445 - DNA, 15 bp, Homo sapiens
acaaggagaaacagg

SEQ ID NO: 808446 - DNA, 15 bp, Homo sapiens
caaggagaaacagga

SEQ ID NO: 808447 - DNA, 15 bp, Homo sapiens
aaggagaaacaggac

SEQ ID NO: 808448 - DNA, 15 bp, Homo sapiens
aggagaaacaggacc

SEQ ID NO: 808449 - DNA, 15 bp, Homo sapiens
ggagaaacaggaccc

SEQ ID NO: 808450 - DNA, 15 bp, Homo sapiens
gagaaacaggacccg

SEQ ID NO: 808451 - DNA, 15 bp, Homo sapiens
agaaacaggacccgc

SEQ ID NO: 808452 - DNA, 15 bp, Homo sapiens
gaaacaggacccgca

SEQ ID NO: 808453 - DNA, 15 bp, Homo sapiens
aaacaggacccgcag

SEQ ID NO: 808454 - DNA, 15 bp, Homo sapiens
aacaggacccgcaga

SEQ ID NO: 808455 - DNA, 15 bp, Homo sapiens
acaggacccgcagag

SEQ ID NO: 808456 - DNA, 15 bp, Homo sapiens
caggacccgcagagt

SEQ ID NO: 808457 - DNA, 15 bp, Homo sapiens
aggacccgcagagtc

SEQ ID NO: 808458 - DNA, 15 bp, Homo sapiens
ggacccgcagagtcg

SEQ ID NO: 808459 - DNA, 15 bp, Homo sapiens
gacccgcagagtcgg

SEQ ID NO: 808460 - DNA, 15 bp, Homo sapiens
acccgcagagtcggg

SEQ ID NO: 808461 - DNA, 15 bp, Homo sapiens
cccgcagagtcgggt

SEQ ID NO: 808462 - DNA, 15 bp, Homo sapiens
ccgcagagtcgggtg

SEQ ID NO: 808463 - DNA, 15 bp, Homo sapiens
cgcagagtcgggtgt

SEQ ID NO: 808464 - DNA, 15 bp, Homo sapiens
gcagagtcgggtgtt

SEQ ID NO: 808465 - DNA, 15 bp, Homo sapiens
cagagtcgggtgtta

SEQ ID NO: 808466 - DNA, 15 bp, Homo sapiens
agagtcgggtgttag

SEQ ID NO: 808467 - DNA, 15 bp, Homo sapiens
gagtcgggtgttagt

SEQ ID NO: 808468 - DNA, 15 bp, Homo sapiens
agtcgggtgttagtg

SEQ ID NO: 808469 - DNA, 15 bp, Homo sapiens
gtcgggtgttagtgt

SEQ ID NO: 808470 - DNA, 15 bp, Homo sapiens
tcgggtgttagtgtt

SEQ ID NO: 808471 - DNA, 15 bp, Homo sapiens
cgggtgttagtgttc

SEQ ID NO: 808472 - DNA, 15 bp, Homo sapiens
gggtgttagtgttct

SEQ ID NO: 808473 - DNA, 15 bp, Homo sapiens
ggtgttagtgttctt

SEQ ID NO: 808474 - DNA, 15 bp, Homo sapiens
gtgttagtgttcttt

SEQ ID NO: 808475 - DNA, 15 bp, Homo sapiens
tgttagtgttctttc

SEQ ID NO: 808476 - DNA, 15 bp, Homo sapiens
gttagtgttctttcc

SEQ ID NO: 808477 - DNA, 15 bp, Homo sapiens
ttagtgttctttcct

SEQ ID NO: 808478 - DNA, 15 bp, Homo sapiens
tagtgttctttcctg

SEQ ID NO: 808479 - DNA, 15 bp, Homo sapiens
agtgttctttcctgg

SEQ ID NO: 808480 - DNA, 15 bp, Homo sapiens
gtgttctttcctgga

SEQ ID NO: 808481 - DNA, 15 bp, Homo sapiens
tgttctttcctggaa

SEQ ID NO: 808482 - DNA, 15 bp, Homo sapiens
gttctttcctggaag

SEQ ID NO: 808483 - DNA, 15 bp, Homo sapiens
ttctttcctggaagc

SEQ ID NO: 808484 - DNA, 15 bp, Homo sapiens
tctttcctggaagca

SEQ ID NO: 808485 - DNA, 15 bp, Homo sapiens
ctttcctggaagcat

SEQ ID NO: 808486 - DNA, 15 bp, Homo sapiens
tttcctggaagcatc

SEQ ID NO: 808487 - DNA, 15 bp, Homo sapiens
ttcctggaagcatct

SEQ ID NO: 808488 - DNA, 15 bp, Homo sapiens
tcctggaagcatctc

SEQ ID NO: 808489 - DNA, 15 bp, Homo sapiens
cctggaagcatctct

SEQ ID NO: 808490 - DNA, 15 bp, Homo sapiens
ctggaagcatctctt

SEQ ID NO: 808491 - DNA, 15 bp, Homo sapiens
tggaagcatctcttt

SEQ ID NO: 808492 - DNA, 15 bp, Homo sapiens
ggaagcatctctttt

SEQ ID NO: 808493 - DNA, 15 bp, Homo sapiens
gaagcatctcttttc

SEQ ID NO: 808494 - DNA, 15 bp, Homo sapiens
aagcatctcttttct

SEQ ID NO: 808495 - DNA, 15 bp, Homo sapiens
agcatctcttttctc

SEQ ID NO: 808496 - DNA, 15 bp, Homo sapiens
gcatctcttttctca

SEQ ID NO: 808497 - DNA, 15 bp, Homo sapiens
catctcttttctcat

SEQ ID NO: 808498 - DNA, 15 bp, Homo sapiens
atctcttttctcatt

SEQ ID NO: 808499 - DNA, 15 bp, Homo sapiens
tctcttttctcattt

SEQ ID NO: 808500 - DNA, 15 bp, Homo sapiens
ctcttttctcatttg

SEQ ID NO: 808501 - DNA, 15 bp, Homo sapiens
tcttttctcatttgg

SEQ ID NO: 808502 - DNA, 15 bp, Homo sapiens
cttttctcatttggc

SEQ ID NO: 808503 - DNA, 15 bp, Homo sapiens
ttttctcatttggct

SEQ ID NO: 808504 - DNA, 15 bp, Homo sapiens
tttctcatttggcta

SEQ ID NO: 808505 - DNA, 15 bp, Homo sapiens
ttctcatttggctaa

SEQ ID NO: 808506 - DNA, 15 bp, Homo sapiens
tctcatttggctaag

SEQ ID NO: 808507 - DNA, 15 bp, Homo sapiens
ctcatttggctaagt

SEQ ID NO: 808508 - DNA, 15 bp, Homo sapiens
tcatttggctaagta

SEQ ID NO: 808509 - DNA, 15 bp, Homo sapiens
catttggctaagtaa

SEQ ID NO: 808510 - DNA, 15 bp, Homo sapiens
atttggctaagtaac

SEQ ID NO: 808511 - DNA, 15 bp, Homo sapiens
tttggctaagtaacg

SEQ ID NO: 808512 - DNA, 15 bp, Homo sapiens
ttggctaagtaacga

SEQ ID NO: 808513 - DNA, 15 bp, Homo sapiens
tggctaagtaacgag

SEQ ID NO: 808514 - DNA, 15 bp, Homo sapiens
ggctaagtaacgaga

SEQ ID NO: 808515 - DNA, 15 bp, Homo sapiens
gctaagtaacgagaa

SEQ ID NO: 808516 - DNA, 15 bp, Homo sapiens
ctaagtaacgagaat

SEQ ID NO: 808517 - DNA, 15 bp, Homo sapiens
taagtaacgagaatc

SEQ ID NO: 808518 - DNA, 15 bp, Homo sapiens
aagtaacgagaatct

SEQ ID NO: 808519 - DNA, 15 bp, Homo sapiens
agtaacgagaatcta

SEQ ID NO: 808520 - DNA, 15 bp, Homo sapiens
gtaacgagaatctat

SEQ ID NO: 808521 - DNA, 15 bp, Homo sapiens
taacgagaatctatc

SEQ ID NO: 808522 - DNA, 15 bp, Homo sapiens
aacgagaatctatct

SEQ ID NO: 808523 - DNA, 15 bp, Homo sapiens
acgagaatctatctt

SEQ ID NO: 808524 - DNA, 15 bp, Homo sapiens
cgagaatctatcttg

SEQ ID NO: 808525 - DNA, 15 bp, Homo sapiens
gagaatctatcttgt

SEQ ID NO: 808526 - DNA, 15 bp, Homo sapiens
agaatctatcttgta

SEQ ID NO: 808527 - DNA, 15 bp, Homo sapiens
gaatctatcttgtat

SEQ ID NO: 808528 - DNA, 15 bp, Homo sapiens
aatctatcttgtatt

SEQ ID NO: 808529 - DNA, 15 bp, Homo sapiens
atctatcttgtattt

SEQ ID NO: 808530 - DNA, 15 bp, Homo sapiens
tctatcttgtatttt

SEQ ID NO: 808531 - DNA, 15 bp, Homo sapiens
ctatcttgtattttc

SEQ ID NO: 808532 - DNA, 15 bp, Homo sapiens
tatcttgtattttca

SEQ ID NO: 808533 - DNA, 15 bp, Homo sapiens
atcttgtattttcaa

SEQ ID NO: 808534 - DNA, 15 bp, Homo sapiens
tcttgtattttcaat

SEQ ID NO: 808535 - DNA, 15 bp, Homo sapiens
cttgtattttcaatc

SEQ ID NO: 808536 - DNA, 15 bp, Homo sapiens
ttgtattttcaatca

SEQ ID NO: 808537 - DNA, 15 bp, Homo sapiens
tgtattttcaatcac

SEQ ID NO: 808538 - DNA, 15 bp, Homo sapiens
gtattttcaatcaca

SEQ ID NO: 808539 - DNA, 15 bp, Homo sapiens
tattttcaatcacag

SEQ ID NO: 808540 - DNA, 15 bp, Homo sapiens
attttcaatcacagg

SEQ ID NO: 808541 - DNA, 15 bp, Homo sapiens
ttttcaatcacagga

SEQ ID NO: 808542 - DNA, 15 bp, Homo sapiens
tttcaatcacaggag

SEQ ID NO: 808543 - DNA, 15 bp, Homo sapiens
ttcaatcacaggaga

SEQ ID NO: 808544 - DNA, 15 bp, Homo sapiens
tcaatcacaggagaa

SEQ ID NO: 808545 - DNA, 15 bp, Homo sapiens
caatcacaggagaag

SEQ ID NO: 808546 - DNA, 15 bp, Homo sapiens
aatcacaggagaagt

SEQ ID NO: 808547 - DNA, 15 bp, Homo sapiens
atcacaggagaagta

SEQ ID NO: 808548 - DNA, 15 bp, Homo sapiens
tcacaggagaagtaa

SEQ ID NO: 808549 - DNA, 15 bp, Homo sapiens
cacaggagaagtaat

SEQ ID NO: 808550 - DNA, 15 bp, Homo sapiens
acaggagaagtaatt

SEQ ID NO: 808551 - DNA, 15 bp, Homo sapiens
caggagaagtaatta

SEQ ID NO: 808552 - DNA, 15 bp, Homo sapiens
aggagaagtaattag

SEQ ID NO: 808553 - DNA, 15 bp, Homo sapiens
ggagaagtaattagc

SEQ ID NO: 808554 - DNA, 15 bp, Homo sapiens
gagaagtaattagcc

SEQ ID NO: 808555 - DNA, 15 bp, Homo sapiens
agaagtaattagccc

SEQ ID NO: 808556 - DNA, 15 bp, Homo sapiens
gaagtaattagccct

SEQ ID NO: 808557 - DNA, 15 bp, Homo sapiens
aagtaattagccctt

SEQ ID NO: 808558 - DNA, 15 bp, Homo sapiens
agtaattagcccttt

SEQ ID NO: 808559 - DNA, 15 bp, Homo sapiens
gtaattagccctttc

SEQ ID NO: 808560 - DNA, 15 bp, Homo sapiens
taattagccctttct

SEQ ID NO: 808561 - DNA, 15 bp, Homo sapiens
aattagccctttctc

SEQ ID NO: 808562 - DNA, 15 bp, Homo sapiens
attagccctttctca

SEQ ID NO: 808563 - DNA, 15 bp, Homo sapiens
ttagccctttctcaa

SEQ ID NO: 808564 - DNA, 15 bp, Homo sapiens
tagccctttctcaaa

SEQ ID NO: 808565 - DNA, 15 bp, Homo sapiens
agccctttctcaaag

SEQ ID NO: 808566 - DNA, 15 bp, Homo sapiens
gccctttctcaaagc

SEQ ID NO: 808567 - DNA, 15 bp, Homo sapiens
ccctttctcaaagct

SEQ ID NO: 808568 - DNA, 15 bp, Homo sapiens
cctttctcaaagctc

SEQ ID NO: 808569 - DNA, 15 bp, Homo sapiens
ctttctcaaagctct

SEQ ID NO: 808570 - DNA, 15 bp, Homo sapiens
tttctcaaagctctg

SEQ ID NO: 808571 - DNA, 15 bp, Homo sapiens
ttctcaaagctctgt

SEQ ID NO: 808572 - DNA, 15 bp, Homo sapiens
tctcaaagctctgta

SEQ ID NO: 808573 - DNA, 15 bp, Homo sapiens
ctcaaagctctgtat

SEQ ID NO: 808574 - DNA, 15 bp, Homo sapiens
tcaaagctctgtata

SEQ ID NO: 808575 - DNA, 15 bp, Homo sapiens
caaagctctgtatac

SEQ ID NO: 808576 - DNA, 15 bp, Homo sapiens
aaagctctgtatact

SEQ ID NO: 808577 - DNA, 15 bp, Homo sapiens
aagctctgtatactt

SEQ ID NO: 808578 - DNA, 15 bp, Homo sapiens
agctctgtatactta

SEQ ID NO: 808579 - DNA, 15 bp, Homo sapiens
gctctgtatacttac

SEQ ID NO: 808580 - DNA, 15 bp, Homo sapiens
ctctgtatacttacc

SEQ ID NO: 808581 - DNA, 15 bp, Homo sapiens
tctgtatacttaccc

SEQ ID NO: 808582 - DNA, 15 bp, Homo sapiens
ctgtatacttacccg

SEQ ID NO: 808583 - DNA, 15 bp, Homo sapiens
tgtatacttacccgt

SEQ ID NO: 808584 - DNA, 15 bp, Homo sapiens
gtatacttacccgtg

SEQ ID NO: 808585 - DNA, 15 bp, Homo sapiens
tatacttacccgtga

SEQ ID NO: 808586 - DNA, 15 bp, Homo sapiens
atacttacccgtgag

SEQ ID NO: 808587 - DNA, 15 bp, Homo sapiens
tacttacccgtgagc

SEQ ID NO: 808588 - DNA, 15 bp, Homo sapiens
acttacccgtgagca

SEQ ID NO: 808589 - DNA, 15 bp, Homo sapiens
cttacccgtgagcat

SEQ ID NO: 808590 - DNA, 15 bp, Homo sapiens
ttacccgtgagcatc

SEQ ID NO: 808591 - DNA, 15 bp, Homo sapiens
tacccgtgagcatca

SEQ ID NO: 808592 - DNA, 15 bp, Homo sapiens
acccgtgagcatcat

SEQ ID NO: 808593 - DNA, 15 bp, Homo sapiens
cccgtgagcatcatt

SEQ ID NO: 808594 - DNA, 15 bp, Homo sapiens
ccgtgagcatcatta

SEQ ID NO: 808595 - DNA, 15 bp, Homo sapiens
cgtgagcatcattac

SEQ ID NO: 808596 - DNA, 15 bp, Homo sapiens
gtgagcatcattacc

SEQ ID NO: 808597 - DNA, 15 bp, Homo sapiens
tgagcatcattacct

SEQ ID NO: 808598 - DNA, 15 bp, Homo sapiens
gagcatcattacctg

SEQ ID NO: 808599 - DNA, 15 bp, Homo sapiens
agcatcattacctga

SEQ ID NO: 808600 - DNA, 15 bp, Homo sapiens
gcatcattacctgag

SEQ ID NO: 808601 - DNA, 15 bp, Homo sapiens
catcattacctgaga

SEQ ID NO: 808602 - DNA, 15 bp, Homo sapiens
atcattacctgagaa

SEQ ID NO: 808603 - DNA, 15 bp, Homo sapiens
tcattacctgagaat

SEQ ID NO: 808604 - DNA, 15 bp, Homo sapiens
cattacctgagaatc

SEQ ID NO: 808605 - DNA, 15 bp, Homo sapiens
attacctgagaatca

SEQ ID NO: 808606 - DNA, 15 bp, Homo sapiens
ttacctgagaatcac

SEQ ID NO: 808607 - DNA, 15 bp, Homo sapiens
tacctgagaatcact

SEQ ID NO: 808608 - DNA, 15 bp, Homo sapiens
acctgagaatcactt

SEQ ID NO: 808609 - DNA, 15 bp, Homo sapiens
cctgagaatcacttc

SEQ ID NO: 808610 - DNA, 15 bp, Homo sapiens
ctgagaatcacttct

SEQ ID NO: 808611 - DNA, 15 bp, Homo sapiens
tgagaatcacttctc

SEQ ID NO: 808612 - DNA, 15 bp, Homo sapiens
gagaatcacttctct

SEQ ID NO: 808613 - DNA, 15 bp, Homo sapiens
agaatcacttctctt

SEQ ID NO: 808614 - DNA, 15 bp, Homo sapiens
gaatcacttctcttg

SEQ ID NO: 808615 - DNA, 15 bp, Homo sapiens
aatcacttctcttgt

SEQ ID NO: 808616 - DNA, 15 bp, Homo sapiens
atcacttctcttgtc

SEQ ID NO: 808617 - DNA, 15 bp, Homo sapiens
tcacttctcttgtca

SEQ ID NO: 808618 - DNA, 15 bp, Homo sapiens
cacttctcttgtcac

SEQ ID NO: 808619 - DNA, 15 bp, Homo sapiens
acttctcttgtcaca

SEQ ID NO: 808620 - DNA, 15 bp, Homo sapiens
cttctcttgtcacag

SEQ ID NO: 808621 - DNA, 15 bp, Homo sapiens
ttctcttgtcacagt

SEQ ID NO: 808622 - DNA, 15 bp, Homo sapiens
tctcttgtcacagtt

SEQ ID NO: 808623 - DNA, 15 bp, Homo sapiens
ctcttgtcacagttg

SEQ ID NO: 808624 - DNA, 15 bp, Homo sapiens
tcttgtcacagttga

SEQ ID NO: 808625 - DNA, 15 bp, Homo sapiens
cttgtcacagttgaa

SEQ ID NO: 808626 - DNA, 15 bp, Homo sapiens
ttgtcacagttgaag

SEQ ID NO: 808627 - DNA, 15 bp, Homo sapiens
tgtcacagttgaagt

SEQ ID NO: 808628 - DNA, 15 bp, Homo sapiens
gtcacagttgaagta

SEQ ID NO: 808629 - DNA, 15 bp, Homo sapiens
tcacagttgaagtaa

SEQ ID NO: 808630 - DNA, 15 bp, Homo sapiens
cacagttgaagtaat

SEQ ID NO: 808631 - DNA, 15 bp, Homo sapiens
acagttgaagtaata

SEQ ID NO: 808632 - DNA, 15 bp, Homo sapiens
cagttgaagtaataa

SEQ ID NO: 808633 - DNA, 15 bp, Homo sapiens
agttgaagtaataaa

SEQ ID NO: 808634 - DNA, 15 bp, Homo sapiens
gttgaagtaataaag

SEQ ID NO: 808635 - DNA, 15 bp, Homo sapiens
ttgaagtaataaagt

SEQ ID NO: 808636 - DNA, 15 bp, Homo sapiens
tgaagtaataaagtg

SEQ ID NO: 808637 - DNA, 15 bp, Homo sapiens
gaagtaataaagtga

SEQ ID NO: 808638 - DNA, 15 bp, Homo sapiens
aagtaataaagtgat

SEQ ID NO: 808639 - DNA, 15 bp, Homo sapiens
agtaataaagtgatt

SEQ ID NO: 808640 - DNA, 15 bp, Homo sapiens
gtaataaagtgattg

SEQ ID NO: 808641 - DNA, 15 bp, Homo sapiens
taataaagtgattgt

SEQ ID NO: 808642 - DNA, 15 bp, Homo sapiens
aataaagtgattgtt

SEQ ID NO: 808643 - DNA, 15 bp, Homo sapiens
ataaagtgattgtta

SEQ ID NO: 808644 - DNA, 15 bp, Homo sapiens
taaagtgattgttat

SEQ ID NO: 808645 - DNA, 15 bp, Homo sapiens
aaagtgattgttatg

SEQ ID NO: 808646 - DNA, 15 bp, Homo sapiens
aagtgattgttatgt

SEQ ID NO: 808647 - DNA, 15 bp, Homo sapiens
agtgattgttatgtt

SEQ ID NO: 808648 - DNA, 15 bp, Homo sapiens
gtgattgttatgtta

SEQ ID NO: 808649 - DNA, 15 bp, Homo sapiens
tgattgttatgttaa

SEQ ID NO: 808650 - DNA, 15 bp, Homo sapiens
gattgttatgttaat

SEQ ID NO: 808651 - DNA, 15 bp, Homo sapiens
attgttatgttaatc

SEQ ID NO: 808652 - DNA, 15 bp, Homo sapiens
ttgttatgttaatca

SEQ ID NO: 808653 - DNA, 15 bp, Homo sapiens
tgttatgttaatcat

SEQ ID NO: 808654 - DNA, 15 bp, Homo sapiens
gttatgttaatcata

SEQ ID NO: 808655 - DNA, 15 bp, Homo sapiens
ttatgttaatcatac

SEQ ID NO: 808656 - DNA, 15 bp, Homo sapiens
tatgttaatcataca

SEQ ID NO: 808657 - DNA, 15 bp, Homo sapiens
atgttaatcatacat

SEQ ID NO: 808658 - DNA, 15 bp, Homo sapiens
tgttaatcatacatg

SEQ ID NO: 808659 - DNA, 15 bp, Homo sapiens
gttaatcatacatgt

SEQ ID NO: 808660 - DNA, 15 bp, Homo sapiens
ttaatcatacatgtt

SEQ ID NO: 808661 - DNA, 15 bp, Homo sapiens
taatcatacatgtta

SEQ ID NO: 808662 - DNA, 15 bp, Homo sapiens
aatcatacatgttag

SEQ ID NO: 808663 - DNA, 15 bp, Homo sapiens
atcatacatgttagc

SEQ ID NO: 808664 - DNA, 15 bp, Homo sapiens
tcatacatgttagca

SEQ ID NO: 808665 - DNA, 15 bp, Homo sapiens
catacatgttagcat

SEQ ID NO: 808666 - DNA, 15 bp, Homo sapiens
atacatgttagcatg

SEQ ID NO: 808667 - DNA, 15 bp, Homo sapiens
tacatgttagcatgt

SEQ ID NO: 808668 - DNA, 15 bp, Homo sapiens
acatgttagcatgtt

SEQ ID NO: 808669 - DNA, 15 bp, Homo sapiens
catgttagcatgtta

SEQ ID NO: 808670 - DNA, 15 bp, Homo sapiens
atgttagcatgttaa

SEQ ID NO: 808671 - DNA, 15 bp, Homo sapiens
tgttagcatgttaac

SEQ ID NO: 808672 - DNA, 15 bp, Homo sapiens
gttagcatgttaacg

SEQ ID NO: 808673 - DNA, 15 bp, Homo sapiens
ttagcatgttaacgc

SEQ ID NO: 808674 - DNA, 15 bp, Homo sapiens
tagcatgttaacgcg

SEQ ID NO: 808675 - DNA, 15 bp, Homo sapiens
agcatgttaacgcgg

SEQ ID NO: 808676 - DNA, 15 bp, Homo sapiens
gcatgttaacgcggt

SEQ ID NO: 808677 - DNA, 15 bp, Homo sapiens
catgttaacgcggtc

SEQ ID NO: 808678 - DNA, 15 bp, Homo sapiens
atgttaacgcggtcc

SEQ ID NO: 808679 - DNA, 15 bp, Homo sapiens
tgttaacgcggtcca

SEQ ID NO: 808680 - DNA, 15 bp, Homo sapiens
gttaacgcggtccac

SEQ ID NO: 808681 - DNA, 15 bp, Homo sapiens
ttaacgcggtccact

SEQ ID NO: 808682 - DNA, 15 bp, Homo sapiens
taacgcggtccactg

SEQ ID NO: 808683 - DNA, 15 bp, Homo sapiens
aacgcggtccactga

SEQ ID NO: 808684 - DNA, 15 bp, Homo sapiens
acgcggtccactgat

SEQ ID NO: 808685 - DNA, 15 bp, Homo sapiens
cgcggtccactgata

SEQ ID NO: 808686 - DNA, 15 bp, Homo sapiens
gcggtccactgatag

SEQ ID NO: 808687 - DNA, 15 bp, Homo sapiens
cggtccactgatagg

SEQ ID NO: 808688 - DNA, 15 bp, Homo sapiens
ggtccactgatagga

SEQ ID NO: 808689 - DNA, 15 bp, Homo sapiens
gtccactgataggaa

SEQ ID NO: 808690 - DNA, 15 bp, Homo sapiens
tccactgataggaag

SEQ ID NO: 808691 - DNA, 15 bp, Homo sapiens
ccactgataggaaga

SEQ ID NO: 808692 - DNA, 15 bp, Homo sapiens
cactgataggaagat

SEQ ID NO: 808693 - DNA, 15 bp, Homo sapiens
actgataggaagatg

SEQ ID NO: 808694 - DNA, 15 bp, Homo sapiens
ctgataggaagatga

SEQ ID NO: 808695 - DNA, 15 bp, Homo sapiens
tgataggaagatgac

SEQ ID NO: 808696 - DNA, 15 bp, Homo sapiens
gataggaagatgact

SEQ ID NO: 808697 - DNA, 15 bp, Homo sapiens
ataggaagatgactc

SEQ ID NO: 808698 - DNA, 15 bp, Homo sapiens
taggaagatgactct

SEQ ID NO: 808699 - DNA, 15 bp, Homo sapiens
aggaagatgactctc

SEQ ID NO: 808700 - DNA, 15 bp, Homo sapiens
ggaagatgactctca

SEQ ID NO: 808701 - DNA, 15 bp, Homo sapiens
gaagatgactctcac

SEQ ID NO: 808702 - DNA, 15 bp, Homo sapiens
aagatgactctcact

SEQ ID NO: 808703 - DNA, 15 bp, Homo sapiens
agatgactctcactg

SEQ ID NO: 808704 - DNA, 15 bp, Homo sapiens
gatgactctcactgt

SEQ ID NO: 808705 - DNA, 15 bp, Homo sapiens
atgactctcactgtt

SEQ ID NO: 808706 - DNA, 15 bp, Homo sapiens
tgactctcactgtta

SEQ ID NO: 808707 - DNA, 15 bp, Homo sapiens
gactctcactgttac

SEQ ID NO: 808708 - DNA, 15 bp, Homo sapiens
actctcactgttaca

SEQ ID NO: 808709 - DNA, 15 bp, Homo sapiens
ctctcactgttacat

SEQ ID NO: 808710 - DNA, 15 bp, Homo sapiens
tctcactgttacatg

SEQ ID NO: 808711 - DNA, 15 bp, Homo sapiens
ctcactgttacatgt

SEQ ID NO: 808712 - DNA, 15 bp, Homo sapiens
tcactgttacatgtt

SEQ ID NO: 808713 - DNA, 15 bp, Homo sapiens
cactgttacatgtta

SEQ ID NO: 808714 - DNA, 15 bp, Homo sapiens
actgttacatgttaa

SEQ ID NO: 808715 - DNA, 15 bp, Homo sapiens
ctgttacatgttaaa

SEQ ID NO: 808716 - DNA, 15 bp, Homo sapiens
tgttacatgttaaat

SEQ ID NO: 808717 - DNA, 15 bp, Homo sapiens
gttacatgttaaatg

SEQ ID NO: 808718 - DNA, 15 bp, Homo sapiens
ttacatgttaaatgt

SEQ ID NO: 808719 - DNA, 15 bp, Homo sapiens
tacatgttaaatgtt

SEQ ID NO: 808720 - DNA, 15 bp, Homo sapiens
acatgttaaatgttt

SEQ ID NO: 808721 - DNA, 15 bp, Homo sapiens
catgttaaatgtttg

SEQ ID NO: 808722 - DNA, 15 bp, Homo sapiens
atgttaaatgtttga

SEQ ID NO: 808723 - DNA, 15 bp, Homo sapiens
tgttaaatgtttgac

SEQ ID NO: 808724 - DNA, 15 bp, Homo sapiens
gttaaatgtttgacc

SEQ ID NO: 808725 - DNA, 15 bp, Homo sapiens
ttaaatgtttgacca

SEQ ID NO: 808726 - DNA, 15 bp, Homo sapiens
taaatgtttgaccat

SEQ ID NO: 808727 - DNA, 15 bp, Homo sapiens
aaatgtttgaccata

SEQ ID NO: 808728 - DNA, 15 bp, Homo sapiens
aatgtttgaccataa

SEQ ID NO: 808729 - DNA, 15 bp, Homo sapiens
atgtttgaccataat

SEQ ID NO: 808730 - DNA, 15 bp, Homo sapiens
tgtttgaccataatg

SEQ ID NO: 808731 - DNA, 15 bp, Homo sapiens
gtttgaccataatgg

SEQ ID NO: 808732 - DNA, 15 bp, Homo sapiens
tttgaccataatggg

SEQ ID NO: 808733 - DNA, 15 bp, Homo sapiens
ttgaccataatggga

SEQ ID NO: 808734 - DNA, 15 bp, Homo sapiens
tgaccataatgggat

SEQ ID NO: 808735 - DNA, 15 bp, Homo sapiens
gaccataatgggata

SEQ ID NO: 808736 - DNA, 15 bp, Homo sapiens
accataatgggatac

SEQ ID NO: 808737 - DNA, 15 bp, Homo sapiens
ccataatgggatact

SEQ ID NO: 808738 - DNA, 15 bp, Homo sapiens
cataatgggatactt

SEQ ID NO: 808739 - DNA, 15 bp, Homo sapiens
ataatgggatacttc

SEQ ID NO: 808740 - DNA, 15 bp, Homo sapiens
taatgggatacttct

SEQ ID NO: 808741 - DNA, 15 bp, Homo sapiens
aatgggatacttctt

SEQ ID NO: 808742 - DNA, 15 bp, Homo sapiens
atgggatacttcttg

SEQ ID NO: 808743 - DNA, 15 bp, Homo sapiens
tgggatacttcttga

SEQ ID NO: 808744 - DNA, 15 bp, Homo sapiens
gggatacttcttgac

SEQ ID NO: 808745 - DNA, 15 bp, Homo sapiens
ggatacttcttgact

SEQ ID NO: 808746 - DNA, 15 bp, Homo sapiens
gatacttcttgacta

SEQ ID NO: 808747 - DNA, 15 bp, Homo sapiens
atacttcttgactaa

SEQ ID NO: 808748 - DNA, 15 bp, Homo sapiens
tacttcttgactaag

SEQ ID NO: 808749 - DNA, 15 bp, Homo sapiens
acttcttgactaagt

SEQ ID NO: 808750 - DNA, 15 bp, Homo sapiens
cttcttgactaagtc

SEQ ID NO: 808751 - DNA, 15 bp, Homo sapiens
ttcttgactaagtca

SEQ ID NO: 808752 - DNA, 15 bp, Homo sapiens
tcttgactaagtcag

SEQ ID NO: 808753 - DNA, 15 bp, Homo sapiens
cttgactaagtcagt

SEQ ID NO: 808754 - DNA, 15 bp, Homo sapiens
ttgactaagtcagta

SEQ ID NO: 808755 - DNA, 15 bp, Homo sapiens
tgactaagtcagtag

SEQ ID NO: 808756 - DNA, 15 bp, Homo sapiens
gactaagtcagtagc

SEQ ID NO: 808757 - DNA, 15 bp, Homo sapiens
actaagtcagtagct

SEQ ID NO: 808758 - DNA, 15 bp, Homo sapiens
ctaagtcagtagctt

SEQ ID NO: 808759 - DNA, 15 bp, Homo sapiens
taagtcagtagcttc

SEQ ID NO: 808760 - DNA, 15 bp, Homo sapiens
aagtcagtagcttcc

SEQ ID NO: 808761 - DNA, 15 bp, Homo sapiens
agtcagtagcttccc

SEQ ID NO: 808762 - DNA, 15 bp, Homo sapiens
gtcagtagcttccct

SEQ ID NO: 808763 - DNA, 15 bp, Homo sapiens
tcagtagcttccctg

SEQ ID NO: 808764 - DNA, 15 bp, Homo sapiens
cagtagcttccctgc

SEQ ID NO: 808765 - DNA, 15 bp, Homo sapiens
agtagcttccctgca

SEQ ID NO: 808766 - DNA, 15 bp, Homo sapiens
gtagcttccctgcaa

SEQ ID NO: 808767 - DNA, 15 bp, Homo sapiens
tagcttccctgcaag

SEQ ID NO: 808768 - DNA, 15 bp, Homo sapiens
agcttccctgcaaga

SEQ ID NO: 808769 - DNA, 15 bp, Homo sapiens
gcttccctgcaagac

SEQ ID NO: 808770 - DNA, 15 bp, Homo sapiens
cttccctgcaagacc

SEQ ID NO: 808771 - DNA, 15 bp, Homo sapiens
ttccctgcaagacca

SEQ ID NO: 808772 - DNA, 15 bp, Homo sapiens
tccctgcaagaccag

SEQ ID NO: 808773 - DNA, 15 bp, Homo sapiens
ccctgcaagaccagg

SEQ ID NO: 808774 - DNA, 15 bp, Homo sapiens
cctgcaagaccagga

SEQ ID NO: 808775 - DNA, 15 bp, Homo sapiens
ctgcaagaccaggat

SEQ ID NO: 808776 - DNA, 15 bp, Homo sapiens
tgcaagaccaggata

SEQ ID NO: 808777 - DNA, 15 bp, Homo sapiens
gcaagaccaggatag

SEQ ID NO: 808778 - DNA, 15 bp, Homo sapiens
caagaccaggatagt

SEQ ID NO: 808779 - DNA, 15 bp, Homo sapiens
aagaccaggatagta

SEQ ID NO: 808780 - DNA, 15 bp, Homo sapiens
agaccaggatagtat

SEQ ID NO: 808781 - DNA, 15 bp, Homo sapiens
gaccaggatagtata

SEQ ID NO: 808782 - DNA, 15 bp, Homo sapiens
accaggatagtatac

SEQ ID NO: 808783 - DNA, 15 bp, Homo sapiens
ccaggatagtatact

SEQ ID NO: 808784 - DNA, 15 bp, Homo sapiens
caggatagtatactg

SEQ ID NO: 808785 - DNA, 15 bp, Homo sapiens
aggatagtatactgt

SEQ ID NO: 808786 - DNA, 15 bp, Homo sapiens
ggatagtatactgtg

SEQ ID NO: 808787 - DNA, 15 bp, Homo sapiens
gatagtatactgtgt

SEQ ID NO: 808788 - DNA, 15 bp, Homo sapiens
atagtatactgtgta

SEQ ID NO: 808789 - DNA, 15 bp, Homo sapiens
tagtatactgtgtaa

SEQ ID NO: 808790 - DNA, 15 bp, Homo sapiens
agtatactgtgtaaa

SEQ ID NO: 808791 - DNA, 15 bp, Homo sapiens
gtatactgtgtaaag

SEQ ID NO: 808792 - DNA, 15 bp, Homo sapiens
tatactgtgtaaaga

SEQ ID NO: 808793 - DNA, 15 bp, Homo sapiens
atactgtgtaaagac

SEQ ID NO: 808794 - DNA, 15 bp, Homo sapiens
tactgtgtaaagact

SEQ ID NO: 808795 - DNA, 15 bp, Homo sapiens
actgtgtaaagactc

SEQ ID NO: 808796 - DNA, 15 bp, Homo sapiens
ctgtgtaaagactca

SEQ ID NO: 808797 - DNA, 15 bp, Homo sapiens
tgtgtaaagactcag

SEQ ID NO: 808798 - DNA, 15 bp, Homo sapiens
gtgtaaagactcaga

SEQ ID NO: 808799 - DNA, 15 bp, Homo sapiens
tgtaaagactcagac

SEQ ID NO: 808800 - DNA, 15 bp, Homo sapiens
gtaaagactcagaca

SEQ ID NO: 808801 - DNA, 15 bp, Homo sapiens
taaagactcagacaa

SEQ ID NO: 808802 - DNA, 15 bp, Homo sapiens
aaagactcagacaag

SEQ ID NO: 808803 - DNA, 15 bp, Homo sapiens
aagactcagacaagg

SEQ ID NO: 808804 - DNA, 15 bp, Homo sapiens
agactcagacaaggc

SEQ ID NO: 808805 - DNA, 15 bp, Homo sapiens
gactcagacaaggcc

SEQ ID NO: 808806 - DNA, 15 bp, Homo sapiens
actcagacaaggcca

SEQ ID NO: 808807 - DNA, 15 bp, Homo sapiens
ctcagacaaggccag

SEQ ID NO: 808808 - DNA, 15 bp, Homo sapiens
tcagacaaggccagg

SEQ ID NO: 808809 - DNA, 15 bp, Homo sapiens
cagacaaggccaggc

SEQ ID NO: 808810 - DNA, 15 bp, Homo sapiens
agacaaggccaggca

SEQ ID NO: 808811 - DNA, 15 bp, Homo sapiens
gacaaggccaggcat

SEQ ID NO: 808812 - DNA, 15 bp, Homo sapiens
acaaggccaggcatg

SEQ ID NO: 808813 - DNA, 15 bp, Homo sapiens
caaggccaggcatgg

SEQ ID NO: 808814 - DNA, 15 bp, Homo sapiens
aaggccaggcatggt

SEQ ID NO: 808815 - DNA, 15 bp, Homo sapiens
aggccaggcatggtg

SEQ ID NO: 808816 - DNA, 15 bp, Homo sapiens
ggccaggcatggtgg

SEQ ID NO: 808817 - DNA, 15 bp, Homo sapiens
gccaggcatggtggc

SEQ ID NO: 808818 - DNA, 15 bp, Homo sapiens
ccaggcatggtggct

SEQ ID NO: 808819 - DNA, 15 bp, Homo sapiens
caggcatggtggctc

SEQ ID NO: 808820 - DNA, 15 bp, Homo sapiens
aggcatggtggctca

SEQ ID NO: 808821 - DNA, 15 bp, Homo sapiens
cgcctgtaatcccaa

SEQ ID NO: 808822 - DNA, 15 bp, Homo sapiens
gcctgtaatcccaac

SEQ ID NO: 808823 - DNA, 15 bp, Homo sapiens
cctgtaatcccaaca

SEQ ID NO: 808824 - DNA, 15 bp, Homo sapiens
ctgtaatcccaacac

SEQ ID NO: 808825 - DNA, 15 bp, Homo sapiens
tgtaatcccaacacc

SEQ ID NO: 808826 - DNA, 15 bp, Homo sapiens
gtaatcccaacacct

SEQ ID NO: 808827 - DNA, 15 bp, Homo sapiens
taatcccaacacctt

SEQ ID NO: 808828 - DNA, 15 bp, Homo sapiens
aatcccaacacctta

SEQ ID NO: 808829 - DNA, 15 bp, Homo sapiens
atcccaacaccttag

SEQ ID NO: 808830 - DNA, 15 bp, Homo sapiens
tcccaacaccttagg

SEQ ID NO: 808831 - DNA, 15 bp, Homo sapiens
cccaacaccttagga

SEQ ID NO: 808832 - DNA, 15 bp, Homo sapiens
ccaacaccttaggag

SEQ ID NO: 808833 - DNA, 15 bp, Homo sapiens
caacaccttaggagg

SEQ ID NO: 808834 - DNA, 15 bp, Homo sapiens
aacaccttaggaggt

SEQ ID NO: 808835 - DNA, 15 bp, Homo sapiens
acaccttaggaggtt

SEQ ID NO: 808836 - DNA, 15 bp, Homo sapiens
caccttaggaggttg

SEQ ID NO: 808837 - DNA, 15 bp, Homo sapiens
accttaggaggttga

SEQ ID NO: 808838 - DNA, 15 bp, Homo sapiens
ccttaggaggttgag

SEQ ID NO: 808839 - DNA, 15 bp, Homo sapiens
cttaggaggttgagg

SEQ ID NO: 808840 - DNA, 15 bp, Homo sapiens
ttaggaggttgaggt

SEQ ID NO: 808841 - DNA, 15 bp, Homo sapiens
taggaggttgaggtg

SEQ ID NO: 808842 - DNA, 15 bp, Homo sapiens
aggaggttgaggtgg

SEQ ID NO: 808843 - DNA, 15 bp, Homo sapiens
ggaggttgaggtggg

SEQ ID NO: 808844 - DNA, 15 bp, Homo sapiens
gaggttgaggtggga

SEQ ID NO: 808845 - DNA, 15 bp, Homo sapiens
aggttgaggtgggag

SEQ ID NO: 808846 - DNA, 15 bp, Homo sapiens
ggttgaggtgggagg

SEQ ID NO: 808847 - DNA, 15 bp, Homo sapiens
gttgaggtgggagga

SEQ ID NO: 808848 - DNA, 15 bp, Homo sapiens
ttgaggtgggaggat

SEQ ID NO: 808849 - DNA, 15 bp, Homo sapiens
gaggtgggaggattg

SEQ ID NO: 808850 - DNA, 15 bp, Homo sapiens
aggtgggaggattgc

SEQ ID NO: 808851 - DNA, 15 bp, Homo sapiens
ggtgggaggattgct

SEQ ID NO: 808852 - DNA, 15 bp, Homo sapiens
gtgggaggattgctt

SEQ ID NO: 808853 - DNA, 15 bp, Homo sapiens
tgggaggattgcttg

SEQ ID NO: 808854 - DNA, 15 bp, Homo sapiens
gggaggattgcttga

SEQ ID NO: 808855 - DNA, 15 bp, Homo sapiens
ggattgcttgagcct

SEQ ID NO: 808856 - DNA, 15 bp, Homo sapiens
gattgcttgagcctg

SEQ ID NO: 808857 - DNA, 15 bp, Homo sapiens
attgcttgagcctgg

SEQ ID NO: 808858 - DNA, 15 bp, Homo sapiens
ttgcttgagcctggg

SEQ ID NO: 808859 - DNA, 15 bp, Homo sapiens
tgcttgagcctggga

SEQ ID NO: 808860 - DNA, 15 bp, Homo sapiens
gcttgagcctgggag

SEQ ID NO: 808861 - DNA, 15 bp, Homo sapiens
cttgagcctgggagt

SEQ ID NO: 808862 - DNA, 15 bp, Homo sapiens
ttgagcctgggagtt

SEQ ID NO: 808863 - DNA, 15 bp, Homo sapiens
tgagcctgggagttt

SEQ ID NO: 808864 - DNA, 15 bp, Homo sapiens
gagcctgggagtttt

SEQ ID NO: 808865 - DNA, 15 bp, Homo sapiens
agcctgggagttttg

SEQ ID NO: 808866 - DNA, 15 bp, Homo sapiens
gcctgggagttttga

SEQ ID NO: 808867 - DNA, 15 bp, Homo sapiens
cctgggagttttgag

SEQ ID NO: 808868 - DNA, 15 bp, Homo sapiens
ctgggagttttgaga

SEQ ID NO: 808869 - DNA, 15 bp, Homo sapiens
tgggagttttgagac

SEQ ID NO: 808870 - DNA, 15 bp, Homo sapiens
gggagttttgagacc

SEQ ID NO: 808871 - DNA, 15 bp, Homo sapiens
ggagttttgagacca

SEQ ID NO: 808872 - DNA, 15 bp, Homo sapiens
gagttttgagaccag

SEQ ID NO: 808873 - DNA, 15 bp, Homo sapiens
agttttgagaccagc

SEQ ID NO: 808874 - DNA, 15 bp, Homo sapiens
gttttgagaccagct

SEQ ID NO: 808875 - DNA, 15 bp, Homo sapiens
ttttgagaccagctt

SEQ ID NO: 808876 - DNA, 15 bp, Homo sapiens
ccagcttgggcaaca

SEQ ID NO: 808877 - DNA, 15 bp, Homo sapiens
cagcttgggcaacat

SEQ ID NO: 808878 - DNA, 15 bp, Homo sapiens
agcttgggcaacata

SEQ ID NO: 808879 - DNA, 15 bp, Homo sapiens
gcttgggcaacataa

SEQ ID NO: 808880 - DNA, 15 bp, Homo sapiens
cttgggcaacataac

SEQ ID NO: 808881 - DNA, 15 bp, Homo sapiens
ttgggcaacataaca

SEQ ID NO: 808882 - DNA, 15 bp, Homo sapiens
tgggcaacataacaa

SEQ ID NO: 808883 - DNA, 15 bp, Homo sapiens
gggcaacataacaag

SEQ ID NO: 808884 - DNA, 15 bp, Homo sapiens
ggcaacataacaaga

SEQ ID NO: 808885 - DNA, 15 bp, Homo sapiens
gcaacataacaagac

SEQ ID NO: 808886 - DNA, 15 bp, Homo sapiens
caacataacaagaca

SEQ ID NO: 808887 - DNA, 15 bp, Homo sapiens
aacataacaagacac

SEQ ID NO: 808888 - DNA, 15 bp, Homo sapiens
acataacaagacacc

SEQ ID NO: 808889 - DNA, 15 bp, Homo sapiens
cataacaagacacca

SEQ ID NO: 808890 - DNA, 15 bp, Homo sapiens
ataacaagacaccat

SEQ ID NO: 808891 - DNA, 15 bp, Homo sapiens
taacaagacaccatc

SEQ ID NO: 808892 - DNA, 15 bp, Homo sapiens
aacaagacaccatct

SEQ ID NO: 808893 - DNA, 15 bp, Homo sapiens
acaagacaccatctc

SEQ ID NO: 808894 - DNA, 15 bp, Homo sapiens
caagacaccatctct

SEQ ID NO: 808895 - DNA, 15 bp, Homo sapiens
aagacaccatctcta

SEQ ID NO: 808896 - DNA, 15 bp, Homo sapiens
agacaccatctctac

SEQ ID NO: 808897 - DNA, 15 bp, Homo sapiens
gacaccatctctaca

SEQ ID NO: 808898 - DNA, 15 bp, Homo sapiens
acaccatctctacag

SEQ ID NO: 808899 - DNA, 15 bp, Homo sapiens
caccatctctacaga

SEQ ID NO: 808900 - DNA, 15 bp, Homo sapiens
accatctctacagaa

SEQ ID NO: 808901 - DNA, 15 bp, Homo sapiens
ccatctctacagaaa

SEQ ID NO: 808902 - DNA, 15 bp, Homo sapiens
catctctacagaaat

SEQ ID NO: 808903 - DNA, 15 bp, Homo sapiens
atctctacagaaatt

SEQ ID NO: 808904 - DNA, 15 bp, Homo sapiens
tctctacagaaattt

SEQ ID NO: 808905 - DNA, 15 bp, Homo sapiens
ctctacagaaatttt

SEQ ID NO: 808906 - DNA, 15 bp, Homo sapiens
tctacagaaattttt

SEQ ID NO: 808907 - DNA, 15 bp, Homo sapiens
ctacagaaatttttt

SEQ ID NO: 808908 - DNA, 15 bp, Homo sapiens
tacagaaattttttt

SEQ ID NO: 808909 - DNA, 15 bp, Homo sapiens
acagaaatttttttt

SEQ ID NO: 808910 - DNA, 15 bp, Homo sapiens
cagaaatttttttta

SEQ ID NO: 808911 - DNA, 15 bp, Homo sapiens
agaaattttttttaa

SEQ ID NO: 808912 - DNA, 15 bp, Homo sapiens
gaaattttttttaaa

SEQ ID NO: 808913 - DNA, 15 bp, Homo sapiens
aaattttttttaaaa

SEQ ID NO: 808914 - DNA, 15 bp, Homo sapiens
aattttttttaaaaa

SEQ ID NO: 808915 - DNA, 15 bp, Homo sapiens
attttttttaaaaac

SEQ ID NO: 808916 - DNA, 15 bp, Homo sapiens
ttttttttaaaaact

SEQ ID NO: 808917 - DNA, 15 bp, Homo sapiens
tttttttaaaaacta

SEQ ID NO: 808918 - DNA, 15 bp, Homo sapiens
ttttttaaaaactag

SEQ ID NO: 808919 - DNA, 15 bp, Homo sapiens
tttttaaaaactagc

SEQ ID NO: 808920 - DNA, 15 bp, Homo sapiens
ttttaaaaactagct

SEQ ID NO: 808921 - DNA, 15 bp, Homo sapiens
tttaaaaactagctg

SEQ ID NO: 808922 - DNA, 15 bp, Homo sapiens
ttaaaaactagctga

SEQ ID NO: 808923 - DNA, 15 bp, Homo sapiens
taaaaactagctgat

SEQ ID NO: 808924 - DNA, 15 bp, Homo sapiens
aaaaactagctgatt

SEQ ID NO: 808925 - DNA, 15 bp, Homo sapiens
aaaactagctgattg

SEQ ID NO: 808926 - DNA, 15 bp, Homo sapiens
aaactagctgattgt

SEQ ID NO: 808927 - DNA, 15 bp, Homo sapiens
aactagctgattgtg

SEQ ID NO: 808928 - DNA, 15 bp, Homo sapiens
actagctgattgtgg

SEQ ID NO: 808929 - DNA, 15 bp, Homo sapiens
ctagctgattgtggt

SEQ ID NO: 808930 - DNA, 15 bp, Homo sapiens
tagctgattgtggtg

SEQ ID NO: 808931 - DNA, 15 bp, Homo sapiens
agctgattgtggtgg

SEQ ID NO: 808932 - DNA, 15 bp, Homo sapiens
gctgattgtggtggc

SEQ ID NO: 808933 - DNA, 15 bp, Homo sapiens
ctgattgtggtggca

SEQ ID NO: 808934 - DNA, 15 bp, Homo sapiens
tgattgtggtggcat

SEQ ID NO: 808935 - DNA, 15 bp, Homo sapiens
gattgtggtggcatg

SEQ ID NO: 808936 - DNA, 15 bp, Homo sapiens
attgtggtggcatgc

SEQ ID NO: 808937 - DNA, 15 bp, Homo sapiens
ttgtggtggcatgca

SEQ ID NO: 808938 - DNA, 15 bp, Homo sapiens
tgtggtggcatgcac

SEQ ID NO: 808939 - DNA, 15 bp, Homo sapiens
gtggtggcatgcacc

SEQ ID NO: 808940 - DNA, 15 bp, Homo sapiens
tggtggcatgcacct

SEQ ID NO: 808941 - DNA, 15 bp, Homo sapiens
ggtggcatgcacctg

SEQ ID NO: 808942 - DNA, 15 bp, Homo sapiens
gtggcatgcacctgt

SEQ ID NO: 808943 - DNA, 15 bp, Homo sapiens
tggcatgcacctgta

SEQ ID NO: 808944 - DNA, 15 bp, Homo sapiens
ggcatgcacctgtag

SEQ ID NO: 808945 - DNA, 15 bp, Homo sapiens
gcatgcacctgtagt

SEQ ID NO: 808946 - DNA, 15 bp, Homo sapiens
catgcacctgtagtc

SEQ ID NO: 808947 - DNA, 15 bp, Homo sapiens
atgcacctgtagtcc

SEQ ID NO: 808948 - DNA, 15 bp, Homo sapiens
tgcacctgtagtccc

SEQ ID NO: 808949 - DNA, 15 bp, Homo sapiens
tcccagctactcaga

SEQ ID NO: 808950 - DNA, 15 bp, Homo sapiens
cccagctactcagaa

SEQ ID NO: 808951 - DNA, 15 bp, Homo sapiens
ccagctactcagaag

SEQ ID NO: 808952 - DNA, 15 bp, Homo sapiens
cagctactcagaagg

SEQ ID NO: 808953 - DNA, 15 bp, Homo sapiens
agctactcagaaggc

SEQ ID NO: 808954 - DNA, 15 bp, Homo sapiens
gctactcagaaggct

SEQ ID NO: 808955 - DNA, 15 bp, Homo sapiens
ctactcagaaggctg

SEQ ID NO: 808956 - DNA, 15 bp, Homo sapiens
tactcagaaggctga

SEQ ID NO: 808957 - DNA, 15 bp, Homo sapiens
actcagaaggctgag

SEQ ID NO: 808958 - DNA, 15 bp, Homo sapiens
ctcagaaggctgagg

SEQ ID NO: 808959 - DNA, 15 bp, Homo sapiens
tcagaaggctgaggt

SEQ ID NO: 808960 - DNA, 15 bp, Homo sapiens
cagaaggctgaggtg

SEQ ID NO: 808961 - DNA, 15 bp, Homo sapiens
agaaggctgaggtga

SEQ ID NO: 808962 - DNA, 15 bp, Homo sapiens
gaaggctgaggtgag

SEQ ID NO: 808963 - DNA, 15 bp, Homo sapiens
aaggctgaggtgaga

SEQ ID NO: 808964 - DNA, 15 bp, Homo sapiens
aggctgaggtgagaa

SEQ ID NO: 808965 - DNA, 15 bp, Homo sapiens
ggctgaggtgagaaa

SEQ ID NO: 808966 - DNA, 15 bp, Homo sapiens
gctgaggtgagaaaa

SEQ ID NO: 808967 - DNA, 15 bp, Homo sapiens
ctgaggtgagaaaat

SEQ ID NO: 808968 - DNA, 15 bp, Homo sapiens
tgaggtgagaaaatt

SEQ ID NO: 808969 - DNA, 15 bp, Homo sapiens
gaggtgagaaaattg

SEQ ID NO: 808970 - DNA, 15 bp, Homo sapiens
aggtgagaaaattgt

SEQ ID NO: 808971 - DNA, 15 bp, Homo sapiens
ggtgagaaaattgtt

SEQ ID NO: 808972 - DNA, 15 bp, Homo sapiens
gtgagaaaattgttt

SEQ ID NO: 808973 - DNA, 15 bp, Homo sapiens
tgagaaaattgtttg

SEQ ID NO: 808974 - DNA, 15 bp, Homo sapiens
gagaaaattgtttga

SEQ ID NO: 808975 - DNA, 15 bp, Homo sapiens
agaaaattgtttgag

SEQ ID NO: 808976 - DNA, 15 bp, Homo sapiens
gaaaattgtttgagc

SEQ ID NO: 808977 - DNA, 15 bp, Homo sapiens
aaaattgtttgagcc

SEQ ID NO: 808978 - DNA, 15 bp, Homo sapiens
aaattgtttgagcct

SEQ ID NO: 808979 - DNA, 15 bp, Homo sapiens
aattgtttgagcctg

SEQ ID NO: 808980 - DNA, 15 bp, Homo sapiens
attgtttgagcctgg

SEQ ID NO: 808981 - DNA, 15 bp, Homo sapiens
ttgtttgagcctggg

SEQ ID NO: 808982 - DNA, 15 bp, Homo sapiens
tgtttgagcctggga

SEQ ID NO: 808983 - DNA, 15 bp, Homo sapiens
gtttgagcctgggag

SEQ ID NO: 808984 - DNA, 15 bp, Homo sapiens
tttgagcctgggagg

SEQ ID NO: 808985 - DNA, 15 bp, Homo sapiens
ttgagcctgggaggt

SEQ ID NO: 808986 - DNA, 15 bp, Homo sapiens
tgagcctgggaggtc

SEQ ID NO: 808987 - DNA, 15 bp, Homo sapiens
gagcctgggaggtcg

SEQ ID NO: 808988 - DNA, 15 bp, Homo sapiens
agcctgggaggtcga

SEQ ID NO: 808989 - DNA, 15 bp, Homo sapiens
gcctgggaggtcgaa

SEQ ID NO: 808990 - DNA, 15 bp, Homo sapiens
cctgggaggtcgaag

SEQ ID NO: 808991 - DNA, 15 bp, Homo sapiens
ctgggaggtcgaagc

SEQ ID NO: 808992 - DNA, 15 bp, Homo sapiens
tgggaggtcgaagct

SEQ ID NO: 808993 - DNA, 15 bp, Homo sapiens
gggaggtcgaagctg

SEQ ID NO: 808994 - DNA, 15 bp, Homo sapiens
ggaggtcgaagctgc

SEQ ID NO: 808995 - DNA, 15 bp, Homo sapiens
gaggtcgaagctgca

SEQ ID NO: 808996 - DNA, 15 bp, Homo sapiens
aggtcgaagctgcaa

SEQ ID NO: 808997 - DNA, 15 bp, Homo sapiens
ggtcgaagctgcaat

SEQ ID NO: 808998 - DNA, 15 bp, Homo sapiens
gtcgaagctgcaata

SEQ ID NO: 808999 - DNA, 15 bp, Homo sapiens
tcgaagctgcaataa

SEQ ID NO: 809000 - DNA, 15 bp, Homo sapiens
cgaagctgcaataag

SEQ ID NO: 809001 - DNA, 15 bp, Homo sapiens
gaagctgcaataagc

SEQ ID NO: 809002 - DNA, 15 bp, Homo sapiens
aagctgcaataagcc

SEQ ID NO: 809003 - DNA, 15 bp, Homo sapiens
agctgcaataagccg

SEQ ID NO: 809004 - DNA, 15 bp, Homo sapiens
gctgcaataagccgt

SEQ ID NO: 809005 - DNA, 15 bp, Homo sapiens
ctgcaataagccgtg

SEQ ID NO: 809006 - DNA, 15 bp, Homo sapiens
tgcaataagccgtga

SEQ ID NO: 809007 - DNA, 15 bp, Homo sapiens
gcaataagccgtgat

SEQ ID NO: 809008 - DNA, 15 bp, Homo sapiens
caataagccgtgatt

SEQ ID NO: 809009 - DNA, 15 bp, Homo sapiens
aataagccgtgattg

SEQ ID NO: 809010 - DNA, 15 bp, Homo sapiens
ataagccgtgattgc

SEQ ID NO: 809011 - DNA, 15 bp, Homo sapiens
taagccgtgattgcg

SEQ ID NO: 809012 - DNA, 15 bp, Homo sapiens
aagccgtgattgcgc

SEQ ID NO: 809013 - DNA, 15 bp, Homo sapiens
agccgtgattgcgcc

SEQ ID NO: 809014 - DNA, 15 bp, Homo sapiens
gccgtgattgcgcca

SEQ ID NO: 809015 - DNA, 15 bp, Homo sapiens
ccgtgattgcgccac

SEQ ID NO: 809016 - DNA, 15 bp, Homo sapiens
cgtgattgcgccact

SEQ ID NO: 809017 - DNA, 15 bp, Homo sapiens
gtgattgcgccactg

SEQ ID NO: 809018 - DNA, 15 bp, Homo sapiens
tgattgcgccactgc

SEQ ID NO: 809019 - DNA, 15 bp, Homo sapiens
gcactccagcctggc

SEQ ID NO: 809020 - DNA, 15 bp, Homo sapiens
cactccagcctggcg

SEQ ID NO: 809021 - DNA, 15 bp, Homo sapiens
actccagcctggcgg

SEQ ID NO: 809022 - DNA, 15 bp, Homo sapiens
ctccagcctggcgga

SEQ ID NO: 809023 - DNA, 15 bp, Homo sapiens
tccagcctggcggac

SEQ ID NO: 809024 - DNA, 15 bp, Homo sapiens
ccagcctggcggaca

SEQ ID NO: 809025 - DNA, 15 bp, Homo sapiens
cagcctggcggacag

SEQ ID NO: 809026 - DNA, 15 bp, Homo sapiens
agcctggcggacaga

SEQ ID NO: 809027 - DNA, 15 bp, Homo sapiens
gcctggcggacagag

SEQ ID NO: 809028 - DNA, 15 bp, Homo sapiens
cctggcggacagagt

SEQ ID NO: 809029 - DNA, 15 bp, Homo sapiens
ctggcggacagagtg

SEQ ID NO: 809030 - DNA, 15 bp, Homo sapiens
tggcggacagagtga

SEQ ID NO: 809031 - DNA, 15 bp, Homo sapiens
ggcggacagagtgag

SEQ ID NO: 809032 - DNA, 15 bp, Homo sapiens
gcggacagagtgaga

SEQ ID NO: 809033 - DNA, 15 bp, Homo sapiens
cggacagagtgagag

SEQ ID NO: 809034 - DNA, 15 bp, Homo sapiens
ggacagagtgagagc

SEQ ID NO: 809035 - DNA, 15 bp, Homo sapiens
gacagagtgagagcc

SEQ ID NO: 809036 - DNA, 15 bp, Homo sapiens
acagagtgagagcca

SEQ ID NO: 809037 - DNA, 15 bp, Homo sapiens
cagagtgagagccag

SEQ ID NO: 809038 - DNA, 15 bp, Homo sapiens
agagtgagagccagt

SEQ ID NO: 809039 - DNA, 15 bp, Homo sapiens
gagtgagagccagtc

SEQ ID NO: 809040 - DNA, 15 bp, Homo sapiens
agtgagagccagtct

SEQ ID NO: 809041 - DNA, 15 bp, Homo sapiens
gtgagagccagtctc

SEQ ID NO: 809042 - DNA, 15 bp, Homo sapiens
tgagagccagtctca

SEQ ID NO: 809043 - DNA, 15 bp, Homo sapiens
gagagccagtctcaa

SEQ ID NO: 809044 - DNA, 15 bp, Homo sapiens
agagccagtctcaaa

SEQ ID NO: 809045 - DNA, 15 bp, Homo sapiens
gagccagtctcaaaa

SEQ ID NO: 809046 - DNA, 15 bp, Homo sapiens
agccagtctcaaaaa

SEQ ID NO: 809047 - DNA, 15 bp, Homo sapiens
gccagtctcaaaaaa

SEQ ID NO: 809048 - DNA, 15 bp, Homo sapiens
ccagtctcaaaaaaa

SEQ ID NO: 809049 - DNA, 15 bp, Homo sapiens
cagtctcaaaaaaaa

SEQ ID NO: 809050 - DNA, 15 bp, Homo sapiens
agtctcaaaaaaaaa

SEQ ID NO: 809051 - DNA, 15 bp, Homo sapiens
aaaaaaaaaaagact

SEQ ID NO: 809052 - DNA, 15 bp, Homo sapiens
aaaaaaaaaagactc

SEQ ID NO: 809053 - DNA, 15 bp, Homo sapiens
aaaaaaaaagactca

SEQ ID NO: 809054 - DNA, 15 bp, Homo sapiens
aaaaaaaagactcag

SEQ ID NO: 809055 - DNA, 15 bp, Homo sapiens
aaaaaaagactcagg

SEQ ID NO: 809056 - DNA, 15 bp, Homo sapiens
aaaaaagactcaggc

SEQ ID NO: 809057 - DNA, 15 bp, Homo sapiens
aaaaagactcaggct

SEQ ID NO: 809058 - DNA, 15 bp, Homo sapiens
aaaagactcaggcta

SEQ ID NO: 809059 - DNA, 15 bp, Homo sapiens
aaagactcaggctaa

SEQ ID NO: 809060 - DNA, 15 bp, Homo sapiens
aagactcaggctaat

SEQ ID NO: 809061 - DNA, 15 bp, Homo sapiens
agactcaggctaatg

SEQ ID NO: 809062 - DNA, 15 bp, Homo sapiens
gactcaggctaatgt

SEQ ID NO: 809063 - DNA, 15 bp, Homo sapiens
actcaggctaatgtg

SEQ ID NO: 809064 - DNA, 15 bp, Homo sapiens
ctcaggctaatgtgc

SEQ ID NO: 809065 - DNA, 15 bp, Homo sapiens
tcaggctaatgtgcc

SEQ ID NO: 809066 - DNA, 15 bp, Homo sapiens
caggctaatgtgcct

SEQ ID NO: 809067 - DNA, 15 bp, Homo sapiens
aggctaatgtgcctt

SEQ ID NO: 809068 - DNA, 15 bp, Homo sapiens
ggctaatgtgccttc

SEQ ID NO: 809069 - DNA, 15 bp, Homo sapiens
gctaatgtgccttct

SEQ ID NO: 809070 - DNA, 15 bp, Homo sapiens
ctaatgtgccttctg

SEQ ID NO: 809071 - DNA, 15 bp, Homo sapiens
taatgtgccttctgt

SEQ ID NO: 809072 - DNA, 15 bp, Homo sapiens
aatgtgccttctgtt

SEQ ID NO: 809073 - DNA, 15 bp, Homo sapiens
atgtgccttctgtta

SEQ ID NO: 809074 - DNA, 15 bp, Homo sapiens
tgtgccttctgttac

SEQ ID NO: 809075 - DNA, 15 bp, Homo sapiens
gtgccttctgttaca

SEQ ID NO: 809076 - DNA, 15 bp, Homo sapiens
tgccttctgttacag

SEQ ID NO: 809077 - DNA, 15 bp, Homo sapiens
gccttctgttacaga

SEQ ID NO: 809078 - DNA, 15 bp, Homo sapiens
ccttctgttacagaa

SEQ ID NO: 809079 - DNA, 15 bp, Homo sapiens
cttctgttacagaaa

SEQ ID NO: 809080 - DNA, 15 bp, Homo sapiens
ttctgttacagaaat

SEQ ID NO: 809081 - DNA, 15 bp, Homo sapiens
tctgttacagaaata

SEQ ID NO: 809082 - DNA, 15 bp, Homo sapiens
ctgttacagaaatag

SEQ ID NO: 809083 - DNA, 15 bp, Homo sapiens
tgttacagaaatagt

SEQ ID NO: 809084 - DNA, 15 bp, Homo sapiens
gttacagaaatagta

SEQ ID NO: 809085 - DNA, 15 bp, Homo sapiens
ttacagaaatagtaa

SEQ ID NO: 809086 - DNA, 15 bp, Homo sapiens
tacagaaatagtaac

SEQ ID NO: 809087 - DNA, 15 bp, Homo sapiens
acagaaatagtaacg

SEQ ID NO: 809088 - DNA, 15 bp, Homo sapiens
cagaaatagtaacga

SEQ ID NO: 809089 - DNA, 15 bp, Homo sapiens
agaaatagtaacgac

SEQ ID NO: 809090 - DNA, 15 bp, Homo sapiens
gaaatagtaacgacc

SEQ ID NO: 809091 - DNA, 15 bp, Homo sapiens
aaatagtaacgacct

SEQ ID NO: 809092 - DNA, 15 bp, Homo sapiens
aatagtaacgacctc

SEQ ID NO: 809093 - DNA, 15 bp, Homo sapiens
atagtaacgacctcc

SEQ ID NO: 809094 - DNA, 15 bp, Homo sapiens
tagtaacgacctccc

SEQ ID NO: 809095 - DNA, 15 bp, Homo sapiens
agtaacgacctcccc

SEQ ID NO: 809096 - DNA, 15 bp, Homo sapiens
gtaacgacctcccct

SEQ ID NO: 809097 - DNA, 15 bp, Homo sapiens
taacgacctcccctt

SEQ ID NO: 809098 - DNA, 15 bp, Homo sapiens
aacgacctccccttc

SEQ ID NO: 809099 - DNA, 15 bp, Homo sapiens
acgacctccccttcg

SEQ ID NO: 809100 - DNA, 15 bp, Homo sapiens
cgacctccccttcgc

SEQ ID NO: 809101 - DNA, 15 bp, Homo sapiens
gacctccccttcgcc

SEQ ID NO: 809102 - DNA, 15 bp, Homo sapiens
acctccccttcgccc

SEQ ID NO: 809103 - DNA, 15 bp, Homo sapiens
cctccccttcgcccc

SEQ ID NO: 809104 - DNA, 15 bp, Homo sapiens
ctccccttcgccccc

SEQ ID NO: 809105 - DNA, 15 bp, Homo sapiens
tccccttcgcccccc

SEQ ID NO: 809106 - DNA, 15 bp, Homo sapiens
ccccttcgccccccg

SEQ ID NO: 809107 - DNA, 15 bp, Homo sapiens
cccttcgccccccgc

SEQ ID NO: 809108 - DNA, 15 bp, Homo sapiens
ccttcgccccccgcc

SEQ ID NO: 809109 - DNA, 15 bp, Homo sapiens
cttcgccccccgccg

SEQ ID NO: 809110 - DNA, 15 bp, Homo sapiens
ttcgccccccgccga

SEQ ID NO: 809111 - DNA, 15 bp, Homo sapiens
tcgccccccgccgac

SEQ ID NO: 809112 - DNA, 15 bp, Homo sapiens
cgccccccgccgaca

SEQ ID NO: 809113 - DNA, 15 bp, Homo sapiens
gccccccgccgacag

SEQ ID NO: 809114 - DNA, 15 bp, Homo sapiens
ccccccgccgacaga

SEQ ID NO: 809115 - DNA, 15 bp, Homo sapiens
cccccgccgacagag

SEQ ID NO: 809116 - DNA, 15 bp, Homo sapiens
ccccgccgacagaga

SEQ ID NO: 809117 - DNA, 15 bp, Homo sapiens
cccgccgacagagag

SEQ ID NO: 809118 - DNA, 15 bp, Homo sapiens
ccgccgacagagagc

SEQ ID NO: 809119 - DNA, 15 bp, Homo sapiens
cgccgacagagagcc

SEQ ID NO: 809120 - DNA, 15 bp, Homo sapiens
gccgacagagagcct

SEQ ID NO: 809121 - DNA, 15 bp, Homo sapiens
ccgacagagagcctt

SEQ ID NO: 809122 - DNA, 15 bp, Homo sapiens
cgacagagagccttc

SEQ ID NO: 809123 - DNA, 15 bp, Homo sapiens
gacagagagccttca

SEQ ID NO: 809124 - DNA, 15 bp, Homo sapiens
acagagagccttcac

SEQ ID NO: 809125 - DNA, 15 bp, Homo sapiens
cagagagccttcacc

SEQ ID NO: 809126 - DNA, 15 bp, Homo sapiens
agagagccttcaccc

SEQ ID NO: 809127 - DNA, 15 bp, Homo sapiens
gagagccttcaccca

SEQ ID NO: 809128 - DNA, 15 bp, Homo sapiens
agagccttcacccag

SEQ ID NO: 809129 - DNA, 15 bp, Homo sapiens
gagccttcacccagg

SEQ ID NO: 809130 - DNA, 15 bp, Homo sapiens
agccttcacccaggc

SEQ ID NO: 809131 - DNA, 15 bp, Homo sapiens
gccttcacccaggct

SEQ ID NO: 809132 - DNA, 15 bp, Homo sapiens
ccttcacccaggctc

SEQ ID NO: 809133 - DNA, 15 bp, Homo sapiens
cttcacccaggctct

SEQ ID NO: 809134 - DNA, 15 bp, Homo sapiens
ttcacccaggctctg

SEQ ID NO: 809135 - DNA, 15 bp, Homo sapiens
tcacccaggctctga

SEQ ID NO: 809136 - DNA, 15 bp, Homo sapiens
cacccaggctctgaa

SEQ ID NO: 809137 - DNA, 15 bp, Homo sapiens
acccaggctctgaag

SEQ ID NO: 809138 - DNA, 15 bp, Homo sapiens
cccaggctctgaagc

SEQ ID NO: 809139 - DNA, 15 bp, Homo sapiens
ccaggctctgaagcc

SEQ ID NO: 809140 - DNA, 15 bp, Homo sapiens
caggctctgaagcct

SEQ ID NO: 809141 - DNA, 15 bp, Homo sapiens
aggctctgaagcctt

SEQ ID NO: 809142 - DNA, 15 bp, Homo sapiens
ggctctgaagccttt

SEQ ID NO: 809143 - DNA, 15 bp, Homo sapiens
gctctgaagcctttg

SEQ ID NO: 809144 - DNA, 15 bp, Homo sapiens
ctctgaagcctttgt

SEQ ID NO: 809145 - DNA, 15 bp, Homo sapiens
tctgaagcctttgtt

SEQ ID NO: 809146 - DNA, 15 bp, Homo sapiens
ctgaagcctttgttc

SEQ ID NO: 809147 - DNA, 15 bp, Homo sapiens
tgaagcctttgttcc

SEQ ID NO: 809148 - DNA, 15 bp, Homo sapiens
gaagcctttgttccg

SEQ ID NO: 809149 - DNA, 15 bp, Homo sapiens
aagcctttgttccgt

SEQ ID NO: 809150 - DNA, 15 bp, Homo sapiens
agcctttgttccgtt

SEQ ID NO: 809151 - DNA, 15 bp, Homo sapiens
gcctttgttccgttg

SEQ ID NO: 809152 - DNA, 15 bp, Homo sapiens
cctttgttccgttgt

SEQ ID NO: 809153 - DNA, 15 bp, Homo sapiens
ctttgttccgttgtt

SEQ ID NO: 809154 - DNA, 15 bp, Homo sapiens
tttgttccgttgttt

SEQ ID NO: 809155 - DNA, 15 bp, Homo sapiens
ttgttccgttgtttc

SEQ ID NO: 809156 - DNA, 15 bp, Homo sapiens
tgttccgttgtttcc

SEQ ID NO: 809157 - DNA, 15 bp, Homo sapiens
gttccgttgtttcct

SEQ ID NO: 809158 - DNA, 15 bp, Homo sapiens
ttccgttgtttccta

SEQ ID NO: 809159 - DNA, 15 bp, Homo sapiens
tccgttgtttcctag

SEQ ID NO: 809160 - DNA, 15 bp, Homo sapiens
ccgttgtttcctaga

SEQ ID NO: 809161 - DNA, 15 bp, Homo sapiens
cgttgtttcctagaa

SEQ ID NO: 809162 - DNA, 15 bp, Homo sapiens
gttgtttcctagaat

SEQ ID NO: 809163 - DNA, 15 bp, Homo sapiens
ttgtttcctagaata

SEQ ID NO: 809164 - DNA, 15 bp, Homo sapiens
tgtttcctagaataa

SEQ ID NO: 809165 - DNA, 15 bp, Homo sapiens
gtttcctagaataaa

SEQ ID NO: 809166 - DNA, 15 bp, Homo sapiens
tttcctagaataaat

SEQ ID NO: 809167 - DNA, 15 bp, Homo sapiens
ttcctagaataaatg

SEQ ID NO: 809168 - DNA, 15 bp, Homo sapiens
tcctagaataaatgc

SEQ ID NO: 809169 - DNA, 15 bp, Homo sapiens
cctagaataaatgct

SEQ ID NO: 809170 - DNA, 15 bp, Homo sapiens
ctagaataaatgctt

SEQ ID NO: 809171 - DNA, 15 bp, Homo sapiens
tagaataaatgcttt

SEQ ID NO: 809172 - DNA, 15 bp, Homo sapiens
agaataaatgctttc

SEQ ID NO: 809173 - DNA, 15 bp, Homo sapiens
gaataaatgctttcc

SEQ ID NO: 809174 - DNA, 15 bp, Homo sapiens
aataaatgctttcct

SEQ ID NO: 809175 - DNA, 15 bp, Homo sapiens
ataaatgctttcctt

SEQ ID NO: 809176 - DNA, 15 bp, Homo sapiens
taaatgctttccttg

SEQ ID NO: 809177 - DNA, 15 bp, Homo sapiens
aaatgctttccttga

SEQ ID NO: 809178 - DNA, 15 bp, Homo sapiens
aatgctttccttgat

SEQ ID NO: 809179 - DNA, 15 bp, Homo sapiens
atgctttccttgatg

SEQ ID NO: 809180 - DNA, 15 bp, Homo sapiens
tgctttccttgatga

SEQ ID NO: 809181 - DNA, 15 bp, Homo sapiens
gctttccttgatgaa

SEQ ID NO: 809182 - DNA, 15 bp, Homo sapiens
ctttccttgatgaat

SEQ ID NO: 809183 - DNA, 15 bp, Homo sapiens
tttccttgatgaata

SEQ ID NO: 809184 - DNA, 15 bp, Homo sapiens
ttccttgatgaatac

SEQ ID NO: 809185 - DNA, 15 bp, Homo sapiens
tccttgatgaataca

SEQ ID NO: 809186 - DNA, 15 bp, Homo sapiens
ccttgatgaatacat

SEQ ID NO: 809187 - DNA, 15 bp, Homo sapiens
cttgatgaatacatt

SEQ ID NO: 809188 - DNA, 15 bp, Homo sapiens
ttgatgaatacatta

SEQ ID NO: 809189 - DNA, 15 bp, Homo sapiens
tgatgaatacattag

SEQ ID NO: 809190 - DNA, 15 bp, Homo sapiens
gatgaatacattagt

SEQ ID NO: 809191 - DNA, 15 bp, Homo sapiens
atgaatacattagtt

SEQ ID NO: 809192 - DNA, 15 bp, Homo sapiens
tgaatacattagttt

SEQ ID NO: 809193 - DNA, 15 bp, Homo sapiens
gaatacattagtttt

SEQ ID NO: 809194 - DNA, 15 bp, Homo sapiens
aatacattagtttta

SEQ ID NO: 809195 - DNA, 15 bp, Homo sapiens
atacattagttttaa

SEQ ID NO: 809196 - DNA, 15 bp, Homo sapiens
tacattagttttaag

SEQ ID NO: 809197 - DNA, 15 bp, Homo sapiens
acattagttttaagg

SEQ ID NO: 809198 - DNA, 15 bp, Homo sapiens
cattagttttaaggt

SEQ ID NO: 809199 - DNA, 15 bp, Homo sapiens
attagttttaaggtg

SEQ ID NO: 809200 - DNA, 15 bp, Homo sapiens
ttagttttaaggtgc

SEQ ID NO: 809201 - DNA, 15 bp, Homo sapiens
tagttttaaggtgcc

SEQ ID NO: 809202 - DNA, 15 bp, Homo sapiens
agttttaaggtgcca

SEQ ID NO: 809203 - DNA, 15 bp, Homo sapiens
gttttaaggtgccac

SEQ ID NO: 809204 - DNA, 15 bp, Homo sapiens
ttttaaggtgccaca

SEQ ID NO: 809205 - DNA, 15 bp, Homo sapiens
tttaaggtgccacag

SEQ ID NO: 809206 - DNA, 15 bp, Homo sapiens
ttaaggtgccacagt

SEQ ID NO: 809207 - DNA, 15 bp, Homo sapiens
taaggtgccacagtt

SEQ ID NO: 809208 - DNA, 15 bp, Homo sapiens
aaggtgccacagttc

SEQ ID NO: 809209 - DNA, 15 bp, Homo sapiens
aggtgccacagttca

SEQ ID NO: 809210 - DNA, 15 bp, Homo sapiens
ggtgccacagttcag

SEQ ID NO: 809211 - DNA, 15 bp, Homo sapiens
gtgccacagttcagt

SEQ ID NO: 809212 - DNA, 15 bp, Homo sapiens
tgccacagttcagtc

SEQ ID NO: 809213 - DNA, 15 bp, Homo sapiens
gccacagttcagtcc

SEQ ID NO: 809214 - DNA, 15 bp, Homo sapiens
ccacagttcagtcca

SEQ ID NO: 809215 - DNA, 15 bp, Homo sapiens
cacagttcagtccac

SEQ ID NO: 809216 - DNA, 15 bp, Homo sapiens
acagttcagtccaca

SEQ ID NO: 809217 - DNA, 15 bp, Homo sapiens
cagttcagtccacat

SEQ ID NO: 809218 - DNA, 15 bp, Homo sapiens
agttcagtccacatc

SEQ ID NO: 809219 - DNA, 15 bp, Homo sapiens
gttcagtccacatct

SEQ ID NO: 809220 - DNA, 15 bp, Homo sapiens
ttcagtccacatctc

SEQ ID NO: 809221 - DNA, 15 bp, Homo sapiens
tcagtccacatctcc

SEQ ID NO: 809222 - DNA, 15 bp, Homo sapiens
cagtccacatctcca

SEQ ID NO: 809223 - DNA, 15 bp, Homo sapiens
agtccacatctccat

SEQ ID NO: 809224 - DNA, 15 bp, Homo sapiens
gtccacatctccatg

SEQ ID NO: 809225 - DNA, 15 bp, Homo sapiens
tccacatctccatgg

SEQ ID NO: 809226 - DNA, 15 bp, Homo sapiens
ccacatctccatggt

SEQ ID NO: 809227 - DNA, 15 bp, Homo sapiens
cacatctccatggtc

SEQ ID NO: 809228 - DNA, 15 bp, Homo sapiens
acatctccatggtct

SEQ ID NO: 809229 - DNA, 15 bp, Homo sapiens
catctccatggtctg

SEQ ID NO: 809230 - DNA, 15 bp, Homo sapiens
atctccatggtctgc

SEQ ID NO: 809231 - DNA, 15 bp, Homo sapiens
tctccatggtctgct

SEQ ID NO: 809232 - DNA, 15 bp, Homo sapiens
ctccatggtctgctg

SEQ ID NO: 809233 - DNA, 15 bp, Homo sapiens
tccatggtctgctgc

SEQ ID NO: 809234 - DNA, 15 bp, Homo sapiens
ccatggtctgctgct

SEQ ID NO: 809235 - DNA, 15 bp, Homo sapiens
catggtctgctgctg

SEQ ID NO: 809236 - DNA, 15 bp, Homo sapiens
atggtctgctgctga

SEQ ID NO: 809237 - DNA, 15 bp, Homo sapiens
tggtctgctgctgat

SEQ ID NO: 809238 - DNA, 15 bp, Homo sapiens
ggtctgctgctgatt

SEQ ID NO: 809239 - DNA, 15 bp, Homo sapiens
gtctgctgctgattt

SEQ ID NO: 809240 - DNA, 15 bp, Homo sapiens
tctgctgctgatttt

SEQ ID NO: 809241 - DNA, 15 bp, Homo sapiens
ctgctgctgattttt

SEQ ID NO: 809242 - DNA, 15 bp, Homo sapiens
tgctgctgattttta

SEQ ID NO: 809243 - DNA, 15 bp, Homo sapiens
gctgctgatttttat

SEQ ID NO: 809244 - DNA, 15 bp, Homo sapiens
ctgctgatttttatt

SEQ ID NO: 809245 - DNA, 15 bp, Homo sapiens
tgctgatttttattc

SEQ ID NO: 809246 - DNA, 15 bp, Homo sapiens
gctgatttttattct

SEQ ID NO: 809247 - DNA, 15 bp, Homo sapiens
ctgatttttattctc

SEQ ID NO: 809248 - DNA, 15 bp, Homo sapiens
tgatttttattctct

SEQ ID NO: 809249 - DNA, 15 bp, Homo sapiens
gatttttattctctt

SEQ ID NO: 809250 - DNA, 15 bp, Homo sapiens
atttttattctcttt

SEQ ID NO: 809251 - DNA, 15 bp, Homo sapiens
tttttattctctttc

SEQ ID NO: 809252 - DNA, 15 bp, Homo sapiens
ttttattctctttct

SEQ ID NO: 809253 - DNA, 15 bp, Homo sapiens
tttattctctttctc

SEQ ID NO: 809254 - DNA, 15 bp, Homo sapiens
ttattctctttctct

SEQ ID NO: 809255 - DNA, 15 bp, Homo sapiens
tattctctttctctc

SEQ ID NO: 809256 - DNA, 15 bp, Homo sapiens
attctctttctctcc

SEQ ID NO: 809257 - DNA, 15 bp, Homo sapiens
ttctctttctctcct

SEQ ID NO: 809258 - DNA, 15 bp, Homo sapiens
tctctttctctccta

SEQ ID NO: 809259 - DNA, 15 bp, Homo sapiens
ctctttctctcctac

SEQ ID NO: 809260 - DNA, 15 bp, Homo sapiens
tctttctctcctact

SEQ ID NO: 809261 - DNA, 15 bp, Homo sapiens
ctttctctcctactt

SEQ ID NO: 809262 - DNA, 15 bp, Homo sapiens
tttctctcctactta

SEQ ID NO: 809263 - DNA, 15 bp, Homo sapiens
ttctctcctacttat

SEQ ID NO: 809264 - DNA, 15 bp, Homo sapiens
tctctcctacttata

SEQ ID NO: 809265 - DNA, 15 bp, Homo sapiens
ctctcctacttatag

SEQ ID NO: 809266 - DNA, 15 bp, Homo sapiens
tctcctacttataga

SEQ ID NO: 809267 - DNA, 15 bp, Homo sapiens
ctcctacttatagag

SEQ ID NO: 809268 - DNA, 15 bp, Homo sapiens
tcctacttatagagc

SEQ ID NO: 809269 - DNA, 15 bp, Homo sapiens
cctacttatagagca

SEQ ID NO: 809270 - DNA, 15 bp, Homo sapiens
ctacttatagagcag

SEQ ID NO: 809271 - DNA, 15 bp, Homo sapiens
tacttatagagcagg

SEQ ID NO: 809272 - DNA, 15 bp, Homo sapiens
acttatagagcaggt

SEQ ID NO: 809273 - DNA, 15 bp, Homo sapiens
cttatagagcaggta

SEQ ID NO: 809274 - DNA, 15 bp, Homo sapiens
ttatagagcaggtat

SEQ ID NO: 809275 - DNA, 15 bp, Homo sapiens
tatagagcaggtatc

SEQ ID NO: 809276 - DNA, 15 bp, Homo sapiens
atagagcaggtatct

SEQ ID NO: 809277 - DNA, 15 bp, Homo sapiens
tagagcaggtatctt

SEQ ID NO: 809278 - DNA, 15 bp, Homo sapiens
agagcaggtatcttg

SEQ ID NO: 809279 - DNA, 15 bp, Homo sapiens
gagcaggtatcttga

SEQ ID NO: 809280 - DNA, 15 bp, Homo sapiens
agcaggtatcttgag

SEQ ID NO: 809281 - DNA, 15 bp, Homo sapiens
gcaggtatcttgaga

SEQ ID NO: 809282 - DNA, 15 bp, Homo sapiens
caggtatcttgagaa

SEQ ID NO: 809283 - DNA, 15 bp, Homo sapiens
aggtatcttgagaag

SEQ ID NO: 809284 - DNA, 15 bp, Homo sapiens
ggtatcttgagaagc

SEQ ID NO: 809285 - DNA, 15 bp, Homo sapiens
gtatcttgagaagcc

SEQ ID NO: 809286 - DNA, 15 bp, Homo sapiens
tatcttgagaagcca

SEQ ID NO: 809287 - DNA, 15 bp, Homo sapiens
atcttgagaagccaa

SEQ ID NO: 809288 - DNA, 15 bp, Homo sapiens
tcttgagaagccaat

SEQ ID NO: 809289 - DNA, 15 bp, Homo sapiens
cttgagaagccaatg

SEQ ID NO: 809290 - DNA, 15 bp, Homo sapiens
ttgagaagccaatgg

SEQ ID NO: 809291 - DNA, 15 bp, Homo sapiens
tgagaagccaatgga

SEQ ID NO: 809292 - DNA, 15 bp, Homo sapiens
gagaagccaatggag

SEQ ID NO: 809293 - DNA, 15 bp, Homo sapiens
agaagccaatggaga

SEQ ID NO: 809294 - DNA, 15 bp, Homo sapiens
gaagccaatggagat

SEQ ID NO: 809295 - DNA, 15 bp, Homo sapiens
aagccaatggagatt

SEQ ID NO: 809296 - DNA, 15 bp, Homo sapiens
agccaatggagattg

SEQ ID NO: 809297 - DNA, 15 bp, Homo sapiens
gccaatggagattgc

SEQ ID NO: 809298 - DNA, 15 bp, Homo sapiens
ccaatggagattgcc

SEQ ID NO: 809299 - DNA, 15 bp, Homo sapiens
caatggagattgccc

SEQ ID NO: 809300 - DNA, 15 bp, Homo sapiens
aatggagattgcccg

SEQ ID NO: 809301 - DNA, 15 bp, Homo sapiens
atggagattgcccgg

SEQ ID NO: 809302 - DNA, 15 bp, Homo sapiens
tggagattgcccgga

SEQ ID NO: 809303 - DNA, 15 bp, Homo sapiens
ggagattgcccggat

SEQ ID NO: 809304 - DNA, 15 bp, Homo sapiens
gagattgcccggatt

SEQ ID NO: 809305 - DNA, 15 bp, Homo sapiens
agattgcccggattg

SEQ ID NO: 809306 - DNA, 15 bp, Homo sapiens
gattgcccggattgt

SEQ ID NO: 809307 - DNA, 15 bp, Homo sapiens
attgcccggattgtg

SEQ ID NO: 809308 - DNA, 15 bp, Homo sapiens
ttgcccggattgtgg

SEQ ID NO: 809309 - DNA, 15 bp, Homo sapiens
tgcccggattgtggc

SEQ ID NO: 809310 - DNA, 15 bp, Homo sapiens
gcccggattgtggcc

SEQ ID NO: 809311 - DNA, 15 bp, Homo sapiens
cccggattgtggccc

SEQ ID NO: 809312 - DNA, 15 bp, Homo sapiens
ccggattgtggcccg

SEQ ID NO: 809313 - DNA, 15 bp, Homo sapiens
cggattgtggcccgg

SEQ ID NO: 809314 - DNA, 15 bp, Homo sapiens
ggattgtggcccggt

SEQ ID NO: 809315 - DNA, 15 bp, Homo sapiens
gattgtggcccggtg

SEQ ID NO: 809316 - DNA, 15 bp, Homo sapiens
attgtggcccggtgc

SEQ ID NO: 809317 - DNA, 15 bp, Homo sapiens
ttgtggcccggtgcc

SEQ ID NO: 809318 - DNA, 15 bp, Homo sapiens
tgtggcccggtgcct

SEQ ID NO: 809319 - DNA, 15 bp, Homo sapiens
gtggcccggtgcctg

SEQ ID NO: 809320 - DNA, 15 bp, Homo sapiens
tggcccggtgcctgt

SEQ ID NO: 809321 - DNA, 15 bp, Homo sapiens
ggcccggtgcctgtg

SEQ ID NO: 809322 - DNA, 15 bp, Homo sapiens
gcccggtgcctgtgg

SEQ ID NO: 809323 - DNA, 15 bp, Homo sapiens
cccggtgcctgtggg

SEQ ID NO: 809324 - DNA, 15 bp, Homo sapiens
ccggtgcctgtggga

SEQ ID NO: 809325 - DNA, 15 bp, Homo sapiens
cggtgcctgtgggaa

SEQ ID NO: 809326 - DNA, 15 bp, Homo sapiens
ggtgcctgtgggaag

SEQ ID NO: 809327 - DNA, 15 bp, Homo sapiens
gtgcctgtgggaaga

SEQ ID NO: 809328 - DNA, 15 bp, Homo sapiens
tgcctgtgggaagaa

SEQ ID NO: 809329 - DNA, 15 bp, Homo sapiens
gcctgtgggaagaat

SEQ ID NO: 809330 - DNA, 15 bp, Homo sapiens
cctgtgggaagaatc

SEQ ID NO: 809331 - DNA, 15 bp, Homo sapiens
ctgtgggaagaatca

SEQ ID NO: 809332 - DNA, 15 bp, Homo sapiens
tgtgggaagaatcac

SEQ ID NO: 809333 - DNA, 15 bp, Homo sapiens
gtgggaagaatcacg

SEQ ID NO: 809334 - DNA, 15 bp, Homo sapiens
tgggaagaatcacgc

SEQ ID NO: 809335 - DNA, 15 bp, Homo sapiens
gggaagaatcacgcc

SEQ ID NO: 809336 - DNA, 15 bp, Homo sapiens
ggaagaatcacgcct

SEQ ID NO: 809337 - DNA, 15 bp, Homo sapiens
gaagaatcacgcctt

SEQ ID NO: 809338 - DNA, 15 bp, Homo sapiens
aagaatcacgccttc

SEQ ID NO: 809339 - DNA, 15 bp, Homo sapiens
agaatcacgccttct

SEQ ID NO: 809340 - DNA, 15 bp, Homo sapiens
gaatcacgccttcta

SEQ ID NO: 809341 - DNA, 15 bp, Homo sapiens
aatcacgccttctac

SEQ ID NO: 809342 - DNA, 15 bp, Homo sapiens
atcacgccttctaca

SEQ ID NO: 809343 - DNA, 15 bp, Homo sapiens
tcacgccttctacag

SEQ ID NO: 809344 - DNA, 15 bp, Homo sapiens
cacgccttctacaga

SEQ ID NO: 809345 - DNA, 15 bp, Homo sapiens
acgccttctacagac

SEQ ID NO: 809346 - DNA, 15 bp, Homo sapiens
cgccttctacagact

SEQ ID NO: 809347 - DNA, 15 bp, Homo sapiens
gccttctacagactg

SEQ ID NO: 809348 - DNA, 15 bp, Homo sapiens
ccttctacagactgc

SEQ ID NO: 809349 - DNA, 15 bp, Homo sapiens
cttctacagactgca

SEQ ID NO: 809350 - DNA, 15 bp, Homo sapiens
ttctacagactgcag

SEQ ID NO: 809351 - DNA, 15 bp, Homo sapiens
tctacagactgcagc

SEQ ID NO: 809352 - DNA, 15 bp, Homo sapiens
ctacagactgcagcc

SEQ ID NO: 809353 - DNA, 15 bp, Homo sapiens
tacagactgcagcca

SEQ ID NO: 809354 - DNA, 15 bp, Homo sapiens
acagactgcagccac

SEQ ID NO: 809355 - DNA, 15 bp, Homo sapiens
cagactgcagccact

SEQ ID NO: 809356 - DNA, 15 bp, Homo sapiens
agactgcagccactg

SEQ ID NO: 809357 - DNA, 15 bp, Homo sapiens
gactgcagccactgc

SEQ ID NO: 809358 - DNA, 15 bp, Homo sapiens
actgcagccactgcg

SEQ ID NO: 809359 - DNA, 15 bp, Homo sapiens
ctgcagccactgcgg

SEQ ID NO: 809360 - DNA, 15 bp, Homo sapiens
tgcagccactgcggc

SEQ ID NO: 809361 - DNA, 15 bp, Homo sapiens
gcagccactgcggcc

SEQ ID NO: 809362 - DNA, 15 bp, Homo sapiens
cagccactgcggccc

SEQ ID NO: 809363 - DNA, 15 bp, Homo sapiens
agccactgcggccca

SEQ ID NO: 809364 - DNA, 15 bp, Homo sapiens
gccactgcggcccag

SEQ ID NO: 809365 - DNA, 15 bp, Homo sapiens
ccactgcggcccagg

SEQ ID NO: 809366 - DNA, 15 bp, Homo sapiens
cactgcggcccaggt

SEQ ID NO: 809367 - DNA, 15 bp, Homo sapiens
actgcggcccaggtg

SEQ ID NO: 809368 - DNA, 15 bp, Homo sapiens
ctgcggcccaggtga

SEQ ID NO: 809369 - DNA, 15 bp, Homo sapiens
tgcggcccaggtgag

SEQ ID NO: 809370 - DNA, 15 bp, Homo sapiens
gcggcccaggtgaga

SEQ ID NO: 809371 - DNA, 15 bp, Homo sapiens
cggcccaggtgagac

SEQ ID NO: 809372 - DNA, 15 bp, Homo sapiens
ggcccaggtgagacc

SEQ ID NO: 809373 - DNA, 15 bp, Homo sapiens
gcccaggtgagacct

SEQ ID NO: 809374 - DNA, 15 bp, Homo sapiens
cccaggtgagacctg

SEQ ID NO: 809375 - DNA, 15 bp, Homo sapiens
ccaggtgagacctga

SEQ ID NO: 809376 - DNA, 15 bp, Homo sapiens
caggtgagacctgag

SEQ ID NO: 809377 - DNA, 15 bp, Homo sapiens
aggtgagacctgaga

SEQ ID NO: 809378 - DNA, 15 bp, Homo sapiens
ggtgagacctgagac

SEQ ID NO: 809379 - DNA, 15 bp, Homo sapiens
gtgagacctgagaca

SEQ ID NO: 809380 - DNA, 15 bp, Homo sapiens
tgagacctgagacaa

SEQ ID NO: 809381 - DNA, 15 bp, Homo sapiens
gagacctgagacaaa

SEQ ID NO: 809382 - DNA, 15 bp, Homo sapiens
agacctgagacaaaa

SEQ ID NO: 809383 - DNA, 15 bp, Homo sapiens
gacctgagacaaaac

SEQ ID NO: 809384 - DNA, 15 bp, Homo sapiens
acctgagacaaaaca

SEQ ID NO: 809385 - DNA, 15 bp, Homo sapiens
cctgagacaaaacaa

SEQ ID NO: 809386 - DNA, 15 bp, Homo sapiens
ctgagacaaaacaaa

SEQ ID NO: 809387 - DNA, 15 bp, Homo sapiens
tgagacaaaacaaat

SEQ ID NO: 809388 - DNA, 15 bp, Homo sapiens
gagacaaaacaaatc

SEQ ID NO: 809389 - DNA, 15 bp, Homo sapiens
agacaaaacaaatcc

SEQ ID NO: 809390 - DNA, 15 bp, Homo sapiens
gacaaaacaaatccc

SEQ ID NO: 809391 - DNA, 15 bp, Homo sapiens
acaaaacaaatccct

SEQ ID NO: 809392 - DNA, 15 bp, Homo sapiens
caaaacaaatccctg

SEQ ID NO: 809393 - DNA, 15 bp, Homo sapiens
aaaacaaatccctgg

SEQ ID NO: 809394 - DNA, 15 bp, Homo sapiens
aaacaaatccctggt

SEQ ID NO: 809395 - DNA, 15 bp, Homo sapiens
aacaaatccctggtc

SEQ ID NO: 809396 - DNA, 15 bp, Homo sapiens
acaaatccctggtct

SEQ ID NO: 809397 - DNA, 15 bp, Homo sapiens
caaatccctggtctg

SEQ ID NO: 809398 - DNA, 15 bp, Homo sapiens
aaatccctggtctgg

SEQ ID NO: 809399 - DNA, 15 bp, Homo sapiens
aatccctggtctggg

SEQ ID NO: 809400 - DNA, 15 bp, Homo sapiens
atccctggtctggga

SEQ ID NO: 809401 - DNA, 15 bp, Homo sapiens
tccctggtctgggag

SEQ ID NO: 809402 - DNA, 15 bp, Homo sapiens
ccctggtctgggagg

SEQ ID NO: 809403 - DNA, 15 bp, Homo sapiens
cctggtctgggagga

SEQ ID NO: 809404 - DNA, 15 bp, Homo sapiens
ctggtctgggaggaa

SEQ ID NO: 809405 - DNA, 15 bp, Homo sapiens
tggtctgggaggaat

SEQ ID NO: 809406 - DNA, 15 bp, Homo sapiens
ggtctgggaggaatg

SEQ ID NO: 809407 - DNA, 15 bp, Homo sapiens
gtctgggaggaatgg

SEQ ID NO: 809408 - DNA, 15 bp, Homo sapiens
tctgggaggaatgga

SEQ ID NO: 809409 - DNA, 15 bp, Homo sapiens
ctgggaggaatggaa

SEQ ID NO: 809410 - DNA, 15 bp, Homo sapiens
tgggaggaatggaaa

SEQ ID NO: 809411 - DNA, 15 bp, Homo sapiens
gggaggaatggaaaa

SEQ ID NO: 809412 - DNA, 15 bp, Homo sapiens
ggaggaatggaaaat

SEQ ID NO: 809413 - DNA, 15 bp, Homo sapiens
gaggaatggaaaatc

SEQ ID NO: 809414 - DNA, 15 bp, Homo sapiens
aggaatggaaaatca

SEQ ID NO: 809415 - DNA, 15 bp, Homo sapiens
ggaatggaaaatcaa

SEQ ID NO: 809416 - DNA, 15 bp, Homo sapiens
gaatggaaaatcaaa

SEQ ID NO: 809417 - DNA, 15 bp, Homo sapiens
aatggaaaatcaaac

SEQ ID NO: 809418 - DNA, 15 bp, Homo sapiens
atggaaaatcaaaca

SEQ ID NO: 809419 - DNA, 15 bp, Homo sapiens
tggaaaatcaaacaa

SEQ ID NO: 809420 - DNA, 15 bp, Homo sapiens
ggaaaatcaaacaac

SEQ ID NO: 809421 - DNA, 15 bp, Homo sapiens
gaaaatcaaacaact

SEQ ID NO: 809422 - DNA, 15 bp, Homo sapiens
aaaatcaaacaactt

SEQ ID NO: 809423 - DNA, 15 bp, Homo sapiens
aaatcaaacaacttt

SEQ ID NO: 809424 - DNA, 15 bp, Homo sapiens
aatcaaacaacttta

SEQ ID NO: 809425 - DNA, 15 bp, Homo sapiens
atcaaacaactttat

SEQ ID NO: 809426 - DNA, 15 bp, Homo sapiens
tcaaacaactttata

SEQ ID NO: 809427 - DNA, 15 bp, Homo sapiens
caaacaactttataa

SEQ ID NO: 809428 - DNA, 15 bp, Homo sapiens
aaacaactttataat

SEQ ID NO: 809429 - DNA, 15 bp, Homo sapiens
aacaactttataatg

SEQ ID NO: 809430 - DNA, 15 bp, Homo sapiens
acaactttataatga

SEQ ID NO: 809431 - DNA, 15 bp, Homo sapiens
caactttataatgag

SEQ ID NO: 809432 - DNA, 15 bp, Homo sapiens
aactttataatgaga

SEQ ID NO: 809433 - DNA, 15 bp, Homo sapiens
actttataatgagat

SEQ ID NO: 809434 - DNA, 15 bp, Homo sapiens
ctttataatgagata

SEQ ID NO: 809435 - DNA, 15 bp, Homo sapiens
tttataatgagataa

SEQ ID NO: 809436 - DNA, 15 bp, Homo sapiens
ttataatgagataaa

SEQ ID NO: 809437 - DNA, 15 bp, Homo sapiens
tataatgagataaat

SEQ ID NO: 809438 - DNA, 15 bp, Homo sapiens
ataatgagataaatt

SEQ ID NO: 809439 - DNA, 15 bp, Homo sapiens
taatgagataaatta

SEQ ID NO: 809440 - DNA, 15 bp, Homo sapiens
aatgagataaattat

SEQ ID NO: 809441 - DNA, 15 bp, Homo sapiens
atgagataaattatt

SEQ ID NO: 809442 - DNA, 15 bp, Homo sapiens
tgagataaattatta

SEQ ID NO: 809443 - DNA, 15 bp, Homo sapiens
gagataaattattag

SEQ ID NO: 809444 - DNA, 15 bp, Homo sapiens
agataaattattaga

SEQ ID NO: 809445 - DNA, 15 bp, Homo sapiens
gataaattattagat

SEQ ID NO: 809446 - DNA, 15 bp, Homo sapiens
ataaattattagatc

SEQ ID NO: 809447 - DNA, 15 bp, Homo sapiens
taaattattagatct

SEQ ID NO: 809448 - DNA, 15 bp, Homo sapiens
aaattattagatcta

SEQ ID NO: 809449 - DNA, 15 bp, Homo sapiens
aattattagatctac

SEQ ID NO: 809450 - DNA, 15 bp, Homo sapiens
attattagatctact

SEQ ID NO: 809451 - DNA, 15 bp, Homo sapiens
ttattagatctacta

SEQ ID NO: 809452 - DNA, 15 bp, Homo sapiens
tattagatctactaa

SEQ ID NO: 809453 - DNA, 15 bp, Homo sapiens
attagatctactaaa

SEQ ID NO: 809454 - DNA, 15 bp, Homo sapiens
ttagatctactaaaa

SEQ ID NO: 809455 - DNA, 15 bp, Homo sapiens
tagatctactaaaaa

SEQ ID NO: 809456 - DNA, 15 bp, Homo sapiens
agatctactaaaaaa

SEQ ID NO: 809457 - DNA, 15 bp, Homo sapiens
gatctactaaaaaag

SEQ ID NO: 809458 - DNA, 15 bp, Homo sapiens
atctactaaaaaaga

SEQ ID NO: 809459 - DNA, 15 bp, Homo sapiens
tctactaaaaaagaa

SEQ ID NO: 809460 - DNA, 15 bp, Homo sapiens
ctactaaaaaagaag

SEQ ID NO: 809461 - DNA, 15 bp, Homo sapiens
tactaaaaaagaagg

SEQ ID NO: 809462 - DNA, 15 bp, Homo sapiens
actaaaaaagaagga

SEQ ID NO: 809463 - DNA, 15 bp, Homo sapiens
ctaaaaaagaaggaa

SEQ ID NO: 809464 - DNA, 15 bp, Homo sapiens
taaaaaagaaggaaa

SEQ ID NO: 809465 - DNA, 15 bp, Homo sapiens
aaaaaagaaggaaaa

SEQ ID NO: 809466 - DNA, 15 bp, Homo sapiens
aaaaagaaggaaaag

SEQ ID NO: 809467 - DNA, 15 bp, Homo sapiens
aaaagaaggaaaaga

SEQ ID NO: 809468 - DNA, 15 bp, Homo sapiens
aaagaaggaaaagaa

SEQ ID NO: 809469 - DNA, 15 bp, Homo sapiens
aagaaggaaaagaaa

SEQ ID NO: 809470 - DNA, 15 bp, Homo sapiens
agaaggaaaagaaat

SEQ ID NO: 809471 - DNA, 15 bp, Homo sapiens
gaaggaaaagaaatt

SEQ ID NO: 809472 - DNA, 15 bp, Homo sapiens
aaggaaaagaaatta

SEQ ID NO: 809473 - DNA, 15 bp, Homo sapiens
aggaaaagaaattaa

SEQ ID NO: 809474 - DNA, 15 bp, Homo sapiens
ggaaaagaaattaaa

SEQ ID NO: 809475 - DNA, 15 bp, Homo sapiens
gaaaagaaattaaat

SEQ ID NO: 809476 - DNA, 15 bp, Homo sapiens
aaaagaaattaaata

SEQ ID NO: 809477 - DNA, 15 bp, Homo sapiens
aaagaaattaaatag

SEQ ID NO: 809478 - DNA, 15 bp, Homo sapiens
aagaaattaaataga

SEQ ID NO: 809479 - DNA, 15 bp, Homo sapiens
agaaattaaatagat

SEQ ID NO: 809480 - DNA, 15 bp, Homo sapiens
gaaattaaatagatc

SEQ ID NO: 809481 - DNA, 15 bp, Homo sapiens
aaattaaatagatca

SEQ ID NO: 809482 - DNA, 15 bp, Homo sapiens
aattaaatagatcaa

SEQ ID NO: 809483 - DNA, 15 bp, Homo sapiens
attaaatagatcaat

SEQ ID NO: 809484 - DNA, 15 bp, Homo sapiens
ttaaatagatcaata

SEQ ID NO: 809485 - DNA, 15 bp, Homo sapiens
taaatagatcaataa

SEQ ID NO: 809486 - DNA, 15 bp, Homo sapiens
aaatagatcaataat

SEQ ID NO: 809487 - DNA, 15 bp, Homo sapiens
aatagatcaataatc

SEQ ID NO: 809488 - DNA, 15 bp, Homo sapiens
atagatcaataatca

SEQ ID NO: 809489 - DNA, 15 bp, Homo sapiens
tagatcaataatcat

SEQ ID NO: 809490 - DNA, 15 bp, Homo sapiens
agatcaataatcata

SEQ ID NO: 809491 - DNA, 15 bp, Homo sapiens
gatcaataatcataa

SEQ ID NO: 809492 - DNA, 15 bp, Homo sapiens
atcaataatcataaa

SEQ ID NO: 809493 - DNA, 15 bp, Homo sapiens
tcaataatcataaaa

SEQ ID NO: 809494 - DNA, 15 bp, Homo sapiens
caataatcataaaaa

SEQ ID NO: 809495 - DNA, 15 bp, Homo sapiens
aataatcataaaaat

SEQ ID NO: 809496 - DNA, 15 bp, Homo sapiens
ataatcataaaaata

SEQ ID NO: 809497 - DNA, 15 bp, Homo sapiens
taatcataaaaatac

SEQ ID NO: 809498 - DNA, 15 bp, Homo sapiens
aatcataaaaataca

SEQ ID NO: 809499 - DNA, 15 bp, Homo sapiens
atcataaaaatacat

SEQ ID NO: 809500 - DNA, 15 bp, Homo sapiens
tcataaaaatacatt

SEQ ID NO: 809501 - DNA, 15 bp, Homo sapiens
cataaaaatacattg

SEQ ID NO: 809502 - DNA, 15 bp, Homo sapiens
ataaaaatacattga

SEQ ID NO: 809503 - DNA, 15 bp, Homo sapiens
taaaaatacattgaa

SEQ ID NO: 809504 - DNA, 15 bp, Homo sapiens
aaaaatacattgaaa

SEQ ID NO: 809505 - DNA, 15 bp, Homo sapiens
aaaatacattgaaaa

SEQ ID NO: 809506 - DNA, 15 bp, Homo sapiens
aaatacattgaaaaa

SEQ ID NO: 809507 - DNA, 15 bp, Homo sapiens
aatacattgaaaaac

SEQ ID NO: 809508 - DNA, 15 bp, Homo sapiens
atacattgaaaaact

SEQ ID NO: 809509 - DNA, 15 bp, Homo sapiens
tacattgaaaaactc

SEQ ID NO: 809510 - DNA, 15 bp, Homo sapiens
acattgaaaaactct

SEQ ID NO: 809511 - DNA, 15 bp, Homo sapiens
cattgaaaaactcta

SEQ ID NO: 809512 - DNA, 15 bp, Homo sapiens
attgaaaaactctaa

SEQ ID NO: 809513 - DNA, 15 bp, Homo sapiens
ttgaaaaactctaaa

SEQ ID NO: 809514 - DNA, 15 bp, Homo sapiens
tgaaaaactctaaaa

SEQ ID NO: 809515 - DNA, 15 bp, Homo sapiens
gaaaaactctaaaaa

SEQ ID NO: 809516 - DNA, 15 bp, Homo sapiens
aaaaactctaaaaaa

SEQ ID NO: 809517 - DNA, 15 bp, Homo sapiens
aaaactctaaaaaaa

SEQ ID NO: 809518 - DNA, 15 bp, Homo sapiens
aaactctaaaaaaaa

SEQ ID NO: 809519 - DNA, 15 bp, Homo sapiens
aactctaaaaaaaaa

SEQ ID NO: 809520 - DNA, 15 bp, Homo sapiens
actctaaaaaaaaag

SEQ ID NO: 809521 - DNA, 15 bp, Homo sapiens
ctctaaaaaaaaaga

SEQ ID NO: 809522 - DNA, 15 bp, Homo sapiens
tctaaaaaaaaagaa

SEQ ID NO: 809523 - DNA, 15 bp, Homo sapiens
ctaaaaaaaaagaaa

SEQ ID NO: 809524 - DNA, 15 bp, Homo sapiens
taaaaaaaaagaaag

SEQ ID NO: 809525 - DNA, 15 bp, Homo sapiens
aaaaaaaaagaaagt

SEQ ID NO: 809526 - DNA, 15 bp, Homo sapiens
aaaaaaaagaaagtt

SEQ ID NO: 809527 - DNA, 15 bp, Homo sapiens
aaaaaaagaaagttc

SEQ ID NO: 809528 - DNA, 15 bp, Homo sapiens
aaaaaagaaagttcc

SEQ ID NO: 809529 - DNA, 15 bp, Homo sapiens
aaaaagaaagttcca

SEQ ID NO: 809530 - DNA, 15 bp, Homo sapiens
aaaagaaagttccac

SEQ ID NO: 809531 - DNA, 15 bp, Homo sapiens
aaagaaagttccacc

SEQ ID NO: 809532 - DNA, 15 bp, Homo sapiens
aagaaagttccaccc

SEQ ID NO: 809533 - DNA, 15 bp, Homo sapiens
agaaagttccacccc

SEQ ID NO: 809534 - DNA, 15 bp, Homo sapiens
gaaagttccaccccc

SEQ ID NO: 809535 - DNA, 15 bp, Homo sapiens
aaagttccacccccc

SEQ ID NO: 809536 - DNA, 15 bp, Homo sapiens
aagttccacccccca

SEQ ID NO: 809537 - DNA, 15 bp, Homo sapiens
agttccaccccccaa

SEQ ID NO: 809538 - DNA, 15 bp, Homo sapiens
gttccaccccccaaa

SEQ ID NO: 809539 - DNA, 15 bp, Homo sapiens
ttccaccccccaaaa

SEQ ID NO: 809540 - DNA, 15 bp, Homo sapiens
tccaccccccaaaat

SEQ ID NO: 809541 - DNA, 15 bp, Homo sapiens
ccaccccccaaaata

SEQ ID NO: 809542 - DNA, 15 bp, Homo sapiens
caccccccaaaatac

SEQ ID NO: 809543 - DNA, 15 bp, Homo sapiens
accccccaaaataca

SEQ ID NO: 809544 - DNA, 15 bp, Homo sapiens
ccccccaaaatacat

SEQ ID NO: 809545 - DNA, 15 bp, Homo sapiens
cccccaaaatacatt

SEQ ID NO: 809546 - DNA, 15 bp, Homo sapiens
ccccaaaatacattg

SEQ ID NO: 809547 - DNA, 15 bp, Homo sapiens
cccaaaatacattga

SEQ ID NO: 809548 - DNA, 15 bp, Homo sapiens
ccaaaatacattgaa

SEQ ID NO: 809549 - DNA, 15 bp, Homo sapiens
caaaatacattgaaa

SEQ ID NO: 809550 - DNA, 15 bp, Homo sapiens
aactctaaaaaaaag

SEQ ID NO: 809551 - DNA, 15 bp, Homo sapiens
actctaaaaaaaaga

SEQ ID NO: 809552 - DNA, 15 bp, Homo sapiens
ctctaaaaaaaagaa

SEQ ID NO: 809553 - DNA, 15 bp, Homo sapiens
tctaaaaaaaagaaa

SEQ ID NO: 809554 - DNA, 15 bp, Homo sapiens
ctaaaaaaaagaaag

SEQ ID NO: 809555 - DNA, 15 bp, Homo sapiens
taaaaaaaagaaagt

SEQ ID NO: 809556 - DNA, 15 bp, Homo sapiens
aagaaagttccacca

SEQ ID NO: 809557 - DNA, 15 bp, Homo sapiens
agaaagttccaccaa

SEQ ID NO: 809558 - DNA, 15 bp, Homo sapiens
gaaagttccaccaaa

SEQ ID NO: 809559 - DNA, 15 bp, Homo sapiens
aaagttccaccaaaa

SEQ ID NO: 809560 - DNA, 15 bp, Homo sapiens
aagttccaccaaaag

SEQ ID NO: 809561 - DNA, 15 bp, Homo sapiens
agttccaccaaaaga

SEQ ID NO: 809562 - DNA, 15 bp, Homo sapiens
gttccaccaaaagaa

SEQ ID NO: 809563 - DNA, 15 bp, Homo sapiens
ttccaccaaaagaat

SEQ ID NO: 809564 - DNA, 15 bp, Homo sapiens
tccaccaaaagaatc

SEQ ID NO: 809565 - DNA, 15 bp, Homo sapiens
ccaccaaaagaatcc

SEQ ID NO: 809566 - DNA, 15 bp, Homo sapiens
caccaaaagaatcca

SEQ ID NO: 809567 - DNA, 15 bp, Homo sapiens
accaaaagaatccaa

SEQ ID NO: 809568 - DNA, 15 bp, Homo sapiens
ccaaaagaatccaac

SEQ ID NO: 809569 - DNA, 15 bp, Homo sapiens
caaaagaatccaaca

SEQ ID NO: 809570 - DNA, 15 bp, Homo sapiens
aaaagaatccaacag

SEQ ID NO: 809571 - DNA, 15 bp, Homo sapiens
aaagaatccaacaga

SEQ ID NO: 809572 - DNA, 15 bp, Homo sapiens
aagaatccaacagac

SEQ ID NO: 809573 - DNA, 15 bp, Homo sapiens
agaatccaacagacc

SEQ ID NO: 809574 - DNA, 15 bp, Homo sapiens
gaatccaacagaccc

SEQ ID NO: 809575 - DNA, 15 bp, Homo sapiens
aatccaacagaccca

SEQ ID NO: 809576 - DNA, 15 bp, Homo sapiens
atccaacagacccaa

SEQ ID NO: 809577 - DNA, 15 bp, Homo sapiens
tccaacagacccaat

SEQ ID NO: 809578 - DNA, 15 bp, Homo sapiens
ccaacagacccaatg

SEQ ID NO: 809579 - DNA, 15 bp, Homo sapiens
caacagacccaatgg

SEQ ID NO: 809580 - DNA, 15 bp, Homo sapiens
aacagacccaatggt

SEQ ID NO: 809581 - DNA, 15 bp, Homo sapiens
acagacccaatggtt

SEQ ID NO: 809582 - DNA, 15 bp, Homo sapiens
cagacccaatggttt

SEQ ID NO: 809583 - DNA, 15 bp, Homo sapiens
agacccaatggttta

SEQ ID NO: 809584 - DNA, 15 bp, Homo sapiens
gacccaatggtttaa

SEQ ID NO: 809585 - DNA, 15 bp, Homo sapiens
acccaatggtttaaa

SEQ ID NO: 809586 - DNA, 15 bp, Homo sapiens
cccaatggtttaaaa

SEQ ID NO: 809587 - DNA, 15 bp, Homo sapiens
ccaatggtttaaaag

SEQ ID NO: 809588 - DNA, 15 bp, Homo sapiens
caatggtttaaaagt

SEQ ID NO: 809589 - DNA, 15 bp, Homo sapiens
aatggtttaaaagtt

SEQ ID NO: 809590 - DNA, 15 bp, Homo sapiens
atggtttaaaagttt

SEQ ID NO: 809591 - DNA, 15 bp, Homo sapiens
tggtttaaaagtttt

SEQ ID NO: 809592 - DNA, 15 bp, Homo sapiens
ggtttaaaagttttg

SEQ ID NO: 809593 - DNA, 15 bp, Homo sapiens
gtttaaaagttttgt

SEQ ID NO: 809594 - DNA, 15 bp, Homo sapiens
tttaaaagttttgtt

SEQ ID NO: 809595 - DNA, 15 bp, Homo sapiens
ttaaaagttttgttt

SEQ ID NO: 809596 - DNA, 15 bp, Homo sapiens
taaaagttttgtttt

SEQ ID NO: 809597 - DNA, 15 bp, Homo sapiens
aaaagttttgttttg

SEQ ID NO: 809598 - DNA, 15 bp, Homo sapiens
aaagttttgttttgt

SEQ ID NO: 809599 - DNA, 15 bp, Homo sapiens
aagttttgttttgtt

SEQ ID NO: 809600 - DNA, 15 bp, Homo sapiens
agttttgttttgttc

SEQ ID NO: 809601 - DNA, 15 bp, Homo sapiens
gttttgttttgttct

SEQ ID NO: 809602 - DNA, 15 bp, Homo sapiens
ttttgttttgttctg

SEQ ID NO: 809603 - DNA, 15 bp, Homo sapiens
tttgttttgttctga

SEQ ID NO: 809604 - DNA, 15 bp, Homo sapiens
ttgttttgttctgac

SEQ ID NO: 809605 - DNA, 15 bp, Homo sapiens
tgttttgttctgaca

SEQ ID NO: 809606 - DNA, 15 bp, Homo sapiens
gttttgttctgacaa

SEQ ID NO: 809607 - DNA, 15 bp, Homo sapiens
ttttgttctgacaaa

SEQ ID NO: 809608 - DNA, 15 bp, Homo sapiens
tttgttctgacaaat

SEQ ID NO: 809609 - DNA, 15 bp, Homo sapiens
ttgttctgacaaatt

SEQ ID NO: 809610 - DNA, 15 bp, Homo sapiens
tgttctgacaaattt

SEQ ID NO: 809611 - DNA, 15 bp, Homo sapiens
gttctgacaaatttt

SEQ ID NO: 809612 - DNA, 15 bp, Homo sapiens
ttctgacaaattttc

SEQ ID NO: 809613 - DNA, 15 bp, Homo sapiens
tctgacaaattttct

SEQ ID NO: 809614 - DNA, 15 bp, Homo sapiens
ctgacaaattttctt

SEQ ID NO: 809615 - DNA, 15 bp, Homo sapiens
tgacaaattttcttt

SEQ ID NO: 809616 - DNA, 15 bp, Homo sapiens
gacaaattttctttg

SEQ ID NO: 809617 - DNA, 15 bp, Homo sapiens
acaaattttctttgt

SEQ ID NO: 809618 - DNA, 15 bp, Homo sapiens
caaattttctttgtt

SEQ ID NO: 809619 - DNA, 15 bp, Homo sapiens
aaattttctttgttt

SEQ ID NO: 809620 - DNA, 15 bp, Homo sapiens
aattttctttgtttt

SEQ ID NO: 809621 - DNA, 15 bp, Homo sapiens
attttctttgttttt

SEQ ID NO: 809622 - DNA, 15 bp, Homo sapiens
ttttctttgtttttc

SEQ ID NO: 809623 - DNA, 15 bp, Homo sapiens
tttctttgtttttct

SEQ ID NO: 809624 - DNA, 15 bp, Homo sapiens
ttctttgtttttctt

SEQ ID NO: 809625 - DNA, 15 bp, Homo sapiens
tctttgtttttcttt

SEQ ID NO: 809626 - DNA, 15 bp, Homo sapiens
ctttgtttttctttt

SEQ ID NO: 809627 - DNA, 15 bp, Homo sapiens
tttgtttttcttttt

SEQ ID NO: 809628 - DNA, 15 bp, Homo sapiens
ttgtttttctttttt

SEQ ID NO: 809629 - DNA, 15 bp, Homo sapiens
tgtttttcttttttt

SEQ ID NO: 809630 - DNA, 15 bp, Homo sapiens
gtttttctttttttt

SEQ ID NO: 809631 - DNA, 15 bp, Homo sapiens
ctttttttttttttc

SEQ ID NO: 809632 - DNA, 15 bp, Homo sapiens
tttttttttttttct

SEQ ID NO: 809633 - DNA, 15 bp, Homo sapiens
ttttttttttttctg

SEQ ID NO: 809634 - DNA, 15 bp, Homo sapiens
tttttttttttctga

SEQ ID NO: 809635 - DNA, 15 bp, Homo sapiens
ttttttttttctgag

SEQ ID NO: 809636 - DNA, 15 bp, Homo sapiens
tttttttttctgaga

SEQ ID NO: 809637 - DNA, 15 bp, Homo sapiens
ttttttttctgagac

SEQ ID NO: 809638 - DNA, 15 bp, Homo sapiens
tttttttctgagaca

SEQ ID NO: 809639 - DNA, 15 bp, Homo sapiens
ttttttctgagacag

SEQ ID NO: 809640 - DNA, 15 bp, Homo sapiens
tttttctgagacaga

SEQ ID NO: 809641 - DNA, 15 bp, Homo sapiens
ttttctgagacagag

SEQ ID NO: 809642 - DNA, 15 bp, Homo sapiens
tttctgagacagagt

SEQ ID NO: 809643 - DNA, 15 bp, Homo sapiens
ttctgagacagagtt

SEQ ID NO: 809644 - DNA, 15 bp, Homo sapiens
tctgagacagagttt

SEQ ID NO: 809645 - DNA, 15 bp, Homo sapiens
ctgagacagagtttt

SEQ ID NO: 809646 - DNA, 15 bp, Homo sapiens
gttttgctcttgtta

SEQ ID NO: 809647 - DNA, 15 bp, Homo sapiens
ttttgctcttgttac

SEQ ID NO: 809648 - DNA, 15 bp, Homo sapiens
tttgctcttgttacc

SEQ ID NO: 809649 - DNA, 15 bp, Homo sapiens
ttgctcttgttaccc

SEQ ID NO: 809650 - DNA, 15 bp, Homo sapiens
tgctcttgttaccca

SEQ ID NO: 809651 - DNA, 15 bp, Homo sapiens
gctcttgttacccag

SEQ ID NO: 809652 - DNA, 15 bp, Homo sapiens
ctcttgttacccagg

SEQ ID NO: 809653 - DNA, 15 bp, Homo sapiens
tcttgttacccaggc

SEQ ID NO: 809654 - DNA, 15 bp, Homo sapiens
cttgttacccaggct

SEQ ID NO: 809655 - DNA, 15 bp, Homo sapiens
ttgttacccaggcta

SEQ ID NO: 809656 - DNA, 15 bp, Homo sapiens
tgttacccaggctag

SEQ ID NO: 809657 - DNA, 15 bp, Homo sapiens
gttacccaggctaga

SEQ ID NO: 809658 - DNA, 15 bp, Homo sapiens
ttacccaggctagag

SEQ ID NO: 809659 - DNA, 15 bp, Homo sapiens
tacccaggctagagt

SEQ ID NO: 809660 - DNA, 15 bp, Homo sapiens
acccaggctagagtg

SEQ ID NO: 809661 - DNA, 15 bp, Homo sapiens
caggctagagtgcaa

SEQ ID NO: 809662 - DNA, 15 bp, Homo sapiens
aggctagagtgcaat

SEQ ID NO: 809663 - DNA, 15 bp, Homo sapiens
ggctagagtgcaatg

SEQ ID NO: 809664 - DNA, 15 bp, Homo sapiens
gctagagtgcaatgg

SEQ ID NO: 809665 - DNA, 15 bp, Homo sapiens
ctagagtgcaatggc

SEQ ID NO: 809666 - DNA, 15 bp, Homo sapiens
tagagtgcaatggcg

SEQ ID NO: 809667 - DNA, 15 bp, Homo sapiens
agagtgcaatggcgc

SEQ ID NO: 809668 - DNA, 15 bp, Homo sapiens
caatggcgcgatctt

SEQ ID NO: 809669 - DNA, 15 bp, Homo sapiens
aatggcgcgatcttg

SEQ ID NO: 809670 - DNA, 15 bp, Homo sapiens
atggcgcgatcttgg

SEQ ID NO: 809671 - DNA, 15 bp, Homo sapiens
tggcgcgatcttggc

SEQ ID NO: 809672 - DNA, 15 bp, Homo sapiens
ggcgcgatcttggct

SEQ ID NO: 809673 - DNA, 15 bp, Homo sapiens
gcgcgatcttggctc

SEQ ID NO: 809674 - DNA, 15 bp, Homo sapiens
cgcgatcttggctca

SEQ ID NO: 809675 - DNA, 15 bp, Homo sapiens
gcgatcttggctcac

SEQ ID NO: 809676 - DNA, 15 bp, Homo sapiens
caacctccacctcca

SEQ ID NO: 809677 - DNA, 15 bp, Homo sapiens
aacctccacctccag

SEQ ID NO: 809678 - DNA, 15 bp, Homo sapiens
acctccacctccagg

SEQ ID NO: 809679 - DNA, 15 bp, Homo sapiens
cctccacctccaggg

SEQ ID NO: 809680 - DNA, 15 bp, Homo sapiens
ctccacctccagggt

SEQ ID NO: 809681 - DNA, 15 bp, Homo sapiens
tccacctccagggtt

SEQ ID NO: 809682 - DNA, 15 bp, Homo sapiens
ccacctccagggttc

SEQ ID NO: 809683 - DNA, 15 bp, Homo sapiens
cacctccagggttca

SEQ ID NO: 809684 - DNA, 15 bp, Homo sapiens
acctccagggttcaa

SEQ ID NO: 809685 - DNA, 15 bp, Homo sapiens
cctccagggttcaag

SEQ ID NO: 809686 - DNA, 15 bp, Homo sapiens
ctccagggttcaagt

SEQ ID NO: 809687 - DNA, 15 bp, Homo sapiens
tccagggttcaagtg

SEQ ID NO: 809688 - DNA, 15 bp, Homo sapiens
ccagggttcaagtga

SEQ ID NO: 809689 - DNA, 15 bp, Homo sapiens
cagggttcaagtgat

SEQ ID NO: 809690 - DNA, 15 bp, Homo sapiens
agggttcaagtgatt

SEQ ID NO: 809691 - DNA, 15 bp, Homo sapiens
cctgcctcagcctca

SEQ ID NO: 809692 - DNA, 15 bp, Homo sapiens
ctgcctcagcctcaa

SEQ ID NO: 809693 - DNA, 15 bp, Homo sapiens
tgcctcagcctcaag

SEQ ID NO: 809694 - DNA, 15 bp, Homo sapiens
gcctcagcctcaaga

SEQ ID NO: 809695 - DNA, 15 bp, Homo sapiens
cctcagcctcaagag

SEQ ID NO: 809696 - DNA, 15 bp, Homo sapiens
ctcagcctcaagagt

SEQ ID NO: 809697 - DNA, 15 bp, Homo sapiens
tcagcctcaagagta

SEQ ID NO: 809698 - DNA, 15 bp, Homo sapiens
cagcctcaagagtag

SEQ ID NO: 809699 - DNA, 15 bp, Homo sapiens
agcctcaagagtagc

SEQ ID NO: 809700 - DNA, 15 bp, Homo sapiens
gcctcaagagtagct

SEQ ID NO: 809701 - DNA, 15 bp, Homo sapiens
cctcaagagtagctg

SEQ ID NO: 809702 - DNA, 15 bp, Homo sapiens
ctcaagagtagctgg

SEQ ID NO: 809703 - DNA, 15 bp, Homo sapiens
tcaagagtagctggg

SEQ ID NO: 809704 - DNA, 15 bp, Homo sapiens
caagagtagctggga

SEQ ID NO: 809705 - DNA, 15 bp, Homo sapiens
aagagtagctgggat

SEQ ID NO: 809706 - DNA, 15 bp, Homo sapiens
agagtagctgggatt

SEQ ID NO: 809707 - DNA, 15 bp, Homo sapiens
tgggattataggcgt

SEQ ID NO: 809708 - DNA, 15 bp, Homo sapiens
gggattataggcgtg

SEQ ID NO: 809709 - DNA, 15 bp, Homo sapiens
ggattataggcgtgt

SEQ ID NO: 809710 - DNA, 15 bp, Homo sapiens
gattataggcgtgtg

SEQ ID NO: 809711 - DNA, 15 bp, Homo sapiens
attataggcgtgtgc

SEQ ID NO: 809712 - DNA, 15 bp, Homo sapiens
ttataggcgtgtgcc

SEQ ID NO: 809713 - DNA, 15 bp, Homo sapiens
tataggcgtgtgcca

SEQ ID NO: 809714 - DNA, 15 bp, Homo sapiens
ataggcgtgtgccac

SEQ ID NO: 809715 - DNA, 15 bp, Homo sapiens
taggcgtgtgccacc

SEQ ID NO: 809716 - DNA, 15 bp, Homo sapiens
gcgtgtgccaccaca

SEQ ID NO: 809717 - DNA, 15 bp, Homo sapiens
cgtgtgccaccacac

SEQ ID NO: 809718 - DNA, 15 bp, Homo sapiens
gtgtgccaccacacc

SEQ ID NO: 809719 - DNA, 15 bp, Homo sapiens
acccagctaattttg

SEQ ID NO: 809720 - DNA, 15 bp, Homo sapiens
cccagctaattttgt

SEQ ID NO: 809721 - DNA, 15 bp, Homo sapiens
ccagctaattttgta

SEQ ID NO: 809722 - DNA, 15 bp, Homo sapiens
cagctaattttgtat

SEQ ID NO: 809723 - DNA, 15 bp, Homo sapiens
agctaattttgtatt

SEQ ID NO: 809724 - DNA, 15 bp, Homo sapiens
gctaattttgtattt

SEQ ID NO: 809725 - DNA, 15 bp, Homo sapiens
ctaattttgtatttt

SEQ ID NO: 809726 - DNA, 15 bp, Homo sapiens
taattttgtattttt

SEQ ID NO: 809727 - DNA, 15 bp, Homo sapiens
aattttgtattttta

SEQ ID NO: 809728 - DNA, 15 bp, Homo sapiens
attttgtatttttag

SEQ ID NO: 809729 - DNA, 15 bp, Homo sapiens
agagacggggtttct

SEQ ID NO: 809730 - DNA, 15 bp, Homo sapiens
gagacggggtttctt

SEQ ID NO: 809731 - DNA, 15 bp, Homo sapiens
agacggggtttcttc

SEQ ID NO: 809732 - DNA, 15 bp, Homo sapiens
gacggggtttcttca

SEQ ID NO: 809733 - DNA, 15 bp, Homo sapiens
acggggtttcttcat

SEQ ID NO: 809734 - DNA, 15 bp, Homo sapiens
cggggtttcttcatg

SEQ ID NO: 809735 - DNA, 15 bp, Homo sapiens
ggggtttcttcatgt

SEQ ID NO: 809736 - DNA, 15 bp, Homo sapiens
gggtttcttcatgtt

SEQ ID NO: 809737 - DNA, 15 bp, Homo sapiens
ggtttcttcatgttg

SEQ ID NO: 809738 - DNA, 15 bp, Homo sapiens
gtttcttcatgttgg

SEQ ID NO: 809739 - DNA, 15 bp, Homo sapiens
tttcttcatgttggt

SEQ ID NO: 809740 - DNA, 15 bp, Homo sapiens
ttcttcatgttggtc

SEQ ID NO: 809741 - DNA, 15 bp, Homo sapiens
tcttcatgttggtca

SEQ ID NO: 809742 - DNA, 15 bp, Homo sapiens
cttcatgttggtcag

SEQ ID NO: 809743 - DNA, 15 bp, Homo sapiens
ttcatgttggtcagg

SEQ ID NO: 809744 - DNA, 15 bp, Homo sapiens
tcatgttggtcaggc

SEQ ID NO: 809745 - DNA, 15 bp, Homo sapiens
tcaggtgatccgccc

SEQ ID NO: 809746 - DNA, 15 bp, Homo sapiens
caggtgatccgcccg

SEQ ID NO: 809747 - DNA, 15 bp, Homo sapiens
aggtgatccgcccgc

SEQ ID NO: 809748 - DNA, 15 bp, Homo sapiens
ggtgatccgcccgcc

SEQ ID NO: 809749 - DNA, 15 bp, Homo sapiens
gtgatccgcccgcct

SEQ ID NO: 809750 - DNA, 15 bp, Homo sapiens
tgatccgcccgcctc

SEQ ID NO: 809751 - DNA, 15 bp, Homo sapiens
gatccgcccgcctca

SEQ ID NO: 809752 - DNA, 15 bp, Homo sapiens
atccgcccgcctcag

SEQ ID NO: 809753 - DNA, 15 bp, Homo sapiens
tccgcccgcctcagc

SEQ ID NO: 809754 - DNA, 15 bp, Homo sapiens
ccgcccgcctcagcc

SEQ ID NO: 809755 - DNA, 15 bp, Homo sapiens
cgcctcagcctccca

SEQ ID NO: 809756 - DNA, 15 bp, Homo sapiens
gcctcagcctcccac

SEQ ID NO: 809757 - DNA, 15 bp, Homo sapiens
cctcagcctcccaca

SEQ ID NO: 809758 - DNA, 15 bp, Homo sapiens
ctcagcctcccacag

SEQ ID NO: 809759 - DNA, 15 bp, Homo sapiens
tcagcctcccacagt

SEQ ID NO: 809760 - DNA, 15 bp, Homo sapiens
cagcctcccacagtg

SEQ ID NO: 809761 - DNA, 15 bp, Homo sapiens
agcctcccacagtgc

SEQ ID NO: 809762 - DNA, 15 bp, Homo sapiens
gcctcccacagtgct

SEQ ID NO: 809763 - DNA, 15 bp, Homo sapiens
cctcccacagtgctg

SEQ ID NO: 809764 - DNA, 15 bp, Homo sapiens
ctcccacagtgctgg

SEQ ID NO: 809765 - DNA, 15 bp, Homo sapiens
tcccacagtgctggg

SEQ ID NO: 809766 - DNA, 15 bp, Homo sapiens
cccacagtgctggga

SEQ ID NO: 809767 - DNA, 15 bp, Homo sapiens
ccacagtgctgggat

SEQ ID NO: 809768 - DNA, 15 bp, Homo sapiens
cacagtgctgggatt

SEQ ID NO: 809769 - DNA, 15 bp, Homo sapiens
acagtgctgggatta

SEQ ID NO: 809770 - DNA, 15 bp, Homo sapiens
cagtgctgggattac

SEQ ID NO: 809771 - DNA, 15 bp, Homo sapiens
gtgagccactgtgcc

SEQ ID NO: 809772 - DNA, 15 bp, Homo sapiens
tgagccactgtgccc

SEQ ID NO: 809773 - DNA, 15 bp, Homo sapiens
gagccactgtgcccg

SEQ ID NO: 809774 - DNA, 15 bp, Homo sapiens
agccactgtgcccgg

SEQ ID NO: 809775 - DNA, 15 bp, Homo sapiens
gccactgtgcccggc

SEQ ID NO: 809776 - DNA, 15 bp, Homo sapiens
ccactgtgcccggcc

SEQ ID NO: 809777 - DNA, 15 bp, Homo sapiens
cactgtgcccggcct

SEQ ID NO: 809778 - DNA, 15 bp, Homo sapiens
actgtgcccggcctg

SEQ ID NO: 809779 - DNA, 15 bp, Homo sapiens
ctgtgcccggcctgt

SEQ ID NO: 809780 - DNA, 15 bp, Homo sapiens
tgtgcccggcctgtt

SEQ ID NO: 809781 - DNA, 15 bp, Homo sapiens
gtgcccggcctgttc

SEQ ID NO: 809782 - DNA, 15 bp, Homo sapiens
tgcccggcctgttct

SEQ ID NO: 809783 - DNA, 15 bp, Homo sapiens
gcccggcctgttctg

SEQ ID NO: 809784 - DNA, 15 bp, Homo sapiens
cccggcctgttctga

SEQ ID NO: 809785 - DNA, 15 bp, Homo sapiens
ccggcctgttctgac

SEQ ID NO: 809786 - DNA, 15 bp, Homo sapiens
cggcctgttctgaca

SEQ ID NO: 809787 - DNA, 15 bp, Homo sapiens
ggcctgttctgacaa

SEQ ID NO: 809788 - DNA, 15 bp, Homo sapiens
gcctgttctgacaaa

SEQ ID NO: 809789 - DNA, 15 bp, Homo sapiens
cctgttctgacaaac

SEQ ID NO: 809790 - DNA, 15 bp, Homo sapiens
ctgttctgacaaact

SEQ ID NO: 809791 - DNA, 15 bp, Homo sapiens
tgttctgacaaactt

SEQ ID NO: 809792 - DNA, 15 bp, Homo sapiens
gttctgacaaacttt

SEQ ID NO: 809793 - DNA, 15 bp, Homo sapiens
ttctgacaaactttc

SEQ ID NO: 809794 - DNA, 15 bp, Homo sapiens
tctgacaaactttca

SEQ ID NO: 809795 - DNA, 15 bp, Homo sapiens
ctgacaaactttcat

SEQ ID NO: 809796 - DNA, 15 bp, Homo sapiens
tgacaaactttcata

SEQ ID NO: 809797 - DNA, 15 bp, Homo sapiens
gacaaactttcatag

SEQ ID NO: 809798 - DNA, 15 bp, Homo sapiens
acaaactttcatagt

SEQ ID NO: 809799 - DNA, 15 bp, Homo sapiens
caaactttcatagta

SEQ ID NO: 809800 - DNA, 15 bp, Homo sapiens
aaactttcatagtac

SEQ ID NO: 809801 - DNA, 15 bp, Homo sapiens
aactttcatagtaca

SEQ ID NO: 809802 - DNA, 15 bp, Homo sapiens
actttcatagtacag

SEQ ID NO: 809803 - DNA, 15 bp, Homo sapiens
ctttcatagtacaga

SEQ ID NO: 809804 - DNA, 15 bp, Homo sapiens
tttcatagtacagat

SEQ ID NO: 809805 - DNA, 15 bp, Homo sapiens
ttcatagtacagatt

SEQ ID NO: 809806 - DNA, 15 bp, Homo sapiens
tcatagtacagatta

SEQ ID NO: 809807 - DNA, 15 bp, Homo sapiens
catagtacagattat

SEQ ID NO: 809808 - DNA, 15 bp, Homo sapiens
atagtacagattatt

SEQ ID NO: 809809 - DNA, 15 bp, Homo sapiens
tagtacagattattc

SEQ ID NO: 809810 - DNA, 15 bp, Homo sapiens
agtacagattattcc

SEQ ID NO: 809811 - DNA, 15 bp, Homo sapiens
gtacagattattcca

SEQ ID NO: 809812 - DNA, 15 bp, Homo sapiens
tacagattattccaa

SEQ ID NO: 809813 - DNA, 15 bp, Homo sapiens
acagattattccaat

SEQ ID NO: 809814 - DNA, 15 bp, Homo sapiens
cagattattccaata

SEQ ID NO: 809815 - DNA, 15 bp, Homo sapiens
agattattccaatat

SEQ ID NO: 809816 - DNA, 15 bp, Homo sapiens
gattattccaatatc

SEQ ID NO: 809817 - DNA, 15 bp, Homo sapiens
attattccaatatca

SEQ ID NO: 809818 - DNA, 15 bp, Homo sapiens
ttattccaatatcat

SEQ ID NO: 809819 - DNA, 15 bp, Homo sapiens
tattccaatatcatt

SEQ ID NO: 809820 - DNA, 15 bp, Homo sapiens
attccaatatcattc

SEQ ID NO: 809821 - DNA, 15 bp, Homo sapiens
ttccaatatcattca

SEQ ID NO: 809822 - DNA, 15 bp, Homo sapiens
tccaatatcattcaa

SEQ ID NO: 809823 - DNA, 15 bp, Homo sapiens
ccaatatcattcaaa

SEQ ID NO: 809824 - DNA, 15 bp, Homo sapiens
caatatcattcaaac

SEQ ID NO: 809825 - DNA, 15 bp, Homo sapiens
aatatcattcaaact

SEQ ID NO: 809826 - DNA, 15 bp, Homo sapiens
atatcattcaaactt

SEQ ID NO: 809827 - DNA, 15 bp, Homo sapiens
tatcattcaaacttt

SEQ ID NO: 809828 - DNA, 15 bp, Homo sapiens
atcattcaaactttt

SEQ ID NO: 809829 - DNA, 15 bp, Homo sapiens
tcattcaaacttttc

SEQ ID NO: 809830 - DNA, 15 bp, Homo sapiens
cattcaaacttttcc

SEQ ID NO: 809831 - DNA, 15 bp, Homo sapiens
attcaaacttttcca

SEQ ID NO: 809832 - DNA, 15 bp, Homo sapiens
ttcaaacttttccaa

SEQ ID NO: 809833 - DNA, 15 bp, Homo sapiens
tcaaacttttccaaa

SEQ ID NO: 809834 - DNA, 15 bp, Homo sapiens
caaacttttccaaag

SEQ ID NO: 809835 - DNA, 15 bp, Homo sapiens
aaacttttccaaagt

SEQ ID NO: 809836 - DNA, 15 bp, Homo sapiens
aacttttccaaagta

SEQ ID NO: 809837 - DNA, 15 bp, Homo sapiens
acttttccaaagtat

SEQ ID NO: 809838 - DNA, 15 bp, Homo sapiens
cttttccaaagtata

SEQ ID NO: 809839 - DNA, 15 bp, Homo sapiens
ttttccaaagtatag

SEQ ID NO: 809840 - DNA, 15 bp, Homo sapiens
tttccaaagtatagg

SEQ ID NO: 809841 - DNA, 15 bp, Homo sapiens
ttccaaagtatagga

SEQ ID NO: 809842 - DNA, 15 bp, Homo sapiens
tccaaagtataggaa

SEQ ID NO: 809843 - DNA, 15 bp, Homo sapiens
ccaaagtataggaaa

SEQ ID NO: 809844 - DNA, 15 bp, Homo sapiens
caaagtataggaaaa

SEQ ID NO: 809845 - DNA, 15 bp, Homo sapiens
aaagtataggaaaac

SEQ ID NO: 809846 - DNA, 15 bp, Homo sapiens
aagtataggaaaaca

SEQ ID NO: 809847 - DNA, 15 bp, Homo sapiens
agtataggaaaacaa

SEQ ID NO: 809848 - DNA, 15 bp, Homo sapiens
gtataggaaaacaag

SEQ ID NO: 809849 - DNA, 15 bp, Homo sapiens
tataggaaaacaagg

SEQ ID NO: 809850 - DNA, 15 bp, Homo sapiens
ataggaaaacaaggg

SEQ ID NO: 809851 - DNA, 15 bp, Homo sapiens
taggaaaacaaggga

SEQ ID NO: 809852 - DNA, 15 bp, Homo sapiens
aggaaaacaagggat

SEQ ID NO: 809853 - DNA, 15 bp, Homo sapiens
ggaaaacaagggatg

SEQ ID NO: 809854 - DNA, 15 bp, Homo sapiens
gaaaacaagggatgt

SEQ ID NO: 809855 - DNA, 15 bp, Homo sapiens
aaaacaagggatgtt

SEQ ID NO: 809856 - DNA, 15 bp, Homo sapiens
aaacaagggatgttt

SEQ ID NO: 809857 - DNA, 15 bp, Homo sapiens
aacaagggatgtttt

SEQ ID NO: 809858 - DNA, 15 bp, Homo sapiens
acaagggatgttttc

SEQ ID NO: 809859 - DNA, 15 bp, Homo sapiens
caagggatgttttca

SEQ ID NO: 809860 - DNA, 15 bp, Homo sapiens
aagggatgttttcag

SEQ ID NO: 809861 - DNA, 15 bp, Homo sapiens
agggatgttttcagc

SEQ ID NO: 809862 - DNA, 15 bp, Homo sapiens
gggatgttttcagct

SEQ ID NO: 809863 - DNA, 15 bp, Homo sapiens
ggatgttttcagctt

SEQ ID NO: 809864 - DNA, 15 bp, Homo sapiens
gatgttttcagctta

SEQ ID NO: 809865 - DNA, 15 bp, Homo sapiens
atgttttcagcttat

SEQ ID NO: 809866 - DNA, 15 bp, Homo sapiens
tgttttcagcttatt

SEQ ID NO: 809867 - DNA, 15 bp, Homo sapiens
gttttcagcttattt

SEQ ID NO: 809868 - DNA, 15 bp, Homo sapiens
ttttcagcttatttt

SEQ ID NO: 809869 - DNA, 15 bp, Homo sapiens
tttcagcttatttta

SEQ ID NO: 809870 - DNA, 15 bp, Homo sapiens
ttcagcttattttat

SEQ ID NO: 809871 - DNA, 15 bp, Homo sapiens
tcagcttattttatg

SEQ ID NO: 809872 - DNA, 15 bp, Homo sapiens
cagcttattttatga

SEQ ID NO: 809873 - DNA, 15 bp, Homo sapiens
agcttattttatgag

SEQ ID NO: 809874 - DNA, 15 bp, Homo sapiens
gcttattttatgagg

SEQ ID NO: 809875 - DNA, 15 bp, Homo sapiens
cttattttatgaggc

SEQ ID NO: 809876 - DNA, 15 bp, Homo sapiens
ttattttatgaggct

SEQ ID NO: 809877 - DNA, 15 bp, Homo sapiens
tattttatgaggctg

SEQ ID NO: 809878 - DNA, 15 bp, Homo sapiens
attttatgaggctgg

SEQ ID NO: 809879 - DNA, 15 bp, Homo sapiens
ttttatgaggctgga

SEQ ID NO: 809880 - DNA, 15 bp, Homo sapiens
tttatgaggctggaa

SEQ ID NO: 809881 - DNA, 15 bp, Homo sapiens
ttatgaggctggaaa

SEQ ID NO: 809882 - DNA, 15 bp, Homo sapiens
tatgaggctggaaaa

SEQ ID NO: 809883 - DNA, 15 bp, Homo sapiens
atgaggctggaaaaa

SEQ ID NO: 809884 - DNA, 15 bp, Homo sapiens
tgaggctggaaaaat

SEQ ID NO: 809885 - DNA, 15 bp, Homo sapiens
gaggctggaaaaatc

SEQ ID NO: 809886 - DNA, 15 bp, Homo sapiens
aggctggaaaaatcc

SEQ ID NO: 809887 - DNA, 15 bp, Homo sapiens
ggctggaaaaatcct

SEQ ID NO: 809888 - DNA, 15 bp, Homo sapiens
gctggaaaaatcctc

SEQ ID NO: 809889 - DNA, 15 bp, Homo sapiens
ctggaaaaatcctca

SEQ ID NO: 809890 - DNA, 15 bp, Homo sapiens
tggaaaaatcctcat

SEQ ID NO: 809891 - DNA, 15 bp, Homo sapiens
ggaaaaatcctcata

SEQ ID NO: 809892 - DNA, 15 bp, Homo sapiens
gaaaaatcctcatat

SEQ ID NO: 809893 - DNA, 15 bp, Homo sapiens
aaaaatcctcatatc

SEQ ID NO: 809894 - DNA, 15 bp, Homo sapiens
aaaatcctcatatca

SEQ ID NO: 809895 - DNA, 15 bp, Homo sapiens
aaatcctcatatcaa

SEQ ID NO: 809896 - DNA, 15 bp, Homo sapiens
aatcctcatatcaaa

SEQ ID NO: 809897 - DNA, 15 bp, Homo sapiens
atcctcatatcaaaa

SEQ ID NO: 809898 - DNA, 15 bp, Homo sapiens
tcctcatatcaaaac

SEQ ID NO: 809899 - DNA, 15 bp, Homo sapiens
cctcatatcaaaacc

SEQ ID NO: 809900 - DNA, 15 bp, Homo sapiens
ctcatatcaaaacct

SEQ ID NO: 809901 - DNA, 15 bp, Homo sapiens
tcatatcaaaaccta

SEQ ID NO: 809902 - DNA, 15 bp, Homo sapiens
catatcaaaacctaa

SEQ ID NO: 809903 - DNA, 15 bp, Homo sapiens
atatcaaaacctaaa

SEQ ID NO: 809904 - DNA, 15 bp, Homo sapiens
tatcaaaacctaaaa

SEQ ID NO: 809905 - DNA, 15 bp, Homo sapiens
atcaaaacctaaaaa

SEQ ID NO: 809906 - DNA, 15 bp, Homo sapiens
tcaaaacctaaaaaa

SEQ ID NO: 809907 - DNA, 15 bp, Homo sapiens
caaaacctaaaaaac

SEQ ID NO: 809908 - DNA, 15 bp, Homo sapiens
aaaacctaaaaaaca

SEQ ID NO: 809909 - DNA, 15 bp, Homo sapiens
aaacctaaaaaacag

SEQ ID NO: 809910 - DNA, 15 bp, Homo sapiens
aacctaaaaaacagc

SEQ ID NO: 809911 - DNA, 15 bp, Homo sapiens
acctaaaaaacagcc

SEQ ID NO: 809912 - DNA, 15 bp, Homo sapiens
cctaaaaaacagcca

SEQ ID NO: 809913 - DNA, 15 bp, Homo sapiens
ctaaaaaacagccag

SEQ ID NO: 809914 - DNA, 15 bp, Homo sapiens
taaaaaacagccagg

SEQ ID NO: 809915 - DNA, 15 bp, Homo sapiens
aaaaaacagccaggt

SEQ ID NO: 809916 - DNA, 15 bp, Homo sapiens
aaaaacagccaggtg

SEQ ID NO: 809917 - DNA, 15 bp, Homo sapiens
aaaacagccaggtgt

SEQ ID NO: 809918 - DNA, 15 bp, Homo sapiens
aaacagccaggtgta

SEQ ID NO: 809919 - DNA, 15 bp, Homo sapiens
aacagccaggtgtag

SEQ ID NO: 809920 - DNA, 15 bp, Homo sapiens
acagccaggtgtagt

SEQ ID NO: 809921 - DNA, 15 bp, Homo sapiens
cagccaggtgtagta

SEQ ID NO: 809922 - DNA, 15 bp, Homo sapiens
agccaggtgtagtag

SEQ ID NO: 809923 - DNA, 15 bp, Homo sapiens
gccaggtgtagtagc

SEQ ID NO: 809924 - DNA, 15 bp, Homo sapiens
ccaggtgtagtagct

SEQ ID NO: 809925 - DNA, 15 bp, Homo sapiens
caggtgtagtagctc

SEQ ID NO: 809926 - DNA, 15 bp, Homo sapiens
aggtgtagtagctca

SEQ ID NO: 809927 - DNA, 15 bp, Homo sapiens
ggtgtagtagctcac

SEQ ID NO: 809928 - DNA, 15 bp, Homo sapiens
gtgtagtagctcacg

SEQ ID NO: 809929 - DNA, 15 bp, Homo sapiens
tgtagtagctcacgc

SEQ ID NO: 809930 - DNA, 15 bp, Homo sapiens
gtagtagctcacgcc

SEQ ID NO: 809931 - DNA, 15 bp, Homo sapiens
tagtagctcacgcct

SEQ ID NO: 809932 - DNA, 15 bp, Homo sapiens
agtagctcacgcctg

SEQ ID NO: 809933 - DNA, 15 bp, Homo sapiens
gtagctcacgcctgt

SEQ ID NO: 809934 - DNA, 15 bp, Homo sapiens
tagctcacgcctgta

SEQ ID NO: 809935 - DNA, 15 bp, Homo sapiens
agctcacgcctgtaa

SEQ ID NO: 809936 - DNA, 15 bp, Homo sapiens
tttgggaggctgaga

SEQ ID NO: 809937 - DNA, 15 bp, Homo sapiens
ttgggaggctgagac

SEQ ID NO: 809938 - DNA, 15 bp, Homo sapiens
tgggaggctgagacg

SEQ ID NO: 809939 - DNA, 15 bp, Homo sapiens
gggaggctgagacgg

SEQ ID NO: 809940 - DNA, 15 bp, Homo sapiens
ggaggctgagacggg

SEQ ID NO: 809941 - DNA, 15 bp, Homo sapiens
gaggctgagacgggc

SEQ ID NO: 809942 - DNA, 15 bp, Homo sapiens
aggctgagacgggca

SEQ ID NO: 809943 - DNA, 15 bp, Homo sapiens
ggctgagacgggcag

SEQ ID NO: 809944 - DNA, 15 bp, Homo sapiens
gctgagacgggcaga

SEQ ID NO: 809945 - DNA, 15 bp, Homo sapiens
ctgagacgggcagat

SEQ ID NO: 809946 - DNA, 15 bp, Homo sapiens
tgagacgggcagatt

SEQ ID NO: 809947 - DNA, 15 bp, Homo sapiens
gagacgggcagattg

SEQ ID NO: 809948 - DNA, 15 bp, Homo sapiens
agacgggcagattgc

SEQ ID NO: 809949 - DNA, 15 bp, Homo sapiens
gacgggcagattgcc

SEQ ID NO: 809950 - DNA, 15 bp, Homo sapiens
acgggcagattgcct

SEQ ID NO: 809951 - DNA, 15 bp, Homo sapiens
cgggcagattgcctg

SEQ ID NO: 809952 - DNA, 15 bp, Homo sapiens
gggcagattgcctga

SEQ ID NO: 809953 - DNA, 15 bp, Homo sapiens
ggcagattgcctgag

SEQ ID NO: 809954 - DNA, 15 bp, Homo sapiens
gcagattgcctgagc

SEQ ID NO: 809955 - DNA, 15 bp, Homo sapiens
cagattgcctgagcc

SEQ ID NO: 809956 - DNA, 15 bp, Homo sapiens
agattgcctgagcct

SEQ ID NO: 809957 - DNA, 15 bp, Homo sapiens
gattgcctgagcctc

SEQ ID NO: 809958 - DNA, 15 bp, Homo sapiens
attgcctgagcctca

SEQ ID NO: 809959 - DNA, 15 bp, Homo sapiens
ttgcctgagcctcag

SEQ ID NO: 809960 - DNA, 15 bp, Homo sapiens
tgcctgagcctcagg

SEQ ID NO: 809961 - DNA, 15 bp, Homo sapiens
gcctgagcctcagga

SEQ ID NO: 809962 - DNA, 15 bp, Homo sapiens
cctgagcctcaggag

SEQ ID NO: 809963 - DNA, 15 bp, Homo sapiens
ctgagcctcaggagt

SEQ ID NO: 809964 - DNA, 15 bp, Homo sapiens
tgagcctcaggagtt

SEQ ID NO: 809965 - DNA, 15 bp, Homo sapiens
gagcctcaggagttc

SEQ ID NO: 809966 - DNA, 15 bp, Homo sapiens
agcctcaggagttcg

SEQ ID NO: 809967 - DNA, 15 bp, Homo sapiens
gcctcaggagttcga

SEQ ID NO: 809968 - DNA, 15 bp, Homo sapiens
cctcaggagttcgag

SEQ ID NO: 809969 - DNA, 15 bp, Homo sapiens
ctcaggagttcgaga

SEQ ID NO: 809970 - DNA, 15 bp, Homo sapiens
tcaggagttcgagac

SEQ ID NO: 809971 - DNA, 15 bp, Homo sapiens
agttcgagaccagct

SEQ ID NO: 809972 - DNA, 15 bp, Homo sapiens
gttcgagaccagctg

SEQ ID NO: 809973 - DNA, 15 bp, Homo sapiens
ttcgagaccagctgg

SEQ ID NO: 809974 - DNA, 15 bp, Homo sapiens
tcgagaccagctggg

SEQ ID NO: 809975 - DNA, 15 bp, Homo sapiens
cgagaccagctgggg

SEQ ID NO: 809976 - DNA, 15 bp, Homo sapiens
gagaccagctggggc

SEQ ID NO: 809977 - DNA, 15 bp, Homo sapiens
agaccagctggggca

SEQ ID NO: 809978 - DNA, 15 bp, Homo sapiens
gaccagctggggcaa

SEQ ID NO: 809979 - DNA, 15 bp, Homo sapiens
accagctggggcaat

SEQ ID NO: 809980 - DNA, 15 bp, Homo sapiens
ccagctggggcaatg

SEQ ID NO: 809981 - DNA, 15 bp, Homo sapiens
cagctggggcaatgt

SEQ ID NO: 809982 - DNA, 15 bp, Homo sapiens
agctggggcaatgta

SEQ ID NO: 809983 - DNA, 15 bp, Homo sapiens
gctggggcaatgtag

SEQ ID NO: 809984 - DNA, 15 bp, Homo sapiens
ctggggcaatgtagc

SEQ ID NO: 809985 - DNA, 15 bp, Homo sapiens
tggggcaatgtagcg

SEQ ID NO: 809986 - DNA, 15 bp, Homo sapiens
ggggcaatgtagcga

SEQ ID NO: 809987 - DNA, 15 bp, Homo sapiens
gggcaatgtagcgag

SEQ ID NO: 809988 - DNA, 15 bp, Homo sapiens
ggcaatgtagcgaga

SEQ ID NO: 809989 - DNA, 15 bp, Homo sapiens
gcaatgtagcgagac

SEQ ID NO: 809990 - DNA, 15 bp, Homo sapiens
caatgtagcgagacc

SEQ ID NO: 809991 - DNA, 15 bp, Homo sapiens
aatgtagcgagacct

SEQ ID NO: 809992 - DNA, 15 bp, Homo sapiens
atgtagcgagacctc

SEQ ID NO: 809993 - DNA, 15 bp, Homo sapiens
tgtagcgagacctca

SEQ ID NO: 809994 - DNA, 15 bp, Homo sapiens
gtagcgagacctcat

SEQ ID NO: 809995 - DNA, 15 bp, Homo sapiens
tagcgagacctcatc

SEQ ID NO: 809996 - DNA, 15 bp, Homo sapiens
agcgagacctcatct

SEQ ID NO: 809997 - DNA, 15 bp, Homo sapiens
gcgagacctcatctc

SEQ ID NO: 809998 - DNA, 15 bp, Homo sapiens
cgagacctcatctct

SEQ ID NO: 809999 - DNA, 15 bp, Homo sapiens
gagacctcatctctc

SEQ ID NO: 810000 - DNA, 15 bp, Homo sapiens
agacctcatctctct

SEQ ID NO: 810001 - DNA, 15 bp, Homo sapiens
gacctcatctctctt

SEQ ID NO: 810002 - DNA, 15 bp, Homo sapiens
acctcatctctcttt

SEQ ID NO: 810003 - DNA, 15 bp, Homo sapiens
cctcatctctctttt

SEQ ID NO: 810004 - DNA, 15 bp, Homo sapiens
ctcatctctcttttt

SEQ ID NO: 810005 - DNA, 15 bp, Homo sapiens
tcatctctctttttt

SEQ ID NO: 810006 - DNA, 15 bp, Homo sapiens
catctctcttttttt

SEQ ID NO: 810007 - DNA, 15 bp, Homo sapiens
atctctctttttttt

SEQ ID NO: 810008 - DNA, 15 bp, Homo sapiens
tctctcttttttttt

SEQ ID NO: 810009 - DNA, 15 bp, Homo sapiens
ctctctttttttttt

SEQ ID NO: 810010 - DNA, 15 bp, Homo sapiens
tgagacagagtctct

SEQ ID NO: 810011 - DNA, 15 bp, Homo sapiens
gagacagagtctctc

SEQ ID NO: 810012 - DNA, 15 bp, Homo sapiens
agacagagtctctct

SEQ ID NO: 810013 - DNA, 15 bp, Homo sapiens
gacagagtctctctc

SEQ ID NO: 810014 - DNA, 15 bp, Homo sapiens
acagagtctctctct

SEQ ID NO: 810015 - DNA, 15 bp, Homo sapiens
cagagtctctctctg

SEQ ID NO: 810016 - DNA, 15 bp, Homo sapiens
agagtctctctctgt

SEQ ID NO: 810017 - DNA, 15 bp, Homo sapiens
gagtctctctctgtc

SEQ ID NO: 810018 - DNA, 15 bp, Homo sapiens
agtctctctctgtcg

SEQ ID NO: 810019 - DNA, 15 bp, Homo sapiens
gtctctctctgtcgt

SEQ ID NO: 810020 - DNA, 15 bp, Homo sapiens
tctctctctgtcgtc

SEQ ID NO: 810021 - DNA, 15 bp, Homo sapiens
ctctctctgtcgtcc

SEQ ID NO: 810022 - DNA, 15 bp, Homo sapiens
tctctctgtcgtcca

SEQ ID NO: 810023 - DNA, 15 bp, Homo sapiens
ctctctgtcgtccag

SEQ ID NO: 810024 - DNA, 15 bp, Homo sapiens
tctctgtcgtccagg

SEQ ID NO: 810025 - DNA, 15 bp, Homo sapiens
ctctgtcgtccaggc

SEQ ID NO: 810026 - DNA, 15 bp, Homo sapiens
tctgtcgtccaggct

SEQ ID NO: 810027 - DNA, 15 bp, Homo sapiens
ctgtcgtccaggctg

SEQ ID NO: 810028 - DNA, 15 bp, Homo sapiens
tgtcgtccaggctgg

SEQ ID NO: 810029 - DNA, 15 bp, Homo sapiens
gtcgtccaggctgga

SEQ ID NO: 810030 - DNA, 15 bp, Homo sapiens
tcgtccaggctggag

SEQ ID NO: 810031 - DNA, 15 bp, Homo sapiens
cgtccaggctggagt

SEQ ID NO: 810032 - DNA, 15 bp, Homo sapiens
gtccaggctggagtg

SEQ ID NO: 810033 - DNA, 15 bp, Homo sapiens
tcaggtcaaggagtt

SEQ ID NO: 810034 - DNA, 15 bp, Homo sapiens
caggtcaaggagttt

SEQ ID NO: 810035 - DNA, 15 bp, Homo sapiens
aggtcaaggagtttt

SEQ ID NO: 810036 - DNA, 15 bp, Homo sapiens
ggtcaaggagttttt

SEQ ID NO: 810037 - DNA, 15 bp, Homo sapiens
gtcaaggagtttttt

SEQ ID NO: 810038 - DNA, 15 bp, Homo sapiens
tcaaggagttttttc

SEQ ID NO: 810039 - DNA, 15 bp, Homo sapiens
caaggagttttttct

SEQ ID NO: 810040 - DNA, 15 bp, Homo sapiens
aaggagttttttctt

SEQ ID NO: 810041 - DNA, 15 bp, Homo sapiens
aggagttttttcttc

SEQ ID NO: 810042 - DNA, 15 bp, Homo sapiens
ggagttttttcttcc

SEQ ID NO: 810043 - DNA, 15 bp, Homo sapiens
gagttttttcttcct

SEQ ID NO: 810044 - DNA, 15 bp, Homo sapiens
agttttttcttcctt

SEQ ID NO: 810045 - DNA, 15 bp, Homo sapiens
gttttttcttccttc

SEQ ID NO: 810046 - DNA, 15 bp, Homo sapiens
ttttttcttccttcg

SEQ ID NO: 810047 - DNA, 15 bp, Homo sapiens
tttttcttccttcgc

SEQ ID NO: 810048 - DNA, 15 bp, Homo sapiens
ttttcttccttcgca

SEQ ID NO: 810049 - DNA, 15 bp, Homo sapiens
tttcttccttcgcag

SEQ ID NO: 810050 - DNA, 15 bp, Homo sapiens
ttcttccttcgcaga

SEQ ID NO: 810051 - DNA, 15 bp, Homo sapiens
tcttccttcgcagac

SEQ ID NO: 810052 - DNA, 15 bp, Homo sapiens
cttccttcgcagaca

SEQ ID NO: 810053 - DNA, 15 bp, Homo sapiens
ttccttcgcagacat

SEQ ID NO: 810054 - DNA, 15 bp, Homo sapiens
tccttcgcagacatg

SEQ ID NO: 810055 - DNA, 15 bp, Homo sapiens
ccttcgcagacatgc

SEQ ID NO: 810056 - DNA, 15 bp, Homo sapiens
cttcgcagacatgca

SEQ ID NO: 810057 - DNA, 15 bp, Homo sapiens
ttcgcagacatgcaa

SEQ ID NO: 810058 - DNA, 15 bp, Homo sapiens
tcgcagacatgcaag

SEQ ID NO: 810059 - DNA, 15 bp, Homo sapiens
cgcagacatgcaaga

SEQ ID NO: 810060 - DNA, 15 bp, Homo sapiens
gcagacatgcaagat

SEQ ID NO: 810061 - DNA, 15 bp, Homo sapiens
cagacatgcaagatc

SEQ ID NO: 810062 - DNA, 15 bp, Homo sapiens
agacatgcaagatct

SEQ ID NO: 810063 - DNA, 15 bp, Homo sapiens
gacatgcaagatctg

SEQ ID NO: 810064 - DNA, 15 bp, Homo sapiens
acatgcaagatctga

SEQ ID NO: 810065 - DNA, 15 bp, Homo sapiens
catgcaagatctgaa

SEQ ID NO: 810066 - DNA, 15 bp, Homo sapiens
atgcaagatctgaat

SEQ ID NO: 810067 - DNA, 15 bp, Homo sapiens
tgcaagatctgaatg

SEQ ID NO: 810068 - DNA, 15 bp, Homo sapiens
gcaagatctgaatgg

SEQ ID NO: 810069 - DNA, 15 bp, Homo sapiens
caagatctgaatgga

SEQ ID NO: 810070 - DNA, 15 bp, Homo sapiens
aagatctgaatggaa

SEQ ID NO: 810071 - DNA, 15 bp, Homo sapiens
agatctgaatggaaa

SEQ ID NO: 810072 - DNA, 15 bp, Homo sapiens
gatctgaatggaaac

SEQ ID NO: 810073 - DNA, 15 bp, Homo sapiens
atctgaatggaaaca

SEQ ID NO: 810074 - DNA, 15 bp, Homo sapiens
tctgaatggaaacaa

SEQ ID NO: 810075 - DNA, 15 bp, Homo sapiens
ctgaatggaaacaac

SEQ ID NO: 810076 - DNA, 15 bp, Homo sapiens
tgaatggaaacaacc

SEQ ID NO: 810077 - DNA, 15 bp, Homo sapiens
gaatggaaacaacca

SEQ ID NO: 810078 - DNA, 15 bp, Homo sapiens
aatggaaacaaccag

SEQ ID NO: 810079 - DNA, 15 bp, Homo sapiens
atggaaacaaccagt

SEQ ID NO: 810080 - DNA, 15 bp, Homo sapiens
tggaaacaaccagtc

SEQ ID NO: 810081 - DNA, 15 bp, Homo sapiens
ggaaacaaccagtca

SEQ ID NO: 810082 - DNA, 15 bp, Homo sapiens
gaaacaaccagtcag

SEQ ID NO: 810083 - DNA, 15 bp, Homo sapiens
aaacaaccagtcagt

SEQ ID NO: 810084 - DNA, 15 bp, Homo sapiens
aacaaccagtcagtg

SEQ ID NO: 810085 - DNA, 15 bp, Homo sapiens
acaaccagtcagtga

SEQ ID NO: 810086 - DNA, 15 bp, Homo sapiens
caaccagtcagtgac

SEQ ID NO: 810087 - DNA, 15 bp, Homo sapiens
aaccagtcagtgacc

SEQ ID NO: 810088 - DNA, 15 bp, Homo sapiens
accagtcagtgacca

SEQ ID NO: 810089 - DNA, 15 bp, Homo sapiens
ccagtcagtgaccag

SEQ ID NO: 810090 - DNA, 15 bp, Homo sapiens
cagtcagtgaccagg

SEQ ID NO: 810091 - DNA, 15 bp, Homo sapiens
agtcagtgaccaggc

SEQ ID NO: 810092 - DNA, 15 bp, Homo sapiens
gtcagtgaccaggca

SEQ ID NO: 810093 - DNA, 15 bp, Homo sapiens
tcagtgaccaggcag

SEQ ID NO: 810094 - DNA, 15 bp, Homo sapiens
cagtgaccaggcaga

SEQ ID NO: 810095 - DNA, 15 bp, Homo sapiens
agtgaccaggcagaa

SEQ ID NO: 810096 - DNA, 15 bp, Homo sapiens
gtgaccaggcagaag

SEQ ID NO: 810097 - DNA, 15 bp, Homo sapiens
tgaccaggcagaaga

SEQ ID NO: 810098 - DNA, 15 bp, Homo sapiens
gaccaggcagaagat

SEQ ID NO: 810099 - DNA, 15 bp, Homo sapiens
accaggcagaagatg

SEQ ID NO: 810100 - DNA, 15 bp, Homo sapiens
ccaggcagaagatgc

SEQ ID NO: 810101 - DNA, 15 bp, Homo sapiens
caggcagaagatgca

SEQ ID NO: 810102 - DNA, 15 bp, Homo sapiens
aggcagaagatgcag

SEQ ID NO: 810103 - DNA, 15 bp, Homo sapiens
ggcagaagatgcagc

SEQ ID NO: 810104 - DNA, 15 bp, Homo sapiens
gcagaagatgcagca

SEQ ID NO: 810105 - DNA, 15 bp, Homo sapiens
cagaagatgcagcag

SEQ ID NO: 810106 - DNA, 15 bp, Homo sapiens
agaagatgcagcagc

SEQ ID NO: 810107 - DNA, 15 bp, Homo sapiens
gaagatgcagcagct

SEQ ID NO: 810108 - DNA, 15 bp, Homo sapiens
aagatgcagcagctg

SEQ ID NO: 810109 - DNA, 15 bp, Homo sapiens
agatgcagcagctgg

SEQ ID NO: 810110 - DNA, 15 bp, Homo sapiens
gatgcagcagctgga

SEQ ID NO: 810111 - DNA, 15 bp, Homo sapiens
atgcagcagctggaa

SEQ ID NO: 810112 - DNA, 15 bp, Homo sapiens
tgcagcagctggaac

SEQ ID NO: 810113 - DNA, 15 bp, Homo sapiens
gcagcagctggaaca

SEQ ID NO: 810114 - DNA, 15 bp, Homo sapiens
cagcagctggaacag

SEQ ID NO: 810115 - DNA, 15 bp, Homo sapiens
agcagctggaacaga

SEQ ID NO: 810116 - DNA, 15 bp, Homo sapiens
gcagctggaacagat

SEQ ID NO: 810117 - DNA, 15 bp, Homo sapiens
cagctggaacagatg

SEQ ID NO: 810118 - DNA, 15 bp, Homo sapiens
agctggaacagatgc

SEQ ID NO: 810119 - DNA, 15 bp, Homo sapiens
gctggaacagatgct

SEQ ID NO: 810120 - DNA, 15 bp, Homo sapiens
ctggaacagatgctc

SEQ ID NO: 810121 - DNA, 15 bp, Homo sapiens
tggaacagatgctca

SEQ ID NO: 810122 - DNA, 15 bp, Homo sapiens
ggaacagatgctcac

SEQ ID NO: 810123 - DNA, 15 bp, Homo sapiens
gaacagatgctcact

SEQ ID NO: 810124 - DNA, 15 bp, Homo sapiens
aacagatgctcactg

SEQ ID NO: 810125 - DNA, 15 bp, Homo sapiens
acagatgctcactgc

SEQ ID NO: 810126 - DNA, 15 bp, Homo sapiens
cagatgctcactgcg

SEQ ID NO: 810127 - DNA, 15 bp, Homo sapiens
agatgctcactgcgc

SEQ ID NO: 810128 - DNA, 15 bp, Homo sapiens
gatgctcactgcgct

SEQ ID NO: 810129 - DNA, 15 bp, Homo sapiens
atgctcactgcgctg

SEQ ID NO: 810130 - DNA, 15 bp, Homo sapiens
tgctcactgcgctgg

SEQ ID NO: 810131 - DNA, 15 bp, Homo sapiens
gctcactgcgctgga

SEQ ID NO: 810132 - DNA, 15 bp, Homo sapiens
ctcactgcgctggac

SEQ ID NO: 810133 - DNA, 15 bp, Homo sapiens
tcactgcgctggacc

SEQ ID NO: 810134 - DNA, 15 bp, Homo sapiens
cactgcgctggacca

SEQ ID NO: 810135 - DNA, 15 bp, Homo sapiens
actgcgctggaccag

SEQ ID NO: 810136 - DNA, 15 bp, Homo sapiens
ctgcgctggaccaga

SEQ ID NO: 810137 - DNA, 15 bp, Homo sapiens
tgcgctggaccagat

SEQ ID NO: 810138 - DNA, 15 bp, Homo sapiens
gcgctggaccagatg

SEQ ID NO: 810139 - DNA, 15 bp, Homo sapiens
cgctggaccagatgc

SEQ ID NO: 810140 - DNA, 15 bp, Homo sapiens
gctggaccagatgcg

SEQ ID NO: 810141 - DNA, 15 bp, Homo sapiens
ctggaccagatgcgg

SEQ ID NO: 810142 - DNA, 15 bp, Homo sapiens
tggaccagatgcgga

SEQ ID NO: 810143 - DNA, 15 bp, Homo sapiens
ggaccagatgcggag

SEQ ID NO: 810144 - DNA, 15 bp, Homo sapiens
gaccagatgcggaga

SEQ ID NO: 810145 - DNA, 15 bp, Homo sapiens
accagatgcggagag

SEQ ID NO: 810146 - DNA, 15 bp, Homo sapiens
ccagatgcggagagt

SEQ ID NO: 810147 - DNA, 15 bp, Homo sapiens
cagatgcggagagta

SEQ ID NO: 810148 - DNA, 15 bp, Homo sapiens
agatgcggagagtaa

SEQ ID NO: 810149 - DNA, 15 bp, Homo sapiens
gatgcggagagtaag

SEQ ID NO: 810150 - DNA, 15 bp, Homo sapiens
atgcggagagtaagg

SEQ ID NO: 810151 - DNA, 15 bp, Homo sapiens
tgcggagagtaaggg

SEQ ID NO: 810152 - DNA, 15 bp, Homo sapiens
gcggagagtaagggc

SEQ ID NO: 810153 - DNA, 15 bp, Homo sapiens
cggagagtaagggca

SEQ ID NO: 810154 - DNA, 15 bp, Homo sapiens
ggagagtaagggcat

SEQ ID NO: 810155 - DNA, 15 bp, Homo sapiens
gagagtaagggcata

SEQ ID NO: 810156 - DNA, 15 bp, Homo sapiens
agagtaagggcatag

SEQ ID NO: 810157 - DNA, 15 bp, Homo sapiens
gagtaagggcatagg

SEQ ID NO: 810158 - DNA, 15 bp, Homo sapiens
agtaagggcataggt

SEQ ID NO: 810159 - DNA, 15 bp, Homo sapiens
gtaagggcataggtc

SEQ ID NO: 810160 - DNA, 15 bp, Homo sapiens
taagggcataggtcg

SEQ ID NO: 810161 - DNA, 15 bp, Homo sapiens
aagggcataggtcgg

SEQ ID NO: 810162 - DNA, 15 bp, Homo sapiens
agggcataggtcgga

SEQ ID NO: 810163 - DNA, 15 bp, Homo sapiens
gggcataggtcggac

SEQ ID NO: 810164 - DNA, 15 bp, Homo sapiens
ggcataggtcggacc

SEQ ID NO: 810165 - DNA, 15 bp, Homo sapiens
gcataggtcggacca

SEQ ID NO: 810166 - DNA, 15 bp, Homo sapiens
cataggtcggaccac

SEQ ID NO: 810167 - DNA, 15 bp, Homo sapiens
ataggtcggaccact

SEQ ID NO: 810168 - DNA, 15 bp, Homo sapiens
taggtcggaccactt

SEQ ID NO: 810169 - DNA, 15 bp, Homo sapiens
aggtcggaccacttc

SEQ ID NO: 810170 - DNA, 15 bp, Homo sapiens
ggtcggaccacttcc

SEQ ID NO: 810171 - DNA, 15 bp, Homo sapiens
gtcggaccacttccc

SEQ ID NO: 810172 - DNA, 15 bp, Homo sapiens
tcggaccacttcccc

SEQ ID NO: 810173 - DNA, 15 bp, Homo sapiens
cggaccacttccccc

SEQ ID NO: 810174 - DNA, 15 bp, Homo sapiens
ggaccacttccccca

SEQ ID NO: 810175 - DNA, 15 bp, Homo sapiens
gaccacttcccccat

SEQ ID NO: 810176 - DNA, 15 bp, Homo sapiens
accacttcccccatg

SEQ ID NO: 810177 - DNA, 15 bp, Homo sapiens
ccacttcccccatgt

SEQ ID NO: 810178 - DNA, 15 bp, Homo sapiens
cacttcccccatgtg

SEQ ID NO: 810179 - DNA, 15 bp, Homo sapiens
acttcccccatgtgt

SEQ ID NO: 810180 - DNA, 15 bp, Homo sapiens
cttcccccatgtgtc

SEQ ID NO: 810181 - DNA, 15 bp, Homo sapiens
ttcccccatgtgtct

SEQ ID NO: 810182 - DNA, 15 bp, Homo sapiens
tcccccatgtgtctc

SEQ ID NO: 810183 - DNA, 15 bp, Homo sapiens
cccccatgtgtctcg

SEQ ID NO: 810184 - DNA, 15 bp, Homo sapiens
ccccatgtgtctcgc

SEQ ID NO: 810185 - DNA, 15 bp, Homo sapiens
cccatgtgtctcgct

SEQ ID NO: 810186 - DNA, 15 bp, Homo sapiens
ccatgtgtctcgctc

SEQ ID NO: 810187 - DNA, 15 bp, Homo sapiens
catgtgtctcgctca

SEQ ID NO: 810188 - DNA, 15 bp, Homo sapiens
atgtgtctcgctcac

SEQ ID NO: 810189 - DNA, 15 bp, Homo sapiens
tgtgtctcgctcact

SEQ ID NO: 810190 - DNA, 15 bp, Homo sapiens
gtgtctcgctcactt

SEQ ID NO: 810191 - DNA, 15 bp, Homo sapiens
tgtctcgctcacttg

SEQ ID NO: 810192 - DNA, 15 bp, Homo sapiens
gtctcgctcacttgc

SEQ ID NO: 810193 - DNA, 15 bp, Homo sapiens
tctcgctcacttgcg

SEQ ID NO: 810194 - DNA, 15 bp, Homo sapiens
ctcgctcacttgcgg

SEQ ID NO: 810195 - DNA, 15 bp, Homo sapiens
tcgctcacttgcggg

SEQ ID NO: 810196 - DNA, 15 bp, Homo sapiens
cgctcacttgcggga

SEQ ID NO: 810197 - DNA, 15 bp, Homo sapiens
gctcacttgcgggat

SEQ ID NO: 810198 - DNA, 15 bp, Homo sapiens
ctcacttgcgggatt

SEQ ID NO: 810199 - DNA, 15 bp, Homo sapiens
tcacttgcgggattt

SEQ ID NO: 810200 - DNA, 15 bp, Homo sapiens
cacttgcgggatttc

SEQ ID NO: 810201 - DNA, 15 bp, Homo sapiens
acttgcgggatttca

SEQ ID NO: 810202 - DNA, 15 bp, Homo sapiens
cttgcgggatttcag

SEQ ID NO: 810203 - DNA, 15 bp, Homo sapiens
ttgcgggatttcagc

SEQ ID NO: 810204 - DNA, 15 bp, Homo sapiens
tgcgggatttcagcg

SEQ ID NO: 810205 - DNA, 15 bp, Homo sapiens
gcgggatttcagcgt

SEQ ID NO: 810206 - DNA, 15 bp, Homo sapiens
cgggatttcagcgtc

SEQ ID NO: 810207 - DNA, 15 bp, Homo sapiens
gggatttcagcgtct

SEQ ID NO: 810208 - DNA, 15 bp, Homo sapiens
ggatttcagcgtctt

SEQ ID NO: 810209 - DNA, 15 bp, Homo sapiens
gatttcagcgtcttg

SEQ ID NO: 810210 - DNA, 15 bp, Homo sapiens
atttcagcgtcttgt

SEQ ID NO: 810211 - DNA, 15 bp, Homo sapiens
tttcagcgtcttgtg

SEQ ID NO: 810212 - DNA, 15 bp, Homo sapiens
ttcagcgtcttgtgg

SEQ ID NO: 810213 - DNA, 15 bp, Homo sapiens
tcagcgtcttgtggc

SEQ ID NO: 810214 - DNA, 15 bp, Homo sapiens
cagcgtcttgtggca

SEQ ID NO: 810215 - DNA, 15 bp, Homo sapiens
agcgtcttgtggcag

SEQ ID NO: 810216 - DNA, 15 bp, Homo sapiens
gcgtcttgtggcaga

SEQ ID NO: 810217 - DNA, 15 bp, Homo sapiens
cgtcttgtggcagaa

SEQ ID NO: 810218 - DNA, 15 bp, Homo sapiens
gtcttgtggcagaac

SEQ ID NO: 810219 - DNA, 15 bp, Homo sapiens
tcttgtggcagaact

SEQ ID NO: 810220 - DNA, 15 bp, Homo sapiens
cttgtggcagaactt

SEQ ID NO: 810221 - DNA, 15 bp, Homo sapiens
ttgtggcagaacttg

SEQ ID NO: 810222 - DNA, 15 bp, Homo sapiens
tgtggcagaacttgc

SEQ ID NO: 810223 - DNA, 15 bp, Homo sapiens
gtggcagaacttgct

SEQ ID NO: 810224 - DNA, 15 bp, Homo sapiens
tggcagaacttgctt

SEQ ID NO: 810225 - DNA, 15 bp, Homo sapiens
ggcagaacttgcttg

SEQ ID NO: 810226 - DNA, 15 bp, Homo sapiens
gcagaacttgcttgg

SEQ ID NO: 810227 - DNA, 15 bp, Homo sapiens
cagaacttgcttggt

SEQ ID NO: 810228 - DNA, 15 bp, Homo sapiens
agaacttgcttggtt

SEQ ID NO: 810229 - DNA, 15 bp, Homo sapiens
gaacttgcttggttt

SEQ ID NO: 810230 - DNA, 15 bp, Homo sapiens
aacttgcttggtttc

SEQ ID NO: 810231 - DNA, 15 bp, Homo sapiens
acttgcttggtttct

SEQ ID NO: 810232 - DNA, 15 bp, Homo sapiens
cttgcttggtttcta

SEQ ID NO: 810233 - DNA, 15 bp, Homo sapiens
ttgcttggtttctaa

SEQ ID NO: 810234 - DNA, 15 bp, Homo sapiens
tgcttggtttctaag

SEQ ID NO: 810235 - DNA, 15 bp, Homo sapiens
gcttggtttctaaga

SEQ ID NO: 810236 - DNA, 15 bp, Homo sapiens
cttggtttctaagaa

SEQ ID NO: 810237 - DNA, 15 bp, Homo sapiens
ttggtttctaagaag

SEQ ID NO: 810238 - DNA, 15 bp, Homo sapiens
tggtttctaagaagt

SEQ ID NO: 810239 - DNA, 15 bp, Homo sapiens
ggtttctaagaagtt

SEQ ID NO: 810240 - DNA, 15 bp, Homo sapiens
gtttctaagaagttc

SEQ ID NO: 810241 - DNA, 15 bp, Homo sapiens
tttctaagaagttcc

SEQ ID NO: 810242 - DNA, 15 bp, Homo sapiens
ttctaagaagttcct

SEQ ID NO: 810243 - DNA, 15 bp, Homo sapiens
tctaagaagttcctg

SEQ ID NO: 810244 - DNA, 15 bp, Homo sapiens
ctaagaagttcctgc

SEQ ID NO: 810245 - DNA, 15 bp, Homo sapiens
taagaagttcctgct

SEQ ID NO: 810246 - DNA, 15 bp, Homo sapiens
aagaagttcctgctc

SEQ ID NO: 810247 - DNA, 15 bp, Homo sapiens
agaagttcctgctct

SEQ ID NO: 810248 - DNA, 15 bp, Homo sapiens
gaagttcctgctctg

SEQ ID NO: 810249 - DNA, 15 bp, Homo sapiens
aagttcctgctctgg

SEQ ID NO: 810250 - DNA, 15 bp, Homo sapiens
agttcctgctctgga

SEQ ID NO: 810251 - DNA, 15 bp, Homo sapiens
gttcctgctctggag

SEQ ID NO: 810252 - DNA, 15 bp, Homo sapiens
ttcctgctctggagt

SEQ ID NO: 810253 - DNA, 15 bp, Homo sapiens
tcctgctctggagtt

SEQ ID NO: 810254 - DNA, 15 bp, Homo sapiens
cctgctctggagttg

SEQ ID NO: 810255 - DNA, 15 bp, Homo sapiens
gagatgtgggaatgg

SEQ ID NO: 810256 - DNA, 15 bp, Homo sapiens
agatgtgggaatggg

SEQ ID NO: 810257 - DNA, 15 bp, Homo sapiens
gatgtgggaatgggg

SEQ ID NO: 810258 - DNA, 15 bp, Homo sapiens
atgtgggaatggggg

SEQ ID NO: 810259 - DNA, 15 bp, Homo sapiens
tgtgggaatgggggc

SEQ ID NO: 810260 - DNA, 15 bp, Homo sapiens
gtgggaatgggggcc

SEQ ID NO: 810261 - DNA, 15 bp, Homo sapiens
tgggaatgggggccg

SEQ ID NO: 810262 - DNA, 15 bp, Homo sapiens
gggaatgggggccga

SEQ ID NO: 810263 - DNA, 15 bp, Homo sapiens
ggaatgggggccgag

SEQ ID NO: 810264 - DNA, 15 bp, Homo sapiens
gaatgggggccgagc

SEQ ID NO: 810265 - DNA, 15 bp, Homo sapiens
aatgggggccgagcc

SEQ ID NO: 810266 - DNA, 15 bp, Homo sapiens
atgggggccgagcca

SEQ ID NO: 810267 - DNA, 15 bp, Homo sapiens
tgggggccgagccaa

SEQ ID NO: 810268 - DNA, 15 bp, Homo sapiens
gggggccgagccaat

SEQ ID NO: 810269 - DNA, 15 bp, Homo sapiens
ggggccgagccaatt

SEQ ID NO: 810270 - DNA, 15 bp, Homo sapiens
gggccgagccaattg

SEQ ID NO: 810271 - DNA, 15 bp, Homo sapiens
ggccgagccaattgt

SEQ ID NO: 810272 - DNA, 15 bp, Homo sapiens
gccgagccaattgtg

SEQ ID NO: 810273 - DNA, 15 bp, Homo sapiens
ccgagccaattgtga

SEQ ID NO: 810274 - DNA, 15 bp, Homo sapiens
cgagccaattgtgat

SEQ ID NO: 810275 - DNA, 15 bp, Homo sapiens
gagccaattgtgatg

SEQ ID NO: 810276 - DNA, 15 bp, Homo sapiens
agccaattgtgatgt

SEQ ID NO: 810277 - DNA, 15 bp, Homo sapiens
gccaattgtgatgta

SEQ ID NO: 810278 - DNA, 15 bp, Homo sapiens
ccaattgtgatgtaa

SEQ ID NO: 810279 - DNA, 15 bp, Homo sapiens
caattgtgatgtaag

SEQ ID NO: 810280 - DNA, 15 bp, Homo sapiens
aattgtgatgtaagt

SEQ ID NO: 810281 - DNA, 15 bp, Homo sapiens
attgtgatgtaagtt

SEQ ID NO: 810282 - DNA, 15 bp, Homo sapiens
ttgtgatgtaagttt

SEQ ID NO: 810283 - DNA, 15 bp, Homo sapiens
tgtgatgtaagtttt

SEQ ID NO: 810284 - DNA, 15 bp, Homo sapiens
gtgatgtaagttttg

SEQ ID NO: 810285 - DNA, 15 bp, Homo sapiens
tgatgtaagttttgt

SEQ ID NO: 810286 - DNA, 15 bp, Homo sapiens
gatgtaagttttgtt

SEQ ID NO: 810287 - DNA, 15 bp, Homo sapiens
atgtaagttttgttg

SEQ ID NO: 810288 - DNA, 15 bp, Homo sapiens
tgtaagttttgttgg

SEQ ID NO: 810289 - DNA, 15 bp, Homo sapiens
gtaagttttgttggg

SEQ ID NO: 810290 - DNA, 15 bp, Homo sapiens
taagttttgttgggg

SEQ ID NO: 810291 - DNA, 15 bp, Homo sapiens
aagttttgttgggga

SEQ ID NO: 810292 - DNA, 15 bp, Homo sapiens
agttttgttggggat

SEQ ID NO: 810293 - DNA, 15 bp, Homo sapiens
gttttgttggggatg

SEQ ID NO: 810294 - DNA, 15 bp, Homo sapiens
ttttgttggggatga

SEQ ID NO: 810295 - DNA, 15 bp, Homo sapiens
tttgttggggatgaa

SEQ ID NO: 810296 - DNA, 15 bp, Homo sapiens
ttgttggggatgaaa

SEQ ID NO: 810297 - DNA, 15 bp, Homo sapiens
tgttggggatgaaag

SEQ ID NO: 810298 - DNA, 15 bp, Homo sapiens
gttggggatgaaaga

SEQ ID NO: 810299 - DNA, 15 bp, Homo sapiens
ttggggatgaaagac

SEQ ID NO: 810300 - DNA, 15 bp, Homo sapiens
tggggatgaaagaca

SEQ ID NO: 810301 - DNA, 15 bp, Homo sapiens
ggggatgaaagacaa

SEQ ID NO: 810302 - DNA, 15 bp, Homo sapiens
gggatgaaagacaac

SEQ ID NO: 810303 - DNA, 15 bp, Homo sapiens
ggatgaaagacaact

SEQ ID NO: 810304 - DNA, 15 bp, Homo sapiens
gatgaaagacaactg

SEQ ID NO: 810305 - DNA, 15 bp, Homo sapiens
atgaaagacaactgg

SEQ ID NO: 810306 - DNA, 15 bp, Homo sapiens
tgaaagacaactggg

SEQ ID NO: 810307 - DNA, 15 bp, Homo sapiens
gaaagacaactgggg

SEQ ID NO: 810308 - DNA, 15 bp, Homo sapiens
aaagacaactggggt

SEQ ID NO: 810309 - DNA, 15 bp, Homo sapiens
aagacaactggggtg

SEQ ID NO: 810310 - DNA, 15 bp, Homo sapiens
agacaactggggtgt

SEQ ID NO: 810311 - DNA, 15 bp, Homo sapiens
gacaactggggtgtt

SEQ ID NO: 810312 - DNA, 15 bp, Homo sapiens
acaactggggtgttt

SEQ ID NO: 810313 - DNA, 15 bp, Homo sapiens
caactggggtgtttt

SEQ ID NO: 810314 - DNA, 15 bp, Homo sapiens
aactggggtgttttc

SEQ ID NO: 810315 - DNA, 15 bp, Homo sapiens
actggggtgttttcc

SEQ ID NO: 810316 - DNA, 15 bp, Homo sapiens
ctggggtgttttcct

SEQ ID NO: 810317 - DNA, 15 bp, Homo sapiens
tggggtgttttcctt

SEQ ID NO: 810318 - DNA, 15 bp, Homo sapiens
ggggtgttttccttg

SEQ ID NO: 810319 - DNA, 15 bp, Homo sapiens
gggtgttttccttga

SEQ ID NO: 810320 - DNA, 15 bp, Homo sapiens
ggtgttttccttgag

SEQ ID NO: 810321 - DNA, 15 bp, Homo sapiens
gtgttttccttgagg

SEQ ID NO: 810322 - DNA, 15 bp, Homo sapiens
tgttttccttgaggg

SEQ ID NO: 810323 - DNA, 15 bp, Homo sapiens
gttttccttgaggga

SEQ ID NO: 810324 - DNA, 15 bp, Homo sapiens
ttttccttgagggag

SEQ ID NO: 810325 - DNA, 15 bp, Homo sapiens
tttccttgagggaga

SEQ ID NO: 810326 - DNA, 15 bp, Homo sapiens
ttccttgagggagag

SEQ ID NO: 810327 - DNA, 15 bp, Homo sapiens
tccttgagggagaga

SEQ ID NO: 810328 - DNA, 15 bp, Homo sapiens
ccttgagggagagag

SEQ ID NO: 810329 - DNA, 15 bp, Homo sapiens
cttgagggagagagg

SEQ ID NO: 810330 - DNA, 15 bp, Homo sapiens
ttgagggagagaggg

SEQ ID NO: 810331 - DNA, 15 bp, Homo sapiens
tgagggagagagggg

SEQ ID NO: 810332 - DNA, 15 bp, Homo sapiens
gagggagagaggggt

SEQ ID NO: 810333 - DNA, 15 bp, Homo sapiens
agggagagaggggta

SEQ ID NO: 810334 - DNA, 15 bp, Homo sapiens
gggagagaggggtaa

SEQ ID NO: 810335 - DNA, 15 bp, Homo sapiens
ggagagaggggtaaa

SEQ ID NO: 810336 - DNA, 15 bp, Homo sapiens
gagagaggggtaaag

SEQ ID NO: 810337 - DNA, 15 bp, Homo sapiens
agagaggggtaaaga

SEQ ID NO: 810338 - DNA, 15 bp, Homo sapiens
gagaggggtaaagat

SEQ ID NO: 810339 - DNA, 15 bp, Homo sapiens
agaggggtaaagatc

SEQ ID NO: 810340 - DNA, 15 bp, Homo sapiens
gaggggtaaagatcc

SEQ ID NO: 810341 - DNA, 15 bp, Homo sapiens
aggggtaaagatcct

SEQ ID NO: 810342 - DNA, 15 bp, Homo sapiens
ggggtaaagatcctt

SEQ ID NO: 810343 - DNA, 15 bp, Homo sapiens
gggtaaagatccttc

SEQ ID NO: 810344 - DNA, 15 bp, Homo sapiens
ggtaaagatccttct

SEQ ID NO: 810345 - DNA, 15 bp, Homo sapiens
gtaaagatccttctt

SEQ ID NO: 810346 - DNA, 15 bp, Homo sapiens
taaagatccttctta

SEQ ID NO: 810347 - DNA, 15 bp, Homo sapiens
aaagatccttcttaa

SEQ ID NO: 810348 - DNA, 15 bp, Homo sapiens
aagatccttcttaat

SEQ ID NO: 810349 - DNA, 15 bp, Homo sapiens
agatccttcttaatc

SEQ ID NO: 810350 - DNA, 15 bp, Homo sapiens
gatccttcttaatcc

SEQ ID NO: 810351 - DNA, 15 bp, Homo sapiens
atccttcttaatccc

SEQ ID NO: 810352 - DNA, 15 bp, Homo sapiens
tccttcttaatcccc

SEQ ID NO: 810353 - DNA, 15 bp, Homo sapiens
ccttcttaatcccca

SEQ ID NO: 810354 - DNA, 15 bp, Homo sapiens
cttcttaatccccag

SEQ ID NO: 810355 - DNA, 15 bp, Homo sapiens
ttcttaatccccaga

SEQ ID NO: 810356 - DNA, 15 bp, Homo sapiens
tcttaatccccagaa

SEQ ID NO: 810357 - DNA, 15 bp, Homo sapiens
cttaatccccagaat

SEQ ID NO: 810358 - DNA, 15 bp, Homo sapiens
ttaatccccagaatt

SEQ ID NO: 810359 - DNA, 15 bp, Homo sapiens
taatccccagaatta

SEQ ID NO: 810360 - DNA, 15 bp, Homo sapiens
aatccccagaattag

SEQ ID NO: 810361 - DNA, 15 bp, Homo sapiens
atccccagaattaga

SEQ ID NO: 810362 - DNA, 15 bp, Homo sapiens
tccccagaattagaa

SEQ ID NO: 810363 - DNA, 15 bp, Homo sapiens
ccccagaattagaaa

SEQ ID NO: 810364 - DNA, 15 bp, Homo sapiens
cccagaattagaaac

SEQ ID NO: 810365 - DNA, 15 bp, Homo sapiens
ccagaattagaaaca

SEQ ID NO: 810366 - DNA, 15 bp, Homo sapiens
cagaattagaaacat

SEQ ID NO: 810367 - DNA, 15 bp, Homo sapiens
agaattagaaacatc

SEQ ID NO: 810368 - DNA, 15 bp, Homo sapiens
gaattagaaacatca

SEQ ID NO: 810369 - DNA, 15 bp, Homo sapiens
aattagaaacatcaa

SEQ ID NO: 810370 - DNA, 15 bp, Homo sapiens
attagaaacatcaac

SEQ ID NO: 810371 - DNA, 15 bp, Homo sapiens
ttagaaacatcaacc

SEQ ID NO: 810372 - DNA, 15 bp, Homo sapiens
tagaaacatcaacct

SEQ ID NO: 810373 - DNA, 15 bp, Homo sapiens
agaaacatcaacctg

SEQ ID NO: 810374 - DNA, 15 bp, Homo sapiens
gaaacatcaacctgt

SEQ ID NO: 810375 - DNA, 15 bp, Homo sapiens
aaacatcaacctgtt

SEQ ID NO: 810376 - DNA, 15 bp, Homo sapiens
aacatcaacctgttc

SEQ ID NO: 810377 - DNA, 15 bp, Homo sapiens
acatcaacctgttct

SEQ ID NO: 810378 - DNA, 15 bp, Homo sapiens
catcaacctgttctt

SEQ ID NO: 810379 - DNA, 15 bp, Homo sapiens
atcaacctgttcttt

SEQ ID NO: 810380 - DNA, 15 bp, Homo sapiens
tcaacctgttctttc

SEQ ID NO: 810381 - DNA, 15 bp, Homo sapiens
caacctgttctttca

SEQ ID NO: 810382 - DNA, 15 bp, Homo sapiens
aacctgttctttcag

SEQ ID NO: 810383 - DNA, 15 bp, Homo sapiens
acctgttctttcagc

SEQ ID NO: 810384 - DNA, 15 bp, Homo sapiens
cctgttctttcagct

SEQ ID NO: 810385 - DNA, 15 bp, Homo sapiens
ctgttctttcagctg

SEQ ID NO: 810386 - DNA, 15 bp, Homo sapiens
tgttctttcagctgt

SEQ ID NO: 810387 - DNA, 15 bp, Homo sapiens
gttctttcagctgta

SEQ ID NO: 810388 - DNA, 15 bp, Homo sapiens
ttctttcagctgtag

SEQ ID NO: 810389 - DNA, 15 bp, Homo sapiens
tctttcagctgtagt

SEQ ID NO: 810390 - DNA, 15 bp, Homo sapiens
ctttcagctgtagtt

SEQ ID NO: 810391 - DNA, 15 bp, Homo sapiens
tttcagctgtagtta

SEQ ID NO: 810392 - DNA, 15 bp, Homo sapiens
ttcagctgtagttat

SEQ ID NO: 810393 - DNA, 15 bp, Homo sapiens
tcagctgtagttatt

SEQ ID NO: 810394 - DNA, 15 bp, Homo sapiens
cagctgtagttattc

SEQ ID NO: 810395 - DNA, 15 bp, Homo sapiens
agctgtagttattcc

SEQ ID NO: 810396 - DNA, 15 bp, Homo sapiens
gctgtagttattcca

SEQ ID NO: 810397 - DNA, 15 bp, Homo sapiens
ctgtagttattccaa

SEQ ID NO: 810398 - DNA, 15 bp, Homo sapiens
tgtagttattccaaa

SEQ ID NO: 810399 - DNA, 15 bp, Homo sapiens
gtagttattccaaaa

SEQ ID NO: 810400 - DNA, 15 bp, Homo sapiens
tagttattccaaaaa

SEQ ID NO: 810401 - DNA, 15 bp, Homo sapiens
agttattccaaaaag

SEQ ID NO: 810402 - DNA, 15 bp, Homo sapiens
gttattccaaaaagt

SEQ ID NO: 810403 - DNA, 15 bp, Homo sapiens
ttattccaaaaagtc

SEQ ID NO: 810404 - DNA, 15 bp, Homo sapiens
tattccaaaaagtca

SEQ ID NO: 810405 - DNA, 15 bp, Homo sapiens
attccaaaaagtcac

SEQ ID NO: 810406 - DNA, 15 bp, Homo sapiens
ttccaaaaagtcact

SEQ ID NO: 810407 - DNA, 15 bp, Homo sapiens
tccaaaaagtcactt

SEQ ID NO: 810408 - DNA, 15 bp, Homo sapiens
ccaaaaagtcacttc

SEQ ID NO: 810409 - DNA, 15 bp, Homo sapiens
caaaaagtcacttca

SEQ ID NO: 810410 - DNA, 15 bp, Homo sapiens
aaaaagtcacttcag

SEQ ID NO: 810411 - DNA, 15 bp, Homo sapiens
aaaagtcacttcagg

SEQ ID NO: 810412 - DNA, 15 bp, Homo sapiens
aaagtcacttcaggc

SEQ ID NO: 810413 - DNA, 15 bp, Homo sapiens
aagtcacttcaggcc

SEQ ID NO: 810414 - DNA, 15 bp, Homo sapiens
agtcacttcaggcca

SEQ ID NO: 810415 - DNA, 15 bp, Homo sapiens
gtcacttcaggccaa

SEQ ID NO: 810416 - DNA, 15 bp, Homo sapiens
tcacttcaggccaaa

SEQ ID NO: 810417 - DNA, 15 bp, Homo sapiens
cacttcaggccaaag

SEQ ID NO: 810418 - DNA, 15 bp, Homo sapiens
acttcaggccaaagt

SEQ ID NO: 810419 - DNA, 15 bp, Homo sapiens
cttcaggccaaagtg

SEQ ID NO: 810420 - DNA, 15 bp, Homo sapiens
ttcaggccaaagtga

SEQ ID NO: 810421 - DNA, 15 bp, Homo sapiens
tcaggccaaagtgac

SEQ ID NO: 810422 - DNA, 15 bp, Homo sapiens
caggccaaagtgaca

SEQ ID NO: 810423 - DNA, 15 bp, Homo sapiens
aggccaaagtgacat

SEQ ID NO: 810424 - DNA, 15 bp, Homo sapiens
ggccaaagtgacatg

SEQ ID NO: 810425 - DNA, 15 bp, Homo sapiens
gccaaagtgacatga

SEQ ID NO: 810426 - DNA, 15 bp, Homo sapiens
ccaaagtgacatgaa

SEQ ID NO: 810427 - DNA, 15 bp, Homo sapiens
caaagtgacatgaac

SEQ ID NO: 810428 - DNA, 15 bp, Homo sapiens
aaagtgacatgaaca

SEQ ID NO: 810429 - DNA, 15 bp, Homo sapiens
aagtgacatgaacag

SEQ ID NO: 810430 - DNA, 15 bp, Homo sapiens
agtgacatgaacaga

SEQ ID NO: 810431 - DNA, 15 bp, Homo sapiens
gtgacatgaacagaa

SEQ ID NO: 810432 - DNA, 15 bp, Homo sapiens
tgacatgaacagaag

SEQ ID NO: 810433 - DNA, 15 bp, Homo sapiens
gacatgaacagaagt

SEQ ID NO: 810434 - DNA, 15 bp, Homo sapiens
acatgaacagaagtt

SEQ ID NO: 810435 - DNA, 15 bp, Homo sapiens
catgaacagaagttc

SEQ ID NO: 810436 - DNA, 15 bp, Homo sapiens
atgaacagaagttcc

SEQ ID NO: 810437 - DNA, 15 bp, Homo sapiens
tgaacagaagttcca

SEQ ID NO: 810438 - DNA, 15 bp, Homo sapiens
gaacagaagttccat

SEQ ID NO: 810439 - DNA, 15 bp, Homo sapiens
aacagaagttccatg

SEQ ID NO: 810440 - DNA, 15 bp, Homo sapiens
acagaagttccatgt

SEQ ID NO: 810441 - DNA, 15 bp, Homo sapiens
cagaagttccatgtg

SEQ ID NO: 810442 - DNA, 15 bp, Homo sapiens
agaagttccatgtgc

SEQ ID NO: 810443 - DNA, 15 bp, Homo sapiens
gaagttccatgtgcc

SEQ ID NO: 810444 - DNA, 15 bp, Homo sapiens
aagttccatgtgcca

SEQ ID NO: 810445 - DNA, 15 bp, Homo sapiens
agttccatgtgccat

SEQ ID NO: 810446 - DNA, 15 bp, Homo sapiens
gttccatgtgccatg

SEQ ID NO: 810447 - DNA, 15 bp, Homo sapiens
ttccatgtgccatgg

SEQ ID NO: 810448 - DNA, 15 bp, Homo sapiens
tccatgtgccatgga

SEQ ID NO: 810449 - DNA, 15 bp, Homo sapiens
ccatgtgccatggag

SEQ ID NO: 810450 - DNA, 15 bp, Homo sapiens
catgtgccatggagc

SEQ ID NO: 810451 - DNA, 15 bp, Homo sapiens
atgtgccatggagct

SEQ ID NO: 810452 - DNA, 15 bp, Homo sapiens
tgtgccatggagctc

SEQ ID NO: 810453 - DNA, 15 bp, Homo sapiens
gtgccatggagctct

SEQ ID NO: 810454 - DNA, 15 bp, Homo sapiens
tgccatggagctctc

SEQ ID NO: 810455 - DNA, 15 bp, Homo sapiens
gccatggagctctct

SEQ ID NO: 810456 - DNA, 15 bp, Homo sapiens
ccatggagctctctg

SEQ ID NO: 810457 - DNA, 15 bp, Homo sapiens
catggagctctctgg

SEQ ID NO: 810458 - DNA, 15 bp, Homo sapiens
atggagctctctggc

SEQ ID NO: 810459 - DNA, 15 bp, Homo sapiens
tggagctctctggct

SEQ ID NO: 810460 - DNA, 15 bp, Homo sapiens
ggagctctctggctt

SEQ ID NO: 810461 - DNA, 15 bp, Homo sapiens
gagctctctggcttg

SEQ ID NO: 810462 - DNA, 15 bp, Homo sapiens
agctctctggcttgg

SEQ ID NO: 810463 - DNA, 15 bp, Homo sapiens
gctctctggcttgga

SEQ ID NO: 810464 - DNA, 15 bp, Homo sapiens
ctctctggcttggaa

SEQ ID NO: 810465 - DNA, 15 bp, Homo sapiens
tctctggcttggaac

SEQ ID NO: 810466 - DNA, 15 bp, Homo sapiens
ctctggcttggaaca

SEQ ID NO: 810467 - DNA, 15 bp, Homo sapiens
tctggcttggaacat

SEQ ID NO: 810468 - DNA, 15 bp, Homo sapiens
ctggcttggaacatt

SEQ ID NO: 810469 - DNA, 15 bp, Homo sapiens
tggcttggaacattt

SEQ ID NO: 810470 - DNA, 15 bp, Homo sapiens
ggcttggaacatttc

SEQ ID NO: 810471 - DNA, 15 bp, Homo sapiens
gcttggaacatttcc

SEQ ID NO: 810472 - DNA, 15 bp, Homo sapiens
cttggaacatttccg

SEQ ID NO: 810473 - DNA, 15 bp, Homo sapiens
ttggaacatttccgt

SEQ ID NO: 810474 - DNA, 15 bp, Homo sapiens
tggaacatttccgtg

SEQ ID NO: 810475 - DNA, 15 bp, Homo sapiens
ggaacatttccgtga

SEQ ID NO: 810476 - DNA, 15 bp, Homo sapiens
gaacatttccgtgaa

SEQ ID NO: 810477 - DNA, 15 bp, Homo sapiens
aacatttccgtgaat

SEQ ID NO: 810478 - DNA, 15 bp, Homo sapiens
acatttccgtgaata

SEQ ID NO: 810479 - DNA, 15 bp, Homo sapiens
catttccgtgaatat

SEQ ID NO: 810480 - DNA, 15 bp, Homo sapiens
atttccgtgaatatc

SEQ ID NO: 810481 - DNA, 15 bp, Homo sapiens
tttccgtgaatatct

SEQ ID NO: 810482 - DNA, 15 bp, Homo sapiens
ttccgtgaatatctg

SEQ ID NO: 810483 - DNA, 15 bp, Homo sapiens
tccgtgaatatctgg

SEQ ID NO: 810484 - DNA, 15 bp, Homo sapiens
ccgtgaatatctggg

SEQ ID NO: 810485 - DNA, 15 bp, Homo sapiens
cgtgaatatctggga

SEQ ID NO: 810486 - DNA, 15 bp, Homo sapiens
gtgaatatctgggag

SEQ ID NO: 810487 - DNA, 15 bp, Homo sapiens
tgaatatctgggagt

SEQ ID NO: 810488 - DNA, 15 bp, Homo sapiens
gaatatctgggagtt

SEQ ID NO: 810489 - DNA, 15 bp, Homo sapiens
aatatctgggagttg

SEQ ID NO: 810490 - DNA, 15 bp, Homo sapiens
atatctgggagttgg

SEQ ID NO: 810491 - DNA, 15 bp, Homo sapiens
tatctgggagttggc

SEQ ID NO: 810492 - DNA, 15 bp, Homo sapiens
atctgggagttggct

SEQ ID NO: 810493 - DNA, 15 bp, Homo sapiens
tctgggagttggctc

SEQ ID NO: 810494 - DNA, 15 bp, Homo sapiens
ctgggagttggctcc

SEQ ID NO: 810495 - DNA, 15 bp, Homo sapiens
tgggagttggctcct

SEQ ID NO: 810496 - DNA, 15 bp, Homo sapiens
gggagttggctcctc

SEQ ID NO: 810497 - DNA, 15 bp, Homo sapiens
ggagttggctcctcc

SEQ ID NO: 810498 - DNA, 15 bp, Homo sapiens
gagttggctcctcct

SEQ ID NO: 810499 - DNA, 15 bp, Homo sapiens
agttggctcctcctt

SEQ ID NO: 810500 - DNA, 15 bp, Homo sapiens
gttggctcctcctta

SEQ ID NO: 810501 - DNA, 15 bp, Homo sapiens
ttggctcctccttaa

SEQ ID NO: 810502 - DNA, 15 bp, Homo sapiens
tggctcctccttaag

SEQ ID NO: 810503 - DNA, 15 bp, Homo sapiens
ggctcctccttaagg

SEQ ID NO: 810504 - DNA, 15 bp, Homo sapiens
gctcctccttaagga

SEQ ID NO: 810505 - DNA, 15 bp, Homo sapiens
ctcctccttaaggag

SEQ ID NO: 810506 - DNA, 15 bp, Homo sapiens
tcctccttaaggaga

SEQ ID NO: 810507 - DNA, 15 bp, Homo sapiens
cctccttaaggagaa

SEQ ID NO: 810508 - DNA, 15 bp, Homo sapiens
ctccttaaggagaag

SEQ ID NO: 810509 - DNA, 15 bp, Homo sapiens
tccttaaggagaagt

SEQ ID NO: 810510 - DNA, 15 bp, Homo sapiens
ccttaaggagaagtg

SEQ ID NO: 810511 - DNA, 15 bp, Homo sapiens
cttaaggagaagtgg

SEQ ID NO: 810512 - DNA, 15 bp, Homo sapiens
ttaaggagaagtgga

SEQ ID NO: 810513 - DNA, 15 bp, Homo sapiens
taaggagaagtggaa

SEQ ID NO: 810514 - DNA, 15 bp, Homo sapiens
aaggagaagtggaaa

SEQ ID NO: 810515 - DNA, 15 bp, Homo sapiens
aggagaagtggaaag

SEQ ID NO: 810516 - DNA, 15 bp, Homo sapiens
ggagaagtggaaagt

SEQ ID NO: 810517 - DNA, 15 bp, Homo sapiens
gagaagtggaaagtc

SEQ ID NO: 810518 - DNA, 15 bp, Homo sapiens
agaagtggaaagtcc

SEQ ID NO: 810519 - DNA, 15 bp, Homo sapiens
gaagtggaaagtccc

SEQ ID NO: 810520 - DNA, 15 bp, Homo sapiens
aagtggaaagtccct

SEQ ID NO: 810521 - DNA, 15 bp, Homo sapiens
agtggaaagtccctt

SEQ ID NO: 810522 - DNA, 15 bp, Homo sapiens
gtggaaagtcccttg

SEQ ID NO: 810523 - DNA, 15 bp, Homo sapiens
tggaaagtcccttgc

SEQ ID NO: 810524 - DNA, 15 bp, Homo sapiens
ggaaagtcccttgct

SEQ ID NO: 810525 - DNA, 15 bp, Homo sapiens
gaaagtcccttgctg

SEQ ID NO: 810526 - DNA, 15 bp, Homo sapiens
aaagtcccttgctga

SEQ ID NO: 810527 - DNA, 15 bp, Homo sapiens
aagtcccttgctgag

SEQ ID NO: 810528 - DNA, 15 bp, Homo sapiens
agtcccttgctgagt

SEQ ID NO: 810529 - DNA, 15 bp, Homo sapiens
gtcccttgctgagtt

SEQ ID NO: 810530 - DNA, 15 bp, Homo sapiens
tcccttgctgagttg

SEQ ID NO: 810531 - DNA, 15 bp, Homo sapiens
cccttgctgagttgt

SEQ ID NO: 810532 - DNA, 15 bp, Homo sapiens
ccttgctgagttgtt

SEQ ID NO: 810533 - DNA, 15 bp, Homo sapiens
cttgctgagttgttc

SEQ ID NO: 810534 - DNA, 15 bp, Homo sapiens
ttgctgagttgttct

SEQ ID NO: 810535 - DNA, 15 bp, Homo sapiens
tgctgagttgttctc

SEQ ID NO: 810536 - DNA, 15 bp, Homo sapiens
gctgagttgttctcc

SEQ ID NO: 810537 - DNA, 15 bp, Homo sapiens
ctgagttgttctcca

SEQ ID NO: 810538 - DNA, 15 bp, Homo sapiens
tgagttgttctccac

SEQ ID NO: 810539 - DNA, 15 bp, Homo sapiens
gagttgttctccaca

SEQ ID NO: 810540 - DNA, 15 bp, Homo sapiens
agttgttctccacac

SEQ ID NO: 810541 - DNA, 15 bp, Homo sapiens
gttgttctccacacc

SEQ ID NO: 810542 - DNA, 15 bp, Homo sapiens
ttgttctccacaccc

SEQ ID NO: 810543 - DNA, 15 bp, Homo sapiens
tgttctccacaccca

SEQ ID NO: 810544 - DNA, 15 bp, Homo sapiens
gttctccacacccat

SEQ ID NO: 810545 - DNA, 15 bp, Homo sapiens
ttctccacacccatg

SEQ ID NO: 810546 - DNA, 15 bp, Homo sapiens
tctccacacccatgt

SEQ ID NO: 810547 - DNA, 15 bp, Homo sapiens
ctccacacccatgtg

SEQ ID NO: 810548 - DNA, 15 bp, Homo sapiens
tccacacccatgtgg

SEQ ID NO: 810549 - DNA, 15 bp, Homo sapiens
ccacacccatgtggt

SEQ ID NO: 810550 - DNA, 15 bp, Homo sapiens
cacacccatgtggta

SEQ ID NO: 810551 - DNA, 15 bp, Homo sapiens
acacccatgtggtat

SEQ ID NO: 810552 - DNA, 15 bp, Homo sapiens
cacccatgtggtata

SEQ ID NO: 810553 - DNA, 15 bp, Homo sapiens
acccatgtggtataa

SEQ ID NO: 810554 - DNA, 15 bp, Homo sapiens
cccatgtggtataaa

SEQ ID NO: 810555 - DNA, 15 bp, Homo sapiens
ccatgtggtataaag

SEQ ID NO: 810556 - DNA, 15 bp, Homo sapiens
catgtggtataaagc

SEQ ID NO: 810557 - DNA, 15 bp, Homo sapiens
atgtggtataaagca

SEQ ID NO: 810558 - DNA, 15 bp, Homo sapiens
tgtggtataaagcag

SEQ ID NO: 810559 - DNA, 15 bp, Homo sapiens
gtggtataaagcagc

SEQ ID NO: 810560 - DNA, 15 bp, Homo sapiens
tggtataaagcagct

SEQ ID NO: 810561 - DNA, 15 bp, Homo sapiens
ggtataaagcagctt

SEQ ID NO: 810562 - DNA, 15 bp, Homo sapiens
gtataaagcagcttt

SEQ ID NO: 810563 - DNA, 15 bp, Homo sapiens
tataaagcagctttc

SEQ ID NO: 810564 - DNA, 15 bp, Homo sapiens
ataaagcagctttcc

SEQ ID NO: 810565 - DNA, 15 bp, Homo sapiens
taaagcagctttcca

SEQ ID NO: 810566 - DNA, 15 bp, Homo sapiens
aaagcagctttccac

SEQ ID NO: 810567 - DNA, 15 bp, Homo sapiens
aagcagctttccacc

SEQ ID NO: 810568 - DNA, 15 bp, Homo sapiens
agcagctttccacct

SEQ ID NO: 810569 - DNA, 15 bp, Homo sapiens
gcagctttccacctt

SEQ ID NO: 810570 - DNA, 15 bp, Homo sapiens
cagctttccaccttg

SEQ ID NO: 810571 - DNA, 15 bp, Homo sapiens
agctttccaccttgc

SEQ ID NO: 810572 - DNA, 15 bp, Homo sapiens
gctttccaccttgcc

SEQ ID NO: 810573 - DNA, 15 bp, Homo sapiens
ctttccaccttgcct

SEQ ID NO: 810574 - DNA, 15 bp, Homo sapiens
tttccaccttgcctg

SEQ ID NO: 810575 - DNA, 15 bp, Homo sapiens
ttccaccttgcctgg

SEQ ID NO: 810576 - DNA, 15 bp, Homo sapiens
tccaccttgcctggg

SEQ ID NO: 810577 - DNA, 15 bp, Homo sapiens
ccaccttgcctgggg

SEQ ID NO: 810578 - DNA, 15 bp, Homo sapiens
caccttgcctggggc

SEQ ID NO: 810579 - DNA, 15 bp, Homo sapiens
accttgcctggggct

SEQ ID NO: 810580 - DNA, 15 bp, Homo sapiens
ccttgcctggggctt

SEQ ID NO: 810581 - DNA, 15 bp, Homo sapiens
cttgcctggggcttt

SEQ ID NO: 810582 - DNA, 15 bp, Homo sapiens
ttgcctggggctttc

SEQ ID NO: 810583 - DNA, 15 bp, Homo sapiens
tgcctggggctttcc

SEQ ID NO: 810584 - DNA, 15 bp, Homo sapiens
gcctggggctttcca

SEQ ID NO: 810585 - DNA, 15 bp, Homo sapiens
cctggggctttccaa

SEQ ID NO: 810586 - DNA, 15 bp, Homo sapiens
ctggggctttccaaa

SEQ ID NO: 810587 - DNA, 15 bp, Homo sapiens
tggggctttccaaat

SEQ ID NO: 810588 - DNA, 15 bp, Homo sapiens
ggggctttccaaatt

SEQ ID NO: 810589 - DNA, 15 bp, Homo sapiens
gggctttccaaattc

SEQ ID NO: 810590 - DNA, 15 bp, Homo sapiens
ggctttccaaattcc

SEQ ID NO: 810591 - DNA, 15 bp, Homo sapiens
gctttccaaattccc

SEQ ID NO: 810592 - DNA, 15 bp, Homo sapiens
ctttccaaattcccc

SEQ ID NO: 810593 - DNA, 15 bp, Homo sapiens
tttccaaattcccca

SEQ ID NO: 810594 - DNA, 15 bp, Homo sapiens
ttccaaattccccat

SEQ ID NO: 810595 - DNA, 15 bp, Homo sapiens
tccaaattccccatc

SEQ ID NO: 810596 - DNA, 15 bp, Homo sapiens
ccaaattccccatcc

SEQ ID NO: 810597 - DNA, 15 bp, Homo sapiens
caaattccccatcca

SEQ ID NO: 810598 - DNA, 15 bp, Homo sapiens
aaattccccatccag

SEQ ID NO: 810599 - DNA, 15 bp, Homo sapiens
aattccccatccagc

SEQ ID NO: 810600 - DNA, 15 bp, Homo sapiens
attccccatccagct

SEQ ID NO: 810601 - DNA, 15 bp, Homo sapiens
ttccccatccagctc

SEQ ID NO: 810602 - DNA, 15 bp, Homo sapiens
tccccatccagctcc

SEQ ID NO: 810603 - DNA, 15 bp, Homo sapiens
ccccatccagctcct

SEQ ID NO: 810604 - DNA, 15 bp, Homo sapiens
cccatccagctcctg

SEQ ID NO: 810605 - DNA, 15 bp, Homo sapiens
ccatccagctcctgc

SEQ ID NO: 810606 - DNA, 15 bp, Homo sapiens
catccagctcctgcg

SEQ ID NO: 810607 - DNA, 15 bp, Homo sapiens
atccagctcctgcgg

SEQ ID NO: 810608 - DNA, 15 bp, Homo sapiens
tccagctcctgcggc

SEQ ID NO: 810609 - DNA, 15 bp, Homo sapiens
ccagctcctgcggct

SEQ ID NO: 810610 - DNA, 15 bp, Homo sapiens
cagctcctgcggctg

SEQ ID NO: 810611 - DNA, 15 bp, Homo sapiens
agctcctgcggctga

SEQ ID NO: 810612 - DNA, 15 bp, Homo sapiens
gctcctgcggctgac

SEQ ID NO: 810613 - DNA, 15 bp, Homo sapiens
ctcctgcggctgacc

SEQ ID NO: 810614 - DNA, 15 bp, Homo sapiens
tcctgcggctgaccc

SEQ ID NO: 810615 - DNA, 15 bp, Homo sapiens
cctgcggctgaccct

SEQ ID NO: 810616 - DNA, 15 bp, Homo sapiens
ctgcggctgaccctg

SEQ ID NO: 810617 - DNA, 15 bp, Homo sapiens
tgcggctgaccctgc

SEQ ID NO: 810618 - DNA, 15 bp, Homo sapiens
gcggctgaccctgct

SEQ ID NO: 810619 - DNA, 15 bp, Homo sapiens
cggctgaccctgctt

SEQ ID NO: 810620 - DNA, 15 bp, Homo sapiens
ggctgaccctgcttg

SEQ ID NO: 810621 - DNA, 15 bp, Homo sapiens
gctgaccctgcttgg

SEQ ID NO: 810622 - DNA, 15 bp, Homo sapiens
ctgaccctgcttggc

SEQ ID NO: 810623 - DNA, 15 bp, Homo sapiens
tgaccctgcttggct

SEQ ID NO: 810624 - DNA, 15 bp, Homo sapiens
gaccctgcttggctc

SEQ ID NO: 810625 - DNA, 15 bp, Homo sapiens
accctgcttggctcc

SEQ ID NO: 810626 - DNA, 15 bp, Homo sapiens
ccctgcttggctcca

SEQ ID NO: 810627 - DNA, 15 bp, Homo sapiens
cctgcttggctccat

SEQ ID NO: 810628 - DNA, 15 bp, Homo sapiens
ctgcttggctccatt

SEQ ID NO: 810629 - DNA, 15 bp, Homo sapiens
tgcttggctccattt

SEQ ID NO: 810630 - DNA, 15 bp, Homo sapiens
gcttggctccatttt

SEQ ID NO: 810631 - DNA, 15 bp, Homo sapiens
cttggctccattttt

SEQ ID NO: 810632 - DNA, 15 bp, Homo sapiens
ttggctccattttta

SEQ ID NO: 810633 - DNA, 15 bp, Homo sapiens
tggctccatttttag

SEQ ID NO: 810634 - DNA, 15 bp, Homo sapiens
ggctccatttttagt

SEQ ID NO: 810635 - DNA, 15 bp, Homo sapiens
gctccatttttagtg

SEQ ID NO: 810636 - DNA, 15 bp, Homo sapiens
ctccatttttagtgc

SEQ ID NO: 810637 - DNA, 15 bp, Homo sapiens
tccatttttagtgcc

SEQ ID NO: 810638 - DNA, 15 bp, Homo sapiens
ccatttttagtgccc

SEQ ID NO: 810639 - DNA, 15 bp, Homo sapiens
catttttagtgccct

SEQ ID NO: 810640 - DNA, 15 bp, Homo sapiens
atttttagtgccctg

SEQ ID NO: 810641 - DNA, 15 bp, Homo sapiens
tttttagtgccctgt

SEQ ID NO: 810642 - DNA, 15 bp, Homo sapiens
ttttagtgccctgtt

SEQ ID NO: 810643 - DNA, 15 bp, Homo sapiens
tttagtgccctgttt

SEQ ID NO: 810644 - DNA, 15 bp, Homo sapiens
ttagtgccctgtttt

SEQ ID NO: 810645 - DNA, 15 bp, Homo sapiens
tagtgccctgttttt

SEQ ID NO: 810646 - DNA, 15 bp, Homo sapiens
agtgccctgtttttc

SEQ ID NO: 810647 - DNA, 15 bp, Homo sapiens
gtgccctgtttttct

SEQ ID NO: 810648 - DNA, 15 bp, Homo sapiens
tgccctgtttttctc

SEQ ID NO: 810649 - DNA, 15 bp, Homo sapiens
gccctgtttttctct

SEQ ID NO: 810650 - DNA, 15 bp, Homo sapiens
ccctgtttttctctc

SEQ ID NO: 810651 - DNA, 15 bp, Homo sapiens
cctgtttttctctcc

SEQ ID NO: 810652 - DNA, 15 bp, Homo sapiens
ctgtttttctctccc

SEQ ID NO: 810653 - DNA, 15 bp, Homo sapiens
tgtttttctctccca

SEQ ID NO: 810654 - DNA, 15 bp, Homo sapiens
gtttttctctcccac

SEQ ID NO: 810655 - DNA, 15 bp, Homo sapiens
tttttctctcccact

SEQ ID NO: 810656 - DNA, 15 bp, Homo sapiens
ttttctctcccactg

SEQ ID NO: 810657 - DNA, 15 bp, Homo sapiens
tttctctcccactga

SEQ ID NO: 810658 - DNA, 15 bp, Homo sapiens
ttctctcccactgag

SEQ ID NO: 810659 - DNA, 15 bp, Homo sapiens
tctctcccactgagg

SEQ ID NO: 810660 - DNA, 15 bp, Homo sapiens
ctctcccactgaggt

SEQ ID NO: 810661 - DNA, 15 bp, Homo sapiens
tctcccactgaggtg

SEQ ID NO: 810662 - DNA, 15 bp, Homo sapiens
ctcccactgaggtgg

SEQ ID NO: 810663 - DNA, 15 bp, Homo sapiens
tcccactgaggtggg

SEQ ID NO: 810664 - DNA, 15 bp, Homo sapiens
cccactgaggtggga

SEQ ID NO: 810665 - DNA, 15 bp, Homo sapiens
ccactgaggtgggat

SEQ ID NO: 810666 - DNA, 15 bp, Homo sapiens
cactgaggtgggata

SEQ ID NO: 810667 - DNA, 15 bp, Homo sapiens
actgaggtgggatag

SEQ ID NO: 810668 - DNA, 15 bp, Homo sapiens
ctgaggtgggataga

SEQ ID NO: 810669 - DNA, 15 bp, Homo sapiens
tgaggtgggatagag

SEQ ID NO: 810670 - DNA, 15 bp, Homo sapiens
gaggtgggatagagg

SEQ ID NO: 810671 - DNA, 15 bp, Homo sapiens
aggtgggatagaggg

SEQ ID NO: 810672 - DNA, 15 bp, Homo sapiens
ggtgggatagagggt

SEQ ID NO: 810673 - DNA, 15 bp, Homo sapiens
gtgggatagagggtg

SEQ ID NO: 810674 - DNA, 15 bp, Homo sapiens
tgggatagagggtgt

SEQ ID NO: 810675 - DNA, 15 bp, Homo sapiens
gggatagagggtgta

SEQ ID NO: 810676 - DNA, 15 bp, Homo sapiens
ggatagagggtgtaa

SEQ ID NO: 810677 - DNA, 15 bp, Homo sapiens
gatagagggtgtaaa

SEQ ID NO: 810678 - DNA, 15 bp, Homo sapiens
atagagggtgtaaaa

SEQ ID NO: 810679 - DNA, 15 bp, Homo sapiens
tagagggtgtaaaag

SEQ ID NO: 810680 - DNA, 15 bp, Homo sapiens
agagggtgtaaaagc

SEQ ID NO: 810681 - DNA, 15 bp, Homo sapiens
gagggtgtaaaagca

SEQ ID NO: 810682 - DNA, 15 bp, Homo sapiens
agggtgtaaaagcaa

SEQ ID NO: 810683 - DNA, 15 bp, Homo sapiens
gggtgtaaaagcaac

SEQ ID NO: 810684 - DNA, 15 bp, Homo sapiens
ggtgtaaaagcaaca

SEQ ID NO: 810685 - DNA, 15 bp, Homo sapiens
gtgtaaaagcaacag

SEQ ID NO: 810686 - DNA, 15 bp, Homo sapiens
tgtaaaagcaacaga

SEQ ID NO: 810687 - DNA, 15 bp, Homo sapiens
gtaaaagcaacagat

SEQ ID NO: 810688 - DNA, 15 bp, Homo sapiens
taaaagcaacagatt

SEQ ID NO: 810689 - DNA, 15 bp, Homo sapiens
aaaagcaacagattt

SEQ ID NO: 810690 - DNA, 15 bp, Homo sapiens
aaagcaacagatttg

SEQ ID NO: 810691 - DNA, 15 bp, Homo sapiens
aagcaacagatttga

SEQ ID NO: 810692 - DNA, 15 bp, Homo sapiens
agcaacagatttgag

SEQ ID NO: 810693 - DNA, 15 bp, Homo sapiens
gcaacagatttgagt

SEQ ID NO: 810694 - DNA, 15 bp, Homo sapiens
caacagatttgagtt

SEQ ID NO: 810695 - DNA, 15 bp, Homo sapiens
aacagatttgagtta

SEQ ID NO: 810696 - DNA, 15 bp, Homo sapiens
acagatttgagttaa

SEQ ID NO: 810697 - DNA, 15 bp, Homo sapiens
cagatttgagttaaa

SEQ ID NO: 810698 - DNA, 15 bp, Homo sapiens
agatttgagttaaac

SEQ ID NO: 810699 - DNA, 15 bp, Homo sapiens
gatttgagttaaact

SEQ ID NO: 810700 - DNA, 15 bp, Homo sapiens
atttgagttaaactt

SEQ ID NO: 810701 - DNA, 15 bp, Homo sapiens
tttgagttaaacttt

SEQ ID NO: 810702 - DNA, 15 bp, Homo sapiens
ttgagttaaacttta

SEQ ID NO: 810703 - DNA, 15 bp, Homo sapiens
tgagttaaactttaa

SEQ ID NO: 810704 - DNA, 15 bp, Homo sapiens
gagttaaactttaaa

SEQ ID NO: 810705 - DNA, 15 bp, Homo sapiens
agttaaactttaaaa

SEQ ID NO: 810706 - DNA, 15 bp, Homo sapiens
gttaaactttaaaat

SEQ ID NO: 810707 - DNA, 15 bp, Homo sapiens
ttaaactttaaaata

SEQ ID NO: 810708 - DNA, 15 bp, Homo sapiens
taaactttaaaataa

SEQ ID NO: 810709 - DNA, 15 bp, Homo sapiens
aaactttaaaataaa

SEQ ID NO: 810710 - DNA, 15 bp, Homo sapiens
aactttaaaataaat

SEQ ID NO: 810711 - DNA, 15 bp, Homo sapiens
actttaaaataaatg

SEQ ID NO: 810712 - DNA, 15 bp, Homo sapiens
ctttaaaataaatga

SEQ ID NO: 810713 - DNA, 15 bp, Homo sapiens
tttaaaataaatgac

SEQ ID NO: 810714 - DNA, 15 bp, Homo sapiens
ttaaaataaatgacc

SEQ ID NO: 810715 - DNA, 15 bp, Homo sapiens
taaaataaatgacca

SEQ ID NO: 810716 - DNA, 15 bp, Homo sapiens
aaaataaatgaccac

SEQ ID NO: 810717 - DNA, 15 bp, Homo sapiens
aaataaatgaccacc

SEQ ID NO: 810718 - DNA, 15 bp, Homo sapiens
aataaatgaccacct

SEQ ID NO: 810719 - DNA, 15 bp, Homo sapiens
ataaatgaccacctt

SEQ ID NO: 810720 - DNA, 15 bp, Homo sapiens
taaatgaccaccttg

SEQ ID NO: 810721 - DNA, 15 bp, Homo sapiens
aaatgaccaccttgc

SEQ ID NO: 810722 - DNA, 15 bp, Homo sapiens
aatgaccaccttgca

SEQ ID NO: 810723 - DNA, 15 bp, Homo sapiens
atgaccaccttgcat

SEQ ID NO: 810724 - DNA, 15 bp, Homo sapiens
tgaccaccttgcatt

SEQ ID NO: 810725 - DNA, 15 bp, Homo sapiens
gaccaccttgcatta

SEQ ID NO: 810726 - DNA, 15 bp, Homo sapiens
accaccttgcattag

SEQ ID NO: 810727 - DNA, 15 bp, Homo sapiens
ccaccttgcattagc

SEQ ID NO: 810728 - DNA, 15 bp, Homo sapiens
caccttgcattagct

SEQ ID NO: 810729 - DNA, 15 bp, Homo sapiens
accttgcattagctt

SEQ ID NO: 810730 - DNA, 15 bp, Homo sapiens
ccttgcattagcttg

SEQ ID NO: 810731 - DNA, 15 bp, Homo sapiens
cttgcattagcttgc

SEQ ID NO: 810732 - DNA, 15 bp, Homo sapiens
ttgcattagcttgct

SEQ ID NO: 810733 - DNA, 15 bp, Homo sapiens
tgcattagcttgctt

SEQ ID NO: 810734 - DNA, 15 bp, Homo sapiens
gcattagcttgctta

SEQ ID NO: 810735 - DNA, 15 bp, Homo sapiens
cattagcttgcttag

SEQ ID NO: 810736 - DNA, 15 bp, Homo sapiens
attagcttgcttagg

SEQ ID NO: 810737 - DNA, 15 bp, Homo sapiens
ttagcttgcttagga

SEQ ID NO: 810738 - DNA, 15 bp, Homo sapiens
tagcttgcttaggaa

SEQ ID NO: 810739 - DNA, 15 bp, Homo sapiens
agcttgcttaggaaa

SEQ ID NO: 810740 - DNA, 15 bp, Homo sapiens
gcttgcttaggaaaa

SEQ ID NO: 810741 - DNA, 15 bp, Homo sapiens
cttgcttaggaaaag

SEQ ID NO: 810742 - DNA, 15 bp, Homo sapiens
ttgcttaggaaaaga

SEQ ID NO: 810743 - DNA, 15 bp, Homo sapiens
tgcttaggaaaagag

SEQ ID NO: 810744 - DNA, 15 bp, Homo sapiens
gcttaggaaaagagt

SEQ ID NO: 810745 - DNA, 15 bp, Homo sapiens
cttaggaaaagagta

SEQ ID NO: 810746 - DNA, 15 bp, Homo sapiens
ttaggaaaagagtac

SEQ ID NO: 810747 - DNA, 15 bp, Homo sapiens
taggaaaagagtaca

SEQ ID NO: 810748 - DNA, 15 bp, Homo sapiens
aggaaaagagtacat

SEQ ID NO: 810749 - DNA, 15 bp, Homo sapiens
ggaaaagagtacata

SEQ ID NO: 810750 - DNA, 15 bp, Homo sapiens
gaaaagagtacataa

SEQ ID NO: 810751 - DNA, 15 bp, Homo sapiens
aaaagagtacataaa

SEQ ID NO: 810752 - DNA, 15 bp, Homo sapiens
aaagagtacataaaa

SEQ ID NO: 810753 - DNA, 15 bp, Homo sapiens
aagagtacataaaat

SEQ ID NO: 810754 - DNA, 15 bp, Homo sapiens
agagtacataaaata

SEQ ID NO: 810755 - DNA, 15 bp, Homo sapiens
gagtacataaaataa

SEQ ID NO: 810756 - DNA, 15 bp, Homo sapiens
agtacataaaataaa

SEQ ID NO: 810757 - DNA, 15 bp, Homo sapiens
gtacataaaataaaa

SEQ ID NO: 810758 - DNA, 15 bp, Homo sapiens
tacataaaataaaat

SEQ ID NO: 810759 - DNA, 15 bp, Homo sapiens
acataaaataaaatg

SEQ ID NO: 810760 - DNA, 15 bp, Homo sapiens
cataaaataaaatga

SEQ ID NO: 810761 - DNA, 15 bp, Homo sapiens
ataaaataaaatgaa

SEQ ID NO: 810762 - DNA, 15 bp, Homo sapiens
taaaataaaatgaac

SEQ ID NO: 810763 - DNA, 15 bp, Homo sapiens
aaaataaaatgaaca

SEQ ID NO: 810764 - DNA, 15 bp, Homo sapiens
aaataaaatgaacaa

SEQ ID NO: 810765 - DNA, 15 bp, Homo sapiens
aataaaatgaacaaa

SEQ ID NO: 810766 - DNA, 15 bp, Homo sapiens
ataaaatgaacaaac

SEQ ID NO: 810767 - DNA, 15 bp, Homo sapiens
taaaatgaacaaaca

SEQ ID NO: 810768 - DNA, 15 bp, Homo sapiens
aaaatgaacaaacaa

SEQ ID NO: 810769 - DNA, 15 bp, Homo sapiens
aaatgaacaaacaaa

SEQ ID NO: 810770 - DNA, 15 bp, Homo sapiens
aatgaacaaacaaaa

SEQ ID NO: 810771 - DNA, 15 bp, Homo sapiens
atgaacaaacaaaaa

SEQ ID NO: 810772 - DNA, 15 bp, Homo sapiens
tgaacaaacaaaaac

SEQ ID NO: 810773 - DNA, 15 bp, Homo sapiens
gaacaaacaaaaacc

SEQ ID NO: 810774 - DNA, 15 bp, Homo sapiens
aacaaacaaaaaccc

SEQ ID NO: 810775 - DNA, 15 bp, Homo sapiens
acaaacaaaaaccca

SEQ ID NO: 810776 - DNA, 15 bp, Homo sapiens
caaacaaaaacccat

SEQ ID NO: 810777 - DNA, 15 bp, Homo sapiens
aaacaaaaacccatc

SEQ ID NO: 810778 - DNA, 15 bp, Homo sapiens
aacaaaaacccatct

SEQ ID NO: 810779 - DNA, 15 bp, Homo sapiens
acaaaaacccatctt

SEQ ID NO: 810780 - DNA, 15 bp, Homo sapiens
caaaaacccatcttg

SEQ ID NO: 810781 - DNA, 15 bp, Homo sapiens
aaaaacccatcttgt

SEQ ID NO: 810782 - DNA, 15 bp, Homo sapiens
aaaacccatcttgtt

SEQ ID NO: 810783 - DNA, 15 bp, Homo sapiens
aaacccatcttgttc

SEQ ID NO: 810784 - DNA, 15 bp, Homo sapiens
aacccatcttgttct

SEQ ID NO: 810785 - DNA, 15 bp, Homo sapiens
acccatcttgttctt

SEQ ID NO: 810786 - DNA, 15 bp, Homo sapiens
cccatcttgttcttt

SEQ ID NO: 810787 - DNA, 15 bp, Homo sapiens
ccatcttgttcttta

SEQ ID NO: 810788 - DNA, 15 bp, Homo sapiens
catcttgttctttat

SEQ ID NO: 810789 - DNA, 15 bp, Homo sapiens
atcttgttctttatc

SEQ ID NO: 810790 - DNA, 15 bp, Homo sapiens
tcttgttctttatcc

SEQ ID NO: 810791 - DNA, 15 bp, Homo sapiens
cttgttctttatccc

SEQ ID NO: 810792 - DNA, 15 bp, Homo sapiens
ttgttctttatcccc

SEQ ID NO: 810793 - DNA, 15 bp, Homo sapiens
tgttctttatccccc

SEQ ID NO: 810794 - DNA, 15 bp, Homo sapiens
gttctttatccccct

SEQ ID NO: 810795 - DNA, 15 bp, Homo sapiens
ttctttatccccctt

SEQ ID NO: 810796 - DNA, 15 bp, Homo sapiens
tctttatccccctta

SEQ ID NO: 810797 - DNA, 15 bp, Homo sapiens
ctttatcccccttat

SEQ ID NO: 810798 - DNA, 15 bp, Homo sapiens
tttatcccccttatt

SEQ ID NO: 810799 - DNA, 15 bp, Homo sapiens
ttatcccccttattt

SEQ ID NO: 810800 - DNA, 15 bp, Homo sapiens
tatcccccttatttt

SEQ ID NO: 810801 - DNA, 15 bp, Homo sapiens
atcccccttattttc

SEQ ID NO: 810802 - DNA, 15 bp, Homo sapiens
tcccccttattttct

SEQ ID NO: 810803 - DNA, 15 bp, Homo sapiens
cccccttattttctg

SEQ ID NO: 810804 - DNA, 15 bp, Homo sapiens
ccccttattttctgc

SEQ ID NO: 810805 - DNA, 15 bp, Homo sapiens
cccttattttctgct

SEQ ID NO: 810806 - DNA, 15 bp, Homo sapiens
ccttattttctgctt

SEQ ID NO: 810807 - DNA, 15 bp, Homo sapiens
cttattttctgcttt

SEQ ID NO: 810808 - DNA, 15 bp, Homo sapiens
ttattttctgctttt

SEQ ID NO: 810809 - DNA, 15 bp, Homo sapiens
tattttctgcttttc

SEQ ID NO: 810810 - DNA, 15 bp, Homo sapiens
attttctgcttttca

SEQ ID NO: 810811 - DNA, 15 bp, Homo sapiens
ttttctgcttttcat

SEQ ID NO: 810812 - DNA, 15 bp, Homo sapiens
tttctgcttttcatt

SEQ ID NO: 810813 - DNA, 15 bp, Homo sapiens
ttctgcttttcattg

SEQ ID NO: 810814 - DNA, 15 bp, Homo sapiens
tctgcttttcattga

SEQ ID NO: 810815 - DNA, 15 bp, Homo sapiens
ctgcttttcattgat

SEQ ID NO: 810816 - DNA, 15 bp, Homo sapiens
tgcttttcattgatt

SEQ ID NO: 810817 - DNA, 15 bp, Homo sapiens
gcttttcattgattc

SEQ ID NO: 810818 - DNA, 15 bp, Homo sapiens
cttttcattgattca

SEQ ID NO: 810819 - DNA, 15 bp, Homo sapiens
ttttcattgattcag

SEQ ID NO: 810820 - DNA, 15 bp, Homo sapiens
tttcattgattcaga

SEQ ID NO: 810821 - DNA, 15 bp, Homo sapiens
ttcattgattcagat

SEQ ID NO: 810822 - DNA, 15 bp, Homo sapiens
tcattgattcagatt

SEQ ID NO: 810823 - DNA, 15 bp, Homo sapiens
cattgattcagatta

SEQ ID NO: 810824 - DNA, 15 bp, Homo sapiens
attgattcagattat

SEQ ID NO: 810825 - DNA, 15 bp, Homo sapiens
ttgattcagattatt

SEQ ID NO: 810826 - DNA, 15 bp, Homo sapiens
tgattcagattattg

SEQ ID NO: 810827 - DNA, 15 bp, Homo sapiens
gattcagattattgg

SEQ ID NO: 810828 - DNA, 15 bp, Homo sapiens
attcagattattgga

SEQ ID NO: 810829 - DNA, 15 bp, Homo sapiens
ttcagattattggat

SEQ ID NO: 810830 - DNA, 15 bp, Homo sapiens
tcagattattggatt

SEQ ID NO: 810831 - DNA, 15 bp, Homo sapiens
cagattattggattc

SEQ ID NO: 810832 - DNA, 15 bp, Homo sapiens
agattattggattct

SEQ ID NO: 810833 - DNA, 15 bp, Homo sapiens
gattattggattctt

SEQ ID NO: 810834 - DNA, 15 bp, Homo sapiens
attattggattctta

SEQ ID NO: 810835 - DNA, 15 bp, Homo sapiens
ttattggattcttat

SEQ ID NO: 810836 - DNA, 15 bp, Homo sapiens
tattggattcttatt

SEQ ID NO: 810837 - DNA, 15 bp, Homo sapiens
attggattcttattg

SEQ ID NO: 810838 - DNA, 15 bp, Homo sapiens
ttggattcttattgt

SEQ ID NO: 810839 - DNA, 15 bp, Homo sapiens
tggattcttattgtc

SEQ ID NO: 810840 - DNA, 15 bp, Homo sapiens
ggattcttattgtca

SEQ ID NO: 810841 - DNA, 15 bp, Homo sapiens
gattcttattgtcaa

SEQ ID NO: 810842 - DNA, 15 bp, Homo sapiens
attcttattgtcaag

SEQ ID NO: 810843 - DNA, 15 bp, Homo sapiens
ttcttattgtcaaga

SEQ ID NO: 810844 - DNA, 15 bp, Homo sapiens
tcttattgtcaagaa

SEQ ID NO: 810845 - DNA, 15 bp, Homo sapiens
cttattgtcaagaat

SEQ ID NO: 810846 - DNA, 15 bp, Homo sapiens
ttattgtcaagaata

SEQ ID NO: 810847 - DNA, 15 bp, Homo sapiens
tattgtcaagaataa

SEQ ID NO: 810848 - DNA, 15 bp, Homo sapiens
attgtcaagaataaa

SEQ ID NO: 810849 - DNA, 15 bp, Homo sapiens
ttgtcaagaataaac

SEQ ID NO: 810850 - DNA, 15 bp, Homo sapiens
tgtcaagaataaact

SEQ ID NO: 810851 - DNA, 15 bp, Homo sapiens
gtcaagaataaactt

SEQ ID NO: 810852 - DNA, 15 bp, Homo sapiens
tcaagaataaacttt

SEQ ID NO: 810853 - DNA, 15 bp, Homo sapiens
caagaataaacttta

SEQ ID NO: 810854 - DNA, 15 bp, Homo sapiens
aagaataaactttaa

SEQ ID NO: 810855 - DNA, 15 bp, Homo sapiens
agaataaactttaaa

SEQ ID NO: 810856 - DNA, 15 bp, Homo sapiens
gaataaactttaaac

SEQ ID NO: 810857 - DNA, 15 bp, Homo sapiens
aataaactttaaaca

SEQ ID NO: 810858 - DNA, 15 bp, Homo sapiens
ataaactttaaacaa

SEQ ID NO: 810859 - DNA, 15 bp, Homo sapiens
taaactttaaacaaa

SEQ ID NO: 810860 - DNA, 15 bp, Homo sapiens
aaactttaaacaaac

SEQ ID NO: 810861 - DNA, 15 bp, Homo sapiens
aactttaaacaaaca

SEQ ID NO: 810862 - DNA, 15 bp, Homo sapiens
actttaaacaaacaa

SEQ ID NO: 810863 - DNA, 15 bp, Homo sapiens
ctttaaacaaacaaa

SEQ ID NO: 810864 - DNA, 15 bp, Homo sapiens
tttaaacaaacaaac

SEQ ID NO: 810865 - DNA, 15 bp, Homo sapiens
ttaaacaaacaaaca

SEQ ID NO: 810866 - DNA, 15 bp, Homo sapiens
taaacaaacaaacaa

SEQ ID NO: 810867 - DNA, 15 bp, Homo sapiens
aaacaaacaaaaaaa

SEQ ID NO: 810868 - DNA, 15 bp, Homo sapiens
aacaaacaaaaaaag

SEQ ID NO: 810869 - DNA, 15 bp, Homo sapiens
acaaacaaaaaaagg

SEQ ID NO: 810870 - DNA, 15 bp, Homo sapiens
caaacaaaaaaaggt

SEQ ID NO: 810871 - DNA, 15 bp, Homo sapiens
aaacaaaaaaaggta

SEQ ID NO: 810872 - DNA, 15 bp, Homo sapiens
aacaaaaaaaggtaa

SEQ ID NO: 810873 - DNA, 15 bp, Homo sapiens
acaaaaaaaggtaaa

SEQ ID NO: 810874 - DNA, 15 bp, Homo sapiens
caaaaaaaggtaaat

SEQ ID NO: 810875 - DNA, 15 bp, Homo sapiens
aaaaaaaggtaaatg

SEQ ID NO: 810876 - DNA, 15 bp, Homo sapiens
aaaaaaggtaaatgt

SEQ ID NO: 810877 - DNA, 15 bp, Homo sapiens
aaaaaggtaaatgtg

SEQ ID NO: 810878 - DNA, 15 bp, Homo sapiens
aaaaggtaaatgtga

SEQ ID NO: 810879 - DNA, 15 bp, Homo sapiens
aaaggtaaatgtgac

SEQ ID NO: 810880 - DNA, 15 bp, Homo sapiens
aaggtaaatgtgacg

SEQ ID NO: 810881 - DNA, 15 bp, Homo sapiens
aggtaaatgtgacgg

SEQ ID NO: 810882 - DNA, 15 bp, Homo sapiens
ggtaaatgtgacgga

SEQ ID NO: 810883 - DNA, 15 bp, Homo sapiens
gtaaatgtgacggaa

SEQ ID NO: 810884 - DNA, 15 bp, Homo sapiens
taaatgtgacggaag

SEQ ID NO: 810885 - DNA, 15 bp, Homo sapiens
aaatgtgacggaagg

SEQ ID NO: 810886 - DNA, 15 bp, Homo sapiens
aatgtgacggaaggc

SEQ ID NO: 810887 - DNA, 15 bp, Homo sapiens
atgtgacggaaggct

SEQ ID NO: 810888 - DNA, 15 bp, Homo sapiens
tgtgacggaaggcta

SEQ ID NO: 810889 - DNA, 15 bp, Homo sapiens
gtgacggaaggctag

SEQ ID NO: 810890 - DNA, 15 bp, Homo sapiens
tgacggaaggctagt

SEQ ID NO: 810891 - DNA, 15 bp, Homo sapiens
gacggaaggctagtt

SEQ ID NO: 810892 - DNA, 15 bp, Homo sapiens
acggaaggctagttt

SEQ ID NO: 810893 - DNA, 15 bp, Homo sapiens
cggaaggctagtttt

SEQ ID NO: 810894 - DNA, 15 bp, Homo sapiens
ggaaggctagttttc

SEQ ID NO: 810895 - DNA, 15 bp, Homo sapiens
gaaggctagttttca

SEQ ID NO: 810896 - DNA, 15 bp, Homo sapiens
aaggctagttttcag

SEQ ID NO: 810897 - DNA, 15 bp, Homo sapiens
aggctagttttcagt

SEQ ID NO: 810898 - DNA, 15 bp, Homo sapiens
ggctagttttcagtc

SEQ ID NO: 810899 - DNA, 15 bp, Homo sapiens
gctagttttcagtca

SEQ ID NO: 810900 - DNA, 15 bp, Homo sapiens
ctagttttcagtcat

SEQ ID NO: 810901 - DNA, 15 bp, Homo sapiens
tagttttcagtcatt

SEQ ID NO: 810902 - DNA, 15 bp, Homo sapiens
agttttcagtcattt

SEQ ID NO: 810903 - DNA, 15 bp, Homo sapiens
gttttcagtcatttt

SEQ ID NO: 810904 - DNA, 15 bp, Homo sapiens
ttttcagtcattttt

SEQ ID NO: 810905 - DNA, 15 bp, Homo sapiens
tttcagtcattttta

SEQ ID NO: 810906 - DNA, 15 bp, Homo sapiens
ttcagtcatttttaa

SEQ ID NO: 810907 - DNA, 15 bp, Homo sapiens
tcagtcatttttaaa

SEQ ID NO: 810908 - DNA, 15 bp, Homo sapiens
cagtcatttttaaaa

SEQ ID NO: 810909 - DNA, 15 bp, Homo sapiens
agtcatttttaaaaa

SEQ ID NO: 810910 - DNA, 15 bp, Homo sapiens
gtcatttttaaaaat

SEQ ID NO: 810911 - DNA, 15 bp, Homo sapiens
tcatttttaaaaatt

SEQ ID NO: 810912 - DNA, 15 bp, Homo sapiens
catttttaaaaattg

SEQ ID NO: 810913 - DNA, 15 bp, Homo sapiens
atttttaaaaattgt

SEQ ID NO: 810914 - DNA, 15 bp, Homo sapiens
tttttaaaaattgtg

SEQ ID NO: 810915 - DNA, 15 bp, Homo sapiens
ttttaaaaattgtga

SEQ ID NO: 810916 - DNA, 15 bp, Homo sapiens
tttaaaaattgtgat

SEQ ID NO: 810917 - DNA, 15 bp, Homo sapiens
ttaaaaattgtgatg

SEQ ID NO: 810918 - DNA, 15 bp, Homo sapiens
taaaaattgtgatgc

SEQ ID NO: 810919 - DNA, 15 bp, Homo sapiens
aaaaattgtgatgcc

SEQ ID NO: 810920 - DNA, 15 bp, Homo sapiens
aaaattgtgatgccc

SEQ ID NO: 810921 - DNA, 15 bp, Homo sapiens
aaattgtgatgcccc

SEQ ID NO: 810922 - DNA, 15 bp, Homo sapiens
aattgtgatgccccg

SEQ ID NO: 810923 - DNA, 15 bp, Homo sapiens
attgtgatgccccgt

SEQ ID NO: 810924 - DNA, 15 bp, Homo sapiens
ttgtgatgccccgtt

SEQ ID NO: 810925 - DNA, 15 bp, Homo sapiens
tgtgatgccccgttc

SEQ ID NO: 810926 - DNA, 15 bp, Homo sapiens
gtgatgccccgttct

SEQ ID NO: 810927 - DNA, 15 bp, Homo sapiens
tgatgccccgttctt

SEQ ID NO: 810928 - DNA, 15 bp, Homo sapiens
gatgccccgttcttt

SEQ ID NO: 810929 - DNA, 15 bp, Homo sapiens
atgccccgttctttt

SEQ ID NO: 810930 - DNA, 15 bp, Homo sapiens
tgccccgttcttttt

SEQ ID NO: 810931 - DNA, 15 bp, Homo sapiens
gccccgttctttttc

SEQ ID NO: 810932 - DNA, 15 bp, Homo sapiens
ccccgttctttttct

SEQ ID NO: 810933 - DNA, 15 bp, Homo sapiens
cccgttctttttctt

SEQ ID NO: 810934 - DNA, 15 bp, Homo sapiens
ccgttctttttctta

SEQ ID NO: 810935 - DNA, 15 bp, Homo sapiens
cgttctttttcttac

SEQ ID NO: 810936 - DNA, 15 bp, Homo sapiens
gttctttttcttaca

SEQ ID NO: 810937 - DNA, 15 bp, Homo sapiens
ttctttttcttacat

SEQ ID NO: 810938 - DNA, 15 bp, Homo sapiens
tctttttcttacatt

SEQ ID NO: 810939 - DNA, 15 bp, Homo sapiens
ctttttcttacattt

SEQ ID NO: 810940 - DNA, 15 bp, Homo sapiens
tttttcttacatttg

SEQ ID NO: 810941 - DNA, 15 bp, Homo sapiens
ttttcttacatttgt

SEQ ID NO: 810942 - DNA, 15 bp, Homo sapiens
tttcttacatttgtc

SEQ ID NO: 810943 - DNA, 15 bp, Homo sapiens
ttcttacatttgtcc

SEQ ID NO: 810944 - DNA, 15 bp, Homo sapiens
tcttacatttgtccc

SEQ ID NO: 810945 - DNA, 15 bp, Homo sapiens
cttacatttgtcccc

SEQ ID NO: 810946 - DNA, 15 bp, Homo sapiens
ttacatttgtcccct

SEQ ID NO: 810947 - DNA, 15 bp, Homo sapiens
tacatttgtcccctg

SEQ ID NO: 810948 - DNA, 15 bp, Homo sapiens
acatttgtcccctga

SEQ ID NO: 810949 - DNA, 15 bp, Homo sapiens
catttgtcccctgaa

SEQ ID NO: 810950 - DNA, 15 bp, Homo sapiens
atttgtcccctgaac

SEQ ID NO: 810951 - DNA, 15 bp, Homo sapiens
tttgtcccctgaaca

SEQ ID NO: 810952 - DNA, 15 bp, Homo sapiens
ttgtcccctgaacaa

SEQ ID NO: 810953 - DNA, 15 bp, Homo sapiens
tgtcccctgaacaat

SEQ ID NO: 810954 - DNA, 15 bp, Homo sapiens
gtcccctgaacaatt

SEQ ID NO: 810955 - DNA, 15 bp, Homo sapiens
tcccctgaacaattc

SEQ ID NO: 810956 - DNA, 15 bp, Homo sapiens
cccctgaacaattct

SEQ ID NO: 810957 - DNA, 15 bp, Homo sapiens
ccctgaacaattctt

SEQ ID NO: 810958 - DNA, 15 bp, Homo sapiens
cctgaacaattcttc

SEQ ID NO: 810959 - DNA, 15 bp, Homo sapiens
ctgaacaattcttcc

SEQ ID NO: 810960 - DNA, 15 bp, Homo sapiens
tgaacaattcttcct

SEQ ID NO: 810961 - DNA, 15 bp, Homo sapiens
gaacaattcttcctc

SEQ ID NO: 810962 - DNA, 15 bp, Homo sapiens
aacaattcttcctct

SEQ ID NO: 810963 - DNA, 15 bp, Homo sapiens
acaattcttcctctt

SEQ ID NO: 810964 - DNA, 15 bp, Homo sapiens
caattcttcctcttt

SEQ ID NO: 810965 - DNA, 15 bp, Homo sapiens
aattcttcctcttta

SEQ ID NO: 810966 - DNA, 15 bp, Homo sapiens
attcttcctctttaa

SEQ ID NO: 810967 - DNA, 15 bp, Homo sapiens
ttcttcctctttaaa

SEQ ID NO: 810968 - DNA, 15 bp, Homo sapiens
tcttcctctttaaaa

SEQ ID NO: 810969 - DNA, 15 bp, Homo sapiens
cttcctctttaaaat

SEQ ID NO: 810970 - DNA, 15 bp, Homo sapiens
ttcctctttaaaatg

SEQ ID NO: 810971 - DNA, 15 bp, Homo sapiens
tcctctttaaaatgt

SEQ ID NO: 810972 - DNA, 15 bp, Homo sapiens
cctctttaaaatgta

SEQ ID NO: 810973 - DNA, 15 bp, Homo sapiens
ctctttaaaatgtag

SEQ ID NO: 810974 - DNA, 15 bp, Homo sapiens
tctttaaaatgtagc

SEQ ID NO: 810975 - DNA, 15 bp, Homo sapiens
ctttaaaatgtagca

SEQ ID NO: 810976 - DNA, 15 bp, Homo sapiens
tttaaaatgtagcag

SEQ ID NO: 810977 - DNA, 15 bp, Homo sapiens
ttaaaatgtagcagt

SEQ ID NO: 810978 - DNA, 15 bp, Homo sapiens
taaaatgtagcagtc

SEQ ID NO: 810979 - DNA, 15 bp, Homo sapiens
aaaatgtagcagtcc

SEQ ID NO: 810980 - DNA, 15 bp, Homo sapiens
aaatgtagcagtcct

SEQ ID NO: 810981 - DNA, 15 bp, Homo sapiens
aatgtagcagtccta

SEQ ID NO: 810982 - DNA, 15 bp, Homo sapiens
atgtagcagtcctag

SEQ ID NO: 810983 - DNA, 15 bp, Homo sapiens
tgtagcagtcctagc

SEQ ID NO: 810984 - DNA, 15 bp, Homo sapiens
gtagcagtcctagct

SEQ ID NO: 810985 - DNA, 15 bp, Homo sapiens
tagcagtcctagctg

SEQ ID NO: 810986 - DNA, 15 bp, Homo sapiens
agcagtcctagctgg

SEQ ID NO: 810987 - DNA, 15 bp, Homo sapiens
gcagtcctagctggg

SEQ ID NO: 810988 - DNA, 15 bp, Homo sapiens
cagtcctagctgggc

SEQ ID NO: 810989 - DNA, 15 bp, Homo sapiens
agtcctagctgggcg

SEQ ID NO: 810990 - DNA, 15 bp, Homo sapiens
gtcctagctgggcgt

SEQ ID NO: 810991 - DNA, 15 bp, Homo sapiens
tcctagctgggcgtg

SEQ ID NO: 810992 - DNA, 15 bp, Homo sapiens
cctagctgggcgtgc

SEQ ID NO: 810993 - DNA, 15 bp, Homo sapiens
ctagctgggcgtgct

SEQ ID NO: 810994 - DNA, 15 bp, Homo sapiens
tagctgggcgtgctg

SEQ ID NO: 810995 - DNA, 15 bp, Homo sapiens
agctgggcgtgctgg

SEQ ID NO: 810996 - DNA, 15 bp, Homo sapiens
gctgggcgtgctggc

SEQ ID NO: 810997 - DNA, 15 bp, Homo sapiens
ctgggcgtgctggct

SEQ ID NO: 810998 - DNA, 15 bp, Homo sapiens
tgggcgtgctggctc

SEQ ID NO: 810999 - DNA, 15 bp, Homo sapiens
gggcgtgctggctca

SEQ ID NO: 811000 - DNA, 15 bp, Homo sapiens
ggcgtgctggctcac

SEQ ID NO: 811001 - DNA, 15 bp, Homo sapiens
gcgtgctggctcaca

SEQ ID NO: 811002 - DNA, 15 bp, Homo sapiens
cgtgctggctcacac

SEQ ID NO: 811003 - DNA, 15 bp, Homo sapiens
gtgctggctcacacc

SEQ ID NO: 811004 - DNA, 15 bp, Homo sapiens
tgctggctcacaccc

SEQ ID NO: 811005 - DNA, 15 bp, Homo sapiens
gctggctcacacccc

SEQ ID NO: 811006 - DNA, 15 bp, Homo sapiens
ctggctcacaccccg

SEQ ID NO: 811007 - DNA, 15 bp, Homo sapiens
tggctcacaccccgt

SEQ ID NO: 811008 - DNA, 15 bp, Homo sapiens
ggctcacaccccgta

SEQ ID NO: 811009 - DNA, 15 bp, Homo sapiens
gctcacaccccgtac

SEQ ID NO: 811010 - DNA, 15 bp, Homo sapiens
ctcacaccccgtact

SEQ ID NO: 811011 - DNA, 15 bp, Homo sapiens
tcacaccccgtactt

SEQ ID NO: 811012 - DNA, 15 bp, Homo sapiens
cacaccccgtacttt

SEQ ID NO: 811013 - DNA, 15 bp, Homo sapiens
acaccccgtactttg

SEQ ID NO: 811014 - DNA, 15 bp, Homo sapiens
caccccgtactttgg

SEQ ID NO: 811015 - DNA, 15 bp, Homo sapiens
accccgtactttggg

SEQ ID NO: 811016 - DNA, 15 bp, Homo sapiens
ccccgtactttggga

SEQ ID NO: 811017 - DNA, 15 bp, Homo sapiens
cccgtactttgggat

SEQ ID NO: 811018 - DNA, 15 bp, Homo sapiens
ccgtactttgggatg

SEQ ID NO: 811019 - DNA, 15 bp, Homo sapiens
cgtactttgggatgc

SEQ ID NO: 811020 - DNA, 15 bp, Homo sapiens
gtactttgggatgcc

SEQ ID NO: 811021 - DNA, 15 bp, Homo sapiens
tactttgggatgcca

SEQ ID NO: 811022 - DNA, 15 bp, Homo sapiens
actttgggatgccaa

SEQ ID NO: 811023 - DNA, 15 bp, Homo sapiens
ctttgggatgccaag

SEQ ID NO: 811024 - DNA, 15 bp, Homo sapiens
tttgggatgccaagg

SEQ ID NO: 811025 - DNA, 15 bp, Homo sapiens
ttgggatgccaaggc

SEQ ID NO: 811026 - DNA, 15 bp, Homo sapiens
tgggatgccaaggca

SEQ ID NO: 811027 - DNA, 15 bp, Homo sapiens
gggatgccaaggcag

SEQ ID NO: 811028 - DNA, 15 bp, Homo sapiens
ggatgccaaggcagg

SEQ ID NO: 811029 - DNA, 15 bp, Homo sapiens
gatgccaaggcaggc

SEQ ID NO: 811030 - DNA, 15 bp, Homo sapiens
atgccaaggcaggct

SEQ ID NO: 811031 - DNA, 15 bp, Homo sapiens
tgccaaggcaggctg

SEQ ID NO: 811032 - DNA, 15 bp, Homo sapiens
gccaaggcaggctgg

SEQ ID NO: 811033 - DNA, 15 bp, Homo sapiens
ccaaggcaggctggt

SEQ ID NO: 811034 - DNA, 15 bp, Homo sapiens
caaggcaggctggtc

SEQ ID NO: 811035 - DNA, 15 bp, Homo sapiens
aaggcaggctggtca

SEQ ID NO: 811036 - DNA, 15 bp, Homo sapiens
aggcaggctggtcac

SEQ ID NO: 811037 - DNA, 15 bp, Homo sapiens
ggcaggctggtcact

SEQ ID NO: 811038 - DNA, 15 bp, Homo sapiens
gcaggctggtcactt

SEQ ID NO: 811039 - DNA, 15 bp, Homo sapiens
caggctggtcacttg

SEQ ID NO: 811040 - DNA, 15 bp, Homo sapiens
aggctggtcacttga

SEQ ID NO: 811041 - DNA, 15 bp, Homo sapiens
ggctggtcacttgag

SEQ ID NO: 811042 - DNA, 15 bp, Homo sapiens
gctggtcacttgagg

SEQ ID NO: 811043 - DNA, 15 bp, Homo sapiens
ctggtcacttgaggt

SEQ ID NO: 811044 - DNA, 15 bp, Homo sapiens
tggtcacttgaggtc

SEQ ID NO: 811045 - DNA, 15 bp, Homo sapiens
ggtcacttgaggtca

SEQ ID NO: 811046 - DNA, 15 bp, Homo sapiens
gtcacttgaggtcag

SEQ ID NO: 811047 - DNA, 15 bp, Homo sapiens
ccaacatggtgaaag

SEQ ID NO: 811048 - DNA, 15 bp, Homo sapiens
caacatggtgaaagc

SEQ ID NO: 811049 - DNA, 15 bp, Homo sapiens
aacatggtgaaagcc

SEQ ID NO: 811050 - DNA, 15 bp, Homo sapiens
acatggtgaaagccc

SEQ ID NO: 811051 - DNA, 15 bp, Homo sapiens
catggtgaaagcccg

SEQ ID NO: 811052 - DNA, 15 bp, Homo sapiens
atggtgaaagcccgt

SEQ ID NO: 811053 - DNA, 15 bp, Homo sapiens
tggtgaaagcccgtc

SEQ ID NO: 811054 - DNA, 15 bp, Homo sapiens
ggtgaaagcccgtct

SEQ ID NO: 811055 - DNA, 15 bp, Homo sapiens
gtgaaagcccgtctc

SEQ ID NO: 811056 - DNA, 15 bp, Homo sapiens
tgaaagcccgtctct

SEQ ID NO: 811057 - DNA, 15 bp, Homo sapiens
gaaagcccgtctcta

SEQ ID NO: 811058 - DNA, 15 bp, Homo sapiens
aaagcccgtctctac

SEQ ID NO: 811059 - DNA, 15 bp, Homo sapiens
aagcccgtctctact

SEQ ID NO: 811060 - DNA, 15 bp, Homo sapiens
agcccgtctctacta

SEQ ID NO: 811061 - DNA, 15 bp, Homo sapiens
gcccgtctctactaa

SEQ ID NO: 811062 - DNA, 15 bp, Homo sapiens
ccgtctctactaaag

SEQ ID NO: 811063 - DNA, 15 bp, Homo sapiens
cgtctctactaaaga

SEQ ID NO: 811064 - DNA, 15 bp, Homo sapiens
gtctctactaaagat

SEQ ID NO: 811065 - DNA, 15 bp, Homo sapiens
tctctactaaagata

SEQ ID NO: 811066 - DNA, 15 bp, Homo sapiens
ctctactaaagatac

SEQ ID NO: 811067 - DNA, 15 bp, Homo sapiens
tctactaaagataca

SEQ ID NO: 811068 - DNA, 15 bp, Homo sapiens
ctactaaagatacaa

SEQ ID NO: 811069 - DNA, 15 bp, Homo sapiens
tactaaagatacaaa

SEQ ID NO: 811070 - DNA, 15 bp, Homo sapiens
actaaagatacaaaa

SEQ ID NO: 811071 - DNA, 15 bp, Homo sapiens
ctaaagatacaaaaa

SEQ ID NO: 811072 - DNA, 15 bp, Homo sapiens
taaagatacaaaaat

SEQ ID NO: 811073 - DNA, 15 bp, Homo sapiens
aaagatacaaaaatt

SEQ ID NO: 811074 - DNA, 15 bp, Homo sapiens
aagatacaaaaatta

SEQ ID NO: 811075 - DNA, 15 bp, Homo sapiens
agatacaaaaattag

SEQ ID NO: 811076 - DNA, 15 bp, Homo sapiens
gatacaaaaattagc

SEQ ID NO: 811077 - DNA, 15 bp, Homo sapiens
ctgggtgtggtggtg

SEQ ID NO: 811078 - DNA, 15 bp, Homo sapiens
tgggtgtggtggtgc

SEQ ID NO: 811079 - DNA, 15 bp, Homo sapiens
gggtgtggtggtgca

SEQ ID NO: 811080 - DNA, 15 bp, Homo sapiens
ggtgtggtggtgcac

SEQ ID NO: 811081 - DNA, 15 bp, Homo sapiens
gtgtggtggtgcacg

SEQ ID NO: 811082 - DNA, 15 bp, Homo sapiens
tgtggtggtgcacgc

SEQ ID NO: 811083 - DNA, 15 bp, Homo sapiens
gtggtggtgcacgcc

SEQ ID NO: 811084 - DNA, 15 bp, Homo sapiens
tggtggtgcacgcct

SEQ ID NO: 811085 - DNA, 15 bp, Homo sapiens
ggtggtgcacgcctg

SEQ ID NO: 811086 - DNA, 15 bp, Homo sapiens
gtggtgcacgcctgt

SEQ ID NO: 811087 - DNA, 15 bp, Homo sapiens
tggtgcacgcctgta

SEQ ID NO: 811088 - DNA, 15 bp, Homo sapiens
ggtgcacgcctgtag

SEQ ID NO: 811089 - DNA, 15 bp, Homo sapiens
gtgcacgcctgtagt

SEQ ID NO: 811090 - DNA, 15 bp, Homo sapiens
tgcacgcctgtagtc

SEQ ID NO: 811091 - DNA, 15 bp, Homo sapiens
gcacgcctgtagtcc

SEQ ID NO: 811092 - DNA, 15 bp, Homo sapiens
cacgcctgtagtccc

SEQ ID NO: 811093 - DNA, 15 bp, Homo sapiens
gcctgtagtcccagt

SEQ ID NO: 811094 - DNA, 15 bp, Homo sapiens
cctgtagtcccagtt

SEQ ID NO: 811095 - DNA, 15 bp, Homo sapiens
tagtcccagttactg

SEQ ID NO: 811096 - DNA, 15 bp, Homo sapiens
agtcccagttactgg

SEQ ID NO: 811097 - DNA, 15 bp, Homo sapiens
gtcccagttactggg

SEQ ID NO: 811098 - DNA, 15 bp, Homo sapiens
tcccagttactgggg

SEQ ID NO: 811099 - DNA, 15 bp, Homo sapiens
cccagttactgggga

SEQ ID NO: 811100 - DNA, 15 bp, Homo sapiens
ccagttactggggag

SEQ ID NO: 811101 - DNA, 15 bp, Homo sapiens
cagttactggggagg

SEQ ID NO: 811102 - DNA, 15 bp, Homo sapiens
agttactggggaggc

SEQ ID NO: 811103 - DNA, 15 bp, Homo sapiens
gttactggggaggct

SEQ ID NO: 811104 - DNA, 15 bp, Homo sapiens
ttactggggaggctg

SEQ ID NO: 811105 - DNA, 15 bp, Homo sapiens
tactggggaggctga

SEQ ID NO: 811106 - DNA, 15 bp, Homo sapiens
actggggaggctgag

SEQ ID NO: 811107 - DNA, 15 bp, Homo sapiens
ctggggaggctgagg

SEQ ID NO: 811108 - DNA, 15 bp, Homo sapiens
tggggaggctgaggc

SEQ ID NO: 811109 - DNA, 15 bp, Homo sapiens
ggggaggctgaggca

SEQ ID NO: 811110 - DNA, 15 bp, Homo sapiens
gggaggctgaggcat

SEQ ID NO: 811111 - DNA, 15 bp, Homo sapiens
ggaggctgaggcatg

SEQ ID NO: 811112 - DNA, 15 bp, Homo sapiens
gaggcatgagaatcg

SEQ ID NO: 811113 - DNA, 15 bp, Homo sapiens
aggcatgagaatcgc

SEQ ID NO: 811114 - DNA, 15 bp, Homo sapiens
ggcatgagaatcgct

SEQ ID NO: 811115 - DNA, 15 bp, Homo sapiens
gcatgagaatcgctt

SEQ ID NO: 811116 - DNA, 15 bp, Homo sapiens
catgagaatcgcttg

SEQ ID NO: 811117 - DNA, 15 bp, Homo sapiens
atgagaatcgcttga

SEQ ID NO: 811118 - DNA, 15 bp, Homo sapiens
tgagaatcgcttgaa

SEQ ID NO: 811119 - DNA, 15 bp, Homo sapiens
atcgcttgaacctga

SEQ ID NO: 811120 - DNA, 15 bp, Homo sapiens
tcgcttgaacctgag

SEQ ID NO: 811121 - DNA, 15 bp, Homo sapiens
cgcttgaacctgaga

SEQ ID NO: 811122 - DNA, 15 bp, Homo sapiens
gcttgaacctgagag

SEQ ID NO: 811123 - DNA, 15 bp, Homo sapiens
cttgaacctgagagg

SEQ ID NO: 811124 - DNA, 15 bp, Homo sapiens
ttgaacctgagaggt

SEQ ID NO: 811125 - DNA, 15 bp, Homo sapiens
tgaacctgagaggtg

SEQ ID NO: 811126 - DNA, 15 bp, Homo sapiens
gaacctgagaggtgg

SEQ ID NO: 811127 - DNA, 15 bp, Homo sapiens
aacctgagaggtgga

SEQ ID NO: 811128 - DNA, 15 bp, Homo sapiens
acctgagaggtggag

SEQ ID NO: 811129 - DNA, 15 bp, Homo sapiens
cctgagaggtggagc

SEQ ID NO: 811130 - DNA, 15 bp, Homo sapiens
ctgagaggtggagct

SEQ ID NO: 811131 - DNA, 15 bp, Homo sapiens
tgagaggtggagctt

SEQ ID NO: 811132 - DNA, 15 bp, Homo sapiens
gagaggtggagcttg

SEQ ID NO: 811133 - DNA, 15 bp, Homo sapiens
agaggtggagcttgc

SEQ ID NO: 811134 - DNA, 15 bp, Homo sapiens
gaggtggagcttgca

SEQ ID NO: 811135 - DNA, 15 bp, Homo sapiens
aggtggagcttgcag

SEQ ID NO: 811136 - DNA, 15 bp, Homo sapiens
ggtggagcttgcagt

SEQ ID NO: 811137 - DNA, 15 bp, Homo sapiens
gtggagcttgcagtg

SEQ ID NO: 811138 - DNA, 15 bp, Homo sapiens
tggagcttgcagtga

SEQ ID NO: 811139 - DNA, 15 bp, Homo sapiens
gcttgcagtgagcca

SEQ ID NO: 811140 - DNA, 15 bp, Homo sapiens
cttgcagtgagccaa

SEQ ID NO: 811141 - DNA, 15 bp, Homo sapiens
cagtgagccaagatt

SEQ ID NO: 811142 - DNA, 15 bp, Homo sapiens
agtgagccaagattt

SEQ ID NO: 811143 - DNA, 15 bp, Homo sapiens
gtgagccaagatttt

SEQ ID NO: 811144 - DNA, 15 bp, Homo sapiens
tgagccaagattttg

SEQ ID NO: 811145 - DNA, 15 bp, Homo sapiens
gagccaagattttgc

SEQ ID NO: 811146 - DNA, 15 bp, Homo sapiens
agccaagattttgcc

SEQ ID NO: 811147 - DNA, 15 bp, Homo sapiens
gccaagattttgcca

SEQ ID NO: 811148 - DNA, 15 bp, Homo sapiens
ccaagattttgccac

SEQ ID NO: 811149 - DNA, 15 bp, Homo sapiens
caagattttgccact

SEQ ID NO: 811150 - DNA, 15 bp, Homo sapiens
aagattttgccactg

SEQ ID NO: 811151 - DNA, 15 bp, Homo sapiens
agattttgccactgc

SEQ ID NO: 811152 - DNA, 15 bp, Homo sapiens
gattttgccactgca

SEQ ID NO: 811153 - DNA, 15 bp, Homo sapiens
attttgccactgcac

SEQ ID NO: 811154 - DNA, 15 bp, Homo sapiens
ttttgccactgcact

SEQ ID NO: 811155 - DNA, 15 bp, Homo sapiens
gggcaacagagtgaa

SEQ ID NO: 811156 - DNA, 15 bp, Homo sapiens
ggcaacagagtgaaa

SEQ ID NO: 811157 - DNA, 15 bp, Homo sapiens
gcaacagagtgaaac

SEQ ID NO: 811158 - DNA, 15 bp, Homo sapiens
caacagagtgaaact

SEQ ID NO: 811159 - DNA, 15 bp, Homo sapiens
aacagagtgaaactc

SEQ ID NO: 811160 - DNA, 15 bp, Homo sapiens
acagagtgaaactct

SEQ ID NO: 811161 - DNA, 15 bp, Homo sapiens
cagagtgaaactctg

SEQ ID NO: 811162 - DNA, 15 bp, Homo sapiens
agagtgaaactctgt

SEQ ID NO: 811163 - DNA, 15 bp, Homo sapiens
gagtgaaactctgtc

SEQ ID NO: 811164 - DNA, 15 bp, Homo sapiens
agtgaaactctgtct

SEQ ID NO: 811165 - DNA, 15 bp, Homo sapiens
gtgaaactctgtctc

SEQ ID NO: 811166 - DNA, 15 bp, Homo sapiens
tgaaactctgtctca

SEQ ID NO: 811167 - DNA, 15 bp, Homo sapiens
ctgtctcaaaaaaat

SEQ ID NO: 811168 - DNA, 15 bp, Homo sapiens
tgtctcaaaaaaata

SEQ ID NO: 811169 - DNA, 15 bp, Homo sapiens
gtctcaaaaaaataa

SEQ ID NO: 811170 - DNA, 15 bp, Homo sapiens
ctcaaaaaaataaat

SEQ ID NO: 811171 - DNA, 15 bp, Homo sapiens
tcaaaaaaataaata

SEQ ID NO: 811172 - DNA, 15 bp, Homo sapiens
caaaaaaataaataa

SEQ ID NO: 811173 - DNA, 15 bp, Homo sapiens
aaaaaataaataaaa

SEQ ID NO: 811174 - DNA, 15 bp, Homo sapiens
aaaaataaataaaat

SEQ ID NO: 811175 - DNA, 15 bp, Homo sapiens
aaaataaataaaata

SEQ ID NO: 811176 - DNA, 15 bp, Homo sapiens
aaataaataaaataa

SEQ ID NO: 811177 - DNA, 15 bp, Homo sapiens
aataaataaaataaa

SEQ ID NO: 811178 - DNA, 15 bp, Homo sapiens
ataaataaaataaaa

SEQ ID NO: 811179 - DNA, 15 bp, Homo sapiens
taaataaaataaaat

SEQ ID NO: 811180 - DNA, 15 bp, Homo sapiens
aaataaaataaaatg

SEQ ID NO: 811181 - DNA, 15 bp, Homo sapiens
aataaaataaaatgt

SEQ ID NO: 811182 - DNA, 15 bp, Homo sapiens
ataaaataaaatgta

SEQ ID NO: 811183 - DNA, 15 bp, Homo sapiens
taaaataaaatgtag

SEQ ID NO: 811184 - DNA, 15 bp, Homo sapiens
aaaataaaatgtagc

SEQ ID NO: 811185 - DNA, 15 bp, Homo sapiens
aaataaaatgtagca

SEQ ID NO: 811186 - DNA, 15 bp, Homo sapiens
aataaaatgtagcag

SEQ ID NO: 811187 - DNA, 15 bp, Homo sapiens
ataaaatgtagcagt

SEQ ID NO: 811188 - DNA, 15 bp, Homo sapiens
aatgtagcagtcctt

SEQ ID NO: 811189 - DNA, 15 bp, Homo sapiens
atgtagcagtccttt

SEQ ID NO: 811190 - DNA, 15 bp, Homo sapiens
tgtagcagtcctttt

SEQ ID NO: 811191 - DNA, 15 bp, Homo sapiens
gtagcagtccttttt

SEQ ID NO: 811192 - DNA, 15 bp, Homo sapiens
tagcagtccttttta

SEQ ID NO: 811193 - DNA, 15 bp, Homo sapiens
agcagtcctttttaa

SEQ ID NO: 811194 - DNA, 15 bp, Homo sapiens
gcagtcctttttaaa

SEQ ID NO: 811195 - DNA, 15 bp, Homo sapiens
cagtcctttttaaaa

SEQ ID NO: 811196 - DNA, 15 bp, Homo sapiens
agtcctttttaaaaa

SEQ ID NO: 811197 - DNA, 15 bp, Homo sapiens
gtcctttttaaaaat

SEQ ID NO: 811198 - DNA, 15 bp, Homo sapiens
tcctttttaaaaatg

SEQ ID NO: 811199 - DNA, 15 bp, Homo sapiens
cctttttaaaaatgt

SEQ ID NO: 811200 - DNA, 15 bp, Homo sapiens
ctttttaaaaatgtg

SEQ ID NO: 811201 - DNA, 15 bp, Homo sapiens
tttttaaaaatgtgg

SEQ ID NO: 811202 - DNA, 15 bp, Homo sapiens
ttttaaaaatgtgga

SEQ ID NO: 811203 - DNA, 15 bp, Homo sapiens
tttaaaaatgtggaa

SEQ ID NO: 811204 - DNA, 15 bp, Homo sapiens
ttaaaaatgtggaat

SEQ ID NO: 811205 - DNA, 15 bp, Homo sapiens
taaaaatgtggaatt

SEQ ID NO: 811206 - DNA, 15 bp, Homo sapiens
aaaaatgtggaattt

SEQ ID NO: 811207 - DNA, 15 bp, Homo sapiens
aaaatgtggaatttt

SEQ ID NO: 811208 - DNA, 15 bp, Homo sapiens
aaatgtggaatttta

SEQ ID NO: 811209 - DNA, 15 bp, Homo sapiens
aatgtggaattttac

SEQ ID NO: 811210 - DNA, 15 bp, Homo sapiens
atgtggaattttact

SEQ ID NO: 811211 - DNA, 15 bp, Homo sapiens
tgtggaattttactt

SEQ ID NO: 811212 - DNA, 15 bp, Homo sapiens
gtggaattttacttg

SEQ ID NO: 811213 - DNA, 15 bp, Homo sapiens
tggaattttacttga

SEQ ID NO: 811214 - DNA, 15 bp, Homo sapiens
ggaattttacttgac

SEQ ID NO: 811215 - DNA, 15 bp, Homo sapiens
gaattttacttgaca

SEQ ID NO: 811216 - DNA, 15 bp, Homo sapiens
aattttacttgacag

SEQ ID NO: 811217 - DNA, 15 bp, Homo sapiens
attttacttgacagt

SEQ ID NO: 811218 - DNA, 15 bp, Homo sapiens
ttttacttgacagta

SEQ ID NO: 811219 - DNA, 15 bp, Homo sapiens
tttacttgacagtag

SEQ ID NO: 811220 - DNA, 15 bp, Homo sapiens
ttacttgacagtaga

SEQ ID NO: 811221 - DNA, 15 bp, Homo sapiens
tacttgacagtagag

SEQ ID NO: 811222 - DNA, 15 bp, Homo sapiens
acttgacagtagagt

SEQ ID NO: 811223 - DNA, 15 bp, Homo sapiens
cttgacagtagagtg

SEQ ID NO: 811224 - DNA, 15 bp, Homo sapiens
ttgacagtagagtga

SEQ ID NO: 811225 - DNA, 15 bp, Homo sapiens
tgacagtagagtgaa

SEQ ID NO: 811226 - DNA, 15 bp, Homo sapiens
gacagtagagtgaag

SEQ ID NO: 811227 - DNA, 15 bp, Homo sapiens
acagtagagtgaagt

SEQ ID NO: 811228 - DNA, 15 bp, Homo sapiens
cagtagagtgaagta

SEQ ID NO: 811229 - DNA, 15 bp, Homo sapiens
agtagagtgaagtag

SEQ ID NO: 811230 - DNA, 15 bp, Homo sapiens
gtagagtgaagtagc

SEQ ID NO: 811231 - DNA, 15 bp, Homo sapiens
tagagtgaagtagcc

SEQ ID NO: 811232 - DNA, 15 bp, Homo sapiens
agagtgaagtagcct

SEQ ID NO: 811233 - DNA, 15 bp, Homo sapiens
gagtgaagtagcctg

SEQ ID NO: 811234 - DNA, 15 bp, Homo sapiens
agtgaagtagcctgt

SEQ ID NO: 811235 - DNA, 15 bp, Homo sapiens
gtgaagtagcctgta

SEQ ID NO: 811236 - DNA, 15 bp, Homo sapiens
tgaagtagcctgtat

SEQ ID NO: 811237 - DNA, 15 bp, Homo sapiens
gaagtagcctgtatg

SEQ ID NO: 811238 - DNA, 15 bp, Homo sapiens
aagtagcctgtatgc

SEQ ID NO: 811239 - DNA, 15 bp, Homo sapiens
agtagcctgtatgca

SEQ ID NO: 811240 - DNA, 15 bp, Homo sapiens
gtagcctgtatgcaa

SEQ ID NO: 811241 - DNA, 15 bp, Homo sapiens
tagcctgtatgcaat

SEQ ID NO: 811242 - DNA, 15 bp, Homo sapiens
agcctgtatgcaatg

SEQ ID NO: 811243 - DNA, 15 bp, Homo sapiens
gcctgtatgcaatga

SEQ ID NO: 811244 - DNA, 15 bp, Homo sapiens
cctgtatgcaatgat

SEQ ID NO: 811245 - DNA, 15 bp, Homo sapiens
ctgtatgcaatgata

SEQ ID NO: 811246 - DNA, 15 bp, Homo sapiens
tgtatgcaatgatat

SEQ ID NO: 811247 - DNA, 15 bp, Homo sapiens
gtatgcaatgatatg

SEQ ID NO: 811248 - DNA, 15 bp, Homo sapiens
tatgcaatgatatgg

SEQ ID NO: 811249 - DNA, 15 bp, Homo sapiens
atgcaatgatatggg

SEQ ID NO: 811250 - DNA, 15 bp, Homo sapiens
tgcaatgatatggga

SEQ ID NO: 811251 - DNA, 15 bp, Homo sapiens
gcaatgatatgggaa

SEQ ID NO: 811252 - DNA, 15 bp, Homo sapiens
caatgatatgggaaa

SEQ ID NO: 811253 - DNA, 15 bp, Homo sapiens
aatgatatgggaaaa

SEQ ID NO: 811254 - DNA, 15 bp, Homo sapiens
atgatatgggaaaat

SEQ ID NO: 811255 - DNA, 15 bp, Homo sapiens
tgatatgggaaaatg

SEQ ID NO: 811256 - DNA, 15 bp, Homo sapiens
gatatgggaaaatgt

SEQ ID NO: 811257 - DNA, 15 bp, Homo sapiens
atatgggaaaatgta

SEQ ID NO: 811258 - DNA, 15 bp, Homo sapiens
tatgggaaaatgtac

SEQ ID NO: 811259 - DNA, 15 bp, Homo sapiens
atgggaaaatgtaca

SEQ ID NO: 811260 - DNA, 15 bp, Homo sapiens
tgggaaaatgtacat

SEQ ID NO: 811261 - DNA, 15 bp, Homo sapiens
gggaaaatgtacatg

SEQ ID NO: 811262 - DNA, 15 bp, Homo sapiens
ggaaaatgtacatga

SEQ ID NO: 811263 - DNA, 15 bp, Homo sapiens
gaaaatgtacatgac

SEQ ID NO: 811264 - DNA, 15 bp, Homo sapiens
aaaatgtacatgaca

SEQ ID NO: 811265 - DNA, 15 bp, Homo sapiens
aaatgtacatgacat

SEQ ID NO: 811266 - DNA, 15 bp, Homo sapiens
aatgtacatgacata

SEQ ID NO: 811267 - DNA, 15 bp, Homo sapiens
atgtacatgacatat

SEQ ID NO: 811268 - DNA, 15 bp, Homo sapiens
tgtacatgacatatt

SEQ ID NO: 811269 - DNA, 15 bp, Homo sapiens
gtacatgacatatta

SEQ ID NO: 811270 - DNA, 15 bp, Homo sapiens
tacatgacatattaa

SEQ ID NO: 811271 - DNA, 15 bp, Homo sapiens
acatgacatattaag

SEQ ID NO: 811272 - DNA, 15 bp, Homo sapiens
catgacatattaaga

SEQ ID NO: 811273 - DNA, 15 bp, Homo sapiens
atgacatattaagaa

SEQ ID NO: 811274 - DNA, 15 bp, Homo sapiens
tgacatattaagaaa

SEQ ID NO: 811275 - DNA, 15 bp, Homo sapiens
gacatattaagaaaa

SEQ ID NO: 811276 - DNA, 15 bp, Homo sapiens
acatattaagaaaaa

SEQ ID NO: 811277 - DNA, 15 bp, Homo sapiens
catattaagaaaaag

SEQ ID NO: 811278 - DNA, 15 bp, Homo sapiens
atattaagaaaaagc

SEQ ID NO: 811279 - DNA, 15 bp, Homo sapiens
tattaagaaaaagca

SEQ ID NO: 811280 - DNA, 15 bp, Homo sapiens
attaagaaaaagcaa

SEQ ID NO: 811281 - DNA, 15 bp, Homo sapiens
ttaagaaaaagcaaa

SEQ ID NO: 811282 - DNA, 15 bp, Homo sapiens
taagaaaaagcaaaa

SEQ ID NO: 811283 - DNA, 15 bp, Homo sapiens
aagaaaaagcaaaat

SEQ ID NO: 811284 - DNA, 15 bp, Homo sapiens
agaaaaagcaaaatg

SEQ ID NO: 811285 - DNA, 15 bp, Homo sapiens
gaaaaagcaaaatgt

SEQ ID NO: 811286 - DNA, 15 bp, Homo sapiens
aaaaagcaaaatgta

SEQ ID NO: 811287 - DNA, 15 bp, Homo sapiens
aaaagcaaaatgtaa

SEQ ID NO: 811288 - DNA, 15 bp, Homo sapiens
aaagcaaaatgtaaa

SEQ ID NO: 811289 - DNA, 15 bp, Homo sapiens
aagcaaaatgtaaaa

SEQ ID NO: 811290 - DNA, 15 bp, Homo sapiens
agcaaaatgtaaaat

SEQ ID NO: 811291 - DNA, 15 bp, Homo sapiens
gcaaaatgtaaaata

SEQ ID NO: 811292 - DNA, 15 bp, Homo sapiens
caaaatgtaaaataa

SEQ ID NO: 811293 - DNA, 15 bp, Homo sapiens
aaaatgtaaaataat

SEQ ID NO: 811294 - DNA, 15 bp, Homo sapiens
aaatgtaaaataatt

SEQ ID NO: 811295 - DNA, 15 bp, Homo sapiens
aatgtaaaataattt

SEQ ID NO: 811296 - DNA, 15 bp, Homo sapiens
atgtaaaataatttg

SEQ ID NO: 811297 - DNA, 15 bp, Homo sapiens
tgtaaaataatttga

SEQ ID NO: 811298 - DNA, 15 bp, Homo sapiens
gtaaaataatttgaa

SEQ ID NO: 811299 - DNA, 15 bp, Homo sapiens
taaaataatttgaat

SEQ ID NO: 811300 - DNA, 15 bp, Homo sapiens
aaaataatttgaata

SEQ ID NO: 811301 - DNA, 15 bp, Homo sapiens
aaataatttgaatag

SEQ ID NO: 811302 - DNA, 15 bp, Homo sapiens
aataatttgaatagt

SEQ ID NO: 811303 - DNA, 15 bp, Homo sapiens
ataatttgaatagta

SEQ ID NO: 811304 - DNA, 15 bp, Homo sapiens
taatttgaatagtat

SEQ ID NO: 811305 - DNA, 15 bp, Homo sapiens
aatttgaatagtatt

SEQ ID NO: 811306 - DNA, 15 bp, Homo sapiens
atttgaatagtatta

SEQ ID NO: 811307 - DNA, 15 bp, Homo sapiens
tttgaatagtattat

SEQ ID NO: 811308 - DNA, 15 bp, Homo sapiens
ttgaatagtattatt

SEQ ID NO: 811309 - DNA, 15 bp, Homo sapiens
tgaatagtattatta

SEQ ID NO: 811310 - DNA, 15 bp, Homo sapiens
gaatagtattattag

SEQ ID NO: 811311 - DNA, 15 bp, Homo sapiens
aatagtattattagt

SEQ ID NO: 811312 - DNA, 15 bp, Homo sapiens
atagtattattagta

SEQ ID NO: 811313 - DNA, 15 bp, Homo sapiens
tagtattattagtat

SEQ ID NO: 811314 - DNA, 15 bp, Homo sapiens
agtattattagtata

SEQ ID NO: 811315 - DNA, 15 bp, Homo sapiens
gtattattagtatat

SEQ ID NO: 811316 - DNA, 15 bp, Homo sapiens
tattattagtatatg

SEQ ID NO: 811317 - DNA, 15 bp, Homo sapiens
attattagtatatgt

SEQ ID NO: 811318 - DNA, 15 bp, Homo sapiens
ttattagtatatgtg

SEQ ID NO: 811319 - DNA, 15 bp, Homo sapiens
tattagtatatgtgt

SEQ ID NO: 811320 - DNA, 15 bp, Homo sapiens
attagtatatgtgtt

SEQ ID NO: 811321 - DNA, 15 bp, Homo sapiens
ttagtatatgtgttt

SEQ ID NO: 811322 - DNA, 15 bp, Homo sapiens
tagtatatgtgtttt

SEQ ID NO: 811323 - DNA, 15 bp, Homo sapiens
agtatatgtgtttta

SEQ ID NO: 811324 - DNA, 15 bp, Homo sapiens
gtatatgtgttttaa

SEQ ID NO: 811325 - DNA, 15 bp, Homo sapiens
tatatgtgttttaaa

SEQ ID NO: 811326 - DNA, 15 bp, Homo sapiens
atatgtgttttaaaa

SEQ ID NO: 811327 - DNA, 15 bp, Homo sapiens
tatgtgttttaaaaa

SEQ ID NO: 811328 - DNA, 15 bp, Homo sapiens
atgtgttttaaaaat

SEQ ID NO: 811329 - DNA, 15 bp, Homo sapiens
tgtgttttaaaaata

SEQ ID NO: 811330 - DNA, 15 bp, Homo sapiens
gtgttttaaaaatac

SEQ ID NO: 811331 - DNA, 15 bp, Homo sapiens
tgttttaaaaataca

SEQ ID NO: 811332 - DNA, 15 bp, Homo sapiens
gttttaaaaatacac

SEQ ID NO: 811333 - DNA, 15 bp, Homo sapiens
ttttaaaaatacact

SEQ ID NO: 811334 - DNA, 15 bp, Homo sapiens
tttaaaaatacacta

SEQ ID NO: 811335 - DNA, 15 bp, Homo sapiens
ttaaaaatacactat

SEQ ID NO: 811336 - DNA, 15 bp, Homo sapiens
taaaaatacactata

SEQ ID NO: 811337 - DNA, 15 bp, Homo sapiens
aaaaatacactatac

SEQ ID NO: 811338 - DNA, 15 bp, Homo sapiens
aaaatacactatact

SEQ ID NO: 811339 - DNA, 15 bp, Homo sapiens
aaatacactatactc

SEQ ID NO: 811340 - DNA, 15 bp, Homo sapiens
aatacactatactct

SEQ ID NO: 811341 - DNA, 15 bp, Homo sapiens
atacactatactctt

SEQ ID NO: 811342 - DNA, 15 bp, Homo sapiens
tacactatactctta

SEQ ID NO: 811343 - DNA, 15 bp, Homo sapiens
acactatactcttat

SEQ ID NO: 811344 - DNA, 15 bp, Homo sapiens
cactatactcttatg

SEQ ID NO: 811345 - DNA, 15 bp, Homo sapiens
actatactcttatgt

SEQ ID NO: 811346 - DNA, 15 bp, Homo sapiens
ctatactcttatgtg

SEQ ID NO: 811347 - DNA, 15 bp, Homo sapiens
tatactcttatgtgt

SEQ ID NO: 811348 - DNA, 15 bp, Homo sapiens
atactcttatgtgta

SEQ ID NO: 811349 - DNA, 15 bp, Homo sapiens
tactcttatgtgtat

SEQ ID NO: 811350 - DNA, 15 bp, Homo sapiens
actcttatgtgtatt

SEQ ID NO: 811351 - DNA, 15 bp, Homo sapiens
ctcttatgtgtattc

SEQ ID NO: 811352 - DNA, 15 bp, Homo sapiens
tcttatgtgtattca

SEQ ID NO: 811353 - DNA, 15 bp, Homo sapiens
cttatgtgtattcat

SEQ ID NO: 811354 - DNA, 15 bp, Homo sapiens
ttatgtgtattcata

SEQ ID NO: 811355 - DNA, 15 bp, Homo sapiens
tatgtgtattcatat

SEQ ID NO: 811356 - DNA, 15 bp, Homo sapiens
atgtgtattcatatg

SEQ ID NO: 811357 - DNA, 15 bp, Homo sapiens
tgtgtattcatatgt

SEQ ID NO: 811358 - DNA, 15 bp, Homo sapiens
gtgtattcatatgta

SEQ ID NO: 811359 - DNA, 15 bp, Homo sapiens
tgtattcatatgtat

SEQ ID NO: 811360 - DNA, 15 bp, Homo sapiens
gtattcatatgtata

SEQ ID NO: 811361 - DNA, 15 bp, Homo sapiens
tattcatatgtatat

SEQ ID NO: 811362 - DNA, 15 bp, Homo sapiens
attcatatgtatatt

SEQ ID NO: 811363 - DNA, 15 bp, Homo sapiens
ttcatatgtatatta

SEQ ID NO: 811364 - DNA, 15 bp, Homo sapiens
tcatatgtatattaa

SEQ ID NO: 811365 - DNA, 15 bp, Homo sapiens
catatgtatattaag

SEQ ID NO: 811366 - DNA, 15 bp, Homo sapiens
atatgtatattaaga

SEQ ID NO: 811367 - DNA, 15 bp, Homo sapiens
tatgtatattaagaa

SEQ ID NO: 811368 - DNA, 15 bp, Homo sapiens
atgtatattaagaaa

SEQ ID NO: 811369 - DNA, 15 bp, Homo sapiens
tgtatattaagaaat

SEQ ID NO: 811370 - DNA, 15 bp, Homo sapiens
gtatattaagaaatt

SEQ ID NO: 811371 - DNA, 15 bp, Homo sapiens
tatattaagaaattc

SEQ ID NO: 811372 - DNA, 15 bp, Homo sapiens
atattaagaaattct

SEQ ID NO: 811373 - DNA, 15 bp, Homo sapiens
tattaagaaattctg

SEQ ID NO: 811374 - DNA, 15 bp, Homo sapiens
attaagaaattctgg

SEQ ID NO: 811375 - DNA, 15 bp, Homo sapiens
ttaagaaattctgga

SEQ ID NO: 811376 - DNA, 15 bp, Homo sapiens
taagaaattctggag

SEQ ID NO: 811377 - DNA, 15 bp, Homo sapiens
aagaaattctggagg

SEQ ID NO: 811378 - DNA, 15 bp, Homo sapiens
agaaattctggagga

SEQ ID NO: 811379 - DNA, 15 bp, Homo sapiens
gaaattctggaggaa

SEQ ID NO: 811380 - DNA, 15 bp, Homo sapiens
aaattctggaggaat

SEQ ID NO: 811381 - DNA, 15 bp, Homo sapiens
aattctggaggaata

SEQ ID NO: 811382 - DNA, 15 bp, Homo sapiens
attctggaggaatat

SEQ ID NO: 811383 - DNA, 15 bp, Homo sapiens
ttctggaggaatata

SEQ ID NO: 811384 - DNA, 15 bp, Homo sapiens
tctggaggaatatac

SEQ ID NO: 811385 - DNA, 15 bp, Homo sapiens
ctggaggaatatacc

SEQ ID NO: 811386 - DNA, 15 bp, Homo sapiens
tggaggaatatacca

SEQ ID NO: 811387 - DNA, 15 bp, Homo sapiens
ggaggaatataccag

SEQ ID NO: 811388 - DNA, 15 bp, Homo sapiens
gaggaatataccagc

SEQ ID NO: 811389 - DNA, 15 bp, Homo sapiens
aggaatataccagca

SEQ ID NO: 811390 - DNA, 15 bp, Homo sapiens
ggaatataccagcag

SEQ ID NO: 811391 - DNA, 15 bp, Homo sapiens
gaatataccagcagt

SEQ ID NO: 811392 - DNA, 15 bp, Homo sapiens
aatataccagcagtg

SEQ ID NO: 811393 - DNA, 15 bp, Homo sapiens
atataccagcagtgc

SEQ ID NO: 811394 - DNA, 15 bp, Homo sapiens
tataccagcagtgct

SEQ ID NO: 811395 - DNA, 15 bp, Homo sapiens
ataccagcagtgcta

SEQ ID NO: 811396 - DNA, 15 bp, Homo sapiens
taccagcagtgctat

SEQ ID NO: 811397 - DNA, 15 bp, Homo sapiens
accagcagtgctatg

SEQ ID NO: 811398 - DNA, 15 bp, Homo sapiens
ccagcagtgctatgt

SEQ ID NO: 811399 - DNA, 15 bp, Homo sapiens
cagcagtgctatgtg

SEQ ID NO: 811400 - DNA, 15 bp, Homo sapiens
agcagtgctatgtgt

SEQ ID NO: 811401 - DNA, 15 bp, Homo sapiens
gcagtgctatgtgta

SEQ ID NO: 811402 - DNA, 15 bp, Homo sapiens
cagtgctatgtgtat

SEQ ID NO: 811403 - DNA, 15 bp, Homo sapiens
agtgctatgtgtatt

SEQ ID NO: 811404 - DNA, 15 bp, Homo sapiens
gtgctatgtgtatta

SEQ ID NO: 811405 - DNA, 15 bp, Homo sapiens
tgctatgtgtattag

SEQ ID NO: 811406 - DNA, 15 bp, Homo sapiens
gctatgtgtattagt

SEQ ID NO: 811407 - DNA, 15 bp, Homo sapiens
ctatgtgtattagtg

SEQ ID NO: 811408 - DNA, 15 bp, Homo sapiens
tatgtgtattagtgc

SEQ ID NO: 811409 - DNA, 15 bp, Homo sapiens
atgtgtattagtgct

SEQ ID NO: 811410 - DNA, 15 bp, Homo sapiens
tgtgtattagtgctg

SEQ ID NO: 811411 - DNA, 15 bp, Homo sapiens
gtgtattagtgctgc

SEQ ID NO: 811412 - DNA, 15 bp, Homo sapiens
tgtattagtgctgct

SEQ ID NO: 811413 - DNA, 15 bp, Homo sapiens
gtattagtgctgctg

SEQ ID NO: 811414 - DNA, 15 bp, Homo sapiens
tattagtgctgctgt

SEQ ID NO: 811415 - DNA, 15 bp, Homo sapiens
attagtgctgctgtt

SEQ ID NO: 811416 - DNA, 15 bp, Homo sapiens
ttagtgctgctgttg

SEQ ID NO: 811417 - DNA, 15 bp, Homo sapiens
tagtgctgctgttgg

SEQ ID NO: 811418 - DNA, 15 bp, Homo sapiens
agtgctgctgttggt

SEQ ID NO: 811419 - DNA, 15 bp, Homo sapiens
gtgctgctgttggta

SEQ ID NO: 811420 - DNA, 15 bp, Homo sapiens
tgctgctgttggtat

SEQ ID NO: 811421 - DNA, 15 bp, Homo sapiens
gctgctgttggtatc

SEQ ID NO: 811422 - DNA, 15 bp, Homo sapiens
ctgctgttggtatcc

SEQ ID NO: 811423 - DNA, 15 bp, Homo sapiens
tgctgttggtatcca

SEQ ID NO: 811424 - DNA, 15 bp, Homo sapiens
gctgttggtatccat

SEQ ID NO: 811425 - DNA, 15 bp, Homo sapiens
ctgttggtatccatg

SEQ ID NO: 811426 - DNA, 15 bp, Homo sapiens
tgttggtatccatgg

SEQ ID NO: 811427 - DNA, 15 bp, Homo sapiens
gttggtatccatggc

SEQ ID NO: 811428 - DNA, 15 bp, Homo sapiens
ttggtatccatggct

SEQ ID NO: 811429 - DNA, 15 bp, Homo sapiens
tggtatccatggcta

SEQ ID NO: 811430 - DNA, 15 bp, Homo sapiens
ggtatccatggctat

SEQ ID NO: 811431 - DNA, 15 bp, Homo sapiens
gtatccatggctatt

SEQ ID NO: 811432 - DNA, 15 bp, Homo sapiens
tatccatggctattc

SEQ ID NO: 811433 - DNA, 15 bp, Homo sapiens
atccatggctattct

SEQ ID NO: 811434 - DNA, 15 bp, Homo sapiens
tccatggctattcta

SEQ ID NO: 811435 - DNA, 15 bp, Homo sapiens
ccatggctattctag

SEQ ID NO: 811436 - DNA, 15 bp, Homo sapiens
catggctattctaga

SEQ ID NO: 811437 - DNA, 15 bp, Homo sapiens
atggctattctagac

SEQ ID NO: 811438 - DNA, 15 bp, Homo sapiens
tggctattctagact

SEQ ID NO: 811439 - DNA, 15 bp, Homo sapiens
ggctattctagactg

SEQ ID NO: 811440 - DNA, 15 bp, Homo sapiens
gctattctagactgt

SEQ ID NO: 811441 - DNA, 15 bp, Homo sapiens
ctattctagactgtc

SEQ ID NO: 811442 - DNA, 15 bp, Homo sapiens
tattctagactgtct

SEQ ID NO: 811443 - DNA, 15 bp, Homo sapiens
attctagactgtctc

SEQ ID NO: 811444 - DNA, 15 bp, Homo sapiens
ttctagactgtctct

SEQ ID NO: 811445 - DNA, 15 bp, Homo sapiens
tctagactgtctctg

SEQ ID NO: 811446 - DNA, 15 bp, Homo sapiens
ctagactgtctctgt

SEQ ID NO: 811447 - DNA, 15 bp, Homo sapiens
tagactgtctctgtg

SEQ ID NO: 811448 - DNA, 15 bp, Homo sapiens
agactgtctctgtga

SEQ ID NO: 811449 - DNA, 15 bp, Homo sapiens
gactgtctctgtgat

SEQ ID NO: 811450 - DNA, 15 bp, Homo sapiens
actgtctctgtgata

SEQ ID NO: 811451 - DNA, 15 bp, Homo sapiens
ctgtctctgtgatat

SEQ ID NO: 811452 - DNA, 15 bp, Homo sapiens
tgtctctgtgatatt

SEQ ID NO: 811453 - DNA, 15 bp, Homo sapiens
gtctctgtgatattt

SEQ ID NO: 811454 - DNA, 15 bp, Homo sapiens
tctctgtgatatttg

SEQ ID NO: 811455 - DNA, 15 bp, Homo sapiens
ctctgtgatatttgc

SEQ ID NO: 811456 - DNA, 15 bp, Homo sapiens
tctgtgatatttgca

SEQ ID NO: 811457 - DNA, 15 bp, Homo sapiens
ctgtgatatttgcat

SEQ ID NO: 811458 - DNA, 15 bp, Homo sapiens
tgtgatatttgcatt

SEQ ID NO: 811459 - DNA, 15 bp, Homo sapiens
gtgatatttgcattt

SEQ ID NO: 811460 - DNA, 15 bp, Homo sapiens
tgatatttgcatttt

SEQ ID NO: 811461 - DNA, 15 bp, Homo sapiens
gatatttgcatttta

SEQ ID NO: 811462 - DNA, 15 bp, Homo sapiens
atatttgcattttaa

SEQ ID NO: 811463 - DNA, 15 bp, Homo sapiens
tatttgcattttaaa

SEQ ID NO: 811464 - DNA, 15 bp, Homo sapiens
atttgcattttaaac

SEQ ID NO: 811465 - DNA, 15 bp, Homo sapiens
tttgcattttaaact

SEQ ID NO: 811466 - DNA, 15 bp, Homo sapiens
ttgcattttaaactg

SEQ ID NO: 811467 - DNA, 15 bp, Homo sapiens
tgcattttaaactga

SEQ ID NO: 811468 - DNA, 15 bp, Homo sapiens
gcattttaaactgaa

SEQ ID NO: 811469 - DNA, 15 bp, Homo sapiens
cattttaaactgaat

SEQ ID NO: 811470 - DNA, 15 bp, Homo sapiens
attttaaactgaata

SEQ ID NO: 811471 - DNA, 15 bp, Homo sapiens
ttttaaactgaatat

SEQ ID NO: 811472 - DNA, 15 bp, Homo sapiens
tttaaactgaatata

SEQ ID NO: 811473 - DNA, 15 bp, Homo sapiens
ttaaactgaatatat

SEQ ID NO: 811474 - DNA, 15 bp, Homo sapiens
taaactgaatatatt

SEQ ID NO: 811475 - DNA, 15 bp, Homo sapiens
aaactgaatatatta

SEQ ID NO: 811476 - DNA, 15 bp, Homo sapiens
aactgaatatattac

SEQ ID NO: 811477 - DNA, 15 bp, Homo sapiens
actgaatatattact

SEQ ID NO: 811478 - DNA, 15 bp, Homo sapiens
ctgaatatattactt

SEQ ID NO: 811479 - DNA, 15 bp, Homo sapiens
tgaatatattacttt

SEQ ID NO: 811480 - DNA, 15 bp, Homo sapiens
gaatatattactttt

SEQ ID NO: 811481 - DNA, 15 bp, Homo sapiens
aatatattactttta

SEQ ID NO: 811482 - DNA, 15 bp, Homo sapiens
atatattacttttat

SEQ ID NO: 811483 - DNA, 15 bp, Homo sapiens
tatattacttttata

SEQ ID NO: 811484 - DNA, 15 bp, Homo sapiens
atattacttttataa

SEQ ID NO: 811485 - DNA, 15 bp, Homo sapiens
tattacttttataat

SEQ ID NO: 811486 - DNA, 15 bp, Homo sapiens
attacttttataatc

SEQ ID NO: 811487 - DNA, 15 bp, Homo sapiens
ttacttttataatca

SEQ ID NO: 811488 - DNA, 15 bp, Homo sapiens
tacttttataatcag

SEQ ID NO: 811489 - DNA, 15 bp, Homo sapiens
acttttataatcaga

SEQ ID NO: 811490 - DNA, 15 bp, Homo sapiens
cttttataatcagaa

SEQ ID NO: 811491 - DNA, 15 bp, Homo sapiens
ttttataatcagaaa

SEQ ID NO: 811492 - DNA, 15 bp, Homo sapiens
tttataatcagaaaa

SEQ ID NO: 811493 - DNA, 15 bp, Homo sapiens
ttataatcagaaaaa

SEQ ID NO: 811494 - DNA, 15 bp, Homo sapiens
tataatcagaaaaat

SEQ ID NO: 811495 - DNA, 15 bp, Homo sapiens
ataatcagaaaaata

SEQ ID NO: 811496 - DNA, 15 bp, Homo sapiens
taatcagaaaaatag

SEQ ID NO: 811497 - DNA, 15 bp, Homo sapiens
aatcagaaaaatagt

SEQ ID NO: 811498 - DNA, 15 bp, Homo sapiens
atcagaaaaatagta

SEQ ID NO: 811499 - DNA, 15 bp, Homo sapiens
tcagaaaaatagtat

SEQ ID NO: 811500 - DNA, 15 bp, Homo sapiens
cagaaaaatagtatt

SEQ ID NO: 811501 - DNA, 15 bp, Homo sapiens
agaaaaatagtatta

SEQ ID NO: 811502 - DNA, 15 bp, Homo sapiens
gaaaaatagtattaa

SEQ ID NO: 811503 - DNA, 15 bp, Homo sapiens
aaaaatagtattaaa

SEQ ID NO: 811504 - DNA, 15 bp, Homo sapiens
aaaatagtattaaaa

SEQ ID NO: 811505 - DNA, 15 bp, Homo sapiens
aaatagtattaaaaa

SEQ ID NO: 811506 - DNA, 15 bp, Homo sapiens
aatagtattaaaaat

SEQ ID NO: 811507 - DNA, 15 bp, Homo sapiens
atagtattaaaaatg

SEQ ID NO: 811508 - DNA, 15 bp, Homo sapiens
tagtattaaaaatga

SEQ ID NO: 811509 - DNA, 15 bp, Homo sapiens
agtattaaaaatgaa

SEQ ID NO: 811510 - DNA, 15 bp, Homo sapiens
gtattaaaaatgaat

SEQ ID NO: 811511 - DNA, 15 bp, Homo sapiens
tattaaaaatgaatt

SEQ ID NO: 811512 - DNA, 15 bp, Homo sapiens
attaaaaatgaatta

SEQ ID NO: 811513 - DNA, 15 bp, Homo sapiens
ttaaaaatgaattat

SEQ ID NO: 811514 - DNA, 15 bp, Homo sapiens
taaaaatgaattata

SEQ ID NO: 811515 - DNA, 15 bp, Homo sapiens
aaaaatgaattataa

SEQ ID NO: 811516 - DNA, 15 bp, Homo sapiens
aaaatgaattataat

SEQ ID NO: 811517 - DNA, 15 bp, Homo sapiens
aaatgaattataatt

SEQ ID NO: 811518 - DNA, 15 bp, Homo sapiens
aatgaattataattt

SEQ ID NO: 811519 - DNA, 15 bp, Homo sapiens
atgaattataattta

SEQ ID NO: 811520 - DNA, 15 bp, Homo sapiens
tgaattataatttaa

SEQ ID NO: 811521 - DNA, 15 bp, Homo sapiens
gaattataatttaat

SEQ ID NO: 811522 - DNA, 15 bp, Homo sapiens
aattataatttaatt

SEQ ID NO: 811523 - DNA, 15 bp, Homo sapiens
attataatttaattt

SEQ ID NO: 811524 - DNA, 15 bp, Homo sapiens
ttataatttaatttc

SEQ ID NO: 811525 - DNA, 15 bp, Homo sapiens
tataatttaatttct

SEQ ID NO: 811526 - DNA, 15 bp, Homo sapiens
ataatttaatttctt

SEQ ID NO: 811527 - DNA, 15 bp, Homo sapiens
taatttaatttcttt

SEQ ID NO: 811528 - DNA, 15 bp, Homo sapiens
aatttaatttctttt

SEQ ID NO: 811529 - DNA, 15 bp, Homo sapiens
atttaatttcttttt

SEQ ID NO: 811530 - DNA, 15 bp, Homo sapiens
tttaatttctttttt

SEQ ID NO: 811531 - DNA, 15 bp, Homo sapiens
ttaatttcttttttc

SEQ ID NO: 811532 - DNA, 15 bp, Homo sapiens
taatttcttttttct

SEQ ID NO: 811533 - DNA, 15 bp, Homo sapiens
aatttcttttttctt

SEQ ID NO: 811534 - DNA, 15 bp, Homo sapiens
atttcttttttcttt

SEQ ID NO: 811535 - DNA, 15 bp, Homo sapiens
tttttttttgagtcg

SEQ ID NO: 811536 - DNA, 15 bp, Homo sapiens
ttttttttgagtcgg

SEQ ID NO: 811537 - DNA, 15 bp, Homo sapiens
tttttttgagtcgga

SEQ ID NO: 811538 - DNA, 15 bp, Homo sapiens
ttttttgagtcggag

SEQ ID NO: 811539 - DNA, 15 bp, Homo sapiens
tttttgagtcggagt

SEQ ID NO: 811540 - DNA, 15 bp, Homo sapiens
ttttgagtcggagtc

SEQ ID NO: 811541 - DNA, 15 bp, Homo sapiens
tttgagtcggagtct

SEQ ID NO: 811542 - DNA, 15 bp, Homo sapiens
ttgagtcggagtctc

SEQ ID NO: 811543 - DNA, 15 bp, Homo sapiens
tgagtcggagtctcg

SEQ ID NO: 811544 - DNA, 15 bp, Homo sapiens
gagtcggagtctcgt

SEQ ID NO: 811545 - DNA, 15 bp, Homo sapiens
agtcggagtctcgtt

SEQ ID NO: 811546 - DNA, 15 bp, Homo sapiens
gtcggagtctcgttc

SEQ ID NO: 811547 - DNA, 15 bp, Homo sapiens
tcggagtctcgttct

SEQ ID NO: 811548 - DNA, 15 bp, Homo sapiens
cggagtctcgttcta

SEQ ID NO: 811549 - DNA, 15 bp, Homo sapiens
ggagtctcgttctat

SEQ ID NO: 811550 - DNA, 15 bp, Homo sapiens
gagtctcgttctatc

SEQ ID NO: 811551 - DNA, 15 bp, Homo sapiens
agtctcgttctatcg

SEQ ID NO: 811552 - DNA, 15 bp, Homo sapiens
gtctcgttctatcgg

SEQ ID NO: 811553 - DNA, 15 bp, Homo sapiens
tctcgttctatcgga

SEQ ID NO: 811554 - DNA, 15 bp, Homo sapiens
ctcgttctatcggat

SEQ ID NO: 811555 - DNA, 15 bp, Homo sapiens
tcgttctatcggatt

SEQ ID NO: 811556 - DNA, 15 bp, Homo sapiens
cgttctatcggattg

SEQ ID NO: 811557 - DNA, 15 bp, Homo sapiens
gttctatcggattgc

SEQ ID NO: 811558 - DNA, 15 bp, Homo sapiens
ttctatcggattgca

SEQ ID NO: 811559 - DNA, 15 bp, Homo sapiens
tctatcggattgcag

SEQ ID NO: 811560 - DNA, 15 bp, Homo sapiens
ctatcggattgcagt

SEQ ID NO: 811561 - DNA, 15 bp, Homo sapiens
tatcggattgcagtg

SEQ ID NO: 811562 - DNA, 15 bp, Homo sapiens
atcggattgcagtgg

SEQ ID NO: 811563 - DNA, 15 bp, Homo sapiens
tcggattgcagtggt

SEQ ID NO: 811564 - DNA, 15 bp, Homo sapiens
cggattgcagtggtg

SEQ ID NO: 811565 - DNA, 15 bp, Homo sapiens
ggattgcagtggtgc

SEQ ID NO: 811566 - DNA, 15 bp, Homo sapiens
gattgcagtggtgcg

SEQ ID NO: 811567 - DNA, 15 bp, Homo sapiens
attgcagtggtgcga

SEQ ID NO: 811568 - DNA, 15 bp, Homo sapiens
ttgcagtggtgcgat

SEQ ID NO: 811569 - DNA, 15 bp, Homo sapiens
agtggtgcgatctca

SEQ ID NO: 811570 - DNA, 15 bp, Homo sapiens
gtggtgcgatctcag

SEQ ID NO: 811571 - DNA, 15 bp, Homo sapiens
tggtgcgatctcagc

SEQ ID NO: 811572 - DNA, 15 bp, Homo sapiens
ggtgcgatctcagct

SEQ ID NO: 811573 - DNA, 15 bp, Homo sapiens
gtgcgatctcagctc

SEQ ID NO: 811574 - DNA, 15 bp, Homo sapiens
tgcgatctcagctca

SEQ ID NO: 811575 - DNA, 15 bp, Homo sapiens
aacctctgcctccta

SEQ ID NO: 811576 - DNA, 15 bp, Homo sapiens
acctctgcctcctag

SEQ ID NO: 811577 - DNA, 15 bp, Homo sapiens
cctctgcctcctagg

SEQ ID NO: 811578 - DNA, 15 bp, Homo sapiens
ctctgcctcctaggt

SEQ ID NO: 811579 - DNA, 15 bp, Homo sapiens
tctgcctcctaggtt

SEQ ID NO: 811580 - DNA, 15 bp, Homo sapiens
ctgcctcctaggttc

SEQ ID NO: 811581 - DNA, 15 bp, Homo sapiens
tgcctcctaggttca

SEQ ID NO: 811582 - DNA, 15 bp, Homo sapiens
gcctcctaggttcaa

SEQ ID NO: 811583 - DNA, 15 bp, Homo sapiens
cctcctaggttcaag

SEQ ID NO: 811584 - DNA, 15 bp, Homo sapiens
ctcctaggttcaagc

SEQ ID NO: 811585 - DNA, 15 bp, Homo sapiens
tcctaggttcaagcg

SEQ ID NO: 811586 - DNA, 15 bp, Homo sapiens
cctaggttcaagcga

SEQ ID NO: 811587 - DNA, 15 bp, Homo sapiens
ctaggttcaagcgat

SEQ ID NO: 811588 - DNA, 15 bp, Homo sapiens
taggttcaagcgatt

SEQ ID NO: 811589 - DNA, 15 bp, Homo sapiens
aagcgattctcctgt

SEQ ID NO: 811590 - DNA, 15 bp, Homo sapiens
agcgattctcctgtc

SEQ ID NO: 811591 - DNA, 15 bp, Homo sapiens
gcgattctcctgtct

SEQ ID NO: 811592 - DNA, 15 bp, Homo sapiens
cgattctcctgtctc

SEQ ID NO: 811593 - DNA, 15 bp, Homo sapiens
gattctcctgtctca

SEQ ID NO: 811594 - DNA, 15 bp, Homo sapiens
attctcctgtctcag

SEQ ID NO: 811595 - DNA, 15 bp, Homo sapiens
ttctcctgtctcagc

SEQ ID NO: 811596 - DNA, 15 bp, Homo sapiens
tctcctgtctcagcc

SEQ ID NO: 811597 - DNA, 15 bp, Homo sapiens
ctcctgtctcagcct

SEQ ID NO: 811598 - DNA, 15 bp, Homo sapiens
tcctgtctcagcctc

SEQ ID NO: 811599 - DNA, 15 bp, Homo sapiens
cctgtctcagcctcc

SEQ ID NO: 811600 - DNA, 15 bp, Homo sapiens
ctgtctcagcctccc

SEQ ID NO: 811601 - DNA, 15 bp, Homo sapiens
tgtctcagcctccca

SEQ ID NO: 811602 - DNA, 15 bp, Homo sapiens
gtctcagcctcccaa

SEQ ID NO: 811603 - DNA, 15 bp, Homo sapiens
tctcagcctcccaag

SEQ ID NO: 811604 - DNA, 15 bp, Homo sapiens
caagtagctgggacg

SEQ ID NO: 811605 - DNA, 15 bp, Homo sapiens
aagtagctgggacga

SEQ ID NO: 811606 - DNA, 15 bp, Homo sapiens
agtagctgggacgat

SEQ ID NO: 811607 - DNA, 15 bp, Homo sapiens
gtagctgggacgata

SEQ ID NO: 811608 - DNA, 15 bp, Homo sapiens
tagctgggacgatag

SEQ ID NO: 811609 - DNA, 15 bp, Homo sapiens
agctgggacgatagg

SEQ ID NO: 811610 - DNA, 15 bp, Homo sapiens
gctgggacgataggt

SEQ ID NO: 811611 - DNA, 15 bp, Homo sapiens
ctgggacgataggtg

SEQ ID NO: 811612 - DNA, 15 bp, Homo sapiens
tgggacgataggtgc

SEQ ID NO: 811613 - DNA, 15 bp, Homo sapiens
gggacgataggtgca

SEQ ID NO: 811614 - DNA, 15 bp, Homo sapiens
ggacgataggtgcat

SEQ ID NO: 811615 - DNA, 15 bp, Homo sapiens
gacgataggtgcatg

SEQ ID NO: 811616 - DNA, 15 bp, Homo sapiens
acgataggtgcatgc

SEQ ID NO: 811617 - DNA, 15 bp, Homo sapiens
cgataggtgcatgcc

SEQ ID NO: 811618 - DNA, 15 bp, Homo sapiens
gataggtgcatgcca

SEQ ID NO: 811619 - DNA, 15 bp, Homo sapiens
ataggtgcatgccac

SEQ ID NO: 811620 - DNA, 15 bp, Homo sapiens
taggtgcatgccacc

SEQ ID NO: 811621 - DNA, 15 bp, Homo sapiens
aggtgcatgccacca

SEQ ID NO: 811622 - DNA, 15 bp, Homo sapiens
ggtgcatgccaccac

SEQ ID NO: 811623 - DNA, 15 bp, Homo sapiens
gtgcatgccaccacg

SEQ ID NO: 811624 - DNA, 15 bp, Homo sapiens
tgcatgccaccacgc

SEQ ID NO: 811625 - DNA, 15 bp, Homo sapiens
gcatgccaccacgcc

SEQ ID NO: 811626 - DNA, 15 bp, Homo sapiens
catgccaccacgcct

SEQ ID NO: 811627 - DNA, 15 bp, Homo sapiens
atgccaccacgcctg

SEQ ID NO: 811628 - DNA, 15 bp, Homo sapiens
cagggtttcaccata

SEQ ID NO: 811629 - DNA, 15 bp, Homo sapiens
tttcaccatattggt

SEQ ID NO: 811630 - DNA, 15 bp, Homo sapiens
ttcaccatattggtc

SEQ ID NO: 811631 - DNA, 15 bp, Homo sapiens
tcaccatattggtca

SEQ ID NO: 811632 - DNA, 15 bp, Homo sapiens
caccatattggtcag

SEQ ID NO: 811633 - DNA, 15 bp, Homo sapiens
accatattggtcagg

SEQ ID NO: 811634 - DNA, 15 bp, Homo sapiens
ccatattggtcaggc

SEQ ID NO: 811635 - DNA, 15 bp, Homo sapiens
catattggtcaggct

SEQ ID NO: 811636 - DNA, 15 bp, Homo sapiens
atattggtcaggctg

SEQ ID NO: 811637 - DNA, 15 bp, Homo sapiens
tattggtcaggctgg

SEQ ID NO: 811638 - DNA, 15 bp, Homo sapiens
attggtcaggctggt

SEQ ID NO: 811639 - DNA, 15 bp, Homo sapiens
ctcgtgatccaccca

SEQ ID NO: 811640 - DNA, 15 bp, Homo sapiens
tcgtgatccacccat

SEQ ID NO: 811641 - DNA, 15 bp, Homo sapiens
cgtgatccacccatc

SEQ ID NO: 811642 - DNA, 15 bp, Homo sapiens
gtgatccacccatct

SEQ ID NO: 811643 - DNA, 15 bp, Homo sapiens
tgatccacccatctc

SEQ ID NO: 811644 - DNA, 15 bp, Homo sapiens
gatccacccatctcg

SEQ ID NO: 811645 - DNA, 15 bp, Homo sapiens
atccacccatctcgg

SEQ ID NO: 811646 - DNA, 15 bp, Homo sapiens
tccacccatctcggc

SEQ ID NO: 811647 - DNA, 15 bp, Homo sapiens
ccacccatctcggcc

SEQ ID NO: 811648 - DNA, 15 bp, Homo sapiens
cacccatctcggcct

SEQ ID NO: 811649 - DNA, 15 bp, Homo sapiens
acccatctcggcctc

SEQ ID NO: 811650 - DNA, 15 bp, Homo sapiens
cccatctcggcctcc

SEQ ID NO: 811651 - DNA, 15 bp, Homo sapiens
ccatctcggcctccg

SEQ ID NO: 811652 - DNA, 15 bp, Homo sapiens
catctcggcctccga

SEQ ID NO: 811653 - DNA, 15 bp, Homo sapiens
atctcggcctccgaa

SEQ ID NO: 811654 - DNA, 15 bp, Homo sapiens
tctcggcctccgaaa

SEQ ID NO: 811655 - DNA, 15 bp, Homo sapiens
ctcggcctccgaaag

SEQ ID NO: 811656 - DNA, 15 bp, Homo sapiens
tcggcctccgaaagt

SEQ ID NO: 811657 - DNA, 15 bp, Homo sapiens
cggcctccgaaagtg

SEQ ID NO: 811658 - DNA, 15 bp, Homo sapiens
ggcctccgaaagtgc

SEQ ID NO: 811659 - DNA, 15 bp, Homo sapiens
gcctccgaaagtgct

SEQ ID NO: 811660 - DNA, 15 bp, Homo sapiens
cctccgaaagtgctg

SEQ ID NO: 811661 - DNA, 15 bp, Homo sapiens
ctccgaaagtgctgg

SEQ ID NO: 811662 - DNA, 15 bp, Homo sapiens
tccgaaagtgctggg

SEQ ID NO: 811663 - DNA, 15 bp, Homo sapiens
ccgaaagtgctggga

SEQ ID NO: 811664 - DNA, 15 bp, Homo sapiens
cgaaagtgctgggat

SEQ ID NO: 811665 - DNA, 15 bp, Homo sapiens
gaaagtgctgggatt

SEQ ID NO: 811666 - DNA, 15 bp, Homo sapiens
tacaggcatgagccg

SEQ ID NO: 811667 - DNA, 15 bp, Homo sapiens
acaggcatgagccgc

SEQ ID NO: 811668 - DNA, 15 bp, Homo sapiens
caggcatgagccgct

SEQ ID NO: 811669 - DNA, 15 bp, Homo sapiens
aggcatgagccgctg

SEQ ID NO: 811670 - DNA, 15 bp, Homo sapiens
ggcatgagccgctgt

SEQ ID NO: 811671 - DNA, 15 bp, Homo sapiens
gcatgagccgctgtg

SEQ ID NO: 811672 - DNA, 15 bp, Homo sapiens
catgagccgctgtgc

SEQ ID NO: 811673 - DNA, 15 bp, Homo sapiens
atgagccgctgtgcc

SEQ ID NO: 811674 - DNA, 15 bp, Homo sapiens
tgagccgctgtgccc

SEQ ID NO: 811675 - DNA, 15 bp, Homo sapiens
gagccgctgtgccca

SEQ ID NO: 811676 - DNA, 15 bp, Homo sapiens
agccgctgtgcccag

SEQ ID NO: 811677 - DNA, 15 bp, Homo sapiens
gccgctgtgcccaga

SEQ ID NO: 811678 - DNA, 15 bp, Homo sapiens
ccgctgtgcccagac

SEQ ID NO: 811679 - DNA, 15 bp, Homo sapiens
cgctgtgcccagact

SEQ ID NO: 811680 - DNA, 15 bp, Homo sapiens
gctgtgcccagacta

SEQ ID NO: 811681 - DNA, 15 bp, Homo sapiens
ctgtgcccagactag

SEQ ID NO: 811682 - DNA, 15 bp, Homo sapiens
tgtgcccagactaga

SEQ ID NO: 811683 - DNA, 15 bp, Homo sapiens
gtgcccagactagaa

SEQ ID NO: 811684 - DNA, 15 bp, Homo sapiens
tgcccagactagaat

SEQ ID NO: 811685 - DNA, 15 bp, Homo sapiens
gcccagactagaatt

SEQ ID NO: 811686 - DNA, 15 bp, Homo sapiens
cccagactagaattc

SEQ ID NO: 811687 - DNA, 15 bp, Homo sapiens
ccagactagaattca

SEQ ID NO: 811688 - DNA, 15 bp, Homo sapiens
cagactagaattcaa

SEQ ID NO: 811689 - DNA, 15 bp, Homo sapiens
agactagaattcaat

SEQ ID NO: 811690 - DNA, 15 bp, Homo sapiens
gactagaattcaatt

SEQ ID NO: 811691 - DNA, 15 bp, Homo sapiens
actagaattcaattt

SEQ ID NO: 811692 - DNA, 15 bp, Homo sapiens
ctagaattcaatttt

SEQ ID NO: 811693 - DNA, 15 bp, Homo sapiens
tagaattcaattttt

SEQ ID NO: 811694 - DNA, 15 bp, Homo sapiens
agaattcaatttttg

SEQ ID NO: 811695 - DNA, 15 bp, Homo sapiens
gaattcaatttttga

SEQ ID NO: 811696 - DNA, 15 bp, Homo sapiens
aattcaatttttgag

SEQ ID NO: 811697 - DNA, 15 bp, Homo sapiens
attcaatttttgaga

SEQ ID NO: 811698 - DNA, 15 bp, Homo sapiens
ttcaatttttgagaa

SEQ ID NO: 811699 - DNA, 15 bp, Homo sapiens
tcaatttttgagaat

SEQ ID NO: 811700 - DNA, 15 bp, Homo sapiens
caatttttgagaatt

SEQ ID NO: 811701 - DNA, 15 bp, Homo sapiens
aatttttgagaattc

SEQ ID NO: 811702 - DNA, 15 bp, Homo sapiens
atttttgagaattca

SEQ ID NO: 811703 - DNA, 15 bp, Homo sapiens
tttttgagaattcat

SEQ ID NO: 811704 - DNA, 15 bp, Homo sapiens
ttttgagaattcatt

SEQ ID NO: 811705 - DNA, 15 bp, Homo sapiens
tttgagaattcattg

SEQ ID NO: 811706 - DNA, 15 bp, Homo sapiens
ttgagaattcattga

SEQ ID NO: 811707 - DNA, 15 bp, Homo sapiens
tgagaattcattgac

SEQ ID NO: 811708 - DNA, 15 bp, Homo sapiens
gagaattcattgaca

SEQ ID NO: 811709 - DNA, 15 bp, Homo sapiens
agaattcattgacaa

SEQ ID NO: 811710 - DNA, 15 bp, Homo sapiens
gaattcattgacaac

SEQ ID NO: 811711 - DNA, 15 bp, Homo sapiens
aattcattgacaact

SEQ ID NO: 811712 - DNA, 15 bp, Homo sapiens
attcattgacaactc

SEQ ID NO: 811713 - DNA, 15 bp, Homo sapiens
ttcattgacaactct

SEQ ID NO: 811714 - DNA, 15 bp, Homo sapiens
tcattgacaactctt

SEQ ID NO: 811715 - DNA, 15 bp, Homo sapiens
cattgacaactctta

SEQ ID NO: 811716 - DNA, 15 bp, Homo sapiens
attgacaactcttac

SEQ ID NO: 811717 - DNA, 15 bp, Homo sapiens
ttgacaactcttact

SEQ ID NO: 811718 - DNA, 15 bp, Homo sapiens
tgacaactcttactt

SEQ ID NO: 811719 - DNA, 15 bp, Homo sapiens
gacaactcttactta

SEQ ID NO: 811720 - DNA, 15 bp, Homo sapiens
acaactcttacttaa

SEQ ID NO: 811721 - DNA, 15 bp, Homo sapiens
caactcttacttaaa

SEQ ID NO: 811722 - DNA, 15 bp, Homo sapiens
aactcttacttaaaa

SEQ ID NO: 811723 - DNA, 15 bp, Homo sapiens
actcttacttaaaat

SEQ ID NO: 811724 - DNA, 15 bp, Homo sapiens
ctcttacttaaaata

SEQ ID NO: 811725 - DNA, 15 bp, Homo sapiens
tcttacttaaaataa

SEQ ID NO: 811726 - DNA, 15 bp, Homo sapiens
cttacttaaaataag

SEQ ID NO: 811727 - DNA, 15 bp, Homo sapiens
ttacttaaaataagg

SEQ ID NO: 811728 - DNA, 15 bp, Homo sapiens
tacttaaaataaggt

SEQ ID NO: 811729 - DNA, 15 bp, Homo sapiens
acttaaaataaggtt

SEQ ID NO: 811730 - DNA, 15 bp, Homo sapiens
cttaaaataaggttg

SEQ ID NO: 811731 - DNA, 15 bp, Homo sapiens
ttaaaataaggttgc

SEQ ID NO: 811732 - DNA, 15 bp, Homo sapiens
taaaataaggttgct

SEQ ID NO: 811733 - DNA, 15 bp, Homo sapiens
aaaataaggttgctg

SEQ ID NO: 811734 - DNA, 15 bp, Homo sapiens
aaataaggttgctgt

SEQ ID NO: 811735 - DNA, 15 bp, Homo sapiens
aataaggttgctgta

SEQ ID NO: 811736 - DNA, 15 bp, Homo sapiens
ataaggttgctgtac

SEQ ID NO: 811737 - DNA, 15 bp, Homo sapiens
taaggttgctgtact

SEQ ID NO: 811738 - DNA, 15 bp, Homo sapiens
aaggttgctgtactg

SEQ ID NO: 811739 - DNA, 15 bp, Homo sapiens
aggttgctgtactga

SEQ ID NO: 811740 - DNA, 15 bp, Homo sapiens
ggttgctgtactgat

SEQ ID NO: 811741 - DNA, 15 bp, Homo sapiens
ttccagatttttttt

SEQ ID NO: 811742 - DNA, 15 bp, Homo sapiens
tccagatttttttta

SEQ ID NO: 811743 - DNA, 15 bp, Homo sapiens
ccagattttttttaa

SEQ ID NO: 811744 - DNA, 15 bp, Homo sapiens
cagattttttttaat

SEQ ID NO: 811745 - DNA, 15 bp, Homo sapiens
agattttttttaatc

SEQ ID NO: 811746 - DNA, 15 bp, Homo sapiens
gattttttttaatct

SEQ ID NO: 811747 - DNA, 15 bp, Homo sapiens
attttttttaatctc

SEQ ID NO: 811748 - DNA, 15 bp, Homo sapiens
ttttttttaatctcc

SEQ ID NO: 811749 - DNA, 15 bp, Homo sapiens
tttttttaatctcct

SEQ ID NO: 811750 - DNA, 15 bp, Homo sapiens
ttttttaatctccta

SEQ ID NO: 811751 - DNA, 15 bp, Homo sapiens
tttttaatctcctac

SEQ ID NO: 811752 - DNA, 15 bp, Homo sapiens
ttttaatctcctact

SEQ ID NO: 811753 - DNA, 15 bp, Homo sapiens
tttaatctcctactt

SEQ ID NO: 811754 - DNA, 15 bp, Homo sapiens
ttaatctcctacttc

SEQ ID NO: 811755 - DNA, 15 bp, Homo sapiens
taatctcctacttct

SEQ ID NO: 811756 - DNA, 15 bp, Homo sapiens
aatctcctacttctg

SEQ ID NO: 811757 - DNA, 15 bp, Homo sapiens
atctcctacttctgc

SEQ ID NO: 811758 - DNA, 15 bp, Homo sapiens
tctcctacttctgct

SEQ ID NO: 811759 - DNA, 15 bp, Homo sapiens
ctcctacttctgcta

SEQ ID NO: 811760 - DNA, 15 bp, Homo sapiens
tcctacttctgctat

SEQ ID NO: 811761 - DNA, 15 bp, Homo sapiens
cctacttctgctatc

SEQ ID NO: 811762 - DNA, 15 bp, Homo sapiens
ctacttctgctatct

SEQ ID NO: 811763 - DNA, 15 bp, Homo sapiens
tacttctgctatctt

SEQ ID NO: 811764 - DNA, 15 bp, Homo sapiens
acttctgctatcttt

SEQ ID NO: 811765 - DNA, 15 bp, Homo sapiens
cttctgctatctttg

SEQ ID NO: 811766 - DNA, 15 bp, Homo sapiens
ttctgctatctttga

SEQ ID NO: 811767 - DNA, 15 bp, Homo sapiens
tctgctatctttgag

SEQ ID NO: 811768 - DNA, 15 bp, Homo sapiens
ctgctatctttgagc

SEQ ID NO: 811769 - DNA, 15 bp, Homo sapiens
tgctatctttgagca

SEQ ID NO: 811770 - DNA, 15 bp, Homo sapiens
gctatctttgagcaa

SEQ ID NO: 811771 - DNA, 15 bp, Homo sapiens
ctatctttgagcaat

SEQ ID NO: 811772 - DNA, 15 bp, Homo sapiens
tatctttgagcaatc

SEQ ID NO: 811773 - DNA, 15 bp, Homo sapiens
atctttgagcaatct

SEQ ID NO: 811774 - DNA, 15 bp, Homo sapiens
tctttgagcaatctg

SEQ ID NO: 811775 - DNA, 15 bp, Homo sapiens
ctttgagcaatctgg

SEQ ID NO: 811776 - DNA, 15 bp, Homo sapiens
tttgagcaatctggg

SEQ ID NO: 811777 - DNA, 15 bp, Homo sapiens
ttgagcaatctgggc

SEQ ID NO: 811778 - DNA, 15 bp, Homo sapiens
tgagcaatctgggca

SEQ ID NO: 811779 - DNA, 15 bp, Homo sapiens
gagcaatctgggcac

SEQ ID NO: 811780 - DNA, 15 bp, Homo sapiens
agcaatctgggcact

SEQ ID NO: 811781 - DNA, 15 bp, Homo sapiens
gcaatctgggcactt

SEQ ID NO: 811782 - DNA, 15 bp, Homo sapiens
caatctgggcacttt

SEQ ID NO: 811783 - DNA, 15 bp, Homo sapiens
aatctgggcactttt

SEQ ID NO: 811784 - DNA, 15 bp, Homo sapiens
atctgggcactttta

SEQ ID NO: 811785 - DNA, 15 bp, Homo sapiens
tctgggcacttttaa

SEQ ID NO: 811786 - DNA, 15 bp, Homo sapiens
ctgggcacttttaaa

SEQ ID NO: 811787 - DNA, 15 bp, Homo sapiens
tgggcacttttaaaa

SEQ ID NO: 811788 - DNA, 15 bp, Homo sapiens
gggcacttttaaaaa

SEQ ID NO: 811789 - DNA, 15 bp, Homo sapiens
ggcacttttaaaaat

SEQ ID NO: 811790 - DNA, 15 bp, Homo sapiens
gcacttttaaaaata

SEQ ID NO: 811791 - DNA, 15 bp, Homo sapiens
cacttttaaaaatag

SEQ ID NO: 811792 - DNA, 15 bp, Homo sapiens
acttttaaaaataga

SEQ ID NO: 811793 - DNA, 15 bp, Homo sapiens
cttttaaaaatagag

SEQ ID NO: 811794 - DNA, 15 bp, Homo sapiens
ttttaaaaatagaga

SEQ ID NO: 811795 - DNA, 15 bp, Homo sapiens
tttaaaaatagagaa

SEQ ID NO: 811796 - DNA, 15 bp, Homo sapiens
ttaaaaatagagaaa

SEQ ID NO: 811797 - DNA, 15 bp, Homo sapiens
taaaaatagagaaat

SEQ ID NO: 811798 - DNA, 15 bp, Homo sapiens
aaaaatagagaaatg

SEQ ID NO: 811799 - DNA, 15 bp, Homo sapiens
aaaatagagaaatga

SEQ ID NO: 811800 - DNA, 15 bp, Homo sapiens
aaatagagaaatgag

SEQ ID NO: 811801 - DNA, 15 bp, Homo sapiens
aatagagaaatgagt

SEQ ID NO: 811802 - DNA, 15 bp, Homo sapiens
atagagaaatgagtg

SEQ ID NO: 811803 - DNA, 15 bp, Homo sapiens
tagagaaatgagtga

SEQ ID NO: 811804 - DNA, 15 bp, Homo sapiens
agagaaatgagtgaa

SEQ ID NO: 811805 - DNA, 15 bp, Homo sapiens
gagaaatgagtgaat

SEQ ID NO: 811806 - DNA, 15 bp, Homo sapiens
agaaatgagtgaatg

SEQ ID NO: 811807 - DNA, 15 bp, Homo sapiens
gaaatgagtgaatgt

SEQ ID NO: 811808 - DNA, 15 bp, Homo sapiens
aaatgagtgaatgtg

SEQ ID NO: 811809 - DNA, 15 bp, Homo sapiens
aatgagtgaatgtgg

SEQ ID NO: 811810 - DNA, 15 bp, Homo sapiens
atgagtgaatgtggg

SEQ ID NO: 811811 - DNA, 15 bp, Homo sapiens
tgagtgaatgtgggt

SEQ ID NO: 811812 - DNA, 15 bp, Homo sapiens
gagtgaatgtgggtg

SEQ ID NO: 811813 - DNA, 15 bp, Homo sapiens
agtgaatgtgggtga

SEQ ID NO: 811814 - DNA, 15 bp, Homo sapiens
gtgaatgtgggtgat

SEQ ID NO: 811815 - DNA, 15 bp, Homo sapiens
tgaatgtgggtgatc

SEQ ID NO: 811816 - DNA, 15 bp, Homo sapiens
gaatgtgggtgatct

SEQ ID NO: 811817 - DNA, 15 bp, Homo sapiens
aatgtgggtgatctg

SEQ ID NO: 811818 - DNA, 15 bp, Homo sapiens
atgtgggtgatctgc

SEQ ID NO: 811819 - DNA, 15 bp, Homo sapiens
tgtgggtgatctgct

SEQ ID NO: 811820 - DNA, 15 bp, Homo sapiens
gtgggtgatctgctt

SEQ ID NO: 811821 - DNA, 15 bp, Homo sapiens
tgggtgatctgcttt

SEQ ID NO: 811822 - DNA, 15 bp, Homo sapiens
gggtgatctgctttt

SEQ ID NO: 811823 - DNA, 15 bp, Homo sapiens
ggtgatctgctttta

SEQ ID NO: 811824 - DNA, 15 bp, Homo sapiens
gtgatctgcttttat

SEQ ID NO: 811825 - DNA, 15 bp, Homo sapiens
tgatctgcttttatc

SEQ ID NO: 811826 - DNA, 15 bp, Homo sapiens
gatctgcttttatct

SEQ ID NO: 811827 - DNA, 15 bp, Homo sapiens
atctgcttttatcta

SEQ ID NO: 811828 - DNA, 15 bp, Homo sapiens
tctgcttttatctaa

SEQ ID NO: 811829 - DNA, 15 bp, Homo sapiens
ctgcttttatctaaa

SEQ ID NO: 811830 - DNA, 15 bp, Homo sapiens
tgcttttatctaaat

SEQ ID NO: 811831 - DNA, 15 bp, Homo sapiens
gcttttatctaaatg

SEQ ID NO: 811832 - DNA, 15 bp, Homo sapiens
cttttatctaaatgc

SEQ ID NO: 811833 - DNA, 15 bp, Homo sapiens
ttttatctaaatgca

SEQ ID NO: 811834 - DNA, 15 bp, Homo sapiens
tttatctaaatgcaa

SEQ ID NO: 811835 - DNA, 15 bp, Homo sapiens
ttatctaaatgcaaa

SEQ ID NO: 811836 - DNA, 15 bp, Homo sapiens
tatctaaatgcaaat

SEQ ID NO: 811837 - DNA, 15 bp, Homo sapiens
atctaaatgcaaata

SEQ ID NO: 811838 - DNA, 15 bp, Homo sapiens
tctaaatgcaaataa

SEQ ID NO: 811839 - DNA, 15 bp, Homo sapiens
ctaaatgcaaataag

SEQ ID NO: 811840 - DNA, 15 bp, Homo sapiens
taaatgcaaataagg

SEQ ID NO: 811841 - DNA, 15 bp, Homo sapiens
aaatgcaaataagga

SEQ ID NO: 811842 - DNA, 15 bp, Homo sapiens
aatgcaaataaggat

SEQ ID NO: 811843 - DNA, 15 bp, Homo sapiens
atgcaaataaggatg

SEQ ID NO: 811844 - DNA, 15 bp, Homo sapiens
tgcaaataaggatgt

SEQ ID NO: 811845 - DNA, 15 bp, Homo sapiens
gcaaataaggatgtg

SEQ ID NO: 811846 - DNA, 15 bp, Homo sapiens
caaataaggatgtgt

SEQ ID NO: 811847 - DNA, 15 bp, Homo sapiens
aaataaggatgtgtt

SEQ ID NO: 811848 - DNA, 15 bp, Homo sapiens
aataaggatgtgttc

SEQ ID NO: 811849 - DNA, 15 bp, Homo sapiens
ataaggatgtgttct

SEQ ID NO: 811850 - DNA, 15 bp, Homo sapiens
taaggatgtgttctc

SEQ ID NO: 811851 - DNA, 15 bp, Homo sapiens
aaggatgtgttctct

SEQ ID NO: 811852 - DNA, 15 bp, Homo sapiens
aggatgtgttctctg

SEQ ID NO: 811853 - DNA, 15 bp, Homo sapiens
ggatgtgttctctga

SEQ ID NO: 811854 - DNA, 15 bp, Homo sapiens
gatgtgttctctgag

SEQ ID NO: 811855 - DNA, 15 bp, Homo sapiens
atgtgttctctgaga

SEQ ID NO: 811856 - DNA, 15 bp, Homo sapiens
tgtgttctctgagac

SEQ ID NO: 811857 - DNA, 15 bp, Homo sapiens
gtgttctctgagacc

SEQ ID NO: 811858 - DNA, 15 bp, Homo sapiens
tgttctctgagaccc

SEQ ID NO: 811859 - DNA, 15 bp, Homo sapiens
gttctctgagaccca

SEQ ID NO: 811860 - DNA, 15 bp, Homo sapiens
ttctctgagacccat

SEQ ID NO: 811861 - DNA, 15 bp, Homo sapiens
tctctgagacccatg

SEQ ID NO: 811862 - DNA, 15 bp, Homo sapiens
ctctgagacccatga

SEQ ID NO: 811863 - DNA, 15 bp, Homo sapiens
tctgagacccatgat

SEQ ID NO: 811864 - DNA, 15 bp, Homo sapiens
ctgagacccatgatc

SEQ ID NO: 811865 - DNA, 15 bp, Homo sapiens
tgagacccatgatca

SEQ ID NO: 811866 - DNA, 15 bp, Homo sapiens
gagacccatgatcag

SEQ ID NO: 811867 - DNA, 15 bp, Homo sapiens
agacccatgatcagg

SEQ ID NO: 811868 - DNA, 15 bp, Homo sapiens
gacccatgatcaggg

SEQ ID NO: 811869 - DNA, 15 bp, Homo sapiens
acccatgatcagggg

SEQ ID NO: 811870 - DNA, 15 bp, Homo sapiens
cccatgatcagggga

SEQ ID NO: 811871 - DNA, 15 bp, Homo sapiens
ccatgatcaggggat

SEQ ID NO: 811872 - DNA, 15 bp, Homo sapiens
catgatcaggggatg

SEQ ID NO: 811873 - DNA, 15 bp, Homo sapiens
atgatcaggggatgt

SEQ ID NO: 811874 - DNA, 15 bp, Homo sapiens
tgatcaggggatgtg

SEQ ID NO: 811875 - DNA, 15 bp, Homo sapiens
gatcaggggatgtgg

SEQ ID NO: 811876 - DNA, 15 bp, Homo sapiens
atcaggggatgtggc

SEQ ID NO: 811877 - DNA, 15 bp, Homo sapiens
tcaggggatgtggcg

SEQ ID NO: 811878 - DNA, 15 bp, Homo sapiens
caggggatgtggcgg

SEQ ID NO: 811879 - DNA, 15 bp, Homo sapiens
aggggatgtggcggg

SEQ ID NO: 811880 - DNA, 15 bp, Homo sapiens
ggggatgtggcgggg

SEQ ID NO: 811881 - DNA, 15 bp, Homo sapiens
gggatgtggcggggg

SEQ ID NO: 811882 - DNA, 15 bp, Homo sapiens
ggatgtggcgggggg

SEQ ID NO: 811883 - DNA, 15 bp, Homo sapiens
gatgtggcggggggt

SEQ ID NO: 811884 - DNA, 15 bp, Homo sapiens
atgtggcggggggtg

SEQ ID NO: 811885 - DNA, 15 bp, Homo sapiens
tgtggcggggggtgg

SEQ ID NO: 811886 - DNA, 15 bp, Homo sapiens
gtggcggggggtggc

SEQ ID NO: 811887 - DNA, 15 bp, Homo sapiens
tggcggggggtggct

SEQ ID NO: 811888 - DNA, 15 bp, Homo sapiens
ggcggggggtggcta

SEQ ID NO: 811889 - DNA, 15 bp, Homo sapiens
gcggggggtggctag

SEQ ID NO: 811890 - DNA, 15 bp, Homo sapiens
cggggggtggctaga

SEQ ID NO: 811891 - DNA, 15 bp, Homo sapiens
ggggggtggctagag

SEQ ID NO: 811892 - DNA, 15 bp, Homo sapiens
gggggtggctagagg

SEQ ID NO: 811893 - DNA, 15 bp, Homo sapiens
ggggtggctagaggg

SEQ ID NO: 811894 - DNA, 15 bp, Homo sapiens
gggtggctagaggga

SEQ ID NO: 811895 - DNA, 15 bp, Homo sapiens
ggtggctagagggag

SEQ ID NO: 811896 - DNA, 15 bp, Homo sapiens
gtggctagagggaga

SEQ ID NO: 811897 - DNA, 15 bp, Homo sapiens
tggctagagggagaa

SEQ ID NO: 811898 - DNA, 15 bp, Homo sapiens
ggctagagggagaaa

SEQ ID NO: 811899 - DNA, 15 bp, Homo sapiens
gctagagggagaaaa

SEQ ID NO: 811900 - DNA, 15 bp, Homo sapiens
ctagagggagaaaaa

SEQ ID NO: 811901 - DNA, 15 bp, Homo sapiens
tagagggagaaaaag

SEQ ID NO: 811902 - DNA, 15 bp, Homo sapiens
agagggagaaaaagg

SEQ ID NO: 811903 - DNA, 15 bp, Homo sapiens
gagggagaaaaagga

SEQ ID NO: 811904 - DNA, 15 bp, Homo sapiens
agggagaaaaaggaa

SEQ ID NO: 811905 - DNA, 15 bp, Homo sapiens
gggagaaaaaggaaa

SEQ ID NO: 811906 - DNA, 15 bp, Homo sapiens
ggagaaaaaggaaat

SEQ ID NO: 811907 - DNA, 15 bp, Homo sapiens
gagaaaaaggaaatg

SEQ ID NO: 811908 - DNA, 15 bp, Homo sapiens
agaaaaaggaaatgt

SEQ ID NO: 811909 - DNA, 15 bp, Homo sapiens
gaaaaaggaaatgtc

SEQ ID NO: 811910 - DNA, 15 bp, Homo sapiens
aaaaaggaaatgtct

SEQ ID NO: 811911 - DNA, 15 bp, Homo sapiens
aaaaggaaatgtctt

SEQ ID NO: 811912 - DNA, 15 bp, Homo sapiens
aaaggaaatgtcttg

SEQ ID NO: 811913 - DNA, 15 bp, Homo sapiens
aaggaaatgtcttgt

SEQ ID NO: 811914 - DNA, 15 bp, Homo sapiens
aggaaatgtcttgtg

SEQ ID NO: 811915 - DNA, 15 bp, Homo sapiens
ggaaatgtcttgtgt

SEQ ID NO: 811916 - DNA, 15 bp, Homo sapiens
gaaatgtcttgtgtt

SEQ ID NO: 811917 - DNA, 15 bp, Homo sapiens
aaatgtcttgtgttg

SEQ ID NO: 811918 - DNA, 15 bp, Homo sapiens
aatgtcttgtgttgt

SEQ ID NO: 811919 - DNA, 15 bp, Homo sapiens
atgtcttgtgttgtt

SEQ ID NO: 811920 - DNA, 15 bp, Homo sapiens
tgtcttgtgttgttt

SEQ ID NO: 811921 - DNA, 15 bp, Homo sapiens
gtcttgtgttgtttt

SEQ ID NO: 811922 - DNA, 15 bp, Homo sapiens
tcttgtgttgttttg

SEQ ID NO: 811923 - DNA, 15 bp, Homo sapiens
cttgtgttgttttgt

SEQ ID NO: 811924 - DNA, 15 bp, Homo sapiens
ttgtgttgttttgtt

SEQ ID NO: 811925 - DNA, 15 bp, Homo sapiens
tgtgttgttttgttc

SEQ ID NO: 811926 - DNA, 15 bp, Homo sapiens
gtgttgttttgttcc

SEQ ID NO: 811927 - DNA, 15 bp, Homo sapiens
tgttgttttgttccc

SEQ ID NO: 811928 - DNA, 15 bp, Homo sapiens
gttgttttgttcccc

SEQ ID NO: 811929 - DNA, 15 bp, Homo sapiens
ttgttttgttcccct

SEQ ID NO: 811930 - DNA, 15 bp, Homo sapiens
tgttttgttcccctg

SEQ ID NO: 811931 - DNA, 15 bp, Homo sapiens
gttttgttcccctgc

SEQ ID NO: 811932 - DNA, 15 bp, Homo sapiens
ttttgttcccctgcc

SEQ ID NO: 811933 - DNA, 15 bp, Homo sapiens
tttgttcccctgccc

SEQ ID NO: 811934 - DNA, 15 bp, Homo sapiens
ttgttcccctgccct

SEQ ID NO: 811935 - DNA, 15 bp, Homo sapiens
tgttcccctgccctc

SEQ ID NO: 811936 - DNA, 15 bp, Homo sapiens
gttcccctgccctcc

SEQ ID NO: 811937 - DNA, 15 bp, Homo sapiens
ttcccctgccctcct

SEQ ID NO: 811938 - DNA, 15 bp, Homo sapiens
tcccctgccctcctt

SEQ ID NO: 811939 - DNA, 15 bp, Homo sapiens
cccctgccctccttt

SEQ ID NO: 811940 - DNA, 15 bp, Homo sapiens
ccctgccctcctttc

SEQ ID NO: 811941 - DNA, 15 bp, Homo sapiens
cctgccctcctttct

SEQ ID NO: 811942 - DNA, 15 bp, Homo sapiens
ctgccctcctttctc

SEQ ID NO: 811943 - DNA, 15 bp, Homo sapiens
tgccctcctttctca

SEQ ID NO: 811944 - DNA, 15 bp, Homo sapiens
gccctcctttctcag

SEQ ID NO: 811945 - DNA, 15 bp, Homo sapiens
ccctcctttctcagc

SEQ ID NO: 811946 - DNA, 15 bp, Homo sapiens
cctcctttctcagca

SEQ ID NO: 811947 - DNA, 15 bp, Homo sapiens
ctcctttctcagcag

SEQ ID NO: 811948 - DNA, 15 bp, Homo sapiens
tcctttctcagcagc

SEQ ID NO: 811949 - DNA, 15 bp, Homo sapiens
cctttctcagcagct

SEQ ID NO: 811950 - DNA, 15 bp, Homo sapiens
ctttctcagcagctt

SEQ ID NO: 811951 - DNA, 15 bp, Homo sapiens
tttctcagcagcttt

SEQ ID NO: 811952 - DNA, 15 bp, Homo sapiens
ttctcagcagctttt

SEQ ID NO: 811953 - DNA, 15 bp, Homo sapiens
tctcagcagcttttt

SEQ ID NO: 811954 - DNA, 15 bp, Homo sapiens
ctcagcagctttttg

SEQ ID NO: 811955 - DNA, 15 bp, Homo sapiens
tcagcagctttttgt

SEQ ID NO: 811956 - DNA, 15 bp, Homo sapiens
cagcagctttttgtt

SEQ ID NO: 811957 - DNA, 15 bp, Homo sapiens
agcagctttttgtta

SEQ ID NO: 811958 - DNA, 15 bp, Homo sapiens
gcagctttttgttat

SEQ ID NO: 811959 - DNA, 15 bp, Homo sapiens
cagctttttgttatt

SEQ ID NO: 811960 - DNA, 15 bp, Homo sapiens
agctttttgttattg

SEQ ID NO: 811961 - DNA, 15 bp, Homo sapiens
gctttttgttattgt

SEQ ID NO: 811962 - DNA, 15 bp, Homo sapiens
ctttttgttattgtt

SEQ ID NO: 811963 - DNA, 15 bp, Homo sapiens
tttttgttattgttg

SEQ ID NO: 811964 - DNA, 15 bp, Homo sapiens
ttttgttattgttgt

SEQ ID NO: 811965 - DNA, 15 bp, Homo sapiens
tttgttattgttgtt

SEQ ID NO: 811966 - DNA, 15 bp, Homo sapiens
ttgttattgttgttg

SEQ ID NO: 811967 - DNA, 15 bp, Homo sapiens
tgttattgttgttgt

SEQ ID NO: 811968 - DNA, 15 bp, Homo sapiens
gttattgttgttgtt

SEQ ID NO: 811969 - DNA, 15 bp, Homo sapiens
ttattgttgttgttg

SEQ ID NO: 811970 - DNA, 15 bp, Homo sapiens
tattgttgttgttgt

SEQ ID NO: 811971 - DNA, 15 bp, Homo sapiens
attgttgttgttgtt

SEQ ID NO: 811972 - DNA, 15 bp, Homo sapiens
ttgttgttgttgttc

SEQ ID NO: 811973 - DNA, 15 bp, Homo sapiens
tgttgttgttgttct

SEQ ID NO: 811974 - DNA, 15 bp, Homo sapiens
gttgttgttgttctt

SEQ ID NO: 811975 - DNA, 15 bp, Homo sapiens
ttgttgttgttctta

SEQ ID NO: 811976 - DNA, 15 bp, Homo sapiens
tgttgttgttcttag

SEQ ID NO: 811977 - DNA, 15 bp, Homo sapiens
gttgttgttcttaga

SEQ ID NO: 811978 - DNA, 15 bp, Homo sapiens
ttgttgttcttagac

SEQ ID NO: 811979 - DNA, 15 bp, Homo sapiens
tgttgttcttagaca

SEQ ID NO: 811980 - DNA, 15 bp, Homo sapiens
gttgttcttagacaa

SEQ ID NO: 811981 - DNA, 15 bp, Homo sapiens
ttgttcttagacaag

SEQ ID NO: 811982 - DNA, 15 bp, Homo sapiens
tgttcttagacaagt

SEQ ID NO: 811983 - DNA, 15 bp, Homo sapiens
gttcttagacaagtg

SEQ ID NO: 811984 - DNA, 15 bp, Homo sapiens
ttcttagacaagtgc

SEQ ID NO: 811985 - DNA, 15 bp, Homo sapiens
tcttagacaagtgcc

SEQ ID NO: 811986 - DNA, 15 bp, Homo sapiens
cttagacaagtgcct

SEQ ID NO: 811987 - DNA, 15 bp, Homo sapiens
ttagacaagtgcctc

SEQ ID NO: 811988 - DNA, 15 bp, Homo sapiens
tagacaagtgcctcc

SEQ ID NO: 811989 - DNA, 15 bp, Homo sapiens
agacaagtgcctcct

SEQ ID NO: 811990 - DNA, 15 bp, Homo sapiens
gacaagtgcctcctg

SEQ ID NO: 811991 - DNA, 15 bp, Homo sapiens
acaagtgcctcctgg

SEQ ID NO: 811992 - DNA, 15 bp, Homo sapiens
caagtgcctcctggt

SEQ ID NO: 811993 - DNA, 15 bp, Homo sapiens
aagtgcctcctggtg

SEQ ID NO: 811994 - DNA, 15 bp, Homo sapiens
agtgcctcctggtgc

SEQ ID NO: 811995 - DNA, 15 bp, Homo sapiens
gtgcctcctggtgcc

SEQ ID NO: 811996 - DNA, 15 bp, Homo sapiens
tgcctcctggtgcct

SEQ ID NO: 811997 - DNA, 15 bp, Homo sapiens
gcctcctggtgcctg

SEQ ID NO: 811998 - DNA, 15 bp, Homo sapiens
cctcctggtgcctgc

SEQ ID NO: 811999 - DNA, 15 bp, Homo sapiens
ctcctggtgcctgcg

SEQ ID NO: 812000 - DNA, 15 bp, Homo sapiens
tcctggtgcctgcgg

SEQ ID NO: 812001 - DNA, 15 bp, Homo sapiens
cctggtgcctgcggc

SEQ ID NO: 812002 - DNA, 15 bp, Homo sapiens
ctggtgcctgcggca

SEQ ID NO: 812003 - DNA, 15 bp, Homo sapiens
tggtgcctgcggcat

SEQ ID NO: 812004 - DNA, 15 bp, Homo sapiens
ggtgcctgcggcatc

SEQ ID NO: 812005 - DNA, 15 bp, Homo sapiens
gtgcctgcggcatcc

SEQ ID NO: 812006 - DNA, 15 bp, Homo sapiens
tgcctgcggcatcct

SEQ ID NO: 812007 - DNA, 15 bp, Homo sapiens
gcctgcggcatcctt

SEQ ID NO: 812008 - DNA, 15 bp, Homo sapiens
cctgcggcatccttc

SEQ ID NO: 812009 - DNA, 15 bp, Homo sapiens
ctgcggcatccttct

SEQ ID NO: 812010 - DNA, 15 bp, Homo sapiens
tgcggcatccttctg

SEQ ID NO: 812011 - DNA, 15 bp, Homo sapiens
gcggcatccttctgc

SEQ ID NO: 812012 - DNA, 15 bp, Homo sapiens
cggcatccttctgcc

SEQ ID NO: 812013 - DNA, 15 bp, Homo sapiens
ggcatccttctgcct

SEQ ID NO: 812014 - DNA, 15 bp, Homo sapiens
gcatccttctgcctg

SEQ ID NO: 812015 - DNA, 15 bp, Homo sapiens
catccttctgcctgt

SEQ ID NO: 812016 - DNA, 15 bp, Homo sapiens
atccttctgcctgtt

SEQ ID NO: 812017 - DNA, 15 bp, Homo sapiens
tccttctgcctgttt

SEQ ID NO: 812018 - DNA, 15 bp, Homo sapiens
ccttctgcctgtttc

SEQ ID NO: 812019 - DNA, 15 bp, Homo sapiens
cttctgcctgtttct

SEQ ID NO: 812020 - DNA, 15 bp, Homo sapiens
ttctgcctgtttctg

SEQ ID NO: 812021 - DNA, 15 bp, Homo sapiens
tctgcctgtttctgt

SEQ ID NO: 812022 - DNA, 15 bp, Homo sapiens
ctgcctgtttctgta

SEQ ID NO: 812023 - DNA, 15 bp, Homo sapiens
tgcctgtttctgtaa

SEQ ID NO: 812024 - DNA, 15 bp, Homo sapiens
gcctgtttctgtaag

SEQ ID NO: 812025 - DNA, 15 bp, Homo sapiens
cctgtttctgtaagc

SEQ ID NO: 812026 - DNA, 15 bp, Homo sapiens
ctgtttctgtaagca

SEQ ID NO: 812027 - DNA, 15 bp, Homo sapiens
tgtttctgtaagcaa

SEQ ID NO: 812028 - DNA, 15 bp, Homo sapiens
gtttctgtaagcaaa

SEQ ID NO: 812029 - DNA, 15 bp, Homo sapiens
tttctgtaagcaaat

SEQ ID NO: 812030 - DNA, 15 bp, Homo sapiens
ttctgtaagcaaatg

SEQ ID NO: 812031 - DNA, 15 bp, Homo sapiens
tctgtaagcaaatgc

SEQ ID NO: 812032 - DNA, 15 bp, Homo sapiens
ctgtaagcaaatgcc

SEQ ID NO: 812033 - DNA, 15 bp, Homo sapiens
tgtaagcaaatgcca

SEQ ID NO: 812034 - DNA, 15 bp, Homo sapiens
gtaagcaaatgccac

SEQ ID NO: 812035 - DNA, 15 bp, Homo sapiens
taagcaaatgccaca

SEQ ID NO: 812036 - DNA, 15 bp, Homo sapiens
aagcaaatgccacag

SEQ ID NO: 812037 - DNA, 15 bp, Homo sapiens
agcaaatgccacagg

SEQ ID NO: 812038 - DNA, 15 bp, Homo sapiens
gcaaatgccacaggc

SEQ ID NO: 812039 - DNA, 15 bp, Homo sapiens
caaatgccacaggcc

SEQ ID NO: 812040 - DNA, 15 bp, Homo sapiens
aaatgccacaggcca

SEQ ID NO: 812041 - DNA, 15 bp, Homo sapiens
aatgccacaggccac

SEQ ID NO: 812042 - DNA, 15 bp, Homo sapiens
atgccacaggccacc

SEQ ID NO: 812043 - DNA, 15 bp, Homo sapiens
tgccacaggccacct

SEQ ID NO: 812044 - DNA, 15 bp, Homo sapiens
gccacaggccaccta

SEQ ID NO: 812045 - DNA, 15 bp, Homo sapiens
ccacaggccacctat

SEQ ID NO: 812046 - DNA, 15 bp, Homo sapiens
cacaggccacctata

SEQ ID NO: 812047 - DNA, 15 bp, Homo sapiens
acaggccacctatag

SEQ ID NO: 812048 - DNA, 15 bp, Homo sapiens
caggccacctatagc

SEQ ID NO: 812049 - DNA, 15 bp, Homo sapiens
aggccacctatagct

SEQ ID NO: 812050 - DNA, 15 bp, Homo sapiens
ggccacctatagcta

SEQ ID NO: 812051 - DNA, 15 bp, Homo sapiens
gccacctatagctac

SEQ ID NO: 812052 - DNA, 15 bp, Homo sapiens
ccacctatagctaca

SEQ ID NO: 812053 - DNA, 15 bp, Homo sapiens
cacctatagctacat

SEQ ID NO: 812054 - DNA, 15 bp, Homo sapiens
acctatagctacata

SEQ ID NO: 812055 - DNA, 15 bp, Homo sapiens
cctatagctacatac

SEQ ID NO: 812056 - DNA, 15 bp, Homo sapiens
ctatagctacatact

SEQ ID NO: 812057 - DNA, 15 bp, Homo sapiens
tatagctacatactc

SEQ ID NO: 812058 - DNA, 15 bp, Homo sapiens
atagctacatactcc

SEQ ID NO: 812059 - DNA, 15 bp, Homo sapiens
tagctacatactcct

SEQ ID NO: 812060 - DNA, 15 bp, Homo sapiens
agctacatactcctg

SEQ ID NO: 812061 - DNA, 15 bp, Homo sapiens
gctacatactcctgg

SEQ ID NO: 812062 - DNA, 15 bp, Homo sapiens
ctacatactcctggc

SEQ ID NO: 812063 - DNA, 15 bp, Homo sapiens
tacatactcctggca

SEQ ID NO: 812064 - DNA, 15 bp, Homo sapiens
acatactcctggcat

SEQ ID NO: 812065 - DNA, 15 bp, Homo sapiens
catactcctggcatt

SEQ ID NO: 812066 - DNA, 15 bp, Homo sapiens
atactcctggcattg

SEQ ID NO: 812067 - DNA, 15 bp, Homo sapiens
tactcctggcattgc

SEQ ID NO: 812068 - DNA, 15 bp, Homo sapiens
actcctggcattgca

SEQ ID NO: 812069 - DNA, 15 bp, Homo sapiens
ctcctggcattgcac

SEQ ID NO: 812070 - DNA, 15 bp, Homo sapiens
tcctggcattgcact

SEQ ID NO: 812071 - DNA, 15 bp, Homo sapiens
cctggcattgcactt

SEQ ID NO: 812072 - DNA, 15 bp, Homo sapiens
ctggcattgcacttt

SEQ ID NO: 812073 - DNA, 15 bp, Homo sapiens
tggcattgcactttt

SEQ ID NO: 812074 - DNA, 15 bp, Homo sapiens
ggcattgcacttttt

SEQ ID NO: 812075 - DNA, 15 bp, Homo sapiens
gcattgcacttttta

SEQ ID NO: 812076 - DNA, 15 bp, Homo sapiens
cattgcactttttaa

SEQ ID NO: 812077 - DNA, 15 bp, Homo sapiens
attgcactttttaac

SEQ ID NO: 812078 - DNA, 15 bp, Homo sapiens
ttgcactttttaacc

SEQ ID NO: 812079 - DNA, 15 bp, Homo sapiens
tgcactttttaacct

SEQ ID NO: 812080 - DNA, 15 bp, Homo sapiens
gcactttttaacctt

SEQ ID NO: 812081 - DNA, 15 bp, Homo sapiens
cactttttaaccttg

SEQ ID NO: 812082 - DNA, 15 bp, Homo sapiens
actttttaaccttgc

SEQ ID NO: 812083 - DNA, 15 bp, Homo sapiens
ctttttaaccttgct

SEQ ID NO: 812084 - DNA, 15 bp, Homo sapiens
tttttaaccttgctg

SEQ ID NO: 812085 - DNA, 15 bp, Homo sapiens
ttttaaccttgctga

SEQ ID NO: 812086 - DNA, 15 bp, Homo sapiens
tttaaccttgctgac

SEQ ID NO: 812087 - DNA, 15 bp, Homo sapiens
ttaaccttgctgaca

SEQ ID NO: 812088 - DNA, 15 bp, Homo sapiens
taaccttgctgacat

SEQ ID NO: 812089 - DNA, 15 bp, Homo sapiens
aaccttgctgacatc

SEQ ID NO: 812090 - DNA, 15 bp, Homo sapiens
accttgctgacatcc

SEQ ID NO: 812091 - DNA, 15 bp, Homo sapiens
ccttgctgacatcca

SEQ ID NO: 812092 - DNA, 15 bp, Homo sapiens
cttgctgacatccaa

SEQ ID NO: 812093 - DNA, 15 bp, Homo sapiens
ttgctgacatccaaa

SEQ ID NO: 812094 - DNA, 15 bp, Homo sapiens
tgctgacatccaaat

SEQ ID NO: 812095 - DNA, 15 bp, Homo sapiens
gctgacatccaaata

SEQ ID NO: 812096 - DNA, 15 bp, Homo sapiens
ctgacatccaaatag

SEQ ID NO: 812097 - DNA, 15 bp, Homo sapiens
tgacatccaaataga

SEQ ID NO: 812098 - DNA, 15 bp, Homo sapiens
gacatccaaatagaa

SEQ ID NO: 812099 - DNA, 15 bp, Homo sapiens
acatccaaatagaag

SEQ ID NO: 812100 - DNA, 15 bp, Homo sapiens
catccaaatagaaga

SEQ ID NO: 812101 - DNA, 15 bp, Homo sapiens
atccaaatagaagat

SEQ ID NO: 812102 - DNA, 15 bp, Homo sapiens
tccaaatagaagata

SEQ ID NO: 812103 - DNA, 15 bp, Homo sapiens
ccaaatagaagatag

SEQ ID NO: 812104 - DNA, 15 bp, Homo sapiens
caaatagaagatagg

SEQ ID NO: 812105 - DNA, 15 bp, Homo sapiens
aaatagaagatagga

SEQ ID NO: 812106 - DNA, 15 bp, Homo sapiens
aatagaagataggac

SEQ ID NO: 812107 - DNA, 15 bp, Homo sapiens
atagaagataggact

SEQ ID NO: 812108 - DNA, 15 bp, Homo sapiens
tagaagataggacta

SEQ ID NO: 812109 - DNA, 15 bp, Homo sapiens
agaagataggactat

SEQ ID NO: 812110 - DNA, 15 bp, Homo sapiens
gaagataggactatc

SEQ ID NO: 812111 - DNA, 15 bp, Homo sapiens
aagataggactatct

SEQ ID NO: 812112 - DNA, 15 bp, Homo sapiens
agataggactatcta

SEQ ID NO: 812113 - DNA, 15 bp, Homo sapiens
gataggactatctaa

SEQ ID NO: 812114 - DNA, 15 bp, Homo sapiens
ataggactatctaag

SEQ ID NO: 812115 - DNA, 15 bp, Homo sapiens
taggactatctaagc

SEQ ID NO: 812116 - DNA, 15 bp, Homo sapiens
aggactatctaagcc

SEQ ID NO: 812117 - DNA, 15 bp, Homo sapiens
ggactatctaagccc

SEQ ID NO: 812118 - DNA, 15 bp, Homo sapiens
gactatctaagccct

SEQ ID NO: 812119 - DNA, 15 bp, Homo sapiens
actatctaagcccta

SEQ ID NO: 812120 - DNA, 15 bp, Homo sapiens
ctatctaagccctag

SEQ ID NO: 812121 - DNA, 15 bp, Homo sapiens
tatctaagccctagg

SEQ ID NO: 812122 - DNA, 15 bp, Homo sapiens
atctaagccctaggt

SEQ ID NO: 812123 - DNA, 15 bp, Homo sapiens
tctaagccctaggtt

SEQ ID NO: 812124 - DNA, 15 bp, Homo sapiens
ctaagccctaggttt

SEQ ID NO: 812125 - DNA, 15 bp, Homo sapiens
taagccctaggtttc

SEQ ID NO: 812126 - DNA, 15 bp, Homo sapiens
aagccctaggtttct

SEQ ID NO: 812127 - DNA, 15 bp, Homo sapiens
agccctaggtttctt

SEQ ID NO: 812128 - DNA, 15 bp, Homo sapiens
gccctaggtttcttt

SEQ ID NO: 812129 - DNA, 15 bp, Homo sapiens
ccctaggtttctttt

SEQ ID NO: 812130 - DNA, 15 bp, Homo sapiens
cctaggtttcttttt

SEQ ID NO: 812131 - DNA, 15 bp, Homo sapiens
ctaggtttcttttta

SEQ ID NO: 812132 - DNA, 15 bp, Homo sapiens
taggtttctttttaa

SEQ ID NO: 812133 - DNA, 15 bp, Homo sapiens
aggtttctttttaaa

SEQ ID NO: 812134 - DNA, 15 bp, Homo sapiens
ggtttctttttaaat

SEQ ID NO: 812135 - DNA, 15 bp, Homo sapiens
gtttctttttaaatt

SEQ ID NO: 812136 - DNA, 15 bp, Homo sapiens
tttctttttaaatta

SEQ ID NO: 812137 - DNA, 15 bp, Homo sapiens
ttctttttaaattaa

SEQ ID NO: 812138 - DNA, 15 bp, Homo sapiens
tctttttaaattaag

SEQ ID NO: 812139 - DNA, 15 bp, Homo sapiens
ctttttaaattaaga

SEQ ID NO: 812140 - DNA, 15 bp, Homo sapiens
tttttaaattaagaa

SEQ ID NO: 812141 - DNA, 15 bp, Homo sapiens
ttttaaattaagaaa

SEQ ID NO: 812142 - DNA, 15 bp, Homo sapiens
tttaaattaagaaat

SEQ ID NO: 812143 - DNA, 15 bp, Homo sapiens
ttaaattaagaaata

SEQ ID NO: 812144 - DNA, 15 bp, Homo sapiens
taaattaagaaataa

SEQ ID NO: 812145 - DNA, 15 bp, Homo sapiens
aaattaagaaataat

SEQ ID NO: 812146 - DNA, 15 bp, Homo sapiens
aattaagaaataata

SEQ ID NO: 812147 - DNA, 15 bp, Homo sapiens
attaagaaataataa

SEQ ID NO: 812148 - DNA, 15 bp, Homo sapiens
ttaagaaataataac

SEQ ID NO: 812149 - DNA, 15 bp, Homo sapiens
taagaaataataaca

SEQ ID NO: 812150 - DNA, 15 bp, Homo sapiens
aagaaataataacaa

SEQ ID NO: 812151 - DNA, 15 bp, Homo sapiens
agaaataataacaat

SEQ ID NO: 812152 - DNA, 15 bp, Homo sapiens
gaaataataacaatt

SEQ ID NO: 812153 - DNA, 15 bp, Homo sapiens
aaataataacaatta

SEQ ID NO: 812154 - DNA, 15 bp, Homo sapiens
aataataacaattaa

SEQ ID NO: 812155 - DNA, 15 bp, Homo sapiens
ataataacaattaaa

SEQ ID NO: 812156 - DNA, 15 bp, Homo sapiens
taataacaattaaag

SEQ ID NO: 812157 - DNA, 15 bp, Homo sapiens
aataacaattaaagg

SEQ ID NO: 812158 - DNA, 15 bp, Homo sapiens
ataacaattaaaggg

SEQ ID NO: 812159 - DNA, 15 bp, Homo sapiens
taacaattaaagggc

SEQ ID NO: 812160 - DNA, 15 bp, Homo sapiens
aacaattaaagggca

SEQ ID NO: 812161 - DNA, 15 bp, Homo sapiens
acaattaaagggcaa

SEQ ID NO: 812162 - DNA, 15 bp, Homo sapiens
caattaaagggcaaa

SEQ ID NO: 812163 - DNA, 15 bp, Homo sapiens
aattaaagggcaaaa

SEQ ID NO: 812164 - DNA, 15 bp, Homo sapiens
attaaagggcaaaaa

SEQ ID NO: 812165 - DNA, 15 bp, Homo sapiens
ttaaagggcaaaaaa

SEQ ID NO: 812166 - DNA, 15 bp, Homo sapiens
taaagggcaaaaaac

SEQ ID NO: 812167 - DNA, 15 bp, Homo sapiens
aaagggcaaaaaaca

SEQ ID NO: 812168 - DNA, 15 bp, Homo sapiens
aagggcaaaaaacac

SEQ ID NO: 812169 - DNA, 15 bp, Homo sapiens
agggcaaaaaacact

SEQ ID NO: 812170 - DNA, 15 bp, Homo sapiens
gggcaaaaaacactg

SEQ ID NO: 812171 - DNA, 15 bp, Homo sapiens
ggcaaaaaacactgt

SEQ ID NO: 812172 - DNA, 15 bp, Homo sapiens
gcaaaaaacactgta

SEQ ID NO: 812173 - DNA, 15 bp, Homo sapiens
caaaaaacactgtat

SEQ ID NO: 812174 - DNA, 15 bp, Homo sapiens
aaaaaacactgtatc

SEQ ID NO: 812175 - DNA, 15 bp, Homo sapiens
aaaaacactgtatca

SEQ ID NO: 812176 - DNA, 15 bp, Homo sapiens
aaaacactgtatcag

SEQ ID NO: 812177 - DNA, 15 bp, Homo sapiens
aaacactgtatcagc

SEQ ID NO: 812178 - DNA, 15 bp, Homo sapiens
aacactgtatcagca

SEQ ID NO: 812179 - DNA, 15 bp, Homo sapiens
acactgtatcagcat

SEQ ID NO: 812180 - DNA, 15 bp, Homo sapiens
cactgtatcagcata

SEQ ID NO: 812181 - DNA, 15 bp, Homo sapiens
actgtatcagcatag

SEQ ID NO: 812182 - DNA, 15 bp, Homo sapiens
ctgtatcagcatagc

SEQ ID NO: 812183 - DNA, 15 bp, Homo sapiens
tgtatcagcatagcc

SEQ ID NO: 812184 - DNA, 15 bp, Homo sapiens
gtatcagcatagcct

SEQ ID NO: 812185 - DNA, 15 bp, Homo sapiens
tatcagcatagcctt

SEQ ID NO: 812186 - DNA, 15 bp, Homo sapiens
atcagcatagccttt

SEQ ID NO: 812187 - DNA, 15 bp, Homo sapiens
tcagcatagcctttc

SEQ ID NO: 812188 - DNA, 15 bp, Homo sapiens
cagcatagcctttct

SEQ ID NO: 812189 - DNA, 15 bp, Homo sapiens
agcatagcctttctg

SEQ ID NO: 812190 - DNA, 15 bp, Homo sapiens
gcatagcctttctgt

SEQ ID NO: 812191 - DNA, 15 bp, Homo sapiens
catagcctttctgta

SEQ ID NO: 812192 - DNA, 15 bp, Homo sapiens
atagcctttctgtat

SEQ ID NO: 812193 - DNA, 15 bp, Homo sapiens
tagcctttctgtatt

SEQ ID NO: 812194 - DNA, 15 bp, Homo sapiens
agcctttctgtattt

SEQ ID NO: 812195 - DNA, 15 bp, Homo sapiens
gcctttctgtattta

SEQ ID NO: 812196 - DNA, 15 bp, Homo sapiens
cctttctgtatttaa

SEQ ID NO: 812197 - DNA, 15 bp, Homo sapiens
ctttctgtatttaag

SEQ ID NO: 812198 - DNA, 15 bp, Homo sapiens
tttctgtatttaaga

SEQ ID NO: 812199 - DNA, 15 bp, Homo sapiens
ttctgtatttaagaa

SEQ ID NO: 812200 - DNA, 15 bp, Homo sapiens
tctgtatttaagaaa

SEQ ID NO: 812201 - DNA, 15 bp, Homo sapiens
ctgtatttaagaaac

SEQ ID NO: 812202 - DNA, 15 bp, Homo sapiens
tgtatttaagaaact

SEQ ID NO: 812203 - DNA, 15 bp, Homo sapiens
gtatttaagaaactt

SEQ ID NO: 812204 - DNA, 15 bp, Homo sapiens
tatttaagaaactta

SEQ ID NO: 812205 - DNA, 15 bp, Homo sapiens
atttaagaaacttaa

SEQ ID NO: 812206 - DNA, 15 bp, Homo sapiens
tttaagaaacttaag

SEQ ID NO: 812207 - DNA, 15 bp, Homo sapiens
ttaagaaacttaagc

SEQ ID NO: 812208 - DNA, 15 bp, Homo sapiens
taagaaacttaagca

SEQ ID NO: 812209 - DNA, 15 bp, Homo sapiens
aagaaacttaagcag

SEQ ID NO: 812210 - DNA, 15 bp, Homo sapiens
agaaacttaagcagc

SEQ ID NO: 812211 - DNA, 15 bp, Homo sapiens
gaaacttaagcagcc

SEQ ID NO: 812212 - DNA, 15 bp, Homo sapiens
aaacttaagcagccg

SEQ ID NO: 812213 - DNA, 15 bp, Homo sapiens
aacttaagcagccgg

SEQ ID NO: 812214 - DNA, 15 bp, Homo sapiens
acttaagcagccggg

SEQ ID NO: 812215 - DNA, 15 bp, Homo sapiens
cttaagcagccgggc

SEQ ID NO: 812216 - DNA, 15 bp, Homo sapiens
ttaagcagccgggca

SEQ ID NO: 812217 - DNA, 15 bp, Homo sapiens
taagcagccgggcat

SEQ ID NO: 812218 - DNA, 15 bp, Homo sapiens
aagcagccgggcatg

SEQ ID NO: 812219 - DNA, 15 bp, Homo sapiens
agcagccgggcatgg

SEQ ID NO: 812220 - DNA, 15 bp, Homo sapiens
gcagccgggcatggt

SEQ ID NO: 812221 - DNA, 15 bp, Homo sapiens
cagccgggcatggtg

SEQ ID NO: 812222 - DNA, 15 bp, Homo sapiens
agccgggcatggtgg

SEQ ID NO: 812223 - DNA, 15 bp, Homo sapiens
gccgggcatggtggc

SEQ ID NO: 812224 - DNA, 15 bp, Homo sapiens
ccgggcatggtggct

SEQ ID NO: 812225 - DNA, 15 bp, Homo sapiens
ggaggccgaggcgga

SEQ ID NO: 812226 - DNA, 15 bp, Homo sapiens
gaggccgaggcggat

SEQ ID NO: 812227 - DNA, 15 bp, Homo sapiens
aggccgaggcggatc

SEQ ID NO: 812228 - DNA, 15 bp, Homo sapiens
ggccgaggcggatca

SEQ ID NO: 812229 - DNA, 15 bp, Homo sapiens
gccgaggcggatcat

SEQ ID NO: 812230 - DNA, 15 bp, Homo sapiens
ccgaggcggatcata

SEQ ID NO: 812231 - DNA, 15 bp, Homo sapiens
cgaggcggatcataa

SEQ ID NO: 812232 - DNA, 15 bp, Homo sapiens
gaggcggatcataag

SEQ ID NO: 812233 - DNA, 15 bp, Homo sapiens
aggcggatcataagg

SEQ ID NO: 812234 - DNA, 15 bp, Homo sapiens
ggcggatcataaggt

SEQ ID NO: 812235 - DNA, 15 bp, Homo sapiens
gcggatcataaggtc

SEQ ID NO: 812236 - DNA, 15 bp, Homo sapiens
cggatcataaggtca

SEQ ID NO: 812237 - DNA, 15 bp, Homo sapiens
ggatcataaggtcag

SEQ ID NO: 812238 - DNA, 15 bp, Homo sapiens
gatcataaggtcagg

SEQ ID NO: 812239 - DNA, 15 bp, Homo sapiens
atcataaggtcagga

SEQ ID NO: 812240 - DNA, 15 bp, Homo sapiens
tcataaggtcaggag

SEQ ID NO: 812241 - DNA, 15 bp, Homo sapiens
cataaggtcaggaga

SEQ ID NO: 812242 - DNA, 15 bp, Homo sapiens
ataaggtcaggagat

SEQ ID NO: 812243 - DNA, 15 bp, Homo sapiens
taaggtcaggagatc

SEQ ID NO: 812244 - DNA, 15 bp, Homo sapiens
aaggtcaggagatca

SEQ ID NO: 812245 - DNA, 15 bp, Homo sapiens
aggtcaggagatcaa

SEQ ID NO: 812246 - DNA, 15 bp, Homo sapiens
ggtcaggagatcaag

SEQ ID NO: 812247 - DNA, 15 bp, Homo sapiens
gtcaggagatcaaga

SEQ ID NO: 812248 - DNA, 15 bp, Homo sapiens
tcaggagatcaagac

SEQ ID NO: 812249 - DNA, 15 bp, Homo sapiens
caggagatcaagacc

SEQ ID NO: 812250 - DNA, 15 bp, Homo sapiens
aggagatcaagacca

SEQ ID NO: 812251 - DNA, 15 bp, Homo sapiens
ggagatcaagaccat

SEQ ID NO: 812252 - DNA, 15 bp, Homo sapiens
gagatcaagaccatc

SEQ ID NO: 812253 - DNA, 15 bp, Homo sapiens
agatcaagaccatcc

SEQ ID NO: 812254 - DNA, 15 bp, Homo sapiens
gatcaagaccatcct

SEQ ID NO: 812255 - DNA, 15 bp, Homo sapiens
atcaagaccatcctg

SEQ ID NO: 812256 - DNA, 15 bp, Homo sapiens
tcaagaccatcctgg

SEQ ID NO: 812257 - DNA, 15 bp, Homo sapiens
caagaccatcctggc

SEQ ID NO: 812258 - DNA, 15 bp, Homo sapiens
aagaccatcctggct

SEQ ID NO: 812259 - DNA, 15 bp, Homo sapiens
cgtctctactaaaag

SEQ ID NO: 812260 - DNA, 15 bp, Homo sapiens
gtctctactaaaagt

SEQ ID NO: 812261 - DNA, 15 bp, Homo sapiens
tctctactaaaagta

SEQ ID NO: 812262 - DNA, 15 bp, Homo sapiens
ctctactaaaagtac

SEQ ID NO: 812263 - DNA, 15 bp, Homo sapiens
tctactaaaagtaca

SEQ ID NO: 812264 - DNA, 15 bp, Homo sapiens
ctactaaaagtacaa

SEQ ID NO: 812265 - DNA, 15 bp, Homo sapiens
tactaaaagtacaaa

SEQ ID NO: 812266 - DNA, 15 bp, Homo sapiens
actaaaagtacaaaa

SEQ ID NO: 812267 - DNA, 15 bp, Homo sapiens
ctaaaagtacaaaaa

SEQ ID NO: 812268 - DNA, 15 bp, Homo sapiens
taaaagtacaaaaaa

SEQ ID NO: 812269 - DNA, 15 bp, Homo sapiens
aaaagtacaaaaaat

SEQ ID NO: 812270 - DNA, 15 bp, Homo sapiens
aaagtacaaaaaatt

SEQ ID NO: 812271 - DNA, 15 bp, Homo sapiens
aagtacaaaaaatta

SEQ ID NO: 812272 - DNA, 15 bp, Homo sapiens
agtacaaaaaattag

SEQ ID NO: 812273 - DNA, 15 bp, Homo sapiens
gtacaaaaaattagc

SEQ ID NO: 812274 - DNA, 15 bp, Homo sapiens
caaaaaattagctgg

SEQ ID NO: 812275 - DNA, 15 bp, Homo sapiens
tgggtgtggtggtgg

SEQ ID NO: 812276 - DNA, 15 bp, Homo sapiens
gggtgtggtggtggg

SEQ ID NO: 812277 - DNA, 15 bp, Homo sapiens
ggtgtggtggtgggc

SEQ ID NO: 812278 - DNA, 15 bp, Homo sapiens
gtgtggtggtgggcg

SEQ ID NO: 812279 - DNA, 15 bp, Homo sapiens
tgtggtggtgggcgc

SEQ ID NO: 812280 - DNA, 15 bp, Homo sapiens
gtggtggtgggcgcc

SEQ ID NO: 812281 - DNA, 15 bp, Homo sapiens
tggtggtgggcgcct

SEQ ID NO: 812282 - DNA, 15 bp, Homo sapiens
ggtggtgggcgcctg

SEQ ID NO: 812283 - DNA, 15 bp, Homo sapiens
gtggtgggcgcctgt

SEQ ID NO: 812284 - DNA, 15 bp, Homo sapiens
tggtgggcgcctgta

SEQ ID NO: 812285 - DNA, 15 bp, Homo sapiens
ggtgggcgcctgtag

SEQ ID NO: 812286 - DNA, 15 bp, Homo sapiens
gtgggcgcctgtagt

SEQ ID NO: 812287 - DNA, 15 bp, Homo sapiens
tgggcgcctgtagtc

SEQ ID NO: 812288 - DNA, 15 bp, Homo sapiens
gggcgcctgtagtcc

SEQ ID NO: 812289 - DNA, 15 bp, Homo sapiens
ggcgcctgtagtccc

SEQ ID NO: 812290 - DNA, 15 bp, Homo sapiens
ttgaacctgagaggc

SEQ ID NO: 812291 - DNA, 15 bp, Homo sapiens
tgaacctgagaggcg

SEQ ID NO: 812292 - DNA, 15 bp, Homo sapiens
gaacctgagaggcgg

SEQ ID NO: 812293 - DNA, 15 bp, Homo sapiens
aacctgagaggcgga

SEQ ID NO: 812294 - DNA, 15 bp, Homo sapiens
acctgagaggcggag

SEQ ID NO: 812295 - DNA, 15 bp, Homo sapiens
cctgagaggcggagg

SEQ ID NO: 812296 - DNA, 15 bp, Homo sapiens
ctgagaggcggaggt

SEQ ID NO: 812297 - DNA, 15 bp, Homo sapiens
tgagaggcggaggtt

SEQ ID NO: 812298 - DNA, 15 bp, Homo sapiens
gagaggcggaggttg

SEQ ID NO: 812299 - DNA, 15 bp, Homo sapiens
agaggcggaggttgc

SEQ ID NO: 812300 - DNA, 15 bp, Homo sapiens
ttgcagtgagccaaa

SEQ ID NO: 812301 - DNA, 15 bp, Homo sapiens
tgcagtgagccaaaa

SEQ ID NO: 812302 - DNA, 15 bp, Homo sapiens
gcagtgagccaaaat

SEQ ID NO: 812303 - DNA, 15 bp, Homo sapiens
cagtgagccaaaatt

SEQ ID NO: 812304 - DNA, 15 bp, Homo sapiens
agtgagccaaaattg

SEQ ID NO: 812305 - DNA, 15 bp, Homo sapiens
gtgagccaaaattgc

SEQ ID NO: 812306 - DNA, 15 bp, Homo sapiens
tgagccaaaattgca

SEQ ID NO: 812307 - DNA, 15 bp, Homo sapiens
gagccaaaattgcac

SEQ ID NO: 812308 - DNA, 15 bp, Homo sapiens
agccaaaattgcacc

SEQ ID NO: 812309 - DNA, 15 bp, Homo sapiens
gccaaaattgcacca

SEQ ID NO: 812310 - DNA, 15 bp, Homo sapiens
ccaaaattgcaccac

SEQ ID NO: 812311 - DNA, 15 bp, Homo sapiens
caaaattgcaccact

SEQ ID NO: 812312 - DNA, 15 bp, Homo sapiens
aaaattgcaccactg

SEQ ID NO: 812313 - DNA, 15 bp, Homo sapiens
aaattgcaccactgc

SEQ ID NO: 812314 - DNA, 15 bp, Homo sapiens
aattgcaccactgca

SEQ ID NO: 812315 - DNA, 15 bp, Homo sapiens
ttgcaccactgcaca

SEQ ID NO: 812316 - DNA, 15 bp, Homo sapiens
tgcaccactgcacac

SEQ ID NO: 812317 - DNA, 15 bp, Homo sapiens
gcaccactgcacact

SEQ ID NO: 812318 - DNA, 15 bp, Homo sapiens
caccactgcacactg

SEQ ID NO: 812319 - DNA, 15 bp, Homo sapiens
accactgcacactgc

SEQ ID NO: 812320 - DNA, 15 bp, Homo sapiens
ccactgcacactgca

SEQ ID NO: 812321 - DNA, 15 bp, Homo sapiens
cactgcacactgcac

SEQ ID NO: 812322 - DNA, 15 bp, Homo sapiens
actgcacactgcact

SEQ ID NO: 812323 - DNA, 15 bp, Homo sapiens
ctgcacactgcactc

SEQ ID NO: 812324 - DNA, 15 bp, Homo sapiens
tgcacactgcactcc

SEQ ID NO: 812325 - DNA, 15 bp, Homo sapiens
gcacactgcactcca

SEQ ID NO: 812326 - DNA, 15 bp, Homo sapiens
cacactgcactccat

SEQ ID NO: 812327 - DNA, 15 bp, Homo sapiens
acactgcactccatc

SEQ ID NO: 812328 - DNA, 15 bp, Homo sapiens
actccatcctgggcg

SEQ ID NO: 812329 - DNA, 15 bp, Homo sapiens
ctccatcctgggcga

SEQ ID NO: 812330 - DNA, 15 bp, Homo sapiens
tccatcctgggcgac

SEQ ID NO: 812331 - DNA, 15 bp, Homo sapiens
ccatcctgggcgaca

SEQ ID NO: 812332 - DNA, 15 bp, Homo sapiens
catcctgggcgacag

SEQ ID NO: 812333 - DNA, 15 bp, Homo sapiens
atcctgggcgacagt

SEQ ID NO: 812334 - DNA, 15 bp, Homo sapiens
tcctgggcgacagtc

SEQ ID NO: 812335 - DNA, 15 bp, Homo sapiens
cctgggcgacagtct

SEQ ID NO: 812336 - DNA, 15 bp, Homo sapiens
ctgggcgacagtctg

SEQ ID NO: 812337 - DNA, 15 bp, Homo sapiens
tgggcgacagtctga

SEQ ID NO: 812338 - DNA, 15 bp, Homo sapiens
gggcgacagtctgag

SEQ ID NO: 812339 - DNA, 15 bp, Homo sapiens
ggcgacagtctgaga

SEQ ID NO: 812340 - DNA, 15 bp, Homo sapiens
gcgacagtctgagac

SEQ ID NO: 812341 - DNA, 15 bp, Homo sapiens
cgacagtctgagact

SEQ ID NO: 812342 - DNA, 15 bp, Homo sapiens
gacagtctgagactc

SEQ ID NO: 812343 - DNA, 15 bp, Homo sapiens
acagtctgagactct

SEQ ID NO: 812344 - DNA, 15 bp, Homo sapiens
cagtctgagactctg

SEQ ID NO: 812345 - DNA, 15 bp, Homo sapiens
agtctgagactctgt

SEQ ID NO: 812346 - DNA, 15 bp, Homo sapiens
gtctgagactctgtc

SEQ ID NO: 812347 - DNA, 15 bp, Homo sapiens
tctgagactctgtct

SEQ ID NO: 812348 - DNA, 15 bp, Homo sapiens
ctgagactctgtctc

SEQ ID NO: 812349 - DNA, 15 bp, Homo sapiens
aaaaaaaaaagaaac

SEQ ID NO: 812350 - DNA, 15 bp, Homo sapiens
aaaaaaaaagaaact

SEQ ID NO: 812351 - DNA, 15 bp, Homo sapiens
aaaaaaaagaaactt

SEQ ID NO: 812352 - DNA, 15 bp, Homo sapiens
aaaaaaagaaacttc

SEQ ID NO: 812353 - DNA, 15 bp, Homo sapiens
aaaaaagaaacttca

SEQ ID NO: 812354 - DNA, 15 bp, Homo sapiens
aaaaagaaacttcag

SEQ ID NO: 812355 - DNA, 15 bp, Homo sapiens
aaaagaaacttcagt

SEQ ID NO: 812356 - DNA, 15 bp, Homo sapiens
aaagaaacttcagtt

SEQ ID NO: 812357 - DNA, 15 bp, Homo sapiens
aagaaacttcagtta

SEQ ID NO: 812358 - DNA, 15 bp, Homo sapiens
agaaacttcagttaa

SEQ ID NO: 812359 - DNA, 15 bp, Homo sapiens
gaaacttcagttaac

SEQ ID NO: 812360 - DNA, 15 bp, Homo sapiens
aaacttcagttaaca

SEQ ID NO: 812361 - DNA, 15 bp, Homo sapiens
aacttcagttaacag

SEQ ID NO: 812362 - DNA, 15 bp, Homo sapiens
acttcagttaacagc

SEQ ID NO: 812363 - DNA, 15 bp, Homo sapiens
cttcagttaacagcc

SEQ ID NO: 812364 - DNA, 15 bp, Homo sapiens
ttcagttaacagcct

SEQ ID NO: 812365 - DNA, 15 bp, Homo sapiens
tcagttaacagcctc

SEQ ID NO: 812366 - DNA, 15 bp, Homo sapiens
cagttaacagcctcc

SEQ ID NO: 812367 - DNA, 15 bp, Homo sapiens
agttaacagcctcct

SEQ ID NO: 812368 - DNA, 15 bp, Homo sapiens
gttaacagcctcctt

SEQ ID NO: 812369 - DNA, 15 bp, Homo sapiens
ttaacagcctccttg

SEQ ID NO: 812370 - DNA, 15 bp, Homo sapiens
taacagcctccttgg

SEQ ID NO: 812371 - DNA, 15 bp, Homo sapiens
aacagcctccttggt

SEQ ID NO: 812372 - DNA, 15 bp, Homo sapiens
acagcctccttggtg

SEQ ID NO: 812373 - DNA, 15 bp, Homo sapiens
cagcctccttggtgc

SEQ ID NO: 812374 - DNA, 15 bp, Homo sapiens
agcctccttggtgct

SEQ ID NO: 812375 - DNA, 15 bp, Homo sapiens
gcctccttggtgctt

SEQ ID NO: 812376 - DNA, 15 bp, Homo sapiens
cctccttggtgcttt

SEQ ID NO: 812377 - DNA, 15 bp, Homo sapiens
ctccttggtgcttta

SEQ ID NO: 812378 - DNA, 15 bp, Homo sapiens
tccttggtgctttaa

SEQ ID NO: 812379 - DNA, 15 bp, Homo sapiens
ccttggtgctttaag

SEQ ID NO: 812380 - DNA, 15 bp, Homo sapiens
cttggtgctttaagc

SEQ ID NO: 812381 - DNA, 15 bp, Homo sapiens
ttggtgctttaagca

SEQ ID NO: 812382 - DNA, 15 bp, Homo sapiens
tggtgctttaagcat

SEQ ID NO: 812383 - DNA, 15 bp, Homo sapiens
ggtgctttaagcatt

SEQ ID NO: 812384 - DNA, 15 bp, Homo sapiens
gtgctttaagcattc

SEQ ID NO: 812385 - DNA, 15 bp, Homo sapiens
tgctttaagcattca

SEQ ID NO: 812386 - DNA, 15 bp, Homo sapiens
gctttaagcattcag

SEQ ID NO: 812387 - DNA, 15 bp, Homo sapiens
ctttaagcattcagc

SEQ ID NO: 812388 - DNA, 15 bp, Homo sapiens
tttaagcattcagct

SEQ ID NO: 812389 - DNA, 15 bp, Homo sapiens
ttaagcattcagctt

SEQ ID NO: 812390 - DNA, 15 bp, Homo sapiens
taagcattcagcttc

SEQ ID NO: 812391 - DNA, 15 bp, Homo sapiens
aagcattcagcttcc

SEQ ID NO: 812392 - DNA, 15 bp, Homo sapiens
agcattcagcttcct

SEQ ID NO: 812393 - DNA, 15 bp, Homo sapiens
gcattcagcttcctt

SEQ ID NO: 812394 - DNA, 15 bp, Homo sapiens
cattcagcttccttc

SEQ ID NO: 812395 - DNA, 15 bp, Homo sapiens
attcagcttccttca

SEQ ID NO: 812396 - DNA, 15 bp, Homo sapiens
ttcagcttccttcag

SEQ ID NO: 812397 - DNA, 15 bp, Homo sapiens
tcagcttccttcagg

SEQ ID NO: 812398 - DNA, 15 bp, Homo sapiens
cagcttccttcaggc

SEQ ID NO: 812399 - DNA, 15 bp, Homo sapiens
agcttccttcaggct

SEQ ID NO: 812400 - DNA, 15 bp, Homo sapiens
gcttccttcaggctg

SEQ ID NO: 812401 - DNA, 15 bp, Homo sapiens
cttccttcaggctgg

SEQ ID NO: 812402 - DNA, 15 bp, Homo sapiens
ttccttcaggctggt

SEQ ID NO: 812403 - DNA, 15 bp, Homo sapiens
tccttcaggctggta

SEQ ID NO: 812404 - DNA, 15 bp, Homo sapiens
ccttcaggctggtaa

SEQ ID NO: 812405 - DNA, 15 bp, Homo sapiens
cttcaggctggtaat

SEQ ID NO: 812406 - DNA, 15 bp, Homo sapiens
ttcaggctggtaatt

SEQ ID NO: 812407 - DNA, 15 bp, Homo sapiens
tcaggctggtaattt

SEQ ID NO: 812408 - DNA, 15 bp, Homo sapiens
caggctggtaattta

SEQ ID NO: 812409 - DNA, 15 bp, Homo sapiens
aggctggtaatttat

SEQ ID NO: 812410 - DNA, 15 bp, Homo sapiens
ggctggtaatttata

SEQ ID NO: 812411 - DNA, 15 bp, Homo sapiens
gctggtaatttatat

SEQ ID NO: 812412 - DNA, 15 bp, Homo sapiens
ctggtaatttatata

SEQ ID NO: 812413 - DNA, 15 bp, Homo sapiens
tggtaatttatataa

SEQ ID NO: 812414 - DNA, 15 bp, Homo sapiens
ggtaatttatataat

SEQ ID NO: 812415 - DNA, 15 bp, Homo sapiens
gtaatttatataatc

SEQ ID NO: 812416 - DNA, 15 bp, Homo sapiens
taatttatataatcc

SEQ ID NO: 812417 - DNA, 15 bp, Homo sapiens
aatttatataatccc

SEQ ID NO: 812418 - DNA, 15 bp, Homo sapiens
atttatataatccct

SEQ ID NO: 812419 - DNA, 15 bp, Homo sapiens
tttatataatccctg

SEQ ID NO: 812420 - DNA, 15 bp, Homo sapiens
ttatataatccctga

SEQ ID NO: 812421 - DNA, 15 bp, Homo sapiens
tatataatccctgaa

SEQ ID NO: 812422 - DNA, 15 bp, Homo sapiens
atataatccctgaaa

SEQ ID NO: 812423 - DNA, 15 bp, Homo sapiens
tataatccctgaaac

SEQ ID NO: 812424 - DNA, 15 bp, Homo sapiens
ataatccctgaaacg

SEQ ID NO: 812425 - DNA, 15 bp, Homo sapiens
taatccctgaaacgg

SEQ ID NO: 812426 - DNA, 15 bp, Homo sapiens
aatccctgaaacggg

SEQ ID NO: 812427 - DNA, 15 bp, Homo sapiens
atccctgaaacgggc

SEQ ID NO: 812428 - DNA, 15 bp, Homo sapiens
tccctgaaacgggct

SEQ ID NO: 812429 - DNA, 15 bp, Homo sapiens
ccctgaaacgggctt

SEQ ID NO: 812430 - DNA, 15 bp, Homo sapiens
cctgaaacgggcttc

SEQ ID NO: 812431 - DNA, 15 bp, Homo sapiens
ctgaaacgggcttca

SEQ ID NO: 812432 - DNA, 15 bp, Homo sapiens
tgaaacgggcttcag

SEQ ID NO: 812433 - DNA, 15 bp, Homo sapiens
gaaacgggcttcagg

SEQ ID NO: 812434 - DNA, 15 bp, Homo sapiens
aaacgggcttcaggt

SEQ ID NO: 812435 - DNA, 15 bp, Homo sapiens
aacgggcttcaggtc

SEQ ID NO: 812436 - DNA, 15 bp, Homo sapiens
acgggcttcaggtca

SEQ ID NO: 812437 - DNA, 15 bp, Homo sapiens
cgggcttcaggtcaa

SEQ ID NO: 812438 - DNA, 15 bp, Homo sapiens
gggcttcaggtcaaa

SEQ ID NO: 812439 - DNA, 15 bp, Homo sapiens
ggcttcaggtcaaac

SEQ ID NO: 812440 - DNA, 15 bp, Homo sapiens
gcttcaggtcaaacc

SEQ ID NO: 812441 - DNA, 15 bp, Homo sapiens
cttcaggtcaaaccc

SEQ ID NO: 812442 - DNA, 15 bp, Homo sapiens
ttcaggtcaaaccct

SEQ ID NO: 812443 - DNA, 15 bp, Homo sapiens
tcaggtcaaaccctt

SEQ ID NO: 812444 - DNA, 15 bp, Homo sapiens
caggtcaaaccctta

SEQ ID NO: 812445 - DNA, 15 bp, Homo sapiens
aggtcaaacccttaa

SEQ ID NO: 812446 - DNA, 15 bp, Homo sapiens
ggtcaaacccttaag

SEQ ID NO: 812447 - DNA, 15 bp, Homo sapiens
gtcaaacccttaaga

SEQ ID NO: 812448 - DNA, 15 bp, Homo sapiens
tcaaacccttaagac

SEQ ID NO: 812449 - DNA, 15 bp, Homo sapiens
caaacccttaagaca

SEQ ID NO: 812450 - DNA, 15 bp, Homo sapiens
aaacccttaagacat

SEQ ID NO: 812451 - DNA, 15 bp, Homo sapiens
aacccttaagacatc

SEQ ID NO: 812452 - DNA, 15 bp, Homo sapiens
acccttaagacatct

SEQ ID NO: 812453 - DNA, 15 bp, Homo sapiens
cccttaagacatctg

SEQ ID NO: 812454 - DNA, 15 bp, Homo sapiens
ccttaagacatctga

SEQ ID NO: 812455 - DNA, 15 bp, Homo sapiens
cttaagacatctgaa

SEQ ID NO: 812456 - DNA, 15 bp, Homo sapiens
ttaagacatctgaag

SEQ ID NO: 812457 - DNA, 15 bp, Homo sapiens
taagacatctgaagc

SEQ ID NO: 812458 - DNA, 15 bp, Homo sapiens
aagacatctgaagct

SEQ ID NO: 812459 - DNA, 15 bp, Homo sapiens
agacatctgaagctg

SEQ ID NO: 812460 - DNA, 15 bp, Homo sapiens
gacatctgaagctgc

SEQ ID NO: 812461 - DNA, 15 bp, Homo sapiens
acatctgaagctgca

SEQ ID NO: 812462 - DNA, 15 bp, Homo sapiens
catctgaagctgcaa

SEQ ID NO: 812463 - DNA, 15 bp, Homo sapiens
atctgaagctgcaac

SEQ ID NO: 812464 - DNA, 15 bp, Homo sapiens
tctgaagctgcaacc

SEQ ID NO: 812465 - DNA, 15 bp, Homo sapiens
ctgaagctgcaacct

SEQ ID NO: 812466 - DNA, 15 bp, Homo sapiens
tgaagctgcaacctg

SEQ ID NO: 812467 - DNA, 15 bp, Homo sapiens
gaagctgcaacctgg

SEQ ID NO: 812468 - DNA, 15 bp, Homo sapiens
aagctgcaacctggc

SEQ ID NO: 812469 - DNA, 15 bp, Homo sapiens
agctgcaacctggcc

SEQ ID NO: 812470 - DNA, 15 bp, Homo sapiens
gctgcaacctggcct

SEQ ID NO: 812471 - DNA, 15 bp, Homo sapiens
ctgcaacctggcctt

SEQ ID NO: 812472 - DNA, 15 bp, Homo sapiens
tgcaacctggccttt

SEQ ID NO: 812473 - DNA, 15 bp, Homo sapiens
gcaacctggcctttg

SEQ ID NO: 812474 - DNA, 15 bp, Homo sapiens
caacctggcctttgg

SEQ ID NO: 812475 - DNA, 15 bp, Homo sapiens
aacctggcctttggt

SEQ ID NO: 812476 - DNA, 15 bp, Homo sapiens
acctggcctttggtg

SEQ ID NO: 812477 - DNA, 15 bp, Homo sapiens
cctggcctttggtgt

SEQ ID NO: 812478 - DNA, 15 bp, Homo sapiens
ctggcctttggtgtt

SEQ ID NO: 812479 - DNA, 15 bp, Homo sapiens
tggcctttggtgttg

SEQ ID NO: 812480 - DNA, 15 bp, Homo sapiens
ggcctttggtgttga

SEQ ID NO: 812481 - DNA, 15 bp, Homo sapiens
gcctttggtgttgaa

SEQ ID NO: 812482 - DNA, 15 bp, Homo sapiens
cctttggtgttgaaa

SEQ ID NO: 812483 - DNA, 15 bp, Homo sapiens
ctttggtgttgaaat

SEQ ID NO: 812484 - DNA, 15 bp, Homo sapiens
tttggtgttgaaata

SEQ ID NO: 812485 - DNA, 15 bp, Homo sapiens
ttggtgttgaaatag

SEQ ID NO: 812486 - DNA, 15 bp, Homo sapiens
tggtgttgaaatagg

SEQ ID NO: 812487 - DNA, 15 bp, Homo sapiens
ggtgttgaaatagga

SEQ ID NO: 812488 - DNA, 15 bp, Homo sapiens
gtgttgaaataggaa

SEQ ID NO: 812489 - DNA, 15 bp, Homo sapiens
tgttgaaataggaag

SEQ ID NO: 812490 - DNA, 15 bp, Homo sapiens
gttgaaataggaagg

SEQ ID NO: 812491 - DNA, 15 bp, Homo sapiens
ttgaaataggaaggt

SEQ ID NO: 812492 - DNA, 15 bp, Homo sapiens
tgaaataggaaggtt

SEQ ID NO: 812493 - DNA, 15 bp, Homo sapiens
gaaataggaaggttt

SEQ ID NO: 812494 - DNA, 15 bp, Homo sapiens
aaataggaaggttta

SEQ ID NO: 812495 - DNA, 15 bp, Homo sapiens
aataggaaggtttaa

SEQ ID NO: 812496 - DNA, 15 bp, Homo sapiens
ataggaaggtttaag

SEQ ID NO: 812497 - DNA, 15 bp, Homo sapiens
taggaaggtttaagg

SEQ ID NO: 812498 - DNA, 15 bp, Homo sapiens
aggaaggtttaagga

SEQ ID NO: 812499 - DNA, 15 bp, Homo sapiens
ggaaggtttaaggag

SEQ ID NO: 812500 - DNA, 15 bp, Homo sapiens
gaaggtttaaggaga

SEQ ID NO: 812501 - DNA, 15 bp, Homo sapiens
aaggtttaaggagaa

SEQ ID NO: 812502 - DNA, 15 bp, Homo sapiens
aggtttaaggagaat

SEQ ID NO: 812503 - DNA, 15 bp, Homo sapiens
ggtttaaggagaatc

SEQ ID NO: 812504 - DNA, 15 bp, Homo sapiens
gtttaaggagaatct

SEQ ID NO: 812505 - DNA, 15 bp, Homo sapiens
tttaaggagaatcta

SEQ ID NO: 812506 - DNA, 15 bp, Homo sapiens
ttaaggagaatctaa

SEQ ID NO: 812507 - DNA, 15 bp, Homo sapiens
taaggagaatctaag

SEQ ID NO: 812508 - DNA, 15 bp, Homo sapiens
aaggagaatctaagc

SEQ ID NO: 812509 - DNA, 15 bp, Homo sapiens
aggagaatctaagca

SEQ ID NO: 812510 - DNA, 15 bp, Homo sapiens
ggagaatctaagcat

SEQ ID NO: 812511 - DNA, 15 bp, Homo sapiens
gagaatctaagcatt

SEQ ID NO: 812512 - DNA, 15 bp, Homo sapiens
agaatctaagcattt

SEQ ID NO: 812513 - DNA, 15 bp, Homo sapiens
gaatctaagcatttt

SEQ ID NO: 812514 - DNA, 15 bp, Homo sapiens
aatctaagcatttta

SEQ ID NO: 812515 - DNA, 15 bp, Homo sapiens
atctaagcattttag

SEQ ID NO: 812516 - DNA, 15 bp, Homo sapiens
tctaagcattttaga

SEQ ID NO: 812517 - DNA, 15 bp, Homo sapiens
ctaagcattttagac

SEQ ID NO: 812518 - DNA, 15 bp, Homo sapiens
taagcattttagact

SEQ ID NO: 812519 - DNA, 15 bp, Homo sapiens
aagcattttagactt

SEQ ID NO: 812520 - DNA, 15 bp, Homo sapiens
agcattttagacttt

SEQ ID NO: 812521 - DNA, 15 bp, Homo sapiens
gcattttagactttt

SEQ ID NO: 812522 - DNA, 15 bp, Homo sapiens
cattttagacttttt

SEQ ID NO: 812523 - DNA, 15 bp, Homo sapiens
attttagactttttt

SEQ ID NO: 812524 - DNA, 15 bp, Homo sapiens
ttttagacttttttt

SEQ ID NO: 812525 - DNA, 15 bp, Homo sapiens
tttagactttttttt

SEQ ID NO: 812526 - DNA, 15 bp, Homo sapiens
ttagactttttttta

SEQ ID NO: 812527 - DNA, 15 bp, Homo sapiens
tagacttttttttat

SEQ ID NO: 812528 - DNA, 15 bp, Homo sapiens
agacttttttttata

SEQ ID NO: 812529 - DNA, 15 bp, Homo sapiens
gacttttttttataa

SEQ ID NO: 812530 - DNA, 15 bp, Homo sapiens
acttttttttataaa

SEQ ID NO: 812531 - DNA, 15 bp, Homo sapiens
cttttttttataaat

SEQ ID NO: 812532 - DNA, 15 bp, Homo sapiens
ttttttttataaata

SEQ ID NO: 812533 - DNA, 15 bp, Homo sapiens
tttttttataaatag

SEQ ID NO: 812534 - DNA, 15 bp, Homo sapiens
ttttttataaataga

SEQ ID NO: 812535 - DNA, 15 bp, Homo sapiens
tttttataaatagac

SEQ ID NO: 812536 - DNA, 15 bp, Homo sapiens
ttttataaatagact

SEQ ID NO: 812537 - DNA, 15 bp, Homo sapiens
tttataaatagactt

SEQ ID NO: 812538 - DNA, 15 bp, Homo sapiens
ttataaatagactta

SEQ ID NO: 812539 - DNA, 15 bp, Homo sapiens
tataaatagacttat

SEQ ID NO: 812540 - DNA, 15 bp, Homo sapiens
ataaatagacttatt

SEQ ID NO: 812541 - DNA, 15 bp, Homo sapiens
taaatagacttattt

SEQ ID NO: 812542 - DNA, 15 bp, Homo sapiens
aaatagacttatttt

SEQ ID NO: 812543 - DNA, 15 bp, Homo sapiens
aatagacttattttc

SEQ ID NO: 812544 - DNA, 15 bp, Homo sapiens
atagacttattttcc

SEQ ID NO: 812545 - DNA, 15 bp, Homo sapiens
tagacttattttcct

SEQ ID NO: 812546 - DNA, 15 bp, Homo sapiens
agacttattttcctt

SEQ ID NO: 812547 - DNA, 15 bp, Homo sapiens
gacttattttccttt

SEQ ID NO: 812548 - DNA, 15 bp, Homo sapiens
acttattttcctttg

SEQ ID NO: 812549 - DNA, 15 bp, Homo sapiens
cttattttcctttgt

SEQ ID NO: 812550 - DNA, 15 bp, Homo sapiens
ttattttcctttgta

SEQ ID NO: 812551 - DNA, 15 bp, Homo sapiens
tattttcctttgtaa

SEQ ID NO: 812552 - DNA, 15 bp, Homo sapiens
attttcctttgtaat

SEQ ID NO: 812553 - DNA, 15 bp, Homo sapiens
ttttcctttgtaatg

SEQ ID NO: 812554 - DNA, 15 bp, Homo sapiens
tttcctttgtaatgt

SEQ ID NO: 812555 - DNA, 15 bp, Homo sapiens
ttcctttgtaatgta

SEQ ID NO: 812556 - DNA, 15 bp, Homo sapiens
tcctttgtaatgtat

SEQ ID NO: 812557 - DNA, 15 bp, Homo sapiens
cctttgtaatgtatt

SEQ ID NO: 812558 - DNA, 15 bp, Homo sapiens
ctttgtaatgtattg

SEQ ID NO: 812559 - DNA, 15 bp, Homo sapiens
tttgtaatgtattgg

SEQ ID NO: 812560 - DNA, 15 bp, Homo sapiens
ttgtaatgtattggc

SEQ ID NO: 812561 - DNA, 15 bp, Homo sapiens
tgtaatgtattggcc

SEQ ID NO: 812562 - DNA, 15 bp, Homo sapiens
gtaatgtattggcct

SEQ ID NO: 812563 - DNA, 15 bp, Homo sapiens
taatgtattggcctt

SEQ ID NO: 812564 - DNA, 15 bp, Homo sapiens
aatgtattggccttt

SEQ ID NO: 812565 - DNA, 15 bp, Homo sapiens
atgtattggcctttt

SEQ ID NO: 812566 - DNA, 15 bp, Homo sapiens
tgtattggcctttta

SEQ ID NO: 812567 - DNA, 15 bp, Homo sapiens
gtattggccttttag

SEQ ID NO: 812568 - DNA, 15 bp, Homo sapiens
tattggccttttagt

SEQ ID NO: 812569 - DNA, 15 bp, Homo sapiens
attggccttttagtg

SEQ ID NO: 812570 - DNA, 15 bp, Homo sapiens
ttggccttttagtga

SEQ ID NO: 812571 - DNA, 15 bp, Homo sapiens
tggccttttagtgag

SEQ ID NO: 812572 - DNA, 15 bp, Homo sapiens
ggccttttagtgagt

SEQ ID NO: 812573 - DNA, 15 bp, Homo sapiens
gccttttagtgagta

SEQ ID NO: 812574 - DNA, 15 bp, Homo sapiens
ccttttagtgagtaa

SEQ ID NO: 812575 - DNA, 15 bp, Homo sapiens
cttttagtgagtaag

SEQ ID NO: 812576 - DNA, 15 bp, Homo sapiens
ttttagtgagtaagg

SEQ ID NO: 812577 - DNA, 15 bp, Homo sapiens
tttagtgagtaaggc

SEQ ID NO: 812578 - DNA, 15 bp, Homo sapiens
ttagtgagtaaggct

SEQ ID NO: 812579 - DNA, 15 bp, Homo sapiens
tagtgagtaaggctg

SEQ ID NO: 812580 - DNA, 15 bp, Homo sapiens
agtgagtaaggctgg

SEQ ID NO: 812581 - DNA, 15 bp, Homo sapiens
gtgagtaaggctggg

SEQ ID NO: 812582 - DNA, 15 bp, Homo sapiens
tgagtaaggctgggc

SEQ ID NO: 812583 - DNA, 15 bp, Homo sapiens
gagtaaggctgggca

SEQ ID NO: 812584 - DNA, 15 bp, Homo sapiens
agtaaggctgggcag

SEQ ID NO: 812585 - DNA, 15 bp, Homo sapiens
gtaaggctgggcaga

SEQ ID NO: 812586 - DNA, 15 bp, Homo sapiens
taaggctgggcagag

SEQ ID NO: 812587 - DNA, 15 bp, Homo sapiens
aaggctgggcagagg

SEQ ID NO: 812588 - DNA, 15 bp, Homo sapiens
aggctgggcagaggg

SEQ ID NO: 812589 - DNA, 15 bp, Homo sapiens
ggctgggcagagggt

SEQ ID NO: 812590 - DNA, 15 bp, Homo sapiens
gctgggcagagggtg

SEQ ID NO: 812591 - DNA, 15 bp, Homo sapiens
ctgggcagagggtgc

SEQ ID NO: 812592 - DNA, 15 bp, Homo sapiens
tgggcagagggtgct

SEQ ID NO: 812593 - DNA, 15 bp, Homo sapiens
gggcagagggtgctt

SEQ ID NO: 812594 - DNA, 15 bp, Homo sapiens
ggcagagggtgctta

SEQ ID NO: 812595 - DNA, 15 bp, Homo sapiens
gcagagggtgcttac

SEQ ID NO: 812596 - DNA, 15 bp, Homo sapiens
cagagggtgcttaca

SEQ ID NO: 812597 - DNA, 15 bp, Homo sapiens
agagggtgcttacaa

SEQ ID NO: 812598 - DNA, 15 bp, Homo sapiens
gagggtgcttacaac

SEQ ID NO: 812599 - DNA, 15 bp, Homo sapiens
agggtgcttacaacc

SEQ ID NO: 812600 - DNA, 15 bp, Homo sapiens
gggtgcttacaacct

SEQ ID NO: 812601 - DNA, 15 bp, Homo sapiens
ggtgcttacaacctt

SEQ ID NO: 812602 - DNA, 15 bp, Homo sapiens
gtgcttacaaccttg

SEQ ID NO: 812603 - DNA, 15 bp, Homo sapiens
tgcttacaaccttga

SEQ ID NO: 812604 - DNA, 15 bp, Homo sapiens
gcttacaaccttgac

SEQ ID NO: 812605 - DNA, 15 bp, Homo sapiens
cttacaaccttgact

SEQ ID NO: 812606 - DNA, 15 bp, Homo sapiens
ttacaaccttgactc

SEQ ID NO: 812607 - DNA, 15 bp, Homo sapiens
tacaaccttgactcc

SEQ ID NO: 812608 - DNA, 15 bp, Homo sapiens
acaaccttgactccc

SEQ ID NO: 812609 - DNA, 15 bp, Homo sapiens
caaccttgactccct

SEQ ID NO: 812610 - DNA, 15 bp, Homo sapiens
aaccttgactccctt

SEQ ID NO: 812611 - DNA, 15 bp, Homo sapiens
accttgactcccttt

SEQ ID NO: 812612 - DNA, 15 bp, Homo sapiens
ccttgactccctttc

SEQ ID NO: 812613 - DNA, 15 bp, Homo sapiens
cttgactccctttct

SEQ ID NO: 812614 - DNA, 15 bp, Homo sapiens
ttgactccctttctc

SEQ ID NO: 812615 - DNA, 15 bp, Homo sapiens
tgactccctttctcc

SEQ ID NO: 812616 - DNA, 15 bp, Homo sapiens
gactccctttctccc

SEQ ID NO: 812617 - DNA, 15 bp, Homo sapiens
actccctttctccct

SEQ ID NO: 812618 - DNA, 15 bp, Homo sapiens
ctccctttctccctg

SEQ ID NO: 812619 - DNA, 15 bp, Homo sapiens
tccctttctccctgg

SEQ ID NO: 812620 - DNA, 15 bp, Homo sapiens
ccctttctccctgga

SEQ ID NO: 812621 - DNA, 15 bp, Homo sapiens
cctttctccctggac

SEQ ID NO: 812622 - DNA, 15 bp, Homo sapiens
ctttctccctggact

SEQ ID NO: 812623 - DNA, 15 bp, Homo sapiens
tttctccctggactt

SEQ ID NO: 812624 - DNA, 15 bp, Homo sapiens
ttctccctggacttg

SEQ ID NO: 812625 - DNA, 15 bp, Homo sapiens
tctccctggacttga

SEQ ID NO: 812626 - DNA, 15 bp, Homo sapiens
ctccctggacttgat

SEQ ID NO: 812627 - DNA, 15 bp, Homo sapiens
tccctggacttgatc

SEQ ID NO: 812628 - DNA, 15 bp, Homo sapiens
ccctggacttgatct

SEQ ID NO: 812629 - DNA, 15 bp, Homo sapiens
cctggacttgatctg

SEQ ID NO: 812630 - DNA, 15 bp, Homo sapiens
ctggacttgatctgc

SEQ ID NO: 812631 - DNA, 15 bp, Homo sapiens
tggacttgatctgct

SEQ ID NO: 812632 - DNA, 15 bp, Homo sapiens
ggacttgatctgctg

SEQ ID NO: 812633 - DNA, 15 bp, Homo sapiens
gacttgatctgctgt

SEQ ID NO: 812634 - DNA, 15 bp, Homo sapiens
acttgatctgctgtt

SEQ ID NO: 812635 - DNA, 15 bp, Homo sapiens
cttgatctgctgttt

SEQ ID NO: 812636 - DNA, 15 bp, Homo sapiens
ttgatctgctgtttc

SEQ ID NO: 812637 - DNA, 15 bp, Homo sapiens
tgatctgctgtttca

SEQ ID NO: 812638 - DNA, 15 bp, Homo sapiens
gatctgctgtttcag

SEQ ID NO: 812639 - DNA, 15 bp, Homo sapiens
atctgctgtttcaga

SEQ ID NO: 812640 - DNA, 15 bp, Homo sapiens
tctgctgtttcagag

SEQ ID NO: 812641 - DNA, 15 bp, Homo sapiens
ctgctgtttcagagg

SEQ ID NO: 812642 - DNA, 15 bp, Homo sapiens
tgctgtttcagaggc

SEQ ID NO: 812643 - DNA, 15 bp, Homo sapiens
gctgtttcagaggct

SEQ ID NO: 812644 - DNA, 15 bp, Homo sapiens
ctgtttcagaggcta

SEQ ID NO: 812645 - DNA, 15 bp, Homo sapiens
tgtttcagaggctag

SEQ ID NO: 812646 - DNA, 15 bp, Homo sapiens
gtttcagaggctagg

SEQ ID NO: 812647 - DNA, 15 bp, Homo sapiens
tttcagaggctaggt

SEQ ID NO: 812648 - DNA, 15 bp, Homo sapiens
ttcagaggctaggtt

SEQ ID NO: 812649 - DNA, 15 bp, Homo sapiens
tcagaggctaggttg

SEQ ID NO: 812650 - DNA, 15 bp, Homo sapiens
cagaggctaggttgt

SEQ ID NO: 812651 - DNA, 15 bp, Homo sapiens
agaggctaggttgtt

SEQ ID NO: 812652 - DNA, 15 bp, Homo sapiens
gaggctaggttgttt

SEQ ID NO: 812653 - DNA, 15 bp, Homo sapiens
aggctaggttgtttc

SEQ ID NO: 812654 - DNA, 15 bp, Homo sapiens
ggctaggttgtttct

SEQ ID NO: 812655 - DNA, 15 bp, Homo sapiens
gctaggttgtttctg

SEQ ID NO: 812656 - DNA, 15 bp, Homo sapiens
ctaggttgtttctgt

SEQ ID NO: 812657 - DNA, 15 bp, Homo sapiens
taggttgtttctgtg

SEQ ID NO: 812658 - DNA, 15 bp, Homo sapiens
aggttgtttctgtgg

SEQ ID NO: 812659 - DNA, 15 bp, Homo sapiens
ggttgtttctgtggg

SEQ ID NO: 812660 - DNA, 15 bp, Homo sapiens
gttgtttctgtgggt

SEQ ID NO: 812661 - DNA, 15 bp, Homo sapiens
ttgtttctgtgggtg

SEQ ID NO: 812662 - DNA, 15 bp, Homo sapiens
tgtttctgtgggtgc

SEQ ID NO: 812663 - DNA, 15 bp, Homo sapiens
gtttctgtgggtgcc

SEQ ID NO: 812664 - DNA, 15 bp, Homo sapiens
tttctgtgggtgcct

SEQ ID NO: 812665 - DNA, 15 bp, Homo sapiens
ttctgtgggtgcctt

SEQ ID NO: 812666 - DNA, 15 bp, Homo sapiens
tctgtgggtgcctta

SEQ ID NO: 812667 - DNA, 15 bp, Homo sapiens
ctgtgggtgccttat

SEQ ID NO: 812668 - DNA, 15 bp, Homo sapiens
tgtgggtgccttatc

SEQ ID NO: 812669 - DNA, 15 bp, Homo sapiens
gtgggtgccttatca

SEQ ID NO: 812670 - DNA, 15 bp, Homo sapiens
tgggtgccttatcag

SEQ ID NO: 812671 - DNA, 15 bp, Homo sapiens
gggtgccttatcagg

SEQ ID NO: 812672 - DNA, 15 bp, Homo sapiens
ggtgccttatcaggg

SEQ ID NO: 812673 - DNA, 15 bp, Homo sapiens
gtgccttatcagggc

SEQ ID NO: 812674 - DNA, 15 bp, Homo sapiens
tgccttatcagggct

SEQ ID NO: 812675 - DNA, 15 bp, Homo sapiens
gccttatcagggctg

SEQ ID NO: 812676 - DNA, 15 bp, Homo sapiens
ccttatcagggctgg

SEQ ID NO: 812677 - DNA, 15 bp, Homo sapiens
cttatcagggctggg

SEQ ID NO: 812678 - DNA, 15 bp, Homo sapiens
ttatcagggctggga

SEQ ID NO: 812679 - DNA, 15 bp, Homo sapiens
tatcagggctgggat

SEQ ID NO: 812680 - DNA, 15 bp, Homo sapiens
atcagggctgggata

SEQ ID NO: 812681 - DNA, 15 bp, Homo sapiens
tcagggctgggatac

SEQ ID NO: 812682 - DNA, 15 bp, Homo sapiens
cagggctgggatact

SEQ ID NO: 812683 - DNA, 15 bp, Homo sapiens
agggctgggatactt

SEQ ID NO: 812684 - DNA, 15 bp, Homo sapiens
gggctgggatacttc

SEQ ID NO: 812685 - DNA, 15 bp, Homo sapiens
ggctgggatacttct

SEQ ID NO: 812686 - DNA, 15 bp, Homo sapiens
gctgggatacttctg

SEQ ID NO: 812687 - DNA, 15 bp, Homo sapiens
ctgggatacttctga

SEQ ID NO: 812688 - DNA, 15 bp, Homo sapiens
tgggatacttctgat

SEQ ID NO: 812689 - DNA, 15 bp, Homo sapiens
gggatacttctgatt

SEQ ID NO: 812690 - DNA, 15 bp, Homo sapiens
ggatacttctgattc

SEQ ID NO: 812691 - DNA, 15 bp, Homo sapiens
gatacttctgattct

SEQ ID NO: 812692 - DNA, 15 bp, Homo sapiens
atacttctgattctg

SEQ ID NO: 812693 - DNA, 15 bp, Homo sapiens
tacttctgattctgg

SEQ ID NO: 812694 - DNA, 15 bp, Homo sapiens
acttctgattctggc

SEQ ID NO: 812695 - DNA, 15 bp, Homo sapiens
cttctgattctggct

SEQ ID NO: 812696 - DNA, 15 bp, Homo sapiens
ttctgattctggctt

SEQ ID NO: 812697 - DNA, 15 bp, Homo sapiens
tctgattctggcttc

SEQ ID NO: 812698 - DNA, 15 bp, Homo sapiens
ctgattctggcttcc

SEQ ID NO: 812699 - DNA, 15 bp, Homo sapiens
tgattctggcttcct

SEQ ID NO: 812700 - DNA, 15 bp, Homo sapiens
gattctggcttcctt

SEQ ID NO: 812701 - DNA, 15 bp, Homo sapiens
attctggcttccttc

SEQ ID NO: 812702 - DNA, 15 bp, Homo sapiens
ttctggcttccttcc

SEQ ID NO: 812703 - DNA, 15 bp, Homo sapiens
tctggcttccttcct

SEQ ID NO: 812704 - DNA, 15 bp, Homo sapiens
ctggcttccttcctg

SEQ ID NO: 812705 - DNA, 15 bp, Homo sapiens
tggcttccttcctgc

SEQ ID NO: 812706 - DNA, 15 bp, Homo sapiens
ggcttccttcctgcc

SEQ ID NO: 812707 - DNA, 15 bp, Homo sapiens
gcttccttcctgccc

SEQ ID NO: 812708 - DNA, 15 bp, Homo sapiens
cttccttcctgcccc

SEQ ID NO: 812709 - DNA, 15 bp, Homo sapiens
ttccttcctgcccca

SEQ ID NO: 812710 - DNA, 15 bp, Homo sapiens
tccttcctgccccac

SEQ ID NO: 812711 - DNA, 15 bp, Homo sapiens
ccttcctgccccacc

SEQ ID NO: 812712 - DNA, 15 bp, Homo sapiens
cttcctgccccaccc

SEQ ID NO: 812713 - DNA, 15 bp, Homo sapiens
ttcctgccccaccct

SEQ ID NO: 812714 - DNA, 15 bp, Homo sapiens
tcctgccccaccctc

SEQ ID NO: 812715 - DNA, 15 bp, Homo sapiens
cctgccccaccctcc

SEQ ID NO: 812716 - DNA, 15 bp, Homo sapiens
ctgccccaccctccc

SEQ ID NO: 812717 - DNA, 15 bp, Homo sapiens
tgccccaccctcccg

SEQ ID NO: 812718 - DNA, 15 bp, Homo sapiens
gccccaccctcccga

SEQ ID NO: 812719 - DNA, 15 bp, Homo sapiens
ccccaccctcccgac

SEQ ID NO: 812720 - DNA, 15 bp, Homo sapiens
cccaccctcccgacc

SEQ ID NO: 812721 - DNA, 15 bp, Homo sapiens
ccaccctcccgaccc

SEQ ID NO: 812722 - DNA, 15 bp, Homo sapiens
caccctcccgacccc

SEQ ID NO: 812723 - DNA, 15 bp, Homo sapiens
accctcccgacccca

SEQ ID NO: 812724 - DNA, 15 bp, Homo sapiens
ccctcccgaccccag

SEQ ID NO: 812725 - DNA, 15 bp, Homo sapiens
cctcccgaccccagt

SEQ ID NO: 812726 - DNA, 15 bp, Homo sapiens
ctcccgaccccagtc

SEQ ID NO: 812727 - DNA, 15 bp, Homo sapiens
tcccgaccccagtcc

SEQ ID NO: 812728 - DNA, 15 bp, Homo sapiens
cccgaccccagtccc

SEQ ID NO: 812729 - DNA, 15 bp, Homo sapiens
ccgaccccagtcccc

SEQ ID NO: 812730 - DNA, 15 bp, Homo sapiens
cgaccccagtccccc

SEQ ID NO: 812731 - DNA, 15 bp, Homo sapiens
gaccccagtccccct

SEQ ID NO: 812732 - DNA, 15 bp, Homo sapiens
accccagtccccctg

SEQ ID NO: 812733 - DNA, 15 bp, Homo sapiens
ccccagtccccctga

SEQ ID NO: 812734 - DNA, 15 bp, Homo sapiens
cccagtccccctgat

SEQ ID NO: 812735 - DNA, 15 bp, Homo sapiens
ccagtccccctgatc

SEQ ID NO: 812736 - DNA, 15 bp, Homo sapiens
cagtccccctgatcc

SEQ ID NO: 812737 - DNA, 15 bp, Homo sapiens
agtccccctgatcct

SEQ ID NO: 812738 - DNA, 15 bp, Homo sapiens
gtccccctgatcctg

SEQ ID NO: 812739 - DNA, 15 bp, Homo sapiens
tccccctgatcctgc

SEQ ID NO: 812740 - DNA, 15 bp, Homo sapiens
ccccctgatcctgct

SEQ ID NO: 812741 - DNA, 15 bp, Homo sapiens
cccctgatcctgcta

SEQ ID NO: 812742 - DNA, 15 bp, Homo sapiens
ccctgatcctgctag

SEQ ID NO: 812743 - DNA, 15 bp, Homo sapiens
cctgatcctgctaga

SEQ ID NO: 812744 - DNA, 15 bp, Homo sapiens
ctgatcctgctagag

SEQ ID NO: 812745 - DNA, 15 bp, Homo sapiens
tgatcctgctagagg

SEQ ID NO: 812746 - DNA, 15 bp, Homo sapiens
gatcctgctagaggc

SEQ ID NO: 812747 - DNA, 15 bp, Homo sapiens
atcctgctagaggca

SEQ ID NO: 812748 - DNA, 15 bp, Homo sapiens
tcctgctagaggcat

SEQ ID NO: 812749 - DNA, 15 bp, Homo sapiens
cctgctagaggcatg

SEQ ID NO: 812750 - DNA, 15 bp, Homo sapiens
ctgctagaggcatgt

SEQ ID NO: 812751 - DNA, 15 bp, Homo sapiens
tgctagaggcatgtc

SEQ ID NO: 812752 - DNA, 15 bp, Homo sapiens
gctagaggcatgtct

SEQ ID NO: 812753 - DNA, 15 bp, Homo sapiens
ctagaggcatgtctc

SEQ ID NO: 812754 - DNA, 15 bp, Homo sapiens
tagaggcatgtctcc

SEQ ID NO: 812755 - DNA, 15 bp, Homo sapiens
agaggcatgtctcct

SEQ ID NO: 812756 - DNA, 15 bp, Homo sapiens
gaggcatgtctcctt

SEQ ID NO: 812757 - DNA, 15 bp, Homo sapiens
aggcatgtctccttg

SEQ ID NO: 812758 - DNA, 15 bp, Homo sapiens
ggcatgtctccttgc

SEQ ID NO: 812759 - DNA, 15 bp, Homo sapiens
gcatgtctccttgcg

SEQ ID NO: 812760 - DNA, 15 bp, Homo sapiens
catgtctccttgcgt

SEQ ID NO: 812761 - DNA, 15 bp, Homo sapiens
atgtctccttgcgtg

SEQ ID NO: 812762 - DNA, 15 bp, Homo sapiens
tgtctccttgcgtgt

SEQ ID NO: 812763 - DNA, 15 bp, Homo sapiens
gtctccttgcgtgtc

SEQ ID NO: 812764 - DNA, 15 bp, Homo sapiens
tctccttgcgtgtct

SEQ ID NO: 812765 - DNA, 15 bp, Homo sapiens
ctccttgcgtgtcta

SEQ ID NO: 812766 - DNA, 15 bp, Homo sapiens
tccttgcgtgtctaa

SEQ ID NO: 812767 - DNA, 15 bp, Homo sapiens
ccttgcgtgtctaaa

SEQ ID NO: 812768 - DNA, 15 bp, Homo sapiens
cttgcgtgtctaaag

SEQ ID NO: 812769 - DNA, 15 bp, Homo sapiens
ttgcgtgtctaaagg

SEQ ID NO: 812770 - DNA, 15 bp, Homo sapiens
tgcgtgtctaaaggt

SEQ ID NO: 812771 - DNA, 15 bp, Homo sapiens
gcgtgtctaaaggtc

SEQ ID NO: 812772 - DNA, 15 bp, Homo sapiens
cgtgtctaaaggtcc

SEQ ID NO: 812773 - DNA, 15 bp, Homo sapiens
gtgtctaaaggtccc

SEQ ID NO: 812774 - DNA, 15 bp, Homo sapiens
tgtctaaaggtccct

SEQ ID NO: 812775 - DNA, 15 bp, Homo sapiens
gtctaaaggtccctc

SEQ ID NO: 812776 - DNA, 15 bp, Homo sapiens
tctaaaggtccctca

SEQ ID NO: 812777 - DNA, 15 bp, Homo sapiens
ctaaaggtccctcat

SEQ ID NO: 812778 - DNA, 15 bp, Homo sapiens
taaaggtccctcatc

SEQ ID NO: 812779 - DNA, 15 bp, Homo sapiens
aaaggtccctcatcc

SEQ ID NO: 812780 - DNA, 15 bp, Homo sapiens
aaggtccctcatcct

SEQ ID NO: 812781 - DNA, 15 bp, Homo sapiens
aggtccctcatcctg

SEQ ID NO: 812782 - DNA, 15 bp, Homo sapiens
ggtccctcatcctgt

SEQ ID NO: 812783 - DNA, 15 bp, Homo sapiens
gtccctcatcctgtt

SEQ ID NO: 812784 - DNA, 15 bp, Homo sapiens
tccctcatcctgttt

SEQ ID NO: 812785 - DNA, 15 bp, Homo sapiens
ccctcatcctgtttg

SEQ ID NO: 812786 - DNA, 15 bp, Homo sapiens
cctcatcctgtttgt

SEQ ID NO: 812787 - DNA, 15 bp, Homo sapiens
ctcatcctgtttgtt

SEQ ID NO: 812788 - DNA, 15 bp, Homo sapiens
tcatcctgtttgttt

SEQ ID NO: 812789 - DNA, 15 bp, Homo sapiens
catcctgtttgtttt

SEQ ID NO: 812790 - DNA, 15 bp, Homo sapiens
atcctgtttgtttta

SEQ ID NO: 812791 - DNA, 15 bp, Homo sapiens
tcctgtttgttttag

SEQ ID NO: 812792 - DNA, 15 bp, Homo sapiens
cctgtttgttttagg

SEQ ID NO: 812793 - DNA, 15 bp, Homo sapiens
ctgtttgttttagga

SEQ ID NO: 812794 - DNA, 15 bp, Homo sapiens
tgtttgttttaggaa

SEQ ID NO: 812795 - DNA, 15 bp, Homo sapiens
gtttgttttaggaat

SEQ ID NO: 812796 - DNA, 15 bp, Homo sapiens
tttgttttaggaatc

SEQ ID NO: 812797 - DNA, 15 bp, Homo sapiens
ttgttttaggaatcc

SEQ ID NO: 812798 - DNA, 15 bp, Homo sapiens
tgttttaggaatcct

SEQ ID NO: 812799 - DNA, 15 bp, Homo sapiens
gttttaggaatcctg

SEQ ID NO: 812800 - DNA, 15 bp, Homo sapiens
ttttaggaatcctgg

SEQ ID NO: 812801 - DNA, 15 bp, Homo sapiens
tttaggaatcctggt

SEQ ID NO: 812802 - DNA, 15 bp, Homo sapiens
ttaggaatcctggtc

SEQ ID NO: 812803 - DNA, 15 bp, Homo sapiens
taggaatcctggtct

SEQ ID NO: 812804 - DNA, 15 bp, Homo sapiens
aggaatcctggtctc

SEQ ID NO: 812805 - DNA, 15 bp, Homo sapiens
ggaatcctggtctca

SEQ ID NO: 812806 - DNA, 15 bp, Homo sapiens
gaatcctggtctcag

SEQ ID NO: 812807 - DNA, 15 bp, Homo sapiens
aatcctggtctcagg

SEQ ID NO: 812808 - DNA, 15 bp, Homo sapiens
atcctggtctcagga

SEQ ID NO: 812809 - DNA, 15 bp, Homo sapiens
tcctggtctcaggac

SEQ ID NO: 812810 - DNA, 15 bp, Homo sapiens
cctggtctcaggacc

SEQ ID NO: 812811 - DNA, 15 bp, Homo sapiens
ctggtctcaggacct

SEQ ID NO: 812812 - DNA, 15 bp, Homo sapiens
tggtctcaggacctc

SEQ ID NO: 812813 - DNA, 15 bp, Homo sapiens
ggtctcaggacctca

SEQ ID NO: 812814 - DNA, 15 bp, Homo sapiens
gtctcaggacctcat

SEQ ID NO: 812815 - DNA, 15 bp, Homo sapiens
tctcaggacctcatg

SEQ ID NO: 812816 - DNA, 15 bp, Homo sapiens
ctcaggacctcatgg

SEQ ID NO: 812817 - DNA, 15 bp, Homo sapiens
tcaggacctcatgga

SEQ ID NO: 812818 - DNA, 15 bp, Homo sapiens
caggacctcatggaa

SEQ ID NO: 812819 - DNA, 15 bp, Homo sapiens
aggacctcatggaag

SEQ ID NO: 812820 - DNA, 15 bp, Homo sapiens
ggacctcatggaaga

SEQ ID NO: 812821 - DNA, 15 bp, Homo sapiens
gacctcatggaagaa

SEQ ID NO: 812822 - DNA, 15 bp, Homo sapiens
acctcatggaagaag

SEQ ID NO: 812823 - DNA, 15 bp, Homo sapiens
cctcatggaagaaga

SEQ ID NO: 812824 - DNA, 15 bp, Homo sapiens
ctcatggaagaagag

SEQ ID NO: 812825 - DNA, 15 bp, Homo sapiens
tcatggaagaagagg

SEQ ID NO: 812826 - DNA, 15 bp, Homo sapiens
catggaagaagaggg

SEQ ID NO: 812827 - DNA, 15 bp, Homo sapiens
atggaagaagagggg

SEQ ID NO: 812828 - DNA, 15 bp, Homo sapiens
tggaagaagaggggg

SEQ ID NO: 812829 - DNA, 15 bp, Homo sapiens
ggaagaagaggggga

SEQ ID NO: 812830 - DNA, 15 bp, Homo sapiens
gaagaagagggggag

SEQ ID NO: 812831 - DNA, 15 bp, Homo sapiens
aagaagagggggaga

SEQ ID NO: 812832 - DNA, 15 bp, Homo sapiens
agaagagggggagag

SEQ ID NO: 812833 - DNA, 15 bp, Homo sapiens
gaagagggggagaga

SEQ ID NO: 812834 - DNA, 15 bp, Homo sapiens
aagagggggagagag

SEQ ID NO: 812835 - DNA, 15 bp, Homo sapiens
agagggggagagagt

SEQ ID NO: 812836 - DNA, 15 bp, Homo sapiens
gagggggagagagtt

SEQ ID NO: 812837 - DNA, 15 bp, Homo sapiens
agggggagagagtta

SEQ ID NO: 812838 - DNA, 15 bp, Homo sapiens
gggggagagagttac

SEQ ID NO: 812839 - DNA, 15 bp, Homo sapiens
ggggagagagttaca

SEQ ID NO: 812840 - DNA, 15 bp, Homo sapiens
gggagagagttacag

SEQ ID NO: 812841 - DNA, 15 bp, Homo sapiens
ggagagagttacagg

SEQ ID NO: 812842 - DNA, 15 bp, Homo sapiens
gagagagttacaggt

SEQ ID NO: 812843 - DNA, 15 bp, Homo sapiens
agagagttacaggtt

SEQ ID NO: 812844 - DNA, 15 bp, Homo sapiens
gagagttacaggttg

SEQ ID NO: 812845 - DNA, 15 bp, Homo sapiens
agagttacaggttgg

SEQ ID NO: 812846 - DNA, 15 bp, Homo sapiens
gagttacaggttgga

SEQ ID NO: 812847 - DNA, 15 bp, Homo sapiens
agttacaggttggac

SEQ ID NO: 812848 - DNA, 15 bp, Homo sapiens
gttacaggttggaca

SEQ ID NO: 812849 - DNA, 15 bp, Homo sapiens
ttacaggttggacat

SEQ ID NO: 812850 - DNA, 15 bp, Homo sapiens
tacaggttggacatg

SEQ ID NO: 812851 - DNA, 15 bp, Homo sapiens
acaggttggacatga

SEQ ID NO: 812852 - DNA, 15 bp, Homo sapiens
caggttggacatgat

SEQ ID NO: 812853 - DNA, 15 bp, Homo sapiens
aggttggacatgatg

SEQ ID NO: 812854 - DNA, 15 bp, Homo sapiens
ggttggacatgatgc

SEQ ID NO: 812855 - DNA, 15 bp, Homo sapiens
gttggacatgatgca

SEQ ID NO: 812856 - DNA, 15 bp, Homo sapiens
ttggacatgatgcac

SEQ ID NO: 812857 - DNA, 15 bp, Homo sapiens
tggacatgatgcaca

SEQ ID NO: 812858 - DNA, 15 bp, Homo sapiens
ggacatgatgcacac

SEQ ID NO: 812859 - DNA, 15 bp, Homo sapiens
gacatgatgcacact

SEQ ID NO: 812860 - DNA, 15 bp, Homo sapiens
acatgatgcacacta

SEQ ID NO: 812861 - DNA, 15 bp, Homo sapiens
catgatgcacactat

SEQ ID NO: 812862 - DNA, 15 bp, Homo sapiens
atgatgcacactatg

SEQ ID NO: 812863 - DNA, 15 bp, Homo sapiens
tgatgcacactatgg

SEQ ID NO: 812864 - DNA, 15 bp, Homo sapiens
gatgcacactatggg

SEQ ID NO: 812865 - DNA, 15 bp, Homo sapiens
atgcacactatgggg

SEQ ID NO: 812866 - DNA, 15 bp, Homo sapiens
tgcacactatggggc

SEQ ID NO: 812867 - DNA, 15 bp, Homo sapiens
gcacactatggggcc

SEQ ID NO: 812868 - DNA, 15 bp, Homo sapiens
cacactatggggccc

SEQ ID NO: 812869 - DNA, 15 bp, Homo sapiens
acactatggggcccc

SEQ ID NO: 812870 - DNA, 15 bp, Homo sapiens
cactatggggcccca

SEQ ID NO: 812871 - DNA, 15 bp, Homo sapiens
actatggggccccag

SEQ ID NO: 812872 - DNA, 15 bp, Homo sapiens
ctatggggccccagc

SEQ ID NO: 812873 - DNA, 15 bp, Homo sapiens
tatggggccccagcg

SEQ ID NO: 812874 - DNA, 15 bp, Homo sapiens
atggggccccagcga

SEQ ID NO: 812875 - DNA, 15 bp, Homo sapiens
tggggccccagcgac

SEQ ID NO: 812876 - DNA, 15 bp, Homo sapiens
ggggccccagcgacg

SEQ ID NO: 812877 - DNA, 15 bp, Homo sapiens
gggccccagcgacgt

SEQ ID NO: 812878 - DNA, 15 bp, Homo sapiens
ggccccagcgacgtg

SEQ ID NO: 812879 - DNA, 15 bp, Homo sapiens
gccccagcgacgtgt

SEQ ID NO: 812880 - DNA, 15 bp, Homo sapiens
ccccagcgacgtgtc

SEQ ID NO: 812881 - DNA, 15 bp, Homo sapiens
cccagcgacgtgtct

SEQ ID NO: 812882 - DNA, 15 bp, Homo sapiens
ccagcgacgtgtctg

SEQ ID NO: 812883 - DNA, 15 bp, Homo sapiens
cagcgacgtgtctgg

SEQ ID NO: 812884 - DNA, 15 bp, Homo sapiens
agcgacgtgtctggt

SEQ ID NO: 812885 - DNA, 15 bp, Homo sapiens
gcgacgtgtctggtt

SEQ ID NO: 812886 - DNA, 15 bp, Homo sapiens
cgacgtgtctggttg

SEQ ID NO: 812887 - DNA, 15 bp, Homo sapiens
gacgtgtctggttga

SEQ ID NO: 812888 - DNA, 15 bp, Homo sapiens
acgtgtctggttgag

SEQ ID NO: 812889 - DNA, 15 bp, Homo sapiens
cgtgtctggttgagc

SEQ ID NO: 812890 - DNA, 15 bp, Homo sapiens
gtgtctggttgagct

SEQ ID NO: 812891 - DNA, 15 bp, Homo sapiens
tgtctggttgagctc

SEQ ID NO: 812892 - DNA, 15 bp, Homo sapiens
gtctggttgagctca

SEQ ID NO: 812893 - DNA, 15 bp, Homo sapiens
tctggttgagctcag

SEQ ID NO: 812894 - DNA, 15 bp, Homo sapiens
ctggttgagctcagg

SEQ ID NO: 812895 - DNA, 15 bp, Homo sapiens
tggttgagctcaggg

SEQ ID NO: 812896 - DNA, 15 bp, Homo sapiens
ggttgagctcaggga

SEQ ID NO: 812897 - DNA, 15 bp, Homo sapiens
gttgagctcagggaa

SEQ ID NO: 812898 - DNA, 15 bp, Homo sapiens
ttgagctcagggaat

SEQ ID NO: 812899 - DNA, 15 bp, Homo sapiens
tgagctcagggaata

SEQ ID NO: 812900 - DNA, 15 bp, Homo sapiens
gagctcagggaatat

SEQ ID NO: 812901 - DNA, 15 bp, Homo sapiens
agctcagggaatatg

SEQ ID NO: 812902 - DNA, 15 bp, Homo sapiens
gctcagggaatatgg

SEQ ID NO: 812903 - DNA, 15 bp, Homo sapiens
ctcagggaatatggt

SEQ ID NO: 812904 - DNA, 15 bp, Homo sapiens
tcagggaatatggtt

SEQ ID NO: 812905 - DNA, 15 bp, Homo sapiens
cagggaatatggttc

SEQ ID NO: 812906 - DNA, 15 bp, Homo sapiens
agggaatatggttct

SEQ ID NO: 812907 - DNA, 15 bp, Homo sapiens
gggaatatggttctt

SEQ ID NO: 812908 - DNA, 15 bp, Homo sapiens
ggaatatggttctta

SEQ ID NO: 812909 - DNA, 15 bp, Homo sapiens
gaatatggttcttag

SEQ ID NO: 812910 - DNA, 15 bp, Homo sapiens
aatatggttcttagc

SEQ ID NO: 812911 - DNA, 15 bp, Homo sapiens
atatggttcttagcc

SEQ ID NO: 812912 - DNA, 15 bp, Homo sapiens
tatggttcttagcca

SEQ ID NO: 812913 - DNA, 15 bp, Homo sapiens
atggttcttagccag

SEQ ID NO: 812914 - DNA, 15 bp, Homo sapiens
tggttcttagccagt

SEQ ID NO: 812915 - DNA, 15 bp, Homo sapiens
ggttcttagccagtt

SEQ ID NO: 812916 - DNA, 15 bp, Homo sapiens
gttcttagccagttt

SEQ ID NO: 812917 - DNA, 15 bp, Homo sapiens
ttcttagccagtttc

SEQ ID NO: 812918 - DNA, 15 bp, Homo sapiens
tcttagccagtttct

SEQ ID NO: 812919 - DNA, 15 bp, Homo sapiens
cttagccagtttctt

SEQ ID NO: 812920 - DNA, 15 bp, Homo sapiens
ttagccagtttcttg

SEQ ID NO: 812921 - DNA, 15 bp, Homo sapiens
tagccagtttcttgg

SEQ ID NO: 812922 - DNA, 15 bp, Homo sapiens
agccagtttcttggt

SEQ ID NO: 812923 - DNA, 15 bp, Homo sapiens
gccagtttcttggtg

SEQ ID NO: 812924 - DNA, 15 bp, Homo sapiens
ccagtttcttggtga

SEQ ID NO: 812925 - DNA, 15 bp, Homo sapiens
cagtttcttggtgat

SEQ ID NO: 812926 - DNA, 15 bp, Homo sapiens
agtttcttggtgata

SEQ ID NO: 812927 - DNA, 15 bp, Homo sapiens
gtttcttggtgatat

SEQ ID NO: 812928 - DNA, 15 bp, Homo sapiens
tttcttggtgatatc

SEQ ID NO: 812929 - DNA, 15 bp, Homo sapiens
ttcttggtgatatcc

SEQ ID NO: 812930 - DNA, 15 bp, Homo sapiens
tcttggtgatatcca

SEQ ID NO: 812931 - DNA, 15 bp, Homo sapiens
cttggtgatatccag

SEQ ID NO: 812932 - DNA, 15 bp, Homo sapiens
ttggtgatatccagt

SEQ ID NO: 812933 - DNA, 15 bp, Homo sapiens
tggtgatatccagtg

SEQ ID NO: 812934 - DNA, 15 bp, Homo sapiens
ggtgatatccagtgg

SEQ ID NO: 812935 - DNA, 15 bp, Homo sapiens
gtgatatccagtggc

SEQ ID NO: 812936 - DNA, 15 bp, Homo sapiens
tgatatccagtggca

SEQ ID NO: 812937 - DNA, 15 bp, Homo sapiens
gatatccagtggcac

SEQ ID NO: 812938 - DNA, 15 bp, Homo sapiens
atatccagtggcact

SEQ ID NO: 812939 - DNA, 15 bp, Homo sapiens
tatccagtggcactt

SEQ ID NO: 812940 - DNA, 15 bp, Homo sapiens
atccagtggcacttg

SEQ ID NO: 812941 - DNA, 15 bp, Homo sapiens
tccagtggcacttgt

SEQ ID NO: 812942 - DNA, 15 bp, Homo sapiens
ccagtggcacttgta

SEQ ID NO: 812943 - DNA, 15 bp, Homo sapiens
cagtggcacttgtaa

SEQ ID NO: 812944 - DNA, 15 bp, Homo sapiens
agtggcacttgtaat

SEQ ID NO: 812945 - DNA, 15 bp, Homo sapiens
gtggcacttgtaatg

SEQ ID NO: 812946 - DNA, 15 bp, Homo sapiens
tggcacttgtaatgg

SEQ ID NO: 812947 - DNA, 15 bp, Homo sapiens
ggcacttgtaatggc

SEQ ID NO: 812948 - DNA, 15 bp, Homo sapiens
gcacttgtaatggcg

SEQ ID NO: 812949 - DNA, 15 bp, Homo sapiens
cacttgtaatggcgt

SEQ ID NO: 812950 - DNA, 15 bp, Homo sapiens
acttgtaatggcgtc

SEQ ID NO: 812951 - DNA, 15 bp, Homo sapiens
cttgtaatggcgtct

SEQ ID NO: 812952 - DNA, 15 bp, Homo sapiens
ttgtaatggcgtctt

SEQ ID NO: 812953 - DNA, 15 bp, Homo sapiens
tgtaatggcgtcttc

SEQ ID NO: 812954 - DNA, 15 bp, Homo sapiens
gtaatggcgtcttca

SEQ ID NO: 812955 - DNA, 15 bp, Homo sapiens
taatggcgtcttcat

SEQ ID NO: 812956 - DNA, 15 bp, Homo sapiens
aatggcgtcttcatt

SEQ ID NO: 812957 - DNA, 15 bp, Homo sapiens
atggcgtcttcattc

SEQ ID NO: 812958 - DNA, 15 bp, Homo sapiens
tggcgtcttcattca

SEQ ID NO: 812959 - DNA, 15 bp, Homo sapiens
ggcgtcttcattcag

SEQ ID NO: 812960 - DNA, 15 bp, Homo sapiens
gcgtcttcattcagt

SEQ ID NO: 812961 - DNA, 15 bp, Homo sapiens
cgtcttcattcagtt

SEQ ID NO: 812962 - DNA, 15 bp, Homo sapiens
gtcttcattcagttc

SEQ ID NO: 812963 - DNA, 15 bp, Homo sapiens
tcttcattcagttca

SEQ ID NO: 812964 - DNA, 15 bp, Homo sapiens
cttcattcagttcat

SEQ ID NO: 812965 - DNA, 15 bp, Homo sapiens
ttcattcagttcatg

SEQ ID NO: 812966 - DNA, 15 bp, Homo sapiens
tcattcagttcatgc

SEQ ID NO: 812967 - DNA, 15 bp, Homo sapiens
cattcagttcatgca

SEQ ID NO: 812968 - DNA, 15 bp, Homo sapiens
attcagttcatgcag

SEQ ID NO: 812969 - DNA, 15 bp, Homo sapiens
ttcagttcatgcagg

SEQ ID NO: 812970 - DNA, 15 bp, Homo sapiens
tcagttcatgcaggg

SEQ ID NO: 812971 - DNA, 15 bp, Homo sapiens
cagttcatgcagggc

SEQ ID NO: 812972 - DNA, 15 bp, Homo sapiens
agttcatgcagggca

SEQ ID NO: 812973 - DNA, 15 bp, Homo sapiens
gttcatgcagggcaa

SEQ ID NO: 812974 - DNA, 15 bp, Homo sapiens
ttcatgcagggcaaa

SEQ ID NO: 812975 - DNA, 15 bp, Homo sapiens
tcatgcagggcaaag

SEQ ID NO: 812976 - DNA, 15 bp, Homo sapiens
catgcagggcaaagg

SEQ ID NO: 812977 - DNA, 15 bp, Homo sapiens
atgcagggcaaaggc

SEQ ID NO: 812978 - DNA, 15 bp, Homo sapiens
tgcagggcaaaggct

SEQ ID NO: 812979 - DNA, 15 bp, Homo sapiens
gcagggcaaaggctt

SEQ ID NO: 812980 - DNA, 15 bp, Homo sapiens
cagggcaaaggctta

SEQ ID NO: 812981 - DNA, 15 bp, Homo sapiens
agggcaaaggcttac

SEQ ID NO: 812982 - DNA, 15 bp, Homo sapiens
gggcaaaggcttact

SEQ ID NO: 812983 - DNA, 15 bp, Homo sapiens
ggcaaaggcttactg

SEQ ID NO: 812984 - DNA, 15 bp, Homo sapiens
gcaaaggcttactga

SEQ ID NO: 812985 - DNA, 15 bp, Homo sapiens
caaaggcttactgat

SEQ ID NO: 812986 - DNA, 15 bp, Homo sapiens
aaaggcttactgata

SEQ ID NO: 812987 - DNA, 15 bp, Homo sapiens
aaggcttactgataa

SEQ ID NO: 812988 - DNA, 15 bp, Homo sapiens
aggcttactgataaa

SEQ ID NO: 812989 - DNA, 15 bp, Homo sapiens
ggcttactgataaac

SEQ ID NO: 812990 - DNA, 15 bp, Homo sapiens
gcttactgataaact

SEQ ID NO: 812991 - DNA, 15 bp, Homo sapiens
cttactgataaactt

SEQ ID NO: 812992 - DNA, 15 bp, Homo sapiens
ttactgataaacttg

SEQ ID NO: 812993 - DNA, 15 bp, Homo sapiens
tactgataaacttga

SEQ ID NO: 812994 - DNA, 15 bp, Homo sapiens
actgataaacttgag

SEQ ID NO: 812995 - DNA, 15 bp, Homo sapiens
ctgataaacttgagt

SEQ ID NO: 812996 - DNA, 15 bp, Homo sapiens
tgataaacttgagtc

SEQ ID NO: 812997 - DNA, 15 bp, Homo sapiens
gataaacttgagtct

SEQ ID NO: 812998 - DNA, 15 bp, Homo sapiens
ataaacttgagtctg

SEQ ID NO: 812999 - DNA, 15 bp, Homo sapiens
taaacttgagtctgc

SEQ ID NO: 813000 - DNA, 15 bp, Homo sapiens
aaacttgagtctgcc

SEQ ID NO: 813001 - DNA, 15 bp, Homo sapiens
aacttgagtctgccc

SEQ ID NO: 813002 - DNA, 15 bp, Homo sapiens
acttgagtctgccct

SEQ ID NO: 813003 - DNA, 15 bp, Homo sapiens
cttgagtctgccctc

SEQ ID NO: 813004 - DNA, 15 bp, Homo sapiens
ttgagtctgccctcg

SEQ ID NO: 813005 - DNA, 15 bp, Homo sapiens
tgagtctgccctcgt

SEQ ID NO: 813006 - DNA, 15 bp, Homo sapiens
gagtctgccctcgta

SEQ ID NO: 813007 - DNA, 15 bp, Homo sapiens
agtctgccctcgtat

SEQ ID NO: 813008 - DNA, 15 bp, Homo sapiens
gtctgccctcgtatg

SEQ ID NO: 813009 - DNA, 15 bp, Homo sapiens
tctgccctcgtatga

SEQ ID NO: 813010 - DNA, 15 bp, Homo sapiens
ctgccctcgtatgag

SEQ ID NO: 813011 - DNA, 15 bp, Homo sapiens
tgccctcgtatgagg

SEQ ID NO: 813012 - DNA, 15 bp, Homo sapiens
gccctcgtatgaggg

SEQ ID NO: 813013 - DNA, 15 bp, Homo sapiens
ccctcgtatgagggt

SEQ ID NO: 813014 - DNA, 15 bp, Homo sapiens
cctcgtatgagggtg

SEQ ID NO: 813015 - DNA, 15 bp, Homo sapiens
ctcgtatgagggtgt

SEQ ID NO: 813016 - DNA, 15 bp, Homo sapiens
tcgtatgagggtgta

SEQ ID NO: 813017 - DNA, 15 bp, Homo sapiens
cgtatgagggtgtat

SEQ ID NO: 813018 - DNA, 15 bp, Homo sapiens
gtatgagggtgtata

SEQ ID NO: 813019 - DNA, 15 bp, Homo sapiens
tatgagggtgtatac

SEQ ID NO: 813020 - DNA, 15 bp, Homo sapiens
atgagggtgtatacc

SEQ ID NO: 813021 - DNA, 15 bp, Homo sapiens
tgagggtgtatacct

SEQ ID NO: 813022 - DNA, 15 bp, Homo sapiens
gagggtgtatacctg

SEQ ID NO: 813023 - DNA, 15 bp, Homo sapiens
agggtgtatacctgg

SEQ ID NO: 813024 - DNA, 15 bp, Homo sapiens
gggtgtatacctggc

SEQ ID NO: 813025 - DNA, 15 bp, Homo sapiens
ggtgtatacctggcc

SEQ ID NO: 813026 - DNA, 15 bp, Homo sapiens
gtgtatacctggcct

SEQ ID NO: 813027 - DNA, 15 bp, Homo sapiens
tgtatacctggcctc

SEQ ID NO: 813028 - DNA, 15 bp, Homo sapiens
gtatacctggcctcc

SEQ ID NO: 813029 - DNA, 15 bp, Homo sapiens
tatacctggcctccc

SEQ ID NO: 813030 - DNA, 15 bp, Homo sapiens
atacctggcctccct

SEQ ID NO: 813031 - DNA, 15 bp, Homo sapiens
tacctggcctccctc

SEQ ID NO: 813032 - DNA, 15 bp, Homo sapiens
acctggcctccctct

SEQ ID NO: 813033 - DNA, 15 bp, Homo sapiens
cctggcctccctctg

SEQ ID NO: 813034 - DNA, 15 bp, Homo sapiens
ctggcctccctctga

SEQ ID NO: 813035 - DNA, 15 bp, Homo sapiens
tggcctccctctgag

SEQ ID NO: 813036 - DNA, 15 bp, Homo sapiens
ggcctccctctgagg

SEQ ID NO: 813037 - DNA, 15 bp, Homo sapiens
gcctccctctgaggc

SEQ ID NO: 813038 - DNA, 15 bp, Homo sapiens
cctccctctgaggct

SEQ ID NO: 813039 - DNA, 15 bp, Homo sapiens
ctccctctgaggctg

SEQ ID NO: 813040 - DNA, 15 bp, Homo sapiens
tccctctgaggctgg

SEQ ID NO: 813041 - DNA, 15 bp, Homo sapiens
ccctctgaggctggt

SEQ ID NO: 813042 - DNA, 15 bp, Homo sapiens
cctctgaggctggtg

SEQ ID NO: 813043 - DNA, 15 bp, Homo sapiens
ctctgaggctggtga

SEQ ID NO: 813044 - DNA, 15 bp, Homo sapiens
tctgaggctggtgac

SEQ ID NO: 813045 - DNA, 15 bp, Homo sapiens
ctgaggctggtgact

SEQ ID NO: 813046 - DNA, 15 bp, Homo sapiens
tgaggctggtgactc

SEQ ID NO: 813047 - DNA, 15 bp, Homo sapiens
gaggctggtgactcc

SEQ ID NO: 813048 - DNA, 15 bp, Homo sapiens
aggctggtgactcct

SEQ ID NO: 813049 - DNA, 15 bp, Homo sapiens
ggctggtgactcctc

SEQ ID NO: 813050 - DNA, 15 bp, Homo sapiens
gctggtgactcctcc

SEQ ID NO: 813051 - DNA, 15 bp, Homo sapiens
ctggtgactcctccc

SEQ ID NO: 813052 - DNA, 15 bp, Homo sapiens
tggtgactcctccct

SEQ ID NO: 813053 - DNA, 15 bp, Homo sapiens
ggtgactcctccctg

SEQ ID NO: 813054 - DNA, 15 bp, Homo sapiens
gtgactcctccctgc

SEQ ID NO: 813055 - DNA, 15 bp, Homo sapiens
tgactcctccctgct

SEQ ID NO: 813056 - DNA, 15 bp, Homo sapiens
gactcctccctgctg

SEQ ID NO: 813057 - DNA, 15 bp, Homo sapiens
actcctccctgctgg

SEQ ID NO: 813058 - DNA, 15 bp, Homo sapiens
ctcctccctgctggg

SEQ ID NO: 813059 - DNA, 15 bp, Homo sapiens
tcctccctgctgggg

SEQ ID NO: 813060 - DNA, 15 bp, Homo sapiens
cctccctgctggggc

SEQ ID NO: 813061 - DNA, 15 bp, Homo sapiens
ctccctgctggggcc

SEQ ID NO: 813062 - DNA, 15 bp, Homo sapiens
tccctgctggggccc

SEQ ID NO: 813063 - DNA, 15 bp, Homo sapiens
ccctgctggggcccc

SEQ ID NO: 813064 - DNA, 15 bp, Homo sapiens
cctgctggggcccca

SEQ ID NO: 813065 - DNA, 15 bp, Homo sapiens
ctgctggggccccac

SEQ ID NO: 813066 - DNA, 15 bp, Homo sapiens
tgctggggccccaca

SEQ ID NO: 813067 - DNA, 15 bp, Homo sapiens
gctggggccccacag

SEQ ID NO: 813068 - DNA, 15 bp, Homo sapiens
ctggggccccacagg

SEQ ID NO: 813069 - DNA, 15 bp, Homo sapiens
tggggccccacaggt

SEQ ID NO: 813070 - DNA, 15 bp, Homo sapiens
ggggccccacaggtg

SEQ ID NO: 813071 - DNA, 15 bp, Homo sapiens
gggccccacaggtga

SEQ ID NO: 813072 - DNA, 15 bp, Homo sapiens
ggccccacaggtgag

SEQ ID NO: 813073 - DNA, 15 bp, Homo sapiens
gccccacaggtgagg

SEQ ID NO: 813074 - DNA, 15 bp, Homo sapiens
ccccacaggtgaggc

SEQ ID NO: 813075 - DNA, 15 bp, Homo sapiens
cccacaggtgaggca

SEQ ID NO: 813076 - DNA, 15 bp, Homo sapiens
ccacaggtgaggcag

SEQ ID NO: 813077 - DNA, 15 bp, Homo sapiens
cacaggtgaggcaga

SEQ ID NO: 813078 - DNA, 15 bp, Homo sapiens
acaggtgaggcagaa

SEQ ID NO: 813079 - DNA, 15 bp, Homo sapiens
caggtgaggcagaac

SEQ ID NO: 813080 - DNA, 15 bp, Homo sapiens
aggtgaggcagaaca

SEQ ID NO: 813081 - DNA, 15 bp, Homo sapiens
ggtgaggcagaacag

SEQ ID NO: 813082 - DNA, 15 bp, Homo sapiens
gtgaggcagaacagc

SEQ ID NO: 813083 - DNA, 15 bp, Homo sapiens
tgaggcagaacagct

SEQ ID NO: 813084 - DNA, 15 bp, Homo sapiens
gaggcagaacagcta

SEQ ID NO: 813085 - DNA, 15 bp, Homo sapiens
aggcagaacagctag

SEQ ID NO: 813086 - DNA, 15 bp, Homo sapiens
ggcagaacagctaga

SEQ ID NO: 813087 - DNA, 15 bp, Homo sapiens
gcagaacagctagag

SEQ ID NO: 813088 - DNA, 15 bp, Homo sapiens
cagaacagctagagg

SEQ ID NO: 813089 - DNA, 15 bp, Homo sapiens
agaacagctagaggg

SEQ ID NO: 813090 - DNA, 15 bp, Homo sapiens
gaacagctagagggc

SEQ ID NO: 813091 - DNA, 15 bp, Homo sapiens
aacagctagagggcc

SEQ ID NO: 813092 - DNA, 15 bp, Homo sapiens
acagctagagggcct

SEQ ID NO: 813093 - DNA, 15 bp, Homo sapiens
cagctagagggcctc

SEQ ID NO: 813094 - DNA, 15 bp, Homo sapiens
agctagagggcctcc

SEQ ID NO: 813095 - DNA, 15 bp, Homo sapiens
gctagagggcctccc

SEQ ID NO: 813096 - DNA, 15 bp, Homo sapiens
ctagagggcctcccc

SEQ ID NO: 813097 - DNA, 15 bp, Homo sapiens
tagagggcctccccg

SEQ ID NO: 813098 - DNA, 15 bp, Homo sapiens
agagggcctccccgc

SEQ ID NO: 813099 - DNA, 15 bp, Homo sapiens
gagggcctccccgcc

SEQ ID NO: 813100 - DNA, 15 bp, Homo sapiens
agggcctccccgcct

SEQ ID NO: 813101 - DNA, 15 bp, Homo sapiens
gggcctccccgcctg

SEQ ID NO: 813102 - DNA, 15 bp, Homo sapiens
ggcctccccgcctgc

SEQ ID NO: 813103 - DNA, 15 bp, Homo sapiens
gcctccccgcctgcc

SEQ ID NO: 813104 - DNA, 15 bp, Homo sapiens
cctccccgcctgccc

SEQ ID NO: 813105 - DNA, 15 bp, Homo sapiens
ctccccgcctgcccg

SEQ ID NO: 813106 - DNA, 15 bp, Homo sapiens
tccccgcctgcccgc

SEQ ID NO: 813107 - DNA, 15 bp, Homo sapiens
ccccgcctgcccgcc

SEQ ID NO: 813108 - DNA, 15 bp, Homo sapiens
cccgcctgcccgcct

SEQ ID NO: 813109 - DNA, 15 bp, Homo sapiens
ccgcctgcccgcctt

SEQ ID NO: 813110 - DNA, 15 bp, Homo sapiens
cgcctgcccgccttg

SEQ ID NO: 813111 - DNA, 15 bp, Homo sapiens
gcctgcccgccttgg

SEQ ID NO: 813112 - DNA, 15 bp, Homo sapiens
cctgcccgccttggc

SEQ ID NO: 813113 - DNA, 15 bp, Homo sapiens
ctgcccgccttggct

SEQ ID NO: 813114 - DNA, 15 bp, Homo sapiens
tgcccgccttggctg

SEQ ID NO: 813115 - DNA, 15 bp, Homo sapiens
gcccgccttggctgg

SEQ ID NO: 813116 - DNA, 15 bp, Homo sapiens
cccgccttggctggc

SEQ ID NO: 813117 - DNA, 15 bp, Homo sapiens
ccgccttggctggct

SEQ ID NO: 813118 - DNA, 15 bp, Homo sapiens
cgccttggctggcta

SEQ ID NO: 813119 - DNA, 15 bp, Homo sapiens
gccttggctggctag

SEQ ID NO: 813120 - DNA, 15 bp, Homo sapiens
ccttggctggctagc

SEQ ID NO: 813121 - DNA, 15 bp, Homo sapiens
cttggctggctagct

SEQ ID NO: 813122 - DNA, 15 bp, Homo sapiens
ttggctggctagctc

SEQ ID NO: 813123 - DNA, 15 bp, Homo sapiens
tggctggctagctcg

SEQ ID NO: 813124 - DNA, 15 bp, Homo sapiens
ggctggctagctcgc

SEQ ID NO: 813125 - DNA, 15 bp, Homo sapiens
gctggctagctcgcc

SEQ ID NO: 813126 - DNA, 15 bp, Homo sapiens
ctggctagctcgcct

SEQ ID NO: 813127 - DNA, 15 bp, Homo sapiens
tggctagctcgcctc

SEQ ID NO: 813128 - DNA, 15 bp, Homo sapiens
ggctagctcgcctct

SEQ ID NO: 813129 - DNA, 15 bp, Homo sapiens
gctagctcgcctctc

SEQ ID NO: 813130 - DNA, 15 bp, Homo sapiens
ctagctcgcctctcc

SEQ ID NO: 813131 - DNA, 15 bp, Homo sapiens
tagctcgcctctcct

SEQ ID NO: 813132 - DNA, 15 bp, Homo sapiens
agctcgcctctcctg

SEQ ID NO: 813133 - DNA, 15 bp, Homo sapiens
gctcgcctctcctgt

SEQ ID NO: 813134 - DNA, 15 bp, Homo sapiens
ctcgcctctcctgtg

SEQ ID NO: 813135 - DNA, 15 bp, Homo sapiens
tcgcctctcctgtgc

SEQ ID NO: 813136 - DNA, 15 bp, Homo sapiens
cgcctctcctgtgcg

SEQ ID NO: 813137 - DNA, 15 bp, Homo sapiens
gcctctcctgtgcgt

SEQ ID NO: 813138 - DNA, 15 bp, Homo sapiens
cctctcctgtgcgta

SEQ ID NO: 813139 - DNA, 15 bp, Homo sapiens
ctctcctgtgcgtat

SEQ ID NO: 813140 - DNA, 15 bp, Homo sapiens
tctcctgtgcgtatg

SEQ ID NO: 813141 - DNA, 15 bp, Homo sapiens
ctcctgtgcgtatgg

SEQ ID NO: 813142 - DNA, 15 bp, Homo sapiens
tcctgtgcgtatggg

SEQ ID NO: 813143 - DNA, 15 bp, Homo sapiens
cctgtgcgtatggga

SEQ ID NO: 813144 - DNA, 15 bp, Homo sapiens
ctgtgcgtatgggaa

SEQ ID NO: 813145 - DNA, 15 bp, Homo sapiens
tgtgcgtatgggaac

SEQ ID NO: 813146 - DNA, 15 bp, Homo sapiens
gtgcgtatgggaaca

SEQ ID NO: 813147 - DNA, 15 bp, Homo sapiens
tgcgtatgggaacac

SEQ ID NO: 813148 - DNA, 15 bp, Homo sapiens
gcgtatgggaacacc

SEQ ID NO: 813149 - DNA, 15 bp, Homo sapiens
cgtatgggaacacct

SEQ ID NO: 813150 - DNA, 15 bp, Homo sapiens
gtatgggaacaccta

SEQ ID NO: 813151 - DNA, 15 bp, Homo sapiens
tatgggaacacctag

SEQ ID NO: 813152 - DNA, 15 bp, Homo sapiens
atgggaacacctagc

SEQ ID NO: 813153 - DNA, 15 bp, Homo sapiens
tgggaacacctagca

SEQ ID NO: 813154 - DNA, 15 bp, Homo sapiens
gggaacacctagcac

SEQ ID NO: 813155 - DNA, 15 bp, Homo sapiens
ggaacacctagcacg

SEQ ID NO: 813156 - DNA, 15 bp, Homo sapiens
gaacacctagcacgt

SEQ ID NO: 813157 - DNA, 15 bp, Homo sapiens
aacacctagcacgtg

SEQ ID NO: 813158 - DNA, 15 bp, Homo sapiens
acacctagcacgtgc

SEQ ID NO: 813159 - DNA, 15 bp, Homo sapiens
cacctagcacgtgct

SEQ ID NO: 813160 - DNA, 15 bp, Homo sapiens
acctagcacgtgctg

SEQ ID NO: 813161 - DNA, 15 bp, Homo sapiens
cctagcacgtgctgg

SEQ ID NO: 813162 - DNA, 15 bp, Homo sapiens
ctagcacgtgctgga

SEQ ID NO: 813163 - DNA, 15 bp, Homo sapiens
tagcacgtgctggat

SEQ ID NO: 813164 - DNA, 15 bp, Homo sapiens
agcacgtgctggatg

SEQ ID NO: 813165 - DNA, 15 bp, Homo sapiens
gcacgtgctggatgg

SEQ ID NO: 813166 - DNA, 15 bp, Homo sapiens
cacgtgctggatggg

SEQ ID NO: 813167 - DNA, 15 bp, Homo sapiens
acgtgctggatgggc

SEQ ID NO: 813168 - DNA, 15 bp, Homo sapiens
cgtgctggatgggct

SEQ ID NO: 813169 - DNA, 15 bp, Homo sapiens
gtgctggatgggctg

SEQ ID NO: 813170 - DNA, 15 bp, Homo sapiens
tgctggatgggctgc

SEQ ID NO: 813171 - DNA, 15 bp, Homo sapiens
gctggatgggctgcc

SEQ ID NO: 813172 - DNA, 15 bp, Homo sapiens
ctggatgggctgcct

SEQ ID NO: 813173 - DNA, 15 bp, Homo sapiens
tggatgggctgcctc

SEQ ID NO: 813174 - DNA, 15 bp, Homo sapiens
ggatgggctgcctct

SEQ ID NO: 813175 - DNA, 15 bp, Homo sapiens
gatgggctgcctctg

SEQ ID NO: 813176 - DNA, 15 bp, Homo sapiens
atgggctgcctctga

SEQ ID NO: 813177 - DNA, 15 bp, Homo sapiens
tgggctgcctctgac

SEQ ID NO: 813178 - DNA, 15 bp, Homo sapiens
gggctgcctctgact

SEQ ID NO: 813179 - DNA, 15 bp, Homo sapiens
ggctgcctctgactc

SEQ ID NO: 813180 - DNA, 15 bp, Homo sapiens
gctgcctctgactca

SEQ ID NO: 813181 - DNA, 15 bp, Homo sapiens
ctgcctctgactcag

SEQ ID NO: 813182 - DNA, 15 bp, Homo sapiens
tgcctctgactcaga

SEQ ID NO: 813183 - DNA, 15 bp, Homo sapiens
gcctctgactcagag

SEQ ID NO: 813184 - DNA, 15 bp, Homo sapiens
cctctgactcagagg

SEQ ID NO: 813185 - DNA, 15 bp, Homo sapiens
ctctgactcagaggc

SEQ ID NO: 813186 - DNA, 15 bp, Homo sapiens
tctgactcagaggca

SEQ ID NO: 813187 - DNA, 15 bp, Homo sapiens
ctgactcagaggcat

SEQ ID NO: 813188 - DNA, 15 bp, Homo sapiens
tgactcagaggcatg

SEQ ID NO: 813189 - DNA, 15 bp, Homo sapiens
gactcagaggcatgg

SEQ ID NO: 813190 - DNA, 15 bp, Homo sapiens
actcagaggcatggc

SEQ ID NO: 813191 - DNA, 15 bp, Homo sapiens
ctcagaggcatggcc

SEQ ID NO: 813192 - DNA, 15 bp, Homo sapiens
tcagaggcatggccg

SEQ ID NO: 813193 - DNA, 15 bp, Homo sapiens
cagaggcatggccgg

SEQ ID NO: 813194 - DNA, 15 bp, Homo sapiens
agaggcatggccgga

SEQ ID NO: 813195 - DNA, 15 bp, Homo sapiens
gaggcatggccggat

SEQ ID NO: 813196 - DNA, 15 bp, Homo sapiens
aggcatggccggatt

SEQ ID NO: 813197 - DNA, 15 bp, Homo sapiens
ggcatggccggattt

SEQ ID NO: 813198 - DNA, 15 bp, Homo sapiens
gcatggccggatttg

SEQ ID NO: 813199 - DNA, 15 bp, Homo sapiens
catggccggatttgg

SEQ ID NO: 813200 - DNA, 15 bp, Homo sapiens
atggccggatttggc

SEQ ID NO: 813201 - DNA, 15 bp, Homo sapiens
tggccggatttggca

SEQ ID NO: 813202 - DNA, 15 bp, Homo sapiens
ggccggatttggcaa

SEQ ID NO: 813203 - DNA, 15 bp, Homo sapiens
gccggatttggcaac

SEQ ID NO: 813204 - DNA, 15 bp, Homo sapiens
ccggatttggcaact

SEQ ID NO: 813205 - DNA, 15 bp, Homo sapiens
cggatttggcaactc

SEQ ID NO: 813206 - DNA, 15 bp, Homo sapiens
ggatttggcaactca

SEQ ID NO: 813207 - DNA, 15 bp, Homo sapiens
gatttggcaactcaa

SEQ ID NO: 813208 - DNA, 15 bp, Homo sapiens
atttggcaactcaaa

SEQ ID NO: 813209 - DNA, 15 bp, Homo sapiens
tttggcaactcaaaa

SEQ ID NO: 813210 - DNA, 15 bp, Homo sapiens
ttggcaactcaaaac

SEQ ID NO: 813211 - DNA, 15 bp, Homo sapiens
tggcaactcaaaacc

SEQ ID NO: 813212 - DNA, 15 bp, Homo sapiens
ggcaactcaaaacca

SEQ ID NO: 813213 - DNA, 15 bp, Homo sapiens
gcaactcaaaaccac

SEQ ID NO: 813214 - DNA, 15 bp, Homo sapiens
caactcaaaaccacc

SEQ ID NO: 813215 - DNA, 15 bp, Homo sapiens
aactcaaaaccacct

SEQ ID NO: 813216 - DNA, 15 bp, Homo sapiens
actcaaaaccacctt

SEQ ID NO: 813217 - DNA, 15 bp, Homo sapiens
ctcaaaaccaccttg

SEQ ID NO: 813218 - DNA, 15 bp, Homo sapiens
tcaaaaccaccttgc

SEQ ID NO: 813219 - DNA, 15 bp, Homo sapiens
caaaaccaccttgcc

SEQ ID NO: 813220 - DNA, 15 bp, Homo sapiens
aaaaccaccttgcct

SEQ ID NO: 813221 - DNA, 15 bp, Homo sapiens
aaaccaccttgcctc

SEQ ID NO: 813222 - DNA, 15 bp, Homo sapiens
aaccaccttgcctca

SEQ ID NO: 813223 - DNA, 15 bp, Homo sapiens
accaccttgcctcag

SEQ ID NO: 813224 - DNA, 15 bp, Homo sapiens
ccaccttgcctcagc

SEQ ID NO: 813225 - DNA, 15 bp, Homo sapiens
caccttgcctcagct

SEQ ID NO: 813226 - DNA, 15 bp, Homo sapiens
accttgcctcagctg

SEQ ID NO: 813227 - DNA, 15 bp, Homo sapiens
ccttgcctcagctga

SEQ ID NO: 813228 - DNA, 15 bp, Homo sapiens
cttgcctcagctgat

SEQ ID NO: 813229 - DNA, 15 bp, Homo sapiens
ttgcctcagctgatc

SEQ ID NO: 813230 - DNA, 15 bp, Homo sapiens
tgcctcagctgatca

SEQ ID NO: 813231 - DNA, 15 bp, Homo sapiens
gcctcagctgatcag

SEQ ID NO: 813232 - DNA, 15 bp, Homo sapiens
cctcagctgatcaga

SEQ ID NO: 813233 - DNA, 15 bp, Homo sapiens
ctcagctgatcagag

SEQ ID NO: 813234 - DNA, 15 bp, Homo sapiens
tcagctgatcagagt

SEQ ID NO: 813235 - DNA, 15 bp, Homo sapiens
cagctgatcagagtt

SEQ ID NO: 813236 - DNA, 15 bp, Homo sapiens
agctgatcagagttt

SEQ ID NO: 813237 - DNA, 15 bp, Homo sapiens
gctgatcagagtttc

SEQ ID NO: 813238 - DNA, 15 bp, Homo sapiens
ctgatcagagtttct

SEQ ID NO: 813239 - DNA, 15 bp, Homo sapiens
tgatcagagtttctg

SEQ ID NO: 813240 - DNA, 15 bp, Homo sapiens
gatcagagtttctgt

SEQ ID NO: 813241 - DNA, 15 bp, Homo sapiens
atcagagtttctgtg

SEQ ID NO: 813242 - DNA, 15 bp, Homo sapiens
tcagagtttctgtgg

SEQ ID NO: 813243 - DNA, 15 bp, Homo sapiens
cagagtttctgtgga

SEQ ID NO: 813244 - DNA, 15 bp, Homo sapiens
agagtttctgtggaa

SEQ ID NO: 813245 - DNA, 15 bp, Homo sapiens
gagtttctgtggaat

SEQ ID NO: 813246 - DNA, 15 bp, Homo sapiens
agtttctgtggaatt

SEQ ID NO: 813247 - DNA, 15 bp, Homo sapiens
gtttctgtggaattc

SEQ ID NO: 813248 - DNA, 15 bp, Homo sapiens
tttctgtggaattct

SEQ ID NO: 813249 - DNA, 15 bp, Homo sapiens
ttctgtggaattctg

SEQ ID NO: 813250 - DNA, 15 bp, Homo sapiens
tctgtggaattctgt

SEQ ID NO: 813251 - DNA, 15 bp, Homo sapiens
ctgtggaattctgtt

SEQ ID NO: 813252 - DNA, 15 bp, Homo sapiens
tgtggaattctgttt

SEQ ID NO: 813253 - DNA, 15 bp, Homo sapiens
gtggaattctgtttg

SEQ ID NO: 813254 - DNA, 15 bp, Homo sapiens
tggaattctgtttgt

SEQ ID NO: 813255 - DNA, 15 bp, Homo sapiens
ggaattctgtttgtt

SEQ ID NO: 813256 - DNA, 15 bp, Homo sapiens
gaattctgtttgtta

SEQ ID NO: 813257 - DNA, 15 bp, Homo sapiens
aattctgtttgttaa

SEQ ID NO: 813258 - DNA, 15 bp, Homo sapiens
attctgtttgttaaa

SEQ ID NO: 813259 - DNA, 15 bp, Homo sapiens
ttctgtttgttaaat

SEQ ID NO: 813260 - DNA, 15 bp, Homo sapiens
tctgtttgttaaatc

SEQ ID NO: 813261 - DNA, 15 bp, Homo sapiens
ctgtttgttaaatca

SEQ ID NO: 813262 - DNA, 15 bp, Homo sapiens
tgtttgttaaatcaa

SEQ ID NO: 813263 - DNA, 15 bp, Homo sapiens
gtttgttaaatcaaa

SEQ ID NO: 813264 - DNA, 15 bp, Homo sapiens
tttgttaaatcaaat

SEQ ID NO: 813265 - DNA, 15 bp, Homo sapiens
ttgttaaatcaaatt

SEQ ID NO: 813266 - DNA, 15 bp, Homo sapiens
tgttaaatcaaatta

SEQ ID NO: 813267 - DNA, 15 bp, Homo sapiens
gttaaatcaaattag

SEQ ID NO: 813268 - DNA, 15 bp, Homo sapiens
ttaaatcaaattagc

SEQ ID NO: 813269 - DNA, 15 bp, Homo sapiens
taaatcaaattagct

SEQ ID NO: 813270 - DNA, 15 bp, Homo sapiens
aaatcaaattagctg

SEQ ID NO: 813271 - DNA, 15 bp, Homo sapiens
aatcaaattagctgg

SEQ ID NO: 813272 - DNA, 15 bp, Homo sapiens
atcaaattagctggt

SEQ ID NO: 813273 - DNA, 15 bp, Homo sapiens
tcaaattagctggtc

SEQ ID NO: 813274 - DNA, 15 bp, Homo sapiens
caaattagctggtct

SEQ ID NO: 813275 - DNA, 15 bp, Homo sapiens
aaattagctggtctc

SEQ ID NO: 813276 - DNA, 15 bp, Homo sapiens
aattagctggtctct

SEQ ID NO: 813277 - DNA, 15 bp, Homo sapiens
attagctggtctctg

SEQ ID NO: 813278 - DNA, 15 bp, Homo sapiens
ttagctggtctctga

SEQ ID NO: 813279 - DNA, 15 bp, Homo sapiens
tagctggtctctgaa

SEQ ID NO: 813280 - DNA, 15 bp, Homo sapiens
agctggtctctgaat

SEQ ID NO: 813281 - DNA, 15 bp, Homo sapiens
gctggtctctgaatt

SEQ ID NO: 813282 - DNA, 15 bp, Homo sapiens
ctggtctctgaatta

SEQ ID NO: 813283 - DNA, 15 bp, Homo sapiens
tggtctctgaattaa

SEQ ID NO: 813284 - DNA, 15 bp, Homo sapiens
ggtctctgaattaag

SEQ ID NO: 813285 - DNA, 15 bp, Homo sapiens
gtctctgaattaagg

SEQ ID NO: 813286 - DNA, 15 bp, Homo sapiens
tctctgaattaaggg

SEQ ID NO: 813287 - DNA, 15 bp, Homo sapiens
ctctgaattaagggg

SEQ ID NO: 813288 - DNA, 15 bp, Homo sapiens
tctgaattaaggggg

SEQ ID NO: 813289 - DNA, 15 bp, Homo sapiens
ctgaattaaggggga

SEQ ID NO: 813290 - DNA, 15 bp, Homo sapiens
tgaattaagggggag

SEQ ID NO: 813291 - DNA, 15 bp, Homo sapiens
gaattaagggggaga

SEQ ID NO: 813292 - DNA, 15 bp, Homo sapiens
aattaagggggagac

SEQ ID NO: 813293 - DNA, 15 bp, Homo sapiens
attaagggggagacg

SEQ ID NO: 813294 - DNA, 15 bp, Homo sapiens
ttaagggggagacga

SEQ ID NO: 813295 - DNA, 15 bp, Homo sapiens
taagggggagacgac

SEQ ID NO: 813296 - DNA, 15 bp, Homo sapiens
aagggggagacgacc

SEQ ID NO: 813297 - DNA, 15 bp, Homo sapiens
agggggagacgacct

SEQ ID NO: 813298 - DNA, 15 bp, Homo sapiens
gggggagacgacctt

SEQ ID NO: 813299 - DNA, 15 bp, Homo sapiens
ggggagacgaccttc

SEQ ID NO: 813300 - DNA, 15 bp, Homo sapiens
gggagacgaccttct

SEQ ID NO: 813301 - DNA, 15 bp, Homo sapiens
ggagacgaccttctc

SEQ ID NO: 813302 - DNA, 15 bp, Homo sapiens
gagacgaccttctct

SEQ ID NO: 813303 - DNA, 15 bp, Homo sapiens
agacgaccttctcta

SEQ ID NO: 813304 - DNA, 15 bp, Homo sapiens
gacgaccttctctaa

SEQ ID NO: 813305 - DNA, 15 bp, Homo sapiens
acgaccttctctaag

SEQ ID NO: 813306 - DNA, 15 bp, Homo sapiens
cgaccttctctaaga

SEQ ID NO: 813307 - DNA, 15 bp, Homo sapiens
gaccttctctaagat

SEQ ID NO: 813308 - DNA, 15 bp, Homo sapiens
accttctctaagatg

SEQ ID NO: 813309 - DNA, 15 bp, Homo sapiens
ccttctctaagatga

SEQ ID NO: 813310 - DNA, 15 bp, Homo sapiens
cttctctaagatgaa

SEQ ID NO: 813311 - DNA, 15 bp, Homo sapiens
ttctctaagatgaac

SEQ ID NO: 813312 - DNA, 15 bp, Homo sapiens
tctctaagatgaaca

SEQ ID NO: 813313 - DNA, 15 bp, Homo sapiens
ctctaagatgaacag

SEQ ID NO: 813314 - DNA, 15 bp, Homo sapiens
tctaagatgaacagg

SEQ ID NO: 813315 - DNA, 15 bp, Homo sapiens
ctaagatgaacaggg

SEQ ID NO: 813316 - DNA, 15 bp, Homo sapiens
taagatgaacagggt

SEQ ID NO: 813317 - DNA, 15 bp, Homo sapiens
aagatgaacagggtt

SEQ ID NO: 813318 - DNA, 15 bp, Homo sapiens
agatgaacagggttc

SEQ ID NO: 813319 - DNA, 15 bp, Homo sapiens
gatgaacagggttcg

SEQ ID NO: 813320 - DNA, 15 bp, Homo sapiens
atgaacagggttcgc

SEQ ID NO: 813321 - DNA, 15 bp, Homo sapiens
tgaacagggttcgcc

SEQ ID NO: 813322 - DNA, 15 bp, Homo sapiens
gaacagggttcgccc

SEQ ID NO: 813323 - DNA, 15 bp, Homo sapiens
aacagggttcgcccc

SEQ ID NO: 813324 - DNA, 15 bp, Homo sapiens
acagggttcgcccca

SEQ ID NO: 813325 - DNA, 15 bp, Homo sapiens
cagggttcgccccag

SEQ ID NO: 813326 - DNA, 15 bp, Homo sapiens
agggttcgccccagt

SEQ ID NO: 813327 - DNA, 15 bp, Homo sapiens
gggttcgccccagtc

SEQ ID NO: 813328 - DNA, 15 bp, Homo sapiens
ggttcgccccagtcc

SEQ ID NO: 813329 - DNA, 15 bp, Homo sapiens
gttcgccccagtcct

SEQ ID NO: 813330 - DNA, 15 bp, Homo sapiens
ttcgccccagtcctc

SEQ ID NO: 813331 - DNA, 15 bp, Homo sapiens
tcgccccagtcctcc

SEQ ID NO: 813332 - DNA, 15 bp, Homo sapiens
cgccccagtcctcct

SEQ ID NO: 813333 - DNA, 15 bp, Homo sapiens
gccccagtcctcctg

SEQ ID NO: 813334 - DNA, 15 bp, Homo sapiens
ccccagtcctcctgc

SEQ ID NO: 813335 - DNA, 15 bp, Homo sapiens
cccagtcctcctgcc

SEQ ID NO: 813336 - DNA, 15 bp, Homo sapiens
ccagtcctcctgcct

SEQ ID NO: 813337 - DNA, 15 bp, Homo sapiens
cagtcctcctgcctg

SEQ ID NO: 813338 - DNA, 15 bp, Homo sapiens
agtcctcctgcctgg

SEQ ID NO: 813339 - DNA, 15 bp, Homo sapiens
gtcctcctgcctgga

SEQ ID NO: 813340 - DNA, 15 bp, Homo sapiens
tcctcctgcctggag

SEQ ID NO: 813341 - DNA, 15 bp, Homo sapiens
cctcctgcctggaga

SEQ ID NO: 813342 - DNA, 15 bp, Homo sapiens
ctcctgcctggagac

SEQ ID NO: 813343 - DNA, 15 bp, Homo sapiens
tcctgcctggagaca

SEQ ID NO: 813344 - DNA, 15 bp, Homo sapiens
cctgcctggagacag

SEQ ID NO: 813345 - DNA, 15 bp, Homo sapiens
ctgcctggagacagt

SEQ ID NO: 813346 - DNA, 15 bp, Homo sapiens
tgcctggagacagtt

SEQ ID NO: 813347 - DNA, 15 bp, Homo sapiens
gcctggagacagttg

SEQ ID NO: 813348 - DNA, 15 bp, Homo sapiens
cctggagacagttga

SEQ ID NO: 813349 - DNA, 15 bp, Homo sapiens
ctggagacagttgat

SEQ ID NO: 813350 - DNA, 15 bp, Homo sapiens
tggagacagttgatg

SEQ ID NO: 813351 - DNA, 15 bp, Homo sapiens
ggagacagttgatgt

SEQ ID NO: 813352 - DNA, 15 bp, Homo sapiens
gagacagttgatgtg

SEQ ID NO: 813353 - DNA, 15 bp, Homo sapiens
agacagttgatgtgt

SEQ ID NO: 813354 - DNA, 15 bp, Homo sapiens
gacagttgatgtgtc

SEQ ID NO: 813355 - DNA, 15 bp, Homo sapiens
acagttgatgtgtca

SEQ ID NO: 813356 - DNA, 15 bp, Homo sapiens
cagttgatgtgtcat

SEQ ID NO: 813357 - DNA, 15 bp, Homo sapiens
agttgatgtgtcatg

SEQ ID NO: 813358 - DNA, 15 bp, Homo sapiens
gttgatgtgtcatgc

SEQ ID NO: 813359 - DNA, 15 bp, Homo sapiens
ttgatgtgtcatgca

SEQ ID NO: 813360 - DNA, 15 bp, Homo sapiens
tgatgtgtcatgcag

SEQ ID NO: 813361 - DNA, 15 bp, Homo sapiens
gatgtgtcatgcaga

SEQ ID NO: 813362 - DNA, 15 bp, Homo sapiens
atgtgtcatgcagag

SEQ ID NO: 813363 - DNA, 15 bp, Homo sapiens
tgtgtcatgcagagc

SEQ ID NO: 813364 - DNA, 15 bp, Homo sapiens
gtgtcatgcagagct

SEQ ID NO: 813365 - DNA, 15 bp, Homo sapiens
tgtcatgcagagctc

SEQ ID NO: 813366 - DNA, 15 bp, Homo sapiens
gtcatgcagagctct

SEQ ID NO: 813367 - DNA, 15 bp, Homo sapiens
tcatgcagagctctt

SEQ ID NO: 813368 - DNA, 15 bp, Homo sapiens
catgcagagctctta

SEQ ID NO: 813369 - DNA, 15 bp, Homo sapiens
atgcagagctcttac

SEQ ID NO: 813370 - DNA, 15 bp, Homo sapiens
tgcagagctcttact

SEQ ID NO: 813371 - DNA, 15 bp, Homo sapiens
gcagagctcttactt

SEQ ID NO: 813372 - DNA, 15 bp, Homo sapiens
cagagctcttacttc

SEQ ID NO: 813373 - DNA, 15 bp, Homo sapiens
agagctcttacttct

SEQ ID NO: 813374 - DNA, 15 bp, Homo sapiens
gagctcttacttctc

SEQ ID NO: 813375 - DNA, 15 bp, Homo sapiens
agctcttacttctcc

SEQ ID NO: 813376 - DNA, 15 bp, Homo sapiens
gctcttacttctcca

SEQ ID NO: 813377 - DNA, 15 bp, Homo sapiens
ctcttacttctccag

SEQ ID NO: 813378 - DNA, 15 bp, Homo sapiens
tcttacttctccagc

SEQ ID NO: 813379 - DNA, 15 bp, Homo sapiens
cttacttctccagca

SEQ ID NO: 813380 - DNA, 15 bp, Homo sapiens
ttacttctccagcaa

SEQ ID NO: 813381 - DNA, 15 bp, Homo sapiens
tacttctccagcaac

SEQ ID NO: 813382 - DNA, 15 bp, Homo sapiens
acttctccagcaaca

SEQ ID NO: 813383 - DNA, 15 bp, Homo sapiens
cttctccagcaacac

SEQ ID NO: 813384 - DNA, 15 bp, Homo sapiens
ttctccagcaacact

SEQ ID NO: 813385 - DNA, 15 bp, Homo sapiens
tctccagcaacactc

SEQ ID NO: 813386 - DNA, 15 bp, Homo sapiens
ctccagcaacactct

SEQ ID NO: 813387 - DNA, 15 bp, Homo sapiens
tccagcaacactctt

SEQ ID NO: 813388 - DNA, 15 bp, Homo sapiens
ccagcaacactcttc

SEQ ID NO: 813389 - DNA, 15 bp, Homo sapiens
cagcaacactcttca

SEQ ID NO: 813390 - DNA, 15 bp, Homo sapiens
agcaacactcttcag

SEQ ID NO: 813391 - DNA, 15 bp, Homo sapiens
gcaacactcttcagt

SEQ ID NO: 813392 - DNA, 15 bp, Homo sapiens
caacactcttcagta

SEQ ID NO: 813393 - DNA, 15 bp, Homo sapiens
aacactcttcagtac

SEQ ID NO: 813394 - DNA, 15 bp, Homo sapiens
acactcttcagtaca

SEQ ID NO: 813395 - DNA, 15 bp, Homo sapiens
cactcttcagtacat

SEQ ID NO: 813396 - DNA, 15 bp, Homo sapiens
actcttcagtacata

SEQ ID NO: 813397 - DNA, 15 bp, Homo sapiens
ctcttcagtacataa

SEQ ID NO: 813398 - DNA, 15 bp, Homo sapiens
tcttcagtacataat

SEQ ID NO: 813399 - DNA, 15 bp, Homo sapiens
cttcagtacataata

SEQ ID NO: 813400 - DNA, 15 bp, Homo sapiens
ttcagtacataataa

SEQ ID NO: 813401 - DNA, 15 bp, Homo sapiens
tcagtacataataag

SEQ ID NO: 813402 - DNA, 15 bp, Homo sapiens
cagtacataataagc

SEQ ID NO: 813403 - DNA, 15 bp, Homo sapiens
agtacataataagct

SEQ ID NO: 813404 - DNA, 15 bp, Homo sapiens
gtacataataagctt

SEQ ID NO: 813405 - DNA, 15 bp, Homo sapiens
tacataataagctta

SEQ ID NO: 813406 - DNA, 15 bp, Homo sapiens
acataataagcttaa

SEQ ID NO: 813407 - DNA, 15 bp, Homo sapiens
cataataagcttaac

SEQ ID NO: 813408 - DNA, 15 bp, Homo sapiens
ataataagcttaact

SEQ ID NO: 813409 - DNA, 15 bp, Homo sapiens
taataagcttaactg

SEQ ID NO: 813410 - DNA, 15 bp, Homo sapiens
aataagcttaactga

SEQ ID NO: 813411 - DNA, 15 bp, Homo sapiens
ataagcttaactgat

SEQ ID NO: 813412 - DNA, 15 bp, Homo sapiens
taagcttaactgata

SEQ ID NO: 813413 - DNA, 15 bp, Homo sapiens
aagcttaactgataa

SEQ ID NO: 813414 - DNA, 15 bp, Homo sapiens
agcttaactgataaa

SEQ ID NO: 813415 - DNA, 15 bp, Homo sapiens
gcttaactgataaac

SEQ ID NO: 813416 - DNA, 15 bp, Homo sapiens
cttaactgataaaca

SEQ ID NO: 813417 - DNA, 15 bp, Homo sapiens
ttaactgataaacag

SEQ ID NO: 813418 - DNA, 15 bp, Homo sapiens
taactgataaacaga

SEQ ID NO: 813419 - DNA, 15 bp, Homo sapiens
aactgataaacagaa

SEQ ID NO: 813420 - DNA, 15 bp, Homo sapiens
actgataaacagaat

SEQ ID NO: 813421 - DNA, 15 bp, Homo sapiens
ctgataaacagaata

SEQ ID NO: 813422 - DNA, 15 bp, Homo sapiens
tgataaacagaatat

SEQ ID NO: 813423 - DNA, 15 bp, Homo sapiens
gataaacagaatatt

SEQ ID NO: 813424 - DNA, 15 bp, Homo sapiens
ataaacagaatattt

SEQ ID NO: 813425 - DNA, 15 bp, Homo sapiens
taaacagaatattta

SEQ ID NO: 813426 - DNA, 15 bp, Homo sapiens
aaacagaatatttag

SEQ ID NO: 813427 - DNA, 15 bp, Homo sapiens
aacagaatatttaga

SEQ ID NO: 813428 - DNA, 15 bp, Homo sapiens
acagaatatttagaa

SEQ ID NO: 813429 - DNA, 15 bp, Homo sapiens
cagaatatttagaaa

SEQ ID NO: 813430 - DNA, 15 bp, Homo sapiens
agaatatttagaaag

SEQ ID NO: 813431 - DNA, 15 bp, Homo sapiens
gaatatttagaaagg

SEQ ID NO: 813432 - DNA, 15 bp, Homo sapiens
aatatttagaaaggt

SEQ ID NO: 813433 - DNA, 15 bp, Homo sapiens
atatttagaaaggtg

SEQ ID NO: 813434 - DNA, 15 bp, Homo sapiens
tatttagaaaggtga

SEQ ID NO: 813435 - DNA, 15 bp, Homo sapiens
atttagaaaggtgag

SEQ ID NO: 813436 - DNA, 15 bp, Homo sapiens
tttagaaaggtgaga

SEQ ID NO: 813437 - DNA, 15 bp, Homo sapiens
ttagaaaggtgagac

SEQ ID NO: 813438 - DNA, 15 bp, Homo sapiens
tagaaaggtgagact

SEQ ID NO: 813439 - DNA, 15 bp, Homo sapiens
agaaaggtgagactt

SEQ ID NO: 813440 - DNA, 15 bp, Homo sapiens
gaaaggtgagacttg

SEQ ID NO: 813441 - DNA, 15 bp, Homo sapiens
aaaggtgagacttgg

SEQ ID NO: 813442 - DNA, 15 bp, Homo sapiens
aaggtgagacttggg

SEQ ID NO: 813443 - DNA, 15 bp, Homo sapiens
aggtgagacttgggc

SEQ ID NO: 813444 - DNA, 15 bp, Homo sapiens
ggtgagacttgggct

SEQ ID NO: 813445 - DNA, 15 bp, Homo sapiens
gtgagacttgggctt

SEQ ID NO: 813446 - DNA, 15 bp, Homo sapiens
tgagacttgggctta

SEQ ID NO: 813447 - DNA, 15 bp, Homo sapiens
gagacttgggcttac

SEQ ID NO: 813448 - DNA, 15 bp, Homo sapiens
agacttgggcttacc

SEQ ID NO: 813449 - DNA, 15 bp, Homo sapiens
gacttgggcttacca

SEQ ID NO: 813450 - DNA, 15 bp, Homo sapiens
acttgggcttaccat

SEQ ID NO: 813451 - DNA, 15 bp, Homo sapiens
cttgggcttaccatt

SEQ ID NO: 813452 - DNA, 15 bp, Homo sapiens
ttgggcttaccattg

SEQ ID NO: 813453 - DNA, 15 bp, Homo sapiens
tgggcttaccattgg

SEQ ID NO: 813454 - DNA, 15 bp, Homo sapiens
gggcttaccattggg

SEQ ID NO: 813455 - DNA, 15 bp, Homo sapiens
ggcttaccattgggt

SEQ ID NO: 813456 - DNA, 15 bp, Homo sapiens
gcttaccattgggtt

SEQ ID NO: 813457 - DNA, 15 bp, Homo sapiens
cttaccattgggttt

SEQ ID NO: 813458 - DNA, 15 bp, Homo sapiens
ttaccattgggttta

SEQ ID NO: 813459 - DNA, 15 bp, Homo sapiens
taccattgggtttaa

SEQ ID NO: 813460 - DNA, 15 bp, Homo sapiens
accattgggtttaaa

SEQ ID NO: 813461 - DNA, 15 bp, Homo sapiens
ccattgggtttaaat

SEQ ID NO: 813462 - DNA, 15 bp, Homo sapiens
cattgggtttaaatc

SEQ ID NO: 813463 - DNA, 15 bp, Homo sapiens
attgggtttaaatca

SEQ ID NO: 813464 - DNA, 15 bp, Homo sapiens
ttgggtttaaatcat

SEQ ID NO: 813465 - DNA, 15 bp, Homo sapiens
tgggtttaaatcata

SEQ ID NO: 813466 - DNA, 15 bp, Homo sapiens
gggtttaaatcatag

SEQ ID NO: 813467 - DNA, 15 bp, Homo sapiens
ggtttaaatcatagg

SEQ ID NO: 813468 - DNA, 15 bp, Homo sapiens
gtttaaatcataggg

SEQ ID NO: 813469 - DNA, 15 bp, Homo sapiens
tttaaatcataggga

SEQ ID NO: 813470 - DNA, 15 bp, Homo sapiens
ttaaatcatagggac

SEQ ID NO: 813471 - DNA, 15 bp, Homo sapiens
taaatcatagggacc

SEQ ID NO: 813472 - DNA, 15 bp, Homo sapiens
aaatcatagggacct

SEQ ID NO: 813473 - DNA, 15 bp, Homo sapiens
aatcatagggaccta

SEQ ID NO: 813474 - DNA, 15 bp, Homo sapiens
atcatagggacctag

SEQ ID NO: 813475 - DNA, 15 bp, Homo sapiens
tcatagggacctagg

SEQ ID NO: 813476 - DNA, 15 bp, Homo sapiens
catagggacctaggg

SEQ ID NO: 813477 - DNA, 15 bp, Homo sapiens
atagggacctagggc

SEQ ID NO: 813478 - DNA, 15 bp, Homo sapiens
tagggacctagggcg

SEQ ID NO: 813479 - DNA, 15 bp, Homo sapiens
agggacctagggcga

SEQ ID NO: 813480 - DNA, 15 bp, Homo sapiens
gggacctagggcgag

SEQ ID NO: 813481 - DNA, 15 bp, Homo sapiens
ggacctagggcgagg

SEQ ID NO: 813482 - DNA, 15 bp, Homo sapiens
gacctagggcgaggg

SEQ ID NO: 813483 - DNA, 15 bp, Homo sapiens
acctagggcgagggt

SEQ ID NO: 813484 - DNA, 15 bp, Homo sapiens
cctagggcgagggtt

SEQ ID NO: 813485 - DNA, 15 bp, Homo sapiens
ctagggcgagggttc

SEQ ID NO: 813486 - DNA, 15 bp, Homo sapiens
tagggcgagggttca

SEQ ID NO: 813487 - DNA, 15 bp, Homo sapiens
agggcgagggttcag

SEQ ID NO: 813488 - DNA, 15 bp, Homo sapiens
gggcgagggttcagg

SEQ ID NO: 813489 - DNA, 15 bp, Homo sapiens
ggcgagggttcaggg

SEQ ID NO: 813490 - DNA, 15 bp, Homo sapiens
gcgagggttcagggc

SEQ ID NO: 813491 - DNA, 15 bp, Homo sapiens
cgagggttcagggct

SEQ ID NO: 813492 - DNA, 15 bp, Homo sapiens
gagggttcagggctt

SEQ ID NO: 813493 - DNA, 15 bp, Homo sapiens
agggttcagggcttc

SEQ ID NO: 813494 - DNA, 15 bp, Homo sapiens
gggttcagggcttct

SEQ ID NO: 813495 - DNA, 15 bp, Homo sapiens
ggttcagggcttctc

SEQ ID NO: 813496 - DNA, 15 bp, Homo sapiens
gttcagggcttctct

SEQ ID NO: 813497 - DNA, 15 bp, Homo sapiens
ttcagggcttctctg

SEQ ID NO: 813498 - DNA, 15 bp, Homo sapiens
tcagggcttctctgg

SEQ ID NO: 813499 - DNA, 15 bp, Homo sapiens
cagggcttctctgga

SEQ ID NO: 813500 - DNA, 15 bp, Homo sapiens
agggcttctctggag

SEQ ID NO: 813501 - DNA, 15 bp, Homo sapiens
gggcttctctggagc

SEQ ID NO: 813502 - DNA, 15 bp, Homo sapiens
ggcttctctggagca

SEQ ID NO: 813503 - DNA, 15 bp, Homo sapiens
gcttctctggagcag

SEQ ID NO: 813504 - DNA, 15 bp, Homo sapiens
cttctctggagcaga

SEQ ID NO: 813505 - DNA, 15 bp, Homo sapiens
ttctctggagcagat

SEQ ID NO: 813506 - DNA, 15 bp, Homo sapiens
tctctggagcagata

SEQ ID NO: 813507 - DNA, 15 bp, Homo sapiens
ctctggagcagatat

SEQ ID NO: 813508 - DNA, 15 bp, Homo sapiens
tctggagcagatatt

SEQ ID NO: 813509 - DNA, 15 bp, Homo sapiens
ctggagcagatattg

SEQ ID NO: 813510 - DNA, 15 bp, Homo sapiens
tggagcagatattgt

SEQ ID NO: 813511 - DNA, 15 bp, Homo sapiens
ggagcagatattgtc

SEQ ID NO: 813512 - DNA, 15 bp, Homo sapiens
gagcagatattgtca

SEQ ID NO: 813513 - DNA, 15 bp, Homo sapiens
agcagatattgtcaa

SEQ ID NO: 813514 - DNA, 15 bp, Homo sapiens
gcagatattgtcaag

SEQ ID NO: 813515 - DNA, 15 bp, Homo sapiens
cagatattgtcaagt

SEQ ID NO: 813516 - DNA, 15 bp, Homo sapiens
agatattgtcaagtt

SEQ ID NO: 813517 - DNA, 15 bp, Homo sapiens
gatattgtcaagttc

SEQ ID NO: 813518 - DNA, 15 bp, Homo sapiens
atattgtcaagttca

SEQ ID NO: 813519 - DNA, 15 bp, Homo sapiens
tattgtcaagttcat

SEQ ID NO: 813520 - DNA, 15 bp, Homo sapiens
attgtcaagttcatg

SEQ ID NO: 813521 - DNA, 15 bp, Homo sapiens
ttgtcaagttcatgg

SEQ ID NO: 813522 - DNA, 15 bp, Homo sapiens
tgtcaagttcatggc

SEQ ID NO: 813523 - DNA, 15 bp, Homo sapiens
gtcaagttcatggcc

SEQ ID NO: 813524 - DNA, 15 bp, Homo sapiens
tcaagttcatggcct

SEQ ID NO: 813525 - DNA, 15 bp, Homo sapiens
caagttcatggcctt

SEQ ID NO: 813526 - DNA, 15 bp, Homo sapiens
aagttcatggcctta

SEQ ID NO: 813527 - DNA, 15 bp, Homo sapiens
agttcatggccttag

SEQ ID NO: 813528 - DNA, 15 bp, Homo sapiens
gttcatggccttagg

SEQ ID NO: 813529 - DNA, 15 bp, Homo sapiens
ttcatggccttaggt

SEQ ID NO: 813530 - DNA, 15 bp, Homo sapiens
tcatggccttaggta

SEQ ID NO: 813531 - DNA, 15 bp, Homo sapiens
catggccttaggtag

SEQ ID NO: 813532 - DNA, 15 bp, Homo sapiens
atggccttaggtagc

SEQ ID NO: 813533 - DNA, 15 bp, Homo sapiens
tggccttaggtagca

SEQ ID NO: 813534 - DNA, 15 bp, Homo sapiens
ggccttaggtagcat

SEQ ID NO: 813535 - DNA, 15 bp, Homo sapiens
gccttaggtagcatg

SEQ ID NO: 813536 - DNA, 15 bp, Homo sapiens
ccttaggtagcatgt

SEQ ID NO: 813537 - DNA, 15 bp, Homo sapiens
cttaggtagcatgta

SEQ ID NO: 813538 - DNA, 15 bp, Homo sapiens
ttaggtagcatgtat

SEQ ID NO: 813539 - DNA, 15 bp, Homo sapiens
taggtagcatgtatc

SEQ ID NO: 813540 - DNA, 15 bp, Homo sapiens
aggtagcatgtatct

SEQ ID NO: 813541 - DNA, 15 bp, Homo sapiens
ggtagcatgtatctg

SEQ ID NO: 813542 - DNA, 15 bp, Homo sapiens
gtagcatgtatctgg

SEQ ID NO: 813543 - DNA, 15 bp, Homo sapiens
tagcatgtatctggt

SEQ ID NO: 813544 - DNA, 15 bp, Homo sapiens
agcatgtatctggtc

SEQ ID NO: 813545 - DNA, 15 bp, Homo sapiens
gcatgtatctggtct

SEQ ID NO: 813546 - DNA, 15 bp, Homo sapiens
catgtatctggtctt

SEQ ID NO: 813547 - DNA, 15 bp, Homo sapiens
atgtatctggtctta

SEQ ID NO: 813548 - DNA, 15 bp, Homo sapiens
tgtatctggtcttaa

SEQ ID NO: 813549 - DNA, 15 bp, Homo sapiens
gtatctggtcttaac

SEQ ID NO: 813550 - DNA, 15 bp, Homo sapiens
tatctggtcttaact

SEQ ID NO: 813551 - DNA, 15 bp, Homo sapiens
atctggtcttaactc

SEQ ID NO: 813552 - DNA, 15 bp, Homo sapiens
tctggtcttaactct

SEQ ID NO: 813553 - DNA, 15 bp, Homo sapiens
ctggtcttaactctg

SEQ ID NO: 813554 - DNA, 15 bp, Homo sapiens
tggtcttaactctga

SEQ ID NO: 813555 - DNA, 15 bp, Homo sapiens
ggtcttaactctgat

SEQ ID NO: 813556 - DNA, 15 bp, Homo sapiens
gtcttaactctgatt

SEQ ID NO: 813557 - DNA, 15 bp, Homo sapiens
tcttaactctgattg

SEQ ID NO: 813558 - DNA, 15 bp, Homo sapiens
cttaactctgattgt

SEQ ID NO: 813559 - DNA, 15 bp, Homo sapiens
ttaactctgattgta

SEQ ID NO: 813560 - DNA, 15 bp, Homo sapiens
taactctgattgtag

SEQ ID NO: 813561 - DNA, 15 bp, Homo sapiens
aactctgattgtagc

SEQ ID NO: 813562 - DNA, 15 bp, Homo sapiens
actctgattgtagca

SEQ ID NO: 813563 - DNA, 15 bp, Homo sapiens
ctctgattgtagcaa

SEQ ID NO: 813564 - DNA, 15 bp, Homo sapiens
tctgattgtagcaaa

SEQ ID NO: 813565 - DNA, 15 bp, Homo sapiens
ctgattgtagcaaaa

SEQ ID NO: 813566 - DNA, 15 bp, Homo sapiens
tgattgtagcaaaag

SEQ ID NO: 813567 - DNA, 15 bp, Homo sapiens
gattgtagcaaaagt

SEQ ID NO: 813568 - DNA, 15 bp, Homo sapiens
attgtagcaaaagtt

SEQ ID NO: 813569 - DNA, 15 bp, Homo sapiens
ttgtagcaaaagttc

SEQ ID NO: 813570 - DNA, 15 bp, Homo sapiens
tgtagcaaaagttct

SEQ ID NO: 813571 - DNA, 15 bp, Homo sapiens
gtagcaaaagttctg

SEQ ID NO: 813572 - DNA, 15 bp, Homo sapiens
tagcaaaagttctga

SEQ ID NO: 813573 - DNA, 15 bp, Homo sapiens
agcaaaagttctgag

SEQ ID NO: 813574 - DNA, 15 bp, Homo sapiens
gcaaaagttctgaga

SEQ ID NO: 813575 - DNA, 15 bp, Homo sapiens
caaaagttctgagag

SEQ ID NO: 813576 - DNA, 15 bp, Homo sapiens
aaaagttctgagagg

SEQ ID NO: 813577 - DNA, 15 bp, Homo sapiens
aaagttctgagagga

SEQ ID NO: 813578 - DNA, 15 bp, Homo sapiens
aagttctgagaggag

SEQ ID NO: 813579 - DNA, 15 bp, Homo sapiens
agttctgagaggagc

SEQ ID NO: 813580 - DNA, 15 bp, Homo sapiens
gttctgagaggagct

SEQ ID NO: 813581 - DNA, 15 bp, Homo sapiens
ttctgagaggagctg

SEQ ID NO: 813582 - DNA, 15 bp, Homo sapiens
tctgagaggagctga

SEQ ID NO: 813583 - DNA, 15 bp, Homo sapiens
ctgagaggagctgag

SEQ ID NO: 813584 - DNA, 15 bp, Homo sapiens
tgagaggagctgagc

SEQ ID NO: 813585 - DNA, 15 bp, Homo sapiens
gagaggagctgagcc

SEQ ID NO: 813586 - DNA, 15 bp, Homo sapiens
agaggagctgagccc

SEQ ID NO: 813587 - DNA, 15 bp, Homo sapiens
gaggagctgagccct

SEQ ID NO: 813588 - DNA, 15 bp, Homo sapiens
aggagctgagccctg

SEQ ID NO: 813589 - DNA, 15 bp, Homo sapiens
ggagctgagccctgt

SEQ ID NO: 813590 - DNA, 15 bp, Homo sapiens
gagctgagccctgtt

SEQ ID NO: 813591 - DNA, 15 bp, Homo sapiens
agctgagccctgttg

SEQ ID NO: 813592 - DNA, 15 bp, Homo sapiens
gctgagccctgttgt

SEQ ID NO: 813593 - DNA, 15 bp, Homo sapiens
ctgagccctgttgtg

SEQ ID NO: 813594 - DNA, 15 bp, Homo sapiens
tgagccctgttgtgg

SEQ ID NO: 813595 - DNA, 15 bp, Homo sapiens
gagccctgttgtggc

SEQ ID NO: 813596 - DNA, 15 bp, Homo sapiens
agccctgttgtggcc

SEQ ID NO: 813597 - DNA, 15 bp, Homo sapiens
gccctgttgtggccc

SEQ ID NO: 813598 - DNA, 15 bp, Homo sapiens
ccctgttgtggccca

SEQ ID NO: 813599 - DNA, 15 bp, Homo sapiens
cctgttgtggcccat

SEQ ID NO: 813600 - DNA, 15 bp, Homo sapiens
ctgttgtggcccatt

SEQ ID NO: 813601 - DNA, 15 bp, Homo sapiens
tgttgtggcccatta

SEQ ID NO: 813602 - DNA, 15 bp, Homo sapiens
gttgtggcccattaa

SEQ ID NO: 813603 - DNA, 15 bp, Homo sapiens
ttgtggcccattaaa

SEQ ID NO: 813604 - DNA, 15 bp, Homo sapiens
tgtggcccattaaag

SEQ ID NO: 813605 - DNA, 15 bp, Homo sapiens
gtggcccattaaaga

SEQ ID NO: 813606 - DNA, 15 bp, Homo sapiens
tggcccattaaagaa

SEQ ID NO: 813607 - DNA, 15 bp, Homo sapiens
ggcccattaaagaac

SEQ ID NO: 813608 - DNA, 15 bp, Homo sapiens
gcccattaaagaaca

SEQ ID NO: 813609 - DNA, 15 bp, Homo sapiens
cccattaaagaacag

SEQ ID NO: 813610 - DNA, 15 bp, Homo sapiens
ccattaaagaacagg

SEQ ID NO: 813611 - DNA, 15 bp, Homo sapiens
cattaaagaacaggg

SEQ ID NO: 813612 - DNA, 15 bp, Homo sapiens
attaaagaacagggt

SEQ ID NO: 813613 - DNA, 15 bp, Homo sapiens
ttaaagaacagggtc

SEQ ID NO: 813614 - DNA, 15 bp, Homo sapiens
taaagaacagggtcc

SEQ ID NO: 813615 - DNA, 15 bp, Homo sapiens
aaagaacagggtcct

SEQ ID NO: 813616 - DNA, 15 bp, Homo sapiens
aagaacagggtcctc

SEQ ID NO: 813617 - DNA, 15 bp, Homo sapiens
agaacagggtcctca

SEQ ID NO: 813618 - DNA, 15 bp, Homo sapiens
gaacagggtcctcag

SEQ ID NO: 813619 - DNA, 15 bp, Homo sapiens
aacagggtcctcagg

SEQ ID NO: 813620 - DNA, 15 bp, Homo sapiens
acagggtcctcaggc

SEQ ID NO: 813621 - DNA, 15 bp, Homo sapiens
cagggtcctcaggcc

SEQ ID NO: 813622 - DNA, 15 bp, Homo sapiens
agggtcctcaggccc

SEQ ID NO: 813623 - DNA, 15 bp, Homo sapiens
gggtcctcaggccct

SEQ ID NO: 813624 - DNA, 15 bp, Homo sapiens
ggtcctcaggccctg

SEQ ID NO: 813625 - DNA, 15 bp, Homo sapiens
gtcctcaggccctgc

SEQ ID NO: 813626 - DNA, 15 bp, Homo sapiens
tcctcaggccctgcc

SEQ ID NO: 813627 - DNA, 15 bp, Homo sapiens
cctcaggccctgccc

SEQ ID NO: 813628 - DNA, 15 bp, Homo sapiens
ctcaggccctgcccg

SEQ ID NO: 813629 - DNA, 15 bp, Homo sapiens
tcaggccctgcccgc

SEQ ID NO: 813630 - DNA, 15 bp, Homo sapiens
caggccctgcccgct

SEQ ID NO: 813631 - DNA, 15 bp, Homo sapiens
aggccctgcccgctt

SEQ ID NO: 813632 - DNA, 15 bp, Homo sapiens
ggccctgcccgcttc

SEQ ID NO: 813633 - DNA, 15 bp, Homo sapiens
gccctgcccgcttcc

SEQ ID NO: 813634 - DNA, 15 bp, Homo sapiens
ccctgcccgcttcct

SEQ ID NO: 813635 - DNA, 15 bp, Homo sapiens
cctgcccgcttcctg

SEQ ID NO: 813636 - DNA, 15 bp, Homo sapiens
ctgcccgcttcctgt

SEQ ID NO: 813637 - DNA, 15 bp, Homo sapiens
tgcccgcttcctgtc

SEQ ID NO: 813638 - DNA, 15 bp, Homo sapiens
gcccgcttcctgtcc

SEQ ID NO: 813639 - DNA, 15 bp, Homo sapiens
cccgcttcctgtcca

SEQ ID NO: 813640 - DNA, 15 bp, Homo sapiens
ccgcttcctgtccac

SEQ ID NO: 813641 - DNA, 15 bp, Homo sapiens
cgcttcctgtccact

SEQ ID NO: 813642 - DNA, 15 bp, Homo sapiens
gcttcctgtccactg

SEQ ID NO: 813643 - DNA, 15 bp, Homo sapiens
cttcctgtccactgc

SEQ ID NO: 813644 - DNA, 15 bp, Homo sapiens
ttcctgtccactgcc

SEQ ID NO: 813645 - DNA, 15 bp, Homo sapiens
tcctgtccactgccc

SEQ ID NO: 813646 - DNA, 15 bp, Homo sapiens
cctgtccactgcccc

SEQ ID NO: 813647 - DNA, 15 bp, Homo sapiens
ctgtccactgccccc

SEQ ID NO: 813648 - DNA, 15 bp, Homo sapiens
tgtccactgccccct

SEQ ID NO: 813649 - DNA, 15 bp, Homo sapiens
gtccactgccccctc

SEQ ID NO: 813650 - DNA, 15 bp, Homo sapiens
tccactgccccctcc

SEQ ID NO: 813651 - DNA, 15 bp, Homo sapiens
ccactgccccctccc

SEQ ID NO: 813652 - DNA, 15 bp, Homo sapiens
cactgccccctcccc

SEQ ID NO: 813653 - DNA, 15 bp, Homo sapiens
actgccccctcccca

SEQ ID NO: 813654 - DNA, 15 bp, Homo sapiens
ctgccccctccccat

SEQ ID NO: 813655 - DNA, 15 bp, Homo sapiens
tgccccctccccatc

SEQ ID NO: 813656 - DNA, 15 bp, Homo sapiens
gccccctccccatcc

SEQ ID NO: 813657 - DNA, 15 bp, Homo sapiens
ccccctccccatccc

SEQ ID NO: 813658 - DNA, 15 bp, Homo sapiens
cccctccccatcccc

SEQ ID NO: 813659 - DNA, 15 bp, Homo sapiens
ccctccccatcccca

SEQ ID NO: 813660 - DNA, 15 bp, Homo sapiens
cctccccatccccag

SEQ ID NO: 813661 - DNA, 15 bp, Homo sapiens
ctccccatccccagc

SEQ ID NO: 813662 - DNA, 15 bp, Homo sapiens
tccccatccccagcc

SEQ ID NO: 813663 - DNA, 15 bp, Homo sapiens
ccccatccccagccc

SEQ ID NO: 813664 - DNA, 15 bp, Homo sapiens
cccatccccagccca

SEQ ID NO: 813665 - DNA, 15 bp, Homo sapiens
ccatccccagcccag

SEQ ID NO: 813666 - DNA, 15 bp, Homo sapiens
catccccagcccagc

SEQ ID NO: 813667 - DNA, 15 bp, Homo sapiens
atccccagcccagcc

SEQ ID NO: 813668 - DNA, 15 bp, Homo sapiens
tccccagcccagccg

SEQ ID NO: 813669 - DNA, 15 bp, Homo sapiens
ccccagcccagccga

SEQ ID NO: 813670 - DNA, 15 bp, Homo sapiens
cccagcccagccgag

SEQ ID NO: 813671 - DNA, 15 bp, Homo sapiens
ccagcccagccgagg

SEQ ID NO: 813672 - DNA, 15 bp, Homo sapiens
cagcccagccgaggg

SEQ ID NO: 813673 - DNA, 15 bp, Homo sapiens
agcccagccgaggga

SEQ ID NO: 813674 - DNA, 15 bp, Homo sapiens
gcccagccgagggaa

SEQ ID NO: 813675 - DNA, 15 bp, Homo sapiens
cccagccgagggaat

SEQ ID NO: 813676 - DNA, 15 bp, Homo sapiens
ccagccgagggaatc

SEQ ID NO: 813677 - DNA, 15 bp, Homo sapiens
cagccgagggaatcc

SEQ ID NO: 813678 - DNA, 15 bp, Homo sapiens
agccgagggaatccc

SEQ ID NO: 813679 - DNA, 15 bp, Homo sapiens
gccgagggaatcccg

SEQ ID NO: 813680 - DNA, 15 bp, Homo sapiens
ccgagggaatcccgt

SEQ ID NO: 813681 - DNA, 15 bp, Homo sapiens
cgagggaatcccgtg

SEQ ID NO: 813682 - DNA, 15 bp, Homo sapiens
gagggaatcccgtgg

SEQ ID NO: 813683 - DNA, 15 bp, Homo sapiens
agggaatcccgtggg

SEQ ID NO: 813684 - DNA, 15 bp, Homo sapiens
gggaatcccgtgggt

SEQ ID NO: 813685 - DNA, 15 bp, Homo sapiens
ggaatcccgtgggtt

SEQ ID NO: 813686 - DNA, 15 bp, Homo sapiens
gaatcccgtgggttg

SEQ ID NO: 813687 - DNA, 15 bp, Homo sapiens
aatcccgtgggttgc

SEQ ID NO: 813688 - DNA, 15 bp, Homo sapiens
atcccgtgggttgct

SEQ ID NO: 813689 - DNA, 15 bp, Homo sapiens
tcccgtgggttgctt

SEQ ID NO: 813690 - DNA, 15 bp, Homo sapiens
cccgtgggttgctta

SEQ ID NO: 813691 - DNA, 15 bp, Homo sapiens
ccgtgggttgcttac

SEQ ID NO: 813692 - DNA, 15 bp, Homo sapiens
cgtgggttgcttacc

SEQ ID NO: 813693 - DNA, 15 bp, Homo sapiens
gtgggttgcttacct

SEQ ID NO: 813694 - DNA, 15 bp, Homo sapiens
tgggttgcttaccta

SEQ ID NO: 813695 - DNA, 15 bp, Homo sapiens
gggttgcttacctac

SEQ ID NO: 813696 - DNA, 15 bp, Homo sapiens
ggttgcttacctacc

SEQ ID NO: 813697 - DNA, 15 bp, Homo sapiens
gttgcttacctacct

SEQ ID NO: 813698 - DNA, 15 bp, Homo sapiens
ttgcttacctaccta

SEQ ID NO: 813699 - DNA, 15 bp, Homo sapiens
tgcttacctacctat

SEQ ID NO: 813700 - DNA, 15 bp, Homo sapiens
gcttacctacctata

SEQ ID NO: 813701 - DNA, 15 bp, Homo sapiens
cttacctacctataa

SEQ ID NO: 813702 - DNA, 15 bp, Homo sapiens
ttacctacctataag

SEQ ID NO: 813703 - DNA, 15 bp, Homo sapiens
tacctacctataagg

SEQ ID NO: 813704 - DNA, 15 bp, Homo sapiens
acctacctataaggt

SEQ ID NO: 813705 - DNA, 15 bp, Homo sapiens
cctacctataaggtg

SEQ ID NO: 813706 - DNA, 15 bp, Homo sapiens
ctacctataaggtgg

SEQ ID NO: 813707 - DNA, 15 bp, Homo sapiens
tacctataaggtggt

SEQ ID NO: 813708 - DNA, 15 bp, Homo sapiens
acctataaggtggtt

SEQ ID NO: 813709 - DNA, 15 bp, Homo sapiens
cctataaggtggttt

SEQ ID NO: 813710 - DNA, 15 bp, Homo sapiens
ctataaggtggttta

SEQ ID NO: 813711 - DNA, 15 bp, Homo sapiens
tataaggtggtttat

SEQ ID NO: 813712 - DNA, 15 bp, Homo sapiens
ataaggtggtttata

SEQ ID NO: 813713 - DNA, 15 bp, Homo sapiens
taaggtggtttataa

SEQ ID NO: 813714 - DNA, 15 bp, Homo sapiens
aaggtggtttataag

SEQ ID NO: 813715 - DNA, 15 bp, Homo sapiens
aggtggtttataagc

SEQ ID NO: 813716 - DNA, 15 bp, Homo sapiens
ggtggtttataagct

SEQ ID NO: 813717 - DNA, 15 bp, Homo sapiens
gtggtttataagctg

SEQ ID NO: 813718 - DNA, 15 bp, Homo sapiens
tggtttataagctgc

SEQ ID NO: 813719 - DNA, 15 bp, Homo sapiens
ggtttataagctgct

SEQ ID NO: 813720 - DNA, 15 bp, Homo sapiens
gtttataagctgctg

SEQ ID NO: 813721 - DNA, 15 bp, Homo sapiens
tttataagctgctgt

SEQ ID NO: 813722 - DNA, 15 bp, Homo sapiens
ttataagctgctgtc

SEQ ID NO: 813723 - DNA, 15 bp, Homo sapiens
tataagctgctgtcc

SEQ ID NO: 813724 - DNA, 15 bp, Homo sapiens
ataagctgctgtcct

SEQ ID NO: 813725 - DNA, 15 bp, Homo sapiens
taagctgctgtcctg

SEQ ID NO: 813726 - DNA, 15 bp, Homo sapiens
aagctgctgtcctgg

SEQ ID NO: 813727 - DNA, 15 bp, Homo sapiens
agctgctgtcctggc

SEQ ID NO: 813728 - DNA, 15 bp, Homo sapiens
gctgctgtcctggcc

SEQ ID NO: 813729 - DNA, 15 bp, Homo sapiens
ctgctgtcctggcca

SEQ ID NO: 813730 - DNA, 15 bp, Homo sapiens
tgctgtcctggccac

SEQ ID NO: 813731 - DNA, 15 bp, Homo sapiens
gctgtcctggccact

SEQ ID NO: 813732 - DNA, 15 bp, Homo sapiens
ctgtcctggccactg

SEQ ID NO: 813733 - DNA, 15 bp, Homo sapiens
tgtcctggccactgc

SEQ ID NO: 813734 - DNA, 15 bp, Homo sapiens
gtcctggccactgca

SEQ ID NO: 813735 - DNA, 15 bp, Homo sapiens
tcctggccactgcat

SEQ ID NO: 813736 - DNA, 15 bp, Homo sapiens
cctggccactgcatt

SEQ ID NO: 813737 - DNA, 15 bp, Homo sapiens
ctggccactgcattc

SEQ ID NO: 813738 - DNA, 15 bp, Homo sapiens
tggccactgcattca

SEQ ID NO: 813739 - DNA, 15 bp, Homo sapiens
ggccactgcattcaa

SEQ ID NO: 813740 - DNA, 15 bp, Homo sapiens
gccactgcattcaaa

SEQ ID NO: 813741 - DNA, 15 bp, Homo sapiens
ccactgcattcaaat

SEQ ID NO: 813742 - DNA, 15 bp, Homo sapiens
cactgcattcaaatt

SEQ ID NO: 813743 - DNA, 15 bp, Homo sapiens
actgcattcaaattc

SEQ ID NO: 813744 - DNA, 15 bp, Homo sapiens
ctgcattcaaattcc

SEQ ID NO: 813745 - DNA, 15 bp, Homo sapiens
tgcattcaaattcca

SEQ ID NO: 813746 - DNA, 15 bp, Homo sapiens
gcattcaaattccaa

SEQ ID NO: 813747 - DNA, 15 bp, Homo sapiens
cattcaaattccaat

SEQ ID NO: 813748 - DNA, 15 bp, Homo sapiens
attcaaattccaatg

SEQ ID NO: 813749 - DNA, 15 bp, Homo sapiens
ttcaaattccaatgt

SEQ ID NO: 813750 - DNA, 15 bp, Homo sapiens
tcaaattccaatgtg

SEQ ID NO: 813751 - DNA, 15 bp, Homo sapiens
caaattccaatgtgt

SEQ ID NO: 813752 - DNA, 15 bp, Homo sapiens
aaattccaatgtgta

SEQ ID NO: 813753 - DNA, 15 bp, Homo sapiens
aattccaatgtgtac

SEQ ID NO: 813754 - DNA, 15 bp, Homo sapiens
attccaatgtgtact

SEQ ID NO: 813755 - DNA, 15 bp, Homo sapiens
ttccaatgtgtactt

SEQ ID NO: 813756 - DNA, 15 bp, Homo sapiens
tccaatgtgtacttc

SEQ ID NO: 813757 - DNA, 15 bp, Homo sapiens
ccaatgtgtacttca

SEQ ID NO: 813758 - DNA, 15 bp, Homo sapiens
caatgtgtacttcat

SEQ ID NO: 813759 - DNA, 15 bp, Homo sapiens
aatgtgtacttcata

SEQ ID NO: 813760 - DNA, 15 bp, Homo sapiens
atgtgtacttcatag

SEQ ID NO: 813761 - DNA, 15 bp, Homo sapiens
tgtgtacttcatagt

SEQ ID NO: 813762 - DNA, 15 bp, Homo sapiens
gtgtacttcatagtg

SEQ ID NO: 813763 - DNA, 15 bp, Homo sapiens
tgtacttcatagtgt

SEQ ID NO: 813764 - DNA, 15 bp, Homo sapiens
gtacttcatagtgta

SEQ ID NO: 813765 - DNA, 15 bp, Homo sapiens
tacttcatagtgtaa

SEQ ID NO: 813766 - DNA, 15 bp, Homo sapiens
acttcatagtgtaaa

SEQ ID NO: 813767 - DNA, 15 bp, Homo sapiens
cttcatagtgtaaaa

SEQ ID NO: 813768 - DNA, 15 bp, Homo sapiens
ttcatagtgtaaaaa

SEQ ID NO: 813769 - DNA, 15 bp, Homo sapiens
tcatagtgtaaaaat

SEQ ID NO: 813770 - DNA, 15 bp, Homo sapiens
catagtgtaaaaatt

SEQ ID NO: 813771 - DNA, 15 bp, Homo sapiens
atagtgtaaaaattt

SEQ ID NO: 813772 - DNA, 15 bp, Homo sapiens
tagtgtaaaaattta

SEQ ID NO: 813773 - DNA, 15 bp, Homo sapiens
agtgtaaaaatttat

SEQ ID NO: 813774 - DNA, 15 bp, Homo sapiens
gtgtaaaaatttata

SEQ ID NO: 813775 - DNA, 15 bp, Homo sapiens
tgtaaaaatttatat

SEQ ID NO: 813776 - DNA, 15 bp, Homo sapiens
gtaaaaatttatatt

SEQ ID NO: 813777 - DNA, 15 bp, Homo sapiens
taaaaatttatatta

SEQ ID NO: 813778 - DNA, 15 bp, Homo sapiens
aaaaatttatattat

SEQ ID NO: 813779 - DNA, 15 bp, Homo sapiens
aaaatttatattatt

SEQ ID NO: 813780 - DNA, 15 bp, Homo sapiens
aaatttatattattg

SEQ ID NO: 813781 - DNA, 15 bp, Homo sapiens
aatttatattattgt

SEQ ID NO: 813782 - DNA, 15 bp, Homo sapiens
atttatattattgtg

SEQ ID NO: 813783 - DNA, 15 bp, Homo sapiens
tttatattattgtga

SEQ ID NO: 813784 - DNA, 15 bp, Homo sapiens
ttatattattgtgag

SEQ ID NO: 813785 - DNA, 15 bp, Homo sapiens
tatattattgtgagg

SEQ ID NO: 813786 - DNA, 15 bp, Homo sapiens
atattattgtgaggt

SEQ ID NO: 813787 - DNA, 15 bp, Homo sapiens
tattattgtgaggtt

SEQ ID NO: 813788 - DNA, 15 bp, Homo sapiens
attattgtgaggttt

SEQ ID NO: 813789 - DNA, 15 bp, Homo sapiens
ttattgtgaggtttt

SEQ ID NO: 813790 - DNA, 15 bp, Homo sapiens
tattgtgaggttttt

SEQ ID NO: 813791 - DNA, 15 bp, Homo sapiens
attgtgaggtttttt

SEQ ID NO: 813792 - DNA, 15 bp, Homo sapiens
ttgtgaggttttttg

SEQ ID NO: 813793 - DNA, 15 bp, Homo sapiens
tgtgaggttttttgt

SEQ ID NO: 813794 - DNA, 15 bp, Homo sapiens
gtgaggttttttgtc

SEQ ID NO: 813795 - DNA, 15 bp, Homo sapiens
tgaggttttttgtct

SEQ ID NO: 813796 - DNA, 15 bp, Homo sapiens
gaggttttttgtctt

SEQ ID NO: 813797 - DNA, 15 bp, Homo sapiens
aggttttttgtcttt

SEQ ID NO: 813798 - DNA, 15 bp, Homo sapiens
ggttttttgtctttt

SEQ ID NO: 813799 - DNA, 15 bp, Homo sapiens
gttttttgtcttttt

SEQ ID NO: 813800 - DNA, 15 bp, Homo sapiens
ttttttgtctttttt

SEQ ID NO: 813801 - DNA, 15 bp, Homo sapiens
tttttgtcttttttt

SEQ ID NO: 813802 - DNA, 15 bp, Homo sapiens
ttttgtctttttttt

SEQ ID NO: 813803 - DNA, 15 bp, Homo sapiens
tttgtcttttttttt

SEQ ID NO: 813804 - DNA, 15 bp, Homo sapiens
ttgtctttttttttt

SEQ ID NO: 813805 - DNA, 15 bp, Homo sapiens
tgtcttttttttttt

SEQ ID NO: 813806 - DNA, 15 bp, Homo sapiens
gtctttttttttttt

SEQ ID NO: 813807 - DNA, 15 bp, Homo sapiens
ttttttttttggtat

SEQ ID NO: 813808 - DNA, 15 bp, Homo sapiens
tttttttttggtata

SEQ ID NO: 813809 - DNA, 15 bp, Homo sapiens
ttttttttggtatat

SEQ ID NO: 813810 - DNA, 15 bp, Homo sapiens
tttttttggtatatt

SEQ ID NO: 813811 - DNA, 15 bp, Homo sapiens
ttttttggtatattg

SEQ ID NO: 813812 - DNA, 15 bp, Homo sapiens
tttttggtatattgc

SEQ ID NO: 813813 - DNA, 15 bp, Homo sapiens
ttttggtatattgct

SEQ ID NO: 813814 - DNA, 15 bp, Homo sapiens
tttggtatattgctg

SEQ ID NO: 813815 - DNA, 15 bp, Homo sapiens
ttggtatattgctgt

SEQ ID NO: 813816 - DNA, 15 bp, Homo sapiens
tggtatattgctgta

SEQ ID NO: 813817 - DNA, 15 bp, Homo sapiens
ggtatattgctgtat

SEQ ID NO: 813818 - DNA, 15 bp, Homo sapiens
gtatattgctgtatc

SEQ ID NO: 813819 - DNA, 15 bp, Homo sapiens
tatattgctgtatct

SEQ ID NO: 813820 - DNA, 15 bp, Homo sapiens
atattgctgtatcta

SEQ ID NO: 813821 - DNA, 15 bp, Homo sapiens
tattgctgtatctac

SEQ ID NO: 813822 - DNA, 15 bp, Homo sapiens
attgctgtatctact

SEQ ID NO: 813823 - DNA, 15 bp, Homo sapiens
ttgctgtatctactt

SEQ ID NO: 813824 - DNA, 15 bp, Homo sapiens
tgctgtatctacttt

SEQ ID NO: 813825 - DNA, 15 bp, Homo sapiens
gctgtatctacttta

SEQ ID NO: 813826 - DNA, 15 bp, Homo sapiens
ctgtatctactttaa

SEQ ID NO: 813827 - DNA, 15 bp, Homo sapiens
tgtatctactttaac

SEQ ID NO: 813828 - DNA, 15 bp, Homo sapiens
gtatctactttaact

SEQ ID NO: 813829 - DNA, 15 bp, Homo sapiens
tatctactttaactt

SEQ ID NO: 813830 - DNA, 15 bp, Homo sapiens
atctactttaacttc

SEQ ID NO: 813831 - DNA, 15 bp, Homo sapiens
tctactttaacttcc

SEQ ID NO: 813832 - DNA, 15 bp, Homo sapiens
ctactttaacttcca

SEQ ID NO: 813833 - DNA, 15 bp, Homo sapiens
tactttaacttccag

SEQ ID NO: 813834 - DNA, 15 bp, Homo sapiens
actttaacttccaga

SEQ ID NO: 813835 - DNA, 15 bp, Homo sapiens
ctttaacttccagaa

SEQ ID NO: 813836 - DNA, 15 bp, Homo sapiens
tttaacttccagaaa

SEQ ID NO: 813837 - DNA, 15 bp, Homo sapiens
ttaacttccagaaat

SEQ ID NO: 813838 - DNA, 15 bp, Homo sapiens
taacttccagaaata

SEQ ID NO: 813839 - DNA, 15 bp, Homo sapiens
aacttccagaaataa

SEQ ID NO: 813840 - DNA, 15 bp, Homo sapiens
acttccagaaataaa

SEQ ID NO: 813841 - DNA, 15 bp, Homo sapiens
cttccagaaataaac

SEQ ID NO: 813842 - DNA, 15 bp, Homo sapiens
ttccagaaataaacg

SEQ ID NO: 813843 - DNA, 15 bp, Homo sapiens
tccagaaataaacgt

SEQ ID NO: 813844 - DNA, 15 bp, Homo sapiens
ccagaaataaacgtt

SEQ ID NO: 813845 - DNA, 15 bp, Homo sapiens
cagaaataaacgtta

SEQ ID NO: 813846 - DNA, 15 bp, Homo sapiens
agaaataaacgttat

SEQ ID NO: 813847 - DNA, 15 bp, Homo sapiens
gaaataaacgttata

SEQ ID NO: 813848 - DNA, 15 bp, Homo sapiens
aaataaacgttatat

SEQ ID NO: 813849 - DNA, 15 bp, Homo sapiens
aataaacgttatata

SEQ ID NO: 813850 - DNA, 15 bp, Homo sapiens
ataaacgttatatag

SEQ ID NO: 813851 - DNA, 15 bp, Homo sapiens
taaacgttatatagg

SEQ ID NO: 813852 - DNA, 15 bp, Homo sapiens
aaacgttatatagga

SEQ ID NO: 813853 - DNA, 15 bp, Homo sapiens
aacgttatataggaa

SEQ ID NO: 813854 - DNA, 15 bp, Homo sapiens
acgttatataggaac

SEQ ID NO: 813855 - DNA, 15 bp, Homo sapiens
cgttatataggaacc

SEQ ID NO: 813856 - DNA, 15 bp, Homo sapiens
gttatataggaaccg

SEQ ID NO: 813857 - DNA, 15 bp, Homo sapiens
ttatataggaaccgt

SEQ ID NO: 813858 - DNA, 15 bp, Homo sapiens
tatataggaaccgtc

SEQ ID NO: 813859 - DNA, 15 bp, Homo sapiens
atataggaaccgtct

SEQ ID NO: 813860 - DNA, 15 bp, Homo sapiens
tataggaaccgtctg

SEQ ID NO: 813861 - DNA, 15 bp, Homo sapiens
ataggaaccgtctga

SEQ ID NO: 813862 - DNA, 15 bp, Homo sapiens
taggaaccgtctgat

SEQ ID NO: 813863 - DNA, 15 bp, Homo sapiens
aggaaccgtctgata

SEQ ID NO: 813864 - DNA, 15 bp, Homo sapiens
ggaaccgtctgatag

SEQ ID NO: 813865 - DNA, 15 bp, Homo sapiens
gaaccgtctgatagc

SEQ ID NO: 813866 - DNA, 15 bp, Homo sapiens
aaccgtctgatagca

SEQ ID NO: 813867 - DNA, 15 bp, Homo sapiens
accgtctgatagcat

SEQ ID NO: 813868 - DNA, 15 bp, Homo sapiens
ccgtctgatagcatg

SEQ ID NO: 813869 - DNA, 15 bp, Homo sapiens
cgtctgatagcatgg

SEQ ID NO: 813870 - DNA, 15 bp, Homo sapiens
gtctgatagcatggc

SEQ ID NO: 813871 - DNA, 15 bp, Homo sapiens
tctgatagcatggca

SEQ ID NO: 813872 - DNA, 15 bp, Homo sapiens
ctgatagcatggcag

SEQ ID NO: 813873 - DNA, 15 bp, Homo sapiens
tgatagcatggcagc

SEQ ID NO: 813874 - DNA, 15 bp, Homo sapiens
gatagcatggcagct

SEQ ID NO: 813875 - DNA, 15 bp, Homo sapiens
atagcatggcagctc

SEQ ID NO: 813876 - DNA, 15 bp, Homo sapiens
tagcatggcagctct

SEQ ID NO: 813877 - DNA, 15 bp, Homo sapiens
agcatggcagctctg

SEQ ID NO: 813878 - DNA, 15 bp, Homo sapiens
gcatggcagctctgt

SEQ ID NO: 813879 - DNA, 15 bp, Homo sapiens
catggcagctctgtt

SEQ ID NO: 813880 - DNA, 15 bp, Homo sapiens
atggcagctctgttt

SEQ ID NO: 813881 - DNA, 15 bp, Homo sapiens
tggcagctctgtttg

SEQ ID NO: 813882 - DNA, 15 bp, Homo sapiens
ggcagctctgtttgg

SEQ ID NO: 813883 - DNA, 15 bp, Homo sapiens
gcagctctgtttggc

SEQ ID NO: 813884 - DNA, 15 bp, Homo sapiens
cagctctgtttggct

SEQ ID NO: 813885 - DNA, 15 bp, Homo sapiens
agctctgtttggctg

SEQ ID NO: 813886 - DNA, 15 bp, Homo sapiens
gctctgtttggctgg

SEQ ID NO: 813887 - DNA, 15 bp, Homo sapiens
ctctgtttggctggt

SEQ ID NO: 813888 - DNA, 15 bp, Homo sapiens
tctgtttggctggtg

SEQ ID NO: 813889 - DNA, 15 bp, Homo sapiens
ctgtttggctggtgg

SEQ ID NO: 813890 - DNA, 15 bp, Homo sapiens
tgtttggctggtgga

SEQ ID NO: 813891 - DNA, 15 bp, Homo sapiens
gtttggctggtggag

SEQ ID NO: 813892 - DNA, 15 bp, Homo sapiens
tttggctggtggagg

SEQ ID NO: 813893 - DNA, 15 bp, Homo sapiens
ttggctggtggaggc

SEQ ID NO: 813894 - DNA, 15 bp, Homo sapiens
tggctggtggaggct

SEQ ID NO: 813895 - DNA, 15 bp, Homo sapiens
ggctggtggaggctt

SEQ ID NO: 813896 - DNA, 15 bp, Homo sapiens
gctggtggaggcttc

SEQ ID NO: 813897 - DNA, 15 bp, Homo sapiens
ctggtggaggcttcc

SEQ ID NO: 813898 - DNA, 15 bp, Homo sapiens
tggtggaggcttcct

SEQ ID NO: 813899 - DNA, 15 bp, Homo sapiens
ggtggaggcttcctt

SEQ ID NO: 813900 - DNA, 15 bp, Homo sapiens
gtggaggcttccttt

SEQ ID NO: 813901 - DNA, 15 bp, Homo sapiens
tggaggcttcctttt

SEQ ID NO: 813902 - DNA, 15 bp, Homo sapiens
ggaggcttccttttc

SEQ ID NO: 813903 - DNA, 15 bp, Homo sapiens
gaggcttccttttcc

SEQ ID NO: 813904 - DNA, 15 bp, Homo sapiens
aggcttccttttccc

SEQ ID NO: 813905 - DNA, 15 bp, Homo sapiens
ggcttccttttcccc

SEQ ID NO: 813906 - DNA, 15 bp, Homo sapiens
gcttccttttcccct

SEQ ID NO: 813907 - DNA, 15 bp, Homo sapiens
cttccttttcccctg

SEQ ID NO: 813908 - DNA, 15 bp, Homo sapiens
ttccttttcccctgc

SEQ ID NO: 813909 - DNA, 15 bp, Homo sapiens
tccttttcccctgca

SEQ ID NO: 813910 - DNA, 15 bp, Homo sapiens
ccttttcccctgcat

SEQ ID NO: 813911 - DNA, 15 bp, Homo sapiens
cttttcccctgcata

SEQ ID NO: 813912 - DNA, 15 bp, Homo sapiens
ttttcccctgcataa

SEQ ID NO: 813913 - DNA, 15 bp, Homo sapiens
tttcccctgcataag

SEQ ID NO: 813914 - DNA, 15 bp, Homo sapiens
ttcccctgcataagt

SEQ ID NO: 813915 - DNA, 15 bp, Homo sapiens
tcccctgcataagtt

SEQ ID NO: 813916 - DNA, 15 bp, Homo sapiens
cccctgcataagttc

SEQ ID NO: 813917 - DNA, 15 bp, Homo sapiens
ccctgcataagttct

SEQ ID NO: 813918 - DNA, 15 bp, Homo sapiens
cctgcataagttctg

SEQ ID NO: 813919 - DNA, 15 bp, Homo sapiens
ctgcataagttctga

SEQ ID NO: 813920 - DNA, 15 bp, Homo sapiens
tgcataagttctgag

SEQ ID NO: 813921 - DNA, 15 bp, Homo sapiens
gcataagttctgagg

SEQ ID NO: 813922 - DNA, 15 bp, Homo sapiens
cataagttctgaggg

SEQ ID NO: 813923 - DNA, 15 bp, Homo sapiens
ataagttctgagggg

SEQ ID NO: 813924 - DNA, 15 bp, Homo sapiens
taagttctgaggggg

SEQ ID NO: 813925 - DNA, 15 bp, Homo sapiens
aagttctgagggggc

SEQ ID NO: 813926 - DNA, 15 bp, Homo sapiens
agttctgagggggcc

SEQ ID NO: 813927 - DNA, 15 bp, Homo sapiens
gttctgagggggcct

SEQ ID NO: 813928 - DNA, 15 bp, Homo sapiens
ttctgagggggcctc

SEQ ID NO: 813929 - DNA, 15 bp, Homo sapiens
tctgagggggcctca

SEQ ID NO: 813930 - DNA, 15 bp, Homo sapiens
ctgagggggcctcac

SEQ ID NO: 813931 - DNA, 15 bp, Homo sapiens
tgagggggcctcaca

SEQ ID NO: 813932 - DNA, 15 bp, Homo sapiens
gagggggcctcacac

SEQ ID NO: 813933 - DNA, 15 bp, Homo sapiens
agggggcctcacaca

SEQ ID NO: 813934 - DNA, 15 bp, Homo sapiens
gggggcctcacacac

SEQ ID NO: 813935 - DNA, 15 bp, Homo sapiens
ggggcctcacacaca

SEQ ID NO: 813936 - DNA, 15 bp, Homo sapiens
gggcctcacacacag

SEQ ID NO: 813937 - DNA, 15 bp, Homo sapiens
ggcctcacacacagg

SEQ ID NO: 813938 - DNA, 15 bp, Homo sapiens
gcctcacacacaggt

SEQ ID NO: 813939 - DNA, 15 bp, Homo sapiens
cctcacacacaggtg

SEQ ID NO: 813940 - DNA, 15 bp, Homo sapiens
ctcacacacaggtgg

SEQ ID NO: 813941 - DNA, 15 bp, Homo sapiens
tcacacacaggtggg

SEQ ID NO: 813942 - DNA, 15 bp, Homo sapiens
cacacacaggtgggg

SEQ ID NO: 813943 - DNA, 15 bp, Homo sapiens
acacacaggtggggc

SEQ ID NO: 813944 - DNA, 15 bp, Homo sapiens
cacacaggtggggcc

SEQ ID NO: 813945 - DNA, 15 bp, Homo sapiens
acacaggtggggcct

SEQ ID NO: 813946 - DNA, 15 bp, Homo sapiens
cacaggtggggcctg

SEQ ID NO: 813947 - DNA, 15 bp, Homo sapiens
acaggtggggcctgg

SEQ ID NO: 813948 - DNA, 15 bp, Homo sapiens
caggtggggcctggg

SEQ ID NO: 813949 - DNA, 15 bp, Homo sapiens
aggtggggcctggga

SEQ ID NO: 813950 - DNA, 15 bp, Homo sapiens
ggtggggcctgggat

SEQ ID NO: 813951 - DNA, 15 bp, Homo sapiens
gtggggcctgggata

SEQ ID NO: 813952 - DNA, 15 bp, Homo sapiens
tggggcctgggataa

SEQ ID NO: 813953 - DNA, 15 bp, Homo sapiens
ggggcctgggataag

SEQ ID NO: 813954 - DNA, 15 bp, Homo sapiens
gggcctgggataagg

SEQ ID NO: 813955 - DNA, 15 bp, Homo sapiens
ggcctgggataaggg

SEQ ID NO: 813956 - DNA, 15 bp, Homo sapiens
gcctgggataagggc

SEQ ID NO: 813957 - DNA, 15 bp, Homo sapiens
cctgggataagggcc

SEQ ID NO: 813958 - DNA, 15 bp, Homo sapiens
ctgggataagggccg

SEQ ID NO: 813959 - DNA, 15 bp, Homo sapiens
tgggataagggccgg

SEQ ID NO: 813960 - DNA, 15 bp, Homo sapiens
gggataagggccgga

SEQ ID NO: 813961 - DNA, 15 bp, Homo sapiens
ggataagggccggaa

SEQ ID NO: 813962 - DNA, 15 bp, Homo sapiens
gataagggccggaaa

SEQ ID NO: 813963 - DNA, 15 bp, Homo sapiens
ataagggccggaaag

SEQ ID NO: 813964 - DNA, 15 bp, Homo sapiens
taagggccggaaagg

SEQ ID NO: 813965 - DNA, 15 bp, Homo sapiens
aagggccggaaaggg

SEQ ID NO: 813966 - DNA, 15 bp, Homo sapiens
agggccggaaagggt

SEQ ID NO: 813967 - DNA, 15 bp, Homo sapiens
gggccggaaagggtc

SEQ ID NO: 813968 - DNA, 15 bp, Homo sapiens
ggccggaaagggtct

SEQ ID NO: 813969 - DNA, 15 bp, Homo sapiens
gccggaaagggtctt

SEQ ID NO: 813970 - DNA, 15 bp, Homo sapiens
ccggaaagggtcttg

SEQ ID NO: 813971 - DNA, 15 bp, Homo sapiens
cggaaagggtcttga

SEQ ID NO: 813972 - DNA, 15 bp, Homo sapiens
ggaaagggtcttgag

SEQ ID NO: 813973 - DNA, 15 bp, Homo sapiens
gaaagggtcttgaga

SEQ ID NO: 813974 - DNA, 15 bp, Homo sapiens
aaagggtcttgagag

SEQ ID NO: 813975 - DNA, 15 bp, Homo sapiens
aagggtcttgagagg

SEQ ID NO: 813976 - DNA, 15 bp, Homo sapiens
agggtcttgagagga

SEQ ID NO: 813977 - DNA, 15 bp, Homo sapiens
gggtcttgagaggag

SEQ ID NO: 813978 - DNA, 15 bp, Homo sapiens
ggtcttgagaggagg

SEQ ID NO: 813979 - DNA, 15 bp, Homo sapiens
gtcttgagaggaggt

SEQ ID NO: 813980 - DNA, 15 bp, Homo sapiens
tcttgagaggaggtg

SEQ ID NO: 813981 - DNA, 15 bp, Homo sapiens
cttgagaggaggtgg

SEQ ID NO: 813982 - DNA, 15 bp, Homo sapiens
ttgagaggaggtggt

SEQ ID NO: 813983 - DNA, 15 bp, Homo sapiens
tgagaggaggtggtt

SEQ ID NO: 813984 - DNA, 15 bp, Homo sapiens
gagaggaggtggttg

SEQ ID NO: 813985 - DNA, 15 bp, Homo sapiens
agaggaggtggttgc

SEQ ID NO: 813986 - DNA, 15 bp, Homo sapiens
gaggaggtggttgcc

SEQ ID NO: 813987 - DNA, 15 bp, Homo sapiens
aggaggtggttgcct

SEQ ID NO: 813988 - DNA, 15 bp, Homo sapiens
ggaggtggttgcctt

SEQ ID NO: 813989 - DNA, 15 bp, Homo sapiens
gaggtggttgcctta

SEQ ID NO: 813990 - DNA, 15 bp, Homo sapiens
aggtggttgccttaa

SEQ ID NO: 813991 - DNA, 15 bp, Homo sapiens
ggtggttgccttaat

SEQ ID NO: 813992 - DNA, 15 bp, Homo sapiens
gtggttgccttaatc

SEQ ID NO: 813993 - DNA, 15 bp, Homo sapiens
tggttgccttaatcc

SEQ ID NO: 813994 - DNA, 15 bp, Homo sapiens
ggttgccttaatccc

SEQ ID NO: 813995 - DNA, 15 bp, Homo sapiens
gttgccttaatcccc

SEQ ID NO: 813996 - DNA, 15 bp, Homo sapiens
ttgccttaatccccc

SEQ ID NO: 813997 - DNA, 15 bp, Homo sapiens
tgccttaatcccccc

SEQ ID NO: 813998 - DNA, 15 bp, Homo sapiens
gccttaatccccccc

SEQ ID NO: 813999 - DNA, 15 bp, Homo sapiens
ccttaatcccccccg

SEQ ID NO: 814000 - DNA, 15 bp, Homo sapiens
cttaatcccccccgc

SEQ ID NO: 814001 - DNA, 15 bp, Homo sapiens
ttaatcccccccgcc

SEQ ID NO: 814002 - DNA, 15 bp, Homo sapiens
taatcccccccgcca

SEQ ID NO: 814003 - DNA, 15 bp, Homo sapiens
aatcccccccgccaa

SEQ ID NO: 814004 - DNA, 15 bp, Homo sapiens
atcccccccgccaac

SEQ ID NO: 814005 - DNA, 15 bp, Homo sapiens
tcccccccgccaacc

SEQ ID NO: 814006 - DNA, 15 bp, Homo sapiens
cccccccgccaaccc

SEQ ID NO: 814007 - DNA, 15 bp, Homo sapiens
ccccccgccaacccc

SEQ ID NO: 814008 - DNA, 15 bp, Homo sapiens
cccccgccaaccccc

SEQ ID NO: 814009 - DNA, 15 bp, Homo sapiens
ccccgccaaccccct

SEQ ID NO: 814010 - DNA, 15 bp, Homo sapiens
cccgccaaccccctt

SEQ ID NO: 814011 - DNA, 15 bp, Homo sapiens
ccgccaaccccctta

SEQ ID NO: 814012 - DNA, 15 bp, Homo sapiens
cgccaacccccttat

SEQ ID NO: 814013 - DNA, 15 bp, Homo sapiens
gccaacccccttatg

SEQ ID NO: 814014 - DNA, 15 bp, Homo sapiens
ccaacccccttatgt

SEQ ID NO: 814015 - DNA, 15 bp, Homo sapiens
caacccccttatgtt

SEQ ID NO: 814016 - DNA, 15 bp, Homo sapiens
aacccccttatgtta

SEQ ID NO: 814017 - DNA, 15 bp, Homo sapiens
acccccttatgttag

SEQ ID NO: 814018 - DNA, 15 bp, Homo sapiens
cccccttatgttagc

SEQ ID NO: 814019 - DNA, 15 bp, Homo sapiens
ccccttatgttagcc

SEQ ID NO: 814020 - DNA, 15 bp, Homo sapiens
cccttatgttagcca

SEQ ID NO: 814021 - DNA, 15 bp, Homo sapiens
ccttatgttagccac

SEQ ID NO: 814022 - DNA, 15 bp, Homo sapiens
cttatgttagccacc

SEQ ID NO: 814023 - DNA, 15 bp, Homo sapiens
ttatgttagccacca

SEQ ID NO: 814024 - DNA, 15 bp, Homo sapiens
tatgttagccaccag

SEQ ID NO: 814025 - DNA, 15 bp, Homo sapiens
atgttagccaccagc

SEQ ID NO: 814026 - DNA, 15 bp, Homo sapiens
tgttagccaccagcc

SEQ ID NO: 814027 - DNA, 15 bp, Homo sapiens
gttagccaccagccc

SEQ ID NO: 814028 - DNA, 15 bp, Homo sapiens
ttagccaccagcccg

SEQ ID NO: 814029 - DNA, 15 bp, Homo sapiens
tagccaccagcccgg

SEQ ID NO: 814030 - DNA, 15 bp, Homo sapiens
agccaccagcccgga

SEQ ID NO: 814031 - DNA, 15 bp, Homo sapiens
gccaccagcccggag

SEQ ID NO: 814032 - DNA, 15 bp, Homo sapiens
ccaccagcccggagg

SEQ ID NO: 814033 - DNA, 15 bp, Homo sapiens
caccagcccggaggt

SEQ ID NO: 814034 - DNA, 15 bp, Homo sapiens
accagcccggaggta

SEQ ID NO: 814035 - DNA, 15 bp, Homo sapiens
ccagcccggaggtaa

SEQ ID NO: 814036 - DNA, 15 bp, Homo sapiens
cagcccggaggtaag

SEQ ID NO: 814037 - DNA, 15 bp, Homo sapiens
agcccggaggtaagg

SEQ ID NO: 814038 - DNA, 15 bp, Homo sapiens
gcccggaggtaaggg

SEQ ID NO: 814039 - DNA, 15 bp, Homo sapiens
cccggaggtaagggg

SEQ ID NO: 814040 - DNA, 15 bp, Homo sapiens
ccggaggtaaggggt

SEQ ID NO: 814041 - DNA, 15 bp, Homo sapiens
cggaggtaaggggtg

SEQ ID NO: 814042 - DNA, 15 bp, Homo sapiens
ggaggtaaggggtgc

SEQ ID NO: 814043 - DNA, 15 bp, Homo sapiens
gaggtaaggggtgcc

SEQ ID NO: 814044 - DNA, 15 bp, Homo sapiens
aggtaaggggtgcct

SEQ ID NO: 814045 - DNA, 15 bp, Homo sapiens
ggtaaggggtgcctg

SEQ ID NO: 814046 - DNA, 15 bp, Homo sapiens
gtaaggggtgcctgg

SEQ ID NO: 814047 - DNA, 15 bp, Homo sapiens
taaggggtgcctgga

SEQ ID NO: 814048 - DNA, 15 bp, Homo sapiens
aaggggtgcctggag

SEQ ID NO: 814049 - DNA, 15 bp, Homo sapiens
aggggtgcctggagg

SEQ ID NO: 814050 - DNA, 15 bp, Homo sapiens
ggggtgcctggagga

SEQ ID NO: 814051 - DNA, 15 bp, Homo sapiens
gggtgcctggaggag

SEQ ID NO: 814052 - DNA, 15 bp, Homo sapiens
ggtgcctggaggagc

SEQ ID NO: 814053 - DNA, 15 bp, Homo sapiens
gtgcctggaggagca

SEQ ID NO: 814054 - DNA, 15 bp, Homo sapiens
tgcctggaggagcag

SEQ ID NO: 814055 - DNA, 15 bp, Homo sapiens
gcctggaggagcagg

SEQ ID NO: 814056 - DNA, 15 bp, Homo sapiens
cctggaggagcagga

SEQ ID NO: 814057 - DNA, 15 bp, Homo sapiens
ctggaggagcaggag

SEQ ID NO: 814058 - DNA, 15 bp, Homo sapiens
tggaggagcaggagg

SEQ ID NO: 814059 - DNA, 15 bp, Homo sapiens
ggaggagcaggaggt

SEQ ID NO: 814060 - DNA, 15 bp, Homo sapiens
gaggagcaggaggtc

SEQ ID NO: 814061 - DNA, 15 bp, Homo sapiens
aggagcaggaggtca

SEQ ID NO: 814062 - DNA, 15 bp, Homo sapiens
ggagcaggaggtcaa

SEQ ID NO: 814063 - DNA, 15 bp, Homo sapiens
gagcaggaggtcaat

SEQ ID NO: 814064 - DNA, 15 bp, Homo sapiens
agcaggaggtcaata

SEQ ID NO: 814065 - DNA, 15 bp, Homo sapiens
gcaggaggtcaatag

SEQ ID NO: 814066 - DNA, 15 bp, Homo sapiens
caggaggtcaatagt

SEQ ID NO: 814067 - DNA, 15 bp, Homo sapiens
aggaggtcaatagtc

SEQ ID NO: 814068 - DNA, 15 bp, Homo sapiens
ggaggtcaatagtcc

SEQ ID NO: 814069 - DNA, 15 bp, Homo sapiens
gaggtcaatagtcca

SEQ ID NO: 814070 - DNA, 15 bp, Homo sapiens
aggtcaatagtccaa

SEQ ID NO: 814071 - DNA, 15 bp, Homo sapiens
ggtcaatagtccaac

SEQ ID NO: 814072 - DNA, 15 bp, Homo sapiens
gtcaatagtccaacg

SEQ ID NO: 814073 - DNA, 15 bp, Homo sapiens
tcaatagtccaacgg

SEQ ID NO: 814074 - DNA, 15 bp, Homo sapiens
caatagtccaacggc

SEQ ID NO: 814075 - DNA, 15 bp, Homo sapiens
aatagtccaacggca

SEQ ID NO: 814076 - DNA, 15 bp, Homo sapiens
atagtccaacggcag

SEQ ID NO: 814077 - DNA, 15 bp, Homo sapiens
tagtccaacggcaga

SEQ ID NO: 814078 - DNA, 15 bp, Homo sapiens
agtccaacggcagaa

SEQ ID NO: 814079 - DNA, 15 bp, Homo sapiens
gtccaacggcagaaa

SEQ ID NO: 814080 - DNA, 15 bp, Homo sapiens
tccaacggcagaaag

SEQ ID NO: 814081 - DNA, 15 bp, Homo sapiens
ccaacggcagaaagg

SEQ ID NO: 814082 - DNA, 15 bp, Homo sapiens
caacggcagaaaggt

SEQ ID NO: 814083 - DNA, 15 bp, Homo sapiens
aacggcagaaaggtg

SEQ ID NO: 814084 - DNA, 15 bp, Homo sapiens
acggcagaaaggtgt

SEQ ID NO: 814085 - DNA, 15 bp, Homo sapiens
cggcagaaaggtgtc

SEQ ID NO: 814086 - DNA, 15 bp, Homo sapiens
ggcagaaaggtgtca

SEQ ID NO: 814087 - DNA, 15 bp, Homo sapiens
gcagaaaggtgtcag

SEQ ID NO: 814088 - DNA, 15 bp, Homo sapiens
cagaaaggtgtcaga

SEQ ID NO: 814089 - DNA, 15 bp, Homo sapiens
agaaaggtgtcagag

SEQ ID NO: 814090 - DNA, 15 bp, Homo sapiens
gaaaggtgtcagagt

SEQ ID NO: 814091 - DNA, 15 bp, Homo sapiens
aaaggtgtcagagtg

SEQ ID NO: 814092 - DNA, 15 bp, Homo sapiens
aaggtgtcagagtgg

SEQ ID NO: 814093 - DNA, 15 bp, Homo sapiens
aggtgtcagagtgga

SEQ ID NO: 814094 - DNA, 15 bp, Homo sapiens
ggtgtcagagtggag

SEQ ID NO: 814095 - DNA, 15 bp, Homo sapiens
gtgtcagagtggagg

SEQ ID NO: 814096 - DNA, 15 bp, Homo sapiens
tgtcagagtggaggc

SEQ ID NO: 814097 - DNA, 15 bp, Homo sapiens
gtcagagtggaggcc

SEQ ID NO: 814098 - DNA, 15 bp, Homo sapiens
tcagagtggaggcct

SEQ ID NO: 814099 - DNA, 15 bp, Homo sapiens
cagagtggaggcctc

SEQ ID NO: 814100 - DNA, 15 bp, Homo sapiens
agagtggaggcctcc

SEQ ID NO: 814101 - DNA, 15 bp, Homo sapiens
gagtggaggcctccc

SEQ ID NO: 814102 - DNA, 15 bp, Homo sapiens
agtggaggcctccct

SEQ ID NO: 814103 - DNA, 15 bp, Homo sapiens
gtggaggcctccctc

SEQ ID NO: 814104 - DNA, 15 bp, Homo sapiens
tggaggcctccctcc

SEQ ID NO: 814105 - DNA, 15 bp, Homo sapiens
ggaggcctccctccc

SEQ ID NO: 814106 - DNA, 15 bp, Homo sapiens
gaggcctccctcccc

SEQ ID NO: 814107 - DNA, 15 bp, Homo sapiens
aggcctccctccccg

SEQ ID NO: 814108 - DNA, 15 bp, Homo sapiens
ggcctccctccccgg

SEQ ID NO: 814109 - DNA, 15 bp, Homo sapiens
gcctccctccccggc

SEQ ID NO: 814110 - DNA, 15 bp, Homo sapiens
cctccctccccggcc

SEQ ID NO: 814111 - DNA, 15 bp, Homo sapiens
ctccctccccggccc

SEQ ID NO: 814112 - DNA, 15 bp, Homo sapiens
tccctccccggcccc

SEQ ID NO: 814113 - DNA, 15 bp, Homo sapiens
ccctccccggccccc

SEQ ID NO: 814114 - DNA, 15 bp, Homo sapiens
cctccccggccccct

SEQ ID NO: 814115 - DNA, 15 bp, Homo sapiens
ctccccggccccctc

SEQ ID NO: 814116 - DNA, 15 bp, Homo sapiens
tccccggccccctcc

SEQ ID NO: 814117 - DNA, 15 bp, Homo sapiens
ccccggccccctcct

SEQ ID NO: 814118 - DNA, 15 bp, Homo sapiens
cccggccccctccta

SEQ ID NO: 814119 - DNA, 15 bp, Homo sapiens
ccggccccctcctac

SEQ ID NO: 814120 - DNA, 15 bp, Homo sapiens
cggccccctcctacc

SEQ ID NO: 814121 - DNA, 15 bp, Homo sapiens
ggccccctcctaccc

SEQ ID NO: 814122 - DNA, 15 bp, Homo sapiens
gccccctcctacccc

SEQ ID NO: 814123 - DNA, 15 bp, Homo sapiens
ccccctcctaccccc

SEQ ID NO: 814124 - DNA, 15 bp, Homo sapiens
cccctcctacccccc

SEQ ID NO: 814125 - DNA, 15 bp, Homo sapiens
ccctcctacccccca

SEQ ID NO: 814126 - DNA, 15 bp, Homo sapiens
cctcctaccccccag

SEQ ID NO: 814127 - DNA, 15 bp, Homo sapiens
ctcctaccccccaga

SEQ ID NO: 814128 - DNA, 15 bp, Homo sapiens
tcctaccccccagag

SEQ ID NO: 814129 - DNA, 15 bp, Homo sapiens
cctaccccccagagc

SEQ ID NO: 814130 - DNA, 15 bp, Homo sapiens
ctaccccccagagcg

SEQ ID NO: 814131 - DNA, 15 bp, Homo sapiens
taccccccagagcgg

SEQ ID NO: 814132 - DNA, 15 bp, Homo sapiens
accccccagagcggc

SEQ ID NO: 814133 - DNA, 15 bp, Homo sapiens
ccccccagagcggcc

SEQ ID NO: 814134 - DNA, 15 bp, Homo sapiens
cccccagagcggcct

SEQ ID NO: 814135 - DNA, 15 bp, Homo sapiens
ccccagagcggcctc

SEQ ID NO: 814136 - DNA, 15 bp, Homo sapiens
cccagagcggcctcg

SEQ ID NO: 814137 - DNA, 15 bp, Homo sapiens
ccagagcggcctcgt

SEQ ID NO: 814138 - DNA, 15 bp, Homo sapiens
cagagcggcctcgtc

SEQ ID NO: 814139 - DNA, 15 bp, Homo sapiens
agagcggcctcgtcc

SEQ ID NO: 814140 - DNA, 15 bp, Homo sapiens
gagcggcctcgtcct

SEQ ID NO: 814141 - DNA, 15 bp, Homo sapiens
agcggcctcgtcctg

SEQ ID NO: 814142 - DNA, 15 bp, Homo sapiens
gcggcctcgtcctgt

SEQ ID NO: 814143 - DNA, 15 bp, Homo sapiens
cggcctcgtcctgtc

SEQ ID NO: 814144 - DNA, 15 bp, Homo sapiens
ggcctcgtcctgtct

SEQ ID NO: 814145 - DNA, 15 bp, Homo sapiens
gcctcgtcctgtctg

SEQ ID NO: 814146 - DNA, 15 bp, Homo sapiens
cctcgtcctgtctgg

SEQ ID NO: 814147 - DNA, 15 bp, Homo sapiens
ctcgtcctgtctggg

SEQ ID NO: 814148 - DNA, 15 bp, Homo sapiens
tcgtcctgtctgggg

SEQ ID NO: 814149 - DNA, 15 bp, Homo sapiens
cgtcctgtctggggt

SEQ ID NO: 814150 - DNA, 15 bp, Homo sapiens
gtcctgtctggggtc

SEQ ID NO: 814151 - DNA, 15 bp, Homo sapiens
tcctgtctggggtca

SEQ ID NO: 814152 - DNA, 15 bp, Homo sapiens
cctgtctggggtcag

SEQ ID NO: 814153 - DNA, 15 bp, Homo sapiens
ctgtctggggtcaga

SEQ ID NO: 814154 - DNA, 15 bp, Homo sapiens
tgtctggggtcagat

SEQ ID NO: 814155 - DNA, 15 bp, Homo sapiens
gtctggggtcagata

SEQ ID NO: 814156 - DNA, 15 bp, Homo sapiens
tctggggtcagataa

SEQ ID NO: 814157 - DNA, 15 bp, Homo sapiens
ctggggtcagataag

SEQ ID NO: 814158 - DNA, 15 bp, Homo sapiens
tggggtcagataagc

SEQ ID NO: 814159 - DNA, 15 bp, Homo sapiens
ggggtcagataagcc

SEQ ID NO: 814160 - DNA, 15 bp, Homo sapiens
gggtcagataagcca

SEQ ID NO: 814161 - DNA, 15 bp, Homo sapiens
ggtcagataagccac

SEQ ID NO: 814162 - DNA, 15 bp, Homo sapiens
gtcagataagccacc

SEQ ID NO: 814163 - DNA, 15 bp, Homo sapiens
tcagataagccacct

SEQ ID NO: 814164 - DNA, 15 bp, Homo sapiens
cagataagccaccta

SEQ ID NO: 814165 - DNA, 15 bp, Homo sapiens
agataagccacctaa

SEQ ID NO: 814166 - DNA, 15 bp, Homo sapiens
gataagccacctaag

SEQ ID NO: 814167 - DNA, 15 bp, Homo sapiens
ataagccacctaagc

SEQ ID NO: 814168 - DNA, 15 bp, Homo sapiens
taagccacctaagcg

SEQ ID NO: 814169 - DNA, 15 bp, Homo sapiens
aagccacctaagcgg

SEQ ID NO: 814170 - DNA, 15 bp, Homo sapiens
agccacctaagcggg

SEQ ID NO: 814171 - DNA, 15 bp, Homo sapiens
gccacctaagcgggg

SEQ ID NO: 814172 - DNA, 15 bp, Homo sapiens
ccacctaagcggggt

SEQ ID NO: 814173 - DNA, 15 bp, Homo sapiens
cacctaagcggggtg

SEQ ID NO: 814174 - DNA, 15 bp, Homo sapiens
acctaagcggggtgg

SEQ ID NO: 814175 - DNA, 15 bp, Homo sapiens
cctaagcggggtggg

SEQ ID NO: 814176 - DNA, 15 bp, Homo sapiens
ctaagcggggtgggg

SEQ ID NO: 814177 - DNA, 15 bp, Homo sapiens
taagcggggtggggg

SEQ ID NO: 814178 - DNA, 15 bp, Homo sapiens
aagcggggtgggggg

SEQ ID NO: 814179 - DNA, 15 bp, Homo sapiens
agcggggtggggggt

SEQ ID NO: 814180 - DNA, 15 bp, Homo sapiens
gcggggtggggggta

SEQ ID NO: 814181 - DNA, 15 bp, Homo sapiens
cggggtggggggtag

SEQ ID NO: 814182 - DNA, 15 bp, Homo sapiens
ggggtggggggtaga

SEQ ID NO: 814183 - DNA, 15 bp, Homo sapiens
gggtggggggtagat

SEQ ID NO: 814184 - DNA, 15 bp, Homo sapiens
ggtggggggtagata

SEQ ID NO: 814185 - DNA, 15 bp, Homo sapiens
gtggggggtagatac

SEQ ID NO: 814186 - DNA, 15 bp, Homo sapiens
tggggggtagatact

SEQ ID NO: 814187 - DNA, 15 bp, Homo sapiens
ggggggtagatactc

SEQ ID NO: 814188 - DNA, 15 bp, Homo sapiens
gggggtagatactcc

SEQ ID NO: 814189 - DNA, 15 bp, Homo sapiens
ggggtagatactccc

SEQ ID NO: 814190 - DNA, 15 bp, Homo sapiens
gggtagatactccca

SEQ ID NO: 814191 - DNA, 15 bp, Homo sapiens
ggtagatactcccac

SEQ ID NO: 814192 - DNA, 15 bp, Homo sapiens
gtagatactcccacc

SEQ ID NO: 814193 - DNA, 15 bp, Homo sapiens
tagatactcccaccg

SEQ ID NO: 814194 - DNA, 15 bp, Homo sapiens
agatactcccaccgc

SEQ ID NO: 814195 - DNA, 15 bp, Homo sapiens
gatactcccaccgca

SEQ ID NO: 814196 - DNA, 15 bp, Homo sapiens
atactcccaccgcac

SEQ ID NO: 814197 - DNA, 15 bp, Homo sapiens
tactcccaccgcacc

SEQ ID NO: 814198 - DNA, 15 bp, Homo sapiens
actcccaccgcacca

SEQ ID NO: 814199 - DNA, 15 bp, Homo sapiens
ctcccaccgcaccaa

SEQ ID NO: 814200 - DNA, 15 bp, Homo sapiens
tcccaccgcaccaag

SEQ ID NO: 814201 - DNA, 15 bp, Homo sapiens
cccaccgcaccaagg

SEQ ID NO: 814202 - DNA, 15 bp, Homo sapiens
ccaccgcaccaaggc

SEQ ID NO: 814203 - DNA, 15 bp, Homo sapiens
caccgcaccaaggcc

SEQ ID NO: 814204 - DNA, 15 bp, Homo sapiens
accgcaccaaggcct

SEQ ID NO: 814205 - DNA, 15 bp, Homo sapiens
ccgcaccaaggcctc

SEQ ID NO: 814206 - DNA, 15 bp, Homo sapiens
cgcaccaaggcctcc

SEQ ID NO: 814207 - DNA, 15 bp, Homo sapiens
gcaccaaggcctccc

SEQ ID NO: 814208 - DNA, 15 bp, Homo sapiens
caccaaggcctcccc

SEQ ID NO: 814209 - DNA, 15 bp, Homo sapiens
accaaggcctcccct

SEQ ID NO: 814210 - DNA, 15 bp, Homo sapiens
ccaaggcctcccctt

SEQ ID NO: 814211 - DNA, 15 bp, Homo sapiens
caaggcctccccttc

SEQ ID NO: 814212 - DNA, 15 bp, Homo sapiens
aaggcctccccttcc

SEQ ID NO: 814213 - DNA, 15 bp, Homo sapiens
aggcctccccttcca

SEQ ID NO: 814214 - DNA, 15 bp, Homo sapiens
ggcctccccttccac

SEQ ID NO: 814215 - DNA, 15 bp, Homo sapiens
gcctccccttccaca

SEQ ID NO: 814216 - DNA, 15 bp, Homo sapiens
cctccccttccacag

SEQ ID NO: 814217 - DNA, 15 bp, Homo sapiens
ctccccttccacagt

SEQ ID NO: 814218 - DNA, 15 bp, Homo sapiens
tccccttccacagtt

SEQ ID NO: 814219 - DNA, 15 bp, Homo sapiens
ccccttccacagttg

SEQ ID NO: 814220 - DNA, 15 bp, Homo sapiens
cccttccacagttgg

SEQ ID NO: 814221 - DNA, 15 bp, Homo sapiens
ccttccacagttggc

SEQ ID NO: 814222 - DNA, 15 bp, Homo sapiens
cttccacagttggct

SEQ ID NO: 814223 - DNA, 15 bp, Homo sapiens
ttccacagttggctc

SEQ ID NO: 814224 - DNA, 15 bp, Homo sapiens
tccacagttggctcc

SEQ ID NO: 814225 - DNA, 15 bp, Homo sapiens
ccacagttggctcct

SEQ ID NO: 814226 - DNA, 15 bp, Homo sapiens
cacagttggctcctt

SEQ ID NO: 814227 - DNA, 15 bp, Homo sapiens
acagttggctccttt

SEQ ID NO: 814228 - DNA, 15 bp, Homo sapiens
cagttggctccttta

SEQ ID NO: 814229 - DNA, 15 bp, Homo sapiens
agttggctcctttat

SEQ ID NO: 814230 - DNA, 15 bp, Homo sapiens
gttggctcctttatc

SEQ ID NO: 814231 - DNA, 15 bp, Homo sapiens
ttggctcctttatca

SEQ ID NO: 814232 - DNA, 15 bp, Homo sapiens
tggctcctttatcac

SEQ ID NO: 814233 - DNA, 15 bp, Homo sapiens
ggctcctttatcact

SEQ ID NO: 814234 - DNA, 15 bp, Homo sapiens
gctcctttatcactt

SEQ ID NO: 814235 - DNA, 15 bp, Homo sapiens
ctcctttatcacttt

SEQ ID NO: 814236 - DNA, 15 bp, Homo sapiens
tcctttatcactttc

SEQ ID NO: 814237 - DNA, 15 bp, Homo sapiens
cctttatcactttcc

SEQ ID NO: 814238 - DNA, 15 bp, Homo sapiens
ctttatcactttccc

SEQ ID NO: 814239 - DNA, 15 bp, Homo sapiens
tttatcactttccct

SEQ ID NO: 814240 - DNA, 15 bp, Homo sapiens
ttatcactttccctt

SEQ ID NO: 814241 - DNA, 15 bp, Homo sapiens
tatcactttcccttc

SEQ ID NO: 814242 - DNA, 15 bp, Homo sapiens
atcactttcccttca

SEQ ID NO: 814243 - DNA, 15 bp, Homo sapiens
tcactttcccttcag

SEQ ID NO: 814244 - DNA, 15 bp, Homo sapiens
cactttcccttcagt

SEQ ID NO: 814245 - DNA, 15 bp, Homo sapiens
actttcccttcagtt

SEQ ID NO: 814246 - DNA, 15 bp, Homo sapiens
ctttcccttcagttc

SEQ ID NO: 814247 - DNA, 15 bp, Homo sapiens
tttcccttcagttca

SEQ ID NO: 814248 - DNA, 15 bp, Homo sapiens
ttcccttcagttcac

SEQ ID NO: 814249 - DNA, 15 bp, Homo sapiens
tcccttcagttcacc

SEQ ID NO: 814250 - DNA, 15 bp, Homo sapiens
cccttcagttcaccc

SEQ ID NO: 814251 - DNA, 15 bp, Homo sapiens
ccttcagttcaccca

SEQ ID NO: 814252 - DNA, 15 bp, Homo sapiens
cttcagttcacccag

SEQ ID NO: 814253 - DNA, 15 bp, Homo sapiens
ttcagttcacccagc

SEQ ID NO: 814254 - DNA, 15 bp, Homo sapiens
tcagttcacccagcg

SEQ ID NO: 814255 - DNA, 15 bp, Homo sapiens
cagttcacccagcgg

SEQ ID NO: 814256 - DNA, 15 bp, Homo sapiens
agttcacccagcggg

SEQ ID NO: 814257 - DNA, 15 bp, Homo sapiens
gttcacccagcgggg

SEQ ID NO: 814258 - DNA, 15 bp, Homo sapiens
ttcacccagcgggga

SEQ ID NO: 814259 - DNA, 15 bp, Homo sapiens
tcacccagcggggac

SEQ ID NO: 814260 - DNA, 15 bp, Homo sapiens
cacccagcggggaca

SEQ ID NO: 814261 - DNA, 15 bp, Homo sapiens
acccagcggggacaa

SEQ ID NO: 814262 - DNA, 15 bp, Homo sapiens
cccagcggggacaac

SEQ ID NO: 814263 - DNA, 15 bp, Homo sapiens
ccagcggggacaaca

SEQ ID NO: 814264 - DNA, 15 bp, Homo sapiens
cagcggggacaacac

SEQ ID NO: 814265 - DNA, 15 bp, Homo sapiens
agcggggacaacacg

SEQ ID NO: 814266 - DNA, 15 bp, Homo sapiens
gcggggacaacacgc

SEQ ID NO: 814267 - DNA, 15 bp, Homo sapiens
cggggacaacacgca

SEQ ID NO: 814268 - DNA, 15 bp, Homo sapiens
ggggacaacacgcag

SEQ ID NO: 814269 - DNA, 15 bp, Homo sapiens
gggacaacacgcaga

SEQ ID NO: 814270 - DNA, 15 bp, Homo sapiens
ggacaacacgcagac

SEQ ID NO: 814271 - DNA, 15 bp, Homo sapiens
gacaacacgcagaca

SEQ ID NO: 814272 - DNA, 15 bp, Homo sapiens
acaacacgcagacac

SEQ ID NO: 814273 - DNA, 15 bp, Homo sapiens
caacacgcagacacc

SEQ ID NO: 814274 - DNA, 15 bp, Homo sapiens
aacacgcagacaccc

SEQ ID NO: 814275 - DNA, 15 bp, Homo sapiens
acacgcagacacccg

SEQ ID NO: 814276 - DNA, 15 bp, Homo sapiens
cacgcagacacccgg

SEQ ID NO: 814277 - DNA, 15 bp, Homo sapiens
acgcagacacccggt

SEQ ID NO: 814278 - DNA, 15 bp, Homo sapiens
cgcagacacccggtg

SEQ ID NO: 814279 - DNA, 15 bp, Homo sapiens
gcagacacccggtgg

SEQ ID NO: 814280 - DNA, 15 bp, Homo sapiens
cagacacccggtggt

SEQ ID NO: 814281 - DNA, 15 bp, Homo sapiens
agacacccggtggtg

SEQ ID NO: 814282 - DNA, 15 bp, Homo sapiens
gacacccggtggtgg

SEQ ID NO: 814283 - DNA, 15 bp, Homo sapiens
acacccggtggtggc

SEQ ID NO: 814284 - DNA, 15 bp, Homo sapiens
cacccggtggtggct

SEQ ID NO: 814285 - DNA, 15 bp, Homo sapiens
acccggtggtggctg

SEQ ID NO: 814286 - DNA, 15 bp, Homo sapiens
cccggtggtggctgc

SEQ ID NO: 814287 - DNA, 15 bp, Homo sapiens
ccggtggtggctgca

SEQ ID NO: 814288 - DNA, 15 bp, Homo sapiens
cggtggtggctgcag

SEQ ID NO: 814289 - DNA, 15 bp, Homo sapiens
ggtggtggctgcagg

SEQ ID NO: 814290 - DNA, 15 bp, Homo sapiens
gtggtggctgcaggg

SEQ ID NO: 814291 - DNA, 15 bp, Homo sapiens
tggtggctgcagggc

SEQ ID NO: 814292 - DNA, 15 bp, Homo sapiens
ggtggctgcagggcc

SEQ ID NO: 814293 - DNA, 15 bp, Homo sapiens
gtggctgcagggccc

SEQ ID NO: 814294 - DNA, 15 bp, Homo sapiens
tggctgcagggcccc

SEQ ID NO: 814295 - DNA, 15 bp, Homo sapiens
ggctgcagggccccc

SEQ ID NO: 814296 - DNA, 15 bp, Homo sapiens
gctgcagggcccccg

SEQ ID NO: 814297 - DNA, 15 bp, Homo sapiens
ctgcagggcccccgg

SEQ ID NO: 814298 - DNA, 15 bp, Homo sapiens
tgcagggcccccggc

SEQ ID NO: 814299 - DNA, 15 bp, Homo sapiens
gcagggcccccggca

SEQ ID NO: 814300 - DNA, 15 bp, Homo sapiens
cagggcccccggcag

SEQ ID NO: 814301 - DNA, 15 bp, Homo sapiens
agggcccccggcagc

SEQ ID NO: 814302 - DNA, 15 bp, Homo sapiens
gggcccccggcagcc

SEQ ID NO: 814303 - DNA, 15 bp, Homo sapiens
ggcccccggcagcca

SEQ ID NO: 814304 - DNA, 15 bp, Homo sapiens
gcccccggcagccag

SEQ ID NO: 814305 - DNA, 15 bp, Homo sapiens
cccccggcagccagc

SEQ ID NO: 814306 - DNA, 15 bp, Homo sapiens
ccccggcagccagcg

SEQ ID NO: 814307 - DNA, 15 bp, Homo sapiens
cccggcagccagcgg

SEQ ID NO: 814308 - DNA, 15 bp, Homo sapiens
ccggcagccagcggt

SEQ ID NO: 814309 - DNA, 15 bp, Homo sapiens
cggcagccagcggtg

SEQ ID NO: 814310 - DNA, 15 bp, Homo sapiens
ggcagccagcggtga

SEQ ID NO: 814311 - DNA, 15 bp, Homo sapiens
gcagccagcggtgat

SEQ ID NO: 814312 - DNA, 15 bp, Homo sapiens
cagccagcggtgata

SEQ ID NO: 814313 - DNA, 15 bp, Homo sapiens
agccagcggtgataa

SEQ ID NO: 814314 - DNA, 15 bp, Homo sapiens
gccagcggtgataat

SEQ ID NO: 814315 - DNA, 15 bp, Homo sapiens
ccagcggtgataatg

SEQ ID NO: 814316 - DNA, 15 bp, Homo sapiens
cagcggtgataatgc

SEQ ID NO: 814317 - DNA, 15 bp, Homo sapiens
agcggtgataatgca

SEQ ID NO: 814318 - DNA, 15 bp, Homo sapiens
gcggtgataatgcag

SEQ ID NO: 814319 - DNA, 15 bp, Homo sapiens
cggtgataatgcagg

SEQ ID NO: 814320 - DNA, 15 bp, Homo sapiens
ggtgataatgcaggg

SEQ ID NO: 814321 - DNA, 15 bp, Homo sapiens
gtgataatgcaggga

SEQ ID NO: 814322 - DNA, 15 bp, Homo sapiens
tgataatgcagggaa

SEQ ID NO: 814323 - DNA, 15 bp, Homo sapiens
gataatgcagggaaa

SEQ ID NO: 814324 - DNA, 15 bp, Homo sapiens
ataatgcagggaaag

SEQ ID NO: 814325 - DNA, 15 bp, Homo sapiens
taatgcagggaaagg

SEQ ID NO: 814326 - DNA, 15 bp, Homo sapiens
aatgcagggaaaggc

SEQ ID NO: 814327 - DNA, 15 bp, Homo sapiens
atgcagggaaaggcg

SEQ ID NO: 814328 - DNA, 15 bp, Homo sapiens
tgcagggaaaggcgc

SEQ ID NO: 814329 - DNA, 15 bp, Homo sapiens
gcagggaaaggcgcc

SEQ ID NO: 814330 - DNA, 15 bp, Homo sapiens
cagggaaaggcgccc

SEQ ID NO: 814331 - DNA, 15 bp, Homo sapiens
agggaaaggcgcccc

SEQ ID NO: 814332 - DNA, 15 bp, Homo sapiens
gggaaaggcgcccca

SEQ ID NO: 814333 - DNA, 15 bp, Homo sapiens
ggaaaggcgccccaa

SEQ ID NO: 814334 - DNA, 15 bp, Homo sapiens
gaaaggcgccccaac

SEQ ID NO: 814335 - DNA, 15 bp, Homo sapiens
aaaggcgccccaacc

SEQ ID NO: 814336 - DNA, 15 bp, Homo sapiens
aaggcgccccaacct

SEQ ID NO: 814337 - DNA, 15 bp, Homo sapiens
aggcgccccaacctc

SEQ ID NO: 814338 - DNA, 15 bp, Homo sapiens
ggcgccccaacctca

SEQ ID NO: 814339 - DNA, 15 bp, Homo sapiens
gcgccccaacctcag

SEQ ID NO: 814340 - DNA, 15 bp, Homo sapiens
cgccccaacctcagc

SEQ ID NO: 814341 - DNA, 15 bp, Homo sapiens
gccccaacctcagct

SEQ ID NO: 814342 - DNA, 15 bp, Homo sapiens
ccccaacctcagcta

SEQ ID NO: 814343 - DNA, 15 bp, Homo sapiens
cccaacctcagctac

SEQ ID NO: 814344 - DNA, 15 bp, Homo sapiens
ccaacctcagctacg

SEQ ID NO: 814345 - DNA, 15 bp, Homo sapiens
caacctcagctacgc

SEQ ID NO: 814346 - DNA, 15 bp, Homo sapiens
aacctcagctacgcg

SEQ ID NO: 814347 - DNA, 15 bp, Homo sapiens
acctcagctacgcgg

SEQ ID NO: 814348 - DNA, 15 bp, Homo sapiens
cctcagctacgcggg

SEQ ID NO: 814349 - DNA, 15 bp, Homo sapiens
ctcagctacgcgggc

SEQ ID NO: 814350 - DNA, 15 bp, Homo sapiens
tcagctacgcgggcg

SEQ ID NO: 814351 - DNA, 15 bp, Homo sapiens
cagctacgcgggcgc

SEQ ID NO: 814352 - DNA, 15 bp, Homo sapiens
agctacgcgggcgcc

SEQ ID NO: 814353 - DNA, 15 bp, Homo sapiens
gctacgcgggcgccc

SEQ ID NO: 814354 - DNA, 15 bp, Homo sapiens
ctacgcgggcgccca

SEQ ID NO: 814355 - DNA, 15 bp, Homo sapiens
tacgcgggcgcccac

SEQ ID NO: 814356 - DNA, 15 bp, Homo sapiens
acgcgggcgcccaca

SEQ ID NO: 814357 - DNA, 15 bp, Homo sapiens
cgcgggcgcccacag

SEQ ID NO: 814358 - DNA, 15 bp, Homo sapiens
gcgggcgcccacagg

SEQ ID NO: 814359 - DNA, 15 bp, Homo sapiens
cgggcgcccacaggg

SEQ ID NO: 814360 - DNA, 15 bp, Homo sapiens
gggcgcccacagggc

SEQ ID NO: 814361 - DNA, 15 bp, Homo sapiens
ggcgcccacagggct

SEQ ID NO: 814362 - DNA, 15 bp, Homo sapiens
gcgcccacagggctt

SEQ ID NO: 814363 - DNA, 15 bp, Homo sapiens
cgcccacagggcttc

SEQ ID NO: 814364 - DNA, 15 bp, Homo sapiens
gcccacagggcttct

SEQ ID NO: 814365 - DNA, 15 bp, Homo sapiens
cccacagggcttctc

SEQ ID NO: 814366 - DNA, 15 bp, Homo sapiens
ccacagggcttctcc

SEQ ID NO: 814367 - DNA, 15 bp, Homo sapiens
cacagggcttctccc

SEQ ID NO: 814368 - DNA, 15 bp, Homo sapiens
acagggcttctcccc

SEQ ID NO: 814369 - DNA, 15 bp, Homo sapiens
cagggcttctcccca

SEQ ID NO: 814370 - DNA, 15 bp, Homo sapiens
agggcttctccccac

SEQ ID NO: 814371 - DNA, 15 bp, Homo sapiens
gggcttctccccacc

SEQ ID NO: 814372 - DNA, 15 bp, Homo sapiens
ggcttctccccaccc

SEQ ID NO: 814373 - DNA, 15 bp, Homo sapiens
gcttctccccacccc

SEQ ID NO: 814374 - DNA, 15 bp, Homo sapiens
cttctccccacccct

SEQ ID NO: 814375 - DNA, 15 bp, Homo sapiens
ttctccccaccccta

SEQ ID NO: 814376 - DNA, 15 bp, Homo sapiens
tctccccacccctac

SEQ ID NO: 814377 - DNA, 15 bp, Homo sapiens
ctccccacccctaca

SEQ ID NO: 814378 - DNA, 15 bp, Homo sapiens
tccccacccctacac

SEQ ID NO: 814379 - DNA, 15 bp, Homo sapiens
ccccacccctacacg

SEQ ID NO: 814380 - DNA, 15 bp, Homo sapiens
cccacccctacacgt

SEQ ID NO: 814381 - DNA, 15 bp, Homo sapiens
ccacccctacacgtg

SEQ ID NO: 814382 - DNA, 15 bp, Homo sapiens
cacccctacacgtgc

SEQ ID NO: 814383 - DNA, 15 bp, Homo sapiens
acccctacacgtgcc

SEQ ID NO: 814384 - DNA, 15 bp, Homo sapiens
cccctacacgtgccc

SEQ ID NO: 814385 - DNA, 15 bp, Homo sapiens
ccctacacgtgcccc

SEQ ID NO: 814386 - DNA, 15 bp, Homo sapiens
cctacacgtgcccca

SEQ ID NO: 814387 - DNA, 15 bp, Homo sapiens
ctacacgtgccccag

SEQ ID NO: 814388 - DNA, 15 bp, Homo sapiens
tacacgtgccccagc

SEQ ID NO: 814389 - DNA, 15 bp, Homo sapiens
acacgtgccccagcg

SEQ ID NO: 814390 - DNA, 15 bp, Homo sapiens
cacgtgccccagcgc

SEQ ID NO: 814391 - DNA, 15 bp, Homo sapiens
acgtgccccagcgcc

SEQ ID NO: 814392 - DNA, 15 bp, Homo sapiens
cgtgccccagcgccc

SEQ ID NO: 814393 - DNA, 15 bp, Homo sapiens
gtgccccagcgccct

SEQ ID NO: 814394 - DNA, 15 bp, Homo sapiens
tgccccagcgccctg

SEQ ID NO: 814395 - DNA, 15 bp, Homo sapiens
gccccagcgccctgg

SEQ ID NO: 814396 - DNA, 15 bp, Homo sapiens
ccccagcgccctgga

SEQ ID NO: 814397 - DNA, 15 bp, Homo sapiens
cccagcgccctggag

SEQ ID NO: 814398 - DNA, 15 bp, Homo sapiens
ccagcgccctggaga

SEQ ID NO: 814399 - DNA, 15 bp, Homo sapiens
cagcgccctggagac

SEQ ID NO: 814400 - DNA, 15 bp, Homo sapiens
agcgccctggagacc

SEQ ID NO: 814401 - DNA, 15 bp, Homo sapiens
gcgccctggagaccg

SEQ ID NO: 814402 - DNA, 15 bp, Homo sapiens
cgccctggagaccgc

SEQ ID NO: 814403 - DNA, 15 bp, Homo sapiens
gccctggagaccgcg

SEQ ID NO: 814404 - DNA, 15 bp, Homo sapiens
ccctggagaccgcgc

SEQ ID NO: 814405 - DNA, 15 bp, Homo sapiens
cctggagaccgcgcc

SEQ ID NO: 814406 - DNA, 15 bp, Homo sapiens
ctggagaccgcgcct

SEQ ID NO: 814407 - DNA, 15 bp, Homo sapiens
tggagaccgcgcctg

SEQ ID NO: 814408 - DNA, 15 bp, Homo sapiens
ggagaccgcgcctgg

SEQ ID NO: 814409 - DNA, 15 bp, Homo sapiens
gagaccgcgcctggg

SEQ ID NO: 814410 - DNA, 15 bp, Homo sapiens
agaccgcgcctggga

SEQ ID NO: 814411 - DNA, 15 bp, Homo sapiens
gaccgcgcctgggag

SEQ ID NO: 814412 - DNA, 15 bp, Homo sapiens
accgcgcctgggagc

SEQ ID NO: 814413 - DNA, 15 bp, Homo sapiens
ccgcgcctgggagct

SEQ ID NO: 814414 - DNA, 15 bp, Homo sapiens
cgcgcctgggagcta

SEQ ID NO: 814415 - DNA, 15 bp, Homo sapiens
gcgcctgggagctac

SEQ ID NO: 814416 - DNA, 15 bp, Homo sapiens
cgcctgggagctacg

SEQ ID NO: 814417 - DNA, 15 bp, Homo sapiens
gcctgggagctacga

SEQ ID NO: 814418 - DNA, 15 bp, Homo sapiens
cctgggagctacgag

SEQ ID NO: 814419 - DNA, 15 bp, Homo sapiens
ctgggagctacgagc

SEQ ID NO: 814420 - DNA, 15 bp, Homo sapiens
tgggagctacgagcg

SEQ ID NO: 814421 - DNA, 15 bp, Homo sapiens
gggagctacgagcga

SEQ ID NO: 814422 - DNA, 15 bp, Homo sapiens
ggagctacgagcgag

SEQ ID NO: 814423 - DNA, 15 bp, Homo sapiens
gagctacgagcgagc

SEQ ID NO: 814424 - DNA, 15 bp, Homo sapiens
agctacgagcgagca

SEQ ID NO: 814425 - DNA, 15 bp, Homo sapiens
gctacgagcgagcac

SEQ ID NO: 814426 - DNA, 15 bp, Homo sapiens
ctacgagcgagcacc

SEQ ID NO: 814427 - DNA, 15 bp, Homo sapiens
tacgagcgagcacct

SEQ ID NO: 814428 - DNA, 15 bp, Homo sapiens
acgagcgagcacctt

SEQ ID NO: 814429 - DNA, 15 bp, Homo sapiens
cgagcgagcaccttc

SEQ ID NO: 814430 - DNA, 15 bp, Homo sapiens
gagcgagcaccttcc

SEQ ID NO: 814431 - DNA, 15 bp, Homo sapiens
agcgagcaccttccc

SEQ ID NO: 814432 - DNA, 15 bp, Homo sapiens
gcgagcaccttccct

SEQ ID NO: 814433 - DNA, 15 bp, Homo sapiens
cgagcaccttccctc

SEQ ID NO: 814434 - DNA, 15 bp, Homo sapiens
gagcaccttccctcg

SEQ ID NO: 814435 - DNA, 15 bp, Homo sapiens
agcaccttccctcgc

SEQ ID NO: 814436 - DNA, 15 bp, Homo sapiens
gcaccttccctcgca

SEQ ID NO: 814437 - DNA, 15 bp, Homo sapiens
caccttccctcgcag

SEQ ID NO: 814438 - DNA, 15 bp, Homo sapiens
accttccctcgcaga

SEQ ID NO: 814439 - DNA, 15 bp, Homo sapiens
ccttccctcgcagag

SEQ ID NO: 814440 - DNA, 15 bp, Homo sapiens
cttccctcgcagaga

SEQ ID NO: 814441 - DNA, 15 bp, Homo sapiens
ttccctcgcagagat

SEQ ID NO: 814442 - DNA, 15 bp, Homo sapiens
tccctcgcagagatg

SEQ ID NO: 814443 - DNA, 15 bp, Homo sapiens
ccctcgcagagatgg

SEQ ID NO: 814444 - DNA, 15 bp, Homo sapiens
cctcgcagagatgga

SEQ ID NO: 814445 - DNA, 15 bp, Homo sapiens
ctcgcagagatggat

SEQ ID NO: 814446 - DNA, 15 bp, Homo sapiens
tcgcagagatggatc

SEQ ID NO: 814447 - DNA, 15 bp, Homo sapiens
cgcagagatggatca

SEQ ID NO: 814448 - DNA, 15 bp, Homo sapiens
gcagagatggatcag

SEQ ID NO: 814449 - DNA, 15 bp, Homo sapiens
cagagatggatcaga

SEQ ID NO: 814450 - DNA, 15 bp, Homo sapiens
agagatggatcagat

SEQ ID NO: 814451 - DNA, 15 bp, Homo sapiens
gagatggatcagatt

SEQ ID NO: 814452 - DNA, 15 bp, Homo sapiens
agatggatcagatta

SEQ ID NO: 814453 - DNA, 15 bp, Homo sapiens
gatggatcagattag

SEQ ID NO: 814454 - DNA, 15 bp, Homo sapiens
atggatcagattagc

SEQ ID NO: 814455 - DNA, 15 bp, Homo sapiens
tggatcagattagcc

SEQ ID NO: 814456 - DNA, 15 bp, Homo sapiens
ggatcagattagccc

SEQ ID NO: 814457 - DNA, 15 bp, Homo sapiens
gatcagattagcccc

SEQ ID NO: 814458 - DNA, 15 bp, Homo sapiens
atcagattagccccc

SEQ ID NO: 814459 - DNA, 15 bp, Homo sapiens
tcagattagccccct

SEQ ID NO: 814460 - DNA, 15 bp, Homo sapiens
cagattagccccctg

SEQ ID NO: 814461 - DNA, 15 bp, Homo sapiens
agattagccccctgg

SEQ ID NO: 814462 - DNA, 15 bp, Homo sapiens
gattagccccctggg

SEQ ID NO: 814463 - DNA, 15 bp, Homo sapiens
attagccccctgggg

SEQ ID NO: 814464 - DNA, 15 bp, Homo sapiens
ttagccccctggggc

SEQ ID NO: 814465 - DNA, 15 bp, Homo sapiens
tagccccctggggcg

SEQ ID NO: 814466 - DNA, 15 bp, Homo sapiens
agccccctggggcgg

SEQ ID NO: 814467 - DNA, 15 bp, Homo sapiens
gccccctggggcggt

SEQ ID NO: 814468 - DNA, 15 bp, Homo sapiens
ccccctggggcggtg

SEQ ID NO: 814469 - DNA, 15 bp, Homo sapiens
cccctggggcggtgg

SEQ ID NO: 814470 - DNA, 15 bp, Homo sapiens
ccctggggcggtggc

SEQ ID NO: 814471 - DNA, 15 bp, Homo sapiens
cctggggcggtggca

SEQ ID NO: 814472 - DNA, 15 bp, Homo sapiens
ctggggcggtggcac

SEQ ID NO: 814473 - DNA, 15 bp, Homo sapiens
tggggcggtggcacc

SEQ ID NO: 814474 - DNA, 15 bp, Homo sapiens
ggggcggtggcacct

SEQ ID NO: 814475 - DNA, 15 bp, Homo sapiens
gggcggtggcacctg

SEQ ID NO: 814476 - DNA, 15 bp, Homo sapiens
ggcggtggcacctgc

SEQ ID NO: 814477 - DNA, 15 bp, Homo sapiens
gcggtggcacctgcc

SEQ ID NO: 814478 - DNA, 15 bp, Homo sapiens
cggtggcacctgccc

SEQ ID NO: 814479 - DNA, 15 bp, Homo sapiens
ggtggcacctgcccg

SEQ ID NO: 814480 - DNA, 15 bp, Homo sapiens
gtggcacctgcccgt

SEQ ID NO: 814481 - DNA, 15 bp, Homo sapiens
tggcacctgcccgtc

SEQ ID NO: 814482 - DNA, 15 bp, Homo sapiens
ggcacctgcccgtcc

SEQ ID NO: 814483 - DNA, 15 bp, Homo sapiens
gcacctgcccgtccc

SEQ ID NO: 814484 - DNA, 15 bp, Homo sapiens
cacctgcccgtcccc

SEQ ID NO: 814485 - DNA, 15 bp, Homo sapiens
acctgcccgtcccct

SEQ ID NO: 814486 - DNA, 15 bp, Homo sapiens
cctgcccgtcccctc

SEQ ID NO: 814487 - DNA, 15 bp, Homo sapiens
ctgcccgtcccctcc

SEQ ID NO: 814488 - DNA, 15 bp, Homo sapiens
tgcccgtcccctccc

SEQ ID NO: 814489 - DNA, 15 bp, Homo sapiens
gcccgtcccctcccc

SEQ ID NO: 814490 - DNA, 15 bp, Homo sapiens
cccgtcccctcccct

SEQ ID NO: 814491 - DNA, 15 bp, Homo sapiens
ccgtcccctcccctc

SEQ ID NO: 814492 - DNA, 15 bp, Homo sapiens
cgtcccctcccctcc

SEQ ID NO: 814493 - DNA, 15 bp, Homo sapiens
gtcccctcccctcct

SEQ ID NO: 814494 - DNA, 15 bp, Homo sapiens
tcccctcccctcctc

SEQ ID NO: 814495 - DNA, 15 bp, Homo sapiens
cccctcccctcctct

SEQ ID NO: 814496 - DNA, 15 bp, Homo sapiens
ccctcccctcctctc

SEQ ID NO: 814497 - DNA, 15 bp, Homo sapiens
cctcccctcctctct

SEQ ID NO: 814498 - DNA, 15 bp, Homo sapiens
ctcccctcctctctt

SEQ ID NO: 814499 - DNA, 15 bp, Homo sapiens
tcccctcctctcttc

SEQ ID NO: 814500 - DNA, 15 bp, Homo sapiens
cccctcctctcttct

SEQ ID NO: 814501 - DNA, 15 bp, Homo sapiens
ccctcctctcttctc

SEQ ID NO: 814502 - DNA, 15 bp, Homo sapiens
cctcctctcttctcc

SEQ ID NO: 814503 - DNA, 15 bp, Homo sapiens
ctcctctcttctccc

SEQ ID NO: 814504 - DNA, 15 bp, Homo sapiens
tcctctcttctccca

SEQ ID NO: 814505 - DNA, 15 bp, Homo sapiens
cctctcttctcccac

SEQ ID NO: 814506 - DNA, 15 bp, Homo sapiens
ctctcttctcccacc

SEQ ID NO: 814507 - DNA, 15 bp, Homo sapiens
tctcttctcccaccc

SEQ ID NO: 814508 - DNA, 15 bp, Homo sapiens
ctcttctcccacccc

SEQ ID NO: 814509 - DNA, 15 bp, Homo sapiens
tcttctcccaccccc

SEQ ID NO: 814510 - DNA, 15 bp, Homo sapiens
cttctcccacccccg

SEQ ID NO: 814511 - DNA, 15 bp, Homo sapiens
ttctcccacccccgc

SEQ ID NO: 814512 - DNA, 15 bp, Homo sapiens
tctcccacccccgcc

SEQ ID NO: 814513 - DNA, 15 bp, Homo sapiens
ctcccacccccgcct

SEQ ID NO: 814514 - DNA, 15 bp, Homo sapiens
tcccacccccgcctt

SEQ ID NO: 814515 - DNA, 15 bp, Homo sapiens
cccacccccgccttc

SEQ ID NO: 814516 - DNA, 15 bp, Homo sapiens
ccacccccgccttcc

SEQ ID NO: 814517 - DNA, 15 bp, Homo sapiens
cacccccgccttccc

SEQ ID NO: 814518 - DNA, 15 bp, Homo sapiens
acccccgccttcccc

SEQ ID NO: 814519 - DNA, 15 bp, Homo sapiens
cccccgccttccccc

SEQ ID NO: 814520 - DNA, 15 bp, Homo sapiens
ccccgccttccccct

SEQ ID NO: 814521 - DNA, 15 bp, Homo sapiens
cccgccttccccctg

SEQ ID NO: 814522 - DNA, 15 bp, Homo sapiens
ccgccttccccctgc

SEQ ID NO: 814523 - DNA, 15 bp, Homo sapiens
cgccttccccctgct

SEQ ID NO: 814524 - DNA, 15 bp, Homo sapiens
gccttccccctgctc

SEQ ID NO: 814525 - DNA, 15 bp, Homo sapiens
ccttccccctgctct

SEQ ID NO: 814526 - DNA, 15 bp, Homo sapiens
cttccccctgctctg

SEQ ID NO: 814527 - DNA, 15 bp, Homo sapiens
ttccccctgctctgg

SEQ ID NO: 814528 - DNA, 15 bp, Homo sapiens
tccccctgctctggg

SEQ ID NO: 814529 - DNA, 15 bp, Homo sapiens
ccccctgctctgggc

SEQ ID NO: 814530 - DNA, 15 bp, Homo sapiens
cccctgctctgggcc

SEQ ID NO: 814531 - DNA, 15 bp, Homo sapiens
ccctgctctgggccc

SEQ ID NO: 814532 - DNA, 15 bp, Homo sapiens
cctgctctgggcccc

SEQ ID NO: 814533 - DNA, 15 bp, Homo sapiens
ctgctctgggccccc

SEQ ID NO: 814534 - DNA, 15 bp, Homo sapiens
tgctctgggccccct

SEQ ID NO: 814535 - DNA, 15 bp, Homo sapiens
gctctgggccccctg

SEQ ID NO: 814536 - DNA, 15 bp, Homo sapiens
ctctgggccccctgc

SEQ ID NO: 814537 - DNA, 15 bp, Homo sapiens
tctgggccccctgca

SEQ ID NO: 814538 - DNA, 15 bp, Homo sapiens
ctgggccccctgcac

SEQ ID NO: 814539 - DNA, 15 bp, Homo sapiens
tgggccccctgcacc

SEQ ID NO: 814540 - DNA, 15 bp, Homo sapiens
gggccccctgcacct

SEQ ID NO: 814541 - DNA, 15 bp, Homo sapiens
ggccccctgcacctc

SEQ ID NO: 814542 - DNA, 15 bp, Homo sapiens
gccccctgcacctcc

SEQ ID NO: 814543 - DNA, 15 bp, Homo sapiens
ccccctgcacctccc

SEQ ID NO: 814544 - DNA, 15 bp, Homo sapiens
cccctgcacctccct

SEQ ID NO: 814545 - DNA, 15 bp, Homo sapiens
ccctgcacctccctc

SEQ ID NO: 814546 - DNA, 15 bp, Homo sapiens
cctgcacctccctct

SEQ ID NO: 814547 - DNA, 15 bp, Homo sapiens
ctgcacctccctctt

SEQ ID NO: 814548 - DNA, 15 bp, Homo sapiens
tgcacctccctcttg

SEQ ID NO: 814549 - DNA, 15 bp, Homo sapiens
gcacctccctcttgg

SEQ ID NO: 814550 - DNA, 15 bp, Homo sapiens
cacctccctcttggg

SEQ ID NO: 814551 - DNA, 15 bp, Homo sapiens
acctccctcttgggg

SEQ ID NO: 814552 - DNA, 15 bp, Homo sapiens
cctccctcttggggc

SEQ ID NO: 814553 - DNA, 15 bp, Homo sapiens
ctccctcttggggcc

SEQ ID NO: 814554 - DNA, 15 bp, Homo sapiens
tccctcttggggccc

SEQ ID NO: 814555 - DNA, 15 bp, Homo sapiens
ccctcttggggccca

SEQ ID NO: 814556 - DNA, 15 bp, Homo sapiens
cctcttggggcccac

SEQ ID NO: 814557 - DNA, 15 bp, Homo sapiens
ctcttggggcccacg

SEQ ID NO: 814558 - DNA, 15 bp, Homo sapiens
tcttggggcccacgc

SEQ ID NO: 814559 - DNA, 15 bp, Homo sapiens
cttggggcccacgcg

SEQ ID NO: 814560 - DNA, 15 bp, Homo sapiens
ttggggcccacgcgc

SEQ ID NO: 814561 - DNA, 15 bp, Homo sapiens
tggggcccacgcgcc

SEQ ID NO: 814562 - DNA, 15 bp, Homo sapiens
ggggcccacgcgccg

SEQ ID NO: 814563 - DNA, 15 bp, Homo sapiens
gggcccacgcgccgc

SEQ ID NO: 814564 - DNA, 15 bp, Homo sapiens
ggcccacgcgccgcc

SEQ ID NO: 814565 - DNA, 15 bp, Homo sapiens
gcccacgcgccgccc

SEQ ID NO: 814566 - DNA, 15 bp, Homo sapiens
cccacgcgccgcccc

SEQ ID NO: 814567 - DNA, 15 bp, Homo sapiens
ccacgcgccgcccct

SEQ ID NO: 814568 - DNA, 15 bp, Homo sapiens
cacgcgccgcccctc

SEQ ID NO: 814569 - DNA, 15 bp, Homo sapiens
acgcgccgcccctct

SEQ ID NO: 814570 - DNA, 15 bp, Homo sapiens
cgcgccgcccctctc

SEQ ID NO: 814571 - DNA, 15 bp, Homo sapiens
gcgccgcccctctcc

SEQ ID NO: 814572 - DNA, 15 bp, Homo sapiens
cgccgcccctctccc

SEQ ID NO: 814573 - DNA, 15 bp, Homo sapiens
gccgcccctctccct

SEQ ID NO: 814574 - DNA, 15 bp, Homo sapiens
ccgcccctctccctc

SEQ ID NO: 814575 - DNA, 15 bp, Homo sapiens
cgcccctctccctcg

SEQ ID NO: 814576 - DNA, 15 bp, Homo sapiens
gcccctctccctcgc

SEQ ID NO: 814577 - DNA, 15 bp, Homo sapiens
cccctctccctcgct

SEQ ID NO: 814578 - DNA, 15 bp, Homo sapiens
ccctctccctcgctt

SEQ ID NO: 814579 - DNA, 15 bp, Homo sapiens
cctctccctcgcttg

SEQ ID NO: 814580 - DNA, 15 bp, Homo sapiens
ctctccctcgcttga

SEQ ID NO: 814581 - DNA, 15 bp, Homo sapiens
tctccctcgcttgag

SEQ ID NO: 814582 - DNA, 15 bp, Homo sapiens
ctccctcgcttgagc

SEQ ID NO: 814583 - DNA, 15 bp, Homo sapiens
tccctcgcttgagct

SEQ ID NO: 814584 - DNA, 15 bp, Homo sapiens
ccctcgcttgagctc

SEQ ID NO: 814585 - DNA, 15 bp, Homo sapiens
cctcgcttgagctct

SEQ ID NO: 814586 - DNA, 15 bp, Homo sapiens
ctcgcttgagctctg

SEQ ID NO: 814587 - DNA, 15 bp, Homo sapiens
tcgcttgagctctga

SEQ ID NO: 814588 - DNA, 15 bp, Homo sapiens
cgcttgagctctgag

SEQ ID NO: 814589 - DNA, 15 bp, Homo sapiens
gcttgagctctgagc

SEQ ID NO: 814590 - DNA, 15 bp, Homo sapiens
cttgagctctgagct

SEQ ID NO: 814591 - DNA, 15 bp, Homo sapiens
ttgagctctgagctc

SEQ ID NO: 814592 - DNA, 15 bp, Homo sapiens
tgagctctgagctca

SEQ ID NO: 814593 - DNA, 15 bp, Homo sapiens
gagctctgagctcag

SEQ ID NO: 814594 - DNA, 15 bp, Homo sapiens
agctctgagctcaga

SEQ ID NO: 814595 - DNA, 15 bp, Homo sapiens
gctctgagctcagaa

SEQ ID NO: 814596 - DNA, 15 bp, Homo sapiens
ctctgagctcagaag

SEQ ID NO: 814597 - DNA, 15 bp, Homo sapiens
tctgagctcagaagg

SEQ ID NO: 814598 - DNA, 15 bp, Homo sapiens
ctgagctcagaagga

SEQ ID NO: 814599 - DNA, 15 bp, Homo sapiens
tgagctcagaaggaa

SEQ ID NO: 814600 - DNA, 15 bp, Homo sapiens
gagctcagaaggaac

SEQ ID NO: 814601 - DNA, 15 bp, Homo sapiens
agctcagaaggaacc

SEQ ID NO: 814602 - DNA, 15 bp, Homo sapiens
gctcagaaggaacct

SEQ ID NO: 814603 - DNA, 15 bp, Homo sapiens
ctcagaaggaacctg

SEQ ID NO: 814604 - DNA, 15 bp, Homo sapiens
tcagaaggaacctgc

SEQ ID NO: 814605 - DNA, 15 bp, Homo sapiens
cagaaggaacctgcc

SEQ ID NO: 814606 - DNA, 15 bp, Homo sapiens
agaaggaacctgccc

SEQ ID NO: 814607 - DNA, 15 bp, Homo sapiens
gaaggaacctgcccg

SEQ ID NO: 814608 - DNA, 15 bp, Homo sapiens
aaggaacctgcccgc

SEQ ID NO: 814609 - DNA, 15 bp, Homo sapiens
aggaacctgcccgca

SEQ ID NO: 814610 - DNA, 15 bp, Homo sapiens
ggaacctgcccgcaa

SEQ ID NO: 814611 - DNA, 15 bp, Homo sapiens
gaacctgcccgcaaa

SEQ ID NO: 814612 - DNA, 15 bp, Homo sapiens
aacctgcccgcaaac

SEQ ID NO: 814613 - DNA, 15 bp, Homo sapiens
acctgcccgcaaacc

SEQ ID NO: 814614 - DNA, 15 bp, Homo sapiens
cctgcccgcaaacct

SEQ ID NO: 814615 - DNA, 15 bp, Homo sapiens
ctgcccgcaaacctg

SEQ ID NO: 814616 - DNA, 15 bp, Homo sapiens
tgcccgcaaacctgg

SEQ ID NO: 814617 - DNA, 15 bp, Homo sapiens
gcccgcaaacctggc

SEQ ID NO: 814618 - DNA, 15 bp, Homo sapiens
cccgcaaacctggct

SEQ ID NO: 814619 - DNA, 15 bp, Homo sapiens
ccgcaaacctggctc

SEQ ID NO: 814620 - DNA, 15 bp, Homo sapiens
cgcaaacctggctcc

SEQ ID NO: 814621 - DNA, 15 bp, Homo sapiens
gcaaacctggctccc

SEQ ID NO: 814622 - DNA, 15 bp, Homo sapiens
caaacctggctccca

SEQ ID NO: 814623 - DNA, 15 bp, Homo sapiens
aaacctggctcccag

SEQ ID NO: 814624 - DNA, 15 bp, Homo sapiens
aacctggctcccagc

SEQ ID NO: 814625 - DNA, 15 bp, Homo sapiens
acctggctcccagcc

SEQ ID NO: 814626 - DNA, 15 bp, Homo sapiens
cctggctcccagccc

SEQ ID NO: 814627 - DNA, 15 bp, Homo sapiens
ctggctcccagcccc

SEQ ID NO: 814628 - DNA, 15 bp, Homo sapiens
tggctcccagccccg

SEQ ID NO: 814629 - DNA, 15 bp, Homo sapiens
ggctcccagccccgc

SEQ ID NO: 814630 - DNA, 15 bp, Homo sapiens
gctcccagccccgcc

SEQ ID NO: 814631 - DNA, 15 bp, Homo sapiens
ctcccagccccgccc

SEQ ID NO: 814632 - DNA, 15 bp, Homo sapiens
tcccagccccgccca

SEQ ID NO: 814633 - DNA, 15 bp, Homo sapiens
cccagccccgcccag

SEQ ID NO: 814634 - DNA, 15 bp, Homo sapiens
ccagccccgcccagg

SEQ ID NO: 814635 - DNA, 15 bp, Homo sapiens
cagccccgcccaggg

SEQ ID NO: 814636 - DNA, 15 bp, Homo sapiens
agccccgcccaggga

SEQ ID NO: 814637 - DNA, 15 bp, Homo sapiens
gccccgcccagggag

SEQ ID NO: 814638 - DNA, 15 bp, Homo sapiens
ccccgcccagggagc

SEQ ID NO: 814639 - DNA, 15 bp, Homo sapiens
cccgcccagggagcg

SEQ ID NO: 814640 - DNA, 15 bp, Homo sapiens
ccgcccagggagcgc

SEQ ID NO: 814641 - DNA, 15 bp, Homo sapiens
cgcccagggagcgcg

SEQ ID NO: 814642 - DNA, 15 bp, Homo sapiens
gcccagggagcgcgc

SEQ ID NO: 814643 - DNA, 15 bp, Homo sapiens
cccagggagcgcgcg

SEQ ID NO: 814644 - DNA, 15 bp, Homo sapiens
ccagggagcgcgcgt

SEQ ID NO: 814645 - DNA, 15 bp, Homo sapiens
cagggagcgcgcgtc

SEQ ID NO: 814646 - DNA, 15 bp, Homo sapiens
agggagcgcgcgtcc

SEQ ID NO: 814647 - DNA, 15 bp, Homo sapiens
gggagcgcgcgtccc

SEQ ID NO: 814648 - DNA, 15 bp, Homo sapiens
ggagcgcgcgtccct

SEQ ID NO: 814649 - DNA, 15 bp, Homo sapiens
gagcgcgcgtccctg

SEQ ID NO: 814650 - DNA, 15 bp, Homo sapiens
agcgcgcgtccctga

SEQ ID NO: 814651 - DNA, 15 bp, Homo sapiens
gcgcgcgtccctgag

SEQ ID NO: 814652 - DNA, 15 bp, Homo sapiens
cgcgcgtccctgagc

SEQ ID NO: 814653 - DNA, 15 bp, Homo sapiens
gcgcgtccctgagcc

SEQ ID NO: 814654 - DNA, 15 bp, Homo sapiens
cgcgtccctgagccc

SEQ ID NO: 814655 - DNA, 15 bp, Homo sapiens
gcgtccctgagccca

SEQ ID NO: 814656 - DNA, 15 bp, Homo sapiens
cgtccctgagcccaa

SEQ ID NO: 814657 - DNA, 15 bp, Homo sapiens
gtccctgagcccaag

SEQ ID NO: 814658 - DNA, 15 bp, Homo sapiens
tccctgagcccaagg

SEQ ID NO: 814659 - DNA, 15 bp, Homo sapiens
ccctgagcccaaggg

SEQ ID NO: 814660 - DNA, 15 bp, Homo sapiens
cctgagcccaagggc

SEQ ID NO: 814661 - DNA, 15 bp, Homo sapiens
ctgagcccaagggcc

SEQ ID NO: 814662 - DNA, 15 bp, Homo sapiens
tgagcccaagggccc

SEQ ID NO: 814663 - DNA, 15 bp, Homo sapiens
gagcccaagggcccc

SEQ ID NO: 814664 - DNA, 15 bp, Homo sapiens
agcccaagggcccca

SEQ ID NO: 814665 - DNA, 15 bp, Homo sapiens
gcccaagggccccag

SEQ ID NO: 814666 - DNA, 15 bp, Homo sapiens
cccaagggccccagc

SEQ ID NO: 814667 - DNA, 15 bp, Homo sapiens
ccaagggccccagcg

SEQ ID NO: 814668 - DNA, 15 bp, Homo sapiens
caagggccccagcga

SEQ ID NO: 814669 - DNA, 15 bp, Homo sapiens
aagggccccagcgac

SEQ ID NO: 814670 - DNA, 15 bp, Homo sapiens
agggccccagcgaca

SEQ ID NO: 814671 - DNA, 15 bp, Homo sapiens
gggccccagcgacag

SEQ ID NO: 814672 - DNA, 15 bp, Homo sapiens
ggccccagcgacagc

SEQ ID NO: 814673 - DNA, 15 bp, Homo sapiens
gccccagcgacagca

SEQ ID NO: 814674 - DNA, 15 bp, Homo sapiens
ccccagcgacagcag

SEQ ID NO: 814675 - DNA, 15 bp, Homo sapiens
cccagcgacagcagg

SEQ ID NO: 814676 - DNA, 15 bp, Homo sapiens
ccagcgacagcaggg

SEQ ID NO: 814677 - DNA, 15 bp, Homo sapiens
cagcgacagcaggga

SEQ ID NO: 814678 - DNA, 15 bp, Homo sapiens
agcgacagcagggac

SEQ ID NO: 814679 - DNA, 15 bp, Homo sapiens
gcgacagcagggact

SEQ ID NO: 814680 - DNA, 15 bp, Homo sapiens
cgacagcagggactg

SEQ ID NO: 814681 - DNA, 15 bp, Homo sapiens
gacagcagggactgg

SEQ ID NO: 814682 - DNA, 15 bp, Homo sapiens
acagcagggactggc

SEQ ID NO: 814683 - DNA, 15 bp, Homo sapiens
cagcagggactggct

SEQ ID NO: 814684 - DNA, 15 bp, Homo sapiens
agcagggactggctg

SEQ ID NO: 814685 - DNA, 15 bp, Homo sapiens
gcagggactggctgc

SEQ ID NO: 814686 - DNA, 15 bp, Homo sapiens
cagggactggctgca

SEQ ID NO: 814687 - DNA, 15 bp, Homo sapiens
agggactggctgcag

SEQ ID NO: 814688 - DNA, 15 bp, Homo sapiens
gggactggctgcagc

SEQ ID NO: 814689 - DNA, 15 bp, Homo sapiens
ggactggctgcagcc

SEQ ID NO: 814690 - DNA, 15 bp, Homo sapiens
gactggctgcagccg

SEQ ID NO: 814691 - DNA, 15 bp, Homo sapiens
actggctgcagccgg

SEQ ID NO: 814692 - DNA, 15 bp, Homo sapiens
ctggctgcagccggc

SEQ ID NO: 814693 - DNA, 15 bp, Homo sapiens
tggctgcagccggca

SEQ ID NO: 814694 - DNA, 15 bp, Homo sapiens
ggctgcagccggcag

SEQ ID NO: 814695 - DNA, 15 bp, Homo sapiens
gctgcagccggcagt

SEQ ID NO: 814696 - DNA, 15 bp, Homo sapiens
ctgcagccggcagtg

SEQ ID NO: 814697 - DNA, 15 bp, Homo sapiens
tgcagccggcagtgc

SEQ ID NO: 814698 - DNA, 15 bp, Homo sapiens
gcagccggcagtgcg

SEQ ID NO: 814699 - DNA, 15 bp, Homo sapiens
cagccggcagtgcgg

SEQ ID NO: 814700 - DNA, 15 bp, Homo sapiens
agccggcagtgcggg

SEQ ID NO: 814701 - DNA, 15 bp, Homo sapiens
gccggcagtgcgggg

SEQ ID NO: 814702 - DNA, 15 bp, Homo sapiens
ccggcagtgcggggg

SEQ ID NO: 814703 - DNA, 15 bp, Homo sapiens
cggcagtgcgggggt

SEQ ID NO: 814704 - DNA, 15 bp, Homo sapiens
ggcagtgcgggggtc

SEQ ID NO: 814705 - DNA, 15 bp, Homo sapiens
gcagtgcgggggtcc

SEQ ID NO: 814706 - DNA, 15 bp, Homo sapiens
cagtgcgggggtcca

SEQ ID NO: 814707 - DNA, 15 bp, Homo sapiens
agtgcgggggtccag

SEQ ID NO: 814708 - DNA, 15 bp, Homo sapiens
gtgcgggggtccagc

SEQ ID NO: 814709 - DNA, 15 bp, Homo sapiens
tgcgggggtccagcc

SEQ ID NO: 814710 - DNA, 15 bp, Homo sapiens
gcgggggtccagccg

SEQ ID NO: 814711 - DNA, 15 bp, Homo sapiens
cgggggtccagccgg

SEQ ID NO: 814712 - DNA, 15 bp, Homo sapiens
gggggtccagccggg

SEQ ID NO: 814713 - DNA, 15 bp, Homo sapiens
ggggtccagccgggg

SEQ ID NO: 814714 - DNA, 15 bp, Homo sapiens
gggtccagccggggc

SEQ ID NO: 814715 - DNA, 15 bp, Homo sapiens
ggtccagccggggcg

SEQ ID NO: 814716 - DNA, 15 bp, Homo sapiens
gtccagccggggcga

SEQ ID NO: 814717 - DNA, 15 bp, Homo sapiens
tccagccggggcgag

SEQ ID NO: 814718 - DNA, 15 bp, Homo sapiens
ccagccggggcgagc

SEQ ID NO: 814719 - DNA, 15 bp, Homo sapiens
cagccggggcgagcc

SEQ ID NO: 814720 - DNA, 15 bp, Homo sapiens
agccggggcgagccg

SEQ ID NO: 814721 - DNA, 15 bp, Homo sapiens
gccggggcgagccgg

SEQ ID NO: 814722 - DNA, 15 bp, Homo sapiens
ccggggcgagccggt

SEQ ID NO: 814723 - DNA, 15 bp, Homo sapiens
cggggcgagccggtc

SEQ ID NO: 814724 - DNA, 15 bp, Homo sapiens
ggggcgagccggtcc

SEQ ID NO: 814725 - DNA, 15 bp, Homo sapiens
gggcgagccggtccc

SEQ ID NO: 814726 - DNA, 15 bp, Homo sapiens
ggcgagccggtcccg

SEQ ID NO: 814727 - DNA, 15 bp, Homo sapiens
gcgagccggtcccgc

SEQ ID NO: 814728 - DNA, 15 bp, Homo sapiens
cgagccggtcccgct

SEQ ID NO: 814729 - DNA, 15 bp, Homo sapiens
gagccggtcccgctt

SEQ ID NO: 814730 - DNA, 15 bp, Homo sapiens
agccggtcccgcttg

SEQ ID NO: 814731 - DNA, 15 bp, Homo sapiens
gccggtcccgcttgc

SEQ ID NO: 814732 - DNA, 15 bp, Homo sapiens
ccggtcccgcttgct

SEQ ID NO: 814733 - DNA, 15 bp, Homo sapiens
cggtcccgcttgctg

SEQ ID NO: 814734 - DNA, 15 bp, Homo sapiens
ggtcccgcttgctgc

SEQ ID NO: 814735 - DNA, 15 bp, Homo sapiens
gtcccgcttgctgca

SEQ ID NO: 814736 - DNA, 15 bp, Homo sapiens
tcccgcttgctgcac

SEQ ID NO: 814737 - DNA, 15 bp, Homo sapiens
cccgcttgctgcacc

SEQ ID NO: 814738 - DNA, 15 bp, Homo sapiens
ccgcttgctgcacct

SEQ ID NO: 814739 - DNA, 15 bp, Homo sapiens
cgcttgctgcacctc

SEQ ID NO: 814740 - DNA, 15 bp, Homo sapiens
gcttgctgcacctcc

SEQ ID NO: 814741 - DNA, 15 bp, Homo sapiens
cttgctgcacctccg

SEQ ID NO: 814742 - DNA, 15 bp, Homo sapiens
ttgctgcacctccgc

SEQ ID NO: 814743 - DNA, 15 bp, Homo sapiens
tgctgcacctccgcc

SEQ ID NO: 814744 - DNA, 15 bp, Homo sapiens
gctgcacctccgcct

SEQ ID NO: 814745 - DNA, 15 bp, Homo sapiens
ctgcacctccgcctc

SEQ ID NO: 814746 - DNA, 15 bp, Homo sapiens
tgcacctccgcctcg

SEQ ID NO: 814747 - DNA, 15 bp, Homo sapiens
gcacctccgcctcgc

SEQ ID NO: 814748 - DNA, 15 bp, Homo sapiens
cacctccgcctcgca

SEQ ID NO: 814749 - DNA, 15 bp, Homo sapiens
acctccgcctcgcac

SEQ ID NO: 814750 - DNA, 15 bp, Homo sapiens
cctccgcctcgcaca

SEQ ID NO: 814751 - DNA, 15 bp, Homo sapiens
ctccgcctcgcacag

SEQ ID NO: 814752 - DNA, 15 bp, Homo sapiens
tccgcctcgcacagt

SEQ ID NO: 814753 - DNA, 15 bp, Homo sapiens
ccgcctcgcacagtc

SEQ ID NO: 814754 - DNA, 15 bp, Homo sapiens
cgcctcgcacagtcg

SEQ ID NO: 814755 - DNA, 15 bp, Homo sapiens
gcctcgcacagtcgc

SEQ ID NO: 814756 - DNA, 15 bp, Homo sapiens
cctcgcacagtcgcc

SEQ ID NO: 814757 - DNA, 15 bp, Homo sapiens
ctcgcacagtcgccg

SEQ ID NO: 814758 - DNA, 15 bp, Homo sapiens
tcgcacagtcgccgg

SEQ ID NO: 814759 - DNA, 15 bp, Homo sapiens
cgcacagtcgccggc

SEQ ID NO: 814760 - DNA, 15 bp, Homo sapiens
gcacagtcgccggca

SEQ ID NO: 814761 - DNA, 15 bp, Homo sapiens
cacagtcgccggcag

SEQ ID NO: 814762 - DNA, 15 bp, Homo sapiens
acagtcgccggcagc

SEQ ID NO: 814763 - DNA, 15 bp, Homo sapiens
cagtcgccggcagcc

SEQ ID NO: 814764 - DNA, 15 bp, Homo sapiens
agtcgccggcagcca

SEQ ID NO: 814765 - DNA, 15 bp, Homo sapiens
gtcgccggcagccag

SEQ ID NO: 814766 - DNA, 15 bp, Homo sapiens
tcgccggcagccagc

SEQ ID NO: 814767 - DNA, 15 bp, Homo sapiens
cgccggcagccagct

SEQ ID NO: 814768 - DNA, 15 bp, Homo sapiens
gccggcagccagctg

SEQ ID NO: 814769 - DNA, 15 bp, Homo sapiens
ccggcagccagctga

SEQ ID NO: 814770 - DNA, 15 bp, Homo sapiens
cggcagccagctgaa

SEQ ID NO: 814771 - DNA, 15 bp, Homo sapiens
ggcagccagctgaaa

SEQ ID NO: 814772 - DNA, 15 bp, Homo sapiens
gcagccagctgaaaa

SEQ ID NO: 814773 - DNA, 15 bp, Homo sapiens
cagccagctgaaaac

SEQ ID NO: 814774 - DNA, 15 bp, Homo sapiens
agccagctgaaaaca

SEQ ID NO: 814775 - DNA, 15 bp, Homo sapiens
gccagctgaaaacag

SEQ ID NO: 814776 - DNA, 15 bp, Homo sapiens
ccagctgaaaacagc

SEQ ID NO: 814777 - DNA, 15 bp, Homo sapiens
cagctgaaaacagcg

SEQ ID NO: 814778 - DNA, 15 bp, Homo sapiens
agctgaaaacagcgc

SEQ ID NO: 814779 - DNA, 15 bp, Homo sapiens
gctgaaaacagcgca

SEQ ID NO: 814780 - DNA, 15 bp, Homo sapiens
ctgaaaacagcgcag

SEQ ID NO: 814781 - DNA, 15 bp, Homo sapiens
tgaaaacagcgcagc

SEQ ID NO: 814782 - DNA, 15 bp, Homo sapiens
gaaaacagcgcagcc

SEQ ID NO: 814783 - DNA, 15 bp, Homo sapiens
aaaacagcgcagccg

SEQ ID NO: 814784 - DNA, 15 bp, Homo sapiens
aaacagcgcagccgc

SEQ ID NO: 814785 - DNA, 15 bp, Homo sapiens
aacagcgcagccgcg

SEQ ID NO: 814786 - DNA, 15 bp, Homo sapiens
acagcgcagccgcgt

SEQ ID NO: 814787 - DNA, 15 bp, Homo sapiens
cagcgcagccgcgtg

SEQ ID NO: 814788 - DNA, 15 bp, Homo sapiens
agcgcagccgcgtgg

SEQ ID NO: 814789 - DNA, 15 bp, Homo sapiens
gcgcagccgcgtggt

SEQ ID NO: 814790 - DNA, 15 bp, Homo sapiens
cgcagccgcgtggtg

SEQ ID NO: 814791 - DNA, 15 bp, Homo sapiens
gcagccgcgtggtgc

SEQ ID NO: 814792 - DNA, 15 bp, Homo sapiens
cagccgcgtggtgcc

SEQ ID NO: 814793 - DNA, 15 bp, Homo sapiens
agccgcgtggtgcca

SEQ ID NO: 814794 - DNA, 15 bp, Homo sapiens
gccgcgtggtgccac

SEQ ID NO: 814795 - DNA, 15 bp, Homo sapiens
ccgcgtggtgccacc

SEQ ID NO: 814796 - DNA, 15 bp, Homo sapiens
cgcgtggtgccacct

SEQ ID NO: 814797 - DNA, 15 bp, Homo sapiens
gcgtggtgccacctg

SEQ ID NO: 814798 - DNA, 15 bp, Homo sapiens
cgtggtgccacctgc

SEQ ID NO: 814799 - DNA, 15 bp, Homo sapiens
gtggtgccacctgct

SEQ ID NO: 814800 - DNA, 15 bp, Homo sapiens
tggtgccacctgctg

SEQ ID NO: 814801 - DNA, 15 bp, Homo sapiens
ggtgccacctgctgg

SEQ ID NO: 814802 - DNA, 15 bp, Homo sapiens
gtgccacctgctggt

SEQ ID NO: 814803 - DNA, 15 bp, Homo sapiens
tgccacctgctggtc

SEQ ID NO: 814804 - DNA, 15 bp, Homo sapiens
gccacctgctggtct

SEQ ID NO: 814805 - DNA, 15 bp, Homo sapiens
ccacctgctggtctc

SEQ ID NO: 814806 - DNA, 15 bp, Homo sapiens
cacctgctggtctct

SEQ ID NO: 814807 - DNA, 15 bp, Homo sapiens
acctgctggtctctg

SEQ ID NO: 814808 - DNA, 15 bp, Homo sapiens
cctgctggtctctgg

SEQ ID NO: 814809 - DNA, 15 bp, Homo sapiens
ctgctggtctctggg

SEQ ID NO: 814810 - DNA, 15 bp, Homo sapiens
tgctggtctctggga

SEQ ID NO: 814811 - DNA, 15 bp, Homo sapiens
gctggtctctgggaa

SEQ ID NO: 814812 - DNA, 15 bp, Homo sapiens
ctggtctctgggaag

SEQ ID NO: 814813 - DNA, 15 bp, Homo sapiens
tggtctctgggaagg

SEQ ID NO: 814814 - DNA, 15 bp, Homo sapiens
ggtctctgggaagga

SEQ ID NO: 814815 - DNA, 15 bp, Homo sapiens
gtctctgggaaggag

SEQ ID NO: 814816 - DNA, 15 bp, Homo sapiens
tctctgggaaggagg

SEQ ID NO: 814817 - DNA, 15 bp, Homo sapiens
ctctgggaaggagga

SEQ ID NO: 814818 - DNA, 15 bp, Homo sapiens
tctgggaaggaggag

SEQ ID NO: 814819 - DNA, 15 bp, Homo sapiens
ctgggaaggaggagg

SEQ ID NO: 814820 - DNA, 15 bp, Homo sapiens
tgggaaggaggagga

SEQ ID NO: 814821 - DNA, 15 bp, Homo sapiens
gggaaggaggaggat

SEQ ID NO: 814822 - DNA, 15 bp, Homo sapiens
ggaaggaggaggatg

SEQ ID NO: 814823 - DNA, 15 bp, Homo sapiens
gaaggaggaggatgg

SEQ ID NO: 814824 - DNA, 15 bp, Homo sapiens
aaggaggaggatggg

SEQ ID NO: 814825 - DNA, 15 bp, Homo sapiens
aggaggaggatggga

SEQ ID NO: 814826 - DNA, 15 bp, Homo sapiens
ggaggaggatgggac

SEQ ID NO: 814827 - DNA, 15 bp, Homo sapiens
gaggaggatgggacg

SEQ ID NO: 814828 - DNA, 15 bp, Homo sapiens
aggaggatgggacgg

SEQ ID NO: 814829 - DNA, 15 bp, Homo sapiens
ggaggatgggacggt

SEQ ID NO: 814830 - DNA, 15 bp, Homo sapiens
gaggatgggacggtt

SEQ ID NO: 814831 - DNA, 15 bp, Homo sapiens
aggatgggacggttg

SEQ ID NO: 814832 - DNA, 15 bp, Homo sapiens
ggatgggacggttgt

SEQ ID NO: 814833 - DNA, 15 bp, Homo sapiens
gatgggacggttgtt

SEQ ID NO: 814834 - DNA, 15 bp, Homo sapiens
atgggacggttgttg

SEQ ID NO: 814835 - DNA, 15 bp, Homo sapiens
tgggacggttgttgc

SEQ ID NO: 814836 - DNA, 15 bp, Homo sapiens
gggacggttgttgcg

SEQ ID NO: 814837 - DNA, 15 bp, Homo sapiens
ggacggttgttgcgg

SEQ ID NO: 814838 - DNA, 15 bp, Homo sapiens
gacggttgttgcggc

SEQ ID NO: 814839 - DNA, 15 bp, Homo sapiens
acggttgttgcggct

SEQ ID NO: 814840 - DNA, 15 bp, Homo sapiens
cggttgttgcggctc

SEQ ID NO: 814841 - DNA, 15 bp, Homo sapiens
ggttgttgcggctct

SEQ ID NO: 814842 - DNA, 15 bp, Homo sapiens
gttgttgcggctctg

SEQ ID NO: 814843 - DNA, 15 bp, Homo sapiens
ttgttgcggctctgg

SEQ ID NO: 814844 - DNA, 15 bp, Homo sapiens
tgttgcggctctggg

SEQ ID NO: 814845 - DNA, 15 bp, Homo sapiens
gttgcggctctggga

SEQ ID NO: 814846 - DNA, 15 bp, Homo sapiens
ttgcggctctgggac

SEQ ID NO: 814847 - DNA, 15 bp, Homo sapiens
tgcggctctgggact

SEQ ID NO: 814848 - DNA, 15 bp, Homo sapiens
gcggctctgggactg

SEQ ID NO: 814849 - DNA, 15 bp, Homo sapiens
cggctctgggactgc

SEQ ID NO: 814850 - DNA, 15 bp, Homo sapiens
ggctctgggactgcc

SEQ ID NO: 814851 - DNA, 15 bp, Homo sapiens
gctctgggactgccc

SEQ ID NO: 814852 - DNA, 15 bp, Homo sapiens
ctctgggactgcccc

SEQ ID NO: 814853 - DNA, 15 bp, Homo sapiens
tctgggactgcccct

SEQ ID NO: 814854 - DNA, 15 bp, Homo sapiens
ctgggactgcccctg

SEQ ID NO: 814855 - DNA, 15 bp, Homo sapiens
tgggactgcccctgg

SEQ ID NO: 814856 - DNA, 15 bp, Homo sapiens
gggactgcccctggc

SEQ ID NO: 814857 - DNA, 15 bp, Homo sapiens
ggactgcccctggcc

SEQ ID NO: 814858 - DNA, 15 bp, Homo sapiens
gactgcccctggccc

SEQ ID NO: 814859 - DNA, 15 bp, Homo sapiens
actgcccctggcccc

SEQ ID NO: 814860 - DNA, 15 bp, Homo sapiens
ctgcccctggccccg

SEQ ID NO: 814861 - DNA, 15 bp, Homo sapiens
tgcccctggccccga

SEQ ID NO: 814862 - DNA, 15 bp, Homo sapiens
gcccctggccccgag

SEQ ID NO: 814863 - DNA, 15 bp, Homo sapiens
cccctggccccgagg

SEQ ID NO: 814864 - DNA, 15 bp, Homo sapiens
ccctggccccgaggg

SEQ ID NO: 814865 - DNA, 15 bp, Homo sapiens
cctggccccgagggt

SEQ ID NO: 814866 - DNA, 15 bp, Homo sapiens
ctggccccgagggtt

SEQ ID NO: 814867 - DNA, 15 bp, Homo sapiens
tggccccgagggttg

SEQ ID NO: 814868 - DNA, 15 bp, Homo sapiens
ggccccgagggttga

SEQ ID NO: 814869 - DNA, 15 bp, Homo sapiens
gccccgagggttgag

SEQ ID NO: 814870 - DNA, 15 bp, Homo sapiens
ccccgagggttgaga

SEQ ID NO: 814871 - DNA, 15 bp, Homo sapiens
cccgagggttgagaa

SEQ ID NO: 814872 - DNA, 15 bp, Homo sapiens
ccgagggttgagaag

SEQ ID NO: 814873 - DNA, 15 bp, Homo sapiens
cgagggttgagaagc

SEQ ID NO: 814874 - DNA, 15 bp, Homo sapiens
gagggttgagaagca

SEQ ID NO: 814875 - DNA, 15 bp, Homo sapiens
agggttgagaagcat

SEQ ID NO: 814876 - DNA, 15 bp, Homo sapiens
gggttgagaagcatc

SEQ ID NO: 814877 - DNA, 15 bp, Homo sapiens
ggttgagaagcatct

SEQ ID NO: 814878 - DNA, 15 bp, Homo sapiens
gttgagaagcatctt

SEQ ID NO: 814879 - DNA, 15 bp, Homo sapiens
ttgagaagcatcttg

SEQ ID NO: 814880 - DNA, 15 bp, Homo sapiens
tgagaagcatcttgg

SEQ ID NO: 814881 - DNA, 15 bp, Homo sapiens
gagaagcatcttggc

SEQ ID NO: 814882 - DNA, 15 bp, Homo sapiens
agaagcatcttggcg

SEQ ID NO: 814883 - DNA, 15 bp, Homo sapiens
gaagcatcttggcgc

SEQ ID NO: 814884 - DNA, 15 bp, Homo sapiens
aagcatcttggcgcc

SEQ ID NO: 814885 - DNA, 15 bp, Homo sapiens
agcatcttggcgccg

SEQ ID NO: 814886 - DNA, 15 bp, Homo sapiens
gcatcttggcgccgg

SEQ ID NO: 814887 - DNA, 15 bp, Homo sapiens
catcttggcgccggg

SEQ ID NO: 814888 - DNA, 15 bp, Homo sapiens
atcttggcgccgggc

SEQ ID NO: 814889 - DNA, 15 bp, Homo sapiens
tcttggcgccgggcc

SEQ ID NO: 814890 - DNA, 15 bp, Homo sapiens
cttggcgccgggccc

SEQ ID NO: 814891 - DNA, 15 bp, Homo sapiens
ttggcgccgggccct

SEQ ID NO: 814892 - DNA, 15 bp, Homo sapiens
tggcgccgggccctc

SEQ ID NO: 814893 - DNA, 15 bp, Homo sapiens
ggcgccgggccctca

SEQ ID NO: 814894 - DNA, 15 bp, Homo sapiens
gcgccgggccctcag

SEQ ID NO: 814895 - DNA, 15 bp, Homo sapiens
cgccgggccctcagc

SEQ ID NO: 814896 - DNA, 15 bp, Homo sapiens
gccgggccctcagcc

SEQ ID NO: 814897 - DNA, 15 bp, Homo sapiens
ccgggccctcagccg

SEQ ID NO: 814898 - DNA, 15 bp, Homo sapiens
cgggccctcagccgc

SEQ ID NO: 814899 - DNA, 15 bp, Homo sapiens
gggccctcagccgcc

SEQ ID NO: 814900 - DNA, 15 bp, Homo sapiens
ggccctcagccgcca

SEQ ID NO: 814901 - DNA, 15 bp, Homo sapiens
gccctcagccgccag

SEQ ID NO: 814902 - DNA, 15 bp, Homo sapiens
ccctcagccgccagc

SEQ ID NO: 814903 - DNA, 15 bp, Homo sapiens
cctcagccgccagct

SEQ ID NO: 814904 - DNA, 15 bp, Homo sapiens
ctcagccgccagctt

SEQ ID NO: 814905 - DNA, 15 bp, Homo sapiens
tcagccgccagcttc

SEQ ID NO: 814906 - DNA, 15 bp, Homo sapiens
cagccgccagcttcg

SEQ ID NO: 814907 - DNA, 15 bp, Homo sapiens
agccgccagcttcga

SEQ ID NO: 814908 - DNA, 15 bp, Homo sapiens
gccgccagcttcgag

SEQ ID NO: 814909 - DNA, 15 bp, Homo sapiens
ccgccagcttcgagg

SEQ ID NO: 814910 - DNA, 15 bp, Homo sapiens
cgccagcttcgaggc

SEQ ID NO: 814911 - DNA, 15 bp, Homo sapiens
gccagcttcgaggct

SEQ ID NO: 814912 - DNA, 15 bp, Homo sapiens
ccagcttcgaggctg

SEQ ID NO: 814913 - DNA, 15 bp, Homo sapiens
cagcttcgaggctgc

SEQ ID NO: 814914 - DNA, 15 bp, Homo sapiens
agcttcgaggctgct

SEQ ID NO: 814915 - DNA, 15 bp, Homo sapiens
gcttcgaggctgctg

SEQ ID NO: 814916 - DNA, 15 bp, Homo sapiens
cttcgaggctgctgg

SEQ ID NO: 814917 - DNA, 15 bp, Homo sapiens
ttcgaggctgctggg

SEQ ID NO: 814918 - DNA, 15 bp, Homo sapiens
tcgaggctgctggga

SEQ ID NO: 814919 - DNA, 15 bp, Homo sapiens
cgaggctgctgggag

SEQ ID NO: 814920 - DNA, 15 bp, Homo sapiens
gaggctgctgggagc

SEQ ID NO: 814921 - DNA, 15 bp, Homo sapiens
aggctgctgggagca

SEQ ID NO: 814922 - DNA, 15 bp, Homo sapiens
ggctgctgggagcag

SEQ ID NO: 814923 - DNA, 15 bp, Homo sapiens
gctgctgggagcagc

SEQ ID NO: 814924 - DNA, 15 bp, Homo sapiens
ctgctgggagcagca

SEQ ID NO: 814925 - DNA, 15 bp, Homo sapiens
tgctgggagcagcag

SEQ ID NO: 814926 - DNA, 15 bp, Homo sapiens
gctgggagcagcagc

SEQ ID NO: 814927 - DNA, 15 bp, Homo sapiens
ctgggagcagcagct

SEQ ID NO: 814928 - DNA, 15 bp, Homo sapiens
tgggagcagcagctg

SEQ ID NO: 814929 - DNA, 15 bp, Homo sapiens
gggagcagcagctgc

SEQ ID NO: 814930 - DNA, 15 bp, Homo sapiens
ggagcagcagctgct

SEQ ID NO: 814931 - DNA, 15 bp, Homo sapiens
gagcagcagctgcta

SEQ ID NO: 814932 - DNA, 15 bp, Homo sapiens
agcagcagctgctaa

SEQ ID NO: 814933 - DNA, 15 bp, Homo sapiens
gcagcagctgctaag

SEQ ID NO: 814934 - DNA, 15 bp, Homo sapiens
cagcagctgctaagg

SEQ ID NO: 814935 - DNA, 15 bp, Homo sapiens
agcagctgctaagga

SEQ ID NO: 814936 - DNA, 15 bp, Homo sapiens
gcagctgctaaggag

SEQ ID NO: 814937 - DNA, 15 bp, Homo sapiens
cagctgctaaggaga

SEQ ID NO: 814938 - DNA, 15 bp, Homo sapiens
agctgctaaggagaa

SEQ ID NO: 814939 - DNA, 15 bp, Homo sapiens
gctgctaaggagaag

SEQ ID NO: 814940 - DNA, 15 bp, Homo sapiens
ctgctaaggagaagc

SEQ ID NO: 814941 - DNA, 15 bp, Homo sapiens
tgctaaggagaagcc

SEQ ID NO: 814942 - DNA, 15 bp, Homo sapiens
gctaaggagaagcct

SEQ ID NO: 814943 - DNA, 15 bp, Homo sapiens
ctaaggagaagcctg

SEQ ID NO: 814944 - DNA, 15 bp, Homo sapiens
taaggagaagcctgg

SEQ ID NO: 814945 - DNA, 15 bp, Homo sapiens
aaggagaagcctggg

SEQ ID NO: 814946 - DNA, 15 bp, Homo sapiens
aggagaagcctgggt

SEQ ID NO: 814947 - DNA, 15 bp, Homo sapiens
ggagaagcctgggtc

SEQ ID NO: 814948 - DNA, 15 bp, Homo sapiens
gagaagcctgggtca

SEQ ID NO: 814949 - DNA, 15 bp, Homo sapiens
agaagcctgggtcag

SEQ ID NO: 814950 - DNA, 15 bp, Homo sapiens
gaagcctgggtcaga

SEQ ID NO: 814951 - DNA, 15 bp, Homo sapiens
aagcctgggtcagag

SEQ ID NO: 814952 - DNA, 15 bp, Homo sapiens
agcctgggtcagagt

SEQ ID NO: 814953 - DNA, 15 bp, Homo sapiens
gcctgggtcagagtt

SEQ ID NO: 814954 - DNA, 15 bp, Homo sapiens
cctgggtcagagttc

SEQ ID NO: 814955 - DNA, 15 bp, Homo sapiens
ctgggtcagagttct

SEQ ID NO: 814956 - DNA, 15 bp, Homo sapiens
tgggtcagagttctg

SEQ ID NO: 814957 - DNA, 15 bp, Homo sapiens
gggtcagagttctgc

SEQ ID NO: 814958 - DNA, 15 bp, Homo sapiens
ggtcagagttctgcc

SEQ ID NO: 814959 - DNA, 15 bp, Homo sapiens
gtcagagttctgccc

SEQ ID NO: 814960 - DNA, 15 bp, Homo sapiens
tcagagttctgccca

SEQ ID NO: 814961 - DNA, 15 bp, Homo sapiens
cagagttctgcccac

SEQ ID NO: 814962 - DNA, 15 bp, Homo sapiens
agagttctgcccacc

SEQ ID NO: 814963 - DNA, 15 bp, Homo sapiens
gagttctgcccaccc

SEQ ID NO: 814964 - DNA, 15 bp, Homo sapiens
agttctgcccacccg

SEQ ID NO: 814965 - DNA, 15 bp, Homo sapiens
gttctgcccacccgc

SEQ ID NO: 814966 - DNA, 15 bp, Homo sapiens
ttctgcccacccgcg

SEQ ID NO: 814967 - DNA, 15 bp, Homo sapiens
tctgcccacccgcgc

SEQ ID NO: 814968 - DNA, 15 bp, Homo sapiens
ctgcccacccgcgcc

SEQ ID NO: 814969 - DNA, 15 bp, Homo sapiens
tgcccacccgcgccc

SEQ ID NO: 814970 - DNA, 15 bp, Homo sapiens
gcccacccgcgccca

SEQ ID NO: 814971 - DNA, 15 bp, Homo sapiens
cccacccgcgcccat

SEQ ID NO: 814972 - DNA, 15 bp, Homo sapiens
ccacccgcgcccatc

SEQ ID NO: 814973 - DNA, 15 bp, Homo sapiens
cacccgcgcccatct

SEQ ID NO: 814974 - DNA, 15 bp, Homo sapiens
acccgcgcccatctc

SEQ ID NO: 814975 - DNA, 15 bp, Homo sapiens
cccgcgcccatctcc

SEQ ID NO: 814976 - DNA, 15 bp, Homo sapiens
ccgcgcccatctcca

SEQ ID NO: 814977 - DNA, 15 bp, Homo sapiens
cgcgcccatctccat

SEQ ID NO: 814978 - DNA, 15 bp, Homo sapiens
gcgcccatctccatc

SEQ ID NO: 814979 - DNA, 15 bp, Homo sapiens
cgcccatctccatca

SEQ ID NO: 814980 - DNA, 15 bp, Homo sapiens
gcccatctccatcat

SEQ ID NO: 814981 - DNA, 15 bp, Homo sapiens
cccatctccatcatt

SEQ ID NO: 814982 - DNA, 15 bp, Homo sapiens
ccatctccatcattt

SEQ ID NO: 814983 - DNA, 15 bp, Homo sapiens
catctccatcatttc

SEQ ID NO: 814984 - DNA, 15 bp, Homo sapiens
atctccatcatttcc

SEQ ID NO: 814985 - DNA, 15 bp, Homo sapiens
tctccatcatttccc

SEQ ID NO: 814986 - DNA, 15 bp, Homo sapiens
ctccatcatttcccc

SEQ ID NO: 814987 - DNA, 15 bp, Homo sapiens
tccatcatttcccca

SEQ ID NO: 814988 - DNA, 15 bp, Homo sapiens
ccatcatttccccaa

SEQ ID NO: 814989 - DNA, 15 bp, Homo sapiens
catcatttccccaaa

SEQ ID NO: 814990 - DNA, 15 bp, Homo sapiens
atcatttccccaaac

SEQ ID NO: 814991 - DNA, 15 bp, Homo sapiens
tcatttccccaaacc

SEQ ID NO: 814992 - DNA, 15 bp, Homo sapiens
catttccccaaacct

SEQ ID NO: 814993 - DNA, 15 bp, Homo sapiens
atttccccaaacctc

SEQ ID NO: 814994 - DNA, 15 bp, Homo sapiens
tttccccaaacctcg

SEQ ID NO: 814995 - DNA, 15 bp, Homo sapiens
ttccccaaacctcga

SEQ ID NO: 814996 - DNA, 15 bp, Homo sapiens
tccccaaacctcgag

SEQ ID NO: 814997 - DNA, 15 bp, Homo sapiens
ccccaaacctcgagt

SEQ ID NO: 814998 - DNA, 15 bp, Homo sapiens
cccaaacctcgagtc

SEQ ID NO: 814999 - DNA, 15 bp, Homo sapiens
ccaaacctcgagtcc

SEQ ID NO: 815000 - DNA, 15 bp, Homo sapiens
caaacctcgagtccc

SEQ ID NO: 815001 - DNA, 15 bp, Homo sapiens
aaacctcgagtcccc

SEQ ID NO: 815002 - DNA, 15 bp, Homo sapiens
aacctcgagtcccct

SEQ ID NO: 815003 - DNA, 15 bp, Homo sapiens
acctcgagtcccctg

SEQ ID NO: 815004 - DNA, 15 bp, Homo sapiens
cctcgagtcccctgc

SEQ ID NO: 815005 - DNA, 15 bp, Homo sapiens
ctcgagtcccctgct

SEQ ID NO: 815006 - DNA, 15 bp, Homo sapiens
tcgagtcccctgctt

SEQ ID NO: 815007 - DNA, 15 bp, Homo sapiens
cgagtcccctgcttt

SEQ ID NO: 815008 - DNA, 15 bp, Homo sapiens
cagaccccggtgggc

SEQ ID NO: 815009 - DNA, 15 bp, Homo sapiens
agaccccggtgggcc

SEQ ID NO: 815010 - DNA, 15 bp, Homo sapiens
gaccccggtgggccc

SEQ ID NO: 815011 - DNA, 15 bp, Homo sapiens
accccggtgggccct

SEQ ID NO: 815012 - DNA, 15 bp, Homo sapiens
ccccggtgggccctg

SEQ ID NO: 815013 - DNA, 15 bp, Homo sapiens
cccggtgggccctgg

SEQ ID NO: 815014 - DNA, 15 bp, Homo sapiens
ccggtgggccctggt

SEQ ID NO: 815015 - DNA, 15 bp, Homo sapiens
cggtgggccctggtg

SEQ ID NO: 815016 - DNA, 15 bp, Homo sapiens
ggtgggccctggtgg

SEQ ID NO: 815017 - DNA, 15 bp, Homo sapiens
gtgggccctggtggg

SEQ ID NO: 815018 - DNA, 15 bp, Homo sapiens
tgggccctggtgggc

SEQ ID NO: 815019 - DNA, 15 bp, Homo sapiens
gggccctggtgggcg

SEQ ID NO: 815020 - DNA, 15 bp, Homo sapiens
ggccctggtgggcgg

SEQ ID NO: 815021 - DNA, 15 bp, Homo sapiens
gccctggtgggcggc

SEQ ID NO: 815022 - DNA, 15 bp, Homo sapiens
ccctggtgggcggct

SEQ ID NO: 815023 - DNA, 15 bp, Homo sapiens
cctggtgggcggctg

SEQ ID NO: 815024 - DNA, 15 bp, Homo sapiens
ctggtgggcggctgg

SEQ ID NO: 815025 - DNA, 15 bp, Homo sapiens
tggtgggcggctggc

SEQ ID NO: 815026 - DNA, 15 bp, Homo sapiens
ggtgggcggctggca

SEQ ID NO: 815027 - DNA, 15 bp, Homo sapiens
gtgggcggctggcag

SEQ ID NO: 815028 - DNA, 15 bp, Homo sapiens
tgggcggctggcagc

SEQ ID NO: 815029 - DNA, 15 bp, Homo sapiens
gggcggctggcagct

SEQ ID NO: 815030 - DNA, 15 bp, Homo sapiens
ggcggctggcagctg

SEQ ID NO: 815031 - DNA, 15 bp, Homo sapiens
gcggctggcagctgg

SEQ ID NO: 815032 - DNA, 15 bp, Homo sapiens
cggctggcagctggg

SEQ ID NO: 815033 - DNA, 15 bp, Homo sapiens
ggctggcagctgggc

SEQ ID NO: 815034 - DNA, 15 bp, Homo sapiens
gctggcagctgggcc

SEQ ID NO: 815035 - DNA, 15 bp, Homo sapiens
ctggcagctgggccc

SEQ ID NO: 815036 - DNA, 15 bp, Homo sapiens
tggcagctgggcccc

SEQ ID NO: 815037 - DNA, 15 bp, Homo sapiens
ggcagctgggcccct

SEQ ID NO: 815038 - DNA, 15 bp, Homo sapiens
gcagctgggcccctc

SEQ ID NO: 815039 - DNA, 15 bp, Homo sapiens
cagctgggcccctca

SEQ ID NO: 815040 - DNA, 15 bp, Homo sapiens
agctgggcccctcac

SEQ ID NO: 815041 - DNA, 15 bp, Homo sapiens
gctgggcccctcacc

SEQ ID NO: 815042 - DNA, 15 bp, Homo sapiens
ctgggcccctcaccc

SEQ ID NO: 815043 - DNA, 15 bp, Homo sapiens
tgggcccctcaccct

SEQ ID NO: 815044 - DNA, 15 bp, Homo sapiens
gggcccctcaccctg

SEQ ID NO: 815045 - DNA, 15 bp, Homo sapiens
ggcccctcaccctgt

SEQ ID NO: 815046 - DNA, 15 bp, Homo sapiens
gcccctcaccctgtt

SEQ ID NO: 815047 - DNA, 15 bp, Homo sapiens
cccctcaccctgttg

SEQ ID NO: 815048 - DNA, 15 bp, Homo sapiens
ccctcaccctgttga

SEQ ID NO: 815049 - DNA, 15 bp, Homo sapiens
cctcaccctgttgaa

SEQ ID NO: 815050 - DNA, 15 bp, Homo sapiens
ctcaccctgttgaac

SEQ ID NO: 815051 - DNA, 15 bp, Homo sapiens
tcaccctgttgaact

SEQ ID NO: 815052 - DNA, 15 bp, Homo sapiens
caccctgttgaactg

SEQ ID NO: 815053 - DNA, 15 bp, Homo sapiens
accctgttgaactgg

SEQ ID NO: 815054 - DNA, 15 bp, Homo sapiens
ccctgttgaactggg

SEQ ID NO: 815055 - DNA, 15 bp, Homo sapiens
cctgttgaactggga

SEQ ID NO: 815056 - DNA, 15 bp, Homo sapiens
ctgttgaactgggac

SEQ ID NO: 815057 - DNA, 15 bp, Homo sapiens
tgttgaactgggacc

SEQ ID NO: 815058 - DNA, 15 bp, Homo sapiens
gttgaactgggacca

SEQ ID NO: 815059 - DNA, 15 bp, Homo sapiens
ttgaactgggaccag

SEQ ID NO: 815060 - DNA, 15 bp, Homo sapiens
tgaactgggaccagg

SEQ ID NO: 815061 - DNA, 15 bp, Homo sapiens
gaactgggaccagga

SEQ ID NO: 815062 - DNA, 15 bp, Homo sapiens
aactgggaccaggac

SEQ ID NO: 815063 - DNA, 15 bp, Homo sapiens
actgggaccaggaca

SEQ ID NO: 815064 - DNA, 15 bp, Homo sapiens
ctgggaccaggacac

SEQ ID NO: 815065 - DNA, 15 bp, Homo sapiens
tgggaccaggacacg

SEQ ID NO: 815066 - DNA, 15 bp, Homo sapiens
gggaccaggacacgg

SEQ ID NO: 815067 - DNA, 15 bp, Homo sapiens
ggaccaggacacgga

SEQ ID NO: 815068 - DNA, 15 bp, Homo sapiens
gaccaggacacggac

SEQ ID NO: 815069 - DNA, 15 bp, Homo sapiens
accaggacacggaca

SEQ ID NO: 815070 - DNA, 15 bp, Homo sapiens
ccaggacacggacag

SEQ ID NO: 815071 - DNA, 15 bp, Homo sapiens
caggacacggacagg

SEQ ID NO: 815072 - DNA, 15 bp, Homo sapiens
aggacacggacaggc

SEQ ID NO: 815073 - DNA, 15 bp, Homo sapiens
ggacacggacaggcc

SEQ ID NO: 815074 - DNA, 15 bp, Homo sapiens
gacacggacaggcca

SEQ ID NO: 815075 - DNA, 15 bp, Homo sapiens
acacggacaggccac

SEQ ID NO: 815076 - DNA, 15 bp, Homo sapiens
cacggacaggccact

SEQ ID NO: 815077 - DNA, 15 bp, Homo sapiens
acggacaggccactg

SEQ ID NO: 815078 - DNA, 15 bp, Homo sapiens
cggacaggccactgt

SEQ ID NO: 815079 - DNA, 15 bp, Homo sapiens
ggacaggccactgta

SEQ ID NO: 815080 - DNA, 15 bp, Homo sapiens
gacaggccactgtag

SEQ ID NO: 815081 - DNA, 15 bp, Homo sapiens
acaggccactgtagt

SEQ ID NO: 815082 - DNA, 15 bp, Homo sapiens
caggccactgtagtc

SEQ ID NO: 815083 - DNA, 15 bp, Homo sapiens
aggccactgtagtcc

SEQ ID NO: 815084 - DNA, 15 bp, Homo sapiens
ggccactgtagtcct

SEQ ID NO: 815085 - DNA, 15 bp, Homo sapiens
gccactgtagtcctc

SEQ ID NO: 815086 - DNA, 15 bp, Homo sapiens
ccactgtagtcctcc

SEQ ID NO: 815087 - DNA, 15 bp, Homo sapiens
cactgtagtcctcca

SEQ ID NO: 815088 - DNA, 15 bp, Homo sapiens
actgtagtcctccag

SEQ ID NO: 815089 - DNA, 15 bp, Homo sapiens
ctgtagtcctccagg

SEQ ID NO: 815090 - DNA, 15 bp, Homo sapiens
tgtagtcctccaggt

SEQ ID NO: 815091 - DNA, 15 bp, Homo sapiens
gtagtcctccaggtg

SEQ ID NO: 815092 - DNA, 15 bp, Homo sapiens
tagtcctccaggtgg

SEQ ID NO: 815093 - DNA, 15 bp, Homo sapiens
agtcctccaggtggc

SEQ ID NO: 815094 - DNA, 15 bp, Homo sapiens
gtcctccaggtggct

SEQ ID NO: 815095 - DNA, 15 bp, Homo sapiens
tcctccaggtggctg

SEQ ID NO: 815096 - DNA, 15 bp, Homo sapiens
cctccaggtggctgc

SEQ ID NO: 815097 - DNA, 15 bp, Homo sapiens
ctccaggtggctgct

SEQ ID NO: 815098 - DNA, 15 bp, Homo sapiens
tccaggtggctgctg

SEQ ID NO: 815099 - DNA, 15 bp, Homo sapiens
ccaggtggctgctgc

SEQ ID NO: 815100 - DNA, 15 bp, Homo sapiens
caggtggctgctgct

SEQ ID NO: 815101 - DNA, 15 bp, Homo sapiens
aggtggctgctgctg

SEQ ID NO: 815102 - DNA, 15 bp, Homo sapiens
ggtggctgctgctgt

SEQ ID NO: 815103 - DNA, 15 bp, Homo sapiens
gtggctgctgctgtt

SEQ ID NO: 815104 - DNA, 15 bp, Homo sapiens
tggctgctgctgttg

SEQ ID NO: 815105 - DNA, 15 bp, Homo sapiens
ggctgctgctgttgt

SEQ ID NO: 815106 - DNA, 15 bp, Homo sapiens
gctgctgctgttgtt

SEQ ID NO: 815107 - DNA, 15 bp, Homo sapiens
ctgctgctgttgttg

SEQ ID NO: 815108 - DNA, 15 bp, Homo sapiens
tgctgctgttgttga

SEQ ID NO: 815109 - DNA, 15 bp, Homo sapiens
gctgctgttgttgaa

SEQ ID NO: 815110 - DNA, 15 bp, Homo sapiens
ctgctgttgttgaac

SEQ ID NO: 815111 - DNA, 15 bp, Homo sapiens
tgctgttgttgaaca

SEQ ID NO: 815112 - DNA, 15 bp, Homo sapiens
gctgttgttgaacag

SEQ ID NO: 815113 - DNA, 15 bp, Homo sapiens
ctgttgttgaacagt

SEQ ID NO: 815114 - DNA, 15 bp, Homo sapiens
tgttgttgaacagtt

SEQ ID NO: 815115 - DNA, 15 bp, Homo sapiens
gttgttgaacagttt

SEQ ID NO: 815116 - DNA, 15 bp, Homo sapiens
ttgttgaacagtttc

SEQ ID NO: 815117 - DNA, 15 bp, Homo sapiens
tgttgaacagtttct

SEQ ID NO: 815118 - DNA, 15 bp, Homo sapiens
gttgaacagtttctg

SEQ ID NO: 815119 - DNA, 15 bp, Homo sapiens
ttgaacagtttctgc

SEQ ID NO: 815120 - DNA, 15 bp, Homo sapiens
tgaacagtttctgcg

SEQ ID NO: 815121 - DNA, 15 bp, Homo sapiens
gaacagtttctgcgc

SEQ ID NO: 815122 - DNA, 15 bp, Homo sapiens
aacagtttctgcgcc

SEQ ID NO: 815123 - DNA, 15 bp, Homo sapiens
acagtttctgcgcca

SEQ ID NO: 815124 - DNA, 15 bp, Homo sapiens
cagtttctgcgccag

SEQ ID NO: 815125 - DNA, 15 bp, Homo sapiens
agtttctgcgccagg

SEQ ID NO: 815126 - DNA, 15 bp, Homo sapiens
gtttctgcgccagga

SEQ ID NO: 815127 - DNA, 15 bp, Homo sapiens
tttctgcgccaggaa

SEQ ID NO: 815128 - DNA, 15 bp, Homo sapiens
ttctgcgccaggaac

SEQ ID NO: 815129 - DNA, 15 bp, Homo sapiens
tctgcgccaggaaca

SEQ ID NO: 815130 - DNA, 15 bp, Homo sapiens
ctgcgccaggaacac

SEQ ID NO: 815131 - DNA, 15 bp, Homo sapiens
tgcgccaggaacacg

SEQ ID NO: 815132 - DNA, 15 bp, Homo sapiens
gcgccaggaacacga

SEQ ID NO: 815133 - DNA, 15 bp, Homo sapiens
cgccaggaacacgag

SEQ ID NO: 815134 - DNA, 15 bp, Homo sapiens
gccaggaacacgagg

SEQ ID NO: 815135 - DNA, 15 bp, Homo sapiens
ccaggaacacgaggt

SEQ ID NO: 815136 - DNA, 15 bp, Homo sapiens
caggaacacgaggtt

SEQ ID NO: 815137 - DNA, 15 bp, Homo sapiens
aggaacacgaggttc

SEQ ID NO: 815138 - DNA, 15 bp, Homo sapiens
ggaacacgaggttct

SEQ ID NO: 815139 - DNA, 15 bp, Homo sapiens
gaacacgaggttctc

SEQ ID NO: 815140 - DNA, 15 bp, Homo sapiens
aacacgaggttctcc

SEQ ID NO: 815141 - DNA, 15 bp, Homo sapiens
acacgaggttctcct

SEQ ID NO: 815142 - DNA, 15 bp, Homo sapiens
cacgaggttctcctt

SEQ ID NO: 815143 - DNA, 15 bp, Homo sapiens
acgaggttctccttg

SEQ ID NO: 815144 - DNA, 15 bp, Homo sapiens
cgaggttctccttgg

SEQ ID NO: 815145 - DNA, 15 bp, Homo sapiens
gaggttctccttggt

SEQ ID NO: 815146 - DNA, 15 bp, Homo sapiens
aggttctccttggtc

SEQ ID NO: 815147 - DNA, 15 bp, Homo sapiens
ggttctccttggtca

SEQ ID NO: 815148 - DNA, 15 bp, Homo sapiens
gttctccttggtcag

SEQ ID NO: 815149 - DNA, 15 bp, Homo sapiens
ttctccttggtcagg

SEQ ID NO: 815150 - DNA, 15 bp, Homo sapiens
tctccttggtcaggc

SEQ ID NO: 815151 - DNA, 15 bp, Homo sapiens
ctccttggtcaggcc

SEQ ID NO: 815152 - DNA, 15 bp, Homo sapiens
tccttggtcaggccc

SEQ ID NO: 815153 - DNA, 15 bp, Homo sapiens
ccttggtcaggcccc

SEQ ID NO: 815154 - DNA, 15 bp, Homo sapiens
cttggtcaggccccg

SEQ ID NO: 815155 - DNA, 15 bp, Homo sapiens
ttggtcaggccccgg

SEQ ID NO: 815156 - DNA, 15 bp, Homo sapiens
tggtcaggccccggt

SEQ ID NO: 815157 - DNA, 15 bp, Homo sapiens
ggtcaggccccggtt

SEQ ID NO: 815158 - DNA, 15 bp, Homo sapiens
gtcaggccccggttg

SEQ ID NO: 815159 - DNA, 15 bp, Homo sapiens
tcaggccccggttgc

SEQ ID NO: 815160 - DNA, 15 bp, Homo sapiens
caggccccggttgct

SEQ ID NO: 815161 - DNA, 15 bp, Homo sapiens
aggccccggttgctc

SEQ ID NO: 815162 - DNA, 15 bp, Homo sapiens
ggccccggttgctct

SEQ ID NO: 815163 - DNA, 15 bp, Homo sapiens
gccccggttgctctg

SEQ ID NO: 815164 - DNA, 15 bp, Homo sapiens
ccccggttgctctgc

SEQ ID NO: 815165 - DNA, 15 bp, Homo sapiens
cccggttgctctgca

SEQ ID NO: 815166 - DNA, 15 bp, Homo sapiens
ccggttgctctgcac

SEQ ID NO: 815167 - DNA, 15 bp, Homo sapiens
cggttgctctgcact

SEQ ID NO: 815168 - DNA, 15 bp, Homo sapiens
ggttgctctgcactt

SEQ ID NO: 815169 - DNA, 15 bp, Homo sapiens
gttgctctgcacttc

SEQ ID NO: 815170 - DNA, 15 bp, Homo sapiens
ttgctctgcacttcg

SEQ ID NO: 815171 - DNA, 15 bp, Homo sapiens
tgctctgcacttcgg

SEQ ID NO: 815172 - DNA, 15 bp, Homo sapiens
gctctgcacttcggc

SEQ ID NO: 815173 - DNA, 15 bp, Homo sapiens
ctctgcacttcggcc

SEQ ID NO: 815174 - DNA, 15 bp, Homo sapiens
tctgcacttcggcct

SEQ ID NO: 815175 - DNA, 212702 bp, Homo sapiens
gatctcatggtcacccttgcaagagaaatatctaattgaaaaaaaatatgaagagtattaattttgatagtgctaaaatgacataaagggatctcactgggcttgagatattaagtattaaaattgttaaaggtttaaattgttagtaacttgttattgcatagaaaatgtgccaaatgtcagtaaataaaaaaactttttttaaaataaaaatttacagaaaaattatgacgatactacaaagaggttctgtacaaccccctcccagtttctcttactattaacatcttaaattagtatgttacatttgtcacaattagtgaaccaatattgatacattagtactaactaaagtcagtgttccttttactggagaatggtgttagaaactaaggtctgggcactgtggtatggtggttgctattgagatgttgttatttttaggttctttctcagctgacagagcaaagaaatatatgtgtgtatattaacctatgtgtacacatacatctatgattatttcgatatgtaacatctgtatctttattaagctaaatatgagttcatatggtgtcttcaattctaatcaattactgtatagattattctagcctcttcctcttgcttatctgtaacttcctatttcaaaccgtgaaaaatctgtcttccaccacctactatctgcttacctaatttctcatttccagtttatgtatacagtggcttcagaattattacatatagccctgtgggatacaactttgtcaactagagtggtgcttatgtaagttcttctatctttagttttactgactctactcattttcaaagttgcttagtccagaacatttcactcatactcctcctagtgaagttgtttcatatgttagtaacacagattctttttttgcagtctgcattccattttagggttccctcctctccaatctcctaaattattattttttaaattcatatacatcaaggtttattctttgtgctgtaaagttctataggttttgacaaatacaaagtgtcatgtacccatcattacaatgtcatacagaatcgtttcactgccctaaaaatatcccttgtcctttgcctattcaacccttcccctcctttcccaaactcctggcaaccactgatctgtttatcgtggagctgtgtctcttccagaatgcatataattgaaatcatacaatatgtagacttttcaccctggcttattttgttagcaatatgcatttaacattcatccatgtccttatgtggcttgtagttcattactttttactgctgggtagtattctatcatagaaatgtaccacagtttgtttatccattcgctgattgaagtatatcaatataccttggaacatgactgctagatagtatagtaagactatatttagctttgcaagaaactgccaaactgtattttaaagtggctgtaccattgtgccaccagcaactcctgccagtgatccagtattgtcagttttttggattttagccattctaaaaggtgagtgatggtatctcattgtcgttttaatttgtaatactctaatgacaaatgatggtggatttcttttcatatgtttgtttcccatttgtatatcttctttagtatgtgtctgttcggatgttttgcttactttttttaaactgggttgattgttttctttttctttttctttttttcttttgagacggagtctcgctctttagccaggctggagtgcagtggcgccatctcggctcactgcaagctctgccttccgggttcaagtgattttcgtacctcagcctcccgagtagctgggactacaggcgcccgccaccacacctggctaatttttttgtatttttggtggagacgaggtttcaccatgtcggtcaggctggtcttaaactcctgaccatagatgatctgcctgtcttggcctcccaaagctaggattacaggctaggattgcaagtaggataggcgtgagccactatgcccggctgattgttttcttattgttgagttttatattcctttattttggaatggagtaaataagcacaataaaactggttgagaagataatcattttaaaaaatcataatgaattatatgatacacattctattatttcatgagaaaaatcatggaagagtcagttcaatattcagtgaatcattaatgtgaggatgtaaaatttgatacacacacaatttattgagcacttatcctatgtcaatcagtgcgctaaatttttttcttttatattaactcatttaattcccactacagccctgtgtaatggaagctgttcttcccaccattttataaatgatgaaaccttagatcacactcagtggaagagttctaaagccctatgtggtgctgtctgatagaaaatatattttaaaatgagatgatctaaggtatgtttacctacagagctaaaggaaagtatgtcttaaatttaataatgagtgattatagaaacagattacaggaaatagtccatctttcttgaattatccaaagtgttacaagcctcaaattcattgttgtttgtatgagaacacatttaggtgatcggatacaagtatatagtttttcccagatgtttatttcacatcaacttttttttcatctttactttcttcaaggcaagtaggatagaatgtaataatcaaataggtttttcccccaccccattttagagcagtaaataattccaagaggcatttgctttgttattggataagtaattaacaaaaagaattcctaaagacaattagaatcatgaccatactgggtcttgaaaacatagcagtgcaatcacagccaatggctggcttggtggctggcgatgagcctgcagcatgggactgggtgttccaccacggcttggctgttgtccagggagctttcagtcgctggggttcccacagtgccaagcacgaggcaggtgcagaaaggataaaggtttctgttccccattagtgttgagggcatgcaggtcgtctgacatgaggggcatgagaagtgaagttcctgctttgctttgggtaaggaatctgcattgacaggggcttaagaacctgctcttatacctcacatgtcttagcctggcctttgagatgagtagggagtttgagtgggagtttgagtttcctcttagagaaacagaactgagtgaggcactttcattttttagtttcctagtaccttttgttaaggaaaaaaaagccaaaatgagtgttaaaaatttaaaatttttagattttaaatttgcatttaaaaaattaatgcttttttttttagatggagttttgctcctgttgcccaggctggagtgcaatggcgtgatcttggctcactgcaacctctgcctcccaggttcaagcgattctcctgcctcagcctcctgagtagctgggattacaggcgcccgccaccacacccagctaatttttgtatttttagtagagacgaggtttcaccatgttggccaggctggtttcgaactcctgacctcaggtgatccacctgcctcggcctcccaaagtgctgggattacaggcgtgagccactgcgcccagccaaaattaatgctcttaacatgtaaaaagtaaagtgcagtggaactttggcacttatgcaagataatacaacttaaaagatttataagaatattaactgctaatgaacagtagagggatctaattaacattgaaagttacatgaagaaagtgtttgtcttctattcccaacagggcatctttgtaactataatgactcttgagaagattttgttttcagtcttaaaacaggaatgggggaaaaatgtaggcctgggtaagtacaaaaaagggaaatcgaaggagactagggagttactgtagattttgcaggactgaggaaagtcagaataaatacaagagacaatgatgctggtaattttctttgggctcagagaagtaatgctttgctttgtcagagttgtagtaaaatttagatctaagaagctcgttggaagttgtagcagaatcctgtcttgtttactatgtccactgcctggcacagagatggaacactataagctttccaaaaacatttgtggaatggaatcagaaagtcactttactttccaagatgcaattctttattttgaaacataaatatttaaaaagtttataaatttttgacataattatgacatacatccttccaggcttttttcaatgcttatgcaaacatgtatatgtgacctgtaggtctccttttacccagtttttggagtacaaataaggtcacatctcttcttaactttaaatgtttaaaacattgaagttagcaagaagcccagaaactttttctaaagaactttttctacccctaattgtccaagaactccaagttttcttggttcaaagaggtaatttctgtttctaaacactagaaaaaggagaatatgaaggatctgactagtccattgtcacatgccccaccccattttctgctgcaagagcctctgtcaccacagcattgtgtcactgatgaaaataggtcctcccacagagtcagatgcatcccagtctattgctactattatcaccctgttggaacagatccctgcacaggtcacagcagttcctggaagatgaaactcattctcccagccttaatatcagccaggaatactttattcttggacttccaaagttgctatagtagtttccaaagcccacctagcacctaaggatgggtgagtaaagacaagcttccagtttcagctgcagaaacaagaacccatctcccaccacatagtaggtgttggcattaaacttctctcttatgatgtaatgtgttctccttgggatctttggtatttctgtttgcatacttcatttggggtcatctcaacacaccaaacagattctaactacactgaatctcaaaagaaatagaagtagtctttgtcaagccacagaaaagagcttgttcttctttcttctcctcctagacacctgcatacttttcattcctctaatgaagagggtccattcaataaattcagaagaaatgaagaaaaaaatacaagtctagtttgtgataagtccttgttttcacctaaacagagaagcaagaacataaattatataaggcaccttctcttaattaaataaacaaaagagttctatgtggtctagttacacagagatcacagtgattaactactcagctctggagccagacaactgggtttgttcagattctggcactctttcttgaatttgggcatggcatttgaccttctgtacctcagtttcttcatttgtaaattgggatgttaataataaaatgtactaactttatagggtctttcctgaggcacataatgtaatttaaacaacaaacaagtatacataacagacatttttttcttacaaagacggtaccatactaaacttaatttgctttttttgaaaaattatatttttaggtaaaactttgtaagttaatttttttgggtgaaaaacatgatacaaatttatcaatttgattttgcttcattagcatgatatactttgttctagaaagtacttaggcaattttcatacatgtctttaaatataatttttgcacatgtaaataagagttccaaagtattttgccatcacttcatcagtgttgcctctcaacagcctttgaagcgaggagatgccagtcactgtctcagacacaaggatgcaggctgtggaggccagtgagccatagtcactgaactgggaattggctgtccttttgaccatacagattaatcactgtagtttcaccaatcacattgaacttgaagatcaataaatgaccctaaaacaatgagatttcatagactctttctatatagtggaagttaaagcaaatcagaaaggagtccctaaacctgtgaattcttgaattttagttttccaggtcaacaagccttctttaagtgacttcatgtcccgtccttggtttttgatcatagactggtataagaaatgaccataaaataaatgtttttgagaaaattatagctgaaaatactgtccatgataccactcagtgatataagtctctaaacagcaaactcttccatgaatggggtggagggaagatggtttttctttccaggtgaacttacatattgccttttctcagatatcagattatgagaataatacaatggactgggctttgacagccaagactttcagaattgctgttagtgcccatgtgcaataaaatttttctatcatgtctctcttattatttcaaatgccctgttttactgttttgattactaattatctatttagagggaaacagttataaataaataattcactgttctacttactgtgcacccctgcctttctaaatataactcttctatgtagcatgtaaattaccacagaactcatctcagaaaaaagatcactacttttctttttagaattcaaatttataatatctaattctataggtggcatctggcctttagcatgatatcaccaatgaaaatttaatctgtgttatgaattcccttgtttctagaaaagcttcagcaggaaaatgagaagagaacccataaaaaccataaaacatttcatgaatggtagctttagaaaatcttacaggatttggtagcttttacatttatgacaaagtgatatttttgatgttgttcataattatttcagttcattagcagcattaataagctcccgttttgtacagcttgaagatctttaagacttccttaatgagaaactacctttaagctacggaagacccatcagggtgccaaattccatctggacacagttacaaatacaccactgttgatgagctgaaaattagagcaaccaaacaacagagctttaaaatgttatttcaatgcaaagggacattttcaccatagaaaaatagaagtttgcctctaaataaaaatgattttacaattgcaagagtacttgatttacccctttacatttagttcaaataccaaaaatttcttaaggaatgagaaattccaatgttcctgagaattctgatagcttttagagagttcagttttctgtagcattccattttgcaatcctatacaaatttctaatttataaccagtggtatgtaatgataatttctaatatttattaagtgtttattgggttctaagtgctttacgtctgatatatgtatcacatttaatttatttcatccagtggttcttaactggggacaactttgtacctctctccccaacatatttggcaatctctggagatagtcctggatctccagatctatctgtcacaacctaggatgtatgtggtcctacgagcatccagtgaatagaagctagagatactgctgaacattccacagtacaagggcaacccccacatcaaagaattatccacacccaaatgtcagtagtactgaggtagagagaccctaacttaatctgttcaacaatcctatgaggtgattttttttttttttttgagataaggtcttactctgtcacctaaactggagtgcagtggcatgatcacagctcactgcagcctcgatctcccaggctcaagccatccacctgcctcagcctcccaagtagctgagatcagaagcatgcaccaccacacctggctattttttttatttttttgtagagacaaggtcttactgtgttgcccaggctgatctcaaactcctgagctcaagcaatcctcctgcctcagcttctcaaagttctgggattacaggcatgagccatggcacctgaccaaggtgagtgtatttaacctcattttcaggcaaggaaacaaaagacagaaaagttaagtagcttacttaaggtcacagagctaagtgtggtgccaggattgaaaacctagttctttattgctttagcacaagctatttccactatactctgtcatgttcagagaatgttgatgtccatcagtggattctaaattttgaaggatggagatactgccttattctgtacatctgctttagcacccaagctcttgcttggtgaaaaattaatagtaaacattcatcttttgagcatcttcaaatatcccctttagaatgacattcaattattaggtcagtaaccccaagagaaaacggttgtttgagtgtatatactgtattacaaaataaggggtgaattcaaaggaaaacataagatgcaattcgtgcctccaaggaggttgtagggaagaggggttatgaatgtatgtaaatagaagttggtgtgcgtgtgtgtttataaacagaattgtcagaccaaacattattttggaagcagtaaaagtaaactagaatctggcctagtcatgtcccaggacacctctttcaagtcctgaaacatctttgtaagactgtaatgtgtgtttacatcctaggtaatcactgtggcccactgttgaagagctgtggctgttcttacccttctagcttagataaacttataagcacaaccagactacatatatgaagctgaagagaccttgtctttttttaacgagcttttcttcccgataggagtgactatttcttttcttcttccacattttcaggttttagtgtacttgtgattgctacccacttatcactattaaagtctactcaggagagaatctgagaaacactctcaaattaagttgaacatgatggataagtaaagtattgtgaaagttcactctcatgatttctaatggtgaaacctggcagggtgactaatctttgacgagaaggttatcacttataatctttcatatattgagatcatttgtaagaagcacccagcacattgctgaacacaaagtaggtattaaataaatgttggcttccttttctcctactcatcctcgctcttctttttaatatacctttaaaatgatgccacagaaatggccacccaatcttctatatttaaggtcagttcttgcattaggaaattctataggggaagtatgtgaagtatgtgtagtcagtcattaaatgcttgggctctggccacagattgtttaggtttaaatcccagtttcctcttttattattaattgtgcaacttgcttgggaaaacatgaaacttgtttttcctcaggttcattatctgtaatatatagtgaatgaagaagtttcctgtcccatgaaggtgttgtaaagattaaaaaaggcaaattaggctgtgtatttgtcataataattggcatatatggtaagtgaccaacaaccataaggtattataaaattgttataaaatgatatgagctatcattgagcagcatgaaagaagagcttcactgtttcacctactatcaccctggcccattaatctctttcctgttcctgacatttcagagatacgtttaggatttcaatcatgaccttaagccacatttgaacaattttctggtggataagtcctcattcccacattatgtatgtacctagatgcaaatcctgaatatcatgtcgcaattagtgcatctggacatgcttgctaactgtgttaaagctctgaataatggtaaagttttatttctaccaaaacaaatttgggctgtaatgttttatgataaaaatctgtggtcttcctatgtacatgtgtgtgtacatgcttaaaatgcaatgttatagttaaatgtaattcattaaaagtatgtaactccagtggctacttagtttggctacttggtttgtagatttctgctttcctgtttcattgttaaacaggtctagaagttattatttcatgaaactaatgtgaggaaaaagactatgttgatatataagtgacattatataaatacatgagggatgatttgattagaagcagtattacacagtgataggagtaatggtttagaactagactcaggtttgaatcttagctctatcattataggcatttacttaacttttcttgtttgcttaactgaaaactgaagataataacacctatttacatggttgttataagggttatatgaataatgtctggcaaatagtaagaactcaagtaactgtttcactctttccagaaggagattggctgaaaaatatttggagtctcctccagccatattccttggtcagcttctatgatcctctttggagcttaattcttaatccctttattttcacttgcttgttgataacaaagaagaactaattattaatttatttcaaaatgcatgtattatatttgatgggccacactaacagttataaaccaaacaacagattgggaatggggaagtggatgtggtgagttcaatcacatgtctgggaaaagtcaatagtgaagacagagtctcacaattttttgtcataatggagagatgaaaacacaggtagaggatttcaaacaacagagtggatggtgagttaaaaatgctgaaattctttcctggtgtctaacttaatgcaatgtggtttatctctttgctcttttctctactattcaaatttaggataataaagattaaatgtttctaaatcttactttacaatatcaagaaaaaaaggtatgcttttgcccacggaagggcaaagcagagctatgaaaacctgctgaacacattctttattttcaacacaggttcttgtctttccatcatgaaatgcacattttatttgtactgtatttgggtgaccacaagtcaacaacaagataattcacaagacccttgccttagatgtgtcggcaataaagtaatcaggccaaaatttttactttcctttgaatttttcaattcaaacacaatgtatgcttgcttttacacagtagggttcagggattagagggttggctctttaaaaaccgtcagagacacaggcaatcctacacaaaattctcagaaggaaggcgcctacgcctgggaatgcccagatgcccctcagagagttgaagatggcgtttctctgagtcaggtcaaagttaacacattaccttcgcttcaaagactgcttggcttcctttcggtggattagtcaagatgttttgctgactgagactaggaaatctataggagggcgggttagtttacattgttccttgtcattatcgctaaaacactccaaagccttccttaaaaatgcgcactgggctaaaaaggatagacaaggaacacatcctgggccggtaattacgcaaagcattatctcctcttacctccttgcagatttttttttctctttcagtacgtgtcctaagatttctgtgccacccttggagttcactcacctaaacctgaaactaataaagcttggttcttttctccgacacgcaaaggaagcgctaaggtaaatgcatcagacccacactgccgcggaacttttcggctctctaaggctgtattttgatatacgaaaggcacattttccttcccttttcaaaatgcaccttgcaaacgtaacaggaacccgactaggatcatcgggaaaaggaggaggaggaggaaggcaggctccggggaagctggtggcagcgggtcctgggtctggcggaccctgacgcgaaggagggtctaggaagctctccggggagccggttctcccgccggtggcttcttctgtcctccagcgttgccaactggacctaaagagaggccgcgactgtcgcccacctgcgggatgggcctggtgctgggcggtaaggacacggacctggaaggagcgcgcgcgagggagggaggctgggagtcagaatcgggaaagggaggtgcggggcggcgagggagcgaaggaggagaggaggaaggagcgggaggggtgctggcgggggtgcgtagtgggtggagaaagccgctagagcaaatttggggccggaccaggcagcactcggcttttaacctgggcagtgaaggcgggggaaagagcaaaaggaaggggtggtgtgcggagtaggggtgggtggggggaattggaagcaaatgacatcacagcaggtcagagaaaaagggttgagcggcaggcacccagagtagtaggtctttggcattaggagcttgagcccagacggccctagcagggaccccagcgcccgagagaccatgcagaggtcgcctctggaaaaggccagcgttgtctccaaactttttttcaggtgagaaggtggccaaccgagcttcggaaagacacgtgcccacgaaagaggagggcgtgtgtatgggttgggtttggggtaaaggaataagcagtttttaaaaagatgcgctatcattcattgttttgaaagaaaatgtgggtattgtagaataaaacagaaagcattaagaagagatggaagaatgaactgaagctgattgaatagagagccacatctacttgcaactgaaaagttagaatctcaagactcaagtacgctactatgcacttgttttatttcatttttctaagaaactaaaaatacttgttaataagtacctaagtatggtttattggttttcccccttcatgccttggacacttgattgtcttcttggcacatacaggtgccatgcctgcatatagtaagtgctcagaaaacatttcttgactgaattcagccaacaaaaattttggggtaggtagaaaatatatgcttaaagtatttattgttatgagactggatatatctagtatttgtcacaggtaaatgattcttcaaaaattgaaagcaaatttgttgaaatatttattttgaaaaaagttacttcacaagctataaattttaaaagccataggaatagataccgaagttatatccaactgacatttaataaattgtattcatagcctaatgtgatgagccacagaagcttgcaaactttaatgagattttttaaaatagcatctaagttcggaatcttaggcaaagtgttgttagatgtagcacttcatatttgaagtgttctttggatattgcatctactttgttcctgttattatactggtgtgaatgaatgaataggtactgctctctcttgggacattacttgacacataattacccaatgaataagcatactgaggtatcaaaaaagtcaaatatgttataaatagctcatatatgtgtgtaggggggaaggaatttagctttcacatctctcttatgtttagttctctgcatgtgcagttaatcctggaactccggtgctaaggagagactgttggcccttgaaggagagctcctccctgtggatgagagagaaggactttactctttggaattatctttttgtgttgatgttatccaccttttgttactccacctataaaatcggcttatctattgatctgttttcctagtccttataaagtcaaaatgttaattggcataaattatagactttttttagcagagaactttgaggaacctaaatgccaaccagtctaaaaatgcagttttcagaagaatgaatatttcatggatagttctaaatactaatgaactttaaaatagcttactattgatctgtcaaagtgggtttttatataattttctttttacaaatcacctgacacatttaatataggttaaaaaatgctatcaggctggtttgcaaagaaaatgtattacaaaggctgctaagtgtgttaagagcatactcatttctgttctccaaaatatttcataaggtgctttaagaataggtatgtttttaaaagttaagttcctactatttataggaactgacaatcacctaaaataccaatgattacaaacttccttctggccttctggactgcaattctaaaagtgtaaaaaacatattttctgcattaagttaggcagtattgcttagttttcaaagtggtaggctttggagtcagattattttgattcagatcctacatctactgtttagtagctctgttgcctgaggcaggtcccttaacatctctgtgtgtgacttgacctttaaaatttggagactgtcataggggttaatcccttgagaaaatgaatgtgaaaagttagcctaatgttaactgctattattatggattaccatattttcacattcatcacagtacatgcaccttgttaatataagatgctcaattcatctttgagtataattttgtgactctcaatctggatatgcaatgagtgggcctgtatgagaatttaatttatgaaaaattgtgtttcacatggccttaccagatatacaggaaacacgtcacatgtttctattgtatgttgttaaatgccttagaatttaactttctgaataggatcccttcagtttgagagtcataaaagagtaaaattattatggtatgagttatagattgtattgaatatctctttatatgtctaggttttgtcattggaaaaccaaaaagtttggaaaaaaaatctaagttatttcttactttcttaattttgtgtggatttcacatcaagtataaaatttgaagaacatctgaactatcataatccatatatatatataaaataaacataatctaagagagaatttcaccatgaaaaattcaggtagttcatgactatcagagcaaacaagtacattaaattgaaacttttatgaaaataacatttatgaaataggaagctatttttaaactagaagtgatatattagcatataatttataattcatatacaagtgggattgatttataaatggtcaccaacagagattgtgctatttaatttgggaaaattttttaaatttacattttctcacaacttttaaggtagttattcagtttgttcctctctgtctcttctctcatgccctgaatttttcatatttcgtttagttgtaagagtgtatatcaaaccgtgtgtcacatgacataacttgaattttcgtcgtgatatctgtgctatgtctaggtctatactgaggaactgtgggaaccccacagaatccaagtatacagtgccactgatttcttacaagggatgtggggtctcctgtaaactctgcagttagtctcaagtaagaccaaagagtaaaatattgttaggatctaaggtggaaattcagcaaagaatcacatagtctaagtctcgagtttaacagtaagataatttgagatacttttgtaattattaaacacaaagtaatgagagattttaaaacaaacaaatacacctgaatttatatatcagaataggtatggtggttcaaaatagctatctaataaaaaccacactcctattctaaacatttgcctttgatcaaaataattttgggtctcttattatgaaattgcctttctaaataatacataaatttcttctcataagtatatattagccacattattttattgttattgttttatattcatagcttgctttagattaaaaattatattacccagactggtctcttggacttgcttccaagtgacttttgactgtatcacaaaatcaaattcactctgaaaatataaagatttttcatcataatttcctttgttaacagccaagtgctacctaattttaggtgttttcattaaaaaaaaatgcattgcaaactttaaagacaattcttttgtttgtttgtttttaaaagacagagtctcactctgttgcccaggctagagtgcagtgacacaatcataactcactgcaacctccacctcctgggctcaagtgagccttccatcttgcctcacgagtagctgggtcttcaggtgtacaggtgtgtaccaccatgcctggctaactttttttttttttaagttatatagagacagtatctcactatgttgcccaggctgctcttggagctcctggcctcaagttatcctcccactcagtctcccaaagtgctgggattacaggcgtaagccacctcaccctgtcagcctaaagacagtgcttaatgaagagaaatataagtgctttgagcaatggaagtataattaaaattatactatgaaagatttataaagatgaccattttgaatgggaccacacttatttggttatataaattatgatacactattaaaaattcatcatgatgattttgtatttacattttatttacatgtttgcaatttgtgaggaaagctaaaattatggctaagccataaatatttttgcagtttgttgagggtgtttgtaaaagtgttgccaaggaagaccagttggctacccaaacaagggtttagtctaggtctgatcaatacatacacattatctcaggtttgtctatcagaaaaaccttaggttatccaaatcaaaataaaatagatgcataaaacaaaggccaatatgtgttgaacaattatattgtgatatacaactgccaagcattcccgattaccatgactccatttagtcagtccatgggcaaatgccatcaatgaggacagcccagggtttccatattctctcttggctttacatcctataggaattggaggggcccacctctgggataggagcccttctgtcttgaacaatgttgtctgaacactaacaaatgttgactttctacaccagtccctcaatagtcttttctatttatccttttgctgaccatgttttgttattacacagttgagatttttcagctgggaatctgtgttaattttgtattaattttgattagcttaactctcagagttctaaaagtacctcctgtacctgatatatgacaaaaattataattacatttatttatatataaaatatctttgtatatgtaaaatatctttgtatatataattatataattgtttcttttaattttgcaaattttaaaaagttctcctttgttttgaagtttattcctatagttttttatatgctagttaaattattaatcacttgattcaagtaatattcttatatacttataaggaatagtgtagttttaatatttaattccttgctaaagagagaagtggaatctatttttcttagctacttcatcaatattttatgtttgatgtgacagtcaaaatatccctcagagctaactgttacactagggaaatcacggttttccagttttccatttatgtgttatgggagggagtggaacttagtgtaataatattcaatacataaatgttaacacttgtttaaaggtccttgagtgagtactgctataaaatgcattattattgctagtgtcatttcacaagagcctataatttcagtgtgatagagctacaatataagtatagtattgcaaaaccatcaggaagggtgttaactatttagcatgcagttatgtgttggttgtcaaaacgttaaaaacatctctgactcagcagcaattttggcaattttgatcctgaggcatctgtgtagggcatcttcctggagaaaaacctctgagatgcaatgaggtcaaaaggggaaaacagactatgataaagatcaagttgtttggagatcttgtagaaagattaatttacaaatatgtcaagtgcattatcatggaggaaaacattgctatttctgttggttctcttcagagctctagaatcaatttaccacatagttgtttcagtgtgaaattagcattacagagtggctttacggctttactgtagggcattgtgtcagcaaagagcttaggcttcttttagcaagaagcttgtaaaaatttaatttactcttagattgcttgatgtagagaattacattcctacagagctctgaaaaatcttttttcagagtttttcacagctgtattcaagttgcaaggcttgtcaactttgctatttttctgtgcagctctgttaacttattattatcttttgacataaattatgattccaaattgtaaagctctggatgtcagggccttttctaatttgtttagtatgatattcagaccatttcaagactcttccgtggaacaatttaataaagatttttttgtgatgttaatgagttcatggtgatcaaccctagagacctgtgtctattgtagatcgatgacattcaacagtcctgcagtgctggcatcattttgataaaaaggggtcaaagcaagtgggactgtgggcagatttttaatgcttagaacaattattccatcgaagttttcttgtgtcccttctgccttagcctttgtaggatagcatgcttgctaatttcttgctcatggggtaaggaaatgaagatttttgctaggtccgtaggattattaggactactcaggcctgaagctatgcctggatatagccagaaaactctcccatagcttgctccaaggagctgagatacagcagtacttcctttgtaggtcatgattctgggtaacctggaagatgacctcattcatattctgtattctatgtgagacgttaagaaggtagaggtggccaagaaggaaattgttgctgcctttatggaacaaattatctgaaacccagctttctcgagggcttcattgaagtactcaactggggcacttaacccagtctaaggctggtcaaggaaggcttgctgggggaagtgtcttttgtattcacacctaaaggaggttattcaattagaattatccaaagagggtagggatgggctaggaaaaatttaaacaggtagtgtggaggactgacaggataagtaagcatggcaccttcaaaatatcctgagaagttccctatgacgggaacataaaatatgtgacagagatttgtgggagatgggtctggaaactctagcaggggccagatcgtaagggggctttgtaggctttgtaggctttgtttgggctttatcatactggaagtgaaaagccatggcttttaaacaggagagggacataatcagttcatatactgttgcagttttgtaaaagaaaagatgagctgaaagagtggccatggtggaggtgggtggggtgggggggagggggcggggagagagagagagagagagagatttgaaagacatttaggaggtaaaatcaactggtttggtaatcaattagtagttgaaggtgaaggaaagagaagagttaaggataacatctatatttgttgatttggataatagaggggacagtggtgctgcttattgaatgagaaaatttaatcggagaagaaggcatggagcaggagtgcagacctatgtgactctacttctctcaaaaccagaaacggaaatgatgtatatggctcagggttaggtaatatggttatttgaaaatgtattaaagtgatttagagcttagtcttaggtaagagatataagatgtctgaggtgacagttttataaatatgtagagtgcccacttgtttggccttattgtggcatagtgtgacctgagagtgttaggaagaagcagctgagttctagggacagtactggttaaattctacttagaaattatacttagaactctcctatataacctgctaactgatgtctgaacctcctgataacttcactcctttaggcagtgcttttcacatcacgggacacaacatatgagagatcatagaaattcaatgtggtatgaaaatctgcttgggacttcagatattgtctccagtgattgaataaaaataggagctcacctactatgatgaggtttctgtgtgtgttaaaagaaggttttcattacttttgaaaaggttatgtatccttgttttatgttaaaactttgagctttgttaaatatgcagagttctctttcttagcatggactacagaggtgcaactacctcctacctgacttcacatctactcccaaatgcctagtgaaggcttaataatttcaaaaagggactctagaatttcatttgataccagtcagacaaatgtgtgaaaattaagcataataggcagaatcccaggggtactgacagctgtattaagaggtgattcaagggctaaaccttagagtccagcattggttatgggtgtgacaagaaaatgaagcctatgttggctgggattagcaaccacagttctagaggaagcaaggtggagaaactatatagggggctccctttgtacgttttatttattttaaacatctctataaactctagaaattaaaacaacaataccaacacaaaagcatcactttttcgaccaaagaccattgctatacttttttgtgtaaagggctagatagtaaatattttcagctttgtgggccacataagtctctgcaatagacaatatgcaaacaaataagcatggctgtgtttcaattaaactttattatgaacattaaaatttgaatttcatataacttttacatgttgcaaaatattctttatttaaattctattgcaatatgctttaaaagatacagtttttagtctttcttagtttaaaataaaatctagaaaaaattttaagtcttctataactttttttcggtaactgaataattttaaaagtaagtgaaacatttagacatgcaaaatggacttttcagaagaagaaaatggtagcttaacagttattagattattgtccagaataatttttgacttataagtctctgttgaccatttcattgcctctttttttggaatatgcatcttttaatgtgtccttcaaggcaaaggctctatcttatctatcttgtgtcttgcattttcccagggcaatgtttttcacaatttttttaaaaaacaatactgtaatcaattttcaaataaaattttccatgggaccgcagtgtatacaaatagcagtgacaataaaagataataactctcccataaatacaaagaaacagttaacctagtgctctaaagtaaaggctacagtgattttgtataacatttatatgtaattttcttgatcctacatggttgtgtttttcacagtgttatgtttctgaaatcgagatgccttttataattgatgtcaaaagaaacttgtcagccacaaggcccaggaataagttgtaatatgggaacttagcaatacataaaggtatatatactcctgtgacctcagctgaattatttgcattggttgcatcccacaaggttgactcttaaataaatttagtttgttgcttgaaatttcttgggataaattactttgtgatgtagttttgaaaaaaaaacaggtaatatttagtctgaagtttgtctgacatactaagcaatgtaattaaagtagaagtcgcctaagctcagcactttattatgccttgaaattatactgcctgtcctacaggtgaaggtgttatgaatgcagtttgtcactgtaactctattcatagctctgaaaggctgagagtgactcagaagaatatttttgctctgaatatgaagaacgcttagactaaaactttaattacgatgctgaagaagaaagtggtaggtgattgcatgaataagtatgtaatattgttaatttctaaaaactgtgtatagttaatgtagtgcttctttttggaaaggctattgttaaattgatggtaaattctataaccaatatcaccttaaagcaagtacgcatgataaagtattataaaaccatgataatatcatatgtggcttattattgttccctgagtgttgtacaactctgttatgctgtgatgaaacctcatgcaaacaggtatgtcaaagatatgatgggctgttaactgagcttggcccacatatggtgtagtgacatgctcactaatgcagtgcagagataaccaataacagatcataacaggtttaaatatgtgcaaggagatgtcagcagaagctttcctacatagtgaatactaaacaagcctgacagcccaggatcatgttcggatcaatctagtgtgctaaaattaacatatagtcctacatttgagaatgtgtgattttcttggttcctgtctataaaataatattttaaaatacatacatttcaaatcagaagttggtgaattcactgaaatatttctagagaacactaggtattggggctcatagtgtgaaaaccactgacttaattcttcccccatcttggttgttcctgatcttcccttgtgtccccattccagccatttgtatccttagaaaatgatctcatattctacttcatctttatcttcattgtcaactgtcaggtagcaatatatgatggaagaagcatgtactttggaatcagacagacctggctggaatcctaactctgtcacttattaacaatgtgatcttaggcaatttacttaatctctctgaacctcagctactctcgtcagtacaatgagttatccttatctttacatggcacagtattattatgatatcaaaaattcattgagtatttactctgcatattagtcaaggttctccagagaagtagaaccaatgatacacacacacacacacacacacacacacacacacacacacacaatttattataaggaattgacttacatgattatgatggctaacaagtccaaaatctgcagtatgggtcagctggcaggaaacccaggagagtcaatgttccagtttgagtctgaaggcagtctgttggggaatttcgtccttctctgggaggccagcctttttgttctatacaggccttcaaccgattggatgaagttcacctttattagtgagggcaatctgctttaaccaaagtttactgatttaaatgttaatctcatccaaaaacacccacccagttgacacataaaattaaccatcactctctgtaagcactttctatgcattaagtgatagcaaataatgccagacatagggcgtctttaataaatggtaagcactgttatcagcaacaacaggattattataattagcaccttttcatctttctgtctgggctctgagaaagtacctctcttctctaaatttatccctcctttcctatgaattagacccagtgctttctctgaattatgaaggtcacactcctacaaatgccccttcccaattgcacatctgtcggctttctttgccattgacttttatctctagcttttaaatttacaggcatatgtcagttaacaatgggaatgcgttctgggtaatatgtccttaggcaattttatcgttgtgagaatactatagagtatacctacacaagcctagatgtcgtatagcctactacacacctaggcaatatgacatagtcttttgcttctaggctacaaacctgtacggcttgttactatactgaatactgcaggcagttgtgacacagtggtatttgcatatcggaacatgtctaaacacagaaaaggtgcactaaaaatactatgtagtgatctcatgggaccaccattgtatatgcagtctgctgtagactgaaatgtcatgcagtgcataactgtatcttaaatactcaaagtatcacctttgtttgtttgtccccttgtgtgcatcatcctaacgtggaatttctctgttgattagggccagcgtattagtttgctagggctaccataacaaaataccacaaatttggtggcttaaataacaggaatttattatcttatggttttgaagactagaagtacaagatcaaggtgttggcaggtttttcttctaagggccatgaggaagagtctattccatgcctttcccctaccttctggtggtttgctagaaatccttggcattccttgacttacagaggcatcaccctgatctctgttttcatcttcacatggcattctccctgtgagcctgtctctgtgtccaaacttctttactattaatataaggacaccagtcatattggattagggtctactttagtgacctcattggaatgttattacctctgtaaagatcctatctctaaataaggtcacatccttaggtaccgggggttaggactcaaacatacctttttttggggaaacacaattcaacctataacaattgataacactctttaggagcagaatgcgatatggaagtaatttgagaccataaagtatatacatgtagggagttaatctatgaaacctattgaaagccatatatacctcatgtatagtggtccataaatagcatggagacattgcagaggatgttaagtgatatgatacaggaacaatccaagaaggtcataagaaaaaggaccttttgctcttgagaggactgaagaatgactttccatttatgaaattttggtacatgtccactaaaaataggatgaaggccaaacttaggaagaatattttgataatggagaaggttgcatataaaaacattttattgaggacaattaaataatgttggctggaagttttaggatgatcatctttaggactcagaaaaagagaagaaacattattaaagaattgtccctgaacaagtataggcaccctcacatttgcattgcatttactatagaattgaaaaatgttttgaccttttttttttggcttttaatatatttgaccaagagtaacagctaagcaatacctatttgcaatcagtgtcatcatgtgggctccaaacatatcatgtttgtgtaattaattgattgacccattaatttgttcaatttctgctctgttccaggcactgaacaacatgatggagataaaagataaatattacacctgccttgtcctcaagaagttagtcttctgagggaaagaaattagcaaacaaattgtaatctcagttatgtgccatgttccatgctgggcacaggggatacagtagtttaaaaaaaacacaagatctataaggtgtttcttcttgtggaccttacagtctagggtgcttggaaacatggggcgttggcagacaagtaaatacacattttgtggtaaaggctcaggtagaagaagtacaggatagaatagagcacaccatggggaattaatctagacttcagagaggctcacacatacataatttatgtgtgactatttcaatgcatttgaggtttcttggaaatagaggttaggttttattttaaggaagttaccattttttttttcagtgtgatgtggttgaaccaaagaatgccatgcccagtgatggtaataggataatctttttaaaaattaagagccacctaataaatcaatagtttcattcagcgggagctcctgcagagttcaaaaagaagagaatctggcacagcgtttcctttaaagttcattttcctagagtgtgaatggaagcaagagattataacattttgaggtcaaaaaaattctgaaatgcctataaaaattattttctccaaattatcatcatttgtgcttttaatgacctgattgcaaagatgaacattttgaattcttaaattgcttattaggattggttaatgaatcaattatctattactgtatgttttgctattggaaaaaatagcaacttaagtgttttgcagacctttacttaggtatatgttgcttttatgaaaaaaaagatgtaaatattaagtaaaagggatttaaagcaaggcttttgaggtagagtcttattaattccttggtaaaccttgagccaattgttgtctatgttctctgcctctgtcttgctccttccttctgggattcactgtgggaatgcgggattgttaatctggggatgctgtccaatcctgcctctctcaagctttgctattgatctccctcccagtgataataaagcttgaagaaaatgaaagtagcgttagtattggtcctcaaactcaagaacaggatgaaacttaaatcttgagtcatacaattgtgtctacatactgctccccaaaaagagaagtaaagaagatgctaactttcccttttaatttgcagtacttagcaatttgttttcttgagggttaagtaataacagtggaagaaaaaagggttaaaatgccaccaagaacccaattccatgtttagtttgaaagtgggaaatcagctgccactgggaagtctgaatccaatgccatgatgttctttgaatccttctgagaaataatcatgtgtagccataacatacctgtataacagagcagagaacataaacaaatgaaggtgaagggaagattaagacagaagagaaaaattccagaatcgactgatcatttttatctgtttagatgatttcaggcagaatcctagagaccaactttatcacaactgaattttaaaaatcaccagctttgtcattgtgatgcagcatcagtttcagtattatccttggagtattaattcttaatcatcttcatcttagaacatttttgaggtcacttctagtctctatttcaccagtgaagaaacaaaaatccccaaactatatcaggtggaattacacagtattttttttttaattttggggaaagtcgattcaaggcagtaacttgcaagctagtgttagaaaggatttaataaatagtggtttttctgtacacatagtgagaggtcattacatcatttggttgttgaaagtcataaggatgtctagcatgcgctttgcctgtagtggttcatgccaggcagattcctgactcctataacccagagcttatcagagcatttatgtccccaaagagaaatgtcacctccatctttcaataaacactttagcaaagaaaaatcaagtactttaattccaaatcttgagttaattccagaataacaatgatggctcggaaaaatatgggtatttctgtcaaaggacagagaaacctagtagagagtatttactttgggtcctagtgatggtatctgaacaagctaggtgaacaaagagcctcaataagggattttgaggtctagaaaaagagaggaaataccaaataaatggaataattataaaataaataccagcaaagttaaatcaatatatcatgtgggagatatccttatatcactcatgtgatttctattttgttcctatattaggccaaggagaggtggaacttgttttcctttttccctctcagctacgaatggacatacttaaaactgtttctctgcttctgttctctaaaatgtgattgtctaacagtaaccgtgatgacgttttgacagttgcacaagtttctttctttaagctttaaaaatgccagccagtaacccagtggcatttctactataaaatcttaaggccaatccatttccccttttccttattttcttggtttcaaatatatttttattgccaatggaaataaaaatcctaaattagagagcaatggcatcccttgtcttgtgaataaagagctcctaaatgtgaacttatacaggatgcagcaatttatagggtagttaatcattcttctttctagccagttgttccagctacagttttgtggctcttgttagtggcttcattcccagatagaataaaaatcaaaccaaaatcctggaaaggcactctgaggatgcttctctaaagtagatgggcatcaactataaatcacaatgctttgtttcctctgttatgtttcaagatgggtgggattttttttgtagcattacttattattgcctctcaagtgcttgagtctttgaaatccaagtcatgtgagtgaattagatacagctgttagaagtggcctttcaatgccaatggtacacattccttggtttctttacgatactattgctcttacaacttttatctgaagtcataaattcatagttgtcccagaagttaagttccttgcttctagaggacagaaaacaaacaatttacacaactcatggtgcatgtcaccagtccttagatctcatgaaatatgcatgaaatcttaaatcacttgctgtagccacccagccattgacatatttgaaagactttagtgtatcaaagtcactataatgaaaattttgatttcaccagttctaggagtgaaaaatcaaatgtttagtaaaactttctaaaattaacactgacagttgatttctgtatactgttgttcttaataatagctttattgagatataattcatattcaaaacaacttacccatttaaagcatacaatccaatgattttttagtatcttcaaagagttgcctatcaccataaccaattttagaacactttcatcactgtaaaaagaaactccattcctattagcagtcattccttattccaaatccccctgctcgccctagacaactacaaatgtactttccatctctatagatttgcctgttctggaaattttatgtaaatagaacaaagtgttcttttgtgactggcttatttcacttagcattttttttcaaagattcatccctgttgtagcgtgtatcagtgcatcattcttttttatttttttagagacagggccttgctctgttgcccaggttggaatgtgcagtggcatgatcatgggtcactatagctttgaagtcataggcgaaagcggtcctcccacctcagtctcccgagtagctgagactacaggcttgcaccacatgactgtctaatttataattttctttagagacagggtcttgttatgttgtctaggctgctctcaaactccagggctcaagtggtcctcctcccacagcatcctaaagtgctgggattataggtgtgagccacagcacctggcttgcatcattctttttattgttgaataatatcccacttgtaagaatatgtattttatttatcctttccccagttaatagatatttcgattgttcctaattcttgtctattataaataatggtgctatgaacatttgtgtacaagtttttgtgcagacatccattttcctttcttttgggcatatacctacgagtgtaatggatgggccatatagtaactttatgtttaatattttgaggatttttcaaactgttttccaaagtggctgcatcattttaaattccttccaccattgtgtgagtgtttcaatttctccacatatttgcaacacttactattatctactcttaaaaattacagccatcctactgggcatgaagtggtatttcattgtgagttttttttttctttttctttttttctttttttgctaatgtttgtggattttcttttcattttcttgatggtgtcctttgaagcacaaaagtatttaattttgataatttccaatttattttttgttattgctgtttgtgcttctggtgttgtatctaagtgtatgctactttaaaaaattagttgtaatatggcaaattggatacatgtgtaggctttggtgtcacaatcctaattttaaaattctgactctgcccttgacaaattaactaattaagcttccttagcctcagtttctcaactgtaagttggagatattaccaagacctacctcttgaattgttgtggggatcagatgaaataatgtatgtgaaatatttagaattatgcaagtctgtggtaatgaatactaatgttagctatcattattgttataatcccaataataaattctggtgctttgaaaattaaaccaaagccaagcagttgatatgaagaagcatgtaataatgtacagacataatgctttatagacaacattgaatttggctctcatgaacatcaggaatagtggtcatggtagttattatctccagcaggaactgtagctgagagatcttcagagctttttccaaggcgatatcactgggaaataatagagacaaggttacaagctagggctgtgttttcttcttaaaatctttagttcagtttttttcaataacagatttgtagtaggcatcaggtgactggggattcgtattcttcaagttgaaatattaccttgttgagaaagaaaccatgtgtgagacaaccatgttgagaaagaaaaagtgattttatagaaaattaatattgatagtgagcattatatgaaaatcatgaagttagaacatatttggccagaaaatttacattaatagttacccatagcaattaatgcattataattacacataccttttctttaatgaaaaagaattctttccttccaaagttatgcatgctattgttaaacattagagaatatagagaagcaaaaaagaaaatatcttttttgatattttcttaacatacgtctgttcctaataatgtttatagtttagaagcattgcatgaaatgggtagatcaattttctatttaatgtttggattcattaggtacgaagttagcaaattaatttccattagggtgcctgtatggttgtaaatcctggacctgcagaagatttttcagtattggtttgtagtcttttgtttagcagcaaataattagttctccagagcttctgaaattaattgaccactttaatggtgtttacctacctagagaaagaaaaagaacttctccaagtcccttggtaaaattaagcctcatgaacaattaactcaaatatacacaaggcttgtctttagcgagcatatactccctaaagttgattaagctgaccaagtgattactgcttataaattcaccattttatggagaagaagcaaacactgctaaataccttgtggaatcagaggaggggaaattagtaacttgaccccaatactgcgattttaaattgaattcttgaagcctacaagttttacacaggactttagagagctggatagtatcactttgtcaagtcctacttttactatgattctttgagaaaaatacatctgactaaataactctgaatctaaattggataaaataaatgtgacattcaaaatgttatttatgattttagaaaaatatccttatagacactagatgagttttagtctcaaatcaatcctccctatcatagtcacttatcaaaataactaaagcaaagtggtagagctgtgctctagaagtttgggatttatgatcacaatcttttccaatgagtcccctctttcctctgcctgtcttcaacatttgtttttttttttttttggttaggactatccagattgtgtggcctatttcaaactcatggcaaatacattggatgatcagaaattttctaatgtatttgaatttgtctacacaaactagagtaattgctattaattcctcaagtgttaattatttcatgcaaaaaggaaaaaggctattagtctttaagtgtattagtatgtcaatatttgggagaagtgtcatgcaattagtggtttgaatttcctattttattttattgcattttattttatttgcctagtcaaataaaaagtaatgttaaatacatggaagcatgattgttttctacactaaaaatcattttgacttgaaaagatctgatatccatgaccttcatctgaagttttggcagatgaaaatgtcagatgcgtcttttggattaataaaaggcaaaagtcagatcgaaaaatgagtataagctttaattatatgactttaggaggatatgttatgaaaatcaaagctttaatagtgattataattggcaagttctttttttataaggaattacaagtcactctatacaaaaattggaatttttgtcctaagaaatgaaatttactatagtttcatctgtgtgtgtgtgtgtgtgtgtgtgtgtgtgtgtttaaaaaatcaagtgatagggcttttcctcaataaaatctgaaatctcttatagttaagtgaacagaacagtgtatctaggatgctagacttttttttcaaagttagtttaaaacttatacatagtaaaatctgtatgccttagggatctctgtttgctatcccatagtgaatgattaattagtttctgttagaaatagtcagaactaggctgggtgtggtggtggctcatgcctgtaattccaggactttgggaggccaaggcaggaggatctcttaagcccaggaatttgcaaccagcttgggcaggctggtgagatcctatctctacaaaaacaaacaaacaaacaaaggacaataagaaagaaagaaatagccagagctttgaacaaaatttctaagtagaccaatgtaaaagtctgtcgtcaatatgtagtggctatgaatggaggttatgaatgaaagagaaggataagatgaactagaggtgagaggggaagacagcaggcccaagtgaaaggcagagccgagtttattgctttttggttattccaggtgtgtctgctttgtctcatgaaacacctggatgatcactgatttctagtggaagaaatgctgaaaagtccttactgtgcatttaaacattctaggtttaatatactcagggtttttcaaaagaaagggtggctggagttttgcactaactaatatttcataaagtgtctaagtatagatgtctggtttttttttgtatttctaagactggcttgaggtaggcatggagaattctttgatgggacataattttcttcctttctttttttttttttttttttttttttgagacggagttttgctcttgttgcccaggctggagtgcaatggcacaatctcggctcactgcaacctccgcctcccaggttcaagcaattctcccacctcagcctcccgcgtagctgggattacaggcatgtgcccccatgcctggctaattttttttgtatttttagtagagatggggtttctccatgttggtcaggctggtctcgaactccttacctcaggtgatccacccacctcggcctcccaaagtgctgggattacaggcgtgagccaccgcgcctggcctgatgggacatatttttcattcaattttattgatttaacctcacaaaataaaatatttccttaagatgactctgtggtcattgttgggcagcataagcttaatggattttagttatcataatttaccttaaacccaatttgtatttcaggatataaatagaggtttattgtagtgaatcttccaggaaatactaagtgatactaataattatagatggtgaacttaagtctttatattactgaatttgtttggtttgatgatgctaggctatggcattcttgctaatcaaaacgatgtgtcatggtgtaacataacttattaaaatgggcacagataacacaggaagctttttataaaagcagctcacaaattgtgttactttgaactgaactggccatttatgggaaaggtcactgggttgtaaataaggaccaaaagagttacgtttatattttttaaaagagattgaggagatttatttttacatttcttgaaaatgccttattttggtatggtattgacagatagtgaaattctgctcatttgtaaatatagtgtcatattttaataatttcaaacatattgaaaatgcagaatttattaatagtgggagcacattttcctttttactaaatgttctacaggttcttttctttccatccacacacagtgccattaccctcattctaagcctttcaaacatctggcagtaagtgatctgctgcacttagctctttccagctgagctgatttttaaattttcagaaaatttgtgagctaattgttaaacatggccattattaaaaattaaattatttcaacttataattaaataaattatattaaaacaaaagtattaaaaactcaaaagttggctgggcgcactggctcacgtctgtaatcccagcactttgggagaccgaggcaggtggattgcctgaagtcaggggttcgagaccaacctgaccaacatggagaaaccctgtctctactaaaaatataaaaaaatagccgggcatggtggtgcatgcctgtaatcccagctactcaggaggctgaggcaggagaattgcttgaacccaggaggtggaggttgtggtgagctgagattgcgccattgcgctccagcctgggcaacaagagtgaaactctgtctcaaaaaaaaaaaaaaaaaaaaaaaagaaacaaaaaaaaaaaaaaaacaaaaagcaaacaaacaaaaaaacaaaaattatcacttcctaattattttgcattttactattatctatgctattaacgttatttgccttcattgtatttgaaaggtggactatattctattgcactttcattgtactatattctaatatgcaactgtgtatcccttcccaactctgtgttcaatgactttatatttggttgctttaaaatgatgacgatgagagtatttatatcatagaaattggcaaatgccgtaagtcagtttttgtttttgtttttgttttccggagaggggattgttaaatatttgcctgcatgcaacaccactacatgcagtctgctatcttttgttcttcctgctttcaggctcctctcccagctgtctgtctagcacaacccagcataccaaattttcttaaatagggaaagttgaacatggtaaaagaatgaatgaagtcaaaagaatgtggaaagacctaggctttgccatttagtaaagtttagcatctctaagcctccatctctttatcaataaaattgagcaatgatcccttttagttctacccatttaagaagattttcaaatgaaaaccacaacctgctcatgtttatgaaggcactttggaaagcgctaaatacacgggtttttattagtagtaaacacttacttcacctttttcacttcttgactttagtttacaagggctcataatctaaattatatcataaattgctgtcccagatttttttacagcctaattgccacctgtatgttcgactttccttctgttctttatgttagatactgggatagtatgcaccaggtgggtgtgccatcactttctcagatgatgtccactgaagaccttgcatgatcatggcattcattttcctgctgtattcagactggcctcaactattttctttattgctctccaggaaaaattacaaatgaatcagactgggcaatgaagggtaaacctaattatcgctctttgttaaagacagctcttgttaaaatgcggatattgcaaattaatggaaaaaatatgacatagtaaaccatactcacttattaatatcttagtaaggaataattgatgaagttacttaaccttagagccctaattcagttaagttttaatgaaggacaagttgtagagatatcgagaacccagggcaggtgcctactgaagaagttccagaccaaggaagtataaagaaggacctgggtgggagcagtgagattggatatgagggccactggcaaagttttgccccagaacagtgtcaaaatgtttgcatttggcatagccctttctctttttgttctgaatggctttgctagaatatcttttctataatgaatttatcctgcttctcagatattgctaaagcactcccttttgaattttggtgctttaacatgcattttgatacattaccaaataaggtctgaatgacacaaattttagaactctccagagaaaagaaagatgctgagggaaaaagcataggtttgggactcactaaatcccagttcaattcctttctttaataaatatattcaattttacctgagaaagctctcgtgctctcgaattttatttagaaatttctctttgtacatgattgatttcacaatccttcttctgcctcctcttctactttcttctttctagattttcctatctttatgaagattattctgccttatcctcaacagttagaaacaatatttttgaaaatcactacggtatcctgcatagtgatttcccatgccaactttactaatttccattataaattattatttattgatgcctagagggcagatgagtgtagctgctatggagtgaggagacaaaacataagaaagttatgatcctaccctcaggtaatgattcagacatgataattaagtcaacaaattgatagaaactaatcactaactctctggctatagtcattctttcaatgaatagctcattactgagtatgcatgctacagtaacaaaattatataaggctgttgattaaatgttgattaagtgcatgtcttattcagagtttttttatatttgaaatggaagaggctggacttcagtaatttgctataaactgctagtatatgattatttgggggcagttattttttaaagaataatttaaatatggaatgtttagcagtttgttttttccctgggaaaaaccatactattattccctcccaatccctttgacaaagtgacagtcacattagttcagagatattgatgttttatacaggtgtagcctgtaagagatgaagcctggtatttatagaaattgacttattttattctcatatttacatgtgcataattttccatatgccagaaaagttgaatagtatcagattccaaatctgtatggagaccaaatcaagtgaatatctgttcctcctctctttattttagctggaccagaccaattttgaggaaaggatacagacagcgcctggaattgtcagacatataccaaatcccttctgttgattctgctgacaatctatctgaaaaattggaaaggtatgttcatgtacattgtttagttgaagagagaaattcatattattaattatttagagaagagaaagcaaacatattataagtttaattcttatatttaaaaataggagccaagtatggtggctaatgcctgtaatcccaactatttgggaggccaagatgagaggattgcttgagaccaggagtttgataccagcctgggcaacatagcaagatgttatctctacacaaaataaaaaagttagctgggaatggtagtgcatgcttgtattcccagctactcaggaggctgaagcaggagggttacttgagcccaggagtttgaggttgcagtgagctatgattgtgccactgcactccagcttgggtgacacagcaaaaccctctctctctaaaaaaaaaaaaaaaaaggaacatctcattttcacactgaaatgttgactgaaatcattaaacaataaaatcataaaagaaaaataatcagtttcctaagaaatgattttttttcctgaaaaatacacatttggtttcagagaatttgtcttattagagaccatgagatggattttgtgaaaactaaagtaacaccattatgaagtaaatcgtgtatatttgctttcaaaacctttatatttgaatacaaatgtactccctgggaagtcttaaggtaatggctactggttatcaaacaaatgtaaaaattgtatatttttgagtacctgttacatgccaggtagaatatctcctctcagccactctgagtggaaagcatcattatctctattttacagaaaagcaaactgaggctcagagagataatatactttgccagttaatgaatgatggagccatgattccagctgaggtctgtattgccttgctctctaggaatggtagtcccccccataaagaatctctcagtttcctttccaatcaaaaggttaggatccttttgattgccagtgacagaaacccaatttactagcttaagtaaataaaaggaacgaatttattggctcatgaagcctgaactatgtgaagacctaggtggagaactggccttaggaactcaatgggaccaaggactcaaatgccacctggtggcatttgccttatgctggttttattttctcagaccggaccagctttctacataaagtgggtccctggttagaactctttgctcctatctttaaggaccacgaaagaaggagccctttgtccttggctaaatgtgaaaaatcccagagactcttgagtcatagtgcttaccccttgggccactcatagtctagaatgaactaggctgagtctcgtgccaacagcacaggcctgatgccagataaaagggtgagtgaagggggataaaaaataagacatagctactaaattattgcaccaaagtaaaaacattgagttgacttgcaatttgtttcttttaattaaattcatttcctttttttggcattttgaaggcaaagtaagatattaaactttatttttattgattttattcaaagaattaagctagtgggagtagcagattcacacttctaagatcaagggccagcttctattattgaacacttggtgtgtgcaaatgccatgaggtagggatactttgttttgttttttattttttattgggttcgatctcttttgtttatgatgtatccccaagtgcctagaatagggcctggcatatggtatatactcaataaatatttgttgaatgaatccatgatggaatgtgaaatggctagcattacatagaaacctgtagcattgctggagagataaaatatataaacataatccattgcaggtatattgacaagttcaaaataatataatgggtattgaatatctaaatgtttgttgttgttgttgctgttgtttttgagacagagtcttgctctgttgcccaggctggagtgtaatggtgcaattttggctcactgcaaacttcgtctcctgggttcaagtgattctcctgcctcagcctctcgagtagctgggtttacaggcactcgccacaatgcctggctaatttttgtattttagtagatgtggagtttcgccatgttggccaggctggtcttgaactcctgacctcaagtgatctgcccaccttggcctcccaaaatgctgggattataggtgtgagccactatgcccagctttgaatatctaagttttaattggatgctgagggaatgattaatcagagtagggctgggttaattgaaaaatgtgatacatttgtatttatggccagatagagaacatgaatctgaatttgcagaattatctggcttaacatttttttctttccagttttcactgtatcccccatgttgattcaatttaaaaaatatacctattttacttcaattcaacaatgctatgccagtacaaacccatacgttctattatttttgttttgttttgtttttgtatctccaccctgttacttcttttcttataaaattggtatttgaaatttattgaaatattttggaagagtgacataccatttttggtactttgtacctctgcacccttgggaagtgaccctggcttcacatttcataactgccttgtgaccatggccctcaagtggttgccagatggttgaagaacattaacctatctggctcaattttgtgaccatggattgaatcctctacataactgcagtgtgcaaaccacacatccgttccaagattgtagtcaggatatgaactttttaagaataaaacttcttcccttctgatctgggcctggtatgtggtcctactagaaccacatcacctactcttggtgctaacaatttgtggcaccaagttgttcaagtttcacccattaaagaaattccccgaccttgccttctcctcaggtaactaccccattctattttttctttcatagctaacattctctgctctcctggtctctctacttcactttcatttacatctcagctcctgaagtatggtttccaccatgttcctaaaactacattgcccagggtcactagagacctcttatgaaatataacaacacctttctacattacttccgtgtggaccactttttcacattgaacccattttgttggtttatgtacacaccccttccttggctttcccatctgatccatttctcctttgatggagaaggtgagtctgctccatatttagcttcttactctgagtaaccaaatgttatggatgggaggttagctctgtgtgtgagagaaaggtggagaagcatgtggggagggaaatagatgggaaaaggtaattaggctttatagaagggctctcattagcaagcttctaggggatgccaagatccatgcttagagattgccaggcttgtcttcaaatctcagctgtgtattactcctttatgttttttgtttgtttgtgttgtttgtttttgagacagagtctcgctgtgtcacccaggctggagtgtagtggtgtgatctcagctcactgcaaactctgcctcctgggttcaagcgaatctcagtctcctgagtagctgggactacaggcatgcaccaccaggcctggctaatttttgtagagacggggttttgctatgctggccaggctggtcttgaactcctgacctcaagtgatctgcccgccttggcctcccaaagtgttgggattagtggcgtgagccactgccccggcctattactcctttagagtgatttagagccatgtttacttatggtaacttgacagtaatgggaataaccactgatgaaacgtaaagcctttgtctaattgtttacctagttcttccttgtggttcatgaaatttttcatctctgtacagtttgaaaattaagatgataatatttagagatattttattcctttgtgaagagaaaaaaggctttcattaacagaaatcagtggcaataacttaataaatacaatcagctggtgttcctatagtatttaaaagaaaacagaaagtttactagatttcagccagttttcagactatttaatgtctattcttactataatagaaaatatataatttgatcttgttctcatttttcaaagacctttaatacatgattttagtagttgaaaatgaagtttaatgatagtttatgcctctacttttaaaaacaaagtctaacagatttttctcatgttaaatcacagaaaaagccacctgacattttaacttgtttttgatttgacagtgaaatcttataaatctgccacagttctaaaccaataaagatcaaggtataagggaaaaatgtagaatgtttgtgtgtttattttttccaccttgttctaagcacagcaatgagcattcgtaaaagccttactttatttgtccacccttttcattgttttttagaagcccaacacttttctttaacacatacaatgtggccttttcatgaaatcaattccctgcacagtgatatatggcagagcattgaattctgccaaatatctggctgagtgtttggtgttgtatggtctccatgagattttgtctctataatacttgggttaatctccttggatatacttgtgtgaatcaaactatgttaagggaaataggacaactaaaatatttgcacatgcaacttattggtcccactttttattcttttgcagagaatgggatagagagctggcttcaaagaaaaatcctaaactcattaatgcccttcggcgatgttttttctggagatttatgttctatggaatctttttatatttaggggtaaggatctcatttgtacattcattatgtatcacataactatattcatttttgtgattatgaaaagactacgaaatctggtgaataggtgtaaaaatataaaggatgaatccaactccaaacactaagaaaccacctaaaactctagtaaggataagtaaaaatcctttggaactaaaatgtcctggaacacgggtggcaatttacaatctcaatgggctcagcaaaataaattgcttgcttaaaaaattattttctgttatgattccaaatcacattatcttactagtacatgagattactggtgcctttattttgctgtattcaacaggagagtgtcaggagacaatgtcagcagaattaggtcaaatgcagctaattacatatatgaatgtttgtaatattttgaaatcatatctgcatggtgaattgtttcaaagaaaaacactaaaaatttaaagtatagcagctttaaatactaaataaataatactaaaaatttaaagttctcttgcaatatattttcttaatatcttacatctcatcagtgtgaaaagttgcacatctgaaaatccaggctttgtggtgtttaagtgccttgtatgttccccagttgctgtccaatgtgactctgatttattattttctacatcatgaaagcattatttgaatccttggttgtaacctataaaaggagacagattcaagacttgtttaatcttcttgttaaagctgtgcacaatatttgctttggggcgtttacttatcatatggattgacttgtgtttatattggtctttatgcctcagggagttaaacagtgtctcccagagaaatgccatttgtgttacattgcttgaaaaatttcagttcatacacccccatgaaaaatacatttaaaacttatcttaacaaagatgagtacacttaggcccagaatgttctctaatgctcttgataatttcctagaagaaatttttctgacttttgaaataatagatccataatatatattcttatggaaatctgaaaccatttgggcatttgggggtaaaaagtattttattagtaaatttaaatgaggtagctggataattaaattacttttaagttacctttgagatgatttttctcaatcagagcaccacccagagctttgagaaacaattttattcacagcttctgattctatttgatgtaatttttagaaaataagttttgctggttgctttgaatcagggtatggagtacagttcactctgatcctatcatataaatcatgtaagtatataacattttcaataagtgattgttggattgaagtgaatgatatttcaagtaattgttatgtcatggccaagatttcagtgaaactcaaaatttctcctggttgtgttctccattgcatgctgcttctattgattaacctaagcactactgagtagaagctggaagaggggtctaattagaaggcccctttctatgctctgcttggcttgtaaaataatttatttctctagatcccaccaacatagtagtttcatgtatgcaaaaacacccacctaaatgtcaaagtttgtatgatacatggacatatctatagaattttttttggtctggtgcatgccaaaaaataaacatgatatagaagaatttaatatttattgagtacctaatctgttccagttcaatatgaaggtctttatgcagattattttacttaattttcctagtaactccatggagcaaaaattatctctaatttatataacaggaagttgagcgtgaggcaaattaagtaactttcccaaagttacacatatggtaagtttgagagatatcccagtctctttagctccaaagcctttgaccctttcaccataccagattatgattgctattaatatataattataattataatgattgtatttaggtactcaacagaatggtgactctagtaaccagccttggttctgctgagcttctctgcgtcttctcaggagacacaggctacagagcttgaaggctgaggattcttccagggtcacttcaggggcaaatctgaaactttcttcaggacaggaatcaacgagatcttctcacttacttatacctgggggaggaactgtatgaaatccacccaagaaccagtcatgctaagggccaaacctatagacaaaaaaagggataggagaatggagtatgtatggagaaagactaaattgttcttaaacttctcaagcttaaaaatatcccagcaaaagagatcgtaaaagcccttcatggcgtattaattatccatgcatgggggtgagtggaaaggtactcctgagcccgaggctacagctttggaactagcagcacctttgaaggggaaagcgtgtttccatcatctcaactcctactgataaccaatggaatattggtgagtaaaggatcctgggggaagaagcagctgaaatgtgtaggtgagaaggcagagagaagaatatttatattgggaatggcacaagtgtgatgaggctgcaggtttttcacccttgtcatagagaaaaaaccacgctgacaccatgcagttttaaatagtgagaaatttgcaaattgttagatcttaaataatttagataaacatagtggccatttagattattgcagttttttcaggatatctgatctcttgatttcattctttttgtctcttataagaataaaagggggggagaaaatttagccattatagtatttctctacattttctctgtccttttacataacttacaccagtgccttcctatttatggtattatttatgggtatttcttcttttctttcactgagcaaggataaatgagccagggattcttgaaactactgtaacacttctcttagaaatagatggtcatactttcagaatctctacacattcttagtccctctaaacaatgatagttgtggcataaaaatatttgcttggtttcaggactgatagagaaaagtactataaaatttgctgttaactgtgaaaggttaaaaaaaaggaggtgccatcatgaaggagctaatctttctgaagtactgctgtagttttaaatattattagctatgacttctcaccattaactatgcacttgctttttcttcatctgactcagcagccagatagatgcaacattgtctttaacatttaagactcctagcaagtccgggcacgggggctcacacctgtaatcccagcactttgggaggccgaggtgggcaaatcacaaggtcaggagtttgagaccagcctggccaatatggtgaaaccctgtctctactaaaagtacaaaaatcagccaggtgtggtggcgtggtggcgggcacctgtggtcccagctacttgggaggctgaggcaggagaatagcttgaacctgggaggcagaggttgcagtgagctgagatcgcaccactgcactccagcctgggtgacagagcgagactccatctcaaaaaaaaaaaaaaaaaaaaagactcctagcatggaagagaaactggctgttgaaaacctgaatgtgagagtcagtcaaggatagtttgagggaagccaagtagaggaagctctcacaagcagattggtgagagaatatgattatacaatgcatttattatgataagaaattcacaagcattcattcaaaatactcttgattcctaggcagctctgggcatatttccaccaacaaattgaggcatatgtcagtgcagcctaggtcagactaccttttttcattaaacctcacaaaattaaaggacatacaggagaagtcctggtactcatgttgcagactacagtctatatggcaaaggaggatctctgtcccttatgtttggatgaaaacattgggtaggcatttgaatacaagcctactgctaatatggggctaaggtctttggccccctaaaggtttgctgaaatattactgacaggaggcagattgataagaggaaaagcacataaatgtatttgacatgtatacatgggagccttcaggatgaagacctaccctctcagtgcagtatggaagcttgtataccatcttgaggttacagaaagaatgggggtttggatctttgtaaaacaggtttcagtggcaagacaggttatgagaaggagaaaggaagagacttgggtagcaaagggggtcttgttttgtaggtaaatcgttggcagcccacagagaaaatagatggagaatgtttcttttcagaccttggcaggtgtcagattctcagttaatctctcctagatttgaaaaaaaaaaaaaaggtctagaaagggagagcctggctgcactaacacattttctacagatgcaaatttctcccacaaaatacagctttgcaggtccacttctatctgctgggcctgtggcaaccatttcaaaatatgtgaatgaaatatatgtgggggtaaactatttttatttacttccctaaagaagggatggtgttctctcgggaattctgtgcatagagagcctgtggcttaggcactttgatttatgtatatctcttcctgtgattggctatctagggactgctatctccagcaaatcttctaaatgtctgccatgtagaattcctttctcatctttctgtctcacccccttatctagctgcttctctaaccctagagtgacactgcactccccacaatctcctatgtcctgaatattttaccccatcctaaactccatctctaacacagatgcactttcttgtgctgcctactgcattgtacatcttccccttagttcccatgatgcaactctgccctaccccagaaaatgtaatttaattggtctgggataaaacctgggacactatcattcttgaaatattccccaagcgattctaattatatagccaaagttgagaactatttgtagacaggcatcagcatgatcacttaatgatttgacttttgctagatctaaggtgaggaaattggagagtggtatccataggaagaactgtttagtttaattttttttttattttttcttctaaaaaaaaatccaacaacgagatacatgtgcggaacatgcaggtttgttacataggtataatgtgccatggtagtttgttgcacctattgacccatcctctaagttccctcccctactccttacttcccaacaggccctggtgtatgttgttcccctctctgggtccacctgttctcaatgttcaactcccttttacgagtgagaacacatggtgtttgattttctgttcctgtgttaatttgctgaggatgatagtttccagcttcatccacgtccctgcaaaggacatgatctcattcctttttatggctgcatagtattccatgatgtatatgtaccacattttctttatccagtctgtcattgatgggcatttgggttggttccatgtctttgctattgtaaatagttctgcagtaaacatatatgtccatgtgtctttatagtagaatgatttatattactttgggtatatacccagtaatgagattgctgggtcaaatggcatttctggttctagatacttgaggaatcgccacactgtcttccacaatggttgaactaatttacactcccactaacagtgtaaaagcgttcctatttctccacagcctcaccagcatctattgtttcctaacattttaataactgctattctgactggcatgagatggtatctcattgtggttttgatttgcatttatctgatgatcagtgatgctgagatttttaaaatatgtttgttggccatgtaaatgtcttttgtgaagtgtctgttcatatcctttgcccaccttaatagggttttttttttcttgtgaatttgtttaagtgccttgtaaattctggaaattagatctttgtcagatggatagattgcaaaaattttctcccattttgtaggttgcctgttcactctgatgataggttcttttgctgtgcagaagctctttagtttaattagatccaatttgtcaattttggctttttttgcaattgcttttggcattttcctcgtgaagtctttgcccgtgcctatgtcctgaatggtattgcgtaggttttcttctagggtttttatagttttgggttttacatttaagtctttaatacatcttgagttaatttttgtataaggtataaggaaggggtccagtttcagttttatgcataatggctaggcagttttcccaccaccatttactgaataggagatcttttcctcattgcttgtttttgtcagatttgtcgaagatcagatggttgtagatgtgtggtgttatttctgaggtctctgttctgcaccattggtctatatgtctgttatcgtaccagtcccatgctgttttggttaccgtagccttgtagtatattttgaagtctggtagcgtgatgcctccagctttgttctttttgcttaggattgtcttggctatatggagtcttctttgattccatatgaaatttaaaataatttttttttattctgtgaagaatgtcaatggtagtttgatgggaatagcattgaaattataaattactttgggcagtatagccatgttcacaatattgattctttctatccgtaaggacgacactttttccatttgtttgtgttctctcttatttccttgagcagtggtttgtagttctccttaaagaggtctttcacatcctttgttagctgtgttcctaggtattttgttctctttgtagtgattgtgaatgggaattcattcttgatttgcctctctgctgcctgttgttggtgtaaacaaaattcatttcttgttcttatttgtgaaattttggaaccaaatctattttcaaattagaaattgcttgtgataatggttttgcaacttagactggatatgagacgatgagatattagttctttcattcctttgtaggaatatggtgcatcttgcattattttagctaactagtgtcctttaatgactaatgaatatgacatggtgaaacaaagtaaaatatatatgatgcactaagtatgcattgtttccaaaggttcagcattttttttttgttaactctgctgggatctgctttatgcactgataacataacttattttatgatcttaagcaaataaaaacacttatctggacctcagtttccttaactgtacaactgagggaaactgtatagtatagctatagtacagtataccatctttaccgtcacttccatcttttaaattatgtgtatataagatagggcctagataaatggtatttatcttaaattacagtgatactagcttataacttaatttgctaggtcatgttgaactgataacaatgtgtgaactgatgagcaactgagaagtaaccaggttgtgttataacagtttgtttttgatttagggttatcagtgagggtggcggtggggaggggactttggagtctaactgtctagttcaaatattagtttttgtttatttttatttttaatttttgtgggtacatagtagatgtatatatttatggggtacatgtgatgttttcatataggcatgcaatgtgaaataagcacatcatagagaatggggtatccatcccctcaaacacttatcttttgagttaccaacaatccaatgacactctttaagttatcaaatcacagttttgccagctactagccatgtgattttgggtaggttacttaaattctcttcatctcaatttcattattgtaaagtggagataatgatagcacattttttctttttcttttttcttttattttttattattatactttaagttgtgtgatacatgtgcagaatgtgcaggtttgttacataggtatcaacaactctataaaacatgttctatccaggaaaagaaactatcatcagagtgaacaggcaacttacggaatgggagaaaatgtttgcaatctagatggcgattgcaatggcggttcgctgcatccatcagcccatcatctacattaggtatttctcctaatgctatccctccccttgctccccaccccctcacaggcccctgtgtgtgatgttcccctccctgtgtccatgtgttctcattgttcaactcccacttatgagtgagaacatgtggtgtttggttttctgttcttgtgttagtttgctgagaatgatggtttccagcttcatccatgttcctgcaaggacatgaactcatccttttttatggctgtatagtattccatggtatatatgtgccacattttctttatccagtctatcattggtggacatttgggttggttccaagtctttgctattgtgaacgctgcagcaatgaacatacataagcatatgtctttctagtcaaataagttataatcctttgggtatgtacccagtaatgggattgctgggtcaaatggtatttctggttctagattcttgaggaatcgccacactgtcttccacaatggttgaattaatttacactcccaccaacagtgtagaagcattcctatttctccacatccgctccagcatctgttgtttcctgactttttaatgatcaccattctaactggtgtgagatggtatctcattgtggttttgatttgcatttctctaatgactagtgatgatgagcttcttttcatgtttgttggctgcataaatgtcttcttttgagaagtgtctgttcatatcctttccccactttttgatggggttgtttttttcctgtaaatttgtttaagttccttgtagattttggatattagccctttgtcaggtggatagattgcaaacattttctcccattctgtaagttgcctgttcactctgatgatagtttcttttgctggatagaacatgttttatagagttgttgtgagaattaaatgcattaagcacatagaatagattctggtacatagcaagtgctctctctatatatggaactctatatgtagttggtgcaaaagtaattgtggttttcaccattgaaagtaatggcaaagaccatcattaccttttcaccaatttaaatatatggaaggaatatatatataaaacctatatatatatgtcacatatatgtctctaacccattattataatatataatacaatatatattataattataattgtatataacatatgttatataataatatagtaatatttattctaaataaatatataatactataaataatataataatttatatatatgattataatatataataggctatattatatattattaacatatacatatgtgtatatatatgtctttcatagacttaaatatatagagcaataataggttagaaaatagcaaacatgtatatataaacatatatacatatagaaaacatatataaaaacatatatatatatatatatatgtgtgttttctgcctttcatttttagagacagggtctcatcatgttgcccaggctggtctcaaactcctgggctcaagtgatcctactgctttggactcccgaagtgctgggatttcagacatgagacactgcacccagtccagtccctgtctttttaaatagactctctacctaagtgcacaaatactcattatttacatttagttatttctgtatatatgctataagcaaatcttgtagcaccagtttgatttttataaggcacaagaatatattttactaatgctttaaaatggcagctagattctagtattactttagaaattaaaattaatattttaacacatctttcattattgtgttatctgaaccaaacctattattgctgctatttcagcaaatccaggggctttttcttataaaatatgaagaatatagcttagatttctagtgaagatgttaccagtaataattaataaaatcagtaagcactaaaaggaaaataccaaaactaaagcattttgaattagtcattgaatctaaaagaaaggtagatttttttctgagattctgttctaggtgtggtatatgtgtatttttgcaaaaactataaacaattgtggcaaaatgaaggaaatatttaaaaacaaacctcttaattcttcagtggattaagcgtgaatatgtttttattttctatgatgaatatggaaaaattcatttccttagcaatttgtatgagcccaaaaactattgtcagactctgctgtatcaaaatagacaaaaaattgacactcacttttaccctgccaaaagcaaaatcttaaacttttgctttagtatataagccagcattcattgtatcctatgatgggttctgagtgtaggtgtatttgctttcttccattttttgtatgcatgttttctttttatttattattgtaagttgtatgaaatttttatccaaatttttattttcttctgattaataatcagaataatcagataattactggtaaatttgatgttaatccttccagctttttcccatgggaatttatacttaataaaggggagaagtcatcattacataatgtgcatattaatctgcttctccctttaatgtgttgtgaatgcctttccatgtcattagatgtttttctacctagttactttcatgaatcatatggctgtaccatgatttatttaatcagttcctcatcattgagtatgtaaattgcctccatttttttattactataaaaggtccttcagtacacacccctttaaaagctgactcttagaaggtgttcttgactctctacctaagtgtaaaaatacaaataaattgctttccagaaaaggtgcactactattttactttcctgatactaaactatgaaaattcagtcctaacaatagatatttaaataaagttttaaaaatgccaagtgaaaaagagcatattattattttcatttgcattacttttggttcctggtgagtttaatctgtttttgtatattaattatgcatttatatttctttttgtgtgtgtgaattgcctttcatgttctttgtgtgtttttattttgttgtatttgtctctttcttgatatatgagagaatattttccctagcctgtcaattgccttgtaattttgtttctagtgagtttttttttttttttttacaattaaaagctttaatttttgaaaattttgctggcaaatctatatatctttttctttgttttctgctttgacattattcttttataaaggcccatgccacccaaatattatgtaagcatgcatctatgtttttattacttcatcttttacatttaaatatctactctatttagaattcattgtgatgcatgtatgaggtagaaatctaatttcaaaaagatgagtatccagtttgtccatcatttattgcatgatctctttctccactgaattaaaatgccgtattttataatatattaaagtattacatgtgcttggacatgttcctggacttttgagataaatcagtctatttctttgtcatgtcacatattattatggctttatgatttaatatccagtaatgtaaaccctctgacacattattcttattcctcaaatgtttttgatgagttttcttccaaatgaaatttataatcattttattcattgattcaacaaatatttgttgaatggatattctgtgcttggtattgtgcatggtattaggattgttgcaaaaattgagactgacagtccctactcttacggtgctaaaaattcacttccaaaaaaatctttaaatgttgatgaagattgcactaatcttataaaataacttggaggggaatgtaatctttgcaacattaagttcttcattttagaaagttttaagactctccatttatttgagacttttaaaatatgtcccaataatgttttgtgagatgtatattttaagatatatatcttattgctattacattgtatcttttgttatattgttactatgaatgggatactcatttaattagatgtcatttttggtatatagaaatctattttcttagcatagtcattttttaaacctcgatctattaaattcttgattcatttacatttgttacacaatcatattctatgctgataatacttcttgcttctttccaatatttgtacctcgatcatttttcttgttgagttgtattagctagaagttctagaaaaatgttaaatggtagtaatagctagtattctgttttttcctgactctaaatgtaatgcatctagacttttataattatggcattgattgtaacattttgaggaagaaatcctttttcaggttaataatgtatctttatattcaagtttattaagaacatttattggaaacatattgaaattttatcagattccttttcagttgttactgagataatcataggttcttctgtattcttttaattaatttctcaaaattaaactgtcctattattcttggaataacgacatataaagtactgtatatttaaaagaagttaaaatgataatggtgattttattaagtgacctcacacaatagaaaacagtgtagccttagaagttttccaagtgaccattctacttagaaacaaccctgctttgggatcagaactgtaatttttaaagtaaagttttctgggtttaattcatttagtgtaattacaagcatgagttcaggtttctatttttttcacctgaactttccttcatggtttgaatatctagaaaaagcagactttcctatctctagactaaacatttgatcctatcttaggtatgcattacaattttttaaccataaatggttaaagaatttagactcatctacaataactttgaagctctggtcttgaagaacatgtgagaaatgagatataactcctagaagatataggagacatttttagtcttccaaattttccctgggaggctgatctaaattgagtcacaaaattgttcccaccaggaatgcaatcacttgagctgttttctaatctgagcccctctacccagatgatcttctgaactcatactgttcagactttcatccttctgagtagaaaacagccatagtcatggcaggatgagggctaggacaattacccaaggaattcttggcctctgccatgggactctgcagactcagatcatataatcagagatgttagcactggaggggacatcacaattagctttctccacctcttagtttatcagtgaggaaaactgtccagagcgcggaagagactaaaataacacagccaatgtaggtaatgtgctggataagaatttggaattcacgattttgaattcagtgtttatttcaccatcacgctggcttacacgttggtatcaggcttcttctattattgaagtgagccattaagtgaattccatcttgatttgtgtctgatacagagtaataaactattttattaaatatccaaataattatacattcctccttcttacatgcaagcctaagtttgcttgtactatttcatgtggtagcaaatcaggacgcttcttgtgtctctgaaaatactctgagtaatggagtacagtcagctttcttgtaccaagaatatagggactatgtttctcccagtcattctggggataatttttgtgaaggattgcacttcataggttaagctaggtatcagttaccagtgttttttccaaataaaaaaaaaatcaggtgatatctgtaaatggttccattgtaaatattaaagaacatgatgcttaaaacagattagggaaaactatagaaggggtggggtttcggagtgctaattttgtccttgaatggtaacagctccatgtggtggtgaggtttatgttggtttgctgtttgcagatgatcttattattagaatttttcataccgaaaataaactgcattttagtttgtaaacatgcccttccagagtaatgctaccagttctttgtgaaatagctactgttgttcaaaggatgactatgtcctcttcggttgaggaaagatgacaacaaactcagtaatgacatgtaaaataggtattacaaaccaggtatggtggcatgagcctgtaatcccagctacttgagaggctaaagcaggaggatctgttgatctatggatttgaggctgtagtgtgttgtgatggcacctatgaatagcccttgcactccagcccaagcaacaaagcaagactgtctctgaatttttgttttgttttgttttttgtttttttttttttgagacagagtcttgctctgtcacccaggctgaagtgcagtggcgcgatctccactcactgcaagctccgcctcctgggttcacgccattctcctgcctcagcctcccgagtagctaggactacaggcgcccgcctccacgcccagctaaattttttgtatttttagtagagacgaggtttcactgtgttagccaggacggtcttgatctcctgaccttgtgatcctcctgcctcggcctcccaaagtgctgggattacaggcgtgagccaccgcgcccggcccctgtctctgaattttttaaaaaggcattccactcaaattaatacacattttaattgtgttttgttgtaaattacaactgaataaaaattcagcaaataagtctgttgtggtagggaaaagtctattgtgatctggaaaatataatggagaaatccagtggaagagattttatttcacattactcaaaataaaaaaatcttatacaagtctttacacttgtaacttgaaaaattctgtgctaaaatttagcttggttgctaaaatatttctctttttttctcagaagcttctttttagcatcctatagacacaagttactttttaaaatatttgcatacttgctttgcaatgtattgtttatcagtagttctatattctttgagatagtctatccagtctttctgtatttatcgtatgtctgtatagatatatattagcagataaatgagttctgaaaggggagaaatgtgattatgctaatcatgatataaagaattgactttataagcagtgttcacaggtcatacctttcccgttactgtcttacagtgaacaagaaatgatgctttgtctggtatgcatggtaaataatgccccttgctctctgcttcatgatcacatgtgatacttctaacatagatagcacatgtaaatccagtggccttgactgcaactcaagagagcattttggccaagtacaaacccactagtcatgaaaaaaaaaaaaaaaccaaatcaaagtaaattgatggtattgacatttgtctatgaaaaacaacataatatagaacaattctggggtaaaatattgatctaaaataattttaaggattaaatattgccattgtaagcatactatgagcaattatgtttgtaatgcagatatatttataattttaaatccaagatttaccttaattgtacattttcctaatttaaaaaagttattttgaaaaaaaaatcctcgaatctagagaaaggttggcaaatacatatggaactttgtaaaaaacatccagggcagcactttcactgattgcagtagcttaggagtgaaaaacaacacaactgctccaatgtatggcaatgggcaaatatcccgatttattcacagggtggcatgttaggcagtgcttagaataaatgagttggttatacaagtatcaatagggataaatgtgaaaaacacagtgttaagtttttaaaaagttgtaaaaagcacagtaggatgttatttatataaaatttaaaaacctcaaaaaccattcttctttgatatatattctaaagatgaacatatatgtaatagaagtacaaaacatacataaaataatatacactatgcagtcatttgtgtacttacttttcaaaaatatttcagtagatatagcaaacagttaacatgtaatatttggataggaggttggcaattttctttttagcacctgcctgtctgctatcattcaaactcacatttaaaatgtggctatgtgagatgagagaactataatattccaggtttgtgattagtttggaaactttttaaaagtttgaatgtggtctgagagatagtttgttataatttctgttcttttacatttgctgaggagagctttacttccaactatgtggtcaattttggaataggtgtggtgtggtgctgaaaaaaatgtatattctgttgatttggggtggagagttctgtagatgtctattaggtctgcttggtgcagagctgagttcaattcctgggtatccttgttgactttctgtctcgttgatctgtctaatgttgacagtggggtgttaaagtctcccattattaatgtgtgggagtctaagtctctttgtaggtcactcaggacttgctttatgaatctgggtgctcctgtattgggtgcataaatatttaggatagttagctcctcttgttgaattgatccctttaccattatgtaatggccttctttgtctcttttgatctttgttggtttaaagtctgttttatcagagactaggattgcaacccctgcctttttttgttttccattggcttggtagatcttcctccatccttttattttgagcctatgtgtgtctctgcacgtgagatgggtttcctgaatacagcacactgatgggtcttgactctttatccaatttgccagtctgtgtcttttaattggagcatttagtccatttatatttaaagttaatattgttatgtgtgaatttgatcctgtcattatgatgttagctggtgattttgctcattagttgatgcagtttcttcctagtctcgatggtctttacattttggcatgattttgcagtggctggtactggttgttcctttccaggtttagcgcttccttcaggagctcttttagggcaggcctggtggtgacaaaatctctcagcatttgcttgtctataaagtattttatttctccttcacttatgaagcttagtttggctggatatctctcagaccacagtgcaatcaaactagaactcaggattaagaatctcactcaaagccgctcaactacatggaaactgaacaacctgctcctgaatgactactgggtacataacgaaatgaagacagaaataaagatgttctttgaaaccaacgagaacaaagacaccacataccagaatctctgggatgcattcaaagcagtgtgtagagggaaatttatagcactaaatgcctacaagagaaagcaggaaagatccaaaattgacaccctaacatcacaattaaaagaactagaaaagcaagagcaaacacattcaaaagctagcagaaggcaagaaataactaaaatcagagcagaactgaaggaaatagagacacaaaaaacccttcaaaaaatcaatgaatccaggagctggttttttgaaaggatcaacaaaattgatagaccgctagcaagactaataaagaaaaaaagagagaagaatcaaatagacacaataaaaaatgataaaggggatatcaccaccaatcccacagaaatacaaactaccatcagagaatactacaaacacctctacgcaaataaactagaaaatctagaagaaatggatacattcctcgacacatacactctcccaagactaaaccaggaagaagttgaatctctgaatagaccaataacaggctctgaaattgtggcaataatcaatagtttaccaaccaaaaagagtccaggaccagatggattcacagccgaattctaccagaggtacaaggaggaactggtaccattccttctgaaactattccaatcaatagaaaaagagggaatcctccctaactcattttatgaggccagcatcattctgataccaaagccgggcagagacacaaccaaaaaagagaattttagaccaatatccttgatgaacattgatgcaaaaatcctcaataaaatactggcaaaccgaatccagcagcacatcaaaaagcttatccaccatgatcaagtgggcttcatccctgggatgcaaggctggttcaatatacgcaaatcaataaatgtaatccagcatataaacagagccaaagacaaaaaccacatgattatctcaatagatgcagaaaaagcctttgacaaaattcaacaacccttcatgctaaaaactctcaataaattaggtattgatgggacgtatttcaaaataataagagctatctatgacaaacccacagccaatatcatactgaatgggcaaaaactggaagcattccctttgaaaactggcacaagacagggatgccctctctcaccgctcctattcaacatagtgttggaagttctggccagggcaatcaggcaggagaaggaaataaagggtattcaattaggaaaagaggaagtcaaattgtccctgtttgcagacgacatgattgtttatctagaaaaccccatcgtctcagcccaaaatctccttaagctgataagcaacttcagcaaagtctcaggatacaaaatcaatgtacaaaaatcacaagcattcttatacaccaacaacagacaaacagagagccaaatcatgagtgaactcccattcacaattgcttcaaagagaataaaatacctaggaatccaacttacaagggatgtgaaggacctcttcaaggagaactacaaaccactgctcaaggaaataaaagaggacacaaacaaatggaagaacattccatgctcatgggtaggaagaatcaatatcgtgaaaatggccatactgcccaaggtaatttacagattcaatgccatccccatcaagctaccaatgactttcttcatagaattggaaaaaactactttaaagttcatatggaaccaaaaaagagcccgcatcgccaagtcaatcgtaagccaaaagaacaaagctggaggcatcacgctacctgacttcaaactatactacaaggctacagtaaccaaaacagcatggtactggtaccaaaacagagatatagatcaatggaacagaacagagccctcagaaataacgccgcatatctacaactatctgatctttgacaaacctgagaaaaacaagcaatggggaaaggattccctatttaataaatggtgctgggaaaactggctagccatatgtagaaagctgaaactggatcccttccttacaccttatacaaaaatcaattcaagatggattaaagatttaaacgttagacctaaaaccataaaaaccctagaagaaaacctaggtattaccattcaggacataggcgtgggcaaggacttcatgtccaaaacaccaaaagcaatggcaacaaaagccaaaattgacaaatgggatctaattaaactaaagagcttctgcaaagcaaaagaaactaccatcagagtgaacaggcaacctacaacatgggagaaaattttcgcaacctactcatctgacaaagggctaatatccagaatctacaatgaactcaaacaaatttacaagaaaaaaacaaacaaccccatcaaaaagtgggcgaaggacatgaacagacactactcaaaagaagacatttatgcagccaaaaaacacatgaagaaatgctcatcatcactggccatcagagaaatgcaaatcaaaaccactatgagatatcatctcacaccagttagaatggcaatcattaaaaagtcaggaaacaacaggtgctggagaggatgtggagaaataggaacacttttacactgttggtgggactgtaaactagttcaaccattgtggaagtcagtgtggcgattcctcagggatctagaactagaaataccatttgacccagccatcccattactgggtatatacccaaaggactataaatcatgctgctataaagacacatgcacacgtatgtttattgcggcactattcacaataggaaagacttggaaccaacccaaatgtccaacaatgatagactggattaagaaaatgtggcacatatacaccatggaatactatacagccataaaaaatgatgagttcatgtcctttgtagagacatggatgaaattggaaaccatcattctcagtaaactatcgcaagaacaaaaaaccaaacaccgcatattctcactcataggtgggaattgaacaatgagatcacatggacacaggaaggggaatatcacactctggggactgtggtggggtcgggggaggggggagggatagcattgggagatatacctaatgctagatgacacgttagtgggtgcagcgcaccagcatggcacatgtatacatatgtaactaacctgcacaatgtgcacatgtaccctaaaacttagagtataaaaaaaaaaaaaaaaaaagtttgaatgttttcttgcattcagagccttggttgacatagttaattaaaaataaaacattgtatataaagcacagaatgagcagctacacaaagctgctcaatcaatgacagctctatatgggttagggtttcttgtggggatgacattgatgtagaaagcatggtcatctattgagaatgatggggctggaggtattggatacttgaggtttagaaaatacattgtagaaaatggacaaaaacccctcaaattaagggatgaggcagaataatgcttggcaataccaggggtaggctgcagtctttcttggaaatatatattttaaatggaaccaattatcatagcatcatttcctctcagggttaccctctgatccctattttactaaatcgttataaaacaaaatgaggaattatgtgtccttcccttttgaagccaatgtaacaagatgggtaagaattagacctcctgagttcaaaatccctggattcagatctattcctgtatattcaggagaagtggtaataaattcgatggacaatttggtttagtagtcgattgaggaccctgatgaggtatatttgggaaaacataacttccgctctctctcattgactcacgggcctttgaggagtccaggagtcattggaatctggcctgaggttgaggctgctggcaaaactccttccccaaagtccattcctattgctgactgagaagggactagcattggaagtggctgattttaaataccgctagtgctggtgtgctcctccctcccattcccagctctgctttgtgtagttgccttgagaagctaagttcattctgaaaataatgccattgcacaaaacacttttgaaagttctagtttgaaattacatcaggtcacttggtctgtgtggcctcagtttcttcatctgccatgtgaaaataataatgcctactctgtagcaaagaaagtctctatagtaaacaaaaaaaaagcctactctgatactgaaagttgttatgaaaaataaaaaagggaaatgctttagaaactgttaagtgctatgtagatgttactaattaacaaaccatttcagaaactatactttttattttatggccactattcactgtttaacttaaaatacctcatatgtaaacttgtctcccactgttgctataacaaatcccaagtcttatttcaaagtaccaagatattgaaaatagtgctaagagtttcacatatggtatgaccctctatataaactcattttaagtctcctctaaagatgaaaagtcttgtgttgaaattctcagggtattttatgagaaataaatgaaatttaatttctctgtttttccccttttgtaggaagtcaccaaagcagtacagcctctcttactgggaagaatcatagcttcctatgacccggataacaaggaggaacgctctatcgcgatttatctaggcataggcttatgccttctctttattgtgaggacactgctcctacacccagccatttttggccttcatcacattggaatgcagatgagaatagctatgtttagtttgatttataagaaggtaatacttccttgcacaggccccatggcacatatattctgtatcgtacatgttttaatgtcataaattaggtagtgagctggtacaagtaagggataaatgctgaaattaatttaatatgcctattaaataaatggcaggaataattaatgctcttaattatccttgataatttaattgacttaaactgataattattgagtatcttctgtaaactgcctctgttgtagttttttttttctcctaatcatgttatcatttttttggaatccatggtttcctgttaagatgactcacacagcctacataaaagtaattgacaaaatatcatcttatagtaaaatgccacatatctttatgttcagcaagaagagtataatatatgattgttaatgataacccaaacaacaaaagatttcaccttaactggttgtcataagtagtagtatccaccgccttattttgagttggatttttatcatcctatgagccctacaaatttaaagtttttggaacagcacgtgcattgaacccataagaacctactctgcttttctgcatgtattgtccagacaagagaccaaattgccgaggcatcatttaggtgaattctaattaacatttagctaccttacaaccacaattcaaggttgtttcaaaggcatgtgcttgcatcatcctgattcactaccatgtgttactaacttggatctgcaaagtcattataaaaagctgttttgatggacttatttggatattgctttacccttcttctctcttttcttttatcaatgtaaaaacattatatgttaaatacttggcttttaagagcatagatctgaaatctgcctctagcaaataacccataacacttctaagatatacctgcaaggtcaattgtgttgtaaaaccttgataaccatactttattgttcaaaaaagccttttatgaaggcagaagttaaaaaaaaaaaacaaaaaaaacagagtccacagttatcacctcagctacaatctcatcagttcacaagtaccagcaaaacatgtgataagtcaacaaatgttttatttcaatctgaacattttacgtaagtgaagactttgttagatatcatttggaatgtggaatctacacagttggcatatcagagaaggttgaattcagtttaataaatgtttatagaaagtgcttgttatcataatgataatagctcaggatgtgcatgacaagcttttaagcgattgggtacactatctcatttgatcttctgcacaactattaatggtaggtactattatccctatcttatggataagtaaactaagatttaaaaagtacagaacatggtgtgaacactgcttcaaaatttctaaaataggtaaatcacgatctctaaactggagggttgtccaaccactagggacaatagagtactgatatttagtggtcagactgtaatgcgggaagagacaggcatgggctaaacgggtgtagagatcaaataaggggcaggttagtttgtaaacatgtccatatgtaacatttagcacaaatacaggatataggtgctttcagacccagctgcattgataaaaagttaggtggtattgtatctgtcttcctttctcaatgttgcatatctgtgttcttgcccagtttgcttcatctctctagccacacttattggcctacaatggcatcatcaccaaagaaggcaatcccatctccgtgtggctttggtttgctccctaaagtaaaccttgtgtttacttttcccaggtctcatgctttcccatatctgacctgttttgtcctcatggccaggatatgtgggacctttcctacaatgttccaaagtttgtaatagagctcttctctgctttgttccaaattctgcaacattttactttaaataatgaatttaaatacaaacaaacttgagctttgcctatacttttcaagaatgcagagataactaaattaataaaaatattcattgagtccttactgtgcacacagctctatgttaagccttgtgcagaactcaaagtcactcgagattaagcctgttactaagttatgtgcaatttagctcagtggatttcccccacttcatattgctctgataatgttttggaattaactgccttgattccttcttttctctgcttgtctatacactatttattattctacaccatctcaaattctaactcctcaagaaaatccttccagatgatttttctaaccaggagttttaacttccttttaactaccctattactttctacttccttaactcatctatcatattatatttagttatttatatactaggtcgccttgaagaagggattgtgttttcataaatcttaataatccctgaggcatcaagtacagtgatttgcatttactaaatgctcaacaaatatgtgagggattcacttgaaactaatattagataattcccagtcaaagtgatctaatagcaaatcaattcttcagttttataggcaaagtatgactctggttttccataatcataattaatttgtcaactttataattttaattaagtaaatttaattggtagataaataagtagataaaaaataatttacctgcttaactacgtttcatatagcattgcatttttctttgtaaaatttaagaattttgtattaataaacttttttacaaaagtattaattattcagttattcatcatatacttttattgacttaaaagtaattttattcaaaagagttagtataggactacatgaaaaattcaaggccaaggcttaatttcaaatttcactgcctttggctctatcttttaaaacaaaacaaaaaactcccgcacaatatcaatgggtatttaagtataatatcattctcattgtgaggagaaaaaataattatttctgcctagatgctgggaaataaaacaactagaagcatgccagtataatattgactgttgaaagaaacatttatgaacctgagaagatagtaagctagatgaatagaatataattttcattacctttacttaataatgaatgcataataactgaattagtcatattataattttacttataatatatttgtattttgtttgttgaaattatctaactttccatttttcttttagactttaaagctgtcaagccgtgttctagataaaataagtattggacaacttgttagtctcctttccaacaacctgaacaaatttgatgaagtatgtacctattgatttaatcttttaggcactattgttataaattatacaactggaaaggcggagttttcctgggtcagataatagtaattagtggttaagtcttgctcagctctagcttccctattctggaaactaagaaaggtcaattgtatagcagagcaccattctggggtctggtagaaccacccaactcaaaggcaccttagcctgttgttaataagatttttcaaaacttaattcttatcagaccttgcttctttttaaaactttaaatctgttatgtactttggccagatatgatacctgagcaattcttgttctgggttgtcttatgtgaaaaataaattcaaggtccttgggacagataatgtgttttatttatctttgcatatccattacttaaaacagcattggacccacagctggtacaaaattaattactgttgaattgagcaaatatttattctaaatgtctctgtcaaatgacagagtgtggttgtgtggattaagtccctggagagagttctttgttctctcatgttctatgctgtggttcttgctttatgcaaaaagaagtaagttacttaaaacctggacatgatacttaagatgtccaatcttgattccactgaataaaaatatgcttaaaaatgcactgacttgaaatttgttttttgggaaaaccgattctatgtgtagaatgtttaagcacattgctatgtgctccatgtaatgattacctagattttagtgtgctcagaaccacgaagtgtttgatcatataagctccttttacttgctttctttcatatatgattgttagtttctaggggtggaagatacaatgacacctgtttttgctgtgcttttattttccagggacttgcattggcacatttcgtgtggatcgctcctttgcaagtggcactcctcatggggctaatctgggagttgttacaggcgtctgccttctgtggacttggtttcctgatagtccttgccctttttcaggctgggctagggagaatgatgatgaagtacaggtagcaacctattttcataacttgaaagttttaaaaattatgttttcaaaaagcccactttagtaaaaccaggactgctctatgcatagaacagtgatcttcagtgtcattaaattttttttttttttttttttttgagacagagtctagatctgtcacccaggctggagtgcagtggcacgatcttggctcactgcactgcaacttctgcctcccaggctcaagcaattctcctgcctcagcctccggagtagctgggattagaggcgcatgccaccacacccagctaatttttgtattttagtagagacagggtttcaccaggttgcccaggctggtctcgaatgcctgacctcaggtgatccgcccacctcggcctcccaaagtactgatattacaggcatgagctaccgcgcccggcctaaaaaatactttttaagatggtgtaaatattactttctgtatcaatggtacattttttacttgtcagtctctagaatttctttataaatatgttgattcagttcatttttgtagattataaaacaggtaaaaaaggataaaacatttatgtgaattaaagggaatacctaatttttgtgtagagtttattagcttttactactctggtttatggatcatcacaccagagccttagttactttgtgttacagaataactaatatgagtgaatgaatgacttacacaagtcactgcttaggataaagggcttgagtttgtcagctagagtatgacagaaagtatctaagttttggagtcaaatagcactttgtttgaatcccagattgcatgcttactagttatgtgaccttagtcaagccacttcacctcactgagtctttgcttttttcatctctaaaatagagatacccaccgctcataggctgtcataagggatagagatagcatatggaatgagtctgtacagcgtctggcacataggaggcatttaccaaacagtagttattatttttgttaccatctatttgataataaaataatgcccatctgttgaataaaagaaatatgacttaaaaccttgagcagttcttaatagataatttgacttgtttttactattagattgattgattgattgattgattgatttacagagatcagagagctgggaagatcagtgaaagacttgtgattacctcagaaatgattgaaaatatccaatctgttaaggcatactgctgggaagaagcaatggaaaaaatgattgaaaacttaagacagtaagttgttccaataatttcaatattgttagtaattctgtccttaattttttaaaaatatgtttatcatggtagacttccacctcatatttgatgtttgtgacaatcaaatgattgcatttaagttctgtcaatattcatgcattagttgcacaaattcactttcatgggctgtagttttatgtagttggtccagggtgttattttatgctgcaagtatattatactgatacgttattaaagaatttcctacatatgttcactgctgctcaatacatttatttcgttaaaacaattatcaagatactgaaggctgattggtaactcacatggaactgggagagtatacaattctgaaccaaatagatgattctctattattatatcttaatttatgtgttatggtatattaaacatgaaaaaaattgtatttggttagaatatgtttgctcttccttaactcgggaatgacatagggtaatattcacagattgggttcctataaatcctccacttgaagtgaagtcagttcaagtaatgaaagctacctcctgagatagaatcagtacttggcacctatctctagtgttctttcacctcatataacctttcactgattagtaaagattatatccaacaaagaaagtacagcacagactgagatatgattactgagataaatttgggcaaaatataaactacagcatttctgtagcaatgagaccatttttcttcagttgagctccatgttctacaaacttcaatcaaaaaaggttctaggagactcagtgaaagttgatacactgttcaaggaacaaataatttcagcacatgggaatttcacagggaaaaatatactaaaaagagaggtaccattttggatggtgtcaatatgggttatgaggaattcaggctgctgagtccagtgtacaatggaaactgagctgcaggtgtgtgattgtaacaacaaaagaaatgctgaaatattaagtcctttgccatgtaaatagaaaaagagtatttatttcccaaacattattgctcacctgtttttgttatgcctttcaagataaatccaggaaaggaattgcattttctttccagaaaacaagttcttgggggaattgttcaattggtagatgttgtttttctcattaacaagtgagtgctccatcacacttgctgagtgctccatcacacttgctctctgcattactcctctgcctgcaaacacatatatagcaagggtgatgacaaggatatcagagggtctggttttctcaaactcatgataaactcatggctgggtcattcttggtgctgattttactttgttttttgttgttattgttccctcttcctcaaaagatgaaatctatccctcttacttggaatttctctttgatatatagcgaatgtttggttgtaacctgtataatctggcatgaaattgtcactcgaaaaggctagaagtgttgacataaatatgggacagcaagagttgctcctactcaagagagcaaatataatgttctggaagagattggcagaattcacatcaaaggagtgattacttcagcctgggccactgttgtactggtcaaaaggctgtgcaaagctctctgaaaatccactcttttattgctctttagtaataaagtcactttcaattttaaaaataacaaactgatatatttttatgactcataaaatgttagcaattatattatggagaatctactttctgggtgattcttacaaatgttcttggatctatttttttttcttatagtacctattcttcccatttttctcagctctagttaatatatttcaacaacagttcaacaaatttaacatttttataaaaagtgtttcctatcattttataaataccagcctagtccatgttattccttttcttgttgaggagaaaggacacacattgtaaattcaaatatagacctctactgtgctatttaatcttggtaacaactccacaaaggagatgacatgttttccttctatagaggtagattctgtaaagttagagggaagagtgacttgcttaagatggcataagctgtaactggcagaaccaggattcaaagccaggtgggatgccaaaatcataatctgtcttcagtgtcaagttactgaaattggtaaacattagacctaaatagacggaattgcaatccgggttgggcacattaaactccattttcttcatcaatgtgctcagattacattttacttttcaggctaaaaatggaaaaaaagagtccctcttagttctgcacttgagaatgagaatagcttttctgaattatacaaggaagaagaactaatgcccaaatgccaggtacccacatgcactatgccatggcacagctgttgccccctttcaccagagccctctctctgtatcctggttgacctttccttgggcaagagctgggtggggaggatcacaagtgactccaatttggatggcttcgggaagactgggaccgagctgaaggcagtgttgtcctctgcactccctgttttctgtctgctggagcactgaagcctcacatatgtattaaaaaaataatttccatttgcatttcagactagaagattgaacgtatagtgtaatgtgattgcaaataattatattgaaatgagacagagaggatgtagtatctactgtcataatttttcaaaacccacctgcaacttgaattaaaagaaccacttgggtttttttttttgtttcaaacgcaaatcctggaaacctactgagactcattcagtcagtatctctaagaggcaagcttgagactgtatatttaaaaagcatctcaggtgatttttacacatgctaaggcttaagaaccacttctctgtagcttatatgttattttcaatgttcctcaaagccaagttagaatttccaaagtgttaagaatccattagacaatcacagaattgtctttttcctttataaatcttgcaatgttgttctcatttccatacttaattacttaaaacaccaaccaaccaacaagcaaaaaatgattagtctaactaatattacaagttaataatgaagtaaaggtttaaaaataatgtcataataatgttaataacaaattattaattataatttaaaaataatatttataatttaaaaataatatttacaagtactacaagcaaaacactggtactttcattgttatcttttcatataaggtaactgaggcccagagagattaaataacatgcccaaggtcacacaggtcatatgatgtggagccaggttaaaaatataggcagaaagactctagagaccatgctcagatcttccattccaagatccctgatatttgaaaaataaaataacatcctgaattttattgttattgttttttatagaacagaactgaaactgactcggaaggcagcctatgtgagatacttcaatagctcagccttcttcttctcagggttctttgtggtgtttttatctgtgcttccctatgcactaatcaaaggaatcatcctccggaaaatattcaccaccatctcattctgcattgttctgcgcatggcggtcactcggcaatttccctgggctgtacaaacatggtatgactctcttggagcaataaacaaaatacaggtaatgtaccataatgctgcattatatactatgatttaaataatcagtcaatagatcagttctaatgaactttgcaaaaatgtgcgaaaagatagaaaaagaaatttccttcactaggaagttataaaagttgccagctaatactaggaatgttcaccttaaacttttcctagcatttctctggacagtatgatggatgagagtggcattttatgccaaattaccttaaaatcccaataatactgatgtagctagcagctttgagaaattctaaagttttcaagtgataagactcaatttatacaaagctaattggataaacttgtatatgattaagaagcaaataaatacttattatgcttttttgctgtttatttaaatatttaacccagaaaataagtcactgtgacagaaataaaaatgagagagaagggtgagccactcttaggtagttctggcattatttaatctaggccagaggttgcaaatggtgtcccatagaactaattttggctcctagacctgtcttatttaacctttcatttaaaaaatttgtattggttgccagcaattaaaaattgggagatgtctcacacacacacacacataaacacacacactcatgtgtgcagcctcttttgaagaattggaataactagtcaactgcgtcctccttttccacaagctgtgacagctccctgctcacagagcacctgccctctcctgttcatcatgctctcttctcagtcccattccttcattatatcacctatttggtcctgagactaagtgagtttgagatctgtgatttagacaaagtggtgaatctagctctgaatcatagtaagtagctctgggaatcatcttgtcttctgttagcccattgagagagaaatagagagagagagagagagaaagaaagaagaagaaacagatctggggagagtcactgaatgggagcatagagacagagaaacagatctagaaaaccaaactgggagaaaatgagagaaaccaaaagagaggtagagaggagcagagaagaaaatgaagaagcaaggcaaggaccaggctttttcattatttcttatggccaagacttcagtatgcgtggacttaattcttccttatgctcctaccttccctagggaaactgatttggagtctctaatagagcccttcttttagaatcacagtttgatgccttaaaactagttatataccttcacatgcttccttaacccacagaagtgatgctaatgaggcccttaataaggagcgtgctattaagatgaagacattcattttttttctccgtccaatgttggattaaggcacattagtgggtaattcagggttgctttgtaaattcatcactaaggttagcatgtaatagtacaaggaagaatcagttgtatgttaaatctaatgtataaaaagttttataaaatatcatatgtttagagagtatatttcaaatatgatgaatcctagtgcttggcaaattaactttagaacactaataaaattattttattaagaaataattactatttcattattaaaattcatatataagatgtagcacaatgagagtataaagtagatgtaataatgcattaatgctattctgattctataatatgtttttgctctcttttataaataggatttcttacaaaagcaagaatataagacattggaatataacttaacgactacagaagtagtgatggagaatgtaacagccttctgggaggaggtcagaatttttaaaaaattgtttgctctaaacacctaactgttttcttctttgtgaatatggatttcatcctaatggcgaataaaattagaatgatgatataactggtagaactggaaggaggatcactcacttattttctagattaagaagtagaggaatggccaggtgctcatggttgtaatcccagcactttgggagaccaaggcgggtggatcacctgaggtcaggagttcaagaccagcctggccaacatggtaaaacccggtctctactaaaaatacaaaaaattaactgggcatggtggcagatgctgtagtcccagctgctcgggaggctgaggcaggagaatcacttgaacctgggaggcggaggttgcagtgagctaagatcacgccactgcactccagcctgggcaacaaggcgagactctgtctgaaaaagaaaaaaaaataaaaataaaaataaaaagaagtggaggaatattaaatgcaatataaaagctttttttatttttaagtcatacaatttgtttcacataacagatcaggaaataatacagagatcataagttttggagctgggtttgaatcctggctctgccatttactttctgtgtaatctaagtcaagttactgaactttgtgggccctctggctctccatgtgtaaaatggagaatattaatatttaccttgcaagtttgttgtgaagactgaaggagagaatttaggtaaaacattcatcagagtaccatgcacacagttgttcctcaataaacattagcttctctgattgcaagttccagtctaaagtgctttatatataccagccaataaaaggatgcgagagagatataccagtgtattgttttctaccattttaaacctattttcatccactgttacaaattctatcatactgctccacataaaaaatattatcaatgatttttagtctctgaagtgcaatatttgattattgagcacacctgttgaagttttagtttcttctcacttacatgggttgtgtaaaggtaggaggtataaaaccagtgtcctaggtctaaatctttcttaatgtcatactttggattcattgatataagtaacttgagcaccagcgcttcattttacttcattttttaaagatatagtaagagtaattcccatctgcctagcaaaattgttttgtagaaaagtttgtggatcagatttattttactttgattttaggaatttcaagtgtcttcgtcggcatgaaggaaaaatatgcagtttgacattttctactactttcaggtcattattttcctactctggtgcaaaaaccctcaattcctgtctcactccatctaatcaaataggtagcatgcttgagcccttactatgtgccaggcactaggataagcactttatatgttttgtcccaattaattctcacagcatttctatgacctaaataaaattaatattttcatttcaccaataataaaatggaggcttcaaaaagtttagggacttggctcagctcacacaactggcaaggactgaaaatggattttagtcccaaatgtcataggctagagccctttcactaaactgttgtcttccatctggtggcatcctcttcctccagtctttgtcacctaaactctgggcaccccttgatggcatttacttatgatggtgatgcttgttaaacttcctgtttgcgacttcaacgtccatataaatgagtcttccaatactgtacttagaacttatattttgtagtgacttctttaaaagctttctctcttagtcatatcctgagttttgttagcacctggacttaccttactttggaaatgttgcactctgaaatctctttctcagcttggaatttcctaatcttccaactgtttgagtcttttaattctacatttactgcctttccatttcatcaggatttctagtctctttaattcttccttttgaactcctcctgatttaacctctgcttattcgaagaacaataattttattctctcagctgcactctcaattcccttttccttttggtgatttttctttttcctacagaacacttactttatcagttttggagaaggaagtgctatctgggtaacagtagtgctatctgttgactctagtcaactgtaagttttatacatttattgtttaaaccttatatgggtctataatccttcttgggaaatcctttcatttgtctttaatttcctttaccatttccctaaaggctattccagatttttatcacattcacaaaattcccgtcttttctcaggatctgttcacccccagtagatagccttgtctcccacaatacatggagaaaatagaggccaccgtcatatttgaatgtttccaacttctctcttcacctttggaattatctttttcttcttttgtgtctaagagaaagatgtatacttcttcttacccttgtctgaactactctattttgcttcatcttctcagaacaggggaccagcaattattcttcctccagaagcttcaacatcttttgtcaactgactccttctcatgtttaaatattttcaagttaaacaatttctttcctgactttcgctcacgcaacctcatgcccaaaaccttatcactcttcttccctttgctgtcaaggctgttctcacttcttcactttttgtggacttctccccactacaacatagattctgctatcaccaatctattaaaactgttatactcttgtggaatttatcatttaatttagcttcagtgaaccgttctttccagattattttggcctcagaccatgacttctaagtctgccgtgcttgccacttaagtgatgatgggccagtgggtccccacctaggcctctgtgttagtctgttttcatgttgctgataaagacatacccaagaatgggcaatttacagaagaaaggggtttgagggactcacagttccatgtgactggggaggcctcacaatcatggtggatgatgaaaggcatgtctcacatggaggcagataagagcatagaacttgtgcagggaaacttccctttattaaaccaccaggtcttgtgagacttcttcactatcacgagaataggatgggcaagaccctcccccatgattcaattatctcccactgggtccctcccacaacacatgggaattatgggagctataattcaagatgagatttgggtgaggacatagccaaaccatatcagcctccttctggctttttatgttctccgtgggtgacctctctcaggctcaagtgataaccaatgtgctgatgactctcaaatgcgcatctctggcttcagtttcttccttgaacttcatacatatgtttccaaatttcctgcgtgtacctcaaggttcttgttcatcacttcccaagcttcataaacgcactcattttagtgtattctctgtctcctttgatagcatccctgagaggcaagtccctggtgagttatatacaactcctcccttgctccaaacctgagagtaagtaacattcctattaacatattaggaagctgaggcttagacagtttaagtaactcaagcatggttacacaactagctagggcagagctaaaatgtcaggctaggcttctgtgactccaaagccctttctcacttagcatatcatcacttatttttttttttaatcacatatatgatttttttttctttaagagatagaatcttgctctatcacgtgggctggagtgcagtggcacaatcatagctcactgtaaccttgaacttgggctcaagtgatcctcctgccttagcctactgagtagctagggctacagacacacaccaccatgcctagctaattttattttattttattttattttttgagacagagtctcactctgtcacccaggctggagtgcagtggtgcgatcttggctcactggaacctctgctgcccgggttcaagcgattctcctgcctcagcctcctgagtagctgggattacaggtgcctgccactgtgcccagctaatttttgtatttttagtagagacggggtttcaccatcttggccaggcttgtcttgaactcctgacctcgtgatccactcgcctcggcctcccaaagtgctgggattacaggtgtgagccaccacgcctggccacctacctaatttttaatttttttgtagagacagggtctcactacgttgcccaggctggtcttgaactcctgttctcaaacaatcctcctgcctcggacaccccaagtgcagggattacaggcatgagtcattgcagctgacctgtatatatgatttttagtatatgtaaatatacatatttattaaatgtaaatataaatataaatgtgtggagtgatatccattgaaatgttaaacatagttctcagtggtacaactacaggtgatttctcttttcttatttctggttttctgtgttttccaaatttcttgaaatgtgtcttctgtaatcagaaataaaagttattagtaacaacagtcttccactggtacaagtgcttattggataaaagtcccacttctaagcatgatactcacaacttttaggttaatagcctttgtcaccttgccatatacatctgatccagccactcacaccattcctgagatatattttgttcctttgtgcctaaatcattgtgcatgcagatccatcttcctggaacacctataaccatttcttagtcctgtgaaatcctacttacatccttcatagcctagcatgtatgtcatttatttggtcaagggtgagttggttgttctcttgaatgtactgccatatgacgtggtgtgatttcaattgtagcaccaagctcattgcaatattaattcgtttgtcattctcccatgtaggatgtttgaagtagtttctaacacagagattatactcaataaatatttattagataaataaatgaataagggaataacaaatgcctttgtctcattttaaaatactttcattgttagctacccatataataaaaaactaaaagcagtagttttcaagcatgattgtttatgtatgccttaaaagaattttgaaaacctatgtacccctgacacacttttaagttaacttataaatttttcaacatagttttaagtggtggcaaatgatgtagtttcttgtgtattttaaactgcttaagtatgctatacatggatttcttcaaaaccctgaagctgcagtttcagtgcattcaatttatggaaaagaaattaatttataaaattggttcttattgtcaagtcaatcagctaaatataacttgctttctgtcaggaaaagtctgactttaaaatacagataagtaataactattattaattaattaaattattaaaattaaaataattaaataatttgttaattaaaatgccttattcccctacttatttctgcaatttgactctaagaatagataggacatgtagattgccttaggtttgaaatctgggtgaaataagatactgcctccttcagtatttctgcctttgcttttatgggagcctctttcaagaaaaagtcattctctcatggtccctttgtttgagtcccagaggttttcctactccagaaagtgcaacgtagtgagactagtactatactcccttgcatggtaagtgagaaggctgtctgtataaaatgagggaaggactcatgagagggaagtaggtcaggagaaatgataggttctcaggcaggttaattttaggaaagagtgaatagagtcccttaaaacaaggtgcatctgcttcctcctgatcaatctttaggactgtttactttgatttgaagaccactatgctaaagcttcccacgggggcaatagtgaggcaaggaatttttaaaagggaattacttcttcgtagctacttttgtgaaatgaattcatttgaattatctggcaatctcttcatatttatattcaacaataattacttaaagaaatgctttgagcttctcagaggagggtgctaccagtgtgatggagtagaattcagatttgggtagtgactttaaagctgtgtgactttagtcatttaactgctgagtcacagtctacagctttgaaagaggaggattataaaatctatctcatgttaatgctgaagattaaataatagtgtttatgtaccccgcttataggagaagagggtgtgtgtgtgtgtgtgtgtgtgtgtgtgtgtatgtgtatgtatacatgtatgtattcagtctttactgaaattaaaaaatctttaacttgataatgggcaaatatcttagttttagatcatgtcctctagaaaccgtatgctatataattatgtactataaagtaataatgtatacagtgtaatggatcatgggccatgtgcttttcaaactaattgtacataaaacaagcatctattgaaaatatctgacaaactcatcttttatttttgatgtgtgtgtgtgtgtgtgtgtgtttttttaacagggatttggggaattatttgagaaagcaaaacaaaacaataacaatagaaaaacttctaatggtgatgacagcctcttcttcagtaatttctcacttcttggtactcctgtcctgaaagatattaatttcaagatagaaagaggacagttgttggcggttgctggatccactggagcaggcaaggtagttcttttgttcttcactattaagaacttaatttggtgtccatgtctctttttttttctagtttgtagtgctggaaggtatttttggagaaattcttacatgagcattaggagaatgtatgggtgtagtgtcttgtataatagaaattgttccactgataatttactctagttttttatttcctcatattattttcagtggctttttcttccacatctttatattttgcaccacattcaacactgtatcttgcacatggcgagcattcaataactttattgaataaacaaatcatccattttatccattcttaaccagaacagacattttttcagagctggtccaggaaaatcatgacttacattttgccttagtaaccacataaacaaaaggtctccatttttgttaacattacaattttcagaatagatttagatttgcttatgatatattataaggaaaaattatttagtgggatagttttttgaggaaatacataggaatgttaatttattcagtggtcatcctcttctccatatcccaccctaagaacaacttaacctggcatatttggagatacatctgaaaaaatagtagattagaaagaaaaaacagcaaaaggaccaaaactttattgtcaggagaagactttgtagtgatcttcaagaatataacccattgtgtagataatggtaaaaacttgctctcttttaactattgaggaaataaatttaaagacatgaaagaatcaaattagagatgagaaagagctttctagtattagaatgggctaaagggcaataggtatttgcttcagaagtctataaaatggttccttgttcccatttgattgtcattttagctgtggtactttgtagaaatgtgagaaaaagtttagtggtctcttgaagcttttcaaaatactttctagaattataccgaataatctaagacaaacagaaaaagaaagagaggaaggaagaaagaaggaaatgaggaagaaaggaagtaggaggaaggaaggaaggaaagaaggaaggaagtaagagggaagcagtgctgctgctgtaggtaaaaatgttaatgaaaatagaaattaagaaagactcctgaaaggcaattatttatcaatatctaagatgaggagaaccatattttgaagaattgaatatgagacttgggaaacaaaatgccacaaaaaatttccactcaataaatttggtgtcaggctgggtgcagtggctcacacttgtaatcctagcacttttggaggcagaggcaggtgaattgcttgagtccaggagtttgagaccagcgtgggcaacatggcaaaccccacctctacaaaaaacacaaacaaaagaaaatagctgggtgtggtggtgtgtgcctgtagtcccagctacttgggaggctgaggtgggaggatcacctgagcctgagaagtggaggctgcagtgagccatgattgcaccactgtaccctagcctaggtgataggctcaaaaaaaaaaaaaattggtgtttgcaatgctaataatacaatttggttgtttctctctccagttgttttcctacatacgaaacagcttttaaaacaaaatagctggaattgtgcattttttcttacaaaaacattttctttcttaaaatgttattatttttcttttatatcttgtatattattactagcagtgttcactattaaaaaattatactataggaggggctgatactaaataagttagcaatggtctaaacaaggatgtttatttatgaaaaggtagtaattgtgtttcatagaatttttaaaattaattctgcgtatgtcttcaagatcaattctatgatagatgtgcaaaaatagctttggaattacaaattccaagacttactggcaattaaatttcaggcagttttattaaaattgatgagcagataattactggctgacagtgcagttatagcttatgaaaagcagctatgaaggcagagttagaggaaggcagtggtcccttgggaatatttaaacacttctgagaaacggagtttactaactcaatctaggaggctgccttttagtagtattaggaatggaacactttatagttttttttggacaaaagatctagctaaaatataagattgaataattgaaaatattaacattttaagttaaatcttacccactcaatacaatttggtaatttgtatcagaagcttaaaagataacctaatagttcttctacttctataacttacccaaatatgtttgcagagatcttatgtaaagctcttcattataacactgctttcaggagccaaaaattgggtgggggagccccataaatgttgaataataggggtttgattagataaattttggtgtagttctataatggcgtgttattcagccaataaaaggtttgttaaagaatgactgtgacggatgtatatgatatactcttaagtgaataaagagttacaaaatgttatgtacaagttacaaaatgtatgtacattatgatccatttttcataaaatcatatgtatgtatatatgtgtgtctggaaggataaatttatcaagttgttatctctgaaattttgggtatattttatatttctagattttctgttactttgttactttactgataaagtaataacgttgttgacttttgtcactctcccctattaataatcatctaggctgcaaaaggatcatgtcttctttatttttatattccaaggactgtcaacaagtgcctagcacttgacaggtatattatagaaatttaactgaatatctttaggaaatagatttttgtttgtagttgttctagtctacattaaatgtcttgcgcttatgaaacttccttgaattattttagtgaagcaatattagtatagaattttgcatcactggatgcccttgactgaaagctggcttatggcatctcaccagtgtgtggggagtttcagtccttctgttgtctgcatcacagctgaagcagtgctgttgctgacaattcctgacaccaccttgtctctattattgatcattgcctcactatggtactgagttttagcttattcttgtaataactgggactcatatgtatagaataagctattagctcacgtttttgcttgctttttatacagaatacatgtctgcaaatagttttatcaatattttggaattttgggagatatgaagttaaaaacatcattgaatatatatatatacacacacacatatatatatgacactatacatgatttattttatttaatttttaaaattttattctttttagagattaggtcttactctgtcacccaggctgaacttcagtggtgtgatcatagctcactgtaaccttgaactcctgggctcaattgacctttccgcttcagcctcccaaagtgctgggtttataggcatgagccactgtgtctggtccaatatgcatatatatatttttaacctggattatcagagctatattgtgtttaggtttataaagctgtactatgtgaaaatatcacttctaggtttaattttgtacaaaggaattttatatagaaatgaggtaattcagattttttcccatgtaataagaattgtaaaatttactgaaacaaacatcaaaaagatatctgttacatgaccttcctttcttttgaatatatttcaggtgatattatttattaaaatttaaaaatgaaaattaaaatatataaaaagttgaaaattattcctttctttactgtctctcatctgtccattttccattctcctgcattccctcatccaaccaaggtagccaatccaggtaactttttttagtatcttcccagagatgtttctctctatatatataatcaatatacattttttattattccccacctctctttttatgtaacaatatgcagagttttgcttcttgcttttcccactatcttggacaactttccatattcaaagcacagaggacttgcacatatgttcagactgctgaatatttctgtctctcccctgccattcatatgttgaaatcctaattcccaaggtgatggtattgcagggtggggcctttgggaggtgattagtccatgagggtgaagtctttagtaaatgagattagtgtctttataaaagaaaccttagagagaccctcacaccttagagagaccctcacccctttctgccatgtgagaacacagcaggaagacagctggctatccaggattcaggagtctcttagcagacccaaatctgctggcaccttgatcttggacttcccagcctccagaactgtgagaaataaattcctgttgtttataagccacacagttcatggtattttgttatagcagcctgaacaaggacacacacacacacacacacacatgcacacacatttaaatagatgcatagtattctatcatatggatggatattctatgatataatgaatcactattgattgacatttgggttgtttccaatattttgttaacacaaagaacaacactacaaataactttatatacatatcatttagcacatctgcaattgtatcagtaggcttcctataagtggtcaagcatttgtgtacttgtgattttggtagatgttgtcaaatgtccttccctgaaatttgtaccaattcgtactcatgccatacactctaaatagagtgctgatttccccacagcattactaacagatgatattatctaatttaaaaagtttctcatcttatagggaaaatagtatgtcaatgtattcttaacttgcatttcttttattataagtagtgtaaaatatcatttcaacttatacacaggaggaatttctctctatataaagtgatcctagaatcataatgaaaaatatcaccaactcattaggaaaatgtacaaaggattgaatagatatctcatcaaaaataaaaatataagtggcctttaaacattgaaaggtaacatttgaacaaagacttgcaggaggtgagggattagggaatgcagactctgggaagagtcttccaagtagcaggtgaagcaagtgcaaagctttcagatgggactgactatacctgtctggtttgaagaacagtaaggaggtcactgaggctggcatagagtaagacagggagggtagaatactgtcagagaagtaatcggcggtggaggtagggggtaaaccataaagtgctcgtaaagactaaggcttatttctctgggtgagattagaggccactggagagttttaaacagaagtaacagggccactttggctaatgtttttaggctattctgtagggagacaagggaggaagcaaggagatgagttaggagtctattgtgccagttcaggcaagtgatgatggtggcttgatccaggtagtagtggaagtagtatagtaggaagtgatcagattcaggacatgctttgaaggaagatccaataggattaatggataagttgaacaatggcatatgagaaaagtcacagaggagtcaaagatgattccaagctttctggactgagtaactggaaggataaatgtgccgtttactagaaagataatgggagaaacaggttttggatggagcttggtttgggaatattaagtttgaaatgcctatttgacatccaaatagagatgttagttggatgtacaagtctagtttcaaggaagagggggctggtagtgtgaagatggggctggataagattctaaaggaaagagggttgataagaagagaaaggggtgtaggggttagcctaagggcattctaagtattagaggttaaggaggtgggtgaagaaaacccaataaaataaaagtctgagaagacaaagctagtgaatgaatgtggtatcccggaacccaactgatgtcaagcagaagggtgttatcaactaggtcaaatgctcattcatcaagtaagatgaaactgttataattaaccggtgtcttctgaaatacggagataactcgtgacttaatgaaagcaatagtagagaaggtcaaacttgaccagaatgaaattagaaagaataagaggaaagaaaagaccaaatacagacaaccattgatgccttattcttttgatatactcctggagtccacttgctaatacaattgacccttaaacaatacaggcttgaactgcatgggtccacttatttgtgaattttttttcagttaatacattggaaaatttttggggttttttgacaatttgaaaaaactcacaaactgtctagcctagaaataccgagaaaattaagaaaaagtaagatatgccatgaatgcataaaatatatgtagacactagcctattttatcatttgctactataaaatatacacaatctattataaaaagttaaaatttatcaaaacttaacacacactaacacctaccctacctggcaccattcacagtaaagagaaatgtaaataaacataaaaatgtagtattaaaccataatggcataaaactaattgtagtacatatggtactactgtaataatttggaagccacttcctgttgctattacggtaagctcaagcattgtggatagccatttaaaacaccacgtgatgctaatcatctccgtgtgagcagttctctctccagtaaattgcatattgcagtaaaaagtgatctctagtggttctcgcatatttttcatcatgtttagtgcaatgccataaaccttgaataacatcaagcaatccatacaaagtgccactagtgatgcacggaaaagttgtaacagtacaagaaaaaagttgagttgcttggtatttaccatatattgaggtctgcagctacagttgcctgcaatttcgagataaatgaacccagtataaagactgttgtaacaaaagaaaagaaaatgtgaaaccatcagtgcagctatgccagcaggtgtgaagtcttgcactttttgcaaaatacaaaatatgaaatatgtgttaattgactgtttatgttatctgtaaggtttccactcaacaataggctattagtagttaagtttttgtggagtcaaaaattatacgtggatttttgactatacagtgggttggcacccctaaccttcatgttgataaagggtcaatggtatattatttaatttttttgtatttatattcataaataagattaaatctatatttccaagtaatctctataagattttgttattaatattactattatttttgagacagagtcttactgtcaccaggctggagcacagtggtgcgatctcggctcactgcaacctctgcctcccgggctcaagcaattctcctgcctcaccctcccaagtagctgggactacaggcacgcacaaccacactcagctaatttttgtatttttagtagagacggggtttcaccatgttggccaggatggtattgatctcttgacctcatgatctgcctgcctcggcctcccaaagtgttgggattacaggcatgagccactgtgcacagccattaatattattgttacccaataaaaaaaatttggaaacttgtcttcttttcccctgattctgtttaaatagcactggagttacctgttttgaattttttttccaagcggtcccttatgagttttctctatgttttatttgtttcatttctttttttttttttttttttttttttgagacggagtctcgctctgtcgcccaggctggagtgcagtggcgggatctcggctcactgcaagctccgcctcccgggttcacgccattctcctgcctcagcctcccaagtagctgggactacaggcgcccgccactacgcccggctaattttttgtatttttagtagagacggggtttcaccgttttagccgggatggtctcgatctcctgacctcgtgatccgcccgcctcggcctcccaaagtgctgggattacaggcgtgagccaccgcgcccggcctgtttcatttcttatatcgtatttttgcaactcctttattgatacttttcttcctgattaggtttctactaaaaccaaacaagctttccatgaattagcttttagatttacttattagtttaactgttctgttgtattgtaactcattaatttataattttatctttattaattattctatttttcttcgcttttttgttgtttttctagtttttgagttagatgtttgacgcttttttaaaaagctgtgcattttcctctgggtaatactttagctgtatattatgtattctgatatatagtgtttccattacattgttttctagaaaatctgtagctttgatttatatttgtttcctctttgacctaagatatcctaagggaaaatttaacattttccagaaagaaaacaaattttctttgttttccaagaatgttgttcaaattatttctactgcttggaatttttatcatttttgtgtatccagtaaatagtcaatatttgtacttgctctctgaccacataaaagaatatattcgtgtagtttctattaatagattagagttcaattcagatattaaatgtacatcattattcatgatatttaggtcttctacatcttcacttatcttttttctacttgctttgccattaacagataaagttgaattaaaggcttctactacatacatttctccctgttattccttataggttctgtaatttttgcttcaagaatattgctttttaaatttaatatatagatacttataattacactctagcattataaagagccttttctttttcattgaatgtatttgggcctgcatatgtctaacatgaaaattatagtcctttttttgtttctttgtttgtatttacagttttaagttccattttcaacctttatgcactctttgctttaggtgtgtctcttttagttagcataaagttaggtttgtctttaatttcacctgaagtcttttcctcttaatagatgggttaagccaactgaaaaataaaactgacttatatacttttatttcaagtatgtcctccacaaatattttttgaatagattagcttatatactttggaatttgttaaaaaaagatttttataaaaaataattgtggtgaaatgtacataacataaaatttatcattttgaccatttttaagggcatagctctgtggcataaagtatactcacatagttgtgcaactatcacctccttttgatttttttttactaattttgtaaatttgtttcatctgagctgtcttattatgttttgttttatgtttttctttcctttattatgaagtcactgtattgtctgtaggctatatgtatctgtgagtgtgtgtgtatatgtgtgtattatggtttttaaaaaagtctatatttgttttccagtggctatacttaatactaataactttatgttaaatttttcattctatgtgactctagttcactaatatgagctctgataaaatcagtgctttttcgaggttaggagatcaagaccatcctggctaacacagtgaaactccgtctctactaaaaatacaaaaaattagccagacgtgatggcgggtgcccgtagtcccagctactcgggaggctgaggcaggagaatggcgtgaacccaggaggcagaacttgcagtgagccgagatcgcgccactgcactctagcctgggtgacagagtgagactctgtctctaaataaataaataaataaataaataaataaataaaatcagtgctttttcttcctctgctacctcctttccttctactcagttttagtcagtagtattatcttttttcagatttatctttgtattgttaaatctgcttatgcttctattactttatttattagctttaaatgataccttttgactttcagcttttcttaataaagcaatcagcaaatttcctttacactccacacttataccccatttcctttgtttgtttatttggtttttacttctaacttttcttattgtcaggacatataacatatttaaactttgtttttcaactcgaattctgccattagttttaatttttgttcacagttatataaatctttgttcactgatagtccttttgtactatcatctcttaaatgactttatactccaagaaaggctcatgggaacaatattacctgaatatgtctctattacttaatctgtacctaataatatgaaggtaatctactttgtaggatttctgtgaagattaaataaattaatatagttaaagcacatagaacagcactcgacacagagtgagcacttggcaactgttagctgttactaacctttcccattcttcctccaaacctattccaactatctgaatcatgtgccccttctctgtgaacctctatcataatacttgtcacactgtattgtaattgtctcttttactttcccttgtatcttttgtgcatagcagagtacctgaaacaggaagtattttaaatattttgaatcaaatgagttaatagaatctttacaaataagaatatacacttctgcttaggatgataattggaggcaagtgaatcctgagcgtgatttgataatgacctaataatgatgggttttatttccagacttcacttctaatggtgattatgggagaactggagccttcagagggtaaaattaagcacagtggaagaatttcattctgttctcagttttcctggattatgcctggcaccattaaagaaaatatcatctttggtgtttcctatgatgaatatagatacagaagcgtcatcaaagcatgccaactagaagaggtaagaaactatgtgaaaactttttgattatgcatatgaacccttcacactacccaaattatatatttggctccatattcaatcggttagtctacatatatttatgtttcctctatgggtaagctactgtgaatggatcaattaataaaacacatgacctatgctttaagaagcttgcaaacacatgaaataaatgcaatttattttttaaataatgggttcatttgatcacaataaatgcattttatgaaatggtgagaattttgttcactcattagtgagacaaacgtcctcaatggttatttatatggcatgcatataagtgatatgtggtatctttttaaaagataccacaaaatatgcatctttaaaaatatactccaaaaattattaagattattttaataattttaataatactatagcctaatggaatgagcattgatctgccagcagagaattagaggggtaaaattgtgaagatattgtatccctggctttgaacaaataccatataacttctagtgactgcaattctttgatgcagaggcaaaatgaagatgatgtcattactcatttcacaacaatattggagaatgagctaattatctgaaaattacatgaagtattccaagagaaaccagtatatggatcttgtgctgttcactatgtaaattgtgtgatggtgggttcagtagttattgctgtaaatgttagggcagggaatatgttactatgaagtttattgacagtatactccaaatagtgtttgtgattcaaaagcaatatctttgatagttggcatttgcaattcctttatataatcttttatgaaaaaaattgcagagaaagtaaaatgtagcttaaaatacagtatccaaaaaaatggaaaagggcaaaccgtggattagatagaaatggcaattcttataaaaagggttgcatgcttacatgaatggctttccatgtatatactcagtcattcaacagttttttttttagagccccattcttattttttatacactttgagagcataatgaaaagaaaagctacctgcaaaagttttggacttacctcaaagaggatatacttcattcctcaaaaggccttcttccaggaatagtatttcataacctggaggttggaaaaatctggatttgttacaaaaaaatctgagtgtttctagcggacacagatatttgtctaggaggggactaggttgtagcagtggtagtgccttacaagataaatcatgggctttatttacttacgagtggaaaagttgcggaaggtgccttacagactttttttttgcgttaagtatgtgttttcccataggaattaatttataaatggtggtttgatttcctcaagtcaacctttaaaagtatatttagccaaaatatagcttaaatatattactagtaataaatttagtactgtgggtctctcattctcaaaatgagcatttactaatttctgaacactgtgctaggtcctgggaataccaaattgaataagacatagtctatttttctgaagggtttatagcagagtcccctgtgttaataatgaaggagtgtgtggtatgtgaatcatatatcaatagggttgttaaaaataatgaaaaaaggagaagaggaagaacatcttttttttttctgattgcacgggcagccttaaaattatttttgaagtgtacaattcagtgtttttttagcatattcacagggttgtattatcatcaccatatttttggcctcttgaaaagaaatcctgtgcctattagcatccaattaccgttcctttgtagctaagtctcccccattccagctttaaacaatcacccatctactttctgtctctataaatttgtctcttttggacatttcacataaatgaaataatataatagggttttttgtgcctaaataagcttctaaagaagaataaggtaaggaatcatcattcagcaaatatttattaagacttgctttattttatacagtgtactaggagctggagatgaaaatatgtgtagaacatgaatcatatacttcgggaatttgtggactagtgggaaagattgacatatcaataacaaatcgaattagtgatgtaatagaggcatttttacaggagtaaaatgaggtagcatggactctatctgggtctgaataatgtgaggagtaacctccttacacaaagaggcacaaggctaatgtcctctgatggaatgattcaccatgcaattctaagggtgacaagaatgaaagttagggccttgaagaaatattttgattaagagctgccaataaagtagagtaaagattagattgatgtgaagaagtgggagattaatgagtaaatggtcactggcttgttgagaagattaaatgagatgtacatgtaatgtacctaacacaacgtcttgtacaaagtagccattcagtagagactagcttgtattatctccctttgaggtaaagaaaactgttagaaatagtatttctactactgatagtatttcttctacttatgcctccctttgaggtgaagaatactgttagaaaacatgacataggagaaatacccctgagagacagttcttattagtgactactgtgcagaaaagatggaggttggtgtaattaaggagaaggaaagccatgaagccaaagtattatgaaaaagcatcaatatgaattttcatgttgacaaagtggtataaaagataattataaagatggtcacttataaatacggtagttctgtgtgacacaatttacagaagttggtatatcgtgtggaagaaaacagcataagatcctgaaggtttgaactgtgggcacattggctccatgctcaggaaatggcaatggggttgggaagtgattccactttatgtccctttcagacacataaaaattacttgtgtgagtatcttatgccagacactattcactgtgtagtgagcatggtgggtatgaaatgacaactttattgtctttcctgtcaaagaacttgtaggctggttgggggaaagagaccatttcaatatgaagtgctgagctagaggtacccttagggcactacagaagcctagctgatggcttttagcctggctagacagttcaggatctctaaaagcaggtgccttgaaggctgagtcaaatacaaaaatgtattttggacagaggaaattgtatgaacagaaacacagaacatgaaactacttggttggtgcagggtatcatcagcatagaaccagacagaaccagagtgtaaataagccagaaggccatgtcatggaggccttgtataccagtctcaggaatttggttgtggagagctttcatcaggggaatgatgtaatcagcttggaaatgtagatatatcactgactgtgatagtgaggagcagaattaaggtggacgtgattagaagctttgtgaatagcagaaagaacatagattttgaaagctggcagacgtaggttactgaagaaagttacttaaccttgctatgtctttagttttatcctctgcaatatggggataatactgcctattttgtagagtcttgtggattcttctggcatatataatagaaaataaaacagctattattattattgttgatggtactatttgctatatctgactacaaggagaaagactaataggaaaccatttcaggaatccagatatggtcatgatggacaggaagagacaagagttacatagaggaattctgggaagataagaaatgtcatttttatgtactgtttgcatccatcagacaaggcatcaggaaaaatgatccttcaggaaagagtgattttttttcttcaagaaattagaagaggggagaaattggtttaagattaaggactccatgcataagagaaactgggagggaagacaggtagaaatgctatggggttaggaaggaagaatgcagaggtggattacttagaattgagacatctgatcaagacagagggatcacagcttttgctaacaaagtactagtggaggatgccactaggtgaggtttaataaataattgttgacaataagttccatttaaaaaataaacaatttatgcttcttctttgcctaagtgtcaaataaaacattcagatttttatttcaaagtatccctgagtccctgttcccttttttgtcctgctgacttttggaactgatttaggcttccttagtcatctcataatagaaaaaatcagccaggtatttcctacatttcttgtattttaaaaaaatgtaatggatgtaatgaattttaagcaaatgtaatgaatacaataagtaacttagtatatgctgttttcttctctatgctgaatgtttcatacatgttattttctatacaactacatggtcaattccttgaaaatatcaactccaaaatctttattttggtatactccacgtagcacattgagagagttttaaactcttgttggatgactgtttcaaaagtgttttgaagtaggcatgtcagttgcaaaaagtttgctcagcaaatgttgttctgtctcacagtctcagacattgagcagatgattacatgacagcacgtgattgctgggagtaacagacaaaagtaactgaaagtgctcggttatcttgacagtcaaaatcaaaagtgtcccctattttcagtgacctaagagtttctttttgtgtttttggtattgttgttaaataagtgttctcacctttgaaaaggtcaataagaattcaatacagtataatgtctgtgtgccaaatgaaggtgccccttatttttaagtgtggaggagttttgatcataagaacttgaaatacctacagaatccttgatggttaagcagctggtgccagcacaagaatccctcaatatgttctctatgaagccccgatcaccaaatgcaaacattcatgattcagtatattttcatcttgactgccaaagttgatctgtttcttaatatattacatctagacttggaactggagatgagaacagaatattatcttcctcatttttgtgtttttgttcaactctaatgtctgcaaagcacttgcgtatgtaatgatgctcagtgtcataggagcaggcaggtaagtgtaaatttgtctggataggagaaagcatgcacaacatatttcacatagttttctgatttcagtttgtttttgcaaattattcactcagtgagatagcttaaagacgttatcacagggaaaggcatggagatagttctgtgttgatagaaaacttgtaatgtacagccatgagtgagaagtcaggttcagattcttcaccttcagtcctcctctttcataaacagctccatgtcctattttacatatcctactttaaaacgagattatagaagaatgaatttctaggcaaagtgacacttattttaaaatactattacgtatccctgtgcccattaacttatcctaccatttttcttcccctgtgtccaaaccacctttagaatctcctaaatatttgtagctattgtaaacagcactggagactttgctagtttaaaaggagaaatcaacgcaattaagccctagttaatttacttatcccttatgagattataattgtattttgttattaaaagggggacagagtacactgttctcttgcctttttaatttccagactaccacttctcctgcacttgacaataccgcagtctaccacgtagtcccatggctgacaggaggagaattctaggcaggccagtgtttgagtagtgagtaattggactgtctttacccagcaactcactgttttgtaaatgtacctgagtttggagaagtaattggcttttataaggggtgcggggtggagggttggggtggggagagtgagaaggaggtcagagctttaggatatataattggtctccacaaagttgttgtgatacttttggaaccacgtaatggtcttcattaactaagtgtctgtcatgacagccattacatatgcattataataaaaatttatttacagtgtaagttgaagaaggtaaaatctggatgtagtttctaaactctgcttggcagttttcatatttaagccactagaagaaaaaaattgggagggaagctgagaagaatttactgaaagaaaaaaatacttgggagggaaattggcaagaagtatgaaaaagcttgggagggaagtaagcaaataaatgagttaatgactgttctggaaaataaactctatcatgcagatatcacatgactgattaaatttgaatttgacctcctgctttccaggtctggtaaaaactaacctgtaagaacttgaaacttagcctttgaatggtcaatccaccactgtaggagaatttatgaatgttcagttgagagaactgaaaataaagaagtaccataggaattaacatttgcattcagtagccaagatataatggacatctgaaacaggtatttgaggccaggcgtggtgtctcatgcctgtaataatagcactttgggaggccgaggtgggtggatcacaggaggccaggagttcaagaccagcctactaaaacacacacacacacacacacacacacacacacacacactagccaggcgtggtggtgcacgtttgtagtccaagctacttgggaggctgaggcatgagaatagcttgaacccagaaggcggaggttgctgtgagctgagattgcgccactgcactctagcctgggtgacagagtgagactctgtctcaaaaataaaataaaacatatatttgaaacacattgaattatgtcccttaaacaagaataaacatcactaaatgactgtaccttgaactacctgtaattttctcctgataggtaattaagcttcaaagtactgacacttatttactgtaatatgaagcaataacttaaaaaaaaaaaaaaactattgaaccagaaccaaacaggaatgccatagcattttgtaaactaaactgctatttcatttcatttgagccctggaacttgaaaataaatgctagctaacatctgtgaacagaacatacccatcagtactgtgctaagcacctttcatgaactggtcattaaatcctcactttccatttatttagtgacaacttcacccagagtttgcagtcaaagtgaaaatgtgctgaattccaaaagtgtgagctaggttttagaagttaatcacaattctggaacaaattactagcttaacaaatgagagttcttatgtctctaaaaccaaaatagccctaagtctgtccctcccagtaagatttgggccagtcaatggaacagtaatatacaaatataattacagctgtctaggagcaaactatcctatgaatagataataaaattaagacacttaagccatgttttcatattaaaacacaaagtaaaaaatcattgttttccaaagataaaagccatactgtatcatgacatatatatgcccgatgtttcgaccctcttgaagaattgagattctcgactctacactcttagcgttttctatattgaacagatgtttaatttaaggaggtcaagagaaatcttacacttattttttaatggtaccttagacatagaaggaacctcagaaatctctggctgaatatttccatctgcagatgatcatgtcattaggcttctgactctatagccatagaaaaatattcatgaagacctttcaggaagggaatgttggtatttctaaaaattgagtacaagtattctctagacaaaacagctcttgaaatggcagattgtattcccattattatatttcagaatcaagacattaatacctactttttatttaccaggtttagttatccttgaattagattttataaattaaagaaatagatttcaataaatatttgttgagttcctagtatggaaacatcgtgtttggcaccagggatgttgcctgcaagtataacaggagttcgtatttgtaatgagtttatgatttacagatatttggggggcaaagatatcattcggtaaatacttatgagtgcaaactttgaactagggactgggccaaactctaggaacatatttgatgacagagacacaatccctgtcctcaaggagctttcattctagtagagaagatgaaaaccagtacagtttggtaagttagatgatattggttaatgtagggttcttatgtaagtctagagaagtagcatttaatctgttcttagaaggtcaggaaagatttccctggaggaagtgacatttaagctgagagaggatggataaacaggagtcatctgagtgaacaacagggagaacattccagaaagagaacaaaatgtacgaggcctgatgccaagagagaacattcattgcattggggaactatagtcacttctgtgtggctgggatgtagaatgaaatgagcctggacccaagagagcactttgccctttggggaagctgtaggtattacagtaaggttggagtctggaaagaaaggggtatattgtgagatctgaattgggagaggacagttatatccagacctttatatgctccagtaagaagactgaactttacactgggggccatgggactcactgaatggcattaaatttgagagtggtcatatgaccagatttgcattttacaaagattgtcattgactgcaacatgaagtatggagtattggaggagcggtaaggctggtggcagggagataatttaggaggctttaggtgagggatgataatgacttgccaggtaggaaggagtaaatttcttctcagtggataattagaagattgaatggatggacttggtcactatttggtatagaaggggaaaaaagatgtcaaagatgatgccaatttttaaaaataatttaacatttatttttaaatattttttcagccttattaaggtataatggacaacaattgtaggtatatgtcatttacaacatgatgttttgatttatgtatacattgtgaaatgactgccatagtcaagctcattaacatatccatcactcacataattaacattttgtgtgtatgcagtgagaacatcaggctctactctcttagcaattttcaagtatagattacatttgttaccaactatagtggccacactatacaatagagctccaggacttattcatcctgcctaactaaaactttgtactctttgaccaacatcttcccattcgtctctcctccccatgccaagtttccatcttggtcagttgggtggatagtagtactatctgccgaggcaggttggtagggtgaaaacaatgtgttcccttttggaaatgctgaggtgaccagggaacttccaagggaatctgtctggatctagagcttagaagagatgtttgggctggaaacagacatcaggtattcttcagtatatgggttgtaaatgaagtcacaggagtgggtgatatcaccaatggtgagtgtagtataagaagactggactgaggacagatttccaaggaatttcaatacttaagaggtacgcagagaaaagaggggctgtgaaggacaccaaggaggagactaagagccaggagggaaaactttcaagagagtattgcattatggaagggaagaagagagaacattttaaatgatacgcaatgctcaataatggtatccgctttggagaggccaagtaagattcctaagtacccattggatcaaggtccttaatcttacaaaaacttatgcaaatcaataataaagagatgataacccgataatcaaaaatagacaaggcatataagaagaaaatgaattaaaaatattcaaagcattcaacatatacaaatgcgctcaatctgatatataatgaaagaaaagtaaattaaaacaacaatgggcatgactaaataacagtatgagggagcctgaggagaaggagcatttgaaatttcagtacagaagagaaaaggggtgacttatagaaaaaggagacagaaaccatagaacatgtttggaggataagactcaaacaggtagtggggacccttttctagagtaggatgaaaacaggtaatgtgtgtggatgcaaatatgaggtaggatgtaatgggaagttgagcgaattcatatttagtcattcattcaaaaatacttaattgagttactgctgtgtggcaagcatcattctacaaacagagggcacagtgataagcaagccagtttgtactctcgtgtaacttacattctactttgagaagacagattataaataggttaaaaagtcaataatatgatgtttcagcatcaacaataaaaaattagggtgatatatagagtgccagggaaagtgctttcatggacctcttcattctctcctctcctggtgtcataagctactccttcatccatgctgccatttctcttggtttacggttccagtatagtactcatcacattattactatagagccatccaccttatgaaggtgaaggtgtccatctccttacttaaaaaaaaaaaaaacaaacaaaaaaacaaaaaacccgaaaaacaaaaaaagaggcagaaagacagaaggtcctccactaactttcacgtgccatgtaaccagcgaaatccaattattttacagcattctagctatagaagagtttgggaagcgtagtgcttagtgttctagcctttgtagcacaggaaagggcctggaaggaaaggaattgtgtcttccgcagttgcttttctttatggggaagtgctatagcccaaacaatattttaggaattttcatctattgtcaatatgcaaactggaaggggataatgaaaatgttgtggttagaagtttatgaaatattgttattcacattttaaagtaaaaagagggaatgtttaagagacttgtttaagatcacatgtctcataattggtgggaccagcaatacaatccaaatctaactacttatctttttgctatgccctattagtgttcatattagaaaagaaattctatctcagacactaatgatttgttctttggacaccaatgactttaagttaaaacttcatactagttaatttaattatggtgtagcagtattattaaactatcaagactataaattttctatttgtaaaggagattatgataccaaagattagtgaactaatgatattgagaattctatgacataattttgaaaaatatttgcaggatatttatttttgtgtaaatgatgctttcaagctaccataatcctaagtaagtgtatatttgggaaaaccacctattctaacacacttgaaatttaaataagtcaggaaatttttttccagatcttctcccaaattatcttcatctttttcctctccccttgggaaagaatctcttcatgcctcataatatcaaatttaaactatggaagtccaggtggtggacagtcagcaaaggggaagatgagaagcttgtgttataaagccagctcttgtcagaataaggatctggtaggaacttcagaagtgatgggtaggtaagtatgaaggccaggtcctaagatctaaattacaaagcagaagacttacttaccagggagctggaaaacatgttaggaaatccagagcaggaacagatttcaagatagcacaataatatagcagtgaagtactgagaaaagagtttttttcacgggttggatttattctagcattttaggcagcatttgggcatttctaagtggtcagacttagaggagatagttaaggaattagcagctgctaaatgccaattcttagaccagttgaatcaaaatcatctaaaaagctttcagaaaccagactttttaagggccatttgagagactctcaaatctggaatccagaaatctatagctagatgagtttaaggtagagccagaataagaaaaataaaatagtttgtttgtttcaggtatcttttccaatattatttccgaacctaccccaaacaccttaaatcactgcattctatagccattcttttaaaaatgcttgagttattagttttcaaaaacaaatacaaatctgcacacatacagaaataaacattaaagagacataaagatattaaacagagttacatatacttacaacttcatacatatatattatatataaaactgaatattaagtgtttgatattagtgacaaaatctgtaacatccattatattagtgctttttgtactttttgttgggtgtagtaaaaattgcattcgaatttgagttttctgctatatatttggtcagttcctatcagtgaaggaaaaacctttttttattattttattgtttttttattttttgagacggagtcctgctctgttgtccaggctggagtgcagtggcatgatcttggctcactccaacctctgcctcccgggttcaagcgattctcctgcctcagcctcctgagtagctgggactacaggcacctgccaccaggtccagctaatttttgtatttttagtagaaatggggttttgccatgttggccaagttggtctggaactcctgacctcaggtgatctgcctggcttggcctcccaaagtgctggaattacaggtgtaagtcaccacgcctggcccctttttattttttaagctgattgaagattcttagttctcatgctttctagtggtgattaatctttagccaatatttctatatacagttattagtaatcatgtttgacttaggtcaacaaacaatctttcctaaaaaaacagaaccccaattttaatttctgaattatttagtatctattttctgctgtggaagttgaattatgttgatagatatcatacagggccatgtaacactctcagatacacgttcacatgtatagtagctgtatacaaaaatgttacttcattctctctctctttataatactcttggctctcttacgttctctcacacactctactcttcccttcctctgttctttctacttgttccctctgctcctaccacacttattccccccttgtccattttccttgtgcataaagcacaagtgcttagtaattatcaaatattaataacaatgacactaaccacccaatgatttagtgttaatgacatgctttattgaatggcattacctctaaagttcatgtttcctttacccaaccaagcttcttaccctcctcccttaccacaagcatctatattgtcaaggttgttataaagagtaataagccagccattaaaaaagggtttatggtattttcctatctacaaagtcacaggaagctcaaatgtactcagtaaatattgcaaaattacacaggaccattaaatgtaacactccaccctttctctctctctctctctctcttgctctctctctctctttctgtcaatatagcaacaccctatatcattgccctttgtatgtgcaaatcagagttaataagctttatattagcaattactccttaacaacttctggtttgtttggtccagttgaataatgtaagcacttaaaaaaatgaaattataaacatttatgtgaaaagtgcatatatcacattggatatgttgttatgcactccttaataataaagtaagttaatctttattgcacacttattataatattactttgaccctctctagtactctttatctaagtattctcaagtgctttacaatctcaaacagacccaatgtgttgtatacacagaatcctttgaagctgacatttgcctttctgaccagcttgttgtaaaggaaatcagccaaaaaacaagtatctagatgagtagctcaaacattagtacacatagtaatcacaggtcaaaatgcagatagattaccctgtccaaattctcctgagtaagagtaggtgaaacatttttaaataagctccccaggtgattctgaaattggtccaaggaccacatattaagaactaatgatccaaacaatttgactttttattgtagattaaaccatgctgagaaaattattaaaaattgaaatggcagtggaggatggtttgaaagaaaggtttttcagggccctttcaacaataaaattaattgaacacaatattaaaactctatatttgatttaagactaaggttttcattgtttttaaatctcagtaatttttatgtaacaggtcaattcatacccagcatcttaattccaatgaatgatttcccacaacaatttttgtggataactccaagggaactcgaaggaagttgtagtatgaacaaagagaagtagaatttgtccctgtgtgtaaggcttctctgataagcagcacaggctctcatactgctttttaaaaaaattatgatagcatcaagtggaattaattttttttagattatactttcatggaagggaagatctactgtgaaggctggaaaaccaacacccttaagataaatatattaccagatttgagcgctcttagtaatcagcaaagataaatgtttaacagtgcatacaaaatgaagtgttttatgttaaatcaaatagagaaagccaaacactaataatgtggttacaaatgaacaataaattaggtaatcagaacaggtacagacattaatagcaggatattggtattattaatgtattttgttttaaaataatgaacttaattacaattctcctcatcctaccccactattttattttattccagattcagcagcttcatattatgtctctgaaacacttattattaaagttatccaaatgtacacatttctctttatataaatgtttcagtccagaaaaggaggccaaatacattagctcagaacatcaaatcttctcagatgtgggaatcttttattttcacacttttaaaggtaatctgtatttctagcgtctattatagacagaaaactttcatatgacaacattcctattttcttaactgccttgataggggcgaagacaaattctaagtaggactttttaccccattcttcttaccatcattctttcacaaaacccccagctttagacaatcgctattatgaatttgacatgtactattccaatccattcccataaatttacacccatatatacatatagttatctatgaacaatatttagtagcttttttgtgtgtggctttaaaatttacataaattgtataatttgtgcacattcttctttaatttgccttcttggctacggttatctttttgagatctagctatgctgctggtatgtagaattctatttcattcttttttcattgttgttttgtacccataacgtgtcacattttatttataccttctgttcctgatggacatttagattcttccaggattttactcaatactgcaatgaaaatctttgaatttttctcttttgcacatattcaagagacttttctgacatatatatctataggtgaattgtgtagtcatatgatacatacacacattttaaatttcactagatactgccaatttgccctttgaaatagccatacaatttatagtaccaccagccacttatgaaagttcccatttcctcaaatctttgaaagttcttattataaacagacatattaattcttgccattctgatttgtaaatcagaatctctattgttctacctctagttctaatttggaattccccaattacttgtaagatgctatatattttcatgtttgttagtcattctgatttcatatcctttaccaattatctttttggtaagttattgtggtggccatgagatgtgccttacagaggccttgctagagggaatgtgattgaatgagagccccagatgctgtgtattaaaatcctgcactgagtttgtctcaagatttcttgcacgtgaatgaatgagtacagctgggatactaaagcagatgtgtatttgggagatatgagacttctttagtggctgatttttggctcataaatgactttgccaaaccttccttagactgctcagtgttctaacatcttccatccagccttctacccttctttcctttactaggggattgaatttacattgaggtctcatagccttctctgcctctctccttatttccttttatacaaatatttcccctaataaatccatgcacatttaataccattttgctatttgcaacctgcaggtcctggactaacacagttctatacattgcattaccattctctagagtgggatcttttgttgtagagagttttaaaatttttatgtagtcacttttatccatatttttctttatggtttatatttttgtgtcttctctttaacacatcttttctagcagaattcataaatatattattctatattgccaaaagtttgaaagttgcaatcattagaattaatttttgtatattgtgtaagttaagaatctaattttattgtttttcattggaaagccatttgtcccaagataattttttagtagtccctccttcccctattgtcattctgacatattttttctaggttccgatctatgcatgtgtttctttatggaagagttggccctttgtatctttgagtttcaaatccatggattcaatcaaccacagatagaaaatatttagaaaagcgtcagaattgaacatgtacatacattttgcttgtcattattccctaaacaatatagtataacaactatttatgtaggatttacattgtattaggtattgtaagtaatctagagatgatttaaagtatacaggaagatgtgcatatgttacatgcaaatactaccccatttatataagggtcttgagcattcatggattttggtatccacagagagtcctggaaccaattccccacagatgccaaggcacaactgtatttattctatcatctacttgtttaatctcacatcagtatctacttttgaaataacaataactttattatttaactttttttattacttaggattagagaatttcctctggtgaggcatcatagtgtctcaagctggccataaagacaagtgagggctaggatcggtaagactgggcagaggaagatacaacagatctcctatgcatgaagcaaaagtgcagctcagaagccagctctttcattaagttgtcctctataccctcactagattgtaagctcttgaaatgagaggctataccttaattgtctctgttatctaaaatacttccactcactgcttggaacatattgcctgcaataattaagcttgccctggctcccaaagcatagagcaaatcacactcctccccttgcctttgagaagctcacagtcttcgaaggtagagatatgtgaacagataagaaaatggatgacaggagaacagaaacgcatgactgtcagagaagtcattggagactttacagaggaaattaaatttttattgatcttgaaagagtttgccagatgaagtagaggacaggcattttagacaaagggaacaggaaatgtgaaaacacaaagtgatggaagtcatggtgagtttggagaactataaaacttcaatgtggctgaagggtaaggtggatatagaggagtgctgggaggtgaggctgaagaaataagctaggaaatgtctttttatgccattttttaaagtttggactttattctgaagttcacatggatccaatattttttgttttgtgttgttttaagcagaagcgtgacatgatcagcttgaatgatgaacaacttgaattgtttaaagtggatcacacagtctactgttttacagttattctttgaccaagatattctttattaactgaggaaaaaaagggctttcctgaattttgcagtcatgggatatatgataagcattcttgatttatcatcttcaatcctgttacataacataataaccattgttattacctttagcaatgctttcctcagtattatctaatggcctataaaatgtgactttcatttgcaaatacagtacatctaacaagaacttaccacagctgctatgcaaaataccaatacaattgacccttggacaatgtgggggttaggggtgctgattccccatgcagttgaacatgttacataacataatacataaccattgttattatgtaacaggattgaaaatgataaatctttggaaagtggggcaaatgaattcttatgaattccatatcttccacatgtgttttacttttttgataagaagtagtaacctagttcagaaagaaaataatcatccccttttacttatgcaggataccaagtctatcttagcaccataatagtgaatgataggaatcaagctctatgaatacattcacatgtacatatatatggctatataggacacatgcatgcacatatacatatatacacttgcatatatgtgtatatacatgtacatatatgcatgtatattcaattgtatatgtgtatatagccaagttattgtacagttgacctttgaacaacacgggtttgaactatgcaggtccacttacacgtattttttttttccgtttctgacacccctaaggcaacaaggccaactcctccccttgctcttcctcctcagctgactcaacatgaaaactatgaggacgaagacctttatgaagattcacctccacttaatgaatagtacatacatttctttttccccatggttttcttaataacattttcttttctctagcttgctttattgtaataatatagtatataatacatataacataccaagtatgtgttaattgactgcttatgttatcagtaaggcttctggtcaacagtagactattgctagttaagtttctggtagttacaagttatatgtgggtgttcgactgcatggggagtcagcaccccaaccctcatgttgtccaagggcgttgtccaagggtcagttgtaattggtattttggatagcagctgtggtaaattctggttagatgtactatatttataaatgaaactcacattttataggccattaaatattattgaggagagcatttctaagggtaaaatcttgtctaatgcttgaaacatcttcattttcctgtcagtttagatctttttgaagtaattctgaaaatctctcttttaagctaaatttaacacaaccaaatagccaaatatttaagttccactaatgaagatatctaaatttctgttaaaaatttaagatatatgttaaacccttctaatataactcttctctcagtcaaacttttttttttaacagttgctttgcttcttctttcaaagtcatacttcaacaaagttgctattgaatatgtctgactaaacatgttagctatatgataagatggctggataagagataaatatagaaaatgtagctttttttctacttgcaataaccctttaggaattaaaatggaaaactaataactatttgattcataatagtagcaaaccgtaaaatatttagacataaatctactaagaaatttataagacatatatggagaaaattcaattgaataaaccgttattgaagtatataaaataagatctggatgaatagaaagatcataatttttaataaaattttgcatcttaaaaagtgaaccctctccaaatatatgcacatttaataaaattataaatacatcccaatgaggttggttttgaaattttgttaattggaacttaaatttcacctaagaagaaaaaataaagaatagttaagagtgcatgctttgtagacaaattgccttagttagaatcctggctctatcatctattagctatgttatctttgggataacattcatcttttcttatagatatgcttaaaacagtgcctgacatatagtaagcacaaatatccattagctattcttcttattatttatgttattagtattgttaatatttgttattatatggaagactaaatgaccaaagagagtcaagaaatttatgaataagatttatgcgttgttagatattagagccattaaaaaaaaaaaaaccaaagtgccaaaaaacctagcacagtgttaatacaggaataaaaaaatggatcagaggaaccaaacagaaaagccagaaatggatcttaggaaacatgagaatatgatatatgatagatgctaaatgaattcagtataaaaatattaatgtaataaatcatgcttgctattcaagtaaaagaaaatgaggttagattcatgtctcataccaaatataaccataaattataccttgattaaattttttaattaaaaagcaataatatttgaaaagaaatataggatactcaatgtataacctgaaggttgggtagtacttttcaacaaatataggaatttttcacttgaaatactagaagaaaaaaagatagcaaacaaatacaggaattccaatttcaagcagatataatgatttcatgaaatgttaactgtgcacatgatagatggtctatggatagtgcaaaagaaaaagagaaaagaaaaaatgttttttaacatatgcagcaaaaaaggtttttaacatctattacatacaaataaaaatgaatgtataacacagacttcaataaaaataggcatttcacaggagaacaattcagatggccagtatttacaatttcataggtattaaggaaaatacaaattaaaatggcaaattagcaaaaattgaggtgtgattatattaatatctgttggtggtggtgattatggggaaaagggtactttcaaaacttgctaatataaatataattcttttggttgttttgtaaaggaacctgacaatatcttttaaaaataaagaaaacgcatacttttgacctagccatcccattcatgagggtatgtcttagaaaaataagatcacaaaatcatagagatttatgtgcaatgatattattggtaggtcatttttatgaggaggggtgtggatagtaaatgccagggtaaatcacatagcatctaataaacgtatttatgaactacaaaagcttacactttcagtctagtctagtccagactgcaaataaatgtgagcaagtgaattcaagcacagaagtgcttgaaggcaggtttcataaatctactttcttacagtatcctgatattgacttatcgagacagttactgtggggttgattattaaaatatttatgtatctaggtatttttcattcagtagtatgttattcaattagcaacaagtgtggggatttaaagatattcttgtttgtttttactgctgaaacatattctagtggaaatttcgaataaacgattagtcatcctaaaagcaagatacattttctcagaaaagacaaggtaaagaacttgtatatcctccctcaattcgtttataaggtaataagatgaataaaaatatcatagtacaatttagcattgtaaaataaaattaattggtcatctctagtgtggtcgtgcttggaaggtgaaagaagccaagatcttgtctgggaatatcatgtctaccttgacctcacccttaagaatcctagcctttagtttaaaatcacatggctacatacataccaacttcaacaatagtacatctggcaaggtcatgcaaacctgggacttgagcttctgattctaagtccagtgctttttgtgtacatcatctcttgtacataccttatgatgatatgctaataaaagctacgtgatcaggccttaaaaatctgctttttttttgtaatggtagaatggggcatattatcacatcaggtaaacactctattcaaggataaatggaaatgaatgtcatatatagatcattgataaatatctcattacaaaattatgagagttaccaatgtttgagtgtatattatgggccagccctttatattaaattacttcaaatttttacaactgttaaaggaagatattattatacccattttatagatggacaagttagggccagaaaagacttcctcaaagctgttagtccagtaatggagacagggctagaaaacaggtcattttgctctttgactaatgttactactcatgttttgtattttgtttaaagttttattttattttgctttatttattttttgagacaagatcttactctgtcacccaggctggagtgcaatggagtgatcacggttcattgcagccttgacctcctgggctcaagcgatcctcccacctctcaatctccagagtagctaggactactacaggtgtgtgccaccatacctggctaaattttgcattttttgtggggacagggtttcactatgttgcccaggctggtcttgaactcctgggctccagcgattcacctgccttgacctcccaaagtgccagtatcacaggcttgagccaccatgtccagccaagttttattttagaattaaaaaaaattccacttggattgttacattttatctcattgctttatatttatagaattactttataaatgccactttcttaattttcatagttagcactctttatgaaacataaactattatttgacccaggtttttgttagaggaattgagtcagagagctgttaagtaactgagatttcacaataagccagacagaccagggttcaaattctgggtctcacattatccaattcaatattccagctttgttacttattgagcaaccactacaagcacagtttacatgacatctgatagctctcaaaatgaattttacaaacataattcagatttcaactcagcagtgactcaggagaaaggacacttggatgcatttctttatggcatttttcccagggtacacgcaacctggaagatctcccaagtatgggggaaggtttcaccctgaggaatcccattccctctaatctgggacaagggggaggagagtactgtctcttatcagccatctccccagggaggcctgggccctcctggaatgcataccatggcttactgactcaaagtgttgaaaagaccaggcattgggacacacaacactactcttaaaataaaaaaagaatcagagtagcttgtggttataattgaaatggacagagtaacatggtaccaagaaactattagcaattccttccctaaatccctcattttcttaaagcattttctccttttcctcaacaagctttaagttggatttgaagaatgataagactaaaaggagggctgtttctggtctttggaggaatttgatattccattcgatctgagtgtgcaaagcctgagttcacatgaactcttctgatctctttctctaatattttttcaccttattcatatgggaaagaaggaggggaatactttagttccattctccctcctcctatttccttgacttgtttaaaatataaatgttatagacacctaagatagaaatttgactgaaacagcctcttaattattgtcttaaaaaattggtataatgaaattgcatttgtagtctttggacatttaaatccagaagggatattttctttttcttttttaaaaatttaattcaatagtttttgggctacaggtggtttttggttacatggataagtgctttagtggtgatttctgagattttgatatacccatcacctgagcagtgtgcactgtacccaatatgtagtcttttatcccccccccgctccacccttcctttatcgtccccaaagcacattatataattattatgcctttgcagcctcattggttagctcccacttgtaagtgagaacatgcgatatttggttttccattcctgagttacttcatttagaataaattgtctctagctccattcaagttgctgcaaaggccattatttcattccgttttttggctgaatagtattccatagtgtatatatgccacattttctttatccacttgttgattgataggcatttaggttggacccatattttcgcaattatgaattgtactgctgtaaacatgagtgtgctttttttttttccatataatgacttcttttcctttgggtagatacccagcagtgggactgctggatcgaatggtagttctccttttagttctttaaggaatctccatactgttttccacagtggttgtactagtttacaaccccaccagcagtgtaaaactgttccattttcagcacatccatgccaacatctattattttttgactttttaattgtggctattcttgcaggagtaagatggtatctcattgtggttttaatttgcatttccctgataatcagtgatgttgagcattttttcctgtgtttgttatttgtttgtatatcttgagaattatctattctgtcctttgcccactttttgatggaattatttgtttttttttcttgctgatttgtttgagttccttgtagatcctggatactagtcctttatcggatgcatagtttatgaatattctttcccactctgtaggttgtctgtttaccatgctaattatttattttgctgtgcaaaagcttttcagtttaattatttcccatctatttatttttgtttctgttttatttgcttttgggatcttagtcatgaactttttacctaaaccaatgactataagagtttttccaatgttatcttctagaatgcttatgttttctggtcttagatttaagtctttgattcatcttgagttaatttttgtataaggtgagcattgaggatccagtttcattcttctacgtgtggcttgccagttttcccagcaccatttattagatagggtatcctgtccccactttatgtttttgtatgctttgtcaaagatcagttgactttaagtatttggctttatttctgggttctctattctgttccattgtctacttgcctatttgtgtaccagtaccaggctgttttagtaactatagccttgtagtataatttgaagtcgggtaatatgatgcctccagatttgttctttttgcttagtattcctttagctatgtgggctcttttttagttccctatgaattttaggatttttttctagttctgtgaagaattatgatgatattttgatgggaattgtattgaatttgtagattgcttttggcagtatggtcattttcatagtattgattctacccatccatgagcatgggatgtgtttccatttgtttgtgtcacctgtgatttctttgagcagcattttgtagttttccttgtagagatctttaacctccttggttaagtatattttcatgtattttagttttttttttttgtttgttttgttttgttttgttttgtttttgcagctgttgtaaaagggattgagttcttgatttgattctcagcttggttgttgtcagcagggacattttctaaagtatagactgtagttccttatcttctatctgtttcttactgtccccttcagtattcttgtccttttttcccgctattatctttttgaccttttaatatatagatatctacttctacttctgacaatttttgcttctccaattttctttctttttctcctctgcacacatttatttattttcttctatgtacttctttatttttaacttaatatttgattaacttcccttccctgtctcttttccttctttccataaatcttcattaattgcctgcactgagctaggattctatactctctaaatcaataatctattttctatagtcaactgtgttataatcgtactgtcaagataactacttatttttaatacttaaaaatattttgaaattttaaccaatttaattaatacaatgttgagttcaaatttgaaaaaaacaatggaaaactgtaataattctagcaacctcctgctttttaataatgtattagaaaatttgcctctttttcaaaagcctacagtgaatctattcatacaaggcaaaagcaaaccattctcttcattctctttttttctccaaaagatttaagtgttttttgtttgtttgttttgttttgttttttagatattgagtcttgctctgtcatccaggctgcagtgcagtggtgtgatcatagctcgctatagcctcgaattcctgggttcaagcaatcctcctccctcaccctcctgagtagctggggctacaggtgcatgctaccatgcccagctaatttaaaaggaaaaaaattgtgtagagatgggtcttgctatgttgcccaggctggtctcaaacttccaatctcaagcatttctcccacccagcatcctgaagtgctgagattataagtgagccactatgcccaaccagatttagtttttaaaaagagaatacgatttgaaaaaggaaaaatgtgaggcaggagagaagaaatacacacacgagctgttttgtaattgctgtaaaactgaaatcttcagcctcactaaaggagcacttgcatgaacacctctaaattaccttattaccttctaaattaggtgtgaagtctaacttctaaattatgagtgaaatccactgcaattcttgttatttggatggaatcctaggtatgtggtccagttcatgagttgaacaaaagcatgctcatttaggccaggtagaaagaaataaagacctatgttttacatgtctcataaccactgaaggtccttctcataagcagtgcttatgggtattaacgacctctctatattttacttctccagtgcctaagtagccgagtccactgagtcctgctacatctcctccaacatgtcagcatttttttcacaggccttttgttactctagatcagaaatgttgatagcaacagttccttgagggcagcagctagcatgatgccagccaacaggaaccaccaaatggttcttaatataaattactacttattaatctatttactttgtgcatttggagttttgcatgtaaagtcctatttatgtccatatggtagataaatggaacaaatgaataacagaagtaaccattttgatactttagatatagataatattggattatttctggattgtgaaagaagaaggaagaagcatatggaagagaagttttagtagaggggaggaaggaggaggtggaaacgaatgtacaaggatgggaggagaaaagggagagagacttttttttttttaaggcgagagtttactacctatctaactcttcgcattcttgaagtctcagaccaaatcccatcggtttgaaagcctctagggtattctatctattgtatacttctgttatgtacaaaattaatttgccaattaattgtgaactgttttataaactatcttaaaatggttagttaaatctttgggatagtatttagctttctccaggattatgacttaccttctaaattagacatacaatgcctaggagtcaaggactattttgcataaattccagtcttcttttacaatgcctagaatgattgttaccacagaaatattcattacctgggagaaaggatgacaggaggggcagaatgaatggagagaggtcgtgagaatgaggtgctgaggatggacgaggaagaaagctgttttagttgggaggataggtgacagaagcatggaaaggaattgccttggacccatggaagcccagtgaagatacttagatcctgcaggggtgtgaataatgttcttttagtttctcttcttaggaggtttgttcattttgggagatttcttttgaaaagagtgaacttaaattggagaaaagtacattttagtatgttgataacatttgaatttgtaaaatggacctatggatgatctacacatatttatatacccataaatatacacatattttaatttttggtattttataattattatttaatgatcattcatgacattttaaaaattacagaaaaatttacatctaaaatttcagcaatgttgtttttgaccaactaaataaattgcatttgaaataatggagatgcaatgttcaaaatttcaactgtggttaaagcaatagtgtgatatatgattacattagaaggaagatgtgcctttcaaattcagattgagcatactaaaagtgactctctaattttctatttttggtaataggacatctccaagtttgcagagaaagacaatatagttcttggagaaggtggaatcacactgagtggaggtcaacgagcaagaatttctttagcaaggtgaataactaattattggtctagcaagcatttgctgtaaatgtcattcatgtaaaaaaattacagacatttctctattgctttatattctgtttctggaattgaaaaaatcctggggttttatggctagtgggttaagaatcacatttaagaactataaataatggtatagtatccagatttggtagagattatggttactcagaatctgtgcccgtatcttggtgtcagtgtatttgtttgcctcatagtatagtttactacaaatggaaaactctaggattctgcataatactggacagagaagatgtaaatatctgttagttccatcatagaccctgccactccaatgtacacaccagctttaggcttcttggtatagataaacatacattttcaaaatttttcatcataattttcataacaaaataggaaggcaaatgatgtcacttggcttaaaatctataatatttaaaataaacaggacaaatgcattaacattgttgggggaggaggtcccttagtagaaacactcttggtccaagcattttaaagctgtcaaagagatgtaaatatagataatgtatgtcaaggagagagctttgtggttaaactgtaactttcagtttaaacaattattggtgactctgatgtcaaatgtttctcaagctttatctgaacaaaattcttctcactttgttgccaaagtcgttaacaagaaatcacattgactcattgatgttttggctcctttcccttactttctgttgctttccaaaagctgagacaggaaactaaccctaactgagcacctgcaattgcctggtagtattctagtcatgtgtgtacttttgtgtgtatgtaatccccttacagctctgcaaagtaagaattgttctccctgctttacagaagagatcataagataattgaggctgttagatgttaacttgccaaaagccatacaggaaaatggtagagtcacagtttgaaccaggtccttttgattctttacattaaaccatgctttgatcttggaaatacactgtaaggcaataaatcaatagatacggataattcacaggcttctaaataaatggaagttgattgtttttatctgtgagccaaagtaagacttattctaagaattccacaaatttagataagatagagtatatggcttctagacatccaacatagaactgagtttgtgttatcagtttaagatttggttttgctgtaaggtgcacacactttgaggaactaaaaataattgtctgttcttattctgatcagaatgtgtaatgtgttgtccagttttggatgatgaatttcttatttctaatctcataagaaacttgtcatagatgtgagggagagaattaagaacagagtgtggggaagaaactgtgtacattttgatgggatccattatgtagctcttgcatactgtcttcaaaaataagttacactataaaggttgttttagacttttaaagttttgccattggtttttaaaaaaatttttaaattggctttaaaaatttcttaattgtgtgctgaatacaattttctttattacagaagtaccaacaattacatgtataaacagagaatcctatgtacttgagatataagtaaggttactatcaatcacacctgaaaaatttaaatgttatgaagaaattatctcatttctattaatatgggaactgtgtcttcatctttattactgttctaaggtcaactcaatgtagattttacttgcttatggtttcatattttagctaaatagtaaaataatatggatatacattttgttgtgacttactcatactttccttatttggaacttttatgaatatgatatagagactgaaactacaaggaacaaaatgcaatatcaattatacagttgtggcagcactgctatcaatttgttgatagtggttaacacttagaaaaacattttaaaaataatttcacataagtaatgtaatttattagctgtctctgacattttacagtttggaatagtttattttctttttggtgtcctcaccaaaacccaacatcttcaagggcaggaactgtataatttttgccattgtattttgagcacatagcatggtacttgcctctaaatagatactattgttaaaatattttttaaggtaatattttaaagtgtatgctatggtacagttcagtttgtgacttttgctagtttatgccacttacagttagcaaaatcacttcagcagttcttggaatgttgtgaaaagtgataaaaatcttctgcaacttattcctttattcctcatttaaaataatctaccatagtaaaaacatgtataaaagtgctacttctgcaccacttttgagaatagtgttatttcagtgaatcgatgtggtgaccatattgtaatgcatgtagtgaactgtttaaggcaaatcatctacactagatgaccaggaaatagagaggaaatgtaatttaatttccattttctttttagagcagtatacaaagatgctgatttgtatttattagactctccttttggatacctagatgttttaacagaaaaagaaatatttgaaaggtatgttctttgaataccttacttataatgctcatgctaaaataaaagaaagacagactgtcccatcatagattgcattttacctcttgagaaatatgttcaccattgttggtatggcagaatgtagcatggtattaactcaaatctgatctgccctactgggccaggattcaagattacttccattaaaaccttttctcaccgcctcatgctaaaccagtttctctcattgctatactgttatagcaattgctatctatgtagtttttgcagtatcattgccttgtgatatatattactttaattattattatacttaacatttttatttactttttgtgttagtattttattctgtcttctccttagatagtaaccttcttaagaaaatatatatgctaagtgttttactggtttaatatgcttagactactcatctacctcaatacttccttggagatctcctcctcagtcacacagagctcaggacttatatttccttggaactcctgttagggtccaatgtacatgaaattccctagacagacagacagtcagttatatggcttgatttcaaagtttcaaaatgatttaatggactatcaagtagtttattaggagaacagttattatactcttctaaaaataaagactttaagcaataaagatgtatatgtatataaaatggctgggttattcctagaagtacctttcttagaatttagttaaatttaatatccaagatactatcttttcaaccctgagattgtgaaaagtaacttctatcaatataaactttactacatttgtattgtgttagtgtgttacagtataatctagaacaatgtgtctttctatatgatatatgacattttaatgcctaaaaaaactgatatgtcttagatgattctagtcaggatttacttctagaatagattaaaattctatttgaggagagtcaaattaattatcgaattctcagttgttattattgctgttttatttttagtgaaacagattagtcttaatgtaaacacttgagaaataaattgatggtcaacctaaaatgtaaaaaagaaattaatagaaaatttaaagagcaacaaagctctgacatttaaaagaaatgaagtacaaatctctagggaccttaaagatcatctaataatttcctcattttctagataaataaactgagagaccccgaggataaatgatttgctcaaagtcaaatatctacttaatataggaaatttaatttcattctcagtctgttaacatgcaacttttcaatatagcatgttatttcatgctatcagaattcacaaggtaccaatttaattactacagagtacttatagaatcatttaaaatataataaaattgtatgatagagattatatgcaataaaacattaacaaaatgctaaaatacgagacatattgcaataaagtatttataaaattgatatttatatgtttttatatcttaaagctgtgtctgtaaactgatggctaacaaaactaggattttggtcacttctaaaatggaacatttaaagaaagctgacaaaatattaattttgcatgaaggtagcagctatttttatgggacattttcagaactccaaaatctacagccagactttagctcaaaactcatgggatgtgattctttcgaccaatttagtgcagaaagaagaaattcaatcctaactgagaccttacaccgtttctcattagaaggagatgctcctgtctcctggacagaaacaaaaaaacaatcttttaaacagactggagagtttggggaaaaaaggaagaattctattctcaatccaatcaactctatacgaaaattttccattgtgcaaaagactcccttacaaatgaatggcatcgaagaggattctgatgagcctttagagagaaggctgtccttagtaccagattctgagcagggagaggcgatactgcctcgcatcagcgtgatcagcactggccccacgcttcaggcacgaaggaggcagtctgtcctgaacctgatgacacactcagttaaccaaggtcagaacattcaccgaaagacaacagcatccacacgaaaagtgtcactggcccctcaggcaaacttgactgaactggatatatattcaagaaggttatctcaagaaactggcttggaaataagtgaagaaattaacgaagaagacttaaaggtaggtatacatcgcttgggggtatttcaccccacagaatgcaattgagtagaatgcaatatgtagcatgtaacaaaatttactaaaatcataggattaggataaggtgtatcttaaaactcagaaagtatgaagttcattaattatacaagcaacgttaaaatgtaaaataacaaatgatttctttttgcaatggacatatctcttcccataaaatgggaaaggatttagtttttggtcctctactaagccagtgataactgtgactataagttagaaagcatttgctttattaccatcttgaaccctctgtgggaagaggtgcagtataaataactgtataaataaatagtagctttcattatttatagctcgcaaaataatctgtatggaagtagcatatataaggtatataaacatttagcctcttgataggactaactcacattctggtttgtatatcagtcttgcctgaatttagctagtgtgggcttttttttatcttgtgagtttgctttatacattgggtttctgaaaagatttcttttagagaatgtatataagcttaacatgtactagtgccaatcttcagacagaaattttgttctattaggttttaagaataaaagcattttatttttaaaacaggaaataatataaaaaggagagtttttgttgttttagtagaaaacttaatgccttggatgaaatgagccatgggcagggttgtaatgaattgatatgtttaatagtatagatcatttgtgaataatatgacctttgacaagacacaagccattaacatctgtaggcagaagtttccttctttgtaaaatgagggaataaaatagatccctaaagtgtgtaattttagtatttctaaactttatgaaggtttcctaaatgataattcatctatatagtgtttttttgtgtgtttgtttgtttgtttgtttgagatggagtctcgctctgtcacctaggctggagtgcaatggtgcaacctcggctcactgcaacctctgcctcctgggttcaagctaatctcctgcctcagcctcctgagtagctgagattacaggcatgcaccaccatgccgagctaatttttgtatttttagtagagaaggggtttcatcatgttgaccaggctggtcttgaactcctgaccttgtgatccacccacctcagcctcccaaagtgctggtattacaggcgtgtgccaccacgtccagcctgagccactgcgcccagcccatctatatagtttaatatcaatctaaatgaatttctcagtcctgagcctaaaaatttagttgtaaagaatgatatccttgactaataatagtttctattaatggattgcatctagtgctaggtggcatatatttagtccccacaactaccctggaaggtatttaaaatttttcacatttgcagataaggaaactaaagttcagagttcggcaacatgcttgaattcaagcagctcctaggatgttaatggtggaggttgggttcaaatccagatctgtctgactcaaaaaatgcatactcctaaccagtgcactatatcccaattccataggagcccttctttgtgattcatagcactttcccatgagttttgttgattttgtgagaaacaaaactctttttcctttggactgtctggaatctctctttttcaaatttttgaaatgtatttctatgccaaaagacaaagatttctagaggaatatgcctaggatgagaattatgtaatttaaatcacagctggaaagagagaaagtcctaagttactaagaaatgttcaaacacaaatgagctttcagtctattggaagacctttatagctagaagtatactgaactgtacttgtccatggacccctgaagaaacaggttaaatcaaagagagttctgggaaacttcatttagatggtatcattcatttgataaaaggtatgccactgttaagcctttaatggtaaaattgtccaataataatacagttatataatcagtgatacatttttagaattttgaaaaattacgatgtttctcatttttaataaagctgtgttgctccagtagacattattctggctatagaatgacatcatacatggcatttataatgatttatatttgttaaaatacacttagattcaagtaatactattcttttattttcatatattaaaaataaaaccacaatggtggcatgaaactgtactgtcttattgtaatagccataattcttttattcaggagtgcttttttgatgatatggagagcataccagcagtgactacatggaacacataccttcgatatattactgtccacaagagcttaatttttgtgctaatttggtgcttagtaatttttctggcagaggtaagaatgttctattgtaaagtattactggatttaaagttaaattaagatagtttggggatgtatacatatatatgcacacacataaatatgtatatatacacatgtatacatgtataagtatgcatatatacacacatatatcactatatgtatatatgtatatattacatatatttgtgattttacagtatataatggtatagattcatatagttcttagcttctgaaaaatcaacaagtagaaccactactgatattttattatttcatattacatataaaatatatttaaatacaaatataagaagagtttttaatagatttttaataataaaggttaagagattcgaaagctcaaagtagaaggcttttatttggattgaaattaaacaattagaatcactgttgatattttattatttcatattacatataaaatatatttaaatataaagataagagtttttaatagattttataataaatgttaagagattaaaaaactgaaaatagaaggcttttatttggattgaaattaaaggccaggcatggtggttcatgcctgtaatcccagaattttaggagactgagtggggaggattgcttgagcccaggggtcaagaccagcctgggcaacacagtgagacaccgtatctacaaaataattaaaaaattagctgggcatggtggtgtgtgcctgtatgctaccattaactaaggaggctgaggtgggagaatcgcttgagcctgggaggtcaaggctgccctgaactgtgattgtgccattgcattccagcctgggtgccagagagagaccctatctctaaataaataaataagtaaataaataaacagcaacaacaaaaacactcaaagcaaatctgtactaaattttgaattcattctgagaggtgacagcatgctggcagtcctggcagccctcgctcactctcagggcctccttgaccttgacgcccactctggctgtgcgtgaggagcccttcagccctcccctgcactgtgggagcccctttctgggctggccaaggccagagccggctccctcagcttgcggggaggtgtggagggagaggcgctgggggaactggggctgcgggtgccttgtgggccagcgcgagttctgggtgggtgtgggctgggcaggccccgcactcggagcagccggccggccccgcgagccccaggcagtgaggggcttagcacctgggccagcagctgctgtactcgatttctcactgggccttagctgcctccctgcggggcagggctcgggacctgcagcctgccatgcctgagcctccccccaacctgccgctgcagtgggctcctgcgtggcccaagcctcctgacgagcaccgccccctgctccacggcacccagtcccatagaccgcccaagggctgaggagtgtgggtgcagggcgcagggctggcaggcagctccacctgcagccccagtgcgggatccactgggtgaagccagctgggcttctgagtctggtggggacttggaggatctttatgtctagctaagggattgtaaatacaccaatcagcactctgtatctagctcaaggtttgtaaacacaccaatcagcaccctgtgtctagctcagggtttgtgaatgcaccaatcagcactctgtatctagttaatctggtggagacttggagaacctttatgtctagctaagggattgtaaatataccaatgtgcactctgtatctagctcaaggtttgtaaatacaccaatcagcactctctgtctagctcagggtttgtaaatacaccaatggacactttgtatctagctaatctagtgaggaggtggagaacttttgtgtctagctcagggattgtaaacgcaccaatcagcaccctgtcaaaacggaccaatcagctctctgtaaaaccaatctgctgtctgtaaaatggaccaatcagcaggatgtgggtggggccagataagagaataaaagcaggctgcctgagccagaagtggcaacctgctggggtctgtagaagctttgttcttttgttctttgcaataaattttgctactgctcactttttgggtccgcattgcgtttatgagctgtgacactcactgggaaggtctgcagcttcactcctgaagccagcgagatcacgaacccaccagaagaaagaaactcctaacacatccgaacatcagaaggaacaaactcaggacacgcggcctttaagaactataacactcactgcaagggtccttggcttcattctcgaagtcagtgagaccaagaacccaccaattccggacacaatttgactgcagaaaatggatgtccaaccctgtggtttccctgggccacattggaagaagaaaggagttgtcttgggccacacataaaatacacttactatagcagatgagctaaagaaaagaaaaaagtccatgcgtaatctttgtgatatgtgccaccaccaataagcaaaattgttctcttattcaaaaggttggacacagctgctctagatattttattattaaatatgcaggcaattactgtttaaatgaagatttcctcacagaatgagattaaaagtatatattagtggcttagcattcattttagacaaccattttagagattcaaatcacacacttgcttacagaaattttgttgtcttcaatgtccccattgtggtttctttaccaagcctctactgttcttcacatcaccaagttaaaaaaaaaaaaggggcgggggggcagaatgaaaattgcatggtaggccacaagttcagatcctcatcgacacaagaggtgcctgaagcagtggatgaggcttttctatggatcatgagcagccacataaatgcttaaaagggcctggcagggagcatcagtgggtgatgtggctgggaggctgaatggagagcatttgttcttcagttatctatagaaggcagctgtcactcagcaccagctaagggcttcccatgagggaactggggatcaggtttcccagatctttttatgtaacaggataagacagagatccagctttttttgggtaattatttcctattttaaaatacgggtagttgattaaataaaaacaaacgaatgaacaccatatgggcacaacaaaacacatctgtggcttggattcagcttgtgaatgattactgcagatatttattctagaggacacccctgggtatgtcctaatataaaacctaaatctaaactcaagtcccatgctaccttcagagaataaatgacccagaaaaagaaccacctctcctaaggaagtataaatttgtaaataactgagacccaaacttacaactgtacatttttcttattgttgggctgttgctaacctcaattaagaaggcttgatgatatttgtaaagtgtcatcactccaccatggtccagtaacatctgatcactccaccatggtccagtaacatctgaatggtcaagaaatatctaaacgtatgtaccaaaaatttgtgtatactactgtaccaataaaccatttgtttccatttgatctctgagtgtggtaatacatgttatttgccctgctgttgtaaataaacaaaccaaatggaggcttgatgcaagatgcagtgtagcatagtgccaactctggactccgactactcagggtgtaaattctaactctgttctattaacaccatgaaactgagcaagttagttaaaactcgctgggcccattttctcatttatacaatggagattttaatagtacagctacataggccattttgtggtttaaaatacatcatgattatgaaacacttaatgtagggcttgctacataatgagcaaggtttgttgctgttatcattaatatccttaattctcattattataaaacttgagatagtatgaggtgaacaagttcataacagcaatataatgaaaattttaataattccttttatactttaacaaaaatacgagattgggtaatttattatttttacatgagtaataaatattgcattaaaatatatttaaaatttaccacattaatgtctgccagtcatgccaaatgaccaacatgaatgtgaataaaactcagtctgtgcccatttaatcttaaccaaccctttataattgttaatgatttgaacctctgccttgaaagatcacattacttgattgtcttcaacttatctgaatgtggtagtgatttctgtaaatttataggacctttgtctcatgcagctccatggagttgaacttatgcacctttaaaatggtatatacttaattaattaagtgttgatctgcttcacatgtgtataatattattagctcactaaaccaagaaaacagtggtcctttagggaaagaaactaaattacaacagagaatataaataccatataaatatctattatttattgaactgtcacaattattgcaaaaaattaccttttagtggacaaaacaattgatattgcccttttctggaaaagaaataatgtaatatatgatgaatagttttggccagtatcctctagaccttgccagttaactggctctcaaaattttgaataataaaaacttggtgatagtagaaaaatagtaattttttaaaagtatgtgcacaattatacaactaaacaattcattcaccagtgttcacaattctattgccttctttgaatcaaaatttacatagtttttcttttagactaagctcctttatgataccagtgtgcccatttctcattaccattgaaatgtctcatgagcatgtcacattctggtacaactgctaatccaggatgacagtttagttcttttaaatccaattgagagccttctactcatgaccagagaacctaaagaaaggttaagatacatttattccttggtgtaagtgatttgtctatttttagttttcctaagggtcatatttcaatttagatttttttttataggttaggtaaaataggcttcccttttgcaatatgaaatatgtagtcttttaaaaaatttcttcaaagctattaaactgaaaaaaaattaatttggtctattcagtttgttagcacttaccattttggaaagagagtgactctacttttgtatttggtaacattttccctactacagggcagtatcttttgtaagttcttagatattagcaccaaataaataggcaaaaaaaatctattatgttaattcttagaacccctgcttggcagtgcatcattgactagatggagaagaaatgaaaataatacattaggaagcagtttcctggttcttttgaaaacaactagagagtcttgttgttgactggaatatctgaagatcctgtttaatgctttcattctatgattgttaagaatatgtcatagaactgctgtatcctgtttctttatgtcttcccttctgtttgttgattagaaatccctgagtggctttacattattagtacagtagatatgtagtatattcccataataccactgctgctattgactaatagtaataattttagggcagctttatgacagttggtttatgttttagggtgtcatttgacttgtgaagcattgaaatctgggtattaagcacactgttttctatgtggtatggaatgattcttaaagccctgagaaaatggaaaataaaaatatttttcctttttaccataatcacctatgactgtcactctatcataaactgcataaactttataacctcaaaacattttggaaatgaaatgacagaacttgcttactcaattgcttctatatacaccaaatatttttttaaagtattatgttaagtccttgaaaatattttgttctactcaatagaagcagtttaggttggtagttctatgtggaaaccgtgaggaaataattttatattatgatgactagaccagtctttgaacatcactttggttattgttccattagtaaatattataattatttctgagatttactcaccttcaaagaatgttggcaatgccagcattattaacactcctctagttagaacaaagaggaaatgtaataacaaaacataataatagccaaataaagagtgacttagaatgtacacccttatctaggatcctgagtaattcgattattcttaggaaatacacttttgtgctagaacaaagacttttgaaatagctaatttctgggtttcttttcattttgaattaacttgaatttcaaggaaacaagggtagtttttacagatacagtgcatagaagctctgtgtacaatgaagaaaagtaggaaagtgagaaaaatgccattagatttttcatcgttatactatctgatatgtgaatttaactaaaacttatatacctcattatagtacttcctaatgtaatttcttaatttaagtgttccccataaggtttttttttatataaacttaagtactgttaaatatttaaggcaaattcaggtataaaataagacttgttgatatcttattccaagcatatttgtttctctcctatttatttttattctgtgttcatttccaaaattgttttactcacaactgtttgttttttctgtttcattctgtggtaaaggtatcatttggctaattgtataatttcagtgtcatttctaatattccaattgtgatagtatcaacacaagattaaatttctctacatggtttatgagaatggaatgccaaattgaaatagaacagagcacagatgatctaaatataaaaagaactacaaaaatcacagttgtttaaaaaggttttttgtttgtttatatatggtgcagaacatttgttccttagccaaatgtttccaccttgagaaagctatagagattctatgtagtcctagtaccaataatatgttttaacctgaatgtaccttatctttattcataaactgtgactttttacactgctgaaacttttttttttaagacaatctcactctgtcgtccagtctggagtgcagcagtggtgtgatcttggctcactgcaacctctaccttctgtgttcaagcaattctggtgcctcggccacctgagtagttgggatcacaggtgtacaccaccaggcctggctaatagtttttgatatttctagtagagatgagttttgccacattggccaggctggcctgaaactcctggcctcaagtgatctgcctgccttggcctcccaaagtgttggtattacaagtgtgagccactgtgcctggcctgaaactcataattcatttccattaatattaatctcaccttttccaataattaattgatttcacaagtattagtcccctataatcattgaatggctaataaaattatttatagcaaacagattaattatctgccagcagtctgagattagtttctttaaaaaatgtttattatttaaaacattcagctgtgatcttggctttcttgtgaggttcaatagtttctattgagtaaaggagagaaatggcagagaatttacttcagtgaaatttgaattccattaacttaatgtggtctcatcacaaataatagtacttagaacacctagtacagctgctggacccaggaacacaaagcaaaggaagatgaaattgtgtgtaccttgatattggtacacacatcaaatggtgtgatgtgaatttagatgtgggcatgggaggaataggtgaagatgttagaaaaaaaatcaactgtgtcttgttccattccaggtggctgcttctttggttgtgctgtggctccttggaaagtgagtattccatgtcctattgtgtagattgtgttttatttctgttgattaaatattgtaatccactatgtttgtatgtattgtaatccactttgtttcatttctcccaagcattatggtagtggaaagataaggttttttgtttaaatgatgaccattagttgggtgaggtgacacattcctgtagtcctagctcctccacaggctgacgcaggaggatcacttgagcccaggagttcagggctgtagtgttgtatcattgtgagtagccaccgcactccagcctggacaatatagtgagatcctatatctaaaataaaataaaataaaatgaataaattgtgagcatgtgcagctcctgcagtttctaaagaatatagttctgttcagtttctgtgaaacacaataaaaatatttgaaataacattacatatttagggttttcttcaaattttttaatttaataaagaacaactcaatctctatcaatagtgagaaaacatatctattttcttgcaataatagtatgattttgaggttaagggtgcatgctcttctaatgcaaaatattgtatttatttagactcaagtttagttccatttacatgtattggaaattcagtaagtaactttggctgccaaataacgatttcctatttgctttacagcactcctcttcaagacaaagggaatagtactcatagtagaaataacagctatgcagtgattatcaccagcaccagttcgtattatgtgttttacatttacgtgggagtagccgacactttgcttgctatgggattcttcagaggtctaccactggtgcatactctaatcacagtgtcgaaaattttacaccacaaaatgttacattctgttcttcaagcacctatgtcaaccctcaacacgttgaaagcaggtactttactaggtctaagaaatgaaactgctgatccaccatcaatagggcctgtggttttgttggttttctaatggcagtgctggcttttgcacagaggcatgtgccctttgttgaacctccatttgactggcatgcacatgtctcagatattataggttatcatatattgttgctcctaatatttctgtgttagataattagagtagcttggtttgtaagaatgtgatgttggtgggactgtagcagaacaagaaggcccttatgggtcagtcatacctctcttttcaaatatttggtctagctctcttctgggcatcttgttgccaatatatagtattgctcaaaagggcaggagatttgaagtgatcaaggaaaatatattttttctattgattaagtcttttgatggggtagaataatctaatttcatgtaactgctcaaagttatatggtagggggatcccaaatgtattttaaaactatttttatatcatcatatttgaagtaatagaaagtcagagtagcagaataaaggtactaaaaattttaaaaactaataaggtactttgaaagaaatcaattatgttgattcctcattaaacaaatttgcacttaaagactgaggttaataaggatttccccaagttttttcatagcaacctgtgagcactttctctgttgaggcatttatggtatgaaaagatgagtaaggcacagttcttgccctggagaaggtcacaggtgagaggaggagttgacacagaaacatttgatataaagcaaggaataaattccaagactaaaattttcagaaatctaaaaaactcaagataagaaaaacccattatattttctgggtaacaaaatttcagtgttattaacatgtaggaagatcttgatatttattctgaagcccatgtgtgttgctgaaatattgccgcatttgcatatactcatcaccatcctctgttttggagctaagaattttagactcaagatgtctaattaagttgatccattgattttattttttatggaaatctgagacccacagaaggcaggggatttgcccacatttctagaagagtcagacatgagcgatgaggcacagtggaaagaacatgagcattgcctgagctctgagttggcgctataagagcagtgatcatgggcaagtgactcttctgagccttggcctcctcacctgttaagtgaagaaaagaatatttcagaagatctttgtgagaatgaaacaaggcaatttacttgcctgctacatagccaatgggaaatcaatataagttccccgtggttcccttctgtggggttttgttcccacagagggtgcactggccattccacttcttcttttccaagctcctcattccctttaacgctgttcatagttggttccaaaccatttgaaatataataagcaccaggatggttttttctttccaccaaagcaaatttcattttctaaacactgtttataaatatcaatggctattttttcaatttttgattatcatgaaaatatacaaatatgtttaattaaatatgctaaagaatgtattaataaatatgtattaaataattcctacatataaggcctttttgcttggggtatgggtgatacaaaataaatgtggcatgaacccactgacctctagcaatttataacctagaaaaagagttatgatatgtttataagttcctgtgatataagacatgcatatagtcattataacagaggtgcaaacaagatgtatcaagtatgtccagaggaggaagagattaatcccagctggaggaaacactgatgctttcttgcagcaggggcatttgagttgagaaagggaggaaacatagattttgacaatgagagctgaggggaaaggggtttcaggtggagggaaccgcatgtggaaagcagggaggtaggaaagtgtagagtgtgtttaaagaatagaccagtttggctgaaacaggatatttgagcagaggaagcttgtactaggtaggtgggttgaggccaaattatgcaaggcattaaatattaaactaggaattttggactttatcctgcagtttatggggggtaaatgataagattcaatatcactttatttgtacagtattatgttacattttatctaattgtttgtttaattcctgtctagacaatgaattcctcaagggcaaggagcatggcttattcacctcagtaatttcagtgcctagcattgtgcctggtacaaagtggacacttgtatataaccttttttaattgaagcaacaagttgtcaaccttacaaatgtgaatccgtgattcagatgacaggttgaaatgtagattgtctgcgaagagggcagaaagagagtatgacaaaggaggacaagacagtggggcaggcagggagagagagcagccagggtttcggtagaggtatgtcaaaaaggtatggaagtcagaggagaaggagacccctatgttatagaatacaaatggaagggaaatgatgacaacagtaagttgtcattaaatgcaaggttgcaaaagtaagattgtaaagcaggatgagtacccacctattcctgacataatttatagtaaaagctatttcagagaaattggtcgttacttgaatcttacaagaatctgaaacttttaaaaaggtttaaaagtaaaagacaataacttgaacacataattatttagaatgtttggaaagaaacaaaaatttctaagtctatctgattctatttgctaattcttatttgggttctgaatgcgtctactgtgatccaaacttagtattgaatatattgatatatctttaaaaaattagtgttttttgaggaatttgtcatcttgtatattataggtgggattcttaatagattctccaaagatatagcaattttggatgaccttctgcctcttaccatatttgacttcatccaggtatgtaaaaataagtaccgttaagtatgtctgtattattaaaaaaacaataacaaaagcaaatgtgattttgttttcattttttatttgattgagggttgaagtcctgtctattgcattaattttgtaattatccaaagccttcaaaatagacataagtttagtaaattcaataataagtcagaactgcttacctggcccaaacctgaggcaatcccacatttagatgtaatagctgtctacttgggagtgatttgagaggcacaaaggaccatctttcccaaaatcactggccacaaagtgtgacattttggcattggcatcactatttgatggaagccaacctccccccaaaaggcctgtattagaatgaagatggattccctgggtgggttacacttgaaactagcctcacccatgaacactttggcacagattagctagcccattcccccacagtaaggaccataaggaagggacagaagcaaagataagttttagaacaaaagagaggggaaagaaaaaatctagggttttatgagggctgtccctgagtgatagatgtgaataggcctccagggcaggctggctcagaggctgactctttgggttggggtgactgattggtggtgaggatggagaagaaaaggggagtggaggaggtgaaagtgaccttgggacattaggtctccataagtgacaggatttaaggagtgttgtaagctgtggttgttggaccaggtttaagcacagcttcctgagcttcctgactggtttaggtcaagctccagagagcaaatgccacagtctcagtgatctccttggagaaacagttggaataggatgttgcccatgttgggatgagtcattgtccgctcttgctctttccctacccctgcaaaataataatactgtatttgattgaacatataaaacaaaagaaggattatcacataagtatgtatatataaccaacattggcaggtgcagaaaaaccagactgtcagtttgcctcatctgaaatgattgacacaaacaaatatatttactgtcccaagtgaactttggcattttggatatccttcagttgttctgtttaaagatataacttagaagcagctgatggaatatttaaatccatgcgttgaattcatgcattcaaagaaacatgtcctgagtcactaaatgctgacatttgtttttcatgttaagagtgtaaataactggtcccaaatataatattattacatcagataaaaactggaatgtgaacctcttaacttgattgtgaaagtatttgccaatggtgcctcttgataattatttgaggctcacttcagaactcctctggaagggttaatttttaaatagtcattttataaattaacatttttgacatatgtgatggctctcaaattttttcttttatgccagtttgaatcatttctgctcaatttttttttttaattgggatggagtctcactctgttgcccaggctggagtgcagtgatgcaatcttggctgactgcaacctccacctcctcggttcaagcgattctctcgcatcagcctccagagtagctgggattacaggcgcgcaccaccatgcctggataatttttgtattattactagagatggggtttcaccacgttggccaggctggtcttgaactcctgaactcctgacctcaagtgatccacctgcctcagcctcttaaagagctggaattataggtgtgagccactgcaccaggccctgttcaacttttaatgctaagattcatttgttgttgtttcacaagtgattaggcagaggtcttttatattaatttacccattttatttgtaagagagtctcatattaaggaagcataatatatgacaatccaaatacagtacaaatttggttaattttgattttgttaaataattaatcacaggggtccttcaaattgtgagctcctctggttatacttatgttttacctctggttatacttaatttcaaacaaatgaaatttcattctattcatgatatttcagaagcagatctgttgcacaaaataaagcatacctataaattttctttttttaaaaaaaagtctctgttcactctattttctattatttttctctttttaaaatttgaattttattgtggcaagtccacttaacatgagatttaccctcttaacagatttttatgtgtaaaatacaatattgttcaccatgggtaaatgttgcacagcagatctctggaacttattcattttgcactactgaaattttatacctgttgattagtatctccccatttccctctctcccctgtcctgttacccatggttctgttctttgcttctttgagtttgagtattttgatacctcatgtaatcttcattctattttctaactttgacaatgttctgacaaatttgctttccggattggagcactgtatagtgaaaattgaaaatcttggttattttctacagattcccactattttaccttgagcagacacttatcttgaagggtctcagatttgtcacttgtagaatggggaatataaacctgataatggtccctttcagttctaaagttatatcagttgaaaatacatgtgtcacttatggtaacgggtagagaactggctcactgaacagcatatggatattataaagtggttttttttaatcctttctgcagacagttactttatactttattcaaatggattattgtgaagtacatgttagcggactttgtaccttttaaaaatgtatgtatttggtgtaatgtagaaatatagaaatttattaagtatgatttatttcaatgttaagcatgagaaaatatgctccgaaaggttagatagcttgcctaaatgacaagcttgtatttcaagcagaactttctgaatcaaaagactccaagacgaatgcccagctttcaaaaactgtctaaccaaaataaatcctaagattcaccttcatactaaaattatttaaaaatagtttattttaaattaatattcacttaaaatgtatttatcatgcaatactttaaagtgtctgggaaatgaaaatatccaaagatcaaagaacaccatgttttcaaacttcaaaaatgttatcagtgacctaaacaatttttaaaattttcatagagcctatgaaaaatgtacttgcaaatggctactttctgactaggaatagaatggggagagtatttagtccaacaatgatagactggattaagaaaatgtggcacatatacaccatggaacactatgcagccataaaaaatgatgagttcatgtcctttgtagggacatggatgaaattggaaaacatcattctcagtaaactatcgcaagaacaaaaaaccaaacaccgcatattctcactcataggtgggaattgaacaatgagatcacatggacacaggaaggggaatatcacactctggggactgttgtggggtggggggaggggggagggatagcactgggagatatacctaatgctagatgacgagttagtgggtgcagtgcaccagcatggcacatgtatacatatgtaactaacctgcacaatgtgcacatgtaccctaaaacttaaagtataataaaaaaaataaaaaaaagtttgaggtgtttaaagtatgcaaaaaaaaaaaaagaaataaatcactgacacactttgtccactttgcaatgtgaaaatgtttactcaccaacatgttttctttgatcttacagttgttattaattgtgattggagctatagcagttgtcgcagttttacaaccctacatctttgttgcaacagtgccagtgatagtggcttttattatgttgagagcatatttcctccaaacctcacagcaactcaaacaactggaatctgaaggtatgacagtgaatgtgcgatactcatcttgtaaaaaagctataagagctatttgagattctttattgttaatctacttaaaaaaaattctgcttttaaacttttacatcatataacaataatttttttctacatgcatgtgtatataaaaggaaactatattacaaagtacacatggattttttttcttaattaatgaccatgtgacttcattttggttttaaaataggtatatagaatcttaccacagttggtgtacaggacattcatttataataaacttatatcagtcaaattaaacaaggatagtgctgctattactaaaggtttctctgggttcccaaatgatacttgaccaaatttgtccctttggcttgttgtcttcagacaccctttcttcatgtgttggagctgccatttcgtgtgcccccaaactctacttgagctgttagggaatcacattttgcagtgacagccttagtgtgggtgcattttcaggcaatactttttcagtatatttctgctttgtagattattagctaaatcaagtcacataaacttccttaatttagatacttgaaaaaattgtcttaaaagaaaatttttttagtaagaattaatttagaattagccagaaaactcccagtggtagccaagaaagaggaataaatattggtggtaattttttaagttcccatctctggtagccaagtaaaaaaagagggtaactcattaataaaataacaaatcatatctattcaaagaatggcaccagtgtgaaaaaaagctttttaaccaatgacatttgtgatatgattattctaatttagtctttttcaggtacaagatattatgaaattacattttgtgtttatgttatttgcaatgttttctatggaaatatttcacaggcaggagtccaattttcactcatcttgttacaagcttaaaaggactatggacacttcgtgccttcggacggcagccttactttgaaactctgttccacaaagctctgaatttacatactgccaactggttcttgtacctgtcaacactgcgctggttccaaatgagaatagaaatgatttttgtcatcttcttcattgctgttaccttcatttccattttaacaacaggtactatgaactcattaactttagctaagcatttaagtaaaaaattttcaatgaataaaatgctgcattctataggttatcaatttttgatatctttagagtttagtaattaacaaatttgttggtttattattgaacaagtgatttctttgaatttccattgttttattgttaaacaaataatttccttgaaatcggatatatatatatatatgtatatatatatatatatatatatatatatacatatatatatatagtattatccctgttttcacagttttaaaaaccgatgcacacagattgtcagatagcaattctgtgattgaaggggaaatatgtcacctcttcatactcatattggtgaagggtcctagcttcaaaattaatagattcctaaagaggggaaatgaaacatccgcatttacacacacacacacacacacacacacagagttcctcttgtcggtaagttttgttttttttaaatctctactagataaaatttgttatctaattgtgagttttacacaaagaaaaactgtcacagaaaagaaagacagtgtcacatttttcaaaagaaaaagaagaaaagaaagtgccatgtttttcaaatacaaatgttctggattgattttaggatctttagtgaaaaacaaagtatttcataataagtaaaataaaaatctatgtaggtaaatttgtttctctaatttaagaatttgaatttctgagtatttatgataagtgttgaaataacttcttatatgtgacagtgaatactggcagagcaaatgccaaatcaatgccaaatctgtaggatcatttgattgtaggaacagaattctactcaaaccgaaagcaggcatttgctggagttacagaaaggcctcatggaacaccgagaaggtggtgccattcgactcttaaagaagctgcaacaggcacaagagagtcagctgcagctcttcttcttgagtctatatctgtcctgggtccattcctttttgtggttgcttcattcctttctctctctgaagactggtttttctggtctaccagggctatgccacattgactttatgtagtgtctccattctggcctcctgaatttacaggagagttcctctgtacaaactcaaagtcctggagagaacagaaaacagcttccttttggctcaggggtccaactgcagtctactctgctgctatgaggatagtgggttcaccacctttgttgttctctcagctagggcagtgggaaatgactctatgaaaggaatatacatgggcaggcaaatgtactaatcctcatcagtactgtaattttaagcaactttaaaaaattcttttaagttatttgaaaataagatcaaagaaggctgaattacataaatgaagatttgttaacaattaattcaaaccaatataacacatgctataacatggttgagtgtgattgagtcttgatttattaggggcaataatcaaaacatttaacaatcattatagtacagaacttaccaatcaaatcagatgctcagccggagtggatgttggccacccagctattattatccctggctcaattggtcttcagctgtgttaacttgcaaacattaattaactatctaagcccctcattttcctcaagtgtaaatagacacaataatattacctattccataggtgtggggtgaatagtaaatgtaataatttgtccaaaacacttagtatagtgcctggtccatggtaaatactaaataaatgttatctgacttattattaaaattttatcttctcagcttaaccttcagaacagtaatatattggggtctagataaatcttgcctatatgaaaataatttaatactacatgcagatatatgctgtgtatattatgccttctgttagaggaattgcagaaacaaaaatttcaattaataataagatgaattatttctcccaattgtagaatcttttgacaattttatcatgcattacagatgtaagaactcttgattgggacttgatagtctaactttataataatttaagaacattcctcttagagaatttctatggccataatactgaacacatgaattttaattagctgtcctctttagccctaaaaaaaaaattactgtaatttaacacttaagtgttgttcttcccaggtacagtaatctttttttttttttttttttttttttgcatagagggtaatcttttctctttccaaatggcagaactgttagttttctgactgtccggtgaaattctaagtccacttacttcccaatagcatgcaattagcaaaggtcctccttgcaaaggcacagaacacacctaaacatcttgcagatgctgtttggacactcttcccctgcttttggtctctttgtaaagcagctcatctggatacaggatctcttttccccattgcccattctaatatatgttaccgttattacttatagaataatagtagaagagacaaatatggtacctacccattaccaacaacacctccaataccagtaacattttttaaaaagggcaacactttcctaatattcaatcgctctttgatttaaaatcctggttgaatacttactatatgcagagcattattctattagtagatgctgtgatgaactgagatttaaaaattgttaaaattagcataaaattgaaatgtaaatttaatgtgatatgtgccctaggagaagtgtgaataaagtcgttcacagaagagagaaataacatgaggttcatttacgtcttttgtgcatctataggagaaggagaaggaagagttggtattatcctgactttagccatgaatatcatgagtacattgcagtgggctgtaaactccagcatagatgtggatagcttggtaagtcttatcatctttttaacttttatgaaaaaaattcagacaagtaacaaagtatgagtaatagcatgaggaagaactatataccgtatattgagcttaagaaataaaacattacagataaattgagggtcactgtgtatctgtcattaaatccttatctcttctttccttctcatagatagccactatgaagatctaatactgcagtgagcattctttcacctgtttccttattcaggattttctaggagaaatacctaggggttgtattgctgggtcataggattcacccatgcttaactgagtggtgccaaattgtcctcaagtctgttgtactgatatatatccccatcaagagagtacaagaattctcatagctatgtatcttcaacaacacttggtgtctggtagatgtgaagtgattactaaaaatatagggaagctgcatacataattattggcttttgctgttctcttacattaatttcttattcatgttgattactcatttgtcacctagttttttcttccttaattaaattgtaggaatttatgaattatggattgatcatcagctctatacatttcaaacataatccctcagtcagtggcttggcttatagagtcttttgatgaaaagaagcttttaagtttaataaagttcaatttattgtcttttcctttatgttttgtgcttttggtatcttgattaagaactccttccttatattgggttctcaaatttagcagcataacattttcatactattatttaaatttttttcacattatttagtgatagcacctttcttattcctaaagtgtttatcattgccttctgtctttctgcttgataaatattgccacacatttgtatactttattagtgtgtacaaagaccacattttagttgtgttatttctcttgttttggttttctagaatgcagagccattaatattatagtaatgcttatgtgctaataccatatcaggggcacaaatcccattgcagcgggactgagaaattaaaggaaatgatgcacatttactcatttttgtttaaaaaatcaaatgcatatttttcaatcagactatatggttggtctggatagcttcatcattgaatttttaaagtatttttgtactactgtatttaaaattattcattcaccactgcttttgtagatggtttagaaacccaagttaggaatgactgtgcaacactattattatactctttttaaaattatactttttgcttaagtttctttccttgttctctgagacagtgttcatgttcccaaaccacacacatttattcagctataaaatttgtatgatcaactcctgtcagaacaaacatcattataaaaaatatctccaggaaaaagaaaacccttttaatgctctcttctggttcatgtgtcttcttattttctttaagcattttcataacccattgagctgtaatttaattggaacatgatttatactaaagttggtttctttacctttaacttttttttttagtttgatcagctctctttagcttctgtagttcggtctttaattccattccagtatgcttttggagttgggtctcataaatgtatagaaatgtttctgttgggaaacagcaggagaatattaaataaatattgtgcttacatctatttaattctttgcccaactttctacaactttgactttacatttaagctcctcatgcacttacatgtttctttacctaaaaatatcttttcaccatgggtgtgtacaattcctttgtccttgctgtattaattttcttggtttacatagtagcctctacacattgatgtcaaaacctctgtttggtgcatttctactctgcgtgttcaatctccatgaaagtttctgtaaggtattttcattcctctagtttttcacatgtgcatcctggctttgtgacctgtgctttgatatcgtgcctttcatcttgtggcattgaaggatctttgcaaggacctattgtgttataatacagtctatgaaaaatatcaatatttgcatttgatcacatttaaaaaaatcacattcttttgtttgaatatcaaagctaatatgtgagtgatttccctgccaaatagcacaagtagcctttcctgggtgtttatgggcatttatctggttaatgattcccatcatagtgctgtcacccatgccattgctaaacttatacagtaacttttttgttttcacctcagcatatgttgagagtaggaaatagataggactatgccctcaaattttacgtttatatgatgttaatcctaaaggtccttgtgacttctgaagtaaaaactcagtgttgtcattttacttactgaattgttagctgagtttagagttgagtttacaatggagtaaacaaggtgtttagtttgatgtatgcttttagtctttcagaaaaaaatgtttatacttggaaagaatagtttatttacccatctggcctagtttagacaaaaacacagagtcaaatgtcaacagaattctgaagttataaaaatgacagtgtggctttttttttttttaaccttccacctggtgcttatgcccaagtgcctagctttctttagctctcaactaataaaggtaatgtttagataacatttaacgttaagttgcattgtgtttatgatcacatatctcaaatattggtacacgaaactgtacaacaaccttttttattagattttcctacgaaattccttattatattccctaagatagctttttcccaccttcttcttccttctcccttctcaggtgctccaataattccaacccctgcagccagtgactttattatatctttttttaaaaatctaaaaaaaaaaattgatgcaaccaggaagaattttctcatttctctccaccagttgtaccagcctactgcacctctcctcatgcaccaccttctgcctgtgttcttgctcctatattcaggagcaagtaatatgcaatacctccctctttgtgggatctttctcattagcataaaaatactttcccttgatctccagctactaccccatttctttgacctacatatagcaaaatatttgagaaaggaccactttccatcttttcctcaatctacttccatttttttctcaatccactttcatttcattgttctcctcaacccattctttccacaacctacttcattttatttccatcagccccataactcaggatcaacatcttgccagagccaatttccttgtctcccttaacagctccagcagtatttatgccatggacaaattattcttcttgtgatactttctctcttgcttccatgacactactcccacttcattttctttctacctctctggctcttccttggtcccttttcctggccccttctctctttcagatctctaaacatcagctatatctcagccctgttctactgacactctctagctgttattttctaaacccatgtttcagaaaccatatcttgatgaatcttggaaggccgaggcaggcgaattacttgaggtcgggagtttgagaccagcctggccaacgtggtgaaaccccatctctcctaaaaatacaaaaattacctggccgtggtggcatgcacccagctacttgagaggctgaggcacaagaatcgcttgaacctgggaggtggaggtttcagtgagccgagatcctgccactgcactccagcctgagcaatagaggagactccgtctcacacacacacacacacacacacacacaaagaaaataaaccatctcttgatgaatcataaatttgtgtctctagtttagacctctatcctgctctctaaatgatgtatccaactatcatcttgacaccatcatatgttcataaaacataattatagaatatctttcagtaggcttgacattttaaggcatgagtttccgttcagtatctccttaaaatatacccagggtctcaggagactattcaaacaggacaaagcttctattctacttactaatgtgtctggccctatttggcaggttggataaaaagtcatctgaacattgtcactttatgaataatatagtttaatagtttgtgaatcacccctgcaatttaaaaaatagtaaaattatcagaatctaatttaataattcctattggaacaccccatgttaggggatttccagttatttcaattgatatctcaatgttttaaagattgtttatttctattactaattcactctttattttaacataaattgtggctatctatctctattcatttcaattatatttctcataccattctatagatggggtgaaaagaaaagtgttaattttttaaaactccatacctcaaatactatatgaatttatagttgttattgctaaagcaattatcttacatcttttcctccaaaacaaagttatgtgctggtttattttctttgtactcataagatgccttccatttttagtaacataagtcttgtctttctcctattcttagctacttaagcattatgtagcttaaataagcactaaagattcctatctgtatgaaaaaataaagattaaataaataagatctagaaagggtgacaaggtgatgcttcaaaatgaaccataccaagccatctagcgattgataaattactcacactcataatcacattgttggaaagaagccattgacaattcagtttgtttcacaactgtctatcacatagtgagcacaactaaaagactactttttgtcttttactgcttgttttgttgatcaagtgactgattgtacaatgaccaacaagaagtctgatgtgtagagaaaaggggaacctggcttttctgccttactcctgatgcctaattctgagcatgtgaatattattctgtttctttaattctccaagtgaagcagcagataaaccatccttgtttccattagctgtctaccctgttcaactgtgtgtttctaataacataagaataagaaagccaccagggtgagcagggaaggcaatgagtctgcaaggcttgtggatagatttctgttagtgaggctctagaaagttcttccaagattgatgcaatctgagaagagttttctgtcaatacaaactccctgggtttctcctttgtccttttactgcctgtgtttgttttgggttccagtaaagatcaagtgactgattgtaccatgaccaacaagaagcctgatgtgtggagaaaaggggaacctggcttttctgcattactcctaatgcctaattttcttgtactgaaagtagtttttgctgtaagaatctgaggggaggagtcatttcttcaatttttttttttggtctccttttaatggtttcttgatcatgtctatccttatttttctgttttcacaaatttttgtggtatattttcctctcatgacctctgtctcaagacttctttccatccatctcttctcatttcatcctgtagagtgtctgtggtaagagccctgcattctactctggccttgccatgtgtggccttgggcaagtcctagcctccttgagggtcttatttttctcatttgtaaaatgaaacagtttgatgagaagttttctaaggttccttcaagctttgacaatctctctcttctggatctttttcccatgaaaaatttcaactcttgattagcatgtaggcagggattattccacatccttataggaatcacatttctgctactgtccctgaatgctagagtccattgattaagttattcactgctgcaattgtcagagctgatcaaagaactctgaaccagtgtgttactagaactaacaaagaaaatgccattatgatgttctagagtcttgaattagtagaagaggtttaataagaaccctaagggattgctagaatgttaaaaacaaacaaacaaaaaaaaaggttgaaaagtttagaaaattcactggtctttgtgcccatcattttacttccagggtttagataatctcatttttgcaatgaaggaatggattagatcacaagttctcatcctagtagcacatgcagaatctttataaaaacacagagtagccaggtgcggtggctcatgcctgtaatcccagcactttgagagcctggggcaggtggatcacttgagaataggagttgaagaccaagctggtcaacatggcaaaaccctgtatctactaaaaattcaaaaattagccaggcatgatggcacatgcctcccagctactggggaggctgaggcaggagaatcgattgaacccgggagatggaggttgcagggagctgagatagctccactgcactccagcctggtgacagggtgagactccatcacaaacaaaacaaaacaaaagaaagcaaaaacacagattactcagggtccactaagaccagtgaagtcagttctcttggtagggggcagggtgactgagcatgatgtttgtaattttaaaagtgctccaggtgattctagcgtgtatcaagcaagacttgtgaaccactgaactacatgctaagactcattttagctctgattttctgtgagtcatagcagagggctcagcaaactttttctataaatgctaagatagtaaatattttcagctttgtgggctgtatcgtctttatgacaactcaactcagtctttgtagagaaaagcagctgtacataatatgtaaactaatgggagtagctagatgtgtcctgtgggccatagttttgctgactcctggtctatgtcatagaatttccttttgaattgatggaccaccagcaaatgatttttgtcctgtatcaatcaatgatacatacataaatctctacaagacatgtaaaggatgaggcttaatgacagagtactttggggaagacataatattgcaaaattaagatgcttagagaaaaatcatattaaaatagtgaaaactgtgagaaggtattttgatttgttgttttggattcctctttttgcaaattcttttgaaatattttcagtggaagctacatagatccaattgtattcaccaagctagattgtaattaagctccagagtaagtaatagatttgatgagtgatgtccaaccttttacatggaagagtaagtttgagtcttcctttgcccattgacacacttagtaccatgtttaccaaagttcttagttattgaaatgggcaccagcatattttgaaacgttggtgttaacttgggatatgccttttgtcatgttgcaaatagattttgtttctgttttgtgaagatcaccatctctgtcacttctgatagaaaaagtgacactgacttctcaagtgatttgacacaggttaaaatatgtaaaccatttctgtagagagcaagctgtaataatatactaaagggctaggtttatagtataatataaataactcatttatgctgttaataatttatagcaacatggcatttgactgactttttatgtgctctagtcatgtaagtaatagatgtggaaacatagaccagagtttcaagaacatgttttgggcagagtctgttttcttgctattatctcttaagtttatgttcatggcctaaagattatgctaatggatctgccttggtcttgggtgtcaggtctgtgttagcgagtattgaaaagcatagtttttgcctactgggaaggatttatgatttaaaagccctaaatctccccttttatgtacttcatacttagaaaatttttcctgtaaactgtgtgacttttttacattgtgccagttttctagatgactctcgtcatatttatttcttgcaatccttctataactatcagttatgaagtctctttatagtgttgccagccaggtctcaggtgtgtgaaatgtattttctattatggattttggggtatgatggcacatagtttgggtgttaatgcctaatcttgatgtactggcttctgaacaaccaaaaggatgaaaggaaatagaacaaatatttttgtgagggagaggagtctggcttcttgacttactctagaaaaagcctgtaagcctcctcttccctccttgtcacacaaagtgacaaagaaaatcaagaattgttttcttcttggcttaaatgcatcccttataaagtaaggctgagatcaggctgtgaagctatctttttgtcaagactgtcataattccaaaacactttgttcttctaatgcttaggttagtaactttaaacatttttataaagatagtgaggtccagttttaaggattgaccccttctcaaggggctcagaagaggttttggagaataataaaattaaataatgaaaccaataatttaaaccagatcatgatccttaagaaaaaatcccatcaaatttgggctaaactctaatatacagaggtctgcacaacttatgtcaagtattcttccccacaaatgaagaatggggttcattgtgtcattggttgggtctcattttggcttcatcttctatttctcaaagtctaagaaaagtgctcctacggaagtgggtgttggctatcatgagactttgctgctggcaggccagcttgctgctctagacagagatatccctcgatcctccttggacaactgttttctgtgcacaggaagcagcaggctggggttaaggagtttgccaatccagtcattctgataattgctgaatatgaatttctatccagcacaatctaggtagctacaatggcacagtagtttttatgtatcaggtgaaaatgtttaataggcactctaaatgagagaaaaggttaagtgaggttaaaagctcaatgaaaacaaatagatgagactaaaaatagttcaataggttgtaacttccatctcatccaaacagcaatgaatattttgaggctgaggcgctgaggggtaaaattgcagcctggactacttgctaatgtagacctacagcactgtcattcttactgcacagacactgctttctgcataggaggtagaataatgaattcatttattattaacaaagatttattaagtgactgcatggtgctaaccactagatggggagggatgttttgaactgtccattgtttgactataacaaggaacgctttgaacgaggttactatcataggcagaatttgtttaacatgaagcctatgagacataagccacaggtcctctcacgtgcaggaactcctttgaaggccctatacttaattttatatgcatagtttggatttggattcttttttttttaagagttccccaaattacttaagcttcaggctccacaaaacctggatctacccctggtagcagctatgaatctttgactatgaaattaagtgtacaagaaatatgactttactttttctgtgattgagtttattttctatttgagcacgcattccactgagtgaaagaaataatatcattgaattcagagattttgctgggttctaagtggagtttacagaatgccatgatattaggaattaaggagtgtgttgccctacatcatcttttgtccgtgctcactgtctctgaggcactgatgttcctatgtgacctagaggggcatggtccaggtagatggagtctgtccttgttctcactgtgagctctcgcttgctgacccttcttcagtttcttccatgcccctgaggggtaaaaagattcaaatctgaagctatatcaagccatctgtgcatagacattccaagcaaccatgttcactctactgctcccatgtcatgcaaggcacaggaagcttcactatggcatgagtatttcctgggctttgccttggaattgaggcacgggcctcctttgttctaaaattccccaaatctacttgaggatagaaccaggatttggttgcaaggcagaacttttcttagaggacctggtatctaaaccctcttgttacccccatttatggaccccatttatggggtgaggagagtgactgcttctaatccatcataatttttgtctatggctactgtttttgcatagacactatgttttgagtccttaggctttggcttttggcgcttaatggccaatattcacatggctcaaaattttcaaatgatccatatctgacttgagtttcaaaagtcagtttttgaaacttaaatgatcagaattgatttgttctgctctggttctgatgtggcctctccttccagaggtactggaggtagaatatccaaggtggaaagcccacgactacaaggaattggttagtaattcataatgttagctgtccacatctattcagtaatggcatttcagtggctgcacaactgaccatggtgaaagtgtctgcacaagccactttttcttcctgtcagaaaatgttctcacccactgaattgaatgactgtctgctcatatgctgtgaatgagtgcccagtcttaagattaaatcacacgttcttggctatgcatatttgggcatgctgtggggagttataataggctgtcttagagtcacattaagcagctagacagacaatgagttggaaagttacattttctaaatttgattggtacattccatttgtcacatttgacattagaagttctggattcaccctctatggtgagcttcactaatggagaatgtaatttgcaatgctcaaacacaagtcctaaacagaaaacattgtatgttacattccagtgctaccaaaatagtggttttgaaagtccttattttctaatactactatgtgtaattttgagtcatttagatagcaacagttaaatgttttatagattgtttggaagtattaaaatgtgaaggatttttgttatatagtgtctttcctatcttgcttaataaaatataagtttagaattgtgtatagaattaacatgcaaaaatatcaagtctcaactttatacagttaatctacatttgtgtatacccttcaattatttcaagagagggatactattcttatgcaggataaatacaataagatattttaaatgaattttaactacatctctggcagtttcatctcaatagtagttgtaattttatctcccagaccttattatagactagcagctctctatgaaaattagtgacagtgtgagtgtattttaattcaaagttaatcaagaatgactgagtcaagagttagctacccctgaaagtaactcataattcagaatttaaaatattacatgtggaacaatcatgactatatgccttttactttctctatcattatttaggttgtgggctttgggtccttttcacatccgttaacagtgggcttgacttcaaaggattattttcttgaatcttgaataattgctgaagacaatttgaagatattttcaagatgaaggaaactgaagcacagaatcactagagtgaaaaaagaacttcacaaacagtgcaggcttgatcaatggcatgggaaaacaggcaatacagttagaattgctaagatggaattttaacgttcaattaaggatctatctctaaactcctctgctttatccaccaatcattccatattaaagatgaagaattgttcccatttcaccttttgataaggaaaaatagaaataacagaagcaaatacacttttgcccacatttttttccaaaaagaataatttttgaagtctaaacgtttggtgtaaataagatgatgtgttaatattgtaaaggaaagctagttaagtttttgactgaataaagccagcatcaataattactagtaagactaaaaataagagcagtaaaattgtgtctaatcagctactaatatctgggaaggattgagccacaggatcaaagatggtatcttttaaaaatagaagttgagtgaattcggtcttcaaattctttctttttattcatttatatttatttactcattagtatattcattcctttattcatgtattgttcaaatatatattgggtacttattatatgccaagttgtttttaaaatcacattccaaattcccgtaagtcataattattcagagatgtatgttttttttaaaaaaaattgaacacctttaaaaattatcaagtccttttatttctgtatgcattaaagataaactttactaaatgttacatgaatagatttataaagcagataaatatttaatttcaaatataacccttatatgcaattatattttccttagcactaaaaatgaatatttaagtaatttatattaaaagtgtaattatttaactgcagatgtatgccaatgacttaaattgtttaaagattatagcaaagttgtttaaaattgtctaatcatgaagagttcacttaaccacctggttgacacataaaattatagttagttactaaggtagttcgagagaaagagaagaatcttcagtagtggttttgaggtgtggtacattttattataatataccggttatacagcattgtgcagtgctgctcatagtagaaataaattttctctttgatgtcatctattcccttgtgtggcttacataactgagaattaggtgatcacaaaaataaacaggcctatacagagcccatttatataagtcctggttatttctcttcagttaaacttttaattatatccaattatttcctgttagttcattgaaaagcccgacaaataaccaagtgacaaatagcaagtgttgcattttacaagttattttttaggaagcatcaaactaattgtgaaattgtctgccattcttaaaaacaaaaatgttgttatttttatttcagatgcgatctgtgagccgagtctttaagttcattgacatgccaacagaaggtaaacctaccaagtcaaccaaaccatacaagaatggccaactctcgaaagttatgattattgagaattcacacgtgaagaaagatgacatctggccctcagggggccaaatgactgtcaaagatctcacagcaaaatacacagaaggtggaaatgccatattagagaacatttccttctcaataagtcctggccagagggtgagatttgaacactgcttgctttgttagactgtgttcagtaagtgaatcccagtagcctgaagcaatgtgttagcagaatctatttgtaacattattattgtacagtagaatcaatattaaacacacatgttttattatatggagtcattatttttaatatgaaatttaatttgcagagtcctgaacctatataatgggtttattttaaatgtgattgtacttgcagaatatctaattaattgctaggttaataactaaagaagccattaaataaatcaaaattgtaacatgttttagatttcccatcttgaaaatgtcttccaaaaatatcttattgctgactccatctattgtcttaaattttatctaagttccattctgccaaacaagtgatactttttttctagcttttttcagtttgtttgttttgtttttctttgaagttttaattcagacatagattattttttcccagttatttactatatttattaagcatgagtaattgacattattttgaaatccttcttatggatcccagcactgggctgaacacatagaaggaacttaatatatactgatttctggaattgattcttggagacagggatggtcattatccatatacttcaggctccataaacatatttcttaattgccttcaaatccctattctggactgctctataaatctagacaagagtattatatattttgattgatattttttagataaaataaaagggagctgaaaactgaattgcaaactgaattttaaaactttatctctctgtggttaattgcaaacacagatacaaaaatatagagagagatacagttagtaaagatgttaggtcaccgttactaacactgacatagaaacagttttgctcatgagtttcagaatatatgagtttgattttgcccatggattttagaatatttgataaacatttaatgcattgtacaaattctgtgaaaacatatatataggatgtgcgaaaagtccctgtgtatcatgtgaaatggcttaaaacagaacaccataggtattcatatcagtgaataccataggtagctgaaagtgttttttcctggggtcgccaagatgaatgccaaaagtgatatcattattataaacaatagccagaataggttggtataaacctggtagaaagccttgataaattgactttctctcctcctgacatcctgccacccctttgctttgctgatgctcatttgtccactaaattaaactcaagcaagccctagtaaagtaatagaatttgtggagtcctcattagtataggaagtttccctgatgtgagattagtaattagagatgtagcaaaatgagaaagaagtaatatgcttagatatttcattttctctgaacctgtatatacaaaataggccatgcgtgttcagtaactattcactgcaaggcactctctaggtactttgggggaattggaaattactcacataaggctatggattgtgccatttgtcaaaagacaaaatgacaacaaatttagtttaaagacctcagtcagctttattttctattctagatttggacagtccttcatttcacaaattggagtaagtgttccaataagttgagcaaaggagcttggctttatagacccaaaaaaagggccaaaggaagcagaaacaaagaacaataagagaattggtcatttcaaagttacttttcttgaaaggtggggacaaggagacagaataatagaaaagtcactgattggttaacattggattaagaattaaaacagaggaaactttaagattgaagtttgaaactgacttgtttgggaaatcaggctgtcttctttcttgatttcttagaaggccggataacaactgagttttgctttggtgaacatgggtgactccatttttacttttagtctggtctgttgaggcctcgtgagagagcttaatctaaaacaatgacttcctataatttttgtttgacacatccaaagagggactctaatatttattgagagcttatcatatcttaagtactgtttaaacacttttatttgctattacatttgatcttattataactctaaaggcagaaatgattgcttttattttccacaatggaggaaactgaggttcaattaagtgagtaaggaagcagggatcttaaacccagataccattgctcctctttaaaggtggaagaacagaaaacatggggcaggggaagagagaaagtttctgtcccaggacatgataatctaaaagggaaaacgtaagatccactgaaacctgaggcagatttattgtggcaataacaaagcttaagtttcacagaccttcatttgcctgagccaactttgaaggccatgtatctaattttgtttttataattctataatctttattcttgaaaagagccctccctccaaatttacaagctttgggcccccaaaatccttgaaatgcccttgaataagagatatccaggtaaatgctatgggaattcagaggaggaagcagttagtatcagttggcggagagttaggctattaagagaaggttttatataggaagtggcatttagaatgaagctttgagaactgagctgtgtatttgaacaagtaaaggtggtgttgcagaattttgctccttagttctattaaaaacccgggttcttgtcacatgatccggaaaatttaggcacacagatacattgaagcatgagtagagcaggattttattgggcaaaaaggaaaaaaagaaaactcagcaaatcgagatggagtcttgctcacagattgaatcccaggccaccacaaaggaactgaagagatcgggcttctcccctgcataaggtgcaaattccccatggctccacccacttccccttagtgtgcatgtggggctccagtccacggtgggcatgcccagacaagccttgggcaggttccctcatctgtgcaaaagcatctgatgtaaacacttgaggggtggttcggagattctctgggacccttttattttcttatctgcctaggcatttggctgtctcagtgggtgggaaagggtgctccaggcaaagggcataacatgaggcaaagggcatgcacagaaaacagtgactggttcagtcaggttgggggatgccaaaggaagtaatgggagacaagattggagcaagatagataagagattgtggattttttttcttttttatctatataaatacagagacagggtctcactatgttgcccaggctggtctcaaactcctggcctcaagtgatcctcccacctcatcctcccaaagtgctaggattacaggcatgaggcactgtgcccaacctccaattttggattttgagagctaaagcaatatagtcgaaaactcagataatccaggtagattttgctattaggtgctatttggttcctggtacagagctaaaacccttggaatttcctaagtgataagagctacaggagcatcttttgttatatgtttccccccctagttcctgaaatagctctagagaaatacaggtgaataacatcctttgttattcatatcaagcccctatcaaccataccccagtttctatttatgaagtggcttttgggaagtccctaaagacaggagtggggaaaggctggttgtcagggggatgggttgaaactttcatcttccccccttgacctccagggagggatgagtggctgaaaattgtgtaaaatcaacaatggccagtgatttaatcaaccatgcctatgtaatgaagccacccgataagccttaactggaactttttggagagcctccaggctggtgaagacattgaggtgctcagaaggtggtattccagagagagcacagaatctctgttccccttcccacattcattttgctatgcatctctcccatctggctgttcttgagaggtatccgtttataataaactggtaacctagtaagtaaactgttaccctgagttctgtgagccattctagcaaattatcaaacctaaagagttcatggatacgtgcaatttacagatgcacagtcagaagcacagatgacaatctgggcttgccattggcatttgaagtgtgttgggaggcagtcttacaggaatgagcccttatcctgtggggtctatgctaataacagacagttgtcagcattgcttggtgtcgaaaacccacattgttggtgtcagaagtattgtcagtaggatagggaaaacagtttgttttctttttttagtggtctttggtcatctttaagagcagggcttctcaaagtgtggtccttgaaccagcatcacctgtaccacgtaagaacttatgagaaatgttcattcttgggccccaacaaagaattaaaaattctgagggtgtgaacggggtctgagtttcagcacaacttcccgaccatgctgatgcattcttgcccaagcatgaaagccctcccttgtttaagaaggccattagggccgggtgtggtggctcatgcttgtaatcgagcactttgagaggacatagtgggaggatcacttgagccctggagttctagacaagcctgggcaacatggcaaaatgctgtctccacaaaaatcacaaaaattaggtgggcgtgtgttgtgtgcctataggcccagctacttaggagactgaggcaggaggatcgcttgagcccaggagattaaggctgcagcgagctgtgatggcaccactacagcctggatgacagagtgagacactgtctcaaaaaaaaaaaagaaaaagaaaaagaaaaaagaaaggaaaatgaaaaagaacgccattaggtataaaggagcaatggtaaaagaccagttgcaaaaggttagggaatgggtggttactgaaataagaagctatgtagaacactagtgttggtggcaggaagtagaaagcaagagcactgctctgtgggggatggtcatagcaaatgcaatatggaggcatttgcctctgcactgaggagaaaactatcttttccaagataggaggaaaggagataagtggaattaaagagaacctttgagcacagagttgggaaactgaaggtatttgtgttgtgctccctcaatcttttaattcaactataagctaaacccatgaaacttgagtagtttcagttatctgacttttttcttctcttttgatacagtgttggctattctgggtcttttgcctctctttatgtacttaagaatcagtttgccaatgtatgcaaaataactggctgggattttgattgtgattggcttgaatctatagatggagttgggaaggactgacatcttgacaatgttgaagcttcctattcatcattatgaaatatttctccatttgtttgattctttgatttcttttatcagaatttagttttcctcatatagtcttttaaaatattttgttatattttgttcaagtattttgtttttgaggaatgccaatgtaaatggtattgtgattttaatttcaaattccaatttttcattgctgttatataggaaaatgattttttttgcatgttagccttatatctttcaactttgctataatcaattattgatagtttcaaggattttttggtcaattattttgaatcttctacatagattatcatcatctgaacttagttttatttcttccttcccaatctgtatacctttatctccttttcttatttcattagctaggacttccagtatgatgttgaaagtagtggtgagaggggatatcttggtcttgttcttgatcttagtgggaaaacttcaagtttcttatcattaagtatgattttagctggagggtttttgtagaagttttttttttttaagttgaagaagtctccttctatttttagtttgctgatttttaaaaagaatcaggaatgggtgttaaattttgtgaaatgcttttctgcaactattgatttgagcactttatttttcttctttggcttgttgatgtgaagtacattaattgatttttgaatgctgaatcaaccttttgtacctgagattaatcccgtttggttgtggtatataattatttgtatacatgttgagttcgatttgctaatactttttgagaatttttgcattggtgttcatgaaaaaatattggtgtgtagttttttgtgacatctttatctgcttatggttttaaggtaatgctggcctcatagcatgagttagggagtatttcctctacttttacatttgagaagagattgcagagaattagtaaaattcctactttaaatattttgtggaattcaccagtgaacccatctggacctggtgctttctgttttggaaggtcattaattattttaaaatagatataggcctattcagattacctattttttctcatgcgagttttagcagattgtctttcaaggaattggtctatttcatttaggttatcaaatatgtcaacgtagagttattcatagtattcttttattatccttttaatgtgcaagggatctgtagtgatgtccccttttttgttttattgatattagcaatttgtgtcacatcttttattttgctttgttagccaggctagagatatctctatttttgatgtttttgatgaaccaactttttgttttattgattttctctgttgatttcgtgatttcaatttcatgatttttaaattatgcttacatttgatttaatttgatcttcttttgctagttatccaaggtggaagcttatattgttaagatccttttgcattcttatgcattcaatgatgtaaatttccctctaagcactgctttttctgcatctcacaaatattcatgagttgtattttcatgttcatttagtttgaaatatttttaaatttctcttgatatttctcttttgacccatgtgttacttagaagtgtgttgtttaatcaccatttttaaaaattttctagctatctttctgttattgatttctagtttaattccattgtggtctgagagcatatattgtataattttaatttttataaaatttgttaaggtgtgatttatggcccagaatgtggtctatcttggtgaatgttccatgtaagctttggaagactgtgtattctgctatatttgaatgaggtagtctatagacatcaattatgtccagttgattgatggtgctgttgaattcaactatgtccttactgattttccacctgctagatctgtccattctttgcagagggacactgaagtctccaactctagtagtgaatattctatttcttgttacagttttatcaacttctgcttcatgtcttttgatgctttgttgctagaaacatacacatgaagaattggtatgtcttttggagcatgacccatttatcctcatataatgcccctcattatttcctcgccctgatgtctgttctctctgaaagaaatatagcctctccaggtctcttttggttggtgttaaaatgacttaactttctttatcccccttacttttagtttatatgtggttttaaatttaaagtgggtttcttgtagacagcaaatagttcagagttgtttttcgatccactttgacaatctttgtcttttaattggtatatttggactattgatattttaagtgattattgatatagttagataaacatctactatatttattactgttttctgtctgttacactacttgttctttgtttatatttttattgtctactctttttctttccattgtggttttaatcgagcattttatatgtttccattttcttttcttagcatagtaattcttctttaaaaaaacattttttagtggttgcccctagagtttgcaatatacatttacaactaatctaagtccattttcaaataatactaaataatttcatgtgtagtgcaagtaccttttaataataaaacactcccagttccaccttccagtctcttgtattatagctataatttagttcacttacatatatgggtatacctaagtatatacattatcatatttatgattgaatatattgatgaaattattttgaaaaaactgttatcgttaaatcaattaagagtaagaaaaatagttctaattttattataaaatgaaataccttcatttattcattctctaatacactttctttctttatgtagatccaagtttctgacctgtataattttccttttctctcttcagcttctttgaacatttcttaccagccagacctactgacaacaattttccccaatttttgtttgtctgatagagactttatttcttcttgacttttgaagaataattccacagggcacagaactctagattggtgatttcttcccctcaaacccttaaatatttcattccactgccttcttgcttgcattgtttctgagaagttagatataattcttatctttgcctttctataggtaagatgttttttcctctggcttctatcaagattttttctttatgaacatgatatgcctttctttttgaacatgatatgcctttctttttgaacatgatatgcctttgtgtcggattttttttggcattattctgcttggttttctctgagtttcttggatatgtggtatggtatctgacactaatttggaaaaattctcagtcattattgcttcaaatatttcttctgttcttttttttcctttattctccttctggtattcccattacatgtatgttacagtttttgtagtcatcccgctgttttggatattctgtttttttcagtttttttttccttcgcatttcagtgttggaagtttctattgacatattctcaacctcagagattctttcttcagctgtgttcagtctaccaatgagtccatcaaaggcattttacatttttattacagaatttttgacctatagaatttcttttgattccatctttgaatctccatttctcttctgcttttcatctgttcttgcatgttgcctactttttccatgaaaacctttagctttttttttttttctttttgaggtggagtctcactgttgcccaggctggagtgcagtggtgtgatcttggctcactgcaacctctgcctcctgggttcaagtgattctcctcctcagcctcccaagtagctgggattacaggtgcctgccaccatgcctgagtaatttttgtatttttagtagagatggggttttatcatgttggccaggcgggtcttgaactcctaacctcaagtgatctgcccaccttagcctcccaaattgctgggattataggtgtgagccaccatgccctgcctttagcatgttaatcatagttgttttaaattcctgatctgttaattccaacatccctgtcatatctgactgtggttctgatgcttgctctgtgttttcaaatggtgtttttttttttttgccttttagtaagccttgtaattttttattgaaaggtggacatgatgtgctgggtaaaaggaactgtagtaaataggcctttagtaatgtactggtaggtgtagcagagggtgagggaagtattctgtagtcctatgattaggttttagtcttttagtgagcctgtgcgcctgcagcttggaagcacttgtgaagtgttttttcaccccttttggtgggacatagtgactagtgtgagcgggagttgagtatttcccttcccctaggtcagttaggctctgaaaaaaccctgataggttaggcatggtaaaatagtctcttttgagggcaggcattgttataagaatagaatgctctggggccaggtgcggtggctcacgcctgtaatccccgcactttgggaggctaaggcaggtggatcacctgaggtcaggagttcgagaccagcctggccaacatggtgaaaccccgtctctactaaaaatacaaaaatcagccaggtgtggtggcacacacctataatcccagctactcaggaggctgaggcaggagaactgcttgaacccagtaagtggaggttacagtgacccaagattgtgccactgcagtctagtctgggtgacagagcaagactccgtctcaaaaaaaaaagaatgctctggcatatttgaaaatggttacttttccctttttttctctgatcttcactgtgagaacctggtaagcatcctataggcaaaattcataaaagtatagaagtcggccagtgacttggacccacttggaattttcttgctctcacatcatgcacactgaatctccagcaatttttcacttacagtttaggttttcctaccctactactggttctctcagaggtttctgcttattggtttctgttttgtaagttgtgattctctgtacctaactgcctgtctcccattttggggggcagtggtttgccctgtgacctcacttctctgacagatctaagaaaagttgtttatttttcagtgtgctctgctttttacttgttacgatgaagccaaccactttcagaatttctacaaaccagatcagaatctggaagtcctgtttttttattttttttatccctttgtttagcatgttacctatcttaacacattttaaataagtgaatgcatagcttatatctacttctaggttatatgcttccttagaataggaattgattcttaaaatgtcgttctgctcacgcctgtaattccagcactttgggaggccaaggcaggcggatcacttggggtcaggagttcaagaccagcctggtcaacatggtaaaaccctgtgcctgcaaaaaatacaaaaattagctgggcatggtggtggccatctgtaatcccagctactagggaagctaaggcatgagaatcacttgaacctgggaggtggaggttgcagtgagctgagatcgcgccactgcactccagcctgggtgacaagagcaaaactccatctcataaataaataaataaataaataaataaataataaaaataaaaaaataaaataaaacaaaaattttattctgagcagtctctgaagaatataaattctactgccttgcctttagaacttataacagcatctcgcaaactatcacaagatgctccaaacatacttcttatgtgctgaattaagaagtcaactcaaatttagtatactagtaatatttttggatatcccaaaacactgccagctcagctttaggctgcccttcttgggggggaaaaaagcagttgaaatttaggacttaagtgggcatctcgtttaatttttaatggatttctatgttgttggttatggtgaagaggtgaaaagaataaatattctgtgcagaaaaattattcagtcttcatgtgaaaacactttgtccatagcaattactttatgaaaaagatgtggtattactttctttgctcttaactgagacctttaatttaaagaacctatactttacaagtttttattttcaatgcatgaaaaatgtagcagctatttcacaacctttacttttaaaatccatttttctttttaatctcaaatagttttttcttaaaaccttttgactttttatctaaattgtaatagccagagcaccttcccacaactagaatatctcatcctttttgtcttttctttttcctctcaaaatgcctactgggaacttaatttggagtcagattcttcatgataaatctggacttaatcaaaattcctcatatggtatattgtatatatcacagtactggatagtcctctgattaaatagatatttgatagtactttaaggtctatacttttggatgaacttaactgctttctccatttgtagtctcttgaaaatacagaaatttcagaaataatttataagaatatcaaggattcaaatcatatcagcacaaacacctaaatacttgtttgctttgttaaacacatatcccattttctatcttgataaacattggtgtaaagtagttgaatcattcagtgggtataagcagcatattctcaatactatgtttcattaataattaatagagatatatgaacacataaaagattcaattataatcaccttgtggatctaaatttcagttgacttgtcatcttgatttctggagaccacaaggtaatgaaaaataattacaagagtcttccatctgttgcagtattaaaatggcgagtaagacaccctgaaaggaaatgttctattcatggtacaatgcaattacagctagcaccaaattcaacactgtttaactttcaacatattattttgatttatcttgatccaacattctcagggaggaggtgcattgaagttattagaaaacactgacttagatttagggtatgtcttaaaagcttatttgcgggaagtactctagccttattcaacagatcactgagaagcctggaaaaacaaatcccggaaactaattattatgtgccagttatataaacaagaagactttgttgggtacaaaccagtgattccttgcctttgaaaaatgtgtcagatatcatgcattaccagcagttcaatgatataaggaaaccagagtaatagctaaaacctttaaagctaaaccaaagatttacaaattgcctcttcatccagtctttcccaacctaaaaactgagttctctaaaaattttagtatttttttctgaagaaaagggaacatggacatttatctaatcctcattagaaatctgactaatgataacaaggatttagacctcaagcacttcttaccaaaattcttgatatgaccttatagcaaattactttcacctgttgaactttcctttcttttattcccctgtacctcacctgcactgggcatattcaagttgcttatacaacactttactattgtgttagaaaaatcatgacacatgatgaatgtgtttgtgcaacatgagctgattcataaatgaaaatgtgcattgaaattccacaatattttaaaattaggagtttatctagcaattgaacaaaattgattaaatccattatttgttagatcagctaaattacataagttcattcatctgctcataaatccatccattcttccatctggctatcccttagtcaattcaaataaatatttatggggcactttgggtaagccaggtgctaagaattcaatgcaaaacaagatagactcccctgtccttgttgaacttatatttttggtacaaacaaaagcaataatcaagaaaaaataaaaaaagtactgattgtgattaataatatgaagaaattcaacagagtattgtacttaacatttgattgatctgattttctcagttgtctgagaacaaacatttgtgaaaatctcattgtagagttcttacgatggatagggggtcaactgtgtcattattgcttatcagcttatcccaaagacctagtttattaccagattgcaaatagtgttcaataaattattcttattaagggttgttatgtactctaaaacatttattgtggtcccttcactggttctggtttacaaacttacttttctatgatgacatagtatagaaattgagagtgaatatttagaagttcatttttattatatatttttgaagtattgatatgtagtgaattagaaatttaaaaagaaaacaaaactgtccttcactacagattgaaaagcattatactaaaagaccatttgctcagttatagtatataaaggccaaatgacttaaaaacaaattatgtaaggagaaggaaacaaccatttattcagtgccactaactgtcagccagttttttcagtggtcagttaatgactgcagtagtgttctaccttgctcaaagcaccctcctcaagttctggcatctaagctgacatcagaacacagagttggggctctctgtgggtcacctctagcacttgatctcctcatgcagtgcatggtgctctcacgtctatgctatgttcttatggtctttaggtaacaagaataattttctttcttttccttactatacattttgctttctgaaattcccttctcgccaatccaggtgaatgtcagaatgtgatttgacaactgtccaaagtactcattcactgaggagtggtaaggccttcgcccaacctgccttctctgggaatatactgctgcctgaacatatcattgtttattgccaggcttgaacttcaccaaattaatttattagggtcaacatctaaatattagaactatttcagattaatttttaagtcgtatccactttgggtactagatcaaattgcaggtctctgcttctggcttgagcctatgtttagagatgatgtgcatgaagacactctttgcttttcctttatgcaaaatgggcattttcaatctttttgtcattagtaaaggtcagtgataaaggaagtctgcatcaggggtccaattccttatggccagtttctctattctgttccaaggttgtttgtctccatatatcaacattggtcaggattgaaagtgtgcaacaaggtttgaatgaataagtgaaaatcttccactggtgacaggataaaatattccaatggtttttattgaagtacaatactgaattatgtttatggcatggtacctatatgtcacagaagtgatcccatcacttttaccttataggtgggcctcttgggaagaactggatcagggaagagtactttgttatcagcttttttgagactactgaacactgaaggagaaatccagatcgatggtgtgtcttgggattcaataactttgcaacagtggaggaaagcctttggagtgataccacaggtgagcaaaaggacttagccagaaaaaaggcaactaaattatattttttactgctatttgatacttgtactcaagaaattcatattactctgcaaaatatatttgttatgcattgctgtcttttttctccagtgcagttttctcataggcagaaaagatgtctctaaaagtttggaattctcaaattctggttattgaaatgttcatagctttgatagtgtttttcagaagaccaaatttacagtgggagccttgggcttttgttttttaacagctcttttttgttcctgcttcagtggcctgacctccaagttagcaatcgccaggttgagaaatgctttgcgagacataacagatgctcctgaaataacaaacacttggaatcatgaggtagtggaattgaaaatagaaagtgtagtgattgttttttgttatttggatgggatgaacaatgtcagattagtctgtaactatttttttttaatgtcactctgatttggtcacaaaggatctctagtctcattgccttagtatcattctacgaattagaatgtgttactgtgtaagagcacttcttgtatatgagagaaatagcaacagttccagtttaaagtgatataaatggaaaccaagaaatgtctttactgggaccaaatctggacagcatttactgtatttttgctggtattttctctagtctttccgggtatattcacatttaatgatcacttttctccctttgtgctaatggacactgaatccattccactaccatagttcttgctaatactactctactttttacacaaaattaaaatgccaggagcacctccaggtagactgactataaatctagactgaaaaaaaagcttgtatttcttaacagattaccttgtggaacatttgctcctttcaactaatgaggcactaaatattgtaactgctcaactggtgcttttaatttatttgtctagactttgtcatgttgccagaagctttatcctggttggagttttgaaaacagtattgtttcttcagaaagaaaaaagggattgtcagatgatctaaaaataaagaaacactggaaatacaagtatcccaaggtgatagcattaggcaagataaaaatgttgaaaagcgaaaaagaactggttgatagagaagtgttgttattcagtagaacctaagtcttgtggtcccatttttaatgaaaaatggtgaattttttggtttttattgttcttgttcacacaaatctgcccattagaataagccaagccctaaaaattaatttcagtttcactgggaatcctttagtttatctactatgtagtagagaggttttgttttattgcatgtttgacgtaggaacgtatatatgcaagacatggaggaaaaccaagtgggccagagttttgaaaattctttatcttttctttctgccaaagtgagtctcccaagtttgtcttttttttttcatttccactcttctatggtttctagcattatataaaccaaacaaaaaaaatacgttcagagattccttcagaaatgctggatgatcttgatatcgatgcttttcatatatgtgtttatgatgctggtttctggggctggctctcagtatcacaaagatgtctgtaaacagaatatgctatttcttctttgtgacaaattttgaacattatgtgaatgtccaagaaagagcaaaagagggcaaacttctcatacatttttgatgtcgaaaccaagagacgcttttattttcctaacttttctttgaaagttcaaattaagtaattttatcctgtcctaaagtttaaaaagaaaaaaaaaaggaagaaggaattaaaaatccaaagaaaattatgtttgtttgcttttctgtttttttcttccttccaactccgagactttgcaagggcatagttctgaagatctctgacactgagacattagagatctctgtatcaatggatcatttgttttcagacatatgaaacaggaactttgaacaagaaatttcccctctttttctcatagtgatcctgagacatcagctgtggaatcacaacacgtcattagttttggcaggtccttgcaggtgttttgttttgttttattaatgttcttccctcctgtagctagacagcaatcttggagaatctgccagcttggaagactattgtgtaaatttcaaggtggagcctcctttaatttgttctgtgttacctgtgagctgtgaggtcatgaagaggagacaatgaggctaatcatgagagccccattggtttaggcaattagaacaacaagatctaaaatggtttattagccttgaattgtgttaagcacataattcataaaaaacagaaaaaatatttttaaatgtatgtctaaatcttcagttacaagtttgaaaggtgacaaactattctgaggaaatgattaggcctattcttgcaacgagtctttatgatctgaaaagaatctatgtccacacataactcccacctcaaagatggggcatcttttgctctgggagatatcaaatgcgaccaaaacaagtgtttgtagatttgaatgatgattcagcagtgtagcagttctcactcattttataataattaacaacttaataattaattattaaactcctacatgcttaacattataagtatgataacttctgtggttacataaaagatatacatagcacttgtccttgatctgtcacagtgaggtcccaatccaacctatgagcttcaaatgaaaagttcaaaattacactcattgtcataagtcagagatcaaaggaagaaaggatttaaccaaaatgataaattaaatataggtgattaaatatagtcatggttcaaggcatgggccagttagggagtgtgatgtgggtaattatgaaaggccagctcccaagccctgttgttgctactcccccacatcagtcatccttcctttttttctacttctactgcagtgccttcctcatcttttcccttgcatccctccattatatgagtcatacaaattagacttttcaaagcaacattaacattgtgtgaatttggggtttttgactaatcccaacattccacccccacattccagtcccacatgggatttggagccttgtttataaacctggcacttctaatatatcttatcttagagtaatccttgtatttgtttaatttccacttagcattgtaaatacttgcaggtatcctagttaagaaagcaaggtttaaacacaaaatcatcaccaattaaagcaggctagataaagaatgtaatagaaatgctagataaaacagattttttcttactaagttttctgtcccttatagagtgcataacacaataacttgcttgataagaattcaatgtacattgttttgtgctgaatcactaaatgcttgatttctgtaacaagagattgtggttccatcagtatctggattttagtctgtgtaatcttaggcaagttatttgatttctctgtgcctctgttttcttgtctgtaaaatgagtataatggtagtaactaattcattgtgtttttgtgaggattaaatgagttaataactagtactcctccctggcacatagtaagtacaatatgctgtgctgtggtggttgttattattttttatagttccttgagcaaaagaaataatgtccccatcttagtataatattggaggtatataccatagaagtgaacaaaagaatatagtttcacaaagaaagtgataattaaggcggttcataaagggtcataaagcttgtagattttagaaatgtgggggcatgaggatgtggagagggtattccaggatgccagacagggagattatggatgagtactaagatgagaactagaaaaagctgaggggcaaaaggtcagaggaggccacaagttagggagtattaggaaaaagaagttaatacttgacaagtgccaacatggcttcacgaggaatgggttgggcctttttgagtgaggaagaggctggtgaaagggtggtggaggacactgctgctgctgatggcatggggtgtaggtggcaggagaggcagggacatgagctaggaaactctccagctatgaagtgatgagtctggagtaatataaggacagtaggggtggagtgctgaacttaagggaggagagaaaaataattggtatggaagtaggtacaatgcaattttattatttctgagcctaaaaatgtgaaatttttgattatttggtcagaccagggaagtattttcttttatgctatctctgaaaatgtatacactaaaaagttgtagtataaaaaggttgtaaagcattaagtaattttagaggaaacaataatttggatattttacatgcaatcatttatatgcaaatatatgtaaatattacaaaattattctctatttgttacaaaccttaaatatttttgactgaggaatattttattcatctaattatagctactttgttctaactaatagatattcttgaaaacaaagcaacacttttttggagacagagtcttgcactgtcacctagacttgagtgtgttaccttgaactccagggctccagtgatcctcccacctcagtctcttgggtaggtggattacaggcccacactaccatgcccagctgtattagtccatcctttcattgctataaagaaataccggaaactgggtaatttataaagaaaataaatgtaactggctcacggttcttcaggctgtacgggaagcatagcagcatctgcttctgaggaggcctcaggaagttttcaatcatggtggaaggcaaataagaagcaggcatgttacacgacgaatcaggagcaagacaaagtgagggaggaggtgccacacactttgaaatgagcagatctcatgagaacagcgccaagaggatggtgctataccgttcatgagaaatccacccccatgatccagttacctcccaccaggccccgcctccaacactgggaattacaattcaacatgagatttgggcagagacacagatccaaaccataccaccagctaataccaaaaaaaaaaaaaaattttttttttaagacatggtcttactatgttctacaggctggtcttaaactcctggcctcaagtgatcctcccaccttggcctcccaaagcactgggaattcagacatgagtaacagtgcctggccaatacttatttttaaacattctctaccataaacttaggatcttgatttgttcacattgaacagatttttattatacagattgaatttataagaaaatgttgcagacattgtcaaaaagggacgtccaaaccactgtgatatttataagcatttgggccacattttgatagaactatacacggagtgtgtgtgtgtgtgtgtgtgtatatatatatacacacacacattatttatatatatgtatatatgtatatatatatatgtatttatatatatatgtgtatatgtatgtacacattatttacctacctactgtgtgagtgtgtgcatatatacacgcacacacacacacacaaatatatatatttcccttctgagacaaagccaaacagcactgtatgcttaaagaaaaacagtcacacttcccacttatgtaatttatattacatccagtcaccacaccagccaaactgctttattgttttttgtttgacatccaatgctaaagcataatgcctgttgcagtgaaatatacatgagcaaccctgagaactcaatatagcctcacgtgttgccactgagttgagttgaggagtcaagctgtagcaaaaaggtttgtcaccgggtgagtaatggtgctcttatttttctctgggtctcaagaagtgctctttatgacatatatggcattaaataaatatcagatatttgcacatcctaactttcctattggtgaagtttcttaaaagagagataaagggccattgtgtgattgatagtttcaggtatatttttgctgcacagtcagtccgagtgtaccacgtagggcaaaccacgtaacttctcagggccttgactgtttcatttgtaaaccagagaaaaggacttgggtgacctccaaagacctttcaaatttggagatgagtttgtggaaagttcaaacagtttagaaaacagaactaagacacccactggcacccctggaagcaagagagtgccaggtactatttgtaatacaggaatgaaatacctaattgtatgaaattgaattctaactgaaccagtttgttcagttaaattttttttttcaattagagtgcttacttcagtatctaacactagacagtaaactgtagacaaaagacctacagaatttctgaatggtatcaaattcaccacacttaaaactttgggatgtctaatttcaaccaacagctttctttcttcataatgttgaatatatgtgtatctattttagctaaatttaatatatatcaatatactttgatagatattttatataaactattagactatagtattatgagtaaaagacccaccatttcccaagcaattataaagaacgatcaaaattttaatgggttgttagtattatttctttaaagattgtgatactgataaatatttggccacattttaatagaattatacatgggatgtgtgtgtgtgtgtgtgtgtgtgtatatgtgtgtgtgtatatatatatggcagtagagatatatatatctacacacatctagatatatatatacatgtatatctatatatacacacatatatctgtgtgtatatatacatatgtatatatacctacatacatatgtacatatacatacatgcatatatctgtacatatatatatagtgtgtgtgtgtgtatatatatatatatatatatattttttttttcctgagccaaaacaaaatactaggttgtaatagctgttctttcagaaggaagaaaaacaacatgtgctgaactctgagtttgatgtttttgtattttacttcctattttcatatcagtccatttatttattcaggaagaatttattgagcatatattatgaacacagcttttgctaaggacagggtatgcagcagttatggcctagtaggagatatggatgttaaaaacaaaatgctcacaaatgcacatataatcttaatactcattgtaagctatgaaagcagagtgtgagtattatgagaccatatgttgggagattttatttggtattgaggatcaggaaagatacccctgaggaagtgatatttaatttgaaacctaaagaaagcagttggccatgggaagaaggtagggaatgagattcccaagcaataggaatccaatgtgtgaagaagctgagggagtgaaagaaagctagtgtggtggcaggaagaaagagaagagaatggagaagggcactaaatgagtcagagaagtaggaggggctaaaccatgtagggtcgtgtaggccatcttaaaggcctgagtgtagtggaaaacctttgaaggtttgttaaaaggtcaatgaaatgttctaatttctgttgtagtgaattgctttgattgctgaatgcgaatggatgggtagagatgcaagagtgaaagggaagaaatcaattaggaggctcttgccctgctccagataggactgataattaattttatttgggaagatcagggagaaagataagtcatgaatgactcccaagtttctggattgaagaaatgaaggtaccatacactgagatgggaaagcctaggggtagagtagctttgagaagaaaggtagcatttccccatttcataaaacatggaagaacaaagaggctggattcctgtttgtagacataccttccaggccagaactgcattactacaacatctttgcaagccacattgcctttcataactctgtgtcagtgttgatgccgtaacatctttggccttccccctaccatcctcccgcagtcctccatgataatgccattattccgtttcaaattgtgtgcttccattggatgtgtgagtctccttgaaagttataatgaggctgtagcccatatgaaatgcttcaactcaggtcctgcataggaagaggaagctaatctctccaggaactgagcctgtggctagagggatggataattgtttaaataaagaatatgctgctgagtactgatgggctctttatgtacccatttggctgctgctgcccaacctttaatctttcctgagctttaaataggaaggaaaaaatggtccacaaaggatttgagccattttgctgtggtgatgaggagcacgggtttagagacaaacactcctgtgtttgaattccagctcctactatctcctagctaagtgaccttggacaagtcacttaccttctccaacctgctgtttcttcatgtacgtaataggatttacctcatgaggttgacatgaagattgaaagaggtaacatatagaatgagcctgtcccaggacatggttcatgataagtctgccataaatgggagctatgtgtcccacccttttggaggagataactgttctgtagcaggtaatatattgtttgatacttggttaacccttacaattatcatttcctgttcttctcaataatgctagaaaccttttatttaaagaaccacaatataaaatgaaaaatatataaaaaaagcaaatggaaaaattctattggcaaggctttttaactttatatactaaataaatccaattgcttaaataatgaactgactcaagttctcagcactgcttcttgtttaattctctttagtttttcagaattctccaataatgacctttgtctactctcttcagtttattcagaaattacttttatttacatagaagtttggaagtggatacacaaacatatccctcacatatcttatgatcctatgagtcatatactcatctcttatattccctctgtaaagcaatgtaggtacctttcaggaaggtgatttttatgtaggttgagaaatatcagcatggaggtcctagctgacctctctagagagtttctgagacatttgacaacaactttttctttaagtcatcagttatgccccggggtatgaaatttctaacatgatcctcagtaaacttggctgccttgctgaggatactctccatctgcctgagagacacagacaccattaattgggaattgacttgacttgtgtggttccttgtggaccagatggccactaaatattctcatttcaaggcaattggtaaaaactacacttcaagaaatttcattcttaattccccttagtggatgttattaaccaaaggcaaaagaaaaaaagggtaaaaaaaatattctaaatgttaatatcaaaaatattattttcaattcaccccaggcacagagaactaagtattattattgctattgcaccggcattccccaatgagacagtgattttcttttaagacatttttaaataatataggcagaattaagtagacggtgatctggtaagtagatgtttcagggtaacagctgtgcaatgctccatgcagggaattagattgtcattttattccttaccaggaacatacattcagttaaacaattatttgacttctgctcttccactgatttctaagttgaggctctctcttgtgcctgtctgatcagataagtagagttgtgccttggtttatagatgagataaatgtgtatttgaataagcataagttaaagaaattttaaaatcccttaggaagctaggcttatcagagaaatccaaggaaatacattaacaaactaggaatttgttctaacaggttaattataactcataaacttattgggtttttttaccttttaattttatattacatttgcttataataaggaatattgctaggaataaaattttttaatattctacaattaacaattatctcaatttctttattctaaagacattgggattagaaaaatgttcacaagggactccaaatattgctgtagtatttgtttcttaaaagaatgatacaaagcagacatgataaaatattaaaatttgagagaacttgatggtaagtacatgggtgtttcttattttaaaataatttttctacttgaaatattttacaatacaataagggaaaaataaaaagttatttaagttattcatactttcttcttcttttcttttttgctatagaaagtatttattttttctggaacatttagaaaaaacttggatccctatgaacagtggagtgatcaagaaatatggaaagttgcagatgaggtaaggctgctaactgaaatgattttgaaaggggtaactcataccaacacaaatggctgatatagctgacatcattctacacactttgtgtgcatgtatgtgtgtgcacaactttaaaatggagtaccctaacatacctggagcaacaggtacttttgactggacctacccctaactgaaatgattttgaaagaggtaactcataccaacacaaatggttgatatggctaagatcattctacacactttgtgtgcatgtatttctgtgcacaacttcaaaatggagtaccctaaaatacctggcgcgacaagtacttttgactgagcctacttctctcctcactggtatggctccaaccatcaggccctatcttggtccatttaggctgctaaaataaaataccaaagactgagctgcttataagcaatctttggaggctgagaagtcaaagatcaaggtgccagcaggtttgctgtctcgtgagagcatacttcctggttcattgatggtgctttcttgctgtgtcctcacataatggaaagggcaagacctctctggtgtctcttttacaatggcactaatcccatcatgagggctttgttctcatgacctaatcacctcccacatgtcctacattctaatactatcaccttgggggttaggattttaacatatgaatttgaggaggtggcgggggggacacaaatatttagaccatagcatttcactcctgacctccaaagttcatgtcttcttcacatgcaaaatacattcattccatcccaatagcccccaaagtcttaacttgttccagcatcaacttacaaggctaaagtccaaggtttcatctaaatatcagctaaatcagcacaaacagctaaatcaggtagagtgggacttaaggtgtgattcctctttaggcagattgctctccaactatgaaattgtgaaatcaaacctattatgtactttcaaaataaaatggtgaaacaggcacaggctagacagtcccatttcaaaaaagagaaatagaaaagaaaaaaggagtgacaggtctctataagtctaaaactttaaggcttgagaataatttgctttgctttgcctccaggctcactggggtggtgtcttacctctggacacactggggtggaggctctatcctcatggatttgagtgtctcattctttgtggcaggtctgtgctccaatcccacacctatggctccctgagtgtgcaattgcatgcctggtggttctactggtctgggattgcataggtggcccagccttcatagctccactgggcattgccctaatgtgggctctatgtggtgacctcacccctgggcctctacctgggccctgtgactccctgggttcttgaaatctaggtggaggcagccatccccctacagttgtgctgagtgtagtgcatgagtgctggggtctgctagagctatacctagggtggtggagatgtatggcaatggagtatggggagctgatatggtttgggtgtgtccccacccaaatcttgtcttgaattataatttccataatctccatgtgttgagggagggacctggtgagaggtgactggatcatgggcatggttttcccatgctgttcatgtgatagtgagtgagttctcacgagatccaatggtttcataaggcagttttccctgctcttgcaccctctttcttgcctgtcaccatgtaagacataactctttcccttccgccatgattgtaagtttcctgaggccttcccagccatgtggaactgtgagtcaattaaacctcttttctttataaattacccagtctctttacagcaatgtgaaaatgtgctaatacaggagcaaagactgcagtgtgaggtggcaatgtgaagtctgcaatgtgaggtggcacggggcagttgtagcccctcctttgaaatctttcttccctaccccaggcctctgcactctgaactatgatgggaaaggcagcttggaagatctccaaatggctttggagtcattcttccattgtcttggactataaattctggcttctgtttaggtggctgactaatatccccactgtctgaatgcatagcacctagtttctgttgagatggctagtccatagtaatttacttatcaaatttggccacaccctttgtattctctcctgagcaggctttctcatctttcacaatatggataggctgagaattttccaaattttgaagttctgcttcccttttgatcaataattccattttaaagtcatttctcatcttgaattttactatgagcagtcaagagtaactaagctgctccttcaactttgcttggatatttcctcagtcaaacattcaatttcattgctttcaagttctgccttccacaaaacactaggacacaaacagctcagccaagttctttgacattttataagaaggatagcttttcctccattgtccaataacatgttcctcatttccatctgaaaacccatcagattggcctttaccgtccatatttctgggaacattctgctcatgaccacttaggtattcggtaagaagatagtagctttctctatagctctcctcctctctggagccctcaccagaatggcctttaattgtccattcacagcaatgtaggctttttctagcatgtacctgaaaactcttccagcctctactcattaccttgttccaaagctgcttccacattgagtatttgttacagcagtacccagatcccagtaccaatattctgtcttagtccattggggctactacacgatgtcttataaacaacagtaaaatttatttttcacagttgtggaggctgggaagttcaaaatctggtgccagcagattttgtgtctggtgaaggccttcttcctcacagatggctgtgttctcactgtgttgttacatggcagaagagtgggcaggctagctctctgggatgtcttttataagggcagtaatccaaatcatgggtttagggtagagccctcatgacctaaatcacctcccaaaggccccacctcctaataccagcatctttgaagttaggatttcaacatatgactttggcagggggacagaagctttcagtttatagcaaaccctataggtagcactactttgtcctttcctaatcaatttgcgtcaatgaaacatgaattagaagagacctaggcgactccactatactgggattattcccagtataaattatcatctctccacaccttctcatctactccctatctgagttctgaagctctccactacaagaaggaggctttggtttgacttgatatacttctctgggaaacaggtttagcataaaacagtgatgctcattctagaacacctgcaaatgacaatagttttctttcgaagtcgccaggaatcgtctgcctttgggtatgtggctgtgagcactgccgggcaaaatgccatatgacctagatgaggcatatgccatcctttgaagccattaggacattatataggaaatatattaactaaaatggaataaaattttctaaataacaccttatgtttatccaacaggtggttcattatacttgagagcattatacagaggaatttgatggggaggagagctggagaaattctcgaaattctgggtttctttaacagaatactctagctataaacttataattttaaaaaataagcattatattaaagaaaagggaacataaattattttgttttattaaacttaagtccaaaggtctggattgtggcagaataggatcaggggacctaaaatgttgagcctcaaaggtcttcttagagaacaactgtattccactattagcgcttttggtccttttagcccaatttctgtttatcccaaatgttcttcccttttctgccttccttcacagtggaccctgccaggagctttgaaatgcctgtgagtgttaaacacttacccattgagtgcccaaccttaacatgcccctaataaaatgtacttagattaaccgttttcattatcaaagtttccttattacccaacaaacacaggcgctttaaagaaaacattaactaaattgcaagtgacacattttaagatctttgatatgacttcagagaatgcactataggaacacaatgcaatgggagggaaacttgggagggaagacattagcctttataaaatctgcaagtattgccaaatcaaaataaaatttacaggaaagcaggatcataaatataatctaaaatcttagaacctgtggttatgattttaaatactaatacaatgcaaaatttttacctgtttaggtttttatttcatcagttcatatttaggtatatacttttactgttctccttttttataatttaccattcacaaagatgatgatgttagtctaactttaatgtcatgagtgctttgagtagtagtgctaagtttttgttgagtagtagtgtgcttttttgattagtagtgataggtttttgatgagtaagcctgctagcagcatacaaacaaacaagcaagtatcagcctagagaagcagaaaaggcatttgggtttcaaagtcacaaggcctaggctttagtctaatacagctgataatacaatttgtccaaacaggacatttttgggtgtgtcaaacactaaactggacaggacattatgacaaaagtgcaaagcaggactttccggggcaaaccaggatgtatgtcatctcactgagtcctctctttgtccttgccatgactagtatctctagaggtaaatgaacagagtaatgacaaatagccagacacctgaatcttatcccaacagcacctcctacataattccccattatcccaaatggaaattaaaaatatatacagtgataattccaggccaagaaatgctttatttctagcttggacttggcttccatgtccagtgtagaatcttatccttgctgatctggactgtatctcatgaagccatgacttgtacctagttactagctggaaggcttagaacaaaagctggtccagagagcctcctttttccttatttcctgggtccacacctttaccatggcagtctgcctatcatttgatggaggaatttaaagcaagtccaagggaagggaagagagtttctaaaatctagaacttggatagtttaatttacctatcccaaaacagcttaggcccagacagcttctctccaagattggtgccaaactgaaattaccagctgtgtagaccaaagagaatttcaaaagaaactgaatcccaagagaaaaaaaaaagacttctggcattgtggcccaataaattggtaggattgttgtgacttttcaagtttacatgtaaaatgggcccagcgcagtgcctggcaaatatgggtactaagtaaaagtaactataatcatgtttttttaatctggacttcacttggtcatcctttaaatggtgtctgacagaatcctagttcttgtctcactttacttagtttccctgggaaatttcatgtgtccttttggctttaattaatatctctattttgatgacctccattatctgcctattcccagagctttccacctgatatctcagcacatgaaaagcaccttatgtcaataagtgagttccttccctgccccaccacatacctgtcctgtgttcctaattccactgaatggcatcccatcctccagtttcccaaggccaagacctgggactcatctttcactctcaagttcctccacgggtacccacatgtcacatcctgtcaatgctgtccctggggagtatctgaaatatattcacttttcttcatttccacctgacaccactattaacacttgcacaaatttctgaggttcctggctcatttccctcattgacccccaatagttcattctgctctttgcagctctggtgatctttccaaaccccacatctgatcacttgtttcttcccttcatatggctccttaatgccttctggactaagtccacactgcttaaggtggcttaccaggtccttcatgattttgtctttgtttggctttctacactcactgcccaacttccccttacttcccatgattcagttatactgaatttctttggttctctaaagcacatgtgctttctgttctgcagaggcttttttgttcacttgctattctctacctgggaaactcccccagcccttcactgcctccttctaccatctttcaggcctctccttacacatcacttctttccaaaaatctgccttgacactccaggtctcggtttcctaggtgtaccctataactccacccctttcatagcatttctcactctggctggagatttaccttttaacttgtccatgtcccccactggagtggaagttcctggaggtcagggattatatcctattaattgttgtatttccagtgcctagagtagtcttgcatacatggatggtattcaataaatattggttgaatgaataaggagttctttcatttcatatgtaatagatcatggaaatagccttgtgattgatacacagcaggtattaccatcctcactttagaatgaggactcagagccttgagatgtctgagggccttgactgggacagctggcagatgcaggagcagagctgcatcacccctgtgggctatctcagggttgtctgtaatctaagtacaatgtctgttgattttggactgaaggctttttgggtaattgtttgctttttcaatacttataaaatagtttccatccttactcattgatagtaaggttagttattttagaaaacaagctaaatagcagaaatagtggccttttaagttgaaaatttaccctgaaaaatctacagagtagcaaacagagtatcaaaaggagttgactgtatctatttttataactgccacttatggattattcagtaaaaccacaattcacttttatgattttttttcatgtttctctgtcacaagagcaaactcttgctccataataacattccagaatacagcaatagcaaaagtcaacattttgaatcctttacaaactcttagacatttttttttttttagtttaacatgttacaaaacaaaatttcttcttttttcacagcagtttgggaagtacatactatttattagctcatcagcatgaagctggaaaattctttttcctaaagttctttatatctacaaactgttgatgttttcatttatttatttttaatgctacgttgtaatgaaaatcattggaaaactttagattctagtaattttgaagtcttcttagtttggacaggactgagctaaagtttgtactttttttaatttattgaaaaatggtttctaatgatagtattaacaagattatattgggggcaggacgcagtggctcacacttgtaatcctagcactttgggaggccgaggcggttggatcacctgaggtcaggagttcaagaccagcctggccaacatgtagaaatcccctctccactaaaatacaaaaattagctgggcatggtggcaggcactgtaatcccagctacttgggaggctgaggcaggagaattgtttgaacctgggagtcggaggttgcagtgagcccagatcgcaccactgcactccagcctgggcaatagagcaagattctgtctcaaaaaggaagaaagaaagattatattggggatatatatgtgtgtgtgtgtgtgtgtgtgtatatacacacacatatatatatacatatatacatatatatacatatttaaaggataaaggattctgctgccacagatcactaaatcagatgatctctagcaatttcctgtttgtttgttttttgcccatagtgcttatctctttgaacagtaattttccacttactatttttctccccttttggaccataatttcctttaaggcagagcctcctgttactcatctttgaatctggggtctgtcagagtacctagaatttaataaactctcattaagagccagttgaaagaatatatgactaagcagtcatttacatccaaaagatccgtaggagaattcttatcagcacatgtgattggtaacaataactttgtacttttcaaaaacaattactaatctatcttgctttccattatctcaccaaaacctattagcatgtctggcagaaaatagatacttaataaatttcttaaatgtttactgacttcaattttaagttttattaactatgttgacttttctctaatgaagatgattctaaaaagctttttactatacttcacagtgaataaaacagtgagataggaatattgcaaaatgtcccctgtgttggtcagtcttagtgtcattcattttaaaaattctgttctctaaatattgacagttatatataaatttatgtaattgtttacttctaataaagaatttcatctggggaaaaacatactttgctcagctctttgccacaagtgcaaagtctaagacagtcaaatagctttcctagtacggccttaggaacttagtatatgactggtgtgaatctagagggagcatactgcattctgaccaaaatctccaccctgttactatggccatcactaacttcgcagtattgcagtacttcctgctagcttagttcccaaggcaacttgtgaaggaaaatttttacaaagctgttgtcacacaaaggtagtgtttcagttcctgagcccatgtccttggagttgcccaggctccaataatactaataattactgtacattaggtacttaccatgtgccatattctgtgggagccgctttccacaaattatctctggtaatccttgtaacaaccctttgacatcaatattattattttctccatttttttacatatgagataaatgagacttaaaataatgtgcctgatatcatcagcaaatgagctgaggagggcagattcaaagctgattgtgtttgactctagagctgcagtcttaagccagaccttttcttgctggttaattttactgaaaaaaaaaaaaaaaaaaaaaaaccctcaaatactgctgattgatctaaagtactaacatttctatcagtgttagggaaattttaattttataatttgattttgtgagaaatttatagcatcttgaatactcacatgcaaagtgatatgtcttagataacattttacaatggcagagcttaagccagtgctcagtcattcattcatcctcaagttttgattcatttatcattcatcaaaactctgttttgtttggccacccacattctaggagctcagtacatatttgataaatgaatgaattgttgaggttgacagttacccaggactggcattaggaacacagagctgaagagcacgtttttaccctcaagaagcttacagtctaacgagggaacttgcacaaatactactatcactaggtgcctggttgaatggcttaagagatgatcagggatattcagaaggatatgtcaggctcagcaatggcatcacttgagagcatcaaggtgtttagggaactacaagatgtttggttctgctgggaataagagtgaagggggctccatttggatgcctcatacaccaggtgagagatcttagattttattccaccaggaggagaactaccataggatttaaaacagaaatgatatggtcaaacctacatcttaggaagatccctggggtgtttgtatggtggacttgcaatttgactaattgagatttgtaggatgattcttaagagatgatgatgacccagactgggatcactataatagagttggtaaggaggagaatgatttaaaaagtagttggaagaattctagggatggagataaacatttgaaaattattaacttataggtggtcatcaataccctgaaaatgactgggatctcagaggagagtctggagagttggaaatgacaaagactaatattcaagggggcaggaagagggagagttgttcacacatgacaataggaagaaatggccatagagtgtgtggtttctctcaagccaaggaatagatgttttaagaaaggaaaattcttgtggtgggaagcagtagagatgacagatacacattaatttcttgagatttctagatgactaaatgggcagatgttgaatgatagctaaaggagaacccagaaacaagggagggattttgtttttgttttttaaaaaagatagaccatagcagcttcatagactgaaacaataaaaaagttgaaggcacaaagaaagacacaggtcctctaactccctgcccagtgccctttattcatattctcagcacttgtatttctaagttttatgtttgagtcttcggggatacatcagagtagtcccccttgtctaataaatgtgtttacatttcctgccataccagaaacccttctcaaactttaatgaatttctacaaggtgagattactttaatgagaaaccaaccaaggaaaggagtatcatctgcaatatactttcaaatgttttttgcttgtttgtttcttgtccagctaaaaaaaaaaaaaaaaaacaagccattggtcctaacacaactttcatattctaccccaatatcaaagaggcttaaaatctcctggtcgtgtgatgggcacacagttaattttttgtgaacaaacacagtgttatgggccatttctgaatttatctctgaaatcataagattctttctgagccattatctcattctatattacagtcaggtggagcccatcttacctcctcatactaaattctagacttctcaagggcaggagacaatcatctgtatatctctttggccttcatacactcaggagtacttgccaaaaataaacatttaatgcacatttatttgaataattgataagatccaatacttcaataactttgtcatatttttatagaatgggtttctatatctcatttgcattttcaaactttacttttactgtctagctttaaaaaaaaagcctttgactctaatacagccctcatattctaccccaatatctaagaggctttatatctcctagtgttgtaccactattttaactccagtattttttacttcatagttttacctatttgttacagttagtttttatgaattcaagagatgaatagcaattttccatatgtaatttaaaaaaccccacagttgactattttatgctatcttttgtcctcagtcatgacagagtagaagatgggaggtagcaccaaggatgatgtcatacctccatcctttatgctacattctatcttctgtctacataagatgtcatactagagggcatatctgcaatgtatacatattatcttttccagcatgcattcagttgtgttggaataatttatgtacacctttataaacgctgagcctcacaagagccatgtgccacgtattgttttcttactactttttgggatacctggcacgtaatagacactcattgaaagtttcctaatgaatgaagtacaaagataaaacaagttatagactgattcttttgagctgtcaaggttgtaaatagacttttgctcaatcaattcaaatggtggcaggtagtgggggtagagggattggtatgaaaaacataagctttcagaactcctgtgtttatttttagaatgtcaactgcttgagtgtttttaactctgtggtatctgaactatcttctctaactgcaggttgggctcagatctgtgatagaacagtttcctgggaagcttgactttgtccttgtggatgggggctgtgtcctaagccatggccacaagcagttgatgtgcttggctagatctgttctcagtaaggcgaagatcttgctgcttgatgaacccagtgctcatttggatccagtgtgagtttcagatgttctgttacttaatagcacagtgggaacagaatcattatgcctgcttcatggtgacacatatttctattaggctgtcatgtctgcgtgtgggggtctcccccaagatatgaaataattgcccagtggaaatgagcataaatgcatatttccttgctaagagtcttgtgttttcttccgaagatagtttttagtttcatacaaactcttcccccttgtcaacacatgatgaagcttttaaatacatgggcctaatctgatccttatgatttgcctttgtatcccatttataccataagcatgtttatagccccaaataaagaagtactggtgattctacataatgaaaaatgtactcatttattaaagtttctttgaaatatttgtcctgtttatttatggatacttagagtctaccccatggttgaaaagctgattgtggctaacgctatatcaacattatgtgaaaagaacttaaagaaataagtaatttaaagagataatagaacaatagacatattatcaaggtaaatacagatcattactgttctgtgatattatgtgtggtattttctttcttttctagaacataccaaataattagaagaactctaaaacaagcatttgctgattgcacagtaattctctgtgaacacaggatagaagcaatgctggaatgccaacaatttttggtgagtctttataactttacttaagatctcattgcccttgtaattcttgataacaatctcacatgtgatagttcctgcaaattgcaacaatgtacaagttcttttcaaaaatatgtatcatacagccatccagctttactcaaaatagctgcacaagtttttcactttgatctgagccatgtggtgaggttgaaatatagtaaatctaaaatggcagcatattactaagttatgtttataaataggatatatatactttttgagccctttatttggggaccaagtcatacaaaatactctactgtttaagattttaaaaaaggtccctgtgattctttcaataactaaatgtcccatggatgtggtctgggacaggcctagttgtcttacagtctgatttatggtattaatgacaaagttgagaggcacatttcatttttctagccatgatttgggttcaggtagtacctttctcaaccaccttctcactgttcttaaaaaaactgtcacatggccaggcacagtggcttacatctgtaatcccaatactttgggaggctgaggtggggggattacttgaggccaggaattcaagaccagcccaggcaacatagtgaggccccatctgtctttattaaaacaaaacaaaactgtcacagcttctttcaagtgatgtttacaaattccctatggtttagtcacaaggaagttctgaggatgatgtatcacgtcatttctgttcaggcttttgagcctcctggaggtaaatggtttccttactgaaggcttgttattaccatgattatcactaagcttgaagtaacaaattaggggggcagactcacaacctcttgccctgccatggacaagttcaagaatctaagtaaagtcctctattgtctgatcttggatttgctcaacctgaacaagccaaggaggtgtattaaactcaggcacatcctgaccaatttggaattcttaagcttcagatcactgtggaagaggctcaactctttatggtgctgtagacttacgctcattttctaggtaatttataagggacctaatattttgttttcaaagcaacttcagttctactaaacctccctgaagaatcttccagctgctgagtagaaaatcacaactaatttcacagatggtagaacctccttagagcaaaaggacacagcagttaaatgtgacatacctgattgttcaaaatgcaaggctctggacattgcattctttgacttttattttcctttgagcctgtgccagtttctgtccctgctctggtctgacctgccttctgtcccagatctcactaacagccatttccctaggtcatagaagagaacaaagtgcggcagtacgattccatccagaaactgctgaacgagaggagcctcttccggcaagccatcagcccctccgacagggtgaagctctttccccaccggaactcaagcaagtgcaagtctaagccccagattgctgctctgaaagaggagacagaagaagaggtgcaagatacaaggctttagagagcagcataaatgttgacatgggacatttgctcatggaattggagctcgtgggacagtcacctcatggaattggagctcgtggaacagttacctctgcctcagaaaacaaggatgaattaagtttttttttaaaaaagaaacatttggtaaggggaattgaggacactgatatgggtcttgataaatggcttcctggcaatagtcaaattgtgtgaaaggtacttcaaatccttgaagatttaccacttgtgttttgcaagccagattttcctgaaaacccttgccatgtgctagtaattggaaaggcagctctaaatgtcaatcagcctagttgatcagcttattgtctagtgaaactcgttaatttgtagtgttggagaagaactgaaatcatacttcttagggttatgattaagtaatgataactggaaacttcagcggtttatataagcttgtattcctttttctctcctctccccatgatgtttagaaacacaactatattgtttgctaagcattccaactatctcatttccaagcaagtattagaataccacaggaaccacaagactgcacatcaaaatatgccccattcaacatctagtgagcagtcaggaaagagaacttccagatcctggaaatcagggttagtattgtccaggtctaccaaaaatctcaatatttcagataatcacaatacatcccttacctgggaaagggctgttataatctttcacaggggacaggatggttcccttgatgaagaagttgatatgccttttcccaactccagaaagtgacaagctcacagacctttgaactagagtttagctggaaaagtatgttagtgcaaattgtcacaggacagcccttctttccacagaagctccaggtagagggtgtgtaagtagataggccatgggcactgtgggtagacacacatgaagtccaagcatttagatgtataggttgatggtggtatgttttcaggctagatgtatgtacttcatgctgtctacactaagagagaatgagagacacactgaagaagcaccaatcatgaattagttttatatgcttctgttttataattttgtgaagcaaaattttttctctaggaaatatttattttaataatgtttcaaacatatataacaatgctgtattttaaaagaatgattatgaattacatttgtataaaataatttttatatttgaaatattgactttttatggcactagtatttctatgaaatattatgttaaaactgggacaggggagaacctagggtgatattaaccaggggccatgaatcaccttttggtctggagggaagccttggggctgatgcagttgttgcccacagctgtatgattcccagccagcacagcctcttagatgcagttctgaagaagatggtaccaccagtctgactgtttccatcaagggtacactgccttctcaactccaaactgactcttaagaagactgcattatatttattactgtaagaaaatatcacttgtcaataaaatccatacatttgtgtgaaactttgttgttttcagatgcgttcacttgtcatgtttcatcagtctctcactccaatttctaagcttcatggaacatgaaacacgaatctgtcttttagatatagcctcttttgagaattcacatgaattagaacacacatttttagttatctgtttaaactatggtaaaatatacataacataaaattttccattttaaccattttaaagttcagttcagtgtcattaggtacattcacatggttgtgcaaatatcaccatcatccttccacagaatttttttcttgcaaaactgaaactctttttacccgttagtcaataatcccgcatttatctttcctctaatgcctggcaaccaccattttactttctgtctctgattttgactactcgaaggacctaggagtgggatcatacagtatttgtatttttgtgcttatttcatctagcataatgtcttcaagcctcatccatgttgcaacatgggtcaattttcttccttcttaaggttgaataatattcattatagagtagtccccccttatccttggggaatatgttccaagacccccaatggatgcctgaaatcactgatagcactgaacctgattactgtgtttattcctatacatacacacatacatatgataacatttaatttataaattaagcacagtaatagattaacaacaataatcataaaatagaacaattataacaatatattatgacacgagcgatacaaatgtggtctctctctttctcaaaatatctcattatactgtgccacaggtaactgaaaccacagagagcaaaaccttggatagggggaccactctataaatatgtaccacatttttcctcacccattcatccatcactggctacttggtttgcttccactttttggatatagtgaataatgcttctataaatatgggtgtacaaatgtttcttcatgtccctgctttcattacttaggatatgtttgaagttatttttatttttaaatggaggcttatagaacacaaaagatttatattctgcaagtgtccatctatttcttttaaagcttattcaaaaagtggtagctatctcatagctcttggtaagttaaaaatcttcatcaacgaaaatactatttctgcgttggcacctgcatggattttctttgtccaaatccctctttttaattgatgaggcttctttagttcctttttttcttccttgttgagcttcttcatgaaatgtgcagttgctagcatgtggtggacggactgcagatccctactgaatgccaggccctccggccctgtgttctctttcttggagaggtttgttttcacacgtaaccccaagagggcagtctcagagcgtgttctagtctagttctttttttaaaattactaaactttattttttttagggcagttttaggttcccatcaaaattgaacaaaaagtatggagagttcacatataacttctccatacatgatagcctcccccattcaacatcccacactaaagtagtacatttgttacaactgtgaaagcaaatagaatttcaagaccccaagctcactatgccaaagggcaagttaagcttcagagctgaattactcaatattgccttccttttgttccctaacagccgtaacttcacaatcttgtgtgatagcctcatccataaaccaggttcccacaatgatagaaggccacatatctccccaaatgacctccctcacaattgtgcccaaggaaaatccttgtgagaccctatcttttaggatacatatccctcctataaaatagccctaaaactgagttatgttgaatttcaccctgatgatgtcaattaccagcttgtcttcataggcacaggacgcgggcaagaccagaaatcatcgtgctgtctaccctgcaatgaacacataattgacttttcctttactccctctttttacctataaaatttggatttactgaacactaaccaaagcctcccctgaatagaaccatttgcctcactgcctaccctctatcctcttttccttctccgtgtttgcactttactctttaaatattaaagttcccaaaccctctttggaaaagcacaggtcacagatgctcctctggcttgtgttcttcctgggtgcatctgcaaactttggctaaacaaacctctatcgattaagacacctgcctcagtcactttttccttaacacaaccaatgaacctacattgacacattattattgcccaaacacaatagtttatattagggttcattattggtattttacatttcatgggtttggacaaatgtgtaatgacaagttaactaccattacagtatcttacagggtagtttcactgcccaaaaaatactttgtgctctgcatattcattcccctttctcccctaacttttggcaaccactgacctttttattgtctccatagttttgcctttaccagaatgtcatctacttagaattacgcagtatgtggccttttcagattggcttctttcacttagtaatatgcatttaagtttcctccgtatcttttcatggcttgatagctcatttctttttagtgctgaattatattctattgtcagatgtaccacagtttattcattgacctactaaaggacatcttggttgcttcaacgttttggcaattttcaataaagctgctgaaacatctgtgtgtgggtttttgtgtaaatataagttttaatttctttgggtaagtaccaaggagttcaattgttggatcatatagtaaaagatgtttcgttttgtaagaaactgccaaactgtcttcaaagtggctgtaccattttgcagtcccaccagtaacgaatgggagttgtggttgctccttatcattgccagcatttggtgtcctcggcgttttagaatttggccattctaatagttttgtggtggtatctcattgttatttcaatttgcatttccctgatgacatgatgtggagtatgttttcatatgcttatttgccagctgtgtatcttttttggcaaggcatctgttaaggtctttggcccgtgttttgatcaggttgtgtcttgttgttgagttcctttactggatttcttttgttagcatggtataactttatccatccctttattaatctacctggggctttaaatttaactaggtttcttatagacatcatgtaagtcttgctttttgattcactctcacaatctttgttttttagctcttgacatttaaaatgattattgatataattggattaatatctaccatatttattcctgttttctgtttgtttcctttgttctttattcctatttttactttccccatttttttgcctttttaaattttattgagcattttacaggattctattttctcaccttcttaacatagcaattcttctttttttaaacttttttagtggttgccctacagtttgcaataaacatttacaagtgacctatgtgcctttaaataacaatattccatttcatatcagtgcaagtaccttaaattacaaatttctagcttctgtcccttttaccatttcaggtattcatttcatttatatattagcttatatatatccctacacttgatttttcctcatatgagattttctttcctctttcccatttaaaaaaataaaataaactattatagccacagactttctatttttatttgttttctgtattgaagtcttgattttggggctttacttgtccctgtctatgcccactcctatctgacacacactttcttaatttatttcctagttgtttcactttgtttatcttcattatgaggaaaaaaagccaaaacctgaaatgaatatgcttccttccagtaaccagggaccttccatggttgggaaattgttacctattcgagtgaaaggctaataaaacccccaaggtaaatattttagtacttcactaaagaaagaacctcaaatactatgtggaagacaatttaaaatgaggtttaaagagctcaatataaaaacctgtttgacctgttaaaacaggtgtggacaatcacaattccctatttaaaaatacagtgaaaaaacctacaaatgcaagacaaatacattggagcatgagaactccaaattgttaggttaggaattagaagctgttcccagtgtgtagagctaagagacccaagtcattgtcagttgacagggagccgggactcaatacctgtgtactttctcagagaaaggagaggtcttggcaaaattttgggtttatccttaattccatacaatgggaatattcaattgctctttaatcactcagtattgatagggacagggggcagagaaattctaggcagaaaagggcgggaccctggtgaaaccccaccctcaatccgaaaaacctgaaactgccaccgaaagtgagaacttctatccctgttttcccactcgaatgttgcctttttctaaactacccgtggcctgctccacccccatcctttgcctataaaaaccccagactcagttggtagatgggactataactggacattggagagaagtggcttgacttcagagcgacagcttgacagcatactttggagaagaatctgagaggagaaggcaagacttcaggggaagattacctatctgccctgtcccctgttcagctctatttcccactgaaagccactttcatcagcaataaaatccctcatttaccatccttcaattcgttcatgtgacctcattttttctggacgccagacaagagcttggaggccacgagtatggatacaaaaggctgtcacactggctgtttgcccttgctggtggagggcagctgcctcacatgaaaaggcaaagagctcactgagctgttaacacttaagccttccgcagacggcagagctgaaagagcactgcaacacaccctctgggcctcaggctctcaggcactcctacctggttgcgccgctgggcccgcacagagtttgctactgccggcacctgaaagcggttggctggttcctgcactcgctcgttctggttcctgcacttattcattcgcacgctccctcccacaaggggtagacggggcgggatgggtaaatgaggcacccctgtctcaagtcccgtgaaggcgtcagggaaataatctgcttcagtttctctagttgtaaaatggttaagaacattatgaaaggtggtcaacaactttataagtgaatatgctaatgctggccttaattctaaaatgctacttggatcaaaagttatgattcagttccaatacatcttctattcattgaagtacagaatctgtacacaaagtacaattgtatcttcaaaaactgccaccttgtggagatttggttttattgttaagacagccagtgccaacaacagaaatgagtacagagcctcacatactaatgtaagtgaatctcaaagacattttatctttaagccattttgaaaagtagaaattaagcctgaatagttttggggcacaaattgctctttaactctcttctttcccattcacctttgtcactgatggaataatagaaggagcaatctttatcagcaatggcagatgtgctgataaatgaaaccaaaactgaattgacaaatattgacacaaatacttatagaagcaatttaaaaatctaccttgcaattaatccttatgaaatttaagtcataatttactaaaaattataatataaagaaataaactttctctgttttattaaaagaaaggatcaatacatttggccacaattgattggccataatttttgtcaatgttctataagctaattgaaaataagactattttaaatataattatctcccttctcctttgccttttcattggcagcaggtgccatgggcttattcatattctaaaagagaagttgtgtgagcaaatttgtcatcataggcaatcctcttgtaaggaaaaaattatgatttgatttttattttctcttatctcctaattgggtcagatactccagtgtcctcggggagccaaaccaggagccagtgtgtccttacacaaacacagcttccttcctgcttggagctcacaccaagcatttgcatttgaaccaagcaatgttgacaggctattgagccacagaagttaaacattccaagtgagcctgagacgaccattacattcttttacattttctggtcgattaaaattttaattgtttaaaatttcaaatagatacaaaaatagacatagagtataataaacttcacacccctgtcactgaacttcaatagttatcagctcacagtcaatcttatttcatctatgctccctcatgcttccctcctatattattttgtgcaaatccaaacagcatataactttagctctatgtgtctctaaaagacacggctttctctatcattctttttcttttgaaactgatccatattacctttaccagaactagaaaaacagtcatctttaatatcctcaaatattcactccatgtataaacgtcattgtcagttttttcccaaatataggtagtcctcatgttgcacattaatatggcactatgaaaatcaccatgcaagataatttaaataattaatgggggaaaaattgttccatgacctttaaaaatattaaaaatttaaaactttcttactgttggttataaacaatagggacacaaaaatagtgaaacatttagtaagtaatttaaaacattagaaacactgagaattaaaatgtttcttttaaactacttatcaagagtagtttgagcaatacttggtttcttttggttatgtaacttgcaatatgaagaaagcatcttttctatgcctgggcaagttgtcatactcctttctaatttaggaccagcttccaacattgtatccttcgtgacttcaatgttgtaaaatatctccaagagtttgtttaaggtaatgatttttgctgatgtcacctcctctggggcatctgacaggcattcctgctaggtcaacctatagcagagggtggaagggcccagagatggcaagagagaaaaggggggaaccttttagaggtgattaggctatgagggctctgctttcatgaatggattaatgccattacggcagtgagttcattataaaaggacaagtttggcccccttctctctctttcttgctctcttttggcccttttgccttctgccatgggatgacacagcacaaaaaccctcaccagatgctgaccccttgatactggacttcccagcctccagaactgtaagccaacaaatgtgtgttctttataaattaccccagctgtggcattctgttatagcagtacaaaatagatcaagacaaagggggattgcaggcaggaagggagcccctgacctcttagtttcactcatctggaatttagccactacaacacagagctggggcttgaggggataagaaatgctattgacctgcacttcccagggtgatagtacagttacaggctgtaaactcaagggagagggaatgccatcatcttggccacatcagcctggagtagagcttctatcacaccaagttgggggagggaagagggagcagcttgtgactgaagtgccataaacttttgttcttactgagattagtatattttctggaataaacgctgctgcttttgctgtatgtgcttagggccattttcagagactttaaatgattgataattgttaccagtaatggttattttgatgggtagttggtccacagagctcctcaccttgctgttctagaaattgtcttttagcttagtattaattcctgaatttttcagtttttctgatcttttacctccaggatgactctttgaaacaactctaaattattgactgaaacttttatgtataattctcattttgttcttcacacaatctctgtgaaggaggttctaagaactaagaggcttagagagggtaaggatcttcccagaaattacacagcactcccagatttggaacctttagaaagtttatatacttattggaaaacttagctcatttttaatcagagggaagtcattttacagtgccccatacagggagtcagataactacttcctagttaggttttcctctctatagagagtcaaccagccctgctgtactttcccgtgggatctgaaactgcagaaatctactgagaaaaacagaatgctcacagcaggataaagctcatgttttctagagctactaagattcaggcttatgcctctgtgtttgattttttaatagtcttgctaatgtcaaagtgattctatcttacacaccccaaagtctgtaaaggtataataacaaggggtgagattgtcttaaatctgcagtttcttgatctgtttagtgggctactataggttactgcaggacctctcaaggtttctagtatgcaaaggtgcattttgactctgtaagagtggaatatcatatgtaatgtttctcaattgatttgtctacataaccgtattttcttgtgccatttatatcctgtgttttggggaaggttggcctagaacatttattctaaaaggaaagggcatgggaaattcttaccattggcagtgtcggggaggaaaaaatgcatacttcttacccatttagtttattttgctagtttacaaattaaattgagataagacagattaataggagaaaatcaactttaattatgtgtgtatacatgggagtcccacaaaaatgtaagactcaaggaagcagccagatgattgagacctatatattatcctgagctacagaaagggataagggtttggggcttttgcggggttgtggaggcaaattttgggaaggcgaggagaggaaatgtatgatcaataaatgttgccttgttgtgcagataaaagtgtcttaggtgataaagatgtttccaaagagtagttctcttcatggtacagatattttactcatgatcatttcctttatagatataaatttcctttacgaaagggggaattttattttatgtagttagtggagaagtcggtaaagagcttttcctgtattggctgattctcagttttttttagctcaaaatgatcaatatgccgaagtggcatgttctgaaatgacatattctgaatcctttcagctggaatatatttgtatatcaacagtgtttccatctgtcagcccttagggtctgcttatggaagatataagcacctggatgaccatgacgaaaatctggagattttgagaaaacactggtgcaaggctccatccaaaatcaattaaagaagaatcttggaagatggggttaggtcactgatagcttgaaaggcatcccaggtgattctaatacgcagccagttgagaagcacggatttttttattgggtttttcaggctggctgaaagaactgcgatgctcaggaaaccaggggtgcctggcaggagtttgaccggggagactgaagcctgtcaacagggacaagaacggtaggctggtgcctggcacctgagggtacttcagaggtgctcattaaaaaagaggaggggacatcaagcgagaattcttaatcagacattcaacaaattgagggtcgtctatgtgttctaggtgctaagaactcggcagcaaacaaggcaaagttctcagtgtcatggagtttacattctagtggatgaggacaaaagtaagtaaatgttaaaaatatatagcagatggtaactaaagagacaaagcagagaattaggttatttgctgtaacatcatcaaaaagtcattagtatggtggcaattgagcagaaacatgaaggaagtgaggaagtcagctgtgtgggtgtcttgaacagtgtttgaagcaaagggaagagcaaatgtaaaggcagaatcatggctgggatgttggaggagcagcaaggaagtgctgtgaatcttggggaaaaagaggtttagatgatatgggcctctgtaagagccctggcttttactttaagtcataagggaaaacttcggagttttgagtgaagagtgatgtgattggaggcacattatagcagggtgactctgatgctgtactgacaccagactgaaaagtgtagagcatggaagcagggagaccagttaggagtctattgtaatagtcctggtgagagaccacagcggcttggactaagatggcaactaaggtatatctgagaggtggtcagactctgcatttatcttgggaacagaagcatccagatttgctgatgaattgtatatactgtaggagaaggagaggactcaaggatgatgtgaaagatttcagtctgaggagttttaaggatgagactgggaagaatgaaggagaagttggtgggatgggaaggatttagggcattttagacattaagtttgagacatcttggtggaatgacaagcaagcagttgaatctgagtctgaagttcaggaaaaagattcagagtggagacagaattataaaagttatcaaaatggagattgtatttaacacgagtgtgaactagattcttgttacttgcaccatcaacatcacctgggagcttgttagaactgaagactctcagaccctacctcggaactgctgagtcagtatcaggatattgtcacgatcccaggtgatctgtaggtactttagagtttgaggattcctagattagatcatctagggtatgaatgaatgtagaagagaaagactgagaacctgagacaatctatctctggaggccttggaaaagagctggagactgagatgatataggaaaggggaatttagagagaatagtgttcaaatccaagttaagaatgtgtttcaagaaagagggagttaaatgcgtaggtcaattaaaatgaggaatgctagtttaccactggatatagaaatatgaatgtcatttgttacttctataagagcattttaataggattcaagatattgggaagagaaatgttagagactgaggatagaccttcatgagttttttctaaaggaaaggagagaaaggggaggtaagtggatgggaaactcaaggcaggtaaaagttctgggcacggtggctcatgtctataatcctagcactttgggaggcttgggagaattgctagcacccaggaatttgagaccccatttctacaaactgaaaaaaaaattagccaggcatgatggcatgtgcctgtggtcccagctactcaggaggctgtggtgggaggattgcttaagccccggtggttgaggttgcagcaagctctgatcacgacactgcactccagcctgggaaatggagtgagaccccatctcaaaacacaaaaaaggtgagagaagtaacatcctactggcatagtggatatatagataacaaattaaggggtggggcatttggtggagctgggggtatgtggaggccaaagcaactctgtcttggaggctaattcacaattttgacttctgattaaccccttttctgggaatgcctctaagatttctattttatctactgttccttgtgtaagagcatgtacttaccataaatcctgcccttaatcaattgttctatacatcccttctgaagcacatatatatcctttccctatggtgtataagcccggggtatggaaagtaagagtgtggagatccagcatcttgtctcactgccactgagatacagacatggcttctgtttttaagtctctattaaatgtttctttccaagaaactggatacatcagcctcttccttcagcttcagcttctaagtttgggtatatccgcccacagcagaacaggggagaattgagagtcattccaggataccctgaatagttgagagggaaggaacgcttggaacaagagaagggatcacctttagtaaggaggatggaaagtcactcctagaagtaggagaaaaggtagcttggtagatgtggggataga

SEQ ID NO: 815176 - DNA, 212702 bp, Homo sapiens
tctatccccacatctaccaagctaccttttctcctacttctaggagtgactttccatcctccttactaaaggtgatcccttctcttgttccaagcgttccttccctctcaactattcagggtatcctggaatgactctcaattctcccctgttctgctgtgggcggatatacccaaacttagaagctgaagctgaaggaagaggctgatgtatccagtttcttggaaagaaacatttaatagagacttaaaaacagaagccatgtctgtatctcagtggcagtgagacaagatgctggatctccacactcttactttccataccccgggcttatacaccatagggaaaggatatatatgtgcttcagaagggatgtatagaacaattgattaagggcaggatttatggtaagtacatgctcttacacaaggaacagtagataaaatagaaatcttagaggcattcccagaaaaggggttaatcagaagtcaaaattgtgaattagcctccaagacagagttgctttggcctccacatacccccagctccaccaaatgccccaccccttaatttgttatctatatatccactatgccagtaggatgttacttctctcaccttttttgtgttttgagatggggtctcactccatttcccaggctggagtgcagtgtcgtgatcagagcttgctgcaacctcaaccaccggggcttaagcaatcctcccaccacagcctcctgagtagctgggaccacaggcacatgccatcatgcctggctaatttttttttcagtttgtagaaatggggtctcaaattcctgggtgctagcaattctcccaagcctcccaaagtgctaggattatagacatgagccaccgtgcccagaacttttacctgccttgagtttcccatccacttacctcccctttctctcctttcctttagaaaaaactcatgaaggtctatcctcagtctctaacatttctcttcccaatatcttgaatcctattaaaatgctcttatagaagtaacaaatgacattcatatttctatatccagtggtaaactagcattcctcattttaattgacctacgcatttaactccctctttcttgaaacacattcttaacttggatttgaacactattctctctaaattcccctttcctatatcatctcagtctccagctcttttccaaggcctccagagatagattgtctcaggttctcagtctttctcttctacattcattcataccctagatgatctaatctaggaatcctcaaactctaaagtacctacagatcacctgggatcgtgacaatatcctgatactgactcagcagttccgaggtagggtctgagagtcttcagttctaacaagctcccaggtgatgttgatggtgcaagtaacaagaatctagttcacactcgtgttaaatacaatctccattttgataacttttataattctgtctccactctgaatctttttcctgaacttcagactcagattcaactgcttgcttgtcattccaccaagatgtctcaaacttaatgtctaaaatgccctaaatccttcccatcccaccaacttctccttcattcttcccagtctcatccttaaaactcctcagactgaaatctttcacatcatccttgagtcctctccttctcctacagtatatacaattcatcagcaaatctggatgcttctgttcccaagataaatgcagagtctgaccacctctcagatataccttagttgccatcttagtccaagccgctgtggtctctcaccaggactattacaatagactcctaactggtctccctgcttccatgctctacacttttcagtctggtgtcagtacagcatcagagtcaccctgctataatgtgcctccaatcacatcactcttcactcaaaactccgaagttttcccttatgacttaaagtaaaagccagggctcttacagaggcccatatcatctaaacctctttttccccaagattcacagcacttccttgctgctcctccaacatcccagccatgattctgcctttacatttgctcttccctttgcttcaaacactgttcaagacacccacacagctgacttcctcacttccttcatgtttctgctcaattgccaccatactaatgactttttgatgatgttacagcaaataacctaattctctgctttgtctctttagttaccatctgctatatatttttaacatttacttacttttgtcctcatccactagaatgtaaactccatgacactgagaactttgccttgtttgctgccgagttcttagcacctagaacacatagacgaccctcaatttgttgaatgtctgattaagaattctcgcttgatgtcccctcctcttttttaatgagcacctctgaagtaccctcaggtgccaggcaccagcctaccgttcttgtccctgttgacaggcttcagtctccccggtcaaactcctgccaggcacccctggtttcctgagcatcgcagttctttcagccagcctgaaaaacccaataaaaaaatccgtgcttctcaactggctgcgtattagaatcacctgggatgcctttcaagctatcagtgacctaaccccatcttccaagattcttctttaattgattttggatggagccttgcaccagtgttttctcaaaatctccagattttcgtcatggtcatccaggtgcttatatcttccataagcagaccctaagggctgacagatggaaacactgttgatatacaaatatattccagctgaaaggattcagaatatgtcatttcagaacatgccacttcggcatattgatcattttgagctaaaaaaaactgagaatcagccaatacaggaaaagctctttaccgacttctccactaactacataaaataaaattccccctttcgtaaaggaaatttatatctataaaggaaatgatcatgagtaaaatatctgtaccatgaagagaactactctttggaaacatctttatcacctaagacacttttatctgcacaacaaggcaacatttattgatcatacatttcctctcctcgccttcccaaaatttgcctccacaaccccgcaaaagccccaaacccttatccctttctgtagctcaggataatatataggtctcaatcatctggctgcttccttgagtcttacatttttgtgggactcccatgtatacacacataattaaagttgattttctcctattaatctgtcttatctcaatttaatttgtaaactagcaaaataaactaaatgggtaagaagtatgcattttttcctccccgacactgccaatggtaagaatttcccatgccctttccttttagaataaatgttctaggccaaccttccccaaaacacaggatataaatggcacaagaaaatacggttatgtagacaaatcaattgagaaacattacatatgatattccactcttacagagtcaaaatgcacctttgcatactagaaaccttgagaggtcctgcagtaacctatagtagcccactaaacagatcaagaaactgcagatttaagacaatctcaccccttgttattatacctttacagactttggggtgtgtaagatagaatcactttgacattagcaagactattaaaaaatcaaacacagaggcataagcctgaatcttagtagctctagaaaacatgagctttatcctgctgtgagcattctgtttttctcagtagatttctgcagtttcagatcccacgggaaagtacagcagggctggttgactctctatagagaggaaaacctaactaggaagtagttatctgactccctgtatggggcactgtaaaatgacttccctctgattaaaaatgagctaagttttccaataagtatataaactttctaaaggttccaaatctgggagtgctgtgtaatttctgggaagatccttaccctctctaagcctcttagttcttagaacctccttcacagagattgtgtgaagaacaaaatgagaattatacataaaagtttcagtcaataatttagagttgtttcaaagagtcatcctggaggtaaaagatcagaaaaactgaaaaattcaggaattaatactaagctaaaagacaatttctagaacagcaaggtgaggagctctgtggaccaactacccatcaaaataaccattactggtaacaattatcaatcatttaaagtctctgaaaatggccctaagcacatacagcaaaagcagcagcgtttattccagaaaatatactaatctcagtaagaacaaaagtttatggcacttcagtcacaagctgctccctcttccctcccccaacttggtgtgatagaagctctactccaggctgatgtggccaagatgatggcattccctctcccttgagtttacagcctgtaactgtactatcaccctgggaagtgcaggtcaatagcatttcttatcccctcaagccccagctctgtgttgtagtggctaaattccagatgagtgaaactaagaggtcaggggctcccttcctgcctgcaatccccctttgtcttgatctattttgtactgctataacagaatgccacagctggggtaatttataaagaacacacatttgttggcttacagttctggaggctgggaagtccagtatcaaggggtcagcatctggtgagggtttttgtgctgtgtcatcccatggcagaaggcaaaagggccaaaagagagcaagaaagagagagaagggggccaaacttgtccttttataatgaactcactgccgtaatggcattaatccattcatgaaagcagagccctcatagcctaatcacctctaaaaggttccccccttttctctcttgccatctctgggcccttccaccctctgctataggttgacctagcaggaatgcctgtcagatgccccagaggaggtgacatcagcaaaaatcattaccttaaacaaactcttggagatattttacaacattgaagtcacgaaggatacaatgttggaagctggtcctaaattagaaaggagtatgacaacttgcccaggcatagaaaagatgctttcttcatattgcaagttacataaccaaaagaaaccaagtattgctcaaactactcttgataagtagtttaaaagaaacattttaattctcagtgtttctaatgttttaaattacttactaaatgtttcactatttttgtgtccctattgtttataaccaacagtaagaaagttttaaatttttaatatttttaaaggtcatggaacaatttttcccccattaattatttaaattatcttgcatggtgattttcatagtgccatattaatgtgcaacatgaggactacctatatttgggaaaaaactgacaatgacgtttatacatggagtgaatatttgaggatattaaagatgactgtttttctagttctggtaaaggtaatatggatcagtttcaaaagaaaaagaatgatagagaaagccgtgtcttttagagacacatagagctaaagttatatgctgtttggatttgcacaaaataatataggagggaagcatgagggagcatagatgaaataagattgactgtgagctgataactattgaagttcagtgacaggggtgtgaagtttattatactctatgtctatttttgtatctatttgaaattttaaacaattaaaattttaatcgaccagaaaatgtaaaagaatgtaatggtcgtctcaggctcacttggaatgtttaacttctgtggctcaatagcctgtcaacattgcttggttcaaatgcaaatgcttggtgtgagctccaagcaggaaggaagctgtgtttgtgtaaggacacactggctcctggtttggctccccgaggacactggagtatctgacccaattaggagataagagaaaataaaaatcaaatcataattttttccttacaagaggattgcctatgatgacaaatttgctcacacaacttctcttttagaatatgaataagcccatggcacctgctgccaatgaaaaggcaaaggagaagggagataattatatttaaaatagtcttattttcaattagcttatagaacattgacaaaaattatggccaatcaattgtggccaaatgtattgatcctttcttttaataaaacagagaaagtttatttctttatattataatttttagtaaattatgacttaaatttcataaggattaattgcaaggtagatttttaaattgcttctataagtatttgtgtcaatatttgtcaattcagttttggtttcatttatcagcacatctgccattgctgataaagattgctccttctattattccatcagtgacaaaggtgaatgggaaagaagagagttaaagagcaatttgtgccccaaaactattcaggcttaatttctacttttcaaaatggcttaaagataaaatgtctttgagattcacttacattagtatgtgaggctctgtactcatttctgttgttggcactggctgtcttaacaataaaaccaaatctccacaaggtggcagtttttgaagatacaattgtactttgtgtacagattctgtacttcaatgaatagaagatgtattggaactgaatcataacttttgatccaagtagcattttagaattaaggccagcattagcatattcacttataaagttgttgaccacctttcataatgttcttaaccattttacaactagagaaactgaagcagattatttccctgacgccttcacgggacttgagacaggggtgcctcatttacccatcccgccccgtctaccccttgtgggagggagcgtgcgaatgaataagtgcaggaaccagaacgagcgagtgcaggaaccagccaaccgctttcaggtgccggcagtagcaaactctgtgcgggcccagcggcgcaaccaggtaggagtgcctgagagcctgaggcccagagggtgtgttgcagtgctctttcagctctgccgtctgcggaaggcttaagtgttaacagctcagtgagctctttgccttttcatgtgaggcagctgccctccaccagcaagggcaaacagccagtgtgacagccttttgtatccatactcgtggcctccaagctcttgtctggcgtccagaaaaaatgaggtcacatgaacgaattgaaggatggtaaatgagggattttattgctgatgaaagtggctttcagtgggaaatagagctgaacaggggacagggcagataggtaatcttcccctgaagtcttgccttctcctctcagattcttctccaaagtatgctgtcaagctgtcgctctgaagtcaagccacttctctccaatgtccagttatagtcccatctaccaactgagtctggggtttttataggcaaaggatgggggtggagcaggccacgggtagtttagaaaaaggcaacattcgagtgggaaaacagggatagaagttctcactttcggtggcagtttcaggtttttcggattgagggtggggtttcaccagggtcccgcccttttctgcctagaatttctctgccccctgtccctatcaatactgagtgattaaagagcaattgaatattcccattgtatggaattaaggataaacccaaaattttgccaagacctctcctttctctgagaaagtacacaggtattgagtcccggctccctgtcaactgacaatgacttgggtctcttagctctacacactgggaacagcttctaattcctaacctaacaatttggagttctcatgctccaatgtatttgtcttgcatttgtaggttttttcactgtatttttaaatagggaattgtgattgtccacacctgttttaacaggtcaaacaggtttttatattgagctctttaaacctcattttaaattgtcttccacatagtatttgaggttctttctttagtgaagtactaaaatatttaccttgggggttttattagcctttcactcgaataggtaacaatttcccaaccatggaaggtccctggttactggaaggaagcatattcatttcaggttttggctttttttcctcataatgaagataaacaaagtgaaacaactaggaaataaattaagaaagtgtgtgtcagataggagtgggcatagacagggacaagtaaagccccaaaatcaagacttcaatacagaaaacaaataaaaatagaaagtctgtggctataatagtttattttatttttttaaatgggaaagaggaaagaaaatctcatatgaggaaaaatcaagtgtagggatatatataagctaatatataaatgaaatgaatacctgaaatggtaaaagggacagaagctagaaatttgtaatttaaggtacttgcactgatatgaaatggaatattgttatttaaaggcacataggtcacttgtaaatgtttattgcaaactgtagggcaaccactaaaaaagtttaaaaaaagaagaattgctatgttaagaaggtgagaaaatagaatcctgtaaaatgctcaataaaatttaaaaaggcaaaaaaatggggaaagtaaaaataggaataaagaacaaaggaaacaaacagaaaacaggaataaatatggtagatattaatccaattatatcaataatcattttaaatgtcaagagctaaaaaacaaagattgtgagagtgaatcaaaaagcaagacttacatgatgtctataagaaacctagttaaatttaaagccccaggtagattaataaagggatggataaagttataccatgctaacaaaagaaatccagtaaaggaactcaacaacaagacacaacctgatcaaaacacgggccaaagaccttaacagatgccttgccaaaaaagatacacagctggcaaataagcatatgaaaacatactccacatcatgtcatcagggaaatgcaaattgaaataacaatgagataccaccacaaaactattagaatggccaaattctaaaacgccgaggacaccaaatgctggcaatgataaggagcaaccacaactcccattcgttactggtgggactgcaaaatggtacagccactttgaagacagtttggcagtttcttacaaaacgaaacatcttttactatatgatccaacaattgaactccttggtacttacccaaagaaattaaaacttatatttacacaaaaacccacacacagatgtttcagcagctttattgaaaattgccaaaacgttgaagcaaccaagatgtcctttagtaggtcaatgaataaactgtggtacatctgacaatagaatataattcagcactaaaaagaaatgagctatcaagccatgaaaagatacggaggaaacttaaatgcatattactaagtgaaagaagccaatctgaaaaggccacatactgcgtaattctaagtagatgacattctggtaaaggcaaaactatggagacaataaaaaggtcagtggttgccaaaagttaggggagaaaggggaatgaatatgcagagcacaaagtattttttgggcagtgaaactaccctgtaagatactgtaatggtagttaacttgtcattacacatttgtccaaacccatgaaatgtaaaataccaataatgaaccctaatataaactattgtgtttgggcaataataatgtgtcaatgtaggttcattggttgtgttaaggaaaaagtgactgaggcaggtgtcttaatcgatagaggtttgtttagccaaagtttgcagatgcacccaggaagaacacaagccagaggagcatctgtgacctgtgcttttccaaagagggtttgggaactttaatatttaaagagtaaagtgcaaacacggagaaggaaaagaggatagagggtaggcagtgaggcaaatggttctattcaggggaggctttggttagtgttcagtaaatccaaattttataggtaaaaagagggagtaaaggaaaagtcaattatgtgttcattgcagggtagacagcacgatgatttctggtcttgcccgcgtcctgtgcctatgaagacaagctggtaattgacatcatcagggtgaaattcaacataactcagttttagggctattttataggagggatatgtatcctaaaagatagggtctcacaaggattttccttgggcacaattgtgagggaggtcatttggggagatatgtggccttctatcattgtgggaacctggtttatggatgaggctatcacacaagattgtgaagttacggctgttagggaacaaaaggaaggcaatattgagtaattcagctctgaagcttaacttgccctttggcatagtgagcttggggtcttgaaattctatttgctttcacagttgtaacaaatgtactactttagtgtgggatgttgaatgggggaggctatcatgtatggagaagttatatgtgaactctccatactttttgttcaattttgatgggaacctaaaactgccctaaaaaaaataaagtttagtaattttaaaaaaagaactagactagaacacgctctgagactgccctcttggggttacgtgtgaaaacaaacctctccaagaaagagaacacagggccggagggcctggcattcagtagggatctgcagtccgtccaccacatgctagcaactgcacatttcatgaagaagctcaacaaggaagaaaaaaaggaactaaagaagcctcatcaattaaaaagagggatttggacaaagaaaatccatgcaggtgccaacgcagaaatagtattttcgttgatgaagatttttaacttaccaagagctatgagatagctaccactttttgaataagctttaaaagaaatagatggacacttgcagaatataaatcttttgtgttctataagcctccatttaaaaataaaaataacttcaaacatatcctaagtaatgaaagcagggacatgaagaaacatttgtacacccatatttatagaagcattattcactatatccaaaaagtggaagcaaaccaagtagccagtgatggatgaatgggtgaggaaaaatgtggtacatatttatagagtggtccccctatccaaggttttgctctctgtggtttcagttacctgtggcacagtataatgagatattttgagaaagagagagaccacatttgtatcgctcgtgtcataatatattgttataattgttctattttatgattattgttgttaatctattactgtgcttaatttataaattaaatgttatcatatgtatgtgtgtatgtataggaataaacacagtaatcaggttcagtgctatcagtgatttcaggcatccattgggggtcttggaacatattccccaaggataaggggggactactctataatgaatattattcaaccttaagaaggaagaaaattgacccatgttgcaacatggatgaggcttgaagacattatgctagatgaaataagcacaaaaatacaaatactgtatgatcccactcctaggtccttcgagtagtcaaaatcagagacagaaagtaaaatggtggttgccaggcattagaggaaagataaatgcgggattattgactaacgggtaaaaagagtttcagttttgcaagaaaaaaattctgtggaaggatgatggtgatatttgcacaaccatgtgaatgtacctaatgacactgaactgaactttaaaatggttaaaatggaaaattttatgttatgtatattttaccatagtttaaacagataactaaaaatgtgtgttctaattcatgtgaattctcaaaagaggctatatctaaaagacagattcgtgtttcatgttccatgaagcttagaaattggagtgagagactgatgaaacatgacaagtgaacgcatctgaaaacaacaaagtttcacacaaatgtatggattttattgacaagtgatattttcttacagtaataaatataatgcagtcttcttaagagtcagtttggagttgagaaggcagtgtacccttgatggaaacagtcagactggtggtaccatcttcttcagaactgcatctaagaggctgtgctggctgggaatcatacagctgtgggcaacaactgcatcagccccaaggcttccctccagaccaaaaggtgattcatggcccctggttaatatcaccctaggttctcccctgtcccagttttaacataatatttcatagaaatactagtgccataaaaagtcaatatttcaaatataaaaattattttatacaaatgtaattcataatcattcttttaaaatacagcattgttatatatgtttgaaacattattaaaataaatatttcctagagaaaaaattttgcttcacaaaattataaaacagaagcatataaaactaattcatgattggtgcttcttcagtgtgtctctcattctctcttagtgtagacagcatgaagtacatacatctagcctgaaaacataccaccatcaacctatacatctaaatgcttggacttcatgtgtgtctacccacagtgcccatggcctatctacttacacaccctctacctggagcttctgtggaaagaagggctgtcctgtgacaatttgcactaacatacttttccagctaaactctagttcaaaggtctgtgagcttgtcactttctggagttgggaaaaggcatatcaacttcttcatcaagggaaccatcctgtcccctgtgaaagattataacagccctttcccaggtaagggatgtattgtgattatctgaaatattgagatttttggtagacctggacaatactaaccctgatttccaggatctggaagttctctttcctgactgctcactagatgttgaatggggcatattttgatgtgcagtcttgtggttcctgtggtattctaatacttgcttggaaatgagatagttggaatgcttagcaaacaatatagttgtgtttctaaacatcatggggagaggagagaaaaaggaatacaagcttatataaaccgctgaagtttccagttatcattacttaatcataaccctaagaagtatgatttcagttcttctccaacactacaaattaacgagtttcactagacaataagctgatcaactaggctgattgacatttagagctgcctttccaattactagcacatggcaagggttttcaggaaaatctggcttgcaaaacacaagtggtaaatcttcaaggatttgaagtacctttcacacaatttgactattgccaggaagccatttatcaagacccatatcagtgtcctcaattccccttaccaaatgtttcttttttaaaaaaaaacttaattcatccttgttttctgaggcagaggtaactgttccacgagctccaattccatgaggtgactgtcccacgagctccaattccatgagcaaatgtcccatgtcaacatttatgctgctctctaaagccttgtatcttgcacctcttcttctgtctcctctttcagagcagcaatctggggcttagacttgcacttgcttgagttccggtggggaaagagcttcaccctgtcggaggggctgatggcttgccggaagaggctcctctcgttcagcagtttctggatggaatcgtactgccgcactttgttctcttctatgacctagggaaatggctgttagtgagatctgggacagaaggcaggtcagaccagagcagggacagaaactggcacaggctcaaaggaaaataaaagtcaaagaatgcaatgtccagagccttgcattttgaacaatcaggtatgtcacatttaactgctgtgtccttttgctctaaggaggttctaccatctgtgaaattagttgtgattttctactcagcagctggaagattcttcagggaggtttagtagaactgaagttgctttgaaaacaaaatattaggtcccttataaattacctagaaaatgagcgtaagtctacagcaccataaagagttgagcctcttccacagtgatctgaagcttaagaattccaaattggtcaggatgtgcctgagtttaatacacctccttggcttgttcaggttgagcaaatccaagatcagacaatagaggactttacttagattcttgaacttgtccatggcagggcaagaggttgtgagtctgcccccctaatttgttacttcaagcttagtgataatcatggtaataacaagccttcagtaaggaaaccatttacctccaggaggctcaaaagcctgaacagaaatgacgtgatacatcatcctcagaacttccttgtgactaaaccatagggaatttgtaaacatcacttgaaagaagctgtgacagttttgttttgttttaataaagacagatggggcctcactatgttgcctgggctggtcttgaattcctggcctcaagtaatccccccacctcagcctcccaaagtattgggattacagatgtaagccactgtgcctggccatgtgacagtttttttaagaacagtgagaaggtggttgagaaaggtactacctgaacccaaatcatggctagaaaaatgaaatgtgcctctcaactttgtcattaataccataaatcagactgtaagacaactaggcctgtcccagaccacatccatgggacatttagttattgaaagaatcacagggaccttttttaaaatcttaaacagtagagtattttgtatgacttggtccccaaataaagggctcaaaaagtatatatatcctatttataaacataacttagtaatatgctgccattttagatttactatatttcaacctcaccacatggctcagatcaaagtgaaaaacttgtgcagctattttgagtaaagctggatggctgtatgatacatatttttgaaaagaacttgtacattgttgcaatttgcaggaactatcacatgtgagattgttatcaagaattacaagggcaatgagatcttaagtaaagttataaagactcaccaaaaattgttggcattccagcattgcttctatcctgtgttcacagagaattactgtgcaatcagcaaatgcttgttttagagttcttctaattatttggtatgttctagaaaagaaagaaaataccacacataatatcacagaacagtaatgatctgtatttaccttgataatatgtctattgttctattatctctttaaattacttatttctttaagttcttttcacataatgttgatatagcgttagccacaatcagcttttcaaccatggggtagactctaagtatccataaataaacaggacaaatatttcaaagaaactttaataaatgagtacatttttcattatgtagaatcaccagtacttctttatttggggctataaacatgcttatggtataaatgggatacaaaggcaaatcataaggatcagattaggcccatgtatttaaaagcttcatcatgtgttgacaagggggaagagtttgtatgaaactaaaaactatcttcggaagaaaacacaagactcttagcaaggaaatatgcatttatgctcatttccactgggcaattatttcatatcttgggggagacccccacacgcagacatgacagcctaatagaaatatgtgtcaccatgaagcaggcataatgattctgttcccactgtgctattaagtaacagaacatctgaaactcacactggatccaaatgagcactgggttcatcaagcagcaagatcttcgccttactgagaacagatctagccaagcacatcaactgcttgtggccatggcttaggacacagcccccatccacaaggacaaagtcaagcttcccaggaaactgttctatcacagatctgagcccaacctgcagttagagaagatagttcagataccacagagttaaaaacactcaagcagttgacattctaaaaataaacacaggagttctgaaagcttatgtttttcataccaatccctctacccccactacctgccaccatttgaattgattgagcaaaagtctatttacaaccttgacagctcaaaagaatcagtctataacttgttttatctttgtacttcattcattaggaaactttcaatgagtgtctattacgtgccaggtatcccaaaaagtagtaagaaaacaatacgtggcacatggctcttgtgaggctcagcgtttataaaggtgtacataaattattccaacacaactgaatgcatgctggaaaagataatatgtatacattgcagatatgccctctagtatgacatcttatgtagacagaagatagaatgtagcataaaggatggaggtatgacatcatccttggtgctacctcccatcttctactctgtcatgactgaggacaaaagatagcataaaatagtcaactgtggggttttttaaattacatatggaaaattgctattcatctcttgaattcataaaaactaactgtaacaaataggtaaaactatgaagtaaaaaatactggagttaaaatagtggtacaacactaggagatataaagcctcttagatattggggtagaatatgagggctgtattagagtcaaaggctttttttttaaagctagacagtaaaagtaaagtttgaaaatgcaaatgagatatagaaacccattctataaaaatatgacaaagttattgaagtattggatcttatcaattattcaaataaatgtgcattaaatgtttatttttggcaagtactcctgagtgtatgaaggccaaagagatatacagatgattgtctcctgcccttgagaagtctagaatttagtatgaggaggtaagatgggctccacctgactgtaatatagaatgagataatggctcagaaagaatcttatgatttcagagataaattcagaaatggcccataacactgtgtttgttcacaaaaaattaactgtgtgcccatcacacgaccaggagattttaagcctctttgatattggggtagaatatgaaagttgtgttaggaccaatggcttgttttttttttttttttttagctggacaagaaacaaacaagcaaaaaacatttgaaagtatattgcagatgatactcctttccttggttggtttctcattaaagtaatctcaccttgtagaaattcattaaagtttgagaagggtttctggtatggcaggaaatgtaaacacatttattagacaagggggactactctgatgtatccccgaagactcaaacataaaacttagaaatacaagtgctgagaatatgaataaagggcactgggcagggagttagaggacctgtgtctttctttgtgccttcaacttttttattgtttcagtctatgaagctgctatggtctatcttttttaaaaaacaaaaacaaaatccctcccttgtttctgggttctcctttagctatcattcaacatctgcccatttagtcatctagaaatctcaagaaattaatgtgtatctgtcatctctactgcttcccaccacaagaattttcctttcttaaaacatctattccttggcttgagagaaaccacacactctatggccatttcttcctattgtcatgtgtgaacaactctccctcttcctgcccccttgaatattagtctttgtcatttccaactctccagactctcctctgagatcccagtcattttcagggtattgatgaccacctataagttaataattttcaaatgtttatctccatccctagaattcttccaactactttttaaatcattctcctccttaccaactctattatagtgatcccagtctgggtcatcatcatctcttaagaatcatcctacaaatctcaattagtcaaattgcaagtccaccatacaaacaccccagggatcttcctaagatgtaggtttgaccatatcatttctgttttaaatcctatggtagttctcctcctggtggaataaaatctaagatctctcacctggtgtatgaggcatccaaatggagcccccttcactcttattcccagcagaaccaaacatcttgtagttccctaaacaccttgatgctctcaagtgatgccattgctgagcctgacatatccttctgaatatccctgatcatctcttaagccattcaaccaggcacctagtgatagtagtatttgtgcaagttccctcgttagactgtaagcttcttgagggtaaaaacgtgctcttcagctctgtgttcctaatgccagtcctgggtaactgtcaacctcaacaattcattcatttatcaaatatgtactgagctcctagaatgtgggtggccaaacaaaacagagttttgatgaatgataaatgaatcaaaacttgaggatgaatgaatgactgagcactggcttaagctctgccattgtaaaatgttatctaagacatatcactttgcatgtgagtattcaagatgctataaatttctcacaaaatcaaattataaaattaaaatttccctaacactgatagaaatgttagtactttagatcaatcagcagtatttgagggtttttttttttttttttttttttcagtaaaattaaccagcaagaaaaggtctggcttaagactgcagctctagagtcaaacacaatcagctttgaatctgccctcctcagctcatttgctgatgatatcaggcacattattttaagtctcatttatctcatatgtaaaaaaatggagaaaataataatattgatgtcaaagggttgttacaaggattaccagagataatttgtggaaagcggctcccacagaatatggcacatggtaagtacctaatgtacagtaattattagtattattggagcctgggcaactccaaggacatgggctcaggaactgaaacactacctttgtgtgacaacagctttgtaaaaattttccttcacaagttgccttgggaactaagctagcaggaagtactgcaatactgcgaagttagtgatggccatagtaacagggtggagattttggtcagaatgcagtatgctccctctagattcacaccagtcatatactaagttcctaaggccgtactaggaaagctatttgactgtcttagactttgcacttgtggcaaagagctgagcaaagtatgtttttccccagatgaaattctttattagaagtaaacaattacataaatttatatataactgtcaatatttagagaacagaatttttaaaatgaatgacactaagactgaccaacacaggggacattttgcaatattcctatctcactgttttattcactgtgaagtatagtaaaaagctttttagaatcatcttcattagagaaaagtcaacatagttaataaaacttaaaattgaagtcagtaaacatttaagaaatttattaagtatctattttctgccagacatgctaataggttttggtgagataatggaaagcaagatagattagtaattgtttttgaaaagtacaaagttattgttaccaatcacatgtgctgataagaattctcctacggatcttttggatgtaaatgactgcttagtcatatattctttcaactggctcttaatgagagtttattaaattctaggtactctgacagaccccagattcaaagatgagtaacaggaggctctgccttaaaggaaattatggtccaaaaggggagaaaaatagtaagtggaaaattactgttcaaagagataagcactatgggcaaaaaacaaacaaacaggaaattgctagagatcatctgatttagtgatctgtggcagcagaatcctttatcctttaaatatgtatatatatgtatatatgtatatatatatgtgtgtgtatatacacacacacacacacacacacatatatatccccaatataatctttctttcttcctttttgagacagaatcttgctctattgcccaggctggagtgcagtggtgcgatctgggctcactgcaacctccgactcccaggttcaaacaattctcctgcctcagcctcccaagtagctgggattacagtgcctgccaccatgcccagctaatttttgtattttagtggagaggggatttctacatgttggccaggctggtcttgaactcctgacctcaggtgatccaaccgcctcggcctcccaaagtgctaggattacaagtgtgagccactgcgtcctgcccccaatataatcttgttaatactatcattagaaaccatttttcaataaattaaaaaaagtacaaactttagctcagtcctgtccaaactaagaagacttcaaaattactagaatctaaagttttccaatgattttcattacaacgtagcattaaaaataaataaatgaaaacatcaacagtttgtagatataaagaactttaggaaaaagaattttccagcttcatgctgatgagctaataaatagtatgtacttcccaaactgctgtgaaaaaagaagaaattttgttttgtaacatgttaaactaaaaaaaaaaaaatgtctaagagtttgtaaaggattcaaaatgttgacttttgctattgctgtattctggaatgttattatggagcaagagtttgctcttgtgacagagaaacatgaaaaaaaatcataaaagtgaattgtggttttactgaataatccataagtggcagttataaaaatagatacagtcaactccttttgatactctgtttgctactctgtagatttttcagggtaaattttcaacttaaaaggccactatttctgctatttagcttgttttctaaaataactaaccttactatcaatgagtaaggatggaaactattttataagtattgaaaaagcaaacaattacccaaaaagccttcagtccaaaatcaacagacattgtacttagattacagacaaccctgagatagcccacaggggtgatgcagctctgctcctgcatctgccagctgtcccagtcaaggccctcagacatctcaaggctctgagtcctcattctaaagtgaggatggtaatacctgctgtgtatcaatcacaaggctatttccatgatctattacatatgaaatgaaagaactccttattcattcaaccaatatttattgaataccatccatgtatgcaagactactctaggcactggaaatacaacaattaataggatataatccctgacctccaggaacttccactccagtgggggacatggacaagttaaaaggtaaatctccagccagagtgagaaatgctatgaaaggggtggagttatagggtacacctaggaaaccgagacctggagtgtcaaggcagatttttggaaagaagtgatgtgtaaggagaggcctgaaagatggtagaaggaggcagtgaagggctgggggagtttcccaggtagagaatagcaagtgaacaaaaaagcctctgcagaacagaaagcacatgtgctttagagaaccaaagaaattcagtataactgaatcatgggaagtaaggggaagttgggcagtgagtgtagaaagccaaacaaagacaaaatcatgaaggacctggtaagccaccttaagcagtgtggacttagtccagaaggcattaaggagccatatgaagggaagaaacaagtgatcagatgtggggtttggaaagatcaccagagctgcaaagagcagaatgaactattgggggtcaatgagggaaatgagccaggaacctcagaaatttgtgcaagtgttaatagtggtgtcaggtggaaatgaagaaaagtgaatatatttcagatactccccagggacagcattgacaggatgtgacatgtgggtacccgtggaggaacttgagagtgaaagatgagtcccaggtcttggccttgggaaactggaggatgggatgccattcagtggaattaggaacacaggacaggtatgtggtggggcagggaaggaactcacttattgacataaggtgcttttcatgtgctgagatatcaggtggaaagctctgggaataggcagataatggaggtcatcaaaatagagatattaattaaagccaaaaggacacatgaaatttcccagggaaactaagtaaagtgagacaagaactaggattctgtcagacaccatttaaaggatgaccaagtgaagtccagattaaaaaaacatgattatagttacttttacttagtacccatatttgccaggcactgcgctgggcccattttacatgtaaacttgaaaagtcacaacaatcctaccaatttattgggccacaatgccagaagtcttttttttttctcttgggattcagtttcttttgaaattctctttggtctacacagctggtaatttcagtttggcaccaatcttggagagaagctgtctgggcctaagctgttttgggataggtaaattaaactatccaagttctagattttagaaactctcttcccttcccttggacttgctttaaattcctccatcaaatgataggcagactgccatggtaaaggtgtggacccaggaaataaggaaaaaggaggctctctggaccagcttttgttctaagccttccagctagtaactaggtacaagtcatggcttcatgagatacagtccagatcagcaaggataagattctacactggacatggaagccaagtccaagctagaaataaagcatttcttggcctggaattatcactgtatatatttttaatttccatttgggataatggggaattatgtaggaggtgctgttgggataagattcaggtgtctggctatttgtcattactctgttcatttacctctagagatactagtcatggcaaggacaaagagaggactcagtgagatgacatacatcctggtttgccccggaaagtcctgctttgcacttttgtcataatgtcctgtccagtttagtgtttgacacacccaaaaatgtcctgtttggacaaattgtattatcagctgtattagactaaagcctaggccttgtgactttgaaacccaaatgccttttctgcttctctaggctgatacttgcttgtttgtttgtatgctgctagcaggcttactcatcaaaaacctatcactactaatcaaaaaagcacactactactcaacaaaaacttagcactactactcaaagcactcatgacattaaagttagactaacatcatcatctttgtgaatggtaaattataaaaaaggagaacagtaaaagtatatacctaaatatgaactgatgaaataaaaacctaaacaggtaaaaattttgcattgtattagtatttaaaatcataaccacaggttctaagattttagattatatttatgatcctgctttcctgtaaattttattttgatttggcaatacttgcagattttataaaggctaatgtcttccctcccaagtttccctcccattgcattgtgttcctatagtgcattctctgaagtcatatcaaagatcttaaaatgtgtcacttgcaatttagttaatgttttctttaaagcgcctgtgtttgttgggtaataaggaaactttgataatgaaaacggttaatctaagtacattttattaggggcatgttaaggttgggcactcaatgggtaagtgtttaacactcacaggcatttcaaagctcctggcagggtccactgtgaaggaaggcagaaaagggaagaacatttgggataaacagaaattgggctaaaaggaccaaaagcgctaatagtggaatacagttgttctctaagaagacctttgaggctcaacattttaggtcccctgatcctattctgccacaatccagacctttggacttaagtttaataaaacaaaataatttatgttcccttttctttaatataatgcttattttttaaaattataagtttatagctagagtattctgttaaagaaacccagaatttcgagaatttctccagctctcctccccatcaaattcctctgtataatgctctcaagtataatgaaccacctgttggataaacataaggtgttatttagaaaattttattccattttagttaatatatttcctatataatgtcctaatggcttcaaaggatggcatatgcctcatctaggtcatatggcattttgcccggcagtgctcacagccacatacccaaaggcagacgattcctggcgacttcgaaagaaaactattgtcatttgcaggtgttctagaatgagcatcactgttttatgctaaacctgtttcccagagaagtatatcaagtcaaaccaaagcctccttcttgtagtggagagcttcagaactcagatagggagtagatgagaaggtgtggagagatgataatttatactgggaataatcccagtatagtggagtcgcctaggtctcttctaattcatgtttcattgacgcaaattgattaggaaaggacaaagtagtgctacctatagggtttgctataaactgaaagcttctgtccccctgccaaagtcatatgttgaaatcctaacttcaaagatgctggtattaggaggtggggcctttgggaggtgatttaggtcatgagggctctaccctaaacccatgatttggattactgcccttataaaagacatcccagagagctagcctgcccactcttctgccatgtaacaacacagtgagaacacagccatctgtgaggaagaaggccttcaccagacacaaaatctgctggcaccagattttgaacttcccagcctccacaactgtgaaaaataaattttactgttgtttataagacatcgtgtagtagccccaatggactaagacagaatattggtactgggatctgggtactgctgtaacaaatactcaatgtggaagcagctttggaacaaggtaatgagtagaggctggaagagttttcaggtacatgctagaaaaagcctacattgctgtgaatggacaattaaaggccattctggtgagggctccagagaggaggagagctatagagaaagctactatcttcttaccgaatacctaagtggtcatgagcagaatgttcccagaaatatggacggtaaaggccaatctgatgggttttcagatggaaatgaggaacatgttattggacaatggaggaaaagctatccttcttataaaatgtcaaagaacttggctgagctgtttgtgtcctagtgttttgtggaaggcagaacttgaaagcaatgaaattgaatgtttgactgaggaaatatccaagcaaagttgaaggagcagcttagttactcttgactgctcatagtaaaattcaagatgagaaatgactttaaaatggaattattgatcaaaagggaagcagaacttcaaaatttggaaaattctcagcctatccatattgtgaaagatgagaaagcctgctcaggagagaatacaaagggtgtggccaaatttgataagtaaattactatggactagccatctcaacagaaactaggtgctatgcattcagacagtggggatattagtcagccacctaaacagaagccagaatttatagtccaagacaatggaagaatgactccaaagccatttggagatcttccaagctgcctttcccatcatagttcagagtgcagaggcctggggtagggaagaaagatttcaaaggaggggctacaactgccccgtgccacctcacattgcagacttcacattgccacctcacactgcagtctttgctcctgtattagcacattttcacattgctgtaaagagactgggtaatttataaagaaaagaggtttaattgactcacagttccacatggctgggaaggcctcaggaaacttacaatcatggcggaagggaaagagttatgtcttacatggtgacaggcaagaaagagggtgcaagagcagggaaaactgccttatgaaaccattggatctcgtgagaactcactcactatcacatgaacagcatgggaaaaccatgcccatgatccagtcacctctcaccaggtccctccctcaacacatggagattatggaaattataattcaagacaagatttgggtggggacacacccaaaccatatcagctccccatactccattgccatacatctccaccaccctaggtatagctctagcagaccccagcactcatgcactacactcagcacaactgtagggggatggctgcctccacctagatttcaagaacccagggagtcacagggcccaggtagaggcccaggggtgaggtcaccacatagagcccacattagggcaatgcccagtggagctatgaaggctgggccacctatgcaatcccagaccagtagaaccaccaggcatgcaattgcacactcagggagccataggtgtgggattggagcacagacctgccacaaagaatgagacactcaaatccatgaggatagagcctccaccccagtgtgtccagaggtaagacaccaccccagtgagcctggaggcaaagcaaagcaaattattctcaagccttaaagttttagacttatagagacctgtcactccttttttcttttctatttctcttttttgaaatgggactgtctagcctgtgcctgtttcaccattttattttgaaagtacataataggtttgatttcacaatttcatagttggagagcaatctgcctaaagaggaatcacaccttaagtcccactctacctgatttagctgtttgtgctgatttagctgatatttagatgaaaccttggactttagccttgtaagttgatgctggaacaagttaagactttgggggctattgggatggaatgaatgtattttgcatgtgaagaagacatgaactttggaggtcaggagtgaaatgctatggtctaaatatttgtgtcccccccgccacctcctcaaattcatatgttaaaatcctaacccccaaggtgatagtattagaatgtaggacatgtgggaggtgattaggtcatgagaacaaagccctcatgatgggattagtgccattgtaaaagagacaccagagaggtcttgccctttccattatgtgaggacacagcaagaaagcaccatcaatgaaccaggaagtatgctctcacgagacagcaaacctgctggcaccttgatctttgacttctcagcctccaaagattgcttataagcagctcagtctttggtattttattttagcagcctaaatggaccaagatagggcctgatggttggagccataccagtgaggagagaagtaggctcagtcaaaagtacttgtcgcgccaggtattttagggtactccattttgaagttgtgcacagaaatacatgcacacaaagtgtgtagaatgatcttagccatatcaaccatttgtgttggtatgagttacctctttcaaaatcatttcagttaggggtaggtccagtcaaaagtacctgttgctccaggtatgttagggtactccattttaaagttgtgcacacacatacatgcacacaaagtgtgtagaatgatgtcagctatatcagccatttgtgttggtatgagttacccctttcaaaatcatttcagttagcagccttacctcatctgcaactttccatatttcttgatcactccactgttcatagggatccaagttttttctaaatgttccagaaaaaataaatactttctatagcaaaaaagaaaagaagaagaaagtatgaataacttaaataactttttatttttcccttattgtattgtaaaatatttcaagtagaaaaattattttaaaataagaaacacccatgtacttaccatcaagttctctcaaattttaatattttatcatgtctgctttgtatcattcttttaagaaacaaatactacagcaatatttggagtcccttgtgaacatttttctaatcccaatgtctttagaataaagaaattgagataattgttaattgtagaatattaaaaaattttattcctagcaatattccttattataagcaaatgtaatataaaattaaaaggtaaaaaaacccaataagtttatgagttataattaacctgttagaacaaattcctagtttgttaatgtatttccttggatttctctgataagcctagcttcctaagggattttaaaatttctttaacttatgcttattcaaatacacatttatctcatctataaaccaaggcacaactctacttatctgatcagacaggcacaagagagagcctcaacttagaaatcagtggaagagcagaagtcaaataattgtttaactgaatgtatgttcctggtaaggaataaaatgacaatctaattccctgcatggagcattgcacagctgttaccctgaaacatctacttaccagatcaccgtctacttaattctgcctatattatttaaaaatgtcttaaaagaaaatcactgtctcattggggaatgccggtgcaatagcaataataatacttagttctctgtgcctggggtgaattgaaaataatatttttgatattaacatttagaatattttttttaccctttttttcttttgcctttggttaataacatccactaaggggaattaagaatgaaatttcttgaagtgtagtttttaccaattgccttgaaatgagaatatttagtggccatctggtccacaaggaaccacacaagtcaagtcaattcccaattaatggtgtctgtgtctctcaggcagatggagagtatcctcagcaaggcagccaagtttactgaggatcatgttagaaatttcataccccggggcataactgatgacttaaagaaaaagttgttgtcaaatgtctcagaaactctctagagaggtcagctaggacctccatgctgatatttctcaacctacataaaaatcaccttcctgaaaggtacctacattgctttacagagggaatataagagatgagtatatgactcataggatcataagatatgtgagggatatgtttgtgtatccacttccaaacttctatgtaaataaaagtaatttctgaataaactgaagagagtagacaaaggtcattattggagaattctgaaaaactaaagagaattaaacaagaagcagtgctgagaacttgagtcagttcattatttaagcaattggatttatttagtatataaagttaaaaagccttgccaatagaatttttccatttgctttttttatatatttttcattttatattgtggttctttaaataaaaggtttctagcattattgagaagaacaggaaatgataattgtaagggttaaccaagtatcaaacaatatattacctgctacagaacagttatctcctccaaaagggtgggacacatagctcccatttatggcagacttatcatgaaccatgtcctgggacaggctcattctatatgttacctctttcaatcttcatgtcaacctcatgaggtaaatcctattacgtacatgaagaaacagcaggttggagaaggtaagtgacttgtccaaggtcacttagctaggagatagtaggagctggaattcaaacacaggagtgtttgtctctaaacccgtgctcctcatcaccacagcaaaatggctcaaatcctttgtggaccattttttccttcctatttaaagctcaggaaagattaaaggttgggcagcagcagccaaatgggtacataaagagcccatcagtactcagcagcatattctttatttaaacaattatccatccctctagccacaggctcagttcctggagagattagcttcctcttcctatgcaggacctgagttgaagcatttcatatgggctacagcctcattataactttcaaggagactcacacatccaatggaagcacacaatttgaaacggaataatggcattatcatggaggactgcgggaggatggtagggggaaggccaaagatgttacggcatcaacactgacacagagttatgaaaggcaatgtggcttgcaaagatgttgtagtaatgcagttctggcctggaaggtatgtctacaaacaggaatccagcctctttgttcttccatgttttatgaaatggggaaatgctacctttcttctcaaagctactctacccctaggctttcccatctcagtgtatggtaccttcatttcttcaatccagaaacttgggagtcattcatgacttatctttctccctgatcttcccaaataaaattaattatcagtcctatctggagcagggcaagagcctcctaattgatttcttccctttcactcttgcatctctacccatccattcgcattcagcaatcaaagcaattcactacaacagaaattagaacatttcattgaccttttaacaaaccttcaaaggttttccactacactcaggcctttaagatggcctacacgaccctacatggtttagcccctcctacttctctgactcatttagtgcccttctccattctcttctctttcttcctgccaccacactagctttctttcactccctcagcttcttcacacattggattcctattgcttgggaatctcattccctaccttcttcccatggccaactgctttctttaggtttcaaattaaatatcacttcctcaggggtatctttcctgatcctcaataccaaataaaatctcccaacatatggtctcataatactcacactctgctttcatagcttacaatgagtattaagattatatgtgcatttgtgagcattttgtttttaacatccatatctcctactaggccataactgctgcataccctgtccttagcaaaagctgtgttcataatatatgctcaataaattcttcctgaataaataaatggactgatatgaaaataggaagtaaaatacaaaaacatcaaactcagagttcagcacatgttgtttttcttccttctgaaagaacagctattacaacctagtattttgttttggctcaggaaaaaaaaaatatatatatatatatatatatacacacacacacactatatatatatgtacagatatatgcatgtatgtatatgtacatatgtatgtaggtatatatacatatgtatatatacacacagatatatgtgtgtatatatagatatacatgtatatatatatctagatgtgtgtagatatatatatctctactgccatatatatatacacacacacatatacacacacacacacacacacacacatcccatgtataattctattaaaatgtggccaaatatttatcagtatcacaatctttaaagaaataatactaacaacccattaaaattttgatcgttctttataattgcttgggaaatggtgggtcttttactcataatactatagtctaatagtttatataaaatatctatcaaagtatattgatatatattaaatttagctaaaatagatacacatatattcaacattatgaagaaagaaagctgttggttgaaattagacatcccaaagttttaagtgtggtgaatttgataccattcagaaattctgtaggtcttttgtctacagtttactgtctagtgttagatactgaagtaagcactctaattgaaaaaaaaaatttaactgaacaaactggttcagttagaattcaatttcatacaattaggtatttcattcctgtattacaaatagtacctggcactctcttgcttccaggggtgccagtgggtgtcttagttctgttttctaaactgtttgaactttccacaaactcatctccaaatttgaaaggtctttggaggtcacccaagtccttttctctggtttacaaatgaaacagtcaaggccctgagaagttacgtggtttgccctacgtggtacactcggactgactgtgcagcaaaaatatacctgaaactatcaatcacacaatggccctttatctctcttttaagaaacttcaccaataggaaagttaggatgtgcaaatatctgatatttatttaatgccatatatgtcataaagagcacttcttgagacccagagaaaaataagagcaccattactcacccggtgacaaacctttttgctacagcttgactcctcaactcaactcagtggcaacacgtgaggctatattgagttctcagggttgctcatgtatatttcactgcaacaggcattatgctttagcattggatgtcaaacaaaaaacaataaagcagtttggctggtgtggtgactggatgtaatataaattacataagtgggaagtgtgactgtttttctttaagcatacagtgctgtttggctttgtctcagaagggaaatatatatatttgtgtgtgtgtgtgtgcgtgtatatatgcacacactcacacagtaggtaggtaaataatgtgtacatacatatacacatatatatataaatacatatatatatatacatatatacatatatataaataatgtgtgtgtgtatatatatatacacacacacacacacacacactccgtgtatagttctatcaaaatgtggcccaaatgcttataaatatcacagtggtttggacgtccctttttgacaatgtctgcaacattttcttataaattcaatctgtataataaaaatctgttcaatgtgaacaaatcaagatcctaagtttatggtagagaatgtttaaaaataagtattggccaggcactgttactcatgtctgaattcccagtgctttgggaggccaaggtgggaggatcacttgaggccaggagtttaagaccagcctgtagaacatagtaagaccatgtcttaaaaaaaaaatttttttttttttttggtattagctggtggtatggtttggatctgtgtctctgcccaaatctcatgttgaattgtaattcccagtgttggaggcggggcctggtgggaggtaactggatcatgggggtggatttctcatgaacggtatagcaccatcctcttggcgctgttctcatgagatctgctcatttcaaagtgtgtggcacctcctccctcactttgtcttgctcctgattcgtcgtgtaacatgcctgcttcttatttgccttccaccatgattgaaaacttcctgaggcctcctcagaagcagatgctgctatgcttcccgtacagcctgaagaaccgtgagccagttacatttattttctttataaattacccagtttccggtatttctttatagcaatgaaaggatggactaatacagctgggcatggtagtgtgggcctgtaatccacctacccaagagactgaggtgggaggatcactggagccctggagttcaaggtaacacactcaagtctaggtgacagtgcaagactctgtctccaaaaaagtgttgctttgttttcaagaatatctattagttagaacaaagtagctataattagatgaataaaatattcctcagtcaaaaatatttaaggtttgtaacaaatagagaataattttgtaatatttacatatatttgcatataaatgattgcatgtaaaatatccaaattattgtttcctctaaaattacttaatgctttacaacctttttatactacaactttttagtgtatacattttcagagatagcataaaagaaaatacttccctggtctgaccaaataatcaaaaatttcacatttttaggctcagaaataataaaattgcattgtacctacttccataccaattatttttctctcctcccttaagttcagcactccacccctactgtccttatattactccagactcatcacttcatagctggagagtttcctagctcatgtccctgcctctcctgccacctacaccccatgccatcagcagcagcagtgtcctccaccaccctttcaccagcctcttcctcactcaaaaaggcccaacccattcctcgtgaagccatgttggcacttgtcaagtattaacttctttttcctaatactccctaacttgtggcctcctctgaccttttgcccctcagctttttctagttctcatcttagtactcatccataatctccctgtctggcatcctggaataccctctccacatcctcatgcccccacatttctaaaatctacaagctttatgaccctttatgaaccgccttaattatcactttctttgtgaaactatattcttttgttcacttctatggtatatacctccaatattatactaagatggggacattatttcttttgctcaaggaactataaaaaataataacaaccaccacagcacagcatattgtacttactatgtgccagggaggagtactagttattaactcatttaatcctcacaaaaacacaatgaattagttactaccattatactcattttacagacaagaaaacagaggcacagagaaatcaaataacttgcctaagattacacagactaaaatccagatactgatggaaccacaatctcttgttacagaaatcaagcatttagtgattcagcacaaaacaatgtacattgaattcttatcaagcaagttattgtgttatgcactctataagggacagaaaacttagtaagaaaaaatctgttttatctagcatttctattacattctttatctagcctgctttaattggtgatgattttgtgtttaaaccttgctttcttaactaggatacctgcaagtatttacaatgctaagtggaaattaaacaaatacaaggattactctaagataagatatattagaagtgccaggtttataaacaaggctccaaatcccatgtgggactggaatgtgggggtggaatgttgggattagtcaaaaaccccaaattcacacaatgttaatgttgctttgaaaagtctaatttgtatgactcatataatggagggatgcaagggaaaagatgaggaaggcactgcagtagaagtagaaaaaaaggaaggatgactgatgtgggggagtagcaacaacagggcttgggagctggcctttcataattacccacatcacactccctaactggcccatgccttgaaccatgactatatttaatcacctatatttaatttatcattttggttaaatcctttcttcctttgatctctgacttatgacaatgagtgtaattttgaacttttcatttgaagctcataggttggattgggacctcactgtgacagatcaaggacaagtgctatgtatatcttttatgtaaccacagaagttatcatacttataatgttaagcatgtaggagtttaataattaattattaagttgttaattattataaaatgagtgagaactgctacactgctgaatcatcattcaaatctacaaacacttgttttggtcgcatttgatatctcccagagcaaaagatgccccatctttgaggtgggagttatgtgtggacatagattcttttcagatcataaagactcgttgcaagaataggcctaatcatttcctcagaatagtttgtcacctttcaaacttgtaactgaagatttagacatacatttaaaaatattttttctgttttttatgaattatgtgcttaacacaattcaaggctaataaaccattttagatcttgttgttctaattgcctaaaccaatggggctctcatgattagcctcattgtctcctcttcatgacctcacagctcacaggtaacacagaacaaattaaaggaggctccaccttgaaatttacacaatagtcttccaagctggcagattctccaagattgctgtctagctacaggagggaagaacattaataaaacaaaacaaaacacctgcaaggacctgccaaaactaatgacgtgttgtgattccacagctgatgtctcaggatcactatgagaaaaagaggggaaatttcttgttcaaagttcctgtttcatatgtctgaaaacaaatgatccattgatacagagatctctaatgtctcagtgtcagagatcttcagaactatgcccttgcaaagtctcggagttggaaggaagaaaaaaacagaaaagcaaacaaacataattttctttggatttttaattccttcttccttttttttttctttttaaactttaggacaggataaaattacttaatttgaactttcaaagaaaagttaggaaaataaaagcgtctcttggtttcgacatcaaaaatgtatgagaagtttgccctcttttgctctttcttggacattcacataatgttcaaaatttgtcacaaagaagaaatagcatattctgtttacagacatctttgtgatactgagagccagccccagaaaccagcatcataaacacatatatgaaaagcatcgatatcaagatcatccagcatttctgaaggaatctctgaacgtattttttttgtttggtttatataatgctagaaaccatagaagagtggaaatgaaaaaaaaaagacaaacttgggagactcactttggcagaaagaaaagataaagaattttcaaaactctggcccacttggttttcctccatgtcttgcatatatacgttcctacgtcaaacatgcaataaaacaaaacctctctactacatagtagataaactaaaggattcccagtgaaactgaaattaatttttagggcttggcttattctaatgggcagatttgtgtgaacaagaacaataaaaaccaaaaaattcaccatttttcattaaaaatgggaccacaagacttaggttctactgaataacaacacttctctatcaaccagttctttttcgcttttcaacatttttatcttgcctaatgctatcaccttgggatacttgtatttccagtgtttctttatttttagatcatctgacaatcccttttttctttctgaagaaacaatactgttttcaaaactccaaccaggataaagcttctggcaacatgacaaagtctagacaaataaattaaaagcaccagttgagcagttacaatatttagtgcctcattagttgaaaggagcaaatgttccacaaggtaatctgttaagaaatacaagcttttttttcagtctagatttatagtcagtctacctggaggtgctcctggcattttaattttgtgtaaaaagtagagtagtattagcaagaactatggtagtggaatggattcagtgtccattagcacaaagggagaaaagtgatcattaaatgtgaatatacccggaaagactagagaaaataccagcaaaaatacagtaaatgctgtccagatttggtcccagtaaagacatttcttggtttccatttatatcactttaaactggaactgttgctatttctctcatatacaagaagtgctcttacacagtaacacattctaattcgtagaatgatactaaggcaatgagactagagatcctttgtgaccaaatcagagtgacattaaaaaaaaatagttacagactaatctgacattgttcatcccatccaaataacaaaaaacaatcactacactttctattttcaattccactacctcatgattccaagtgtttgttatttcaggagcatctgttatgtctcgcaaagcatttctcaacctggcgattgctaacttggaggtcaggccactgaagcaggaacaaaaaagagctgttaaaaaacaaaagcccaaggctcccactgtaaatttggtcttctgaaaaacactatcaaagctatgaacatttcaataaccagaatttgagaattccaaacttttagagacatcttttctgcctatgagaaaactgcactggagaaaaaagacagcaatgcataacaaatatattttgcagagtaatatgaatttcttgagtacaagtatcaaatagcagtaaaaaatataatttagttgccttttttctggctaagtccttttgctcacctgtggtatcactccaaaggctttcctccactgttgcaaagttattgaatcccaagacacaccatcgatctggatttctccttcagtgttcagtagtctcaaaaaagctgataacaaagtactcttccctgatccagttcttcccaagaggcccacctataaggtaaaagtgatgggatcacttctgtgacatataggtaccatgccataaacataattcagtattgtacttcaataaaaaccattggaatattttatcctgtcaccagtggaagattttcacttattcattcaaaccttgttgcacactttcaatcctgaccaatgttgatatatggagacaaacaaccttggaacagaatagagaaactggccataaggaattggacccctgatgcagacttcctttatcactgacctttactaatgacaaaaagattgaaaatgcccattttgcataaaggaaaagcaaagagtgtcttcatgcacatcatctctaaacataggctcaagccagaagcagagacctgcaatttgatctagtacccaaagtggatacgacttaaaaattaatctgaaatagttctaatatttagatgttgaccctaataaattaatttggtgaagttcaagcctggcaataaacaatgatatgttcaggcagcagtatattcccagagaaggcaggttgggcgaaggccttaccactcctcagtgaatgagtactttggacagttgtcaaatcacattctgacattcacctggattggcgagaagggaatttcagaaagcaaaatgtatagtaaggaaaagaaagaaaattattcttgttacctaaagaccataagaacatagcatagacgtgagagcaccatgcactgcatgaggagatcaagtgctagaggtgacccacagagagccccaactctgtgttctgatgtcagcttagatgccagaacttgaggagggtgctttgagcaaggtagaacactactgcagtcattaactgaccactgaaaaaactggctgacagttagtggcactgaataaatggttgtttccttctccttacataatttgtttttaagtcatttggcctttatatactataactgagcaaatggtcttttagtataatgcttttcaatctgtagtgaaggacagttttgttttctttttaaatttctaattcactacatatcaatacttcaaaaatatataataaaaatgaacttctaaatattcactctcaatttctatactatgtcatcatagaaaagtaagtttgtaaaccagaaccagtgaagggaccacaataaatgttttagagtacataacaacccttaataagaataatttattgaacactatttgcaatctggtaataaactaggtctttgggataagctgataagcaataatgacacagttgaccccctatccatcgtaagaactctacaatgagattttcacaaatgtttgttctcagacaactgagaaaatcagatcaatcaaatgttaagtacaatactctgttgaatttcttcatattattaatcacaatcagtactttttttattttttcttgattattgcttttgtttgtaccaaaaatataagttcaacaaggacaggggagtctatcttgttttgcattgaattcttagcacctggcttacccaaagtgccccataaatatttatttgaattgactaagggatagccagatggaagaatggatggatttatgagcagatgaatgaacttatgtaatttagctgatctaacaaataatggatttaatcaattttgttcaattgctagataaactcctaattttaaaatattgtggaatttcaatgcacattttcatttatgaatcagctcatgttgcacaaacacattcatcatgtgtcatgatttttctaacacaatagtaaagtgttgtataagcaacttgaatatgcccagtgcaggtgaggtacaggggaataaaagaaaggaaagttcaacaggtgaaagtaatttgctataaggtcatatcaagaattttggtaagaagtgcttgaggtctaaatccttgttatcattagtcagatttctaatgaggattagataaatgtccatgttcccttttcttcagaaaaaaatactaaaatttttagagaactcagtttttaggttgggaaagactggatgaagaggcaatttgtaaatctttggtttagctttaaaggttttagctattactctggtttccttatatcattgaactgctggtaatgcatgatatctgacacatttttcaaaggcaaggaatcactggtttgtacccaacaaagtcttcttgtttatataactggcacataataattagtttccgggatttgtttttccaggcttctcagtgatctgttgaataaggctagagtacttcccgcaaataagcttttaagacataccctaaatctaagtcagtgttttctaataacttcaatgcacctcctccctgagaatgttggatcaagataaatcaaaataatatgttgaaagttaaacagtgttgaatttggtgctagctgtaattgcattgtaccatgaatagaacatttcctttcagggtgtcttactcgccattttaatactgcaacagatggaagactcttgtaattatttttcattaccttgtggtctccagaaatcaagatgacaagtcaactgaaatttagatccacaaggtgattataattgaatcttttatgtgttcatatatctctattaattattaatgaaacatagtattgagaatatgctgcttatacccactgaatgattcaactactttacaccaatgtttatcaagatagaaaatgggatatgtgtttaacaaagcaaacaagtatttaggtgtttgtgctgatatgatttgaatccttgatattcttataaattatttctgaaatttctgtattttcaagagactacaaatggagaaagcagttaagttcatccaaaagtatagaccttaaagtactatcaaatatctatttaatcagaggactatccagtactgtgatatatacaatataccatatgaggaattttgattaagtccagatttatcatgaagaatctgactccaaattaagttcccagtaggcattttgagaggaaaaagaaaagacaaaaaggatgagatattctagttgtgggaaggtgctctggctattacaatttagataaaaagtcaaaaggttttaagaaaaaactatttgagattaaaaagaaaaatggattttaaaagtaaaggttgtgaaatagctgctacatttttcatgcattgaaaataaaaacttgtaaagtataggttctttaaattaaaggtctcagttaagagcaaagaaagtaataccacatctttttcataaagtaattgctatggacaaagtgttttcacatgaagactgaataatttttctgcacagaatatttattcttttcacctcttcaccataaccaacaacatagaaatccattaaaaattaaacgagatgcccacttaagtcctaaatttcaactgcttttttcccccccaagaagggcagcctaaagctgagctggcagtgttttgggatatccaaaaatattactagtatactaaatttgagttgacttcttaattcagcacataagaagtatgtttggagcatcttgtgatagtttgcgagatgctgttataagttctaaaggcaaggcagtagaatttatattcttcagagactgctcagaataaaatttttgttttattttatttttttatttttattatttatttatttatttatttatttatttatgagatggagttttgctcttgtcacccaggctggagtgcagtggcgcgatctcagctcactgcaacctccacctcccaggttcaagtgattctcatgccttagcttccctagtagctgggattacagatggccaccaccatgcccagctaatttttgtattttttgcaggcacagggttttaccatgttgaccaggctggtcttgaactcctgaccccaagtgatccgcctgccttggcctcccaaagtgctggaattacaggcgtgagcagaacgacattttaagaatcaattcctattctaaggaagcatataacctagaagtagatataagctatgcattcacttatttaaaatgtgttaagataggtaacatgctaaacaaagggataaaaaaaataaaaaaacaggacttccagattctgatctggtttgtagaaattctgaaagtggttggcttcatcgtaacaagtaaaaagcagagcacactgaaaaataaacaacttttcttagatctgtcagagaagtgaggtcacagggcaaaccactgccccccaaaatgggagacaggcagttaggtacagagaatcacaacttacaaaacagaaaccaataagcagaaacctctgagagaaccagtagtagggtaggaaaacctaaactgtaagtgaaaaattgctggagattcagtgtgcatgatgtgagagcaagaaaattccaagtgggtccaagtcactggccgacttctatacttttatgaattttgcctataggatgcttaccaggttctcacagtgaagatcagagaaaaaaagggaaaagtaaccattttcaaatatgccagagcattcttttttttttgagacggagtcttgctctgtcacccagactagactgcagtggcacaatcttgggtcactgtaacctccacttactgggttcaagcagttctcctgcctcagcctcctgagtagctgggattataggtgtgtgccaccacacctggctgatttttgtatttttagtagagacggggtttcaccatgttggccaggctggtctcgaactcctgacctcaggtgatccacctgccttagcctcccaaagtgcggggattacaggcgtgagccaccgcacctggccccagagcattctattcttataacaatgcctgccctcaaaagagactattttaccatgcctaacctatcagggttttttcagagcctaactgacctaggggaagggaaatactcaactcccgctcacactagtcactatgtcccaccaaaaggggtgaaaaaacacttcacaagtgcttccaagctgcaggcgcacaggctcactaaaagactaaaacctaatcataggactacagaatacttccctcaccctctgctacacctaccagtacattactaaaggcctatttactacagttccttttacccagcacatcatgtccacctttcaataaaaaattacaaggcttactaaaaggcaaaaaaaaaaaaacaccatttgaaaacacagagcaagcatcagaaccacagtcagatatgacagggatgttggaattaacagatcaggaatttaaaacaactatgattaacatgctaaaggcagggcatggtggctcacacctataatcccagcaatttgggaggctaaggtgggcagatcacttgaggttaggagttcaagacccgcctggccaacatgataaaaccccatctctactaaaaatacaaaaattactcaggcatggtggcaggcacctgtaatcccagctacttgggaggctgaggaggagaatcacttgaacccaggaggcagaggttgcagtgagccaagatcacaccactgcactccagcctgggcaacagtgagactccacctcaaaaagaaaaaaaaaaaaagctaaaggttttcatggaaaaagtaggcaacatgcaagaacagatgaaaagcagaagagaaatggagattcaaagatggaatcaaaagaaattctataggtcaaaaattctgtaataaaaatgtaaaatgcctttgatggactcattggtagactgaacacagctgaagaaagaatctctgaggttgagaatatgtcaatagaaacttccaacactgaaatgcgaaggaaaaaaaaactgaaaaaaacagaatatccaaaacagcgggatgactacaaaaactgtaacatacatgtaatgggaataccagaaggagaataaaggaaaaaaaagaacagaagaaatatttgaagcaataatgactgagaatttttccaaattagtgtcagataccataccacatatccaagaaactcagagaaaaccaagcagaataatgccaaaaaaaatccgacacaaaggcatatcatgttcaaaaagaaaggcatatcatgttcaaaaagaaaggcatatcatgttcataaagaaaaaatcttgatagaagccagaggaaaaaacatcttacctatagaaaggcaaagataagaattatatctaacttctcagaaacaatgcaagcaagaaggcagtggaatgaaatatttaagggtttgaggggaagaaatcaccaatctagagttctgtgccctgtggaattattcttcaaaagtcaagaagaaataaagtctctatcagacaaacaaaaattggggaaaattgttgtcagtaggtctggctggtaagaaatgttcaaagaagctgaagagagaaaaggaaaattatacaggtcagaaacttggatctacataaagaaagaaagtgtattagagaatgaataaatgaaggtatttcattttataataaaattagaactatttttcttactcttaattgatttaacgataacagttttttcaaaataatttcatcaatatattcaatcataaatatgataatgtatatacttaggtatacccatatatgtaagtgaactaaattatagctataatacaagagactggaaggtggaactgggagtgttttattattaaaaggtacttgcactacacatgaaattatttagtattatttgaaaatggacttagattagttgtaaatgtatattgcaaactctaggggcaaccactaaaaaatgtttttttaaagaagaattactatgctaagaaaagaaaatggaaacatataaaatgctcgattaaaaccacaatggaaagaaaaagagtagacaataaaaatataaacaaagaacaagtagtgtaacagacagaaaacagtaataaatatagtagatgtttatctaactatatcaataatcacttaaaatatcaatagtccaaatataccaattaaaagacaaagattgtcaaagtggatcgaaaaacaactctgaactatttgctgtctacaagaaacccactttaaatttaaaaccacatataaactaaaagtaagggggataaagaaagttaagtcattttaacaccaaccaaaagagacctggagaggctatatttctttcagagagaacagacatcagggcgaggaaataatgaggggcattatatgaggataaatgggtcatgctccaaaagacataccaattcttcatgtgtatgtttctagcaacaaagcatcaaaagacatgaagcagaagttgataaaactgtaacaagaaatagaatattcactactagagttggagacttcagtgtccctctgcaaagaatggacagatctagcaggtggaaaatcagtaaggacatagttgaattcaacagcaccatcaatcaactggacataattgatgtctatagactacctcattcaaatatagcagaatacacagtcttccaaagcttacatggaacattcaccaagatagaccacattctgggccataaatcacaccttaacaaattttataaaaattaaaattatacaatatatgctctcagaccacaatggaattaaactagaaatcaataacagaaagatagctagaaaatttttaaaaatggtgattaaacaacacacttctaagtaacacatgggtcaaaagagaaatatcaagagaaatttaaaaatatttcaaactaaatgaacatgaaaatacaactcatgaatatttgtgagatgcagaaaaagcagtgcttagagggaaatttacatcattgaatgcataagaatgcaaaaggatcttaacaatataagcttccaccttggataactagcaaaagaagatcaaattaaatcaaatgtaagcataatttaaaaatcatgaaattgaaatcacgaaatcaacagagaaaatcaataaaacaaaaagttggttcatcaaaaacatcaaaaatagagatatctctagcctggctaacaaagcaaaataaaagatgtgacacaaattgctaatatcaataaaacaaaaaaggggacatcactacagatcccttgcacattaaaaggataataaaagaatactatgaataactctacgttgacatatttgataacctaaatgaaatagaccaattccttgaaagacaatctgctaaaactcgcatgagaaaaaataggtaatctgaataggcctatatctattttaaaataattaatgaccttccaaaacagaaagcaccaggtccagatgggttcactggtgaattccacaaaatatttaaagtaggaattttactaattctctgcaatctcttctcaaatgtaaaagtagaggaaatactccctaactcatgctatgaggccagcattaccttaaaaccataagcagataaagatgtcacaaaaaactacacaccaatattttttcatgaacaccaatgcaaaaattctcaaaaagtattagcaaatcgaactcaacatgtatacaaataattatataccacaaccaaacgggattaatctcaggtacaaaaggttgattcagcattcaaaaatcaattaatgtacttcacatcaacaagccaaagaagaaaaataaagtgctcaaatcaatagttgcagaaaagcatttcacaaaatttaacacccattcctgattctttttaaaaatcagcaaactaaaaatagaaggagacttcttcaacttaaaaaaaaaaaacttctacaaaaaccctccagctaaaatcatacttaatgataagaaacttgaagttttcccactaagatcaagaacaagaccaagatatcccctctcaccactactttcaacatcatactggaagtcctagctaatgaaataagaaaaggagataaaggtatacagattgggaaggaagaaataaaactaagttcagatgatgataatctatgtagaagattcaaaataattgaccaaaaaatccttgaaactatcaataattgattatagcaaagttgaaagatataaggctaacatgcaaaaaaaatcattttcctatataacagcaatgaaaaattggaatttgaaattaaaatcacaataccatttacattggcattcctcaaaaacaaaatacttgaacaaaatataacaaaatattttaaaagactatatgaggaaaactaaattctgataaaagaaatcaaagaatcaaacaaatggagaaatatttcataatgatgaataggaagcttcaacattgtcaagatgtcagtccttcccaactccatctatagattcaagccaatcacaatcaaaatcccagccagttattttgcatacattggcaaactgattcttaagtacataaagagaggcaaaagacccagaatagccaacactgtatcaaaagagaagaaaaaagtcagataactgaaactactcaagtttcatgggtttagcttatagttgaattaaaagattgagggagcacaacacaaataccttcagtttcccaactctgtgctcaaaggttctctttaattccacttatctcctttcctcctatcttggaaaagatagttttctcctcagtgcagaggcaaatgcctccatattgcatttgctatgaccatcccccacagagcagtgctcttgctttctacttcctgccaccaacactagtgttctacatagcttcttatttcagtaaccacccattccctaaccttttgcaactggtcttttaccattgctcctttatacctaatggcgttctttttcattttcctttcttttttctttttctttttcttttttttttttgagacagtgtctcactctgtcatccaggctgtagtggtgccatcacagctcgctgcagccttaatctcctgggctcaagcgatcctcctgcctcagtctcctaagtagctgggcctataggcacacaacacacgcccacctaatttttgtgatttttgtggagacagcattttgccatgttgcccaggcttgtctagaactccagggctcaagtgatcctcccactatgtcctctcaaagtgctcgattacaagcatgagccaccacacccggccctaatggccttcttaaacaagggagggctttcatgcttgggcaagaatgcatcagcatggtcgggaagttgtgctgaaactcagaccccgttcacaccctcagaatttttaattctttgttggggcccaagaatgaacatttctcataagttcttacgtggtacaggtgatgctggttcaaggaccacactttgagaagccctgctcttaaagatgaccaaagaccactaaaaaaagaaaacaaactgttttccctatcctactgacaatacttctgacaccaacaatgtgggttttcgacaccaagcaatgctgacaactgtctgttattagcatagaccccacaggataagggctcattcctgtaagactgcctcccaacacacttcaaatgccaatggcaagcccagattgtcatctgtgcttctgactgtgcatctgtaaattgcacgtatccatgaactctttaggtttgataatttgctagaatggctcacagaactcagggtaacagtttacttactaggttaccagtttattataaacggatacctctcaagaacagccagatgggagagatgcatagcaaaatgaatgtgggaaggggaacagagattctgtgctctctctggaataccaccttctgagcacctcaatgtcttcaccagcctggaggctctccaaaaagttccagttaaggcttatcgggtggcttcattacataggcatggttgattaaatcactggccattgttgattttacacaattttcagccactcatccctccctggaggtcaaggggggaagatgaaagtttcaacccatccccctgacaaccagcctttccccactcctgtctttagggacttcccaaaagccacttcataaatagaaactggggtatggttgataggggcttgatatgaataacaaaggatgttattcacctgtatttctctagagctatttcaggaactagggggggaaacatataacaaaagatgctcctgtagctcttatcacttaggaaattccaagggttttagctctgtaccaggaaccaaatagcacctaatagcaaaatctacctggattatctgagttttcgactatattgctttagctctcaaaatccaaaattggaggttgggcacagtgcctcatgcctgtaatcctagcactttgggaggatgaggtgggaggatcacttgaggccaggagtttgagaccagcctgggcaacatagtgagaccctgtctctgtatttatatagataaaaaagaaaaaaaatccacaatctcttatctatcttgctccaatcttgtctcccattacttcctttggcatcccccaacctgactgaaccagtcactgttttctgtgcatgccctttgcctcatgttatgccctttgcctggagcaccctttcccacccactgagacagccaaatgcctaggcagataagaaaataaaagggtcccagagaatctccgaaccacccctcaagtgtttacatcagatgcttttgcacagatgagggaacctgcccaaggcttgtctgggcatgcccaccgtggactggagccccacatgcacactaaggggaagtgggtggagccatggggaatttgcaccttatgcaggggagaagcccgatctcttcagttcctttgtggtggcctgggattcaatctgtgagcaagactccatctcgatttgctgagttttctttttttcctttttgcccaataaaatcctgctctactcatgcttcaatgtatctgtgtgcctaaattttccggatcatgtgacaagaacccgggtttttaatagaactaaggagcaaaattctgcaacaccacctttacttgttcaaatacacagctcagttctcaaagcttcattctaaatgccacttcctatataaaaccttctcttaatagcctaactctccgccaactgatactaactgcttcctcctctgaattcccatagcatttacctggatatctcttattcaagggcatttcaaggattttgggggcccaaagcttgtaaatttggagggagggctcttttcaagaataaagattatagaattataaaaacaaaattagatacatggccttcaaagttggctcaggcaaatgaaggtctgtgaaacttaagctttgttattgccacaataaatctgcctcaggtttcagtggatcttacgttttcccttttagattatcatgtcctgggacagaaactttctctcttcccctgccccatgttttctgttcttccacctttaaagaggagcaatggtatctgggtttaagatccctgcttccttactcacttaattgaacctcagtttcctccattgtggaaaataaaagcaatcatttctgcctttagagttataataagatcaaatgtaatagcaaataaaagtgtttaaacagtacttaagatatgataagctctcaataaatattagagtccctctttggatgtgtcaaacaaaaattataggaagtcattgttttagattaagctctctcacgaggcctcaacagaccagactaaaagtaaaaatggagtcacccatgttcaccaaagcaaaactcagttgttatccggccttctaagaaatcaagaaagaagacagcctgatttcccaaacaagtcagtttcaaacttcaatcttaaagtttcctctgttttaattcttaatccaatgttaaccaatcagtgacttttctattattctgtctccttgtccccacctttcaagaaaagtaactttgaaatgaccaattctcttattgttctttgtttctgcttcctttggccctttttttgggtctataaagccaagctcctttgctcaacttattggaacacttactccaatttgtgaaatgaaggactgtccaaatctagaatagaaaataaagctgactgaggtctttaaactaaatttgttgtcattttgtcttttgacaaatggcacaatccatagccttatgtgagtaatttccaattcccccaaagtacctagagagtgccttgcagtgaatagttactgaacacgcatggcctattttgtatatacaggttcagagaaaatgaaatatctaagcatattacttctttctcattttgctacatctctaattactaatctcacatcagggaaacttcctatactaatgaggactccacaaattctattactttactagggcttgcttgagtttaatttagtggacaaatgagcatcagcaaagcaaaggggtggcaggatgtcaggaggagagaaagtcaatttatcaaggctttctaccaggtttataccaacctattctggctattgtttataataatgatatcacttttggcattcatcttggcgaccccaggaaaaaacactttcagctacctatggtattcactgatatgaatacctatggtgttctgttttaagccatttcacatgatacacagggacttttcgcacatcctatatatatgttttcacagaatttgtacaatgcattaaatgtttatcaaatattctaaaatccatgggcaaaatcaaactcatatattctgaaactcatgagcaaaactgtttctatgtcagtgttagtaacggtgacctaacatctttactaactgtatctctctctatatttttgtatctgtgtttgcaattaaccacagagagataaagttttaaaattcagtttgcaattcagttttcagctcccttttattttatctaaaaaatatcaatcaaaatatataatactcttgtctagatttatagagcagtccagaatagggatttgaaggcaattaagaaatatgtttatggagcctgaagtatatggataatgaccatccctgtctccaagaatcaattccagaaatcagtatatattaagttccttctatgtgttcagcccagtgctgggatccataagaaggatttcaaaataatgtcaattactcatgcttaataaatatagtaaataactgggaaaaaataatctatgtctgaattaaaacttcaaagaaaaacaaaacaaacaaactgaaaaaagctagaaaaaaagtatcacttgtttggcagaatggaacttagataaaatttaagacaatagatggagtcagcaataagatatttttggaagacattttcaagatgggaaatctaaaacatgttacaattttgatttatttaatggcttctttagttattaacctagcaattaattagatattctgcaagtacaatcacatttaaaataaacccattatataggttcaggactctgcaaattaaatttcatattaaaaataatgactccatataataaaacatgtgtgtttaatattgattctactgtacaataataatgttacaaatagattctgctaacacattgcttcaggctactgggattcacttactgaacacagtctaacaaagcaagcagtgttcaaatctcaccctctggccaggacttattgagaaggaaatgttctctaatatggcatttccaccttctgtgtattttgctgtgagatctttgacagtcatttggccccctgagggccagatgtcatctttcttcacgtgtgaattctcaataatcataactttcgagagttggccattcttgtatggtttggttgacttggtaggtttaccttctgttggcatgtcaatgaacttaaagactcggctcacagatcgcatctgaaataaaaataacaacatttttgtttttaagaatggcagacaatttcacaattagtttgatgcttcctaaaaaataacttgtaaaatgcaacacttgctatttgtcacttggttatttgtcgggcttttcaatgaactaacaggaaataattggatataattaaaagtttaactgaagagaaataaccaggacttatataaatgggctctgtataggcctgtttatttttgtgatcacctaattctcagttatgtaagccacacaagggaatagatgacatcaaagagaaaatttatttctactatgagcagcactgcacaatgctgtataaccggtatattataataaaatgtaccacacctcaaaaccactactgaagattcttctctttctctcgaactaccttagtaactaactataattttatgtgtcaaccaggtggttaagtgaactcttcatgattagacaattttaaacaactttgctataatctttaaacaatttaagtcattggcatacatctgcagttaaataattacacttttaatataaattacttaaatattcatttttagtgctaaggaaaatataattgcatataagggttatatttgaaattaaatatttatctgctttataaatctattcatgtaacatttagtaaagtttatctttaatgcatacagaaataaaaggacttgataatttttaaaggtgttcaattttttttaaaaaaaacatacatctctgaataattatgacttacgggaatttggaatgtgattttaaaaacaacttggcatataataagtacccaatatatatttgaacaatacatgaataaaggaatgaatatactaatgagtaaataaatataaatgaataaaaagaaagaatttgaagaccgaattcactcaacttctatttttaaaagataccatctttgatcctgtggctcaatccttcccagatattagtagctgattagacacaattttactgctcttatttttagtcttactagtaattattgatgctggctttattcagtcaaaaacttaactagctttcctttacaatattaacacatcatcttatttacaccaaacgtttagacttcaaaaattattctttttggaaaaaaatgtgggcaaaagtgtatttgcttctgttatttctatttttccttatcaaaaggtgaaatgggaacaattcttcatctttaatatggaatgattggtggataaagcagaggagtttagagatagatccttaattgaacgttaaaattccatcttagcaattctaactgtattgcctgttttcccatgccattgatcaagcctgcactgtttgtgaagttcttttttcactctagtgattctgtgcttcagtttccttcatcttgaaaatatcttcaaattgtcttcagcaattattcaagattcaagaaaataatcctttgaagtcaagcccactgttaacggatgtgaaaaggacccaaagcccacaacctaaataatgatagagaaagtaaaaggcatatagtcatgattgttccacatgtaatattttaaattctgaattatgagttactttcaggggtagctaactcttgactcagtcattcttgattaactttgaattaaaatacactcacactgtcactaattttcatagagagctgctagtctataataaggtctgggagataaaattacaactactattgagatgaaactgccagagatgtagttaaaattcatttaaaatatcttattgtatttatcctgcataagaatagtatccctctcttgaaataattgaagggtatacacaaatgtagattaactgtataaagttgagacttgatatttttgcatgttaattctatacacaattctaaacttatattttattaagcaagataggaaagacactatataacaaaaatccttcacattttaatacttccaaacaatctataaaacatttaactgttgctatctaaatgactcaaaattacacatagtagtattagaaaataaggactttcaaaaccactattttggtagcactggaatgtaacatacaatgttttctgtttaggacttgtgtttgagcattgcaaattacattctccattagtgaagctcaccatagagggtgaatccagaacttctaatgtcaaatgtgacaaatggaatgtaccaatcaaatttagaaaatgtaactttccaactcattgtctgtctagctgcttaatgtgactctaagacagcctattataactccccacagcatgcccaaatatgcatagccaagaacgtgtgatttaatcttaagactgggcactcattcacagcatatgagcagacagtcattcaattcagtgggtgagaacattttctgacaggaagaaaaagtggcttgtgcagacactttcaccatggtcagttgtgcagccactgaaatgccattactgaatagatgtggacagctaacattatgaattactaaccaattccttgtagtcgtgggctttccaccttggatattctacctccagtacctctggaaggagaggccacatcagaaccagagcagaacaaatcaattctgatcatttaagtttcaaaaactgacttttgaaactcaagtcagatatggatcatttgaaaattttgagccatgtgaatattggccattaagcgccaaaagccaaagcctaaggactcaaaacatagtgtctatgcaaaaacagtagccatagacaaaaattatgatggattagaagcagtcactctcctcaccccataaatggggtccataaatgggggtaacaagagggtttagataccaggtcctctaagaaaagttctgccttgcaaccaaatcctggttctatcctcaagtagatttggggaattttagaacaaaggaggcccgtgcctcaattccaaggcaaagcccaggaaatactcatgccatagtgaagcttcctgtgccttgcatgacatgggagcagtagagtgaacatggttgcttggaatgtctatgcacagatggcttgatatagcttcagatttgaatctttttacccctcaggggcatggaagaaactgaagaagggtcagcaagcgagagctcacagtgagaacaaggacagactccatctacctggaccatgcccctctaggtcacataggaacatcagtgcctcagagacagtgagcacggacaaaagatgatgtagggcaacacactccttaattcctaatatcatggcattctgtaaactccacttagaacccagcaaaatctctgaattcaatgatattatttctttcactcagtggaatgcgtgctcaaatagaaaataaactcaatcacagaaaaagtaaagtcatatttcttgtacacttaatttcatagtcaaagattcatagctgctaccaggggtagatccaggttttgtggagcctgaagcttaagtaatttggggaactcttaaaaaaaaaagaatccaaatccaaactatgcatataaaattaagtatagggccttcaaaggagttcctgcacgtgagaggacctgtggcttatgtctcataggcttcatgttaaacaaattctgcctatgatagtaacctcgttcaaagcgttccttgttatagtcaaacaatggacagttcaaaacatccctccccatctagtggttagcaccatgcagtcacttaataaatctttgttaataataaatgaattcattattctacctcctatgcagaaagcagtgtctgtgcagtaagaatgacagtgctgtaggtctacattagcaagtagtccaggctgcaattttacccctcagcgcctcagcctcaaaatattcattgctgtttggatgagatggaagttacaacctattgaactatttttagtctcatctatttgttttcattgagcttttaacctcacttaaccttttctctcatttagagtgcctattaaacattttcacctgatacataaaaactactgtgccattgtagctacctagattgtgctggatagaaattcatattcagcaattatcagaatgactggattggcaaactccttaaccccagcctgctgcttcctgtgcacagaaaacagttgtccaaggaggatcgagggatatctctgtctagagcagcaagctggcctgccagcagcaaagtctcatgatagccaacacccacttccgtaggagcacttttcttagactttgagaaatagaagatgaagccaaaatgagacccaaccaatgacacaatgaaccccattcttcatttgtggggaagaatacttgacataagttgtgcagacctctgtatattagagtttagcccaaatttgatgggattttttcttaaggatcatgatctggtttaaattattggtttcattatttaattttattattctccaaaacctcttctgagccccttgagaaggggtcaatccttaaaactggacctcactatctttataaaaatgtttaaagttactaacctaagcattagaagaacaaagtgttttggaattatgacagtcttgacaaaaagatagcttcacagcctgatctcagccttactttataagggatgcatttaagccaagaagaaaacaattcttgattttctttgtcactttgtgtgacaaggagggaagaggaggcttacaggctttttctagagtaagtcaagaagccagactcctctccctcacaaaaatatttgttctatttcctttcatccttttggttgttcagaagccagtacatcaagattaggcattaacacccaaactatgtgccatcataccccaaaatccataatagaaaatacatttcacacacctgagacctggctggcaacactataaagagacttcataactgatagttatagaaggattgcaagaaataaatatgacgagagtcatctagaaaactggcacaatgtaaaaaagtcacacagtttacaggaaaaattttctaagtatgaagtacataaaaggggagatttagggcttttaaatcataaatccttcccagtaggcaaaaactatgcttttcaatactcgctaacacagacctgacacccaagaccaaggcagatccattagcataatctttaggccatgaacataaacttaagagataatagcaagaaaacagactctgcccaaaacatgttcttgaaactctggtctatgtttccacatctattacttacatgactagagcacataaaaagtcagtcaaatgccatgttgctataaattattaacagcataaatgagttatttatattatactataaacctagccctttagtatattattacagcttgctctctacagaaatggtttacatattttaacctgtgtcaaatcacttgagaagtcagtgtcactttttctatcagaagtgacagagatggtgatcttcacaaaacagaaacaaaatctatttgcaacatgacaaaaggcatatcccaagttaacaccaacgtttcaaaatatgctggtgcccatttcaataactaagaactttggtaaacatggtactaagtgtgtcaatgggcaaaggaagactcaaacttactcttccatgtaaaaggttggacatcactcatcaaatctattacttactctggagcttaattacaatctagcttggtgaatacaattggatctatgtagcttccactgaaaatatttcaaaagaatttgcaaaaagaggaatccaaaacaacaaatcaaaataccttctcacagttttcactattttaatatgatttttctctaagcatcttaattttgcaatattatgtcttccccaaagtactctgtcattaagcctcatcctttacatgtcttgtagagatttatgtatgtatcattgattgatacaggacaaaaatcatttgctggtggtccatcaattcaaaaggaaattctatgacatagaccaggagtcagcaaaactatggcccacaggacacatctagctactcccattagtttacatattatgtacagctgcttttctctacaaagactgagttgagttgtcataaagacgatacagcccacaaagctgaaaatatttactatcttagcatttatagaaaaagtttgctgagccctctgctatgactcacagaaaatcagagctaaaatgagtcttagcatgtagttcagtggttcacaagtcttgcttgatacacgctagaatcacctggagcacttttaaaattacaaacatcatgctcagtcaccctgccccctaccaagagaactgacttcactggtcttagtggaccctgagtaatctgtgtttttgctttcttttgttttgttttgtttgtgatggagtctcaccctgtcaccaggctggagtgcagtggagctatctcagctccctgcaacctccatctcccgggttcaatcgattctcctgcctcagcctccccagtagctgggaggcatgtgccatcatgcctggctaatttttgaatttttagtagatacagggttttgccatgttgaccagcttggtcttcaactcctattctcaagtgatccacctgccccaggctctcaaagtgctgggattacaggcatgagccaccgcacctggctactctgtgtttttataaagattctgcatgtgctactaggatgagaacttgtgatctaatccattccttcattgcaaaaatgagattatctaaaccctggaagtaaaatgatgggcacaaagaccagtgaattttctaaacttttcaacctttttttttgtttgtttgtttttaacattctagcaatcccttagggttcttattaaacctcttctactaattcaagactctagaacatcataatggcattttctttgttagttctagtaacacactggttcagagttctttgatcagctctgacaattgcagcagtgaataacttaatcaatggactctagcattcagggacagtagcagaaatgtgattcctataaggatgtggaataatccctgcctacatgctaatcaagagttgaaatttttcatgggaaaaagatccagaagagagagattgtcaaagcttgaaggaaccttagaaaacttctcatcaaactgtttcattttacaaatgagaaaaataagaccctcaaggaggctaggacttgcccaaggccacacatggcaaggccagagtagaatgcagggctcttaccacagacactctacaggatgaaatgagaagagatggatggaaagaagtcttgagacagaggtcatgagaggaaaatataccacaaaaatttgtgaaaacagaaaaataaggatagacatgatcaagaaaccattaaaaggagaccaaaaaaaaaaattgaagaaatgactcctcccctcagattcttacagcaaaaactactttcagtacaagaaaattaggcattaggagtaatgcagaaaagccaggttccccttttctccacacatcaggcttcttgttggtcatggtacaatcagtcacttgatctttactggaacccaaaacaaacacaggcagtaaaaggacaaaggagaaacccagggagtttgtattgacagaaaactcttctcagattgcatcaatcttggaagaactttctagagcctcactaacagaaatctatccacaagccttgcagactcattgccttccctgctcaccctggtggctttcttattcttatgttattagaaacacacagttgaacagggtagacagctaatggaaacaaggatggtttatctgctgcttcacttggagaattaaagaaacagaataatattcacatgctcagaattaggcatcaggagtaaggcagaaaagccaggttccccttttctctacacatcagacttcttgttggtcattgtacaatcagtcacttgatcaacaaaacaagcagtaaaagacaaaaagtagtcttttagttgtgctcactatgtgatagacagttgtgaaacaaactgaattgtcaatggcttctttccaacaatgtgattatgagtgtgagtaatttatcaatcgctagatggcttggtatggttcattttgaagcatcaccttgtcaccctttctagatcttatttatttaatctttattttttcatacagataggaatctttagtgcttatttaagctacataatgcttaagtagctaagaataggagaaagacaagacttatgttactaaaaatggaaggcatcttatgagtacaaagaaaataaaccagcacataactttgttttggaggaaaagatgtaagataattgctttagcaataacaactataaattcatatagtatttgaggtatggagttttaaaaaattaacacttttcttttcaccccatctatagaatggtatgagaaatataattgaaatgaatagagatagatagccacaatttatgttaaaataaagagtgaattagtaatagaaataaacaatctttaaaacattgagatatcaattgaaataactggaaatcccctaacatggggtgttccaataggaattattaaattagattctgataattttactattttttaaattgcaggggtgattcacaaactattaaactatattattcataaagtgacaatgttcagatgactttttatccaacctgccaaatagggccagacacattagtaagtagaatagaagctttgtcctgtttgaatagtctcctgagaccctgggtatattttaaggagatactgaacggaaactcatgccttaaaatgtcaagcctactgaaagatattctataattatgttttatgaacatatgatggtgtcaagatgatagttggatacatcatttagagagcaggatagaggtctaaactagagacacaaatttatgattcatcaagagatggtttattttctttgtgtgtgtgtgtgtgtgtgtgtgtgtgagacggagtctcctctattgctcaggctggagtgcagtggcaggatctcggctcactgaaacctccacctcccaggttcaagcgattcttgtgcctcagcctctcaagtagctgggtgcatgccaccacggccaggtaatttttgtatttttaggagagatggggtttcaccacgttggccaggctggtctcaaactcccgacctcaagtaattcgcctgcctcggccttccaagattcatcaagatatggtttctgaaacatgggtttagaaaataacagctagagagtgtcagtagaacagggctgagatatagctgatgtttagagatctgaaagagagaaggggccaggaaaagggaccaaggaagagccagagaggtagaaagaaaatgaagtgggagtagtgtcatggaagcaagagagaaagtatcacaagaagaataatttgtccatggcataaatactgctggagctgttaagggagacaaggaaattggctctggcaagatgttgatcctgagttatggggctgatggaaataaaatgaagtaggttgtggaaagaatgggttgaggagaacaatgaaatgaaagtggattgagaaaaaaatggaagtagattgaggaaaagatggaaagtggtcctttctcaaatattttgctatatgtaggtcaaagaaatggggtagtagctggagatcaagggaaagtatttttatgctaatgagaaagatcccacaaagagggaggtattgcatattacttgctcctgaatataggagcaagaacacaggcagaaggtggtgcatgaggagaggtgcagtaggctggtacaactggtggagagaaatgagaaaattcttcctggttgcatcaatttttttttttagatttttaaaaaaagatataataaagtcactggctgcaggggttggaattattggagcacctgagaagggagaaggaagaagaaggtgggaaaaagctatcttagggaatataataaggaatttcgtaggaaaatctaataaaaaaggttgttgtacagtttcgtgtaccaatatttgagatatgtgatcataaacacaatgcaacttaacgttaaatgttatctaaacattacctttattagttgagagctaaagaaagctaggcacttgggcataagcaccaggtggaaggttaaaaaaaaaaaaagccacactgtcatttttataacttcagaattctgttgacatttgactctgtgtttttgtctaaactaggccagatgggtaaataaactattctttccaagtataaacatttttttctgaaagactaaaagcatacatcaaactaaacaccttgtttactccattgtaaactcaactctaaactcagctaacaattcagtaagtaaaatgacaacactgagtttttacttcagaagtcacaaggacctttaggattaacatcatataaacgtaaaatttgagggcatagtcctatctatttcctactctcaacatatgctgaggtgaaaacaaaaaagttactgtataagtttagcaatggcatgggtgacagcactatgatgggaatcattaaccagataaatgcccataaacacccaggaaaggctacttgtgctatttggcagggaaatcactcacatattagctttgatattcaaacaaaagaatgtgatttttttaaatgtgatcaaatgcaaatattgatatttttcatagactgtattataacacaataggtccttgcaaagatccttcaatgccacaagatgaaaggcacgatatcaaagcacaggtcacaaagccaggatgcacatgtgaaaaactagaggaatgaaaataccttacagaaactttcatggagattgaacacgcagagtagaaatgcaccaaacagaggttttgacatcaatgtgtagaggctactatgtaaaccaagaaaattaatacagcaaggacaaaggaattgtacacacccatggtgaaaagatatttttaggtaaagaaacatgtaagtgcatgaggagcttaaatgtaaagtcaaagttgtagaaagttgggcaaagaattaaatagatgtaagcacaatatttatttaatattctcctgctgtttcccaacagaaacatttctatacatttatgagacccaactccaaaagcatactggaatggaattaaagaccgaactacagaagctaaagagagctgatcaaactaaaaaaaaaagttaaaggtaaagaaaccaactttagtataaatcatgttccaattaaattacagctcaatgggttatgaaaatgcttaaagaaaataagaagacacatgaaccagaagagagcattaaaagggttttctttttcctggagatattttttataatgatgtttgttctgacaggagttgatcatacaaattttatagctgaataaatgtgtgtggtttgggaacatgaacactgtctcagagaacaaggaaagaaacttaagcaaaaagtataattttaaaaagagtataataatagtgttgcacagtcattcctaacttgggtttctaaaccatctacaaaagcagtggtgaatgaataattttaaatacagtagtacaaaaatactttaaaaattcaatgatgaagctatccagaccaaccatatagtctgattgaaaaatatgcatttgattttttaaacaaaaatgagtaaatgtgcatcatttcctttaatttctcagtcccgctgcaatgggatttgtgcccctgatatggtattagcacataagcattactataatattaatggctctgcattctagaaaaccaaaacaagagaaataacacaactaaaatgtggtctttgtacacactaataaagtatacaaatgtgtggcaatatttatcaagcagaaagacagaaggcaatgataaacactttaggaataagaaaggtgctatcactaaataatgtgaaaaaaatttaaataatagtatgaaaatgttatgctgctaaatttgagaacccaatataaggaaggagttcttaatcaagataccaaaagcacaaaacataaaggaaaagacaataaattgaactttattaaacttaaaagcttcttttcatcaaaagactctataagccaagccactgactgagggattatgtttgaaatgtatagagctgatgatcaatccataattcataaattcctacaatttaattaaggaagaaaaaactaggtgacaaatgagtaatcaacatgaataagaaattaatgtaagagaacagcaaaagccaataattatgtatgcagcttccctatatttttagtaatcacttcacatctaccagacaccaagtgttgttgaagatacatagctatgagaattcttgtactctcttgatggggatatatatcagtacaacagacttgaggacaatttggcaccactcagttaagcatgggtgaatcctatgacccagcaatacaacccctaggtatttctcctagaaaatcctgaataaggaaacaggtgaaagaatgctcactgcagtattagatcttcatagtggctatctatgagaaggaaagaagagataaggatttaatgacagatacacagtgaccctcaatttatctgtaatgttttatttcttaagctcaatatacggtatatagttcttcctcatgctattactcatactttgttacttgtctgaatttttttcataaaagttaaaaagatgataagacttaccaagctatccacatctatgctggagtttacagcccactgcaatgtactcatgatattcatggctaaagtcaggataataccaactcttccttctccttctcctatagatgcacaaaagacgtaaatgaacctcatgttatttctctcttctgtgaacgactttattcacacttctcctagggcacatatcacattaaatttacatttcaattttatgctaattttaacaatttttaaatctcagttcatcacagcatctactaatagaataatgctctgcatatagtaagtattcaaccaggattttaaatcaaagagcgattgaatattaggaaagtgttgccctttttaaaaaatgttactggtattggaggtgttgttggtaatgggtaggtaccatatttgtctcttctactattattctataagtaataacggtaacatatattagaatgggcaatggggaaaagagatcctgtatccagatgagctgctttacaaagagaccaaaagcaggggaagagtgtccaaacagcatctgcaagatgtttaggtgtgttctgtgcctttgcaaggaggacctttgctaattgcatgctattgggaagtaagtggacttagaatttcaccggacagtcagaaaactaacagttctgccatttggaaagagaaaagattaccctctatgcaaaaaaaaaaaaaaaaaaaaaaaaagattactgtacctgggaagaacaacacttaagtgttaaattacagtaattttttttttagggctaaagaggacagctaattaaaattcatgtgttcagtattatggccatagaaattctctaagaggaatgttcttaaattattataaagttagactatcaagtcccaatcaagagttcttacatctgtaatgcatgataaaattgtcaaaagattctacaattgggagaaataattcatcttattattaattgaaatttttgtttctgcaattcctctaacagaaggcataatatacacagcatatatctgcatgtagtattaaattattttcatataggcaagatttatctagaccccaatatattactgttctgaaggttaagctgagaagataaaattttaataataagtcagataacatttatttagtatttaccatggaccaggcactatactaagtgttttggacaaattattacatttactattcaccccacacctatggaataggtaatattattgtgtctatttacacttgaggaaaatgaggggcttagatagttaattaatgtttgcaagttaacacagctgaagaccaattgagccagggataataatagctgggtggccaacatccactccggctgagcatctgatttgattggtaagttctgtactataatgattgttaaatgttttgattattgcccctaataaatcaagactcaatcacactcaaccatgttatagcatgtgttatattggtttgaattaattgttaacaaatcttcatttatgtaattcagccttctttgatcttattttcaaataacttaaaagaattttttaaagttgcttaaaattacagtactgatgaggattagtacatttgcctgcccatgtatattcctttcatagagtcatttcccactgccctagctgagagaacaacaaaggtggtgaacccactatcctcatagcagcagagtagactgcagttggacccctgagccaaaaggaagctgttttctgttctctccaggactttgagtttgtacagaggaactctcctgtaaattcaggaggccagaatggagacactacataaagtcaatgtggcatagccctggtagaccagaaaaaccagtcttcagagagagaaaggaatgaagcaaccacaaaaaggaatggacccaggacagatatagactcaagaagaagagctgcagctgactctcttgtgcctgttgcagcttctttaagagtcgaatggcaccaccttctcggtgttccatgaggcctttctgtaactccagcaaatgcctgctttcggtttgagtagaattctgttcctacaatcaaatgatcctacagatttggcattgatttggcatttgctctgccagtattcactgtcacatataagaagttatttcaacacttatcataaatactcagaaattcaaattcttaaattagagaaacaaatttacctacatagatttttattttacttattatgaaatactttgtttttcactaaagatcctaaaatcaatccagaacatttgtatttgaaaaacatggcactttcttttcttctttttcttttgaaaaatgtgacactgtctttcttttctgtgacagtttttctttgtgtaaaactcacaattagataacaaattttatctagtagagatttaaaaaaaacaaaacttaccgacaagaggaactctgtgtgtgtgtgtgtgtgtgtgtgtgtaaatgcggatgtttcatttcccctctttaggaatctattaattttgaagctaggacccttcaccaatatgagtatgaagaggtgacatatttccccttcaatcacagaattgctatctgacaatctgtgtgcatcggtttttaaaactgtgaaaacagggataatactatatatatatatgtatatatatatatatatatatatatatatacatatatatatatatatccgatttcaaggaaattatttgtttaacaataaaacaatggaaattcaaagaaatcacttgttcaataataaaccaacaaatttgttaattactaaactctaaagatatcaaaaattgataacctatagaatgcagcattttattcattgaaaattttttacttaaatgcttagctaaagttaatgagttcatagtacctgttgttaaaatggaaatgaaggtaacagcaatgaagaagatgacaaaaatcatttctattctcatttggaaccagcgcagtgttgacaggtacaagaaccagttggcagtatgtaaattcagagctttgtggaacagagtttcaaagtaaggctgccgtccgaaggcacgaagtgtccatagtccttttaagcttgtaacaagatgagtgaaaattggactcctgcctgtgaaatatttccatagaaaacattgcaaataacataaacacaaaatgtaatttcataatatcttgtacctgaaaaagactaaattagaataatcatatcacaaatgtcattggttaaaaagctttttttcacactggtgccattctttgaatagatatgatttgttattttattaatgagttaccctctttttttacttggctaccagagatgggaacttaaaaaattaccaccaatatttattcctctttcttggctaccactgggagttttctggctaattctaaattaattcttactaaaaaaattttcttttaagacaattttttcaagtatctaaattaaggaagtttatgtgacttgatttagctaataatctacaaagcagaaatatactgaaaaagtattgcctgaaaatgcacccacactaaggctgtcactgcaaaatgtgattccctaacagctcaagtagagtttgggggcacacgaaatggcagctccaacacatgaagaaagggtgtctgaagacaacaagccaaagggacaaatttggtcaagtatcatttgggaacccagagaaacctttagtaatagcagcactatccttgtttaatttgactgatataagtttattataaatgaatgtcctgtacaccaactgtggtaagattctatatacctattttaaaaccaaaatgaagtcacatggtcattaattaagaaaaaaaatccatgtgtactttgtaatatagtttccttttatatacacatgcatgtagaaaaaaattattgttatatgatgtaaaagtttaaaagcagaattttttttaagtagattaacaataaagaatctcaaatagctcttatagcttttttacaagatgagtatcgcacattcactgtcataccttcagattccagttgtttgagttgctgtgaggtttggaggaaatatgctctcaacataataaaagccactatcactggcactgttgcaacaaagatgtagggttgtaaaactgcgacaactgctatagctccaatcacaattaataacaactgtaagatcaaagaaaacatgttggtgagtaaacattttcacattgcaaagtggacaaagtgtgtcagtgatttatttctttttttttttttgcatactttaaacacctcaaacttttttttattttttttattatactttaagttttagggtacatgtgcacattgtgcaggttagttacatatgtatacatgtgccatgctggtgcactgcacccactaactcgtcatctagcattaggtatatctcccagtgctatccctcccccctccccccaccccacaacagtccccagagtgtgatattccccttcctgtgtccatgtgatctcattgttcaattcccacctatgagtgagaatatgcggtgtttggttttttgttcttgcgatagtttactgagaatgatgttttccaatttcatccatgtccctacaaaggacatgaactcatcattttttatggctgcatagtgttccatggtgtatatgtgccacattttcttaatccagtctatcattgttggactaaatactctccccattctattcctagtcagaaagtagccatttgcaagtacatttttcataggctctatgaaaattttaaaaattgtttaggtcactgataacatttttgaagtttgaaaacatggtgttctttgatctttggatattttcatttcccagacactttaaagtattgcatgataaatacattttaagtgaatattaatttaaaataaactatttttaaataattttagtatgaaggtgaatcttaggatttattttggttagacagtttttgaaagctgggcattcgtcttggagtcttttgattcagaaagttctgcttgaaatacaagcttgtcatttaggcaagctatctaacctttcggagcatattttctcatgcttaacattgaaataaatcatacttaataaatttctatatttctacattacaccaaatacatacatttttaaaaggtacaaagtccgctaacatgtacttcacaataatccatttgaataaagtataaagtaactgtctgcagaaaggattaaaaaaaaccactttataatatccatatgctgttcagtgagccagttctctacccgttaccataagtgacacatgtattttcaactgatataactttagaactgaaagggaccattatcaggtttatattccccattctacaagtgacaaatctgagacccttcaagataagtgtctgctcaaggtaaaatagtgggaatctgtagaaaataaccaagattttcaattttcactatacagtgctccaatccggaaagcaaatttgtcagaacattgtcaaagttagaaaatagaatgaagattacatgaggtatcaaaatactcaaactcaaagaagcaaagaacagaaccatgggtaacaggacaggggagagagggaaatggggagatactaatcaacaggtataaaatttcagtagtgcaaaatgaataagttccagagatctgctgtgcaacatttacccatggtgaacaatattgtattttacacataaaaatctgttaagagggtaaatctcatgttaagtggacttgccacaataaaattcaaattttaaaaagagaaaaataatagaaaatagagtgaacagagacttttttttaaaaaaagaaaatttataggtatgctttattttgtgcaacagatctgcttctgaaatatcatgaatagaatgaaatttcatttgtttgaaattaagtataaccagaggtaaaacataagtataaccagaggagctcacaatttgaaggacccctgtgattaattatttaacaaaatcaaaattaaccaaatttgtactgtatttggattgtcatatattatgcttccttaatatgagactctcttacaaataaaatgggtaaattaatataaaagacctctgcctaatcacttgtgaaacaacaacaaatgaatcttagcattaaaagttgaacagggcctggtgcagtggctcacacctataattccagctctttaagaggctgaggcaggtggatcacttgaggtcaggagttcaggagttcaagaccagcctggccaacgtggtgaaaccccatctctagtaataatacaaaaattatccaggcatggtggtgcgcgcctgtaatcccagctactctggaggctgatgcgagagaatcgcttgaaccgaggaggtggaggttgcagtcagccaagattgcatcactgcactccagcctgggcaacagagtgagactccatcccaattaaaaaaaaaaattgagcagaaatgattcaaactggcataaaagaaaaaatttgagagccatcacatatgtcaaaaatgttaatttataaaatgactatttaaaaattaacccttccagaggagttctgaagtgagcctcaaataattatcaagaggcaccattggcaaatactttcacaatcaagttaagaggttcacattccagtttttatctgatgtaataatattatatttgggaccagttatttacactcttaacatgaaaaacaaatgtcagcatttagtgactcaggacatgtttctttgaatgcatgaattcaacgcatggatttaaatattccatcagctgcttctaagttatatctttaaacagaacaactgaaggatatccaaaatgccaaagttcacttgggacagtaaatatatttgtttgtgtcaatcatttcagatgaggcaaactgacagtctggtttttctgcacctgccaatgttggttatatatacatacttatgtgataatccttcttttgttttatatgttcaatcaaatacagtattattattttgcaggggtagggaaagagcaagagcggacaatgactcatcccaacatgggcaacatcctattccaactgtttctccaaggagatcactgagactgtggcatttgctctctggagcttgacctaaaccagtcaggaagctcaggaagctgtgcttaaacctggtccaacaaccacagcttacaacactccttaaatcctgtcacttatggagacctaatgtcccaaggtcactttcacctcctccactccccttttcttctccatcctcaccaccaatcagtcaccccaacccaaagagtcagcctctgagccagcctgccctggaggcctattcacatctatcactcagggacagccctcataaaaccctagattttttctttcccctctcttttgttctaaaacttatctttgcttctgtcccttccttatggtccttactgtgggggaatgggctagctaatctgtgccaaagtgttcatgggtgaggctagtttcaagtgtaacccacccagggaatccatcttcattctaatacaggccttttggggggaggttggcttccatcaaatagtgatgccaatgccaaaatgtcacactttgtggccagtgattttgggaaagatggtcctttgtgcctctcaaatcactcccaagtagacagctattacatctaaatgtgggattgcctcaggtttgggccaggtaagcagttctgacttattattgaatttactaaacttatgtctattttgaaggctttggataattacaaaattaatgcaatagacaggacttcaaccctcaatcaaataaaaaatgaaaacaaaatcacatttgcttttgttattgtttttttaataatacagacatacttaacggtacttatttttacatacctggatgaagtcaaatatggtaagaggcagaaggtcatccaaaattgctatatctttggagaatctattaagaatcccacctataatatacaagatgacaaattcctcaaaaaacactaattttttaaagatatatcaatatattcaatactaagtttggatcacagtagacgcattcagaacccaaataagaattagcaaatagaatcagatagacttagaaatttttgtttctttccaaacattctaaataattatgtgttcaagttattgtcttttacttttaaacctttttaaaagtttcagattcttgtaagattcaagtaacgaccaatttctctgaaatagcttttactataaattatgtcaggaataggtgggtactcatcctgctttacaatcttacttttgcaaccttgcatttaatgacaacttactgttgtcatcatttcccttccatttgtattctataacataggggtctccttctcctctgacttccatacctttttgacatacctctaccgaaaccctggctgctctctctccctgcctgccccactgtcttgtcctcctttgtcatactctctttctgccctcttcgcagacaatctacatttcaacctgtcatctgaatcacggattcacatttgtaaggttgacaacttgttgcttcaattaaaaaaggttatatacaagtgtccactttgtaccaggcacaatgctaggcactgaaattactgaggtgaataagccatgctccttgcccttgaggaattcattgtctagacaggaattaaacaaacaattagataaaatgtaacataatactgtacaaataaagtgatattgaatcttatcatttaccccccataaactgcaggataaagtccaaaattcctagtttaatatttaatgccttgcataatttggcctcaacccacctacctagtacaagcttcctctgctcaaatatcctgtttcagccaaactggtctattctttaaacacactctacactttcctacctccctgctttccacatgcggttccctccacctgaaacccctttcccctcagctctcattgtcaaaatctatgtttcctccctttctcaactcaaatgcccctgctgcaagaaagcatcagtgtttcctccagctgggattaatctcttcctcctctggacatacttgatacatcttgtttgcacctctgttataatgactatatgcatgtcttatatcacaggaacttataaacatatcataactctttttctaggttataaattgctagaggtcagtgggttcatgccacatttattttgtatcacccataccccaagcaaaaaggccttatatgtaggaattatttaatacatatttattaatacattctttagcatatttaattaaacatatttgtatattttcatgataatcaaaaattgaaaaaatagccattgatatttataaacagtgtttagaaaatgaaatttgctttggtggaaagaaaaaaccatcctggtgcttattatatttcaaatggtttggaaccaactatgaacagcgttaaagggaatgaggagcttggaaaagaagaagtggaatggccagtgcaccctctgtgggaacaaaaccccacagaagggaaccacggggaacttatattgatttcccattggctatgtagcaggcaagtaaattgccttgtttcattctcacaaagatcttctgaaatattcttttcttcacttaacaggtgaggaggccaaggctcagaagagtcacttgcccatgatcactgctcttatagcgccaactcagagctcaggcaatgctcatgttctttccactgtgcctcatcgctcatgtctgactcttctagaaatgtgggcaaatcccctgccttctgtgggtctcagatttccataaaaaataaaatcaatggatcaacttaattagacatcttgagtctaaaattcttagctccaaaacagaggatggtgatgagtatatgcaaatgcggcaatatttcagcaacacacatgggcttcagaataaatatcaagatcttcctacatgttaataacactgaaattttgttacccagaaaatataatgggtttttcttatcttgagttttttagatttctgaaaattttagtcttggaatttattccttgctttatatcaaatgtttctgtgtcaactcctcctctcacctgtgaccttctccagggcaagaactgtgccttactcatcttttcataccataaatgcctcaacagagaaagtgctcacaggttgctatgaaaaaacttggggaaatccttattaacctcagtctttaagtgcaaatttgtttaatgaggaatcaacataattgatttctttcaaagtaccttattagtttttaaaatttttagtacctttattctgctactctgactttctattacttcaaatatgatgatataaaaatagttttaaaatacatttgggatccccctaccatataactttgagcagttacatgaaattagattattctaccccatcaaaagacttaatcaatagaaaaaatatattttccttgatcacttcaaatctcctgcccttttgagcaatactatatattggcaacaagatgcccagaagagagctagaccaaatatttgaaaagagaggtatgactgacccataagggccttcttgttctgctacagtcccaccaacatcacattcttacaaaccaagctactctaattatctaacacagaaatattaggagcaacaatatatgataacctataatatctgagacatgtgcatgccagtcaaatggaggttcaacaaagggcacatgcctctgtgcaaaagccagcactgccattagaaaaccaacaaaaccacaggccctattgatggtggatcagcagtttcatttcttagacctagtaaagtacctgctttcaacgtgttgagggttgacataggtgcttgaagaacagaatgtaacattttgtggtgtaaaattttcgacactgtgattagagtatgcaccagtggtagacctctgaagaatcccatagcaagcaaagtgtcggctactcccacgtaaatgtaaaacacataatacgaactggtgctggtgataatcactgcatagctgttatttctactatgagtactattccctttgtcttgaagaggagtgctgtaaagcaaataggaaatcgttatttggcagccaaagttacttactgaatttccaatacatgtaaatggaactaaacttgagtctaaataaatacaatattttgcattagaagagcatgcacccttaacctcaaaatcatactattattgcaagaaaatagatatgttttctcactattgatagagattgagttgttctttattaaattaaaaaatttgaagaaaaccctaaatatgtaatgttatttcaaatatttttattgtgtttcacagaaactgaacagaactatattctttagaaactgcaggagctgcacatgctcacaatttattcattttattttattttattttagatataggatctcactatattgtccaggctggagtgcggtggctactcacaatgatacaacactacagccctgaactcctgggctcaagtgatcctcctgcgtcagcctgtggaggagctaggactacaggaatgtgtcacctcacccaactaatggtcatcatttaaacaaaaaaccttatctttccactaccataatgcttgggagaaatgaaacaaagtggattacaatacatacaaacatagtggattacaatatttaatcaacagaaataaaacacaatctacacaataggacatggaatactcactttccaaggagccacagcacaaccaaagaagcagccacctggaatggaacaagacacagttgattttttttctaacatcttcacctattcctcccatgcccacatctaaattcacatcacaccatttgatgtgtgtaccaatatcaaggtacacacaatttcatcttcctttgctttgtgttcctgggtccagcagctgtactaggtgttctaagtactattatttgtgatgagaccacattaagttaatggaattcaaatttcactgaagtaaattctctgccatttctctcctttactcaatagaaactattgaacctcacaagaaagccaagatcacagctgaatgttttaaataataaacattttttaaagaaactaatctcagactgctggcagataattaatctgtttgctataaataattttattagccattcaatgattataggggactaatacttgtgaaatcaattaattattggaaaaggtgagattaatattaatggaaatgaattatgagtttcaggccaggcacagtggctcacacttgtaataccaacactttgggaggccaaggcaggcagatcacttgaggccaggagtttcaggccagcctggccaatgtggcaaaactcatctctactagaaatatcaaaaactattagccaggcctggtggtgtacacctgtgatcccaactactcaggtggccgaggcaccagaattgcttgaacacagaaggtagaggttgcagtgagccaagatcacaccactgctgcactccagactggacgacagagtgagattgtcttaaaaaaaaaagtttcagcagtgtaaaaagtcacagtttatgaataaagataaggtacattcaggttaaaacatattattggtactaggactacatagaatctctatagctttctcaaggtggaaacatttggctaaggaacaaatgttctgcaccatatataaacaaacaaaaaacctttttaaacaactgtgatttttgtagttctttttatatttagatcatctgtgctctgttctatttcaatttggcattccattctcataaaccatgtagagaaatttaatcttgtgttgatactatcacaattggaatattagaaatgacactgaaattatacaattagccaaatgatacctttaccacagaatgaaacagaaaaaacaaacagttgtgagtaaaacaattttggaaatgaacacagaataaaaataaataggagagaaacaaatatgcttggaataagatatcaacaagtcttattttatacctgaatttgccttaaatatttaacagtacttaagtttatataaaaaaaaaccttatggggaacacttaaattaagaaattacattaggaagtactataatgaggtatataagttttagttaaattcacatatcagatagtataacgatgaaaaatctaatggcatttttctcactttcctacttttcttcattgtacacagagcttctatgcactgtatctgtaaaaactacccttgtttccttgaaattcaagttaattcaaaatgaaaagaaacccagaaattagctatttcaaaagtctttgttctagcacaaaagtgtatttcctaagaataatcgaattactcaggatcctagataagggtgtacattctaagtcactctttatttggctattattatgttttgttattacatttcctctttgttctaactagaggagtgttaataatgctggcattgccaacattctttgaaggtgagtaaatctcagaaataattataatatttactaatggaacaataaccaaagtgatgttcaaagactggtctagtcatcataatataaaattatttcctcacggtttccacatagaactaccaacctaaactgcttctattgagtagaacaaaatattttcaaggacttaacataatactttaaaaaaatatttggtgtatatagaagcaattgagtaagcaagttctgtcatttcatttccaaaatgttttgaggttataaagtttatgcagtttatgatagagtgacagtcataggtgattatggtaaaaaggaaaaatatttttattttccattttctcagggctttaagaatcattccataccacatagaaaacagtgtgcttaatacccagatttcaatgcttcacaagtcaaatgacaccctaaaacataaaccaactgtcataaagctgccctaaaattattactattagtcaatagcagcagtggtattatgggaatatactacatatctactgtactaataatgtaaagccactcagggatttctaatcaacaaacagaagggaagacataaagaaacaggatacagcagttctatgacatattcttaacaatcatagaatgaaagcattaaacaggatcttcagatattccagtcaacaacaagactctctagttgttttcaaaagaaccaggaaactgcttcctaatgtattattttcatttcttctccatctagtcaatgatgcactgccaagcaggggttctaagaattaacataatagattttttttgcctatttatttggtgctaatatctaagaacttacaaaagatactgccctgtagtagggaaaatgttaccaaatacaaaagtagagtcactctctttccaaaatggtaagtgctaacaaactgaatagaccaaattaattttttttcagtttaatagctttgaagaaattttttaaaagactacatatttcatattgcaaaagggaagcctattttacctaacctataaaaaaaaatctaaattgaaatatgacccttaggaaaactaaaaatagacaaatcacttacaccaaggaataaatgtatcttaacctttctttaggttctctggtcatgagtagaaggctctcaattggatttaaaagaactaaactgtcatcctggattagcagttgtaccagaatgtgacatgctcatgagacatttcaatggtaatgagaaatgggcacactggtatcataaaggagcttagtctaaaagaaaaactatgtaaattttgattcaaagaaggcaatagaattgtgaacactggtgaatgaattgtttagttgtataattgtgcacatacttttaaaaaattactatttttctactatcaccaagtttttattattcaaaattttgagagccagttaactggcaaggtctagaggatactggccaaaactattcatcatatattacattatttcttttccagaaaagggcaatatcaattgttttgtccactaaaaggtaattttttgcaataattgtgacagttcaataaataatagatatttatatggtatttatattctctgttgtaatttagtttctttccctaaaggaccactgttttcttggtttagtgagctaataatattatacacatgtgaagcagatcaacacttaattaattaagtatataccattttaaaggtgcataagttcaactccatggagctgcatgagacaaaggtcctataaatttacagaaatcactaccacattcagataagttgaagacaatcaagtaatgtgatctttcaaggcagaggttcaaatcattaacaattataaagggttggttaagattaaatgggcacagactgagttttattcacattcatgttggtcatttggcatgactggcagacattaatgtggtaaattttaaatatattttaatgcaatatttattactcatgtaaaaataataaattacccaatctcgtatttttgttaaagtataaaaggaattattaaaattttcattatattgctgttatgaacttgttcacctcatactatctcaagttttataataatgagaattaaggatattaatgataacagcaacaaaccttgctcattatgtagcaagccctacattaagtgtttcataatcatgatgtattttaaaccacaaaatggcctatgtagctgtactattaaaatctccattgtataaatgagaaaatgggcccagcgagttttaactaacttgctcagtttcatggtgttaatagaacagagttagaatttacaccctgagtagtcggagtccagagttggcactatgctacactgcatcttgcatcaagcctccatttggtttgtttatttacaacagcagggcaaataacatgtattaccacactcagagatcaaatggaaacaaatggtttattggtacagtagtatacacaaatttttggtacatacgtttagatatttcttgaccattcagatgttactggaccatggtggagtgatcagatgttactggaccatggtggagtgatgacactttacaaatatcatcaagccttcttaattgaggttagcaacagcccaacaataagaaaaatgtacagttgtaagtttgggtctcagttatttacaaatttatacttccttaggagaggtggttctttttctgggtcatttattctctgaaggtagcatgggacttgagtttagatttaggttttatattaggacatacccaggggtgtcctctagaataaatatctgcagtaatcattcacaagctgaatccaagccacagatgtgttttgttgtgcccatatggtgttcattcgtttgtttttatttaatcaactacccgtattttaaaataggaaataattacccaaaaaaagctggatctctgtcttatcctgttacataaaaagatctgggaaacctgatccccagttccctcatgggaagcccttagctggtgctgagtgacagctgccttctatagataactgaagaacaaatgctctccattcagcctcccagccacatcacccactgatgctccctgccaggcccttttaagcatttatgtggctgctcatgatccatagaaaagcctcatccactgcttcaggcacctcttgtgtcgatgaggatctgaacttgtggcctaccatgcaattttcattctgcccccccgccccttttttttttttaacttggtgatgtgaagaacagtagaggcttggtaaagaaaccacaatggggacattgaagacaacaaaatttctgtaagcaagtgtgtgatttgaatctctaaaatggttgtctaaaatgaatgctaagccactaatatatacttttaatctcattctgtgaggaaatcttcatttaaacagtaattgcctgcatatttaataataaaatatctagagcagctgtgtccaaccttttgaataagagaacaattttgcttattggtggtggcacatatcacaaagattacgcatggacttttttcttttctttagctcatctgctatagtaagtgtattttatgtgtggcccaagacaactcctttcttcttccaatgtggcccagggaaaccacagggttggacatccattttctgcagtcaaattgtgtccggaattggtgggttcttggtctcactgacttcgagaatgaagccaaggacccttgcagtgagtgttatagttcttaaaggccgcgtgtcctgagtttgttccttctgatgttcggatgtgttaggagtttctttcttctggtgggttcgtgatctcgctggcttcaggagtgaagctgcagaccttcccagtgagtgtcacagctcataaacgcaatgcggacccaaaaagtgagcagtagcaaaatttattgcaaagaacaaaagaacaaagcttctacagaccccagcaggttgccacttctggctcaggcagcctgcttttattctcttatctggccccacccacatcctgctgattggtccattttacagacagcagattggttttacagagagctgattggtccgttttgacagggtgctgattggtgcgtttacaatccctgagctagacacaaaagttctccacctcctcactagattagctagatacaaagtgtccattggtgtatttacaaaccctgagctagacagagagtgctgattggtgtatttacaaaccttgagctagatacagagtgcacattggtatatttacaatcccttagctagacataaaggttctccaagtctccaccagattaactagatacagagtgctgattggtgcattcacaaaccctgagctagacacagggtgctgattggtgtgtttacaaaccttgagctagatacagagtgctgattggtgtatttacaatcccttagctagacataaagatcctccaagtccccaccagactcagaagcccagctggcttcacccagtggatcccgcactggggctgcaggtggagctgcctgccagccctgcgccctgcacccacactcctcagcccttgggcggtctatgggactgggtgccgtggagcagggggcggtgctcgtcaggaggcttgggccacgcaggagcccactgcagcggcaggttggggggaggctcaggcatggcaggctgcaggtcccgagccctgccccgcagggaggcagctaaggcccagtgagaaatcgagtacagcagctgctggcccaggtgctaagcccctcactgcctggggctcgcggggccggccggctgctccgagtgcggggcctgcccagcccacacccacccagaactcgcgctggcccacaaggcacccgcagccccagttcccccagcgcctctccctccacacctccccgcaagctgagggagccggctctggccttggccagcccagaaaggggctcccacagtgcaggggagggctgaagggctcctcacgcacagccagagtgggcgtcaaggtcaaggaggccctgagagtgagcgagggctgccaggactgccagcatgctgtcacctctcagaatgaattcaaaatttagtacagatttgctttgagtgtttttgttgttgctgtttatttatttacttatttatttatttagagatagggtctctctctggcacccaggctggaatgcaatggcacaatcacagttcagggcagccttgacctcccaggctcaagcgattctcccacctcagcctccttagttaatggtagcatacaggcacacaccaccatgcccagctaattttttaattattttgtagatacggtgtctcactgtgttgcccaggctggtcttgacccctgggctcaagcaatcctccccactcagtctcctaaaattctgggattacaggcatgaaccaccatgcctggcctttaatttcaatccaaataaaagccttctattttcagttttttaatctcttaacatttattataaaatctattaaaaactcttatctttatatttaaatatattttatatgtaatatgaaataataaaatatcaacagtgattctaattgtttaatttcaatccaaataaaagccttctactttgagctttcgaatctcttaacctttattattaaaaatctattaaaaactcttcttatatttgtatttaaatatattttatatgtaatatgaaataataaaatatcagtagtggttctacttgttgatttttcagaagctaagaactatatgaatctataccattatatactgtaaaatcacaaatatatgtaatatatacatatatacatatagtgatatatgtgtgtatatatgcatacttatacatgtatacatgtgtatatatacatatttatgtgtgtgcatatatatgtatacatccccaaactatcttaatttaactttaaatccagtaatactttacaatagaacattcttacctctgccagaaaaattactaagcaccaaattagcacaaaaattaagctcttgtggacagtaatatatcgaaggtatgtgttccatgtagtcactgctggtatgctctccatatcatcaaaaaagcactcctgaataaaagaattatggctattacaataagacagtacagtttcatgccaccattgtggttttatttttaatatatgaaaataaaagaatagtattacttgaatctaagtgtattttaacaaatataaatcattataaatgccatgtatgatgtcattctatagccagaataatgtctactggagcaacacagctttattaaaaatgagaaacatcgtaatttttcaaaattctaaaaatgtatcactgattatataactgtattattattggacaattttaccattaaaggcttaacagtggcataccttttatcaaatgaatgataccatctaaatgaagtttcccagaactctctttgatttaacctgtttcttcaggggtccatggacaagtacagttcagtatacttctagctataaaggtcttccaatagactgaaagctcatttgtgtttgaacatttcttagtaacttaggactttctctctttccagctgtgatttaaattacataattctcatcctaggcatattcctctagaaatctttgtcttttggcatagaaatacatttcaaaaatttgaaaaagagagattccagacagtccaaaggaaaaagagttttgtttctcacaaaatcaacaaaactcatgggaaagtgctatgaatcacaaagaagggctcctatggaattgggatatagtgcactggttaggagtatgcattttttgagtcagacagatctggatttgaacccaacctccaccattaacatcctaggagctgcttgaattcaagcatgttgccgaactctgaactttagtttccttatctgcaaatgtgaaaaattttaaataccttccagggtagttgtggggactaaatatatgccacctagcactagatgcaatccattaatagaaactattattagtcaaggatatcattctttacaactaaatttttaggctcaggactgagaaattcatttagattgatattaaactatatagatgggctgggcgcagtggctcaggctggacgtggtggcacacgcctgtaataccagcactttgggaggctgaggtgggtggatcacaaggtcaggagttcaagaccagcctggtcaacatgatgaaaccccttctctactaaaaatacaaaaattagctcggcatggtggtgcatgcctgtaatctcagctactcaggaggctgaggcaggagattagcttgaacccaggaggcagaggttgcagtgagccgaggttgcaccattgcactccagcctaggtgacagagcgagactccatctcaaacaaacaaacaaacaaacacacaaaaaaacactatatagatgaattatcatttaggaaaccttcataaagtttagaaatactaaaattacacactttagggatctattttattccctcattttacaaagaaggaaacttctgcctacagatgttaatggcttgtgtcttgtcaaaggtcatattattcacaaatgatctatactattaaacatatcaattcattacaaccctgcccatggctcatttcatccaaggcattaagttttctactaaaacaacaaaaactctcctttttatattatttcctgttttaaaaataaaatgcttttattcttaaaacctaatagaacaaaatttctgtctgaagattggcactagtacatgttaagcttatatacattctctaaaagaaatcttttcagaaacccaatgtataaagcaaactcacaagataaaaaaaagcccacactagctaaattcaggcaagactgatatacaaaccagaatgtgagttagtcctatcaagaggctaaatgtttatataccttatatatgctacttccatacagattattttgcgagctataaataatgaaagctactatttatttatacagttatttatactgcacctcttcccacagagggttcaagatggtaataaagcaaatgctttctaacttatagtcacagttatcactggcttagtagaggaccaaaaactaaatcctttcccattttatgggaagagatatgtccattgcaaaaagaaatcatttgttattttacattttaacgttgcttgtataattaatgaacttcatactttctgagttttaagatacaccttatcctaatcctatgattttagtaaattttgttacatgctacatattgcattctactcaattgcattctgtggggtgaaatacccccaagcgatgtatacctacctttaagtcttcttcgttaatttcttcacttatttccaagccagtttcttgagataaccttcttgaatatatatccagttcagtcaagtttgcctgaggggccagtgacacttttcgtgtggatgctgttgtctttcggtgaatgttctgaccttggttaactgagtgtgtcatcaggttcaggacagactgcctccttcgtgcctgaagcgtggggccagtgctgatcacgctgatgcgaggcagtatcgcctctccctgctcagaatctggtactaaggacagccttctctctaaaggctcatcagaatcctcttcgatgccattcatttgtaagggagtcttttgcacaatggaaaattttcgtatagagttgattggattgagaatagaattcttccttttttccccaaactctccagtctgtttaaaagattgtttttttgtttctgtccaggagacaggagcatctccttctaatgagaaacggtgtaaggtctcagttaggattgaatttcttctttctgcactaaattggtcgaaagaatcacatcccatgagttttgagctaaagtctggctgtagattttggagttctgaaaatgtcccataaaaatagctgctaccttcatgcaaaattaatattttgtcagctttctttaaatgttccattttagaagtgaccaaaatcctagttttgttagccatcagtttacagacacagctttaagatataaaaacatataaatatcaattttataaatactttattgcaatatgtctcgtattttagcattttgttaatgttttattgcatataatctctatcatacaattttattatattttaaatgattctataagtactctgtagtaattaaattggtaccttgtgaattctgatagcatgaaataacatgctatattgaaaagttgcatgttaacagactgagaatgaaattaaatttcctatattaagtagatatttgactttgagcaaatcatttatcctcggggtctctcagtttatttatctagaaaatgaggaaattattagatgatctttaaggtccctagagatttgtacttcatttcttttaaatgtcagagctttgttgctctttaaattttctattaatttcttttttacattttaggttgaccatcaatttatttctcaagtgtttacattaagactaatctgtttcactaaaaataaaacagcaataataacaactgagaattcgataattaatttgactctcctcaaatagaattttaatctattctagaagtaaatcctgactagaatcatctaagacatatcagtttttttaggcattaaaatgtcatatatcatatagaaagacacattgttctagattatactgtaacacactaacacaatacaaatgtagtaaagtttatattgatagaagttacttttcacaatctcagggttgaaaagatagtatcttggatattaaatttaactaaattctaagaaaggtacttctaggaataacccagccattttatatacatatacatctttattgcttaaagtctttatttttagaagagtataataactgttctcctaataaactacttgatagtccattaaatcattttgaaactttgaaatcaagccatataactgactgtctgtctgtctagggaatttcatgtacattggaccctaacaggagttccaaggaaatataagtcctgagctctgtgtgactgaggaggagatctccaaggaagtattgaggtagatgagtagtctaagcatattaaaccagtaaaacacttagcatatatattttcttaagaaggttactatctaaggagaagacagaataaaatactaacacaaaaagtaaataaaaatgttaagtataataataattaaagtaatatatatcacaaggcaatgatactgcaaaaactacatagatagcaattgctataacagtatagcaatgagagaaactggtttagcatgaggcggtgagaaaaggttttaatggaagtaatcttgaatcctggcccagtagggcagatcagatttgagttaataccatgctacattctgccataccaacaatggtgaacatatttctcaagaggtaaaatgcaatctatgatgggacagtctgtctttcttttattttagcatgagcattataagtaaggtattcaaagaacatacctttcaaatatttctttttctgttaaaacatctaggtatccaaaaggagagtctaataaatacaaatcagcatctttgtatactgctctaaaaagaaaatggaaattaaattacatttcctctctatttcctggtcatctagtgtagatgatttgccttaaacagttcactacatgcattacaatatggtcaccacatcgattcactgaaataacactattctcaaaagtggtgcagaagtagcacttttatacatgtttttactatggtagattattttaaatgaggaataaaggaataagttgcagaagatttttatcacttttcacaacattccaagaactgctgaagtgattttgctaactgtaagtggcataaactagcaaaagtcacaaactgaactgtaccatagcatacactttaaaatattaccttaaaaaatattttaacaatagtatctatttagaggcaagtaccatgctatgtgctcaaaatacaatggcaaaaattatacagttcctgcccttgaagatgttgggttttggtgaggacaccaaaaagaaaataaactattccaaactgtaaaatgtcagagacagctaataaattacattacttatgtgaaattatttttaaaatgtttttctaagtgttaaccactatcaacaaattgatagcagtgctgccacaactgtataattgatattgcattttgttccttgtagtttcagtctctatatcatattcataaaagttccaaataaggaaagtatgagtaagtcacaacaaaatgtatatccatattattttactatttagctaaaatatgaaaccataagcaagtaaaatctacattgagttgaccttagaacagtaataaagatgaagacacagttcccatattaatagaaatgagataatttcttcataacatttaaatttttcaggtgtgattgatagtaaccttacttatatctcaagtacataggattctctgtttatacatgtaattgttggtacttctgtaataaagaaaattgtattcagcacacaattaagaaatttttaaagccaatttaaaaatttttttaaaaaccaatggcaaaactttaaaagtctaaaacaacctttatagtgtaacttatttttgaagacagtatgcaagagctacataatggatcccatcaaaatgtacacagtttcttccccacactctgttcttaattctctccctcacatctatgacaagtttcttatgagattagaaataagaaattcatcatccaaaactggacaacacattacacattctgatcagaataagaacagacaattatttttagttcctcaaagtgtgtgcaccttacagcaaaaccaaatcttaaactgataacacaaactcagttctatgttggatgtctagaagccatatactctatcttatctaaatttgtggaattcttagaataagtcttactttggctcacagataaaaacaatcaacttccatttatttagaagcctgtgaattatccgtatctattgatttattgccttacagtgtatttccaagatcaaagcatggtttaatgtaaagaatcaaaaggacctggttcaaactgtgactctaccattttcctgtatggcttttggcaagttaacatctaacagcctcaattatcttatgatctcttctgtaaagcagggagaacaattcttactttgcagagctgtaaggggattacatacacacaaaagtacacacatgactagaatactaccaggcaattgcaggtgctcagttagggttagtttcctgtctcagcttttggaaagcaacagaaagtaagggaaaggagccaaaacatcaatgagtcaatgtgatttcttgttaacgactttggcaacaaagtgagaagaattttgttcagataaagcttgagaaacatttgacatcagagtcaccaataattgtttaaactgaaagttacagtttaaccacaaagctctctccttgacatacattatctatatttacatctctttgacagctttaaaatgcttggaccaagagtgtttctactaagggacctcctcccccaacaatgttaatgcatttgtcctgtttattttaaatattatagattttaagccaagtgacatcatttgccttcctattttgttatgaaaattatgatgaaaaattttgaaaatgtatgtttatctataccaagaagcctaaagctggtgtgtacattggagtggcagggtctatgatggaactaacagatatttacatcttctctgtccagtattatgcagaatcctagagttttccatttgtagtaaactatactatgaggcaaacaaatacactgacaccaagatacgggcacagattctgagtaaccataatctctaccaaatctggatactataccattatttatagttcttaaatgtgattcttaacccactagccataaaaccccaggattttttcaattccagaaacagaatataaagcaatagagaaatgtctgtaatttttttacatgaatgacatttacagcaaatgcttgctagaccaataattagttattcaccttgctaaagaaattcttgctcgttgacctccactcagtgtgattccaccttctccaagaactatattgtctttctctgcaaacttggagatgtcctattaccaaaaatagaaaattagagagtcacttttagtatgctcaatctgaatttgaaaggcacatcttccttctaatgtaatcatatatcacactattgctttaaccacagttgaaattttgaacattgcatctccattatttcaaatgcaatttatttagttggtcaaaaacaacattgctgaaattttagatgtaaatttttctgtaatttttaaaatgtcatgaatgatcattaaataataattataaaataccaaaaattaaaatatgtgtatatttatgggtatataaatatgtgtagatcatccataggtccattttacaaattcaaatgttatcaacatactaaaatgtacttttctccaatttaagttcactcttttcaaaagaaatctcccaaaatgaacaaacctcctaagaagagaaactaaaagaacattattcacacccctgcaggatctaagtatcttcactgggcttccatgggtccaaggcaattcctttccatgcttctgtcacctatcctcccaactaaaacagctttcttcctcgtccatcctcagcacctcattctcacgacctctctccattcattctgcccctcctgtcatcctttctcccaggtaatgaatatttctgtggtaacaatcattctaggcattgtaaaagaagactggaatttatgcaaaatagtccttgactcctaggcattgtatgtctaatttagaaggtaagtcataatcctggagaaagctaaatactatcccaaagatttaactaaccattttaagatagtttataaaacagttcacaattaattggcaaattaattttgtacataacagaagtatacaatagatagaataccctagaggctttcaaaccgatgggatttggtctgagacttcaagaatgcgaagagttagataggtagtaaactctcgccttaaaaaaaaaaaagtctctctcccttttctcctcccatccttgtacattcgtttccacctcctccttcctcccctctactaaaacttctcttccatatgcttcttccttcttctttcacaatccagaaataatccaatattatctatatctaaagtatcaaaatggttacttctgttattcatttgttccatttatctaccatatggacataaataggactttacatgcaaaactccaaatgcacaaagtaaatagattaataagtagtaatttatattaagaaccatttggtggttcctgttggctggcatcatgctagctgctgccctcaaggaactgttgctatcaacatttctgatctagagtaacaaaaggcctgtgaaaaaaatgctgacatgttggaggagatgtagcaggactcagtggactcggctacttaggcactggagaagtaaaatatagagaggtcgttaatacccataagcactgcttatgagaaggaccttcagtggttatgagacatgtaaaacataggtctttatttctttctacctggcctaaatgagcatgcttttgttcaactcatgaactggaccacatacctaggattccatccaaataacaagaattgcagtggatttcactcataatttagaagttagacttcacacctaatttagaaggtaataaggtaatttagaggtgttcatgcaagtgctcctttagtgaggctgaagatttcagttttacagcaattacaaaacagctcgtgtgtgtatttcttctctcctgcctcacatttttcctttttcaaatcgtattctctttttaaaaactaaatctggttgggcatagtggctcacttataatctcagcacttcaggatgctgggtgggagaaatgcttgagattggaagtttgagaccagcctgggcaacatagcaagacccatctctacacaatttttttccttttaaattagctgggcatggtagcatgcacctgtagccccagctactcaggagggtgagggaggaggattgcttgaacccaggaattcgaggctatagcgagctatgatcacaccactgcactgcagcctggatgacagagcaagactcaatatctaaaaaacaaaacaaaacaaacaaacaaaaaacacttaaatcttttggagaaaaaaagagaatgaagagaatggtttgcttttgccttgtatgaatagattcactgtaggcttttgaaaaagaggcaaattttctaatacattattaaaaagcaggaggttgctagaattattacagttttccattgtttttttcaaatttgaactcaacattgtattaattaaattggttaaaatttcaaaatatttttaagtattaaaaataagtagttatcttgacagtacgattataacacagttgactatagaaaatagattattgatttagagagtatagaatcctagctcagtgcaggcaattaatgaagatttatggaaagaaggaaaagagacagggaagggaagttaatcaaatattaagttaaaaataaagaagtacatagaagaaaataaataaatgtgtgcagaggagaaaaagaaagaaaattggagaagcaaaaattgtcagaagtagaagtagatatctatatattaaaaggtcaaaaagataatagcgggaaaaaaggacaagaatactgaaggggacagtaagaaacagatagaagataaggaactacagtctatactttagaaaatgtccctgctgacaacaaccaagctgagaatcaaatcaagaactcaatcccttttacaacagctgcaaaaacaaaacaaaacaaaacaaaacaaacaaaaaaaaaaaactaaaatacatgaaaatatacttaaccaaggaggttaaagatctctacaaggaaaactacaaaatgctgctcaaagaaatcacaggtgacacaaacaaatggaaacacatcccatgctcatggatgggtagaatcaatactatgaaaatgaccatactgccaaaagcaatctacaaattcaatacaattcccatcaaaatatcatcataattcttcacagaactagaaaaaaatcctaaaattcatagggaactaaaaaagagcccacatagctaaaggaatactaagcaaaaagaacaaatctggaggcatcatattacccgacttcaaattatactacaaggctatagttactaaaacagcctggtactggtacacaaataggcaagtagacaatggaacagaatagagaacccagaaataaagccaaatacttaaagtcaactgatctttgacaaagcatacaaaaacataaagtggggacaggataccctatctaataaatggtgctgggaaaactggcaagccacacgtagaagaatgaaactggatcctcaatgctcaccttatacaaaaattaactcaagatgaatcaaagacttaaatctaagaccagaaaacataagcattctagaagataacattggaaaaactcttatagtcattggtttaggtaaaaagttcatgactaagatcccaaaagcaaataaaacagaaacaaaaataaatagatgggaaataattaaactgaaaagcttttgcacagcaaaataaataattagcatggtaaacagacaacctacagagtgggaaagaatattcataaactatgcatccgataaaggactagtatccaggatctacaaggaactcaaacaaatcagcaagaaaaaaaaacaaataattccatcaaaaagtgggcaaaggacagaatagataattctcaagatatacaaacaaataacaaacacaggaaaaaatgctcaacatcactgattatcagggaaatgcaaattaaaaccacaatgagataccatcttactcctgcaagaatagccacaattaaaaagtcaaaaaataatagatgttggcatggatgtgctgaaaatggaacagttttacactgctggtggggttgtaaactagtacaaccactgtggaaaacagtatggagattccttaaagaactaaaaggagaactaccattcgatccagcagtcccactgctgggtatctacccaaaggaaaagaagtcattatatggaaaaaaaaaaagcacactcatgtttacagcagtacaattcataattgcgaaaatatgggtccaacctaaatgcctatcaatcaacaagtggataaagaaaatgtggcatatatacactatggaatactattcagccaaaaaacggaatgaaataatggcctttgcagcaacttgaatggagctagagacaatttattctaaatgaagtaactcaggaatggaaaaccaaatatcgcatgttctcacttacaagtgggagctaaccaatgaggctgcaaaggcataataattatataatgtgctttggggacgataaaggaagggtggagcgggggggggataaaagactacatattgggtacagtgcacactgctcaggtgatgggtatatcaaaatctcagaaatcaccactaaagcacttatccatgtaaccaaaaaccacctgtagcccaaaaactattgaattaaatttttaaaaaagaaaaagaaaatatcccttctggatttaaatgtccaaagactacaaatgcaatttcattataccaattttttaagacaataattaagaggctgtttcagtcaaatttctatcttaggtgtctataacatttatattttaaacaagtcaaggaaataggaggagggagaatggaactaaagtattcccctccttctttcccatatgaataaggtgaaaaaatattagagaaagagatcagaagagttcatgtgaactcaggctttgcacactcagatcgaatggaatatcaaattcctccaaagaccagaaacagccctccttttagtcttatcattcttcaaatccaacttaaagcttgttgaggaaaaggagaaaatgctttaagaaaatgagggatttagggaaggaattgctaatagtttcttggtaccatgttactctgtccatttcaattataaccacaagctactctgattctttttttattttaagagtagtgttgtgtgtcccaatgcctggtcttttcaacactttgagtcagtaagccatggtatgcattccaggagggcccaggcctccctggggagatggctgataagagacagtactctcctcccccttgtcccagattagagggaatgggattcctcagggtgaaaccttcccccatacttgggagatcttccaggttgcgtgtaccctgggaaaaatgccataaagaaatgcatccaagtgtcctttctcctgagtcactgctgagttgaaatctgaattatgtttgtaaaattcattttgagagctatcagatgtcatgtaaactgtgcttgtagtggttgctcaataagtaacaaagctggaatattgaattggataatgtgagacccagaatttgaaccctggtctgtctggcttattgtgaaatctcagttacttaacagctctctgactcaattcctctaacaaaaacctgggtcaaataatagtttatgtttcataaagagtgctaactatgaaaattaagaaagtggcatttataaagtaattctataaatataaagcaatgagataaaatgtaacaatccaagtggaattttttttaattctaaaataaaacttggctggacatggtggctcaagcctgtgatactggcactttgggaggtcaaggcaggtgaatcgctggagcccaggagttcaagaccagcctgggcaacatagtgaaaccctgtccccacaaaaaatgcaaaatttagccaggtatggtggcacacacctgtagtagtcctagctactctggagattgagaggtgggaggatcgcttgagcccaggaggtcaaggctgcaatgaaccgtgatcactccattgcactccagcctgggtgacagagtaagatcttgtctcaaaaaataaataaagcaaaataaaataaaactttaaacaaaatacaaaacatgagtagtaacattagtcaaagagcaaaatgacctgttttctagccctgtctccattactggactaacagctttgaggaagtcttttctggccctaacttgtccatctataaaatgggtataataatatcttcctttaacagttgtaaaaatttgaagtaatttaatataaagggctggcccataatatacactcaaacattggtaactctcataattttgtaatgagatatttatcaatgatctatatatgacattcatttccatttatccttgaatagagtgtttacctgatgtgataatatgccccattctaccattacaaaaaaaaagcagatttttaaggcctgatcacgtagcttttattagcatatcatcataaggtatgtacaagagatgatgtacacaaaaagcactggacttagaatcagaagctcaagtcccaggtttgcatgaccttgccagatgtactattgttgaagttggtatgtatgtagccatgtgattttaaactaaaggctaggattcttaagggtgaggtcaaggtagacatgatattcccagacaagatcttggcttctttcaccttccaagcacgaccacactagagatgaccaattaattttattttacaatgctaaattgtactatgatatttttattcatcttattaccttataaacgaattgagggaggatatacaagttctttaccttgtcttttctgagaaaatgtatcttgcttttaggatgactaatcgtttattcgaaatttccactagaatatgtttcagcagtaaaaacaaacaagaatatctttaaatccccacacttgttgctaattgaataacatactactgaatgaaaaatacctagatacataaatattttaataatcaaccccacagtaactgtctcgataagtcaatatcaggatactgtaagaaagtagatttatgaaacctgccttcaagcacttctgtgcttgaattcacttgctcacatttatttgcagtctggactagactagactgaaagtgtaagcttttgtagttcataaatacgtttattagatgctatgtgatttaccctggcatttactatccacacccctcctcataaaaatgacctaccaataatatcattgcacataaatctctatgattttgtgatcttatttttctaagacataccctcatgaatgggatggctaggtcaaaagtatgcgttttctttatttttaaaagatattgtcaggttcctttacaaaacaaccaaaagaattatatttatattagcaagttttgaaagtacccttttccccataatcaccaccaccaacagatattaatataatcacacctcaatttttgctaatttgccattttaatttgtattttccttaatacctatgaaattgtaaatactggccatctgaattgttctcctgtgaaatgcctatttttattgaagtctgtgttatacattcatttttatttgtatgtaatagatgttaaaaaccttttttgctgcatatgttaaaaaacattttttcttttctctttttcttttgcactatccatagaccatctatcatgtgcacagttaacatttcatgaaatcattatatctgcttgaaattggaattcctgtatttgtttgctatctttttttcttctagtatttcaagtgaaaaattcctatatttgttgaaaagtactacccaaccttcaggttatacattgagtatcctatatttcttttcaaatattattgctttttaattaaaaaatttaatcaaggtataatttatggttatatttggtatgagacatgaatctaacctcattttcttttacttgaatagcaagcatgatttattacattaatatttttatactgaattcatttagcatctatcatatatcatattctcatgtttcctaagatccatttctggcttttctgtttggttcctctgatccatttttttattcctgtattaacactgtgctaggttttttggcactttggtttttttttttttaatggctctaatatctaacaacgcataaatcttattcataaatttcttgactctctttggtcatttagtcttccatataataacaaatattaacaatactaataacataaataataagaagaatagctaatggatatttgtgcttactatatgtcaggcactgttttaagcatatctataagaaaagatgaatgttatcccaaagataacatagctaatagatgatagagccaggattctaactaaggcaatttgtctacaaagcatgcactcttaactattctttattttttcttcttaggtgaaatttaagttccaattaacaaaatttcaaaaccaacctcattgggatgtatttataattttattaaatgtgcatatatttggagagggttcactttttaagatgcaaaattttattaaaaattatgatctttctattcatccagatcttattttatatacttcaataacggtttattcaattgaattttctccatatatgtcttataaatttcttagtagatttatgtctaaatattttacggtttgctactattatgaatcaaatagttattagttttccattttaattcctaaagggttattgcaagtagaaaaaaagctacattttctatatttatctcttatccagccatcttatcatatagctaacatgtttagtcagacatattcaatagcaactttgttgaagtatgactttgaaagaagaagcaaagcaactgttaaaaaaaaaagtttgactgagagaagagttatattagaagggtttaacatatatcttaaatttttaacagaaatttagatatcttcattagtggaacttaaatatttggctatttggttgtgttaaatttagcttaaaagagagattttcagaattacttcaaaaagatctaaactgacaggaaaatgaagatgtttcaagcattagacaagattttacccttagaaatgctctcctcaataatatttaatggcctataaaatgtgagtttcatttataaatatagtacatctaaccagaatttaccacagctgctatccaaaataccaattacaactgacccttggacaacgcccttggacaacatgagggttggggtgctgactccccatgcagtcgaacacccacatataacttgtaactaccagaaacttaactagcaatagtctactgttgaccagaagccttactgataacataagcagtcaattaacacatacttggtatgttatatgtattatatactatattattacaataaagcaagctagagaaaagaaaatgttattaagaaaaccatggggaaaaagaaatgtatgtactattcattaagtggaggtgaatcttcataaaggtcttcgtcctcatagttttcatgttgagtcagctgaggaggaagagcaaggggaggagttggccttgttgccttaggggtgtcagaaacggaaaaaaaaaatacgtgtaagtggacctgcatagttcaaacccgtgttgttcaaaggtcaactgtacaataacttggctatatacacatatacaattgaatatacatgcatatatgtacatgtatatacacatatatgcaagtgtatatatgtatatgtgcatgcatgtgtcctatatagccatatatatgtacatgtgaatgtattcatagagcttgattcctatcattcactattatggtgctaagatagacttggtatcctgcataagtaaaaggggatgattattttctttctgaactaggttactacttcttatcaaaaaagtaaaacacatgtggaagatatggaattcataagaattcatttgccccactttccaaagatttatcattttcaatcctgttacataataacaatggttatgtattatgttatgtaacatgttcaactgcatggggaatcagcacccctaacccccacattgtccaagggtcaattgtattggtattttgcatagcagctgtggtaagttcttgttagatgtactgtatttgcaaatgaaagtcacattttataggccattagataatactgaggaaagcattgctaaaggtaataacaatggttattatgttatgtaacaggattgaagatgataaatcaagaatgcttatcatatatcccatgactgcaaaattcaggaaagccctttttttcctcagttaataaagaatatcttggtcaaagaataactgtaaaacagtagactgtgtgatccactttaaacaattcaagttgttcatcattcaagctgatcatgtcacgcttctgcttaaaacaacacaaaacaaaaaatattggatccatgtgaacttcagaataaagtccaaactttaaaaaatggcataaaaagacatttcctagcttatttcttcagcctcacctcccagcactcctctatatccaccttacccttcagccacattgaagttttatagttctccaaactcaccatgacttccatcactttgtgttttcacatttcctgttccctttgtctaaaatgcctgtcctctacttcatctggcaaactctttcaagatcaataaaaatttaatttcctctgtaaagtctccaatgacttctctgacagtcatgcgtttctgttctcctgtcatccattttcttatctgttcacatatctctaccttcgaagactgtgagcttctcaaaggcaaggggaggagtgtgatttgctctatgctttgggagccagggcaagcttaattattgcaggcaatatgttccaagcagtgagtggaagtattttagataacagagacaattaaggtatagcctctcatttcaagagcttacaatctagtgagggtatagaggacaacttaatgaaagagctggcttctgagctgcacttttgcttcatgcataggagatctgttgtatcttcctctgcccagtcttaccgatcctagccctcacttgtctttatggccagcttgagacactatgatgcctcaccagaggaaattctctaatcctaagtaataaaaaaagttaaataataaagttattgttatttcaaaagtagatactgatgtgagattaaacaagtagatgatagaataaatacagttgtgccttggcatctgtggggaattggttccaggactctctgtggataccaaaatccatgaatgctcaagacccttatataaatggggtagtatttgcatgtaacatatgcacatcttcctgtatactttaaatcatctctagattacttacaatacctaatacaatgtaaatcctacataaatagttgttatactatattgtttagggaataatgacaagcaaaatgtatgtacatgttcaattctgacgcttttctaaatattttctatctgtggttgattgaatccatggatttgaaactcaaagatacaaagggccaactcttccataaagaaacacatgcatagatcggaacctagaaaaaatatgtcagaatgacaataggggaaggagggactactaaaaaattatcttgggacaaatggctttccaatgaaaaacaataaaattagattcttaacttacacaatatacaaaaattaattctaatgattgcaactttcaaacttttggcaatatagaataatatatttatgaattctgctagaaaagatgtgttaaagagaagacacaaaaatataaaccataaagaaaaatatggataaaagtgactacataaaaattttaaaactctctacaacaaaagatcccactctagagaatggtaatgcaatgtatagaactgtgttagtccaggacctgcaggttgcaaatagcaaaatggtattaaatgtgcatggatttattaggggaaatatttgtataaaaggaaataaggagagaggcagagaaggctatgagacctcaatgtaaattcaatcccctagtaaaggaaagaagggtagaaggctggatggaagatgttagaacactgagcagtctaaggaaggtttggcaaagtcatttatgagccaaaaatcagccactaaagaagtctcatatctcccaaatacacatctgctttagtatcccagctgtactcattcattcacgtgcaagaaatcttgagacaaactcagtgcaggattttaatacacagcatctggggctctcattcaatcacattccctctagcaaggcctctgtaaggcacatctcatggccaccacaataacttaccaaaaagataattggtaaaggatatgaaatcagaatgactaacaaacatgaaaatatatagcatcttacaagtaattggggaattccaaattagaactagaggtagaacaatagagattctgatttacaaatcagaatggcaagaattaatatgtctgtttataataagaactttcaaagatttgaggaaatgggaactttcataagtggctggtggtactataaattgtatggctatttcaaagggcaaattggcagtatctagtgaaatttaaaatgtgtgtatgtatcatatgactacacaattcacctatagatatatatgtcagaaaagtctcttgaatatgtgcaaaagagaaaaattcaaagattttcattgcagtattgagtaaaatcctggaagaatctaaatgtccatcaggaacagaaggtataaataaaatgtgacacgttatgggtacaaaacaacaatgaaaaaagaatgaaatagaattctacataccagcagcatagctagatctcaaaaagataaccgtagccaagaaggcaaattaaagaagaatgtgcacaaattatacaatttatgtaaattttaaagccacacacaaaaaagctactaaatattgttcatagataactatatgtatatatgggtgtaaatttatgggaatggattggaatagtacatgtcaaattcataatagcgattgtctaaagctgggggttttgtgaaagaatgatggtaagaagaatggggtaaaaagtcctacttagaatttgtcttcgcccctatcaaggcagttaagaaaataggaatgttgtcatatgaaagttttctgtctataatagacgctagaaatacagattacctttaaaagtgtgaaaataaaagattcccacatctgagaagatttgatgttctgagctaatgtatttggcctccttttctggactgaaacatttatataaagagaaatgtgtacatttggataactttaataataagtgtttcagagacataatatgaagctgctgaatctggaataaaataaaatagtggggtaggatgaggagaattgtaattaagttcattattttaaaacaaaatacattaataataccaatatcctgctattaatgtctgtacctgttctgattacctaatttattgttcatttgtaaccacattattagtgtttggctttctctatttgatttaacataaaacacttcattttgtatgcactgttaaacatttatctttgctgattactaagagcgctcaaatctggtaatatatttatcttaagggtgttggttttccagccttcacagtagatcttcccttccatgaaagtataatctaaaaaaaattaattccacttgatgctatcataatttttttaaaaagcagtatgagagcctgtgctgcttatcagagaagccttacacacagggacaaattctacttctctttgttcatactacaacttccttcgagttcccttggagttatccacaaaaattgttgtgggaaatcattcattggaattaagatgctgggtatgaattgacctgttacataaaaattactgagatttaaaaacaatgaaaaccttagtcttaaatcaaatatagagttttaatattgtgttcaattaattttattgttgaaagggccctgaaaaacctttctttcaaaccatcctccactgccatttcaatttttaataattttctcagcatggtttaatctacaataaaaagtcaaattgtttggatcattagttcttaatatgtggtccttggaccaatttcagaatcacctggggagcttatttaaaaatgtttcacctactcttactcaggagaatttggacagggtaatctatctgcattttgacctgtgattactatgtgtactaatgtttgagctactcatctagatacttgttttttggctgatttcctttacaacaagctggtcagaaaggcaaatgtcagcttcaaaggattctgtgtatacaacacattgggtctgtttgagattgtaaagcacttgagaatacttagataaagagtactagagagggtcaaagtaatattataataagtgtgcaataaagattaacttactttattattaaggagtgcataacaacatatccaatgtgatatatgcacttttcacataaatgtttataatttcatttttttaagtgcttacattattcaactggaccaaacaaaccagaagttgttaaggagtaattgctaatataaagcttattaactctgatttgcacatacaaagggcaatgatatagggtgttgctatattgacagaaagagagagagagagcaagagagagagagagagagagaaagggtggagtgttacatttaatggtcctgtgtaattttgcaatatttactgagtacatttgagcttcctgtgactttgtagataggaaaataccataaacccttttttaatggctggcttattactctttataacaaccttgacaatatagatgcttgtggtaagggaggagggtaagaagcttggttgggtaaaggaaacatgaactttagaggtaatgccattcaataaagcatgtcattaacactaaatcattgggtggttagtgtcattgttattaatatttgataattactaagcacttgtgctttatgcacaaggaaaatggacaaggggggaataagtgtggtaggagcagagggaacaagtagaaagaacagaggaagggaagagtagagtgtgtgagagaacgtaagagagccaagagtattataaagagagagagaatgaagtaacatttttgtatacagctactatacatgtgaacgtgtatctgagagtgttacatggccctgtatgatatctatcaacataattcaacttccacagcagaaaatagatactaaataattcagaaattaaaattggggttctgtttttttaggaaagattgtttgttgacctaagtcaaacatgattactaataactgtatatagaaatattggctaaagattaatcaccactagaaagcatgagaactaagaatcttcaatcagcttaaaaaataaaaaggggccaggcgtggtgacttacacctgtaattccagcactttgggaggccaagccaggcagatcacctgaggtcaggagttccagaccaacttggccaacatggcaaaaccccatttctactaaaaatacaaaaattagctggacctggtggcaggtgcctgtagtcccagctactcaggaggctgaggcaggagaatcgcttgaacccgggaggcagaggttggagtgagccaagatcatgccactgcactccagcctggacaacagagcaggactccgtctcaaaaaataaaaaaacaataaaataataaaaaaaggtttttccttcactgataggaactgaccaaatatatagcagaaaactcaaattcgaatgcaatttttactacacccaacaaaaagtacaaaaagcactaatataatggatgttacagattttgtcactaatatcaaacacttaatattcagttttatatataatatatatgtatgaagttgtaagtatatgtaactctgtttaatatctttatgtctctttaatgtttatttctgtatgtgtgcagatttgtatttgtttttgaaaactaataactcaagcatttttaaaagaatggctatagaatgcagtgatttaaggtgtttggggtaggttcggaaataatattggaaaagatacctgaaacaaacaaactattttatttttcttattctggctctaccttaaactcatctagctatagatttctggattccagatttgagagtctctcaaatggcccttaaaaagtctggtttctgaaagctttttagatgattttgattcaactggtctaagaattggcatttagcagctgctaattccttaactatctcctctaagtctgaccacttagaaatgcccaaatgctgcctaaaatgctagaataaatccaacccgtgaaaaaaactcttttctcagtacttcactgctatattattgtgctatcttgaaatctgttcctgctctggatttcctaacatgttttccagctccctggtaagtaagtcttctgctttgtaatttagatcttaggacctggccttcatacttacctacccatcacttctgaagttcctaccagatccttattctgacaagagctggctttataacacaagcttctcatcttcccctttgctgactgtccaccacctggacttccatagtttaaatttgatattatgaggcatgaagagattctttcccaaggggagaggaaaaagatgaagataatttgggagaagatctggaaaaaaatttcctgacttatttaaatttcaagtgtgttagaataggtggttttcccaaatatacacttacttaggattatggtagcttgaaagcatcatttacacaaaaataaatatcctgcaaatatttttcaaaattatgtcatagaattctcaatatcattagttcactaatctttggtatcataatctcctttacaaatagaaaatttatagtcttgatagtttaataatactgctacaccataattaaattaactagtatgaagttttaacttaaagtcattggtgtccaaagaacaaatcattagtgtctgagatagaatttcttttctaatatgaacactaatagggcatagcaaaaagataagtagttagatttggattgtattgctggtcccaccaattatgagacatgtgatcttaaacaagtctcttaaacattccctctttttactttaaaatgtgaataacaatatttcataaacttctaaccacaacattttcattatccccttccagtttgcatattgacaatagatgaaaattcctaaaatattgtttgggctatagcacttccccataaagaaaagcaactgcggaagacacaattcctttccttccaggccctttcctgtgctacaaaggctagaacactaagcactacgcttcccaaactcttctatagctagaatgctgtaaaataattggatttcgctggttacatggcacgtgaaagttagtggaggaccttctgtctttctgcctctttttttgtttttcgggttttttgtttttttgtttgttttttttttttttaagtaaggagatggacaccttcaccttcataaggtggatggctctatagtaataatgtgatgagtactatactggaaccgtaaaccaagagaaatggcagcatggatgaaggagtagcttatgacaccaggagaggagagaatgaagaggtccatgaaagcactttccctggcactctatatatcaccctaattttttattgttgatgctgaaacatcatattattgactttttaacctatttataatctgtcttctcaaagtagaatgtaagttacacgagagtacaaactggcttgcttatcactgtgccctctgtttgtagaatgatgcttgccacacagcagtaactcaattaagtatttttgaatgaatgactaaatatgaattcgctcaacttcccattacatcctacctcatatttgcatccacacacattacctgttttcatcctactctagaaaagggtccccactacctgtttgagtcttatcctccaaacatgttctatggtttctgtctcctttttctataagtcaccccttttctcttctgtactgaaatttcaaatgctccttctcctcaggctccctcatactgttatttagtcatgcccattgttgttttaatttacttttctttcattatatatcagattgagcgcatttgtatatgttgaatgctttgaatatttttaattcattttcttcttatatgccttgtctatttttgattatcgggttatcatctctttattattgatttgcataagtttttgtaagattaaggaccttgatccaatgggtacttaggaatcttacttggcctctccaaagcggataccattattgagcattgcgtatcatttaaaatgttctctcttcttcccttccataatgcaatactctcttgaaagttttccctcctggctcttagtctcctccttggtgtccttcacagcccctcttttctctgcgtacctcttaagtattgaaattccttggaaatctgtcctcagtccagtcttcttatactacactcaccattggtgatatcacccactcctgtgacttcatttacaacccatatactgaagaatacctgatgtctgtttccagcccaaacatctcttctaagctctagatccagacagattcccttggaagttccctggtcacctcagcatttccaaaagggaacacattgttttcaccctaccaacctgcctcggcagatagtactactatccacccaactgaccaagatggaaacttggcatggggaggagagacgaatgggaagatgttggtcaaagagtacaaagttttagttaggcaggatgaataagtcctggagctctattgtatagtgtggccactatagttggtaacaaatgtaatctatacttgaaaattgctaagagagtagagcctgatgttctcactgcatacacacaaaatgttaattatgtgagtgatggatatgttaatgagcttgactatggcagtcatttcacaatgtatacataaatcaaaacatcatgttgtaaatgacatatacctacaattgttgtccattataccttaataaggctgaaaaaatatttaaaaataaatgttaaattatttttaaaaattggcatcatctttgacatcttttttccccttctataccaaatagtgaccaagtccatccattcaatcttctaattatccactgagaagaaatttactccttcctacctggcaagtcattatcatccctcacctaaagcctcctaaattatctccctgccaccagccttaccgctcctccaatactccatacttcatgttgcagtcaatgacaatctttgtaaaatgcaaatctggtcatatgaccactctcaaatttaatgccattcagtgagtcccatggcccccagtgtaaagttcagtcttcttactggagcatataaaggtctggatataactgtcctctcccaattcagatctcacaatatacccctttctttccagactccaaccttactgtaatacctacagcttccccaaagggcaaagtgctctcttgggtccaggctcatttcattctacatcccagccacacagaagtgactatagttccccaatgcaatgaatgttctctcttggcatcaggcctcgtacattttgttctctttctggaatgttctccctgttgttcactcagatgactcctgtttatccatcctctctcagcttaaatgtcacttcctccagggaaatctttcctgaccttctaagaacagattaaatgctacttctctagacttacataagaaccctacattaaccaatatcatctaacttaccaaactgtactggttttcatcttctctactagaatgaaagctccttgaggacagggattgtgtctctgtcatcaaatatgttcctagagtttggcccagtccctagttcaaagtttgcactcataagtatttaccgaatgatatctttgccccccaaatatctgtaaatcataaactcattacaaatacgaactcctgttatacttgcaggcaacatccctggtgccaaacacgatgtttccatactaggaactcaacaaatatttattgaaatctatttctttaatttataaaatctaattcaaggataactaaacctggtaaataaaaagtaggtattaatgtcttgattctgaaatataataatgggaatacaatctgccatttcaagagctgttttgtctagagaatacttgtactcaatttttagaaataccaacattcccttcctgaaaggtcttcatgaatatttttctatggctatagagtcagaagcctaatgacatgatcatctgcagatggaaatattcagccagagatttctgaggttccttctatgtctaaggtaccattaaaaaataagtgtaagatttctcttgacctccttaaattaaacatctgttcaatatagaaaacgctaagagtgtagagtcgagaatctcaattcttcaagagggtcgaaacatcgggcatatatatgtcatgatacagtatggcttttatctttggaaaacaatgattttttactttgtgttttaatatgaaaacatggcttaagtgtcttaattttattatctattcataggatagtttgctcctagacagctgtaattatatttgtatattactgttccattgactggcccaaatcttactgggagggacagacttagggctattttggttttagagacataagaactctcatttgttaagctagtaatttgttccagaattgtgattaacttctaaaacctagctcacacttttggaattcagcacattttcactttgactgcaaactctgggtgaagttgtcactaaataaatggaaagtgaggatttaatgaccagttcatgaaaggtgcttagcacagtactgatgggtatgttctgttcacagatgttagctagcatttattttcaagttccagggctcaaatgaaatgaaatagcagtttagtttacaaaatgctatggcattcctgtttggttctggttcaatagtttttttttttttttaagttattgcttcatattacagtaaataagtgtcagtactttgaagcttaattacctatcaggagaaaattacaggtagttcaaggtacagtcatttagtgatgtttattcttgtttaagggacataattcaatgtgtttcaaatatatgttttattttatttttgagacagagtctcactctgtcacccaggctagagtgcagtggcgcaatctcagctcacagcaacctccgccttctgggttcaagctattctcatgcctcagcctcccaagtagcttggactacaaacgtgcaccaccacgcctggctagtgtgtgtgtgtgtgtgtgtgtgtgtgtgtgtgtgtgttttagtaggctggtcttgaactcctggcctcctgtgatccacccacctcggcctcccaaagtgctattattacaggcatgagacaccacgcctggcctcaaatacctgtttcagatgtccattatatcttggctactgaatgcaaatgttaattcctatggtacttctttattttcagttctctcaactgaacattcataaattctcctacagtggtggattgaccattcaaaggctaagtttcaagttcttacaggttagtttttaccagacctggaaagcaggaggtcaaattcaaatttaatcagtcatgtgatatctgcatgatagagtttattttccagaacagtcattaactcatttatttgcttacttccctcccaagctttttcatacttcttgccaatttccctcccaagtatttttttctttcagtaaattcttctcagcttccctcccaatttttttcttctagtggcttaaatatgaaaactgccaagcagagtttagaaactacatccagattttaccttcttcaacttacactgtaaataaatttttattataatgcatatgtaatggctgtcatgacagacacttagttaatgaagaccattacgtggttccaaaagtatcacaacaactttgtggagaccaattatatatcctaaagctctgacctccttctcactctccccaccccaaccctccaccccgcaccccttataaaagccaattacttctccaaactcaggtacatttacaaaacagtgagttgctgggtaaagacagtccaattactcactactcaaacactggcctgcctagaattctcctcctgtcagccatgggactacgtggtagactgcggtattgtcaagtgcaggagaagtggtagtctggaaattaaaaaggcaagagaacagtgtactctgtcccccttttaataacaaaatacaattataatctcataagggataagtaaattaactagggcttaattgcgttgatttctccttttaaactagcaaagtctccagtgctgtttacaatagctacaaatatttaggagattctaaaggtggtttggacacaggggaagaaaaatggtaggataagttaatgggcacagggatacgtaatagtattttaaaataagtgtcactttgcctagaaattcattcttctataatctcgttttaaagtaggatatgtaaaataggacatggagctgtttatgaaagaggaggactgaaggtgaagaatctgaacctgacttctcactcatggctgtacattacaagttttctatcaacacagaactatctccatgcctttccctgtgataacgtctttaagctatctcactgagtgaataatttgcaaaaacaaactgaaatcagaaaactatgtgaaatatgttgtgcatgctttctcctatccagacaaatttacacttacctgcctgctcctatgacactgagcatcattacatacgcaagtgctttgcagacattagagttgaacaaaaacacaaaaatgaggaagataatattctgttctcatctccagttccaagtctagatgtaatatattaagaaacagatcaactttggcagtcaagatgaaaatatactgaatcatgaatgtttgcatttggtgatcggggcttcatagagaacatattgagggattcttgtgctggcaccagctgcttaaccatcaaggattctgtaggtatttcaagttcttatgatcaaaactcctccacacttaaaaataaggggcaccttcatttggcacacagacattatactgtattgaattcttattgaccttttcaaaggtgagaacacttatttaacaacaataccaaaaacacaaaaagaaactcttaggtcactgaaaataggggacacttttgattttgactgtcaagataaccgagcactttcagttacttttgtctgttactcccagcaatcacgtgctgtcatgtaatcatctgctcaatgtctgagactgtgagacagaacaacatttgctgagcaaactttttgcaactgacatgcctacttcaaaacacttttgaaacagtcatccaacaagagtttaaaactctctcaatgtgctacgtggagtataccaaaataaagattttggagttgatattttcaaggaattgaccatgtagttgtatagaaaataacatgtatgaaacattcagcatagagaagaaaacagcatatactaagttacttattgtattcattacatttgcttaaaattcattacatccattacatttttttaaaatacaagaaatgtaggaaatacctggctgattttttctattatgagatgactaaggaagcctaaatcagttccaaaagtcagcaggacaaaaaagggaacagggactcagggatactttgaaataaaaatctgaatgttttatttgacacttaggcaaagaagaagcataaattgtttattttttaaatggaacttattgtcaacaattatttattaaacctcacctagtggcatcctccactagtactttgttagcaaaagctgtgatccctctgtcttgatcagatgtctcaattctaagtaatccacctctgcattcttccttcctaaccccatagcatttctacctgtcttccctcccagtttctcttatgcatggagtccttaatcttaaaccaatttctcccctcttctaatttcttgaagaaaaaaaatcactctttcctgaaggatcatttttcctgatgccttgtctgatggatgcaaacagtacataaaaatgacatttcttatcttcccagaattcctctatgtaactcttgtctcttcctgtccatcatgaccatatctggattcctgaaatggtttcctattagtctttctccttgtagtcagatatagcaaatagtaccatcaacaataataataatagctgttttattttctattatatatgccagaagaatccacaagactctacaaaataggcagtattatccccatattgcagaggataaaactaaagacatagcaaggttaagtaactttcttcagtaacctacgtctgccagctttcaaaatctatgttctttctgctattcacaaagcttctaatcacgtccaccttaattctgctcctcactatcacagtcagtgatatatctacatttccaagctgattacatcattcccctgatgaaagctctccacaaccaaattcctgagactggtatacaaggcctccatgacatggccttctggcttatttacactctggttctgtctggttctatgctgatgataccctgcaccaaccaagtagtttcatgttctgtgtttctgttcatacaatttcctctgtccaaaatacatttttgtatttgactcagccttcaaggcacctgcttttagagatcctgaactgtctagccaggctaaaagccatcagctaggcttctgtagtgccctaagggtacctctagctcagcacttcatattgaaatggtctctttcccccaaccagcctacaagttctttgacaggaaagacaataaagttgtcatttcatacccaccatgctcactacacagtgaatagtgtctggcataagatactcacacaagtaatttttatgtgtctgaaagggacataaagtggaatcacttcccaaccccattgccatttcctgagcatggagccaatgtgcccacagttcaaaccttcaggatcttatgctgttttcttccacacgatataccaacttctgtaaattgtgtcacacagaactaccgtatttataagtgaccatctttataattatcttttataccactttgtcaacatgaaaattcatattgatgctttttcataatactttggcttcatggctttccttctccttaattacaccaacctccatcttttctgcacagtagtcactaataagaactgtctctcaggggtatttctcctatgtcatgttttctaacagtattcttcacctcaaagggaggcataagtagaagaaatactatcagtagtagaaatactatttctaacagttttctttacctcaaagggagataatacaagctagtctctactgaatggctactttgtacaagacgttgtgttaggtacattacatgtacatctcatttaatcttctcaacaagccagtgaccatttactcattaatctcccacttcttcacatcaatctaatctttactctactttattggcagctcttaatcaaaatatttcttcaaggccctaactttcattcttgtcacccttagaattgcatggtgaatcattccatcagaggacattagccttgtgcctctttgtgtaaggaggttactcctcacattattcagacccagatagagtccatgctacctcattttactcctgtaaaaatgcctctattacatcactaattcgatttgttattgatatgtcaatctttcccactagtccacaaattcccgaagtatatgattcatgttctacacatattttcatctccagctcctagtacactgtataaaataaagcaagtcttaataaatatttgctgaatgatgattccttaccttattcttctttagaagcttatttaggcacaaaaaaccctattatattatttcatttatgtgaaatgtccaaaagagacaaatttatagagacagaaagtagatgggtgattgtttaaagctggaatgggggagacttagctacaaaggaacggtaattggatgctaataggcacaggatttcttttcaagaggccaaaaatatggtgatgataatacaaccctgtgaatatgctaaaaaaacactgaattgtacacttcaaaaataattttaaggctgcccgtgcaatcagaaaaaaaaaagatgttcttcctcttctccttttttcattatttttaacaaccctattgatatatgattcacataccacacactccttcattattaacacaggggactctgctataaacccttcagaaaaatagactatgtcttattcaatttggtattcccaggacctagcacagtgttcagaaattagtaaatgctcattttgagaatgagagacccacagtactaaatttattactagtaatatatttaagctatattttggctaaatatacttttaaaggttgacttgaggaaatcaaaccaccatttataaattaattcctatgggaaaacacatacttaacgcaaaaaaaaagtctgtaaggcaccttccgcaacttttccactcgtaagtaaataaagcccatgatttatcttgtaaggcactaccactgctacaacctagtcccctcctagacaaatatctgtgtccgctagaaacactcagatttttttgtaacaaatccagatttttccaacctccaggttatgaaatactattcctggaagaaggccttttgaggaatgaagtatatcctctttgaggtaagtccaaaacttttgcaggtagcttttcttttcattatgctctcaaagtgtataaaaaataagaatggggctctaaaaaaaaaactgttgaatgactgagtatatacatggaaagccattcatgtaagcatgcaaccctttttataagaattgccatttctatctaatccacggtttgcccttttccatttttttggatactgtattttaagctacattttactttctctgcaatttttttcataaaagattatataaaggaattgcaaatgccaactatcaaagatattgcttttgaatcacaaacactatttggagtatactgtcaataaacttcatagtaacatattccctgccctaacatttacagcaataactactgaacccaccatcacacaatttacatagtgaacagcacaagatccatatactggtttctcttggaatacttcatgtaattttcagataattagctcattctccaatattgttgtgaaatgagtaatgacatcatcttcattttgcctctgcatcaaagaattgcagtcactagaagttatatggtatttgttcaaagccagggatacaatatcttcacaattttacccctctaattctctgctggcagatcaatgctcattccattaggctatagtattattaaaattattaaaataatcttaataatttttggagtatatttttaaagatgcatattttgtggtatcttttaaaaagataccacatatcacttatatgcatgccatataaataaccattgaggacgtttgtctcactaatgagtgaacaaaattctcaccatttcataaaatgcatttattgtgatcaaatgaacccattatttaaaaaataaattgcatttatttcatgtgtttgcaagcttcttaaagcataggtcatgtgttttattaattgatccattcacagtagcttacccatagaggaaacataaatatatgtagactaaccgattgaatatggagccaaatatataatttgggtagtgtgaagggttcatatgcataatcaaaaagttttcacatagtttcttacctcttctagttggcatgctttgatgacgcttctgtatctatattcatcataggaaacaccaaagatgatattttctttaatggtgccaggcataatccaggaaaactgagaacagaatgaaattcttccactgtgcttaattttaccctctgaaggctccagttctcccataatcaccattagaagtgaagtctggaaataaaacccatcattattaggtcattatcaaatcacgctcaggattcacttgcctccaattatcatcctaagcagaagtgtatattcttatttgtaaagattctattaactcatttgattcaaaatatttaaaatacttcctgtttcaggtactctgctatgcacaaaagatacaagggaaagtaaaagagacaattacaatacagtgtgacaagtattatgatagaggttcacagagaaggggcacatgattcagatagttggaataggtttggaggaagaatgggaaaggttagtaacagctaacagttgccaagtgctcactctgtgtcgagtgctgttctatgtgctttaactatattaatttatttaatcttcacagaaatcctacaaagtagattaccttcatattattaggtacagattaagtaatagagacatattcaggtaatattgttcccatgagcctttcttggagtataaagtcatttaagagatgatagtacaaaaggactatcagtgaacaaagatttatataactgtgaacaaaaattaaaactaatggcagaattcgagttgaaaaacaaagtttaaatatgttatatgtcctgacaataagaaaagttagaagtaaaaaccaaataaacaaacaaaggaaatggggtataagtgtggagtgtaaaggaaatttgctgattgctttattaagaaaagctgaaagtcaaaaggtatcatttaaagctaataaataaagtaatagaagcataagcagatttaacaatacaaagataaatctgaaaaaagataatactactgactaaaactgagtagaaggaaaggaggtagcagaggaagaaaaagcactgattttatttatttatttatttatttatttatttatttagagacagagtctcactctgtcacccaggctagagtgcagtggcgcgatctcggctcactgcaagttctgcctcctgggttcacgccattctcctgcctcagcctcccgagtagctgggactacgggcacccgccatcacgtctggctaattttttgtatttttagtagagacggagtttcactgtgttagccaggatggtcttgatctcctaacctcgaaaaagcactgattttatcagagctcatattagtgaactagagtcacatagaatgaaaaatttaacataaagttattagtattaagtatagccactggaaaacaaatatagacttttttaaaaaccataatacacacatatacacacacactcacagatacatatagcctacagacaatacagtgacttcataataaaggaaagaaaaacataaaacaaaacataataagacagctcagatgaaacaaatttacaaaattagtaaaaaaaaatcaaaaggaggtgatagttgcacaactatgtgagtatactttatgccacagagctatgcccttaaaaatggtcaaaatgataaattttatgttatgtacatttcaccacaattattttttataaaaatctttttttaacaaattccaaagtatataagctaatctattcaaaaaatatttgtggaggacatacttgaaataaaagtatataagtcagttttatttttcagttggcttaacccatctattaagaggaaaagacttcaggtgaaattaaagacaaacctaactttatgctaactaaaagagacacacctaaagcaaagagtgcataaaggttgaaaatggaacttaaaactgtaaatacaaacaaagaaacaaaaaaaggactataattttcatgttagacatatgcaggcccaaatacattcaatgaaaaagaaaaggctctttataatgctagagtgtaattataagtatctatatattaaatttaaaaagcaatattcttgaagcaaaaattacagaacctataaggaataacagggagaaatgtatgtagtagaagcctttaattcaactttatctgttaatggcaaagcaagtagaaaaaagataagtgaagatgtagaagacctaaatatcatgaataatgatgtacatttaatatctgaattgaactctaatctattaatagaaactacacgaatatattcttttatgtggtcagagagcaagtacaaatattgactatttactggatacacaaaaatgataaaaattccaagcagtagaaataatttgaacaacattcttggaaaacaaagaaaatttgttttctttctggaaaatgttaaattttcccttaggatatcttaggtcaaagaggaaacaaatataaatcaaagctacagattttctagaaaacaatgtaatggaaacactatatatcagaatacataatatacagctaaagtattacccagaggaaaatgcacagctttttaaaaaagcgtcaaacatctaactcaaaaactagaaaaacaacaaaaaagcgaagaaaaatagaataattaataaagataaaattataaattaatgagttacaatacaacagaacagttaaactaataagtaaatctaaaagctaattcatggaaagcttgtttggttttagtagaaacctaatcaggaagaaaagtatcaataaaggagttgcaaaaatacgatataagaaatgaaacaggccgggcgcggtggctcacgcctgtaatcccagcactttgggaggccgaggcgggcggatcacgaggtcaggagatcgagaccatcccggctaaaacggtgaaaccccgtctctactaaaaatacaaaaaattagccgggcgtagtggcgggcgcctgtagtcccagctacttgggaggctgaggcaggagaatggcgtgaacccgggaggcggagcttgcagtgagccgagatcccgccactgcactccagcctgggcgacagagcgagactccgtctcaaaaaaaaaaaaaaaaaaaaaaaaagaaatgaaacaaataaaacatagagaaaactcataagggaccgcttggaaaaaaaattcaaaacaggtaactccagtgctatttaaacagaatcaggggaaaagaagacaagtttccaaattttttttattgggtaacaataatattaatggctgtgcacagtggctcatgcctgtaatcccaacactttgggaggccgaggcaggcagatcatgaggtcaagagatcaataccatcctggccaacatggtgaaaccccgtctctactaaaaatacaaaaattagctgagtgtggttgtgcgtgcctgtagtcccagctacttgggagggtgaggcaggagaattgcttgagcccgggaggcagaggttgcagtgagccgagatcgcaccactgtgctccagcctggtgacagtaagactctgtctcaaaaataatagtaatattaataacaaaatcttatagagattacttggaaatatagatttaatcttatttatgaatataaatacaaaaaaattaaataatataccattgaccctttatcaacatgaaggttaggggtgccaacccactgtatagtcaaaaatccacgtataatttttgactccacaaaaacttaactactaatagcctattgttgagtggaaaccttacagataacataaacagtcaattaacacatatttcatattttgtattttgcaaaaagtgcaagacttcacacctgctggcatagctgcactgatggtttcacattttcttttcttttgttacaacagtctttatactgggttcatttatctcgaaattgcaggcaactgtagctgcagacctcaatatatggtaaataccaagcaactcaacttttttcttgtactgttacaacttttccgtgcatcactagtggcactttgtatggattgcttgatgttattcaaggtttatggcattgcactaaacatgatgaaaaatatgcgagaaccactagagatcactttttactgcaatatgcaatttactggagagagaactgctcacacggagatgattagcatcacgtggtgttttaaatggctatccacaatgcttgagcttaccgtaatagcaacaggaagtggcttccaaattattacagtagtaccatatgtactacaattagttttatgccattatggtttaatactacatttttatgtttatttacatttctctttactgtgaatggtgccaggtagggtaggtgttagtgtgtgttaagttttgataaattttaactttttataatagattgtgtatattttatagtagcaaatgataaaataggctagtgtctacatatattttatgcattcatggcatatcttactttttcttaattttctcggtatttctaggctagacagtttgtgagttttttcaaattgtcaaaaaaccccaaaaattttccaatgtattaactgaaaaaaaattcacaaataagtggacccatgcagttcaagcctgtattgtttaagggtcaattgtattagcaagtggactccaggagtatatcaaaagaataaggcatcaatggttgtctgtatttggtcttttctttcctcttattctttctaatttcattctggtcaagtttgaccttctctactattgctttcattaagtcacgagttatctccgtatttcagaagacaccggttaattataacagtttcatcttacttgatgaatgagcatttgacctagttgataacacccttctgcttgacatcagttgggttccgggataccacattcattcactagctttgtcttctcagacttttattttattgggttttcttcacccacctccttaacctctaatacttagaatgcccttaggctaacccctacacccctttctcttcttatcaaccctctttcctttagaatcttatccagccccatcttcacactaccagccccctcttccttgaaactagacttgtacatccaactaacatctctatttggatgtcaaataggcatttcaaacttaatattcccaaaccaagctccatccaaaacctgtttctcccattatctttctagtaaacggcacatttatccttccagttactcagtccagaaagcttggaatcatctttgactcctctgtgacttttctcatatgccattgttcaacttatccattaatcctattggatcttccttcaaagcatgtcctgaatctgatcacttcctactatactacttccactactacctggatcaagccaccatcatcacttgcctgaactggcacaatagactcctaactcatctccttgcttcctcccttgtctccctacagaatagcctaaaaacattagccaaagtggccctgttacttctgtttaaaactctccagtggcctctaatctcacccagagaaataagccttagtctttacgagcactttatggtttaccccctacctccaccgccgattacttctctgacagtattctaccctccctgtcttactctatgccagcctcagtgacctccttactgttcttcaaaccagacaggtatagtcagtcccatctgaaagctttgcacttgcttcacctgctacttggaagactcttcccagagtctgcattccctaatccctcacctcctgcaagtctttgttcaaatgttacctttcaatgtttaaaggccacttatatttttatttttgatgagatatctattcaatcctttgtacattttcctaatgagttggtgatatttttcattatgattctaggatcactttatatagagagaaattcctcctgtgtataagttgaaatgatattttacactacttataataaaagaaatgcaagttaagaatacattgacatactattttccctataagatgagaaactttttaaattagataatatcatctgttagtaatgctgtggggaaatcagcactctatttagagtgtatggcatgagtacgaattggtacaaatttcagggaaggacatttgacaacatctaccaaaatcacaagtacacaaatgcttgaccacttataggaagcctactgatacaattgcagatgtgctaaatgatatgtatataaagttatttgtagtgttgttctttgtgttaacaaaatattggaaacaacccaaatgtcaatcaatagtgattcattatatcatagaatatccatccatatgatagaatactatgcatctatttaaatgtgtgtgcatgtgtgtgtgtgtgtgtgtgtgtccttgttcaggctgctataacaaaataccatgaactgtgtggcttataaacaacaggaatttatttctcacagttctggaggctgggaagtccaagatcaaggtgccagcagatttgggtctgctaagagactcctgaatcctggatagccagctgtcttcctgctgtgttctcacatggcagaaaggggtgagggtctctctaaggtgtgagggtctctctaaggtttcttttataaagacactaatctcatttactaaagacttcaccctcatggactaatcacctcccaaaggccccaccctgcaataccatcaccttgggaattaggatttcaacatatgaatggcaggggagagacagaaatattcagcagtctgaacatatgtgcaagtcctctgtgctttgaatatggaaagttgtccaagatagtgggaaaagcaagaagcaaaactctgcatattgttacataaaaagagaggtggggaataataaaaaatgtatattgattatatatatagagagaaacatctctgggaagatactaaaaaaagttacctggattggctaccttggttggatgagggaatgcaggagaatggaaaatggacagatgagagacagtaaagaaaggaataattttcaactttttatatattttaattttcatttttaaattttaataaataatatcacctgaaatatattcaaaagaaaggaaggtcatgtaacagatatctttttgatgtttgtttcagtaaattttacaattcttattacatgggaaaaaatctgaattacctcatttctatataaaattcctttgtacaaaattaaacctagaagtgatattttcacatagtacagctttataaacctaaacacaatatagctctgataatccaggttaaaaatatatatatgcatattggaccagacacagtggctcatgcctataaacccagcactttgggaggctgaagcggaaaggtcaattgagcccaggagttcaaggttacagtgagctatgatcacaccactgaagttcagcctgggtgacagagtaagacctaatctctaaaaagaataaaattttaaaaattaaataaaataaatcatgtatagtgtcatatatatatgtgtgtgtgtatatatatatattcaatgatgtttttaacttcatatctcccaaaattccaaaatattgataaaactatttgcagacatgtattctgtataaaaagcaagcaaaaacgtgagctaatagcttattctatacatatgagtcccagttattacaagaataagctaaaactcagtaccatagtgaggcaatgatcaataatagagacaaggtggtgtcaggaattgtcagcaacagcactgcttcagctgtgatgcagacaacagaaggactgaaactccccacacactggtgagatgccataagccagctttcagtcaagggcatccagtgatgcaaaattctatactaatattgcttcactaaaataattcaaggaagtttcataagcgcaagacatttaatgtagactagaacaactacaaacaaaaatctatttcctaaagatattcagttaaatttctataatatacctgtcaagtgctaggcacttgttgacagtccttggaatataaaaataaagaagacatgatccttttgcagcctagatgattattaataggggagagtgacaaaagtcaacaacgttattactttatcagtaaagtaacaaagtaacagaaaatctagaaatataaaatatacccaaaatttcagagataacaacttgataaatttatccttccagacacacatatatacatacatatgattttatgaaaaatggatcataatgtacatacattttgtaacttgtacataacattttgtaactctttattcacttaagagtatatcatatacatccgtcacagtcattctttaacaaaccttttattggctgaataacacgccattatagaactacaccaaaatttatctaatcaaacccctattattcaacatttatggggctcccccacccaatttttggctcctgaaagcagtgttataatgaagagctttacataagatctctgcaaacatatttgggtaagttatagaagtagaagaactattaggttatcttttaagcttctgatacaaattaccaaattgtattgagtgggtaagatttaacttaaaatgttaatattttcaattattcaatcttatattttagctagatcttttgtccaaaaaaaactataaagtgttccattcctaatactactaaaaggcagcctcctagattgagttagtaaactccgtttctcagaagtgtttaaatattcccaagggaccactgccttcctctaactctgccttcatagctgcttttcataagctataactgcactgtcagccagtaattatctgctcatcaattttaataaaactgcctgaaatttaattgccagtaagtcttggaatttgtaattccaaagctatttttgcacatctatcatagaattgatcttgaagacatacgcagaattaattttaaaaattctatgaaacacaattactaccttttcataaataaacatccttgtttagaccattgctaacttatttagtatcagcccctcctatagtataattttttaatagtgaacactgctagtaataatatacaagatataaaagaaaaataataacattttaagaaagaaaatgtttttgtaagaaaaaatgcacaattccagctattttgttttaaaagctgtttcgtatgtaggaaaacaactggagagagaaacaaccaaattgtattattagcattgcaaacaccaattttttttttttttgagcctatcacctaggctagggtacagtggtgcaatcatggctcactgcagcctccacttctcaggctcaggtgatcctcccacctcagcctcccaagtagctgggactacaggcacacaccaccacacccagctattttcttttgtttgtgttttttgtagaggtggggtttgccatgttgcccacgctggtctcaaactcctggactcaagcaattcacctgcctctgcctccaaaagtgctaggattacaagtgtgagccactgcacccagcctgacaccaaatttattgagtggaaattttttgtggcattttgtttcccaagtctcatattcaattcttcaaaatatggttctcctcatcttagatattgataaataattgcctttcaggagtctttcttaatttctattttcattaacatttttacctacagcagcagcactgcttccctcttacttccttccttctttccttccttccttcctcctacttcctttcttcctcatttccttctttcttccttcctctctttctttttctgtttgtcttagattattcggtataattctagaaagtattttgaaaagcttcaagagaccactaaactttttctcacatttctacaaagtaccacagctaaaatgacaatcaaatgggaacaaggaaccattttatagacttctgaagcaaatacctattgccctttagcccattctaatactagaaagctctttctcatctctaatttgattctttcatgtctttaaatttatttcctcaatagttaaaagagagcaagtttttaccattatctacacaatgggttatattcttgaagatcactacaaagtcttctcctgacaataaagttttggtccttttgctgttttttctttctaatctactattttttcagatgtatctccaaatatgccaggttaagttgttcttagggtgggatatggagaagaggatgaccactgaataaattaacattcctatgtatttcctcaaaaaactatcccactaaataatttttccttataatatatcataagcaaatctaaatctattctgaaaattgtaatgttaacaaaaatggagaccttttgtttatgtggttactaaggcaaaatgtaagtcatgattttcctggaccagctctgaaaaaatgtctgttctggttaagaatggataaaatggatgatttgtttattcaataaagttattgaatgctcgccatgtgcaagatacagtgttgaatgtggtgcaaaatataaagatgtggaagaaaaagccactgaaaataatatgaggaaataaaaaactagagtaaattatcagtggaacaatttctattatacaagacactacacccatacattctcctaatgctcatgtaagaatttctccaaaaataccttccagcactacaaactagaaaaaaaaagagacatggacaccaaattaagttcttaatagtgaagaacaaaagaactaccttgcctgctccagtggatccagcaaccgccaacaactgtcctctttctatcttgaaattaatatctttcaggacaggagtaccaagaagtgagaaattactgaagaagaggctgtcatcaccattagaagtttttctattgttattgttttgttttgctttctcaaataattccccaaatccctgttaaaaaaacacacacacacacacacacacatcaaaaataaaagatgagtttgtcagatattttcaatagatgcttgttttatgtacaattagtttgaaaagcacatggcccatgatccattacactgtatacattattactttatagtacataattatatagcatacggtttctagaggacatgatctaaaactaagatatttgcccattatcaagttaaagattttttaatttcagtaaagactgaatacatacatgtatacatacacatacacacacacacacacacacacacacacacaccctcttctcctataagcggggtacataaacactattatttaatcttcagcattaacatgagatagattttataatcctcctctttcaaagctgtagactgtgactcagcagttaaatgactaaagtcacacagctttaaagtcactacccaaatctgaattctactccatcacactggtagcaccctcctctgagaagctcaaagcatttctttaagtaattattgttgaatataaatatgaagagattgccagataattcaaatgaattcatttcacaaaagtagctacgaagaagtaattcccttttaaaaattccttgcctcactattgcccccgtgggaagctttagcatagtggtcttcaaatcaaagtaaacagtcctaaagattgatcaggaggaagcagatgcaccttgttttaagggactctattcactctttcctaaaattaacctgcctgagaacctatcatttctcctgacctacttccctctcatgagtccttccctcattttatacagacagccttctcacttaccatgcaagggagtatagtactagtctcactacgttgcactttctggagtaggaaaacctctgggactcaaacaaagggaccatgagagaatgactttttcttgaaagaggctcccataaaagcaaaggcagaaatactgaaggaggcagtatcttatttcacccagatttcaaacctaaggcaatctacatgtcctatctattcttagagtcaaattgcagaaataagtaggggaataaggcattttaattaacaaattatttaattattttaattttaataatttaattaattaataatagttattacttatctgtattttaaagtcagacttttcctgacagaaagcaagttatatttagctgattgacttgacaataagaaccaattttataaattaatttcttttccataaattgaatgcactgaaactgcagcttcagggttttgaagaaatccatgtatagcatacttaagcagtttaaaatacacaagaaactacatcatttgccaccacttaaaactatgttgaaaaatttataagttaacttaaaagtgtgtcaggggtacataggttttcaaaattcttttaaggcatacataaacaatcatgcttgaaaactactgcttttagttttttattatatgggtagctaacaatgaaagtattttaaaatgagacaaaggcatttgttattcccttattcatttatttatctaataaatatttattgagtataatctctgtgttagaaactacttcaaacatcctacatgggagaatgacaaacgaattaatattgcaatgagcttggtgctacaattgaaatcacaccacgtcatatggcagtacattcaagagaacaaccaactcacccttgaccaaataaatgacatacatgctaggctatgaaggatgtaagtaggatttcacaggactaagaaatggttataggtgttccaggaagatggatctgcatgcacaatgatttaggcacaaaggaacaaaatatatctcaggaatggtgtgagtggctggatcagatgtatatggcaaggtgacaaaggctattaacctaaaagttgtgagtatcatgcttagaagtgggacttttatccaataagcacttgtaccagtggaagactgttgttactaataacttttatttctgattacagaagacacatttcaagaaatttggaaaacacagaaaaccagaaataagaaaagagaaatcacctgtagttgtaccactgagaactatgtttaacatttcaatggatatcactccacacatttatatttatatttacatttaataaatatgtatatttacatatactaaaaatcatatatacaggtcagctgcaatgactcatgcctgtaatccctgcacttggggtgtccgaggcaggaggattgtttgagaacaggagttcaagaccagcctgggcaacgtagtgagaccctgtctctacaaaaaaattaaaaattaggtaggtggccaggcgtggtggctcacacctgtaatcccagcactttgggaggccgaggcgagtggatcacgaggtcaggagttcaagacaagcctggccaagatggtgaaaccccgtctctactaaaaatacaaaaattagctgggcacagtggcaggcacctgtaatcccagctactcaggaggctgaggcaggagaatcgcttgaacccgggcagcagaggttccagtgagccaagatcgcaccactgcactccagcctgggtgacagagtgagactctgtctcaaaaaataaaataaaataaaataaaattagctaggcatggtggtgtgtgtctgtagccctagctactcagtaggctaaggcaggaggatcacttgagcccaagttcaaggttacagtgagctatgattgtgccactgcactccagcccacgtgatagagcaagattctatctcttaaagaaaaaaaaatcatatatgtgattaaaaaaaaaaataagtgatgatatgctaagtgagaaagggctttggagtcacagaagcctagcctgacattttagctctgccctagctagttgtgtaaccatgcttgagttacttaaactgtctaagcctcagcttcctaatatgttaataggaatgttacttactctcaggtttggagcaagggaggagttgtatataactcaccagggacttgcctctcagggatgctatcaaaggagacagagaatacactaaaatgagtgcgtttatgaagcttgggaagtgatgaacaagaaccttgaggtacacgcaggaaatttggaaacatatgtatgaagttcaaggaagaaactgaagccagagatgcgcatttgagagtcatcagcacattggttatcacttgagcctgagagaggtcacccacggagaacataaaaagccagaaggaggctgatatggtttggctatgtcctcacccaaatctcatcttgaattatagctcccataattcccatgtgttgtgggagggacccagtgggagataattgaatcatgggggagggtcttgcccatcctattctcgtgatagtgaagaagtctcacaagacctggtggtttaataaagggaagtttccctgcacaagttctatgctcttatctgcctccatgtgagacatgcctttcatcatccaccatgattgtgaggcctccccagtcacatggaactgtgagtccctcaaacccctttcttctgtaaattgcccattcttgggtatgtctttatcagcaacatgaaaacagactaacacagaggcctaggtggggacccactggcccatcatcacttaagtggcaagcacggcagacttagaagtcatggtctgaggccaaaataatctggaaagaacggttcactgaagctaaattaaatgataaattccacaagagtataacagttttaatagattggtgatagcagaatctatgttgtagtggggagaagtccacaaaaagtgaagaagtgagaacagccttgacagcaaagggaagaagagtgataaggttttgggcatgaggttgcgtgagcgaaagtcaggaaagaaattgtttaacttgaaaatatttaaacatgagaaggagtcagttgacaaaagatgttgaagcttctggaggaagaataattgctggtcccctgttctgagaagatgaagcaaaatagagtagttcagacaagggtaagaagaagtatacatctttctcttagacacaaaagaagaaaaagataattccaaaggtgaagagagaagttggaaacattcaaatatgacggtggcctctattttctccatgtattgtgggagacaaggctatctactgggggtgaacagatcctgagaaaagacgggaattttgtgaatgtgataaaaatctggaatagcctttagggaaatggtaaaggaaattaaagacaaatgaaaggatttcccaagaaggattatagacccatataaggtttaaacaataaatgtataaaacttacagttgactagagtcaacagatagcactactgttacccagatagcacttccttctccaaaactgataaagtaagtgttctgtaggaaaaagaaaaatcaccaaaaggaaaagggaattgagagtgcagctgagagaataaaattattgttcttcgaataagcagaggttaaatcaggaggagttcaaaaggaagaattaaagagactagaaatcctgatgaaatggaaaggcagtaaatgtagaattaaaagactcaaacagttggaagattaggaaattccaagctgagaaagagatttcagagtgcaacatttccaaagtaaggtaagtccaggtgctaacaaaactcaggatatgactaagagagaaagcttttaaagaagtcactacaaaatataagttctaagtacagtattggaagactcatttatatggacgttgaagtcgcaaacaggaagtttaacaagcatcaccatcataagtaaatgccatcaaggggtgcccagagtttaggtgacaaagactggaggaagaggatgccaccagatggaagacaacagtttagtgaaagggctctagcctatgacatttgggactaaaatccattttcagtccttgccagttgtgtgagctgagccaagtccctaaactttttgaagcctccattttattattggtgaaatgaaaatattaattttatttaggtcatagaaatgctgtgagaattaattgggacaaaacatataaagtgcttatcctagtgcctggcacatagtaagggctcaagcatgctacctatttgattagatggagtgagacaggaattgagggtttttgcaccagagtaggaaaataatgacctgaaagtagtagaaaatgtcaaactgcatatttttccttcatgccgacgaagacacttgaaattcctaaaatcaaagtaaaataaatctgatccacaaacttttctacaaaacaattttgctaggcagatgggaattactcttactatatctttaaaaaatgaagtaaaatgaagcgctggtgctcaagttacttatatcaatgaatccaaagtatgacattaagaaagatttagacctaggacactggttttatacctcctacctttacacaacccatgtaagtgagaagaaactaaaacttcaacaggtgtgctcaataatcaaatattgcacttcagagactaaaaatcattgataatattttttatgtggagcagtatgatagaatttgtaacagtggatgaaaataggtttaaaatggtagaaaacaatacactggtatatctctctcgcatccttttattggctggtatatataaagcactttagactggaacttgcaatcagagaagctaatgtttattgaggaacaactgtgtgcatggtactctgatgaatgttttacctaaattctctccttcagtcttcacaacaaacttgcaaggtaaatattaatattctccattttacacatggagagccagagggcccacaaagttcagtaacttgacttagattacacagaaagtaaatggcagagccaggattcaaacccagctccaaaacttatgatctctgtattatttcctgatctgttatgtgaaacaaattgtatgacttaaaaataaaaaaagcttttatattgcatttaatattcctccacttctttttatttttatttttatttttttttctttttcagacagagtctcgccttgttgcccaggctggagtgcagtggcgtgatcttagctcactgcaacctccgcctcccaggttcaagtgattctcctgcctcagcctcccgagcagctgggactacagcatctgccaccatgcccagttaattttttgtatttttagtagagaccgggttttaccatgttggccaggctggtcttgaactcctgacctcaggtgatccacccgccttggtctcccaaagtgctgggattacaaccatgagcacctggccattcctctacttcttaatctagaaaataagtgagtgatcctccttccagttctaccagttatatcatcattctaattttattcgccattaggatgaaatccatattcacaaagaagaaaacagttaggtgtttagagcaaacaattttttaaaaattctgacctcctcccagaaggctgttacattctccatcactacttctgtagtcgttaagttatattccaatgtcttatattcttgcttttgtaagaaatcctatttataaaagagagcaaaaacatattatagaatcagaatagcattaatgcattattacatctactttatactctcattgtgctacatcttatatatgaattttaataatgaaatagtaattatttcttaataaaataattttattagtgttctaaagttaatttgccaagcactaggattcatcatatttgaaatatactctctaaacatatgatattttataaaactttttatacattagatttaacatacaactgattcttccttgtactattacatgctaaccttagtgatgaatttacaaagcaaccctgaattacccactaatgtgccttaatccaacattggacggagaaaaaaaatgaatgtcttcatcttaatagcacgctccttattaagggcctcattagcatcacttctgtgggttaaggaagcatgtgaaggtatataactagttttaaggcatcaaactgtgattctaaaagaagggctctattagagactccaaatcagtttccctagggaaggtaggagcataaggaagaattaagtccacgcatactgaagtcttggccataagaaataatgaaaaagcctggtccttgccttgcttcttcattttcttctctgctcctctctacctctcttttggtttctctcattttctcccagtttggttttctagatctgtttctctgtctctatgctcccattcagtgactctccccagatctgtttcttcttctttctttctctctctctctctctctatttctctctcaatgggctaacagaagacaagatgattcccagagctacttactatgattcagagctagattcaccactttgtctaaatcacagatctcaaactcacttagtctcaggaccaaataggtgatataatgaaggaatgggactgagaagagagcatgatgaacaggagagggcaggtgctctgtgagcagggagctgtcacagcttgtggaaaaggaggacgcagttgactagttattccaattcttcaaaagaggctgcacacatgagtgtgtgtgtttatgtgtgtgtgtgtgtgagacatctcccaatttttaattgctggcaaccaatacaaattttttaaatgaaaggttaaataagacaggtctaggagccaaaattagttctatgggacaccatttgcaacctctggcctagattaaataatgccagaactacctaagagtggctcacccttctctctcatttttatttctgtcacagtgacttattttctgggttaaatatttaaataaacagcaaaaaagcataataagtatttatttgcttcttaatcatatacaagtttatccaattagctttgtataaattgagtcttatcacttgaaaactttagaatttctcaaagctgctagctacatcagtattattgggattttaaggtaatttggcataaaatgccactctcatccatcatactgtccagagaaatgctaggaaaagtttaaggtgaacattcctagtattagctggcaacttttataacttcctagtgaaggaaatttctttttctatcttttcgcacatttttgcaaagttcattagaactgatctattgactgattatttaaatcatagtatataatgcagcattatggtacattacctgtattttgtttattgctccaagagagtcataccatgtttgtacagcccagggaaattgccgagtgaccgccatgcgcagaacaatgcagaatgagatggtggtgaatattttccggaggatgattcctttgattagtgcatagggaagcacagataaaaacaccacaaagaaccctgagaagaagaaggctgagctattgaagtatctcacataggctgccttccgagtcagtttcagttctgttctataaaaaacaataacaataaaattcaggatgttattttatttttcaaatatcagggatcttggaatggaagatctgagcatggtctctagagtctttctgcctatatttttaacctggctccacatcatatgacctgtgtgaccttgggcatgttatttaatctctctgggcctcagttaccttatatgaaaagataacaatgaaagtaccagtgttttgcttgtagtacttgtaaatattatttttaaattataaatattatttttaaattataattaataatttgttattaacattattatgacattatttttaaacctttacttcattattaacttgtaatattagttagactaatcattttttgcttgttggttggttggtgttttaagtaattaagtatggaaatgagaacaacattgcaagatttataaaggaaaaagacaattctgtgattgtctaatggattcttaacactttggaaattctaacttggctttgaggaacattgaaaataacatataagctacagagaagtggttcttaagccttagcatgtgtaaaaatcacctgagatgctttttaaatatacagtctcaagcttgcctcttagagatactgactgaatgagtctcagtaggtttccaggatttgcgtttgaaacaaaaaaaaaaacccaagtggttcttttaattcaagttgcaggtgggttttgaaaaattatgacagtagatactacatcctctctgtctcatttcaatataattatttgcaatcacattacactatacgttcaatcttctagtctgaaatgcaaatggaaattatttttttaatacatatgtgaggcttcagtgctccagcagacagaaaacagggagtgcagaggacaacactgccttcagctcggtcccagtcttcccgaagccatccaaattggagtcacttgtgatcctccccacccagctcttgcccaaggaaaggtcaaccaggatacagagagagggctctggtgaaagggggcaacagctgtgccatggcatagtgcatgtgggtacctggcatttgggcattagttcttcttccttgtataattcagaaaagctattctcattctcaagtgcagaactaagagggactctttttttccatttttagcctgaaaagtaaaatgtaatctgagcacattgatgaagaaaatggagtttaatgtgcccaacccggattgcaattccgtctatttaggtctaatgtttaccaatttcagtaacttgacactgaagacagattatgattttggcatcccacctggctttgaatcctggttctgccagttacagcttatgccatcttaagcaagtcactcttccctctaactttacagaatctacctctatagaaggaaaacatgtcatctcctttgtggagttgttaccaagattaaatagcacagtagaggtctatatttgaatttacaatgtgtgtcctttctcctcaacaagaaaaggaataacatggactaggctggtatttataaaatgataggaaacactttttataaaaatgttaaatttgttgaactgttgttgaaatatattaactagagctgagaaaaatgggaagaataggtactataagaaaaaaaaatagatccaagaacatttgtaagaatcacccagaaagtagattctccataatataattgctaacattttatgagtcataaaaatatatcagtttgttatttttaaaattgaaagtgactttattactaaagagcaataaaagagtggattttcagagagctttgcacagccttttgaccagtacaacagtggcccaggctgaagtaatcactcctttgatgtgaattctgccaatctcttccagaacattatatttgctctcttgagtaggagcaactcttgctgtcccatatttatgtcaacacttctagccttttcgagtgacaatttcatgccagattatacaggttacaaccaaacattcgctatatatcaaagagaaattccaagtaagagggatagatttcatcttttgaggaagagggaacaataacaacaaaaaacaaagtaaaatcagcaccaagaatgacccagccatgagtttatcatgagtttgagaaaaccagaccctctgatatccttgtcatcacccttgctatatatgtgtttgcaggcagaggagtaatgcagagagcaagtgtgatggagcactcagcaagtgtgatggagcactcacttgttaatgagaaaaacaacatctaccaattgaacaattcccccaagaacttgttttctggaaagaaaatgcaattcctttcctggatttatcttgaaaggcataacaaaaacaggtgagcaataatgtttgggaaataaatactctttttctatttacatggcaaaggacttaatatttcagcatttcttttgttgttacaatcacacacctgcagctcagtttccattgtacactggactcagcagcctgaattcctcataacccatattgacaccatccaaaatggtacctctctttttagtatatttttccctgtgaaattcccatgtgctgaaattatttgttccttgaacagtgtatcaactttcactgagtctcctagaaccttttttgattgaagtttgtagaacatggagctcaactgaagaaaaatggtctcattgctacagaaatgctgtagtttatattttgcccaaatttatctcagtaatcatatctcagtctgtgctgtactttctttgttggatataatctttactaatcagtgaaaggttatatgaggtgaaagaacactagagataggtgccaagtactgattctatctcaggaggtagctttcattacttgaactgacttcacttcaagtggaggatttataggaacccaatctgtgaatattaccctatgtcattcccgagttaaggaagagcaaacatattctaaccaaatacaatttttttcatgtttaatataccataacacataaattaagatataataatagagaatcatctatttggttcagaattgtatactctcccagttccatgtgagttaccaatcagccttcagtatcttgataattgttttaacgaaataaatgtattgagcagcagtgaacatatgtaggaaattctttaataacgtatcagtataatatacttgcagcataaaataacaccctggaccaactacataaaactacagcccatgaaagtgaatttgtgcaactaatgcatgaatattgacagaacttaaatgcaatcatttgattgtcacaaacatcaaatatgaggtggaagtctaccatgataaacatatttttaaaaaattaaggacagaattactaacaatattgaaattattggaacaacttactgtcttaagttttcaatcattttttccattgcttcttcccagcagtatgccttaacagattggatattttcaatcatttctgaggtaatcacaagtctttcactgatcttcccagctctctgatctctgtaaatcaatcaatcaatcaatcaatcaatctaatagtaaaaacaagtcaaattatctattaagaactgctcaaggttttaagtcatatttcttttattcaacagatgggcattattttattatcaaatagatggtaacaaaaataataactactgtttggtaaatgcctcctatgtgccagacgctgtacagactcattccatatgctatctctatcccttatgacagcctatgagcggtgggtatctctattttagagatgaaaaaagcaaagactcagtgaggtgaagtggcttgactaaggtcacataactagtaagcatgcaatctgggattcaaacaaagtgctatttgactccaaaacttagatactttctgtcatactctagctgacaaactcaagccctttatcctaagcagtgacttgtgtaagtcattcattcactcatattagttattctgtaacacaaagtaactaaggctctggtgtgatgatccataaaccagagtagtaaaagctaataaactctacacaaaaattaggtattccctttaattcacataaatgttttatccttttttacctgttttataatctacaaaaatgaactgaatcaacatatttataaagaaattctagagactgacaagtaaaaaatgtaccattgatacagaaagtaatatttacaccatcttaaaaagtattttttaggccgggcgcggtagctcatgcctgtaatatcagtactttgggaggccgaggtgggcggatcacctgaggtcaggcattcgagaccagcctgggcaacctggtgaaaccctgtctctactaaaatacaaaaattagctgggtgtggtggcatgcgcctctaatcccagctactccggaggctgaggcaggagaattgcttgagcctgggaggcagaagttgcagtgcagtgagccaagatcgtgccactgcactccagcctgggtgacagatctagactctgtctcaaaaaaaaaaaaaaaaaaaaaatttaatgacactgaagatcactgttctatgcatagagcagtcctggttttactaaagtgggctttttgaaaacataatttttaaaactttcaagttatgaaaataggttgctacctgtacttcatcatcattctccctagcccagcctgaaaaagggcaaggactatcaggaaaccaagtccacagaaggcagacgcctgtaacaactcccagattagccccatgaggagtgccacttgcaaaggagcgatccacacgaaatgtgccaatgcaagtccctggaaaataaaagcacagcaaaaacaggtgtcattgtatcttccacccctagaaactaacaatcatatatgaaagaaagcaagtaaaaggagcttatatgatcaaacacttcgtggttctgagcacactaaaatctaggtaatcattacatggagcacatagcaatgtgcttaaacattctacacatagaatcggttttcccaaaaaacaaatttcaagtcagtgcatttttaagcatatttttattcagtggaatcaagattggacatcttaagtatcatgtccaggttttaagtaacttacttctttttgcataaagcaagaaccacagcatagaacatgagagaacaaagaactctctccagggacttaatccacacaaccacactctgtcatttgacagagacatttagaataaatatttgctcaattcaacagtaattaattttgtaccagctgtgggtccaatgctgttttaagtaatggatatgcaaagataaataaaacacattatctgtcccaaggaccttgaatttatttttcacataagacaacccagaacaagaattgctcaggtatcatatctggccaaagtacataacagatttaaagttttaaaaagaagcaaggtctgataagaattaagttttgaaaaatcttattaacaacaggctaaggtgcctttgagttgggtggttctaccagaccccagaatggtgctctgctatacaattgacctttcttagtttccagaatagggaagctagagctgagcaagacttaaccactaattactattatctgacccaggaaaactccgcctttccagttgtataatttataacaatagtgcctaaaagattaaatcaataggtacatacttcatcaaatttgttcaggttgttggaaaggagactaacaagttgtccaatacttattttatctagaacacggcttgacagctttaaagtctaaaagaaaaatggaaagttagataatttcaacaaacaaaatacaaatatattataagtaaaattataatatgactaattcagttattatgcattcattattaagtaaaggtaatgaaaattatattctattcatctagcttactatcttctcaggttcataaatgtttctttcaacagtcaatattatactggcatgcttctagttgttttatttcccagcatctaggcagaaataattattttttctcctcacaatgagaatgatattatacttaaatacccattgatattgtgcgggagttttttgttttgttttaaaagatagagccaaaggcagtgaaatttgaaattaagccttggccttgaatttttcatgtagtcctatactaactcttttgaataaaattacttttaagtcaataaaagtatatgatgaataactgaataattaatacttttgtaaaaaagtttattaatacaaaattcttaaattttacaaagaaaaatgcaatgctatatgaaacgtagttaagcaggtaaattattttttatctacttatttatctaccaattaaatttacttaattaaaattataaagttgacaaattaattatgattatggaaaaccagagtcatactttgcctataaaactgaagaattgatttgctattagatcactttgactgggaattatctaatattagtttcaagtgaatccctcacatatttgttgagcatttagtaaatgcaaatcactgtacttgatgcctcagggattattaagatttatgaaaacacaatcccttcttcaaggcgacctagtatataaataactaaatataatatgatagatgagttaaggaagtagaaagtaatagggtagttaaaaggaagttaaaactcctggttagaaaaatcatctggaaggattttcttgaggagttagaatttgagatggtgtagaataataaatagtgtatagacaagcagagaaaagaaggaatcaaggcagttaattccaaaacattatcagagcaatatgaagtgggggaaatccactgagctaaattgcacataacttagtaacaggcttaatctcgagtgactttgagttctgcacaaggcttaacatagagctgtgtgcacagtaaggactcaatgaatatttttattaatttagttatctctgcattcttgaaaagtataggcaaagctcaagtttgtttgtatttaaattcattatttaaagtaaaatgttgcagaatttggaacaaagcagagaagagctctattacaaactttggaacattgtaggaaaggtcccacatatcctggccatgaggacaaaacaggtcagatatgggaaagcatgagacctgggaaaagtaaacacaaggtttactttagggagcaaaccaaagccacacggagatgggattgccttctttggtgatgatgccattgtaggccaataagtgtggctagagagatgaagcaaactgggcaagaacacagatatgcaacattgagaaaggaagacagatacaataccacctaactttttatcaatgcagctgggtctgaaagcacctatatcctgtatttgtgctaaatgttacatatggacatgtttacaaactaacctgccccttatttgatctctacacccgtttagcccatgcctgtctcttcccgcattacagtctgaccactaaatatcagtactctattgtccctagtggttggacaaccctccagtttagagatcgtgatttacctattttagaaattttgaagcagtgttcacaccatgttctgtactttttaaatcttagtttacttatccataagatagggataatagtacctaccattaatagttgtgcagaagatcaaatgagatagtgtacccaatcgcttaaaagcttgtcatgcacatcctgagctattatcattatgataacaagcactttctataaacatttattaaactgaattcaaccttctctgatatgccaactgtgtagattccacattccaaatgatatctaacaaagtcttcacttacgtaaaatgttcagattgaaataaaacatttgttgacttatcacatgttttgctggtacttgtgaactgatgagattgtagctgaggtgataactgtggactctgttttttttgttttttttttttaacttctgccttcataaaaggcttttttgaacaataaagtatggttatcaaggttttacaacacaattgaccttgcaggtatatcttagaagtgttatgggttatttgctagaggcagatttcagatctatgctcttaaaagccaagtatttaacatataatgtttttacattgataaaagaaaagagagaagaagggtaaagcaatatccaaataagtccatcaaaacagctttttataatgactttgcagatccaagttagtaacacatggtagtgaatcaggatgatgcaagcacatgcctttgaaacaaccttgaattgtggttgtaaggtagctaaatgttaattagaattcacctaaatgatgcctcggcaatttggtctcttgtctggacaatacatgcagaaaagcagagtaggttcttatgggttcaatgcacgtgctgttccaaaaactttaaatttgtagggctcataggatgataaaaatccaactcaaaataaggcggtggatactactacttatgacaaccagttaaggtgaaatcttttgttgtttgggttatcattaacaatcatatattatactcttcttgctgaacataaagatatgtggcattttactataagatgatattttgtcaattacttttatgtaggctgtgtgagtcatcttaacaggaaaccatggattccaaaaaaatgataacatgattaggagaaaaaaaaaactacaacagaggcagtttacagaagatactcaataattatcagtttaagtcaattaaattatcaaggataattaagagcattaattattcctgccatttatttaataggcatattaaattaatttcagcatttatcccttacttgtaccagctcactacctaatttatgacattaaaacatgtacgatacagaatatatgtgccatggggcctgtgcaaggaagtattaccttcttataaatcaaactaaacatagctattctcatctgcattccaatgtgatgaaggccaaaaatggctgggtgtaggagcagtgtcctcacaataaagagaaggcataagcctatgcctagataaatcgcgatagagcgttcctccttgttatccgggtcataggaagctatgattcttcccagtaagagaggctgtactgctttggtgacttcctacaaaaggggaaaaacagagaaattaaatttcatttatttctcataaaataccctgagaatttcaacacaagacttttcatctttagaggagacttaaaatgagtttatatagagggtcataccatatgtgaaactcttagcactattttcaatatcttggtactttgaaataagacttgggatttgttatagcaacagtgggagacaagtttacatatgaggtattttaagttaaacagtgaatagtggccataaaataaaaagtatagtttctgaaatggtttgttaattagtaacatctacatagcacttaacagtttctaaagcatttcccttttttatttttcataacaactttcagtatcagagtaggctttttttttgtttactatagagactttctttgctacagagtaggcattattattttcacatggcagatgaagaaactgaggccacacagaccaagtgacctgatgtaatttcaaactagaactttcaaaagtgttttgtgcaatggcattattttcagaatgaacttagcttctcaaggcaactacacaaagcagagctgggaatgggagggaggagcacaccagcactagcggtatttaaaatcagccacttccaatgctagtcccttctcagtcagcaataggaatggactttggggaaggagttttgccagcagcctcaacctcaggccagattccaatgactcctggactcctcaaaggcccgtgagtcaatgagagagagcggaagttatgttttcccaaatatacctcatcagggtcctcaatcgactactaaaccaaattgtccatcgaatttattaccacttctcctgaatatacaggaatagatctgaatccagggattttgaactcaggaggtctaattcttacccatcttgttacattggcttcaaaagggaaggacacataattcctcattttgttttataacgatttagtaaaatagggatcagagggtaaccctgagaggaaatgatgctatgataattggttccatttaaaatatatatttccaagaaagactgcagcctacccctggtattgccaagcattattctgcctcatcccttaatttgaggggtttttgtccattttctacaatgtattttctaaacctcaagtatccaatacctccagccccatcattctcaatagatgaccatgctttctacatcaatgtcatccccacaagaaaccctaacccatatagagctgtcattgattgagcagctttgtgtagctgctcattctgtgctttatatacaatgttttatttttaattaactatgtcaaccaaggctctgaatgcaagaaaacattcaaactttttttttttttttttttatactctaagttttagggtacatgtgcacattgtgcaggttagttacatatgtatacatgtgccatgctggtgcgctgcacccactaacgtgtcatctagcattaggtatatctcccaatgctatccctcccccctcccccgaccccaccacagtccccagagtgtgatattccccttcctgtgtccatgtgatctcattgttcaattcccacctatgagtgagaatatgcggtgtttggttttttgttcttgcgatagtttactgagaatgatggtttccaatttcatccatgtctctacaaaggacatgaactcatcattttttatggctgtatagtattccatggtgtatatgtgccacattttcttaatccagtctatcattgttggacatttgggttggttccaagtctttcctattgtgaatagtgccgcaataaacatacgtgtgcatgtgtctttatagcagcatgatttatagtcctttgggtatatacccagtaatgggatggctgggtcaaatggtatttctagttctagatccctgaggaatcgccacactgacttccacaatggttgaactagtttacagtcccaccaacagtgtaaaagtgttcctatttctccacatcctctccagcacctgttgtttcctgactttttaatgattgccattctaactggtgtgagatgatatctcatagtggttttgatttgcatttctctgatggccagtgatgatgagcatttcttcatgtgttttttggctgcataaatgtcttcttttgagtagtgtctgttcatgtccttcgcccactttttgatggggttgtttgtttttttcttgtaaatttgtttgagttcattgtagattctggatattagccctttgtcagatgagtaggttgcgaaaattttctcccatgttgtaggttgcctgttcactctgatggtagtttcttttgctttgcagaagctctttagtttaattagatcccatttgtcaattttggcttttgttgccattgcttttggtgttttggacatgaagtccttgcccacgcctatgtcctgaatggtaatacctaggttttcttctagggtttttatggttttaggtctaacgtttaaatctttaatccatcttgaattgatttttgtataaggtgtaaggaagggatccagtttcagctttctacatatggctagccagttttcccagcaccatttattaaatagggaatcctttccccattgcttgtttttctcaggtttgtcaaagatcagatagttgtagatatgcggcgttatttctgagggctctgttctgttccattgatctatatctctgttttggtaccagtaccatgctgttttggttactgtagccttgtagtatagtttgaagtcaggtagcgtgatgcctccagctttgttcttttggcttacgattgacttggcgatgcgggctcttttttggttccatatgaactttaaagtagttttttccaattctatgaagaaagtcattggtagcttgatggggatggcattgaatctgtaaattaccttgggcagtatggccattttcacgatattgattcttcctacccatgagcatggaatgttcttccatttgtttgtgtcctcttttatttccttgagcagtggtttgtagttctccttgaagaggtccttcacatcccttgtaagttggattcctaggtattttattctctttgaagcaattgtgaatgggagttcactcatgatttggctctctgtttgtctgttgttggtgtataagaatgcttgtgatttttgtacattgattttgtatcctgagactttgctgaagttgcttatcagcttaaggagattttgggctgagacgatggggttttctagataaacaatcatgtcgtctgcaaacagggacaatttgacttcctcttttcctaattgaataccctttatttccttctcctgcctgattgccctggccagaacttccaacactatgttgaataggagcggtgagagagggcatccctgtcttgtgccagttttcaaagggaatgcttccagtttttgcccattcagtatgatattggctgtgggtttgtcatagatagctcttattattttgaaatacgtcccatcaatacctaatttattgagagtttttagcatgaagggttgttgaattttgtcaaaggctttttctgcatctattgagataatcatgtggtttttgtctttggctctgtttatatgctggattacatttattgatttgcgtatattgaaccagccttgcatcccagggatgaagcccacttgatcatggtggataagctttttgatgtgctgctggattcggtttgccagtattttattgaggatttttgcatcaatgttcatcaaggatattggtctaaaattctcttttttggttgtgtctctgcccggctttggtatcagaatgatgctggcctcataaaatgagttagggaggattccctctttttctattgattggaatagtttcagaaggaatggtaccagttcctccttgtacctctggtagaattcggctgtgaatccatctggtcctggactctttttggttggtaaactattgattattgccacaatttcagagcctgttattggtctattcagagattcaacttcttcctggtttagtcttgggagagtgtatgtgtcgaggaatgtatccatttcttctagattttctagtttatttgcgtagaggtgtttgtagtattctctgatggtagtttgtatttctgtgggattggtggtgatatcccctttatcattttttattgtgtctatttgattcttctctctttttttctttattagtcttgctagcggtctatcaattttgttgatcctttcaaaaaaccagctcctggattcattgattttttgaagggttttttgtgtctctatttccttcagttctgctctgattttagttatttcttgccttctgctagcttttgaatgtgtttgctcttgcttttctagttcttttaattgtgatgttagggtgtcaattttggatctttcctgctttctcttgtaggcatttagtgctataaatttccctctacacactgctttgaatgcatcccagagattctggtatgtggtgtctttgttctcgttggtttcaaagaacatctttatttctgtcttcatttcgttatgtacccagtagtcattcaggagcaggttgttcagtttccatgtagttgagcggctttgagtgagattcttaatcctgagttctagtttgattgcactgtggtctgagagatatccagccaaactaagcttcataagtgaaggagaaataaaatactttatagacaagcaaatgctgagagattttgtcaccaccaggcctgccctaaaagagctcctgaaggaagcgctaaacctggaaaggaacaaccagtaccagccactgcaaaatcatgccaaaatgtaaagaccatcgagactaggaagaaactgcatcaactaatgagcaaaatcaccagctaacatcataatgacaggatcaaattcacacataacaatattaactttaaatataaatggactaaatgctccaattaaaagacacagactggcaaattggataaagagtcaagacccatcagtgtgctgtattcaggaaacccatctcacgtgcagagacacacataggctcaaaataaaaggatggaggaagatctaccaagccaatggaaaacaaaaaaaggcaggggttgcaatcctagtctctgataaaacagactttaaaccaacaaagatcaaaagagacaaagaaggccattacataatggtaaagggatcaattcaacaagaggagctaactatcctaaatatttatgcacccaatacaggagcacccagattcataaagcaagtcctgagtgacctacaaagagacttagactcccacacattaataatgggagactttaacaccccactgtcaacattagacagatcaacgagacagaaagtcaacaaggatacccaggaattgaactcagctctgcaccaagcagacctaatagacatctacagaactctccaccccaaatcaacagaatatacatttttttcagcaccacaccacacctattccaaaattgaccacatagttggaagtaaagctctcctcagcaaatgtaaaagaacagaaattataacaaactatctctcagaccacattcaaacttttaaaaagtttccaaactaatcacaaacctggaatattatagttctctcatctcacatagccacattttaaatgtgagtttgaatgatagcagacaggcaggtgctaaaaagaaaattgccaacctcctatccaaatattacatgttaactgtttgctatatctactgaaatatttttgaaaagtaagtacacaaatgactgcatagtgtatattattttatgtatgttttgtacttctattacatatatgttcatctttagaatatatatcaaagaagaatggtttttgaggtttttaaattttatataaataacatcctactgtgctttttacaactttttaaaaacttaacactgtgtttttcacatttatccctattgatacttgtataaccaactcatttattctaagcactgcctaacatgccaccctgtgaataaatcgggatatttgcccattgccatacattggagcagttgtgttgtttttcactcctaagctactgcaatcagtgaaagtgctgccctggatgttttttacaaagttccatatgtatttgccaacctttctctagattcgaggatttttttttcaaaataacttttttaaattaggaaaatgtacaattaaggtaaatcttggatttaaaattataaatatatctgcattacaaacataattgctcatagtatgcttacaatggcaatatttaatccttaaaattattttagatcaatattttaccccagaattgttctatattatgttgtttttcatagacaaatgtcaataccatcaatttactttgatttggtttttttttttttttcatgactagtgggtttgtacttggccaaaatgctctcttgagttgcagtcaaggccactggatttacatgtgctatctatgttagaagtatcacatgtgatcatgaagcagagagcaaggggcattatttaccatgcataccagacaaagcatcatttcttgttcactgtaagacagtaacgggaaaggtatgacctgtgaacactgcttataaagtcaattctttatatcatgattagcataatcacatttctcccctttcagaactcatttatctgctaatatatatctatacagacatacgataaatacagaaagactggatagactatctcaaagaatatagaactactgataaacaatacattgcaaagcaagtatgcaaatattttaaaaagtaacttgtgtctataggatgctaaaaagaagcttctgagaaaaaaagagaaatattttagcaaccaagctaaattttagcacagaatttttcaagttacaagtgtaaagacttgtataagatttttttattttgagtaatgtgaaataaaatctcttccactggatttctccattatattttccagatcacaatagacttttccctaccacaacagacttatttgctgaatttttattcagttgtaatttacaacaaaacacaattaaaatgtgtattaatttgagtggaatgcctttttaaaaaattcagagacaggggccgggcgcggtggctcacgcctgtaatcccagcactttgggaggccgaggcaggaggatcacaaggtcaggagatcaagaccgtcctggctaacacagtgaaacctcgtctctactaaaaatacaaaaaatttagctgggcgtggaggcgggcgcctgtagtcctagctactcgggaggctgaggcaggagaatggcgtgaacccaggaggcggagcttgcagtgagtggagatcgcgccactgcacttcagcctgggtgacagagcaagactctgtctcaaaaaaaaaaaaacaaaaaacaaaacaaaacaaaaattcagagacagtcttgctttgttgcttgggctggagtgcaagggctattcataggtgccatcacaacacactacagcctcaaatccatagatcaacagatcctcctgctttagcctctcaagtagctgggattacaggctcatgccaccatacctggtttgtaatacctattttacatgtcattactgagtttgttgtcatctttcctcaaccgaagaggacatagtcatcctttgaacaacagtagctatttcacaaagaactggtagcattactctggaagggcatgtttacaaactaaaatgcagtttattttcggtatgaaaaattctaataataagatcatctgcaaacagcaaaccaacataaacctcaccaccacatggagctgttaccattcaaggacaaaattagcactccgaaaccccaccccttctatagttttccctaatctgttttaagcatcatgttctttaatatttacaatggaaccatttacagatatcacctgattttttttttatttggaaaaaacactggtaactgatacctagcttaacctatgaagtgcaatccttcacaaaaattatccccagaatgactgggagaaacatagtccctatattcttggtacaagaaagctgactgtactccattactcagagtattttcagagacacaagaagcgtcctgatttgctaccacatgaaatagtacaagcaaacttaggcttgcatgtaagaaggaggaatgtataattatttggatatttaataaaatagtttattactctgtatcagacacaaatcaagatggaattcacttaatggctcacttcaataatagaagaagcctgataccaacgtgtaagccagcgtgatggtgaaataaacactgaattcaaaatcgtgaattccaaattcttatccagcacattacctacattggctgtgttattttagtctcttccgcgctctggacagttttcctcactgataaactaagaggtggagaaagctaattgtgatgtcccctccagtgctaacatctctgattatatgatctgagtctgcagagtcccatggcagaggccaagaattccttgggtaattgtcctagccctcatcctgccatgactatggctgttttctactcagaaggatgaaagtctgaacagtatgagttcagaagatcatctgggtagaggggctcagattagaaaacagctcaagtgattgcattcctggtgggaacaattttgtgactcaatttagatcagcctcccagggaaaatttggaagactaaaaatgtctcctatatcttctaggagttatatctcatttctcacatgttcttcaagaccagagcttcaaagttattgtagatgagtctaaattctttaaccatttatggttaaaaaattgtaatgcatacctaagataggatcaaatgtttagtctagagataggaaagtctgctttttctagatattcaaaccatgaaggaaagttcaggtgaaaaaaatagaaacctgaactcatgcttgtaattacactaaatgaattaaacccagaaaactttactttaaaaattacagttctgatcccaaagcagggttgtttctaagtagaatggtcacttggaaaacttctaaggctacactgttttctattgtgtgaggtcacttaataaaatcaccattatcattttaacttcttttaaatatacagtactttatatgtcgttattccaagaataataggacagtttaattttgagaaattaattaaaagaatacagaagaacctatgattatctcagtaacaactgaaaaggaatctgataaaatttcaatatgtttccaataaatgttcttaataaacttgaatataaagatacattattaacctgaaaaaggatttcttcctcaaaatgttacaatcaatgccataattataaaagtctagatgcattacatttagagtcaggaaaaaacagaatactagctattactaccatttaacatttttctagaacttctagctaatacaactcaacaagaaaaatgatcgaggtacaaatattggaaagaagcaagaagtattatcagcatagaatatgattgtgtaacaaatgtaaatgaatcaagaatttaatagatcgaggtttaaaaaatgactatgctaagaaaatagatttctatataccaaaaatgacatctaattaaatgagtatcccattcatagtaacaatataacaaaagatacaatgtaatagcaataagatatatatcttaaaatatacatctcacaaaacattattgggacatattttaaaagtctcaaataaatggagagtcttaaaactttctaaaatgaagaacttaatgttgcaaagattacattcccctccaagttattttataagattagtgcaatcttcatcaacatttaaagatttttttggaagtgaatttttagcaccgtaagagtagggactgtcagtctcaatttttgcaacaatcctaataccatgcacaataccaagcacagaatatccattcaacaaatatttgttgaatcaatgaataaaatgattataaatttcatttggaagaaaactcatcaaaaacatttgaggaataagaataatgtgtcagagggtttacattactggatattaaatcataaagccataataatatgtgacatgacaaagaaatagactgatttatctcaaaagtccaggaacatgtccaagcacatgtaatactttaatatattataaaatacggcattttaattcagtggagaaagagatcatgcaataaatgatggacaaactggatactcatctttttgaaattagatttctacctcatacatgcatcacaatgaattctaaatagagtagatatttaaatgtaaaagatgaagtaataaaaacatagatgcatgcttacataatatttgggtggcatgggcctttataaaagaataatgtcaaagcagaaaacaaagaaaaagatatatagatttgccagcaaaattttcaaaaattaaagcttttaattgtaaaaaaaaaaaaaaaaactcactagaaacaaaattacaaggcaattgacaggctagggaaaatattctctcatatatcaagaaagagacaaatacaacaaaataaaaacacacaaagaacatgaaaggcaattcacacacacaaaaagaaatataaatgcataattaatatacaaaaacagattaaactcaccaggaaccaaaagtaatgcaaatgaaaataataatatgctctttttcacttggcatttttaaaactttatttaaatatctattgttaggactgaattttcatagtttagtatcaggaaagtaaaatagtagtgcaccttttctggaaagcaatttatttgtatttttacacttaggtagagagtcaagaacaccttctaagagtcagcttttaaaggggtgtgtactgaaggaccttttatagtaataaaaaaatggaggcaatttacatactcaatgatgaggaactgattaaataaatcatggtacagccatatgattcatgaaagtaactaggtagaaaaacatctaatgacatggaaaggcattcacaacacattaaagggagaagcagattaatatgcacattatgtaatgatgacttctcccctttattaagtataaattcccatgggaaaaagctggaaggattaacatcaaatttaccagtaattatctgattattctgattattaatcagaagaaaataaaaatttggataaaaatttcatacaacttacaataataaataaaaagaaaacatgcatacaaaaaatggaagaaagcaaatacacctacactcagaacccatcataggatacaatgaatgctggcttatatactaaagcaaaagtttaagattttgcttttggcagggtaaaagtgagtgtcaattttttgtctattttgatacagcagagtctgacaatagtttttgggctcatacaaattgctaaggaaatgaatttttccatattcatcatagaaaataaaaacatattcacgcttaatccactgaagaattaagaggtttgtttttaaatatttccttcattttgccacaattgtttatagtttttgcaaaaatacacatataccacacctagaacagaatctcagaaaaaaatctacctttcttttagattcaatgactaattcaaaatgctttagttttggtattttccttttagtgcttactgattttattaattattactggtaacatcttcactagaaatctaagctatattcttcatattttataagaaaaagcccctggatttgctgaaatagcagcaataataggtttggttcagataacacaataatgaaagatgtgttaaaatattaattttaatttctaaagtaatactagaatctagctgccattttaaagcattagtaaaatatattcttgtgccttataaaaatcaaactggtgctacaagatttgcttatagcatatatacagaaataactaaatgtaaataatgagtatttgtgcacttaggtagagagtctatttaaaaagacagggactggactgggtgcagtgtctcatgtctgaaatcccagcacttcgggagtccaaagcagtaggatcacttgagcccaggagtttgagaccagcctgggcaacatgatgagaccctgtctctaaaaatgaaaggcagaaaacacacatatatatatatatatatatgtttttatatatgttttctatatgtatatatgtttatatatacatgtttgctattttctaacctattattgctctatatatttaagtctatgaaagacatatatatacacatatgtatatgttaataatatataatatagcctattatatattataatcatatatataaattattatattatttatagtattatatatttatttagaataaatattactatattattatataacatatgttatatacaattataattataatatatattgtattatatattataataatgggttagagacatatatgtgacatatatatataggttttatatatatattccttccatatatttaaattggtgaaaaggtaatgatggtctttgccattactttcaatggtgaaaaccacaattacttttgcaccaactacatatagagttccatatatagagagagcacttgctatgtaccagaatctattctatgtgcttaatgcatttaattctcacaacaactctataaaacatgttctatccagcaaaagaaactatcatcagagtgaacaggcaacttacagaatgggagaaaatgtttgcaatctatccacctgacaaagggctaatatccaaaatctacaaggaacttaaacaaatttacaggaaaaaaacaaccccatcaaaaagtggggaaaggatatgaacagacacttctcaaaagaagacatttatgcagccaacaaacatgaaaagaagctcatcatcactagtcattagagaaatgcaaatcaaaaccacaatgagataccatctcacaccagttagaatggtgatcattaaaaagtcaggaaacaacagatgctggagcggatgtggagaaataggaatgcttctacactgttggtgggagtgtaaattaattcaaccattgtggaagacagtgtggcgattcctcaagaatctagaaccagaaataccatttgacccagcaatcccattactgggtacatacccaaaggattataacttatttgactagaaagacatatgcttatgtatgttcattgctgcagcgttcacaatagcaaagacttggaaccaacccaaatgtccaccaatgatagactggataaagaaaatgtggcacatatataccatggaatactatacagccataaaaaaggatgagttcatgtccttgcaggaacatggatgaagctggaaaccatcattctcagcaaactaacacaagaacagaaaaccaaacaccacatgttctcactcataagtgggagttgaacaatgagaacacatggacacagggaggggaacatcacacacaggggcctgtgagggggtggggagcaaggggagggatagcattaggagaaatacctaatgtagatgatgggctgatggatgcagcgaaccgccattgcaatcgccatctagattgcaaacattttctcccattccgtaagttgcctgttcactctgatgatagtttcttttcctggatagaacatgttttatagagttgttgatacctatgtaacaaacctgcacattctgcacatgtatcacacaacttaaagtataataataaaaaataaaagaaaaaagaaaaagaaaaaatgtgctatcattatctccactttacaataatgaaattgagatgaagagaatttaagtaacctacccaaaatcacatggctagtagctggcaaaactgtgatttgataacttaaagagtgtcattggattgttggtaactcaaaagataagtgtttgaggggatggataccccattctctatgatgtgcttatttcacattgcatgcctatatgaaaacatcacatgtaccccataaatatatacatctactatgtacccacaaaaattaaaaataaaaataaacaaaaactaatatttgaactagacagttagactccaaagtcccctccccaccgccaccctcactgataaccctaaatcaaaaacaaactgttataacacaacctggttacttctcagttgctcatcagttcacacattgttatcagttcaacatgacctagcaaattaagttataagctagtatcactgtaatttaagataaataccatttatctaggccctatcttatatacacataatttaaaagatggaagtgacggtaaagatggtatactgtactatagctatactatacagtttccctcagttgtacagttaaggaaactgaggtccagataagtgtttttatttgcttaagatcataaaataagttatgttatcagtgcataaagcagatcccagcagagttaacaaaaaaaaaatgctgaacctttggaaacaatgcatacttagtgcatcatatatattttactttgtttcaccatgtcatattcattagtcattaaaggacactagttagctaaaataatgcaagatgcaccatattcctacaaaggaatgaaagaactaatatctcatcgtctcatatccagtctaagttgcaaaaccattatcacaagcaatttctaatttgaaaatagatttggttccaaaatttcacaaataagaacaagaaatgaattttgtttacaccaacaacaggcagcagagaggcaaatcaagaatgaattcccattcacaatcactacaaagagaacaaaatacctaggaacacagctaacaaaggatgtgaaagacctctttaaggagaactacaaaccactgctcaaggaaataagagagaacacaaacaaatggaaaaagtgtcgtccttacggatagaaagaatcaatattgtgaacatggctatactgcccaaagtaatttataatttcaatgctattcccatcaaactaccattgacattcttcacagaataaaaaaaaattattttaaatttcatatggaatcaaagaagactccatatagccaagacaatcctaagcaaaaagaacaaagctggaggcatcacgctaccagacttcaaaatatactacaaggctacggtaaccaaaacagcatgggactggtacgataacagacatatagaccaatggtgcagaacagagacctcagaaataacaccacacatctacaaccatctgatcttcgacaaatctgacaaaaacaagcaatgaggaaaagatctcctattcagtaaatggtggtgggaaaactgcctagccattatgcataaaactgaaactggaccccttccttataccttatacaaaaattaactcaagatgtattaaagacttaaatgtaaaacccaaaactataaaaaccctagaagaaaacctacgcaataccattcaggacataggcacgggcaaagacttcacgaggaaaatgccaaaagcaattgcaaaaaaagccaaaattgacaaattggatctaattaaactaaagagcttctgcacagcaaaagaacctatcatcagagtgaacaggcaacctacaaaatgggagaaaatttttgcaatctatccatctgacaaagatctaatttccagaatttacaaggcacttaaacaaattcacaagaaaaaaaaaaccctattaaggtgggcaaaggatatgaacagacacttcacaaaagacatttacatggccaacaaacatattttaaaaatctcagcatcactgatcatcagataaatgcaaatcaaaaccacaatgagataccatctcatgccagtcagaatagcagttattaaaatgttaggaaacaatagatgctggtgaggctgtggagaaataggaacgcttttacactgttagtgggagtgtaaattagttcaaccattgtggaagacagtgtggcgattcctcaagtatctagaaccagaaatgccatttgacccagcaatctcattactgggtatatacccaaagtaatataaatcattctactataaagacacatggacatatatgtttactgcagaactatttacaatagcaaagacatggaaccaacccaaatgcccatcaatgacagactggataaagaaaatgtggtacatatacatcatggaatactatgcagccataaaaaggaatgagatcatgtcctttgcagggacgtggatgaagctggaaactatcatcctcagcaaattaacacaggaacagaaaatcaaacaccatgtgttctcactcgtaaaagggagttgaacattgagaacaggtggacccagagaggggaacaacatacaccagggcctgttgggaagtaaggagtaggggagggaacttagaggatgggtcaataggtgcaacaaactaccatggcacattatacctatgtaacaaacctgcatgttccgcacatgtatctcgttgttggatttttttttagaagaaaaaataaaaaaaaaattaaactaaacagttcttcctatggataccactctccaatttcctcaccttagatctagcaaaagtcaaatcattaagtgatcatgctgatgcctgtctacaaatagttctcaactttggctatataattagaatcgcttggggaatatttcaagaatgatagtgtcccaggttttatcccagaccaattaaattacattttctggggtagggcagagttgcatcatgggaactaaggggaagatgtacaatgcagtaggcagcacaagaaagtgcatctgtgttagagatggagtttaggatggggtaaaatattcaggacataggagattgtggggagtgcagtgtcactctagggttagagaagcagctagataagggggtgagacagaaagatgagaaaggaattctacatggcagacatttagaagatttgctggagatagcagtccctagatagccaatcacaggaagagatatacataaatcaaagtgcctaagccacaggctctctatgcacagaattcccgagagaacaccatcccttctttagggaagtaaataaaaatagtttacccccacatatatttcattcacatattttgaaatggttgccacaggcccagcagatagaagtggacctgcaaagctgtattttgtgggagaaatttgcatctgtagaaaatgtgttagtgcagccaggctctccctttctagaccttttttttttttttcaaatctaggagagattaactgagaatctgacacctgccaaggtctgaaaagaaacattctccatctattttctctgtgggctgccaacgatttacctacaaaacaagaccccctttgctacccaagtctcttcctttctccttctcataacctgtcttgccactgaaacctgttttacaaagatccaaacccccattctttctgtaacctcaagatggtatacaagcttccatactgcactgagagggtaggtcttcatcctgaaggctcccatgtatacatgtcaaatacatttatgtgcttttcctcttatcaatctgcctcctgtcagtaatatttcagcaaacctttagggggccaaagaccttagccccatattagcagtaggcttgtattcaaatgcctacccaatgttttcatccaaacataagggacagagatcctcctttgccatatagactgtagtctgcaacatgagtaccaggacttctcctgtatgtcctttaattttgtgaggtttaatgaaaaaaggtagtctgacctaggctgcactgacatatgcctcaatttgttggtggaaatatgcccagagctgcctaggaatcaagagtattttgaatgaatgcttgtgaatttcttatcataataaatgcattgtataatcatattctctcaccaatctgcttgtgagagcttcctctacttggcttccctcaaactatccttgactgactctcacattcaggttttcaacagccagtttctcttccatgctaggagtctttttttttttttttttttttgagatggagtctcgctctgtcacccaggctggagtgcagtggtgcgatctcagctcactgcaacctctgcctcccaggttcaagctattctcctgcctcagcctcccaagtagctgggaccacaggtgcccgccaccacgccaccacacctggctgatttttgtacttttagtagagacagggtttcaccatattggccaggctggtctcaaactcctgaccttgtgatttgcccacctcggcctcccaaagtgctgggattacaggtgtgagcccccgtgcccggacttgctaggagtcttaaatgttaaagacaatgttgcatctatctggctgctgagtcagatgaagaaaaagcaagtgcatagttaatggtgagaagtcatagctaataatatttaaaactacagcagtacttcagaaagattagctccttcatgatggcacctccttttttttaacctttcacagttaacagcaaattttatagtacttttctctatcagtcctgaaaccaagcaaatatttttatgccacaactatcattgtttagagggactaagaatgtgtagagattctgaaagtatgaccatctatttctaagagaagtgttacagtagtttcaagaatccctggctcatttatccttgctcagtgaaagaaaagaagaaatacccataaataataccataaataggaaggcactggtgtaagttatgtaaaaggacagagaaaatgtagagaaatactataatggctaaattttctcccccccttttattcttataagagacaaaaagaatgaaatcaagagatcagatatcctgaaaaaactgcaataatctaaatggccactatgtttatctaaattatttaagatctaacaatttgcaaatttctcactatttaaaactgcatggtgtcagcgtggttttttctctatgacaagggtgaaaaacctgcagcctcatcacacttgtgccattcccaatataaatattcttctctctgccttctcacctacacatttcagctgcttcttcccccaggatcctttactcaccaatattccattggttatcagtaggagttgagatgatggaaacacgctttccccttcaaaggtgctgctagttccaaagctgtagcctcgggctcaggagtacctttccactcacccccatgcatggataattaatacgccatgaagggcttttacgatctcttttgctgggatatttttaagcttgagaagtttaagaacaatttagtctttctccatacatactccattctcctatccctttttttgtctataggtttggcccttagcatgactggttcttgggtggatttcatacagttcctcccccaggtataagtaagtgagaagatctcgttgattcctgtcctgaagaaagtttcagatttgcccctgaagtgaccctggaagaatcctcagccttcaagctctgtagcctgtgtctcctgagaagacgcagagaagctcagcagaaccaaggctggttactagagtcaccattctgttgagtacctaaatacaatcattataattataattatatattaatagcaatcataatctggtatggtgaaagggtcaaaggctttggagctaaagagactgggatatctctcaaacttaccatatgtgtaactttgggaaagttacttaatttgcctcacgctcaacttcctgttatataaattagagataatttttgctccatggagttactaggaaaattaagtaaaataatctgcataaagaccttcatattgaactggaacagattaggtactcaataaatattaaattcttctatatcatgtttattttttggcatgcaccagaccaaaaaaaattctatagatatgtccatgtatcatacaaactttgacatttaggtgggtgtttttgcatacatgaaactactatgttggtgggatctagagaaataaattattttacaagccaagcagagcatagaaaggggccttctaattagacccctcttccagcttctactcagtagtgcttaggttaatcaatagaagcagcatgcaatggagaacacaaccaggagaaattttgagtttcactgaaatcttggccatgacataacaattacttgaaatatcattcacttcaatccaacaatcacttattgaaaatgttatatacttacatgatttatatgataggatcagagtgaactgtactccataccctgattcaaagcaaccagcaaaacttattttctaaaaattacatcaaatagaatcagaagctgtgaataaaattgtttctcaaagctctgggtggtgctctgattgagaaaaatcatctcaaaggtaacttaaaagtaatttaattatccagctacctcatttaaatttactaataaaatactttttacccccaaatgcccaaatggtttcagatttccataagaatatatattatggatctattatttcaaaagtcagaaaaatttcttctaggaaattatcaagagcattagagaacattctgggcctaagtgtactcatctttgttaagataagttttaaatgtatttttcatgggggtgtatgaactgaaatttttcaagcaatgtaacacaaatggcatttctctgggagacactgtttaactccctgaggcataaagaccaatataaacacaagtcaatccatatgataagtaaacgccccaaagcaaatattgtgcacagctttaacaagaagattaaacaagtcttgaatctgtctccttttataggttacaaccaaggattcaaataatgctttcatgatgtagaaaataataaatcagagtcacattggacagcaactggggaacatacaaggcacttaaacaccacaaagcctggattttcagatgtgcaacttttcacactgatgagatgtaagatattaagaaaatatattgcaagagaactttaaatttttagtattatttatttagtatttaaagctgctatactttaaatttttagtgtttttctttgaaacaattcaccatgcagatatgatttcaaaatattacaaacattcatatatgtaattagctgcatttgacctaattctgctgacattgtctcctgacactctcctgttgaatacagcaaaataaaggcaccagtaatctcatgtactagtaagataatgtgatttggaatcataacagaaaataattttttaagcaagcaatttattttgctgagcccattgagattgtaaattgccacccgtgttccaggacattttagttccaaaggatttttacttatccttactagagttttaggtggtttcttagtgtttggagttggattcatcctttatatttttacacctattcaccagatttcgtagtcttttcataatcacaaaaatgaatatagttatgtgatacataatgaatgtacaaatgagatccttacccctaaatataaaaagattccatagaacataaatctccagaaaaaacatcgccgaagggcattaatgagtttaggatttttctttgaagccagctctctatcccattctctgcaaaagaataaaaagtgggaccaataagttgcatgtgcaaatattttagttgtcctatttcccttaacatagtttgattcacacaagtatatccaaggagattaacccaagtattatagagacaaaatctcatggagaccatacaacaccaaacactcagccagatatttggcagaattcaatgctctgccatatatcactgtgcagggaattgatttcatgaaaaggccacattgtatgtgttaaagaaaagtgttgggcttctaaaaaacaatgaaaagggtggacaaataaagtaaggcttttacgaatgctcattgctgtgcttagaacaaggtggaaaaaataaacacacaaacattctacatttttcccttataccttgatctttattggtttagaactgtggcagatttataagatttcactgtcaaatcaaaaacaagttaaaatgtcaggtggctttttctgtgatttaacatgagaaaaatctgttagactttgtttttaaaagtagaggcataaactatcattaaacttcattttcaactactaaaatcatgtattaaaggtctttgaaaaatgagaacaagatcaaattatatattttctattatagtaagaatagacattaaatagtctgaaaactggctgaaatctagtaaactttctgttttcttttaaatactataggaacaccagctgattgtatttattaagttattgccactgatttctgttaatgaaagccttttttctcttcacaaaggaataaaatatctctaaatattatcatcttaattttcaaactgtacagagatgaaaaatttcatgaaccacaaggaagaactaggtaaacaattagacaaaggctttacgtttcatcagtggttattcccattactgtcaagttaccataagtaaacatggctctaaatcactctaaaggagtaataggccggggcagtggctcacgccactaatcccaacactttgggaggccaaggcgggcagatcacttgaggtcaggagttcaagaccagcctggccagcatagcaaaaccccgtctctacaaaaattagccaggcctggtggtgcatgcctgtagtcccagctactcaggagactgagattcgcttgaacccaggaggcagagtttgcagtgagctgagatcacaccactacactccagcctgggtgacacagcgagactctgtctcaaaaacaaacaacacaaacaaacaaaaaacataaaggagtaatacacagctgagatttgaagacaagcctggcaatctctaagcatggatcttggcatcccctagaagcttgctaatgagagcccttctataaagcctaattaccttttcccatctatttccctccccacatgcttctccacctttctctcacacacagagctaacctcccatccataacatttggttactcagagtaagaagctaaatatggagcagactcaccttctccatcaaaggagaaatggatcagatgggaaagccaaggaaggggtgtgtacataaaccaacaaaatgggttcaatgtgaaaaagtggtccacacggaagtaatgtagaaaggtgttgttatatttcataagaggtctctagtgaccctgggcaatgtagttttaggaacatggtggaaaccatacttcaggagctgagatgtaaatgaaagtgaagtagagagaccaggagagcagagaatgttagctatgaaagaaaaaatagaatggggtagttacctgaggagaaggcaaggtcggggaatttctttaatgggtgaaacttgaacaacttggtgccacaaattgttagcaccaagagtaggtgatgtggttctagtaggaccacataccaggcccagatcagaagggaagaagttttattcttaaaaagttcatatcctgactacaatcttggaacggatgtgtggtttgcacactgcagttatgtagaggattcaatccatggtcacaaaattgagccagataggttaatgttcttcaaccatctggcaaccacttgagggccatggtcacaaggcagttatgaaatgtgaagccagggtcacttcccaagggtgcagaggtacaaagtaccaaaaatggtatgtcactcttccaaaatatttcaataaatttcaaataccaattttataagaaaagaagtaacagggtggagatacaaaaacaaaacaaaacaaaaataatagaacgtatgggtttgtactggcatagcattgttgaattgaagtaaaataggtatattttttaaattgaatcaacatgggggatacagtgaaaactggaaagaaaaaaatgttaagccagataattctgcaaattcagattcatgttctctatctggccataaatacaaatgtatcacatttttcaattaacccagccctactctgattaatcattccctcagcatccaattaaaacttagatattcaaagctgggcatagtggctcacacctataatcccagcattttgggaggccaaggtgggcagatcacttgaggtcaggagttcaagaccagcctggccaacatggcgaaactccacatctactaaaatacaaaaattagccaggcattgtggcgagtgcctgtaaacccagctactcgagaggctgaggcaggagaatcacttgaacccaggagacgaagtttgcagtgagccaaaattgcaccattacactccagcctgggcaacagagcaagactctgtctcaaaaacaacagcaacaacaacaacaaacatttagatattcaatacccattatattattttgaacttgtcaatatacctgcaatggattatgtttatatattttatctctccagcaatgctacaggtttctatgtaatgctagccatttcacattccatcatggattcattcaacaaatatttattgagtatataccatatgccaggccctattctaggcacttggggatacatcataaacaaaagagatcgaacccaataaaaaataaaaaacaaaacaaagtatccctacctcatggcatttgcacacaccaagtgttcaataatagaagctggcccttgatcttagaagtgtgaatctgctactcccactagcttaattctttgaataaaatcaataaaaataaagtttaatatcttactttgccttcaaaatgccaaaaaaaggaaatgaatttaattaaaagaaacaaattgcaagtcaactcaatgtttttactttggtgcaataatttagtagctatgtcttattttttatcccccttcactcacccttttatctggcatcaggcctgtgctgttggcacgagactcagcctagttcattctagactatgagtggcccaaggggtaagcactatgactcaagagtctctgggatttttcacatttagccaaggacaaagggctccttctttcgtggtccttaaagataggagcaaagagttctaaccagggacccactttatgtagaaagctggtccggtctgagaaaataaaaccagcataaggcaaatgccaccaggtggcatttgagtccttggtcccattgagttcctaaggccagttctccacctaggtcttcacatagttcaggcttcatgagccaataaattcgttccttttatttacttaagctagtaaattgggtttctgtcactggcaatcaaaaggatcctaaccttttgattggaaaggaaactgagagattctttatgggggggactaccattcctagagagcaaggcaatacagacctcagctggaatcatggctccatcattcattaactggcaaagtatattatctctctgagcctcagtttgcttttctgtaaaatagagataatgatgctttccactcagagtggctgagaggagatattctacctggcatgtaacaggtactcaaaaatatacaatttttacatttgtttgataaccagtagccattaccttaagacttcccagggagtacatttgtattcaaatataaaggttttgaaagcaaatatacacgatttacttcataatggtgttactttagttttcacaaaatccatctcatggtctctaataagacaaattctctgaaaccaaatgtgtatttttcaggaaaaaaaatcatttcttaggaaactgattatttttcttttatgattttattgtttaatgatttcagtcaacatttcagtgtgaaaatgagatgttcctttttttttttttttttagagagagagggttttgctgtgtcacccaagctggagtgcagtggcacaatcatagctcactgcaacctcaaactcctgggctcaagtaaccctcctgcttcagcctcctgagtagctgggaatacaagcatgcactaccattcccagctaacttttttattttgtgtagagataacatcttgctatgttgcccaggctggtatcaaactcctggtctcaagcaatcctctcatcttggcctcccaaatagttgggattacaggcattagccaccatacttggctcctatttttaaatataagaattaaacttataatatgtttgctttctcttctctaaataattaataatatgaatttctctcttcaactaaacaatgtacatgaacatacctttccaatttttcagatagattgtcagcagaatcaacagaagggatttggtatatgtctgacaattccaggcgctgtctgtatcctttcctcaaaattggtctggtccagctaaaataaagagaggaggaacagatattcacttgatttggtctccatacagatttggaatctgatactattcaacttttctggcatatggaaaattatgcacatgtaaatatgagaataaaataagtcaatttctataaataccaggcttcatctcttacaggctacacctgtataaaacatcaatatctctgaactaatgtgactgtcactttgtcaaagggattgggagggaataatagtatggtttttcccagggaaaaaacaaactgctaaacattccatatttaaattattctttaaaaaataactgcccccaaataatcatatactagcagtttatagcaaattactgaagtccagcctcttccatttcaaatataaaaaaactctgaataagacatgcacttaatcaacatttaatcaacagccttatataattttgttactgtagcatgcatactcagtaatgagctattcattgaaagaatgactatagccagagagttagtgattagtttctatcaatttgttgacttaattatcatgtctgaatcattacctgagggtaggatcataactttcttatgttttgtctcctcactccatagcagctacactcatctgccctctaggcatcaataaataataatttataatggaaattagtaaagttggcatgggaaatcactatgcaggataccgtagtgattttcaaaaatattgtttctaactgttgaggataaggcagaataatcttcataaagataggaaaatctagaaagaagaaagtagaagaggaggcagaagaaggattgtgaaatcaatcatgtacaaagagaaatttctaaataaaattcgagagcacgagagctttctcaggtaaaattgaatatatttattaaagaaaggaattgaactgggatttagtgagtcccaaacctatgctttttccctcagcatctttcttttctctggagagttctaaaatttgtgtcattcagaccttatttggtaatgtatcaaaatgcatgttaaagcaccaaaattcaaaagggagtgctttagcaatatctgagaagcaggataaattcattatagaaaagatattctagcaaagccattcagaacaaaaagagaaagggctatgccaaatgcaaacattttgacactgttctggggcaaaactttgccagtggccctcatatccaatctcactgctcccacccaggtccttctttatacttccttggtctggaacttcttcagtaggcacctgccctgggttctcgatatctctacaacttgtccttcattaaaacttaactgaattagggctctaaggttaagtaacttcatcaattattccttactaagatattaataagtgagtatggtttactatgtcatattttttccattaatttgcaatatccgcattttaacaagagctgtctttaacaaagagcgataattaggtttacccttcattgcccagtctgattcatttgtaatttttcctggagagcaataaagaaaatagttgaggccagtctgaatacagcaggaaaatgaatgccatgatcatgcaaggtcttcagtggacatcatctgagaaagtgatggcacacccacctggtgcatactatcccagtatctaacataaagaacagaaggaaagtcgaacatacaggtggcaattaggctgtaaaaaaatctgggacagcaatttatgatataatttagattatgagcccttgtaaactaaagtcaagaagtgaaaaaggtgaagtaagtgtttactactaataaaaacccgtgtatttagcgctttccaaagtgccttcataaacatgagcaggttgtggttttcatttgaaaatcttcttaaatgggtagaactaaaagggatcattgctcaattttattgataaagagatggaggcttagagatgctaaactttactaaatggcaaagcctaggtctttccacattcttttgacttcattcattcttttaccatgttcaactttccctatttaagaaaatttggtatgctgggttgtgctagacagacagctgggagaggagcctgaaagcaggaagaacaaaagatagcagactgcatgtagtggtgttgcatgcaggcaaatatttaacaatcccctctccggaaaacaaaaacaaaaacaaaaactgacttacggcatttgccaatttctatgatataaatactctcatcgtcatcattttaaagcaaccaaatataaagtcattgaacacagagttgggaagggatacacagttgcatattagaatatagtacaatgaaagtgcaatagaatatagtccacctttcaaatacaatgaaggcaaataacgttaatagcatagataatagtaaaatgcaaaataattaggaagtgataatttttgtttttttgtttgtttgctttttgttttttttttttttttgtttcttttttttttttttttttttttttgagacagagtttcactcttgttgcccaggctggagcgcaatggcgcaatctcagctcaccacaacctccacctcctgggttcaagcaattctcctgcctcagcctcctgagtagctgggattacaggcatgcaccaccatgcccggctatttttttatatttttagtagagacagggtttctccatgttggtcaggttggtctcgaacccctgacttcaggcaatccacctgcctcggtctcccaaagtgctgggattacagacgtgagccagtgcgcccagccaacttttgagtttttaatacttttgttttaatataatttatttaattataagttgaaataatttaatttttaataatggccatgtttaacaattagctcacaaattttctgaaaatttaaaaatcagctcagctggaaagagctaagtgcagcagatcacttactgccagatgtttgaaaggcttagaatgagggtaatggcactgtgtgtggatggaaagaaaagaacctgtagaacatttagtaaaaaggaaaatgtgctcccactattaataaattctgcattttcaatatgtttgaaattattaaaatatgacactatatttacaaatgagcagaatttcactatctgtcaataccataccaaaataaggcattttcaagaaatgtaaaaataaatctcctcaatctcttttaaaaaatataaacgtaactcttttggtccttatttacaacccagtgacctttcccataaatggccagttcagttcaaagtaacacaatttgtgagctgcttttataaaaagcttcctgtgttatctgtgcccattttaataagttatgttacaccatgacacatcgttttgattagcaagaatgccatagcctagcatcatcaaaccaaacaaattcagtaatataaagacttaagttcaccatctataattattagtatcacttagtatttcctggaagattcactacaataaacctctatttatatcctgaaatacaaattgggtttaaggtaaattatgataactaaaatccattaagcttatgctgcccaacaatgaccacagagtcatcttaaggaaatattttattttgtgaggttaaatcaataaaattgaatgaaaaatatgtcccatcaggccaggcgcggtggctcacgcctgtaatcccagcactttgggaggccgaggtgggtggatcacctgaggtaaggagttcgagaccagcctgaccaacatggagaaaccccatctctactaaaaatacaaaaaaaattagccaggcatgggggcacatgcctgtaatcccagctacgcgggaggctgaggtgggagaattgcttgaacctgggaggcggaggttgcagtgagccgagattgtgccattgcactccagcctgggcaacaagagcaaaactccgtctcaaaaaaaaaaaaaaaaaaaaaaaaagaaaggaagaaaattatgtcccatcaaagaattctccatgcctacctcaagccagtcttagaaatacaaaaaaaaaccagacatctatacttagacactttatgaaatattagttagtgcaaaactccagccaccctttcttttgaaaaaccctgagtatattaaacctagaatgtttaaatgcacagtaaggacttttcagcatttcttccactagaaatcagtgatcatccaggtgtttcatgagacaaagcagacacacctggaataaccaaaaagcaataaactcggctctgcctttcacttgggcctgctgtcttcccctctcacctctagttcatcttatccttctctttcattcataacctccattcatagccactacatattgacgacagacttttacattggtctacttagaaattttgttcaaagctctggctatttctttctttcttattgtcctttgtttgtttgtttgtttttgtagagataggatctcaccagcctgcccaagctggttgcaaattcctgggcttaagagatcctcctgccttggcctcccaaagtcctggaattacaggcatgagccaccaccacacccagcctagttctgactatttctaacagaaactaattaatcattcactatgggatagcaaacagagatccctaaggcatacagattttactatgtataagttttaaactaactttgaaaaaaaagtctagcatcctagatacactgttctgttcacttaactataagagatttcagattttattgaggaaaagccctatcacttgattttttaaacacacacacacacacacacacacacacacacagatgaaactatagtaaatttcatttcttaggacaaaaattccaatttttgtatagagtgacttgtaattccttataaaaaaagaacttgccaattataatcactattaaagctttgattttcataacatatcctcctaaagtcatataattaaagcttatactcatttttcgatctgacttttgccttttattaatccaaaagacgcatctgacattttcatctgccaaaacttcagatgaaggtcatggatatcagatcttttcaagtcaaaatgatttttagtgtagaaaacaatcatgcttccatgtatttaacattactttttatttgactaggcaaataaaataaaatgcaataaaataaaataggaaattcaaaccactaattgcatgacacttctcccaaatattgacatactaatacacttaaagactaatagcctttttcctttttgcatgaaataattaacacttgaggaattaatagcaattactctagtttgtgtagacaaattcaaatacattagaaaatttctgatcatccaatgtatttgccatgagtttgaaataggccacacaatctggatagtcctaaccaaaaaaaaaaaaaaacaaatgttgaagacaggcagaggaaagaggggactcattggaaaagattgtgatcataaatcccaaacttctagagcacagctctaccactttgctttagttattttgataagtgactatgatagggaggattgatttgagactaaaactcatctagtgtctataaggatatttttctaaaatcataaataacattttgaatgtcacatttattttatccaatttagattcagagttatttagtcagatgtatttttctcaaagaatcatagtaaaagtaggacttgacaaagtgatactatccagctctctaaagtcctgtgtaaaacttgtaggcttcaagaattcaatttaaaatcgcagtattggggtcaagttactaatttcccctcctctgattccacaaggtatttagcagtgtttgcttcttctccataaaatggtgaatttataagcagtaatcacttggtcagcttaatcaactttagggagtatatgctcgctaaagacaagccttgtgtatatttgagttaattgttcatgaggcttaattttaccaagggacttggagaagttctttttctttctctaggtaggtaaacaccattaaagtggtcaattaatttcagaagctctggagaactaattatttgctgctaaacaaaagactacaaaccaatactgaaaaatcttctgcaggtccaggatttacaaccatacaggcaccctaatggaaattaatttgctaacttcgtacctaatgaatccaaacattaaatagaaaattgatctacccatttcatgcaatgcttctaaactataaacattattaggaacagacgtatgttaagaaaatatcaaaaaagatattttcttttttgcttctctatattctctaatgtttaacaatagcatgcataactttggaaggaaagaattctttttcattaaagaaaaggtatgtgtaattataatgcattaattgctatgggtaactattaatgtaaattttctggccaaatatgttctaacttcatgattttcatataatgctcactatcaatattaattttctataaaatcactttttctttctcaacatggttgtctcacacatggtttctttctcaacaaggtaatatttcaacttgaagaatacgaatccccagtcacctgatgcctactacaaatctgttattgaaaaaaactgaactaaagattttaagaagaaaacacagccctagcttgtaaccttgtctctattatttcccagtgatatcgccttggaaaaagctctgaagatctctcagctacagttcctgctggagataataactaccatgaccactattcctgatgttcatgagagccaaattcaatgttgtctataaagcattatgtctgtacattattacatgcttcttcatatcaactgcttggctttggtttaattttcaaagcaccagaatttattattgggattataacaataatgatagctaacattagtattcattaccacagacttgcataattctaaatatttcacatacattatttcatctgatccccacaacaattcaagaggtaggtcttggtaatatctccaacttacagttgagaaactgaggctaaggaagcttaattagttaatttgtcaagggcagagtcagaattttaaaattaggattgtgacaccaaagcctacacatgtatccaatttgccatattacaactaattttttaaagtagcatacacttagatacaacaccagaagcacaaacagcaataacaaaaaataaattggaaattatcaaaattaaatacttttgtgcttcaaaggacaccatcaagaaaatgaaaagaaaatccacaaacattagcaaaaaaagaaaaaaagaaaaagaaaaaaaaaactcacaatgaaataccacttcatgcccagtaggatggctgtaatttttaagagtagataatagtaagtgttgcaaatatgtggagaaattgaaacactcacacaatggtggaaggaatttaaaatgatgcagccactttggaaaacagtttgaaaaatcctcaaaatattaaacataaagttactatatggcccatccattacactcgtaggtatatgcccaaaagaaaggaaaatggatgtctgcacaaaaacttgtacacaaatgttcatagcaccattatttataatagacaagaattaggaacaatcgaaatatctattaactggggaaaggataaataaaatacatattcttacaagtgggatattattcaacaataaaaagaatgatgcaagccaggtgctgtggctcacacctataatcccagcactttaggatgctgtgggaggaggaccacttgagccctggagtttgagagcagcctagacaacataacaagaccctgtctctaaagaaaattataaattagacagtcatgtggtgcaagcctgtagtctcagctactcgggagactgaggtgggaggaccgctttcgcctatgacttcaaagctatagtgacccatgatcatgccactgcacattccaacctgggcaacagagcaaggccctgtctctaaaaaaataaaaaagaatgatgcactgatacacgctacaacagggatgaatctttgaaaaaaaatgctaagtgaaataagccagtcacaaaagaacactttgttctatttacataaaatttccagaacaggcaaatctatagagatggaaagtacatttgtagttgtctagggcgagcagggggatttggaataaggaatgactgctaataggaatggagtttctttttacagtgatgaaagtgttctaaaattggttatggtgataggcaactctttgaagatactaaaaaatcattggattgtatgctttaaatgggtaagttgttttgaatatgaattatatctcaataaagctattattaagaacaacagtatacagaaatcaactgtcagtgttaattttagaaagttttactaaacatttgatttttcactcctagaactggtgaaatcaaaattttcattatagtgactttgatacactaaagtctttcaaatatgtcaatggctgggtggctacagcaagtgatttaagatttcatgcatatttcatgagatctaaggactggtgacatgcaccatgagttgtgtaaattgtttgttttctgtcctctagaagcaaggaacttaacttctgggacaactatgaatttatgacttcagataaaagttgtaagagcaatagtatcgtaaagaaaccaaggaatgtgtaccattggcattgaaaggccacttctaacagctgtatctaattcactcacatgacttggatttcaaagactcaagcacttgagaggcaataataagtaatgctacaaaaaaaatcccacccatcttgaaacataacagaggaaacaaagcattgtgatttatagttgatgcccatctactttagagaagcatcctcagagtgcctttccaggattttggtttgatttttattctatctgggaatgaagccactaacaagagccacaaaactgtagctggaacaactggctagaaagaagaatgattaactaccctataaattgctgcatcctgtataagttcacatttaggagctctttattcacaagacaagggatgccattgctctctaatttaggatttttatttccattggcaataaaaatatatttgaaaccaagaaaataaggaaaaggggaaatggattggccttaagattttatagtagaaatgccactgggttactggctggcatttttaaagcttaaagaaagaaacttgtgcaactgtcaaaacgtcatcacggttactgttagacaatcacattttagagaacagaagcagagaaacagttttaagtatgtccattcgtagctgagagggaaaaaggaaaacaagttccacctctccttggcctaatataggaacaaaatagaaatcacatgagtgatataaggatatctcccacatgatatattgatttaactttgctggtatttattttataattattccatttatttggtatttcctctctttttctagacctcaaaatcccttattgaggctctttgttcacctagcttgttcagataccatcactaggacccaaagtaaatactctctactaggtttctctgtcctttgacagaaatacccatatttttccgagccatcattgttattctggaattaactcaagatttggaattaaagtacttgatttttctttgctaaagtgtttattgaaagatggaggtgacatttctctttggggacataaatgctctgataagctctgggttataggagtcaggaatctgcctggcatgaaccactacaggcaaagcgcatgctagacatccttatgactttcaacaaccaaatgatgtaatgacctctcactatgtgtacagaaaaaccactatttattaaatcctttctaacactagcttgcaagttactgccttgaatcgactttccccaaaattaaaaaaaaaatactgtgtaattccacctgatatagtttggggatttttgtttcttcactggtgaaatagagactagaagtgacctcaaaaatgttctaagatgaagatgattaagaattaatactccaaggataatactgaaactgatgctgcatcacaatgacaaagctggtgatttttaaaattcagttgtgataaagttggtctctaggattctgcctgaaatcatctaaacagataaaaatgatcagtcgattctggaatttttctcttctgtcttaatcttcccttcaccttcatttgtttatgttctctgctctgttatacaggtatgttatggctacacatgattatttctcagaaggattcaaagaacatcatggcattggattcagacttcccagtggcagctgatttcccactttcaaactaaacatggaattgggttcttggtggcattttaacccttttttcttccactgttattacttaaccctcaagaaaacaaattgctaagtactgcaaattaaaagggaaagttagcatcttctttacttctctttttggggagcagtatgtagacacaattgtatgactcaagatttaagtttcatcctgttcttgagtttgaggaccaatactaacgctactttcattttcttcaagctttattatcactgggagggagatcaatagcaaagcttgagagaggcaggattggacagcatccccagattaacaatcccgcattcccacagtgaatcccagaaggaaggagcaagacagaggcagagaacatagacaacaattggctcaaggtttaccaaggaattaataagactctacctcaaaagccttgctttaaatcccttttacttaatatttacatcttttttttcataaaagcaacatatacctaagtaaaggtctgcaaaacacttaagttgctattttttccaatagcaaaacatacagtaatagataattgattcattaaccaatcctaataagcaatttaagaattcaaaatgttcatctttgcaatcaggtcattaaaagcacaaatgatgataatttggagaaaataatttttataggcatttcagaatttttttgacctcaaaatgttataatctcttgcttccattcacactctaggaaaatgaactttaaaggaaacgctgtgccagattctcttctttttgaactctgcaggagctcccgctgaatgaaactattgatttattaggtggctcttaatttttaaaaagattatcctattaccatcactgggcatggcattctttggttcaaccacatcacactgaaaaaaaaaatggtaacttccttaaaataaaacctaacctctatttccaagaaacctcaaatgcattgaaatagtcacacataaattatgtatgtgtgagcctctctgaagtctagattaattccccatggtgtgctctattctatcctgtacttcttctacctgagcctttaccacaaaatgtgtatttacttgtctgccaacgccccatgtttccaagcaccctagactgtaaggtccacaagaagaaacaccttatagatcttgtgttttttttaaactactgtatcccctgtgcccagcatggaacatggcacataactgagattacaatttgtttgctaatttctttccctcagaagactaacttcttgaggacaaggcaggtgtaatatttatcttttatctccatcatgttgttcagtgcctggaacagagcagaaattgaacaaattaatgggtcaatcaattaattacacaaacatgatatgtttggagcccacatgatgacactgattgcaaataggtattgcttagctgttactcttggtcaaatatattaaaagccaaaaaaaaaaggtcaaaacatttttcaattctatagtaaatgcaatgcaaatgtgagggtgcctatacttgttcagggacaattctttaataatgtttcttctctttttctgagtcctaaagatgatcatcctaaaacttccagccaacattatttaattgtcctcaataaaatgtttttatatgcaaccttctccattatcaaaatattcttcctaagtttggccttcatcctatttttagtggacatgtaccaaaatttcataaatggaaagtcattcttcagtcctctcaagagcaaaaggtcctttttcttatgaccttcttggattgttcctgtatcatatcacttaacatcctctgcaatgtctccatgctatttatggaccactatacatgaggtatatatggctttcaataggtttcatagattaactccctacatgtatatactttatggtctcaaattacttccatatcgcattctgctcctaaagagtgttatcaattgttataggttgaattgtgtttccccaaaaaaaggtatgtttgagtcctaacccccggtacctaaggatgtgaccttatttagagataggatctttacagaggtaataacattccaatgaggtcactaaagtagaccctaatccaatatgactggtgtccttatattaatagtaaagaagtttggacacagagacaggctcacagggagaatgccatgtgaagatgaaaacagagatcagggtgatgcctctgtaagtcaaggaatgccaaggatttctagcaaaccaccagaaggtaggggaaaggcatggaatagactcttcctcatggcccttagaagaaaaacctgccaacaccttgatcttgtacttctagtcttcaaaaccataagataataaattcctgttatttaagccaccaaatttgtggtattttgttatggtagccctagcaaactaatacgctggccctaatcaacagagaaattccacgttaggatgatgcacacaaggggacaaacaaacaaaggtgatactttgagtatttaagatacagttatgcactgcatgacatttcagtctacagcagactgcatatacaatggtggtcccatgagatcactacatagtatttttagtgcaccttttctgtgtttagacatgttccgatatgcaaataccactgtgtcacaactgcctgcagtattcagtatagtaacaagccgtacaggtttgtagcctagaagcaaaagactatgtcatattgcctaggtgtgtagtaggctatacgacatctaggcttgtgtaggtatactctatagtattctcacaacgataaaattgcctaaggacatattacccagaacgcattcccattgttaactgacatatgcctgtaaatttaaaagctagagataaaagtcaatggcaaagaaagccgacagatgtgcaattgggaaggggcatttgtaggagtgtgaccttcataattcagagaaagcactgggtctaattcataggaaaggagggataaatttagagaagagaggtactttctcagagcccagacagaaagatgaaaaggtgctaattataataatcctgttgttgctgataacagtgcttaccatttattaaagacgccctatgtctggcattatttgctatcacttaatgcatagaaagtgcttacagagagtgatggttaattttatgtgtcaactgggtgggtgtttttggatgagattaacatttaaatcagtaaactttggttaaagcagattgccctcactaataaaggtgaacttcatccaatcggttgaaggcctgtatagaacaaaaaggctggcctcccagagaaggacgaaattccccaacagactgccttcagactcaaactggaacattgactctcctgggtttcctgccagctgacccatactgcagattttggacttgttagccatcataatcatgtaagtcaattccttataataaattgtgtgtgtgtgtgtgtgtgtgtgtgtgtgtgtgtgtgtgtgtatcattggttctacttctctggagaaccttgactaatatgcagagtaaatactcaatgaatttttgatatcataataatactgtgccatgtaaagataaggataactcattgtactgacgagagtagctgaggttcagagagattaagtaaattgcctaagatcacattgttaataagtgacagagttaggattccagccaggtctgtctgattccaaagtacatgcttcttccatcatatattgctacctgacagttgacaatgaagataaagatgaagtagaatatgagatcattttctaaggatacaaatggctggaatggggacacaagggaagatcaggaacaaccaagatgggggaagaattaagtcagtggttttcacactatgagccccaatacctagtgttctctagaaatatttcagtgaattcaccaacttctgatttgaaatgtatgtattttaaaatattattttatagacaggaaccaagaaaatcacacattctcaaatgtaggactatatgttaattttagcacactagattgatccgaacatgatcctgggctgtcaggcttgtttagtattcactatgtaggaaagcttctgctgacatctccttgcacatatttaaacctgttatgatctgttattggttatctctgcactgcattagtgagcatgtcactacaccatatgtgggccaagctcagttaacagcccatcatatctttgacatacctgtttgcatgaggtttcatcacagcataacagagttgtacaacactcagggaacaataataagccacatatgatattatcatggttttataatactttatcatgcgtacttgctttaaggtgatattggttatagaatttaccatcaatttaacaatagcctttccaaaaagaagcactacattaactatacacagtttttagaaattaacaatattacatacttattcatgcaatcacctaccactttcttcttcagcatcgtaattaaagttttagtctaagcgttcttcatattcagagcaaaaatattcttctgagtcactctcagcctttcagagctatgaatagagttacagtgacaaactgcattcataacaccttcacctgtaggacaggcagtataatttcaaggcataataaagtgctgagcttaggcgacttctactttaattacattgcttagtatgtcagacaaacttcagactaaatattacctgtttttttttcaaaactacatcacaaagtaatttatcccaagaaatttcaagcaacaaactaaatttatttaagagtcaaccttgtgggatgcaaccaatgcaaataattcagctgaggtcacaggagtatatatacctttatgtattgctaagttcccatattacaacttattcctgggccttgtggctgacaagtttcttttgacatcaattataaaaggcatctcgatttcagaaacataacactgtgaaaaacacaaccatgtaggatcaagaaaattacatataaatgttatacaaaatcactgtagcctttactttagagcactaggttaactgtttctttgtatttatgggagagttattatcttttattgtcactgctatttgtatacactgcggtcccatggaaaattttatttgaaaattgattacagtattgttttttaaaaaaattgtgaaaaacattgccctgggaaaatgcaagacacaagatagataagatagagcctttgccttgaaggacacattaaaagatgcatattccaaaaaaagaggcaatgaaatggtcaacagagacttataagtcaaaaattattctggacaataatctaataactgttaagctaccattttcttcttctgaaaagtccattttgcatgtctaaatgtttcacttacttttaaaattattcagttaccgaaaaaaagttatagaagacttaaaattttttctagattttattttaaactaagaaagactaaaaactgtatcttttaaagcatattgcaatagaatttaaataaagaatattttgcaacatgtaaaagttatatgaaattcaaattttaatgttcataataaagtttaattgaaacacagccatgcttatttgtttgcatattgtctattgcagagacttatgtggcccacaaagctgaaaatatttactatctagccctttacacaaaaaagtatagcaatggtctttggtcgaaaaagtgatgcttttgtgttggtattgttgttttaatttctagagtttatagagatgtttaaaataaataaaacgtacaaagggagccccctatatagtttctccaccttgcttcctctagaactgtggttgctaatcccagccaacataggcttcattttcttgtcacacccataaccaatgctggactctaaggtttagcccttgaatcacctcttaatacagctgtcagtacccctgggattctgcctattatgcttaattttcacacatttgtctgactggtatcaaatgaaattctagagtccctttttgaaattattaagccttcactaggcatttgggagtagatgtgaagtcaggtaggaggtagttgcacctctgtagtccatgctaagaaagagaactctgcatatttaacaaagctcaaagttttaacataaaacaaggatacataaccttttcaaaagtaatgaaaaccttcttttaacacacacagaaacctcatcatagtaggtgagctcctatttttattcaatcactggagacaatatctgaagtcccaagcagattttcataccacattgaatttctatgatctctcatatgttgtgtcccgtgatgtgaaaagcactgcctaaaggagtgaagttatcaggaggttcagacatcagttagcaggttatataggagagttctaagtataatttctaagtagaatttaaccagtactgtccctagaactcagctgcttcttcctaacactctcaggtcacactatgccacaataaggccaaacaagtgggcactctacatatttataaaactgtcacctcagacatcttatatctcttacctaagactaagctctaaatcactttaatacattttcaaataaccatattacctaaccctgagccatatacatcatttccgtttctggttttgagagaagtagagtcacataggtctgcactcctgctccatgccttcttctccgattaaattttctcattcaataagcagcaccactgtcccctctattatccaaatcaacaaatatagatgttatccttaactcttctctttccttcaccttcaactactaattgattaccaaaccagttgattttacctcctaaatgtctttcaaatctctctctctctctctctctccccgccccctcccccccaccccacccacctccaccatggccactctttcagctcatcttttcttttacaaaactgcaacagtatatgaactgattatgtccctctcctgtttaaaagccatggcttttcacttccagtatgataaagcccaaacaaagcctacaaagcctacaaagcccccttacgatctggcccctgctagagtttccagacccatctcccacaaatctctgtcacatattttatgttcccgtcatagggaacttctcaggatattttgaaggtgccatgcttacttatcctgtcagtcctccacactacctgtttaaatttttcctagcccatccctaccctctttggataattctaattgaataacctcctttaggtgtgaatacaaaagacacttcccccagcaagccttccttgaccagccttagactgggttaagtgccccagttgagtacttcaatgaagccctcgagaaagctgggtttcagataatttgttccataaaggcagcaacaatttccttcttggccacctctaccttcttaacgtctcacatagaatacagaatatgaatgaggtcatcttccaggttacccagaatcatgacctacaaaggaagtactgctgtatctcagctccttggagcaagctatgggagagttttctggctatatccaggcatagcttcaggcctgagtagtcctaataatcctacggacctagcaaaaatcttcatttccttaccccatgagcaagaaattagcaagcatgctatcctacaaaggctaaggcagaagggacacaagaaaacttcgatggaataattgttctaagcattaaaaatctgcccacagtcccacttgctttgacccctttttatcaaaatgatgccagcactgcaggactgttgaatgtcatcgatctacaatagacacaggtctctagggttgatcaccatgaactcattaacatcacaaaaaaatctttattaaattgttccacggaagagtcttgaaatggtctgaatatcatactaaacaaattagaaaaggccctgacatccagagctttacaatttggaatcataatttatgtcaaaagataataataagttaacagagctgcacagaaaaatagcaaagttgacaagccttgcaacttgaatacagctgtgaaaaactctgaaaaaagatttttcagagctctgtaggaatgtaattctctacatcaagcaatctaagagtaaattaaatttttacaagcttcttgctaaaagaagcctaagctctttgctgacacaatgccctacagtaaagccgtaaagccactctgtaatgctaatttcacactgaaacaactatgtggtaaattgattctagagctctgaagagaaccaacagaaatagcaatgttttcctccatgataatgcacttgacatatttgtaaattaatctttctacaagatctccaaacaacttgatctttatcatagtctgttttccccttttgacctcattgcatctcagaggtttttctccaggaagatgccctacacagatgcctcaggatcaaaattgccaaaattgctgctgagtcagagatgtttttaacgttttgacaaccaacacataactgcatgctaaatagttaacacccttcctgatggttttgcaatactatacttatattgtagctctatcacactgaaattataggctcttgtgaaatgacactagcaataataatgcattttatagcagtactcactcaaggacctttaaacaagtgttaacatttatgtattgaatattattacactaagttccactccctcccataacacataaatggaaaactggaaaaccgtgatttccctagtgtaacagttagctctgagggatattttgactgtcacatcaaacataaaatattgatgaagtagctaagaaaaatagattccacttctctctttagcaaggaattaaatattaaaactacactattccttataagtatataagaatattacttgaatcaagtgattaataatttaactagcatataaaaaactataggaataaacttcaaaacaaaggagaactttttaaaatttgcaaaattaaaagaaacaattatataattatatatacaaagatattttacatatacaaagatattttatatataaataaatgtaattataatttttgtcatatatcaggtacaggaggtacttttagaactctgagagttaagctaatcaaaattaatacaaaattaacacagattcccagctgaaaaatctcaactgtgtaataacaaaacatggtcagcaaaaggataaatagaaaagactattgagggactggtgtagaaagtcaacatttgttagtgttcagacaacattgttcaagacagaagggctcctatcccagaggtgggcccctccaattcctataggatgtaaagccaagagagaatatggaaaccctgggctgtcctcattgatggcatttgcccatggactgactaaatggagtcatggtaatcgggaatgcttggcagttgtatatcacaatataattgttcaacacatattggcctttgttttatgcatctattttattttgatttggataacctaaggtttttctgatagacaaacctgagataatgtgtatgtattgatcagacctagactaaacccttgtttgggtagccaactggtcttccttggcaacacttttacaaacaccctcaacaaactgcaaaaatatttatggcttagccataattttagctttcctcacaaattgcaaacatgtaaataaaatgtaaatacaaaatcatcatgatgaatttttaatagtgtatcataatttatataaccaaataagtgtggtcccattcaaaatggtcatctttataaatctttcatagtataattttaattatacttccattgctcaaagcacttatatttctcttcattaagcactgtctttaggctgacagggtgaggtggcttacgcctgtaatcccagcactttgggagactgagtgggaggataacttgaggccaggagctccaagagcagcctgggcaacatagtgagatactgtctctatataacttaaaaaaaaaaaaagttagccaggcatggtggtacacacctgtacacctgaagacccagctactcgtgaggcaagatggaaggctcacttgagcccaggaggtggaggttgcagtgagttatgattgtgtcactgcactctagcctgggcaacagagtgagactctgtcttttaaaaacaaacaaacaaaagaattgtctttaaagtttgcaatgcatttttttttaatgaaaacacctaaaattaggtagcacttggctgttaacaaaggaaattatgatgaaaaatctttatattttcagagtgaatttgattttgtgatacagtcaaaagtcacttggaagcaagtccaagagaccagtctgggtaatataatttttaatctaaagcaagctatgaatataaaacaataacaataaaataatgtggctaatatatacttatgagaagaaatttatgtattatttagaaaggcaatttcataataagagacccaaaattattttgatcaaaggcaaatgtttagaataggagtgtggtttttattagatagctattttgaaccaccatacctattctgatatataaattcaggtgtatttgtttgttttaaaatctctcattactttgtgtttaataattacaaaagtatctcaaattatcttactgttaaactcgagacttagactatgtgattctttgctgaatttccaccttagatcctaacaatattttactctttggtcttacttgagactaactgcagagtttacaggagaccccacatcccttgtaagaaatcagtggcactgtatacttggattctgtggggttcccacagttcctcagtatagacctagacatagcacagatatcacgacgaaaattcaagttatgtcatgtgacacacggtttgatatacactcttacaactaaacgaaatatgaaaaattcagggcatgagagaagagacagagaggaacaaactgaataactaccttaaaagttgtgagaaaatgtaaatttaaaaaattttcccaaattaaatagcacaatctctgttggtgaccatttataaatcaatcccacttgtatatgaattataaattatatgctaatatatcacttctagtttaaaaatagcttcctatttcataaatgttattttcataaaagtttcaatttaatgtacttgtttgctctgatagtcatgaactacctgaatttttcatggtgaaattctctcttagattatgtttattttatatatatatatggattatgatagttcagatgttcttcaaattttatacttgatgtgaaatccacacaaaattaagaaagtaagaaataacttagattttttttccaaactttttggttttccaatgacaaaacctagacatataaagagatattcaatacaatctataactcataccataataattttactcttttatgactctcaaactgaagggatcctattcagaaagttaaattctaaggcatttaacaacatacaatagaaacatgtgacgtgtttcctgtatatctggtaaggccatgtgaaacacaatttttcataaattaaattctcatacaggcccactcattgcatatccagattgagagtcacaaaattatactcaaagatgaattgagcatcttatattaacaaggtgcatgtactgtgatgaatgtgaaaatatggtaatccataataatagcagttaacattaggctaacttttcacattcattttctcaagggattaacccctatgacagtctccaaattttaaaggtcaagtcacacacagagatgttaagggacctgcctcaggcaacagagctactaaacagtagatgtaggatctgaatcaaaataatctgactccaaagcctaccactttgaaaactaagcaatactgcctaacttaatgcagaaaatatgttttttacacttttagaattgcagtccagaaggccagaaggaagtttgtaatcattggtattttaggtgattgtcagttcctataaatagtaggaacttaacttttaaaaacatacctattcttaaagcaccttatgaaatattttggagaacagaaatgagtatgctcttaacacacttagcagcctttgtaatacattttctttgcaaaccagcctgatagcattttttaacctatattaaatgtgtcaggtgatttgtaaaaagaaaattatataaaaacccactttgacagatcaatagtaagctattttaaagttcattagtatttagaactatccatgaaatattcattcttctgaaaactgcatttttagactggttggcatttaggttcctcaaagttctctgctaaaaaaagtctataatttatgccaattaacattttgactttataaggactaggaaaacagatcaatagataagccgattttataggtggagtaacaaaaggtggataacatcaacacaaaaagataattccaaagagtaaagtccttctctctcatccacagggaggagctctccttcaagggccaacagtctctccttagcaccggagttccaggattaactgcacatgcagagaactaaacataagagagatgtgaaagctaaattccttcccccctacacacatatatgagctatttataacatatttgacttttttgatacctcagtatgcttattcattgggtaattatgtgtcaagtaatgtcccaagagagagcagtacctattcattcattcacaccagtataataacaggaacaaagtagatgcaatatccaaagaacacttcaaatatgaagtgctacatctaacaacactttgcctaagattccgaacttagatgctattttaaaaaatctcattaaagtttgcaagcttctgtggctcatcacattaggctatgaatacaatttattaaatgtcagttggatataacttcggtatctattcctatggcttttaaaatttatagcttgtgaagtaacttttttcaaaataaatatttcaacaaatttgctttcaatttttgaagaatcatttacctgtgacaaatactagatatatccagtctcataacaataaatactttaagcatatattttctacctaccccaaaatttttgttggctgaattcagtcaagaaatgttttctgagcacttactatatgcaggcatggcacctgtatgtgccaagaagacaatcaagtgtccaaggcatgaagggggaaaaccaataaaccatacttaggtacttattaacaagtatttttagtttcttagaaaaatgaaataaaacaagtgcatagtagcgtacttgagtcttgagattctaacttttcagttgcaagtagatgtggctctctattcaatcagcttcagttcattcttccatctcttcttaatgctttctgttttattctacaatacccacattttctttcaaaacaatgaatgatagcgcatctttttaaaaactgcttattcctttaccccaaacccaacccatacacacgccctcctctttcgtgggcacgtgtctttccgaagctcggttggccaccttctcacctgaaaaaaagtttggagacaacgctggccttttccagaggcgacctctgcatggtctctcgggcgctggggtccctgctagggccgtctgggctcaagctcctaatgccaaagacctactactctgggtgcctgccgctcaaccctttttctctgacctgctgtgatgtcatttgcttccaattccccccacccacccctactccgcacaccaccccttccttttgctctttcccccgccttcactgcccaggttaaaagccgagtgctgcctggtccggccccaaatttgctctagcggctttctccacccactacgcacccccgccagcacccctcccgctccttcctcctctcctccttcgctccctcgccgccccgcacctccctttcccgattctgactcccagcctccctccctcgcgcgcgctccttccaggtccgtgtccttaccgcccagcaccaggcccatcccgcaggtgggcgacagtcgcggcctctctttaggtccagttggcaacgctggaggacagaagaagccaccggcgggagaaccggctccccggagagcttcctagaccctccttcgcgtcagggtccgccagacccaggacccgctgccaccagcttccccggagcctgccttcctcctcctcctccttttcccgatgatcctagtcgggttcctgttacgtttgcaaggtgcattttgaaaagggaaggaaaatgtgcctttcgtatatcaaaatacagccttagagagccgaaaagttccgcggcagtgtgggtctgatgcatttaccttagcgcttcctttgcgtgtcggagaaaagaaccaagctttattagtttcaggtttaggtgagtgaactccaagggtggcacagaaatcttaggacacgtactgaaagagaaaaaaaaatctgcaaggaggtaagaggagataatgctttgcgtaattaccggcccaggatgtgttccttgtctatcctttttagcccagtgcgcatttttaaggaaggctttggagtgttttagcgataatgacaaggaacaatgtaaactaacccgccctcctatagatttcctagtctcagtcagcaaaacatcttgactaatccaccgaaaggaagccaagcagtctttgaagcgaaggtaatgtgttaactttgacctgactcagagaaacgccatcttcaactctctgaggggcatctgggcattcccaggcgtaggcgccttccttctgagaattttgtgtaggattgcctgtgtctctgacggtttttaaagagccaaccctctaatccctgaaccctactgtgtaaaagcaagcatacattgtgtttgaattgaaaaattcaaaggaaagtaaaaattttggcctgattactttattgccgacacatctaaggcaagggtcttgtgaattatcttgttgttgacttgtggtcacccaaatacagtacaaataaaatgtgcatttcatgatggaaagacaagaacctgtgttgaaaataaagaatgtgttcagcaggttttcatagctctgctttgcccttccgtgggcaaaagcatacctttttttcttgatattgtaaagtaagatttagaaacatttaatctttattatcctaaatttgaatagtagagaaaagagcaaagagataaaccacattgcattaagttagacaccaggaaagaatttcagcatttttaactcaccatccactctgttgtttgaaatcctctacctgtgttttcatctctccattatgacaaaaaattgtgagactctgtcttcactattgacttttcccagacatgtgattgaactcaccacatccacttccccattcccaatctgttgtttggtttataactgttagtgtggcccatcaaatataatacatgcattttgaaataaattaataattagttcttctttgttatcaacaagcaagtgaaaataaagggattaagaattaagctccaaagaggatcatagaagctgaccaaggaatatggctggaggagactccaaatatttttcagccaatctccttctggaaagagtgaaacagttacttgagttcttactatttgccagacattattcatataacccttataacaaccatgtaaataggtgttattatcttcagttttcagttaagcaaacaagaaaagttaagtaaatgcctataatgatagagctaagattcaaacctgagtctagttctaaaccattactcctatcactgtgtaatactgcttctaatcaaatcatccctcatgtatttatataatgtcacttatatatcaacatagtctttttcctcacattagtttcatgaaataataacttctagacctgtttaacaatgaaacaggaaagcagaaatctacaaaccaagtagccaaactaagtagccactggagttacatacttttaatgaattacatttaactataacattgcattttaagcatgtacacacacatgtacataggaagaccacagatttttatcataaaacattacagcccaaatttgttttggtagaaataaaactttaccattattcagagctttaacacagttagcaagcatgtccagatgcactaattgcgacatgatattcaggatttgcatctaggtacatacataatgtgggaatgaggacttatccaccagaaaattgttcaaatgtggcttaaggtcatgattgaaatcctaaacgtatctctgaaatgtcaggaacaggaaagagattaatgggccagggtgatagtaggtgaaacagtgaagctcttctttcatgctgctcaatgatagctcatatcattttataacaattttataataccttatggttgttggtcacttaccatatatgccaattattatgacaaatacacagcctaatttgccttttttaatctttacaacaccttcatgggacaggaaacttcttcattcactatatattacagataatgaacctgaggaaaaacaagtttcatgttttcccaagcaagttgcacaattaataataaaagaggaaactgggatttaaacctaaacaatctgtggccagagcccaagcatttaatgactgactacacatacttcacatacttcccctatagaatttcctaatgcaagaactgaccttaaatatagaagattgggtggccatttctgtggcatcattttaaaggtatattaaaaagaagagcgaggatgagtaggagaaaaggaagccaacatttatttaatacctactttgtgttcagcaatgtgctgggtgcttcttacaaatgatctcaatatatgaaagattataagtgataaccttctcgtcaaagattagtcaccctgccaggtttcaccattagaaatcatgagagtgaactttcacaatactttacttatccatcatgttcaacttaatttgagagtgtttctcagattctctcctgagtagactttaatagtgataagtgggtagcaatcacaagtacactaaaacctgaaaatgtggaagaagaaaagaaatagtcactcctatcgggaagaaaagctcgttaaaaaaagacaaggtctcttcagcttcatatatgtagtctggttgtgcttataagtttatctaagctagaagggtaagaacagccacagctcttcaacagtgggccacagtgattacctaggatgtaaacacacattacagtcttacaaagatgtttcaggacttgaaagaggtgtcctgggacatgactaggccagattctagtttacttttactgcttccaaaataatgtttggtctgacaattctgtttataaacacacacgcacaccaacttctatttacatacattcataacccctcttccctacaacctccttggaggcacgaattgcatcttatgttttcctttgaattcaccccttattttgtaatacagtatatacactcaaacaaccgttttctcttggggttactgacctaataattgaatgtcattctaaaggggatatttgaagatgctcaaaagatgaatgtttactattaatttttcaccaagcaagagcttgggtgctaaagcagatgtacagaataaggcagtatctccatccttcaaaatttagaatccactgatggacatcaacattctctgaacatgacagagtatagtggaaatagcttgtgctaaagcaataaagaactaggttttcaatcctggcaccacacttagctctgtgaccttaagtaagctacttaacttttctgtcttttgtttccttgcctgaaaatgaggttaaatacactcaccttggtcaggtgccatggctcatgcctgtaatcccagaactttgagaagctgaggcaggaggattgcttgagctcaggagtttgagatcagcctgggcaacacagtaagaccttgtctctacaaaaaaataaaaaaaatagccaggtgtggtggtgcatgcttctgatctcagctacttgggaggctgaggcaggtggatggcttgagcctgggagatcgaggctgcagtgagctgtgatcatgccactgcactccagtttaggtgacagagtaagaccttatctcaaaaaaaaaaaaaaaatcacctcataggattgttgaacagattaagttagggtctctctacctcagtactactgacatttgggtgtggataattctttgatgtgggggttgcccttgtactgtggaatgttcagcagtatctctagcttctattcactggatgctcgtaggaccacatacatcctaggttgtgacagatagatctggagatccaggactatctccagagattgccaaatatgttggggagagaggtacaaagttgtccccagttaagaaccactggatgaaataaattaaatgtgatacatatatcagacgtaaagcacttagaacccaataaacacttaataaatattagaaattatcattacataccactggttataaattagaaatttgtataggattgcaaaatggaatgctacagaaaactgaactctctaaaagctatcagaattctcaggaacattggaatttctcattccttaagaaatttttggtatttgaactaaatgtaaaggggtaaatcaagtactcttgcaattgtaaaatcatttttatttagaggcaaacttctatttttctatggtgaaaatgtccctttgcattgaaataacattttaaagctctgttgtttggttgctctaattttcagctcatcaacagtggtgtatttgtaactgtgtccagatggaatttggcaccctgatgggtcttccgtagcttaaaggtagtttctcattaaggaagtcttaaagatcttcaagctgtacaaaacgggagcttattaatgctgctaatgaactgaaataattatgaacaacatcaaaaatatcactttgtcataaatgtaaaagctaccaaatcctgtaagattttctaaagctaccattcatgaaatgttttatggtttttatgggttctcttctcattttcctgctgaagcttttctagaaacaagggaattcataacacagattaaattttcattggtgatatcatgctaaaggccagatgccacctatagaattagatattataaatttgaattctaaaaagaaaagtagtgatcttttttctgagatgagttctgtggtaatttacatgctacatagaagagttatatttagaaaggcaggggtgcacagtaagtagaacagtgaattatttatttataactgtttccctctaaatagataattagtaatcaaaacagtaaaacagggcatttgaaataataagagagacatgatagaaaaattttattgcacatgggcactaacagcaattctgaaagtcttggctgtcaaagcccagtccattgtattattctcataatctgatatctgagaaaaggcaatatgtaagttcacctggaaagaaaaaccatcttccctccaccccattcatggaagagtttgctgtttagagacttatatcactgagtggtatcatggacagtattttcagctataattttctcaaaaacatttattttatggtcatttcttataccagtctatgatcaaaaaccaaggacgggacatgaagtcacttaaagaaggcttgttgacctggaaaactaaaattcaagaattcacaggtttagggactcctttctgatttgctttaacttccactatatagaaagagtctatgaaatctcattgttttagggtcatttattgatcttcaagttcaatgtgattggtgaaactacagtgattaatctgtatggtcaaaaggacagccaattcccagttcagtgactatggctcactggcctccacagcctgcatccttgtgtctgagacagtgactggcatctcctcgcttcaaaggctgttgagaggcaacactgatgaagtgatggcaaaatactttggaactcttatttacatgtgcaaaaattatatttaaagacatgtatgaaaattgcctaagtactttctagaacaaagtatatcatgctaatgaagcaaaatcaaattgataaatttgtatcatgtttttcacccaaaaaaattaacttacaaagttttacctaaaaatataatttttcaaaaaaagcaaattaagtttagtatggtaccgtctttgtaagaaaaaaatgtctgttatgtatacttgtttgttgtttaaattacattatgtgcctcaggaaagaccctataaagttagtacattttattattaacatcccaatttacaaatgaagaaactgaggtacagaaggtcaaatgccatgcccaaattcaagaaagagtgccagaatctgaacaaacccagttgtctggctccagagctgagtagttaatcactgtgatctctgtgtaactagaccacatagaactcttttgtttatttaattaagagaaggtgccttatataatttatgttcttgcttctctgtttaggtgaaaacaaggacttatcacaaactagacttgtatttttttcttcatttcttctgaatttattgaatggaccctcttcattagaggaatgaaaagtatgcaggtgtctaggaggagaagaaagaagaacaagctcttttctgtggcttgacaaagactacttctatttcttttgagattcagtgtagttagaatctgtttggtgtgttgagatgaccccaaatgaagtatgcaaacagaaataccaaagatcccaaggagaacacattacatcataagagagaagtttaatgccaacacctactatgtggtgggagatgggttcttgtttctgcagctgaaactggaagcttgtctttactcacccatccttaggtgctaggtgggctttggaaactactatagcaactttggaagtccaagaataaagtattcctggctgatattaaggctgggagaatgagtttcatcttccaggaactgctgtgacctgtgcagggatctgttccaacagggtgataatagtagcaatagactgggatgcatctgactctgtgggaggacctattttcatcagtgacacaatgctgtggtgacagaggctcttgcagcagaaaatggggtggggcatgtgacaatggactagtcagatccttcatattctcctttttctagtgtttagaaacagaaattacctctttgaaccaagaaaacttggagttcttggacaattaggggtagaaaaagttctttagaaaaagtttctgggcttcttgctaacttcaatgttttaaacatttaaagttaagaagagatgtgaccttatttgtactccaaaaactgggtaaaaggagacctacaggtcacatatacatgtttgcataagcattgaaaaaagcctggaaggatgtatgtcataattatgtcaaaaatttataaactttttaaatatttatgtttcaaaataaagaattgcatcttggaaagtaaagtgactttctgattccattccacaaatgtttttggaaagcttatagtgttccatctctgtgccaggcagtggacatagtaaacaagacaggattctgctacaacttccaacgagcttcttagatctaaattttactacaactctgacaaagcaaagcattacttctctgagcccaaagaaaattaccagcatcattgtctcttgtatttattctgactttcctcagtcctgcaaaatctacagtaactccctagtctccttcgatttcccttttttgtacttacccaggcctacatttttcccccattcctgttttaagactgaaaacaaaatcttctcaagagtcattatagttacaaagatgccctgttgggaatagaagacaaacactttcttcatgtaactttcaatgttaattagatccctctactgttcattagcagttaatattcttataaatcttttaagttgtattatcttgcataagtgccaaagttccactgcactttactttttacatgttaagagcattaattttggctgggcgcagtggctcacgcctgtaatcccagcactttgggaggccgaggcaggtggatcacctgaggtcaggagttcgaaaccagcctggccaacatggtgaaacctcgtctctactaaaaatacaaaaattagctgggtgtggtggcgggcgcctgtaatcccagctactcaggaggctgaggcaggagaatcgcttgaacctgggaggcagaggttgcagtgagccaagatcacgccattgcactccagcctgggcaacaggagcaaaactccatctaaaaaaaaaagcattaattttttaaatgcaaatttaaaatctaaaaattttaaatttttaacactcattttggcttttttttccttaacaaaaggtactaggaaactaaaaaatgaaagtgcctcactcagttctgtttctctaagaggaaactcaaactcccactcaaactccctactcatctcaaaggccaggctaagacatgtgaggtataagagcaggttcttaagcccctgtcaatgcagattccttacccaaagcaaagcaggaacttcacttctcatgcccctcatgtcagacgacctgcatgccctcaacactaatggggaacagaaacctttatcctttctgcacctgcctcgtgcttggcactgtgggaaccccagcgactgaaagctccctggacaacagccaagccgtggtggaacacccagtcccatgctgcaggctcatcgccagccaccaagccagccattggctgtgattgcactgctatgttttcaagacccagtatggtcatgattctaattgtctttaggaattctttttgttaattacttatccaataacaaagcaaatgcctcttggaattatttactgctctaaaatggggtgggggaaaaacctatttgattattacattctatcctacttgccttgaagaaagtaaagatgaaaaaaaagttgatgtgaaataaacatctgggaaaaactatatacttgtatccgatcacctaaatgtgttctcatacaaacaacaatgaatttgaggcttgtaacactttggataattcaagaaagatggactatttcctgtaatctgtttctataatcactcattattaaatttaagacatactttcctttagctctgtaggtaaacataccttagatcatctcattttaaaatatattttctatcagacagcaccacatagggctttagaactcttccactgagtgtgatctaaggtttcatcatttataaaatggtgggaagaacagcttccattacacagggctgtagtgggaattaaatgagttaatataaaagaaaaaaatttagcgcactgattgacataggataagtgctcaataaattgtgtgtgtatcaaattttacatcctcacattaatgattcactgaatattgaactgactcttccatgatttttctcatgaaataatagaatgtgtatcatataattcattatgattttttaaaatgattatcttctcaaccagttttattgtgcttatttactccattccaaaataaaggaatataaaactcaacaataagaaaacaatcagccgggcatagtggctcacgcctatcctacttgcaatcctagcctgtaatcctagctttgggaggccaagacaggcagatcatctatggtcaggagtttaagaccagcctgaccgacatggtgaaacctcgtctccaccaaaaatacaaaaaaattagccaggtgtggtggcgggcgcctgtagtcccagctactcgggaggctgaggtacgaaaatcacttgaacccggaaggcagagcttgcagtgagccgagatggcgccactgcactccagcctggctaaagagcgagactccgtctcaaaagaaaaaaagaaaaagaaaaagaaaacaatcaacccagtttaaaaaaagtaagcaaaacatccgaacagacacatactaaagaagatatacaaatgggaaacaaacatatgaaaagaaatccaccatcatttgtcattagagtattacaaattaaaacgacaatgagataccatcactcaccttttagaatggctaaaatccaaaaaactgacaatactggatcactggcaggagttgctggtggcacaatggtacagccactttaaaatacagtttggcagtttcttgcaaagctaaatatagtcttactatactatctagcagtcatgttccaaggtatattgatatacttcaatcagcgaatggataaacaaactgtggtacatttctatgatagaatactacccagcagtaaaaagtaatgaactacaagccacataaggacatggatgaatgttaaatgcatattgctaacaaaataagccagggtgaaaagtctacatattgtatgatttcaattatatgcattctggaagagacacagctccacgataaacagatcagtggttgccaggagtttgggaaaggaggggaagggttgaataggcaaaggacaagggatatttttagggcagtgaaacgattctgtatgacattgtaatgatgggtacatgacactttgtatttgtcaaaacctatagaactttacagcacaaagaataaaccttgatgtatatgaatttaaaaaataataatttaggagattggagaggagggaaccctaaaatggaatgcagactgcaaaaaaagaatctgtgttactaacatatgaaacaacttcactaggaggagtatgagtgaaatgttctggactaagcaactttgaaaatgagtagagtcagtaaaactaaagatagaagaacttacataagcaccactctagttgacaaagttgtatcccacagggctatatgtaataattctgaagccactgtatacataaactggaaatgagaaattaggtaagcagatagtaggtggtggaagacagatttttcacggtttgaaataggaagttacagataagcaagaggaagaggctagaataatctatacagtaattgattagaattgaagacaccatatgaactcatatttagcttaataaagatacagatgttacatatcgaaataatcatagatgtatgtgtacacataggttaatatacacacatatatttctttgctctgtcagctgagaaagaacctaaaaataacaacatctcaatagcaaccaccataccacagtgcccagaccttagtttctaacaccattctccagtaaaaggaacactgactttagttagtactaatgtatcaatattggttcactaattgtgacaaatgtaacatactaatttaagatgttaatagtaagagaaactgggagggggttgtacagaacctctttgtagtatcgtcataatttttctgtaaatttttattttaaaaaaagtttttttatttactgacatttggcacattttctatgcaataacaagttactaacaatttaaacctttaacaattttaatacttaatatctcaagcccagtgagatccctttatgtcattttagcactatcaaaattaatactcttcatattttttttcaattagatatttctcttgcaagggtgaccatgagatc

SEQ ID NO: 815177 - DNA, 176083 bp, Mus musculus
tcatctactggatcagtaactacaacacagaatgattgcttagttgttcttgctgcattacttaaaatgagttaaaaacaaacaatcaaatgaacaccccagaagacattatttctgtctccatttctgtggaagttctatatgaataccaaatgtgtgtgtgtgtgtgtgtgttttcatgagtgtttataaacagatttgtcagactagctgtactgttggcatcagaaaacatgcccaactgatctgactatgtaacaaggcccctcttgccttaaaacagcttcgtaagactgggatatgtatttgcactgagggatccccggggcaaggtatggaaaagctgtgactgcccctacctcctacttttaataagtttttaagcatagccatcctgtccatgtgaaactaatgaggtctgctttctctctttaggaattttgtcttcctatgaagaaactttttcatccttctacttgcctagatttcagtatatccacgattgctacccatttatgataaagatccttcaggaaagattctgatacactcaaattaagttgaacgtgatggatcagagtgagatgtagtataagtacactcttctgatctctaatggggagcacctgagccactttctagcaggtcaagaagcatgtgacaggaagcttaggtcatttgtggaaagcacctggcacactgctggcacattttaagaggtgccaagtagacatgggctacttttgtcctcctttctttcttttcatcaacctttcccacttcattccttcctctttttctctttcagtcctctcagtatactttcaaaagtatgacatgagagtgaatattactcatctatactaaagaacagctctccctaaaataccagtcaaccctgcagatgaatgtgcaactattaagtgctagggcagacaaaggctgcttagctccacattgcattctgctctttcattattactgactgatcacactgtggctaggactgagagtgtgggacaagctactcaatgctctgccctgaaaagcatcccaagccacctgtgttattaccaatctgccaagcaacttaatttgaaaattaataaaccattatttctcaagttcttcctctgcagtatgtgatattagttagctttacatgagcatgtcataaggattaaaagaggcaaactacactgtaatttactcaagacatatggtaaatatctaatgaatggaagttattataatattatatgatgatatgactggtatttgaatatcttaaagagaaaaatcagcatatcttggaatcaccctttttgtttatcctaatctgttggtttcttttgaggttctcatttagagcttcagtcagaatcttacctatatctgaatgtatttcctgatatattttcacatttgtatcaggcatgtatatagatataaattctgtatatcatttcttaattatttcacttggacttgtctaatttgctgaaatctgtccaaacaagtttggactgtgatgttttacgataaaaatctagggtggatatatactcttagaacggattatactgcttacagaacatttatcaaagatatataacccttgtggcttcttggtctgtaggtttctgcttttccatcttattgaacagctgtgtaagttttgacttcatgagactaatacgaggagaaaggggttgtgagagaataggaatgcatggtgggagatttgattagaagtaatctttcacactgatggggctgaaggtttgggaccacatctgagtttgaatccactaatgtgaacatgtacttcaatgcttcattacctagaaatggcataataggcatagtagtataggcacagttattgagtgaatggttcctggaaactgcaaggacttttcactgtccttgctagaggaagcagcgtgagatcccctgcagtcgtgcagcttggccagtttgatgggctctgaaacttaattcttcagttagtgtcacgtgatggtgaaaacaaggaagaactgataacaaatttgtttcagaatctgtgtatcatatgtgatgggtcacactagcatttacaaacaaaggtgagggtggggaaaggataaatcaagttcagtcacagggatgtgaaaagtcaaccgtgagaaccaagtttcaatcttgtcatactggagagagaaaaacacacaaggagagtacttgaaaatgataagtcagaagacatagaaactttcctgtagtgtctatctgtaacaacttcatctttgtgttattttttctttttaaatcaaatttggctactaaaaattaaatgtctttacagctatttcaaggtaaggaaaaagctggtgtagatacaggaactagagctataaagcctcttggccacaagattcattaatttaaatttattttcttatcttagaagtattatgaactatatattttacttgtgtcataatttgatgcccacaagtcaaaaattagataattcacaagtaaatacccttgcttttttttgtttgttttggtttttcaattttgtattagatattttcttcatttacatttcaaatgctacggtctggcaagaatcaggcctcaaaactttcaaactctaattttggaacagtcagccctaaatgggatatctctatcaaatctatcaaacagtcagccctaaatgggatctatcaaatccctgccttcgggggtcagggaacccttcagaagaggcagaaagagtctaaaccagagaagatggagaaaatcatgaagacaaggccctctaaatcaacatggtcatagcccatatgaatgtagacactgaggaagcatgcatggagccgttatgacaccagatcctttgtgtgtatattatagtttccagtttagcattatttgtgggattactgagtgttcgaacaagtcactctctttcttatgcccctgtttcttatgggctctgtttcttttctctctctctctctctctctctctctctctctctctctctctctcttttttaattaggtattttcctcatttacatttccaatgctatcccaaaagtcccccatcccctccctcccatcccctccccccctcccactttttggccctggcgttcccctgtactggggcatataaagtttgcaagtccaatgggcctctctttccagtgatggccgactaggccatcttttgatacatatgcagctagagtcaagagctccggggtactggttagttcatattgttgttccacctatagggttgcagatccctttagctccttgggtattgtctctagctcctccattgggctctgtttcttatgggctcctttctgattgttttgtccaagtctaatgtgtttttaacttttattttattttattttattattatcctttagaagcctgtttgtttcctaatgatggatagaaagggagcgatccagatgacactggagatgggaaggaactaagaggaatggagggagggtaaatagtaatcaggatatattatatgaaaaaaaatgctttctttatgtgtttgtttgattttggtttttcttttttttttttttttttttttttttttttttttttttttttttttttttttttttttttttttttttctttccattttttattaggtatttagcttatttacatttccaatgctataccaaaagtcccccccatacccacccacccccactcccctacccgcccactccccctttttggccctggcgttcccctgttctggggcatataaagtttgtgtgtccaatgggcctctctttccagtgatggccgactaggtcatcttttgatacatatgcagctagagtcaagagctccggggtactggttagttcataatgttgatccacctatagggttgcagatccctttagctccttgggtactttctctagctcctccattgggagccctgtgatccgtccattagctgactgtgggcatccacttctgtgtttgctaggccccggcatagtctcacaagagacagctacatctgggtcctttcgataaaatcttgctagtgtatgcaatggtgtcagcgtttggatgctgattatggggtggatccctggataaggcagtctctacatggtccaccctttaatctcagctccaaactttgtctctgtaactccttccaagggtgttttgttcccacttctaaggaggggcatagtgtctacacttcagtcttcatttttcttgagtttcatgtgtttaggaaattgtatcttatatcttgggtatcctaggttttgggctaatatccacttatcagtgagtacatattgtgtgagttcctttgtgaatgtgttacctcactcaggatgatgccctccaggtccatccatttggctaggaatttcataaattcattctttttaatagttgagtagtactccattgtgtagatgtaccacattttctgtatccattcctctgttgaggggcatctgggttctttccagcttctggctattataaataatgctgctatgaacatagtggagcatgtgtccttcttaccagttggggcatcttctggatatatgcccaagagaggtattgctggatcctccggtagtactatgtccaattttctgaggaaccgccagacggatttccagagtggttgtacaagcctgcaatcccaccaacaatggaggagtgttcctctttctccacatccacgccagcatctgctgtcacctgaatttttgatcttagacattctgactggtgtgaggtggaatcttagggttgttttgatttgcatttccctgatgattaaggatgttgaacattttttcaggtgcttctctgccattctgtattcctcaggtgagaattctttgttcagttctgagccccattttttaatggggttgtttgattttctgaagtccaccttcttgagttctttatatatgttggatattagtcccctatctgatttaggataggtaaagatcctttcccaatctgttggtggtctctttgtcttattgacggtgtcttttgccttgcagaaactttggagtttcattaggtcccatttgtcaattctcgatcttacagcacaagccattgctgttctgttcaggaatttttcccctgtgcccatatcttcaaggcttttccccactttctcctctataagtttcagtgtctctggttttatgtgaagttctttgatccatttagatttgaccttagtacaaggagataagtatggatcgattcgcattcttctacatgataacaaccagttgtgccagcaccatttgttgaaaatgctgtctttcttccactggatggttttagctcccttgtcgaagatcaagtgaccataggtgtgtgggttcatttctgggtcttcaattctattccattggtctacttgtctgtctctataccagtaccatgcagtttttaccacaattgctctgtagtaaagctttaggtccggcatggtgattccaccagaggttcttttatccttgagaagagtttttgctatcctaggttttttgttattccagatgaatttgcaaattgctccttctaattcattgaagaattgagttggaattttgatggggattgcattgaatctgtagattgcttttggcaagatagccatttttacaatattgatcctgccaatccatgagcatgggagatctttccatcttctgagatcttctttaatttctttcttcagagacttgaagtttttatcatacagatctttcacttccttagttagagtcacgccgagatattttatattatttgtgactattgagaagggtgttgtttccctaatttctttctcagcctgtttattctttgtgtagagaaaggccattgacttgtttgagttaattttatatccagctacttcaccgaagctgtttatcaggtttaggagttctctggtggaatttttagggtcacttatatatactatcatatcatctgcaaaaagtgatattttgacttcctcttttccaatttgtatccccttgatctccttttgttgtcgaattgctctggctaatacttcaagtactatgttgaaaaggtagggagaaagtgggcagccttgtctagtccctgattttagtgggattgcttccagcttctctccatttactttgatgttggctactggtttgctgtagattgcttttatcatgtttaggtatgggccttgaattcctgatctttccagaacttttatcatgaatgggtgttggatcttgtcaaatgctttttctgcatccaacgagatgatcatgtggtttttgtctttgagtttgtttatatagtggattacattgatggattttcgtatattaaaccatccctgcattcctggaataaaacctacttggtcaggatggatgattgctttaatgtgatcttggattcggttagcgagaattttattgaggatttttgcatcgatattcataagagaaattggtctgaagttctctatctttgttggatctttctgtggtttaggtatcagagtaatagtggcttcataaaatgagttgggtagagtactttctacttctatcttgtgaaaaagtttgtgcagaactggaattagatcttctttgaaggtctgatagaactctgcactaaacccgtctggtcctgggctttttttggctgggagactatttataactgcttctatttctttaggggatatgggactgtttagaaggtcaacttgatcctgattcaactttggtacctggtatctgtccagaaatttgtccatttcgtccaggttttccagttttgttgagtatagccttttgtagaaggatctgatggtgttttggatttcttcaggatctgttgttatgtctcccttttcagttctgattttgttaattaggattttgtctctgtgccctctagtgagtctagctaagggtttatctatcttgttgattttctcaaagaaccaactcctcgtttggttaattctttgaatagttcttcttgtttccacttggttgatttcacccctgagtttgattatttcctgccgtctactcctcttgggtgaatttgcttcctttttttctagagcttttagatgtgttgtcaagctgctagtatgtgctctctcccgtttcttcatggaggcactcagagctatgagtttccctcttagaaatgctttcattgtgtcccaaaggtttgggtacgttgtggcttcattttcattaaactctaaaaagtctttaatttctttctttattccttccttgaccaaggtatcattgagaagagtgttgttcagtttccacgtgagtgttggctttctgttattttttttgttattgaagatcagccttagtgcatggtgatctgataggatacatgggacaatttcaatatttttgaatctgttgaggcctgttttgtggcctattatgtggtcaattttggagaaggtaccatgaggtgctgagaagaaggtatatcctttggttttaggataaaatgttctgtagatatctgtcagatccatttgtttcatcacttctgttagtttcagtgtgtccctgtttagtttctgtttccatgatctgtccattggtgaaagtggtgtgttgaagtctcccactattattgtgtgaggtgcaatgtgtgctttgagctttactaaagtttctttaatgaatgtggctgcccttgtatttggcgcatagatattcagaattgagagttcctcttggaggattttacctttgatgagaacaaagtgcccctccttgtcttttttgatgactttgggttggaagtcaatcttatcagatattaggatggctactccagcttgtttcttcataccatttgcttggaaaattgttttccagccttttattctgaggtagtgtctatctttttctctgagatgtgtctcctgtaaacagcaaaatgttgggtcttgtttgtgtagccagtttgttagtctatgtctttttattggggagttgagaccattgatgttaagagatattaaggaaaagtaattgttgcttcctgttatttttgttgttaaagttggcattctgttcttgtggctgtcttcttttaggtttgttgagggattaccttcttgttttttctagggcattgttcccgttcttgtattggtttttttctgttattaccctttgaagggctggattcgtggagagataatgtgagaatttggttttgtcgtggaatactttggtttctccatctatggtaattgagagtttggcagggtatagtagcctgggctggaatttgtgttcttttagtgtctgtataacatctgtccaggctcttctggctttcatagtctctggtgaaaaatctggtgtaattctgataggcttgcctttgtatgttacttgacctttttcccttaccgcttttagtattctatctttatttagtgcatttgttgttctgattattatgtgtcgggaggaatttcttttctggtccagtctatttggagttctgtaggcttcttgtatgttcataggtatctctttctttatatttgggaagttttcttcaataattttgttgaagatgtttgctggccctttaagttgaaaatcttcattctcatccactcctattatccgtaggtttggtcttctcattgtgtcctggatttcctggatattttgagttaggatctttttgcattttccattttctttgattgttgtgccgatgttctctatggaatcttctgcacctgagattctctcttccatctcttgtattctgttgctgatgctcaaatctatggttccagatttctttcctagggtttctatctccagtgttgcctcactttgagttttctttattgtttctacttccctttttaggtctagtatggttttgttcatttccatcacctgtttgtatgttttttcctctttttctgtaaggacttctacctgtttgattgtgttttcctgtttttctttaaggacttgtaactctttagcagtgttctcctgtatttctttaagtgatttattaaagtccttcttgatgtcctctaccatcatcatgagatatgcttttaaatctaggtctaggttttcgggtgtgttggggtgccctggactgggcgaagtgggagtactgggttctgatgatggtgagtggtcttggttcctgttagtaggattcctccgtttacctttcgccatctggtaatctctggagttagtagttatagttgactctgtttagagattgttcttctggtgattctgttaccgtctctcagcagacctgggagacagattctctcctctgagtttcagtgctcagagcactctctgctggcaagctctcttatagggaaggtgcgcagatatcttgtatttggacctcctcctggccgaagaagaaggcccaaaacaggacctttctcagacactgtgttgctttggcagttcccagaagctgtcagcttctgtggtgcagactctcacctgtgcagactaaaatcctaagttccagggagtcctggaaccaagatggtgaccgctgctcctgaggccgaggccgtctcccgagccaggcggacacctgtcctctggtccggatggtggccggttatctgcggcccgcccaggctgctgcctcagcggctctgtgcttctgcccgttccagaagctgtccggttctctggcacaccctctaacctgttcagactaatttcctaaattctgctgagtcccggaaccaagatggcgaccgctgctgctgaggctgaggtcgcctcccaagccaggcggacacctgtcctctggtccggatggtggccggttatctgcggcccgccccggctgctgcctcagcggctctgtgcttccgcccgtcccagaagctgtccggttctctggtgcaccctctaacctgttcagactaatttcctaggtcccgcggagtcccggaacccagatggcgaccgctgctgctgaggctgaggtcgcctcccaagccaggcggacacctgtcctctggtccggatggtggccggttgtctgcggcccgcccaggctgctgcctcagcggctctgtgcttctgcccgtcccagaagctgtcaggttctctggcgcaccctctaacctgttcagactaatttcctaagttctgctgagtcccggaaccaagatggcgacagattttggtttttcaagacgtagtttctttgtgttgccatggttgtcctggaatttgctctgtagaccagactggcctcgaactcagagatctgcttgcctatgactcctgagtgttgagttctgggattgaaaatgtgcgtcaccactgccgggatagaaagaacgttcaattttcaataaagaaaaaaaaaattcaactctattttaacttgctttggcaaaacagggtttagatatttaagtgttgactctttacaacccagcagggttttgtgttggacacacatttctcacaccaaaaaccttggaaggaaggtgcacagcttgggaaacttccaaagcctccagggagctaaagactcaggtttttctctctgtgagcttgagtgactaggacacttttgcttcagtgactcagaggcccttttagtgtctcagtcaagatattttgcttagcagactagggaaaggaaaggagggtcatttagtttagactgtccacctgttgttttttagcacacacacatgaaataccacactgcacactgagcagggcccggaggtaaagggccctctttgctctctttgtccttgaggactttggctgtaattatgacacagcagggcattgtgacatatatgtacgacacacatgtacctcataagggaaagtagtagcttccctttccttggtaggacctttgctgtaattatgacatatcagggaattgtgacatatgtgtatgacacacatatacctcataggtatttgtgccactatggctactctagagccttcagtcaacagagcttaggtcttgtccagctcttgaagggcttactgaggtggacacctcagagtactgtggaacttgctgcttcctgagtgttctttgatacaaaagagccacattttcatctccttttcaaaatggatcttgaaaagttatctgtaactaagccaggagctaaggagacaggagaaagagggagtgaaagagaagaaaaacgaggagagaggagtgaaagggaaagaggaaggggaagaaaagaggaagaaagagaggaaagaggagagcgaaatgaaggagaaagagatgaaggtggaggaggaagaggaagagatgaagaggaaagagatgaaggcaggggaggaatgggaagaaaagagagaggaacagacgggggagaaagagataaaggagaaagaggagaagaggaagggggagaggacgagggagagggaaagggagaaggaagagaaaggttccaggaagccaaggagatcagtgagtggtctttatttccacgaaaaaagggttctaagtcccgcagattggccacggtttacccgggcccagggtcgggcccgcagtctgagccggtgttgctgtggctgcctgaaggtaggcacgcggggggatctggagggcgggcgctaaggccgagggccagggaaaaggtggcgccggcgggcgggcgggcgggcgcggggcgcgctggaggaaggagcgcaaggagcgcgcggggcgggcgcgggcgcggggcgtggagagcagcgactgtgaggctgggctaggcagcgctggctttaacctgggcggcggaggcgtggggaagaaggctgaggaaggggaggtgtgtgggacccgagtgggtggggggaattggaagcaaatgacatcacctcaggtctgagtaaaagggacgagccaaaagcattgacctggtcctggatatccagatgtcgagtccaacctgaatttagccgaacacagacctcattgcctcacggagacatcatgcagaagtcgcctttggagaaagccagctttatctccaaactcttcttcaggtgagagggtactcagcggatctttgcacggacacatgtgcctatgcaggagaagggaatgaatatgggcagactttgggaaaacaggaagagatttttgttgtgtttgttttgttttaaaaggtgtgttgtcattcagtgctttaaaggaaataagcatttttgtacaataaaatgaagctgattgaatagagaacaaaatatacttgcaactgtgaatcagacttgcaacagccaaatatgctacggagcaatagatatatatttttttaatttcctgaaaaaagttatacttcataagtgtacttaatagaacattcctaagattggtctgttattttctccaagaaaagctgaccgcaagtgcagtgcctgtgtaataggtgctctgaaaacatttgttgactgaatttttttaaaagtccaggaattatattgtatttactttttgccgttgtaatattgagtaagtctaacatgctcatcacagttacattattctttttaaaaatgagcaagtcagttaaaatatctaactttaaaaagaaataatataagcaatgcattaaaaaagtgagttaccatggggatatgaaactagagttttagccactgaagctatattcaattgacaattaggacattgttctcttatcctacattgtcaaaaaaccaaaccctcaatctaataggatttttaaattagaatttaagttggaagacctaggcaagaattaagcgctttgtatttgaagtgctccgtggagcttcgtctgctctgatcctgtagtgtgaatgaatgaaaagagcagcgctcatgggtcctcagctgactcacccccccccccccacacacacaccaatgagtcagcacactgaagtatcataagtgtcgaatatgttctcaacctgccctatgctgtgggtagggggcaaggctcagccttagtcttcctgatgttcctttttcagccggtctagagctcaaggctgaggaaagacaagtgcttctgcaggagagctccccccggtggttgggagagaaggaagggctttcttctttagaatgaatatttgtggtgccttttgttacttcatctataaatctagcttatcggtctggatctattttcttattacttacaaaatcagaatgtcacttgacatacatgtgaggcttttatgaaagcctattgaggaacctaaatgtcaatgtgtctgtaaaggcaagttttcaggagaatgaatatctcttgtgtggttttcccactaagtagtaagaaacttcaaaatttttcacttatcaaagtgtttcaaaaatttcccgtttttataacccacctaataaattgtagtgtgctttacaaatgttcttaggctgatttggaaaggaaatgtattataatggctgtgaaatttgttaagaacatactcatttctgccctccaaatgatttcataatcagttgctttaagaataggtgtgtttttaagagtttagttcctactatttataggaactgacatttagctaagtactagtcagtgattataaacttccttctggactttaattttcaaagagtaaaacccttttctccactggactaggcagtgccgcctagtgaccagggcagtgggccctggattcccatggcctggactcaggctgcagatctactgcttagtaggcaagccctttggtgtctctgcatgacttcagtgctacaacttggagtctgtcagtgtgacacataatgtaatgggttagtctgttgaggaatatatgctgtgctttgaggacatgttagctgcccttactgttgtttacatgtttacattcctcgaagtgctgggatcctcactgtaaaggacagtgagtttatttctgctgggtgcacttttgtgactatagcctgtatctatgccatttgcttgagaagttagcataggggatagatagcctcacgtagcatgggcttgttagatacttagatgaaagccatgctcttacatcagatctccttcagtgccttagaatttaacctatcccatcaagcttagggttataaaagactcctaaaagctgacttctatgtgtctactattatggtcttggttttggattatattaattaacattttaattatttagattatgttactgagaaaccaaaacaagtttaataataatttaagtactttttatttttttaagttttcagtaagtaaaaaaatggaaagacattggaattggtctaacacagaagataattttaccatgaaaatttcaagtaattttttttactttcatggaaaataaatgcattaacttgaaggtgtaatgataacatttatgaaataagttgtttcaaaacaagtggtgatatatttatacagaatttatgattgacatattagtggaattaattcctaaaaacctttgatttgtagaaatgtttgaactttacactttcatagagatttaagaaaaaagattatgcctaacgtgtacctgttagtgtgtgtgtgtgtgtgtatgtgcgcgtatgcatgtttgtatgaccatagagtgcagtataagctatcatctcttgagtcatgtctctcattggcctgaatctcaccagttatgttagacagacttgccagtgaacccaagggctttccctgactctaccttctcagcactgggattacaatcttgtgtcactctgcccgccttttcacctaggagcttgggattgagctcggttcttcattcatgtgaagttcttctctgactgggttatgaacagtcccaagaaattgggtagcaacatttccattctgtttgtgatccatattacagagattatacttgacaaaacttaaggttatccaaatctgaaggccacttttgatatactgaggatatggtatttagaaaaccaagaattgctgtcccttcagttgatggatgtcatacagtggccacagctccagatttcatttggcttttctttaatagaaatgggaagaagccacatctaggatggagagaccctctgtttggacagtgtacaagcactgcccgatactggctctgtgccagcaacttaggactcccttctgtttattttcttttcactgataatgtttggttgttacacagctcagaaatttcaacttgggatttatgttaggttcatgtcagttttgtttagtttaatcaacagttctaagagcacctcttgtacaggacatgatgaaatcatgattttgtgtatgtgcatatatatgtgtataataaatatctctatacagtgaaatttattttagttgatatcacaattattaaaatttattttaaggttttatagcacattactacacaatatattttgatagtcaattcctcagagcagaggaagctattatcttaaaaataacttcttcaacattttgtttgatatacgatgaaatactactcagtgcacactgatatacaagggaaatcaaggctttttgttttctttatggaagtttgacttaactgtgataattcctaagtgttaaaacatgtttaagaggtccacaaataaatatcaccataaagtatgttattactgttaatgccctttcataggaacctgtaatttcactgcggtagcactatagataagtataggattgccaaaccataagggaagggcggtaaccatttagcatgcagtgagatattatttgttgagactttaaaaacacatctgagtcagcagagtttgggccgttttgatttgctcttcaccatgcatcttgtgcatttcctcagagccaagtctgcaaagcagtgagtataagaggcgaaaactatgaaagaggtccacttatttggagatactaacagagggatttcataaatacatttttcatcatcagtaagggaaacattttaatggcttcccttcagctcttaagaatggaatggatgcaccatgtagggttttctttgtaaaatcagcattacaaagtggcctcttcatggacttgattgtcagagaacttaggcttttagcaagaatactctagtagttcagatgaggcttgtcaaaatgtcaatttcagtataagccattaattatcttttgacattaatgactatttgaaattgtaaactacttttgtgtttagtattcacatcatttcatgactccaggattacatgattataatacctgtttcttgttgaaattgtctcacaatgctaaacatcatctatatgcagtatacatacatactctaccctcaaaataatgggacaatcattttgatacaatgggtgaggggaaacaactgttgacacattttttaatagagtaagtattccttcacattttccttgtgatgtttatcatataaactcttcagaaggcagtctactttatgactccttgttctagggcagtagttctcaacctgtgtgtttcaagggttaaatgacccttacacatgtgttgcatataagctatcctacatatcagctcttcaccatacaatgaataacaatagaagaattagactcatgaagtagcaacaaaaattatcttataatttggattcaccataacatgagaaactgtattaaagagttccagcaatagaaaggttgaggaccactgcgctagggtaagggaatggtttggagatttttgaagtctttagcattgttagacttcttagcttggaagatattctcttgatatcataagattagctgtcctccccacccaagtcaaaggggtatttccccagtatttcctgtaggtcatgatgactcagagcaatgtttggagggcaatttcattcactcccttttcaccaccaccgtactccatgcttggcattaaggtggtagaggcgctgccctctgaatgaatgaataccttaaaactgatgatctcaagccacagagatccctatcccatactcatggctgtctagcaaggtttgatagagaagtgttgtataggaactgcaagaacaagtgagagaacagcagtggttcagagaaggtctggagtctgtcctgaaagcatgtgacagaacttgggaggtagatctggaaactagcaagggctagacccctgggtaccttatatatttcttagggctttattgcactgctcatgaaatgaaaggtgggaaattttaagcaggcagagatgtgattatttcaagattgttggcgtttttttttttgtttttttgtttttttgttttttttaaagactgacagaagggatagagaaagatgcctgaaagatgtttgggaagcaaaataatcatatttttaaattagaggtggaaggtgagagtgaggaaaaaataagagggcttggatgggtcagtttgggtggtagaatggtaggtgatacatactatgaagtggggtccttctattagaggcagaggcctggtgtgaggttagatgcctatgcaagactgcagtctctaaaagaaagtgcaactggcttgaggtgggttatacagtttgaatgaattctttgtcttgtcaatactgtttttcaacaaataataattagtcagaactaatattttatttggtagtgctaggcaccaaacccagacccatgtctatattaaagcattctcctactaaactgcaccccagccccaagtaattacttcttagcagagaaattcctagcacttagttcagacagatttgccaactaacatttgcttttctactccattacacctgacatttaatagtcactgttttctttacataaaaatattggtctctccctctctctgtctctctgtctctctgtctctgtctctgtctgtctgtctgtctctctctctctttctctttctctctctctctctctctcacacacacacacacaattaaaagccatcatggatcagtgtcagtgatcgagtaagacattaggtattcccataattcagtgcatcaagtacataattacaatgagacctaaaaaattattcactcttttaagagtttatagacctgttgaatttaagagtccgagatagcaatcccaatagcagggccaaggatttttgcaacagaatttgatgaaccagataggcactataagatgagttcattatggtgaggataataaccttgaaatataaatgtgactttttagtgatgtgttaattatttatttatgcaagcctgtgtatgcgcatttatttatcattactagtgagcctctatacttaccaggtttctaacagttaacagtcttagactctatataagaatttattaaaaattctgtttattctgcctaaagtttcattgtattatttttaataacgcaacctttttttctttgtaataagatggctatcacattcatttataggttctgtaattatattacttagtttaattagactaggcattaattttgattcataaaatcattgactgtttaaagtagttgatatataataaaatattacagttaaaaatggactttcttgaaaacaaaaattattgaatatttaaaaaaattaatgaaatctttcacctgtgttgttagcaaaatgtaacttcatttagaaatgtgtaatgtgttagtagtcctttactcagccggcccatggattccctggagtatgaaactgctgacttgttggcacaggtgtcatcggagccttgagagccaggtgctttgctgccacagaaggggagcagaagcagtctcttgtggttcactctccttttgtcaccattgtgaccactgcttctgcagagtgacatcagacacagtccagtggatttacaactcattagtaaagcagtatgtcagggctctgcacttaatggaaacttgttcagggttagtggtgtggtaagatggaacccagctgtaagttgtaatattttattatgtatcaactactttacatagtcagtgattttataaatcaaaattaaaacaggatgaggagattcttgaaattagaaccttctacttcacaaacaacagccatttctatagcttttctttactctgacaaatactaagtatctatataggttctctgtggaatatagcacacacataaaatggaaaatatattaaatatgccaagtcctagatcccatgtgtacctgttaattaaatttatgggaaagaacaacttctatgatctcctttaacaaatgctaaggtaattcttctttttgctaacatctaaaatcatcaactcaacgataaaacaggtttggataacccaacaggtcttcattgggctaacatcctcctcctcctcctcctccccctcttcctcctcctcctcctcttcagtaaattaacaataaagacacaaaaataggtcaactcggaattctgtagttttgcctctatcttccagcccttattaagtacactcaagagattacatacattatctcagtgaagtttttaatctgtctttgataattgcacatataagaaatgtggttttaggggactgcagtttagcagccaccaagctaagagatgtgatgtcagatgtatctttagattggtgtaaatccagacataaaattttaatcaatacatcacacacctagaatagaattgatcaattatttcacatggctttatatatactttaatgttttttcttgggtctgaaataattttttactgcatttgtttatagacaacattaaacaggccatcagttagtcttcttggaagggcttgttgctttaacaacaacaaagaattactttattttatgtgtacagtagtttttccagcttgtttgtttgtgcacattctgccagtggaagccagaagagggtgctgaatagactggagttgcaggtagtggagagacatctgaagatgctgaaaactgaggtgagggcctctggaagagcagctcttaagcccatctcttctctgagccatctcttcagcccatttattcagtctgtttcttagcataggtctttatgacatccacaggaggcaggatggaactttcctaaaaataacaatatccttatagtttactttcagtattatttgaaaacaaaacaaaacaaaacaataaaaacagacaatatagcaggccagaaaacgtggcagtagctaaacattgtcacagtaacagctcagttacagtgagtgtgattccagctgtgcttcctgtcctgaataaggtagctaagtactaggcagtgccttttactcagccccactttcctactttccattttctctctaggataccaagctgggactttgagttttcacctcctaaccctacttcccttcactctctaagcacatcacagccatctttggcatctatgccagcattaccacccagtacttgttctcatcattcatgtcatctgatttttctattggtctttcttcttatccacctgctaaggttgcaggaagtggtagagacacctgatagatggttcttcaattttatacttgtcactttatatatacaaatttcagattttcttcatatggtagtatctatagttcttttagaaagtgcttttatcagtaagtcttcatggaatttaaatacttcatgaaatttctagtgtaaacatgtatgtatggcaataaaagaattgcttttccacaaacaaaaagatataaagtcccaaataaaagcaaaacatttatataatattttaagcattattttcttgattcccttttctgtgttttacacaattatatacttctgaaattgaattgtcttataattgatttttttcccaaacttctttctggccatcagatccaggaataaattattatcaacacataaaagttgcatatttcctgtatcctgtgacttcaagtgattttttttttttacttttggcattaatttcacccaacaatgttgacttttaactttgattgcttgatattccttgagaaagagtactttatgatccagttttggaagtatcaggtaatgtgtacttggatgcttgtctggcatgctaggcattgtaattacagtagacattcaccaagtttagtactctaccttaacttgaaattgtacacctgtcccagaggtgaaggggttctgaaggcagatttacactataaacctattcatagattctaaagggcaagagtgattcagaaaactaatttttacttgagtatgaaaatggcttaggctaaaactttaattatggttccaaaagtaataagtacttatataaatgattatataattttaatttctaaaaacagtatgtcatgtacattttgacagtggaagtgttggtttaatagtgaatctcataatcagtgtcaccttagaatgaacataaccactttattttaaaaacatgataatgtcacctatggtttgtcacttatcacttcctaggggttttgttgccctgggttatgctgtgatcttgtgtcaacaggtgtactgcaggcatgctaggctgttaactgagtttggctcatatgtcctatagggacatgctcacttatgcactgtagagataacagtaaatatcacagtaagtttcaatattcaccaaaaaagaaatgtccggtgaagttttcctatttgtaggactattatgggactaaaattatcatatatttaagaatatgtaattttttattccttttattcctaaaaaaaaaaaatgaaaccaactcagtcactttaaaagatatacatttcagatcaaaattttgtggggtgtgtctggagagtggcagatattaggattcaagatttcaaagacattgaaggtagattatgcttatcttgattgtgcctggcaatttttgagtcccatgcttcatctccccatgcttttagaaaagtctcacatttagcttctctgtcagttcttaggaaccagcgtgtagcggaagaaatgtgcactttggaatcaggcttagctggagtcctcattctgtgacttattaacgtgtgttcttaggcacttaatctttctgatactcaattattctcactgggataatgagttactttcatttcaacctggcctaagaatataataatattcaatattctctgagtacttactctgtatattagagttctcctgagaataagaatcaatagtaaatctatttaatatataagattatttataaagaattagcttccgtgactaagaaaactgtcaagttcaatacttgcagggttgttttcaaagtggagactgggaaagctaatattcaggtttgagttcaaaagcagtcgccaggagttcggtgtcatttggggaggctggtctttttttttgtcagactcatgttttcagtggattagggaagacagcttacattagagagcatgtagtggtgcacagacatctggcttcccttgtgatttccggaacagaattaacacaaataatagaacaatccataacaggagctcaacctgctctaacctaaatgctctcatttaatgttagtctgacctccaagtatcttatcaattgccatagccatcacccctgtgaggactttctgtgtcttcagtgataagtagtgcaagatacagaatgcctctttaataagtaaatggtaacagtcttatgaacactaaggcacttaacacctttccagtgtgtaacagactagctcgctctttcctacatctaacattcctctcctagaaagtaggcacaacatgtcactgaattataattctctttcccaaaatcccttgcccagtctacaagttttgtttaccatagactttcatcctcaattgtgtgtgtgtgtgttcattgctgggtttgaactcctgggtaaatgcagcatactaagcaaatgctctgaggcactgagttacacttccaaccctcatcttaaattttaagtttattttaagcattcaggctactctttttgctccgacatatttcctttctgtttggggcccatgtgtttgcagaggctgctatcacatagtatataaactgaatggattagacactcaaaatttatcgttatagttctaaatgctacaaggctgacatcaaggtgttagttaattgttttttcccaaggatgtgagtgagaatctattctgtgctttctggcctagcgtttgtcagcatgctggtggggatccttagcattttgagatctgtagaggtatcacctccagaggcacccttttcacagatttctccttgtatcttcagataaatgtccaaaatcaattcctttgtaaggaaaacagtcatgttgtctggaacctactaaatgtgtttactccacatgttttgagggtcataggttagagggggtgggtgggtggatgagcaccttcatagaagcagggggaggaggatgggatagggggtttccagcagggaaaccaggaaaggggctaacatttaaaatgtaaataaataatatatccaataaaaaagtaaatacatatatatccttaaaaatatggagacactacagaggacactgtaagacgggataagggaactatctagggagtagttcatgaatctttagtatatctttagtatatctgtactaaaacattaatgaagatcaaatattgagaaggtttagataatgaaaaatatttcataaaattttattcaacaaaattaaataaattcttggttgaatatttagtattgtgggccattaatgatatgtaaaatgaacatgttatctctgaccaagtacaaatcctcaatgtttatattacattcttgtagagttggtttttcttttctcctttcggtgccttgaccagaagtaatgaataagcaaaacgtccttgcaatcagtgtccttagggtgccataaacatactatgtttgtggaattaattactaacagatcaattcaccaagtttctaatttgctcagtgcaatgaacaggacaatgaacataggaagataaattatacactatgttgtccttatgaatttaatcttgtgaggaaaaataagcagagtgaaatatcttaacttttaaattcaaaaatttaaaatattaagtgagaattatgtgccatgttcagtggacagtgcagagtagacagtgcagcttaaacagagctctttatgcaatgtggtatacagtttagtgtacttggggacctgtggttgataaagggaggaatagagaaaggtggggtagggtaggacagtgtacacaggagactgattaaccagactggagagagagaggctcttcctgaccaatatcaatgcactaaaccttcttagaaatagaagtcaggctttgtttcaaggaagctgtcagtttttattcagtgtaactcagcaaaatcagagattagcttgctcagtgatggtgataggaaaatctttttaaatattaagagccaccctattatcagtgttttcatccagttgaactcctgcagagttcaaaagctggagagtctggctcaatgtttcctttaaagttcattttcttaaaacctaaatggaaacaaaagatcatgacatcttgaggaaaaaaggaaaacaaaacctttaaatagttataaaaataatttttattaatctaccatggtttgtgttaggagctatccttttaagtacctgattgctaagatggctaacttgatctcttaaattgcttattagaaacaatgaattaatcactattatttatatatgttatagtcttgaaaaaatcagcaattttaatttttgacagatcttaaaaggtttgtattaacatgcattgctatgcttaaatgaacataaaaatattaagtagagacttaaagtaaggccttggagtagttttctttcatggcaaatcctggactaatctggtcaacaactccattccctgctgaatctcaattttccaaaggaatacgtggtgagaaagggtgaggacgagcctctgttttcctctcctgcagctctggggagcttcagtgtttgttcttagtgatgccaaggtttttggacaatgcaaatagaaatacttcgcctcccaaattcaggaacaggatatgaaccttatagtccgagtcatgaactgtgcctacttacatcctcctcagcactaaaagggaaaaggcataaagatttgaaacttccatttcaatttgttgcataatagaaggtaaaaaggattaaaatgacattaataaacaaatttcatatttaactgggaggtaggaaaatatccacagatgagaagcccaaatcaaatgccacaccactcttctaatcccactggggattcacagtgggtatcagtgccttaaaagtggcatcatacttaaacaaacttggggaagaggaggttaagacaatgaggaaaatttcagactgacttatcagactagttgattgcatggagaactatggaaactatgtttaccacaaactgaagtttaaccttgtcttcctggtaccaaattacttcttctagaaaacattaacattcttattgtgtatacatggaatgtgttttgattaaatcctcctcctatctctttccctctcatatatcctcttcttcctactacttttgcctcccaacttcatgtgctcttatttatttaaatttaatacccactgaagccattcagtactgccttatatgactatatgtgcatggagaccatctactaaacatacgtatccaccctttcaggaatgggcatccctgaatactgattctcccttccccagcagctacggattcccaataacttctcagatagagctaagacttcatgagtcccttcctagtccatgctggggttttgactggcttaatcctgttactattttcatttaaaaaatgatatagatgcctctaatctctgctgtatcattttatctgccaagcaaatctatcaaatgagaaaatgatctcaaatgatgtgggcagatgcattttaaaattacatttgtgtctttgtgtgtgtgtgtgcacatatacacatgcacacacacactgctgtgtactaatgtatggaggtcagaggacaacttgtaagtcagtcctctctttctaccatatagtttctatgtgttgagcttaggtcatcaaacttgacaccaactacctcctaagccatctgctggtcctggaatatatagaagtcattttgatgtaatgaatgacaaacatctatcaaaagacaaaaagaacttctttgtacacatagtgaggagctattaaatgatttagatattgaagatcacgagaagttgtactttgtgttttatgtgccatggctcatgccagatgatatctgtaggaatctaccacctgtccagaacctcatagaagttctttgtctctaagaaataattatgttctttatacatttggggaaaaccttggagagtcaagtaggtatgcttccaaatatttagtcactgtcagaatgacagtcatggctcagtaaaggacatgcttatttccgtgataaatgaaaagtattgaatttgggtctttgtgatgccatctgataaagcaaaatgaacaaagaaccacaataaaggatacaaagttctagagaaggggagaaaacactgaaataaatcgaataattatttttaaaaaagcagcaaggaaatgcgtatctcccatataggagatgtcatgaatgccacttgtgcacagtcaagtctttcagttgcctagtcagaagccgggaggagcttatgcccatcttccactttcacacttccgtgaggatgcggtgagagtgcttctgacctctgtgttccaggagatgattcaacactgcacagagggtcagttccctgatagcacagaggtttccatctgaaagcttgcacacatgcctgtccataactcaggagcattgctacggtaaaactgcaacaccaggctgtttcctgtcttccttgttcttttggtttcaaatatatttcttattgatgatgaaaatatcgctcagtaatttgaaagccattgtttcctcagaagtctcctaaaaggaaactcgcatgtaggaaataggcagcttcatggggcaattagtactattttcttggatttggtgtaggtacagtgatatctgtagcttcacagaaaggcacttaggctgctttttcagaggacattggtacttgacagtaaatgacatcctttgtgtcttatgttacctcctaagatgagcaggattcctcccctcccttcccttcctctcccttcccctcctctcccctctgacctcccttccaacctcctctcccctcctctcccctcccctcccctcccctcccctcccctccttttccctccccccttccctcctcttcccttccctttcctatttccttttctatttttttcttgtagcgttgcttgttgtctttagattttagaaatgctcgtgtcctctcactgccaacaaacacttcttcatttctatacaatatgatatcacaatgccattttttcccctcagaattcatagtagttccaaaatctaagtttctggctttgagagaccggaaataaacaatgtataacattcatgttgcttgtcatcaaccgttaactggtcccatgagttttttacacactgtgatatcattgtcaggagccatcagaacaactgcgtatgtgaaaaggattagagtttgaaaatcaccactggaaagtttcaccagttctacaagcatatctatctcacttagaaaacccttccagcaccaacgttgatttctcaacccttcacactgcttttctaacttatagctttattgaggtagaatttacacatcaaacactttacccatttacaatatacaaaataatgaattttaagcatatttataattttgttaaatatcacaaaataaatgtaggaacctttattcatacaaagaaagaaagaaagaaagaaagaaagaaagaaagaaagaaagaaagaaagaaaactattcagctttctcatgcctatctgcagatctgtttcaagggccttgtgtacttgaagcagatagagccacctgggaagagcctacactgagaaactggcttcatcagactagcccagaagcaaggtcattggttttatttatttatttatttatttatttatttagtggtttttgtttgtttgtttgtttgattaatgattcatgtggaagaagcaagcccactgtagacaatgccattcattagtaggtgaccttacaatatataagaaaggaaatcctataagccatagagaacaaacccataaacatactcctccttaggtcctctgcttcgattcctgtctttaggttgctgtttaagttagttactgccctgacttccattcatgataaattgtgatgcacaagtgtaagcttttcttcctcaagttgcttttggtcagtgtcttaacacagtagcagagaaacaagctctatattttgcctcccacttcttgttctaggcaactgttagtctacttctgcctttatcttgttgcttcataaaaatgaaacaattcagtgttttgtgactggtcttgttcaatggttcaaaaagttgacactattattacatggttcatcacttggtttagggatatatatgttgttaagtttttacttgacagttaatgttttttaaccatttgcctgttgtaaatgatactcatatgaatatcatttgggtattagtttttatgtagatgtatgtttttatcctttggggtatatacctaagagtggaatgggtaagtcatgctgtaaatttatgcttaatattttaaatatcttactgattattttccaaaatatatacacaaatttatattcctctagcagaacacagggttacaattttccatacatttgcaacgatttgtatgtttagtttgttgttattacagcgattctaatgggtataaaatggaatctagctgtagttttgaattgcattttcctactttgtaatgaccatttcatgtgcttactggtcatttatgtaatttctattttagataaatttttatccagctcatgtaattttaaattttggtttatgtctattactgagttagaagtcttttatatatctgatattaaaaccacttagcagatatttgacttgcagaaattatatagactatacactattttctttattgtatattttaaaggataagaagttttattcattttatccattttggttattgttgtttatgcttctggtattatatttaattatgtgctactttttcaaattaattatgaaatatggcaaattagacaaataagctttgatattacatgcctatttttaaattctaacttcacattaacaaattgcttaagcatcactagatccagtttcatatctataacatggatatgtaaggtctgtgcccagagctggtccagtgccacagtgctctgtacccaaatactgtccggagagagctggtctcccaggagtgccaacacacatgtgaacacaggtaagaccaccacttttgattaaattcctggcccaaaagggtctcgcccagagccatcaggacacaggaaccaaggaacagctggggacaggatccttcagtttctgtctgtattctggagcttaccttgtgccacagctctccataaccaaattactccaggagggaactcccaggagtacagacacacaggtttgaaggagggacaagccacagtcagagacaggaaggccagctaacagcagagatatcaagatggcaagaggcaagggcaagaacataagcaacagaaaccaaggctacttggcatcatcagaaaccagttctcccaccacagctatccctggatactccaacaaaccagaaaagtaagactctgaattaaaatcatatctcatgatgatgataagcgatgttaagaaggatataaataactctgtaaagaagtacaggggaaaacaggttaacagctagaagccttaaagaggaaacacaaaaattccttaaagaattacagaaaaacacaaacaggtcaaggaattgaacaaaaccttccaggatctaaaaatggaaatagaaataataaagaaatcacaaagggagaccagcctggagatagaaaacctaggaaaaagatcaggagttagatgcaagcatcaccaacagaacacaagagacagaaaagagaatctcaggtgcagaagataccagagaaaacattgacacaacagtcaaagaaaatgcaaaatataaaaatctaacccaaaacatccaggaaatccaggacacaatgagaagaacaaacctaagaataataggtgtagaagaaagtgaagaatcccaacttaagggccagtaaatatcttcaacaaaattatagaaggaaacttccctaacctaaaggaagagatacccataagcatacaagaagcctacagaactccaaatatattagatcagaaaagaaattcctcccatcacataatagtcaaaacaccaaatgcacaaaacaaagaaagaatattaaaagcagtaagggaaaaaggtcaagtaacatatacaggctgatctatcagaattacaccagacttctcaccagagactatgaaatctagaagattctgggcagatgttatacagagcctaagagaacgcaaatgccagcccaggttactatacccaacaaaactctcatttaccatagatggagaaaccaagatattccatgacaaaaataaacttacacaatctctctccacaaatccagtactataaagggtaatagatggaaaactccaacacaaggagggaaactacaccgtagaaaaagcatgaaagtaatcttctttcaacagatccaaaagaggatccacacaatcataaaaataatataaagaataacaggaagcaacaatcactattctttagtatctcttaacatcaatggactcagtttcccaataaaaagacatagaataacagactggatacatacacagaacccagcattttgctgcatacaggaaacccacatcagagacaaagacagaaattacctcagagtaaagggctgaaaccaattttccaagcaaatggtcccaagaaacaagctggagtagccattctaatattaaataagatcaactttcagcaaatagttatcaaaaagaataaggaaggacaccccatatgcatcaaaggaaaaatcaaccaagaagatctctccattctgaacatctatgctccaaatgcaagggcacccacattcataaaagaaactttgtactacagctcaaagtactcattgcaccccacacattaatagtgggagacttcaacaacctgctctcagcaatggacagatcatgggaacagaaactaaacagagacacagtgaaactaacagaagttatgaaccaaatggatctaacagatatctatagaacatttcaccctaaaacaaaagaatatactttcttctcagcacctcgtggtactgtctccaaaactgaccatataattggtcacaaaacaggcctcaacatatacaagaagagtgaaataatcctgtgcatcctatcagattttcaacagcaacaaaaataacagaaaacccacatccaaatggaatctgaatgttctagtcaatgataacttggtcaaggaagaagtaaagaaaaaaaaattaaagactttttagagtgtaatgaaaatgaaggcacaacatacccaaacttatgggacacagtgaaagcagtgctaagagaaaaactcagcccccagtcccttttaaaagaaactggagagagcatacactagcggcttgacagcacacctgaaagctctagaacaaaaagaagcaaacacacccaagaggagtagacggcaggaaataatcaaactcagggctgaaatcaaccaagtagaaacaaaaagaactatacaaagaacaaaatcaggagctggttctttgaaaaaaaatcaacaatatagatgaactcttagccagactaaccagatgtcgcagagacagcatccaaattaacaaaatcagaaatgaaaagtgatataaaaaactgaaactgaggaaattaaaaaaaatcagatcctactacaaaagcctatattcaactatactggaaaatatggatgaaatggataattttctagagagatgctaaatacctaaattaaatcaggatcagataaaccatctaaatagtcccataacccctaaagaaatagaagcagccattaaaagtttctcaacagaaagaagcctaggaccagatgggtttagtgcagaattctatcagaccttcaaagaagacctaataacaatactcttcaaactgttccacaaaatagaaacagaaggaacactacccaattcattctatgaagccacagttatactcccttggagatggaatggtttctgtctaatcaggaaccggtcacaatttcataagactataaggacttcataagagattttttccatttttatcatatttaatgttacaaatagatttttttaagactggctgagtgcatattacttttagcttcagatgatatcgtgtatatttaagaggcattttgcaattatagattattttgatgacttaaaaatgtcaataccgagttgtaaatattaaaataaattcctacccccacagtgacacacctacttcaacaaggccatacccctagtcactgctcatctccttaattggcttatttggacaggtggctgagccttgtatttagcaattgtggagcagggacttccaccctcaatctctggcaacacatcatttcattattagaaatgagatgtcatcctataaaaaattagagttttcacaaagaaatggaatgaactaagctaaacagtcgggttaatatgtgcttgtttaaaaactaaaatactagcatttttcataataaaatctgaagcttttcatggttaagtgaacagaacagtatatcgaagatactaggttttttttttttttcctgtgaatgttagtgaactcttaaaaatacacacgagtctgctaacttatagttgattagctagtttctgttagaagtagccaaaattttggagaccactatatttttgaggaataccattttataagtccattgagtatatacatggctgggcatgaatcaagatgcataaagtcacttggatatgaggtgaagagctatcagggataatggaaagacagaaaaggagatcctcaatgcattgcctcccgttgttccaagcgaaccaccgagactcatgaaatgcctgactgactataaattccttgcctgaacattactgaatttacacaagttcactgaatataatcagaatcactgaaaagaagaatggcttgaatttcatatcattattgcaaagtgtctaaaacttgaatgcctgtcttttaattttttaatttttttttacttttgttttatatttcttagactgacctgcagttgacagagagaactcactggtaggagacatttggtttgatttattggtttaatctcaagatataaaatctttctcgaagatgactctctggtgattgcatagagctaatagattttagtttttaaaaattctttttagacttataaagtatatgatgagtgttttgcctgtatgtaaatatgtgtactgcacatgcgcttggagccctcagaggtcaaaacaagacatctgatcccctggccctggagtcccagatgtgagtcaccatgtcggtgctgagaatcaaaccctggttctctgtaagagcagcaaatgctctaaaccactgatcatccctcctgtccctatattttagtttttataatttactttgaaccagtttcaacttgggagcataaatataggttcattttattgtaacttccaaaaagaaatgctaactaataataaaatacaggtggtgagctgtgtgatgtgtgggtatattatatcaccgaattttattttgccttcagtcgttgatctaaggttctcttgttaaaactagatgtcactgtataacataatatcttaaaaattctgagatagcaaagaaggtttttataaaagcatctcacacattgtgttactttgaaatgagctggaagctcatttatggggatggccactatattttatacatgagccaaaagaatcatagttatattttttcaaggggataagatgatttcaaatttgcctctaaatgctttttgaggcatgggtttggaggacagtaaaattctacttacttaaaaggtgatgtgtccaagaaaatcaagaagaaggaagaccaacgcatgcatacttcattcctccttagggaacaaaatacccatggaaggagttaacagagacaatgtttggaactgaaacaaaaggatggaccatccagagactgcctcaccctgggatccatcccataatcagccaccaaacgcagacactattgcatatgccagcaagatttttgtggaaaagaccctgatatagctgtctcttgtgaggctataccagtttctggcaaatacagaagtggatgctcattgccatctattggatggaacacagggcccccaatggaggaactagagaaattacccaagagctgaaggggtctgcaaccctataggtgaacaacaatatgaactaaccagtacccccagagcttgtgtctctatctgcatatgtatcagaagatggcctagtcggccatcaatgggaaaagaggctccttggtcttgcaaactttatatgcctcagtatgggggaatgccagggccaagaagtgggagtgggtgggtagaggagcagggcagggggagggtataggggactttcatgatagcatttgaaatgtaaatgaagaatatatctaataaaaattgaaaaataacataaaatgtgatgtgtcattttaatattttcaaatctattgcgagcacaaggcttctggtaggtggaattcatctttaaactgtgttctaaggaccaccatccttcctgtcccatcccatcagccgtctgagatttccaatctcggccagtcgtcaacacacgtgaatctttctagctgaattgaactgtgaactagctgctaagcacagccgtttttaaatttcagattgtagaacctaaattatgatatggtaaacaaaggttaaagaggttgtcactttgcatttattttgtaccttgctgttatggtattaagggcatttgtgcttgctgtctctgaggaggtaggcatactactattttatgcaggttagtcctcttcccagttctcatctgtagtagctagaagctgatcatggaaagagtccttataaagcagtgactgctgaaggtcatgagtcaggtttgcttttgttttctggaaaggggtttattatttgtttacagatcacacccccaccctcagcctagtagttttcagttcccttactttaatctaagtttgtgtcttattttaatacaactcactctacctacttttgtaaagctgaacatggttaaatgaattcagaagaatgtgaagaaatctttgatgttagtaattcagaaaagttttgtgcctctgagtaccatttcctaaccctggtaataaagcaacagcccttttgtcctgtttgcctaacaggaacttaagatgcaaataaagtgctaatggtgtggaatttctttggcaattgctaaatagatactttaaaaaaattgtagtaaactcttgctttaagtttatggagaataatagcccaaatcacaacatcccacaaggccatcttccttttacctcctatacttattgccagatacttttcagtgtcactttccttctgtgagatgctgggcaataagtacctagctgtagaactaactttctttctttctttctttctttctttctttctttctttctttctttctttctttctttctttatttcttccttccttccttccttccttccttccttccttccttcctttctctctctctctctctctctctctctttctttcttctttctaaatttattagatattttctttttccttccttccttccttccttccttccttccttccttccttccttccttcctttctttctttctttctttctttctttctttctttctttctttctttcttaattttttattagatattttcttcatttacatttaaaatgctatccccaaagtcccctataccctccccctgccctgctctccaacccacccactcttgcttcctggccctggaaatcccctgtactggggcatatgctcttcccaagaccaagggcctctcctcccattgatggctgactaggccatcctctgctacatatgcaactagagacatagctctagggggtactggttagttcatattgttgttccacctatagggttgcaaacccctttagctccttgggtactttctctagttccttcattaggggccctgtgttccatccaatagctgactgtgagcatccacttctgtatttgccaggcactggcatagcctcacaacggagagctatatcagggtcctgtcagcaaaaattcttaggcaaatggatcgatctggtggatatcatcctgagtgaggtaacctaatcacaaaagaacatacatgatatgcactcactgataatctggtattagcccagaaacctaggatattcaagatacaatttgcaaaacacgtgtagtaccctttcttagatgatgccactagaggcactacaccattgtggcaccattttcctcatgcatccagaccactttcataaatattcactactttttccctctcacaaaatgaccagtgaatcacagtgagctgtgaagatatctagttaacctttgtcaaagaaggcttttgttaaagtgtaagctttcaagttaaagggagaaagtgacacactaaaccatagtcaatcactaatgtcttagcaaggaatagataataagtttacttagtcttatggattgacctaaatttagattagccttaaaggcaacttacagaacaattaaggacatagggctggtgctagtgatcaagccagagatggaagtagtgtaaagaatatggacccttataagggagggaggagggtaatcatgaaggccacctggaacattgtgtcctagagaggtatcaaaatgttgacatttggcaagacatttctttgctctctcaaatgactttgatagtgtcttagttagggttttactgctgtgaacagacaccatgaccaaggcaagtcttataaaaaacaacatttaattggggctggcttacaggttcagaggttcagttcattatcatcaaggtgggagcatggcagtatccaggcagacttggcacagcaggagctgagagttctatgtcttcatctaaaggcgactagtggaagactgacttccaggcaactagggtgagaatcttaaacccacacccacagtgacacacctactccaaccaggtcacacctattccaactaggtcacacctccaaatggtgccacttcctggcccaagaatatacaaaccatcatagatagagtatgtttttctgttacatgtttatcttgcttctcagatactgacttttggtggtttagtgtgcatatttcttcttcttttttttttttttttacatcattaagaagtctcaataacgataaatcttagacatctctgagttacaaaaaggtgctgagggagaaaccagttttgtaaaccactaaatccagatgaatttcttccttaagcaaatacacaaaacgacttgcagtaatcacacatgtctttaatctcagcactctagaggcagaaataggtggatctctatgagttcaaggtcagtatggtttacagagtgagttccaggacagctagggttacacagaaaatactgtctcaaaataacaaaaaatttaagctgagaaatatctcattcttttgaatttattttacaattttctcttgatatatgattgattttttttaaatataattctccttttcttctcagcctgtcttcctctcatatttttcaggcttcctctaatacacacacacacatacatacatacatacatacatacatttccaaaggctaatactttaatacttggtcaccagttggtgaagctctttggggaggattaagaggtgtggccgtgtgtgtgtgtgtgtgtgtgtgtgtgtgttagaatttctgatttttgtcattgtgaaggttatcctgcctgttgccttaatagttaaagcagcatgtttgagcaaatagggctaatctgcttatttcttccatcataaattatatattaaattcctaataaatatctacagtgtaaagagaacagatggtgatgattcatatttccaagcaatgatatagtgataattatatcagctaactggtataagctactcaatgtttatactcactttttaattttttaaaacttttaaaaaattttattctttaatcctttcttacagtccagtctttctctccctctcactcttcccactgaccactccctgtcccctaccttccccttgtctccaagagaatgtcaccatcttccaccccaaacccaacccccactccaccagacctccctggggcctcaagtctctagatactgctggtcttcccatggggccaccctactcctcaggttcctctagcttttccccaattcaaccacaggtttctccagcttccatatattggttgggtcctagtatctgcatccaactctttcaggtgcttgttgggcctttctgagggcagtcgtgctaggttcctgtctgcaagcacaccacagcatcagtaacagtgttatagctaacacattgctgaattgccatgggctacttttaggaaagactacactgtaatagatttcttgtctgttagaactaagcaatggcatcagtttagagatgttagtgtttatgtgggtatatcaactaagatatgaattactgcatttatgtaagttgtcttatttaactttcatctttttgtatgcatacagttggtataagaatcatgtctacattagagacccaaccaagtgaataaatctgtctgccctcttctcttttagctggaccacaccaattttgaggaaagggtacagacaccacttggagttgtcagacatataccaagccccttctgctgattcagctgaccacttgtctgaaaaactagaaaggtatgatcttatcattgactttactggcaaaagaaagatgtttttcatgtcttttaaagaacagaaagctggaatattagaggttccatttaaaagtgatgcatttaaataaaatcgtactcttgatgaatcttgatctactcaagaattaaacaatgaaacaatgaattaaagataataactttcttaagaaatggcctcttctacaaaaatagataatgcatagtctgagaatttctatctagtgttggaattgatgctttttttactctttgtcaagcattcttaacaatgaggtgcattcttagccttggccttttgatacaaaatatcattagtccaggataactctaaactcactatataaccaggatggcctcaaaacctcttcctttttgcattaacctcctaagaactaaaggcatataccaccaagtctggcttttttgaaaatatttttaagttgaagatttttataatgatggtggtctgagtgagaatggcccccataagcttatatattgaatacttggtactgagttggagaggctgtttgggaaggaatgggaagtcttgcctttaaggtttcaaaagcccatgctgttcccaattagctctctctctctctctctctctctctctctctctctctctctctctctctctctcagctgccccaggatcatgcctgcctactgctaaactccccaccatcatgaactctccctctcaaagtataagctcccaataaactaattcttctgtaagttgtctgagtcacagtgtcctggcacaatagtataaaagtaactaaaacaattatattagtcaaaatacataagccagttgaatattcttaaaatagtagtttcttttatgattattataagtaggagtagtttagctttgtgatattaaaacaaaatatatttggaatttttgagatgagaacttatgtattttttctttctaattttggtttattatattgataatttcatgcaagcatatatgtttttgtcaagtccatctttgattccagtctactcaatgcctatctgatcctcccccccctcaccctcccagcttccatgtgctttttaaaaatcacagttagagctaccatatgcggataatataggaccatctactgtgttgtgggttgcctctccagctgcatttctgaaaaccagctctccattaattactagtagctcctcaggtagtagtgggacttcataagcccctctcatccatgctgagattctcttgacatgattgtatacaggtcttgtacatgcagttgcagctgttatgagttcatatgtgctgtcatgttcagcacatactgtatttctgcatgtatccaataactttagctcttaaactcatcctacatccacttctatgatgatccctgaacatataggtatcttatttatagctgaggactccacagtcatgtcttcatatactgatcagttgtagacctcaaaattaattgctatctactgcaaaaagtagcttatctgatgaaggttgaggtatgcacaaatctgtaaatatagataacttaggcagcaggttaatactatgtctatttatcaggataatagtaataggttctcccctgggtaccaagcataactcctatcttgtgaagtgggccttcaatccaatcagaaaaaggttaattacgtgagttgacatcattcatgtctctgtgtcctactcatgggcatgtctttctgaagccagtcttcattatagatggcagtgtttatatgtaagcctgttactttttcctccagtcacatgcatagaattttcagcactatgaccaccggccactatgggtgaagcttactttttgctacctgattgattttttttttttttttttttacattttttggctcaagtatccaattacttgagcagtagggtgtttccatcaaactctggaagcttaccaaaaacattggcaatatgtaaagcctgtaatatttgggggattatgggatcccagtaaccaaaaactctagagagataatcactgcctggcactgggaatttttttattaatttactttatatcctgatcatagcttccccttcctcctcttcttcctcctccctctcaacttaccccctctgttttctacaggatcctgtctgattagatttcccaataagattttttacttggattattgatgttttttcatttccagaatcattttagtttgaaattgtccaacaattctcttaattgaaggttattatcctatcttctaatgacttctttacttcattgatccctttattctttttaatacattcatgcctttttccagatgtttgaatatactcatactttattaggtgctattattgtaggattagtaatctgttgaggaaacatggtatcttgatttttcatgtttatttcctttctatgctgagacttgtacatctcaaatagttgttgagttccctccttctccttttcattcacatcactgcctttcactgaagtcatctacaatggccatgagagtactaggtctcagtagggttgagaatgccatttccatctgtggtgcttttagagggaatgtgggtctgagtagatggcctaagaaagggtagccagctttcctgctacctgtacaaagatacatagttgaggcatctggagcaaaatttatgtgagctgaatgtgtgaatgccattatacttcatgggaaccattatactttatgaatttgaatctttcacatttcaaccataatttctcatctcggccactctggaagaaaaaccgtaattatcttcagcttacagataaacacatcatggcttagagataatgtaatttgccaaccactgaatgatgaataattcagtcctggtgaatttatcatagttcccttttctgactattggttggggccattgtgattgtgagtgacagaagcctaatcaactaggttcatcaattaagaagaggacatttaatagctcacaaagcctaaagtatgtgagtgtctagatagatgactagcctgagggctcagtgggtccaatatatctgcactcaaatttctacttgtgatattttccctctgttggcttattttcttagattagttttctcctcaggttgacctctcagaactctatgcttatacctgtctgctccacagaagataataagcctcccttcccttcctttccccttccccttcccccttctctccttccctccttccctccttccctccatccttccttccttccttcctctctgctttttatttcatcaccaaatttatagaattatttagacttagttttatgtcccctattctgatagagtttttaaaatttatctattgtgttttaattcaaacactgtctcagactggatacataagttctagtaagaaataaattctaacctatattgtctttgatacaattttgtatctctttatcttatttcttatatatttatgaaaaccactcctttacccacttggggagtgactgaagttctcagtctgtggctgagatccattgattgactcatctgcttcaattttgtgaccatgagattgaatctgcagtgtgaaaaccatgagcccactctgtgttcctaactaacttatgagctttgccagtctggaactcttttccctcattaagtttctttactgtgttgctggattaataccatctacttttattgataattgctctagagctacagatttttcaagtcctatgattaaaaataacagcttcttttcccctcaagtctatatgtcttccatttcatagctgacaattctttgctgttctcgtttccacttgtttatcattcatttatatatcaatgcctgaaatatggtttctcatcagactatgttcctcaaactgcatagatgagggataacagtgacctgttactgtcaaatgtgacactttttttttgtatttactatcctactgttattggtatcttcatcttgaaaccatttctttgatttatggacattctctcctctgcatttcctagatcattaaattataagtgaagtattgatgaaaatttttaacgagacctattgtgtggagattatactgctactatgtattttagtgccttattttttttattaaatttatttacttattccctttacaactcaatatcagcccttcctctcctcccagtaccccctgacacaagttctcctccattactcttctgaatgggaagcccccctttgggtgtccacccctccactctagcatatcaagtcactgtgggactaggtgactaggtatatcctctcccacttagactctctaaatattacagatggagaaactggctctctgtttgtgaataaagagtagaagagaaccataggttgactaggctttatagatcagctgccgttagcatgtttcttagggaagtcatggtccatgtagtgcgacttccaagcttttcattaatatcagttgtatgctcttcctatcaagtgagataggaccatatttagttatgctaacttaatgataatgagaatagccattaaagaaatccaaggcctttatctgatcattcagttctggtctgtggtttatggaattttttttcatctcaggataatttgaaaattgagatgaaagtgagactgagacatattttattccattacaaaaattgtaaatagttttttttttaaataaaaagcagtggtagtactgaaataaaactttttcaatactatttagtacctatccttactataaaacatatttttattttgctctattttcaaagagttagatactattaaatgaattcagtagttggatatgaagtttaatgatggttctctcattgtttttctttaaaactccaaatgggtttttcttgtgttaaatcacaaaatgttcccctttcattagaatgtctgttggtattgtcattgttcaggtctcttttaggcaaccaggttgtattatggctgtcacttcactgtcatttctaagagacatatcttaagtagactttctggccttctggctcttacagtgcttcagccccttctttcaagagccccacttctaaacaaagaactatagacaactgagagagaaatgtttttttctagaggtgagctccctaattagttatcaaatgccaaggagtcatccctgaatcatatttatacaagcagcactaaaaggactcaccaggttgtttgtatgtatgtatttatgtatgtaaatattttaaaataataatagatattataatcaaagacatgaggctatgaatttgagaaggaatgtggaagagggacaggggaggggctgaagggaagagacataggaggggctagaacgtgaacaatgaaagagaaaatgatgcaaattatagtagttaaaattaaaatatatatatttaaaacaaaaaattcacctgatattttgttgtttgaaagttgcatattgtgaagtatgtgacagttaaaaacacataaatatcatgaggtaacaggaaaaaagcttaaaatatgtatttttgcatcttgttctgagcacaaatgcattctcagtgttatccatcatttgctcacccttgtcattgcttttaagaaacctagtatggttctttaacatacaaaacttagtatttttataaatgaaactggacagagtgatttcatggaagaccatcagattatgacagatatctattgggcagttggtactggagcaacttcacaaggttttatcacttacatcacagttaatctctttgacactcatgggacagaaagtatgaagggagatagagcagctcatatatttgcacctgcagttcactggtttcattttcttattccttgcagagaatgggacagagaacaagcttcaaaaaagaatccccagcttatccacgcccttcggcgatgctttttctggagattcctcttctatggaattttgctatacctaggggtaagaatctcacgtgtaaatatggtgtcatatattattaagatataatcatagttttgtgattacagaagggtgaggacaatcttgtaaccaaagccttttgttttctgtttagtatttgttttcatttttttatatagaattttattacaagtccaaacacaaatgactgaaaattctatcaaagataagtgaaaattcttaaaatgtagatctcaattgatagttcaaaattagaatgggtccaaaaatcaaattacttgtttcaaaattatgctcatttatgaatccagattataatgacttaatagtatatgaggttactggcacctttacttttctgtgctaaaaaagagaatgttagaaggcaatctcataccaagaatgagactccattcagtcagtgataccaaggaatgtttatgatattttctgctcagatagatagatagatagatagatagatagatagatagatagatagatagatagatagaggtaatgtaatgtttatattttgaaaacatatatatgtatatatgtataaatagatatatagatagaattatatagagtaatgtagattaatgtttatgatattttgaaaacacacacacatatatggagagagagagagagagggagagagagagagactgaattgtttacaaaagataataaaaatttaaaatgaggtggtgaggtgcacatagaatgtattttgtcagcaccctatgtcttcatcattgtaaagagaatagcagcctgggaacctgggctttgtgctgtttaagaactttggatatatcccagatgtgttcagaagtggttattgttttctgggtcatgcgagcatcactttgaagcttgatcatagcctgtaaaaagggtgacaagtggaaagtgtgttgagtctgatgtatcaactcagcacaatactgccttggggtgttatgtttcatctgggttgacttgcattgtatttcttcaggtctttatcctcagattgcatgggctttggtttctcctcaaatgatgtatgaacaatatgtagccgtgctacttaaataattttattttatcctgtcccagaaaaagtcattaaaaatttatcttgataaaattgactataattactctagaatcttttctagtgctattattttctagaagaaattcttctggtctttcttaatccatatatatgtatgaacataaatgtatagatgtatagatttgaatttctttttaagcaaattcatgcatattatattatcacatatttccatgtagattcatatattatattcacatataataaataatgtgttatatattatagatctgttatttaatggtagttctatatatgaaagaaaagactataaaaaagataatataatttcttctagtagaatatgtgttataaaatgcatatatagacacataaagatatagacagaagaatgagatatcgtttaaagatatctttgtggtcatttttatcagtgagcacacccaagcatttgaagatattttcagtcaagatctccttgtgagtagacattaagaagagggagatgcagtaaatatgaaaaaatatttaaaattttgaagattaaaaatagcaaaaaaaaatcacaaagcattcacaatgtattaattatctatggatagtgattagaagtacttctgagacaaacggagtgctggaatgtatctctggacccatcacagcctttggagccgaagatcaaatttctgcaaatacccaataaaatgggtaaggaaaggtcctgatgggagagagtagatgaatgtgcagagtgagaaggcacgagaaacaaagtgagcaggacacagtgtaatgatgttgaagggtctcttttatccctccccatcccccatacacagtttcactgagatcacaaagttcagtgttgtaaaactgttgaaatctagatcccacttatttaggtaagtataatttccaagatctattatttatttcaatttaagttttatcttaaaatatttatttgacaaatataaattgtcattgtagaatatacagtgtatatttcaatatatgtatacaatttttcatgatcaaataagggtaattaacatacagatcactcagtcatttaccatttctttatggtgagaagagtaaaatactctcctggttgttttgagatactgttgctaactataatcactctagcagaacgtattccctcaatacttgaatttgttgctgataacagagctttcccagcatcctcgtccctcctacccttactagtctttgttatcttaactcctcttccaactcacagtggaaatgggacaaagttgagccattttaataagcttctactgtgtcaagtaaccgctgccgttgctttactgttgtgtgttctttctgagcattttcttcttcctgttaaataaacaaacattactgagacagatataacaattgtacagataaagataacgggacatacattcaaaatgtgtttatattcttggtcgctgtaggccatgataattgtggcataacaattatttagttgttttcagtattgatagaaaaaaacactattaaaaatgccttcaactatgaaaggttaagacaaaggaaataccattacaaaggaccttatttctacaacagtgatgcaattttaaaatcatattagctatagtacatccccattaactgtggacttgttttttctttatctgattcagcagccagacatagcatgctctttaatatttcagacttccagcagagaagagcaacaggctgctgaaaacctaagtaggagaatcaactaaggataatcatttttttattttattttatttttaaactagatgttttctttatttacattgctaattttgtccccttttctcatttcccctcaaaaccccccctgtcccattcccctccccttgctcactaacccacccactcccacttccctgacctggcattcccctacactggggcatcaagccttcacaagaccaagggcctctcctcccattgatgtcccacaaggtcatcatctgctatgtatgcagctggagccatgggtccctccatgtgttttctttggttggtggtttagtccctgggagctctgggggtactggttagttcatattgttgttcctcctatagggctacaaaccccttccgctccttgggtcttttctctggctcctctactggggatgctgtgcttagtctaatggttggctgagagcatccacctctatatttgtcaggtactggcagagcctctcaggagacagctaaatcagactcctatcagcaagcacttgttggcatccataatagtgtctgggtttgataactgtatatgggatggatccccaggtgggacagtcactggatgacatttccttcagtttctggctcaaactttgcctctgtatttcctacaatgggtattttgttccccctaagaaggactgaagtatcctcactgtggtcttccttcttcttgagcttcatgtggtctgtgaattgtatcttgggtattgtgaacttctgggctaatatccacttatcaatgaatgtgtgttcttttgtgattgagttacctcactcaggatgagttccatccatttgcctaagaacttcatgaattcatcatttttaatagctatgtagtactccattgtgtaaatgtgccacattttctgtattcattcctctgttgaaggatatctgggttctttccagcttctggctatcataaataaggctgctatgaacacagtgatataagtgtccttattacgtgttggagcatcttctaggtatatgcccaggagaggtattgctggatcctctggtagtcctatgtccaattttctgagcaactgccaaattgatttccagagtaccagcgtgcaatcccactagcaatggatgagtgttcctctttctccacatccttgccagcatctgctgtcacctgagttttttatcttagccattctgattggtgtgagatagactctcagggttgttttgatttgcatttctctgatgactaaggatattgaatatttctctaggtgcttctcagccactcgatattccttagttgagaattctttgtttagctctgcaccccatttaaaaatagcgttatttgattctctatagtcacttcttgagttttttgtatatattggatattagcccactattggatgtagggttggtaaagatcttttcccaatctgttggttgccattttgtcctattgacagtgtcctttgccttacagaagctttgaaattttatgaggtcccatttgtcaattcttgatcttagagcataaactatttgtgttttgttcagaaaaaaatttcctctgtgcttatgtgttggagacgctggtattggtacggtgacaggcaggtagataaatggaatagaattgaagacacagatatgaacccacacatctatggtcacctgatctttgacaaaggagctaaaaccatccagtggaaaaaaagacagcattttcaccaaatggtgctggttcaactggcagttatcatgtagaagaatgccaatcgatccattcttatctccttgtacaaagctcaagtccaaatggaccaaggatcaccacataaaagcagataaactgaaactaatagaaaagaaagtgaggaagagccttgagcacatgggcacaggagaaaattcagggtaatctaagggaagctaaataaagggaatctgtaagcatgttcctgacagactgtgatcaccagagagagcttgttactgtagaagtcacaggtgtatactcacacgtatcttcgattccatgtttccatcactacatgtaagtatcattagttcagcttaaatcgagacctttttttttaagtcccagaaagctaacggacatgaagaaagcctggttctcacaatgccacagttcttatattccccagactgttataaaagaggatctgtctctcatatttagacaaagacaggcttttgaatccaagcctcctgctcctgaagcaagagtatttgcggtaattctgcttatgagtaggctctgcctagggtactttttcttcatacatcccctcagtacgaatgctctcagcaaagcttctagaggcctgctatctaggattcacttctcatctctgtcccatccctgcgaacacccacagctggttgcttctctggattcagcttcactcacacctgaactcttcctaagccatttctctagcccctctatatgtgttattatgtcatgttttacacttacatatctatgccacttagaatttacttctccactgaattaagttccatgcattataagttaaattgttatatatatttgggtcttttactggaatttctagataaatcagtatactttctttgacctgtgaagtgtatacatgtatggtttaatatccagtagcttaaatgttcatattatttttattcttcaaatagtttcaattagaatttattcctaaattaaattcagaataattttatttgttgttttaacaaatatttattggttaagcatgctcactaagaatgtattatatatgtcataacacttgtgacaatataaacatatagccaataacctggtgcaaatttattcatttttaaaatatacttaaaatttttatgtgattacactaatcttacaaaatggattaggtgaaacatcatctttgtaatatgtagatttttttagttcagttagtttttttaaaatgtgcttagtagtttctggaatcaatcacatatcatactaatacaggtgctttttactttttatataattcatagctatcatttttctcattaaattatcttagctagacatttcagaataatgttaggtggtcatagtagtcaaggttcttttgctttcctgcctcccacacttgtgtttatcaactattcctgattctggaagaaagtctttcttaggttaacaagcaatgttgcgattcagctttgtagaaattttaaccagatactgatactttttatcaaattagttatttcattgttactgtgatattcacagcttgttcagtagtatattagtattctgttagttgatttcttggtatcactagcattaatattctaaatgtaacaatatacaaaatgtgcttgcaacaagtgaaggtgatactattacttagtagctgcacaagatatagcaagaaactcttaaacctcacatgctagcaaagcaagcactcctgaactaaatccgcaggcctgtaaaaatgcagtatttttttttaagtataaagataaagtccatataatttagctgcaagcctgagtctgcacttgtttttgtatgaacttttctctatggtctgcatatgcactcaacacagacttacctgtctgtctctagaaacatctgattatttgtcaggtacaatggaaatggcttaagggtatgcatctacagtgacttagagctttgttctggaagtgcattcaggtgtcccctggtcggctgcagtgagaactgaattattcctaccatgagtgcaagtcttttagctagtttttacatggtcacttacccagatgacacatggtcttatagtgggaaggaagtatatatagactggcctggaattcataataatccttttgcagccttcctagatagggttatactcatgtggcaggcctctgcatagtactcctagactcaggtcatgcttccaggggtgatgttataggagcgaaccttgtaggtaaccagagtttgccaataaggagaactgtccaaacaacagaagtgcctgaggtgacacagaataaatatacaggaataagaatagtaaggaagaaggcatgaactcgtgagggagtcagatgggacatggatggagttggaagtgagaaagtggtaaagtgtttctgtgtgtgtgaagtattcatgtatgaaattctcaaaaaataaatggaaaaatgggtatttgagttttatgattctgaatttagtgttcttattgtcataaacattagtattaagcttattttctaaggaaaacaattaagaaacttgcgttttgatttatgcctgataaaattgttaaaatacgtcattgaatattatcttatttaaaatagttttgcattttttctattggatacaattctatttggagtagtatttcaatgtggtgaaaattagggaattttttttcggaaaatagtctgagcagcagaggacatgcaactcgcatgcaccaatgctgatttttaaaaaggggctgtgctttatagattaactgaggtatcagttacagtttttcttcacacttaaaaaatgtcatgtggatctatgaatggttccattgtaaatattagagaacatgatacataaaagagattaggggaaatgatagaaggagagagtctagaagtgctggttttgtccttgagaactgtgaggtagtaaggtttatgctgtgctctacaaaccatcttgttattgaaattttccagtaaagaaacaagctgtatcttactgtgtgaatatatgctcctccagagtaatactgtcagtgtccttatgagatgacgtgtattgttgaaaagatgagtatgtcttgctagttgaggcaagatgagatctaactcattagtagcaatatgtaaaataggcatgccatttaaagtattgaaagctataattactgtattaaattgtaatcaaataattaagcaaataagtctagtatgataaagtaggttattgaaaactgtaatggagttctaacattagtaaacagaagaaaaacatttaagcttataacttacaacttgaaaaaaaatctgtgtatttataagagccagaagctggaaagaacccagatgtccctcaatagaggaatggatacagaaaatgtggtacatttacacaatggagtactactcagctattaaaaacaatgagttcatgaaattcttaggcaaatggatggaactagaaaacacacacacatggagggacccatggctccagccacatatgtagcagaggatgaccttgttggcatcagtgggagaagaggaccttggtcttgtgaaggcttgatgccccagtgtcgggaaatgtgaaggtgggaaagagggagtgggtgggtgggtgggtggataggggcacaccctcatagaagcaggagaatgggtgatgggatagggaatctccagagagggagttcgttaaaggggatagaatttgaaatgtaaataaataaaatacccaataaaataaattatagataggccatatcaccctgaatgtgcctgcttagtctctaatataattcaacatctaaatatgttaaagatgtttagctatgtaataaaaatatgatgcatatgtaagatgatgtacaataagaaatattttatatactttttaaaataagttttatttattagatgtctcaaacaattggcatattatatctgggtaagaggttagaaattctttttgatacctccctttttatttggcataattcaaatccatttcaaccctgcatgtaaaaggaaagaattatatctcattttgtgattatcttggaaacttttccaaaggcttgaatcttcttttctatgcagagctttgaattatactaatatgaagtgctgtatataaagtagagaatgagcatctacaataaaggcaatgattaatgacagttaggttgtagttaattccctgtgaagatgaaggtgagatacaaaacatggtcatattctgggactggtgggacaggtagtgttggcacttgggatttggaaaagccatcatagagaacaatgaaaagcaaattaacagtaaaaatttgatgtcacatctatattaatcttctttcaagatttagccctaagttctattttactaagttatcataaaataaaaattgggagatgatgtctttttgtaattcaaaggccatttgtggttcaaatccatccatgtacatttagaagggttgatgaatcagttgaacggcttggttggtaatcagttttggattattgaagtttatgggtttattggaaactggctcaagatagagtgctctagtgcacaccttactgatgcacatacccagctctacactggcaaagggaaggaacaggacccaagcggctggctttaaataataccagtggtgctggcatgctcttccctcctgaatccagctccgctcaatggttgtactcttgagaagctgttccttctgatcataataccatggctcaaaatccttaaagaagttcattttgaaatttcttagtgtcttgcttttcttggcctccatttcttcacctgcctgcatagtgaaaacagttcgtacatgactgagagttgtgaaatcctctgggacatattttaggaatggtttgtgacatgtacatgttactagttaatgtaccacttcatcaagtacccctttacaatatagttgctattcatgcaggttttagtgaacacctcacacaaacttgtctctaaatgacttttgctgtaaactaataaccaagtcttatttcagagtatgcacaaagacactatcagcagtttcataaattgtccaaccttctctgtaaaattattttaaattattgtaaagatgaaattttcataattaaaatgtgaacaagaaatgaaatttaatcactgccttctcctgcaggaagtcaccaaggctgtccagcctgtcttgctaggaagaatcatagcatcctatgatccagaaaacaaggtggaacgttccattgccatttaccttggcataggcttatgccttctcttcattgtcaggacactgcttcttcacccagctatttttggccttcatcgcattggaatgcagatgagaacagctatgtttagcttgatttataagaaggtaatactttttggaagatgttatttggtcttgttttactatttcagtgctggatattaaattcagggtttcttgtatgccaggcaagttctttgctgagtttgctgccctgcacagtctcaggtattctacctgacatgtcttcagtgccctaaatgtgagcttgtacaagaataggtgtgaatacttattcctgttttaggtgcctatgaaatatatggcaggtgcaagtattgttctgagttatctatccttgataatgcaaagtgattcagtcgacagttattaaatatcttctgtaaattacctatatttcagatgtcatattttaggggaagtatttgaatagtttagtggttttttttaattgtcacacaaaatagacaagtgagcagtaagctaaatcaatgtcagattttttaatccactttttttcagttaaaatggcaaatagtacaagactcattgacaaaatatcatcctatgataaaattctatttttactagcaataatatatcactgttaatgataacctaagaaatacattcccaccttagccagctgccacagatggtgacagtgtcacagtggtgacactcatccatctccactgtcttactttgagtttgatttttttgtcatccagtgaattctgaaactttataacatttttgaaatagcatgtacgttgagatcatgtgaacttaactttgcttttctgcattcattagctagataagaaggctttgtaggatctaaatagattgaaatgaacagtaaacctccctgcactccagccacagccacctgccaaaccaagcaggcctctgaccaagacaaagactctcctctctgtgggacctagcctggagccccgtcctcctgcccttttcccttctgcccggggtagagtctgcccgccggttcccactctgttctcagttcttctgtgacaggcatctgaggtgttcaagactgagaacttgacgttcctagcctccatgtggcccagggaccccagaactggctcttctacaacccccagtggaaggcctgcccagtggtgccatgtgggtgtgtgcagttaaacgccctgcatctgccttgcctagtggcccgagccctgataggatgtgggatcccacttttttttttattagatattttctttatttacatttcaaatgttatcccctttcctaatttcccccctgaaaatcccctatcctatcctctcctccctcccctgctccccatcccacccattccggcttcctggccaggcattcccctattctgaagcatagaaccttcacaggaccaagggcctctcctctcattgatgactgactaggccatccacagctacatatgcagctagagccatgagtctctccatgtgttttctttgattggtggtttagtcccagggagctctggggttactggttagttcatattgttgttcctcctagggagctgcagacccctttagctcctagggtcctttctctagctccttcattggggaccctgtgttccatctaatagctaactgagcatccccttctgtattagtcaggtactggcagagcctctcaggagacagctatatcagtttcctgtcagcaagctcttgttggcatctgcaatagtgtctggggatcccactttttaactcacatctaaatgttgtcttaaattttgacaaaactcaagttatttcagtggcaccaatgtgacttcattgctctaccaagtgatcaaagaaagatatattggtggtatttagatattacctttatctttgctattttctttctttagtaacacattatatatatatttggcttataagggctatgggtctgaaattgacctctaacaagtaatccattataccactacagtacatactcaaggtcagttgtgttataaaatcttgatagccatactttattgcttaaaaaacacttttatgccaggcgtggtggcacacgcctttaatcctagcacttgggaggcagagacaggcagatttctgagttcaaggccagcctggtctacaaagtgagttccaggacagccaggactacacagagaaaccgtgtctcaaaaaaaaaaaaaaaaaaaaaaaaaaaaacaacaacaacaacaaaaaatcagttttatgaaggcagagaagaacaaaaagaagtcagagtttaattcaatctcttatgctacaaaatcatcaattcataagttccaagaaaacatgaataaacaaaaattttagagattatttggaatgtagaatctataaacttgctatcaaagaaaattgaatttactttaataaatatttgttaaaagtacttctaataaagataataactaagcatatgtatattgcaccaatgaattatttaaatgtgatctaattttatctacccacaagtttctactatagttgctattatccttcttttaaggaacccaaatcctataaagaaagaacattgaaaaaaaaggtatttcaaaactttaaaatagataagtaacagccttagaaaatggtttccaagtaattaggtaaaacagaagtatggaaacataatattgaggcaaaggacatgtgaagtaaaatgaaggggatggttaattggtaatcaagtccttagagatattggtgaagaatttgaagctgctgcatatttatttccctcacaacatcacctactgtgattgctgatcaattagtttatcttatagaccacatttaacttcccgatactggcttatcaccaaagagtatgaggacatcttcatggttctctagctggtccctacttgcactttgtcttggcttgtcccgtagcttatatccattcccctatccgtactgtttcaggttcaaggcaaggacacataggatccttccaacaacatctgcaatttatagtagagaaatccactcccattaaattctgaaaccaaacatgttatactcaaaataatgaatactaacacaagctgaactttgcccatcattttgaagattaccaagataactgaatattaactatgtgctatggatgaagctccatgctttagcctgtgcattgctttatctgacactgaaattccttctaaacatatgtaatctaccacagtgggttctccctctcttcttatttctctaataatattttgtaattacctatactcattccttcttcatctttgcttctctaaatatatctattttataattttatctctataaaatctttcatatttttaatccaaattttgagcccactctacattctgccttccttaactaatttatcatattatctatatgataaacacacactcacacacatatgtgtgagtgtgtgtttgtgtatatatatatgaattttttctaggttactcccaggaaagaattgtatcttaataaatgctaattcctgatacatacagaacaatggtttacatctattaaatactcaacaaatatgtgatgagttgaaacatataaaatgggtgctttgctgcaaagccatctaacagaaaataagttactaaatttcaccaggcaaaggattactctatttcatgatcataatttatctaataagttaaaacattaatttatagataaataaatgtttttaatcagtgatcttccatgtttttcctttgtaatatttgaagactttgttttgttaacataaaaatactgattcagttattagtaacatacttttgttggatttaagtacttttatcccaaagaattagtgaaggactttatgaaaaaattaagacaaggattcactgccttaggttccatcttttatttctaaactttcaatttttttattgtttgacgtctttaaatggttacataattaattttagttatctgtatcctcagtttctctctcattccttgccttccctctctggaactcattgtagcagtactcgtctattttaatgcctttttgcgtgtggctcattaagtttaatgagagcatgggtgcaatgatatttagtggagcaagggacgcttacatgtgttgcagacatgagaacagaataggacaactcctctctaacaaccatgagcctgcctcacccatcctaaaatgttttaccatgtacagataaccccagctctaatgggttcatgactgtaagtggtatgtcctgtagcaaaggtgtgtgtctactctttctataggtcagctcttaaattcttcatgctcccacttctgccatgttctctgaatcatggtggaatgatacaaccttcccatttatgccaaatattctgttaccacttatttgccactggttaggtttctgcagtcaccgggaaccattgtagtaagaaacttttacagtaacagctgggtgcaagctctaatctatggtataaacatgagtagtgagaaggtagcttgataacatgaccatttagcagaataacagttacttgcataccttggtggtcaaagacctccccagtcagagacttaactagggttacagaaccaaatataagttcccatttgtggaacaggccatacatataatcagcaagcaggtagtcatcaccataagaattacactactgctctactagaggacacattttacaaaggtatgtgattactatagcttatagtcccagctgggtaaggctgatgatgctttccccagtgacttgcatatgctgcctctggcactacgaaccagtaagcaggaagcttacacttcatctccatgacctgtgaccatagcatacaatacttaacatcaagttctggtaggtatccaagagcactgggaaaagcctgtgttgtttggggcacctctgagatcccccttgtcagtcactcatagggaggtatcccctacccagcactgggacttttgtttgattattcatggtatctgagaggaatagcatctaaaagaagacctctatttaagctttttaaagattacatatatttcttagaactgtagaatagtttactaaaatggtaaatttgaactcaaatatgtatagtttttaaacaggttcaactattattaactaatttctcaaggcatgatatatgttattggcaagacaaacactaataataatgtttacaaatctctatattaaatcatcttgataattgcaatttgggacacacttcattactacataggatagcatatgttttcttgcattattggtgacagagacagatgatgagtaaatgagtctctgccagtgtatttctgtatgctgataagattgtattattgtggtgctggagagatggctcagcagttaataacactgactattcttccgaaggtcctgagttcaaatcccagcagccacatggtggcttacaaccatccgtaatgagaactgacaccctcttctggtgcatgtgaagatataataattaataaatcttaaaaaatagattgtattattgcaaatcctatccccaccacatagtcctctgtggaactccattctgagaaagctagttaagttaaaactaggtagtgccattttgaagccactcaacagagaatgcctcagccacccaaagtagagggaagatgactgtctaccctactccttattgaactctccactgtgaactactacttgctactcttcttgctgtctactgtctccccaccatgttcctttcataagtctttaccttaagtagccctcaaccctggcctccattttcatgtctaatgtgtaatactatcctcctctctttctctactgtctctctctatttttcttacttttgtcaacatattattacacttgatattctaaaaatgaaaagctgagatcctcacatgaggaagatctggtagatttgtcctttggggcctggcttacctgactcagtgtaatatttatttctgttaaaaaaaataaaagaaaaacaaatccccaaaactcaaacaaaaccactcaaaacaacaacacaaaagattcaaccttatattttgcaagtggaaataaaatatcattcttattgtcaaagacaacaaagtttctatatgacagaaaatatctaaatgtaagcatttcaatatatttgtttttcagttgtatatttttaaagctgaaaaagtataacagtaacaaatatgaaacaaggttgacctctcaggttaagatacattcagtcacatcttactaatgtgttattgatgaatacattttatatttgtttgttgacatcacctaacttgccactttttcttttagactttaaagttgtcaagccgcgttcttgataaaataagtattggacaacttgttagtcttctttccaacaacctgaacaaatttgatgaagtatgtaccattgacttaatgttttatgcattttattagaaatcaaacaattctaaagaaagatttatcctgcatcagctaacagtgataagtagcaaagtcccaccaatagctagtttggctatttctggaaactgggaaagctagtcctgtagcagagcaccattctgaggtcaggtacgattgcccaactcaaacatacctcagcttgctcttaataatgtttttcaaaacttgatccttatcagacttagcttgcttccttttagtataatactttaaattgttatgtactttgactaaatatgatactctgagcagttcttgttctgtgctgtcttatgtcacaagtaaattcaaggaccttgaggacagataccatgttttatttatctttgcattttcaatatttaatagagcaagtgttacggctgaattgagtagcagagagagagagagagagagagagagagagaggaaaacctttttggagagtcccttgttctcatgtgttctgtgtgagaacactagctttattttaaaaaggtattaataaaacctaggcgcaatttcaaagatacacaatcttaattccactgaataaaaacataatgcataaattgtaatatgctaagaaccatgaatttattgattggataactcttcagtgttcattttcttccacatgtgtctctctgcttggttttgattgtggaatgtaatataccacttgattttctctgtgcttttatttttcagggacttgccttggcacattttatatggattgctcctttacaagtgactcttctgatggggcttctctgggacttgttacagttctcagccttctgtggccttggtttactgataatcctggttatttttcaagctatcctagggaagatgatggtgaagtacaggtagtggtctttttcaaagcttgaagaaatttgaattgggcttctctaagccctaacaataaaactatgccatgtcacttagaagggattattttaattctgtaaataattttttctataagaaaaaggcaattattttccctattggtctatagaatttctttattcatgttctaagtaaggttcagtacattttatattcataaagtttaggtaaaatggatattgtatttctttgaactggaaggaatgcctaaattttgtatggaacaaactggcctcttcctctccatatagtagggccattctaccaaagcatttattacttttattggtaatatgagttatatgatgtgcttattgcagagaatttgtagtttgcctgtttgaatgtgatagaaagttgaaaatctggggctatacagacaggtttctgttttagtttgtatatgctttcatttgcttcacaaaatggaggtgatctcctcttagagactttgtaaaggattggattagagatattgtccaaagttcatctaatggcgggtatctgacactttttaaaaattttttctcttcctgtttttctgtgacagagcgtctctctgtatccctggctgtcctggatctcactctgtagctgatctagaactcagaggtctacctgcctctgcctcctgagtgctggatttaaaagtgtgcactggctatgattttgtttgttcccagctgtttaataacaaaatgtttatctatgtaataaaaatatggaatttttcaaaattttgaatagttattagtagataatttgacttgtttttgttattgattgtttgatcaattgattggtttacagagatcagagagctgcaaagatcaatgaaagactcgtgatcacatcagaaattattgataatatctattctgttaaggcatattgttgggaatcagcgatggagaaaatgattgaaaacttgagagagtaagttgacataattacaatactggtccaattttatatttaacatttaaaactgaccactcaggtggattttcaactcaactcatctaaaactcaaatatatgtatgtcctgagttttacatggtttatatgtcagtgcctataatcattttggtgagcaaatgttttcttttgttttttgagactggttctcaatatacccttggctagcatagacctctgtatgtagatctagaccttaaaggcatgtgccaccacacctgtccctggcttatggttttacagttgattcagtttttttgtagtgcatagatagttatctcttactaatgattctgctatactagttcacagttgtttcatacccttaatttaattaaaacaatgatgaagatgctggggggctaattgaaaccataaatggaaatactgaaatatataattgtaagaggaaagggtgatcttgtatgacactgtacttcaagtattatgacacaaagagcgggtgacagccacatttggacaacttctgttattctgagcctgaggaataatgacaaaggaaattttccttagggctactcatataaattgcttacaagaggctaagtcagtccttgtaacaaaagccatctcctgagatggaatctttacttagcacctgtgtgtatcttatcttctttcacctcagataaccttttgcagatcagtaaagattacctctgaccaaaaaaaaaaaaaaaaaaaaaagcacagcaaggctgatacatcattactaagataattttgggtaaaataaccatgagcattgctgtggccatggaccgtttttatttagttgacttccgtgtcctaccaactacagtcaaggaaatgttttagacttctggggatgagcggaccacgaaagatactactaatttaaagacatgagatatatgagtatttcacagggaaaaggaaataaagagtgctctttgcaatggtgtgaatttgattatttcatattcagggtgctggagacctgtagacaatggtaactgagccacagctgtgtgattggaacaacaatggaaatgcttaaatgttaagtcctttgccatgtaaatagaaatagcaaaaagagtgtttattttccaaatactattgctcacctgtttttgttatgcctttcaaggtaaatctaggaaaggaattgcattttctttctagaaacatccttaaagatcttggggaattgttgagttgataagagttgtttctcacgttaacaggttgagtgctcccctgcactgcctgtaaacacagtcatggcagggctggttatcacagaatccagttttctcaggcttcataatcagcttgcagtaggccgttcctgtggctgacgggtttttgtttcctttttggggttggttttctttttttgacattggtattttacccctcttttcctcacataataaaatccatctttcctattctgaatttcaggctggttaattctaatagctagcatttgtctggttgtaacctgtttgatacatcatgaaattgttacctgaaaaagctggagagttctgacgtaaaaaggaaagcaggaattgctttaccccgcagagtaaatacaatgttctaggggagactgactggatgttcttaggattacctcagcctagaaagctgttgaactcggccaaaggctatgttaatgttcttgaaaaaaaaatctgccttttattgctttttagccattaaggtactttcaattttttatacgaaactgatagaatttttttatgactcataaaatgttagggattttatgttagtgtatagatgattctgttgcgtgtttgggatcaattattctttttcctatgtgacttcttccttttctgagctgttctaaaatattggaacagttttgacactttactaccatttgtaaacattctttccttttataaataccaggcttatcaatgtatttttttatctctagaagaaagggatacacattgctcttttacatctgctatgctgtcatctaagcttaattacatctctacaagggaagtattacggtttttttagtgatagaatcacatttaattagatggaagagtgtcttcctttaaacataagtaagactagtccatcttcagtacaaatttattgaaacactacaactcactaggctgatcacaatataggctatacacatgacctctatccgtgagctcaatagtatattgttttctttgaggacttatttttttttttttttagttctaccacttgacaataacacttgcttctatggattagaggaacagtggaagcatagtgcctgtatatcatgtgccttcctgcaccaggctgtagatcagatactgttcctttccgacagagccttcattttgtgttcaccattggcctttgcccacacaagaactggttgtttttacaaatgatcacaattgggttgaggtttatggctcctggaacagtggcgaggttgactgcagtattgttctccatcttccttttgtcactaaagcatttaacctcttcctgtatatgttaaaaaagtaaatacctcccagttgaagtacagactagaacagactagaggactgcaactctagtgaggtgcgactgcagataattacatgacaatgagagggactaggagggaggagctactccctgctctttgaaggaccccctgcaactgagtgacttggcctctgactccagagtggctcctgggaagctcaggcagcagctcagcagatgtcagcagatgtgactgagagacaatgcccagtcacgtgtttctcactgctctttgatatacacacctcgccagtgctatttaaagccaagctagaatctcaaaactactaagaatatgatggataactacagaactgtcccttttgttcataaagcttgtaacattgttttcccttccacacatcacttcaagcgttaataaagaagttactaaagatataaaaataatataaaagtaaatctatttagataatacaatttaaataaattttaattataattataaatttaattatgatagcaattgaagttcttaattgttttatgttaacaagcattctgtgtaaataaatggtatattctttaagagtcatataagctaattaaggtcaagagaagttttgtaacttgcccaaactttggactgtatattcagattttgtattctaagacacctgattattgaaagaaaataacgtgtcacgtcttcttctgttttgcacagggtggagctgaaaatgacccggaaggcggcctatatgaggttcttcactagctctgccttcttcttttcagggttctttgtagtctttctatctgtgcttccctacacagtcatcaacggaatcgtcctacgaaaaatattcacaaccatttcattctgcattgtcctacgtatgtcagtcacacggcagttccccactgccgtacagatatggtatgattcttttggaatgataagaaaaatacaggtaacttccatgatggtatacttacatgattttggaaacattttagaatttgtatagtggggaaaatctctaaaatgaatttcttgattttggatttattaatggattagatttccactcttcattttcatacataatttcatgagcgcttacagtgaaaatctaatgaaataaaatcctaggagattttgtaggtcaaatgaatttaaaataattatttctataatctagaaaatcccatccaagaaatctgtgaatagatcatttctaggcagcttgtaaatatccaaaaacattgaaaataaatttcagcaggaagttaaaaaaatgttctagctagccctggaatgctcaccttgtaggccactgtactttcccatgaagcattgctatgttccaagaacttcagcttccagcagaccagaaagttacctgatccctggccaggtgggacttacagggttattttgagcattaggtaagaagtagtttattcagagcaagttgaataaacttctgagaaaaaaaatgtcttattatcccttaaaatgtatatttaaatattcagtgcagaaagtaaatcattgtgaagaataaatgtgggatcgagggtagactgctttttaagaggttctccaattgtttaccttggactgatgtcacaaatgacagaaaacatgtaattttggcttttaaatctgttttatttggtctttgaaacttttgaattaattaatagaaattagaagtagagagattatcatgtgtacctctgtccacaggcatccatgtgtattcacttacgtgtattgagtgtcttctggagatttgcgattatgtagtaatttgggttcccacagttacagcaactgccctcaaatgtgtatagcctgcccagctcatcaaatcttttacagccttttctattcagcgtttcacccccaaggttaaatcaacttgagttgtgtgactagagcagtcactcaaacttagaatcatagtggctctatgacaaatcttatttccctgctgacatcaccctagttgggtggagggatgagagaagaaagacagagagaaggggagagatgtaagaggagaaatgggagtatctatgaacagtaacacagaaacatctaaaaaaaaaaaagagaaggaaatgagacaaaccaatagaggaagagaggggggtacaaggaagaaagatcagagcaaagattccaggtgcacagatttaagtcttatgctctccacctttcctaagaaccatgtggctggaattctctgatggaggcctttctcagagaactgagaaatagttctatgaagtccttctccttccctttatataaggagcaatgattatgatgttgctcgtaaagagagtgttaaaaaaaattgttgttcttttcacttgtactagccttgaactggtacatgaataattgtcagggtttcattagaaattcatattctatataacagtataagaaagaaacaattgcactgatatctaatgtataaaactaatttcatacattaatatatttaaagaatatattttgactatgatgagtcctactgcttggtactttaactttaagacaattgtaacgttaatttattaagaaacaatttctaatttaattgttaaaatccatacaagacactgtaatgttagagtggaagaagatataacaatacatttttgctattgtgattctacaattgaaagatttttgtcttcattgactaggatttcctgcagaaacaagagtataaagtactggagtataacttaatgaccacaggcataatcatggaaaatgtaacagcattttgggaggaggtgagatttctaaatatggtcgatttttaaaatatgtaaacaattgtgctttttccttttcttgcacctaaatttctactcaataacatataagattcaaaagatattatatctcatagggatgtaaggagggctatcctcttttataaggtgaaaagtgggtaaccaggaatattaaatgcagcataaagtgcctttatttctttaaagtcatataattgatttcatataatgggccaggaagatgattaccttcgatactagatctaaatcctgtctctgcaatacactttccatgtaatctaaatcatattatgttcaagttattaagcctcaagtgtcttcatgtgtaaaatagacattatttccctactgactaagatgatttacatggtctgttcattagtgcactttgcaaataatggtctttcagtgaagattaacttctctaatcatgactcctaagtcttccctgcctatcactcagaattgatgagccactgagttcccatgagcagcttccagcagtttactcactctgtatgtggtgtaggtgacctcatccagcctcaacatcagtgagctgatgacatgcaagtgcaaatctctaggcctaatttcaggcttgcatgctcctcatcaacttcacagtcatcactcctcaagctttactgccctcgtgctccagcatgttctccatctcctttcctggccacactgagaggcaagctaggataggatgcattacatgccaaactttcactagataaatatttctttttaccgtgttcaacttccattcttcctccttactcctaattgaatcctcaatgttgaacttagaactactgtttatgaaaggtgaagatagacccatacatttgaaatctagatgaaatacaacgttacttccttttttcccttactattttaacctttgcttttgtggttctctcttgtttcaagacatcatcattccttttaatactattgtttgggtctgagttttcatattctggagccttagtgatattggcataatattaaaaaagggagttgattctgtagaaagcaaggcaagaacaattgtgaggtgcaagtggatcataagaagtagcagacaatgaattctcaggcaggttacctttaggaaagaggatcgttggatggtgtggacctaaaaatagattcacttaaaactaggcacacaagtttcccaggcttcttcatgaccactatttgatgatatatattttgctttggagacagtacctccgagcttccattgggcaatagagaggcaagcaatttttaaaagaggatttctctccaccccatacatactcttgtacagaaaaattattttgaatccactagcaactttgtcacttgtatttgtagccaatgataaatgtttggagcaagtcttagaggattggaagtgaggattgccttgtaaatctaccttgtgagctacttgtttttgactttttgctgagccaaagtctacagttttaaaagaggaggattgaaaaattggtcttatatattatattgaagattaattaatgtttatttactaagtctgtaggaaaaagggtatatgtgtatacttccttatagtcttggtgtacacacacacactcatacacacacactcacacatacacacacacacacacacacacacatactttagccaataatatgagactgaggcaatgataagtaaaagtctgataaagagaaattttgttctcattacacataactatttctcaaacacattcaaccatactctccagaaaccatgtgctttatagttatatattataaattaattaatactatgtatgtattttaatggatcctgtaccatgtatttcttaaactgattgcatataaagttttctatggaaaatctgaaagcattattatcttcaatgtgtatgaatagggatttggggaattactggagaaagtacaacaaagcaatggtgacagaaaacattccagtgatgagaacaatgtcagtttcagtcatctctgccttgtgggaaatcctgtgctgaaaaacatcaatttgaatatagagaaaggagagatgttggctattactggatctactggatcaggaaaggtactgtctctttaaattgttaattttctgagaaatttgtacacaaatactgtaattatgtaatttctatccccctttccagtatcttactccttccatgtacccctcctcacttccattaaaattcaagacctttttgtttatgattattatatataatgttcttgatctattttgtgttttatatatacacgtgtttagaactgatcactcaagattggataacctatcagcgagctaatttttaaagaaaactgattctccctcataacaattttgcctgtaaattttcatctaggggatggagccttgtgagataacctcatatgcattgtcatgtcaactggtaatgtcatcctgtaggacttgtttagttaacagtgttttgaatatttcataggtgtagcatctcattgtctaggagatactatctagcagtagacatgcctgttttctggctatgttttagccacatcttccacaattagccctgagccttaaatacagagtttgcattgtagatgtatcaacatggtcagttcttctttgactagctctagatctctgcaatgctttgcatccagtgcaaaaaaaaaagatgtgtctacaaaaagtggtgagaactatgcttacctgtggctatgaagagaagtatttagaacccagttagaaattatattagtttacaaaatggcagtagtaagagctatgacctctccagctatgggtagtagttaggtctacattacaagattactaggtatgaattgaatactcttaatgatttggtcttaggtctaatcaggcagctgttaggtatccctaggataccactgttgtaccattgatgttgtattttgccaagacatcaggttttttttttgtttgcttgttttttaatctatttatttcatatcattaagaatttaatttactattcatttctcctttttgtgtactttgaagtatatgtaatatttcagagaaaatcacatatgtatggaatatctggtgtaatatatatatatatataaataaatatatatatatatatatatatatatgtaatatgtaggaatgtttgagtataatgtatataagttgcttcagtaatgatttccttcaggtttttcacataattttatacttttttgtatataatttagccttgtcatacatatagatggctttcaagaaaaccatccttttaaccgttctttacttcagatctattttcaaaactggtacaaaaaaaaccctgctttagatttcacctatttctctatatatttgacatctctctatatgtggatttttactgaatagacccaggcttgctttttatatattattaaaatatgtcaagtaagtgttaaaatgttaaaaattttaatttattcagtggctatgttactccccacccagtaccaagaacaatcaattatgatttggagagatatctgacaaaatctaattggctagaagtgaaaagcgctcagggattgtcacggtttcagatatgttctgtcatgtagataatgatagatacttggtttttggtagttacctagataaatcattaaggaccaaagaaatgaaatgtacttgagccaatgctttgagcagcagagtacttgctgtggggatccataaaatagatccttgttgcaatcagattgttgttttagagtacctttcagtaatacaaatatatatttattaatctctaaaattctatttcaaaatataaagcaatgggagaggaagggtgggaagaaaaaagaggtgggagaaaaataaggacaaggcagtgttgttataaaataaaaatgaaaattaaggatcacaggagcctagcatagatgtctcctgagaagcttcatctagcagtggatggaaccagatgcaaagacccacagccaaacatcaggctgagctcaggaagccttgtggaagggttgggggtaggattgaacaagccagagggctcaaacacaccacaaaagacctacagagtcaactaagctgggccgatgggtgctcccagagatcaaagcaaacaaagagcaggcaggagttgttcctaggctcgctacacgtttatagaagatgtgcagcttggtcttcatgtgagtcccctagtaactggaccagggctctctgattctgttgcctgcagttggatcccctaccccctagcaggaatgctttgttggggcctcactgggagaggatgcaaaaatttaatcctactgagacttgatgtaccagaccaggctggtacccaaggtgggcttctctttctctgaggagaaggggaggtggtaatgggggtagggatttgtgagaattcgactgggagagggggctgaagccaggatgtaaagtgaattaataaaccaattaattaatgaaaacaaaaagcattctaaaaggtaatttgtttctattttatactagtatcttaaacagggattttattttaaagagttttatatgagattttggaaatagcacaaattttctaatcactgtacattttgcttatttttctctccaattgttttcttatctgtgacatagacatgttgttttgttttattttatttatttaaagactgaatgacctttattgctcatttttaattaattattttatttatctacatctatgctcccagaaatcttcaccctattcaccctcccctttgcctctgagagggtatctaaggctgggcatctctcttctctgggacatcaaatctctacaggattaggtgcatcttctcacactggggccagacagatggcataggcatcttaaataaagtagctataattttatattctcttcctacagaaatgcttgctcctcagagtgttatttctttcctcattttctgatatggaaatagagacagttttcacgattaaatgaaaatggtagcacaggaatctgcataactaatgctataaaagacacagatgaccagaaacacactgtctgctgaggagggggtattactagcattacacagaattttaaaaatgaattgttcatgtacttaagatcaatacatgaaagaggtataaaaatagctttggaagcacagttgttgaacttgtcagtagttaaccatcaggcaattctatgaaaccttaatgaataagtaattaaaatctgggactgttcttgcctctcacagaaaattgctgtgaaggcagagaaagatctgggttcccttctgacaacttactcagagagactgctgttttgtaagaataagaaggaaaaacgattatttgattgaaaaaatgtgaagctataatataagatttaaaatattaatatttaaagttaattttatacctctcaatttgatagtttattatttaagacttaaatataacctaataatcttatatgttatacccttatatatttacagagatttttgtataggtatctttggagtagtatggctatattttgaagttctgtagtccttggttatagaaaaatttacaagatatgtagttaagtgagaaaagcaaaacaaaatttttgtatagtaatgctacaatgtactcaaggatactaaactatattattattttccataaagtctatattttgttctactggatacatttataatatctatatatgcttcatatttcacttattcttaacagtttcttcattcataaggagcttggataaaaaaatcaatatttttccttctcctgctacctgtttttctttctaccaaatggtacattaggagccctttctgtgtaagcacggggacctaagcttgaattccaagctcacatgttaggtggatccataaccccacaatgagaggctcagacagttggatcaaaggagctcacaggcagccagtgaagctgagactgtgagcttcagtttattgagacacttggtttgcctcaagcaatggaaagagacatagaagatactagtatcctgctctggcctctacatgtacacagaagggtacaggtgtccacatgttcacattgtagctctctctctctctctctctctctctctctctctctctctctctctctctctctctctcccccactctgtgtgtatacacaaacttgacatccatcatttctttttttattgtagtttttttagaaaacatttattaggttttttattggatattttctttatttacatttcaactgttatcctctttccttgtttcccctgtgaaaactcccctatcccatctcccctctccctgctcactcacccacccactcctgcttctctgtcctggcattcccatacatggagcatcgatcctttacaggaccaagggcctctcctctcattgatgtcccacaaagccatcctctgctatatatgtggctagagccttgagtaccgccttgtatactctggttggtggtttagaccctgggagatctgggggtactggttggttcattttgttgtttcccttcagtttcttgggtcctttctctagctcctccattgaggaccctgtgctcagtcccatatgtttttataatttcttaaagatgaaagcaaattttcatactagtaaaatgaaagtactttctaagactgaatctgtgttagtttattataatgaacacactcatgtagttagagcataggggcagcccatagcccaagagctttcagcaagtgctcactgtcaccagtctcttactacaaactgatcacagcaatttaagtaggggctcgctcttctttgtgaaccttagtcctatgttgcccagatctctttcatcccctttgtattttttatgcctagaaaagtccctgtatcatgaagtactaaaacatctttaatcaaatgagttacactctttaaacattgggagacttgtgattggaataattggacgcaagaaagggataagtaatttgatcaaacaatttagctgttgtttttatttgtagacatcactcctgatgttgattttgggagaactggaagcttcagagggaattattaagcacagtggaagagtttcattctgctctcaattttcttggattatgccgggtactatcaaagaaaatatcatctttggtgtttcctatgatgagtacagatataagagtgttgtcaaagcttgccaactacagcaggtaagcatatttatgaaaaatgctgattgtgttagctacttgtgtcagtgttgtgataaaattgcttgactactcaccttgaaaagggttttattttaaattcttttcagggatgataccgtccatcttggcaaaggaggggcaggaatgggaagatggcgagacatgttatatccatagtcaggaagcagacagccagcaggaagtggggcttcaaggcctaattctagtagcttactttctccagtaaagctccaagttgtaaacactgtcctaccccagtgtacccccaactggaaataatgttttcaaacacatgagcccattgtaggtatttcacgttcacaccactacatggattatgctcattcagtcttcagactaaccaaattacacagttagttctctattgagttaatgtaaacatgtcaaggaccccctaggattaagctggagtgggtgggtcagtgaataaaaccatgctcctactttaagtttacaaaattataaatagatgcagtttatttttaaagtgtgtttgggtgttgtaaaaataaaaattccttatgcatggggtgtggtacttcatgagtgcaatcctaatactcaagagactgaagcaaaaaggtcatgaagttgaagccagtcttagctgtctaatgagttctaggccagtctggatcacatggtaggatcatgctaaaaactaacaaaccaaaagtctgtatgaattcaataggagtattttgtgtacactttgagaccacagtgaaaagagaagctatcctagaaacttgtgctaaccttgaagaagatagccatactttcccaaaagtccttcttctacaacatgggggttgatgtgttctgggcttgttaccagatctgtttttagaagagtttttctgggcaagaattggagggagtaataagtcttacttggcttattttgggggtggtgggggtgagatagggtggtactttcttgctagatttagattttgctttgcttgagtatgtattttcccatataaatgatttcacagatgatattttgagtaatcaaagtcgatctacaaaatgtacataatccaaatatagcatttatacattactattaataaatttagagctgtggatcatccatgcaacaagtatttacaacattctggacacaggtagatcattggaatgcttagatgaagaaaattgtatttattgttaaagcttcatagtaggatggtatatattaataatagaggattatatggtttgtatagtatatatcaataaaatagtgagagaaggagaagcaaaatatattgttctttcatttggatgcaaggacatattacaattattttatagtgtatgatttattgtgttttagaatagttacagtggtacagtgatgaccacccttttagaacccctgaaaagaaactccatattcattaatagtcaaatcctatttttttaaaatattttttattattacatattttcatcaattacatttagaatgctatcccaaaagtcccccataccctccccccccacttccctacccacccattcccactttttggccctggcattcccctgtactggggcatataaagtttgtgtgtccaatgggcctctctttccagtgatggccgattaggccatcttttgatacatatgcagctagagtcaagagctccggagtactggttagttcataatgttgttgcacctacagggttgcagatctctttagctccttggttactttctctagctcctgcattgggggccctgtgatccatccaatagctgactgtgagcatccacttctgtgtttgccaggccccggcctagtctcacaagagacagctatatcagggtcctttcagcaaaatcttgctagtgtatgcaatgatgtcatcgtttggaggctaattatgggatggatctctgggtatggcagtctctagatggtccatccttttgtctcagctccaaactttgactctgtaactctatgcaaccactgatctatctccataaattctcctggtccttttctttttcacattttacataaaggaaatttattgagaatttcatacatatatctagtgtatgttttatctaatccatctctctctatctttcctttaacttctctcatactcccttcaaccacttcacccacccacatctgtgctctgccttaaccttcagagttcagtctgtgatcctagtatatggccttgtacccatgctatgctggcagctctaaggaaattttaatgtaaagcaattaatgtaaagcaattagttttcatcgacttagacttgctgtgctttatacagtgtcctgaagagtgatagaaacagaccaataatgaatttagttaaaaatgggggaaaaaagagaatattttaggagtaaaaagaagaaacagagagactccatcagggtctacccaaaaatagcagcctccacatgcagaaaagggtaataatattcctgatggtgtgattctttgtagaattctgaggttcacagggaaagcgagcggcccaagagttctttattaggaacattggaactatgaaaaaagagagccagactggacttaagaagtagggaaatggggtctggttgtttagagtaactgatagttgcccagtgaaacattcggtataagatccttccagtaaacactaagttatttttgcttcttttgaaatatagaataatatcactacagagaaaagcaggaaaatactttgagagccagttgttcttagaaagtgaattctgtagagacaaagttgttaaggacaagaagagcctccaaaccaaagaataatgaaaagacattgatatgatatcaatattgacaaaactggtcatagcgaagatgataacaatggcattttaaatttttggctacgtgacatagttaacaaaatttgggtatctatggaagaaatgaaaatgacagcagagcctggaggtttggaatgtggatgcactggctttctgcttagtgtcggtgagagctggaagtcactccactttagtgtatcttcagacccccaaaactatatgtgtcattcctttatgtccgactgttttggtttgatttccagtgctataattttgaccaaaaacatcttcagggagaaaagggataatgtggcttacacttcctggtcacagttgatcattggtgaactcagagtaaggaactaaaggtgggaacttgaagcagaaaccaaaaagaatgctatattctcatctgttctttgtcttgctagcaggcttacacttacctagctttctcttacaaagtagaatacctgccaggaagtggcaccacccaaaggttgtctgggccctcccacatcaattagccatcaagacaacttcccacagatatgaatagtccagttgcactggaaaaatttctatttccaggtgactctgtccaatttcaataaaaactgtctactttaggagagtcaaggtgaatagcaaatgaaagcttaaccatctctcatataaaggatttatatgataaatttgggggaaacaaacttaaggttctaatttctatatgctatgacagttgttgggttaaagtcagtggtgaaatttgagcctacttggataattcaggaagcccctctctaagagaagacttcttgaagagcaggtcaaaaagaaaggtaacattatgtataaaagaaaatgaataggtgtgaaaccacctattgcagggattataagcatcttgatagagccacggtgcaattaaagagaatgaatgagcaggaatggatttagggaaccagacctgggaggtttatcctagagaactgttagcaagagtgctgtgagagctttgaagtctgtccctgtcattctgggatgatggagagcacaattaaggtgggtaccacatgaagcttagcacagcataaatagcatagactttgaaatcgtacaaagctgagtcataaggttatttaacttgtgccaatactcggcttttctgctctgcaataggaagctaatatcgcctattctatagcttttgtaaagtgctctagtacatagaaagttcaccataagtaaagcaccagttattattattactgtcatcatcattggcaatagtgctctgttcacggttgtgactagaagaagggagactaataggaaactatttcagttacacagattatggtcatgatgtacaagagacaacagttatataaaagaattgtgggaatataggaagttatttatgtaatttttattcaatggaaaggacatcagtgaaaaaaatggttattcatggagaataaggtatttctgcaaataatgtctttaaaagtgtataaatgggttcaagattaagaaatctgagatctttaaaacaacagtcagaaaaatggacatgtataggtcatggcctcaagaaggacacagagagtgaacaaagtagagggtcgcagatgtggctgacaaggaacaatggaggggactaggaagggcttaataaatagttatgaaatagttatacactctagattttcgtttttaacgtattgcatacatagatcttcaattacttctagaccatttcctgttgttatgctttcaaagattatttcacttttactgctctccaaagcttcccattaactgtgtgacagtgtctgcctagcctcctctagtggagaatgaactcagggtcttgccgaacctctgtcatcatatgcctagttagtctccaaaccctcagggtttctgttttcatgcattccattgtgtgttatctaggctctgtcttttagttttagttttgagactgttctgtcactctcactcacaccctctatcttgctctcgttgaaattaaaggtctccttttcctcagctgttgctacttggactaccctcagctttccttagctgcctgtggttctttgcccagggctgagactcctgaacttttccccttctgcattaaaaagcccattggtgtcattgttgttgattgtccctttaatttgcaatacccttctttttcttagttaaataaaatgtgaagtaaaactatttttttaattttaaagaatccctaagtctttgttccttttgtgccactgctttttgccaccaagttagaaccttttagttaacatttgaaaggcttttttcttaaatccctttgctctttaaaatggcaaatgtagtattacaatgagctatgtatatgctgtggtattatcttttgaactacagagtaaagttctgaacacaacaactctaaaaatgttaatttaatttagtctatttagtgtactgatagaatagtccatttttactggatgactgttttggaatggtttgaggtaacatgatggttgggagaattttgctcagcaaaggttctgtgagtgttgtggtctcagaatctgagcagattggttcttgaatgagcacactttttggaagcttgggatgattgtgcttgtctgactacaaagaaaagcatcaggagtctcccctgtgtccagtgactgaaacttccatgtttgtttctgttatataaacacacatttggtcaggtacataaggaacttcaacacactaaaataccttgttttcttagataaataaaatgttaagtaaaacgtctttttttaaattttaaagaatccctaagtctttttccttttttatgccactttttaccatatatacatatacatacgcatacacacgtgcatatgcacatacatacatacatacatacacacgtatgtatgtataatgacaatttaagaatgcaggaattttgatcacaggaacacagtatacctacagagctcagtggctcaagagctggcaccaacacaagaacccctcagcatgatctgtggacggtcccatttgcgaaacccagacattcatgactctgtttgcattctgactgctgaagttgatctgtttctcagtgtgctgcatcaaggcttggaatcagagatggggatgggatatcctcttcctcatgcttgtgattttgttcaactccgagatcttcaaagtcccctgtgtgtcgtgatgctcagtgtcacaggagtatgtgagtgtggaagggcaaagcatgcacaacatatttcacatagttttctgatttcagtctgttgttggaaattattcactagatgaggcagctcaagggggaagggcatggtggttctgttgatagaatgatttttagcatgaagtctcaaataaatatgttatgggtttttttttgtttgtttttttttttacttttaagctctcctttgggaaaaatctccatgctttgctttttaaaaatgaattttagagtctagattttaagacaacaggcttttaggtgaattgagagtcacttgcaaacactgttctgcgtccttgtgtccattggctctcttcattttcctctgcgggccattagggtttccttgacacatttcttttcagggcccagcactagagactgttctagctttgagagaagaactagtgtgatgtagctctagtagaataacatgtcttatgaaattagagtcctatttcagtgttgagagagagcaagggcttacactgttctctcatctaccttctctgcctcacacagccccagtgacaagagaattctggacaggccagtgtttgagcaataaatgatttgatggtctttattctgtgactcattttcttataaaagtacctgggtttggagaagtaattaaagtttataatactttatggtggggcgtaaggatgggcaatgtgcaaaggaggtcaggggcttaggatatgtaatcagtttccacaaaattattgtgatgcttttgaaaccacaaaatgatcctcatcaagtaagtatctgtcatgacagccattacacacgcactgcagcaaaaattactatgtgagctgaagaaggaggaatcgtgcatgtctttctctttcatagctgcttagtggtttttgtatttaacttgctagagaaaatactgagaagaaaattgtcaagaattcagtaaaagattaaaaaaaagaagaagaaccatcttgggagagaaattggcaagaagttattaaaaagttgggagggaaataagctgagaaatgagggtgttccaaaaaataaattccaccatagagattccacatgactaactgaatttgaatttgacctctggctctccatgttctgcatgactaacctatgagaaggtgagacttaacctttgaatagtcaacttaccaagttggataattcacagctttacagttagaagtaatgagaagataagtgccataggactcagcattgtactagctcagacataatgtatatctaaagaagatatttgaaacacattgaactatgtccctttcaaccagaataaatcacattgactataccgtaccatggactacctataatttactgattatatgtgattaggaaacactagatattatttactataacatgaagccaagaatacttatagaattactgaaccagaactaaatgggaatgccatgatattttatagtctgaactggtatttcactgcatttgagccttggaacttaaaaaatatgtactagctaatatttagggaaagagtatctatggcagcattgtgctaagcacgcgcatgaactggcccatggagttgtctcttctgatttatttagtgatagcttcaccaagagtttgcagtagagtgaaaatatgctgacttcaaaatgcaggctaggctttaggccctaagcgcatgaagttcccgtgctaattatcaggttaacacatcagagttcttaagtcacaaaaaccaaaatagcaccaggatagccactcctagtgagatttgaagtcaacagagcagtagcttatgaacataattataactgtctgaacagactacctcatgagtagactgtgaaactatgacatgtaagcctgaccttcatatttaaaacaaaaacaatagggaaacttacaaagataaaaataattttatacaaatccttattatgtgtttccagtttctaccttttttaaggtataggaaacccagattcagagttctccatatttagatggtgaataatattatttaaaccaagaaaaaatataattttagatgcaggatggtgctccgaagaccctagctaaacttcacattcgtggaaaatttgacattttaccagacttgtaactctatagatgttcacaaaagcttacccagagaaggaatcctggtgtttgctaaattgaatgtgaagtcttctctagataggtgaaatgttctagcattgacagctattagaagtaactccatgatgataggataagtgcttttatttatattgcttattcttggtttagattgatgaattaaaaagaaattgatatcagctgggtatgatggcacatgccttaatcccagcatgtgggagatagaggcagacgtgtctctgagtttgaggtcagcctggtttacagagcgagttccaggacagccagggctacaacacagatggagcctgtagaaagaaagaaagaaagaaagaaagaaagaaaagaaagaaagaaagaaagaaaggaaggaaggaaggaaggaaagaaaggaaggaaggaaagaaaggaagaaaggaaggaaagaaaggaagaaaggaagaaaggaaggaagaaaagaaaagaaaaggaaggaaagaaaggaaggaaagaaaggaaggaaagaaaggaaggaaagaaaggaaggaaagaaaggaaagaaagagagaaagagagaaagagagaaagagagagagaaaggaaggaagaaaaaaaggaaggaaggaaggaagaaggagggaaaaggaaaggaagggaaaggaaagagaaagtgtgcgtgtgtgtgagggagagagagagggagagagagagagaaagaaagaaaggaaggaagaaggaaggaaaaggaaaggaaaggaagggaaaggaaagagaaagtgtgcttgtgtgtgagggagagagagagagggagagagagagagaaagaaaggaagaaagaaagaaagaaagaaagaaacaaaggaaggaagaaggaaggaaaaggaagggaaaggaaagagaaagtgtgcgcgtgtgtgagggagagagagagggagagaaagaagagagagggagagagaagaaaaaggagagaagaagaagaggaggaggaggaggaggaggaggagaaggagaaggagaagaagaagaagaagaagaagaagaagaagaagaagaagaagaagaagaagaagaagaagaagaaagttgttaatctcagcaacttttcactgagctcccactataagcacaatggtgcaataagcacagtagatgttgcctgcaggtataactagtaacttgtctatagtgagatttttgttacaaaaatttatagcaggatggcatatattcattcagtaaatatttttgaatatatgcatcaagctaatgattataccaaactctgggaattacactggtaagaaaggcacaatgcttgctctaaaagaggtttttttttttttcctcatagaaaagaacaattaaagattagcataggttaatgtatcgtatgtttcttagggctcttttatacattaggaagttaacaatgttctcctaaaagatgatggaagtttccccgcaaggaagtgacatctaagtgagagctgaatgaagaagcagaagaacattttaggaagggaacagaatgtacaagggtgcagaaccaaaagaagatactgtacccggcaacgtggggagccttgtgcatatagtagagtaagcatgggcatctgtaaaggaaaggctgtgtgaagaggggcgaactggggaacggaaaggtagtcacattctcagaacccattctgctatactcaggaactcagactttaaagcttaggagattcaccaaaggctttaaagtaggaggtaatgccacacaattacctttttcaaagatgttttcagttataatgtatagttatcatgctctcaattaaatgactagcaaagctgctggcagatagataatttcggttatctatctgagagacagagacagaaggattctccaagtcagggcccaccttgtctgtgtagtgagttccaggcaagctggagctacacagtgagactgttaaaacaaacaaacaaacaaacaaacaaacacaaatttaaaaactattcactgagcataaaatataagatgtaatagtgactatagtcaccatgctacagggtagatctctagaacctattcatcttgtctgagacattctgtcttatgaatacttctctatgatggtgctatttgctgagcaagttgacacaataaaagcattgtgcttcattatggaaatctggaagggatgtagaattgtgatgtatacattctatcaaaatgtatagaaactaagaagggcaaaaagtaggtaaggtatataagtagaatatttgtttaaaatatctaaaacaactaaacatgtaatactcgagctaattgataattaagagaataagcacaactgagtggcaataggaggctccgcggaggggatctcccaaaggctcagtgcagaagagcagagatgacttacagcacaacaaggccaatccatagagcaggctgttagtctgagctcagtacatgaagggcaccttcatttggagaattaagagaatgaaaataagatattacatatgaaaatataaggtcagtgtagtgggaaattaaagaattccatattcgttggaaagtttttactacgtttccttgtggcatcattgctttagaacaaaggacacacttagacaaggatctttgttctcagcttacattttactcaaaggagatagacttttcacaggaaggcagctcttgagagacaagagattagttgggaacttcaaaggtagtggggtttgaagctcttctaagaatctgagttataagagacttcataataggaaccagaaaataatttggggaacatagtctagataacacaagatgttctattgaagtatggtattctttcccccaggcattagagttgtcctagcattagggataggtatagttagaggagaaaataaggaattgtaccacttaaatatccatactgccaatgccataggagttatttagagagtttccttgcatctgagctcgtgctatccagaagtctatgactaaatgagtctgaatgaggcataataggattacagacactgaatagcatttgaaaggatttttggctggctggctggctggttggttggttggtttcatttagtaaaagccagagaaatccagttcccatatcattctctagctgtaggggagttcaggaatcccagcacttttctatttctggacactctttccctgcacacataaaatcactgcactctacagttcctctcttaagaatgcttgagctatccattctgaatataaacccagatctataacacaaggaagtacacaatagcaatagctatatttatattcatacatacacacatgaaaactgattataaaacagtttagtttgtgttatgattttatacacacacacacacacacacacacacacacacacacacacatatatatatatatatatatatatatatatatatatatatatgctctcttctgtatgaggatgtgtgcatatcatggtaaatgtgtagaggtcagatggcaacattgggtactgagctttactgtctaccatgtttgaggcagagttgttccttttgttgctatatacactaggctagttggcttgtgagctactggatctcaggcagttctcctgctctacttttcatcttccagtacaggcataatgggattacagacactcagggcgtctagttttaatgtggatcctggggatccaaactcaaattgttgggcctgtgaggcaggtgctttatcccactgcaccatctttccaggccagagcctttagtgttgatggcaactactataacatcaatatttatatttttctttgttataataaagatgatgttaagtgttttttttttctgctataaacttggttactattcactggtgaaggtaaatctttttatctttaaatcgatgaaaaatcttacaccaccatcctttttagcagagcttagtcttttgaaaatgtttcttcatgcagctatttgtaataaagtttgacttatgtcaacaacctatcttatttattagacataagccaatttaaatgagctccttagtgtctgcattctgttatgaggcttacatctgtggatctctgtcagagtctactaggtatctgcttaccacactcaaatgtacaataagctatgtagaaatgatcactagatttttctctttttccagtgctttcttggctgcccattttcccatcctgacttcttcctacctgtttttcctacctttctcttccattggctatcttctgtatgcacaaaacaaagcagtgttttgtgctttttaagccttattaacaatggcattaactatccagtgattcaccgttagagatatgctttattgagcagcattcccctgaagttaatgttcccttaaccctggcttctcactgtgcccaccctcttcttcccacaagcgtctgtattgtcaaggttgttctaaaaatgataagccagccatataaaagtttatggtattttcctatcttcaaagctacaggaagctcaaataaactcagcaaatattgctcaattacacaagactattaaatgtaacaccccacccttctaaaaagcacctcctcttctatatctttcccttttctttcttagtataacagcctagatcattatggctctattgtgtgatcaggtcagagcaaatgaggttcatattaacaagtttccttaataacttctggcttgtttgatatagttgaaggataccaagatgataaattctaaatttctaagagaagtcagtggtaaatgtgaataaatggaacataccacaataagtatgttctctagtccttaatgataaagtaagttaatctttattgcacacttattatagtattactttgaccctctccagtgtgcttatctcagcgttttcaagtgttttacaacctcaaacacacacattgtgttgtgtgcacagtctgctttgaagttgacatttgcctttctgacgaggctgtaataaaggaagtcaaccacctgagagaacaagtgtcagatgaggatttcaggccctggcgagcaccgctgttcagggttaagtgcagaaacccaggttccttccagatgcctttgagtcaccacaggtgcagcaattttaaacaaataaagtttctgtgaattagctcaagagcctcaccttagtttggcagatatttgatgttatttgtagataaactacaccgaaaaaataaataaaatatcaaaaaattaaaataaattaaaattgggaatagagaataatttgaaagaaaagttaataatgttctccttctataagagtagtctttgattacataagtttatatttcaggataagacagttttcttttattaaacaaaattcttctggacacttaataagcatgtgcaagggcctctatttcatccatagcaccaatttaaaaaaaaaaaaaacctaaacgaaaatccaacagctaattttatagaatattttatagctaattttatcgtcaaatattatctaatacccttgtctaggacccttattccaatagatgcatttcttcaaggagttttatggataaatgcccctcaccccccaaaaaaaatttccagagaattttcagtattaacaaagaaaagtagcccctgtagctgtgtgccaggcttcctctaaaagccacgtgtgctcgtgcagcattctaaagagctcacaacacaccctaatggatggtcatgtacccatgctcatactgggcaacactagttgaactaaggggattattgataaaaataaaaagacaaggtttgagtaagaatggggtaaggtgtagaagggggcgttagagggaggaaactgtgggatttatatgatcaaagtgcattgtataaatgtgtggggttttcaaaaagaatatatgtatatacatatatttcaaaaagaatatctatgcattatctatgccattaacaaaaaccaggaaaaaatggaagggatggatgaggagggtttgcagggagggagggaatggataaatgtaattatgttatagtctcagacataaaaataaagattaaaaacaaatcctcatgataggcacgagtgatataacagtttttaaattgtgatttttacaggtggggaaaatctatgaagtctgaaaccaacacccttaagataaatatattaccagatttgagtatccttagtagtcagcaaaggtcaatgtttaacgatgcatgcaaaacagagtgctttgttttaaatcaaacagaatgttaagtactcataaatttgcagacggatgaggcataaactgagtaatcaaaccaagtgctcagattaaaggaggatattggcgtgctgatgtattaggctgtaatgagtgcaatctcagtagatccccgctgcctgtccctcatttcactctcagcagcatgaaatcttcactcacggagtgaaagttacccatatttctcttcacgagtggattcagtccataaacaacagttcaaaccttggctcagtaggcagatctactttcataccattgaaagtcaattcctagaaataatatgttatagaagagaacatgtatgtctcagtgttcttattttgttcaatgttaaaagcctggatagcatcaccaaaactgtgccacaaaactctaagattcagcaaatagaataatgaaatatgtatttttccaatccatttaatacaagttacacccatatatgcagttcagctttaaaattcacatacagtataatttgcacacattattctctaacttattcagttcccgttatctttttaagatataacaatacctatatacatgtttatacactaatttagggatgagtgagtgtgtacatgtggcagacggctcagatggaggtctgcagtgtcagtccttcatccttgacggccattaatgagtgtttgctgggaggagaggtccttggtcctgtgaaggctccatagatgcctcagtgtaggggaattcaaggtggggggaggtgggagtgggtgggtggggggagggatactatcatagaagggggggtggtatagggggtgtacgtggggggggaacgggaaaggggataacatttggaatgtaaataaagaaaaatatccaataaaaaaaccttcctatcagtgactttaatctttttggtcattctgactcctaaatcaaaatttctattattttgtctctattctatttagatgaatatgtaagagattataaatatactttcatgtttattaactatcttgatttcctaacatttaaacttgaacactttttgtaagatataatgatggataaaatatgtattatatagatcactgctataggaaacaattgaatgaagagtccagttttgttttgaagtccttaactgagtttgtcttgagactacctctacattcatgaatgtttccggcaggattactaaaatagatttctattttgaaaacataagaactattagctaatttttgacataaaaatcaccaagctgctttgccaaattctcccttggactaaattggtataatattctcccataccaaccatcaatcctactttaggatcagagttgcagtgggctcttcagactgcccatctatcctatgtgtttccttttccacagtatctcccccaattaaactcttggacatttgatatcatgttggaatctggttggagaattttgactgatagctgcatatattacattatcatcttctgtagtgatagtttttcttataattttatatagtcaattttatctaaatgccattttatgttttgacatttctgacttctcttaaagatgttcgttagagcaaaaaataaagacattctgtcctaatagttttacattttcatttatcaagaatatgggttattagaattatatggtgtgcagttttatgttgacattttacactcttaattaaaatataatggctgcttttcccgctccccttccttccctccattccttctcatgtcccttctctccaaacccttccatttcacctctctttcaaattggtgtcctctttattgttgttacatgcatatgcataaatatgtaaatactcatatcttagaattagccaagggtggtttaactagatggagggcatgctcaatagtgagatttttctatttaggaaagtaatgtgatatatcttaatcatagaaacttttaatatcactcttcttcatcctgatcaaagtggtcagaatacagatttctagatttctttgaacaaatctactctactttgaagaaatttagtccactgctgtttctgttgaaaaagaaattgactttgcatgttagctctatgatcaaattgtagacaaacatttaagataactagctcttccttacagaaaagtcatctaaagatataaatgggaaacaactattcagttcacaataatggcaaaccttaaagtatttagtgattgttatagctctcatgggacatttacagaatatgaagaaaatgataaatcttattgaagtattgaattcaacatctgaatcaggattaaaaaacattttgatttagtgttgcaaactagaattctatgtaagtgcaaggtatttaaaagttgcaaataaattctaataaggttatcttaaactaaacttaatataaaatcttagaagtaatttattgacaaattattttggtggaatttttgcttcatcatatgtagacttgatatcatggtatttgtacttcttatatttgaaatgttagtgaggaagaattactgcattaaaattgttcaagtcagcacttgagactatgttagctcatcttttaatgatatattatttcaatagttgacatggctactatgtcaaaaactaagaaagccaactctttcatgaggtaggattatattttatcagatattaaatgatatataattttatttaaaatcaaggacccaaaagtccagaaaatattaatatagaaataaaaaaatggatcagaaaaataagagaacccagaactaggaaccatgacagatgatagaggcatcagtaaaccattcatttgatgattattgttgccttgtaacaaatgaaagatagggtagacaaatagaaaactgtgccataagggttttgaacattttattttgaaaatagtattcaagataacacatatagctagctggtggggagtagatacatttatttcacaaaatctttttgcacatgataagtgatatgcacagtgaaaaaaagagaaacgaatggagttttttatatgcagcctataaagttgcaaaaactacatacaaatattagacacttcaaagaagaaaatgcaacacagcaaatatttaaaatctttgtgattaagaaaaatgtaaatgaaaagagaaaattagcaaaaattatcataatcatactagtacaacttagtaaattgtaatttaactctttagttgctttgtaaagcaatctggtggtaacttttgaaagtagaacatatgcatttgatatagtcatcctactcatgagaatatatcttccagctacagatcacaaaagcatatatgtattcagtgatattaatagtaggctttgtagggaggaagtggggagcaattgctagggaagaattgcatgcctcaccattttaatgtagtctggactacaaagagaaaccaatgacttcaaatgaaccacctggaagcagcttgcatggatcagctctcttgtagtattctgttctcacagtgttgtaagtactgaaacatttatttttctgagtgcctcaccttatagtgtgtcactcagccaagagtatggggattacaaacactgtttgttctagtggaaatctcacatctgtcattacgtcatcatcttcaaaacaggagggagtgttttagagacgtgatggtagtgaacctgaatccccttcctttttcctttctttttaaaaaagcaataaggtaacagaggaaataaatataaaattgtatttactcttgtgaaataaaatcaccaacaatctgtgctagctagtttttatgccacaggtagagttttatgacatgagctagaataatttgggaacagagaagttcaattgagaaaatgcctcaccagattggcctgtggacaagcctatgggaaattttcttggttgaggattgtgggaggtcccagttcatgatggttggtgccacctctaggccagtggtcctgggtgctataagaaagcaggctaaggagccacatggagcaaatcagtaagtagcactcctccatggcctgtgtttcactccctgcttccagattcctgcctgagttcctgcactggcttccctcagtgatggacataaaagttgcaaaatgaaataaaccctttcttccccaagttgcttttggtcctctgttatcacagtaacaaacaaacaactaacaaagaccccatgtctgcaatggtgtatgtgggaagtcactgatttatcccaagtctttggtcacgctgtcaggaatgcttgttagacggggttccttgttaaaagtgaatagcatggcaatctaaggaggtgatagaaaacatgagagggggctgggaggagagaatattaaaggaaattggtacctaacttgatcacattttaactactcaagtgaagctcttcatggaaggcctcgaacattctctctgtggtgtgtgctttattcctatcgtctaaataattaacatgccatgtatactgttgtataatacgttgtaaaattgttttttaagaagttagattgttacttaattctcgctccaggattagagcttatcttctaaattaggtttacactgtctggagtcctggactatttcttacaaacccaggtcgtcttttactgtgccttcatagttgttactacagaaaagatcattattgggcaaggaatggcatatgtgacaggagaggagtagtaagtggacaaggacagaaaaataatggaagtggtgaggatgtttgtgttgttgtttgggaagatgaatgaaagaatgcggaaataaactgacatgtcccgttgttagccactgaagaatgcagaaataaactgacatgtcccgttgttagccactgaagaatgcggaaataaactgacatgtcccattgttagccactgaagaatgaggaaataaactgacatgtcctgttgttagccactgaagaatgcagaaataaactgacatgtcctgttgttagccactgaagaatgcagaaataaactgacatgtcctgttgttagccactgaagaatgcagaaataaactgacatgtcctgttgttagccactgaagaatgtggaaataaactgacatgtcctgttgttagccactgaagttgcctgcatgtttctgtgggtgtggagagttttgttttagcttttcttattaacaggcttattcagtcttttgacattttttaaaagtgattttaagttgaaagtatatttgaatggcacttgagtttatatgatgggcttatgggtagtctttgaatataaacattccccaaataaatagttgcatctgaagaaaaatgttcttttcaattttggattgtgcatgctaaattttatttctggtgttatgctttggataataggacatcaccaagtttgcagaacaagacaacacagttcttggagaaggtggagtcacactgagtggaggtcagcgtgcaaggatttctttagcaaggtaaatatttaactgttggtcttgtgagcacttgctgtaaatactatgggtttttaattatacatacacatttctcttctgcttcctgttctgtctctggaattgatgctttttctttaagaactatagacattataatattcaaatttggtaaagatggtggtttttttttttcaaaatgtatacttttcaaaatgtatactcttatttatatttgtccaaacttgttgttatggtgcatggattgttatgaagagaaaagtatagaattctaaagaaaaaaagaaaaggaaattacaagtttctattaatcccccctttttccctgtccccagatgcctctgatttgaatttctgtttattcttctaagtttagatatacacattttcaatttttaatttttagaacataatctatgatagtataacaaaaataggaaggtaaatgatgtcactaaggtttctcatttgtttacagacaaaggacaaggtctccctatttagaaattaggatctttctgtgtttgtttctgtatactaggatgaaagtgtgtgccaccacacccggtaagctttatactgaatacatgctttcatttgtgatgctgattgtcctcatggtcatgtttaattattgtcagaacgaaagtattttatttaaattgtagcttccgtttaaagacaattggtggtatgggatttcaaatgctctctaattttattgaaacaaaattcttactacattaccaaagctgttaatgagaaattacattggctcagtggtatcttggtatcttggccatttatcttccatctcctggaaaagtaaacactaagtatcacaactgatccttgataccattccttctccccctccctttgtctgtgtgcctgcctgtctgtctgtctctgaatgtatgtttatgatctcaatccccatacaagactagaagcagaaattgttttctttattttatggaagaaatcacaagataattgaggtagtcagacattaacttgccaaaggccacaaggaaatgatacagtcactatttaatcaaggtcatcttgactccttacattaaactatgcttcggtctggaaaatacactgcgaaatcagatcaatagatagaatttccagacaatggcttcaaaatgattggaagctaattcccttatctgtgtggcaaaagtcatatcttaagcattccatttgagttttaagtaaaatatggtatgtgacttcagtatagtattaacatttactagtttaagatttagtcatatttgctatgtacaatatatggcactactcaaaacagttgtctactatttttatagttgcacatgttattctcatttacatatgcaataaatatgtcatccacttttatatgaagaatatacacattttaatcttgagaaactggccacacatgtgaatgagagtttttaccttggttttgcactaataatttaccaatatattcagagtaaattttacagaaaatcactttttattcccacttactgtttaaggtaaaggagtcatatccagtgatggcttcttgttggcagagtcttgagacagcacacacaaaaaaatcatatgtcaagaaaaaaaaggaatgtgtgtgtgttctctgttattcctttcctcatgaagccaccattatccaatcatgaaaccccaccttgataatcttacttaatcctcatcattttgcaaaatgaccaccaacagctttgctgttggactaagtttccatcttcttcctgcctctgatggatatgaaatctatattagtttcagaatggacaaatatatttgattatattacagagaaataaataaaatctaaatgttgataaagacaggagagttcatttttatggagtccattagctcttctgtttccttccagacaatttatagcataaagggcttgtttgtttgtttgtttatttttattctttaatccttttttacagttcagaattcatccccctcccagtctgcccccgactgctccccatcccatacctcctccctacccctaacctccatcgccaagaggatgtccccaccctgagcataaaagagcattatgacttaatctggaattttttttgctatttctattttattcattgtttttcttatttgtgatgattaagtacattttaaaaacaaaagtatcaataaatagtttctacagcatgtcctctgtaactgggatagaggtagcattattagtaatcacacttgaaaaaagtaagatgtataaagaaattatttcctttttgttagtttggaaaatatacctttatatttttcctattgtaagtcaactcaaattgtttttagtttcaatttcaagtgaaataagagctggggagagatagctcattggtgaggagcgctggctggtcttccaaaggctccaggcttgagtcacagtactaatctgcttcacaatcatctgtaattggtaacccagcacacctgacatttccttttggtctccataggcactgaacacacatggtacacatacatgtaggtaaaaaccgtcaaacacacagtacagaagttactaacagtactccctgtgctctgtgctgtgacacgtgtgctttcagtacatggttttgatgaccattgtataacacaagttctgtgtttaaaatatctattctcaatgacgtaaaagatcttgagggatcctaactttctttccattttgtttatagagcagtatataaagatgctgatttgtacctattagattccccttttggatatctagatgtttttactgaagaacaagtatttgaaaggtatgttctatgactgagttacttataatgctcatgttaaaagataataaatgtctgtttcaccaaaggctgcatattagcatattagctccagagtaatatccactatttctattgctcaaaacatcaggatctagcacagtgcttattcagtcctggcatccccttaatggtcaagggtgaagttgcttctgccacacccttttctgatgatcacatctgaagccaatttcttgattgctatcctgttctaacagttgatatttaagaatcgtttatattttgctatcttgaaaagtcttccagtattttaagtagtttacttttaaaattccacctaccattctgtattagtatttttattttatgttgttttagaaagaaaataatgtttattggtaaatgcccatactgtacctctgtcttagtcctctttagatgcccctctttggtcacagagaacatagatatttccttaaagtttttattagagcccaaatgggtgtaaaatctctaagaggtaacattagttataccatttgatttcaaatgttaaaataattttatgggcaacaaagtagcttattagaatagacattatagcactctagaaacaaatgagtttttgttttaaggatagaatgtagtgtgtgtgttaagatggtttgattatttattgatttatttcaaacttttactttaggacattgtgctaaagggttgaaatattctagagccctgcttattgtgtcttaaaatatgtggaataacatgtttcactaatggactttactgtacttacacatgaagccagcaggtctcagtcctgaagctacttttattcagaggtggaatactatggcatgtttgttttgacattttccgtttacgtttctgttgcatggtgtttattagcatggtttatccggccacaatcccaagaacatcgtgatctctgaatgaagggccaagtcccaacaatgccatctctagcccacagatcccagtcctcattgttgctcataagcttccgatcaaatctatagtgaagaagtccttatatgacaatgtattttcatagttcccttcatcttctcttgcttattctaatctaatgcaaacggctgtagaaggtcctagtacatttctgcctcccgcaaagctttttgcatctccttcactacagctgtgcattaacattgtcttctgagtctctaaagttgttttgtaattcccattgcatcaagttctctgtgtccattacagtctgaatgctgaccactttaagcatataacactctgtaagacaaacattttcttcttttattctttcttttttctctttcttttttttttcttttttcttttttttagatgcaagctggctctcttttccctgatgattctcaatattatttattcttcaacttgaggttaataatcagagagagcctaaacattgtattttatttactaaagctacatcattaaggctttgataattgttaattcatttatttattcactttacaaaactcctctcctcccagtatcaccctcacaaatttgcccccccccccccatgagtcttctcagagaagaggatgtccccttggccgttggatacctgccagccatgggacatcaagtcacagcacaagcctatcctttcccaatgaggcctgactaagcagctcagctggaggaaggtaattccagtggcaggcaatagattcagagacagccccgctgcagttgttaggggacccacatgaaggccaaacagcacaactgctacatatggtttagtctctgcaggctctctggttggtgcttcagtctttctgagctcccatgggcccaggttagtatactctgtaggtctttgtggtgtccttaacccctctacctccctcagtcctatcccctactcttacaaaagactcccccaaatctgcttaatgcttggctgtggatctctgcatctgtttccatcacctgctggatgaagcctctaaagagacacatttgctagggttctatgtgcaaacataatatcattaatagtgttgggagttggctctctcccatgggataggtatcaaattggaccagacactggtgaacttccttcaatctctatattttttagtatttttttttatattttattatctgtaatcatttttttaaagtgcagtcgttatccccctcctgttctgccctctgacagttcttcatctcattcctcctcccctatatccaagatgatgtctctacacccccacacatgcccacaccgcaccagacctccccattccctggggcctctcaagggttaggtgcatgcatcttctctcattgatgccagaataggccatcctcagatgtaaatatgtttcccaactagtgtatgctgcctggtgggtggctcagtgtctgagagatttggggaagttcaggtttgttgagacagctagtctttctattggatcaccctcttcgtcagattcttccagcctttccctagttcaaccacaggggtccccaacttctgatcattggatctgcttctgtctcagtcatctctttgttgggcctctcagagggcagccatgctaggctcctgtttataagtacatcatagcatcagtaatagcatcagaccttggagactcacgctgagatggctcccagtttggaccagtcagtggacctcctttccctcattcttttctccatttttgtccctgcagttcttttagacaggaataattctaggtctgagttttggattgtacaatggcaaccccatccctccatgccctgtctttctactggaggtggactctataagtgctctctcaacactgttgggtattttacctaaggtccctttgagtcctgaaagtctctcacttctcaggtctctggtatattctagaaggtccccccacatcccacctcctgagttgcctgttttcattcattctgcttgccctcagtgcttcactcctgtttcctaccctgctaatacctgaacatgttatgaaattcttaggcaaatggatgtcctcattcttaatagctgcctagtattcattgtgtaaatgtaccacattttctgtatctattcttctgttgtgggacatctgggttgtttacagcttctggatatcaaaaataaggctactataaacacagtggacttgtagcatggtgggacatctttttggtatatgcctaggaacagtatagctggctcttcatttacaattatttctaattttctgaggaacctccagatttatttccaaagttgttgtaccagctagcaatcccaccagcaatagaggagtgttcctcttattccacatttttgccaaaatgtgctgtgacctgaggttttgatcttaaccattctgattggtgtaaaggtggaatctcgaggtcattttatttgcatttccctgatcaaaaaggactttgaacatttctttaattgccattcaaaatttctctgccgtgaattctctgtttagttctataccccattttttttattggaagtttttttgtggaagttagcttctttagttctttatatattttggatattagtcaactatgagatgtgggattagtggagattttttccccaatctgtaggttgccaatttgtcctattgacaatgtccattgccttacagaagctttacagtttcatgaagtcccatttatcaattcttgatcttagagcctgagtcattggagttttgtataggaaatccccacccacaccccctaatccccaaatttctccccaacctccatggccatgagttcaaggctctttcccatttttcttttctgttagatttatcttatctggctttttttgttaaggttcttgatccacttggacttgagctttgtgcaaggtgacaaatataaatctattttaattcatttacaaactgactcccagttagatcagcaccatttattgacggttcttttttacctttgtatattttttgcttctttgtcaaagatcaagtatccataagtatgtgcttttactgttgggtcttcaattcaattccattaatcaactgatctgtctctgtaccaaaaccattcaggtttgttttttgttttttgttttgttttgttttgtttttatcactattgctgtatagtatagcttgaggtcagggtgatgatttcctcagaagttcttttattgttatgaattgtttttgctttcctgtttttttggtttctttccagatgaaattgagaattgttctttccatgtctttgaagaattgtgttggaattttaatgggtattgcattgaatctgtagactccttttgtaggatggccatttttactatgttaatcctaccaatccatgagcatggaagatctttccattttctgatgatttctttcttgagagacttgaagttcttgtcatgcagatctttcacttgtttggttagtttccccaagatattctctctctctctttcttccttccttccttccttccttccttccttccttccttcctttctttcttcctttctttccttctctatttctttctttgtttctttctctcattctctctttttttcttttttctttttttctttctttttcttttttttttcttttttttttttttttttggtgtttccctattttcattctcagccctgtttatccttagtataaaggaaggctactgatttgtttgagtaaattttacattcagtcactttgctgaagatgtttgtcagctgtagaagttctctggtaggattttggggtcacttatgtatactatcatatcatctccaaatagtgataccttgactttttctttgccagtttgtatccccttcatctccttttgttgtcttattgctctggctagaaccttgaaaactatattgaataggtatggggagagtgagcatccttgtcttgttccttattttagtgggattgcttcaagtgtctctccatttaatttgatattttctgttggtttgctgtatattgcttttattatgtttagatatgggccctgaattcatgatctctccaatacttttaacatgaaggcatgttatattttgtcaaatactttttcagcatctaatgggatgatcatgtgatttttttctttgagtttgttgatatagttgattatattaatgtattttcttatattgaaccaaccttgcagccctggaatgaagcctacttcattgtggtgaatgaccgttttaatgtgtgcttagattcagtttgctttatgagtactttctgaagttcttttgttgttgttgttgggtctgtgtatagtttagataacagagtaattatgtcatcatagagtgaattaggtagcattccttctgtttctattttatggaatagtttgaggagtgttggctcttctttgaaagtctgtgtgatgccttcttagcagaaaggttgccacaaaattttacatgagtctttctatgtggtccagagcacaaagtacctttgtctgaattacttgttcaaatcttccaggagccactgtactgtttttgtttgttcagttgttgttttcctttatatataataattttagcttcacttgtttggggggagctcctttgtatctgtagaacctgcatagtgccagaaatatgaactagcactgtagccatatgcatttcagaagtctgtttccagcaggactctagtttaagacaaagagaaaattccattaaatgaaattccccccttccccaatgctatttttatgatgctctgactatagttgccaatgtttactgtcataaacttacctaaaattatattatttatacttaagagaatttaatggttcttatttttttatattttaatggataaaaggaacagattttccctgtagtatccactgcaatacttaactttttttttccttttccattttttattaggtatttagctcatttacatttccaatgctataccaaaagtcccccatacccacccacccccactcccctacccacccactccccctttttggccctggtgttcccctgtactggggcatataaagtttgcgtgtccaatgggcctctctttccagtgatggccgactaggccatcttttgatacatatgcagctagagtcaagagctccggggtactggttagttcataatgttgttccacctatagggttgcagatccctttagctccttgggtactttctctagctcctccattgggagccctgtgatccatccattagctgactgtgagcatccacttctgtgtttgctaggccccggcatagtctcacaagagacagctacatctgggtcctttcgataaaatcttgctagtgtatgcaatggtgtcagcgtttggatgctgattatggggtggatccctggatatggcagtctctacatggtccatcctttcatctcagctccaaactttgtctctgtaactccttccaagggtgttttgttcccacttctaaggaggagcatagtgtccacacttcagtcttcatttttcttgagtttcatgtgtttaggaaattgtatcttatatcttgggtatcctaggttttgggctaatatccacttatcggtgagtacatattgtgtgagttcctttgtgaatgtgttacctcactcaggatgatgccctccaggtccatccatttgcctaggaatttcataaattcatttttttttcaattttttattaggtatttagctcatttacatttccaatgctataccaaaagtcccccatatccacccacccccactcccctgcccacccactccccctttttggccctggtgttcccctgtactggggcatataaagtttgcaagtccaatgggcctctctttccactgatggccgcctaggccatcttttgatatatatgcagctagagtcaagagctccggggtactggttagttcataatgttgttccacctatagggttgcagatccctttagctccttggctactttctctagctcctccattgggagccctatgatccatccattagctgacagtgagcatccacttctgtgtttgctaggccccggcatagtctcacaagagacagctacatctgggtcctttcgataaaatcttgctagtgtatgcaatggtgtcagcgtttggatgctgattatggggtggatccctggatatggcagtctctacatggtccatcctttcatctcagctccaaagtttgtctctgtaactccttccatggatgttttgttcccaaatctaaggaggggcatagtgtccacacttcagtcttcattcttcatgagtttcatgtgtttagcaaattatatcttatatcttgggtatcctaggtttggggctaatatccacttatcagtgagtacatattgtgtgagttcctttgtgaatgtgttacctcactcaggatgatgccctccaggtccatccatttggctaggaatttcataaattcattctttttaatagctgagtagtactccattgtgtagatgtaccacattttctgtatccattcctctgttgaggggcatctaggttctttccagcttctggctattataaataaggctgctatgaacatagtggagcatgtgtccttcttaccagttggggcatcttctggatatatgcccaggagcggaattgctggatcctccggtagtactatgtccaattttctgaggaaccgccagactgatttccagagtggttgtacaagcctgcaatcccaccaacaatggaggagtgttcctctttctccacatccacgccagcatctgctgtcacctgaatttttgatcttagccattctgactagtgtgaggtggaatctcagggttgttttgatttgcatttccctgatgattaaggatgttgaacattttttcaggtgcttctctgccattcggtatttttcaggtgagaattctttgttcagttctgagccccattttttaatggggttatttgattttctgaagtccaccttcttgagttctttatatatgttggatattagtcccctatctgatttaggataggtaaagatcctttcccaatctgttggtggtctttttgtcttattgacggtgtcttttgccttgcagaaactttggagtttcattaggtcccatttgtcaattctcgatcttacagcacaagccattgctgttctgttcaggaatttttcccctgtgcccatatcttcaaggcttttccccactttctcctctataagtttcagtgtctctggttttatgtgaagttccttgatccacttagatttgaccttagtacaaggagataggaatggatcaattcgcattcttctacatgataacaaccagttgtgccagcaccaattgttgaaaatgctgtctttcttccactggatggttttagctcccttgtcgaagatcaagtgaccataggtgtgtgggttcatttctgggtcttcaattctattccattggtctacttgtctgtctctataccagtaccatgcagtttttatcacaattgctctgtagtaaagctttaggtcaggcatggtgattccaccagaggttcttttatccttgacaagactttttgctatcctaggttttttgttattccagatgaatttgcaaattgctccttctaattcgttgaagaattgagttggaattttgatggggattgcattgaatctgtagattgcttttggcaagatagccatttttgcaatgttgatcctgccaatccatgagcatgggagatctttccatcttctgagatctgtaggaaaatgttattggaggacagtcaactttattaggtatttctcagttgtaatgttttatcttaaagaaaacagattagtcaacataaaatataagagaaaattcattaaaaactaaaaatagaaaatctctaacatcttagaagttatatggacatataaactttaggaacatataataattcttttattttctagaaaaataaatcaagaccaaagagaaaatgatttggttaaaatcagatacttgattatttaaaattgtatttgattttatgtctgctagtatttactttacagtaagatatgctatttcatactgcaattcatgaggcacctaagagttatgatggagtggttatttgtataagtgtattaaataaagcaataaaatgctatgatagattttatgcaatgaaactttatgctgaagttaaatatacatcactatttatgaagtaatatcttatatcttttttatatttccaaagctgtgtttgtaaattgatggccaacaaaactaggattttggttacatctaaaatggaacacttaaggaaagctgacaaaatactaattttgcatcagggcagtagctatttttatgggacattttctgagctacaaagtctacgtccagacttcagttcgaaactcatggggtatgatacttttgaccagtttactgaggaaagaagaagttcaattctaactgagaccttacgcaggttctcagtagacgattcctctgccccgtggagcaaacccaaacagtcgtttagacagactggagaggtgggagaaaaaaggaagaactctattctaaattcattcagctctgtaaggaaaatttccattgtgcaaaagactccattatgtatcgatggagagtctgatgatctccaagaaaagagactgtccctagttccggattctgaacagggggaggctgctctgccgcgcagcaacatgatcgccaccggccccacatttccaggcagaagaagacagtctgttttggatctgatgacgttcacacccaactcaggctccagcaatcttcagaggaccagaacttctattcgaaaaatctccttagtccctcagataagcttaaatgaagtggatgtatattcaaggagattatcgcaagatagcacactgaacatcactgaagaaattaacgaagaagatttaaaggtatatacccgtcaagtcttaagatacatctcatcctaaccccataattggagtaaattttgtcacatactatgtatttcatggcatcccattgtggtctatgggctaaggatacaaagtccattacctgtgtaagcaacttgaaacataaaactatttctggttatcattgaaatatcatccccaccccacaaatgtgtggtaagccaaaacagggcctcagtgttgagtttttctactagactcatgaaatgatattcacttttataacttaataattgtctcctttagtgtttttctaggaaaaggcggaatagagtattatataaacaaatacttgcatttatgtagacaccaaaaagtgtttttaaggcatggccttgataaggattacacacacctggcttcttgacaagataaattcacattcctgcctgcatttagttagcatatattttctaacctttcagatttgtgttgtgttttttaaagggtttctctaaggaagatatgtgcagctcggcatatattagtgacagtagtcagattaaagttcttaactctatgtgttaaggagcaaaacgacctctcttaaaatagaaagcagtggaaaacaagagggcgattgtttaccagtggatgtaccttagatgaagttaaagcagagtcctagtggatgatatatttaatggtgactgtctttaatataaagttaacttttgggcagttgcaattcatttagtatctctgggcctgagttcactctgttgtgaaataaaggaataagtaattctcaaaaatatatgctcgatatttctataatctaaaactgatttgctaaaagataattcatctatatgatttaatatccatctaaataaaattaccaaattgaagtatatacattttggtttgtgtgcattttaaagaatgctttctttacctgattttgttactaagttatcaattatttcaccttccaggcaacacactttttgtctccttcactgtgacatcattgtccctattaacaaagaaataaaataaagttctgagaaattcagtatcttcatacattcaaacatcctacgatgttaccatttggtcttgattttaaataaagggcagtttagttcaacaatctaatttttaatcagtaaaccttattccaggttaataggcttccttctttgtgagtctaatggcacttaatgaacttcatggattttatgagggcatcgtttccctttagaatatatagactctctttttctcacatttttataatgtagcttccaaaagacaaaggcttttagaggctgtatttggaattggattttgtaacttaagttgtagctagaaaagcaaccatgtaatgcctaaggactatacaaatataagccagcttctaaaatagaagactcaagtagctagcaaattctacattgcccttgtctctggctcactgaatcaagctcaatcatgaagagtttgggagcttcactcatttgacaaaaggtgtgggctgtaaagcatttacatgctaaggtttgggaagtctcactgtgtttggtactttataaactatattgcttgagcagacatcctattctctgtggccatcatcacccgtggcatttttagtggcttttattttttaaagatccttggctgtaaatggtactgttcccttatttccctgaattcataataaaagctcagtggcagcatggagtaggattgtctcagaatcacacttcttttctcaggagtgttttcttgatgatgtgatcaagatacccccggtgacaacatggaacacatacctacgatattttactctccataaaggcttactgctagtgctgatttggtgcgtactggtttttctggttgaggtaagtatgtttgtttggaaattgtcactgtgagtttaaatttaggataaaaaagctgtatgtattcatatgagcatgtacacatgtgtatgtgcatgtgtacaacggtagtttcctgtaaagttcatcgcttctgaaaaccaagaggagctgacgaggcagctatgtggttaagggcactggttgctttcccagacaacctagccaaattcccagaccccacatggtggtttacagcatctgtaactgaagtctcaggaacctggtactcttttctggcctctgtgtgtacaacatgtgtgtagtacacagatgtgtgcaggcaaaacattcatacacagaaaaataagttaaaactttttaaaatccacagttagaattactattgatattttagtacttcagacataaggaaatatgcataaatacaaatgctatatatgatgaattgtcataaaataaaatttattgggaatattttttataatcagcatattttgattcataagtattgtaaagagattactataacaaaatcaataacataactatgtcatctcaagtaacattttttgttgtttttgtgacaaggggtcctaaaatccacacatctaacaagtaaaataatagtttgttatttataatcctcacatcatttattacacctccatacatttagtttttaacagattcagaagcccaacctacaaagagtgaatatgagttgaagttaagtactgaaaagaattctagatgtccatctagatgatctaatgaggcaggcagtgactcatgtggtaatgatccttacttgcctgctgtacctttgtctcaggcagtgttcatcgagggaagctttcacaatgatgtaattacttcattgtgtgctgacctgctgcacaagaatgcagtattagtcactctattatttttcctgttgccatgataaagcacctaaaagttaaggaaaggagatatatatgtgctttctgtttgagggaacatattccacagaggctgggaaggcatgatagcagaagtagcaggttggtaggtcatattgcaagcacactttggaagcaaatagtgaaaaagtggggccaggctgtaaacctgaaggcctgctcaagaaccgaaggattccatagccttcctaaacagcacagtagcttgagaccaagtattcaaacacaggagtctttagcacattttacatccaaatcatcaacagtcacctgaggggaaaaaaaagacattttgggaaaggaagtcaggggacaggggcagggttcatagtggacaaaattcaatgatgcacttgtcagaaaacaatctaatggtgtgcttttctttcttttcgtcttccttccttccttccttccttccctccttccttccttccttccttccttccttcttttcatttttgtcagtatcttataggcattgtccagttaaatagctctcaaatgctagattaaaagaaagcaatgatatgcacaattttacaactaaacaacatatttgctaatgtttatgttgttttccttcaatcaaaatttacatagactttgtttaagtctaaactttttttctttgtgtcagtgccaatgtgtagatttcttttggctactggaatgtttcttggtacattccatcatggaacaggtgccaatccacagtggcagtttagtttttaaagcactgtttaagtcctaagtgacaagaaattcccaaatgcatatcctcctccattaaagtgatttagataattttaagtcttaataaggactgtatttccatttagatttatgactttatagcatctcttctgtgtgtgatcccttttgtaataggaaataaactttgtggcccacgctgtcttttcttattccttcacagctacttaaattagtggtgggggaaataatatttctcagtcatgtgttattttgaaaaagtgtatattttgtattttccctcaaaagcaatgttgtctctaagttcttaacactgaacaaatagactaatatttctattgtgctgctctttctagtgccccttcttggcagtgtattatggacaagagagggaaaatgtaaacactggattaatggatgtttacaataacctgatggtgtgtagagtgcagcatctcaagatcctgtttgctccttggtcttgtggtctttaagactgtgtcaaaggcctgctgtgtctgtttgttaataaggagttgttttacatcagtaataaaatggagattatagtgaacttctataaaactacctttgctagtcagtgttagagtccctttagcacatcatctttattgtgaatgtggattttagggttatatttgtcccacaaaatatgtgaaaatctgcaaattatggtgtattacattccatgtgatatggcaccgtgtgttacctccccaccttaggaataaaaatgattattacttattttgttgctgcttcagcgtaatcctccaagagtacccttctttgaaaaattacatgaactttatatagtcttgaatcattttgaagtgaaataatagtgtgtattccattatctctttaattcccaaatatttttcctaaaggcttcctaccaagtatttgaaaaaatttttatctactgtagtcagtaaatatagcttggattggtcaatctatgtgatagacaagaaactactttgttaggatctaggcctccattggtaactacgtatttctcttattgcttctattcagagtgtgttggcagtgctggtgctgctgatttttctcttcttggatcaaaggagatgtaatggagaagtggctcagaacatgtgccccatctagggtctagagtcatttgattagtctgaagattgaggaagacttttctataagaataaagacattttaaaagcttagattattaccaggtttctagttttgcattaacttgagtcttaagacatcagaagtttttctttcttactgagacagtacacagagactatgtgtacattgagaaaacatgacaattaaaataataccattagatcttcatcatagaagttaataagataaactaaaataaaatatattatttaaacagacaacccttacctttcctgtatgattcaataaatagtgtttgtggaaaaatgaatgtgcaaaatgagagagtggaattccataagcttaatgtgctcttaaccaatagcaattgctgaagtgacttcagaggtgtaaagccaagacactaagagtgtgtgcacttcgatgttggtcatattgaatttagaaatgggtgtggaaggcttagataaagacgctagaaaaaaatcaactgtggattgttccattgcaggtggctgcttctttatttgtgttatggttgcttaaaaagtgagtatgccacactttatgtggattgtgttttgtttatatttagaggttataaactattttaatatatactatgttcattacacccttccatattcctgctgattatgaggggagaaaccatgtttcaataattcttcaatttctgaggagactgggtcccagaacaaagataccaaattctgcactcgtgctccatgtgtaaaactgttttttacacatacaatacaatagtattttgcatatagcctaggcatatcaccacatatactttaaaacatttctagatttatatgatgcccagtataatgtaattttcatgtaagtagttatatcctttagagaaatgatgataagaaaaataagtatgtgcgtgttcactaaagatgcaattttaagaataattttctcagtaaactgatggctgaatccatagatacacaggagatacataaggtttgctatatttgttcaagttgaaagctgttcagtgcctttatctcttcatttctaaaatatatgttgttttcagttttcatgaaatgcaataaaatatatgaagcaacagttcatatttaatagtttctactaattattttgttcaaataagaatcaattacatctatttcaattatgagaaaccttaacaccttttggcaatacaaaatttataaaactaagggtatagtctcttttaaagtcagcatttcatgtttccttatacttatttttattagtgattcacttggcaagtttggttgtcaaataatccttttcttttgttttacagcaaccctgttaacagtggaaacaatggtactaaaatttccaatagctcctatgttgtgatcatcaccagtaccagtttctattatattttttacatttacgtgggagtggctgacactttgcttgccctgagcctcttcagaggtttgccgctggtgcatacgttaatcacagcatcaaaaattttgcacaggaaaatgttacactccattcttcacgcccctatgtcgaccatcagcaagctgaaagcaggtacttgtgactaggtataaagtggagctgcccgcttgccatctgtgtggctcatcggcctgcctgccttcagtagcagcatgagcgggaacacaggcatctgcccctcatccaactaccttgtttggcatttctaagatactgcaggcaagcatacccatgctccccagcatttctgtatcagcctagtagagtaaattatcttgttacaatgtgatttgcgttcagtggactcacttgaagcaacctcttttggataacttgaccttctcacatacttatcttgatgggaaaaaaaataactgtttcttgtgcctcttcaagagtggtcatatgaatgcattagatgactttggggggagggggatagtttttaattattatgagacaattatagtacatgatccttgtataatgcatttgacaccgatttaattacagtcacagaaagtaagataatttgaaaaatagaaccaaacatttcaaaacctatggtaagaagggtctttgaaaatgtggtgcattgattcgcctctgagttagcttactttaaagaccatgaagataataagcctcctaagttctccttcactggagagcctgctgtgtgacactaagccagggaagtcctggcgcatacaaataattaaagtatcattcatgtcaggcatagaaattcaactaaatgtagagaaagctacagtattgagacctttttactgtaatctgtctaaaaatctcaaatgtgcatcagatttttttaggtgacaaaattaagtgttgatgtatgaaaaagattatatttatcctggagcccttatgcctcggcaaagggttgcctcatttgcatatgatcctggtcatcctcttttagtctaagaatcttaaaactaaggaaatgggcaattcactctttaagagaggcgttctctcacatttctggcagaattgaacatggacacgtggaaaggacacagacatttgaggcttaggcttagtttggccacacaccattggtagtaatggctgtcagcagcctacgtgaaatgaatattagcatatttctgccattcttttctgtgaggttgttgctctcaaaggaagtgaaccatcctctttctcccaaaatccactcacagcgccctctccgccctctctgttttccctctcagtgatcaccatacattcttcttttctcatttgtcttcccaaaatgtcatctgtgtctcaggttagttcctaaccactttatgctgtgttcctccttattcaacctcctggacctaagcagcaagatgacctcaagagatttccaatcagcctgcactcattatttggtagctgtggtacatatagtttgcttttaattaaaaaaagttattagattcatggtttatgattctcatctgatactgaattattctgctatactttgcaacaacttggaatttcccttggatgagctcttcagaattgtgcattgaccatgcttttccttgacagtaattttctcaggctttttttttcctgttactttctcccactttgtcatactcaaattgcgatcatacagacacataataaaggtcctcagcaaaatgcggttataatacacagatgctcctggttgaaataaaatttgaaatataaatatcactatgagtatactattttgcccaagcatactttcagttttaaatagttattacaaatgtcatggaatatacattatttctctgacttatttatggaaggatatccataatgggtatccatataatatattcataaaatatcctaaattaatatgttttctaatgtatcacatgtctgcataagactttttacttttgtctgtgggtcatataaaatagacatggaattatctatcctattgacttcaaaaatctcctatctgggaaaagagataagttatatgtacacacacaagcagctgtgatatacagcacgtatgtagtctctgcaactcaggcatacagacaaggacaggaagagatttttttccagatgcagtaaataccctactctcttgcagacaggctatttgaattgaaccaggaaagaggtacagatttgacaagaggagacagggcttttagatagaaaggaacaacacataggcaaagtaggaaaaggtagactaaagaagacatacttaccagaagcagtgggtttgaatagcaggatctaggttagttaaggacaaattatgggaaactattaaatattaaagaattttggactttaatccagtaggtaatagtgaacgagtgataaggttcactattacattgttgccatagtgttgtgttacactttatctgttggcttagctccttttttagaagatgaattcctgcactacaaggagaatgacttaatcacctccctgtagccagcattaccaaagcatgtagtagacatggaatttttagttcattgacacaacaatcaagactcaaatggggtgaatctggaatttagaatacaggttgaagcttatattcccagtgaagaagatagacaaaataaaaaaggaagtctggtgtgtactgagagagacagctgtgggttttggatcagcatatctaaatggcagaaaactccacagggagggtgtatgtgccctgtttggtggagttgaacataaaaaattgatgaaagcaccgccattaagacaccttgaaaccgagagcagcagaagtgaggcccaaggggtacgatgaccagacattcctacccttaattatagtaagaacttgattaaagacactgcttggagctgagtcgtaggggactatgtgttttataaaagttcaaaagtaggaggcaataacttaaataaatacatagaattctcaacaaagctaatatttgtaagttcttgaatttctgactagatgataattcttattttaaatgattttgctgtgctgtgaatttaggataaaatatattggtgtccttctaaaagtgattaatatttgagaatatttatttgtatcacaggtgggattcttaacagattctccaaagatatagcaattttggatgactttctgcctcttaccatttttgacttcattcaggtttgtaaagaataactattatcaagtttttctatttgccataaagttttgtgaataatttcaaaaggaagcaagtgaatttgttgctaattttccacatactagttgaagtcctggctagtgaataagttttatgaagaacagcaatgtttaatagtcataaatttagtgaattcagtaactagctatgtctatctatttcaggcatgccctggatatgatactatcctcttgaattggtttgaaaggtacaaaagacagttttccgcccaatcattgaccataaaatttgactcatagaacatttcttaagtccaacactgaaatgaaaatgaagttcctggagaggctacactctaatccagccatacccatgaacacttaaacacaaatttagctaagcagtttccccacaaaagtataacttaatggaaggatgaaaaatggattgttgaaaaaatgtgaaggaaaagaaatatttagagcctctgaggctctcccttagtgactgctgtgacagacctccagggtagccatgctatggagatgactgaaagtcacttaataacaaaagaaggccattgagtggagaccaaagtgaccatgaaagcatcacattaggactccaatgtcaaaggacttacaggagttgtaagctgatactcttgcctgttgaatcaggcagttttctgagctccctgttggcttcctgaagcttcagagagcaaatgcacttggagaagtagttgtaacacaacatggtccttgttggaatgacacagtctcatagcttgtcccttcccttctctttaaaatagtactgcatctctgaaaacttggaaaaaatgtggaactattgcccctgtatgtatacacacaagccacatcagcagatgcagagaaagcagctgttggttcacctcctctgaaatgattgacataattaaatacacttactgtactaagtgaactgtgttttggatttccttcattgctgtgtttaaagatataactttacggtagcagcacctactggaatttttttaacccaagttttgatttatgtactcaaaagtgttagtttatgtgtgtttctttagcatgagacatttgtttcccagtctcagaaaataaaccaaaggtccgtaataaaagtatactaaatactatatactaatataatataatgcaatataatatagtatggtcaaaaactggaatgtggatatctatctgaatctgcctacaaaagtcttaaaaatggtgcttgagtgatatatatatttatggtctcctaagtatctcttgttatttagtttatctcagaaatctgggagagctaattttcaaatatttatcttacaaattaaaggttatttgacatttgtgatggctttcaagtccttttatgtatcttaaacacttttatttcaggttctagagctgctaaagcttcatgaggtagcaaatctctcagagctttcttttgagctgagatctaccctgcccatttcccttcaggacaccagccagaaagcccatggaaactagtggagaattagcgtatgaaagttacactaagttggttttaaagttagcacatgtttgatgtcatgtggaccatttatttggtaaactgtagtgaggttgcaaacagtattctaattttctggggtgtaatacagtaagatgtctgcattgcatggcagaattcattttgatagtgtggctagaaaaatacttaatttcaaattaaatccatctactataaaccttttgagttactggagtatctccagttattacagtaggcataggtgaggtgagatataaataacacttattaaataatactcctttcaatattacatatgaaaaattagagtcagaaaagtgaacttgtcaacatgactaaacctaggtttaaaacagatatttgtaatttaaaatgttctgttaagaatgtttcattttaaacgactccaacaaaatcacaaaagataatatttatactaaaattattttgaaattttaatttttcaatggacaggatgaagaaaatcataatcatttcacatttacttcttataaaatttagagtgtgtgataaataaaaatatcccaagaacagaaagcaccgtgtaaagcttcagcagctgaactatcacatcagcaaactaaacaatttgaacattgtttctctgcagccggcagactgccttcgagctggcaccttattcatggatgcatgtttcctcactgagaatagtgcagtctaagaacgtgtgtagacacagctcagcaatgcccctgtccacttaacaaagtgaaaatgtctctcactaccatgttctctttgaccccgcagttggtgttcattgtgattggagctataatagtcgtctcggcattacaaccctacatcttcctagcaacggtgccagggctagtagtctttattttactgagggcctacttccttcatacagcacagcagctcaaacaactggaatctgaaggtacagcatggaatgcattgcaggggttcctggaagtgggtgagggggaccacatttactaaccactatactgctttaaatctctaattatataacagtggtgtgtgtgtgtctgtgtgtgtgtctgtgtgtgtgtctgtgtctgtgtctgagtagtagtagtagtagtatgtgtgtgggcatacttgctcgtgcaggcatgtgtgggaaccaaaggctacctttgtcaattgcttctcttcttttttcccttatcatcttctttctacttcctccttctctgttccctccctccctcccttccctctccctctctcccccctccccccaccatccctcttttcttccttcctccctttcttccttcccttctctctctctcatgagtttctcacagaacctggcatttgctggttcagctggactggctggccagggaggccccgggacccatgtgtcttcatctctagcattacagacattcagtacaggcccaaagtttttcatgtgtgcttggaatctgacctcaggttcttatgtttgtgtagcagacatattaccgactgaactctcccggcccaacaatgaaacttataaagtacgtgaggattgactttgttaactactatggctttgttttggctttcaaacaagtgtatacccttaccattgtgtatgcatagacatgcatacgttcttatactgctcaaagtcaaaaccagcaatgctatttttcctcagagtttctcccagatttcaagtgagactggatggaattcttccatttggcttatcgtcttcaggcctttccttattggcctggcttggttaatctttgctccatctccttaggaagcatctctttcagaaggaaccttggtgtgaggcaattatttttttaatattttttattaggtattttcctcatttacacttccaatgctatcccaaaaccccccatacccccccactcccctacccacccactcccacttcttggccctggcgttcccctgtactggggcatataaagtttgcaagtccaatgggcctctctttgcagtgatggcagactaggccatcttttgatacatatgcatctagagtcaagagctccggggtactggttagttcataatgttgtttcacctatagggttgcagatccctttagctccttgggtactttctctagctcctccattgggggccctgtggtccatccaatagctgactgtgagcatccacttctgtgtttgttaggccccggcatagtctcactagagacagctatatcagggtcctatcagcacaatcttgctagtgtgtgcaatggtgtcagcatttggaagctgattatgggatggatacctggatatggcagtctctagatggtcgatcctttcatcacagctccaaactttgtctctgtaactccttccatgggtgttttgttctcaattctaagaaggggcaaagtgtccacactttggtcttcgttcttcttgagtttcatgcgtttagcaaattgtatcttatatcttggatatcctaagtttctaagccaatatccacttatcagtgagtacatattgtgtgagttcctttttatttttaagagagtaaacttaatgtgtgtttctgctttgaaacttaggagctaaatcaattcacagaaattctacactgagagacttagagattgagtctcaaaagacaaaacccattttctcagcagttactaatttaggattagccaagaatattgactactcttagacaaggaaatgtgagttaacaaggaaagtggttctgtccactacctacctatctaccatggtcagcaggtaaaagggcagggccatgcactttaaaagtaaattccggtttcagtgagaagcccacaccatagatgcttatcgtgaagttactctggagttcatctttgtcagaaacatggtagtatgaaattctgttctgtattgcaagctgtacattatctcctatgggatgatttacaggcaggagtccaattttcacccaccttgtgacaagcttaaaaggactctggacacttcgagccttccgacgccagacttactttgaaactctgttccacaaagctctgaatttgcacactgccaactggtttatgtatctggcaaccttgcgctggttccaaatgagaatagacatgatatttgtcctcttcttcattgttgttaccttcatctccattttaacaacaggtaatctgaacttatttttttgtcagtgattaaaatgccatatgtttatattaaaatatttagatgattttaagtagacttgtagagcttacaagtaatttctttgcatttctgttgttttgtttctaaataatttatttaaaggtttatatggtattgttactagtttcactatttaagaataatgagacactgagtcagatagcaaatatgtgactaacaagaaaaatgtctttttcatgccaatgttggaaatctatatggggaaagaaaaacatatttgtatacacatgcacacatgtacacacacttatcatttcacacttcctgtaaaatttcttcacttaacaactacttattggtaaaattcttgtctaatatgaatttgaataaataaaaattagcatagaagtaaaataactgacataaaagtgcattatttttcaaatataaatgttctgaaatttaggatcttcaaggaaaaaataagtcacaataagaaaaattaaaatctatacagataaatgagtattttaaggtgctggatttctgagtcaaaatgctatgttacttatatatacaccattttattatatataaaatattgtatattatttatagcaaaatttcagagcgaatgacacatcaatgccagatttgcaacattatttgattataagaacagaattgctcaactccaatgaagcagcctttgacaagttatcaaattgtgtcatgcagcctcagggtgggtatcacacttgattacctgaaggaaccagcacaggcactggagagtcaggcataagtatgactcatgtagatactggtttctgttctcttcattctgtggatgatgcatttctttctcactctgtctctctgtatctctctgtctttctctgtctctctatgtcatatctatatctatatacacacatatataatattatataatatatttgtatataataaatgtatattatgtatatatttcatgtataatacatatataatatatacacatataacatatatatatatatatatatatatatatatatatatatatatatatatatgagagagagagatctgtgtatgtgtctccctctctcttcctccctgccctctctcagaataatagttatcttcatttaacaggaccataacacatgagcttcatgtgccatcttcattcttcttcttgaattaatggtatggatcctgtgtccaattattaaatcctagagaaggcaaaaaacatattccttctggctttgggcccactgcagattgacaactgctatgaggatggttaacttacccatatattgctttcttcatgcatggctatgaaatgaatctatatgtaggtatatttgtggatacacatatagtcattttgacaccttaaaataatttttggaaggtataatattgattatttgtatataaggtaattcagaggggatcaaagatgactaaattacatggattaagacttcacaattaactcaagccaatgtatcacatgctgtatcagactgtatattatgactaagtcctgggttactaaggccagtactcaaaatcttcactagtcaacacagtagaacctccaactgtgatgagcagcacagcccaggaacccagccataaccaaccaactctattggtcttaattttattgatgatattaacttacattaatttacagccattaattaacttccctaattccctaatcgtgtgggcagatgcacactaataacactttcataatattgtgtgatattttgtgtaatacagtgtagtcttgtttgtaataaatggccagtgattattaaataatactacttggtattaaaatattaccttacttttttttaaccctcagaataagaaatgtataagggacctatataaaatgaactattaacaattttcaatatattatttgatattaacacagcataacatgtgttatctatggtgtacctaagaaggagaaaatgtcaacatgaaatttttcagctattaataggatgacttgttcatcttgatgtttaactttatagtaatttaatggtagattaagcattatcatttgggatatgatatcctaactttaaaataatttatgaacacttatcttaaaaatatttgtagtcataatcctcattttttaaaattttaattagttgccctttctaatcctaaatgaaatttactctaaaataacatattaacactgttcttttcaagcagattgggcatttttcttcttgcttttaatgtaatgtgcaaacttctcccttaaatggctggcattagttttctgactgcctggtgacaagtgaagactcctttcttagaaacagcttttgatgagcagagaccatgacccttacagaggtgctcagcacatgtgctagtgctactcggatggatgtggccctcctttgagttctgtacaggatctcatttcctatttatttttatctatctatctacctatctatctatctatctatctatctatctatctatctatctatctattcactcatttatggtgtggtattcaatcagtatttgtttatattgttacatacagagtaagagtagacaattactcactaccaacattaccttcaagacctaagcatcatttaaaagtgcagcagttcccaatattcagtcactatttgattttaaattctggatgaaagcttactcaatgaaggcattattgttcaaaggagtcactaaaactgcattaaattgaaacataaatttattggcaagcgatgagagagagatgaatacaataattcacagaagagagaaataacatatactttgttcaaaacccttttccatgtctaggtgaaggagaaggaacagctggtattattctaactttagctatgaatatcatgagtactttgcagtgggctgtgaactcaagcattgatacagatagcttggtaagttactatttttaattttatgaaaagttgagagaacaaaacaaaaagagtaggcactaacatatgaaatatatatatatatattactcagtttaagaaataaaatattcaggttactttaaggacattctgtattccacattaagctgtggcatgatttatctttcgtcctcatggattatcattattatgtgtctttgccctggagttttccaaagcaaatcttagaagtggaagacattgctgaggttagaatctccccaaacttggcttcactaacgccaaattactccagtctgttgtgccactatatacttccagcaagagagcatgtgaatgtttccagcagtatttcttattcaggcttttacaattttgccagcttgatgaatgtgaagtaactactaaaatttctggataacttagtaagtctctattgttgaccacttggatttttattgttgtttatttctgttaaatgcttgtttctgttatttgcaacctgatgaggtttgatgtgcttgtttgtttttccttatgttataggtgttcttaagtcctggatcagtcatcagttctatacatttcaatggcccttgagccagtggctttactcacagtataccttaatgaatggaaacattgaatttgatagagagtagtttattttcctttacctttatggcttgtgcatttggtgtcttgtttatgaaatccttctgtatattaggtttccacattcaacagcctgacatttttcataatcctcttgtcttattttgaaaatgtctggtcatagtgtttgtcattgctctgttcctttgtgcttaacggatgctgtcttgcatttgaggactttgtgtgttcaaagaccatatttggtgtattcttccatagagtgagagcctgaagtgatatttgtgtgctaaaatgatacaaaggactactaattcacaagggccagggcaagaaatgaaaagaggttccataaacttccctatttatattttaataaaagccatattatcagttagactttagaattggcctgagaatgtcataactgatttctttttacatatttgattacagttatttgtgtcagtaaggaatgtccataccacagcatgagtgtggagggttcaaagggaaactggtggggctcacctccctcttttcaccatgtgggtcctaggggctgaactcaagtcatcgggcttagcagcagttgccatcacatgctgatctgtcattgcggacctgtcactgaagcttaaggctttggacatacattcatccattccttatgtcatttctaagaggtctagaatccatacaactccctttacttccattttcagacacccattcatgtgattgcaaaatttctatagttataatatataaatacatacagtatatttttttcataaatatgtcacaagggaaaaacctaaaatcttttaaagcctcttcttgtttgttcattttcatcattccatgaggcagcttagtaattccttgaaatacagttttcttaggttttatttagttagaccagtccctagtctcttctccacacttcttggttttgtgttggaattagctgaagaagattatataaatgctgtttctatttacttaaatttttaaaactatgacttcataattcaaaacccttgtgcacattatatatttctttacataaaaattctcttcttgtacatgtacaattccctttgcaaccttaattttctggcttaatcacatagccaaacttttgacattgcaacacaatgttgtcacctacagagttcacactcaagatatgtacagttaagctcctaaacttagtcacacacattcaacctaagattttcagtaagtagtaagtttttgatttgtgttgggcttctttcatagctctgtttgtgcagctggatgtggcctgtgaactgtggattggacagtcctgttagaatagcctttgcacaggctgacaaaaccgttgctaaatacatttctacttcatgtatctagtgtccatgaaagacacttaaagtatttctccaggttttcccatggctatgctagactttgttgtctgacattgtatctttcatggtgtgtgaaaggaccctttacagacctattgtgtttgtgacatggtctatgaaatgtatcaatatttgcagttgattacgttttcaaaagtaatgctcttttgtttaatatcaaagagcgtatgttagtttgcatctctttgccaagcaatgctggcgggccttcctgggtgttggtggtcccttcctgctattacctcccatcgtgctggtctcacctgcactgctgcgaaaactacccggtagtgctcttctttccacctcttgcttgggaatctgaagggagaatgtctgatcagtggccagtagtgctcttctttccacctcttccttgggaatctgaagggagaatgtctggtcagtgctttcagatttcacacccacctgatgtaaccccaaggttttacaacactaagcaaaaactcagtgtgatgtaattttatcttactgtgctttaaactgcatcaagagtgatctgagtttaaaatggaacaaatacaatgttttctttactatattataaagctaagtacaaggctattcaggaaaaacttcagagttggaataattacttcatttcccatctgtcccaatttaaaaattaatacagtcaatttgactatgaagttatgaatatagcagtataactttgtttttattttctacctgttacatacccacatatctctagctttctttatctctcagctattaaatccaatatcacaacaacacaagttatgttgtgtttattatcacatatctggaatgctgatactcagaactatccagcaaccttttcattatgttttcataataaaatttactcccaagctctttcctttatttctacatccttttagacattataataattctattctttaaactcttagccaaagacctttctatatatctcacagaaatacatacatataaccagaaataattcccttacatctctctactatctctttctcttttgtctttttaaaatttttttaattaattttttacactccatattccattccccacccccccatccactctcccactgctccacatcacacacttcctccccactcccccatcccccactcctccacccccacctgatctctaaactccctggggcctccagtctcttaagggttaggtgcatcatctctgaatgaacacagatctggaagtcctctgctgtatgtgtgttgggtgcctcatatcagctggtgtatgctgcctgtttggtggtccagtgtttgagagatctcaaggttaattgagactgctgctcctcctacaggatcacccttctcagcttctttcagccttccctaattcaacaacaggggtcagctgcttccattggttgaatgcaaatatctgcatctctttcagctgcttgttgggtctttcagagggcagtcatgatagatccctttttgtgagcactccatggcctcagtaatagtgtcaggaatgccttttgagctggatcccactttgggcctgttgctggaccttcttttcctcaggtttcctctccattccaatccctgcaattctttcagacaggaacaattatgggtcagagatgtgactgtgggatgacaaccccatccctcacttgatgtcctgtcttactgctggagctgagggccagcaggaagagtggaaacagggcaacctcaggaaataggaggttggggggggggggacgacgaccctccagaatgcaccagaggcctgggaggtaagagactctcaggaatcaaagggagggaccttagatgaaatgcccaacagtagggagagggaacttatagagctctttcttaatgtagcatactactagaaaatcttgcagtagacatgacatcttagagtatgagtacaggtttattgaatctctagtcatatgtactctctttacccatgtccttgcttctatctagaggcaagtcctgtgtagttgcctgccctttatgagacttttcaccagtgaatactttcatttggtctccagtttctgccctaattatttgacctgtttacagcaaaacttctaaagagattgcctttctctgttatatcttctgttctttacacagtttcttccatattcatcacccatgtgagtcacaataaacatcatgtacaaagcaatgtccttgtcttctgaagttgttgagcactatttcacatggatgaatccttatactatttcatttttctgctacctcctgggccttcatctcatgtatcctttaaatcatcatttgtattacttcttctttccacatgcattctctatagctattggtatctaaccccatggttcaaaagttgtctcttgatgaattatagattcatatatttagtgtacatctctctattcctctctatacatgtccagctaccatcttgatacctccatgaatctataaaatattctgctagattgttttctagtagatttgacatgcaagcatatgagttcctgtacatcacctcagagtgcacatatgatcttaagtggccatcgaaatgatacaaagtttatactccctgaaaggccaaataaataaatgagagccaacaaaggtataaaaggtgatattttaaacttggcagtattaaaccatctggtgtctaagaggttgctcacacataatttcttcatttgataactcatatccttccagaactttctaccacagaaggaacagaaagtgagcagtcttaatatgtgaatgccattgccttcgtttttcaagaagaccagcaaataagcatccctgtttccactagattattgaactgaactgtatgtccctagtaaaaagaaggaagttgcaaagttaagaacaatgagcttataagacttccatttagatcactattagtgaagttccagaaagttcttgcatggttggtgcaatctgagaagagttttctgtcagcacaaagtcactctgtgtctcctttgtgctctcatcacctgtgtttattttgggttccactgaggatcaggtgactaattgtagaatgagcaacatgaaatgtgggaggacaaaaaagaatttctccttccttcatgactgccgtcaccaaatgtccttgtattgaaagcagttcctgttgtaccaatctgacggatgagttaattcatcctctttgtcttttgcctccttttaatggtagcttgattgtggtttgttgttgttcttacaagtctttgtggtgtatttttcaagacattatgcattcaaccgcaaagagccttgcatttctttctggctcagacactaaaaagttgagtgcctttagacaagtcatttttcctcatttccaaggccttattttcctcctctgtaaaattaaatggtttggttaggaatttttcagattgctggcatgtttgacattctctctctgctgaacccttccatataaaaatataaactcttaacctacatgtagatattatttcagttcttaggaaatccacacaccaaccctatcctgaatgctgacattcattgaatactagcctgtagttactacagctgactcagtatgttactacagccaacaaagaaaaagtaactaatagaatgatatttttgaaccttgaattaagacaagaaatttaacagccccctcaggaattgctggagtgtacaaaattgtgtgataaacttggaaaattgactagggctttggtcctgccactttatcttcctggtttaggttttgtcctatgtacaatgaaaggatggattagatcatgggctctctcagtctggctacagatgaataaagctgctttttcaggttcacagaggccagggaaattagttcttctgctggggcaagtatcagggcctgttttctgtattttgaaatgtgcccaggtgattctaatgtgtatggaggcctttaaatcactggattaagtggtcctgcagattcctttttgctttgaatgtctgtgagtcacgttacaaggattagcaaattttttctattaaggttgaaatgaaaatagtttcagctttgtaagcttatgggctcatgacagcaactcaactcaacctttgtatgacaaagcagccatagacgttcatgagtggtgtgtgtgtttcatttcactttggcaattattattttcagtttatttgaattttgagtggtttgggtttgagagatagggagaaaatatgaaattgagaggatagagagatagtaagtagaatctggaagaaactgggggaagaggaaagaatatagtcaaaatacgtaaaaaaaatataaatgaacctaaaataacaaatcaaaatatcctatcaagaattcagtattttcctctaagcatctatattttgaaatattctaacttctccaaagcattctgtcagtcagcttcattttctgtatgtaacatgaatacttaggtaagcatcattgacagcacaaaacatggtttgctagtggtccttccatttactagtaactataccctgtaggctaagcatgagtagaaatatggccactatgtcatattcctccactccatctgcttatatattgtattcaccaactaatgctatgcaagaggcctggtttggtctgtggtacatacaccagtgacactccattgaaaggattgatttttctctttcccagcaaatatcaattgcaaatagtttattagttaagggtgagacatgtccaattcccctttcccttctcagccctgagagttttgtctgctttgaacatgtggcaaccttgtgaatgctatcactgtctctgtgagttcacttgtgtacaatcctgttgtatctggatgacactatttccttgaaatcatctaccaccacttgctatctccccttcctataaatctctcagttttgagaggagtggttctctcattctctgcacattgtccagtcatggattgttttgttcattagtttctgctgtaaggaaaggcttctctgatggtggctgagtgaggcactaatctatgggtacaacattaggtcattaagagacatgttcctgttatattctttaggctgaataatagaagtaggctttcccctacagcccatgacctacctaataaggtttttgcccactttagatgtgtcaagtatcctatctcatggaataggtcttaactccaattatctaattgttggttagtctataatacttgtgcctctattgcacttctattatagtttctggatttgtagctagatgatattaatgatttgtaattactttatgtgtgtggggggtttgcctgcatctgatcaccatatgtatatctgatgtccatggaggacaggagacagtgttagatcctctggaactggagttatagacagttgttagctactttatgaatgttgagaaccaaaaccaagtcccctagaagaatagcctgtgctcttaaccactgaactatctctcaatcctcccccataatgacatttttgtctgggattgatgaacattttgggcatgggaaacaatgtcactattgccatgactttggagtgcttggtcattcattgaagcataattttgttattctgccttctaaagaactaagtaaaattagcaaatatttttatgagacatttctggattcctgaaaatgctgtaatgacttctgtgattagctagaaaagatgaacaggaaaatttagagtcgttttcatgataaccgagttgcctcctttataaattaacattgaaaggaagctattgaactacattttgttcttgccatcatcattgtcatcttggtgcttagattagtacatttaggcattactgtaaggataataacagttttaaggattacctcttcctcaatatatttaggggaaggctttggctcttaatacaattaatgtaccagaaattacaagcacacgaatcgcaagcaaacatttcactttatcttggctacattccaatttgaaagaataagaacctatgctatgttaagttttcttgtccataaataaaaaacagattcagtgttttagcacctggctcacctggctctccttttgtcctttgcctttaaagtatgagaacatggtgttaattccttacctgacttcattgtaatttaactctagccacacagagatttttcctatccatggggctgactaaccttcctgggtagggctgcccatactccttccttcctaaatcttctaagcacagcagacagcagcttgagactggggagtatgtcagtctacagctataatgataattaccaatgctgagtgactgtctagcgctaagacaccaaggtttttacataccatgtggaaatatatagtagacaatcctttaagaaaggattaagtgagttttgcaagttttatgaaaacagataggggtaatctctgcaggggtaatctctgctgtagtatgtggaagaataacctgtcatatgtgctttcctgatggagagatgcttccaaggtgccgcccaccctttgagggtctccagggttgtgatgggcagctcctatgatgaacacactatgctcaaggctgacccggtggtgtttcttaacactctcacctgctttaaggatcaattaaagtggcagagaaagttcattgaggaaatttgagaactctgtgccatttgcagcaagaaaaacaatttgaagcaagaagtttaaggtccacagctcagagcaacccaactccaggtctctgagccccacccccacccccagcgctagcaggaagtggaatttgatgtgcagccagcctatgatgtccttatgaaatgagaaactacaagaactttgactccaatagctacaacaaaatctatacccaactcatccatgagtgcatcacgctaaagaagaaggatgaattcttgatctgcttcacagacatccatcaaaacttcctgaggtatcgtgcacccaggctatggactctcctctgtctggtcaagcactggtatcaactgtgtaaggagaagctgagggagccactgtccccacagtatcccctggagctgctcacagtctatgcctgggaatgcaggctccaagacagctctggactacatacagcccagtgcttctgaactgtcttagaactgatcactaactatccatgtctttgaatctactggacatggtgttatgattttaaacatgagatctctgactacttgcgcagagagatccaaaacgacaggcctctgatcctggatccagcagactcaacaaggaatgtggctgggtcagacttacaggcctggcaccttctggcaagaaaggctctgatctggatgcgttcgagactttctttatgaactgtgatgtgtcctttgtgaatggctgggaagtgccaccagagagaaaagaatgtgtcttccagtgagtactgcagtacttgcccaggaggctccagagtcagggcatgcactcactcctctgctgcaagaccttgatctagagaggacaggaaggtgctcaaggcttcagtgaggggcatccagcctgtgatcagactccaggcttctgattcctgcctgcccatggacagccttcctcacagcctgattcatctgccttgtcctccaacagtgttctctgggagtaagactctgaaggaaagagaagaactcaagcttgacttccatctatctacccattgggaggttctacctcccccaaaatttctgatcatcagcaataaaccacaggaagccatgagtgggtgtgtgtactctgagggatgtatcctcatcccacaaagaaactgttcagcattgcacgtagccctggagccctggagccctggagccctggagccctggagccctggagccctggagccctggagccctggagccctggagccctggagccctggagccctggagccctggagccctggaaatttgacaagtgttcatcaagctgcactatttcttcaacatgcaggctggggttacagcagtgcaggaaaataaaattgcaagcactttaaaatgtatgactttaaaacttaggtgggtgtgttaggatgagacctgaagcactgatttaaagcaaaatgcattgaaaaaaaagaataaatgggataataagttcagagttacttggggaaccagccctgcctatggcctaggcatttattaataatattaagcctctccgtttttattcaggtactggcacatgggtgaaaaagcccatggctatataaaactagtgttctatgttataacctctgactaatccagttagcaatatacagttttagactaagaaaatgagatataaattcccagtcttgaagacataccttatcatcctcacagcattgccattatcactgcatagtagagaaaacaatggctttattagttagtgaaaaaggtttacatgtctttgtatggttaagcactagatgttctgaagattccgttcttcgagtacaagaaatactgtggacatttacaatagtgagtaggatcatcaccaggggacataatcttcaggtcttgacttggatcgacctttccacaggcccttgagtcagtctggtttctgtcactgcaacaaaatacctggtgtaaaccccatgaagaaatgaaatgtttctttgggcttacacagtccccgaagtgtcagtccatggttacctgccttgacttcagtcctttgctgaggcagaacatcatggcaacaggaatatgtgttagagaaggcagcttacctcatggcagccaggaagtggggttagggatttaggattggggacaaactctcaggggccaactttcagtagttatccatacctcccaatgtttctactatactctaaaagccccatcatcttggaaccaagcctttatcttggagtgacatttacaatccaacttataactactaggttttagggacaagggtaggttcaagagagatatatgttggatcatcattcaggcactgagggggtcattagcatgactagcatggcaggggctgtctctatccttctccatttaggaatctgctacctgcaagtcctgtttccgggaaggatgggctccttattttctgacttgatattacctctatagttaatttggtatgtacaatttgaattctatttttgtaagaaggacctaccaaattgcttgagctttccacaaagctgagatccgtttttatagaggatatgaaattttgacagggaaatcaagcgtacaatgaataggacttcaactttcctgtagttagttttttattattgttgcttttgctgtacggagggaagaactctggctaattgagaccctcttagttttgtagtggagctgagctctttcgcaggctcctttgtgagttctctttccatgactcaccgaagttcctgtcttgtctacaagaatcatctgggagacttggtcttgttctgtcttctctttttgcagaaccttcttggtttcttccatgcttcttaggatacaggacaggacaccttcttgcaccttgcccatattcatgcttcatatcgtgagtcgaggagggtgactgttctcggacatcctaagttaatcaatgacaaaatttttttctaaaactcctaagtcttcagtgttccagacagtggattttcatttttataagcaacagtcttgctttcttgcccaagctgacatctgagcctgaactcaaatgaccacttcttagaagacatgaatacctacagttgtatgtctctttgggacttggcctttgaagcataaaagtcattgttcatatgactacaaaatgctgaactgttactatgtcttgacttttaaaagactgtttgtgagacttgaaagaatgctgtggttcgggggtgactcctccttctagaggcaatcaacatgctgacagccccctggttcaagaaattggttagtgactagtctattccataatggcatttcagtagttgctactttatctgactgtcagaaaacgtcctcagatattgaattgaactacactttgctcatattgttataacgagtgttggttagggatattttcaccagggtgagaatagttagacttgaggttcattttaagcattgatattgtaagaaacaacttataaacttttatttttaacactcaataagtatgtgctgtctagcacatagaatgttaaatgttctggatttgtctttaatggtgactatcactgatcaagttaggctacagtgcttcagtcaaagaaatgtgtattacttttcaaatgaccaaaatcccccatctctctctctctctctctacatatacatatatatgtatatatatatatatatatatatatactccatcatatattcatttactaattgttcaaatagataatatctgttgtcatcatattttaaaattatcacaacaaagttaatcagattattaaaatcagagtattaaaataaaattaaagcagcattcttttgttgttgaaaatttgccaagttcctgtatttctgtgtgcactaaatatgtactttattaaatgtcatattggaatatttataaaccagattgttgcattaactttttccaaggaaaggtgaacaaatgtattttcactcccaaccagacactgaagaagggcaaaagtaagaatttcatccaagtctaacttggtgaacaatgagtttattgagagtacaataagcatggatgacggatcacttacagactgtgagcgaacataaaacactttcacactacaatgttcaactctagcatggatgatgaccttgtggaagctgctccaacgtgccctacttcctctcttagggtctcccaagatcacttcagctgaaagggaagagaaacagaaggggactgatggttggagtcccagaggagggtcccgaactctactctcctcccttctagtatggagcatcactatagacctagctgtcagtgaatattatcctgtctattttgccacatggctaccaggcccaagcatatctccactctaagatgaggaaagaacaagccactcttccacaattccatggaattgagaatataacctttatataaagtcaccttttgctaatgatgcaaattgatttcaaagtaatatttattagaagtgtaaactttttcactttctatctgtgcaataacttaaacattgtggattcactaaaaattgatatatgccttcagttccagtactcagaaggtagagacagacagatctctatacattcaagggcagcctggtctacagaatgagttccagaaaagctagagctacacacacacaaaagaaaaaccctgttttgaaaaaacacccccccccccaacgaaaaagaaggagaaaaaaagaaattgactaagcatcaggtgtctacaaataacttagttgacatacaggattatagatgttaaagaaagtggagaggcagtactgtctgcagtgctacaatcttacaacataatatgtagtactgtcatagtggggaaaagagttctctttgacatcatctatgcccttgagaatactttggttatttgtgtgtggactgcgtaactgagatttaagcaatcacaaaaataaacaggtctctacagaacccaattatatgtgtcttagttgtttcgctggctaaacatttaattatatctaattatttcctgttacttcactgaaaaccctgtcaaataacctagtgacagttttcttgcatcataatttaaaggttatctttttaggcaacgtcaaactaattatggccactgtctagagttttcaaacaaacaaacatactgttattttcatttcagatgcgatctgtgagcagagtgtttaagtttattgatatacaaacagaagaaagtatgtacacacagataattaaagaactacctagagaaggatcatctgacgttttagtcattaagaatgagcatgtgaagaaaagtgatatctggccctctggaggcgaaatggttgtcaaagaccttactgtgaaatacatggatgatggaaatgccgtattagagaacatttctttttcaataagtcctggacagagggtgagatttcagcattacttgctttgttagtgggtcccaactaccagagcaatatgttcgtaaaaaccatttgtaacataattatataatcagtatcccttatacatagttgaaggtgtgactgtgcaaagtttttatgtttcatatgaaatttgaattacagactctacacaacaggttattgtaaatgtgattgtatttgaatgtgactatacttgcaaatatgtaagattttccaactgcagatgcctttaaatacacacagacaccaaaaatacaaccatcactatgaacagtagcaccaaattggttgattggcacagtataaattaatccatcccttaattaacttagatgaaactttaaacttgagtgattttcttgcaggcaatgggtagttatatcttagttctttgggccactctgtcagtccatgtttctcaagtggtgcatttagaccatgagcatctagagtggtaggcacacattcaggcattataacttgttctgctttttgttccttgcttttgctctttatccctatttttaccttgaatccttttctttctgttgctgttccttagtatttatgattccaagactttctcatttcctaacatagcgattctacttttgtggtttttatgagtttctctagaggtcacaatatatattcacaatgaatccaggtccattttaaaagaataatgttatcacataagaggcatcagcaccctgtagtcccaattgctctctcatgtgtgtcatattcttcctatgggtcattttgtgtattcacagataatatgtgcaaatagatgttattaaaatgactttaagtaagcttccctgttagatccagtaagagtaagaaaagcattttagtttctaaaatgcttcctttattcatttagcttcaagtttgcaactccttgtagatctgagttgtgtcttttctctgagtaagttctcttaacatatctttcaagataagcccattgacagcacatagcttctgtgttggtttgataatttcttactttgccataagttttaaaagataactgcacaaggttcacgatcctagtttggcagagttttgcttttcctcttcttttctactcgtttcctgactttgtggtgtccataaagttataagtcattcttatctcaaattgttttgttttgtttttttgagacagggtttctctgtgtagccctggctatcctggaactcactctgtagatcgggctggcctcaaactcagaaatccgcctgcctgtgcctcccaaatgctgggattaaaggtgtgtgccactttaggggaaattttcctgaacataatgccataacttatgctctgagatcaggaatcaacaaattggaccttataaaattgcaaagattctgtaaagcaagggacactgtcaataggacaaaatggcaaccaacatatttggaaaagatctttatcaatcctacatgatagaaggctaatagtcaatatatataaagaactcaggaaattagactttagataatcaaatagctgatttaaaatggtgtaaagagcttaaaaaaaaaagaaagaaagaaaggtgtgtgccacgactgcctggccctcaatatttaataaataatatattttttactgggctttcttcaagaggatttctttaaaaaattttttgtacttttaagatgatatgctgtggtatgggtttttagctttaagcaacattctggttatttttctctgtgtatggattgagtatatgacactaatttttgagggaaccctcttagtaactattatttgaaatatccccctctatctttctcagcatccttttcttctctttttctttcttcttcatttctgtcttctttctctttctggtatctacattatatacaagttacacctttcctaattgtgccatgattcttggatatgctgggggagggggttgtttgttgtgcagaggcatgttggtgttggctgcttttagtaacatatcctcaagctcagggttctttcctcacacatgtctaaactattgttgaactcctcaaggcatcctccatctttgttgtacatggtttttgtttgtttgcttacctgcttgatttttttttttttgctatacttgtagaagtcttttgattttgctttagaatgacgcctttctgtttactaaggatccatctgttactatatgccaattttttcatgatgaaatccttatcacattagtcatagttgttttgcattcccaacgtatgaattagagtgtcattgtcacatctggctttgttctatcctagtattgcttattatttcctcttttccctttcaacatgtctcattgttttttcttgagagggaacatagatgacgtgcttgggaaagggaccgtgataataggctgttagtaatagactggctatgctgtgttggactgtagagttctgtagctgcatagttatgttagagaaattacattttcggctgtgagcttttaaatggcaccagcttagttactttaggtagtacagactggttagagtgagttagcactaaatattactgtttcctaaagtcagttagtctgggcttttggaaaaaaaatctctaagttacaaatgataaaatagtctcactcaagatgggccttaaatgggagaccgtgctctggcctaacagaatgatcactgtcttgtggggtccttgaaagctagggaaacttcctctagtcttcctgtgaggtcactggaggctgacaggaattgtttccctctccatggtccacaatgagcccaggtcatcttctcagtgtagtgcttgtacttgctccctccagctgtctgcttgctggtttctgctggtctctgtgactgtatctgcttgcctttctctctggctctaggggcagagtcattcgttctatggttttacctttctgacagaaaatgtgttgcttacctttttacttaagatggagtgacttttcagttagtggtagcacatacctttaatcccagcacttgagattcctgtgaattcaaggccagcctggttcacagagtaagttccagaacaaccaaggctacacaaaagaccctgtctttaaaaaacaaaaacaaacaacaacacaacccaaaaagaatagcaatgttctctacaaatgaagacatctaaataggtgctggatttgttaaaagtgcaccccattctgcctttatagaatctggcgtgaggctgctgactcatttaacaatctgagtggcccatgtgtcttattaacaataaacagatgtgtcgacatatgagaggctcagttataatcacccatgaatctgatgtttcatttgattgtctgtcttggtttctggggaccacaaggaaacaagataattatagtgcacttccctctgccattaaagtgcagagaaggtgctttaaagggactgtgccccaactgcgctactcttgacacaatggaattcctgctcctacctagtttggcactgaatagctctccagattgtagtctgatttatgttgatctaaattttgcagagctgaggtgcattgaggttaataaaaacgttgactcatacttaggacacatctttaaagcttgtttgcaggaagtactcttagaaataagaagataattagtatgtgacaattactcaaccagacaaccttgttagggtacaaatcaattaagttccttgctgttgaaaaactggtcagacttaatacatgccagcactttgatgtgaggaaactagagcaatagacaaagggtttcaagctaaagaaagtatttattcattgcctctcaggccagtattatgccagcataagaactgagttttctgaaaatgtatttccttctggaggaaatgcagtgaactcatttacccctactaggtccattcaaggtcctttctgccaactatcctgtaatgaacttagcactcttccatcggtccactgtcactttcttttttcctcctgtacatcacctgcactgaccgattctgatttcttatttaacttatttaacattgcagtattggaaaaatcctaacatggtgaatgtgtatttgtatggcatggtctagcacagagatgggagcatgcagtgtgaaattcctccagattttaaaattaatgctttatctagtcattgaacaaaattattgtattatttatttataaggtacaataatatgtatgctcattcatttgctctcctatctgactgtctttcagtccacctcaatatttcttgagtacctttttaaagccaagtacacatgggtccttttattcctccattcttccagccatctcactttcccatcctttcaccctccaatctgactatcagctaatccaagtatttattatttaagtacaccattattccagatggagaaactgaaaaaacaatcaaaacggataaactatgcaacctttgttgaatttatattctttatgtaaatacaaagctacaagaaggagaaaataaatcattacaaaattcttcttcataacatttgtttattttcccaacaacaatgatttatataaattaccttgtagagctcttttgagggttaggaaggcaattattcttgtcactgtcctttaccagcttatcacaaaggcctacattattgccaagtaatttactcagtaaattattattatttccattggttgtggcccatgccaccattggagtttataagttattactagtctacaatgaaataagtatagagtctgtaaatatttagaaattcattttttaatttatttaaagtactgatttgcagttcattaaaaacagatggtttttcaccaaccacatatatgtaaagaacacttttcaaaaagaccattttctccttaaagaggtcaaacaataggaaataaaggggcagtgtgaacagcatgaaacaaatttaagtgttgcatatatactgcagcttattctgtgatcagttagtcattgcaaggaactgagcttatatcataacaaagaatgtgagctttgagggctacctggacaactgatctctgtaatgggaagtagccttaatctgatgctgtgctcttgcagctgtggtctttgcataatgagaacagtttaatatcctttttgcttcttagagtttccttcttgccagaagagtcatatgttagttagcatttgattcaaacattgctgagaagctgagtgatcttggctctcgactcaacctgaattctgtgagaatgtatactttactgaacatgcctgtatcttatcatcaggcctgaacttgacactgctcattccttaagggcagaatccatctgcctcttcaatgccggggcccaatccctggaccttgtacatgctagacaactgtacatgctccaccaatgaggaaataagtttagtccagggacagtaagtagtgttaggcctattttgagtaaacttcaagtttgtatccatattcaaaagtacatcgggcagcaggtccctgcttctggtttgagctgacgtgcatcaagatagactgtttttactcttccttgactttaaatggacactttctccctttttctcattagtaaaagtcagtggtcaatgaagcccacatcaggaatacagttctgtatggccagtttctgatttcagttgcagattatgatgagttccagatcagttccagatagtgatgagaattcggagtgtgtaaacaggcttacgtggctccatgagaagagaacccattccactgctttctgtccaaggagcagtgctgattggataataggtgctatccttggtgcaagagtaatgccatcactttctccttctaggtggggctcttaggaagaactggatcaggaaaaagtactttgctttcagcatttttacgaatgttgaacattaaaggtgatatagagattgatggtgtctcatggaattcagtgaccttacaagaatggaggaaagctttcggagtgataacacaggtgagcacaaaaatgtaaaaagcaatacgaattaacatttttatcattatttgacatacttaagaaattcatatcactctgcaaaatatatttggtgggtcctaccatctcgtctactgtgcaagagaactgtagcatatggaatgagagtacctcccaatgtctggaattctgcgtggtgtatatttcttaaagtgttttgatagtgttctcccaaagcacaatctgtaacagcagcctgggtagttccttgtgcaggcttcctagtcttgcttaagtacttgatctccgagggagtgatagcagcctgtagataaatgctttgcaagatgtggaagatgcttctgagatcataagctctcggaagcaggacatagtggaattgaaagttgaagtgcagtgatgttttccctttggagtctgagtaggaagaagtatgtcaggtcaatctagattcttataaagggcagtgtttgattcaggcagtacagcatctcgaacatcgccatttagtgctattctgtctgtgttactgcacatgctgatttcttgtgtagaggagaaacggcaatggttgcgggcaacatgacccaaatgtgaaccaagagatgctgaagccagaagaattgcagtatttctgctgctgttggcccttttctctgagacttttcctccttttgtgctactagacactaaatccaacccactaagatggctctttgaagcacttctgtatttttaacacaaaattaacattccgggactatcaccaggtagaccaactacaaagctagaccaagaaaatgcttgtacttcttgataaatgatcttcacagaacatttgctcctttcaagtggtgagacaatagatactgtaaccaccaaactgatgctttcaatttgtttctatggtgtgccatttttttcaaatgcttcatcttggctgaagttgtggaaacactgtgtgttcaaaaacacaaaagggattgtcagatggcctaaagaaaaagaaacgctaggagtacaaggttcctgaggtgagagcactagtcgagtaaaaatgctaaggccagtggaagggtgtggttgtctgagaagcactgctgttggacttgcccaggtcctgtgctgccagttgaactaaagcagggtaggctttgccttggttgctcttgttcgaacacattggcctacaagaagcgtcaacctctaaaacttctatcctcttgctcatcatcgtagctgctacacaatagaagggctccgtcttcctcactagctctgcttaggagcttacttatgccaggcacagagtacactgcagtgggccagagctggaaaatctcccctgcctttctgcctaaatgactcttcagacttgactcaattcatgtctgctcttttatggattcaaggcttacatttaaaaaaaaaaaaaagaaaaaaggaaaaaaaaaagtgtgttcagggcatccttcagaaatactgaagggtctctggaacatcagccagcatggttaacatgtctcagtgacaatttttgaatgtcatgtgaaacctaaggaaggaaggagagagagagagagagagagagagagagagagagagagagagagagagagagagagagcaaaccaagtccttatatgcttgatgtctaaactacgggttactttgcttttcctatcttttcttggaacgtgaggattgcagcatgcttctcctttccttagaaagataaaagaaggagaaaagtgaatatccacagaaaactaactagtttggtctgctttttcatcttttcttttctcctctgtctcctttaacaaggatgtacttcagaaggtcccacactgagctagtgtaatgttaaaggttcactggccactggttctcagatacatgaaacaggtattttgaaaagtaccctcttatacagagatccaaaagcatttgctgggcagtcacaaaaggtcctgttggtttggacggttcttaacaattttttccctccttttatagtttagtaactacatagcaatctcagaatacgtgcagcccagaattcagactatcatgtgcattccaaaacagagcctctttcatttgttctgagtcaagcagagcaggcagtgaagccgatagatggcatctgatttactttggcaattagagcaccaagaagaaagcacccactaatgctgcgcctggctaggcagataattaataaaaagcaactattttaaagcttcagttacaattttggaaggctgtaagttcttctgagtaaaggactagaagtttttccttttgttgattactattgtatgtggtatgtgtctgagaggaggggagaatgggtggggtattcatcacgtcatggctcacttggagaggtcagcacacaactttcaggaacaagttctccccttccagcatggcatttagacactggattcaggtcatcagggctgtgtggcaagcgtgagttatccactgagccatctcactggctccttttcttaatgaattgaaaatactcaccatccacccatcattctcaccacagacagaggtgaggcatcttttgttttgaaagagatcagacagcatgtatagatataaacagtgaaattggtggtgacagcttaaaattcactatataaaataattacatcttgtgcttacaattataatatcacagtcattttatttatatcaaatgtagagatactacttgccattaatatgccagagaagttccagtccaacctgtaaacttctaatgagaaactcaaaacgatgttcatagtcgtgtgacagaaattaaaaacagaaacagtaaagccaaagtgagtggctgagagttagtaatgaaaccatagctgcctgtaagctgtgggctaacaagggagtatataggcagagagaactgtccagattaagctagctgtcactcctgccagtacatctgtgtctttcctgtcctgctgttttgtctcccttcttttcttgttttctctctgattgcagaaaacatgtaactgtttactggttagacattatgaattgaggggttttctttctttgtttgttttgggggtatttttttaacacaaatactttgcttgactgcccaaacccagatgggatctcaaaccttgcttatgtatttctgcgtgtagttctaatatgtctcattttcaaattatccacatatctcccttaattatgcaagatttaaacagagtgaccagaaaatggaagcagagttataaaaagaaggatagaaatacatagtaaaatacttttcttctgagttttctccgttgtaagacatctaacataacaccttggatgagaagaattcaaaagacagtgttctatgctgaatcattaaatgttgctgtctctcacatgtgtggttctttcagcatttggaccctaatctgtataatcttaggacagctatataatttctctgtcatagtttccttgtttgtaaaatgagtatagtaataataacaattatttgtactttgggggaaattgaacgagaaatacttaaacttttacttcccacatggcttgataattatcctctgttatggtagttattatttttaattcagtgggggtggggagtcatgtctcctctgtctttctactggactgggggtatgttctatgaataagtatgaataagtatgaataaatgagcttgcacaatttcacaaagaaagttgtaatgaatacatgccatagagtgtcataaagtttataggtttagaatgattgggtacatggagttctaggcaggaagactgtgaacaatcaaaaggataggtcagtgtgaagggaaagggagaagggtcagagggaaccacagcttagagggtattagacgtcatggcatggtccagtaggaaggggctaattctcctgggctgaggaagggaatggagaacgtttggtggcacattgctatatacatgatgaactagcaaatgattatactgtgatgtggttaattagaacttactgaggtagacagttggacagagtgtagaattcaagggagggcagaaaaataactgtcatgtccaattttcaaattagtataacacaatttagctatttcagagactaaactttgaaacctttgattatatgctttggttagaaaacatttttatgtatctttggaaatgtttatactaaaactttgtagtataaaaactgttaggaagctgggcagtggcagcgcatgcctcggcagaggcagtcagatctctgaattcgaggccagcctggtttacagagtgagttctaggacagccagggctgcacatagaaaccttgtctcaaaaaaaaaaaaaaacaacaaagaaaaaacaacctgtaatgaagcactctggatttctagaaaactaaactttaactatcctgtatgcagtcttttatatttaaatcaatagcatatacactggtagtatagcaatctatatttgttacaaactgttaatagttcttagtagaaatatgtcattcataattttatagttgggccacatttcaagggaactattcatgatgtacacatacatacataagcaggggtagtcatttctcctattaatctattttatattaagtgcaatcaccacataagctggattacttttttttcatttgacatctagtactataaagcatattagctgttgcaacgatatatggtcagctgtgggaagtccatgtaggcttagccacttccacagagttgaggagtggaggcagcagctgcagggaggagatgggacatgtggggaacaatgatgatctctttgttctgcttagagtctcaagaactgctcattatagcatacatgacattaaataaatatcaaatatttgcttgccctaactgacttattagtgagtagtttcttttaagggcgacaggggatccctgggatgtgacagcttcaggtgcattttttaattggtgcacagcagatctgagagtgccatgctggccaaatcattccacttctcagggccttcattttgaatatgtaaaccagagagagagggtttaggttgacctccaaagacctttaggttagacagaggagtttgaggatgattaaacagcttaggaaacaagtaagacctctgctggcaccgtgaaggcaagggactgccagattctctttgaattaaaggaatggaatgtctgattgatggtatacaattgaattctagctgaaccggtttctttagttgatttttctttaaaattggatatgttgtccattaccttttaccagacatgaaattatgaaggaaagcctgcaagatttctgagttgtgataaatctaccacacctacagcttctagattcctgacagcttctttccttcataattttgaatgtgtatctgcttaaaataaattagttaaaacatcataaatttagtaaactagtatacattatagattttatgactaaaagttaaataatttctgaagcacccgtaggaatcttcacaggtgtattgggttgttagtgttacacttaaagaactgtgatagctgtgagcatttgggtcacatttagagatctctctctgtctctgtctctctctgtctctctgtctctcacacacacacacacacacacacacggagagggggagggaggagagaaaaagaggaggaggggagggaaggatgagagagagaactttattagccagaaaaatagccttatagaagttaactttcaaatctgaggaaaaacagcatttactctgattgttattattttctacttttacttcttcacgtctgctcactcatttgggacttttgctgagcttattcaaaatttgcatctaaaaaagaaagtaaagacatggccttcgacactcatagatatccacggacttagtaattttctttgatacacactaccgagattgggctccatcttcatatgtaacaaagaataactctgaaactctaatcctcttttttctatttcctgtgtgttggaattaagggcacatactacagtgccaagtttatatgcttctgggataagacccaaggcctcttgcaaattaagtaagcattttttgccaactgagccacatccccaccaactaaacttggtgttatttaaggaatgaaagtataagaaataattggggagcttgtttggtctgaggataaggaacagtgcccctaggaaatgaagcttgatttgaaacctgaaggatatagattgttgtgtgaagatcagggaggataagatttccagctgagaagaaaacttaggtgactaagctaagaaagtgtgtgcttagaatagaatggagtggaaaggagccctgagatcttgggaccatcgtaaggatattgtacccttagtgaaggggaaagtcattgacatttttcatgaattacttgggtatattgtaagagaagcaaaagtataaagaagaagatcaatttaggaagctcctgcagtgacacaaaaaggactagtgatagtttggcatgttcagtgggaacagaaattgagaaagaaattgatttgacatatagtttgaggataatataaatgaccaatgactcatttttaagataagctgaggaataagatgaattatgagtgactctcagttcctgatgtgcactgagatggagatgcagaaaggacaaaagtagggtggcatttctctgctttacaaagcatggggatgaaagagactgggttcctatgagcaactgtctgttttaaagataaaacatcttgtccattcctttcattcttccgggataatgaaattattctgtttgtcccaagtaaatatttctattgtatatttcaactaaatatataactctttcaaagttacagagatgcaaccaaaacaataagaggaaagaaaattattttagacattgacatcaaaaattttttgccagtcttgtatatataaagagtactaaatattatttttaaaatattattacctgagatctcttaagacagtggttttctcttaagcacatggtccacctaagtggaagtgttactgcaagtggagcatcttgacaatggtcatacagtgctatttgcacaccagagcatctgcctcttccctagcacacatgcccctgaacaaacggttgatctatgatcacatgggtttctgagttgtcctttcagcttctctttgttcatagaagtaagaagatgtgtaaagggatgttagtagaagaagagtctcaattcttcccagagcacagtggcctcaatttccttatctcaagggcattgaaataaaaaaaatccaaaaagagttttaaatgttgccctatttttctttaaaatgatgtaaagcaaatgtagaaaagtatgactagctaatgggtaccatagatgataggcagttttacacatctaccagtgtgtgtatgtgtgaatacagaaatgcatgtatactcaccttgtagcacagtgctctagtggatgctcatttgttccttttcttacttgaaattggtttgaataaagagaaaaacattaaaagatgtataggttatttatactttctaattatctttaccattgcagaaagtatttatcttttctggaacattcagacaaaacctggatcccaatggaaaatggaaagatgaagaaatatggaaagttgcagatgaggtaaggatgacaaataaagtagttttaaagaagtagatcatacacacaagtgtggttgccatagatgataggcagttttacacatctactggtgtgtgcatgtgtgaacacagaaatgcatgtatactcaccttgtagcacagtgctctcatttactggcacatccttgtcagaacctttgactcatccccctttcaggagtgtcgctcctttccatatactctattcgtggtgctttactaaagttctatagacccttgctcctagacgacgtatgtttctctcactattttgaagactgagaagtccaaggttaaggagccagcagacagtatttactatctgctaaggccctacttgctgtcactcccgaggtgtttttctgcacctcactcagtataagtggtcagtgagcgctgtggagcctcttttcattatagtgttaattccatctatggggtactcagagcccatgacctaatcacttcctaaacattttattttatgtctcagtagcactgccttggacagtcaggtgttaacatgagtttctgaagacatgcggacctagaactccctcctttcctcccctccaagttatgtcttgttcttatgaaaatagattactccacttaaacaaatgccaaagtcttaacacattttggtgtcagtgtacaactggaaatcacaaagtctcaattcagccaccatgagacttgggactttaggtttttcatgttggcattccaccattccctgcactttgcccattgttgttcccttgatgttcgctcttcggcctcccccagaacagatcttgccaggagctttgaagcctctgagtgctaaatgctaaccccttgagtaaccaaccttaaccttctcctaataaaatgaactgagattaaccgtttttcattatcagggtttccttattacccagcaaacacaaggtttttaaagaaaacattaactaaattgctagtgatatactgtaagatccttgatgtacttttacagagtgacctgtcagaatacagtgtgctgggagagagcttgggaaagaaggaattagcctttgtaaagcttaccaggtattgccaagtctccataaaatttgcaggaaactgagatcataaaatcatctaaaatgttaggagataggtttagaagactttagattccagaataatacaggtagttatgtgattagattttgtctaccagtccatctttagatgtacgttttcattggattctctttttaaatttatgttcataaagatgctgctcctgagctaaccgtaatgtcccatggtttgagtaagagtgacaaattttttgctgaagagtccacaaagaaacataaacaccaacccctagcttacagcagcaggcaggagatttaggttaaaggcaggaatcctaggctttaatcctgtatggttgatgatccaatatagtcaaataggaacacgttgaggtgtgtcagcctactaaggcactaggacaaaagtctaaccttcctgccctggttcatggcagcttgctgccctattcagctctggggatctttctttttttttttaatttttttatttaaaacaattttttaaatattttttattacatattttcctcaattacatttccaaagctatcccaaaagtcccccataccctccccccccacttccctacccacccattcccatttttttggccctggcgttcccctgtactggggcatatacagtttgcgtgtccaatgggcctctctttccagtgatggccaactaggccatcttttgatacctatgcagctagagtcaagagcttcggggtactggttagttcataatgttgttccacctatagggttgcagatccctttagctccttgggtactttctctagctcctccattgggagccctgtggtccatccaatagctgactgtgagcatccacttctgtgtttgctaggccccggcatagtctcacaagagacagctacatctgggtcctttcgataaaatcttgctagtgtatgcaatggctttctaaaggctgcatctttagcctacttctcacccctccctgtgctgctgctggacagggttcctgttgtacactgactgcttaaaggacctttatgatttggtctttgctgctctactttcagccccagcccccatgtgtcctgtgagtccactactgtgaattttaattttctttagagcacagtgtgctgctctctgttctatggtacgggttggggcagttgtttctgctttttaccttctggtttctggacctgggaaacccttgcagagcactactcctgctccttctcaccattcaagccttccttcacacatcactttgttctgaactccatcctgaccctcctgctttgggaaaagagactttcctaggtatagctatgcctcggctcctcaaaatttcctacactgaatcaaaattcacctcttggctactccatatctcctatgattatggaatcatgccctgctctctgttgttcctgcagtagttggatccctgggtggtttttgataagtactgactgaatgatctgagcaagtaaagaattcttttaactcatgtaaaatatgttgtgaaaatatcctcatgcttaatgcccaatagacattactaccttcatctcagtaaaggtcttgcaagatggctggcggattctgaaaagaactgcagccctgacttggggccctctgctgttttagccctactaagctatgtgatcttggccccttgactctggctcttagatgtggggactttgtttgtttgtttgtgtttccttattagaataatttttaaatttatcatctttacatcctaatagtcaagggaactgttgtagagacaatttaaatagcagaaacagggaccctgtaagtgggacatttccctgagaagtttgcagaatggaaacacaaggagctgagggtatccatttttacattgcccactagtgcttacaggcaaagcataatccaccttttttactgaaaaaaaaaaactgtcatagaaaacaaaaatcctacaaatacttctgagtagtttggtatagagtactgatttatctaaacatatttgaatacttttaactttgttatttgatggatggtcatagagttaaagatttacagagtacagtatataatttctgagctaaaactagcactaattcattcattcttaagttctaatgcttaaagactcatagtacatattaaatgaatgactgaaaggaagatgaatgaatgaatgaatggattaataaatatatgaatgaatgaatgaatgaatgaatgatgaattgttgaggctgagagtgttcctaactgaaaaacacatatttgctttcaagaaatgtatggtctaacagggaaaaaatacacaattctaatacaggatgcctggctgtcctgtgggtaggcaaggatatttaagagagtaatcagactgagcagaaggacaaaccctgagaatgttaagctgtataaagaattaaaagttgatgctgctggacacagtagtaggtgtgtgtgtgggggcggaggaggtcaggatgtcctgtgggccacatgagaacaattatattttatttttccagtaaaagaacttctgtaggatttaaaacagagaaatgatccaagttcaaacctgcattttagggagagctcttaaatatttctgtgacatgttgacaatttgactcattgatacttgcagtatgatgtttaagaaatgacagaaggccagacgaggatcagtgtgccagaactgacaaaaagaacggtttcagaaaccctgggggaacttctaggctggagagaggcattgaaagccattagcttaaacatacacattgatgccatgtacataaccaaaatctggacacaggaggggaggggacattggtgttgaaacctgatatggatgggacaaagctgtatagtatagtatcccctgtgatacaccaggcagtcttccttgtcttctgtgcctacattccctactatctcaggaaccttttaaacattaacgagtttacacaaagggtagttttaacaagccacatgtttgaacttccataatgagcacataagagtctggcattaacaatgatatgagccacttctgaactcatctccaaaatcatgaatctttcttaaggccttatctaactctgcacatgttagagtgatatgggtatatatcttacctgtacatacaaaattccagattcatgaagcacaagaaacaatcctgtctgtatttatttaactcttatacacctagtggttcttagcaaagaagacacaatgtacatgtattgaataaggaaaaaccaccaagacatctataattatgccttaattttgacagactactttttgatctttttattaaaccccctttaaaattgcagtttaaaaatataagccattaattctaaaataatcttcatattctaccctaacaataagagcctttaaattttagtcgtgttccatttttaactaagtaacttcttactttatgagaaagttatcagtttctcagattttataagtgaaggagataagtattatgatggcatgatttttttaaagcctcctcagctaattttcatgatatttctcatcctgtattacagatagaagatgaacatgtcatgctatgttttctaccctttctgctcttgaatcctttgccatcagttataatggagtgaataactgtgttctctatctgttatctttaaagcccatattgaattgtattgcaattgcatctatccatctatctatatctgtatctgtacctatccatctatataatgtgacaggaataggtataattgtttatcactgctagggaacatgacacttacaaggtgaacactgaatgattttgtaatcaagtgtggggctgaaagaaatcctccagtctgtttagagctaccgatattattgccagattttggttactcaaactaagtaggagttgggagttgagggtgatgtgaaatttattctgtgcaaactcatgtctgcttttagaatgcaagcctcttaagtgattttagttatgccccttctaagcacagtgtttttctttattttctacaggttggactcaagtctgtaatagagcagtttcctggacagctcaactttacccttgtggatgggggttatgtgctaagccatggccataagcaattaatgtgcttggcccgatcagttctcagtaaggccaagatcatactgcttgatgagcccagtgcccatctagaccccatgtaagttccaaaaatctttagataatcatgcaatagaagtagagtccttgaagttacctcatattggtacaaattcccattcagctaccacacctacaagtagggggtacaaaataattttccaggggaaaaatcactatttaacatgagcacaagtacttttttttttttcaacaagagctttgtttttcctcctgactggagtctggaatttataaacccttcaacctcattaacacataataaatacttagttaggtatgcacacacttatggcttccctctgtatcctatttatatcataaatacattaacagcacaaaataaataactgatgctgaatctacataaaatgtagtctcatttttatgaaattttcttctaagcatttgctttattagtgtatgaaattatattaaatacttagaatggcttaaaagctgattgtagctcattctgtatcatcattatcctaaaagtatttttaagtaaagaattaagtccatagaatactatacgtattgtcaaagataaaggcagaaaattcacactctataatgtcttatgtggtattttcttgctttgctagaacataccaagtcattcgacgagttctaaaacaagccttcgctggttgcacagtcatcctctgtgaacacaggatagaagcgatgttggattgccagcgatttttggtaagtcatttacacttgattgatatctcattctccatttatttaaataatcctgcacagctggatttgcacaccctttcttcacacttatgtcacacatttaccacctaccctcagtctctttccctggacttgagctatgaagtggtgaggaaatttagcacacttctctggtatcatatcactaaacgacactgtagataaggtaactatgctttcagatcttttgtggcgaacaagtcacaaaatgtacaattgaaaaaaaaaatgtctgtttcttacagtaactcagcttcccatggggaagataagggtgggccttaccattagtggttcaatgtagtaggagagaagcctgttccatcatccccattactactggaactcagggtagtgtccctgtcagacaccttctcattctccccccgcccccaaaaaaaagtcactgttcctgtttagacatgggaagttccaaggatcatgtaaaatttttactttcccaaggcttttgaatattctggaggtaaatgcttttttactgaagcacttttgatcctattgttattgcccagttacaagtgcctagagagtagatgcatctcttgttctgtggtggtcaagtacagggactaggtaaggggctctactctctgacctcaagcttgcaaacagtttaacatgcactgaaggcgttattctctgtcattcctggccaatttgaaacctttcggcctcaaccccaggtatgaggaagctcaaagttaatggttatatatagctcggtttaagagtgcgtgggtcattgattattttgctttgcaaagctccttcagttcctcaactgttctctgaaggatggcaacagctagtattacattaatttttcaaatccctatcgctactttcccggatgtgaaagctaagagaaaagtacaagctctgaatcctgtgctttctttggacttttgttcttctttgggcctggctcagtttatgtgtcagcactggcctgctcttcactcagaggtctcactaatgccctctcccttaggtcatagaagagagcaatgtctggcagtacgactcccttcaggcacttctgagtgagaagagtatcttccagcaggccattagctcctcggaaaagatgaggttcttccagggccgccactccagcaagcacaagcctcggacgcaaattactgctctgaaagaggagacagaagaagaagttcaagaaacccgtctctagtgctgggatgctgaggaagcaactcagtgcactgagtccattcccagaacccatgcagaatgaaaaaagccaggcatttcccatgcttctaaccccagtgctggggacacagagacaggtggatccctggggctctgtggcaagtgatcctagcccacaaagagagttccaggctgggcacctgagggacaatacctgtggatatactcttgcttccacatgcaagtacatatacacatgcatgcacattagtggacatacacacagaaaagcaaagaagaaggaaagagggaagaaaatagtgcaaataattgcaaaacgatcatgtatggagtctgctcatggacttagaggaggtgaactctactacctgtgcctttgaaagaagggtgaagcctgcgacttgctctttaagagactgttttggaagagagttcaaaaacgttcatatgggtatgggtaactgactttccagcagtagtcaaattgtttgaacttcagatagttgataatgaccacttgtgtattgcaaggcagatttttctgaaaacatttgccccctaatagtagctgaaaaagcagctataaatgccaaccaggttagtcattcggcttattgttcagtacagctggttaatttgcattattgaagaactgaaattatagtgcttagatataggacaaagtaaagagaactaaaaacagtgtcttatataactcaaagcccaacttactttcctctaagatatgtattgccttctatacattgtctgccccattccaagcaaatgttagaatattatacaaaatactgggtggtattgattgaaagatgcccgacatctggtgatctagtaacccatcaggattaaggatatccaggtcttggaaattaaggttaagaccatctagccttactaccgtacagctaaacattcttattaccagaataagacctaggaaaagaactgtttcagtcccataaagtggcctggataatttccttgatatggaaatcgacacacttatgttcccagaaagcaacagatctttaagacttctgaagtgaaggaaggttgtgttagtgcaaactagtgcagcccagtgccaggtccaggagttaacatgtagacaggccatggactgtgtgggtagatgctcatggaaatgtgcagtagtatgttcatgtgctctcagctagctgtgtgtacttcaaactgtctccacagagttgttggggagacactctgaaaaagaattaattgtgaattagttttatatactttgttttataatttgtgatgcaaatgaaaatttctctgggaaatatttattttagtaataatgtttcaaactcatatataacaatgctgtattttaagaatgattacataatgacttatatttgtataaaataatttttatatttgaaatgttaactttttatagcactagctattttaaaacaggggagtgaggaggacagggatgataaggatcattcaacttcatgttgtgaagacgagctgatgtaaatcttgtacccatctgtgtggttctcagacaacacatgctctcttttaatgcagctttgaagaagatggtaccaaaggttaagacggccccctgatgggcacatcaacttctgaactgcaaactaagctttagaggaatgtattatatttattactgtaatagaatatcatgtgtcaataaaatccttttatttgtgtgaaactcatctgttttcagatatattcattgggattcctagctctggaattcctagctctactctctatgattcttagaacacaaacattccttttagatataatctctttgagaatcccagttgaattagagcacaagacattaagttgggtctctaaacccaactagattatttttgtcaatttgatgcaagatagaattatctaggaaggggaacctcagttaacaaaatacctccaacaggttcactgtaggtgaatctggagttcattttcttgattgaaattcatgtgggaggatctagatcactgtgagctacaacacccagattggtagtcctggatggtgcaagaaattgggctgagcaagccatggggaacaagccaacagcatctcctccacagtctctattttagttcctgctttgagtccctcaaggatgaactataaaatgtaagccgaaataaaccctttccttcccaatttgctctttgtcaatgtttatcataagaatagaaacttacccagcacagtgtacaacagagctcattcttgatggggtgctgtactggctgcttttctgtgtcaacttaacacaagctggagttatcacagaaaaaggagcctctcttgaggaaatgcctccatgagatccagctgtaaagcatacactagcattttctcaattagtgttcaaagggggaagggcctagcccctggtgggtggtgccatccctgggattagtagttttggattctataagaaagcaagctgagcaagccaggggaagcaagccagcacacaacattcctccctggcttctgcatccaagtttctaccctgtgtgaattcctgtcctgacttcctttgatgataaacagcaatttggaagtgtcagctggataacccctttcctcccaacttgcttcttggtcatgacgtttttttgcaggtatagaaaccctgactaagggtcaccttgggcgcaaactcagctggatgatcccgcagcccctagaggactctctatgcaatcttaggatcactggtgaatggaacacatcatcggttccaatccaatcatgccggacctgagccagcaagcagggaagcagaaaacccacctgaccagggccttagtcccttcccattggcaccagctccaggtcgccttggtcgggaactctttgggggaaggtcccacagtccccagagggcgctccatgagatcttaggatcactggtgagtggaacacaacatctgttccacaccaattgtgacaggtctgtgacagcaggagcaaagacacgggagccttgcctgaccagaggcttgggttccttctgatcagtactggtacaccttggtttcaaacacaccagacagccccacagtcctcagaggagacacctcttccaggcgctgtaacacacccagaatcttaggattccaggatcccaggataacagcagcttgatcacaccaggatctcaggttctcagaagaagcttaactgccaagaactctgacacagccagaatctcaggttcccaggagcccagaatcacaggatcacagaaaaagctagactctgaggagtcctgaatcaaccaggattataggaagaacaagctccaatcagatatattaagggcagcaaccacttgagataatcagatggcgggaggcaagcataagaacagaagcaacaaaaaccaaggtttcttggcatcatcagaaccaaactctcccaccatagcaagtcctggatacaccatcataccagaaaagcaagacatggctctaaagtcacttctcatggtgatgatggaggactttaagaaagaaatacagaaaaacacaggtaaatagctagaagctctcaaagagttacaggaaaacactaccaaataggtaaaagaattgaacaaaaccttccatgagctaaaaatggaagtagaaacaatgaagaaaacacaaagggagacaactctgaagatagaaacgctaggaaagaaagcaggaaccatagatgtgtgcatcagccacagaatacaagagatggaagagagaatctaaggggcagaagattccatagaaaacatggacacaacaatcaaagacaatgcgaaatgcaaaaagatcctaactcaaaacatccaggaaatccaggacacaatgagaaggccaagcctaaggataggaggtatagatgagaatgaagattttaaacttaagggccagtaaatatcttatacttacaaacaaaattatagacgaaaacttccctaacctgaagaaagagatgctcatgaacatacaagaagcctacagaactccaaatagactggtccagaaaataaattcctcctgacacataataatcagaacaacaaatgcactaaataaggatagaatattaaaagcagtaagagaaaaaggtcaagtaacatataaaggcatatctatcagaattacaccagacttctcaccagagactatgaaagccaaatgatcatggacagatgttatacagacccttcgagaaaacaaatgccagcccagcaaaactctcaattatcatagatggagaagccaaagtattccatgacaaaaccatattcacacaatatctttccatgaatccagcccttcaaaggataaagagaaaactccaacaaaaggagggaaaaagcacaaaagtaatcattcaaccaacctaaaagaagacagctgcaagaacagaatcccaactctaacaacaacaacaaaaacaggaagcaacaattacttttccttaatatctcttactatcaatggactcaattctccaataaaaagacatagactaacagactggctacataaacaggacccaatgttttgctgcatacaggaaatacacctcagggacaagacagacactacttcagagtaaaagctggaaaacaattttccaagcaaatggtgtgaagaaacaaactggagtagccattctaatatgaaataaaatcaactgccaacccaaagttatccaaaacaaggaagggcacttaatactcatcaaaggtaaactcttccaagatgaactctcaattctgagtatgctccaaatgcaaaggcatccactttcattaaagaaacttgggtaaagatcaaaccacacattgtaccacacacaataatagtgggagacttcaacacaccactctcatcaatttacagatcctggaagcagaaactaaacaaagacacagtcaaactaataagttatgaaacaaatggatttaacaaatatctacagaacattttatcctaaaacaaaaggatataccttattcctggtaccttctccaaaactgatcaataatcagtcacaaaacaggcctcagcagatacaaaaatattgaaatgatcccatctatcctatcagatcaccacggactaaggctgatattcaataacaacataaataatagaaagccaacattcatgtggaagctgaacaacaatctactcaatgatacccttgtcaaggaagaaattaagaaagaaattagacattttagagtttaatgaaaatgaagccacagcatacccaaacttatgggacacaatgaaagcagtactaagaggaaaactcatagccctgagtgctgccaaaaaaactagagagagcacacactaacagcttgacaggacacctaaaagctctagaacaaaaagaaacaaattcacccaaaaggagtataaggtaggaaataatcaaactcagggctgaaatcaaccaagtggaaacataaagaactattcaaaaaaatcaaccaaactatgagctggttctttgagaaaatcaacaagatatataaactcttagactaactagagggcacagggacagtatcctaattaacaaaatcagaaatgaaaagggagacacagcaaaagaacctgaggaaatccaaaacatcatcagatcctactaagggccatactcaacaaaactggaaaatgtggatgaaatggacaaattcctagacagataccaggtaccaaaattaaatcaagatcagattaatcagattaattatctaaacagtcccatagcccctaaagaaatagaagcagttattaatagtgtcccaaacaaaaaaagcccagggccagatgggtttagtgcagaattttatcagaccttcaaagaagatctaattccagttcttctcaaactattccacaaaacagaaacagaaggtactctccccaattcattctatgaagccacaattactctgatacctaaaccacacaaagacccaacacagaaggagaacttcagaccaatttctcttatgaatattgatgcaaagatactcaataaaattctcgctaacagaatccaagaacacatcaaaaaagatcatgaattatgatcaagtaggcttcatcccagggatgctttaatatatacaaatccatcaatgtaatccactacataaacaagctcaaagacaaaaaccacgtgatcatctcattagatgctgagaaagcgtttcacaaaatcatgataaaaggcttggaaagatcaggaattcaaggcccatacctaaacataacaaaagcaacatacagcaaaccagtagctaacatcaaagtaaatggagagaagctggaagcaatcccactaaaatcagggactagacaaggctgcccactttctccctaccttttcaacatagtacttgaagtattagccagagcaattcgacaacaaaaggagatcaaggggatacaaattggaaaagaggaagtcaaaatatcactttttgcagatgatatgatagtatatataagtgactctaaaaattccaccagagaactcctaaacctgataaagagcttcggtgaagtagctggttataaaattaagtcaaacaagtcaatggcctttctctacacaaagaataaacaggctgagaaagaaattagggaaacaacacccttttcaatagtcacaaataatataaaatatctcggcgtgactctaactaagaaagtgaaagatctatatgataaaaacttcaagtctctgaagaaagaaattaaagaagatctcagaagatggaaagatctcccatgctcatggattggcaggatcaacattgtaaaaatggctatcttgccaaaagcaatcaacagattgaatgcaatccccatcaaaattccaacacaattcttcaacgaattagaaggagcaatttgcaaattcatctggaataacaaaaaacctaggatagcaaaaactcttctcaaggataaaagaacctctggtggaatcaccatacctgacctaaagctttactacagagcaattgtgataaaaactgcatggtactggtatagagacagacaagtagaccaatggaatagaagtgaagacccagaaatgaacccacacacctatgatcacttgatcttcgacaagggagctaaaaccatccagtggaagaaagacagcattttcaacaattggtgctggcacaactggttgttatcgtgtagaagaatgcgaattgatccatacttatctccttgtactaaggtcaaatctaagtggatcaaggaacttcacataaaaccagagacactgaaacttatagaggagaaagtggggaaaagccttgaagatatgggcacaggggaaaaattcctgaacagaacagcaatggcttgtgctgtaagatcaagaattgacaaatgggacctaatgaaactccaaagtttctgcaaggcaaaagacaccgtcaataagacaaaaagaccaccaacagattgggaaaggatctttacctatcctaaatcagataggggactaatatccaacatatataaagaactcaagaaggtggacttcagaaaatcaactaaccccattaaaaaatggggctcagaactgaacaaagaattctcacctgaggaataccgaatggcagagaagcacctgaaaaaatgttcaacatccttaatcatcagggaaatgcaaatcaaaacaaccctgagattccacctcacaccagtcagaatggctaagatcaaaaactcaggtgacagcagatgctggcgaggatgtggagaaagaggaacactcctccattgttggtgggattgcaggcttgtacaaccactctggaaatcagtctggcggtttctcagaaaactggatatagtactaccggaggatccagcaatacctctcctgggcatatatccagaagatgccccaacttgtaagaaggacacatgctccactatgttcatagcagccttatttataatagccagaagctggaaggaacccagatgcccctcaacagaggaatggatacagaaaatgtggtacatctacacaatggagtactactcagctattaaaaagaatgaatttatgaaattcctagccaaatggatggacctggagggcatcatcctgagtgaggtaacacattcacaaaggaactcacacaatatgtactcactgataagtggatattagcccaaaacctaggatattcaagatataagatacaatttcctaaacacatgaaactcaagaaaaatgaagactgaagtgtggacactatgcccctccttagaagtgggaacaaaacacccttggaaggaggtacagagacaaagtttggagctgagataaaaagatggaccatgtagagactggaccggggatccatcccataatcagcttccaaatgctgacaccattgcatacactagcaagattatgctgaaaggaccctgatatagctgtctcttgtcagagtatgcctgggcctagcaaacatagaagtggatgctcacagtcggctattggatggatcacatggcccccaatgaaggagctagagaaagtacccaagaagctaaagggatctgcaaccctagaggtggaacaacattatgaactaaccagtaccccagagctcttgactctagctgcatatgtatcaaaagatggcctaggcggccatcactggaaagagaggcccattggacacgcaaactttatatgccccagtacaggggaacgccagggccaaaaaaggggagtgggtgggtaggggagtgggggtgggtggctatgggggacttttggtatagcattggaaatgtaaatgagctaaatacctaataaaaaatggaaaaaaaaaagaacttcaagtctctgaagaaagaaatttaagtagatctcagaagatggaaagatctcccatgctcatgttttggcaggatcaatatagtaaaaatggctgtcttgccaaaagcaatctacagattcaattcaatccccatcaaaattccaacttaattcttcaccagttagatagtgcaatttgcaaattcatctggaataacaaaagaccaaggatggcaaaaactactttcaacaataaaagaacctctggtggaatcaccatgcctgacctcaagctgtactacagagcaattgtgataaaaactgtatggtactggtaacagtgaccaacaggtagatcaatggaatagaattgaagacccagaaatgaaagcatatacctctggtcatttgatctctgacaagggagctaaaactatccagtggaaaaaaagacagcatttttcaacaaatggtgctggctcaactggtgcttatcatgtagaagaatatgaattgatccattcttttttttctttttctacgtggatcaaggaactccatataaaaccagagactctgacacccctaaaggagaaagtggggaagtgcctcgaagatatgggcacaggggaaaaattcttgaatagaacaacaatggcttgtgctgtaagattgagaattggcaaatgggacctaataaaactgcaaagcttttttataaggcaaaatacactgtcaataagacaaaaaggtcaccaacagtttgggaaaggatctttaccaattctaaatctgataggggactaatatccattatatacaaagagctcaagaagctggactccagaaaatcaaataaccctattaaaaatggggtacagagctaaacaaagaatcctcaactgaggaataccgaatggctgaggagcacctgaaaaaatgttcaacatccttaatcattaaggaaatgcaaatcaaaacaaccctgagattccacctcacaccagtcagaatgtttaggatcaaaaattcaggtgacagcagatgctggtgaggatgtggagaaagaggaacactcctccattgctggtgggattgcaagctggtacaaccactctggaagtcagtctggcggttcctcagaaaattggacatagtagtgccggaagatccagctataccactcctgggcatatacccagaagatgttccaactgttaataaggacacatggtccactatgttcatagtagccttatatataatagccagaatctggacagaacccagatgtccctcaacagaaaaatatggatacagaaaatgtggttcatttacacaatagagtaatactcagttattaaaaacaatgaatttatgaaattcttaggcaaatggatggatctggaggatatcatcctgagtgaggtaacccaatcataaaaggacacacatgatatgcactcagagataagtggatattagcccagaaacagaatacccaagatacaatttgcaaaacacatgaaactcaagaagaaggaagaccaaagtatggatacttcgccccttcttagaatggggaataaaatagccattaatggagttacagagacaacgtttggagcagagtctgaatgaatgaccatccagagactgacccacttggggacccccccccccgataaacagcaaccaaacccagacactagacagatgccaacaagagcctgctgacagaaccctgatatagctgtctcctgtgaggctctgccatgcctggcaaatacagaagtcatccattggagagagcagaaggtccccaatgaaggagccagagaaatactcagggagctgaaggagactgaagccccatagaaggtacatcaatatgaactaaccagtaccctcagagctccttggaactataccaccaatcaaagaaaacacatggtggaatatgtggctctagctatatttgtagcagagaatggcctagtccgtcatccatgggaggataggcccttggtcctgtgaaggctctatgccccagtgcatggaaatgccaggaccaggaatgggagtgggtgggttggggagcagggggagaggggatggagtaggggattttcgaaggggaaactaggaaaagggataacatttgaaatgtaaataaagaaaatatctaataaaaaaagaaaagaaaaaagaaaccctgactaagacaggtactgttacaagttttggccaatgtgtaaagagatgtgcagccatcatactggctattttctatgccctgagagttctctgtgtcctcagtgtgcttcatcactcccacccaacacctggtaacttctggtgtcttcctgctttagaccttgctctgcgaggtatgatgatgatagcattgagctgcatgcagtcctttaaggccagcttctttcccatagcaataagcactgtttctctatgtggttttactgcatgatggctcattgatttttgttgttgaataacatgcccctgtctggatatattgacgtttattcacctactgaaggacctcatgtttttccttggttcattcttattcattgtgacaatcttgaataaagctgctaaaagtatagggagggagagatggagagaaagcgtgggaggggaggagagaaggctaggaggagggaaaagaagaagatcataaggaaggaaaggtactagaaaagaggaaagatgagaggcatgaggagacatgagacttgagaggaaggagagcagagaggtagaaaagaacaaggcaaaggcagaaaggatgagccctgggagctccgggaggacaatctgaaaggaaacatttgggagagagcaagagctaaggtggatgtactgtggtattagccacactatgagttcaacttagcacataccttagcatcaaggtgctgcatgtcatcttgtacgggtagtttcataaccatttaaaaagagacaaaatcctgcccctcacaaaatataaaatatttacactcttagtacccatttccagagaaaaagagtgaagtaccctgaagtctgtacttgaaatctgtctggaagtgtttccttgttagtttggggtttctcccctgtcctaaggttaagcgctgagcatcttcatttcctctgtgattgactacaggttgtctggggctctctggacctttgtggcaccttcaaagcctgttctcttggctcctttggattttcatcgctttcatttgaagtttgggtttgccctctgtgttctgtgcgtatcttgttcaatgtcgtcaaggttcagcttcaagtctcactgcggagggagcagacattctgatcactgcatttctttttttcttttttatttgtattagatattttctttatttatatttcaaatgttatcccctttccttgtttcccctccgaaaaccccctatcctctccctccttcctctgctcaccaacccacactccagcttcctggtcttggcattcccctatactggtccatcgagccttcacagaccaagggtctctcctcccattgatgaccaacaaggccattctctgctacatatgcgactggagtcatggtactctttggttggtggtttactccctgggagttctggggttgctggttggttcatactgttgttcctcctatggggctacagaccccttcagctccttggattctttctctagctcctccattggggatcctgtgcttagtccaatggttggctaagagcatccacctctttatttgtcaggcactggcaaaatctctcagaagacagctatatcagtctcctgttggcaaacacttgttggcattcacaatagtttctgggtttgatagcagtgtatgggatggatcccaaggtggggaagtctctggatggcctttccttcaatctctgctcaacactttgtctctgtatctcctcccatgggtattttgttcccctttctaagaaggaccgaagtatccacactttggtcttccttcttcttgagtttcatgtggtctgtgaattgtttcttgggtattctgagcttctggtctaatatccacttatcagtgagtgcatgccatgtgtgtgcacatgttttgtgattgagttacctcattcaggatgatattttctagttccattcatttgcctaaattcataaattcattgtttttaatagctgagtagtactccattgtgtaaatgtaccacattttctgtatccattcttctgatgagggacatctgggttctttctagctcctggctattataaataaggctgctacgaacatagtggagcatatgtccttattacatgttggaacatcttttgggtacatgcctaggagtggtatagctgggttctcaggtagtactatgtccaattttctgaggaactgatttccactctgatttccagagtggttgtaccagcttgcaatcacaccaacaatgaaggattgttcctctttctccacatccttgccagcatctgctgtcacttgaggttttgattttagccattctgactggtgtgaggtggactctcagggctgtttagatttgcatttccctgatgactaaggctgttgaacatttttccaggtgtttctcagccattcggcattcctctgttgaggattctttgtttagctctgtaccccatttttaatagggttatttggttctctggagtctaacttcttgagttctttgtatatattggatattaacgctctgtca

SEQ ID NO: 815178 - DNA, 176083 bp, Mus musculus
tgacagagcgttaatatccaatatatacaaagaactcaagaagttagactccagagaaccaaataaccctattaaaaatggggtacagagctaaacaaagaatcctcaacagaggaatgccgaatggctgagaaacacctggaaaaatgttcaacagccttagtcatcagggaaatgcaaatctaaacagccctgagagtccacctcacaccagtcagaatggctaaaatcaaaacctcaagtgacagcagatgctggcaaggatgtggagaaagaggaacaatccttcattgttggtgtgattgcaagctggtacaaccactctggaaatcagagtggaaatcagttcctcagaaaattggacatagtactacctgagaacccagctataccactcctaggcatgtacccaaaagatgttccaacatgtaataaggacatatgctccactatgttcgtagcagccttatttataatagccaggagctagaaagaacccagatgtccctcatcagaagaatggatacagaaaatgtggtacatttacacaatggagtactactcagctattaaaaacaatgaatttatgaatttaggcaaatgaatggaactagaaaatatcatcctgaatgaggtaactcaatcacaaaacatgtgcacacacatggcatgcactcactgataagtggatattagaccagaagctcagaatacccaagaaacaattcacagaccacatgaaactcaagaagaaggaagaccaaagtgtggatacttcggtccttcttagaaaggggaacaaaatacccatgggaggagatacagagacaaagtgttgagcagagattgaaggaaaggccatccagagacttccccaccttgggatccatcccatacactgctatcaaacccagaaactattgtgaatgccaacaagtgtttgccaacaggagactgatatagctgtcttctgagagattttgccagtgcctgacaaataaagaggtggatgctcttagccaaccattggactaagcacaggatccccaatggaggagctagagaaagaatccaaggagctgaaggggtctgtagccccataggaggaacaacagtatgaaccaaccagcaaccccagaactcccagggagtaaaccaccaaccaaagagtaccatgactccagtcgcatatgtagcagagaatggccttgttggtcatcaatgggaggagagacccttggtctgtgaaggctcgatggaccagtataggggaatgccaagaccaggaagctggagtgtgggttggtgagcagaggaaggagggagaggatagggggttttcggaggggaaacaaggaaaggggataacatttgaaatataaataaagaaaatatctaatacaaataaaaaagaaaaaaagaaatgcagtgatcagaatgtctgctccctccgcagtgagacttgaagctgaaccttgacgacattgaacaagatacgcacagaacacagagggcaaacccaaacttcaaatgaaagcgatgaaaatccaaaggagccaagagaacaggctttgaaggtgccacaaaggtccagagagccccagacaacctgtagtcaatcacagaggaaatgaagatgctcagcgcttaaccttaggacaggggagaaaccccaaactaacaaggaaacacttccagacagatttcaagtacagacttcagggtacttcactctttttctctggaaatgggtactaagagtgtaaatattttatattttgtgaggggcaggattttgtctctttttaaatggttatgaaactacccgtacaagatgacatgcagcaccttgatgctaaggtatgtgctaagttgaactcatagtgtggctaataccacagtacatccaccttagctcttgctctctcccaaatgtttcctttcagattgtcctcccggagctcccagggctcatcctttctgcctttgccttgttcttttctacctctctgctctccttcctctcaagtctcatgtctcctcatgcctctcatctttcctcttttctagtacctttccttccttatgatcttcttcttttccctcctcctagccttctctcctcccctcccacgctttctctccatctctccctccctatacttttagcagctttattcaagattgtcacaatgaataagaatgaaccaaggaaaaacatgaggtccttcagtaggtgaataaacgtcaatatatccagacaggggcatgttattcaacaacaaaaatcaatgagccatcatgcagtaaaaccacatagagaaacagtgcttattgctatgggaaagaagctggccttaaaggactgcatgcagctcaatgctatcatcatcatacctcgcagagcaaggtctaaagcaggaagacaccagaagttaccaggtgttgggtgggagtgatgaagcacactgaggacacagagaactctcagggcatagaaaatagccagtatgatggctgcacatctctttacacattggccaaaacttgtaacagtacctgtcttagtcagggtttcttttttcttttctttttttattagatattttctttatttacatttcaaatgttatcccttttcctagtttccccttcgaaaatcccctactccatcccctctccccctgctccccaacccacccactcccattcctggtcctggcatttccatgcactggggcatagagccttcacaggaccaagggcctatcctcccatggatgacggactaggccattctctgctacaaatatagctagagccacatattccaccatgtgttttctttgattggtggtatagttccaaggagctctgagggtactggttagttcatattgatgtaccttctatggggcttcagtctccttcagctccctgagtatttctctggctccttcattggggaccttctgctctctccaatggatgacttctgtatttgccaggcatggcagagcctcacaggagacagctatatcagggttctgtcagcaggctcttgttggcatctgtctagtgtctgggtttggttgctgtttatcgggggggggggtccccaagtgggtcagtctctggatggtcattcattcagactctgctccaaacgttgtctctgtaactccattaatggctattttattccccattctaagaaggggcgaagtatccatactttggtcttccttcttcttgagtttcatgtgttttgcaaattgtatcttgggtattctgtttctgggctaatatccacttatctctgagtgcatatcatgtgtgtccttttatgattgggttacctcactcaggatgatatcctccagatccatccatttgcctaagaatttcataaattcattgtttttaataactgagtattactctattgtgtaaatgaaccacattttctgtatccatatttttctgttgagggacatctgggttctgtccagattctggctattatatataaggctactatgaacatagtggaccatgtgtccttattaacagttggaacatcttctgggtatatgcccaggagtggtatagctggatcttccggcactactatgtccaattttctgaggaaccgccagactgacttccagagtggttgtaccagcttgcaatcccaccagcaatggaggagtgttcctctttctccacatcctcaccagcatctgctgtcacctgaatttttgatcctaaacattctgactggtgtgaggtggaatctcagggttgttttgatttgcatttccttaatgattaaggatgttgaacattttttcaggtgctcctcagccattcggtattcctcagttgaggattctttgtttagctctgtaccccatttttaatagggttatttgattttctggagtccagcttcttgagctctttgtatataatggatattagtcccctatcagatttagaattggtaaagatcctttcccaaactgttggtgacctttttgtcttattgacagtgtattttgccttataaaaaagctttgcagttttattaggtcccatttgccaattctcaatcttacagcacaagccattgttgttctattcaagaatttttcccctgtgcccatatcttcgaggcacttccccactttctcctttaggggtgtcagagtctctggttttatatggagttccttgatccacgtagaaaaagaaaaaaaagaatggatcaattcatattcttctacatgataagcaccagttgagccagcaccatttgttgaaaaatgctgtctttttttccactggatagttttagctcccttgtcagagatcaaatgaccagaggtatatgctttcatttctgggtcttcaattctattccattgatctacctgttggtcactgttaccagtaccatacagtttttatcacaattgctctgtagtacagcttgaggtcaggcatggtgattccaccagaggttcttttattgttgaaagtagtttttgccatccttggtcttttgttattccagatgaatttgcaaattgcactatctaactggtgaagaattaagttggaattttgatggggattgaattgaatctgtagattgcttttggcaagacagccatttttactatattgatcctgccaaaacatgagcatgggagatctttccatcttctgagatctacttaaatttctttcttcagagacttgaagttcttttttttttccattttttattaggtatttagctcatttacatttccaatgctataccaaaagtcccccatagccacccacccccactcccctacccacccactccccttttttggccctggcgttcccctgtactggggcatataaagtttgcgtgtccaatgggcctctctttccagtgatggccgcctaggccatcttttgatacatatgcagctagagtcaagagctctggggtactggttagttcataatgttgttccacctctagggttgcagatccctttagcttcttgggtactttctctagctccttcattgggggccatgtgatccatccaatagccgactgtgagcatccacttctatgtttgctaggcccaggcatactctgacaagagacagctatatcagggtcctttcagcataatcttgctagtgtatgcaatggtgtcagcatttggaagctgattatgggatggatccccggtccagtctctacatggtccatctttttatctcagctccaaactttgtctctgtacctccttccaagggtgttttgttcccacttctaaggaggggcatagtgtccacacttcagtcttcatttttcttgagtttcatgtgtttaggaaattgtatcttatatcttgaatatcctaggttttgggctaatatccacttatcagtgagtacatattgtgtgagttcctttgtgaatgtgttacctcactcaggatgatgccctccaggtccatccatttggctaggaatttcataaattcattctttttaatagctgagtagtactccattgtgtagatgtaccacattttctgtatccattcctctgttgaggggcatctgggttccttccagcttctggctattataaataaggctgctatgaacatagtggagcatgtgtccttcttacaagttggggcatcttctggatatatgcccaggagaggtattgctggatcctccggtagtactatatccagttttctgagaaaccgccagactgatttccagagtggttgtacaagcctgcaatcccaccaacaatggaggagtgttcctctttctccacatcctcgccagcatctgctgtcacctgagtttttgatcttagccattctgactggtgtgaggtggaatctcagggttgttttgatttgcatttccctgatgattaaggatgttgaacattttttcaggtgcttctctgccattcggtattcctcaggtgagaattctttgttcagttctgagccccattttttaatggggttagttgattttctgaagtccaccttcttgagttctttatatatgttggatattagtcccctatctgatttaggataggtaaagatcctttcccaatctgttggtggtctttttgtcttattgacggtgtcttttgccttgcagaaactttggagtttcattaggtcccatttgtcaattcttgatcttacagcacaagccattgctgttctgttcaggaatttttcccctgtgcccatatcttcaaggcttttccccactttctcctctataagtttcagtgtctctggttttatgtgaagttccttgatccacttagatttgaccttagtacaaggagataagtatggatcaattcgcattcttctacacgataacaaccagttgtgccagcaccaattgttgaaaatgctgtctttcttccactggatggttttagctcccttgtcgaagatcaagtgatcataggtgtgtgggttcatttctgggtcttcacttctattccattggtctacttgtctgtctctataccagtaccatgcagtttttatcacaattgctctgtagtaaagctttaggtcaggtatggtgattccaccagaggttcttttatccttgagaagagtttttgctatcctaggttttttgttattccagatgaatttgcaaattgctccttctaattcgttgaagaattgtgttggaattttgatggggattgcattcaatctgttgattgcttttggcaagatagccatttttacaatgttgatcctgccaatccatgagcatgggagatctttccatcttctgagatcttctttaatttctttcttcagagacttgaagtttttatcatatagatctttcactttcttagttagagtcacgccgagatattttatattatttgtgactattgaaaagggtgttgtttccctaatttctttctcagcctgtttattctttgtgtagagaaaggccattgacttgtttgacttaattttataaccagctacttcaccgaagctctttatcaggtttaggagttctctggtggaatttttagagtcacttatatatactatcatatcatctgcaaaaagtgatattttgacttcctcttttccaatttgtatccccttgatctccttttgttgtcgaattgctctggctaatacttcaagtactatgttgaaaaggtagggagaaagtgggcagccttgtctagtccctgattttagtgggattgcttccagcttctctccatttactttgatgttagctactggtttgctgtatgttgcttttgttatgtttaggtatgggccttgaattcctgatctttccaagccttttatcatgattttgtgaaacgctttctcagcatctaatgagatgatcacgtggtttttgtctttgagcttgtttatgtagtggattacattgatggatttgtatatattaaagcatccctgggatgaagcctacttgatcataattcatgatcttttttgatgtgttcttggattctgttagcgagaattttattgagtatctttgcatcaatattcataagagaaattggtctgaagttctccttctgtgttgggtctttgtgtggtttaggtatcagagtaattgtggcttcatagaatgaattggggagagtaccttctgtttctgttttgtggaatagtttgagaagaactggaattagatcttctttgaaggtctgataaaattctgcactaaacccatctggccctgggctttttttgtttgggacactattaataactgcttctatttctttaggggctatgggactgtttagataattaatctgattaatctgatcttgatttaattttggtacctggtatctgtctaggaatttgtccatttcatccacattttccagttttgttgagtatggcccttagtaggatctgatgatgttttggatttcctcaggttcttttgctgtgtctcccttttcatttctgattttgttaattaggatactgtccctgtgccctctagttagtctaagagtttatatatcttgttgattttctcaaagaaccagctcatagtttggttgatttttttgaatagttctttatgtttccacttggttgatttcagccctgagtttgattatttcctaccttatactccttttgggtgaatttgtttctttttgttctagagcttttaggtgtcctgtcaagctgttagtgtgtgctctctctagtttttttggcagcactcagggctatgagttttcctcttagtactgctttcattgtgtcccataagtttgggtatgctgtggcttcattttcattaaactctaaaatgtctaatttctttcttaatttcttccttgacaagggtatcattgagtagattgttgttcagcttccacatgaatgttggctttctattatttatgttgttattgaatatcagccttagtccgtggtgatctgataggatagatgggatcatttcaatatttttgtatctgctgaggcctgttttgtgactgattattgatcagttttggagaaggtaccaggaataaggtatatccttttgttttaggataaaatgttctgtagatatttgttaaatccatttgtttcataacttattagtttgactgtgtctttgtttagtttctgcttccaggatctgtaaattgatgagagtggtgtgttgaagtctcccactattattgtgtgtggtacaatgtgtggtttgatctttacccaagtttctttaatgaaagtggatgcctttgcatttggagcatactcagaattgagagttcatcttggaagagtttacctttgatgagtattaagtgcccttccttgttttggataactttgggttggcagttgattttatttcatattagaatggctactccagtttgtttcttcacaccatttgcttggaaaattgttttccagcttttactctgaagtagtgtctgtcttgtccctgaggtgtatttcctgtatgcagcaaaacattgggtcctgtttatgtagccagtctgttagtctatgtctttttattggagaattgagtccattgatagtaagagatattaaggaaaagtaattgttgcttcctgtttttgttgttgttgttagagttgggattctgttcttgcagctgtcttcttttaggttggttgaatgattacttttgtgctttttccctccttttgttggagttttctctttatcctttgaagggctggattcatggaaagatattgtgtgaatatggttttgtcatggaatactttggcttctccatctatgataattgagagttttgctgggctggcatttgttttctcgaagggtctgtataacatctgtccatgatcatttggctttcatagtctctggtgagaagtctggtgtaattctgatagatatgcctttatatgttacttgacctttttctcttactgcttttaatattctatccttatttagtgcatttgttgttctgattattatgtgtcaggaggaatttattttctggaccagtctatttggagttctgtaggcttcttgtatgttcatgagcatctctttcttcaggttagggaagttttcgtctataattttgtttgtaagtataagatatttactggcccttaagtttaaaatcttcattctcatctatacctcctatccttaggcttggccttctcattgtgtcctggatttcctggatgttttgagttaggatctttttgcatttcgcattgtctttgattgttgtgtccatgttttctatggaatcttctgccccttagattctctcttccatctcttgtattctgtggctgatgcacacatctatggttcctgctttctttcctagcgtttctatcttcagagttgtctccctttgtgttttcttcattgtttctacttccatttttagctcatggaaggttttgttcaattcttttacctatttggtagtgttttcctgtaactctttgagagcttctagctatttacctgtgtttttctgtatttctttcttaaagtcctccatcatcaccatgagaagtgactttagagccatgtcttgcttttctggtatgatggtgtatccaggacttgctatggtgggagagtttggttctgatgatgccaagaaaccttggtttttgttgcttctgttcttatgcttgcctcccgccatctgattatctcaagtggttgctgcccttaatatatctgattggagcttgttcttcctataatcctggttgattcaggactcctcagagtctagctttttctgtgatcctgtgattctgggctcctgggaacctgagattctggctgtgtcagagttcttggcagttaagcttcttctgagaacctgagatcctggtgtgatcaagctgctgttatcctgggatcctggaatcctaagattctgggtgtgttacagcgcctggaagaggtgtctcctctgaggactgtggggctgtctggtgtgtttgaaaccaaggtgtaccagtactgatcagaaggaacccaagcctctggtcaggcaaggctcccgtgtctttgctcctgctgtcacagacctgtcacaattggtgtggaacagatgttgtgttccactcaccagtgatcctaagatctcatggagcgccctctggggactgtgggaccttcccccaaagagttcccgaccaaggcgacctggagctggtgccaatgggaagggactaaggccctggtcaggtgggttttctgcttccctgcttgctggctcaggtccggcatgattggattggaaccgatgatgtgttccattcaccagtgatcctaagattgcatagagagtcctctaggggctgcgggatcatccagctgagtttgcgcccaaggtgacccttagtcagggtttctatacctgcaaaaaaacgtcatgaccaagaagcaagttgggaggaaaggggttatccagctgacacttccaaattgctgtttatcatcaaaggaagtcaggacaggaattcacacagggtagaaacttggatgcagaagccagggaggaatgttgtgtgctggcttgcttcccctggcttgctcagcttgctttcttatagaatccaaaactactaatcccagggatggcaccacccaccaggggctaggcccttccccctttgaacactaattgagaaaatgctagtgtatgctttacagctggatctcatggaggcatttcctcaagagaggctcctttttctgtgataactccagcttgtgttaagttgacacagaaaagcagccagtacagcaccccatcaagaatgagctctgttgtacactgtgctgggtaagtttctattcttatgataaacattgacaaagagcaaattgggaaggaaagggtttatttcggcttacattttatagttcatccttgagggactcaaagcaggaactaaaatagagactgtggaggagatgctgttggcttgttccccatggcttgctcagcccaatttcttgcaccatccaggactaccaatctgggtgttgtagctcacagtgatctagatcctcccacatgaatttcaatcaagaaaatgaactccagattcacctacagtgaacctgttggaggtattttgttaactgaggttccccttcctagataattctatcttgcatcaaattgacaaaaataatctagttgggtttagagacccaacttaatgtcttgtgctctaattcaactgggattctcaaagagattatatctaaaaggaatgtttgtgttctaagaatcatagagagtagagctaggaattccagagctaggaatcccaatgaatatatctgaaaacagatgagtttcacacaaataaaaggattttattgacacatgatattctattacagtaataaatataatacattcctctaaagcttagtttgcagttcagaagttgatgtgcccatcagggggccgtcttaacctttggtaccatcttcttcaaagctgcattaaaagagagcatgtgttgtctgagaaccacacagatgggtacaagatttacatcagctcgtcttcacaacatgaagttgaatgatccttatcatccctgtcctcctcactcccctgttttaaaatagctagtgctataaaaagttaacatttcaaatataaaaattattttatacaaatataagtcattatgtaatcattcttaaaatacagcattgttatatatgagtttgaaacattattactaaaataaatatttcccagagaaattttcatttgcatcacaaattataaaacaaagtatataaaactaattcacaattaattctttttcagagtgtctccccaacaactctgtggagacagtttgaagtacacacagctagctgagagcacatgaacatactactgcacatttccatgagcatctacccacacagtccatggcctgtctacatgttaactcctggacctggcactgggctgcactagtttgcactaacacaaccttccttcacttcagaagtcttaaagatctgttgctttctgggaacataagtgtgtcgatttccatatcaaggaaattatccaggccactttatgggactgaaacagttcttttcctaggtcttattctggtaataagaatgtttagctgtacggtagtaaggctagatggtcttaaccttaatttccaagacctggatatccttaatcctgatgggttactagatcaccagatgtcgggcatctttcaatcaataccacccagtattttgtataatattctaacatttgcttggaatggggcagacaatgtatagaaggcaatacatatcttagaggaaagtaagttgggctttgagttatataagacactgtttttagttctctttactttgtcctatatctaagcactataatttcagttcttcaataatgcaaattaaccagctgtactgaacaataagccgaatgactaacctggttggcatttatagctgctttttcagctactattagggggcaaatgttttcagaaaaatctgccttgcaatacacaagtggtcattatcaactatctgaagttcaaacaatttgactactgctggaaagtcagttacccatacccatatgaacgtttttgaactctcttccaaaacagtctcttaaagagcaagtcgcaggcttcacccttctttcaaaggcacaggtagtagagttcacctcctctaagtccatgagcagactccatacatgatcgttttgcaattatttgcactattttcttccctctttccttcttctttgcttttctgtgtgtatgtccactaatgtgcatgcatgtgtatatgtacttgcatgtggaagcaagagtatatccacaggtattgtccctcaggtgcccagcctggaactctctttgtgggctaggatcacttgccacagagccccagggatccacctgtctctgtgtccccagcactggggttagaagcatgggaaatgcctggcttttttcattctgcatgggttctgggaatggactcagtgcactgagttgcttcctcagcatcccagcactagagacgggtttcttgaacttcttcttctgtctcctctttcagagcagtaatttgcgtccgaggcttgtgcttgctggagtggcggccctggaagaacctcatcttttccgaggagctaatggcctgctggaagatactcttctcactcagaagtgcctgaagggagtcgtactgccagacattgctctcttctatgacctaagggagagggcattagtgagacctctgagtgaagagcaggccagtgctgacacataaactgagccaggcccaaagaagaacaaaagtccaaagaaagcacaggattcagagcttgtacttttctcttagctttcacatccgggaaagtagcgatagggatttgaaaaattaatgtaatactagctgttgccatccttcagagaacagttgaggaactgaaggagctttgcaaagcaaaataatcaatgacccacgcactcttaaaccgagctatatataaccattaactttgagcttcctcatacctggggttgaggccgaaaggtttcaaattggccaggaatgacagagaataacgccttcagtgcatgttaaactgtttgcaagcttgaggtcagagagtagagccccttacctagtccctgtacttgaccaccacagaacaagagatgcatctactctctaggcacttgtaactgggcaataacaataggatcaaaagtgcttcagtaaaaaagcatttacctccagaatattcaaaagccttgggaaagtaaaaattttacatgatccttggaacttcccatgtctaaacaggaacagtgacttttttttgggggcggggggagaatgagaaggtgtctgacagggacactaccctgagttccagtagtaatggggatgatggaacaggcttctctcctactacattgaaccactaatggtaaggcccacccttatcttccccatgggaagctgagttactgtaagaaacagacattttttttttcaattgtacattttgtgacttgttcgccacaaaagatctgaaagcatagttaccttatctacagtgtcgtttagtgatatgataccagagaagtgtgctaaatttcctcaccacttcatagctcaagtccagggaaagagactgagggtaggtggtaaatgtgtgacataagtgtgaagaaagggtgtgcaaatccagctgtgcaggattatttaaataaatggagaatgagatatcaatcaagtgtaaatgacttaccaaaaatcgctggcaatccaacatcgcttctatcctgtgttcacagaggatgactgtgcaaccagcgaaggcttgttttagaactcgtcgaatgacttggtatgttctagcaaagcaagaaaataccacataagacattatagagtgtgaattttctgcctttatctttgacaatacgtatagtattctatggacttaattctttacttaaaaatacttttaggataatgatgatacagaatgagctacaatcagcttttaagccattctaagtatttaatataatttcatacactaataaagcaaatgcttagaagaaaatttcataaaaatgagactacattttatgtagattcagcatcagttatttattttgtgctgttaatgtatttatgatataaataggatacagagggaagccataagtgtgtgcatacctaactaagtatttattatgtgttaatgaggttgaagggtttataaattccagactccagtcaggaggaaaaacaaagctcttgttgaaaaaaaaaaaagtacttgtgctcatgttaaatagtgatttttcccctggaaaattattttgtaccccctacttgtaggtgtggtagctgaatgggaatttgtaccaatatgaggtaacttcaaggactctacttctattgcatgattatctaaagatttttggaacttacatggggtctagatgggcactgggctcatcaagcagtatgatcttggccttactgagaactgatcgggccaagcacattaattgcttatggccatggcttagcacataacccccatccacaagggtaaagttgagctgtccaggaaactgctctattacagacttgagtccaacctgtagaaaataaagaaaaacactgtgcttagaaggggcataactaaaatcacttaagaggcttgcattctaaaagcagacatgagtttgcacagaataaatttcacatcaccctcaactcccaactcctacttagtttgagtaaccaaaatctggcaataatatcggtagctctaaacagactggaggatttctttcagccccacacttgattacaaaatcattcagtgttcaccttgtaagtgtcatgttccctagcagtgataaacaattatacctattcctgtcacattatatagatggataggtacagatacagatatagatagatggatagatgcaattgcaatacaattcaatatgggctttaaagataacagatagagaacacagttattcactccattataactgatggcaaaggattcaagagcagaaagggtagaaaacatagcatgacatgttcatcttctatctgtaatacaggatgagaaatatcatgaaaattagctgaggaggctttaaaaaaatcatgccatcataatacttatctccttcacttataaaatctgagaaactgataactttctcataaagtaagaagttacttagttaaaaatggaacacgactaaaatttaaaggctcttattgttagggtagaatatgaagattattttagaattaatggcttatatttttaaactgcaattttaaagggggtttaataaaaagatcaaaaagtagtctgtcaaaattaaggcataattatagatgtcttggtggtttttccttattcaatacatgtacattgtgtcttctttgctaagaaccactaggtgtataagagttaaataaatacagacaggattgtttcttgtgcttcatgaatctggaattttgtatgtacaggtaagatatatacccatatcactctaacatgtgcagagttagataaggccttaagaaagattcatgattttggagatgagttcagaagtggctcatatcattgttaatgccagactcttatgtgctcattatggaagttcaaacatgtggcttgttaaaactaccctttgtgtaaactcgttaatgtttaaaaggttcctgagatagtagggaatgtaggcacagaagacaaggaagactgcctggtgtatcacaggggatactatactatacagctttgtcccatccatatcaggtttcaacaccaatgtcccctcccctcctgtgtccagattttggttatgtacatggcatcaatgtgtatgtttaagctaatggctttcaatgcctctctccagcctagaagttcccccagggtttctgaaaccgttctttttgtcagttctggcacactgatcctcgtctggccttctgtcatttcttaaacatcatactgcaagtatcaatgagtcaaattgtcaacatgtcacagaaatatttaagagctctccctaaaatgcaggtttgaacttggatcatttctctgttttaaatcctacagaagttcttttactggaaaaataaaatataattgttctcatgtggcccacaggacatcctgacctcctccgcccccacacacacacctactactgtgtccagcagcatcaacttttaattctttatacagcttaacattctcagggtttgtccttctgctcagtctgattactctcttaaatatccttgcctacccacaggacagccaggcatcctgtattagaattgtgtattttttccctgttagaccatacatttcttgaaagcaaatatgtgtttttcagttaggaacactctcagcctcaacaattcatcattcattcattcattcattcattcatatatttattaatccattcattcattcattcatcttcctttcagtcattcatttaatatgtactatgagtctttaagcattagaacttaagaatgaatgaattagtgctagttttagctcagaaattatatactgtactctgtaaatctttaactctatgaccatccatcaaataacaaagttaaaagtattcaaatatgtttagataaatcagtactctataccaaactactcagaagtatttgtaggatttttgttttctatgacagtttttttttttcagtaaaaaaggtggattatgctttgcctgtaagcactagtgggcaatgtaaaaatggataccctcagctccttgtgtttccattctgcaaacttctcagggaaatgtcccacttacagggtccctgtttctgctatttaaattgtctctacaacagttcccttgactattaggatgtaaagatgataaatttaaaaattattctaataaggaaacacaaacaaacaaacaaagtccccacatctaagagccagagtcaaggggccaagatcacatagcttagtagggctaaaacagcagagggccccaagtcagggctgcagttcttttcagaatccgccagccatcttgcaagacctttactgagatgaaggtagtaatgtctattgggcattaagcatgaggatattttcacaacatattttacatgagttaaaagaattctttacttgctcagatcattcagtcagtacttatcaaaaaccacccagggatccaactactgcaggaacaacagagagcagggcatgattccataatcataggagatatggagtagccaagaggtgaattttgattcagtgtaggaaattttgaggagccgaggcatagctatacctaggaaagtctcttttcccaaagcaggagggtcaggatggagttcagaacaaagtgatgtgtgaaggaaggcttgaatggtgagaaggagcaggagtagtgctctgcaagggtttcccaggtccagaaaccagaaggtaaaaagcagaaacaactgccccaacccgtaccatagaacagagagcagcacactgtgctctaaagaaaattaaaattcacagtagtggactcacaggacacatgggggctggggctgaaagtagagcagcaaagaccaaatcataaaggtcctttaagcagtcagtgtacaacaggaaccctgtccagcagcagcacagggaggggtgagaagtaggctaaagatgcagcctttagaaagccattgcatacactagcaagattttatcgaaaggacccagatgtagctgtctcttgtgagactatgccggggcctagcaaacacagaagtggatgctcacagtcagctattggatggaccacagggctcccaatggaggagctagagaaagtacccaaggagctaaagggatctgcaaccctataggtggaacaacattatgaactaaccagtaccccgaagctcttgactctagctgcataggtatcaaaagatggcctagttggccatcactggaaagagaggcccattggacacgcaaactgtatatgccccagtacaggggaacgccagggccaaaaaaatgggaatgggtgggtagggaagtggggggggagggtatgggggacttttgggatagctttggaaatgtaattgaggaaaatatgtaataaaaaatatttaaaaaattgttttaaataaaaaaattaaaaaaaaaaagaaagatccccagagctgaatagggcagcaagctgccatgaaccagggcaggaaggttagacttttgtcctagtgccttagtaggctgacacacctcaacgtgttcctatttgactatattggatcatcaaccatacaggattaaagcctaggattcctgcctttaacctaaatctcctgcctgctgctgtaagctaggggttggtgtttatgtttctttgtggactcttcagcaaaaaatttgtcactcttactcaaaccatgggacattacggttagctcaggagcagcatctttatgaacataaatttaaaaagagaatccaatgaaaacgtacatctaaagatggactggtagacaaaatctaatcacataactacctgtattattctggaatctaaagtcttctaaacctatctcctaacattttagatgattttatgatctcagtttcctgcaaattttatggagacttggcaatacctggtaagctttacaaaggctaattccttctttcccaagctctctcccagcacactgtattctgacaggtcactctgtaaaagtacatcaaggatcttacagtatatcactagcaatttagttaatgttttctttaaaaaccttgtgtttgctgggtaataaggaaaccctgataatgaaaaacggttaatctcagttcattttattaggagaaggttaaggttggttactcaaggggttagcatttagcactcagaggcttcaaagctcctggcaagatctgttctgggggaggccgaagagcgaacatcaagggaacaacaatgggcaaagtgcagggaatggtggaatgccaacatgaaaaacctaaagtcccaagtctcatggtggctgaattgagactttgtgatttccagttgtacactgacaccaaaatgtgttaagactttggcatttgtttaagtggagtaatctattttcataagaacaagacataacttggaggggaggaaaggagggagttctaggtccgcatgtcttcagaaactcatgttaacacctgactgtccaaggcagtgctactgagacataaaataaaatgtttaggaagtgattaggtcatgggctctgagtaccccatagatggaattaacactataatgaaaagaggctccacagcgctcactgaccacttatactgagtgaggtgcagaaaaacacctcgggagtgacagcaagtagggccttagcagatagtaaatactgtctgctggctccttaaccttggacttctcagtcttcaaaatagtgagagaaacatacgtcgtctaggagcaagggtctatagaactttagtaaagcaccacgaatagagtatatggaaaggagcgacactcctgaaagggggatgagtcaaaggttctgacaaggatgtgccagtaaatgagagcactgtgctacaaggtgagtatacatgcatttctgtgttcacacatgcacacaccagtagatgtgtaaaactgcctatcatctatggcaaccacacttgtgtgtatgatctacttctttaaaactactttatttgtcatccttacctcatctgcaactttccatatttcttcatctttccattttccattgggatccaggttttgtctgaatgttccagaaaagataaatactttctgcaatggtaaagataattagaaagtataaataacctatacatcttttaatgtttttctctttattcaaaccaatttcaagtaagaaaaggaacaaatgagcatccactagagcactgtgctacaaggtgagtatacatgcatttctgtattcacacatacacacactggtagatgtgtaaaactgcctatcatctatggtacccattagctagtcatacttttctacatttgctttacatcattttaaagaaaaatagggcaacatttaaaactctttttggattttttttatttcaatgcccttgagataaggaaattgaggccactgtgctctgggaagaattgagactcttcttctactaacatccctttacacatcttcttacttctatgaacaaagagaagctgaaaggacaactcagaaacccatgtgatcatagatcaaccgtttgttcaggggcatgtgtgctagggaagaggcagatgctctggtgtgcaaatagcactgtatgaccattgtcaagatgctccacttgcagtaacacttccacttaggtggaccatgtgcttaagagaaaaccactgtcttaagagatctcaggtaataatattttaaaaataatatttagtactctttatatatacaagactggcaaaaaatttttgatgtcaatgtctaaaataattttctttcctcttattgttttggttgcatctctgtaactttgaaagagttatatatttagttgaaatatacaatagaaatatttacttgggacaaacagaataatttcattatcccggaagaatgaaaggaatggacaagatgttttatctttaaaacagacagttgctcataggaacccagtctctttcatccccatgctttgtaaagcagagaaatgccaccctacttttgtcctttctgcatctccatctcagtgcacatcaggaactgagagtcactcataattcatcttattcctcagcttatcttaaaaatgagtcattggtcatttatattatcctcaaactatatgtcaaatcaatttctttctcaatttctgttcccactgaacatgccaaactatcactagtcctttttgtgtcactgcaggagcttcctaaattgatcttcttctttatacttttgcttctcttacaatatacccaagtaattcatgaaaaatgtcaatgactttccccttcactaagggtacaatatccttacgatggtcccaagatctcagggctcctttccactccattctattctaagcacacactttcttagcttagtcacctaagttttcttctcagctggaaatcttatcctccctgatcttcacacaacaatctatatccttcaggtttcaaatcaagcttcatttcctaggggcactgttccttatcctcagaccaaacaagctccccaattatttcttatactttcattccttaaataacaccaagtttagttggtggggatgtggctcagttggcaaaaaatgcttacttaatttgcaagaggccttgggtcttatcccagaagcatataaacttggcactgtagtatgtgcccttaattccaacacacaggaaatagaaaaaagaggattagagtttcagagttattctttgttacatatgaagatggagcccaatctcggtagtgtgtatcaaagaaaattactaagtccgtggatatctatgagtgtcgaaggccatgtctttactttcttttttagatgcaaattttgaataagctcagcaaaagtcccaaatgagtgagcagacgtgaagaagtaaaagtagaaaataataacaatcagagtaaatgctgtttttcctcagatttgaaagttaacttctataaggctatttttctggctaataaagttctctctctcatccttccctcccctcctcctctttttctctcctccctccccctctccgtgtgtgtgtgtgtgtgtgtgtgtgagagacagagagacagagagagacagagacagagagagatctctaaatgtgacccaaatgctcacagctatcacagttctttaagtgtaacactaacaacccaatacacctgtgaagattcctacgggtgcttcagaaattatttaacttttagtcataaaatctataatgtatactagtttactaaatttatgatgttttaactaatttattttaagcagatacacattcaaaattatgaaggaaagaagctgtcaggaatctagaagctgtaggtgtggtagatttatcacaactcagaaatcttgcaggctttccttcataatttcatgtctggtaaaaggtaatggacaacatatccaattttaaagaaaaatcaactaaagaaaccggttcagctagaattcaattgtataccatcaatcagacattccattcctttaattcaaagagaatctggcagtcccttgccttcacggtgccagcagaggtcttacttgtttcctaagctgtttaatcatcctcaaactcctctgtctaacctaaaggtctttggaggtcaacctaaaccctctctctctggtttacatattcaaaatgaaggccctgagaagtggaatgatttggccagcatggcactctcagatctgctgtgcaccaattaaaaaatgcacctgaagctgtcacatcccagggatcccctgtcgcccttaaaagaaactactcactaataagtcagttagggcaagcaaatatttgatatttatttaatgtcatgtatgctataatgagcagttcttgagactctaagcagaacaaagagatcatcattgttccccacatgtcccatctcctccctgcagctgctgcctccactcctcaactctgtggaagtggctaagcctacatggacttcccacagctgaccatatatcgttgcaacagctaatatgctttatagtactagatgtcaaatgaaaaaaaagtaatccagcttatgtggtgattgcacttaatataaaatagattaataggagaaatgactacccctgcttatgtatgtatgtgtacatcatgaatagttcccttgaaatgtggcccaactataaaattatgaatgacatatttctactaagaactattaacagtttgtaacaaatatagattgctatactaccagtgtatatgctattgatttaaatataaaagactgcatacaggatagttaaagtttagttttctagaaatccagagtgcttcattacaggttgttttttctttgttgtttttttttttttttgagacaaggtttctatgtgcagccctggctgtcctagaactcactctgtaaaccaggctggcctcgaattcagagatctgactgcctctgccgaggcatgcgctgccactgcccagcttcctaacagtttttatactacaaagttttagtataaacatttccaaagatacataaaaatgttttctaaccaaagcatataatcaaaggtttcaaagtttagtctctgaaatagctaaattgtgttatactaatttgaaaattggacatgacagttatttttctgccctcccttgaattctacactctgtccaactgtctacctcagtaagttctaattaaccacatcacagtataatcatttgctagttcatcatgtatatagcaatgtgccaccaaacgttctccattcccttcctcagcccaggagaattagccccttcctactggaccatgccatgacgtctaataccctctaagctgtggttccctctgacccttctccctttcccttcacactgacctatccttttgattgttcacagtcttcctgcctagaactccatgtacccaatcattctaaacctataaactttatgacactctatggcatgtattcattacaactttctttgtgaaattgtgcaagctcatttattcatacttattcatacttattcatagaacatacccccagtccagtagaaagacagaggagacatgactccccacccccactgaattaaaaataataactaccataacagaggataattatcaagccatgtgggaagtaaaagtttaagtatttctcgttcaatttcccccaaagtacaaataattgttattattactatactcattttacaaacaaggaaactatgacagagaaattatatagctgtcctaagattatacagattagggtccaaatgctgaaagaaccacacatgtgagagacagcaacatttaatgattcagcatagaacactgtcttttgaattcttctcatccaaggtgttatgttagatgtcttacaacggagaaaactcagaagaaaagtattttactatgtatttctatccttctttttataactctgcttccattttctggtcactctgtttaaatcttgcataattaagggagatatgtggataatttgaaaatgagacatattagaactacacgcagaaatacataagcaaggtttgagatcccatctgggtttgggcagtcaagcaaagtatttgtgttaaaaaaatacccccaaaacaaacaaagaaagaaaacccctcaattcataatgtctaaccagtaaacagttacatgttttctgcaatcagagagaaaacaagaaaagaagggagacaaaacagcaggacaggaaagacacagatgtactggcaggagtgacagctagcttaatctggacagttctctctgcctatatactcccttgttagcccacagcttacaggcagctatggtttcattactaactctcagccactcactttggctttactgtttctgtttttaatttctgtcacacgactatgaacatcgttttgagtttctcattagaagtttacaggttggactggaacttctctggcatattaatggcaagtagtatctctacatttgatataaataaaatgactgtgatattataattgtaagcacaagatgtaattattttatatagtgaattttaagctgtcaccaccaatttcactgtttatatctatacatgctgtctgatctctttcaaaacaaaagatgcctcacctctgtctgtggtgagaatgatgggtggatggtgagtattttcaattcattaagaaaaggagccagtgagatggctcagtggataactcacgcttgccacacagccctgatgacctgaatccagtgtctaaatgccatgctggaaggggagaacttgttcctgaaagttgtgtgctgacctctccaagtgagccatgacgtgatgaataccccacccattctcccctcctctcagacacataccacatacaatagtaatcaacaaaaggaaaaacttctagtcctttactcagaagaacttacagccttccaaaattgtaactgaagctttaaaatagttgctttttattaattatctgcctagccaggcgcagcattagtgggtgctttcttcttggtgctctaattgccaaagtaaatcagatgccatctatcggcttcactgcctgctctgcttgactcagaacaaatgaaagaggctctgttttggaatgcacatgatagtctgaattctgggctgcacgtattctgagattgctatgtagttactaaactataaaaggagggaaaaaattgttaagaaccgtccaaaccaacaggaccttttgtgactgcccagcaaatgcttttggatctctgtataagagggtacttttcaaaatacctgtttcatgtatctgagaaccagtggccagtgaacctttaacattacactagctcagtgtgggaccttctgaagtacatccttgttaaaggagacagaggagaaaagaaaagatgaaaaagcagaccaaactagttagttttctgtggatattcacttttctccttcttttatctttctaaggaaaggagaagcatgctgcaatcctcacgttccaagaaaagataggaaaagcaaagtaacccgtagtttagacatcaagcatataaggacttggtttgctctctctctctctctctctctctctctctctctctctctctctctctctctctctctccttccttccttaggtttcacatgacattcaaaaattgtcactgagacatgttaaccatgctggctgatgttccagagacccttcagtatttctgaaggatgccctgaacacacttttttttttccttttttcttttttttttttttaaatgtaagccttgaatccataaaagagcagacatgaattgagtcaagtctgaagagtcatttaggcagaaaggcaggggagattttccagctctggcccactgcagtgtactctgtgcctggcataagtaagctcctaagcagagctagtgaggaagacggagcccttctattgtgtagcagctacgatgatgagcaagaggatagaagttttagaggttgacgcttcttgtaggccaatgtgttcgaacaagagcaaccaaggcaaagcctaccctgctttagttcaactggcagcacaggacctgggcaagtccaacagcagtgcttctcagacaaccacacccttccactggccttagcatttttactcgactagtgctctcacctcaggaaccttgtactcctagcgtttctttttctttaggccatctgacaatcccttttgtgtttttgaacacacagtgtttccacaacttcagccaagatgaagcatttgaaaaaaatggcacaccatagaaacaaattgaaagcatcagtttggtggttacagtatctattgtctcaccacttgaaaggagcaaatgttctgtgaagatcatttatcaagaagtacaagcattttcttggtctagctttgtagttggtctacctggtgatagtcccggaatgttaattttgtgttaaaaatacagaagtgcttcaaagagccatcttagtgggttggatttagtgtctagtagcacaaaaggaggaaaagtctcagagaaaagggccaacagcagcagaaatactgcaattcttctggcttcagcatctcttggttcacatttgggtcatgttgcccgcaaccattgccgtttctcctctacacaagaaatcagcatgtgcagtaacacagacagaatagcactaaatggcgatgttcgagatgctgtactgcctgaatcaaacactgccctttataagaatctagattgacctgacatacttcttcctactcagactccaaagggaaaacatcactgcacttcaactttcaattccactatgtcctgcttccgagagcttatgatctcagaagcatcttccacatcttgcaaagcatttatctacaggctgctatcactccctcggagatcaagtacttaagcaagactaggaagcctgcacaaggaactacccaggctgctgttacagattgtgctttgggagaacactatcaaaacactttaagaaatatacaccacgcagaattccagacattgggaggtactctcattccatatgctacagttctcttgcacagtagacgagatggtaggacccaccaaatatattttgcagagtgatatgaatttcttaagtatgtcaaataatgataaaaatgttaattcgtattgctttttacatttttgtgctcacctgtgttatcactccgaaagctttcctccattcttgtaaggtcactgaattccatgagacaccatcaatctctatatcacctttaatgttcaacattcgtaaaaatgctgaaagcaaagtactttttcctgatccagttcttcctaagagccccacctagaaggagaaagtgatggcattactcttgcaccaaggatagcacctattatccaatcagcactgctccttggacagaaagcagtggaatgggttctcttctcatggagccacgtaagcctgtttacacactccgaattctcatcactatctggaactgatctggaactcatcataatctgcaactgaaatcagaaactggccatacagaactgtattcctgatgtgggcttcattgaccactgacttttactaatgagaaaaagggagaaagtgtccatttaaagtcaaggaagagtaaaaacagtctatcttgatgcacgtcagctcaaaccagaagcagggacctgctgcccgatgtacttttgaatatggatacaaacttgaagtttactcaaaataggcctaacactacttactgtccctggactaaacttatttcctcattggtggagcatgtacagttgtctagcatgtacaaggtccagggattgggccccggcattgaagaggcagatggattctgcccttaaggaatgagcagtgtcaagttcaggcctgatgataagatacaggcatgttcagtaaagtatacattctcacagaattcaggttgagtcgagagccaagatcactcagcttctcagcaatgtttgaatcaaatgctaactaacatatgactcttctggcaagaaggaaactctaagaagcaaaaaggatattaaactgttctcattatgcaaagaccacagctgcaagagcacagcatcagattaaggctacttcccattacagagatcagttgtccaggtagccctcaaagctcacattctttgttatgatataagctcagttccttgcaatgactaactgatcacagaataagctgcagtatatatgcaacacttaaatttgtttcatgctgttcacactgcccctttatttcctattgtttgacctctttaaggagaaaatggtctttttgaaaagtgttctttacatatatgtggttggtgaaaaaccatctgtttttaatgaactgcaaatcagtactttaaataaattaaaaaatgaatttctaaatatttacagactctatacttatttcattgtagactagtaataacttataaactccaatggtggcatgggccacaaccaatggaaataataataatttactgagtaaattacttggcaataatgtaggcctttgtgataagctggtaaaggacagtgacaagaataattgccttcctaaccctcaaaagagctctacaaggtaatttatataaatcattgttgttgggaaaataaacaaatgttatgaagaagaattttgtaatgatttattttctccttcttgtagctttgtatttacataaagaatataaattcaacaaaggttgcatagtttatccgttttgattgttttttcagtttctccatctggaataatggtgtacttaaataataaatacttggattagctgatagtcagattggagggtgaaaggatgggaaagtgagatggctggaagaatggaggaataaaaggacccatgtgtacttggctttaaaaaggtactcaagaaatattgaggtggactgaaagacagtcagataggagagcaaatgaatgagcatacatattattgtaccttataaataaataatacaataattttgttcaatgactagataaagcattaattttaaaatctggaggaatttcacactgcatgctcccatctctgtgctagaccatgccatacaaatacacattcaccatgttaggatttttccaatactgcaatgttaaataagttaaataagaaatcagaatcggtcagtgcaggtgatgtacaggaggaaaaaagaaagtgacagtggaccgatggaagagtgctaagttcattacaggatagttggcagaaaggaccttgaatggacctagtaggggtaaatgagttcactgcatttcctccagaaggaaatacattttcagaaaactcagttcttatgctggcataatactggcctgagaggcaatgaataaatactttctttagcttgaaaccctttgtctattgctctagtttcctcacatcaaagtgctggcatgtattaagtctgaccagtttttcaacagcaaggaacttaattgatttgtaccctaacaaggttgtctggttgagtaattgtcacatactaattatcttcttatttctaagagtacttcctgcaaacaagctttaaagatgtgtcctaagtatgagtcaacgtttttattaacctcaatgcacctcagctctgcaaaatttagatcaacataaatcagactacaatctggagagctattcagtgccaaactaggtaggagcaggaattccattgtgtcaagagtagcgcagttggggcacagtccctttaaagcaccttctctgcactttaatggcagagggaagtgcactataattatcttgtttccttgtggtccccagaaaccaagacagacaatcaaatgaaacatcagattcatgggtgattataactgagcctctcatatgtcgacacatctgtttattgttaataagacacatgggccactcagattgttaaatgagtcagcagcctcacgccagattctataaaggcagaatggggtgcacttttaacaaatccagcacctatttagatgtcttcatttgtagagaacattgctattctttttgggttgtgttgttgtttgtttttgttttttaaagacagggtcttttgtgtagccttggttgttctggaacttactctgtgaaccaggctggccttgaattcacaggaatctcaagtgctgggattaaaggtatgtgctaccactaactgaaaagtcactccatcttaagtaaaaaggtaagcaacacattttctgtcagaaaggtaaaaccatagaacgaatgactctgcccctagagccagagagaaaggcaagcagatacagtcacagagaccagcagaaaccagcaagcagacagctggagggagcaagtacaagcactacactgagaagatgacctgggctcattgtggaccatggagagggaaacaattcctgtcagcctccagtgacctcacaggaagactagaggaagtttccctagctttcaaggaccccacaagacagtgatcattctgttaggccagagcacggtctcccatttaaggcccatcttgagtgagactattttatcatttgtaacttagagattttttttccaaaagcccagactaactgactttaggaaacagtaatatttagtgctaactcactctaaccagtctgtactacctaaagtaactaagctggtgccatttaaaagctcacagccgaaaatgtaatttctctaacataactatgcagctacagaactctacagtccaacacagcatagccagtctattactaacagcctattatcacggtccctttcccaagcacgtcatctatgttccctctcaagaaaaaacaatgagacatgttgaaagggaaaagaggaaataataagcaatactaggatagaacaaagccagatgtgacaatgacactctaattcatacgttgggaatgcaaaacaactatgactaatgtgataaggatttcatcatgaaaaaattggcatatagtaacagatggatccttagtaaacagaaaggcgtcattctaaagcaaaatcaaaagacttctacaagtatagcaaaaaaaaaaaaatcaagcaggtaagcaaacaaacaaaaaccatgtacaacaaagatggaggatgccttgaggagttcaacaatagtttagacatgtgtgaggaaagaaccctgagcttgaggatatgttactaaaagcagccaacaccaacatgcctctgcacaacaaacaaccccctcccccagcatatccaagaatcatggcacaattaggaaaggtgtaacttgtatataatgtagataccagaaagagaaagaagacagaaatgaagaagaaagaaaaagagaagaaaaggatgctgagaaagatagagggggatatttcaaataatagttactaagagggttccctcaaaaattagtgtcatatactcaatccatacacagagaaaaataaccagaatgttgcttaaagctaaaaacccataccacagcatatcatcttaaaagtacaaaaaattttttaaagaaatcctcttgaagaaagcccagtaaaaaatatattatttattaaatattgagggccaggcagtcgtggcacacacctttctttctttcttttttttttaagctctttacaccattttaaatcagctatttgattatctaaagtctaatttcctgagttctttatatatattgactattagccttctatcatgtaggattgataaagatcttttccaaatatgttggttgccattttgtcctattgacagtgtcccttgctttacagaatctttgcaattttataaggtccaatttgttgattcctgatctcagagcataagttatggcattatgttcaggaaaatttcccctaaagtggcacacacctttaatcccagcatttgggaggcacaggcaggcggatttctgagtttgaggccagcccgatctacagagtgagttccaggatagccagggctacacagagaaaccctgtctcaaaaaaacaaaacaaaacaatttgagataagaatgacttataactttatggacaccacaaagtcaggaaacgagtagaaaagaagaggaaaagcaaaactctgccaaactaggatcgtgaaccttgtgcagttatcttttaaaacttatggcaaagtaagaaattatcaaaccaacacagaagctatgtgctgtcaatgggcttatcttgaaagatatgttaagagaacttactcagagaaaagacacaactcagatctacaaggagttgcaaacttgaagctaaatgaataaaggaagcattttagaaactaaaatgcttttcttactcttactggatctaacagggaagcttacttaaagtcattttaataacatctatttgcacatattatctgtgaatacacaaaatgacccataggaagaatatgacacacatgagagagcaattgggactacagggtgctgatgcctcttatgtgataacattattcttttaaaatggacctggattcattgtgaatatatattgtgacctctagagaaactcataaaaaccacaaaagtagaatcgctatgttaggaaatgagaaagtcttggaatcataaatactaaggaacagcaacagaaagaaaaggattcaaggtaaaaatagggataaagagcaaaagcaaggaacaaaaagcagaacaagttataatgcctgaatgtgtgcctaccactctagatgctcatggtctaaatgcaccacttgagaaacatggactgacagagtggcccaaagaactaagatataactacccattgcctgcaagaaaatcactcaagtttaaagtttcatctaagttaattaagggatggattaatttatactgtgccaatcaaccaatttggtgctactgttcatagtgatggttgtatttttggtgtctgtgtgtatttaaaggcatctgcagttggaaaatcttacatatttgcaagtatagtcacattcaaatacaatcacatttacaataacctgttgtgtagagtctgtaattcaaatttcatatgaaacataaaaactttgcacagtcacaccttcaactatgtataagggatactgattatataattatgttacaaatggtttttacgaacatattgctctggtagttgggacccactaacaaagcaagtaatgctgaaatctcaccctctgtccaggacttattgaaaaagaaatgttctctaatacggcatttccatcatccatgtatttcacagtaaggtctttgacaaccatttcgcctccagagggccagatatcacttttcttcacatgctcattcttaatgactaaaacgtcagatgatccttctctaggtagttctttaattatctgtgtgtacatactttcttctgtttgtatatcaataaacttaaacactctgctcacagatcgcatctgaaatgaaaataacagtatgtttgtttgtttgaaaactctagacagtggccataattagtttgacgttgcctaaaaagataacctttaaattatgatgcaagaaaactgtcactaggttatttgacagggttttcagtgaagtaacaggaaataattagatataattaaatgtttagccagcgaaacaactaagacacatataattgggttctgtagagacctgtttatttttgtgattgcttaaatctcagttacgcagtccacacacaaataaccaaagtattctcaagggcatagatgatgtcaaagagaactcttttccccactatgacagtactacatattatgttgtaagattgtagcactgcagacagtactgcctctccactttctttaacatctataatcctgtatgtcaactaagttatttgtagacacctgatgcttagtcaatttctttttttctccttctttttcgttgggggggggggtgttttttcaaaacagggtttttcttttgtgtgtgtgtagctctagcttttctggaactcattctgtagaccaggctgcccttgaatgtatagagatctgtctgtctctaccttctgagtactggaactgaaggcatatatcaatttttagtgaatccacaatgtttaagttattgcacagatagaaagtgaaaaagtttacacttctaataaatattactttgaaatcaatttgcatcattagcaaaaggtgactttatataaaggttatattctcaattccatggaattgtggaagagtggcttgttctttcctcatcttagagtggagatatgcttgggcctggtagccatgtggcaaaatagacaggataatattcactgacagctaggtctatagtgatgctccatactagaagggaggagagtagagttcgggaccctcctctgggactccaaccatcagtccccttctgtttctcttccctttcagctgaagtgatcttgggagaccctaagagaggaagtagggcacgttggagcagcttccacaaggtcatcatccatgctagagttgaacattgtagtgtgaaagtgttttatgttcgctcacagtctgtaagtgatccgtcatccatgcttattgtactctcaataaactcattgttcaccaagttagacttggatgaaattcttacttttgcccttcttcagtgtctggttgggagtgaaaatacatttgttcacctttccttggaaaaagttaatgcaacaatctggtttataaatattccaatatgacatttaataaagtacatatttagtgcacacagaaatacaggaacttggcaaattttcaacaacaaaagaatgctgctttaattttattttaatactctgattttaataatctgattaactttgttgtgataattttaaaatatgatgacaacagatattatctatttgaacaattagtaaatgaatatatgatggagtatatatatatatatatatatatatacatatatatgtatatgtagagagagagagagagagatgggggattttggtcatttgaaaagtaatacacatttctttgactgaagcactgtagcctaacttgatcagtgatagtcaccattaaagacaaatccagaacatttaacattctatgtgctagacagcacatacttattgagtgttaaaaataaaagtttataagttgtttcttacaatatcaatgcttaaaatgaacctcaagtctaactattctcaccctggtgaaaatatccctaaccaacactcgttataacaatatgagcaaagtgtagttcaattcaatatctgaggacgttttctgacagtcagataaagtagcaactactgaaatgccattatggaatagactagtcactaaccaatttcttgaaccagggggctgtcagcatgttgattgcctctagaaggaggagtcacccccgaaccacagcattctttcaagtctcacaaacagtcttttaaaagtcaagacatagtaacagttcagcattttgtagtcatatgaacaatgacttttatgcttcaaaggccaagtcccaaagagacatacaactgtaggtattcatgtcttctaagaagtggtcatttgagttcaggctcagatgtcagcttgggcaagaaagcaagactgttgcttataaaaatgaaaatccactgtctggaacactgaagacttaggagttttagaaaaaaattttgtcattgattaacttaggatgtccgagaacagtcaccctcctcgactcacgatatgaagcatgaatatgggcaaggtgcaagaaggtgtcctgtcctgtatcctaagaagcatggaagaaaccaagaaggttctgcaaaaagagaagacagaacaagaccaagtctcccagatgattcttgtagacaagacaggaacttcggtgagtcatggaaagagaactcacaaaggagcctgcgaaagagctcagctccactacaaaactaagagggtctcaattagccagagttcttccctccgtacagcaaaagcaacaataataaaaaactaactacaggaaagttgaagtcctattcattgtacgcttgatttccctgtcaaaatttcatatcctctataaaaacggatctcagctttgtggaaagctcaagcaatttggtaggtccttcttacaaaaatagaattcaaattgtacataccaaattaactatagaggtaatatcaagtcagaaaataaggagcccatccttcccggaaacaggacttgcaggtagcagattcctaaatggagaaggatagagacagcccctgccatgctagtcatgctaatgaccccctcagtgcctgaatgatgatccaacatatatctctcttgaacctacccttgtccctaaaacctagtagttataagttggattgtaaatgtcactccaagataaaggcttggttccaagatgatggggcttttagagtatagtagaaacattgggaggtatggataactactgaaagttggcccctgagagtttgtccccaatcctaaatccctaaccccacttcctggctgccatgaggtaagctgccttctctaacacatattcctgttgccatgatgttctgcctcagcaaaggactgaagtcaaggcaggtaaccatggactgacacttcggggactgtgtaagcccaaagaaacatttcatttcttcatggggtttacaccaggtattttgttgcagtgacagaaaccagactgactcaagggcctgtggaaaggtcgatccaagtcaagacctgaagattatgtcccctggtgatgatcctactcactattgtaaatgtccacagtatttcttgtactcgaagaacggaatcttcagaacatctagtgcttaaccatacaaagacatgtaaacctttttcactaactaataaagccattgttttctctactatgcagtgataatggcaatgctgtgaggatgataaggtatgtcttcaagactgggaatttatatctcattttcttagtctaaaactgtatattgctaactggattagtcagaggttataacatagaacactagttttatatagccatgggctttttcacccatgtgccagtacctgaataaaaacggagaggcttaatattattaataaatgcctaggccataggcagggctggttccccaagtaactctgaacttattatcccatttattcttttttttcaatgcattttgctttaaatcagtgcttcaggtctcatcctaacacacccacctaagttttaaagtcatacattttaaagtgcttgcaattttattttcctgcactgctgtaaccccagcctgcatgttgaagaaatagtgcagcttgatgaacacttgtcaaatttccagggctccagggctccagggctccagggctccagggctccagggctccagggctccagggctccagggctccagggctccagggctccagggctccagggctccagggctccagggctacgtgcaatgctgaacagtttctttgtgggatgaggatacatccctcagagtacacacacccactcatggcttcctgtggtttattgctgatgatcagaaattttgggggaggtagaacctcccaatgggtagatagatggaagtcaagcttgagttcttctctttccttcagagtcttactcccagagaacactgttggaggacaaggcagatgaatcaggctgtgaggaaggctgtccatgggcaggcaggaatcagaagcctggagtctgatcacaggctggatgcccctcactgaagccttgagcaccttcctgtcctctctagatcaaggtcttgcagcagaggagtgagtgcatgccctgactctggagcctcctgggcaagtactgcagtactcactggaagacacattcttttctctctggtggcacttcccagccattcacaaaggacacatcacagttcataaagaaagtctcgaacgcatccagatcagagcctttcttgccagaaggtgccaggcctgtaagtctgacccagccacattccttgttgagtctgctggatccaggatcagaggcctgtcgttttggatctctctgcgcaagtagtcagagatctcatgtttaaaatcataacaccatgtccagtagattcaaagacatggatagttagtgatcagttctaagacagttcagaagcactgggctgtatgtagtccagagctgtcttggagcctgcattcccaggcatagactgtgagcagctccaggggatactgtggggacagtggctccctcagcttctccttacacagttgataccagtgcttgaccagacagaggagagtccatagcctgggtgcacgatacctcaggaagttttgatggatgtctgtgaagcagatcaagaattcatccttcttctttagcgtgatgcactcatggatgagttgggtatagattttgttgtagctattggagtcaaagttcttgtagtttctcatttcataaggacatcataggctggctgcacatcaaattccacttcctgctagcgctgggggtgggggtggggctcagagacctggagttgggttgctctgagctgtggaccttaaacttcttgcttcaaattgtttttcttgctgcaaatggcacagagttctcaaatttcctcaatgaactttctctgccactttaattgatccttaaagcaggtgagagtgttaagaaacaccaccgggtcagccttgagcatagtgtgttcatcataggagctgcccatcacaaccctggagaccctcaaagggtgggcggcaccttggaagcatctctccatcaggaaagcacatatgacaggttattcttccacatactacagcagagattacccctgcagagattacccctatctgttttcataaaacttgcaaaactcacttaatcctttcttaaaggattgtctactatatatttccacatggtatgtaaaaaccttggtgtcttagcgctagacagtcactcagcattggtaattatcattatagctgtagactgacatactccccagtctcaagctgctgtctgctgtgcttagaagatttaggaaggaaggagtatgggcagccctacccaggaaggttagtcagccccatggataggaaaaatctctgtgtggctagagttaaattacaatgaagtcaggtaaggaattaacaccatgttctcatactttaaaggcaaaggacaaaaggagagccaggtgagccaggtgctaaaacactgaatctgttttttatttatggacaagaaaacttaacatagcataggttcttattctttcaaattggaatgtagccaagataaagtgaaatgtttgcttgcgattcgtgtgcttgtaatttctggtacattaattgtattaagagccaaagccttcccctaaatatattgaggaagaggtaatccttaaaactgttattatccttacagtaatgcctaaatgtactaatctaagcaccaagatgacaatgatgatggcaagaacaaaatgtagttcaatagcttcctttcaatgttaatttataaaggaggcaactcggttatcatgaaaacgactctaaattttcctgttcatcttttctagctaatcacagaagtcattacagcattttcaggaatccagaaatgtctcataaaaatatttgctaattttacttagttctttagaaggcagaataacaaaattatgcttcaatgaatgaccaagcactccaaagtcatggcaatagtgacattgtttcccatgcccaaaatgttcatcaatcccagacaaaaatgtcattatgggggaggattgagagatagttcagtggttaagagcacaggctattcttctaggggacttggttttggttctcaacattcataaagtagctaacaactgtctataactccagttccagaggatctaacactgtctcctgtcctccatggacatcagatatacatatggtgatcagatgcaggcaaaccccccacacacataaagtaattacaaatcattaatatcatctagctacaaatccagaaactataatagaagtgcaatagaggcacaagtattatagactaaccaacaattagataattggagttaagacctattccatgagataggatacttgacacatctaaagtgggcaaaaaccttattaggtaggtcatgggctgtaggggaaagcctacttctattattcagcctaaagaatataacaggaacatgtctcttaatgacctaatgttgtacccatagattagtgcctcactcagccaccatcagagaagcctttccttacagcagaaactaatgaacaaaacaatccatgactggacaatgtgcagagaatgagagaaccactcctctcaaaactgagagatttataggaaggggagatagcaagtggtggtagatgatttcaaggaaatagtgtcatccagatacaacaggattgtacacaagtgaactcacagagacagtgatagcattcacaaggttgccacatgttcaaagcagacaaaactctcagggctgagaagggaaaggggaattggacatgtctcacccttaactaataaactatttgcaattgatatttgctgggaaagagaaaaatcaatcctttcaatggagtgtcactggtgtatgtaccacagaccaaaccaggcctcttgcatagcattagttggtgaatacaatatataagcagatggagtggaggaatatgacatagtggccatatttctactcatgcttagcctacagggtatagttactagtaaatggaaggaccactagcaaaccatgttttgtgctgtcaatgatgcttacctaagtattcatgttacatacagaaaatgaagctgactgacagaatgctttggagaagttagaatatttcaaaatatagatgcttagaggaaaatactgaattcttgataggatattttgatttgttattttaggttcatttatattttttttacgtattttgactatattctttcctcttcccccagtttcttccagattctacttactatctctctatcctctcaatttcatattttctccctatctctcaaacccaaaccactcaaaattcaaataaactgaaaataataattgccaaagtgaaatgaaacacacacaccactcatgaacgtctatggctgctttgtcatacaaaggttgagttgagttgctgtcatgagcccataagcttacaaagctgaaactattttcatttcaaccttaatagaaaaaatttgctaatccttgtaacgtgactcacagacattcaaagcaaaaaggaatctgcaggaccacttaatccagtgatttaaaggcctccatacacattagaatcacctgggcacatttcaaaatacagaaaacaggccctgatacttgccccagcagaagaactaatttccctggcctctgtgaacctgaaaaagcagctttattcatctgtagccagactgagagagcccatgatctaatccatcctttcattgtacataggacaaaacctaaaccaggaagataaagtggcaggaccaaagccctagtcaattttccaagtttatcacacaattttgtacactccagcaattcctgagggggctgttaaatttcttgtcttaattcaaggttcaaaaatatcattctattagttactttttctttgttggctgtagtaacatactgagtcagctgtagtaactacaggctagtattcaatgaatgtcagcattcaggatagggttggtgtgtggatttcctaagaactgaaataatatctacatgtaggttaagagtttatatttttatatggaagggttcagcagagagagaatgtcaaacatgccagcaatctgaaaaattcctaaccaaaccatttaattttacagaggaggaaaataaggccttggaaatgaggaaaaatgacttgtctaaaggcactcaactttttagtgtctgagccagaaagaaatgcaaggctctttgcggttgaatgcataatgtcttgaaaaatacaccacaaagacttgtaagaacaacaacaaaccacaatcaagctaccattaaaaggaggcaaaagacaaagaggatgaattaactcatccgtcagattggtacaacaggaactgctttcaatacaaggacatttggtgacggcagtcatgaaggaaggagaaattcttttttgtcctcccacatttcatgttgctcattctacaattagtcacctgatcctcagtggaacccaaaataaacacaggtgatgagagcacaaaggagacacagagtgactttgtgctgacagaaaactcttctcagattgcaccaaccatgcaagaactttctggaacttcactaatagtgatctaaatggaagtcttataagctcattgttcttaactttgcaacttccttctttttactagggacatacagttcagttcaataatctagtggaaacagggatgcttatttgctggtcttcttgaaaaacgaaggcaatggcattcacatattaagactgctcactttctgttccttctgtggtagaaagttctggaaggatatgagttatcaaatgaagaaattatgtgtgagcaacctcttagacaccagatggtttaatactgccaagtttaaaatatcaccttttatacctttgttggctctcatttatttatttggcctttcagggagtataaactttgtatcatttcgatggccacttaagatcatatgtgcactctgaggtgatgtacaggaactcatatgcttgcatgtcaaatctactagaaaacaatctagcagaatattttatagattcatggaggtatcaagatggtagctggacatgtatagagaggaatagagagatgtacactaaatatatgaatctataattcatcaagagacaacttttgaaccatggggttagataccaatagctatagagaatgcatgtggaaagaagaagtaatacaaatgatgatttaaaggatacatgagatgaaggcccaggaggtagcagaaaaatgaaatagtataaggattcatccatgtgaaatagtgctcaacaacttcagaagacaaggacattgctttgtacatgatgtttattgtgactcacatgggtgatgaatatggaagaaactgtgtaaagaacagaagatataacagagaaaggcaatctctttagaagttttgctgtaaacaggtcaaataattagggcagaaactggagaccaaatgaaagtattcactggtgaaaagtctcataaagggcaggcaactacacaggacttgcctctagatagaagcaaggacatgggtaaagagagtacatatgactagagattcaataaacctgtactcatactctaagatgtcatgtctactgcaagattttctagtagtatgctacattaagaaagagctctataagttccctctccctactgttgggcatttcatctaaggtccctccctttgattcctgagagtctcttacctcccaggcctctggtgcattctggagggtcgtcgtccccccccccccaacctcctatttcctgaggttgccctgtttccactcttcctgctggccctcagctccagcagtaagacaggacatcaagtgagggatggggttgtcatcccacagtcacatctctgacccataattgttcctgtctgaaagaattgcagggattggaatggagaggaaacctgaggaaaagaaggtccagcaacaggcccaaagtgggatccagctcaaaaggcattcctgacactattactgaggccatggagtgctcacaaaaagggatctatcatgactgccctctgaaagacccaacaagcagctgaaagagatgcagatatttgcattcaaccaatggaagcagctgacccctgttgttgaattagggaaggctgaaagaagctgagaagggtgatcctgtaggaggagcagcagtctcaattaaccttgagatctctcaaacactggaccaccaaacaggcagcatacaccagctgatatgaggcacccaacacacatacagcagaggacttccagatctgtgttcattcagagatgatgcacctaacccttaagagactggaggccccagggagtttagagatcaggtgggggtggaggagtgggggatgggggagtggggaggaagtgtgtgatgtggagcagtgggagagtggatgggggggtggggaatggaatatggagtgtaaaaaattaattaaaaaaattttaaaaagacaaaagagaaagagatagtagagagatgtaagggaattatttctggttatatgtatgtatttctgtgagatatatagaaaggtctttggctaagagtttaaagaatagaattattataatgtctaaaaggatgtagaaataaaggaaagagcttgggagtaaattttattatgaaaacataatgaaaaggttgctggatagttctgagtatcagcattccagatatgtgataataaacacaacataacttgtgttgttgtgatattggatttaatagctgagagataaagaaagctagagatatgtgggtatgtaacaggtagaaaataaaaacaaagttatactgctatattcataacttcatagtcaaattgactgtattaatttttaaattgggacagatgggaaatgaagtaattattccaactctgaagtttttcctgaatagccttgtacttagctttataatatagtaaagaaaacattgtatttgttccattttaaactcagatcactcttgatgcagtttaaagcacagtaagataaaattacatcacactgagtttttgcttagtgttgtaaaaccttggggttacatcaggtgggtgtgaaatctgaaagcactgaccagacattctcccttcagattcccaaggaagaggtggaaagaagagcactactggccactgatcagacattctcccttcagattcccaagcaagaggtggaaagaagagcactaccgggtagttttcgcagcagtgcaggtgagaccagcacgatgggaggtaatagcaggaagggaccaccaacacccaggaaggcccgccagcattgcttggcaaagagatgcaaactaacatacgctctttgatattaaacaaaagagcattacttttgaaaacgtaatcaactgcaaatattgatacatttcatagaccatgtcacaaacacaataggtctgtaaagggtcctttcacacaccatgaaagatacaatgtcagacaacaaagtctagcatagccatgggaaaacctggagaaatactttaagtgtctttcatggacactagatacatgaagtagaaatgtatttagcaacggttttgtcagcctgtgcaaaggctattctaacaggactgtccaatccacagttcacaggccacatccagctgcacaaacagagctatgaaagaagcccaacacaaatcaaaaacttactacttactgaaaatcttaggttgaatgtgtgtgactaagtttaggagcttaactgtacatatcttgagtgtgaactctgtaggtgacaacattgtgttgcaatgtcaaaagtttggctatgtgattaagccagaaaattaaggttgcaaagggaattgtacatgtacaagaagagaatttttatgtaaagaaatatataatgtgcacaagggttttgaattatgaagtcatagttttaaaaatttaagtaaatagaaacagcatttatataatcttcttcagctaattccaacacaaaaccaagaagtgtggagaagagactagggactggtctaactaaataaaacctaagaaaactgtatttcaaggaattactaagctgcctcatggaatgatgaaaatgaacaaacaagaagaggctttaaaagattttaggtttttcccttgtgacatatttatgaaaaaaatatactgtatgtatttatatattataactatagaaattttgcaatcacatgaatgggtgtctgaaaatggaagtaaagggagttgtatggattctagacctcttagaaatgacataaggaatggatgaatgtatgtccaaagccttaagcttcagtgacaggtccgcaatgacagatcagcatgtgatggcaactgctgctaagcccgatgacttgagttcagcccctaggacccacatggtgaaaagagggaggtgagccccaccagtttccctttgaaccctccacactcatgctgtggtatggacattccttactgacacaaataactgtaatcaaatatgtaaaaagaaatcagttatgacattctcaggccaattctaaagtctaactgataatatggcttttattaaaatataaatagggaagtttatggaacctcttttcatttcttgccctggcccttgtgaattagtagtcctttgtatcattttagcacacaaatatcacttcaggctctcactctatggaagaatacaccaaatatggtctttgaacacacaaagtcctcaaatgcaagacagcatccgttaagcacaaaggaacagagcaatgacaaacactatgaccagacattttcaaaataagacaagaggattatgaaaaatgtcaggctgttgaatgtggaaacctaatatacagaaggatttcataaacaagacaccaaatgcacaagccataaaggtaaaggaaaataaactactctctatcaaattcaatgtttccattcattaaggtatactgtgagtaaagccactggctcaagggccattgaaatgtatagaactgatgactgatccaggacttaagaacacctataacataaggaaaaacaaacaagcacatcaaacctcatcaggttgcaaataacagaaacaagcatttaacagaaataaacaacaataaaaatccaagtggtcaacaatagagacttactaagttatccagaaattttagtagttacttcacattcatcaagctggcaaaattgtaaaagcctgaataagaaatactgctggaaacattcacatgctctcttgctggaagtatatagtggcacaacagactggagtaatttggcgttagtgaagccaagtttggggagattctaacctcagcaatgtcttccacttctaagatttgctttggaaaactccagggcaaagacacataataatgataatccatgaggacgaaagataaatcatgccacagcttaatgtggaatacagaatgtccttaaagtaacctgaatattttatttcttaaactgagtaatatatatatatatatttcatatgttagtgcctactctttttgttttgttctctcaacttttcataaaattaaaaatagtaacttaccaagctatctgtatcaatgcttgagttcacagcccactgcaaagtactcatgatattcatagctaaagttagaataataccagctgttccttctccttcacctagacatggaaaagggttttgaacaaagtatatgttatttctctcttctgtgaattattgtattcatctctctctcatcgcttgccaataaatttatgtttcaatttaatgcagttttagtgactcctttgaacaataatgccttcattgagtaagctttcatccagaatttaaaatcaaatagtgactgaatattgggaactgctgcacttttaaatgatgcttaggtcttgaaggtaatgttggtagtgagtaattgtctactcttactctgtatgtaacaatataaacaaatactgattgaataccacaccataaatgagtgaatagatagatagatagatagatagatagatagatagatagatagataggtagatagatagataaaaataaataggaaatgagatcctgtacagaactcaaaggagggccacatccatccgagtagcactagcacatgtgctgagcacctctgtaagggtcatggtctctgctcatcaaaagctgtttctaagaaaggagtcttcacttgtcaccaggcagtcagaaaactaatgccagccatttaagggagaagtttgcacattacattaaaagcaagaagaaaaatgcccaatctgcttgaaaagaacagtgttaatatgttattttagagtaaatttcatttaggattagaaagggcaactaattaaaattttaaaaaatgaggattatgactacaaatatttttaagataagtgttcataaattattttaaagttaggatatcatatcccaaatgataatgcttaatctaccattaaattactataaagttaaacatcaagatgaacaagtcatcctattaatagctgaaaaatttcatgttgacattttctccttcttaggtacaccatagataacacatgttatgctgtgttaatatcaaataatatattgaaaattgttaatagttcattttatataggtcccttatacatttcttattctgagggttaaaaaaaagtaaggtaatattttaataccaagtagtattatttaataatcactggccatttattacaaacaagactacactgtattacacaaaatatcacacaatattatgaaagtgttattagtgtgcatctgcccacacgattagggaattagggaagttaattaatggctgtaaattaatgtaagttaatatcatcaataaaattaagaccaatagagttggttggttatggctgggttcctgggctgtgctgctcatcacagttggaggttctactgtgttgactagtgaagattttgagtactggccttagtaacccaggacttagtcataatatacagtctgatacagcatgtgatacattggcttgagttaattgtgaagtcttaatccatgtaatttagtcatctttgatcccctctgaattaccttatatacaaataatcaatattataccttccaaaaattattttaaggtgtcaaaatgactatatgtgtatccacaaatatacctacatatagattcatttcatagccatgcatgaagaaagcaatatatgggtaagttaaccatcctcatagcagttgtcaatctgcagtgggcccaaagccagaaggaatatgttttttgccttctctaggatttaataattggacacaggatccataccattaattcaagaagaagaatgaagatggcacatgaagctcatgtgttatggtcctgttaaatgaagataactattattctgagagagggcagggaggaagagagagggagacacatacacagatctctctctctcatatatatatatatatatatatatatatatatatatatatatatatatatgttatatgtgtatatattatatatgtattatacatgaaatatatacataatatacatttattatatacaaatatattatataatattatatatgtgtgtatatagatatagatatgacatagagagacagagaaagacagagagatacagagagacagagtgagaaagaaatgcatcatccacagaatgaagagaacagaaaccagtatctacatgagtcatacttatgcctgactctccagtgcctgtgctggttccttcaggtaatcaagtgtgatacccaccctgaggctgcatgacacaatttgataacttgtcaaaggctgcttcattggagttgagcaattctgttcttataatcaaataatgttgcaaatctggcattgatgtgtcattcgctctgaaattttgctataaataatatacaatattttatatataataaaatggtgtatatataagtaacatagcattttgactcagaaatccagcaccttaaaatactcatttatctgtatagattttaatttttcttattgtgacttattttttccttgaagatcctaaatttcagaacatttatatttgaaaaataatgcacttttatgtcagttattttacttctatgctaatttttatttattcaaattcatattagacaagaattttaccaataagtagttgttaagtgaagaaattttacaggaagtgtgaaatgataagtgtgtgtacatgtgtgcatgtgtatacaaatatgtttttctttccccatatagatttccaacattggcatgaaaaagacatttttcttgttagtcacatatttgctatctgactcagtgtctcattattcttaaatagtgaaactagtaacaataccatataaacctttaaataaattatttagaaacaaaacaacagaaatgcaaagaaattacttgtaagctctacaagtctacttaaaatcatctaaatattttaatataaacatatggcattttaatcactgacaaaaaaataagttcagattacctgttgttaaaatggagatgaaggtaacaacaatgaagaagaggacaaatatcatgtctattctcatttggaaccagcgcaaggttgccagatacataaaccagttggcagtgtgcaaattcagagctttgtggaacagagtttcaaagtaagtctggcgtcggaaggctcgaagtgtccagagtccttttaagcttgtcacaaggtgggtgaaaattggactcctgcctgtaaatcatcccataggagataatgtacagcttgcaatacagaacagaatttcatactaccatgtttctgacaaagatgaactccagagtaacttcacgataagcatctatggtgtgggcttctcactgaaaccggaatttacttttaaagtgcatggccctgcccttttacctgctgaccatggtagataggtaggtagtggacagaaccactttccttgttaactcacatttccttgtctaagagtagtcaatattcttggctaatcctaaattagtaactgctgagaaaatgggttttgtcttttgagactcaatctctaagtctctcagtgtagaatttctgtgaattgatttagctcctaagtttcaaagcagaaacacacattaagtttactctcttaaaaataaaaaggaactcacacaatatgtactcactgataagtggatattggcttagaaacttaggatatccaagatataagatacaatttgctaaacgcatgaaactcaagaagaacgaagaccaaagtgtggacactttgccccttcttagaattgagaacaaaacacccatggaaggagttacagagacaaagtttggagctgtgatgaaaggatcgaccatctagagactgccatatccaggtatccatcccataatcagcttccaaatgctgacaccattgcacacactagcaagattgtgctgataggaccctgatatagctgtctctagtgagactatgccggggcctaacaaacacagaagtggatgctcacagtcagctattggatggaccacagggcccccaatggaggagctagagaaagtacccaaggagctaaagggatctgcaaccctataggtgaaacaacattatgaactaaccagtaccccggagctcttgactctagatgcatatgtatcaaaagatggcctagtctgccatcactgcaaagagaggcccattggacttgcaaactttatatgccccagtacaggggaacgccagggccaagaagtgggagtgggtgggtaggggagtgggggggtatggggggttttgggatagcattggaagtgtaaatgaggaaaatacctaataaaaaatattaaaaaaataattgcctcacaccaaggttccttctgaaagagatgcttcctaaggagatggagcaaagattaaccaagccaggccaataaggaaaggcctgaagacgataagccaaatggaagaattccatccagtctcacttgaaatctgggagaaactctgaggaaaaatagcattgctggttttgactttgagcagtataagaacgtatgcatgtctatgcatacacaatggtaagggtatacacttgtttgaaagccaaaacaaagccatagtagttaacaaagtcaatcctcacgtactttataagtttcattgttgggccgggagagttcagtcggtaatatgtctgctacacaaacataagaacctgaggtcagattccaagcacacatgaaaaactttgggcctgtactgaatgtctgtaatgctagagatgaagacacatgggtcccggggcctccctggccagccagtccagctgaaccagcaaatgccaggttctgtgagaaactcatgagagagagagaagggaaggaagaaagggaggaaggaagaaaagagggatggtggggggaggggggagagagggagagggaagggagggagggagggaacagagaaggaggaagtagaaagaagatgataagggaaaaaagaagagaagcaattgacaaaggtagcctttggttcccacacatgcctgcacgagcaagtatgcccacacacatactactactactactactcagacacagacacagacacacacacagacacacacacagacacacacacaccactgttatataattagagatttaaagcagtatagtggttagtaaatgtggtccccctcacccacttccaggaacccctgcaatgcattccatgctgtaccttcagattccagttgtttgagctgctgtgctgtatgaaggaagtaggccctcagtaaaataaagactactagccctggcaccgttgctaggaagatgtagggttgtaatgccgagacgactattatagctccaatcacaatgaacaccaactgcggggtcaaagagaacatggtagtgagagacattttcactttgttaagtggacaggggcattgctgagctgtgtctacacacgttcttagactgcactattctcagtgaggaaacatgcatccatgaataaggtgccagctcgaaggcagtctgccggctgcagagaaacaatgttcaaattgtttagtttgctgatgtgatagttcagctgctgaagctttacacggtgctttctgttcttgggatatttttatttatcacacactctaaattttataagaagtaaatgtgaaatgattatgattttcttcatcctgtccattgaaaaattaaaatttcaaaataattttagtataaatattatcttttgtgattttgttggagtcgtttaaaatgaaacattcttaacagaacattttaaattacaaatatctgttttaaacctaggtttagtcatgttgacaagttcacttttctgactctaatttttcatatgtaatattgaaaggagtattatttaataagtgttatttatatctcacctcacctatgcctactgtaataactggagatactccagtaactcaaaaggtttatagtagatggatttaatttgaaattaagtatttttctagccacactatcaaaatgaattctgccatgcaatgcagacatcttactgtattacaccccagaaaattagaatactgtttgcaacctcactacagtttaccaaataaatggtccacatgacatcaaacatgtgctaactttaaaaccaacttagtgtaactttcatacgctaattctccactagtttccatgggctttctggctggtgtcctgaagggaaatgggcagggtagatctcagctcaaaagaaagctctgagagatttgctacctcatgaagctttagcagctctagaacctgaaataaaagtgtttaagatacataaaaggacttgaaagccatcacaaatgtcaaataacctttaatttgtaagataaatatttgaaaattagctctcccagatttctgagataaactaaataacaagagatacttaggagaccataaatatatatatcactcaagcaccatttttaagacttttgtaggcagattcagatagatatccacattccagtttttgaccatactatattatattgcattatattatattagtatatagtatttagtatacttttattacggacctttggtttattttctgagactgggaaacaaatgtctcatgctaaagaaacacacataaactaacacttttgagtacataaatcaaaacttgggttaaaaaaattccagtaggtgctgctaccgtaaagttatatctttaaacacagcaatgaaggaaatccaaaacacagttcacttagtacagtaagtgtatttaattatgtcaatcatttcagaggaggtgaaccaacagctgctttctctgcatctgctgatgtggcttgtgtgtatacatacaggggcaatagttccacattttttccaagttttcagagatgcagtactattttaaagagaagggaagggacaagctatgagactgtgtcattccaacaaggaccatgttgtgttacaactacttctccaagtgcatttgctctctgaagcttcaggaagccaacagggagctcagaaaactgcctgattcaacaggcaagagtatcagcttacaactcctgtaagtcctttgacattggagtcctaatgtgatgctttcatggtcactttggtctccactcaatggccttcttttgttattaagtgactttcagtcatctccatagcatggctaccctggaggtctgtcacagcagtcactaagggagagcctcagaggctctaaatatttcttttccttcacattttttcaacaatccatttttcatccttccattaagttatacttttgtggggaaactgcttagctaaatttgtgtttaagtgttcatgggtatggctggattagagtgtagcctctccaggaacttcattttcatttcagtgttggacttaagaaatgttctatgagtcaaattttatggtcaatgattgggcggaaaactgtcttttgtacctttcaaaccaattcaagaggatagtatcatatccagggcatgcctgaaatagatagacatagctagttactgaattcactaaatttatgactattaaacattgctgttcttcataaaacttattcactagccaggacttcaactagtatgtggaaaattagcaacaaattcacttgcttccttttgaaattattcacaaaactttatggcaaatagaaaaacttgataatagttattctttacaaacctgaatgaagtcaaaaatggtaagaggcagaaagtcatccaaaattgctatatctttggagaatctgttaagaatcccacctgtgatacaaataaatattctcaaatattaatcacttttagaaggacaccaatatattttatcctaaattcacagcacagcaaaatcatttaaaataagaattatcatctagtcagaaattcaagaacttacaaatattagctttgttgagaattctatgtatttatttaagttattgcctcctacttttgaacttttataaaacacatagtcccctacgactcagctccaagcagtgtctttaatcaagttcttactataattaagggtaggaatgtctggtcatcgtaccccttgggcctcacttctgctgctctcggtttcaaggtgtcttaatggcggtgctttcatcaattttttatgttcaactccaccaaacagggcacatacaccctccctgtggagttttctgccatttagatatgctgatccaaaacccacagctgtctctctcagtacacaccagacttccttttttattttgtctatcttcttcactgggaatataagcttcaacctgtattctaaattccagattcaccccatttgagtcttgattgttgtgtcaatgaactaaaaattccatgtctactacatgctttggtaatgctggctacagggaggtgattaagtcattctccttgtagtgcaggaattcatcttctaaaaaaggagctaagccaacagataaagtgtaacacaacactatggcaacaatgtaatagtgaaccttatcactcgttcactattacctactggattaaagtccaaaattctttaatatttaatagtttcccataatttgtccttaactaacctagatcctgctattcaaacccactgcttctggtaagtatgtcttctttagtctaccttttcctactttgcctatgtgttgttcctttctatctaaaagccctgtctcctcttgtcaaatctgtacctctttcctggttcaattcaaatagcctgtctgcaagagagtagggtatttactgcatctggaaaaaaatctcttcctgtccttgtctgtatgcctgagttgcagagactacatacgtgctgtatatcacagctgcttgtgtgtgtacatataacttatctcttttcccagataggagatttttgaagtcaataggatagataattccatgtctattttatatgacccacagacaaaagtaaaaagtcttatgcagacatgtgatacattagaaaacatattaatttaggatattttatgaatatattatatggatacccattatggatatccttccataaataagtcagagaaataatgtatattccatgacatttgtaataactatttaaaactgaaagtatgcttgggcaaaatagtatactcatagtgatatttatatttcaaattttatttcaaccaggagcatctgtgtattataaccgcattttgctgaggacctttattatgtgtctgtatgatcgcaatttgagtatgacaaagtgggagaaagtaacaggaaaaaaaaagcctgagaaaattactgtcaaggaaaagcatggtcaatgcacaattctgaagagctcatccaagggaaattccaagttgttgcaaagtatagcagaataattcagtatcagatgagaatcataaaccatgaatctaataactttttttaattaaaagcaaactatatgtaccacagctaccaaataatgagtgcaggctgattggaaatctcttgaggtcatcttgctgcttaggtccaggaggttgaataaggaggaacacagcataaagtggttaggaactaacctgagacacagatgacattttgggaagacaaatgagaaaagaagaatgtatggtgatcactgagagggaaaacagagagggcggagagggcgctgtgagtggattttgggagaaagaggatggttcacttcctttgagagcaacaacctcacagaaaagaatggcagaaatatgctaatattcatttcacgtaggctgctgacagccattactaccaatggtgtgtggccaaactaagcctaagcctcaaatgtctgtgtcctttccacgtgtccatgttcaattctgccagaaatgtgagagaacgcctctcttaaagagtgaattgcccatttccttagttttaagattcttagactaaaagaggatgaccaggatcatatgcaaatgaggcaaccctttgccgaggcataagggctccaggataaatataatctttttcatacatcaacacttaattttgtcacctaaaaaaatctgatgcacatttgagatttttagacagattacagtaaaaaggtctcaatactgtagctttctctacatttagttgaatttctatgcctgacatgaatgatactttaattatttgtatgcgccaggacttccctggcttagtgtcacacagcaggctctccagtgaaggagaacttaggaggcttattatcttcatggtctttaaagtaagctaactcagaggcgaatcaatgcaccacattttcaaagacccttcttaccataggttttgaaatgtttggttctatttttcaaattatcttactttctgtgactgtaattaaatcggtgtcaaatgcattatacaaggatcatgtactataattgtctcataataattaaaaactatccccctccccccaaagtcatctaatgcattcatatgaccactcttgaagaggcacaagaaacagttattttttttcccatcaagataagtatgtgagaaggtcaagttatccaaaagaggttgcttcaagtgagtccactgaacgcaaatcacattgtaacaagataatttactctactaggctgatacagaaatgctggggagcatgggtatgcttgcctgcagtatcttagaaatgccaaacaaggtagttggatgaggggcagatgcctgtgttcccgctcatgctgctactgaaggcaggcaggccgatgagccacacagatggcaagcgggcagctccactttatacctagtcacaagtacctgctttcagcttgctgatggtcgacataggggcgtgaagaatggagtgtaacattttcctgtgcaaaatttttgatgctgtgattaacgtatgcaccagcggcaaacctctgaagaggctcagggcaagcaaagtgtcagccactcccacgtaaatgtaaaaaatataatagaaactggtactggtgatgatcacaacataggagctattggaaattttagtaccattgtttccactgttaacagggttgctgtaaaacaaaagaaaaggattatttgacaaccaaacttgccaagtgaatcactaataaaaataagtataaggaaacatgaaatgctgactttaaaagagactatacccttagttttataaattttgtattgccaaaaggtgttaaggtttctcataattgaaatagatgtaattgattcttatttgaacaaaataattagtagaaactattaaatatgaactgttgcttcatatattttattgcatttcatgaaaactgaaaacaacatatattttagaaatgaagagataaaggcactgaacagctttcaacttgaacaaatatagcaaaccttatgtatctcctgtgtatctatggattcagccatcagtttactgagaaaattattcttaaaattgcatctttagtgaacacgcacatacttatttttcttatcatcatttctctaaaggatataactacttacatgaaaattacattatactgggcatcatataaatctagaaatgttttaaagtatatgtggtgatatgcctaggctatatgcaaaatactattgtattgtatgtgtaaaaaacagttttacacatggagcacgagtgcagaatttggtatctttgttctgggacccagtctcctcagaaattgaagaattattgaaacatggtttctcccctcataatcagcaggaatatggaagggtgtaatgaacatagtatatattaaaatagtttataacctctaaatataaacaaaacacaatccacataaagtgtggcatactcactttttaagcaaccataacacaaataaagaagcagccacctgcaatggaacaatccacagttgatttttttctagcgtctttatctaagccttccacacccatttctaaattcaatatgaccaacatcgaagtgcacacactcttagtgtcttggctttacacctctgaagtcacttcagcaattgctattggttaagagcacattaagcttatggaattccactctctcattttgcacattcatttttccacaaacactatttattgaatcatacaggaaaggtaagggttgtctgtttaaataatatattttattttagtttatcttattaacttctatgatgaagatctaatggtattattttaattgtcatgttttctcaatgtacacatagtctctgtgtactgtctcagtaagaaagaaaaacttctgatgtcttaagactcaagttaatgcaaaactagaaacctggtaataatctaagcttttaaaatgtctttattcttatagaaaagtcttcctcaatcttcagactaatcaaatgactctagaccctagatggggcacatgttctgagccacttctccattacatctcctttgatccaagaagagaaaaatcagcagcaccagcactgccaacacactctgaatagaagcaataagagaaatacgtagttaccaatggaggcctagatcctaacaaagtagtttcttgtctatcacatagattgaccaatccaagctatatttactgactacagtagataaaaattttttcaaatacttggtaggaagcctttaggaaaaatatttgggaattaaagagataatggaatacacactattatttcacttcaaaatgattcaagactatataaagttcatgtaatttttcaaagaagggtactcttggaggattacgctgaagcagcaacaaaataagtaataatcatttttattcctaaggtggggaggtaacacacggtgccatatcacatggaatgtaatacaccataatttgcagattttcacatattttgtgggacaaatataaccctaaaatccacattcacaataaagatgatgtgctaaagggactctaacactgactagcaaaggtagttttatagaagttcactataatctccattttattactgatgtaaaacaactccttattaacaaacagacacagcaggcctttgacacagtcttaaagaccacaagaccaaggagcaaacaggatcttgagatgctgcactctacacaccatcaggttattgtaaacatccattaatccagtgtttacattttccctctcttgtccataatacactgccaagaaggggcactagaaagagcagcacaatagaaatattagtctatttgttcagtgttaagaacttagagacaacattgcttttgagggaaaatacaaaatatacactttttcaaaataacacatgactgagaaatattatttcccccaccactaatttaagtagctgtgaaggaataagaaaagacagcgtgggccacaaagtttatttcctattacaaaagggatcacacacagaagagatgctataaagtcataaatctaaatggaaatacagtccttattaagacttaaaattatctaaatcactttaatggaggaggatatgcatttgggaatttcttgtcacttaggacttaaacagtgctttaaaaactaaactgccactgtggattggcacctgttccatgatggaatgtaccaagaaacattccagtagccaaaagaaatctacacattggcactgacacaaagaaaaaaagtttagacttaaacaaagtctatgtaaattttgattgaaggaaaacaacataaacattagcaaatatgttgtttagttgtaaaattgtgcatatcattgctttcttttaatctagcatttgagagctatttaactggacaatgcctataagatactgacaaaaatgaaaagaaggaaggaaggaaggaaggaaggaaggagggaaggaaggaaggaaggaaggaagacgaaaagaaagaaaagcacaccattagattgttttctgacaagtgcatcattgaattttgtccactatgaaccctgcccctgtcccctgacttcctttcccaaaatgtcttttttttcccctcaggtgactgttgatgatttggatgtaaaatgtgctaaagactcctgtgtttgaatacttggtctcaagctactgtgctgtttaggaaggctatggaatccttcggttcttgagcaggccttcaggtttacagcctggccccactttttcactatttgcttccaaagtgtgcttgcaatatgacctaccaacctgctacttctgctatcatgccttcccagcctctgtggaatatgttccctcaaacagaaagcacatatatatctcctttccttaacttttaggtgctttatcatggcaacaggaaaaataatagagtgactaatactgcattcttgtgcagcaggtcagcacacaatgaagtaattacatcattgtgaaagcttccctcgatgaacactgcctgagacaaaggtacagcaggcaagtaaggatcattaccacatgagtcactgcctgcctcattagatcatctagatggacatctagaattcttttcagtacttaacttcaactcatattcactctttgtaggttgggcttctgaatctgttaaaaactaaatgtatggaggtgtaataaatgatgtgaggattataaataacaaactattattttacttgttagatgtgtggattttaggaccccttgtcacaaaaacaacaaaaaatgttacttgagatgacatagttatgttattgattttgttatagtaatctctttacaatacttatgaatcaaaatatgctgattataaaaaatattcccaataaattttattttatgacaattcatcatatatagcatttgtatttatgcatatttccttatgtctgaagtactaaaatatcaatagtaattctaactgtggattttaaaaagttttaacttatttttctgtgtatgaatgttttgcctgcacacatctgtgtactacacacatgttgtacacacagaggccagaaaagagtaccaggttcctgagacttcagttacagatgctgtaaaccaccatgtggggtctgggaatttggctaggttgtctgggaaagcaaccagtgcccttaaccacatagctgcctcgtcagctcctcttggttttcagaagcgatgaactttacaggaaactaccgttgtacacatgcacatacacatgtgtacatgctcatatgaatacatacagcttttttatcctaaatttaaactcacagtgacaatttccaaacaaacatacttacctcaaccagaaaaaccagtacgcaccaaatcagcactagcagtaagcctttatggagagtaaaatatcgtaggtatgtgttccatgttgtcaccgggggtatcttgatcacatcatcaagaaaacactcctgagaaaagaagtgtgattctgagacaatcctactccatgctgccactgagcttttattatgaattcagggaaataagggaacagtaccatttacagccaaggatctttaaaaaataaaagccactaaaaatgccacgggtgatgatggccacagagaataggatgtctgctcaagcaatatagtttataaagtaccaaacacagtgagacttcccaaaccttagcatgtaaatgctttacagcccacaccttttgtcaaatgagtgaagctcccaaactcttcatgattgagcttgattcagtgagccagagacaagggcaatgtagaatttgctagctacttgagtcttctattttagaagctggcttatatttgtatagtccttaggcattacatggttgcttttctagctacaacttaagttacaaaatccaattccaaatacagcctctaaaagcctttgtcttttggaagctacattataaaaatgtgagaaaaagagagtctatatattctaaagggaaacgatgccctcataaaatccatgaagttcattaagtgccattagactcacaaagaaggaagcctattaacctggaataaggtttactgattaaaaattagattgttgaactaaactgccctttatttaaaatcaagaccaaatggtaacatcgtaggatgtttgaatgtatgaagatactgaatttctcagaactttattttatttctttgttaatagggacaatgatgtcacagtgaaggagacaaaaagtgtgttgcctggaaggtgaaataattgataacttagtaacaaaatcaggtaaagaaagcattctttaaaatgcacacaaaccaaaatgtatatacttcaatttggtaattttatttagatggatattaaatcatatagatgaattatcttttagcaaatcagttttagattatagaaatatcgagcatatatttttgagaattacttattcctttatttcacaacagagtgaactcaggcccagagatactaaatgaattgcaactgcccaaaagttaactttatattaaagacagtcaccattaaatatatcatccactaggactctgctttaacttcatctaaggtacatccactggtaaacaatcgccctcttgttttccactgctttctattttaagagaggtcgttttgctccttaacacatagagttaagaactttaatctgactactgtcactaatatatgccgagctgcacatatcttccttagagaaaccctttaaaaaacacaacacaaatctgaaaggttagaaaatatatgctaactaaatgcaggcaggaatgtgaatttatcttgtcaagaagccaggtgtgtgtaatccttatcaaggccatgccttaaaaacactttttggtgtctacataaatgcaagtatttgtttatataatactctattccgccttttcctagaaaaacactaaaggagacaattattaagttataaaagtgaatatcatttcatgagtctagtagaaaaactcaacactgaggccctgttttggcttaccacacatttgtggggtggggatgatatttcaatgataaccagaaatagttttatgtttcaagttgcttacacaggtaatggactttgtatccttagcccatagaccacaatgggatgccatgaaatacatagtatgtgacaaaatttactccaattatggggttaggatgagatgtatcttaagacttgacgggtatatacctttaaatcttcttcgttaatttcttcagtgatgttcagtgtgctatcttgcgataatctccttgaatatacatccacttcatttaagcttatctgagggactaaggagatttttcgaatagaagttctggtcctctgaagattgctggagcctgagttgggtgtgaacgtcatcagatccaaaacagactgtcttcttctgcctggaaatgtggggccggtggcgatcatgttgctgcgcggcagagcagcctccccctgttcagaatccggaactagggacagtctcttttcttggagatcatcagactctccatcgatacataatggagtcttttgcacaatggaaattttccttacagagctgaatgaatttagaatagagttcttccttttttctcccacctctccagtctgtctaaacgactgtttgggtttgctccacggggcagaggaatcgtctactgagaacctgcgtaaggtctcagttagaattgaacttcttctttcctcagtaaactggtcaaaagtatcataccccatgagtttcgaactgaagtctggacgtagactttgtagctcagaaaatgtcccataaaaatagctactgccctgatgcaaaattagtattttgtcagctttccttaagtgttccattttagatgtaaccaaaatcctagttttgttggccatcaatttacaaacacagctttggaaatataaaaaagatataagatattacttcataaatagtgatgtatatttaacttcagcataaagtttcattgcataaaatctatcatagcattttattgctttatttaatacacttatacaaataaccactccatcataactcttaggtgcctcatgaattgcagtatgaaatagcatatcttactgtaaagtaaatactagcagacataaaatcaaatacaattttaaataatcaagtatctgattttaaccaaatcattttctctttggtcttgatttatttttctagaaaataaaagaattattatatgttcctaaagtttatatgtccatataacttctaagatgttagagattttctatttttagtttttaatgaattttctcttatattttatgttgactaatctgttttctttaagataaaacattacaactgagaaatacctaataaagttgactgtcctccaataacattttcctacagatctcagaagatggaaagatctcccatgctcatggattggcaggatcaacattgcaaaaatggctatcttgccaaaagcaatctacagattcaatgcaatccccatcaaaattccaactcaattcttcaacgaattagaaggagcaatttgcaaattcatctggaataacaaaaaacctaggatagcaaaaagtcttgtcaaggataaaagaacctctggtggaatcaccatgcctgacctaaagctttactacagagcaattgtgataaaaactgcatggtactggtatagagacagacaagtagaccaatggaatagaattgaagacccagaaatgaacccacacacctatggtcacttgatcttcgacaagggagctaaaaccatccagtggaagaaagacagcattttcaacaattggtgctggcacaactggttgttatcatgtagaagaatgcgaattgatccattcctatctccttgtactaaggtcaaatctaagtggatcaaggaacttcacataaaaccagagacactgaaacttatagaggagaaagtggggaaaagccttgaagatatgggcacaggggaaaaattcctgaacagaacagcaatggcttgtgctgtaagatcgagaattgacaaatgggacctaatgaaactccaaagtttctgcaaggcaaaagacaccgtcaataagacaaaaagaccaccaacagattgggaaaggatctttacctatcctaaatcagataggggactaatatccaacatatataaagaactcaagaaggtggacttcagaaaatcaaataaccccattaaaaaatggggctcagaactgaacaaagaattctcacctgaaaaataccgaatggcagagaagcacctgaaaaaatgttcaacatccttaatcatcagggaaatgcaaatcaaaacaaccctgagattccacctcacactagtcagaatggctaagatcaaaaattcaggtgacagcagatgctggcgtggatgtggagaaagaggaacactcctccattgttggtgggattgcaggcttgtacaaccactctggaaatcagtctggcggttcctcagaaaattggacatagtactaccggaggatccagcaattccgctcctgggcatatatccagaagatgccccaactggtaagaaggacacatgctccactatgttcatagcagccttatttataatagccagaagctggaaagaacctagatgcccctcaacagaggaatggatacagaaaatgtggtacatctacacaatggagtactactcagctattaaaaagaatgaatttatgaaattcctagccaaatggatggacctggagggcatcatcctgagtgaggtaacacattcacaaaggaactcacacaatatgtactcactgataagtggatattagccccaaacctaggatacccaagatataagatataatttgctaaacacatgaaactcatgaagaatgaagactgaagtgtggacactatgcccctccttagatttgggaacaaaacatccatggaaggagttacagagacaaactttggagctgagatgaaaggatggaccatgtagagactgccatatccagggatccaccccataatcagcatccaaacgctgacaccattgcatacactagcaagattttatcgaaaggacccagatgtagctgtctcttgtgagactatgccggggcctagcaaacacagaagtggatgctcactgtcagctaatggatggatcatagggctcccaatggaggagctagagaaagtagccaaggagctaaagggatctgcaaccctataggtggaacaacattatgaactaaccagtaccccggagctcttgactctagctgcatatatatcaaaagatggcctaggcggccatcagtggaaagagaggcccattggacttgcaaactttatatgccccagtacaggggaacaccagggccaaaaagggggagtgggtgggcaggggagtgggggtgggtggatatgggggacttttggtatagcattggaaatgtaaatgagctaaatacctaataaaaaattgaaaaaaaaatgaatttatgaaattcctaggcaaatggatggacctggagggcatcatcctgagtgaggtaacacattcacaaaggaactcacacaatatgtactcaccgataagtggatattagcccaaaacctaggatacccaagatataagatacaatttcctaaacacatgaaactcaagaaaaatgaagactgaagtgtggacactatgctcctccttagaagtgggaacaaaacacccttggaaggagttacagagacaaagtttggagctgagatgaaaggatggaccatgtagagactgccatatccagggatccaccccataatcagcatccaaacgctgacaccattgcatacactagcaagattttatcgaaaggacccagatgtagctgtctcttgtgagactatgccggggcctagcaaacacagaagtggatgctcacagtcagctaatggatggatcacagggctcccaatggaggagctagagaaagtacccaaggagctaaagggatctgcaaccctataggtggaacaacattatgaactaaccagtaccccggagctcttgactctagctgcatatgtatcaaaagatggcctagtcggccatcactggaaagagaggcccattggacacgcaaactttatatgccccagtacaggggaacaccagggccaaaaagggggagtgggtgggtaggggagtgggggtgggtgggtatgggggacttttggtatagcattggaaatgtaaatgagctaaatacctaataaaaaatggaaaaggaaaaaaaaagttaagtattgcagtggatactacagggaaaatctgttccttttatccattaaaatataaaaaaataagaaccattaaattctcttaagtataaataatataattttaggtaagtttatgacagtaaacattggcaactatagtcagagcatcataaaaatagcattggggaaggggggaatttcatttaatggaattttctctttgtcttaaactagagtcctgctggaaacagacttctgaaatgcatatggctacagtgctagttcatatttctggcactatgcaggttctacagatacaaaggagctccccccaaacaagtgaagctaaaattattatatataaaggaaaacaacaactgaacaaacaaaaacagtacagtggctcctggaagatttgaacaagtaattcagacaaaggtactttgtgctctggaccacatagaaagactcatgtaaaattttgtggcaacctttctgctaagaaggcatcacacagactttcaaagaagagccaacactcctcaaactattccataaaatagaaacagaaggaatgctacctaattcactctatgatgacataattactctgttatctaaactatacacagacccaacaacaacaacaaaagaacttcagaaagtactcataaagcaaactgaatctaagcacacattaaaacggtcattcaccacaatgaagtaggcttcattccagggctgcaaggttggttcaatataagaaaatacattaatataatcaactatatcaacaaactcaaagaaaaaaatcacatgatcatcccattagatgctgaaaaagtatttgacaaaatataacatgccttcatgttaaaagtattggagagatcatgaattcagggcccatatctaaacataataaaagcaatatacagcaaaccaacagaaaatatcaaattaaatggagagacacttgaagcaatcccactaaaataaggaacaagacaaggatgctcactctccccatacctattcaatatagttttcaaggttctagccagagcaataagacaacaaaaggagatgaaggggatacaaactggcaaagaaaaagtcaaggtatcactatttggagatgatatgatagtatacataagtgaccccaaaatcctaccagagaacttctacagctgacaaacatcttcagcaaagtgactgaatgtaaaatttactcaaacaaatcagtagccttcctttatactaaggataaacagggctgagaatgaaaatagggaaacaccaaaaaaaaaaaaaaaaaagaaaaaaaaaagaaaaagaaagaaaaaaagaaaaaagaaaaaaagagagaatgagagaaagaaacaaagaaagaaatagagaaggaaagaaaggaagaaagaaaggaaggaaggaaggaaggaaggaaggaaggaaggaaggaagaaagagagagagagaatatcttggggaaactaaccaaacaagtgaaagatctgcatgacaagaacttcaagtctctcaagaaagaaatcatcagaaaatggaaagatcttccatgctcatggattggtaggattaacatagtaaaaatggccatcctacaaaaggagtctacagattcaatgcaatacccattaaaattccaacacaattcttcaaagacatggaaagaacaattctcaatttcatctggaaagaaaccaaaaaaacaggaaagcaaaaacaattcataacaataaaagaacttctgaggaaatcatcaccctgacctcaagctatactatacagcaatagtgataaaaacaaaacaaaacaaaacaaaaaacaaaaaacaaacctgaatggttttggtacagagacagatcagttgattaatggaattgaattgaagacccaacagtaaaagcacatacttatggatacttgatctttgacaaagaagcaaaaaatatacaaaggtaaaaaagaaccgtcaataaatggtgctgatctaactgggagtcagtttgtaaatgaattaaaatagatttatatttgtcaccttgcacaaagctcaagtccaagtggatcaagaaccttaacaaaaaaagccagataagataaatctaacagaaaagaaaaatgggaaagagccttgaactcatggccatggaggttggggagaaatttggggattagggggtgtgggtggggatttcctatacaaaactccaatgactcaggctctaagatcaagaattgataaatgggacttcatgaaactgtaaagcttctgtaaggcaatggacattgtcaataggacaaattggcaacctacagattggggaaaaaatctccactaatcccacatctcatagttgactaatatccaaaatatataaagaactaaagaagctaacttccacaaaaaaacttccaataaaaaaaatggggtatagaactaaacagagaattcacggcagagaaattttgaatggcaattaaagaaatgttcaaagtcctttttgatcagggaaatgcaaataaaatgacctcgagattccacctttacaccaatcagaatggttaagatcaaaacctcaggtcacagcacattttggcaaaaatgtggaataagaggaacactcctctattgctggtgggattgctagctggtacaacaactttggaaataaatctggaggttcctcagaaaattagaaataattgtaaatgaagagccagctatactgttcctaggcatataccaaaaagatgtcccaccatgctacaagtccactgtgtttatagtagccttatttttgatatccagaagctgtaaacaacccagatgtcccacaacagaagaatagatacagaaaatgtggtacatttacacaatgaatactaggcagctattaagaatgaggacatccatttgcctaagaatttcataacatgttcaggtattagcagggtaggaaacaggagtgaagcactgagggcaagcagaatgaatgaaaacaggcaactcaggaggtgggatgtggggggaccttctagaatataccagagacctgagaagtgagagactttcaggactcaaagggaccttaggtaaaatacccaacagtgttgagagagcacttatagagtccacctccagtagaaagacagggcatggagggatggggttgccattgtacaatccaaaactcagacctagaattattcctgtctaaaagaactgcagggacaaaaatggagaaaagaatgagggaaaggaggtccactgactggtccaaactgggagccatctcagcgtgagtctccaaggtctgatgctattactgatgctatgatgtacttataaacaggagcctagcatggctgccctctgagaggcccaacaaagagatgactgagacagaagcagatccaatgatcagaagttggggacccctgtggttgaactagggaaaggctggaagaatctgacgaagagggtgatccaatagaaagactagctgtctcaacaaacctgaacttccccaaatctctcagacactgagccacccaccaggcagcatacactagttgggaaacatatttacatctgaggatggcctattctggcatcaatgagagaagatgcatgcacctaacccttgagaggccccagggaatggggaggtctggtgcggtgtgggcatgtgtgggggtgtagagacatcatcttggatataggggaggaggaatgagatgaagaactgtcagagggcagaacaggagggggataacgactgcactttaaaaaaatgattacagataataaaatataaaaaaaaatactaaaaaatatagagattgaaggaagttcaccagtgtctggtccaatttgatacctatcccatgggagagagccaactcccaacactattaatgatattatgtttgcacatagaaccctagcaaatgtgtctctttagaggcttcatccagcaggtgatggaaacagatgcagagatccacagccaagcattaagcagatttgggggagtcttttgtaagagtaggggataggactgagggaggtagaggggttaaggacaccacaaagacctacagagtatactaacctgggcccatgggagctcagaaagactgaagcaccaaccagagagcctgcagagactaaaccatatgtagcagttgtgctgtttggccttcatgtgggtcccctaacaactgcagcggggctgtctctgaatctattgcctgccactggaattaccttcctccagctgagctgcttagtcaggcctcattgggaaaggataggcttgtgctgtgacttgatgtcccatggctggcaggtatccaacggccaaggggacatcctcttctctgagaagactcatgggggggggggggcaaatttgtgagggtgatactgggaggagaggagttttgtaaagtgaataaataaatgaattaacaattatcaaagccttaatgatgtagctttagtaaataaaatacaatgtttaggctctctctgattattaacctcaagttgaagaataaataatattgagaatcatcagggaaaagagagccagcttgcatctaaaaaaaagaaaaaagaaaaaaaaaagaaagagaaaaaagaaagaataaaagaagaaaatgtttgtcttacagagtgttatatgcttaaagtggtcagcattcagactgtaatggacacagagaacttgatgcaatgggaattacaaaacaactttagagactcagaagacaatgttaatgcacagctgtagtgaaggagatgcaaaaagctttgcgggaggcagaaatgtactaggaccttctacagccgtttgcattagattagaataagcaagagaagatgaagggaactatgaaaatacattgtcatataaggacttcttcactatagatttgatcggaagcttatgagcaacaatgaggactgggatctgtgggctagagatggcattgttgggacttggcccttcattcagagatcacgatgttcttgggattgtggccggataaaccatgctaataaacaccatgcaacagaaacgtaaacggaaaatgtcaaaacaaacatgccatagtattccacctctgaataaaagtagcttcaggactgagacctgctggcttcatgtgtaagtacagtaaagtccattagtgaaacatgttattccacatattttaagacacaataagcagggctctagaatatttcaaccctttagcacaatgtcctaaagtaaaagtttgaaataaatcaataaataatcaaaccatcttaacacacacactacattctatccttaaaacaaaaactcatttgtttctagagtgctataatgtctattctaataagctactttgttgcccataaaattattttaacatttgaaatcaaatggtataactaatgttacctcttagagattttacacccatttgggctctaataaaaactttaaggaaatatctatgttctctgtgaccaaagaggggcatctaaagaggactaagacagaggtacagtatgggcatttaccaataaacattattttctttctaaaacaacataaaataaaaatactaatacagaatggtaggtggaattttaaaagtaaactacttaaaatactggaagacttttcaagatagcaaaatataaacgattcttaaatatcaactgttagaacaggatagcaatcaagaaattggcttcagatgtgatcatcagaaaagggtgtggcagaagcaacttcacccttgaccattaaggggatgccaggactgaataagcactgtgctagatcctgatgttttgagcaatagaaatagtggatattactctggagctaatatgctaatatgcagcctttggtgaaacagacatttattatcttttaacatgagcattataagtaactcagtcatagaacatacctttcaaatacttgttcttcagtaaaaacatctagatatccaaaaggggaatctaataggtacaaatcagcatctttatatactgctctataaacaaaatggaaagaaagttaggatccctcaagatcttttacgtcattgagaatagatattttaaacacagaacttgtgttatacaatggtcatcaaaaccatgtactgaaagcacacgtgtcacagcacagagcacagggagtactgttagtaacttctgtactgtgtgtttgacggtttttacctacatgtatgtgtaccatgtgtgttcagtgcctatggagaccaaaaggaaatgtcaggtgtgctgggttaccaattacagatgattgtgaagcagattagtactgtgactcaagcctggagcctttggaagaccagccagcgctcctcaccaatgagctatctctccccagctcttatttcacttgaaattgaaactaaaaacaatttgagttgacttacaataggaaaaatataaaggtatattttccaaactaacaaaaaggaaataatttctttatacatcttacttttttcaagtgtgattactaataatgctacctctatcccagttacagaggacatgctgtagaaactatttattgatacttttgtttttaaaatgtacttaatcatcacaaataagaaaaacaatgaataaaatagaaatagcaaaaaaaattccagattaagtcataatgctcttttatgctcagggtggggacatcctcttggcgatggaggttaggggtagggaggaggtatgggatggggagcagtcgggggcagactgggagggggatgaattctgaactgtaaaaaaggattaaagaataaaaataaacaaacaaacaaacaagccctttatgctataaattgtctggaaggaaacagaagagctaatggactccataaaaatgaactctcctgtctttatcaacatttagattttatttatttctctgtaatataatcaaatatatttgtccattctgaaactaatatagatttcatatccatcagaggcaggaagaagatggaaacttagtccaacagcaaagctgttggtggtcattttgcaaaatgatgaggattaagtaagattatcaaggtggggtttcatgattggataatggtggcttcatgaggaaaggaataacagagaacacacacacattccttttttttcttgacatatgatttttttgtgtgtgctgtctcaagactctgccaacaagaagccatcactggatatgactcctttaccttaaacagtaagtgggaataaaaagtgattttctgtaaaatttactctgaatatattggtaaattattagtgcaaaaccaaggtaaaaactctcattcacatgtgtggccagtttctcaagattaaaatgtgtatattcttcatataaaagtggatgacatatttattgcatatgtaaatgagaataacatgtgcaactataaaaatagtagacaactgttttgagtagtgccatatattgtacatagcaaatatgactaaatcttaaactagtaaatgttaatactatactgaagtcacataccatattttacttaaaactcaaatggaatgcttaagatatgacttttgccacacagataagggaattagcttccaatcattttgaagccattgtctggaaattctatctattgatctgatttcgcagtgtattttccagaccgaagcatagtttaatgtaaggagtcaagatgaccttgattaaatagtgactgtatcatttccttgtggcctttggcaagttaatgtctgactacctcaattatcttgtgatttcttccataaaataaagaaaacaatttctgcttctagtcttgtatggggattgagatcataaacatacattcagagacagacagacaggcaggcacacagacaaagggagggggagaaggaatggtatcaaggatcagttgtgatacttagtgtttacttttccaggagatggaagataaatggccaagataccaagataccactgagccaatgtaatttctcattaacagctttggtaatgtagtaagaattttgtttcaataaaattagagagcatttgaaatcccataccaccaattgtctttaaacggaagctacaatttaaataaaatactttcgttctgacaataattaaacatgaccatgaggacaatcagcatcacaaatgaaagcatgtattcagtataaagcttaccgggtgtggtggcacacactttcatcctagtatacagaaacaaacacagaaagatcctaatttctaaatagggagaccttgtcctttgtctgtaaacaaatgagaaaccttagtgacatcatttaccttcctatttttgttatactatcatagattatgttctaaaaattaaaaattgaaaatgtgtatatctaaacttagaagaataaacagaaattcaaatcagaggcatctggggacagggaaaaaggggggattaatagaaacttgtaatttccttttctttttttctttagaattctatacttttctcttcataacaatccatgcaccataacaacaagtttggacaaatataaataagagtatacattttgaaaagtatacattttgaaaaaaaaaaaccaccatctttaccaaatttgaatattataatgtctatagttcttaaagaaaaagcatcaattccagagacagaacaggaagcagaagagaaatgtgtatgtataattaaaaacccatagtatttacagcaagtgctcacaagaccaacagttaaatatttaccttgctaaagaaatccttgcacgctgacctccactcagtgtgactccaccttctccaagaactgtgttgtcttgttctgcaaacttggtgatgtcctattatccaaagcataacaccagaaataaaatttagcatgcacaatccaaaattgaaaagaacatttttcttcagatgcaactatttatttggggaatgtttatattcaaagactacccataagcccatcatataaactcaagtgccattcaaatatactttcaacttaaaatcacttttaaaaaatgtcaaaagactgaataagcctgttaataagaaaagctaaaacaaaactctccacacccacagaaacatgcaggcaacttcagtggctaacaacaggacatgtcagtttatttccacattcttcagtggctaacaacaggacatgtcagtttatttctgcattcttcagtggctaacaacaggacatgtcagtttatttctgcattcttcagtggctaacaacaggacatgtcagtttatttctgcattcttcagtggctaacaacaggacatgtcagtttatttcctcattcttcagtggctaacaatgggacatgtcagtttatttccgcattcttcagtggctaacaacgggacatgtcagtttatttctgcattcttcagtggctaacaacgggacatgtcagtttatttccgcattctttcattcatcttcccaaacaacaacacaaacatcctcaccacttccattatttttctgtccttgtccacttactactcctctcctgtcacatatgccattccttgcccaataatgatcttttctgtagtaacaactatgaaggcacagtaaaagacgacctgggtttgtaagaaatagtccaggactccagacagtgtaaacctaatttagaagataagctctaatcctggagcgagaattaagtaacaatctaacttcttaaaaaacaattttacaacgtattatacaacagtatacatggcatgttaattatttagacgataggaataaagcacacaccacagagagaatgttcgaggccttccatgaagagcttcacttgagtagttaaaatgtgatcaagttaggtaccaatttcctttaatattctctcctcccagccccctctcatgttttctatcacctccttagattgccatgctattcacttttaacaaggaaccccgtctaacaagcattcctgacagcgtgaccaaagacttgggataaatcagtgacttcccacatacaccattgcagacatggggtctttgttagttgtttgtttgttactgtgataacagaggaccaaaagcaacttggggaagaaagggtttatttcattttgcaacttttatgtccatcactgagggaagccagtgcaggaactcaggcaggaatctggaagcagggagtgaaacacaggccatggaggagtgctacttactgatttgctccatgtggctccttagcctgctttcttatagcacccaggaccactggcctagaggtggcaccaaccatcatgaactgggacctcccacaatcctcaaccaagaaaatttcccataggcttgtccacaggccaatctggtgaggcattttctcaattgaacttctctgttcccaaattattctagctcatgtcataaaactctacctgtggcataaaaactagctagcacagattgttggtgattttatttcacaagagtaaatacaattttatatttatttcctctgttaccttattgcttttttaaaaagaaaggaaaaaggaaggggattcaggttcactaccatcacgtctctaaaacactccctcctgttttgaagatgatgacgtaatgacagatgtgagatttccactagaacaaacagtgtttgtaatccccatactcttggctgagtgacacactataaggtgaggcactcagaaaaataaatgtttcagtacttacaacactgtgagaacagaatactacaagagagctgatccatgcaagctgcttccaggtggttcatttgaagtcattggtttctctttgtagtccagactacattaaaatggtgaggcatgcaattcttccctagcaattgctccccacttcctccctacaaagcctactattaatatcactgaatacatatatgcttttgtgatctgtagctggaagatatattctcatgagtaggatgactatatcaaatgcatatgttctactttcaaaagttaccaccagattgctttacaaagcaactaaagagttaaattacaatttactaagttgtactagtatgattatgataatttttgctaattttctcttttcatttacatttttcttaatcacaaagattttaaatatttgctgtgttgcattttcttctttgaagtgtctaatatttgtatgtagtttttgcaactttataggctgcatataaaaaactccattcgtttctctttttttcactgtgcatatcacttatcatgtgcaaaaagattttgtgaaataaatgtatctactccccaccagctagctatatgtgttatcttgaatactattttcaaaataaaatgttcaaaacccttatggcacagttttctatttgtctaccctatctttcatttgttacaaggcaacaataatcatcaaatgaatggtttactgatgcctctatcatctgtcatggttcctagttctgggttctcttatttttctgatccatttttttatttctatattaatattttctggacttttgggtccttgattttaaataaaattatatatcatttaatatctgataaaatataatcctacctcatgaaagagttggctttcttagtttttgacatagtagccatgtcaactattgaaataatatatcattaaaagatgagctaacatagtctcaagtgctgacttgaacaattttaatgcagtaattcttcctcactaacatttcaaatataagaagtacaaataccatgatatcaagtctacatatgatgaagcaaaaattccaccaaaataatttgtcaataaattacttctaagattttatattaagtttagtttaagataaccttattagaatttatttgcaacttttaaataccttgcacttacatagaattctagtttgcaacactaaatcaaaatgttttttaatcctgattcagatgttgaattcaatacttcaataagatttatcattttcttcatattctgtaaatgtcccatgagagctataacaatcactaaatactttaaggtttgccattattgtgaactgaatagttgtttcccatttatatctttagatgacttttctgtaaggaagagctagttatcttaaatgtttgtctacaatttgatcatagagctaacatgcaaagtcaatttctttttcaacagaaacagcagtggactaaatttcttcaaagtagagtagatttgttcaaagaaatctagaaatctgtattctgaccactttgatcaggatgaagaagagtgatattaaaagtttctatgattaagatatatcacattactttcctaaatagaaaaatctcactattgagcatgccctccatctagttaaaccacccttggctaattctaagatatgagtatttacatatttatgcatatgcatgtaacaacaataaagaggacaccaatttgaaagagaggtgaaatggaagggtttggagagaagggacatgagaaggaatggagggaaggaaggggagcgggaaaagcagccattatattttaattaagagtgtaaaatgtcaacataaaactgcacaccatataattctaataacccatattcttgataaatgaaaatgtaaaactattaggacagaatgtctttattttttgctctaacgaacatctttaagagaagtcagaaatgtcaaaacataaaatggcatttagataaaattgactatataaaattataagaaaaactatcactacagaagatgataatgtaatatatgcagctatcagtcaaaattctccaaccagattccaacatgatatcaaatgtccaagagtttaattgggggagatactgtggaaaaggaaacacataggatagatgggcagtctgaagagcccactgcaactctgatcctaaagtaggattgatggttggtatgggagaatattataccaatttagtccaagggagaatttggcaaagcagcttggtgatttttatgtcaaaaattagctaatagttcttatgttttcaaaatagaaatctattttagtaatcctgccggaaacattcatgaatgtagaggtagtctcaagacaaactcagttaaggacttcaaaacaaaactggactcttcattcaattgtttcctatagcagtgatctatataatacatattttatccatcattatatcttacaaaaagtgttcaagtttaaatgttaggaaatcaagatagttaataaacatgaaagtatatttataatctcttacatattcatctaaatagaatagagacaaaataatagaaattttgatttaggagtcagaatgaccaaaaagattaaagtcactgataggaaggtttttttattggatatttttctttatttacattccaaatgttatcccctttcccgttccccccccacgtacaccccctataccacccccccttctatgatagtatccctccccccacccacccactcccacctccccccaccttgaattcccctacactgaggcatctatggagccttcacaggaccaaggacctctcctcccagcaaacactcattaatggccgtcaaggatgaaggactgacactgcagacctccatctgagccgtctgccacatgtacacactcactcatccctaaattagtgtataaacatgtatataggtattgttatatcttaaaaagataacgggaactgaataagttagagaataatgtgtgcaaattatactgtatgtgaattttaaagctgaactgcatatatgggtgtaacttgtattaaatggattggaaaaatacatatttcattattctatttgctgaatcttagagttttgtggcacagttttggtgatgctatccaggcttttaacattgaacaaaataagaacactgagacatacatgttctcttctataacatattatttctaggaattgactttcaatggtatgaaagtagatctgcctactgagccaaggtttgaactgttgtttatggactgaatccactcgtgaagagaaatatgggtaactttcactccgtgagtgaagatttcatgctgctgagagtgaaatgagggacaggcagcggggatctactgagattgcactcattacagcctaatacatcagcacgccaatatcctcctttaatctgagcacttggtttgattactcagtttatgcctcatccgtctgcaaatttatgagtacttaacattctgtttgatttaaaacaaagcactctgttttgcatgcatcgttaaacattgacctttgctgactactaaggatactcaaatctggtaatatatttatcttaagggtgttggtttcagacttcatagattttccccacctgtaaaaatcacaatttaaaaactgttatatcactcgtgcctatcatgaggatttgtttttaatctttatttttatgtctgagactataacataattacatttatccattccctccctccctgcaaaccctcctcatccatcccttccattttttcctggtttttgttaatggcatagataatgcatagatattctttttgaaatatatgtatatacatatattctttttgaaaaccccacacatttatacaatgcactttgatcatataaatcccacagtttcctccctctaacgcccccttctacaccttaccccattcttactcaaaccttgtctttttatttttatcaataatccccttagttcaactagtgttgcccagtatgagcatgggtacatgaccatccattagggtgtgttgtgagctctttagaatgctgcacgagcacacgtggcttttagaggaagcctggcacacagctacaggggctacttttctttgttaatactgaaaattctctggaaattttttttggggggtgaggggcatttatccataaaactccttgaagaaatgcatctattggaataagggtcctagacaagggtattagataatatttgacgataaaattagctataaaatattctataaaattagctgttggattttcgtttaggttttttttttttttaaattggtgctatggatgaaatagaggcccttgcacatgcttattaagtgtccagaagaattttgtttaataaaagaaaactgtcttatcctgaaatataaacttatgtaatcaaagactactcttatagaaggagaacattattaacttttctttcaaattattctctattcccaattttaatttattttaattttttgatattttatttattttttcggtgtagtttatctacaaataacatcaaatatctgccaaactaaggtgaggctcttgagctaattcacagaaactttatttgtttaaaattgctgcacctgtggtgactcaaaggcatctggaaggaacctgggtttctgcacttaaccctgaacagcggtgctcgccagggcctgaaatcctcatctgacacttgttctctcaggtggttgacttcctttattacagcctcgtcagaaaggcaaatgtcaacttcaaagcagactgtgcacacaacacaatgtgtgtgtttgaggttgtaaaacacttgaaaacgctgagataagcacactggagagggtcaaagtaatactataataagtgtgcaataaagattaacttactttatcattaaggactagagaacatacttattgtggtatgttccatttattcacatttaccactgacttctcttagaaatttagaatttatcatcttggtatccttcaactatatcaaacaagccagaagttattaaggaaacttgttaatatgaacctcatttgctctgacctgatcacacaatagagccataatgatctaggctgttatactaagaaagaaaagggaaagatatagaagaggaggtgctttttagaagggtggggtgttacatttaatagtcttgtgtaattgagcaatatttgctgagtttatttgagcttcctgtagctttgaagataggaaaataccataaacttttatatggctggcttatcatttttagaacaaccttgacaatacagacgcttgtgggaagaagagggtgggcacagtgagaagccagggttaagggaacattaacttcaggggaatgctgctcaataaagcatatctctaacggtgaatcactggatagttaatgccattgttaataaggcttaaaaagcacaaaacactgctttgttttgtgcatacagaagatagccaatggaagagaaaggtaggaaaaacaggtaggaagaagtcaggatgggaaaatgggcagccaagaaagcactggaaaaagagaaaaatctagtgatcatttctacatagcttattgtacatttgagtgtggtaagcagatacctagtagactctgacagagatccacagatgtaagcctcataacagaatgcagacactaaggagctcatttaaattggcttatgtctaataaataagataggttgttgacataagtcaaactttattacaaatagctgcatgaagaaacattttcaaaagactaagctctgctaaaaaggatggtggtgtaagatttttcatcgatttaaagataaaaagatttaccttcaccagtgaatagtaaccaagtttatagcagaaaaaaaaaacacttaacatcatctttattataacaaagaaaaatataaatattgatgttatagtagttgccatcaacactaaaggctctggcctggaaagatggtgcagtgggataaagcacctgcctcacaggcccaacaatttgagtttggatccccaggatccacattaaaactagacgccctgagtgtctgtaatcccattatgcctgtactggaagatgaaaagtagagcaggagaactgcctgagatccagtagctcacaagccaactagcctagtgtatatagcaacaaaaggaacaactctgcctcaaacatggtagacagtaaagctcagtacccaatgttgccatctgacctctacacatttaccatgatatgcacacatcctcatacagaagagagcatatatatatatatatatatatatatatatatatatatatatgtgtgtgtgtgtgtgtgtgtgtgtgtgtgtgtgtgtgtgtataaaatcataacacaaactaaactgttttataatcagttttcatgtgtgtatgtatgaatataaatatagctattgctattgtgtacttccttgtgttatagatctgggtttatattcagaatggatagctcaagcattcttaagagaggaactgtagagtgcagtgattttatgtgtgcagggaaagagtgtccagaaatagaaaagtgctgggattcctgaactcccctacagctagagaatgatatgggaactggatttctctggcttttactaaatgaaaccaaccaaccaaccagccagccagccagccaaaaatcctttcaaatgctattcagtgtctgtaatcctattatgcctcattcagactcatttagtcatagacttctggatagcacgagctcagatgcaaggaaactctctaaataactcctatggcattggcagtatggatatttaagtggtacaattccttattttctcctctaactatacctatccctaatgctaggacaactctaatgcctgggggaaagaataccatacttcaatagaacatcttgtgttatctagactatgttccccaaattattttctggttcctattatgaagtctcttataactcagattcttagaagagcttcaaaccccactacctttgaagttcccaactaatctcttgtctctcaagagctgccttcctgtgaaaagtctatctcctttgagtaaaatgtaagctgagaacaaagatccttgtctaagtgtgtcctttgttctaaagcaatgatgccacaaggaaacgtagtaaaaactttccaacgaatatggaattctttaatttcccactacactgaccttatattttcatatgtaatatcttattttcattctcttaattctccaaatgaaggtgcccttcatgtactgagctcagactaacagcctgctctatggattggccttgttgtgctgtaagtcatctctgctcttctgcactgagcctttgggagatcccctccgcggagcctcctattgccactcagttgtgcttattctcttaattatcaattagctcgagtattacatgtttagttgttttagatattttaaacaaatattctacttatataccttacctactttttgcccttcttagtttctatacattttgatagaatgtatacatcacaattctacatcccttccagatttccataatgaagcacaatgcttttattgtgtcaacttgctcagcaaatagcaccatcatagagaagtattcataagacagaatgtctcagacaagatgaataggttctagagatctaccctgtagcatggtgactatagtcactattacatcttatattttatgctcagtgaatagtttttaaatttgtgtttgtttgtttgtttgtttgtttgttttaacagtctcactgtgtagctccagcttgcctggaactcactacacagacaaggtgggccctgacttggagaatccttctgtctctgtctctcagatagataaccgaaattatctatctgccagcagctttgctagtcatttaattgagagcatgataactatacattataactgaaaacatctttgaaaaaggtaattgtgtggcattacctcctactttaaagcctttggtgaatctcctaagctttaaagtctgagttcctgagtatagcagaatgggttctgagaatgtgactacctttccgttccccagttcgcccctcttcacacagcctttcctttacagatgcccatgcttactctactatatgcacaaggctccccacgttgccgggtacagtatcttcttttggttctgcacccttgtacattctgttcccttcctaaaatgttcttctgcttcttcattcagctctcacttagatgtcacttccttgcggggaaacttccatcatcttttaggagaacattgttaacttcctaatgtataaaagagccctaagaaacatacgatacattaacctatgctaatctttaattgttcttttctatgaggaaaaaaaaaaaaacctcttttagagcaagcattgtgcctttcttaccagtgtaattcccagagtttggtataatcattagcttgatgcatatattcaaaaatatttactgaatgaatatatgccatcctgctataaatttttgtaacaaaaatctcactatagacaagttactagttatacctgcaggcaacatctactgtgcttattgcaccattgtgcttatagtgggagctcagtgaaaagttgctgagattaacaactttcttcttcttcttcttcttcttcttcttcttcttcttcttcttcttcttcttcttcttcttcttctccttctccttctcctcctcctcctcctcctcctcctcttcttcttctctcctttttcttctctctccctctctcttctttctctccctctctctctccctcacacacgcgcacactttctctttcctttcccttccttttccttccttcttccttcctttgtttctttctttctttctttctttcttcctttctttctctctctctctccctctctctctctccctcacacacaagcacactttctctttcctttcccttcctttcctttccttttccttccttcttccttcctttctttctttctctctctctctccctctctctctccctcacacacacgcacactttctctttcctttcccttcctttccttttccctccttcttccttccttccttcctttttttcttccttcctttctctctctctttctctctttctctctttctctctttctttcctttctttccttcctttctttccttcctttctttccttcctttctttccttcctttctttccttccttttcttttcttttcttccttcctttcttcctttcttcctttctttccttcctttcttcctttctttccttccttcctttctttccttccttccttccttcctttctttctttctttctttcttttctttctttctttctttctttctttctttctacaggctccatctgtgttgtagccctggctgtcctggaactcgctctgtaaaccaggctgacctcaaactcagagacacgtctgcctctatctcccacatgctgggattaaggcatgtgccatcatacccagctgatatcaatttctttttaattcatcaatctaaaccaagaataagcaatataaataaaagcacttatcctatcatcatggagttacttctaatagctgtcaatgctagaacatttcacctatctagagaagacttcacattcaatttagcaaacaccaggattccttctctgggtaagcttttgtgaacatctatagagttacaagtctggtaaaatgtcaaattttccacgaatgtgaagtttagctagggtcttcggagcaccatcctgcatctaaaattatattttttcttggtttaaataatattattcaccatctaaatatggagaactctgaatctgggtttcctataccttaaaaaaggtagaaactggaaacacataataaggatttgtataaaattatttttatctttgtaagtttccctattgtttttgttttaaatatgaaggtcaggcttacatgtcatagtttcacagtctactcatgaggtagtctgttcagacagttataattatgttcataagctactgctctgttgacttcaaatctcactaggagtggctatcctggtgctattttggtttttgtgacttaagaactctgatgtgttaacctgataattagcacgggaacttcatgcgcttagggcctaaagcctagcctgcattttgaagtcagcatattttcactctactgcaaactcttggtgaagctatcactaaataaatcagaagagacaactccatgggccagttcatgcgcgtgcttagcacaatgctgccatagatactctttccctaaatattagctagtacatattttttaagttccaaggctcaaatgcagtgaaataccagttcagactataaaatatcatggcattcccatttagttctggttcagtaattctataagtattcttggcttcatgttatagtaaataatatctagtgtttcctaatcacatataatcagtaaattataggtagtccatggtacggtatagtcaatgtgatttattctggttgaaagggacatagttcaatgtgtttcaaatatcttctttagatatacattatgtctgagctagtacaatgctgagtcctatggcacttatcttctcattacttctaactgtaaagctgtgaattatccaacttggtaagttgactattcaaaggttaagtctcaccttctcataggttagtcatgcagaacatggagagccagaggtcaaattcaaattcagttagtcatgtggaatctctatggtggaatttattttttggaacaccctcatttctcagcttatttccctcccaactttttaataacttcttgccaatttctctcccaagatggttcttcttcttttttttaatcttttactgaattcttgacaattttcttctcagtattttctctagcaagttaaatacaaaaaccactaagcagctatgaaagagaaagacatgcacgattcctccttcttcagctcacatagtaatttttgctgcagtgcgtgtgtaatggctgtcatgacagatacttacttgatgaggatcattttgtggtttcaaaagcatcacaataattttgtggaaactgattacatatcctaagcccctgacctcctttgcacattgcccatccttacgccccaccataaagtattataaactttaattacttctccaaacccaggtacttttataagaaaatgagtcacagaataaagaccatcaaatcatttattgctcaaacactggcctgtccagaattctcttgtcactggggctgtgtgaggcagagaaggtagatgagagaacagtgtaagcccttgctctctctcaacactgaaataggactctaatttcataagacatgttattctactagagctacatcacactagttcttctctcaaagctagaacagtctctagtgctgggccctgaaaagaaatgtgtcaaggaaaccctaatggcccgcagaggaaaatgaagagagccaatggacacaaggacgcagaacagtgtttgcaagtgactctcaattcacctaaaagcctgttgtcttaaaatctagactctaaaattcatttttaaaaagcaaagcatggagatttttcccaaaggagagcttaaaagtaaaaaaaaaaacaaacaaaaaaaaacccataacatatttatttgagacttcatgctaaaaatcattctatcaacagaaccaccatgcccttcccccttgagctgcctcatctagtgaataatttccaacaacagactgaaatcagaaaactatgtgaaatatgttgtgcatgctttgcccttccacactcacatactcctgtgacactgagcatcacgacacacaggggactttgaagatctcggagttgaacaaaatcacaagcatgaggaagaggatatcccatccccatctctgattccaagccttgatgcagcacactgagaaacagatcaacttcagcagtcagaatgcaaacagagtcatgaatgtctgggtttcgcaaatgggaccgtccacagatcatgctgaggggttcttgtgttggtgccagctcttgagccactgagctctgtaggtatactgtgttcctgtgatcaaaattcctgcattcttaaattgtcattatacatacatacgtgtgtatgtatgtatgtatgtatgtgcatatgcacgtgtgtatgcgtatgtatatgtatatatggtaaaaagtggcataaaaaaggaaaaagacttagggattctttaaaatttaaaaaaagacgttttacttaacattttatttatctaagaaaacaaggtattttagtgtgttgaagttccttatgtacctgaccaaatgtgtgtttatataacagaaacaaacatggaagtttcagtcactggacacaggggagactcctgatgcttttctttgtagtcagacaagcacaatcatcccaagcttccaaaaagtgtgctcattcaagaaccaatctgctcagattctgagaccacaacactcacagaacctttgctgagcaaaattctcccaaccatcatgttacctcaaaccattccaaaacagtcatccagtaaaaatggactattctatcagtacactaaatagactaaattaaattaacatttttagagttgttgtgttcagaactttactctgtagttcaaaagataataccacagcatatacatagctcattgtaatactacatttgccattttaaagagcaaagggatttaagaaaaaagcctttcaaatgttaactaaaaggttctaacttggtggcaaaaagcagtggcacaaaaggaacaaagacttagggattctttaaaattaaaaaaatagttttacttcacattttatttaactaagaaaaagaagggtattgcaaattaaagggacaatcaacaacaatgacaccaatgggctttttaatgcagaaggggaaaagttcaggagtctcagccctgggcaaagaaccacaggcagctaaggaaagctgagggtagtccaagtagcaacagctgaggaaaaggagacctttaatttcaacgagagcaagatagagggtgtgagtgagagtgacagaacagtctcaaaactaaaactaaaagacagagcctagataacacacaatggaatgcatgaaaacagaaaccctgagggtttggagactaactaggcatatgatgacagaggttcggcaagaccctgagttcattctccactagaggaggctaggcagacactgtcacacagttaatgggaagctttggagagcagtaaaagtgaaataatctttgaaagcataacaacaggaaatggtctagaagtaattgaagatctatgtatgcaatacgttaaaaacgaaaatctagagtgtataactatttcataactatttattaagcccttcctagtcccctccattgttccttgtcagccacatctgcgaccctctactttgttcactctctgtgtccttcttgaggccatgacctatacatgtccatttttctgactgttgttttaaagatctcagatttcttaatcttgaacccatttatacacttttaaagacattatttgcagaaataccttattctccatgaataaccatttttttcactgatgtcctttccattgaataaaaattacataaataacttcctatattcccacaattcttttatataactgttgtctcttgtacatcatgaccataatctgtgtaactgaaatagtttcctattagtctcccttcttctagtcacaaccgtgaacagagcactattgccaatgatgatgacagtaataataataactggtgctttacttatggtgaactttctatgtactagagcactttacaaaagctatagaataggcgatattagcttcctattgcagagcagaaaagccgagtattggcacaagttaaataaccttatgactcagctttgtacgatttcaaagtctatgctatttatgctgtgctaagcttcatgtggtacccaccttaattgtgctctccatcatcccagaatgacagggacagacttcaaagctctcacagcactcttgctaacagttctctaggataaacctcccaggtctggttccctaaatccattcctgctcattcattctctttaattgcaccgtggctctatcaagatgcttataatccctgcaataggtggtttcacacctattcattttcttttatacataatgttacctttctttttgacctgctcttcaagaagtcttctcttagagaggggcttcctgaattatccaagtaggctcaaatttcaccactgactttaacccaacaactgtcatagcatatagaaattagaaccttaagtttgtttcccccaaatttatcatataaatcctttatatgagagatggttaagctttcatttgctattcaccttgactctcctaaagtagacagtttttattgaaattggacagagtcacctggaaatagaaatttttccagtgcaactggactattcatatctgtgggaagttgtcttgatggctaattgatgtgggagggcccagacaacctttgggtggtgccacttcctggcaggtattctactttgtaagagaaagctaggtaagtgtaagcctgctagcaagacaaagaacagatgagaatatagcattctttttggtttctgcttcaagttcccacctttagttccttactctgagttcaccaatgatcaactgtgaccaggaagtgtaagccacattatcccttttctccctgaagatgtttttggtcaaaattatagcactggaaatcaaaccaaaacagtcggacataaaggaatgacacatatagttttgggggtctgaagatacactaaagtggagtgacttccagctctcaccgacactaagcagaaagccagtgcatccacattccaaacctccaggctctgctgtcattttcatttcttccatagatacccaaattttgttaactatgtcacgtagccaaaaatttaaaatgccattgttatcatcttcgctatgaccagttttgtcaatattgatatcatatcaatgtcttttcattattctttggtttggaggctcttcttgtccttaacaactttgtctctacagaattcactttctaagaacaactggctctcaaagtattttcctgcttttctctgtagtgatattattctatatttcaaaagaagcaaaaataacttagtgtttactggaaggatcttataccgaatgtttcactgggcaactatcagttactctaaacaaccagaccccatttccctacttcttaagtccagtctggctctcttttttcatagttccaatgttcctaataaagaactcttgggccgctcgctttccctgtgaacctcagaattctacaaagaatcacaccatcaggaatattattacccttttctgcatgtggaggctgctatttttgggtagaccctgatggagtctctctgtttcttctttttactcctaaaatattctcttttttcccccatttttaactaaattcattattggtctgtttctatcactcttcaggacactgtataaagcacagcaagtctaagtcgatgaaaactaattgctttacattaattgctttacattaaaatttccttagagctgccagcatagcatgggtacaaggccatatactaggatcacagactgaactctgaaggttaaggcagagcacagatgtgggtgggtgaagtggttgaagggagtatgagagaagttaaaggaaagatagagagagatggattagataaaacatacactagatatatgtatgaaattctcaataaatttcctttatgtaaaatgtgaaaaagaaaaggaccaggagaatttatggagatagatcagtggttgcatagagttacagagtcaaagtttggagctgagacaaaaggatggaccatctagagactgccatacccagagatccatcccataattagcctccaaacgatgacatcattgcatacactagcaagattttgctgaaaggaccctgatatagctgtctcttgtgagactaggccggggcctggcaaacacagaagtggatgctcacagtcagctattggatggatcacagggcccccaatgcaggagctagagaaagtaaccaaggagctaaagagatctgcaaccctgtaggtgcaacaacattatgaactaaccagtactccggagctcttgactctagctgcatatgtatcaaaagatggcctaatcggccatcactggaaagagaggcccattggacacacaaactttatatgccccagtacaggggaatgccagggccaaaaagtgggaatgggtgggtagggaagtggggggggagggtatgggggacttttgggatagcattctaaatgtaattgatgaaaatatgtaataataaaaaatattttaaaaaaataggatttgactattaatgaatatggagtttcttttcaggggttctaaaagggtggtcatcactgtaccactgtaactattctaaaacacaataaatcatacactataaaataattgtaatatgtccttgcatccaaatgaaagaacaatatattttgcttctccttctctcactattttattgatatatactatacaaaccatataatcctctattattaatatataccatcctactatgaagctttaacaataaatacaattttcttcatctaagcattccaatgatctacctgtgtccagaatgttgtaaatacttgttgcatggatgatccacagctctaaatttattaatagtaatgtataaatgctatatttggattatgtacattttgtagatcgactttgattactcaaaatatcatctgtgaaatcatttatatgggaaaatacatactcaagcaaagcaaaatctaaatctagcaagaaagtaccaccctatctcacccccaccacccccaaaataagccaagtaagacttattactccctccaattcttgcccagaaaaactcttctaaaaacagatctggtaacaagcccagaacacatcaacccccatgttgtagaagaaggacttttgggaaagtatggctatcttcttcaaggttagcacaagtttctaggatagcttctcttttcactgtggtctcaaagtgtacacaaaatactcctattgaattcatacagacttttggtttgttagtttttagcatgatcctaccatgtgatccagactggcctagaactcattagacagctaagactggcttcaacttcatgacctttttgcttcagtctcttgagtattaggattgcactcatgaagtaccacaccccatgcataaggaatttttatttttacaacacccaaacacactttaaaaataaactgcatctatttataattttgtaaacttaaagtaggagcatggttttattcactgacccacccactccagcttaatcctagggggtccttgacatgtttacattaactcaatagagaactaactgtgtaatttggttagtctgaagactgaatgagcataatccatgtagtggtgtgaacgtgaaatacctacaatgggctcatgtgtttgaaaacattatttccagttgggggtacactggggtaggacagtgtttacaacttggagctttactggagaaagtaagctactagaattaggccttgaagccccacttcctgctggctgtctgcttcctgactatggatataacatgtctcgccatcttcccattcctgcccctcctttgccaagatggacggtatcatccctgaaaagaatttaaaataaaacccttttcaaggtgagtagtcaagcaattttatcacaacactgacacaagtagctaacacaatcagcatttttcataaatatgcttacctgctgtagttggcaagctttgacaacactcttatatctgtactcatcataggaaacaccaaagatgatattttctttgatagtacccggcataatccaagaaaattgagagcagaatgaaactcttccactgtgcttaataattccctctgaagcttccagttctcccaaaatcaacatcaggagtgatgtctacaaataaaaacaacagctaaattgtttgatcaaattacttatccctttcttgcgtccaattattccaatcacaagtctcccaatgtttaaagagtgtaactcatttgattaaagatgttttagtacttcatgatacagggacttttctaggcataaaaaatacaaaggggatgaaagagatctgggcaacataggactaaggttcacaaagaagagcgagcccctacttaaattgctgtgatcagtttgtagtaagagactggtgacagtgagcacttgctgaaagctcttgggctatgggctgcccctatgctctaactacatgagtgtgttcattataataaactaacacagattcagtcttagaaagtactttcattttactagtatgaaaatttgctttcatctttaagaaattataaaaacatatgggactgagcacagggtcctcaatggaggagctagagaaaggacccaagaaactgaagggaaacaacaaaatgaaccaaccagtacccccagatctcccagggtctaaaccaccaaccagagtatacaaggcggtactcaaggctctagccacatatatagcagaggatggctttgtgggacatcaatgagaggagaggcccttggtcctgtaaaggatcgatgctccatgtatgggaatgccaggacagagaagcaggagtgggtgggtgagtgagcagggagaggggagatgggataggggagttttcacaggggaaacaaggaaagaggataacagttgaaatgtaaataaagaaaatatccaataaaaaacctaataaatgttttctaaaaaaactacaataaaaaaagaaatgatggatgtcaagtttgtgtatacacacagagtgggggagagagagagagagagagagagagagagagagagagagagagagagagagagagagagctacaatgtgaacatgtggacacctgtacccttctgtgtacatgtagaggccagagcaggatactagtatcttctatgtctctttccattgcttgaggcaaaccaagtgtctcaataaactgaagctcacagtctcagcttcactggctgcctgtgagctcctttgatccaactgtctgagcctctcattgtggggttatggatccacctaacatgtgagcttggaattcaagcttaggtccccgtgcttacacagaaagggctcctaatgtaccatttggtagaaagaaaaacaggtagcaggagaaggaaaaatattgatttttttatccaagctccttatgaatgaagaaactgttaagaataagtgaaatatgaagcatatatagatattataaatgtatccagtagaacaaaatatagactttatggaaaataataatatagtttagtatccttgagtacattgtagcattactatacaaaaattttgttttgcttttctcacttaactacatatcttgtaaatttttctataaccaaggactacagaacttcaaaatatagccatactactccaaagatacctatacaaaaatctctgtaaatatataagggtataacatataagattattaggttatatttaagtcttaaataataaactatcaaattgagaggtataaaattaactttaaatattaatattttaaatcttatattatagcttcacattttttcaatcaaataatcgtttttccttcttattcttacaaaacagcagtctctctgagtaagttgtcagaagggaacccagatctttctctgccttcacagcaattttctgtgagaggcaagaacagtcccagattttaattacttattcattaaggtttcatagaattgcctgatggttaactactgacaagttcaacaactgtgcttccaaagctatttttatacctctttcatgtattgatcttaagtacatgaacaattcatttttaaaattctgtgtaatgctagtaataccccctcctcagcagacagtgtgtttctggtcatctgtgtcttttatagcattagttatgcagattcctgtgctaccattttcatttaatcgtgaaaactgtctctatttccatatcagaaaatgaggaaagaaataacactctgaggagcaagcatttctgtaggaagagaatataaaattatagctactttatttaagatgcctatgccatctgtctggccccagtgtgagaagatgcacctaatcctgtagagatttgatgtcccagagaagagagatgcccagccttagataccctctcagaggcaaaggggagggtgaatagggtgaagatttctgggagcatagatgtagataaataaaataattaattaaaaatgagcaataaaggtcattcagtctttaaataaataaaataaaacaaaacaacatgtctatgtcacagataagaaaacaattggagagaaaaataagcaaaatgtacagtgattagaaaatttgtgctatttccaaaatctcatataaaactctttaaaataaaatccctgtttaagatactagtataaaatagaaacaaattaccttttagaatgctttttgttttcattaattaattggtttattaattcactttacatcctggcttcagccccctctcccagtcgaattctcacaaatccctacccccattaccacctccccttctcctcagagaaagagaagcccaccttgggtaccagcctggtctggtacatcaagtctcagtaggattaaatttttgcatcctctcccagtgaggccccaacaaagcattcctgctagggggtaggggatccaactgcaggcaacagaatcagagagccctggtccagttactaggggactcacatgaagaccaagctgcacatcttctataaacgtgtagcgagcctaggaacaactcctgcctgctctttgtttgctttgatctctgggagcacccatcggcccagcttagttgactctgtaggtcttttgtggtgtgtttgagccctctggcttgttcaatcctacccccaacccttccacaaggcttcctgagctcagcctgatgtttggctgtgggtctttgcatctggttccatccactgctagatgaagcttctcaggagacatctatgctaggctcctgtgatccttaattttcatttttattttataacaacactgccttgtccttatttttctcccacctcttttttcttcccacccttcctctcccattgctttatattttgaaatagaattttagagattaataaatatatatttgtattactgaaaggtactctaaaacaacaatctgattgcaacaaggatctattttatggatccccacagcaagtactctgctgctcaaagcattggctcaagtacatttcatttctttggtccttaatgatttatctaggtaactaccaaaaaccaagtatctatcattatctacatgacagaacatatctgaaaccgtgacaatccctgagcgcttttcacttctagccaattagattttgtcagatatctctccaaatcataattgattgttcttggtactgggtggggagtaacatagccactgaataaattaaaatttttaacattttaacacttacttgacatattttaataatatataaaaagcaagcctgggtctattcagtaaaaatccacatatagagagatgtcaaatatatagagaaataggtgaaatctaaagcagggttttttttgtaccagttttgaaaatagatctgaagtaaagaacggttaaaaggatggttttcttgaaagccatctatatgtatgacaaggctaaattatatacaaaaaagtataaaattatgtgaaaaacctgaaggaaatcattactgaagcaacttatatacattatactcaaacattcctacatattacatatatatatatatatatatatatatttatttatatatatatatatattacaccagatattccatacatatgtgattttctctgaaatattacatatacttcaaagtacacaaaaaggagaaatgaatagtaaattaaattcttaatgatatgaaataaatagattaaaaaacaagcaaacaaaaaaaaaacctgatgtcttggcaaaatacaacatcaatggtacaacagtggtatcctagggatacctaacagctgcctgattagacctaagaccaaatcattaagagtattcaattcatacctagtaatcttgtaatgtagacctaactactacccatagctggagaggtcatagctcttactactgccattttgtaaactaatataatttctaactgggttctaaatacttctcttcatagccacaggtaagcatagttctcaccactttttgtagacacatcttttttttttgcactggatgcaaagcattgcagagatctagagctagtcaaagaagaactgaccatgttgatacatctacaatgcaaactctgtatttaaggctcagggctaattgtggaagatgtggctaaaacatagccagaaaacaggcatgtctactgctagatagtatctcctagacaatgagatgctacacctatgaaatattcaaaacactgttaactaaacaagtcctacaggatgacattaccagttgacatgacaatgcatatgaggttatctcacaaggctccatcccctagatgaaaatttacaggcaaaattgttatgagggagaatcagttttctttaaaaattagctcgctgataggttatccaatcttgagtgatcagttctaaacacgtgtatatataaaacacaaaatagatcaagaacattatatataataatcataaacaaaaaggtcttgaattttaatggaagtgaggaggggtacatggaaggagtaagatactggaaagggggatagaaattacataattacagtatttgtgtacaaatttctcagaaaattaacaatttaaagagacagtacctttcctgatccagtagatccagtaatagccaacatctctcctttctctatattcaaattgatgtttttcagcacaggatttcccacaaggcagagatgactgaaactgacattgttctcatcactggaatgttttctgtcaccattgctttgttgtactttctccagtaattccccaaatccctattcatacacattgaagataataatgctttcagattttccatagaaaactttatatgcaatcagtttaagaaatacatggtacaggatccattaaaatacatacatagtattaattaatttataatatataactataaagcacatggtttctggagagtatggttgaatgtgtttgagaaatagttatgtgtaatgagaacaaaatttctctttatcagacttttacttatcattgcctcagtctcatattattggctaaagtatgtgtgtgtgtgtgtgtgtgtgtgtatgtgtgagtgtgtgtgtatgagtgtgtgtgtgtacaccaagactataaggaagtatacacatataccctttttcctacagacttagtaaataaacattaattaatcttcaatataatatataagaccaatttttcaatcctcctcttttaaaactgtagactttggctcagcaaaaagtcaaaaacaagtagctcacaaggtagatttacaaggcaatcctcacttccaatcctctaagacttgctccaaacatttatcattggctacaaatacaagtgacaaagttgctagtggattcaaaataatttttctgtacaagagtatgtatggggtggagagaaatcctcttttaaaaattgcttgcctctctattgcccaatggaagctcggaggtactgtctccaaagcaaaatatatatcatcaaatagtggtcatgaagaagcctgggaaacttgtgtgcctagttttaagtgaatctatttttaggtccacaccatccaacgatcctctttcctaaaggtaacctgcctgagaattcattgtctgctacttcttatgatccacttgcacctcacaattgttcttgccttgctttctacagaatcaactcccttttttaatattatgccaatatcactaaggctccagaatatgaaaactcagacccaaacaatagtattaaaaggaatgatgatgtcttgaaacaagagagaaccacaaaagcaaaggttaaaatagtaagggaaaaaaggaagtaacgttgtatttcatctagatttcaaatgtatgggtctatcttcacctttcataaacagtagttctaagttcaacattgaggattcaattaggagtaaggaggaagaatggaagttgaacacggtaaaaagaaatatttatctagtgaaagtttggcatgtaatgcatcctatcctagcttgcctctcagtgtggccaggaaaggagatggagaacatgctggagcacgagggcagtaaagcttgaggagtgatgactgtgaagttgatgaggagcatgcaagcctgaaattaggcctagagatttgcacttgcatgtcatcagctcactgatgttgaggctggatgaggtcacctacaccacatacagagtgagtaaactgctggaagctgctcatgggaactcagtggctcatcaattctgagtgataggcagggaagacttaggagtcatgattagagaagttaatcttcactgaaagaccattatttgcaaagtgcactaatgaacagaccatgtaaatcatcttagtcagtagggaaataatgtctattttacacatgaagacacttgaggcttaataacttgaacataatatgatttagattacatggaaagtgtattgcagagacaggatttagatctagtatcgaaggtaatcatcttcctggcccattatatgaaatcaattatatgactttaaagaaataaaggcactttatgctgcatttaatattcctggttacccacttttcaccttataaaagaggatagccctccttacatccctatgagatataatatcttttgaatcttatatgttattgagtagaaatttaggtgcaagaaaaggaaaaagcacaattgtttacatattttaaaaatcgaccatatttagaaatctcacctcctcccaaaatgctgttacattttccatgattatgcctgtggtcattaagttatactccagtactttatactcttgtttctgcaggaaatcctagtcaatgaagacaaaaatctttcaattgtagaatcacaatagcaaaaatgtattgttatatcttcttccactctaacattacagtgtcttgtatggattttaacaattaaattagaaattgtttcttaataaattaacgttacaattgtcttaaagttaaagtaccaagcagtaggactcatcatagtcaaaatatattctttaaatatattaatgtatgaaattagttttatacattagatatcagtgcaattgtttctttcttatactgttatatagaatatgaatttctaatgaaaccctgacaattattcatgtaccagttcaaggctagtacaagtgaaaagaacaacaattttttttaacactctctttacgagcaacatcataatcattgctccttatataaagggaaggagaaggacttcatagaactatttctcagttctctgagaaaggcctccatcagagaattccagccacatggttcttaggaaaggtggagagcataagacttaaatctgtgcacctggaatctttgctctgatctttcttccttgtacccccctctcttcctctattggtttgtctcatttccttctcttttttttttttagatgtttctgtgttactgttcatagatactcccatttctcctcttacatctctccccttctctctgtctttcttctctcatccctccacccaactagggtgatgtcagcagggaaataagatttgtcatagagccactatgattctaagtttgagtgactgctctagtcacacaactcaagttgatttaaccttgggggtgaaacgctgaatagaaaaggctgtaaaagatttgatgagctgggcaggctatacacatttgagggcagttgctgtaactgtgggaacccaaattactacataatcgcaaatctccagaagacactcaatacacgtaagtgaatacacatggatgcctgtggacagaggtacacatgataatctctctacttctaatttctattaattaattcaaaagtttcaaagaccaaataaaacagatttaaaagccaaaattacatgttttctgtcatttgtgacatcagtccaaggtaaacaattggagaacctcttaaaaagcagtctaccctcgatcccacatttattcttcacaatgatttactttctgcactgaatatttaaatatacattttaagggataataagacattttttttctcagaagtttattcaacttgctctgaataaactacttcttacctaatgctcaaaataaccctgtaagtcccacctggccagggatcaggtaactttctggtctgctggaagctgaagttcttggaacatagcaatgcttcatgggaaagtacagtggcctacaaggtgagcattccagggctagctagaacatttttttaacttcctgctgaaatttattttcaatgtttttggatatttacaagctgcctagaaatgatctattcacagatttcttggatgggattttctagattatagaaataattattttaaattcatttgacctacaaaatctcctaggattttatttcattagattttcactgtaagcgctcatgaaattatgtatgaaaatgaagagtggaaatctaatccattaataaatccaaaatcaagaaattcattttagagattttccccactatacaaattctaaaatgtttccaaaatcatgtaagtataccatcatggaagttacctgtatttttcttatcattccaaaagaatcataccatatctgtacggcagtggggaactgccgtgtgactgacatacgtaggacaatgcagaatgaaatggttgtgaatatttttcgtaggacgattccgttgatgactgtgtagggaagcacagatagaaagactacaaagaaccctgaaaagaagaaggcagagctagtgaagaacctcatataggccgccttccgggtcattttcagctccaccctgtgcaaaacagaagaagacgtgacacgttattttctttcaataatcaggtgtcttagaatacaaaatctgaatatacagtccaaagtttgggcaagttacaaaacttctcttgaccttaattagcttatatgactcttaaagaatataccatttatttacacagaatgcttgttaacataaaacaattaagaacttcaattgctatcataattaaatttataattataattaaaatttatttaaattgtattatctaaatagatttacttttatattatttttatatctttagtaacttctttattaacgcttgaagtgatgtgtggaagggaaaacaatgttacaagctttatgaacaaaagggacagttctgtagttatccatcatattcttagtagttttgagattctagcttggctttaaatagcactggcgaggtgtgtatatcaaagagcagtgagaaacacgtgactgggcattgtctctcagtcacatctgctgacatctgctgagctgctgcctgagcttcccaggagccactctggagtcagaggccaagtcactcagttgcagggggtccttcaaagagcagggagtagctcctccctcctagtccctctcattgtcatgtaattatctgcagtcgcacctcactagagttgcagtcctctagtctgttctagtctgtacttcaactgggaggtatttacttttttaacatatacaggaagaggttaaatgctttagtgacaaaaggaagatggagaacaatactgcagtcaacctcgccactgttccaggagccataaacctcaacccaattgtgatcatttgtaaaaacaaccagttcttgtgtgggcaaaggccaatggtgaacacaaaatgaaggctctgtcggaaaggaacagtatctgatctacagcctggtgcaggaaggcacatgatatacaggcactatgcttccactgttcctctaatccatagaagcaagtgttattgtcaagtggtagaactaaaaaaaaaaaaaaataagtcctcaaagaaaacaatatactattgagctcacggatagaggtcatgtgtatagcctatattgtgatcagcctagtgagttgtagtgtttcaataaatttgtactgaagatggactagtcttacttatgtttaaaggaagacactcttccatctaattaaatgtgattctatcactaaaaaaaccgtaatacttcccttgtagagatgtaattaagcttagatgacagcatagcagatgtaaaagagcaatgtgtatccctttcttctagagataaaaaaatacattgataagcctggtatttataaaaggaaagaatgtttacaaatggtagtaaagtgtcaaaactgttccaatattttagaacagctcagaaaaggaagaagtcacataggaaaaagaataattgatcccaaacacgcaacagaatcatctatacactaacataaaatccctaacattttatgagtcataaaaaaattctatcagtttcgtataaaaaattgaaagtaccttaatggctaaaaagcaataaaaggcagatttttttttcaagaacattaacatagcctttggccgagttcaacagctttctaggctgaggtaatcctaagaacatccagtcagtctcccctagaacattgtatttactctgcggggtaaagcaattcctgctttcctttttacgtcagaactctccagctttttcaggtaacaatttcatgatgtatcaaacaggttacaaccagacaaatgctagctattagaattaaccagcctgaaattcagaataggaaagatggattttattatgtgaggaaaagaggggtaaaataccaatgtcaaaaaaagaaaaccaaccccaaaaaggaaacaaaaacccgtcagccacaggaacggcctactgcaagctgattatgaagcctgagaaaactggattctgtgataaccagccctgccatgactgtgtttacaggcagtgcaggggagcactcaacctgttaacgtgagaaacaactcttatcaactcaacaattccccaagatctttaaggatgtttctagaaagaaaatgcaattcctttcctagatttaccttgaaaggcataacaaaaacaggtgagcaatagtatttggaaaataaacactctttttgctatttctatttacatggcaaaggacttaacatttaagcatttccattgttgttccaatcacacagctgtggctcagttaccattgtctacaggtctccagcaccctgaatatgaaataatcaaattcacaccattgcaaagagcactctttatttccttttccctgtgaaatactcatatatctcatgtctttaaattagtagtatctttcgtggtccgctcatccccagaagtctaaaacatttccttgactgtagttggtaggacacggaagtcaactaaataaaaacggtccatggccacagcaatgctcatggttattttacccaaaattatcttagtaatgatgtatcagccttgctgtgcttttttttttttttttttttttggtcagaggtaatctttactgatctgcaaaaggttatctgaggtgaaagaagataagatacacacaggtgctaagtaaagattccatctcaggagatggcttttgttacaaggactgacttagcctcttgtaagcaatttatatgagtagccctaaggaaaatttcctttgtcattattcctcaggctcagaataacagaagttgtccaaatgtggctgtcacccgctctttgtgtcataatacttgaagtacagtgtcatacaagatcaccctttcctcttacaattatatatttcagtatttccatttatggtttcaattagccccccagcatcttcatcattgttttaattaaattaagggtatgaaacaactgtgaactagtatagcagaatcattagtaagagataactatctatgcactacaaaaaaactgaatcaactgtaaaaccataagccagggacaggtgtggtggcacatgcctttaaggtctagatctacatacagaggtctatgctagccaagggtatattgagaaccagtctcaaaaaacaaaagaaaacatttgctcaccaaaatgattataggcactgacatataaaccatgtaaaactcaggacatacatatatttgagttttagatgagttgagttgaaaatccacctgagtggtcagttttaaatgttaaatataaaattggaccagtattgtaattatgtcaacttactctctcaagttttcaatcattttctccatcgctgattcccaacaatatgccttaacagaatagatattatcaataatttctgatgtgatcacgagtctttcattgatctttgcagctctctgatctctgtaaaccaatcaattgatcaaacaatcaataacaaaaacaagtcaaattatctactaataactattcaaaattttgaaaaattccatatttttattacatagataaacattttgttattaaacagctgggaacaaacaaaatcatagccagtgcacacttttaaatccagcactcaggaggcagaggcaggtagacctctgagttctagatcagctacagagtgagatccaggacagccagggatacagagagacgctctgtcacagaaaaacaggaagagaaaaaatttttaaaaagtgtcagatacccgccattagatgaactttggacaatatctctaatccaatcctttacaaagtctctaagaggagatcacctccattttgtgaagcaaatgaaagcatatacaaactaaaacagaaacctgtctgtatagccccagattttcaactttctatcacattcaaacaggcaaactacaaattctctgcaataagcacatcatataactcatattaccaataaaagtaataaatgctttggtagaatggccctactatatggagaggaagaggccagtttgttccatacaaaatttaggcattccttccagttcaaagaaatacaatatccattttacctaaactttatgaatataaaatgtactgaaccttacttagaacatgaataaagaaattctatagaccaatagggaaaataattgcctttttcttatagaaaaaattatttacagaattaaaataatcccttctaagtgacatggcatagttttattgttagggcttagagaagcccaattcaaatttcttcaagctttgaaaaagaccactacctgtacttcaccatcatcttccctaggatagcttgaaaaataaccaggattatcagtaaaccaaggccacagaaggctgagaactgtaacaagtcccagagaagccccatcagaagagtcacttgtaaaggagcaatccatataaaatgtgccaaggcaagtccctgaaaaataaaagcacagagaaaatcaagtggtatattacattccacaatcaaaaccaagcagagagacacatgtggaagaaaatgaacactgaagagttatccaatcaataaattcatggttcttagcatattacaatttatgcattatgtttttattcagtggaattaagattgtgtatctttgaaattgcgcctaggttttattaatacctttttaaaataaagctagtgttctcacacagaacacatgagaacaagggactctccaaaaaggttttcctctctctctctctctctctctctctctctctgctactcaattcagccgtaacacttgctctattaaatattgaaaatgcaaagataaataaaacatggtatctgtcctcaaggtccttgaatttacttgtgacataagacagcacagaacaagaactgctcagagtatcatatttagtcaaagtacataacaatttaaagtattatactaaaaggaagcaagctaagtctgataaggatcaagttttgaaaaacattattaagagcaagctgaggtatgtttgagttgggcaatcgtacctgacctcagaatggtgctctgctacaggactagctttcccagtttccagaaatagccaaactagctattggtgggactttgctacttatcactgttagctgatgcaggataaatctttctttagaattgtttgatttctaataaaatgcataaaacattaagtcaatggtacatacttcatcaaatttgttcaggttgttggaaagaagactaacaagttgtccaatacttattttatcaagaacgcggcttgacaactttaaagtctaaaagaaaaagtggcaagttaggtgatgtcaacaaacaaatataaaatgtattcatcaataacacattagtaagatgtgactgaatgtatcttaacctgagaggtcaaccttgtttcatatttgttactgttatactttttcagctttaaaaatatacaactgaaaaacaaatatattgaaatgcttacatttagatattttctgtcatatagaaactttgttgtctttgacaataagaatgatattttatttccacttgcaaaatataaggttgaatcttttgtgttgttgttttgagtggttttgtttgagttttggggatttgtttttcttttattttttttaacagaaataaatattacactgagtcaggtaagccaggccccaaaggacaaatctaccagatcttcctcatgtgaggatctcagcttttcatttttagaatatcaagtgtaataatatgttgacaaaagtaagaaaaatagagagagacagtagagaaagagaggaggatagtattacacattagacatgaaaatggaggccagggttgagggctacttaaggtaaagacttatgaaaggaacatggtggggagacagtagacagcaagaagagtagcaagtagtagttcacagtggagagttcaataaggagtagggtagacagtcatcttccctctactttgggtggctgaggcattctctgttgagtggcttcaaaatggcactacctagttttaacttaactagctttctcagaatggagttccacagaggactatgtggtggggataggatttgcaataatacaatctattttttaagatttattaattattatatcttcacatgcaccagaagagggtgtcagttctcattacggatggttgtaagccaccatgtggctgctgggatttgaactcaggaccttcggaagaatagtcagtgttattaactgctgagccatctctccagcaccacaataatacaatcttatcagcatacagaaatacactggcagagactcatttactcatcatctgtctctgtcaccaataatgcaagaaaacatatgctatcctatgtagtaatgaagtgtgtcccaaattgcaattatcaagatgatttaatatagagatttgtaaacattattattagtgtttgtcttgccaataacatatatcatgccttgagaaattagttaataatagttgaacctgtttaaaaactatacatatttgagttcaaatttaccattttagtaaactattctacagttctaagaaatatatgtaatctttaaaaagcttaaatagaggtcttcttttagatgctattcctctcagataccatgaataatcaaacaaaagtcccagtgctgggtaggggatacctccctatgagtgactgacaagggggatctcagaggtgccccaaacaacacaggcttttcccagtgctcttggatacctaccagaacttgatgttaagtattgtatgctatggtcacaggtcatggagatgaagtgtaagcttcctgcttactggttcgtagtgccagaggcagcatatgcaagtcactggggaaagcatcatcagccttacccagctgggactataagctatagtaatcacatacctttgtaaaatgtgtcctctagtagagcagtagtgtaattcttatggtgatgactacctgcttgctgattatatgtatggcctgttccacaaatgggaacttatatttggttctgtaaccctagttaagtctctgactggggaggtctttgaccaccaaggtatgcaagtaactgttattctgctaaatggtcatgttatcaagctaccttctcactactcatgtttataccatagattagagcttgcacccagctgttactgtaaaagtttcttactacaatggttcccggtgactgcagaaacctaaccagtggcaaataagtggtaacagaatatttggcataaatgggaaggttgtatcattccaccatgattcagagaacatggcagaagtgggagcatgaagaatttaagagctgacctatagaaagagtagacacacacctttgctacaggacataccacttacagtcatgaacccattagagctggggttatctgtacatggtaaaacattttaggatgggtgaggcaggctcatggttgttagagaggagttgtcctattctgttctcatgtctgcaacacatgtaagcgtcccttgctccactaaatatcattgcacccatgctctcattaaacttaatgagccacacgcaaaaaggcattaaaatagacgagtactgctacaatgagttccagagagggaaggcaaggaatgagagagaaactgaggatacagataactaaaattaattatgtaaccatttaaagacgtcaaacaataaaaaaattgaaagtttagaaataaaagatggaacctaaggcagtgaatccttgtcttaattttttcataaagtccttcactaattctttgggataaaagtacttaaatccaacaaaagtatgttactaataactgaatcagtatttttatgttaacaaaacaaagtcttcaaatattacaaaggaaaaacatggaagatcactgattaaaaacatttatttatctataaattaatgttttaacttattagataaattatgatcatgaaatagagtaatcctttgcctggtgaaatttagtaacttattttctgttagatggctttgcagcaaagcacccattttatatgtttcaactcatcacatatttgttgagtatttaatagatgtaaaccattgttctgtatgtatcaggaattagcatttattaagatacaattctttcctgggagtaacctagaaaaaattcatatatatatacacaaacacacactcacacatatgtgtgtgagtgtgtgtttatcatatagataatatgataaattagttaaggaaggcagaatgtagagtgggctcaaaatttggattaaaaatatgaaagattttatagagataaaattataaaatagatatatttagagaagcaaagatgaagaaggaatgagtataggtaattacaaaatattattagagaaataagaagagagggagaacccactgtggtagattacatatgtttagaaggaatttcagtgtcagataaagcaatgcacaggctaaagcatggagcttcatccatagcacatagttaatattcagttatcttggtaatcttcaaaatgatgggcaaagttcagcttgtgttagtattcattattttgagtataacatgtttggtttcagaatttaatgggagtggatttctctactataaattgcagatgttgttggaaggatcctatgtgtccttgccttgaacctgaaacagtacggataggggaatggatataagctacgggacaagccaagacaaagtgcaagtagggaccagctagagaaccatgaagatgtcctcatactctttggtgataagccagtatcgggaagttaaatgtggtctataagataaactaattgatcagcaatcacagtaggtgatgttgtgagggaaataaatatgcagcagcttcaaattcttcaccaatatctctaaggacttgattaccaattaaccatccccttcattttacttcacatgtcctttgcctcaatattatgtttccatacttctgttttacctaattacttggaaaccattttctaaggctgttacttatctattttaaagttttgaaataccttttttttcaatgttctttctttataggatttgggttccttaaaagaaggataatagcaactatagtagaaacttgtgggtagataaaattagatcacatttaaataattcattggtgcaatatacatatgcttagttattatctttattagaagtacttttaacaaatatttattaaagtaaattcaattttctttgatagcaagtttatagattctacattccaaataatctctaaaatttttgtttattcatgttttcttggaacttatgaattgatgattttgtagcataagagattgaattaaactctgacttctttttgttcttctctgccttcataaaactgattttttgttgttgttgttgtttttttttttttttttttttttttttttgagacacggtttctctgtgtagtcctggctgtcctggaactcactttgtagaccaggctggccttgaactcagaaatctgcctgtctctgcctcccaagtgctaggattaaaggcgtgtgccaccacgcctggcataaaagtgttttttaagcaataaagtatggctatcaagattttataacacaactgaccttgagtatgtactgtagtggtataatggattacttgttagaggtcaatttcagacccatagcccttataagccaaatatatatataatgtgttactaaagaaagaaaatagcaaagataaaggtaatatctaaataccaccaatatatctttctttgatcacttggtagagcaatgaagtcacattggtgccactgaaataacttgagttttgtcaaaatttaagacaacatttagatgtgagttaaaaagtgggatccccagacactattgcagatgccaacaagagcttgctgacaggaaactgatatagctgtctcctgagaggctctgccagtacctgactaatacagaaggggatgctcagttagctattagatggaacacagggtccccaatgaaggagctagagaaaggaccctaggagctaaaggggtctgcagctccctaggaggaacaacaatatgaactaaccagtaaccccagagctccctgggactaaaccaccaatcaaagaaaacacatggagagactcatggctctagctgcatatgtagctgtggatggcctagtcagtcatcaatgagaggagaggcccttggtcctgtgaaggttctatgcttcagaataggggaatgcctggccaggaagccggaatgggtgggatggggagcaggggagggaggagaggataggataggggattttcaggggggaaattaggaaaggggataacatttgaaatgtaaataaagaaaatatctaataaaaaaaaaagtgggatcccacatcctatcagggctcgggccactaggcaaggcagatgcagggcgtttaactgcacacacccacatggcaccactgggcaggccttccactgggggttgtagaagagccagttctggggtccctgggccacatggaggctaggaacgtcaagttctcagtcttgaacacctcagatgcctgtcacagaagaactgagaacagagtgggaaccggcgggcagactctaccccgggcagaagggaaaagggcaggaggacggggctccaggctaggtcccacagagaggagagtctttgtcttggtcagaggcctgcttggtttggcaggtggctgtggctggagtgcagggaggtttactgttcatttcaatctatttagatcctacaaagccttcttatctagctaatgaatgcagaaaagcaaagttaagttcacatgatctcaacgtacatgctatttcaaaaatgttataaagtttcagaattcactggatgacaaaaaaatcaaactcaaagtaagacagtggagatggatgagtgtcaccactgtgacactgtcaccatctgtggcagctggctaaggtgggaatgtatttcttaggttatcattaacagtgatatattattgctagtaaaaatagaattttatcataggatgatattttgtcaatgagtcttgtactatttgccattttaactgaaaaaaagtggattaaaaaatctgacattgatttagcttactgctcacttgtctattttgtgtgacaattaaaaaaaaccactaaactattcaaatacttcccctaaaatatgacatctgaaatataggtaatttacagaagatatttaataactgtcgactgaatcactttgcattatcaaggatagataactcagaacaatacttgcacctgccatatatttcataggcacctaaaacaggaataagtattcacacctattcttgtacaagctcacatttagggcactgaagacatgtcaggtagaatacctgagactgtgcagggcagcaaactcagcaaagaacttgcctggcatacaagaaaccctgaatttaatatccagcactgaaatagtaaaacaagaccaaataacatcttccaaaaagtattaccttcttataaatcaagctaaacatagctgttctcatctgcattccaatgcgatgaaggccaaaaatagctgggtgaagaagcagtgtcctgacaatgaagagaaggcataagcctatgccaaggtaaatggcaatggaacgttccaccttgttttctggatcataggatgctatgattcttcctagcaagacaggctggacagccttggtgacttcctgcaggagaaggcagtgattaaatttcatttcttgttcacattttaattatgaaaatttcatctttacaataatttaaaataattttacagagaaggttggacaatttatgaaactgctgatagtgtctttgtgcatactctgaaataagacttggttattagtttacagcaaaagtcatttagagacaagtttgtgtgaggtgttcactaaaacctgcatgaatagcaactatattgtaaaggggtacttgatgaagtggtacattaactagtaacatgtacatgtcacaaaccattcctaaaatatgtcccagaggatttcacaactctcagtcatgtacgaactgttttcactatgcaggcaggtgaagaaatggaggccaagaaaagcaagacactaagaaatttcaaaatgaacttctttaaggattttgagccatggtattatgatcagaaggaacagcttctcaagagtacaaccattgagcggagctggattcaggagggaagagcatgccagcaccactggtattatttaaagccagccgcttgggtcctgttccttccctttgccagtgtagagctgggtatgtgcatcagtaaggtgtgcactagagcactctatcttgagccagtttccaataaacccataaacttcaataatccaaaactgattaccaaccaagccgttcaactgattcatcaacccttctaaatgtacatggatggatttgaaccacaaatggcctttgaattacaaaaagacatcatctcccaatttttattttatgataacttagtaaaatagaacttagggctaaatcttgaaagaagattaatatagatgtgacatcaaatttttactgttaatttgcttttcattgttctctatgatggcttttccaaatcccaagtgccaacactacctgtcccaccagtcccagaatatgaccatgttttgtatctcaccttcatcttcacagggaattaactacaacctaactgtcattaatcattgcctttattgtagatgctcattctctactttatatacagcacttcatattagtataattcaaagctctgcatagaaaagaagattcaagcctttggaaaagtttccaagataatcacaaaatgagatataattctttccttttacatgcagggttgaaatggatttgaattatgccaaataaaaagggaggtatcaaaaagaatttctaacctcttacccagatataatatgccaattgtttgagacatctaataaataaaacttattttaaaaagtatataaaatatttcttattgtacatcatcttacatatgcatcatatttttattacatagctaaacatctttaacatatttagatgttgaattatattagagactaagcaggcacattcagggtgatatggcctatctataatttattttattgggtattttatttatttacatttcaaattctatcccctttaacgaactccctctctggagattccctatcccatcacccattctcctgcttctatgagggtgtgcccctatccacccacccacccacccactccctctttcccaccttcacatttcccgacactggggcatcaagccttcacaagaccaaggtcctcttctcccactgatgccaacaaggtcatcctctgctacatatgtggctggagccatgggtccctccatgtgtgtgtgttttctagttccatccatttgcctaagaatttcatgaactcattgtttttaatagctgagtagtactccattgtgtaaatgtaccacattttctgtatccattcctctattgagggacatctgggttctttccagcttctggctcttataaatacacagattttttttcaagttgtaagttataagcttaaatgtttttcttctgtttactaatgttagaactccattacagttttcaataacctactttatcatactagacttatttgcttaattatttgattacaatttaatacagtaattatagctttcaatactttaaatggcatgcctattttacatattgctactaatgagttagatctcatcttgcctcaactagcaagacatactcatcttttcaacaatacacgtcatctcataaggacactgacagtattactctggaggagcatatattcacacagtaagatacagcttgtttctttactggaaaatttcaataacaagatggtttgtagagcacagcataaaccttactacctcacagttctcaaggacaaaaccagcacttctagactctctccttctatcatttcccctaatctcttttatgtatcatgttctctaatatttacaatggaaccattcatagatccacatgacattttttaagtgtgaagaaaaactgtaactgatacctcagttaatctataaagcacagcccctttttaaaaatcagcattggtgcatgcgagttgcatgtcctctgctgctcagactattttccgaaaaaaaattccctaattttcaccacattgaaatactactccaaatagaattgtatccaatagaaaaaatgcaaaactattttaaataagataatattcaatgacgtattttaacaattttatcaggcataaatcaaaacgcaagtttcttaattgttttccttagaaaataagcttaatactaatgtttatgacaataagaacactaaattcagaatcataaaactcaaatacccatttttccatttattttttgagaatttcatacatgaatacttcacacacacagaaacactttaccactttctcacttccaactccatccatgtcccatctgactccctcacgagttcatgccttcttccttactattcttattcctgtatatttattctgtgtcacctcaggcacttctgttgtttggacagttctccttattggcaaactctggttacctacaaggttcgctcctataacatcacccctggaagcatgacctgagtctaggagtactatgcagaggcctgccacatgagtataaccctatctaggaaggctgcaaaaggattattatgaattccaggccagtctatatatacttccttcccactataagaccatgtgtcatctgggtaagtgaccatgtaaaaactagctaaaagacttgcactcatggtaggaataattcagttctcactgcagccgaccaggggacacctgaatgcacttccagaacaaagctctaagtcactgtagatgcatacccttaagccatttccattgtacctgacaaataatcagatgtttctagagacagacaggtaagtctgtgttgagtgcatatgcagaccatagagaaaagttcatacaaaaacaagtgcagactcaggcttgcagctaaattatatggactttatctttatacttaaaaaaaaatactgcatttttacaggcctgcggatttagttcaggagtgcttgctttgctagcatgtgaggtttaagagtttcttgctatatcttgtgcagctactaagtaatagtatcaccttcacttgttgcaagcacattttgtatattgttacatttagaatattaatgctagtgataccaagaaatcaactaacagaatactaatatactactgaacaagctgtgaatatcacagtaacaatgaaataactaatttgataaaaagtatcagtatctggttaaaatttctacaaagctgaatcgcaacattgcttgttaacctaagaaagactttcttccagaatcaggaatagttgataaacacaagtgtgggaggcaggaaagcaaaagaaccttgactactatgaccacctaacattattctgaaatgtctagctaagataatttaatgagaaaaatgatagctatgaattatataaaaagtaaaaagcacctgtattagtatgatatgtgattgattccagaaactactaagcacattttaaaaaaactaactgaactaaaaaaatctacatattacaaagatgatgtttcacctaatccattttgtaagattagtgtaatcacataaaaattttaagtatattttaaaaatgaataaatttgcaccaggttattggctatatgtttatattgtcacaagtgttatgacatatataatacattcttagtgagcatgcttaaccaataaatatttgttaaaacaacaaataaaattattctgaatttaatttaggaataaattctaattgaaactatttgaagaataaaaataatatgaacatttaagctactggatattaaaccatacatgtatacacttcacaggtcaaagaaagtatactgatttatctagaaattccagtaaaagacccaaatatatataacaatttaacttataatgcatggaacttaattcagtggagaagtaaattctaagtggcatagatatgtaagtgtaaaacatgacataataacacatatagaggggctagagaaatggcttaggaagagttcaggtgtgagtgaagctgaatccagagaagcaaccagctgtgggtgttcgcagggatgggacagagatgagaagtgaatcctagatagcaggcctctagaagctttgctgagagcattcgtactgaggggatgtatgaagaaaaagtaccctaggcagagcctactcataagcagaattaccgcaaatactcttgcttcaggagcaggaggcttggattcaaaagcctgtctttgtctaaatatgagagacagatcctcttttataacagtctggggaatataagaactgtggcattgtgagaaccaggctttcttcatgtccgttagctttctgggacttaaaaaaaaaggtctcgatttaagctgaactaatgatacttacatgtagtgatggaaacatggaatcgaagatacgtgtgagtatacacctgtgacttctacagtaacaagctctctctggtgatcacagtctgtcaggaacatgcttacagattccctttatttagcttcccttagattaccctgaattttctcctgtgcccatgtgctcaaggctcttcctcactttcttttctattagtttcagtttatctgcttttatgtggtgatccttggtccatttggacttgagctttgtacaaggagataagaatggatcgattggcattcttctacatgataactgccagttgaaccagcaccatttggtgaaaatgctgtctttttttccactggatggttttagctcctttgtcaaagatcaggtgaccatagatgtgtgggttcatatctgtgtcttcaattctattccatttatctacctgcctgtcaccgtaccaataccagcgtctccaacacataagcacagaggaaatttttttctgaacaaaacacaaatagtttatgctctaagatcaagaattgacaaatgggacctcataaaatttcaaagcttctgtaaggcaaaggacactgtcaataggacaaaatggcaaccaacagattgggaaaagatctttaccaaccctacatccaatagtgggctaatatccaatatatacaaaaaactcaagaagtgactatagagaatcaaataacgctatttttaaatggggtgcagagctaaacaaagaattctcaactaaggaatatcgagtggctgagaagcacctagagaaatattcaatatccttagtcatcagagaaatgcaaatcaaaacaaccctgagagtctatctcacaccaatcagaatggctaagataaaaaactcaggtgacagcagatgctggcaaggatgtggagaaagaggaacactcatccattgctagtgggattgcacgctggtactctggaaatcaatttggcagttgctcagaaaattggacataggactaccagaggatccagcaatacctctcctgggcatatacctagaagatgctccaacacgtaataaggacacttatatcactgtgttcatagcagccttatttatgatagccagaagctggaaagaacccagatatccttcaacagaggaatgaatacagaaaatgtggcacatttacacaatggagtactacatagctattaaaaatgatgaattcatgaagttcttaggcaaatggatggaactcatcctgagtgaggtaactcaatcacaaaagaacacacattcattgataagtggatattagcccagaagttcacaatacccaagatacaattcacagaccacatgaagctcaagaagaaggaagaccacagtgaggatacttcagtccttcttagggggaacaaaatacccattgtaggaaatacagaggcaaagtttgagccagaaactgaaggaaatgtcatccagtgactgtcccacctggggatccatcccatatacagttatcaaacccagacactattatggatgccaacaagtgcttgctgataggagtctgatttagctgtctcctgagaggctctgccagtacctgacaaatatagaggtggatgctctcagccaaccattagactaagcacagcatccccagtagaggagccagagaaaagacccaaggagcggaaggggtttgtagccctataggaggaacaacaatatgaactaaccagtacccccagagctcccagggactaaaccaccaaccaaagaaaacacatggagggacccatggctccagctgcatacatagcagatgatgaccttgtgggacatcaatgggaggagaggcccttggtcttgtgaaggcttgatgccccagtgtaggggaatgccaggtcagggaagtgggagtgggtgggttagtgagcaaggggaggggaatgggacagggggggttttgaggggaaatgagaaaaggggacaaaattagcaatgtaaataaagaaaacatctagtttaaaaataaaataaaataaaaaaatgattatccttagttgattctcctacttaggttttcagcagcctgttgctcttctctgctggaagtctgaaatattaaagagcatgctatgtctggctgctgaatcagataaagaaaaaacaagtccacagttaatggggatgtactatagctaatatgattttaaaattgcatcactgttgtagaaataaggtcctttgtaatggtatttcctttgtcttaacctttcatagttgaaggcatttttaatagtgtttttttctatcaatactgaaaacaactaaataattgttatgccacaattatcatggcctacagcgaccaagaatataaacacattttgaatgtatgtcccgttatctttatctgtacaattgttatatctgtctcagtaatgtttgtttatttaacaggaagaagaaaatgctcagaaagaacacacaacagtaaagcaacggcagcggttacttgacacagtagaagcttattaaaatggctcaactttgtcccatttccactgtgagttggaagaggagttaagataacaaagactagtaagggtaggagggacgaggatgctgggaaagctctgttatcagcaacaaattcaagtattgagggaatacgttctgctagagtgattatagttagcaacagtatctcaaaacaaccaggagagtattttactcttctcaccataaagaaatggtaaatgactgagtgatctgtatgttaattacccttatttgatcatgaaaaattgtatacatatattgaaatatacactgtatattctacaatgacaatttatatttgtcaaataaatattttaagataaaacttaaattgaaataaataatagatcttggaaattatacttacctaaataagtgggatctagatttcaacagttttacaacactgaactttgtgatctcagtgaaactgtgtatgggggatggggagggataaaagagacccttcaacatcattacactgtgtcctgctcactttgtttctcgtgccttctcactctgcacattcatctactctctcccatcaggacctttccttacccattttattgggtatttgcagaaatttgatcttcggctccaaaggctgtgatgggtccagagatacattccagcactccgtttgtctcagaagtacttctaatcactatccatagataattaatacattgtgaatgctttgtgatttttttttgctatttttaatcttcaaaattttaaatattttttcatatttactgcatctccctcttcttaatgtctactcacaaggagatcttgactgaaaatatcttcaaatgcttgggtgtgctcactgataaaaatgaccacaaagatatctttaaacgatatctcattcttctgtctatatctttatgtgtctatatatgcattttataacacatattctactagaagaaattatattatcttttttatagtcttttctttcatatatagaactaccattaaataacagatctataatatataacacattatttattatatgtgaatataatatatgaatctacatggaaatatgtgataatataatatgcatgaatttgcttaaaaagaaattcaaatctatacatctatacatttatgttcatacatatatatggattaagaaagaccagaagaatttcttctagaaaataatagcactagaaaagattctagagtaattatagtcaattttatcaagataaatttttaatgactttttctgggacaggataaaataaaattatttaagtagcacggctacatattgttcatacatcatttgaggagaaaccaaagcccatgcaatctgaggataaagacctgaagaaatacaatgcaagtcaacccagatgaaacataacaccccaaggcagtattgtgctgagttgatacatcagactcaacacactttccacttgtcaccctttttacaggctatgatcaagcttcaaagtgatgctcgcatgacccagaaaacaataaccacttctgaacacatctgggatatatccaaagttcttaaacagcacaaagcccaggttcccaggctgctattctctttacaatgatgaagacatagggtgctgacaaaatacattctatgtgcacctcaccacctcattttaaatttttattatcttttgtaaacaattcagtctctctctctctccctctctctctctctctccatatatgtgtgtgtgttttcaaaatatcataaacattaatctacattactctatataattctatctatatatctatttatacatatatacatatatatgttttcaaaatataaacattacattacctctatctatctatctatctatctatctatctatctatctatctatctatctatctatctgagcagaaaatatcataaacattccttggtatcactgactgaatggagtctcattcttggtatgagattgccttctaacattctcttttttagcacagaaaagtaaaggtgccagtaacctcatatactattaagtcattataatctggattcataaatgagcataattttgaaacaagtaatttgatttttggacccattctaattttgaactatcaattgagatctacattttaagaattttcacttatctttgatagaattttcagtcatttgtgtttggacttgtaataaaattctatataaaaaaatgaaaacaaatactaaacagaaaacaaaaggctttggttacaagattgtcctcacccttctgtaatcacaaaactatgattatatcttaataatatatgacaccatatttacacgtgagattcttacccctaggtatagcaaaattccatagaagaggaatctccagaaaaagcatcgccgaagggcgtggataagctggggattcttttttgaagcttgttctctgtcccattctctgcaaggaataagaaaatgaaaccagtgaactgcaggtgcaaatatatgagctgctctatctcccttcatactttctgtcccatgagtgtcaaagagattaactgtgatgtaagtgataaaaccttgtgaagttgctccagtaccaactgcccaatagatatctgtcataatctgatggtcttccatgaaatcactctgtccagtttcatttataaaaatactaagttttgtatgttaaagaaccatactaggtttcttaaaagcaatgacaagggtgagcaaatgatggataacactgagaatgcatttgtgctcagaacaagatgcaaaaatacatattttaagcttttttcctgttacctcatgatatttatgtgtttttaactgtcacatacttcacaatatgcaactttcaaacaacaaaatatcaggtgaattttttgttttaaatatatatattttaattttaactactataatttgcatcattttctctttcattgttcacgttctagcccctcctatgtctcttcccttcagcccctcccctgtccctcttccacattccttctcaaattcatagcctcatgtctttgattataatatctattattattttaaaatatttacatacataaatacatacatacaaacaacctggtgagtccttttagtgctgcttgtataaatatgattcagggatgactccttggcatttgataactaattagggagctcacctctagaaaaaaacatttctctctcagttgtctatagttctttgtttagaagtggggctcttgaaagaaggggctgaagcactgtaagagccagaaggccagaaagtctacttaagatatgtctcttagaaatgacagtgaagtgacagccataatacaacctggttgcctaaaagagacctgaacaatgacaataccaacagacattctaatgaaaggggaacattttgtgatttaacacaagaaaaacccatttggagttttaaagaaaaacaatgagagaaccatcattaaacttcatatccaactactgaattcatttaatagtatctaactctttgaaaatagagcaaaataaaaatatgttttatagtaaggataggtactaaatagtattgaaaaagttttatttcagtactaccactgctttttatttaaaaaaaaaactatttacaatttttgtaatggaataaaatatgtctcagtctcactttcatctcaattttcaaattatcctgagatgaaaaaaaattccataaaccacagaccagaactgaatgatcagataaaggccttggatttctttaatggctattctcattatcattaagttagcataactaaatatggtcctatctcacttgataggaagagcatacaactgatattaatgaaaagcttggaagtcgcactacatggaccatgacttccctaagaaacatgctaacggcagctgatctataaagcctagtcaacctatggttctcttctactctttattcacaaacagagagccagtttctccatctgtaatatttagagagtctaagtgggagaggatatacctagtcacctagtcccacagtgacttgatatgctagagtggaggggtggacacccaaaggggggcttcccattcagaagagtaatggaggagaacttgtgtcagggggtactgggaggagaggaagggctgatattgagttgtaaagggaataagtaaataaatttaataaaaaaaataaggcactaaaatacatagtagcagtataatctccacacaataggtctcgttaaaaattttcatcaatacttcacttataatttaatgatctaggaaatgcagaggagagaatgtccataaatcaaagaaatggtttcaagatgaagataccaataacagtaggatagtaaatacaaaaaaaaagtgtcacatttgacagtaacaggtcactgttatccctcatctatgcagtttgaggaacatagtctgatgagaaaccatatttcaggcattgatatataaatgaatgataaacaagtggaaacgagaacagcaaagaattgtcagctatgaaatggaagacatatagacttgaggggaaaagaagctgttatttttaatcataggacttgaaaaatctgtagctctagagcaattatcaataaaagtagatggtattaatccagcaacacagtaaagaaacttaatgagggaaaagagttccagactggcaaagctcataagttagttaggaacacagagtgggctcatggttttcacactgcagattcaatctcatggtcacaaaattgaagcagatgagtcaatcaatggatctcagccacagactgagaacttcagtcactccccaagtgggtaaaggagtggttttcataaatatataagaaataagataaagagatacaaaattgtatcaaagacaatataggttagaatttatttcttactagaacttatgtatccagtctgagacagtgtttgaattaaaacacaatagataaattttaaaaactctatcagaataggggacataaaactaagtctaaataattctataaatttggtgatgaaataaaaagcagagaggaaggaaggaaggaaggatggagggaaggagggaaggagggaaggagagaagggggaaggggaaggggaaaggaagggaagggaggcttattatcttctgtggagcagacaggtataagcatagagttctgagaggtcaacctgaggagaaaactaatctaagaaaataagccaacagagggaaaatatcacaagtagaaatttgagtgcagatatattggacccactgagccctcaggctagtcatctatctagacactcacatactttaggctttgtgagctattaaatgtcctcttcttaattgatgaacctagttgattaggcttctgtcactcacaatcacaatggccccaaccaatagtcagaaaagggaactatgataaattcaccaggactgaattattcatcattcagtggttggcaaattacattatctctaagccatgatgtgtttatctgtaagctgaagataattacggtttttcttccagagtggccgagatgagaaattatggttgaaatgtgaaagattcaaattcataaagtataatggttcccatgaagtataatggcattcacacattcagctcacataaattttgctccagatgcctcaactatgtatctttgtacaggtagcaggaaagctggctaccctttcttaggccatctactcagacccacattccctctaaaagcaccacagatggaaatggcattctcaaccctactgagacctagtactctcatggccattgtagatgacttcagtgaaaggcagtgatgtgaatgaaaaggagaaggagggaactcaacaactatttgagatgtacaagtctcagcatagaaaggaaataaacatgaaaaatcaagataccatgtttcctcaacagattactaatcctacaataatagcacctaataaagtatgagtatattcaaacatctggaaaaaggcatgaatgtattaaaaagaataaagggatcaatgaagtaaagaagtcattagaagataggataataaccttcaattaagagaattgttggacaatttcaaactaaaatgattctggaaatgaaaaaacatcaataatccaagtaaaaaatcttattgggaaatctaatcagacaggatcctgtagaaaacagagggggtaagttgagagggaggaggaagaagaggaggaaggggaagctatgatcaggatataaagtaaattaataaaaaaattcccagtgccaggcagtgattatctctctagagtttttggttactgggatcccataatcccccaaatattacaggctttacatattgccaatgtttttggtaagcttccagagtttgatggaaacaccctactgctcaagtaattggatacttgagccaaaaaatgtaaaaaaaaaaaaaaaaaaaatcaatcaggtagcaaaaagtaagcttcacccatagtggccggtggtcatagtgctgaaaattctatgcatgtgactggaggaaaaagtaacaggcttacatataaacactgccatctataatgaagactggcttcagaaagacatgcccatgagtaggacacagagacatgaatgatgtcaactcacgtaattaacctttttctgattggattgaaggcccacttcacaagataggagttatgcttggtacccaggggagaacctattactattatcctgataaatagacatagtattaacctgctgcctaagttatctatatttacagatttgtgcatacctcaaccttcatcagataagctactttttgcagtagatagcaattaattttgaggtctacaactgatcagtatatgaagacatgactgtggagtcctcagctataaataagatacctatatgttcagggatcatcatagaagtggatgtaggatgagtttaagagctaaagttattggatacatgcagaaatacagtatgtgctgaacatgacagcacatatgaactcataacagctgcaactgcatgtacaagacctgtatacaatcatgtcaagagaatctcagcatggatgagaggggcttatgaagtcccactactacctgaggagctactagtaattaatggagagctggttttcagaaatgcagctggagaggcaacccacaacacagtagatggtcctatattatccgcatatggtagctctaactgtgatttttaaaaagcacatggaagctgggagggtgaggggggggaggatcagataggcattgagtagactggaatcaaagatggacttgacaaaaacatatatgcttgcatgaaattatcaatataataaaccaaaattagaaagaaaaaatacataagttctcatctcaaaaattccaaatatattttgttttaatatcacaaagctaaactactcctacttataataatcataaaagaaactactattttaagaatattcaactggcttatgtattttgactaatataattgttttagttacttttatactattgtgccaggacactgtgactcagacaacttacagaagaattagtttattgggagcttatactttgagagggagagttcatgatggtggggagtttagcagtaggcaggcatgatcctggggcagctgagagagagagagagagagagagagagagagagagagagagagagagagagagagctaattgggaacagcatgggcttttgaaaccttaaaggcaagacttcccattccttcccaaacagcctctccaactcagtaccaagtattcaatatataagcttatgggggccattctcactcagaccaccatcattataaaaatcttcaacttaaaaatattttcaaaaaagccagacttggtggtatatgcctttagttcttaggaggttaatgcaaaaaggaagaggttttgaggccatcctggttatatagtgagtttagagttatcctggactaatgatattttgtatcaaaaggccaaggctaagaatgcacctcattgttaagaatgcttgacaaagagtaaaaaaagcatcaattccaacactagatagaaattctcagactatgcattatctatttttgtagaagaggccatttcttaagaaagttattatctttaattcattgtttcattgtttaattcttgagtagatcaagattcatcaagagtacgattttatttaaatgcatcacttttaaatggaacctctaatattccagctttctgttctttaaaagacatgaaaaacatctttcttttgccagtaaagtcaatgataagatcatacctttctagtttttcagacaagtggtcagctgaatcagcagaaggggcttggtatatgtctgacaactccaagtggtgtctgtaccctttcctcaaaattggtgtggtccagctaaaagagaagagggcagacagatttattcacttggttgggtctctaatgtagacatgattcttataccaactgtatgcatacaaaaagatgaaagttaaataagacaacttacataaatgcagtaattcatatcttagttgatatacccacataaacactaacatctctaaactgatgccattgcttagttctaacagacaagaaatctattacagtgtagtctttcctaaaagtagcccatggcaattcagcaatgtgttagctataacactgttactgatgctgtggtgtgcttgcagacaggaacctagcacgactgccctcagaaaggcccaacaagcacctgaaagagttggatgcagatactaggacccaaccaatatatggaagctggagaaacctgtggttgaattggggaaaagctagaggaacctgaggagtagggtggccccatgggaagaccagcagtatctagagacttgaggccccagggaggtctggtggagtgggggttgggtttggggtggaagatggtgacattctcttggagacaaggggaaggtaggggacagggagtggtcagtgggaagagtgagagggagagaaagactggactgtaagaaaggattaaagaataaaattttttaaaagttttaaaaaattaaaaagtgagtataaacattgagtagcttataccagttagctgatataattatcactatatcattgcttggaaatatgaatcatcaccatctgttctctttacactgtagatatttattaggaatttaatatataatttatgatggaagaaataagcagattagccctatttgctcaaacatgctgctttaactattaaggcaacaggcaggataaccttcacaatgacaaaaatcagaaattctaacacacacacacacacacacacacacacacggccacacctcttaatcctccccaaagagcttcaccaactggtgaccaagtattaaagtattagcctttggaaatgtatgtatgtatgtatgtatgtatgtgtgtgtgtgtattagaggaagcctgaaaaatatgagaggaagacaggctgagaagaaaaggagaattatatttaaaaaaaatcaatcatatatcaagagaaaattgtaaaataaattcaaaagaatgagatatttctcagcttaaattttttgttattttgagacagtattttctgtgtaaccctagctgtcctggaactcactctgtaaaccatactgaccttgaactcatagagatccacctatttctgcctctagagtgctgagattaaagacatgtgtgattactgcaagtcgttttgtgtatttgcttaaggaagaaattcatctggatttagtggtttacaaaactggtttctccctcagcacctttttgtaactcagagatgtctaagatttatcgttattgagacttcttaatgatgtaaaaaaaaaaaaaaaagaagaagaaatatgcacactaaaccaccaaaagtcagtatctgagaagcaagataaacatgtaacagaaaaacatactctatctatgatggtttgtatattcttgggccaggaagtggcaccatttggaggtgtgacctagttggaataggtgtgacctggttggagtaggtgtgtcactgtgggtgtgggtttaagattctcaccctagttgcctggaagtcagtcttccactagtcgcctttagatgaagacatagaactctcagctcctgctgtgccaagtctgcctggatactgccatgctcccaccttgatgataatgaactgaacctctgaacctgtaagccagccccaattaaatgttgttttttataagacttgccttggtcatggtgtctgttcacagcagtaaaaccctaactaagacactatcaaagtcatttgagagagcaaagaaatgtcttgccaaatgtcaacattttgatacctctctaggacacaatgttccaggtggccttcatgattaccctcctccctcccttataagggtccatattctttacactacttccatctctggcttgatcactagcaccagccctatgtccttaattgttctgtaagttgcctttaaggctaatctaaatttaggtcaatccataagactaagtaaacttattatctattccttgctaagacattagtgattgactatggtttagtgtgtcactttctccctttaacttgaaagcttacactttaacaaaagccttctttgacaaaggttaactagatatcttcacagctcactgtgattcactggtcattttgtgagagggaaaaagtagtgaatatttatgaaagtggtctggatgcatgaggaaaatggtgccacaatggtgtagtgcctctagtggcatcatctaagaaagggtactacacgtgttttgcaaattgtatcttgaatatcctaggtttctgggctaataccagattatcagtgagtgcatatcatgtatgttcttttgtgattaggttacctcactcaggatgatatccaccagatcgatccatttgcctaagaatttttgctgacaggaccctgatatagctctccgttgtgaggctatgccagtgcctggcaaatacagaagtggatgctcacagtcagctattggatggaacacagggcccctaatgaaggaactagagaaagtacccaaggagctaaaggggtttgcaaccctataggtggaacaacaatatgaactaaccagtaccccctagagctatgtctctagttgcatatgtagcagaggatggcctagtcagccatcaatgggaggagaggcccttggtcttgggaagagcatatgccccagtacaggggatttccagggccaggaagcaagagtgggtgggttggagagcagggcagggggagggtataggggactttggggatagcattttaaatgtaaatgaagaaaatatctaataaaaaattaagaaagaaagaaagaaagaaagaaagaaagaaagaaagaaagaaagaaaggaaggaaggaaggaaggaaggaaggaaggaaggaaggaaggaaggaaggaaaaagaaaatatctaataaatttagaaagaagaaagaaagagagagagagagagagagagagagaaaggaaggaaggaaggaaggaaggaaggaaggaaggaaggaagaaataaagaaagaaagaaagaaagaaagaaagaaagaaagaaagaaagaaagaaagaaagaaagaaagttagttctacagctaggtacttattgcccagcatctcacagaaggaaagtgacactgaaaagtatctggcaataagtataggaggtaaaaggaagatggccttgtgggatgttgtgatttgggctattattctccataaacttaaagcaagagtttactacaatttttttaaagtatctatttagcaattgccaaagaaattccacaccattagcactttatttgcatcttaagttcctgttaggcaaacaggacaaaagggctgttgctttattaccagggttaggaaatggtactcagaggcacaaaacttttctgaattactaacatcaaagatttcttcacattcttctgaattcatttaaccatgttcagctttacaaaagtaggtagagtgagttgtattaaaataagacacaaacttagattaaagtaagggaactgaaaactactaggctgagggtgggggtgtgatctgtaaacaaataataaacccctttccagaaaacaaaagcaaacctgactcatgaccttcagcagtcactgctttataaggactctttccatgatcagcttctagctactacagatgagaactgggaagaggactaacctgcataaaatagtagtatgcctacctcctcagagacagcaagcacaaatgcccttaataccataacagcaaggtacaaaataaatgcaaagtgacaacctctttaacctttgtttaccatatcataatttaggttctacaatctgaaatttaaaaacggctgtgcttagcagctagttcacagttcaattcagctagaaagattcacgtgtgttgacgactggccgagattggaaatctcagacggctgatgggatgggacaggaaggatggtggtccttagaacacagtttaaagatgaattccacctaccagaagccttgtgctcgcaatagatttgaaaatattaaaatgacacatcacattttatgttatttttcaatttttattagatatattcttcatttacatttcaaatgctatcatgaaagtcccctataccctccccctgccctgctcctctacccacccactcccacttcttggccctggcattcccccatactgaggcatataaagtttgcaagaccaaggagcctcttttcccattgatggccgactaggccatcttctgatacatatgcagatagagacacaagctctgggggtactggttagttcatattgttgttcacctatagggttgcagaccccttcagctcttgggtaatttctctagttcctccattgggggccctgtgttccatccaatagatggcaatgagcatccacttctgtatttgccagaaactggtatagcctcacaagagacagctatatcagggtcttttccacaaaaatcttgctggcatatgcaatagtgtctgcgtttggtggctgattatgggatggatcccagggtgaggcagtctctggatggtccatccttttgtttcagttccaaacattgtctctgttaactccttccatgggtattttgttccctaaggaggaatgaagtatgcatgcgttggtcttccttcttcttgattttcttggacacatcaccttttaagtaagtagaattttactgtcctccaaacccatgcctcaaaaagcatttagaggcaaatttgaaatcatcttatccccttgaaaaaatataactatgattcttttggctcatgtataaaatatagtggccatccccataaatgagcttccagctcatttcaaagtaacacaatgtgtgagatgcttttataaaaaccttctttgctatctcagaatttttaagatattatgttatacagtgacatctagttttaacaagagaaccttagatcaacgactgaaggcaaaataaaattcggtgatataatatacccacacatcacacagctcaccacctgtattttattattagttagcatttctttttggaagttacaataaaatgaacctatatttatgctcccaagttgaaactggttcaaagtaaattataaaaactaaaatatagggacaggagggatgatcagtggtttagagcatttgctgctcttacagagaaccagggtttgattctcagcaccgacatggtgactcacatctgggactccagggccaggggatcagatgtcttgttttgacctctgagggctccaagcgcatgtgcagtacacatatttacatacaggcaaaacactcatcatatactttataagtctaaaaagaatttttaaaaactaaaatctattagctctatgcaatcaccagagagtcatcttcgagaaagattttatatcttgagattaaaccaataaatcaaaccaaatgtctcctaccagtgagttctctctgtcaactgcaggtcagtctaagaaatataaaacaaaagtaaaaaaaaattaaaaaattaaaagacaggcattcaagttttagacactttgcaataatgatatgaaattcaagccattcttcttttcagtgattctgattatattcagtgaacttgtgtaaattcagtaatgttcaggcaaggaatttatagtcagtcaggcatttcatgagtctcggtggttcgcttggaacaacgggaggcaatgcattgaggatctccttttctgtctttccattatccctgatagctcttcacctcatatccaagtgactttatgcatcttgattcatgcccagccatgtatatactcaatggacttataaaatggtattcctcaaaaatatagtggtctccaaaattttggctacttctaacagaaactagctaatcaactataagttagcagactcgtgtgtatttttaagagttcactaacattcacaggaaaaaaaaaaaaaacctagtatcttcgatatactgttctgttcacttaaccatgaaaagcttcagattttattatgaaaaatgctagtattttagtttttaaacaagcacatattaacccgactgtttagcttagttcattccatttctttgtgaaaactctaattttttataggatgacatctcatttctaataatgaaatgatgtgttgccagagattgagggtggaagtccctgctccacaattgctaaatacaaggctcagccacctgtccaaataagccaattaaggagatgagcagtgactaggggtatggccttgttgaagtaggtgtgtcactgtgggggtaggaatttattttaatatttacaactcggtattgacatttttaagtcatcaaaataatctataattgcaaaatgcctcttaaatatacacgatatcatctgaagctaaaagtaatatgcactcagccagtcttaaaaaaatctatttgtaacattaaatatgataaaaatggaaaaaatctcttatgaagtccttatagtcttatgaaattgtgaccggttcctgattagacagaaaccattccatctccaagggagtataactgtggcttcatagaatgaattgggtagtgttccttctgtttctattttgtggaacagtttgaagagtattgttattaggtcttctttgaaggtctgatagaattctgcactaaacccatctggtcctaggcttctttctgttgagaaacttttaatggctgcttctatttctttaggggttatgggactatttagatggtttatctgatcctgatttaatttaggtatttagcatctctctagaaaattatccatttcatccatattttccagtatagttgaatataggcttttgtagtaggatctgattttttttaatttcctcagtttcagttttttatatcacttttcatttctgattttgttaatttggatgctgtctctgcgacatctggttagtctggctaagagttcatctatattgttgattttttttcaaagaaccagctcctgattttgttctttgtatagttctttttgtttctacttggttgatttcagccctgagtttgattatttcctgccgtctactcctcttgggtgtgtttgcttctttttgttctagagctttcaggtgtgctgtcaagccgctagtgtatgctctctccagtttcttttaaaagggactgggggctgagtttttctcttagcactgctttcactgtgtcccataagtttgggtatgttgtgccttcattttcattacactctaaaaagtctttaatttttttttctttacttcttccttgaccaagttatcattgactagaacattcagattccatttggatgtgggttttctgttatttttgttgctgttgaaaatctgataggatgcacaggattatttcactcttcttgtatatgttgaggcctgttttgtgaccaattatatggtcagttttggagacagtaccacgaggtgctgagaagaaagtatattcttttgttttagggtgaaatgttctatagatatctgttagatccatttggttcataacttctgttagtttcactgtgtctctgtttagtttctgttcccatgatctgtccattgctgagagcaggttgttgaagtctcccactattaatgtgtggggtgcaatgagtactttgagctgtagtacaaagtttcttttatgaatgtgggtgcccttgcatttggagcatagatgttcagaatggagagatcttcttggttgatttttcctttgatgcatatggggtgtccttccttattctttttgataactatttgctgaaagttgatcttatttaatattagaatggctactccagcttgtttcttgggaccatttgcttggaaaattggtttcagccctttactctgaggtaatttctgtctttgtctctgatgtgggtttcctgtatgcagcaaaatgctgggttctgtgtatgtatccagtctgttattctatgtctttttattgggaaactgagtccattgatgttaagagatactaaagaatagtgattgttgcttcctgttattctttatattatttttatgattgtgtggatcctcttttggatctgttgaaagaagattactttcatgctttttctacggtgtagtttccctccttgtgttggagttttccatctattaccctttatagtactggatttgtggagagagattgtgtaagtttatttttgtcatggaatatcttggtttctccatctatggtaaatgagagttttgttgggtatagtaacctgggctggcatttgcgttctcttaggctctgtataacatctgcccagaatcttctagatttcatagtctctggtgagaagtctggtgtaattctgatagatcagcctgtatatgttacttgacctttttcccttactgcttttaatattctttctttgttttgtgcatttggtgttttgactattatgtgatgggaggaatttcttttctgatctaatatatttggagttctgtaggcttcttgtatgcttatgggtatctcttcctttaggttagggaagtttccttctataattttgttgaagatatttactggcccttaagttgggattcttcactttcttctacacctattattcttaggtttgttcttctcattgtgtcctggatttcctggatgttttgggttagatttttatattttgcattttctttgactgttgtgtcaatgttttctctggtatcttctgcacctgagattctcttttctgtctcttgtgttctgttggtgatgcttgcatctaactcctgatctttttcctaggttttctatctccaggctggtctccctttgtgatttctttattatttctatttccatttttagatcctggaaggttttgttcaattccttgacctgtttgtgtttttctgtaattctttaaggaatttttgtgtttcctctttaaggcttctagctgttaacctgttttcccctgtacttctttacagagttatttatatccttcttaacatcgcttatcatcatcatgagatatgattttaattcagagtcttacttttctggtttgttggagtatccagggatagctgtggtgggagaactggtttctgatgatgccaagtagccttggtttctgttgcttatgttcttgcccttgcctcttgccatcttgatatctctgctgttagctggccttcctgtctctgactgtggcttgtccctccttcaaacctgtgtgtctgtactcctgggagttccctcctggagtaatttggttatggagagctgtggcacaaggtaagctccagaatacagacagaaactgaaggatcctgtccccagctgttccttggttcctgtgtcctgatggctctgggcgagacccttttgggccaggaatttaatcaaaagtggtggtcttacctgtgttcacatgtgtgttggcactcctgggagaccagctctctccggacagtatttgggtacagagcactgtggcactggaccagctctgggcacagaccttacatatccatgttatagatatgaaactggatctagtgatgcttaagcaatttgttaatgtgaagttagaatttaaaaataggcatgtaatatcaaagcttatttgtctaatttgccatatttcataattaatttgaaaaagtagcacataattaaatataataccagaagcataaacaacaataaccaaaatggataaaatgaataaaacttcttatcctttaaaatatacaataaagaaaatagtgtatagtctatataatttctgcaagtcaaatatctgctaagtggttttaatatcagatatataaaagacttctaactcagtaatagacataaaccaaaatttaaaattacatgagctggataaaaatttatctaaaatagaaattacataaatgaccagtaagcacatgaaatggtcattacaaagtaggaaaatgcaattcaaaactacagctagattccattttatacccattagaatcgctgtaataacaacaaactaaacatacaaatcgttgcaaatgtatggaaaattgtaaccctgtgttctgctagaggaatataaatttgtgtatatattttggaaaataatcagtaagatatttaaaatattaagcataaatttacagcatgacttacccattccactcttaggtatataccccaaaggataaaaacatacatctacataaaaactaatacccaaatgatattcatatgagtatcatttacaacaggcaaatggttaaaaaacattaactgtcaagtaaaaacttaacaacatatatatccctaaaccaagtgatgaaccatgtaataatagtgtcaactttttgaaccattgaacaagaccagtcacaaaacactgaattgtttcatttttatgaagcaacaagataaaggcagaagtagactaacagttgcctagaacaagaagtgggaggcaaaatatagagcttgtttctctgctactgtgttaagacactgaccaaaagcaacttgaggaagaaaagcttacacttgtgcatcacaatttatcatgaatggaagtcagggcagtaactaacttaaacagcaacctaaagacaggaatcgaagcagaggacctaaggaggagtatgtttatgggtttgttctctatggcttataggatttcctttcttatatattgtaaggtcacctactaatgaatggcattgtctacagtgggcttgcttcttccacatgaatcattaatcaaacaaacaaacaaacaaaaaccactaaataaataaataaataaataaataaataaaaccaatgaccttgcttctgggctagtctgatgaagccagtttctcagtgtaggctcttcccaggtggctctatctgcttcaagtacacaaggcccttgaaacagatctgcagataggcatgagaaagctgaatagttttctttctttctttctttctttctttctttctttctttctttctttctttctttgtatgaataaaggttcctacatttattttgtgatatttaacaaaattataaatatgcttaaaattcattattttgtatattgtaaatgggtaaagtgtttgatgtgtaaattctacctcaataaagctataagttagaaaagcagtgtgaagggttgagaaatcaacgttggtgctggaagggttttctaagtgagatagatatgcttgtagaactggtgaaactttccagtggtgattttcaaactctaatccttttcacatacgcagttgttctgatggctcctgacaatgatatcacagtgtgtaaaaaactcatgggaccagttaacggttgatgacaagcaacatgaatgttatacattgtttatttccggtctctcaaagccagaaacttagattttggaactactatgaattctgaggggaaaaaatggcattgtgatatcatattgtatagaaatgaagaagtgtttgttggcagtgagaggacacgagcatttctaaaatctaaagacaacaagcaacgctacaagaaaaaaatagaaaaggaaataggaaagggaagggaagaggagggaaggggggagggaaaaggaggggaggggaggggaggggaggggaggggagaggaggggagaggaggttggaagggaggtcagaggggagaggaggggaagggagaggaagggaagggaggggaggaatcctgctcatcttaggaggtaacataagacacaaaggatgtcatttactgtcaagtaccaatgtcctctgaaaaagcagcctaagtgcctttctgtgaagctacagatatcactgtacctacaccaaatccaagaaaatagtactaattgccccatgaagctgcctatttcctacatgcgagtttccttttaggagacttctgaggaaacaatggctttcaaattactgagcgatattttcatcatcaataagaaatatatttgaaaccaaaagaacaaggaagacaggaaacagcctggtgttgcagttttaccgtagcaatgctcctgagttatggacaggcatgtgtgcaagctttcagatggaaacctctgtgctatcagggaactgaccctctgtgcagtgttgaatcatctcctggaacacagaggtcagaagcactctcaccgcatcctcacggaagtgtgaaagtggaagatgggcataagctcctcccggcttctgactaggcaactgaaagacttgactgtgcacaagtggcattcatgacatctcctatatgggagatacgcatttccttgctgcttttttaaaaataattattcgatttatttcagtgttttctccccttctctagaactttgtatcctttattgtggttctttgttcattttgctttatcagatggcatcacaaagacccaaattcaatacttttcatttatcacggaaataagcatgtcctttactgagccatgactgtcattctgacagtgactaaatatttggaagcatacctacttgactctccaaggttttccccaaatgtataaagaacataattatttcttagagacaaagaacttctatgaggttctggacaggtggtagattcctacagatatcatctggcatgagccatggcacataaaacacaaagtacaacttctcgtgatcttcaatatctaaatcatttaatagctcctcactatgtgtacaaagaagttctttttgtcttttgatagatgtttgtcattcattacatcaaaatgacttctatatattccaggaccagcagatggcttaggaggtagttggtgtcaagtttgatgacctaagctcaacacatagaaactatatggtagaaagagaggactgacttacaagttgtcctctgacctccatacattagtacacagcagtgtgtgtgtgcatgtgtatatgtgcacacacacacacaaagacacaaatgtaattttaaaatgcatctgcccacatcatttgagatcattttctcatttgatagatttgcttggcagataaaatgatacagcagagattagaggcatctatatcattttttaaatgaaaatagtaacaggattaagccagtcaaaaccccagcatggactaggaagggactcatgaagtcttagctctatctgagaagttattgggaatccgtagctgctggggaagggagaatcagtattcagggatgcccattcctgaaagggtggatacgtatgtttagtagatggtctccatgcacatatagtcatataaggcagtactgaatggcttcagtgggtattaaatttaaataaataagagcacatgaagttgggaggcaaaagtagtaggaagaagaggatatatgagagggaaagagataggaggaggatttaatcaaaacacattccatgtatacacaataagaatgttaatgttttctagaagaagtaatttggtaccaggaagacaaggttaaacttcagtttgtggtaaacatagtttccatagttctccatgcaatcaactagtctgataagtcagtctgaaattttcctcattgtcttaacctcctcttccccaagtttgtttaagtatgatgccacttttaaggcactgatacccactgtgaatccccagtgggattagaagagtggtgtggcatttgatttgggcttctcatctgtggatattttcctacctcccagttaaatatgaaatttgtttattaatgtcattttaatcctttttaccttctattatgcaacaaattgaaatggaagtttcaaatctttatgccttttcccttttagtgctgaggaggatgtaagtaggcacagttcatgactcggactataaggttcatatcctgttcctgaatttgggaggcgaagtatttctatttgcattgtccaaaaaccttggcatcactaagaacaaacactgaagctccccagagctgcaggagaggaaaacagaggctcgtcctcaccctttctcaccacgtattcctttggaaaattgagattcagcagggaatggagttgttgaccagattagtccaggatttgccatgaaagaaaactactccaaggccttactttaagtctctacttaatatttttatgttcatttaagcatagcaatgcatgttaatacaaaccttttaagatctgtcaaaaattaaaattgctgattttttcaagactataacatatataaataatagtgattaattcattgtttctaataagcaatttaagagatcaagttagccatcttagcaatcaggtacttaaaaggatagctcctaacacaaaccatggtagattaataaaaattatttttataactatttaaaggttttgttttccttttttcctcaagatgtcatgatcttttgtttccatttaggttttaagaaaatgaactttaaaggaaacattgagccagactctccagcttttgaactctgcaggagttcaactggatgaaaacactgataatagggtggctcttaatatttaaaaagattttcctatcaccatcactgagcaagctaatctctgattttgctgagttacactgaataaaaactgacagcttccttgaaacaaagcctgacttctatttctaagaaggtttagtgcattgatattggtcaggaagagcctctctctctccagtctggttaatcagtctcctgtgtacactgtcctaccctaccccacctttctctattcctccctttatcaaccacaggtccccaagtacactaaactgtataccacattgcataaagagctctgtttaagctgcactgtctactctgcactgtccactgaacatggcacataattctcacttaatattttaaatttttgaatttaaaagttaagatatttcactctgcttatttttcctcacaagattaaattcataaggacaacatagtgtataatttatcttcctatgttcattgtcctgttcattgcactgagcaaattagaaacttggtgaattgatctgttagtaattaattccacaaacatagtatgtttatggcaccctaaggacactgattgcaaggacgttttgcttattcattacttctggtcaaggcaccgaaaggagaaaagaaaaaccaactctacaagaatgtaatataaacattgaggatttgtacttggtcagagataacatgttcattttacatatcattaatggcccacaatactaaatattcaaccaagaatttatttaattttgttgaataaaattttatgaaatatttttcattatctaaaccttctcaatatttgatcttcattaatgttttagtacagatatactaaagatatactaaagattcatgaactactccctagatagttcccttatcccgtcttacagtgtcctctgtagtgtctccatatttttaaggatatatatgtatttacttttttattggatatattatttatttacattttaaatgttagcccctttcctggtttccctgctggaaaccccctatcccatcctcctccccctgcttctatgaaggtgctcatccacccacccaccccctctaacctatgaccctcaaaacatgtggagtaaacacatttagtaggttccagacaacatgactgttttccttacaaaggaattgattttggacatttatctgaagatacaaggagaaatctgtgaaaagggtgcctctggaggtgatacctctacagatctcaaaatgctaaggatccccaccagcatgctgacaaacgctaggccagaaagcacagaatagattctcactcacatccttgggaaaaaacaattaactaacaccttgatgtcagccttgtagcatttagaactataacgataaattttgagtgtctaatccattcagtttatatactatgtgatagcagcctctgcaaacacatgggccccaaacagaaaggaaatatgtcggagcaaaaagagtagcctgaatgcttaaaataaacttaaaatttaagatgagggttggaagtgtaactcagtgcctcagagcatttgcttagtatgctgcatttacccaggagttcaaacccagcaatgaacacacacacacacaattgaggatgaaagtctatggtaaacaaaacttgtagactgggcaagggattttgggaaagagaattataattcagtgacatgttgtgcctactttctaggagaggaatgttagatgtaggaaagagcgagctagtctgttacacactggaaaggtgttaagtgccttagtgttcataagactgttaccatttacttattaaagaggcattctgtatcttgcactacttatcactgaagacacagaaagtcctcacaggggtgatggctatggcaattgataagatacttggaggtcagactaacattaaatgagagcatttaggttagagcaggttgagctcctgttatggattgttctattatttgtgttaattctgttccggaaatcacaagggaagccagatgtctgtgcaccactacatgctctctaatgtaagctgtcttccctaatccactgaaaacatgagtctgacaaaaaaaaagaccagcctccccaaatgacaccgaactcctggcgactgcttttgaactcaaacctgaatattagctttcccagtctccactttgaaaacaaccctgcaagtattgaacttgacagttttcttagtcacggaagctaattctttataaataatcttatatattaaatagatttactattgattcttattctcaggagaactctaatatacagagtaagtactcagagaatattgaatattattatattcttaggccaggttgaaatgaaagtaactcattatcccagtgagaataattgagtatcagaaagattaagtgcctaagaacacacgttaataagtcacagaatgaggactccagctaagcctgattccaaagtgcacatttcttccgctacacgctggttcctaagaactgacagagaagctaaatgtgagacttttctaaaagcatggggagatgaagcatgggactcaaaaattgccaggcacaatcaagataagcataatctaccttcaatgtctttgaaatcttgaatcctaatatctgccactctccagacacaccccacaaaattttgatctgaaatgtatatcttttaaagtgactgagttggtttcattttttttttttaggaataaaaggaataaaaaattacatattcttaaatatatgataattttagtcccataatagtcctacaaataggaaaacttcaccggacatttcttttttggtgaatattgaaacttactgtgatatttactgttatctctacagtgcataagtgagcatgtccctataggacatatgagccaaactcagttaacagcctagcatgcctgcagtacacctgttgacacaagatcacagcataacccagggcaacaaaacccctaggaagtgataagtgacaaaccataggtgacattatcatgtttttaaaataaagtggttatgttcattctaaggtgacactgattatgagattcactattaaaccaacacttccactgtcaaaatgtacatgacatactgtttttagaaattaaaattatataatcatttatataagtacttattacttttggaaccataattaaagttttagcctaagccattttcatactcaagtaaaaattagttttctgaatcactcttgccctttagaatctatgaataggtttatagtgtaaatctgccttcagaaccccttcacctctgggacaggtgtacaatttcaagttaaggtagagtactaaacttggtgaatgtctactgtaattacaatgcctagcatgccagacaagcatccaagtacacattacctgatacttccaaaactggatcataaagtactctttctcaaggaatatcaagcaatcaaagttaaaagtcaacattgttgggtgaaattaatgccaaaagtaaaaaaaaaaaatcacttgaagtcacaggatacaggaaatatgcaacttttatgtgttgataataatttattcctggatctgatggccagaaagaagtttgggaaaaaaatcaattataagacaattcaatttcagaagtatataattgtgtaaaacacagaaaagggaatcaagaaaataatgcttaaaatattatataaatgttttgcttttatttgggactttatatctttttgtttgtggaaaagcaattcttttattgccatacatacatgtttacactagaaatttcatgaagtatttaaattccatgaagacttactgataaaagcactttctaaaagaactatagatactaccatatgaagaaaatctgaaatttgtatatataaagtgacaagtataaaattgaagaaccatctatcaggtgtctctaccacttcctgcaaccttagcaggtggataagaagaaagaccaatagaaaaatcagatgacatgaatgatgagaacaagtactgggtggtaatgctggcatagatgccaaagatggctgtgatgtgcttagagagtgaagggaagtagggttaggaggtgaaaactcaaagtcccagcttggtatcctagagagaaaatggaaagtaggaaagtggggctgagtaaaaggcactgcctagtacttagctaccttattcaggacaggaagcacagctggaatcacactcactgtaactgagctgttactgtgacaatgtttagctactgccacgttttctggcctgctatattgtctgtttttattgttttgttttgttttgttttcaaataatactgaaagtaaactataaggatattgttatttttaggaaagttccatcctgcctcctgtggatgtcataaagacctatgctaagaaacagactgaataaatgggctgaagagatggctcagagaagagatgggcttaagagctgctcttccagaggccctcacctcagttttcagcatcttcagatgtctctccactacctgcaactccagtctattcagcaccctcttctggcttccactggcagaatgtgcacaaacaaacaagctggaaaaactactgtacacataaaataaagtaattctttgttgttgttaaagcaacaagcccttccaagaagactaactgatggcctgtttaatgttgtctataaacaaatgcagtaaaaaattatttcagacccaagaaaaaacattaaagtatatataaagccatgtgaaataattgatcaattctattctaggtgtgtgatgtattgattaaaattttatgtctggatttacaccaatctaaagatacatctgacatcacatctcttagcttggtggctgctaaactgcagtcccctaaaaccacatttcttatatgtgcaattatcaaagacagattaaaaacttcactgagataatgtatgtaatctcttgagtgtacttaataagggctggaagatagaggcaaaactacagaattccgagttgacctatttttgtgtctttattgttaatttactgaagaggaggaggaggaggaagagggggaggaggaggaggaggaggatgttagcccaatgaagacctgttgggttatccaaacctgttttatcgttgagttgatgattttagatgttagcaaaaagaagaattaccttagcatttgttaaaggagatcatagaagttgttctttcccataaatttaattaacaggtacacatgggatctaggacttggcatatttaatatattttccattttatgtgtgtgctatattccacagagaacctatatagatacttagtatttgtcagagtaaagaaaagctatagaaatggctgttgtttgtgaagtagaaggttctaatttcaagaatctcctcatcctgttttaattttgatttataaaatcactgactatgtaaagtagttgatacataataaaatattacaacttacagctgggttccatcttaccacaccactaaccctgaacaagtttccattaagtgcagagccctgacatactgctttactaatgagttgtaaatccactggactgtgtctgatgtcactctgcagaagcagtggtcacaatggtgacaaaaggagagtgaaccacaagagactgcttctgctccccttctgtggcagcaaagcacctggctctcaaggctccgatgacacctgtgccaacaagtcagcagtttcatactccagggaatccatgggccggctgagtaaaggactactaacacattacacatttctaaatgaagttacattttgctaacaacacaggtgaaagatttcattaatttttttaaatattcaataatttttgttttcaagaaagtccatttttaactgtaatattttattatatatcaactactttaaacagtcaatgattttatgaatcaaaattaatgcctagtctaattaaactaagtaatataattacagaacctataaatgaatgtgatagccatcttattacaaagaaaaaaaggttgcgttattaaaaataatacaatgaaactttaggcagaataaacagaatttttaataaattcttatatagagtctaagactgttaactgttagaaacctggtaagtatagaggctcactagtaatgataaataaatgcgcatacacaggcttgcataaataaataattaacacatcactaaaaagtcacatttatatttcaaggttattatcctcaccataatgaactcatcttatagtgcctatctggttcatcaaattctgttgcaaaaatccttggccctgctattgggattgctatctcggactcttaaattcaacaggtctataaactcttaaaagagtgaataattttttaggtctcattgtaattatgtacttgatgcactgaattatgggaatacctaatgtcttactcgatcactgacactgatccatgatggcttttaattgtgtgtgtgtgtgtgagagagagagagagagagaaagagaaagagagagagagacagacagacagacagagacagagacagagagacagagagacagagagagggagagaccaatatttttatgtaaagaaaacagtgactattaaatgtcaggtgtaatggagtagaaaagcaaatgttagttggcaaatctgtctgaactaagtgctaggaatttctctgctaagaagtaattacttggggctggggtgcagtttagtaggagaatgctttaatatagacatgggtctgggtttggtgcctagcactaccaaataaaatattagttctgactaattattatttgttgaaaaacagtattgacaagacaaagaattcattcaaactgtataacccacctcaagccagttgcactttcttttagagactgcagtcttgcataggcatctaacctcacaccaggcctctgcctctaatagaaggaccccacttcatagtatgtatcacctaccattctaccacccaaactgacccatccaagccctcttattttttcctcactctcaccttccacctctaatttaaaaatatgattattttgcttcccaaacatctttcaggcatctttctctatcccttctgtcagtctttaaaaaaaacaaaaaaacaaaaaaacaaaaaaaaaaacgccaacaatcttgaaataatcacatctctgcctgcttaaaatttcccacctttcatttcatgagcagtgcaataaagccctaagaaatatataaggtacccaggggtctagcccttgctagtttccagatctacctcccaagttctgtcacatgctttcaggacagactccagaccttctctgaaccactgctgttctctcacttgttcttgcagttcctatacaacacttctctatcaaaccttgctagacagccatgagtatgggatagggatctctgtggcttgagatcatcagttttaaggtattcattcattcagagggcagcgcctctaccaccttaatgccaagcatggagtacggtggtggtgaaaagggagtgaatgaaattgccctccaaacattgctctgagtcatcatgacctacaggaaatactggggaaatacccctttgacttgggtggggaggacagctaatcttatgatatcaagagaatatcttccaagctaagaagtctaacaatgctaaagacttcaaaaatctccaaaccattcccttaccctagcgcagtggtcctcaacctttctattgctggaactctttaatacagtttctcatgttatggtgaatccaaattataagataatttttgttgctacttcatgagtctaattcttctattgttattcattgtatggtgaagagctgatatgtaggatagcttatatgcaacacatgtgtaagggtcatttaacccttgaaacacacaggttgagaactactgccctagaacaaggagtcataaagtagactgccttctgaagagtttatatgataaacatcacaaggaaaatgtgaaggaatacttactctattaaaaaatgtgtcaacagttgtttcccctcacccattgtatcaaaatgattgtcccattattttgagggtagagtatgtatgtatactgcatatagatgatgtttagcattgtgagacaatttcaacaagaaacaggtattataatcatgtaatcctggagtcatgaaatgatgtgaatactaaacacaaaagtagtttacaatttcaaatagtcattaatgtcaaaagataattaatggcttatactgaaattgacattttgacaagcctcatctgaactactagagtattcttgctaaaagcctaagttctctgacaatcaagtccatgaagaggccactttgtaatgctgattttacaaagaaaaccctacatggtgcatccattccattcttaagagctgaagggaagccattaaaatgtttcccttactgatgatgaaaaatgtatttatgaaatccctctgttagtatctccaaataagtggacctctttcatagttttcgcctcttatactcactgctttgcagacttggctctgaggaaatgcacaagatgcatggtgaagagcaaatcaaaacggcccaaactctgctgactcagatgtgtttttaaagtctcaacaaataatatctcactgcatgctaaatggttaccgcccttcccttatggtttggcaatcctatacttatctatagtgctaccgcagtgaaattacaggttcctatgaaagggcattaacagtaataacatactttatggtgatatttatttgtggacctcttaaacatgttttaacacttaggaattatcacagttaagtcaaacttccataaagaaaacaaaaagccttgatttcccttgtatatcagtgtgcactgagtagtatttcatcgtatatcaaacaaaatgttgaagaagttatttttaagataatagcttcctctgctctgaggaattgactatcaaaatatattgtgtagtaatgtgctataaaaccttaaaataaattttaataattgtgatatcaactaaaataaatttcactgtatagagatatttattatacacatatatatgcacatacacaaaatcatgatttcatcatgtcctgtacaagaggtgctcttagaactgttgattaaactaaacaaaactgacatgaacctaacataaatcccaagttgaaatttctgagctgtgtaacaaccaaacattatcagtgaaaagaaaataaacagaagggagtcctaagttgctggcacagagccagtatcgggcagtgcttgtacactgtccaaacagagggtctctccatcctagatgtggcttcttcccatttctattaaagaaaagccaaatgaaatctggagctgtggccactgtatgacatccatcaactgaagggacagcaattcttggttttctaaataccatatcctcagtatatcaaaagtggccttcagatttggataaccttaagttttgtcaagtataatctctgtaatatggatcacaaacagaatggaaatgttgctacccaatttcttgggactgttcataacccagtcagagaagaacttcacatgaatgaagaaccgagctcaatcccaagctcctaggtgaaaaggcgggcagagtgacacaagattgtaatcccagtgctgagaaggtagagtcagggaaagcccttgggttcactggcaagtctgtctaacataactggtgagattcaggccaatgagagacatgactcaagagatgatagcttatactgcactctatggtcatacaaacatgcatacgcgcacatacacacacacacacacactaacaggtacacgttaggcataatcttttttcttaaatctctatgaaagtgtaaagttcaaacatttctacaaatcaaaggtttttaggaattaattccactaatatgtcaatcataaattctgtataaatatatcaccacttgttttgaaacaacttatttcataaatgttatcattacaccttcaagttaatgcatttattttccatgaaagtaaaaaaaattacttgaaattttcatggtaaaattatcttctgtgttagaccaattccaatgtctttccatttttttacttactgaaaacttaaaaaaataaaaagtacttaaattattattaaacttgttttggtttctcagtaacataatctaaataattaaaatgttaattaatataatccaaaaccaagaccataatagtagacacatagaagtcagcttttaggagtcttttataaccctaagcttgatgggataggttaaattctaaggcactgaaggagatctgatgtaagagcatggctttcatctaagtatctaacaagcccatgctacgtgaggctatctatcccctatgctaacttctcaagcaaatggcatagatacaggctatagtcacaaaagtgcacccagcagaaataaactcactgtcctttacagtgaggatcccagcacttcgaggaatgtaaacatgtaaacaacagtaagggcagctaacatgtcctcaaagcacagcatatattcctcaacagactaacccattacattatgtgtcacactgacagactccaagttgtagcactgaagtcatgcagagacaccaaagggcttgcctactaagcagtagatctgcagcctgagtccaggccatgggaatccagggcccactgccctggtcactaggcggcactgcctagtccagtggagaaaagggttttactctttgaaaattaaagtccagaaggaagtttataatcactgactagtacttagctaaatgtcagttcctataaatagtaggaactaaactcttaaaaacacacctattcttaaagcaactgattatgaaatcatttggagggcagaaatgagtatgttcttaacaaatttcacagccattataatacatttcctttccaaatcagcctaagaacatttgtaaagcacactacaatttattaggtgggttataaaaacgggaaatttttgaaacactttgataagtgaaaaattttgaagtttcttactacttagtgggaaaaccacacaagagatattcattctcctgaaaacttgcctttacagacacattgacatttaggttcctcaataggctttcataaaagcctcacatgtatgtcaagtgacattctgattttgtaagtaataagaaaatagatccagaccgataagctagatttatagatgaagtaacaaaaggcaccacaaatattcattctaaagaagaaagcccttccttctctcccaaccaccggggggagctctcctgcagaagcacttgtctttcctcagccttgagctctagaccggctgaaaaaggaacatcaggaagactaaggctgagccttgccccctacccacagcatagggcaggttgagaacatattcgacacttatgatacttcagtgtgctgactcattggtgtgtgtgtgggggggggggggtgagtcagctgaggacccatgagcgctgctcttttcattcattcacactacaggatcagagcagacgaagctccacggagcacttcaaatacaaagcgcttaattcttgcctaggtcttccaacttaaattctaatttaaaaatcctattagattgagggtttggttttttgacaatgtaggataagagaacaatgtcctaattgtcaattgaatatagcttcagtggctaaaactctagtttcatatccccatggtaactcacttttttaatgcattgcttatattatttctttttaaagttagatattttaactgacttgctcatttttaaaaagaataatgtaactgtgatgagcatgttagacttactcaatattacaacggcaaaaagtaaatacaatataattcctggacttttaaaaaaattcagtcaacaaatgttttcagagcacctattacacaggcactgcacttgcggtcagcttttcttggagaaaataacagaccaatcttaggaatgttctattaagtacacttatgaagtataacttttttcaggaaattaaaaaaatatatatctattgctccgtagcatatttggctgttgcaagtctgattcacagttgcaagtatattttgttctctattcaatcagcttcattttattgtacaaaaatgcttatttcctttaaagcactgaatgacaacacaccttttaaaacaaaacaaacacaacaaaaatctcttcctgttttcccaaagtctgcccatattcattcccttctcctgcataggcacatgtgtccgtgcaaagatccgctgagtaccctctcacctgaagaagagtttggagataaagctggctttctccaaaggcgacttctgcatgatgtctccgtgaggcaatgaggtctgtgttcggctaaattcaggttggactcgacatctggatatccaggaccaggtcaatgcttttggctcgtcccttttactcagacctgaggtgatgtcatttgcttccaattccccccacccactcgggtcccacacacctccccttcctcagccttcttccccacgcctccgccgcccaggttaaagccagcgctgcctagcccagcctcacagtcgctgctctccacgccccgcgcccgcgcccgccccgcgcgctccttgcgctccttcctccagcgcgccccgcgcccgcccgcccgcccgccggcgccaccttttccctggccctcggccttagcgcccgccctccagatccccccgcgtgcctaccttcaggcagccacagcaacaccggctcagactgcgggcccgaccctgggcccgggtaaaccgtggccaatctgcgggacttagaacccttttttcgtggaaataaagaccactcactgatctccttggcttcctggaacctttctcttccttctccctttccctctccctcgtcctctcccccttcctcttctcctctttctcctttatctctttctcccccgtctgttcctctctcttttcttcccattcctcccctgccttcatctctttcctcttcatctcttcctcttcctcctccaccttcatctctttctccttcatttcgctctcctctttcctctctttcttcctcttttcttccccttcctctttccctttcactcctctctcctcgtttttcttctctttcactccctctttctcctgtctccttagctcctggcttagttacagataacttttcaagatccattttgaaaaggagatgaaaatgtggctcttttgtatcaaagaacactcaggaagcagcaagttccacagtactctgaggtgtccacctcagtaagcccttcaagagctggacaagacctaagctctgttgactgaaggctctagagtagccatagtggcacaaatacctatgaggtatatgtgtgtcatacacatatgtcacaattccctgatatgtcataattacagcaaaggtcctaccaaggaaagggaagctactactttcccttatgaggtacatgtgtgtcgtacatatatgtcacaatgccctgctgtgtcataattacagccaaagtcctcaaggacaaagagagcaaagagggccctttacctccgggccctgctcagtgtgcagtgtggtatttcatgtgtgtgtgctaaaaaacaacaggtggacagtctaaactaaatgaccctcctttcctttccctagtctgctaagcaaaatatcttgactgagacactaaaagggcctctgagtcactgaagcaaaagtgtcctagtcactcaagctcacagagagaaaaacctgagtctttagctccctggaggctttggaagtttcccaagctgtgcaccttccttccaaggtttttggtgtgagaaatgtgtgtccaacacaaaaccctgctgggttgtaaagagtcaacacttaaatatctaaaccctgttttgccaaagcaagttaaaatagagttgaattttttttttctttattgaaaattgaacgttctttctatcccggcagtggtgacgcacattttcaatcccagaactcaacactcaggagtcataggcaagcagatctctgagttcgaggccagtctggtctacagagcaaattccaggacaaccatggcaacacaaagaaactacgtcttgaaaaaccaaaatctgtcgccatcttggttccgggactcagcagaacttaggaaattagtctgaacaggttagagggtgcgccagagaacctgacagcttctgggacgggcagaagcacagagccgctgaggcagcagcctgggcgggccgcagacaaccggccaccatccggaccagaggacaggtgtccgcctggcttgggaggcgacctcagcctcagcagcagcggtcgccatctgggttccgggactccgcgggacctaggaaattagtctgaacaggttagagggtgcaccagagaaccggacagcttctgggacgggcggaagcacagagccgctgaggcagcagccggggcgggccgcagataaccggccaccatccggaccagaggacaggtgtccgcctggcttgggaggcgacctcagcctcagcagcagcggtcgccatcttggttccgggactcagcagaatttaggaaattagtctgaacaggttagagggtgtgccagagaaccggacagcttctggaacgggcagaagcacagagccgctgaggcagcagcctgggcgggccgcagataaccggccaccatccggaccagaggacaggtgtccgcctggctcgggagacggcctcggcctcaggagcagcggtcaccatcttggttccaggactccctggaacttaggattttagtctgcacaggtgagagtctgcaccacagaagctgacagcttctgggaactgccaaagcaacacagtgtctgagaaaggtcctgttttgggccttcttcttcggccaggaggaggtccaaatacaagatatctgcgcaccttccctataagagagcttgccagcagagagtgctctgagcactgaaactcagaggagagaatctgtctcccaggtctgctgagagacggtaacagaatcaccagaagaacaatctctaaacagagtcaactataactactaactccagagattaccagatggcgaaaggtaaacggaggaatcctactaacaggaaccaagaccactcaccatcatcagaacccagtactcccacttcgcccagtccagggcaccccaacacacccgaaaacctagacctagatttaaaagcatatctcatgatgatggtagaggacatcaagaaggactttaataaatcacttaaagaaatacaggagaacactgctaaagagttacaagtccttaaagaaaaacaggaaaacacaatcaaacaggtagaagtccttacagaaaaagaggaaaaaacatacaaacaggtgatggaaatgaacaaaaccatactagacctaaaaagggaagtagaaacaataaagaaaactcaaagtgaggcaacactggagatagaaaccctaggaaagaaatctggaaccatagatttgagcatcagcaacagaatacaagagatggaagagagaatctcaggtgcagaagattccatagagaacatcggcacaacaatcaaagaaaatggaaaatgcaaaaagatcctaactcaaaatatccaggaaatccaggacacaatgagaagaccaaacctacggataataggagtggatgagaatgaagattttcaacttaaagggccagcaaacatcttcaacaaaattattgaagaaaacttcccaaatataaagaaagagatacctatgaacatacaagaagcctacagaactccaaatagactggaccagaaaagaaattcctcccgacacataataatcagaacaacaaatgcactaaataaagatagaatactaaaagcggtaagggaaaaaggtcaagtaacatacaaaggcaagcctatcagaattacaccagatttttcaccagagactatgaaagccagaagagcctggacagatgttatacagacactaaaagaacacaaattccagcccaggctactataccctgccaaactctcaattaccatagatggagaaaccaaagtattccacgacaaaaccaaattctcacattatctctccacgaatccagcccttcaaagggtaataacagaaaaaaaccaatacaagaacgggaacaatgccctagaaaaaacaagaaggtaatccctcaacaaacctaaaagaagacagccacaagaacagaatgccaactttaacaacaaaaataacaggaagcaacaattacttttccttaatatctcttaacatcaatggtctcaactccccaataaaaagacatagactaacaaactggctacacaaacaagacccaacattttgctgtttacaggagacacatctcagagaaaaagatagacactacctcagaataaaaggctggaaaacaattttccaagcaaatggtatgaagaaacaagctggagtagccatcctaatatctgataagattgacttccaacccaaagtcatcaaaaaagacaaggaggggcactttgttctcatcaaaggtaaaatcctccaagaggaactctcaattctgaatatctatgcgccaaatacaagggcagccacattcattaaagaaactttagtaaagctcaaagcacacattgcacctcacacaataatagtgggagacttcaacacaccactttcaccaatggacagatcatggaaacagaaactaaacagggacacactgaaactaacagaagtgatgaaacaaatggatctgacagatatctacagaacattttatcctaaaaccaaaggatataccttcttctcagcacctcatggtaccttctccaaaattgaccacataataggccacaaaacaggcctcaacagattcaaaaatattgaaattgtcccatgtatcctatcagatcaccatgcactaaggctgatcttcaataacaaaaaaaataacagaaagccaacactcacgtggaaactgaacaacactcttctcaatgataccttggtcaaggaaggaataaagaaagaaattaaagactttttagagtttaatgaaaatgaagccacaacgtacccaaacctttgggacacaatgaaagcatttctaagagggaaactcatagctctgagtgcctccatgaagaaacgggagagagcacatactagcagcttgacaacacatctaaaagctctagaaaaaaaggaagcaaattcacccaagaggagtagacggcaggaaataatcaaactcaggggtgaaatcaaccaagtggaaacaagaagaactattcaaagaattaaccaaacgaggagttggttctttgagaaaatcaacaagatagataaacccttagctagactcactagagggcacagagacaaaatcctaattaacaaaatcagaactgaaaagggagacataacaacagatcctgaagaaatccaaaacaccatcagatccttctacaaaaggctatactcaacaaaactggaaaacctggacgaaatggacaaatttctggacagataccaggtaccaaagttgaatcaggatcaagttgaccttctaaacagtcccatatcccctaaagaaatagaagcagttataaatagtctcccagccaaaaaaagcccaggaccagacgggtttagtgcagagttctatcagaccttcaaagaagatctaattccagttctgcacaaactttttcacaagatagaagtagaaagtactctacccaactcattttatgaagccactattactctgatacctaaaccacagaaagatccaacaaagatagagaacttcagaccaatttctcttatgaatatcgatgcaaaaatcctcaataaaattctcgctaaccgaatccaagatcacattaaagcaatcatccatcctgaccaagtaggttttattccaggaatgcagggatggtttaatatacgaaaatccatcaatgtaatccactatataaacaaactcaaagacaaaaaccacatgatcatctcgttggatgcagaaaaagcatttgacaagatccaacacccattcatgataaaagttctggaaagatcaggaattcaaggcccatacctaaacatgataaaagcaatctacagcaaaccagtagccaacatcaaagtaaatggagagaagctggaagcaatcccactaaaatcagggactagacaaggctgcccactttctccctaccttttcaacatagtacttgaagtattagccagagcaattcgacaacaaaaggagatcaaggggatacaaattggaaaagaggaagtcaaaatatcactttttgcagatgatatgatagtatatataagtgaccctaaaaattccaccagagaactcctaaacctgataaacagcttcggtgaagtagctggatataaaattaactcaaacaagtcaatggcctttctctacacaaagaataaacaggctgagaaagaaattagggaaacaacacccttctcaatagtcacaaataatataaaatatctcggcgtgactctaactaaggaagtgaaagatctgtatgataaaaacttcaagtctctgaagaaagaaattaaagaagatctcagaagatggaaagatctcccatgctcatggattggcaggatcaatattgtaaaaatggctatcttgccaaaagcaatctacagattcaatgcaatccccatcaaaattccaactcaattcttcaatgaattagaaggagcaatttgcaaattcatctggaataacaaaaaacctaggatagcaaaaactcttctcaaggataaaagaacctctggtggaatcaccatgccggacctaaagctttactacagagcaattgtggtaaaaactgcatggtactggtatagagacagacaagtagaccaatggaatagaattgaagacccagaaatgaacccacacacctatggtcacttgatcttcgacaagggagctaaaaccatccagtggaagaaagacagcattttcaacaaatggtgctggcacaactggttgttatcatgtagaagaatgcgaatcgatccatacttatctccttgtactaaggtcaaatctaaatggatcaaagaacttcacataaaaccagagacactgaaacttatagaggagaaagtggggaaaagccttgaagatatgggcacaggggaaaaattcctgaacagaacagcaatggcttgtgctgtaagatcgagaattgacaaatgggacctaatgaaactccaaagtttctgcaaggcaaaagacaccgtcaataagacaaagagaccaccaacagattgggaaaggatctttacctatcctaaatcagataggggactaatatccaacatatataaagaactcaagaaggtggacttcagaaaatcaaacaaccccattaaaaaatggggctcagaactgaacaaagaattctcacctgaggaatacagaatggcagagaagcacctgaaaaaatgttcaacatccttaatcatcagggaaatgcaaatcaaaacaaccctaagattccacctcacaccagtcagaatgtctaagatcaaaaattcaggtgacagcagatgctggcgtggatgtggagaaagaggaacactcctccattgttggtgggattgcaggcttgtacaaccactctggaaatccgtctggcggttcctcagaaaattggacatagtactaccggaggatccagcaatacctctcttgggcatatatccagaagatgccccaactggtaagaaggacacatgctccactatgttcatagcagcattatttataatagccagaagctggaaagaacccagatgcccctcaacagaggaatggatacagaaaatgtggtacatctacacaatggagtactactcaactattaaaaagaatgaatttatgaaattcctagccaaatggatggacctggagggcatcatcctgagtgaggtaacacattcacaaaggaactcacacaatatgtactcactgataagtggatattagcccaaaacctaggatacccaagatataagatacaatttcctaaacacatgaaactcaagaaaaatgaagactgaagtgtagacactatgcccctccttagaagtgggaacaaaacacccttggaaggagttacagagacaaagtttggagctgagattaaagggtggaccatgtagagactgccttatccagggatccaccccataatcagcatccaaacgctgacaccattgcatacactagcaagattttatcgaaaggacccagatgtagctgtctcttgtgagactatgccggggcctagcaaacacagaagtggatgcccacagtcagctaatggacggatcacagggctcccaatggaggagctagagaaagtacccaaggagctaaagggatctgcaaccctataggtggatcaacattatgaactaaccagtaccccggagctcttgactctagctgcatatgtatcaaaagatgacctagtcggccatcactggaaagagaggcccattggacacacaaactttatatgccccagaacaggggaacgccagggccaaaaagggggagtgggcgggtaggggagtgggggtgggtgggtatgggggggacttttggtatagcattggaaatgtaaataagctaaatacctaataaaaaatggaaagaaaaaaaaaaaaaaaaaaaaaaaaaaaaaaaaaaaaaaaaaaaaaaaaaaaaaaaaaaaaaaaaaaaagaaaaaccaaaatcaaacaaacacataaagaaagcattttttttcatataatatatcctgattactatttaccctccctccattcctcttagttccttcccatctccagtgtcatctggatcgctccctttctatccatcattaggaaacaaacaggcttctaaaggataataataaaataaaataaaataaaagttaaaaacacattagacttggacaaaacaatcagaaaggagcccataagaaacagagcccaatggaggagctagagacaatacccaaggagctaaagggatctgcaaccctataggtggaacaacaatatgaactaaccagtaccccggagctcttgactctagctgcatatgtatcaaaagatggcctagtcggccatcactggaaagagaggcccattggacttgcaaactttatatgccccagtacaggggaacgccagggccaaaaagtgggagggggggaggggatgggagggaggggatgggggacttttgggatagcattggaaatgtaaatgaggaaaatacctaattaaaaaagagagagagagagagagagagagagagagagagagagagagagagaaaagaaacagagcccataagaaacaggggcataagaaagagagtgacttgttcgaacactcagtaatcccacaaataatgctaaactggaaactataatatacacacaaaggatctggtgtcataacggctccatgcatgcttcctcagtgtctacattcatatgggctatgaccatgttgatttagagggccttgtcttcatgattttctccatcttctctggtttagactctttctgcctcttctgaagggttccctgacccccgaaggcagggatttgatagatcccatttagggctgactgtttgatagatttgatagagatatcccatttagggctgactgttccaaaattagagtttgaaagttttgaggcctgattcttgccagaccgtagcatttgaaatgtaaatgaagaaaatatctaatacaaaattgaaaaaccaaaacaaacaaaaaaaagcaagggtatttacttgtgaattatctaatttttgacttgtgggcatcaaattatgacacaagtaaaatatatagttcataatacttctaagataagaaaataaatttaaattaatgaatcttgtggccaagaggctttatagctctagttcctgtatctacaccagctttttccttaccttgaaatagctgtaaagacatttaatttttagtagccaaatttgatttaaaaagaaaaaataacacaaagatgaagttgttacagatagacactacaggaaagtttctatgtcttctgacttatcattttcaagtactctccttgtgtgtttttctctctccagtatgacaagattgaaacttggttctcacggttgacttttcacatccctgtgactgaacttgatttatcctttccccaccctcacctttgtttgtaaatgctagtgtgacccatcacatatgatacacagattctgaaacaaatttgttatcagttcttccttgttttcaccatcacgtgacactaactgaagaattaagtttcagagcccatcaaactggccaagctgcacgactgcaggggatctcacgctgcttcctctagcaaggacagtgaaaagtccttgcagtttccaggaaccattcactcaataactgtgcctatactactatgcctattatgccatttctaggtaatgaagcattgaagtacatgttcacattagtggattcaaactcagatgtggtcccaaaccttcagccccatcagtgtgaaagattacttctaatcaaatctcccaccatgcattcctattctctcacaacccctttctcctcgtattagtctcatgaagtcaaaacttacacagctgttcaataagatggaaaagcagaaacctacagaccaagaagccacaagggttatatatctttgataaatgttctgtaagcagtataatccgttctaagagtatatatccaccctagatttttatcgtaaaacatcacagtccaaacttgtttggacagatttcagcaaattagacaagtccaagtgaaataattaagaaatgatatacagaatttatatctatatacatgcctgatacaaatgtgaaaatatatcaggaaatacattcagatataggtaagattctgactgaagctctaaatgagaacctcaaaagaaaccaacagattaggataaacaaaaagggtgattccaagatatgctgatttttctctttaagatattcaaataccagtcatatcatcatataatattataataacttccattcattagatatttaccatatgtcttgagtaaattacagtgtagtttgcctcttttaatccttatgacatgctcatgtaaagctaactaatatcacatactgcagaggaagaacttgagaaataatggtttattaattttcaaattaagttgcttggcagattggtaataacacaggtggcttgggatgcttttcagggcagagcattgagtagcttgtcccacactctcagtcctagccacagtgtgatcagtcagtaataatgaaagagcagaatgcaatgtggagctaagcagcctttgtctgccctagcacttaatagttgcacattcatctgcagggttgactggtattttagggagagctgttctttagtatagatgagtaatattcactctcatgtcatacttttgaaagtatactgagaggactgaaagagaaaaagaggaaggaatgaagtgggaaaggttgatgaaaagaaagaaaggaggacaaaagtagcccatgtctacttggcacctcttaaaatgtgccagcagtgtgccaggtgctttccacaaatgacctaagcttcctgtcacatgcttcttgacctgctagaaagtggctcaggtgctccccattagagatcagaagagtgtacttatactacatctcactctgatccatcacgttcaacttaatttgagtgtatcagaatctttcctgaaggatctttatcataaatgggtagcaatcgtggatatactgaaatctaggcaagtagaaggatgaaaaagtttcttcataggaagacaaaattcctaaagagagaaagcagacctcattagtttcacatggacaggatggctatgcttaaaaacttattaaaagtaggaggtaggggcagtcacagcttttccataccttgccccggggatccctcagtgcaaatacatatcccagtcttacgaagctgttttaaggcaagaggggccttgttacatagtcagatcagttgggcatgttttctgatgccaacagtacagctagtctgacaaatctgtttataaacactcatgaaaacacacacacacacacacacatttggtattcatatagaacttccacagaaatggagacagaaataatgtcttctggggtgttcatttgattgtttgtttttaactcattttaagtaatgcagcaagaacaactaagcaatcattctgtgttgtagttactgatccagtagatga

SEQ ID NO: 815179 - DNA, 46 bp, Homo sapiens
tttttgtgcagacatccattttcctttcttttgggcatatacctac

SEQ ID NO: 815180 - DNA, 72 bp, Homo sapiens
tagagatatcgagaacccagggcaggtgcctactgaagaagttccagaccaaggaagtataaagaaggacct

SEQ ID NO: 815181 - DNA, 47 bp, Homo sapiens
gaaatagagagagagagagagagaaagaaagaagaagaaacagatct

SEQ ID NO: 815182 - DNA, 60 bp, Homo sapiens
tggatttgttacaaaaaaatctgagtgtttctagcggacacagatatttgtctaggaggg

SEQ ID NO: 815183 - DNA, 46 bp, Homo sapiens
agcatgcacaacatatttcacatagttttctgatttcagtttgttt

SEQ ID NO: 815184 - DNA, 68 bp, Homo sapiens
tgtgggggcatgaggatgtggagagggtattccaggatgccagacagggagattatggatgagtacta

SEQ ID NO: 815185 - DNA, 42 bp, Homo sapiens
gagaatgatttaaaaagtagttggaagaattctagggatgga

SEQ ID NO: 815186 - DNA, 4046 bp, Homo sapiens
gtgatggtatctgaacaagctaggtgaacaaagagcctcaataagggattttgaggtctagaaaaagagaggaaataccaaataaatggaataattataaaataaataccagcaaagttaaatcaatatatcatgtgggagatatccttatatcactcatgtgatttctattttgttcctatattaggccaaggagaggtggaacttgttttcctttttccctctcagctacgaatggacatacttaaaactgtttctctgcttctgttctctaaaatgtgattgtctaacagtaaccgtgatgacgttttgacagttgcacaagtttctttctttaagctttaaaaatgccagccagtaacccagtggcatttctactataaaatcttaaggccaatccatttccccttttccttattttcttggtttcaaatatatttttattgccaatggaaataaaaatcctaaattagagagcaatggcatcccttgtcttgtgaataaagagctcctaaatgtgaacttatacaggatgcagcaatttatagggtagttaatcattcttctttctagccagttgttccagctacagttttgtggctcttgttagtggcttcattcccagatagaataaaaatcaaaccaaaatcctggaaaggcactctgaggatgcttctctaaagtagatgggcatcaactataaatcacaatgctttgtttcctctgttatgtttcaagatgggtgggattttttttgtagcattacttattattgcctctcaagtgcttgagtctttgaaatccaagtcatgtgagtgaattagatacagctgttagaagtggcctttcaatgccaatggtacacattccttggtttctttacgatactattgctcttacaacttttatctgaagtcataaattcatagttgtcccagaagttaagttccttgcttctagaggacagaaaacaaacaatttacacaactcatggtgcatgtcaccagtccttagatctcatgaaatatgcatgaaatcttaaatcacttgctgtagccacccagccattgacatatttgaaagactttagtgtatcaaagtcactataatgaaaattttgatttcaccagttctaggagtgaaaaatcaaatgtttagtaaaactttctaaaattaacactgacagttgatttctgtatactgttgttcttaataatagctttattgagatataattcatattcaaaacaacttacccatttaaagcatacaatccaatgattttttagtatcttcaaagagttgcctatcaccataaccaattttagaacactttcatcactgtaaaaagaaactccattcctattagcagtcattccttattccaaatccccctgctcgccctagacaactacaaatgtactttccatctctatagatttgcctgttctggaaattttatgtaaatagaacaaagtgttcttttgtgactggcttatttcacttagcattttttttcaaagattcatccctgttgtagcgtgtatcagtgcatcattcttttttatttttttagagacagggccttgctctgttgcccaggttggaatgtgcagtggcatgatcatgggtcactatagctttgaagtcataggcgaaagcggtcctcccacctcagtctcccgagtagctgagactacaggcttgcaccacatgactgtctaatttataattttctttagagacagggtcttgttatgttgtctaggctgctctcaaactccagggctcaagtggtcctcctcccacagcatcctaaagtgctgggattataggtgtgagccacagcacctggcttgcatcattctttttattgttgaataatatcccacttgtaagaatatgtattttatttatcctttccccagttaatagatatttcgattgttcctaattcttgtctattataaataatggtgctatgaacatttgtgtacaagtttttgtgcagacatccattttcctttcttttgggcatatacctacgagtgtaatggatgggccatatagtaactttatgtttaatattttgaggatttttcaaactgttttccaaagtggctgcatcattttaaattccttccaccattgtgtgagtgtttcaatttctccacatatttgcaacacttactattatctactcttaaaaattacagccatcctactgggcatgaagtggtatttcattgtgagttttttttttctttttctttttttctttttttgctaatgtttgtggattttcttttcattttcttgatggtgtcctttgaagcacaaaagtatttaattttgataatttccaatttattttttgttattgctgtttgtgcttctggtgttgtatctaagtgtatgctactttaaaaaattagttgtaatatggcaaattggatacatgtgtaggctttggtgtcacaatcctaattttaaaattctgactctgcccttgacaaattaactaattaagcttccttagcctcagtttctcaactgtaagttggagatattaccaagacctacctcttgaattgttgtggggatcagatgaaataatgtatgtgaaatatttagaattatgcaagtctgtggtaatgaatactaatgttagctatcattattgttataatcccaataataaattctggtgctttgaaaattaaaccaaagccaagcagttgatatgaagaagcatgtaataatgtacagacataatgctttatagacaacattgaatttggctctcatgaacatcaggaatagtggtcatggtagttattatctccagcaggaactgtagctgagagatcttcagagctttttccaaggcgatatcactgggaaataatagagacaaggttacaagctagggctgtgttttcttcttaaaatctttagttcagtttttttcaataacagatttgtagtaggcatcaggtgactggggattcgtattcttcaagttgaaatattaccttgttgagaaagaaaccatgtgtgagacaaccatgttgagaaagaaaaagtgattttatagaaaattaatattgatagtgagcattatatgaaaatcatgaagttagaacatatttggccagaaaatttacattaatagttacccatagcaattaatgcattataattacacataccttttctttaatgaaaaagaattctttccttccaaagttatgcatgctattgttaaacattagagaatatagagaagcaaaaaagaaaatatcttttttgatattttcttaacatacgtctgttcctaataatgtttatagtttagaagcattgcatgaaatgggtagatcaattttctatttaatgtttggattcattaggtacgaagttagcaaattaatttccattagggtgcctgtatggttgtaaatcctggacctgcagaagatttttcagtattggtttgtagtcttttgtttagcagcaaataattagttctccagagcttctgaaattaattgaccactttaatggtgtttacctacctagagaaagaaaaagaacttctccaagtcccttggtaaaattaagcctcatgaacaattaactcaaatatacacaaggcttgtctttagcgagcatatactccctaaagttgattaagctgaccaagtgattactgcttataaattcaccattttatggagaagaagcaaacactgctaaataccttgtggaatcagaggaggggaaattagtaacttgaccccaatactgcgattttaaattgaattcttgaagcctacaagttttacacaggactttagagagctggatagtatcactttgtcaagtcctacttttactatgattctttgagaaaaatacatctgactaaataactctgaatctaaattggataaaataaatgtgacattcaaaatgttatttatgattttagaaaaatatccttatagacactagatgagttttagtctcaaatcaatcctccc

SEQ ID NO: 815187 - DNA, 4072 bp, Homo sapiens
gctcacaaattgtgttactttgaactgaactggccatttatgggaaaggtcactgggttgtaaataaggaccaaaagagttacgtttatattttttaaaagagattgaggagatttatttttacatttcttgaaaatgccttattttggtatggtattgacagatagtgaaattctgctcatttgtaaatatagtgtcatattttaataatttcaaacatattgaaaatgcagaatttattaatagtgggagcacattttcctttttactaaatgttctacaggttcttttctttccatccacacacagtgccattaccctcattctaagcctttcaaacatctggcagtaagtgatctgctgcacttagctctttccagctgagctgatttttaaattttcagaaaatttgtgagctaattgttaaacatggccattattaaaaattaaattatttcaacttataattaaataaattatattaaaacaaaagtattaaaaactcaaaagttggctgggcgcactggctcacgtctgtaatcccagcactttgggagaccgaggcaggtggattgcctgaagtcaggggttcgagaccaacctgaccaacatggagaaaccctgtctctactaaaaatataaaaaaatagccgggcatggtggtgcatgcctgtaatcccagctactcaggaggctgaggcaggagaattgcttgaacccaggaggtggaggttgtggtgagctgagattgcgccattgcgctccagcctgggcaacaagagtgaaactctgtctcaaaaaaaaaaaaaaaaaaaaaaaagaaacaaaaaaaaaaaaaaaacaaaaagcaaacaaacaaaaaaacaaaaattatcacttcctaattattttgcattttactattatctatgctattaacgttatttgccttcattgtatttgaaaggtggactatattctattgcactttcattgtactatattctaatatgcaactgtgtatcccttcccaactctgtgttcaatgactttatatttggttgctttaaaatgatgacgatgagagtatttatatcatagaaattggcaaatgccgtaagtcagtttttgtttttgtttttgttttccggagaggggattgttaaatatttgcctgcatgcaacaccactacatgcagtctgctatcttttgttcttcctgctttcaggctcctctcccagctgtctgtctagcacaacccagcataccaaattttcttaaatagggaaagttgaacatggtaaaagaatgaatgaagtcaaaagaatgtggaaagacctaggctttgccatttagtaaagtttagcatctctaagcctccatctctttatcaataaaattgagcaatgatcccttttagttctacccatttaagaagattttcaaatgaaaaccacaacctgctcatgtttatgaaggcactttggaaagcgctaaatacacgggtttttattagtagtaaacacttacttcacctttttcacttcttgactttagtttacaagggctcataatctaaattatatcataaattgctgtcccagatttttttacagcctaattgccacctgtatgttcgactttccttctgttctttatgttagatactgggatagtatgcaccaggtgggtgtgccatcactttctcagatgatgtccactgaagaccttgcatgatcatggcattcattttcctgctgtattcagactggcctcaactattttctttattgctctccaggaaaaattacaaatgaatcagactgggcaatgaagggtaaacctaattatcgctctttgttaaagacagctcttgttaaaatgcggatattgcaaattaatggaaaaaatatgacatagtaaaccatactcacttattaatatcttagtaaggaataattgatgaagttacttaaccttagagccctaattcagttaagttttaatgaaggacaagttgtagagatatcgagaacccagggcaggtgcctactgaagaagttccagaccaaggaagtataaagaaggacctgggtgggagcagtgagattggatatgagggccactggcaaagttttgccccagaacagtgtcaaaatgtttgcatttggcatagccctttctctttttgttctgaatggctttgctagaatatcttttctataatgaatttatcctgcttctcagatattgctaaagcactcccttttgaattttggtgctttaacatgcattttgatacattaccaaataaggtctgaatgacacaaattttagaactctccagagaaaagaaagatgctgagggaaaaagcataggtttgggactcactaaatcccagttcaattcctttctttaataaatatattcaattttacctgagaaagctctcgtgctctcgaattttatttagaaatttctctttgtacatgattgatttcacaatccttcttctgcctcctcttctactttcttctttctagattttcctatctttatgaagattattctgccttatcctcaacagttagaaacaatatttttgaaaatcactacggtatcctgcatagtgatttcccatgccaactttactaatttccattataaattattatttattgatgcctagagggcagatgagtgtagctgctatggagtgaggagacaaaacataagaaagttatgatcctaccctcaggtaatgattcagacatgataattaagtcaacaaattgatagaaactaatcactaactctctggctatagtcattctttcaatgaatagctcattactgagtatgcatgctacagtaacaaaattatataaggctgttgattaaatgttgattaagtgcatgtcttattcagagtttttttatatttgaaatggaagaggctggacttcagtaatttgctataaactgctagtatatgattatttgggggcagttattttttaaagaataatttaaatatggaatgtttagcagtttgttttttccctgggaaaaaccatactattattccctcccaatccctttgacaaagtgacagtcacattagttcagagatattgatgttttatacaggtgtagcctgtaagagatgaagcctggtatttatagaaattgacttattttattctcatatttacatgtgcataattttccatatgccagaaaagttgaatagtatcagattccaaatctgtatggagaccaaatcaagtgaatatctgttcctcctctctttattttagctggaccagaccaattttgaggaaaggatacagacagcgcctggaattgtcagacatataccaaatcccttctgttgattctgctgacaatctatctgaaaaattggaaaggtatgttcatgtacattgtttagttgaagagagaaattcatattattaattatttagagaagagaaagcaaacatattataagtttaattcttatatttaaaaataggagccaagtatggtggctaatgcctgtaatcccaactatttgggaggccaagatgagaggattgcttgagaccaggagtttgataccagcctgggcaacatagcaagatgttatctctacacaaaataaaaaagttagctgggaatggtagtgcatgcttgtattcccagctactcaggaggctgaagcaggagggttacttgagcccaggagtttgaggttgcagtgagctatgattgtgccactgcactccagcttgggtgacacagcaaaaccctctctctctaaaaaaaaaaaaaaaaaggaacatctcattttcacactgaaatgttgactgaaatcattaaacaataaaatcataaaagaaaaataatcagtttcctaagaaatgattttttttcctgaaaaatacacatttggtttcagagaatttgtcttattagagaccatgagatggattttgtgaaaactaaagtaacaccattatgaagtaaatcgtgtatatttgctttcaaaacctttatatttgaatacaaatgtactccctgggaag

SEQ ID NO: 815188 - DNA, 4047 bp, Homo sapiens
agcactgaagcctcacatatgtattaaaaaaataatttccatttgcatttcagactagaagattgaacgtatagtgtaatgtgattgcaaataattatattgaaatgagacagagaggatgtagtatctactgtcataatttttcaaaacccacctgcaacttgaattaaaagaaccacttgggtttttttttttgtttcaaacgcaaatcctggaaacctactgagactcattcagtcagtatctctaagaggcaagcttgagactgtatatttaaaaagcatctcaggtgatttttacacatgctaaggcttaagaaccacttctctgtagcttatatgttattttcaatgttcctcaaagccaagttagaatttccaaagtgttaagaatccattagacaatcacagaattgtctttttcctttataaatcttgcaatgttgttctcatttccatacttaattacttaaaacaccaaccaaccaacaagcaaaaaatgattagtctaactaatattacaagttaataatgaagtaaaggtttaaaaataatgtcataataatgttaataacaaattattaattataatttaaaaataatatttataatttaaaaataatatttacaagtactacaagcaaaacactggtactttcattgttatcttttcatataaggtaactgaggcccagagagattaaataacatgcccaaggtcacacaggtcatatgatgtggagccaggttaaaaatataggcagaaagactctagagaccatgctcagatcttccattccaagatccctgatatttgaaaaataaaataacatcctgaattttattgttattgttttttatagaacagaactgaaactgactcggaaggcagcctatgtgagatacttcaatagctcagccttcttcttctcagggttctttgtggtgtttttatctgtgcttccctatgcactaatcaaaggaatcatcctccggaaaatattcaccaccatctcattctgcattgttctgcgcatggcggtcactcggcaatttccctgggctgtacaaacatggtatgactctcttggagcaataaacaaaatacaggtaatgtaccataatgctgcattatatactatgatttaaataatcagtcaatagatcagttctaatgaactttgcaaaaatgtgcgaaaagatagaaaaagaaatttccttcactaggaagttataaaagttgccagctaatactaggaatgttcaccttaaacttttcctagcatttctctggacagtatgatggatgagagtggcattttatgccaaattaccttaaaatcccaataatactgatgtagctagcagctttgagaaattctaaagttttcaagtgataagactcaatttatacaaagctaattggataaacttgtatatgattaagaagcaaataaatacttattatgcttttttgctgtttatttaaatatttaacccagaaaataagtcactgtgacagaaataaaaatgagagagaagggtgagccactcttaggtagttctggcattatttaatctaggccagaggttgcaaatggtgtcccatagaactaattttggctcctagacctgtcttatttaacctttcatttaaaaaatttgtattggttgccagcaattaaaaattgggagatgtctcacacacacacacacataaacacacacactcatgtgtgcagcctcttttgaagaattggaataactagtcaactgcgtcctccttttccacaagctgtgacagctccctgctcacagagcacctgccctctcctgttcatcatgctctcttctcagtcccattccttcattatatcacctatttggtcctgagactaagtgagtttgagatctgtgatttagacaaagtggtgaatctagctctgaatcatagtaagtagctctgggaatcatcttgtcttctgttagcccattgagagagaaatagagagagagagagagagaaagaaagaagaagaaacagatctggggagagtcactgaatgggagcatagagacagagaaacagatctagaaaaccaaactgggagaaaatgagagaaaccaaaagagaggtagagaggagcagagaagaaaatgaagaagcaaggcaaggaccaggctttttcattatttcttatggccaagacttcagtatgcgtggacttaattcttccttatgctcctaccttccctagggaaactgatttggagtctctaatagagcccttcttttagaatcacagtttgatgccttaaaactagttatataccttcacatgcttccttaacccacagaagtgatgctaatgaggcccttaataaggagcgtgctattaagatgaagacattcattttttttctccgtccaatgttggattaaggcacattagtgggtaattcagggttgctttgtaaattcatcactaaggttagcatgtaatagtacaaggaagaatcagttgtatgttaaatctaatgtataaaaagttttataaaatatcatatgtttagagagtatatttcaaatatgatgaatcctagtgcttggcaaattaactttagaacactaataaaattattttattaagaaataattactatttcattattaaaattcatatataagatgtagcacaatgagagtataaagtagatgtaataatgcattaatgctattctgattctataatatgtttttgctctcttttataaataggatttcttacaaaagcaagaatataagacattggaatataacttaacgactacagaagtagtgatggagaatgtaacagccttctgggaggaggtcagaatttttaaaaaattgtttgctctaaacacctaactgttttcttctttgtgaatatggatttcatcctaatggcgaataaaattagaatgatgatataactggtagaactggaaggaggatcactcacttattttctagattaagaagtagaggaatggccaggtgctcatggttgtaatcccagcactttgggagaccaaggcgggtggatcacctgaggtcaggagttcaagaccagcctggccaacatggtaaaacccggtctctactaaaaatacaaaaaattaactgggcatggtggcagatgctgtagtcccagctgctcgggaggctgaggcaggagaatcacttgaacctgggaggcggaggttgcagtgagctaagatcacgccactgcactccagcctgggcaacaaggcgagactctgtctgaaaaagaaaaaaaaataaaaataaaaataaaaagaagtggaggaatattaaatgcaatataaaagctttttttatttttaagtcatacaatttgtttcacataacagatcaggaaataatacagagatcataagttttggagctgggtttgaatcctggctctgccatttactttctgtgtaatctaagtcaagttactgaactttgtgggccctctggctctccatgtgtaaaatggagaatattaatatttaccttgcaagtttgttgtgaagactgaaggagagaatttaggtaaaacattcatcagagtaccatgcacacagttgttcctcaataaacattagcttctctgattgcaagttccagtctaaagtgctttatatataccagccaataaaaggatgcgagagagatataccagtgtattgttttctaccattttaaacctattttcatccactgttacaaattctatcatactgctccacataaaaaatattatcaatgatttttagtctctgaagtgcaatatttgattattgagcacacctgttgaagttttagtttcttctcacttacatgggttgtgtaaaggtaggaggtataaaaccagtgtcctaggtctaaatctttcttaatgtcatactttggattcattgatataagtaacttgagcaccagcgcttcattttacttcattttttaaagatatagtaagagtaattcccatctgcc

SEQ ID NO: 815189 - DNA, 4060 bp, Homo sapiens
gtttatttggtttttacttctaacttttcttattgtcaggacatataacatatttaaactttgtttttcaactcgaattctgccattagttttaatttttgttcacagttatataaatctttgttcactgatagtccttttgtactatcatctcttaaatgactttatactccaagaaaggctcatgggaacaatattacctgaatatgtctctattacttaatctgtacctaataatatgaaggtaatctactttgtaggatttctgtgaagattaaataaattaatatagttaaagcacatagaacagcactcgacacagagtgagcacttggcaactgttagctgttactaacctttcccattcttcctccaaacctattccaactatctgaatcatgtgccccttctctgtgaacctctatcataatacttgtcacactgtattgtaattgtctcttttactttcccttgtatcttttgtgcatagcagagtacctgaaacaggaagtattttaaatattttgaatcaaatgagttaatagaatctttacaaataagaatatacacttctgcttaggatgataattggaggcaagtgaatcctgagcgtgatttgataatgacctaataatgatgggttttatttccagacttcacttctaatggtgattatgggagaactggagccttcagagggtaaaattaagcacagtggaagaatttcattctgttctcagttttcctggattatgcctggcaccattaaagaaaatatcatctttggtgtttcctatgatgaatatagatacagaagcgtcatcaaagcatgccaactagaagaggtaagaaactatgtgaaaactttttgattatgcatatgaacccttcacactacccaaattatatatttggctccatattcaatcggttagtctacatatatttatgtttcctctatgggtaagctactgtgaatggatcaattaataaaacacatgacctatgctttaagaagcttgcaaacacatgaaataaatgcaatttattttttaaataatgggttcatttgatcacaataaatgcattttatgaaatggtgagaattttgttcactcattagtgagacaaacgtcctcaatggttatttatatggcatgcatataagtgatatgtggtatctttttaaaagataccacaaaatatgcatctttaaaaatatactccaaaaattattaagattattttaataattttaataatactatagcctaatggaatgagcattgatctgccagcagagaattagaggggtaaaattgtgaagatattgtatccctggctttgaacaaataccatataacttctagtgactgcaattctttgatgcagaggcaaaatgaagatgatgtcattactcatttcacaacaatattggagaatgagctaattatctgaaaattacatgaagtattccaagagaaaccagtatatggatcttgtgctgttcactatgtaaattgtgtgatggtgggttcagtagttattgctgtaaatgttagggcagggaatatgttactatgaagtttattgacagtatactccaaatagtgtttgtgattcaaaagcaatatctttgatagttggcatttgcaattcctttatataatcttttatgaaaaaaattgcagagaaagtaaaatgtagcttaaaatacagtatccaaaaaaatggaaaagggcaaaccgtggattagatagaaatggcaattcttataaaaagggttgcatgcttacatgaatggctttccatgtatatactcagtcattcaacagttttttttttagagccccattcttattttttatacactttgagagcataatgaaaagaaaagctacctgcaaaagttttggacttacctcaaagaggatatacttcattcctcaaaaggccttcttccaggaatagtatttcataacctggaggttggaaaaatctggatttgttacaaaaaaatctgagtgtttctagcggacacagatatttgtctaggaggggactaggttgtagcagtggtagtgccttacaagataaatcatgggctttatttacttacgagtggaaaagttgcggaaggtgccttacagactttttttttgcgttaagtatgtgttttcccataggaattaatttataaatggtggtttgatttcctcaagtcaacctttaaaagtatatttagccaaaatatagcttaaatatattactagtaataaatttagtactgtgggtctctcattctcaaaatgagcatttactaatttctgaacactgtgctaggtcctgggaataccaaattgaataagacatagtctatttttctgaagggtttatagcagagtcccctgtgttaataatgaaggagtgtgtggtatgtgaatcatatatcaatagggttgttaaaaataatgaaaaaaggagaagaggaagaacatcttttttttttctgattgcacgggcagccttaaaattatttttgaagtgtacaattcagtgtttttttagcatattcacagggttgtattatcatcaccatatttttggcctcttgaaaagaaatcctgtgcctattagcatccaattaccgttcctttgtagctaagtctcccccattccagctttaaacaatcacccatctactttctgtctctataaatttgtctcttttggacatttcacataaatgaaataatataatagggttttttgtgcctaaataagcttctaaagaagaataaggtaaggaatcatcattcagcaaatatttattaagacttgctttattttatacagtgtactaggagctggagatgaaaatatgtgtagaacatgaatcatatacttcgggaatttgtggactagtgggaaagattgacatatcaataacaaatcgaattagtgatgtaatagaggcatttttacaggagtaaaatgaggtagcatggactctatctgggtctgaataatgtgaggagtaacctccttacacaaagaggcacaaggctaatgtcctctgatggaatgattcaccatgcaattctaagggtgacaagaatgaaagttagggccttgaagaaatattttgattaagagctgccaataaagtagagtaaagattagattgatgtgaagaagtgggagattaatgagtaaatggtcactggcttgttgagaagattaaatgagatgtacatgtaatgtacctaacacaacgtcttgtacaaagtagccattcagtagagactagcttgtattatctccctttgaggtaaagaaaactgttagaaatagtatttctactactgatagtatttcttctacttatgcctccctttgaggtgaagaatactgttagaaaacatgacataggagaaatacccctgagagacagttcttattagtgactactgtgcagaaaagatggaggttggtgtaattaaggagaaggaaagccatgaagccaaagtattatgaaaaagcatcaatatgaattttcatgttgacaaagtggtataaaagataattataaagatggtcacttataaatacggtagttctgtgtgacacaatttacagaagttggtatatcgtgtggaagaaaacagcataagatcctgaaggtttgaactgtgggcacattggctccatgctcaggaaatggcaatggggttgggaagtgattccactttatgtccctttcagacacataaaaattacttgtgtgagtatcttatgccagacactattcactgtgtagtgagcatggtgggtatgaaatgacaactttattgtctttcctgtcaaagaacttgtaggctggttgggggaaagagaccatttcaatatgaagtgctgagctagaggtacccttagggcactacagaagcctagctgatggcttttagcctggctagacagttcaggatctctaaaagcaggtgccttgaaggctgagtcaaatacaaaaatgtattttggacagaggaaattgtatgaa

SEQ ID NO: 815190 - DNA, 4046 bp, Homo sapiens
ttgaaggctgagtcaaatacaaaaatgtattttggacagaggaaattgtatgaacagaaacacagaacatgaaactacttggttggtgcagggtatcatcagcatagaaccagacagaaccagagtgtaaataagccagaaggccatgtcatggaggccttgtataccagtctcaggaatttggttgtggagagctttcatcaggggaatgatgtaatcagcttggaaatgtagatatatcactgactgtgatagtgaggagcagaattaaggtggacgtgattagaagctttgtgaatagcagaaagaacatagattttgaaagctggcagacgtaggttactgaagaaagttacttaaccttgctatgtctttagttttatcctctgcaatatggggataatactgcctattttgtagagtcttgtggattcttctggcatatataatagaaaataaaacagctattattattattgttgatggtactatttgctatatctgactacaaggagaaagactaataggaaaccatttcaggaatccagatatggtcatgatggacaggaagagacaagagttacatagaggaattctgggaagataagaaatgtcatttttatgtactgtttgcatccatcagacaaggcatcaggaaaaatgatccttcaggaaagagtgattttttttcttcaagaaattagaagaggggagaaattggtttaagattaaggactccatgcataagagaaactgggagggaagacaggtagaaatgctatggggttaggaaggaagaatgcagaggtggattacttagaattgagacatctgatcaagacagagggatcacagcttttgctaacaaagtactagtggaggatgccactaggtgaggtttaataaataattgttgacaataagttccatttaaaaaataaacaatttatgcttcttctttgcctaagtgtcaaataaaacattcagatttttatttcaaagtatccctgagtccctgttcccttttttgtcctgctgacttttggaactgatttaggcttccttagtcatctcataatagaaaaaatcagccaggtatttcctacatttcttgtattttaaaaaaatgtaatggatgtaatgaattttaagcaaatgtaatgaatacaataagtaacttagtatatgctgttttcttctctatgctgaatgtttcatacatgttattttctatacaactacatggtcaattccttgaaaatatcaactccaaaatctttattttggtatactccacgtagcacattgagagagttttaaactcttgttggatgactgtttcaaaagtgttttgaagtaggcatgtcagttgcaaaaagtttgctcagcaaatgttgttctgtctcacagtctcagacattgagcagatgattacatgacagcacgtgattgctgggagtaacagacaaaagtaactgaaagtgctcggttatcttgacagtcaaaatcaaaagtgtcccctattttcagtgacctaagagtttctttttgtgtttttggtattgttgttaaataagtgttctcacctttgaaaaggtcaataagaattcaatacagtataatgtctgtgtgccaaatgaaggtgccccttatttttaagtgtggaggagttttgatcataagaacttgaaatacctacagaatccttgatggttaagcagctggtgccagcacaagaatccctcaatatgttctctatgaagccccgatcaccaaatgcaaacattcatgattcagtatattttcatcttgactgccaaagttgatctgtttcttaatatattacatctagacttggaactggagatgagaacagaatattatcttcctcatttttgtgtttttgttcaactctaatgtctgcaaagcacttgcgtatgtaatgatgctcagtgtcataggagcaggcaggtaagtgtaaatttgtctggataggagaaagcatgcacaacatatttcacatagttttctgatttcagtttgtttttgcaaattattcactcagtgagatagcttaaagacgttatcacagggaaaggcatggagatagttctgtgttgatagaaaacttgtaatgtacagccatgagtgagaagtcaggttcagattcttcaccttcagtcctcctctttcataaacagctccatgtcctattttacatatcctactttaaaacgagattatagaagaatgaatttctaggcaaagtgacacttattttaaaatactattacgtatccctgtgcccattaacttatcctaccatttttcttcccctgtgtccaaaccacctttagaatctcctaaatatttgtagctattgtaaacagcactggagactttgctagtttaaaaggagaaatcaacgcaattaagccctagttaatttacttatcccttatgagattataattgtattttgttattaaaagggggacagagtacactgttctcttgcctttttaatttccagactaccacttctcctgcacttgacaataccgcagtctaccacgtagtcccatggctgacaggaggagaattctaggcaggccagtgtttgagtagtgagtaattggactgtctttacccagcaactcactgttttgtaaatgtacctgagtttggagaagtaattggcttttataaggggtgcggggtggagggttggggtggggagagtgagaaggaggtcagagctttaggatatataattggtctccacaaagttgttgtgatacttttggaaccacgtaatggtcttcattaactaagtgtctgtcatgacagccattacatatgcattataataaaaatttatttacagtgtaagttgaagaaggtaaaatctggatgtagtttctaaactctgcttggcagttttcatatttaagccactagaagaaaaaaattgggagggaagctgagaagaatttactgaaagaaaaaaatacttgggagggaaattggcaagaagtatgaaaaagcttgggagggaagtaagcaaataaatgagttaatgactgttctggaaaataaactctatcatgcagatatcacatgactgattaaatttgaatttgacctcctgctttccaggtctggtaaaaactaacctgtaagaacttgaaacttagcctttgaatggtcaatccaccactgtaggagaatttatgaatgttcagttgagagaactgaaaataaagaagtaccataggaattaacatttgcattcagtagccaagatataatggacatctgaaacaggtatttgaggccaggcgtggtgtctcatgcctgtaataatagcactttgggaggccgaggtgggtggatcacaggaggccaggagttcaagaccagcctactaaaacacacacacacacacacacacacacacacacacacactagccaggcgtggtggtgcacgtttgtagtccaagctacttgggaggctgaggcatgagaatagcttgaacccagaaggcggaggttgctgtgagctgagattgcgccactgcactctagcctgggtgacagagtgagactctgtctcaaaaataaaataaaacatatatttgaaacacattgaattatgtcccttaaacaagaataaacatcactaaatgactgtaccttgaactacctgtaattttctcctgataggtaattaagcttcaaagtactgacacttatttactgtaatatgaagcaataacttaaaaaaaaaaaaaaactattgaaccagaaccaaacaggaatgccatagcattttgtaaactaaactgctatttcatttcatttgagccctggaacttgaaaataaatgctagctaacatctgtgaacagaacatacccatcagtactgtgctaagcacctttcatgaactggtcattaaatcctcactttccatttatttagtgacaacttcacccagagtttgcagtcaaagtgaaaatgtgctgaattccaaaagtgtgag

SEQ ID NO: 815191 - DNA, 4068 bp, Homo sapiens
agtttaaaaagaaaaaaaaaaggaagaaggaattaaaaatccaaagaaaattatgtttgtttgcttttctgtttttttcttccttccaactccgagactttgcaagggcatagttctgaagatctctgacactgagacattagagatctctgtatcaatggatcatttgttttcagacatatgaaacaggaactttgaacaagaaatttcccctctttttctcatagtgatcctgagacatcagctgtggaatcacaacacgtcattagttttggcaggtccttgcaggtgttttgttttgttttattaatgttcttccctcctgtagctagacagcaatcttggagaatctgccagcttggaagactattgtgtaaatttcaaggtggagcctcctttaatttgttctgtgttacctgtgagctgtgaggtcatgaagaggagacaatgaggctaatcatgagagccccattggtttaggcaattagaacaacaagatctaaaatggtttattagccttgaattgtgttaagcacataattcataaaaaacagaaaaaatatttttaaatgtatgtctaaatcttcagttacaagtttgaaaggtgacaaactattctgaggaaatgattaggcctattcttgcaacgagtctttatgatctgaaaagaatctatgtccacacataactcccacctcaaagatggggcatcttttgctctgggagatatcaaatgcgaccaaaacaagtgtttgtagatttgaatgatgattcagcagtgtagcagttctcactcattttataataattaacaacttaataattaattattaaactcctacatgcttaacattataagtatgataacttctgtggttacataaaagatatacatagcacttgtccttgatctgtcacagtgaggtcccaatccaacctatgagcttcaaatgaaaagttcaaaattacactcattgtcataagtcagagatcaaaggaagaaaggatttaaccaaaatgataaattaaatataggtgattaaatatagtcatggttcaaggcatgggccagttagggagtgtgatgtgggtaattatgaaaggccagctcccaagccctgttgttgctactcccccacatcagtcatccttcctttttttctacttctactgcagtgccttcctcatcttttcccttgcatccctccattatatgagtcatacaaattagacttttcaaagcaacattaacattgtgtgaatttggggtttttgactaatcccaacattccacccccacattccagtcccacatgggatttggagccttgtttataaacctggcacttctaatatatcttatcttagagtaatccttgtatttgtttaatttccacttagcattgtaaatacttgcaggtatcctagttaagaaagcaaggtttaaacacaaaatcatcaccaattaaagcaggctagataaagaatgtaatagaaatgctagataaaacagattttttcttactaagttttctgtcccttatagagtgcataacacaataacttgcttgataagaattcaatgtacattgttttgtgctgaatcactaaatgcttgatttctgtaacaagagattgtggttccatcagtatctggattttagtctgtgtaatcttaggcaagttatttgatttctctgtgcctctgttttcttgtctgtaaaatgagtataatggtagtaactaattcattgtgtttttgtgaggattaaatgagttaataactagtactcctccctggcacatagtaagtacaatatgctgtgctgtggtggttgttattattttttatagttccttgagcaaaagaaataatgtccccatcttagtataatattggaggtatataccatagaagtgaacaaaagaatatagtttcacaaagaaagtgataattaaggcggttcataaagggtcataaagcttgtagattttagaaatgtgggggcatgaggatgtggagagggtattccaggatgccagacagggagattatggatgagtactaagatgagaactagaaaaagctgaggggcaaaaggtcagaggaggccacaagttagggagtattaggaaaaagaagttaatacttgacaagtgccaacatggcttcacgaggaatgggttgggcctttttgagtgaggaagaggctggtgaaagggtggtggaggacactgctgctgctgatggcatggggtgtaggtggcaggagaggcagggacatgagctaggaaactctccagctatgaagtgatgagtctggagtaatataaggacagtaggggtggagtgctgaacttaagggaggagagaaaaataattggtatggaagtaggtacaatgcaattttattatttctgagcctaaaaatgtgaaatttttgattatttggtcagaccagggaagtattttcttttatgctatctctgaaaatgtatacactaaaaagttgtagtataaaaaggttgtaaagcattaagtaattttagaggaaacaataatttggatattttacatgcaatcatttatatgcaaatatatgtaaatattacaaaattattctctatttgttacaaaccttaaatatttttgactgaggaatattttattcatctaattatagctactttgttctaactaatagatattcttgaaaacaaagcaacacttttttggagacagagtcttgcactgtcacctagacttgagtgtgttaccttgaactccagggctccagtgatcctcccacctcagtctcttgggtaggtggattacaggcccacactaccatgcccagctgtattagtccatcctttcattgctataaagaaataccggaaactgggtaatttataaagaaaataaatgtaactggctcacggttcttcaggctgtacgggaagcatagcagcatctgcttctgaggaggcctcaggaagttttcaatcatggtggaaggcaaataagaagcaggcatgttacacgacgaatcaggagcaagacaaagtgagggaggaggtgccacacactttgaaatgagcagatctcatgagaacagcgccaagaggatggtgctataccgttcatgagaaatccacccccatgatccagttacctcccaccaggccccgcctccaacactgggaattacaattcaacatgagatttgggcagagacacagatccaaaccataccaccagctaataccaaaaaaaaaaaaaaattttttttttaagacatggtcttactatgttctacaggctggtcttaaactcctggcctcaagtgatcctcccaccttggcctcccaaagcactgggaattcagacatgagtaacagtgcctggccaatacttatttttaaacattctctaccataaacttaggatcttgatttgttcacattgaacagatttttattatacagattgaatttataagaaaatgttgcagacattgtcaaaaagggacgtccaaaccactgtgatatttataagcatttgggccacattttgatagaactatacacggagtgtgtgtgtgtgtgtgtgtgtatatatatatacacacacacattatttatatatatgtatatatgtatatatatatatgtatttatatatatatgtgtatatgtatgtacacattatttacctacctactgtgtgagtgtgtgcatatatacacgcacacacacacacacaaatatatatatttcccttctgagacaaagccaaacagcactgtatgcttaaagaaaaacagtcacacttcccacttatgtaatttatattacatccagtcaccacaccagccaaactgctttattgttttttgtttgacatccaatgctaaagcataatgcctgttgcagtgaaatatacatgagcaaccctgagaactcaatatagcctcacgtgttgccactgagttgagttgaggagtcaagctgtagcaaaaaggtttgtcaccgggtgagtaatggtgctcttatttttctctgggt

SEQ ID NO: 815192 - DNA, 4042 bp, Homo sapiens
atgatctctagcaatttcctgtttgtttgttttttgcccatagtgcttatctctttgaacagtaattttccacttactatttttctccccttttggaccataatttcctttaaggcagagcctcctgttactcatctttgaatctggggtctgtcagagtacctagaatttaataaactctcattaagagccagttgaaagaatatatgactaagcagtcatttacatccaaaagatccgtaggagaattcttatcagcacatgtgattggtaacaataactttgtacttttcaaaaacaattactaatctatcttgctttccattatctcaccaaaacctattagcatgtctggcagaaaatagatacttaataaatttcttaaatgtttactgacttcaattttaagttttattaactatgttgacttttctctaatgaagatgattctaaaaagctttttactatacttcacagtgaataaaacagtgagataggaatattgcaaaatgtcccctgtgttggtcagtcttagtgtcattcattttaaaaattctgttctctaaatattgacagttatatataaatttatgtaattgtttacttctaataaagaatttcatctggggaaaaacatactttgctcagctctttgccacaagtgcaaagtctaagacagtcaaatagctttcctagtacggccttaggaacttagtatatgactggtgtgaatctagagggagcatactgcattctgaccaaaatctccaccctgttactatggccatcactaacttcgcagtattgcagtacttcctgctagcttagttcccaaggcaacttgtgaaggaaaatttttacaaagctgttgtcacacaaaggtagtgtttcagttcctgagcccatgtccttggagttgcccaggctccaataatactaataattactgtacattaggtacttaccatgtgccatattctgtgggagccgctttccacaaattatctctggtaatccttgtaacaaccctttgacatcaatattattattttctccatttttttacatatgagataaatgagacttaaaataatgtgcctgatatcatcagcaaatgagctgaggagggcagattcaaagctgattgtgtttgactctagagctgcagtcttaagccagaccttttcttgctggttaattttactgaaaaaaaaaaaaaaaaaaaaaaaccctcaaatactgctgattgatctaaagtactaacatttctatcagtgttagggaaattttaattttataatttgattttgtgagaaatttatagcatcttgaatactcacatgcaaagtgatatgtcttagataacattttacaatggcagagcttaagccagtgctcagtcattcattcatcctcaagttttgattcatttatcattcatcaaaactctgttttgtttggccacccacattctaggagctcagtacatatttgataaatgaatgaattgttgaggttgacagttacccaggactggcattaggaacacagagctgaagagcacgtttttaccctcaagaagcttacagtctaacgagggaacttgcacaaatactactatcactaggtgcctggttgaatggcttaagagatgatcagggatattcagaaggatatgtcaggctcagcaatggcatcacttgagagcatcaaggtgtttagggaactacaagatgtttggttctgctgggaataagagtgaagggggctccatttggatgcctcatacaccaggtgagagatcttagattttattccaccaggaggagaactaccataggatttaaaacagaaatgatatggtcaaacctacatcttaggaagatccctggggtgtttgtatggtggacttgcaatttgactaattgagatttgtaggatgattcttaagagatgatgatgacccagactgggatcactataatagagttggtaaggaggagaatgatttaaaaagtagttggaagaattctagggatggagataaacatttgaaaattattaacttataggtggtcatcaataccctgaaaatgactgggatctcagaggagagtctggagagttggaaatgacaaagactaatattcaagggggcaggaagagggagagttgttcacacatgacaataggaagaaatggccatagagtgtgtggtttctctcaagccaaggaatagatgttttaagaaaggaaaattcttgtggtgggaagcagtagagatgacagatacacattaatttcttgagatttctagatgactaaatgggcagatgttgaatgatagctaaaggagaacccagaaacaagggagggattttgtttttgttttttaaaaaagatagaccatagcagcttcatagactgaaacaataaaaaagttgaaggcacaaagaaagacacaggtcctctaactccctgcccagtgccctttattcatattctcagcacttgtatttctaagttttatgtttgagtcttcggggatacatcagagtagtcccccttgtctaataaatgtgtttacatttcctgccataccagaaacccttctcaaactttaatgaatttctacaaggtgagattactttaatgagaaaccaaccaaggaaaggagtatcatctgcaatatactttcaaatgttttttgcttgtttgtttcttgtccagctaaaaaaaaaaaaaaaaaacaagccattggtcctaacacaactttcatattctaccccaatatcaaagaggcttaaaatctcctggtcgtgtgatgggcacacagttaattttttgtgaacaaacacagtgttatgggccatttctgaatttatctctgaaatcataagattctttctgagccattatctcattctatattacagtcaggtggagcccatcttacctcctcatactaaattctagacttctcaagggcaggagacaatcatctgtatatctctttggccttcatacactcaggagtacttgccaaaaataaacatttaatgcacatttatttgaataattgataagatccaatacttcaataactttgtcatatttttatagaatgggtttctatatctcatttgcattttcaaactttacttttactgtctagctttaaaaaaaaagcctttgactctaatacagccctcatattctaccccaatatctaagaggctttatatctcctagtgttgtaccactattttaactccagtattttttacttcatagttttacctatttgttacagttagtttttatgaattcaagagatgaatagcaattttccatatgtaatttaaaaaaccccacagttgactattttatgctatcttttgtcctcagtcatgacagagtagaagatgggaggtagcaccaaggatgatgtcatacctccatcctttatgctacattctatcttctgtctacataagatgtcatactagagggcatatctgcaatgtatacatattatcttttccagcatgcattcagttgtgttggaataatttatgtacacctttataaacgctgagcctcacaagagccatgtgccacgtattgttttcttactactttttgggatacctggcacgtaatagacactcattgaaagtttcctaatgaatgaagtacaaagataaaacaagttatagactgattcttttgagctgtcaaggttgtaaatagacttttgctcaatcaattcaaatggtggcaggtagtgggggtagagggattggtatgaaaaacataagctttcagaactcctgtgtttatttttagaatgtcaactgcttgagtgtttttaactctgtggtatctgaactatcttctctaactgcaggttgggctcagatctgtgatagaacagtttcctgggaagcttgactttgtccttgtggatgggggctgtgtcctaagccatggccacaagcagttgatgtgcttggctagatctgttctcagtaaggcgaag

SEQ ID NO: 815193 - DNA, 24 bp, Homo sapiens
tcttcacaaaggaataaaatatct

SEQ ID NO: 815194 - DNA, 35 bp, Homo sapiens
acatacacacaaaagtacacacatgactagaatac

SEQ ID NO: 815195 - DNA, 48 bp, Homo sapiens
gttccttgtagtttcagtctctatatcatattcataaaagttccaaat

SEQ ID NO: 815196 - DNA, 46 bp, Homo sapiens
ggggccagtgacacttttcgtgtggatgctgttgtctttcggtgaa

SEQ ID NO: 815197 - DNA, 52 bp, Homo sapiens
agctctgacaattgcagcagtgaataacttaatcaatggactctagcattca

SEQ ID NO: 815198 - DNA, 36 bp, Homo sapiens
caaagtgccccataaatatttatttgaattgactaa

SEQ ID NO: 815199 - DNA, 25 bp, Homo sapiens
cactgtgaaggaaggcagaaaaggg

SEQ ID NO: 815200 - DNA, 52 bp, Homo sapiens
tgtatacattgcagatatgccctctagtatgacatcttatgtagacagaaga

SEQ ID NO: 815201 - DNA, 4024 bp, Homo sapiens
aaaatcatctcaaaggtaacttaaaagtaatttaattatccagctacctcatttaaatttactaataaaatactttttacccccaaatgcccaaatggtttcagatttccataagaatatatattatggatctattatttcaaaagtcagaaaaatttcttctaggaaattatcaagagcattagagaacattctgggcctaagtgtactcatctttgttaagataagttttaaatgtatttttcatgggggtgtatgaactgaaatttttcaagcaatgtaacacaaatggcatttctctgggagacactgtttaactccctgaggcataaagaccaatataaacacaagtcaatccatatgataagtaaacgccccaaagcaaatattgtgcacagctttaacaagaagattaaacaagtcttgaatctgtctccttttataggttacaaccaaggattcaaataatgctttcatgatgtagaaaataataaatcagagtcacattggacagcaactggggaacatacaaggcacttaaacaccacaaagcctggattttcagatgtgcaacttttcacactgatgagatgtaagatattaagaaaatatattgcaagagaactttaaatttttagtattatttatttagtatttaaagctgctatactttaaatttttagtgtttttctttgaaacaattcaccatgcagatatgatttcaaaatattacaaacattcatatatgtaattagctgcatttgacctaattctgctgacattgtctcctgacactctcctgttgaatacagcaaaataaaggcaccagtaatctcatgtactagtaagataatgtgatttggaatcataacagaaaataattttttaagcaagcaatttattttgctgagcccattgagattgtaaattgccacccgtgttccaggacattttagttccaaaggatttttacttatccttactagagttttaggtggtttcttagtgtttggagttggattcatcctttatatttttacacctattcaccagatttcgtagtcttttcataatcacaaaaatgaatatagttatgtgatacataatgaatgtacaaatgagatccttacccctaaatataaaaagattccatagaacataaatctccagaaaaaacatcgccgaagggcattaatgagtttaggatttttctttgaagccagctctctatcccattctctgcaaaagaataaaaagtgggaccaataagttgcatgtgcaaatattttagttgtcctatttcccttaacatagtttgattcacacaagtatatccaaggagattaacccaagtattatagagacaaaatctcatggagaccatacaacaccaaacactcagccagatatttggcagaattcaatgctctgccatatatcactgtgcagggaattgatttcatgaaaaggccacattgtatgtgttaaagaaaagtgttgggcttctaaaaaacaatgaaaagggtggacaaataaagtaaggcttttacgaatgctcattgctgtgcttagaacaaggtggaaaaaataaacacacaaacattctacatttttcccttataccttgatctttattggtttagaactgtggcagatttataagatttcactgtcaaatcaaaaacaagttaaaatgtcaggtggctttttctgtgatttaacatgagaaaaatctgttagactttgtttttaaaagtagaggcataaactatcattaaacttcattttcaactactaaaatcatgtattaaaggtctttgaaaaatgagaacaagatcaaattatatattttctattatagtaagaatagacattaaatagtctgaaaactggctgaaatctagtaaactttctgttttcttttaaatactataggaacaccagctgattgtatttattaagttattgccactgatttctgttaatgaaagccttttttctcttcacaaaggaataaaatatctctaaatattatcatcttaattttcaaactgtacagagatgaaaaatttcatgaaccacaaggaagaactaggtaaacaattagacaaaggctttacgtttcatcagtggttattcccattactgtcaagttaccataagtaaacatggctctaaatcactctaaaggagtaataggccggggcagtggctcacgccactaatcccaacactttgggaggccaaggcgggcagatcacttgaggtcaggagttcaagaccagcctggccagcatagcaaaaccccgtctctacaaaaattagccaggcctggtggtgcatgcctgtagtcccagctactcaggagactgagattcgcttgaacccaggaggcagagtttgcagtgagctgagatcacaccactacactccagcctgggtgacacagcgagactctgtctcaaaaacaaacaacacaaacaaacaaaaaacataaaggagtaatacacagctgagatttgaagacaagcctggcaatctctaagcatggatcttggcatcccctagaagcttgctaatgagagcccttctataaagcctaattaccttttcccatctatttccctccccacatgcttctccacctttctctcacacacagagctaacctcccatccataacatttggttactcagagtaagaagctaaatatggagcagactcaccttctccatcaaaggagaaatggatcagatgggaaagccaaggaaggggtgtgtacataaaccaacaaaatgggttcaatgtgaaaaagtggtccacacggaagtaatgtagaaaggtgttgttatatttcataagaggtctctagtgaccctgggcaatgtagttttaggaacatggtggaaaccatacttcaggagctgagatgtaaatgaaagtgaagtagagagaccaggagagcagagaatgttagctatgaaagaaaaaatagaatggggtagttacctgaggagaaggcaaggtcggggaatttctttaatgggtgaaacttgaacaacttggtgccacaaattgttagcaccaagagtaggtgatgtggttctagtaggaccacataccaggcccagatcagaagggaagaagttttattcttaaaaagttcatatcctgactacaatcttggaacggatgtgtggtttgcacactgcagttatgtagaggattcaatccatggtcacaaaattgagccagataggttaatgttcttcaaccatctggcaaccacttgagggccatggtcacaaggcagttatgaaatgtgaagccagggtcacttcccaagggtgcagaggtacaaagtaccaaaaatggtatgtcactcttccaaaatatttcaataaatttcaaataccaattttataagaaaagaagtaacagggtggagatacaaaaacaaaacaaaacaaaaataatagaacgtatgggtttgtactggcatagcattgttgaattgaagtaaaataggtatattttttaaattgaatcaacatgggggatacagtgaaaactggaaagaaaaaaatgttaagccagataattctgcaaattcagattcatgttctctatctggccataaatacaaatgtatcacatttttcaattaacccagccctactctgattaatcattccctcagcatccaattaaaacttagatattcaaagctgggcatagtggctcacacctataatcccagcattttgggaggccaaggtgggcagatcacttgaggtcaggagttcaagaccagcctggccaacatggcgaaactccacatctactaaaatacaaaaattagccaggcattgtggcgagtgcctgtaaacccagctactcgagaggctgaggcaggagaatcacttgaacccaggagacgaagtttgcagtgagccaaaattgcaccattacactccagcctgggcaacagagcaagactctgtctcaaaaacaacagcaaca

SEQ ID NO: 815202 - DNA, 4035 bp, Homo sapiens
gatagcaattgctataacagtatagcaatgagagaaactggtttagcatgaggcggtgagaaaaggttttaatggaagtaatcttgaatcctggcccagtagggcagatcagatttgagttaataccatgctacattctgccataccaacaatggtgaacatatttctcaagaggtaaaatgcaatctatgatgggacagtctgtctttcttttattttagcatgagcattataagtaaggtattcaaagaacatacctttcaaatatttctttttctgttaaaacatctaggtatccaaaaggagagtctaataaatacaaatcagcatctttgtatactgctctaaaaagaaaatggaaattaaattacatttcctctctatttcctggtcatctagtgtagatgatttgccttaaacagttcactacatgcattacaatatggtcaccacatcgattcactgaaataacactattctcaaaagtggtgcagaagtagcacttttatacatgtttttactatggtagattattttaaatgaggaataaaggaataagttgcagaagatttttatcacttttcacaacattccaagaactgctgaagtgattttgctaactgtaagtggcataaactagcaaaagtcacaaactgaactgtaccatagcatacactttaaaatattaccttaaaaaatattttaacaatagtatctatttagaggcaagtaccatgctatgtgctcaaaatacaatggcaaaaattatacagttcctgcccttgaagatgttgggttttggtgaggacaccaaaaagaaaataaactattccaaactgtaaaatgtcagagacagctaataaattacattacttatgtgaaattatttttaaaatgtttttctaagtgttaaccactatcaacaaattgatagcagtgctgccacaactgtataattgatattgcattttgttccttgtagtttcagtctctatatcatattcataaaagttccaaataaggaaagtatgagtaagtcacaacaaaatgtatatccatattattttactatttagctaaaatatgaaaccataagcaagtaaaatctacattgagttgaccttagaacagtaataaagatgaagacacagttcccatattaatagaaatgagataatttcttcataacatttaaatttttcaggtgtgattgatagtaaccttacttatatctcaagtacataggattctctgtttatacatgtaattgttggtacttctgtaataaagaaaattgtattcagcacacaattaagaaatttttaaagccaatttaaaaatttttttaaaaaccaatggcaaaactttaaaagtctaaaacaacctttatagtgtaacttatttttgaagacagtatgcaagagctacataatggatcccatcaaaatgtacacagtttcttccccacactctgttcttaattctctccctcacatctatgacaagtttcttatgagattagaaataagaaattcatcatccaaaactggacaacacattacacattctgatcagaataagaacagacaattatttttagttcctcaaagtgtgtgcaccttacagcaaaaccaaatcttaaactgataacacaaactcagttctatgttggatgtctagaagccatatactctatcttatctaaatttgtggaattcttagaataagtcttactttggctcacagataaaaacaatcaacttccatttatttagaagcctgtgaattatccgtatctattgatttattgccttacagtgtatttccaagatcaaagcatggtttaatgtaaagaatcaaaaggacctggttcaaactgtgactctaccattttcctgtatggcttttggcaagttaacatctaacagcctcaattatcttatgatctcttctgtaaagcagggagaacaattcttactttgcagagctgtaaggggattacatacacacaaaagtacacacatgactagaatactaccaggcaattgcaggtgctcagttagggttagtttcctgtctcagcttttggaaagcaacagaaagtaagggaaaggagccaaaacatcaatgagtcaatgtgatttcttgttaacgactttggcaacaaagtgagaagaattttgttcagataaagcttgagaaacatttgacatcagagtcaccaataattgtttaaactgaaagttacagtttaaccacaaagctctctccttgacatacattatctatatttacatctctttgacagctttaaaatgcttggaccaagagtgtttctactaagggacctcctcccccaacaatgttaatgcatttgtcctgtttattttaaatattatagattttaagccaagtgacatcatttgccttcctattttgttatgaaaattatgatgaaaaattttgaaaatgtatgtttatctataccaagaagcctaaagctggtgtgtacattggagtggcagggtctatgatggaactaacagatatttacatcttctctgtccagtattatgcagaatcctagagttttccatttgtagtaaactatactatgaggcaaacaaatacactgacaccaagatacgggcacagattctgagtaaccataatctctaccaaatctggatactataccattatttatagttcttaaatgtgattcttaacccactagccataaaaccccaggattttttcaattccagaaacagaatataaagcaatagagaaatgtctgtaatttttttacatgaatgacatttacagcaaatgcttgctagaccaataattagttattcaccttgctaaagaaattcttgctcgttgacctccactcagtgtgattccaccttctccaagaactatattgtctttctctgcaaacttggagatgtcctattaccaaaaatagaaaattagagagtcacttttagtatgctcaatctgaatttgaaaggcacatcttccttctaatgtaatcatatatcacactattgctttaaccacagttgaaattttgaacattgcatctccattatttcaaatgcaatttatttagttggtcaaaaacaacattgctgaaattttagatgtaaatttttctgtaatttttaaaatgtcatgaatgatcattaaataataattataaaataccaaaaattaaaatatgtgtatatttatgggtatataaatatgtgtagatcatccataggtccattttacaaattcaaatgttatcaacatactaaaatgtacttttctccaatttaagttcactcttttcaaaagaaatctcccaaaatgaacaaacctcctaagaagagaaactaaaagaacattattcacacccctgcaggatctaagtatcttcactgggcttccatgggtccaaggcaattcctttccatgcttctgtcacctatcctcccaactaaaacagctttcttcctcgtccatcctcagcacctcattctcacgacctctctccattcattctgcccctcctgtcatcctttctcccaggtaatgaatatttctgtggtaacaatcattctaggcattgtaaaagaagactggaatttatgcaaaatagtccttgactcctaggcattgtatgtctaatttagaaggtaagtcataatcctggagaaagctaaatactatcccaaagatttaactaaccattttaagatagtttataaaacagttcacaattaattggcaaattaattttgtacataacagaagtatacaatagatagaataccctagaggctttcaaaccgatgggatttggtctgagacttcaagaatgcgaagagttagataggtagtaaactctcgccttaaaaaaaaaaaagtctctctcccttttctcctcccatccttgtacattcgtttccacctcctccttcctcccctctactaaaacttctcttccatatgcttcttccttcttctttcacaatccag

SEQ ID NO: 815203 - DNA, 4048 bp, Homo sapiens
gttgcatgttaacagactgagaatgaaattaaatttcctatattaagtagatatttgactttgagcaaatcatttatcctcggggtctctcagtttatttatctagaaaatgaggaaattattagatgatctttaaggtccctagagatttgtacttcatttcttttaaatgtcagagctttgttgctctttaaattttctattaatttcttttttacattttaggttgaccatcaatttatttctcaagtgtttacattaagactaatctgtttcactaaaaataaaacagcaataataacaactgagaattcgataattaatttgactctcctcaaatagaattttaatctattctagaagtaaatcctgactagaatcatctaagacatatcagtttttttaggcattaaaatgtcatatatcatatagaaagacacattgttctagattatactgtaacacactaacacaatacaaatgtagtaaagtttatattgatagaagttacttttcacaatctcagggttgaaaagatagtatcttggatattaaatttaactaaattctaagaaaggtacttctaggaataacccagccattttatatacatatacatctttattgcttaaagtctttatttttagaagagtataataactgttctcctaataaactacttgatagtccattaaatcattttgaaactttgaaatcaagccatataactgactgtctgtctgtctagggaatttcatgtacattggaccctaacaggagttccaaggaaatataagtcctgagctctgtgtgactgaggaggagatctccaaggaagtattgaggtagatgagtagtctaagcatattaaaccagtaaaacacttagcatatatattttcttaagaaggttactatctaaggagaagacagaataaaatactaacacaaaaagtaaataaaaatgttaagtataataataattaaagtaatatatatcacaaggcaatgatactgcaaaaactacatagatagcaattgctataacagtatagcaatgagagaaactggtttagcatgaggcggtgagaaaaggttttaatggaagtaatcttgaatcctggcccagtagggcagatcagatttgagttaataccatgctacattctgccataccaacaatggtgaacatatttctcaagaggtaaaatgcaatctatgatgggacagtctgtctttcttttattttagcatgagcattataagtaaggtattcaaagaacatacctttcaaatatttctttttctgttaaaacatctaggtatccaaaaggagagtctaataaatacaaatcagcatctttgtatactgctctaaaaagaaaatggaaattaaattacatttcctctctatttcctggtcatctagtgtagatgatttgccttaaacagttcactacatgcattacaatatggtcaccacatcgattcactgaaataacactattctcaaaagtggtgcagaagtagcacttttatacatgtttttactatggtagattattttaaatgaggaataaaggaataagttgcagaagatttttatcacttttcacaacattccaagaactgctgaagtgattttgctaactgtaagtggcataaactagcaaaagtcacaaactgaactgtaccatagcatacactttaaaatattaccttaaaaaatattttaacaatagtatctatttagaggcaagtaccatgctatgtgctcaaaatacaatggcaaaaattatacagttcctgcccttgaagatgttgggttttggtgaggacaccaaaaagaaaataaactattccaaactgtaaaatgtcagagacagctaataaattacattacttatgtgaaattatttttaaaatgtttttctaagtgttaaccactatcaacaaattgatagcagtgctgccacaactgtataattgatattgcattttgttccttgtagtttcagtctctatatcatattcataaaagttccaaataaggaaagtatgagtaagtcacaacaaaatgtatatccatattattttactatttagctaaaatatgaaaccataagcaagtaaaatctacattgagttgaccttagaacagtaataaagatgaagacacagttcccatattaatagaaatgagataatttcttcataacatttaaatttttcaggtgtgattgatagtaaccttacttatatctcaagtacataggattctctgtttatacatgtaattgttggtacttctgtaataaagaaaattgtattcagcacacaattaagaaatttttaaagccaatttaaaaatttttttaaaaaccaatggcaaaactttaaaagtctaaaacaacctttatagtgtaacttatttttgaagacagtatgcaagagctacataatggatcccatcaaaatgtacacagtttcttccccacactctgttcttaattctctccctcacatctatgacaagtttcttatgagattagaaataagaaattcatcatccaaaactggacaacacattacacattctgatcagaataagaacagacaattatttttagttcctcaaagtgtgtgcaccttacagcaaaaccaaatcttaaactgataacacaaactcagttctatgttggatgtctagaagccatatactctatcttatctaaatttgtggaattcttagaataagtcttactttggctcacagataaaaacaatcaacttccatttatttagaagcctgtgaattatccgtatctattgatttattgccttacagtgtatttccaagatcaaagcatggtttaatgtaaagaatcaaaaggacctggttcaaactgtgactctaccattttcctgtatggcttttggcaagttaacatctaacagcctcaattatcttatgatctcttctgtaaagcagggagaacaattcttactttgcagagctgtaaggggattacatacacacaaaagtacacacatgactagaatactaccaggcaattgcaggtgctcagttagggttagtttcctgtctcagcttttggaaagcaacagaaagtaagggaaaggagccaaaacatcaatgagtcaatgtgatttcttgttaacgactttggcaacaaagtgagaagaattttgttcagataaagcttgagaaacatttgacatcagagtcaccaataattgtttaaactgaaagttacagtttaaccacaaagctctctccttgacatacattatctatatttacatctctttgacagctttaaaatgcttggaccaagagtgtttctactaagggacctcctcccccaacaatgttaatgcatttgtcctgtttattttaaatattatagattttaagccaagtgacatcatttgccttcctattttgttatgaaaattatgatgaaaaattttgaaaatgtatgtttatctataccaagaagcctaaagctggtgtgtacattggagtggcagggtctatgatggaactaacagatatttacatcttctctgtccagtattatgcagaatcctagagttttccatttgtagtaaactatactatgaggcaaacaaatacactgacaccaagatacgggcacagattctgagtaaccataatctctaccaaatctggatactataccattatttatagttcttaaatgtgattcttaacccactagccataaaaccccaggattttttcaattccagaaacagaatataaagcaatagagaaatgtctgtaatttttttacatgaatgacatttacagcaaatgcttgctagaccaataattagttattcaccttgctaaagaaattcttgctcgttgacctccactcagtgtgattccaccttctccaagaactatattgtctttctctgcaaacttggagatgtcctattaccaaaaatagaaaattagagagtcacttttagtatgctcaatctgaatttgaaag

SEQ ID NO: 815204 - DNA, 4046 bp, Homo sapiens
ctgtttcttcaggggtccatggacaagtacagttcagtatacttctagctataaaggtcttccaatagactgaaagctcatttgtgtttgaacatttcttagtaacttaggactttctctctttccagctgtgatttaaattacataattctcatcctaggcatattcctctagaaatctttgtcttttggcatagaaatacatttcaaaaatttgaaaaagagagattccagacagtccaaaggaaaaagagttttgtttctcacaaaatcaacaaaactcatgggaaagtgctatgaatcacaaagaagggctcctatggaattgggatatagtgcactggttaggagtatgcattttttgagtcagacagatctggatttgaacccaacctccaccattaacatcctaggagctgcttgaattcaagcatgttgccgaactctgaactttagtttccttatctgcaaatgtgaaaaattttaaataccttccagggtagttgtggggactaaatatatgccacctagcactagatgcaatccattaatagaaactattattagtcaaggatatcattctttacaactaaatttttaggctcaggactgagaaattcatttagattgatattaaactatatagatgggctgggcgcagtggctcaggctggacgtggtggcacacgcctgtaataccagcactttgggaggctgaggtgggtggatcacaaggtcaggagttcaagaccagcctggtcaacatgatgaaaccccttctctactaaaaatacaaaaattagctcggcatggtggtgcatgcctgtaatctcagctactcaggaggctgaggcaggagattagcttgaacccaggaggcagaggttgcagtgagccgaggttgcaccattgcactccagcctaggtgacagagcgagactccatctcaaacaaacaaacaaacaaacacacaaaaaaacactatatagatgaattatcatttaggaaaccttcataaagtttagaaatactaaaattacacactttagggatctattttattccctcattttacaaagaaggaaacttctgcctacagatgttaatggcttgtgtcttgtcaaaggtcatattattcacaaatgatctatactattaaacatatcaattcattacaaccctgcccatggctcatttcatccaaggcattaagttttctactaaaacaacaaaaactctcctttttatattatttcctgttttaaaaataaaatgcttttattcttaaaacctaatagaacaaaatttctgtctgaagattggcactagtacatgttaagcttatatacattctctaaaagaaatcttttcagaaacccaatgtataaagcaaactcacaagataaaaaaaagcccacactagctaaattcaggcaagactgatatacaaaccagaatgtgagttagtcctatcaagaggctaaatgtttatataccttatatatgctacttccatacagattattttgcgagctataaataatgaaagctactatttatttatacagttatttatactgcacctcttcccacagagggttcaagatggtaataaagcaaatgctttctaacttatagtcacagttatcactggcttagtagaggaccaaaaactaaatcctttcccattttatgggaagagatatgtccattgcaaaaagaaatcatttgttattttacattttaacgttgcttgtataattaatgaacttcatactttctgagttttaagatacaccttatcctaatcctatgattttagtaaattttgttacatgctacatattgcattctactcaattgcattctgtggggtgaaatacccccaagcgatgtatacctacctttaagtcttcttcgttaatttcttcacttatttccaagccagtttcttgagataaccttcttgaatatatatccagttcagtcaagtttgcctgaggggccagtgacacttttcgtgtggatgctgttgtctttcggtgaatgttctgaccttggttaactgagtgtgtcatcaggttcaggacagactgcctccttcgtgcctgaagcgtggggccagtgctgatcacgctgatgcgaggcagtatcgcctctccctgctcagaatctggtactaaggacagccttctctctaaaggctcatcagaatcctcttcgatgccattcatttgtaagggagtcttttgcacaatggaaaattttcgtatagagttgattggattgagaatagaattcttccttttttccccaaactctccagtctgtttaaaagattgtttttttgtttctgtccaggagacaggagcatctccttctaatgagaaacggtgtaaggtctcagttaggattgaatttcttctttctgcactaaattggtcgaaagaatcacatcccatgagttttgagctaaagtctggctgtagattttggagttctgaaaatgtcccataaaaatagctgctaccttcatgcaaaattaatattttgtcagctttctttaaatgttccattttagaagtgaccaaaatcctagttttgttagccatcagtttacagacacagctttaagatataaaaacatataaatatcaattttataaatactttattgcaatatgtctcgtattttagcattttgttaatgttttattgcatataatctctatcatacaattttattatattttaaatgattctataagtactctgtagtaattaaattggtaccttgtgaattctgatagcatgaaataacatgctatattgaaaagttgcatgttaacagactgagaatgaaattaaatttcctatattaagtagatatttgactttgagcaaatcatttatcctcggggtctctcagtttatttatctagaaaatgaggaaattattagatgatctttaaggtccctagagatttgtacttcatttcttttaaatgtcagagctttgttgctctttaaattttctattaatttcttttttacattttaggttgaccatcaatttatttctcaagtgtttacattaagactaatctgtttcactaaaaataaaacagcaataataacaactgagaattcgataattaatttgactctcctcaaatagaattttaatctattctagaagtaaatcctgactagaatcatctaagacatatcagtttttttaggcattaaaatgtcatatatcatatagaaagacacattgttctagattatactgtaacacactaacacaatacaaatgtagtaaagtttatattgatagaagttacttttcacaatctcagggttgaaaagatagtatcttggatattaaatttaactaaattctaagaaaggtacttctaggaataacccagccattttatatacatatacatctttattgcttaaagtctttatttttagaagagtataataactgttctcctaataaactacttgatagtccattaaatcattttgaaactttgaaatcaagccatataactgactgtctgtctgtctagggaatttcatgtacattggaccctaacaggagttccaaggaaatataagtcctgagctctgtgtgactgaggaggagatctccaaggaagtattgaggtagatgagtagtctaagcatattaaaccagtaaaacacttagcatatatattttcttaagaaggttactatctaaggagaagacagaataaaatactaacacaaaaagtaaataaaaatgttaagtataataataattaaagtaatatatatcacaaggcaatgatactgcaaaaactacatagatagcaattgctataacagtatagcaatgagagaaactggtttagcatgaggcggtgagaaaaggttttaatggaagtaatcttgaatcctggcccagtagggcagatcagatttgagttaataccatgctacattctgccataccaacaatggtgaacatatttctcaagaggtaaaatg

SEQ ID NO: 815205 - DNA, 4052 bp, Homo sapiens
tctagaaaactggcacaatgtaaaaaagtcacacagtttacaggaaaaattttctaagtatgaagtacataaaaggggagatttagggcttttaaatcataaatccttcccagtaggcaaaaactatgcttttcaatactcgctaacacagacctgacacccaagaccaaggcagatccattagcataatctttaggccatgaacataaacttaagagataatagcaagaaaacagactctgcccaaaacatgttcttgaaactctggtctatgtttccacatctattacttacatgactagagcacataaaaagtcagtcaaatgccatgttgctataaattattaacagcataaatgagttatttatattatactataaacctagccctttagtatattattacagcttgctctctacagaaatggtttacatattttaacctgtgtcaaatcacttgagaagtcagtgtcactttttctatcagaagtgacagagatggtgatcttcacaaaacagaaacaaaatctatttgcaacatgacaaaaggcatatcccaagttaacaccaacgtttcaaaatatgctggtgcccatttcaataactaagaactttggtaaacatggtactaagtgtgtcaatgggcaaaggaagactcaaacttactcttccatgtaaaaggttggacatcactcatcaaatctattacttactctggagcttaattacaatctagcttggtgaatacaattggatctatgtagcttccactgaaaatatttcaaaagaatttgcaaaaagaggaatccaaaacaacaaatcaaaataccttctcacagttttcactattttaatatgatttttctctaagcatcttaattttgcaatattatgtcttccccaaagtactctgtcattaagcctcatcctttacatgtcttgtagagatttatgtatgtatcattgattgatacaggacaaaaatcatttgctggtggtccatcaattcaaaaggaaattctatgacatagaccaggagtcagcaaaactatggcccacaggacacatctagctactcccattagtttacatattatgtacagctgcttttctctacaaagactgagttgagttgtcataaagacgatacagcccacaaagctgaaaatatttactatcttagcatttatagaaaaagtttgctgagccctctgctatgactcacagaaaatcagagctaaaatgagtcttagcatgtagttcagtggttcacaagtcttgcttgatacacgctagaatcacctggagcacttttaaaattacaaacatcatgctcagtcaccctgccccctaccaagagaactgacttcactggtcttagtggaccctgagtaatctgtgtttttgctttcttttgttttgttttgtttgtgatggagtctcaccctgtcaccaggctggagtgcagtggagctatctcagctccctgcaacctccatctcccgggttcaatcgattctcctgcctcagcctccccagtagctgggaggcatgtgccatcatgcctggctaatttttgaatttttagtagatacagggttttgccatgttgaccagcttggtcttcaactcctattctcaagtgatccacctgccccaggctctcaaagtgctgggattacaggcatgagccaccgcacctggctactctgtgtttttataaagattctgcatgtgctactaggatgagaacttgtgatctaatccattccttcattgcaaaaatgagattatctaaaccctggaagtaaaatgatgggcacaaagaccagtgaattttctaaacttttcaacctttttttttgtttgtttgtttttaacattctagcaatcccttagggttcttattaaacctcttctactaattcaagactctagaacatcataatggcattttctttgttagttctagtaacacactggttcagagttctttgatcagctctgacaattgcagcagtgaataacttaatcaatggactctagcattcagggacagtagcagaaatgtgattcctataaggatgtggaataatccctgcctacatgctaatcaagagttgaaatttttcatgggaaaaagatccagaagagagagattgtcaaagcttgaaggaaccttagaaaacttctcatcaaactgtttcattttacaaatgagaaaaataagaccctcaaggaggctaggacttgcccaaggccacacatggcaaggccagagtagaatgcagggctcttaccacagacactctacaggatgaaatgagaagagatggatggaaagaagtcttgagacagaggtcatgagaggaaaatataccacaaaaatttgtgaaaacagaaaaataaggatagacatgatcaagaaaccattaaaaggagaccaaaaaaaaaaattgaagaaatgactcctcccctcagattcttacagcaaaaactactttcagtacaagaaaattaggcattaggagtaatgcagaaaagccaggttccccttttctccacacatcaggcttcttgttggtcatggtacaatcagtcacttgatctttactggaacccaaaacaaacacaggcagtaaaaggacaaaggagaaacccagggagtttgtattgacagaaaactcttctcagattgcatcaatcttggaagaactttctagagcctcactaacagaaatctatccacaagccttgcagactcattgccttccctgctcaccctggtggctttcttattcttatgttattagaaacacacagttgaacagggtagacagctaatggaaacaaggatggtttatctgctgcttcacttggagaattaaagaaacagaataatattcacatgctcagaattaggcatcaggagtaaggcagaaaagccaggttccccttttctctacacatcagacttcttgttggtcattgtacaatcagtcacttgatcaacaaaacaagcagtaaaagacaaaaagtagtcttttagttgtgctcactatgtgatagacagttgtgaaacaaactgaattgtcaatggcttctttccaacaatgtgattatgagtgtgagtaatttatcaatcgctagatggcttggtatggttcattttgaagcatcaccttgtcaccctttctagatcttatttatttaatctttattttttcatacagataggaatctttagtgcttatttaagctacataatgcttaagtagctaagaataggagaaagacaagacttatgttactaaaaatggaaggcatcttatgagtacaaagaaaataaaccagcacataactttgttttggaggaaaagatgtaagataattgctttagcaataacaactataaattcatatagtatttgaggtatggagttttaaaaaattaacacttttcttttcaccccatctatagaatggtatgagaaatataattgaaatgaatagagatagatagccacaatttatgttaaaataaagagtgaattagtaatagaaataaacaatctttaaaacattgagatatcaattgaaataactggaaatcccctaacatggggtgttccaataggaattattaaattagattctgataattttactattttttaaattgcaggggtgattcacaaactattaaactatattattcataaagtgacaatgttcagatgactttttatccaacctgccaaatagggccagacacattagtaagtagaatagaagctttgtcctgtttgaatagtctcctgagaccctgggtatattttaaggagatactgaacggaaactcatgccttaaaatgtcaagcctactgaaagatattctataattatgttttatgaacatatgatggtgtcaagatgatagttggatacatcatttagagagcaggatagaggtctaaactagagacacaaatttatgattcatcaagagatggtttattttctttgtgtgtgtgtgtgtgtgtgtgtgtgtg

SEQ ID NO: 815206 - DNA, 4036 bp, Homo sapiens
attgctaacttggaggtcaggccactgaagcaggaacaaaaaagagctgttaaaaaacaaaagcccaaggctcccactgtaaatttggtcttctgaaaaacactatcaaagctatgaacatttcaataaccagaatttgagaattccaaacttttagagacatcttttctgcctatgagaaaactgcactggagaaaaaagacagcaatgcataacaaatatattttgcagagtaatatgaatttcttgagtacaagtatcaaatagcagtaaaaaatataatttagttgccttttttctggctaagtccttttgctcacctgtggtatcactccaaaggctttcctccactgttgcaaagttattgaatcccaagacacaccatcgatctggatttctccttcagtgttcagtagtctcaaaaaagctgataacaaagtactcttccctgatccagttcttcccaagaggcccacctataaggtaaaagtgatgggatcacttctgtgacatataggtaccatgccataaacataattcagtattgtacttcaataaaaaccattggaatattttatcctgtcaccagtggaagattttcacttattcattcaaaccttgttgcacactttcaatcctgaccaatgttgatatatggagacaaacaaccttggaacagaatagagaaactggccataaggaattggacccctgatgcagacttcctttatcactgacctttactaatgacaaaaagattgaaaatgcccattttgcataaaggaaaagcaaagagtgtcttcatgcacatcatctctaaacataggctcaagccagaagcagagacctgcaatttgatctagtacccaaagtggatacgacttaaaaattaatctgaaatagttctaatatttagatgttgaccctaataaattaatttggtgaagttcaagcctggcaataaacaatgatatgttcaggcagcagtatattcccagagaaggcaggttgggcgaaggccttaccactcctcagtgaatgagtactttggacagttgtcaaatcacattctgacattcacctggattggcgagaagggaatttcagaaagcaaaatgtatagtaaggaaaagaaagaaaattattcttgttacctaaagaccataagaacatagcatagacgtgagagcaccatgcactgcatgaggagatcaagtgctagaggtgacccacagagagccccaactctgtgttctgatgtcagcttagatgccagaacttgaggagggtgctttgagcaaggtagaacactactgcagtcattaactgaccactgaaaaaactggctgacagttagtggcactgaataaatggttgtttccttctccttacataatttgtttttaagtcatttggcctttatatactataactgagcaaatggtcttttagtataatgcttttcaatctgtagtgaaggacagttttgttttctttttaaatttctaattcactacatatcaatacttcaaaaatatataataaaaatgaacttctaaatattcactctcaatttctatactatgtcatcatagaaaagtaagtttgtaaaccagaaccagtgaagggaccacaataaatgttttagagtacataacaacccttaataagaataatttattgaacactatttgcaatctggtaataaactaggtctttgggataagctgataagcaataatgacacagttgaccccctatccatcgtaagaactctacaatgagattttcacaaatgtttgttctcagacaactgagaaaatcagatcaatcaaatgttaagtacaatactctgttgaatttcttcatattattaatcacaatcagtactttttttattttttcttgattattgcttttgtttgtaccaaaaatataagttcaacaaggacaggggagtctatcttgttttgcattgaattcttagcacctggcttacccaaagtgccccataaatatttatttgaattgactaagggatagccagatggaagaatggatggatttatgagcagatgaatgaacttatgtaatttagctgatctaacaaataatggatttaatcaattttgttcaattgctagataaactcctaattttaaaatattgtggaatttcaatgcacattttcatttatgaatcagctcatgttgcacaaacacattcatcatgtgtcatgatttttctaacacaatagtaaagtgttgtataagcaacttgaatatgcccagtgcaggtgaggtacaggggaataaaagaaaggaaagttcaacaggtgaaagtaatttgctataaggtcatatcaagaattttggtaagaagtgcttgaggtctaaatccttgttatcattagtcagatttctaatgaggattagataaatgtccatgttcccttttcttcagaaaaaaatactaaaatttttagagaactcagtttttaggttgggaaagactggatgaagaggcaatttgtaaatctttggtttagctttaaaggttttagctattactctggtttccttatatcattgaactgctggtaatgcatgatatctgacacatttttcaaaggcaaggaatcactggtttgtacccaacaaagtcttcttgtttatataactggcacataataattagtttccgggatttgtttttccaggcttctcagtgatctgttgaataaggctagagtacttcccgcaaataagcttttaagacataccctaaatctaagtcagtgttttctaataacttcaatgcacctcctccctgagaatgttggatcaagataaatcaaaataatatgttgaaagttaaacagtgttgaatttggtgctagctgtaattgcattgtaccatgaatagaacatttcctttcagggtgtcttactcgccattttaatactgcaacagatggaagactcttgtaattatttttcattaccttgtggtctccagaaatcaagatgacaagtcaactgaaatttagatccacaaggtgattataattgaatcttttatgtgttcatatatctctattaattattaatgaaacatagtattgagaatatgctgcttatacccactgaatgattcaactactttacaccaatgtttatcaagatagaaaatgggatatgtgtttaacaaagcaaacaagtatttaggtgtttgtgctgatatgatttgaatccttgatattcttataaattatttctgaaatttctgtattttcaagagactacaaatggagaaagcagttaagttcatccaaaagtatagaccttaaagtactatcaaatatctatttaatcagaggactatccagtactgtgatatatacaatataccatatgaggaattttgattaagtccagatttatcatgaagaatctgactccaaattaagttcccagtaggcattttgagaggaaaaagaaaagacaaaaaggatgagatattctagttgtgggaaggtgctctggctattacaatttagataaaaagtcaaaaggttttaagaaaaaactatttgagattaaaaagaaaaatggattttaaaagtaaaggttgtgaaatagctgctacatttttcatgcattgaaaataaaaacttgtaaagtataggttctttaaattaaaggtctcagttaagagcaaagaaagtaataccacatctttttcataaagtaattgctatggacaaagtgttttcacatgaagactgaataatttttctgcacagaatatttattcttttcacctcttcaccataaccaacaacatagaaatccattaaaaattaaacgagatgcccacttaagtcctaaatttcaactgcttttttcccccccaagaagggcagcctaaagctgagctggcagtgttttgggatatccaaaaatattactagtatactaaatttgagttgacttcttaattcagcacataagaagtatgtttggagcatcttgtg

SEQ ID NO: 815207 - DNA, 4025 bp, Homo sapiens
gagcagaatgaactattgggggtcaatgagggaaatgagccaggaacctcagaaatttgtgcaagtgttaatagtggtgtcaggtggaaatgaagaaaagtgaatatatttcagatactccccagggacagcattgacaggatgtgacatgtgggtacccgtggaggaacttgagagtgaaagatgagtcccaggtcttggccttgggaaactggaggatgggatgccattcagtggaattaggaacacaggacaggtatgtggtggggcagggaaggaactcacttattgacataaggtgcttttcatgtgctgagatatcaggtggaaagctctgggaataggcagataatggaggtcatcaaaatagagatattaattaaagccaaaaggacacatgaaatttcccagggaaactaagtaaagtgagacaagaactaggattctgtcagacaccatttaaaggatgaccaagtgaagtccagattaaaaaaacatgattatagttacttttacttagtacccatatttgccaggcactgcgctgggcccattttacatgtaaacttgaaaagtcacaacaatcctaccaatttattgggccacaatgccagaagtcttttttttttctcttgggattcagtttcttttgaaattctctttggtctacacagctggtaatttcagtttggcaccaatcttggagagaagctgtctgggcctaagctgttttgggataggtaaattaaactatccaagttctagattttagaaactctcttcccttcccttggacttgctttaaattcctccatcaaatgataggcagactgccatggtaaaggtgtggacccaggaaataaggaaaaaggaggctctctggaccagcttttgttctaagccttccagctagtaactaggtacaagtcatggcttcatgagatacagtccagatcagcaaggataagattctacactggacatggaagccaagtccaagctagaaataaagcatttcttggcctggaattatcactgtatatatttttaatttccatttgggataatggggaattatgtaggaggtgctgttgggataagattcaggtgtctggctatttgtcattactctgttcatttacctctagagatactagtcatggcaaggacaaagagaggactcagtgagatgacatacatcctggtttgccccggaaagtcctgctttgcacttttgtcataatgtcctgtccagtttagtgtttgacacacccaaaaatgtcctgtttggacaaattgtattatcagctgtattagactaaagcctaggccttgtgactttgaaacccaaatgccttttctgcttctctaggctgatacttgcttgtttgtttgtatgctgctagcaggcttactcatcaaaaacctatcactactaatcaaaaaagcacactactactcaacaaaaacttagcactactactcaaagcactcatgacattaaagttagactaacatcatcatctttgtgaatggtaaattataaaaaaggagaacagtaaaagtatatacctaaatatgaactgatgaaataaaaacctaaacaggtaaaaattttgcattgtattagtatttaaaatcataaccacaggttctaagattttagattatatttatgatcctgctttcctgtaaattttattttgatttggcaatacttgcagattttataaaggctaatgtcttccctcccaagtttccctcccattgcattgtgttcctatagtgcattctctgaagtcatatcaaagatcttaaaatgtgtcacttgcaatttagttaatgttttctttaaagcgcctgtgtttgttgggtaataaggaaactttgataatgaaaacggttaatctaagtacattttattaggggcatgttaaggttgggcactcaatgggtaagtgtttaacactcacaggcatttcaaagctcctggcagggtccactgtgaaggaaggcagaaaagggaagaacatttgggataaacagaaattgggctaaaaggaccaaaagcgctaatagtggaatacagttgttctctaagaagacctttgaggctcaacattttaggtcccctgatcctattctgccacaatccagacctttggacttaagtttaataaaacaaaataatttatgttcccttttctttaatataatgcttattttttaaaattataagtttatagctagagtattctgttaaagaaacccagaatttcgagaatttctccagctctcctccccatcaaattcctctgtataatgctctcaagtataatgaaccacctgttggataaacataaggtgttatttagaaaattttattccattttagttaatatatttcctatataatgtcctaatggcttcaaaggatggcatatgcctcatctaggtcatatggcattttgcccggcagtgctcacagccacatacccaaaggcagacgattcctggcgacttcgaaagaaaactattgtcatttgcaggtgttctagaatgagcatcactgttttatgctaaacctgtttcccagagaagtatatcaagtcaaaccaaagcctccttcttgtagtggagagcttcagaactcagatagggagtagatgagaaggtgtggagagatgataatttatactgggaataatcccagtatagtggagtcgcctaggtctcttctaattcatgtttcattgacgcaaattgattaggaaaggacaaagtagtgctacctatagggtttgctataaactgaaagcttctgtccccctgccaaagtcatatgttgaaatcctaacttcaaagatgctggtattaggaggtggggcctttgggaggtgatttaggtcatgagggctctaccctaaacccatgatttggattactgcccttataaaagacatcccagagagctagcctgcccactcttctgccatgtaacaacacagtgagaacacagccatctgtgaggaagaaggccttcaccagacacaaaatctgctggcaccagattttgaacttcccagcctccacaactgtgaaaaataaattttactgttgtttataagacatcgtgtagtagccccaatggactaagacagaatattggtactgggatctgggtactgctgtaacaaatactcaatgtggaagcagctttggaacaaggtaatgagtagaggctggaagagttttcaggtacatgctagaaaaagcctacattgctgtgaatggacaattaaaggccattctggtgagggctccagagaggaggagagctatagagaaagctactatcttcttaccgaatacctaagtggtcatgagcagaatgttcccagaaatatggacggtaaaggccaatctgatgggttttcagatggaaatgaggaacatgttattggacaatggaggaaaagctatccttcttataaaatgtcaaagaacttggctgagctgtttgtgtcctagtgttttgtggaaggcagaacttgaaagcaatgaaattgaatgtttgactgaggaaatatccaagcaaagttgaaggagcagcttagttactcttgactgctcatagtaaaattcaagatgagaaatgactttaaaatggaattattgatcaaaagggaagcagaacttcaaaatttggaaaattctcagcctatccatattgtgaaagatgagaaagcctgctcaggagagaatacaaagggtgtggccaaatttgataagtaaattactatggactagccatctcaacagaaactaggtgctatgcattcagacagtggggatattagtcagccacctaaacagaagccagaatttatagtccaagacaatggaagaatgactccaaagccatttggagatcttccaagctgcctttcccatcatagttcagagtgcagaggcctggggtagggaagaaagatttcaaaggaggggctacaactgccccgtgc

SEQ ID NO: 815208 - DNA, 4052 bp, Homo sapiens
cctgaacagaaatgacgtgatacatcatcctcagaacttccttgtgactaaaccatagggaatttgtaaacatcacttgaaagaagctgtgacagttttgttttgttttaataaagacagatggggcctcactatgttgcctgggctggtcttgaattcctggcctcaagtaatccccccacctcagcctcccaaagtattgggattacagatgtaagccactgtgcctggccatgtgacagtttttttaagaacagtgagaaggtggttgagaaaggtactacctgaacccaaatcatggctagaaaaatgaaatgtgcctctcaactttgtcattaataccataaatcagactgtaagacaactaggcctgtcccagaccacatccatgggacatttagttattgaaagaatcacagggaccttttttaaaatcttaaacagtagagtattttgtatgacttggtccccaaataaagggctcaaaaagtatatatatcctatttataaacataacttagtaatatgctgccattttagatttactatatttcaacctcaccacatggctcagatcaaagtgaaaaacttgtgcagctattttgagtaaagctggatggctgtatgatacatatttttgaaaagaacttgtacattgttgcaatttgcaggaactatcacatgtgagattgttatcaagaattacaagggcaatgagatcttaagtaaagttataaagactcaccaaaaattgttggcattccagcattgcttctatcctgtgttcacagagaattactgtgcaatcagcaaatgcttgttttagagttcttctaattatttggtatgttctagaaaagaaagaaaataccacacataatatcacagaacagtaatgatctgtatttaccttgataatatgtctattgttctattatctctttaaattacttatttctttaagttcttttcacataatgttgatatagcgttagccacaatcagcttttcaaccatggggtagactctaagtatccataaataaacaggacaaatatttcaaagaaactttaataaatgagtacatttttcattatgtagaatcaccagtacttctttatttggggctataaacatgcttatggtataaatgggatacaaaggcaaatcataaggatcagattaggcccatgtatttaaaagcttcatcatgtgttgacaagggggaagagtttgtatgaaactaaaaactatcttcggaagaaaacacaagactcttagcaaggaaatatgcatttatgctcatttccactgggcaattatttcatatcttgggggagacccccacacgcagacatgacagcctaatagaaatatgtgtcaccatgaagcaggcataatgattctgttcccactgtgctattaagtaacagaacatctgaaactcacactggatccaaatgagcactgggttcatcaagcagcaagatcttcgccttactgagaacagatctagccaagcacatcaactgcttgtggccatggcttaggacacagcccccatccacaaggacaaagtcaagcttcccaggaaactgttctatcacagatctgagcccaacctgcagttagagaagatagttcagataccacagagttaaaaacactcaagcagttgacattctaaaaataaacacaggagttctgaaagcttatgtttttcataccaatccctctacccccactacctgccaccatttgaattgattgagcaaaagtctatttacaaccttgacagctcaaaagaatcagtctataacttgttttatctttgtacttcattcattaggaaactttcaatgagtgtctattacgtgccaggtatcccaaaaagtagtaagaaaacaatacgtggcacatggctcttgtgaggctcagcgtttataaaggtgtacataaattattccaacacaactgaatgcatgctggaaaagataatatgtatacattgcagatatgccctctagtatgacatcttatgtagacagaagatagaatgtagcataaaggatggaggtatgacatcatccttggtgctacctcccatcttctactctgtcatgactgaggacaaaagatagcataaaatagtcaactgtggggttttttaaattacatatggaaaattgctattcatctcttgaattcataaaaactaactgtaacaaataggtaaaactatgaagtaaaaaatactggagttaaaatagtggtacaacactaggagatataaagcctcttagatattggggtagaatatgagggctgtattagagtcaaaggctttttttttaaagctagacagtaaaagtaaagtttgaaaatgcaaatgagatatagaaacccattctataaaaatatgacaaagttattgaagtattggatcttatcaattattcaaataaatgtgcattaaatgtttatttttggcaagtactcctgagtgtatgaaggccaaagagatatacagatgattgtctcctgcccttgagaagtctagaatttagtatgaggaggtaagatgggctccacctgactgtaatatagaatgagataatggctcagaaagaatcttatgatttcagagataaattcagaaatggcccataacactgtgtttgttcacaaaaaattaactgtgtgcccatcacacgaccaggagattttaagcctctttgatattggggtagaatatgaaagttgtgttaggaccaatggcttgttttttttttttttttttagctggacaagaaacaaacaagcaaaaaacatttgaaagtatattgcagatgatactcctttccttggttggtttctcattaaagtaatctcaccttgtagaaattcattaaagtttgagaagggtttctggtatggcaggaaatgtaaacacatttattagacaagggggactactctgatgtatccccgaagactcaaacataaaacttagaaatacaagtgctgagaatatgaataaagggcactgggcagggagttagaggacctgtgtctttctttgtgccttcaacttttttattgtttcagtctatgaagctgctatggtctatcttttttaaaaaacaaaaacaaaatccctcccttgtttctgggttctcctttagctatcattcaacatctgcccatttagtcatctagaaatctcaagaaattaatgtgtatctgtcatctctactgcttcccaccacaagaattttcctttcttaaaacatctattccttggcttgagagaaaccacacactctatggccatttcttcctattgtcatgtgtgaacaactctccctcttcctgcccccttgaatattagtctttgtcatttccaactctccagactctcctctgagatcccagtcattttcagggtattgatgaccacctataagttaataattttcaaatgtttatctccatccctagaattcttccaactactttttaaatcattctcctccttaccaactctattatagtgatcccagtctgggtcatcatcatctcttaagaatcatcctacaaatctcaattagtcaaattgcaagtccaccatacaaacaccccagggatcttcctaagatgtaggtttgaccatatcatttctgttttaaatcctatggtagttctcctcctggtggaataaaatctaagatctctcacctggtgtatgaggcatccaaatggagcccccttcactcttattcccagcagaaccaaacatcttgtagttccctaaacaccttgatgctctcaagtgatgccattgctgagcctgacatatccttctgaatatccctgatcatctcttaagccattcaaccaggcacctagtgatagtagtatttgtgcaagttccctcgttagactgtaagcttcttgagggtaaaaacgtgctcttcagctctgtgttcctaatgccagtcctgggtaactgtcaacctcaacaattcattcatttatcaaatatgtactga

SEQ ID NO: 815209 - DNA, 15 bp, Homo sapiens
taggacccaaagtaa

SEQ ID NO: 815210 - DNA, 15 bp, Homo sapiens
ctaggacccaaagta

SEQ ID NO: 815211 - DNA, 15 bp, Homo sapiens
actaggacccaaagt

SEQ ID NO: 815212 - DNA, 15 bp, Homo sapiens
cactaggacccaaag

SEQ ID NO: 815213 - DNA, 15 bp, Homo sapiens
tcactaggacccaaa

SEQ ID NO: 815214 - DNA, 15 bp, Homo sapiens
atcactaggacccaa

SEQ ID NO: 815215 - DNA, 15 bp, Homo sapiens
catcactaggaccca

SEQ ID NO: 815216 - DNA, 15 bp, Homo sapiens
ccatcactaggaccc

SEQ ID NO: 815217 - DNA, 15 bp, Homo sapiens
accatcactaggacc

SEQ ID NO: 815218 - DNA, 15 bp, Homo sapiens
taccatcactaggac

SEQ ID NO: 815219 - DNA, 15 bp, Homo sapiens
ataccatcactagga

SEQ ID NO: 815220 - DNA, 15 bp, Homo sapiens
gataccatcactagg

SEQ ID NO: 815221 - DNA, 15 bp, Homo sapiens
agataccatcactag

SEQ ID NO: 815222 - DNA, 15 bp, Homo sapiens
cagataccatcacta

SEQ ID NO: 815223 - DNA, 15 bp, Homo sapiens
tcagataccatcact

SEQ ID NO: 815224 - DNA, 15 bp, Homo sapiens
ttcagataccatcac

SEQ ID NO: 815225 - DNA, 15 bp, Homo sapiens
gttcagataccatca

SEQ ID NO: 815226 - DNA, 15 bp, Homo sapiens
tgttcagataccatc

SEQ ID NO: 815227 - DNA, 15 bp, Homo sapiens
ttgttcagataccat

SEQ ID NO: 815228 - DNA, 15 bp, Homo sapiens
cttgttcagatacca

SEQ ID NO: 815229 - DNA, 15 bp, Homo sapiens
gcttgttcagatacc

SEQ ID NO: 815230 - DNA, 15 bp, Homo sapiens
agcttgttcagatac

SEQ ID NO: 815231 - DNA, 15 bp, Homo sapiens
tagcttgttcagata

SEQ ID NO: 815232 - DNA, 15 bp, Homo sapiens
ctagcttgttcagat

SEQ ID NO: 815233 - DNA, 15 bp, Homo sapiens
cctagcttgttcaga

SEQ ID NO: 815234 - DNA, 15 bp, Homo sapiens
acctagcttgttcag

SEQ ID NO: 815235 - DNA, 15 bp, Homo sapiens
cacctagcttgttca

SEQ ID NO: 815236 - DNA, 15 bp, Homo sapiens
tcacctagcttgttc

SEQ ID NO: 815237 - DNA, 15 bp, Homo sapiens
ttcacctagcttgtt

SEQ ID NO: 815238 - DNA, 15 bp, Homo sapiens
gttcacctagcttgt

SEQ ID NO: 815239 - DNA, 15 bp, Homo sapiens
tgttcacctagcttg

SEQ ID NO: 815240 - DNA, 15 bp, Homo sapiens
ttgttcacctagctt

SEQ ID NO: 815241 - DNA, 15 bp, Homo sapiens
tttgttcacctagct

SEQ ID NO: 815242 - DNA, 15 bp, Homo sapiens
ctttgttcacctagc

SEQ ID NO: 815243 - DNA, 15 bp, Homo sapiens
tctttgttcacctag

SEQ ID NO: 815244 - DNA, 15 bp, Homo sapiens
ctctttgttcaccta

SEQ ID NO: 815245 - DNA, 15 bp, Homo sapiens
gctctttgttcacct

SEQ ID NO: 815246 - DNA, 15 bp, Homo sapiens
ggctctttgttcacc

SEQ ID NO: 815247 - DNA, 15 bp, Homo sapiens
aggctctttgttcac

SEQ ID NO: 815248 - DNA, 15 bp, Homo sapiens
gaggctctttgttca

SEQ ID NO: 815249 - DNA, 15 bp, Homo sapiens
tgaggctctttgttc

SEQ ID NO: 815250 - DNA, 15 bp, Homo sapiens
ttgaggctctttgtt

SEQ ID NO: 815251 - DNA, 15 bp, Homo sapiens
attgaggctctttgt

SEQ ID NO: 815252 - DNA, 15 bp, Homo sapiens
tattgaggctctttg

SEQ ID NO: 815253 - DNA, 15 bp, Homo sapiens
ttattgaggctcttt

SEQ ID NO: 815254 - DNA, 15 bp, Homo sapiens
cttattgaggctctt

SEQ ID NO: 815255 - DNA, 15 bp, Homo sapiens
ccttattgaggctct

SEQ ID NO: 815256 - DNA, 15 bp, Homo sapiens
cccttattgaggctc

SEQ ID NO: 815257 - DNA, 15 bp, Homo sapiens
tcccttattgaggct

SEQ ID NO: 815258 - DNA, 15 bp, Homo sapiens
atcccttattgaggc

SEQ ID NO: 815259 - DNA, 15 bp, Homo sapiens
aatcccttattgagg

SEQ ID NO: 815260 - DNA, 15 bp, Homo sapiens
aaatcccttattgag

SEQ ID NO: 815261 - DNA, 15 bp, Homo sapiens
aaaatcccttattga

SEQ ID NO: 815262 - DNA, 15 bp, Homo sapiens
caaaatcccttattg

SEQ ID NO: 815263 - DNA, 15 bp, Homo sapiens
tcaaaatcccttatt

SEQ ID NO: 815264 - DNA, 15 bp, Homo sapiens
ctcaaaatcccttat

SEQ ID NO: 815265 - DNA, 15 bp, Homo sapiens
cctcaaaatccctta

SEQ ID NO: 815266 - DNA, 15 bp, Homo sapiens
acctcaaaatccctt

SEQ ID NO: 815267 - DNA, 15 bp, Homo sapiens
gacctcaaaatccct

SEQ ID NO: 815268 - DNA, 15 bp, Homo sapiens
agacctcaaaatccc

SEQ ID NO: 815269 - DNA, 15 bp, Homo sapiens
tagacctcaaaatcc

SEQ ID NO: 815270 - DNA, 15 bp, Homo sapiens
ctagacctcaaaatc

SEQ ID NO: 815271 - DNA, 15 bp, Homo sapiens
tctagacctcaaaat

SEQ ID NO: 815272 - DNA, 15 bp, Homo sapiens
ttctagacctcaaaa

SEQ ID NO: 815273 - DNA, 15 bp, Homo sapiens
tttctagacctcaaa

SEQ ID NO: 815274 - DNA, 15 bp, Homo sapiens
ttttctagacctcaa

SEQ ID NO: 815275 - DNA, 15 bp, Homo sapiens
tttttctagacctca

SEQ ID NO: 815276 - DNA, 15 bp, Homo sapiens
ctttttctagacctc

SEQ ID NO: 815277 - DNA, 15 bp, Homo sapiens
tctttttctagacct

SEQ ID NO: 815278 - DNA, 15 bp, Homo sapiens
ctctttttctagacc

SEQ ID NO: 815279 - DNA, 15 bp, Homo sapiens
tctctttttctagac

SEQ ID NO: 815280 - DNA, 15 bp, Homo sapiens
ctctctttttctaga

SEQ ID NO: 815281 - DNA, 15 bp, Homo sapiens
cctctctttttctag

SEQ ID NO: 815282 - DNA, 15 bp, Homo sapiens
tcctctctttttcta

SEQ ID NO: 815283 - DNA, 15 bp, Homo sapiens
ttcctctctttttct

SEQ ID NO: 815284 - DNA, 15 bp, Homo sapiens
tttcctctctttttc

SEQ ID NO: 815285 - DNA, 15 bp, Homo sapiens
atttcctctcttttt

SEQ ID NO: 815286 - DNA, 15 bp, Homo sapiens
tatttcctctctttt

SEQ ID NO: 815287 - DNA, 15 bp, Homo sapiens
gtatttcctctcttt

SEQ ID NO: 815288 - DNA, 15 bp, Homo sapiens
ggtatttcctctctt

SEQ ID NO: 815289 - DNA, 15 bp, Homo sapiens
tggtatttcctctct

SEQ ID NO: 815290 - DNA, 15 bp, Homo sapiens
ttggtatttcctctc

SEQ ID NO: 815291 - DNA, 15 bp, Homo sapiens
tttggtatttcctct

SEQ ID NO: 815292 - DNA, 15 bp, Homo sapiens
atttggtatttcctc

SEQ ID NO: 815293 - DNA, 15 bp, Homo sapiens
tatttggtatttcct

SEQ ID NO: 815294 - DNA, 15 bp, Homo sapiens
ttatttggtatttcc

SEQ ID NO: 815295 - DNA, 15 bp, Homo sapiens
tttatttggtatttc

SEQ ID NO: 815296 - DNA, 15 bp, Homo sapiens
atttatttggtattt

SEQ ID NO: 815297 - DNA, 15 bp, Homo sapiens
catttatttggtatt

SEQ ID NO: 815298 - DNA, 15 bp, Homo sapiens
ccatttatttggtat

SEQ ID NO: 815299 - DNA, 15 bp, Homo sapiens
tccatttatttggta

SEQ ID NO: 815300 - DNA, 15 bp, Homo sapiens
ttccatttatttggt

SEQ ID NO: 815301 - DNA, 15 bp, Homo sapiens
attccatttatttgg

SEQ ID NO: 815302 - DNA, 15 bp, Homo sapiens
tattccatttatttg

SEQ ID NO: 815303 - DNA, 15 bp, Homo sapiens
ttattccatttattt

SEQ ID NO: 815304 - DNA, 15 bp, Homo sapiens
attattccatttatt

SEQ ID NO: 815305 - DNA, 15 bp, Homo sapiens
aattattccatttat

SEQ ID NO: 815306 - DNA, 15 bp, Homo sapiens
taattattccattta

SEQ ID NO: 815307 - DNA, 15 bp, Homo sapiens
ataattattccattt

SEQ ID NO: 815308 - DNA, 15 bp, Homo sapiens
tataattattccatt

SEQ ID NO: 815309 - DNA, 15 bp, Homo sapiens
ttataattattccat

SEQ ID NO: 815310 - DNA, 15 bp, Homo sapiens
tttataattattcca

SEQ ID NO: 815311 - DNA, 15 bp, Homo sapiens
ttttataattattcc

SEQ ID NO: 815312 - DNA, 15 bp, Homo sapiens
attttataattattc

SEQ ID NO: 815313 - DNA, 15 bp, Homo sapiens
tattttataattatt

SEQ ID NO: 815314 - DNA, 15 bp, Homo sapiens
ttattttataattat

SEQ ID NO: 815315 - DNA, 15 bp, Homo sapiens
tttattttataatta

SEQ ID NO: 815316 - DNA, 15 bp, Homo sapiens
atttattttataatt

SEQ ID NO: 815317 - DNA, 15 bp, Homo sapiens
tatttattttataat

SEQ ID NO: 815318 - DNA, 15 bp, Homo sapiens
gtatttattttataa

SEQ ID NO: 815319 - DNA, 15 bp, Homo sapiens
ggtatttattttata

SEQ ID NO: 815320 - DNA, 15 bp, Homo sapiens
tggtatttattttat

SEQ ID NO: 815321 - DNA, 15 bp, Homo sapiens
ctggtatttatttta

SEQ ID NO: 815322 - DNA, 15 bp, Homo sapiens
gctggtatttatttt

SEQ ID NO: 815323 - DNA, 15 bp, Homo sapiens
tgctggtatttattt

SEQ ID NO: 815324 - DNA, 15 bp, Homo sapiens
ttgctggtatttatt

SEQ ID NO: 815325 - DNA, 15 bp, Homo sapiens
tttgctggtatttat

SEQ ID NO: 815326 - DNA, 15 bp, Homo sapiens
ctttgctggtattta

SEQ ID NO: 815327 - DNA, 15 bp, Homo sapiens
actttgctggtattt

SEQ ID NO: 815328 - DNA, 15 bp, Homo sapiens
aactttgctggtatt

SEQ ID NO: 815329 - DNA, 15 bp, Homo sapiens
taactttgctggtat

SEQ ID NO: 815330 - DNA, 15 bp, Homo sapiens
ttaactttgctggta

SEQ ID NO: 815331 - DNA, 15 bp, Homo sapiens
tttaactttgctggt

SEQ ID NO: 815332 - DNA, 15 bp, Homo sapiens
atttaactttgctgg

SEQ ID NO: 815333 - DNA, 15 bp, Homo sapiens
gatttaactttgctg

SEQ ID NO: 815334 - DNA, 15 bp, Homo sapiens
tgatttaactttgct

SEQ ID NO: 815335 - DNA, 15 bp, Homo sapiens
ttgatttaactttgc

SEQ ID NO: 815336 - DNA, 15 bp, Homo sapiens
attgatttaactttg

SEQ ID NO: 815337 - DNA, 15 bp, Homo sapiens
tattgatttaacttt

SEQ ID NO: 815338 - DNA, 15 bp, Homo sapiens
atattgatttaactt

SEQ ID NO: 815339 - DNA, 15 bp, Homo sapiens
tatattgatttaact

SEQ ID NO: 815340 - DNA, 15 bp, Homo sapiens
atatattgatttaac

SEQ ID NO: 815341 - DNA, 15 bp, Homo sapiens
gatatattgatttaa

SEQ ID NO: 815342 - DNA, 15 bp, Homo sapiens
tgatatattgattta

SEQ ID NO: 815343 - DNA, 15 bp, Homo sapiens
atgatatattgattt

SEQ ID NO: 815344 - DNA, 15 bp, Homo sapiens
catgatatattgatt

SEQ ID NO: 815345 - DNA, 15 bp, Homo sapiens
acatgatatattgat

SEQ ID NO: 815346 - DNA, 15 bp, Homo sapiens
cacatgatatattga

SEQ ID NO: 815347 - DNA, 15 bp, Homo sapiens
ccacatgatatattg

SEQ ID NO: 815348 - DNA, 15 bp, Homo sapiens
cccacatgatatatt

SEQ ID NO: 815349 - DNA, 15 bp, Homo sapiens
tcccacatgatatat

SEQ ID NO: 815350 - DNA, 15 bp, Homo sapiens
ctcccacatgatata

SEQ ID NO: 815351 - DNA, 15 bp, Homo sapiens
tctcccacatgatat

SEQ ID NO: 815352 - DNA, 15 bp, Homo sapiens
atctcccacatgata

SEQ ID NO: 815353 - DNA, 15 bp, Homo sapiens
tatctcccacatgat

SEQ ID NO: 815354 - DNA, 15 bp, Homo sapiens
atatctcccacatga

SEQ ID NO: 815355 - DNA, 15 bp, Homo sapiens
gatatctcccacatg

SEQ ID NO: 815356 - DNA, 15 bp, Homo sapiens
ggatatctcccacat

SEQ ID NO: 815357 - DNA, 15 bp, Homo sapiens
aggatatctcccaca

SEQ ID NO: 815358 - DNA, 15 bp, Homo sapiens
aaggatatctcccac

SEQ ID NO: 815359 - DNA, 15 bp, Homo sapiens
taaggatatctccca

SEQ ID NO: 815360 - DNA, 15 bp, Homo sapiens
ataaggatatctccc

SEQ ID NO: 815361 - DNA, 15 bp, Homo sapiens
tataaggatatctcc

SEQ ID NO: 815362 - DNA, 15 bp, Homo sapiens
atataaggatatctc

SEQ ID NO: 815363 - DNA, 15 bp, Homo sapiens
gatataaggatatct

SEQ ID NO: 815364 - DNA, 15 bp, Homo sapiens
tgatataaggatatc

SEQ ID NO: 815365 - DNA, 15 bp, Homo sapiens
gtgatataaggatat

SEQ ID NO: 815366 - DNA, 15 bp, Homo sapiens
agtgatataaggata

SEQ ID NO: 815367 - DNA, 15 bp, Homo sapiens
gagtgatataaggat

SEQ ID NO: 815368 - DNA, 15 bp, Homo sapiens
tgagtgatataagga

SEQ ID NO: 815369 - DNA, 15 bp, Homo sapiens
atgagtgatataagg

SEQ ID NO: 815370 - DNA, 15 bp, Homo sapiens
catgagtgatataag

SEQ ID NO: 815371 - DNA, 15 bp, Homo sapiens
acatgagtgatataa

SEQ ID NO: 815372 - DNA, 15 bp, Homo sapiens
cacatgagtgatata

SEQ ID NO: 815373 - DNA, 15 bp, Homo sapiens
tcacatgagtgatat

SEQ ID NO: 815374 - DNA, 15 bp, Homo sapiens
atcacatgagtgata

SEQ ID NO: 815375 - DNA, 15 bp, Homo sapiens
aatcacatgagtgat

SEQ ID NO: 815376 - DNA, 15 bp, Homo sapiens
aaatcacatgagtga

SEQ ID NO: 815377 - DNA, 15 bp, Homo sapiens
gaaatcacatgagtg

SEQ ID NO: 815378 - DNA, 15 bp, Homo sapiens
agaaatcacatgagt

SEQ ID NO: 815379 - DNA, 15 bp, Homo sapiens
tagaaatcacatgag

SEQ ID NO: 815380 - DNA, 15 bp, Homo sapiens
atagaaatcacatga

SEQ ID NO: 815381 - DNA, 15 bp, Homo sapiens
aatagaaatcacatg

SEQ ID NO: 815382 - DNA, 15 bp, Homo sapiens
aaatagaaatcacat

SEQ ID NO: 815383 - DNA, 15 bp, Homo sapiens
aaaatagaaatcaca

SEQ ID NO: 815384 - DNA, 15 bp, Homo sapiens
caaaatagaaatcac

SEQ ID NO: 815385 - DNA, 15 bp, Homo sapiens
acaaaatagaaatca

SEQ ID NO: 815386 - DNA, 15 bp, Homo sapiens
aacaaaatagaaatc

SEQ ID NO: 815387 - DNA, 15 bp, Homo sapiens
gaacaaaatagaaat

SEQ ID NO: 815388 - DNA, 15 bp, Homo sapiens
ggaacaaaatagaaa

SEQ ID NO: 815389 - DNA, 15 bp, Homo sapiens
aggaacaaaatagaa

SEQ ID NO: 815390 - DNA, 15 bp, Homo sapiens
taggaacaaaataga

SEQ ID NO: 815391 - DNA, 15 bp, Homo sapiens
ataggaacaaaatag

SEQ ID NO: 815392 - DNA, 15 bp, Homo sapiens
tataggaacaaaata

SEQ ID NO: 815393 - DNA, 15 bp, Homo sapiens
atataggaacaaaat

SEQ ID NO: 815394 - DNA, 15 bp, Homo sapiens
aatataggaacaaaa

SEQ ID NO: 815395 - DNA, 15 bp, Homo sapiens
taatataggaacaaa

SEQ ID NO: 815396 - DNA, 15 bp, Homo sapiens
ctaatataggaacaa

SEQ ID NO: 815397 - DNA, 15 bp, Homo sapiens
cctaatataggaaca

SEQ ID NO: 815398 - DNA, 15 bp, Homo sapiens
gcctaatataggaac

SEQ ID NO: 815399 - DNA, 15 bp, Homo sapiens
ggcctaatataggaa

SEQ ID NO: 815400 - DNA, 15 bp, Homo sapiens
tggcctaatatagga

SEQ ID NO: 815401 - DNA, 15 bp, Homo sapiens
ttggcctaatatagg

SEQ ID NO: 815402 - DNA, 15 bp, Homo sapiens
cttggcctaatatag

SEQ ID NO: 815403 - DNA, 15 bp, Homo sapiens
ccttggcctaatata

SEQ ID NO: 815404 - DNA, 15 bp, Homo sapiens
tccttggcctaatat

SEQ ID NO: 815405 - DNA, 15 bp, Homo sapiens
ctccttggcctaata

SEQ ID NO: 815406 - DNA, 15 bp, Homo sapiens
tctccttggcctaat

SEQ ID NO: 815407 - DNA, 15 bp, Homo sapiens
ctctccttggcctaa

SEQ ID NO: 815408 - DNA, 15 bp, Homo sapiens
cctctccttggccta

SEQ ID NO: 815409 - DNA, 15 bp, Homo sapiens
acctctccttggcct

SEQ ID NO: 815410 - DNA, 15 bp, Homo sapiens
cacctctccttggcc

SEQ ID NO: 815411 - DNA, 15 bp, Homo sapiens
ccacctctccttggc

SEQ ID NO: 815412 - DNA, 15 bp, Homo sapiens
tccacctctccttgg

SEQ ID NO: 815413 - DNA, 15 bp, Homo sapiens
ttccacctctccttg

SEQ ID NO: 815414 - DNA, 15 bp, Homo sapiens
gttccacctctcctt

SEQ ID NO: 815415 - DNA, 15 bp, Homo sapiens
agttccacctctcct

SEQ ID NO: 815416 - DNA, 15 bp, Homo sapiens
aagttccacctctcc

SEQ ID NO: 815417 - DNA, 15 bp, Homo sapiens
caagttccacctctc

SEQ ID NO: 815418 - DNA, 15 bp, Homo sapiens
acaagttccacctct

SEQ ID NO: 815419 - DNA, 15 bp, Homo sapiens
aacaagttccacctc

SEQ ID NO: 815420 - DNA, 15 bp, Homo sapiens
aaacaagttccacct

SEQ ID NO: 815421 - DNA, 15 bp, Homo sapiens
aaaacaagttccacc

SEQ ID NO: 815422 - DNA, 15 bp, Homo sapiens
gaaaacaagttccac

SEQ ID NO: 815423 - DNA, 15 bp, Homo sapiens
ggaaaacaagttcca

SEQ ID NO: 815424 - DNA, 15 bp, Homo sapiens
aggaaaacaagttcc

SEQ ID NO: 815425 - DNA, 15 bp, Homo sapiens
aaggaaaacaagttc

SEQ ID NO: 815426 - DNA, 15 bp, Homo sapiens
aaaggaaaacaagtt

SEQ ID NO: 815427 - DNA, 15 bp, Homo sapiens
aaaaggaaaacaagt

SEQ ID NO: 815428 - DNA, 15 bp, Homo sapiens
aaaaaggaaaacaag

SEQ ID NO: 815429 - DNA, 15 bp, Homo sapiens
gaaaaaggaaaacaa

SEQ ID NO: 815430 - DNA, 15 bp, Homo sapiens
ggaaaaaggaaaaca

SEQ ID NO: 815431 - DNA, 15 bp, Homo sapiens
gggaaaaaggaaaac

SEQ ID NO: 815432 - DNA, 15 bp, Homo sapiens
agggaaaaaggaaaa

SEQ ID NO: 815433 - DNA, 15 bp, Homo sapiens
gagggaaaaaggaaa

SEQ ID NO: 815434 - DNA, 15 bp, Homo sapiens
agagggaaaaaggaa

SEQ ID NO: 815435 - DNA, 15 bp, Homo sapiens
gagagggaaaaagga

SEQ ID NO: 815436 - DNA, 15 bp, Homo sapiens
tgagagggaaaaagg

SEQ ID NO: 815437 - DNA, 15 bp, Homo sapiens
ctgagagggaaaaag

SEQ ID NO: 815438 - DNA, 15 bp, Homo sapiens
gctgagagggaaaaa

SEQ ID NO: 815439 - DNA, 15 bp, Homo sapiens
agctgagagggaaaa

SEQ ID NO: 815440 - DNA, 15 bp, Homo sapiens
tagctgagagggaaa

SEQ ID NO: 815441 - DNA, 15 bp, Homo sapiens
gtagctgagagggaa

SEQ ID NO: 815442 - DNA, 15 bp, Homo sapiens
cgtagctgagaggga

SEQ ID NO: 815443 - DNA, 15 bp, Homo sapiens
tcgtagctgagaggg

SEQ ID NO: 815444 - DNA, 15 bp, Homo sapiens
ttcgtagctgagagg

SEQ ID NO: 815445 - DNA, 15 bp, Homo sapiens
attcgtagctgagag

SEQ ID NO: 815446 - DNA, 15 bp, Homo sapiens
cattcgtagctgaga

SEQ ID NO: 815447 - DNA, 15 bp, Homo sapiens
ccattcgtagctgag

SEQ ID NO: 815448 - DNA, 15 bp, Homo sapiens
tccattcgtagctga

SEQ ID NO: 815449 - DNA, 15 bp, Homo sapiens
gtccattcgtagctg

SEQ ID NO: 815450 - DNA, 15 bp, Homo sapiens
tgtccattcgtagct

SEQ ID NO: 815451 - DNA, 15 bp, Homo sapiens
atgtccattcgtagc

SEQ ID NO: 815452 - DNA, 15 bp, Homo sapiens
tatgtccattcgtag

SEQ ID NO: 815453 - DNA, 15 bp, Homo sapiens
gtatgtccattcgta

SEQ ID NO: 815454 - DNA, 15 bp, Homo sapiens
agtatgtccattcgt

SEQ ID NO: 815455 - DNA, 15 bp, Homo sapiens
aagtatgtccattcg

SEQ ID NO: 815456 - DNA, 15 bp, Homo sapiens
taagtatgtccattc

SEQ ID NO: 815457 - DNA, 15 bp, Homo sapiens
ttaagtatgtccatt

SEQ ID NO: 815458 - DNA, 15 bp, Homo sapiens
tttaagtatgtccat

SEQ ID NO: 815459 - DNA, 15 bp, Homo sapiens
ttttaagtatgtcca

SEQ ID NO: 815460 - DNA, 15 bp, Homo sapiens
gttttaagtatgtcc

SEQ ID NO: 815461 - DNA, 15 bp, Homo sapiens
agttttaagtatgtc

SEQ ID NO: 815462 - DNA, 15 bp, Homo sapiens
cagttttaagtatgt

SEQ ID NO: 815463 - DNA, 15 bp, Homo sapiens
acagttttaagtatg

SEQ ID NO: 815464 - DNA, 15 bp, Homo sapiens
aacagttttaagtat

SEQ ID NO: 815465 - DNA, 15 bp, Homo sapiens
aaacagttttaagta

SEQ ID NO: 815466 - DNA, 15 bp, Homo sapiens
gaaacagttttaagt

SEQ ID NO: 815467 - DNA, 15 bp, Homo sapiens
agaaacagttttaag

SEQ ID NO: 815468 - DNA, 15 bp, Homo sapiens
gagaaacagttttaa

SEQ ID NO: 815469 - DNA, 15 bp, Homo sapiens
agagaaacagtttta

SEQ ID NO: 815470 - DNA, 15 bp, Homo sapiens
cagagaaacagtttt

SEQ ID NO: 815471 - DNA, 15 bp, Homo sapiens
gcagagaaacagttt

SEQ ID NO: 815472 - DNA, 15 bp, Homo sapiens
agcagagaaacagtt

SEQ ID NO: 815473 - DNA, 15 bp, Homo sapiens
aagcagagaaacagt

SEQ ID NO: 815474 - DNA, 15 bp, Homo sapiens
gaagcagagaaacag

SEQ ID NO: 815475 - DNA, 15 bp, Homo sapiens
agaagcagagaaaca

SEQ ID NO: 815476 - DNA, 15 bp, Homo sapiens
cagaagcagagaaac

SEQ ID NO: 815477 - DNA, 15 bp, Homo sapiens
acagaagcagagaaa

SEQ ID NO: 815478 - DNA, 15 bp, Homo sapiens
aacagaagcagagaa

SEQ ID NO: 815479 - DNA, 15 bp, Homo sapiens
gaacagaagcagaga

SEQ ID NO: 815480 - DNA, 15 bp, Homo sapiens
agaacagaagcagag

SEQ ID NO: 815481 - DNA, 15 bp, Homo sapiens
gagaacagaagcaga

SEQ ID NO: 815482 - DNA, 15 bp, Homo sapiens
agagaacagaagcag

SEQ ID NO: 815483 - DNA, 15 bp, Homo sapiens
tagagaacagaagca

SEQ ID NO: 815484 - DNA, 15 bp, Homo sapiens
ttagagaacagaagc

SEQ ID NO: 815485 - DNA, 15 bp, Homo sapiens
tttagagaacagaag

SEQ ID NO: 815486 - DNA, 15 bp, Homo sapiens
ttttagagaacagaa

SEQ ID NO: 815487 - DNA, 15 bp, Homo sapiens
attttagagaacaga

SEQ ID NO: 815488 - DNA, 15 bp, Homo sapiens
cattttagagaacag

SEQ ID NO: 815489 - DNA, 15 bp, Homo sapiens
acattttagagaaca

SEQ ID NO: 815490 - DNA, 15 bp, Homo sapiens
cacattttagagaac

SEQ ID NO: 815491 - DNA, 15 bp, Homo sapiens
tcacattttagagaa

SEQ ID NO: 815492 - DNA, 15 bp, Homo sapiens
atcacattttagaga

SEQ ID NO: 815493 - DNA, 15 bp, Homo sapiens
aatcacattttagag

SEQ ID NO: 815494 - DNA, 15 bp, Homo sapiens
caatcacattttaga

SEQ ID NO: 815495 - DNA, 15 bp, Homo sapiens
acaatcacattttag

SEQ ID NO: 815496 - DNA, 15 bp, Homo sapiens
gacaatcacatttta

SEQ ID NO: 815497 - DNA, 15 bp, Homo sapiens
agacaatcacatttt

SEQ ID NO: 815498 - DNA, 15 bp, Homo sapiens
tagacaatcacattt

SEQ ID NO: 815499 - DNA, 15 bp, Homo sapiens
ttagacaatcacatt

SEQ ID NO: 815500 - DNA, 15 bp, Homo sapiens
gttagacaatcacat

SEQ ID NO: 815501 - DNA, 15 bp, Homo sapiens
tgttagacaatcaca

SEQ ID NO: 815502 - DNA, 15 bp, Homo sapiens
ctgttagacaatcac

SEQ ID NO: 815503 - DNA, 15 bp, Homo sapiens
actgttagacaatca

SEQ ID NO: 815504 - DNA, 15 bp, Homo sapiens
tactgttagacaatc

SEQ ID NO: 815505 - DNA, 15 bp, Homo sapiens
ttactgttagacaat

SEQ ID NO: 815506 - DNA, 15 bp, Homo sapiens
gttactgttagacaa

SEQ ID NO: 815507 - DNA, 15 bp, Homo sapiens
ggttactgttagaca

SEQ ID NO: 815508 - DNA, 15 bp, Homo sapiens
cggttactgttagac

SEQ ID NO: 815509 - DNA, 15 bp, Homo sapiens
acggttactgttaga

SEQ ID NO: 815510 - DNA, 15 bp, Homo sapiens
cacggttactgttag

SEQ ID NO: 815511 - DNA, 15 bp, Homo sapiens
tcacggttactgtta

SEQ ID NO: 815512 - DNA, 15 bp, Homo sapiens
atcacggttactgtt

SEQ ID NO: 815513 - DNA, 15 bp, Homo sapiens
catcacggttactgt

SEQ ID NO: 815514 - DNA, 15 bp, Homo sapiens
tcatcacggttactg

SEQ ID NO: 815515 - DNA, 15 bp, Homo sapiens
gtcatcacggttact

SEQ ID NO: 815516 - DNA, 15 bp, Homo sapiens
cgtcatcacggttac

SEQ ID NO: 815517 - DNA, 15 bp, Homo sapiens
acgtcatcacggtta

SEQ ID NO: 815518 - DNA, 15 bp, Homo sapiens
aacgtcatcacggtt

SEQ ID NO: 815519 - DNA, 15 bp, Homo sapiens
aaacgtcatcacggt

SEQ ID NO: 815520 - DNA, 15 bp, Homo sapiens
aaaacgtcatcacgg

SEQ ID NO: 815521 - DNA, 15 bp, Homo sapiens
caaaacgtcatcacg

SEQ ID NO: 815522 - DNA, 15 bp, Homo sapiens
tcaaaacgtcatcac

SEQ ID NO: 815523 - DNA, 15 bp, Homo sapiens
gtcaaaacgtcatca

SEQ ID NO: 815524 - DNA, 15 bp, Homo sapiens
tgtcaaaacgtcatc

SEQ ID NO: 815525 - DNA, 15 bp, Homo sapiens
ctgtcaaaacgtcat

SEQ ID NO: 815526 - DNA, 15 bp, Homo sapiens
actgtcaaaacgtca

SEQ ID NO: 815527 - DNA, 15 bp, Homo sapiens
aactgtcaaaacgtc

SEQ ID NO: 815528 - DNA, 15 bp, Homo sapiens
caactgtcaaaacgt

SEQ ID NO: 815529 - DNA, 15 bp, Homo sapiens
gcaactgtcaaaacg

SEQ ID NO: 815530 - DNA, 15 bp, Homo sapiens
tgcaactgtcaaaac

SEQ ID NO: 815531 - DNA, 15 bp, Homo sapiens
gtgcaactgtcaaaa

SEQ ID NO: 815532 - DNA, 15 bp, Homo sapiens
tgtgcaactgtcaaa

SEQ ID NO: 815533 - DNA, 15 bp, Homo sapiens
ttgtgcaactgtcaa

SEQ ID NO: 815534 - DNA, 15 bp, Homo sapiens
cttgtgcaactgtca

SEQ ID NO: 815535 - DNA, 15 bp, Homo sapiens
acttgtgcaactgtc

SEQ ID NO: 815536 - DNA, 15 bp, Homo sapiens
aacttgtgcaactgt

SEQ ID NO: 815537 - DNA, 15 bp, Homo sapiens
aaacttgtgcaactg

SEQ ID NO: 815538 - DNA, 15 bp, Homo sapiens
gaaacttgtgcaact

SEQ ID NO: 815539 - DNA, 15 bp, Homo sapiens
agaaacttgtgcaac

SEQ ID NO: 815540 - DNA, 15 bp, Homo sapiens
aagaaacttgtgcaa

SEQ ID NO: 815541 - DNA, 15 bp, Homo sapiens
aaagaaacttgtgca

SEQ ID NO: 815542 - DNA, 15 bp, Homo sapiens
gaaagaaacttgtgc

SEQ ID NO: 815543 - DNA, 15 bp, Homo sapiens
agaaagaaacttgtg

SEQ ID NO: 815544 - DNA, 15 bp, Homo sapiens
aagaaagaaacttgt

SEQ ID NO: 815545 - DNA, 15 bp, Homo sapiens
aaagaaagaaacttg

SEQ ID NO: 815546 - DNA, 15 bp, Homo sapiens
taaagaaagaaactt

SEQ ID NO: 815547 - DNA, 15 bp, Homo sapiens
ttaaagaaagaaact

SEQ ID NO: 815548 - DNA, 15 bp, Homo sapiens
cttaaagaaagaaac

SEQ ID NO: 815549 - DNA, 15 bp, Homo sapiens
gcttaaagaaagaaa

SEQ ID NO: 815550 - DNA, 15 bp, Homo sapiens
agcttaaagaaagaa

SEQ ID NO: 815551 - DNA, 15 bp, Homo sapiens
aagcttaaagaaaga

SEQ ID NO: 815552 - DNA, 15 bp, Homo sapiens
aaagcttaaagaaag

SEQ ID NO: 815553 - DNA, 15 bp, Homo sapiens
taaagcttaaagaaa

SEQ ID NO: 815554 - DNA, 15 bp, Homo sapiens
ttaaagcttaaagaa

SEQ ID NO: 815555 - DNA, 15 bp, Homo sapiens
tttaaagcttaaaga

SEQ ID NO: 815556 - DNA, 15 bp, Homo sapiens
ttttaaagcttaaag

SEQ ID NO: 815557 - DNA, 15 bp, Homo sapiens
tttttaaagcttaaa

SEQ ID NO: 815558 - DNA, 15 bp, Homo sapiens
atttttaaagcttaa

SEQ ID NO: 815559 - DNA, 15 bp, Homo sapiens
catttttaaagctta

SEQ ID NO: 815560 - DNA, 15 bp, Homo sapiens
gcatttttaaagctt

SEQ ID NO: 815561 - DNA, 15 bp, Homo sapiens
ggcatttttaaagct

SEQ ID NO: 815562 - DNA, 15 bp, Homo sapiens
tggcatttttaaagc

SEQ ID NO: 815563 - DNA, 15 bp, Homo sapiens
ctggcatttttaaag

SEQ ID NO: 815564 - DNA, 15 bp, Homo sapiens
gctggcatttttaaa

SEQ ID NO: 815565 - DNA, 15 bp, Homo sapiens
ggctggcatttttaa

SEQ ID NO: 815566 - DNA, 15 bp, Homo sapiens
tggctggcattttta

SEQ ID NO: 815567 - DNA, 15 bp, Homo sapiens
ctggctggcattttt

SEQ ID NO: 815568 - DNA, 15 bp, Homo sapiens
actggctggcatttt

SEQ ID NO: 815569 - DNA, 15 bp, Homo sapiens
tactggctggcattt

SEQ ID NO: 815570 - DNA, 15 bp, Homo sapiens
ttactggctggcatt

SEQ ID NO: 815571 - DNA, 15 bp, Homo sapiens
gttactggctggcat

SEQ ID NO: 815572 - DNA, 15 bp, Homo sapiens
ggttactggctggca

SEQ ID NO: 815573 - DNA, 15 bp, Homo sapiens
gggttactggctggc

SEQ ID NO: 815574 - DNA, 15 bp, Homo sapiens
tgggttactggctgg

SEQ ID NO: 815575 - DNA, 15 bp, Homo sapiens
ctgggttactggctg

SEQ ID NO: 815576 - DNA, 15 bp, Homo sapiens
actgggttactggct

SEQ ID NO: 815577 - DNA, 15 bp, Homo sapiens
cactgggttactggc

SEQ ID NO: 815578 - DNA, 15 bp, Homo sapiens
ccactgggttactgg

SEQ ID NO: 815579 - DNA, 15 bp, Homo sapiens
gccactgggttactg

SEQ ID NO: 815580 - DNA, 15 bp, Homo sapiens
tgccactgggttact

SEQ ID NO: 815581 - DNA, 15 bp, Homo sapiens
atgccactgggttac

SEQ ID NO: 815582 - DNA, 15 bp, Homo sapiens
aatgccactgggtta

SEQ ID NO: 815583 - DNA, 15 bp, Homo sapiens
aaatgccactgggtt

SEQ ID NO: 815584 - DNA, 15 bp, Homo sapiens
gaaatgccactgggt

SEQ ID NO: 815585 - DNA, 15 bp, Homo sapiens
agaaatgccactggg

SEQ ID NO: 815586 - DNA, 15 bp, Homo sapiens
tagaaatgccactgg

SEQ ID NO: 815587 - DNA, 15 bp, Homo sapiens
gtagaaatgccactg

SEQ ID NO: 815588 - DNA, 15 bp, Homo sapiens
agtagaaatgccact

SEQ ID NO: 815589 - DNA, 15 bp, Homo sapiens
tagtagaaatgccac

SEQ ID NO: 815590 - DNA, 15 bp, Homo sapiens
atagtagaaatgcca

SEQ ID NO: 815591 - DNA, 15 bp, Homo sapiens
tatagtagaaatgcc

SEQ ID NO: 815592 - DNA, 15 bp, Homo sapiens
ttatagtagaaatgc

SEQ ID NO: 815593 - DNA, 15 bp, Homo sapiens
tttatagtagaaatg

SEQ ID NO: 815594 - DNA, 15 bp, Homo sapiens
ttttatagtagaaat

SEQ ID NO: 815595 - DNA, 15 bp, Homo sapiens
attttatagtagaaa

SEQ ID NO: 815596 - DNA, 15 bp, Homo sapiens
gattttatagtagaa

SEQ ID NO: 815597 - DNA, 15 bp, Homo sapiens
agattttatagtaga

SEQ ID NO: 815598 - DNA, 15 bp, Homo sapiens
aagattttatagtag

SEQ ID NO: 815599 - DNA, 15 bp, Homo sapiens
taagattttatagta

SEQ ID NO: 815600 - DNA, 15 bp, Homo sapiens
ttaagattttatagt

SEQ ID NO: 815601 - DNA, 15 bp, Homo sapiens
cttaagattttatag

SEQ ID NO: 815602 - DNA, 15 bp, Homo sapiens
ccttaagattttata

SEQ ID NO: 815603 - DNA, 15 bp, Homo sapiens
gccttaagattttat

SEQ ID NO: 815604 - DNA, 15 bp, Homo sapiens
ggccttaagatttta

SEQ ID NO: 815605 - DNA, 15 bp, Homo sapiens
tggccttaagatttt

SEQ ID NO: 815606 - DNA, 15 bp, Homo sapiens
ttggccttaagattt

SEQ ID NO: 815607 - DNA, 15 bp, Homo sapiens
attggccttaagatt

SEQ ID NO: 815608 - DNA, 15 bp, Homo sapiens
gattggccttaagat

SEQ ID NO: 815609 - DNA, 15 bp, Homo sapiens
ggattggccttaaga

SEQ ID NO: 815610 - DNA, 15 bp, Homo sapiens
tggattggccttaag

SEQ ID NO: 815611 - DNA, 15 bp, Homo sapiens
atggattggccttaa

SEQ ID NO: 815612 - DNA, 15 bp, Homo sapiens
aatggattggcctta

SEQ ID NO: 815613 - DNA, 15 bp, Homo sapiens
aaatggattggcctt

SEQ ID NO: 815614 - DNA, 15 bp, Homo sapiens
gaaatggattggcct

SEQ ID NO: 815615 - DNA, 15 bp, Homo sapiens
ggaaatggattggcc

SEQ ID NO: 815616 - DNA, 15 bp, Homo sapiens
gggaaatggattggc

SEQ ID NO: 815617 - DNA, 15 bp, Homo sapiens
ggggaaatggattgg

SEQ ID NO: 815618 - DNA, 15 bp, Homo sapiens
aggggaaatggattg

SEQ ID NO: 815619 - DNA, 15 bp, Homo sapiens
aaggggaaatggatt

SEQ ID NO: 815620 - DNA, 15 bp, Homo sapiens
aaaggggaaatggat

SEQ ID NO: 815621 - DNA, 15 bp, Homo sapiens
aaaaggggaaatgga

SEQ ID NO: 815622 - DNA, 15 bp, Homo sapiens
gaaaaggggaaatgg

SEQ ID NO: 815623 - DNA, 15 bp, Homo sapiens
ggaaaaggggaaatg

SEQ ID NO: 815624 - DNA, 15 bp, Homo sapiens
aggaaaaggggaaat

SEQ ID NO: 815625 - DNA, 15 bp, Homo sapiens
aaggaaaaggggaaa

SEQ ID NO: 815626 - DNA, 15 bp, Homo sapiens
taaggaaaaggggaa

SEQ ID NO: 815627 - DNA, 15 bp, Homo sapiens
ataaggaaaagggga

SEQ ID NO: 815628 - DNA, 15 bp, Homo sapiens
aataaggaaaagggg

SEQ ID NO: 815629 - DNA, 15 bp, Homo sapiens
aaataaggaaaaggg

SEQ ID NO: 815630 - DNA, 15 bp, Homo sapiens
aaaataaggaaaagg

SEQ ID NO: 815631 - DNA, 15 bp, Homo sapiens
gaaaataaggaaaag

SEQ ID NO: 815632 - DNA, 15 bp, Homo sapiens
agaaaataaggaaaa

SEQ ID NO: 815633 - DNA, 15 bp, Homo sapiens
aagaaaataaggaaa

SEQ ID NO: 815634 - DNA, 15 bp, Homo sapiens
caagaaaataaggaa

SEQ ID NO: 815635 - DNA, 15 bp, Homo sapiens
ccaagaaaataagga

SEQ ID NO: 815636 - DNA, 15 bp, Homo sapiens
accaagaaaataagg

SEQ ID NO: 815637 - DNA, 15 bp, Homo sapiens
aaccaagaaaataag

SEQ ID NO: 815638 - DNA, 15 bp, Homo sapiens
aaaccaagaaaataa

SEQ ID NO: 815639 - DNA, 15 bp, Homo sapiens
gaaaccaagaaaata

SEQ ID NO: 815640 - DNA, 15 bp, Homo sapiens
tgaaaccaagaaaat

SEQ ID NO: 815641 - DNA, 15 bp, Homo sapiens
ttgaaaccaagaaaa

SEQ ID NO: 815642 - DNA, 15 bp, Homo sapiens
tttgaaaccaagaaa

SEQ ID NO: 815643 - DNA, 15 bp, Homo sapiens
atttgaaaccaagaa

SEQ ID NO: 815644 - DNA, 15 bp, Homo sapiens
tatttgaaaccaaga

SEQ ID NO: 815645 - DNA, 15 bp, Homo sapiens
atatttgaaaccaag

SEQ ID NO: 815646 - DNA, 15 bp, Homo sapiens
tatatttgaaaccaa

SEQ ID NO: 815647 - DNA, 15 bp, Homo sapiens
atatatttgaaacca

SEQ ID NO: 815648 - DNA, 15 bp, Homo sapiens
aatatatttgaaacc

SEQ ID NO: 815649 - DNA, 15 bp, Homo sapiens
aaatatatttgaaac

SEQ ID NO: 815650 - DNA, 15 bp, Homo sapiens
aaaatatatttgaaa

SEQ ID NO: 815651 - DNA, 15 bp, Homo sapiens
aaaaatatatttgaa

SEQ ID NO: 815652 - DNA, 15 bp, Homo sapiens
taaaaatatatttga

SEQ ID NO: 815653 - DNA, 15 bp, Homo sapiens
ataaaaatatatttg

SEQ ID NO: 815654 - DNA, 15 bp, Homo sapiens
aataaaaatatattt

SEQ ID NO: 815655 - DNA, 15 bp, Homo sapiens
caataaaaatatatt

SEQ ID NO: 815656 - DNA, 15 bp, Homo sapiens
gcaataaaaatatat

SEQ ID NO: 815657 - DNA, 15 bp, Homo sapiens
ggcaataaaaatata

SEQ ID NO: 815658 - DNA, 15 bp, Homo sapiens
tggcaataaaaatat

SEQ ID NO: 815659 - DNA, 15 bp, Homo sapiens
ttggcaataaaaata

SEQ ID NO: 815660 - DNA, 15 bp, Homo sapiens
attggcaataaaaat

SEQ ID NO: 815661 - DNA, 15 bp, Homo sapiens
cattggcaataaaaa

SEQ ID NO: 815662 - DNA, 15 bp, Homo sapiens
ccattggcaataaaa

SEQ ID NO: 815663 - DNA, 15 bp, Homo sapiens
tccattggcaataaa

SEQ ID NO: 815664 - DNA, 15 bp, Homo sapiens
ttccattggcaataa

SEQ ID NO: 815665 - DNA, 15 bp, Homo sapiens
tttccattggcaata

SEQ ID NO: 815666 - DNA, 15 bp, Homo sapiens
atttccattggcaat

SEQ ID NO: 815667 - DNA, 15 bp, Homo sapiens
tatttccattggcaa

SEQ ID NO: 815668 - DNA, 15 bp, Homo sapiens
ttatttccattggca

SEQ ID NO: 815669 - DNA, 15 bp, Homo sapiens
tttatttccattggc

SEQ ID NO: 815670 - DNA, 15 bp, Homo sapiens
ttttatttccattgg

SEQ ID NO: 815671 - DNA, 15 bp, Homo sapiens
tttttatttccattg

SEQ ID NO: 815672 - DNA, 15 bp, Homo sapiens
atttttatttccatt

SEQ ID NO: 815673 - DNA, 15 bp, Homo sapiens
gatttttatttccat

SEQ ID NO: 815674 - DNA, 15 bp, Homo sapiens
ggatttttatttcca

SEQ ID NO: 815675 - DNA, 15 bp, Homo sapiens
aggatttttatttcc

SEQ ID NO: 815676 - DNA, 15 bp, Homo sapiens
taggatttttatttc

SEQ ID NO: 815677 - DNA, 15 bp, Homo sapiens
ttaggatttttattt

SEQ ID NO: 815678 - DNA, 15 bp, Homo sapiens
tttaggatttttatt

SEQ ID NO: 815679 - DNA, 15 bp, Homo sapiens
atttaggatttttat

SEQ ID NO: 815680 - DNA, 15 bp, Homo sapiens
aatttaggattttta

SEQ ID NO: 815681 - DNA, 15 bp, Homo sapiens
taatttaggattttt

SEQ ID NO: 815682 - DNA, 15 bp, Homo sapiens
ctaatttaggatttt

SEQ ID NO: 815683 - DNA, 15 bp, Homo sapiens
tctaatttaggattt

SEQ ID NO: 815684 - DNA, 15 bp, Homo sapiens
ctctaatttaggatt

SEQ ID NO: 815685 - DNA, 15 bp, Homo sapiens
tctctaatttaggat

SEQ ID NO: 815686 - DNA, 15 bp, Homo sapiens
ctctctaatttagga

SEQ ID NO: 815687 - DNA, 15 bp, Homo sapiens
gctctctaatttagg

SEQ ID NO: 815688 - DNA, 15 bp, Homo sapiens
tgctctctaatttag

SEQ ID NO: 815689 - DNA, 15 bp, Homo sapiens
ttgctctctaattta

SEQ ID NO: 815690 - DNA, 15 bp, Homo sapiens
attgctctctaattt

SEQ ID NO: 815691 - DNA, 15 bp, Homo sapiens
cattgctctctaatt

SEQ ID NO: 815692 - DNA, 15 bp, Homo sapiens
ccattgctctctaat

SEQ ID NO: 815693 - DNA, 15 bp, Homo sapiens
gccattgctctctaa

SEQ ID NO: 815694 - DNA, 15 bp, Homo sapiens
tgccattgctctcta

SEQ ID NO: 815695 - DNA, 15 bp, Homo sapiens
atgccattgctctct

SEQ ID NO: 815696 - DNA, 15 bp, Homo sapiens
gatgccattgctctc

SEQ ID NO: 815697 - DNA, 15 bp, Homo sapiens
ggatgccattgctct

SEQ ID NO: 815698 - DNA, 15 bp, Homo sapiens
gggatgccattgctc

SEQ ID NO: 815699 - DNA, 15 bp, Homo sapiens
agggatgccattgct

SEQ ID NO: 815700 - DNA, 15 bp, Homo sapiens
aagggatgccattgc

SEQ ID NO: 815701 - DNA, 15 bp, Homo sapiens
caagggatgccattg

SEQ ID NO: 815702 - DNA, 15 bp, Homo sapiens
acaagggatgccatt

SEQ ID NO: 815703 - DNA, 15 bp, Homo sapiens
gacaagggatgccat

SEQ ID NO: 815704 - DNA, 15 bp, Homo sapiens
agacaagggatgcca

SEQ ID NO: 815705 - DNA, 15 bp, Homo sapiens
aagacaagggatgcc

SEQ ID NO: 815706 - DNA, 15 bp, Homo sapiens
caagacaagggatgc

SEQ ID NO: 815707 - DNA, 15 bp, Homo sapiens
acaagacaagggatg

SEQ ID NO: 815708 - DNA, 15 bp, Homo sapiens
cacaagacaagggat

SEQ ID NO: 815709 - DNA, 15 bp, Homo sapiens
tcacaagacaaggga

SEQ ID NO: 815710 - DNA, 15 bp, Homo sapiens
ttcacaagacaaggg

SEQ ID NO: 815711 - DNA, 15 bp, Homo sapiens
attcacaagacaagg

SEQ ID NO: 815712 - DNA, 15 bp, Homo sapiens
tattcacaagacaag

SEQ ID NO: 815713 - DNA, 15 bp, Homo sapiens
ttattcacaagacaa

SEQ ID NO: 815714 - DNA, 15 bp, Homo sapiens
tttattcacaagaca

SEQ ID NO: 815715 - DNA, 15 bp, Homo sapiens
ctttattcacaagac

SEQ ID NO: 815716 - DNA, 15 bp, Homo sapiens
tctttattcacaaga

SEQ ID NO: 815717 - DNA, 15 bp, Homo sapiens
ctctttattcacaag

SEQ ID NO: 815718 - DNA, 15 bp, Homo sapiens
gctctttattcacaa

SEQ ID NO: 815719 - DNA, 15 bp, Homo sapiens
agctctttattcaca

SEQ ID NO: 815720 - DNA, 15 bp, Homo sapiens
gagctctttattcac

SEQ ID NO: 815721 - DNA, 15 bp, Homo sapiens
ggagctctttattca

SEQ ID NO: 815722 - DNA, 15 bp, Homo sapiens
aggagctctttattc

SEQ ID NO: 815723 - DNA, 15 bp, Homo sapiens
taggagctctttatt

SEQ ID NO: 815724 - DNA, 15 bp, Homo sapiens
ttaggagctctttat

SEQ ID NO: 815725 - DNA, 15 bp, Homo sapiens
tttaggagctcttta

SEQ ID NO: 815726 - DNA, 15 bp, Homo sapiens
atttaggagctcttt

SEQ ID NO: 815727 - DNA, 15 bp, Homo sapiens
catttaggagctctt

SEQ ID NO: 815728 - DNA, 15 bp, Homo sapiens
acatttaggagctct

SEQ ID NO: 815729 - DNA, 15 bp, Homo sapiens
cacatttaggagctc

SEQ ID NO: 815730 - DNA, 15 bp, Homo sapiens
tcacatttaggagct

SEQ ID NO: 815731 - DNA, 15 bp, Homo sapiens
ttcacatttaggagc

SEQ ID NO: 815732 - DNA, 15 bp, Homo sapiens
gttcacatttaggag

SEQ ID NO: 815733 - DNA, 15 bp, Homo sapiens
agttcacatttagga

SEQ ID NO: 815734 - DNA, 15 bp, Homo sapiens
aagttcacatttagg

SEQ ID NO: 815735 - DNA, 15 bp, Homo sapiens
taagttcacatttag

SEQ ID NO: 815736 - DNA, 15 bp, Homo sapiens
ataagttcacattta

SEQ ID NO: 815737 - DNA, 15 bp, Homo sapiens
tataagttcacattt

SEQ ID NO: 815738 - DNA, 15 bp, Homo sapiens
gtataagttcacatt

SEQ ID NO: 815739 - DNA, 15 bp, Homo sapiens
tgtataagttcacat

SEQ ID NO: 815740 - DNA, 15 bp, Homo sapiens
ctgtataagttcaca

SEQ ID NO: 815741 - DNA, 15 bp, Homo sapiens
cctgtataagttcac

SEQ ID NO: 815742 - DNA, 15 bp, Homo sapiens
tcctgtataagttca

SEQ ID NO: 815743 - DNA, 15 bp, Homo sapiens
atcctgtataagttc

SEQ ID NO: 815744 - DNA, 15 bp, Homo sapiens
catcctgtataagtt

SEQ ID NO: 815745 - DNA, 15 bp, Homo sapiens
gcatcctgtataagt

SEQ ID NO: 815746 - DNA, 15 bp, Homo sapiens
tgcatcctgtataag

SEQ ID NO: 815747 - DNA, 15 bp, Homo sapiens
ctgcatcctgtataa

SEQ ID NO: 815748 - DNA, 15 bp, Homo sapiens
gctgcatcctgtata

SEQ ID NO: 815749 - DNA, 15 bp, Homo sapiens
tgctgcatcctgtat

SEQ ID NO: 815750 - DNA, 15 bp, Homo sapiens
ttgctgcatcctgta

SEQ ID NO: 815751 - DNA, 15 bp, Homo sapiens
attgctgcatcctgt

SEQ ID NO: 815752 - DNA, 15 bp, Homo sapiens
aattgctgcatcctg

SEQ ID NO: 815753 - DNA, 15 bp, Homo sapiens
aaattgctgcatcct

SEQ ID NO: 815754 - DNA, 15 bp, Homo sapiens
taaattgctgcatcc

SEQ ID NO: 815755 - DNA, 15 bp, Homo sapiens
ataaattgctgcatc

SEQ ID NO: 815756 - DNA, 15 bp, Homo sapiens
tataaattgctgcat

SEQ ID NO: 815757 - DNA, 15 bp, Homo sapiens
ctataaattgctgca

SEQ ID NO: 815758 - DNA, 15 bp, Homo sapiens
cctataaattgctgc

SEQ ID NO: 815759 - DNA, 15 bp, Homo sapiens
ccctataaattgctg

SEQ ID NO: 815760 - DNA, 15 bp, Homo sapiens
accctataaattgct

SEQ ID NO: 815761 - DNA, 15 bp, Homo sapiens
taccctataaattgc

SEQ ID NO: 815762 - DNA, 15 bp, Homo sapiens
ctaccctataaattg

SEQ ID NO: 815763 - DNA, 15 bp, Homo sapiens
actaccctataaatt

SEQ ID NO: 815764 - DNA, 15 bp, Homo sapiens
aactaccctataaat

SEQ ID NO: 815765 - DNA, 15 bp, Homo sapiens
taactaccctataaa

SEQ ID NO: 815766 - DNA, 15 bp, Homo sapiens
ttaactaccctataa

SEQ ID NO: 815767 - DNA, 15 bp, Homo sapiens
attaactaccctata

SEQ ID NO: 815768 - DNA, 15 bp, Homo sapiens
gattaactaccctat

SEQ ID NO: 815769 - DNA, 15 bp, Homo sapiens
tgattaactacccta

SEQ ID NO: 815770 - DNA, 15 bp, Homo sapiens
atgattaactaccct

SEQ ID NO: 815771 - DNA, 15 bp, Homo sapiens
aatgattaactaccc

SEQ ID NO: 815772 - DNA, 15 bp, Homo sapiens
gaatgattaactacc

SEQ ID NO: 815773 - DNA, 15 bp, Homo sapiens
agaatgattaactac

SEQ ID NO: 815774 - DNA, 15 bp, Homo sapiens
aagaatgattaacta

SEQ ID NO: 815775 - DNA, 15 bp, Homo sapiens
gaagaatgattaact

SEQ ID NO: 815776 - DNA, 15 bp, Homo sapiens
agaagaatgattaac

SEQ ID NO: 815777 - DNA, 15 bp, Homo sapiens
aagaagaatgattaa

SEQ ID NO: 815778 - DNA, 15 bp, Homo sapiens
aaagaagaatgatta

SEQ ID NO: 815779 - DNA, 15 bp, Homo sapiens
gaaagaagaatgatt

SEQ ID NO: 815780 - DNA, 15 bp, Homo sapiens
agaaagaagaatgat

SEQ ID NO: 815781 - DNA, 15 bp, Homo sapiens
tagaaagaagaatga

SEQ ID NO: 815782 - DNA, 15 bp, Homo sapiens
ctagaaagaagaatg

SEQ ID NO: 815783 - DNA, 15 bp, Homo sapiens
gctagaaagaagaat

SEQ ID NO: 815784 - DNA, 15 bp, Homo sapiens
ggctagaaagaagaa

SEQ ID NO: 815785 - DNA, 15 bp, Homo sapiens
tggctagaaagaaga

SEQ ID NO: 815786 - DNA, 15 bp, Homo sapiens
ctggctagaaagaag

SEQ ID NO: 815787 - DNA, 15 bp, Homo sapiens
actggctagaaagaa

SEQ ID NO: 815788 - DNA, 15 bp, Homo sapiens
aactggctagaaaga

SEQ ID NO: 815789 - DNA, 15 bp, Homo sapiens
caactggctagaaag

SEQ ID NO: 815790 - DNA, 15 bp, Homo sapiens
acaactggctagaaa

SEQ ID NO: 815791 - DNA, 15 bp, Homo sapiens
aacaactggctagaa

SEQ ID NO: 815792 - DNA, 15 bp, Homo sapiens
gaacaactggctaga

SEQ ID NO: 815793 - DNA, 15 bp, Homo sapiens
ggaacaactggctag

SEQ ID NO: 815794 - DNA, 15 bp, Homo sapiens
tggaacaactggcta

SEQ ID NO: 815795 - DNA, 15 bp, Homo sapiens
ctggaacaactggct

SEQ ID NO: 815796 - DNA, 15 bp, Homo sapiens
gctggaacaactggc

SEQ ID NO: 815797 - DNA, 15 bp, Homo sapiens
agctggaacaactgg

SEQ ID NO: 815798 - DNA, 15 bp, Homo sapiens
tagctggaacaactg

SEQ ID NO: 815799 - DNA, 15 bp, Homo sapiens
gtagctggaacaact

SEQ ID NO: 815800 - DNA, 15 bp, Homo sapiens
tgtagctggaacaac

SEQ ID NO: 815801 - DNA, 15 bp, Homo sapiens
ctgtagctggaacaa

SEQ ID NO: 815802 - DNA, 15 bp, Homo sapiens
actgtagctggaaca

SEQ ID NO: 815803 - DNA, 15 bp, Homo sapiens
aactgtagctggaac

SEQ ID NO: 815804 - DNA, 15 bp, Homo sapiens
aaactgtagctggaa

SEQ ID NO: 815805 - DNA, 15 bp, Homo sapiens
aaaactgtagctgga

SEQ ID NO: 815806 - DNA, 15 bp, Homo sapiens
caaaactgtagctgg

SEQ ID NO: 815807 - DNA, 15 bp, Homo sapiens
acaaaactgtagctg

SEQ ID NO: 815808 - DNA, 15 bp, Homo sapiens
cacaaaactgtagct

SEQ ID NO: 815809 - DNA, 15 bp, Homo sapiens
ccacaaaactgtagc

SEQ ID NO: 815810 - DNA, 15 bp, Homo sapiens
gccacaaaactgtag

SEQ ID NO: 815811 - DNA, 15 bp, Homo sapiens
agccacaaaactgta

SEQ ID NO: 815812 - DNA, 15 bp, Homo sapiens
gagccacaaaactgt

SEQ ID NO: 815813 - DNA, 15 bp, Homo sapiens
agagccacaaaactg

SEQ ID NO: 815814 - DNA, 15 bp, Homo sapiens
aagagccacaaaact

SEQ ID NO: 815815 - DNA, 15 bp, Homo sapiens
caagagccacaaaac

SEQ ID NO: 815816 - DNA, 15 bp, Homo sapiens
acaagagccacaaaa

SEQ ID NO: 815817 - DNA, 15 bp, Homo sapiens
aacaagagccacaaa

SEQ ID NO: 815818 - DNA, 15 bp, Homo sapiens
taacaagagccacaa

SEQ ID NO: 815819 - DNA, 15 bp, Homo sapiens
ctaacaagagccaca

SEQ ID NO: 815820 - DNA, 15 bp, Homo sapiens
actaacaagagccac

SEQ ID NO: 815821 - DNA, 15 bp, Homo sapiens
cactaacaagagcca

SEQ ID NO: 815822 - DNA, 15 bp, Homo sapiens
ccactaacaagagcc

SEQ ID NO: 815823 - DNA, 15 bp, Homo sapiens
gccactaacaagagc

SEQ ID NO: 815824 - DNA, 15 bp, Homo sapiens
agccactaacaagag

SEQ ID NO: 815825 - DNA, 15 bp, Homo sapiens
aagccactaacaaga

SEQ ID NO: 815826 - DNA, 15 bp, Homo sapiens
gaagccactaacaag

SEQ ID NO: 815827 - DNA, 15 bp, Homo sapiens
tgaagccactaacaa

SEQ ID NO: 815828 - DNA, 15 bp, Homo sapiens
atgaagccactaaca

SEQ ID NO: 815829 - DNA, 15 bp, Homo sapiens
aatgaagccactaac

SEQ ID NO: 815830 - DNA, 15 bp, Homo sapiens
gaatgaagccactaa

SEQ ID NO: 815831 - DNA, 15 bp, Homo sapiens
ggaatgaagccacta

SEQ ID NO: 815832 - DNA, 15 bp, Homo sapiens
gggaatgaagccact

SEQ ID NO: 815833 - DNA, 15 bp, Homo sapiens
tgggaatgaagccac

SEQ ID NO: 815834 - DNA, 15 bp, Homo sapiens
ctgggaatgaagcca

SEQ ID NO: 815835 - DNA, 15 bp, Homo sapiens
tctgggaatgaagcc

SEQ ID NO: 815836 - DNA, 15 bp, Homo sapiens
atctgggaatgaagc

SEQ ID NO: 815837 - DNA, 15 bp, Homo sapiens
tatctgggaatgaag

SEQ ID NO: 815838 - DNA, 15 bp, Homo sapiens
ctatctgggaatgaa

SEQ ID NO: 815839 - DNA, 15 bp, Homo sapiens
tctatctgggaatga

SEQ ID NO: 815840 - DNA, 15 bp, Homo sapiens
ttctatctgggaatg

SEQ ID NO: 815841 - DNA, 15 bp, Homo sapiens
attctatctgggaat

SEQ ID NO: 815842 - DNA, 15 bp, Homo sapiens
tattctatctgggaa

SEQ ID NO: 815843 - DNA, 15 bp, Homo sapiens
ttattctatctggga

SEQ ID NO: 815844 - DNA, 15 bp, Homo sapiens
tttattctatctggg

SEQ ID NO: 815845 - DNA, 15 bp, Homo sapiens
ttttattctatctgg

SEQ ID NO: 815846 - DNA, 15 bp, Homo sapiens
tttttattctatctg

SEQ ID NO: 815847 - DNA, 15 bp, Homo sapiens
atttttattctatct

SEQ ID NO: 815848 - DNA, 15 bp, Homo sapiens
gatttttattctatc

SEQ ID NO: 815849 - DNA, 15 bp, Homo sapiens
tgatttttattctat

SEQ ID NO: 815850 - DNA, 15 bp, Homo sapiens
ttgatttttattcta

SEQ ID NO: 815851 - DNA, 15 bp, Homo sapiens
tttgatttttattct

SEQ ID NO: 815852 - DNA, 15 bp, Homo sapiens
gtttgatttttattc

SEQ ID NO: 815853 - DNA, 15 bp, Homo sapiens
ggtttgatttttatt

SEQ ID NO: 815854 - DNA, 15 bp, Homo sapiens
tggtttgatttttat

SEQ ID NO: 815855 - DNA, 15 bp, Homo sapiens
ttggtttgattttta

SEQ ID NO: 815856 - DNA, 15 bp, Homo sapiens
tttggtttgattttt

SEQ ID NO: 815857 - DNA, 15 bp, Homo sapiens
ttttggtttgatttt

SEQ ID NO: 815858 - DNA, 15 bp, Homo sapiens
attttggtttgattt

SEQ ID NO: 815859 - DNA, 15 bp, Homo sapiens
gattttggtttgatt

SEQ ID NO: 815860 - DNA, 15 bp, Homo sapiens
ggattttggtttgat

SEQ ID NO: 815861 - DNA, 15 bp, Homo sapiens
aggattttggtttga

SEQ ID NO: 815862 - DNA, 15 bp, Homo sapiens
caggattttggtttg

SEQ ID NO: 815863 - DNA, 15 bp, Homo sapiens
ccaggattttggttt

SEQ ID NO: 815864 - DNA, 15 bp, Homo sapiens
tccaggattttggtt

SEQ ID NO: 815865 - DNA, 15 bp, Homo sapiens
ttccaggattttggt

SEQ ID NO: 815866 - DNA, 15 bp, Homo sapiens
tttccaggattttgg

SEQ ID NO: 815867 - DNA, 15 bp, Homo sapiens
ctttccaggattttg

SEQ ID NO: 815868 - DNA, 15 bp, Homo sapiens
cctttccaggatttt

SEQ ID NO: 815869 - DNA, 15 bp, Homo sapiens
gcctttccaggattt

SEQ ID NO: 815870 - DNA, 15 bp, Homo sapiens
tgcctttccaggatt

SEQ ID NO: 815871 - DNA, 15 bp, Homo sapiens
gtgcctttccaggat

SEQ ID NO: 815872 - DNA, 15 bp, Homo sapiens
agtgcctttccagga

SEQ ID NO: 815873 - DNA, 15 bp, Homo sapiens
gagtgcctttccagg

SEQ ID NO: 815874 - DNA, 15 bp, Homo sapiens
agagtgcctttccag

SEQ ID NO: 815875 - DNA, 15 bp, Homo sapiens
cagagtgcctttcca

SEQ ID NO: 815876 - DNA, 15 bp, Homo sapiens
tcagagtgcctttcc

SEQ ID NO: 815877 - DNA, 15 bp, Homo sapiens
ctcagagtgcctttc

SEQ ID NO: 815878 - DNA, 15 bp, Homo sapiens
cctcagagtgccttt

SEQ ID NO: 815879 - DNA, 15 bp, Homo sapiens
tcctcagagtgcctt

SEQ ID NO: 815880 - DNA, 15 bp, Homo sapiens
atcctcagagtgcct

SEQ ID NO: 815881 - DNA, 15 bp, Homo sapiens
catcctcagagtgcc

SEQ ID NO: 815882 - DNA, 15 bp, Homo sapiens
gcatcctcagagtgc

SEQ ID NO: 815883 - DNA, 15 bp, Homo sapiens
agcatcctcagagtg

SEQ ID NO: 815884 - DNA, 15 bp, Homo sapiens
aagcatcctcagagt

SEQ ID NO: 815885 - DNA, 15 bp, Homo sapiens
gaagcatcctcagag

SEQ ID NO: 815886 - DNA, 15 bp, Homo sapiens
agaagcatcctcaga

SEQ ID NO: 815887 - DNA, 15 bp, Homo sapiens
gagaagcatcctcag

SEQ ID NO: 815888 - DNA, 15 bp, Homo sapiens
agagaagcatcctca

SEQ ID NO: 815889 - DNA, 15 bp, Homo sapiens
tagagaagcatcctc

SEQ ID NO: 815890 - DNA, 15 bp, Homo sapiens
ttagagaagcatcct

SEQ ID NO: 815891 - DNA, 15 bp, Homo sapiens
tttagagaagcatcc

SEQ ID NO: 815892 - DNA, 15 bp, Homo sapiens
ctttagagaagcatc

SEQ ID NO: 815893 - DNA, 15 bp, Homo sapiens
actttagagaagcat

SEQ ID NO: 815894 - DNA, 15 bp, Homo sapiens
tactttagagaagca

SEQ ID NO: 815895 - DNA, 15 bp, Homo sapiens
ctactttagagaagc

SEQ ID NO: 815896 - DNA, 15 bp, Homo sapiens
tctactttagagaag

SEQ ID NO: 815897 - DNA, 15 bp, Homo sapiens
atctactttagagaa

SEQ ID NO: 815898 - DNA, 15 bp, Homo sapiens
catctactttagaga

SEQ ID NO: 815899 - DNA, 15 bp, Homo sapiens
ccatctactttagag

SEQ ID NO: 815900 - DNA, 15 bp, Homo sapiens
cccatctactttaga

SEQ ID NO: 815901 - DNA, 15 bp, Homo sapiens
gcccatctactttag

SEQ ID NO: 815902 - DNA, 15 bp, Homo sapiens
tgcccatctacttta

SEQ ID NO: 815903 - DNA, 15 bp, Homo sapiens
atgcccatctacttt

SEQ ID NO: 815904 - DNA, 15 bp, Homo sapiens
gatgcccatctactt

SEQ ID NO: 815905 - DNA, 15 bp, Homo sapiens
tgatgcccatctact

SEQ ID NO: 815906 - DNA, 15 bp, Homo sapiens
ttgatgcccatctac

SEQ ID NO: 815907 - DNA, 15 bp, Homo sapiens
gttgatgcccatcta

SEQ ID NO: 815908 - DNA, 15 bp, Homo sapiens
agttgatgcccatct

SEQ ID NO: 815909 - DNA, 15 bp, Homo sapiens
tagttgatgcccatc

SEQ ID NO: 815910 - DNA, 15 bp, Homo sapiens
atagttgatgcccat

SEQ ID NO: 815911 - DNA, 15 bp, Homo sapiens
tatagttgatgccca

SEQ ID NO: 815912 - DNA, 15 bp, Homo sapiens
ttatagttgatgccc

SEQ ID NO: 815913 - DNA, 15 bp, Homo sapiens
tttatagttgatgcc

SEQ ID NO: 815914 - DNA, 15 bp, Homo sapiens
atttatagttgatgc

SEQ ID NO: 815915 - DNA, 15 bp, Homo sapiens
gatttatagttgatg

SEQ ID NO: 815916 - DNA, 15 bp, Homo sapiens
tgatttatagttgat

SEQ ID NO: 815917 - DNA, 15 bp, Homo sapiens
gtgatttatagttga

SEQ ID NO: 815918 - DNA, 15 bp, Homo sapiens
tgtgatttatagttg

SEQ ID NO: 815919 - DNA, 15 bp, Homo sapiens
ttgtgatttatagtt

SEQ ID NO: 815920 - DNA, 15 bp, Homo sapiens
attgtgatttatagt

SEQ ID NO: 815921 - DNA, 15 bp, Homo sapiens
cattgtgatttatag

SEQ ID NO: 815922 - DNA, 15 bp, Homo sapiens
gcattgtgatttata

SEQ ID NO: 815923 - DNA, 15 bp, Homo sapiens
agcattgtgatttat

SEQ ID NO: 815924 - DNA, 15 bp, Homo sapiens
aagcattgtgattta

SEQ ID NO: 815925 - DNA, 15 bp, Homo sapiens
aaagcattgtgattt

SEQ ID NO: 815926 - DNA, 15 bp, Homo sapiens
caaagcattgtgatt

SEQ ID NO: 815927 - DNA, 15 bp, Homo sapiens
acaaagcattgtgat

SEQ ID NO: 815928 - DNA, 15 bp, Homo sapiens
aacaaagcattgtga

SEQ ID NO: 815929 - DNA, 15 bp, Homo sapiens
aaacaaagcattgtg

SEQ ID NO: 815930 - DNA, 15 bp, Homo sapiens
gaaacaaagcattgt

SEQ ID NO: 815931 - DNA, 15 bp, Homo sapiens
ggaaacaaagcattg

SEQ ID NO: 815932 - DNA, 15 bp, Homo sapiens
aggaaacaaagcatt

SEQ ID NO: 815933 - DNA, 15 bp, Homo sapiens
gaggaaacaaagcat

SEQ ID NO: 815934 - DNA, 15 bp, Homo sapiens
agaggaaacaaagca

SEQ ID NO: 815935 - DNA, 15 bp, Homo sapiens
cagaggaaacaaagc

SEQ ID NO: 815936 - DNA, 15 bp, Homo sapiens
acagaggaaacaaag

SEQ ID NO: 815937 - DNA, 15 bp, Homo sapiens
aacagaggaaacaaa

SEQ ID NO: 815938 - DNA, 15 bp, Homo sapiens
taacagaggaaacaa

SEQ ID NO: 815939 - DNA, 15 bp, Homo sapiens
ataacagaggaaaca

SEQ ID NO: 815940 - DNA, 15 bp, Homo sapiens
cataacagaggaaac

SEQ ID NO: 815941 - DNA, 15 bp, Homo sapiens
acataacagaggaaa

SEQ ID NO: 815942 - DNA, 15 bp, Homo sapiens
aacataacagaggaa

SEQ ID NO: 815943 - DNA, 15 bp, Homo sapiens
aaacataacagagga

SEQ ID NO: 815944 - DNA, 15 bp, Homo sapiens
gaaacataacagagg

SEQ ID NO: 815945 - DNA, 15 bp, Homo sapiens
tgaaacataacagag

SEQ ID NO: 815946 - DNA, 15 bp, Homo sapiens
ttgaaacataacaga

SEQ ID NO: 815947 - DNA, 15 bp, Homo sapiens
cttgaaacataacag

SEQ ID NO: 815948 - DNA, 15 bp, Homo sapiens
tcttgaaacataaca

SEQ ID NO: 815949 - DNA, 15 bp, Homo sapiens
atcttgaaacataac

SEQ ID NO: 815950 - DNA, 15 bp, Homo sapiens
catcttgaaacataa

SEQ ID NO: 815951 - DNA, 15 bp, Homo sapiens
ccatcttgaaacata

SEQ ID NO: 815952 - DNA, 15 bp, Homo sapiens
cccatcttgaaacat

SEQ ID NO: 815953 - DNA, 15 bp, Homo sapiens
acccatcttgaaaca

SEQ ID NO: 815954 - DNA, 15 bp, Homo sapiens
cacccatcttgaaac

SEQ ID NO: 815955 - DNA, 15 bp, Homo sapiens
ccacccatcttgaaa

SEQ ID NO: 815956 - DNA, 15 bp, Homo sapiens
cccacccatcttgaa

SEQ ID NO: 815957 - DNA, 15 bp, Homo sapiens
tcccacccatcttga

SEQ ID NO: 815958 - DNA, 15 bp, Homo sapiens
atcccacccatcttg

SEQ ID NO: 815959 - DNA, 15 bp, Homo sapiens
aatcccacccatctt

SEQ ID NO: 815960 - DNA, 15 bp, Homo sapiens
aaatcccacccatct

SEQ ID NO: 815961 - DNA, 15 bp, Homo sapiens
aaaatcccacccatc

SEQ ID NO: 815962 - DNA, 15 bp, Homo sapiens
aaaaatcccacccat

SEQ ID NO: 815963 - DNA, 15 bp, Homo sapiens
aaaaaatcccaccca

SEQ ID NO: 815964 - DNA, 15 bp, Homo sapiens
aaaaaaatcccaccc

SEQ ID NO: 815965 - DNA, 15 bp, Homo sapiens
aaaaaaaatcccacc

SEQ ID NO: 815966 - DNA, 15 bp, Homo sapiens
caaaaaaaatcccac

SEQ ID NO: 815967 - DNA, 15 bp, Homo sapiens
acaaaaaaaatccca

SEQ ID NO: 815968 - DNA, 15 bp, Homo sapiens
tacaaaaaaaatccc

SEQ ID NO: 815969 - DNA, 15 bp, Homo sapiens
ctacaaaaaaaatcc

SEQ ID NO: 815970 - DNA, 15 bp, Homo sapiens
gctacaaaaaaaatc

SEQ ID NO: 815971 - DNA, 15 bp, Homo sapiens
tgctacaaaaaaaat

SEQ ID NO: 815972 - DNA, 15 bp, Homo sapiens
atgctacaaaaaaaa

SEQ ID NO: 815973 - DNA, 15 bp, Homo sapiens
aatgctacaaaaaaa

SEQ ID NO: 815974 - DNA, 15 bp, Homo sapiens
taatgctacaaaaaa

SEQ ID NO: 815975 - DNA, 15 bp, Homo sapiens
gtaatgctacaaaaa

SEQ ID NO: 815976 - DNA, 15 bp, Homo sapiens
agtaatgctacaaaa

SEQ ID NO: 815977 - DNA, 15 bp, Homo sapiens
aagtaatgctacaaa

SEQ ID NO: 815978 - DNA, 15 bp, Homo sapiens
taagtaatgctacaa

SEQ ID NO: 815979 - DNA, 15 bp, Homo sapiens
ataagtaatgctaca

SEQ ID NO: 815980 - DNA, 15 bp, Homo sapiens
aataagtaatgctac

SEQ ID NO: 815981 - DNA, 15 bp, Homo sapiens
taataagtaatgcta

SEQ ID NO: 815982 - DNA, 15 bp, Homo sapiens
ataataagtaatgct

SEQ ID NO: 815983 - DNA, 15 bp, Homo sapiens
aataataagtaatgc

SEQ ID NO: 815984 - DNA, 15 bp, Homo sapiens
caataataagtaatg

SEQ ID NO: 815985 - DNA, 15 bp, Homo sapiens
gcaataataagtaat

SEQ ID NO: 815986 - DNA, 15 bp, Homo sapiens
ggcaataataagtaa

SEQ ID NO: 815987 - DNA, 15 bp, Homo sapiens
aggcaataataagta

SEQ ID NO: 815988 - DNA, 15 bp, Homo sapiens
gaggcaataataagt

SEQ ID NO: 815989 - DNA, 15 bp, Homo sapiens
agaggcaataataag

SEQ ID NO: 815990 - DNA, 15 bp, Homo sapiens
gagaggcaataataa

SEQ ID NO: 815991 - DNA, 15 bp, Homo sapiens
tgagaggcaataata

SEQ ID NO: 815992 - DNA, 15 bp, Homo sapiens
ttgagaggcaataat

SEQ ID NO: 815993 - DNA, 15 bp, Homo sapiens
cttgagaggcaataa

SEQ ID NO: 815994 - DNA, 15 bp, Homo sapiens
acttgagaggcaata

SEQ ID NO: 815995 - DNA, 15 bp, Homo sapiens
cacttgagaggcaat

SEQ ID NO: 815996 - DNA, 15 bp, Homo sapiens
gcacttgagaggcaa

SEQ ID NO: 815997 - DNA, 15 bp, Homo sapiens
agcacttgagaggca

SEQ ID NO: 815998 - DNA, 15 bp, Homo sapiens
aagcacttgagaggc

SEQ ID NO: 815999 - DNA, 15 bp, Homo sapiens
caagcacttgagagg

SEQ ID NO: 816000 - DNA, 15 bp, Homo sapiens
tcaagcacttgagag

SEQ ID NO: 816001 - DNA, 15 bp, Homo sapiens
ctcaagcacttgaga

SEQ ID NO: 816002 - DNA, 15 bp, Homo sapiens
actcaagcacttgag

SEQ ID NO: 816003 - DNA, 15 bp, Homo sapiens
gactcaagcacttga

SEQ ID NO: 816004 - DNA, 15 bp, Homo sapiens
agactcaagcacttg

SEQ ID NO: 816005 - DNA, 15 bp, Homo sapiens
aagactcaagcactt

SEQ ID NO: 816006 - DNA, 15 bp, Homo sapiens
aaagactcaagcact

SEQ ID NO: 816007 - DNA, 15 bp, Homo sapiens
caaagactcaagcac

SEQ ID NO: 816008 - DNA, 15 bp, Homo sapiens
tcaaagactcaagca

SEQ ID NO: 816009 - DNA, 15 bp, Homo sapiens
ttcaaagactcaagc

SEQ ID NO: 816010 - DNA, 15 bp, Homo sapiens
tttcaaagactcaag

SEQ ID NO: 816011 - DNA, 15 bp, Homo sapiens
atttcaaagactcaa

SEQ ID NO: 816012 - DNA, 15 bp, Homo sapiens
gatttcaaagactca

SEQ ID NO: 816013 - DNA, 15 bp, Homo sapiens
ggatttcaaagactc

SEQ ID NO: 816014 - DNA, 15 bp, Homo sapiens
tggatttcaaagact

SEQ ID NO: 816015 - DNA, 15 bp, Homo sapiens
ttggatttcaaagac

SEQ ID NO: 816016 - DNA, 15 bp, Homo sapiens
cttggatttcaaaga

SEQ ID NO: 816017 - DNA, 15 bp, Homo sapiens
acttggatttcaaag

SEQ ID NO: 816018 - DNA, 15 bp, Homo sapiens
gacttggatttcaaa

SEQ ID NO: 816019 - DNA, 15 bp, Homo sapiens
tgacttggatttcaa

SEQ ID NO: 816020 - DNA, 15 bp, Homo sapiens
atgacttggatttca

SEQ ID NO: 816021 - DNA, 15 bp, Homo sapiens
catgacttggatttc

SEQ ID NO: 816022 - DNA, 15 bp, Homo sapiens
acatgacttggattt

SEQ ID NO: 816023 - DNA, 15 bp, Homo sapiens
cacatgacttggatt

SEQ ID NO: 816024 - DNA, 15 bp, Homo sapiens
tcacatgacttggat

SEQ ID NO: 816025 - DNA, 15 bp, Homo sapiens
ctcacatgacttgga

SEQ ID NO: 816026 - DNA, 15 bp, Homo sapiens
actcacatgacttgg

SEQ ID NO: 816027 - DNA, 15 bp, Homo sapiens
cactcacatgacttg

SEQ ID NO: 816028 - DNA, 15 bp, Homo sapiens
tcactcacatgactt

SEQ ID NO: 816029 - DNA, 15 bp, Homo sapiens
ttcactcacatgact

SEQ ID NO: 816030 - DNA, 15 bp, Homo sapiens
attcactcacatgac

SEQ ID NO: 816031 - DNA, 15 bp, Homo sapiens
aattcactcacatga

SEQ ID NO: 816032 - DNA, 15 bp, Homo sapiens
taattcactcacatg

SEQ ID NO: 816033 - DNA, 15 bp, Homo sapiens
ctaattcactcacat

SEQ ID NO: 816034 - DNA, 15 bp, Homo sapiens
tctaattcactcaca

SEQ ID NO: 816035 - DNA, 15 bp, Homo sapiens
atctaattcactcac

SEQ ID NO: 816036 - DNA, 15 bp, Homo sapiens
tatctaattcactca

SEQ ID NO: 816037 - DNA, 15 bp, Homo sapiens
gtatctaattcactc

SEQ ID NO: 816038 - DNA, 15 bp, Homo sapiens
tgtatctaattcact

SEQ ID NO: 816039 - DNA, 15 bp, Homo sapiens
ctgtatctaattcac

SEQ ID NO: 816040 - DNA, 15 bp, Homo sapiens
gctgtatctaattca

SEQ ID NO: 816041 - DNA, 15 bp, Homo sapiens
agctgtatctaattc

SEQ ID NO: 816042 - DNA, 15 bp, Homo sapiens
cagctgtatctaatt

SEQ ID NO: 816043 - DNA, 15 bp, Homo sapiens
acagctgtatctaat

SEQ ID NO: 816044 - DNA, 15 bp, Homo sapiens
aacagctgtatctaa

SEQ ID NO: 816045 - DNA, 15 bp, Homo sapiens
taacagctgtatcta

SEQ ID NO: 816046 - DNA, 15 bp, Homo sapiens
ctaacagctgtatct

SEQ ID NO: 816047 - DNA, 15 bp, Homo sapiens
tctaacagctgtatc

SEQ ID NO: 816048 - DNA, 15 bp, Homo sapiens
ttctaacagctgtat

SEQ ID NO: 816049 - DNA, 15 bp, Homo sapiens
cttctaacagctgta

SEQ ID NO: 816050 - DNA, 15 bp, Homo sapiens
acttctaacagctgt

SEQ ID NO: 816051 - DNA, 15 bp, Homo sapiens
cacttctaacagctg

SEQ ID NO: 816052 - DNA, 15 bp, Homo sapiens
ccacttctaacagct

SEQ ID NO: 816053 - DNA, 15 bp, Homo sapiens
gccacttctaacagc

SEQ ID NO: 816054 - DNA, 15 bp, Homo sapiens
ggccacttctaacag

SEQ ID NO: 816055 - DNA, 15 bp, Homo sapiens
aggccacttctaaca

SEQ ID NO: 816056 - DNA, 15 bp, Homo sapiens
aaggccacttctaac

SEQ ID NO: 816057 - DNA, 15 bp, Homo sapiens
aaaggccacttctaa

SEQ ID NO: 816058 - DNA, 15 bp, Homo sapiens
gaaaggccacttcta

SEQ ID NO: 816059 - DNA, 15 bp, Homo sapiens
tgaaaggccacttct

SEQ ID NO: 816060 - DNA, 15 bp, Homo sapiens
ttgaaaggccacttc

SEQ ID NO: 816061 - DNA, 15 bp, Homo sapiens
attgaaaggccactt

SEQ ID NO: 816062 - DNA, 15 bp, Homo sapiens
cattgaaaggccact

SEQ ID NO: 816063 - DNA, 15 bp, Homo sapiens
gcattgaaaggccac

SEQ ID NO: 816064 - DNA, 15 bp, Homo sapiens
ggcattgaaaggcca

SEQ ID NO: 816065 - DNA, 15 bp, Homo sapiens
tggcattgaaaggcc

SEQ ID NO: 816066 - DNA, 15 bp, Homo sapiens
ttggcattgaaaggc

SEQ ID NO: 816067 - DNA, 15 bp, Homo sapiens
attggcattgaaagg

SEQ ID NO: 816068 - DNA, 15 bp, Homo sapiens
cattggcattgaaag

SEQ ID NO: 816069 - DNA, 15 bp, Homo sapiens
ccattggcattgaaa

SEQ ID NO: 816070 - DNA, 15 bp, Homo sapiens
accattggcattgaa

SEQ ID NO: 816071 - DNA, 15 bp, Homo sapiens
taccattggcattga

SEQ ID NO: 816072 - DNA, 15 bp, Homo sapiens
gtaccattggcattg

SEQ ID NO: 816073 - DNA, 15 bp, Homo sapiens
tgtaccattggcatt

SEQ ID NO: 816074 - DNA, 15 bp, Homo sapiens
gtgtaccattggcat

SEQ ID NO: 816075 - DNA, 15 bp, Homo sapiens
tgtgtaccattggca

SEQ ID NO: 816076 - DNA, 15 bp, Homo sapiens
atgtgtaccattggc

SEQ ID NO: 816077 - DNA, 15 bp, Homo sapiens
aatgtgtaccattgg

SEQ ID NO: 816078 - DNA, 15 bp, Homo sapiens
gaatgtgtaccattg

SEQ ID NO: 816079 - DNA, 15 bp, Homo sapiens
ggaatgtgtaccatt

SEQ ID NO: 816080 - DNA, 15 bp, Homo sapiens
aggaatgtgtaccat

SEQ ID NO: 816081 - DNA, 15 bp, Homo sapiens
aaggaatgtgtacca

SEQ ID NO: 816082 - DNA, 15 bp, Homo sapiens
caaggaatgtgtacc

SEQ ID NO: 816083 - DNA, 15 bp, Homo sapiens
ccaaggaatgtgtac

SEQ ID NO: 816084 - DNA, 15 bp, Homo sapiens
accaaggaatgtgta

SEQ ID NO: 816085 - DNA, 15 bp, Homo sapiens
aaccaaggaatgtgt

SEQ ID NO: 816086 - DNA, 15 bp, Homo sapiens
aaaccaaggaatgtg

SEQ ID NO: 816087 - DNA, 15 bp, Homo sapiens
gaaaccaaggaatgt

SEQ ID NO: 816088 - DNA, 15 bp, Homo sapiens
agaaaccaaggaatg

SEQ ID NO: 816089 - DNA, 15 bp, Homo sapiens
aagaaaccaaggaat

SEQ ID NO: 816090 - DNA, 15 bp, Homo sapiens
aaagaaaccaaggaa

SEQ ID NO: 816091 - DNA, 15 bp, Homo sapiens
taaagaaaccaagga

SEQ ID NO: 816092 - DNA, 15 bp, Homo sapiens
gtaaagaaaccaagg

SEQ ID NO: 816093 - DNA, 15 bp, Homo sapiens
cgtaaagaaaccaag

SEQ ID NO: 816094 - DNA, 15 bp, Homo sapiens
tcgtaaagaaaccaa

SEQ ID NO: 816095 - DNA, 15 bp, Homo sapiens
atcgtaaagaaacca

SEQ ID NO: 816096 - DNA, 15 bp, Homo sapiens
tatcgtaaagaaacc

SEQ ID NO: 816097 - DNA, 15 bp, Homo sapiens
gtatcgtaaagaaac

SEQ ID NO: 816098 - DNA, 15 bp, Homo sapiens
agtatcgtaaagaaa

SEQ ID NO: 816099 - DNA, 15 bp, Homo sapiens
tagtatcgtaaagaa

SEQ ID NO: 816100 - DNA, 15 bp, Homo sapiens
atagtatcgtaaaga

SEQ ID NO: 816101 - DNA, 15 bp, Homo sapiens
aatagtatcgtaaag

SEQ ID NO: 816102 - DNA, 15 bp, Homo sapiens
caatagtatcgtaaa

SEQ ID NO: 816103 - DNA, 15 bp, Homo sapiens
gcaatagtatcgtaa

SEQ ID NO: 816104 - DNA, 15 bp, Homo sapiens
agcaatagtatcgta

SEQ ID NO: 816105 - DNA, 15 bp, Homo sapiens
gagcaatagtatcgt

SEQ ID NO: 816106 - DNA, 15 bp, Homo sapiens
agagcaatagtatcg

SEQ ID NO: 816107 - DNA, 15 bp, Homo sapiens
aagagcaatagtatc

SEQ ID NO: 816108 - DNA, 15 bp, Homo sapiens
taagagcaatagtat

SEQ ID NO: 816109 - DNA, 15 bp, Homo sapiens
gtaagagcaatagta

SEQ ID NO: 816110 - DNA, 15 bp, Homo sapiens
tgtaagagcaatagt

SEQ ID NO: 816111 - DNA, 15 bp, Homo sapiens
ttgtaagagcaatag

SEQ ID NO: 816112 - DNA, 15 bp, Homo sapiens
gttgtaagagcaata

SEQ ID NO: 816113 - DNA, 15 bp, Homo sapiens
agttgtaagagcaat

SEQ ID NO: 816114 - DNA, 15 bp, Homo sapiens
aagttgtaagagcaa

SEQ ID NO: 816115 - DNA, 15 bp, Homo sapiens
aaagttgtaagagca

SEQ ID NO: 816116 - DNA, 15 bp, Homo sapiens
aaaagttgtaagagc

SEQ ID NO: 816117 - DNA, 15 bp, Homo sapiens
taaaagttgtaagag

SEQ ID NO: 816118 - DNA, 15 bp, Homo sapiens
ataaaagttgtaaga

SEQ ID NO: 816119 - DNA, 15 bp, Homo sapiens
gataaaagttgtaag

SEQ ID NO: 816120 - DNA, 15 bp, Homo sapiens
agataaaagttgtaa

SEQ ID NO: 816121 - DNA, 15 bp, Homo sapiens
cagataaaagttgta

SEQ ID NO: 816122 - DNA, 15 bp, Homo sapiens
tcagataaaagttgt

SEQ ID NO: 816123 - DNA, 15 bp, Homo sapiens
ttcagataaaagttg

SEQ ID NO: 816124 - DNA, 15 bp, Homo sapiens
cttcagataaaagtt

SEQ ID NO: 816125 - DNA, 15 bp, Homo sapiens
acttcagataaaagt

SEQ ID NO: 816126 - DNA, 15 bp, Homo sapiens
gacttcagataaaag

SEQ ID NO: 816127 - DNA, 15 bp, Homo sapiens
tgacttcagataaaa

SEQ ID NO: 816128 - DNA, 15 bp, Homo sapiens
atgacttcagataaa

SEQ ID NO: 816129 - DNA, 15 bp, Homo sapiens
tatgacttcagataa

SEQ ID NO: 816130 - DNA, 15 bp, Homo sapiens
ttatgacttcagata

SEQ ID NO: 816131 - DNA, 15 bp, Homo sapiens
tttatgacttcagat

SEQ ID NO: 816132 - DNA, 15 bp, Homo sapiens
atttatgacttcaga

SEQ ID NO: 816133 - DNA, 15 bp, Homo sapiens
aatttatgacttcag

SEQ ID NO: 816134 - DNA, 15 bp, Homo sapiens
gaatttatgacttca

SEQ ID NO: 816135 - DNA, 15 bp, Homo sapiens
tgaatttatgacttc

SEQ ID NO: 816136 - DNA, 15 bp, Homo sapiens
atgaatttatgactt

SEQ ID NO: 816137 - DNA, 15 bp, Homo sapiens
tatgaatttatgact

SEQ ID NO: 816138 - DNA, 15 bp, Homo sapiens
ctatgaatttatgac

SEQ ID NO: 816139 - DNA, 15 bp, Homo sapiens
actatgaatttatga

SEQ ID NO: 816140 - DNA, 15 bp, Homo sapiens
aactatgaatttatg

SEQ ID NO: 816141 - DNA, 15 bp, Homo sapiens
caactatgaatttat

SEQ ID NO: 816142 - DNA, 15 bp, Homo sapiens
acaactatgaattta

SEQ ID NO: 816143 - DNA, 15 bp, Homo sapiens
gacaactatgaattt

SEQ ID NO: 816144 - DNA, 15 bp, Homo sapiens
ggacaactatgaatt

SEQ ID NO: 816145 - DNA, 15 bp, Homo sapiens
gggacaactatgaat

SEQ ID NO: 816146 - DNA, 15 bp, Homo sapiens
tgggacaactatgaa

SEQ ID NO: 816147 - DNA, 15 bp, Homo sapiens
ctgggacaactatga

SEQ ID NO: 816148 - DNA, 15 bp, Homo sapiens
tctgggacaactatg

SEQ ID NO: 816149 - DNA, 15 bp, Homo sapiens
ttctgggacaactat

SEQ ID NO: 816150 - DNA, 15 bp, Homo sapiens
cttctgggacaacta

SEQ ID NO: 816151 - DNA, 15 bp, Homo sapiens
acttctgggacaact

SEQ ID NO: 816152 - DNA, 15 bp, Homo sapiens
aacttctgggacaac

SEQ ID NO: 816153 - DNA, 15 bp, Homo sapiens
taacttctgggacaa

SEQ ID NO: 816154 - DNA, 15 bp, Homo sapiens
ttaacttctgggaca

SEQ ID NO: 816155 - DNA, 15 bp, Homo sapiens
cttaacttctgggac

SEQ ID NO: 816156 - DNA, 15 bp, Homo sapiens
acttaacttctggga

SEQ ID NO: 816157 - DNA, 15 bp, Homo sapiens
aacttaacttctggg

SEQ ID NO: 816158 - DNA, 15 bp, Homo sapiens
gaacttaacttctgg

SEQ ID NO: 816159 - DNA, 15 bp, Homo sapiens
ggaacttaacttctg

SEQ ID NO: 816160 - DNA, 15 bp, Homo sapiens
aggaacttaacttct

SEQ ID NO: 816161 - DNA, 15 bp, Homo sapiens
aaggaacttaacttc

SEQ ID NO: 816162 - DNA, 15 bp, Homo sapiens
caaggaacttaactt

SEQ ID NO: 816163 - DNA, 15 bp, Homo sapiens
gcaaggaacttaact

SEQ ID NO: 816164 - DNA, 15 bp, Homo sapiens
agcaaggaacttaac

SEQ ID NO: 816165 - DNA, 15 bp, Homo sapiens
aagcaaggaacttaa

SEQ ID NO: 816166 - DNA, 15 bp, Homo sapiens
gaagcaaggaactta

SEQ ID NO: 816167 - DNA, 15 bp, Homo sapiens
agaagcaaggaactt

SEQ ID NO: 816168 - DNA, 15 bp, Homo sapiens
tagaagcaaggaact

SEQ ID NO: 816169 - DNA, 15 bp, Homo sapiens
ctagaagcaaggaac

SEQ ID NO: 816170 - DNA, 15 bp, Homo sapiens
tctagaagcaaggaa

SEQ ID NO: 816171 - DNA, 15 bp, Homo sapiens
ctctagaagcaagga

SEQ ID NO: 816172 - DNA, 15 bp, Homo sapiens
cctctagaagcaagg

SEQ ID NO: 816173 - DNA, 15 bp, Homo sapiens
tcctctagaagcaag

SEQ ID NO: 816174 - DNA, 15 bp, Homo sapiens
gtcctctagaagcaa

SEQ ID NO: 816175 - DNA, 15 bp, Homo sapiens
tgtcctctagaagca

SEQ ID NO: 816176 - DNA, 15 bp, Homo sapiens
ctgtcctctagaagc

SEQ ID NO: 816177 - DNA, 15 bp, Homo sapiens
tctgtcctctagaag

SEQ ID NO: 816178 - DNA, 15 bp, Homo sapiens
ttctgtcctctagaa

SEQ ID NO: 816179 - DNA, 15 bp, Homo sapiens
tttctgtcctctaga

SEQ ID NO: 816180 - DNA, 15 bp, Homo sapiens
ttttctgtcctctag

SEQ ID NO: 816181 - DNA, 15 bp, Homo sapiens
gttttctgtcctcta

SEQ ID NO: 816182 - DNA, 15 bp, Homo sapiens
tgttttctgtcctct

SEQ ID NO: 816183 - DNA, 15 bp, Homo sapiens
ttgttttctgtcctc

SEQ ID NO: 816184 - DNA, 15 bp, Homo sapiens
tttgttttctgtcct

SEQ ID NO: 816185 - DNA, 15 bp, Homo sapiens
gtttgttttctgtcc

SEQ ID NO: 816186 - DNA, 15 bp, Homo sapiens
tgtttgttttctgtc

SEQ ID NO: 816187 - DNA, 15 bp, Homo sapiens
ttgtttgttttctgt

SEQ ID NO: 816188 - DNA, 15 bp, Homo sapiens
attgtttgttttctg

SEQ ID NO: 816189 - DNA, 15 bp, Homo sapiens
aattgtttgttttct

SEQ ID NO: 816190 - DNA, 15 bp, Homo sapiens
aaattgtttgttttc

SEQ ID NO: 816191 - DNA, 15 bp, Homo sapiens
taaattgtttgtttt

SEQ ID NO: 816192 - DNA, 15 bp, Homo sapiens
gtaaattgtttgttt

SEQ ID NO: 816193 - DNA, 15 bp, Homo sapiens
tgtaaattgtttgtt

SEQ ID NO: 816194 - DNA, 15 bp, Homo sapiens
gtgtaaattgtttgt

SEQ ID NO: 816195 - DNA, 15 bp, Homo sapiens
tgtgtaaattgtttg

SEQ ID NO: 816196 - DNA, 15 bp, Homo sapiens
ttgtgtaaattgttt

SEQ ID NO: 816197 - DNA, 15 bp, Homo sapiens
gttgtgtaaattgtt

SEQ ID NO: 816198 - DNA, 15 bp, Homo sapiens
agttgtgtaaattgt

SEQ ID NO: 816199 - DNA, 15 bp, Homo sapiens
gagttgtgtaaattg

SEQ ID NO: 816200 - DNA, 15 bp, Homo sapiens
tgagttgtgtaaatt

SEQ ID NO: 816201 - DNA, 15 bp, Homo sapiens
atgagttgtgtaaat

SEQ ID NO: 816202 - DNA, 15 bp, Homo sapiens
catgagttgtgtaaa

SEQ ID NO: 816203 - DNA, 15 bp, Homo sapiens
ccatgagttgtgtaa

SEQ ID NO: 816204 - DNA, 15 bp, Homo sapiens
accatgagttgtgta

SEQ ID NO: 816205 - DNA, 15 bp, Homo sapiens
caccatgagttgtgt

SEQ ID NO: 816206 - DNA, 15 bp, Homo sapiens
gcaccatgagttgtg

SEQ ID NO: 816207 - DNA, 15 bp, Homo sapiens
tgcaccatgagttgt

SEQ ID NO: 816208 - DNA, 15 bp, Homo sapiens
atgcaccatgagttg

SEQ ID NO: 816209 - DNA, 15 bp, Homo sapiens
catgcaccatgagtt

SEQ ID NO: 816210 - DNA, 15 bp, Homo sapiens
acatgcaccatgagt

SEQ ID NO: 816211 - DNA, 15 bp, Homo sapiens
gacatgcaccatgag

SEQ ID NO: 816212 - DNA, 15 bp, Homo sapiens
tgacatgcaccatga

SEQ ID NO: 816213 - DNA, 15 bp, Homo sapiens
gtgacatgcaccatg

SEQ ID NO: 816214 - DNA, 15 bp, Homo sapiens
ggtgacatgcaccat

SEQ ID NO: 816215 - DNA, 15 bp, Homo sapiens
tggtgacatgcacca

SEQ ID NO: 816216 - DNA, 15 bp, Homo sapiens
ctggtgacatgcacc

SEQ ID NO: 816217 - DNA, 15 bp, Homo sapiens
actggtgacatgcac

SEQ ID NO: 816218 - DNA, 15 bp, Homo sapiens
gactggtgacatgca

SEQ ID NO: 816219 - DNA, 15 bp, Homo sapiens
ggactggtgacatgc

SEQ ID NO: 816220 - DNA, 15 bp, Homo sapiens
aggactggtgacatg

SEQ ID NO: 816221 - DNA, 15 bp, Homo sapiens
aaggactggtgacat

SEQ ID NO: 816222 - DNA, 15 bp, Homo sapiens
taaggactggtgaca

SEQ ID NO: 816223 - DNA, 15 bp, Homo sapiens
ctaaggactggtgac

SEQ ID NO: 816224 - DNA, 15 bp, Homo sapiens
tctaaggactggtga

SEQ ID NO: 816225 - DNA, 15 bp, Homo sapiens
atctaaggactggtg

SEQ ID NO: 816226 - DNA, 15 bp, Homo sapiens
gatctaaggactggt

SEQ ID NO: 816227 - DNA, 15 bp, Homo sapiens
agatctaaggactgg

SEQ ID NO: 816228 - DNA, 15 bp, Homo sapiens
gagatctaaggactg

SEQ ID NO: 816229 - DNA, 15 bp, Homo sapiens
tgagatctaaggact

SEQ ID NO: 816230 - DNA, 15 bp, Homo sapiens
atgagatctaaggac

SEQ ID NO: 816231 - DNA, 15 bp, Homo sapiens
catgagatctaagga

SEQ ID NO: 816232 - DNA, 15 bp, Homo sapiens
tcatgagatctaagg

SEQ ID NO: 816233 - DNA, 15 bp, Homo sapiens
ttcatgagatctaag

SEQ ID NO: 816234 - DNA, 15 bp, Homo sapiens
tttcatgagatctaa

SEQ ID NO: 816235 - DNA, 15 bp, Homo sapiens
atttcatgagatcta

SEQ ID NO: 816236 - DNA, 15 bp, Homo sapiens
tatttcatgagatct

SEQ ID NO: 816237 - DNA, 15 bp, Homo sapiens
atatttcatgagatc

SEQ ID NO: 816238 - DNA, 15 bp, Homo sapiens
catatttcatgagat

SEQ ID NO: 816239 - DNA, 15 bp, Homo sapiens
gcatatttcatgaga

SEQ ID NO: 816240 - DNA, 15 bp, Homo sapiens
tgcatatttcatgag

SEQ ID NO: 816241 - DNA, 15 bp, Homo sapiens
atgcatatttcatga

SEQ ID NO: 816242 - DNA, 15 bp, Homo sapiens
catgcatatttcatg

SEQ ID NO: 816243 - DNA, 15 bp, Homo sapiens
tcatgcatatttcat

SEQ ID NO: 816244 - DNA, 15 bp, Homo sapiens
ttcatgcatatttca

SEQ ID NO: 816245 - DNA, 15 bp, Homo sapiens
tttcatgcatatttc

SEQ ID NO: 816246 - DNA, 15 bp, Homo sapiens
atttcatgcatattt

SEQ ID NO: 816247 - DNA, 15 bp, Homo sapiens
gatttcatgcatatt

SEQ ID NO: 816248 - DNA, 15 bp, Homo sapiens
agatttcatgcatat

SEQ ID NO: 816249 - DNA, 15 bp, Homo sapiens
aagatttcatgcata

SEQ ID NO: 816250 - DNA, 15 bp, Homo sapiens
taagatttcatgcat

SEQ ID NO: 816251 - DNA, 15 bp, Homo sapiens
ttaagatttcatgca

SEQ ID NO: 816252 - DNA, 15 bp, Homo sapiens
tttaagatttcatgc

SEQ ID NO: 816253 - DNA, 15 bp, Homo sapiens
atttaagatttcatg

SEQ ID NO: 816254 - DNA, 15 bp, Homo sapiens
gatttaagatttcat

SEQ ID NO: 816255 - DNA, 15 bp, Homo sapiens
tgatttaagatttca

SEQ ID NO: 816256 - DNA, 15 bp, Homo sapiens
gtgatttaagatttc

SEQ ID NO: 816257 - DNA, 15 bp, Homo sapiens
agtgatttaagattt

SEQ ID NO: 816258 - DNA, 15 bp, Homo sapiens
aagtgatttaagatt

SEQ ID NO: 816259 - DNA, 15 bp, Homo sapiens
caagtgatttaagat

SEQ ID NO: 816260 - DNA, 15 bp, Homo sapiens
gcaagtgatttaaga

SEQ ID NO: 816261 - DNA, 15 bp, Homo sapiens
agcaagtgatttaag

SEQ ID NO: 816262 - DNA, 15 bp, Homo sapiens
cagcaagtgatttaa

SEQ ID NO: 816263 - DNA, 15 bp, Homo sapiens
acagcaagtgattta

SEQ ID NO: 816264 - DNA, 15 bp, Homo sapiens
tacagcaagtgattt

SEQ ID NO: 816265 - DNA, 15 bp, Homo sapiens
ctacagcaagtgatt

SEQ ID NO: 816266 - DNA, 15 bp, Homo sapiens
gctacagcaagtgat

SEQ ID NO: 816267 - DNA, 15 bp, Homo sapiens
ggctacagcaagtga

SEQ ID NO: 816268 - DNA, 15 bp, Homo sapiens
tggctacagcaagtg

SEQ ID NO: 816269 - DNA, 15 bp, Homo sapiens
gtggctacagcaagt

SEQ ID NO: 816270 - DNA, 15 bp, Homo sapiens
ggtggctacagcaag

SEQ ID NO: 816271 - DNA, 15 bp, Homo sapiens
gggtggctacagcaa

SEQ ID NO: 816272 - DNA, 15 bp, Homo sapiens
tgggtggctacagca

SEQ ID NO: 816273 - DNA, 15 bp, Homo sapiens
ctgggtggctacagc

SEQ ID NO: 816274 - DNA, 15 bp, Homo sapiens
gctgggtggctacag

SEQ ID NO: 816275 - DNA, 15 bp, Homo sapiens
ggctgggtggctaca

SEQ ID NO: 816276 - DNA, 15 bp, Homo sapiens
tggctgggtggctac

SEQ ID NO: 816277 - DNA, 15 bp, Homo sapiens
atggctgggtggcta

SEQ ID NO: 816278 - DNA, 15 bp, Homo sapiens
aatggctgggtggct

SEQ ID NO: 816279 - DNA, 15 bp, Homo sapiens
caatggctgggtggc

SEQ ID NO: 816280 - DNA, 15 bp, Homo sapiens
tcaatggctgggtgg

SEQ ID NO: 816281 - DNA, 15 bp, Homo sapiens
gtcaatggctgggtg

SEQ ID NO: 816282 - DNA, 15 bp, Homo sapiens
tgtcaatggctgggt

SEQ ID NO: 816283 - DNA, 15 bp, Homo sapiens
atgtcaatggctggg

SEQ ID NO: 816284 - DNA, 15 bp, Homo sapiens
tatgtcaatggctgg

SEQ ID NO: 816285 - DNA, 15 bp, Homo sapiens
atatgtcaatggctg

SEQ ID NO: 816286 - DNA, 15 bp, Homo sapiens
aatatgtcaatggct

SEQ ID NO: 816287 - DNA, 15 bp, Homo sapiens
aaatatgtcaatggc

SEQ ID NO: 816288 - DNA, 15 bp, Homo sapiens
caaatatgtcaatgg

SEQ ID NO: 816289 - DNA, 15 bp, Homo sapiens
tcaaatatgtcaatg

SEQ ID NO: 816290 - DNA, 15 bp, Homo sapiens
ttcaaatatgtcaat

SEQ ID NO: 816291 - DNA, 15 bp, Homo sapiens
tttcaaatatgtcaa

SEQ ID NO: 816292 - DNA, 15 bp, Homo sapiens
ctttcaaatatgtca

SEQ ID NO: 816293 - DNA, 15 bp, Homo sapiens
tctttcaaatatgtc

SEQ ID NO: 816294 - DNA, 15 bp, Homo sapiens
gtctttcaaatatgt

SEQ ID NO: 816295 - DNA, 15 bp, Homo sapiens
agtctttcaaatatg

SEQ ID NO: 816296 - DNA, 15 bp, Homo sapiens
aagtctttcaaatat

SEQ ID NO: 816297 - DNA, 15 bp, Homo sapiens
aaagtctttcaaata

SEQ ID NO: 816298 - DNA, 15 bp, Homo sapiens
taaagtctttcaaat

SEQ ID NO: 816299 - DNA, 15 bp, Homo sapiens
ctaaagtctttcaaa

SEQ ID NO: 816300 - DNA, 15 bp, Homo sapiens
actaaagtctttcaa

SEQ ID NO: 816301 - DNA, 15 bp, Homo sapiens
cactaaagtctttca

SEQ ID NO: 816302 - DNA, 15 bp, Homo sapiens
acactaaagtctttc

SEQ ID NO: 816303 - DNA, 15 bp, Homo sapiens
tacactaaagtcttt

SEQ ID NO: 816304 - DNA, 15 bp, Homo sapiens
atacactaaagtctt

SEQ ID NO: 816305 - DNA, 15 bp, Homo sapiens
gatacactaaagtct

SEQ ID NO: 816306 - DNA, 15 bp, Homo sapiens
tgatacactaaagtc

SEQ ID NO: 816307 - DNA, 15 bp, Homo sapiens
ttgatacactaaagt

SEQ ID NO: 816308 - DNA, 15 bp, Homo sapiens
tttgatacactaaag

SEQ ID NO: 816309 - DNA, 15 bp, Homo sapiens
ctttgatacactaaa

SEQ ID NO: 816310 - DNA, 15 bp, Homo sapiens
actttgatacactaa

SEQ ID NO: 816311 - DNA, 15 bp, Homo sapiens
gactttgatacacta

SEQ ID NO: 816312 - DNA, 15 bp, Homo sapiens
tgactttgatacact

SEQ ID NO: 816313 - DNA, 15 bp, Homo sapiens
gtgactttgatacac

SEQ ID NO: 816314 - DNA, 15 bp, Homo sapiens
agtgactttgataca

SEQ ID NO: 816315 - DNA, 15 bp, Homo sapiens
tagtgactttgatac

SEQ ID NO: 816316 - DNA, 15 bp, Homo sapiens
atagtgactttgata

SEQ ID NO: 816317 - DNA, 15 bp, Homo sapiens
tatagtgactttgat

SEQ ID NO: 816318 - DNA, 15 bp, Homo sapiens
ttatagtgactttga

SEQ ID NO: 816319 - DNA, 15 bp, Homo sapiens
attatagtgactttg

SEQ ID NO: 816320 - DNA, 15 bp, Homo sapiens
cattatagtgacttt

SEQ ID NO: 816321 - DNA, 15 bp, Homo sapiens
tcattatagtgactt

SEQ ID NO: 816322 - DNA, 15 bp, Homo sapiens
ttcattatagtgact

SEQ ID NO: 816323 - DNA, 15 bp, Homo sapiens
tttcattatagtgac

SEQ ID NO: 816324 - DNA, 15 bp, Homo sapiens
ttttcattatagtga

SEQ ID NO: 816325 - DNA, 15 bp, Homo sapiens
attttcattatagtg

SEQ ID NO: 816326 - DNA, 15 bp, Homo sapiens
aattttcattatagt

SEQ ID NO: 816327 - DNA, 15 bp, Homo sapiens
aaattttcattatag

SEQ ID NO: 816328 - DNA, 15 bp, Homo sapiens
aaaattttcattata

SEQ ID NO: 816329 - DNA, 15 bp, Homo sapiens
caaaattttcattat

SEQ ID NO: 816330 - DNA, 15 bp, Homo sapiens
tcaaaattttcatta

SEQ ID NO: 816331 - DNA, 15 bp, Homo sapiens
atcaaaattttcatt

SEQ ID NO: 816332 - DNA, 15 bp, Homo sapiens
aatcaaaattttcat

SEQ ID NO: 816333 - DNA, 15 bp, Homo sapiens
aaatcaaaattttca

SEQ ID NO: 816334 - DNA, 15 bp, Homo sapiens
gaaatcaaaattttc

SEQ ID NO: 816335 - DNA, 15 bp, Homo sapiens
tgaaatcaaaatttt

SEQ ID NO: 816336 - DNA, 15 bp, Homo sapiens
gtgaaatcaaaattt

SEQ ID NO: 816337 - DNA, 15 bp, Homo sapiens
ggtgaaatcaaaatt

SEQ ID NO: 816338 - DNA, 15 bp, Homo sapiens
tggtgaaatcaaaat

SEQ ID NO: 816339 - DNA, 15 bp, Homo sapiens
ctggtgaaatcaaaa

SEQ ID NO: 816340 - DNA, 15 bp, Homo sapiens
actggtgaaatcaaa

SEQ ID NO: 816341 - DNA, 15 bp, Homo sapiens
aactggtgaaatcaa

SEQ ID NO: 816342 - DNA, 15 bp, Homo sapiens
gaactggtgaaatca

SEQ ID NO: 816343 - DNA, 15 bp, Homo sapiens
agaactggtgaaatc

SEQ ID NO: 816344 - DNA, 15 bp, Homo sapiens
tagaactggtgaaat

SEQ ID NO: 816345 - DNA, 15 bp, Homo sapiens
ctagaactggtgaaa

SEQ ID NO: 816346 - DNA, 15 bp, Homo sapiens
cctagaactggtgaa

SEQ ID NO: 816347 - DNA, 15 bp, Homo sapiens
tcctagaactggtga

SEQ ID NO: 816348 - DNA, 15 bp, Homo sapiens
ctcctagaactggtg

SEQ ID NO: 816349 - DNA, 15 bp, Homo sapiens
actcctagaactggt

SEQ ID NO: 816350 - DNA, 15 bp, Homo sapiens
cactcctagaactgg

SEQ ID NO: 816351 - DNA, 15 bp, Homo sapiens
tcactcctagaactg

SEQ ID NO: 816352 - DNA, 15 bp, Homo sapiens
ttcactcctagaact

SEQ ID NO: 816353 - DNA, 15 bp, Homo sapiens
tttcactcctagaac

SEQ ID NO: 816354 - DNA, 15 bp, Homo sapiens
ttttcactcctagaa

SEQ ID NO: 816355 - DNA, 15 bp, Homo sapiens
tttttcactcctaga

SEQ ID NO: 816356 - DNA, 15 bp, Homo sapiens
atttttcactcctag

SEQ ID NO: 816357 - DNA, 15 bp, Homo sapiens
gatttttcactccta

SEQ ID NO: 816358 - DNA, 15 bp, Homo sapiens
tgatttttcactcct

SEQ ID NO: 816359 - DNA, 15 bp, Homo sapiens
ttgatttttcactcc

SEQ ID NO: 816360 - DNA, 15 bp, Homo sapiens
tttgatttttcactc

SEQ ID NO: 816361 - DNA, 15 bp, Homo sapiens
atttgatttttcact

SEQ ID NO: 816362 - DNA, 15 bp, Homo sapiens
catttgatttttcac

SEQ ID NO: 816363 - DNA, 15 bp, Homo sapiens
acatttgatttttca

SEQ ID NO: 816364 - DNA, 15 bp, Homo sapiens
aacatttgatttttc

SEQ ID NO: 816365 - DNA, 15 bp, Homo sapiens
aaacatttgattttt

SEQ ID NO: 816366 - DNA, 15 bp, Homo sapiens
taaacatttgatttt

SEQ ID NO: 816367 - DNA, 15 bp, Homo sapiens
ctaaacatttgattt

SEQ ID NO: 816368 - DNA, 15 bp, Homo sapiens
actaaacatttgatt

SEQ ID NO: 816369 - DNA, 15 bp, Homo sapiens
tactaaacatttgat

SEQ ID NO: 816370 - DNA, 15 bp, Homo sapiens
ttactaaacatttga

SEQ ID NO: 816371 - DNA, 15 bp, Homo sapiens
tttactaaacatttg

SEQ ID NO: 816372 - DNA, 15 bp, Homo sapiens
ttttactaaacattt

SEQ ID NO: 816373 - DNA, 15 bp, Homo sapiens
gttttactaaacatt

SEQ ID NO: 816374 - DNA, 15 bp, Homo sapiens
agttttactaaacat

SEQ ID NO: 816375 - DNA, 15 bp, Homo sapiens
aagttttactaaaca

SEQ ID NO: 816376 - DNA, 15 bp, Homo sapiens
aaagttttactaaac

SEQ ID NO: 816377 - DNA, 15 bp, Homo sapiens
gaaagttttactaaa

SEQ ID NO: 816378 - DNA, 15 bp, Homo sapiens
agaaagttttactaa

SEQ ID NO: 816379 - DNA, 15 bp, Homo sapiens
tagaaagttttacta

SEQ ID NO: 816380 - DNA, 15 bp, Homo sapiens
ttagaaagttttact

SEQ ID NO: 816381 - DNA, 15 bp, Homo sapiens
tttagaaagttttac

SEQ ID NO: 816382 - DNA, 15 bp, Homo sapiens
ttttagaaagtttta

SEQ ID NO: 816383 - DNA, 15 bp, Homo sapiens
attttagaaagtttt

SEQ ID NO: 816384 - DNA, 15 bp, Homo sapiens
aattttagaaagttt

SEQ ID NO: 816385 - DNA, 15 bp, Homo sapiens
taattttagaaagtt

SEQ ID NO: 816386 - DNA, 15 bp, Homo sapiens
ttaattttagaaagt

SEQ ID NO: 816387 - DNA, 15 bp, Homo sapiens
gttaattttagaaag

SEQ ID NO: 816388 - DNA, 15 bp, Homo sapiens
tgttaattttagaaa

SEQ ID NO: 816389 - DNA, 15 bp, Homo sapiens
gtgttaattttagaa

SEQ ID NO: 816390 - DNA, 15 bp, Homo sapiens
agtgttaattttaga

SEQ ID NO: 816391 - DNA, 15 bp, Homo sapiens
cagtgttaattttag

SEQ ID NO: 816392 - DNA, 15 bp, Homo sapiens
tcagtgttaatttta

SEQ ID NO: 816393 - DNA, 15 bp, Homo sapiens
gtcagtgttaatttt

SEQ ID NO: 816394 - DNA, 15 bp, Homo sapiens
tgtcagtgttaattt

SEQ ID NO: 816395 - DNA, 15 bp, Homo sapiens
ctgtcagtgttaatt

SEQ ID NO: 816396 - DNA, 15 bp, Homo sapiens
actgtcagtgttaat

SEQ ID NO: 816397 - DNA, 15 bp, Homo sapiens
aactgtcagtgttaa

SEQ ID NO: 816398 - DNA, 15 bp, Homo sapiens
caactgtcagtgtta

SEQ ID NO: 816399 - DNA, 15 bp, Homo sapiens
tcaactgtcagtgtt

SEQ ID NO: 816400 - DNA, 15 bp, Homo sapiens
atcaactgtcagtgt

SEQ ID NO: 816401 - DNA, 15 bp, Homo sapiens
aatcaactgtcagtg

SEQ ID NO: 816402 - DNA, 15 bp, Homo sapiens
aaatcaactgtcagt

SEQ ID NO: 816403 - DNA, 15 bp, Homo sapiens
gaaatcaactgtcag

SEQ ID NO: 816404 - DNA, 15 bp, Homo sapiens
agaaatcaactgtca

SEQ ID NO: 816405 - DNA, 15 bp, Homo sapiens
cagaaatcaactgtc

SEQ ID NO: 816406 - DNA, 15 bp, Homo sapiens
acagaaatcaactgt

SEQ ID NO: 816407 - DNA, 15 bp, Homo sapiens
tacagaaatcaactg

SEQ ID NO: 816408 - DNA, 15 bp, Homo sapiens
atacagaaatcaact

SEQ ID NO: 816409 - DNA, 15 bp, Homo sapiens
tatacagaaatcaac

SEQ ID NO: 816410 - DNA, 15 bp, Homo sapiens
gtatacagaaatcaa

SEQ ID NO: 816411 - DNA, 15 bp, Homo sapiens
agtatacagaaatca

SEQ ID NO: 816412 - DNA, 15 bp, Homo sapiens
cagtatacagaaatc

SEQ ID NO: 816413 - DNA, 15 bp, Homo sapiens
acagtatacagaaat

SEQ ID NO: 816414 - DNA, 15 bp, Homo sapiens
aacagtatacagaaa

SEQ ID NO: 816415 - DNA, 15 bp, Homo sapiens
caacagtatacagaa

SEQ ID NO: 816416 - DNA, 15 bp, Homo sapiens
acaacagtatacaga

SEQ ID NO: 816417 - DNA, 15 bp, Homo sapiens
aacaacagtatacag

SEQ ID NO: 816418 - DNA, 15 bp, Homo sapiens
gaacaacagtataca

SEQ ID NO: 816419 - DNA, 15 bp, Homo sapiens
agaacaacagtatac

SEQ ID NO: 816420 - DNA, 15 bp, Homo sapiens
aagaacaacagtata

SEQ ID NO: 816421 - DNA, 15 bp, Homo sapiens
taagaacaacagtat

SEQ ID NO: 816422 - DNA, 15 bp, Homo sapiens
ttaagaacaacagta

SEQ ID NO: 816423 - DNA, 15 bp, Homo sapiens
attaagaacaacagt

SEQ ID NO: 816424 - DNA, 15 bp, Homo sapiens
tattaagaacaacag

SEQ ID NO: 816425 - DNA, 15 bp, Homo sapiens
ttattaagaacaaca

SEQ ID NO: 816426 - DNA, 15 bp, Homo sapiens
attattaagaacaac

SEQ ID NO: 816427 - DNA, 15 bp, Homo sapiens
tattattaagaacaa

SEQ ID NO: 816428 - DNA, 15 bp, Homo sapiens
ctattattaagaaca

SEQ ID NO: 816429 - DNA, 15 bp, Homo sapiens
gctattattaagaac

SEQ ID NO: 816430 - DNA, 15 bp, Homo sapiens
agctattattaagaa

SEQ ID NO: 816431 - DNA, 15 bp, Homo sapiens
aagctattattaaga

SEQ ID NO: 816432 - DNA, 15 bp, Homo sapiens
aaagctattattaag

SEQ ID NO: 816433 - DNA, 15 bp, Homo sapiens
taaagctattattaa

SEQ ID NO: 816434 - DNA, 15 bp, Homo sapiens
ataaagctattatta

SEQ ID NO: 816435 - DNA, 15 bp, Homo sapiens
aataaagctattatt

SEQ ID NO: 816436 - DNA, 15 bp, Homo sapiens
caataaagctattat

SEQ ID NO: 816437 - DNA, 15 bp, Homo sapiens
tcaataaagctatta

SEQ ID NO: 816438 - DNA, 15 bp, Homo sapiens
ctcaataaagctatt

SEQ ID NO: 816439 - DNA, 15 bp, Homo sapiens
tctcaataaagctat

SEQ ID NO: 816440 - DNA, 15 bp, Homo sapiens
atctcaataaagcta

SEQ ID NO: 816441 - DNA, 15 bp, Homo sapiens
tatctcaataaagct

SEQ ID NO: 816442 - DNA, 15 bp, Homo sapiens
atatctcaataaagc

SEQ ID NO: 816443 - DNA, 15 bp, Homo sapiens
tatatctcaataaag

SEQ ID NO: 816444 - DNA, 15 bp, Homo sapiens
ttatatctcaataaa

SEQ ID NO: 816445 - DNA, 15 bp, Homo sapiens
attatatctcaataa

SEQ ID NO: 816446 - DNA, 15 bp, Homo sapiens
aattatatctcaata

SEQ ID NO: 816447 - DNA, 15 bp, Homo sapiens
gaattatatctcaat

SEQ ID NO: 816448 - DNA, 15 bp, Homo sapiens
tgaattatatctcaa

SEQ ID NO: 816449 - DNA, 15 bp, Homo sapiens
atgaattatatctca

SEQ ID NO: 816450 - DNA, 15 bp, Homo sapiens
tatgaattatatctc

SEQ ID NO: 816451 - DNA, 15 bp, Homo sapiens
atatgaattatatct

SEQ ID NO: 816452 - DNA, 15 bp, Homo sapiens
aatatgaattatatc

SEQ ID NO: 816453 - DNA, 15 bp, Homo sapiens
gaatatgaattatat

SEQ ID NO: 816454 - DNA, 15 bp, Homo sapiens
tgaatatgaattata

SEQ ID NO: 816455 - DNA, 15 bp, Homo sapiens
ttgaatatgaattat

SEQ ID NO: 816456 - DNA, 15 bp, Homo sapiens
tttgaatatgaatta

SEQ ID NO: 816457 - DNA, 15 bp, Homo sapiens
ttttgaatatgaatt

SEQ ID NO: 816458 - DNA, 15 bp, Homo sapiens
gttttgaatatgaat

SEQ ID NO: 816459 - DNA, 15 bp, Homo sapiens
tgttttgaatatgaa

SEQ ID NO: 816460 - DNA, 15 bp, Homo sapiens
ttgttttgaatatga

SEQ ID NO: 816461 - DNA, 15 bp, Homo sapiens
gttgttttgaatatg

SEQ ID NO: 816462 - DNA, 15 bp, Homo sapiens
agttgttttgaatat

SEQ ID NO: 816463 - DNA, 15 bp, Homo sapiens
aagttgttttgaata

SEQ ID NO: 816464 - DNA, 15 bp, Homo sapiens
taagttgttttgaat

SEQ ID NO: 816465 - DNA, 15 bp, Homo sapiens
gtaagttgttttgaa

SEQ ID NO: 816466 - DNA, 15 bp, Homo sapiens
ggtaagttgttttga

SEQ ID NO: 816467 - DNA, 15 bp, Homo sapiens
gggtaagttgttttg

SEQ ID NO: 816468 - DNA, 15 bp, Homo sapiens
tgggtaagttgtttt

SEQ ID NO: 816469 - DNA, 15 bp, Homo sapiens
atgggtaagttgttt

SEQ ID NO: 816470 - DNA, 15 bp, Homo sapiens
aatgggtaagttgtt

SEQ ID NO: 816471 - DNA, 15 bp, Homo sapiens
aaatgggtaagttgt

SEQ ID NO: 816472 - DNA, 15 bp, Homo sapiens
taaatgggtaagttg

SEQ ID NO: 816473 - DNA, 15 bp, Homo sapiens
ttaaatgggtaagtt

SEQ ID NO: 816474 - DNA, 15 bp, Homo sapiens
tttaaatgggtaagt

SEQ ID NO: 816475 - DNA, 15 bp, Homo sapiens
ctttaaatgggtaag

SEQ ID NO: 816476 - DNA, 15 bp, Homo sapiens
gctttaaatgggtaa

SEQ ID NO: 816477 - DNA, 15 bp, Homo sapiens
tgctttaaatgggta

SEQ ID NO: 816478 - DNA, 15 bp, Homo sapiens
atgctttaaatgggt

SEQ ID NO: 816479 - DNA, 15 bp, Homo sapiens
tatgctttaaatggg

SEQ ID NO: 816480 - DNA, 15 bp, Homo sapiens
gtatgctttaaatgg

SEQ ID NO: 816481 - DNA, 15 bp, Homo sapiens
tgtatgctttaaatg

SEQ ID NO: 816482 - DNA, 15 bp, Homo sapiens
ttgtatgctttaaat

SEQ ID NO: 816483 - DNA, 15 bp, Homo sapiens
attgtatgctttaaa

SEQ ID NO: 816484 - DNA, 15 bp, Homo sapiens
gattgtatgctttaa

SEQ ID NO: 816485 - DNA, 15 bp, Homo sapiens
ggattgtatgcttta

SEQ ID NO: 816486 - DNA, 15 bp, Homo sapiens
tggattgtatgcttt

SEQ ID NO: 816487 - DNA, 15 bp, Homo sapiens
ttggattgtatgctt

SEQ ID NO: 816488 - DNA, 15 bp, Homo sapiens
attggattgtatgct

SEQ ID NO: 816489 - DNA, 15 bp, Homo sapiens
cattggattgtatgc

SEQ ID NO: 816490 - DNA, 15 bp, Homo sapiens
tcattggattgtatg

SEQ ID NO: 816491 - DNA, 15 bp, Homo sapiens
atcattggattgtat

SEQ ID NO: 816492 - DNA, 15 bp, Homo sapiens
aatcattggattgta

SEQ ID NO: 816493 - DNA, 15 bp, Homo sapiens
aaatcattggattgt

SEQ ID NO: 816494 - DNA, 15 bp, Homo sapiens
aaaatcattggattg

SEQ ID NO: 816495 - DNA, 15 bp, Homo sapiens
aaaaatcattggatt

SEQ ID NO: 816496 - DNA, 15 bp, Homo sapiens
aaaaaatcattggat

SEQ ID NO: 816497 - DNA, 15 bp, Homo sapiens
taaaaaatcattgga

SEQ ID NO: 816498 - DNA, 15 bp, Homo sapiens
ctaaaaaatcattgg

SEQ ID NO: 816499 - DNA, 15 bp, Homo sapiens
actaaaaaatcattg

SEQ ID NO: 816500 - DNA, 15 bp, Homo sapiens
tactaaaaaatcatt

SEQ ID NO: 816501 - DNA, 15 bp, Homo sapiens
atactaaaaaatcat

SEQ ID NO: 816502 - DNA, 15 bp, Homo sapiens
gatactaaaaaatca

SEQ ID NO: 816503 - DNA, 15 bp, Homo sapiens
agatactaaaaaatc

SEQ ID NO: 816504 - DNA, 15 bp, Homo sapiens
aagatactaaaaaat

SEQ ID NO: 816505 - DNA, 15 bp, Homo sapiens
gaagatactaaaaaa

SEQ ID NO: 816506 - DNA, 15 bp, Homo sapiens
tgaagatactaaaaa

SEQ ID NO: 816507 - DNA, 15 bp, Homo sapiens
ttgaagatactaaaa

SEQ ID NO: 816508 - DNA, 15 bp, Homo sapiens
tttgaagatactaaa

SEQ ID NO: 816509 - DNA, 15 bp, Homo sapiens
ctttgaagatactaa

SEQ ID NO: 816510 - DNA, 15 bp, Homo sapiens
tctttgaagatacta

SEQ ID NO: 816511 - DNA, 15 bp, Homo sapiens
ctctttgaagatact

SEQ ID NO: 816512 - DNA, 15 bp, Homo sapiens
actctttgaagatac

SEQ ID NO: 816513 - DNA, 15 bp, Homo sapiens
aactctttgaagata

SEQ ID NO: 816514 - DNA, 15 bp, Homo sapiens
caactctttgaagat

SEQ ID NO: 816515 - DNA, 15 bp, Homo sapiens
gcaactctttgaaga

SEQ ID NO: 816516 - DNA, 15 bp, Homo sapiens
ggcaactctttgaag

SEQ ID NO: 816517 - DNA, 15 bp, Homo sapiens
aggcaactctttgaa

SEQ ID NO: 816518 - DNA, 15 bp, Homo sapiens
taggcaactctttga

SEQ ID NO: 816519 - DNA, 15 bp, Homo sapiens
ataggcaactctttg

SEQ ID NO: 816520 - DNA, 15 bp, Homo sapiens
gataggcaactcttt

SEQ ID NO: 816521 - DNA, 15 bp, Homo sapiens
tgataggcaactctt

SEQ ID NO: 816522 - DNA, 15 bp, Homo sapiens
gtgataggcaactct

SEQ ID NO: 816523 - DNA, 15 bp, Homo sapiens
ggtgataggcaactc

SEQ ID NO: 816524 - DNA, 15 bp, Homo sapiens
tggtgataggcaact

SEQ ID NO: 816525 - DNA, 15 bp, Homo sapiens
atggtgataggcaac

SEQ ID NO: 816526 - DNA, 15 bp, Homo sapiens
tatggtgataggcaa

SEQ ID NO: 816527 - DNA, 15 bp, Homo sapiens
ttatggtgataggca

SEQ ID NO: 816528 - DNA, 15 bp, Homo sapiens
gttatggtgataggc

SEQ ID NO: 816529 - DNA, 15 bp, Homo sapiens
ggttatggtgatagg

SEQ ID NO: 816530 - DNA, 15 bp, Homo sapiens
tggttatggtgatag

SEQ ID NO: 816531 - DNA, 15 bp, Homo sapiens
ttggttatggtgata

SEQ ID NO: 816532 - DNA, 15 bp, Homo sapiens
attggttatggtgat

SEQ ID NO: 816533 - DNA, 15 bp, Homo sapiens
aattggttatggtga

SEQ ID NO: 816534 - DNA, 15 bp, Homo sapiens
aaattggttatggtg

SEQ ID NO: 816535 - DNA, 15 bp, Homo sapiens
aaaattggttatggt

SEQ ID NO: 816536 - DNA, 15 bp, Homo sapiens
taaaattggttatgg

SEQ ID NO: 816537 - DNA, 15 bp, Homo sapiens
ctaaaattggttatg

SEQ ID NO: 816538 - DNA, 15 bp, Homo sapiens
tctaaaattggttat

SEQ ID NO: 816539 - DNA, 15 bp, Homo sapiens
ttctaaaattggtta

SEQ ID NO: 816540 - DNA, 15 bp, Homo sapiens
gttctaaaattggtt

SEQ ID NO: 816541 - DNA, 15 bp, Homo sapiens
tgttctaaaattggt

SEQ ID NO: 816542 - DNA, 15 bp, Homo sapiens
gtgttctaaaattgg

SEQ ID NO: 816543 - DNA, 15 bp, Homo sapiens
agtgttctaaaattg

SEQ ID NO: 816544 - DNA, 15 bp, Homo sapiens
aagtgttctaaaatt

SEQ ID NO: 816545 - DNA, 15 bp, Homo sapiens
aaagtgttctaaaat

SEQ ID NO: 816546 - DNA, 15 bp, Homo sapiens
gaaagtgttctaaaa

SEQ ID NO: 816547 - DNA, 15 bp, Homo sapiens
tgaaagtgttctaaa

SEQ ID NO: 816548 - DNA, 15 bp, Homo sapiens
atgaaagtgttctaa

SEQ ID NO: 816549 - DNA, 15 bp, Homo sapiens
gatgaaagtgttcta

SEQ ID NO: 816550 - DNA, 15 bp, Homo sapiens
tgatgaaagtgttct

SEQ ID NO: 816551 - DNA, 15 bp, Homo sapiens
gtgatgaaagtgttc

SEQ ID NO: 816552 - DNA, 15 bp, Homo sapiens
agtgatgaaagtgtt

SEQ ID NO: 816553 - DNA, 15 bp, Homo sapiens
cagtgatgaaagtgt

SEQ ID NO: 816554 - DNA, 15 bp, Homo sapiens
acagtgatgaaagtg

SEQ ID NO: 816555 - DNA, 15 bp, Homo sapiens
tacagtgatgaaagt

SEQ ID NO: 816556 - DNA, 15 bp, Homo sapiens
ttacagtgatgaaag

SEQ ID NO: 816557 - DNA, 15 bp, Homo sapiens
tttacagtgatgaaa

SEQ ID NO: 816558 - DNA, 15 bp, Homo sapiens
ttttacagtgatgaa

SEQ ID NO: 816559 - DNA, 15 bp, Homo sapiens
tttttacagtgatga

SEQ ID NO: 816560 - DNA, 15 bp, Homo sapiens
ctttttacagtgatg

SEQ ID NO: 816561 - DNA, 15 bp, Homo sapiens
tctttttacagtgat

SEQ ID NO: 816562 - DNA, 15 bp, Homo sapiens
ttctttttacagtga

SEQ ID NO: 816563 - DNA, 15 bp, Homo sapiens
tttctttttacagtg

SEQ ID NO: 816564 - DNA, 15 bp, Homo sapiens
gtttctttttacagt

SEQ ID NO: 816565 - DNA, 15 bp, Homo sapiens
agtttctttttacag

SEQ ID NO: 816566 - DNA, 15 bp, Homo sapiens
gagtttctttttaca

SEQ ID NO: 816567 - DNA, 15 bp, Homo sapiens
ggagtttctttttac

SEQ ID NO: 816568 - DNA, 15 bp, Homo sapiens
tggagtttcttttta

SEQ ID NO: 816569 - DNA, 15 bp, Homo sapiens
atggagtttcttttt

SEQ ID NO: 816570 - DNA, 15 bp, Homo sapiens
aatggagtttctttt

SEQ ID NO: 816571 - DNA, 15 bp, Homo sapiens
gaatggagtttcttt

SEQ ID NO: 816572 - DNA, 15 bp, Homo sapiens
ggaatggagtttctt

SEQ ID NO: 816573 - DNA, 15 bp, Homo sapiens
aggaatggagtttct

SEQ ID NO: 816574 - DNA, 15 bp, Homo sapiens
taggaatggagtttc

SEQ ID NO: 816575 - DNA, 15 bp, Homo sapiens
ataggaatggagttt

SEQ ID NO: 816576 - DNA, 15 bp, Homo sapiens
aataggaatggagtt

SEQ ID NO: 816577 - DNA, 15 bp, Homo sapiens
taataggaatggagt

SEQ ID NO: 816578 - DNA, 15 bp, Homo sapiens
ctaataggaatggag

SEQ ID NO: 816579 - DNA, 15 bp, Homo sapiens
gctaataggaatgga

SEQ ID NO: 816580 - DNA, 15 bp, Homo sapiens
tgctaataggaatgg

SEQ ID NO: 816581 - DNA, 15 bp, Homo sapiens
ctgctaataggaatg

SEQ ID NO: 816582 - DNA, 15 bp, Homo sapiens
actgctaataggaat

SEQ ID NO: 816583 - DNA, 15 bp, Homo sapiens
gactgctaataggaa

SEQ ID NO: 816584 - DNA, 15 bp, Homo sapiens
tgactgctaatagga

SEQ ID NO: 816585 - DNA, 15 bp, Homo sapiens
atgactgctaatagg

SEQ ID NO: 816586 - DNA, 15 bp, Homo sapiens
aatgactgctaatag

SEQ ID NO: 816587 - DNA, 15 bp, Homo sapiens
gaatgactgctaata

SEQ ID NO: 816588 - DNA, 15 bp, Homo sapiens
ggaatgactgctaat

SEQ ID NO: 816589 - DNA, 15 bp, Homo sapiens
aggaatgactgctaa

SEQ ID NO: 816590 - DNA, 15 bp, Homo sapiens
aaggaatgactgcta

SEQ ID NO: 816591 - DNA, 15 bp, Homo sapiens
taaggaatgactgct

SEQ ID NO: 816592 - DNA, 15 bp, Homo sapiens
ataaggaatgactgc

SEQ ID NO: 816593 - DNA, 15 bp, Homo sapiens
aataaggaatgactg

SEQ ID NO: 816594 - DNA, 15 bp, Homo sapiens
gaataaggaatgact

SEQ ID NO: 816595 - DNA, 15 bp, Homo sapiens
ggaataaggaatgac

SEQ ID NO: 816596 - DNA, 15 bp, Homo sapiens
tggaataaggaatga

SEQ ID NO: 816597 - DNA, 15 bp, Homo sapiens
ttggaataaggaatg

SEQ ID NO: 816598 - DNA, 15 bp, Homo sapiens
tttggaataaggaat

SEQ ID NO: 816599 - DNA, 15 bp, Homo sapiens
atttggaataaggaa

SEQ ID NO: 816600 - DNA, 15 bp, Homo sapiens
gatttggaataagga

SEQ ID NO: 816601 - DNA, 15 bp, Homo sapiens
ggatttggaataagg

SEQ ID NO: 816602 - DNA, 15 bp, Homo sapiens
gggatttggaataag

SEQ ID NO: 816603 - DNA, 15 bp, Homo sapiens
ggggatttggaataa

SEQ ID NO: 816604 - DNA, 15 bp, Homo sapiens
gggggatttggaata

SEQ ID NO: 816605 - DNA, 15 bp, Homo sapiens
agggggatttggaat

SEQ ID NO: 816606 - DNA, 15 bp, Homo sapiens
cagggggatttggaa

SEQ ID NO: 816607 - DNA, 15 bp, Homo sapiens
gcagggggatttgga

SEQ ID NO: 816608 - DNA, 15 bp, Homo sapiens
agcagggggatttgg

SEQ ID NO: 816609 - DNA, 15 bp, Homo sapiens
gagcagggggatttg

SEQ ID NO: 816610 - DNA, 15 bp, Homo sapiens
cgagcagggggattt

SEQ ID NO: 816611 - DNA, 15 bp, Homo sapiens
gcgagcagggggatt

SEQ ID NO: 816612 - DNA, 15 bp, Homo sapiens
ggcgagcagggggat

SEQ ID NO: 816613 - DNA, 15 bp, Homo sapiens
gggcgagcaggggga

SEQ ID NO: 816614 - DNA, 15 bp, Homo sapiens
agggcgagcaggggg

SEQ ID NO: 816615 - DNA, 15 bp, Homo sapiens
tagggcgagcagggg

SEQ ID NO: 816616 - DNA, 15 bp, Homo sapiens
ctagggcgagcaggg

SEQ ID NO: 816617 - DNA, 15 bp, Homo sapiens
tctagggcgagcagg

SEQ ID NO: 816618 - DNA, 15 bp, Homo sapiens
gtctagggcgagcag

SEQ ID NO: 816619 - DNA, 15 bp, Homo sapiens
tgtctagggcgagca

SEQ ID NO: 816620 - DNA, 15 bp, Homo sapiens
ttgtctagggcgagc

SEQ ID NO: 816621 - DNA, 15 bp, Homo sapiens
gttgtctagggcgag

SEQ ID NO: 816622 - DNA, 15 bp, Homo sapiens
agttgtctagggcga

SEQ ID NO: 816623 - DNA, 15 bp, Homo sapiens
tagttgtctagggcg

SEQ ID NO: 816624 - DNA, 15 bp, Homo sapiens
gtagttgtctagggc

SEQ ID NO: 816625 - DNA, 15 bp, Homo sapiens
tgtagttgtctaggg

SEQ ID NO: 816626 - DNA, 15 bp, Homo sapiens
ttgtagttgtctagg

SEQ ID NO: 816627 - DNA, 15 bp, Homo sapiens
tttgtagttgtctag

SEQ ID NO: 816628 - DNA, 15 bp, Homo sapiens
atttgtagttgtcta

SEQ ID NO: 816629 - DNA, 15 bp, Homo sapiens
catttgtagttgtct

SEQ ID NO: 816630 - DNA, 15 bp, Homo sapiens
acatttgtagttgtc

SEQ ID NO: 816631 - DNA, 15 bp, Homo sapiens
tacatttgtagttgt

SEQ ID NO: 816632 - DNA, 15 bp, Homo sapiens
gtacatttgtagttg

SEQ ID NO: 816633 - DNA, 15 bp, Homo sapiens
agtacatttgtagtt

SEQ ID NO: 816634 - DNA, 15 bp, Homo sapiens
aagtacatttgtagt

SEQ ID NO: 816635 - DNA, 15 bp, Homo sapiens
aaagtacatttgtag

SEQ ID NO: 816636 - DNA, 15 bp, Homo sapiens
gaaagtacatttgta

SEQ ID NO: 816637 - DNA, 15 bp, Homo sapiens
ggaaagtacatttgt

SEQ ID NO: 816638 - DNA, 15 bp, Homo sapiens
tggaaagtacatttg

SEQ ID NO: 816639 - DNA, 15 bp, Homo sapiens
atggaaagtacattt

SEQ ID NO: 816640 - DNA, 15 bp, Homo sapiens
gatggaaagtacatt

SEQ ID NO: 816641 - DNA, 15 bp, Homo sapiens
agatggaaagtacat

SEQ ID NO: 816642 - DNA, 15 bp, Homo sapiens
gagatggaaagtaca

SEQ ID NO: 816643 - DNA, 15 bp, Homo sapiens
agagatggaaagtac

SEQ ID NO: 816644 - DNA, 15 bp, Homo sapiens
tagagatggaaagta

SEQ ID NO: 816645 - DNA, 15 bp, Homo sapiens
atagagatggaaagt

SEQ ID NO: 816646 - DNA, 15 bp, Homo sapiens
tatagagatggaaag

SEQ ID NO: 816647 - DNA, 15 bp, Homo sapiens
ctatagagatggaaa

SEQ ID NO: 816648 - DNA, 15 bp, Homo sapiens
tctatagagatggaa

SEQ ID NO: 816649 - DNA, 15 bp, Homo sapiens
atctatagagatgga

SEQ ID NO: 816650 - DNA, 15 bp, Homo sapiens
aatctatagagatgg

SEQ ID NO: 816651 - DNA, 15 bp, Homo sapiens
aaatctatagagatg

SEQ ID NO: 816652 - DNA, 15 bp, Homo sapiens
caaatctatagagat

SEQ ID NO: 816653 - DNA, 15 bp, Homo sapiens
gcaaatctatagaga

SEQ ID NO: 816654 - DNA, 15 bp, Homo sapiens
ggcaaatctatagag

SEQ ID NO: 816655 - DNA, 15 bp, Homo sapiens
aggcaaatctataga

SEQ ID NO: 816656 - DNA, 15 bp, Homo sapiens
caggcaaatctatag

SEQ ID NO: 816657 - DNA, 15 bp, Homo sapiens
acaggcaaatctata

SEQ ID NO: 816658 - DNA, 15 bp, Homo sapiens
aacaggcaaatctat

SEQ ID NO: 816659 - DNA, 15 bp, Homo sapiens
gaacaggcaaatcta

SEQ ID NO: 816660 - DNA, 15 bp, Homo sapiens
agaacaggcaaatct

SEQ ID NO: 816661 - DNA, 15 bp, Homo sapiens
cagaacaggcaaatc

SEQ ID NO: 816662 - DNA, 15 bp, Homo sapiens
ccagaacaggcaaat

SEQ ID NO: 816663 - DNA, 15 bp, Homo sapiens
tccagaacaggcaaa

SEQ ID NO: 816664 - DNA, 15 bp, Homo sapiens
ttccagaacaggcaa

SEQ ID NO: 816665 - DNA, 15 bp, Homo sapiens
tttccagaacaggca

SEQ ID NO: 816666 - DNA, 15 bp, Homo sapiens
atttccagaacaggc

SEQ ID NO: 816667 - DNA, 15 bp, Homo sapiens
aatttccagaacagg

SEQ ID NO: 816668 - DNA, 15 bp, Homo sapiens
aaatttccagaacag

SEQ ID NO: 816669 - DNA, 15 bp, Homo sapiens
aaaatttccagaaca

SEQ ID NO: 816670 - DNA, 15 bp, Homo sapiens
taaaatttccagaac

SEQ ID NO: 816671 - DNA, 15 bp, Homo sapiens
ataaaatttccagaa

SEQ ID NO: 816672 - DNA, 15 bp, Homo sapiens
cataaaatttccaga

SEQ ID NO: 816673 - DNA, 15 bp, Homo sapiens
acataaaatttccag

SEQ ID NO: 816674 - DNA, 15 bp, Homo sapiens
tacataaaatttcca

SEQ ID NO: 816675 - DNA, 15 bp, Homo sapiens
ttacataaaatttcc

SEQ ID NO: 816676 - DNA, 15 bp, Homo sapiens
tttacataaaatttc

SEQ ID NO: 816677 - DNA, 15 bp, Homo sapiens
atttacataaaattt

SEQ ID NO: 816678 - DNA, 15 bp, Homo sapiens
tatttacataaaatt

SEQ ID NO: 816679 - DNA, 15 bp, Homo sapiens
ctatttacataaaat

SEQ ID NO: 816680 - DNA, 15 bp, Homo sapiens
tctatttacataaaa

SEQ ID NO: 816681 - DNA, 15 bp, Homo sapiens
ttctatttacataaa

SEQ ID NO: 816682 - DNA, 15 bp, Homo sapiens
gttctatttacataa

SEQ ID NO: 816683 - DNA, 15 bp, Homo sapiens
tgttctatttacata

SEQ ID NO: 816684 - DNA, 15 bp, Homo sapiens
ttgttctatttacat

SEQ ID NO: 816685 - DNA, 15 bp, Homo sapiens
tttgttctatttaca

SEQ ID NO: 816686 - DNA, 15 bp, Homo sapiens
ctttgttctatttac

SEQ ID NO: 816687 - DNA, 15 bp, Homo sapiens
actttgttctattta

SEQ ID NO: 816688 - DNA, 15 bp, Homo sapiens
cactttgttctattt

SEQ ID NO: 816689 - DNA, 15 bp, Homo sapiens
acactttgttctatt

SEQ ID NO: 816690 - DNA, 15 bp, Homo sapiens
aacactttgttctat

SEQ ID NO: 816691 - DNA, 15 bp, Homo sapiens
gaacactttgttcta

SEQ ID NO: 816692 - DNA, 15 bp, Homo sapiens
agaacactttgttct

SEQ ID NO: 816693 - DNA, 15 bp, Homo sapiens
aagaacactttgttc

SEQ ID NO: 816694 - DNA, 15 bp, Homo sapiens
aaagaacactttgtt

SEQ ID NO: 816695 - DNA, 15 bp, Homo sapiens
aaaagaacactttgt

SEQ ID NO: 816696 - DNA, 15 bp, Homo sapiens
caaaagaacactttg

SEQ ID NO: 816697 - DNA, 15 bp, Homo sapiens
acaaaagaacacttt

SEQ ID NO: 816698 - DNA, 15 bp, Homo sapiens
cacaaaagaacactt

SEQ ID NO: 816699 - DNA, 15 bp, Homo sapiens
tcacaaaagaacact

SEQ ID NO: 816700 - DNA, 15 bp, Homo sapiens
gtcacaaaagaacac

SEQ ID NO: 816701 - DNA, 15 bp, Homo sapiens
agtcacaaaagaaca

SEQ ID NO: 816702 - DNA, 15 bp, Homo sapiens
cagtcacaaaagaac

SEQ ID NO: 816703 - DNA, 15 bp, Homo sapiens
ccagtcacaaaagaa

SEQ ID NO: 816704 - DNA, 15 bp, Homo sapiens
gccagtcacaaaaga

SEQ ID NO: 816705 - DNA, 15 bp, Homo sapiens
agccagtcacaaaag

SEQ ID NO: 816706 - DNA, 15 bp, Homo sapiens
aagccagtcacaaaa

SEQ ID NO: 816707 - DNA, 15 bp, Homo sapiens
taagccagtcacaaa

SEQ ID NO: 816708 - DNA, 15 bp, Homo sapiens
ataagccagtcacaa

SEQ ID NO: 816709 - DNA, 15 bp, Homo sapiens
aataagccagtcaca

SEQ ID NO: 816710 - DNA, 15 bp, Homo sapiens
aaataagccagtcac

SEQ ID NO: 816711 - DNA, 15 bp, Homo sapiens
gaaataagccagtca

SEQ ID NO: 816712 - DNA, 15 bp, Homo sapiens
tgaaataagccagtc

SEQ ID NO: 816713 - DNA, 15 bp, Homo sapiens
gtgaaataagccagt

SEQ ID NO: 816714 - DNA, 15 bp, Homo sapiens
agtgaaataagccag

SEQ ID NO: 816715 - DNA, 15 bp, Homo sapiens
aagtgaaataagcca

SEQ ID NO: 816716 - DNA, 15 bp, Homo sapiens
taagtgaaataagcc

SEQ ID NO: 816717 - DNA, 15 bp, Homo sapiens
ctaagtgaaataagc

SEQ ID NO: 816718 - DNA, 15 bp, Homo sapiens
gctaagtgaaataag

SEQ ID NO: 816719 - DNA, 15 bp, Homo sapiens
tgctaagtgaaataa

SEQ ID NO: 816720 - DNA, 15 bp, Homo sapiens
atgctaagtgaaata

SEQ ID NO: 816721 - DNA, 15 bp, Homo sapiens
aatgctaagtgaaat

SEQ ID NO: 816722 - DNA, 15 bp, Homo sapiens
aaatgctaagtgaaa

SEQ ID NO: 816723 - DNA, 15 bp, Homo sapiens
aaaatgctaagtgaa

SEQ ID NO: 816724 - DNA, 15 bp, Homo sapiens
aaaaatgctaagtga

SEQ ID NO: 816725 - DNA, 15 bp, Homo sapiens
aaaaaatgctaagtg

SEQ ID NO: 816726 - DNA, 15 bp, Homo sapiens
aaaaaaatgctaagt

SEQ ID NO: 816727 - DNA, 15 bp, Homo sapiens
aaaaaaaatgctaag

SEQ ID NO: 816728 - DNA, 15 bp, Homo sapiens
gaaaaaaaatgctaa

SEQ ID NO: 816729 - DNA, 15 bp, Homo sapiens
tgaaaaaaaatgcta

SEQ ID NO: 816730 - DNA, 15 bp, Homo sapiens
ttgaaaaaaaatgct

SEQ ID NO: 816731 - DNA, 15 bp, Homo sapiens
tttgaaaaaaaatgc

SEQ ID NO: 816732 - DNA, 15 bp, Homo sapiens
ctttgaaaaaaaatg

SEQ ID NO: 816733 - DNA, 15 bp, Homo sapiens
tctttgaaaaaaaat

SEQ ID NO: 816734 - DNA, 15 bp, Homo sapiens
atctttgaaaaaaaa

SEQ ID NO: 816735 - DNA, 15 bp, Homo sapiens
aatctttgaaaaaaa

SEQ ID NO: 816736 - DNA, 15 bp, Homo sapiens
gaatctttgaaaaaa

SEQ ID NO: 816737 - DNA, 15 bp, Homo sapiens
tgaatctttgaaaaa

SEQ ID NO: 816738 - DNA, 15 bp, Homo sapiens
atgaatctttgaaaa

SEQ ID NO: 816739 - DNA, 15 bp, Homo sapiens
gatgaatctttgaaa

SEQ ID NO: 816740 - DNA, 15 bp, Homo sapiens
ggatgaatctttgaa

SEQ ID NO: 816741 - DNA, 15 bp, Homo sapiens
gggatgaatctttga

SEQ ID NO: 816742 - DNA, 15 bp, Homo sapiens
agggatgaatctttg

SEQ ID NO: 816743 - DNA, 15 bp, Homo sapiens
cagggatgaatcttt

SEQ ID NO: 816744 - DNA, 15 bp, Homo sapiens
acagggatgaatctt

SEQ ID NO: 816745 - DNA, 15 bp, Homo sapiens
aacagggatgaatct

SEQ ID NO: 816746 - DNA, 15 bp, Homo sapiens
caacagggatgaatc

SEQ ID NO: 816747 - DNA, 15 bp, Homo sapiens
acaacagggatgaat

SEQ ID NO: 816748 - DNA, 15 bp, Homo sapiens
tacaacagggatgaa

SEQ ID NO: 816749 - DNA, 15 bp, Homo sapiens
ctacaacagggatga

SEQ ID NO: 816750 - DNA, 15 bp, Homo sapiens
gctacaacagggatg

SEQ ID NO: 816751 - DNA, 15 bp, Homo sapiens
cgctacaacagggat

SEQ ID NO: 816752 - DNA, 15 bp, Homo sapiens
acgctacaacaggga

SEQ ID NO: 816753 - DNA, 15 bp, Homo sapiens
cacgctacaacaggg

SEQ ID NO: 816754 - DNA, 15 bp, Homo sapiens
acacgctacaacagg

SEQ ID NO: 816755 - DNA, 15 bp, Homo sapiens
tacacgctacaacag

SEQ ID NO: 816756 - DNA, 15 bp, Homo sapiens
atacacgctacaaca

SEQ ID NO: 816757 - DNA, 15 bp, Homo sapiens
gatacacgctacaac

SEQ ID NO: 816758 - DNA, 15 bp, Homo sapiens
tgatacacgctacaa

SEQ ID NO: 816759 - DNA, 15 bp, Homo sapiens
ctgatacacgctaca

SEQ ID NO: 816760 - DNA, 15 bp, Homo sapiens
actgatacacgctac

SEQ ID NO: 816761 - DNA, 15 bp, Homo sapiens
cactgatacacgcta

SEQ ID NO: 816762 - DNA, 15 bp, Homo sapiens
gcactgatacacgct

SEQ ID NO: 816763 - DNA, 15 bp, Homo sapiens
tgcactgatacacgc

SEQ ID NO: 816764 - DNA, 15 bp, Homo sapiens
atgcactgatacacg

SEQ ID NO: 816765 - DNA, 15 bp, Homo sapiens
gatgcactgatacac

SEQ ID NO: 816766 - DNA, 15 bp, Homo sapiens
tgatgcactgataca

SEQ ID NO: 816767 - DNA, 15 bp, Homo sapiens
atgatgcactgatac

SEQ ID NO: 816768 - DNA, 15 bp, Homo sapiens
aatgatgcactgata

SEQ ID NO: 816769 - DNA, 15 bp, Homo sapiens
gaatgatgcactgat

SEQ ID NO: 816770 - DNA, 15 bp, Homo sapiens
agaatgatgcactga

SEQ ID NO: 816771 - DNA, 15 bp, Homo sapiens
aagaatgatgcactg

SEQ ID NO: 816772 - DNA, 15 bp, Homo sapiens
aaagaatgatgcact

SEQ ID NO: 816773 - DNA, 15 bp, Homo sapiens
aaaagaatgatgcac

SEQ ID NO: 816774 - DNA, 15 bp, Homo sapiens
aaaaagaatgatgca

SEQ ID NO: 816775 - DNA, 15 bp, Homo sapiens
aaaaaagaatgatgc

SEQ ID NO: 816776 - DNA, 15 bp, Homo sapiens
taaaaaagaatgatg

SEQ ID NO: 816777 - DNA, 15 bp, Homo sapiens
ataaaaaagaatgat

SEQ ID NO: 816778 - DNA, 15 bp, Homo sapiens
aataaaaaagaatga

SEQ ID NO: 816779 - DNA, 15 bp, Homo sapiens
aaataaaaaagaatg

SEQ ID NO: 816780 - DNA, 15 bp, Homo sapiens
aaaataaaaaagaat

SEQ ID NO: 816781 - DNA, 15 bp, Homo sapiens
aaaaataaaaaagaa

SEQ ID NO: 816782 - DNA, 15 bp, Homo sapiens
aaaaaataaaaaaga

SEQ ID NO: 816783 - DNA, 15 bp, Homo sapiens
aaaaaaataaaaaag

SEQ ID NO: 816784 - DNA, 15 bp, Homo sapiens
taaaaaaataaaaaa

SEQ ID NO: 816785 - DNA, 15 bp, Homo sapiens
ctaaaaaaataaaaa

SEQ ID NO: 816786 - DNA, 15 bp, Homo sapiens
tctaaaaaaataaaa

SEQ ID NO: 816787 - DNA, 15 bp, Homo sapiens
ctctaaaaaaataaa

SEQ ID NO: 816788 - DNA, 15 bp, Homo sapiens
tctctaaaaaaataa

SEQ ID NO: 816789 - DNA, 15 bp, Homo sapiens
gtctctaaaaaaata

SEQ ID NO: 816790 - DNA, 15 bp, Homo sapiens
tgtctctaaaaaaat

SEQ ID NO: 816791 - DNA, 15 bp, Homo sapiens
ctgtctctaaaaaaa

SEQ ID NO: 816792 - DNA, 15 bp, Homo sapiens
cctgtctctaaaaaa

SEQ ID NO: 816793 - DNA, 15 bp, Homo sapiens
ccctgtctctaaaaa

SEQ ID NO: 816794 - DNA, 15 bp, Homo sapiens
gccctgtctctaaaa

SEQ ID NO: 816795 - DNA, 15 bp, Homo sapiens
ggccctgtctctaaa

SEQ ID NO: 816796 - DNA, 15 bp, Homo sapiens
aggccctgtctctaa

SEQ ID NO: 816797 - DNA, 15 bp, Homo sapiens
aaggccctgtctcta

SEQ ID NO: 816798 - DNA, 15 bp, Homo sapiens
caaggccctgtctct

SEQ ID NO: 816799 - DNA, 15 bp, Homo sapiens
gcaaggccctgtctc

SEQ ID NO: 816800 - DNA, 15 bp, Homo sapiens
agcaaggccctgtct

SEQ ID NO: 816801 - DNA, 15 bp, Homo sapiens
gagcaaggccctgtc

SEQ ID NO: 816802 - DNA, 15 bp, Homo sapiens
agagcaaggccctgt

SEQ ID NO: 816803 - DNA, 15 bp, Homo sapiens
cagagcaaggccctg

SEQ ID NO: 816804 - DNA, 15 bp, Homo sapiens
acagagcaaggccct

SEQ ID NO: 816805 - DNA, 15 bp, Homo sapiens
aacagagcaaggccc

SEQ ID NO: 816806 - DNA, 15 bp, Homo sapiens
caacagagcaaggcc

SEQ ID NO: 816807 - DNA, 15 bp, Homo sapiens
gcaacagagcaaggc

SEQ ID NO: 816808 - DNA, 15 bp, Homo sapiens
ggcaacagagcaagg

SEQ ID NO: 816809 - DNA, 15 bp, Homo sapiens
gggcaacagagcaag

SEQ ID NO: 816810 - DNA, 15 bp, Homo sapiens
tgggcaacagagcaa

SEQ ID NO: 816811 - DNA, 15 bp, Homo sapiens
ctgggcaacagagca

SEQ ID NO: 816812 - DNA, 15 bp, Homo sapiens
cctgggcaacagagc

SEQ ID NO: 816813 - DNA, 15 bp, Homo sapiens
acctgggcaacagag

SEQ ID NO: 816814 - DNA, 15 bp, Homo sapiens
aacctgggcaacaga

SEQ ID NO: 816815 - DNA, 15 bp, Homo sapiens
caacctgggcaacag

SEQ ID NO: 816816 - DNA, 15 bp, Homo sapiens
ccaacctgggcaaca

SEQ ID NO: 816817 - DNA, 15 bp, Homo sapiens
tccaacctgggcaac

SEQ ID NO: 816818 - DNA, 15 bp, Homo sapiens
ttccaacctgggcaa

SEQ ID NO: 816819 - DNA, 15 bp, Homo sapiens
attccaacctgggca

SEQ ID NO: 816820 - DNA, 15 bp, Homo sapiens
cattccaacctgggc

SEQ ID NO: 816821 - DNA, 15 bp, Homo sapiens
acattccaacctggg

SEQ ID NO: 816822 - DNA, 15 bp, Homo sapiens
cacattccaacctgg

SEQ ID NO: 816823 - DNA, 15 bp, Homo sapiens
gcacattccaacctg

SEQ ID NO: 816824 - DNA, 15 bp, Homo sapiens
tgcacattccaacct

SEQ ID NO: 816825 - DNA, 15 bp, Homo sapiens
ctgcacattccaacc

SEQ ID NO: 816826 - DNA, 15 bp, Homo sapiens
actgcacattccaac

SEQ ID NO: 816827 - DNA, 15 bp, Homo sapiens
cactgcacattccaa

SEQ ID NO: 816828 - DNA, 15 bp, Homo sapiens
ccactgcacattcca

SEQ ID NO: 816829 - DNA, 15 bp, Homo sapiens
gccactgcacattcc

SEQ ID NO: 816830 - DNA, 15 bp, Homo sapiens
tgccactgcacattc

SEQ ID NO: 816831 - DNA, 15 bp, Homo sapiens
atgccactgcacatt

SEQ ID NO: 816832 - DNA, 15 bp, Homo sapiens
catgccactgcacat

SEQ ID NO: 816833 - DNA, 15 bp, Homo sapiens
tcatgccactgcaca

SEQ ID NO: 816834 - DNA, 15 bp, Homo sapiens
atgatcatgccactg

SEQ ID NO: 816835 - DNA, 15 bp, Homo sapiens
catgatcatgccact

SEQ ID NO: 816836 - DNA, 15 bp, Homo sapiens
ccatgatcatgccac

SEQ ID NO: 816837 - DNA, 15 bp, Homo sapiens
cccatgatcatgcca

SEQ ID NO: 816838 - DNA, 15 bp, Homo sapiens
acccatgatcatgcc

SEQ ID NO: 816839 - DNA, 15 bp, Homo sapiens
gacccatgatcatgc

SEQ ID NO: 816840 - DNA, 15 bp, Homo sapiens
tgacccatgatcatg

SEQ ID NO: 816841 - DNA, 15 bp, Homo sapiens
gtgacccatgatcat

SEQ ID NO: 816842 - DNA, 15 bp, Homo sapiens
agtgacccatgatca

SEQ ID NO: 816843 - DNA, 15 bp, Homo sapiens
tagtgacccatgatc

SEQ ID NO: 816844 - DNA, 15 bp, Homo sapiens
atagtgacccatgat

SEQ ID NO: 816845 - DNA, 15 bp, Homo sapiens
tatagtgacccatga

SEQ ID NO: 816846 - DNA, 15 bp, Homo sapiens
ctatagtgacccatg

SEQ ID NO: 816847 - DNA, 15 bp, Homo sapiens
gctatagtgacccat

SEQ ID NO: 816848 - DNA, 15 bp, Homo sapiens
agctatagtgaccca

SEQ ID NO: 816849 - DNA, 15 bp, Homo sapiens
aagctatagtgaccc

SEQ ID NO: 816850 - DNA, 15 bp, Homo sapiens
aaagctatagtgacc

SEQ ID NO: 816851 - DNA, 15 bp, Homo sapiens
caaagctatagtgac

SEQ ID NO: 816852 - DNA, 15 bp, Homo sapiens
tcaaagctatagtga

SEQ ID NO: 816853 - DNA, 15 bp, Homo sapiens
ttcaaagctatagtg

SEQ ID NO: 816854 - DNA, 15 bp, Homo sapiens
cttcaaagctatagt

SEQ ID NO: 816855 - DNA, 15 bp, Homo sapiens
acttcaaagctatag

SEQ ID NO: 816856 - DNA, 15 bp, Homo sapiens
gacttcaaagctata

SEQ ID NO: 816857 - DNA, 15 bp, Homo sapiens
tgacttcaaagctat

SEQ ID NO: 816858 - DNA, 15 bp, Homo sapiens
atgacttcaaagcta

SEQ ID NO: 816859 - DNA, 15 bp, Homo sapiens
tatgacttcaaagct

SEQ ID NO: 816860 - DNA, 15 bp, Homo sapiens
ctatgacttcaaagc

SEQ ID NO: 816861 - DNA, 15 bp, Homo sapiens
cctatgacttcaaag

SEQ ID NO: 816862 - DNA, 15 bp, Homo sapiens
gcctatgacttcaaa

SEQ ID NO: 816863 - DNA, 15 bp, Homo sapiens
cgcctatgacttcaa

SEQ ID NO: 816864 - DNA, 15 bp, Homo sapiens
tcgcctatgacttca

SEQ ID NO: 816865 - DNA, 15 bp, Homo sapiens
ttcgcctatgacttc

SEQ ID NO: 816866 - DNA, 15 bp, Homo sapiens
tttcgcctatgactt

SEQ ID NO: 816867 - DNA, 15 bp, Homo sapiens
ctttcgcctatgact

SEQ ID NO: 816868 - DNA, 15 bp, Homo sapiens
gctttcgcctatgac

SEQ ID NO: 816869 - DNA, 15 bp, Homo sapiens
cgctttcgcctatga

SEQ ID NO: 816870 - DNA, 15 bp, Homo sapiens
ccgctttcgcctatg

SEQ ID NO: 816871 - DNA, 15 bp, Homo sapiens
accgctttcgcctat

SEQ ID NO: 816872 - DNA, 15 bp, Homo sapiens
gaccgctttcgccta

SEQ ID NO: 816873 - DNA, 15 bp, Homo sapiens
ggaccgctttcgcct

SEQ ID NO: 816874 - DNA, 15 bp, Homo sapiens
aggaccgctttcgcc

SEQ ID NO: 816875 - DNA, 15 bp, Homo sapiens
gaggaccgctttcgc

SEQ ID NO: 816876 - DNA, 15 bp, Homo sapiens
ggaggaccgctttcg

SEQ ID NO: 816877 - DNA, 15 bp, Homo sapiens
gggaggaccgctttc

SEQ ID NO: 816878 - DNA, 15 bp, Homo sapiens
tgggaggaccgcttt

SEQ ID NO: 816879 - DNA, 15 bp, Homo sapiens
gtgggaggaccgctt

SEQ ID NO: 816880 - DNA, 15 bp, Homo sapiens
ggtgggaggaccgct

SEQ ID NO: 816881 - DNA, 15 bp, Homo sapiens
aggtgggaggaccgc

SEQ ID NO: 816882 - DNA, 15 bp, Homo sapiens
gaggtgggaggaccg

SEQ ID NO: 816883 - DNA, 15 bp, Homo sapiens
tgaggtgggaggacc

SEQ ID NO: 816884 - DNA, 15 bp, Homo sapiens
ctgaggtgggaggac

SEQ ID NO: 816885 - DNA, 15 bp, Homo sapiens
actgaggtgggagga

SEQ ID NO: 816886 - DNA, 15 bp, Homo sapiens
gactgaggtgggagg

SEQ ID NO: 816887 - DNA, 15 bp, Homo sapiens
agactgaggtgggag

SEQ ID NO: 816888 - DNA, 15 bp, Homo sapiens
gagactgaggtggga

SEQ ID NO: 816889 - DNA, 15 bp, Homo sapiens
ggagactgaggtggg

SEQ ID NO: 816890 - DNA, 15 bp, Homo sapiens
gggagactgaggtgg

SEQ ID NO: 816891 - DNA, 15 bp, Homo sapiens
cgggagactgaggtg

SEQ ID NO: 816892 - DNA, 15 bp, Homo sapiens
tcgggagactgaggt

SEQ ID NO: 816893 - DNA, 15 bp, Homo sapiens
ctcgggagactgagg

SEQ ID NO: 816894 - DNA, 15 bp, Homo sapiens
actcgggagactgag

SEQ ID NO: 816895 - DNA, 15 bp, Homo sapiens
tactcgggagactga

SEQ ID NO: 816896 - DNA, 15 bp, Homo sapiens
ctactcgggagactg

SEQ ID NO: 816897 - DNA, 15 bp, Homo sapiens
gctactcgggagact

SEQ ID NO: 816898 - DNA, 15 bp, Homo sapiens
agctactcgggagac

SEQ ID NO: 816899 - DNA, 15 bp, Homo sapiens
cagctactcgggaga

SEQ ID NO: 816900 - DNA, 15 bp, Homo sapiens
tcagctactcgggag

SEQ ID NO: 816901 - DNA, 15 bp, Homo sapiens
ctcagctactcggga

SEQ ID NO: 816902 - DNA, 15 bp, Homo sapiens
tctcagctactcggg

SEQ ID NO: 816903 - DNA, 15 bp, Homo sapiens
gtctcagctactcgg

SEQ ID NO: 816904 - DNA, 15 bp, Homo sapiens
agtctcagctactcg

SEQ ID NO: 816905 - DNA, 15 bp, Homo sapiens
tagtctcagctactc

SEQ ID NO: 816906 - DNA, 15 bp, Homo sapiens
gtagtctcagctact

SEQ ID NO: 816907 - DNA, 15 bp, Homo sapiens
tgtagtctcagctac

SEQ ID NO: 816908 - DNA, 15 bp, Homo sapiens
ctgtagtctcagcta

SEQ ID NO: 816909 - DNA, 15 bp, Homo sapiens
cctgtagtctcagct

SEQ ID NO: 816910 - DNA, 15 bp, Homo sapiens
gcctgtagtctcagc

SEQ ID NO: 816911 - DNA, 15 bp, Homo sapiens
agcctgtagtctcag

SEQ ID NO: 816912 - DNA, 15 bp, Homo sapiens
aagcctgtagtctca

SEQ ID NO: 816913 - DNA, 15 bp, Homo sapiens
caagcctgtagtctc

SEQ ID NO: 816914 - DNA, 15 bp, Homo sapiens
gcaagcctgtagtct

SEQ ID NO: 816915 - DNA, 15 bp, Homo sapiens
tgcaagcctgtagtc

SEQ ID NO: 816916 - DNA, 15 bp, Homo sapiens
gtgcaagcctgtagt

SEQ ID NO: 816917 - DNA, 15 bp, Homo sapiens
ggtgcaagcctgtag

SEQ ID NO: 816918 - DNA, 15 bp, Homo sapiens
tggtgcaagcctgta

SEQ ID NO: 816919 - DNA, 15 bp, Homo sapiens
gtggtgcaagcctgt

SEQ ID NO: 816920 - DNA, 15 bp, Homo sapiens
tgtggtgcaagcctg

SEQ ID NO: 816921 - DNA, 15 bp, Homo sapiens
atgtggtgcaagcct

SEQ ID NO: 816922 - DNA, 15 bp, Homo sapiens
catgtggtgcaagcc

SEQ ID NO: 816923 - DNA, 15 bp, Homo sapiens
tcatgtggtgcaagc

SEQ ID NO: 816924 - DNA, 15 bp, Homo sapiens
gtcatgtggtgcaag

SEQ ID NO: 816925 - DNA, 15 bp, Homo sapiens
agtcatgtggtgcaa

SEQ ID NO: 816926 - DNA, 15 bp, Homo sapiens
cagtcatgtggtgca

SEQ ID NO: 816927 - DNA, 15 bp, Homo sapiens
acagtcatgtggtgc

SEQ ID NO: 816928 - DNA, 15 bp, Homo sapiens
gacagtcatgtggtg

SEQ ID NO: 816929 - DNA, 15 bp, Homo sapiens
agacagtcatgtggt

SEQ ID NO: 816930 - DNA, 15 bp, Homo sapiens
tagacagtcatgtgg

SEQ ID NO: 816931 - DNA, 15 bp, Homo sapiens
ttagacagtcatgtg

SEQ ID NO: 816932 - DNA, 15 bp, Homo sapiens
attagacagtcatgt

SEQ ID NO: 816933 - DNA, 15 bp, Homo sapiens
aattagacagtcatg

SEQ ID NO: 816934 - DNA, 15 bp, Homo sapiens
aaattagacagtcat

SEQ ID NO: 816935 - DNA, 15 bp, Homo sapiens
taaattagacagtca

SEQ ID NO: 816936 - DNA, 15 bp, Homo sapiens
ataaattagacagtc

SEQ ID NO: 816937 - DNA, 15 bp, Homo sapiens
tataaattagacagt

SEQ ID NO: 816938 - DNA, 15 bp, Homo sapiens
ttataaattagacag

SEQ ID NO: 816939 - DNA, 15 bp, Homo sapiens
attataaattagaca

SEQ ID NO: 816940 - DNA, 15 bp, Homo sapiens
aattataaattagac

SEQ ID NO: 816941 - DNA, 15 bp, Homo sapiens
aaattataaattaga

SEQ ID NO: 816942 - DNA, 15 bp, Homo sapiens
aaaattataaattag

SEQ ID NO: 816943 - DNA, 15 bp, Homo sapiens
gaaaattataaatta

SEQ ID NO: 816944 - DNA, 15 bp, Homo sapiens
agaaaattataaatt

SEQ ID NO: 816945 - DNA, 15 bp, Homo sapiens
aagaaaattataaat

SEQ ID NO: 816946 - DNA, 15 bp, Homo sapiens
aaagaaaattataaa

SEQ ID NO: 816947 - DNA, 15 bp, Homo sapiens
taaagaaaattataa

SEQ ID NO: 816948 - DNA, 15 bp, Homo sapiens
ctaaagaaaattata

SEQ ID NO: 816949 - DNA, 15 bp, Homo sapiens
tctaaagaaaattat

SEQ ID NO: 816950 - DNA, 15 bp, Homo sapiens
ctctaaagaaaatta

SEQ ID NO: 816951 - DNA, 15 bp, Homo sapiens
tctctaaagaaaatt

SEQ ID NO: 816952 - DNA, 15 bp, Homo sapiens
gtctctaaagaaaat

SEQ ID NO: 816953 - DNA, 15 bp, Homo sapiens
tgtctctaaagaaaa

SEQ ID NO: 816954 - DNA, 15 bp, Homo sapiens
ctgtctctaaagaaa

SEQ ID NO: 816955 - DNA, 15 bp, Homo sapiens
cctgtctctaaagaa

SEQ ID NO: 816956 - DNA, 15 bp, Homo sapiens
ccctgtctctaaaga

SEQ ID NO: 816957 - DNA, 15 bp, Homo sapiens
accctgtctctaaag

SEQ ID NO: 816958 - DNA, 15 bp, Homo sapiens
gaccctgtctctaaa

SEQ ID NO: 816959 - DNA, 15 bp, Homo sapiens
agaccctgtctctaa

SEQ ID NO: 816960 - DNA, 15 bp, Homo sapiens
aagaccctgtctcta

SEQ ID NO: 816961 - DNA, 15 bp, Homo sapiens
caagaccctgtctct

SEQ ID NO: 816962 - DNA, 15 bp, Homo sapiens
acaagaccctgtctc

SEQ ID NO: 816963 - DNA, 15 bp, Homo sapiens
aacaagaccctgtct

SEQ ID NO: 816964 - DNA, 15 bp, Homo sapiens
taacaagaccctgtc

SEQ ID NO: 816965 - DNA, 15 bp, Homo sapiens
ataacaagaccctgt

SEQ ID NO: 816966 - DNA, 15 bp, Homo sapiens
cataacaagaccctg

SEQ ID NO: 816967 - DNA, 15 bp, Homo sapiens
acataacaagaccct

SEQ ID NO: 816968 - DNA, 15 bp, Homo sapiens
aacataacaagaccc

SEQ ID NO: 816969 - DNA, 15 bp, Homo sapiens
caacataacaagacc

SEQ ID NO: 816970 - DNA, 15 bp, Homo sapiens
acaacataacaagac

SEQ ID NO: 816971 - DNA, 15 bp, Homo sapiens
gacaacataacaaga

SEQ ID NO: 816972 - DNA, 15 bp, Homo sapiens
agacaacataacaag

SEQ ID NO: 816973 - DNA, 15 bp, Homo sapiens
tagacaacataacaa

SEQ ID NO: 816974 - DNA, 15 bp, Homo sapiens
ctagacaacataaca

SEQ ID NO: 816975 - DNA, 15 bp, Homo sapiens
cctagacaacataac

SEQ ID NO: 816976 - DNA, 15 bp, Homo sapiens
gcctagacaacataa

SEQ ID NO: 816977 - DNA, 15 bp, Homo sapiens
agcctagacaacata

SEQ ID NO: 816978 - DNA, 15 bp, Homo sapiens
cagcctagacaacat

SEQ ID NO: 816979 - DNA, 15 bp, Homo sapiens
gcagcctagacaaca

SEQ ID NO: 816980 - DNA, 15 bp, Homo sapiens
agcagcctagacaac

SEQ ID NO: 816981 - DNA, 15 bp, Homo sapiens
gagcagcctagacaa

SEQ ID NO: 816982 - DNA, 15 bp, Homo sapiens
agagcagcctagaca

SEQ ID NO: 816983 - DNA, 15 bp, Homo sapiens
gagagcagcctagac

SEQ ID NO: 816984 - DNA, 15 bp, Homo sapiens
tgagagcagcctaga

SEQ ID NO: 816985 - DNA, 15 bp, Homo sapiens
ttgagagcagcctag

SEQ ID NO: 816986 - DNA, 15 bp, Homo sapiens
tttgagagcagccta

SEQ ID NO: 816987 - DNA, 15 bp, Homo sapiens
gtttgagagcagcct

SEQ ID NO: 816988 - DNA, 15 bp, Homo sapiens
agtttgagagcagcc

SEQ ID NO: 816989 - DNA, 15 bp, Homo sapiens
gagtttgagagcagc

SEQ ID NO: 816990 - DNA, 15 bp, Homo sapiens
ggagtttgagagcag

SEQ ID NO: 816991 - DNA, 15 bp, Homo sapiens
tggagtttgagagca

SEQ ID NO: 816992 - DNA, 15 bp, Homo sapiens
ctggagtttgagagc

SEQ ID NO: 816993 - DNA, 15 bp, Homo sapiens
cctggagtttgagag

SEQ ID NO: 816994 - DNA, 15 bp, Homo sapiens
ccctggagtttgaga

SEQ ID NO: 816995 - DNA, 15 bp, Homo sapiens
gccctggagtttgag

SEQ ID NO: 816996 - DNA, 15 bp, Homo sapiens
agccctggagtttga

SEQ ID NO: 816997 - DNA, 15 bp, Homo sapiens
gagccctggagtttg

SEQ ID NO: 816998 - DNA, 15 bp, Homo sapiens
tgagccctggagttt

SEQ ID NO: 816999 - DNA, 15 bp, Homo sapiens
ttgagccctggagtt

SEQ ID NO: 817000 - DNA, 15 bp, Homo sapiens
cttgagccctggagt

SEQ ID NO: 817001 - DNA, 15 bp, Homo sapiens
acttgagccctggag

SEQ ID NO: 817002 - DNA, 15 bp, Homo sapiens
cacttgagccctgga

SEQ ID NO: 817003 - DNA, 15 bp, Homo sapiens
ccacttgagccctgg

SEQ ID NO: 817004 - DNA, 15 bp, Homo sapiens
accacttgagccctg

SEQ ID NO: 817005 - DNA, 15 bp, Homo sapiens
gaccacttgagccct

SEQ ID NO: 817006 - DNA, 15 bp, Homo sapiens
ggaccacttgagccc

SEQ ID NO: 817007 - DNA, 15 bp, Homo sapiens
aggaccacttgagcc

SEQ ID NO: 817008 - DNA, 15 bp, Homo sapiens
gaggaccacttgagc

SEQ ID NO: 817009 - DNA, 15 bp, Homo sapiens
ggaggaccacttgag

SEQ ID NO: 817010 - DNA, 15 bp, Homo sapiens
aggaggaccacttga

SEQ ID NO: 817011 - DNA, 15 bp, Homo sapiens
gaggaggaccacttg

SEQ ID NO: 817012 - DNA, 15 bp, Homo sapiens
ggaggaggaccactt

SEQ ID NO: 817013 - DNA, 15 bp, Homo sapiens
gggaggaggaccact

SEQ ID NO: 817014 - DNA, 15 bp, Homo sapiens
tgggaggaggaccac

SEQ ID NO: 817015 - DNA, 15 bp, Homo sapiens
gtgggaggaggacca

SEQ ID NO: 817016 - DNA, 15 bp, Homo sapiens
tgtgggaggaggacc

SEQ ID NO: 817017 - DNA, 15 bp, Homo sapiens
ctgtgggaggaggac

SEQ ID NO: 817018 - DNA, 15 bp, Homo sapiens
gctgtgggaggagga

SEQ ID NO: 817019 - DNA, 15 bp, Homo sapiens
tgctgtgggaggagg

SEQ ID NO: 817020 - DNA, 15 bp, Homo sapiens
atgctgtgggaggag

SEQ ID NO: 817021 - DNA, 15 bp, Homo sapiens
gatgctgtgggagga

SEQ ID NO: 817022 - DNA, 15 bp, Homo sapiens
ggatgctgtgggagg

SEQ ID NO: 817023 - DNA, 15 bp, Homo sapiens
aggatgctgtgggag

SEQ ID NO: 817024 - DNA, 15 bp, Homo sapiens
taggatgctgtggga

SEQ ID NO: 817025 - DNA, 15 bp, Homo sapiens
ttaggatgctgtggg

SEQ ID NO: 817026 - DNA, 15 bp, Homo sapiens
tttaggatgctgtgg

SEQ ID NO: 817027 - DNA, 15 bp, Homo sapiens
ctttaggatgctgtg

SEQ ID NO: 817028 - DNA, 15 bp, Homo sapiens
actttaggatgctgt

SEQ ID NO: 817029 - DNA, 15 bp, Homo sapiens
cactttaggatgctg

SEQ ID NO: 817030 - DNA, 15 bp, Homo sapiens
gcactttaggatgct

SEQ ID NO: 817031 - DNA, 15 bp, Homo sapiens
agcactttaggatgc

SEQ ID NO: 817032 - DNA, 15 bp, Homo sapiens
cagcactttaggatg

SEQ ID NO: 817033 - DNA, 15 bp, Homo sapiens
ccagcactttaggat

SEQ ID NO: 817034 - DNA, 15 bp, Homo sapiens
cccagcactttagga

SEQ ID NO: 817035 - DNA, 15 bp, Homo sapiens
tcccagcactttagg

SEQ ID NO: 817036 - DNA, 15 bp, Homo sapiens
atcccagcactttag

SEQ ID NO: 817037 - DNA, 15 bp, Homo sapiens
aatcccagcacttta

SEQ ID NO: 817038 - DNA, 15 bp, Homo sapiens
ataatcccagcactt

SEQ ID NO: 817039 - DNA, 15 bp, Homo sapiens
tataatcccagcact

SEQ ID NO: 817040 - DNA, 15 bp, Homo sapiens
ctataatcccagcac

SEQ ID NO: 817041 - DNA, 15 bp, Homo sapiens
cctataatcccagca

SEQ ID NO: 817042 - DNA, 15 bp, Homo sapiens
acctataatcccagc

SEQ ID NO: 817043 - DNA, 15 bp, Homo sapiens
cacctataatcccag

SEQ ID NO: 817044 - DNA, 15 bp, Homo sapiens
acacctataatccca

SEQ ID NO: 817045 - DNA, 15 bp, Homo sapiens
cacacctataatccc

SEQ ID NO: 817046 - DNA, 15 bp, Homo sapiens
tcacacctataatcc

SEQ ID NO: 817047 - DNA, 15 bp, Homo sapiens
ctcacacctataatc

SEQ ID NO: 817048 - DNA, 15 bp, Homo sapiens
gctcacacctataat

SEQ ID NO: 817049 - DNA, 15 bp, Homo sapiens
ggctcacacctataa

SEQ ID NO: 817050 - DNA, 15 bp, Homo sapiens
tggctcacacctata

SEQ ID NO: 817051 - DNA, 15 bp, Homo sapiens
gtggctcacacctat

SEQ ID NO: 817052 - DNA, 15 bp, Homo sapiens
tgtggctcacaccta

SEQ ID NO: 817053 - DNA, 15 bp, Homo sapiens
ctgtggctcacacct

SEQ ID NO: 817054 - DNA, 15 bp, Homo sapiens
gctgtggctcacacc

SEQ ID NO: 817055 - DNA, 15 bp, Homo sapiens
tgctgtggctcacac

SEQ ID NO: 817056 - DNA, 15 bp, Homo sapiens
gtgctgtggctcaca

SEQ ID NO: 817057 - DNA, 15 bp, Homo sapiens
ggtgctgtggctcac

SEQ ID NO: 817058 - DNA, 15 bp, Homo sapiens
aggtgctgtggctca

SEQ ID NO: 817059 - DNA, 15 bp, Homo sapiens
caggtgctgtggctc

SEQ ID NO: 817060 - DNA, 15 bp, Homo sapiens
ccaggtgctgtggct

SEQ ID NO: 817061 - DNA, 15 bp, Homo sapiens
gccaggtgctgtggc

SEQ ID NO: 817062 - DNA, 15 bp, Homo sapiens
agccaggtgctgtgg

SEQ ID NO: 817063 - DNA, 15 bp, Homo sapiens
aagccaggtgctgtg

SEQ ID NO: 817064 - DNA, 15 bp, Homo sapiens
caagccaggtgctgt

SEQ ID NO: 817065 - DNA, 15 bp, Homo sapiens
gcaagccaggtgctg

SEQ ID NO: 817066 - DNA, 15 bp, Homo sapiens
tgcaagccaggtgct

SEQ ID NO: 817067 - DNA, 15 bp, Homo sapiens
atgcaagccaggtgc

SEQ ID NO: 817068 - DNA, 15 bp, Homo sapiens
gatgcaagccaggtg

SEQ ID NO: 817069 - DNA, 15 bp, Homo sapiens
tgatgcaagccaggt

SEQ ID NO: 817070 - DNA, 15 bp, Homo sapiens
atgatgcaagccagg

SEQ ID NO: 817071 - DNA, 15 bp, Homo sapiens
aatgatgcaagccag

SEQ ID NO: 817072 - DNA, 15 bp, Homo sapiens
gaatgatgcaagcca

SEQ ID NO: 817073 - DNA, 15 bp, Homo sapiens
agaatgatgcaagcc

SEQ ID NO: 817074 - DNA, 15 bp, Homo sapiens
aagaatgatgcaagc

SEQ ID NO: 817075 - DNA, 15 bp, Homo sapiens
aaagaatgatgcaag

SEQ ID NO: 817076 - DNA, 15 bp, Homo sapiens
aaaagaatgatgcaa

SEQ ID NO: 817077 - DNA, 15 bp, Homo sapiens
taaaaagaatgatgc

SEQ ID NO: 817078 - DNA, 15 bp, Homo sapiens
ataaaaagaatgatg

SEQ ID NO: 817079 - DNA, 15 bp, Homo sapiens
aataaaaagaatgat

SEQ ID NO: 817080 - DNA, 15 bp, Homo sapiens
caataaaaagaatga

SEQ ID NO: 817081 - DNA, 15 bp, Homo sapiens
acaataaaaagaatg

SEQ ID NO: 817082 - DNA, 15 bp, Homo sapiens
aacaataaaaagaat

SEQ ID NO: 817083 - DNA, 15 bp, Homo sapiens
caacaataaaaagaa

SEQ ID NO: 817084 - DNA, 15 bp, Homo sapiens
tcaacaataaaaaga

SEQ ID NO: 817085 - DNA, 15 bp, Homo sapiens
ttcaacaataaaaag

SEQ ID NO: 817086 - DNA, 15 bp, Homo sapiens
attcaacaataaaaa

SEQ ID NO: 817087 - DNA, 15 bp, Homo sapiens
tattcaacaataaaa

SEQ ID NO: 817088 - DNA, 15 bp, Homo sapiens
ttattcaacaataaa

SEQ ID NO: 817089 - DNA, 15 bp, Homo sapiens
attattcaacaataa

SEQ ID NO: 817090 - DNA, 15 bp, Homo sapiens
tattattcaacaata

SEQ ID NO: 817091 - DNA, 15 bp, Homo sapiens
atattattcaacaat

SEQ ID NO: 817092 - DNA, 15 bp, Homo sapiens
gatattattcaacaa

SEQ ID NO: 817093 - DNA, 15 bp, Homo sapiens
ggatattattcaaca

SEQ ID NO: 817094 - DNA, 15 bp, Homo sapiens
gggatattattcaac

SEQ ID NO: 817095 - DNA, 15 bp, Homo sapiens
tgggatattattcaa

SEQ ID NO: 817096 - DNA, 15 bp, Homo sapiens
gtgggatattattca

SEQ ID NO: 817097 - DNA, 15 bp, Homo sapiens
agtgggatattattc

SEQ ID NO: 817098 - DNA, 15 bp, Homo sapiens
aagtgggatattatt

SEQ ID NO: 817099 - DNA, 15 bp, Homo sapiens
caagtgggatattat

SEQ ID NO: 817100 - DNA, 15 bp, Homo sapiens
acaagtgggatatta

SEQ ID NO: 817101 - DNA, 15 bp, Homo sapiens
tacaagtgggatatt

SEQ ID NO: 817102 - DNA, 15 bp, Homo sapiens
ttacaagtgggatat

SEQ ID NO: 817103 - DNA, 15 bp, Homo sapiens
cttacaagtgggata

SEQ ID NO: 817104 - DNA, 15 bp, Homo sapiens
tcttacaagtgggat

SEQ ID NO: 817105 - DNA, 15 bp, Homo sapiens
ttcttacaagtggga

SEQ ID NO: 817106 - DNA, 15 bp, Homo sapiens
attcttacaagtggg

SEQ ID NO: 817107 - DNA, 15 bp, Homo sapiens
tattcttacaagtgg

SEQ ID NO: 817108 - DNA, 15 bp, Homo sapiens
atattcttacaagtg

SEQ ID NO: 817109 - DNA, 15 bp, Homo sapiens
catattcttacaagt

SEQ ID NO: 817110 - DNA, 15 bp, Homo sapiens
acatattcttacaag

SEQ ID NO: 817111 - DNA, 15 bp, Homo sapiens
tacatattcttacaa

SEQ ID NO: 817112 - DNA, 15 bp, Homo sapiens
atacatattcttaca

SEQ ID NO: 817113 - DNA, 15 bp, Homo sapiens
aatacatattcttac

SEQ ID NO: 817114 - DNA, 15 bp, Homo sapiens
aaatacatattctta

SEQ ID NO: 817115 - DNA, 15 bp, Homo sapiens
aaaatacatattctt

SEQ ID NO: 817116 - DNA, 15 bp, Homo sapiens
taaaatacatattct

SEQ ID NO: 817117 - DNA, 15 bp, Homo sapiens
ataaaatacatattc

SEQ ID NO: 817118 - DNA, 15 bp, Homo sapiens
aataaaatacatatt

SEQ ID NO: 817119 - DNA, 15 bp, Homo sapiens
aaataaaatacatat

SEQ ID NO: 817120 - DNA, 15 bp, Homo sapiens
taaataaaatacata

SEQ ID NO: 817121 - DNA, 15 bp, Homo sapiens
ataaataaaatacat

SEQ ID NO: 817122 - DNA, 15 bp, Homo sapiens
gataaataaaataca

SEQ ID NO: 817123 - DNA, 15 bp, Homo sapiens
ggataaataaaatac

SEQ ID NO: 817124 - DNA, 15 bp, Homo sapiens
aggataaataaaata

SEQ ID NO: 817125 - DNA, 15 bp, Homo sapiens
aaggataaataaaat

SEQ ID NO: 817126 - DNA, 15 bp, Homo sapiens
aaaggataaataaaa

SEQ ID NO: 817127 - DNA, 15 bp, Homo sapiens
gaaaggataaataaa

SEQ ID NO: 817128 - DNA, 15 bp, Homo sapiens
ggaaaggataaataa

SEQ ID NO: 817129 - DNA, 15 bp, Homo sapiens
gggaaaggataaata

SEQ ID NO: 817130 - DNA, 15 bp, Homo sapiens
ggggaaaggataaat

SEQ ID NO: 817131 - DNA, 15 bp, Homo sapiens
tggggaaaggataaa

SEQ ID NO: 817132 - DNA, 15 bp, Homo sapiens
ctggggaaaggataa

SEQ ID NO: 817133 - DNA, 15 bp, Homo sapiens
actggggaaaggata

SEQ ID NO: 817134 - DNA, 15 bp, Homo sapiens
aactggggaaaggat

SEQ ID NO: 817135 - DNA, 15 bp, Homo sapiens
taactggggaaagga

SEQ ID NO: 817136 - DNA, 15 bp, Homo sapiens
ttaactggggaaagg

SEQ ID NO: 817137 - DNA, 15 bp, Homo sapiens
attaactggggaaag

SEQ ID NO: 817138 - DNA, 15 bp, Homo sapiens
tattaactggggaaa

SEQ ID NO: 817139 - DNA, 15 bp, Homo sapiens
ctattaactggggaa

SEQ ID NO: 817140 - DNA, 15 bp, Homo sapiens
tctattaactgggga

SEQ ID NO: 817141 - DNA, 15 bp, Homo sapiens
atctattaactgggg

SEQ ID NO: 817142 - DNA, 15 bp, Homo sapiens
tatctattaactggg

SEQ ID NO: 817143 - DNA, 15 bp, Homo sapiens
atatctattaactgg

SEQ ID NO: 817144 - DNA, 15 bp, Homo sapiens
aatatctattaactg

SEQ ID NO: 817145 - DNA, 15 bp, Homo sapiens
aaatatctattaact

SEQ ID NO: 817146 - DNA, 15 bp, Homo sapiens
gaaatatctattaac

SEQ ID NO: 817147 - DNA, 15 bp, Homo sapiens
cgaaatatctattaa

SEQ ID NO: 817148 - DNA, 15 bp, Homo sapiens
tcgaaatatctatta

SEQ ID NO: 817149 - DNA, 15 bp, Homo sapiens
atcgaaatatctatt

SEQ ID NO: 817150 - DNA, 15 bp, Homo sapiens
aatcgaaatatctat

SEQ ID NO: 817151 - DNA, 15 bp, Homo sapiens
caatcgaaatatcta

SEQ ID NO: 817152 - DNA, 15 bp, Homo sapiens
acaatcgaaatatct

SEQ ID NO: 817153 - DNA, 15 bp, Homo sapiens
aacaatcgaaatatc

SEQ ID NO: 817154 - DNA, 15 bp, Homo sapiens
gaacaatcgaaatat

SEQ ID NO: 817155 - DNA, 15 bp, Homo sapiens
ggaacaatcgaaata

SEQ ID NO: 817156 - DNA, 15 bp, Homo sapiens
aggaacaatcgaaat

SEQ ID NO: 817157 - DNA, 15 bp, Homo sapiens
taggaacaatcgaaa

SEQ ID NO: 817158 - DNA, 15 bp, Homo sapiens
ttaggaacaatcgaa

SEQ ID NO: 817159 - DNA, 15 bp, Homo sapiens
attaggaacaatcga

SEQ ID NO: 817160 - DNA, 15 bp, Homo sapiens
aattaggaacaatcg

SEQ ID NO: 817161 - DNA, 15 bp, Homo sapiens
gaattaggaacaatc

SEQ ID NO: 817162 - DNA, 15 bp, Homo sapiens
agaattaggaacaat

SEQ ID NO: 817163 - DNA, 15 bp, Homo sapiens
aagaattaggaacaa

SEQ ID NO: 817164 - DNA, 15 bp, Homo sapiens
caagaattaggaaca

SEQ ID NO: 817165 - DNA, 15 bp, Homo sapiens
acaagaattaggaac

SEQ ID NO: 817166 - DNA, 15 bp, Homo sapiens
gacaagaattaggaa

SEQ ID NO: 817167 - DNA, 15 bp, Homo sapiens
agacaagaattagga

SEQ ID NO: 817168 - DNA, 15 bp, Homo sapiens
tagacaagaattagg

SEQ ID NO: 817169 - DNA, 15 bp, Homo sapiens
atagacaagaattag

SEQ ID NO: 817170 - DNA, 15 bp, Homo sapiens
aatagacaagaatta

SEQ ID NO: 817171 - DNA, 15 bp, Homo sapiens
taatagacaagaatt

SEQ ID NO: 817172 - DNA, 15 bp, Homo sapiens
ataatagacaagaat

SEQ ID NO: 817173 - DNA, 15 bp, Homo sapiens
tataatagacaagaa

SEQ ID NO: 817174 - DNA, 15 bp, Homo sapiens
ttataatagacaaga

SEQ ID NO: 817175 - DNA, 15 bp, Homo sapiens
tttataatagacaag

SEQ ID NO: 817176 - DNA, 15 bp, Homo sapiens
atttataatagacaa

SEQ ID NO: 817177 - DNA, 15 bp, Homo sapiens
tatttataatagaca

SEQ ID NO: 817178 - DNA, 15 bp, Homo sapiens
ttatttataatagac

SEQ ID NO: 817179 - DNA, 15 bp, Homo sapiens
attatttataataga

SEQ ID NO: 817180 - DNA, 15 bp, Homo sapiens
cattatttataatag

SEQ ID NO: 817181 - DNA, 15 bp, Homo sapiens
ccattatttataata

SEQ ID NO: 817182 - DNA, 15 bp, Homo sapiens
accattatttataat

SEQ ID NO: 817183 - DNA, 15 bp, Homo sapiens
caccattatttataa

SEQ ID NO: 817184 - DNA, 15 bp, Homo sapiens
gcaccattatttata

SEQ ID NO: 817185 - DNA, 15 bp, Homo sapiens
agcaccattatttat

SEQ ID NO: 817186 - DNA, 15 bp, Homo sapiens
tagcaccattattta

SEQ ID NO: 817187 - DNA, 15 bp, Homo sapiens
atagcaccattattt

SEQ ID NO: 817188 - DNA, 15 bp, Homo sapiens
catagcaccattatt

SEQ ID NO: 817189 - DNA, 15 bp, Homo sapiens
tcatagcaccattat

SEQ ID NO: 817190 - DNA, 15 bp, Homo sapiens
ttcatagcaccatta

SEQ ID NO: 817191 - DNA, 15 bp, Homo sapiens
gttcatagcaccatt

SEQ ID NO: 817192 - DNA, 15 bp, Homo sapiens
tgttcatagcaccat

SEQ ID NO: 817193 - DNA, 15 bp, Homo sapiens
atgttcatagcacca

SEQ ID NO: 817194 - DNA, 15 bp, Homo sapiens
aatgttcatagcacc

SEQ ID NO: 817195 - DNA, 15 bp, Homo sapiens
aaatgttcatagcac

SEQ ID NO: 817196 - DNA, 15 bp, Homo sapiens
caaatgttcatagca

SEQ ID NO: 817197 - DNA, 15 bp, Homo sapiens
acaaatgttcatagc

SEQ ID NO: 817198 - DNA, 15 bp, Homo sapiens
cacaaatgttcatag

SEQ ID NO: 817199 - DNA, 15 bp, Homo sapiens
acacaaatgttcata

SEQ ID NO: 817200 - DNA, 15 bp, Homo sapiens
tacacaaatgttcat

SEQ ID NO: 817201 - DNA, 15 bp, Homo sapiens
gtacacaaatgttca

SEQ ID NO: 817202 - DNA, 15 bp, Homo sapiens
tgtacacaaatgttc

SEQ ID NO: 817203 - DNA, 15 bp, Homo sapiens
ttgtacacaaatgtt

SEQ ID NO: 817204 - DNA, 15 bp, Homo sapiens
cttgtacacaaatgt

SEQ ID NO: 817205 - DNA, 15 bp, Homo sapiens
acttgtacacaaatg

SEQ ID NO: 817206 - DNA, 15 bp, Homo sapiens
aacttgtacacaaat

SEQ ID NO: 817207 - DNA, 15 bp, Homo sapiens
aaacttgtacacaaa

SEQ ID NO: 817208 - DNA, 15 bp, Homo sapiens
aaaacttgtacacaa

SEQ ID NO: 817209 - DNA, 15 bp, Homo sapiens
aaaaacttgtacaca

SEQ ID NO: 817210 - DNA, 15 bp, Homo sapiens
caaaaacttgtacac

SEQ ID NO: 817211 - DNA, 15 bp, Homo sapiens
acaaaaacttgtaca

SEQ ID NO: 817212 - DNA, 15 bp, Homo sapiens
cacaaaaacttgtac

SEQ ID NO: 817213 - DNA, 15 bp, Homo sapiens
gcacaaaaacttgta

SEQ ID NO: 817214 - DNA, 15 bp, Homo sapiens
tgcacaaaaacttgt

SEQ ID NO: 817215 - DNA, 15 bp, Homo sapiens
ctgcacaaaaacttg

SEQ ID NO: 817216 - DNA, 15 bp, Homo sapiens
tctgcacaaaaactt

SEQ ID NO: 817217 - DNA, 15 bp, Homo sapiens
gtctgcacaaaaact

SEQ ID NO: 817218 - DNA, 15 bp, Homo sapiens
tgtctgcacaaaaac

SEQ ID NO: 817219 - DNA, 15 bp, Homo sapiens
atgtctgcacaaaaa

SEQ ID NO: 817220 - DNA, 15 bp, Homo sapiens
gatgtctgcacaaaa

SEQ ID NO: 817221 - DNA, 15 bp, Homo sapiens
ggatgtctgcacaaa

SEQ ID NO: 817222 - DNA, 15 bp, Homo sapiens
tggatgtctgcacaa

SEQ ID NO: 817223 - DNA, 15 bp, Homo sapiens
atggatgtctgcaca

SEQ ID NO: 817224 - DNA, 15 bp, Homo sapiens
aatggatgtctgcac

SEQ ID NO: 817225 - DNA, 15 bp, Homo sapiens
aaatggatgtctgca

SEQ ID NO: 817226 - DNA, 15 bp, Homo sapiens
aaaatggatgtctgc

SEQ ID NO: 817227 - DNA, 15 bp, Homo sapiens
gaaaatggatgtctg

SEQ ID NO: 817228 - DNA, 15 bp, Homo sapiens
ggaaaatggatgtct

SEQ ID NO: 817229 - DNA, 15 bp, Homo sapiens
aggaaaatggatgtc

SEQ ID NO: 817230 - DNA, 15 bp, Homo sapiens
aaggaaaatggatgt

SEQ ID NO: 817231 - DNA, 15 bp, Homo sapiens
aaaggaaaatggatg

SEQ ID NO: 817232 - DNA, 15 bp, Homo sapiens
gaaaggaaaatggat

SEQ ID NO: 817233 - DNA, 15 bp, Homo sapiens
agaaaggaaaatgga

SEQ ID NO: 817234 - DNA, 15 bp, Homo sapiens
aagaaaggaaaatgg

SEQ ID NO: 817235 - DNA, 15 bp, Homo sapiens
aaagaaaggaaaatg

SEQ ID NO: 817236 - DNA, 15 bp, Homo sapiens
aaaagaaaggaaaat

SEQ ID NO: 817237 - DNA, 15 bp, Homo sapiens
caaaagaaaggaaaa

SEQ ID NO: 817238 - DNA, 15 bp, Homo sapiens
ccaaaagaaaggaaa

SEQ ID NO: 817239 - DNA, 15 bp, Homo sapiens
cccaaaagaaaggaa

SEQ ID NO: 817240 - DNA, 15 bp, Homo sapiens
gcccaaaagaaagga

SEQ ID NO: 817241 - DNA, 15 bp, Homo sapiens
tgcccaaaagaaagg

SEQ ID NO: 817242 - DNA, 15 bp, Homo sapiens
atgcccaaaagaaag

SEQ ID NO: 817243 - DNA, 15 bp, Homo sapiens
tatgcccaaaagaaa

SEQ ID NO: 817244 - DNA, 15 bp, Homo sapiens
atatgcccaaaagaa

SEQ ID NO: 817245 - DNA, 15 bp, Homo sapiens
tatatgcccaaaaga

SEQ ID NO: 817246 - DNA, 15 bp, Homo sapiens
gtatatgcccaaaag

SEQ ID NO: 817247 - DNA, 15 bp, Homo sapiens
ggtatatgcccaaaa

SEQ ID NO: 817248 - DNA, 15 bp, Homo sapiens
aggtatatgcccaaa

SEQ ID NO: 817249 - DNA, 15 bp, Homo sapiens
taggtatatgcccaa

SEQ ID NO: 817250 - DNA, 15 bp, Homo sapiens
gtaggtatatgccca

SEQ ID NO: 817251 - DNA, 15 bp, Homo sapiens
cgtaggtatatgccc

SEQ ID NO: 817252 - DNA, 15 bp, Homo sapiens
tcgtaggtatatgcc

SEQ ID NO: 817253 - DNA, 15 bp, Homo sapiens
ctcgtaggtatatgc

SEQ ID NO: 817254 - DNA, 15 bp, Homo sapiens
actcgtaggtatatg

SEQ ID NO: 817255 - DNA, 15 bp, Homo sapiens
cactcgtaggtatat

SEQ ID NO: 817256 - DNA, 15 bp, Homo sapiens
acactcgtaggtata

SEQ ID NO: 817257 - DNA, 15 bp, Homo sapiens
tacactcgtaggtat

SEQ ID NO: 817258 - DNA, 15 bp, Homo sapiens
ttacactcgtaggta

SEQ ID NO: 817259 - DNA, 15 bp, Homo sapiens
attacactcgtaggt

SEQ ID NO: 817260 - DNA, 15 bp, Homo sapiens
cattacactcgtagg

SEQ ID NO: 817261 - DNA, 15 bp, Homo sapiens
ccattacactcgtag

SEQ ID NO: 817262 - DNA, 15 bp, Homo sapiens
tccattacactcgta

SEQ ID NO: 817263 - DNA, 15 bp, Homo sapiens
atccattacactcgt

SEQ ID NO: 817264 - DNA, 15 bp, Homo sapiens
catccattacactcg

SEQ ID NO: 817265 - DNA, 15 bp, Homo sapiens
ccatccattacactc

SEQ ID NO: 817266 - DNA, 15 bp, Homo sapiens
cccatccattacact

SEQ ID NO: 817267 - DNA, 15 bp, Homo sapiens
gcccatccattacac

SEQ ID NO: 817268 - DNA, 15 bp, Homo sapiens
ggcccatccattaca

SEQ ID NO: 817269 - DNA, 15 bp, Homo sapiens
tggcccatccattac

SEQ ID NO: 817270 - DNA, 15 bp, Homo sapiens
atggcccatccatta

SEQ ID NO: 817271 - DNA, 15 bp, Homo sapiens
tatggcccatccatt

SEQ ID NO: 817272 - DNA, 15 bp, Homo sapiens
atatggcccatccat

SEQ ID NO: 817273 - DNA, 15 bp, Homo sapiens
tatatggcccatcca

SEQ ID NO: 817274 - DNA, 15 bp, Homo sapiens
ctatatggcccatcc

SEQ ID NO: 817275 - DNA, 15 bp, Homo sapiens
actatatggcccatc

SEQ ID NO: 817276 - DNA, 15 bp, Homo sapiens
tactatatggcccat

SEQ ID NO: 817277 - DNA, 15 bp, Homo sapiens
ttactatatggccca

SEQ ID NO: 817278 - DNA, 15 bp, Homo sapiens
gttactatatggccc

SEQ ID NO: 817279 - DNA, 15 bp, Homo sapiens
agttactatatggcc

SEQ ID NO: 817280 - DNA, 15 bp, Homo sapiens
aagttactatatggc

SEQ ID NO: 817281 - DNA, 15 bp, Homo sapiens
aaagttactatatgg

SEQ ID NO: 817282 - DNA, 15 bp, Homo sapiens
taaagttactatatg

SEQ ID NO: 817283 - DNA, 15 bp, Homo sapiens
ataaagttactatat

SEQ ID NO: 817284 - DNA, 15 bp, Homo sapiens
cataaagttactata

SEQ ID NO: 817285 - DNA, 15 bp, Homo sapiens
acataaagttactat

SEQ ID NO: 817286 - DNA, 15 bp, Homo sapiens
aacataaagttacta

SEQ ID NO: 817287 - DNA, 15 bp, Homo sapiens
aaacataaagttact

SEQ ID NO: 817288 - DNA, 15 bp, Homo sapiens
taaacataaagttac

SEQ ID NO: 817289 - DNA, 15 bp, Homo sapiens
ttaaacataaagtta

SEQ ID NO: 817290 - DNA, 15 bp, Homo sapiens
attaaacataaagtt

SEQ ID NO: 817291 - DNA, 15 bp, Homo sapiens
tattaaacataaagt

SEQ ID NO: 817292 - DNA, 15 bp, Homo sapiens
atattaaacataaag

SEQ ID NO: 817293 - DNA, 15 bp, Homo sapiens
aatattaaacataaa

SEQ ID NO: 817294 - DNA, 15 bp, Homo sapiens
aaatattaaacataa

SEQ ID NO: 817295 - DNA, 15 bp, Homo sapiens
aaaatattaaacata

SEQ ID NO: 817296 - DNA, 15 bp, Homo sapiens
caaaatattaaacat

SEQ ID NO: 817297 - DNA, 15 bp, Homo sapiens
tcaaaatattaaaca

SEQ ID NO: 817298 - DNA, 15 bp, Homo sapiens
ctcaaaatattaaac

SEQ ID NO: 817299 - DNA, 15 bp, Homo sapiens
cctcaaaatattaaa

SEQ ID NO: 817300 - DNA, 15 bp, Homo sapiens
tcctcaaaatattaa

SEQ ID NO: 817301 - DNA, 15 bp, Homo sapiens
atcctcaaaatatta

SEQ ID NO: 817302 - DNA, 15 bp, Homo sapiens
aatcctcaaaatatt

SEQ ID NO: 817303 - DNA, 15 bp, Homo sapiens
aaatcctcaaaatat

SEQ ID NO: 817304 - DNA, 15 bp, Homo sapiens
aaaatcctcaaaata

SEQ ID NO: 817305 - DNA, 15 bp, Homo sapiens
aaaaatcctcaaaat

SEQ ID NO: 817306 - DNA, 15 bp, Homo sapiens
gaaaaatcctcaaaa

SEQ ID NO: 817307 - DNA, 15 bp, Homo sapiens
tgaaaaatcctcaaa

SEQ ID NO: 817308 - DNA, 15 bp, Homo sapiens
ttgaaaaatcctcaa

SEQ ID NO: 817309 - DNA, 15 bp, Homo sapiens
tttgaaaaatcctca

SEQ ID NO: 817310 - DNA, 15 bp, Homo sapiens
gtttgaaaaatcctc

SEQ ID NO: 817311 - DNA, 15 bp, Homo sapiens
agtttgaaaaatcct

SEQ ID NO: 817312 - DNA, 15 bp, Homo sapiens
cagtttgaaaaatcc

SEQ ID NO: 817313 - DNA, 15 bp, Homo sapiens
acagtttgaaaaatc

SEQ ID NO: 817314 - DNA, 15 bp, Homo sapiens
aacagtttgaaaaat

SEQ ID NO: 817315 - DNA, 15 bp, Homo sapiens
aaacagtttgaaaaa

SEQ ID NO: 817316 - DNA, 15 bp, Homo sapiens
aaaacagtttgaaaa

SEQ ID NO: 817317 - DNA, 15 bp, Homo sapiens
gaaaacagtttgaaa

SEQ ID NO: 817318 - DNA, 15 bp, Homo sapiens
ggaaaacagtttgaa

SEQ ID NO: 817319 - DNA, 15 bp, Homo sapiens
tggaaaacagtttga

SEQ ID NO: 817320 - DNA, 15 bp, Homo sapiens
ttggaaaacagtttg

SEQ ID NO: 817321 - DNA, 15 bp, Homo sapiens
tttggaaaacagttt

SEQ ID NO: 817322 - DNA, 15 bp, Homo sapiens
ctttggaaaacagtt

SEQ ID NO: 817323 - DNA, 15 bp, Homo sapiens
actttggaaaacagt

SEQ ID NO: 817324 - DNA, 15 bp, Homo sapiens
cactttggaaaacag

SEQ ID NO: 817325 - DNA, 15 bp, Homo sapiens
ccactttggaaaaca

SEQ ID NO: 817326 - DNA, 15 bp, Homo sapiens
gccactttggaaaac

SEQ ID NO: 817327 - DNA, 15 bp, Homo sapiens
agccactttggaaaa

SEQ ID NO: 817328 - DNA, 15 bp, Homo sapiens
cagccactttggaaa

SEQ ID NO: 817329 - DNA, 15 bp, Homo sapiens
gcagccactttggaa

SEQ ID NO: 817330 - DNA, 15 bp, Homo sapiens
tgcagccactttgga

SEQ ID NO: 817331 - DNA, 15 bp, Homo sapiens
atgcagccactttgg

SEQ ID NO: 817332 - DNA, 15 bp, Homo sapiens
gatgcagccactttg

SEQ ID NO: 817333 - DNA, 15 bp, Homo sapiens
tgatgcagccacttt

SEQ ID NO: 817334 - DNA, 15 bp, Homo sapiens
atgatgcagccactt

SEQ ID NO: 817335 - DNA, 15 bp, Homo sapiens
aatgatgcagccact

SEQ ID NO: 817336 - DNA, 15 bp, Homo sapiens
aaatgatgcagccac

SEQ ID NO: 817337 - DNA, 15 bp, Homo sapiens
aaaatgatgcagcca

SEQ ID NO: 817338 - DNA, 15 bp, Homo sapiens
taaaatgatgcagcc

SEQ ID NO: 817339 - DNA, 15 bp, Homo sapiens
ttaaaatgatgcagc

SEQ ID NO: 817340 - DNA, 15 bp, Homo sapiens
tttaaaatgatgcag

SEQ ID NO: 817341 - DNA, 15 bp, Homo sapiens
atttaaaatgatgca

SEQ ID NO: 817342 - DNA, 15 bp, Homo sapiens
aatttaaaatgatgc

SEQ ID NO: 817343 - DNA, 15 bp, Homo sapiens
gaatttaaaatgatg

SEQ ID NO: 817344 - DNA, 15 bp, Homo sapiens
ggaatttaaaatgat

SEQ ID NO: 817345 - DNA, 15 bp, Homo sapiens
aggaatttaaaatga

SEQ ID NO: 817346 - DNA, 15 bp, Homo sapiens
aaggaatttaaaatg

SEQ ID NO: 817347 - DNA, 15 bp, Homo sapiens
gaaggaatttaaaat

SEQ ID NO: 817348 - DNA, 15 bp, Homo sapiens
ggaaggaatttaaaa

SEQ ID NO: 817349 - DNA, 15 bp, Homo sapiens
tggaaggaatttaaa

SEQ ID NO: 817350 - DNA, 15 bp, Homo sapiens
gtggaaggaatttaa

SEQ ID NO: 817351 - DNA, 15 bp, Homo sapiens
ggtggaaggaattta

SEQ ID NO: 817352 - DNA, 15 bp, Homo sapiens
tggtggaaggaattt

SEQ ID NO: 817353 - DNA, 15 bp, Homo sapiens
atggtggaaggaatt

SEQ ID NO: 817354 - DNA, 15 bp, Homo sapiens
aatggtggaaggaat

SEQ ID NO: 817355 - DNA, 15 bp, Homo sapiens
caatggtggaaggaa

SEQ ID NO: 817356 - DNA, 15 bp, Homo sapiens
acaatggtggaagga

SEQ ID NO: 817357 - DNA, 15 bp, Homo sapiens
cacaatggtggaagg

SEQ ID NO: 817358 - DNA, 15 bp, Homo sapiens
acacaatggtggaag

SEQ ID NO: 817359 - DNA, 15 bp, Homo sapiens
cacacaatggtggaa

SEQ ID NO: 817360 - DNA, 15 bp, Homo sapiens
tcacacaatggtgga

SEQ ID NO: 817361 - DNA, 15 bp, Homo sapiens
ctcacacaatggtgg

SEQ ID NO: 817362 - DNA, 15 bp, Homo sapiens
actcacacaatggtg

SEQ ID NO: 817363 - DNA, 15 bp, Homo sapiens
cactcacacaatggt

SEQ ID NO: 817364 - DNA, 15 bp, Homo sapiens
acactcacacaatgg

SEQ ID NO: 817365 - DNA, 15 bp, Homo sapiens
aacactcacacaatg

SEQ ID NO: 817366 - DNA, 15 bp, Homo sapiens
aaacactcacacaat

SEQ ID NO: 817367 - DNA, 15 bp, Homo sapiens
gaaacactcacacaa

SEQ ID NO: 817368 - DNA, 15 bp, Homo sapiens
tgaaacactcacaca

SEQ ID NO: 817369 - DNA, 15 bp, Homo sapiens
ttgaaacactcacac

SEQ ID NO: 817370 - DNA, 15 bp, Homo sapiens
attgaaacactcaca

SEQ ID NO: 817371 - DNA, 15 bp, Homo sapiens
aattgaaacactcac

SEQ ID NO: 817372 - DNA, 15 bp, Homo sapiens
aaattgaaacactca

SEQ ID NO: 817373 - DNA, 15 bp, Homo sapiens
gaaattgaaacactc

SEQ ID NO: 817374 - DNA, 15 bp, Homo sapiens
agaaattgaaacact

SEQ ID NO: 817375 - DNA, 15 bp, Homo sapiens
gagaaattgaaacac

SEQ ID NO: 817376 - DNA, 15 bp, Homo sapiens
ggagaaattgaaaca

SEQ ID NO: 817377 - DNA, 15 bp, Homo sapiens
tggagaaattgaaac

SEQ ID NO: 817378 - DNA, 15 bp, Homo sapiens
gtggagaaattgaaa

SEQ ID NO: 817379 - DNA, 15 bp, Homo sapiens
tgtggagaaattgaa

SEQ ID NO: 817380 - DNA, 15 bp, Homo sapiens
atgtggagaaattga

SEQ ID NO: 817381 - DNA, 15 bp, Homo sapiens
tatgtggagaaattg

SEQ ID NO: 817382 - DNA, 15 bp, Homo sapiens
atatgtggagaaatt

SEQ ID NO: 817383 - DNA, 15 bp, Homo sapiens
aatatgtggagaaat

SEQ ID NO: 817384 - DNA, 15 bp, Homo sapiens
aaatatgtggagaaa

SEQ ID NO: 817385 - DNA, 15 bp, Homo sapiens
caaatatgtggagaa

SEQ ID NO: 817386 - DNA, 15 bp, Homo sapiens
gcaaatatgtggaga

SEQ ID NO: 817387 - DNA, 15 bp, Homo sapiens
tgcaaatatgtggag

SEQ ID NO: 817388 - DNA, 15 bp, Homo sapiens
ttgcaaatatgtgga

SEQ ID NO: 817389 - DNA, 15 bp, Homo sapiens
gttgcaaatatgtgg

SEQ ID NO: 817390 - DNA, 15 bp, Homo sapiens
tgttgcaaatatgtg

SEQ ID NO: 817391 - DNA, 15 bp, Homo sapiens
gtgttgcaaatatgt

SEQ ID NO: 817392 - DNA, 15 bp, Homo sapiens
agtgttgcaaatatg

SEQ ID NO: 817393 - DNA, 15 bp, Homo sapiens
aagtgttgcaaatat

SEQ ID NO: 817394 - DNA, 15 bp, Homo sapiens
taagtgttgcaaata

SEQ ID NO: 817395 - DNA, 15 bp, Homo sapiens
gtaagtgttgcaaat

SEQ ID NO: 817396 - DNA, 15 bp, Homo sapiens
agtaagtgttgcaaa

SEQ ID NO: 817397 - DNA, 15 bp, Homo sapiens
tagtaagtgttgcaa

SEQ ID NO: 817398 - DNA, 15 bp, Homo sapiens
atagtaagtgttgca

SEQ ID NO: 817399 - DNA, 15 bp, Homo sapiens
aatagtaagtgttgc

SEQ ID NO: 817400 - DNA, 15 bp, Homo sapiens
taatagtaagtgttg

SEQ ID NO: 817401 - DNA, 15 bp, Homo sapiens
ataatagtaagtgtt

SEQ ID NO: 817402 - DNA, 15 bp, Homo sapiens
gataatagtaagtgt

SEQ ID NO: 817403 - DNA, 15 bp, Homo sapiens
agataatagtaagtg

SEQ ID NO: 817404 - DNA, 15 bp, Homo sapiens
tagataatagtaagt

SEQ ID NO: 817405 - DNA, 15 bp, Homo sapiens
gtagataatagtaag

SEQ ID NO: 817406 - DNA, 15 bp, Homo sapiens
agtagataatagtaa

SEQ ID NO: 817407 - DNA, 15 bp, Homo sapiens
gagtagataatagta

SEQ ID NO: 817408 - DNA, 15 bp, Homo sapiens
agagtagataatagt

SEQ ID NO: 817409 - DNA, 15 bp, Homo sapiens
aagagtagataatag

SEQ ID NO: 817410 - DNA, 15 bp, Homo sapiens
taagagtagataata

SEQ ID NO: 817411 - DNA, 15 bp, Homo sapiens
ttaagagtagataat

SEQ ID NO: 817412 - DNA, 15 bp, Homo sapiens
tttaagagtagataa

SEQ ID NO: 817413 - DNA, 15 bp, Homo sapiens
ttttaagagtagata

SEQ ID NO: 817414 - DNA, 15 bp, Homo sapiens
tttttaagagtagat

SEQ ID NO: 817415 - DNA, 15 bp, Homo sapiens
atttttaagagtaga

SEQ ID NO: 817416 - DNA, 15 bp, Homo sapiens
aatttttaagagtag

SEQ ID NO: 817417 - DNA, 15 bp, Homo sapiens
taatttttaagagta

SEQ ID NO: 817418 - DNA, 15 bp, Homo sapiens
gtaatttttaagagt

SEQ ID NO: 817419 - DNA, 15 bp, Homo sapiens
tgtaatttttaagag

SEQ ID NO: 817420 - DNA, 15 bp, Homo sapiens
ctgtaatttttaaga

SEQ ID NO: 817421 - DNA, 15 bp, Homo sapiens
gctgtaatttttaag

SEQ ID NO: 817422 - DNA, 15 bp, Homo sapiens
ggctgtaatttttaa

SEQ ID NO: 817423 - DNA, 15 bp, Homo sapiens
tggctgtaattttta

SEQ ID NO: 817424 - DNA, 15 bp, Homo sapiens
atggctgtaattttt

SEQ ID NO: 817425 - DNA, 15 bp, Homo sapiens
gatggctgtaatttt

SEQ ID NO: 817426 - DNA, 15 bp, Homo sapiens
ggatggctgtaattt

SEQ ID NO: 817427 - DNA, 15 bp, Homo sapiens
aggatggctgtaatt

SEQ ID NO: 817428 - DNA, 15 bp, Homo sapiens
taggatggctgtaat

SEQ ID NO: 817429 - DNA, 15 bp, Homo sapiens
gtaggatggctgtaa

SEQ ID NO: 817430 - DNA, 15 bp, Homo sapiens
agtaggatggctgta

SEQ ID NO: 817431 - DNA, 15 bp, Homo sapiens
cagtaggatggctgt

SEQ ID NO: 817432 - DNA, 15 bp, Homo sapiens
ccagtaggatggctg

SEQ ID NO: 817433 - DNA, 15 bp, Homo sapiens
cccagtaggatggct

SEQ ID NO: 817434 - DNA, 15 bp, Homo sapiens
gcccagtaggatggc

SEQ ID NO: 817435 - DNA, 15 bp, Homo sapiens
tgcccagtaggatgg

SEQ ID NO: 817436 - DNA, 15 bp, Homo sapiens
atgcccagtaggatg

SEQ ID NO: 817437 - DNA, 15 bp, Homo sapiens
catgcccagtaggat

SEQ ID NO: 817438 - DNA, 15 bp, Homo sapiens
tcatgcccagtagga

SEQ ID NO: 817439 - DNA, 15 bp, Homo sapiens
ttcatgcccagtagg

SEQ ID NO: 817440 - DNA, 15 bp, Homo sapiens
cttcatgcccagtag

SEQ ID NO: 817441 - DNA, 15 bp, Homo sapiens
acttcatgcccagta

SEQ ID NO: 817442 - DNA, 15 bp, Homo sapiens
cacttcatgcccagt

SEQ ID NO: 817443 - DNA, 15 bp, Homo sapiens
ccacttcatgcccag

SEQ ID NO: 817444 - DNA, 15 bp, Homo sapiens
accacttcatgccca

SEQ ID NO: 817445 - DNA, 15 bp, Homo sapiens
taccacttcatgccc

SEQ ID NO: 817446 - DNA, 15 bp, Homo sapiens
ataccacttcatgcc

SEQ ID NO: 817447 - DNA, 15 bp, Homo sapiens
aataccacttcatgc

SEQ ID NO: 817448 - DNA, 15 bp, Homo sapiens
aaataccacttcatg

SEQ ID NO: 817449 - DNA, 15 bp, Homo sapiens
gaaataccacttcat

SEQ ID NO: 817450 - DNA, 15 bp, Homo sapiens
tgaaataccacttca

SEQ ID NO: 817451 - DNA, 15 bp, Homo sapiens
atgaaataccacttc

SEQ ID NO: 817452 - DNA, 15 bp, Homo sapiens
aatgaaataccactt

SEQ ID NO: 817453 - DNA, 15 bp, Homo sapiens
caatgaaataccact

SEQ ID NO: 817454 - DNA, 15 bp, Homo sapiens
acaatgaaataccac

SEQ ID NO: 817455 - DNA, 15 bp, Homo sapiens
cacaatgaaatacca

SEQ ID NO: 817456 - DNA, 15 bp, Homo sapiens
tcacaatgaaatacc

SEQ ID NO: 817457 - DNA, 15 bp, Homo sapiens
ctcacaatgaaatac

SEQ ID NO: 817458 - DNA, 15 bp, Homo sapiens
actcacaatgaaata

SEQ ID NO: 817459 - DNA, 15 bp, Homo sapiens
aactcacaatgaaat

SEQ ID NO: 817460 - DNA, 15 bp, Homo sapiens
aaactcacaatgaaa

SEQ ID NO: 817461 - DNA, 15 bp, Homo sapiens
aaaactcacaatgaa

SEQ ID NO: 817462 - DNA, 15 bp, Homo sapiens
aaaaactcacaatga

SEQ ID NO: 817463 - DNA, 15 bp, Homo sapiens
aaaaaactcacaatg

SEQ ID NO: 817464 - DNA, 15 bp, Homo sapiens
aaaaaaactcacaat

SEQ ID NO: 817465 - DNA, 15 bp, Homo sapiens
aaaaaaaactcacaa

SEQ ID NO: 817466 - DNA, 15 bp, Homo sapiens
aaaaaaaaactcaca

SEQ ID NO: 817467 - DNA, 15 bp, Homo sapiens
aaaaaaaaaactcac

SEQ ID NO: 817468 - DNA, 15 bp, Homo sapiens
gaaaaaaaaaactca

SEQ ID NO: 817469 - DNA, 15 bp, Homo sapiens
agaaaaaaaaaactc

SEQ ID NO: 817470 - DNA, 15 bp, Homo sapiens
aagaaaaaaaaaact

SEQ ID NO: 817471 - DNA, 15 bp, Homo sapiens
aaagaaaaaaaaaac

SEQ ID NO: 817472 - DNA, 15 bp, Homo sapiens
aaaagaaaaaaaaaa

SEQ ID NO: 817473 - DNA, 15 bp, Homo sapiens
aaaaagaaaaaaaaa

SEQ ID NO: 817474 - DNA, 15 bp, Homo sapiens
gaaaaagaaaaaaaa

SEQ ID NO: 817475 - DNA, 15 bp, Homo sapiens
agaaaaagaaaaaaa

SEQ ID NO: 817476 - DNA, 15 bp, Homo sapiens
aagaaaaagaaaaaa

SEQ ID NO: 817477 - DNA, 15 bp, Homo sapiens
aaaaagaaaaaaaga

SEQ ID NO: 817478 - DNA, 15 bp, Homo sapiens
aaaaaagaaaaaaag

SEQ ID NO: 817479 - DNA, 15 bp, Homo sapiens
aaaaaaagaaaaaaa

SEQ ID NO: 817480 - DNA, 15 bp, Homo sapiens
caaaaaaagaaaaaa

SEQ ID NO: 817481 - DNA, 15 bp, Homo sapiens
gcaaaaaaagaaaaa

SEQ ID NO: 817482 - DNA, 15 bp, Homo sapiens
agcaaaaaaagaaaa

SEQ ID NO: 817483 - DNA, 15 bp, Homo sapiens
tagcaaaaaaagaaa

SEQ ID NO: 817484 - DNA, 15 bp, Homo sapiens
ttagcaaaaaaagaa

SEQ ID NO: 817485 - DNA, 15 bp, Homo sapiens
attagcaaaaaaaga

SEQ ID NO: 817486 - DNA, 15 bp, Homo sapiens
cattagcaaaaaaag

SEQ ID NO: 817487 - DNA, 15 bp, Homo sapiens
acattagcaaaaaaa

SEQ ID NO: 817488 - DNA, 15 bp, Homo sapiens
aacattagcaaaaaa

SEQ ID NO: 817489 - DNA, 15 bp, Homo sapiens
aaacattagcaaaaa

SEQ ID NO: 817490 - DNA, 15 bp, Homo sapiens
caaacattagcaaaa

SEQ ID NO: 817491 - DNA, 15 bp, Homo sapiens
acaaacattagcaaa

SEQ ID NO: 817492 - DNA, 15 bp, Homo sapiens
cacaaacattagcaa

SEQ ID NO: 817493 - DNA, 15 bp, Homo sapiens
ccacaaacattagca

SEQ ID NO: 817494 - DNA, 15 bp, Homo sapiens
tccacaaacattagc

SEQ ID NO: 817495 - DNA, 15 bp, Homo sapiens
atccacaaacattag

SEQ ID NO: 817496 - DNA, 15 bp, Homo sapiens
aatccacaaacatta

SEQ ID NO: 817497 - DNA, 15 bp, Homo sapiens
aaatccacaaacatt

SEQ ID NO: 817498 - DNA, 15 bp, Homo sapiens
aaaatccacaaacat

SEQ ID NO: 817499 - DNA, 15 bp, Homo sapiens
gaaaatccacaaaca

SEQ ID NO: 817500 - DNA, 15 bp, Homo sapiens
agaaaatccacaaac

SEQ ID NO: 817501 - DNA, 15 bp, Homo sapiens
aagaaaatccacaaa

SEQ ID NO: 817502 - DNA, 15 bp, Homo sapiens
aaagaaaatccacaa

SEQ ID NO: 817503 - DNA, 15 bp, Homo sapiens
aaaagaaaatccaca

SEQ ID NO: 817504 - DNA, 15 bp, Homo sapiens
gaaaagaaaatccac

SEQ ID NO: 817505 - DNA, 15 bp, Homo sapiens
tgaaaagaaaatcca

SEQ ID NO: 817506 - DNA, 15 bp, Homo sapiens
atgaaaagaaaatcc

SEQ ID NO: 817507 - DNA, 15 bp, Homo sapiens
aatgaaaagaaaatc

SEQ ID NO: 817508 - DNA, 15 bp, Homo sapiens
aaatgaaaagaaaat

SEQ ID NO: 817509 - DNA, 15 bp, Homo sapiens
aaaatgaaaagaaaa

SEQ ID NO: 817510 - DNA, 15 bp, Homo sapiens
gaaaatgaaaagaaa

SEQ ID NO: 817511 - DNA, 15 bp, Homo sapiens
agaaaatgaaaagaa

SEQ ID NO: 817512 - DNA, 15 bp, Homo sapiens
aagaaaatgaaaaga

SEQ ID NO: 817513 - DNA, 15 bp, Homo sapiens
caagaaaatgaaaag

SEQ ID NO: 817514 - DNA, 15 bp, Homo sapiens
tcaagaaaatgaaaa

SEQ ID NO: 817515 - DNA, 15 bp, Homo sapiens
atcaagaaaatgaaa

SEQ ID NO: 817516 - DNA, 15 bp, Homo sapiens
catcaagaaaatgaa

SEQ ID NO: 817517 - DNA, 15 bp, Homo sapiens
ccatcaagaaaatga

SEQ ID NO: 817518 - DNA, 15 bp, Homo sapiens
accatcaagaaaatg

SEQ ID NO: 817519 - DNA, 15 bp, Homo sapiens
caccatcaagaaaat

SEQ ID NO: 817520 - DNA, 15 bp, Homo sapiens
acaccatcaagaaaa

SEQ ID NO: 817521 - DNA, 15 bp, Homo sapiens
gacaccatcaagaaa

SEQ ID NO: 817522 - DNA, 15 bp, Homo sapiens
ggacaccatcaagaa

SEQ ID NO: 817523 - DNA, 15 bp, Homo sapiens
aggacaccatcaaga

SEQ ID NO: 817524 - DNA, 15 bp, Homo sapiens
aaggacaccatcaag

SEQ ID NO: 817525 - DNA, 15 bp, Homo sapiens
aaaggacaccatcaa

SEQ ID NO: 817526 - DNA, 15 bp, Homo sapiens
caaaggacaccatca

SEQ ID NO: 817527 - DNA, 15 bp, Homo sapiens
tcaaaggacaccatc

SEQ ID NO: 817528 - DNA, 15 bp, Homo sapiens
ttcaaaggacaccat

SEQ ID NO: 817529 - DNA, 15 bp, Homo sapiens
cttcaaaggacacca

SEQ ID NO: 817530 - DNA, 15 bp, Homo sapiens
gcttcaaaggacacc

SEQ ID NO: 817531 - DNA, 15 bp, Homo sapiens
tgcttcaaaggacac

SEQ ID NO: 817532 - DNA, 15 bp, Homo sapiens
gtgcttcaaaggaca

SEQ ID NO: 817533 - DNA, 15 bp, Homo sapiens
tgtgcttcaaaggac

SEQ ID NO: 817534 - DNA, 15 bp, Homo sapiens
ttgtgcttcaaagga

SEQ ID NO: 817535 - DNA, 15 bp, Homo sapiens
tttgtgcttcaaagg

SEQ ID NO: 817536 - DNA, 15 bp, Homo sapiens
ttttgtgcttcaaag

SEQ ID NO: 817537 - DNA, 15 bp, Homo sapiens
cttttgtgcttcaaa

SEQ ID NO: 817538 - DNA, 15 bp, Homo sapiens
acttttgtgcttcaa

SEQ ID NO: 817539 - DNA, 15 bp, Homo sapiens
tacttttgtgcttca

SEQ ID NO: 817540 - DNA, 15 bp, Homo sapiens
atacttttgtgcttc

SEQ ID NO: 817541 - DNA, 15 bp, Homo sapiens
aatacttttgtgctt

SEQ ID NO: 817542 - DNA, 15 bp, Homo sapiens
aaatacttttgtgct

SEQ ID NO: 817543 - DNA, 15 bp, Homo sapiens
taaatacttttgtgc

SEQ ID NO: 817544 - DNA, 15 bp, Homo sapiens
ttaaatacttttgtg

SEQ ID NO: 817545 - DNA, 15 bp, Homo sapiens
attaaatacttttgt

SEQ ID NO: 817546 - DNA, 15 bp, Homo sapiens
aattaaatacttttg

SEQ ID NO: 817547 - DNA, 15 bp, Homo sapiens
aaattaaatactttt

SEQ ID NO: 817548 - DNA, 15 bp, Homo sapiens
aaaattaaatacttt

SEQ ID NO: 817549 - DNA, 15 bp, Homo sapiens
caaaattaaatactt

SEQ ID NO: 817550 - DNA, 15 bp, Homo sapiens
tcaaaattaaatact

SEQ ID NO: 817551 - DNA, 15 bp, Homo sapiens
atcaaaattaaatac

SEQ ID NO: 817552 - DNA, 15 bp, Homo sapiens
tatcaaaattaaata

SEQ ID NO: 817553 - DNA, 15 bp, Homo sapiens
ttatcaaaattaaat

SEQ ID NO: 817554 - DNA, 15 bp, Homo sapiens
attatcaaaattaaa

SEQ ID NO: 817555 - DNA, 15 bp, Homo sapiens
aattatcaaaattaa

SEQ ID NO: 817556 - DNA, 15 bp, Homo sapiens
aaattatcaaaatta

SEQ ID NO: 817557 - DNA, 15 bp, Homo sapiens
gaaattatcaaaatt

SEQ ID NO: 817558 - DNA, 15 bp, Homo sapiens
ggaaattatcaaaat

SEQ ID NO: 817559 - DNA, 15 bp, Homo sapiens
tggaaattatcaaaa

SEQ ID NO: 817560 - DNA, 15 bp, Homo sapiens
ttggaaattatcaaa

SEQ ID NO: 817561 - DNA, 15 bp, Homo sapiens
attggaaattatcaa

SEQ ID NO: 817562 - DNA, 15 bp, Homo sapiens
aattggaaattatca

SEQ ID NO: 817563 - DNA, 15 bp, Homo sapiens
aaattggaaattatc

SEQ ID NO: 817564 - DNA, 15 bp, Homo sapiens
taaattggaaattat

SEQ ID NO: 817565 - DNA, 15 bp, Homo sapiens
ataaattggaaatta

SEQ ID NO: 817566 - DNA, 15 bp, Homo sapiens
aataaattggaaatt

SEQ ID NO: 817567 - DNA, 15 bp, Homo sapiens
aaataaattggaaat

SEQ ID NO: 817568 - DNA, 15 bp, Homo sapiens
aaaataaattggaaa

SEQ ID NO: 817569 - DNA, 15 bp, Homo sapiens
aaaaataaattggaa

SEQ ID NO: 817570 - DNA, 15 bp, Homo sapiens
aaaaaataaattgga

SEQ ID NO: 817571 - DNA, 15 bp, Homo sapiens
caaaaaataaattgg

SEQ ID NO: 817572 - DNA, 15 bp, Homo sapiens
acaaaaaataaattg

SEQ ID NO: 817573 - DNA, 15 bp, Homo sapiens
aacaaaaaataaatt

SEQ ID NO: 817574 - DNA, 15 bp, Homo sapiens
taacaaaaaataaat

SEQ ID NO: 817575 - DNA, 15 bp, Homo sapiens
ataacaaaaaataaa

SEQ ID NO: 817576 - DNA, 15 bp, Homo sapiens
aataacaaaaaataa

SEQ ID NO: 817577 - DNA, 15 bp, Homo sapiens
caataacaaaaaata

SEQ ID NO: 817578 - DNA, 15 bp, Homo sapiens
gcaataacaaaaaat

SEQ ID NO: 817579 - DNA, 15 bp, Homo sapiens
agcaataacaaaaaa

SEQ ID NO: 817580 - DNA, 15 bp, Homo sapiens
cagcaataacaaaaa

SEQ ID NO: 817581 - DNA, 15 bp, Homo sapiens
acagcaataacaaaa

SEQ ID NO: 817582 - DNA, 15 bp, Homo sapiens
aacagcaataacaaa

SEQ ID NO: 817583 - DNA, 15 bp, Homo sapiens
aaacagcaataacaa

SEQ ID NO: 817584 - DNA, 15 bp, Homo sapiens
caaacagcaataaca

SEQ ID NO: 817585 - DNA, 15 bp, Homo sapiens
acaaacagcaataac

SEQ ID NO: 817586 - DNA, 15 bp, Homo sapiens
cacaaacagcaataa

SEQ ID NO: 817587 - DNA, 15 bp, Homo sapiens
gcacaaacagcaata

SEQ ID NO: 817588 - DNA, 15 bp, Homo sapiens
agcacaaacagcaat

SEQ ID NO: 817589 - DNA, 15 bp, Homo sapiens
aagcacaaacagcaa

SEQ ID NO: 817590 - DNA, 15 bp, Homo sapiens
gaagcacaaacagca

SEQ ID NO: 817591 - DNA, 15 bp, Homo sapiens
agaagcacaaacagc

SEQ ID NO: 817592 - DNA, 15 bp, Homo sapiens
cagaagcacaaacag

SEQ ID NO: 817593 - DNA, 15 bp, Homo sapiens
ccagaagcacaaaca

SEQ ID NO: 817594 - DNA, 15 bp, Homo sapiens
accagaagcacaaac

SEQ ID NO: 817595 - DNA, 15 bp, Homo sapiens
caccagaagcacaaa

SEQ ID NO: 817596 - DNA, 15 bp, Homo sapiens
acaccagaagcacaa

SEQ ID NO: 817597 - DNA, 15 bp, Homo sapiens
aacaccagaagcaca

SEQ ID NO: 817598 - DNA, 15 bp, Homo sapiens
caacaccagaagcac

SEQ ID NO: 817599 - DNA, 15 bp, Homo sapiens
acaacaccagaagca

SEQ ID NO: 817600 - DNA, 15 bp, Homo sapiens
tacaacaccagaagc

SEQ ID NO: 817601 - DNA, 15 bp, Homo sapiens
atacaacaccagaag

SEQ ID NO: 817602 - DNA, 15 bp, Homo sapiens
gatacaacaccagaa

SEQ ID NO: 817603 - DNA, 15 bp, Homo sapiens
agatacaacaccaga

SEQ ID NO: 817604 - DNA, 15 bp, Homo sapiens
tagatacaacaccag

SEQ ID NO: 817605 - DNA, 15 bp, Homo sapiens
ttagatacaacacca

SEQ ID NO: 817606 - DNA, 15 bp, Homo sapiens
cttagatacaacacc

SEQ ID NO: 817607 - DNA, 15 bp, Homo sapiens
acttagatacaacac

SEQ ID NO: 817608 - DNA, 15 bp, Homo sapiens
cacttagatacaaca

SEQ ID NO: 817609 - DNA, 15 bp, Homo sapiens
acacttagatacaac

SEQ ID NO: 817610 - DNA, 15 bp, Homo sapiens
tacacttagatacaa

SEQ ID NO: 817611 - DNA, 15 bp, Homo sapiens
atacacttagataca

SEQ ID NO: 817612 - DNA, 15 bp, Homo sapiens
catacacttagatac

SEQ ID NO: 817613 - DNA, 15 bp, Homo sapiens
gcatacacttagata

SEQ ID NO: 817614 - DNA, 15 bp, Homo sapiens
agcatacacttagat

SEQ ID NO: 817615 - DNA, 15 bp, Homo sapiens
tagcatacacttaga

SEQ ID NO: 817616 - DNA, 15 bp, Homo sapiens
gtagcatacacttag

SEQ ID NO: 817617 - DNA, 15 bp, Homo sapiens
agtagcatacactta

SEQ ID NO: 817618 - DNA, 15 bp, Homo sapiens
aagtagcatacactt

SEQ ID NO: 817619 - DNA, 15 bp, Homo sapiens
aaagtagcatacact

SEQ ID NO: 817620 - DNA, 15 bp, Homo sapiens
taaagtagcatacac

SEQ ID NO: 817621 - DNA, 15 bp, Homo sapiens
ttaaagtagcataca

SEQ ID NO: 817622 - DNA, 15 bp, Homo sapiens
tttaaagtagcatac

SEQ ID NO: 817623 - DNA, 15 bp, Homo sapiens
ttttaaagtagcata

SEQ ID NO: 817624 - DNA, 15 bp, Homo sapiens
tttttaaagtagcat

SEQ ID NO: 817625 - DNA, 15 bp, Homo sapiens
ttttttaaagtagca

SEQ ID NO: 817626 - DNA, 15 bp, Homo sapiens
attttttaaagtagc

SEQ ID NO: 817627 - DNA, 15 bp, Homo sapiens
aattttttaaagtag

SEQ ID NO: 817628 - DNA, 15 bp, Homo sapiens
taattttttaaagta

SEQ ID NO: 817629 - DNA, 15 bp, Homo sapiens
ctaattttttaaagt

SEQ ID NO: 817630 - DNA, 15 bp, Homo sapiens
actaattttttaaag

SEQ ID NO: 817631 - DNA, 15 bp, Homo sapiens
aactaattttttaaa

SEQ ID NO: 817632 - DNA, 15 bp, Homo sapiens
caactaattttttaa

SEQ ID NO: 817633 - DNA, 15 bp, Homo sapiens
acaactaatttttta

SEQ ID NO: 817634 - DNA, 15 bp, Homo sapiens
tacaactaatttttt

SEQ ID NO: 817635 - DNA, 15 bp, Homo sapiens
ttacaactaattttt

SEQ ID NO: 817636 - DNA, 15 bp, Homo sapiens
attacaactaatttt

SEQ ID NO: 817637 - DNA, 15 bp, Homo sapiens
tattacaactaattt

SEQ ID NO: 817638 - DNA, 15 bp, Homo sapiens
atattacaactaatt

SEQ ID NO: 817639 - DNA, 15 bp, Homo sapiens
catattacaactaat

SEQ ID NO: 817640 - DNA, 15 bp, Homo sapiens
ccatattacaactaa

SEQ ID NO: 817641 - DNA, 15 bp, Homo sapiens
gccatattacaacta

SEQ ID NO: 817642 - DNA, 15 bp, Homo sapiens
tgccatattacaact

SEQ ID NO: 817643 - DNA, 15 bp, Homo sapiens
ttgccatattacaac

SEQ ID NO: 817644 - DNA, 15 bp, Homo sapiens
tttgccatattacaa

SEQ ID NO: 817645 - DNA, 15 bp, Homo sapiens
atttgccatattaca

SEQ ID NO: 817646 - DNA, 15 bp, Homo sapiens
aatttgccatattac

SEQ ID NO: 817647 - DNA, 15 bp, Homo sapiens
caatttgccatatta

SEQ ID NO: 817648 - DNA, 15 bp, Homo sapiens
ccaatttgccatatt

SEQ ID NO: 817649 - DNA, 15 bp, Homo sapiens
tccaatttgccatat

SEQ ID NO: 817650 - DNA, 15 bp, Homo sapiens
atccaatttgccata

SEQ ID NO: 817651 - DNA, 15 bp, Homo sapiens
tatccaatttgccat

SEQ ID NO: 817652 - DNA, 15 bp, Homo sapiens
gtatccaatttgcca

SEQ ID NO: 817653 - DNA, 15 bp, Homo sapiens
tgtatccaatttgcc

SEQ ID NO: 817654 - DNA, 15 bp, Homo sapiens
atgtatccaatttgc

SEQ ID NO: 817655 - DNA, 15 bp, Homo sapiens
catgtatccaatttg

SEQ ID NO: 817656 - DNA, 15 bp, Homo sapiens
acatgtatccaattt

SEQ ID NO: 817657 - DNA, 15 bp, Homo sapiens
cacatgtatccaatt

SEQ ID NO: 817658 - DNA, 15 bp, Homo sapiens
acacatgtatccaat

SEQ ID NO: 817659 - DNA, 15 bp, Homo sapiens
tacacatgtatccaa

SEQ ID NO: 817660 - DNA, 15 bp, Homo sapiens
ctacacatgtatcca

SEQ ID NO: 817661 - DNA, 15 bp, Homo sapiens
cctacacatgtatcc

SEQ ID NO: 817662 - DNA, 15 bp, Homo sapiens
gcctacacatgtatc

SEQ ID NO: 817663 - DNA, 15 bp, Homo sapiens
agcctacacatgtat

SEQ ID NO: 817664 - DNA, 15 bp, Homo sapiens
aagcctacacatgta

SEQ ID NO: 817665 - DNA, 15 bp, Homo sapiens
aaagcctacacatgt

SEQ ID NO: 817666 - DNA, 15 bp, Homo sapiens
caaagcctacacatg

SEQ ID NO: 817667 - DNA, 15 bp, Homo sapiens
ccaaagcctacacat

SEQ ID NO: 817668 - DNA, 15 bp, Homo sapiens
accaaagcctacaca

SEQ ID NO: 817669 - DNA, 15 bp, Homo sapiens
caccaaagcctacac

SEQ ID NO: 817670 - DNA, 15 bp, Homo sapiens
acaccaaagcctaca

SEQ ID NO: 817671 - DNA, 15 bp, Homo sapiens
gacaccaaagcctac

SEQ ID NO: 817672 - DNA, 15 bp, Homo sapiens
tgacaccaaagccta

SEQ ID NO: 817673 - DNA, 15 bp, Homo sapiens
gtgacaccaaagcct

SEQ ID NO: 817674 - DNA, 15 bp, Homo sapiens
tgtgacaccaaagcc

SEQ ID NO: 817675 - DNA, 15 bp, Homo sapiens
ttgtgacaccaaagc

SEQ ID NO: 817676 - DNA, 15 bp, Homo sapiens
attgtgacaccaaag

SEQ ID NO: 817677 - DNA, 15 bp, Homo sapiens
gattgtgacaccaaa

SEQ ID NO: 817678 - DNA, 15 bp, Homo sapiens
ggattgtgacaccaa

SEQ ID NO: 817679 - DNA, 15 bp, Homo sapiens
aggattgtgacacca

SEQ ID NO: 817680 - DNA, 15 bp, Homo sapiens
taggattgtgacacc

SEQ ID NO: 817681 - DNA, 15 bp, Homo sapiens
ttaggattgtgacac

SEQ ID NO: 817682 - DNA, 15 bp, Homo sapiens
attaggattgtgaca

SEQ ID NO: 817683 - DNA, 15 bp, Homo sapiens
aattaggattgtgac

SEQ ID NO: 817684 - DNA, 15 bp, Homo sapiens
aaattaggattgtga

SEQ ID NO: 817685 - DNA, 15 bp, Homo sapiens
aaaattaggattgtg

SEQ ID NO: 817686 - DNA, 15 bp, Homo sapiens
taaaattaggattgt

SEQ ID NO: 817687 - DNA, 15 bp, Homo sapiens
ttaaaattaggattg

SEQ ID NO: 817688 - DNA, 15 bp, Homo sapiens
tttaaaattaggatt

SEQ ID NO: 817689 - DNA, 15 bp, Homo sapiens
ttttaaaattaggat

SEQ ID NO: 817690 - DNA, 15 bp, Homo sapiens
attttaaaattagga

SEQ ID NO: 817691 - DNA, 15 bp, Homo sapiens
aattttaaaattagg

SEQ ID NO: 817692 - DNA, 15 bp, Homo sapiens
gaattttaaaattag

SEQ ID NO: 817693 - DNA, 15 bp, Homo sapiens
agaattttaaaatta

SEQ ID NO: 817694 - DNA, 15 bp, Homo sapiens
cagaattttaaaatt

SEQ ID NO: 817695 - DNA, 15 bp, Homo sapiens
tcagaattttaaaat

SEQ ID NO: 817696 - DNA, 15 bp, Homo sapiens
gtcagaattttaaaa

SEQ ID NO: 817697 - DNA, 15 bp, Homo sapiens
agtcagaattttaaa

SEQ ID NO: 817698 - DNA, 15 bp, Homo sapiens
gagtcagaattttaa

SEQ ID NO: 817699 - DNA, 15 bp, Homo sapiens
agagtcagaatttta

SEQ ID NO: 817700 - DNA, 15 bp, Homo sapiens
cagagtcagaatttt

SEQ ID NO: 817701 - DNA, 15 bp, Homo sapiens
gcagagtcagaattt

SEQ ID NO: 817702 - DNA, 15 bp, Homo sapiens
ggcagagtcagaatt

SEQ ID NO: 817703 - DNA, 15 bp, Homo sapiens
gggcagagtcagaat

SEQ ID NO: 817704 - DNA, 15 bp, Homo sapiens
agggcagagtcagaa

SEQ ID NO: 817705 - DNA, 15 bp, Homo sapiens
aagggcagagtcaga

SEQ ID NO: 817706 - DNA, 15 bp, Homo sapiens
caagggcagagtcag

SEQ ID NO: 817707 - DNA, 15 bp, Homo sapiens
tcaagggcagagtca

SEQ ID NO: 817708 - DNA, 15 bp, Homo sapiens
gtcaagggcagagtc

SEQ ID NO: 817709 - DNA, 15 bp, Homo sapiens
tgtcaagggcagagt

SEQ ID NO: 817710 - DNA, 15 bp, Homo sapiens
ttgtcaagggcagag

SEQ ID NO: 817711 - DNA, 15 bp, Homo sapiens
tttgtcaagggcaga

SEQ ID NO: 817712 - DNA, 15 bp, Homo sapiens
atttgtcaagggcag

SEQ ID NO: 817713 - DNA, 15 bp, Homo sapiens
aatttgtcaagggca

SEQ ID NO: 817714 - DNA, 15 bp, Homo sapiens
taatttgtcaagggc

SEQ ID NO: 817715 - DNA, 15 bp, Homo sapiens
ttaatttgtcaaggg

SEQ ID NO: 817716 - DNA, 15 bp, Homo sapiens
gttaatttgtcaagg

SEQ ID NO: 817717 - DNA, 15 bp, Homo sapiens
agttaatttgtcaag

SEQ ID NO: 817718 - DNA, 15 bp, Homo sapiens
tagttaatttgtcaa

SEQ ID NO: 817719 - DNA, 15 bp, Homo sapiens
ttagttaatttgtca

SEQ ID NO: 817720 - DNA, 15 bp, Homo sapiens
attagttaatttgtc

SEQ ID NO: 817721 - DNA, 15 bp, Homo sapiens
aattagttaatttgt

SEQ ID NO: 817722 - DNA, 15 bp, Homo sapiens
taattagttaatttg

SEQ ID NO: 817723 - DNA, 15 bp, Homo sapiens
ttaattagttaattt

SEQ ID NO: 817724 - DNA, 15 bp, Homo sapiens
cttaattagttaatt

SEQ ID NO: 817725 - DNA, 15 bp, Homo sapiens
gcttaattagttaat

SEQ ID NO: 817726 - DNA, 15 bp, Homo sapiens
agcttaattagttaa

SEQ ID NO: 817727 - DNA, 15 bp, Homo sapiens
aagcttaattagtta

SEQ ID NO: 817728 - DNA, 15 bp, Homo sapiens
gaagcttaattagtt

SEQ ID NO: 817729 - DNA, 15 bp, Homo sapiens
ggaagcttaattagt

SEQ ID NO: 817730 - DNA, 15 bp, Homo sapiens
aggaagcttaattag

SEQ ID NO: 817731 - DNA, 15 bp, Homo sapiens
aaggaagcttaatta

SEQ ID NO: 817732 - DNA, 15 bp, Homo sapiens
taaggaagcttaatt

SEQ ID NO: 817733 - DNA, 15 bp, Homo sapiens
ctaaggaagcttaat

SEQ ID NO: 817734 - DNA, 15 bp, Homo sapiens
gctaaggaagcttaa

SEQ ID NO: 817735 - DNA, 15 bp, Homo sapiens
ggctaaggaagctta

SEQ ID NO: 817736 - DNA, 15 bp, Homo sapiens
aggctaaggaagctt

SEQ ID NO: 817737 - DNA, 15 bp, Homo sapiens
gaggctaaggaagct

SEQ ID NO: 817738 - DNA, 15 bp, Homo sapiens
tgaggctaaggaagc

SEQ ID NO: 817739 - DNA, 15 bp, Homo sapiens
ctgaggctaaggaag

SEQ ID NO: 817740 - DNA, 15 bp, Homo sapiens
actgaggctaaggaa

SEQ ID NO: 817741 - DNA, 15 bp, Homo sapiens
aactgaggctaagga

SEQ ID NO: 817742 - DNA, 15 bp, Homo sapiens
aaactgaggctaagg

SEQ ID NO: 817743 - DNA, 15 bp, Homo sapiens
gaaactgaggctaag

SEQ ID NO: 817744 - DNA, 15 bp, Homo sapiens
agaaactgaggctaa

SEQ ID NO: 817745 - DNA, 15 bp, Homo sapiens
gagaaactgaggcta

SEQ ID NO: 817746 - DNA, 15 bp, Homo sapiens
tgagaaactgaggct

SEQ ID NO: 817747 - DNA, 15 bp, Homo sapiens
ttgagaaactgaggc

SEQ ID NO: 817748 - DNA, 15 bp, Homo sapiens
gttgagaaactgagg

SEQ ID NO: 817749 - DNA, 15 bp, Homo sapiens
agttgagaaactgag

SEQ ID NO: 817750 - DNA, 15 bp, Homo sapiens
cagttgagaaactga

SEQ ID NO: 817751 - DNA, 15 bp, Homo sapiens
acagttgagaaactg

SEQ ID NO: 817752 - DNA, 15 bp, Homo sapiens
tacagttgagaaact

SEQ ID NO: 817753 - DNA, 15 bp, Homo sapiens
ttacagttgagaaac

SEQ ID NO: 817754 - DNA, 15 bp, Homo sapiens
cttacagttgagaaa

SEQ ID NO: 817755 - DNA, 15 bp, Homo sapiens
acttacagttgagaa

SEQ ID NO: 817756 - DNA, 15 bp, Homo sapiens
aacttacagttgaga

SEQ ID NO: 817757 - DNA, 15 bp, Homo sapiens
caacttacagttgag

SEQ ID NO: 817758 - DNA, 15 bp, Homo sapiens
ccaacttacagttga

SEQ ID NO: 817759 - DNA, 15 bp, Homo sapiens
tccaacttacagttg

SEQ ID NO: 817760 - DNA, 15 bp, Homo sapiens
ctccaacttacagtt

SEQ ID NO: 817761 - DNA, 15 bp, Homo sapiens
tctccaacttacagt

SEQ ID NO: 817762 - DNA, 15 bp, Homo sapiens
atctccaacttacag

SEQ ID NO: 817763 - DNA, 15 bp, Homo sapiens
tatctccaacttaca

SEQ ID NO: 817764 - DNA, 15 bp, Homo sapiens
atatctccaacttac

SEQ ID NO: 817765 - DNA, 15 bp, Homo sapiens
aatatctccaactta

SEQ ID NO: 817766 - DNA, 15 bp, Homo sapiens
taatatctccaactt

SEQ ID NO: 817767 - DNA, 15 bp, Homo sapiens
gtaatatctccaact

SEQ ID NO: 817768 - DNA, 15 bp, Homo sapiens
ggtaatatctccaac

SEQ ID NO: 817769 - DNA, 15 bp, Homo sapiens
tggtaatatctccaa

SEQ ID NO: 817770 - DNA, 15 bp, Homo sapiens
ttggtaatatctcca

SEQ ID NO: 817771 - DNA, 15 bp, Homo sapiens
cttggtaatatctcc

SEQ ID NO: 817772 - DNA, 15 bp, Homo sapiens
tcttggtaatatctc

SEQ ID NO: 817773 - DNA, 15 bp, Homo sapiens
gtcttggtaatatct

SEQ ID NO: 817774 - DNA, 15 bp, Homo sapiens
ggtcttggtaatatc

SEQ ID NO: 817775 - DNA, 15 bp, Homo sapiens
aggtcttggtaatat

SEQ ID NO: 817776 - DNA, 15 bp, Homo sapiens
taggtcttggtaata

SEQ ID NO: 817777 - DNA, 15 bp, Homo sapiens
gtaggtcttggtaat

SEQ ID NO: 817778 - DNA, 15 bp, Homo sapiens
ggtaggtcttggtaa

SEQ ID NO: 817779 - DNA, 15 bp, Homo sapiens
aggtaggtcttggta

SEQ ID NO: 817780 - DNA, 15 bp, Homo sapiens
gaggtaggtcttggt

SEQ ID NO: 817781 - DNA, 15 bp, Homo sapiens
agaggtaggtcttgg

SEQ ID NO: 817782 - DNA, 15 bp, Homo sapiens
aagaggtaggtcttg

SEQ ID NO: 817783 - DNA, 15 bp, Homo sapiens
caagaggtaggtctt

SEQ ID NO: 817784 - DNA, 15 bp, Homo sapiens
tcaagaggtaggtct

SEQ ID NO: 817785 - DNA, 15 bp, Homo sapiens
ttcaagaggtaggtc

SEQ ID NO: 817786 - DNA, 15 bp, Homo sapiens
attcaagaggtaggt

SEQ ID NO: 817787 - DNA, 15 bp, Homo sapiens
aattcaagaggtagg

SEQ ID NO: 817788 - DNA, 15 bp, Homo sapiens
caattcaagaggtag

SEQ ID NO: 817789 - DNA, 15 bp, Homo sapiens
acaattcaagaggta

SEQ ID NO: 817790 - DNA, 15 bp, Homo sapiens
aacaattcaagaggt

SEQ ID NO: 817791 - DNA, 15 bp, Homo sapiens
caacaattcaagagg

SEQ ID NO: 817792 - DNA, 15 bp, Homo sapiens
acaacaattcaagag

SEQ ID NO: 817793 - DNA, 15 bp, Homo sapiens
cacaacaattcaaga

SEQ ID NO: 817794 - DNA, 15 bp, Homo sapiens
ccacaacaattcaag

SEQ ID NO: 817795 - DNA, 15 bp, Homo sapiens
cccacaacaattcaa

SEQ ID NO: 817796 - DNA, 15 bp, Homo sapiens
ccccacaacaattca

SEQ ID NO: 817797 - DNA, 15 bp, Homo sapiens
tccccacaacaattc

SEQ ID NO: 817798 - DNA, 15 bp, Homo sapiens
atccccacaacaatt

SEQ ID NO: 817799 - DNA, 15 bp, Homo sapiens
gatccccacaacaat

SEQ ID NO: 817800 - DNA, 15 bp, Homo sapiens
tgatccccacaacaa

SEQ ID NO: 817801 - DNA, 15 bp, Homo sapiens
ctgatccccacaaca

SEQ ID NO: 817802 - DNA, 15 bp, Homo sapiens
tctgatccccacaac

SEQ ID NO: 817803 - DNA, 15 bp, Homo sapiens
atctgatccccacaa

SEQ ID NO: 817804 - DNA, 15 bp, Homo sapiens
catctgatccccaca

SEQ ID NO: 817805 - DNA, 15 bp, Homo sapiens
tcatctgatccccac

SEQ ID NO: 817806 - DNA, 15 bp, Homo sapiens
ttcatctgatcccca

SEQ ID NO: 817807 - DNA, 15 bp, Homo sapiens
tttcatctgatcccc

SEQ ID NO: 817808 - DNA, 15 bp, Homo sapiens
atttcatctgatccc

SEQ ID NO: 817809 - DNA, 15 bp, Homo sapiens
tatttcatctgatcc

SEQ ID NO: 817810 - DNA, 15 bp, Homo sapiens
ttatttcatctgatc

SEQ ID NO: 817811 - DNA, 15 bp, Homo sapiens
attatttcatctgat

SEQ ID NO: 817812 - DNA, 15 bp, Homo sapiens
cattatttcatctga

SEQ ID NO: 817813 - DNA, 15 bp, Homo sapiens
acattatttcatctg

SEQ ID NO: 817814 - DNA, 15 bp, Homo sapiens
tacattatttcatct

SEQ ID NO: 817815 - DNA, 15 bp, Homo sapiens
atacattatttcatc

SEQ ID NO: 817816 - DNA, 15 bp, Homo sapiens
catacattatttcat

SEQ ID NO: 817817 - DNA, 15 bp, Homo sapiens
acatacattatttca

SEQ ID NO: 817818 - DNA, 15 bp, Homo sapiens
cacatacattatttc

SEQ ID NO: 817819 - DNA, 15 bp, Homo sapiens
tcacatacattattt

SEQ ID NO: 817820 - DNA, 15 bp, Homo sapiens
ttcacatacattatt

SEQ ID NO: 817821 - DNA, 15 bp, Homo sapiens
tttcacatacattat

SEQ ID NO: 817822 - DNA, 15 bp, Homo sapiens
atttcacatacatta

SEQ ID NO: 817823 - DNA, 15 bp, Homo sapiens
tatttcacatacatt

SEQ ID NO: 817824 - DNA, 15 bp, Homo sapiens
atatttcacatacat

SEQ ID NO: 817825 - DNA, 15 bp, Homo sapiens
aatatttcacataca

SEQ ID NO: 817826 - DNA, 15 bp, Homo sapiens
aaatatttcacatac

SEQ ID NO: 817827 - DNA, 15 bp, Homo sapiens
taaatatttcacata

SEQ ID NO: 817828 - DNA, 15 bp, Homo sapiens
ctaaatatttcacat

SEQ ID NO: 817829 - DNA, 15 bp, Homo sapiens
tctaaatatttcaca

SEQ ID NO: 817830 - DNA, 15 bp, Homo sapiens
ttctaaatatttcac

SEQ ID NO: 817831 - DNA, 15 bp, Homo sapiens
attctaaatatttca

SEQ ID NO: 817832 - DNA, 15 bp, Homo sapiens
aattctaaatatttc

SEQ ID NO: 817833 - DNA, 15 bp, Homo sapiens
taattctaaatattt

SEQ ID NO: 817834 - DNA, 15 bp, Homo sapiens
ataattctaaatatt

SEQ ID NO: 817835 - DNA, 15 bp, Homo sapiens
cataattctaaatat

SEQ ID NO: 817836 - DNA, 15 bp, Homo sapiens
gcataattctaaata

SEQ ID NO: 817837 - DNA, 15 bp, Homo sapiens
tgcataattctaaat

SEQ ID NO: 817838 - DNA, 15 bp, Homo sapiens
ttgcataattctaaa

SEQ ID NO: 817839 - DNA, 15 bp, Homo sapiens
cttgcataattctaa

SEQ ID NO: 817840 - DNA, 15 bp, Homo sapiens
acttgcataattcta

SEQ ID NO: 817841 - DNA, 15 bp, Homo sapiens
gacttgcataattct

SEQ ID NO: 817842 - DNA, 15 bp, Homo sapiens
agacttgcataattc

SEQ ID NO: 817843 - DNA, 15 bp, Homo sapiens
cagacttgcataatt

SEQ ID NO: 817844 - DNA, 15 bp, Homo sapiens
acagacttgcataat

SEQ ID NO: 817845 - DNA, 15 bp, Homo sapiens
cacagacttgcataa

SEQ ID NO: 817846 - DNA, 15 bp, Homo sapiens
ccacagacttgcata

SEQ ID NO: 817847 - DNA, 15 bp, Homo sapiens
accacagacttgcat

SEQ ID NO: 817848 - DNA, 15 bp, Homo sapiens
taccacagacttgca

SEQ ID NO: 817849 - DNA, 15 bp, Homo sapiens
ttaccacagacttgc

SEQ ID NO: 817850 - DNA, 15 bp, Homo sapiens
attaccacagacttg

SEQ ID NO: 817851 - DNA, 15 bp, Homo sapiens
cattaccacagactt

SEQ ID NO: 817852 - DNA, 15 bp, Homo sapiens
tcattaccacagact

SEQ ID NO: 817853 - DNA, 15 bp, Homo sapiens
ttcattaccacagac

SEQ ID NO: 817854 - DNA, 15 bp, Homo sapiens
attcattaccacaga

SEQ ID NO: 817855 - DNA, 15 bp, Homo sapiens
tattcattaccacag

SEQ ID NO: 817856 - DNA, 15 bp, Homo sapiens
gtattcattaccaca

SEQ ID NO: 817857 - DNA, 15 bp, Homo sapiens
agtattcattaccac

SEQ ID NO: 817858 - DNA, 15 bp, Homo sapiens
tagtattcattacca

SEQ ID NO: 817859 - DNA, 15 bp, Homo sapiens
ttagtattcattacc

SEQ ID NO: 817860 - DNA, 15 bp, Homo sapiens
attagtattcattac

SEQ ID NO: 817861 - DNA, 15 bp, Homo sapiens
cattagtattcatta

SEQ ID NO: 817862 - DNA, 15 bp, Homo sapiens
acattagtattcatt

SEQ ID NO: 817863 - DNA, 15 bp, Homo sapiens
aacattagtattcat

SEQ ID NO: 817864 - DNA, 15 bp, Homo sapiens
taacattagtattca

SEQ ID NO: 817865 - DNA, 15 bp, Homo sapiens
ctaacattagtattc

SEQ ID NO: 817866 - DNA, 15 bp, Homo sapiens
gctaacattagtatt

SEQ ID NO: 817867 - DNA, 15 bp, Homo sapiens
agctaacattagtat

SEQ ID NO: 817868 - DNA, 15 bp, Homo sapiens
tagctaacattagta

SEQ ID NO: 817869 - DNA, 15 bp, Homo sapiens
atagctaacattagt

SEQ ID NO: 817870 - DNA, 15 bp, Homo sapiens
gatagctaacattag

SEQ ID NO: 817871 - DNA, 15 bp, Homo sapiens
tgatagctaacatta

SEQ ID NO: 817872 - DNA, 15 bp, Homo sapiens
atgatagctaacatt

SEQ ID NO: 817873 - DNA, 15 bp, Homo sapiens
aatgatagctaacat

SEQ ID NO: 817874 - DNA, 15 bp, Homo sapiens
taatgatagctaaca

SEQ ID NO: 817875 - DNA, 15 bp, Homo sapiens
ataatgatagctaac

SEQ ID NO: 817876 - DNA, 15 bp, Homo sapiens
aataatgatagctaa

SEQ ID NO: 817877 - DNA, 15 bp, Homo sapiens
caataatgatagcta

SEQ ID NO: 817878 - DNA, 15 bp, Homo sapiens
acaataatgatagct

SEQ ID NO: 817879 - DNA, 15 bp, Homo sapiens
aacaataatgatagc

SEQ ID NO: 817880 - DNA, 15 bp, Homo sapiens
taacaataatgatag

SEQ ID NO: 817881 - DNA, 15 bp, Homo sapiens
ataacaataatgata

SEQ ID NO: 817882 - DNA, 15 bp, Homo sapiens
tataacaataatgat

SEQ ID NO: 817883 - DNA, 15 bp, Homo sapiens
ttataacaataatga

SEQ ID NO: 817884 - DNA, 15 bp, Homo sapiens
attataacaataatg

SEQ ID NO: 817885 - DNA, 15 bp, Homo sapiens
gattataacaataat

SEQ ID NO: 817886 - DNA, 15 bp, Homo sapiens
ggattataacaataa

SEQ ID NO: 817887 - DNA, 15 bp, Homo sapiens
gggattataacaata

SEQ ID NO: 817888 - DNA, 15 bp, Homo sapiens
tgggattataacaat

SEQ ID NO: 817889 - DNA, 15 bp, Homo sapiens
ttgggattataacaa

SEQ ID NO: 817890 - DNA, 15 bp, Homo sapiens
attgggattataaca

SEQ ID NO: 817891 - DNA, 15 bp, Homo sapiens
tattgggattataac

SEQ ID NO: 817892 - DNA, 15 bp, Homo sapiens
ttattgggattataa

SEQ ID NO: 817893 - DNA, 15 bp, Homo sapiens
attattgggattata

SEQ ID NO: 817894 - DNA, 15 bp, Homo sapiens
tattattgggattat

SEQ ID NO: 817895 - DNA, 15 bp, Homo sapiens
ttattattgggatta

SEQ ID NO: 817896 - DNA, 15 bp, Homo sapiens
tttattattgggatt

SEQ ID NO: 817897 - DNA, 15 bp, Homo sapiens
atttattattgggat

SEQ ID NO: 817898 - DNA, 15 bp, Homo sapiens
aatttattattggga

SEQ ID NO: 817899 - DNA, 15 bp, Homo sapiens
gaatttattattggg

SEQ ID NO: 817900 - DNA, 15 bp, Homo sapiens
agaatttattattgg

SEQ ID NO: 817901 - DNA, 15 bp, Homo sapiens
cagaatttattattg

SEQ ID NO: 817902 - DNA, 15 bp, Homo sapiens
ccagaatttattatt

SEQ ID NO: 817903 - DNA, 15 bp, Homo sapiens
accagaatttattat

SEQ ID NO: 817904 - DNA, 15 bp, Homo sapiens
caccagaatttatta

SEQ ID NO: 817905 - DNA, 15 bp, Homo sapiens
gcaccagaatttatt

SEQ ID NO: 817906 - DNA, 15 bp, Homo sapiens
agcaccagaatttat

SEQ ID NO: 817907 - DNA, 15 bp, Homo sapiens
aagcaccagaattta

SEQ ID NO: 817908 - DNA, 15 bp, Homo sapiens
aaagcaccagaattt

SEQ ID NO: 817909 - DNA, 15 bp, Homo sapiens
caaagcaccagaatt

SEQ ID NO: 817910 - DNA, 15 bp, Homo sapiens
tcaaagcaccagaat

SEQ ID NO: 817911 - DNA, 15 bp, Homo sapiens
ttcaaagcaccagaa

SEQ ID NO: 817912 - DNA, 15 bp, Homo sapiens
tttcaaagcaccaga

SEQ ID NO: 817913 - DNA, 15 bp, Homo sapiens
ttttcaaagcaccag

SEQ ID NO: 817914 - DNA, 15 bp, Homo sapiens
attttcaaagcacca

SEQ ID NO: 817915 - DNA, 15 bp, Homo sapiens
aattttcaaagcacc

SEQ ID NO: 817916 - DNA, 15 bp, Homo sapiens
taattttcaaagcac

SEQ ID NO: 817917 - DNA, 15 bp, Homo sapiens
ttaattttcaaagca

SEQ ID NO: 817918 - DNA, 15 bp, Homo sapiens
tttaattttcaaagc

SEQ ID NO: 817919 - DNA, 15 bp, Homo sapiens
gtttaattttcaaag

SEQ ID NO: 817920 - DNA, 15 bp, Homo sapiens
ggtttaattttcaaa

SEQ ID NO: 817921 - DNA, 15 bp, Homo sapiens
tggtttaattttcaa

SEQ ID NO: 817922 - DNA, 15 bp, Homo sapiens
ttggtttaattttca

SEQ ID NO: 817923 - DNA, 15 bp, Homo sapiens
tttggtttaattttc

SEQ ID NO: 817924 - DNA, 15 bp, Homo sapiens
ctttggtttaatttt

SEQ ID NO: 817925 - DNA, 15 bp, Homo sapiens
gctttggtttaattt

SEQ ID NO: 817926 - DNA, 15 bp, Homo sapiens
ggctttggtttaatt

SEQ ID NO: 817927 - DNA, 15 bp, Homo sapiens
tggctttggtttaat

SEQ ID NO: 817928 - DNA, 15 bp, Homo sapiens
ttggctttggtttaa

SEQ ID NO: 817929 - DNA, 15 bp, Homo sapiens
cttggctttggttta

SEQ ID NO: 817930 - DNA, 15 bp, Homo sapiens
gcttggctttggttt

SEQ ID NO: 817931 - DNA, 15 bp, Homo sapiens
tgcttggctttggtt

SEQ ID NO: 817932 - DNA, 15 bp, Homo sapiens
ctgcttggctttggt

SEQ ID NO: 817933 - DNA, 15 bp, Homo sapiens
actgcttggctttgg

SEQ ID NO: 817934 - DNA, 15 bp, Homo sapiens
aactgcttggctttg

SEQ ID NO: 817935 - DNA, 15 bp, Homo sapiens
caactgcttggcttt

SEQ ID NO: 817936 - DNA, 15 bp, Homo sapiens
tcaactgcttggctt

SEQ ID NO: 817937 - DNA, 15 bp, Homo sapiens
atcaactgcttggct

SEQ ID NO: 817938 - DNA, 15 bp, Homo sapiens
tatcaactgcttggc

SEQ ID NO: 817939 - DNA, 15 bp, Homo sapiens
atatcaactgcttgg

SEQ ID NO: 817940 - DNA, 15 bp, Homo sapiens
catatcaactgcttg

SEQ ID NO: 817941 - DNA, 15 bp, Homo sapiens
tcatatcaactgctt

SEQ ID NO: 817942 - DNA, 15 bp, Homo sapiens
ttcatatcaactgct

SEQ ID NO: 817943 - DNA, 15 bp, Homo sapiens
cttcatatcaactgc

SEQ ID NO: 817944 - DNA, 15 bp, Homo sapiens
tcttcatatcaactg

SEQ ID NO: 817945 - DNA, 15 bp, Homo sapiens
ttcttcatatcaact

SEQ ID NO: 817946 - DNA, 15 bp, Homo sapiens
cttcttcatatcaac

SEQ ID NO: 817947 - DNA, 15 bp, Homo sapiens
gcttcttcatatcaa

SEQ ID NO: 817948 - DNA, 15 bp, Homo sapiens
tgcttcttcatatca

SEQ ID NO: 817949 - DNA, 15 bp, Homo sapiens
atgcttcttcatatc

SEQ ID NO: 817950 - DNA, 15 bp, Homo sapiens
catgcttcttcatat

SEQ ID NO: 817951 - DNA, 15 bp, Homo sapiens
acatgcttcttcata

SEQ ID NO: 817952 - DNA, 15 bp, Homo sapiens
tacatgcttcttcat

SEQ ID NO: 817953 - DNA, 15 bp, Homo sapiens
ttacatgcttcttca

SEQ ID NO: 817954 - DNA, 15 bp, Homo sapiens
attacatgcttcttc

SEQ ID NO: 817955 - DNA, 15 bp, Homo sapiens
tattacatgcttctt

SEQ ID NO: 817956 - DNA, 15 bp, Homo sapiens
ttattacatgcttct

SEQ ID NO: 817957 - DNA, 15 bp, Homo sapiens
attattacatgcttc

SEQ ID NO: 817958 - DNA, 15 bp, Homo sapiens
cattattacatgctt

SEQ ID NO: 817959 - DNA, 15 bp, Homo sapiens
acattattacatgct

SEQ ID NO: 817960 - DNA, 15 bp, Homo sapiens
tacattattacatgc

SEQ ID NO: 817961 - DNA, 15 bp, Homo sapiens
gtacattattacatg

SEQ ID NO: 817962 - DNA, 15 bp, Homo sapiens
tgtacattattacat

SEQ ID NO: 817963 - DNA, 15 bp, Homo sapiens
ctgtacattattaca

SEQ ID NO: 817964 - DNA, 15 bp, Homo sapiens
tctgtacattattac

SEQ ID NO: 817965 - DNA, 15 bp, Homo sapiens
gtctgtacattatta

SEQ ID NO: 817966 - DNA, 15 bp, Homo sapiens
tgtctgtacattatt

SEQ ID NO: 817967 - DNA, 15 bp, Homo sapiens
atgtctgtacattat

SEQ ID NO: 817968 - DNA, 15 bp, Homo sapiens
tatgtctgtacatta

SEQ ID NO: 817969 - DNA, 15 bp, Homo sapiens
ttatgtctgtacatt

SEQ ID NO: 817970 - DNA, 15 bp, Homo sapiens
attatgtctgtacat

SEQ ID NO: 817971 - DNA, 15 bp, Homo sapiens
cattatgtctgtaca

SEQ ID NO: 817972 - DNA, 15 bp, Homo sapiens
gcattatgtctgtac

SEQ ID NO: 817973 - DNA, 15 bp, Homo sapiens
agcattatgtctgta

SEQ ID NO: 817974 - DNA, 15 bp, Homo sapiens
aagcattatgtctgt

SEQ ID NO: 817975 - DNA, 15 bp, Homo sapiens
aaagcattatgtctg

SEQ ID NO: 817976 - DNA, 15 bp, Homo sapiens
taaagcattatgtct

SEQ ID NO: 817977 - DNA, 15 bp, Homo sapiens
ataaagcattatgtc

SEQ ID NO: 817978 - DNA, 15 bp, Homo sapiens
tataaagcattatgt

SEQ ID NO: 817979 - DNA, 15 bp, Homo sapiens
ctataaagcattatg

SEQ ID NO: 817980 - DNA, 15 bp, Homo sapiens
tctataaagcattat

SEQ ID NO: 817981 - DNA, 15 bp, Homo sapiens
gtctataaagcatta

SEQ ID NO: 817982 - DNA, 15 bp, Homo sapiens
tgtctataaagcatt

SEQ ID NO: 817983 - DNA, 15 bp, Homo sapiens
ttgtctataaagcat

SEQ ID NO: 817984 - DNA, 15 bp, Homo sapiens
gttgtctataaagca

SEQ ID NO: 817985 - DNA, 15 bp, Homo sapiens
tgttgtctataaagc

SEQ ID NO: 817986 - DNA, 15 bp, Homo sapiens
atgttgtctataaag

SEQ ID NO: 817987 - DNA, 15 bp, Homo sapiens
aatgttgtctataaa

SEQ ID NO: 817988 - DNA, 15 bp, Homo sapiens
caatgttgtctataa

SEQ ID NO: 817989 - DNA, 15 bp, Homo sapiens
tcaatgttgtctata

SEQ ID NO: 817990 - DNA, 15 bp, Homo sapiens
ttcaatgttgtctat

SEQ ID NO: 817991 - DNA, 15 bp, Homo sapiens
attcaatgttgtcta

SEQ ID NO: 817992 - DNA, 15 bp, Homo sapiens
aattcaatgttgtct

SEQ ID NO: 817993 - DNA, 15 bp, Homo sapiens
aaattcaatgttgtc

SEQ ID NO: 817994 - DNA, 15 bp, Homo sapiens
caaattcaatgttgt

SEQ ID NO: 817995 - DNA, 15 bp, Homo sapiens
ccaaattcaatgttg

SEQ ID NO: 817996 - DNA, 15 bp, Homo sapiens
gccaaattcaatgtt

SEQ ID NO: 817997 - DNA, 15 bp, Homo sapiens
agccaaattcaatgt

SEQ ID NO: 817998 - DNA, 15 bp, Homo sapiens
gagccaaattcaatg

SEQ ID NO: 817999 - DNA, 15 bp, Homo sapiens
agagccaaattcaat

SEQ ID NO: 818000 - DNA, 15 bp, Homo sapiens
gagagccaaattcaa

SEQ ID NO: 818001 - DNA, 15 bp, Homo sapiens
tgagagccaaattca

SEQ ID NO: 818002 - DNA, 15 bp, Homo sapiens
atgagagccaaattc

SEQ ID NO: 818003 - DNA, 15 bp, Homo sapiens
catgagagccaaatt

SEQ ID NO: 818004 - DNA, 15 bp, Homo sapiens
tcatgagagccaaat

SEQ ID NO: 818005 - DNA, 15 bp, Homo sapiens
ttcatgagagccaaa

SEQ ID NO: 818006 - DNA, 15 bp, Homo sapiens
gttcatgagagccaa

SEQ ID NO: 818007 - DNA, 15 bp, Homo sapiens
tgttcatgagagcca

SEQ ID NO: 818008 - DNA, 15 bp, Homo sapiens
atgttcatgagagcc

SEQ ID NO: 818009 - DNA, 15 bp, Homo sapiens
gatgttcatgagagc

SEQ ID NO: 818010 - DNA, 15 bp, Homo sapiens
tgatgttcatgagag

SEQ ID NO: 818011 - DNA, 15 bp, Homo sapiens
ctgatgttcatgaga

SEQ ID NO: 818012 - DNA, 15 bp, Homo sapiens
cctgatgttcatgag

SEQ ID NO: 818013 - DNA, 15 bp, Homo sapiens
tcctgatgttcatga

SEQ ID NO: 818014 - DNA, 15 bp, Homo sapiens
ttcctgatgttcatg

SEQ ID NO: 818015 - DNA, 15 bp, Homo sapiens
attcctgatgttcat

SEQ ID NO: 818016 - DNA, 15 bp, Homo sapiens
tattcctgatgttca

SEQ ID NO: 818017 - DNA, 15 bp, Homo sapiens
ctattcctgatgttc

SEQ ID NO: 818018 - DNA, 15 bp, Homo sapiens
actattcctgatgtt

SEQ ID NO: 818019 - DNA, 15 bp, Homo sapiens
cactattcctgatgt

SEQ ID NO: 818020 - DNA, 15 bp, Homo sapiens
ccactattcctgatg

SEQ ID NO: 818021 - DNA, 15 bp, Homo sapiens
accactattcctgat

SEQ ID NO: 818022 - DNA, 15 bp, Homo sapiens
gaccactattcctga

SEQ ID NO: 818023 - DNA, 15 bp, Homo sapiens
tgaccactattcctg

SEQ ID NO: 818024 - DNA, 15 bp, Homo sapiens
atgaccactattcct

SEQ ID NO: 818025 - DNA, 15 bp, Homo sapiens
catgaccactattcc

SEQ ID NO: 818026 - DNA, 15 bp, Homo sapiens
ccatgaccactattc

SEQ ID NO: 818027 - DNA, 15 bp, Homo sapiens
accatgaccactatt

SEQ ID NO: 818028 - DNA, 15 bp, Homo sapiens
taccatgaccactat

SEQ ID NO: 818029 - DNA, 15 bp, Homo sapiens
ctaccatgaccacta

SEQ ID NO: 818030 - DNA, 15 bp, Homo sapiens
actaccatgaccact

SEQ ID NO: 818031 - DNA, 15 bp, Homo sapiens
aactaccatgaccac

SEQ ID NO: 818032 - DNA, 15 bp, Homo sapiens
taactaccatgacca

SEQ ID NO: 818033 - DNA, 15 bp, Homo sapiens
ataactaccatgacc

SEQ ID NO: 818034 - DNA, 15 bp, Homo sapiens
aataactaccatgac

SEQ ID NO: 818035 - DNA, 15 bp, Homo sapiens
taataactaccatga

SEQ ID NO: 818036 - DNA, 15 bp, Homo sapiens
ataataactaccatg

SEQ ID NO: 818037 - DNA, 15 bp, Homo sapiens
gataataactaccat

SEQ ID NO: 818038 - DNA, 15 bp, Homo sapiens
agataataactacca

SEQ ID NO: 818039 - DNA, 15 bp, Homo sapiens
gagataataactacc

SEQ ID NO: 818040 - DNA, 15 bp, Homo sapiens
ggagataataactac

SEQ ID NO: 818041 - DNA, 15 bp, Homo sapiens
tggagataataacta

SEQ ID NO: 818042 - DNA, 15 bp, Homo sapiens
ctggagataataact

SEQ ID NO: 818043 - DNA, 15 bp, Homo sapiens
gctggagataataac

SEQ ID NO: 818044 - DNA, 15 bp, Homo sapiens
tgctggagataataa

SEQ ID NO: 818045 - DNA, 15 bp, Homo sapiens
ctgctggagataata

SEQ ID NO: 818046 - DNA, 15 bp, Homo sapiens
cctgctggagataat

SEQ ID NO: 818047 - DNA, 15 bp, Homo sapiens
tcctgctggagataa

SEQ ID NO: 818048 - DNA, 15 bp, Homo sapiens
ttcctgctggagata

SEQ ID NO: 818049 - DNA, 15 bp, Homo sapiens
gttcctgctggagat

SEQ ID NO: 818050 - DNA, 15 bp, Homo sapiens
agttcctgctggaga

SEQ ID NO: 818051 - DNA, 15 bp, Homo sapiens
cagttcctgctggag

SEQ ID NO: 818052 - DNA, 15 bp, Homo sapiens
acagttcctgctgga

SEQ ID NO: 818053 - DNA, 15 bp, Homo sapiens
tacagttcctgctgg

SEQ ID NO: 818054 - DNA, 15 bp, Homo sapiens
ctacagttcctgctg

SEQ ID NO: 818055 - DNA, 15 bp, Homo sapiens
gctacagttcctgct

SEQ ID NO: 818056 - DNA, 15 bp, Homo sapiens
agctacagttcctgc

SEQ ID NO: 818057 - DNA, 15 bp, Homo sapiens
cagctacagttcctg

SEQ ID NO: 818058 - DNA, 15 bp, Homo sapiens
tcagctacagttcct

SEQ ID NO: 818059 - DNA, 15 bp, Homo sapiens
ctcagctacagttcc

SEQ ID NO: 818060 - DNA, 15 bp, Homo sapiens
tctcagctacagttc

SEQ ID NO: 818061 - DNA, 15 bp, Homo sapiens
ctctcagctacagtt

SEQ ID NO: 818062 - DNA, 15 bp, Homo sapiens
tctctcagctacagt

SEQ ID NO: 818063 - DNA, 15 bp, Homo sapiens
atctctcagctacag

SEQ ID NO: 818064 - DNA, 15 bp, Homo sapiens
gatctctcagctaca

SEQ ID NO: 818065 - DNA, 15 bp, Homo sapiens
agatctctcagctac

SEQ ID NO: 818066 - DNA, 15 bp, Homo sapiens
aagatctctcagcta

SEQ ID NO: 818067 - DNA, 15 bp, Homo sapiens
gaagatctctcagct

SEQ ID NO: 818068 - DNA, 15 bp, Homo sapiens
tgaagatctctcagc

SEQ ID NO: 818069 - DNA, 15 bp, Homo sapiens
ctgaagatctctcag

SEQ ID NO: 818070 - DNA, 15 bp, Homo sapiens
tctgaagatctctca

SEQ ID NO: 818071 - DNA, 15 bp, Homo sapiens
ctctgaagatctctc

SEQ ID NO: 818072 - DNA, 15 bp, Homo sapiens
gctctgaagatctct

SEQ ID NO: 818073 - DNA, 15 bp, Homo sapiens
agctctgaagatctc

SEQ ID NO: 818074 - DNA, 15 bp, Homo sapiens
aagctctgaagatct

SEQ ID NO: 818075 - DNA, 15 bp, Homo sapiens
aaagctctgaagatc

SEQ ID NO: 818076 - DNA, 15 bp, Homo sapiens
aaaagctctgaagat

SEQ ID NO: 818077 - DNA, 15 bp, Homo sapiens
aaaaagctctgaaga

SEQ ID NO: 818078 - DNA, 15 bp, Homo sapiens
gaaaaagctctgaag

SEQ ID NO: 818079 - DNA, 15 bp, Homo sapiens
ggaaaaagctctgaa

SEQ ID NO: 818080 - DNA, 15 bp, Homo sapiens
tggaaaaagctctga

SEQ ID NO: 818081 - DNA, 15 bp, Homo sapiens
ttggaaaaagctctg

SEQ ID NO: 818082 - DNA, 15 bp, Homo sapiens
cttggaaaaagctct

SEQ ID NO: 818083 - DNA, 15 bp, Homo sapiens
ccttggaaaaagctc

SEQ ID NO: 818084 - DNA, 15 bp, Homo sapiens
gccttggaaaaagct

SEQ ID NO: 818085 - DNA, 15 bp, Homo sapiens
cgccttggaaaaagc

SEQ ID NO: 818086 - DNA, 15 bp, Homo sapiens
tcgccttggaaaaag

SEQ ID NO: 818087 - DNA, 15 bp, Homo sapiens
atcgccttggaaaaa

SEQ ID NO: 818088 - DNA, 15 bp, Homo sapiens
tatcgccttggaaaa

SEQ ID NO: 818089 - DNA, 15 bp, Homo sapiens
atatcgccttggaaa

SEQ ID NO: 818090 - DNA, 15 bp, Homo sapiens
gatatcgccttggaa

SEQ ID NO: 818091 - DNA, 15 bp, Homo sapiens
tgatatcgccttgga

SEQ ID NO: 818092 - DNA, 15 bp, Homo sapiens
gtgatatcgccttgg

SEQ ID NO: 818093 - DNA, 15 bp, Homo sapiens
agtgatatcgccttg

SEQ ID NO: 818094 - DNA, 15 bp, Homo sapiens
cagtgatatcgcctt

SEQ ID NO: 818095 - DNA, 15 bp, Homo sapiens
ccagtgatatcgcct

SEQ ID NO: 818096 - DNA, 15 bp, Homo sapiens
cccagtgatatcgcc

SEQ ID NO: 818097 - DNA, 15 bp, Homo sapiens
tcccagtgatatcgc

SEQ ID NO: 818098 - DNA, 15 bp, Homo sapiens
ttcccagtgatatcg

SEQ ID NO: 818099 - DNA, 15 bp, Homo sapiens
tttcccagtgatatc

SEQ ID NO: 818100 - DNA, 15 bp, Homo sapiens
atttcccagtgatat

SEQ ID NO: 818101 - DNA, 15 bp, Homo sapiens
tatttcccagtgata

SEQ ID NO: 818102 - DNA, 15 bp, Homo sapiens
ttatttcccagtgat

SEQ ID NO: 818103 - DNA, 15 bp, Homo sapiens
attatttcccagtga

SEQ ID NO: 818104 - DNA, 15 bp, Homo sapiens
tattatttcccagtg

SEQ ID NO: 818105 - DNA, 15 bp, Homo sapiens
ctattatttcccagt

SEQ ID NO: 818106 - DNA, 15 bp, Homo sapiens
tctattatttcccag

SEQ ID NO: 818107 - DNA, 15 bp, Homo sapiens
ctctattatttccca

SEQ ID NO: 818108 - DNA, 15 bp, Homo sapiens
tctctattatttccc

SEQ ID NO: 818109 - DNA, 15 bp, Homo sapiens
gtctctattatttcc

SEQ ID NO: 818110 - DNA, 15 bp, Homo sapiens
tgtctctattatttc

SEQ ID NO: 818111 - DNA, 15 bp, Homo sapiens
ttgtctctattattt

SEQ ID NO: 818112 - DNA, 15 bp, Homo sapiens
cttgtctctattatt

SEQ ID NO: 818113 - DNA, 15 bp, Homo sapiens
ccttgtctctattat

SEQ ID NO: 818114 - DNA, 15 bp, Homo sapiens
accttgtctctatta

SEQ ID NO: 818115 - DNA, 15 bp, Homo sapiens
aaccttgtctctatt

SEQ ID NO: 818116 - DNA, 15 bp, Homo sapiens
taaccttgtctctat

SEQ ID NO: 818117 - DNA, 15 bp, Homo sapiens
gtaaccttgtctcta

SEQ ID NO: 818118 - DNA, 15 bp, Homo sapiens
tgtaaccttgtctct

SEQ ID NO: 818119 - DNA, 15 bp, Homo sapiens
ttgtaaccttgtctc

SEQ ID NO: 818120 - DNA, 15 bp, Homo sapiens
cttgtaaccttgtct

SEQ ID NO: 818121 - DNA, 15 bp, Homo sapiens
gcttgtaaccttgtc

SEQ ID NO: 818122 - DNA, 15 bp, Homo sapiens
agcttgtaaccttgt

SEQ ID NO: 818123 - DNA, 15 bp, Homo sapiens
tagcttgtaaccttg

SEQ ID NO: 818124 - DNA, 15 bp, Homo sapiens
ctagcttgtaacctt

SEQ ID NO: 818125 - DNA, 15 bp, Homo sapiens
cctagcttgtaacct

SEQ ID NO: 818126 - DNA, 15 bp, Homo sapiens
ccctagcttgtaacc

SEQ ID NO: 818127 - DNA, 15 bp, Homo sapiens
gccctagcttgtaac

SEQ ID NO: 818128 - DNA, 15 bp, Homo sapiens
agccctagcttgtaa

SEQ ID NO: 818129 - DNA, 15 bp, Homo sapiens
cagccctagcttgta

SEQ ID NO: 818130 - DNA, 15 bp, Homo sapiens
acagccctagcttgt

SEQ ID NO: 818131 - DNA, 15 bp, Homo sapiens
cacagccctagcttg

SEQ ID NO: 818132 - DNA, 15 bp, Homo sapiens
acacagccctagctt

SEQ ID NO: 818133 - DNA, 15 bp, Homo sapiens
aacacagccctagct

SEQ ID NO: 818134 - DNA, 15 bp, Homo sapiens
aaacacagccctagc

SEQ ID NO: 818135 - DNA, 15 bp, Homo sapiens
aaaacacagccctag

SEQ ID NO: 818136 - DNA, 15 bp, Homo sapiens
gaaaacacagcccta

SEQ ID NO: 818137 - DNA, 15 bp, Homo sapiens
agaaaacacagccct

SEQ ID NO: 818138 - DNA, 15 bp, Homo sapiens
aagaaaacacagccc

SEQ ID NO: 818139 - DNA, 15 bp, Homo sapiens
gaagaaaacacagcc

SEQ ID NO: 818140 - DNA, 15 bp, Homo sapiens
agaagaaaacacagc

SEQ ID NO: 818141 - DNA, 15 bp, Homo sapiens
aagaagaaaacacag

SEQ ID NO: 818142 - DNA, 15 bp, Homo sapiens
taagaagaaaacaca

SEQ ID NO: 818143 - DNA, 15 bp, Homo sapiens
ttaagaagaaaacac

SEQ ID NO: 818144 - DNA, 15 bp, Homo sapiens
tttaagaagaaaaca

SEQ ID NO: 818145 - DNA, 15 bp, Homo sapiens
ttttaagaagaaaac

SEQ ID NO: 818146 - DNA, 15 bp, Homo sapiens
attttaagaagaaaa

SEQ ID NO: 818147 - DNA, 15 bp, Homo sapiens
gattttaagaagaaa

SEQ ID NO: 818148 - DNA, 15 bp, Homo sapiens
agattttaagaagaa

SEQ ID NO: 818149 - DNA, 15 bp, Homo sapiens
aagattttaagaaga

SEQ ID NO: 818150 - DNA, 15 bp, Homo sapiens
aaagattttaagaag

SEQ ID NO: 818151 - DNA, 15 bp, Homo sapiens
taaagattttaagaa

SEQ ID NO: 818152 - DNA, 15 bp, Homo sapiens
ctaaagattttaaga

SEQ ID NO: 818153 - DNA, 15 bp, Homo sapiens
actaaagattttaag

SEQ ID NO: 818154 - DNA, 15 bp, Homo sapiens
aactaaagattttaa

SEQ ID NO: 818155 - DNA, 15 bp, Homo sapiens
gaactaaagatttta

SEQ ID NO: 818156 - DNA, 15 bp, Homo sapiens
tgaactaaagatttt

SEQ ID NO: 818157 - DNA, 15 bp, Homo sapiens
ctgaactaaagattt

SEQ ID NO: 818158 - DNA, 15 bp, Homo sapiens
actgaactaaagatt

SEQ ID NO: 818159 - DNA, 15 bp, Homo sapiens
aactgaactaaagat

SEQ ID NO: 818160 - DNA, 15 bp, Homo sapiens
aaactgaactaaaga

SEQ ID NO: 818161 - DNA, 15 bp, Homo sapiens
aaaactgaactaaag

SEQ ID NO: 818162 - DNA, 15 bp, Homo sapiens
aaaaactgaactaaa

SEQ ID NO: 818163 - DNA, 15 bp, Homo sapiens
aaaaaactgaactaa

SEQ ID NO: 818164 - DNA, 15 bp, Homo sapiens
aaaaaaactgaacta

SEQ ID NO: 818165 - DNA, 15 bp, Homo sapiens
gaaaaaaactgaact

SEQ ID NO: 818166 - DNA, 15 bp, Homo sapiens
tgaaaaaaactgaac

SEQ ID NO: 818167 - DNA, 15 bp, Homo sapiens
ttgaaaaaaactgaa

SEQ ID NO: 818168 - DNA, 15 bp, Homo sapiens
attgaaaaaaactga

SEQ ID NO: 818169 - DNA, 15 bp, Homo sapiens
tattgaaaaaaactg

SEQ ID NO: 818170 - DNA, 15 bp, Homo sapiens
ttattgaaaaaaact

SEQ ID NO: 818171 - DNA, 15 bp, Homo sapiens
gttattgaaaaaaac

SEQ ID NO: 818172 - DNA, 15 bp, Homo sapiens
tgttattgaaaaaaa

SEQ ID NO: 818173 - DNA, 15 bp, Homo sapiens
ctgttattgaaaaaa

SEQ ID NO: 818174 - DNA, 15 bp, Homo sapiens
tctgttattgaaaaa

SEQ ID NO: 818175 - DNA, 15 bp, Homo sapiens
atctgttattgaaaa

SEQ ID NO: 818176 - DNA, 15 bp, Homo sapiens
aatctgttattgaaa

SEQ ID NO: 818177 - DNA, 15 bp, Homo sapiens
aaatctgttattgaa

SEQ ID NO: 818178 - DNA, 15 bp, Homo sapiens
caaatctgttattga

SEQ ID NO: 818179 - DNA, 15 bp, Homo sapiens
acaaatctgttattg

SEQ ID NO: 818180 - DNA, 15 bp, Homo sapiens
tacaaatctgttatt

SEQ ID NO: 818181 - DNA, 15 bp, Homo sapiens
ctacaaatctgttat

SEQ ID NO: 818182 - DNA, 15 bp, Homo sapiens
actacaaatctgtta

SEQ ID NO: 818183 - DNA, 15 bp, Homo sapiens
tactacaaatctgtt

SEQ ID NO: 818184 - DNA, 15 bp, Homo sapiens
ctactacaaatctgt

SEQ ID NO: 818185 - DNA, 15 bp, Homo sapiens
cctactacaaatctg

SEQ ID NO: 818186 - DNA, 15 bp, Homo sapiens
gcctactacaaatct

SEQ ID NO: 818187 - DNA, 15 bp, Homo sapiens
tgcctactacaaatc

SEQ ID NO: 818188 - DNA, 15 bp, Homo sapiens
atgcctactacaaat

SEQ ID NO: 818189 - DNA, 15 bp, Homo sapiens
gatgcctactacaaa

SEQ ID NO: 818190 - DNA, 15 bp, Homo sapiens
tgatgcctactacaa

SEQ ID NO: 818191 - DNA, 15 bp, Homo sapiens
ctgatgcctactaca

SEQ ID NO: 818192 - DNA, 15 bp, Homo sapiens
cctgatgcctactac

SEQ ID NO: 818193 - DNA, 15 bp, Homo sapiens
acctgatgcctacta

SEQ ID NO: 818194 - DNA, 15 bp, Homo sapiens
cacctgatgcctact

SEQ ID NO: 818195 - DNA, 15 bp, Homo sapiens
tcacctgatgcctac

SEQ ID NO: 818196 - DNA, 15 bp, Homo sapiens
gtcacctgatgccta

SEQ ID NO: 818197 - DNA, 15 bp, Homo sapiens
agtcacctgatgcct

SEQ ID NO: 818198 - DNA, 15 bp, Homo sapiens
cagtcacctgatgcc

SEQ ID NO: 818199 - DNA, 15 bp, Homo sapiens
ccagtcacctgatgc

SEQ ID NO: 818200 - DNA, 15 bp, Homo sapiens
cccagtcacctgatg

SEQ ID NO: 818201 - DNA, 15 bp, Homo sapiens
ccccagtcacctgat

SEQ ID NO: 818202 - DNA, 15 bp, Homo sapiens
tccccagtcacctga

SEQ ID NO: 818203 - DNA, 15 bp, Homo sapiens
atccccagtcacctg

SEQ ID NO: 818204 - DNA, 15 bp, Homo sapiens
aatccccagtcacct

SEQ ID NO: 818205 - DNA, 15 bp, Homo sapiens
gaatccccagtcacc

SEQ ID NO: 818206 - DNA, 15 bp, Homo sapiens
cgaatccccagtcac

SEQ ID NO: 818207 - DNA, 15 bp, Homo sapiens
acgaatccccagtca

SEQ ID NO: 818208 - DNA, 15 bp, Homo sapiens
tacgaatccccagtc

SEQ ID NO: 818209 - DNA, 15 bp, Homo sapiens
atacgaatccccagt

SEQ ID NO: 818210 - DNA, 15 bp, Homo sapiens
aatacgaatccccag

SEQ ID NO: 818211 - DNA, 15 bp, Homo sapiens
gaatacgaatcccca

SEQ ID NO: 818212 - DNA, 15 bp, Homo sapiens
agaatacgaatcccc

SEQ ID NO: 818213 - DNA, 15 bp, Homo sapiens
aagaatacgaatccc

SEQ ID NO: 818214 - DNA, 15 bp, Homo sapiens
gaagaatacgaatcc

SEQ ID NO: 818215 - DNA, 15 bp, Homo sapiens
tgaagaatacgaatc

SEQ ID NO: 818216 - DNA, 15 bp, Homo sapiens
ttgaagaatacgaat

SEQ ID NO: 818217 - DNA, 15 bp, Homo sapiens
cttgaagaatacgaa

SEQ ID NO: 818218 - DNA, 15 bp, Homo sapiens
acttgaagaatacga

SEQ ID NO: 818219 - DNA, 15 bp, Homo sapiens
aacttgaagaatacg

SEQ ID NO: 818220 - DNA, 15 bp, Homo sapiens
caacttgaagaatac

SEQ ID NO: 818221 - DNA, 15 bp, Homo sapiens
tcaacttgaagaata

SEQ ID NO: 818222 - DNA, 15 bp, Homo sapiens
ttcaacttgaagaat

SEQ ID NO: 818223 - DNA, 15 bp, Homo sapiens
tttcaacttgaagaa

SEQ ID NO: 818224 - DNA, 15 bp, Homo sapiens
atttcaacttgaaga

SEQ ID NO: 818225 - DNA, 15 bp, Homo sapiens
tatttcaacttgaag

SEQ ID NO: 818226 - DNA, 15 bp, Homo sapiens
atatttcaacttgaa

SEQ ID NO: 818227 - DNA, 15 bp, Homo sapiens
aatatttcaacttga

SEQ ID NO: 818228 - DNA, 15 bp, Homo sapiens
taatatttcaacttg

SEQ ID NO: 818229 - DNA, 15 bp, Homo sapiens
gtaatatttcaactt

SEQ ID NO: 818230 - DNA, 15 bp, Homo sapiens
ggtaatatttcaact

SEQ ID NO: 818231 - DNA, 15 bp, Homo sapiens
aggtaatatttcaac

SEQ ID NO: 818232 - DNA, 15 bp, Homo sapiens
aaggtaatatttcaa

SEQ ID NO: 818233 - DNA, 15 bp, Homo sapiens
caaggtaatatttca

SEQ ID NO: 818234 - DNA, 15 bp, Homo sapiens
acaaggtaatatttc

SEQ ID NO: 818235 - DNA, 15 bp, Homo sapiens
aacaaggtaatattt

SEQ ID NO: 818236 - DNA, 15 bp, Homo sapiens
caacaaggtaatatt

SEQ ID NO: 818237 - DNA, 15 bp, Homo sapiens
tcaacaaggtaatat

SEQ ID NO: 818238 - DNA, 15 bp, Homo sapiens
ctcaacaaggtaata

SEQ ID NO: 818239 - DNA, 15 bp, Homo sapiens
tctcaacaaggtaat

SEQ ID NO: 818240 - DNA, 15 bp, Homo sapiens
ttctcaacaaggtaa

SEQ ID NO: 818241 - DNA, 15 bp, Homo sapiens
tttctcaacaaggta

SEQ ID NO: 818242 - DNA, 15 bp, Homo sapiens
ctttctcaacaaggt

SEQ ID NO: 818243 - DNA, 15 bp, Homo sapiens
tctttctcaacaagg

SEQ ID NO: 818244 - DNA, 15 bp, Homo sapiens
ttctttctcaacaag

SEQ ID NO: 818245 - DNA, 15 bp, Homo sapiens
tttctttctcaacaa

SEQ ID NO: 818246 - DNA, 15 bp, Homo sapiens
gtttctttctcaaca

SEQ ID NO: 818247 - DNA, 15 bp, Homo sapiens
ggtttctttctcaac

SEQ ID NO: 818248 - DNA, 15 bp, Homo sapiens
tggtttctttctcaa

SEQ ID NO: 818249 - DNA, 15 bp, Homo sapiens
atggtttctttctca

SEQ ID NO: 818250 - DNA, 15 bp, Homo sapiens
catggtttctttctc

SEQ ID NO: 818251 - DNA, 15 bp, Homo sapiens
acatggtttctttct

SEQ ID NO: 818252 - DNA, 15 bp, Homo sapiens
cacatggtttctttc

SEQ ID NO: 818253 - DNA, 15 bp, Homo sapiens
acacatggtttcttt

SEQ ID NO: 818254 - DNA, 15 bp, Homo sapiens
cacacatggtttctt

SEQ ID NO: 818255 - DNA, 15 bp, Homo sapiens
tcacacatggtttct

SEQ ID NO: 818256 - DNA, 15 bp, Homo sapiens
ctcacacatggtttc

SEQ ID NO: 818257 - DNA, 15 bp, Homo sapiens
tctcacacatggttt

SEQ ID NO: 818258 - DNA, 15 bp, Homo sapiens
gtctcacacatggtt

SEQ ID NO: 818259 - DNA, 15 bp, Homo sapiens
tgtctcacacatggt

SEQ ID NO: 818260 - DNA, 15 bp, Homo sapiens
ttgtctcacacatgg

SEQ ID NO: 818261 - DNA, 15 bp, Homo sapiens
gttgtctcacacatg

SEQ ID NO: 818262 - DNA, 15 bp, Homo sapiens
ggttgtctcacacat

SEQ ID NO: 818263 - DNA, 15 bp, Homo sapiens
tggttgtctcacaca

SEQ ID NO: 818264 - DNA, 15 bp, Homo sapiens
atggttgtctcacac

SEQ ID NO: 818265 - DNA, 15 bp, Homo sapiens
catggttgtctcaca

SEQ ID NO: 818266 - DNA, 15 bp, Homo sapiens
acatggttgtctcac

SEQ ID NO: 818267 - DNA, 15 bp, Homo sapiens
aacatggttgtctca

SEQ ID NO: 818268 - DNA, 15 bp, Homo sapiens
caacatggttgtctc

SEQ ID NO: 818269 - DNA, 15 bp, Homo sapiens
tcaacatggttgtct

SEQ ID NO: 818270 - DNA, 15 bp, Homo sapiens
ctcaacatggttgtc

SEQ ID NO: 818271 - DNA, 15 bp, Homo sapiens
tctcaacatggttgt

SEQ ID NO: 818272 - DNA, 15 bp, Homo sapiens
ttctcaacatggttg

SEQ ID NO: 818273 - DNA, 15 bp, Homo sapiens
tttctcaacatggtt

SEQ ID NO: 818274 - DNA, 15 bp, Homo sapiens
ctttctcaacatggt

SEQ ID NO: 818275 - DNA, 15 bp, Homo sapiens
tctttctcaacatgg

SEQ ID NO: 818276 - DNA, 15 bp, Homo sapiens
ttctttctcaacatg

SEQ ID NO: 818277 - DNA, 15 bp, Homo sapiens
tttctttctcaacat

SEQ ID NO: 818278 - DNA, 15 bp, Homo sapiens
ttttctttctcaaca

SEQ ID NO: 818279 - DNA, 15 bp, Homo sapiens
tttttctttctcaac

SEQ ID NO: 818280 - DNA, 15 bp, Homo sapiens
ctttttctttctcaa

SEQ ID NO: 818281 - DNA, 15 bp, Homo sapiens
actttttctttctca

SEQ ID NO: 818282 - DNA, 15 bp, Homo sapiens
cactttttctttctc

SEQ ID NO: 818283 - DNA, 15 bp, Homo sapiens
tcactttttctttct

SEQ ID NO: 818284 - DNA, 15 bp, Homo sapiens
atcactttttctttc

SEQ ID NO: 818285 - DNA, 15 bp, Homo sapiens
aatcactttttcttt

SEQ ID NO: 818286 - DNA, 15 bp, Homo sapiens
aaatcactttttctt

SEQ ID NO: 818287 - DNA, 15 bp, Homo sapiens
aaaatcactttttct

SEQ ID NO: 818288 - DNA, 15 bp, Homo sapiens
taaaatcactttttc

SEQ ID NO: 818289 - DNA, 15 bp, Homo sapiens
ataaaatcacttttt

SEQ ID NO: 818290 - DNA, 15 bp, Homo sapiens
tataaaatcactttt

SEQ ID NO: 818291 - DNA, 15 bp, Homo sapiens
ctataaaatcacttt

SEQ ID NO: 818292 - DNA, 15 bp, Homo sapiens
tctataaaatcactt

SEQ ID NO: 818293 - DNA, 15 bp, Homo sapiens
ttctataaaatcact

SEQ ID NO: 818294 - DNA, 15 bp, Homo sapiens
tttctataaaatcac

SEQ ID NO: 818295 - DNA, 15 bp, Homo sapiens
ttttctataaaatca

SEQ ID NO: 818296 - DNA, 15 bp, Homo sapiens
attttctataaaatc

SEQ ID NO: 818297 - DNA, 15 bp, Homo sapiens
aattttctataaaat

SEQ ID NO: 818298 - DNA, 15 bp, Homo sapiens
taattttctataaaa

SEQ ID NO: 818299 - DNA, 15 bp, Homo sapiens
ttaattttctataaa

SEQ ID NO: 818300 - DNA, 15 bp, Homo sapiens
attaattttctataa

SEQ ID NO: 818301 - DNA, 15 bp, Homo sapiens
tattaattttctata

SEQ ID NO: 818302 - DNA, 15 bp, Homo sapiens
atattaattttctat

SEQ ID NO: 818303 - DNA, 15 bp, Homo sapiens
aatattaattttcta

SEQ ID NO: 818304 - DNA, 15 bp, Homo sapiens
caatattaattttct

SEQ ID NO: 818305 - DNA, 15 bp, Homo sapiens
tcaatattaattttc

SEQ ID NO: 818306 - DNA, 15 bp, Homo sapiens
atcaatattaatttt

SEQ ID NO: 818307 - DNA, 15 bp, Homo sapiens
tatcaatattaattt

SEQ ID NO: 818308 - DNA, 15 bp, Homo sapiens
ctatcaatattaatt

SEQ ID NO: 818309 - DNA, 15 bp, Homo sapiens
actatcaatattaat

SEQ ID NO: 818310 - DNA, 15 bp, Homo sapiens
cactatcaatattaa

SEQ ID NO: 818311 - DNA, 15 bp, Homo sapiens
tcactatcaatatta

SEQ ID NO: 818312 - DNA, 15 bp, Homo sapiens
ctcactatcaatatt

SEQ ID NO: 818313 - DNA, 15 bp, Homo sapiens
gctcactatcaatat

SEQ ID NO: 818314 - DNA, 15 bp, Homo sapiens
tgctcactatcaata

SEQ ID NO: 818315 - DNA, 15 bp, Homo sapiens
atgctcactatcaat

SEQ ID NO: 818316 - DNA, 15 bp, Homo sapiens
aatgctcactatcaa

SEQ ID NO: 818317 - DNA, 15 bp, Homo sapiens
taatgctcactatca

SEQ ID NO: 818318 - DNA, 15 bp, Homo sapiens
ataatgctcactatc

SEQ ID NO: 818319 - DNA, 15 bp, Homo sapiens
tataatgctcactat

SEQ ID NO: 818320 - DNA, 15 bp, Homo sapiens
atataatgctcacta

SEQ ID NO: 818321 - DNA, 15 bp, Homo sapiens
catataatgctcact

SEQ ID NO: 818322 - DNA, 15 bp, Homo sapiens
tcatataatgctcac

SEQ ID NO: 818323 - DNA, 15 bp, Homo sapiens
ttcatataatgctca

SEQ ID NO: 818324 - DNA, 15 bp, Homo sapiens
tttcatataatgctc

SEQ ID NO: 818325 - DNA, 15 bp, Homo sapiens
ttttcatataatgct

SEQ ID NO: 818326 - DNA, 15 bp, Homo sapiens
attttcatataatgc

SEQ ID NO: 818327 - DNA, 15 bp, Homo sapiens
gattttcatataatg

SEQ ID NO: 818328 - DNA, 15 bp, Homo sapiens
tgattttcatataat

SEQ ID NO: 818329 - DNA, 15 bp, Homo sapiens
atgattttcatataa

SEQ ID NO: 818330 - DNA, 15 bp, Homo sapiens
catgattttcatata

SEQ ID NO: 818331 - DNA, 15 bp, Homo sapiens
tcatgattttcatat

SEQ ID NO: 818332 - DNA, 15 bp, Homo sapiens
ttcatgattttcata

SEQ ID NO: 818333 - DNA, 15 bp, Homo sapiens
cttcatgattttcat

SEQ ID NO: 818334 - DNA, 15 bp, Homo sapiens
acttcatgattttca

SEQ ID NO: 818335 - DNA, 15 bp, Homo sapiens
aacttcatgattttc

SEQ ID NO: 818336 - DNA, 15 bp, Homo sapiens
taacttcatgatttt

SEQ ID NO: 818337 - DNA, 15 bp, Homo sapiens
ctaacttcatgattt

SEQ ID NO: 818338 - DNA, 15 bp, Homo sapiens
tctaacttcatgatt

SEQ ID NO: 818339 - DNA, 15 bp, Homo sapiens
ttctaacttcatgat

SEQ ID NO: 818340 - DNA, 15 bp, Homo sapiens
gttctaacttcatga

SEQ ID NO: 818341 - DNA, 15 bp, Homo sapiens
tgttctaacttcatg

SEQ ID NO: 818342 - DNA, 15 bp, Homo sapiens
atgttctaacttcat

SEQ ID NO: 818343 - DNA, 15 bp, Homo sapiens
tatgttctaacttca

SEQ ID NO: 818344 - DNA, 15 bp, Homo sapiens
atatgttctaacttc

SEQ ID NO: 818345 - DNA, 15 bp, Homo sapiens
aatatgttctaactt

SEQ ID NO: 818346 - DNA, 15 bp, Homo sapiens
aaatatgttctaact

SEQ ID NO: 818347 - DNA, 15 bp, Homo sapiens
caaatatgttctaac

SEQ ID NO: 818348 - DNA, 15 bp, Homo sapiens
ccaaatatgttctaa

SEQ ID NO: 818349 - DNA, 15 bp, Homo sapiens
gccaaatatgttcta

SEQ ID NO: 818350 - DNA, 15 bp, Homo sapiens
ggccaaatatgttct

SEQ ID NO: 818351 - DNA, 15 bp, Homo sapiens
tggccaaatatgttc

SEQ ID NO: 818352 - DNA, 15 bp, Homo sapiens
ctggccaaatatgtt

SEQ ID NO: 818353 - DNA, 15 bp, Homo sapiens
tctggccaaatatgt

SEQ ID NO: 818354 - DNA, 15 bp, Homo sapiens
ttctggccaaatatg

SEQ ID NO: 818355 - DNA, 15 bp, Homo sapiens
tttctggccaaatat

SEQ ID NO: 818356 - DNA, 15 bp, Homo sapiens
ttttctggccaaata

SEQ ID NO: 818357 - DNA, 15 bp, Homo sapiens
attttctggccaaat

SEQ ID NO: 818358 - DNA, 15 bp, Homo sapiens
aattttctggccaaa

SEQ ID NO: 818359 - DNA, 15 bp, Homo sapiens
aaattttctggccaa

SEQ ID NO: 818360 - DNA, 15 bp, Homo sapiens
taaattttctggcca

SEQ ID NO: 818361 - DNA, 15 bp, Homo sapiens
gtaaattttctggcc

SEQ ID NO: 818362 - DNA, 15 bp, Homo sapiens
tgtaaattttctggc

SEQ ID NO: 818363 - DNA, 15 bp, Homo sapiens
atgtaaattttctgg

SEQ ID NO: 818364 - DNA, 15 bp, Homo sapiens
aatgtaaattttctg

SEQ ID NO: 818365 - DNA, 15 bp, Homo sapiens
taatgtaaattttct

SEQ ID NO: 818366 - DNA, 15 bp, Homo sapiens
ttaatgtaaattttc

SEQ ID NO: 818367 - DNA, 15 bp, Homo sapiens
attaatgtaaatttt

SEQ ID NO: 818368 - DNA, 15 bp, Homo sapiens
tattaatgtaaattt

SEQ ID NO: 818369 - DNA, 15 bp, Homo sapiens
ctattaatgtaaatt

SEQ ID NO: 818370 - DNA, 15 bp, Homo sapiens
actattaatgtaaat

SEQ ID NO: 818371 - DNA, 15 bp, Homo sapiens
aactattaatgtaaa

SEQ ID NO: 818372 - DNA, 15 bp, Homo sapiens
taactattaatgtaa

SEQ ID NO: 818373 - DNA, 15 bp, Homo sapiens
gtaactattaatgta

SEQ ID NO: 818374 - DNA, 15 bp, Homo sapiens
ggtaactattaatgt

SEQ ID NO: 818375 - DNA, 15 bp, Homo sapiens
gggtaactattaatg

SEQ ID NO: 818376 - DNA, 15 bp, Homo sapiens
tgggtaactattaat

SEQ ID NO: 818377 - DNA, 15 bp, Homo sapiens
atgggtaactattaa

SEQ ID NO: 818378 - DNA, 15 bp, Homo sapiens
tatgggtaactatta

SEQ ID NO: 818379 - DNA, 15 bp, Homo sapiens
ctatgggtaactatt

SEQ ID NO: 818380 - DNA, 15 bp, Homo sapiens
gctatgggtaactat

SEQ ID NO: 818381 - DNA, 15 bp, Homo sapiens
tgctatgggtaacta

SEQ ID NO: 818382 - DNA, 15 bp, Homo sapiens
ttgctatgggtaact

SEQ ID NO: 818383 - DNA, 15 bp, Homo sapiens
attgctatgggtaac

SEQ ID NO: 818384 - DNA, 15 bp, Homo sapiens
aattgctatgggtaa

SEQ ID NO: 818385 - DNA, 15 bp, Homo sapiens
taattgctatgggta

SEQ ID NO: 818386 - DNA, 15 bp, Homo sapiens
ttaattgctatgggt

SEQ ID NO: 818387 - DNA, 15 bp, Homo sapiens
attaattgctatggg

SEQ ID NO: 818388 - DNA, 15 bp, Homo sapiens
cattaattgctatgg

SEQ ID NO: 818389 - DNA, 15 bp, Homo sapiens
gcattaattgctatg

SEQ ID NO: 818390 - DNA, 15 bp, Homo sapiens
tgcattaattgctat

SEQ ID NO: 818391 - DNA, 15 bp, Homo sapiens
atgcattaattgcta

SEQ ID NO: 818392 - DNA, 15 bp, Homo sapiens
aatgcattaattgct

SEQ ID NO: 818393 - DNA, 15 bp, Homo sapiens
taatgcattaattgc

SEQ ID NO: 818394 - DNA, 15 bp, Homo sapiens
ataatgcattaattg

SEQ ID NO: 818395 - DNA, 15 bp, Homo sapiens
tataatgcattaatt

SEQ ID NO: 818396 - DNA, 15 bp, Homo sapiens
ttataatgcattaat

SEQ ID NO: 818397 - DNA, 15 bp, Homo sapiens
attataatgcattaa

SEQ ID NO: 818398 - DNA, 15 bp, Homo sapiens
aattataatgcatta

SEQ ID NO: 818399 - DNA, 15 bp, Homo sapiens
taattataatgcatt

SEQ ID NO: 818400 - DNA, 15 bp, Homo sapiens
gtaattataatgcat

SEQ ID NO: 818401 - DNA, 15 bp, Homo sapiens
tgtaattataatgca

SEQ ID NO: 818402 - DNA, 15 bp, Homo sapiens
gtgtaattataatgc

SEQ ID NO: 818403 - DNA, 15 bp, Homo sapiens
tgtgtaattataatg

SEQ ID NO: 818404 - DNA, 15 bp, Homo sapiens
atgtgtaattataat

SEQ ID NO: 818405 - DNA, 15 bp, Homo sapiens
tatgtgtaattataa

SEQ ID NO: 818406 - DNA, 15 bp, Homo sapiens
gtatgtgtaattata

SEQ ID NO: 818407 - DNA, 15 bp, Homo sapiens
ggtatgtgtaattat

SEQ ID NO: 818408 - DNA, 15 bp, Homo sapiens
aggtatgtgtaatta

SEQ ID NO: 818409 - DNA, 15 bp, Homo sapiens
aaggtatgtgtaatt

SEQ ID NO: 818410 - DNA, 15 bp, Homo sapiens
aaaggtatgtgtaat

SEQ ID NO: 818411 - DNA, 15 bp, Homo sapiens
aaaaggtatgtgtaa

SEQ ID NO: 818412 - DNA, 15 bp, Homo sapiens
gaaaaggtatgtgta

SEQ ID NO: 818413 - DNA, 15 bp, Homo sapiens
agaaaaggtatgtgt

SEQ ID NO: 818414 - DNA, 15 bp, Homo sapiens
aagaaaaggtatgtg

SEQ ID NO: 818415 - DNA, 15 bp, Homo sapiens
aaagaaaaggtatgt

SEQ ID NO: 818416 - DNA, 15 bp, Homo sapiens
taaagaaaaggtatg

SEQ ID NO: 818417 - DNA, 15 bp, Homo sapiens
ttaaagaaaaggtat

SEQ ID NO: 818418 - DNA, 15 bp, Homo sapiens
attaaagaaaaggta

SEQ ID NO: 818419 - DNA, 15 bp, Homo sapiens
cattaaagaaaaggt

SEQ ID NO: 818420 - DNA, 15 bp, Homo sapiens
tcattaaagaaaagg

SEQ ID NO: 818421 - DNA, 15 bp, Homo sapiens
ttcattaaagaaaag

SEQ ID NO: 818422 - DNA, 15 bp, Homo sapiens
tttcattaaagaaaa

SEQ ID NO: 818423 - DNA, 15 bp, Homo sapiens
ttttcattaaagaaa

SEQ ID NO: 818424 - DNA, 15 bp, Homo sapiens
tttttcattaaagaa

SEQ ID NO: 818425 - DNA, 15 bp, Homo sapiens
ctttttcattaaaga

SEQ ID NO: 818426 - DNA, 15 bp, Homo sapiens
tctttttcattaaag

SEQ ID NO: 818427 - DNA, 15 bp, Homo sapiens
ttctttttcattaaa

SEQ ID NO: 818428 - DNA, 15 bp, Homo sapiens
attctttttcattaa

SEQ ID NO: 818429 - DNA, 15 bp, Homo sapiens
aattctttttcatta

SEQ ID NO: 818430 - DNA, 15 bp, Homo sapiens
gaattctttttcatt

SEQ ID NO: 818431 - DNA, 15 bp, Homo sapiens
agaattctttttcat

SEQ ID NO: 818432 - DNA, 15 bp, Homo sapiens
aagaattctttttca

SEQ ID NO: 818433 - DNA, 15 bp, Homo sapiens
aaagaattctttttc

SEQ ID NO: 818434 - DNA, 15 bp, Homo sapiens
gaaagaattcttttt

SEQ ID NO: 818435 - DNA, 15 bp, Homo sapiens
ggaaagaattctttt

SEQ ID NO: 818436 - DNA, 15 bp, Homo sapiens
aggaaagaattcttt

SEQ ID NO: 818437 - DNA, 15 bp, Homo sapiens
aaggaaagaattctt

SEQ ID NO: 818438 - DNA, 15 bp, Homo sapiens
gaaggaaagaattct

SEQ ID NO: 818439 - DNA, 15 bp, Homo sapiens
ggaaggaaagaattc

SEQ ID NO: 818440 - DNA, 15 bp, Homo sapiens
tggaaggaaagaatt

SEQ ID NO: 818441 - DNA, 15 bp, Homo sapiens
ttggaaggaaagaat

SEQ ID NO: 818442 - DNA, 15 bp, Homo sapiens
tttggaaggaaagaa

SEQ ID NO: 818443 - DNA, 15 bp, Homo sapiens
ctttggaaggaaaga

SEQ ID NO: 818444 - DNA, 15 bp, Homo sapiens
actttggaaggaaag

SEQ ID NO: 818445 - DNA, 15 bp, Homo sapiens
aactttggaaggaaa

SEQ ID NO: 818446 - DNA, 15 bp, Homo sapiens
taactttggaaggaa

SEQ ID NO: 818447 - DNA, 15 bp, Homo sapiens
ataactttggaagga

SEQ ID NO: 818448 - DNA, 15 bp, Homo sapiens
cataactttggaagg

SEQ ID NO: 818449 - DNA, 15 bp, Homo sapiens
gcataactttggaag

SEQ ID NO: 818450 - DNA, 15 bp, Homo sapiens
tgcataactttggaa

SEQ ID NO: 818451 - DNA, 15 bp, Homo sapiens
atgcataactttgga

SEQ ID NO: 818452 - DNA, 15 bp, Homo sapiens
catgcataactttgg

SEQ ID NO: 818453 - DNA, 15 bp, Homo sapiens
gcatgcataactttg

SEQ ID NO: 818454 - DNA, 15 bp, Homo sapiens
agcatgcataacttt

SEQ ID NO: 818455 - DNA, 15 bp, Homo sapiens
tagcatgcataactt

SEQ ID NO: 818456 - DNA, 15 bp, Homo sapiens
atagcatgcataact

SEQ ID NO: 818457 - DNA, 15 bp, Homo sapiens
aatagcatgcataac

SEQ ID NO: 818458 - DNA, 15 bp, Homo sapiens
caatagcatgcataa

SEQ ID NO: 818459 - DNA, 15 bp, Homo sapiens
acaatagcatgcata

SEQ ID NO: 818460 - DNA, 15 bp, Homo sapiens
aacaatagcatgcat

SEQ ID NO: 818461 - DNA, 15 bp, Homo sapiens
taacaatagcatgca

SEQ ID NO: 818462 - DNA, 15 bp, Homo sapiens
ttaacaatagcatgc

SEQ ID NO: 818463 - DNA, 15 bp, Homo sapiens
tttaacaatagcatg

SEQ ID NO: 818464 - DNA, 15 bp, Homo sapiens
gtttaacaatagcat

SEQ ID NO: 818465 - DNA, 15 bp, Homo sapiens
tgtttaacaatagca

SEQ ID NO: 818466 - DNA, 15 bp, Homo sapiens
atgtttaacaatagc

SEQ ID NO: 818467 - DNA, 15 bp, Homo sapiens
aatgtttaacaatag

SEQ ID NO: 818468 - DNA, 15 bp, Homo sapiens
taatgtttaacaata

SEQ ID NO: 818469 - DNA, 15 bp, Homo sapiens
ctaatgtttaacaat

SEQ ID NO: 818470 - DNA, 15 bp, Homo sapiens
tctaatgtttaacaa

SEQ ID NO: 818471 - DNA, 15 bp, Homo sapiens
ctctaatgtttaaca

SEQ ID NO: 818472 - DNA, 15 bp, Homo sapiens
tctctaatgtttaac

SEQ ID NO: 818473 - DNA, 15 bp, Homo sapiens
ttctctaatgtttaa

SEQ ID NO: 818474 - DNA, 15 bp, Homo sapiens
attctctaatgttta

SEQ ID NO: 818475 - DNA, 15 bp, Homo sapiens
tattctctaatgttt

SEQ ID NO: 818476 - DNA, 15 bp, Homo sapiens
atattctctaatgtt

SEQ ID NO: 818477 - DNA, 15 bp, Homo sapiens
tatattctctaatgt

SEQ ID NO: 818478 - DNA, 15 bp, Homo sapiens
ctatattctctaatg

SEQ ID NO: 818479 - DNA, 15 bp, Homo sapiens
tctatattctctaat

SEQ ID NO: 818480 - DNA, 15 bp, Homo sapiens
ctctatattctctaa

SEQ ID NO: 818481 - DNA, 15 bp, Homo sapiens
tctctatattctcta

SEQ ID NO: 818482 - DNA, 15 bp, Homo sapiens
ttctctatattctct

SEQ ID NO: 818483 - DNA, 15 bp, Homo sapiens
cttctctatattctc

SEQ ID NO: 818484 - DNA, 15 bp, Homo sapiens
gcttctctatattct

SEQ ID NO: 818485 - DNA, 15 bp, Homo sapiens
tgcttctctatattc

SEQ ID NO: 818486 - DNA, 15 bp, Homo sapiens
ttgcttctctatatt

SEQ ID NO: 818487 - DNA, 15 bp, Homo sapiens
tttgcttctctatat

SEQ ID NO: 818488 - DNA, 15 bp, Homo sapiens
ttttgcttctctata

SEQ ID NO: 818489 - DNA, 15 bp, Homo sapiens
tttttgcttctctat

SEQ ID NO: 818490 - DNA, 15 bp, Homo sapiens
ttttttgcttctcta

SEQ ID NO: 818491 - DNA, 15 bp, Homo sapiens
cttttttgcttctct

SEQ ID NO: 818492 - DNA, 15 bp, Homo sapiens
tcttttttgcttctc

SEQ ID NO: 818493 - DNA, 15 bp, Homo sapiens
ttcttttttgcttct

SEQ ID NO: 818494 - DNA, 15 bp, Homo sapiens
tttcttttttgcttc

SEQ ID NO: 818495 - DNA, 15 bp, Homo sapiens
ttttcttttttgctt

SEQ ID NO: 818496 - DNA, 15 bp, Homo sapiens
attttcttttttgct

SEQ ID NO: 818497 - DNA, 15 bp, Homo sapiens
tattttcttttttgc

SEQ ID NO: 818498 - DNA, 15 bp, Homo sapiens
atattttcttttttg

SEQ ID NO: 818499 - DNA, 15 bp, Homo sapiens
gatattttctttttt

SEQ ID NO: 818500 - DNA, 15 bp, Homo sapiens
agatattttcttttt

SEQ ID NO: 818501 - DNA, 15 bp, Homo sapiens
aagatattttctttt

SEQ ID NO: 818502 - DNA, 15 bp, Homo sapiens
aaagatattttcttt

SEQ ID NO: 818503 - DNA, 15 bp, Homo sapiens
aaaagatattttctt

SEQ ID NO: 818504 - DNA, 15 bp, Homo sapiens
aaaaagatattttct

SEQ ID NO: 818505 - DNA, 15 bp, Homo sapiens
aaaaaagatattttc

SEQ ID NO: 818506 - DNA, 15 bp, Homo sapiens
caaaaaagatatttt

SEQ ID NO: 818507 - DNA, 15 bp, Homo sapiens
tcaaaaaagatattt

SEQ ID NO: 818508 - DNA, 15 bp, Homo sapiens
atcaaaaaagatatt

SEQ ID NO: 818509 - DNA, 15 bp, Homo sapiens
tatcaaaaaagatat

SEQ ID NO: 818510 - DNA, 15 bp, Homo sapiens
atatcaaaaaagata

SEQ ID NO: 818511 - DNA, 15 bp, Homo sapiens
aatatcaaaaaagat

SEQ ID NO: 818512 - DNA, 15 bp, Homo sapiens
aaatatcaaaaaaga

SEQ ID NO: 818513 - DNA, 15 bp, Homo sapiens
aaaatatcaaaaaag

SEQ ID NO: 818514 - DNA, 15 bp, Homo sapiens
gaaaatatcaaaaaa

SEQ ID NO: 818515 - DNA, 15 bp, Homo sapiens
agaaaatatcaaaaa

SEQ ID NO: 818516 - DNA, 15 bp, Homo sapiens
aagaaaatatcaaaa

SEQ ID NO: 818517 - DNA, 15 bp, Homo sapiens
taagaaaatatcaaa

SEQ ID NO: 818518 - DNA, 15 bp, Homo sapiens
ttaagaaaatatcaa

SEQ ID NO: 818519 - DNA, 15 bp, Homo sapiens
gttaagaaaatatca

SEQ ID NO: 818520 - DNA, 15 bp, Homo sapiens
tgttaagaaaatatc

SEQ ID NO: 818521 - DNA, 15 bp, Homo sapiens
atgttaagaaaatat

SEQ ID NO: 818522 - DNA, 15 bp, Homo sapiens
tatgttaagaaaata

SEQ ID NO: 818523 - DNA, 15 bp, Homo sapiens
gtatgttaagaaaat

SEQ ID NO: 818524 - DNA, 15 bp, Homo sapiens
cgtatgttaagaaaa

SEQ ID NO: 818525 - DNA, 15 bp, Homo sapiens
acgtatgttaagaaa

SEQ ID NO: 818526 - DNA, 15 bp, Homo sapiens
gacgtatgttaagaa

SEQ ID NO: 818527 - DNA, 15 bp, Homo sapiens
agacgtatgttaaga

SEQ ID NO: 818528 - DNA, 15 bp, Homo sapiens
cagacgtatgttaag

SEQ ID NO: 818529 - DNA, 15 bp, Homo sapiens
acagacgtatgttaa

SEQ ID NO: 818530 - DNA, 15 bp, Homo sapiens
aacagacgtatgtta

SEQ ID NO: 818531 - DNA, 15 bp, Homo sapiens
gaacagacgtatgtt

SEQ ID NO: 818532 - DNA, 15 bp, Homo sapiens
ggaacagacgtatgt

SEQ ID NO: 818533 - DNA, 15 bp, Homo sapiens
aggaacagacgtatg

SEQ ID NO: 818534 - DNA, 15 bp, Homo sapiens
taggaacagacgtat

SEQ ID NO: 818535 - DNA, 15 bp, Homo sapiens
ttaggaacagacgta

SEQ ID NO: 818536 - DNA, 15 bp, Homo sapiens
attaggaacagacgt

SEQ ID NO: 818537 - DNA, 15 bp, Homo sapiens
tattaggaacagacg

SEQ ID NO: 818538 - DNA, 15 bp, Homo sapiens
ttattaggaacagac

SEQ ID NO: 818539 - DNA, 15 bp, Homo sapiens
attattaggaacaga

SEQ ID NO: 818540 - DNA, 15 bp, Homo sapiens
cattattaggaacag

SEQ ID NO: 818541 - DNA, 15 bp, Homo sapiens
acattattaggaaca

SEQ ID NO: 818542 - DNA, 15 bp, Homo sapiens
aacattattaggaac

SEQ ID NO: 818543 - DNA, 15 bp, Homo sapiens
aaacattattaggaa

SEQ ID NO: 818544 - DNA, 15 bp, Homo sapiens
taaacattattagga

SEQ ID NO: 818545 - DNA, 15 bp, Homo sapiens
ataaacattattagg

SEQ ID NO: 818546 - DNA, 15 bp, Homo sapiens
tataaacattattag

SEQ ID NO: 818547 - DNA, 15 bp, Homo sapiens
ctataaacattatta

SEQ ID NO: 818548 - DNA, 15 bp, Homo sapiens
actataaacattatt

SEQ ID NO: 818549 - DNA, 15 bp, Homo sapiens
aactataaacattat

SEQ ID NO: 818550 - DNA, 15 bp, Homo sapiens
aaactataaacatta

SEQ ID NO: 818551 - DNA, 15 bp, Homo sapiens
taaactataaacatt

SEQ ID NO: 818552 - DNA, 15 bp, Homo sapiens
ctaaactataaacat

SEQ ID NO: 818553 - DNA, 15 bp, Homo sapiens
tctaaactataaaca

SEQ ID NO: 818554 - DNA, 15 bp, Homo sapiens
ttctaaactataaac

SEQ ID NO: 818555 - DNA, 15 bp, Homo sapiens
cttctaaactataaa

SEQ ID NO: 818556 - DNA, 15 bp, Homo sapiens
gcttctaaactataa

SEQ ID NO: 818557 - DNA, 15 bp, Homo sapiens
tgcttctaaactata

SEQ ID NO: 818558 - DNA, 15 bp, Homo sapiens
atgcttctaaactat

SEQ ID NO: 818559 - DNA, 15 bp, Homo sapiens
aatgcttctaaacta

SEQ ID NO: 818560 - DNA, 15 bp, Homo sapiens
caatgcttctaaact

SEQ ID NO: 818561 - DNA, 15 bp, Homo sapiens
gcaatgcttctaaac

SEQ ID NO: 818562 - DNA, 15 bp, Homo sapiens
tgcaatgcttctaaa

SEQ ID NO: 818563 - DNA, 15 bp, Homo sapiens
atgcaatgcttctaa

SEQ ID NO: 818564 - DNA, 15 bp, Homo sapiens
catgcaatgcttcta

SEQ ID NO: 818565 - DNA, 15 bp, Homo sapiens
tcatgcaatgcttct

SEQ ID NO: 818566 - DNA, 15 bp, Homo sapiens
ttcatgcaatgcttc

SEQ ID NO: 818567 - DNA, 15 bp, Homo sapiens
tttcatgcaatgctt

SEQ ID NO: 818568 - DNA, 15 bp, Homo sapiens
atttcatgcaatgct

SEQ ID NO: 818569 - DNA, 15 bp, Homo sapiens
catttcatgcaatgc

SEQ ID NO: 818570 - DNA, 15 bp, Homo sapiens
ccatttcatgcaatg

SEQ ID NO: 818571 - DNA, 15 bp, Homo sapiens
cccatttcatgcaat

SEQ ID NO: 818572 - DNA, 15 bp, Homo sapiens
acccatttcatgcaa

SEQ ID NO: 818573 - DNA, 15 bp, Homo sapiens
tacccatttcatgca

SEQ ID NO: 818574 - DNA, 15 bp, Homo sapiens
ctacccatttcatgc

SEQ ID NO: 818575 - DNA, 15 bp, Homo sapiens
tctacccatttcatg

SEQ ID NO: 818576 - DNA, 15 bp, Homo sapiens
atctacccatttcat

SEQ ID NO: 818577 - DNA, 15 bp, Homo sapiens
gatctacccatttca

SEQ ID NO: 818578 - DNA, 15 bp, Homo sapiens
tgatctacccatttc

SEQ ID NO: 818579 - DNA, 15 bp, Homo sapiens
ttgatctacccattt

SEQ ID NO: 818580 - DNA, 15 bp, Homo sapiens
attgatctacccatt

SEQ ID NO: 818581 - DNA, 15 bp, Homo sapiens
aattgatctacccat

SEQ ID NO: 818582 - DNA, 15 bp, Homo sapiens
aaattgatctaccca

SEQ ID NO: 818583 - DNA, 15 bp, Homo sapiens
aaaattgatctaccc

SEQ ID NO: 818584 - DNA, 15 bp, Homo sapiens
gaaaattgatctacc

SEQ ID NO: 818585 - DNA, 15 bp, Homo sapiens
agaaaattgatctac

SEQ ID NO: 818586 - DNA, 15 bp, Homo sapiens
tagaaaattgatcta

SEQ ID NO: 818587 - DNA, 15 bp, Homo sapiens
atagaaaattgatct

SEQ ID NO: 818588 - DNA, 15 bp, Homo sapiens
aatagaaaattgatc

SEQ ID NO: 818589 - DNA, 15 bp, Homo sapiens
aaatagaaaattgat

SEQ ID NO: 818590 - DNA, 15 bp, Homo sapiens
taaatagaaaattga

SEQ ID NO: 818591 - DNA, 15 bp, Homo sapiens
ttaaatagaaaattg

SEQ ID NO: 818592 - DNA, 15 bp, Homo sapiens
attaaatagaaaatt

SEQ ID NO: 818593 - DNA, 15 bp, Homo sapiens
cattaaatagaaaat

SEQ ID NO: 818594 - DNA, 15 bp, Homo sapiens
acattaaatagaaaa

SEQ ID NO: 818595 - DNA, 15 bp, Homo sapiens
aacattaaatagaaa

SEQ ID NO: 818596 - DNA, 15 bp, Homo sapiens
aaacattaaatagaa

SEQ ID NO: 818597 - DNA, 15 bp, Homo sapiens
caaacattaaataga

SEQ ID NO: 818598 - DNA, 15 bp, Homo sapiens
ccaaacattaaatag

SEQ ID NO: 818599 - DNA, 15 bp, Homo sapiens
tccaaacattaaata

SEQ ID NO: 818600 - DNA, 15 bp, Homo sapiens
atccaaacattaaat

SEQ ID NO: 818601 - DNA, 15 bp, Homo sapiens
aatccaaacattaaa

SEQ ID NO: 818602 - DNA, 15 bp, Homo sapiens
gaatccaaacattaa

SEQ ID NO: 818603 - DNA, 15 bp, Homo sapiens
tgaatccaaacatta

SEQ ID NO: 818604 - DNA, 15 bp, Homo sapiens
atgaatccaaacatt

SEQ ID NO: 818605 - DNA, 15 bp, Homo sapiens
aatgaatccaaacat

SEQ ID NO: 818606 - DNA, 15 bp, Homo sapiens
taatgaatccaaaca

SEQ ID NO: 818607 - DNA, 15 bp, Homo sapiens
ctaatgaatccaaac

SEQ ID NO: 818608 - DNA, 15 bp, Homo sapiens
cctaatgaatccaaa

SEQ ID NO: 818609 - DNA, 15 bp, Homo sapiens
acctaatgaatccaa

SEQ ID NO: 818610 - DNA, 15 bp, Homo sapiens
tacctaatgaatcca

SEQ ID NO: 818611 - DNA, 15 bp, Homo sapiens
gtacctaatgaatcc

SEQ ID NO: 818612 - DNA, 15 bp, Homo sapiens
cgtacctaatgaatc

SEQ ID NO: 818613 - DNA, 15 bp, Homo sapiens
tcgtacctaatgaat

SEQ ID NO: 818614 - DNA, 15 bp, Homo sapiens
ttcgtacctaatgaa

SEQ ID NO: 818615 - DNA, 15 bp, Homo sapiens
cttcgtacctaatga

SEQ ID NO: 818616 - DNA, 15 bp, Homo sapiens
acttcgtacctaatg

SEQ ID NO: 818617 - DNA, 15 bp, Homo sapiens
aacttcgtacctaat

SEQ ID NO: 818618 - DNA, 15 bp, Homo sapiens
taacttcgtacctaa

SEQ ID NO: 818619 - DNA, 15 bp, Homo sapiens
ctaacttcgtaccta

SEQ ID NO: 818620 - DNA, 15 bp, Homo sapiens
gctaacttcgtacct

SEQ ID NO: 818621 - DNA, 15 bp, Homo sapiens
tgctaacttcgtacc

SEQ ID NO: 818622 - DNA, 15 bp, Homo sapiens
ttgctaacttcgtac

SEQ ID NO: 818623 - DNA, 15 bp, Homo sapiens
tttgctaacttcgta

SEQ ID NO: 818624 - DNA, 15 bp, Homo sapiens
atttgctaacttcgt

SEQ ID NO: 818625 - DNA, 15 bp, Homo sapiens
aatttgctaacttcg

SEQ ID NO: 818626 - DNA, 15 bp, Homo sapiens
taatttgctaacttc

SEQ ID NO: 818627 - DNA, 15 bp, Homo sapiens
ttaatttgctaactt

SEQ ID NO: 818628 - DNA, 15 bp, Homo sapiens
attaatttgctaact

SEQ ID NO: 818629 - DNA, 15 bp, Homo sapiens
aattaatttgctaac

SEQ ID NO: 818630 - DNA, 15 bp, Homo sapiens
aaattaatttgctaa

SEQ ID NO: 818631 - DNA, 15 bp, Homo sapiens
gaaattaatttgcta

SEQ ID NO: 818632 - DNA, 15 bp, Homo sapiens
ggaaattaatttgct

SEQ ID NO: 818633 - DNA, 15 bp, Homo sapiens
tggaaattaatttgc

SEQ ID NO: 818634 - DNA, 15 bp, Homo sapiens
atggaaattaatttg

SEQ ID NO: 818635 - DNA, 15 bp, Homo sapiens
aatggaaattaattt

SEQ ID NO: 818636 - DNA, 15 bp, Homo sapiens
taatggaaattaatt

SEQ ID NO: 818637 - DNA, 15 bp, Homo sapiens
ctaatggaaattaat

SEQ ID NO: 818638 - DNA, 15 bp, Homo sapiens
cctaatggaaattaa

SEQ ID NO: 818639 - DNA, 15 bp, Homo sapiens
ccctaatggaaatta

SEQ ID NO: 818640 - DNA, 15 bp, Homo sapiens
accctaatggaaatt

SEQ ID NO: 818641 - DNA, 15 bp, Homo sapiens
caccctaatggaaat

SEQ ID NO: 818642 - DNA, 15 bp, Homo sapiens
gcaccctaatggaaa

SEQ ID NO: 818643 - DNA, 15 bp, Homo sapiens
ggcaccctaatggaa

SEQ ID NO: 818644 - DNA, 15 bp, Homo sapiens
aggcaccctaatgga

SEQ ID NO: 818645 - DNA, 15 bp, Homo sapiens
caggcaccctaatgg

SEQ ID NO: 818646 - DNA, 15 bp, Homo sapiens
acaggcaccctaatg

SEQ ID NO: 818647 - DNA, 15 bp, Homo sapiens
tacaggcaccctaat

SEQ ID NO: 818648 - DNA, 15 bp, Homo sapiens
atacaggcaccctaa

SEQ ID NO: 818649 - DNA, 15 bp, Homo sapiens
catacaggcacccta

SEQ ID NO: 818650 - DNA, 15 bp, Homo sapiens
ccatacaggcaccct

SEQ ID NO: 818651 - DNA, 15 bp, Homo sapiens
accatacaggcaccc

SEQ ID NO: 818652 - DNA, 15 bp, Homo sapiens
aaccatacaggcacc

SEQ ID NO: 818653 - DNA, 15 bp, Homo sapiens
caaccatacaggcac

SEQ ID NO: 818654 - DNA, 15 bp, Homo sapiens
acaaccatacaggca

SEQ ID NO: 818655 - DNA, 15 bp, Homo sapiens
tacaaccatacaggc

SEQ ID NO: 818656 - DNA, 15 bp, Homo sapiens
ttacaaccatacagg

SEQ ID NO: 818657 - DNA, 15 bp, Homo sapiens
tttacaaccatacag

SEQ ID NO: 818658 - DNA, 15 bp, Homo sapiens
atttacaaccataca

SEQ ID NO: 818659 - DNA, 15 bp, Homo sapiens
gatttacaaccatac

SEQ ID NO: 818660 - DNA, 15 bp, Homo sapiens
ggatttacaaccata

SEQ ID NO: 818661 - DNA, 15 bp, Homo sapiens
aggatttacaaccat

SEQ ID NO: 818662 - DNA, 15 bp, Homo sapiens
caggatttacaacca

SEQ ID NO: 818663 - DNA, 15 bp, Homo sapiens
ccaggatttacaacc

SEQ ID NO: 818664 - DNA, 15 bp, Homo sapiens
tccaggatttacaac

SEQ ID NO: 818665 - DNA, 15 bp, Homo sapiens
gtccaggatttacaa

SEQ ID NO: 818666 - DNA, 15 bp, Homo sapiens
ggtccaggatttaca

SEQ ID NO: 818667 - DNA, 15 bp, Homo sapiens
aggtccaggatttac

SEQ ID NO: 818668 - DNA, 15 bp, Homo sapiens
caggtccaggattta

SEQ ID NO: 818669 - DNA, 15 bp, Homo sapiens
gcaggtccaggattt

SEQ ID NO: 818670 - DNA, 15 bp, Homo sapiens
tgcaggtccaggatt

SEQ ID NO: 818671 - DNA, 15 bp, Homo sapiens
ctgcaggtccaggat

SEQ ID NO: 818672 - DNA, 15 bp, Homo sapiens
tctgcaggtccagga

SEQ ID NO: 818673 - DNA, 15 bp, Homo sapiens
ttctgcaggtccagg

SEQ ID NO: 818674 - DNA, 15 bp, Homo sapiens
cttctgcaggtccag

SEQ ID NO: 818675 - DNA, 15 bp, Homo sapiens
tcttctgcaggtcca

SEQ ID NO: 818676 - DNA, 15 bp, Homo sapiens
atcttctgcaggtcc

SEQ ID NO: 818677 - DNA, 15 bp, Homo sapiens
aatcttctgcaggtc

SEQ ID NO: 818678 - DNA, 15 bp, Homo sapiens
aaatcttctgcaggt

SEQ ID NO: 818679 - DNA, 15 bp, Homo sapiens
aaaatcttctgcagg

SEQ ID NO: 818680 - DNA, 15 bp, Homo sapiens
aaaaatcttctgcag

SEQ ID NO: 818681 - DNA, 15 bp, Homo sapiens
gaaaaatcttctgca

SEQ ID NO: 818682 - DNA, 15 bp, Homo sapiens
tgaaaaatcttctgc

SEQ ID NO: 818683 - DNA, 15 bp, Homo sapiens
ctgaaaaatcttctg

SEQ ID NO: 818684 - DNA, 15 bp, Homo sapiens
actgaaaaatcttct

SEQ ID NO: 818685 - DNA, 15 bp, Homo sapiens
tactgaaaaatcttc

SEQ ID NO: 818686 - DNA, 15 bp, Homo sapiens
atactgaaaaatctt

SEQ ID NO: 818687 - DNA, 15 bp, Homo sapiens
aatactgaaaaatct

SEQ ID NO: 818688 - DNA, 15 bp, Homo sapiens
caatactgaaaaatc

SEQ ID NO: 818689 - DNA, 15 bp, Homo sapiens
ccaatactgaaaaat

SEQ ID NO: 818690 - DNA, 15 bp, Homo sapiens
accaatactgaaaaa

SEQ ID NO: 818691 - DNA, 15 bp, Homo sapiens
aaccaatactgaaaa

SEQ ID NO: 818692 - DNA, 15 bp, Homo sapiens
aaaccaatactgaaa

SEQ ID NO: 818693 - DNA, 15 bp, Homo sapiens
caaaccaatactgaa

SEQ ID NO: 818694 - DNA, 15 bp, Homo sapiens
acaaaccaatactga

SEQ ID NO: 818695 - DNA, 15 bp, Homo sapiens
tacaaaccaatactg

SEQ ID NO: 818696 - DNA, 15 bp, Homo sapiens
ctacaaaccaatact

SEQ ID NO: 818697 - DNA, 15 bp, Homo sapiens
actacaaaccaatac

SEQ ID NO: 818698 - DNA, 15 bp, Homo sapiens
gactacaaaccaata

SEQ ID NO: 818699 - DNA, 15 bp, Homo sapiens
agactacaaaccaat

SEQ ID NO: 818700 - DNA, 15 bp, Homo sapiens
aagactacaaaccaa

SEQ ID NO: 818701 - DNA, 15 bp, Homo sapiens
aaagactacaaacca

SEQ ID NO: 818702 - DNA, 15 bp, Homo sapiens
aaaagactacaaacc

SEQ ID NO: 818703 - DNA, 15 bp, Homo sapiens
caaaagactacaaac

SEQ ID NO: 818704 - DNA, 15 bp, Homo sapiens
acaaaagactacaaa

SEQ ID NO: 818705 - DNA, 15 bp, Homo sapiens
aacaaaagactacaa

SEQ ID NO: 818706 - DNA, 15 bp, Homo sapiens
aaacaaaagactaca

SEQ ID NO: 818707 - DNA, 15 bp, Homo sapiens
taaacaaaagactac

SEQ ID NO: 818708 - DNA, 15 bp, Homo sapiens
ctaaacaaaagacta

SEQ ID NO: 818709 - DNA, 15 bp, Homo sapiens
gctaaacaaaagact

SEQ ID NO: 818710 - DNA, 15 bp, Homo sapiens
tgctaaacaaaagac

SEQ ID NO: 818711 - DNA, 15 bp, Homo sapiens
ctgctaaacaaaaga

SEQ ID NO: 818712 - DNA, 15 bp, Homo sapiens
gctgctaaacaaaag

SEQ ID NO: 818713 - DNA, 15 bp, Homo sapiens
tgctgctaaacaaaa

SEQ ID NO: 818714 - DNA, 15 bp, Homo sapiens
ttgctgctaaacaaa

SEQ ID NO: 818715 - DNA, 15 bp, Homo sapiens
tttgctgctaaacaa

SEQ ID NO: 818716 - DNA, 15 bp, Homo sapiens
atttgctgctaaaca

SEQ ID NO: 818717 - DNA, 15 bp, Homo sapiens
tatttgctgctaaac

SEQ ID NO: 818718 - DNA, 15 bp, Homo sapiens
ttatttgctgctaaa

SEQ ID NO: 818719 - DNA, 15 bp, Homo sapiens
attatttgctgctaa

SEQ ID NO: 818720 - DNA, 15 bp, Homo sapiens
aattatttgctgcta

SEQ ID NO: 818721 - DNA, 15 bp, Homo sapiens
taattatttgctgct

SEQ ID NO: 818722 - DNA, 15 bp, Homo sapiens
ctaattatttgctgc

SEQ ID NO: 818723 - DNA, 15 bp, Homo sapiens
actaattatttgctg

SEQ ID NO: 818724 - DNA, 15 bp, Homo sapiens
aactaattatttgct

SEQ ID NO: 818725 - DNA, 15 bp, Homo sapiens
gaactaattatttgc

SEQ ID NO: 818726 - DNA, 15 bp, Homo sapiens
agaactaattatttg

SEQ ID NO: 818727 - DNA, 15 bp, Homo sapiens
gagaactaattattt

SEQ ID NO: 818728 - DNA, 15 bp, Homo sapiens
ggagaactaattatt

SEQ ID NO: 818729 - DNA, 15 bp, Homo sapiens
tggagaactaattat

SEQ ID NO: 818730 - DNA, 15 bp, Homo sapiens
ctggagaactaatta

SEQ ID NO: 818731 - DNA, 15 bp, Homo sapiens
tctggagaactaatt

SEQ ID NO: 818732 - DNA, 15 bp, Homo sapiens
ctctggagaactaat

SEQ ID NO: 818733 - DNA, 15 bp, Homo sapiens
gctctggagaactaa

SEQ ID NO: 818734 - DNA, 15 bp, Homo sapiens
agctctggagaacta

SEQ ID NO: 818735 - DNA, 15 bp, Homo sapiens
aagctctggagaact

SEQ ID NO: 818736 - DNA, 15 bp, Homo sapiens
gaagctctggagaac

SEQ ID NO: 818737 - DNA, 15 bp, Homo sapiens
agaagctctggagaa

SEQ ID NO: 818738 - DNA, 15 bp, Homo sapiens
cagaagctctggaga

SEQ ID NO: 818739 - DNA, 15 bp, Homo sapiens
tcagaagctctggag

SEQ ID NO: 818740 - DNA, 15 bp, Homo sapiens
ttcagaagctctgga

SEQ ID NO: 818741 - DNA, 15 bp, Homo sapiens
tttcagaagctctgg

SEQ ID NO: 818742 - DNA, 15 bp, Homo sapiens
atttcagaagctctg

SEQ ID NO: 818743 - DNA, 15 bp, Homo sapiens
aatttcagaagctct

SEQ ID NO: 818744 - DNA, 15 bp, Homo sapiens
taatttcagaagctc

SEQ ID NO: 818745 - DNA, 15 bp, Homo sapiens
ttaatttcagaagct

SEQ ID NO: 818746 - DNA, 15 bp, Homo sapiens
attaatttcagaagc

SEQ ID NO: 818747 - DNA, 15 bp, Homo sapiens
aattaatttcagaag

SEQ ID NO: 818748 - DNA, 15 bp, Homo sapiens
caattaatttcagaa

SEQ ID NO: 818749 - DNA, 15 bp, Homo sapiens
tcaattaatttcaga

SEQ ID NO: 818750 - DNA, 15 bp, Homo sapiens
gtcaattaatttcag

SEQ ID NO: 818751 - DNA, 15 bp, Homo sapiens
ggtcaattaatttca

SEQ ID NO: 818752 - DNA, 15 bp, Homo sapiens
tggtcaattaatttc

SEQ ID NO: 818753 - DNA, 15 bp, Homo sapiens
gtggtcaattaattt

SEQ ID NO: 818754 - DNA, 15 bp, Homo sapiens
agtggtcaattaatt

SEQ ID NO: 818755 - DNA, 15 bp, Homo sapiens
aagtggtcaattaat

SEQ ID NO: 818756 - DNA, 15 bp, Homo sapiens
aaagtggtcaattaa

SEQ ID NO: 818757 - DNA, 15 bp, Homo sapiens
taaagtggtcaatta

SEQ ID NO: 818758 - DNA, 15 bp, Homo sapiens
ttaaagtggtcaatt

SEQ ID NO: 818759 - DNA, 15 bp, Homo sapiens
attaaagtggtcaat

SEQ ID NO: 818760 - DNA, 15 bp, Homo sapiens
cattaaagtggtcaa

SEQ ID NO: 818761 - DNA, 15 bp, Homo sapiens
ccattaaagtggtca

SEQ ID NO: 818762 - DNA, 15 bp, Homo sapiens
accattaaagtggtc

SEQ ID NO: 818763 - DNA, 15 bp, Homo sapiens
caccattaaagtggt

SEQ ID NO: 818764 - DNA, 15 bp, Homo sapiens
acaccattaaagtgg

SEQ ID NO: 818765 - DNA, 15 bp, Homo sapiens
aacaccattaaagtg

SEQ ID NO: 818766 - DNA, 15 bp, Homo sapiens
aaacaccattaaagt

SEQ ID NO: 818767 - DNA, 15 bp, Homo sapiens
taaacaccattaaag

SEQ ID NO: 818768 - DNA, 15 bp, Homo sapiens
gtaaacaccattaaa

SEQ ID NO: 818769 - DNA, 15 bp, Homo sapiens
ggtaaacaccattaa

SEQ ID NO: 818770 - DNA, 15 bp, Homo sapiens
aggtaaacaccatta

SEQ ID NO: 818771 - DNA, 15 bp, Homo sapiens
taggtaaacaccatt

SEQ ID NO: 818772 - DNA, 15 bp, Homo sapiens
gtaggtaaacaccat

SEQ ID NO: 818773 - DNA, 15 bp, Homo sapiens
ggtaggtaaacacca

SEQ ID NO: 818774 - DNA, 15 bp, Homo sapiens
aggtaggtaaacacc

SEQ ID NO: 818775 - DNA, 15 bp, Homo sapiens
taggtaggtaaacac

SEQ ID NO: 818776 - DNA, 15 bp, Homo sapiens
ctaggtaggtaaaca

SEQ ID NO: 818777 - DNA, 15 bp, Homo sapiens
tctaggtaggtaaac

SEQ ID NO: 818778 - DNA, 15 bp, Homo sapiens
ctctaggtaggtaaa

SEQ ID NO: 818779 - DNA, 15 bp, Homo sapiens
tctctaggtaggtaa

SEQ ID NO: 818780 - DNA, 15 bp, Homo sapiens
ttctctaggtaggta

SEQ ID NO: 818781 - DNA, 15 bp, Homo sapiens
tttctctaggtaggt

SEQ ID NO: 818782 - DNA, 15 bp, Homo sapiens
ctttctctaggtagg

SEQ ID NO: 818783 - DNA, 15 bp, Homo sapiens
tctttctctaggtag

SEQ ID NO: 818784 - DNA, 15 bp, Homo sapiens
ttctttctctaggta

SEQ ID NO: 818785 - DNA, 15 bp, Homo sapiens
tttctttctctaggt

SEQ ID NO: 818786 - DNA, 15 bp, Homo sapiens
ttttctttctctagg

SEQ ID NO: 818787 - DNA, 15 bp, Homo sapiens
tttttctttctctag

SEQ ID NO: 818788 - DNA, 15 bp, Homo sapiens
ctttttctttctcta

SEQ ID NO: 818789 - DNA, 15 bp, Homo sapiens
tctttttctttctct

SEQ ID NO: 818790 - DNA, 15 bp, Homo sapiens
ttctttttctttctc

SEQ ID NO: 818791 - DNA, 15 bp, Homo sapiens
gttctttttctttct

SEQ ID NO: 818792 - DNA, 15 bp, Homo sapiens
agttctttttctttc

SEQ ID NO: 818793 - DNA, 15 bp, Homo sapiens
aagttctttttcttt

SEQ ID NO: 818794 - DNA, 15 bp, Homo sapiens
gaagttctttttctt

SEQ ID NO: 818795 - DNA, 15 bp, Homo sapiens
agaagttctttttct

SEQ ID NO: 818796 - DNA, 15 bp, Homo sapiens
gagaagttctttttc

SEQ ID NO: 818797 - DNA, 15 bp, Homo sapiens
ggagaagttcttttt

SEQ ID NO: 818798 - DNA, 15 bp, Homo sapiens
tggagaagttctttt

SEQ ID NO: 818799 - DNA, 15 bp, Homo sapiens
ttggagaagttcttt

SEQ ID NO: 818800 - DNA, 15 bp, Homo sapiens
cttggagaagttctt

SEQ ID NO: 818801 - DNA, 15 bp, Homo sapiens
acttggagaagttct

SEQ ID NO: 818802 - DNA, 15 bp, Homo sapiens
gacttggagaagttc

SEQ ID NO: 818803 - DNA, 15 bp, Homo sapiens
ggacttggagaagtt

SEQ ID NO: 818804 - DNA, 15 bp, Homo sapiens
gggacttggagaagt

SEQ ID NO: 818805 - DNA, 15 bp, Homo sapiens
agggacttggagaag

SEQ ID NO: 818806 - DNA, 15 bp, Homo sapiens
aagggacttggagaa

SEQ ID NO: 818807 - DNA, 15 bp, Homo sapiens
caagggacttggaga

SEQ ID NO: 818808 - DNA, 15 bp, Homo sapiens
ccaagggacttggag

SEQ ID NO: 818809 - DNA, 15 bp, Homo sapiens
accaagggacttgga

SEQ ID NO: 818810 - DNA, 15 bp, Homo sapiens
taccaagggacttgg

SEQ ID NO: 818811 - DNA, 15 bp, Homo sapiens
ttaccaagggacttg

SEQ ID NO: 818812 - DNA, 15 bp, Homo sapiens
tttaccaagggactt

SEQ ID NO: 818813 - DNA, 15 bp, Homo sapiens
ttttaccaagggact

SEQ ID NO: 818814 - DNA, 15 bp, Homo sapiens
attttaccaagggac

SEQ ID NO: 818815 - DNA, 15 bp, Homo sapiens
aattttaccaaggga

SEQ ID NO: 818816 - DNA, 15 bp, Homo sapiens
taattttaccaaggg

SEQ ID NO: 818817 - DNA, 15 bp, Homo sapiens
ttaattttaccaagg

SEQ ID NO: 818818 - DNA, 15 bp, Homo sapiens
cttaattttaccaag

SEQ ID NO: 818819 - DNA, 15 bp, Homo sapiens
gcttaattttaccaa

SEQ ID NO: 818820 - DNA, 15 bp, Homo sapiens
ggcttaattttacca

SEQ ID NO: 818821 - DNA, 15 bp, Homo sapiens
aggcttaattttacc

SEQ ID NO: 818822 - DNA, 15 bp, Homo sapiens
gaggcttaattttac

SEQ ID NO: 818823 - DNA, 15 bp, Homo sapiens
tgaggcttaatttta

SEQ ID NO: 818824 - DNA, 15 bp, Homo sapiens
atgaggcttaatttt

SEQ ID NO: 818825 - DNA, 15 bp, Homo sapiens
catgaggcttaattt

SEQ ID NO: 818826 - DNA, 15 bp, Homo sapiens
tcatgaggcttaatt

SEQ ID NO: 818827 - DNA, 15 bp, Homo sapiens
ttcatgaggcttaat

SEQ ID NO: 818828 - DNA, 15 bp, Homo sapiens
gttcatgaggcttaa

SEQ ID NO: 818829 - DNA, 15 bp, Homo sapiens
tgttcatgaggctta

SEQ ID NO: 818830 - DNA, 15 bp, Homo sapiens
ttgttcatgaggctt

SEQ ID NO: 818831 - DNA, 15 bp, Homo sapiens
attgttcatgaggct

SEQ ID NO: 818832 - DNA, 15 bp, Homo sapiens
aattgttcatgaggc

SEQ ID NO: 818833 - DNA, 15 bp, Homo sapiens
taattgttcatgagg

SEQ ID NO: 818834 - DNA, 15 bp, Homo sapiens
ttaattgttcatgag

SEQ ID NO: 818835 - DNA, 15 bp, Homo sapiens
gttaattgttcatga

SEQ ID NO: 818836 - DNA, 15 bp, Homo sapiens
agttaattgttcatg

SEQ ID NO: 818837 - DNA, 15 bp, Homo sapiens
gagttaattgttcat

SEQ ID NO: 818838 - DNA, 15 bp, Homo sapiens
tgagttaattgttca

SEQ ID NO: 818839 - DNA, 15 bp, Homo sapiens
ttgagttaattgttc

SEQ ID NO: 818840 - DNA, 15 bp, Homo sapiens
tttgagttaattgtt

SEQ ID NO: 818841 - DNA, 15 bp, Homo sapiens
atttgagttaattgt

SEQ ID NO: 818842 - DNA, 15 bp, Homo sapiens
tatttgagttaattg

SEQ ID NO: 818843 - DNA, 15 bp, Homo sapiens
atatttgagttaatt

SEQ ID NO: 818844 - DNA, 15 bp, Homo sapiens
tatatttgagttaat

SEQ ID NO: 818845 - DNA, 15 bp, Homo sapiens
gtatatttgagttaa

SEQ ID NO: 818846 - DNA, 15 bp, Homo sapiens
tgtatatttgagtta

SEQ ID NO: 818847 - DNA, 15 bp, Homo sapiens
gtgtatatttgagtt

SEQ ID NO: 818848 - DNA, 15 bp, Homo sapiens
tgtgtatatttgagt

SEQ ID NO: 818849 - DNA, 15 bp, Homo sapiens
ttgtgtatatttgag

SEQ ID NO: 818850 - DNA, 15 bp, Homo sapiens
cttgtgtatatttga

SEQ ID NO: 818851 - DNA, 15 bp, Homo sapiens
ccttgtgtatatttg

SEQ ID NO: 818852 - DNA, 15 bp, Homo sapiens
gccttgtgtatattt

SEQ ID NO: 818853 - DNA, 15 bp, Homo sapiens
agccttgtgtatatt

SEQ ID NO: 818854 - DNA, 15 bp, Homo sapiens
aagccttgtgtatat

SEQ ID NO: 818855 - DNA, 15 bp, Homo sapiens
caagccttgtgtata

SEQ ID NO: 818856 - DNA, 15 bp, Homo sapiens
acaagccttgtgtat

SEQ ID NO: 818857 - DNA, 15 bp, Homo sapiens
gacaagccttgtgta

SEQ ID NO: 818858 - DNA, 15 bp, Homo sapiens
agacaagccttgtgt

SEQ ID NO: 818859 - DNA, 15 bp, Homo sapiens
aagacaagccttgtg

SEQ ID NO: 818860 - DNA, 15 bp, Homo sapiens
aaagacaagccttgt

SEQ ID NO: 818861 - DNA, 15 bp, Homo sapiens
taaagacaagccttg

SEQ ID NO: 818862 - DNA, 15 bp, Homo sapiens
ctaaagacaagcctt

SEQ ID NO: 818863 - DNA, 15 bp, Homo sapiens
gctaaagacaagcct

SEQ ID NO: 818864 - DNA, 15 bp, Homo sapiens
cgctaaagacaagcc

SEQ ID NO: 818865 - DNA, 15 bp, Homo sapiens
tcgctaaagacaagc

SEQ ID NO: 818866 - DNA, 15 bp, Homo sapiens
ctcgctaaagacaag

SEQ ID NO: 818867 - DNA, 15 bp, Homo sapiens
gctcgctaaagacaa

SEQ ID NO: 818868 - DNA, 15 bp, Homo sapiens
tgctcgctaaagaca

SEQ ID NO: 818869 - DNA, 15 bp, Homo sapiens
atgctcgctaaagac

SEQ ID NO: 818870 - DNA, 15 bp, Homo sapiens
tatgctcgctaaaga

SEQ ID NO: 818871 - DNA, 15 bp, Homo sapiens
atatgctcgctaaag

SEQ ID NO: 818872 - DNA, 15 bp, Homo sapiens
tatatgctcgctaaa

SEQ ID NO: 818873 - DNA, 15 bp, Homo sapiens
gtatatgctcgctaa

SEQ ID NO: 818874 - DNA, 15 bp, Homo sapiens
agtatatgctcgcta

SEQ ID NO: 818875 - DNA, 15 bp, Homo sapiens
gagtatatgctcgct

SEQ ID NO: 818876 - DNA, 15 bp, Homo sapiens
ggagtatatgctcgc

SEQ ID NO: 818877 - DNA, 15 bp, Homo sapiens
gggagtatatgctcg

SEQ ID NO: 818878 - DNA, 15 bp, Homo sapiens
agggagtatatgctc

SEQ ID NO: 818879 - DNA, 15 bp, Homo sapiens
tagggagtatatgct

SEQ ID NO: 818880 - DNA, 15 bp, Homo sapiens
ttagggagtatatgc

SEQ ID NO: 818881 - DNA, 15 bp, Homo sapiens
tttagggagtatatg

SEQ ID NO: 818882 - DNA, 15 bp, Homo sapiens
ctttagggagtatat

SEQ ID NO: 818883 - DNA, 15 bp, Homo sapiens
actttagggagtata

SEQ ID NO: 818884 - DNA, 15 bp, Homo sapiens
aactttagggagtat

SEQ ID NO: 818885 - DNA, 15 bp, Homo sapiens
caactttagggagta

SEQ ID NO: 818886 - DNA, 15 bp, Homo sapiens
tcaactttagggagt

SEQ ID NO: 818887 - DNA, 15 bp, Homo sapiens
atcaactttagggag

SEQ ID NO: 818888 - DNA, 15 bp, Homo sapiens
aatcaactttaggga

SEQ ID NO: 818889 - DNA, 15 bp, Homo sapiens
taatcaactttaggg

SEQ ID NO: 818890 - DNA, 15 bp, Homo sapiens
ttaatcaactttagg

SEQ ID NO: 818891 - DNA, 15 bp, Homo sapiens
cttaatcaactttag

SEQ ID NO: 818892 - DNA, 15 bp, Homo sapiens
gcttaatcaacttta

SEQ ID NO: 818893 - DNA, 15 bp, Homo sapiens
agcttaatcaacttt

SEQ ID NO: 818894 - DNA, 15 bp, Homo sapiens
cagcttaatcaactt

SEQ ID NO: 818895 - DNA, 15 bp, Homo sapiens
tcagcttaatcaact

SEQ ID NO: 818896 - DNA, 15 bp, Homo sapiens
gtcagcttaatcaac

SEQ ID NO: 818897 - DNA, 15 bp, Homo sapiens
ggtcagcttaatcaa

SEQ ID NO: 818898 - DNA, 15 bp, Homo sapiens
tggtcagcttaatca

SEQ ID NO: 818899 - DNA, 15 bp, Homo sapiens
ttggtcagcttaatc

SEQ ID NO: 818900 - DNA, 15 bp, Homo sapiens
cttggtcagcttaat

SEQ ID NO: 818901 - DNA, 15 bp, Homo sapiens
acttggtcagcttaa

SEQ ID NO: 818902 - DNA, 15 bp, Homo sapiens
cacttggtcagctta

SEQ ID NO: 818903 - DNA, 15 bp, Homo sapiens
tcacttggtcagctt

SEQ ID NO: 818904 - DNA, 15 bp, Homo sapiens
atcacttggtcagct

SEQ ID NO: 818905 - DNA, 15 bp, Homo sapiens
aatcacttggtcagc

SEQ ID NO: 818906 - DNA, 15 bp, Homo sapiens
taatcacttggtcag

SEQ ID NO: 818907 - DNA, 15 bp, Homo sapiens
gtaatcacttggtca

SEQ ID NO: 818908 - DNA, 15 bp, Homo sapiens
agtaatcacttggtc

SEQ ID NO: 818909 - DNA, 15 bp, Homo sapiens
cagtaatcacttggt

SEQ ID NO: 818910 - DNA, 15 bp, Homo sapiens
gcagtaatcacttgg

SEQ ID NO: 818911 - DNA, 15 bp, Homo sapiens
agcagtaatcacttg

SEQ ID NO: 818912 - DNA, 15 bp, Homo sapiens
aagcagtaatcactt

SEQ ID NO: 818913 - DNA, 15 bp, Homo sapiens
taagcagtaatcact

SEQ ID NO: 818914 - DNA, 15 bp, Homo sapiens
ataagcagtaatcac

SEQ ID NO: 818915 - DNA, 15 bp, Homo sapiens
tataagcagtaatca

SEQ ID NO: 818916 - DNA, 15 bp, Homo sapiens
ttataagcagtaatc

SEQ ID NO: 818917 - DNA, 15 bp, Homo sapiens
tttataagcagtaat

SEQ ID NO: 818918 - DNA, 15 bp, Homo sapiens
atttataagcagtaa

SEQ ID NO: 818919 - DNA, 15 bp, Homo sapiens
aatttataagcagta

SEQ ID NO: 818920 - DNA, 15 bp, Homo sapiens
gaatttataagcagt

SEQ ID NO: 818921 - DNA, 15 bp, Homo sapiens
tgaatttataagcag

SEQ ID NO: 818922 - DNA, 15 bp, Homo sapiens
gtgaatttataagca

SEQ ID NO: 818923 - DNA, 15 bp, Homo sapiens
ggtgaatttataagc

SEQ ID NO: 818924 - DNA, 15 bp, Homo sapiens
tggtgaatttataag

SEQ ID NO: 818925 - DNA, 15 bp, Homo sapiens
atggtgaatttataa

SEQ ID NO: 818926 - DNA, 15 bp, Homo sapiens
aatggtgaatttata

SEQ ID NO: 818927 - DNA, 15 bp, Homo sapiens
aaatggtgaatttat

SEQ ID NO: 818928 - DNA, 15 bp, Homo sapiens
aaaatggtgaattta

SEQ ID NO: 818929 - DNA, 15 bp, Homo sapiens
taaaatggtgaattt

SEQ ID NO: 818930 - DNA, 15 bp, Homo sapiens
ataaaatggtgaatt

SEQ ID NO: 818931 - DNA, 15 bp, Homo sapiens
cataaaatggtgaat

SEQ ID NO: 818932 - DNA, 15 bp, Homo sapiens
ccataaaatggtgaa

SEQ ID NO: 818933 - DNA, 15 bp, Homo sapiens
tccataaaatggtga

SEQ ID NO: 818934 - DNA, 15 bp, Homo sapiens
ctccataaaatggtg

SEQ ID NO: 818935 - DNA, 15 bp, Homo sapiens
tctccataaaatggt

SEQ ID NO: 818936 - DNA, 15 bp, Homo sapiens
ttctccataaaatgg

SEQ ID NO: 818937 - DNA, 15 bp, Homo sapiens
cttctccataaaatg

SEQ ID NO: 818938 - DNA, 15 bp, Homo sapiens
tcttctccataaaat

SEQ ID NO: 818939 - DNA, 15 bp, Homo sapiens
ttcttctccataaaa

SEQ ID NO: 818940 - DNA, 15 bp, Homo sapiens
cttcttctccataaa

SEQ ID NO: 818941 - DNA, 15 bp, Homo sapiens
gcttcttctccataa

SEQ ID NO: 818942 - DNA, 15 bp, Homo sapiens
tgcttcttctccata

SEQ ID NO: 818943 - DNA, 15 bp, Homo sapiens
ttgcttcttctccat

SEQ ID NO: 818944 - DNA, 15 bp, Homo sapiens
tttgcttcttctcca

SEQ ID NO: 818945 - DNA, 15 bp, Homo sapiens
gtttgcttcttctcc

SEQ ID NO: 818946 - DNA, 15 bp, Homo sapiens
tgtttgcttcttctc

SEQ ID NO: 818947 - DNA, 15 bp, Homo sapiens
gtgtttgcttcttct

SEQ ID NO: 818948 - DNA, 15 bp, Homo sapiens
agtgtttgcttcttc

SEQ ID NO: 818949 - DNA, 15 bp, Homo sapiens
cagtgtttgcttctt

SEQ ID NO: 818950 - DNA, 15 bp, Homo sapiens
gcagtgtttgcttct

SEQ ID NO: 818951 - DNA, 15 bp, Homo sapiens
agcagtgtttgcttc

SEQ ID NO: 818952 - DNA, 15 bp, Homo sapiens
tagcagtgtttgctt

SEQ ID NO: 818953 - DNA, 15 bp, Homo sapiens
ttagcagtgtttgct

SEQ ID NO: 818954 - DNA, 15 bp, Homo sapiens
tttagcagtgtttgc

SEQ ID NO: 818955 - DNA, 15 bp, Homo sapiens
atttagcagtgtttg

SEQ ID NO: 818956 - DNA, 15 bp, Homo sapiens
tatttagcagtgttt

SEQ ID NO: 818957 - DNA, 15 bp, Homo sapiens
gtatttagcagtgtt

SEQ ID NO: 818958 - DNA, 15 bp, Homo sapiens
ggtatttagcagtgt

SEQ ID NO: 818959 - DNA, 15 bp, Homo sapiens
aggtatttagcagtg

SEQ ID NO: 818960 - DNA, 15 bp, Homo sapiens
aaggtatttagcagt

SEQ ID NO: 818961 - DNA, 15 bp, Homo sapiens
caaggtatttagcag

SEQ ID NO: 818962 - DNA, 15 bp, Homo sapiens
acaaggtatttagca

SEQ ID NO: 818963 - DNA, 15 bp, Homo sapiens
cacaaggtatttagc

SEQ ID NO: 818964 - DNA, 15 bp, Homo sapiens
ccacaaggtatttag

SEQ ID NO: 818965 - DNA, 15 bp, Homo sapiens
tccacaaggtattta

SEQ ID NO: 818966 - DNA, 15 bp, Homo sapiens
ttccacaaggtattt

SEQ ID NO: 818967 - DNA, 15 bp, Homo sapiens
attccacaaggtatt

SEQ ID NO: 818968 - DNA, 15 bp, Homo sapiens
gattccacaaggtat

SEQ ID NO: 818969 - DNA, 15 bp, Homo sapiens
tgattccacaaggta

SEQ ID NO: 818970 - DNA, 15 bp, Homo sapiens
ctgattccacaaggt

SEQ ID NO: 818971 - DNA, 15 bp, Homo sapiens
tctgattccacaagg

SEQ ID NO: 818972 - DNA, 15 bp, Homo sapiens
ctctgattccacaag

SEQ ID NO: 818973 - DNA, 15 bp, Homo sapiens
cctctgattccacaa

SEQ ID NO: 818974 - DNA, 15 bp, Homo sapiens
tcctctgattccaca

SEQ ID NO: 818975 - DNA, 15 bp, Homo sapiens
ctcctctgattccac

SEQ ID NO: 818976 - DNA, 15 bp, Homo sapiens
cctcctctgattcca

SEQ ID NO: 818977 - DNA, 15 bp, Homo sapiens
ccctcctctgattcc

SEQ ID NO: 818978 - DNA, 15 bp, Homo sapiens
cccctcctctgattc

SEQ ID NO: 818979 - DNA, 15 bp, Homo sapiens
tcccctcctctgatt

SEQ ID NO: 818980 - DNA, 15 bp, Homo sapiens
ttcccctcctctgat

SEQ ID NO: 818981 - DNA, 15 bp, Homo sapiens
tttcccctcctctga

SEQ ID NO: 818982 - DNA, 15 bp, Homo sapiens
atttcccctcctctg

SEQ ID NO: 818983 - DNA, 15 bp, Homo sapiens
aatttcccctcctct

SEQ ID NO: 818984 - DNA, 15 bp, Homo sapiens
taatttcccctcctc

SEQ ID NO: 818985 - DNA, 15 bp, Homo sapiens
ctaatttcccctcct

SEQ ID NO: 818986 - DNA, 15 bp, Homo sapiens
actaatttcccctcc

SEQ ID NO: 818987 - DNA, 15 bp, Homo sapiens
tactaatttcccctc

SEQ ID NO: 818988 - DNA, 15 bp, Homo sapiens
ttactaatttcccct

SEQ ID NO: 818989 - DNA, 15 bp, Homo sapiens
gttactaatttcccc

SEQ ID NO: 818990 - DNA, 15 bp, Homo sapiens
agttactaatttccc

SEQ ID NO: 818991 - DNA, 15 bp, Homo sapiens
aagttactaatttcc

SEQ ID NO: 818992 - DNA, 15 bp, Homo sapiens
caagttactaatttc

SEQ ID NO: 818993 - DNA, 15 bp, Homo sapiens
tcaagttactaattt

SEQ ID NO: 818994 - DNA, 15 bp, Homo sapiens
gtcaagttactaatt

SEQ ID NO: 818995 - DNA, 15 bp, Homo sapiens
ggtcaagttactaat

SEQ ID NO: 818996 - DNA, 15 bp, Homo sapiens
gggtcaagttactaa

SEQ ID NO: 818997 - DNA, 15 bp, Homo sapiens
ggggtcaagttacta

SEQ ID NO: 818998 - DNA, 15 bp, Homo sapiens
tggggtcaagttact

SEQ ID NO: 818999 - DNA, 15 bp, Homo sapiens
ttggggtcaagttac

SEQ ID NO: 819000 - DNA, 15 bp, Homo sapiens
attggggtcaagtta

SEQ ID NO: 819001 - DNA, 15 bp, Homo sapiens
tattggggtcaagtt

SEQ ID NO: 819002 - DNA, 15 bp, Homo sapiens
gtattggggtcaagt

SEQ ID NO: 819003 - DNA, 15 bp, Homo sapiens
agtattggggtcaag

SEQ ID NO: 819004 - DNA, 15 bp, Homo sapiens
cagtattggggtcaa

SEQ ID NO: 819005 - DNA, 15 bp, Homo sapiens
gcagtattggggtca

SEQ ID NO: 819006 - DNA, 15 bp, Homo sapiens
cgcagtattggggtc

SEQ ID NO: 819007 - DNA, 15 bp, Homo sapiens
tcgcagtattggggt

SEQ ID NO: 819008 - DNA, 15 bp, Homo sapiens
atcgcagtattgggg

SEQ ID NO: 819009 - DNA, 15 bp, Homo sapiens
aatcgcagtattggg

SEQ ID NO: 819010 - DNA, 15 bp, Homo sapiens
aaatcgcagtattgg

SEQ ID NO: 819011 - DNA, 15 bp, Homo sapiens
aaaatcgcagtattg

SEQ ID NO: 819012 - DNA, 15 bp, Homo sapiens
taaaatcgcagtatt

SEQ ID NO: 819013 - DNA, 15 bp, Homo sapiens
ttaaaatcgcagtat

SEQ ID NO: 819014 - DNA, 15 bp, Homo sapiens
tttaaaatcgcagta

SEQ ID NO: 819015 - DNA, 15 bp, Homo sapiens
atttaaaatcgcagt

SEQ ID NO: 819016 - DNA, 15 bp, Homo sapiens
aatttaaaatcgcag

SEQ ID NO: 819017 - DNA, 15 bp, Homo sapiens
caatttaaaatcgca

SEQ ID NO: 819018 - DNA, 15 bp, Homo sapiens
tcaatttaaaatcgc

SEQ ID NO: 819019 - DNA, 15 bp, Homo sapiens
ttcaatttaaaatcg

SEQ ID NO: 819020 - DNA, 15 bp, Homo sapiens
attcaatttaaaatc

SEQ ID NO: 819021 - DNA, 15 bp, Homo sapiens
aattcaatttaaaat

SEQ ID NO: 819022 - DNA, 15 bp, Homo sapiens
gaattcaatttaaaa

SEQ ID NO: 819023 - DNA, 15 bp, Homo sapiens
agaattcaatttaaa

SEQ ID NO: 819024 - DNA, 15 bp, Homo sapiens
aagaattcaatttaa

SEQ ID NO: 819025 - DNA, 15 bp, Homo sapiens
caagaattcaattta

SEQ ID NO: 819026 - DNA, 15 bp, Homo sapiens
tcaagaattcaattt

SEQ ID NO: 819027 - DNA, 15 bp, Homo sapiens
ttcaagaattcaatt

SEQ ID NO: 819028 - DNA, 15 bp, Homo sapiens
cttcaagaattcaat

SEQ ID NO: 819029 - DNA, 15 bp, Homo sapiens
gcttcaagaattcaa

SEQ ID NO: 819030 - DNA, 15 bp, Homo sapiens
ggcttcaagaattca

SEQ ID NO: 819031 - DNA, 15 bp, Homo sapiens
aggcttcaagaattc

SEQ ID NO: 819032 - DNA, 15 bp, Homo sapiens
taggcttcaagaatt

SEQ ID NO: 819033 - DNA, 15 bp, Homo sapiens
gtaggcttcaagaat

SEQ ID NO: 819034 - DNA, 15 bp, Homo sapiens
tgtaggcttcaagaa

SEQ ID NO: 819035 - DNA, 15 bp, Homo sapiens
ttgtaggcttcaaga

SEQ ID NO: 819036 - DNA, 15 bp, Homo sapiens
cttgtaggcttcaag

SEQ ID NO: 819037 - DNA, 15 bp, Homo sapiens
acttgtaggcttcaa

SEQ ID NO: 819038 - DNA, 15 bp, Homo sapiens
aacttgtaggcttca

SEQ ID NO: 819039 - DNA, 15 bp, Homo sapiens
aaacttgtaggcttc

SEQ ID NO: 819040 - DNA, 15 bp, Homo sapiens
aaaacttgtaggctt

SEQ ID NO: 819041 - DNA, 15 bp, Homo sapiens
taaaacttgtaggct

SEQ ID NO: 819042 - DNA, 15 bp, Homo sapiens
gtaaaacttgtaggc

SEQ ID NO: 819043 - DNA, 15 bp, Homo sapiens
tgtaaaacttgtagg

SEQ ID NO: 819044 - DNA, 15 bp, Homo sapiens
gtgtaaaacttgtag

SEQ ID NO: 819045 - DNA, 15 bp, Homo sapiens
tgtgtaaaacttgta

SEQ ID NO: 819046 - DNA, 15 bp, Homo sapiens
ctgtgtaaaacttgt

SEQ ID NO: 819047 - DNA, 15 bp, Homo sapiens
cctgtgtaaaacttg

SEQ ID NO: 819048 - DNA, 15 bp, Homo sapiens
tcctgtgtaaaactt

SEQ ID NO: 819049 - DNA, 15 bp, Homo sapiens
gtcctgtgtaaaact

SEQ ID NO: 819050 - DNA, 15 bp, Homo sapiens
agtcctgtgtaaaac

SEQ ID NO: 819051 - DNA, 15 bp, Homo sapiens
aagtcctgtgtaaaa

SEQ ID NO: 819052 - DNA, 15 bp, Homo sapiens
aaagtcctgtgtaaa

SEQ ID NO: 819053 - DNA, 15 bp, Homo sapiens
taaagtcctgtgtaa

SEQ ID NO: 819054 - DNA, 15 bp, Homo sapiens
ctaaagtcctgtgta

SEQ ID NO: 819055 - DNA, 15 bp, Homo sapiens
tctaaagtcctgtgt

SEQ ID NO: 819056 - DNA, 15 bp, Homo sapiens
ctctaaagtcctgtg

SEQ ID NO: 819057 - DNA, 15 bp, Homo sapiens
tctctaaagtcctgt

SEQ ID NO: 819058 - DNA, 15 bp, Homo sapiens
ctctctaaagtcctg

SEQ ID NO: 819059 - DNA, 15 bp, Homo sapiens
gctctctaaagtcct

SEQ ID NO: 819060 - DNA, 15 bp, Homo sapiens
agctctctaaagtcc

SEQ ID NO: 819061 - DNA, 15 bp, Homo sapiens
cagctctctaaagtc

SEQ ID NO: 819062 - DNA, 15 bp, Homo sapiens
ccagctctctaaagt

SEQ ID NO: 819063 - DNA, 15 bp, Homo sapiens
tccagctctctaaag

SEQ ID NO: 819064 - DNA, 15 bp, Homo sapiens
atccagctctctaaa

SEQ ID NO: 819065 - DNA, 15 bp, Homo sapiens
tatccagctctctaa

SEQ ID NO: 819066 - DNA, 15 bp, Homo sapiens
ctatccagctctcta

SEQ ID NO: 819067 - DNA, 15 bp, Homo sapiens
actatccagctctct

SEQ ID NO: 819068 - DNA, 15 bp, Homo sapiens
tactatccagctctc

SEQ ID NO: 819069 - DNA, 15 bp, Homo sapiens
atactatccagctct

SEQ ID NO: 819070 - DNA, 15 bp, Homo sapiens
gatactatccagctc

SEQ ID NO: 819071 - DNA, 15 bp, Homo sapiens
tgatactatccagct

SEQ ID NO: 819072 - DNA, 15 bp, Homo sapiens
gtgatactatccagc

SEQ ID NO: 819073 - DNA, 15 bp, Homo sapiens
agtgatactatccag

SEQ ID NO: 819074 - DNA, 15 bp, Homo sapiens
aagtgatactatcca

SEQ ID NO: 819075 - DNA, 15 bp, Homo sapiens
aaagtgatactatcc

SEQ ID NO: 819076 - DNA, 15 bp, Homo sapiens
caaagtgatactatc

SEQ ID NO: 819077 - DNA, 15 bp, Homo sapiens
acaaagtgatactat

SEQ ID NO: 819078 - DNA, 15 bp, Homo sapiens
gacaaagtgatacta

SEQ ID NO: 819079 - DNA, 15 bp, Homo sapiens
tgacaaagtgatact

SEQ ID NO: 819080 - DNA, 15 bp, Homo sapiens
ttgacaaagtgatac

SEQ ID NO: 819081 - DNA, 15 bp, Homo sapiens
cttgacaaagtgata

SEQ ID NO: 819082 - DNA, 15 bp, Homo sapiens
acttgacaaagtgat

SEQ ID NO: 819083 - DNA, 15 bp, Homo sapiens
gacttgacaaagtga

SEQ ID NO: 819084 - DNA, 15 bp, Homo sapiens
ggacttgacaaagtg

SEQ ID NO: 819085 - DNA, 15 bp, Homo sapiens
aggacttgacaaagt

SEQ ID NO: 819086 - DNA, 15 bp, Homo sapiens
taggacttgacaaag

SEQ ID NO: 819087 - DNA, 15 bp, Homo sapiens
gtaggacttgacaaa

SEQ ID NO: 819088 - DNA, 15 bp, Homo sapiens
agtaggacttgacaa

SEQ ID NO: 819089 - DNA, 15 bp, Homo sapiens
aagtaggacttgaca

SEQ ID NO: 819090 - DNA, 15 bp, Homo sapiens
aaagtaggacttgac

SEQ ID NO: 819091 - DNA, 15 bp, Homo sapiens
aaaagtaggacttga

SEQ ID NO: 819092 - DNA, 15 bp, Homo sapiens
taaaagtaggacttg

SEQ ID NO: 819093 - DNA, 15 bp, Homo sapiens
gtaaaagtaggactt

SEQ ID NO: 819094 - DNA, 15 bp, Homo sapiens
agtaaaagtaggact

SEQ ID NO: 819095 - DNA, 15 bp, Homo sapiens
tagtaaaagtaggac

SEQ ID NO: 819096 - DNA, 15 bp, Homo sapiens
atagtaaaagtagga

SEQ ID NO: 819097 - DNA, 15 bp, Homo sapiens
catagtaaaagtagg

SEQ ID NO: 819098 - DNA, 15 bp, Homo sapiens
tcatagtaaaagtag

SEQ ID NO: 819099 - DNA, 15 bp, Homo sapiens
atcatagtaaaagta

SEQ ID NO: 819100 - DNA, 15 bp, Homo sapiens
aatcatagtaaaagt

SEQ ID NO: 819101 - DNA, 15 bp, Homo sapiens
gaatcatagtaaaag

SEQ ID NO: 819102 - DNA, 15 bp, Homo sapiens
agaatcatagtaaaa

SEQ ID NO: 819103 - DNA, 15 bp, Homo sapiens
aagaatcatagtaaa

SEQ ID NO: 819104 - DNA, 15 bp, Homo sapiens
aaagaatcatagtaa

SEQ ID NO: 819105 - DNA, 15 bp, Homo sapiens
caaagaatcatagta

SEQ ID NO: 819106 - DNA, 15 bp, Homo sapiens
tcaaagaatcatagt

SEQ ID NO: 819107 - DNA, 15 bp, Homo sapiens
ctcaaagaatcatag

SEQ ID NO: 819108 - DNA, 15 bp, Homo sapiens
tctcaaagaatcata

SEQ ID NO: 819109 - DNA, 15 bp, Homo sapiens
ttctcaaagaatcat

SEQ ID NO: 819110 - DNA, 15 bp, Homo sapiens
tttctcaaagaatca

SEQ ID NO: 819111 - DNA, 15 bp, Homo sapiens
ttttctcaaagaatc

SEQ ID NO: 819112 - DNA, 15 bp, Homo sapiens
tttttctcaaagaat

SEQ ID NO: 819113 - DNA, 15 bp, Homo sapiens
atttttctcaaagaa

SEQ ID NO: 819114 - DNA, 15 bp, Homo sapiens
tatttttctcaaaga

SEQ ID NO: 819115 - DNA, 15 bp, Homo sapiens
gtatttttctcaaag

SEQ ID NO: 819116 - DNA, 15 bp, Homo sapiens
tgtatttttctcaaa

SEQ ID NO: 819117 - DNA, 15 bp, Homo sapiens
atgtatttttctcaa

SEQ ID NO: 819118 - DNA, 15 bp, Homo sapiens
gatgtatttttctca

SEQ ID NO: 819119 - DNA, 15 bp, Homo sapiens
agatgtatttttctc

SEQ ID NO: 819120 - DNA, 15 bp, Homo sapiens
cagatgtatttttct

SEQ ID NO: 819121 - DNA, 15 bp, Homo sapiens
tcagatgtatttttc

SEQ ID NO: 819122 - DNA, 15 bp, Homo sapiens
gtcagatgtattttt

SEQ ID NO: 819123 - DNA, 15 bp, Homo sapiens
agtcagatgtatttt

SEQ ID NO: 819124 - DNA, 15 bp, Homo sapiens
tagtcagatgtattt

SEQ ID NO: 819125 - DNA, 15 bp, Homo sapiens
ttagtcagatgtatt

SEQ ID NO: 819126 - DNA, 15 bp, Homo sapiens
tttagtcagatgtat

SEQ ID NO: 819127 - DNA, 15 bp, Homo sapiens
atttagtcagatgta

SEQ ID NO: 819128 - DNA, 15 bp, Homo sapiens
tatttagtcagatgt

SEQ ID NO: 819129 - DNA, 15 bp, Homo sapiens
ttatttagtcagatg

SEQ ID NO: 819130 - DNA, 15 bp, Homo sapiens
gttatttagtcagat

SEQ ID NO: 819131 - DNA, 15 bp, Homo sapiens
agttatttagtcaga

SEQ ID NO: 819132 - DNA, 15 bp, Homo sapiens
gagttatttagtcag

SEQ ID NO: 819133 - DNA, 15 bp, Homo sapiens
agagttatttagtca

SEQ ID NO: 819134 - DNA, 15 bp, Homo sapiens
cagagttatttagtc

SEQ ID NO: 819135 - DNA, 15 bp, Homo sapiens
tcagagttatttagt

SEQ ID NO: 819136 - DNA, 15 bp, Homo sapiens
ttcagagttatttag

SEQ ID NO: 819137 - DNA, 15 bp, Homo sapiens
attcagagttattta

SEQ ID NO: 819138 - DNA, 15 bp, Homo sapiens
gattcagagttattt

SEQ ID NO: 819139 - DNA, 15 bp, Homo sapiens
agattcagagttatt

SEQ ID NO: 819140 - DNA, 15 bp, Homo sapiens
tagattcagagttat

SEQ ID NO: 819141 - DNA, 15 bp, Homo sapiens
ttagattcagagtta

SEQ ID NO: 819142 - DNA, 15 bp, Homo sapiens
tttagattcagagtt

SEQ ID NO: 819143 - DNA, 15 bp, Homo sapiens
atttagattcagagt

SEQ ID NO: 819144 - DNA, 15 bp, Homo sapiens
aatttagattcagag

SEQ ID NO: 819145 - DNA, 15 bp, Homo sapiens
caatttagattcaga

SEQ ID NO: 819146 - DNA, 15 bp, Homo sapiens
ccaatttagattcag

SEQ ID NO: 819147 - DNA, 15 bp, Homo sapiens
tccaatttagattca

SEQ ID NO: 819148 - DNA, 15 bp, Homo sapiens
atccaatttagattc

SEQ ID NO: 819149 - DNA, 15 bp, Homo sapiens
tatccaatttagatt

SEQ ID NO: 819150 - DNA, 15 bp, Homo sapiens
ttatccaatttagat

SEQ ID NO: 819151 - DNA, 15 bp, Homo sapiens
tttatccaatttaga

SEQ ID NO: 819152 - DNA, 15 bp, Homo sapiens
ttttatccaatttag

SEQ ID NO: 819153 - DNA, 15 bp, Homo sapiens
attttatccaattta

SEQ ID NO: 819154 - DNA, 15 bp, Homo sapiens
tattttatccaattt

SEQ ID NO: 819155 - DNA, 15 bp, Homo sapiens
ttattttatccaatt

SEQ ID NO: 819156 - DNA, 15 bp, Homo sapiens
tttattttatccaat

SEQ ID NO: 819157 - DNA, 15 bp, Homo sapiens
atttattttatccaa

SEQ ID NO: 819158 - DNA, 15 bp, Homo sapiens
catttattttatcca

SEQ ID NO: 819159 - DNA, 15 bp, Homo sapiens
acatttattttatcc

SEQ ID NO: 819160 - DNA, 15 bp, Homo sapiens
cacatttattttatc

SEQ ID NO: 819161 - DNA, 15 bp, Homo sapiens
tcacatttattttat

SEQ ID NO: 819162 - DNA, 15 bp, Homo sapiens
gtcacatttatttta

SEQ ID NO: 819163 - DNA, 15 bp, Homo sapiens
tgtcacatttatttt

SEQ ID NO: 819164 - DNA, 15 bp, Homo sapiens
atgtcacatttattt

SEQ ID NO: 819165 - DNA, 15 bp, Homo sapiens
aatgtcacatttatt

SEQ ID NO: 819166 - DNA, 15 bp, Homo sapiens
gaatgtcacatttat

SEQ ID NO: 819167 - DNA, 15 bp, Homo sapiens
tgaatgtcacattta

SEQ ID NO: 819168 - DNA, 15 bp, Homo sapiens
ttgaatgtcacattt

SEQ ID NO: 819169 - DNA, 15 bp, Homo sapiens
tttgaatgtcacatt

SEQ ID NO: 819170 - DNA, 15 bp, Homo sapiens
ttttgaatgtcacat

SEQ ID NO: 819171 - DNA, 15 bp, Homo sapiens
attttgaatgtcaca

SEQ ID NO: 819172 - DNA, 15 bp, Homo sapiens
cattttgaatgtcac

SEQ ID NO: 819173 - DNA, 15 bp, Homo sapiens
acattttgaatgtca

SEQ ID NO: 819174 - DNA, 15 bp, Homo sapiens
aacattttgaatgtc

SEQ ID NO: 819175 - DNA, 15 bp, Homo sapiens
taacattttgaatgt

SEQ ID NO: 819176 - DNA, 15 bp, Homo sapiens
ataacattttgaatg

SEQ ID NO: 819177 - DNA, 15 bp, Homo sapiens
aataacattttgaat

SEQ ID NO: 819178 - DNA, 15 bp, Homo sapiens
aaataacattttgaa

SEQ ID NO: 819179 - DNA, 15 bp, Homo sapiens
taaataacattttga

SEQ ID NO: 819180 - DNA, 15 bp, Homo sapiens
ataaataacattttg

SEQ ID NO: 819181 - DNA, 15 bp, Homo sapiens
cataaataacatttt

SEQ ID NO: 819182 - DNA, 15 bp, Homo sapiens
tcataaataacattt

SEQ ID NO: 819183 - DNA, 15 bp, Homo sapiens
atcataaataacatt

SEQ ID NO: 819184 - DNA, 15 bp, Homo sapiens
aatcataaataacat

SEQ ID NO: 819185 - DNA, 15 bp, Homo sapiens
aaatcataaataaca

SEQ ID NO: 819186 - DNA, 15 bp, Homo sapiens
aaaatcataaataac

SEQ ID NO: 819187 - DNA, 15 bp, Homo sapiens
taaaatcataaataa

SEQ ID NO: 819188 - DNA, 15 bp, Homo sapiens
ctaaaatcataaata

SEQ ID NO: 819189 - DNA, 15 bp, Homo sapiens
tctaaaatcataaat

SEQ ID NO: 819190 - DNA, 15 bp, Homo sapiens
ttctaaaatcataaa

SEQ ID NO: 819191 - DNA, 15 bp, Homo sapiens
tttctaaaatcataa

SEQ ID NO: 819192 - DNA, 15 bp, Homo sapiens
ttttctaaaatcata

SEQ ID NO: 819193 - DNA, 15 bp, Homo sapiens
tttttctaaaatcat

SEQ ID NO: 819194 - DNA, 15 bp, Homo sapiens
atttttctaaaatca

SEQ ID NO: 819195 - DNA, 15 bp, Homo sapiens
tatttttctaaaatc

SEQ ID NO: 819196 - DNA, 15 bp, Homo sapiens
atatttttctaaaat

SEQ ID NO: 819197 - DNA, 15 bp, Homo sapiens
gatatttttctaaaa

SEQ ID NO: 819198 - DNA, 15 bp, Homo sapiens
ggatatttttctaaa

SEQ ID NO: 819199 - DNA, 15 bp, Homo sapiens
aggatatttttctaa

SEQ ID NO: 819200 - DNA, 15 bp, Homo sapiens
aaggatatttttcta

SEQ ID NO: 819201 - DNA, 15 bp, Homo sapiens
taaggatatttttct

SEQ ID NO: 819202 - DNA, 15 bp, Homo sapiens
ataaggatatttttc

SEQ ID NO: 819203 - DNA, 15 bp, Homo sapiens
tataaggatattttt

SEQ ID NO: 819204 - DNA, 15 bp, Homo sapiens
ctataaggatatttt

SEQ ID NO: 819205 - DNA, 15 bp, Homo sapiens
tctataaggatattt

SEQ ID NO: 819206 - DNA, 15 bp, Homo sapiens
gtctataaggatatt

SEQ ID NO: 819207 - DNA, 15 bp, Homo sapiens
tgtctataaggatat

SEQ ID NO: 819208 - DNA, 15 bp, Homo sapiens
gtgtctataaggata

SEQ ID NO: 819209 - DNA, 15 bp, Homo sapiens
agtgtctataaggat

SEQ ID NO: 819210 - DNA, 15 bp, Homo sapiens
tagtgtctataagga

SEQ ID NO: 819211 - DNA, 15 bp, Homo sapiens
ctagtgtctataagg

SEQ ID NO: 819212 - DNA, 15 bp, Homo sapiens
tctagtgtctataag

SEQ ID NO: 819213 - DNA, 15 bp, Homo sapiens
atctagtgtctataa

SEQ ID NO: 819214 - DNA, 15 bp, Homo sapiens
catctagtgtctata

SEQ ID NO: 819215 - DNA, 15 bp, Homo sapiens
tcatctagtgtctat

SEQ ID NO: 819216 - DNA, 15 bp, Homo sapiens
ctcatctagtgtcta

SEQ ID NO: 819217 - DNA, 15 bp, Homo sapiens
actcatctagtgtct

SEQ ID NO: 819218 - DNA, 15 bp, Homo sapiens
aactcatctagtgtc

SEQ ID NO: 819219 - DNA, 15 bp, Homo sapiens
aaactcatctagtgt

SEQ ID NO: 819220 - DNA, 15 bp, Homo sapiens
aaaactcatctagtg

SEQ ID NO: 819221 - DNA, 15 bp, Homo sapiens
taaaactcatctagt

SEQ ID NO: 819222 - DNA, 15 bp, Homo sapiens
ctaaaactcatctag

SEQ ID NO: 819223 - DNA, 15 bp, Homo sapiens
actaaaactcatcta

SEQ ID NO: 819224 - DNA, 15 bp, Homo sapiens
gactaaaactcatct

SEQ ID NO: 819225 - DNA, 15 bp, Homo sapiens
agactaaaactcatc

SEQ ID NO: 819226 - DNA, 15 bp, Homo sapiens
gagactaaaactcat

SEQ ID NO: 819227 - DNA, 15 bp, Homo sapiens
tgagactaaaactca

SEQ ID NO: 819228 - DNA, 15 bp, Homo sapiens
ttgagactaaaactc

SEQ ID NO: 819229 - DNA, 15 bp, Homo sapiens
tttgagactaaaact

SEQ ID NO: 819230 - DNA, 15 bp, Homo sapiens
atttgagactaaaac

SEQ ID NO: 819231 - DNA, 15 bp, Homo sapiens
gatttgagactaaaa

SEQ ID NO: 819232 - DNA, 15 bp, Homo sapiens
tgatttgagactaaa

SEQ ID NO: 819233 - DNA, 15 bp, Homo sapiens
ttgatttgagactaa

SEQ ID NO: 819234 - DNA, 15 bp, Homo sapiens
attgatttgagacta

SEQ ID NO: 819235 - DNA, 15 bp, Homo sapiens
gattgatttgagact

SEQ ID NO: 819236 - DNA, 15 bp, Homo sapiens
ggattgatttgagac

SEQ ID NO: 819237 - DNA, 15 bp, Homo sapiens
aggattgatttgaga

SEQ ID NO: 819238 - DNA, 15 bp, Homo sapiens
gaggattgatttgag

SEQ ID NO: 819239 - DNA, 15 bp, Homo sapiens
ggaggattgatttga

SEQ ID NO: 819240 - DNA, 15 bp, Homo sapiens
gggaggattgatttg

SEQ ID NO: 819241 - DNA, 15 bp, Homo sapiens
agggaggattgattt

SEQ ID NO: 819242 - DNA, 15 bp, Homo sapiens
tagggaggattgatt

SEQ ID NO: 819243 - DNA, 15 bp, Homo sapiens
atagggaggattgat

SEQ ID NO: 819244 - DNA, 15 bp, Homo sapiens
gatagggaggattga

SEQ ID NO: 819245 - DNA, 15 bp, Homo sapiens
tgatagggaggattg

SEQ ID NO: 819246 - DNA, 15 bp, Homo sapiens
atgatagggaggatt

SEQ ID NO: 819247 - DNA, 15 bp, Homo sapiens
tatgatagggaggat

SEQ ID NO: 819248 - DNA, 15 bp, Homo sapiens
ctatgatagggagga

SEQ ID NO: 819249 - DNA, 15 bp, Homo sapiens
actatgatagggagg

SEQ ID NO: 819250 - DNA, 15 bp, Homo sapiens
gactatgatagggag

SEQ ID NO: 819251 - DNA, 15 bp, Homo sapiens
tgactatgataggga

SEQ ID NO: 819252 - DNA, 15 bp, Homo sapiens
gtgactatgataggg

SEQ ID NO: 819253 - DNA, 15 bp, Homo sapiens
agtgactatgatagg

SEQ ID NO: 819254 - DNA, 15 bp, Homo sapiens
aagtgactatgatag

SEQ ID NO: 819255 - DNA, 15 bp, Homo sapiens
tgcttttataaaaag

SEQ ID NO: 819256 - DNA, 15 bp, Homo sapiens
ctgcttttataaaaa

SEQ ID NO: 819257 - DNA, 15 bp, Homo sapiens
gctgcttttataaaa

SEQ ID NO: 819258 - DNA, 15 bp, Homo sapiens
agctgcttttataaa

SEQ ID NO: 819259 - DNA, 15 bp, Homo sapiens
gagctgcttttataa

SEQ ID NO: 819260 - DNA, 15 bp, Homo sapiens
tgagctgcttttata

SEQ ID NO: 819261 - DNA, 15 bp, Homo sapiens
gtgagctgcttttat

SEQ ID NO: 819262 - DNA, 15 bp, Homo sapiens
tgtgagctgctttta

SEQ ID NO: 819263 - DNA, 15 bp, Homo sapiens
ttgtgagctgctttt

SEQ ID NO: 819264 - DNA, 15 bp, Homo sapiens
tttgtgagctgcttt

SEQ ID NO: 819265 - DNA, 15 bp, Homo sapiens
atttgtgagctgctt

SEQ ID NO: 819266 - DNA, 15 bp, Homo sapiens
aatttgtgagctgct

SEQ ID NO: 819267 - DNA, 15 bp, Homo sapiens
caatttgtgagctgc

SEQ ID NO: 819268 - DNA, 15 bp, Homo sapiens
acaatttgtgagctg

SEQ ID NO: 819269 - DNA, 15 bp, Homo sapiens
cacaatttgtgagct

SEQ ID NO: 819270 - DNA, 15 bp, Homo sapiens
acacaatttgtgagc

SEQ ID NO: 819271 - DNA, 15 bp, Homo sapiens
aacacaatttgtgag

SEQ ID NO: 819272 - DNA, 15 bp, Homo sapiens
taacacaatttgtga

SEQ ID NO: 819273 - DNA, 15 bp, Homo sapiens
gtaacacaatttgtg

SEQ ID NO: 819274 - DNA, 15 bp, Homo sapiens
agtaacacaatttgt

SEQ ID NO: 819275 - DNA, 15 bp, Homo sapiens
aagtaacacaatttg

SEQ ID NO: 819276 - DNA, 15 bp, Homo sapiens
aaagtaacacaattt

SEQ ID NO: 819277 - DNA, 15 bp, Homo sapiens
caaagtaacacaatt

SEQ ID NO: 819278 - DNA, 15 bp, Homo sapiens
tcaaagtaacacaat

SEQ ID NO: 819279 - DNA, 15 bp, Homo sapiens
ttcaaagtaacacaa

SEQ ID NO: 819280 - DNA, 15 bp, Homo sapiens
gttcaaagtaacaca

SEQ ID NO: 819281 - DNA, 15 bp, Homo sapiens
agttcaaagtaacac

SEQ ID NO: 819282 - DNA, 15 bp, Homo sapiens
cagttcaaagtaaca

SEQ ID NO: 819283 - DNA, 15 bp, Homo sapiens
tcagttcaaagtaac

SEQ ID NO: 819284 - DNA, 15 bp, Homo sapiens
ttcagttcaaagtaa

SEQ ID NO: 819285 - DNA, 15 bp, Homo sapiens
gttcagttcaaagta

SEQ ID NO: 819286 - DNA, 15 bp, Homo sapiens
agttcagttcaaagt

SEQ ID NO: 819287 - DNA, 15 bp, Homo sapiens
cagttcagttcaaag

SEQ ID NO: 819288 - DNA, 15 bp, Homo sapiens
ccagttcagttcaaa

SEQ ID NO: 819289 - DNA, 15 bp, Homo sapiens
gccagttcagttcaa

SEQ ID NO: 819290 - DNA, 15 bp, Homo sapiens
ggccagttcagttca

SEQ ID NO: 819291 - DNA, 15 bp, Homo sapiens
tggccagttcagttc

SEQ ID NO: 819292 - DNA, 15 bp, Homo sapiens
atggccagttcagtt

SEQ ID NO: 819293 - DNA, 15 bp, Homo sapiens
aatggccagttcagt

SEQ ID NO: 819294 - DNA, 15 bp, Homo sapiens
aaatggccagttcag

SEQ ID NO: 819295 - DNA, 15 bp, Homo sapiens
taaatggccagttca

SEQ ID NO: 819296 - DNA, 15 bp, Homo sapiens
ataaatggccagttc

SEQ ID NO: 819297 - DNA, 15 bp, Homo sapiens
cataaatggccagtt

SEQ ID NO: 819298 - DNA, 15 bp, Homo sapiens
ccataaatggccagt

SEQ ID NO: 819299 - DNA, 15 bp, Homo sapiens
cccataaatggccag

SEQ ID NO: 819300 - DNA, 15 bp, Homo sapiens
tcccataaatggcca

SEQ ID NO: 819301 - DNA, 15 bp, Homo sapiens
ttcccataaatggcc

SEQ ID NO: 819302 - DNA, 15 bp, Homo sapiens
tttcccataaatggc

SEQ ID NO: 819303 - DNA, 15 bp, Homo sapiens
ctttcccataaatgg

SEQ ID NO: 819304 - DNA, 15 bp, Homo sapiens
cctttcccataaatg

SEQ ID NO: 819305 - DNA, 15 bp, Homo sapiens
acctttcccataaat

SEQ ID NO: 819306 - DNA, 15 bp, Homo sapiens
gacctttcccataaa

SEQ ID NO: 819307 - DNA, 15 bp, Homo sapiens
tgacctttcccataa

SEQ ID NO: 819308 - DNA, 15 bp, Homo sapiens
gtgacctttcccata

SEQ ID NO: 819309 - DNA, 15 bp, Homo sapiens
agtgacctttcccat

SEQ ID NO: 819310 - DNA, 15 bp, Homo sapiens
cagtgacctttccca

SEQ ID NO: 819311 - DNA, 15 bp, Homo sapiens
ccagtgacctttccc

SEQ ID NO: 819312 - DNA, 15 bp, Homo sapiens
cccagtgacctttcc

SEQ ID NO: 819313 - DNA, 15 bp, Homo sapiens
acccagtgacctttc

SEQ ID NO: 819314 - DNA, 15 bp, Homo sapiens
aacccagtgaccttt

SEQ ID NO: 819315 - DNA, 15 bp, Homo sapiens
caacccagtgacctt

SEQ ID NO: 819316 - DNA, 15 bp, Homo sapiens
acaacccagtgacct

SEQ ID NO: 819317 - DNA, 15 bp, Homo sapiens
tacaacccagtgacc

SEQ ID NO: 819318 - DNA, 15 bp, Homo sapiens
ttacaacccagtgac

SEQ ID NO: 819319 - DNA, 15 bp, Homo sapiens
tttacaacccagtga

SEQ ID NO: 819320 - DNA, 15 bp, Homo sapiens
atttacaacccagtg

SEQ ID NO: 819321 - DNA, 15 bp, Homo sapiens
tatttacaacccagt

SEQ ID NO: 819322 - DNA, 15 bp, Homo sapiens
ttatttacaacccag

SEQ ID NO: 819323 - DNA, 15 bp, Homo sapiens
cttatttacaaccca

SEQ ID NO: 819324 - DNA, 15 bp, Homo sapiens
ccttatttacaaccc

SEQ ID NO: 819325 - DNA, 15 bp, Homo sapiens
tccttatttacaacc

SEQ ID NO: 819326 - DNA, 15 bp, Homo sapiens
gtccttatttacaac

SEQ ID NO: 819327 - DNA, 15 bp, Homo sapiens
ggtccttatttacaa

SEQ ID NO: 819328 - DNA, 15 bp, Homo sapiens
tggtccttatttaca

SEQ ID NO: 819329 - DNA, 15 bp, Homo sapiens
ttggtccttatttac

SEQ ID NO: 819330 - DNA, 15 bp, Homo sapiens
tttggtccttattta

SEQ ID NO: 819331 - DNA, 15 bp, Homo sapiens
ttttggtccttattt

SEQ ID NO: 819332 - DNA, 15 bp, Homo sapiens
cttttggtccttatt

SEQ ID NO: 819333 - DNA, 15 bp, Homo sapiens
tcttttggtccttat

SEQ ID NO: 819334 - DNA, 15 bp, Homo sapiens
ctcttttggtcctta

SEQ ID NO: 819335 - DNA, 15 bp, Homo sapiens
actcttttggtcctt

SEQ ID NO: 819336 - DNA, 15 bp, Homo sapiens
aactcttttggtcct

SEQ ID NO: 819337 - DNA, 15 bp, Homo sapiens
taactcttttggtcc

SEQ ID NO: 819338 - DNA, 15 bp, Homo sapiens
gtaactcttttggtc

SEQ ID NO: 819339 - DNA, 15 bp, Homo sapiens
cgtaactcttttggt

SEQ ID NO: 819340 - DNA, 15 bp, Homo sapiens
acgtaactcttttgg

SEQ ID NO: 819341 - DNA, 15 bp, Homo sapiens
aacgtaactcttttg

SEQ ID NO: 819342 - DNA, 15 bp, Homo sapiens
aaacgtaactctttt

SEQ ID NO: 819343 - DNA, 15 bp, Homo sapiens
taaacgtaactcttt

SEQ ID NO: 819344 - DNA, 15 bp, Homo sapiens
ataaacgtaactctt

SEQ ID NO: 819345 - DNA, 15 bp, Homo sapiens
tataaacgtaactct

SEQ ID NO: 819346 - DNA, 15 bp, Homo sapiens
atataaacgtaactc

SEQ ID NO: 819347 - DNA, 15 bp, Homo sapiens
aatataaacgtaact

SEQ ID NO: 819348 - DNA, 15 bp, Homo sapiens
aaatataaacgtaac

SEQ ID NO: 819349 - DNA, 15 bp, Homo sapiens
aaaatataaacgtaa

SEQ ID NO: 819350 - DNA, 15 bp, Homo sapiens
aaaaatataaacgta

SEQ ID NO: 819351 - DNA, 15 bp, Homo sapiens
aaaaaatataaacgt

SEQ ID NO: 819352 - DNA, 15 bp, Homo sapiens
taaaaaatataaacg

SEQ ID NO: 819353 - DNA, 15 bp, Homo sapiens
ttaaaaaatataaac

SEQ ID NO: 819354 - DNA, 15 bp, Homo sapiens
tttaaaaaatataaa

SEQ ID NO: 819355 - DNA, 15 bp, Homo sapiens
ttttaaaaaatataa

SEQ ID NO: 819356 - DNA, 15 bp, Homo sapiens
cttttaaaaaatata

SEQ ID NO: 819357 - DNA, 15 bp, Homo sapiens
tcttttaaaaaatat

SEQ ID NO: 819358 - DNA, 15 bp, Homo sapiens
ctcttttaaaaaata

SEQ ID NO: 819359 - DNA, 15 bp, Homo sapiens
tctcttttaaaaaat

SEQ ID NO: 819360 - DNA, 15 bp, Homo sapiens
atctcttttaaaaaa

SEQ ID NO: 819361 - DNA, 15 bp, Homo sapiens
aatctcttttaaaaa

SEQ ID NO: 819362 - DNA, 15 bp, Homo sapiens
caatctcttttaaaa

SEQ ID NO: 819363 - DNA, 15 bp, Homo sapiens
tcaatctcttttaaa

SEQ ID NO: 819364 - DNA, 15 bp, Homo sapiens
ctcaatctcttttaa

SEQ ID NO: 819365 - DNA, 15 bp, Homo sapiens
cctcaatctctttta

SEQ ID NO: 819366 - DNA, 15 bp, Homo sapiens
tcctcaatctctttt

SEQ ID NO: 819367 - DNA, 15 bp, Homo sapiens
ctcctcaatctcttt

SEQ ID NO: 819368 - DNA, 15 bp, Homo sapiens
tctcctcaatctctt

SEQ ID NO: 819369 - DNA, 15 bp, Homo sapiens
atctcctcaatctct

SEQ ID NO: 819370 - DNA, 15 bp, Homo sapiens
aatctcctcaatctc

SEQ ID NO: 819371 - DNA, 15 bp, Homo sapiens
aaatctcctcaatct

SEQ ID NO: 819372 - DNA, 15 bp, Homo sapiens
taaatctcctcaatc

SEQ ID NO: 819373 - DNA, 15 bp, Homo sapiens
ataaatctcctcaat

SEQ ID NO: 819374 - DNA, 15 bp, Homo sapiens
aataaatctcctcaa

SEQ ID NO: 819375 - DNA, 15 bp, Homo sapiens
aaataaatctcctca

SEQ ID NO: 819376 - DNA, 15 bp, Homo sapiens
aaaataaatctcctc

SEQ ID NO: 819377 - DNA, 15 bp, Homo sapiens
aaaaataaatctcct

SEQ ID NO: 819378 - DNA, 15 bp, Homo sapiens
taaaaataaatctcc

SEQ ID NO: 819379 - DNA, 15 bp, Homo sapiens
gtaaaaataaatctc

SEQ ID NO: 819380 - DNA, 15 bp, Homo sapiens
tgtaaaaataaatct

SEQ ID NO: 819381 - DNA, 15 bp, Homo sapiens
atgtaaaaataaatc

SEQ ID NO: 819382 - DNA, 15 bp, Homo sapiens
aatgtaaaaataaat

SEQ ID NO: 819383 - DNA, 15 bp, Homo sapiens
aaatgtaaaaataaa

SEQ ID NO: 819384 - DNA, 15 bp, Homo sapiens
gaaatgtaaaaataa

SEQ ID NO: 819385 - DNA, 15 bp, Homo sapiens
agaaatgtaaaaata

SEQ ID NO: 819386 - DNA, 15 bp, Homo sapiens
aagaaatgtaaaaat

SEQ ID NO: 819387 - DNA, 15 bp, Homo sapiens
caagaaatgtaaaaa

SEQ ID NO: 819388 - DNA, 15 bp, Homo sapiens
tcaagaaatgtaaaa

SEQ ID NO: 819389 - DNA, 15 bp, Homo sapiens
ttcaagaaatgtaaa

SEQ ID NO: 819390 - DNA, 15 bp, Homo sapiens
tttcaagaaatgtaa

SEQ ID NO: 819391 - DNA, 15 bp, Homo sapiens
ttttcaagaaatgta

SEQ ID NO: 819392 - DNA, 15 bp, Homo sapiens
attttcaagaaatgt

SEQ ID NO: 819393 - DNA, 15 bp, Homo sapiens
cattttcaagaaatg

SEQ ID NO: 819394 - DNA, 15 bp, Homo sapiens
gcattttcaagaaat

SEQ ID NO: 819395 - DNA, 15 bp, Homo sapiens
ggcattttcaagaaa

SEQ ID NO: 819396 - DNA, 15 bp, Homo sapiens
aggcattttcaagaa

SEQ ID NO: 819397 - DNA, 15 bp, Homo sapiens
aaggcattttcaaga

SEQ ID NO: 819398 - DNA, 15 bp, Homo sapiens
taaggcattttcaag

SEQ ID NO: 819399 - DNA, 15 bp, Homo sapiens
ataaggcattttcaa

SEQ ID NO: 819400 - DNA, 15 bp, Homo sapiens
aataaggcattttca

SEQ ID NO: 819401 - DNA, 15 bp, Homo sapiens
aaataaggcattttc

SEQ ID NO: 819402 - DNA, 15 bp, Homo sapiens
aaaataaggcatttt

SEQ ID NO: 819403 - DNA, 15 bp, Homo sapiens
caaaataaggcattt

SEQ ID NO: 819404 - DNA, 15 bp, Homo sapiens
ccaaaataaggcatt

SEQ ID NO: 819405 - DNA, 15 bp, Homo sapiens
accaaaataaggcat

SEQ ID NO: 819406 - DNA, 15 bp, Homo sapiens
taccaaaataaggca

SEQ ID NO: 819407 - DNA, 15 bp, Homo sapiens
ataccaaaataaggc

SEQ ID NO: 819408 - DNA, 15 bp, Homo sapiens
cataccaaaataagg

SEQ ID NO: 819409 - DNA, 15 bp, Homo sapiens
ccataccaaaataag

SEQ ID NO: 819410 - DNA, 15 bp, Homo sapiens
accataccaaaataa

SEQ ID NO: 819411 - DNA, 15 bp, Homo sapiens
taccataccaaaata

SEQ ID NO: 819412 - DNA, 15 bp, Homo sapiens
ataccataccaaaat

SEQ ID NO: 819413 - DNA, 15 bp, Homo sapiens
aataccataccaaaa

SEQ ID NO: 819414 - DNA, 15 bp, Homo sapiens
caataccataccaaa

SEQ ID NO: 819415 - DNA, 15 bp, Homo sapiens
tcaataccataccaa

SEQ ID NO: 819416 - DNA, 15 bp, Homo sapiens
gtcaataccatacca

SEQ ID NO: 819417 - DNA, 15 bp, Homo sapiens
tgtcaataccatacc

SEQ ID NO: 819418 - DNA, 15 bp, Homo sapiens
ctgtcaataccatac

SEQ ID NO: 819419 - DNA, 15 bp, Homo sapiens
tctgtcaataccata

SEQ ID NO: 819420 - DNA, 15 bp, Homo sapiens
atctgtcaataccat

SEQ ID NO: 819421 - DNA, 15 bp, Homo sapiens
tatctgtcaatacca

SEQ ID NO: 819422 - DNA, 15 bp, Homo sapiens
ctatctgtcaatacc

SEQ ID NO: 819423 - DNA, 15 bp, Homo sapiens
actatctgtcaatac

SEQ ID NO: 819424 - DNA, 15 bp, Homo sapiens
cactatctgtcaata

SEQ ID NO: 819425 - DNA, 15 bp, Homo sapiens
tcactatctgtcaat

SEQ ID NO: 819426 - DNA, 15 bp, Homo sapiens
ttcactatctgtcaa

SEQ ID NO: 819427 - DNA, 15 bp, Homo sapiens
tttcactatctgtca

SEQ ID NO: 819428 - DNA, 15 bp, Homo sapiens
atttcactatctgtc

SEQ ID NO: 819429 - DNA, 15 bp, Homo sapiens
aatttcactatctgt

SEQ ID NO: 819430 - DNA, 15 bp, Homo sapiens
gaatttcactatctg

SEQ ID NO: 819431 - DNA, 15 bp, Homo sapiens
agaatttcactatct

SEQ ID NO: 819432 - DNA, 15 bp, Homo sapiens
cagaatttcactatc

SEQ ID NO: 819433 - DNA, 15 bp, Homo sapiens
gcagaatttcactat

SEQ ID NO: 819434 - DNA, 15 bp, Homo sapiens
agcagaatttcacta

SEQ ID NO: 819435 - DNA, 15 bp, Homo sapiens
gagcagaatttcact

SEQ ID NO: 819436 - DNA, 15 bp, Homo sapiens
tgagcagaatttcac

SEQ ID NO: 819437 - DNA, 15 bp, Homo sapiens
atgagcagaatttca

SEQ ID NO: 819438 - DNA, 15 bp, Homo sapiens
aatgagcagaatttc

SEQ ID NO: 819439 - DNA, 15 bp, Homo sapiens
aaatgagcagaattt

SEQ ID NO: 819440 - DNA, 15 bp, Homo sapiens
caaatgagcagaatt

SEQ ID NO: 819441 - DNA, 15 bp, Homo sapiens
acaaatgagcagaat

SEQ ID NO: 819442 - DNA, 15 bp, Homo sapiens
tacaaatgagcagaa

SEQ ID NO: 819443 - DNA, 15 bp, Homo sapiens
ttacaaatgagcaga

SEQ ID NO: 819444 - DNA, 15 bp, Homo sapiens
tttacaaatgagcag

SEQ ID NO: 819445 - DNA, 15 bp, Homo sapiens
atttacaaatgagca

SEQ ID NO: 819446 - DNA, 15 bp, Homo sapiens
tatttacaaatgagc

SEQ ID NO: 819447 - DNA, 15 bp, Homo sapiens
atatttacaaatgag

SEQ ID NO: 819448 - DNA, 15 bp, Homo sapiens
tatatttacaaatga

SEQ ID NO: 819449 - DNA, 15 bp, Homo sapiens
ctatatttacaaatg

SEQ ID NO: 819450 - DNA, 15 bp, Homo sapiens
actatatttacaaat

SEQ ID NO: 819451 - DNA, 15 bp, Homo sapiens
cactatatttacaaa

SEQ ID NO: 819452 - DNA, 15 bp, Homo sapiens
acactatatttacaa

SEQ ID NO: 819453 - DNA, 15 bp, Homo sapiens
gacactatatttaca

SEQ ID NO: 819454 - DNA, 15 bp, Homo sapiens
tgacactatatttac

SEQ ID NO: 819455 - DNA, 15 bp, Homo sapiens
atgacactatattta

SEQ ID NO: 819456 - DNA, 15 bp, Homo sapiens
tatgacactatattt

SEQ ID NO: 819457 - DNA, 15 bp, Homo sapiens
atatgacactatatt

SEQ ID NO: 819458 - DNA, 15 bp, Homo sapiens
aatatgacactatat

SEQ ID NO: 819459 - DNA, 15 bp, Homo sapiens
aaatatgacactata

SEQ ID NO: 819460 - DNA, 15 bp, Homo sapiens
aaaatatgacactat

SEQ ID NO: 819461 - DNA, 15 bp, Homo sapiens
taaaatatgacacta

SEQ ID NO: 819462 - DNA, 15 bp, Homo sapiens
ttaaaatatgacact

SEQ ID NO: 819463 - DNA, 15 bp, Homo sapiens
attaaaatatgacac

SEQ ID NO: 819464 - DNA, 15 bp, Homo sapiens
tattaaaatatgaca

SEQ ID NO: 819465 - DNA, 15 bp, Homo sapiens
ttattaaaatatgac

SEQ ID NO: 819466 - DNA, 15 bp, Homo sapiens
attattaaaatatga

SEQ ID NO: 819467 - DNA, 15 bp, Homo sapiens
aattattaaaatatg

SEQ ID NO: 819468 - DNA, 15 bp, Homo sapiens
aaattattaaaatat

SEQ ID NO: 819469 - DNA, 15 bp, Homo sapiens
gaaattattaaaata

SEQ ID NO: 819470 - DNA, 15 bp, Homo sapiens
tgaaattattaaaat

SEQ ID NO: 819471 - DNA, 15 bp, Homo sapiens
ttgaaattattaaaa

SEQ ID NO: 819472 - DNA, 15 bp, Homo sapiens
tttgaaattattaaa

SEQ ID NO: 819473 - DNA, 15 bp, Homo sapiens
gtttgaaattattaa

SEQ ID NO: 819474 - DNA, 15 bp, Homo sapiens
tgtttgaaattatta

SEQ ID NO: 819475 - DNA, 15 bp, Homo sapiens
atgtttgaaattatt

SEQ ID NO: 819476 - DNA, 15 bp, Homo sapiens
tatgtttgaaattat

SEQ ID NO: 819477 - DNA, 15 bp, Homo sapiens
atatgtttgaaatta

SEQ ID NO: 819478 - DNA, 15 bp, Homo sapiens
aatatgtttgaaatt

SEQ ID NO: 819479 - DNA, 15 bp, Homo sapiens
caatatgtttgaaat

SEQ ID NO: 819480 - DNA, 15 bp, Homo sapiens
tcaatatgtttgaaa

SEQ ID NO: 819481 - DNA, 15 bp, Homo sapiens
ttcaatatgtttgaa

SEQ ID NO: 819482 - DNA, 15 bp, Homo sapiens
tttcaatatgtttga

SEQ ID NO: 819483 - DNA, 15 bp, Homo sapiens
ttttcaatatgtttg

SEQ ID NO: 819484 - DNA, 15 bp, Homo sapiens
attttcaatatgttt

SEQ ID NO: 819485 - DNA, 15 bp, Homo sapiens
cattttcaatatgtt

SEQ ID NO: 819486 - DNA, 15 bp, Homo sapiens
gcattttcaatatgt

SEQ ID NO: 819487 - DNA, 15 bp, Homo sapiens
tgcattttcaatatg

SEQ ID NO: 819488 - DNA, 15 bp, Homo sapiens
ctgcattttcaatat

SEQ ID NO: 819489 - DNA, 15 bp, Homo sapiens
tctgcattttcaata

SEQ ID NO: 819490 - DNA, 15 bp, Homo sapiens
ttctgcattttcaat

SEQ ID NO: 819491 - DNA, 15 bp, Homo sapiens
attctgcattttcaa

SEQ ID NO: 819492 - DNA, 15 bp, Homo sapiens
aattctgcattttca

SEQ ID NO: 819493 - DNA, 15 bp, Homo sapiens
aaattctgcattttc

SEQ ID NO: 819494 - DNA, 15 bp, Homo sapiens
taaattctgcatttt

SEQ ID NO: 819495 - DNA, 15 bp, Homo sapiens
ataaattctgcattt

SEQ ID NO: 819496 - DNA, 15 bp, Homo sapiens
aataaattctgcatt

SEQ ID NO: 819497 - DNA, 15 bp, Homo sapiens
taataaattctgcat

SEQ ID NO: 819498 - DNA, 15 bp, Homo sapiens
ttaataaattctgca

SEQ ID NO: 819499 - DNA, 15 bp, Homo sapiens
attaataaattctgc

SEQ ID NO: 819500 - DNA, 15 bp, Homo sapiens
tattaataaattctg

SEQ ID NO: 819501 - DNA, 15 bp, Homo sapiens
ctattaataaattct

SEQ ID NO: 819502 - DNA, 15 bp, Homo sapiens
actattaataaattc

SEQ ID NO: 819503 - DNA, 15 bp, Homo sapiens
cactattaataaatt

SEQ ID NO: 819504 - DNA, 15 bp, Homo sapiens
ccactattaataaat

SEQ ID NO: 819505 - DNA, 15 bp, Homo sapiens
cccactattaataaa

SEQ ID NO: 819506 - DNA, 15 bp, Homo sapiens
tcccactattaataa

SEQ ID NO: 819507 - DNA, 15 bp, Homo sapiens
ctcccactattaata

SEQ ID NO: 819508 - DNA, 15 bp, Homo sapiens
gctcccactattaat

SEQ ID NO: 819509 - DNA, 15 bp, Homo sapiens
tgctcccactattaa

SEQ ID NO: 819510 - DNA, 15 bp, Homo sapiens
gtgctcccactatta

SEQ ID NO: 819511 - DNA, 15 bp, Homo sapiens
tgtgctcccactatt

SEQ ID NO: 819512 - DNA, 15 bp, Homo sapiens
atgtgctcccactat

SEQ ID NO: 819513 - DNA, 15 bp, Homo sapiens
aatgtgctcccacta

SEQ ID NO: 819514 - DNA, 15 bp, Homo sapiens
aaatgtgctcccact

SEQ ID NO: 819515 - DNA, 15 bp, Homo sapiens
aaaatgtgctcccac

SEQ ID NO: 819516 - DNA, 15 bp, Homo sapiens
gaaaatgtgctccca

SEQ ID NO: 819517 - DNA, 15 bp, Homo sapiens
ggaaaatgtgctccc

SEQ ID NO: 819518 - DNA, 15 bp, Homo sapiens
aggaaaatgtgctcc

SEQ ID NO: 819519 - DNA, 15 bp, Homo sapiens
aaggaaaatgtgctc

SEQ ID NO: 819520 - DNA, 15 bp, Homo sapiens
aaaggaaaatgtgct

SEQ ID NO: 819521 - DNA, 15 bp, Homo sapiens
aaaaggaaaatgtgc

SEQ ID NO: 819522 - DNA, 15 bp, Homo sapiens
aaaaaggaaaatgtg

SEQ ID NO: 819523 - DNA, 15 bp, Homo sapiens
taaaaaggaaaatgt

SEQ ID NO: 819524 - DNA, 15 bp, Homo sapiens
gtaaaaaggaaaatg

SEQ ID NO: 819525 - DNA, 15 bp, Homo sapiens
agtaaaaaggaaaat

SEQ ID NO: 819526 - DNA, 15 bp, Homo sapiens
tagtaaaaaggaaaa

SEQ ID NO: 819527 - DNA, 15 bp, Homo sapiens
ttagtaaaaaggaaa

SEQ ID NO: 819528 - DNA, 15 bp, Homo sapiens
tttagtaaaaaggaa

SEQ ID NO: 819529 - DNA, 15 bp, Homo sapiens
atttagtaaaaagga

SEQ ID NO: 819530 - DNA, 15 bp, Homo sapiens
catttagtaaaaagg

SEQ ID NO: 819531 - DNA, 15 bp, Homo sapiens
acatttagtaaaaag

SEQ ID NO: 819532 - DNA, 15 bp, Homo sapiens
aacatttagtaaaaa

SEQ ID NO: 819533 - DNA, 15 bp, Homo sapiens
gaacatttagtaaaa

SEQ ID NO: 819534 - DNA, 15 bp, Homo sapiens
agaacatttagtaaa

SEQ ID NO: 819535 - DNA, 15 bp, Homo sapiens
tagaacatttagtaa

SEQ ID NO: 819536 - DNA, 15 bp, Homo sapiens
gtagaacatttagta

SEQ ID NO: 819537 - DNA, 15 bp, Homo sapiens
tgtagaacatttagt

SEQ ID NO: 819538 - DNA, 15 bp, Homo sapiens
ctgtagaacatttag

SEQ ID NO: 819539 - DNA, 15 bp, Homo sapiens
cctgtagaacattta

SEQ ID NO: 819540 - DNA, 15 bp, Homo sapiens
acctgtagaacattt

SEQ ID NO: 819541 - DNA, 15 bp, Homo sapiens
aacctgtagaacatt

SEQ ID NO: 819542 - DNA, 15 bp, Homo sapiens
gaacctgtagaacat

SEQ ID NO: 819543 - DNA, 15 bp, Homo sapiens
agaacctgtagaaca

SEQ ID NO: 819544 - DNA, 15 bp, Homo sapiens
aagaacctgtagaac

SEQ ID NO: 819545 - DNA, 15 bp, Homo sapiens
aaagaacctgtagaa

SEQ ID NO: 819546 - DNA, 15 bp, Homo sapiens
aaaagaacctgtaga

SEQ ID NO: 819547 - DNA, 15 bp, Homo sapiens
gaaaagaacctgtag

SEQ ID NO: 819548 - DNA, 15 bp, Homo sapiens
agaaaagaacctgta

SEQ ID NO: 819549 - DNA, 15 bp, Homo sapiens
aagaaaagaacctgt

SEQ ID NO: 819550 - DNA, 15 bp, Homo sapiens
aaagaaaagaacctg

SEQ ID NO: 819551 - DNA, 15 bp, Homo sapiens
gaaagaaaagaacct

SEQ ID NO: 819552 - DNA, 15 bp, Homo sapiens
ggaaagaaaagaacc

SEQ ID NO: 819553 - DNA, 15 bp, Homo sapiens
tggaaagaaaagaac

SEQ ID NO: 819554 - DNA, 15 bp, Homo sapiens
atggaaagaaaagaa

SEQ ID NO: 819555 - DNA, 15 bp, Homo sapiens
gatggaaagaaaaga

SEQ ID NO: 819556 - DNA, 15 bp, Homo sapiens
ggatggaaagaaaag

SEQ ID NO: 819557 - DNA, 15 bp, Homo sapiens
tggatggaaagaaaa

SEQ ID NO: 819558 - DNA, 15 bp, Homo sapiens
gtggatggaaagaaa

SEQ ID NO: 819559 - DNA, 15 bp, Homo sapiens
tgtggatggaaagaa

SEQ ID NO: 819560 - DNA, 15 bp, Homo sapiens
gtgtggatggaaaga

SEQ ID NO: 819561 - DNA, 15 bp, Homo sapiens
tgtgtggatggaaag

SEQ ID NO: 819562 - DNA, 15 bp, Homo sapiens
gtgtgtggatggaaa

SEQ ID NO: 819563 - DNA, 15 bp, Homo sapiens
tgtgtgtggatggaa

SEQ ID NO: 819564 - DNA, 15 bp, Homo sapiens
ctgtgtgtggatgga

SEQ ID NO: 819565 - DNA, 15 bp, Homo sapiens
actgtgtgtggatgg

SEQ ID NO: 819566 - DNA, 15 bp, Homo sapiens
cactgtgtgtggatg

SEQ ID NO: 819567 - DNA, 15 bp, Homo sapiens
gcactgtgtgtggat

SEQ ID NO: 819568 - DNA, 15 bp, Homo sapiens
ggcactgtgtgtgga

SEQ ID NO: 819569 - DNA, 15 bp, Homo sapiens
tggcactgtgtgtgg

SEQ ID NO: 819570 - DNA, 15 bp, Homo sapiens
atggcactgtgtgtg

SEQ ID NO: 819571 - DNA, 15 bp, Homo sapiens
aatggcactgtgtgt

SEQ ID NO: 819572 - DNA, 15 bp, Homo sapiens
taatggcactgtgtg

SEQ ID NO: 819573 - DNA, 15 bp, Homo sapiens
gtaatggcactgtgt

SEQ ID NO: 819574 - DNA, 15 bp, Homo sapiens
ggtaatggcactgtg

SEQ ID NO: 819575 - DNA, 15 bp, Homo sapiens
gggtaatggcactgt

SEQ ID NO: 819576 - DNA, 15 bp, Homo sapiens
agggtaatggcactg

SEQ ID NO: 819577 - DNA, 15 bp, Homo sapiens
gagggtaatggcact

SEQ ID NO: 819578 - DNA, 15 bp, Homo sapiens
tgagggtaatggcac

SEQ ID NO: 819579 - DNA, 15 bp, Homo sapiens
atgagggtaatggca

SEQ ID NO: 819580 - DNA, 15 bp, Homo sapiens
aatgagggtaatggc

SEQ ID NO: 819581 - DNA, 15 bp, Homo sapiens
gaatgagggtaatgg

SEQ ID NO: 819582 - DNA, 15 bp, Homo sapiens
agaatgagggtaatg

SEQ ID NO: 819583 - DNA, 15 bp, Homo sapiens
tagaatgagggtaat

SEQ ID NO: 819584 - DNA, 15 bp, Homo sapiens
ttagaatgagggtaa

SEQ ID NO: 819585 - DNA, 15 bp, Homo sapiens
cttagaatgagggta

SEQ ID NO: 819586 - DNA, 15 bp, Homo sapiens
gcttagaatgagggt

SEQ ID NO: 819587 - DNA, 15 bp, Homo sapiens
ggcttagaatgaggg

SEQ ID NO: 819588 - DNA, 15 bp, Homo sapiens
aggcttagaatgagg

SEQ ID NO: 819589 - DNA, 15 bp, Homo sapiens
aaggcttagaatgag

SEQ ID NO: 819590 - DNA, 15 bp, Homo sapiens
aaaggcttagaatga

SEQ ID NO: 819591 - DNA, 15 bp, Homo sapiens
gaaaggcttagaatg

SEQ ID NO: 819592 - DNA, 15 bp, Homo sapiens
tgaaaggcttagaat

SEQ ID NO: 819593 - DNA, 15 bp, Homo sapiens
ttgaaaggcttagaa

SEQ ID NO: 819594 - DNA, 15 bp, Homo sapiens
tttgaaaggcttaga

SEQ ID NO: 819595 - DNA, 15 bp, Homo sapiens
gtttgaaaggcttag

SEQ ID NO: 819596 - DNA, 15 bp, Homo sapiens
tgtttgaaaggctta

SEQ ID NO: 819597 - DNA, 15 bp, Homo sapiens
atgtttgaaaggctt

SEQ ID NO: 819598 - DNA, 15 bp, Homo sapiens
gatgtttgaaaggct

SEQ ID NO: 819599 - DNA, 15 bp, Homo sapiens
agatgtttgaaaggc

SEQ ID NO: 819600 - DNA, 15 bp, Homo sapiens
cagatgtttgaaagg

SEQ ID NO: 819601 - DNA, 15 bp, Homo sapiens
ccagatgtttgaaag

SEQ ID NO: 819602 - DNA, 15 bp, Homo sapiens
gccagatgtttgaaa

SEQ ID NO: 819603 - DNA, 15 bp, Homo sapiens
tgccagatgtttgaa

SEQ ID NO: 819604 - DNA, 15 bp, Homo sapiens
ctgccagatgtttga

SEQ ID NO: 819605 - DNA, 15 bp, Homo sapiens
actgccagatgtttg

SEQ ID NO: 819606 - DNA, 15 bp, Homo sapiens
tactgccagatgttt

SEQ ID NO: 819607 - DNA, 15 bp, Homo sapiens
ttactgccagatgtt

SEQ ID NO: 819608 - DNA, 15 bp, Homo sapiens
cttactgccagatgt

SEQ ID NO: 819609 - DNA, 15 bp, Homo sapiens
acttactgccagatg

SEQ ID NO: 819610 - DNA, 15 bp, Homo sapiens
cacttactgccagat

SEQ ID NO: 819611 - DNA, 15 bp, Homo sapiens
tcacttactgccaga

SEQ ID NO: 819612 - DNA, 15 bp, Homo sapiens
atcacttactgccag

SEQ ID NO: 819613 - DNA, 15 bp, Homo sapiens
gatcacttactgcca

SEQ ID NO: 819614 - DNA, 15 bp, Homo sapiens
agatcacttactgcc

SEQ ID NO: 819615 - DNA, 15 bp, Homo sapiens
cagatcacttactgc

SEQ ID NO: 819616 - DNA, 15 bp, Homo sapiens
gcagatcacttactg

SEQ ID NO: 819617 - DNA, 15 bp, Homo sapiens
agcagatcacttact

SEQ ID NO: 819618 - DNA, 15 bp, Homo sapiens
cagcagatcacttac

SEQ ID NO: 819619 - DNA, 15 bp, Homo sapiens
gcagcagatcactta

SEQ ID NO: 819620 - DNA, 15 bp, Homo sapiens
tgcagcagatcactt

SEQ ID NO: 819621 - DNA, 15 bp, Homo sapiens
gtgcagcagatcact

SEQ ID NO: 819622 - DNA, 15 bp, Homo sapiens
agtgcagcagatcac

SEQ ID NO: 819623 - DNA, 15 bp, Homo sapiens
aagtgcagcagatca

SEQ ID NO: 819624 - DNA, 15 bp, Homo sapiens
taagtgcagcagatc

SEQ ID NO: 819625 - DNA, 15 bp, Homo sapiens
ctaagtgcagcagat

SEQ ID NO: 819626 - DNA, 15 bp, Homo sapiens
gctaagtgcagcaga

SEQ ID NO: 819627 - DNA, 15 bp, Homo sapiens
agctaagtgcagcag

SEQ ID NO: 819628 - DNA, 15 bp, Homo sapiens
gagctaagtgcagca

SEQ ID NO: 819629 - DNA, 15 bp, Homo sapiens
agagctaagtgcagc

SEQ ID NO: 819630 - DNA, 15 bp, Homo sapiens
aagagctaagtgcag

SEQ ID NO: 819631 - DNA, 15 bp, Homo sapiens
aaagagctaagtgca

SEQ ID NO: 819632 - DNA, 15 bp, Homo sapiens
gaaagagctaagtgc

SEQ ID NO: 819633 - DNA, 15 bp, Homo sapiens
ggaaagagctaagtg

SEQ ID NO: 819634 - DNA, 15 bp, Homo sapiens
tggaaagagctaagt

SEQ ID NO: 819635 - DNA, 15 bp, Homo sapiens
ctggaaagagctaag

SEQ ID NO: 819636 - DNA, 15 bp, Homo sapiens
gctggaaagagctaa

SEQ ID NO: 819637 - DNA, 15 bp, Homo sapiens
agctggaaagagcta

SEQ ID NO: 819638 - DNA, 15 bp, Homo sapiens
cagctggaaagagct

SEQ ID NO: 819639 - DNA, 15 bp, Homo sapiens
tcagctggaaagagc

SEQ ID NO: 819640 - DNA, 15 bp, Homo sapiens
ctcagctggaaagag

SEQ ID NO: 819641 - DNA, 15 bp, Homo sapiens
gctcagctggaaaga

SEQ ID NO: 819642 - DNA, 15 bp, Homo sapiens
agctcagctggaaag

SEQ ID NO: 819643 - DNA, 15 bp, Homo sapiens
cagctcagctggaaa

SEQ ID NO: 819644 - DNA, 15 bp, Homo sapiens
tcagctcagctggaa

SEQ ID NO: 819645 - DNA, 15 bp, Homo sapiens
atcagctcagctgga

SEQ ID NO: 819646 - DNA, 15 bp, Homo sapiens
aatcagctcagctgg

SEQ ID NO: 819647 - DNA, 15 bp, Homo sapiens
aaatcagctcagctg

SEQ ID NO: 819648 - DNA, 15 bp, Homo sapiens
aaaatcagctcagct

SEQ ID NO: 819649 - DNA, 15 bp, Homo sapiens
aaaaatcagctcagc

SEQ ID NO: 819650 - DNA, 15 bp, Homo sapiens
taaaaatcagctcag

SEQ ID NO: 819651 - DNA, 15 bp, Homo sapiens
ttaaaaatcagctca

SEQ ID NO: 819652 - DNA, 15 bp, Homo sapiens
tttaaaaatcagctc

SEQ ID NO: 819653 - DNA, 15 bp, Homo sapiens
atttaaaaatcagct

SEQ ID NO: 819654 - DNA, 15 bp, Homo sapiens
aatttaaaaatcagc

SEQ ID NO: 819655 - DNA, 15 bp, Homo sapiens
aaatttaaaaatcag

SEQ ID NO: 819656 - DNA, 15 bp, Homo sapiens
aaaatttaaaaatca

SEQ ID NO: 819657 - DNA, 15 bp, Homo sapiens
gaaaatttaaaaatc

SEQ ID NO: 819658 - DNA, 15 bp, Homo sapiens
tgaaaatttaaaaat

SEQ ID NO: 819659 - DNA, 15 bp, Homo sapiens
ctgaaaatttaaaaa

SEQ ID NO: 819660 - DNA, 15 bp, Homo sapiens
tctgaaaatttaaaa

SEQ ID NO: 819661 - DNA, 15 bp, Homo sapiens
ttctgaaaatttaaa

SEQ ID NO: 819662 - DNA, 15 bp, Homo sapiens
tttctgaaaatttaa

SEQ ID NO: 819663 - DNA, 15 bp, Homo sapiens
ttttctgaaaattta

SEQ ID NO: 819664 - DNA, 15 bp, Homo sapiens
attttctgaaaattt

SEQ ID NO: 819665 - DNA, 15 bp, Homo sapiens
aattttctgaaaatt

SEQ ID NO: 819666 - DNA, 15 bp, Homo sapiens
aaattttctgaaaat

SEQ ID NO: 819667 - DNA, 15 bp, Homo sapiens
caaattttctgaaaa

SEQ ID NO: 819668 - DNA, 15 bp, Homo sapiens
acaaattttctgaaa

SEQ ID NO: 819669 - DNA, 15 bp, Homo sapiens
cacaaattttctgaa

SEQ ID NO: 819670 - DNA, 15 bp, Homo sapiens
tcacaaattttctga

SEQ ID NO: 819671 - DNA, 15 bp, Homo sapiens
ctcacaaattttctg

SEQ ID NO: 819672 - DNA, 15 bp, Homo sapiens
gctcacaaattttct

SEQ ID NO: 819673 - DNA, 15 bp, Homo sapiens
agctcacaaattttc

SEQ ID NO: 819674 - DNA, 15 bp, Homo sapiens
tagctcacaaatttt

SEQ ID NO: 819675 - DNA, 15 bp, Homo sapiens
ttagctcacaaattt

SEQ ID NO: 819676 - DNA, 15 bp, Homo sapiens
attagctcacaaatt

SEQ ID NO: 819677 - DNA, 15 bp, Homo sapiens
aattagctcacaaat

SEQ ID NO: 819678 - DNA, 15 bp, Homo sapiens
caattagctcacaaa

SEQ ID NO: 819679 - DNA, 15 bp, Homo sapiens
acaattagctcacaa

SEQ ID NO: 819680 - DNA, 15 bp, Homo sapiens
aacaattagctcaca

SEQ ID NO: 819681 - DNA, 15 bp, Homo sapiens
taacaattagctcac

SEQ ID NO: 819682 - DNA, 15 bp, Homo sapiens
ttaacaattagctca

SEQ ID NO: 819683 - DNA, 15 bp, Homo sapiens
tttaacaattagctc

SEQ ID NO: 819684 - DNA, 15 bp, Homo sapiens
gtttaacaattagct

SEQ ID NO: 819685 - DNA, 15 bp, Homo sapiens
tgtttaacaattagc

SEQ ID NO: 819686 - DNA, 15 bp, Homo sapiens
atgtttaacaattag

SEQ ID NO: 819687 - DNA, 15 bp, Homo sapiens
catgtttaacaatta

SEQ ID NO: 819688 - DNA, 15 bp, Homo sapiens
ccatgtttaacaatt

SEQ ID NO: 819689 - DNA, 15 bp, Homo sapiens
gccatgtttaacaat

SEQ ID NO: 819690 - DNA, 15 bp, Homo sapiens
ggccatgtttaacaa

SEQ ID NO: 819691 - DNA, 15 bp, Homo sapiens
tggccatgtttaaca

SEQ ID NO: 819692 - DNA, 15 bp, Homo sapiens
atggccatgtttaac

SEQ ID NO: 819693 - DNA, 15 bp, Homo sapiens
aatggccatgtttaa

SEQ ID NO: 819694 - DNA, 15 bp, Homo sapiens
taatggccatgttta

SEQ ID NO: 819695 - DNA, 15 bp, Homo sapiens
ataatggccatgttt

SEQ ID NO: 819696 - DNA, 15 bp, Homo sapiens
aataatggccatgtt

SEQ ID NO: 819697 - DNA, 15 bp, Homo sapiens
taataatggccatgt

SEQ ID NO: 819698 - DNA, 15 bp, Homo sapiens
ttaataatggccatg

SEQ ID NO: 819699 - DNA, 15 bp, Homo sapiens
tttaataatggccat

SEQ ID NO: 819700 - DNA, 15 bp, Homo sapiens
ttttaataatggcca

SEQ ID NO: 819701 - DNA, 15 bp, Homo sapiens
tttttaataatggcc

SEQ ID NO: 819702 - DNA, 15 bp, Homo sapiens
atttttaataatggc

SEQ ID NO: 819703 - DNA, 15 bp, Homo sapiens
aatttttaataatgg

SEQ ID NO: 819704 - DNA, 15 bp, Homo sapiens
taatttttaataatg

SEQ ID NO: 819705 - DNA, 15 bp, Homo sapiens
ttaatttttaataat

SEQ ID NO: 819706 - DNA, 15 bp, Homo sapiens
tttaatttttaataa

SEQ ID NO: 819707 - DNA, 15 bp, Homo sapiens
atttaatttttaata

SEQ ID NO: 819708 - DNA, 15 bp, Homo sapiens
aatttaatttttaat

SEQ ID NO: 819709 - DNA, 15 bp, Homo sapiens
taatttaatttttaa

SEQ ID NO: 819710 - DNA, 15 bp, Homo sapiens
ataatttaattttta

SEQ ID NO: 819711 - DNA, 15 bp, Homo sapiens
aataatttaattttt

SEQ ID NO: 819712 - DNA, 15 bp, Homo sapiens
aaataatttaatttt

SEQ ID NO: 819713 - DNA, 15 bp, Homo sapiens
gaaataatttaattt

SEQ ID NO: 819714 - DNA, 15 bp, Homo sapiens
tgaaataatttaatt

SEQ ID NO: 819715 - DNA, 15 bp, Homo sapiens
ttgaaataatttaat

SEQ ID NO: 819716 - DNA, 15 bp, Homo sapiens
gttgaaataatttaa

SEQ ID NO: 819717 - DNA, 15 bp, Homo sapiens
agttgaaataattta

SEQ ID NO: 819718 - DNA, 15 bp, Homo sapiens
aagttgaaataattt

SEQ ID NO: 819719 - DNA, 15 bp, Homo sapiens
taagttgaaataatt

SEQ ID NO: 819720 - DNA, 15 bp, Homo sapiens
ataagttgaaataat

SEQ ID NO: 819721 - DNA, 15 bp, Homo sapiens
tataagttgaaataa

SEQ ID NO: 819722 - DNA, 15 bp, Homo sapiens
ttataagttgaaata

SEQ ID NO: 819723 - DNA, 15 bp, Homo sapiens
attataagttgaaat

SEQ ID NO: 819724 - DNA, 15 bp, Homo sapiens
aattataagttgaaa

SEQ ID NO: 819725 - DNA, 15 bp, Homo sapiens
taattataagttgaa

SEQ ID NO: 819726 - DNA, 15 bp, Homo sapiens
ttaattataagttga

SEQ ID NO: 819727 - DNA, 15 bp, Homo sapiens
tttaattataagttg

SEQ ID NO: 819728 - DNA, 15 bp, Homo sapiens
atttaattataagtt

SEQ ID NO: 819729 - DNA, 15 bp, Homo sapiens
tatttaattataagt

SEQ ID NO: 819730 - DNA, 15 bp, Homo sapiens
ttatttaattataag

SEQ ID NO: 819731 - DNA, 15 bp, Homo sapiens
tttatttaattataa

SEQ ID NO: 819732 - DNA, 15 bp, Homo sapiens
atttatttaattata

SEQ ID NO: 819733 - DNA, 15 bp, Homo sapiens
aatttatttaattat

SEQ ID NO: 819734 - DNA, 15 bp, Homo sapiens
taatttatttaatta

SEQ ID NO: 819735 - DNA, 15 bp, Homo sapiens
ataatttatttaatt

SEQ ID NO: 819736 - DNA, 15 bp, Homo sapiens
tataatttatttaat

SEQ ID NO: 819737 - DNA, 15 bp, Homo sapiens
atataatttatttaa

SEQ ID NO: 819738 - DNA, 15 bp, Homo sapiens
aatataatttattta

SEQ ID NO: 819739 - DNA, 15 bp, Homo sapiens
taatataatttattt

SEQ ID NO: 819740 - DNA, 15 bp, Homo sapiens
ttaatataatttatt

SEQ ID NO: 819741 - DNA, 15 bp, Homo sapiens
tttaatataatttat

SEQ ID NO: 819742 - DNA, 15 bp, Homo sapiens
ttttaatataattta

SEQ ID NO: 819743 - DNA, 15 bp, Homo sapiens
gttttaatataattt

SEQ ID NO: 819744 - DNA, 15 bp, Homo sapiens
tgttttaatataatt

SEQ ID NO: 819745 - DNA, 15 bp, Homo sapiens
ttgttttaatataat

SEQ ID NO: 819746 - DNA, 15 bp, Homo sapiens
tttgttttaatataa

SEQ ID NO: 819747 - DNA, 15 bp, Homo sapiens
ttttgttttaatata

SEQ ID NO: 819748 - DNA, 15 bp, Homo sapiens
cttttgttttaatat

SEQ ID NO: 819749 - DNA, 15 bp, Homo sapiens
acttttgttttaata

SEQ ID NO: 819750 - DNA, 15 bp, Homo sapiens
tacttttgttttaat

SEQ ID NO: 819751 - DNA, 15 bp, Homo sapiens
atacttttgttttaa

SEQ ID NO: 819752 - DNA, 15 bp, Homo sapiens
aatacttttgtttta

SEQ ID NO: 819753 - DNA, 15 bp, Homo sapiens
taatacttttgtttt

SEQ ID NO: 819754 - DNA, 15 bp, Homo sapiens
ttaatacttttgttt

SEQ ID NO: 819755 - DNA, 15 bp, Homo sapiens
tttaatacttttgtt

SEQ ID NO: 819756 - DNA, 15 bp, Homo sapiens
ttttaatacttttgt

SEQ ID NO: 819757 - DNA, 15 bp, Homo sapiens
tttttaatacttttg

SEQ ID NO: 819758 - DNA, 15 bp, Homo sapiens
gtttttaatactttt

SEQ ID NO: 819759 - DNA, 15 bp, Homo sapiens
agtttttaatacttt

SEQ ID NO: 819760 - DNA, 15 bp, Homo sapiens
gagtttttaatactt

SEQ ID NO: 819761 - DNA, 15 bp, Homo sapiens
tgagtttttaatact

SEQ ID NO: 819762 - DNA, 15 bp, Homo sapiens
ttgagtttttaatac

SEQ ID NO: 819763 - DNA, 15 bp, Homo sapiens
tttgagtttttaata

SEQ ID NO: 819764 - DNA, 15 bp, Homo sapiens
ttttgagtttttaat

SEQ ID NO: 819765 - DNA, 15 bp, Homo sapiens
cttttgagtttttaa

SEQ ID NO: 819766 - DNA, 15 bp, Homo sapiens
acttttgagttttta

SEQ ID NO: 819767 - DNA, 15 bp, Homo sapiens
aacttttgagttttt

SEQ ID NO: 819768 - DNA, 15 bp, Homo sapiens
caacttttgagtttt

SEQ ID NO: 819769 - DNA, 15 bp, Homo sapiens
ccaacttttgagttt

SEQ ID NO: 819770 - DNA, 15 bp, Homo sapiens
gccaacttttgagtt

SEQ ID NO: 819771 - DNA, 15 bp, Homo sapiens
agccaacttttgagt

SEQ ID NO: 819772 - DNA, 15 bp, Homo sapiens
cagccaacttttgag

SEQ ID NO: 819773 - DNA, 15 bp, Homo sapiens
ccagccaacttttga

SEQ ID NO: 819774 - DNA, 15 bp, Homo sapiens
cccagccaacttttg

SEQ ID NO: 819775 - DNA, 15 bp, Homo sapiens
gcccagccaactttt

SEQ ID NO: 819776 - DNA, 15 bp, Homo sapiens
cgcccagccaacttt

SEQ ID NO: 819777 - DNA, 15 bp, Homo sapiens
gcgcccagccaactt

SEQ ID NO: 819778 - DNA, 15 bp, Homo sapiens
tgcgcccagccaact

SEQ ID NO: 819779 - DNA, 15 bp, Homo sapiens
gtgcgcccagccaac

SEQ ID NO: 819780 - DNA, 15 bp, Homo sapiens
agtgcgcccagccaa

SEQ ID NO: 819781 - DNA, 15 bp, Homo sapiens
cagtgcgcccagcca

SEQ ID NO: 819782 - DNA, 15 bp, Homo sapiens
ccagtgcgcccagcc

SEQ ID NO: 819783 - DNA, 15 bp, Homo sapiens
gccagtgcgcccagc

SEQ ID NO: 819784 - DNA, 15 bp, Homo sapiens
agccagtgcgcccag

SEQ ID NO: 819785 - DNA, 15 bp, Homo sapiens
gagccagtgcgccca

SEQ ID NO: 819786 - DNA, 15 bp, Homo sapiens
tgagccagtgcgccc

SEQ ID NO: 819787 - DNA, 15 bp, Homo sapiens
gtgagccagtgcgcc

SEQ ID NO: 819788 - DNA, 15 bp, Homo sapiens
cgtgagccagtgcgc

SEQ ID NO: 819789 - DNA, 15 bp, Homo sapiens
acgtgagccagtgcg

SEQ ID NO: 819790 - DNA, 15 bp, Homo sapiens
gacgtgagccagtgc

SEQ ID NO: 819791 - DNA, 15 bp, Homo sapiens
agacgtgagccagtg

SEQ ID NO: 819792 - DNA, 15 bp, Homo sapiens
cagacgtgagccagt

SEQ ID NO: 819793 - DNA, 15 bp, Homo sapiens
acagacgtgagccag

SEQ ID NO: 819794 - DNA, 15 bp, Homo sapiens
tacagacgtgagcca

SEQ ID NO: 819795 - DNA, 15 bp, Homo sapiens
ttacagacgtgagcc

SEQ ID NO: 819796 - DNA, 15 bp, Homo sapiens
attacagacgtgagc

SEQ ID NO: 819797 - DNA, 15 bp, Homo sapiens
gattacagacgtgag

SEQ ID NO: 819798 - DNA, 15 bp, Homo sapiens
ggattacagacgtga

SEQ ID NO: 819799 - DNA, 15 bp, Homo sapiens
gggattacagacgtg

SEQ ID NO: 819800 - DNA, 15 bp, Homo sapiens
tgggattacagacgt

SEQ ID NO: 819801 - DNA, 15 bp, Homo sapiens
ctgggattacagacg

SEQ ID NO: 819802 - DNA, 15 bp, Homo sapiens
gctgggattacagac

SEQ ID NO: 819803 - DNA, 15 bp, Homo sapiens
tgctgggattacaga

SEQ ID NO: 819804 - DNA, 15 bp, Homo sapiens
gtgctgggattacag

SEQ ID NO: 819805 - DNA, 15 bp, Homo sapiens
agtgctgggattaca

SEQ ID NO: 819806 - DNA, 15 bp, Homo sapiens
aagtgctgggattac

SEQ ID NO: 819807 - DNA, 15 bp, Homo sapiens
aaagtgctgggatta

SEQ ID NO: 819808 - DNA, 15 bp, Homo sapiens
caaagtgctgggatt

SEQ ID NO: 819809 - DNA, 15 bp, Homo sapiens
ccaaagtgctgggat

SEQ ID NO: 819810 - DNA, 15 bp, Homo sapiens
cccaaagtgctggga

SEQ ID NO: 819811 - DNA, 15 bp, Homo sapiens
tcccaaagtgctggg

SEQ ID NO: 819812 - DNA, 15 bp, Homo sapiens
ctcccaaagtgctgg

SEQ ID NO: 819813 - DNA, 15 bp, Homo sapiens
tctcccaaagtgctg

SEQ ID NO: 819814 - DNA, 15 bp, Homo sapiens
gtctcccaaagtgct

SEQ ID NO: 819815 - DNA, 15 bp, Homo sapiens
ggtctcccaaagtgc

SEQ ID NO: 819816 - DNA, 15 bp, Homo sapiens
cggtctcccaaagtg

SEQ ID NO: 819817 - DNA, 15 bp, Homo sapiens
tcggtctcccaaagt

SEQ ID NO: 819818 - DNA, 15 bp, Homo sapiens
ctcggtctcccaaag

SEQ ID NO: 819819 - DNA, 15 bp, Homo sapiens
cctcggtctcccaaa

SEQ ID NO: 819820 - DNA, 15 bp, Homo sapiens
gcctcggtctcccaa

SEQ ID NO: 819821 - DNA, 15 bp, Homo sapiens
tgcctcggtctccca

SEQ ID NO: 819822 - DNA, 15 bp, Homo sapiens
ctgcctcggtctccc

SEQ ID NO: 819823 - DNA, 15 bp, Homo sapiens
cctgcctcggtctcc

SEQ ID NO: 819824 - DNA, 15 bp, Homo sapiens
acctgcctcggtctc

SEQ ID NO: 819825 - DNA, 15 bp, Homo sapiens
cacctgcctcggtct

SEQ ID NO: 819826 - DNA, 15 bp, Homo sapiens
ccacctgcctcggtc

SEQ ID NO: 819827 - DNA, 15 bp, Homo sapiens
tccacctgcctcggt

SEQ ID NO: 819828 - DNA, 15 bp, Homo sapiens
atccacctgcctcgg

SEQ ID NO: 819829 - DNA, 15 bp, Homo sapiens
aatccacctgcctcg

SEQ ID NO: 819830 - DNA, 15 bp, Homo sapiens
caatccacctgcctc

SEQ ID NO: 819831 - DNA, 15 bp, Homo sapiens
gcaatccacctgcct

SEQ ID NO: 819832 - DNA, 15 bp, Homo sapiens
ggcaatccacctgcc

SEQ ID NO: 819833 - DNA, 15 bp, Homo sapiens
aggcaatccacctgc

SEQ ID NO: 819834 - DNA, 15 bp, Homo sapiens
caggcaatccacctg

SEQ ID NO: 819835 - DNA, 15 bp, Homo sapiens
tcaggcaatccacct

SEQ ID NO: 819836 - DNA, 15 bp, Homo sapiens
ttcaggcaatccacc

SEQ ID NO: 819837 - DNA, 15 bp, Homo sapiens
cttcaggcaatccac

SEQ ID NO: 819838 - DNA, 15 bp, Homo sapiens
acttcaggcaatcca

SEQ ID NO: 819839 - DNA, 15 bp, Homo sapiens
gacttcaggcaatcc

SEQ ID NO: 819840 - DNA, 15 bp, Homo sapiens
tgacttcaggcaatc

SEQ ID NO: 819841 - DNA, 15 bp, Homo sapiens
ctgacttcaggcaat

SEQ ID NO: 819842 - DNA, 15 bp, Homo sapiens
cctgacttcaggcaa

SEQ ID NO: 819843 - DNA, 15 bp, Homo sapiens
ccctgacttcaggca

SEQ ID NO: 819844 - DNA, 15 bp, Homo sapiens
cccctgacttcaggc

SEQ ID NO: 819845 - DNA, 15 bp, Homo sapiens
acccctgacttcagg

SEQ ID NO: 819846 - DNA, 15 bp, Homo sapiens
aacccctgacttcag

SEQ ID NO: 819847 - DNA, 15 bp, Homo sapiens
gaacccctgacttca

SEQ ID NO: 819848 - DNA, 15 bp, Homo sapiens
cgaacccctgacttc

SEQ ID NO: 819849 - DNA, 15 bp, Homo sapiens
tcgaacccctgactt

SEQ ID NO: 819850 - DNA, 15 bp, Homo sapiens
ctcgaacccctgact

SEQ ID NO: 819851 - DNA, 15 bp, Homo sapiens
tctcgaacccctgac

SEQ ID NO: 819852 - DNA, 15 bp, Homo sapiens
gtctcgaacccctga

SEQ ID NO: 819853 - DNA, 15 bp, Homo sapiens
ggtctcgaacccctg

SEQ ID NO: 819854 - DNA, 15 bp, Homo sapiens
tggtctcgaacccct

SEQ ID NO: 819855 - DNA, 15 bp, Homo sapiens
ttggtctcgaacccc

SEQ ID NO: 819856 - DNA, 15 bp, Homo sapiens
gttggtctcgaaccc

SEQ ID NO: 819857 - DNA, 15 bp, Homo sapiens
ggttggtctcgaacc

SEQ ID NO: 819858 - DNA, 15 bp, Homo sapiens
aggttggtctcgaac

SEQ ID NO: 819859 - DNA, 15 bp, Homo sapiens
caggttggtctcgaa

SEQ ID NO: 819860 - DNA, 15 bp, Homo sapiens
tcaggttggtctcga

SEQ ID NO: 819861 - DNA, 15 bp, Homo sapiens
gtcaggttggtctcg

SEQ ID NO: 819862 - DNA, 15 bp, Homo sapiens
ggtcaggttggtctc

SEQ ID NO: 819863 - DNA, 15 bp, Homo sapiens
tggtcaggttggtct

SEQ ID NO: 819864 - DNA, 15 bp, Homo sapiens
ttggtcaggttggtc

SEQ ID NO: 819865 - DNA, 15 bp, Homo sapiens
gttggtcaggttggt

SEQ ID NO: 819866 - DNA, 15 bp, Homo sapiens
tgttggtcaggttgg

SEQ ID NO: 819867 - DNA, 15 bp, Homo sapiens
atgttggtcaggttg

SEQ ID NO: 819868 - DNA, 15 bp, Homo sapiens
catgttggtcaggtt

SEQ ID NO: 819869 - DNA, 15 bp, Homo sapiens
ccatgttggtcaggt

SEQ ID NO: 819870 - DNA, 15 bp, Homo sapiens
tccatgttggtcagg

SEQ ID NO: 819871 - DNA, 15 bp, Homo sapiens
ctccatgttggtcag

SEQ ID NO: 819872 - DNA, 15 bp, Homo sapiens
tctccatgttggtca

SEQ ID NO: 819873 - DNA, 15 bp, Homo sapiens
ttctccatgttggtc

SEQ ID NO: 819874 - DNA, 15 bp, Homo sapiens
tttctccatgttggt

SEQ ID NO: 819875 - DNA, 15 bp, Homo sapiens
gtttctccatgttgg

SEQ ID NO: 819876 - DNA, 15 bp, Homo sapiens
ggtttctccatgttg

SEQ ID NO: 819877 - DNA, 15 bp, Homo sapiens
gggtttctccatgtt

SEQ ID NO: 819878 - DNA, 15 bp, Homo sapiens
agggtttctccatgt

SEQ ID NO: 819879 - DNA, 15 bp, Homo sapiens
cagggtttctccatg

SEQ ID NO: 819880 - DNA, 15 bp, Homo sapiens
acagggtttctccat

SEQ ID NO: 819881 - DNA, 15 bp, Homo sapiens
gacagggtttctcca

SEQ ID NO: 819882 - DNA, 15 bp, Homo sapiens
agacagggtttctcc

SEQ ID NO: 819883 - DNA, 15 bp, Homo sapiens
gagacagggtttctc

SEQ ID NO: 819884 - DNA, 15 bp, Homo sapiens
agagacagggtttct

SEQ ID NO: 819885 - DNA, 15 bp, Homo sapiens
tagagacagggtttc

SEQ ID NO: 819886 - DNA, 15 bp, Homo sapiens
gtagagacagggttt

SEQ ID NO: 819887 - DNA, 15 bp, Homo sapiens
agtagagacagggtt

SEQ ID NO: 819888 - DNA, 15 bp, Homo sapiens
tagtagagacagggt

SEQ ID NO: 819889 - DNA, 15 bp, Homo sapiens
ttagtagagacaggg

SEQ ID NO: 819890 - DNA, 15 bp, Homo sapiens
tttagtagagacagg

SEQ ID NO: 819891 - DNA, 15 bp, Homo sapiens
ttttagtagagacag

SEQ ID NO: 819892 - DNA, 15 bp, Homo sapiens
tttttagtagagaca

SEQ ID NO: 819893 - DNA, 15 bp, Homo sapiens
atttttagtagagac

SEQ ID NO: 819894 - DNA, 15 bp, Homo sapiens
tatttttagtagaga

SEQ ID NO: 819895 - DNA, 15 bp, Homo sapiens
atatttttagtagag

SEQ ID NO: 819896 - DNA, 15 bp, Homo sapiens
tatatttttagtaga

SEQ ID NO: 819897 - DNA, 15 bp, Homo sapiens
ttatatttttagtag

SEQ ID NO: 819898 - DNA, 15 bp, Homo sapiens
tttatatttttagta

SEQ ID NO: 819899 - DNA, 15 bp, Homo sapiens
ttttatatttttagt

SEQ ID NO: 819900 - DNA, 15 bp, Homo sapiens
tttttatatttttag

SEQ ID NO: 819901 - DNA, 15 bp, Homo sapiens
ttttttatattttta

SEQ ID NO: 819902 - DNA, 15 bp, Homo sapiens
tttttttatattttt

SEQ ID NO: 819903 - DNA, 15 bp, Homo sapiens
atttttttatatttt

SEQ ID NO: 819904 - DNA, 15 bp, Homo sapiens
tatttttttatattt

SEQ ID NO: 819905 - DNA, 15 bp, Homo sapiens
ctatttttttatatt

SEQ ID NO: 819906 - DNA, 15 bp, Homo sapiens
gctatttttttatat

SEQ ID NO: 819907 - DNA, 15 bp, Homo sapiens
ggctatttttttata

SEQ ID NO: 819908 - DNA, 15 bp, Homo sapiens
cggctatttttttat

SEQ ID NO: 819909 - DNA, 15 bp, Homo sapiens
ccggctattttttta

SEQ ID NO: 819910 - DNA, 15 bp, Homo sapiens
cccggctattttttt

SEQ ID NO: 819911 - DNA, 15 bp, Homo sapiens
gcccggctatttttt

SEQ ID NO: 819912 - DNA, 15 bp, Homo sapiens
tgcccggctattttt

SEQ ID NO: 819913 - DNA, 15 bp, Homo sapiens
atgcccggctatttt

SEQ ID NO: 819914 - DNA, 15 bp, Homo sapiens
catgcccggctattt

SEQ ID NO: 819915 - DNA, 15 bp, Homo sapiens
ccatgcccggctatt

SEQ ID NO: 819916 - DNA, 15 bp, Homo sapiens
accatgcccggctat

SEQ ID NO: 819917 - DNA, 15 bp, Homo sapiens
caccatgcccggcta

SEQ ID NO: 819918 - DNA, 15 bp, Homo sapiens
ccaccatgcccggct

SEQ ID NO: 819919 - DNA, 15 bp, Homo sapiens
accaccatgcccggc

SEQ ID NO: 819920 - DNA, 15 bp, Homo sapiens
caccaccatgcccgg

SEQ ID NO: 819921 - DNA, 15 bp, Homo sapiens
gcaccaccatgcccg

SEQ ID NO: 819922 - DNA, 15 bp, Homo sapiens
tgcaccaccatgccc

SEQ ID NO: 819923 - DNA, 15 bp, Homo sapiens
atgcaccaccatgcc

SEQ ID NO: 819924 - DNA, 15 bp, Homo sapiens
catgcaccaccatgc

SEQ ID NO: 819925 - DNA, 15 bp, Homo sapiens
gcatgcaccaccatg

SEQ ID NO: 819926 - DNA, 15 bp, Homo sapiens
ggcatgcaccaccat

SEQ ID NO: 819927 - DNA, 15 bp, Homo sapiens
aggcatgcaccacca

SEQ ID NO: 819928 - DNA, 15 bp, Homo sapiens
caggcatgcaccacc

SEQ ID NO: 819929 - DNA, 15 bp, Homo sapiens
acaggcatgcaccac

SEQ ID NO: 819930 - DNA, 15 bp, Homo sapiens
tacaggcatgcacca

SEQ ID NO: 819931 - DNA, 15 bp, Homo sapiens
ttacaggcatgcacc

SEQ ID NO: 819932 - DNA, 15 bp, Homo sapiens
attacaggcatgcac

SEQ ID NO: 819933 - DNA, 15 bp, Homo sapiens
gattacaggcatgca

SEQ ID NO: 819934 - DNA, 15 bp, Homo sapiens
ggattacaggcatgc

SEQ ID NO: 819935 - DNA, 15 bp, Homo sapiens
gggattacaggcatg

SEQ ID NO: 819936 - DNA, 15 bp, Homo sapiens
tgggattacaggcat

SEQ ID NO: 819937 - DNA, 15 bp, Homo sapiens
ctgggattacaggca

SEQ ID NO: 819938 - DNA, 15 bp, Homo sapiens
gctgggattacaggc

SEQ ID NO: 819939 - DNA, 15 bp, Homo sapiens
agctgggattacagg

SEQ ID NO: 819940 - DNA, 15 bp, Homo sapiens
tagctgggattacag

SEQ ID NO: 819941 - DNA, 15 bp, Homo sapiens
gtagctgggattaca

SEQ ID NO: 819942 - DNA, 15 bp, Homo sapiens
agtagctgggattac

SEQ ID NO: 819943 - DNA, 15 bp, Homo sapiens
gagtagctgggatta

SEQ ID NO: 819944 - DNA, 15 bp, Homo sapiens
tgagtagctgggatt

SEQ ID NO: 819945 - DNA, 15 bp, Homo sapiens
ctgagtagctgggat

SEQ ID NO: 819946 - DNA, 15 bp, Homo sapiens
cctgagtagctggga

SEQ ID NO: 819947 - DNA, 15 bp, Homo sapiens
tcctgagtagctggg

SEQ ID NO: 819948 - DNA, 15 bp, Homo sapiens
ctcctgagtagctgg

SEQ ID NO: 819949 - DNA, 15 bp, Homo sapiens
cctcctgagtagctg

SEQ ID NO: 819950 - DNA, 15 bp, Homo sapiens
gcctcctgagtagct

SEQ ID NO: 819951 - DNA, 15 bp, Homo sapiens
agcctcctgagtagc

SEQ ID NO: 819952 - DNA, 15 bp, Homo sapiens
cagcctcctgagtag

SEQ ID NO: 819953 - DNA, 15 bp, Homo sapiens
tcagcctcctgagta

SEQ ID NO: 819954 - DNA, 15 bp, Homo sapiens
ctcagcctcctgagt

SEQ ID NO: 819955 - DNA, 15 bp, Homo sapiens
cctcagcctcctgag

SEQ ID NO: 819956 - DNA, 15 bp, Homo sapiens
gcctcagcctcctga

SEQ ID NO: 819957 - DNA, 15 bp, Homo sapiens
tgcctcagcctcctg

SEQ ID NO: 819958 - DNA, 15 bp, Homo sapiens
ctgcctcagcctcct

SEQ ID NO: 819959 - DNA, 15 bp, Homo sapiens
cctgcctcagcctcc

SEQ ID NO: 819960 - DNA, 15 bp, Homo sapiens
tcctgcctcagcctc

SEQ ID NO: 819961 - DNA, 15 bp, Homo sapiens
ctcctgcctcagcct

SEQ ID NO: 819962 - DNA, 15 bp, Homo sapiens
tctcctgcctcagcc

SEQ ID NO: 819963 - DNA, 15 bp, Homo sapiens
ttctcctgcctcagc

SEQ ID NO: 819964 - DNA, 15 bp, Homo sapiens
attctcctgcctcag

SEQ ID NO: 819965 - DNA, 15 bp, Homo sapiens
aattctcctgcctca

SEQ ID NO: 819966 - DNA, 15 bp, Homo sapiens
caattctcctgcctc

SEQ ID NO: 819967 - DNA, 15 bp, Homo sapiens
gcaattctcctgcct

SEQ ID NO: 819968 - DNA, 15 bp, Homo sapiens
agcaattctcctgcc

SEQ ID NO: 819969 - DNA, 15 bp, Homo sapiens
aagcaattctcctgc

SEQ ID NO: 819970 - DNA, 15 bp, Homo sapiens
caagcaattctcctg

SEQ ID NO: 819971 - DNA, 15 bp, Homo sapiens
tcaagcaattctcct

SEQ ID NO: 819972 - DNA, 15 bp, Homo sapiens
ttcaagcaattctcc

SEQ ID NO: 819973 - DNA, 15 bp, Homo sapiens
gttcaagcaattctc

SEQ ID NO: 819974 - DNA, 15 bp, Homo sapiens
ggttcaagcaattct

SEQ ID NO: 819975 - DNA, 15 bp, Homo sapiens
gggttcaagcaattc

SEQ ID NO: 819976 - DNA, 15 bp, Homo sapiens
tgggttcaagcaatt

SEQ ID NO: 819977 - DNA, 15 bp, Homo sapiens
ctgggttcaagcaat

SEQ ID NO: 819978 - DNA, 15 bp, Homo sapiens
cctgggttcaagcaa

SEQ ID NO: 819979 - DNA, 15 bp, Homo sapiens
tcctgggttcaagca

SEQ ID NO: 819980 - DNA, 15 bp, Homo sapiens
ctcctgggttcaagc

SEQ ID NO: 819981 - DNA, 15 bp, Homo sapiens
cctcctgggttcaag

SEQ ID NO: 819982 - DNA, 15 bp, Homo sapiens
acctcctgggttcaa

SEQ ID NO: 819983 - DNA, 15 bp, Homo sapiens
cacctcctgggttca

SEQ ID NO: 819984 - DNA, 15 bp, Homo sapiens
ccacctcctgggttc

SEQ ID NO: 819985 - DNA, 15 bp, Homo sapiens
tccacctcctgggtt

SEQ ID NO: 819986 - DNA, 15 bp, Homo sapiens
ctccacctcctgggt

SEQ ID NO: 819987 - DNA, 15 bp, Homo sapiens
cctccacctcctggg

SEQ ID NO: 819988 - DNA, 15 bp, Homo sapiens
acctccacctcctgg

SEQ ID NO: 819989 - DNA, 15 bp, Homo sapiens
aacctccacctcctg

SEQ ID NO: 819990 - DNA, 15 bp, Homo sapiens
caacctccacctcct

SEQ ID NO: 819991 - DNA, 15 bp, Homo sapiens
acaacctccacctcc

SEQ ID NO: 819992 - DNA, 15 bp, Homo sapiens
cacaacctccacctc

SEQ ID NO: 819993 - DNA, 15 bp, Homo sapiens
ccacaacctccacct

SEQ ID NO: 819994 - DNA, 15 bp, Homo sapiens
accacaacctccacc

SEQ ID NO: 819995 - DNA, 15 bp, Homo sapiens
caccacaacctccac

SEQ ID NO: 819996 - DNA, 15 bp, Homo sapiens
tcaccacaacctcca

SEQ ID NO: 819997 - DNA, 15 bp, Homo sapiens
ctcaccacaacctcc

SEQ ID NO: 819998 - DNA, 15 bp, Homo sapiens
gctcaccacaacctc

SEQ ID NO: 819999 - DNA, 15 bp, Homo sapiens
agctcaccacaacct

SEQ ID NO: 820000 - DNA, 15 bp, Homo sapiens
cagctcaccacaacc

SEQ ID NO: 820001 - DNA, 15 bp, Homo sapiens
tcagctcaccacaac

SEQ ID NO: 820002 - DNA, 15 bp, Homo sapiens
ctcagctcaccacaa

SEQ ID NO: 820003 - DNA, 15 bp, Homo sapiens
tctcagctcaccaca

SEQ ID NO: 820004 - DNA, 15 bp, Homo sapiens
atctcagctcaccac

SEQ ID NO: 820005 - DNA, 15 bp, Homo sapiens
aatctcagctcacca

SEQ ID NO: 820006 - DNA, 15 bp, Homo sapiens
caatctcagctcacc

SEQ ID NO: 820007 - DNA, 15 bp, Homo sapiens
gcaatctcagctcac

SEQ ID NO: 820008 - DNA, 15 bp, Homo sapiens
cgcaatctcagctca

SEQ ID NO: 820009 - DNA, 15 bp, Homo sapiens
gcgcaatctcagctc

SEQ ID NO: 820010 - DNA, 15 bp, Homo sapiens
ggcgcaatctcagct

SEQ ID NO: 820011 - DNA, 15 bp, Homo sapiens
tggcgcaatctcagc

SEQ ID NO: 820012 - DNA, 15 bp, Homo sapiens
atggcgcaatctcag

SEQ ID NO: 820013 - DNA, 15 bp, Homo sapiens
aatggcgcaatctca

SEQ ID NO: 820014 - DNA, 15 bp, Homo sapiens
caatggcgcaatctc

SEQ ID NO: 820015 - DNA, 15 bp, Homo sapiens
gcaatggcgcaatct

SEQ ID NO: 820016 - DNA, 15 bp, Homo sapiens
cgcaatggcgcaatc

SEQ ID NO: 820017 - DNA, 15 bp, Homo sapiens
gcgcaatggcgcaat

SEQ ID NO: 820018 - DNA, 15 bp, Homo sapiens
agcgcaatggcgcaa

SEQ ID NO: 820019 - DNA, 15 bp, Homo sapiens
gagcgcaatggcgca

SEQ ID NO: 820020 - DNA, 15 bp, Homo sapiens
ggagcgcaatggcgc

SEQ ID NO: 820021 - DNA, 15 bp, Homo sapiens
tggagcgcaatggcg

SEQ ID NO: 820022 - DNA, 15 bp, Homo sapiens
ctggagcgcaatggc

SEQ ID NO: 820023 - DNA, 15 bp, Homo sapiens
gctggagcgcaatgg

SEQ ID NO: 820024 - DNA, 15 bp, Homo sapiens
ggctggagcgcaatg

SEQ ID NO: 820025 - DNA, 15 bp, Homo sapiens
aggctggagcgcaat

SEQ ID NO: 820026 - DNA, 15 bp, Homo sapiens
caggctggagcgcaa

SEQ ID NO: 820027 - DNA, 15 bp, Homo sapiens
ccaggctggagcgca

SEQ ID NO: 820028 - DNA, 15 bp, Homo sapiens
cccaggctggagcgc

SEQ ID NO: 820029 - DNA, 15 bp, Homo sapiens
gcccaggctggagcg

SEQ ID NO: 820030 - DNA, 15 bp, Homo sapiens
tgcccaggctggagc

SEQ ID NO: 820031 - DNA, 15 bp, Homo sapiens
ttgcccaggctggag

SEQ ID NO: 820032 - DNA, 15 bp, Homo sapiens
gttgcccaggctgga

SEQ ID NO: 820033 - DNA, 15 bp, Homo sapiens
tgttgcccaggctgg

SEQ ID NO: 820034 - DNA, 15 bp, Homo sapiens
ttgttgcccaggctg

SEQ ID NO: 820035 - DNA, 15 bp, Homo sapiens
cttgttgcccaggct

SEQ ID NO: 820036 - DNA, 15 bp, Homo sapiens
tcttgttgcccaggc

SEQ ID NO: 820037 - DNA, 15 bp, Homo sapiens
ctcttgttgcccagg

SEQ ID NO: 820038 - DNA, 15 bp, Homo sapiens
actcttgttgcccag

SEQ ID NO: 820039 - DNA, 15 bp, Homo sapiens
cactcttgttgccca

SEQ ID NO: 820040 - DNA, 15 bp, Homo sapiens
tcactcttgttgccc

SEQ ID NO: 820041 - DNA, 15 bp, Homo sapiens
ttcactcttgttgcc

SEQ ID NO: 820042 - DNA, 15 bp, Homo sapiens
tttcactcttgttgc

SEQ ID NO: 820043 - DNA, 15 bp, Homo sapiens
gtttcactcttgttg

SEQ ID NO: 820044 - DNA, 15 bp, Homo sapiens
agtttcactcttgtt

SEQ ID NO: 820045 - DNA, 15 bp, Homo sapiens
gagtttcactcttgt

SEQ ID NO: 820046 - DNA, 15 bp, Homo sapiens
agagtttcactcttg

SEQ ID NO: 820047 - DNA, 15 bp, Homo sapiens
cagagtttcactctt

SEQ ID NO: 820048 - DNA, 15 bp, Homo sapiens
acagagtttcactct

SEQ ID NO: 820049 - DNA, 15 bp, Homo sapiens
gacagagtttcactc

SEQ ID NO: 820050 - DNA, 15 bp, Homo sapiens
agacagagtttcact

SEQ ID NO: 820051 - DNA, 15 bp, Homo sapiens
gagacagagtttcac

SEQ ID NO: 820052 - DNA, 15 bp, Homo sapiens
tgagacagagtttca

SEQ ID NO: 820053 - DNA, 15 bp, Homo sapiens
ttgagacagagtttc

SEQ ID NO: 820054 - DNA, 15 bp, Homo sapiens
tttgagacagagttt

SEQ ID NO: 820055 - DNA, 15 bp, Homo sapiens
ttttgagacagagtt

SEQ ID NO: 820056 - DNA, 15 bp, Homo sapiens
tttttgagacagagt

SEQ ID NO: 820057 - DNA, 15 bp, Homo sapiens
ttttttgagacagag

SEQ ID NO: 820058 - DNA, 15 bp, Homo sapiens
tttttttgagacaga

SEQ ID NO: 820059 - DNA, 15 bp, Homo sapiens
ttttttttgagacag

SEQ ID NO: 820060 - DNA, 15 bp, Homo sapiens
tttttttttgagaca

SEQ ID NO: 820061 - DNA, 15 bp, Homo sapiens
ttttttttttgagac

SEQ ID NO: 820062 - DNA, 15 bp, Homo sapiens
tttttttttttgaga

SEQ ID NO: 820063 - DNA, 15 bp, Homo sapiens
ttttttttttttgag

SEQ ID NO: 820064 - DNA, 15 bp, Homo sapiens
tttttttttttttga

SEQ ID NO: 820065 - DNA, 15 bp, Homo sapiens
ttttttttttttttg

SEQ ID NO: 820066 - DNA, 15 bp, Homo sapiens
ttttttttttttttt

SEQ ID NO: 820067 - DNA, 15 bp, Homo sapiens
ctttttttttttttt

SEQ ID NO: 820068 - DNA, 15 bp, Homo sapiens
tcttttttttttttt

SEQ ID NO: 820069 - DNA, 15 bp, Homo sapiens
ttctttttttttttt

SEQ ID NO: 820070 - DNA, 15 bp, Homo sapiens
tttcttttttttttt

SEQ ID NO: 820071 - DNA, 15 bp, Homo sapiens
gtttctttttttttt

SEQ ID NO: 820072 - DNA, 15 bp, Homo sapiens
tgtttcttttttttt

SEQ ID NO: 820073 - DNA, 15 bp, Homo sapiens
ttgtttctttttttt

SEQ ID NO: 820074 - DNA, 15 bp, Homo sapiens
tttgtttcttttttt

SEQ ID NO: 820075 - DNA, 15 bp, Homo sapiens
ttttgtttctttttt

SEQ ID NO: 820076 - DNA, 15 bp, Homo sapiens
tttttgtttcttttt

SEQ ID NO: 820077 - DNA, 15 bp, Homo sapiens
ttttttgtttctttt

SEQ ID NO: 820078 - DNA, 15 bp, Homo sapiens
tttttttgtttcttt

SEQ ID NO: 820079 - DNA, 15 bp, Homo sapiens
ttttttttgtttctt

SEQ ID NO: 820080 - DNA, 15 bp, Homo sapiens
tttttttttgtttct

SEQ ID NO: 820081 - DNA, 15 bp, Homo sapiens
ttttttttttgtttc

SEQ ID NO: 820082 - DNA, 15 bp, Homo sapiens
tttttttttttgttt

SEQ ID NO: 820083 - DNA, 15 bp, Homo sapiens
ttttttttttttgtt

SEQ ID NO: 820084 - DNA, 15 bp, Homo sapiens
tttttttttttttgt

SEQ ID NO: 820085 - DNA, 15 bp, Homo sapiens
gtttttttttttttt

SEQ ID NO: 820086 - DNA, 15 bp, Homo sapiens
tgttttttttttttt

SEQ ID NO: 820087 - DNA, 15 bp, Homo sapiens
ttgtttttttttttt

SEQ ID NO: 820088 - DNA, 15 bp, Homo sapiens
tttgttttttttttt

SEQ ID NO: 820089 - DNA, 15 bp, Homo sapiens
ttttgtttttttttt

SEQ ID NO: 820090 - DNA, 15 bp, Homo sapiens
tttttgttttttttt

SEQ ID NO: 820091 - DNA, 15 bp, Homo sapiens
ctttttgtttttttt

SEQ ID NO: 820092 - DNA, 15 bp, Homo sapiens
gctttttgttttttt

SEQ ID NO: 820093 - DNA, 15 bp, Homo sapiens
tgctttttgtttttt

SEQ ID NO: 820094 - DNA, 15 bp, Homo sapiens
ttgctttttgttttt

SEQ ID NO: 820095 - DNA, 15 bp, Homo sapiens
tttgctttttgtttt

SEQ ID NO: 820096 - DNA, 15 bp, Homo sapiens
gtttgctttttgttt

SEQ ID NO: 820097 - DNA, 15 bp, Homo sapiens
tgtttgctttttgtt

SEQ ID NO: 820098 - DNA, 15 bp, Homo sapiens
ttgtttgctttttgt

SEQ ID NO: 820099 - DNA, 15 bp, Homo sapiens
tttgtttgctttttg

SEQ ID NO: 820100 - DNA, 15 bp, Homo sapiens
gtttgtttgcttttt

SEQ ID NO: 820101 - DNA, 15 bp, Homo sapiens
tgtttgtttgctttt

SEQ ID NO: 820102 - DNA, 15 bp, Homo sapiens
ttgtttgtttgcttt

SEQ ID NO: 820103 - DNA, 15 bp, Homo sapiens
tttgtttgtttgctt

SEQ ID NO: 820104 - DNA, 15 bp, Homo sapiens
ttttgtttgtttgct

SEQ ID NO: 820105 - DNA, 15 bp, Homo sapiens
tttttgtttgtttgc

SEQ ID NO: 820106 - DNA, 15 bp, Homo sapiens
ttttttgtttgtttg

SEQ ID NO: 820107 - DNA, 15 bp, Homo sapiens
tttttttgtttgttt

SEQ ID NO: 820108 - DNA, 15 bp, Homo sapiens
gtttttttgtttgtt

SEQ ID NO: 820109 - DNA, 15 bp, Homo sapiens
tgtttttttgtttgt

SEQ ID NO: 820110 - DNA, 15 bp, Homo sapiens
ttgtttttttgtttg

SEQ ID NO: 820111 - DNA, 15 bp, Homo sapiens
tttgtttttttgttt

SEQ ID NO: 820112 - DNA, 15 bp, Homo sapiens
ttttgtttttttgtt

SEQ ID NO: 820113 - DNA, 15 bp, Homo sapiens
tttttgtttttttgt

SEQ ID NO: 820114 - DNA, 15 bp, Homo sapiens
atttttgtttttttg

SEQ ID NO: 820115 - DNA, 15 bp, Homo sapiens
aatttttgttttttt

SEQ ID NO: 820116 - DNA, 15 bp, Homo sapiens
taatttttgtttttt

SEQ ID NO: 820117 - DNA, 15 bp, Homo sapiens
ataatttttgttttt

SEQ ID NO: 820118 - DNA, 15 bp, Homo sapiens
gataatttttgtttt

SEQ ID NO: 820119 - DNA, 15 bp, Homo sapiens
tgataatttttgttt

SEQ ID NO: 820120 - DNA, 15 bp, Homo sapiens
gtgataatttttgtt

SEQ ID NO: 820121 - DNA, 15 bp, Homo sapiens
agtgataatttttgt

SEQ ID NO: 820122 - DNA, 15 bp, Homo sapiens
aagtgataatttttg

SEQ ID NO: 820123 - DNA, 15 bp, Homo sapiens
gaagtgataattttt

SEQ ID NO: 820124 - DNA, 15 bp, Homo sapiens
ggaagtgataatttt

SEQ ID NO: 820125 - DNA, 15 bp, Homo sapiens
aggaagtgataattt

SEQ ID NO: 820126 - DNA, 15 bp, Homo sapiens
taggaagtgataatt

SEQ ID NO: 820127 - DNA, 15 bp, Homo sapiens
ttaggaagtgataat

SEQ ID NO: 820128 - DNA, 15 bp, Homo sapiens
attaggaagtgataa

SEQ ID NO: 820129 - DNA, 15 bp, Homo sapiens
aattaggaagtgata

SEQ ID NO: 820130 - DNA, 15 bp, Homo sapiens
taattaggaagtgat

SEQ ID NO: 820131 - DNA, 15 bp, Homo sapiens
ataattaggaagtga

SEQ ID NO: 820132 - DNA, 15 bp, Homo sapiens
aataattaggaagtg

SEQ ID NO: 820133 - DNA, 15 bp, Homo sapiens
aaataattaggaagt

SEQ ID NO: 820134 - DNA, 15 bp, Homo sapiens
aaaataattaggaag

SEQ ID NO: 820135 - DNA, 15 bp, Homo sapiens
caaaataattaggaa

SEQ ID NO: 820136 - DNA, 15 bp, Homo sapiens
gcaaaataattagga

SEQ ID NO: 820137 - DNA, 15 bp, Homo sapiens
tgcaaaataattagg

SEQ ID NO: 820138 - DNA, 15 bp, Homo sapiens
atgcaaaataattag

SEQ ID NO: 820139 - DNA, 15 bp, Homo sapiens
aatgcaaaataatta

SEQ ID NO: 820140 - DNA, 15 bp, Homo sapiens
aaatgcaaaataatt

SEQ ID NO: 820141 - DNA, 15 bp, Homo sapiens
aaaatgcaaaataat

SEQ ID NO: 820142 - DNA, 15 bp, Homo sapiens
taaaatgcaaaataa

SEQ ID NO: 820143 - DNA, 15 bp, Homo sapiens
gtaaaatgcaaaata

SEQ ID NO: 820144 - DNA, 15 bp, Homo sapiens
agtaaaatgcaaaat

SEQ ID NO: 820145 - DNA, 15 bp, Homo sapiens
tagtaaaatgcaaaa

SEQ ID NO: 820146 - DNA, 15 bp, Homo sapiens
atagtaaaatgcaaa

SEQ ID NO: 820147 - DNA, 15 bp, Homo sapiens
aatagtaaaatgcaa

SEQ ID NO: 820148 - DNA, 15 bp, Homo sapiens
taatagtaaaatgca

SEQ ID NO: 820149 - DNA, 15 bp, Homo sapiens
ataatagtaaaatgc

SEQ ID NO: 820150 - DNA, 15 bp, Homo sapiens
gataatagtaaaatg

SEQ ID NO: 820151 - DNA, 15 bp, Homo sapiens
agataatagtaaaat

SEQ ID NO: 820152 - DNA, 15 bp, Homo sapiens
tagataatagtaaaa

SEQ ID NO: 820153 - DNA, 15 bp, Homo sapiens
atagataatagtaaa

SEQ ID NO: 820154 - DNA, 15 bp, Homo sapiens
catagataatagtaa

SEQ ID NO: 820155 - DNA, 15 bp, Homo sapiens
gcatagataatagta

SEQ ID NO: 820156 - DNA, 15 bp, Homo sapiens
agcatagataatagt

SEQ ID NO: 820157 - DNA, 15 bp, Homo sapiens
tagcatagataatag

SEQ ID NO: 820158 - DNA, 15 bp, Homo sapiens
atagcatagataata

SEQ ID NO: 820159 - DNA, 15 bp, Homo sapiens
aatagcatagataat

SEQ ID NO: 820160 - DNA, 15 bp, Homo sapiens
taatagcatagataa

SEQ ID NO: 820161 - DNA, 15 bp, Homo sapiens
ttaatagcatagata

SEQ ID NO: 820162 - DNA, 15 bp, Homo sapiens
gttaatagcatagat

SEQ ID NO: 820163 - DNA, 15 bp, Homo sapiens
cgttaatagcataga

SEQ ID NO: 820164 - DNA, 15 bp, Homo sapiens
acgttaatagcatag

SEQ ID NO: 820165 - DNA, 15 bp, Homo sapiens
aacgttaatagcata

SEQ ID NO: 820166 - DNA, 15 bp, Homo sapiens
taacgttaatagcat

SEQ ID NO: 820167 - DNA, 15 bp, Homo sapiens
ataacgttaatagca

SEQ ID NO: 820168 - DNA, 15 bp, Homo sapiens
aataacgttaatagc

SEQ ID NO: 820169 - DNA, 15 bp, Homo sapiens
aaataacgttaatag

SEQ ID NO: 820170 - DNA, 15 bp, Homo sapiens
caaataacgttaata

SEQ ID NO: 820171 - DNA, 15 bp, Homo sapiens
gcaaataacgttaat

SEQ ID NO: 820172 - DNA, 15 bp, Homo sapiens
ggcaaataacgttaa

SEQ ID NO: 820173 - DNA, 15 bp, Homo sapiens
aggcaaataacgtta

SEQ ID NO: 820174 - DNA, 15 bp, Homo sapiens
aaggcaaataacgtt

SEQ ID NO: 820175 - DNA, 15 bp, Homo sapiens
gaaggcaaataacgt

SEQ ID NO: 820176 - DNA, 15 bp, Homo sapiens
tgaaggcaaataacg

SEQ ID NO: 820177 - DNA, 15 bp, Homo sapiens
atgaaggcaaataac

SEQ ID NO: 820178 - DNA, 15 bp, Homo sapiens
aatgaaggcaaataa

SEQ ID NO: 820179 - DNA, 15 bp, Homo sapiens
caatgaaggcaaata

SEQ ID NO: 820180 - DNA, 15 bp, Homo sapiens
acaatgaaggcaaat

SEQ ID NO: 820181 - DNA, 15 bp, Homo sapiens
tacaatgaaggcaaa

SEQ ID NO: 820182 - DNA, 15 bp, Homo sapiens
atacaatgaaggcaa

SEQ ID NO: 820183 - DNA, 15 bp, Homo sapiens
aatacaatgaaggca

SEQ ID NO: 820184 - DNA, 15 bp, Homo sapiens
aaatacaatgaaggc

SEQ ID NO: 820185 - DNA, 15 bp, Homo sapiens
caaatacaatgaagg

SEQ ID NO: 820186 - DNA, 15 bp, Homo sapiens
tcaaatacaatgaag

SEQ ID NO: 820187 - DNA, 15 bp, Homo sapiens
ttcaaatacaatgaa

SEQ ID NO: 820188 - DNA, 15 bp, Homo sapiens
tttcaaatacaatga

SEQ ID NO: 820189 - DNA, 15 bp, Homo sapiens
ctttcaaatacaatg

SEQ ID NO: 820190 - DNA, 15 bp, Homo sapiens
cctttcaaatacaat

SEQ ID NO: 820191 - DNA, 15 bp, Homo sapiens
acctttcaaatacaa

SEQ ID NO: 820192 - DNA, 15 bp, Homo sapiens
cacctttcaaataca

SEQ ID NO: 820193 - DNA, 15 bp, Homo sapiens
ccacctttcaaatac

SEQ ID NO: 820194 - DNA, 15 bp, Homo sapiens
tccacctttcaaata

SEQ ID NO: 820195 - DNA, 15 bp, Homo sapiens
gtccacctttcaaat

SEQ ID NO: 820196 - DNA, 15 bp, Homo sapiens
agtccacctttcaaa

SEQ ID NO: 820197 - DNA, 15 bp, Homo sapiens
tagtccacctttcaa

SEQ ID NO: 820198 - DNA, 15 bp, Homo sapiens
atagtccacctttca

SEQ ID NO: 820199 - DNA, 15 bp, Homo sapiens
tatagtccacctttc

SEQ ID NO: 820200 - DNA, 15 bp, Homo sapiens
atatagtccaccttt

SEQ ID NO: 820201 - DNA, 15 bp, Homo sapiens
aatatagtccacctt

SEQ ID NO: 820202 - DNA, 15 bp, Homo sapiens
gaatatagtccacct

SEQ ID NO: 820203 - DNA, 15 bp, Homo sapiens
agaatatagtccacc

SEQ ID NO: 820204 - DNA, 15 bp, Homo sapiens
tagaatatagtccac

SEQ ID NO: 820205 - DNA, 15 bp, Homo sapiens
atagaatatagtcca

SEQ ID NO: 820206 - DNA, 15 bp, Homo sapiens
aatagaatatagtcc

SEQ ID NO: 820207 - DNA, 15 bp, Homo sapiens
caatagaatatagtc

SEQ ID NO: 820208 - DNA, 15 bp, Homo sapiens
gcaatagaatatagt

SEQ ID NO: 820209 - DNA, 15 bp, Homo sapiens
tgcaatagaatatag

SEQ ID NO: 820210 - DNA, 15 bp, Homo sapiens
gtgcaatagaatata

SEQ ID NO: 820211 - DNA, 15 bp, Homo sapiens
agtgcaatagaatat

SEQ ID NO: 820212 - DNA, 15 bp, Homo sapiens
aagtgcaatagaata

SEQ ID NO: 820213 - DNA, 15 bp, Homo sapiens
aaagtgcaatagaat

SEQ ID NO: 820214 - DNA, 15 bp, Homo sapiens
gaaagtgcaatagaa

SEQ ID NO: 820215 - DNA, 15 bp, Homo sapiens
tgaaagtgcaataga

SEQ ID NO: 820216 - DNA, 15 bp, Homo sapiens
atgaaagtgcaatag

SEQ ID NO: 820217 - DNA, 15 bp, Homo sapiens
aatgaaagtgcaata

SEQ ID NO: 820218 - DNA, 15 bp, Homo sapiens
caatgaaagtgcaat

SEQ ID NO: 820219 - DNA, 15 bp, Homo sapiens
acaatgaaagtgcaa

SEQ ID NO: 820220 - DNA, 15 bp, Homo sapiens
tacaatgaaagtgca

SEQ ID NO: 820221 - DNA, 15 bp, Homo sapiens
gtacaatgaaagtgc

SEQ ID NO: 820222 - DNA, 15 bp, Homo sapiens
agtacaatgaaagtg

SEQ ID NO: 820223 - DNA, 15 bp, Homo sapiens
tagtacaatgaaagt

SEQ ID NO: 820224 - DNA, 15 bp, Homo sapiens
atagtacaatgaaag

SEQ ID NO: 820225 - DNA, 15 bp, Homo sapiens
tatagtacaatgaaa

SEQ ID NO: 820226 - DNA, 15 bp, Homo sapiens
atatagtacaatgaa

SEQ ID NO: 820227 - DNA, 15 bp, Homo sapiens
aatatagtacaatga

SEQ ID NO: 820228 - DNA, 15 bp, Homo sapiens
gaatatagtacaatg

SEQ ID NO: 820229 - DNA, 15 bp, Homo sapiens
agaatatagtacaat

SEQ ID NO: 820230 - DNA, 15 bp, Homo sapiens
tagaatatagtacaa

SEQ ID NO: 820231 - DNA, 15 bp, Homo sapiens
ttagaatatagtaca

SEQ ID NO: 820232 - DNA, 15 bp, Homo sapiens
attagaatatagtac

SEQ ID NO: 820233 - DNA, 15 bp, Homo sapiens
tattagaatatagta

SEQ ID NO: 820234 - DNA, 15 bp, Homo sapiens
atattagaatatagt

SEQ ID NO: 820235 - DNA, 15 bp, Homo sapiens
catattagaatatag

SEQ ID NO: 820236 - DNA, 15 bp, Homo sapiens
gcatattagaatata

SEQ ID NO: 820237 - DNA, 15 bp, Homo sapiens
tgcatattagaatat

SEQ ID NO: 820238 - DNA, 15 bp, Homo sapiens
ttgcatattagaata

SEQ ID NO: 820239 - DNA, 15 bp, Homo sapiens
gttgcatattagaat

SEQ ID NO: 820240 - DNA, 15 bp, Homo sapiens
agttgcatattagaa

SEQ ID NO: 820241 - DNA, 15 bp, Homo sapiens
cagttgcatattaga

SEQ ID NO: 820242 - DNA, 15 bp, Homo sapiens
acagttgcatattag

SEQ ID NO: 820243 - DNA, 15 bp, Homo sapiens
cacagttgcatatta

SEQ ID NO: 820244 - DNA, 15 bp, Homo sapiens
acacagttgcatatt

SEQ ID NO: 820245 - DNA, 15 bp, Homo sapiens
tacacagttgcatat

SEQ ID NO: 820246 - DNA, 15 bp, Homo sapiens
atacacagttgcata

SEQ ID NO: 820247 - DNA, 15 bp, Homo sapiens
gatacacagttgcat

SEQ ID NO: 820248 - DNA, 15 bp, Homo sapiens
ggatacacagttgca

SEQ ID NO: 820249 - DNA, 15 bp, Homo sapiens
gggatacacagttgc

SEQ ID NO: 820250 - DNA, 15 bp, Homo sapiens
agggatacacagttg

SEQ ID NO: 820251 - DNA, 15 bp, Homo sapiens
aagggatacacagtt

SEQ ID NO: 820252 - DNA, 15 bp, Homo sapiens
gaagggatacacagt

SEQ ID NO: 820253 - DNA, 15 bp, Homo sapiens
ggaagggatacacag

SEQ ID NO: 820254 - DNA, 15 bp, Homo sapiens
gggaagggatacaca

SEQ ID NO: 820255 - DNA, 15 bp, Homo sapiens
tgggaagggatacac

SEQ ID NO: 820256 - DNA, 15 bp, Homo sapiens
ttgggaagggataca

SEQ ID NO: 820257 - DNA, 15 bp, Homo sapiens
gttgggaagggatac

SEQ ID NO: 820258 - DNA, 15 bp, Homo sapiens
agttgggaagggata

SEQ ID NO: 820259 - DNA, 15 bp, Homo sapiens
gagttgggaagggat

SEQ ID NO: 820260 - DNA, 15 bp, Homo sapiens
agagttgggaaggga

SEQ ID NO: 820261 - DNA, 15 bp, Homo sapiens
cagagttgggaaggg

SEQ ID NO: 820262 - DNA, 15 bp, Homo sapiens
acagagttgggaagg

SEQ ID NO: 820263 - DNA, 15 bp, Homo sapiens
cacagagttgggaag

SEQ ID NO: 820264 - DNA, 15 bp, Homo sapiens
acacagagttgggaa

SEQ ID NO: 820265 - DNA, 15 bp, Homo sapiens
aacacagagttggga

SEQ ID NO: 820266 - DNA, 15 bp, Homo sapiens
gaacacagagttggg

SEQ ID NO: 820267 - DNA, 15 bp, Homo sapiens
tgaacacagagttgg

SEQ ID NO: 820268 - DNA, 15 bp, Homo sapiens
ttgaacacagagttg

SEQ ID NO: 820269 - DNA, 15 bp, Homo sapiens
attgaacacagagtt

SEQ ID NO: 820270 - DNA, 15 bp, Homo sapiens
cattgaacacagagt

SEQ ID NO: 820271 - DNA, 15 bp, Homo sapiens
tcattgaacacagag

SEQ ID NO: 820272 - DNA, 15 bp, Homo sapiens
gtcattgaacacaga

SEQ ID NO: 820273 - DNA, 15 bp, Homo sapiens
agtcattgaacacag

SEQ ID NO: 820274 - DNA, 15 bp, Homo sapiens
aagtcattgaacaca

SEQ ID NO: 820275 - DNA, 15 bp, Homo sapiens
aaagtcattgaacac

SEQ ID NO: 820276 - DNA, 15 bp, Homo sapiens
taaagtcattgaaca

SEQ ID NO: 820277 - DNA, 15 bp, Homo sapiens
ataaagtcattgaac

SEQ ID NO: 820278 - DNA, 15 bp, Homo sapiens
tataaagtcattgaa

SEQ ID NO: 820279 - DNA, 15 bp, Homo sapiens
atataaagtcattga

SEQ ID NO: 820280 - DNA, 15 bp, Homo sapiens
aatataaagtcattg

SEQ ID NO: 820281 - DNA, 15 bp, Homo sapiens
aaatataaagtcatt

SEQ ID NO: 820282 - DNA, 15 bp, Homo sapiens
caaatataaagtcat

SEQ ID NO: 820283 - DNA, 15 bp, Homo sapiens
ccaaatataaagtca

SEQ ID NO: 820284 - DNA, 15 bp, Homo sapiens
accaaatataaagtc

SEQ ID NO: 820285 - DNA, 15 bp, Homo sapiens
aaccaaatataaagt

SEQ ID NO: 820286 - DNA, 15 bp, Homo sapiens
caaccaaatataaag

SEQ ID NO: 820287 - DNA, 15 bp, Homo sapiens
gcaaccaaatataaa

SEQ ID NO: 820288 - DNA, 15 bp, Homo sapiens
agcaaccaaatataa

SEQ ID NO: 820289 - DNA, 15 bp, Homo sapiens
aagcaaccaaatata

SEQ ID NO: 820290 - DNA, 15 bp, Homo sapiens
aaagcaaccaaatat

SEQ ID NO: 820291 - DNA, 15 bp, Homo sapiens
taaagcaaccaaata

SEQ ID NO: 820292 - DNA, 15 bp, Homo sapiens
ttaaagcaaccaaat

SEQ ID NO: 820293 - DNA, 15 bp, Homo sapiens
tttaaagcaaccaaa

SEQ ID NO: 820294 - DNA, 15 bp, Homo sapiens
ttttaaagcaaccaa

SEQ ID NO: 820295 - DNA, 15 bp, Homo sapiens
attttaaagcaacca

SEQ ID NO: 820296 - DNA, 15 bp, Homo sapiens
cattttaaagcaacc

SEQ ID NO: 820297 - DNA, 15 bp, Homo sapiens
tcattttaaagcaac

SEQ ID NO: 820298 - DNA, 15 bp, Homo sapiens
atcattttaaagcaa

SEQ ID NO: 820299 - DNA, 15 bp, Homo sapiens
catcattttaaagca

SEQ ID NO: 820300 - DNA, 15 bp, Homo sapiens
tcatcattttaaagc

SEQ ID NO: 820301 - DNA, 15 bp, Homo sapiens
gtcatcattttaaag

SEQ ID NO: 820302 - DNA, 15 bp, Homo sapiens
cgtcatcattttaaa

SEQ ID NO: 820303 - DNA, 15 bp, Homo sapiens
tcgtcatcattttaa

SEQ ID NO: 820304 - DNA, 15 bp, Homo sapiens
atcgtcatcatttta

SEQ ID NO: 820305 - DNA, 15 bp, Homo sapiens
catcgtcatcatttt

SEQ ID NO: 820306 - DNA, 15 bp, Homo sapiens
tcatcgtcatcattt

SEQ ID NO: 820307 - DNA, 15 bp, Homo sapiens
ctcatcgtcatcatt

SEQ ID NO: 820308 - DNA, 15 bp, Homo sapiens
tctcatcgtcatcat

SEQ ID NO: 820309 - DNA, 15 bp, Homo sapiens
ctctcatcgtcatca

SEQ ID NO: 820310 - DNA, 15 bp, Homo sapiens
actctcatcgtcatc

SEQ ID NO: 820311 - DNA, 15 bp, Homo sapiens
tactctcatcgtcat

SEQ ID NO: 820312 - DNA, 15 bp, Homo sapiens
atactctcatcgtca

SEQ ID NO: 820313 - DNA, 15 bp, Homo sapiens
aatactctcatcgtc

SEQ ID NO: 820314 - DNA, 15 bp, Homo sapiens
aaatactctcatcgt

SEQ ID NO: 820315 - DNA, 15 bp, Homo sapiens
taaatactctcatcg

SEQ ID NO: 820316 - DNA, 15 bp, Homo sapiens
ataaatactctcatc

SEQ ID NO: 820317 - DNA, 15 bp, Homo sapiens
tataaatactctcat

SEQ ID NO: 820318 - DNA, 15 bp, Homo sapiens
atataaatactctca

SEQ ID NO: 820319 - DNA, 15 bp, Homo sapiens
gatataaatactctc

SEQ ID NO: 820320 - DNA, 15 bp, Homo sapiens
tgatataaatactct

SEQ ID NO: 820321 - DNA, 15 bp, Homo sapiens
atgatataaatactc

SEQ ID NO: 820322 - DNA, 15 bp, Homo sapiens
tatgatataaatact

SEQ ID NO: 820323 - DNA, 15 bp, Homo sapiens
ctatgatataaatac

SEQ ID NO: 820324 - DNA, 15 bp, Homo sapiens
tctatgatataaata

SEQ ID NO: 820325 - DNA, 15 bp, Homo sapiens
ttctatgatataaat

SEQ ID NO: 820326 - DNA, 15 bp, Homo sapiens
tttctatgatataaa

SEQ ID NO: 820327 - DNA, 15 bp, Homo sapiens
atttctatgatataa

SEQ ID NO: 820328 - DNA, 15 bp, Homo sapiens
aatttctatgatata

SEQ ID NO: 820329 - DNA, 15 bp, Homo sapiens
caatttctatgatat

SEQ ID NO: 820330 - DNA, 15 bp, Homo sapiens
ccaatttctatgata

SEQ ID NO: 820331 - DNA, 15 bp, Homo sapiens
gccaatttctatgat

SEQ ID NO: 820332 - DNA, 15 bp, Homo sapiens
tgccaatttctatga

SEQ ID NO: 820333 - DNA, 15 bp, Homo sapiens
ttgccaatttctatg

SEQ ID NO: 820334 - DNA, 15 bp, Homo sapiens
tttgccaatttctat

SEQ ID NO: 820335 - DNA, 15 bp, Homo sapiens
atttgccaatttcta

SEQ ID NO: 820336 - DNA, 15 bp, Homo sapiens
catttgccaatttct

SEQ ID NO: 820337 - DNA, 15 bp, Homo sapiens
gcatttgccaatttc

SEQ ID NO: 820338 - DNA, 15 bp, Homo sapiens
ggcatttgccaattt

SEQ ID NO: 820339 - DNA, 15 bp, Homo sapiens
cggcatttgccaatt

SEQ ID NO: 820340 - DNA, 15 bp, Homo sapiens
acggcatttgccaat

SEQ ID NO: 820341 - DNA, 15 bp, Homo sapiens
tacggcatttgccaa

SEQ ID NO: 820342 - DNA, 15 bp, Homo sapiens
ttacggcatttgcca

SEQ ID NO: 820343 - DNA, 15 bp, Homo sapiens
cttacggcatttgcc

SEQ ID NO: 820344 - DNA, 15 bp, Homo sapiens
acttacggcatttgc

SEQ ID NO: 820345 - DNA, 15 bp, Homo sapiens
gacttacggcatttg

SEQ ID NO: 820346 - DNA, 15 bp, Homo sapiens
tgacttacggcattt

SEQ ID NO: 820347 - DNA, 15 bp, Homo sapiens
ctgacttacggcatt

SEQ ID NO: 820348 - DNA, 15 bp, Homo sapiens
actgacttacggcat

SEQ ID NO: 820349 - DNA, 15 bp, Homo sapiens
aactgacttacggca

SEQ ID NO: 820350 - DNA, 15 bp, Homo sapiens
aaactgacttacggc

SEQ ID NO: 820351 - DNA, 15 bp, Homo sapiens
aaaactgacttacgg

SEQ ID NO: 820352 - DNA, 15 bp, Homo sapiens
aaaaactgacttacg

SEQ ID NO: 820353 - DNA, 15 bp, Homo sapiens
caaaaactgacttac

SEQ ID NO: 820354 - DNA, 15 bp, Homo sapiens
acaaaaactgactta

SEQ ID NO: 820355 - DNA, 15 bp, Homo sapiens
aacaaaaactgactt

SEQ ID NO: 820356 - DNA, 15 bp, Homo sapiens
aaacaaaaactgact

SEQ ID NO: 820357 - DNA, 15 bp, Homo sapiens
aaaacaaaaactgac

SEQ ID NO: 820358 - DNA, 15 bp, Homo sapiens
aaaaacaaaaactga

SEQ ID NO: 820359 - DNA, 15 bp, Homo sapiens
caaaaacaaaaactg

SEQ ID NO: 820360 - DNA, 15 bp, Homo sapiens
acaaaaacaaaaact

SEQ ID NO: 820361 - DNA, 15 bp, Homo sapiens
aacaaaaacaaaaac

SEQ ID NO: 820362 - DNA, 15 bp, Homo sapiens
aaacaaaaacaaaaa

SEQ ID NO: 820363 - DNA, 15 bp, Homo sapiens
aaaacaaaaacaaaa

SEQ ID NO: 820364 - DNA, 15 bp, Homo sapiens
aaaaacaaaaacaaa

SEQ ID NO: 820365 - DNA, 15 bp, Homo sapiens
caaaaacaaaaacaa

SEQ ID NO: 820366 - DNA, 15 bp, Homo sapiens
acaaaaacaaaaaca

SEQ ID NO: 820367 - DNA, 15 bp, Homo sapiens
gaaaacaaaaacaaa

SEQ ID NO: 820368 - DNA, 15 bp, Homo sapiens
ggaaaacaaaaacaa

SEQ ID NO: 820369 - DNA, 15 bp, Homo sapiens
cggaaaacaaaaaca

SEQ ID NO: 820370 - DNA, 15 bp, Homo sapiens
ccggaaaacaaaaac

SEQ ID NO: 820371 - DNA, 15 bp, Homo sapiens
tccggaaaacaaaaa

SEQ ID NO: 820372 - DNA, 15 bp, Homo sapiens
ctccggaaaacaaaa

SEQ ID NO: 820373 - DNA, 15 bp, Homo sapiens
tctccggaaaacaaa

SEQ ID NO: 820374 - DNA, 15 bp, Homo sapiens
ctctccggaaaacaa

SEQ ID NO: 820375 - DNA, 15 bp, Homo sapiens
cctctccggaaaaca

SEQ ID NO: 820376 - DNA, 15 bp, Homo sapiens
ccctctccggaaaac

SEQ ID NO: 820377 - DNA, 15 bp, Homo sapiens
cccctctccggaaaa

SEQ ID NO: 820378 - DNA, 15 bp, Homo sapiens
tcccctctccggaaa

SEQ ID NO: 820379 - DNA, 15 bp, Homo sapiens
atcccctctccggaa

SEQ ID NO: 820380 - DNA, 15 bp, Homo sapiens
aatcccctctccgga

SEQ ID NO: 820381 - DNA, 15 bp, Homo sapiens
caatcccctctccgg

SEQ ID NO: 820382 - DNA, 15 bp, Homo sapiens
acaatcccctctccg

SEQ ID NO: 820383 - DNA, 15 bp, Homo sapiens
aacaatcccctctcc

SEQ ID NO: 820384 - DNA, 15 bp, Homo sapiens
taacaatcccctctc

SEQ ID NO: 820385 - DNA, 15 bp, Homo sapiens
ttaacaatcccctct

SEQ ID NO: 820386 - DNA, 15 bp, Homo sapiens
tttaacaatcccctc

SEQ ID NO: 820387 - DNA, 15 bp, Homo sapiens
atttaacaatcccct

SEQ ID NO: 820388 - DNA, 15 bp, Homo sapiens
tatttaacaatcccc

SEQ ID NO: 820389 - DNA, 15 bp, Homo sapiens
atatttaacaatccc

SEQ ID NO: 820390 - DNA, 15 bp, Homo sapiens
aatatttaacaatcc

SEQ ID NO: 820391 - DNA, 15 bp, Homo sapiens
aaatatttaacaatc

SEQ ID NO: 820392 - DNA, 15 bp, Homo sapiens
caaatatttaacaat

SEQ ID NO: 820393 - DNA, 15 bp, Homo sapiens
gcaaatatttaacaa

SEQ ID NO: 820394 - DNA, 15 bp, Homo sapiens
ggcaaatatttaaca

SEQ ID NO: 820395 - DNA, 15 bp, Homo sapiens
aggcaaatatttaac

SEQ ID NO: 820396 - DNA, 15 bp, Homo sapiens
caggcaaatatttaa

SEQ ID NO: 820397 - DNA, 15 bp, Homo sapiens
gcaggcaaatattta

SEQ ID NO: 820398 - DNA, 15 bp, Homo sapiens
tgcaggcaaatattt

SEQ ID NO: 820399 - DNA, 15 bp, Homo sapiens
atgcaggcaaatatt

SEQ ID NO: 820400 - DNA, 15 bp, Homo sapiens
catgcaggcaaatat

SEQ ID NO: 820401 - DNA, 15 bp, Homo sapiens
gcatgcaggcaaata

SEQ ID NO: 820402 - DNA, 15 bp, Homo sapiens
tgcatgcaggcaaat

SEQ ID NO: 820403 - DNA, 15 bp, Homo sapiens
ttgcatgcaggcaaa

SEQ ID NO: 820404 - DNA, 15 bp, Homo sapiens
gttgcatgcaggcaa

SEQ ID NO: 820405 - DNA, 15 bp, Homo sapiens
tgttgcatgcaggca

SEQ ID NO: 820406 - DNA, 15 bp, Homo sapiens
gtgttgcatgcaggc

SEQ ID NO: 820407 - DNA, 15 bp, Homo sapiens
ggtgttgcatgcagg

SEQ ID NO: 820408 - DNA, 15 bp, Homo sapiens
tggtgttgcatgcag

SEQ ID NO: 820409 - DNA, 15 bp, Homo sapiens
gtggtgttgcatgca

SEQ ID NO: 820410 - DNA, 15 bp, Homo sapiens
agtggtgttgcatgc

SEQ ID NO: 820411 - DNA, 15 bp, Homo sapiens
tagtggtgttgcatg

SEQ ID NO: 820412 - DNA, 15 bp, Homo sapiens
gtagtggtgttgcat

SEQ ID NO: 820413 - DNA, 15 bp, Homo sapiens
tgtagtggtgttgca

SEQ ID NO: 820414 - DNA, 15 bp, Homo sapiens
atgtagtggtgttgc

SEQ ID NO: 820415 - DNA, 15 bp, Homo sapiens
catgtagtggtgttg

SEQ ID NO: 820416 - DNA, 15 bp, Homo sapiens
gcatgtagtggtgtt

SEQ ID NO: 820417 - DNA, 15 bp, Homo sapiens
tgcatgtagtggtgt

SEQ ID NO: 820418 - DNA, 15 bp, Homo sapiens
ctgcatgtagtggtg

SEQ ID NO: 820419 - DNA, 15 bp, Homo sapiens
actgcatgtagtggt

SEQ ID NO: 820420 - DNA, 15 bp, Homo sapiens
gactgcatgtagtgg

SEQ ID NO: 820421 - DNA, 15 bp, Homo sapiens
agactgcatgtagtg

SEQ ID NO: 820422 - DNA, 15 bp, Homo sapiens
cagactgcatgtagt

SEQ ID NO: 820423 - DNA, 15 bp, Homo sapiens
gcagactgcatgtag

SEQ ID NO: 820424 - DNA, 15 bp, Homo sapiens
agcagactgcatgta

SEQ ID NO: 820425 - DNA, 15 bp, Homo sapiens
tagcagactgcatgt

SEQ ID NO: 820426 - DNA, 15 bp, Homo sapiens
atagcagactgcatg

SEQ ID NO: 820427 - DNA, 15 bp, Homo sapiens
gatagcagactgcat

SEQ ID NO: 820428 - DNA, 15 bp, Homo sapiens
agatagcagactgca

SEQ ID NO: 820429 - DNA, 15 bp, Homo sapiens
aagatagcagactgc

SEQ ID NO: 820430 - DNA, 15 bp, Homo sapiens
aaagatagcagactg

SEQ ID NO: 820431 - DNA, 15 bp, Homo sapiens
aaaagatagcagact

SEQ ID NO: 820432 - DNA, 15 bp, Homo sapiens
caaaagatagcagac

SEQ ID NO: 820433 - DNA, 15 bp, Homo sapiens
acaaaagatagcaga

SEQ ID NO: 820434 - DNA, 15 bp, Homo sapiens
aacaaaagatagcag

SEQ ID NO: 820435 - DNA, 15 bp, Homo sapiens
gaacaaaagatagca

SEQ ID NO: 820436 - DNA, 15 bp, Homo sapiens
agaacaaaagatagc

SEQ ID NO: 820437 - DNA, 15 bp, Homo sapiens
aagaacaaaagatag

SEQ ID NO: 820438 - DNA, 15 bp, Homo sapiens
gaagaacaaaagata

SEQ ID NO: 820439 - DNA, 15 bp, Homo sapiens
ggaagaacaaaagat

SEQ ID NO: 820440 - DNA, 15 bp, Homo sapiens
aggaagaacaaaaga

SEQ ID NO: 820441 - DNA, 15 bp, Homo sapiens
caggaagaacaaaag

SEQ ID NO: 820442 - DNA, 15 bp, Homo sapiens
gcaggaagaacaaaa

SEQ ID NO: 820443 - DNA, 15 bp, Homo sapiens
agcaggaagaacaaa

SEQ ID NO: 820444 - DNA, 15 bp, Homo sapiens
aagcaggaagaacaa

SEQ ID NO: 820445 - DNA, 15 bp, Homo sapiens
aaagcaggaagaaca

SEQ ID NO: 820446 - DNA, 15 bp, Homo sapiens
gaaagcaggaagaac

SEQ ID NO: 820447 - DNA, 15 bp, Homo sapiens
tgaaagcaggaagaa

SEQ ID NO: 820448 - DNA, 15 bp, Homo sapiens
ctgaaagcaggaaga

SEQ ID NO: 820449 - DNA, 15 bp, Homo sapiens
cctgaaagcaggaag

SEQ ID NO: 820450 - DNA, 15 bp, Homo sapiens
gcctgaaagcaggaa

SEQ ID NO: 820451 - DNA, 15 bp, Homo sapiens
agcctgaaagcagga

SEQ ID NO: 820452 - DNA, 15 bp, Homo sapiens
gagcctgaaagcagg

SEQ ID NO: 820453 - DNA, 15 bp, Homo sapiens
ggagcctgaaagcag

SEQ ID NO: 820454 - DNA, 15 bp, Homo sapiens
aggagcctgaaagca

SEQ ID NO: 820455 - DNA, 15 bp, Homo sapiens
gaggagcctgaaagc

SEQ ID NO: 820456 - DNA, 15 bp, Homo sapiens
agaggagcctgaaag

SEQ ID NO: 820457 - DNA, 15 bp, Homo sapiens
gagaggagcctgaaa

SEQ ID NO: 820458 - DNA, 15 bp, Homo sapiens
ggagaggagcctgaa

SEQ ID NO: 820459 - DNA, 15 bp, Homo sapiens
gggagaggagcctga

SEQ ID NO: 820460 - DNA, 15 bp, Homo sapiens
tgggagaggagcctg

SEQ ID NO: 820461 - DNA, 15 bp, Homo sapiens
ctgggagaggagcct

SEQ ID NO: 820462 - DNA, 15 bp, Homo sapiens
gctgggagaggagcc

SEQ ID NO: 820463 - DNA, 15 bp, Homo sapiens
agctgggagaggagc

SEQ ID NO: 820464 - DNA, 15 bp, Homo sapiens
cagctgggagaggag

SEQ ID NO: 820465 - DNA, 15 bp, Homo sapiens
acagctgggagagga

SEQ ID NO: 820466 - DNA, 15 bp, Homo sapiens
gacagctgggagagg

SEQ ID NO: 820467 - DNA, 15 bp, Homo sapiens
agacagctgggagag

SEQ ID NO: 820468 - DNA, 15 bp, Homo sapiens
cagacagctgggaga

SEQ ID NO: 820469 - DNA, 15 bp, Homo sapiens
acagacagctgggag

SEQ ID NO: 820470 - DNA, 15 bp, Homo sapiens
gacagacagctggga

SEQ ID NO: 820471 - DNA, 15 bp, Homo sapiens
agacagacagctggg

SEQ ID NO: 820472 - DNA, 15 bp, Homo sapiens
tagacagacagctgg

SEQ ID NO: 820473 - DNA, 15 bp, Homo sapiens
ctagacagacagctg

SEQ ID NO: 820474 - DNA, 15 bp, Homo sapiens
gctagacagacagct

SEQ ID NO: 820475 - DNA, 15 bp, Homo sapiens
tgctagacagacagc

SEQ ID NO: 820476 - DNA, 15 bp, Homo sapiens
gtgctagacagacag

SEQ ID NO: 820477 - DNA, 15 bp, Homo sapiens
tgtgctagacagaca

SEQ ID NO: 820478 - DNA, 15 bp, Homo sapiens
ttgtgctagacagac

SEQ ID NO: 820479 - DNA, 15 bp, Homo sapiens
gttgtgctagacaga

SEQ ID NO: 820480 - DNA, 15 bp, Homo sapiens
ggttgtgctagacag

SEQ ID NO: 820481 - DNA, 15 bp, Homo sapiens
gggttgtgctagaca

SEQ ID NO: 820482 - DNA, 15 bp, Homo sapiens
tgggttgtgctagac

SEQ ID NO: 820483 - DNA, 15 bp, Homo sapiens
ctgggttgtgctaga

SEQ ID NO: 820484 - DNA, 15 bp, Homo sapiens
gctgggttgtgctag

SEQ ID NO: 820485 - DNA, 15 bp, Homo sapiens
tgctgggttgtgcta

SEQ ID NO: 820486 - DNA, 15 bp, Homo sapiens
atgctgggttgtgct

SEQ ID NO: 820487 - DNA, 15 bp, Homo sapiens
tatgctgggttgtgc

SEQ ID NO: 820488 - DNA, 15 bp, Homo sapiens
gtatgctgggttgtg

SEQ ID NO: 820489 - DNA, 15 bp, Homo sapiens
ggtatgctgggttgt

SEQ ID NO: 820490 - DNA, 15 bp, Homo sapiens
tggtatgctgggttg

SEQ ID NO: 820491 - DNA, 15 bp, Homo sapiens
ttggtatgctgggtt

SEQ ID NO: 820492 - DNA, 15 bp, Homo sapiens
tttggtatgctgggt

SEQ ID NO: 820493 - DNA, 15 bp, Homo sapiens
atttggtatgctggg

SEQ ID NO: 820494 - DNA, 15 bp, Homo sapiens
aatttggtatgctgg

SEQ ID NO: 820495 - DNA, 15 bp, Homo sapiens
aaatttggtatgctg

SEQ ID NO: 820496 - DNA, 15 bp, Homo sapiens
aaaatttggtatgct

SEQ ID NO: 820497 - DNA, 15 bp, Homo sapiens
gaaaatttggtatgc

SEQ ID NO: 820498 - DNA, 15 bp, Homo sapiens
agaaaatttggtatg

SEQ ID NO: 820499 - DNA, 15 bp, Homo sapiens
aagaaaatttggtat

SEQ ID NO: 820500 - DNA, 15 bp, Homo sapiens
taagaaaatttggta

SEQ ID NO: 820501 - DNA, 15 bp, Homo sapiens
ttaagaaaatttggt

SEQ ID NO: 820502 - DNA, 15 bp, Homo sapiens
tttaagaaaatttgg

SEQ ID NO: 820503 - DNA, 15 bp, Homo sapiens
atttaagaaaatttg

SEQ ID NO: 820504 - DNA, 15 bp, Homo sapiens
tatttaagaaaattt

SEQ ID NO: 820505 - DNA, 15 bp, Homo sapiens
ctatttaagaaaatt

SEQ ID NO: 820506 - DNA, 15 bp, Homo sapiens
cctatttaagaaaat

SEQ ID NO: 820507 - DNA, 15 bp, Homo sapiens
ccctatttaagaaaa

SEQ ID NO: 820508 - DNA, 15 bp, Homo sapiens
tccctatttaagaaa

SEQ ID NO: 820509 - DNA, 15 bp, Homo sapiens
ttccctatttaagaa

SEQ ID NO: 820510 - DNA, 15 bp, Homo sapiens
tttccctatttaaga

SEQ ID NO: 820511 - DNA, 15 bp, Homo sapiens
ctttccctatttaag

SEQ ID NO: 820512 - DNA, 15 bp, Homo sapiens
actttccctatttaa

SEQ ID NO: 820513 - DNA, 15 bp, Homo sapiens
aactttccctattta

SEQ ID NO: 820514 - DNA, 15 bp, Homo sapiens
caactttccctattt

SEQ ID NO: 820515 - DNA, 15 bp, Homo sapiens
tcaactttccctatt

SEQ ID NO: 820516 - DNA, 15 bp, Homo sapiens
ttcaactttccctat

SEQ ID NO: 820517 - DNA, 15 bp, Homo sapiens
gttcaactttcccta

SEQ ID NO: 820518 - DNA, 15 bp, Homo sapiens
tgttcaactttccct

SEQ ID NO: 820519 - DNA, 15 bp, Homo sapiens
atgttcaactttccc

SEQ ID NO: 820520 - DNA, 15 bp, Homo sapiens
catgttcaactttcc

SEQ ID NO: 820521 - DNA, 15 bp, Homo sapiens
ccatgttcaactttc

SEQ ID NO: 820522 - DNA, 15 bp, Homo sapiens
accatgttcaacttt

SEQ ID NO: 820523 - DNA, 15 bp, Homo sapiens
taccatgttcaactt

SEQ ID NO: 820524 - DNA, 15 bp, Homo sapiens
ttaccatgttcaact

SEQ ID NO: 820525 - DNA, 15 bp, Homo sapiens
tttaccatgttcaac

SEQ ID NO: 820526 - DNA, 15 bp, Homo sapiens
ttttaccatgttcaa

SEQ ID NO: 820527 - DNA, 15 bp, Homo sapiens
cttttaccatgttca

SEQ ID NO: 820528 - DNA, 15 bp, Homo sapiens
tcttttaccatgttc

SEQ ID NO: 820529 - DNA, 15 bp, Homo sapiens
ttcttttaccatgtt

SEQ ID NO: 820530 - DNA, 15 bp, Homo sapiens
attcttttaccatgt

SEQ ID NO: 820531 - DNA, 15 bp, Homo sapiens
cattcttttaccatg

SEQ ID NO: 820532 - DNA, 15 bp, Homo sapiens
tcattcttttaccat

SEQ ID NO: 820533 - DNA, 15 bp, Homo sapiens
ttcattcttttacca

SEQ ID NO: 820534 - DNA, 15 bp, Homo sapiens
attcattcttttacc

SEQ ID NO: 820535 - DNA, 15 bp, Homo sapiens
cattcattcttttac

SEQ ID NO: 820536 - DNA, 15 bp, Homo sapiens
tcattcattctttta

SEQ ID NO: 820537 - DNA, 15 bp, Homo sapiens
ttcattcattctttt

SEQ ID NO: 820538 - DNA, 15 bp, Homo sapiens
cttcattcattcttt

SEQ ID NO: 820539 - DNA, 15 bp, Homo sapiens
acttcattcattctt

SEQ ID NO: 820540 - DNA, 15 bp, Homo sapiens
gacttcattcattct

SEQ ID NO: 820541 - DNA, 15 bp, Homo sapiens
tgacttcattcattc

SEQ ID NO: 820542 - DNA, 15 bp, Homo sapiens
ttgacttcattcatt

SEQ ID NO: 820543 - DNA, 15 bp, Homo sapiens
tttgacttcattcat

SEQ ID NO: 820544 - DNA, 15 bp, Homo sapiens
ttttgacttcattca

SEQ ID NO: 820545 - DNA, 15 bp, Homo sapiens
cttttgacttcattc

SEQ ID NO: 820546 - DNA, 15 bp, Homo sapiens
tcttttgacttcatt

SEQ ID NO: 820547 - DNA, 15 bp, Homo sapiens
ttcttttgacttcat

SEQ ID NO: 820548 - DNA, 15 bp, Homo sapiens
attcttttgacttca

SEQ ID NO: 820549 - DNA, 15 bp, Homo sapiens
cattcttttgacttc

SEQ ID NO: 820550 - DNA, 15 bp, Homo sapiens
acattcttttgactt

SEQ ID NO: 820551 - DNA, 15 bp, Homo sapiens
cacattcttttgact

SEQ ID NO: 820552 - DNA, 15 bp, Homo sapiens
ccacattcttttgac

SEQ ID NO: 820553 - DNA, 15 bp, Homo sapiens
tccacattcttttga

SEQ ID NO: 820554 - DNA, 15 bp, Homo sapiens
ttccacattcttttg

SEQ ID NO: 820555 - DNA, 15 bp, Homo sapiens
tttccacattctttt

SEQ ID NO: 820556 - DNA, 15 bp, Homo sapiens
ctttccacattcttt

SEQ ID NO: 820557 - DNA, 15 bp, Homo sapiens
tctttccacattctt

SEQ ID NO: 820558 - DNA, 15 bp, Homo sapiens
gtctttccacattct

SEQ ID NO: 820559 - DNA, 15 bp, Homo sapiens
ggtctttccacattc

SEQ ID NO: 820560 - DNA, 15 bp, Homo sapiens
aggtctttccacatt

SEQ ID NO: 820561 - DNA, 15 bp, Homo sapiens
taggtctttccacat

SEQ ID NO: 820562 - DNA, 15 bp, Homo sapiens
ctaggtctttccaca

SEQ ID NO: 820563 - DNA, 15 bp, Homo sapiens
cctaggtctttccac

SEQ ID NO: 820564 - DNA, 15 bp, Homo sapiens
gcctaggtctttcca

SEQ ID NO: 820565 - DNA, 15 bp, Homo sapiens
agcctaggtctttcc

SEQ ID NO: 820566 - DNA, 15 bp, Homo sapiens
aagcctaggtctttc

SEQ ID NO: 820567 - DNA, 15 bp, Homo sapiens
aaagcctaggtcttt

SEQ ID NO: 820568 - DNA, 15 bp, Homo sapiens
caaagcctaggtctt

SEQ ID NO: 820569 - DNA, 15 bp, Homo sapiens
gcaaagcctaggtct

SEQ ID NO: 820570 - DNA, 15 bp, Homo sapiens
ggcaaagcctaggtc

SEQ ID NO: 820571 - DNA, 15 bp, Homo sapiens
tggcaaagcctaggt

SEQ ID NO: 820572 - DNA, 15 bp, Homo sapiens
atggcaaagcctagg

SEQ ID NO: 820573 - DNA, 15 bp, Homo sapiens
aatggcaaagcctag

SEQ ID NO: 820574 - DNA, 15 bp, Homo sapiens
aaatggcaaagccta

SEQ ID NO: 820575 - DNA, 15 bp, Homo sapiens
taaatggcaaagcct

SEQ ID NO: 820576 - DNA, 15 bp, Homo sapiens
ctaaatggcaaagcc

SEQ ID NO: 820577 - DNA, 15 bp, Homo sapiens
actaaatggcaaagc

SEQ ID NO: 820578 - DNA, 15 bp, Homo sapiens
tactaaatggcaaag

SEQ ID NO: 820579 - DNA, 15 bp, Homo sapiens
ttactaaatggcaaa

SEQ ID NO: 820580 - DNA, 15 bp, Homo sapiens
tttactaaatggcaa

SEQ ID NO: 820581 - DNA, 15 bp, Homo sapiens
ctttactaaatggca

SEQ ID NO: 820582 - DNA, 15 bp, Homo sapiens
actttactaaatggc

SEQ ID NO: 820583 - DNA, 15 bp, Homo sapiens
aactttactaaatgg

SEQ ID NO: 820584 - DNA, 15 bp, Homo sapiens
aaactttactaaatg

SEQ ID NO: 820585 - DNA, 15 bp, Homo sapiens
taaactttactaaat

SEQ ID NO: 820586 - DNA, 15 bp, Homo sapiens
ctaaactttactaaa

SEQ ID NO: 820587 - DNA, 15 bp, Homo sapiens
gctaaactttactaa

SEQ ID NO: 820588 - DNA, 15 bp, Homo sapiens
tgctaaactttacta

SEQ ID NO: 820589 - DNA, 15 bp, Homo sapiens
atgctaaactttact

SEQ ID NO: 820590 - DNA, 15 bp, Homo sapiens
gatgctaaactttac

SEQ ID NO: 820591 - DNA, 15 bp, Homo sapiens
agatgctaaacttta

SEQ ID NO: 820592 - DNA, 15 bp, Homo sapiens
gagatgctaaacttt

SEQ ID NO: 820593 - DNA, 15 bp, Homo sapiens
agagatgctaaactt

SEQ ID NO: 820594 - DNA, 15 bp, Homo sapiens
tagagatgctaaact

SEQ ID NO: 820595 - DNA, 15 bp, Homo sapiens
ttagagatgctaaac

SEQ ID NO: 820596 - DNA, 15 bp, Homo sapiens
cttagagatgctaaa

SEQ ID NO: 820597 - DNA, 15 bp, Homo sapiens
gcttagagatgctaa

SEQ ID NO: 820598 - DNA, 15 bp, Homo sapiens
ggcttagagatgcta

SEQ ID NO: 820599 - DNA, 15 bp, Homo sapiens
aggcttagagatgct

SEQ ID NO: 820600 - DNA, 15 bp, Homo sapiens
gaggcttagagatgc

SEQ ID NO: 820601 - DNA, 15 bp, Homo sapiens
ggaggcttagagatg

SEQ ID NO: 820602 - DNA, 15 bp, Homo sapiens
tggaggcttagagat

SEQ ID NO: 820603 - DNA, 15 bp, Homo sapiens
atggaggcttagaga

SEQ ID NO: 820604 - DNA, 15 bp, Homo sapiens
gatggaggcttagag

SEQ ID NO: 820605 - DNA, 15 bp, Homo sapiens
agatggaggcttaga

SEQ ID NO: 820606 - DNA, 15 bp, Homo sapiens
gagatggaggcttag

SEQ ID NO: 820607 - DNA, 15 bp, Homo sapiens
agagatggaggctta

SEQ ID NO: 820608 - DNA, 15 bp, Homo sapiens
aagagatggaggctt

SEQ ID NO: 820609 - DNA, 15 bp, Homo sapiens
aaagagatggaggct

SEQ ID NO: 820610 - DNA, 15 bp, Homo sapiens
taaagagatggaggc

SEQ ID NO: 820611 - DNA, 15 bp, Homo sapiens
ataaagagatggagg

SEQ ID NO: 820612 - DNA, 15 bp, Homo sapiens
gataaagagatggag

SEQ ID NO: 820613 - DNA, 15 bp, Homo sapiens
tgataaagagatgga

SEQ ID NO: 820614 - DNA, 15 bp, Homo sapiens
ttgataaagagatgg

SEQ ID NO: 820615 - DNA, 15 bp, Homo sapiens
attgataaagagatg

SEQ ID NO: 820616 - DNA, 15 bp, Homo sapiens
tattgataaagagat

SEQ ID NO: 820617 - DNA, 15 bp, Homo sapiens
ttattgataaagaga

SEQ ID NO: 820618 - DNA, 15 bp, Homo sapiens
tttattgataaagag

SEQ ID NO: 820619 - DNA, 15 bp, Homo sapiens
ttttattgataaaga

SEQ ID NO: 820620 - DNA, 15 bp, Homo sapiens
attttattgataaag

SEQ ID NO: 820621 - DNA, 15 bp, Homo sapiens
aattttattgataaa

SEQ ID NO: 820622 - DNA, 15 bp, Homo sapiens
caattttattgataa

SEQ ID NO: 820623 - DNA, 15 bp, Homo sapiens
tcaattttattgata

SEQ ID NO: 820624 - DNA, 15 bp, Homo sapiens
ctcaattttattgat

SEQ ID NO: 820625 - DNA, 15 bp, Homo sapiens
gctcaattttattga

SEQ ID NO: 820626 - DNA, 15 bp, Homo sapiens
tgctcaattttattg

SEQ ID NO: 820627 - DNA, 15 bp, Homo sapiens
ttgctcaattttatt

SEQ ID NO: 820628 - DNA, 15 bp, Homo sapiens
attgctcaattttat

SEQ ID NO: 820629 - DNA, 15 bp, Homo sapiens
cattgctcaatttta

SEQ ID NO: 820630 - DNA, 15 bp, Homo sapiens
tcattgctcaatttt

SEQ ID NO: 820631 - DNA, 15 bp, Homo sapiens
atcattgctcaattt

SEQ ID NO: 820632 - DNA, 15 bp, Homo sapiens
gatcattgctcaatt

SEQ ID NO: 820633 - DNA, 15 bp, Homo sapiens
ggatcattgctcaat

SEQ ID NO: 820634 - DNA, 15 bp, Homo sapiens
gggatcattgctcaa

SEQ ID NO: 820635 - DNA, 15 bp, Homo sapiens
agggatcattgctca

SEQ ID NO: 820636 - DNA, 15 bp, Homo sapiens
aagggatcattgctc

SEQ ID NO: 820637 - DNA, 15 bp, Homo sapiens
aaagggatcattgct

SEQ ID NO: 820638 - DNA, 15 bp, Homo sapiens
aaaagggatcattgc

SEQ ID NO: 820639 - DNA, 15 bp, Homo sapiens
taaaagggatcattg

SEQ ID NO: 820640 - DNA, 15 bp, Homo sapiens
ctaaaagggatcatt

SEQ ID NO: 820641 - DNA, 15 bp, Homo sapiens
actaaaagggatcat

SEQ ID NO: 820642 - DNA, 15 bp, Homo sapiens
aactaaaagggatca

SEQ ID NO: 820643 - DNA, 15 bp, Homo sapiens
gaactaaaagggatc

SEQ ID NO: 820644 - DNA, 15 bp, Homo sapiens
agaactaaaagggat

SEQ ID NO: 820645 - DNA, 15 bp, Homo sapiens
tagaactaaaaggga

SEQ ID NO: 820646 - DNA, 15 bp, Homo sapiens
gtagaactaaaaggg

SEQ ID NO: 820647 - DNA, 15 bp, Homo sapiens
ggtagaactaaaagg

SEQ ID NO: 820648 - DNA, 15 bp, Homo sapiens
gggtagaactaaaag

SEQ ID NO: 820649 - DNA, 15 bp, Homo sapiens
tgggtagaactaaaa

SEQ ID NO: 820650 - DNA, 15 bp, Homo sapiens
atgggtagaactaaa

SEQ ID NO: 820651 - DNA, 15 bp, Homo sapiens
aatgggtagaactaa

SEQ ID NO: 820652 - DNA, 15 bp, Homo sapiens
aaatgggtagaacta

SEQ ID NO: 820653 - DNA, 15 bp, Homo sapiens
taaatgggtagaact

SEQ ID NO: 820654 - DNA, 15 bp, Homo sapiens
ttaaatgggtagaac

SEQ ID NO: 820655 - DNA, 15 bp, Homo sapiens
cttaaatgggtagaa

SEQ ID NO: 820656 - DNA, 15 bp, Homo sapiens
tcttaaatgggtaga

SEQ ID NO: 820657 - DNA, 15 bp, Homo sapiens
ttcttaaatgggtag

SEQ ID NO: 820658 - DNA, 15 bp, Homo sapiens
cttcttaaatgggta

SEQ ID NO: 820659 - DNA, 15 bp, Homo sapiens
tcttcttaaatgggt

SEQ ID NO: 820660 - DNA, 15 bp, Homo sapiens
atcttcttaaatggg

SEQ ID NO: 820661 - DNA, 15 bp, Homo sapiens
aatcttcttaaatgg

SEQ ID NO: 820662 - DNA, 15 bp, Homo sapiens
aaatcttcttaaatg

SEQ ID NO: 820663 - DNA, 15 bp, Homo sapiens
aaaatcttcttaaat

SEQ ID NO: 820664 - DNA, 15 bp, Homo sapiens
gaaaatcttcttaaa

SEQ ID NO: 820665 - DNA, 15 bp, Homo sapiens
tgaaaatcttcttaa

SEQ ID NO: 820666 - DNA, 15 bp, Homo sapiens
ttgaaaatcttctta

SEQ ID NO: 820667 - DNA, 15 bp, Homo sapiens
tttgaaaatcttctt

SEQ ID NO: 820668 - DNA, 15 bp, Homo sapiens
atttgaaaatcttct

SEQ ID NO: 820669 - DNA, 15 bp, Homo sapiens
catttgaaaatcttc

SEQ ID NO: 820670 - DNA, 15 bp, Homo sapiens
tcatttgaaaatctt

SEQ ID NO: 820671 - DNA, 15 bp, Homo sapiens
ttcatttgaaaatct

SEQ ID NO: 820672 - DNA, 15 bp, Homo sapiens
tttcatttgaaaatc

SEQ ID NO: 820673 - DNA, 15 bp, Homo sapiens
ttttcatttgaaaat

SEQ ID NO: 820674 - DNA, 15 bp, Homo sapiens
gttttcatttgaaaa

SEQ ID NO: 820675 - DNA, 15 bp, Homo sapiens
ggttttcatttgaaa

SEQ ID NO: 820676 - DNA, 15 bp, Homo sapiens
tggttttcatttgaa

SEQ ID NO: 820677 - DNA, 15 bp, Homo sapiens
gtggttttcatttga

SEQ ID NO: 820678 - DNA, 15 bp, Homo sapiens
tgtggttttcatttg

SEQ ID NO: 820679 - DNA, 15 bp, Homo sapiens
ttgtggttttcattt

SEQ ID NO: 820680 - DNA, 15 bp, Homo sapiens
gttgtggttttcatt

SEQ ID NO: 820681 - DNA, 15 bp, Homo sapiens
ggttgtggttttcat

SEQ ID NO: 820682 - DNA, 15 bp, Homo sapiens
aggttgtggttttca

SEQ ID NO: 820683 - DNA, 15 bp, Homo sapiens
caggttgtggttttc

SEQ ID NO: 820684 - DNA, 15 bp, Homo sapiens
gcaggttgtggtttt

SEQ ID NO: 820685 - DNA, 15 bp, Homo sapiens
agcaggttgtggttt

SEQ ID NO: 820686 - DNA, 15 bp, Homo sapiens
gagcaggttgtggtt

SEQ ID NO: 820687 - DNA, 15 bp, Homo sapiens
tgagcaggttgtggt

SEQ ID NO: 820688 - DNA, 15 bp, Homo sapiens
atgagcaggttgtgg

SEQ ID NO: 820689 - DNA, 15 bp, Homo sapiens
catgagcaggttgtg

SEQ ID NO: 820690 - DNA, 15 bp, Homo sapiens
acatgagcaggttgt

SEQ ID NO: 820691 - DNA, 15 bp, Homo sapiens
aacatgagcaggttg

SEQ ID NO: 820692 - DNA, 15 bp, Homo sapiens
aaacatgagcaggtt

SEQ ID NO: 820693 - DNA, 15 bp, Homo sapiens
taaacatgagcaggt

SEQ ID NO: 820694 - DNA, 15 bp, Homo sapiens
ataaacatgagcagg

SEQ ID NO: 820695 - DNA, 15 bp, Homo sapiens
cataaacatgagcag

SEQ ID NO: 820696 - DNA, 15 bp, Homo sapiens
tcataaacatgagca

SEQ ID NO: 820697 - DNA, 15 bp, Homo sapiens
ttcataaacatgagc

SEQ ID NO: 820698 - DNA, 15 bp, Homo sapiens
cttcataaacatgag

SEQ ID NO: 820699 - DNA, 15 bp, Homo sapiens
ccttcataaacatga

SEQ ID NO: 820700 - DNA, 15 bp, Homo sapiens
gccttcataaacatg

SEQ ID NO: 820701 - DNA, 15 bp, Homo sapiens
tgccttcataaacat

SEQ ID NO: 820702 - DNA, 15 bp, Homo sapiens
gtgccttcataaaca

SEQ ID NO: 820703 - DNA, 15 bp, Homo sapiens
agtgccttcataaac

SEQ ID NO: 820704 - DNA, 15 bp, Homo sapiens
aagtgccttcataaa

SEQ ID NO: 820705 - DNA, 15 bp, Homo sapiens
aaagtgccttcataa

SEQ ID NO: 820706 - DNA, 15 bp, Homo sapiens
caaagtgccttcata

SEQ ID NO: 820707 - DNA, 15 bp, Homo sapiens
ccaaagtgccttcat

SEQ ID NO: 820708 - DNA, 15 bp, Homo sapiens
tccaaagtgccttca

SEQ ID NO: 820709 - DNA, 15 bp, Homo sapiens
ttccaaagtgccttc

SEQ ID NO: 820710 - DNA, 15 bp, Homo sapiens
tttccaaagtgcctt

SEQ ID NO: 820711 - DNA, 15 bp, Homo sapiens
ctttccaaagtgcct

SEQ ID NO: 820712 - DNA, 15 bp, Homo sapiens
gctttccaaagtgcc

SEQ ID NO: 820713 - DNA, 15 bp, Homo sapiens
cgctttccaaagtgc

SEQ ID NO: 820714 - DNA, 15 bp, Homo sapiens
gcgctttccaaagtg

SEQ ID NO: 820715 - DNA, 15 bp, Homo sapiens
agcgctttccaaagt

SEQ ID NO: 820716 - DNA, 15 bp, Homo sapiens
tagcgctttccaaag

SEQ ID NO: 820717 - DNA, 15 bp, Homo sapiens
ttagcgctttccaaa

SEQ ID NO: 820718 - DNA, 15 bp, Homo sapiens
tttagcgctttccaa

SEQ ID NO: 820719 - DNA, 15 bp, Homo sapiens
atttagcgctttcca

SEQ ID NO: 820720 - DNA, 15 bp, Homo sapiens
tatttagcgctttcc

SEQ ID NO: 820721 - DNA, 15 bp, Homo sapiens
gtatttagcgctttc

SEQ ID NO: 820722 - DNA, 15 bp, Homo sapiens
tgtatttagcgcttt

SEQ ID NO: 820723 - DNA, 15 bp, Homo sapiens
gtgtatttagcgctt

SEQ ID NO: 820724 - DNA, 15 bp, Homo sapiens
cgtgtatttagcgct

SEQ ID NO: 820725 - DNA, 15 bp, Homo sapiens
ccgtgtatttagcgc

SEQ ID NO: 820726 - DNA, 15 bp, Homo sapiens
cccgtgtatttagcg

SEQ ID NO: 820727 - DNA, 15 bp, Homo sapiens
acccgtgtatttagc

SEQ ID NO: 820728 - DNA, 15 bp, Homo sapiens
aacccgtgtatttag

SEQ ID NO: 820729 - DNA, 15 bp, Homo sapiens
aaacccgtgtattta

SEQ ID NO: 820730 - DNA, 15 bp, Homo sapiens
aaaacccgtgtattt

SEQ ID NO: 820731 - DNA, 15 bp, Homo sapiens
aaaaacccgtgtatt

SEQ ID NO: 820732 - DNA, 15 bp, Homo sapiens
taaaaacccgtgtat

SEQ ID NO: 820733 - DNA, 15 bp, Homo sapiens
ataaaaacccgtgta

SEQ ID NO: 820734 - DNA, 15 bp, Homo sapiens
aataaaaacccgtgt

SEQ ID NO: 820735 - DNA, 15 bp, Homo sapiens
taataaaaacccgtg

SEQ ID NO: 820736 - DNA, 15 bp, Homo sapiens
ctaataaaaacccgt

SEQ ID NO: 820737 - DNA, 15 bp, Homo sapiens
actaataaaaacccg

SEQ ID NO: 820738 - DNA, 15 bp, Homo sapiens
tactaataaaaaccc

SEQ ID NO: 820739 - DNA, 15 bp, Homo sapiens
ctactaataaaaacc

SEQ ID NO: 820740 - DNA, 15 bp, Homo sapiens
actactaataaaaac

SEQ ID NO: 820741 - DNA, 15 bp, Homo sapiens
tactactaataaaaa

SEQ ID NO: 820742 - DNA, 15 bp, Homo sapiens
ttactactaataaaa

SEQ ID NO: 820743 - DNA, 15 bp, Homo sapiens
tttactactaataaa

SEQ ID NO: 820744 - DNA, 15 bp, Homo sapiens
gtttactactaataa

SEQ ID NO: 820745 - DNA, 15 bp, Homo sapiens
tgtttactactaata

SEQ ID NO: 820746 - DNA, 15 bp, Homo sapiens
gtgtttactactaat

SEQ ID NO: 820747 - DNA, 15 bp, Homo sapiens
agtgtttactactaa

SEQ ID NO: 820748 - DNA, 15 bp, Homo sapiens
aagtgtttactacta

SEQ ID NO: 820749 - DNA, 15 bp, Homo sapiens
taagtgtttactact

SEQ ID NO: 820750 - DNA, 15 bp, Homo sapiens
gtaagtgtttactac

SEQ ID NO: 820751 - DNA, 15 bp, Homo sapiens
agtaagtgtttacta

SEQ ID NO: 820752 - DNA, 15 bp, Homo sapiens
aagtaagtgtttact

SEQ ID NO: 820753 - DNA, 15 bp, Homo sapiens
gaagtaagtgtttac

SEQ ID NO: 820754 - DNA, 15 bp, Homo sapiens
tgaagtaagtgttta

SEQ ID NO: 820755 - DNA, 15 bp, Homo sapiens
gtgaagtaagtgttt

SEQ ID NO: 820756 - DNA, 15 bp, Homo sapiens
ggtgaagtaagtgtt

SEQ ID NO: 820757 - DNA, 15 bp, Homo sapiens
aggtgaagtaagtgt

SEQ ID NO: 820758 - DNA, 15 bp, Homo sapiens
aaggtgaagtaagtg

SEQ ID NO: 820759 - DNA, 15 bp, Homo sapiens
aaaggtgaagtaagt

SEQ ID NO: 820760 - DNA, 15 bp, Homo sapiens
aaaaggtgaagtaag

SEQ ID NO: 820761 - DNA, 15 bp, Homo sapiens
aaaaaggtgaagtaa

SEQ ID NO: 820762 - DNA, 15 bp, Homo sapiens
gaaaaaggtgaagta

SEQ ID NO: 820763 - DNA, 15 bp, Homo sapiens
tgaaaaaggtgaagt

SEQ ID NO: 820764 - DNA, 15 bp, Homo sapiens
gtgaaaaaggtgaag

SEQ ID NO: 820765 - DNA, 15 bp, Homo sapiens
agtgaaaaaggtgaa

SEQ ID NO: 820766 - DNA, 15 bp, Homo sapiens
aagtgaaaaaggtga

SEQ ID NO: 820767 - DNA, 15 bp, Homo sapiens
gaagtgaaaaaggtg

SEQ ID NO: 820768 - DNA, 15 bp, Homo sapiens
agaagtgaaaaaggt

SEQ ID NO: 820769 - DNA, 15 bp, Homo sapiens
aagaagtgaaaaagg

SEQ ID NO: 820770 - DNA, 15 bp, Homo sapiens
caagaagtgaaaaag

SEQ ID NO: 820771 - DNA, 15 bp, Homo sapiens
tcaagaagtgaaaaa

SEQ ID NO: 820772 - DNA, 15 bp, Homo sapiens
gtcaagaagtgaaaa

SEQ ID NO: 820773 - DNA, 15 bp, Homo sapiens
agtcaagaagtgaaa

SEQ ID NO: 820774 - DNA, 15 bp, Homo sapiens
aagtcaagaagtgaa

SEQ ID NO: 820775 - DNA, 15 bp, Homo sapiens
aaagtcaagaagtga

SEQ ID NO: 820776 - DNA, 15 bp, Homo sapiens
taaagtcaagaagtg

SEQ ID NO: 820777 - DNA, 15 bp, Homo sapiens
ctaaagtcaagaagt

SEQ ID NO: 820778 - DNA, 15 bp, Homo sapiens
actaaagtcaagaag

SEQ ID NO: 820779 - DNA, 15 bp, Homo sapiens
aactaaagtcaagaa

SEQ ID NO: 820780 - DNA, 15 bp, Homo sapiens
aaactaaagtcaaga

SEQ ID NO: 820781 - DNA, 15 bp, Homo sapiens
taaactaaagtcaag

SEQ ID NO: 820782 - DNA, 15 bp, Homo sapiens
gtaaactaaagtcaa

SEQ ID NO: 820783 - DNA, 15 bp, Homo sapiens
tgtaaactaaagtca

SEQ ID NO: 820784 - DNA, 15 bp, Homo sapiens
ttgtaaactaaagtc

SEQ ID NO: 820785 - DNA, 15 bp, Homo sapiens
cttgtaaactaaagt

SEQ ID NO: 820786 - DNA, 15 bp, Homo sapiens
ccttgtaaactaaag

SEQ ID NO: 820787 - DNA, 15 bp, Homo sapiens
cccttgtaaactaaa

SEQ ID NO: 820788 - DNA, 15 bp, Homo sapiens
gcccttgtaaactaa

SEQ ID NO: 820789 - DNA, 15 bp, Homo sapiens
agcccttgtaaacta

SEQ ID NO: 820790 - DNA, 15 bp, Homo sapiens
gagcccttgtaaact

SEQ ID NO: 820791 - DNA, 15 bp, Homo sapiens
tgagcccttgtaaac

SEQ ID NO: 820792 - DNA, 15 bp, Homo sapiens
atgagcccttgtaaa

SEQ ID NO: 820793 - DNA, 15 bp, Homo sapiens
tatgagcccttgtaa

SEQ ID NO: 820794 - DNA, 15 bp, Homo sapiens
ttatgagcccttgta

SEQ ID NO: 820795 - DNA, 15 bp, Homo sapiens
attatgagcccttgt

SEQ ID NO: 820796 - DNA, 15 bp, Homo sapiens
gattatgagcccttg

SEQ ID NO: 820797 - DNA, 15 bp, Homo sapiens
agattatgagccctt

SEQ ID NO: 820798 - DNA, 15 bp, Homo sapiens
tagattatgagccct

SEQ ID NO: 820799 - DNA, 15 bp, Homo sapiens
ttagattatgagccc

SEQ ID NO: 820800 - DNA, 15 bp, Homo sapiens
tttagattatgagcc

SEQ ID NO: 820801 - DNA, 15 bp, Homo sapiens
atttagattatgagc

SEQ ID NO: 820802 - DNA, 15 bp, Homo sapiens
aatttagattatgag

SEQ ID NO: 820803 - DNA, 15 bp, Homo sapiens
taatttagattatga

SEQ ID NO: 820804 - DNA, 15 bp, Homo sapiens
ataatttagattatg

SEQ ID NO: 820805 - DNA, 15 bp, Homo sapiens
tataatttagattat

SEQ ID NO: 820806 - DNA, 15 bp, Homo sapiens
atataatttagatta

SEQ ID NO: 820807 - DNA, 15 bp, Homo sapiens
gatataatttagatt

SEQ ID NO: 820808 - DNA, 15 bp, Homo sapiens
tgatataatttagat

SEQ ID NO: 820809 - DNA, 15 bp, Homo sapiens
atgatataatttaga

SEQ ID NO: 820810 - DNA, 15 bp, Homo sapiens
tatgatataatttag

SEQ ID NO: 820811 - DNA, 15 bp, Homo sapiens
ttatgatataattta

SEQ ID NO: 820812 - DNA, 15 bp, Homo sapiens
tttatgatataattt

SEQ ID NO: 820813 - DNA, 15 bp, Homo sapiens
atttatgatataatt

SEQ ID NO: 820814 - DNA, 15 bp, Homo sapiens
aatttatgatataat

SEQ ID NO: 820815 - DNA, 15 bp, Homo sapiens
caatttatgatataa

SEQ ID NO: 820816 - DNA, 15 bp, Homo sapiens
gcaatttatgatata

SEQ ID NO: 820817 - DNA, 15 bp, Homo sapiens
agcaatttatgatat

SEQ ID NO: 820818 - DNA, 15 bp, Homo sapiens
cagcaatttatgata

SEQ ID NO: 820819 - DNA, 15 bp, Homo sapiens
acagcaatttatgat

SEQ ID NO: 820820 - DNA, 15 bp, Homo sapiens
gacagcaatttatga

SEQ ID NO: 820821 - DNA, 15 bp, Homo sapiens
ggacagcaatttatg

SEQ ID NO: 820822 - DNA, 15 bp, Homo sapiens
gggacagcaatttat

SEQ ID NO: 820823 - DNA, 15 bp, Homo sapiens
tgggacagcaattta

SEQ ID NO: 820824 - DNA, 15 bp, Homo sapiens
ctgggacagcaattt

SEQ ID NO: 820825 - DNA, 15 bp, Homo sapiens
tctgggacagcaatt

SEQ ID NO: 820826 - DNA, 15 bp, Homo sapiens
atctgggacagcaat

SEQ ID NO: 820827 - DNA, 15 bp, Homo sapiens
aatctgggacagcaa

SEQ ID NO: 820828 - DNA, 15 bp, Homo sapiens
aaatctgggacagca

SEQ ID NO: 820829 - DNA, 15 bp, Homo sapiens
aaaatctgggacagc

SEQ ID NO: 820830 - DNA, 15 bp, Homo sapiens
aaaaatctgggacag

SEQ ID NO: 820831 - DNA, 15 bp, Homo sapiens
aaaaaatctgggaca

SEQ ID NO: 820832 - DNA, 15 bp, Homo sapiens
aaaaaaatctgggac

SEQ ID NO: 820833 - DNA, 15 bp, Homo sapiens
taaaaaaatctggga

SEQ ID NO: 820834 - DNA, 15 bp, Homo sapiens
gtaaaaaaatctggg

SEQ ID NO: 820835 - DNA, 15 bp, Homo sapiens
tgtaaaaaaatctgg

SEQ ID NO: 820836 - DNA, 15 bp, Homo sapiens
ctgtaaaaaaatctg

SEQ ID NO: 820837 - DNA, 15 bp, Homo sapiens
gctgtaaaaaaatct

SEQ ID NO: 820838 - DNA, 15 bp, Homo sapiens
ggctgtaaaaaaatc

SEQ ID NO: 820839 - DNA, 15 bp, Homo sapiens
aggctgtaaaaaaat

SEQ ID NO: 820840 - DNA, 15 bp, Homo sapiens
taggctgtaaaaaaa

SEQ ID NO: 820841 - DNA, 15 bp, Homo sapiens
ttaggctgtaaaaaa

SEQ ID NO: 820842 - DNA, 15 bp, Homo sapiens
attaggctgtaaaaa

SEQ ID NO: 820843 - DNA, 15 bp, Homo sapiens
aattaggctgtaaaa

SEQ ID NO: 820844 - DNA, 15 bp, Homo sapiens
caattaggctgtaaa

SEQ ID NO: 820845 - DNA, 15 bp, Homo sapiens
gcaattaggctgtaa

SEQ ID NO: 820846 - DNA, 15 bp, Homo sapiens
ggcaattaggctgta

SEQ ID NO: 820847 - DNA, 15 bp, Homo sapiens
tggcaattaggctgt

SEQ ID NO: 820848 - DNA, 15 bp, Homo sapiens
gtggcaattaggctg

SEQ ID NO: 820849 - DNA, 15 bp, Homo sapiens
ggtggcaattaggct

SEQ ID NO: 820850 - DNA, 15 bp, Homo sapiens
aggtggcaattaggc

SEQ ID NO: 820851 - DNA, 15 bp, Homo sapiens
caggtggcaattagg

SEQ ID NO: 820852 - DNA, 15 bp, Homo sapiens
acaggtggcaattag

SEQ ID NO: 820853 - DNA, 15 bp, Homo sapiens
tacaggtggcaatta

SEQ ID NO: 820854 - DNA, 15 bp, Homo sapiens
atacaggtggcaatt

SEQ ID NO: 820855 - DNA, 15 bp, Homo sapiens
catacaggtggcaat

SEQ ID NO: 820856 - DNA, 15 bp, Homo sapiens
acatacaggtggcaa

SEQ ID NO: 820857 - DNA, 15 bp, Homo sapiens
aacatacaggtggca

SEQ ID NO: 820858 - DNA, 15 bp, Homo sapiens
gaacatacaggtggc

SEQ ID NO: 820859 - DNA, 15 bp, Homo sapiens
cgaacatacaggtgg

SEQ ID NO: 820860 - DNA, 15 bp, Homo sapiens
tcgaacatacaggtg

SEQ ID NO: 820861 - DNA, 15 bp, Homo sapiens
gtcgaacatacaggt

SEQ ID NO: 820862 - DNA, 15 bp, Homo sapiens
agtcgaacatacagg

SEQ ID NO: 820863 - DNA, 15 bp, Homo sapiens
aagtcgaacatacag

SEQ ID NO: 820864 - DNA, 15 bp, Homo sapiens
aaagtcgaacataca

SEQ ID NO: 820865 - DNA, 15 bp, Homo sapiens
gaaagtcgaacatac

SEQ ID NO: 820866 - DNA, 15 bp, Homo sapiens
ggaaagtcgaacata

SEQ ID NO: 820867 - DNA, 15 bp, Homo sapiens
aggaaagtcgaacat

SEQ ID NO: 820868 - DNA, 15 bp, Homo sapiens
aaggaaagtcgaaca

SEQ ID NO: 820869 - DNA, 15 bp, Homo sapiens
gaaggaaagtcgaac

SEQ ID NO: 820870 - DNA, 15 bp, Homo sapiens
agaaggaaagtcgaa

SEQ ID NO: 820871 - DNA, 15 bp, Homo sapiens
cagaaggaaagtcga

SEQ ID NO: 820872 - DNA, 15 bp, Homo sapiens
acagaaggaaagtcg

SEQ ID NO: 820873 - DNA, 15 bp, Homo sapiens
aacagaaggaaagtc

SEQ ID NO: 820874 - DNA, 15 bp, Homo sapiens
gaacagaaggaaagt

SEQ ID NO: 820875 - DNA, 15 bp, Homo sapiens
agaacagaaggaaag

SEQ ID NO: 820876 - DNA, 15 bp, Homo sapiens
aagaacagaaggaaa

SEQ ID NO: 820877 - DNA, 15 bp, Homo sapiens
aaagaacagaaggaa

SEQ ID NO: 820878 - DNA, 15 bp, Homo sapiens
taaagaacagaagga

SEQ ID NO: 820879 - DNA, 15 bp, Homo sapiens
ataaagaacagaagg

SEQ ID NO: 820880 - DNA, 15 bp, Homo sapiens
cataaagaacagaag

SEQ ID NO: 820881 - DNA, 15 bp, Homo sapiens
acataaagaacagaa

SEQ ID NO: 820882 - DNA, 15 bp, Homo sapiens
aacataaagaacaga

SEQ ID NO: 820883 - DNA, 15 bp, Homo sapiens
taacataaagaacag

SEQ ID NO: 820884 - DNA, 15 bp, Homo sapiens
ctaacataaagaaca

SEQ ID NO: 820885 - DNA, 15 bp, Homo sapiens
tctaacataaagaac

SEQ ID NO: 820886 - DNA, 15 bp, Homo sapiens
atctaacataaagaa

SEQ ID NO: 820887 - DNA, 15 bp, Homo sapiens
tatctaacataaaga

SEQ ID NO: 820888 - DNA, 15 bp, Homo sapiens
gtatctaacataaag

SEQ ID NO: 820889 - DNA, 15 bp, Homo sapiens
agtatctaacataaa

SEQ ID NO: 820890 - DNA, 15 bp, Homo sapiens
cagtatctaacataa

SEQ ID NO: 820891 - DNA, 15 bp, Homo sapiens
ccagtatctaacata

SEQ ID NO: 820892 - DNA, 15 bp, Homo sapiens
cccagtatctaacat

SEQ ID NO: 820893 - DNA, 15 bp, Homo sapiens
tcccagtatctaaca

SEQ ID NO: 820894 - DNA, 15 bp, Homo sapiens
atcccagtatctaac

SEQ ID NO: 820895 - DNA, 15 bp, Homo sapiens
tatcccagtatctaa

SEQ ID NO: 820896 - DNA, 15 bp, Homo sapiens
ctatcccagtatcta

SEQ ID NO: 820897 - DNA, 15 bp, Homo sapiens
actatcccagtatct

SEQ ID NO: 820898 - DNA, 15 bp, Homo sapiens
tactatcccagtatc

SEQ ID NO: 820899 - DNA, 15 bp, Homo sapiens
atactatcccagtat

SEQ ID NO: 820900 - DNA, 15 bp, Homo sapiens
catactatcccagta

SEQ ID NO: 820901 - DNA, 15 bp, Homo sapiens
gcatactatcccagt

SEQ ID NO: 820902 - DNA, 15 bp, Homo sapiens
tgcatactatcccag

SEQ ID NO: 820903 - DNA, 15 bp, Homo sapiens
gtgcatactatccca

SEQ ID NO: 820904 - DNA, 15 bp, Homo sapiens
ggtgcatactatccc

SEQ ID NO: 820905 - DNA, 15 bp, Homo sapiens
tggtgcatactatcc

SEQ ID NO: 820906 - DNA, 15 bp, Homo sapiens
ctggtgcatactatc

SEQ ID NO: 820907 - DNA, 15 bp, Homo sapiens
cctggtgcatactat

SEQ ID NO: 820908 - DNA, 15 bp, Homo sapiens
acctggtgcatacta

SEQ ID NO: 820909 - DNA, 15 bp, Homo sapiens
cacctggtgcatact

SEQ ID NO: 820910 - DNA, 15 bp, Homo sapiens
ccacctggtgcatac

SEQ ID NO: 820911 - DNA, 15 bp, Homo sapiens
cccacctggtgcata

SEQ ID NO: 820912 - DNA, 15 bp, Homo sapiens
acccacctggtgcat

SEQ ID NO: 820913 - DNA, 15 bp, Homo sapiens
cacccacctggtgca

SEQ ID NO: 820914 - DNA, 15 bp, Homo sapiens
acacccacctggtgc

SEQ ID NO: 820915 - DNA, 15 bp, Homo sapiens
cacacccacctggtg

SEQ ID NO: 820916 - DNA, 15 bp, Homo sapiens
gcacacccacctggt

SEQ ID NO: 820917 - DNA, 15 bp, Homo sapiens
ggcacacccacctgg

SEQ ID NO: 820918 - DNA, 15 bp, Homo sapiens
tggcacacccacctg

SEQ ID NO: 820919 - DNA, 15 bp, Homo sapiens
atggcacacccacct

SEQ ID NO: 820920 - DNA, 15 bp, Homo sapiens
gatggcacacccacc

SEQ ID NO: 820921 - DNA, 15 bp, Homo sapiens
tgatggcacacccac

SEQ ID NO: 820922 - DNA, 15 bp, Homo sapiens
gtgatggcacaccca

SEQ ID NO: 820923 - DNA, 15 bp, Homo sapiens
agtgatggcacaccc

SEQ ID NO: 820924 - DNA, 15 bp, Homo sapiens
aagtgatggcacacc

SEQ ID NO: 820925 - DNA, 15 bp, Homo sapiens
aaagtgatggcacac

SEQ ID NO: 820926 - DNA, 15 bp, Homo sapiens
gaaagtgatggcaca

SEQ ID NO: 820927 - DNA, 15 bp, Homo sapiens
agaaagtgatggcac

SEQ ID NO: 820928 - DNA, 15 bp, Homo sapiens
gagaaagtgatggca

SEQ ID NO: 820929 - DNA, 15 bp, Homo sapiens
tgagaaagtgatggc

SEQ ID NO: 820930 - DNA, 15 bp, Homo sapiens
ctgagaaagtgatgg

SEQ ID NO: 820931 - DNA, 15 bp, Homo sapiens
tctgagaaagtgatg

SEQ ID NO: 820932 - DNA, 15 bp, Homo sapiens
atctgagaaagtgat

SEQ ID NO: 820933 - DNA, 15 bp, Homo sapiens
catctgagaaagtga

SEQ ID NO: 820934 - DNA, 15 bp, Homo sapiens
tcatctgagaaagtg

SEQ ID NO: 820935 - DNA, 15 bp, Homo sapiens
atcatctgagaaagt

SEQ ID NO: 820936 - DNA, 15 bp, Homo sapiens
catcatctgagaaag

SEQ ID NO: 820937 - DNA, 15 bp, Homo sapiens
acatcatctgagaaa

SEQ ID NO: 820938 - DNA, 15 bp, Homo sapiens
gacatcatctgagaa

SEQ ID NO: 820939 - DNA, 15 bp, Homo sapiens
ggacatcatctgaga

SEQ ID NO: 820940 - DNA, 15 bp, Homo sapiens
tggacatcatctgag

SEQ ID NO: 820941 - DNA, 15 bp, Homo sapiens
gtggacatcatctga

SEQ ID NO: 820942 - DNA, 15 bp, Homo sapiens
agtggacatcatctg

SEQ ID NO: 820943 - DNA, 15 bp, Homo sapiens
cagtggacatcatct

SEQ ID NO: 820944 - DNA, 15 bp, Homo sapiens
tcagtggacatcatc

SEQ ID NO: 820945 - DNA, 15 bp, Homo sapiens
ttcagtggacatcat

SEQ ID NO: 820946 - DNA, 15 bp, Homo sapiens
cttcagtggacatca

SEQ ID NO: 820947 - DNA, 15 bp, Homo sapiens
tcttcagtggacatc

SEQ ID NO: 820948 - DNA, 15 bp, Homo sapiens
gtcttcagtggacat

SEQ ID NO: 820949 - DNA, 15 bp, Homo sapiens
ggtcttcagtggaca

SEQ ID NO: 820950 - DNA, 15 bp, Homo sapiens
aggtcttcagtggac

SEQ ID NO: 820951 - DNA, 15 bp, Homo sapiens
aaggtcttcagtgga

SEQ ID NO: 820952 - DNA, 15 bp, Homo sapiens
caaggtcttcagtgg

SEQ ID NO: 820953 - DNA, 15 bp, Homo sapiens
gcaaggtcttcagtg

SEQ ID NO: 820954 - DNA, 15 bp, Homo sapiens
tgcaaggtcttcagt

SEQ ID NO: 820955 - DNA, 15 bp, Homo sapiens
atgcaaggtcttcag

SEQ ID NO: 820956 - DNA, 15 bp, Homo sapiens
catgcaaggtcttca

SEQ ID NO: 820957 - DNA, 15 bp, Homo sapiens
tcatgcaaggtcttc

SEQ ID NO: 820958 - DNA, 15 bp, Homo sapiens
atcatgcaaggtctt

SEQ ID NO: 820959 - DNA, 15 bp, Homo sapiens
gatcatgcaaggtct

SEQ ID NO: 820960 - DNA, 15 bp, Homo sapiens
tgatcatgcaaggtc

SEQ ID NO: 820961 - DNA, 15 bp, Homo sapiens
atgatcatgcaaggt

SEQ ID NO: 820962 - DNA, 15 bp, Homo sapiens
catgatcatgcaagg

SEQ ID NO: 820963 - DNA, 15 bp, Homo sapiens
ccatgatcatgcaag

SEQ ID NO: 820964 - DNA, 15 bp, Homo sapiens
gccatgatcatgcaa

SEQ ID NO: 820965 - DNA, 15 bp, Homo sapiens
tgccatgatcatgca

SEQ ID NO: 820966 - DNA, 15 bp, Homo sapiens
atgccatgatcatgc

SEQ ID NO: 820967 - DNA, 15 bp, Homo sapiens
aatgccatgatcatg

SEQ ID NO: 820968 - DNA, 15 bp, Homo sapiens
gaatgccatgatcat

SEQ ID NO: 820969 - DNA, 15 bp, Homo sapiens
tgaatgccatgatca

SEQ ID NO: 820970 - DNA, 15 bp, Homo sapiens
atgaatgccatgatc

SEQ ID NO: 820971 - DNA, 15 bp, Homo sapiens
aatgaatgccatgat

SEQ ID NO: 820972 - DNA, 15 bp, Homo sapiens
aaatgaatgccatga

SEQ ID NO: 820973 - DNA, 15 bp, Homo sapiens
aaaatgaatgccatg

SEQ ID NO: 820974 - DNA, 15 bp, Homo sapiens
gaaaatgaatgccat

SEQ ID NO: 820975 - DNA, 15 bp, Homo sapiens
ggaaaatgaatgcca

SEQ ID NO: 820976 - DNA, 15 bp, Homo sapiens
aggaaaatgaatgcc

SEQ ID NO: 820977 - DNA, 15 bp, Homo sapiens
caggaaaatgaatgc

SEQ ID NO: 820978 - DNA, 15 bp, Homo sapiens
gcaggaaaatgaatg

SEQ ID NO: 820979 - DNA, 15 bp, Homo sapiens
agcaggaaaatgaat

SEQ ID NO: 820980 - DNA, 15 bp, Homo sapiens
cagcaggaaaatgaa

SEQ ID NO: 820981 - DNA, 15 bp, Homo sapiens
acagcaggaaaatga

SEQ ID NO: 820982 - DNA, 15 bp, Homo sapiens
tacagcaggaaaatg

SEQ ID NO: 820983 - DNA, 15 bp, Homo sapiens
atacagcaggaaaat

SEQ ID NO: 820984 - DNA, 15 bp, Homo sapiens
aatacagcaggaaaa

SEQ ID NO: 820985 - DNA, 15 bp, Homo sapiens
gaatacagcaggaaa

SEQ ID NO: 820986 - DNA, 15 bp, Homo sapiens
tgaatacagcaggaa

SEQ ID NO: 820987 - DNA, 15 bp, Homo sapiens
ctgaatacagcagga

SEQ ID NO: 820988 - DNA, 15 bp, Homo sapiens
tctgaatacagcagg

SEQ ID NO: 820989 - DNA, 15 bp, Homo sapiens
gtctgaatacagcag

SEQ ID NO: 820990 - DNA, 15 bp, Homo sapiens
agtctgaatacagca

SEQ ID NO: 820991 - DNA, 15 bp, Homo sapiens
cagtctgaatacagc

SEQ ID NO: 820992 - DNA, 15 bp, Homo sapiens
ccagtctgaatacag

SEQ ID NO: 820993 - DNA, 15 bp, Homo sapiens
gccagtctgaataca

SEQ ID NO: 820994 - DNA, 15 bp, Homo sapiens
ggccagtctgaatac

SEQ ID NO: 820995 - DNA, 15 bp, Homo sapiens
aggccagtctgaata

SEQ ID NO: 820996 - DNA, 15 bp, Homo sapiens
gaggccagtctgaat

SEQ ID NO: 820997 - DNA, 15 bp, Homo sapiens
tgaggccagtctgaa

SEQ ID NO: 820998 - DNA, 15 bp, Homo sapiens
ttgaggccagtctga

SEQ ID NO: 820999 - DNA, 15 bp, Homo sapiens
gttgaggccagtctg

SEQ ID NO: 821000 - DNA, 15 bp, Homo sapiens
agttgaggccagtct

SEQ ID NO: 821001 - DNA, 15 bp, Homo sapiens
tagttgaggccagtc

SEQ ID NO: 821002 - DNA, 15 bp, Homo sapiens
atagttgaggccagt

SEQ ID NO: 821003 - DNA, 15 bp, Homo sapiens
aatagttgaggccag

SEQ ID NO: 821004 - DNA, 15 bp, Homo sapiens
aaatagttgaggcca

SEQ ID NO: 821005 - DNA, 15 bp, Homo sapiens
aaaatagttgaggcc

SEQ ID NO: 821006 - DNA, 15 bp, Homo sapiens
gaaaatagttgaggc

SEQ ID NO: 821007 - DNA, 15 bp, Homo sapiens
agaaaatagttgagg

SEQ ID NO: 821008 - DNA, 15 bp, Homo sapiens
aagaaaatagttgag

SEQ ID NO: 821009 - DNA, 15 bp, Homo sapiens
aaagaaaatagttga

SEQ ID NO: 821010 - DNA, 15 bp, Homo sapiens
taaagaaaatagttg

SEQ ID NO: 821011 - DNA, 15 bp, Homo sapiens
ataaagaaaatagtt

SEQ ID NO: 821012 - DNA, 15 bp, Homo sapiens
aataaagaaaatagt

SEQ ID NO: 821013 - DNA, 15 bp, Homo sapiens
caataaagaaaatag

SEQ ID NO: 821014 - DNA, 15 bp, Homo sapiens
gcaataaagaaaata

SEQ ID NO: 821015 - DNA, 15 bp, Homo sapiens
agcaataaagaaaat

SEQ ID NO: 821016 - DNA, 15 bp, Homo sapiens
gagcaataaagaaaa

SEQ ID NO: 821017 - DNA, 15 bp, Homo sapiens
agagcaataaagaaa

SEQ ID NO: 821018 - DNA, 15 bp, Homo sapiens
gagagcaataaagaa

SEQ ID NO: 821019 - DNA, 15 bp, Homo sapiens
ggagagcaataaaga

SEQ ID NO: 821020 - DNA, 15 bp, Homo sapiens
tggagagcaataaag

SEQ ID NO: 821021 - DNA, 15 bp, Homo sapiens
ctggagagcaataaa

SEQ ID NO: 821022 - DNA, 15 bp, Homo sapiens
cctggagagcaataa

SEQ ID NO: 821023 - DNA, 15 bp, Homo sapiens
tcctggagagcaata

SEQ ID NO: 821024 - DNA, 15 bp, Homo sapiens
ttcctggagagcaat

SEQ ID NO: 821025 - DNA, 15 bp, Homo sapiens
tttcctggagagcaa

SEQ ID NO: 821026 - DNA, 15 bp, Homo sapiens
ttttcctggagagca

SEQ ID NO: 821027 - DNA, 15 bp, Homo sapiens
tttttcctggagagc

SEQ ID NO: 821028 - DNA, 15 bp, Homo sapiens
atttttcctggagag

SEQ ID NO: 821029 - DNA, 15 bp, Homo sapiens
aatttttcctggaga

SEQ ID NO: 821030 - DNA, 15 bp, Homo sapiens
taatttttcctggag

SEQ ID NO: 821031 - DNA, 15 bp, Homo sapiens
gtaatttttcctgga

SEQ ID NO: 821032 - DNA, 15 bp, Homo sapiens
tgtaatttttcctgg

SEQ ID NO: 821033 - DNA, 15 bp, Homo sapiens
ttgtaatttttcctg

SEQ ID NO: 821034 - DNA, 15 bp, Homo sapiens
tttgtaatttttcct

SEQ ID NO: 821035 - DNA, 15 bp, Homo sapiens
atttgtaatttttcc

SEQ ID NO: 821036 - DNA, 15 bp, Homo sapiens
catttgtaatttttc

SEQ ID NO: 821037 - DNA, 15 bp, Homo sapiens
tcatttgtaattttt

SEQ ID NO: 821038 - DNA, 15 bp, Homo sapiens
ttcatttgtaatttt

SEQ ID NO: 821039 - DNA, 15 bp, Homo sapiens
attcatttgtaattt

SEQ ID NO: 821040 - DNA, 15 bp, Homo sapiens
gattcatttgtaatt

SEQ ID NO: 821041 - DNA, 15 bp, Homo sapiens
tgattcatttgtaat

SEQ ID NO: 821042 - DNA, 15 bp, Homo sapiens
ctgattcatttgtaa

SEQ ID NO: 821043 - DNA, 15 bp, Homo sapiens
tctgattcatttgta

SEQ ID NO: 821044 - DNA, 15 bp, Homo sapiens
gtctgattcatttgt

SEQ ID NO: 821045 - DNA, 15 bp, Homo sapiens
agtctgattcatttg

SEQ ID NO: 821046 - DNA, 15 bp, Homo sapiens
cagtctgattcattt

SEQ ID NO: 821047 - DNA, 15 bp, Homo sapiens
ccagtctgattcatt

SEQ ID NO: 821048 - DNA, 15 bp, Homo sapiens
cccagtctgattcat

SEQ ID NO: 821049 - DNA, 15 bp, Homo sapiens
gcccagtctgattca

SEQ ID NO: 821050 - DNA, 15 bp, Homo sapiens
tgcccagtctgattc

SEQ ID NO: 821051 - DNA, 15 bp, Homo sapiens
ttgcccagtctgatt

SEQ ID NO: 821052 - DNA, 15 bp, Homo sapiens
attgcccagtctgat

SEQ ID NO: 821053 - DNA, 15 bp, Homo sapiens
cattgcccagtctga

SEQ ID NO: 821054 - DNA, 15 bp, Homo sapiens
tcattgcccagtctg

SEQ ID NO: 821055 - DNA, 15 bp, Homo sapiens
ttcattgcccagtct

SEQ ID NO: 821056 - DNA, 15 bp, Homo sapiens
cttcattgcccagtc

SEQ ID NO: 821057 - DNA, 15 bp, Homo sapiens
ccttcattgcccagt

SEQ ID NO: 821058 - DNA, 15 bp, Homo sapiens
cccttcattgcccag

SEQ ID NO: 821059 - DNA, 15 bp, Homo sapiens
acccttcattgccca

SEQ ID NO: 821060 - DNA, 15 bp, Homo sapiens
tacccttcattgccc

SEQ ID NO: 821061 - DNA, 15 bp, Homo sapiens
ttacccttcattgcc

SEQ ID NO: 821062 - DNA, 15 bp, Homo sapiens
tttacccttcattgc

SEQ ID NO: 821063 - DNA, 15 bp, Homo sapiens
gtttacccttcattg

SEQ ID NO: 821064 - DNA, 15 bp, Homo sapiens
ggtttacccttcatt

SEQ ID NO: 821065 - DNA, 15 bp, Homo sapiens
aggtttacccttcat

SEQ ID NO: 821066 - DNA, 15 bp, Homo sapiens
taggtttacccttca

SEQ ID NO: 821067 - DNA, 15 bp, Homo sapiens
ttaggtttacccttc

SEQ ID NO: 821068 - DNA, 15 bp, Homo sapiens
attaggtttaccctt

SEQ ID NO: 821069 - DNA, 15 bp, Homo sapiens
aattaggtttaccct

SEQ ID NO: 821070 - DNA, 15 bp, Homo sapiens
taattaggtttaccc

SEQ ID NO: 821071 - DNA, 15 bp, Homo sapiens
ataattaggtttacc

SEQ ID NO: 821072 - DNA, 15 bp, Homo sapiens
gataattaggtttac

SEQ ID NO: 821073 - DNA, 15 bp, Homo sapiens
cgataattaggttta

SEQ ID NO: 821074 - DNA, 15 bp, Homo sapiens
gcgataattaggttt

SEQ ID NO: 821075 - DNA, 15 bp, Homo sapiens
agcgataattaggtt

SEQ ID NO: 821076 - DNA, 15 bp, Homo sapiens
gagcgataattaggt

SEQ ID NO: 821077 - DNA, 15 bp, Homo sapiens
agagcgataattagg

SEQ ID NO: 821078 - DNA, 15 bp, Homo sapiens
aagagcgataattag

SEQ ID NO: 821079 - DNA, 15 bp, Homo sapiens
aaagagcgataatta

SEQ ID NO: 821080 - DNA, 15 bp, Homo sapiens
caaagagcgataatt

SEQ ID NO: 821081 - DNA, 15 bp, Homo sapiens
acaaagagcgataat

SEQ ID NO: 821082 - DNA, 15 bp, Homo sapiens
aacaaagagcgataa

SEQ ID NO: 821083 - DNA, 15 bp, Homo sapiens
taacaaagagcgata

SEQ ID NO: 821084 - DNA, 15 bp, Homo sapiens
ttaacaaagagcgat

SEQ ID NO: 821085 - DNA, 15 bp, Homo sapiens
tttaacaaagagcga

SEQ ID NO: 821086 - DNA, 15 bp, Homo sapiens
ctttaacaaagagcg

SEQ ID NO: 821087 - DNA, 15 bp, Homo sapiens
tctttaacaaagagc

SEQ ID NO: 821088 - DNA, 15 bp, Homo sapiens
gtctttaacaaagag

SEQ ID NO: 821089 - DNA, 15 bp, Homo sapiens
tgtctttaacaaaga

SEQ ID NO: 821090 - DNA, 15 bp, Homo sapiens
ctgtctttaacaaag

SEQ ID NO: 821091 - DNA, 15 bp, Homo sapiens
gctgtctttaacaaa

SEQ ID NO: 821092 - DNA, 15 bp, Homo sapiens
agctgtctttaacaa

SEQ ID NO: 821093 - DNA, 15 bp, Homo sapiens
gagctgtctttaaca

SEQ ID NO: 821094 - DNA, 15 bp, Homo sapiens
agagctgtctttaac

SEQ ID NO: 821095 - DNA, 15 bp, Homo sapiens
aagagctgtctttaa

SEQ ID NO: 821096 - DNA, 15 bp, Homo sapiens
caagagctgtcttta

SEQ ID NO: 821097 - DNA, 15 bp, Homo sapiens
acaagagctgtcttt

SEQ ID NO: 821098 - DNA, 15 bp, Homo sapiens
aacaagagctgtctt

SEQ ID NO: 821099 - DNA, 15 bp, Homo sapiens
taacaagagctgtct

SEQ ID NO: 821100 - DNA, 15 bp, Homo sapiens
ttaacaagagctgtc

SEQ ID NO: 821101 - DNA, 15 bp, Homo sapiens
tttaacaagagctgt

SEQ ID NO: 821102 - DNA, 15 bp, Homo sapiens
ttttaacaagagctg

SEQ ID NO: 821103 - DNA, 15 bp, Homo sapiens
attttaacaagagct

SEQ ID NO: 821104 - DNA, 15 bp, Homo sapiens
cattttaacaagagc

SEQ ID NO: 821105 - DNA, 15 bp, Homo sapiens
gcattttaacaagag

SEQ ID NO: 821106 - DNA, 15 bp, Homo sapiens
cgcattttaacaaga

SEQ ID NO: 821107 - DNA, 15 bp, Homo sapiens
ccgcattttaacaag

SEQ ID NO: 821108 - DNA, 15 bp, Homo sapiens
tccgcattttaacaa

SEQ ID NO: 821109 - DNA, 15 bp, Homo sapiens
atccgcattttaaca

SEQ ID NO: 821110 - DNA, 15 bp, Homo sapiens
tatccgcattttaac

SEQ ID NO: 821111 - DNA, 15 bp, Homo sapiens
atatccgcattttaa

SEQ ID NO: 821112 - DNA, 15 bp, Homo sapiens
aatatccgcatttta

SEQ ID NO: 821113 - DNA, 15 bp, Homo sapiens
caatatccgcatttt

SEQ ID NO: 821114 - DNA, 15 bp, Homo sapiens
gcaatatccgcattt

SEQ ID NO: 821115 - DNA, 15 bp, Homo sapiens
tgcaatatccgcatt

SEQ ID NO: 821116 - DNA, 15 bp, Homo sapiens
ttgcaatatccgcat

SEQ ID NO: 821117 - DNA, 15 bp, Homo sapiens
tttgcaatatccgca

SEQ ID NO: 821118 - DNA, 15 bp, Homo sapiens
atttgcaatatccgc

SEQ ID NO: 821119 - DNA, 15 bp, Homo sapiens
aatttgcaatatccg

SEQ ID NO: 821120 - DNA, 15 bp, Homo sapiens
taatttgcaatatcc

SEQ ID NO: 821121 - DNA, 15 bp, Homo sapiens
ttaatttgcaatatc

SEQ ID NO: 821122 - DNA, 15 bp, Homo sapiens
attaatttgcaatat

SEQ ID NO: 821123 - DNA, 15 bp, Homo sapiens
cattaatttgcaata

SEQ ID NO: 821124 - DNA, 15 bp, Homo sapiens
ccattaatttgcaat

SEQ ID NO: 821125 - DNA, 15 bp, Homo sapiens
tccattaatttgcaa

SEQ ID NO: 821126 - DNA, 15 bp, Homo sapiens
ttccattaatttgca

SEQ ID NO: 821127 - DNA, 15 bp, Homo sapiens
tttccattaatttgc

SEQ ID NO: 821128 - DNA, 15 bp, Homo sapiens
ttttccattaatttg

SEQ ID NO: 821129 - DNA, 15 bp, Homo sapiens
tttttccattaattt

SEQ ID NO: 821130 - DNA, 15 bp, Homo sapiens
ttttttccattaatt

SEQ ID NO: 821131 - DNA, 15 bp, Homo sapiens
attttttccattaat

SEQ ID NO: 821132 - DNA, 15 bp, Homo sapiens
tattttttccattaa

SEQ ID NO: 821133 - DNA, 15 bp, Homo sapiens
atattttttccatta

SEQ ID NO: 821134 - DNA, 15 bp, Homo sapiens
catattttttccatt

SEQ ID NO: 821135 - DNA, 15 bp, Homo sapiens
tcatattttttccat

SEQ ID NO: 821136 - DNA, 15 bp, Homo sapiens
gtcatattttttcca

SEQ ID NO: 821137 - DNA, 15 bp, Homo sapiens
tgtcatattttttcc

SEQ ID NO: 821138 - DNA, 15 bp, Homo sapiens
atgtcatattttttc

SEQ ID NO: 821139 - DNA, 15 bp, Homo sapiens
tatgtcatatttttt

SEQ ID NO: 821140 - DNA, 15 bp, Homo sapiens
ctatgtcatattttt

SEQ ID NO: 821141 - DNA, 15 bp, Homo sapiens
actatgtcatatttt

SEQ ID NO: 821142 - DNA, 15 bp, Homo sapiens
tactatgtcatattt

SEQ ID NO: 821143 - DNA, 15 bp, Homo sapiens
ttactatgtcatatt

SEQ ID NO: 821144 - DNA, 15 bp, Homo sapiens
tttactatgtcatat

SEQ ID NO: 821145 - DNA, 15 bp, Homo sapiens
gtttactatgtcata

SEQ ID NO: 821146 - DNA, 15 bp, Homo sapiens
ggtttactatgtcat

SEQ ID NO: 821147 - DNA, 15 bp, Homo sapiens
tggtttactatgtca

SEQ ID NO: 821148 - DNA, 15 bp, Homo sapiens
atggtttactatgtc

SEQ ID NO: 821149 - DNA, 15 bp, Homo sapiens
tatggtttactatgt

SEQ ID NO: 821150 - DNA, 15 bp, Homo sapiens
gtatggtttactatg

SEQ ID NO: 821151 - DNA, 15 bp, Homo sapiens
agtatggtttactat

SEQ ID NO: 821152 - DNA, 15 bp, Homo sapiens
gagtatggtttacta

SEQ ID NO: 821153 - DNA, 15 bp, Homo sapiens
tgagtatggtttact

SEQ ID NO: 821154 - DNA, 15 bp, Homo sapiens
gtgagtatggtttac

SEQ ID NO: 821155 - DNA, 15 bp, Homo sapiens
agtgagtatggttta

SEQ ID NO: 821156 - DNA, 15 bp, Homo sapiens
aagtgagtatggttt

SEQ ID NO: 821157 - DNA, 15 bp, Homo sapiens
taagtgagtatggtt

SEQ ID NO: 821158 - DNA, 15 bp, Homo sapiens
ataagtgagtatggt

SEQ ID NO: 821159 - DNA, 15 bp, Homo sapiens
aataagtgagtatgg

SEQ ID NO: 821160 - DNA, 15 bp, Homo sapiens
taataagtgagtatg

SEQ ID NO: 821161 - DNA, 15 bp, Homo sapiens
ttaataagtgagtat

SEQ ID NO: 821162 - DNA, 15 bp, Homo sapiens
attaataagtgagta

SEQ ID NO: 821163 - DNA, 15 bp, Homo sapiens
tattaataagtgagt

SEQ ID NO: 821164 - DNA, 15 bp, Homo sapiens
atattaataagtgag

SEQ ID NO: 821165 - DNA, 15 bp, Homo sapiens
gatattaataagtga

SEQ ID NO: 821166 - DNA, 15 bp, Homo sapiens
agatattaataagtg

SEQ ID NO: 821167 - DNA, 15 bp, Homo sapiens
aagatattaataagt

SEQ ID NO: 821168 - DNA, 15 bp, Homo sapiens
taagatattaataag

SEQ ID NO: 821169 - DNA, 15 bp, Homo sapiens
ctaagatattaataa

SEQ ID NO: 821170 - DNA, 15 bp, Homo sapiens
actaagatattaata

SEQ ID NO: 821171 - DNA, 15 bp, Homo sapiens
tactaagatattaat

SEQ ID NO: 821172 - DNA, 15 bp, Homo sapiens
ttactaagatattaa

SEQ ID NO: 821173 - DNA, 15 bp, Homo sapiens
cttactaagatatta

SEQ ID NO: 821174 - DNA, 15 bp, Homo sapiens
ccttactaagatatt

SEQ ID NO: 821175 - DNA, 15 bp, Homo sapiens
tccttactaagatat

SEQ ID NO: 821176 - DNA, 15 bp, Homo sapiens
ttccttactaagata

SEQ ID NO: 821177 - DNA, 15 bp, Homo sapiens
attccttactaagat

SEQ ID NO: 821178 - DNA, 15 bp, Homo sapiens
tattccttactaaga

SEQ ID NO: 821179 - DNA, 15 bp, Homo sapiens
ttattccttactaag

SEQ ID NO: 821180 - DNA, 15 bp, Homo sapiens
attattccttactaa

SEQ ID NO: 821181 - DNA, 15 bp, Homo sapiens
aattattccttacta

SEQ ID NO: 821182 - DNA, 15 bp, Homo sapiens
caattattccttact

SEQ ID NO: 821183 - DNA, 15 bp, Homo sapiens
tcaattattccttac

SEQ ID NO: 821184 - DNA, 15 bp, Homo sapiens
atcaattattcctta

SEQ ID NO: 821185 - DNA, 15 bp, Homo sapiens
catcaattattcctt

SEQ ID NO: 821186 - DNA, 15 bp, Homo sapiens
tcatcaattattcct

SEQ ID NO: 821187 - DNA, 15 bp, Homo sapiens
ttcatcaattattcc

SEQ ID NO: 821188 - DNA, 15 bp, Homo sapiens
cttcatcaattattc

SEQ ID NO: 821189 - DNA, 15 bp, Homo sapiens
acttcatcaattatt

SEQ ID NO: 821190 - DNA, 15 bp, Homo sapiens
aacttcatcaattat

SEQ ID NO: 821191 - DNA, 15 bp, Homo sapiens
taacttcatcaatta

SEQ ID NO: 821192 - DNA, 15 bp, Homo sapiens
gtaacttcatcaatt

SEQ ID NO: 821193 - DNA, 15 bp, Homo sapiens
agtaacttcatcaat

SEQ ID NO: 821194 - DNA, 15 bp, Homo sapiens
aagtaacttcatcaa

SEQ ID NO: 821195 - DNA, 15 bp, Homo sapiens
taagtaacttcatca

SEQ ID NO: 821196 - DNA, 15 bp, Homo sapiens
ttaagtaacttcatc

SEQ ID NO: 821197 - DNA, 15 bp, Homo sapiens
gttaagtaacttcat

SEQ ID NO: 821198 - DNA, 15 bp, Homo sapiens
ggttaagtaacttca

SEQ ID NO: 821199 - DNA, 15 bp, Homo sapiens
aggttaagtaacttc

SEQ ID NO: 821200 - DNA, 15 bp, Homo sapiens
aaggttaagtaactt

SEQ ID NO: 821201 - DNA, 15 bp, Homo sapiens
taaggttaagtaact

SEQ ID NO: 821202 - DNA, 15 bp, Homo sapiens
ctaaggttaagtaac

SEQ ID NO: 821203 - DNA, 15 bp, Homo sapiens
tctaaggttaagtaa

SEQ ID NO: 821204 - DNA, 15 bp, Homo sapiens
ctctaaggttaagta

SEQ ID NO: 821205 - DNA, 15 bp, Homo sapiens
gctctaaggttaagt

SEQ ID NO: 821206 - DNA, 15 bp, Homo sapiens
ggctctaaggttaag

SEQ ID NO: 821207 - DNA, 15 bp, Homo sapiens
gggctctaaggttaa

SEQ ID NO: 821208 - DNA, 15 bp, Homo sapiens
agggctctaaggtta

SEQ ID NO: 821209 - DNA, 15 bp, Homo sapiens
tagggctctaaggtt

SEQ ID NO: 821210 - DNA, 15 bp, Homo sapiens
ttagggctctaaggt

SEQ ID NO: 821211 - DNA, 15 bp, Homo sapiens
attagggctctaagg

SEQ ID NO: 821212 - DNA, 15 bp, Homo sapiens
aattagggctctaag

SEQ ID NO: 821213 - DNA, 15 bp, Homo sapiens
gaattagggctctaa

SEQ ID NO: 821214 - DNA, 15 bp, Homo sapiens
tgaattagggctcta

SEQ ID NO: 821215 - DNA, 15 bp, Homo sapiens
ctgaattagggctct

SEQ ID NO: 821216 - DNA, 15 bp, Homo sapiens
actgaattagggctc

SEQ ID NO: 821217 - DNA, 15 bp, Homo sapiens
aactgaattagggct

SEQ ID NO: 821218 - DNA, 15 bp, Homo sapiens
taactgaattagggc

SEQ ID NO: 821219 - DNA, 15 bp, Homo sapiens
ttaactgaattaggg

SEQ ID NO: 821220 - DNA, 15 bp, Homo sapiens
cttaactgaattagg

SEQ ID NO: 821221 - DNA, 15 bp, Homo sapiens
acttaactgaattag

SEQ ID NO: 821222 - DNA, 15 bp, Homo sapiens
aacttaactgaatta

SEQ ID NO: 821223 - DNA, 15 bp, Homo sapiens
aaacttaactgaatt

SEQ ID NO: 821224 - DNA, 15 bp, Homo sapiens
aaaacttaactgaat

SEQ ID NO: 821225 - DNA, 15 bp, Homo sapiens
taaaacttaactgaa

SEQ ID NO: 821226 - DNA, 15 bp, Homo sapiens
ttaaaacttaactga

SEQ ID NO: 821227 - DNA, 15 bp, Homo sapiens
attaaaacttaactg

SEQ ID NO: 821228 - DNA, 15 bp, Homo sapiens
cattaaaacttaact

SEQ ID NO: 821229 - DNA, 15 bp, Homo sapiens
tcattaaaacttaac

SEQ ID NO: 821230 - DNA, 15 bp, Homo sapiens
ttcattaaaacttaa

SEQ ID NO: 821231 - DNA, 15 bp, Homo sapiens
cttcattaaaactta

SEQ ID NO: 821232 - DNA, 15 bp, Homo sapiens
ccttcattaaaactt

SEQ ID NO: 821233 - DNA, 15 bp, Homo sapiens
tccttcattaaaact

SEQ ID NO: 821234 - DNA, 15 bp, Homo sapiens
gtccttcattaaaac

SEQ ID NO: 821235 - DNA, 15 bp, Homo sapiens
tgtccttcattaaaa

SEQ ID NO: 821236 - DNA, 15 bp, Homo sapiens
ttgtccttcattaaa

SEQ ID NO: 821237 - DNA, 15 bp, Homo sapiens
cttgtccttcattaa

SEQ ID NO: 821238 - DNA, 15 bp, Homo sapiens
acttgtccttcatta

SEQ ID NO: 821239 - DNA, 15 bp, Homo sapiens
aacttgtccttcatt

SEQ ID NO: 821240 - DNA, 15 bp, Homo sapiens
caacttgtccttcat

SEQ ID NO: 821241 - DNA, 15 bp, Homo sapiens
acaacttgtccttca

SEQ ID NO: 821242 - DNA, 15 bp, Homo sapiens
tacaacttgtccttc

SEQ ID NO: 821243 - DNA, 15 bp, Homo sapiens
ctacaacttgtcctt

SEQ ID NO: 821244 - DNA, 15 bp, Homo sapiens
tctacaacttgtcct

SEQ ID NO: 821245 - DNA, 15 bp, Homo sapiens
ctctacaacttgtcc

SEQ ID NO: 821246 - DNA, 15 bp, Homo sapiens
tctctacaacttgtc

SEQ ID NO: 821247 - DNA, 15 bp, Homo sapiens
atctctacaacttgt

SEQ ID NO: 821248 - DNA, 15 bp, Homo sapiens
tatctctacaacttg

SEQ ID NO: 821249 - DNA, 15 bp, Homo sapiens
atatctctacaactt

SEQ ID NO: 821250 - DNA, 15 bp, Homo sapiens
gatatctctacaact

SEQ ID NO: 821251 - DNA, 15 bp, Homo sapiens
cgatatctctacaac

SEQ ID NO: 821252 - DNA, 15 bp, Homo sapiens
tcgatatctctacaa

SEQ ID NO: 821253 - DNA, 15 bp, Homo sapiens
ctcgatatctctaca

SEQ ID NO: 821254 - DNA, 15 bp, Homo sapiens
tctcgatatctctac

SEQ ID NO: 821255 - DNA, 15 bp, Homo sapiens
ttctcgatatctcta

SEQ ID NO: 821256 - DNA, 15 bp, Homo sapiens
gttctcgatatctct

SEQ ID NO: 821257 - DNA, 15 bp, Homo sapiens
ggttctcgatatctc

SEQ ID NO: 821258 - DNA, 15 bp, Homo sapiens
gggttctcgatatct

SEQ ID NO: 821259 - DNA, 15 bp, Homo sapiens
tgggttctcgatatc

SEQ ID NO: 821260 - DNA, 15 bp, Homo sapiens
ctgggttctcgatat

SEQ ID NO: 821261 - DNA, 15 bp, Homo sapiens
cctgggttctcgata

SEQ ID NO: 821262 - DNA, 15 bp, Homo sapiens
ccctgggttctcgat

SEQ ID NO: 821263 - DNA, 15 bp, Homo sapiens
gccctgggttctcga

SEQ ID NO: 821264 - DNA, 15 bp, Homo sapiens
tgccctgggttctcg

SEQ ID NO: 821265 - DNA, 15 bp, Homo sapiens
ctgccctgggttctc

SEQ ID NO: 821266 - DNA, 15 bp, Homo sapiens
cctgccctgggttct

SEQ ID NO: 821267 - DNA, 15 bp, Homo sapiens
acctgccctgggttc

SEQ ID NO: 821268 - DNA, 15 bp, Homo sapiens
cacctgccctgggtt

SEQ ID NO: 821269 - DNA, 15 bp, Homo sapiens
gcacctgccctgggt

SEQ ID NO: 821270 - DNA, 15 bp, Homo sapiens
ggcacctgccctggg

SEQ ID NO: 821271 - DNA, 15 bp, Homo sapiens
aggcacctgccctgg

SEQ ID NO: 821272 - DNA, 15 bp, Homo sapiens
taggcacctgccctg

SEQ ID NO: 821273 - DNA, 15 bp, Homo sapiens
gtaggcacctgccct

SEQ ID NO: 821274 - DNA, 15 bp, Homo sapiens
agtaggcacctgccc

SEQ ID NO: 821275 - DNA, 15 bp, Homo sapiens
cagtaggcacctgcc

SEQ ID NO: 821276 - DNA, 15 bp, Homo sapiens
tcagtaggcacctgc

SEQ ID NO: 821277 - DNA, 15 bp, Homo sapiens
ttcagtaggcacctg

SEQ ID NO: 821278 - DNA, 15 bp, Homo sapiens
cttcagtaggcacct

SEQ ID NO: 821279 - DNA, 15 bp, Homo sapiens
tcttcagtaggcacc

SEQ ID NO: 821280 - DNA, 15 bp, Homo sapiens
ttcttcagtaggcac

SEQ ID NO: 821281 - DNA, 15 bp, Homo sapiens
cttcttcagtaggca

SEQ ID NO: 821282 - DNA, 15 bp, Homo sapiens
acttcttcagtaggc

SEQ ID NO: 821283 - DNA, 15 bp, Homo sapiens
aacttcttcagtagg

SEQ ID NO: 821284 - DNA, 15 bp, Homo sapiens
gaacttcttcagtag

SEQ ID NO: 821285 - DNA, 15 bp, Homo sapiens
ggaacttcttcagta

SEQ ID NO: 821286 - DNA, 15 bp, Homo sapiens
tggaacttcttcagt

SEQ ID NO: 821287 - DNA, 15 bp, Homo sapiens
ctggaacttcttcag

SEQ ID NO: 821288 - DNA, 15 bp, Homo sapiens
tctggaacttcttca

SEQ ID NO: 821289 - DNA, 15 bp, Homo sapiens
gtctggaacttcttc

SEQ ID NO: 821290 - DNA, 15 bp, Homo sapiens
ggtctggaacttctt

SEQ ID NO: 821291 - DNA, 15 bp, Homo sapiens
tggtctggaacttct

SEQ ID NO: 821292 - DNA, 15 bp, Homo sapiens
ttggtctggaacttc

SEQ ID NO: 821293 - DNA, 15 bp, Homo sapiens
cttggtctggaactt

SEQ ID NO: 821294 - DNA, 15 bp, Homo sapiens
ccttggtctggaact

SEQ ID NO: 821295 - DNA, 15 bp, Homo sapiens
tccttggtctggaac

SEQ ID NO: 821296 - DNA, 15 bp, Homo sapiens
ttccttggtctggaa

SEQ ID NO: 821297 - DNA, 15 bp, Homo sapiens
cttccttggtctgga

SEQ ID NO: 821298 - DNA, 15 bp, Homo sapiens
acttccttggtctgg

SEQ ID NO: 821299 - DNA, 15 bp, Homo sapiens
tacttccttggtctg

SEQ ID NO: 821300 - DNA, 15 bp, Homo sapiens
atacttccttggtct

SEQ ID NO: 821301 - DNA, 15 bp, Homo sapiens
tatacttccttggtc

SEQ ID NO: 821302 - DNA, 15 bp, Homo sapiens
ttatacttccttggt

SEQ ID NO: 821303 - DNA, 15 bp, Homo sapiens
tttatacttccttgg

SEQ ID NO: 821304 - DNA, 15 bp, Homo sapiens
ctttatacttccttg

SEQ ID NO: 821305 - DNA, 15 bp, Homo sapiens
tctttatacttcctt

SEQ ID NO: 821306 - DNA, 15 bp, Homo sapiens
ttctttatacttcct

SEQ ID NO: 821307 - DNA, 15 bp, Homo sapiens
cttctttatacttcc

SEQ ID NO: 821308 - DNA, 15 bp, Homo sapiens
ccttctttatacttc

SEQ ID NO: 821309 - DNA, 15 bp, Homo sapiens
tccttctttatactt

SEQ ID NO: 821310 - DNA, 15 bp, Homo sapiens
gtccttctttatact

SEQ ID NO: 821311 - DNA, 15 bp, Homo sapiens
ggtccttctttatac

SEQ ID NO: 821312 - DNA, 15 bp, Homo sapiens
aggtccttctttata

SEQ ID NO: 821313 - DNA, 15 bp, Homo sapiens
caggtccttctttat

SEQ ID NO: 821314 - DNA, 15 bp, Homo sapiens
ccaggtccttcttta

SEQ ID NO: 821315 - DNA, 15 bp, Homo sapiens
cccaggtccttcttt

SEQ ID NO: 821316 - DNA, 15 bp, Homo sapiens
acccaggtccttctt

SEQ ID NO: 821317 - DNA, 15 bp, Homo sapiens
cacccaggtccttct

SEQ ID NO: 821318 - DNA, 15 bp, Homo sapiens
ccacccaggtccttc

SEQ ID NO: 821319 - DNA, 15 bp, Homo sapiens
cccacccaggtcctt

SEQ ID NO: 821320 - DNA, 15 bp, Homo sapiens
tcccacccaggtcct

SEQ ID NO: 821321 - DNA, 15 bp, Homo sapiens
ctcccacccaggtcc

SEQ ID NO: 821322 - DNA, 15 bp, Homo sapiens
gctcccacccaggtc

SEQ ID NO: 821323 - DNA, 15 bp, Homo sapiens
tgctcccacccaggt

SEQ ID NO: 821324 - DNA, 15 bp, Homo sapiens
ctgctcccacccagg

SEQ ID NO: 821325 - DNA, 15 bp, Homo sapiens
actgctcccacccag

SEQ ID NO: 821326 - DNA, 15 bp, Homo sapiens
cactgctcccaccca

SEQ ID NO: 821327 - DNA, 15 bp, Homo sapiens
tcactgctcccaccc

SEQ ID NO: 821328 - DNA, 15 bp, Homo sapiens
ctcactgctcccacc

SEQ ID NO: 821329 - DNA, 15 bp, Homo sapiens
tctcactgctcccac

SEQ ID NO: 821330 - DNA, 15 bp, Homo sapiens
atctcactgctccca

SEQ ID NO: 821331 - DNA, 15 bp, Homo sapiens
aatctcactgctccc

SEQ ID NO: 821332 - DNA, 15 bp, Homo sapiens
caatctcactgctcc

SEQ ID NO: 821333 - DNA, 15 bp, Homo sapiens
ccaatctcactgctc

SEQ ID NO: 821334 - DNA, 15 bp, Homo sapiens
tccaatctcactgct

SEQ ID NO: 821335 - DNA, 15 bp, Homo sapiens
atccaatctcactgc

SEQ ID NO: 821336 - DNA, 15 bp, Homo sapiens
tatccaatctcactg

SEQ ID NO: 821337 - DNA, 15 bp, Homo sapiens
atatccaatctcact

SEQ ID NO: 821338 - DNA, 15 bp, Homo sapiens
catatccaatctcac

SEQ ID NO: 821339 - DNA, 15 bp, Homo sapiens
tcatatccaatctca

SEQ ID NO: 821340 - DNA, 15 bp, Homo sapiens
ctcatatccaatctc

SEQ ID NO: 821341 - DNA, 15 bp, Homo sapiens
cctcatatccaatct

SEQ ID NO: 821342 - DNA, 15 bp, Homo sapiens
ccctcatatccaatc

SEQ ID NO: 821343 - DNA, 15 bp, Homo sapiens
gccctcatatccaat

SEQ ID NO: 821344 - DNA, 15 bp, Homo sapiens
ggccctcatatccaa

SEQ ID NO: 821345 - DNA, 15 bp, Homo sapiens
tggccctcatatcca

SEQ ID NO: 821346 - DNA, 15 bp, Homo sapiens
gtggccctcatatcc

SEQ ID NO: 821347 - DNA, 15 bp, Homo sapiens
agtggccctcatatc

SEQ ID NO: 821348 - DNA, 15 bp, Homo sapiens
cagtggccctcatat

SEQ ID NO: 821349 - DNA, 15 bp, Homo sapiens
ccagtggccctcata

SEQ ID NO: 821350 - DNA, 15 bp, Homo sapiens
gccagtggccctcat

SEQ ID NO: 821351 - DNA, 15 bp, Homo sapiens
tgccagtggccctca

SEQ ID NO: 821352 - DNA, 15 bp, Homo sapiens
ttgccagtggccctc

SEQ ID NO: 821353 - DNA, 15 bp, Homo sapiens
tttgccagtggccct

SEQ ID NO: 821354 - DNA, 15 bp, Homo sapiens
ctttgccagtggccc

SEQ ID NO: 821355 - DNA, 15 bp, Homo sapiens
actttgccagtggcc

SEQ ID NO: 821356 - DNA, 15 bp, Homo sapiens
aactttgccagtggc

SEQ ID NO: 821357 - DNA, 15 bp, Homo sapiens
aaactttgccagtgg

SEQ ID NO: 821358 - DNA, 15 bp, Homo sapiens
aaaactttgccagtg

SEQ ID NO: 821359 - DNA, 15 bp, Homo sapiens
caaaactttgccagt

SEQ ID NO: 821360 - DNA, 15 bp, Homo sapiens
gcaaaactttgccag

SEQ ID NO: 821361 - DNA, 15 bp, Homo sapiens
ggcaaaactttgcca

SEQ ID NO: 821362 - DNA, 15 bp, Homo sapiens
gggcaaaactttgcc

SEQ ID NO: 821363 - DNA, 15 bp, Homo sapiens
ggggcaaaactttgc

SEQ ID NO: 821364 - DNA, 15 bp, Homo sapiens
tggggcaaaactttg

SEQ ID NO: 821365 - DNA, 15 bp, Homo sapiens
ctggggcaaaacttt

SEQ ID NO: 821366 - DNA, 15 bp, Homo sapiens
tctggggcaaaactt

SEQ ID NO: 821367 - DNA, 15 bp, Homo sapiens
ttctggggcaaaact

SEQ ID NO: 821368 - DNA, 15 bp, Homo sapiens
gttctggggcaaaac

SEQ ID NO: 821369 - DNA, 15 bp, Homo sapiens
tgttctggggcaaaa

SEQ ID NO: 821370 - DNA, 15 bp, Homo sapiens
ctgttctggggcaaa

SEQ ID NO: 821371 - DNA, 15 bp, Homo sapiens
actgttctggggcaa

SEQ ID NO: 821372 - DNA, 15 bp, Homo sapiens
cactgttctggggca

SEQ ID NO: 821373 - DNA, 15 bp, Homo sapiens
acactgttctggggc

SEQ ID NO: 821374 - DNA, 15 bp, Homo sapiens
gacactgttctgggg

SEQ ID NO: 821375 - DNA, 15 bp, Homo sapiens
tgacactgttctggg

SEQ ID NO: 821376 - DNA, 15 bp, Homo sapiens
ttgacactgttctgg

SEQ ID NO: 821377 - DNA, 15 bp, Homo sapiens
tttgacactgttctg

SEQ ID NO: 821378 - DNA, 15 bp, Homo sapiens
ttttgacactgttct

SEQ ID NO: 821379 - DNA, 15 bp, Homo sapiens
attttgacactgttc

SEQ ID NO: 821380 - DNA, 15 bp, Homo sapiens
cattttgacactgtt

SEQ ID NO: 821381 - DNA, 15 bp, Homo sapiens
acattttgacactgt

SEQ ID NO: 821382 - DNA, 15 bp, Homo sapiens
aacattttgacactg

SEQ ID NO: 821383 - DNA, 15 bp, Homo sapiens
aaacattttgacact

SEQ ID NO: 821384 - DNA, 15 bp, Homo sapiens
caaacattttgacac

SEQ ID NO: 821385 - DNA, 15 bp, Homo sapiens
gcaaacattttgaca

SEQ ID NO: 821386 - DNA, 15 bp, Homo sapiens
tgcaaacattttgac

SEQ ID NO: 821387 - DNA, 15 bp, Homo sapiens
atgcaaacattttga

SEQ ID NO: 821388 - DNA, 15 bp, Homo sapiens
aatgcaaacattttg

SEQ ID NO: 821389 - DNA, 15 bp, Homo sapiens
aaatgcaaacatttt

SEQ ID NO: 821390 - DNA, 15 bp, Homo sapiens
caaatgcaaacattt

SEQ ID NO: 821391 - DNA, 15 bp, Homo sapiens
ccaaatgcaaacatt

SEQ ID NO: 821392 - DNA, 15 bp, Homo sapiens
gccaaatgcaaacat

SEQ ID NO: 821393 - DNA, 15 bp, Homo sapiens
tgccaaatgcaaaca

SEQ ID NO: 821394 - DNA, 15 bp, Homo sapiens
atgccaaatgcaaac

SEQ ID NO: 821395 - DNA, 15 bp, Homo sapiens
tatgccaaatgcaaa

SEQ ID NO: 821396 - DNA, 15 bp, Homo sapiens
ctatgccaaatgcaa

SEQ ID NO: 821397 - DNA, 15 bp, Homo sapiens
gctatgccaaatgca

SEQ ID NO: 821398 - DNA, 15 bp, Homo sapiens
ggctatgccaaatgc

SEQ ID NO: 821399 - DNA, 15 bp, Homo sapiens
gggctatgccaaatg

SEQ ID NO: 821400 - DNA, 15 bp, Homo sapiens
agggctatgccaaat

SEQ ID NO: 821401 - DNA, 15 bp, Homo sapiens
aagggctatgccaaa

SEQ ID NO: 821402 - DNA, 15 bp, Homo sapiens
aaagggctatgccaa

SEQ ID NO: 821403 - DNA, 15 bp, Homo sapiens
gaaagggctatgcca

SEQ ID NO: 821404 - DNA, 15 bp, Homo sapiens
agaaagggctatgcc

SEQ ID NO: 821405 - DNA, 15 bp, Homo sapiens
gagaaagggctatgc

SEQ ID NO: 821406 - DNA, 15 bp, Homo sapiens
agagaaagggctatg

SEQ ID NO: 821407 - DNA, 15 bp, Homo sapiens
aagagaaagggctat

SEQ ID NO: 821408 - DNA, 15 bp, Homo sapiens
aaagagaaagggcta

SEQ ID NO: 821409 - DNA, 15 bp, Homo sapiens
aaaagagaaagggct

SEQ ID NO: 821410 - DNA, 15 bp, Homo sapiens
aaaaagagaaagggc

SEQ ID NO: 821411 - DNA, 15 bp, Homo sapiens
caaaaagagaaaggg

SEQ ID NO: 821412 - DNA, 15 bp, Homo sapiens
acaaaaagagaaagg

SEQ ID NO: 821413 - DNA, 15 bp, Homo sapiens
aacaaaaagagaaag

SEQ ID NO: 821414 - DNA, 15 bp, Homo sapiens
gaacaaaaagagaaa

SEQ ID NO: 821415 - DNA, 15 bp, Homo sapiens
agaacaaaaagagaa

SEQ ID NO: 821416 - DNA, 15 bp, Homo sapiens
cagaacaaaaagaga

SEQ ID NO: 821417 - DNA, 15 bp, Homo sapiens
tcagaacaaaaagag

SEQ ID NO: 821418 - DNA, 15 bp, Homo sapiens
ttcagaacaaaaaga

SEQ ID NO: 821419 - DNA, 15 bp, Homo sapiens
attcagaacaaaaag

SEQ ID NO: 821420 - DNA, 15 bp, Homo sapiens
cattcagaacaaaaa

SEQ ID NO: 821421 - DNA, 15 bp, Homo sapiens
ccattcagaacaaaa

SEQ ID NO: 821422 - DNA, 15 bp, Homo sapiens
gccattcagaacaaa

SEQ ID NO: 821423 - DNA, 15 bp, Homo sapiens
agccattcagaacaa

SEQ ID NO: 821424 - DNA, 15 bp, Homo sapiens
aagccattcagaaca

SEQ ID NO: 821425 - DNA, 15 bp, Homo sapiens
aaagccattcagaac

SEQ ID NO: 821426 - DNA, 15 bp, Homo sapiens
caaagccattcagaa

SEQ ID NO: 821427 - DNA, 15 bp, Homo sapiens
gcaaagccattcaga

SEQ ID NO: 821428 - DNA, 15 bp, Homo sapiens
agcaaagccattcag

SEQ ID NO: 821429 - DNA, 15 bp, Homo sapiens
tagcaaagccattca

SEQ ID NO: 821430 - DNA, 15 bp, Homo sapiens
ctagcaaagccattc

SEQ ID NO: 821431 - DNA, 15 bp, Homo sapiens
tctagcaaagccatt

SEQ ID NO: 821432 - DNA, 15 bp, Homo sapiens
ttctagcaaagccat

SEQ ID NO: 821433 - DNA, 15 bp, Homo sapiens
attctagcaaagcca

SEQ ID NO: 821434 - DNA, 15 bp, Homo sapiens
tattctagcaaagcc

SEQ ID NO: 821435 - DNA, 15 bp, Homo sapiens
atattctagcaaagc

SEQ ID NO: 821436 - DNA, 15 bp, Homo sapiens
gatattctagcaaag

SEQ ID NO: 821437 - DNA, 15 bp, Homo sapiens
agatattctagcaaa

SEQ ID NO: 821438 - DNA, 15 bp, Homo sapiens
aagatattctagcaa

SEQ ID NO: 821439 - DNA, 15 bp, Homo sapiens
aaagatattctagca

SEQ ID NO: 821440 - DNA, 15 bp, Homo sapiens
aaaagatattctagc

SEQ ID NO: 821441 - DNA, 15 bp, Homo sapiens
gaaaagatattctag

SEQ ID NO: 821442 - DNA, 15 bp, Homo sapiens
agaaaagatattcta

SEQ ID NO: 821443 - DNA, 15 bp, Homo sapiens
tagaaaagatattct

SEQ ID NO: 821444 - DNA, 15 bp, Homo sapiens
atagaaaagatattc

SEQ ID NO: 821445 - DNA, 15 bp, Homo sapiens
tatagaaaagatatt

SEQ ID NO: 821446 - DNA, 15 bp, Homo sapiens
ttatagaaaagatat

SEQ ID NO: 821447 - DNA, 15 bp, Homo sapiens
attatagaaaagata

SEQ ID NO: 821448 - DNA, 15 bp, Homo sapiens
cattatagaaaagat

SEQ ID NO: 821449 - DNA, 15 bp, Homo sapiens
tcattatagaaaaga

SEQ ID NO: 821450 - DNA, 15 bp, Homo sapiens
ttcattatagaaaag

SEQ ID NO: 821451 - DNA, 15 bp, Homo sapiens
attcattatagaaaa

SEQ ID NO: 821452 - DNA, 15 bp, Homo sapiens
aattcattatagaaa

SEQ ID NO: 821453 - DNA, 15 bp, Homo sapiens
aaattcattatagaa

SEQ ID NO: 821454 - DNA, 15 bp, Homo sapiens
taaattcattataga

SEQ ID NO: 821455 - DNA, 15 bp, Homo sapiens
ataaattcattatag

SEQ ID NO: 821456 - DNA, 15 bp, Homo sapiens
gataaattcattata

SEQ ID NO: 821457 - DNA, 15 bp, Homo sapiens
ggataaattcattat

SEQ ID NO: 821458 - DNA, 15 bp, Homo sapiens
aggataaattcatta

SEQ ID NO: 821459 - DNA, 15 bp, Homo sapiens
caggataaattcatt

SEQ ID NO: 821460 - DNA, 15 bp, Homo sapiens
gcaggataaattcat

SEQ ID NO: 821461 - DNA, 15 bp, Homo sapiens
agcaggataaattca

SEQ ID NO: 821462 - DNA, 15 bp, Homo sapiens
aagcaggataaattc

SEQ ID NO: 821463 - DNA, 15 bp, Homo sapiens
gaagcaggataaatt

SEQ ID NO: 821464 - DNA, 15 bp, Homo sapiens
agaagcaggataaat

SEQ ID NO: 821465 - DNA, 15 bp, Homo sapiens
gagaagcaggataaa

SEQ ID NO: 821466 - DNA, 15 bp, Homo sapiens
tgagaagcaggataa

SEQ ID NO: 821467 - DNA, 15 bp, Homo sapiens
ctgagaagcaggata

SEQ ID NO: 821468 - DNA, 15 bp, Homo sapiens
tctgagaagcaggat

SEQ ID NO: 821469 - DNA, 15 bp, Homo sapiens
atctgagaagcagga

SEQ ID NO: 821470 - DNA, 15 bp, Homo sapiens
tatctgagaagcagg

SEQ ID NO: 821471 - DNA, 15 bp, Homo sapiens
atatctgagaagcag

SEQ ID NO: 821472 - DNA, 15 bp, Homo sapiens
aatatctgagaagca

SEQ ID NO: 821473 - DNA, 15 bp, Homo sapiens
caatatctgagaagc

SEQ ID NO: 821474 - DNA, 15 bp, Homo sapiens
gcaatatctgagaag

SEQ ID NO: 821475 - DNA, 15 bp, Homo sapiens
agcaatatctgagaa

SEQ ID NO: 821476 - DNA, 15 bp, Homo sapiens
tagcaatatctgaga

SEQ ID NO: 821477 - DNA, 15 bp, Homo sapiens
ttagcaatatctgag

SEQ ID NO: 821478 - DNA, 15 bp, Homo sapiens
tttagcaatatctga

SEQ ID NO: 821479 - DNA, 15 bp, Homo sapiens
ctttagcaatatctg

SEQ ID NO: 821480 - DNA, 15 bp, Homo sapiens
gctttagcaatatct

SEQ ID NO: 821481 - DNA, 15 bp, Homo sapiens
tgctttagcaatatc

SEQ ID NO: 821482 - DNA, 15 bp, Homo sapiens
gtgctttagcaatat

SEQ ID NO: 821483 - DNA, 15 bp, Homo sapiens
agtgctttagcaata

SEQ ID NO: 821484 - DNA, 15 bp, Homo sapiens
gagtgctttagcaat

SEQ ID NO: 821485 - DNA, 15 bp, Homo sapiens
ggagtgctttagcaa

SEQ ID NO: 821486 - DNA, 15 bp, Homo sapiens
gggagtgctttagca

SEQ ID NO: 821487 - DNA, 15 bp, Homo sapiens
agggagtgctttagc

SEQ ID NO: 821488 - DNA, 15 bp, Homo sapiens
aagggagtgctttag

SEQ ID NO: 821489 - DNA, 15 bp, Homo sapiens
aaagggagtgcttta

SEQ ID NO: 821490 - DNA, 15 bp, Homo sapiens
aaaagggagtgcttt

SEQ ID NO: 821491 - DNA, 15 bp, Homo sapiens
caaaagggagtgctt

SEQ ID NO: 821492 - DNA, 15 bp, Homo sapiens
tcaaaagggagtgct

SEQ ID NO: 821493 - DNA, 15 bp, Homo sapiens
ttcaaaagggagtgc

SEQ ID NO: 821494 - DNA, 15 bp, Homo sapiens
attcaaaagggagtg

SEQ ID NO: 821495 - DNA, 15 bp, Homo sapiens
aattcaaaagggagt

SEQ ID NO: 821496 - DNA, 15 bp, Homo sapiens
aaattcaaaagggag

SEQ ID NO: 821497 - DNA, 15 bp, Homo sapiens
aaaattcaaaaggga

SEQ ID NO: 821498 - DNA, 15 bp, Homo sapiens
caaaattcaaaaggg

SEQ ID NO: 821499 - DNA, 15 bp, Homo sapiens
ccaaaattcaaaagg

SEQ ID NO: 821500 - DNA, 15 bp, Homo sapiens
accaaaattcaaaag

SEQ ID NO: 821501 - DNA, 15 bp, Homo sapiens
caccaaaattcaaaa

SEQ ID NO: 821502 - DNA, 15 bp, Homo sapiens
gcaccaaaattcaaa

SEQ ID NO: 821503 - DNA, 15 bp, Homo sapiens
agcaccaaaattcaa

SEQ ID NO: 821504 - DNA, 15 bp, Homo sapiens
aagcaccaaaattca

SEQ ID NO: 821505 - DNA, 15 bp, Homo sapiens
aaagcaccaaaattc

SEQ ID NO: 821506 - DNA, 15 bp, Homo sapiens
taaagcaccaaaatt

SEQ ID NO: 821507 - DNA, 15 bp, Homo sapiens
ttaaagcaccaaaat

SEQ ID NO: 821508 - DNA, 15 bp, Homo sapiens
gttaaagcaccaaaa

SEQ ID NO: 821509 - DNA, 15 bp, Homo sapiens
tgttaaagcaccaaa

SEQ ID NO: 821510 - DNA, 15 bp, Homo sapiens
atgttaaagcaccaa

SEQ ID NO: 821511 - DNA, 15 bp, Homo sapiens
catgttaaagcacca

SEQ ID NO: 821512 - DNA, 15 bp, Homo sapiens
gcatgttaaagcacc

SEQ ID NO: 821513 - DNA, 15 bp, Homo sapiens
tgcatgttaaagcac

SEQ ID NO: 821514 - DNA, 15 bp, Homo sapiens
atgcatgttaaagca

SEQ ID NO: 821515 - DNA, 15 bp, Homo sapiens
aatgcatgttaaagc

SEQ ID NO: 821516 - DNA, 15 bp, Homo sapiens
aaatgcatgttaaag

SEQ ID NO: 821517 - DNA, 15 bp, Homo sapiens
aaaatgcatgttaaa

SEQ ID NO: 821518 - DNA, 15 bp, Homo sapiens
caaaatgcatgttaa

SEQ ID NO: 821519 - DNA, 15 bp, Homo sapiens
tcaaaatgcatgtta

SEQ ID NO: 821520 - DNA, 15 bp, Homo sapiens
atcaaaatgcatgtt

SEQ ID NO: 821521 - DNA, 15 bp, Homo sapiens
tatcaaaatgcatgt

SEQ ID NO: 821522 - DNA, 15 bp, Homo sapiens
gtatcaaaatgcatg

SEQ ID NO: 821523 - DNA, 15 bp, Homo sapiens
tgtatcaaaatgcat

SEQ ID NO: 821524 - DNA, 15 bp, Homo sapiens
atgtatcaaaatgca

SEQ ID NO: 821525 - DNA, 15 bp, Homo sapiens
aatgtatcaaaatgc

SEQ ID NO: 821526 - DNA, 15 bp, Homo sapiens
taatgtatcaaaatg

SEQ ID NO: 821527 - DNA, 15 bp, Homo sapiens
gtaatgtatcaaaat

SEQ ID NO: 821528 - DNA, 15 bp, Homo sapiens
ggtaatgtatcaaaa

SEQ ID NO: 821529 - DNA, 15 bp, Homo sapiens
tggtaatgtatcaaa

SEQ ID NO: 821530 - DNA, 15 bp, Homo sapiens
ttggtaatgtatcaa

SEQ ID NO: 821531 - DNA, 15 bp, Homo sapiens
tttggtaatgtatca

SEQ ID NO: 821532 - DNA, 15 bp, Homo sapiens
atttggtaatgtatc

SEQ ID NO: 821533 - DNA, 15 bp, Homo sapiens
tatttggtaatgtat

SEQ ID NO: 821534 - DNA, 15 bp, Homo sapiens
ttatttggtaatgta

SEQ ID NO: 821535 - DNA, 15 bp, Homo sapiens
cttatttggtaatgt

SEQ ID NO: 821536 - DNA, 15 bp, Homo sapiens
ccttatttggtaatg

SEQ ID NO: 821537 - DNA, 15 bp, Homo sapiens
accttatttggtaat

SEQ ID NO: 821538 - DNA, 15 bp, Homo sapiens
gaccttatttggtaa

SEQ ID NO: 821539 - DNA, 15 bp, Homo sapiens
agaccttatttggta

SEQ ID NO: 821540 - DNA, 15 bp, Homo sapiens
cagaccttatttggt

SEQ ID NO: 821541 - DNA, 15 bp, Homo sapiens
tcagaccttatttgg

SEQ ID NO: 821542 - DNA, 15 bp, Homo sapiens
ttcagaccttatttg

SEQ ID NO: 821543 - DNA, 15 bp, Homo sapiens
attcagaccttattt

SEQ ID NO: 821544 - DNA, 15 bp, Homo sapiens
cattcagaccttatt

SEQ ID NO: 821545 - DNA, 15 bp, Homo sapiens
tcattcagaccttat

SEQ ID NO: 821546 - DNA, 15 bp, Homo sapiens
gtcattcagacctta

SEQ ID NO: 821547 - DNA, 15 bp, Homo sapiens
tgtcattcagacctt

SEQ ID NO: 821548 - DNA, 15 bp, Homo sapiens
gtgtcattcagacct

SEQ ID NO: 821549 - DNA, 15 bp, Homo sapiens
tgtgtcattcagacc

SEQ ID NO: 821550 - DNA, 15 bp, Homo sapiens
ttgtgtcattcagac

SEQ ID NO: 821551 - DNA, 15 bp, Homo sapiens
tttgtgtcattcaga

SEQ ID NO: 821552 - DNA, 15 bp, Homo sapiens
atttgtgtcattcag

SEQ ID NO: 821553 - DNA, 15 bp, Homo sapiens
aatttgtgtcattca

SEQ ID NO: 821554 - DNA, 15 bp, Homo sapiens
aaatttgtgtcattc

SEQ ID NO: 821555 - DNA, 15 bp, Homo sapiens
aaaatttgtgtcatt

SEQ ID NO: 821556 - DNA, 15 bp, Homo sapiens
taaaatttgtgtcat

SEQ ID NO: 821557 - DNA, 15 bp, Homo sapiens
ctaaaatttgtgtca

SEQ ID NO: 821558 - DNA, 15 bp, Homo sapiens
tctaaaatttgtgtc

SEQ ID NO: 821559 - DNA, 15 bp, Homo sapiens
ttctaaaatttgtgt

SEQ ID NO: 821560 - DNA, 15 bp, Homo sapiens
gttctaaaatttgtg

SEQ ID NO: 821561 - DNA, 15 bp, Homo sapiens
agttctaaaatttgt

SEQ ID NO: 821562 - DNA, 15 bp, Homo sapiens
gagttctaaaatttg

SEQ ID NO: 821563 - DNA, 15 bp, Homo sapiens
agagttctaaaattt

SEQ ID NO: 821564 - DNA, 15 bp, Homo sapiens
gagagttctaaaatt

SEQ ID NO: 821565 - DNA, 15 bp, Homo sapiens
ggagagttctaaaat

SEQ ID NO: 821566 - DNA, 15 bp, Homo sapiens
tggagagttctaaaa

SEQ ID NO: 821567 - DNA, 15 bp, Homo sapiens
ctggagagttctaaa

SEQ ID NO: 821568 - DNA, 15 bp, Homo sapiens
tctggagagttctaa

SEQ ID NO: 821569 - DNA, 15 bp, Homo sapiens
ctctggagagttcta

SEQ ID NO: 821570 - DNA, 15 bp, Homo sapiens
tctctggagagttct

SEQ ID NO: 821571 - DNA, 15 bp, Homo sapiens
ttctctggagagttc

SEQ ID NO: 821572 - DNA, 15 bp, Homo sapiens
tttctctggagagtt

SEQ ID NO: 821573 - DNA, 15 bp, Homo sapiens
ttttctctggagagt

SEQ ID NO: 821574 - DNA, 15 bp, Homo sapiens
cttttctctggagag

SEQ ID NO: 821575 - DNA, 15 bp, Homo sapiens
tcttttctctggaga

SEQ ID NO: 821576 - DNA, 15 bp, Homo sapiens
ttcttttctctggag

SEQ ID NO: 821577 - DNA, 15 bp, Homo sapiens
tttcttttctctgga

SEQ ID NO: 821578 - DNA, 15 bp, Homo sapiens
ctttcttttctctgg

SEQ ID NO: 821579 - DNA, 15 bp, Homo sapiens
tctttcttttctctg

SEQ ID NO: 821580 - DNA, 15 bp, Homo sapiens
atctttcttttctct

SEQ ID NO: 821581 - DNA, 15 bp, Homo sapiens
catctttcttttctc

SEQ ID NO: 821582 - DNA, 15 bp, Homo sapiens
gcatctttcttttct

SEQ ID NO: 821583 - DNA, 15 bp, Homo sapiens
agcatctttcttttc

SEQ ID NO: 821584 - DNA, 15 bp, Homo sapiens
cagcatctttctttt

SEQ ID NO: 821585 - DNA, 15 bp, Homo sapiens
tcagcatctttcttt

SEQ ID NO: 821586 - DNA, 15 bp, Homo sapiens
ctcagcatctttctt

SEQ ID NO: 821587 - DNA, 15 bp, Homo sapiens
cctcagcatctttct

SEQ ID NO: 821588 - DNA, 15 bp, Homo sapiens
ccctcagcatctttc

SEQ ID NO: 821589 - DNA, 15 bp, Homo sapiens
tccctcagcatcttt

SEQ ID NO: 821590 - DNA, 15 bp, Homo sapiens
ttccctcagcatctt

SEQ ID NO: 821591 - DNA, 15 bp, Homo sapiens
tttccctcagcatct

SEQ ID NO: 821592 - DNA, 15 bp, Homo sapiens
ttttccctcagcatc

SEQ ID NO: 821593 - DNA, 15 bp, Homo sapiens
tttttccctcagcat

SEQ ID NO: 821594 - DNA, 15 bp, Homo sapiens
ctttttccctcagca

SEQ ID NO: 821595 - DNA, 15 bp, Homo sapiens
gctttttccctcagc

SEQ ID NO: 821596 - DNA, 15 bp, Homo sapiens
tgctttttccctcag

SEQ ID NO: 821597 - DNA, 15 bp, Homo sapiens
atgctttttccctca

SEQ ID NO: 821598 - DNA, 15 bp, Homo sapiens
tatgctttttccctc

SEQ ID NO: 821599 - DNA, 15 bp, Homo sapiens
ctatgctttttccct

SEQ ID NO: 821600 - DNA, 15 bp, Homo sapiens
cctatgctttttccc

SEQ ID NO: 821601 - DNA, 15 bp, Homo sapiens
acctatgctttttcc

SEQ ID NO: 821602 - DNA, 15 bp, Homo sapiens
aacctatgctttttc

SEQ ID NO: 821603 - DNA, 15 bp, Homo sapiens
aaacctatgcttttt

SEQ ID NO: 821604 - DNA, 15 bp, Homo sapiens
caaacctatgctttt

SEQ ID NO: 821605 - DNA, 15 bp, Homo sapiens
ccaaacctatgcttt

SEQ ID NO: 821606 - DNA, 15 bp, Homo sapiens
cccaaacctatgctt

SEQ ID NO: 821607 - DNA, 15 bp, Homo sapiens
tcccaaacctatgct

SEQ ID NO: 821608 - DNA, 15 bp, Homo sapiens
gtcccaaacctatgc

SEQ ID NO: 821609 - DNA, 15 bp, Homo sapiens
agtcccaaacctatg

SEQ ID NO: 821610 - DNA, 15 bp, Homo sapiens
gagtcccaaacctat

SEQ ID NO: 821611 - DNA, 15 bp, Homo sapiens
tgagtcccaaaccta

SEQ ID NO: 821612 - DNA, 15 bp, Homo sapiens
gtgagtcccaaacct

SEQ ID NO: 821613 - DNA, 15 bp, Homo sapiens
agtgagtcccaaacc

SEQ ID NO: 821614 - DNA, 15 bp, Homo sapiens
tagtgagtcccaaac

SEQ ID NO: 821615 - DNA, 15 bp, Homo sapiens
ttagtgagtcccaaa

SEQ ID NO: 821616 - DNA, 15 bp, Homo sapiens
tttagtgagtcccaa

SEQ ID NO: 821617 - DNA, 15 bp, Homo sapiens
atttagtgagtccca

SEQ ID NO: 821618 - DNA, 15 bp, Homo sapiens
gatttagtgagtccc

SEQ ID NO: 821619 - DNA, 15 bp, Homo sapiens
ggatttagtgagtcc

SEQ ID NO: 821620 - DNA, 15 bp, Homo sapiens
gggatttagtgagtc

SEQ ID NO: 821621 - DNA, 15 bp, Homo sapiens
tgggatttagtgagt

SEQ ID NO: 821622 - DNA, 15 bp, Homo sapiens
ctgggatttagtgag

SEQ ID NO: 821623 - DNA, 15 bp, Homo sapiens
actgggatttagtga

SEQ ID NO: 821624 - DNA, 15 bp, Homo sapiens
aactgggatttagtg

SEQ ID NO: 821625 - DNA, 15 bp, Homo sapiens
gaactgggatttagt

SEQ ID NO: 821626 - DNA, 15 bp, Homo sapiens
tgaactgggatttag

SEQ ID NO: 821627 - DNA, 15 bp, Homo sapiens
ttgaactgggattta

SEQ ID NO: 821628 - DNA, 15 bp, Homo sapiens
attgaactgggattt

SEQ ID NO: 821629 - DNA, 15 bp, Homo sapiens
aattgaactgggatt

SEQ ID NO: 821630 - DNA, 15 bp, Homo sapiens
gaattgaactgggat

SEQ ID NO: 821631 - DNA, 15 bp, Homo sapiens
ggaattgaactggga

SEQ ID NO: 821632 - DNA, 15 bp, Homo sapiens
aggaattgaactggg

SEQ ID NO: 821633 - DNA, 15 bp, Homo sapiens
aaggaattgaactgg

SEQ ID NO: 821634 - DNA, 15 bp, Homo sapiens
aaaggaattgaactg

SEQ ID NO: 821635 - DNA, 15 bp, Homo sapiens
gaaaggaattgaact

SEQ ID NO: 821636 - DNA, 15 bp, Homo sapiens
agaaaggaattgaac

SEQ ID NO: 821637 - DNA, 15 bp, Homo sapiens
aagaaaggaattgaa

SEQ ID NO: 821638 - DNA, 15 bp, Homo sapiens
aaagaaaggaattga

SEQ ID NO: 821639 - DNA, 15 bp, Homo sapiens
taaagaaaggaattg

SEQ ID NO: 821640 - DNA, 15 bp, Homo sapiens
ttaaagaaaggaatt

SEQ ID NO: 821641 - DNA, 15 bp, Homo sapiens
attaaagaaaggaat

SEQ ID NO: 821642 - DNA, 15 bp, Homo sapiens
tattaaagaaaggaa

SEQ ID NO: 821643 - DNA, 15 bp, Homo sapiens
ttattaaagaaagga

SEQ ID NO: 821644 - DNA, 15 bp, Homo sapiens
tttattaaagaaagg

SEQ ID NO: 821645 - DNA, 15 bp, Homo sapiens
atttattaaagaaag

SEQ ID NO: 821646 - DNA, 15 bp, Homo sapiens
tatttattaaagaaa

SEQ ID NO: 821647 - DNA, 15 bp, Homo sapiens
atatttattaaagaa

SEQ ID NO: 821648 - DNA, 15 bp, Homo sapiens
tatatttattaaaga

SEQ ID NO: 821649 - DNA, 15 bp, Homo sapiens
atatatttattaaag

SEQ ID NO: 821650 - DNA, 15 bp, Homo sapiens
aatatatttattaaa

SEQ ID NO: 821651 - DNA, 15 bp, Homo sapiens
gaatatatttattaa

SEQ ID NO: 821652 - DNA, 15 bp, Homo sapiens
tgaatatatttatta

SEQ ID NO: 821653 - DNA, 15 bp, Homo sapiens
ttgaatatatttatt

SEQ ID NO: 821654 - DNA, 15 bp, Homo sapiens
attgaatatatttat

SEQ ID NO: 821655 - DNA, 15 bp, Homo sapiens
aattgaatatattta

SEQ ID NO: 821656 - DNA, 15 bp, Homo sapiens
aaattgaatatattt

SEQ ID NO: 821657 - DNA, 15 bp, Homo sapiens
aaaattgaatatatt

SEQ ID NO: 821658 - DNA, 15 bp, Homo sapiens
taaaattgaatatat

SEQ ID NO: 821659 - DNA, 15 bp, Homo sapiens
gtaaaattgaatata

SEQ ID NO: 821660 - DNA, 15 bp, Homo sapiens
ggtaaaattgaatat

SEQ ID NO: 821661 - DNA, 15 bp, Homo sapiens
aggtaaaattgaata

SEQ ID NO: 821662 - DNA, 15 bp, Homo sapiens
caggtaaaattgaat

SEQ ID NO: 821663 - DNA, 15 bp, Homo sapiens
tcaggtaaaattgaa

SEQ ID NO: 821664 - DNA, 15 bp, Homo sapiens
ctcaggtaaaattga

SEQ ID NO: 821665 - DNA, 15 bp, Homo sapiens
tctcaggtaaaattg

SEQ ID NO: 821666 - DNA, 15 bp, Homo sapiens
ttctcaggtaaaatt

SEQ ID NO: 821667 - DNA, 15 bp, Homo sapiens
tttctcaggtaaaat

SEQ ID NO: 821668 - DNA, 15 bp, Homo sapiens
ctttctcaggtaaaa

SEQ ID NO: 821669 - DNA, 15 bp, Homo sapiens
gctttctcaggtaaa

SEQ ID NO: 821670 - DNA, 15 bp, Homo sapiens
agctttctcaggtaa

SEQ ID NO: 821671 - DNA, 15 bp, Homo sapiens
gagctttctcaggta

SEQ ID NO: 821672 - DNA, 15 bp, Homo sapiens
agagctttctcaggt

SEQ ID NO: 821673 - DNA, 15 bp, Homo sapiens
gagagctttctcagg

SEQ ID NO: 821674 - DNA, 15 bp, Homo sapiens
cgagagctttctcag

SEQ ID NO: 821675 - DNA, 15 bp, Homo sapiens
acgagagctttctca

SEQ ID NO: 821676 - DNA, 15 bp, Homo sapiens
cacgagagctttctc

SEQ ID NO: 821677 - DNA, 15 bp, Homo sapiens
gcacgagagctttct

SEQ ID NO: 821678 - DNA, 15 bp, Homo sapiens
agcacgagagctttc

SEQ ID NO: 821679 - DNA, 15 bp, Homo sapiens
gagcacgagagcttt

SEQ ID NO: 821680 - DNA, 15 bp, Homo sapiens
agagcacgagagctt

SEQ ID NO: 821681 - DNA, 15 bp, Homo sapiens
gagagcacgagagct

SEQ ID NO: 821682 - DNA, 15 bp, Homo sapiens
cgagagcacgagagc

SEQ ID NO: 821683 - DNA, 15 bp, Homo sapiens
tcgagagcacgagag

SEQ ID NO: 821684 - DNA, 15 bp, Homo sapiens
ttcgagagcacgaga

SEQ ID NO: 821685 - DNA, 15 bp, Homo sapiens
attcgagagcacgag

SEQ ID NO: 821686 - DNA, 15 bp, Homo sapiens
aattcgagagcacga

SEQ ID NO: 821687 - DNA, 15 bp, Homo sapiens
aaattcgagagcacg

SEQ ID NO: 821688 - DNA, 15 bp, Homo sapiens
aaaattcgagagcac

SEQ ID NO: 821689 - DNA, 15 bp, Homo sapiens
taaaattcgagagca

SEQ ID NO: 821690 - DNA, 15 bp, Homo sapiens
ataaaattcgagagc

SEQ ID NO: 821691 - DNA, 15 bp, Homo sapiens
aataaaattcgagag

SEQ ID NO: 821692 - DNA, 15 bp, Homo sapiens
aaataaaattcgaga

SEQ ID NO: 821693 - DNA, 15 bp, Homo sapiens
taaataaaattcgag

SEQ ID NO: 821694 - DNA, 15 bp, Homo sapiens
ctaaataaaattcga

SEQ ID NO: 821695 - DNA, 15 bp, Homo sapiens
tctaaataaaattcg

SEQ ID NO: 821696 - DNA, 15 bp, Homo sapiens
ttctaaataaaattc

SEQ ID NO: 821697 - DNA, 15 bp, Homo sapiens
tttctaaataaaatt

SEQ ID NO: 821698 - DNA, 15 bp, Homo sapiens
atttctaaataaaat

SEQ ID NO: 821699 - DNA, 15 bp, Homo sapiens
aatttctaaataaaa

SEQ ID NO: 821700 - DNA, 15 bp, Homo sapiens
aaatttctaaataaa

SEQ ID NO: 821701 - DNA, 15 bp, Homo sapiens
gaaatttctaaataa

SEQ ID NO: 821702 - DNA, 15 bp, Homo sapiens
agaaatttctaaata

SEQ ID NO: 821703 - DNA, 15 bp, Homo sapiens
gagaaatttctaaat

SEQ ID NO: 821704 - DNA, 15 bp, Homo sapiens
agagaaatttctaaa

SEQ ID NO: 821705 - DNA, 15 bp, Homo sapiens
aagagaaatttctaa

SEQ ID NO: 821706 - DNA, 15 bp, Homo sapiens
aaagagaaatttcta

SEQ ID NO: 821707 - DNA, 15 bp, Homo sapiens
caaagagaaatttct

SEQ ID NO: 821708 - DNA, 15 bp, Homo sapiens
acaaagagaaatttc

SEQ ID NO: 821709 - DNA, 15 bp, Homo sapiens
tacaaagagaaattt

SEQ ID NO: 821710 - DNA, 15 bp, Homo sapiens
gtacaaagagaaatt

SEQ ID NO: 821711 - DNA, 15 bp, Homo sapiens
tgtacaaagagaaat

SEQ ID NO: 821712 - DNA, 15 bp, Homo sapiens
atgtacaaagagaaa

SEQ ID NO: 821713 - DNA, 15 bp, Homo sapiens
catgtacaaagagaa

SEQ ID NO: 821714 - DNA, 15 bp, Homo sapiens
tcatgtacaaagaga

SEQ ID NO: 821715 - DNA, 15 bp, Homo sapiens
atcatgtacaaagag

SEQ ID NO: 821716 - DNA, 15 bp, Homo sapiens
aatcatgtacaaaga

SEQ ID NO: 821717 - DNA, 15 bp, Homo sapiens
caatcatgtacaaag

SEQ ID NO: 821718 - DNA, 15 bp, Homo sapiens
tcaatcatgtacaaa

SEQ ID NO: 821719 - DNA, 15 bp, Homo sapiens
atcaatcatgtacaa

SEQ ID NO: 821720 - DNA, 15 bp, Homo sapiens
aatcaatcatgtaca

SEQ ID NO: 821721 - DNA, 15 bp, Homo sapiens
aaatcaatcatgtac

SEQ ID NO: 821722 - DNA, 15 bp, Homo sapiens
gaaatcaatcatgta

SEQ ID NO: 821723 - DNA, 15 bp, Homo sapiens
tgaaatcaatcatgt

SEQ ID NO: 821724 - DNA, 15 bp, Homo sapiens
gtgaaatcaatcatg

SEQ ID NO: 821725 - DNA, 15 bp, Homo sapiens
tgtgaaatcaatcat

SEQ ID NO: 821726 - DNA, 15 bp, Homo sapiens
ttgtgaaatcaatca

SEQ ID NO: 821727 - DNA, 15 bp, Homo sapiens
attgtgaaatcaatc

SEQ ID NO: 821728 - DNA, 15 bp, Homo sapiens
gattgtgaaatcaat

SEQ ID NO: 821729 - DNA, 15 bp, Homo sapiens
ggattgtgaaatcaa

SEQ ID NO: 821730 - DNA, 15 bp, Homo sapiens
aggattgtgaaatca

SEQ ID NO: 821731 - DNA, 15 bp, Homo sapiens
aaggattgtgaaatc

SEQ ID NO: 821732 - DNA, 15 bp, Homo sapiens
gaaggattgtgaaat

SEQ ID NO: 821733 - DNA, 15 bp, Homo sapiens
agaaggattgtgaaa

SEQ ID NO: 821734 - DNA, 15 bp, Homo sapiens
aagaaggattgtgaa

SEQ ID NO: 821735 - DNA, 15 bp, Homo sapiens
gaagaaggattgtga

SEQ ID NO: 821736 - DNA, 15 bp, Homo sapiens
agaagaaggattgtg

SEQ ID NO: 821737 - DNA, 15 bp, Homo sapiens
cagaagaaggattgt

SEQ ID NO: 821738 - DNA, 15 bp, Homo sapiens
gcagaagaaggattg

SEQ ID NO: 821739 - DNA, 15 bp, Homo sapiens
ggcagaagaaggatt

SEQ ID NO: 821740 - DNA, 15 bp, Homo sapiens
aggcagaagaaggat

SEQ ID NO: 821741 - DNA, 15 bp, Homo sapiens
gaggcagaagaagga

SEQ ID NO: 821742 - DNA, 15 bp, Homo sapiens
ggaggcagaagaagg

SEQ ID NO: 821743 - DNA, 15 bp, Homo sapiens
aggaggcagaagaag

SEQ ID NO: 821744 - DNA, 15 bp, Homo sapiens
gaggaggcagaagaa

SEQ ID NO: 821745 - DNA, 15 bp, Homo sapiens
agaggaggcagaaga

SEQ ID NO: 821746 - DNA, 15 bp, Homo sapiens
aagaggaggcagaag

SEQ ID NO: 821747 - DNA, 15 bp, Homo sapiens
gaagaggaggcagaa

SEQ ID NO: 821748 - DNA, 15 bp, Homo sapiens
agaagaggaggcaga

SEQ ID NO: 821749 - DNA, 15 bp, Homo sapiens
tagaagaggaggcag

SEQ ID NO: 821750 - DNA, 15 bp, Homo sapiens
gtagaagaggaggca

SEQ ID NO: 821751 - DNA, 15 bp, Homo sapiens
agtagaagaggaggc

SEQ ID NO: 821752 - DNA, 15 bp, Homo sapiens
aagtagaagaggagg

SEQ ID NO: 821753 - DNA, 15 bp, Homo sapiens
aaagtagaagaggag

SEQ ID NO: 821754 - DNA, 15 bp, Homo sapiens
gaaagtagaagagga

SEQ ID NO: 821755 - DNA, 15 bp, Homo sapiens
agaaagtagaagagg

SEQ ID NO: 821756 - DNA, 15 bp, Homo sapiens
aagaaagtagaagag

SEQ ID NO: 821757 - DNA, 15 bp, Homo sapiens
gaagaaagtagaaga

SEQ ID NO: 821758 - DNA, 15 bp, Homo sapiens
agaagaaagtagaag

SEQ ID NO: 821759 - DNA, 15 bp, Homo sapiens
aagaagaaagtagaa

SEQ ID NO: 821760 - DNA, 15 bp, Homo sapiens
aaagaagaaagtaga

SEQ ID NO: 821761 - DNA, 15 bp, Homo sapiens
gaaagaagaaagtag

SEQ ID NO: 821762 - DNA, 15 bp, Homo sapiens
agaaagaagaaagta

SEQ ID NO: 821763 - DNA, 15 bp, Homo sapiens
tagaaagaagaaagt

SEQ ID NO: 821764 - DNA, 15 bp, Homo sapiens
ctagaaagaagaaag

SEQ ID NO: 821765 - DNA, 15 bp, Homo sapiens
tctagaaagaagaaa

SEQ ID NO: 821766 - DNA, 15 bp, Homo sapiens
atctagaaagaagaa

SEQ ID NO: 821767 - DNA, 15 bp, Homo sapiens
aatctagaaagaaga

SEQ ID NO: 821768 - DNA, 15 bp, Homo sapiens
aaatctagaaagaag

SEQ ID NO: 821769 - DNA, 15 bp, Homo sapiens
aaaatctagaaagaa

SEQ ID NO: 821770 - DNA, 15 bp, Homo sapiens
gaaaatctagaaaga

SEQ ID NO: 821771 - DNA, 15 bp, Homo sapiens
ggaaaatctagaaag

SEQ ID NO: 821772 - DNA, 15 bp, Homo sapiens
aggaaaatctagaaa

SEQ ID NO: 821773 - DNA, 15 bp, Homo sapiens
taggaaaatctagaa

SEQ ID NO: 821774 - DNA, 15 bp, Homo sapiens
ataggaaaatctaga

SEQ ID NO: 821775 - DNA, 15 bp, Homo sapiens
gataggaaaatctag

SEQ ID NO: 821776 - DNA, 15 bp, Homo sapiens
agataggaaaatcta

SEQ ID NO: 821777 - DNA, 15 bp, Homo sapiens
aagataggaaaatct

SEQ ID NO: 821778 - DNA, 15 bp, Homo sapiens
aaagataggaaaatc

SEQ ID NO: 821779 - DNA, 15 bp, Homo sapiens
taaagataggaaaat

SEQ ID NO: 821780 - DNA, 15 bp, Homo sapiens
ataaagataggaaaa

SEQ ID NO: 821781 - DNA, 15 bp, Homo sapiens
cataaagataggaaa

SEQ ID NO: 821782 - DNA, 15 bp, Homo sapiens
tcataaagataggaa

SEQ ID NO: 821783 - DNA, 15 bp, Homo sapiens
ttcataaagatagga

SEQ ID NO: 821784 - DNA, 15 bp, Homo sapiens
cttcataaagatagg

SEQ ID NO: 821785 - DNA, 15 bp, Homo sapiens
tcttcataaagatag

SEQ ID NO: 821786 - DNA, 15 bp, Homo sapiens
atcttcataaagata

SEQ ID NO: 821787 - DNA, 15 bp, Homo sapiens
aatcttcataaagat

SEQ ID NO: 821788 - DNA, 15 bp, Homo sapiens
taatcttcataaaga

SEQ ID NO: 821789 - DNA, 15 bp, Homo sapiens
ataatcttcataaag

SEQ ID NO: 821790 - DNA, 15 bp, Homo sapiens
aataatcttcataaa

SEQ ID NO: 821791 - DNA, 15 bp, Homo sapiens
gaataatcttcataa

SEQ ID NO: 821792 - DNA, 15 bp, Homo sapiens
agaataatcttcata

SEQ ID NO: 821793 - DNA, 15 bp, Homo sapiens
cagaataatcttcat

SEQ ID NO: 821794 - DNA, 15 bp, Homo sapiens
gcagaataatcttca

SEQ ID NO: 821795 - DNA, 15 bp, Homo sapiens
ggcagaataatcttc

SEQ ID NO: 821796 - DNA, 15 bp, Homo sapiens
aggcagaataatctt

SEQ ID NO: 821797 - DNA, 15 bp, Homo sapiens
aaggcagaataatct

SEQ ID NO: 821798 - DNA, 15 bp, Homo sapiens
taaggcagaataatc

SEQ ID NO: 821799 - DNA, 15 bp, Homo sapiens
ataaggcagaataat

SEQ ID NO: 821800 - DNA, 15 bp, Homo sapiens
gataaggcagaataa

SEQ ID NO: 821801 - DNA, 15 bp, Homo sapiens
ggataaggcagaata

SEQ ID NO: 821802 - DNA, 15 bp, Homo sapiens
aggataaggcagaat

SEQ ID NO: 821803 - DNA, 15 bp, Homo sapiens
gaggataaggcagaa

SEQ ID NO: 821804 - DNA, 15 bp, Homo sapiens
tgaggataaggcaga

SEQ ID NO: 821805 - DNA, 15 bp, Homo sapiens
ttgaggataaggcag

SEQ ID NO: 821806 - DNA, 15 bp, Homo sapiens
gttgaggataaggca

SEQ ID NO: 821807 - DNA, 15 bp, Homo sapiens
tgttgaggataaggc

SEQ ID NO: 821808 - DNA, 15 bp, Homo sapiens
ctgttgaggataagg

SEQ ID NO: 821809 - DNA, 15 bp, Homo sapiens
actgttgaggataag

SEQ ID NO: 821810 - DNA, 15 bp, Homo sapiens
aactgttgaggataa

SEQ ID NO: 821811 - DNA, 15 bp, Homo sapiens
taactgttgaggata

SEQ ID NO: 821812 - DNA, 15 bp, Homo sapiens
ctaactgttgaggat

SEQ ID NO: 821813 - DNA, 15 bp, Homo sapiens
tctaactgttgagga

SEQ ID NO: 821814 - DNA, 15 bp, Homo sapiens
ttctaactgttgagg

SEQ ID NO: 821815 - DNA, 15 bp, Homo sapiens
tttctaactgttgag

SEQ ID NO: 821816 - DNA, 15 bp, Homo sapiens
gtttctaactgttga

SEQ ID NO: 821817 - DNA, 15 bp, Homo sapiens
tgtttctaactgttg

SEQ ID NO: 821818 - DNA, 15 bp, Homo sapiens
ttgtttctaactgtt

SEQ ID NO: 821819 - DNA, 15 bp, Homo sapiens
attgtttctaactgt

SEQ ID NO: 821820 - DNA, 15 bp, Homo sapiens
tattgtttctaactg

SEQ ID NO: 821821 - DNA, 15 bp, Homo sapiens
atattgtttctaact

SEQ ID NO: 821822 - DNA, 15 bp, Homo sapiens
aatattgtttctaac

SEQ ID NO: 821823 - DNA, 15 bp, Homo sapiens
aaatattgtttctaa

SEQ ID NO: 821824 - DNA, 15 bp, Homo sapiens
aaaatattgtttcta

SEQ ID NO: 821825 - DNA, 15 bp, Homo sapiens
aaaaatattgtttct

SEQ ID NO: 821826 - DNA, 15 bp, Homo sapiens
caaaaatattgtttc

SEQ ID NO: 821827 - DNA, 15 bp, Homo sapiens
tcaaaaatattgttt

SEQ ID NO: 821828 - DNA, 15 bp, Homo sapiens
ttcaaaaatattgtt

SEQ ID NO: 821829 - DNA, 15 bp, Homo sapiens
tttcaaaaatattgt

SEQ ID NO: 821830 - DNA, 15 bp, Homo sapiens
ttttcaaaaatattg

SEQ ID NO: 821831 - DNA, 15 bp, Homo sapiens
attttcaaaaatatt

SEQ ID NO: 821832 - DNA, 15 bp, Homo sapiens
gattttcaaaaatat

SEQ ID NO: 821833 - DNA, 15 bp, Homo sapiens
tgattttcaaaaata

SEQ ID NO: 821834 - DNA, 15 bp, Homo sapiens
gtgattttcaaaaat

SEQ ID NO: 821835 - DNA, 15 bp, Homo sapiens
agtgattttcaaaaa

SEQ ID NO: 821836 - DNA, 15 bp, Homo sapiens
tagtgattttcaaaa

SEQ ID NO: 821837 - DNA, 15 bp, Homo sapiens
gtagtgattttcaaa

SEQ ID NO: 821838 - DNA, 15 bp, Homo sapiens
cgtagtgattttcaa

SEQ ID NO: 821839 - DNA, 15 bp, Homo sapiens
ccgtagtgattttca

SEQ ID NO: 821840 - DNA, 15 bp, Homo sapiens
accgtagtgattttc

SEQ ID NO: 821841 - DNA, 15 bp, Homo sapiens
taccgtagtgatttt

SEQ ID NO: 821842 - DNA, 15 bp, Homo sapiens
ataccgtagtgattt

SEQ ID NO: 821843 - DNA, 15 bp, Homo sapiens
gataccgtagtgatt

SEQ ID NO: 821844 - DNA, 15 bp, Homo sapiens
ggataccgtagtgat

SEQ ID NO: 821845 - DNA, 15 bp, Homo sapiens
aggataccgtagtga

SEQ ID NO: 821846 - DNA, 15 bp, Homo sapiens
caggataccgtagtg

SEQ ID NO: 821847 - DNA, 15 bp, Homo sapiens
gcaggataccgtagt

SEQ ID NO: 821848 - DNA, 15 bp, Homo sapiens
tgcaggataccgtag

SEQ ID NO: 821849 - DNA, 15 bp, Homo sapiens
atgcaggataccgta

SEQ ID NO: 821850 - DNA, 15 bp, Homo sapiens
tatgcaggataccgt

SEQ ID NO: 821851 - DNA, 15 bp, Homo sapiens
ctatgcaggataccg

SEQ ID NO: 821852 - DNA, 15 bp, Homo sapiens
actatgcaggatacc

SEQ ID NO: 821853 - DNA, 15 bp, Homo sapiens
cactatgcaggatac

SEQ ID NO: 821854 - DNA, 15 bp, Homo sapiens
tcactatgcaggata

SEQ ID NO: 821855 - DNA, 15 bp, Homo sapiens
atcactatgcaggat

SEQ ID NO: 821856 - DNA, 15 bp, Homo sapiens
aatcactatgcagga

SEQ ID NO: 821857 - DNA, 15 bp, Homo sapiens
aaatcactatgcagg

SEQ ID NO: 821858 - DNA, 15 bp, Homo sapiens
gaaatcactatgcag

SEQ ID NO: 821859 - DNA, 15 bp, Homo sapiens
ggaaatcactatgca

SEQ ID NO: 821860 - DNA, 15 bp, Homo sapiens
gggaaatcactatgc

SEQ ID NO: 821861 - DNA, 15 bp, Homo sapiens
tgggaaatcactatg

SEQ ID NO: 821862 - DNA, 15 bp, Homo sapiens
atgggaaatcactat

SEQ ID NO: 821863 - DNA, 15 bp, Homo sapiens
catgggaaatcacta

SEQ ID NO: 821864 - DNA, 15 bp, Homo sapiens
gcatgggaaatcact

SEQ ID NO: 821865 - DNA, 15 bp, Homo sapiens
ggcatgggaaatcac

SEQ ID NO: 821866 - DNA, 15 bp, Homo sapiens
tggcatgggaaatca

SEQ ID NO: 821867 - DNA, 15 bp, Homo sapiens
ttggcatgggaaatc

SEQ ID NO: 821868 - DNA, 15 bp, Homo sapiens
gttggcatgggaaat

SEQ ID NO: 821869 - DNA, 15 bp, Homo sapiens
agttggcatgggaaa

SEQ ID NO: 821870 - DNA, 15 bp, Homo sapiens
aagttggcatgggaa

SEQ ID NO: 821871 - DNA, 15 bp, Homo sapiens
aaagttggcatggga

SEQ ID NO: 821872 - DNA, 15 bp, Homo sapiens
taaagttggcatggg

SEQ ID NO: 821873 - DNA, 15 bp, Homo sapiens
gtaaagttggcatgg

SEQ ID NO: 821874 - DNA, 15 bp, Homo sapiens
agtaaagttggcatg

SEQ ID NO: 821875 - DNA, 15 bp, Homo sapiens
tagtaaagttggcat

SEQ ID NO: 821876 - DNA, 15 bp, Homo sapiens
ttagtaaagttggca

SEQ ID NO: 821877 - DNA, 15 bp, Homo sapiens
attagtaaagttggc

SEQ ID NO: 821878 - DNA, 15 bp, Homo sapiens
aattagtaaagttgg

SEQ ID NO: 821879 - DNA, 15 bp, Homo sapiens
aaattagtaaagttg

SEQ ID NO: 821880 - DNA, 15 bp, Homo sapiens
gaaattagtaaagtt

SEQ ID NO: 821881 - DNA, 15 bp, Homo sapiens
ggaaattagtaaagt

SEQ ID NO: 821882 - DNA, 15 bp, Homo sapiens
tggaaattagtaaag

SEQ ID NO: 821883 - DNA, 15 bp, Homo sapiens
atggaaattagtaaa

SEQ ID NO: 821884 - DNA, 15 bp, Homo sapiens
aatggaaattagtaa

SEQ ID NO: 821885 - DNA, 15 bp, Homo sapiens
taatggaaattagta

SEQ ID NO: 821886 - DNA, 15 bp, Homo sapiens
ataatggaaattagt

SEQ ID NO: 821887 - DNA, 15 bp, Homo sapiens
tataatggaaattag

SEQ ID NO: 821888 - DNA, 15 bp, Homo sapiens
ttataatggaaatta

SEQ ID NO: 821889 - DNA, 15 bp, Homo sapiens
tttataatggaaatt

SEQ ID NO: 821890 - DNA, 15 bp, Homo sapiens
atttataatggaaat

SEQ ID NO: 821891 - DNA, 15 bp, Homo sapiens
aatttataatggaaa

SEQ ID NO: 821892 - DNA, 15 bp, Homo sapiens
taatttataatggaa

SEQ ID NO: 821893 - DNA, 15 bp, Homo sapiens
ataatttataatgga

SEQ ID NO: 821894 - DNA, 15 bp, Homo sapiens
aataatttataatgg

SEQ ID NO: 821895 - DNA, 15 bp, Homo sapiens
taataatttataatg

SEQ ID NO: 821896 - DNA, 15 bp, Homo sapiens
ataataatttataat

SEQ ID NO: 821897 - DNA, 15 bp, Homo sapiens
aataataatttataa

SEQ ID NO: 821898 - DNA, 15 bp, Homo sapiens
aaataataatttata

SEQ ID NO: 821899 - DNA, 15 bp, Homo sapiens
taaataataatttat

SEQ ID NO: 821900 - DNA, 15 bp, Homo sapiens
ataaataataattta

SEQ ID NO: 821901 - DNA, 15 bp, Homo sapiens
aataaataataattt

SEQ ID NO: 821902 - DNA, 15 bp, Homo sapiens
caataaataataatt

SEQ ID NO: 821903 - DNA, 15 bp, Homo sapiens
tcaataaataataat

SEQ ID NO: 821904 - DNA, 15 bp, Homo sapiens
atcaataaataataa

SEQ ID NO: 821905 - DNA, 15 bp, Homo sapiens
catcaataaataata

SEQ ID NO: 821906 - DNA, 15 bp, Homo sapiens
gcatcaataaataat

SEQ ID NO: 821907 - DNA, 15 bp, Homo sapiens
ggcatcaataaataa

SEQ ID NO: 821908 - DNA, 15 bp, Homo sapiens
aggcatcaataaata

SEQ ID NO: 821909 - DNA, 15 bp, Homo sapiens
taggcatcaataaat

SEQ ID NO: 821910 - DNA, 15 bp, Homo sapiens
ctaggcatcaataaa

SEQ ID NO: 821911 - DNA, 15 bp, Homo sapiens
tctaggcatcaataa

SEQ ID NO: 821912 - DNA, 15 bp, Homo sapiens
ctctaggcatcaata

SEQ ID NO: 821913 - DNA, 15 bp, Homo sapiens
cctctaggcatcaat

SEQ ID NO: 821914 - DNA, 15 bp, Homo sapiens
ccctctaggcatcaa

SEQ ID NO: 821915 - DNA, 15 bp, Homo sapiens
gccctctaggcatca

SEQ ID NO: 821916 - DNA, 15 bp, Homo sapiens
tgccctctaggcatc

SEQ ID NO: 821917 - DNA, 15 bp, Homo sapiens
ctgccctctaggcat

SEQ ID NO: 821918 - DNA, 15 bp, Homo sapiens
tctgccctctaggca

SEQ ID NO: 821919 - DNA, 15 bp, Homo sapiens
atctgccctctaggc

SEQ ID NO: 821920 - DNA, 15 bp, Homo sapiens
catctgccctctagg

SEQ ID NO: 821921 - DNA, 15 bp, Homo sapiens
tcatctgccctctag

SEQ ID NO: 821922 - DNA, 15 bp, Homo sapiens
ctcatctgccctcta

SEQ ID NO: 821923 - DNA, 15 bp, Homo sapiens
actcatctgccctct

SEQ ID NO: 821924 - DNA, 15 bp, Homo sapiens
cactcatctgccctc

SEQ ID NO: 821925 - DNA, 15 bp, Homo sapiens
acactcatctgccct

SEQ ID NO: 821926 - DNA, 15 bp, Homo sapiens
tacactcatctgccc

SEQ ID NO: 821927 - DNA, 15 bp, Homo sapiens
ctacactcatctgcc

SEQ ID NO: 821928 - DNA, 15 bp, Homo sapiens
gctacactcatctgc

SEQ ID NO: 821929 - DNA, 15 bp, Homo sapiens
agctacactcatctg

SEQ ID NO: 821930 - DNA, 15 bp, Homo sapiens
cagctacactcatct

SEQ ID NO: 821931 - DNA, 15 bp, Homo sapiens
gcagctacactcatc

SEQ ID NO: 821932 - DNA, 15 bp, Homo sapiens
agcagctacactcat

SEQ ID NO: 821933 - DNA, 15 bp, Homo sapiens
tagcagctacactca

SEQ ID NO: 821934 - DNA, 15 bp, Homo sapiens
atagcagctacactc

SEQ ID NO: 821935 - DNA, 15 bp, Homo sapiens
catagcagctacact

SEQ ID NO: 821936 - DNA, 15 bp, Homo sapiens
ccatagcagctacac

SEQ ID NO: 821937 - DNA, 15 bp, Homo sapiens
tccatagcagctaca

SEQ ID NO: 821938 - DNA, 15 bp, Homo sapiens
ctccatagcagctac

SEQ ID NO: 821939 - DNA, 15 bp, Homo sapiens
actccatagcagcta

SEQ ID NO: 821940 - DNA, 15 bp, Homo sapiens
cactccatagcagct

SEQ ID NO: 821941 - DNA, 15 bp, Homo sapiens
tcactccatagcagc

SEQ ID NO: 821942 - DNA, 15 bp, Homo sapiens
ctcactccatagcag

SEQ ID NO: 821943 - DNA, 15 bp, Homo sapiens
cctcactccatagca

SEQ ID NO: 821944 - DNA, 15 bp, Homo sapiens
tcctcactccatagc

SEQ ID NO: 821945 - DNA, 15 bp, Homo sapiens
ctcctcactccatag

SEQ ID NO: 821946 - DNA, 15 bp, Homo sapiens
tctcctcactccata

SEQ ID NO: 821947 - DNA, 15 bp, Homo sapiens
gtctcctcactccat

SEQ ID NO: 821948 - DNA, 15 bp, Homo sapiens
tgtctcctcactcca

SEQ ID NO: 821949 - DNA, 15 bp, Homo sapiens
ttgtctcctcactcc

SEQ ID NO: 821950 - DNA, 15 bp, Homo sapiens
tttgtctcctcactc

SEQ ID NO: 821951 - DNA, 15 bp, Homo sapiens
ttttgtctcctcact

SEQ ID NO: 821952 - DNA, 15 bp, Homo sapiens
gttttgtctcctcac

SEQ ID NO: 821953 - DNA, 15 bp, Homo sapiens
tgttttgtctcctca

SEQ ID NO: 821954 - DNA, 15 bp, Homo sapiens
atgttttgtctcctc

SEQ ID NO: 821955 - DNA, 15 bp, Homo sapiens
tatgttttgtctcct

SEQ ID NO: 821956 - DNA, 15 bp, Homo sapiens
ttatgttttgtctcc

SEQ ID NO: 821957 - DNA, 15 bp, Homo sapiens
cttatgttttgtctc

SEQ ID NO: 821958 - DNA, 15 bp, Homo sapiens
tcttatgttttgtct

SEQ ID NO: 821959 - DNA, 15 bp, Homo sapiens
ttcttatgttttgtc

SEQ ID NO: 821960 - DNA, 15 bp, Homo sapiens
tttcttatgttttgt

SEQ ID NO: 821961 - DNA, 15 bp, Homo sapiens
ctttcttatgttttg

SEQ ID NO: 821962 - DNA, 15 bp, Homo sapiens
actttcttatgtttt

SEQ ID NO: 821963 - DNA, 15 bp, Homo sapiens
aactttcttatgttt

SEQ ID NO: 821964 - DNA, 15 bp, Homo sapiens
taactttcttatgtt

SEQ ID NO: 821965 - DNA, 15 bp, Homo sapiens
ataactttcttatgt

SEQ ID NO: 821966 - DNA, 15 bp, Homo sapiens
cataactttcttatg

SEQ ID NO: 821967 - DNA, 15 bp, Homo sapiens
tcataactttcttat

SEQ ID NO: 821968 - DNA, 15 bp, Homo sapiens
atcataactttctta

SEQ ID NO: 821969 - DNA, 15 bp, Homo sapiens
gatcataactttctt

SEQ ID NO: 821970 - DNA, 15 bp, Homo sapiens
ggatcataactttct

SEQ ID NO: 821971 - DNA, 15 bp, Homo sapiens
aggatcataactttc

SEQ ID NO: 821972 - DNA, 15 bp, Homo sapiens
taggatcataacttt

SEQ ID NO: 821973 - DNA, 15 bp, Homo sapiens
gtaggatcataactt

SEQ ID NO: 821974 - DNA, 15 bp, Homo sapiens
ggtaggatcataact

SEQ ID NO: 821975 - DNA, 15 bp, Homo sapiens
gggtaggatcataac

SEQ ID NO: 821976 - DNA, 15 bp, Homo sapiens
agggtaggatcataa

SEQ ID NO: 821977 - DNA, 15 bp, Homo sapiens
gagggtaggatcata

SEQ ID NO: 821978 - DNA, 15 bp, Homo sapiens
tgagggtaggatcat

SEQ ID NO: 821979 - DNA, 15 bp, Homo sapiens
ctgagggtaggatca

SEQ ID NO: 821980 - DNA, 15 bp, Homo sapiens
cctgagggtaggatc

SEQ ID NO: 821981 - DNA, 15 bp, Homo sapiens
acctgagggtaggat

SEQ ID NO: 821982 - DNA, 15 bp, Homo sapiens
tacctgagggtagga

SEQ ID NO: 821983 - DNA, 15 bp, Homo sapiens
ttacctgagggtagg

SEQ ID NO: 821984 - DNA, 15 bp, Homo sapiens
attacctgagggtag

SEQ ID NO: 821985 - DNA, 15 bp, Homo sapiens
cattacctgagggta

SEQ ID NO: 821986 - DNA, 15 bp, Homo sapiens
tcattacctgagggt

SEQ ID NO: 821987 - DNA, 15 bp, Homo sapiens
atcattacctgaggg

SEQ ID NO: 821988 - DNA, 15 bp, Homo sapiens
aatcattacctgagg

SEQ ID NO: 821989 - DNA, 15 bp, Homo sapiens
gaatcattacctgag

SEQ ID NO: 821990 - DNA, 15 bp, Homo sapiens
tgaatcattacctga

SEQ ID NO: 821991 - DNA, 15 bp, Homo sapiens
ctgaatcattacctg

SEQ ID NO: 821992 - DNA, 15 bp, Homo sapiens
tctgaatcattacct

SEQ ID NO: 821993 - DNA, 15 bp, Homo sapiens
gtctgaatcattacc

SEQ ID NO: 821994 - DNA, 15 bp, Homo sapiens
tgtctgaatcattac

SEQ ID NO: 821995 - DNA, 15 bp, Homo sapiens
atgtctgaatcatta

SEQ ID NO: 821996 - DNA, 15 bp, Homo sapiens
catgtctgaatcatt

SEQ ID NO: 821997 - DNA, 15 bp, Homo sapiens
tcatgtctgaatcat

SEQ ID NO: 821998 - DNA, 15 bp, Homo sapiens
atcatgtctgaatca

SEQ ID NO: 821999 - DNA, 15 bp, Homo sapiens
tatcatgtctgaatc

SEQ ID NO: 822000 - DNA, 15 bp, Homo sapiens
ttatcatgtctgaat

SEQ ID NO: 822001 - DNA, 15 bp, Homo sapiens
attatcatgtctgaa

SEQ ID NO: 822002 - DNA, 15 bp, Homo sapiens
aattatcatgtctga

SEQ ID NO: 822003 - DNA, 15 bp, Homo sapiens
taattatcatgtctg

SEQ ID NO: 822004 - DNA, 15 bp, Homo sapiens
ttaattatcatgtct

SEQ ID NO: 822005 - DNA, 15 bp, Homo sapiens
cttaattatcatgtc

SEQ ID NO: 822006 - DNA, 15 bp, Homo sapiens
acttaattatcatgt

SEQ ID NO: 822007 - DNA, 15 bp, Homo sapiens
gacttaattatcatg

SEQ ID NO: 822008 - DNA, 15 bp, Homo sapiens
tgacttaattatcat

SEQ ID NO: 822009 - DNA, 15 bp, Homo sapiens
ttgacttaattatca

SEQ ID NO: 822010 - DNA, 15 bp, Homo sapiens
gttgacttaattatc

SEQ ID NO: 822011 - DNA, 15 bp, Homo sapiens
tgttgacttaattat

SEQ ID NO: 822012 - DNA, 15 bp, Homo sapiens
ttgttgacttaatta

SEQ ID NO: 822013 - DNA, 15 bp, Homo sapiens
tttgttgacttaatt

SEQ ID NO: 822014 - DNA, 15 bp, Homo sapiens
atttgttgacttaat

SEQ ID NO: 822015 - DNA, 15 bp, Homo sapiens
aatttgttgacttaa

SEQ ID NO: 822016 - DNA, 15 bp, Homo sapiens
caatttgttgactta

SEQ ID NO: 822017 - DNA, 15 bp, Homo sapiens
tcaatttgttgactt

SEQ ID NO: 822018 - DNA, 15 bp, Homo sapiens
atcaatttgttgact

SEQ ID NO: 822019 - DNA, 15 bp, Homo sapiens
tatcaatttgttgac

SEQ ID NO: 822020 - DNA, 15 bp, Homo sapiens
ctatcaatttgttga

SEQ ID NO: 822021 - DNA, 15 bp, Homo sapiens
tctatcaatttgttg

SEQ ID NO: 822022 - DNA, 15 bp, Homo sapiens
ttctatcaatttgtt

SEQ ID NO: 822023 - DNA, 15 bp, Homo sapiens
tttctatcaatttgt

SEQ ID NO: 822024 - DNA, 15 bp, Homo sapiens
gtttctatcaatttg

SEQ ID NO: 822025 - DNA, 15 bp, Homo sapiens
agtttctatcaattt

SEQ ID NO: 822026 - DNA, 15 bp, Homo sapiens
tagtttctatcaatt

SEQ ID NO: 822027 - DNA, 15 bp, Homo sapiens
ttagtttctatcaat

SEQ ID NO: 822028 - DNA, 15 bp, Homo sapiens
attagtttctatcaa

SEQ ID NO: 822029 - DNA, 15 bp, Homo sapiens
gattagtttctatca

SEQ ID NO: 822030 - DNA, 15 bp, Homo sapiens
tgattagtttctatc

SEQ ID NO: 822031 - DNA, 15 bp, Homo sapiens
gtgattagtttctat

SEQ ID NO: 822032 - DNA, 15 bp, Homo sapiens
agtgattagtttcta

SEQ ID NO: 822033 - DNA, 15 bp, Homo sapiens
tagtgattagtttct

SEQ ID NO: 822034 - DNA, 15 bp, Homo sapiens
ttagtgattagtttc

SEQ ID NO: 822035 - DNA, 15 bp, Homo sapiens
gttagtgattagttt

SEQ ID NO: 822036 - DNA, 15 bp, Homo sapiens
agttagtgattagtt

SEQ ID NO: 822037 - DNA, 15 bp, Homo sapiens
gagttagtgattagt

SEQ ID NO: 822038 - DNA, 15 bp, Homo sapiens
agagttagtgattag

SEQ ID NO: 822039 - DNA, 15 bp, Homo sapiens
gagagttagtgatta

SEQ ID NO: 822040 - DNA, 15 bp, Homo sapiens
agagagttagtgatt

SEQ ID NO: 822041 - DNA, 15 bp, Homo sapiens
cagagagttagtgat

SEQ ID NO: 822042 - DNA, 15 bp, Homo sapiens
ccagagagttagtga

SEQ ID NO: 822043 - DNA, 15 bp, Homo sapiens
gccagagagttagtg

SEQ ID NO: 822044 - DNA, 15 bp, Homo sapiens
agccagagagttagt

SEQ ID NO: 822045 - DNA, 15 bp, Homo sapiens
tagccagagagttag

SEQ ID NO: 822046 - DNA, 15 bp, Homo sapiens
atagccagagagtta

SEQ ID NO: 822047 - DNA, 15 bp, Homo sapiens
tatagccagagagtt

SEQ ID NO: 822048 - DNA, 15 bp, Homo sapiens
ctatagccagagagt

SEQ ID NO: 822049 - DNA, 15 bp, Homo sapiens
actatagccagagag

SEQ ID NO: 822050 - DNA, 15 bp, Homo sapiens
gactatagccagaga

SEQ ID NO: 822051 - DNA, 15 bp, Homo sapiens
tgactatagccagag

SEQ ID NO: 822052 - DNA, 15 bp, Homo sapiens
atgactatagccaga

SEQ ID NO: 822053 - DNA, 15 bp, Homo sapiens
aatgactatagccag

SEQ ID NO: 822054 - DNA, 15 bp, Homo sapiens
gaatgactatagcca

SEQ ID NO: 822055 - DNA, 15 bp, Homo sapiens
agaatgactatagcc

SEQ ID NO: 822056 - DNA, 15 bp, Homo sapiens
aagaatgactatagc

SEQ ID NO: 822057 - DNA, 15 bp, Homo sapiens
aaagaatgactatag

SEQ ID NO: 822058 - DNA, 15 bp, Homo sapiens
gaaagaatgactata

SEQ ID NO: 822059 - DNA, 15 bp, Homo sapiens
tgaaagaatgactat

SEQ ID NO: 822060 - DNA, 15 bp, Homo sapiens
ttgaaagaatgacta

SEQ ID NO: 822061 - DNA, 15 bp, Homo sapiens
attgaaagaatgact

SEQ ID NO: 822062 - DNA, 15 bp, Homo sapiens
cattgaaagaatgac

SEQ ID NO: 822063 - DNA, 15 bp, Homo sapiens
tcattgaaagaatga

SEQ ID NO: 822064 - DNA, 15 bp, Homo sapiens
ttcattgaaagaatg

SEQ ID NO: 822065 - DNA, 15 bp, Homo sapiens
attcattgaaagaat

SEQ ID NO: 822066 - DNA, 15 bp, Homo sapiens
tattcattgaaagaa

SEQ ID NO: 822067 - DNA, 15 bp, Homo sapiens
ctattcattgaaaga

SEQ ID NO: 822068 - DNA, 15 bp, Homo sapiens
gctattcattgaaag

SEQ ID NO: 822069 - DNA, 15 bp, Homo sapiens
agctattcattgaaa

SEQ ID NO: 822070 - DNA, 15 bp, Homo sapiens
gagctattcattgaa

SEQ ID NO: 822071 - DNA, 15 bp, Homo sapiens
tgagctattcattga

SEQ ID NO: 822072 - DNA, 15 bp, Homo sapiens
atgagctattcattg

SEQ ID NO: 822073 - DNA, 15 bp, Homo sapiens
aatgagctattcatt

SEQ ID NO: 822074 - DNA, 15 bp, Homo sapiens
taatgagctattcat

SEQ ID NO: 822075 - DNA, 15 bp, Homo sapiens
gtaatgagctattca

SEQ ID NO: 822076 - DNA, 15 bp, Homo sapiens
agtaatgagctattc

SEQ ID NO: 822077 - DNA, 15 bp, Homo sapiens
cagtaatgagctatt

SEQ ID NO: 822078 - DNA, 15 bp, Homo sapiens
tcagtaatgagctat

SEQ ID NO: 822079 - DNA, 15 bp, Homo sapiens
ctcagtaatgagcta

SEQ ID NO: 822080 - DNA, 15 bp, Homo sapiens
actcagtaatgagct

SEQ ID NO: 822081 - DNA, 15 bp, Homo sapiens
tactcagtaatgagc

SEQ ID NO: 822082 - DNA, 15 bp, Homo sapiens
atactcagtaatgag

SEQ ID NO: 822083 - DNA, 15 bp, Homo sapiens
catactcagtaatga

SEQ ID NO: 822084 - DNA, 15 bp, Homo sapiens
gcatactcagtaatg

SEQ ID NO: 822085 - DNA, 15 bp, Homo sapiens
tgcatactcagtaat

SEQ ID NO: 822086 - DNA, 15 bp, Homo sapiens
atgcatactcagtaa

SEQ ID NO: 822087 - DNA, 15 bp, Homo sapiens
catgcatactcagta

SEQ ID NO: 822088 - DNA, 15 bp, Homo sapiens
gcatgcatactcagt

SEQ ID NO: 822089 - DNA, 15 bp, Homo sapiens
agcatgcatactcag

SEQ ID NO: 822090 - DNA, 15 bp, Homo sapiens
tagcatgcatactca

SEQ ID NO: 822091 - DNA, 15 bp, Homo sapiens
gtagcatgcatactc

SEQ ID NO: 822092 - DNA, 15 bp, Homo sapiens
tgtagcatgcatact

SEQ ID NO: 822093 - DNA, 15 bp, Homo sapiens
ctgtagcatgcatac

SEQ ID NO: 822094 - DNA, 15 bp, Homo sapiens
actgtagcatgcata

SEQ ID NO: 822095 - DNA, 15 bp, Homo sapiens
tactgtagcatgcat

SEQ ID NO: 822096 - DNA, 15 bp, Homo sapiens
ttactgtagcatgca

SEQ ID NO: 822097 - DNA, 15 bp, Homo sapiens
gttactgtagcatgc

SEQ ID NO: 822098 - DNA, 15 bp, Homo sapiens
tgttactgtagcatg

SEQ ID NO: 822099 - DNA, 15 bp, Homo sapiens
ttgttactgtagcat

SEQ ID NO: 822100 - DNA, 15 bp, Homo sapiens
tttgttactgtagca

SEQ ID NO: 822101 - DNA, 15 bp, Homo sapiens
ttttgttactgtagc

SEQ ID NO: 822102 - DNA, 15 bp, Homo sapiens
attttgttactgtag

SEQ ID NO: 822103 - DNA, 15 bp, Homo sapiens
aattttgttactgta

SEQ ID NO: 822104 - DNA, 15 bp, Homo sapiens
taattttgttactgt

SEQ ID NO: 822105 - DNA, 15 bp, Homo sapiens
ataattttgttactg

SEQ ID NO: 822106 - DNA, 15 bp, Homo sapiens
tataattttgttact

SEQ ID NO: 822107 - DNA, 15 bp, Homo sapiens
atataattttgttac

SEQ ID NO: 822108 - DNA, 15 bp, Homo sapiens
tatataattttgtta

SEQ ID NO: 822109 - DNA, 15 bp, Homo sapiens
ttatataattttgtt

SEQ ID NO: 822110 - DNA, 15 bp, Homo sapiens
cttatataattttgt

SEQ ID NO: 822111 - DNA, 15 bp, Homo sapiens
ccttatataattttg

SEQ ID NO: 822112 - DNA, 15 bp, Homo sapiens
gccttatataatttt

SEQ ID NO: 822113 - DNA, 15 bp, Homo sapiens
agccttatataattt

SEQ ID NO: 822114 - DNA, 15 bp, Homo sapiens
cagccttatataatt

SEQ ID NO: 822115 - DNA, 15 bp, Homo sapiens
acagccttatataat

SEQ ID NO: 822116 - DNA, 15 bp, Homo sapiens
aacagccttatataa

SEQ ID NO: 822117 - DNA, 15 bp, Homo sapiens
caacagccttatata

SEQ ID NO: 822118 - DNA, 15 bp, Homo sapiens
tcaacagccttatat

SEQ ID NO: 822119 - DNA, 15 bp, Homo sapiens
atcaacagccttata

SEQ ID NO: 822120 - DNA, 15 bp, Homo sapiens
aatcaacagccttat

SEQ ID NO: 822121 - DNA, 15 bp, Homo sapiens
taatcaacagcctta

SEQ ID NO: 822122 - DNA, 15 bp, Homo sapiens
ttaatcaacagcctt

SEQ ID NO: 822123 - DNA, 15 bp, Homo sapiens
tttaatcaacagcct

SEQ ID NO: 822124 - DNA, 15 bp, Homo sapiens
atttaatcaacagcc

SEQ ID NO: 822125 - DNA, 15 bp, Homo sapiens
catttaatcaacagc

SEQ ID NO: 822126 - DNA, 15 bp, Homo sapiens
acatttaatcaacag

SEQ ID NO: 822127 - DNA, 15 bp, Homo sapiens
aacatttaatcaaca

SEQ ID NO: 822128 - DNA, 15 bp, Homo sapiens
caacatttaatcaac

SEQ ID NO: 822129 - DNA, 15 bp, Homo sapiens
tcaacatttaatcaa

SEQ ID NO: 822130 - DNA, 15 bp, Homo sapiens
atcaacatttaatca

SEQ ID NO: 822131 - DNA, 15 bp, Homo sapiens
aatcaacatttaatc

SEQ ID NO: 822132 - DNA, 15 bp, Homo sapiens
taatcaacatttaat

SEQ ID NO: 822133 - DNA, 15 bp, Homo sapiens
ttaatcaacatttaa

SEQ ID NO: 822134 - DNA, 15 bp, Homo sapiens
cttaatcaacattta

SEQ ID NO: 822135 - DNA, 15 bp, Homo sapiens
acttaatcaacattt

SEQ ID NO: 822136 - DNA, 15 bp, Homo sapiens
cacttaatcaacatt

SEQ ID NO: 822137 - DNA, 15 bp, Homo sapiens
gcacttaatcaacat

SEQ ID NO: 822138 - DNA, 15 bp, Homo sapiens
tgcacttaatcaaca

SEQ ID NO: 822139 - DNA, 15 bp, Homo sapiens
atgcacttaatcaac

SEQ ID NO: 822140 - DNA, 15 bp, Homo sapiens
catgcacttaatcaa

SEQ ID NO: 822141 - DNA, 15 bp, Homo sapiens
acatgcacttaatca

SEQ ID NO: 822142 - DNA, 15 bp, Homo sapiens
gacatgcacttaatc

SEQ ID NO: 822143 - DNA, 15 bp, Homo sapiens
agacatgcacttaat

SEQ ID NO: 822144 - DNA, 15 bp, Homo sapiens
aagacatgcacttaa

SEQ ID NO: 822145 - DNA, 15 bp, Homo sapiens
taagacatgcactta

SEQ ID NO: 822146 - DNA, 15 bp, Homo sapiens
ataagacatgcactt

SEQ ID NO: 822147 - DNA, 15 bp, Homo sapiens
aataagacatgcact

SEQ ID NO: 822148 - DNA, 15 bp, Homo sapiens
gaataagacatgcac

SEQ ID NO: 822149 - DNA, 15 bp, Homo sapiens
tgaataagacatgca

SEQ ID NO: 822150 - DNA, 15 bp, Homo sapiens
ctgaataagacatgc

SEQ ID NO: 822151 - DNA, 15 bp, Homo sapiens
tctgaataagacatg

SEQ ID NO: 822152 - DNA, 15 bp, Homo sapiens
ctctgaataagacat

SEQ ID NO: 822153 - DNA, 15 bp, Homo sapiens
actctgaataagaca

SEQ ID NO: 822154 - DNA, 15 bp, Homo sapiens
aactctgaataagac

SEQ ID NO: 822155 - DNA, 15 bp, Homo sapiens
aaactctgaataaga

SEQ ID NO: 822156 - DNA, 15 bp, Homo sapiens
aaaactctgaataag

SEQ ID NO: 822157 - DNA, 15 bp, Homo sapiens
aaaaactctgaataa

SEQ ID NO: 822158 - DNA, 15 bp, Homo sapiens
aaaaaactctgaata

SEQ ID NO: 822159 - DNA, 15 bp, Homo sapiens
aaaaaaactctgaat

SEQ ID NO: 822160 - DNA, 15 bp, Homo sapiens
taaaaaaactctgaa

SEQ ID NO: 822161 - DNA, 15 bp, Homo sapiens
ataaaaaaactctga

SEQ ID NO: 822162 - DNA, 15 bp, Homo sapiens
tataaaaaaactctg

SEQ ID NO: 822163 - DNA, 15 bp, Homo sapiens
atataaaaaaactct

SEQ ID NO: 822164 - DNA, 15 bp, Homo sapiens
aatataaaaaaactc

SEQ ID NO: 822165 - DNA, 15 bp, Homo sapiens
aaatataaaaaaact

SEQ ID NO: 822166 - DNA, 15 bp, Homo sapiens
caaatataaaaaaac

SEQ ID NO: 822167 - DNA, 15 bp, Homo sapiens
tcaaatataaaaaaa

SEQ ID NO: 822168 - DNA, 15 bp, Homo sapiens
ttcaaatataaaaaa

SEQ ID NO: 822169 - DNA, 15 bp, Homo sapiens
tttcaaatataaaaa

SEQ ID NO: 822170 - DNA, 15 bp, Homo sapiens
atttcaaatataaaa

SEQ ID NO: 822171 - DNA, 15 bp, Homo sapiens
catttcaaatataaa

SEQ ID NO: 822172 - DNA, 15 bp, Homo sapiens
ccatttcaaatataa

SEQ ID NO: 822173 - DNA, 15 bp, Homo sapiens
tccatttcaaatata

SEQ ID NO: 822174 - DNA, 15 bp, Homo sapiens
ttccatttcaaatat

SEQ ID NO: 822175 - DNA, 15 bp, Homo sapiens
cttccatttcaaata

SEQ ID NO: 822176 - DNA, 15 bp, Homo sapiens
tcttccatttcaaat

SEQ ID NO: 822177 - DNA, 15 bp, Homo sapiens
ctcttccatttcaaa

SEQ ID NO: 822178 - DNA, 15 bp, Homo sapiens
cctcttccatttcaa

SEQ ID NO: 822179 - DNA, 15 bp, Homo sapiens
gcctcttccatttca

SEQ ID NO: 822180 - DNA, 15 bp, Homo sapiens
agcctcttccatttc

SEQ ID NO: 822181 - DNA, 15 bp, Homo sapiens
cagcctcttccattt

SEQ ID NO: 822182 - DNA, 15 bp, Homo sapiens
ccagcctcttccatt

SEQ ID NO: 822183 - DNA, 15 bp, Homo sapiens
tccagcctcttccat

SEQ ID NO: 822184 - DNA, 15 bp, Homo sapiens
gtccagcctcttcca

SEQ ID NO: 822185 - DNA, 15 bp, Homo sapiens
agtccagcctcttcc

SEQ ID NO: 822186 - DNA, 15 bp, Homo sapiens
aagtccagcctcttc

SEQ ID NO: 822187 - DNA, 15 bp, Homo sapiens
gaagtccagcctctt

SEQ ID NO: 822188 - DNA, 15 bp, Homo sapiens
tgaagtccagcctct

SEQ ID NO: 822189 - DNA, 15 bp, Homo sapiens
ctgaagtccagcctc

SEQ ID NO: 822190 - DNA, 15 bp, Homo sapiens
actgaagtccagcct

SEQ ID NO: 822191 - DNA, 15 bp, Homo sapiens
tactgaagtccagcc

SEQ ID NO: 822192 - DNA, 15 bp, Homo sapiens
ttactgaagtccagc

SEQ ID NO: 822193 - DNA, 15 bp, Homo sapiens
attactgaagtccag

SEQ ID NO: 822194 - DNA, 15 bp, Homo sapiens
aattactgaagtcca

SEQ ID NO: 822195 - DNA, 15 bp, Homo sapiens
aaattactgaagtcc

SEQ ID NO: 822196 - DNA, 15 bp, Homo sapiens
caaattactgaagtc

SEQ ID NO: 822197 - DNA, 15 bp, Homo sapiens
gcaaattactgaagt

SEQ ID NO: 822198 - DNA, 15 bp, Homo sapiens
agcaaattactgaag

SEQ ID NO: 822199 - DNA, 15 bp, Homo sapiens
tagcaaattactgaa

SEQ ID NO: 822200 - DNA, 15 bp, Homo sapiens
atagcaaattactga

SEQ ID NO: 822201 - DNA, 15 bp, Homo sapiens
tatagcaaattactg

SEQ ID NO: 822202 - DNA, 15 bp, Homo sapiens
ttatagcaaattact

SEQ ID NO: 822203 - DNA, 15 bp, Homo sapiens
tttatagcaaattac

SEQ ID NO: 822204 - DNA, 15 bp, Homo sapiens
gtttatagcaaatta

SEQ ID NO: 822205 - DNA, 15 bp, Homo sapiens
agtttatagcaaatt

SEQ ID NO: 822206 - DNA, 15 bp, Homo sapiens
cagtttatagcaaat

SEQ ID NO: 822207 - DNA, 15 bp, Homo sapiens
gcagtttatagcaaa

SEQ ID NO: 822208 - DNA, 15 bp, Homo sapiens
agcagtttatagcaa

SEQ ID NO: 822209 - DNA, 15 bp, Homo sapiens
tagcagtttatagca

SEQ ID NO: 822210 - DNA, 15 bp, Homo sapiens
ctagcagtttatagc

SEQ ID NO: 822211 - DNA, 15 bp, Homo sapiens
actagcagtttatag

SEQ ID NO: 822212 - DNA, 15 bp, Homo sapiens
tactagcagtttata

SEQ ID NO: 822213 - DNA, 15 bp, Homo sapiens
atactagcagtttat

SEQ ID NO: 822214 - DNA, 15 bp, Homo sapiens
tatactagcagttta

SEQ ID NO: 822215 - DNA, 15 bp, Homo sapiens
atatactagcagttt

SEQ ID NO: 822216 - DNA, 15 bp, Homo sapiens
catatactagcagtt

SEQ ID NO: 822217 - DNA, 15 bp, Homo sapiens
tcatatactagcagt

SEQ ID NO: 822218 - DNA, 15 bp, Homo sapiens
atcatatactagcag

SEQ ID NO: 822219 - DNA, 15 bp, Homo sapiens
aatcatatactagca

SEQ ID NO: 822220 - DNA, 15 bp, Homo sapiens
taatcatatactagc

SEQ ID NO: 822221 - DNA, 15 bp, Homo sapiens
ataatcatatactag

SEQ ID NO: 822222 - DNA, 15 bp, Homo sapiens
aataatcatatacta

SEQ ID NO: 822223 - DNA, 15 bp, Homo sapiens
aaataatcatatact

SEQ ID NO: 822224 - DNA, 15 bp, Homo sapiens
caaataatcatatac

SEQ ID NO: 822225 - DNA, 15 bp, Homo sapiens
ccaaataatcatata

SEQ ID NO: 822226 - DNA, 15 bp, Homo sapiens
cccaaataatcatat

SEQ ID NO: 822227 - DNA, 15 bp, Homo sapiens
ccccaaataatcata

SEQ ID NO: 822228 - DNA, 15 bp, Homo sapiens
cccccaaataatcat

SEQ ID NO: 822229 - DNA, 15 bp, Homo sapiens
gcccccaaataatca

SEQ ID NO: 822230 - DNA, 15 bp, Homo sapiens
tgcccccaaataatc

SEQ ID NO: 822231 - DNA, 15 bp, Homo sapiens
ctgcccccaaataat

SEQ ID NO: 822232 - DNA, 15 bp, Homo sapiens
actgcccccaaataa

SEQ ID NO: 822233 - DNA, 15 bp, Homo sapiens
aactgcccccaaata

SEQ ID NO: 822234 - DNA, 15 bp, Homo sapiens
taactgcccccaaat

SEQ ID NO: 822235 - DNA, 15 bp, Homo sapiens
ataactgcccccaaa

SEQ ID NO: 822236 - DNA, 15 bp, Homo sapiens
aataactgcccccaa

SEQ ID NO: 822237 - DNA, 15 bp, Homo sapiens
aaataactgccccca

SEQ ID NO: 822238 - DNA, 15 bp, Homo sapiens
aaaataactgccccc

SEQ ID NO: 822239 - DNA, 15 bp, Homo sapiens
aaaaataactgcccc

SEQ ID NO: 822240 - DNA, 15 bp, Homo sapiens
aaaaaataactgccc

SEQ ID NO: 822241 - DNA, 15 bp, Homo sapiens
taaaaaataactgcc

SEQ ID NO: 822242 - DNA, 15 bp, Homo sapiens
ttaaaaaataactgc

SEQ ID NO: 822243 - DNA, 15 bp, Homo sapiens
tttaaaaaataactg

SEQ ID NO: 822244 - DNA, 15 bp, Homo sapiens
ctttaaaaaataact

SEQ ID NO: 822245 - DNA, 15 bp, Homo sapiens
tctttaaaaaataac

SEQ ID NO: 822246 - DNA, 15 bp, Homo sapiens
ttctttaaaaaataa

SEQ ID NO: 822247 - DNA, 15 bp, Homo sapiens
attctttaaaaaata

SEQ ID NO: 822248 - DNA, 15 bp, Homo sapiens
tattctttaaaaaat

SEQ ID NO: 822249 - DNA, 15 bp, Homo sapiens
ttattctttaaaaaa

SEQ ID NO: 822250 - DNA, 15 bp, Homo sapiens
attattctttaaaaa

SEQ ID NO: 822251 - DNA, 15 bp, Homo sapiens
aattattctttaaaa

SEQ ID NO: 822252 - DNA, 15 bp, Homo sapiens
aaattattctttaaa

SEQ ID NO: 822253 - DNA, 15 bp, Homo sapiens
taaattattctttaa

SEQ ID NO: 822254 - DNA, 15 bp, Homo sapiens
ttaaattattcttta

SEQ ID NO: 822255 - DNA, 15 bp, Homo sapiens
tttaaattattcttt

SEQ ID NO: 822256 - DNA, 15 bp, Homo sapiens
atttaaattattctt

SEQ ID NO: 822257 - DNA, 15 bp, Homo sapiens
tatttaaattattct

SEQ ID NO: 822258 - DNA, 15 bp, Homo sapiens
atatttaaattattc

SEQ ID NO: 822259 - DNA, 15 bp, Homo sapiens
catatttaaattatt

SEQ ID NO: 822260 - DNA, 15 bp, Homo sapiens
ccatatttaaattat

SEQ ID NO: 822261 - DNA, 15 bp, Homo sapiens
tccatatttaaatta

SEQ ID NO: 822262 - DNA, 15 bp, Homo sapiens
ttccatatttaaatt

SEQ ID NO: 822263 - DNA, 15 bp, Homo sapiens
attccatatttaaat

SEQ ID NO: 822264 - DNA, 15 bp, Homo sapiens
cattccatatttaaa

SEQ ID NO: 822265 - DNA, 15 bp, Homo sapiens
acattccatatttaa

SEQ ID NO: 822266 - DNA, 15 bp, Homo sapiens
aacattccatattta

SEQ ID NO: 822267 - DNA, 15 bp, Homo sapiens
aaacattccatattt

SEQ ID NO: 822268 - DNA, 15 bp, Homo sapiens
taaacattccatatt

SEQ ID NO: 822269 - DNA, 15 bp, Homo sapiens
ctaaacattccatat

SEQ ID NO: 822270 - DNA, 15 bp, Homo sapiens
gctaaacattccata

SEQ ID NO: 822271 - DNA, 15 bp, Homo sapiens
tgctaaacattccat

SEQ ID NO: 822272 - DNA, 15 bp, Homo sapiens
ctgctaaacattcca

SEQ ID NO: 822273 - DNA, 15 bp, Homo sapiens
actgctaaacattcc

SEQ ID NO: 822274 - DNA, 15 bp, Homo sapiens
aactgctaaacattc

SEQ ID NO: 822275 - DNA, 15 bp, Homo sapiens
aaactgctaaacatt

SEQ ID NO: 822276 - DNA, 15 bp, Homo sapiens
caaactgctaaacat

SEQ ID NO: 822277 - DNA, 15 bp, Homo sapiens
acaaactgctaaaca

SEQ ID NO: 822278 - DNA, 15 bp, Homo sapiens
aacaaactgctaaac

SEQ ID NO: 822279 - DNA, 15 bp, Homo sapiens
aaacaaactgctaaa

SEQ ID NO: 822280 - DNA, 15 bp, Homo sapiens
aaaacaaactgctaa

SEQ ID NO: 822281 - DNA, 15 bp, Homo sapiens
aaaaacaaactgcta

SEQ ID NO: 822282 - DNA, 15 bp, Homo sapiens
aaaaaacaaactgct

SEQ ID NO: 822283 - DNA, 15 bp, Homo sapiens
gaaaaaacaaactgc

SEQ ID NO: 822284 - DNA, 15 bp, Homo sapiens
ggaaaaaacaaactg

SEQ ID NO: 822285 - DNA, 15 bp, Homo sapiens
gggaaaaaacaaact

SEQ ID NO: 822286 - DNA, 15 bp, Homo sapiens
agggaaaaaacaaac

SEQ ID NO: 822287 - DNA, 15 bp, Homo sapiens
cagggaaaaaacaaa

SEQ ID NO: 822288 - DNA, 15 bp, Homo sapiens
ccagggaaaaaacaa

SEQ ID NO: 822289 - DNA, 15 bp, Homo sapiens
cccagggaaaaaaca

SEQ ID NO: 822290 - DNA, 15 bp, Homo sapiens
tcccagggaaaaaac

SEQ ID NO: 822291 - DNA, 15 bp, Homo sapiens
ttcccagggaaaaaa

SEQ ID NO: 822292 - DNA, 15 bp, Homo sapiens
tttcccagggaaaaa

SEQ ID NO: 822293 - DNA, 15 bp, Homo sapiens
ttttcccagggaaaa

SEQ ID NO: 822294 - DNA, 15 bp, Homo sapiens
tttttcccagggaaa

SEQ ID NO: 822295 - DNA, 15 bp, Homo sapiens
gtttttcccagggaa

SEQ ID NO: 822296 - DNA, 15 bp, Homo sapiens
ggtttttcccaggga

SEQ ID NO: 822297 - DNA, 15 bp, Homo sapiens
tggtttttcccaggg

SEQ ID NO: 822298 - DNA, 15 bp, Homo sapiens
atggtttttcccagg

SEQ ID NO: 822299 - DNA, 15 bp, Homo sapiens
tatggtttttcccag

SEQ ID NO: 822300 - DNA, 15 bp, Homo sapiens
gtatggtttttccca

SEQ ID NO: 822301 - DNA, 15 bp, Homo sapiens
agtatggtttttccc

SEQ ID NO: 822302 - DNA, 15 bp, Homo sapiens
tagtatggtttttcc

SEQ ID NO: 822303 - DNA, 15 bp, Homo sapiens
atagtatggtttttc

SEQ ID NO: 822304 - DNA, 15 bp, Homo sapiens
aatagtatggttttt

SEQ ID NO: 822305 - DNA, 15 bp, Homo sapiens
taatagtatggtttt

SEQ ID NO: 822306 - DNA, 15 bp, Homo sapiens
ataatagtatggttt

SEQ ID NO: 822307 - DNA, 15 bp, Homo sapiens
aataatagtatggtt

SEQ ID NO: 822308 - DNA, 15 bp, Homo sapiens
gaataatagtatggt

SEQ ID NO: 822309 - DNA, 15 bp, Homo sapiens
ggaataatagtatgg

SEQ ID NO: 822310 - DNA, 15 bp, Homo sapiens
gggaataatagtatg

SEQ ID NO: 822311 - DNA, 15 bp, Homo sapiens
agggaataatagtat

SEQ ID NO: 822312 - DNA, 15 bp, Homo sapiens
gagggaataatagta

SEQ ID NO: 822313 - DNA, 15 bp, Homo sapiens
ggagggaataatagt

SEQ ID NO: 822314 - DNA, 15 bp, Homo sapiens
gggagggaataatag

SEQ ID NO: 822315 - DNA, 15 bp, Homo sapiens
tgggagggaataata

SEQ ID NO: 822316 - DNA, 15 bp, Homo sapiens
ttgggagggaataat

SEQ ID NO: 822317 - DNA, 15 bp, Homo sapiens
attgggagggaataa

SEQ ID NO: 822318 - DNA, 15 bp, Homo sapiens
gattgggagggaata

SEQ ID NO: 822319 - DNA, 15 bp, Homo sapiens
ggattgggagggaat

SEQ ID NO: 822320 - DNA, 15 bp, Homo sapiens
gggattgggagggaa

SEQ ID NO: 822321 - DNA, 15 bp, Homo sapiens
agggattgggaggga

SEQ ID NO: 822322 - DNA, 15 bp, Homo sapiens
aagggattgggaggg

SEQ ID NO: 822323 - DNA, 15 bp, Homo sapiens
aaagggattgggagg

SEQ ID NO: 822324 - DNA, 15 bp, Homo sapiens
caaagggattgggag

SEQ ID NO: 822325 - DNA, 15 bp, Homo sapiens
tcaaagggattggga

SEQ ID NO: 822326 - DNA, 15 bp, Homo sapiens
gtcaaagggattggg

SEQ ID NO: 822327 - DNA, 15 bp, Homo sapiens
tgtcaaagggattgg

SEQ ID NO: 822328 - DNA, 15 bp, Homo sapiens
ttgtcaaagggattg

SEQ ID NO: 822329 - DNA, 15 bp, Homo sapiens
tttgtcaaagggatt

SEQ ID NO: 822330 - DNA, 15 bp, Homo sapiens
ctttgtcaaagggat

SEQ ID NO: 822331 - DNA, 15 bp, Homo sapiens
actttgtcaaaggga

SEQ ID NO: 822332 - DNA, 15 bp, Homo sapiens
cactttgtcaaaggg

SEQ ID NO: 822333 - DNA, 15 bp, Homo sapiens
tcactttgtcaaagg

SEQ ID NO: 822334 - DNA, 15 bp, Homo sapiens
gtcactttgtcaaag

SEQ ID NO: 822335 - DNA, 15 bp, Homo sapiens
tgtcactttgtcaaa

SEQ ID NO: 822336 - DNA, 15 bp, Homo sapiens
ctgtcactttgtcaa

SEQ ID NO: 822337 - DNA, 15 bp, Homo sapiens
actgtcactttgtca

SEQ ID NO: 822338 - DNA, 15 bp, Homo sapiens
gactgtcactttgtc

SEQ ID NO: 822339 - DNA, 15 bp, Homo sapiens
tgactgtcactttgt

SEQ ID NO: 822340 - DNA, 15 bp, Homo sapiens
gtgactgtcactttg

SEQ ID NO: 822341 - DNA, 15 bp, Homo sapiens
tgtgactgtcacttt

SEQ ID NO: 822342 - DNA, 15 bp, Homo sapiens
atgtgactgtcactt

SEQ ID NO: 822343 - DNA, 15 bp, Homo sapiens
aatgtgactgtcact

SEQ ID NO: 822344 - DNA, 15 bp, Homo sapiens
taatgtgactgtcac

SEQ ID NO: 822345 - DNA, 15 bp, Homo sapiens
ctaatgtgactgtca

SEQ ID NO: 822346 - DNA, 15 bp, Homo sapiens
actaatgtgactgtc

SEQ ID NO: 822347 - DNA, 15 bp, Homo sapiens
aactaatgtgactgt

SEQ ID NO: 822348 - DNA, 15 bp, Homo sapiens
gaactaatgtgactg

SEQ ID NO: 822349 - DNA, 15 bp, Homo sapiens
tgaactaatgtgact

SEQ ID NO: 822350 - DNA, 15 bp, Homo sapiens
ctgaactaatgtgac

SEQ ID NO: 822351 - DNA, 15 bp, Homo sapiens
tctgaactaatgtga

SEQ ID NO: 822352 - DNA, 15 bp, Homo sapiens
ctctgaactaatgtg

SEQ ID NO: 822353 - DNA, 15 bp, Homo sapiens
tctctgaactaatgt

SEQ ID NO: 822354 - DNA, 15 bp, Homo sapiens
atctctgaactaatg

SEQ ID NO: 822355 - DNA, 15 bp, Homo sapiens
tatctctgaactaat

SEQ ID NO: 822356 - DNA, 15 bp, Homo sapiens
atatctctgaactaa

SEQ ID NO: 822357 - DNA, 15 bp, Homo sapiens
aatatctctgaacta

SEQ ID NO: 822358 - DNA, 15 bp, Homo sapiens
caatatctctgaact

SEQ ID NO: 822359 - DNA, 15 bp, Homo sapiens
tcaatatctctgaac

SEQ ID NO: 822360 - DNA, 15 bp, Homo sapiens
atcaatatctctgaa

SEQ ID NO: 822361 - DNA, 15 bp, Homo sapiens
catcaatatctctga

SEQ ID NO: 822362 - DNA, 15 bp, Homo sapiens
acatcaatatctctg

SEQ ID NO: 822363 - DNA, 15 bp, Homo sapiens
aacatcaatatctct

SEQ ID NO: 822364 - DNA, 15 bp, Homo sapiens
aaacatcaatatctc

SEQ ID NO: 822365 - DNA, 15 bp, Homo sapiens
aaaacatcaatatct

SEQ ID NO: 822366 - DNA, 15 bp, Homo sapiens
taaaacatcaatatc

SEQ ID NO: 822367 - DNA, 15 bp, Homo sapiens
ataaaacatcaatat

SEQ ID NO: 822368 - DNA, 15 bp, Homo sapiens
tataaaacatcaata

SEQ ID NO: 822369 - DNA, 15 bp, Homo sapiens
gtataaaacatcaat

SEQ ID NO: 822370 - DNA, 15 bp, Homo sapiens
tgtataaaacatcaa

SEQ ID NO: 822371 - DNA, 15 bp, Homo sapiens
ctgtataaaacatca

SEQ ID NO: 822372 - DNA, 15 bp, Homo sapiens
cctgtataaaacatc

SEQ ID NO: 822373 - DNA, 15 bp, Homo sapiens
acctgtataaaacat

SEQ ID NO: 822374 - DNA, 15 bp, Homo sapiens
cacctgtataaaaca

SEQ ID NO: 822375 - DNA, 15 bp, Homo sapiens
acacctgtataaaac

SEQ ID NO: 822376 - DNA, 15 bp, Homo sapiens
tacacctgtataaaa

SEQ ID NO: 822377 - DNA, 15 bp, Homo sapiens
ctacacctgtataaa

SEQ ID NO: 822378 - DNA, 15 bp, Homo sapiens
gctacacctgtataa

SEQ ID NO: 822379 - DNA, 15 bp, Homo sapiens
ggctacacctgtata

SEQ ID NO: 822380 - DNA, 15 bp, Homo sapiens
aggctacacctgtat

SEQ ID NO: 822381 - DNA, 15 bp, Homo sapiens
caggctacacctgta

SEQ ID NO: 822382 - DNA, 15 bp, Homo sapiens
acaggctacacctgt

SEQ ID NO: 822383 - DNA, 15 bp, Homo sapiens
tacaggctacacctg

SEQ ID NO: 822384 - DNA, 15 bp, Homo sapiens
ttacaggctacacct

SEQ ID NO: 822385 - DNA, 15 bp, Homo sapiens
cttacaggctacacc

SEQ ID NO: 822386 - DNA, 15 bp, Homo sapiens
tcttacaggctacac

SEQ ID NO: 822387 - DNA, 15 bp, Homo sapiens
ctcttacaggctaca

SEQ ID NO: 822388 - DNA, 15 bp, Homo sapiens
tctcttacaggctac

SEQ ID NO: 822389 - DNA, 15 bp, Homo sapiens
atctcttacaggcta

SEQ ID NO: 822390 - DNA, 15 bp, Homo sapiens
catctcttacaggct

SEQ ID NO: 822391 - DNA, 15 bp, Homo sapiens
tcatctcttacaggc

SEQ ID NO: 822392 - DNA, 15 bp, Homo sapiens
ttcatctcttacagg

SEQ ID NO: 822393 - DNA, 15 bp, Homo sapiens
cttcatctcttacag

SEQ ID NO: 822394 - DNA, 15 bp, Homo sapiens
gcttcatctcttaca

SEQ ID NO: 822395 - DNA, 15 bp, Homo sapiens
ggcttcatctcttac

SEQ ID NO: 822396 - DNA, 15 bp, Homo sapiens
aggcttcatctctta

SEQ ID NO: 822397 - DNA, 15 bp, Homo sapiens
caggcttcatctctt

SEQ ID NO: 822398 - DNA, 15 bp, Homo sapiens
ccaggcttcatctct

SEQ ID NO: 822399 - DNA, 15 bp, Homo sapiens
accaggcttcatctc

SEQ ID NO: 822400 - DNA, 15 bp, Homo sapiens
taccaggcttcatct

SEQ ID NO: 822401 - DNA, 15 bp, Homo sapiens
ataccaggcttcatc

SEQ ID NO: 822402 - DNA, 15 bp, Homo sapiens
aataccaggcttcat

SEQ ID NO: 822403 - DNA, 15 bp, Homo sapiens
aaataccaggcttca

SEQ ID NO: 822404 - DNA, 15 bp, Homo sapiens
taaataccaggcttc

SEQ ID NO: 822405 - DNA, 15 bp, Homo sapiens
ataaataccaggctt

SEQ ID NO: 822406 - DNA, 15 bp, Homo sapiens
tataaataccaggct

SEQ ID NO: 822407 - DNA, 15 bp, Homo sapiens
ctataaataccaggc

SEQ ID NO: 822408 - DNA, 15 bp, Homo sapiens
tctataaataccagg

SEQ ID NO: 822409 - DNA, 15 bp, Homo sapiens
ttctataaataccag

SEQ ID NO: 822410 - DNA, 15 bp, Homo sapiens
tttctataaatacca

SEQ ID NO: 822411 - DNA, 15 bp, Homo sapiens
atttctataaatacc

SEQ ID NO: 822412 - DNA, 15 bp, Homo sapiens
aatttctataaatac

SEQ ID NO: 822413 - DNA, 15 bp, Homo sapiens
caatttctataaata

SEQ ID NO: 822414 - DNA, 15 bp, Homo sapiens
tcaatttctataaat

SEQ ID NO: 822415 - DNA, 15 bp, Homo sapiens
gtcaatttctataaa

SEQ ID NO: 822416 - DNA, 15 bp, Homo sapiens
agtcaatttctataa

SEQ ID NO: 822417 - DNA, 15 bp, Homo sapiens
aagtcaatttctata

SEQ ID NO: 822418 - DNA, 15 bp, Homo sapiens
taagtcaatttctat

SEQ ID NO: 822419 - DNA, 15 bp, Homo sapiens
ataagtcaatttcta

SEQ ID NO: 822420 - DNA, 15 bp, Homo sapiens
aataagtcaatttct

SEQ ID NO: 822421 - DNA, 15 bp, Homo sapiens
aaataagtcaatttc

SEQ ID NO: 822422 - DNA, 15 bp, Homo sapiens
aaaataagtcaattt

SEQ ID NO: 822423 - DNA, 15 bp, Homo sapiens
taaaataagtcaatt

SEQ ID NO: 822424 - DNA, 15 bp, Homo sapiens
ataaaataagtcaat

SEQ ID NO: 822425 - DNA, 15 bp, Homo sapiens
aataaaataagtcaa

SEQ ID NO: 822426 - DNA, 15 bp, Homo sapiens
gaataaaataagtca

SEQ ID NO: 822427 - DNA, 15 bp, Homo sapiens
agaataaaataagtc

SEQ ID NO: 822428 - DNA, 15 bp, Homo sapiens
gagaataaaataagt

SEQ ID NO: 822429 - DNA, 15 bp, Homo sapiens
tgagaataaaataag

SEQ ID NO: 822430 - DNA, 15 bp, Homo sapiens
atgagaataaaataa

SEQ ID NO: 822431 - DNA, 15 bp, Homo sapiens
tatgagaataaaata

SEQ ID NO: 822432 - DNA, 15 bp, Homo sapiens
atatgagaataaaat

SEQ ID NO: 822433 - DNA, 15 bp, Homo sapiens
aatatgagaataaaa

SEQ ID NO: 822434 - DNA, 15 bp, Homo sapiens
aaatatgagaataaa

SEQ ID NO: 822435 - DNA, 15 bp, Homo sapiens
taaatatgagaataa

SEQ ID NO: 822436 - DNA, 15 bp, Homo sapiens
gtaaatatgagaata

SEQ ID NO: 822437 - DNA, 15 bp, Homo sapiens
tgtaaatatgagaat

SEQ ID NO: 822438 - DNA, 15 bp, Homo sapiens
atgtaaatatgagaa

SEQ ID NO: 822439 - DNA, 15 bp, Homo sapiens
catgtaaatatgaga

SEQ ID NO: 822440 - DNA, 15 bp, Homo sapiens
acatgtaaatatgag

SEQ ID NO: 822441 - DNA, 15 bp, Homo sapiens
cacatgtaaatatga

SEQ ID NO: 822442 - DNA, 15 bp, Homo sapiens
gcacatgtaaatatg

SEQ ID NO: 822443 - DNA, 15 bp, Homo sapiens
tgcacatgtaaatat

SEQ ID NO: 822444 - DNA, 15 bp, Homo sapiens
atgcacatgtaaata

SEQ ID NO: 822445 - DNA, 15 bp, Homo sapiens
tatgcacatgtaaat

SEQ ID NO: 822446 - DNA, 15 bp, Homo sapiens
ttatgcacatgtaaa

SEQ ID NO: 822447 - DNA, 15 bp, Homo sapiens
attatgcacatgtaa

SEQ ID NO: 822448 - DNA, 15 bp, Homo sapiens
aattatgcacatgta

SEQ ID NO: 822449 - DNA, 15 bp, Homo sapiens
aaattatgcacatgt

SEQ ID NO: 822450 - DNA, 15 bp, Homo sapiens
aaaattatgcacatg

SEQ ID NO: 822451 - DNA, 15 bp, Homo sapiens
gaaaattatgcacat

SEQ ID NO: 822452 - DNA, 15 bp, Homo sapiens
ggaaaattatgcaca

SEQ ID NO: 822453 - DNA, 15 bp, Homo sapiens
tggaaaattatgcac

SEQ ID NO: 822454 - DNA, 15 bp, Homo sapiens
atggaaaattatgca

SEQ ID NO: 822455 - DNA, 15 bp, Homo sapiens
tatggaaaattatgc

SEQ ID NO: 822456 - DNA, 15 bp, Homo sapiens
atatggaaaattatg

SEQ ID NO: 822457 - DNA, 15 bp, Homo sapiens
catatggaaaattat

SEQ ID NO: 822458 - DNA, 15 bp, Homo sapiens
gcatatggaaaatta

SEQ ID NO: 822459 - DNA, 15 bp, Homo sapiens
ggcatatggaaaatt

SEQ ID NO: 822460 - DNA, 15 bp, Homo sapiens
tggcatatggaaaat

SEQ ID NO: 822461 - DNA, 15 bp, Homo sapiens
ctggcatatggaaaa

SEQ ID NO: 822462 - DNA, 15 bp, Homo sapiens
tctggcatatggaaa

SEQ ID NO: 822463 - DNA, 15 bp, Homo sapiens
ttctggcatatggaa

SEQ ID NO: 822464 - DNA, 15 bp, Homo sapiens
tttctggcatatgga

SEQ ID NO: 822465 - DNA, 15 bp, Homo sapiens
ttttctggcatatgg

SEQ ID NO: 822466 - DNA, 15 bp, Homo sapiens
cttttctggcatatg

SEQ ID NO: 822467 - DNA, 15 bp, Homo sapiens
acttttctggcatat

SEQ ID NO: 822468 - DNA, 15 bp, Homo sapiens
aacttttctggcata

SEQ ID NO: 822469 - DNA, 15 bp, Homo sapiens
caacttttctggcat

SEQ ID NO: 822470 - DNA, 15 bp, Homo sapiens
tcaacttttctggca

SEQ ID NO: 822471 - DNA, 15 bp, Homo sapiens
ttcaacttttctggc

SEQ ID NO: 822472 - DNA, 15 bp, Homo sapiens
attcaacttttctgg

SEQ ID NO: 822473 - DNA, 15 bp, Homo sapiens
tattcaacttttctg

SEQ ID NO: 822474 - DNA, 15 bp, Homo sapiens
ctattcaacttttct

SEQ ID NO: 822475 - DNA, 15 bp, Homo sapiens
actattcaacttttc

SEQ ID NO: 822476 - DNA, 15 bp, Homo sapiens
tactattcaactttt

SEQ ID NO: 822477 - DNA, 15 bp, Homo sapiens
atactattcaacttt

SEQ ID NO: 822478 - DNA, 15 bp, Homo sapiens
gatactattcaactt

SEQ ID NO: 822479 - DNA, 15 bp, Homo sapiens
tgatactattcaact

SEQ ID NO: 822480 - DNA, 15 bp, Homo sapiens
ctgatactattcaac

SEQ ID NO: 822481 - DNA, 15 bp, Homo sapiens
tctgatactattcaa

SEQ ID NO: 822482 - DNA, 15 bp, Homo sapiens
atctgatactattca

SEQ ID NO: 822483 - DNA, 15 bp, Homo sapiens
aatctgatactattc

SEQ ID NO: 822484 - DNA, 15 bp, Homo sapiens
gaatctgatactatt

SEQ ID NO: 822485 - DNA, 15 bp, Homo sapiens
ggaatctgatactat

SEQ ID NO: 822486 - DNA, 15 bp, Homo sapiens
tggaatctgatacta

SEQ ID NO: 822487 - DNA, 15 bp, Homo sapiens
ttggaatctgatact

SEQ ID NO: 822488 - DNA, 15 bp, Homo sapiens
tttggaatctgatac

SEQ ID NO: 822489 - DNA, 15 bp, Homo sapiens
atttggaatctgata

SEQ ID NO: 822490 - DNA, 15 bp, Homo sapiens
gatttggaatctgat

SEQ ID NO: 822491 - DNA, 15 bp, Homo sapiens
agatttggaatctga

SEQ ID NO: 822492 - DNA, 15 bp, Homo sapiens
cagatttggaatctg

SEQ ID NO: 822493 - DNA, 15 bp, Homo sapiens
acagatttggaatct

SEQ ID NO: 822494 - DNA, 15 bp, Homo sapiens
tacagatttggaatc

SEQ ID NO: 822495 - DNA, 15 bp, Homo sapiens
atacagatttggaat

SEQ ID NO: 822496 - DNA, 15 bp, Homo sapiens
catacagatttggaa

SEQ ID NO: 822497 - DNA, 15 bp, Homo sapiens
ccatacagatttgga

SEQ ID NO: 822498 - DNA, 15 bp, Homo sapiens
tccatacagatttgg

SEQ ID NO: 822499 - DNA, 15 bp, Homo sapiens
ctccatacagatttg

SEQ ID NO: 822500 - DNA, 15 bp, Homo sapiens
tctccatacagattt

SEQ ID NO: 822501 - DNA, 15 bp, Homo sapiens
gtctccatacagatt

SEQ ID NO: 822502 - DNA, 15 bp, Homo sapiens
ggtctccatacagat

SEQ ID NO: 822503 - DNA, 15 bp, Homo sapiens
tggtctccatacaga

SEQ ID NO: 822504 - DNA, 15 bp, Homo sapiens
ttggtctccatacag

SEQ ID NO: 822505 - DNA, 15 bp, Homo sapiens
tttggtctccataca

SEQ ID NO: 822506 - DNA, 15 bp, Homo sapiens
atttggtctccatac

SEQ ID NO: 822507 - DNA, 15 bp, Homo sapiens
gatttggtctccata

SEQ ID NO: 822508 - DNA, 15 bp, Homo sapiens
tgatttggtctccat

SEQ ID NO: 822509 - DNA, 15 bp, Homo sapiens
ttgatttggtctcca

SEQ ID NO: 822510 - DNA, 15 bp, Homo sapiens
cttgatttggtctcc

SEQ ID NO: 822511 - DNA, 15 bp, Homo sapiens
acttgatttggtctc

SEQ ID NO: 822512 - DNA, 15 bp, Homo sapiens
cacttgatttggtct

SEQ ID NO: 822513 - DNA, 15 bp, Homo sapiens
tcacttgatttggtc

SEQ ID NO: 822514 - DNA, 15 bp, Homo sapiens
ttcacttgatttggt

SEQ ID NO: 822515 - DNA, 15 bp, Homo sapiens
attcacttgatttgg

SEQ ID NO: 822516 - DNA, 15 bp, Homo sapiens
tattcacttgatttg

SEQ ID NO: 822517 - DNA, 15 bp, Homo sapiens
atattcacttgattt

SEQ ID NO: 822518 - DNA, 15 bp, Homo sapiens
gatattcacttgatt

SEQ ID NO: 822519 - DNA, 15 bp, Homo sapiens
agatattcacttgat

SEQ ID NO: 822520 - DNA, 15 bp, Homo sapiens
cagatattcacttga

SEQ ID NO: 822521 - DNA, 15 bp, Homo sapiens
acagatattcacttg

SEQ ID NO: 822522 - DNA, 15 bp, Homo sapiens
aacagatattcactt

SEQ ID NO: 822523 - DNA, 15 bp, Homo sapiens
gaacagatattcact

SEQ ID NO: 822524 - DNA, 15 bp, Homo sapiens
ggaacagatattcac

SEQ ID NO: 822525 - DNA, 15 bp, Homo sapiens
aggaacagatattca

SEQ ID NO: 822526 - DNA, 15 bp, Homo sapiens
gaggaacagatattc

SEQ ID NO: 822527 - DNA, 15 bp, Homo sapiens
ggaggaacagatatt

SEQ ID NO: 822528 - DNA, 15 bp, Homo sapiens
aggaggaacagatat

SEQ ID NO: 822529 - DNA, 15 bp, Homo sapiens
gaggaggaacagata

SEQ ID NO: 822530 - DNA, 15 bp, Homo sapiens
agaggaggaacagat

SEQ ID NO: 822531 - DNA, 15 bp, Homo sapiens
gagaggaggaacaga

SEQ ID NO: 822532 - DNA, 15 bp, Homo sapiens
agagaggaggaacag

SEQ ID NO: 822533 - DNA, 15 bp, Homo sapiens
aagagaggaggaaca

SEQ ID NO: 822534 - DNA, 15 bp, Homo sapiens
aaagagaggaggaac

SEQ ID NO: 822535 - DNA, 15 bp, Homo sapiens
taaagagaggaggaa

SEQ ID NO: 822536 - DNA, 15 bp, Homo sapiens
ataaagagaggagga

SEQ ID NO: 822537 - DNA, 15 bp, Homo sapiens
aataaagagaggagg

SEQ ID NO: 822538 - DNA, 15 bp, Homo sapiens
aaataaagagaggag

SEQ ID NO: 822539 - DNA, 15 bp, Homo sapiens
aaaataaagagagga

SEQ ID NO: 822540 - DNA, 15 bp, Homo sapiens
taaaataaagagagg

SEQ ID NO: 822541 - DNA, 15 bp, Homo sapiens
ctaaaataaagagag

SEQ ID NO: 822542 - DNA, 15 bp, Homo sapiens
gctaaaataaagaga

SEQ ID NO: 822543 - DNA, 15 bp, Homo sapiens
agctaaaataaagag

SEQ ID NO: 822544 - DNA, 15 bp, Homo sapiens
cagctaaaataaaga

SEQ ID NO: 822545 - DNA, 15 bp, Homo sapiens
ccagctaaaataaag

SEQ ID NO: 822546 - DNA, 15 bp, Homo sapiens
tccagctaaaataaa

SEQ ID NO: 822547 - DNA, 15 bp, Homo sapiens
gtccagctaaaataa

SEQ ID NO: 822548 - DNA, 15 bp, Homo sapiens
ggtccagctaaaata

SEQ ID NO: 822549 - DNA, 15 bp, Homo sapiens
tggtccagctaaaat

SEQ ID NO: 822550 - DNA, 15 bp, Homo sapiens
ctggtccagctaaaa

SEQ ID NO: 822551 - DNA, 15 bp, Homo sapiens
tctggtccagctaaa

SEQ ID NO: 822552 - DNA, 15 bp, Homo sapiens
gtctggtccagctaa

SEQ ID NO: 822553 - DNA, 15 bp, Homo sapiens
ggtctggtccagcta

SEQ ID NO: 822554 - DNA, 15 bp, Homo sapiens
tggtctggtccagct

SEQ ID NO: 822555 - DNA, 15 bp, Homo sapiens
ttggtctggtccagc

SEQ ID NO: 822556 - DNA, 15 bp, Homo sapiens
attggtctggtccag

SEQ ID NO: 822557 - DNA, 15 bp, Homo sapiens
aattggtctggtcca

SEQ ID NO: 822558 - DNA, 15 bp, Homo sapiens
aaattggtctggtcc

SEQ ID NO: 822559 - DNA, 15 bp, Homo sapiens
aaaattggtctggtc

SEQ ID NO: 822560 - DNA, 15 bp, Homo sapiens
caaaattggtctggt

SEQ ID NO: 822561 - DNA, 15 bp, Homo sapiens
tcaaaattggtctgg

SEQ ID NO: 822562 - DNA, 15 bp, Homo sapiens
ctcaaaattggtctg

SEQ ID NO: 822563 - DNA, 15 bp, Homo sapiens
cctcaaaattggtct

SEQ ID NO: 822564 - DNA, 15 bp, Homo sapiens
tcctcaaaattggtc

SEQ ID NO: 822565 - DNA, 15 bp, Homo sapiens
ttcctcaaaattggt

SEQ ID NO: 822566 - DNA, 15 bp, Homo sapiens
tttcctcaaaattgg

SEQ ID NO: 822567 - DNA, 15 bp, Homo sapiens
ctttcctcaaaattg

SEQ ID NO: 822568 - DNA, 15 bp, Homo sapiens
cctttcctcaaaatt

SEQ ID NO: 822569 - DNA, 15 bp, Homo sapiens
tcctttcctcaaaat

SEQ ID NO: 822570 - DNA, 15 bp, Homo sapiens
atcctttcctcaaaa

SEQ ID NO: 822571 - DNA, 15 bp, Homo sapiens
tatcctttcctcaaa

SEQ ID NO: 822572 - DNA, 15 bp, Homo sapiens
gtatcctttcctcaa

SEQ ID NO: 822573 - DNA, 15 bp, Homo sapiens
tgtatcctttcctca

SEQ ID NO: 822574 - DNA, 15 bp, Homo sapiens
ctgtatcctttcctc

SEQ ID NO: 822575 - DNA, 15 bp, Homo sapiens
tctgtatcctttcct

SEQ ID NO: 822576 - DNA, 15 bp, Homo sapiens
gtctgtatcctttcc

SEQ ID NO: 822577 - DNA, 15 bp, Homo sapiens
tgtctgtatcctttc

SEQ ID NO: 822578 - DNA, 15 bp, Homo sapiens
ctgtctgtatccttt

SEQ ID NO: 822579 - DNA, 15 bp, Homo sapiens
gctgtctgtatcctt

SEQ ID NO: 822580 - DNA, 15 bp, Homo sapiens
cgctgtctgtatcct

SEQ ID NO: 822581 - DNA, 15 bp, Homo sapiens
gcgctgtctgtatcc

SEQ ID NO: 822582 - DNA, 15 bp, Homo sapiens
ggcgctgtctgtatc

SEQ ID NO: 822583 - DNA, 15 bp, Homo sapiens
aggcgctgtctgtat

SEQ ID NO: 822584 - DNA, 15 bp, Homo sapiens
caggcgctgtctgta

SEQ ID NO: 822585 - DNA, 15 bp, Homo sapiens
ccaggcgctgtctgt

SEQ ID NO: 822586 - DNA, 15 bp, Homo sapiens
tccaggcgctgtctg

SEQ ID NO: 822587 - DNA, 15 bp, Homo sapiens
ttccaggcgctgtct

SEQ ID NO: 822588 - DNA, 15 bp, Homo sapiens
attccaggcgctgtc

SEQ ID NO: 822589 - DNA, 15 bp, Homo sapiens
aattccaggcgctgt

SEQ ID NO: 822590 - DNA, 15 bp, Homo sapiens
caattccaggcgctg

SEQ ID NO: 822591 - DNA, 15 bp, Homo sapiens
acaattccaggcgct

SEQ ID NO: 822592 - DNA, 15 bp, Homo sapiens
gacaattccaggcgc

SEQ ID NO: 822593 - DNA, 15 bp, Homo sapiens
tgacaattccaggcg

SEQ ID NO: 822594 - DNA, 15 bp, Homo sapiens
ctgacaattccaggc

SEQ ID NO: 822595 - DNA, 15 bp, Homo sapiens
tctgacaattccagg

SEQ ID NO: 822596 - DNA, 15 bp, Homo sapiens
gtctgacaattccag

SEQ ID NO: 822597 - DNA, 15 bp, Homo sapiens
tgtctgacaattcca

SEQ ID NO: 822598 - DNA, 15 bp, Homo sapiens
atgtctgacaattcc

SEQ ID NO: 822599 - DNA, 15 bp, Homo sapiens
tatgtctgacaattc

SEQ ID NO: 822600 - DNA, 15 bp, Homo sapiens
atatgtctgacaatt

SEQ ID NO: 822601 - DNA, 15 bp, Homo sapiens
tatatgtctgacaat

SEQ ID NO: 822602 - DNA, 15 bp, Homo sapiens
gtatatgtctgacaa

SEQ ID NO: 822603 - DNA, 15 bp, Homo sapiens
ggtatatgtctgaca

SEQ ID NO: 822604 - DNA, 15 bp, Homo sapiens
tggtatatgtctgac

SEQ ID NO: 822605 - DNA, 15 bp, Homo sapiens
ttggtatatgtctga

SEQ ID NO: 822606 - DNA, 15 bp, Homo sapiens
tttggtatatgtctg

SEQ ID NO: 822607 - DNA, 15 bp, Homo sapiens
atttggtatatgtct

SEQ ID NO: 822608 - DNA, 15 bp, Homo sapiens
gatttggtatatgtc

SEQ ID NO: 822609 - DNA, 15 bp, Homo sapiens
ggatttggtatatgt

SEQ ID NO: 822610 - DNA, 15 bp, Homo sapiens
gggatttggtatatg

SEQ ID NO: 822611 - DNA, 15 bp, Homo sapiens
agggatttggtatat

SEQ ID NO: 822612 - DNA, 15 bp, Homo sapiens
aagggatttggtata

SEQ ID NO: 822613 - DNA, 15 bp, Homo sapiens
gaagggatttggtat

SEQ ID NO: 822614 - DNA, 15 bp, Homo sapiens
agaagggatttggta

SEQ ID NO: 822615 - DNA, 15 bp, Homo sapiens
cagaagggatttggt

SEQ ID NO: 822616 - DNA, 15 bp, Homo sapiens
acagaagggatttgg

SEQ ID NO: 822617 - DNA, 15 bp, Homo sapiens
aacagaagggatttg

SEQ ID NO: 822618 - DNA, 15 bp, Homo sapiens
caacagaagggattt

SEQ ID NO: 822619 - DNA, 15 bp, Homo sapiens
tcaacagaagggatt

SEQ ID NO: 822620 - DNA, 15 bp, Homo sapiens
atcaacagaagggat

SEQ ID NO: 822621 - DNA, 15 bp, Homo sapiens
aatcaacagaaggga

SEQ ID NO: 822622 - DNA, 15 bp, Homo sapiens
gaatcaacagaaggg

SEQ ID NO: 822623 - DNA, 15 bp, Homo sapiens
agaatcaacagaagg

SEQ ID NO: 822624 - DNA, 15 bp, Homo sapiens
cagaatcaacagaag

SEQ ID NO: 822625 - DNA, 15 bp, Homo sapiens
gcagaatcaacagaa

SEQ ID NO: 822626 - DNA, 15 bp, Homo sapiens
agcagaatcaacaga

SEQ ID NO: 822627 - DNA, 15 bp, Homo sapiens
cagcagaatcaacag

SEQ ID NO: 822628 - DNA, 15 bp, Homo sapiens
tcagcagaatcaaca

SEQ ID NO: 822629 - DNA, 15 bp, Homo sapiens
gtcagcagaatcaac

SEQ ID NO: 822630 - DNA, 15 bp, Homo sapiens
tgtcagcagaatcaa

SEQ ID NO: 822631 - DNA, 15 bp, Homo sapiens
ttgtcagcagaatca

SEQ ID NO: 822632 - DNA, 15 bp, Homo sapiens
attgtcagcagaatc

SEQ ID NO: 822633 - DNA, 15 bp, Homo sapiens
gattgtcagcagaat

SEQ ID NO: 822634 - DNA, 15 bp, Homo sapiens
agattgtcagcagaa

SEQ ID NO: 822635 - DNA, 15 bp, Homo sapiens
tagattgtcagcaga

SEQ ID NO: 822636 - DNA, 15 bp, Homo sapiens
atagattgtcagcag

SEQ ID NO: 822637 - DNA, 15 bp, Homo sapiens
gatagattgtcagca

SEQ ID NO: 822638 - DNA, 15 bp, Homo sapiens
agatagattgtcagc

SEQ ID NO: 822639 - DNA, 15 bp, Homo sapiens
cagatagattgtcag

SEQ ID NO: 822640 - DNA, 15 bp, Homo sapiens
tcagatagattgtca

SEQ ID NO: 822641 - DNA, 15 bp, Homo sapiens
ttcagatagattgtc

SEQ ID NO: 822642 - DNA, 15 bp, Homo sapiens
tttcagatagattgt

SEQ ID NO: 822643 - DNA, 15 bp, Homo sapiens
ttttcagatagattg

SEQ ID NO: 822644 - DNA, 15 bp, Homo sapiens
tttttcagatagatt

SEQ ID NO: 822645 - DNA, 15 bp, Homo sapiens
atttttcagatagat

SEQ ID NO: 822646 - DNA, 15 bp, Homo sapiens
aatttttcagataga

SEQ ID NO: 822647 - DNA, 15 bp, Homo sapiens
caatttttcagatag

SEQ ID NO: 822648 - DNA, 15 bp, Homo sapiens
ccaatttttcagata

SEQ ID NO: 822649 - DNA, 15 bp, Homo sapiens
tccaatttttcagat

SEQ ID NO: 822650 - DNA, 15 bp, Homo sapiens
ttccaatttttcaga

SEQ ID NO: 822651 - DNA, 15 bp, Homo sapiens
tttccaatttttcag

SEQ ID NO: 822652 - DNA, 15 bp, Homo sapiens
ctttccaatttttca

SEQ ID NO: 822653 - DNA, 15 bp, Homo sapiens
cctttccaatttttc

SEQ ID NO: 822654 - DNA, 15 bp, Homo sapiens
acctttccaattttt

SEQ ID NO: 822655 - DNA, 15 bp, Homo sapiens
tacctttccaatttt

SEQ ID NO: 822656 - DNA, 15 bp, Homo sapiens
atacctttccaattt

SEQ ID NO: 822657 - DNA, 15 bp, Homo sapiens
catacctttccaatt

SEQ ID NO: 822658 - DNA, 15 bp, Homo sapiens
acatacctttccaat

SEQ ID NO: 822659 - DNA, 15 bp, Homo sapiens
aacatacctttccaa

SEQ ID NO: 822660 - DNA, 15 bp, Homo sapiens
gaacatacctttcca

SEQ ID NO: 822661 - DNA, 15 bp, Homo sapiens
tgaacatacctttcc

SEQ ID NO: 822662 - DNA, 15 bp, Homo sapiens
atgaacatacctttc

SEQ ID NO: 822663 - DNA, 15 bp, Homo sapiens
catgaacataccttt

SEQ ID NO: 822664 - DNA, 15 bp, Homo sapiens
acatgaacatacctt

SEQ ID NO: 822665 - DNA, 15 bp, Homo sapiens
tacatgaacatacct

SEQ ID NO: 822666 - DNA, 15 bp, Homo sapiens
gtacatgaacatacc

SEQ ID NO: 822667 - DNA, 15 bp, Homo sapiens
tgtacatgaacatac

SEQ ID NO: 822668 - DNA, 15 bp, Homo sapiens
atgtacatgaacata

SEQ ID NO: 822669 - DNA, 15 bp, Homo sapiens
aatgtacatgaacat

SEQ ID NO: 822670 - DNA, 15 bp, Homo sapiens
caatgtacatgaaca

SEQ ID NO: 822671 - DNA, 15 bp, Homo sapiens
acaatgtacatgaac

SEQ ID NO: 822672 - DNA, 15 bp, Homo sapiens
aacaatgtacatgaa

SEQ ID NO: 822673 - DNA, 15 bp, Homo sapiens
aaacaatgtacatga

SEQ ID NO: 822674 - DNA, 15 bp, Homo sapiens
taaacaatgtacatg

SEQ ID NO: 822675 - DNA, 15 bp, Homo sapiens
ctaaacaatgtacat

SEQ ID NO: 822676 - DNA, 15 bp, Homo sapiens
actaaacaatgtaca

SEQ ID NO: 822677 - DNA, 15 bp, Homo sapiens
aactaaacaatgtac

SEQ ID NO: 822678 - DNA, 15 bp, Homo sapiens
caactaaacaatgta

SEQ ID NO: 822679 - DNA, 15 bp, Homo sapiens
tcaactaaacaatgt

SEQ ID NO: 822680 - DNA, 15 bp, Homo sapiens
ttcaactaaacaatg

SEQ ID NO: 822681 - DNA, 15 bp, Homo sapiens
cttcaactaaacaat

SEQ ID NO: 822682 - DNA, 15 bp, Homo sapiens
tcttcaactaaacaa

SEQ ID NO: 822683 - DNA, 15 bp, Homo sapiens
ctcttcaactaaaca

SEQ ID NO: 822684 - DNA, 15 bp, Homo sapiens
tctcttcaactaaac

SEQ ID NO: 822685 - DNA, 15 bp, Homo sapiens
ctctcttcaactaaa

SEQ ID NO: 822686 - DNA, 15 bp, Homo sapiens
tctctcttcaactaa

SEQ ID NO: 822687 - DNA, 15 bp, Homo sapiens
ttctctcttcaacta

SEQ ID NO: 822688 - DNA, 15 bp, Homo sapiens
tttctctcttcaact

SEQ ID NO: 822689 - DNA, 15 bp, Homo sapiens
atttctctcttcaac

SEQ ID NO: 822690 - DNA, 15 bp, Homo sapiens
aatttctctcttcaa

SEQ ID NO: 822691 - DNA, 15 bp, Homo sapiens
gaatttctctcttca

SEQ ID NO: 822692 - DNA, 15 bp, Homo sapiens
tgaatttctctcttc

SEQ ID NO: 822693 - DNA, 15 bp, Homo sapiens
atgaatttctctctt

SEQ ID NO: 822694 - DNA, 15 bp, Homo sapiens
tatgaatttctctct

SEQ ID NO: 822695 - DNA, 15 bp, Homo sapiens
atatgaatttctctc

SEQ ID NO: 822696 - DNA, 15 bp, Homo sapiens
aatatgaatttctct

SEQ ID NO: 822697 - DNA, 15 bp, Homo sapiens
taatatgaatttctc

SEQ ID NO: 822698 - DNA, 15 bp, Homo sapiens
ataatatgaatttct

SEQ ID NO: 822699 - DNA, 15 bp, Homo sapiens
aataatatgaatttc

SEQ ID NO: 822700 - DNA, 15 bp, Homo sapiens
taataatatgaattt

SEQ ID NO: 822701 - DNA, 15 bp, Homo sapiens
ttaataatatgaatt

SEQ ID NO: 822702 - DNA, 15 bp, Homo sapiens
attaataatatgaat

SEQ ID NO: 822703 - DNA, 15 bp, Homo sapiens
aattaataatatgaa

SEQ ID NO: 822704 - DNA, 15 bp, Homo sapiens
taattaataatatga

SEQ ID NO: 822705 - DNA, 15 bp, Homo sapiens
ataattaataatatg

SEQ ID NO: 822706 - DNA, 15 bp, Homo sapiens
aataattaataatat

SEQ ID NO: 822707 - DNA, 15 bp, Homo sapiens
aaataattaataata

SEQ ID NO: 822708 - DNA, 15 bp, Homo sapiens
taaataattaataat

SEQ ID NO: 822709 - DNA, 15 bp, Homo sapiens
ctaaataattaataa

SEQ ID NO: 822710 - DNA, 15 bp, Homo sapiens
tctaaataattaata

SEQ ID NO: 822711 - DNA, 15 bp, Homo sapiens
ctctaaataattaat

SEQ ID NO: 822712 - DNA, 15 bp, Homo sapiens
tctctaaataattaa

SEQ ID NO: 822713 - DNA, 15 bp, Homo sapiens
ttctctaaataatta

SEQ ID NO: 822714 - DNA, 15 bp, Homo sapiens
cttctctaaataatt

SEQ ID NO: 822715 - DNA, 15 bp, Homo sapiens
tcttctctaaataat

SEQ ID NO: 822716 - DNA, 15 bp, Homo sapiens
ctcttctctaaataa

SEQ ID NO: 822717 - DNA, 15 bp, Homo sapiens
tctcttctctaaata

SEQ ID NO: 822718 - DNA, 15 bp, Homo sapiens
ttctcttctctaaat

SEQ ID NO: 822719 - DNA, 15 bp, Homo sapiens
tttctcttctctaaa

SEQ ID NO: 822720 - DNA, 15 bp, Homo sapiens
ctttctcttctctaa

SEQ ID NO: 822721 - DNA, 15 bp, Homo sapiens
gctttctcttctcta

SEQ ID NO: 822722 - DNA, 15 bp, Homo sapiens
tgctttctcttctct

SEQ ID NO: 822723 - DNA, 15 bp, Homo sapiens
ttgctttctcttctc

SEQ ID NO: 822724 - DNA, 15 bp, Homo sapiens
tttgctttctcttct

SEQ ID NO: 822725 - DNA, 15 bp, Homo sapiens
gtttgctttctcttc

SEQ ID NO: 822726 - DNA, 15 bp, Homo sapiens
tgtttgctttctctt

SEQ ID NO: 822727 - DNA, 15 bp, Homo sapiens
atgtttgctttctct

SEQ ID NO: 822728 - DNA, 15 bp, Homo sapiens
tatgtttgctttctc

SEQ ID NO: 822729 - DNA, 15 bp, Homo sapiens
atatgtttgctttct

SEQ ID NO: 822730 - DNA, 15 bp, Homo sapiens
aatatgtttgctttc

SEQ ID NO: 822731 - DNA, 15 bp, Homo sapiens
taatatgtttgcttt

SEQ ID NO: 822732 - DNA, 15 bp, Homo sapiens
ataatatgtttgctt

SEQ ID NO: 822733 - DNA, 15 bp, Homo sapiens
tataatatgtttgct

SEQ ID NO: 822734 - DNA, 15 bp, Homo sapiens
ttataatatgtttgc

SEQ ID NO: 822735 - DNA, 15 bp, Homo sapiens
cttataatatgtttg

SEQ ID NO: 822736 - DNA, 15 bp, Homo sapiens
acttataatatgttt

SEQ ID NO: 822737 - DNA, 15 bp, Homo sapiens
aacttataatatgtt

SEQ ID NO: 822738 - DNA, 15 bp, Homo sapiens
aaacttataatatgt

SEQ ID NO: 822739 - DNA, 15 bp, Homo sapiens
taaacttataatatg

SEQ ID NO: 822740 - DNA, 15 bp, Homo sapiens
ttaaacttataatat

SEQ ID NO: 822741 - DNA, 15 bp, Homo sapiens
attaaacttataata

SEQ ID NO: 822742 - DNA, 15 bp, Homo sapiens
aattaaacttataat

SEQ ID NO: 822743 - DNA, 15 bp, Homo sapiens
gaattaaacttataa

SEQ ID NO: 822744 - DNA, 15 bp, Homo sapiens
agaattaaacttata

SEQ ID NO: 822745 - DNA, 15 bp, Homo sapiens
aagaattaaacttat

SEQ ID NO: 822746 - DNA, 15 bp, Homo sapiens
taagaattaaactta

SEQ ID NO: 822747 - DNA, 15 bp, Homo sapiens
ataagaattaaactt

SEQ ID NO: 822748 - DNA, 15 bp, Homo sapiens
tataagaattaaact

SEQ ID NO: 822749 - DNA, 15 bp, Homo sapiens
atataagaattaaac

SEQ ID NO: 822750 - DNA, 15 bp, Homo sapiens
aatataagaattaaa

SEQ ID NO: 822751 - DNA, 15 bp, Homo sapiens
aaatataagaattaa

SEQ ID NO: 822752 - DNA, 15 bp, Homo sapiens
taaatataagaatta

SEQ ID NO: 822753 - DNA, 15 bp, Homo sapiens
ttaaatataagaatt

SEQ ID NO: 822754 - DNA, 15 bp, Homo sapiens
tttaaatataagaat

SEQ ID NO: 822755 - DNA, 15 bp, Homo sapiens
ttttaaatataagaa

SEQ ID NO: 822756 - DNA, 15 bp, Homo sapiens
tttttaaatataaga

SEQ ID NO: 822757 - DNA, 15 bp, Homo sapiens
atttttaaatataag

SEQ ID NO: 822758 - DNA, 15 bp, Homo sapiens
tatttttaaatataa

SEQ ID NO: 822759 - DNA, 15 bp, Homo sapiens
ctatttttaaatata

SEQ ID NO: 822760 - DNA, 15 bp, Homo sapiens
cctatttttaaatat

SEQ ID NO: 822761 - DNA, 15 bp, Homo sapiens
tcctatttttaaata

SEQ ID NO: 822762 - DNA, 15 bp, Homo sapiens
ctcctatttttaaat

SEQ ID NO: 822763 - DNA, 15 bp, Homo sapiens
gctcctatttttaaa

SEQ ID NO: 822764 - DNA, 15 bp, Homo sapiens
ggctcctatttttaa

SEQ ID NO: 822765 - DNA, 15 bp, Homo sapiens
tggctcctattttta

SEQ ID NO: 822766 - DNA, 15 bp, Homo sapiens
ttggctcctattttt

SEQ ID NO: 822767 - DNA, 15 bp, Homo sapiens
cttggctcctatttt

SEQ ID NO: 822768 - DNA, 15 bp, Homo sapiens
acttggctcctattt

SEQ ID NO: 822769 - DNA, 15 bp, Homo sapiens
tacttggctcctatt

SEQ ID NO: 822770 - DNA, 15 bp, Homo sapiens
atacttggctcctat

SEQ ID NO: 822771 - DNA, 15 bp, Homo sapiens
catacttggctccta

SEQ ID NO: 822772 - DNA, 15 bp, Homo sapiens
ccatacttggctcct

SEQ ID NO: 822773 - DNA, 15 bp, Homo sapiens
accatacttggctcc

SEQ ID NO: 822774 - DNA, 15 bp, Homo sapiens
caccatacttggctc

SEQ ID NO: 822775 - DNA, 15 bp, Homo sapiens
ccaccatacttggct

SEQ ID NO: 822776 - DNA, 15 bp, Homo sapiens
gccaccatacttggc

SEQ ID NO: 822777 - DNA, 15 bp, Homo sapiens
agccaccatacttgg

SEQ ID NO: 822778 - DNA, 15 bp, Homo sapiens
tagccaccatacttg

SEQ ID NO: 822779 - DNA, 15 bp, Homo sapiens
ttagccaccatactt

SEQ ID NO: 822780 - DNA, 15 bp, Homo sapiens
attagccaccatact

SEQ ID NO: 822781 - DNA, 15 bp, Homo sapiens
cattagccaccatac

SEQ ID NO: 822782 - DNA, 15 bp, Homo sapiens
gcattagccaccata

SEQ ID NO: 822783 - DNA, 15 bp, Homo sapiens
ggcattagccaccat

SEQ ID NO: 822784 - DNA, 15 bp, Homo sapiens
aggcattagccacca

SEQ ID NO: 822785 - DNA, 15 bp, Homo sapiens
caggcattagccacc

SEQ ID NO: 822786 - DNA, 15 bp, Homo sapiens
acaggcattagccac

SEQ ID NO: 822787 - DNA, 15 bp, Homo sapiens
tacaggcattagcca

SEQ ID NO: 822788 - DNA, 15 bp, Homo sapiens
ttacaggcattagcc

SEQ ID NO: 822789 - DNA, 15 bp, Homo sapiens
attacaggcattagc

SEQ ID NO: 822790 - DNA, 15 bp, Homo sapiens
gattacaggcattag

SEQ ID NO: 822791 - DNA, 15 bp, Homo sapiens
ggattacaggcatta

SEQ ID NO: 822792 - DNA, 15 bp, Homo sapiens
gggattacaggcatt

SEQ ID NO: 822793 - DNA, 15 bp, Homo sapiens
ttgggattacaggca

SEQ ID NO: 822794 - DNA, 15 bp, Homo sapiens
gttgggattacaggc

SEQ ID NO: 822795 - DNA, 15 bp, Homo sapiens
agttgggattacagg

SEQ ID NO: 822796 - DNA, 15 bp, Homo sapiens
tagttgggattacag

SEQ ID NO: 822797 - DNA, 15 bp, Homo sapiens
atagttgggattaca

SEQ ID NO: 822798 - DNA, 15 bp, Homo sapiens
aatagttgggattac

SEQ ID NO: 822799 - DNA, 15 bp, Homo sapiens
aaatagttgggatta

SEQ ID NO: 822800 - DNA, 15 bp, Homo sapiens
caaatagttgggatt

SEQ ID NO: 822801 - DNA, 15 bp, Homo sapiens
ccaaatagttgggat

SEQ ID NO: 822802 - DNA, 15 bp, Homo sapiens
cccaaatagttggga

SEQ ID NO: 822803 - DNA, 15 bp, Homo sapiens
tcccaaatagttggg

SEQ ID NO: 822804 - DNA, 15 bp, Homo sapiens
ctcccaaatagttgg

SEQ ID NO: 822805 - DNA, 15 bp, Homo sapiens
cctcccaaatagttg

SEQ ID NO: 822806 - DNA, 15 bp, Homo sapiens
gcctcccaaatagtt

SEQ ID NO: 822807 - DNA, 15 bp, Homo sapiens
ggcctcccaaatagt

SEQ ID NO: 822808 - DNA, 15 bp, Homo sapiens
tggcctcccaaatag

SEQ ID NO: 822809 - DNA, 15 bp, Homo sapiens
ttggcctcccaaata

SEQ ID NO: 822810 - DNA, 15 bp, Homo sapiens
cttggcctcccaaat

SEQ ID NO: 822811 - DNA, 15 bp, Homo sapiens
tcttggcctcccaaa

SEQ ID NO: 822812 - DNA, 15 bp, Homo sapiens
atcttggcctcccaa

SEQ ID NO: 822813 - DNA, 15 bp, Homo sapiens
catcttggcctccca

SEQ ID NO: 822814 - DNA, 15 bp, Homo sapiens
tcatcttggcctccc

SEQ ID NO: 822815 - DNA, 15 bp, Homo sapiens
ctcatcttggcctcc

SEQ ID NO: 822816 - DNA, 15 bp, Homo sapiens
tctcatcttggcctc

SEQ ID NO: 822817 - DNA, 15 bp, Homo sapiens
ctctcatcttggcct

SEQ ID NO: 822818 - DNA, 15 bp, Homo sapiens
cctctcatcttggcc

SEQ ID NO: 822819 - DNA, 15 bp, Homo sapiens
tcctctcatcttggc

SEQ ID NO: 822820 - DNA, 15 bp, Homo sapiens
atcctctcatcttgg

SEQ ID NO: 822821 - DNA, 15 bp, Homo sapiens
aatcctctcatcttg

SEQ ID NO: 822822 - DNA, 15 bp, Homo sapiens
caatcctctcatctt

SEQ ID NO: 822823 - DNA, 15 bp, Homo sapiens
gcaatcctctcatct

SEQ ID NO: 822824 - DNA, 15 bp, Homo sapiens
agcaatcctctcatc

SEQ ID NO: 822825 - DNA, 15 bp, Homo sapiens
aagcaatcctctcat

SEQ ID NO: 822826 - DNA, 15 bp, Homo sapiens
caagcaatcctctca

SEQ ID NO: 822827 - DNA, 15 bp, Homo sapiens
tcaagcaatcctctc

SEQ ID NO: 822828 - DNA, 15 bp, Homo sapiens
ctcaagcaatcctct

SEQ ID NO: 822829 - DNA, 15 bp, Homo sapiens
tctcaagcaatcctc

SEQ ID NO: 822830 - DNA, 15 bp, Homo sapiens
gtctcaagcaatcct

SEQ ID NO: 822831 - DNA, 15 bp, Homo sapiens
ggtctcaagcaatcc

SEQ ID NO: 822832 - DNA, 15 bp, Homo sapiens
tggtctcaagcaatc

SEQ ID NO: 822833 - DNA, 15 bp, Homo sapiens
ctggtctcaagcaat

SEQ ID NO: 822834 - DNA, 15 bp, Homo sapiens
cctggtctcaagcaa

SEQ ID NO: 822835 - DNA, 15 bp, Homo sapiens
tcctggtctcaagca

SEQ ID NO: 822836 - DNA, 15 bp, Homo sapiens
ctcctggtctcaagc

SEQ ID NO: 822837 - DNA, 15 bp, Homo sapiens
actcctggtctcaag

SEQ ID NO: 822838 - DNA, 15 bp, Homo sapiens
aactcctggtctcaa

SEQ ID NO: 822839 - DNA, 15 bp, Homo sapiens
aaactcctggtctca

SEQ ID NO: 822840 - DNA, 15 bp, Homo sapiens
caaactcctggtctc

SEQ ID NO: 822841 - DNA, 15 bp, Homo sapiens
tcaaactcctggtct

SEQ ID NO: 822842 - DNA, 15 bp, Homo sapiens
atcaaactcctggtc

SEQ ID NO: 822843 - DNA, 15 bp, Homo sapiens
tatcaaactcctggt

SEQ ID NO: 822844 - DNA, 15 bp, Homo sapiens
gtatcaaactcctgg

SEQ ID NO: 822845 - DNA, 15 bp, Homo sapiens
ggtatcaaactcctg

SEQ ID NO: 822846 - DNA, 15 bp, Homo sapiens
tggtatcaaactcct

SEQ ID NO: 822847 - DNA, 15 bp, Homo sapiens
ctggtatcaaactcc

SEQ ID NO: 822848 - DNA, 15 bp, Homo sapiens
gctggtatcaaactc

SEQ ID NO: 822849 - DNA, 15 bp, Homo sapiens
ggctggtatcaaact

SEQ ID NO: 822850 - DNA, 15 bp, Homo sapiens
aggctggtatcaaac

SEQ ID NO: 822851 - DNA, 15 bp, Homo sapiens
caggctggtatcaaa

SEQ ID NO: 822852 - DNA, 15 bp, Homo sapiens
ccaggctggtatcaa

SEQ ID NO: 822853 - DNA, 15 bp, Homo sapiens
cccaggctggtatca

SEQ ID NO: 822854 - DNA, 15 bp, Homo sapiens
gcccaggctggtatc

SEQ ID NO: 822855 - DNA, 15 bp, Homo sapiens
tgcccaggctggtat

SEQ ID NO: 822856 - DNA, 15 bp, Homo sapiens
ttgcccaggctggta

SEQ ID NO: 822857 - DNA, 15 bp, Homo sapiens
gttgcccaggctggt

SEQ ID NO: 822858 - DNA, 15 bp, Homo sapiens
atgttgcccaggctg

SEQ ID NO: 822859 - DNA, 15 bp, Homo sapiens
tatgttgcccaggct

SEQ ID NO: 822860 - DNA, 15 bp, Homo sapiens
ctatgttgcccaggc

SEQ ID NO: 822861 - DNA, 15 bp, Homo sapiens
gctatgttgcccagg

SEQ ID NO: 822862 - DNA, 15 bp, Homo sapiens
tgctatgttgcccag

SEQ ID NO: 822863 - DNA, 15 bp, Homo sapiens
ttgctatgttgccca

SEQ ID NO: 822864 - DNA, 15 bp, Homo sapiens
cttgctatgttgccc

SEQ ID NO: 822865 - DNA, 15 bp, Homo sapiens
tcttgctatgttgcc

SEQ ID NO: 822866 - DNA, 15 bp, Homo sapiens
atcttgctatgttgc

SEQ ID NO: 822867 - DNA, 15 bp, Homo sapiens
catcttgctatgttg

SEQ ID NO: 822868 - DNA, 15 bp, Homo sapiens
acatcttgctatgtt

SEQ ID NO: 822869 - DNA, 15 bp, Homo sapiens
aacatcttgctatgt

SEQ ID NO: 822870 - DNA, 15 bp, Homo sapiens
taacatcttgctatg

SEQ ID NO: 822871 - DNA, 15 bp, Homo sapiens
ataacatcttgctat

SEQ ID NO: 822872 - DNA, 15 bp, Homo sapiens
gataacatcttgcta

SEQ ID NO: 822873 - DNA, 15 bp, Homo sapiens
agataacatcttgct

SEQ ID NO: 822874 - DNA, 15 bp, Homo sapiens
gagataacatcttgc

SEQ ID NO: 822875 - DNA, 15 bp, Homo sapiens
agagataacatcttg

SEQ ID NO: 822876 - DNA, 15 bp, Homo sapiens
tagagataacatctt

SEQ ID NO: 822877 - DNA, 15 bp, Homo sapiens
gtagagataacatct

SEQ ID NO: 822878 - DNA, 15 bp, Homo sapiens
tgtagagataacatc

SEQ ID NO: 822879 - DNA, 15 bp, Homo sapiens
gtgtagagataacat

SEQ ID NO: 822880 - DNA, 15 bp, Homo sapiens
tgtgtagagataaca

SEQ ID NO: 822881 - DNA, 15 bp, Homo sapiens
ttgtgtagagataac

SEQ ID NO: 822882 - DNA, 15 bp, Homo sapiens
tttgtgtagagataa

SEQ ID NO: 822883 - DNA, 15 bp, Homo sapiens
ttttgtgtagagata

SEQ ID NO: 822884 - DNA, 15 bp, Homo sapiens
attttgtgtagagat

SEQ ID NO: 822885 - DNA, 15 bp, Homo sapiens
tattttgtgtagaga

SEQ ID NO: 822886 - DNA, 15 bp, Homo sapiens
ttattttgtgtagag

SEQ ID NO: 822887 - DNA, 15 bp, Homo sapiens
tttattttgtgtaga

SEQ ID NO: 822888 - DNA, 15 bp, Homo sapiens
ttttattttgtgtag

SEQ ID NO: 822889 - DNA, 15 bp, Homo sapiens
tttttattttgtgta

SEQ ID NO: 822890 - DNA, 15 bp, Homo sapiens
ttttttattttgtgt

SEQ ID NO: 822891 - DNA, 15 bp, Homo sapiens
cttttttattttgtg

SEQ ID NO: 822892 - DNA, 15 bp, Homo sapiens
acttttttattttgt

SEQ ID NO: 822893 - DNA, 15 bp, Homo sapiens
aacttttttattttg

SEQ ID NO: 822894 - DNA, 15 bp, Homo sapiens
taacttttttatttt

SEQ ID NO: 822895 - DNA, 15 bp, Homo sapiens
ctaacttttttattt

SEQ ID NO: 822896 - DNA, 15 bp, Homo sapiens
gctaacttttttatt

SEQ ID NO: 822897 - DNA, 15 bp, Homo sapiens
agctaacttttttat

SEQ ID NO: 822898 - DNA, 15 bp, Homo sapiens
cagctaactttttta

SEQ ID NO: 822899 - DNA, 15 bp, Homo sapiens
ccagctaactttttt

SEQ ID NO: 822900 - DNA, 15 bp, Homo sapiens
cccagctaacttttt

SEQ ID NO: 822901 - DNA, 15 bp, Homo sapiens
tcccagctaactttt

SEQ ID NO: 822902 - DNA, 15 bp, Homo sapiens
ttcccagctaacttt

SEQ ID NO: 822903 - DNA, 15 bp, Homo sapiens
attcccagctaactt

SEQ ID NO: 822904 - DNA, 15 bp, Homo sapiens
cattcccagctaact

SEQ ID NO: 822905 - DNA, 15 bp, Homo sapiens
ccattcccagctaac

SEQ ID NO: 822906 - DNA, 15 bp, Homo sapiens
accattcccagctaa

SEQ ID NO: 822907 - DNA, 15 bp, Homo sapiens
taccattcccagcta

SEQ ID NO: 822908 - DNA, 15 bp, Homo sapiens
ctaccattcccagct

SEQ ID NO: 822909 - DNA, 15 bp, Homo sapiens
actaccattcccagc

SEQ ID NO: 822910 - DNA, 15 bp, Homo sapiens
cactaccattcccag

SEQ ID NO: 822911 - DNA, 15 bp, Homo sapiens
gcactaccattccca

SEQ ID NO: 822912 - DNA, 15 bp, Homo sapiens
tgcactaccattccc

SEQ ID NO: 822913 - DNA, 15 bp, Homo sapiens
atgcactaccattcc

SEQ ID NO: 822914 - DNA, 15 bp, Homo sapiens
catgcactaccattc

SEQ ID NO: 822915 - DNA, 15 bp, Homo sapiens
gcatgcactaccatt

SEQ ID NO: 822916 - DNA, 15 bp, Homo sapiens
agcatgcactaccat

SEQ ID NO: 822917 - DNA, 15 bp, Homo sapiens
aagcatgcactacca

SEQ ID NO: 822918 - DNA, 15 bp, Homo sapiens
caagcatgcactacc

SEQ ID NO: 822919 - DNA, 15 bp, Homo sapiens
acaagcatgcactac

SEQ ID NO: 822920 - DNA, 15 bp, Homo sapiens
tacaagcatgcacta

SEQ ID NO: 822921 - DNA, 15 bp, Homo sapiens
atacaagcatgcact

SEQ ID NO: 822922 - DNA, 15 bp, Homo sapiens
aatacaagcatgcac

SEQ ID NO: 822923 - DNA, 15 bp, Homo sapiens
gaatacaagcatgca

SEQ ID NO: 822924 - DNA, 15 bp, Homo sapiens
ggaatacaagcatgc

SEQ ID NO: 822925 - DNA, 15 bp, Homo sapiens
gggaatacaagcatg

SEQ ID NO: 822926 - DNA, 15 bp, Homo sapiens
tgggaatacaagcat

SEQ ID NO: 822927 - DNA, 15 bp, Homo sapiens
ctgggaatacaagca

SEQ ID NO: 822928 - DNA, 15 bp, Homo sapiens
gctgggaatacaagc

SEQ ID NO: 822929 - DNA, 15 bp, Homo sapiens
agctgggaatacaag

SEQ ID NO: 822930 - DNA, 15 bp, Homo sapiens
tagctgggaatacaa

SEQ ID NO: 822931 - DNA, 15 bp, Homo sapiens
gtagctgggaataca

SEQ ID NO: 822932 - DNA, 15 bp, Homo sapiens
agtagctgggaatac

SEQ ID NO: 822933 - DNA, 15 bp, Homo sapiens
gagtagctgggaata

SEQ ID NO: 822934 - DNA, 15 bp, Homo sapiens
tgagtagctgggaat

SEQ ID NO: 822935 - DNA, 15 bp, Homo sapiens
ctgagtagctgggaa

SEQ ID NO: 822936 - DNA, 15 bp, Homo sapiens
ttcagcctcctgagt

SEQ ID NO: 822937 - DNA, 15 bp, Homo sapiens
cttcagcctcctgag

SEQ ID NO: 822938 - DNA, 15 bp, Homo sapiens
gcttcagcctcctga

SEQ ID NO: 822939 - DNA, 15 bp, Homo sapiens
tgcttcagcctcctg

SEQ ID NO: 822940 - DNA, 15 bp, Homo sapiens
ctgcttcagcctcct

SEQ ID NO: 822941 - DNA, 15 bp, Homo sapiens
cctgcttcagcctcc

SEQ ID NO: 822942 - DNA, 15 bp, Homo sapiens
tcctgcttcagcctc

SEQ ID NO: 822943 - DNA, 15 bp, Homo sapiens
ctcctgcttcagcct

SEQ ID NO: 822944 - DNA, 15 bp, Homo sapiens
cctcctgcttcagcc

SEQ ID NO: 822945 - DNA, 15 bp, Homo sapiens
ccctcctgcttcagc

SEQ ID NO: 822946 - DNA, 15 bp, Homo sapiens
accctcctgcttcag

SEQ ID NO: 822947 - DNA, 15 bp, Homo sapiens
aaccctcctgcttca

SEQ ID NO: 822948 - DNA, 15 bp, Homo sapiens
taaccctcctgcttc

SEQ ID NO: 822949 - DNA, 15 bp, Homo sapiens
gtaaccctcctgctt

SEQ ID NO: 822950 - DNA, 15 bp, Homo sapiens
agtaaccctcctgct

SEQ ID NO: 822951 - DNA, 15 bp, Homo sapiens
aagtaaccctcctgc

SEQ ID NO: 822952 - DNA, 15 bp, Homo sapiens
caagtaaccctcctg

SEQ ID NO: 822953 - DNA, 15 bp, Homo sapiens
tcaagtaaccctcct

SEQ ID NO: 822954 - DNA, 15 bp, Homo sapiens
ctcaagtaaccctcc

SEQ ID NO: 822955 - DNA, 15 bp, Homo sapiens
gctcaagtaaccctc

SEQ ID NO: 822956 - DNA, 15 bp, Homo sapiens
ggctcaagtaaccct

SEQ ID NO: 822957 - DNA, 15 bp, Homo sapiens
gggctcaagtaaccc

SEQ ID NO: 822958 - DNA, 15 bp, Homo sapiens
tgggctcaagtaacc

SEQ ID NO: 822959 - DNA, 15 bp, Homo sapiens
ctgggctcaagtaac

SEQ ID NO: 822960 - DNA, 15 bp, Homo sapiens
cctgggctcaagtaa

SEQ ID NO: 822961 - DNA, 15 bp, Homo sapiens
tcctgggctcaagta

SEQ ID NO: 822962 - DNA, 15 bp, Homo sapiens
ctcctgggctcaagt

SEQ ID NO: 822963 - DNA, 15 bp, Homo sapiens
actcctgggctcaag

SEQ ID NO: 822964 - DNA, 15 bp, Homo sapiens
aactcctgggctcaa

SEQ ID NO: 822965 - DNA, 15 bp, Homo sapiens
aaactcctgggctca

SEQ ID NO: 822966 - DNA, 15 bp, Homo sapiens
caaactcctgggctc

SEQ ID NO: 822967 - DNA, 15 bp, Homo sapiens
tcaaactcctgggct

SEQ ID NO: 822968 - DNA, 15 bp, Homo sapiens
ctcaaactcctgggc

SEQ ID NO: 822969 - DNA, 15 bp, Homo sapiens
cctcaaactcctggg

SEQ ID NO: 822970 - DNA, 15 bp, Homo sapiens
acctcaaactcctgg

SEQ ID NO: 822971 - DNA, 15 bp, Homo sapiens
aacctcaaactcctg

SEQ ID NO: 822972 - DNA, 15 bp, Homo sapiens
caacctcaaactcct

SEQ ID NO: 822973 - DNA, 15 bp, Homo sapiens
gcaacctcaaactcc

SEQ ID NO: 822974 - DNA, 15 bp, Homo sapiens
tgcaacctcaaactc

SEQ ID NO: 822975 - DNA, 15 bp, Homo sapiens
ctgcaacctcaaact

SEQ ID NO: 822976 - DNA, 15 bp, Homo sapiens
actgcaacctcaaac

SEQ ID NO: 822977 - DNA, 15 bp, Homo sapiens
cactgcaacctcaaa

SEQ ID NO: 822978 - DNA, 15 bp, Homo sapiens
tcactgcaacctcaa

SEQ ID NO: 822979 - DNA, 15 bp, Homo sapiens
ctcactgcaacctca

SEQ ID NO: 822980 - DNA, 15 bp, Homo sapiens
gctcactgcaacctc

SEQ ID NO: 822981 - DNA, 15 bp, Homo sapiens
agctcactgcaacct

SEQ ID NO: 822982 - DNA, 15 bp, Homo sapiens
tagctcactgcaacc

SEQ ID NO: 822983 - DNA, 15 bp, Homo sapiens
atagctcactgcaac

SEQ ID NO: 822984 - DNA, 15 bp, Homo sapiens
catagctcactgcaa

SEQ ID NO: 822985 - DNA, 15 bp, Homo sapiens
tcatagctcactgca

SEQ ID NO: 822986 - DNA, 15 bp, Homo sapiens
atcatagctcactgc

SEQ ID NO: 822987 - DNA, 15 bp, Homo sapiens
aatcatagctcactg

SEQ ID NO: 822988 - DNA, 15 bp, Homo sapiens
caatcatagctcact

SEQ ID NO: 822989 - DNA, 15 bp, Homo sapiens
acaatcatagctcac

SEQ ID NO: 822990 - DNA, 15 bp, Homo sapiens
cacaatcatagctca

SEQ ID NO: 822991 - DNA, 15 bp, Homo sapiens
gcacaatcatagctc

SEQ ID NO: 822992 - DNA, 15 bp, Homo sapiens
ggcacaatcatagct

SEQ ID NO: 822993 - DNA, 15 bp, Homo sapiens
tggcacaatcatagc

SEQ ID NO: 822994 - DNA, 15 bp, Homo sapiens
gtggcacaatcatag

SEQ ID NO: 822995 - DNA, 15 bp, Homo sapiens
agtggcacaatcata

SEQ ID NO: 822996 - DNA, 15 bp, Homo sapiens
cagtggcacaatcat

SEQ ID NO: 822997 - DNA, 15 bp, Homo sapiens
gcagtggcacaatca

SEQ ID NO: 822998 - DNA, 15 bp, Homo sapiens
tgcagtggcacaatc

SEQ ID NO: 822999 - DNA, 15 bp, Homo sapiens
gtgcagtggcacaat

SEQ ID NO: 823000 - DNA, 15 bp, Homo sapiens
agtgcagtggcacaa

SEQ ID NO: 823001 - DNA, 15 bp, Homo sapiens
gagtgcagtggcaca

SEQ ID NO: 823002 - DNA, 15 bp, Homo sapiens
ggagtgcagtggcac

SEQ ID NO: 823003 - DNA, 15 bp, Homo sapiens
tggagtgcagtggca

SEQ ID NO: 823004 - DNA, 15 bp, Homo sapiens
ctggagtgcagtggc

SEQ ID NO: 823005 - DNA, 15 bp, Homo sapiens
gctggagtgcagtgg

SEQ ID NO: 823006 - DNA, 15 bp, Homo sapiens
agctggagtgcagtg

SEQ ID NO: 823007 - DNA, 15 bp, Homo sapiens
aagctggagtgcagt

SEQ ID NO: 823008 - DNA, 15 bp, Homo sapiens
caagctggagtgcag

SEQ ID NO: 823009 - DNA, 15 bp, Homo sapiens
ccaagctggagtgca

SEQ ID NO: 823010 - DNA, 15 bp, Homo sapiens
cccaagctggagtgc

SEQ ID NO: 823011 - DNA, 15 bp, Homo sapiens
acccaagctggagtg

SEQ ID NO: 823012 - DNA, 15 bp, Homo sapiens
cacccaagctggagt

SEQ ID NO: 823013 - DNA, 15 bp, Homo sapiens
tcacccaagctggag

SEQ ID NO: 823014 - DNA, 15 bp, Homo sapiens
gtcacccaagctgga

SEQ ID NO: 823015 - DNA, 15 bp, Homo sapiens
tgtcacccaagctgg

SEQ ID NO: 823016 - DNA, 15 bp, Homo sapiens
gtgtcacccaagctg

SEQ ID NO: 823017 - DNA, 15 bp, Homo sapiens
tgtgtcacccaagct

SEQ ID NO: 823018 - DNA, 15 bp, Homo sapiens
ctgtgtcacccaagc

SEQ ID NO: 823019 - DNA, 15 bp, Homo sapiens
gctgtgtcacccaag

SEQ ID NO: 823020 - DNA, 15 bp, Homo sapiens
tgctgtgtcacccaa

SEQ ID NO: 823021 - DNA, 15 bp, Homo sapiens
ttgctgtgtcaccca

SEQ ID NO: 823022 - DNA, 15 bp, Homo sapiens
tttgctgtgtcaccc

SEQ ID NO: 823023 - DNA, 15 bp, Homo sapiens
ttttgctgtgtcacc

SEQ ID NO: 823024 - DNA, 15 bp, Homo sapiens
gttttgctgtgtcac

SEQ ID NO: 823025 - DNA, 15 bp, Homo sapiens
ggttttgctgtgtca

SEQ ID NO: 823026 - DNA, 15 bp, Homo sapiens
gggttttgctgtgtc

SEQ ID NO: 823027 - DNA, 15 bp, Homo sapiens
agggttttgctgtgt

SEQ ID NO: 823028 - DNA, 15 bp, Homo sapiens
gagggttttgctgtg

SEQ ID NO: 823029 - DNA, 15 bp, Homo sapiens
agagggttttgctgt

SEQ ID NO: 823030 - DNA, 15 bp, Homo sapiens
gagagggttttgctg

SEQ ID NO: 823031 - DNA, 15 bp, Homo sapiens
agagagggttttgct

SEQ ID NO: 823032 - DNA, 15 bp, Homo sapiens
gagagagggttttgc

SEQ ID NO: 823033 - DNA, 15 bp, Homo sapiens
agagagagggttttg

SEQ ID NO: 823034 - DNA, 15 bp, Homo sapiens
gagagagagggtttt

SEQ ID NO: 823035 - DNA, 15 bp, Homo sapiens
agagagagagggttt

SEQ ID NO: 823036 - DNA, 15 bp, Homo sapiens
tagagagagagggtt

SEQ ID NO: 823037 - DNA, 15 bp, Homo sapiens
ttagagagagagggt

SEQ ID NO: 823038 - DNA, 15 bp, Homo sapiens
tttagagagagaggg

SEQ ID NO: 823039 - DNA, 15 bp, Homo sapiens
ttttagagagagagg

SEQ ID NO: 823040 - DNA, 15 bp, Homo sapiens
tttttagagagagag

SEQ ID NO: 823041 - DNA, 15 bp, Homo sapiens
ttttttagagagaga

SEQ ID NO: 823042 - DNA, 15 bp, Homo sapiens
tttttttagagagag

SEQ ID NO: 823043 - DNA, 15 bp, Homo sapiens
ttttttttagagaga

SEQ ID NO: 823044 - DNA, 15 bp, Homo sapiens
tttttttttagagag

SEQ ID NO: 823045 - DNA, 15 bp, Homo sapiens
ttttttttttagaga

SEQ ID NO: 823046 - DNA, 15 bp, Homo sapiens
tttttttttttagag

SEQ ID NO: 823047 - DNA, 15 bp, Homo sapiens
ttttttttttttaga

SEQ ID NO: 823048 - DNA, 15 bp, Homo sapiens
tttttttttttttag

SEQ ID NO: 823049 - DNA, 15 bp, Homo sapiens
tttttttttttttta

SEQ ID NO: 823050 - DNA, 15 bp, Homo sapiens
ccttttttttttttt

SEQ ID NO: 823051 - DNA, 15 bp, Homo sapiens
tcctttttttttttt

SEQ ID NO: 823052 - DNA, 15 bp, Homo sapiens
ttccttttttttttt

SEQ ID NO: 823053 - DNA, 15 bp, Homo sapiens
gttcctttttttttt

SEQ ID NO: 823054 - DNA, 15 bp, Homo sapiens
tgttccttttttttt

SEQ ID NO: 823055 - DNA, 15 bp, Homo sapiens
atgttcctttttttt

SEQ ID NO: 823056 - DNA, 15 bp, Homo sapiens
gatgttccttttttt

SEQ ID NO: 823057 - DNA, 15 bp, Homo sapiens
agatgttcctttttt

SEQ ID NO: 823058 - DNA, 15 bp, Homo sapiens
gagatgttccttttt

SEQ ID NO: 823059 - DNA, 15 bp, Homo sapiens
tgagatgttcctttt

SEQ ID NO: 823060 - DNA, 15 bp, Homo sapiens
atgagatgttccttt

SEQ ID NO: 823061 - DNA, 15 bp, Homo sapiens
aatgagatgttcctt

SEQ ID NO: 823062 - DNA, 15 bp, Homo sapiens
aaatgagatgttcct

SEQ ID NO: 823063 - DNA, 15 bp, Homo sapiens
aaaatgagatgttcc

SEQ ID NO: 823064 - DNA, 15 bp, Homo sapiens
gaaaatgagatgttc

SEQ ID NO: 823065 - DNA, 15 bp, Homo sapiens
tgaaaatgagatgtt

SEQ ID NO: 823066 - DNA, 15 bp, Homo sapiens
gtgaaaatgagatgt

SEQ ID NO: 823067 - DNA, 15 bp, Homo sapiens
tgtgaaaatgagatg

SEQ ID NO: 823068 - DNA, 15 bp, Homo sapiens
gtgtgaaaatgagat

SEQ ID NO: 823069 - DNA, 15 bp, Homo sapiens
agtgtgaaaatgaga

SEQ ID NO: 823070 - DNA, 15 bp, Homo sapiens
cagtgtgaaaatgag

SEQ ID NO: 823071 - DNA, 15 bp, Homo sapiens
tcagtgtgaaaatga

SEQ ID NO: 823072 - DNA, 15 bp, Homo sapiens
ttcagtgtgaaaatg

SEQ ID NO: 823073 - DNA, 15 bp, Homo sapiens
tttcagtgtgaaaat

SEQ ID NO: 823074 - DNA, 15 bp, Homo sapiens
atttcagtgtgaaaa

SEQ ID NO: 823075 - DNA, 15 bp, Homo sapiens
catttcagtgtgaaa

SEQ ID NO: 823076 - DNA, 15 bp, Homo sapiens
acatttcagtgtgaa

SEQ ID NO: 823077 - DNA, 15 bp, Homo sapiens
aacatttcagtgtga

SEQ ID NO: 823078 - DNA, 15 bp, Homo sapiens
caacatttcagtgtg

SEQ ID NO: 823079 - DNA, 15 bp, Homo sapiens
tcaacatttcagtgt

SEQ ID NO: 823080 - DNA, 15 bp, Homo sapiens
gtcaacatttcagtg

SEQ ID NO: 823081 - DNA, 15 bp, Homo sapiens
agtcaacatttcagt

SEQ ID NO: 823082 - DNA, 15 bp, Homo sapiens
cagtcaacatttcag

SEQ ID NO: 823083 - DNA, 15 bp, Homo sapiens
tcagtcaacatttca

SEQ ID NO: 823084 - DNA, 15 bp, Homo sapiens
ttcagtcaacatttc

SEQ ID NO: 823085 - DNA, 15 bp, Homo sapiens
tttcagtcaacattt

SEQ ID NO: 823086 - DNA, 15 bp, Homo sapiens
atttcagtcaacatt

SEQ ID NO: 823087 - DNA, 15 bp, Homo sapiens
gatttcagtcaacat

SEQ ID NO: 823088 - DNA, 15 bp, Homo sapiens
tgatttcagtcaaca

SEQ ID NO: 823089 - DNA, 15 bp, Homo sapiens
atgatttcagtcaac

SEQ ID NO: 823090 - DNA, 15 bp, Homo sapiens
aatgatttcagtcaa

SEQ ID NO: 823091 - DNA, 15 bp, Homo sapiens
taatgatttcagtca

SEQ ID NO: 823092 - DNA, 15 bp, Homo sapiens
ttaatgatttcagtc

SEQ ID NO: 823093 - DNA, 15 bp, Homo sapiens
tttaatgatttcagt

SEQ ID NO: 823094 - DNA, 15 bp, Homo sapiens
gtttaatgatttcag

SEQ ID NO: 823095 - DNA, 15 bp, Homo sapiens
tgtttaatgatttca

SEQ ID NO: 823096 - DNA, 15 bp, Homo sapiens
ttgtttaatgatttc

SEQ ID NO: 823097 - DNA, 15 bp, Homo sapiens
attgtttaatgattt

SEQ ID NO: 823098 - DNA, 15 bp, Homo sapiens
tattgtttaatgatt

SEQ ID NO: 823099 - DNA, 15 bp, Homo sapiens
ttattgtttaatgat

SEQ ID NO: 823100 - DNA, 15 bp, Homo sapiens
tttattgtttaatga

SEQ ID NO: 823101 - DNA, 15 bp, Homo sapiens
ttttattgtttaatg

SEQ ID NO: 823102 - DNA, 15 bp, Homo sapiens
attttattgtttaat

SEQ ID NO: 823103 - DNA, 15 bp, Homo sapiens
gattttattgtttaa

SEQ ID NO: 823104 - DNA, 15 bp, Homo sapiens
tgattttattgttta

SEQ ID NO: 823105 - DNA, 15 bp, Homo sapiens
atgattttattgttt

SEQ ID NO: 823106 - DNA, 15 bp, Homo sapiens
tatgattttattgtt

SEQ ID NO: 823107 - DNA, 15 bp, Homo sapiens
ttatgattttattgt

SEQ ID NO: 823108 - DNA, 15 bp, Homo sapiens
tttatgattttattg

SEQ ID NO: 823109 - DNA, 15 bp, Homo sapiens
ttttatgattttatt

SEQ ID NO: 823110 - DNA, 15 bp, Homo sapiens
cttttatgattttat

SEQ ID NO: 823111 - DNA, 15 bp, Homo sapiens
tcttttatgatttta

SEQ ID NO: 823112 - DNA, 15 bp, Homo sapiens
ttcttttatgatttt

SEQ ID NO: 823113 - DNA, 15 bp, Homo sapiens
tttcttttatgattt

SEQ ID NO: 823114 - DNA, 15 bp, Homo sapiens
ttttcttttatgatt

SEQ ID NO: 823115 - DNA, 15 bp, Homo sapiens
tttttcttttatgat

SEQ ID NO: 823116 - DNA, 15 bp, Homo sapiens
atttttcttttatga

SEQ ID NO: 823117 - DNA, 15 bp, Homo sapiens
tatttttcttttatg

SEQ ID NO: 823118 - DNA, 15 bp, Homo sapiens
ttatttttcttttat

SEQ ID NO: 823119 - DNA, 15 bp, Homo sapiens
attatttttctttta

SEQ ID NO: 823120 - DNA, 15 bp, Homo sapiens
gattatttttctttt

SEQ ID NO: 823121 - DNA, 15 bp, Homo sapiens
tgattatttttcttt

SEQ ID NO: 823122 - DNA, 15 bp, Homo sapiens
ctgattatttttctt

SEQ ID NO: 823123 - DNA, 15 bp, Homo sapiens
actgattatttttct

SEQ ID NO: 823124 - DNA, 15 bp, Homo sapiens
aactgattatttttc

SEQ ID NO: 823125 - DNA, 15 bp, Homo sapiens
aaactgattattttt

SEQ ID NO: 823126 - DNA, 15 bp, Homo sapiens
gaaactgattatttt

SEQ ID NO: 823127 - DNA, 15 bp, Homo sapiens
ggaaactgattattt

SEQ ID NO: 823128 - DNA, 15 bp, Homo sapiens
aggaaactgattatt

SEQ ID NO: 823129 - DNA, 15 bp, Homo sapiens
taggaaactgattat

SEQ ID NO: 823130 - DNA, 15 bp, Homo sapiens
ttaggaaactgatta

SEQ ID NO: 823131 - DNA, 15 bp, Homo sapiens
cttaggaaactgatt

SEQ ID NO: 823132 - DNA, 15 bp, Homo sapiens
tcttaggaaactgat

SEQ ID NO: 823133 - DNA, 15 bp, Homo sapiens
ttcttaggaaactga

SEQ ID NO: 823134 - DNA, 15 bp, Homo sapiens
tttcttaggaaactg

SEQ ID NO: 823135 - DNA, 15 bp, Homo sapiens
atttcttaggaaact

SEQ ID NO: 823136 - DNA, 15 bp, Homo sapiens
catttcttaggaaac

SEQ ID NO: 823137 - DNA, 15 bp, Homo sapiens
tcatttcttaggaaa

SEQ ID NO: 823138 - DNA, 15 bp, Homo sapiens
atcatttcttaggaa

SEQ ID NO: 823139 - DNA, 15 bp, Homo sapiens
aatcatttcttagga

SEQ ID NO: 823140 - DNA, 15 bp, Homo sapiens
aaatcatttcttagg

SEQ ID NO: 823141 - DNA, 15 bp, Homo sapiens
aaaatcatttcttag

SEQ ID NO: 823142 - DNA, 15 bp, Homo sapiens
aaaaatcatttctta

SEQ ID NO: 823143 - DNA, 15 bp, Homo sapiens
aaaaaatcatttctt

SEQ ID NO: 823144 - DNA, 15 bp, Homo sapiens
aaaaaaatcatttct

SEQ ID NO: 823145 - DNA, 15 bp, Homo sapiens
aaaaaaaatcatttc

SEQ ID NO: 823146 - DNA, 15 bp, Homo sapiens
gaaaaaaaatcattt

SEQ ID NO: 823147 - DNA, 15 bp, Homo sapiens
ggaaaaaaaatcatt

SEQ ID NO: 823148 - DNA, 15 bp, Homo sapiens
aggaaaaaaaatcat

SEQ ID NO: 823149 - DNA, 15 bp, Homo sapiens
caggaaaaaaaatca

SEQ ID NO: 823150 - DNA, 15 bp, Homo sapiens
tcaggaaaaaaaatc

SEQ ID NO: 823151 - DNA, 15 bp, Homo sapiens
ttcaggaaaaaaaat

SEQ ID NO: 823152 - DNA, 15 bp, Homo sapiens
tttcaggaaaaaaaa

SEQ ID NO: 823153 - DNA, 15 bp, Homo sapiens
ttttcaggaaaaaaa

SEQ ID NO: 823154 - DNA, 15 bp, Homo sapiens
tttttcaggaaaaaa

SEQ ID NO: 823155 - DNA, 15 bp, Homo sapiens
atttttcaggaaaaa

SEQ ID NO: 823156 - DNA, 15 bp, Homo sapiens
tatttttcaggaaaa

SEQ ID NO: 823157 - DNA, 15 bp, Homo sapiens
gtatttttcaggaaa

SEQ ID NO: 823158 - DNA, 15 bp, Homo sapiens
tgtatttttcaggaa

SEQ ID NO: 823159 - DNA, 15 bp, Homo sapiens
gtgtatttttcagga

SEQ ID NO: 823160 - DNA, 15 bp, Homo sapiens
tgtgtatttttcagg

SEQ ID NO: 823161 - DNA, 15 bp, Homo sapiens
atgtgtatttttcag

SEQ ID NO: 823162 - DNA, 15 bp, Homo sapiens
aatgtgtatttttca

SEQ ID NO: 823163 - DNA, 15 bp, Homo sapiens
aaatgtgtatttttc

SEQ ID NO: 823164 - DNA, 15 bp, Homo sapiens
caaatgtgtattttt

SEQ ID NO: 823165 - DNA, 15 bp, Homo sapiens
ccaaatgtgtatttt

SEQ ID NO: 823166 - DNA, 15 bp, Homo sapiens
accaaatgtgtattt

SEQ ID NO: 823167 - DNA, 15 bp, Homo sapiens
aaccaaatgtgtatt

SEQ ID NO: 823168 - DNA, 15 bp, Homo sapiens
aaaccaaatgtgtat

SEQ ID NO: 823169 - DNA, 15 bp, Homo sapiens
gaaaccaaatgtgta

SEQ ID NO: 823170 - DNA, 15 bp, Homo sapiens
tgaaaccaaatgtgt

SEQ ID NO: 823171 - DNA, 15 bp, Homo sapiens
ctgaaaccaaatgtg

SEQ ID NO: 823172 - DNA, 15 bp, Homo sapiens
tctgaaaccaaatgt

SEQ ID NO: 823173 - DNA, 15 bp, Homo sapiens
ctctgaaaccaaatg

SEQ ID NO: 823174 - DNA, 15 bp, Homo sapiens
tctctgaaaccaaat

SEQ ID NO: 823175 - DNA, 15 bp, Homo sapiens
ttctctgaaaccaaa

SEQ ID NO: 823176 - DNA, 15 bp, Homo sapiens
attctctgaaaccaa

SEQ ID NO: 823177 - DNA, 15 bp, Homo sapiens
aattctctgaaacca

SEQ ID NO: 823178 - DNA, 15 bp, Homo sapiens
aaattctctgaaacc

SEQ ID NO: 823179 - DNA, 15 bp, Homo sapiens
caaattctctgaaac

SEQ ID NO: 823180 - DNA, 15 bp, Homo sapiens
acaaattctctgaaa

SEQ ID NO: 823181 - DNA, 15 bp, Homo sapiens
gacaaattctctgaa

SEQ ID NO: 823182 - DNA, 15 bp, Homo sapiens
agacaaattctctga

SEQ ID NO: 823183 - DNA, 15 bp, Homo sapiens
aagacaaattctctg

SEQ ID NO: 823184 - DNA, 15 bp, Homo sapiens
taagacaaattctct

SEQ ID NO: 823185 - DNA, 15 bp, Homo sapiens
ataagacaaattctc

SEQ ID NO: 823186 - DNA, 15 bp, Homo sapiens
aataagacaaattct

SEQ ID NO: 823187 - DNA, 15 bp, Homo sapiens
taataagacaaattc

SEQ ID NO: 823188 - DNA, 15 bp, Homo sapiens
ctaataagacaaatt

SEQ ID NO: 823189 - DNA, 15 bp, Homo sapiens
tctaataagacaaat

SEQ ID NO: 823190 - DNA, 15 bp, Homo sapiens
ctctaataagacaaa

SEQ ID NO: 823191 - DNA, 15 bp, Homo sapiens
tctctaataagacaa

SEQ ID NO: 823192 - DNA, 15 bp, Homo sapiens
gtctctaataagaca

SEQ ID NO: 823193 - DNA, 15 bp, Homo sapiens
ggtctctaataagac

SEQ ID NO: 823194 - DNA, 15 bp, Homo sapiens
tggtctctaataaga

SEQ ID NO: 823195 - DNA, 15 bp, Homo sapiens
atggtctctaataag

SEQ ID NO: 823196 - DNA, 15 bp, Homo sapiens
catggtctctaataa

SEQ ID NO: 823197 - DNA, 15 bp, Homo sapiens
tcatggtctctaata

SEQ ID NO: 823198 - DNA, 15 bp, Homo sapiens
ctcatggtctctaat

SEQ ID NO: 823199 - DNA, 15 bp, Homo sapiens
tctcatggtctctaa

SEQ ID NO: 823200 - DNA, 15 bp, Homo sapiens
atctcatggtctcta

SEQ ID NO: 823201 - DNA, 15 bp, Homo sapiens
catctcatggtctct

SEQ ID NO: 823202 - DNA, 15 bp, Homo sapiens
ccatctcatggtctc

SEQ ID NO: 823203 - DNA, 15 bp, Homo sapiens
tccatctcatggtct

SEQ ID NO: 823204 - DNA, 15 bp, Homo sapiens
atccatctcatggtc

SEQ ID NO: 823205 - DNA, 15 bp, Homo sapiens
aatccatctcatggt

SEQ ID NO: 823206 - DNA, 15 bp, Homo sapiens
aaatccatctcatgg

SEQ ID NO: 823207 - DNA, 15 bp, Homo sapiens
aaaatccatctcatg

SEQ ID NO: 823208 - DNA, 15 bp, Homo sapiens
caaaatccatctcat

SEQ ID NO: 823209 - DNA, 15 bp, Homo sapiens
acaaaatccatctca

SEQ ID NO: 823210 - DNA, 15 bp, Homo sapiens
cacaaaatccatctc

SEQ ID NO: 823211 - DNA, 15 bp, Homo sapiens
tcacaaaatccatct

SEQ ID NO: 823212 - DNA, 15 bp, Homo sapiens
ttcacaaaatccatc

SEQ ID NO: 823213 - DNA, 15 bp, Homo sapiens
tttcacaaaatccat

SEQ ID NO: 823214 - DNA, 15 bp, Homo sapiens
ttttcacaaaatcca

SEQ ID NO: 823215 - DNA, 15 bp, Homo sapiens
gttttcacaaaatcc

SEQ ID NO: 823216 - DNA, 15 bp, Homo sapiens
agttttcacaaaatc

SEQ ID NO: 823217 - DNA, 15 bp, Homo sapiens
tagttttcacaaaat

SEQ ID NO: 823218 - DNA, 15 bp, Homo sapiens
ttagttttcacaaaa

SEQ ID NO: 823219 - DNA, 15 bp, Homo sapiens
tttagttttcacaaa

SEQ ID NO: 823220 - DNA, 15 bp, Homo sapiens
ctttagttttcacaa

SEQ ID NO: 823221 - DNA, 15 bp, Homo sapiens
actttagttttcaca

SEQ ID NO: 823222 - DNA, 15 bp, Homo sapiens
tactttagttttcac

SEQ ID NO: 823223 - DNA, 15 bp, Homo sapiens
ttactttagttttca

SEQ ID NO: 823224 - DNA, 15 bp, Homo sapiens
gttactttagttttc

SEQ ID NO: 823225 - DNA, 15 bp, Homo sapiens
tgttactttagtttt

SEQ ID NO: 823226 - DNA, 15 bp, Homo sapiens
gtgttactttagttt

SEQ ID NO: 823227 - DNA, 15 bp, Homo sapiens
ggtgttactttagtt

SEQ ID NO: 823228 - DNA, 15 bp, Homo sapiens
tggtgttactttagt

SEQ ID NO: 823229 - DNA, 15 bp, Homo sapiens
atggtgttactttag

SEQ ID NO: 823230 - DNA, 15 bp, Homo sapiens
aatggtgttacttta

SEQ ID NO: 823231 - DNA, 15 bp, Homo sapiens
taatggtgttacttt

SEQ ID NO: 823232 - DNA, 15 bp, Homo sapiens
ataatggtgttactt

SEQ ID NO: 823233 - DNA, 15 bp, Homo sapiens
cataatggtgttact

SEQ ID NO: 823234 - DNA, 15 bp, Homo sapiens
tcataatggtgttac

SEQ ID NO: 823235 - DNA, 15 bp, Homo sapiens
ttcataatggtgtta

SEQ ID NO: 823236 - DNA, 15 bp, Homo sapiens
cttcataatggtgtt

SEQ ID NO: 823237 - DNA, 15 bp, Homo sapiens
acttcataatggtgt

SEQ ID NO: 823238 - DNA, 15 bp, Homo sapiens
tacttcataatggtg

SEQ ID NO: 823239 - DNA, 15 bp, Homo sapiens
ttacttcataatggt

SEQ ID NO: 823240 - DNA, 15 bp, Homo sapiens
tttacttcataatgg

SEQ ID NO: 823241 - DNA, 15 bp, Homo sapiens
atttacttcataatg

SEQ ID NO: 823242 - DNA, 15 bp, Homo sapiens
gatttacttcataat

SEQ ID NO: 823243 - DNA, 15 bp, Homo sapiens
cgatttacttcataa

SEQ ID NO: 823244 - DNA, 15 bp, Homo sapiens
acgatttacttcata

SEQ ID NO: 823245 - DNA, 15 bp, Homo sapiens
cacgatttacttcat

SEQ ID NO: 823246 - DNA, 15 bp, Homo sapiens
acacgatttacttca

SEQ ID NO: 823247 - DNA, 15 bp, Homo sapiens
tacacgatttacttc

SEQ ID NO: 823248 - DNA, 15 bp, Homo sapiens
atacacgatttactt

SEQ ID NO: 823249 - DNA, 15 bp, Homo sapiens
tatacacgatttact

SEQ ID NO: 823250 - DNA, 15 bp, Homo sapiens
atatacacgatttac

SEQ ID NO: 823251 - DNA, 15 bp, Homo sapiens
aatatacacgattta

SEQ ID NO: 823252 - DNA, 15 bp, Homo sapiens
aaatatacacgattt

SEQ ID NO: 823253 - DNA, 15 bp, Homo sapiens
caaatatacacgatt

SEQ ID NO: 823254 - DNA, 15 bp, Homo sapiens
gcaaatatacacgat

SEQ ID NO: 823255 - DNA, 15 bp, Homo sapiens
agcaaatatacacga

SEQ ID NO: 823256 - DNA, 15 bp, Homo sapiens
aagcaaatatacacg

SEQ ID NO: 823257 - DNA, 15 bp, Homo sapiens
aaagcaaatatacac

SEQ ID NO: 823258 - DNA, 15 bp, Homo sapiens
gaaagcaaatataca

SEQ ID NO: 823259 - DNA, 15 bp, Homo sapiens
tgaaagcaaatatac

SEQ ID NO: 823260 - DNA, 15 bp, Homo sapiens
ttgaaagcaaatata

SEQ ID NO: 823261 - DNA, 15 bp, Homo sapiens
tttgaaagcaaatat

SEQ ID NO: 823262 - DNA, 15 bp, Homo sapiens
ttttgaaagcaaata

SEQ ID NO: 823263 - DNA, 15 bp, Homo sapiens
gttttgaaagcaaat

SEQ ID NO: 823264 - DNA, 15 bp, Homo sapiens
ggttttgaaagcaaa

SEQ ID NO: 823265 - DNA, 15 bp, Homo sapiens
aggttttgaaagcaa

SEQ ID NO: 823266 - DNA, 15 bp, Homo sapiens
aaggttttgaaagca

SEQ ID NO: 823267 - DNA, 15 bp, Homo sapiens
aaaggttttgaaagc

SEQ ID NO: 823268 - DNA, 15 bp, Homo sapiens
taaaggttttgaaag

SEQ ID NO: 823269 - DNA, 15 bp, Homo sapiens
ataaaggttttgaaa

SEQ ID NO: 823270 - DNA, 15 bp, Homo sapiens
tataaaggttttgaa

SEQ ID NO: 823271 - DNA, 15 bp, Homo sapiens
atataaaggttttga

SEQ ID NO: 823272 - DNA, 15 bp, Homo sapiens
aatataaaggttttg

SEQ ID NO: 823273 - DNA, 15 bp, Homo sapiens
aaatataaaggtttt

SEQ ID NO: 823274 - DNA, 15 bp, Homo sapiens
caaatataaaggttt

SEQ ID NO: 823275 - DNA, 15 bp, Homo sapiens
tcaaatataaaggtt

SEQ ID NO: 823276 - DNA, 15 bp, Homo sapiens
ttcaaatataaaggt

SEQ ID NO: 823277 - DNA, 15 bp, Homo sapiens
attcaaatataaagg

SEQ ID NO: 823278 - DNA, 15 bp, Homo sapiens
tattcaaatataaag

SEQ ID NO: 823279 - DNA, 15 bp, Homo sapiens
gtattcaaatataaa

SEQ ID NO: 823280 - DNA, 15 bp, Homo sapiens
tgtattcaaatataa

SEQ ID NO: 823281 - DNA, 15 bp, Homo sapiens
ttgtattcaaatata

SEQ ID NO: 823282 - DNA, 15 bp, Homo sapiens
tttgtattcaaatat

SEQ ID NO: 823283 - DNA, 15 bp, Homo sapiens
atttgtattcaaata

SEQ ID NO: 823284 - DNA, 15 bp, Homo sapiens
catttgtattcaaat

SEQ ID NO: 823285 - DNA, 15 bp, Homo sapiens
acatttgtattcaaa

SEQ ID NO: 823286 - DNA, 15 bp, Homo sapiens
tacatttgtattcaa

SEQ ID NO: 823287 - DNA, 15 bp, Homo sapiens
gtacatttgtattca

SEQ ID NO: 823288 - DNA, 15 bp, Homo sapiens
agtacatttgtattc

SEQ ID NO: 823289 - DNA, 15 bp, Homo sapiens
gagtacatttgtatt

SEQ ID NO: 823290 - DNA, 15 bp, Homo sapiens
ggagtacatttgtat

SEQ ID NO: 823291 - DNA, 15 bp, Homo sapiens
gggagtacatttgta

SEQ ID NO: 823292 - DNA, 15 bp, Homo sapiens
agggagtacatttgt

SEQ ID NO: 823293 - DNA, 15 bp, Homo sapiens
cagggagtacatttg

SEQ ID NO: 823294 - DNA, 15 bp, Homo sapiens
ccagggagtacattt

SEQ ID NO: 823295 - DNA, 15 bp, Homo sapiens
cccagggagtacatt

SEQ ID NO: 823296 - DNA, 15 bp, Homo sapiens
tcccagggagtacat

SEQ ID NO: 823297 - DNA, 15 bp, Homo sapiens
ttcccagggagtaca

SEQ ID NO: 823298 - DNA, 15 bp, Homo sapiens
cttcccagggagtac

SEQ ID NO: 823299 - DNA, 15 bp, Homo sapiens
acttcccagggagta

SEQ ID NO: 823300 - DNA, 15 bp, Homo sapiens
gacttcccagggagt

SEQ ID NO: 823301 - DNA, 15 bp, Homo sapiens
agacttcccagggag

SEQ ID NO: 823302 - DNA, 15 bp, Homo sapiens
aagacttcccaggga

SEQ ID NO: 823303 - DNA, 15 bp, Homo sapiens
taagacttcccaggg

SEQ ID NO: 823304 - DNA, 15 bp, Homo sapiens
ttaagacttcccagg

SEQ ID NO: 823305 - DNA, 15 bp, Homo sapiens
cttaagacttcccag

SEQ ID NO: 823306 - DNA, 15 bp, Homo sapiens
ccttaagacttccca

SEQ ID NO: 823307 - DNA, 15 bp, Homo sapiens
accttaagacttccc

SEQ ID NO: 823308 - DNA, 15 bp, Homo sapiens
taccttaagacttcc

SEQ ID NO: 823309 - DNA, 15 bp, Homo sapiens
ttaccttaagacttc

SEQ ID NO: 823310 - DNA, 15 bp, Homo sapiens
attaccttaagactt

SEQ ID NO: 823311 - DNA, 15 bp, Homo sapiens
cattaccttaagact

SEQ ID NO: 823312 - DNA, 15 bp, Homo sapiens
ccattaccttaagac

SEQ ID NO: 823313 - DNA, 15 bp, Homo sapiens
ccagcagacagaaaa

SEQ ID NO: 823314 - DNA, 15 bp, Homo sapiens
tccagcagacagaaa

SEQ ID NO: 823315 - DNA, 15 bp, Homo sapiens
ctccagcagacagaa

SEQ ID NO: 823316 - DNA, 15 bp, Homo sapiens
gctccagcagacaga

SEQ ID NO: 823317 - DNA, 15 bp, Homo sapiens
tgctccagcagacag

SEQ ID NO: 823318 - DNA, 15 bp, Homo sapiens
gtgctccagcagaca

SEQ ID NO: 823319 - DNA, 15 bp, Homo sapiens
agtgctccagcagac

SEQ ID NO: 823320 - DNA, 15 bp, Homo sapiens
cagtgctccagcaga

SEQ ID NO: 823321 - DNA, 15 bp, Homo sapiens
tcagtgctccagcag

SEQ ID NO: 823322 - DNA, 15 bp, Homo sapiens
ttcagtgctccagca

SEQ ID NO: 823323 - DNA, 15 bp, Homo sapiens
cttcagtgctccagc

SEQ ID NO: 823324 - DNA, 15 bp, Homo sapiens
gcttcagtgctccag

SEQ ID NO: 823325 - DNA, 15 bp, Homo sapiens
ggcttcagtgctcca

SEQ ID NO: 823326 - DNA, 15 bp, Homo sapiens
aggcttcagtgctcc

SEQ ID NO: 823327 - DNA, 15 bp, Homo sapiens
gaggcttcagtgctc

SEQ ID NO: 823328 - DNA, 15 bp, Homo sapiens
tgaggcttcagtgct

SEQ ID NO: 823329 - DNA, 15 bp, Homo sapiens
gtgaggcttcagtgc

SEQ ID NO: 823330 - DNA, 15 bp, Homo sapiens
tgtgaggcttcagtg

SEQ ID NO: 823331 - DNA, 15 bp, Homo sapiens
atgtgaggcttcagt

SEQ ID NO: 823332 - DNA, 15 bp, Homo sapiens
tatgtgaggcttcag

SEQ ID NO: 823333 - DNA, 15 bp, Homo sapiens
atatgtgaggcttca

SEQ ID NO: 823334 - DNA, 15 bp, Homo sapiens
catatgtgaggcttc

SEQ ID NO: 823335 - DNA, 15 bp, Homo sapiens
acatatgtgaggctt

SEQ ID NO: 823336 - DNA, 15 bp, Homo sapiens
tacatatgtgaggct

SEQ ID NO: 823337 - DNA, 15 bp, Homo sapiens
atacatatgtgaggc

SEQ ID NO: 823338 - DNA, 15 bp, Homo sapiens
aatacatatgtgagg

SEQ ID NO: 823339 - DNA, 15 bp, Homo sapiens
taatacatatgtgag

SEQ ID NO: 823340 - DNA, 15 bp, Homo sapiens
ttaatacatatgtga

SEQ ID NO: 823341 - DNA, 15 bp, Homo sapiens
tttaatacatatgtg

SEQ ID NO: 823342 - DNA, 15 bp, Homo sapiens
ttttaatacatatgt

SEQ ID NO: 823343 - DNA, 15 bp, Homo sapiens
tttttaatacatatg

SEQ ID NO: 823344 - DNA, 15 bp, Homo sapiens
ttttttaatacatat

SEQ ID NO: 823345 - DNA, 15 bp, Homo sapiens
tttttttaatacata

SEQ ID NO: 823346 - DNA, 15 bp, Homo sapiens
atttttttaatacat

SEQ ID NO: 823347 - DNA, 15 bp, Homo sapiens
tatttttttaataca

SEQ ID NO: 823348 - DNA, 15 bp, Homo sapiens
ttatttttttaatac

SEQ ID NO: 823349 - DNA, 15 bp, Homo sapiens
attatttttttaata

SEQ ID NO: 823350 - DNA, 15 bp, Homo sapiens
aattatttttttaat

SEQ ID NO: 823351 - DNA, 15 bp, Homo sapiens
aaattatttttttaa

SEQ ID NO: 823352 - DNA, 15 bp, Homo sapiens
gaaattattttttta

SEQ ID NO: 823353 - DNA, 15 bp, Homo sapiens
ggaaattattttttt

SEQ ID NO: 823354 - DNA, 15 bp, Homo sapiens
tggaaattatttttt

SEQ ID NO: 823355 - DNA, 15 bp, Homo sapiens
atggaaattattttt

SEQ ID NO: 823356 - DNA, 15 bp, Homo sapiens
aatggaaattatttt

SEQ ID NO: 823357 - DNA, 15 bp, Homo sapiens
aaatggaaattattt

SEQ ID NO: 823358 - DNA, 15 bp, Homo sapiens
caaatggaaattatt

SEQ ID NO: 823359 - DNA, 15 bp, Homo sapiens
gcaaatggaaattat

SEQ ID NO: 823360 - DNA, 15 bp, Homo sapiens
tgcaaatggaaatta

SEQ ID NO: 823361 - DNA, 15 bp, Homo sapiens
atgcaaatggaaatt

SEQ ID NO: 823362 - DNA, 15 bp, Homo sapiens
aatgcaaatggaaat

SEQ ID NO: 823363 - DNA, 15 bp, Homo sapiens
aaatgcaaatggaaa

SEQ ID NO: 823364 - DNA, 15 bp, Homo sapiens
gaaatgcaaatggaa

SEQ ID NO: 823365 - DNA, 15 bp, Homo sapiens
tgaaatgcaaatgga

SEQ ID NO: 823366 - DNA, 15 bp, Homo sapiens
ctgaaatgcaaatgg

SEQ ID NO: 823367 - DNA, 15 bp, Homo sapiens
tctgaaatgcaaatg

SEQ ID NO: 823368 - DNA, 15 bp, Homo sapiens
gtctgaaatgcaaat

SEQ ID NO: 823369 - DNA, 15 bp, Homo sapiens
agtctgaaatgcaaa

SEQ ID NO: 823370 - DNA, 15 bp, Homo sapiens
tagtctgaaatgcaa

SEQ ID NO: 823371 - DNA, 15 bp, Homo sapiens
ctagtctgaaatgca

SEQ ID NO: 823372 - DNA, 15 bp, Homo sapiens
tctagtctgaaatgc

SEQ ID NO: 823373 - DNA, 15 bp, Homo sapiens
ttctagtctgaaatg

SEQ ID NO: 823374 - DNA, 15 bp, Homo sapiens
cttctagtctgaaat

SEQ ID NO: 823375 - DNA, 15 bp, Homo sapiens
tcttctagtctgaaa

SEQ ID NO: 823376 - DNA, 15 bp, Homo sapiens
atcttctagtctgaa

SEQ ID NO: 823377 - DNA, 15 bp, Homo sapiens
aatcttctagtctga

SEQ ID NO: 823378 - DNA, 15 bp, Homo sapiens
caatcttctagtctg

SEQ ID NO: 823379 - DNA, 15 bp, Homo sapiens
tcaatcttctagtct

SEQ ID NO: 823380 - DNA, 15 bp, Homo sapiens
ttcaatcttctagtc

SEQ ID NO: 823381 - DNA, 15 bp, Homo sapiens
gttcaatcttctagt

SEQ ID NO: 823382 - DNA, 15 bp, Homo sapiens
cgttcaatcttctag

SEQ ID NO: 823383 - DNA, 15 bp, Homo sapiens
acgttcaatcttcta

SEQ ID NO: 823384 - DNA, 15 bp, Homo sapiens
tacgttcaatcttct

SEQ ID NO: 823385 - DNA, 15 bp, Homo sapiens
atacgttcaatcttc

SEQ ID NO: 823386 - DNA, 15 bp, Homo sapiens
tatacgttcaatctt

SEQ ID NO: 823387 - DNA, 15 bp, Homo sapiens
ctatacgttcaatct

SEQ ID NO: 823388 - DNA, 15 bp, Homo sapiens
actatacgttcaatc

SEQ ID NO: 823389 - DNA, 15 bp, Homo sapiens
cactatacgttcaat

SEQ ID NO: 823390 - DNA, 15 bp, Homo sapiens
acactatacgttcaa

SEQ ID NO: 823391 - DNA, 15 bp, Homo sapiens
tacactatacgttca

SEQ ID NO: 823392 - DNA, 15 bp, Homo sapiens
ttacactatacgttc

SEQ ID NO: 823393 - DNA, 15 bp, Homo sapiens
attacactatacgtt

SEQ ID NO: 823394 - DNA, 15 bp, Homo sapiens
cattacactatacgt

SEQ ID NO: 823395 - DNA, 15 bp, Homo sapiens
acattacactatacg

SEQ ID NO: 823396 - DNA, 15 bp, Homo sapiens
cacattacactatac

SEQ ID NO: 823397 - DNA, 15 bp, Homo sapiens
tcacattacactata

SEQ ID NO: 823398 - DNA, 15 bp, Homo sapiens
atcacattacactat

SEQ ID NO: 823399 - DNA, 15 bp, Homo sapiens
aatcacattacacta

SEQ ID NO: 823400 - DNA, 15 bp, Homo sapiens
caatcacattacact

SEQ ID NO: 823401 - DNA, 15 bp, Homo sapiens
gcaatcacattacac

SEQ ID NO: 823402 - DNA, 15 bp, Homo sapiens
tgcaatcacattaca

SEQ ID NO: 823403 - DNA, 15 bp, Homo sapiens
ttgcaatcacattac

SEQ ID NO: 823404 - DNA, 15 bp, Homo sapiens
tttgcaatcacatta

SEQ ID NO: 823405 - DNA, 15 bp, Homo sapiens
atttgcaatcacatt

SEQ ID NO: 823406 - DNA, 15 bp, Homo sapiens
tatttgcaatcacat

SEQ ID NO: 823407 - DNA, 15 bp, Homo sapiens
ttatttgcaatcaca

SEQ ID NO: 823408 - DNA, 15 bp, Homo sapiens
attatttgcaatcac

SEQ ID NO: 823409 - DNA, 15 bp, Homo sapiens
aattatttgcaatca

SEQ ID NO: 823410 - DNA, 15 bp, Homo sapiens
taattatttgcaatc

SEQ ID NO: 823411 - DNA, 15 bp, Homo sapiens
ataattatttgcaat

SEQ ID NO: 823412 - DNA, 15 bp, Homo sapiens
tataattatttgcaa

SEQ ID NO: 823413 - DNA, 15 bp, Homo sapiens
atataattatttgca

SEQ ID NO: 823414 - DNA, 15 bp, Homo sapiens
aatataattatttgc

SEQ ID NO: 823415 - DNA, 15 bp, Homo sapiens
caatataattatttg

SEQ ID NO: 823416 - DNA, 15 bp, Homo sapiens
tcaatataattattt

SEQ ID NO: 823417 - DNA, 15 bp, Homo sapiens
ttcaatataattatt

SEQ ID NO: 823418 - DNA, 15 bp, Homo sapiens
tttcaatataattat

SEQ ID NO: 823419 - DNA, 15 bp, Homo sapiens
atttcaatataatta

SEQ ID NO: 823420 - DNA, 15 bp, Homo sapiens
catttcaatataatt

SEQ ID NO: 823421 - DNA, 15 bp, Homo sapiens
tcatttcaatataat

SEQ ID NO: 823422 - DNA, 15 bp, Homo sapiens
ctcatttcaatataa

SEQ ID NO: 823423 - DNA, 15 bp, Homo sapiens
tctcatttcaatata

SEQ ID NO: 823424 - DNA, 15 bp, Homo sapiens
gtctcatttcaatat

SEQ ID NO: 823425 - DNA, 15 bp, Homo sapiens
tgtctcatttcaata

SEQ ID NO: 823426 - DNA, 15 bp, Homo sapiens
ctgtctcatttcaat

SEQ ID NO: 823427 - DNA, 15 bp, Homo sapiens
tctgtctcatttcaa

SEQ ID NO: 823428 - DNA, 15 bp, Homo sapiens
ctctgtctcatttca

SEQ ID NO: 823429 - DNA, 15 bp, Homo sapiens
tctctgtctcatttc

SEQ ID NO: 823430 - DNA, 15 bp, Homo sapiens
ctctctgtctcattt

SEQ ID NO: 823431 - DNA, 15 bp, Homo sapiens
cctctctgtctcatt

SEQ ID NO: 823432 - DNA, 15 bp, Homo sapiens
tcctctctgtctcat

SEQ ID NO: 823433 - DNA, 15 bp, Homo sapiens
atcctctctgtctca

SEQ ID NO: 823434 - DNA, 15 bp, Homo sapiens
catcctctctgtctc

SEQ ID NO: 823435 - DNA, 15 bp, Homo sapiens
acatcctctctgtct

SEQ ID NO: 823436 - DNA, 15 bp, Homo sapiens
tacatcctctctgtc

SEQ ID NO: 823437 - DNA, 15 bp, Homo sapiens
ctacatcctctctgt

SEQ ID NO: 823438 - DNA, 15 bp, Homo sapiens
actacatcctctctg

SEQ ID NO: 823439 - DNA, 15 bp, Homo sapiens
tactacatcctctct

SEQ ID NO: 823440 - DNA, 15 bp, Homo sapiens
atactacatcctctc

SEQ ID NO: 823441 - DNA, 15 bp, Homo sapiens
gatactacatcctct

SEQ ID NO: 823442 - DNA, 15 bp, Homo sapiens
agatactacatcctc

SEQ ID NO: 823443 - DNA, 15 bp, Homo sapiens
tagatactacatcct

SEQ ID NO: 823444 - DNA, 15 bp, Homo sapiens
gtagatactacatcc

SEQ ID NO: 823445 - DNA, 15 bp, Homo sapiens
agtagatactacatc

SEQ ID NO: 823446 - DNA, 15 bp, Homo sapiens
cagtagatactacat

SEQ ID NO: 823447 - DNA, 15 bp, Homo sapiens
acagtagatactaca

SEQ ID NO: 823448 - DNA, 15 bp, Homo sapiens
gacagtagatactac

SEQ ID NO: 823449 - DNA, 15 bp, Homo sapiens
tgacagtagatacta

SEQ ID NO: 823450 - DNA, 15 bp, Homo sapiens
atgacagtagatact

SEQ ID NO: 823451 - DNA, 15 bp, Homo sapiens
tatgacagtagatac

SEQ ID NO: 823452 - DNA, 15 bp, Homo sapiens
ttatgacagtagata

SEQ ID NO: 823453 - DNA, 15 bp, Homo sapiens
attatgacagtagat

SEQ ID NO: 823454 - DNA, 15 bp, Homo sapiens
aattatgacagtaga

SEQ ID NO: 823455 - DNA, 15 bp, Homo sapiens
aaattatgacagtag

SEQ ID NO: 823456 - DNA, 15 bp, Homo sapiens
aaaattatgacagta

SEQ ID NO: 823457 - DNA, 15 bp, Homo sapiens
aaaaattatgacagt

SEQ ID NO: 823458 - DNA, 15 bp, Homo sapiens
gaaaaattatgacag

SEQ ID NO: 823459 - DNA, 15 bp, Homo sapiens
tgaaaaattatgaca

SEQ ID NO: 823460 - DNA, 15 bp, Homo sapiens
ttgaaaaattatgac

SEQ ID NO: 823461 - DNA, 15 bp, Homo sapiens
tttgaaaaattatga

SEQ ID NO: 823462 - DNA, 15 bp, Homo sapiens
ttttgaaaaattatg

SEQ ID NO: 823463 - DNA, 15 bp, Homo sapiens
gttttgaaaaattat

SEQ ID NO: 823464 - DNA, 15 bp, Homo sapiens
ggttttgaaaaatta

SEQ ID NO: 823465 - DNA, 15 bp, Homo sapiens
gggttttgaaaaatt

SEQ ID NO: 823466 - DNA, 15 bp, Homo sapiens
tgggttttgaaaaat

SEQ ID NO: 823467 - DNA, 15 bp, Homo sapiens
gtgggttttgaaaaa

SEQ ID NO: 823468 - DNA, 15 bp, Homo sapiens
ggtgggttttgaaaa

SEQ ID NO: 823469 - DNA, 15 bp, Homo sapiens
aggtgggttttgaaa

SEQ ID NO: 823470 - DNA, 15 bp, Homo sapiens
caggtgggttttgaa

SEQ ID NO: 823471 - DNA, 15 bp, Homo sapiens
gcaggtgggttttga

SEQ ID NO: 823472 - DNA, 15 bp, Homo sapiens
tgcaggtgggttttg

SEQ ID NO: 823473 - DNA, 15 bp, Homo sapiens
ttgcaggtgggtttt

SEQ ID NO: 823474 - DNA, 15 bp, Homo sapiens
gttgcaggtgggttt

SEQ ID NO: 823475 - DNA, 15 bp, Homo sapiens
agttgcaggtgggtt

SEQ ID NO: 823476 - DNA, 15 bp, Homo sapiens
aagttgcaggtgggt

SEQ ID NO: 823477 - DNA, 15 bp, Homo sapiens
caagttgcaggtggg

SEQ ID NO: 823478 - DNA, 15 bp, Homo sapiens
tcaagttgcaggtgg

SEQ ID NO: 823479 - DNA, 15 bp, Homo sapiens
ttcaagttgcaggtg

SEQ ID NO: 823480 - DNA, 15 bp, Homo sapiens
attcaagttgcaggt

SEQ ID NO: 823481 - DNA, 15 bp, Homo sapiens
aattcaagttgcagg

SEQ ID NO: 823482 - DNA, 15 bp, Homo sapiens
taattcaagttgcag

SEQ ID NO: 823483 - DNA, 15 bp, Homo sapiens
ttaattcaagttgca

SEQ ID NO: 823484 - DNA, 15 bp, Homo sapiens
tttaattcaagttgc

SEQ ID NO: 823485 - DNA, 15 bp, Homo sapiens
ttttaattcaagttg

SEQ ID NO: 823486 - DNA, 15 bp, Homo sapiens
cttttaattcaagtt

SEQ ID NO: 823487 - DNA, 15 bp, Homo sapiens
tcttttaattcaagt

SEQ ID NO: 823488 - DNA, 15 bp, Homo sapiens
ttcttttaattcaag

SEQ ID NO: 823489 - DNA, 15 bp, Homo sapiens
gttcttttaattcaa

SEQ ID NO: 823490 - DNA, 15 bp, Homo sapiens
ggttcttttaattca

SEQ ID NO: 823491 - DNA, 15 bp, Homo sapiens
tggttcttttaattc

SEQ ID NO: 823492 - DNA, 15 bp, Homo sapiens
gtggttcttttaatt

SEQ ID NO: 823493 - DNA, 15 bp, Homo sapiens
agtggttcttttaat

SEQ ID NO: 823494 - DNA, 15 bp, Homo sapiens
aagtggttcttttaa

SEQ ID NO: 823495 - DNA, 15 bp, Homo sapiens
caagtggttctttta

SEQ ID NO: 823496 - DNA, 15 bp, Homo sapiens
ccaagtggttctttt

SEQ ID NO: 823497 - DNA, 15 bp, Homo sapiens
cccaagtggttcttt

SEQ ID NO: 823498 - DNA, 15 bp, Homo sapiens
acccaagtggttctt

SEQ ID NO: 823499 - DNA, 15 bp, Homo sapiens
aacccaagtggttct

SEQ ID NO: 823500 - DNA, 15 bp, Homo sapiens
aaacccaagtggttc

SEQ ID NO: 823501 - DNA, 15 bp, Homo sapiens
aaaacccaagtggtt

SEQ ID NO: 823502 - DNA, 15 bp, Homo sapiens
aaaaacccaagtggt

SEQ ID NO: 823503 - DNA, 15 bp, Homo sapiens
aaaaaacccaagtgg

SEQ ID NO: 823504 - DNA, 15 bp, Homo sapiens
aaaaaaacccaagtg

SEQ ID NO: 823505 - DNA, 15 bp, Homo sapiens
aaaaaaaacccaagt

SEQ ID NO: 823506 - DNA, 15 bp, Homo sapiens
aaaaaaaaacccaag

SEQ ID NO: 823507 - DNA, 15 bp, Homo sapiens
aaaaaaaaaacccaa

SEQ ID NO: 823508 - DNA, 15 bp, Homo sapiens
aaaaaaaaaaaccca

SEQ ID NO: 823509 - DNA, 15 bp, Homo sapiens
caaaaaaaaaaaccc

SEQ ID NO: 823510 - DNA, 15 bp, Homo sapiens
acaaaaaaaaaaacc

SEQ ID NO: 823511 - DNA, 15 bp, Homo sapiens
aacaaaaaaaaaaac

SEQ ID NO: 823512 - DNA, 15 bp, Homo sapiens
aaacaaaaaaaaaaa

SEQ ID NO: 823513 - DNA, 15 bp, Homo sapiens
gaaacaaaaaaaaaa

SEQ ID NO: 823514 - DNA, 15 bp, Homo sapiens
tgaaacaaaaaaaaa

SEQ ID NO: 823515 - DNA, 15 bp, Homo sapiens
ttgaaacaaaaaaaa

SEQ ID NO: 823516 - DNA, 15 bp, Homo sapiens
tttgaaacaaaaaaa

SEQ ID NO: 823517 - DNA, 15 bp, Homo sapiens
gtttgaaacaaaaaa

SEQ ID NO: 823518 - DNA, 15 bp, Homo sapiens
cgtttgaaacaaaaa

SEQ ID NO: 823519 - DNA, 15 bp, Homo sapiens
gcgtttgaaacaaaa

SEQ ID NO: 823520 - DNA, 15 bp, Homo sapiens
tgcgtttgaaacaaa

SEQ ID NO: 823521 - DNA, 15 bp, Homo sapiens
ttgcgtttgaaacaa

SEQ ID NO: 823522 - DNA, 15 bp, Homo sapiens
tttgcgtttgaaaca

SEQ ID NO: 823523 - DNA, 15 bp, Homo sapiens
atttgcgtttgaaac

SEQ ID NO: 823524 - DNA, 15 bp, Homo sapiens
gatttgcgtttgaaa

SEQ ID NO: 823525 - DNA, 15 bp, Homo sapiens
ggatttgcgtttgaa

SEQ ID NO: 823526 - DNA, 15 bp, Homo sapiens
aggatttgcgtttga

SEQ ID NO: 823527 - DNA, 15 bp, Homo sapiens
caggatttgcgtttg

SEQ ID NO: 823528 - DNA, 15 bp, Homo sapiens
ccaggatttgcgttt

SEQ ID NO: 823529 - DNA, 15 bp, Homo sapiens
tccaggatttgcgtt

SEQ ID NO: 823530 - DNA, 15 bp, Homo sapiens
ttccaggatttgcgt

SEQ ID NO: 823531 - DNA, 15 bp, Homo sapiens
tttccaggatttgcg

SEQ ID NO: 823532 - DNA, 15 bp, Homo sapiens
gtttccaggatttgc

SEQ ID NO: 823533 - DNA, 15 bp, Homo sapiens
ggtttccaggatttg

SEQ ID NO: 823534 - DNA, 15 bp, Homo sapiens
aggtttccaggattt

SEQ ID NO: 823535 - DNA, 15 bp, Homo sapiens
taggtttccaggatt

SEQ ID NO: 823536 - DNA, 15 bp, Homo sapiens
gtaggtttccaggat

SEQ ID NO: 823537 - DNA, 15 bp, Homo sapiens
agtaggtttccagga

SEQ ID NO: 823538 - DNA, 15 bp, Homo sapiens
cagtaggtttccagg

SEQ ID NO: 823539 - DNA, 15 bp, Homo sapiens
tcagtaggtttccag

SEQ ID NO: 823540 - DNA, 15 bp, Homo sapiens
ctcagtaggtttcca

SEQ ID NO: 823541 - DNA, 15 bp, Homo sapiens
tctcagtaggtttcc

SEQ ID NO: 823542 - DNA, 15 bp, Homo sapiens
gtctcagtaggtttc

SEQ ID NO: 823543 - DNA, 15 bp, Homo sapiens
agtctcagtaggttt

SEQ ID NO: 823544 - DNA, 15 bp, Homo sapiens
gagtctcagtaggtt

SEQ ID NO: 823545 - DNA, 15 bp, Homo sapiens
tgagtctcagtaggt

SEQ ID NO: 823546 - DNA, 15 bp, Homo sapiens
atgagtctcagtagg

SEQ ID NO: 823547 - DNA, 15 bp, Homo sapiens
aatgagtctcagtag

SEQ ID NO: 823548 - DNA, 15 bp, Homo sapiens
gaatgagtctcagta

SEQ ID NO: 823549 - DNA, 15 bp, Homo sapiens
tgaatgagtctcagt

SEQ ID NO: 823550 - DNA, 15 bp, Homo sapiens
ctgaatgagtctcag

SEQ ID NO: 823551 - DNA, 15 bp, Homo sapiens
actgaatgagtctca

SEQ ID NO: 823552 - DNA, 15 bp, Homo sapiens
gactgaatgagtctc

SEQ ID NO: 823553 - DNA, 15 bp, Homo sapiens
tgactgaatgagtct

SEQ ID NO: 823554 - DNA, 15 bp, Homo sapiens
ctgactgaatgagtc

SEQ ID NO: 823555 - DNA, 15 bp, Homo sapiens
actgactgaatgagt

SEQ ID NO: 823556 - DNA, 15 bp, Homo sapiens
tactgactgaatgag

SEQ ID NO: 823557 - DNA, 15 bp, Homo sapiens
atactgactgaatga

SEQ ID NO: 823558 - DNA, 15 bp, Homo sapiens
gatactgactgaatg

SEQ ID NO: 823559 - DNA, 15 bp, Homo sapiens
agatactgactgaat

SEQ ID NO: 823560 - DNA, 15 bp, Homo sapiens
gagatactgactgaa

SEQ ID NO: 823561 - DNA, 15 bp, Homo sapiens
agagatactgactga

SEQ ID NO: 823562 - DNA, 15 bp, Homo sapiens
tagagatactgactg

SEQ ID NO: 823563 - DNA, 15 bp, Homo sapiens
ttagagatactgact

SEQ ID NO: 823564 - DNA, 15 bp, Homo sapiens
cttagagatactgac

SEQ ID NO: 823565 - DNA, 15 bp, Homo sapiens
tcttagagatactga

SEQ ID NO: 823566 - DNA, 15 bp, Homo sapiens
ctcttagagatactg

SEQ ID NO: 823567 - DNA, 15 bp, Homo sapiens
cctcttagagatact

SEQ ID NO: 823568 - DNA, 15 bp, Homo sapiens
gcctcttagagatac

SEQ ID NO: 823569 - DNA, 15 bp, Homo sapiens
tgcctcttagagata

SEQ ID NO: 823570 - DNA, 15 bp, Homo sapiens
ttgcctcttagagat

SEQ ID NO: 823571 - DNA, 15 bp, Homo sapiens
cttgcctcttagaga

SEQ ID NO: 823572 - DNA, 15 bp, Homo sapiens
gcttgcctcttagag

SEQ ID NO: 823573 - DNA, 15 bp, Homo sapiens
agcttgcctcttaga

SEQ ID NO: 823574 - DNA, 15 bp, Homo sapiens
aagcttgcctcttag

SEQ ID NO: 823575 - DNA, 15 bp, Homo sapiens
caagcttgcctctta

SEQ ID NO: 823576 - DNA, 15 bp, Homo sapiens
tcaagcttgcctctt

SEQ ID NO: 823577 - DNA, 15 bp, Homo sapiens
ctcaagcttgcctct

SEQ ID NO: 823578 - DNA, 15 bp, Homo sapiens
tctcaagcttgcctc

SEQ ID NO: 823579 - DNA, 15 bp, Homo sapiens
gtctcaagcttgcct

SEQ ID NO: 823580 - DNA, 15 bp, Homo sapiens
agtctcaagcttgcc

SEQ ID NO: 823581 - DNA, 15 bp, Homo sapiens
cagtctcaagcttgc

SEQ ID NO: 823582 - DNA, 15 bp, Homo sapiens
acagtctcaagcttg

SEQ ID NO: 823583 - DNA, 15 bp, Homo sapiens
tacagtctcaagctt

SEQ ID NO: 823584 - DNA, 15 bp, Homo sapiens
atacagtctcaagct

SEQ ID NO: 823585 - DNA, 15 bp, Homo sapiens
tatacagtctcaagc

SEQ ID NO: 823586 - DNA, 15 bp, Homo sapiens
atatacagtctcaag

SEQ ID NO: 823587 - DNA, 15 bp, Homo sapiens
aatatacagtctcaa

SEQ ID NO: 823588 - DNA, 15 bp, Homo sapiens
aaatatacagtctca

SEQ ID NO: 823589 - DNA, 15 bp, Homo sapiens
taaatatacagtctc

SEQ ID NO: 823590 - DNA, 15 bp, Homo sapiens
ttaaatatacagtct

SEQ ID NO: 823591 - DNA, 15 bp, Homo sapiens
tttaaatatacagtc

SEQ ID NO: 823592 - DNA, 15 bp, Homo sapiens
tttttaaatatacag

SEQ ID NO: 823593 - DNA, 15 bp, Homo sapiens
ctttttaaatataca

SEQ ID NO: 823594 - DNA, 15 bp, Homo sapiens
gctttttaaatatac

SEQ ID NO: 823595 - DNA, 15 bp, Homo sapiens
tgctttttaaatata

SEQ ID NO: 823596 - DNA, 15 bp, Homo sapiens
atgctttttaaatat

SEQ ID NO: 823597 - DNA, 15 bp, Homo sapiens
gatgctttttaaata

SEQ ID NO: 823598 - DNA, 15 bp, Homo sapiens
agatgctttttaaat

SEQ ID NO: 823599 - DNA, 15 bp, Homo sapiens
gagatgctttttaaa

SEQ ID NO: 823600 - DNA, 15 bp, Homo sapiens
tgagatgctttttaa

SEQ ID NO: 823601 - DNA, 15 bp, Homo sapiens
ctgagatgcttttta

SEQ ID NO: 823602 - DNA, 15 bp, Homo sapiens
cctgagatgcttttt

SEQ ID NO: 823603 - DNA, 15 bp, Homo sapiens
acctgagatgctttt

SEQ ID NO: 823604 - DNA, 15 bp, Homo sapiens
cacctgagatgcttt

SEQ ID NO: 823605 - DNA, 15 bp, Homo sapiens
tcacctgagatgctt

SEQ ID NO: 823606 - DNA, 15 bp, Homo sapiens
atcacctgagatgct

SEQ ID NO: 823607 - DNA, 15 bp, Homo sapiens
aatcacctgagatgc

SEQ ID NO: 823608 - DNA, 15 bp, Homo sapiens
aaatcacctgagatg

SEQ ID NO: 823609 - DNA, 15 bp, Homo sapiens
aaaatcacctgagat

SEQ ID NO: 823610 - DNA, 15 bp, Homo sapiens
aaaaatcacctgaga

SEQ ID NO: 823611 - DNA, 15 bp, Homo sapiens
taaaaatcacctgag

SEQ ID NO: 823612 - DNA, 15 bp, Homo sapiens
gtaaaaatcacctga

SEQ ID NO: 823613 - DNA, 15 bp, Homo sapiens
tgtaaaaatcacctg

SEQ ID NO: 823614 - DNA, 15 bp, Homo sapiens
gtgtaaaaatcacct

SEQ ID NO: 823615 - DNA, 15 bp, Homo sapiens
tgtgtaaaaatcacc

SEQ ID NO: 823616 - DNA, 15 bp, Homo sapiens
atgtgtaaaaatcac

SEQ ID NO: 823617 - DNA, 15 bp, Homo sapiens
catgtgtaaaaatca

SEQ ID NO: 823618 - DNA, 15 bp, Homo sapiens
gcatgtgtaaaaatc

SEQ ID NO: 823619 - DNA, 15 bp, Homo sapiens
agcatgtgtaaaaat

SEQ ID NO: 823620 - DNA, 15 bp, Homo sapiens
tagcatgtgtaaaaa

SEQ ID NO: 823621 - DNA, 15 bp, Homo sapiens
ttagcatgtgtaaaa

SEQ ID NO: 823622 - DNA, 15 bp, Homo sapiens
cttagcatgtgtaaa

SEQ ID NO: 823623 - DNA, 15 bp, Homo sapiens
ccttagcatgtgtaa

SEQ ID NO: 823624 - DNA, 15 bp, Homo sapiens
gccttagcatgtgta

SEQ ID NO: 823625 - DNA, 15 bp, Homo sapiens
agccttagcatgtgt

SEQ ID NO: 823626 - DNA, 15 bp, Homo sapiens
aagccttagcatgtg

SEQ ID NO: 823627 - DNA, 15 bp, Homo sapiens
taagccttagcatgt

SEQ ID NO: 823628 - DNA, 15 bp, Homo sapiens
ttaagccttagcatg

SEQ ID NO: 823629 - DNA, 15 bp, Homo sapiens
cttaagccttagcat

SEQ ID NO: 823630 - DNA, 15 bp, Homo sapiens
tcttaagccttagca

SEQ ID NO: 823631 - DNA, 15 bp, Homo sapiens
ttcttaagccttagc

SEQ ID NO: 823632 - DNA, 15 bp, Homo sapiens
gttcttaagccttag

SEQ ID NO: 823633 - DNA, 15 bp, Homo sapiens
ggttcttaagcctta

SEQ ID NO: 823634 - DNA, 15 bp, Homo sapiens
tggttcttaagcctt

SEQ ID NO: 823635 - DNA, 15 bp, Homo sapiens
gtggttcttaagcct

SEQ ID NO: 823636 - DNA, 15 bp, Homo sapiens
agtggttcttaagcc

SEQ ID NO: 823637 - DNA, 15 bp, Homo sapiens
aagtggttcttaagc

SEQ ID NO: 823638 - DNA, 15 bp, Homo sapiens
gaagtggttcttaag

SEQ ID NO: 823639 - DNA, 15 bp, Homo sapiens
agaagtggttcttaa

SEQ ID NO: 823640 - DNA, 15 bp, Homo sapiens
gagaagtggttctta

SEQ ID NO: 823641 - DNA, 15 bp, Homo sapiens
agagaagtggttctt

SEQ ID NO: 823642 - DNA, 15 bp, Homo sapiens
cagagaagtggttct

SEQ ID NO: 823643 - DNA, 15 bp, Homo sapiens
acagagaagtggttc

SEQ ID NO: 823644 - DNA, 15 bp, Homo sapiens
tacagagaagtggtt

SEQ ID NO: 823645 - DNA, 15 bp, Homo sapiens
ctacagagaagtggt

SEQ ID NO: 823646 - DNA, 15 bp, Homo sapiens
gctacagagaagtgg

SEQ ID NO: 823647 - DNA, 15 bp, Homo sapiens
agctacagagaagtg

SEQ ID NO: 823648 - DNA, 15 bp, Homo sapiens
aagctacagagaagt

SEQ ID NO: 823649 - DNA, 15 bp, Homo sapiens
taagctacagagaag

SEQ ID NO: 823650 - DNA, 15 bp, Homo sapiens
ataagctacagagaa

SEQ ID NO: 823651 - DNA, 15 bp, Homo sapiens
tataagctacagaga

SEQ ID NO: 823652 - DNA, 15 bp, Homo sapiens
atataagctacagag

SEQ ID NO: 823653 - DNA, 15 bp, Homo sapiens
catataagctacaga

SEQ ID NO: 823654 - DNA, 15 bp, Homo sapiens
acatataagctacag

SEQ ID NO: 823655 - DNA, 15 bp, Homo sapiens
aacatataagctaca

SEQ ID NO: 823656 - DNA, 15 bp, Homo sapiens
taacatataagctac

SEQ ID NO: 823657 - DNA, 15 bp, Homo sapiens
ataacatataagcta

SEQ ID NO: 823658 - DNA, 15 bp, Homo sapiens
aataacatataagct

SEQ ID NO: 823659 - DNA, 15 bp, Homo sapiens
aaataacatataagc

SEQ ID NO: 823660 - DNA, 15 bp, Homo sapiens
aaaataacatataag

SEQ ID NO: 823661 - DNA, 15 bp, Homo sapiens
gaaaataacatataa

SEQ ID NO: 823662 - DNA, 15 bp, Homo sapiens
tgaaaataacatata

SEQ ID NO: 823663 - DNA, 15 bp, Homo sapiens
ttgaaaataacatat

SEQ ID NO: 823664 - DNA, 15 bp, Homo sapiens
attgaaaataacata

SEQ ID NO: 823665 - DNA, 15 bp, Homo sapiens
cattgaaaataacat

SEQ ID NO: 823666 - DNA, 15 bp, Homo sapiens
acattgaaaataaca

SEQ ID NO: 823667 - DNA, 15 bp, Homo sapiens
aacattgaaaataac

SEQ ID NO: 823668 - DNA, 15 bp, Homo sapiens
gaacattgaaaataa

SEQ ID NO: 823669 - DNA, 15 bp, Homo sapiens
ggaacattgaaaata

SEQ ID NO: 823670 - DNA, 15 bp, Homo sapiens
aggaacattgaaaat

SEQ ID NO: 823671 - DNA, 15 bp, Homo sapiens
gaggaacattgaaaa

SEQ ID NO: 823672 - DNA, 15 bp, Homo sapiens
tgaggaacattgaaa

SEQ ID NO: 823673 - DNA, 15 bp, Homo sapiens
ttgaggaacattgaa

SEQ ID NO: 823674 - DNA, 15 bp, Homo sapiens
tttgaggaacattga

SEQ ID NO: 823675 - DNA, 15 bp, Homo sapiens
ctttgaggaacattg

SEQ ID NO: 823676 - DNA, 15 bp, Homo sapiens
gctttgaggaacatt

SEQ ID NO: 823677 - DNA, 15 bp, Homo sapiens
ggctttgaggaacat

SEQ ID NO: 823678 - DNA, 15 bp, Homo sapiens
tggctttgaggaaca

SEQ ID NO: 823679 - DNA, 15 bp, Homo sapiens
ttggctttgaggaac

SEQ ID NO: 823680 - DNA, 15 bp, Homo sapiens
cttggctttgaggaa

SEQ ID NO: 823681 - DNA, 15 bp, Homo sapiens
acttggctttgagga

SEQ ID NO: 823682 - DNA, 15 bp, Homo sapiens
aacttggctttgagg

SEQ ID NO: 823683 - DNA, 15 bp, Homo sapiens
taacttggctttgag

SEQ ID NO: 823684 - DNA, 15 bp, Homo sapiens
ctaacttggctttga

SEQ ID NO: 823685 - DNA, 15 bp, Homo sapiens
tctaacttggctttg

SEQ ID NO: 823686 - DNA, 15 bp, Homo sapiens
ttctaacttggcttt

SEQ ID NO: 823687 - DNA, 15 bp, Homo sapiens
attctaacttggctt

SEQ ID NO: 823688 - DNA, 15 bp, Homo sapiens
aattctaacttggct

SEQ ID NO: 823689 - DNA, 15 bp, Homo sapiens
aaattctaacttggc

SEQ ID NO: 823690 - DNA, 15 bp, Homo sapiens
gaaattctaacttgg

SEQ ID NO: 823691 - DNA, 15 bp, Homo sapiens
ggaaattctaacttg

SEQ ID NO: 823692 - DNA, 15 bp, Homo sapiens
tggaaattctaactt

SEQ ID NO: 823693 - DNA, 15 bp, Homo sapiens
ttggaaattctaact

SEQ ID NO: 823694 - DNA, 15 bp, Homo sapiens
tttggaaattctaac

SEQ ID NO: 823695 - DNA, 15 bp, Homo sapiens
ctttggaaattctaa

SEQ ID NO: 823696 - DNA, 15 bp, Homo sapiens
actttggaaattcta

SEQ ID NO: 823697 - DNA, 15 bp, Homo sapiens
cactttggaaattct

SEQ ID NO: 823698 - DNA, 15 bp, Homo sapiens
acactttggaaattc

SEQ ID NO: 823699 - DNA, 15 bp, Homo sapiens
aacactttggaaatt

SEQ ID NO: 823700 - DNA, 15 bp, Homo sapiens
taacactttggaaat

SEQ ID NO: 823701 - DNA, 15 bp, Homo sapiens
ttaacactttggaaa

SEQ ID NO: 823702 - DNA, 15 bp, Homo sapiens
cttaacactttggaa

SEQ ID NO: 823703 - DNA, 15 bp, Homo sapiens
tcttaacactttgga

SEQ ID NO: 823704 - DNA, 15 bp, Homo sapiens
ttcttaacactttgg

SEQ ID NO: 823705 - DNA, 15 bp, Homo sapiens
attcttaacactttg

SEQ ID NO: 823706 - DNA, 15 bp, Homo sapiens
gattcttaacacttt

SEQ ID NO: 823707 - DNA, 15 bp, Homo sapiens
ggattcttaacactt

SEQ ID NO: 823708 - DNA, 15 bp, Homo sapiens
tggattcttaacact

SEQ ID NO: 823709 - DNA, 15 bp, Homo sapiens
atggattcttaacac

SEQ ID NO: 823710 - DNA, 15 bp, Homo sapiens
aatggattcttaaca

SEQ ID NO: 823711 - DNA, 15 bp, Homo sapiens
taatggattcttaac

SEQ ID NO: 823712 - DNA, 15 bp, Homo sapiens
ctaatggattcttaa

SEQ ID NO: 823713 - DNA, 15 bp, Homo sapiens
tctaatggattctta

SEQ ID NO: 823714 - DNA, 15 bp, Homo sapiens
gtctaatggattctt

SEQ ID NO: 823715 - DNA, 15 bp, Homo sapiens
tgtctaatggattct

SEQ ID NO: 823716 - DNA, 15 bp, Homo sapiens
ttgtctaatggattc

SEQ ID NO: 823717 - DNA, 15 bp, Homo sapiens
attgtctaatggatt

SEQ ID NO: 823718 - DNA, 15 bp, Homo sapiens
gattgtctaatggat

SEQ ID NO: 823719 - DNA, 15 bp, Homo sapiens
tgattgtctaatgga

SEQ ID NO: 823720 - DNA, 15 bp, Homo sapiens
gtgattgtctaatgg

SEQ ID NO: 823721 - DNA, 15 bp, Homo sapiens
tgtgattgtctaatg

SEQ ID NO: 823722 - DNA, 15 bp, Homo sapiens
ctgtgattgtctaat

SEQ ID NO: 823723 - DNA, 15 bp, Homo sapiens
tctgtgattgtctaa

SEQ ID NO: 823724 - DNA, 15 bp, Homo sapiens
ttctgtgattgtcta

SEQ ID NO: 823725 - DNA, 15 bp, Homo sapiens
attctgtgattgtct

SEQ ID NO: 823726 - DNA, 15 bp, Homo sapiens
aattctgtgattgtc

SEQ ID NO: 823727 - DNA, 15 bp, Homo sapiens
caattctgtgattgt

SEQ ID NO: 823728 - DNA, 15 bp, Homo sapiens
acaattctgtgattg

SEQ ID NO: 823729 - DNA, 15 bp, Homo sapiens
gacaattctgtgatt

SEQ ID NO: 823730 - DNA, 15 bp, Homo sapiens
agacaattctgtgat

SEQ ID NO: 823731 - DNA, 15 bp, Homo sapiens
aagacaattctgtga

SEQ ID NO: 823732 - DNA, 15 bp, Homo sapiens
aaagacaattctgtg

SEQ ID NO: 823733 - DNA, 15 bp, Homo sapiens
aaaagacaattctgt

SEQ ID NO: 823734 - DNA, 15 bp, Homo sapiens
aaaaagacaattctg

SEQ ID NO: 823735 - DNA, 15 bp, Homo sapiens
gaaaaagacaattct

SEQ ID NO: 823736 - DNA, 15 bp, Homo sapiens
ggaaaaagacaattc

SEQ ID NO: 823737 - DNA, 15 bp, Homo sapiens
aggaaaaagacaatt

SEQ ID NO: 823738 - DNA, 15 bp, Homo sapiens
aaggaaaaagacaat

SEQ ID NO: 823739 - DNA, 15 bp, Homo sapiens
aaaggaaaaagacaa

SEQ ID NO: 823740 - DNA, 15 bp, Homo sapiens
taaaggaaaaagaca

SEQ ID NO: 823741 - DNA, 15 bp, Homo sapiens
ataaaggaaaaagac

SEQ ID NO: 823742 - DNA, 15 bp, Homo sapiens
tataaaggaaaaaga

SEQ ID NO: 823743 - DNA, 15 bp, Homo sapiens
ttataaaggaaaaag

SEQ ID NO: 823744 - DNA, 15 bp, Homo sapiens
tttataaaggaaaaa

SEQ ID NO: 823745 - DNA, 15 bp, Homo sapiens
atttataaaggaaaa

SEQ ID NO: 823746 - DNA, 15 bp, Homo sapiens
gatttataaaggaaa

SEQ ID NO: 823747 - DNA, 15 bp, Homo sapiens
agatttataaaggaa

SEQ ID NO: 823748 - DNA, 15 bp, Homo sapiens
aagatttataaagga

SEQ ID NO: 823749 - DNA, 15 bp, Homo sapiens
caagatttataaagg

SEQ ID NO: 823750 - DNA, 15 bp, Homo sapiens
gcaagatttataaag

SEQ ID NO: 823751 - DNA, 15 bp, Homo sapiens
tgcaagatttataaa

SEQ ID NO: 823752 - DNA, 15 bp, Homo sapiens
ttgcaagatttataa

SEQ ID NO: 823753 - DNA, 15 bp, Homo sapiens
attgcaagatttata

SEQ ID NO: 823754 - DNA, 15 bp, Homo sapiens
cattgcaagatttat

SEQ ID NO: 823755 - DNA, 15 bp, Homo sapiens
acattgcaagattta

SEQ ID NO: 823756 - DNA, 15 bp, Homo sapiens
aacattgcaagattt

SEQ ID NO: 823757 - DNA, 15 bp, Homo sapiens
caacattgcaagatt

SEQ ID NO: 823758 - DNA, 15 bp, Homo sapiens
acaacattgcaagat

SEQ ID NO: 823759 - DNA, 15 bp, Homo sapiens
aacaacattgcaaga

SEQ ID NO: 823760 - DNA, 15 bp, Homo sapiens
gaacaacattgcaag

SEQ ID NO: 823761 - DNA, 15 bp, Homo sapiens
agaacaacattgcaa

SEQ ID NO: 823762 - DNA, 15 bp, Homo sapiens
gagaacaacattgca

SEQ ID NO: 823763 - DNA, 15 bp, Homo sapiens
tgagaacaacattgc

SEQ ID NO: 823764 - DNA, 15 bp, Homo sapiens
atgagaacaacattg

SEQ ID NO: 823765 - DNA, 15 bp, Homo sapiens
aatgagaacaacatt

SEQ ID NO: 823766 - DNA, 15 bp, Homo sapiens
aaatgagaacaacat

SEQ ID NO: 823767 - DNA, 15 bp, Homo sapiens
gaaatgagaacaaca

SEQ ID NO: 823768 - DNA, 15 bp, Homo sapiens
ggaaatgagaacaac

SEQ ID NO: 823769 - DNA, 15 bp, Homo sapiens
tggaaatgagaacaa

SEQ ID NO: 823770 - DNA, 15 bp, Homo sapiens
atggaaatgagaaca

SEQ ID NO: 823771 - DNA, 15 bp, Homo sapiens
tatggaaatgagaac

SEQ ID NO: 823772 - DNA, 15 bp, Homo sapiens
gtatggaaatgagaa

SEQ ID NO: 823773 - DNA, 15 bp, Homo sapiens
agtatggaaatgaga

SEQ ID NO: 823774 - DNA, 15 bp, Homo sapiens
aagtatggaaatgag

SEQ ID NO: 823775 - DNA, 15 bp, Homo sapiens
taagtatggaaatga

SEQ ID NO: 823776 - DNA, 15 bp, Homo sapiens
ttaagtatggaaatg

SEQ ID NO: 823777 - DNA, 15 bp, Homo sapiens
attaagtatggaaat

SEQ ID NO: 823778 - DNA, 15 bp, Homo sapiens
aattaagtatggaaa

SEQ ID NO: 823779 - DNA, 15 bp, Homo sapiens
taattaagtatggaa

SEQ ID NO: 823780 - DNA, 15 bp, Homo sapiens
gtaattaagtatgga

SEQ ID NO: 823781 - DNA, 15 bp, Homo sapiens
agtaattaagtatgg

SEQ ID NO: 823782 - DNA, 15 bp, Homo sapiens
aagtaattaagtatg

SEQ ID NO: 823783 - DNA, 15 bp, Homo sapiens
taagtaattaagtat

SEQ ID NO: 823784 - DNA, 15 bp, Homo sapiens
ttaagtaattaagta

SEQ ID NO: 823785 - DNA, 15 bp, Homo sapiens
tttaagtaattaagt

SEQ ID NO: 823786 - DNA, 15 bp, Homo sapiens
ttttaagtaattaag

SEQ ID NO: 823787 - DNA, 15 bp, Homo sapiens
gttttaagtaattaa

SEQ ID NO: 823788 - DNA, 15 bp, Homo sapiens
tgttttaagtaatta

SEQ ID NO: 823789 - DNA, 15 bp, Homo sapiens
gtgttttaagtaatt

SEQ ID NO: 823790 - DNA, 15 bp, Homo sapiens
ggtgttttaagtaat

SEQ ID NO: 823791 - DNA, 15 bp, Homo sapiens
tggtgttttaagtaa

SEQ ID NO: 823792 - DNA, 15 bp, Homo sapiens
ttggtgttttaagta

SEQ ID NO: 823793 - DNA, 15 bp, Homo sapiens
gttggtgttttaagt

SEQ ID NO: 823794 - DNA, 15 bp, Homo sapiens
ggttggtgttttaag

SEQ ID NO: 823795 - DNA, 15 bp, Homo sapiens
tggttggtgttttaa

SEQ ID NO: 823796 - DNA, 15 bp, Homo sapiens
ttggttggtgtttta

SEQ ID NO: 823797 - DNA, 15 bp, Homo sapiens
gttggttggtgtttt

SEQ ID NO: 823798 - DNA, 15 bp, Homo sapiens
ggttggttggtgttt

SEQ ID NO: 823799 - DNA, 15 bp, Homo sapiens
tggttggttggtgtt

SEQ ID NO: 823800 - DNA, 15 bp, Homo sapiens
ttggttggttggtgt

SEQ ID NO: 823801 - DNA, 15 bp, Homo sapiens
gttggttggttggtg

SEQ ID NO: 823802 - DNA, 15 bp, Homo sapiens
tgttggttggttggt

SEQ ID NO: 823803 - DNA, 15 bp, Homo sapiens
ttgttggttggttgg

SEQ ID NO: 823804 - DNA, 15 bp, Homo sapiens
cttgttggttggttg

SEQ ID NO: 823805 - DNA, 15 bp, Homo sapiens
gcttgttggttggtt

SEQ ID NO: 823806 - DNA, 15 bp, Homo sapiens
tgcttgttggttggt

SEQ ID NO: 823807 - DNA, 15 bp, Homo sapiens
ttgcttgttggttgg

SEQ ID NO: 823808 - DNA, 15 bp, Homo sapiens
tttgcttgttggttg

SEQ ID NO: 823809 - DNA, 15 bp, Homo sapiens
ttttgcttgttggtt

SEQ ID NO: 823810 - DNA, 15 bp, Homo sapiens
tttttgcttgttggt

SEQ ID NO: 823811 - DNA, 15 bp, Homo sapiens
ttttttgcttgttgg

SEQ ID NO: 823812 - DNA, 15 bp, Homo sapiens
attttttgcttgttg

SEQ ID NO: 823813 - DNA, 15 bp, Homo sapiens
cattttttgcttgtt

SEQ ID NO: 823814 - DNA, 15 bp, Homo sapiens
tcattttttgcttgt

SEQ ID NO: 823815 - DNA, 15 bp, Homo sapiens
atcattttttgcttg

SEQ ID NO: 823816 - DNA, 15 bp, Homo sapiens
aatcattttttgctt

SEQ ID NO: 823817 - DNA, 15 bp, Homo sapiens
taatcattttttgct

SEQ ID NO: 823818 - DNA, 15 bp, Homo sapiens
ctaatcattttttgc

SEQ ID NO: 823819 - DNA, 15 bp, Homo sapiens
actaatcattttttg

SEQ ID NO: 823820 - DNA, 15 bp, Homo sapiens
gactaatcatttttt

SEQ ID NO: 823821 - DNA, 15 bp, Homo sapiens
agactaatcattttt

SEQ ID NO: 823822 - DNA, 15 bp, Homo sapiens
tagactaatcatttt

SEQ ID NO: 823823 - DNA, 15 bp, Homo sapiens
ttagactaatcattt

SEQ ID NO: 823824 - DNA, 15 bp, Homo sapiens
gttagactaatcatt

SEQ ID NO: 823825 - DNA, 15 bp, Homo sapiens
agttagactaatcat

SEQ ID NO: 823826 - DNA, 15 bp, Homo sapiens
tagttagactaatca

SEQ ID NO: 823827 - DNA, 15 bp, Homo sapiens
ttagttagactaatc

SEQ ID NO: 823828 - DNA, 15 bp, Homo sapiens
attagttagactaat

SEQ ID NO: 823829 - DNA, 15 bp, Homo sapiens
tattagttagactaa

SEQ ID NO: 823830 - DNA, 15 bp, Homo sapiens
atattagttagacta

SEQ ID NO: 823831 - DNA, 15 bp, Homo sapiens
aatattagttagact

SEQ ID NO: 823832 - DNA, 15 bp, Homo sapiens
taatattagttagac

SEQ ID NO: 823833 - DNA, 15 bp, Homo sapiens
gtaatattagttaga

SEQ ID NO: 823834 - DNA, 15 bp, Homo sapiens
tgtaatattagttag

SEQ ID NO: 823835 - DNA, 15 bp, Homo sapiens
ttgtaatattagtta

SEQ ID NO: 823836 - DNA, 15 bp, Homo sapiens
cttgtaatattagtt

SEQ ID NO: 823837 - DNA, 15 bp, Homo sapiens
acttgtaatattagt

SEQ ID NO: 823838 - DNA, 15 bp, Homo sapiens
aacttgtaatattag

SEQ ID NO: 823839 - DNA, 15 bp, Homo sapiens
taacttgtaatatta

SEQ ID NO: 823840 - DNA, 15 bp, Homo sapiens
ttaacttgtaatatt

SEQ ID NO: 823841 - DNA, 15 bp, Homo sapiens
attaacttgtaatat

SEQ ID NO: 823842 - DNA, 15 bp, Homo sapiens
tattaacttgtaata

SEQ ID NO: 823843 - DNA, 15 bp, Homo sapiens
ttattaacttgtaat

SEQ ID NO: 823844 - DNA, 15 bp, Homo sapiens
attattaacttgtaa

SEQ ID NO: 823845 - DNA, 15 bp, Homo sapiens
cattattaacttgta

SEQ ID NO: 823846 - DNA, 15 bp, Homo sapiens
tcattattaacttgt

SEQ ID NO: 823847 - DNA, 15 bp, Homo sapiens
ttcattattaacttg

SEQ ID NO: 823848 - DNA, 15 bp, Homo sapiens
cttcattattaactt

SEQ ID NO: 823849 - DNA, 15 bp, Homo sapiens
acttcattattaact

SEQ ID NO: 823850 - DNA, 15 bp, Homo sapiens
tacttcattattaac

SEQ ID NO: 823851 - DNA, 15 bp, Homo sapiens
ttacttcattattaa

SEQ ID NO: 823852 - DNA, 15 bp, Homo sapiens
tttacttcattatta

SEQ ID NO: 823853 - DNA, 15 bp, Homo sapiens
ctttacttcattatt

SEQ ID NO: 823854 - DNA, 15 bp, Homo sapiens
cctttacttcattat

SEQ ID NO: 823855 - DNA, 15 bp, Homo sapiens
acctttacttcatta

SEQ ID NO: 823856 - DNA, 15 bp, Homo sapiens
aacctttacttcatt

SEQ ID NO: 823857 - DNA, 15 bp, Homo sapiens
aaacctttacttcat

SEQ ID NO: 823858 - DNA, 15 bp, Homo sapiens
taaacctttacttca

SEQ ID NO: 823859 - DNA, 15 bp, Homo sapiens
ttaaacctttacttc

SEQ ID NO: 823860 - DNA, 15 bp, Homo sapiens
tttaaacctttactt

SEQ ID NO: 823861 - DNA, 15 bp, Homo sapiens
ttttaaacctttact

SEQ ID NO: 823862 - DNA, 15 bp, Homo sapiens
tttttaaacctttac

SEQ ID NO: 823863 - DNA, 15 bp, Homo sapiens
atttttaaaccttta

SEQ ID NO: 823864 - DNA, 15 bp, Homo sapiens
tatttttaaaccttt

SEQ ID NO: 823865 - DNA, 15 bp, Homo sapiens
ttatttttaaacctt

SEQ ID NO: 823866 - DNA, 15 bp, Homo sapiens
attatttttaaacct

SEQ ID NO: 823867 - DNA, 15 bp, Homo sapiens
cattatttttaaacc

SEQ ID NO: 823868 - DNA, 15 bp, Homo sapiens
acattatttttaaac

SEQ ID NO: 823869 - DNA, 15 bp, Homo sapiens
gacattatttttaaa

SEQ ID NO: 823870 - DNA, 15 bp, Homo sapiens
tgacattatttttaa

SEQ ID NO: 823871 - DNA, 15 bp, Homo sapiens
atgacattattttta

SEQ ID NO: 823872 - DNA, 15 bp, Homo sapiens
tatgacattattttt

SEQ ID NO: 823873 - DNA, 15 bp, Homo sapiens
ttatgacattatttt

SEQ ID NO: 823874 - DNA, 15 bp, Homo sapiens
attatgacattattt

SEQ ID NO: 823875 - DNA, 15 bp, Homo sapiens
tattatgacattatt

SEQ ID NO: 823876 - DNA, 15 bp, Homo sapiens
ttattatgacattat

SEQ ID NO: 823877 - DNA, 15 bp, Homo sapiens
attattatgacatta

SEQ ID NO: 823878 - DNA, 15 bp, Homo sapiens
cattattatgacatt

SEQ ID NO: 823879 - DNA, 15 bp, Homo sapiens
acattattatgacat

SEQ ID NO: 823880 - DNA, 15 bp, Homo sapiens
aacattattatgaca

SEQ ID NO: 823881 - DNA, 15 bp, Homo sapiens
taacattattatgac

SEQ ID NO: 823882 - DNA, 15 bp, Homo sapiens
ttaacattattatga

SEQ ID NO: 823883 - DNA, 15 bp, Homo sapiens
attaacattattatg

SEQ ID NO: 823884 - DNA, 15 bp, Homo sapiens
tattaacattattat

SEQ ID NO: 823885 - DNA, 15 bp, Homo sapiens
ttattaacattatta

SEQ ID NO: 823886 - DNA, 15 bp, Homo sapiens
gttattaacattatt

SEQ ID NO: 823887 - DNA, 15 bp, Homo sapiens
tgttattaacattat

SEQ ID NO: 823888 - DNA, 15 bp, Homo sapiens
ttgttattaacatta

SEQ ID NO: 823889 - DNA, 15 bp, Homo sapiens
tttgttattaacatt

SEQ ID NO: 823890 - DNA, 15 bp, Homo sapiens
atttgttattaacat

SEQ ID NO: 823891 - DNA, 15 bp, Homo sapiens
aatttgttattaaca

SEQ ID NO: 823892 - DNA, 15 bp, Homo sapiens
taatttgttattaac

SEQ ID NO: 823893 - DNA, 15 bp, Homo sapiens
ataatttgttattaa

SEQ ID NO: 823894 - DNA, 15 bp, Homo sapiens
aataatttgttatta

SEQ ID NO: 823895 - DNA, 15 bp, Homo sapiens
taataatttgttatt

SEQ ID NO: 823896 - DNA, 15 bp, Homo sapiens
ttaataatttgttat

SEQ ID NO: 823897 - DNA, 15 bp, Homo sapiens
attaataatttgtta

SEQ ID NO: 823898 - DNA, 15 bp, Homo sapiens
aattaataatttgtt

SEQ ID NO: 823899 - DNA, 15 bp, Homo sapiens
taattaataatttgt

SEQ ID NO: 823900 - DNA, 15 bp, Homo sapiens
ataattaataatttg

SEQ ID NO: 823901 - DNA, 15 bp, Homo sapiens
tataattaataattt

SEQ ID NO: 823902 - DNA, 15 bp, Homo sapiens
ttataattaataatt

SEQ ID NO: 823903 - DNA, 15 bp, Homo sapiens
attataattaataat

SEQ ID NO: 823904 - DNA, 15 bp, Homo sapiens
aattataattaataa

SEQ ID NO: 823905 - DNA, 15 bp, Homo sapiens
aaattataattaata

SEQ ID NO: 823906 - DNA, 15 bp, Homo sapiens
taaattataattaat

SEQ ID NO: 823907 - DNA, 15 bp, Homo sapiens
ttaaattataattaa

SEQ ID NO: 823908 - DNA, 15 bp, Homo sapiens
tttaaattataatta

SEQ ID NO: 823909 - DNA, 15 bp, Homo sapiens
ttttaaattataatt

SEQ ID NO: 823910 - DNA, 15 bp, Homo sapiens
tttttaaattataat

SEQ ID NO: 823911 - DNA, 15 bp, Homo sapiens
atttttaaattataa

SEQ ID NO: 823912 - DNA, 15 bp, Homo sapiens
tatttttaaattata

SEQ ID NO: 823913 - DNA, 15 bp, Homo sapiens
ttatttttaaattat

SEQ ID NO: 823914 - DNA, 15 bp, Homo sapiens
attatttttaaatta

SEQ ID NO: 823915 - DNA, 15 bp, Homo sapiens
tattatttttaaatt

SEQ ID NO: 823916 - DNA, 15 bp, Homo sapiens
atattatttttaaat

SEQ ID NO: 823917 - DNA, 15 bp, Homo sapiens
aatattatttttaaa

SEQ ID NO: 823918 - DNA, 15 bp, Homo sapiens
aaatattatttttaa

SEQ ID NO: 823919 - DNA, 15 bp, Homo sapiens
taaatattattttta

SEQ ID NO: 823920 - DNA, 15 bp, Homo sapiens
ataaatattattttt

SEQ ID NO: 823921 - DNA, 15 bp, Homo sapiens
tataaatattatttt

SEQ ID NO: 823922 - DNA, 15 bp, Homo sapiens
ttataaatattattt

SEQ ID NO: 823923 - DNA, 15 bp, Homo sapiens
attataaatattatt

SEQ ID NO: 823924 - DNA, 15 bp, Homo sapiens
aattataaatattat

SEQ ID NO: 823925 - DNA, 15 bp, Homo sapiens
aaattataaatatta

SEQ ID NO: 823926 - DNA, 15 bp, Homo sapiens
taaattataaatatt

SEQ ID NO: 823927 - DNA, 15 bp, Homo sapiens
ttaaattataaatat

SEQ ID NO: 823928 - DNA, 15 bp, Homo sapiens
tttaaattataaata

SEQ ID NO: 823929 - DNA, 15 bp, Homo sapiens
ttttaaattataaat

SEQ ID NO: 823930 - DNA, 15 bp, Homo sapiens
tttttaaattataaa

SEQ ID NO: 823931 - DNA, 15 bp, Homo sapiens
gtaaatattattttt

SEQ ID NO: 823932 - DNA, 15 bp, Homo sapiens
tgtaaatattatttt

SEQ ID NO: 823933 - DNA, 15 bp, Homo sapiens
ttgtaaatattattt

SEQ ID NO: 823934 - DNA, 15 bp, Homo sapiens
cttgtaaatattatt

SEQ ID NO: 823935 - DNA, 15 bp, Homo sapiens
acttgtaaatattat

SEQ ID NO: 823936 - DNA, 15 bp, Homo sapiens
tacttgtaaatatta

SEQ ID NO: 823937 - DNA, 15 bp, Homo sapiens
gtacttgtaaatatt

SEQ ID NO: 823938 - DNA, 15 bp, Homo sapiens
agtacttgtaaatat

SEQ ID NO: 823939 - DNA, 15 bp, Homo sapiens
tagtacttgtaaata

SEQ ID NO: 823940 - DNA, 15 bp, Homo sapiens
gtagtacttgtaaat

SEQ ID NO: 823941 - DNA, 15 bp, Homo sapiens
tgtagtacttgtaaa

SEQ ID NO: 823942 - DNA, 15 bp, Homo sapiens
ttgtagtacttgtaa

SEQ ID NO: 823943 - DNA, 15 bp, Homo sapiens
cttgtagtacttgta

SEQ ID NO: 823944 - DNA, 15 bp, Homo sapiens
gcttgtagtacttgt

SEQ ID NO: 823945 - DNA, 15 bp, Homo sapiens
tgcttgtagtacttg

SEQ ID NO: 823946 - DNA, 15 bp, Homo sapiens
ttgcttgtagtactt

SEQ ID NO: 823947 - DNA, 15 bp, Homo sapiens
tttgcttgtagtact

SEQ ID NO: 823948 - DNA, 15 bp, Homo sapiens
ttttgcttgtagtac

SEQ ID NO: 823949 - DNA, 15 bp, Homo sapiens
gttttgcttgtagta

SEQ ID NO: 823950 - DNA, 15 bp, Homo sapiens
tgttttgcttgtagt

SEQ ID NO: 823951 - DNA, 15 bp, Homo sapiens
gtgttttgcttgtag

SEQ ID NO: 823952 - DNA, 15 bp, Homo sapiens
agtgttttgcttgta

SEQ ID NO: 823953 - DNA, 15 bp, Homo sapiens
cagtgttttgcttgt

SEQ ID NO: 823954 - DNA, 15 bp, Homo sapiens
ccagtgttttgcttg

SEQ ID NO: 823955 - DNA, 15 bp, Homo sapiens
accagtgttttgctt

SEQ ID NO: 823956 - DNA, 15 bp, Homo sapiens
taccagtgttttgct

SEQ ID NO: 823957 - DNA, 15 bp, Homo sapiens
gtaccagtgttttgc

SEQ ID NO: 823958 - DNA, 15 bp, Homo sapiens
agtaccagtgttttg

SEQ ID NO: 823959 - DNA, 15 bp, Homo sapiens
aagtaccagtgtttt

SEQ ID NO: 823960 - DNA, 15 bp, Homo sapiens
aaagtaccagtgttt

SEQ ID NO: 823961 - DNA, 15 bp, Homo sapiens
gaaagtaccagtgtt

SEQ ID NO: 823962 - DNA, 15 bp, Homo sapiens
tgaaagtaccagtgt

SEQ ID NO: 823963 - DNA, 15 bp, Homo sapiens
atgaaagtaccagtg

SEQ ID NO: 823964 - DNA, 15 bp, Homo sapiens
aatgaaagtaccagt

SEQ ID NO: 823965 - DNA, 15 bp, Homo sapiens
caatgaaagtaccag

SEQ ID NO: 823966 - DNA, 15 bp, Homo sapiens
acaatgaaagtacca

SEQ ID NO: 823967 - DNA, 15 bp, Homo sapiens
aacaatgaaagtacc

SEQ ID NO: 823968 - DNA, 15 bp, Homo sapiens
taacaatgaaagtac

SEQ ID NO: 823969 - DNA, 15 bp, Homo sapiens
ataacaatgaaagta

SEQ ID NO: 823970 - DNA, 15 bp, Homo sapiens
gataacaatgaaagt

SEQ ID NO: 823971 - DNA, 15 bp, Homo sapiens
agataacaatgaaag

SEQ ID NO: 823972 - DNA, 15 bp, Homo sapiens
aagataacaatgaaa

SEQ ID NO: 823973 - DNA, 15 bp, Homo sapiens
aaagataacaatgaa

SEQ ID NO: 823974 - DNA, 15 bp, Homo sapiens
aaaagataacaatga

SEQ ID NO: 823975 - DNA, 15 bp, Homo sapiens
gaaaagataacaatg

SEQ ID NO: 823976 - DNA, 15 bp, Homo sapiens
tgaaaagataacaat

SEQ ID NO: 823977 - DNA, 15 bp, Homo sapiens
atgaaaagataacaa

SEQ ID NO: 823978 - DNA, 15 bp, Homo sapiens
tatgaaaagataaca

SEQ ID NO: 823979 - DNA, 15 bp, Homo sapiens
atatgaaaagataac

SEQ ID NO: 823980 - DNA, 15 bp, Homo sapiens
tatatgaaaagataa

SEQ ID NO: 823981 - DNA, 15 bp, Homo sapiens
ttatatgaaaagata

SEQ ID NO: 823982 - DNA, 15 bp, Homo sapiens
cttatatgaaaagat

SEQ ID NO: 823983 - DNA, 15 bp, Homo sapiens
ccttatatgaaaaga

SEQ ID NO: 823984 - DNA, 15 bp, Homo sapiens
accttatatgaaaag

SEQ ID NO: 823985 - DNA, 15 bp, Homo sapiens
taccttatatgaaaa

SEQ ID NO: 823986 - DNA, 15 bp, Homo sapiens
ttaccttatatgaaa

SEQ ID NO: 823987 - DNA, 15 bp, Homo sapiens
gttaccttatatgaa

SEQ ID NO: 823988 - DNA, 15 bp, Homo sapiens
agttaccttatatga

SEQ ID NO: 823989 - DNA, 15 bp, Homo sapiens
cagttaccttatatg

SEQ ID NO: 823990 - DNA, 15 bp, Homo sapiens
tcagttaccttatat

SEQ ID NO: 823991 - DNA, 15 bp, Homo sapiens
ctcagttaccttata

SEQ ID NO: 823992 - DNA, 15 bp, Homo sapiens
cctcagttaccttat

SEQ ID NO: 823993 - DNA, 15 bp, Homo sapiens
gcctcagttacctta

SEQ ID NO: 823994 - DNA, 15 bp, Homo sapiens
ggcctcagttacctt

SEQ ID NO: 823995 - DNA, 15 bp, Homo sapiens
gggcctcagttacct

SEQ ID NO: 823996 - DNA, 15 bp, Homo sapiens
tgggcctcagttacc

SEQ ID NO: 823997 - DNA, 15 bp, Homo sapiens
ctgggcctcagttac

SEQ ID NO: 823998 - DNA, 15 bp, Homo sapiens
tctgggcctcagtta

SEQ ID NO: 823999 - DNA, 15 bp, Homo sapiens
ctctgggcctcagtt

SEQ ID NO: 824000 - DNA, 15 bp, Homo sapiens
tctctgggcctcagt

SEQ ID NO: 824001 - DNA, 15 bp, Homo sapiens
ctctctgggcctcag

SEQ ID NO: 824002 - DNA, 15 bp, Homo sapiens
tctctctgggcctca

SEQ ID NO: 824003 - DNA, 15 bp, Homo sapiens
atctctctgggcctc

SEQ ID NO: 824004 - DNA, 15 bp, Homo sapiens
aatctctctgggcct

SEQ ID NO: 824005 - DNA, 15 bp, Homo sapiens
taatctctctgggcc

SEQ ID NO: 824006 - DNA, 15 bp, Homo sapiens
ttaatctctctgggc

SEQ ID NO: 824007 - DNA, 15 bp, Homo sapiens
tttaatctctctggg

SEQ ID NO: 824008 - DNA, 15 bp, Homo sapiens
atttaatctctctgg

SEQ ID NO: 824009 - DNA, 15 bp, Homo sapiens
tatttaatctctctg

SEQ ID NO: 824010 - DNA, 15 bp, Homo sapiens
ttatttaatctctct

SEQ ID NO: 824011 - DNA, 15 bp, Homo sapiens
gttatttaatctctc

SEQ ID NO: 824012 - DNA, 15 bp, Homo sapiens
tgttatttaatctct

SEQ ID NO: 824013 - DNA, 15 bp, Homo sapiens
atgttatttaatctc

SEQ ID NO: 824014 - DNA, 15 bp, Homo sapiens
catgttatttaatct

SEQ ID NO: 824015 - DNA, 15 bp, Homo sapiens
gcatgttatttaatc

SEQ ID NO: 824016 - DNA, 15 bp, Homo sapiens
ggcatgttatttaat

SEQ ID NO: 824017 - DNA, 15 bp, Homo sapiens
gggcatgttatttaa

SEQ ID NO: 824018 - DNA, 15 bp, Homo sapiens
tgggcatgttattta

SEQ ID NO: 824019 - DNA, 15 bp, Homo sapiens
ttgggcatgttattt

SEQ ID NO: 824020 - DNA, 15 bp, Homo sapiens
cttgggcatgttatt

SEQ ID NO: 824021 - DNA, 15 bp, Homo sapiens
ccttgggcatgttat

SEQ ID NO: 824022 - DNA, 15 bp, Homo sapiens
accttgggcatgtta

SEQ ID NO: 824023 - DNA, 15 bp, Homo sapiens
gaccttgggcatgtt

SEQ ID NO: 824024 - DNA, 15 bp, Homo sapiens
tgaccttgggcatgt

SEQ ID NO: 824025 - DNA, 15 bp, Homo sapiens
gtgaccttgggcatg

SEQ ID NO: 824026 - DNA, 15 bp, Homo sapiens
tgtgaccttgggcat

SEQ ID NO: 824027 - DNA, 15 bp, Homo sapiens
gtgtgaccttgggca

SEQ ID NO: 824028 - DNA, 15 bp, Homo sapiens
tgtgtgaccttgggc

SEQ ID NO: 824029 - DNA, 15 bp, Homo sapiens
ctgtgtgaccttggg

SEQ ID NO: 824030 - DNA, 15 bp, Homo sapiens
cctgtgtgaccttgg

SEQ ID NO: 824031 - DNA, 15 bp, Homo sapiens
acctgtgtgaccttg

SEQ ID NO: 824032 - DNA, 15 bp, Homo sapiens
gacctgtgtgacctt

SEQ ID NO: 824033 - DNA, 15 bp, Homo sapiens
tgacctgtgtgacct

SEQ ID NO: 824034 - DNA, 15 bp, Homo sapiens
atgacctgtgtgacc

SEQ ID NO: 824035 - DNA, 15 bp, Homo sapiens
tatgacctgtgtgac

SEQ ID NO: 824036 - DNA, 15 bp, Homo sapiens
atatgacctgtgtga

SEQ ID NO: 824037 - DNA, 15 bp, Homo sapiens
catatgacctgtgtg

SEQ ID NO: 824038 - DNA, 15 bp, Homo sapiens
tcatatgacctgtgt

SEQ ID NO: 824039 - DNA, 15 bp, Homo sapiens
atcatatgacctgtg

SEQ ID NO: 824040 - DNA, 15 bp, Homo sapiens
catcatatgacctgt

SEQ ID NO: 824041 - DNA, 15 bp, Homo sapiens
acatcatatgacctg

SEQ ID NO: 824042 - DNA, 15 bp, Homo sapiens
cacatcatatgacct

SEQ ID NO: 824043 - DNA, 15 bp, Homo sapiens
ccacatcatatgacc

SEQ ID NO: 824044 - DNA, 15 bp, Homo sapiens
tccacatcatatgac

SEQ ID NO: 824045 - DNA, 15 bp, Homo sapiens
ctccacatcatatga

SEQ ID NO: 824046 - DNA, 15 bp, Homo sapiens
gctccacatcatatg

SEQ ID NO: 824047 - DNA, 15 bp, Homo sapiens
ggctccacatcatat

SEQ ID NO: 824048 - DNA, 15 bp, Homo sapiens
tggctccacatcata

SEQ ID NO: 824049 - DNA, 15 bp, Homo sapiens
ctggctccacatcat

SEQ ID NO: 824050 - DNA, 15 bp, Homo sapiens
cctggctccacatca

SEQ ID NO: 824051 - DNA, 15 bp, Homo sapiens
acctggctccacatc

SEQ ID NO: 824052 - DNA, 15 bp, Homo sapiens
aacctggctccacat

SEQ ID NO: 824053 - DNA, 15 bp, Homo sapiens
taacctggctccaca

SEQ ID NO: 824054 - DNA, 15 bp, Homo sapiens
ttaacctggctccac

SEQ ID NO: 824055 - DNA, 15 bp, Homo sapiens
tttaacctggctcca

SEQ ID NO: 824056 - DNA, 15 bp, Homo sapiens
ttttaacctggctcc

SEQ ID NO: 824057 - DNA, 15 bp, Homo sapiens
tttttaacctggctc

SEQ ID NO: 824058 - DNA, 15 bp, Homo sapiens
atttttaacctggct

SEQ ID NO: 824059 - DNA, 15 bp, Homo sapiens
tatttttaacctggc

SEQ ID NO: 824060 - DNA, 15 bp, Homo sapiens
atatttttaacctgg

SEQ ID NO: 824061 - DNA, 15 bp, Homo sapiens
tatatttttaacctg

SEQ ID NO: 824062 - DNA, 15 bp, Homo sapiens
ctatatttttaacct

SEQ ID NO: 824063 - DNA, 15 bp, Homo sapiens
cctatatttttaacc

SEQ ID NO: 824064 - DNA, 15 bp, Homo sapiens
gcctatatttttaac

SEQ ID NO: 824065 - DNA, 15 bp, Homo sapiens
tgcctatatttttaa

SEQ ID NO: 824066 - DNA, 15 bp, Homo sapiens
ctgcctatattttta

SEQ ID NO: 824067 - DNA, 15 bp, Homo sapiens
tctgcctatattttt

SEQ ID NO: 824068 - DNA, 15 bp, Homo sapiens
ttctgcctatatttt

SEQ ID NO: 824069 - DNA, 15 bp, Homo sapiens
tttctgcctatattt

SEQ ID NO: 824070 - DNA, 15 bp, Homo sapiens
ctttctgcctatatt

SEQ ID NO: 824071 - DNA, 15 bp, Homo sapiens
tctttctgcctatat

SEQ ID NO: 824072 - DNA, 15 bp, Homo sapiens
gtctttctgcctata

SEQ ID NO: 824073 - DNA, 15 bp, Homo sapiens
agtctttctgcctat

SEQ ID NO: 824074 - DNA, 15 bp, Homo sapiens
gagtctttctgccta

SEQ ID NO: 824075 - DNA, 15 bp, Homo sapiens
agagtctttctgcct

SEQ ID NO: 824076 - DNA, 15 bp, Homo sapiens
tagagtctttctgcc

SEQ ID NO: 824077 - DNA, 15 bp, Homo sapiens
ctagagtctttctgc

SEQ ID NO: 824078 - DNA, 15 bp, Homo sapiens
tctagagtctttctg

SEQ ID NO: 824079 - DNA, 15 bp, Homo sapiens
ctctagagtctttct

SEQ ID NO: 824080 - DNA, 15 bp, Homo sapiens
tctctagagtctttc

SEQ ID NO: 824081 - DNA, 15 bp, Homo sapiens
gtctctagagtcttt

SEQ ID NO: 824082 - DNA, 15 bp, Homo sapiens
ggtctctagagtctt

SEQ ID NO: 824083 - DNA, 15 bp, Homo sapiens
tggtctctagagtct

SEQ ID NO: 824084 - DNA, 15 bp, Homo sapiens
atggtctctagagtc

SEQ ID NO: 824085 - DNA, 15 bp, Homo sapiens
catggtctctagagt

SEQ ID NO: 824086 - DNA, 15 bp, Homo sapiens
gcatggtctctagag

SEQ ID NO: 824087 - DNA, 15 bp, Homo sapiens
agcatggtctctaga

SEQ ID NO: 824088 - DNA, 15 bp, Homo sapiens
gagcatggtctctag

SEQ ID NO: 824089 - DNA, 15 bp, Homo sapiens
tgagcatggtctcta

SEQ ID NO: 824090 - DNA, 15 bp, Homo sapiens
ctgagcatggtctct

SEQ ID NO: 824091 - DNA, 15 bp, Homo sapiens
tctgagcatggtctc

SEQ ID NO: 824092 - DNA, 15 bp, Homo sapiens
atctgagcatggtct

SEQ ID NO: 824093 - DNA, 15 bp, Homo sapiens
gatctgagcatggtc

SEQ ID NO: 824094 - DNA, 15 bp, Homo sapiens
agatctgagcatggt

SEQ ID NO: 824095 - DNA, 15 bp, Homo sapiens
aagatctgagcatgg

SEQ ID NO: 824096 - DNA, 15 bp, Homo sapiens
gaagatctgagcatg

SEQ ID NO: 824097 - DNA, 15 bp, Homo sapiens
ggaagatctgagcat

SEQ ID NO: 824098 - DNA, 15 bp, Homo sapiens
tggaagatctgagca

SEQ ID NO: 824099 - DNA, 15 bp, Homo sapiens
atggaagatctgagc

SEQ ID NO: 824100 - DNA, 15 bp, Homo sapiens
aatggaagatctgag

SEQ ID NO: 824101 - DNA, 15 bp, Homo sapiens
gaatggaagatctga

SEQ ID NO: 824102 - DNA, 15 bp, Homo sapiens
ggaatggaagatctg

SEQ ID NO: 824103 - DNA, 15 bp, Homo sapiens
tggaatggaagatct

SEQ ID NO: 824104 - DNA, 15 bp, Homo sapiens
ttggaatggaagatc

SEQ ID NO: 824105 - DNA, 15 bp, Homo sapiens
cttggaatggaagat

SEQ ID NO: 824106 - DNA, 15 bp, Homo sapiens
tcttggaatggaaga

SEQ ID NO: 824107 - DNA, 15 bp, Homo sapiens
atcttggaatggaag

SEQ ID NO: 824108 - DNA, 15 bp, Homo sapiens
gatcttggaatggaa

SEQ ID NO: 824109 - DNA, 15 bp, Homo sapiens
ggatcttggaatgga

SEQ ID NO: 824110 - DNA, 15 bp, Homo sapiens
gggatcttggaatgg

SEQ ID NO: 824111 - DNA, 15 bp, Homo sapiens
agggatcttggaatg

SEQ ID NO: 824112 - DNA, 15 bp, Homo sapiens
cagggatcttggaat

SEQ ID NO: 824113 - DNA, 15 bp, Homo sapiens
tcagggatcttggaa

SEQ ID NO: 824114 - DNA, 15 bp, Homo sapiens
atcagggatcttgga

SEQ ID NO: 824115 - DNA, 15 bp, Homo sapiens
tatcagggatcttgg

SEQ ID NO: 824116 - DNA, 15 bp, Homo sapiens
atatcagggatcttg

SEQ ID NO: 824117 - DNA, 15 bp, Homo sapiens
aatatcagggatctt

SEQ ID NO: 824118 - DNA, 15 bp, Homo sapiens
aaatatcagggatct

SEQ ID NO: 824119 - DNA, 15 bp, Homo sapiens
caaatatcagggatc

SEQ ID NO: 824120 - DNA, 15 bp, Homo sapiens
tcaaatatcagggat

SEQ ID NO: 824121 - DNA, 15 bp, Homo sapiens
ttcaaatatcaggga

SEQ ID NO: 824122 - DNA, 15 bp, Homo sapiens
tttcaaatatcaggg

SEQ ID NO: 824123 - DNA, 15 bp, Homo sapiens
ttttcaaatatcagg

SEQ ID NO: 824124 - DNA, 15 bp, Homo sapiens
tttttcaaatatcag

SEQ ID NO: 824125 - DNA, 15 bp, Homo sapiens
atttttcaaatatca

SEQ ID NO: 824126 - DNA, 15 bp, Homo sapiens
tatttttcaaatatc

SEQ ID NO: 824127 - DNA, 15 bp, Homo sapiens
ttatttttcaaatat

SEQ ID NO: 824128 - DNA, 15 bp, Homo sapiens
tttatttttcaaata

SEQ ID NO: 824129 - DNA, 15 bp, Homo sapiens
ttttatttttcaaat

SEQ ID NO: 824130 - DNA, 15 bp, Homo sapiens
attttatttttcaaa

SEQ ID NO: 824131 - DNA, 15 bp, Homo sapiens
tattttatttttcaa

SEQ ID NO: 824132 - DNA, 15 bp, Homo sapiens
ttattttatttttca

SEQ ID NO: 824133 - DNA, 15 bp, Homo sapiens
gttattttatttttc

SEQ ID NO: 824134 - DNA, 15 bp, Homo sapiens
tgttattttattttt

SEQ ID NO: 824135 - DNA, 15 bp, Homo sapiens
atgttattttatttt

SEQ ID NO: 824136 - DNA, 15 bp, Homo sapiens
gatgttattttattt

SEQ ID NO: 824137 - DNA, 15 bp, Homo sapiens
ggatgttattttatt

SEQ ID NO: 824138 - DNA, 15 bp, Homo sapiens
aggatgttattttat

SEQ ID NO: 824139 - DNA, 15 bp, Homo sapiens
caggatgttatttta

SEQ ID NO: 824140 - DNA, 15 bp, Homo sapiens
tcaggatgttatttt

SEQ ID NO: 824141 - DNA, 15 bp, Homo sapiens
ttcaggatgttattt

SEQ ID NO: 824142 - DNA, 15 bp, Homo sapiens
attcaggatgttatt

SEQ ID NO: 824143 - DNA, 15 bp, Homo sapiens
aattcaggatgttat

SEQ ID NO: 824144 - DNA, 15 bp, Homo sapiens
aaattcaggatgtta

SEQ ID NO: 824145 - DNA, 15 bp, Homo sapiens
aaaattcaggatgtt

SEQ ID NO: 824146 - DNA, 15 bp, Homo sapiens
taaaattcaggatgt

SEQ ID NO: 824147 - DNA, 15 bp, Homo sapiens
ataaaattcaggatg

SEQ ID NO: 824148 - DNA, 15 bp, Homo sapiens
aataaaattcaggat

SEQ ID NO: 824149 - DNA, 15 bp, Homo sapiens
caataaaattcagga

SEQ ID NO: 824150 - DNA, 15 bp, Homo sapiens
acaataaaattcagg

SEQ ID NO: 824151 - DNA, 15 bp, Homo sapiens
aacaataaaattcag

SEQ ID NO: 824152 - DNA, 15 bp, Homo sapiens
taacaataaaattca

SEQ ID NO: 824153 - DNA, 15 bp, Homo sapiens
ataacaataaaattc

SEQ ID NO: 824154 - DNA, 15 bp, Homo sapiens
aataacaataaaatt

SEQ ID NO: 824155 - DNA, 15 bp, Homo sapiens
aaaaacaataacaat

SEQ ID NO: 824156 - DNA, 15 bp, Homo sapiens
aaaaaacaataacaa

SEQ ID NO: 824157 - DNA, 15 bp, Homo sapiens
taaaaaacaataaca

SEQ ID NO: 824158 - DNA, 15 bp, Homo sapiens
ataaaaaacaataac

SEQ ID NO: 824159 - DNA, 15 bp, Homo sapiens
tataaaaaacaataa

SEQ ID NO: 824160 - DNA, 15 bp, Homo sapiens
ctataaaaaacaata

SEQ ID NO: 824161 - DNA, 15 bp, Homo sapiens
tctataaaaaacaat

SEQ ID NO: 824162 - DNA, 15 bp, Homo sapiens
ttctataaaaaacaa

SEQ ID NO: 824163 - DNA, 15 bp, Homo sapiens
gttctataaaaaaca

SEQ ID NO: 824164 - DNA, 15 bp, Homo sapiens
tgttctataaaaaac

SEQ ID NO: 824165 - DNA, 15 bp, Homo sapiens
ctgttctataaaaaa

SEQ ID NO: 824166 - DNA, 15 bp, Homo sapiens
tctgttctataaaaa

SEQ ID NO: 824167 - DNA, 15 bp, Homo sapiens
ttctgttctataaaa

SEQ ID NO: 824168 - DNA, 15 bp, Homo sapiens
gttctgttctataaa

SEQ ID NO: 824169 - DNA, 15 bp, Homo sapiens
agttctgttctataa

SEQ ID NO: 824170 - DNA, 15 bp, Homo sapiens
cagttctgttctata

SEQ ID NO: 824171 - DNA, 15 bp, Homo sapiens
tcagttctgttctat

SEQ ID NO: 824172 - DNA, 15 bp, Homo sapiens
ttcagttctgttcta

SEQ ID NO: 824173 - DNA, 15 bp, Homo sapiens
tttcagttctgttct

SEQ ID NO: 824174 - DNA, 15 bp, Homo sapiens
gtttcagttctgttc

SEQ ID NO: 824175 - DNA, 15 bp, Homo sapiens
agtttcagttctgtt

SEQ ID NO: 824176 - DNA, 15 bp, Homo sapiens
cagtttcagttctgt

SEQ ID NO: 824177 - DNA, 15 bp, Homo sapiens
tcagtttcagttctg

SEQ ID NO: 824178 - DNA, 15 bp, Homo sapiens
gtcagtttcagttct

SEQ ID NO: 824179 - DNA, 15 bp, Homo sapiens
agtcagtttcagttc

SEQ ID NO: 824180 - DNA, 15 bp, Homo sapiens
gagtcagtttcagtt

SEQ ID NO: 824181 - DNA, 15 bp, Homo sapiens
cgagtcagtttcagt

SEQ ID NO: 824182 - DNA, 15 bp, Homo sapiens
ccgagtcagtttcag

SEQ ID NO: 824183 - DNA, 15 bp, Homo sapiens
tccgagtcagtttca

SEQ ID NO: 824184 - DNA, 15 bp, Homo sapiens
ttccgagtcagtttc

SEQ ID NO: 824185 - DNA, 15 bp, Homo sapiens
cttccgagtcagttt

SEQ ID NO: 824186 - DNA, 15 bp, Homo sapiens
ccttccgagtcagtt

SEQ ID NO: 824187 - DNA, 15 bp, Homo sapiens
gccttccgagtcagt

SEQ ID NO: 824188 - DNA, 15 bp, Homo sapiens
tgccttccgagtcag

SEQ ID NO: 824189 - DNA, 15 bp, Homo sapiens
ctgccttccgagtca

SEQ ID NO: 824190 - DNA, 15 bp, Homo sapiens
gctgccttccgagtc

SEQ ID NO: 824191 - DNA, 15 bp, Homo sapiens
ggctgccttccgagt

SEQ ID NO: 824192 - DNA, 15 bp, Homo sapiens
aggctgccttccgag

SEQ ID NO: 824193 - DNA, 15 bp, Homo sapiens
taggctgccttccga

SEQ ID NO: 824194 - DNA, 15 bp, Homo sapiens
ataggctgccttccg

SEQ ID NO: 824195 - DNA, 15 bp, Homo sapiens
cataggctgccttcc

SEQ ID NO: 824196 - DNA, 15 bp, Homo sapiens
acataggctgccttc

SEQ ID NO: 824197 - DNA, 15 bp, Homo sapiens
cacataggctgcctt

SEQ ID NO: 824198 - DNA, 15 bp, Homo sapiens
tcacataggctgcct

SEQ ID NO: 824199 - DNA, 15 bp, Homo sapiens
ctcacataggctgcc

SEQ ID NO: 824200 - DNA, 15 bp, Homo sapiens
tctcacataggctgc

SEQ ID NO: 824201 - DNA, 15 bp, Homo sapiens
atctcacataggctg

SEQ ID NO: 824202 - DNA, 15 bp, Homo sapiens
tatctcacataggct

SEQ ID NO: 824203 - DNA, 15 bp, Homo sapiens
gtatctcacataggc

SEQ ID NO: 824204 - DNA, 15 bp, Homo sapiens
agtatctcacatagg

SEQ ID NO: 824205 - DNA, 15 bp, Homo sapiens
aagtatctcacatag

SEQ ID NO: 824206 - DNA, 15 bp, Homo sapiens
gaagtatctcacata

SEQ ID NO: 824207 - DNA, 15 bp, Homo sapiens
tgaagtatctcacat

SEQ ID NO: 824208 - DNA, 15 bp, Homo sapiens
ttgaagtatctcaca

SEQ ID NO: 824209 - DNA, 15 bp, Homo sapiens
attgaagtatctcac

SEQ ID NO: 824210 - DNA, 15 bp, Homo sapiens
tattgaagtatctca

SEQ ID NO: 824211 - DNA, 15 bp, Homo sapiens
ctattgaagtatctc

SEQ ID NO: 824212 - DNA, 15 bp, Homo sapiens
gctattgaagtatct

SEQ ID NO: 824213 - DNA, 15 bp, Homo sapiens
agctattgaagtatc

SEQ ID NO: 824214 - DNA, 15 bp, Homo sapiens
gagctattgaagtat

SEQ ID NO: 824215 - DNA, 15 bp, Homo sapiens
tgagctattgaagta

SEQ ID NO: 824216 - DNA, 15 bp, Homo sapiens
ctgagctattgaagt

SEQ ID NO: 824217 - DNA, 15 bp, Homo sapiens
gctgagctattgaag

SEQ ID NO: 824218 - DNA, 15 bp, Homo sapiens
ggctgagctattgaa

SEQ ID NO: 824219 - DNA, 15 bp, Homo sapiens
aggctgagctattga

SEQ ID NO: 824220 - DNA, 15 bp, Homo sapiens
aaggctgagctattg

SEQ ID NO: 824221 - DNA, 15 bp, Homo sapiens
gaaggctgagctatt

SEQ ID NO: 824222 - DNA, 15 bp, Homo sapiens
agaaggctgagctat

SEQ ID NO: 824223 - DNA, 15 bp, Homo sapiens
aagaaggctgagcta

SEQ ID NO: 824224 - DNA, 15 bp, Homo sapiens
gaagaaggctgagct

SEQ ID NO: 824225 - DNA, 15 bp, Homo sapiens
agaagaaggctgagc

SEQ ID NO: 824226 - DNA, 15 bp, Homo sapiens
aagaagaaggctgag

SEQ ID NO: 824227 - DNA, 15 bp, Homo sapiens
gaagaagaaggctga

SEQ ID NO: 824228 - DNA, 15 bp, Homo sapiens
agaagaagaaggctg

SEQ ID NO: 824229 - DNA, 15 bp, Homo sapiens
gagaagaagaaggct

SEQ ID NO: 824230 - DNA, 15 bp, Homo sapiens
tgagaagaagaaggc

SEQ ID NO: 824231 - DNA, 15 bp, Homo sapiens
ctgagaagaagaagg

SEQ ID NO: 824232 - DNA, 15 bp, Homo sapiens
cctgagaagaagaag

SEQ ID NO: 824233 - DNA, 15 bp, Homo sapiens
ccctgagaagaagaa

SEQ ID NO: 824234 - DNA, 15 bp, Homo sapiens
accctgagaagaaga

SEQ ID NO: 824235 - DNA, 15 bp, Homo sapiens
aaccctgagaagaag

SEQ ID NO: 824236 - DNA, 15 bp, Homo sapiens
gaaccctgagaagaa

SEQ ID NO: 824237 - DNA, 15 bp, Homo sapiens
agaaccctgagaaga

SEQ ID NO: 824238 - DNA, 15 bp, Homo sapiens
aagaaccctgagaag

SEQ ID NO: 824239 - DNA, 15 bp, Homo sapiens
aaagaaccctgagaa

SEQ ID NO: 824240 - DNA, 15 bp, Homo sapiens
caaagaaccctgaga

SEQ ID NO: 824241 - DNA, 15 bp, Homo sapiens
acaaagaaccctgag

SEQ ID NO: 824242 - DNA, 15 bp, Homo sapiens
cacaaagaaccctga

SEQ ID NO: 824243 - DNA, 15 bp, Homo sapiens
ccacaaagaaccctg

SEQ ID NO: 824244 - DNA, 15 bp, Homo sapiens
accacaaagaaccct

SEQ ID NO: 824245 - DNA, 15 bp, Homo sapiens
caccacaaagaaccc

SEQ ID NO: 824246 - DNA, 15 bp, Homo sapiens
acaccacaaagaacc

SEQ ID NO: 824247 - DNA, 15 bp, Homo sapiens
aacaccacaaagaac

SEQ ID NO: 824248 - DNA, 15 bp, Homo sapiens
aaacaccacaaagaa

SEQ ID NO: 824249 - DNA, 15 bp, Homo sapiens
aaaacaccacaaaga

SEQ ID NO: 824250 - DNA, 15 bp, Homo sapiens
aaaaacaccacaaag

SEQ ID NO: 824251 - DNA, 15 bp, Homo sapiens
taaaaacaccacaaa

SEQ ID NO: 824252 - DNA, 15 bp, Homo sapiens
ataaaaacaccacaa

SEQ ID NO: 824253 - DNA, 15 bp, Homo sapiens
gataaaaacaccaca

SEQ ID NO: 824254 - DNA, 15 bp, Homo sapiens
agataaaaacaccac

SEQ ID NO: 824255 - DNA, 15 bp, Homo sapiens
cagataaaaacacca

SEQ ID NO: 824256 - DNA, 15 bp, Homo sapiens
acagataaaaacacc

SEQ ID NO: 824257 - DNA, 15 bp, Homo sapiens
cacagataaaaacac

SEQ ID NO: 824258 - DNA, 15 bp, Homo sapiens
gcacagataaaaaca

SEQ ID NO: 824259 - DNA, 15 bp, Homo sapiens
agcacagataaaaac

SEQ ID NO: 824260 - DNA, 15 bp, Homo sapiens
aagcacagataaaaa

SEQ ID NO: 824261 - DNA, 15 bp, Homo sapiens
gaagcacagataaaa

SEQ ID NO: 824262 - DNA, 15 bp, Homo sapiens
ggaagcacagataaa

SEQ ID NO: 824263 - DNA, 15 bp, Homo sapiens
gggaagcacagataa

SEQ ID NO: 824264 - DNA, 15 bp, Homo sapiens
agggaagcacagata

SEQ ID NO: 824265 - DNA, 15 bp, Homo sapiens
tagggaagcacagat

SEQ ID NO: 824266 - DNA, 15 bp, Homo sapiens
atagggaagcacaga

SEQ ID NO: 824267 - DNA, 15 bp, Homo sapiens
catagggaagcacag

SEQ ID NO: 824268 - DNA, 15 bp, Homo sapiens
gcatagggaagcaca

SEQ ID NO: 824269 - DNA, 15 bp, Homo sapiens
tgcatagggaagcac

SEQ ID NO: 824270 - DNA, 15 bp, Homo sapiens
gtgcatagggaagca

SEQ ID NO: 824271 - DNA, 15 bp, Homo sapiens
agtgcatagggaagc

SEQ ID NO: 824272 - DNA, 15 bp, Homo sapiens
tagtgcatagggaag

SEQ ID NO: 824273 - DNA, 15 bp, Homo sapiens
ttagtgcatagggaa

SEQ ID NO: 824274 - DNA, 15 bp, Homo sapiens
attagtgcataggga

SEQ ID NO: 824275 - DNA, 15 bp, Homo sapiens
gattagtgcataggg

SEQ ID NO: 824276 - DNA, 15 bp, Homo sapiens
tgattagtgcatagg

SEQ ID NO: 824277 - DNA, 15 bp, Homo sapiens
ttgattagtgcatag

SEQ ID NO: 824278 - DNA, 15 bp, Homo sapiens
tttgattagtgcata

SEQ ID NO: 824279 - DNA, 15 bp, Homo sapiens
ctttgattagtgcat

SEQ ID NO: 824280 - DNA, 15 bp, Homo sapiens
cctttgattagtgca

SEQ ID NO: 824281 - DNA, 15 bp, Homo sapiens
tcctttgattagtgc

SEQ ID NO: 824282 - DNA, 15 bp, Homo sapiens
ttcctttgattagtg

SEQ ID NO: 824283 - DNA, 15 bp, Homo sapiens
attcctttgattagt

SEQ ID NO: 824284 - DNA, 15 bp, Homo sapiens
gattcctttgattag

SEQ ID NO: 824285 - DNA, 15 bp, Homo sapiens
tgattcctttgatta

SEQ ID NO: 824286 - DNA, 15 bp, Homo sapiens
atgattcctttgatt

SEQ ID NO: 824287 - DNA, 15 bp, Homo sapiens
gatgattcctttgat

SEQ ID NO: 824288 - DNA, 15 bp, Homo sapiens
ggatgattcctttga

SEQ ID NO: 824289 - DNA, 15 bp, Homo sapiens
aggatgattcctttg

SEQ ID NO: 824290 - DNA, 15 bp, Homo sapiens
gaggatgattccttt

SEQ ID NO: 824291 - DNA, 15 bp, Homo sapiens
ggaggatgattcctt

SEQ ID NO: 824292 - DNA, 15 bp, Homo sapiens
cggaggatgattcct

SEQ ID NO: 824293 - DNA, 15 bp, Homo sapiens
ccggaggatgattcc

SEQ ID NO: 824294 - DNA, 15 bp, Homo sapiens
tccggaggatgattc

SEQ ID NO: 824295 - DNA, 15 bp, Homo sapiens
ttccggaggatgatt

SEQ ID NO: 824296 - DNA, 15 bp, Homo sapiens
tttccggaggatgat

SEQ ID NO: 824297 - DNA, 15 bp, Homo sapiens
ttttccggaggatga

SEQ ID NO: 824298 - DNA, 15 bp, Homo sapiens
attttccggaggatg

SEQ ID NO: 824299 - DNA, 15 bp, Homo sapiens
tattttccggaggat

SEQ ID NO: 824300 - DNA, 15 bp, Homo sapiens
atattttccggagga

SEQ ID NO: 824301 - DNA, 15 bp, Homo sapiens
aatattttccggagg

SEQ ID NO: 824302 - DNA, 15 bp, Homo sapiens
gaatattttccggag

SEQ ID NO: 824303 - DNA, 15 bp, Homo sapiens
tgaatattttccgga

SEQ ID NO: 824304 - DNA, 15 bp, Homo sapiens
gtgaatattttccgg

SEQ ID NO: 824305 - DNA, 15 bp, Homo sapiens
ggtgaatattttccg

SEQ ID NO: 824306 - DNA, 15 bp, Homo sapiens
tggtgaatattttcc

SEQ ID NO: 824307 - DNA, 15 bp, Homo sapiens
gtggtgaatattttc

SEQ ID NO: 824308 - DNA, 15 bp, Homo sapiens
ggtggtgaatatttt

SEQ ID NO: 824309 - DNA, 15 bp, Homo sapiens
tggtggtgaatattt

SEQ ID NO: 824310 - DNA, 15 bp, Homo sapiens
atggtggtgaatatt

SEQ ID NO: 824311 - DNA, 15 bp, Homo sapiens
gatggtggtgaatat

SEQ ID NO: 824312 - DNA, 15 bp, Homo sapiens
agatggtggtgaata

SEQ ID NO: 824313 - DNA, 15 bp, Homo sapiens
gagatggtggtgaat

SEQ ID NO: 824314 - DNA, 15 bp, Homo sapiens
tgagatggtggtgaa

SEQ ID NO: 824315 - DNA, 15 bp, Homo sapiens
atgagatggtggtga

SEQ ID NO: 824316 - DNA, 15 bp, Homo sapiens
aatgagatggtggtg

SEQ ID NO: 824317 - DNA, 15 bp, Homo sapiens
gaatgagatggtggt

SEQ ID NO: 824318 - DNA, 15 bp, Homo sapiens
agaatgagatggtgg

SEQ ID NO: 824319 - DNA, 15 bp, Homo sapiens
cagaatgagatggtg

SEQ ID NO: 824320 - DNA, 15 bp, Homo sapiens
gcagaatgagatggt

SEQ ID NO: 824321 - DNA, 15 bp, Homo sapiens
tgcagaatgagatgg

SEQ ID NO: 824322 - DNA, 15 bp, Homo sapiens
atgcagaatgagatg

SEQ ID NO: 824323 - DNA, 15 bp, Homo sapiens
aatgcagaatgagat

SEQ ID NO: 824324 - DNA, 15 bp, Homo sapiens
caatgcagaatgaga

SEQ ID NO: 824325 - DNA, 15 bp, Homo sapiens
acaatgcagaatgag

SEQ ID NO: 824326 - DNA, 15 bp, Homo sapiens
aacaatgcagaatga

SEQ ID NO: 824327 - DNA, 15 bp, Homo sapiens
gaacaatgcagaatg

SEQ ID NO: 824328 - DNA, 15 bp, Homo sapiens
agaacaatgcagaat

SEQ ID NO: 824329 - DNA, 15 bp, Homo sapiens
cagaacaatgcagaa

SEQ ID NO: 824330 - DNA, 15 bp, Homo sapiens
gcagaacaatgcaga

SEQ ID NO: 824331 - DNA, 15 bp, Homo sapiens
cgcagaacaatgcag

SEQ ID NO: 824332 - DNA, 15 bp, Homo sapiens
gcgcagaacaatgca

SEQ ID NO: 824333 - DNA, 15 bp, Homo sapiens
tgcgcagaacaatgc

SEQ ID NO: 824334 - DNA, 15 bp, Homo sapiens
atgcgcagaacaatg

SEQ ID NO: 824335 - DNA, 15 bp, Homo sapiens
catgcgcagaacaat

SEQ ID NO: 824336 - DNA, 15 bp, Homo sapiens
ccatgcgcagaacaa

SEQ ID NO: 824337 - DNA, 15 bp, Homo sapiens
gccatgcgcagaaca

SEQ ID NO: 824338 - DNA, 15 bp, Homo sapiens
cgccatgcgcagaac

SEQ ID NO: 824339 - DNA, 15 bp, Homo sapiens
ccgccatgcgcagaa

SEQ ID NO: 824340 - DNA, 15 bp, Homo sapiens
accgccatgcgcaga

SEQ ID NO: 824341 - DNA, 15 bp, Homo sapiens
gaccgccatgcgcag

SEQ ID NO: 824342 - DNA, 15 bp, Homo sapiens
tgaccgccatgcgca

SEQ ID NO: 824343 - DNA, 15 bp, Homo sapiens
gtgaccgccatgcgc

SEQ ID NO: 824344 - DNA, 15 bp, Homo sapiens
agtgaccgccatgcg

SEQ ID NO: 824345 - DNA, 15 bp, Homo sapiens
gagtgaccgccatgc

SEQ ID NO: 824346 - DNA, 15 bp, Homo sapiens
cgagtgaccgccatg

SEQ ID NO: 824347 - DNA, 15 bp, Homo sapiens
ccgagtgaccgccat

SEQ ID NO: 824348 - DNA, 15 bp, Homo sapiens
gccgagtgaccgcca

SEQ ID NO: 824349 - DNA, 15 bp, Homo sapiens
tgccgagtgaccgcc

SEQ ID NO: 824350 - DNA, 15 bp, Homo sapiens
ttgccgagtgaccgc

SEQ ID NO: 824351 - DNA, 15 bp, Homo sapiens
attgccgagtgaccg

SEQ ID NO: 824352 - DNA, 15 bp, Homo sapiens
aattgccgagtgacc

SEQ ID NO: 824353 - DNA, 15 bp, Homo sapiens
aaattgccgagtgac

SEQ ID NO: 824354 - DNA, 15 bp, Homo sapiens
gaaattgccgagtga

SEQ ID NO: 824355 - DNA, 15 bp, Homo sapiens
ggaaattgccgagtg

SEQ ID NO: 824356 - DNA, 15 bp, Homo sapiens
gggaaattgccgagt

SEQ ID NO: 824357 - DNA, 15 bp, Homo sapiens
agggaaattgccgag

SEQ ID NO: 824358 - DNA, 15 bp, Homo sapiens
cagggaaattgccga

SEQ ID NO: 824359 - DNA, 15 bp, Homo sapiens
ccagggaaattgccg

SEQ ID NO: 824360 - DNA, 15 bp, Homo sapiens
cccagggaaattgcc

SEQ ID NO: 824361 - DNA, 15 bp, Homo sapiens
gcccagggaaattgc

SEQ ID NO: 824362 - DNA, 15 bp, Homo sapiens
agcccagggaaattg

SEQ ID NO: 824363 - DNA, 15 bp, Homo sapiens
cagcccagggaaatt

SEQ ID NO: 824364 - DNA, 15 bp, Homo sapiens
acagcccagggaaat

SEQ ID NO: 824365 - DNA, 15 bp, Homo sapiens
tacagcccagggaaa

SEQ ID NO: 824366 - DNA, 15 bp, Homo sapiens
gtacagcccagggaa

SEQ ID NO: 824367 - DNA, 15 bp, Homo sapiens
tgtacagcccaggga

SEQ ID NO: 824368 - DNA, 15 bp, Homo sapiens
ttgtacagcccaggg

SEQ ID NO: 824369 - DNA, 15 bp, Homo sapiens
tttgtacagcccagg

SEQ ID NO: 824370 - DNA, 15 bp, Homo sapiens
gtttgtacagcccag

SEQ ID NO: 824371 - DNA, 15 bp, Homo sapiens
tgtttgtacagccca

SEQ ID NO: 824372 - DNA, 15 bp, Homo sapiens
atgtttgtacagccc

SEQ ID NO: 824373 - DNA, 15 bp, Homo sapiens
catgtttgtacagcc

SEQ ID NO: 824374 - DNA, 15 bp, Homo sapiens
ccatgtttgtacagc

SEQ ID NO: 824375 - DNA, 15 bp, Homo sapiens
accatgtttgtacag

SEQ ID NO: 824376 - DNA, 15 bp, Homo sapiens
taccatgtttgtaca

SEQ ID NO: 824377 - DNA, 15 bp, Homo sapiens
ataccatgtttgtac

SEQ ID NO: 824378 - DNA, 15 bp, Homo sapiens
cataccatgtttgta

SEQ ID NO: 824379 - DNA, 15 bp, Homo sapiens
tcataccatgtttgt

SEQ ID NO: 824380 - DNA, 15 bp, Homo sapiens
gtcataccatgtttg

SEQ ID NO: 824381 - DNA, 15 bp, Homo sapiens
agtcataccatgttt

SEQ ID NO: 824382 - DNA, 15 bp, Homo sapiens
gagtcataccatgtt

SEQ ID NO: 824383 - DNA, 15 bp, Homo sapiens
agagtcataccatgt

SEQ ID NO: 824384 - DNA, 15 bp, Homo sapiens
gagagtcataccatg

SEQ ID NO: 824385 - DNA, 15 bp, Homo sapiens
agagagtcataccat

SEQ ID NO: 824386 - DNA, 15 bp, Homo sapiens
aagagagtcatacca

SEQ ID NO: 824387 - DNA, 15 bp, Homo sapiens
caagagagtcatacc

SEQ ID NO: 824388 - DNA, 15 bp, Homo sapiens
ccaagagagtcatac

SEQ ID NO: 824389 - DNA, 15 bp, Homo sapiens
tccaagagagtcata

SEQ ID NO: 824390 - DNA, 15 bp, Homo sapiens
ctccaagagagtcat

SEQ ID NO: 824391 - DNA, 15 bp, Homo sapiens
gctccaagagagtca

SEQ ID NO: 824392 - DNA, 15 bp, Homo sapiens
tgctccaagagagtc

SEQ ID NO: 824393 - DNA, 15 bp, Homo sapiens
ttgctccaagagagt

SEQ ID NO: 824394 - DNA, 15 bp, Homo sapiens
attgctccaagagag

SEQ ID NO: 824395 - DNA, 15 bp, Homo sapiens
tattgctccaagaga

SEQ ID NO: 824396 - DNA, 15 bp, Homo sapiens
ttattgctccaagag

SEQ ID NO: 824397 - DNA, 15 bp, Homo sapiens
tttattgctccaaga

SEQ ID NO: 824398 - DNA, 15 bp, Homo sapiens
gtttattgctccaag

SEQ ID NO: 824399 - DNA, 15 bp, Homo sapiens
tgtttattgctccaa

SEQ ID NO: 824400 - DNA, 15 bp, Homo sapiens
ttgtttattgctcca

SEQ ID NO: 824401 - DNA, 15 bp, Homo sapiens
tttgtttattgctcc

SEQ ID NO: 824402 - DNA, 15 bp, Homo sapiens
ttttgtttattgctc

SEQ ID NO: 824403 - DNA, 15 bp, Homo sapiens
attttgtttattgct

SEQ ID NO: 824404 - DNA, 15 bp, Homo sapiens
tattttgtttattgc

SEQ ID NO: 824405 - DNA, 15 bp, Homo sapiens
gtattttgtttattg

SEQ ID NO: 824406 - DNA, 15 bp, Homo sapiens
tgtattttgtttatt

SEQ ID NO: 824407 - DNA, 15 bp, Homo sapiens
ctgtattttgtttat

SEQ ID NO: 824408 - DNA, 15 bp, Homo sapiens
cctgtattttgttta

SEQ ID NO: 824409 - DNA, 15 bp, Homo sapiens
acctgtattttgttt

SEQ ID NO: 824410 - DNA, 15 bp, Homo sapiens
tacctgtattttgtt

SEQ ID NO: 824411 - DNA, 15 bp, Homo sapiens
ttacctgtattttgt

SEQ ID NO: 824412 - DNA, 15 bp, Homo sapiens
attacctgtattttg

SEQ ID NO: 824413 - DNA, 15 bp, Homo sapiens
cattacctgtatttt

SEQ ID NO: 824414 - DNA, 15 bp, Homo sapiens
acattacctgtattt

SEQ ID NO: 824415 - DNA, 15 bp, Homo sapiens
tacattacctgtatt

SEQ ID NO: 824416 - DNA, 15 bp, Homo sapiens
gtacattacctgtat

SEQ ID NO: 824417 - DNA, 15 bp, Homo sapiens
ggtacattacctgta

SEQ ID NO: 824418 - DNA, 15 bp, Homo sapiens
tggtacattacctgt

SEQ ID NO: 824419 - DNA, 15 bp, Homo sapiens
atggtacattacctg

SEQ ID NO: 824420 - DNA, 15 bp, Homo sapiens
tatggtacattacct

SEQ ID NO: 824421 - DNA, 15 bp, Homo sapiens
ttatggtacattacc

SEQ ID NO: 824422 - DNA, 15 bp, Homo sapiens
attatggtacattac

SEQ ID NO: 824423 - DNA, 15 bp, Homo sapiens
cattatggtacatta

SEQ ID NO: 824424 - DNA, 15 bp, Homo sapiens
gcattatggtacatt

SEQ ID NO: 824425 - DNA, 15 bp, Homo sapiens
agcattatggtacat

SEQ ID NO: 824426 - DNA, 15 bp, Homo sapiens
cagcattatggtaca

SEQ ID NO: 824427 - DNA, 15 bp, Homo sapiens
gcagcattatggtac

SEQ ID NO: 824428 - DNA, 15 bp, Homo sapiens
tgcagcattatggta

SEQ ID NO: 824429 - DNA, 15 bp, Homo sapiens
atgcagcattatggt

SEQ ID NO: 824430 - DNA, 15 bp, Homo sapiens
aatgcagcattatgg

SEQ ID NO: 824431 - DNA, 15 bp, Homo sapiens
taatgcagcattatg

SEQ ID NO: 824432 - DNA, 15 bp, Homo sapiens
ataatgcagcattat

SEQ ID NO: 824433 - DNA, 15 bp, Homo sapiens
tataatgcagcatta

SEQ ID NO: 824434 - DNA, 15 bp, Homo sapiens
atataatgcagcatt

SEQ ID NO: 824435 - DNA, 15 bp, Homo sapiens
tatataatgcagcat

SEQ ID NO: 824436 - DNA, 15 bp, Homo sapiens
gtatataatgcagca

SEQ ID NO: 824437 - DNA, 15 bp, Homo sapiens
agtatataatgcagc

SEQ ID NO: 824438 - DNA, 15 bp, Homo sapiens
tagtatataatgcag

SEQ ID NO: 824439 - DNA, 15 bp, Homo sapiens
atagtatataatgca

SEQ ID NO: 824440 - DNA, 15 bp, Homo sapiens
catagtatataatgc

SEQ ID NO: 824441 - DNA, 15 bp, Homo sapiens
tcatagtatataatg

SEQ ID NO: 824442 - DNA, 15 bp, Homo sapiens
atcatagtatataat

SEQ ID NO: 824443 - DNA, 15 bp, Homo sapiens
aatcatagtatataa

SEQ ID NO: 824444 - DNA, 15 bp, Homo sapiens
aaatcatagtatata

SEQ ID NO: 824445 - DNA, 15 bp, Homo sapiens
taaatcatagtatat

SEQ ID NO: 824446 - DNA, 15 bp, Homo sapiens
ttaaatcatagtata

SEQ ID NO: 824447 - DNA, 15 bp, Homo sapiens
tttaaatcatagtat

SEQ ID NO: 824448 - DNA, 15 bp, Homo sapiens
atttaaatcatagta

SEQ ID NO: 824449 - DNA, 15 bp, Homo sapiens
tatttaaatcatagt

SEQ ID NO: 824450 - DNA, 15 bp, Homo sapiens
ttatttaaatcatag

SEQ ID NO: 824451 - DNA, 15 bp, Homo sapiens
attatttaaatcata

SEQ ID NO: 824452 - DNA, 15 bp, Homo sapiens
gattatttaaatcat

SEQ ID NO: 824453 - DNA, 15 bp, Homo sapiens
tgattatttaaatca

SEQ ID NO: 824454 - DNA, 15 bp, Homo sapiens
ctgattatttaaatc

SEQ ID NO: 824455 - DNA, 15 bp, Homo sapiens
actgattatttaaat

SEQ ID NO: 824456 - DNA, 15 bp, Homo sapiens
gactgattatttaaa

SEQ ID NO: 824457 - DNA, 15 bp, Homo sapiens
tgactgattatttaa

SEQ ID NO: 824458 - DNA, 15 bp, Homo sapiens
ttgactgattattta

SEQ ID NO: 824459 - DNA, 15 bp, Homo sapiens
attgactgattattt

SEQ ID NO: 824460 - DNA, 15 bp, Homo sapiens
tattgactgattatt

SEQ ID NO: 824461 - DNA, 15 bp, Homo sapiens
ctattgactgattat

SEQ ID NO: 824462 - DNA, 15 bp, Homo sapiens
tctattgactgatta

SEQ ID NO: 824463 - DNA, 15 bp, Homo sapiens
atctattgactgatt

SEQ ID NO: 824464 - DNA, 15 bp, Homo sapiens
gatctattgactgat

SEQ ID NO: 824465 - DNA, 15 bp, Homo sapiens
tgatctattgactga

SEQ ID NO: 824466 - DNA, 15 bp, Homo sapiens
ctgatctattgactg

SEQ ID NO: 824467 - DNA, 15 bp, Homo sapiens
actgatctattgact

SEQ ID NO: 824468 - DNA, 15 bp, Homo sapiens
aactgatctattgac

SEQ ID NO: 824469 - DNA, 15 bp, Homo sapiens
gaactgatctattga

SEQ ID NO: 824470 - DNA, 15 bp, Homo sapiens
agaactgatctattg

SEQ ID NO: 824471 - DNA, 15 bp, Homo sapiens
tagaactgatctatt

SEQ ID NO: 824472 - DNA, 15 bp, Homo sapiens
ttagaactgatctat

SEQ ID NO: 824473 - DNA, 15 bp, Homo sapiens
attagaactgatcta

SEQ ID NO: 824474 - DNA, 15 bp, Homo sapiens
cattagaactgatct

SEQ ID NO: 824475 - DNA, 15 bp, Homo sapiens
tcattagaactgatc

SEQ ID NO: 824476 - DNA, 15 bp, Homo sapiens
ttcattagaactgat

SEQ ID NO: 824477 - DNA, 15 bp, Homo sapiens
gttcattagaactga

SEQ ID NO: 824478 - DNA, 15 bp, Homo sapiens
agttcattagaactg

SEQ ID NO: 824479 - DNA, 15 bp, Homo sapiens
aagttcattagaact

SEQ ID NO: 824480 - DNA, 15 bp, Homo sapiens
aaagttcattagaac

SEQ ID NO: 824481 - DNA, 15 bp, Homo sapiens
caaagttcattagaa

SEQ ID NO: 824482 - DNA, 15 bp, Homo sapiens
gcaaagttcattaga

SEQ ID NO: 824483 - DNA, 15 bp, Homo sapiens
tgcaaagttcattag

SEQ ID NO: 824484 - DNA, 15 bp, Homo sapiens
ttgcaaagttcatta

SEQ ID NO: 824485 - DNA, 15 bp, Homo sapiens
tttgcaaagttcatt

SEQ ID NO: 824486 - DNA, 15 bp, Homo sapiens
ttttgcaaagttcat

SEQ ID NO: 824487 - DNA, 15 bp, Homo sapiens
tttttgcaaagttca

SEQ ID NO: 824488 - DNA, 15 bp, Homo sapiens
atttttgcaaagttc

SEQ ID NO: 824489 - DNA, 15 bp, Homo sapiens
catttttgcaaagtt

SEQ ID NO: 824490 - DNA, 15 bp, Homo sapiens
acatttttgcaaagt

SEQ ID NO: 824491 - DNA, 15 bp, Homo sapiens
cacatttttgcaaag

SEQ ID NO: 824492 - DNA, 15 bp, Homo sapiens
gcacatttttgcaaa

SEQ ID NO: 824493 - DNA, 15 bp, Homo sapiens
cgcacatttttgcaa

SEQ ID NO: 824494 - DNA, 15 bp, Homo sapiens
tcgcacatttttgca

SEQ ID NO: 824495 - DNA, 15 bp, Homo sapiens
ttcgcacatttttgc

SEQ ID NO: 824496 - DNA, 15 bp, Homo sapiens
tttcgcacatttttg

SEQ ID NO: 824497 - DNA, 15 bp, Homo sapiens
ttttcgcacattttt

SEQ ID NO: 824498 - DNA, 15 bp, Homo sapiens
cttttcgcacatttt

SEQ ID NO: 824499 - DNA, 15 bp, Homo sapiens
tcttttcgcacattt

SEQ ID NO: 824500 - DNA, 15 bp, Homo sapiens
atcttttcgcacatt

SEQ ID NO: 824501 - DNA, 15 bp, Homo sapiens
tatcttttcgcacat

SEQ ID NO: 824502 - DNA, 15 bp, Homo sapiens
ctatcttttcgcaca

SEQ ID NO: 824503 - DNA, 15 bp, Homo sapiens
tctatcttttcgcac

SEQ ID NO: 824504 - DNA, 15 bp, Homo sapiens
ttctatcttttcgca

SEQ ID NO: 824505 - DNA, 15 bp, Homo sapiens
tttctatcttttcgc

SEQ ID NO: 824506 - DNA, 15 bp, Homo sapiens
ttttctatcttttcg

SEQ ID NO: 824507 - DNA, 15 bp, Homo sapiens
tttttctatcttttc

SEQ ID NO: 824508 - DNA, 15 bp, Homo sapiens
ctttttctatctttt

SEQ ID NO: 824509 - DNA, 15 bp, Homo sapiens
tctttttctatcttt

SEQ ID NO: 824510 - DNA, 15 bp, Homo sapiens
ttctttttctatctt

SEQ ID NO: 824511 - DNA, 15 bp, Homo sapiens
tttctttttctatct

SEQ ID NO: 824512 - DNA, 15 bp, Homo sapiens
atttctttttctatc

SEQ ID NO: 824513 - DNA, 15 bp, Homo sapiens
aatttctttttctat

SEQ ID NO: 824514 - DNA, 15 bp, Homo sapiens
aaatttctttttcta

SEQ ID NO: 824515 - DNA, 15 bp, Homo sapiens
gaaatttctttttct

SEQ ID NO: 824516 - DNA, 15 bp, Homo sapiens
ggaaatttctttttc

SEQ ID NO: 824517 - DNA, 15 bp, Homo sapiens
aggaaatttcttttt

SEQ ID NO: 824518 - DNA, 15 bp, Homo sapiens
aaggaaatttctttt

SEQ ID NO: 824519 - DNA, 15 bp, Homo sapiens
gaaggaaatttcttt

SEQ ID NO: 824520 - DNA, 15 bp, Homo sapiens
tgaaggaaatttctt

SEQ ID NO: 824521 - DNA, 15 bp, Homo sapiens
gtgaaggaaatttct

SEQ ID NO: 824522 - DNA, 15 bp, Homo sapiens
agtgaaggaaatttc

SEQ ID NO: 824523 - DNA, 15 bp, Homo sapiens
tagtgaaggaaattt

SEQ ID NO: 824524 - DNA, 15 bp, Homo sapiens
ctagtgaaggaaatt

SEQ ID NO: 824525 - DNA, 15 bp, Homo sapiens
cctagtgaaggaaat

SEQ ID NO: 824526 - DNA, 15 bp, Homo sapiens
tcctagtgaaggaaa

SEQ ID NO: 824527 - DNA, 15 bp, Homo sapiens
ttcctagtgaaggaa

SEQ ID NO: 824528 - DNA, 15 bp, Homo sapiens
cttcctagtgaagga

SEQ ID NO: 824529 - DNA, 15 bp, Homo sapiens
acttcctagtgaagg

SEQ ID NO: 824530 - DNA, 15 bp, Homo sapiens
aacttcctagtgaag

SEQ ID NO: 824531 - DNA, 15 bp, Homo sapiens
taacttcctagtgaa

SEQ ID NO: 824532 - DNA, 15 bp, Homo sapiens
ataacttcctagtga

SEQ ID NO: 824533 - DNA, 15 bp, Homo sapiens
tataacttcctagtg

SEQ ID NO: 824534 - DNA, 15 bp, Homo sapiens
ttataacttcctagt

SEQ ID NO: 824535 - DNA, 15 bp, Homo sapiens
tttataacttcctag

SEQ ID NO: 824536 - DNA, 15 bp, Homo sapiens
ttttataacttccta

SEQ ID NO: 824537 - DNA, 15 bp, Homo sapiens
cttttataacttcct

SEQ ID NO: 824538 - DNA, 15 bp, Homo sapiens
acttttataacttcc

SEQ ID NO: 824539 - DNA, 15 bp, Homo sapiens
aacttttataacttc

SEQ ID NO: 824540 - DNA, 15 bp, Homo sapiens
caacttttataactt

SEQ ID NO: 824541 - DNA, 15 bp, Homo sapiens
gcaacttttataact

SEQ ID NO: 824542 - DNA, 15 bp, Homo sapiens
ggcaacttttataac

SEQ ID NO: 824543 - DNA, 15 bp, Homo sapiens
tggcaacttttataa

SEQ ID NO: 824544 - DNA, 15 bp, Homo sapiens
ctggcaacttttata

SEQ ID NO: 824545 - DNA, 15 bp, Homo sapiens
gctggcaacttttat

SEQ ID NO: 824546 - DNA, 15 bp, Homo sapiens
agctggcaactttta

SEQ ID NO: 824547 - DNA, 15 bp, Homo sapiens
tagctggcaactttt

SEQ ID NO: 824548 - DNA, 15 bp, Homo sapiens
ttagctggcaacttt

SEQ ID NO: 824549 - DNA, 15 bp, Homo sapiens
attagctggcaactt

SEQ ID NO: 824550 - DNA, 15 bp, Homo sapiens
tattagctggcaact

SEQ ID NO: 824551 - DNA, 15 bp, Homo sapiens
gtattagctggcaac

SEQ ID NO: 824552 - DNA, 15 bp, Homo sapiens
agtattagctggcaa

SEQ ID NO: 824553 - DNA, 15 bp, Homo sapiens
tagtattagctggca

SEQ ID NO: 824554 - DNA, 15 bp, Homo sapiens
ctagtattagctggc

SEQ ID NO: 824555 - DNA, 15 bp, Homo sapiens
cctagtattagctgg

SEQ ID NO: 824556 - DNA, 15 bp, Homo sapiens
tcctagtattagctg

SEQ ID NO: 824557 - DNA, 15 bp, Homo sapiens
ttcctagtattagct

SEQ ID NO: 824558 - DNA, 15 bp, Homo sapiens
attcctagtattagc

SEQ ID NO: 824559 - DNA, 15 bp, Homo sapiens
cattcctagtattag

SEQ ID NO: 824560 - DNA, 15 bp, Homo sapiens
acattcctagtatta

SEQ ID NO: 824561 - DNA, 15 bp, Homo sapiens
aacattcctagtatt

SEQ ID NO: 824562 - DNA, 15 bp, Homo sapiens
gaacattcctagtat

SEQ ID NO: 824563 - DNA, 15 bp, Homo sapiens
tgaacattcctagta

SEQ ID NO: 824564 - DNA, 15 bp, Homo sapiens
gtgaacattcctagt

SEQ ID NO: 824565 - DNA, 15 bp, Homo sapiens
ggtgaacattcctag

SEQ ID NO: 824566 - DNA, 15 bp, Homo sapiens
aggtgaacattccta

SEQ ID NO: 824567 - DNA, 15 bp, Homo sapiens
aaggtgaacattcct

SEQ ID NO: 824568 - DNA, 15 bp, Homo sapiens
taaggtgaacattcc

SEQ ID NO: 824569 - DNA, 15 bp, Homo sapiens
ttaaggtgaacattc

SEQ ID NO: 824570 - DNA, 15 bp, Homo sapiens
tttaaggtgaacatt

SEQ ID NO: 824571 - DNA, 15 bp, Homo sapiens
gtttaaggtgaacat

SEQ ID NO: 824572 - DNA, 15 bp, Homo sapiens
agtttaaggtgaaca

SEQ ID NO: 824573 - DNA, 15 bp, Homo sapiens
aagtttaaggtgaac

SEQ ID NO: 824574 - DNA, 15 bp, Homo sapiens
aaagtttaaggtgaa

SEQ ID NO: 824575 - DNA, 15 bp, Homo sapiens
aaaagtttaaggtga

SEQ ID NO: 824576 - DNA, 15 bp, Homo sapiens
gaaaagtttaaggtg

SEQ ID NO: 824577 - DNA, 15 bp, Homo sapiens
ggaaaagtttaaggt

SEQ ID NO: 824578 - DNA, 15 bp, Homo sapiens
aggaaaagtttaagg

SEQ ID NO: 824579 - DNA, 15 bp, Homo sapiens
taggaaaagtttaag

SEQ ID NO: 824580 - DNA, 15 bp, Homo sapiens
ctaggaaaagtttaa

SEQ ID NO: 824581 - DNA, 15 bp, Homo sapiens
gctaggaaaagttta

SEQ ID NO: 824582 - DNA, 15 bp, Homo sapiens
tgctaggaaaagttt

SEQ ID NO: 824583 - DNA, 15 bp, Homo sapiens
atgctaggaaaagtt

SEQ ID NO: 824584 - DNA, 15 bp, Homo sapiens
aatgctaggaaaagt

SEQ ID NO: 824585 - DNA, 15 bp, Homo sapiens
aaatgctaggaaaag

SEQ ID NO: 824586 - DNA, 15 bp, Homo sapiens
gaaatgctaggaaaa

SEQ ID NO: 824587 - DNA, 15 bp, Homo sapiens
agaaatgctaggaaa

SEQ ID NO: 824588 - DNA, 15 bp, Homo sapiens
gagaaatgctaggaa

SEQ ID NO: 824589 - DNA, 15 bp, Homo sapiens
agagaaatgctagga

SEQ ID NO: 824590 - DNA, 15 bp, Homo sapiens
cagagaaatgctagg

SEQ ID NO: 824591 - DNA, 15 bp, Homo sapiens
ccagagaaatgctag

SEQ ID NO: 824592 - DNA, 15 bp, Homo sapiens
tccagagaaatgcta

SEQ ID NO: 824593 - DNA, 15 bp, Homo sapiens
gtccagagaaatgct

SEQ ID NO: 824594 - DNA, 15 bp, Homo sapiens
tgtccagagaaatgc

SEQ ID NO: 824595 - DNA, 15 bp, Homo sapiens
ctgtccagagaaatg

SEQ ID NO: 824596 - DNA, 15 bp, Homo sapiens
actgtccagagaaat

SEQ ID NO: 824597 - DNA, 15 bp, Homo sapiens
tactgtccagagaaa

SEQ ID NO: 824598 - DNA, 15 bp, Homo sapiens
atactgtccagagaa

SEQ ID NO: 824599 - DNA, 15 bp, Homo sapiens
catactgtccagaga

SEQ ID NO: 824600 - DNA, 15 bp, Homo sapiens
tcatactgtccagag

SEQ ID NO: 824601 - DNA, 15 bp, Homo sapiens
atcatactgtccaga

SEQ ID NO: 824602 - DNA, 15 bp, Homo sapiens
catcatactgtccag

SEQ ID NO: 824603 - DNA, 15 bp, Homo sapiens
ccatcatactgtcca

SEQ ID NO: 824604 - DNA, 15 bp, Homo sapiens
tccatcatactgtcc

SEQ ID NO: 824605 - DNA, 15 bp, Homo sapiens
atccatcatactgtc

SEQ ID NO: 824606 - DNA, 15 bp, Homo sapiens
catccatcatactgt

SEQ ID NO: 824607 - DNA, 15 bp, Homo sapiens
tcatccatcatactg

SEQ ID NO: 824608 - DNA, 15 bp, Homo sapiens
ctcatccatcatact

SEQ ID NO: 824609 - DNA, 15 bp, Homo sapiens
tctcatccatcatac

SEQ ID NO: 824610 - DNA, 15 bp, Homo sapiens
ctctcatccatcata

SEQ ID NO: 824611 - DNA, 15 bp, Homo sapiens
actctcatccatcat

SEQ ID NO: 824612 - DNA, 15 bp, Homo sapiens
cactctcatccatca

SEQ ID NO: 824613 - DNA, 15 bp, Homo sapiens
ccactctcatccatc

SEQ ID NO: 824614 - DNA, 15 bp, Homo sapiens
gccactctcatccat

SEQ ID NO: 824615 - DNA, 15 bp, Homo sapiens
tgccactctcatcca

SEQ ID NO: 824616 - DNA, 15 bp, Homo sapiens
atgccactctcatcc

SEQ ID NO: 824617 - DNA, 15 bp, Homo sapiens
aatgccactctcatc

SEQ ID NO: 824618 - DNA, 15 bp, Homo sapiens
aaatgccactctcat

SEQ ID NO: 824619 - DNA, 15 bp, Homo sapiens
aaaatgccactctca

SEQ ID NO: 824620 - DNA, 15 bp, Homo sapiens
taaaatgccactctc

SEQ ID NO: 824621 - DNA, 15 bp, Homo sapiens
ataaaatgccactct

SEQ ID NO: 824622 - DNA, 15 bp, Homo sapiens
cataaaatgccactc

SEQ ID NO: 824623 - DNA, 15 bp, Homo sapiens
gcataaaatgccact

SEQ ID NO: 824624 - DNA, 15 bp, Homo sapiens
ggcataaaatgccac

SEQ ID NO: 824625 - DNA, 15 bp, Homo sapiens
tggcataaaatgcca

SEQ ID NO: 824626 - DNA, 15 bp, Homo sapiens
ttggcataaaatgcc

SEQ ID NO: 824627 - DNA, 15 bp, Homo sapiens
tttggcataaaatgc

SEQ ID NO: 824628 - DNA, 15 bp, Homo sapiens
atttggcataaaatg

SEQ ID NO: 824629 - DNA, 15 bp, Homo sapiens
aatttggcataaaat

SEQ ID NO: 824630 - DNA, 15 bp, Homo sapiens
taatttggcataaaa

SEQ ID NO: 824631 - DNA, 15 bp, Homo sapiens
gtaatttggcataaa

SEQ ID NO: 824632 - DNA, 15 bp, Homo sapiens
ggtaatttggcataa

SEQ ID NO: 824633 - DNA, 15 bp, Homo sapiens
aggtaatttggcata

SEQ ID NO: 824634 - DNA, 15 bp, Homo sapiens
aaggtaatttggcat

SEQ ID NO: 824635 - DNA, 15 bp, Homo sapiens
taaggtaatttggca

SEQ ID NO: 824636 - DNA, 15 bp, Homo sapiens
ttaaggtaatttggc

SEQ ID NO: 824637 - DNA, 15 bp, Homo sapiens
tttaaggtaatttgg

SEQ ID NO: 824638 - DNA, 15 bp, Homo sapiens
ttttaaggtaatttg

SEQ ID NO: 824639 - DNA, 15 bp, Homo sapiens
attttaaggtaattt

SEQ ID NO: 824640 - DNA, 15 bp, Homo sapiens
gattttaaggtaatt

SEQ ID NO: 824641 - DNA, 15 bp, Homo sapiens
ggattttaaggtaat

SEQ ID NO: 824642 - DNA, 15 bp, Homo sapiens
gggattttaaggtaa

SEQ ID NO: 824643 - DNA, 15 bp, Homo sapiens
tgggattttaaggta

SEQ ID NO: 824644 - DNA, 15 bp, Homo sapiens
ttgggattttaaggt

SEQ ID NO: 824645 - DNA, 15 bp, Homo sapiens
attgggattttaagg

SEQ ID NO: 824646 - DNA, 15 bp, Homo sapiens
tattgggattttaag

SEQ ID NO: 824647 - DNA, 15 bp, Homo sapiens
ttattgggattttaa

SEQ ID NO: 824648 - DNA, 15 bp, Homo sapiens
attattgggatttta

SEQ ID NO: 824649 - DNA, 15 bp, Homo sapiens
tattattgggatttt

SEQ ID NO: 824650 - DNA, 15 bp, Homo sapiens
gtattattgggattt

SEQ ID NO: 824651 - DNA, 15 bp, Homo sapiens
agtattattgggatt

SEQ ID NO: 824652 - DNA, 15 bp, Homo sapiens
cagtattattgggat

SEQ ID NO: 824653 - DNA, 15 bp, Homo sapiens
tcagtattattggga

SEQ ID NO: 824654 - DNA, 15 bp, Homo sapiens
atcagtattattggg

SEQ ID NO: 824655 - DNA, 15 bp, Homo sapiens
catcagtattattgg

SEQ ID NO: 824656 - DNA, 15 bp, Homo sapiens
acatcagtattattg

SEQ ID NO: 824657 - DNA, 15 bp, Homo sapiens
tacatcagtattatt

SEQ ID NO: 824658 - DNA, 15 bp, Homo sapiens
ctacatcagtattat

SEQ ID NO: 824659 - DNA, 15 bp, Homo sapiens
gctacatcagtatta

SEQ ID NO: 824660 - DNA, 15 bp, Homo sapiens
agctacatcagtatt

SEQ ID NO: 824661 - DNA, 15 bp, Homo sapiens
tagctacatcagtat

SEQ ID NO: 824662 - DNA, 15 bp, Homo sapiens
ctagctacatcagta

SEQ ID NO: 824663 - DNA, 15 bp, Homo sapiens
gctagctacatcagt

SEQ ID NO: 824664 - DNA, 15 bp, Homo sapiens
tgctagctacatcag

SEQ ID NO: 824665 - DNA, 15 bp, Homo sapiens
ctgctagctacatca

SEQ ID NO: 824666 - DNA, 15 bp, Homo sapiens
gctgctagctacatc

SEQ ID NO: 824667 - DNA, 15 bp, Homo sapiens
agctgctagctacat

SEQ ID NO: 824668 - DNA, 15 bp, Homo sapiens
aagctgctagctaca

SEQ ID NO: 824669 - DNA, 15 bp, Homo sapiens
aaagctgctagctac

SEQ ID NO: 824670 - DNA, 15 bp, Homo sapiens
caaagctgctagcta

SEQ ID NO: 824671 - DNA, 15 bp, Homo sapiens
tcaaagctgctagct

SEQ ID NO: 824672 - DNA, 15 bp, Homo sapiens
ctcaaagctgctagc

SEQ ID NO: 824673 - DNA, 15 bp, Homo sapiens
tctcaaagctgctag

SEQ ID NO: 824674 - DNA, 15 bp, Homo sapiens
ttctcaaagctgcta

SEQ ID NO: 824675 - DNA, 15 bp, Homo sapiens
tttctcaaagctgct

SEQ ID NO: 824676 - DNA, 15 bp, Homo sapiens
atttctcaaagctgc

SEQ ID NO: 824677 - DNA, 15 bp, Homo sapiens
aatttctcaaagctg

SEQ ID NO: 824678 - DNA, 15 bp, Homo sapiens
gaatttctcaaagct

SEQ ID NO: 824679 - DNA, 15 bp, Homo sapiens
agaatttctcaaagc

SEQ ID NO: 824680 - DNA, 15 bp, Homo sapiens
tagaatttctcaaag

SEQ ID NO: 824681 - DNA, 15 bp, Homo sapiens
ttagaatttctcaaa

SEQ ID NO: 824682 - DNA, 15 bp, Homo sapiens
tttagaatttctcaa

SEQ ID NO: 824683 - DNA, 15 bp, Homo sapiens
ctttagaatttctca

SEQ ID NO: 824684 - DNA, 15 bp, Homo sapiens
actttagaatttctc

SEQ ID NO: 824685 - DNA, 15 bp, Homo sapiens
aactttagaatttct

SEQ ID NO: 824686 - DNA, 15 bp, Homo sapiens
aaactttagaatttc

SEQ ID NO: 824687 - DNA, 15 bp, Homo sapiens
aaaactttagaattt

SEQ ID NO: 824688 - DNA, 15 bp, Homo sapiens
gaaaactttagaatt

SEQ ID NO: 824689 - DNA, 15 bp, Homo sapiens
tgaaaactttagaat

SEQ ID NO: 824690 - DNA, 15 bp, Homo sapiens
ttgaaaactttagaa

SEQ ID NO: 824691 - DNA, 15 bp, Homo sapiens
cttgaaaactttaga

SEQ ID NO: 824692 - DNA, 15 bp, Homo sapiens
acttgaaaactttag

SEQ ID NO: 824693 - DNA, 15 bp, Homo sapiens
cacttgaaaacttta

SEQ ID NO: 824694 - DNA, 15 bp, Homo sapiens
tcacttgaaaacttt

SEQ ID NO: 824695 - DNA, 15 bp, Homo sapiens
atcacttgaaaactt

SEQ ID NO: 824696 - DNA, 15 bp, Homo sapiens
tatcacttgaaaact

SEQ ID NO: 824697 - DNA, 15 bp, Homo sapiens
ttatcacttgaaaac

SEQ ID NO: 824698 - DNA, 15 bp, Homo sapiens
cttatcacttgaaaa

SEQ ID NO: 824699 - DNA, 15 bp, Homo sapiens
tcttatcacttgaaa

SEQ ID NO: 824700 - DNA, 15 bp, Homo sapiens
gtcttatcacttgaa

SEQ ID NO: 824701 - DNA, 15 bp, Homo sapiens
agtcttatcacttga

SEQ ID NO: 824702 - DNA, 15 bp, Homo sapiens
gagtcttatcacttg

SEQ ID NO: 824703 - DNA, 15 bp, Homo sapiens
tgagtcttatcactt

SEQ ID NO: 824704 - DNA, 15 bp, Homo sapiens
ttgagtcttatcact

SEQ ID NO: 824705 - DNA, 15 bp, Homo sapiens
attgagtcttatcac

SEQ ID NO: 824706 - DNA, 15 bp, Homo sapiens
aattgagtcttatca

SEQ ID NO: 824707 - DNA, 15 bp, Homo sapiens
aaattgagtcttatc

SEQ ID NO: 824708 - DNA, 15 bp, Homo sapiens
taaattgagtcttat

SEQ ID NO: 824709 - DNA, 15 bp, Homo sapiens
ataaattgagtctta

SEQ ID NO: 824710 - DNA, 15 bp, Homo sapiens
tataaattgagtctt

SEQ ID NO: 824711 - DNA, 15 bp, Homo sapiens
gtataaattgagtct

SEQ ID NO: 824712 - DNA, 15 bp, Homo sapiens
tgtataaattgagtc

SEQ ID NO: 824713 - DNA, 15 bp, Homo sapiens
ttgtataaattgagt

SEQ ID NO: 824714 - DNA, 15 bp, Homo sapiens
tttgtataaattgag

SEQ ID NO: 824715 - DNA, 15 bp, Homo sapiens
ctttgtataaattga

SEQ ID NO: 824716 - DNA, 15 bp, Homo sapiens
gctttgtataaattg

SEQ ID NO: 824717 - DNA, 15 bp, Homo sapiens
agctttgtataaatt

SEQ ID NO: 824718 - DNA, 15 bp, Homo sapiens
tagctttgtataaat

SEQ ID NO: 824719 - DNA, 15 bp, Homo sapiens
ttagctttgtataaa

SEQ ID NO: 824720 - DNA, 15 bp, Homo sapiens
attagctttgtataa

SEQ ID NO: 824721 - DNA, 15 bp, Homo sapiens
aattagctttgtata

SEQ ID NO: 824722 - DNA, 15 bp, Homo sapiens
caattagctttgtat

SEQ ID NO: 824723 - DNA, 15 bp, Homo sapiens
ccaattagctttgta

SEQ ID NO: 824724 - DNA, 15 bp, Homo sapiens
tccaattagctttgt

SEQ ID NO: 824725 - DNA, 15 bp, Homo sapiens
atccaattagctttg

SEQ ID NO: 824726 - DNA, 15 bp, Homo sapiens
tatccaattagcttt

SEQ ID NO: 824727 - DNA, 15 bp, Homo sapiens
ttatccaattagctt

SEQ ID NO: 824728 - DNA, 15 bp, Homo sapiens
tttatccaattagct

SEQ ID NO: 824729 - DNA, 15 bp, Homo sapiens
gtttatccaattagc

SEQ ID NO: 824730 - DNA, 15 bp, Homo sapiens
agtttatccaattag

SEQ ID NO: 824731 - DNA, 15 bp, Homo sapiens
aagtttatccaatta

SEQ ID NO: 824732 - DNA, 15 bp, Homo sapiens
caagtttatccaatt

SEQ ID NO: 824733 - DNA, 15 bp, Homo sapiens
acaagtttatccaat

SEQ ID NO: 824734 - DNA, 15 bp, Homo sapiens
tacaagtttatccaa

SEQ ID NO: 824735 - DNA, 15 bp, Homo sapiens
atacaagtttatcca

SEQ ID NO: 824736 - DNA, 15 bp, Homo sapiens
tatacaagtttatcc

SEQ ID NO: 824737 - DNA, 15 bp, Homo sapiens
atatacaagtttatc

SEQ ID NO: 824738 - DNA, 15 bp, Homo sapiens
catatacaagtttat

SEQ ID NO: 824739 - DNA, 15 bp, Homo sapiens
tcatatacaagttta

SEQ ID NO: 824740 - DNA, 15 bp, Homo sapiens
atcatatacaagttt

SEQ ID NO: 824741 - DNA, 15 bp, Homo sapiens
aatcatatacaagtt

SEQ ID NO: 824742 - DNA, 15 bp, Homo sapiens
taatcatatacaagt

SEQ ID NO: 824743 - DNA, 15 bp, Homo sapiens
ttaatcatatacaag

SEQ ID NO: 824744 - DNA, 15 bp, Homo sapiens
cttaatcatatacaa

SEQ ID NO: 824745 - DNA, 15 bp, Homo sapiens
tcttaatcatataca

SEQ ID NO: 824746 - DNA, 15 bp, Homo sapiens
ttcttaatcatatac

SEQ ID NO: 824747 - DNA, 15 bp, Homo sapiens
cttcttaatcatata

SEQ ID NO: 824748 - DNA, 15 bp, Homo sapiens
gcttcttaatcatat

SEQ ID NO: 824749 - DNA, 15 bp, Homo sapiens
tgcttcttaatcata

SEQ ID NO: 824750 - DNA, 15 bp, Homo sapiens
ttgcttcttaatcat

SEQ ID NO: 824751 - DNA, 15 bp, Homo sapiens
tttgcttcttaatca

SEQ ID NO: 824752 - DNA, 15 bp, Homo sapiens
atttgcttcttaatc

SEQ ID NO: 824753 - DNA, 15 bp, Homo sapiens
tatttgcttcttaat

SEQ ID NO: 824754 - DNA, 15 bp, Homo sapiens
ttatttgcttcttaa

SEQ ID NO: 824755 - DNA, 15 bp, Homo sapiens
tttatttgcttctta

SEQ ID NO: 824756 - DNA, 15 bp, Homo sapiens
atttatttgcttctt

SEQ ID NO: 824757 - DNA, 15 bp, Homo sapiens
tatttatttgcttct

SEQ ID NO: 824758 - DNA, 15 bp, Homo sapiens
gtatttatttgcttc

SEQ ID NO: 824759 - DNA, 15 bp, Homo sapiens
agtatttatttgctt

SEQ ID NO: 824760 - DNA, 15 bp, Homo sapiens
aagtatttatttgct

SEQ ID NO: 824761 - DNA, 15 bp, Homo sapiens
taagtatttatttgc

SEQ ID NO: 824762 - DNA, 15 bp, Homo sapiens
ataagtatttatttg

SEQ ID NO: 824763 - DNA, 15 bp, Homo sapiens
aataagtatttattt

SEQ ID NO: 824764 - DNA, 15 bp, Homo sapiens
taataagtatttatt

SEQ ID NO: 824765 - DNA, 15 bp, Homo sapiens
ataataagtatttat

SEQ ID NO: 824766 - DNA, 15 bp, Homo sapiens
cataataagtattta

SEQ ID NO: 824767 - DNA, 15 bp, Homo sapiens
gcataataagtattt

SEQ ID NO: 824768 - DNA, 15 bp, Homo sapiens
agcataataagtatt

SEQ ID NO: 824769 - DNA, 15 bp, Homo sapiens
aagcataataagtat

SEQ ID NO: 824770 - DNA, 15 bp, Homo sapiens
aaagcataataagta

SEQ ID NO: 824771 - DNA, 15 bp, Homo sapiens
aaaagcataataagt

SEQ ID NO: 824772 - DNA, 15 bp, Homo sapiens
aaaaagcataataag

SEQ ID NO: 824773 - DNA, 15 bp, Homo sapiens
aaaaaagcataataa

SEQ ID NO: 824774 - DNA, 15 bp, Homo sapiens
caaaaaagcataata

SEQ ID NO: 824775 - DNA, 15 bp, Homo sapiens
gcaaaaaagcataat

SEQ ID NO: 824776 - DNA, 15 bp, Homo sapiens
agcaaaaaagcataa

SEQ ID NO: 824777 - DNA, 15 bp, Homo sapiens
cagcaaaaaagcata

SEQ ID NO: 824778 - DNA, 15 bp, Homo sapiens
acagcaaaaaagcat

SEQ ID NO: 824779 - DNA, 15 bp, Homo sapiens
aacagcaaaaaagca

SEQ ID NO: 824780 - DNA, 15 bp, Homo sapiens
aaacagcaaaaaagc

SEQ ID NO: 824781 - DNA, 15 bp, Homo sapiens
taaacagcaaaaaag

SEQ ID NO: 824782 - DNA, 15 bp, Homo sapiens
ataaacagcaaaaaa

SEQ ID NO: 824783 - DNA, 15 bp, Homo sapiens
aataaacagcaaaaa

SEQ ID NO: 824784 - DNA, 15 bp, Homo sapiens
aaataaacagcaaaa

SEQ ID NO: 824785 - DNA, 15 bp, Homo sapiens
taaataaacagcaaa

SEQ ID NO: 824786 - DNA, 15 bp, Homo sapiens
ttaaataaacagcaa

SEQ ID NO: 824787 - DNA, 15 bp, Homo sapiens
tttaaataaacagca

SEQ ID NO: 824788 - DNA, 15 bp, Homo sapiens
atttaaataaacagc

SEQ ID NO: 824789 - DNA, 15 bp, Homo sapiens
tatttaaataaacag

SEQ ID NO: 824790 - DNA, 15 bp, Homo sapiens
atatttaaataaaca

SEQ ID NO: 824791 - DNA, 15 bp, Homo sapiens
aatatttaaataaac

SEQ ID NO: 824792 - DNA, 15 bp, Homo sapiens
aaatatttaaataaa

SEQ ID NO: 824793 - DNA, 15 bp, Homo sapiens
taaatatttaaataa

SEQ ID NO: 824794 - DNA, 15 bp, Homo sapiens
ttaaatatttaaata

SEQ ID NO: 824795 - DNA, 15 bp, Homo sapiens
gttaaatatttaaat

SEQ ID NO: 824796 - DNA, 15 bp, Homo sapiens
ggttaaatatttaaa

SEQ ID NO: 824797 - DNA, 15 bp, Homo sapiens
gggttaaatatttaa

SEQ ID NO: 824798 - DNA, 15 bp, Homo sapiens
tgggttaaatattta

SEQ ID NO: 824799 - DNA, 15 bp, Homo sapiens
ctgggttaaatattt

SEQ ID NO: 824800 - DNA, 15 bp, Homo sapiens
tctgggttaaatatt

SEQ ID NO: 824801 - DNA, 15 bp, Homo sapiens
ttctgggttaaatat

SEQ ID NO: 824802 - DNA, 15 bp, Homo sapiens
tttctgggttaaata

SEQ ID NO: 824803 - DNA, 15 bp, Homo sapiens
ttttctgggttaaat

SEQ ID NO: 824804 - DNA, 15 bp, Homo sapiens
attttctgggttaaa

SEQ ID NO: 824805 - DNA, 15 bp, Homo sapiens
tattttctgggttaa

SEQ ID NO: 824806 - DNA, 15 bp, Homo sapiens
ttattttctgggtta

SEQ ID NO: 824807 - DNA, 15 bp, Homo sapiens
cttattttctgggtt

SEQ ID NO: 824808 - DNA, 15 bp, Homo sapiens
acttattttctgggt

SEQ ID NO: 824809 - DNA, 15 bp, Homo sapiens
gacttattttctggg

SEQ ID NO: 824810 - DNA, 15 bp, Homo sapiens
tgacttattttctgg

SEQ ID NO: 824811 - DNA, 15 bp, Homo sapiens
gtgacttattttctg

SEQ ID NO: 824812 - DNA, 15 bp, Homo sapiens
agtgacttattttct

SEQ ID NO: 824813 - DNA, 15 bp, Homo sapiens
cagtgacttattttc

SEQ ID NO: 824814 - DNA, 15 bp, Homo sapiens
acagtgacttatttt

SEQ ID NO: 824815 - DNA, 15 bp, Homo sapiens
cacagtgacttattt

SEQ ID NO: 824816 - DNA, 15 bp, Homo sapiens
tcacagtgacttatt

SEQ ID NO: 824817 - DNA, 15 bp, Homo sapiens
gtcacagtgacttat

SEQ ID NO: 824818 - DNA, 15 bp, Homo sapiens
tgtcacagtgactta

SEQ ID NO: 824819 - DNA, 15 bp, Homo sapiens
ctgtcacagtgactt

SEQ ID NO: 824820 - DNA, 15 bp, Homo sapiens
tctgtcacagtgact

SEQ ID NO: 824821 - DNA, 15 bp, Homo sapiens
ttctgtcacagtgac

SEQ ID NO: 824822 - DNA, 15 bp, Homo sapiens
tttctgtcacagtga

SEQ ID NO: 824823 - DNA, 15 bp, Homo sapiens
atttctgtcacagtg

SEQ ID NO: 824824 - DNA, 15 bp, Homo sapiens
tatttctgtcacagt

SEQ ID NO: 824825 - DNA, 15 bp, Homo sapiens
ttatttctgtcacag

SEQ ID NO: 824826 - DNA, 15 bp, Homo sapiens
tttatttctgtcaca

SEQ ID NO: 824827 - DNA, 15 bp, Homo sapiens
ttttatttctgtcac

SEQ ID NO: 824828 - DNA, 15 bp, Homo sapiens
tttttatttctgtca

SEQ ID NO: 824829 - DNA, 15 bp, Homo sapiens
atttttatttctgtc

SEQ ID NO: 824830 - DNA, 15 bp, Homo sapiens
catttttatttctgt

SEQ ID NO: 824831 - DNA, 15 bp, Homo sapiens
tcatttttatttctg

SEQ ID NO: 824832 - DNA, 15 bp, Homo sapiens
ctcatttttatttct

SEQ ID NO: 824833 - DNA, 15 bp, Homo sapiens
tctcatttttatttc

SEQ ID NO: 824834 - DNA, 15 bp, Homo sapiens
ctctcatttttattt

SEQ ID NO: 824835 - DNA, 15 bp, Homo sapiens
tctctcatttttatt

SEQ ID NO: 824836 - DNA, 15 bp, Homo sapiens
ctctctcatttttat

SEQ ID NO: 824837 - DNA, 15 bp, Homo sapiens
tctctctcattttta

SEQ ID NO: 824838 - DNA, 15 bp, Homo sapiens
ttctctctcattttt

SEQ ID NO: 824839 - DNA, 15 bp, Homo sapiens
cttctctctcatttt

SEQ ID NO: 824840 - DNA, 15 bp, Homo sapiens
ccttctctctcattt

SEQ ID NO: 824841 - DNA, 15 bp, Homo sapiens
cccttctctctcatt

SEQ ID NO: 824842 - DNA, 15 bp, Homo sapiens
acccttctctctcat

SEQ ID NO: 824843 - DNA, 15 bp, Homo sapiens
cacccttctctctca

SEQ ID NO: 824844 - DNA, 15 bp, Homo sapiens
tcacccttctctctc

SEQ ID NO: 824845 - DNA, 15 bp, Homo sapiens
ctcacccttctctct

SEQ ID NO: 824846 - DNA, 15 bp, Homo sapiens
gctcacccttctctc

SEQ ID NO: 824847 - DNA, 15 bp, Homo sapiens
ggctcacccttctct

SEQ ID NO: 824848 - DNA, 15 bp, Homo sapiens
tggctcacccttctc

SEQ ID NO: 824849 - DNA, 15 bp, Homo sapiens
gtggctcacccttct

SEQ ID NO: 824850 - DNA, 15 bp, Homo sapiens
agtggctcacccttc

SEQ ID NO: 824851 - DNA, 15 bp, Homo sapiens
gagtggctcaccctt

SEQ ID NO: 824852 - DNA, 15 bp, Homo sapiens
agagtggctcaccct

SEQ ID NO: 824853 - DNA, 15 bp, Homo sapiens
aagagtggctcaccc

SEQ ID NO: 824854 - DNA, 15 bp, Homo sapiens
taagagtggctcacc

SEQ ID NO: 824855 - DNA, 15 bp, Homo sapiens
ctaagagtggctcac

SEQ ID NO: 824856 - DNA, 15 bp, Homo sapiens
cctaagagtggctca

SEQ ID NO: 824857 - DNA, 15 bp, Homo sapiens
acctaagagtggctc

SEQ ID NO: 824858 - DNA, 15 bp, Homo sapiens
tacctaagagtggct

SEQ ID NO: 824859 - DNA, 15 bp, Homo sapiens
ctacctaagagtggc

SEQ ID NO: 824860 - DNA, 15 bp, Homo sapiens
actacctaagagtgg

SEQ ID NO: 824861 - DNA, 15 bp, Homo sapiens
aactacctaagagtg

SEQ ID NO: 824862 - DNA, 15 bp, Homo sapiens
gaactacctaagagt

SEQ ID NO: 824863 - DNA, 15 bp, Homo sapiens
agaactacctaagag

SEQ ID NO: 824864 - DNA, 15 bp, Homo sapiens
cagaactacctaaga

SEQ ID NO: 824865 - DNA, 15 bp, Homo sapiens
ccagaactacctaag

SEQ ID NO: 824866 - DNA, 15 bp, Homo sapiens
gccagaactacctaa

SEQ ID NO: 824867 - DNA, 15 bp, Homo sapiens
tgccagaactaccta

SEQ ID NO: 824868 - DNA, 15 bp, Homo sapiens
atgccagaactacct

SEQ ID NO: 824869 - DNA, 15 bp, Homo sapiens
aatgccagaactacc

SEQ ID NO: 824870 - DNA, 15 bp, Homo sapiens
taatgccagaactac

SEQ ID NO: 824871 - DNA, 15 bp, Homo sapiens
ataatgccagaacta

SEQ ID NO: 824872 - DNA, 15 bp, Homo sapiens
aataatgccagaact

SEQ ID NO: 824873 - DNA, 15 bp, Homo sapiens
aaataatgccagaac

SEQ ID NO: 824874 - DNA, 15 bp, Homo sapiens
taaataatgccagaa

SEQ ID NO: 824875 - DNA, 15 bp, Homo sapiens
ttaaataatgccaga

SEQ ID NO: 824876 - DNA, 15 bp, Homo sapiens
attaaataatgccag

SEQ ID NO: 824877 - DNA, 15 bp, Homo sapiens
gattaaataatgcca

SEQ ID NO: 824878 - DNA, 15 bp, Homo sapiens
agattaaataatgcc

SEQ ID NO: 824879 - DNA, 15 bp, Homo sapiens
tagattaaataatgc

SEQ ID NO: 824880 - DNA, 15 bp, Homo sapiens
ctagattaaataatg

SEQ ID NO: 824881 - DNA, 15 bp, Homo sapiens
cctagattaaataat

SEQ ID NO: 824882 - DNA, 15 bp, Homo sapiens
gcctagattaaataa

SEQ ID NO: 824883 - DNA, 15 bp, Homo sapiens
ggcctagattaaata

SEQ ID NO: 824884 - DNA, 15 bp, Homo sapiens
tggcctagattaaat

SEQ ID NO: 824885 - DNA, 15 bp, Homo sapiens
ctggcctagattaaa

SEQ ID NO: 824886 - DNA, 15 bp, Homo sapiens
tctggcctagattaa

SEQ ID NO: 824887 - DNA, 15 bp, Homo sapiens
ctctggcctagatta

SEQ ID NO: 824888 - DNA, 15 bp, Homo sapiens
cctctggcctagatt

SEQ ID NO: 824889 - DNA, 15 bp, Homo sapiens
acctctggcctagat

SEQ ID NO: 824890 - DNA, 15 bp, Homo sapiens
aacctctggcctaga

SEQ ID NO: 824891 - DNA, 15 bp, Homo sapiens
caacctctggcctag

SEQ ID NO: 824892 - DNA, 15 bp, Homo sapiens
gcaacctctggccta

SEQ ID NO: 824893 - DNA, 15 bp, Homo sapiens
tgcaacctctggcct

SEQ ID NO: 824894 - DNA, 15 bp, Homo sapiens
ttgcaacctctggcc

SEQ ID NO: 824895 - DNA, 15 bp, Homo sapiens
tttgcaacctctggc

SEQ ID NO: 824896 - DNA, 15 bp, Homo sapiens
atttgcaacctctgg

SEQ ID NO: 824897 - DNA, 15 bp, Homo sapiens
catttgcaacctctg

SEQ ID NO: 824898 - DNA, 15 bp, Homo sapiens
ccatttgcaacctct

SEQ ID NO: 824899 - DNA, 15 bp, Homo sapiens
accatttgcaacctc

SEQ ID NO: 824900 - DNA, 15 bp, Homo sapiens
caccatttgcaacct

SEQ ID NO: 824901 - DNA, 15 bp, Homo sapiens
acaccatttgcaacc

SEQ ID NO: 824902 - DNA, 15 bp, Homo sapiens
gacaccatttgcaac

SEQ ID NO: 824903 - DNA, 15 bp, Homo sapiens
ggacaccatttgcaa

SEQ ID NO: 824904 - DNA, 15 bp, Homo sapiens
gggacaccatttgca

SEQ ID NO: 824905 - DNA, 15 bp, Homo sapiens
tgggacaccatttgc

SEQ ID NO: 824906 - DNA, 15 bp, Homo sapiens
atgggacaccatttg

SEQ ID NO: 824907 - DNA, 15 bp, Homo sapiens
tatgggacaccattt

SEQ ID NO: 824908 - DNA, 15 bp, Homo sapiens
ctatgggacaccatt

SEQ ID NO: 824909 - DNA, 15 bp, Homo sapiens
tctatgggacaccat

SEQ ID NO: 824910 - DNA, 15 bp, Homo sapiens
ttctatgggacacca

SEQ ID NO: 824911 - DNA, 15 bp, Homo sapiens
gttctatgggacacc

SEQ ID NO: 824912 - DNA, 15 bp, Homo sapiens
agttctatgggacac

SEQ ID NO: 824913 - DNA, 15 bp, Homo sapiens
tagttctatgggaca

SEQ ID NO: 824914 - DNA, 15 bp, Homo sapiens
ttagttctatgggac

SEQ ID NO: 824915 - DNA, 15 bp, Homo sapiens
attagttctatggga

SEQ ID NO: 824916 - DNA, 15 bp, Homo sapiens
aattagttctatggg

SEQ ID NO: 824917 - DNA, 15 bp, Homo sapiens
aaattagttctatgg

SEQ ID NO: 824918 - DNA, 15 bp, Homo sapiens
aaaattagttctatg

SEQ ID NO: 824919 - DNA, 15 bp, Homo sapiens
caaaattagttctat

SEQ ID NO: 824920 - DNA, 15 bp, Homo sapiens
ccaaaattagttcta

SEQ ID NO: 824921 - DNA, 15 bp, Homo sapiens
gccaaaattagttct

SEQ ID NO: 824922 - DNA, 15 bp, Homo sapiens
agccaaaattagttc

SEQ ID NO: 824923 - DNA, 15 bp, Homo sapiens
gagccaaaattagtt

SEQ ID NO: 824924 - DNA, 15 bp, Homo sapiens
ggagccaaaattagt

SEQ ID NO: 824925 - DNA, 15 bp, Homo sapiens
aggagccaaaattag

SEQ ID NO: 824926 - DNA, 15 bp, Homo sapiens
taggagccaaaatta

SEQ ID NO: 824927 - DNA, 15 bp, Homo sapiens
ctaggagccaaaatt

SEQ ID NO: 824928 - DNA, 15 bp, Homo sapiens
tctaggagccaaaat

SEQ ID NO: 824929 - DNA, 15 bp, Homo sapiens
gtctaggagccaaaa

SEQ ID NO: 824930 - DNA, 15 bp, Homo sapiens
ggtctaggagccaaa

SEQ ID NO: 824931 - DNA, 15 bp, Homo sapiens
aggtctaggagccaa

SEQ ID NO: 824932 - DNA, 15 bp, Homo sapiens
caggtctaggagcca

SEQ ID NO: 824933 - DNA, 15 bp, Homo sapiens
acaggtctaggagcc

SEQ ID NO: 824934 - DNA, 15 bp, Homo sapiens
gacaggtctaggagc

SEQ ID NO: 824935 - DNA, 15 bp, Homo sapiens
agacaggtctaggag

SEQ ID NO: 824936 - DNA, 15 bp, Homo sapiens
aagacaggtctagga

SEQ ID NO: 824937 - DNA, 15 bp, Homo sapiens
taagacaggtctagg

SEQ ID NO: 824938 - DNA, 15 bp, Homo sapiens
ataagacaggtctag

SEQ ID NO: 824939 - DNA, 15 bp, Homo sapiens
aataagacaggtcta

SEQ ID NO: 824940 - DNA, 15 bp, Homo sapiens
aaataagacaggtct

SEQ ID NO: 824941 - DNA, 15 bp, Homo sapiens
taaataagacaggtc

SEQ ID NO: 824942 - DNA, 15 bp, Homo sapiens
ttaaataagacaggt

SEQ ID NO: 824943 - DNA, 15 bp, Homo sapiens
gttaaataagacagg

SEQ ID NO: 824944 - DNA, 15 bp, Homo sapiens
ggttaaataagacag

SEQ ID NO: 824945 - DNA, 15 bp, Homo sapiens
aggttaaataagaca

SEQ ID NO: 824946 - DNA, 15 bp, Homo sapiens
aaggttaaataagac

SEQ ID NO: 824947 - DNA, 15 bp, Homo sapiens
aaaggttaaataaga

SEQ ID NO: 824948 - DNA, 15 bp, Homo sapiens
gaaaggttaaataag

SEQ ID NO: 824949 - DNA, 15 bp, Homo sapiens
tgaaaggttaaataa

SEQ ID NO: 824950 - DNA, 15 bp, Homo sapiens
atgaaaggttaaata

SEQ ID NO: 824951 - DNA, 15 bp, Homo sapiens
aatgaaaggttaaat

SEQ ID NO: 824952 - DNA, 15 bp, Homo sapiens
aaatgaaaggttaaa

SEQ ID NO: 824953 - DNA, 15 bp, Homo sapiens
taaatgaaaggttaa

SEQ ID NO: 824954 - DNA, 15 bp, Homo sapiens
ttaaatgaaaggtta

SEQ ID NO: 824955 - DNA, 15 bp, Homo sapiens
tttaaatgaaaggtt

SEQ ID NO: 824956 - DNA, 15 bp, Homo sapiens
ttttaaatgaaaggt

SEQ ID NO: 824957 - DNA, 15 bp, Homo sapiens
tttttaaatgaaagg

SEQ ID NO: 824958 - DNA, 15 bp, Homo sapiens
ttttttaaatgaaag

SEQ ID NO: 824959 - DNA, 15 bp, Homo sapiens
attttttaaatgaaa

SEQ ID NO: 824960 - DNA, 15 bp, Homo sapiens
aattttttaaatgaa

SEQ ID NO: 824961 - DNA, 15 bp, Homo sapiens
aaattttttaaatga

SEQ ID NO: 824962 - DNA, 15 bp, Homo sapiens
caaattttttaaatg

SEQ ID NO: 824963 - DNA, 15 bp, Homo sapiens
acaaattttttaaat

SEQ ID NO: 824964 - DNA, 15 bp, Homo sapiens
tacaaattttttaaa

SEQ ID NO: 824965 - DNA, 15 bp, Homo sapiens
atacaaattttttaa

SEQ ID NO: 824966 - DNA, 15 bp, Homo sapiens
aatacaaatttttta

SEQ ID NO: 824967 - DNA, 15 bp, Homo sapiens
caatacaaatttttt

SEQ ID NO: 824968 - DNA, 15 bp, Homo sapiens
ccaatacaaattttt

SEQ ID NO: 824969 - DNA, 15 bp, Homo sapiens
accaatacaaatttt

SEQ ID NO: 824970 - DNA, 15 bp, Homo sapiens
aaccaatacaaattt

SEQ ID NO: 824971 - DNA, 15 bp, Homo sapiens
caaccaatacaaatt

SEQ ID NO: 824972 - DNA, 15 bp, Homo sapiens
gcaaccaatacaaat

SEQ ID NO: 824973 - DNA, 15 bp, Homo sapiens
ggcaaccaatacaaa

SEQ ID NO: 824974 - DNA, 15 bp, Homo sapiens
tggcaaccaatacaa

SEQ ID NO: 824975 - DNA, 15 bp, Homo sapiens
ctggcaaccaataca

SEQ ID NO: 824976 - DNA, 15 bp, Homo sapiens
gctggcaaccaatac

SEQ ID NO: 824977 - DNA, 15 bp, Homo sapiens
tgctggcaaccaata

SEQ ID NO: 824978 - DNA, 15 bp, Homo sapiens
ttgctggcaaccaat

SEQ ID NO: 824979 - DNA, 15 bp, Homo sapiens
attgctggcaaccaa

SEQ ID NO: 824980 - DNA, 15 bp, Homo sapiens
aattgctggcaacca

SEQ ID NO: 824981 - DNA, 15 bp, Homo sapiens
taattgctggcaacc

SEQ ID NO: 824982 - DNA, 15 bp, Homo sapiens
ttaattgctggcaac

SEQ ID NO: 824983 - DNA, 15 bp, Homo sapiens
tttaattgctggcaa

SEQ ID NO: 824984 - DNA, 15 bp, Homo sapiens
ttttaattgctggca

SEQ ID NO: 824985 - DNA, 15 bp, Homo sapiens
tttttaattgctggc

SEQ ID NO: 824986 - DNA, 15 bp, Homo sapiens
atttttaattgctgg

SEQ ID NO: 824987 - DNA, 15 bp, Homo sapiens
aatttttaattgctg

SEQ ID NO: 824988 - DNA, 15 bp, Homo sapiens
caatttttaattgct

SEQ ID NO: 824989 - DNA, 15 bp, Homo sapiens
ccaatttttaattgc

SEQ ID NO: 824990 - DNA, 15 bp, Homo sapiens
cccaatttttaattg

SEQ ID NO: 824991 - DNA, 15 bp, Homo sapiens
tcccaatttttaatt

SEQ ID NO: 824992 - DNA, 15 bp, Homo sapiens
ctcccaatttttaat

SEQ ID NO: 824993 - DNA, 15 bp, Homo sapiens
tctcccaatttttaa

SEQ ID NO: 824994 - DNA, 15 bp, Homo sapiens
atctcccaattttta

SEQ ID NO: 824995 - DNA, 15 bp, Homo sapiens
catctcccaattttt

SEQ ID NO: 824996 - DNA, 15 bp, Homo sapiens
acatctcccaatttt

SEQ ID NO: 824997 - DNA, 15 bp, Homo sapiens
gacatctcccaattt

SEQ ID NO: 824998 - DNA, 15 bp, Homo sapiens
agacatctcccaatt

SEQ ID NO: 824999 - DNA, 15 bp, Homo sapiens
gagacatctcccaat

SEQ ID NO: 825000 - DNA, 15 bp, Homo sapiens
tgagacatctcccaa

SEQ ID NO: 825001 - DNA, 15 bp, Homo sapiens
gtgagacatctccca

SEQ ID NO: 825002 - DNA, 15 bp, Homo sapiens
tgtgagacatctccc

SEQ ID NO: 825003 - DNA, 15 bp, Homo sapiens
gtgtgagacatctcc

SEQ ID NO: 825004 - DNA, 15 bp, Homo sapiens
tgtgtgagacatctc

SEQ ID NO: 825005 - DNA, 15 bp, Homo sapiens
gtgtgtgagacatct

SEQ ID NO: 825006 - DNA, 15 bp, Homo sapiens
tgtgtgtgagacatc

SEQ ID NO: 825007 - DNA, 15 bp, Homo sapiens
gtgtgtgtgagacat

SEQ ID NO: 825008 - DNA, 15 bp, Homo sapiens
tgtgtgtgtgagaca

SEQ ID NO: 825009 - DNA, 15 bp, Homo sapiens
gtgtgtgtgtgagac

SEQ ID NO: 825010 - DNA, 15 bp, Homo sapiens
tgtgtgtgtgtgaga

SEQ ID NO: 825011 - DNA, 15 bp, Homo sapiens
gtgtgtgtgtgtgag

SEQ ID NO: 825012 - DNA, 15 bp, Homo sapiens
tgtgtgtgtgtgtga

SEQ ID NO: 825013 - DNA, 15 bp, Homo sapiens
atgtgtgtgtgtgtg

SEQ ID NO: 825014 - DNA, 15 bp, Homo sapiens
tatgtgtgtgtgtgt

SEQ ID NO: 825015 - DNA, 15 bp, Homo sapiens
ttatgtgtgtgtgtg

SEQ ID NO: 825016 - DNA, 15 bp, Homo sapiens
tttatgtgtgtgtgt

SEQ ID NO: 825017 - DNA, 15 bp, Homo sapiens
gtttatgtgtgtgtg

SEQ ID NO: 825018 - DNA, 15 bp, Homo sapiens
tgtttatgtgtgtgt

SEQ ID NO: 825019 - DNA, 15 bp, Homo sapiens
gtgtttatgtgtgtg

SEQ ID NO: 825020 - DNA, 15 bp, Homo sapiens
tgtgtttatgtgtgt

SEQ ID NO: 825021 - DNA, 15 bp, Homo sapiens
gtgtgtttatgtgtg

SEQ ID NO: 825022 - DNA, 15 bp, Homo sapiens
tgtgtgtttatgtgt

SEQ ID NO: 825023 - DNA, 15 bp, Homo sapiens
gtgtgtgtttatgtg

SEQ ID NO: 825024 - DNA, 15 bp, Homo sapiens
tgtgtgtgtttatgt

SEQ ID NO: 825025 - DNA, 15 bp, Homo sapiens
gtgtgtgtgtttatg

SEQ ID NO: 825026 - DNA, 15 bp, Homo sapiens
agtgtgtgtgtttat

SEQ ID NO: 825027 - DNA, 15 bp, Homo sapiens
gagtgtgtgtgttta

SEQ ID NO: 825028 - DNA, 15 bp, Homo sapiens
tgagtgtgtgtgttt

SEQ ID NO: 825029 - DNA, 15 bp, Homo sapiens
atgagtgtgtgtgtt

SEQ ID NO: 825030 - DNA, 15 bp, Homo sapiens
catgagtgtgtgtgt

SEQ ID NO: 825031 - DNA, 15 bp, Homo sapiens
acatgagtgtgtgtg

SEQ ID NO: 825032 - DNA, 15 bp, Homo sapiens
cacatgagtgtgtgt

SEQ ID NO: 825033 - DNA, 15 bp, Homo sapiens
acacatgagtgtgtg

SEQ ID NO: 825034 - DNA, 15 bp, Homo sapiens
cacacatgagtgtgt

SEQ ID NO: 825035 - DNA, 15 bp, Homo sapiens
gcacacatgagtgtg

SEQ ID NO: 825036 - DNA, 15 bp, Homo sapiens
tgcacacatgagtgt

SEQ ID NO: 825037 - DNA, 15 bp, Homo sapiens
ctgcacacatgagtg

SEQ ID NO: 825038 - DNA, 15 bp, Homo sapiens
gctgcacacatgagt

SEQ ID NO: 825039 - DNA, 15 bp, Homo sapiens
ggctgcacacatgag

SEQ ID NO: 825040 - DNA, 15 bp, Homo sapiens
aggctgcacacatga

SEQ ID NO: 825041 - DNA, 15 bp, Homo sapiens
gaggctgcacacatg

SEQ ID NO: 825042 - DNA, 15 bp, Homo sapiens
agaggctgcacacat

SEQ ID NO: 825043 - DNA, 15 bp, Homo sapiens
aagaggctgcacaca

SEQ ID NO: 825044 - DNA, 15 bp, Homo sapiens
aaagaggctgcacac

SEQ ID NO: 825045 - DNA, 15 bp, Homo sapiens
aaaagaggctgcaca

SEQ ID NO: 825046 - DNA, 15 bp, Homo sapiens
caaaagaggctgcac

SEQ ID NO: 825047 - DNA, 15 bp, Homo sapiens
tcaaaagaggctgca

SEQ ID NO: 825048 - DNA, 15 bp, Homo sapiens
ttcaaaagaggctgc

SEQ ID NO: 825049 - DNA, 15 bp, Homo sapiens
cttcaaaagaggctg

SEQ ID NO: 825050 - DNA, 15 bp, Homo sapiens
tcttcaaaagaggct

SEQ ID NO: 825051 - DNA, 15 bp, Homo sapiens
ttcttcaaaagaggc

SEQ ID NO: 825052 - DNA, 15 bp, Homo sapiens
attcttcaaaagagg

SEQ ID NO: 825053 - DNA, 15 bp, Homo sapiens
aattcttcaaaagag

SEQ ID NO: 825054 - DNA, 15 bp, Homo sapiens
caattcttcaaaaga

SEQ ID NO: 825055 - DNA, 15 bp, Homo sapiens
ccaattcttcaaaag

SEQ ID NO: 825056 - DNA, 15 bp, Homo sapiens
tccaattcttcaaaa

SEQ ID NO: 825057 - DNA, 15 bp, Homo sapiens
ttccaattcttcaaa

SEQ ID NO: 825058 - DNA, 15 bp, Homo sapiens
attccaattcttcaa

SEQ ID NO: 825059 - DNA, 15 bp, Homo sapiens
tattccaattcttca

SEQ ID NO: 825060 - DNA, 15 bp, Homo sapiens
ttattccaattcttc

SEQ ID NO: 825061 - DNA, 15 bp, Homo sapiens
gttattccaattctt

SEQ ID NO: 825062 - DNA, 15 bp, Homo sapiens
agttattccaattct

SEQ ID NO: 825063 - DNA, 15 bp, Homo sapiens
tagttattccaattc

SEQ ID NO: 825064 - DNA, 15 bp, Homo sapiens
ctagttattccaatt

SEQ ID NO: 825065 - DNA, 15 bp, Homo sapiens
actagttattccaat

SEQ ID NO: 825066 - DNA, 15 bp, Homo sapiens
gactagttattccaa

SEQ ID NO: 825067 - DNA, 15 bp, Homo sapiens
tgactagttattcca

SEQ ID NO: 825068 - DNA, 15 bp, Homo sapiens
ttgactagttattcc

SEQ ID NO: 825069 - DNA, 15 bp, Homo sapiens
gttgactagttattc

SEQ ID NO: 825070 - DNA, 15 bp, Homo sapiens
agttgactagttatt

SEQ ID NO: 825071 - DNA, 15 bp, Homo sapiens
cagttgactagttat

SEQ ID NO: 825072 - DNA, 15 bp, Homo sapiens
gcagttgactagtta

SEQ ID NO: 825073 - DNA, 15 bp, Homo sapiens
cgcagttgactagtt

SEQ ID NO: 825074 - DNA, 15 bp, Homo sapiens
acgcagttgactagt

SEQ ID NO: 825075 - DNA, 15 bp, Homo sapiens
gacgcagttgactag

SEQ ID NO: 825076 - DNA, 15 bp, Homo sapiens
ggacgcagttgacta

SEQ ID NO: 825077 - DNA, 15 bp, Homo sapiens
aggacgcagttgact

SEQ ID NO: 825078 - DNA, 15 bp, Homo sapiens
gaggacgcagttgac

SEQ ID NO: 825079 - DNA, 15 bp, Homo sapiens
ggaggacgcagttga

SEQ ID NO: 825080 - DNA, 15 bp, Homo sapiens
aggaggacgcagttg

SEQ ID NO: 825081 - DNA, 15 bp, Homo sapiens
aaggaggacgcagtt

SEQ ID NO: 825082 - DNA, 15 bp, Homo sapiens
aaaggaggacgcagt

SEQ ID NO: 825083 - DNA, 15 bp, Homo sapiens
aaaaggaggacgcag

SEQ ID NO: 825084 - DNA, 15 bp, Homo sapiens
gaaaaggaggacgca

SEQ ID NO: 825085 - DNA, 15 bp, Homo sapiens
ggaaaaggaggacgc

SEQ ID NO: 825086 - DNA, 15 bp, Homo sapiens
tggaaaaggaggacg

SEQ ID NO: 825087 - DNA, 15 bp, Homo sapiens
gtggaaaaggaggac

SEQ ID NO: 825088 - DNA, 15 bp, Homo sapiens
tgtggaaaaggagga

SEQ ID NO: 825089 - DNA, 15 bp, Homo sapiens
ttgtggaaaaggagg

SEQ ID NO: 825090 - DNA, 15 bp, Homo sapiens
cttgtggaaaaggag

SEQ ID NO: 825091 - DNA, 15 bp, Homo sapiens
gcttgtggaaaagga

SEQ ID NO: 825092 - DNA, 15 bp, Homo sapiens
agcttgtggaaaagg

SEQ ID NO: 825093 - DNA, 15 bp, Homo sapiens
cagcttgtggaaaag

SEQ ID NO: 825094 - DNA, 15 bp, Homo sapiens
acagcttgtggaaaa

SEQ ID NO: 825095 - DNA, 15 bp, Homo sapiens
cacagcttgtggaaa

SEQ ID NO: 825096 - DNA, 15 bp, Homo sapiens
tcacagcttgtggaa

SEQ ID NO: 825097 - DNA, 15 bp, Homo sapiens
gtcacagcttgtgga

SEQ ID NO: 825098 - DNA, 15 bp, Homo sapiens
tgtcacagcttgtgg

SEQ ID NO: 825099 - DNA, 15 bp, Homo sapiens
ctgtcacagcttgtg

SEQ ID NO: 825100 - DNA, 15 bp, Homo sapiens
gctgtcacagcttgt

SEQ ID NO: 825101 - DNA, 15 bp, Homo sapiens
agctgtcacagcttg

SEQ ID NO: 825102 - DNA, 15 bp, Homo sapiens
gagctgtcacagctt

SEQ ID NO: 825103 - DNA, 15 bp, Homo sapiens
ggagctgtcacagct

SEQ ID NO: 825104 - DNA, 15 bp, Homo sapiens
gggagctgtcacagc

SEQ ID NO: 825105 - DNA, 15 bp, Homo sapiens
agggagctgtcacag

SEQ ID NO: 825106 - DNA, 15 bp, Homo sapiens
cagggagctgtcaca

SEQ ID NO: 825107 - DNA, 15 bp, Homo sapiens
gcagggagctgtcac

SEQ ID NO: 825108 - DNA, 15 bp, Homo sapiens
agcagggagctgtca

SEQ ID NO: 825109 - DNA, 15 bp, Homo sapiens
gagcagggagctgtc

SEQ ID NO: 825110 - DNA, 15 bp, Homo sapiens
tgagcagggagctgt

SEQ ID NO: 825111 - DNA, 15 bp, Homo sapiens
gtgagcagggagctg

SEQ ID NO: 825112 - DNA, 15 bp, Homo sapiens
tgtgagcagggagct

SEQ ID NO: 825113 - DNA, 15 bp, Homo sapiens
ctgtgagcagggagc

SEQ ID NO: 825114 - DNA, 15 bp, Homo sapiens
tctgtgagcagggag

SEQ ID NO: 825115 - DNA, 15 bp, Homo sapiens
ctctgtgagcaggga

SEQ ID NO: 825116 - DNA, 15 bp, Homo sapiens
gctctgtgagcaggg

SEQ ID NO: 825117 - DNA, 15 bp, Homo sapiens
tgctctgtgagcagg

SEQ ID NO: 825118 - DNA, 15 bp, Homo sapiens
gtgctctgtgagcag

SEQ ID NO: 825119 - DNA, 15 bp, Homo sapiens
ggtgctctgtgagca

SEQ ID NO: 825120 - DNA, 15 bp, Homo sapiens
aggtgctctgtgagc

SEQ ID NO: 825121 - DNA, 15 bp, Homo sapiens
caggtgctctgtgag

SEQ ID NO: 825122 - DNA, 15 bp, Homo sapiens
gcaggtgctctgtga

SEQ ID NO: 825123 - DNA, 15 bp, Homo sapiens
ggcaggtgctctgtg

SEQ ID NO: 825124 - DNA, 15 bp, Homo sapiens
gggcaggtgctctgt

SEQ ID NO: 825125 - DNA, 15 bp, Homo sapiens
agggcaggtgctctg

SEQ ID NO: 825126 - DNA, 15 bp, Homo sapiens
gagggcaggtgctct

SEQ ID NO: 825127 - DNA, 15 bp, Homo sapiens
agagggcaggtgctc

SEQ ID NO: 825128 - DNA, 15 bp, Homo sapiens
gagagggcaggtgct

SEQ ID NO: 825129 - DNA, 15 bp, Homo sapiens
ggagagggcaggtgc

SEQ ID NO: 825130 - DNA, 15 bp, Homo sapiens
aggagagggcaggtg

SEQ ID NO: 825131 - DNA, 15 bp, Homo sapiens
caggagagggcaggt

SEQ ID NO: 825132 - DNA, 15 bp, Homo sapiens
acaggagagggcagg

SEQ ID NO: 825133 - DNA, 15 bp, Homo sapiens
aacaggagagggcag

SEQ ID NO: 825134 - DNA, 15 bp, Homo sapiens
gaacaggagagggca

SEQ ID NO: 825135 - DNA, 15 bp, Homo sapiens
tgaacaggagagggc

SEQ ID NO: 825136 - DNA, 15 bp, Homo sapiens
atgaacaggagaggg

SEQ ID NO: 825137 - DNA, 15 bp, Homo sapiens
gatgaacaggagagg

SEQ ID NO: 825138 - DNA, 15 bp, Homo sapiens
tgatgaacaggagag

SEQ ID NO: 825139 - DNA, 15 bp, Homo sapiens
atgatgaacaggaga

SEQ ID NO: 825140 - DNA, 15 bp, Homo sapiens
catgatgaacaggag

SEQ ID NO: 825141 - DNA, 15 bp, Homo sapiens
gcatgatgaacagga

SEQ ID NO: 825142 - DNA, 15 bp, Homo sapiens
agcatgatgaacagg

SEQ ID NO: 825143 - DNA, 15 bp, Homo sapiens
gagcatgatgaacag

SEQ ID NO: 825144 - DNA, 15 bp, Homo sapiens
agagcatgatgaaca

SEQ ID NO: 825145 - DNA, 15 bp, Homo sapiens
gagagcatgatgaac

SEQ ID NO: 825146 - DNA, 15 bp, Homo sapiens
agagagcatgatgaa

SEQ ID NO: 825147 - DNA, 15 bp, Homo sapiens
aagagagcatgatga

SEQ ID NO: 825148 - DNA, 15 bp, Homo sapiens
gaagagagcatgatg

SEQ ID NO: 825149 - DNA, 15 bp, Homo sapiens
agaagagagcatgat

SEQ ID NO: 825150 - DNA, 15 bp, Homo sapiens
gagaagagagcatga

SEQ ID NO: 825151 - DNA, 15 bp, Homo sapiens
tgagaagagagcatg

SEQ ID NO: 825152 - DNA, 15 bp, Homo sapiens
ctgagaagagagcat

SEQ ID NO: 825153 - DNA, 15 bp, Homo sapiens
actgagaagagagca

SEQ ID NO: 825154 - DNA, 15 bp, Homo sapiens
gactgagaagagagc

SEQ ID NO: 825155 - DNA, 15 bp, Homo sapiens
ggactgagaagagag

SEQ ID NO: 825156 - DNA, 15 bp, Homo sapiens
gggactgagaagaga

SEQ ID NO: 825157 - DNA, 15 bp, Homo sapiens
tgggactgagaagag

SEQ ID NO: 825158 - DNA, 15 bp, Homo sapiens
atgggactgagaaga

SEQ ID NO: 825159 - DNA, 15 bp, Homo sapiens
aatgggactgagaag

SEQ ID NO: 825160 - DNA, 15 bp, Homo sapiens
gaatgggactgagaa

SEQ ID NO: 825161 - DNA, 15 bp, Homo sapiens
ggaatgggactgaga

SEQ ID NO: 825162 - DNA, 15 bp, Homo sapiens
aggaatgggactgag

SEQ ID NO: 825163 - DNA, 15 bp, Homo sapiens
aaggaatgggactga

SEQ ID NO: 825164 - DNA, 15 bp, Homo sapiens
gaaggaatgggactg

SEQ ID NO: 825165 - DNA, 15 bp, Homo sapiens
tgaaggaatgggact

SEQ ID NO: 825166 - DNA, 15 bp, Homo sapiens
atgaaggaatgggac

SEQ ID NO: 825167 - DNA, 15 bp, Homo sapiens
aatgaaggaatggga

SEQ ID NO: 825168 - DNA, 15 bp, Homo sapiens
taatgaaggaatggg

SEQ ID NO: 825169 - DNA, 15 bp, Homo sapiens
ataatgaaggaatgg

SEQ ID NO: 825170 - DNA, 15 bp, Homo sapiens
tataatgaaggaatg

SEQ ID NO: 825171 - DNA, 15 bp, Homo sapiens
atataatgaaggaat

SEQ ID NO: 825172 - DNA, 15 bp, Homo sapiens
gatataatgaaggaa

SEQ ID NO: 825173 - DNA, 15 bp, Homo sapiens
tgatataatgaagga

SEQ ID NO: 825174 - DNA, 15 bp, Homo sapiens
gtgatataatgaagg

SEQ ID NO: 825175 - DNA, 15 bp, Homo sapiens
ggtgatataatgaag

SEQ ID NO: 825176 - DNA, 15 bp, Homo sapiens
aggtgatataatgaa

SEQ ID NO: 825177 - DNA, 15 bp, Homo sapiens
taggtgatataatga

SEQ ID NO: 825178 - DNA, 15 bp, Homo sapiens
ataggtgatataatg

SEQ ID NO: 825179 - DNA, 15 bp, Homo sapiens
aataggtgatataat

SEQ ID NO: 825180 - DNA, 15 bp, Homo sapiens
aaataggtgatataa

SEQ ID NO: 825181 - DNA, 15 bp, Homo sapiens
caaataggtgatata

SEQ ID NO: 825182 - DNA, 15 bp, Homo sapiens
ccaaataggtgatat

SEQ ID NO: 825183 - DNA, 15 bp, Homo sapiens
accaaataggtgata

SEQ ID NO: 825184 - DNA, 15 bp, Homo sapiens
gaccaaataggtgat

SEQ ID NO: 825185 - DNA, 15 bp, Homo sapiens
ggaccaaataggtga

SEQ ID NO: 825186 - DNA, 15 bp, Homo sapiens
aggaccaaataggtg

SEQ ID NO: 825187 - DNA, 15 bp, Homo sapiens
caggaccaaataggt

SEQ ID NO: 825188 - DNA, 15 bp, Homo sapiens
tcaggaccaaatagg

SEQ ID NO: 825189 - DNA, 15 bp, Homo sapiens
ctcaggaccaaatag

SEQ ID NO: 825190 - DNA, 15 bp, Homo sapiens
tctcaggaccaaata

SEQ ID NO: 825191 - DNA, 15 bp, Homo sapiens
gtctcaggaccaaat

SEQ ID NO: 825192 - DNA, 15 bp, Homo sapiens
agtctcaggaccaaa

SEQ ID NO: 825193 - DNA, 15 bp, Homo sapiens
tagtctcaggaccaa

SEQ ID NO: 825194 - DNA, 15 bp, Homo sapiens
ttagtctcaggacca

SEQ ID NO: 825195 - DNA, 15 bp, Homo sapiens
cttagtctcaggacc

SEQ ID NO: 825196 - DNA, 15 bp, Homo sapiens
acttagtctcaggac

SEQ ID NO: 825197 - DNA, 15 bp, Homo sapiens
cacttagtctcagga

SEQ ID NO: 825198 - DNA, 15 bp, Homo sapiens
tcacttagtctcagg

SEQ ID NO: 825199 - DNA, 15 bp, Homo sapiens
ctcacttagtctcag

SEQ ID NO: 825200 - DNA, 15 bp, Homo sapiens
actcacttagtctca

SEQ ID NO: 825201 - DNA, 15 bp, Homo sapiens
aactcacttagtctc

SEQ ID NO: 825202 - DNA, 15 bp, Homo sapiens
aaactcacttagtct

SEQ ID NO: 825203 - DNA, 15 bp, Homo sapiens
caaactcacttagtc

SEQ ID NO: 825204 - DNA, 15 bp, Homo sapiens
tcaaactcacttagt

SEQ ID NO: 825205 - DNA, 15 bp, Homo sapiens
ctcaaactcacttag

SEQ ID NO: 825206 - DNA, 15 bp, Homo sapiens
tctcaaactcactta

SEQ ID NO: 825207 - DNA, 15 bp, Homo sapiens
atctcaaactcactt

SEQ ID NO: 825208 - DNA, 15 bp, Homo sapiens
gatctcaaactcact

SEQ ID NO: 825209 - DNA, 15 bp, Homo sapiens
agatctcaaactcac

SEQ ID NO: 825210 - DNA, 15 bp, Homo sapiens
cagatctcaaactca

SEQ ID NO: 825211 - DNA, 15 bp, Homo sapiens
acagatctcaaactc

SEQ ID NO: 825212 - DNA, 15 bp, Homo sapiens
cacagatctcaaact

SEQ ID NO: 825213 - DNA, 15 bp, Homo sapiens
tcacagatctcaaac

SEQ ID NO: 825214 - DNA, 15 bp, Homo sapiens
atcacagatctcaaa

SEQ ID NO: 825215 - DNA, 15 bp, Homo sapiens
aatcacagatctcaa

SEQ ID NO: 825216 - DNA, 15 bp, Homo sapiens
aaatcacagatctca

SEQ ID NO: 825217 - DNA, 15 bp, Homo sapiens
taaatcacagatctc

SEQ ID NO: 825218 - DNA, 15 bp, Homo sapiens
ctaaatcacagatct

SEQ ID NO: 825219 - DNA, 15 bp, Homo sapiens
tctaaatcacagatc

SEQ ID NO: 825220 - DNA, 15 bp, Homo sapiens
gtctaaatcacagat

SEQ ID NO: 825221 - DNA, 15 bp, Homo sapiens
tgtctaaatcacaga

SEQ ID NO: 825222 - DNA, 15 bp, Homo sapiens
ttgtctaaatcacag

SEQ ID NO: 825223 - DNA, 15 bp, Homo sapiens
tttgtctaaatcaca

SEQ ID NO: 825224 - DNA, 15 bp, Homo sapiens
ctttgtctaaatcac

SEQ ID NO: 825225 - DNA, 15 bp, Homo sapiens
actttgtctaaatca

SEQ ID NO: 825226 - DNA, 15 bp, Homo sapiens
cactttgtctaaatc

SEQ ID NO: 825227 - DNA, 15 bp, Homo sapiens
ccactttgtctaaat

SEQ ID NO: 825228 - DNA, 15 bp, Homo sapiens
accactttgtctaaa

SEQ ID NO: 825229 - DNA, 15 bp, Homo sapiens
caccactttgtctaa

SEQ ID NO: 825230 - DNA, 15 bp, Homo sapiens
tcaccactttgtcta

SEQ ID NO: 825231 - DNA, 15 bp, Homo sapiens
ttcaccactttgtct

SEQ ID NO: 825232 - DNA, 15 bp, Homo sapiens
attcaccactttgtc

SEQ ID NO: 825233 - DNA, 15 bp, Homo sapiens
gattcaccactttgt

SEQ ID NO: 825234 - DNA, 15 bp, Homo sapiens
agattcaccactttg

SEQ ID NO: 825235 - DNA, 15 bp, Homo sapiens
tagattcaccacttt

SEQ ID NO: 825236 - DNA, 15 bp, Homo sapiens
ctagattcaccactt

SEQ ID NO: 825237 - DNA, 15 bp, Homo sapiens
gctagattcaccact

SEQ ID NO: 825238 - DNA, 15 bp, Homo sapiens
agctagattcaccac

SEQ ID NO: 825239 - DNA, 15 bp, Homo sapiens
gagctagattcacca

SEQ ID NO: 825240 - DNA, 15 bp, Homo sapiens
agagctagattcacc

SEQ ID NO: 825241 - DNA, 15 bp, Homo sapiens
cagagctagattcac

SEQ ID NO: 825242 - DNA, 15 bp, Homo sapiens
tcagagctagattca

SEQ ID NO: 825243 - DNA, 15 bp, Homo sapiens
ttcagagctagattc

SEQ ID NO: 825244 - DNA, 15 bp, Homo sapiens
attcagagctagatt

SEQ ID NO: 825245 - DNA, 15 bp, Homo sapiens
gattcagagctagat

SEQ ID NO: 825246 - DNA, 15 bp, Homo sapiens
tgattcagagctaga

SEQ ID NO: 825247 - DNA, 15 bp, Homo sapiens
atgattcagagctag

SEQ ID NO: 825248 - DNA, 15 bp, Homo sapiens
tatgattcagagcta

SEQ ID NO: 825249 - DNA, 15 bp, Homo sapiens
ctatgattcagagct

SEQ ID NO: 825250 - DNA, 15 bp, Homo sapiens
actatgattcagagc

SEQ ID NO: 825251 - DNA, 15 bp, Homo sapiens
tactatgattcagag

SEQ ID NO: 825252 - DNA, 15 bp, Homo sapiens
ttactatgattcaga

SEQ ID NO: 825253 - DNA, 15 bp, Homo sapiens
cttactatgattcag

SEQ ID NO: 825254 - DNA, 15 bp, Homo sapiens
acttactatgattca

SEQ ID NO: 825255 - DNA, 15 bp, Homo sapiens
tacttactatgattc

SEQ ID NO: 825256 - DNA, 15 bp, Homo sapiens
ctacttactatgatt

SEQ ID NO: 825257 - DNA, 15 bp, Homo sapiens
gctacttactatgat

SEQ ID NO: 825258 - DNA, 15 bp, Homo sapiens
agctacttactatga

SEQ ID NO: 825259 - DNA, 15 bp, Homo sapiens
gagctacttactatg

SEQ ID NO: 825260 - DNA, 15 bp, Homo sapiens
agagctacttactat

SEQ ID NO: 825261 - DNA, 15 bp, Homo sapiens
cagagctacttacta

SEQ ID NO: 825262 - DNA, 15 bp, Homo sapiens
ccagagctacttact

SEQ ID NO: 825263 - DNA, 15 bp, Homo sapiens
cccagagctacttac

SEQ ID NO: 825264 - DNA, 15 bp, Homo sapiens
tcccagagctactta

SEQ ID NO: 825265 - DNA, 15 bp, Homo sapiens
ttcccagagctactt

SEQ ID NO: 825266 - DNA, 15 bp, Homo sapiens
attcccagagctact

SEQ ID NO: 825267 - DNA, 15 bp, Homo sapiens
gattcccagagctac

SEQ ID NO: 825268 - DNA, 15 bp, Homo sapiens
tgattcccagagcta

SEQ ID NO: 825269 - DNA, 15 bp, Homo sapiens
atgattcccagagct

SEQ ID NO: 825270 - DNA, 15 bp, Homo sapiens
gatgattcccagagc

SEQ ID NO: 825271 - DNA, 15 bp, Homo sapiens
agatgattcccagag

SEQ ID NO: 825272 - DNA, 15 bp, Homo sapiens
aagatgattcccaga

SEQ ID NO: 825273 - DNA, 15 bp, Homo sapiens
caagatgattcccag

SEQ ID NO: 825274 - DNA, 15 bp, Homo sapiens
acaagatgattccca

SEQ ID NO: 825275 - DNA, 15 bp, Homo sapiens
gacaagatgattccc

SEQ ID NO: 825276 - DNA, 15 bp, Homo sapiens
agacaagatgattcc

SEQ ID NO: 825277 - DNA, 15 bp, Homo sapiens
aagacaagatgattc

SEQ ID NO: 825278 - DNA, 15 bp, Homo sapiens
gaagacaagatgatt

SEQ ID NO: 825279 - DNA, 15 bp, Homo sapiens
agaagacaagatgat

SEQ ID NO: 825280 - DNA, 15 bp, Homo sapiens
cagaagacaagatga

SEQ ID NO: 825281 - DNA, 15 bp, Homo sapiens
acagaagacaagatg

SEQ ID NO: 825282 - DNA, 15 bp, Homo sapiens
aacagaagacaagat

SEQ ID NO: 825283 - DNA, 15 bp, Homo sapiens
taacagaagacaaga

SEQ ID NO: 825284 - DNA, 15 bp, Homo sapiens
ctaacagaagacaag

SEQ ID NO: 825285 - DNA, 15 bp, Homo sapiens
gctaacagaagacaa

SEQ ID NO: 825286 - DNA, 15 bp, Homo sapiens
ggctaacagaagaca

SEQ ID NO: 825287 - DNA, 15 bp, Homo sapiens
gggctaacagaagac

SEQ ID NO: 825288 - DNA, 15 bp, Homo sapiens
tgggctaacagaaga

SEQ ID NO: 825289 - DNA, 15 bp, Homo sapiens
atgggctaacagaag

SEQ ID NO: 825290 - DNA, 15 bp, Homo sapiens
aatgggctaacagaa

SEQ ID NO: 825291 - DNA, 15 bp, Homo sapiens
caatgggctaacaga

SEQ ID NO: 825292 - DNA, 15 bp, Homo sapiens
tcaatgggctaacag

SEQ ID NO: 825293 - DNA, 15 bp, Homo sapiens
ctcaatgggctaaca

SEQ ID NO: 825294 - DNA, 15 bp, Homo sapiens
tctcaatgggctaac

SEQ ID NO: 825295 - DNA, 15 bp, Homo sapiens
ctctcaatgggctaa

SEQ ID NO: 825296 - DNA, 15 bp, Homo sapiens
tctctcaatgggcta

SEQ ID NO: 825297 - DNA, 15 bp, Homo sapiens
ctctctcaatgggct

SEQ ID NO: 825298 - DNA, 15 bp, Homo sapiens
tctctctcaatgggc

SEQ ID NO: 825299 - DNA, 15 bp, Homo sapiens
ttctctctcaatggg

SEQ ID NO: 825300 - DNA, 15 bp, Homo sapiens
tttctctctcaatgg

SEQ ID NO: 825301 - DNA, 15 bp, Homo sapiens
atttctctctcaatg

SEQ ID NO: 825302 - DNA, 15 bp, Homo sapiens
tatttctctctcaat

SEQ ID NO: 825303 - DNA, 15 bp, Homo sapiens
ctatttctctctcaa

SEQ ID NO: 825304 - DNA, 15 bp, Homo sapiens
tctatttctctctca

SEQ ID NO: 825305 - DNA, 15 bp, Homo sapiens
ctctatttctctctc

SEQ ID NO: 825306 - DNA, 15 bp, Homo sapiens
tctctatttctctct

SEQ ID NO: 825307 - DNA, 15 bp, Homo sapiens
ctctctatttctctc

SEQ ID NO: 825308 - DNA, 15 bp, Homo sapiens
tctctctatttctct

SEQ ID NO: 825309 - DNA, 15 bp, Homo sapiens
ctctctctatttctc

SEQ ID NO: 825310 - DNA, 15 bp, Homo sapiens
tctctctctatttct

SEQ ID NO: 825311 - DNA, 15 bp, Homo sapiens
ctctctctctatttc

SEQ ID NO: 825312 - DNA, 15 bp, Homo sapiens
tctctctctctattt

SEQ ID NO: 825313 - DNA, 15 bp, Homo sapiens
ctctctctctctatt

SEQ ID NO: 825314 - DNA, 15 bp, Homo sapiens
tctctctctctctat

SEQ ID NO: 825315 - DNA, 15 bp, Homo sapiens
ctctctctctctcta

SEQ ID NO: 825316 - DNA, 15 bp, Homo sapiens
ttctctctctctctc

SEQ ID NO: 825317 - DNA, 15 bp, Homo sapiens
tttctctctctctct

SEQ ID NO: 825318 - DNA, 15 bp, Homo sapiens
ctttctctctctctc

SEQ ID NO: 825319 - DNA, 15 bp, Homo sapiens
tctttctctctctct

SEQ ID NO: 825320 - DNA, 15 bp, Homo sapiens
ttctttctctctctc

SEQ ID NO: 825321 - DNA, 15 bp, Homo sapiens
tttctttctctctct

SEQ ID NO: 825322 - DNA, 15 bp, Homo sapiens
ctttctttctctctc

SEQ ID NO: 825323 - DNA, 15 bp, Homo sapiens
tctttctttctctct

SEQ ID NO: 825324 - DNA, 15 bp, Homo sapiens
ttctttctttctctc

SEQ ID NO: 825325 - DNA, 15 bp, Homo sapiens
cttctttctttctct

SEQ ID NO: 825326 - DNA, 15 bp, Homo sapiens
tcttctttctttctc

SEQ ID NO: 825327 - DNA, 15 bp, Homo sapiens
ttcttctttctttct

SEQ ID NO: 825328 - DNA, 15 bp, Homo sapiens
cttcttctttctttc

SEQ ID NO: 825329 - DNA, 15 bp, Homo sapiens
tcttcttctttcttt

SEQ ID NO: 825330 - DNA, 15 bp, Homo sapiens
ttcttcttctttctt

SEQ ID NO: 825331 - DNA, 15 bp, Homo sapiens
tttcttcttctttct

SEQ ID NO: 825332 - DNA, 15 bp, Homo sapiens
gtttcttcttctttc

SEQ ID NO: 825333 - DNA, 15 bp, Homo sapiens
tgtttcttcttcttt

SEQ ID NO: 825334 - DNA, 15 bp, Homo sapiens
ctgtttcttcttctt

SEQ ID NO: 825335 - DNA, 15 bp, Homo sapiens
tctgtttcttcttct

SEQ ID NO: 825336 - DNA, 15 bp, Homo sapiens
atctgtttcttcttc

SEQ ID NO: 825337 - DNA, 15 bp, Homo sapiens
gatctgtttcttctt

SEQ ID NO: 825338 - DNA, 15 bp, Homo sapiens
agatctgtttcttct

SEQ ID NO: 825339 - DNA, 15 bp, Homo sapiens
cagatctgtttcttc

SEQ ID NO: 825340 - DNA, 15 bp, Homo sapiens
ccagatctgtttctt

SEQ ID NO: 825341 - DNA, 15 bp, Homo sapiens
cccagatctgtttct

SEQ ID NO: 825342 - DNA, 15 bp, Homo sapiens
ccccagatctgtttc

SEQ ID NO: 825343 - DNA, 15 bp, Homo sapiens
tccccagatctgttt

SEQ ID NO: 825344 - DNA, 15 bp, Homo sapiens
ctccccagatctgtt

SEQ ID NO: 825345 - DNA, 15 bp, Homo sapiens
tctccccagatctgt

SEQ ID NO: 825346 - DNA, 15 bp, Homo sapiens
ctctccccagatctg

SEQ ID NO: 825347 - DNA, 15 bp, Homo sapiens
actctccccagatct

SEQ ID NO: 825348 - DNA, 15 bp, Homo sapiens
gactctccccagatc

SEQ ID NO: 825349 - DNA, 15 bp, Homo sapiens
tgactctccccagat

SEQ ID NO: 825350 - DNA, 15 bp, Homo sapiens
gtgactctccccaga

SEQ ID NO: 825351 - DNA, 15 bp, Homo sapiens
agtgactctccccag

SEQ ID NO: 825352 - DNA, 15 bp, Homo sapiens
cagtgactctcccca

SEQ ID NO: 825353 - DNA, 15 bp, Homo sapiens
tcagtgactctcccc

SEQ ID NO: 825354 - DNA, 15 bp, Homo sapiens
ttcagtgactctccc

SEQ ID NO: 825355 - DNA, 15 bp, Homo sapiens
attcagtgactctcc

SEQ ID NO: 825356 - DNA, 15 bp, Homo sapiens
cattcagtgactctc

SEQ ID NO: 825357 - DNA, 15 bp, Homo sapiens
ccattcagtgactct

SEQ ID NO: 825358 - DNA, 15 bp, Homo sapiens
cccattcagtgactc

SEQ ID NO: 825359 - DNA, 15 bp, Homo sapiens
tcccattcagtgact

SEQ ID NO: 825360 - DNA, 15 bp, Homo sapiens
ctcccattcagtgac

SEQ ID NO: 825361 - DNA, 15 bp, Homo sapiens
gctcccattcagtga

SEQ ID NO: 825362 - DNA, 15 bp, Homo sapiens
tgctcccattcagtg

SEQ ID NO: 825363 - DNA, 15 bp, Homo sapiens
atgctcccattcagt

SEQ ID NO: 825364 - DNA, 15 bp, Homo sapiens
tatgctcccattcag

SEQ ID NO: 825365 - DNA, 15 bp, Homo sapiens
ctatgctcccattca

SEQ ID NO: 825366 - DNA, 15 bp, Homo sapiens
tctatgctcccattc

SEQ ID NO: 825367 - DNA, 15 bp, Homo sapiens
ctctatgctcccatt

SEQ ID NO: 825368 - DNA, 15 bp, Homo sapiens
tctctatgctcccat

SEQ ID NO: 825369 - DNA, 15 bp, Homo sapiens
gtctctatgctccca

SEQ ID NO: 825370 - DNA, 15 bp, Homo sapiens
tgtctctatgctccc

SEQ ID NO: 825371 - DNA, 15 bp, Homo sapiens
ctgtctctatgctcc

SEQ ID NO: 825372 - DNA, 15 bp, Homo sapiens
tctgtctctatgctc

SEQ ID NO: 825373 - DNA, 15 bp, Homo sapiens
ctctgtctctatgct

SEQ ID NO: 825374 - DNA, 15 bp, Homo sapiens
tctctgtctctatgc

SEQ ID NO: 825375 - DNA, 15 bp, Homo sapiens
ttctctgtctctatg

SEQ ID NO: 825376 - DNA, 15 bp, Homo sapiens
tttctctgtctctat

SEQ ID NO: 825377 - DNA, 15 bp, Homo sapiens
gtttctctgtctcta

SEQ ID NO: 825378 - DNA, 15 bp, Homo sapiens
tgtttctctgtctct

SEQ ID NO: 825379 - DNA, 15 bp, Homo sapiens
ctgtttctctgtctc

SEQ ID NO: 825380 - DNA, 15 bp, Homo sapiens
tctgtttctctgtct

SEQ ID NO: 825381 - DNA, 15 bp, Homo sapiens
atctgtttctctgtc

SEQ ID NO: 825382 - DNA, 15 bp, Homo sapiens
gatctgtttctctgt

SEQ ID NO: 825383 - DNA, 15 bp, Homo sapiens
agatctgtttctctg

SEQ ID NO: 825384 - DNA, 15 bp, Homo sapiens
tagatctgtttctct

SEQ ID NO: 825385 - DNA, 15 bp, Homo sapiens
ctagatctgtttctc

SEQ ID NO: 825386 - DNA, 15 bp, Homo sapiens
tctagatctgtttct

SEQ ID NO: 825387 - DNA, 15 bp, Homo sapiens
ttctagatctgtttc

SEQ ID NO: 825388 - DNA, 15 bp, Homo sapiens
tttctagatctgttt

SEQ ID NO: 825389 - DNA, 15 bp, Homo sapiens
ttttctagatctgtt

SEQ ID NO: 825390 - DNA, 15 bp, Homo sapiens
gttttctagatctgt

SEQ ID NO: 825391 - DNA, 15 bp, Homo sapiens
ggttttctagatctg

SEQ ID NO: 825392 - DNA, 15 bp, Homo sapiens
tggttttctagatct

SEQ ID NO: 825393 - DNA, 15 bp, Homo sapiens
ttggttttctagatc

SEQ ID NO: 825394 - DNA, 15 bp, Homo sapiens
tttggttttctagat

SEQ ID NO: 825395 - DNA, 15 bp, Homo sapiens
gtttggttttctaga

SEQ ID NO: 825396 - DNA, 15 bp, Homo sapiens
agtttggttttctag

SEQ ID NO: 825397 - DNA, 15 bp, Homo sapiens
cagtttggttttcta

SEQ ID NO: 825398 - DNA, 15 bp, Homo sapiens
ccagtttggttttct

SEQ ID NO: 825399 - DNA, 15 bp, Homo sapiens
cccagtttggttttc

SEQ ID NO: 825400 - DNA, 15 bp, Homo sapiens
tcccagtttggtttt

SEQ ID NO: 825401 - DNA, 15 bp, Homo sapiens
ctcccagtttggttt

SEQ ID NO: 825402 - DNA, 15 bp, Homo sapiens
tctcccagtttggtt

SEQ ID NO: 825403 - DNA, 15 bp, Homo sapiens
ttctcccagtttggt

SEQ ID NO: 825404 - DNA, 15 bp, Homo sapiens
tttctcccagtttgg

SEQ ID NO: 825405 - DNA, 15 bp, Homo sapiens
ttttctcccagtttg

SEQ ID NO: 825406 - DNA, 15 bp, Homo sapiens
attttctcccagttt

SEQ ID NO: 825407 - DNA, 15 bp, Homo sapiens
cattttctcccagtt

SEQ ID NO: 825408 - DNA, 15 bp, Homo sapiens
tcattttctcccagt

SEQ ID NO: 825409 - DNA, 15 bp, Homo sapiens
ctcattttctcccag

SEQ ID NO: 825410 - DNA, 15 bp, Homo sapiens
tctcattttctccca

SEQ ID NO: 825411 - DNA, 15 bp, Homo sapiens
ctctcattttctccc

SEQ ID NO: 825412 - DNA, 15 bp, Homo sapiens
tctctcattttctcc

SEQ ID NO: 825413 - DNA, 15 bp, Homo sapiens
ttctctcattttctc

SEQ ID NO: 825414 - DNA, 15 bp, Homo sapiens
tttctctcattttct

SEQ ID NO: 825415 - DNA, 15 bp, Homo sapiens
gtttctctcattttc

SEQ ID NO: 825416 - DNA, 15 bp, Homo sapiens
ggtttctctcatttt

SEQ ID NO: 825417 - DNA, 15 bp, Homo sapiens
tggtttctctcattt

SEQ ID NO: 825418 - DNA, 15 bp, Homo sapiens
ttggtttctctcatt

SEQ ID NO: 825419 - DNA, 15 bp, Homo sapiens
tttggtttctctcat

SEQ ID NO: 825420 - DNA, 15 bp, Homo sapiens
ttttggtttctctca

SEQ ID NO: 825421 - DNA, 15 bp, Homo sapiens
cttttggtttctctc

SEQ ID NO: 825422 - DNA, 15 bp, Homo sapiens
tcttttggtttctct

SEQ ID NO: 825423 - DNA, 15 bp, Homo sapiens
ctcttttggtttctc

SEQ ID NO: 825424 - DNA, 15 bp, Homo sapiens
tctcttttggtttct

SEQ ID NO: 825425 - DNA, 15 bp, Homo sapiens
ctctcttttggtttc

SEQ ID NO: 825426 - DNA, 15 bp, Homo sapiens
cctctcttttggttt

SEQ ID NO: 825427 - DNA, 15 bp, Homo sapiens
acctctcttttggtt

SEQ ID NO: 825428 - DNA, 15 bp, Homo sapiens
tacctctcttttggt

SEQ ID NO: 825429 - DNA, 15 bp, Homo sapiens
ctacctctcttttgg

SEQ ID NO: 825430 - DNA, 15 bp, Homo sapiens
tctacctctcttttg

SEQ ID NO: 825431 - DNA, 15 bp, Homo sapiens
ctctacctctctttt

SEQ ID NO: 825432 - DNA, 15 bp, Homo sapiens
tctctacctctcttt

SEQ ID NO: 825433 - DNA, 15 bp, Homo sapiens
ctctctacctctctt

SEQ ID NO: 825434 - DNA, 15 bp, Homo sapiens
cctctctacctctct

SEQ ID NO: 825435 - DNA, 15 bp, Homo sapiens
tcctctctacctctc

SEQ ID NO: 825436 - DNA, 15 bp, Homo sapiens
ctcctctctacctct

SEQ ID NO: 825437 - DNA, 15 bp, Homo sapiens
gctcctctctacctc

SEQ ID NO: 825438 - DNA, 15 bp, Homo sapiens
tgctcctctctacct

SEQ ID NO: 825439 - DNA, 15 bp, Homo sapiens
ctgctcctctctacc

SEQ ID NO: 825440 - DNA, 15 bp, Homo sapiens
tctgctcctctctac

SEQ ID NO: 825441 - DNA, 15 bp, Homo sapiens
ctctgctcctctcta

SEQ ID NO: 825442 - DNA, 15 bp, Homo sapiens
tctctgctcctctct

SEQ ID NO: 825443 - DNA, 15 bp, Homo sapiens
ttctctgctcctctc

SEQ ID NO: 825444 - DNA, 15 bp, Homo sapiens
cttctctgctcctct

SEQ ID NO: 825445 - DNA, 15 bp, Homo sapiens
tcttctctgctcctc

SEQ ID NO: 825446 - DNA, 15 bp, Homo sapiens
ttcttctctgctcct

SEQ ID NO: 825447 - DNA, 15 bp, Homo sapiens
tttcttctctgctcc

SEQ ID NO: 825448 - DNA, 15 bp, Homo sapiens
ttttcttctctgctc

SEQ ID NO: 825449 - DNA, 15 bp, Homo sapiens
attttcttctctgct

SEQ ID NO: 825450 - DNA, 15 bp, Homo sapiens
cattttcttctctgc

SEQ ID NO: 825451 - DNA, 15 bp, Homo sapiens
tcattttcttctctg

SEQ ID NO: 825452 - DNA, 15 bp, Homo sapiens
ttcattttcttctct

SEQ ID NO: 825453 - DNA, 15 bp, Homo sapiens
cttcattttcttctc

SEQ ID NO: 825454 - DNA, 15 bp, Homo sapiens
tcttcattttcttct

SEQ ID NO: 825455 - DNA, 15 bp, Homo sapiens
ttcttcattttcttc

SEQ ID NO: 825456 - DNA, 15 bp, Homo sapiens
cttcttcattttctt

SEQ ID NO: 825457 - DNA, 15 bp, Homo sapiens
gcttcttcattttct

SEQ ID NO: 825458 - DNA, 15 bp, Homo sapiens
tgcttcttcattttc

SEQ ID NO: 825459 - DNA, 15 bp, Homo sapiens
ttgcttcttcatttt

SEQ ID NO: 825460 - DNA, 15 bp, Homo sapiens
cttgcttcttcattt

SEQ ID NO: 825461 - DNA, 15 bp, Homo sapiens
ccttgcttcttcatt

SEQ ID NO: 825462 - DNA, 15 bp, Homo sapiens
gccttgcttcttcat

SEQ ID NO: 825463 - DNA, 15 bp, Homo sapiens
tgccttgcttcttca

SEQ ID NO: 825464 - DNA, 15 bp, Homo sapiens
ttgccttgcttcttc

SEQ ID NO: 825465 - DNA, 15 bp, Homo sapiens
cttgccttgcttctt

SEQ ID NO: 825466 - DNA, 15 bp, Homo sapiens
ccttgccttgcttct

SEQ ID NO: 825467 - DNA, 15 bp, Homo sapiens
tccttgccttgcttc

SEQ ID NO: 825468 - DNA, 15 bp, Homo sapiens
gtccttgccttgctt

SEQ ID NO: 825469 - DNA, 15 bp, Homo sapiens
ggtccttgccttgct

SEQ ID NO: 825470 - DNA, 15 bp, Homo sapiens
tggtccttgccttgc

SEQ ID NO: 825471 - DNA, 15 bp, Homo sapiens
ctggtccttgccttg

SEQ ID NO: 825472 - DNA, 15 bp, Homo sapiens
cctggtccttgcctt

SEQ ID NO: 825473 - DNA, 15 bp, Homo sapiens
gcctggtccttgcct

SEQ ID NO: 825474 - DNA, 15 bp, Homo sapiens
agcctggtccttgcc

SEQ ID NO: 825475 - DNA, 15 bp, Homo sapiens
aagcctggtccttgc

SEQ ID NO: 825476 - DNA, 15 bp, Homo sapiens
aaagcctggtccttg

SEQ ID NO: 825477 - DNA, 15 bp, Homo sapiens
aaaagcctggtcctt

SEQ ID NO: 825478 - DNA, 15 bp, Homo sapiens
aaaaagcctggtcct

SEQ ID NO: 825479 - DNA, 15 bp, Homo sapiens
gaaaaagcctggtcc

SEQ ID NO: 825480 - DNA, 15 bp, Homo sapiens
tgaaaaagcctggtc

SEQ ID NO: 825481 - DNA, 15 bp, Homo sapiens
atgaaaaagcctggt

SEQ ID NO: 825482 - DNA, 15 bp, Homo sapiens
aatgaaaaagcctgg

SEQ ID NO: 825483 - DNA, 15 bp, Homo sapiens
taatgaaaaagcctg

SEQ ID NO: 825484 - DNA, 15 bp, Homo sapiens
ataatgaaaaagcct

SEQ ID NO: 825485 - DNA, 15 bp, Homo sapiens
aataatgaaaaagcc

SEQ ID NO: 825486 - DNA, 15 bp, Homo sapiens
aaataatgaaaaagc

SEQ ID NO: 825487 - DNA, 15 bp, Homo sapiens
gaaataatgaaaaag

SEQ ID NO: 825488 - DNA, 15 bp, Homo sapiens
agaaataatgaaaaa

SEQ ID NO: 825489 - DNA, 15 bp, Homo sapiens
aagaaataatgaaaa

SEQ ID NO: 825490 - DNA, 15 bp, Homo sapiens
taagaaataatgaaa

SEQ ID NO: 825491 - DNA, 15 bp, Homo sapiens
ataagaaataatgaa

SEQ ID NO: 825492 - DNA, 15 bp, Homo sapiens
cataagaaataatga

SEQ ID NO: 825493 - DNA, 15 bp, Homo sapiens
ccataagaaataatg

SEQ ID NO: 825494 - DNA, 15 bp, Homo sapiens
gccataagaaataat

SEQ ID NO: 825495 - DNA, 15 bp, Homo sapiens
ggccataagaaataa

SEQ ID NO: 825496 - DNA, 15 bp, Homo sapiens
tggccataagaaata

SEQ ID NO: 825497 - DNA, 15 bp, Homo sapiens
ttggccataagaaat

SEQ ID NO: 825498 - DNA, 15 bp, Homo sapiens
cttggccataagaaa

SEQ ID NO: 825499 - DNA, 15 bp, Homo sapiens
tcttggccataagaa

SEQ ID NO: 825500 - DNA, 15 bp, Homo sapiens
gtcttggccataaga

SEQ ID NO: 825501 - DNA, 15 bp, Homo sapiens
agtcttggccataag

SEQ ID NO: 825502 - DNA, 15 bp, Homo sapiens
aagtcttggccataa

SEQ ID NO: 825503 - DNA, 15 bp, Homo sapiens
gaagtcttggccata

SEQ ID NO: 825504 - DNA, 15 bp, Homo sapiens
tgaagtcttggccat

SEQ ID NO: 825505 - DNA, 15 bp, Homo sapiens
ctgaagtcttggcca

SEQ ID NO: 825506 - DNA, 15 bp, Homo sapiens
actgaagtcttggcc

SEQ ID NO: 825507 - DNA, 15 bp, Homo sapiens
tactgaagtcttggc

SEQ ID NO: 825508 - DNA, 15 bp, Homo sapiens
atactgaagtcttgg

SEQ ID NO: 825509 - DNA, 15 bp, Homo sapiens
catactgaagtcttg

SEQ ID NO: 825510 - DNA, 15 bp, Homo sapiens
gcatactgaagtctt

SEQ ID NO: 825511 - DNA, 15 bp, Homo sapiens
cgcatactgaagtct

SEQ ID NO: 825512 - DNA, 15 bp, Homo sapiens
acgcatactgaagtc

SEQ ID NO: 825513 - DNA, 15 bp, Homo sapiens
cacgcatactgaagt

SEQ ID NO: 825514 - DNA, 15 bp, Homo sapiens
ccacgcatactgaag

SEQ ID NO: 825515 - DNA, 15 bp, Homo sapiens
tccacgcatactgaa

SEQ ID NO: 825516 - DNA, 15 bp, Homo sapiens
gtccacgcatactga

SEQ ID NO: 825517 - DNA, 15 bp, Homo sapiens
agtccacgcatactg

SEQ ID NO: 825518 - DNA, 15 bp, Homo sapiens
aagtccacgcatact

SEQ ID NO: 825519 - DNA, 15 bp, Homo sapiens
taagtccacgcatac

SEQ ID NO: 825520 - DNA, 15 bp, Homo sapiens
ttaagtccacgcata

SEQ ID NO: 825521 - DNA, 15 bp, Homo sapiens
attaagtccacgcat

SEQ ID NO: 825522 - DNA, 15 bp, Homo sapiens
aattaagtccacgca

SEQ ID NO: 825523 - DNA, 15 bp, Homo sapiens
gaattaagtccacgc

SEQ ID NO: 825524 - DNA, 15 bp, Homo sapiens
agaattaagtccacg

SEQ ID NO: 825525 - DNA, 15 bp, Homo sapiens
aagaattaagtccac

SEQ ID NO: 825526 - DNA, 15 bp, Homo sapiens
gaagaattaagtcca

SEQ ID NO: 825527 - DNA, 15 bp, Homo sapiens
ggaagaattaagtcc

SEQ ID NO: 825528 - DNA, 15 bp, Homo sapiens
aggaagaattaagtc

SEQ ID NO: 825529 - DNA, 15 bp, Homo sapiens
aaggaagaattaagt

SEQ ID NO: 825530 - DNA, 15 bp, Homo sapiens
taaggaagaattaag

SEQ ID NO: 825531 - DNA, 15 bp, Homo sapiens
ataaggaagaattaa

SEQ ID NO: 825532 - DNA, 15 bp, Homo sapiens
cataaggaagaatta

SEQ ID NO: 825533 - DNA, 15 bp, Homo sapiens
gcataaggaagaatt

SEQ ID NO: 825534 - DNA, 15 bp, Homo sapiens
agcataaggaagaat

SEQ ID NO: 825535 - DNA, 15 bp, Homo sapiens
gagcataaggaagaa

SEQ ID NO: 825536 - DNA, 15 bp, Homo sapiens
ggagcataaggaaga

SEQ ID NO: 825537 - DNA, 15 bp, Homo sapiens
aggagcataaggaag

SEQ ID NO: 825538 - DNA, 15 bp, Homo sapiens
taggagcataaggaa

SEQ ID NO: 825539 - DNA, 15 bp, Homo sapiens
gtaggagcataagga

SEQ ID NO: 825540 - DNA, 15 bp, Homo sapiens
ggtaggagcataagg

SEQ ID NO: 825541 - DNA, 15 bp, Homo sapiens
aggtaggagcataag

SEQ ID NO: 825542 - DNA, 15 bp, Homo sapiens
aaggtaggagcataa

SEQ ID NO: 825543 - DNA, 15 bp, Homo sapiens
gaaggtaggagcata

SEQ ID NO: 825544 - DNA, 15 bp, Homo sapiens
ggaaggtaggagcat

SEQ ID NO: 825545 - DNA, 15 bp, Homo sapiens
gggaaggtaggagca

SEQ ID NO: 825546 - DNA, 15 bp, Homo sapiens
agggaaggtaggagc

SEQ ID NO: 825547 - DNA, 15 bp, Homo sapiens
tagggaaggtaggag

SEQ ID NO: 825548 - DNA, 15 bp, Homo sapiens
ctagggaaggtagga

SEQ ID NO: 825549 - DNA, 15 bp, Homo sapiens
cctagggaaggtagg

SEQ ID NO: 825550 - DNA, 15 bp, Homo sapiens
ccctagggaaggtag

SEQ ID NO: 825551 - DNA, 15 bp, Homo sapiens
tccctagggaaggta

SEQ ID NO: 825552 - DNA, 15 bp, Homo sapiens
ttccctagggaaggt

SEQ ID NO: 825553 - DNA, 15 bp, Homo sapiens
tttccctagggaagg

SEQ ID NO: 825554 - DNA, 15 bp, Homo sapiens
gtttccctagggaag

SEQ ID NO: 825555 - DNA, 15 bp, Homo sapiens
agtttccctagggaa

SEQ ID NO: 825556 - DNA, 15 bp, Homo sapiens
cagtttccctaggga

SEQ ID NO: 825557 - DNA, 15 bp, Homo sapiens
tcagtttccctaggg

SEQ ID NO: 825558 - DNA, 15 bp, Homo sapiens
atcagtttccctagg

SEQ ID NO: 825559 - DNA, 15 bp, Homo sapiens
aatcagtttccctag

SEQ ID NO: 825560 - DNA, 15 bp, Homo sapiens
aaatcagtttcccta

SEQ ID NO: 825561 - DNA, 15 bp, Homo sapiens
caaatcagtttccct

SEQ ID NO: 825562 - DNA, 15 bp, Homo sapiens
ccaaatcagtttccc

SEQ ID NO: 825563 - DNA, 15 bp, Homo sapiens
tccaaatcagtttcc

SEQ ID NO: 825564 - DNA, 15 bp, Homo sapiens
ctccaaatcagtttc

SEQ ID NO: 825565 - DNA, 15 bp, Homo sapiens
actccaaatcagttt

SEQ ID NO: 825566 - DNA, 15 bp, Homo sapiens
gactccaaatcagtt

SEQ ID NO: 825567 - DNA, 15 bp, Homo sapiens
agactccaaatcagt

SEQ ID NO: 825568 - DNA, 15 bp, Homo sapiens
gagactccaaatcag

SEQ ID NO: 825569 - DNA, 15 bp, Homo sapiens
agagactccaaatca

SEQ ID NO: 825570 - DNA, 15 bp, Homo sapiens
tagagactccaaatc

SEQ ID NO: 825571 - DNA, 15 bp, Homo sapiens
ttagagactccaaat

SEQ ID NO: 825572 - DNA, 15 bp, Homo sapiens
attagagactccaaa

SEQ ID NO: 825573 - DNA, 15 bp, Homo sapiens
tattagagactccaa

SEQ ID NO: 825574 - DNA, 15 bp, Homo sapiens
ctattagagactcca

SEQ ID NO: 825575 - DNA, 15 bp, Homo sapiens
tctattagagactcc

SEQ ID NO: 825576 - DNA, 15 bp, Homo sapiens
ctctattagagactc

SEQ ID NO: 825577 - DNA, 15 bp, Homo sapiens
gctctattagagact

SEQ ID NO: 825578 - DNA, 15 bp, Homo sapiens
ggctctattagagac

SEQ ID NO: 825579 - DNA, 15 bp, Homo sapiens
gggctctattagaga

SEQ ID NO: 825580 - DNA, 15 bp, Homo sapiens
agggctctattagag

SEQ ID NO: 825581 - DNA, 15 bp, Homo sapiens
aagggctctattaga

SEQ ID NO: 825582 - DNA, 15 bp, Homo sapiens
gaagggctctattag

SEQ ID NO: 825583 - DNA, 15 bp, Homo sapiens
agaagggctctatta

SEQ ID NO: 825584 - DNA, 15 bp, Homo sapiens
aagaagggctctatt

SEQ ID NO: 825585 - DNA, 15 bp, Homo sapiens
aaagaagggctctat

SEQ ID NO: 825586 - DNA, 15 bp, Homo sapiens
aaaagaagggctcta

SEQ ID NO: 825587 - DNA, 15 bp, Homo sapiens
taaaagaagggctct

SEQ ID NO: 825588 - DNA, 15 bp, Homo sapiens
ctaaaagaagggctc

SEQ ID NO: 825589 - DNA, 15 bp, Homo sapiens
tctaaaagaagggct

SEQ ID NO: 825590 - DNA, 15 bp, Homo sapiens
ttctaaaagaagggc

SEQ ID NO: 825591 - DNA, 15 bp, Homo sapiens
attctaaaagaaggg

SEQ ID NO: 825592 - DNA, 15 bp, Homo sapiens
gattctaaaagaagg

SEQ ID NO: 825593 - DNA, 15 bp, Homo sapiens
tgattctaaaagaag

SEQ ID NO: 825594 - DNA, 15 bp, Homo sapiens
gtgattctaaaagaa

SEQ ID NO: 825595 - DNA, 15 bp, Homo sapiens
tgtgattctaaaaga

SEQ ID NO: 825596 - DNA, 15 bp, Homo sapiens
ctgtgattctaaaag

SEQ ID NO: 825597 - DNA, 15 bp, Homo sapiens
actgtgattctaaaa

SEQ ID NO: 825598 - DNA, 15 bp, Homo sapiens
aactgtgattctaaa

SEQ ID NO: 825599 - DNA, 15 bp, Homo sapiens
aaactgtgattctaa

SEQ ID NO: 825600 - DNA, 15 bp, Homo sapiens
caaactgtgattcta

SEQ ID NO: 825601 - DNA, 15 bp, Homo sapiens
tcaaactgtgattct

SEQ ID NO: 825602 - DNA, 15 bp, Homo sapiens
atcaaactgtgattc

SEQ ID NO: 825603 - DNA, 15 bp, Homo sapiens
catcaaactgtgatt

SEQ ID NO: 825604 - DNA, 15 bp, Homo sapiens
gcatcaaactgtgat

SEQ ID NO: 825605 - DNA, 15 bp, Homo sapiens
ggcatcaaactgtga

SEQ ID NO: 825606 - DNA, 15 bp, Homo sapiens
aggcatcaaactgtg

SEQ ID NO: 825607 - DNA, 15 bp, Homo sapiens
aaggcatcaaactgt

SEQ ID NO: 825608 - DNA, 15 bp, Homo sapiens
taaggcatcaaactg

SEQ ID NO: 825609 - DNA, 15 bp, Homo sapiens
ttaaggcatcaaact

SEQ ID NO: 825610 - DNA, 15 bp, Homo sapiens
tttaaggcatcaaac

SEQ ID NO: 825611 - DNA, 15 bp, Homo sapiens
ttttaaggcatcaaa

SEQ ID NO: 825612 - DNA, 15 bp, Homo sapiens
gttttaaggcatcaa

SEQ ID NO: 825613 - DNA, 15 bp, Homo sapiens
agttttaaggcatca

SEQ ID NO: 825614 - DNA, 15 bp, Homo sapiens
tagttttaaggcatc

SEQ ID NO: 825615 - DNA, 15 bp, Homo sapiens
ctagttttaaggcat

SEQ ID NO: 825616 - DNA, 15 bp, Homo sapiens
actagttttaaggca

SEQ ID NO: 825617 - DNA, 15 bp, Homo sapiens
aactagttttaaggc

SEQ ID NO: 825618 - DNA, 15 bp, Homo sapiens
taactagttttaagg

SEQ ID NO: 825619 - DNA, 15 bp, Homo sapiens
ataactagttttaag

SEQ ID NO: 825620 - DNA, 15 bp, Homo sapiens
tataactagttttaa

SEQ ID NO: 825621 - DNA, 15 bp, Homo sapiens
atataactagtttta

SEQ ID NO: 825622 - DNA, 15 bp, Homo sapiens
tatataactagtttt

SEQ ID NO: 825623 - DNA, 15 bp, Homo sapiens
gtatataactagttt

SEQ ID NO: 825624 - DNA, 15 bp, Homo sapiens
ggtatataactagtt

SEQ ID NO: 825625 - DNA, 15 bp, Homo sapiens
aggtatataactagt

SEQ ID NO: 825626 - DNA, 15 bp, Homo sapiens
aaggtatataactag

SEQ ID NO: 825627 - DNA, 15 bp, Homo sapiens
gaaggtatataacta

SEQ ID NO: 825628 - DNA, 15 bp, Homo sapiens
tgaaggtatataact

SEQ ID NO: 825629 - DNA, 15 bp, Homo sapiens
gtgaaggtatataac

SEQ ID NO: 825630 - DNA, 15 bp, Homo sapiens
tgtgaaggtatataa

SEQ ID NO: 825631 - DNA, 15 bp, Homo sapiens
atgtgaaggtatata

SEQ ID NO: 825632 - DNA, 15 bp, Homo sapiens
catgtgaaggtatat

SEQ ID NO: 825633 - DNA, 15 bp, Homo sapiens
gcatgtgaaggtata

SEQ ID NO: 825634 - DNA, 15 bp, Homo sapiens
agcatgtgaaggtat

SEQ ID NO: 825635 - DNA, 15 bp, Homo sapiens
aagcatgtgaaggta

SEQ ID NO: 825636 - DNA, 15 bp, Homo sapiens
gaagcatgtgaaggt

SEQ ID NO: 825637 - DNA, 15 bp, Homo sapiens
ggaagcatgtgaagg

SEQ ID NO: 825638 - DNA, 15 bp, Homo sapiens
aggaagcatgtgaag

SEQ ID NO: 825639 - DNA, 15 bp, Homo sapiens
aaggaagcatgtgaa

SEQ ID NO: 825640 - DNA, 15 bp, Homo sapiens
taaggaagcatgtga

SEQ ID NO: 825641 - DNA, 15 bp, Homo sapiens
ttaaggaagcatgtg

SEQ ID NO: 825642 - DNA, 15 bp, Homo sapiens
gttaaggaagcatgt

SEQ ID NO: 825643 - DNA, 15 bp, Homo sapiens
ggttaaggaagcatg

SEQ ID NO: 825644 - DNA, 15 bp, Homo sapiens
gggttaaggaagcat

SEQ ID NO: 825645 - DNA, 15 bp, Homo sapiens
tgggttaaggaagca

SEQ ID NO: 825646 - DNA, 15 bp, Homo sapiens
gtgggttaaggaagc

SEQ ID NO: 825647 - DNA, 15 bp, Homo sapiens
tgtgggttaaggaag

SEQ ID NO: 825648 - DNA, 15 bp, Homo sapiens
ctgtgggttaaggaa

SEQ ID NO: 825649 - DNA, 15 bp, Homo sapiens
tctgtgggttaagga

SEQ ID NO: 825650 - DNA, 15 bp, Homo sapiens
ttctgtgggttaagg

SEQ ID NO: 825651 - DNA, 15 bp, Homo sapiens
cttctgtgggttaag

SEQ ID NO: 825652 - DNA, 15 bp, Homo sapiens
acttctgtgggttaa

SEQ ID NO: 825653 - DNA, 15 bp, Homo sapiens
cacttctgtgggtta

SEQ ID NO: 825654 - DNA, 15 bp, Homo sapiens
tcacttctgtgggtt

SEQ ID NO: 825655 - DNA, 15 bp, Homo sapiens
atcacttctgtgggt

SEQ ID NO: 825656 - DNA, 15 bp, Homo sapiens
catcacttctgtggg

SEQ ID NO: 825657 - DNA, 15 bp, Homo sapiens
gcatcacttctgtgg

SEQ ID NO: 825658 - DNA, 15 bp, Homo sapiens
agcatcacttctgtg

SEQ ID NO: 825659 - DNA, 15 bp, Homo sapiens
tagcatcacttctgt

SEQ ID NO: 825660 - DNA, 15 bp, Homo sapiens
ttagcatcacttctg

SEQ ID NO: 825661 - DNA, 15 bp, Homo sapiens
attagcatcacttct

SEQ ID NO: 825662 - DNA, 15 bp, Homo sapiens
cattagcatcacttc

SEQ ID NO: 825663 - DNA, 15 bp, Homo sapiens
tcattagcatcactt

SEQ ID NO: 825664 - DNA, 15 bp, Homo sapiens
ctcattagcatcact

SEQ ID NO: 825665 - DNA, 15 bp, Homo sapiens
cctcattagcatcac

SEQ ID NO: 825666 - DNA, 15 bp, Homo sapiens
gcctcattagcatca

SEQ ID NO: 825667 - DNA, 15 bp, Homo sapiens
ggcctcattagcatc

SEQ ID NO: 825668 - DNA, 15 bp, Homo sapiens
gggcctcattagcat

SEQ ID NO: 825669 - DNA, 15 bp, Homo sapiens
agggcctcattagca

SEQ ID NO: 825670 - DNA, 15 bp, Homo sapiens
aagggcctcattagc

SEQ ID NO: 825671 - DNA, 15 bp, Homo sapiens
taagggcctcattag

SEQ ID NO: 825672 - DNA, 15 bp, Homo sapiens
ttaagggcctcatta

SEQ ID NO: 825673 - DNA, 15 bp, Homo sapiens
attaagggcctcatt

SEQ ID NO: 825674 - DNA, 15 bp, Homo sapiens
tattaagggcctcat

SEQ ID NO: 825675 - DNA, 15 bp, Homo sapiens
ttattaagggcctca

SEQ ID NO: 825676 - DNA, 15 bp, Homo sapiens
cttattaagggcctc

SEQ ID NO: 825677 - DNA, 15 bp, Homo sapiens
ccttattaagggcct

SEQ ID NO: 825678 - DNA, 15 bp, Homo sapiens
tccttattaagggcc

SEQ ID NO: 825679 - DNA, 15 bp, Homo sapiens
ctccttattaagggc

SEQ ID NO: 825680 - DNA, 15 bp, Homo sapiens
gctccttattaaggg

SEQ ID NO: 825681 - DNA, 15 bp, Homo sapiens
cgctccttattaagg

SEQ ID NO: 825682 - DNA, 15 bp, Homo sapiens
acgctccttattaag

SEQ ID NO: 825683 - DNA, 15 bp, Homo sapiens
cacgctccttattaa

SEQ ID NO: 825684 - DNA, 15 bp, Homo sapiens
gcacgctccttatta

SEQ ID NO: 825685 - DNA, 15 bp, Homo sapiens
agcacgctccttatt

SEQ ID NO: 825686 - DNA, 15 bp, Homo sapiens
tagcacgctccttat

SEQ ID NO: 825687 - DNA, 15 bp, Homo sapiens
atagcacgctcctta

SEQ ID NO: 825688 - DNA, 15 bp, Homo sapiens
aatagcacgctcctt

SEQ ID NO: 825689 - DNA, 15 bp, Homo sapiens
taatagcacgctcct

SEQ ID NO: 825690 - DNA, 15 bp, Homo sapiens
ttaatagcacgctcc

SEQ ID NO: 825691 - DNA, 15 bp, Homo sapiens
cttaatagcacgctc

SEQ ID NO: 825692 - DNA, 15 bp, Homo sapiens
tcttaatagcacgct

SEQ ID NO: 825693 - DNA, 15 bp, Homo sapiens
atcttaatagcacgc

SEQ ID NO: 825694 - DNA, 15 bp, Homo sapiens
catcttaatagcacg

SEQ ID NO: 825695 - DNA, 15 bp, Homo sapiens
tcatcttaatagcac

SEQ ID NO: 825696 - DNA, 15 bp, Homo sapiens
ttcatcttaatagca

SEQ ID NO: 825697 - DNA, 15 bp, Homo sapiens
cttcatcttaatagc

SEQ ID NO: 825698 - DNA, 15 bp, Homo sapiens
tcttcatcttaatag

SEQ ID NO: 825699 - DNA, 15 bp, Homo sapiens
gtcttcatcttaata

SEQ ID NO: 825700 - DNA, 15 bp, Homo sapiens
tgtcttcatcttaat

SEQ ID NO: 825701 - DNA, 15 bp, Homo sapiens
atgtcttcatcttaa

SEQ ID NO: 825702 - DNA, 15 bp, Homo sapiens
aatgtcttcatctta

SEQ ID NO: 825703 - DNA, 15 bp, Homo sapiens
gaatgtcttcatctt

SEQ ID NO: 825704 - DNA, 15 bp, Homo sapiens
tgaatgtcttcatct

SEQ ID NO: 825705 - DNA, 15 bp, Homo sapiens
atgaatgtcttcatc

SEQ ID NO: 825706 - DNA, 15 bp, Homo sapiens
aatgaatgtcttcat

SEQ ID NO: 825707 - DNA, 15 bp, Homo sapiens
aaatgaatgtcttca

SEQ ID NO: 825708 - DNA, 15 bp, Homo sapiens
aaaatgaatgtcttc

SEQ ID NO: 825709 - DNA, 15 bp, Homo sapiens
aaaaatgaatgtctt

SEQ ID NO: 825710 - DNA, 15 bp, Homo sapiens
aaaaaatgaatgtct

SEQ ID NO: 825711 - DNA, 15 bp, Homo sapiens
aaaaaaatgaatgtc

SEQ ID NO: 825712 - DNA, 15 bp, Homo sapiens
aaaaaaaatgaatgt

SEQ ID NO: 825713 - DNA, 15 bp, Homo sapiens
gaaaaaaaatgaatg

SEQ ID NO: 825714 - DNA, 15 bp, Homo sapiens
agaaaaaaaatgaat

SEQ ID NO: 825715 - DNA, 15 bp, Homo sapiens
gagaaaaaaaatgaa

SEQ ID NO: 825716 - DNA, 15 bp, Homo sapiens
ggagaaaaaaaatga

SEQ ID NO: 825717 - DNA, 15 bp, Homo sapiens
cggagaaaaaaaatg

SEQ ID NO: 825718 - DNA, 15 bp, Homo sapiens
acggagaaaaaaaat

SEQ ID NO: 825719 - DNA, 15 bp, Homo sapiens
gacggagaaaaaaaa

SEQ ID NO: 825720 - DNA, 15 bp, Homo sapiens
ggacggagaaaaaaa

SEQ ID NO: 825721 - DNA, 15 bp, Homo sapiens
tggacggagaaaaaa

SEQ ID NO: 825722 - DNA, 15 bp, Homo sapiens
ttggacggagaaaaa

SEQ ID NO: 825723 - DNA, 15 bp, Homo sapiens
attggacggagaaaa

SEQ ID NO: 825724 - DNA, 15 bp, Homo sapiens
cattggacggagaaa

SEQ ID NO: 825725 - DNA, 15 bp, Homo sapiens
acattggacggagaa

SEQ ID NO: 825726 - DNA, 15 bp, Homo sapiens
aacattggacggaga

SEQ ID NO: 825727 - DNA, 15 bp, Homo sapiens
caacattggacggag

SEQ ID NO: 825728 - DNA, 15 bp, Homo sapiens
ccaacattggacgga

SEQ ID NO: 825729 - DNA, 15 bp, Homo sapiens
tccaacattggacgg

SEQ ID NO: 825730 - DNA, 15 bp, Homo sapiens
atccaacattggacg

SEQ ID NO: 825731 - DNA, 15 bp, Homo sapiens
aatccaacattggac

SEQ ID NO: 825732 - DNA, 15 bp, Homo sapiens
taatccaacattgga

SEQ ID NO: 825733 - DNA, 15 bp, Homo sapiens
ttaatccaacattgg

SEQ ID NO: 825734 - DNA, 15 bp, Homo sapiens
cttaatccaacattg

SEQ ID NO: 825735 - DNA, 15 bp, Homo sapiens
ccttaatccaacatt

SEQ ID NO: 825736 - DNA, 15 bp, Homo sapiens
gccttaatccaacat

SEQ ID NO: 825737 - DNA, 15 bp, Homo sapiens
tgccttaatccaaca

SEQ ID NO: 825738 - DNA, 15 bp, Homo sapiens
gtgccttaatccaac

SEQ ID NO: 825739 - DNA, 15 bp, Homo sapiens
tgtgccttaatccaa

SEQ ID NO: 825740 - DNA, 15 bp, Homo sapiens
atgtgccttaatcca

SEQ ID NO: 825741 - DNA, 15 bp, Homo sapiens
aatgtgccttaatcc

SEQ ID NO: 825742 - DNA, 15 bp, Homo sapiens
taatgtgccttaatc

SEQ ID NO: 825743 - DNA, 15 bp, Homo sapiens
ctaatgtgccttaat

SEQ ID NO: 825744 - DNA, 15 bp, Homo sapiens
actaatgtgccttaa

SEQ ID NO: 825745 - DNA, 15 bp, Homo sapiens
cactaatgtgcctta

SEQ ID NO: 825746 - DNA, 15 bp, Homo sapiens
ccactaatgtgcctt

SEQ ID NO: 825747 - DNA, 15 bp, Homo sapiens
cccactaatgtgcct

SEQ ID NO: 825748 - DNA, 15 bp, Homo sapiens
acccactaatgtgcc

SEQ ID NO: 825749 - DNA, 15 bp, Homo sapiens
tacccactaatgtgc

SEQ ID NO: 825750 - DNA, 15 bp, Homo sapiens
ttacccactaatgtg

SEQ ID NO: 825751 - DNA, 15 bp, Homo sapiens
attacccactaatgt

SEQ ID NO: 825752 - DNA, 15 bp, Homo sapiens
aattacccactaatg

SEQ ID NO: 825753 - DNA, 15 bp, Homo sapiens
gaattacccactaat

SEQ ID NO: 825754 - DNA, 15 bp, Homo sapiens
tgaattacccactaa

SEQ ID NO: 825755 - DNA, 15 bp, Homo sapiens
ctgaattacccacta

SEQ ID NO: 825756 - DNA, 15 bp, Homo sapiens
cctgaattacccact

SEQ ID NO: 825757 - DNA, 15 bp, Homo sapiens
ccctgaattacccac

SEQ ID NO: 825758 - DNA, 15 bp, Homo sapiens
accctgaattaccca

SEQ ID NO: 825759 - DNA, 15 bp, Homo sapiens
aaccctgaattaccc

SEQ ID NO: 825760 - DNA, 15 bp, Homo sapiens
caaccctgaattacc

SEQ ID NO: 825761 - DNA, 15 bp, Homo sapiens
gcaaccctgaattac

SEQ ID NO: 825762 - DNA, 15 bp, Homo sapiens
agcaaccctgaatta

SEQ ID NO: 825763 - DNA, 15 bp, Homo sapiens
aagcaaccctgaatt

SEQ ID NO: 825764 - DNA, 15 bp, Homo sapiens
aaagcaaccctgaat

SEQ ID NO: 825765 - DNA, 15 bp, Homo sapiens
caaagcaaccctgaa

SEQ ID NO: 825766 - DNA, 15 bp, Homo sapiens
acaaagcaaccctga

SEQ ID NO: 825767 - DNA, 15 bp, Homo sapiens
tacaaagcaaccctg

SEQ ID NO: 825768 - DNA, 15 bp, Homo sapiens
ttacaaagcaaccct

SEQ ID NO: 825769 - DNA, 15 bp, Homo sapiens
tttacaaagcaaccc

SEQ ID NO: 825770 - DNA, 15 bp, Homo sapiens
atttacaaagcaacc

SEQ ID NO: 825771 - DNA, 15 bp, Homo sapiens
aatttacaaagcaac

SEQ ID NO: 825772 - DNA, 15 bp, Homo sapiens
gaatttacaaagcaa

SEQ ID NO: 825773 - DNA, 15 bp, Homo sapiens
tgaatttacaaagca

SEQ ID NO: 825774 - DNA, 15 bp, Homo sapiens
atgaatttacaaagc

SEQ ID NO: 825775 - DNA, 15 bp, Homo sapiens
gatgaatttacaaag

SEQ ID NO: 825776 - DNA, 15 bp, Homo sapiens
tgatgaatttacaaa

SEQ ID NO: 825777 - DNA, 15 bp, Homo sapiens
gtgatgaatttacaa

SEQ ID NO: 825778 - DNA, 15 bp, Homo sapiens
agtgatgaatttaca

SEQ ID NO: 825779 - DNA, 15 bp, Homo sapiens
tagtgatgaatttac

SEQ ID NO: 825780 - DNA, 15 bp, Homo sapiens
ttagtgatgaattta

SEQ ID NO: 825781 - DNA, 15 bp, Homo sapiens
cttagtgatgaattt

SEQ ID NO: 825782 - DNA, 15 bp, Homo sapiens
ccttagtgatgaatt

SEQ ID NO: 825783 - DNA, 15 bp, Homo sapiens
accttagtgatgaat

SEQ ID NO: 825784 - DNA, 15 bp, Homo sapiens
aaccttagtgatgaa

SEQ ID NO: 825785 - DNA, 15 bp, Homo sapiens
taaccttagtgatga

SEQ ID NO: 825786 - DNA, 15 bp, Homo sapiens
ctaaccttagtgatg

SEQ ID NO: 825787 - DNA, 15 bp, Homo sapiens
gctaaccttagtgat

SEQ ID NO: 825788 - DNA, 15 bp, Homo sapiens
tgctaaccttagtga

SEQ ID NO: 825789 - DNA, 15 bp, Homo sapiens
atgctaaccttagtg

SEQ ID NO: 825790 - DNA, 15 bp, Homo sapiens
catgctaaccttagt

SEQ ID NO: 825791 - DNA, 15 bp, Homo sapiens
acatgctaaccttag

SEQ ID NO: 825792 - DNA, 15 bp, Homo sapiens
tacatgctaacctta

SEQ ID NO: 825793 - DNA, 15 bp, Homo sapiens
ttacatgctaacctt

SEQ ID NO: 825794 - DNA, 15 bp, Homo sapiens
attacatgctaacct

SEQ ID NO: 825795 - DNA, 15 bp, Homo sapiens
tattacatgctaacc

SEQ ID NO: 825796 - DNA, 15 bp, Homo sapiens
ctattacatgctaac

SEQ ID NO: 825797 - DNA, 15 bp, Homo sapiens
actattacatgctaa

SEQ ID NO: 825798 - DNA, 15 bp, Homo sapiens
tactattacatgcta

SEQ ID NO: 825799 - DNA, 15 bp, Homo sapiens
gtactattacatgct

SEQ ID NO: 825800 - DNA, 15 bp, Homo sapiens
tgtactattacatgc

SEQ ID NO: 825801 - DNA, 15 bp, Homo sapiens
ttgtactattacatg

SEQ ID NO: 825802 - DNA, 15 bp, Homo sapiens
cttgtactattacat

SEQ ID NO: 825803 - DNA, 15 bp, Homo sapiens
ccttgtactattaca

SEQ ID NO: 825804 - DNA, 15 bp, Homo sapiens
tccttgtactattac

SEQ ID NO: 825805 - DNA, 15 bp, Homo sapiens
ttccttgtactatta

SEQ ID NO: 825806 - DNA, 15 bp, Homo sapiens
cttccttgtactatt

SEQ ID NO: 825807 - DNA, 15 bp, Homo sapiens
tcttccttgtactat

SEQ ID NO: 825808 - DNA, 15 bp, Homo sapiens
ttcttccttgtacta

SEQ ID NO: 825809 - DNA, 15 bp, Homo sapiens
attcttccttgtact

SEQ ID NO: 825810 - DNA, 15 bp, Homo sapiens
gattcttccttgtac

SEQ ID NO: 825811 - DNA, 15 bp, Homo sapiens
tgattcttccttgta

SEQ ID NO: 825812 - DNA, 15 bp, Homo sapiens
ctgattcttccttgt

SEQ ID NO: 825813 - DNA, 15 bp, Homo sapiens
actgattcttccttg

SEQ ID NO: 825814 - DNA, 15 bp, Homo sapiens
aactgattcttcctt

SEQ ID NO: 825815 - DNA, 15 bp, Homo sapiens
caactgattcttcct

SEQ ID NO: 825816 - DNA, 15 bp, Homo sapiens
acaactgattcttcc

SEQ ID NO: 825817 - DNA, 15 bp, Homo sapiens
tacaactgattcttc

SEQ ID NO: 825818 - DNA, 15 bp, Homo sapiens
atacaactgattctt

SEQ ID NO: 825819 - DNA, 15 bp, Homo sapiens
catacaactgattct

SEQ ID NO: 825820 - DNA, 15 bp, Homo sapiens
acatacaactgattc

SEQ ID NO: 825821 - DNA, 15 bp, Homo sapiens
aacatacaactgatt

SEQ ID NO: 825822 - DNA, 15 bp, Homo sapiens
taacatacaactgat

SEQ ID NO: 825823 - DNA, 15 bp, Homo sapiens
ttaacatacaactga

SEQ ID NO: 825824 - DNA, 15 bp, Homo sapiens
tttaacatacaactg

SEQ ID NO: 825825 - DNA, 15 bp, Homo sapiens
atttaacatacaact

SEQ ID NO: 825826 - DNA, 15 bp, Homo sapiens
gatttaacatacaac

SEQ ID NO: 825827 - DNA, 15 bp, Homo sapiens
agatttaacatacaa

SEQ ID NO: 825828 - DNA, 15 bp, Homo sapiens
tagatttaacataca

SEQ ID NO: 825829 - DNA, 15 bp, Homo sapiens
ttagatttaacatac

SEQ ID NO: 825830 - DNA, 15 bp, Homo sapiens
attagatttaacata

SEQ ID NO: 825831 - DNA, 15 bp, Homo sapiens
cattagatttaacat

SEQ ID NO: 825832 - DNA, 15 bp, Homo sapiens
acattagatttaaca

SEQ ID NO: 825833 - DNA, 15 bp, Homo sapiens
tacattagatttaac

SEQ ID NO: 825834 - DNA, 15 bp, Homo sapiens
atacattagatttaa

SEQ ID NO: 825835 - DNA, 15 bp, Homo sapiens
tatacattagattta

SEQ ID NO: 825836 - DNA, 15 bp, Homo sapiens
ttatacattagattt

SEQ ID NO: 825837 - DNA, 15 bp, Homo sapiens
tttatacattagatt

SEQ ID NO: 825838 - DNA, 15 bp, Homo sapiens
ttttatacattagat

SEQ ID NO: 825839 - DNA, 15 bp, Homo sapiens
tttttatacattaga

SEQ ID NO: 825840 - DNA, 15 bp, Homo sapiens
ctttttatacattag

SEQ ID NO: 825841 - DNA, 15 bp, Homo sapiens
actttttatacatta

SEQ ID NO: 825842 - DNA, 15 bp, Homo sapiens
aactttttatacatt

SEQ ID NO: 825843 - DNA, 15 bp, Homo sapiens
aaactttttatacat

SEQ ID NO: 825844 - DNA, 15 bp, Homo sapiens
aaaactttttataca

SEQ ID NO: 825845 - DNA, 15 bp, Homo sapiens
taaaactttttatac

SEQ ID NO: 825846 - DNA, 15 bp, Homo sapiens
ataaaactttttata

SEQ ID NO: 825847 - DNA, 15 bp, Homo sapiens
tataaaactttttat

SEQ ID NO: 825848 - DNA, 15 bp, Homo sapiens
ttataaaacttttta

SEQ ID NO: 825849 - DNA, 15 bp, Homo sapiens
tttataaaacttttt

SEQ ID NO: 825850 - DNA, 15 bp, Homo sapiens
ttttataaaactttt

SEQ ID NO: 825851 - DNA, 15 bp, Homo sapiens
attttataaaacttt

SEQ ID NO: 825852 - DNA, 15 bp, Homo sapiens
tattttataaaactt

SEQ ID NO: 825853 - DNA, 15 bp, Homo sapiens
atattttataaaact

SEQ ID NO: 825854 - DNA, 15 bp, Homo sapiens
gatattttataaaac

SEQ ID NO: 825855 - DNA, 15 bp, Homo sapiens
tgatattttataaaa

SEQ ID NO: 825856 - DNA, 15 bp, Homo sapiens
atgatattttataaa

SEQ ID NO: 825857 - DNA, 15 bp, Homo sapiens
tatgatattttataa

SEQ ID NO: 825858 - DNA, 15 bp, Homo sapiens
atatgatattttata

SEQ ID NO: 825859 - DNA, 15 bp, Homo sapiens
catatgatattttat

SEQ ID NO: 825860 - DNA, 15 bp, Homo sapiens
acatatgatatttta

SEQ ID NO: 825861 - DNA, 15 bp, Homo sapiens
aacatatgatatttt

SEQ ID NO: 825862 - DNA, 15 bp, Homo sapiens
aaacatatgatattt

SEQ ID NO: 825863 - DNA, 15 bp, Homo sapiens
taaacatatgatatt

SEQ ID NO: 825864 - DNA, 15 bp, Homo sapiens
ctaaacatatgatat

SEQ ID NO: 825865 - DNA, 15 bp, Homo sapiens
tctaaacatatgata

SEQ ID NO: 825866 - DNA, 15 bp, Homo sapiens
ctctaaacatatgat

SEQ ID NO: 825867 - DNA, 15 bp, Homo sapiens
tctctaaacatatga

SEQ ID NO: 825868 - DNA, 15 bp, Homo sapiens
ctctctaaacatatg

SEQ ID NO: 825869 - DNA, 15 bp, Homo sapiens
actctctaaacatat

SEQ ID NO: 825870 - DNA, 15 bp, Homo sapiens
tactctctaaacata

SEQ ID NO: 825871 - DNA, 15 bp, Homo sapiens
atactctctaaacat

SEQ ID NO: 825872 - DNA, 15 bp, Homo sapiens
tatactctctaaaca

SEQ ID NO: 825873 - DNA, 15 bp, Homo sapiens
atatactctctaaac

SEQ ID NO: 825874 - DNA, 15 bp, Homo sapiens
aatatactctctaaa

SEQ ID NO: 825875 - DNA, 15 bp, Homo sapiens
aaatatactctctaa

SEQ ID NO: 825876 - DNA, 15 bp, Homo sapiens
gaaatatactctcta

SEQ ID NO: 825877 - DNA, 15 bp, Homo sapiens
tgaaatatactctct

SEQ ID NO: 825878 - DNA, 15 bp, Homo sapiens
ttgaaatatactctc

SEQ ID NO: 825879 - DNA, 15 bp, Homo sapiens
tttgaaatatactct

SEQ ID NO: 825880 - DNA, 15 bp, Homo sapiens
atttgaaatatactc

SEQ ID NO: 825881 - DNA, 15 bp, Homo sapiens
tatttgaaatatact

SEQ ID NO: 825882 - DNA, 15 bp, Homo sapiens
atatttgaaatatac

SEQ ID NO: 825883 - DNA, 15 bp, Homo sapiens
catatttgaaatata

SEQ ID NO: 825884 - DNA, 15 bp, Homo sapiens
tcatatttgaaatat

SEQ ID NO: 825885 - DNA, 15 bp, Homo sapiens
atcatatttgaaata

SEQ ID NO: 825886 - DNA, 15 bp, Homo sapiens
catcatatttgaaat

SEQ ID NO: 825887 - DNA, 15 bp, Homo sapiens
tcatcatatttgaaa

SEQ ID NO: 825888 - DNA, 15 bp, Homo sapiens
ttcatcatatttgaa

SEQ ID NO: 825889 - DNA, 15 bp, Homo sapiens
attcatcatatttga

SEQ ID NO: 825890 - DNA, 15 bp, Homo sapiens
gattcatcatatttg

SEQ ID NO: 825891 - DNA, 15 bp, Homo sapiens
ggattcatcatattt

SEQ ID NO: 825892 - DNA, 15 bp, Homo sapiens
aggattcatcatatt

SEQ ID NO: 825893 - DNA, 15 bp, Homo sapiens
taggattcatcatat

SEQ ID NO: 825894 - DNA, 15 bp, Homo sapiens
ctaggattcatcata

SEQ ID NO: 825895 - DNA, 15 bp, Homo sapiens
actaggattcatcat

SEQ ID NO: 825896 - DNA, 15 bp, Homo sapiens
cactaggattcatca

SEQ ID NO: 825897 - DNA, 15 bp, Homo sapiens
gcactaggattcatc

SEQ ID NO: 825898 - DNA, 15 bp, Homo sapiens
agcactaggattcat

SEQ ID NO: 825899 - DNA, 15 bp, Homo sapiens
aagcactaggattca

SEQ ID NO: 825900 - DNA, 15 bp, Homo sapiens
caagcactaggattc

SEQ ID NO: 825901 - DNA, 15 bp, Homo sapiens
ccaagcactaggatt

SEQ ID NO: 825902 - DNA, 15 bp, Homo sapiens
gccaagcactaggat

SEQ ID NO: 825903 - DNA, 15 bp, Homo sapiens
tgccaagcactagga

SEQ ID NO: 825904 - DNA, 15 bp, Homo sapiens
ttgccaagcactagg

SEQ ID NO: 825905 - DNA, 15 bp, Homo sapiens
tttgccaagcactag

SEQ ID NO: 825906 - DNA, 15 bp, Homo sapiens
atttgccaagcacta

SEQ ID NO: 825907 - DNA, 15 bp, Homo sapiens
aatttgccaagcact

SEQ ID NO: 825908 - DNA, 15 bp, Homo sapiens
taatttgccaagcac

SEQ ID NO: 825909 - DNA, 15 bp, Homo sapiens
ttaatttgccaagca

SEQ ID NO: 825910 - DNA, 15 bp, Homo sapiens
gttaatttgccaagc

SEQ ID NO: 825911 - DNA, 15 bp, Homo sapiens
agttaatttgccaag

SEQ ID NO: 825912 - DNA, 15 bp, Homo sapiens
aagttaatttgccaa

SEQ ID NO: 825913 - DNA, 15 bp, Homo sapiens
aaagttaatttgcca

SEQ ID NO: 825914 - DNA, 15 bp, Homo sapiens
taaagttaatttgcc

SEQ ID NO: 825915 - DNA, 15 bp, Homo sapiens
ctaaagttaatttgc

SEQ ID NO: 825916 - DNA, 15 bp, Homo sapiens
tctaaagttaatttg

SEQ ID NO: 825917 - DNA, 15 bp, Homo sapiens
ttctaaagttaattt

SEQ ID NO: 825918 - DNA, 15 bp, Homo sapiens
gttctaaagttaatt

SEQ ID NO: 825919 - DNA, 15 bp, Homo sapiens
tgttctaaagttaat

SEQ ID NO: 825920 - DNA, 15 bp, Homo sapiens
gtgttctaaagttaa

SEQ ID NO: 825921 - DNA, 15 bp, Homo sapiens
agtgttctaaagtta

SEQ ID NO: 825922 - DNA, 15 bp, Homo sapiens
tagtgttctaaagtt

SEQ ID NO: 825923 - DNA, 15 bp, Homo sapiens
ttagtgttctaaagt

SEQ ID NO: 825924 - DNA, 15 bp, Homo sapiens
attagtgttctaaag

SEQ ID NO: 825925 - DNA, 15 bp, Homo sapiens
tattagtgttctaaa

SEQ ID NO: 825926 - DNA, 15 bp, Homo sapiens
ttattagtgttctaa

SEQ ID NO: 825927 - DNA, 15 bp, Homo sapiens
tttattagtgttcta

SEQ ID NO: 825928 - DNA, 15 bp, Homo sapiens
ttttattagtgttct

SEQ ID NO: 825929 - DNA, 15 bp, Homo sapiens
attttattagtgttc

SEQ ID NO: 825930 - DNA, 15 bp, Homo sapiens
aattttattagtgtt

SEQ ID NO: 825931 - DNA, 15 bp, Homo sapiens
taattttattagtgt

SEQ ID NO: 825932 - DNA, 15 bp, Homo sapiens
ataattttattagtg

SEQ ID NO: 825933 - DNA, 15 bp, Homo sapiens
aataattttattagt

SEQ ID NO: 825934 - DNA, 15 bp, Homo sapiens
aaataattttattag

SEQ ID NO: 825935 - DNA, 15 bp, Homo sapiens
aaaataattttatta

SEQ ID NO: 825936 - DNA, 15 bp, Homo sapiens
taaaataattttatt

SEQ ID NO: 825937 - DNA, 15 bp, Homo sapiens
ataaaataattttat

SEQ ID NO: 825938 - DNA, 15 bp, Homo sapiens
aataaaataatttta

SEQ ID NO: 825939 - DNA, 15 bp, Homo sapiens
taataaaataatttt

SEQ ID NO: 825940 - DNA, 15 bp, Homo sapiens
ttaataaaataattt

SEQ ID NO: 825941 - DNA, 15 bp, Homo sapiens
cttaataaaataatt

SEQ ID NO: 825942 - DNA, 15 bp, Homo sapiens
tcttaataaaataat

SEQ ID NO: 825943 - DNA, 15 bp, Homo sapiens
ttcttaataaaataa

SEQ ID NO: 825944 - DNA, 15 bp, Homo sapiens
tttcttaataaaata

SEQ ID NO: 825945 - DNA, 15 bp, Homo sapiens
atttcttaataaaat

SEQ ID NO: 825946 - DNA, 15 bp, Homo sapiens
tatttcttaataaaa

SEQ ID NO: 825947 - DNA, 15 bp, Homo sapiens
ttatttcttaataaa

SEQ ID NO: 825948 - DNA, 15 bp, Homo sapiens
attatttcttaataa

SEQ ID NO: 825949 - DNA, 15 bp, Homo sapiens
aattatttcttaata

SEQ ID NO: 825950 - DNA, 15 bp, Homo sapiens
taattatttcttaat

SEQ ID NO: 825951 - DNA, 15 bp, Homo sapiens
gtaattatttcttaa

SEQ ID NO: 825952 - DNA, 15 bp, Homo sapiens
agtaattatttctta

SEQ ID NO: 825953 - DNA, 15 bp, Homo sapiens
tagtaattatttctt

SEQ ID NO: 825954 - DNA, 15 bp, Homo sapiens
atagtaattatttct

SEQ ID NO: 825955 - DNA, 15 bp, Homo sapiens
aatagtaattatttc

SEQ ID NO: 825956 - DNA, 15 bp, Homo sapiens
aaatagtaattattt

SEQ ID NO: 825957 - DNA, 15 bp, Homo sapiens
gaaatagtaattatt

SEQ ID NO: 825958 - DNA, 15 bp, Homo sapiens
tgaaatagtaattat

SEQ ID NO: 825959 - DNA, 15 bp, Homo sapiens
atgaaatagtaatta

SEQ ID NO: 825960 - DNA, 15 bp, Homo sapiens
aatgaaatagtaatt

SEQ ID NO: 825961 - DNA, 15 bp, Homo sapiens
taatgaaatagtaat

SEQ ID NO: 825962 - DNA, 15 bp, Homo sapiens
ataatgaaatagtaa

SEQ ID NO: 825963 - DNA, 15 bp, Homo sapiens
aataatgaaatagta

SEQ ID NO: 825964 - DNA, 15 bp, Homo sapiens
taataatgaaatagt

SEQ ID NO: 825965 - DNA, 15 bp, Homo sapiens
ttaataatgaaatag

SEQ ID NO: 825966 - DNA, 15 bp, Homo sapiens
tttaataatgaaata

SEQ ID NO: 825967 - DNA, 15 bp, Homo sapiens
ttttaataatgaaat

SEQ ID NO: 825968 - DNA, 15 bp, Homo sapiens
attttaataatgaaa

SEQ ID NO: 825969 - DNA, 15 bp, Homo sapiens
aattttaataatgaa

SEQ ID NO: 825970 - DNA, 15 bp, Homo sapiens
gaattttaataatga

SEQ ID NO: 825971 - DNA, 15 bp, Homo sapiens
tgaattttaataatg

SEQ ID NO: 825972 - DNA, 15 bp, Homo sapiens
atgaattttaataat

SEQ ID NO: 825973 - DNA, 15 bp, Homo sapiens
tatgaattttaataa

SEQ ID NO: 825974 - DNA, 15 bp, Homo sapiens
atatgaattttaata

SEQ ID NO: 825975 - DNA, 15 bp, Homo sapiens
tatatgaattttaat

SEQ ID NO: 825976 - DNA, 15 bp, Homo sapiens
atatatgaattttaa

SEQ ID NO: 825977 - DNA, 15 bp, Homo sapiens
tatatatgaatttta

SEQ ID NO: 825978 - DNA, 15 bp, Homo sapiens
ttatatatgaatttt

SEQ ID NO: 825979 - DNA, 15 bp, Homo sapiens
cttatatatgaattt

SEQ ID NO: 825980 - DNA, 15 bp, Homo sapiens
tcttatatatgaatt

SEQ ID NO: 825981 - DNA, 15 bp, Homo sapiens
atcttatatatgaat

SEQ ID NO: 825982 - DNA, 15 bp, Homo sapiens
catcttatatatgaa

SEQ ID NO: 825983 - DNA, 15 bp, Homo sapiens
acatcttatatatga

SEQ ID NO: 825984 - DNA, 15 bp, Homo sapiens
tacatcttatatatg

SEQ ID NO: 825985 - DNA, 15 bp, Homo sapiens
ctacatcttatatat

SEQ ID NO: 825986 - DNA, 15 bp, Homo sapiens
gctacatcttatata

SEQ ID NO: 825987 - DNA, 15 bp, Homo sapiens
tgctacatcttatat

SEQ ID NO: 825988 - DNA, 15 bp, Homo sapiens
gtgctacatcttata

SEQ ID NO: 825989 - DNA, 15 bp, Homo sapiens
tgtgctacatcttat

SEQ ID NO: 825990 - DNA, 15 bp, Homo sapiens
ttgtgctacatctta

SEQ ID NO: 825991 - DNA, 15 bp, Homo sapiens
attgtgctacatctt

SEQ ID NO: 825992 - DNA, 15 bp, Homo sapiens
cattgtgctacatct

SEQ ID NO: 825993 - DNA, 15 bp, Homo sapiens
tcattgtgctacatc

SEQ ID NO: 825994 - DNA, 15 bp, Homo sapiens
ctcattgtgctacat

SEQ ID NO: 825995 - DNA, 15 bp, Homo sapiens
tctcattgtgctaca

SEQ ID NO: 825996 - DNA, 15 bp, Homo sapiens
ctctcattgtgctac

SEQ ID NO: 825997 - DNA, 15 bp, Homo sapiens
actctcattgtgcta

SEQ ID NO: 825998 - DNA, 15 bp, Homo sapiens
tactctcattgtgct

SEQ ID NO: 825999 - DNA, 15 bp, Homo sapiens
atactctcattgtgc

SEQ ID NO: 826000 - DNA, 15 bp, Homo sapiens
tatactctcattgtg

SEQ ID NO: 826001 - DNA, 15 bp, Homo sapiens
ttatactctcattgt

SEQ ID NO: 826002 - DNA, 15 bp, Homo sapiens
tttatactctcattg

SEQ ID NO: 826003 - DNA, 15 bp, Homo sapiens
ctttatactctcatt

SEQ ID NO: 826004 - DNA, 15 bp, Homo sapiens
actttatactctcat

SEQ ID NO: 826005 - DNA, 15 bp, Homo sapiens
tactttatactctca

SEQ ID NO: 826006 - DNA, 15 bp, Homo sapiens
ctactttatactctc

SEQ ID NO: 826007 - DNA, 15 bp, Homo sapiens
tctactttatactct

SEQ ID NO: 826008 - DNA, 15 bp, Homo sapiens
atctactttatactc

SEQ ID NO: 826009 - DNA, 15 bp, Homo sapiens
catctactttatact

SEQ ID NO: 826010 - DNA, 15 bp, Homo sapiens
acatctactttatac

SEQ ID NO: 826011 - DNA, 15 bp, Homo sapiens
tacatctactttata

SEQ ID NO: 826012 - DNA, 15 bp, Homo sapiens
ttacatctactttat

SEQ ID NO: 826013 - DNA, 15 bp, Homo sapiens
attacatctacttta

SEQ ID NO: 826014 - DNA, 15 bp, Homo sapiens
tattacatctacttt

SEQ ID NO: 826015 - DNA, 15 bp, Homo sapiens
ttattacatctactt

SEQ ID NO: 826016 - DNA, 15 bp, Homo sapiens
attattacatctact

SEQ ID NO: 826017 - DNA, 15 bp, Homo sapiens
cattattacatctac

SEQ ID NO: 826018 - DNA, 15 bp, Homo sapiens
gcattattacatcta

SEQ ID NO: 826019 - DNA, 15 bp, Homo sapiens
tgcattattacatct

SEQ ID NO: 826020 - DNA, 15 bp, Homo sapiens
atgcattattacatc

SEQ ID NO: 826021 - DNA, 15 bp, Homo sapiens
aatgcattattacat

SEQ ID NO: 826022 - DNA, 15 bp, Homo sapiens
taatgcattattaca

SEQ ID NO: 826023 - DNA, 15 bp, Homo sapiens
ttaatgcattattac

SEQ ID NO: 826024 - DNA, 15 bp, Homo sapiens
attaatgcattatta

SEQ ID NO: 826025 - DNA, 15 bp, Homo sapiens
cattaatgcattatt

SEQ ID NO: 826026 - DNA, 15 bp, Homo sapiens
gcattaatgcattat

SEQ ID NO: 826027 - DNA, 15 bp, Homo sapiens
agcattaatgcatta

SEQ ID NO: 826028 - DNA, 15 bp, Homo sapiens
tagcattaatgcatt

SEQ ID NO: 826029 - DNA, 15 bp, Homo sapiens
atagcattaatgcat

SEQ ID NO: 826030 - DNA, 15 bp, Homo sapiens
aatagcattaatgca

SEQ ID NO: 826031 - DNA, 15 bp, Homo sapiens
gaatagcattaatgc

SEQ ID NO: 826032 - DNA, 15 bp, Homo sapiens
agaatagcattaatg

SEQ ID NO: 826033 - DNA, 15 bp, Homo sapiens
cagaatagcattaat

SEQ ID NO: 826034 - DNA, 15 bp, Homo sapiens
tcagaatagcattaa

SEQ ID NO: 826035 - DNA, 15 bp, Homo sapiens
atcagaatagcatta

SEQ ID NO: 826036 - DNA, 15 bp, Homo sapiens
aatcagaatagcatt

SEQ ID NO: 826037 - DNA, 15 bp, Homo sapiens
gaatcagaatagcat

SEQ ID NO: 826038 - DNA, 15 bp, Homo sapiens
agaatcagaatagca

SEQ ID NO: 826039 - DNA, 15 bp, Homo sapiens
tagaatcagaatagc

SEQ ID NO: 826040 - DNA, 15 bp, Homo sapiens
atagaatcagaatag

SEQ ID NO: 826041 - DNA, 15 bp, Homo sapiens
tatagaatcagaata

SEQ ID NO: 826042 - DNA, 15 bp, Homo sapiens
ttatagaatcagaat

SEQ ID NO: 826043 - DNA, 15 bp, Homo sapiens
attatagaatcagaa

SEQ ID NO: 826044 - DNA, 15 bp, Homo sapiens
tattatagaatcaga

SEQ ID NO: 826045 - DNA, 15 bp, Homo sapiens
atattatagaatcag

SEQ ID NO: 826046 - DNA, 15 bp, Homo sapiens
catattatagaatca

SEQ ID NO: 826047 - DNA, 15 bp, Homo sapiens
acatattatagaatc

SEQ ID NO: 826048 - DNA, 15 bp, Homo sapiens
aacatattatagaat

SEQ ID NO: 826049 - DNA, 15 bp, Homo sapiens
aaacatattatagaa

SEQ ID NO: 826050 - DNA, 15 bp, Homo sapiens
aaaacatattataga

SEQ ID NO: 826051 - DNA, 15 bp, Homo sapiens
aaaaacatattatag

SEQ ID NO: 826052 - DNA, 15 bp, Homo sapiens
caaaaacatattata

SEQ ID NO: 826053 - DNA, 15 bp, Homo sapiens
gcaaaaacatattat

SEQ ID NO: 826054 - DNA, 15 bp, Homo sapiens
agcaaaaacatatta

SEQ ID NO: 826055 - DNA, 15 bp, Homo sapiens
gagcaaaaacatatt

SEQ ID NO: 826056 - DNA, 15 bp, Homo sapiens
agagcaaaaacatat

SEQ ID NO: 826057 - DNA, 15 bp, Homo sapiens
gagagcaaaaacata

SEQ ID NO: 826058 - DNA, 15 bp, Homo sapiens
agagagcaaaaacat

SEQ ID NO: 826059 - DNA, 15 bp, Homo sapiens
aagagagcaaaaaca

SEQ ID NO: 826060 - DNA, 15 bp, Homo sapiens
aaagagagcaaaaac

SEQ ID NO: 826061 - DNA, 15 bp, Homo sapiens
aaaagagagcaaaaa

SEQ ID NO: 826062 - DNA, 15 bp, Homo sapiens
taaaagagagcaaaa

SEQ ID NO: 826063 - DNA, 15 bp, Homo sapiens
ataaaagagagcaaa

SEQ ID NO: 826064 - DNA, 15 bp, Homo sapiens
tataaaagagagcaa

SEQ ID NO: 826065 - DNA, 15 bp, Homo sapiens
ttataaaagagagca

SEQ ID NO: 826066 - DNA, 15 bp, Homo sapiens
tttataaaagagagc

SEQ ID NO: 826067 - DNA, 15 bp, Homo sapiens
atttataaaagagag

SEQ ID NO: 826068 - DNA, 15 bp, Homo sapiens
tatttataaaagaga

SEQ ID NO: 826069 - DNA, 15 bp, Homo sapiens
ctatttataaaagag

SEQ ID NO: 826070 - DNA, 15 bp, Homo sapiens
cctatttataaaaga

SEQ ID NO: 826071 - DNA, 15 bp, Homo sapiens
tcctatttataaaag

SEQ ID NO: 826072 - DNA, 15 bp, Homo sapiens
atcctatttataaaa

SEQ ID NO: 826073 - DNA, 15 bp, Homo sapiens
aatcctatttataaa

SEQ ID NO: 826074 - DNA, 15 bp, Homo sapiens
aaatcctatttataa

SEQ ID NO: 826075 - DNA, 15 bp, Homo sapiens
gaaatcctatttata

SEQ ID NO: 826076 - DNA, 15 bp, Homo sapiens
agaaatcctatttat

SEQ ID NO: 826077 - DNA, 15 bp, Homo sapiens
aagaaatcctattta

SEQ ID NO: 826078 - DNA, 15 bp, Homo sapiens
taagaaatcctattt

SEQ ID NO: 826079 - DNA, 15 bp, Homo sapiens
gtaagaaatcctatt

SEQ ID NO: 826080 - DNA, 15 bp, Homo sapiens
tgtaagaaatcctat

SEQ ID NO: 826081 - DNA, 15 bp, Homo sapiens
ttgtaagaaatccta

SEQ ID NO: 826082 - DNA, 15 bp, Homo sapiens
tttgtaagaaatcct

SEQ ID NO: 826083 - DNA, 15 bp, Homo sapiens
ttttgtaagaaatcc

SEQ ID NO: 826084 - DNA, 15 bp, Homo sapiens
cttttgtaagaaatc

SEQ ID NO: 826085 - DNA, 15 bp, Homo sapiens
gcttttgtaagaaat

SEQ ID NO: 826086 - DNA, 15 bp, Homo sapiens
tgcttttgtaagaaa

SEQ ID NO: 826087 - DNA, 15 bp, Homo sapiens
ttgcttttgtaagaa

SEQ ID NO: 826088 - DNA, 15 bp, Homo sapiens
cttgcttttgtaaga

SEQ ID NO: 826089 - DNA, 15 bp, Homo sapiens
tcttgcttttgtaag

SEQ ID NO: 826090 - DNA, 15 bp, Homo sapiens
ttcttgcttttgtaa

SEQ ID NO: 826091 - DNA, 15 bp, Homo sapiens
attcttgcttttgta

SEQ ID NO: 826092 - DNA, 15 bp, Homo sapiens
tattcttgcttttgt

SEQ ID NO: 826093 - DNA, 15 bp, Homo sapiens
atattcttgcttttg

SEQ ID NO: 826094 - DNA, 15 bp, Homo sapiens
tatattcttgctttt

SEQ ID NO: 826095 - DNA, 15 bp, Homo sapiens
ttatattcttgcttt

SEQ ID NO: 826096 - DNA, 15 bp, Homo sapiens
cttatattcttgctt

SEQ ID NO: 826097 - DNA, 15 bp, Homo sapiens
tcttatattcttgct

SEQ ID NO: 826098 - DNA, 15 bp, Homo sapiens
gtcttatattcttgc

SEQ ID NO: 826099 - DNA, 15 bp, Homo sapiens
tgtcttatattcttg

SEQ ID NO: 826100 - DNA, 15 bp, Homo sapiens
atgtcttatattctt

SEQ ID NO: 826101 - DNA, 15 bp, Homo sapiens
aatgtcttatattct

SEQ ID NO: 826102 - DNA, 15 bp, Homo sapiens
caatgtcttatattc

SEQ ID NO: 826103 - DNA, 15 bp, Homo sapiens
ccaatgtcttatatt

SEQ ID NO: 826104 - DNA, 15 bp, Homo sapiens
tccaatgtcttatat

SEQ ID NO: 826105 - DNA, 15 bp, Homo sapiens
ttccaatgtcttata

SEQ ID NO: 826106 - DNA, 15 bp, Homo sapiens
attccaatgtcttat

SEQ ID NO: 826107 - DNA, 15 bp, Homo sapiens
tattccaatgtctta

SEQ ID NO: 826108 - DNA, 15 bp, Homo sapiens
atattccaatgtctt

SEQ ID NO: 826109 - DNA, 15 bp, Homo sapiens
tatattccaatgtct

SEQ ID NO: 826110 - DNA, 15 bp, Homo sapiens
ttatattccaatgtc

SEQ ID NO: 826111 - DNA, 15 bp, Homo sapiens
gttatattccaatgt

SEQ ID NO: 826112 - DNA, 15 bp, Homo sapiens
agttatattccaatg

SEQ ID NO: 826113 - DNA, 15 bp, Homo sapiens
aagttatattccaat

SEQ ID NO: 826114 - DNA, 15 bp, Homo sapiens
taagttatattccaa

SEQ ID NO: 826115 - DNA, 15 bp, Homo sapiens
ttaagttatattcca

SEQ ID NO: 826116 - DNA, 15 bp, Homo sapiens
gttaagttatattcc

SEQ ID NO: 826117 - DNA, 15 bp, Homo sapiens
cgttaagttatattc

SEQ ID NO: 826118 - DNA, 15 bp, Homo sapiens
tcgttaagttatatt

SEQ ID NO: 826119 - DNA, 15 bp, Homo sapiens
gtcgttaagttatat

SEQ ID NO: 826120 - DNA, 15 bp, Homo sapiens
agtcgttaagttata

SEQ ID NO: 826121 - DNA, 15 bp, Homo sapiens
tagtcgttaagttat

SEQ ID NO: 826122 - DNA, 15 bp, Homo sapiens
gtagtcgttaagtta

SEQ ID NO: 826123 - DNA, 15 bp, Homo sapiens
tgtagtcgttaagtt

SEQ ID NO: 826124 - DNA, 15 bp, Homo sapiens
ctgtagtcgttaagt

SEQ ID NO: 826125 - DNA, 15 bp, Homo sapiens
tctgtagtcgttaag

SEQ ID NO: 826126 - DNA, 15 bp, Homo sapiens
ttctgtagtcgttaa

SEQ ID NO: 826127 - DNA, 15 bp, Homo sapiens
cttctgtagtcgtta

SEQ ID NO: 826128 - DNA, 15 bp, Homo sapiens
acttctgtagtcgtt

SEQ ID NO: 826129 - DNA, 15 bp, Homo sapiens
tacttctgtagtcgt

SEQ ID NO: 826130 - DNA, 15 bp, Homo sapiens
ctacttctgtagtcg

SEQ ID NO: 826131 - DNA, 15 bp, Homo sapiens
actacttctgtagtc

SEQ ID NO: 826132 - DNA, 15 bp, Homo sapiens
cactacttctgtagt

SEQ ID NO: 826133 - DNA, 15 bp, Homo sapiens
tcactacttctgtag

SEQ ID NO: 826134 - DNA, 15 bp, Homo sapiens
atcactacttctgta

SEQ ID NO: 826135 - DNA, 15 bp, Homo sapiens
catcactacttctgt

SEQ ID NO: 826136 - DNA, 15 bp, Homo sapiens
ccatcactacttctg

SEQ ID NO: 826137 - DNA, 15 bp, Homo sapiens
tccatcactacttct

SEQ ID NO: 826138 - DNA, 15 bp, Homo sapiens
ctccatcactacttc

SEQ ID NO: 826139 - DNA, 15 bp, Homo sapiens
tctccatcactactt

SEQ ID NO: 826140 - DNA, 15 bp, Homo sapiens
ttctccatcactact

SEQ ID NO: 826141 - DNA, 15 bp, Homo sapiens
attctccatcactac

SEQ ID NO: 826142 - DNA, 15 bp, Homo sapiens
cattctccatcacta

SEQ ID NO: 826143 - DNA, 15 bp, Homo sapiens
acattctccatcact

SEQ ID NO: 826144 - DNA, 15 bp, Homo sapiens
tacattctccatcac

SEQ ID NO: 826145 - DNA, 15 bp, Homo sapiens
ttacattctccatca

SEQ ID NO: 826146 - DNA, 15 bp, Homo sapiens
gttacattctccatc

SEQ ID NO: 826147 - DNA, 15 bp, Homo sapiens
tgttacattctccat

SEQ ID NO: 826148 - DNA, 15 bp, Homo sapiens
ctgttacattctcca

SEQ ID NO: 826149 - DNA, 15 bp, Homo sapiens
gctgttacattctcc

SEQ ID NO: 826150 - DNA, 15 bp, Homo sapiens
ggctgttacattctc

SEQ ID NO: 826151 - DNA, 15 bp, Homo sapiens
aggctgttacattct

SEQ ID NO: 826152 - DNA, 15 bp, Homo sapiens
aaggctgttacattc

SEQ ID NO: 826153 - DNA, 15 bp, Homo sapiens
gaaggctgttacatt

SEQ ID NO: 826154 - DNA, 15 bp, Homo sapiens
agaaggctgttacat

SEQ ID NO: 826155 - DNA, 15 bp, Homo sapiens
cagaaggctgttaca

SEQ ID NO: 826156 - DNA, 15 bp, Homo sapiens
ccagaaggctgttac

SEQ ID NO: 826157 - DNA, 15 bp, Homo sapiens
cccagaaggctgtta

SEQ ID NO: 826158 - DNA, 15 bp, Homo sapiens
tcccagaaggctgtt

SEQ ID NO: 826159 - DNA, 15 bp, Homo sapiens
ctcccagaaggctgt

SEQ ID NO: 826160 - DNA, 15 bp, Homo sapiens
cctcccagaaggctg

SEQ ID NO: 826161 - DNA, 15 bp, Homo sapiens
tcctcccagaaggct

SEQ ID NO: 826162 - DNA, 15 bp, Homo sapiens
ctcctcccagaaggc

SEQ ID NO: 826163 - DNA, 15 bp, Homo sapiens
cctcctcccagaagg

SEQ ID NO: 826164 - DNA, 15 bp, Homo sapiens
acctcctcccagaag

SEQ ID NO: 826165 - DNA, 15 bp, Homo sapiens
gacctcctcccagaa

SEQ ID NO: 826166 - DNA, 15 bp, Homo sapiens
tgacctcctcccaga

SEQ ID NO: 826167 - DNA, 15 bp, Homo sapiens
ctgacctcctcccag

SEQ ID NO: 826168 - DNA, 15 bp, Homo sapiens
tctgacctcctccca

SEQ ID NO: 826169 - DNA, 15 bp, Homo sapiens
ttctgacctcctccc

SEQ ID NO: 826170 - DNA, 15 bp, Homo sapiens
attctgacctcctcc

SEQ ID NO: 826171 - DNA, 15 bp, Homo sapiens
aattctgacctcctc

SEQ ID NO: 826172 - DNA, 15 bp, Homo sapiens
aaattctgacctcct

SEQ ID NO: 826173 - DNA, 15 bp, Homo sapiens
aaaattctgacctcc

SEQ ID NO: 826174 - DNA, 15 bp, Homo sapiens
aaaaattctgacctc

SEQ ID NO: 826175 - DNA, 15 bp, Homo sapiens
taaaaattctgacct

SEQ ID NO: 826176 - DNA, 15 bp, Homo sapiens
ttaaaaattctgacc

SEQ ID NO: 826177 - DNA, 15 bp, Homo sapiens
tttaaaaattctgac

SEQ ID NO: 826178 - DNA, 15 bp, Homo sapiens
ttttaaaaattctga

SEQ ID NO: 826179 - DNA, 15 bp, Homo sapiens
tttttaaaaattctg

SEQ ID NO: 826180 - DNA, 15 bp, Homo sapiens
ttttttaaaaattct

SEQ ID NO: 826181 - DNA, 15 bp, Homo sapiens
attttttaaaaattc

SEQ ID NO: 826182 - DNA, 15 bp, Homo sapiens
aattttttaaaaatt

SEQ ID NO: 826183 - DNA, 15 bp, Homo sapiens
caattttttaaaaat

SEQ ID NO: 826184 - DNA, 15 bp, Homo sapiens
acaattttttaaaaa

SEQ ID NO: 826185 - DNA, 15 bp, Homo sapiens
aacaattttttaaaa

SEQ ID NO: 826186 - DNA, 15 bp, Homo sapiens
aaacaattttttaaa

SEQ ID NO: 826187 - DNA, 15 bp, Homo sapiens
caaacaattttttaa

SEQ ID NO: 826188 - DNA, 15 bp, Homo sapiens
gcaaacaatttttta

SEQ ID NO: 826189 - DNA, 15 bp, Homo sapiens
agcaaacaatttttt

SEQ ID NO: 826190 - DNA, 15 bp, Homo sapiens
gagcaaacaattttt

SEQ ID NO: 826191 - DNA, 15 bp, Homo sapiens
agagcaaacaatttt

SEQ ID NO: 826192 - DNA, 15 bp, Homo sapiens
tagagcaaacaattt

SEQ ID NO: 826193 - DNA, 15 bp, Homo sapiens
ttagagcaaacaatt

SEQ ID NO: 826194 - DNA, 15 bp, Homo sapiens
tttagagcaaacaat

SEQ ID NO: 826195 - DNA, 15 bp, Homo sapiens
gtttagagcaaacaa

SEQ ID NO: 826196 - DNA, 15 bp, Homo sapiens
tgtttagagcaaaca

SEQ ID NO: 826197 - DNA, 15 bp, Homo sapiens
gtgtttagagcaaac

SEQ ID NO: 826198 - DNA, 15 bp, Homo sapiens
ggtgtttagagcaaa

SEQ ID NO: 826199 - DNA, 15 bp, Homo sapiens
aggtgtttagagcaa

SEQ ID NO: 826200 - DNA, 15 bp, Homo sapiens
taggtgtttagagca

SEQ ID NO: 826201 - DNA, 15 bp, Homo sapiens
ttaggtgtttagagc

SEQ ID NO: 826202 - DNA, 15 bp, Homo sapiens
gttaggtgtttagag

SEQ ID NO: 826203 - DNA, 15 bp, Homo sapiens
agttaggtgtttaga

SEQ ID NO: 826204 - DNA, 15 bp, Homo sapiens
cagttaggtgtttag

SEQ ID NO: 826205 - DNA, 15 bp, Homo sapiens
acagttaggtgttta

SEQ ID NO: 826206 - DNA, 15 bp, Homo sapiens
aacagttaggtgttt

SEQ ID NO: 826207 - DNA, 15 bp, Homo sapiens
aaacagttaggtgtt

SEQ ID NO: 826208 - DNA, 15 bp, Homo sapiens
aaaacagttaggtgt

SEQ ID NO: 826209 - DNA, 15 bp, Homo sapiens
gaaaacagttaggtg

SEQ ID NO: 826210 - DNA, 15 bp, Homo sapiens
agaaaacagttaggt

SEQ ID NO: 826211 - DNA, 15 bp, Homo sapiens
aagaaaacagttagg

SEQ ID NO: 826212 - DNA, 15 bp, Homo sapiens
gaagaaaacagttag

SEQ ID NO: 826213 - DNA, 15 bp, Homo sapiens
agaagaaaacagtta

SEQ ID NO: 826214 - DNA, 15 bp, Homo sapiens
aagaagaaaacagtt

SEQ ID NO: 826215 - DNA, 15 bp, Homo sapiens
aaagaagaaaacagt

SEQ ID NO: 826216 - DNA, 15 bp, Homo sapiens
caaagaagaaaacag

SEQ ID NO: 826217 - DNA, 15 bp, Homo sapiens
acaaagaagaaaaca

SEQ ID NO: 826218 - DNA, 15 bp, Homo sapiens
cacaaagaagaaaac

SEQ ID NO: 826219 - DNA, 15 bp, Homo sapiens
tcacaaagaagaaaa

SEQ ID NO: 826220 - DNA, 15 bp, Homo sapiens
ttcacaaagaagaaa

SEQ ID NO: 826221 - DNA, 15 bp, Homo sapiens
attcacaaagaagaa

SEQ ID NO: 826222 - DNA, 15 bp, Homo sapiens
tattcacaaagaaga

SEQ ID NO: 826223 - DNA, 15 bp, Homo sapiens
atattcacaaagaag

SEQ ID NO: 826224 - DNA, 15 bp, Homo sapiens
catattcacaaagaa

SEQ ID NO: 826225 - DNA, 15 bp, Homo sapiens
ccatattcacaaaga

SEQ ID NO: 826226 - DNA, 15 bp, Homo sapiens
tccatattcacaaag

SEQ ID NO: 826227 - DNA, 15 bp, Homo sapiens
atccatattcacaaa

SEQ ID NO: 826228 - DNA, 15 bp, Homo sapiens
aatccatattcacaa

SEQ ID NO: 826229 - DNA, 15 bp, Homo sapiens
aaatccatattcaca

SEQ ID NO: 826230 - DNA, 15 bp, Homo sapiens
gaaatccatattcac

SEQ ID NO: 826231 - DNA, 15 bp, Homo sapiens
tgaaatccatattca

SEQ ID NO: 826232 - DNA, 15 bp, Homo sapiens
atgaaatccatattc

SEQ ID NO: 826233 - DNA, 15 bp, Homo sapiens
gatgaaatccatatt

SEQ ID NO: 826234 - DNA, 15 bp, Homo sapiens
ggatgaaatccatat

SEQ ID NO: 826235 - DNA, 15 bp, Homo sapiens
aggatgaaatccata

SEQ ID NO: 826236 - DNA, 15 bp, Homo sapiens
taggatgaaatccat

SEQ ID NO: 826237 - DNA, 15 bp, Homo sapiens
ttaggatgaaatcca

SEQ ID NO: 826238 - DNA, 15 bp, Homo sapiens
attaggatgaaatcc

SEQ ID NO: 826239 - DNA, 15 bp, Homo sapiens
cattaggatgaaatc

SEQ ID NO: 826240 - DNA, 15 bp, Homo sapiens
ccattaggatgaaat

SEQ ID NO: 826241 - DNA, 15 bp, Homo sapiens
gccattaggatgaaa

SEQ ID NO: 826242 - DNA, 15 bp, Homo sapiens
cgccattaggatgaa

SEQ ID NO: 826243 - DNA, 15 bp, Homo sapiens
tcgccattaggatga

SEQ ID NO: 826244 - DNA, 15 bp, Homo sapiens
ttcgccattaggatg

SEQ ID NO: 826245 - DNA, 15 bp, Homo sapiens
attcgccattaggat

SEQ ID NO: 826246 - DNA, 15 bp, Homo sapiens
tattcgccattagga

SEQ ID NO: 826247 - DNA, 15 bp, Homo sapiens
ttattcgccattagg

SEQ ID NO: 826248 - DNA, 15 bp, Homo sapiens
tttattcgccattag

SEQ ID NO: 826249 - DNA, 15 bp, Homo sapiens
ttttattcgccatta

SEQ ID NO: 826250 - DNA, 15 bp, Homo sapiens
attttattcgccatt

SEQ ID NO: 826251 - DNA, 15 bp, Homo sapiens
aattttattcgccat

SEQ ID NO: 826252 - DNA, 15 bp, Homo sapiens
taattttattcgcca

SEQ ID NO: 826253 - DNA, 15 bp, Homo sapiens
ctaattttattcgcc

SEQ ID NO: 826254 - DNA, 15 bp, Homo sapiens
tctaattttattcgc

SEQ ID NO: 826255 - DNA, 15 bp, Homo sapiens
ttctaattttattcg

SEQ ID NO: 826256 - DNA, 15 bp, Homo sapiens
attctaattttattc

SEQ ID NO: 826257 - DNA, 15 bp, Homo sapiens
cattctaattttatt

SEQ ID NO: 826258 - DNA, 15 bp, Homo sapiens
tcattctaattttat

SEQ ID NO: 826259 - DNA, 15 bp, Homo sapiens
atcattctaatttta

SEQ ID NO: 826260 - DNA, 15 bp, Homo sapiens
catcattctaatttt

SEQ ID NO: 826261 - DNA, 15 bp, Homo sapiens
tcatcattctaattt

SEQ ID NO: 826262 - DNA, 15 bp, Homo sapiens
atcatcattctaatt

SEQ ID NO: 826263 - DNA, 15 bp, Homo sapiens
tatcatcattctaat

SEQ ID NO: 826264 - DNA, 15 bp, Homo sapiens
atatcatcattctaa

SEQ ID NO: 826265 - DNA, 15 bp, Homo sapiens
tatatcatcattcta

SEQ ID NO: 826266 - DNA, 15 bp, Homo sapiens
ttatatcatcattct

SEQ ID NO: 826267 - DNA, 15 bp, Homo sapiens
gttatatcatcattc

SEQ ID NO: 826268 - DNA, 15 bp, Homo sapiens
agttatatcatcatt

SEQ ID NO: 826269 - DNA, 15 bp, Homo sapiens
cagttatatcatcat

SEQ ID NO: 826270 - DNA, 15 bp, Homo sapiens
ccagttatatcatca

SEQ ID NO: 826271 - DNA, 15 bp, Homo sapiens
accagttatatcatc

SEQ ID NO: 826272 - DNA, 15 bp, Homo sapiens
taccagttatatcat

SEQ ID NO: 826273 - DNA, 15 bp, Homo sapiens
ctaccagttatatca

SEQ ID NO: 826274 - DNA, 15 bp, Homo sapiens
tctaccagttatatc

SEQ ID NO: 826275 - DNA, 15 bp, Homo sapiens
ttctaccagttatat

SEQ ID NO: 826276 - DNA, 15 bp, Homo sapiens
gttctaccagttata

SEQ ID NO: 826277 - DNA, 15 bp, Homo sapiens
agttctaccagttat

SEQ ID NO: 826278 - DNA, 15 bp, Homo sapiens
cagttctaccagtta

SEQ ID NO: 826279 - DNA, 15 bp, Homo sapiens
ccagttctaccagtt

SEQ ID NO: 826280 - DNA, 15 bp, Homo sapiens
tccagttctaccagt

SEQ ID NO: 826281 - DNA, 15 bp, Homo sapiens
ttccagttctaccag

SEQ ID NO: 826282 - DNA, 15 bp, Homo sapiens
cttccagttctacca

SEQ ID NO: 826283 - DNA, 15 bp, Homo sapiens
ccttccagttctacc

SEQ ID NO: 826284 - DNA, 15 bp, Homo sapiens
tccttccagttctac

SEQ ID NO: 826285 - DNA, 15 bp, Homo sapiens
ctccttccagttcta

SEQ ID NO: 826286 - DNA, 15 bp, Homo sapiens
cctccttccagttct

SEQ ID NO: 826287 - DNA, 15 bp, Homo sapiens
tcctccttccagttc

SEQ ID NO: 826288 - DNA, 15 bp, Homo sapiens
atcctccttccagtt

SEQ ID NO: 826289 - DNA, 15 bp, Homo sapiens
gatcctccttccagt

SEQ ID NO: 826290 - DNA, 15 bp, Homo sapiens
tgatcctccttccag

SEQ ID NO: 826291 - DNA, 15 bp, Homo sapiens
gtgatcctccttcca

SEQ ID NO: 826292 - DNA, 15 bp, Homo sapiens
agtgatcctccttcc

SEQ ID NO: 826293 - DNA, 15 bp, Homo sapiens
gagtgatcctccttc

SEQ ID NO: 826294 - DNA, 15 bp, Homo sapiens
tgagtgatcctcctt

SEQ ID NO: 826295 - DNA, 15 bp, Homo sapiens
gtgagtgatcctcct

SEQ ID NO: 826296 - DNA, 15 bp, Homo sapiens
agtgagtgatcctcc

SEQ ID NO: 826297 - DNA, 15 bp, Homo sapiens
aagtgagtgatcctc

SEQ ID NO: 826298 - DNA, 15 bp, Homo sapiens
taagtgagtgatcct

SEQ ID NO: 826299 - DNA, 15 bp, Homo sapiens
ataagtgagtgatcc

SEQ ID NO: 826300 - DNA, 15 bp, Homo sapiens
aataagtgagtgatc

SEQ ID NO: 826301 - DNA, 15 bp, Homo sapiens
aaataagtgagtgat

SEQ ID NO: 826302 - DNA, 15 bp, Homo sapiens
aaaataagtgagtga

SEQ ID NO: 826303 - DNA, 15 bp, Homo sapiens
gaaaataagtgagtg

SEQ ID NO: 826304 - DNA, 15 bp, Homo sapiens
agaaaataagtgagt

SEQ ID NO: 826305 - DNA, 15 bp, Homo sapiens
tagaaaataagtgag

SEQ ID NO: 826306 - DNA, 15 bp, Homo sapiens
ctagaaaataagtga

SEQ ID NO: 826307 - DNA, 15 bp, Homo sapiens
tctagaaaataagtg

SEQ ID NO: 826308 - DNA, 15 bp, Homo sapiens
atctagaaaataagt

SEQ ID NO: 826309 - DNA, 15 bp, Homo sapiens
aatctagaaaataag

SEQ ID NO: 826310 - DNA, 15 bp, Homo sapiens
taatctagaaaataa

SEQ ID NO: 826311 - DNA, 15 bp, Homo sapiens
ttaatctagaaaata

SEQ ID NO: 826312 - DNA, 15 bp, Homo sapiens
cttaatctagaaaat

SEQ ID NO: 826313 - DNA, 15 bp, Homo sapiens
tcttaatctagaaaa

SEQ ID NO: 826314 - DNA, 15 bp, Homo sapiens
ttcttaatctagaaa

SEQ ID NO: 826315 - DNA, 15 bp, Homo sapiens
cttcttaatctagaa

SEQ ID NO: 826316 - DNA, 15 bp, Homo sapiens
acttcttaatctaga

SEQ ID NO: 826317 - DNA, 15 bp, Homo sapiens
tacttcttaatctag

SEQ ID NO: 826318 - DNA, 15 bp, Homo sapiens
ctacttcttaatcta

SEQ ID NO: 826319 - DNA, 15 bp, Homo sapiens
tctacttcttaatct

SEQ ID NO: 826320 - DNA, 15 bp, Homo sapiens
ctctacttcttaatc

SEQ ID NO: 826321 - DNA, 15 bp, Homo sapiens
cctctacttcttaat

SEQ ID NO: 826322 - DNA, 15 bp, Homo sapiens
tcctctacttcttaa

SEQ ID NO: 826323 - DNA, 15 bp, Homo sapiens
ttcctctacttctta

SEQ ID NO: 826324 - DNA, 15 bp, Homo sapiens
attcctctacttctt

SEQ ID NO: 826325 - DNA, 15 bp, Homo sapiens
cattcctctacttct

SEQ ID NO: 826326 - DNA, 15 bp, Homo sapiens
ccattcctctacttc

SEQ ID NO: 826327 - DNA, 15 bp, Homo sapiens
gccattcctctactt

SEQ ID NO: 826328 - DNA, 15 bp, Homo sapiens
ggccattcctctact

SEQ ID NO: 826329 - DNA, 15 bp, Homo sapiens
tggccattcctctac

SEQ ID NO: 826330 - DNA, 15 bp, Homo sapiens
ctggccattcctcta

SEQ ID NO: 826331 - DNA, 15 bp, Homo sapiens
cctggccattcctct

SEQ ID NO: 826332 - DNA, 15 bp, Homo sapiens
acctggccattcctc

SEQ ID NO: 826333 - DNA, 15 bp, Homo sapiens
cacctggccattcct

SEQ ID NO: 826334 - DNA, 15 bp, Homo sapiens
gcacctggccattcc

SEQ ID NO: 826335 - DNA, 15 bp, Homo sapiens
agcacctggccattc

SEQ ID NO: 826336 - DNA, 15 bp, Homo sapiens
gagcacctggccatt

SEQ ID NO: 826337 - DNA, 15 bp, Homo sapiens
tgagcacctggccat

SEQ ID NO: 826338 - DNA, 15 bp, Homo sapiens
atgagcacctggcca

SEQ ID NO: 826339 - DNA, 15 bp, Homo sapiens
catgagcacctggcc

SEQ ID NO: 826340 - DNA, 15 bp, Homo sapiens
ccatgagcacctggc

SEQ ID NO: 826341 - DNA, 15 bp, Homo sapiens
accatgagcacctgg

SEQ ID NO: 826342 - DNA, 15 bp, Homo sapiens
aaccatgagcacctg

SEQ ID NO: 826343 - DNA, 15 bp, Homo sapiens
caaccatgagcacct

SEQ ID NO: 826344 - DNA, 15 bp, Homo sapiens
acaaccatgagcacc

SEQ ID NO: 826345 - DNA, 15 bp, Homo sapiens
tacaaccatgagcac

SEQ ID NO: 826346 - DNA, 15 bp, Homo sapiens
ttacaaccatgagca

SEQ ID NO: 826347 - DNA, 15 bp, Homo sapiens
attacaaccatgagc

SEQ ID NO: 826348 - DNA, 15 bp, Homo sapiens
gattacaaccatgag

SEQ ID NO: 826349 - DNA, 15 bp, Homo sapiens
ggattacaaccatga

SEQ ID NO: 826350 - DNA, 15 bp, Homo sapiens
gggattacaaccatg

SEQ ID NO: 826351 - DNA, 15 bp, Homo sapiens
tgggattacaaccat

SEQ ID NO: 826352 - DNA, 15 bp, Homo sapiens
ctgggattacaacca

SEQ ID NO: 826353 - DNA, 15 bp, Homo sapiens
gctgggattacaacc

SEQ ID NO: 826354 - DNA, 15 bp, Homo sapiens
tgctgggattacaac

SEQ ID NO: 826355 - DNA, 15 bp, Homo sapiens
gtgctgggattacaa

SEQ ID NO: 826356 - DNA, 15 bp, Homo sapiens
tggtctcccaaagtg

SEQ ID NO: 826357 - DNA, 15 bp, Homo sapiens
ttggtctcccaaagt

SEQ ID NO: 826358 - DNA, 15 bp, Homo sapiens
cttggtctcccaaag

SEQ ID NO: 826359 - DNA, 15 bp, Homo sapiens
ccttggtctcccaaa

SEQ ID NO: 826360 - DNA, 15 bp, Homo sapiens
gccttggtctcccaa

SEQ ID NO: 826361 - DNA, 15 bp, Homo sapiens
cgccttggtctccca

SEQ ID NO: 826362 - DNA, 15 bp, Homo sapiens
ccgccttggtctccc

SEQ ID NO: 826363 - DNA, 15 bp, Homo sapiens
cccgccttggtctcc

SEQ ID NO: 826364 - DNA, 15 bp, Homo sapiens
acccgccttggtctc

SEQ ID NO: 826365 - DNA, 15 bp, Homo sapiens
cacccgccttggtct

SEQ ID NO: 826366 - DNA, 15 bp, Homo sapiens
ccacccgccttggtc

SEQ ID NO: 826367 - DNA, 15 bp, Homo sapiens
tccacccgccttggt

SEQ ID NO: 826368 - DNA, 15 bp, Homo sapiens
atccacccgccttgg

SEQ ID NO: 826369 - DNA, 15 bp, Homo sapiens
gatccacccgccttg

SEQ ID NO: 826370 - DNA, 15 bp, Homo sapiens
tgatccacccgcctt

SEQ ID NO: 826371 - DNA, 15 bp, Homo sapiens
gtgatccacccgcct

SEQ ID NO: 826372 - DNA, 15 bp, Homo sapiens
ggtgatccacccgcc

SEQ ID NO: 826373 - DNA, 15 bp, Homo sapiens
aggtgatccacccgc

SEQ ID NO: 826374 - DNA, 15 bp, Homo sapiens
caggtgatccacccg

SEQ ID NO: 826375 - DNA, 15 bp, Homo sapiens
tcaggtgatccaccc

SEQ ID NO: 826376 - DNA, 15 bp, Homo sapiens
ctcaggtgatccacc

SEQ ID NO: 826377 - DNA, 15 bp, Homo sapiens
cctcaggtgatccac

SEQ ID NO: 826378 - DNA, 15 bp, Homo sapiens
acctcaggtgatcca

SEQ ID NO: 826379 - DNA, 15 bp, Homo sapiens
gacctcaggtgatcc

SEQ ID NO: 826380 - DNA, 15 bp, Homo sapiens
tgacctcaggtgatc

SEQ ID NO: 826381 - DNA, 15 bp, Homo sapiens
ctgacctcaggtgat

SEQ ID NO: 826382 - DNA, 15 bp, Homo sapiens
cctgacctcaggtga

SEQ ID NO: 826383 - DNA, 15 bp, Homo sapiens
tcctgacctcaggtg

SEQ ID NO: 826384 - DNA, 15 bp, Homo sapiens
ctcctgacctcaggt

SEQ ID NO: 826385 - DNA, 15 bp, Homo sapiens
actcctgacctcagg

SEQ ID NO: 826386 - DNA, 15 bp, Homo sapiens
aactcctgacctcag

SEQ ID NO: 826387 - DNA, 15 bp, Homo sapiens
gaactcctgacctca

SEQ ID NO: 826388 - DNA, 15 bp, Homo sapiens
tgaactcctgacctc

SEQ ID NO: 826389 - DNA, 15 bp, Homo sapiens
ttgaactcctgacct

SEQ ID NO: 826390 - DNA, 15 bp, Homo sapiens
cttgaactcctgacc

SEQ ID NO: 826391 - DNA, 15 bp, Homo sapiens
tcttgaactcctgac

SEQ ID NO: 826392 - DNA, 15 bp, Homo sapiens
gtcttgaactcctga

SEQ ID NO: 826393 - DNA, 15 bp, Homo sapiens
ggtcttgaactcctg

SEQ ID NO: 826394 - DNA, 15 bp, Homo sapiens
tggtcttgaactcct

SEQ ID NO: 826395 - DNA, 15 bp, Homo sapiens
ctggtcttgaactcc

SEQ ID NO: 826396 - DNA, 15 bp, Homo sapiens
gctggtcttgaactc

SEQ ID NO: 826397 - DNA, 15 bp, Homo sapiens
ggctggtcttgaact

SEQ ID NO: 826398 - DNA, 15 bp, Homo sapiens
aggctggtcttgaac

SEQ ID NO: 826399 - DNA, 15 bp, Homo sapiens
caggctggtcttgaa

SEQ ID NO: 826400 - DNA, 15 bp, Homo sapiens
ccaggctggtcttga

SEQ ID NO: 826401 - DNA, 15 bp, Homo sapiens
gccaggctggtcttg

SEQ ID NO: 826402 - DNA, 15 bp, Homo sapiens
ggccaggctggtctt

SEQ ID NO: 826403 - DNA, 15 bp, Homo sapiens
gttggccaggctggt

SEQ ID NO: 826404 - DNA, 15 bp, Homo sapiens
tgttggccaggctgg

SEQ ID NO: 826405 - DNA, 15 bp, Homo sapiens
atgttggccaggctg

SEQ ID NO: 826406 - DNA, 15 bp, Homo sapiens
catgttggccaggct

SEQ ID NO: 826407 - DNA, 15 bp, Homo sapiens
ccatgttggccaggc

SEQ ID NO: 826408 - DNA, 15 bp, Homo sapiens
accatgttggccagg

SEQ ID NO: 826409 - DNA, 15 bp, Homo sapiens
taccatgttggccag

SEQ ID NO: 826410 - DNA, 15 bp, Homo sapiens
ttaccatgttggcca

SEQ ID NO: 826411 - DNA, 15 bp, Homo sapiens
tttaccatgttggcc

SEQ ID NO: 826412 - DNA, 15 bp, Homo sapiens
ttttaccatgttggc

SEQ ID NO: 826413 - DNA, 15 bp, Homo sapiens
gttttaccatgttgg

SEQ ID NO: 826414 - DNA, 15 bp, Homo sapiens
ggttttaccatgttg

SEQ ID NO: 826415 - DNA, 15 bp, Homo sapiens
gggttttaccatgtt

SEQ ID NO: 826416 - DNA, 15 bp, Homo sapiens
cgggttttaccatgt

SEQ ID NO: 826417 - DNA, 15 bp, Homo sapiens
ccgggttttaccatg

SEQ ID NO: 826418 - DNA, 15 bp, Homo sapiens
accgggttttaccat

SEQ ID NO: 826419 - DNA, 15 bp, Homo sapiens
gaccgggttttacca

SEQ ID NO: 826420 - DNA, 15 bp, Homo sapiens
agaccgggttttacc

SEQ ID NO: 826421 - DNA, 15 bp, Homo sapiens
gagaccgggttttac

SEQ ID NO: 826422 - DNA, 15 bp, Homo sapiens
agagaccgggtttta

SEQ ID NO: 826423 - DNA, 15 bp, Homo sapiens
tagagaccgggtttt

SEQ ID NO: 826424 - DNA, 15 bp, Homo sapiens
gtagagaccgggttt

SEQ ID NO: 826425 - DNA, 15 bp, Homo sapiens
agtagagaccgggtt

SEQ ID NO: 826426 - DNA, 15 bp, Homo sapiens
tagtagagaccgggt

SEQ ID NO: 826427 - DNA, 15 bp, Homo sapiens
ttagtagagaccggg

SEQ ID NO: 826428 - DNA, 15 bp, Homo sapiens
tttagtagagaccgg

SEQ ID NO: 826429 - DNA, 15 bp, Homo sapiens
ttttagtagagaccg

SEQ ID NO: 826430 - DNA, 15 bp, Homo sapiens
tttttagtagagacc

SEQ ID NO: 826431 - DNA, 15 bp, Homo sapiens
gtatttttagtagag

SEQ ID NO: 826432 - DNA, 15 bp, Homo sapiens
tgtatttttagtaga

SEQ ID NO: 826433 - DNA, 15 bp, Homo sapiens
ttgtatttttagtag

SEQ ID NO: 826434 - DNA, 15 bp, Homo sapiens
tttgtatttttagta

SEQ ID NO: 826435 - DNA, 15 bp, Homo sapiens
ttttgtatttttagt

SEQ ID NO: 826436 - DNA, 15 bp, Homo sapiens
tttttgtatttttag

SEQ ID NO: 826437 - DNA, 15 bp, Homo sapiens
ttttttgtattttta

SEQ ID NO: 826438 - DNA, 15 bp, Homo sapiens
attttttgtattttt

SEQ ID NO: 826439 - DNA, 15 bp, Homo sapiens
aattttttgtatttt

SEQ ID NO: 826440 - DNA, 15 bp, Homo sapiens
taattttttgtattt

SEQ ID NO: 826441 - DNA, 15 bp, Homo sapiens
ttaattttttgtatt

SEQ ID NO: 826442 - DNA, 15 bp, Homo sapiens
gttaattttttgtat

SEQ ID NO: 826443 - DNA, 15 bp, Homo sapiens
agttaattttttgta

SEQ ID NO: 826444 - DNA, 15 bp, Homo sapiens
cagttaattttttgt

SEQ ID NO: 826445 - DNA, 15 bp, Homo sapiens
ccagttaattttttg

SEQ ID NO: 826446 - DNA, 15 bp, Homo sapiens
cccagttaatttttt

SEQ ID NO: 826447 - DNA, 15 bp, Homo sapiens
gcccagttaattttt

SEQ ID NO: 826448 - DNA, 15 bp, Homo sapiens
tgcccagttaatttt

SEQ ID NO: 826449 - DNA, 15 bp, Homo sapiens
atgcccagttaattt

SEQ ID NO: 826450 - DNA, 15 bp, Homo sapiens
catgcccagttaatt

SEQ ID NO: 826451 - DNA, 15 bp, Homo sapiens
ccatgcccagttaat

SEQ ID NO: 826452 - DNA, 15 bp, Homo sapiens
accatgcccagttaa

SEQ ID NO: 826453 - DNA, 15 bp, Homo sapiens
caccatgcccagtta

SEQ ID NO: 826454 - DNA, 15 bp, Homo sapiens
ccaccatgcccagtt

SEQ ID NO: 826455 - DNA, 15 bp, Homo sapiens
gccaccatgcccagt

SEQ ID NO: 826456 - DNA, 15 bp, Homo sapiens
tgccaccatgcccag

SEQ ID NO: 826457 - DNA, 15 bp, Homo sapiens
ctgccaccatgccca

SEQ ID NO: 826458 - DNA, 15 bp, Homo sapiens
tctgccaccatgccc

SEQ ID NO: 826459 - DNA, 15 bp, Homo sapiens
atctgccaccatgcc

SEQ ID NO: 826460 - DNA, 15 bp, Homo sapiens
catctgccaccatgc

SEQ ID NO: 826461 - DNA, 15 bp, Homo sapiens
gcatctgccaccatg

SEQ ID NO: 826462 - DNA, 15 bp, Homo sapiens
agcatctgccaccat

SEQ ID NO: 826463 - DNA, 15 bp, Homo sapiens
cagcatctgccacca

SEQ ID NO: 826464 - DNA, 15 bp, Homo sapiens
acagcatctgccacc

SEQ ID NO: 826465 - DNA, 15 bp, Homo sapiens
tacagcatctgccac

SEQ ID NO: 826466 - DNA, 15 bp, Homo sapiens
ctacagcatctgcca

SEQ ID NO: 826467 - DNA, 15 bp, Homo sapiens
actacagcatctgcc

SEQ ID NO: 826468 - DNA, 15 bp, Homo sapiens
gactacagcatctgc

SEQ ID NO: 826469 - DNA, 15 bp, Homo sapiens
ggactacagcatctg

SEQ ID NO: 826470 - DNA, 15 bp, Homo sapiens
gggactacagcatct

SEQ ID NO: 826471 - DNA, 15 bp, Homo sapiens
tgggactacagcatc

SEQ ID NO: 826472 - DNA, 15 bp, Homo sapiens
ctgggactacagcat

SEQ ID NO: 826473 - DNA, 15 bp, Homo sapiens
gctgggactacagca

SEQ ID NO: 826474 - DNA, 15 bp, Homo sapiens
agctgggactacagc

SEQ ID NO: 826475 - DNA, 15 bp, Homo sapiens
cagctgggactacag

SEQ ID NO: 826476 - DNA, 15 bp, Homo sapiens
gcagctgggactaca

SEQ ID NO: 826477 - DNA, 15 bp, Homo sapiens
agcagctgggactac

SEQ ID NO: 826478 - DNA, 15 bp, Homo sapiens
gagcagctgggacta

SEQ ID NO: 826479 - DNA, 15 bp, Homo sapiens
cgagcagctgggact

SEQ ID NO: 826480 - DNA, 15 bp, Homo sapiens
ccgagcagctgggac

SEQ ID NO: 826481 - DNA, 15 bp, Homo sapiens
cccgagcagctggga

SEQ ID NO: 826482 - DNA, 15 bp, Homo sapiens
tcccgagcagctggg

SEQ ID NO: 826483 - DNA, 15 bp, Homo sapiens
ctcccgagcagctgg

SEQ ID NO: 826484 - DNA, 15 bp, Homo sapiens
cctcccgagcagctg

SEQ ID NO: 826485 - DNA, 15 bp, Homo sapiens
gcctcccgagcagct

SEQ ID NO: 826486 - DNA, 15 bp, Homo sapiens
agcctcccgagcagc

SEQ ID NO: 826487 - DNA, 15 bp, Homo sapiens
cagcctcccgagcag

SEQ ID NO: 826488 - DNA, 15 bp, Homo sapiens
tcagcctcccgagca

SEQ ID NO: 826489 - DNA, 15 bp, Homo sapiens
ctcagcctcccgagc

SEQ ID NO: 826490 - DNA, 15 bp, Homo sapiens
cctcagcctcccgag

SEQ ID NO: 826491 - DNA, 15 bp, Homo sapiens
gcctcagcctcccga

SEQ ID NO: 826492 - DNA, 15 bp, Homo sapiens
tgcctcagcctcccg

SEQ ID NO: 826493 - DNA, 15 bp, Homo sapiens
gattctcctgcctca

SEQ ID NO: 826494 - DNA, 15 bp, Homo sapiens
tgattctcctgcctc

SEQ ID NO: 826495 - DNA, 15 bp, Homo sapiens
gtgattctcctgcct

SEQ ID NO: 826496 - DNA, 15 bp, Homo sapiens
agtgattctcctgcc

SEQ ID NO: 826497 - DNA, 15 bp, Homo sapiens
aagtgattctcctgc

SEQ ID NO: 826498 - DNA, 15 bp, Homo sapiens
caagtgattctcctg

SEQ ID NO: 826499 - DNA, 15 bp, Homo sapiens
tcaagtgattctcct

SEQ ID NO: 826500 - DNA, 15 bp, Homo sapiens
ttcaagtgattctcc

SEQ ID NO: 826501 - DNA, 15 bp, Homo sapiens
gttcaagtgattctc

SEQ ID NO: 826502 - DNA, 15 bp, Homo sapiens
ggttcaagtgattct

SEQ ID NO: 826503 - DNA, 15 bp, Homo sapiens
aggttcaagtgattc

SEQ ID NO: 826504 - DNA, 15 bp, Homo sapiens
caggttcaagtgatt

SEQ ID NO: 826505 - DNA, 15 bp, Homo sapiens
ccaggttcaagtgat

SEQ ID NO: 826506 - DNA, 15 bp, Homo sapiens
cccaggttcaagtga

SEQ ID NO: 826507 - DNA, 15 bp, Homo sapiens
tcccaggttcaagtg

SEQ ID NO: 826508 - DNA, 15 bp, Homo sapiens
ctcccaggttcaagt

SEQ ID NO: 826509 - DNA, 15 bp, Homo sapiens
cgcctcccaggttca

SEQ ID NO: 826510 - DNA, 15 bp, Homo sapiens
ccgcctcccaggttc

SEQ ID NO: 826511 - DNA, 15 bp, Homo sapiens
tccgcctcccaggtt

SEQ ID NO: 826512 - DNA, 15 bp, Homo sapiens
ctccgcctcccaggt

SEQ ID NO: 826513 - DNA, 15 bp, Homo sapiens
cctccgcctcccagg

SEQ ID NO: 826514 - DNA, 15 bp, Homo sapiens
acctccgcctcccag

SEQ ID NO: 826515 - DNA, 15 bp, Homo sapiens
aacctccgcctccca

SEQ ID NO: 826516 - DNA, 15 bp, Homo sapiens
caacctccgcctccc

SEQ ID NO: 826517 - DNA, 15 bp, Homo sapiens
gcaacctccgcctcc

SEQ ID NO: 826518 - DNA, 15 bp, Homo sapiens
tgcaacctccgcctc

SEQ ID NO: 826519 - DNA, 15 bp, Homo sapiens
ctgcaacctccgcct

SEQ ID NO: 826520 - DNA, 15 bp, Homo sapiens
actgcaacctccgcc

SEQ ID NO: 826521 - DNA, 15 bp, Homo sapiens
cactgcaacctccgc

SEQ ID NO: 826522 - DNA, 15 bp, Homo sapiens
tcactgcaacctccg

SEQ ID NO: 826523 - DNA, 15 bp, Homo sapiens
ctcactgcaacctcc

SEQ ID NO: 826524 - DNA, 15 bp, Homo sapiens
ttagctcactgcaac

SEQ ID NO: 826525 - DNA, 15 bp, Homo sapiens
cttagctcactgcaa

SEQ ID NO: 826526 - DNA, 15 bp, Homo sapiens
tcttagctcactgca

SEQ ID NO: 826527 - DNA, 15 bp, Homo sapiens
atcttagctcactgc

SEQ ID NO: 826528 - DNA, 15 bp, Homo sapiens
gatcttagctcactg

SEQ ID NO: 826529 - DNA, 15 bp, Homo sapiens
tgatcttagctcact

SEQ ID NO: 826530 - DNA, 15 bp, Homo sapiens
gtgatcttagctcac

SEQ ID NO: 826531 - DNA, 15 bp, Homo sapiens
cgtgatcttagctca

SEQ ID NO: 826532 - DNA, 15 bp, Homo sapiens
gcgtgatcttagctc

SEQ ID NO: 826533 - DNA, 15 bp, Homo sapiens
ggcgtgatcttagct

SEQ ID NO: 826534 - DNA, 15 bp, Homo sapiens
tggcgtgatcttagc

SEQ ID NO: 826535 - DNA, 15 bp, Homo sapiens
gtggcgtgatcttag

SEQ ID NO: 826536 - DNA, 15 bp, Homo sapiens
agtggcgtgatctta

SEQ ID NO: 826537 - DNA, 15 bp, Homo sapiens
cagtggcgtgatctt

SEQ ID NO: 826538 - DNA, 15 bp, Homo sapiens
gcagtggcgtgatct

SEQ ID NO: 826539 - DNA, 15 bp, Homo sapiens
tgcagtggcgtgatc

SEQ ID NO: 826540 - DNA, 15 bp, Homo sapiens
gtgcagtggcgtgat

SEQ ID NO: 826541 - DNA, 15 bp, Homo sapiens
agtgcagtggcgtga

SEQ ID NO: 826542 - DNA, 15 bp, Homo sapiens
gagtgcagtggcgtg

SEQ ID NO: 826543 - DNA, 15 bp, Homo sapiens
ggagtgcagtggcgt

SEQ ID NO: 826544 - DNA, 15 bp, Homo sapiens
tggagtgcagtggcg

SEQ ID NO: 826545 - DNA, 15 bp, Homo sapiens
gcccaggctggagtg

SEQ ID NO: 826546 - DNA, 15 bp, Homo sapiens
tgcccaggctggagt

SEQ ID NO: 826547 - DNA, 15 bp, Homo sapiens
ccttgttgcccaggc

SEQ ID NO: 826548 - DNA, 15 bp, Homo sapiens
gccttgttgcccagg

SEQ ID NO: 826549 - DNA, 15 bp, Homo sapiens
cgccttgttgcccag

SEQ ID NO: 826550 - DNA, 15 bp, Homo sapiens
tcgccttgttgccca

SEQ ID NO: 826551 - DNA, 15 bp, Homo sapiens
ctcgccttgttgccc

SEQ ID NO: 826552 - DNA, 15 bp, Homo sapiens
tctcgccttgttgcc

SEQ ID NO: 826553 - DNA, 15 bp, Homo sapiens
gtctcgccttgttgc

SEQ ID NO: 826554 - DNA, 15 bp, Homo sapiens
agtctcgccttgttg

SEQ ID NO: 826555 - DNA, 15 bp, Homo sapiens
gagtctcgccttgtt

SEQ ID NO: 826556 - DNA, 15 bp, Homo sapiens
agagtctcgccttgt

SEQ ID NO: 826557 - DNA, 15 bp, Homo sapiens
cagagtctcgccttg

SEQ ID NO: 826558 - DNA, 15 bp, Homo sapiens
acagagtctcgcctt

SEQ ID NO: 826559 - DNA, 15 bp, Homo sapiens
gacagagtctcgcct

SEQ ID NO: 826560 - DNA, 15 bp, Homo sapiens
agacagagtctcgcc

SEQ ID NO: 826561 - DNA, 15 bp, Homo sapiens
cagacagagtctcgc

SEQ ID NO: 826562 - DNA, 15 bp, Homo sapiens
tcagacagagtctcg

SEQ ID NO: 826563 - DNA, 15 bp, Homo sapiens
ttcagacagagtctc

SEQ ID NO: 826564 - DNA, 15 bp, Homo sapiens
tttcagacagagtct

SEQ ID NO: 826565 - DNA, 15 bp, Homo sapiens
ttttcagacagagtc

SEQ ID NO: 826566 - DNA, 15 bp, Homo sapiens
tttttcagacagagt

SEQ ID NO: 826567 - DNA, 15 bp, Homo sapiens
ctttttcagacagag

SEQ ID NO: 826568 - DNA, 15 bp, Homo sapiens
tctttttcagacaga

SEQ ID NO: 826569 - DNA, 15 bp, Homo sapiens
ttctttttcagacag

SEQ ID NO: 826570 - DNA, 15 bp, Homo sapiens
tttctttttcagaca

SEQ ID NO: 826571 - DNA, 15 bp, Homo sapiens
ttttctttttcagac

SEQ ID NO: 826572 - DNA, 15 bp, Homo sapiens
tttttctttttcaga

SEQ ID NO: 826573 - DNA, 15 bp, Homo sapiens
ttttttctttttcag

SEQ ID NO: 826574 - DNA, 15 bp, Homo sapiens
tttttttctttttca

SEQ ID NO: 826575 - DNA, 15 bp, Homo sapiens
ttttttttctttttc

SEQ ID NO: 826576 - DNA, 15 bp, Homo sapiens
tttttttttcttttt

SEQ ID NO: 826577 - DNA, 15 bp, Homo sapiens
atttttttttctttt

SEQ ID NO: 826578 - DNA, 15 bp, Homo sapiens
tatttttttttcttt

SEQ ID NO: 826579 - DNA, 15 bp, Homo sapiens
ttatttttttttctt

SEQ ID NO: 826580 - DNA, 15 bp, Homo sapiens
tttatttttttttct

SEQ ID NO: 826581 - DNA, 15 bp, Homo sapiens
ttttatttttttttc

SEQ ID NO: 826582 - DNA, 15 bp, Homo sapiens
tttttattttttttt

SEQ ID NO: 826583 - DNA, 15 bp, Homo sapiens
atttttatttttttt

SEQ ID NO: 826584 - DNA, 15 bp, Homo sapiens
tatttttattttttt

SEQ ID NO: 826585 - DNA, 15 bp, Homo sapiens
ttatttttatttttt

SEQ ID NO: 826586 - DNA, 15 bp, Homo sapiens
tttatttttattttt

SEQ ID NO: 826587 - DNA, 15 bp, Homo sapiens
ttttatttttatttt

SEQ ID NO: 826588 - DNA, 15 bp, Homo sapiens
tttttatttttattt

SEQ ID NO: 826589 - DNA, 15 bp, Homo sapiens
atttttatttttatt

SEQ ID NO: 826590 - DNA, 15 bp, Homo sapiens
tatttttatttttat

SEQ ID NO: 826591 - DNA, 15 bp, Homo sapiens
ttatttttattttta

SEQ ID NO: 826592 - DNA, 15 bp, Homo sapiens
ctttttatttttatt

SEQ ID NO: 826593 - DNA, 15 bp, Homo sapiens
tctttttatttttat

SEQ ID NO: 826594 - DNA, 15 bp, Homo sapiens
ttctttttattttta

SEQ ID NO: 826595 - DNA, 15 bp, Homo sapiens
cttctttttattttt

SEQ ID NO: 826596 - DNA, 15 bp, Homo sapiens
acttctttttatttt

SEQ ID NO: 826597 - DNA, 15 bp, Homo sapiens
cacttctttttattt

SEQ ID NO: 826598 - DNA, 15 bp, Homo sapiens
ccacttctttttatt

SEQ ID NO: 826599 - DNA, 15 bp, Homo sapiens
tccacttctttttat

SEQ ID NO: 826600 - DNA, 15 bp, Homo sapiens
ctccacttcttttta

SEQ ID NO: 826601 - DNA, 15 bp, Homo sapiens
cctccacttcttttt

SEQ ID NO: 826602 - DNA, 15 bp, Homo sapiens
tcctccacttctttt

SEQ ID NO: 826603 - DNA, 15 bp, Homo sapiens
ttcctccacttcttt

SEQ ID NO: 826604 - DNA, 15 bp, Homo sapiens
attcctccacttctt

SEQ ID NO: 826605 - DNA, 15 bp, Homo sapiens
tattcctccacttct

SEQ ID NO: 826606 - DNA, 15 bp, Homo sapiens
atattcctccacttc

SEQ ID NO: 826607 - DNA, 15 bp, Homo sapiens
aatattcctccactt

SEQ ID NO: 826608 - DNA, 15 bp, Homo sapiens
taatattcctccact

SEQ ID NO: 826609 - DNA, 15 bp, Homo sapiens
ttaatattcctccac

SEQ ID NO: 826610 - DNA, 15 bp, Homo sapiens
tttaatattcctcca

SEQ ID NO: 826611 - DNA, 15 bp, Homo sapiens
atttaatattcctcc

SEQ ID NO: 826612 - DNA, 15 bp, Homo sapiens
catttaatattcctc

SEQ ID NO: 826613 - DNA, 15 bp, Homo sapiens
gcatttaatattcct

SEQ ID NO: 826614 - DNA, 15 bp, Homo sapiens
tgcatttaatattcc

SEQ ID NO: 826615 - DNA, 15 bp, Homo sapiens
ttgcatttaatattc

SEQ ID NO: 826616 - DNA, 15 bp, Homo sapiens
attgcatttaatatt

SEQ ID NO: 826617 - DNA, 15 bp, Homo sapiens
tattgcatttaatat

SEQ ID NO: 826618 - DNA, 15 bp, Homo sapiens
atattgcatttaata

SEQ ID NO: 826619 - DNA, 15 bp, Homo sapiens
tatattgcatttaat

SEQ ID NO: 826620 - DNA, 15 bp, Homo sapiens
ttatattgcatttaa

SEQ ID NO: 826621 - DNA, 15 bp, Homo sapiens
tttatattgcattta

SEQ ID NO: 826622 - DNA, 15 bp, Homo sapiens
ttttatattgcattt

SEQ ID NO: 826623 - DNA, 15 bp, Homo sapiens
cttttatattgcatt

SEQ ID NO: 826624 - DNA, 15 bp, Homo sapiens
gcttttatattgcat

SEQ ID NO: 826625 - DNA, 15 bp, Homo sapiens
agcttttatattgca

SEQ ID NO: 826626 - DNA, 15 bp, Homo sapiens
aagcttttatattgc

SEQ ID NO: 826627 - DNA, 15 bp, Homo sapiens
aaagcttttatattg

SEQ ID NO: 826628 - DNA, 15 bp, Homo sapiens
aaaagcttttatatt

SEQ ID NO: 826629 - DNA, 15 bp, Homo sapiens
aaaaagcttttatat

SEQ ID NO: 826630 - DNA, 15 bp, Homo sapiens
aaaaaagcttttata

SEQ ID NO: 826631 - DNA, 15 bp, Homo sapiens
aaaaaaagcttttat

SEQ ID NO: 826632 - DNA, 15 bp, Homo sapiens
taaaaaaagctttta

SEQ ID NO: 826633 - DNA, 15 bp, Homo sapiens
ataaaaaaagctttt

SEQ ID NO: 826634 - DNA, 15 bp, Homo sapiens
aataaaaaaagcttt

SEQ ID NO: 826635 - DNA, 15 bp, Homo sapiens
aaataaaaaaagctt

SEQ ID NO: 826636 - DNA, 15 bp, Homo sapiens
aaaataaaaaaagct

SEQ ID NO: 826637 - DNA, 15 bp, Homo sapiens
aaaaataaaaaaagc

SEQ ID NO: 826638 - DNA, 15 bp, Homo sapiens
taaaaataaaaaaag

SEQ ID NO: 826639 - DNA, 15 bp, Homo sapiens
ttaaaaataaaaaaa

SEQ ID NO: 826640 - DNA, 15 bp, Homo sapiens
cttaaaaataaaaaa

SEQ ID NO: 826641 - DNA, 15 bp, Homo sapiens
acttaaaaataaaaa

SEQ ID NO: 826642 - DNA, 15 bp, Homo sapiens
gacttaaaaataaaa

SEQ ID NO: 826643 - DNA, 15 bp, Homo sapiens
tgacttaaaaataaa

SEQ ID NO: 826644 - DNA, 15 bp, Homo sapiens
atgacttaaaaataa

SEQ ID NO: 826645 - DNA, 15 bp, Homo sapiens
tatgacttaaaaata

SEQ ID NO: 826646 - DNA, 15 bp, Homo sapiens
gtatgacttaaaaat

SEQ ID NO: 826647 - DNA, 15 bp, Homo sapiens
tgtatgacttaaaaa

SEQ ID NO: 826648 - DNA, 15 bp, Homo sapiens
ttgtatgacttaaaa

SEQ ID NO: 826649 - DNA, 15 bp, Homo sapiens
attgtatgacttaaa

SEQ ID NO: 826650 - DNA, 15 bp, Homo sapiens
aattgtatgacttaa

SEQ ID NO: 826651 - DNA, 15 bp, Homo sapiens
aaattgtatgactta

SEQ ID NO: 826652 - DNA, 15 bp, Homo sapiens
caaattgtatgactt

SEQ ID NO: 826653 - DNA, 15 bp, Homo sapiens
acaaattgtatgact

SEQ ID NO: 826654 - DNA, 15 bp, Homo sapiens
aacaaattgtatgac

SEQ ID NO: 826655 - DNA, 15 bp, Homo sapiens
aaacaaattgtatga

SEQ ID NO: 826656 - DNA, 15 bp, Homo sapiens
gaaacaaattgtatg

SEQ ID NO: 826657 - DNA, 15 bp, Homo sapiens
tgaaacaaattgtat

SEQ ID NO: 826658 - DNA, 15 bp, Homo sapiens
gtgaaacaaattgta

SEQ ID NO: 826659 - DNA, 15 bp, Homo sapiens
tgtgaaacaaattgt

SEQ ID NO: 826660 - DNA, 15 bp, Homo sapiens
atgtgaaacaaattg

SEQ ID NO: 826661 - DNA, 15 bp, Homo sapiens
tatgtgaaacaaatt

SEQ ID NO: 826662 - DNA, 15 bp, Homo sapiens
ttatgtgaaacaaat

SEQ ID NO: 826663 - DNA, 15 bp, Homo sapiens
gttatgtgaaacaaa

SEQ ID NO: 826664 - DNA, 15 bp, Homo sapiens
tgttatgtgaaacaa

SEQ ID NO: 826665 - DNA, 15 bp, Homo sapiens
ctgttatgtgaaaca

SEQ ID NO: 826666 - DNA, 15 bp, Homo sapiens
tctgttatgtgaaac

SEQ ID NO: 826667 - DNA, 15 bp, Homo sapiens
atctgttatgtgaaa

SEQ ID NO: 826668 - DNA, 15 bp, Homo sapiens
gatctgttatgtgaa

SEQ ID NO: 826669 - DNA, 15 bp, Homo sapiens
tgatctgttatgtga

SEQ ID NO: 826670 - DNA, 15 bp, Homo sapiens
ctgatctgttatgtg

SEQ ID NO: 826671 - DNA, 15 bp, Homo sapiens
cctgatctgttatgt

SEQ ID NO: 826672 - DNA, 15 bp, Homo sapiens
tcctgatctgttatg

SEQ ID NO: 826673 - DNA, 15 bp, Homo sapiens
ttcctgatctgttat

SEQ ID NO: 826674 - DNA, 15 bp, Homo sapiens
tttcctgatctgtta

SEQ ID NO: 826675 - DNA, 15 bp, Homo sapiens
atttcctgatctgtt

SEQ ID NO: 826676 - DNA, 15 bp, Homo sapiens
tatttcctgatctgt

SEQ ID NO: 826677 - DNA, 15 bp, Homo sapiens
ttatttcctgatctg

SEQ ID NO: 826678 - DNA, 15 bp, Homo sapiens
attatttcctgatct

SEQ ID NO: 826679 - DNA, 15 bp, Homo sapiens
tattatttcctgatc

SEQ ID NO: 826680 - DNA, 15 bp, Homo sapiens
gtattatttcctgat

SEQ ID NO: 826681 - DNA, 15 bp, Homo sapiens
tgtattatttcctga

SEQ ID NO: 826682 - DNA, 15 bp, Homo sapiens
ctgtattatttcctg

SEQ ID NO: 826683 - DNA, 15 bp, Homo sapiens
tctgtattatttcct

SEQ ID NO: 826684 - DNA, 15 bp, Homo sapiens
ctctgtattatttcc

SEQ ID NO: 826685 - DNA, 15 bp, Homo sapiens
tctctgtattatttc

SEQ ID NO: 826686 - DNA, 15 bp, Homo sapiens
atctctgtattattt

SEQ ID NO: 826687 - DNA, 15 bp, Homo sapiens
gatctctgtattatt

SEQ ID NO: 826688 - DNA, 15 bp, Homo sapiens
tgatctctgtattat

SEQ ID NO: 826689 - DNA, 15 bp, Homo sapiens
atgatctctgtatta

SEQ ID NO: 826690 - DNA, 15 bp, Homo sapiens
tatgatctctgtatt

SEQ ID NO: 826691 - DNA, 15 bp, Homo sapiens
ttatgatctctgtat

SEQ ID NO: 826692 - DNA, 15 bp, Homo sapiens
cttatgatctctgta

SEQ ID NO: 826693 - DNA, 15 bp, Homo sapiens
acttatgatctctgt

SEQ ID NO: 826694 - DNA, 15 bp, Homo sapiens
aacttatgatctctg

SEQ ID NO: 826695 - DNA, 15 bp, Homo sapiens
aaacttatgatctct

SEQ ID NO: 826696 - DNA, 15 bp, Homo sapiens
aaaacttatgatctc

SEQ ID NO: 826697 - DNA, 15 bp, Homo sapiens
caaaacttatgatct

SEQ ID NO: 826698 - DNA, 15 bp, Homo sapiens
ccaaaacttatgatc

SEQ ID NO: 826699 - DNA, 15 bp, Homo sapiens
tccaaaacttatgat

SEQ ID NO: 826700 - DNA, 15 bp, Homo sapiens
ctccaaaacttatga

SEQ ID NO: 826701 - DNA, 15 bp, Homo sapiens
gctccaaaacttatg

SEQ ID NO: 826702 - DNA, 15 bp, Homo sapiens
agctccaaaacttat

SEQ ID NO: 826703 - DNA, 15 bp, Homo sapiens
cagctccaaaactta

SEQ ID NO: 826704 - DNA, 15 bp, Homo sapiens
ccagctccaaaactt

SEQ ID NO: 826705 - DNA, 15 bp, Homo sapiens
cccagctccaaaact

SEQ ID NO: 826706 - DNA, 15 bp, Homo sapiens
acccagctccaaaac

SEQ ID NO: 826707 - DNA, 15 bp, Homo sapiens
aacccagctccaaaa

SEQ ID NO: 826708 - DNA, 15 bp, Homo sapiens
aaacccagctccaaa

SEQ ID NO: 826709 - DNA, 15 bp, Homo sapiens
caaacccagctccaa

SEQ ID NO: 826710 - DNA, 15 bp, Homo sapiens
tcaaacccagctcca

SEQ ID NO: 826711 - DNA, 15 bp, Homo sapiens
ttcaaacccagctcc

SEQ ID NO: 826712 - DNA, 15 bp, Homo sapiens
attcaaacccagctc

SEQ ID NO: 826713 - DNA, 15 bp, Homo sapiens
gattcaaacccagct

SEQ ID NO: 826714 - DNA, 15 bp, Homo sapiens
ggattcaaacccagc

SEQ ID NO: 826715 - DNA, 15 bp, Homo sapiens
aggattcaaacccag

SEQ ID NO: 826716 - DNA, 15 bp, Homo sapiens
caggattcaaaccca

SEQ ID NO: 826717 - DNA, 15 bp, Homo sapiens
ccaggattcaaaccc

SEQ ID NO: 826718 - DNA, 15 bp, Homo sapiens
gccaggattcaaacc

SEQ ID NO: 826719 - DNA, 15 bp, Homo sapiens
agccaggattcaaac

SEQ ID NO: 826720 - DNA, 15 bp, Homo sapiens
gagccaggattcaaa

SEQ ID NO: 826721 - DNA, 15 bp, Homo sapiens
agagccaggattcaa

SEQ ID NO: 826722 - DNA, 15 bp, Homo sapiens
cagagccaggattca

SEQ ID NO: 826723 - DNA, 15 bp, Homo sapiens
gcagagccaggattc

SEQ ID NO: 826724 - DNA, 15 bp, Homo sapiens
ggcagagccaggatt

SEQ ID NO: 826725 - DNA, 15 bp, Homo sapiens
tggcagagccaggat

SEQ ID NO: 826726 - DNA, 15 bp, Homo sapiens
atggcagagccagga

SEQ ID NO: 826727 - DNA, 15 bp, Homo sapiens
aatggcagagccagg

SEQ ID NO: 826728 - DNA, 15 bp, Homo sapiens
aaatggcagagccag

SEQ ID NO: 826729 - DNA, 15 bp, Homo sapiens
taaatggcagagcca

SEQ ID NO: 826730 - DNA, 15 bp, Homo sapiens
gtaaatggcagagcc

SEQ ID NO: 826731 - DNA, 15 bp, Homo sapiens
agtaaatggcagagc

SEQ ID NO: 826732 - DNA, 15 bp, Homo sapiens
aagtaaatggcagag

SEQ ID NO: 826733 - DNA, 15 bp, Homo sapiens
aaagtaaatggcaga

SEQ ID NO: 826734 - DNA, 15 bp, Homo sapiens
gaaagtaaatggcag

SEQ ID NO: 826735 - DNA, 15 bp, Homo sapiens
agaaagtaaatggca

SEQ ID NO: 826736 - DNA, 15 bp, Homo sapiens
cagaaagtaaatggc

SEQ ID NO: 826737 - DNA, 15 bp, Homo sapiens
acagaaagtaaatgg

SEQ ID NO: 826738 - DNA, 15 bp, Homo sapiens
cacagaaagtaaatg

SEQ ID NO: 826739 - DNA, 15 bp, Homo sapiens
acacagaaagtaaat

SEQ ID NO: 826740 - DNA, 15 bp, Homo sapiens
tacacagaaagtaaa

SEQ ID NO: 826741 - DNA, 15 bp, Homo sapiens
ttacacagaaagtaa

SEQ ID NO: 826742 - DNA, 15 bp, Homo sapiens
attacacagaaagta

SEQ ID NO: 826743 - DNA, 15 bp, Homo sapiens
gattacacagaaagt

SEQ ID NO: 826744 - DNA, 15 bp, Homo sapiens
agattacacagaaag

SEQ ID NO: 826745 - DNA, 15 bp, Homo sapiens
tagattacacagaaa

SEQ ID NO: 826746 - DNA, 15 bp, Homo sapiens
ttagattacacagaa

SEQ ID NO: 826747 - DNA, 15 bp, Homo sapiens
cttagattacacaga

SEQ ID NO: 826748 - DNA, 15 bp, Homo sapiens
acttagattacacag

SEQ ID NO: 826749 - DNA, 15 bp, Homo sapiens
gacttagattacaca

SEQ ID NO: 826750 - DNA, 15 bp, Homo sapiens
tgacttagattacac

SEQ ID NO: 826751 - DNA, 15 bp, Homo sapiens
ttgacttagattaca

SEQ ID NO: 826752 - DNA, 15 bp, Homo sapiens
cttgacttagattac

SEQ ID NO: 826753 - DNA, 15 bp, Homo sapiens
acttgacttagatta

SEQ ID NO: 826754 - DNA, 15 bp, Homo sapiens
aacttgacttagatt

SEQ ID NO: 826755 - DNA, 15 bp, Homo sapiens
taacttgacttagat

SEQ ID NO: 826756 - DNA, 15 bp, Homo sapiens
gtaacttgacttaga

SEQ ID NO: 826757 - DNA, 15 bp, Homo sapiens
agtaacttgacttag

SEQ ID NO: 826758 - DNA, 15 bp, Homo sapiens
cagtaacttgactta

SEQ ID NO: 826759 - DNA, 15 bp, Homo sapiens
tcagtaacttgactt

SEQ ID NO: 826760 - DNA, 15 bp, Homo sapiens
ttcagtaacttgact

SEQ ID NO: 826761 - DNA, 15 bp, Homo sapiens
gttcagtaacttgac

SEQ ID NO: 826762 - DNA, 15 bp, Homo sapiens
agttcagtaacttga

SEQ ID NO: 826763 - DNA, 15 bp, Homo sapiens
aagttcagtaacttg

SEQ ID NO: 826764 - DNA, 15 bp, Homo sapiens
aaagttcagtaactt

SEQ ID NO: 826765 - DNA, 15 bp, Homo sapiens
caaagttcagtaact

SEQ ID NO: 826766 - DNA, 15 bp, Homo sapiens
acaaagttcagtaac

SEQ ID NO: 826767 - DNA, 15 bp, Homo sapiens
cacaaagttcagtaa

SEQ ID NO: 826768 - DNA, 15 bp, Homo sapiens
ccacaaagttcagta

SEQ ID NO: 826769 - DNA, 15 bp, Homo sapiens
cccacaaagttcagt

SEQ ID NO: 826770 - DNA, 15 bp, Homo sapiens
gcccacaaagttcag

SEQ ID NO: 826771 - DNA, 15 bp, Homo sapiens
ggcccacaaagttca

SEQ ID NO: 826772 - DNA, 15 bp, Homo sapiens
gggcccacaaagttc

SEQ ID NO: 826773 - DNA, 15 bp, Homo sapiens
agggcccacaaagtt

SEQ ID NO: 826774 - DNA, 15 bp, Homo sapiens
gagggcccacaaagt

SEQ ID NO: 826775 - DNA, 15 bp, Homo sapiens
agagggcccacaaag

SEQ ID NO: 826776 - DNA, 15 bp, Homo sapiens
cagagggcccacaaa

SEQ ID NO: 826777 - DNA, 15 bp, Homo sapiens
ccagagggcccacaa

SEQ ID NO: 826778 - DNA, 15 bp, Homo sapiens
gccagagggcccaca

SEQ ID NO: 826779 - DNA, 15 bp, Homo sapiens
agccagagggcccac

SEQ ID NO: 826780 - DNA, 15 bp, Homo sapiens
gagccagagggccca

SEQ ID NO: 826781 - DNA, 15 bp, Homo sapiens
agagccagagggccc

SEQ ID NO: 826782 - DNA, 15 bp, Homo sapiens
gagagccagagggcc

SEQ ID NO: 826783 - DNA, 15 bp, Homo sapiens
ggagagccagagggc

SEQ ID NO: 826784 - DNA, 15 bp, Homo sapiens
tggagagccagaggg

SEQ ID NO: 826785 - DNA, 15 bp, Homo sapiens
atggagagccagagg

SEQ ID NO: 826786 - DNA, 15 bp, Homo sapiens
catggagagccagag

SEQ ID NO: 826787 - DNA, 15 bp, Homo sapiens
acatggagagccaga

SEQ ID NO: 826788 - DNA, 15 bp, Homo sapiens
cacatggagagccag

SEQ ID NO: 826789 - DNA, 15 bp, Homo sapiens
acacatggagagcca

SEQ ID NO: 826790 - DNA, 15 bp, Homo sapiens
tacacatggagagcc

SEQ ID NO: 826791 - DNA, 15 bp, Homo sapiens
ttacacatggagagc

SEQ ID NO: 826792 - DNA, 15 bp, Homo sapiens
tttacacatggagag

SEQ ID NO: 826793 - DNA, 15 bp, Homo sapiens
ttttacacatggaga

SEQ ID NO: 826794 - DNA, 15 bp, Homo sapiens
attttacacatggag

SEQ ID NO: 826795 - DNA, 15 bp, Homo sapiens
cattttacacatgga

SEQ ID NO: 826796 - DNA, 15 bp, Homo sapiens
ccattttacacatgg

SEQ ID NO: 826797 - DNA, 15 bp, Homo sapiens
tccattttacacatg

SEQ ID NO: 826798 - DNA, 15 bp, Homo sapiens
ctccattttacacat

SEQ ID NO: 826799 - DNA, 15 bp, Homo sapiens
tctccattttacaca

SEQ ID NO: 826800 - DNA, 15 bp, Homo sapiens
ttctccattttacac

SEQ ID NO: 826801 - DNA, 15 bp, Homo sapiens
attctccattttaca

SEQ ID NO: 826802 - DNA, 15 bp, Homo sapiens
tattctccattttac

SEQ ID NO: 826803 - DNA, 15 bp, Homo sapiens
atattctccatttta

SEQ ID NO: 826804 - DNA, 15 bp, Homo sapiens
aatattctccatttt

SEQ ID NO: 826805 - DNA, 15 bp, Homo sapiens
taatattctccattt

SEQ ID NO: 826806 - DNA, 15 bp, Homo sapiens
ttaatattctccatt

SEQ ID NO: 826807 - DNA, 15 bp, Homo sapiens
attaatattctccat

SEQ ID NO: 826808 - DNA, 15 bp, Homo sapiens
tattaatattctcca

SEQ ID NO: 826809 - DNA, 15 bp, Homo sapiens
atattaatattctcc

SEQ ID NO: 826810 - DNA, 15 bp, Homo sapiens
aatattaatattctc

SEQ ID NO: 826811 - DNA, 15 bp, Homo sapiens
aaatattaatattct

SEQ ID NO: 826812 - DNA, 15 bp, Homo sapiens
taaatattaatattc

SEQ ID NO: 826813 - DNA, 15 bp, Homo sapiens
gtaaatattaatatt

SEQ ID NO: 826814 - DNA, 15 bp, Homo sapiens
ggtaaatattaatat

SEQ ID NO: 826815 - DNA, 15 bp, Homo sapiens
aggtaaatattaata

SEQ ID NO: 826816 - DNA, 15 bp, Homo sapiens
aaggtaaatattaat

SEQ ID NO: 826817 - DNA, 15 bp, Homo sapiens
caaggtaaatattaa

SEQ ID NO: 826818 - DNA, 15 bp, Homo sapiens
gcaaggtaaatatta

SEQ ID NO: 826819 - DNA, 15 bp, Homo sapiens
tgcaaggtaaatatt

SEQ ID NO: 826820 - DNA, 15 bp, Homo sapiens
ttgcaaggtaaatat

SEQ ID NO: 826821 - DNA, 15 bp, Homo sapiens
cttgcaaggtaaata

SEQ ID NO: 826822 - DNA, 15 bp, Homo sapiens
acttgcaaggtaaat

SEQ ID NO: 826823 - DNA, 15 bp, Homo sapiens
aacttgcaaggtaaa

SEQ ID NO: 826824 - DNA, 15 bp, Homo sapiens
aaacttgcaaggtaa

SEQ ID NO: 826825 - DNA, 15 bp, Homo sapiens
caaacttgcaaggta

SEQ ID NO: 826826 - DNA, 15 bp, Homo sapiens
acaaacttgcaaggt

SEQ ID NO: 826827 - DNA, 15 bp, Homo sapiens
aacaaacttgcaagg

SEQ ID NO: 826828 - DNA, 15 bp, Homo sapiens
caacaaacttgcaag

SEQ ID NO: 826829 - DNA, 15 bp, Homo sapiens
acaacaaacttgcaa

SEQ ID NO: 826830 - DNA, 15 bp, Homo sapiens
cacaacaaacttgca

SEQ ID NO: 826831 - DNA, 15 bp, Homo sapiens
tcacaacaaacttgc

SEQ ID NO: 826832 - DNA, 15 bp, Homo sapiens
ttcacaacaaacttg

SEQ ID NO: 826833 - DNA, 15 bp, Homo sapiens
cttcacaacaaactt

SEQ ID NO: 826834 - DNA, 15 bp, Homo sapiens
tcttcacaacaaact

SEQ ID NO: 826835 - DNA, 15 bp, Homo sapiens
gtcttcacaacaaac

SEQ ID NO: 826836 - DNA, 15 bp, Homo sapiens
agtcttcacaacaaa

SEQ ID NO: 826837 - DNA, 15 bp, Homo sapiens
cagtcttcacaacaa

SEQ ID NO: 826838 - DNA, 15 bp, Homo sapiens
tcagtcttcacaaca

SEQ ID NO: 826839 - DNA, 15 bp, Homo sapiens
ttcagtcttcacaac

SEQ ID NO: 826840 - DNA, 15 bp, Homo sapiens
cttcagtcttcacaa

SEQ ID NO: 826841 - DNA, 15 bp, Homo sapiens
ccttcagtcttcaca

SEQ ID NO: 826842 - DNA, 15 bp, Homo sapiens
tccttcagtcttcac

SEQ ID NO: 826843 - DNA, 15 bp, Homo sapiens
ctccttcagtcttca

SEQ ID NO: 826844 - DNA, 15 bp, Homo sapiens
tctccttcagtcttc

SEQ ID NO: 826845 - DNA, 15 bp, Homo sapiens
ctctccttcagtctt

SEQ ID NO: 826846 - DNA, 15 bp, Homo sapiens
tctctccttcagtct

SEQ ID NO: 826847 - DNA, 15 bp, Homo sapiens
ttctctccttcagtc

SEQ ID NO: 826848 - DNA, 15 bp, Homo sapiens
attctctccttcagt

SEQ ID NO: 826849 - DNA, 15 bp, Homo sapiens
aattctctccttcag

SEQ ID NO: 826850 - DNA, 15 bp, Homo sapiens
aaattctctccttca

SEQ ID NO: 826851 - DNA, 15 bp, Homo sapiens
taaattctctccttc

SEQ ID NO: 826852 - DNA, 15 bp, Homo sapiens
ctaaattctctcctt

SEQ ID NO: 826853 - DNA, 15 bp, Homo sapiens
cctaaattctctcct

SEQ ID NO: 826854 - DNA, 15 bp, Homo sapiens
acctaaattctctcc

SEQ ID NO: 826855 - DNA, 15 bp, Homo sapiens
tacctaaattctctc

SEQ ID NO: 826856 - DNA, 15 bp, Homo sapiens
ttacctaaattctct

SEQ ID NO: 826857 - DNA, 15 bp, Homo sapiens
tttacctaaattctc

SEQ ID NO: 826858 - DNA, 15 bp, Homo sapiens
ttttacctaaattct

SEQ ID NO: 826859 - DNA, 15 bp, Homo sapiens
gttttacctaaattc

SEQ ID NO: 826860 - DNA, 15 bp, Homo sapiens
tgttttacctaaatt

SEQ ID NO: 826861 - DNA, 15 bp, Homo sapiens
atgttttacctaaat

SEQ ID NO: 826862 - DNA, 15 bp, Homo sapiens
aatgttttacctaaa

SEQ ID NO: 826863 - DNA, 15 bp, Homo sapiens
gaatgttttacctaa

SEQ ID NO: 826864 - DNA, 15 bp, Homo sapiens
tgaatgttttaccta

SEQ ID NO: 826865 - DNA, 15 bp, Homo sapiens
atgaatgttttacct

SEQ ID NO: 826866 - DNA, 15 bp, Homo sapiens
gatgaatgttttacc

SEQ ID NO: 826867 - DNA, 15 bp, Homo sapiens
tgatgaatgttttac

SEQ ID NO: 826868 - DNA, 15 bp, Homo sapiens
ctgatgaatgtttta

SEQ ID NO: 826869 - DNA, 15 bp, Homo sapiens
tctgatgaatgtttt

SEQ ID NO: 826870 - DNA, 15 bp, Homo sapiens
ctctgatgaatgttt

SEQ ID NO: 826871 - DNA, 15 bp, Homo sapiens
actctgatgaatgtt

SEQ ID NO: 826872 - DNA, 15 bp, Homo sapiens
tactctgatgaatgt

SEQ ID NO: 826873 - DNA, 15 bp, Homo sapiens
gtactctgatgaatg

SEQ ID NO: 826874 - DNA, 15 bp, Homo sapiens
ggtactctgatgaat

SEQ ID NO: 826875 - DNA, 15 bp, Homo sapiens
tggtactctgatgaa

SEQ ID NO: 826876 - DNA, 15 bp, Homo sapiens
atggtactctgatga

SEQ ID NO: 826877 - DNA, 15 bp, Homo sapiens
catggtactctgatg

SEQ ID NO: 826878 - DNA, 15 bp, Homo sapiens
gcatggtactctgat

SEQ ID NO: 826879 - DNA, 15 bp, Homo sapiens
tgcatggtactctga

SEQ ID NO: 826880 - DNA, 15 bp, Homo sapiens
gtgcatggtactctg

SEQ ID NO: 826881 - DNA, 15 bp, Homo sapiens
tgtgcatggtactct

SEQ ID NO: 826882 - DNA, 15 bp, Homo sapiens
gtgtgcatggtactc

SEQ ID NO: 826883 - DNA, 15 bp, Homo sapiens
tgtgtgcatggtact

SEQ ID NO: 826884 - DNA, 15 bp, Homo sapiens
ctgtgtgcatggtac

SEQ ID NO: 826885 - DNA, 15 bp, Homo sapiens
actgtgtgcatggta

SEQ ID NO: 826886 - DNA, 15 bp, Homo sapiens
aactgtgtgcatggt

SEQ ID NO: 826887 - DNA, 15 bp, Homo sapiens
caactgtgtgcatgg

SEQ ID NO: 826888 - DNA, 15 bp, Homo sapiens
acaactgtgtgcatg

SEQ ID NO: 826889 - DNA, 15 bp, Homo sapiens
aacaactgtgtgcat

SEQ ID NO: 826890 - DNA, 15 bp, Homo sapiens
gaacaactgtgtgca

SEQ ID NO: 826891 - DNA, 15 bp, Homo sapiens
ggaacaactgtgtgc

SEQ ID NO: 826892 - DNA, 15 bp, Homo sapiens
aggaacaactgtgtg

SEQ ID NO: 826893 - DNA, 15 bp, Homo sapiens
gaggaacaactgtgt

SEQ ID NO: 826894 - DNA, 15 bp, Homo sapiens
tgaggaacaactgtg

SEQ ID NO: 826895 - DNA, 15 bp, Homo sapiens
ttgaggaacaactgt

SEQ ID NO: 826896 - DNA, 15 bp, Homo sapiens
attgaggaacaactg

SEQ ID NO: 826897 - DNA, 15 bp, Homo sapiens
tattgaggaacaact

SEQ ID NO: 826898 - DNA, 15 bp, Homo sapiens
ttattgaggaacaac

SEQ ID NO: 826899 - DNA, 15 bp, Homo sapiens
tttattgaggaacaa

SEQ ID NO: 826900 - DNA, 15 bp, Homo sapiens
gtttattgaggaaca

SEQ ID NO: 826901 - DNA, 15 bp, Homo sapiens
tgtttattgaggaac

SEQ ID NO: 826902 - DNA, 15 bp, Homo sapiens
atgtttattgaggaa

SEQ ID NO: 826903 - DNA, 15 bp, Homo sapiens
aatgtttattgagga

SEQ ID NO: 826904 - DNA, 15 bp, Homo sapiens
taatgtttattgagg

SEQ ID NO: 826905 - DNA, 15 bp, Homo sapiens
ctaatgtttattgag

SEQ ID NO: 826906 - DNA, 15 bp, Homo sapiens
gctaatgtttattga

SEQ ID NO: 826907 - DNA, 15 bp, Homo sapiens
agctaatgtttattg

SEQ ID NO: 826908 - DNA, 15 bp, Homo sapiens
aagctaatgtttatt

SEQ ID NO: 826909 - DNA, 15 bp, Homo sapiens
gaagctaatgtttat

SEQ ID NO: 826910 - DNA, 15 bp, Homo sapiens
agaagctaatgttta

SEQ ID NO: 826911 - DNA, 15 bp, Homo sapiens
gagaagctaatgttt

SEQ ID NO: 826912 - DNA, 15 bp, Homo sapiens
agagaagctaatgtt

SEQ ID NO: 826913 - DNA, 15 bp, Homo sapiens
cagagaagctaatgt

SEQ ID NO: 826914 - DNA, 15 bp, Homo sapiens
tcagagaagctaatg

SEQ ID NO: 826915 - DNA, 15 bp, Homo sapiens
atcagagaagctaat

SEQ ID NO: 826916 - DNA, 15 bp, Homo sapiens
aatcagagaagctaa

SEQ ID NO: 826917 - DNA, 15 bp, Homo sapiens
caatcagagaagcta

SEQ ID NO: 826918 - DNA, 15 bp, Homo sapiens
gcaatcagagaagct

SEQ ID NO: 826919 - DNA, 15 bp, Homo sapiens
tgcaatcagagaagc

SEQ ID NO: 826920 - DNA, 15 bp, Homo sapiens
ttgcaatcagagaag

SEQ ID NO: 826921 - DNA, 15 bp, Homo sapiens
cttgcaatcagagaa

SEQ ID NO: 826922 - DNA, 15 bp, Homo sapiens
acttgcaatcagaga

SEQ ID NO: 826923 - DNA, 15 bp, Homo sapiens
aacttgcaatcagag

SEQ ID NO: 826924 - DNA, 15 bp, Homo sapiens
gaacttgcaatcaga

SEQ ID NO: 826925 - DNA, 15 bp, Homo sapiens
ggaacttgcaatcag

SEQ ID NO: 826926 - DNA, 15 bp, Homo sapiens
tggaacttgcaatca

SEQ ID NO: 826927 - DNA, 15 bp, Homo sapiens
ctggaacttgcaatc

SEQ ID NO: 826928 - DNA, 15 bp, Homo sapiens
actggaacttgcaat

SEQ ID NO: 826929 - DNA, 15 bp, Homo sapiens
gactggaacttgcaa

SEQ ID NO: 826930 - DNA, 15 bp, Homo sapiens
agactggaacttgca

SEQ ID NO: 826931 - DNA, 15 bp, Homo sapiens
tagactggaacttgc

SEQ ID NO: 826932 - DNA, 15 bp, Homo sapiens
ttagactggaacttg

SEQ ID NO: 826933 - DNA, 15 bp, Homo sapiens
tttagactggaactt

SEQ ID NO: 826934 - DNA, 15 bp, Homo sapiens
ctttagactggaact

SEQ ID NO: 826935 - DNA, 15 bp, Homo sapiens
actttagactggaac

SEQ ID NO: 826936 - DNA, 15 bp, Homo sapiens
cactttagactggaa

SEQ ID NO: 826937 - DNA, 15 bp, Homo sapiens
gcactttagactgga

SEQ ID NO: 826938 - DNA, 15 bp, Homo sapiens
agcactttagactgg

SEQ ID NO: 826939 - DNA, 15 bp, Homo sapiens
aagcactttagactg

SEQ ID NO: 826940 - DNA, 15 bp, Homo sapiens
aaagcactttagact

SEQ ID NO: 826941 - DNA, 15 bp, Homo sapiens
taaagcactttagac

SEQ ID NO: 826942 - DNA, 15 bp, Homo sapiens
ataaagcactttaga

SEQ ID NO: 826943 - DNA, 15 bp, Homo sapiens
tataaagcactttag

SEQ ID NO: 826944 - DNA, 15 bp, Homo sapiens
atataaagcacttta

SEQ ID NO: 826945 - DNA, 15 bp, Homo sapiens
tatataaagcacttt

SEQ ID NO: 826946 - DNA, 15 bp, Homo sapiens
atatataaagcactt

SEQ ID NO: 826947 - DNA, 15 bp, Homo sapiens
tatatataaagcact

SEQ ID NO: 826948 - DNA, 15 bp, Homo sapiens
gtatatataaagcac

SEQ ID NO: 826949 - DNA, 15 bp, Homo sapiens
ggtatatataaagca

SEQ ID NO: 826950 - DNA, 15 bp, Homo sapiens
tggtatatataaagc

SEQ ID NO: 826951 - DNA, 15 bp, Homo sapiens
ctggtatatataaag

SEQ ID NO: 826952 - DNA, 15 bp, Homo sapiens
gctggtatatataaa

SEQ ID NO: 826953 - DNA, 15 bp, Homo sapiens
ggctggtatatataa

SEQ ID NO: 826954 - DNA, 15 bp, Homo sapiens
tggctggtatatata

SEQ ID NO: 826955 - DNA, 15 bp, Homo sapiens
ttggctggtatatat

SEQ ID NO: 826956 - DNA, 15 bp, Homo sapiens
attggctggtatata

SEQ ID NO: 826957 - DNA, 15 bp, Homo sapiens
tattggctggtatat

SEQ ID NO: 826958 - DNA, 15 bp, Homo sapiens
ttattggctggtata

SEQ ID NO: 826959 - DNA, 15 bp, Homo sapiens
tttattggctggtat

SEQ ID NO: 826960 - DNA, 15 bp, Homo sapiens
ttttattggctggta

SEQ ID NO: 826961 - DNA, 15 bp, Homo sapiens
cttttattggctggt

SEQ ID NO: 826962 - DNA, 15 bp, Homo sapiens
ccttttattggctgg

SEQ ID NO: 826963 - DNA, 15 bp, Homo sapiens
tccttttattggctg

SEQ ID NO: 826964 - DNA, 15 bp, Homo sapiens
atccttttattggct

SEQ ID NO: 826965 - DNA, 15 bp, Homo sapiens
catccttttattggc

SEQ ID NO: 826966 - DNA, 15 bp, Homo sapiens
gcatccttttattgg

SEQ ID NO: 826967 - DNA, 15 bp, Homo sapiens
cgcatccttttattg

SEQ ID NO: 826968 - DNA, 15 bp, Homo sapiens
tcgcatccttttatt

SEQ ID NO: 826969 - DNA, 15 bp, Homo sapiens
ctcgcatccttttat

SEQ ID NO: 826970 - DNA, 15 bp, Homo sapiens
tctcgcatcctttta

SEQ ID NO: 826971 - DNA, 15 bp, Homo sapiens
ctctcgcatcctttt

SEQ ID NO: 826972 - DNA, 15 bp, Homo sapiens
tctctcgcatccttt

SEQ ID NO: 826973 - DNA, 15 bp, Homo sapiens
ctctctcgcatcctt

SEQ ID NO: 826974 - DNA, 15 bp, Homo sapiens
tctctctcgcatcct

SEQ ID NO: 826975 - DNA, 15 bp, Homo sapiens
atctctctcgcatcc

SEQ ID NO: 826976 - DNA, 15 bp, Homo sapiens
tatctctctcgcatc

SEQ ID NO: 826977 - DNA, 15 bp, Homo sapiens
atatctctctcgcat

SEQ ID NO: 826978 - DNA, 15 bp, Homo sapiens
tatatctctctcgca

SEQ ID NO: 826979 - DNA, 15 bp, Homo sapiens
gtatatctctctcgc

SEQ ID NO: 826980 - DNA, 15 bp, Homo sapiens
ggtatatctctctcg

SEQ ID NO: 826981 - DNA, 15 bp, Homo sapiens
tggtatatctctctc

SEQ ID NO: 826982 - DNA, 15 bp, Homo sapiens
ctggtatatctctct

SEQ ID NO: 826983 - DNA, 15 bp, Homo sapiens
actggtatatctctc

SEQ ID NO: 826984 - DNA, 15 bp, Homo sapiens
cactggtatatctct

SEQ ID NO: 826985 - DNA, 15 bp, Homo sapiens
acactggtatatctc

SEQ ID NO: 826986 - DNA, 15 bp, Homo sapiens
tacactggtatatct

SEQ ID NO: 826987 - DNA, 15 bp, Homo sapiens
atacactggtatatc

SEQ ID NO: 826988 - DNA, 15 bp, Homo sapiens
aatacactggtatat

SEQ ID NO: 826989 - DNA, 15 bp, Homo sapiens
caatacactggtata

SEQ ID NO: 826990 - DNA, 15 bp, Homo sapiens
acaatacactggtat

SEQ ID NO: 826991 - DNA, 15 bp, Homo sapiens
aacaatacactggta

SEQ ID NO: 826992 - DNA, 15 bp, Homo sapiens
aaacaatacactggt

SEQ ID NO: 826993 - DNA, 15 bp, Homo sapiens
aaaacaatacactgg

SEQ ID NO: 826994 - DNA, 15 bp, Homo sapiens
gaaaacaatacactg

SEQ ID NO: 826995 - DNA, 15 bp, Homo sapiens
agaaaacaatacact

SEQ ID NO: 826996 - DNA, 15 bp, Homo sapiens
tagaaaacaatacac

SEQ ID NO: 826997 - DNA, 15 bp, Homo sapiens
gtagaaaacaataca

SEQ ID NO: 826998 - DNA, 15 bp, Homo sapiens
ggtagaaaacaatac

SEQ ID NO: 826999 - DNA, 15 bp, Homo sapiens
tggtagaaaacaata

SEQ ID NO: 827000 - DNA, 15 bp, Homo sapiens
atggtagaaaacaat

SEQ ID NO: 827001 - DNA, 15 bp, Homo sapiens
aatggtagaaaacaa

SEQ ID NO: 827002 - DNA, 15 bp, Homo sapiens
aaatggtagaaaaca

SEQ ID NO: 827003 - DNA, 15 bp, Homo sapiens
aaaatggtagaaaac

SEQ ID NO: 827004 - DNA, 15 bp, Homo sapiens
taaaatggtagaaaa

SEQ ID NO: 827005 - DNA, 15 bp, Homo sapiens
ttaaaatggtagaaa

SEQ ID NO: 827006 - DNA, 15 bp, Homo sapiens
tttaaaatggtagaa

SEQ ID NO: 827007 - DNA, 15 bp, Homo sapiens
gtttaaaatggtaga

SEQ ID NO: 827008 - DNA, 15 bp, Homo sapiens
ggtttaaaatggtag

SEQ ID NO: 827009 - DNA, 15 bp, Homo sapiens
aggtttaaaatggta

SEQ ID NO: 827010 - DNA, 15 bp, Homo sapiens
taggtttaaaatggt

SEQ ID NO: 827011 - DNA, 15 bp, Homo sapiens
ataggtttaaaatgg

SEQ ID NO: 827012 - DNA, 15 bp, Homo sapiens
aataggtttaaaatg

SEQ ID NO: 827013 - DNA, 15 bp, Homo sapiens
aaataggtttaaaat

SEQ ID NO: 827014 - DNA, 15 bp, Homo sapiens
aaaataggtttaaaa

SEQ ID NO: 827015 - DNA, 15 bp, Homo sapiens
gaaaataggtttaaa

SEQ ID NO: 827016 - DNA, 15 bp, Homo sapiens
tgaaaataggtttaa

SEQ ID NO: 827017 - DNA, 15 bp, Homo sapiens
atgaaaataggttta

SEQ ID NO: 827018 - DNA, 15 bp, Homo sapiens
gatgaaaataggttt

SEQ ID NO: 827019 - DNA, 15 bp, Homo sapiens
ggatgaaaataggtt

SEQ ID NO: 827020 - DNA, 15 bp, Homo sapiens
tggatgaaaataggt

SEQ ID NO: 827021 - DNA, 15 bp, Homo sapiens
gtggatgaaaatagg

SEQ ID NO: 827022 - DNA, 15 bp, Homo sapiens
agtggatgaaaatag

SEQ ID NO: 827023 - DNA, 15 bp, Homo sapiens
cagtggatgaaaata

SEQ ID NO: 827024 - DNA, 15 bp, Homo sapiens
acagtggatgaaaat

SEQ ID NO: 827025 - DNA, 15 bp, Homo sapiens
aacagtggatgaaaa

SEQ ID NO: 827026 - DNA, 15 bp, Homo sapiens
taacagtggatgaaa

SEQ ID NO: 827027 - DNA, 15 bp, Homo sapiens
gtaacagtggatgaa

SEQ ID NO: 827028 - DNA, 15 bp, Homo sapiens
tgtaacagtggatga

SEQ ID NO: 827029 - DNA, 15 bp, Homo sapiens
ttgtaacagtggatg

SEQ ID NO: 827030 - DNA, 15 bp, Homo sapiens
tttgtaacagtggat

SEQ ID NO: 827031 - DNA, 15 bp, Homo sapiens
atttgtaacagtgga

SEQ ID NO: 827032 - DNA, 15 bp, Homo sapiens
aatttgtaacagtgg

SEQ ID NO: 827033 - DNA, 15 bp, Homo sapiens
gaatttgtaacagtg

SEQ ID NO: 827034 - DNA, 15 bp, Homo sapiens
agaatttgtaacagt

SEQ ID NO: 827035 - DNA, 15 bp, Homo sapiens
tagaatttgtaacag

SEQ ID NO: 827036 - DNA, 15 bp, Homo sapiens
atagaatttgtaaca

SEQ ID NO: 827037 - DNA, 15 bp, Homo sapiens
gatagaatttgtaac

SEQ ID NO: 827038 - DNA, 15 bp, Homo sapiens
tgatagaatttgtaa

SEQ ID NO: 827039 - DNA, 15 bp, Homo sapiens
atgatagaatttgta

SEQ ID NO: 827040 - DNA, 15 bp, Homo sapiens
tatgatagaatttgt

SEQ ID NO: 827041 - DNA, 15 bp, Homo sapiens
gtatgatagaatttg

SEQ ID NO: 827042 - DNA, 15 bp, Homo sapiens
agtatgatagaattt

SEQ ID NO: 827043 - DNA, 15 bp, Homo sapiens
cagtatgatagaatt

SEQ ID NO: 827044 - DNA, 15 bp, Homo sapiens
gcagtatgatagaat

SEQ ID NO: 827045 - DNA, 15 bp, Homo sapiens
agcagtatgatagaa

SEQ ID NO: 827046 - DNA, 15 bp, Homo sapiens
gagcagtatgataga

SEQ ID NO: 827047 - DNA, 15 bp, Homo sapiens
ggagcagtatgatag

SEQ ID NO: 827048 - DNA, 15 bp, Homo sapiens
tggagcagtatgata

SEQ ID NO: 827049 - DNA, 15 bp, Homo sapiens
gtggagcagtatgat

SEQ ID NO: 827050 - DNA, 15 bp, Homo sapiens
tgtggagcagtatga

SEQ ID NO: 827051 - DNA, 15 bp, Homo sapiens
atgtggagcagtatg

SEQ ID NO: 827052 - DNA, 15 bp, Homo sapiens
tatgtggagcagtat

SEQ ID NO: 827053 - DNA, 15 bp, Homo sapiens
ttatgtggagcagta

SEQ ID NO: 827054 - DNA, 15 bp, Homo sapiens
tttatgtggagcagt

SEQ ID NO: 827055 - DNA, 15 bp, Homo sapiens
ttttatgtggagcag

SEQ ID NO: 827056 - DNA, 15 bp, Homo sapiens
tttttatgtggagca

SEQ ID NO: 827057 - DNA, 15 bp, Homo sapiens
ttttttatgtggagc

SEQ ID NO: 827058 - DNA, 15 bp, Homo sapiens
attttttatgtggag

SEQ ID NO: 827059 - DNA, 15 bp, Homo sapiens
tattttttatgtgga

SEQ ID NO: 827060 - DNA, 15 bp, Homo sapiens
atattttttatgtgg

SEQ ID NO: 827061 - DNA, 15 bp, Homo sapiens
aatattttttatgtg

SEQ ID NO: 827062 - DNA, 15 bp, Homo sapiens
taatattttttatgt

SEQ ID NO: 827063 - DNA, 15 bp, Homo sapiens
ataatattttttatg

SEQ ID NO: 827064 - DNA, 15 bp, Homo sapiens
gataatattttttat

SEQ ID NO: 827065 - DNA, 15 bp, Homo sapiens
tgataatatttttta

SEQ ID NO: 827066 - DNA, 15 bp, Homo sapiens
ttgataatatttttt

SEQ ID NO: 827067 - DNA, 15 bp, Homo sapiens
attgataatattttt

SEQ ID NO: 827068 - DNA, 15 bp, Homo sapiens
cattgataatatttt

SEQ ID NO: 827069 - DNA, 15 bp, Homo sapiens
tcattgataatattt

SEQ ID NO: 827070 - DNA, 15 bp, Homo sapiens
atcattgataatatt

SEQ ID NO: 827071 - DNA, 15 bp, Homo sapiens
aatcattgataatat

SEQ ID NO: 827072 - DNA, 15 bp, Homo sapiens
aaatcattgataata

SEQ ID NO: 827073 - DNA, 15 bp, Homo sapiens
aaaatcattgataat

SEQ ID NO: 827074 - DNA, 15 bp, Homo sapiens
aaaaatcattgataa

SEQ ID NO: 827075 - DNA, 15 bp, Homo sapiens
taaaaatcattgata

SEQ ID NO: 827076 - DNA, 15 bp, Homo sapiens
ctaaaaatcattgat

SEQ ID NO: 827077 - DNA, 15 bp, Homo sapiens
actaaaaatcattga

SEQ ID NO: 827078 - DNA, 15 bp, Homo sapiens
gactaaaaatcattg

SEQ ID NO: 827079 - DNA, 15 bp, Homo sapiens
agactaaaaatcatt

SEQ ID NO: 827080 - DNA, 15 bp, Homo sapiens
gagactaaaaatcat

SEQ ID NO: 827081 - DNA, 15 bp, Homo sapiens
agagactaaaaatca

SEQ ID NO: 827082 - DNA, 15 bp, Homo sapiens
cagagactaaaaatc

SEQ ID NO: 827083 - DNA, 15 bp, Homo sapiens
tcagagactaaaaat

SEQ ID NO: 827084 - DNA, 15 bp, Homo sapiens
ttcagagactaaaaa

SEQ ID NO: 827085 - DNA, 15 bp, Homo sapiens
cttcagagactaaaa

SEQ ID NO: 827086 - DNA, 15 bp, Homo sapiens
acttcagagactaaa

SEQ ID NO: 827087 - DNA, 15 bp, Homo sapiens
cacttcagagactaa

SEQ ID NO: 827088 - DNA, 15 bp, Homo sapiens
gcacttcagagacta

SEQ ID NO: 827089 - DNA, 15 bp, Homo sapiens
tgcacttcagagact

SEQ ID NO: 827090 - DNA, 15 bp, Homo sapiens
ttgcacttcagagac

SEQ ID NO: 827091 - DNA, 15 bp, Homo sapiens
attgcacttcagaga

SEQ ID NO: 827092 - DNA, 15 bp, Homo sapiens
tattgcacttcagag

SEQ ID NO: 827093 - DNA, 15 bp, Homo sapiens
atattgcacttcaga

SEQ ID NO: 827094 - DNA, 15 bp, Homo sapiens
aatattgcacttcag

SEQ ID NO: 827095 - DNA, 15 bp, Homo sapiens
aaatattgcacttca

SEQ ID NO: 827096 - DNA, 15 bp, Homo sapiens
caaatattgcacttc

SEQ ID NO: 827097 - DNA, 15 bp, Homo sapiens
tcaaatattgcactt

SEQ ID NO: 827098 - DNA, 15 bp, Homo sapiens
atcaaatattgcact

SEQ ID NO: 827099 - DNA, 15 bp, Homo sapiens
aatcaaatattgcac

SEQ ID NO: 827100 - DNA, 15 bp, Homo sapiens
taatcaaatattgca

SEQ ID NO: 827101 - DNA, 15 bp, Homo sapiens
ataatcaaatattgc

SEQ ID NO: 827102 - DNA, 15 bp, Homo sapiens
aataatcaaatattg

SEQ ID NO: 827103 - DNA, 15 bp, Homo sapiens
caataatcaaatatt

SEQ ID NO: 827104 - DNA, 15 bp, Homo sapiens
tcaataatcaaatat

SEQ ID NO: 827105 - DNA, 15 bp, Homo sapiens
ctcaataatcaaata

SEQ ID NO: 827106 - DNA, 15 bp, Homo sapiens
gctcaataatcaaat

SEQ ID NO: 827107 - DNA, 15 bp, Homo sapiens
tgctcaataatcaaa

SEQ ID NO: 827108 - DNA, 15 bp, Homo sapiens
gtgctcaataatcaa

SEQ ID NO: 827109 - DNA, 15 bp, Homo sapiens
tgtgctcaataatca

SEQ ID NO: 827110 - DNA, 15 bp, Homo sapiens
gtgtgctcaataatc

SEQ ID NO: 827111 - DNA, 15 bp, Homo sapiens
ggtgtgctcaataat

SEQ ID NO: 827112 - DNA, 15 bp, Homo sapiens
aggtgtgctcaataa

SEQ ID NO: 827113 - DNA, 15 bp, Homo sapiens
caggtgtgctcaata

SEQ ID NO: 827114 - DNA, 15 bp, Homo sapiens
acaggtgtgctcaat

SEQ ID NO: 827115 - DNA, 15 bp, Homo sapiens
aacaggtgtgctcaa

SEQ ID NO: 827116 - DNA, 15 bp, Homo sapiens
caacaggtgtgctca

SEQ ID NO: 827117 - DNA, 15 bp, Homo sapiens
tcaacaggtgtgctc

SEQ ID NO: 827118 - DNA, 15 bp, Homo sapiens
ttcaacaggtgtgct

SEQ ID NO: 827119 - DNA, 15 bp, Homo sapiens
cttcaacaggtgtgc

SEQ ID NO: 827120 - DNA, 15 bp, Homo sapiens
acttcaacaggtgtg

SEQ ID NO: 827121 - DNA, 15 bp, Homo sapiens
aacttcaacaggtgt

SEQ ID NO: 827122 - DNA, 15 bp, Homo sapiens
aaacttcaacaggtg

SEQ ID NO: 827123 - DNA, 15 bp, Homo sapiens
aaaacttcaacaggt

SEQ ID NO: 827124 - DNA, 15 bp, Homo sapiens
taaaacttcaacagg

SEQ ID NO: 827125 - DNA, 15 bp, Homo sapiens
ctaaaacttcaacag

SEQ ID NO: 827126 - DNA, 15 bp, Homo sapiens
actaaaacttcaaca

SEQ ID NO: 827127 - DNA, 15 bp, Homo sapiens
aactaaaacttcaac

SEQ ID NO: 827128 - DNA, 15 bp, Homo sapiens
aaactaaaacttcaa

SEQ ID NO: 827129 - DNA, 15 bp, Homo sapiens
gaaactaaaacttca

SEQ ID NO: 827130 - DNA, 15 bp, Homo sapiens
agaaactaaaacttc

SEQ ID NO: 827131 - DNA, 15 bp, Homo sapiens
aagaaactaaaactt

SEQ ID NO: 827132 - DNA, 15 bp, Homo sapiens
gaagaaactaaaact

SEQ ID NO: 827133 - DNA, 15 bp, Homo sapiens
agaagaaactaaaac

SEQ ID NO: 827134 - DNA, 15 bp, Homo sapiens
gagaagaaactaaaa

SEQ ID NO: 827135 - DNA, 15 bp, Homo sapiens
tgagaagaaactaaa

SEQ ID NO: 827136 - DNA, 15 bp, Homo sapiens
gtgagaagaaactaa

SEQ ID NO: 827137 - DNA, 15 bp, Homo sapiens
agtgagaagaaacta

SEQ ID NO: 827138 - DNA, 15 bp, Homo sapiens
aagtgagaagaaact

SEQ ID NO: 827139 - DNA, 15 bp, Homo sapiens
taagtgagaagaaac

SEQ ID NO: 827140 - DNA, 15 bp, Homo sapiens
gtaagtgagaagaaa

SEQ ID NO: 827141 - DNA, 15 bp, Homo sapiens
tgtaagtgagaagaa

SEQ ID NO: 827142 - DNA, 15 bp, Homo sapiens
atgtaagtgagaaga

SEQ ID NO: 827143 - DNA, 15 bp, Homo sapiens
catgtaagtgagaag

SEQ ID NO: 827144 - DNA, 15 bp, Homo sapiens
ccatgtaagtgagaa

SEQ ID NO: 827145 - DNA, 15 bp, Homo sapiens
cccatgtaagtgaga

SEQ ID NO: 827146 - DNA, 15 bp, Homo sapiens
acccatgtaagtgag

SEQ ID NO: 827147 - DNA, 15 bp, Homo sapiens
aacccatgtaagtga

SEQ ID NO: 827148 - DNA, 15 bp, Homo sapiens
caacccatgtaagtg

SEQ ID NO: 827149 - DNA, 15 bp, Homo sapiens
acaacccatgtaagt

SEQ ID NO: 827150 - DNA, 15 bp, Homo sapiens
cacaacccatgtaag

SEQ ID NO: 827151 - DNA, 15 bp, Homo sapiens
acacaacccatgtaa

SEQ ID NO: 827152 - DNA, 15 bp, Homo sapiens
tacacaacccatgta

SEQ ID NO: 827153 - DNA, 15 bp, Homo sapiens
ttacacaacccatgt

SEQ ID NO: 827154 - DNA, 15 bp, Homo sapiens
tttacacaacccatg

SEQ ID NO: 827155 - DNA, 15 bp, Homo sapiens
ctttacacaacccat

SEQ ID NO: 827156 - DNA, 15 bp, Homo sapiens
cctttacacaaccca

SEQ ID NO: 827157 - DNA, 15 bp, Homo sapiens
acctttacacaaccc

SEQ ID NO: 827158 - DNA, 15 bp, Homo sapiens
tacctttacacaacc

SEQ ID NO: 827159 - DNA, 15 bp, Homo sapiens
ctacctttacacaac

SEQ ID NO: 827160 - DNA, 15 bp, Homo sapiens
cctacctttacacaa

SEQ ID NO: 827161 - DNA, 15 bp, Homo sapiens
tcctacctttacaca

SEQ ID NO: 827162 - DNA, 15 bp, Homo sapiens
ctcctacctttacac

SEQ ID NO: 827163 - DNA, 15 bp, Homo sapiens
cctcctacctttaca

SEQ ID NO: 827164 - DNA, 15 bp, Homo sapiens
acctcctacctttac

SEQ ID NO: 827165 - DNA, 15 bp, Homo sapiens
tacctcctaccttta

SEQ ID NO: 827166 - DNA, 15 bp, Homo sapiens
atacctcctaccttt

SEQ ID NO: 827167 - DNA, 15 bp, Homo sapiens
tatacctcctacctt

SEQ ID NO: 827168 - DNA, 15 bp, Homo sapiens
ttatacctcctacct

SEQ ID NO: 827169 - DNA, 15 bp, Homo sapiens
tttatacctcctacc

SEQ ID NO: 827170 - DNA, 15 bp, Homo sapiens
ttttatacctcctac

SEQ ID NO: 827171 - DNA, 15 bp, Homo sapiens
gttttatacctccta

SEQ ID NO: 827172 - DNA, 15 bp, Homo sapiens
ggttttatacctcct

SEQ ID NO: 827173 - DNA, 15 bp, Homo sapiens
tggttttatacctcc

SEQ ID NO: 827174 - DNA, 15 bp, Homo sapiens
ctggttttatacctc

SEQ ID NO: 827175 - DNA, 15 bp, Homo sapiens
actggttttatacct

SEQ ID NO: 827176 - DNA, 15 bp, Homo sapiens
cactggttttatacc

SEQ ID NO: 827177 - DNA, 15 bp, Homo sapiens
acactggttttatac

SEQ ID NO: 827178 - DNA, 15 bp, Homo sapiens
gacactggttttata

SEQ ID NO: 827179 - DNA, 15 bp, Homo sapiens
ggacactggttttat

SEQ ID NO: 827180 - DNA, 15 bp, Homo sapiens
aggacactggtttta

SEQ ID NO: 827181 - DNA, 15 bp, Homo sapiens
taggacactggtttt

SEQ ID NO: 827182 - DNA, 15 bp, Homo sapiens
ctaggacactggttt

SEQ ID NO: 827183 - DNA, 15 bp, Homo sapiens
cctaggacactggtt

SEQ ID NO: 827184 - DNA, 15 bp, Homo sapiens
acctaggacactggt

SEQ ID NO: 827185 - DNA, 15 bp, Homo sapiens
gacctaggacactgg

SEQ ID NO: 827186 - DNA, 15 bp, Homo sapiens
agacctaggacactg

SEQ ID NO: 827187 - DNA, 15 bp, Homo sapiens
tagacctaggacact

SEQ ID NO: 827188 - DNA, 15 bp, Homo sapiens
ttagacctaggacac

SEQ ID NO: 827189 - DNA, 15 bp, Homo sapiens
tttagacctaggaca

SEQ ID NO: 827190 - DNA, 15 bp, Homo sapiens
atttagacctaggac

SEQ ID NO: 827191 - DNA, 15 bp, Homo sapiens
gatttagacctagga

SEQ ID NO: 827192 - DNA, 15 bp, Homo sapiens
agatttagacctagg

SEQ ID NO: 827193 - DNA, 15 bp, Homo sapiens
aagatttagacctag

SEQ ID NO: 827194 - DNA, 15 bp, Homo sapiens
aaagatttagaccta

SEQ ID NO: 827195 - DNA, 15 bp, Homo sapiens
gaaagatttagacct

SEQ ID NO: 827196 - DNA, 15 bp, Homo sapiens
agaaagatttagacc

SEQ ID NO: 827197 - DNA, 15 bp, Homo sapiens
aagaaagatttagac

SEQ ID NO: 827198 - DNA, 15 bp, Homo sapiens
taagaaagatttaga

SEQ ID NO: 827199 - DNA, 15 bp, Homo sapiens
ttaagaaagatttag

SEQ ID NO: 827200 - DNA, 15 bp, Homo sapiens
attaagaaagattta

SEQ ID NO: 827201 - DNA, 15 bp, Homo sapiens
cattaagaaagattt

SEQ ID NO: 827202 - DNA, 15 bp, Homo sapiens
acattaagaaagatt

SEQ ID NO: 827203 - DNA, 15 bp, Homo sapiens
gacattaagaaagat

SEQ ID NO: 827204 - DNA, 15 bp, Homo sapiens
tgacattaagaaaga

SEQ ID NO: 827205 - DNA, 15 bp, Homo sapiens
atgacattaagaaag

SEQ ID NO: 827206 - DNA, 15 bp, Homo sapiens
tatgacattaagaaa

SEQ ID NO: 827207 - DNA, 15 bp, Homo sapiens
gtatgacattaagaa

SEQ ID NO: 827208 - DNA, 15 bp, Homo sapiens
agtatgacattaaga

SEQ ID NO: 827209 - DNA, 15 bp, Homo sapiens
aagtatgacattaag

SEQ ID NO: 827210 - DNA, 15 bp, Homo sapiens
aaagtatgacattaa

SEQ ID NO: 827211 - DNA, 15 bp, Homo sapiens
caaagtatgacatta

SEQ ID NO: 827212 - DNA, 15 bp, Homo sapiens
ccaaagtatgacatt

SEQ ID NO: 827213 - DNA, 15 bp, Homo sapiens
tccaaagtatgacat

SEQ ID NO: 827214 - DNA, 15 bp, Homo sapiens
atccaaagtatgaca

SEQ ID NO: 827215 - DNA, 15 bp, Homo sapiens
aatccaaagtatgac

SEQ ID NO: 827216 - DNA, 15 bp, Homo sapiens
gaatccaaagtatga

SEQ ID NO: 827217 - DNA, 15 bp, Homo sapiens
tgaatccaaagtatg

SEQ ID NO: 827218 - DNA, 15 bp, Homo sapiens
atgaatccaaagtat

SEQ ID NO: 827219 - DNA, 15 bp, Homo sapiens
aatgaatccaaagta

SEQ ID NO: 827220 - DNA, 15 bp, Homo sapiens
caatgaatccaaagt

SEQ ID NO: 827221 - DNA, 15 bp, Homo sapiens
tcaatgaatccaaag

SEQ ID NO: 827222 - DNA, 15 bp, Homo sapiens
atcaatgaatccaaa

SEQ ID NO: 827223 - DNA, 15 bp, Homo sapiens
tatcaatgaatccaa

SEQ ID NO: 827224 - DNA, 15 bp, Homo sapiens
atatcaatgaatcca

SEQ ID NO: 827225 - DNA, 15 bp, Homo sapiens
tatatcaatgaatcc

SEQ ID NO: 827226 - DNA, 15 bp, Homo sapiens
ttatatcaatgaatc

SEQ ID NO: 827227 - DNA, 15 bp, Homo sapiens
cttatatcaatgaat

SEQ ID NO: 827228 - DNA, 15 bp, Homo sapiens
acttatatcaatgaa

SEQ ID NO: 827229 - DNA, 15 bp, Homo sapiens
tacttatatcaatga

SEQ ID NO: 827230 - DNA, 15 bp, Homo sapiens
ttacttatatcaatg

SEQ ID NO: 827231 - DNA, 15 bp, Homo sapiens
gttacttatatcaat

SEQ ID NO: 827232 - DNA, 15 bp, Homo sapiens
agttacttatatcaa

SEQ ID NO: 827233 - DNA, 15 bp, Homo sapiens
aagttacttatatca

SEQ ID NO: 827234 - DNA, 15 bp, Homo sapiens
caagttacttatatc

SEQ ID NO: 827235 - DNA, 15 bp, Homo sapiens
tcaagttacttatat

SEQ ID NO: 827236 - DNA, 15 bp, Homo sapiens
ctcaagttacttata

SEQ ID NO: 827237 - DNA, 15 bp, Homo sapiens
gctcaagttacttat

SEQ ID NO: 827238 - DNA, 15 bp, Homo sapiens
tgctcaagttactta

SEQ ID NO: 827239 - DNA, 15 bp, Homo sapiens
gtgctcaagttactt

SEQ ID NO: 827240 - DNA, 15 bp, Homo sapiens
ggtgctcaagttact

SEQ ID NO: 827241 - DNA, 15 bp, Homo sapiens
tggtgctcaagttac

SEQ ID NO: 827242 - DNA, 15 bp, Homo sapiens
ctggtgctcaagtta

SEQ ID NO: 827243 - DNA, 15 bp, Homo sapiens
gctggtgctcaagtt

SEQ ID NO: 827244 - DNA, 15 bp, Homo sapiens
cgctggtgctcaagt

SEQ ID NO: 827245 - DNA, 15 bp, Homo sapiens
gcgctggtgctcaag

SEQ ID NO: 827246 - DNA, 15 bp, Homo sapiens
agcgctggtgctcaa

SEQ ID NO: 827247 - DNA, 15 bp, Homo sapiens
aagcgctggtgctca

SEQ ID NO: 827248 - DNA, 15 bp, Homo sapiens
gaagcgctggtgctc

SEQ ID NO: 827249 - DNA, 15 bp, Homo sapiens
tgaagcgctggtgct

SEQ ID NO: 827250 - DNA, 15 bp, Homo sapiens
atgaagcgctggtgc

SEQ ID NO: 827251 - DNA, 15 bp, Homo sapiens
aatgaagcgctggtg

SEQ ID NO: 827252 - DNA, 15 bp, Homo sapiens
aaatgaagcgctggt

SEQ ID NO: 827253 - DNA, 15 bp, Homo sapiens
aaaatgaagcgctgg

SEQ ID NO: 827254 - DNA, 15 bp, Homo sapiens
taaaatgaagcgctg

SEQ ID NO: 827255 - DNA, 15 bp, Homo sapiens
gtaaaatgaagcgct

SEQ ID NO: 827256 - DNA, 15 bp, Homo sapiens
agtaaaatgaagcgc

SEQ ID NO: 827257 - DNA, 15 bp, Homo sapiens
aagtaaaatgaagcg

SEQ ID NO: 827258 - DNA, 15 bp, Homo sapiens
gaagtaaaatgaagc

SEQ ID NO: 827259 - DNA, 15 bp, Homo sapiens
tgaagtaaaatgaag

SEQ ID NO: 827260 - DNA, 15 bp, Homo sapiens
atgaagtaaaatgaa

SEQ ID NO: 827261 - DNA, 15 bp, Homo sapiens
aatgaagtaaaatga

SEQ ID NO: 827262 - DNA, 15 bp, Homo sapiens
aaatgaagtaaaatg

SEQ ID NO: 827263 - DNA, 15 bp, Homo sapiens
aaaatgaagtaaaat

SEQ ID NO: 827264 - DNA, 15 bp, Homo sapiens
aaaaatgaagtaaaa

SEQ ID NO: 827265 - DNA, 15 bp, Homo sapiens
aaaaaatgaagtaaa

SEQ ID NO: 827266 - DNA, 15 bp, Homo sapiens
taaaaaatgaagtaa

SEQ ID NO: 827267 - DNA, 15 bp, Homo sapiens
ttaaaaaatgaagta

SEQ ID NO: 827268 - DNA, 15 bp, Homo sapiens
tttaaaaaatgaagt

SEQ ID NO: 827269 - DNA, 15 bp, Homo sapiens
ctttaaaaaatgaag

SEQ ID NO: 827270 - DNA, 15 bp, Homo sapiens
tctttaaaaaatgaa

SEQ ID NO: 827271 - DNA, 15 bp, Homo sapiens
atctttaaaaaatga

SEQ ID NO: 827272 - DNA, 15 bp, Homo sapiens
tatctttaaaaaatg

SEQ ID NO: 827273 - DNA, 15 bp, Homo sapiens
atatctttaaaaaat

SEQ ID NO: 827274 - DNA, 15 bp, Homo sapiens
tatatctttaaaaaa

SEQ ID NO: 827275 - DNA, 15 bp, Homo sapiens
ctatatctttaaaaa

SEQ ID NO: 827276 - DNA, 15 bp, Homo sapiens
actatatctttaaaa

SEQ ID NO: 827277 - DNA, 15 bp, Homo sapiens
tactatatctttaaa

SEQ ID NO: 827278 - DNA, 15 bp, Homo sapiens
ttactatatctttaa

SEQ ID NO: 827279 - DNA, 15 bp, Homo sapiens
cttactatatcttta

SEQ ID NO: 827280 - DNA, 15 bp, Homo sapiens
tcttactatatcttt

SEQ ID NO: 827281 - DNA, 15 bp, Homo sapiens
ctcttactatatctt

SEQ ID NO: 827282 - DNA, 15 bp, Homo sapiens
actcttactatatct

SEQ ID NO: 827283 - DNA, 15 bp, Homo sapiens
tactcttactatatc

SEQ ID NO: 827284 - DNA, 15 bp, Homo sapiens
ttactcttactatat

SEQ ID NO: 827285 - DNA, 15 bp, Homo sapiens
attactcttactata

SEQ ID NO: 827286 - DNA, 15 bp, Homo sapiens
aattactcttactat

SEQ ID NO: 827287 - DNA, 15 bp, Homo sapiens
gaattactcttacta

SEQ ID NO: 827288 - DNA, 15 bp, Homo sapiens
ggaattactcttact

SEQ ID NO: 827289 - DNA, 15 bp, Homo sapiens
gggaattactcttac

SEQ ID NO: 827290 - DNA, 15 bp, Homo sapiens
tgggaattactctta

SEQ ID NO: 827291 - DNA, 15 bp, Homo sapiens
atgggaattactctt

SEQ ID NO: 827292 - DNA, 15 bp, Homo sapiens
gatgggaattactct

SEQ ID NO: 827293 - DNA, 15 bp, Homo sapiens
agatgggaattactc

SEQ ID NO: 827294 - DNA, 15 bp, Homo sapiens
cagatgggaattact

SEQ ID NO: 827295 - DNA, 15 bp, Homo sapiens
gcagatgggaattac

SEQ ID NO: 827296 - DNA, 15 bp, Homo sapiens
ggcagatgggaatta

SEQ ID NO: 827297 - DNA, 15 bp, Homo sapiens
aggcagatgggaatt

SEQ ID NO: 827298 - DNA, 15 bp, Homo sapiens
taggcagatgggaat

SEQ ID NO: 827299 - DNA, 15 bp, Homo sapiens
ctaggcagatgggaa

SEQ ID NO: 827300 - DNA, 15 bp, Homo sapiens
gctaggcagatggga

SEQ ID NO: 827301 - DNA, 15 bp, Homo sapiens
tgctaggcagatggg

SEQ ID NO: 827302 - DNA, 15 bp, Homo sapiens
ttgctaggcagatgg

SEQ ID NO: 827303 - DNA, 15 bp, Homo sapiens
tttgctaggcagatg

SEQ ID NO: 827304 - DNA, 15 bp, Homo sapiens
ttttgctaggcagat

SEQ ID NO: 827305 - DNA, 15 bp, Homo sapiens
attttgctaggcaga

SEQ ID NO: 827306 - DNA, 15 bp, Homo sapiens
aattttgctaggcag

SEQ ID NO: 827307 - DNA, 15 bp, Homo sapiens
caattttgctaggca

SEQ ID NO: 827308 - DNA, 15 bp, Homo sapiens
acaattttgctaggc

SEQ ID NO: 827309 - DNA, 15 bp, Homo sapiens
aacaattttgctagg

SEQ ID NO: 827310 - DNA, 15 bp, Homo sapiens
aaacaattttgctag

SEQ ID NO: 827311 - DNA, 15 bp, Homo sapiens
aaacaaaggaaatgg

SEQ ID NO: 827312 - DNA, 15 bp, Homo sapiens
caaacaaaggaaatg

SEQ ID NO: 827313 - DNA, 15 bp, Homo sapiens
acaaacaaaggaaat

SEQ ID NO: 827314 - DNA, 15 bp, Homo sapiens
aacaaacaaaggaaa

SEQ ID NO: 827315 - DNA, 15 bp, Homo sapiens
aaacaaacaaaggaa

SEQ ID NO: 827316 - DNA, 15 bp, Homo sapiens
taaacaaacaaagga

SEQ ID NO: 827317 - DNA, 15 bp, Homo sapiens
ataaacaaacaaagg

SEQ ID NO: 827318 - DNA, 15 bp, Homo sapiens
aataaacaaacaaag

SEQ ID NO: 827319 - DNA, 15 bp, Homo sapiens
aaataaacaaacaaa

SEQ ID NO: 827320 - DNA, 15 bp, Homo sapiens
caaataaacaaacaa

SEQ ID NO: 827321 - DNA, 15 bp, Homo sapiens
ccaaataaacaaaca

SEQ ID NO: 827322 - DNA, 15 bp, Homo sapiens
accaaataaacaaac

SEQ ID NO: 827323 - DNA, 15 bp, Homo sapiens
aaccaaataaacaaa

SEQ ID NO: 827324 - DNA, 15 bp, Homo sapiens
aaaccaaataaacaa

SEQ ID NO: 827325 - DNA, 15 bp, Homo sapiens
aaaaccaaataaaca

SEQ ID NO: 827326 - DNA, 15 bp, Homo sapiens
aaaaaccaaataaac

SEQ ID NO: 827327 - DNA, 15 bp, Homo sapiens
taaaaaccaaataaa

SEQ ID NO: 827328 - DNA, 15 bp, Homo sapiens
gtaaaaaccaaataa

SEQ ID NO: 827329 - DNA, 15 bp, Homo sapiens
agtaaaaaccaaata

SEQ ID NO: 827330 - DNA, 15 bp, Homo sapiens
aagtaaaaaccaaat

SEQ ID NO: 827331 - DNA, 15 bp, Homo sapiens
gaagtaaaaaccaaa

SEQ ID NO: 827332 - DNA, 15 bp, Homo sapiens
agaagtaaaaaccaa

SEQ ID NO: 827333 - DNA, 15 bp, Homo sapiens
tagaagtaaaaacca

SEQ ID NO: 827334 - DNA, 15 bp, Homo sapiens
ttagaagtaaaaacc

SEQ ID NO: 827335 - DNA, 15 bp, Homo sapiens
gttagaagtaaaaac

SEQ ID NO: 827336 - DNA, 15 bp, Homo sapiens
agttagaagtaaaaa

SEQ ID NO: 827337 - DNA, 15 bp, Homo sapiens
aagttagaagtaaaa

SEQ ID NO: 827338 - DNA, 15 bp, Homo sapiens
aaagttagaagtaaa

SEQ ID NO: 827339 - DNA, 15 bp, Homo sapiens
aaaagttagaagtaa

SEQ ID NO: 827340 - DNA, 15 bp, Homo sapiens
gaaaagttagaagta

SEQ ID NO: 827341 - DNA, 15 bp, Homo sapiens
agaaaagttagaagt

SEQ ID NO: 827342 - DNA, 15 bp, Homo sapiens
aagaaaagttagaag

SEQ ID NO: 827343 - DNA, 15 bp, Homo sapiens
taagaaaagttagaa

SEQ ID NO: 827344 - DNA, 15 bp, Homo sapiens
ataagaaaagttaga

SEQ ID NO: 827345 - DNA, 15 bp, Homo sapiens
aataagaaaagttag

SEQ ID NO: 827346 - DNA, 15 bp, Homo sapiens
caataagaaaagtta

SEQ ID NO: 827347 - DNA, 15 bp, Homo sapiens
acaataagaaaagtt

SEQ ID NO: 827348 - DNA, 15 bp, Homo sapiens
gacaataagaaaagt

SEQ ID NO: 827349 - DNA, 15 bp, Homo sapiens
tgacaataagaaaag

SEQ ID NO: 827350 - DNA, 15 bp, Homo sapiens
ctgacaataagaaaa

SEQ ID NO: 827351 - DNA, 15 bp, Homo sapiens
cctgacaataagaaa

SEQ ID NO: 827352 - DNA, 15 bp, Homo sapiens
tcctgacaataagaa

SEQ ID NO: 827353 - DNA, 15 bp, Homo sapiens
gtcctgacaataaga

SEQ ID NO: 827354 - DNA, 15 bp, Homo sapiens
tgtcctgacaataag

SEQ ID NO: 827355 - DNA, 15 bp, Homo sapiens
atgtcctgacaataa

SEQ ID NO: 827356 - DNA, 15 bp, Homo sapiens
tatgtcctgacaata

SEQ ID NO: 827357 - DNA, 15 bp, Homo sapiens
atatgtcctgacaat

SEQ ID NO: 827358 - DNA, 15 bp, Homo sapiens
tatatgtcctgacaa

SEQ ID NO: 827359 - DNA, 15 bp, Homo sapiens
ttatatgtcctgaca

SEQ ID NO: 827360 - DNA, 15 bp, Homo sapiens
gttatatgtcctgac

SEQ ID NO: 827361 - DNA, 15 bp, Homo sapiens
tgttatatgtcctga

SEQ ID NO: 827362 - DNA, 15 bp, Homo sapiens
atgttatatgtcctg

SEQ ID NO: 827363 - DNA, 15 bp, Homo sapiens
tatgttatatgtcct

SEQ ID NO: 827364 - DNA, 15 bp, Homo sapiens
atatgttatatgtcc

SEQ ID NO: 827365 - DNA, 15 bp, Homo sapiens
aatatgttatatgtc

SEQ ID NO: 827366 - DNA, 15 bp, Homo sapiens
aaatatgttatatgt

SEQ ID NO: 827367 - DNA, 15 bp, Homo sapiens
taaatatgttatatg

SEQ ID NO: 827368 - DNA, 15 bp, Homo sapiens
ttaaatatgttatat

SEQ ID NO: 827369 - DNA, 15 bp, Homo sapiens
tttaaatatgttata

SEQ ID NO: 827370 - DNA, 15 bp, Homo sapiens
gtttaaatatgttat

SEQ ID NO: 827371 - DNA, 15 bp, Homo sapiens
agtttaaatatgtta

SEQ ID NO: 827372 - DNA, 15 bp, Homo sapiens
aagtttaaatatgtt

SEQ ID NO: 827373 - DNA, 15 bp, Homo sapiens
aaagtttaaatatgt

SEQ ID NO: 827374 - DNA, 15 bp, Homo sapiens
caaagtttaaatatg

SEQ ID NO: 827375 - DNA, 15 bp, Homo sapiens
acaaagtttaaatat

SEQ ID NO: 827376 - DNA, 15 bp, Homo sapiens
aacaaagtttaaata

SEQ ID NO: 827377 - DNA, 15 bp, Homo sapiens
aaacaaagtttaaat

SEQ ID NO: 827378 - DNA, 15 bp, Homo sapiens
aaaacaaagtttaaa

SEQ ID NO: 827379 - DNA, 15 bp, Homo sapiens
aaaaacaaagtttaa

SEQ ID NO: 827380 - DNA, 15 bp, Homo sapiens
gaaaaacaaagttta

SEQ ID NO: 827381 - DNA, 15 bp, Homo sapiens
tgaaaaacaaagttt

SEQ ID NO: 827382 - DNA, 15 bp, Homo sapiens
ttgaaaaacaaagtt

SEQ ID NO: 827383 - DNA, 15 bp, Homo sapiens
gttgaaaaacaaagt

SEQ ID NO: 827384 - DNA, 15 bp, Homo sapiens
agttgaaaaacaaag

SEQ ID NO: 827385 - DNA, 15 bp, Homo sapiens
gagttgaaaaacaaa

SEQ ID NO: 827386 - DNA, 15 bp, Homo sapiens
cgagttgaaaaacaa

SEQ ID NO: 827387 - DNA, 15 bp, Homo sapiens
tcgagttgaaaaaca

SEQ ID NO: 827388 - DNA, 15 bp, Homo sapiens
ttcgagttgaaaaac

SEQ ID NO: 827389 - DNA, 15 bp, Homo sapiens
attcgagttgaaaaa

SEQ ID NO: 827390 - DNA, 15 bp, Homo sapiens
aattcgagttgaaaa

SEQ ID NO: 827391 - DNA, 15 bp, Homo sapiens
gaattcgagttgaaa

SEQ ID NO: 827392 - DNA, 15 bp, Homo sapiens
agaattcgagttgaa

SEQ ID NO: 827393 - DNA, 15 bp, Homo sapiens
cagaattcgagttga

SEQ ID NO: 827394 - DNA, 15 bp, Homo sapiens
gcagaattcgagttg

SEQ ID NO: 827395 - DNA, 15 bp, Homo sapiens
ggcagaattcgagtt

SEQ ID NO: 827396 - DNA, 15 bp, Homo sapiens
tggcagaattcgagt

SEQ ID NO: 827397 - DNA, 15 bp, Homo sapiens
atggcagaattcgag

SEQ ID NO: 827398 - DNA, 15 bp, Homo sapiens
aatggcagaattcga

SEQ ID NO: 827399 - DNA, 15 bp, Homo sapiens
taatggcagaattcg

SEQ ID NO: 827400 - DNA, 15 bp, Homo sapiens
ctaatggcagaattc

SEQ ID NO: 827401 - DNA, 15 bp, Homo sapiens
actaatggcagaatt

SEQ ID NO: 827402 - DNA, 15 bp, Homo sapiens
aactaatggcagaat

SEQ ID NO: 827403 - DNA, 15 bp, Homo sapiens
aaactaatggcagaa

SEQ ID NO: 827404 - DNA, 15 bp, Homo sapiens
aaaactaatggcaga

SEQ ID NO: 827405 - DNA, 15 bp, Homo sapiens
taaaactaatggcag

SEQ ID NO: 827406 - DNA, 15 bp, Homo sapiens
ttaaaactaatggca

SEQ ID NO: 827407 - DNA, 15 bp, Homo sapiens
attaaaactaatggc

SEQ ID NO: 827408 - DNA, 15 bp, Homo sapiens
aattaaaactaatgg

SEQ ID NO: 827409 - DNA, 15 bp, Homo sapiens
aaattaaaactaatg

SEQ ID NO: 827410 - DNA, 15 bp, Homo sapiens
aaaattaaaactaat

SEQ ID NO: 827411 - DNA, 15 bp, Homo sapiens
aaaaattaaaactaa

SEQ ID NO: 827412 - DNA, 15 bp, Homo sapiens
caaaaattaaaacta

SEQ ID NO: 827413 - DNA, 15 bp, Homo sapiens
acaaaaattaaaact

SEQ ID NO: 827414 - DNA, 15 bp, Homo sapiens
aacaaaaattaaaac

SEQ ID NO: 827415 - DNA, 15 bp, Homo sapiens
gaacaaaaattaaaa

SEQ ID NO: 827416 - DNA, 15 bp, Homo sapiens
tgaacaaaaattaaa

SEQ ID NO: 827417 - DNA, 15 bp, Homo sapiens
gtgaacaaaaattaa

SEQ ID NO: 827418 - DNA, 15 bp, Homo sapiens
tgtgaacaaaaatta

SEQ ID NO: 827419 - DNA, 15 bp, Homo sapiens
ctgtgaacaaaaatt

SEQ ID NO: 827420 - DNA, 15 bp, Homo sapiens
actgtgaacaaaaat

SEQ ID NO: 827421 - DNA, 15 bp, Homo sapiens
aactgtgaacaaaaa

SEQ ID NO: 827422 - DNA, 15 bp, Homo sapiens
taactgtgaacaaaa

SEQ ID NO: 827423 - DNA, 15 bp, Homo sapiens
ataactgtgaacaaa

SEQ ID NO: 827424 - DNA, 15 bp, Homo sapiens
tataactgtgaacaa

SEQ ID NO: 827425 - DNA, 15 bp, Homo sapiens
atataactgtgaaca

SEQ ID NO: 827426 - DNA, 15 bp, Homo sapiens
tatataactgtgaac

SEQ ID NO: 827427 - DNA, 15 bp, Homo sapiens
ttatataactgtgaa

SEQ ID NO: 827428 - DNA, 15 bp, Homo sapiens
tttatataactgtga

SEQ ID NO: 827429 - DNA, 15 bp, Homo sapiens
atttatataactgtg

SEQ ID NO: 827430 - DNA, 15 bp, Homo sapiens
gatttatataactgt

SEQ ID NO: 827431 - DNA, 15 bp, Homo sapiens
agatttatataactg

SEQ ID NO: 827432 - DNA, 15 bp, Homo sapiens
aagatttatataact

SEQ ID NO: 827433 - DNA, 15 bp, Homo sapiens
aaagatttatataac

SEQ ID NO: 827434 - DNA, 15 bp, Homo sapiens
caaagatttatataa

SEQ ID NO: 827435 - DNA, 15 bp, Homo sapiens
acaaagatttatata

SEQ ID NO: 827436 - DNA, 15 bp, Homo sapiens
aacaaagatttatat

SEQ ID NO: 827437 - DNA, 15 bp, Homo sapiens
gaacaaagatttata

SEQ ID NO: 827438 - DNA, 15 bp, Homo sapiens
tgaacaaagatttat

SEQ ID NO: 827439 - DNA, 15 bp, Homo sapiens
gtgaacaaagattta

SEQ ID NO: 827440 - DNA, 15 bp, Homo sapiens
agtgaacaaagattt

SEQ ID NO: 827441 - DNA, 15 bp, Homo sapiens
cagtgaacaaagatt

SEQ ID NO: 827442 - DNA, 15 bp, Homo sapiens
tcagtgaacaaagat

SEQ ID NO: 827443 - DNA, 15 bp, Homo sapiens
atcagtgaacaaaga

SEQ ID NO: 827444 - DNA, 15 bp, Homo sapiens
tatcagtgaacaaag

SEQ ID NO: 827445 - DNA, 15 bp, Homo sapiens
ctatcagtgaacaaa

SEQ ID NO: 827446 - DNA, 15 bp, Homo sapiens
actatcagtgaacaa

SEQ ID NO: 827447 - DNA, 15 bp, Homo sapiens
gactatcagtgaaca

SEQ ID NO: 827448 - DNA, 15 bp, Homo sapiens
ggactatcagtgaac

SEQ ID NO: 827449 - DNA, 15 bp, Homo sapiens
aggactatcagtgaa

SEQ ID NO: 827450 - DNA, 15 bp, Homo sapiens
aaggactatcagtga

SEQ ID NO: 827451 - DNA, 15 bp, Homo sapiens
aaaggactatcagtg

SEQ ID NO: 827452 - DNA, 15 bp, Homo sapiens
aaaaggactatcagt

SEQ ID NO: 827453 - DNA, 15 bp, Homo sapiens
caaaaggactatcag

SEQ ID NO: 827454 - DNA, 15 bp, Homo sapiens
acaaaaggactatca

SEQ ID NO: 827455 - DNA, 15 bp, Homo sapiens
tacaaaaggactatc

SEQ ID NO: 827456 - DNA, 15 bp, Homo sapiens
gtacaaaaggactat

SEQ ID NO: 827457 - DNA, 15 bp, Homo sapiens
agtacaaaaggacta

SEQ ID NO: 827458 - DNA, 15 bp, Homo sapiens
tagtacaaaaggact

SEQ ID NO: 827459 - DNA, 15 bp, Homo sapiens
atagtacaaaaggac

SEQ ID NO: 827460 - DNA, 15 bp, Homo sapiens
gatagtacaaaagga

SEQ ID NO: 827461 - DNA, 15 bp, Homo sapiens
tgatagtacaaaagg

SEQ ID NO: 827462 - DNA, 15 bp, Homo sapiens
atgatagtacaaaag

SEQ ID NO: 827463 - DNA, 15 bp, Homo sapiens
gatgatagtacaaaa

SEQ ID NO: 827464 - DNA, 15 bp, Homo sapiens
agatgatagtacaaa

SEQ ID NO: 827465 - DNA, 15 bp, Homo sapiens
gagatgatagtacaa

SEQ ID NO: 827466 - DNA, 15 bp, Homo sapiens
agagatgatagtaca

SEQ ID NO: 827467 - DNA, 15 bp, Homo sapiens
aagagatgatagtac

SEQ ID NO: 827468 - DNA, 15 bp, Homo sapiens
taagagatgatagta

SEQ ID NO: 827469 - DNA, 15 bp, Homo sapiens
ttaagagatgatagt

SEQ ID NO: 827470 - DNA, 15 bp, Homo sapiens
tttaagagatgatag

SEQ ID NO: 827471 - DNA, 15 bp, Homo sapiens
atttaagagatgata

SEQ ID NO: 827472 - DNA, 15 bp, Homo sapiens
catttaagagatgat

SEQ ID NO: 827473 - DNA, 15 bp, Homo sapiens
tcatttaagagatga

SEQ ID NO: 827474 - DNA, 15 bp, Homo sapiens
gtcatttaagagatg

SEQ ID NO: 827475 - DNA, 15 bp, Homo sapiens
agtcatttaagagat

SEQ ID NO: 827476 - DNA, 15 bp, Homo sapiens
aagtcatttaagaga

SEQ ID NO: 827477 - DNA, 15 bp, Homo sapiens
aaagtcatttaagag

SEQ ID NO: 827478 - DNA, 15 bp, Homo sapiens
taaagtcatttaaga

SEQ ID NO: 827479 - DNA, 15 bp, Homo sapiens
ataaagtcatttaag

SEQ ID NO: 827480 - DNA, 15 bp, Homo sapiens
tataaagtcatttaa

SEQ ID NO: 827481 - DNA, 15 bp, Homo sapiens
gtataaagtcattta

SEQ ID NO: 827482 - DNA, 15 bp, Homo sapiens
agtataaagtcattt

SEQ ID NO: 827483 - DNA, 15 bp, Homo sapiens
gagtataaagtcatt

SEQ ID NO: 827484 - DNA, 15 bp, Homo sapiens
ggagtataaagtcat

SEQ ID NO: 827485 - DNA, 15 bp, Homo sapiens
tggagtataaagtca

SEQ ID NO: 827486 - DNA, 15 bp, Homo sapiens
ttggagtataaagtc

SEQ ID NO: 827487 - DNA, 15 bp, Homo sapiens
cttggagtataaagt

SEQ ID NO: 827488 - DNA, 15 bp, Homo sapiens
tcttggagtataaag

SEQ ID NO: 827489 - DNA, 15 bp, Homo sapiens
ttcttggagtataaa

SEQ ID NO: 827490 - DNA, 15 bp, Homo sapiens
tttcttggagtataa

SEQ ID NO: 827491 - DNA, 15 bp, Homo sapiens
ctttcttggagtata

SEQ ID NO: 827492 - DNA, 15 bp, Homo sapiens
cctttcttggagtat

SEQ ID NO: 827493 - DNA, 15 bp, Homo sapiens
gcctttcttggagta

SEQ ID NO: 827494 - DNA, 15 bp, Homo sapiens
agcctttcttggagt

SEQ ID NO: 827495 - DNA, 15 bp, Homo sapiens
gagcctttcttggag

SEQ ID NO: 827496 - DNA, 15 bp, Homo sapiens
tgagcctttcttgga

SEQ ID NO: 827497 - DNA, 15 bp, Homo sapiens
atgagcctttcttgg

SEQ ID NO: 827498 - DNA, 15 bp, Homo sapiens
catgagcctttcttg

SEQ ID NO: 827499 - DNA, 15 bp, Homo sapiens
ccatgagcctttctt

SEQ ID NO: 827500 - DNA, 15 bp, Homo sapiens
cccatgagcctttct

SEQ ID NO: 827501 - DNA, 15 bp, Homo sapiens
tcccatgagcctttc

SEQ ID NO: 827502 - DNA, 15 bp, Homo sapiens
ttcccatgagccttt

SEQ ID NO: 827503 - DNA, 15 bp, Homo sapiens
gttcccatgagcctt

SEQ ID NO: 827504 - DNA, 15 bp, Homo sapiens
tgttcccatgagcct

SEQ ID NO: 827505 - DNA, 15 bp, Homo sapiens
ttgttcccatgagcc

SEQ ID NO: 827506 - DNA, 15 bp, Homo sapiens
attgttcccatgagc

SEQ ID NO: 827507 - DNA, 15 bp, Homo sapiens
tattgttcccatgag

SEQ ID NO: 827508 - DNA, 15 bp, Homo sapiens
atattgttcccatga

SEQ ID NO: 827509 - DNA, 15 bp, Homo sapiens
aatattgttcccatg

SEQ ID NO: 827510 - DNA, 15 bp, Homo sapiens
taatattgttcccat

SEQ ID NO: 827511 - DNA, 15 bp, Homo sapiens
gtaatattgttccca

SEQ ID NO: 827512 - DNA, 15 bp, Homo sapiens
ggtaatattgttccc

SEQ ID NO: 827513 - DNA, 15 bp, Homo sapiens
aggtaatattgttcc

SEQ ID NO: 827514 - DNA, 15 bp, Homo sapiens
caggtaatattgttc

SEQ ID NO: 827515 - DNA, 15 bp, Homo sapiens
tcaggtaatattgtt

SEQ ID NO: 827516 - DNA, 15 bp, Homo sapiens
ttcaggtaatattgt

SEQ ID NO: 827517 - DNA, 15 bp, Homo sapiens
attcaggtaatattg

SEQ ID NO: 827518 - DNA, 15 bp, Homo sapiens
tattcaggtaatatt

SEQ ID NO: 827519 - DNA, 15 bp, Homo sapiens
atattcaggtaatat

SEQ ID NO: 827520 - DNA, 15 bp, Homo sapiens
catattcaggtaata

SEQ ID NO: 827521 - DNA, 15 bp, Homo sapiens
acatattcaggtaat

SEQ ID NO: 827522 - DNA, 15 bp, Homo sapiens
gacatattcaggtaa

SEQ ID NO: 827523 - DNA, 15 bp, Homo sapiens
agacatattcaggta

SEQ ID NO: 827524 - DNA, 15 bp, Homo sapiens
gagacatattcaggt

SEQ ID NO: 827525 - DNA, 15 bp, Homo sapiens
agagacatattcagg

SEQ ID NO: 827526 - DNA, 15 bp, Homo sapiens
tagagacatattcag

SEQ ID NO: 827527 - DNA, 15 bp, Homo sapiens
atagagacatattca

SEQ ID NO: 827528 - DNA, 15 bp, Homo sapiens
aatagagacatattc

SEQ ID NO: 827529 - DNA, 15 bp, Homo sapiens
taatagagacatatt

SEQ ID NO: 827530 - DNA, 15 bp, Homo sapiens
gtaatagagacatat

SEQ ID NO: 827531 - DNA, 15 bp, Homo sapiens
agtaatagagacata

SEQ ID NO: 827532 - DNA, 15 bp, Homo sapiens
aagtaatagagacat

SEQ ID NO: 827533 - DNA, 15 bp, Homo sapiens
taagtaatagagaca

SEQ ID NO: 827534 - DNA, 15 bp, Homo sapiens
ttaagtaatagagac

SEQ ID NO: 827535 - DNA, 15 bp, Homo sapiens
attaagtaatagaga

SEQ ID NO: 827536 - DNA, 15 bp, Homo sapiens
gattaagtaatagag

SEQ ID NO: 827537 - DNA, 15 bp, Homo sapiens
agattaagtaataga

SEQ ID NO: 827538 - DNA, 15 bp, Homo sapiens
cagattaagtaatag

SEQ ID NO: 827539 - DNA, 15 bp, Homo sapiens
acagattaagtaata

SEQ ID NO: 827540 - DNA, 15 bp, Homo sapiens
tacagattaagtaat

SEQ ID NO: 827541 - DNA, 15 bp, Homo sapiens
gtacagattaagtaa

SEQ ID NO: 827542 - DNA, 15 bp, Homo sapiens
ggtacagattaagta

SEQ ID NO: 827543 - DNA, 15 bp, Homo sapiens
aggtacagattaagt

SEQ ID NO: 827544 - DNA, 15 bp, Homo sapiens
taggtacagattaag

SEQ ID NO: 827545 - DNA, 15 bp, Homo sapiens
ttaggtacagattaa

SEQ ID NO: 827546 - DNA, 15 bp, Homo sapiens
attaggtacagatta

SEQ ID NO: 827547 - DNA, 15 bp, Homo sapiens
tattaggtacagatt

SEQ ID NO: 827548 - DNA, 15 bp, Homo sapiens
ttattaggtacagat

SEQ ID NO: 827549 - DNA, 15 bp, Homo sapiens
attattaggtacaga

SEQ ID NO: 827550 - DNA, 15 bp, Homo sapiens
tattattaggtacag

SEQ ID NO: 827551 - DNA, 15 bp, Homo sapiens
atattattaggtaca

SEQ ID NO: 827552 - DNA, 15 bp, Homo sapiens
catattattaggtac

SEQ ID NO: 827553 - DNA, 15 bp, Homo sapiens
tcatattattaggta

SEQ ID NO: 827554 - DNA, 15 bp, Homo sapiens
ttcatattattaggt

SEQ ID NO: 827555 - DNA, 15 bp, Homo sapiens
cttcatattattagg

SEQ ID NO: 827556 - DNA, 15 bp, Homo sapiens
ccttcatattattag

SEQ ID NO: 827557 - DNA, 15 bp, Homo sapiens
accttcatattatta

SEQ ID NO: 827558 - DNA, 15 bp, Homo sapiens
taccttcatattatt

SEQ ID NO: 827559 - DNA, 15 bp, Homo sapiens
ttaccttcatattat

SEQ ID NO: 827560 - DNA, 15 bp, Homo sapiens
attaccttcatatta

SEQ ID NO: 827561 - DNA, 15 bp, Homo sapiens
gattaccttcatatt

SEQ ID NO: 827562 - DNA, 15 bp, Homo sapiens
agattaccttcatat

SEQ ID NO: 827563 - DNA, 15 bp, Homo sapiens
tagattaccttcata

SEQ ID NO: 827564 - DNA, 15 bp, Homo sapiens
gtagattaccttcat

SEQ ID NO: 827565 - DNA, 15 bp, Homo sapiens
agtagattaccttca

SEQ ID NO: 827566 - DNA, 15 bp, Homo sapiens
aagtagattaccttc

SEQ ID NO: 827567 - DNA, 15 bp, Homo sapiens
aaagtagattacctt

SEQ ID NO: 827568 - DNA, 15 bp, Homo sapiens
caaagtagattacct

SEQ ID NO: 827569 - DNA, 15 bp, Homo sapiens
acaaagtagattacc

SEQ ID NO: 827570 - DNA, 15 bp, Homo sapiens
tacaaagtagattac

SEQ ID NO: 827571 - DNA, 15 bp, Homo sapiens
ctacaaagtagatta

SEQ ID NO: 827572 - DNA, 15 bp, Homo sapiens
cctacaaagtagatt

SEQ ID NO: 827573 - DNA, 15 bp, Homo sapiens
tcctacaaagtagat

SEQ ID NO: 827574 - DNA, 15 bp, Homo sapiens
atcctacaaagtaga

SEQ ID NO: 827575 - DNA, 15 bp, Homo sapiens
aatcctacaaagtag

SEQ ID NO: 827576 - DNA, 15 bp, Homo sapiens
aaatcctacaaagta

SEQ ID NO: 827577 - DNA, 15 bp, Homo sapiens
gaaatcctacaaagt

SEQ ID NO: 827578 - DNA, 15 bp, Homo sapiens
agaaatcctacaaag

SEQ ID NO: 827579 - DNA, 15 bp, Homo sapiens
cagaaatcctacaaa

SEQ ID NO: 827580 - DNA, 15 bp, Homo sapiens
acagaaatcctacaa

SEQ ID NO: 827581 - DNA, 15 bp, Homo sapiens
cacagaaatcctaca

SEQ ID NO: 827582 - DNA, 15 bp, Homo sapiens
tcacagaaatcctac

SEQ ID NO: 827583 - DNA, 15 bp, Homo sapiens
ttcacagaaatccta

SEQ ID NO: 827584 - DNA, 15 bp, Homo sapiens
cttcacagaaatcct

SEQ ID NO: 827585 - DNA, 15 bp, Homo sapiens
tcttcacagaaatcc

SEQ ID NO: 827586 - DNA, 15 bp, Homo sapiens
atcttcacagaaatc

SEQ ID NO: 827587 - DNA, 15 bp, Homo sapiens
aatcttcacagaaat

SEQ ID NO: 827588 - DNA, 15 bp, Homo sapiens
taatcttcacagaaa

SEQ ID NO: 827589 - DNA, 15 bp, Homo sapiens
ttaatcttcacagaa

SEQ ID NO: 827590 - DNA, 15 bp, Homo sapiens
tttaatcttcacaga

SEQ ID NO: 827591 - DNA, 15 bp, Homo sapiens
atttaatcttcacag

SEQ ID NO: 827592 - DNA, 15 bp, Homo sapiens
tatttaatcttcaca

SEQ ID NO: 827593 - DNA, 15 bp, Homo sapiens
ttatttaatcttcac

SEQ ID NO: 827594 - DNA, 15 bp, Homo sapiens
tttatttaatcttca

SEQ ID NO: 827595 - DNA, 15 bp, Homo sapiens
atttatttaatcttc

SEQ ID NO: 827596 - DNA, 15 bp, Homo sapiens
aatttatttaatctt

SEQ ID NO: 827597 - DNA, 15 bp, Homo sapiens
taatttatttaatct

SEQ ID NO: 827598 - DNA, 15 bp, Homo sapiens
ttaatttatttaatc

SEQ ID NO: 827599 - DNA, 15 bp, Homo sapiens
attaatttatttaat

SEQ ID NO: 827600 - DNA, 15 bp, Homo sapiens
tattaatttatttaa

SEQ ID NO: 827601 - DNA, 15 bp, Homo sapiens
atattaatttattta

SEQ ID NO: 827602 - DNA, 15 bp, Homo sapiens
tatattaatttattt

SEQ ID NO: 827603 - DNA, 15 bp, Homo sapiens
ctatattaatttatt

SEQ ID NO: 827604 - DNA, 15 bp, Homo sapiens
actatattaatttat

SEQ ID NO: 827605 - DNA, 15 bp, Homo sapiens
aactatattaattta

SEQ ID NO: 827606 - DNA, 15 bp, Homo sapiens
taactatattaattt

SEQ ID NO: 827607 - DNA, 15 bp, Homo sapiens
ttaactatattaatt

SEQ ID NO: 827608 - DNA, 15 bp, Homo sapiens
tttaactatattaat

SEQ ID NO: 827609 - DNA, 15 bp, Homo sapiens
ctttaactatattaa

SEQ ID NO: 827610 - DNA, 15 bp, Homo sapiens
gctttaactatatta

SEQ ID NO: 827611 - DNA, 15 bp, Homo sapiens
tgctttaactatatt

SEQ ID NO: 827612 - DNA, 15 bp, Homo sapiens
gtgctttaactatat

SEQ ID NO: 827613 - DNA, 15 bp, Homo sapiens
tgtgctttaactata

SEQ ID NO: 827614 - DNA, 15 bp, Homo sapiens
atgtgctttaactat

SEQ ID NO: 827615 - DNA, 15 bp, Homo sapiens
tatgtgctttaacta

SEQ ID NO: 827616 - DNA, 15 bp, Homo sapiens
ctatgtgctttaact

SEQ ID NO: 827617 - DNA, 15 bp, Homo sapiens
tctatgtgctttaac

SEQ ID NO: 827618 - DNA, 15 bp, Homo sapiens
ttctatgtgctttaa

SEQ ID NO: 827619 - DNA, 15 bp, Homo sapiens
gttctatgtgcttta

SEQ ID NO: 827620 - DNA, 15 bp, Homo sapiens
tgttctatgtgcttt

SEQ ID NO: 827621 - DNA, 15 bp, Homo sapiens
ctgttctatgtgctt

SEQ ID NO: 827622 - DNA, 15 bp, Homo sapiens
gctgttctatgtgct

SEQ ID NO: 827623 - DNA, 15 bp, Homo sapiens
tgctgttctatgtgc

SEQ ID NO: 827624 - DNA, 15 bp, Homo sapiens
gtgctgttctatgtg

SEQ ID NO: 827625 - DNA, 15 bp, Homo sapiens
agtgctgttctatgt

SEQ ID NO: 827626 - DNA, 15 bp, Homo sapiens
gagtgctgttctatg

SEQ ID NO: 827627 - DNA, 15 bp, Homo sapiens
cgagtgctgttctat

SEQ ID NO: 827628 - DNA, 15 bp, Homo sapiens
tcgagtgctgttcta

SEQ ID NO: 827629 - DNA, 15 bp, Homo sapiens
gtcgagtgctgttct

SEQ ID NO: 827630 - DNA, 15 bp, Homo sapiens
tgtcgagtgctgttc

SEQ ID NO: 827631 - DNA, 15 bp, Homo sapiens
gtgtcgagtgctgtt

SEQ ID NO: 827632 - DNA, 15 bp, Homo sapiens
tgtgtcgagtgctgt

SEQ ID NO: 827633 - DNA, 15 bp, Homo sapiens
ctgtgtcgagtgctg

SEQ ID NO: 827634 - DNA, 15 bp, Homo sapiens
tctgtgtcgagtgct

SEQ ID NO: 827635 - DNA, 15 bp, Homo sapiens
ctctgtgtcgagtgc

SEQ ID NO: 827636 - DNA, 15 bp, Homo sapiens
actctgtgtcgagtg

SEQ ID NO: 827637 - DNA, 15 bp, Homo sapiens
cactctgtgtcgagt

SEQ ID NO: 827638 - DNA, 15 bp, Homo sapiens
tcactctgtgtcgag

SEQ ID NO: 827639 - DNA, 15 bp, Homo sapiens
ctcactctgtgtcga

SEQ ID NO: 827640 - DNA, 15 bp, Homo sapiens
gctcactctgtgtcg

SEQ ID NO: 827641 - DNA, 15 bp, Homo sapiens
tgctcactctgtgtc

SEQ ID NO: 827642 - DNA, 15 bp, Homo sapiens
gtgctcactctgtgt

SEQ ID NO: 827643 - DNA, 15 bp, Homo sapiens
agtgctcactctgtg

SEQ ID NO: 827644 - DNA, 15 bp, Homo sapiens
aagtgctcactctgt

SEQ ID NO: 827645 - DNA, 15 bp, Homo sapiens
caagtgctcactctg

SEQ ID NO: 827646 - DNA, 15 bp, Homo sapiens
ccaagtgctcactct

SEQ ID NO: 827647 - DNA, 15 bp, Homo sapiens
gccaagtgctcactc

SEQ ID NO: 827648 - DNA, 15 bp, Homo sapiens
tgccaagtgctcact

SEQ ID NO: 827649 - DNA, 15 bp, Homo sapiens
ttgccaagtgctcac

SEQ ID NO: 827650 - DNA, 15 bp, Homo sapiens
gttgccaagtgctca

SEQ ID NO: 827651 - DNA, 15 bp, Homo sapiens
agttgccaagtgctc

SEQ ID NO: 827652 - DNA, 15 bp, Homo sapiens
cagttgccaagtgct

SEQ ID NO: 827653 - DNA, 15 bp, Homo sapiens
acagttgccaagtgc

SEQ ID NO: 827654 - DNA, 15 bp, Homo sapiens
aacagttgccaagtg

SEQ ID NO: 827655 - DNA, 15 bp, Homo sapiens
taacagttgccaagt

SEQ ID NO: 827656 - DNA, 15 bp, Homo sapiens
ctaacagttgccaag

SEQ ID NO: 827657 - DNA, 15 bp, Homo sapiens
gctaacagttgccaa

SEQ ID NO: 827658 - DNA, 15 bp, Homo sapiens
agctaacagttgcca

SEQ ID NO: 827659 - DNA, 15 bp, Homo sapiens
cagctaacagttgcc

SEQ ID NO: 827660 - DNA, 15 bp, Homo sapiens
acagctaacagttgc

SEQ ID NO: 827661 - DNA, 15 bp, Homo sapiens
aacagctaacagttg

SEQ ID NO: 827662 - DNA, 15 bp, Homo sapiens
taacagctaacagtt

SEQ ID NO: 827663 - DNA, 15 bp, Homo sapiens
gtaacagctaacagt

SEQ ID NO: 827664 - DNA, 15 bp, Homo sapiens
agtaacagctaacag

SEQ ID NO: 827665 - DNA, 15 bp, Homo sapiens
tagtaacagctaaca

SEQ ID NO: 827666 - DNA, 15 bp, Homo sapiens
ttagtaacagctaac

SEQ ID NO: 827667 - DNA, 15 bp, Homo sapiens
gttagtaacagctaa

SEQ ID NO: 827668 - DNA, 15 bp, Homo sapiens
ggttagtaacagcta

SEQ ID NO: 827669 - DNA, 15 bp, Homo sapiens
aggttagtaacagct

SEQ ID NO: 827670 - DNA, 15 bp, Homo sapiens
aaggttagtaacagc

SEQ ID NO: 827671 - DNA, 15 bp, Homo sapiens
aaaggttagtaacag

SEQ ID NO: 827672 - DNA, 15 bp, Homo sapiens
gaaaggttagtaaca

SEQ ID NO: 827673 - DNA, 15 bp, Homo sapiens
ggaaaggttagtaac

SEQ ID NO: 827674 - DNA, 15 bp, Homo sapiens
gggaaaggttagtaa

SEQ ID NO: 827675 - DNA, 15 bp, Homo sapiens
tgggaaaggttagta

SEQ ID NO: 827676 - DNA, 15 bp, Homo sapiens
atgggaaaggttagt

SEQ ID NO: 827677 - DNA, 15 bp, Homo sapiens
aatgggaaaggttag

SEQ ID NO: 827678 - DNA, 15 bp, Homo sapiens
gaatgggaaaggtta

SEQ ID NO: 827679 - DNA, 15 bp, Homo sapiens
agaatgggaaaggtt

SEQ ID NO: 827680 - DNA, 15 bp, Homo sapiens
aagaatgggaaaggt

SEQ ID NO: 827681 - DNA, 15 bp, Homo sapiens
gaagaatgggaaagg

SEQ ID NO: 827682 - DNA, 15 bp, Homo sapiens
ggaagaatgggaaag

SEQ ID NO: 827683 - DNA, 15 bp, Homo sapiens
aggaagaatgggaaa

SEQ ID NO: 827684 - DNA, 15 bp, Homo sapiens
gaggaagaatgggaa

SEQ ID NO: 827685 - DNA, 15 bp, Homo sapiens
ggaggaagaatggga

SEQ ID NO: 827686 - DNA, 15 bp, Homo sapiens
tggaggaagaatggg

SEQ ID NO: 827687 - DNA, 15 bp, Homo sapiens
ttggaggaagaatgg

SEQ ID NO: 827688 - DNA, 15 bp, Homo sapiens
tttggaggaagaatg

SEQ ID NO: 827689 - DNA, 15 bp, Homo sapiens
gtttggaggaagaat

SEQ ID NO: 827690 - DNA, 15 bp, Homo sapiens
ggtttggaggaagaa

SEQ ID NO: 827691 - DNA, 15 bp, Homo sapiens
aggtttggaggaaga

SEQ ID NO: 827692 - DNA, 15 bp, Homo sapiens
taggtttggaggaag

SEQ ID NO: 827693 - DNA, 15 bp, Homo sapiens
ataggtttggaggaa

SEQ ID NO: 827694 - DNA, 15 bp, Homo sapiens
aataggtttggagga

SEQ ID NO: 827695 - DNA, 15 bp, Homo sapiens
gaataggtttggagg

SEQ ID NO: 827696 - DNA, 15 bp, Homo sapiens
ggaataggtttggag

SEQ ID NO: 827697 - DNA, 15 bp, Homo sapiens
tggaataggtttgga

SEQ ID NO: 827698 - DNA, 15 bp, Homo sapiens
ttggaataggtttgg

SEQ ID NO: 827699 - DNA, 15 bp, Homo sapiens
gttggaataggtttg

SEQ ID NO: 827700 - DNA, 15 bp, Homo sapiens
agttggaataggttt

SEQ ID NO: 827701 - DNA, 15 bp, Homo sapiens
tagttggaataggtt

SEQ ID NO: 827702 - DNA, 15 bp, Homo sapiens
atagttggaataggt

SEQ ID NO: 827703 - DNA, 15 bp, Homo sapiens
gatagttggaatagg

SEQ ID NO: 827704 - DNA, 15 bp, Homo sapiens
agatagttggaatag

SEQ ID NO: 827705 - DNA, 15 bp, Homo sapiens
cagatagttggaata

SEQ ID NO: 827706 - DNA, 15 bp, Homo sapiens
tcagatagttggaat

SEQ ID NO: 827707 - DNA, 15 bp, Homo sapiens
ttcagatagttggaa

SEQ ID NO: 827708 - DNA, 15 bp, Homo sapiens
attcagatagttgga

SEQ ID NO: 827709 - DNA, 15 bp, Homo sapiens
gattcagatagttgg

SEQ ID NO: 827710 - DNA, 15 bp, Homo sapiens
tgattcagatagttg

SEQ ID NO: 827711 - DNA, 15 bp, Homo sapiens
atgattcagatagtt

SEQ ID NO: 827712 - DNA, 15 bp, Homo sapiens
catgattcagatagt

SEQ ID NO: 827713 - DNA, 15 bp, Homo sapiens
acatgattcagatag

SEQ ID NO: 827714 - DNA, 15 bp, Homo sapiens
cacatgattcagata

SEQ ID NO: 827715 - DNA, 15 bp, Homo sapiens
gcacatgattcagat

SEQ ID NO: 827716 - DNA, 15 bp, Homo sapiens
ggcacatgattcaga

SEQ ID NO: 827717 - DNA, 15 bp, Homo sapiens
gggcacatgattcag

SEQ ID NO: 827718 - DNA, 15 bp, Homo sapiens
ggggcacatgattca

SEQ ID NO: 827719 - DNA, 15 bp, Homo sapiens
aggggcacatgattc

SEQ ID NO: 827720 - DNA, 15 bp, Homo sapiens
aaggggcacatgatt

SEQ ID NO: 827721 - DNA, 15 bp, Homo sapiens
gaaggggcacatgat

SEQ ID NO: 827722 - DNA, 15 bp, Homo sapiens
agaaggggcacatga

SEQ ID NO: 827723 - DNA, 15 bp, Homo sapiens
gagaaggggcacatg

SEQ ID NO: 827724 - DNA, 15 bp, Homo sapiens
agagaaggggcacat

SEQ ID NO: 827725 - DNA, 15 bp, Homo sapiens
cagagaaggggcaca

SEQ ID NO: 827726 - DNA, 15 bp, Homo sapiens
acagagaaggggcac

SEQ ID NO: 827727 - DNA, 15 bp, Homo sapiens
cacagagaaggggca

SEQ ID NO: 827728 - DNA, 15 bp, Homo sapiens
tcacagagaaggggc

SEQ ID NO: 827729 - DNA, 15 bp, Homo sapiens
ttcacagagaagggg

SEQ ID NO: 827730 - DNA, 15 bp, Homo sapiens
gttcacagagaaggg

SEQ ID NO: 827731 - DNA, 15 bp, Homo sapiens
ggttcacagagaagg

SEQ ID NO: 827732 - DNA, 15 bp, Homo sapiens
aggttcacagagaag

SEQ ID NO: 827733 - DNA, 15 bp, Homo sapiens
gaggttcacagagaa

SEQ ID NO: 827734 - DNA, 15 bp, Homo sapiens
agaggttcacagaga

SEQ ID NO: 827735 - DNA, 15 bp, Homo sapiens
tagaggttcacagag

SEQ ID NO: 827736 - DNA, 15 bp, Homo sapiens
atagaggttcacaga

SEQ ID NO: 827737 - DNA, 15 bp, Homo sapiens
gatagaggttcacag

SEQ ID NO: 827738 - DNA, 15 bp, Homo sapiens
tgatagaggttcaca

SEQ ID NO: 827739 - DNA, 15 bp, Homo sapiens
atgatagaggttcac

SEQ ID NO: 827740 - DNA, 15 bp, Homo sapiens
tatgatagaggttca

SEQ ID NO: 827741 - DNA, 15 bp, Homo sapiens
ttatgatagaggttc

SEQ ID NO: 827742 - DNA, 15 bp, Homo sapiens
attatgatagaggtt

SEQ ID NO: 827743 - DNA, 15 bp, Homo sapiens
tattatgatagaggt

SEQ ID NO: 827744 - DNA, 15 bp, Homo sapiens
gtattatgatagagg

SEQ ID NO: 827745 - DNA, 15 bp, Homo sapiens
agtattatgatagag

SEQ ID NO: 827746 - DNA, 15 bp, Homo sapiens
aagtattatgataga

SEQ ID NO: 827747 - DNA, 15 bp, Homo sapiens
caagtattatgatag

SEQ ID NO: 827748 - DNA, 15 bp, Homo sapiens
acaagtattatgata

SEQ ID NO: 827749 - DNA, 15 bp, Homo sapiens
gacaagtattatgat

SEQ ID NO: 827750 - DNA, 15 bp, Homo sapiens
tgacaagtattatga

SEQ ID NO: 827751 - DNA, 15 bp, Homo sapiens
gtgacaagtattatg

SEQ ID NO: 827752 - DNA, 15 bp, Homo sapiens
tgtgacaagtattat

SEQ ID NO: 827753 - DNA, 15 bp, Homo sapiens
gtgtgacaagtatta

SEQ ID NO: 827754 - DNA, 15 bp, Homo sapiens
agtgtgacaagtatt

SEQ ID NO: 827755 - DNA, 15 bp, Homo sapiens
cagtgtgacaagtat

SEQ ID NO: 827756 - DNA, 15 bp, Homo sapiens
acagtgtgacaagta

SEQ ID NO: 827757 - DNA, 15 bp, Homo sapiens
tacagtgtgacaagt

SEQ ID NO: 827758 - DNA, 15 bp, Homo sapiens
atacagtgtgacaag

SEQ ID NO: 827759 - DNA, 15 bp, Homo sapiens
aatacagtgtgacaa

SEQ ID NO: 827760 - DNA, 15 bp, Homo sapiens
caatacagtgtgaca

SEQ ID NO: 827761 - DNA, 15 bp, Homo sapiens
acaatacagtgtgac

SEQ ID NO: 827762 - DNA, 15 bp, Homo sapiens
tacaatacagtgtga

SEQ ID NO: 827763 - DNA, 15 bp, Homo sapiens
ttacaatacagtgtg

SEQ ID NO: 827764 - DNA, 15 bp, Homo sapiens
attacaatacagtgt

SEQ ID NO: 827765 - DNA, 15 bp, Homo sapiens
aattacaatacagtg

SEQ ID NO: 827766 - DNA, 15 bp, Homo sapiens
caattacaatacagt

SEQ ID NO: 827767 - DNA, 15 bp, Homo sapiens
acaattacaatacag

SEQ ID NO: 827768 - DNA, 15 bp, Homo sapiens
gacaattacaataca

SEQ ID NO: 827769 - DNA, 15 bp, Homo sapiens
agacaattacaatac

SEQ ID NO: 827770 - DNA, 15 bp, Homo sapiens
gagacaattacaata

SEQ ID NO: 827771 - DNA, 15 bp, Homo sapiens
agagacaattacaat

SEQ ID NO: 827772 - DNA, 15 bp, Homo sapiens
aagagacaattacaa

SEQ ID NO: 827773 - DNA, 15 bp, Homo sapiens
aaagagacaattaca

SEQ ID NO: 827774 - DNA, 15 bp, Homo sapiens
aaaagagacaattac

SEQ ID NO: 827775 - DNA, 15 bp, Homo sapiens
taaaagagacaatta

SEQ ID NO: 827776 - DNA, 15 bp, Homo sapiens
gtaaaagagacaatt

SEQ ID NO: 827777 - DNA, 15 bp, Homo sapiens
agtaaaagagacaat

SEQ ID NO: 827778 - DNA, 15 bp, Homo sapiens
aagtaaaagagacaa

SEQ ID NO: 827779 - DNA, 15 bp, Homo sapiens
aaagtaaaagagaca

SEQ ID NO: 827780 - DNA, 15 bp, Homo sapiens
gaaagtaaaagagac

SEQ ID NO: 827781 - DNA, 15 bp, Homo sapiens
ggaaagtaaaagaga

SEQ ID NO: 827782 - DNA, 15 bp, Homo sapiens
gggaaagtaaaagag

SEQ ID NO: 827783 - DNA, 15 bp, Homo sapiens
agggaaagtaaaaga

SEQ ID NO: 827784 - DNA, 15 bp, Homo sapiens
aagggaaagtaaaag

SEQ ID NO: 827785 - DNA, 15 bp, Homo sapiens
caagggaaagtaaaa

SEQ ID NO: 827786 - DNA, 15 bp, Homo sapiens
acaagggaaagtaaa

SEQ ID NO: 827787 - DNA, 15 bp, Homo sapiens
tacaagggaaagtaa

SEQ ID NO: 827788 - DNA, 15 bp, Homo sapiens
atacaagggaaagta

SEQ ID NO: 827789 - DNA, 15 bp, Homo sapiens
gatacaagggaaagt

SEQ ID NO: 827790 - DNA, 15 bp, Homo sapiens
agatacaagggaaag

SEQ ID NO: 827791 - DNA, 15 bp, Homo sapiens
aagatacaagggaaa

SEQ ID NO: 827792 - DNA, 15 bp, Homo sapiens
aaagatacaagggaa

SEQ ID NO: 827793 - DNA, 15 bp, Homo sapiens
aaaagatacaaggga

SEQ ID NO: 827794 - DNA, 15 bp, Homo sapiens
caaaagatacaaggg

SEQ ID NO: 827795 - DNA, 15 bp, Homo sapiens
acaaaagatacaagg

SEQ ID NO: 827796 - DNA, 15 bp, Homo sapiens
cacaaaagatacaag

SEQ ID NO: 827797 - DNA, 15 bp, Homo sapiens
gcacaaaagatacaa

SEQ ID NO: 827798 - DNA, 15 bp, Homo sapiens
tgcacaaaagataca

SEQ ID NO: 827799 - DNA, 15 bp, Homo sapiens
atgcacaaaagatac

SEQ ID NO: 827800 - DNA, 15 bp, Homo sapiens
tatgcacaaaagata

SEQ ID NO: 827801 - DNA, 15 bp, Homo sapiens
ctatgcacaaaagat

SEQ ID NO: 827802 - DNA, 15 bp, Homo sapiens
gctatgcacaaaaga

SEQ ID NO: 827803 - DNA, 15 bp, Homo sapiens
tgctatgcacaaaag

SEQ ID NO: 827804 - DNA, 15 bp, Homo sapiens
ctgctatgcacaaaa

SEQ ID NO: 827805 - DNA, 15 bp, Homo sapiens
tctgctatgcacaaa

SEQ ID NO: 827806 - DNA, 15 bp, Homo sapiens
ctctgctatgcacaa

SEQ ID NO: 827807 - DNA, 15 bp, Homo sapiens
actctgctatgcaca

SEQ ID NO: 827808 - DNA, 15 bp, Homo sapiens
tactctgctatgcac

SEQ ID NO: 827809 - DNA, 15 bp, Homo sapiens
gtactctgctatgca

SEQ ID NO: 827810 - DNA, 15 bp, Homo sapiens
ggtactctgctatgc

SEQ ID NO: 827811 - DNA, 15 bp, Homo sapiens
aggtactctgctatg

SEQ ID NO: 827812 - DNA, 15 bp, Homo sapiens
caggtactctgctat

SEQ ID NO: 827813 - DNA, 15 bp, Homo sapiens
tcaggtactctgcta

SEQ ID NO: 827814 - DNA, 15 bp, Homo sapiens
ttcaggtactctgct

SEQ ID NO: 827815 - DNA, 15 bp, Homo sapiens
tttcaggtactctgc

SEQ ID NO: 827816 - DNA, 15 bp, Homo sapiens
gtttcaggtactctg

SEQ ID NO: 827817 - DNA, 15 bp, Homo sapiens
tgtttcaggtactct

SEQ ID NO: 827818 - DNA, 15 bp, Homo sapiens
ctgtttcaggtactc

SEQ ID NO: 827819 - DNA, 15 bp, Homo sapiens
cctgtttcaggtact

SEQ ID NO: 827820 - DNA, 15 bp, Homo sapiens
tcctgtttcaggtac

SEQ ID NO: 827821 - DNA, 15 bp, Homo sapiens
ttcctgtttcaggta

SEQ ID NO: 827822 - DNA, 15 bp, Homo sapiens
cttcctgtttcaggt

SEQ ID NO: 827823 - DNA, 15 bp, Homo sapiens
acttcctgtttcagg

SEQ ID NO: 827824 - DNA, 15 bp, Homo sapiens
tacttcctgtttcag

SEQ ID NO: 827825 - DNA, 15 bp, Homo sapiens
atacttcctgtttca

SEQ ID NO: 827826 - DNA, 15 bp, Homo sapiens
aatacttcctgtttc

SEQ ID NO: 827827 - DNA, 15 bp, Homo sapiens
aaatacttcctgttt

SEQ ID NO: 827828 - DNA, 15 bp, Homo sapiens
aaaatacttcctgtt

SEQ ID NO: 827829 - DNA, 15 bp, Homo sapiens
taaaatacttcctgt

SEQ ID NO: 827830 - DNA, 15 bp, Homo sapiens
ttaaaatacttcctg

SEQ ID NO: 827831 - DNA, 15 bp, Homo sapiens
tttaaaatacttcct

SEQ ID NO: 827832 - DNA, 15 bp, Homo sapiens
atttaaaatacttcc

SEQ ID NO: 827833 - DNA, 15 bp, Homo sapiens
tatttaaaatacttc

SEQ ID NO: 827834 - DNA, 15 bp, Homo sapiens
atatttaaaatactt

SEQ ID NO: 827835 - DNA, 15 bp, Homo sapiens
aatatttaaaatact

SEQ ID NO: 827836 - DNA, 15 bp, Homo sapiens
aaatatttaaaatac

SEQ ID NO: 827837 - DNA, 15 bp, Homo sapiens
aaaatatttaaaata

SEQ ID NO: 827838 - DNA, 15 bp, Homo sapiens
caaaatatttaaaat

SEQ ID NO: 827839 - DNA, 15 bp, Homo sapiens
tcaaaatatttaaaa

SEQ ID NO: 827840 - DNA, 15 bp, Homo sapiens
ttcaaaatatttaaa

SEQ ID NO: 827841 - DNA, 15 bp, Homo sapiens
attcaaaatatttaa

SEQ ID NO: 827842 - DNA, 15 bp, Homo sapiens
gattcaaaatattta

SEQ ID NO: 827843 - DNA, 15 bp, Homo sapiens
tgattcaaaatattt

SEQ ID NO: 827844 - DNA, 15 bp, Homo sapiens
ttgattcaaaatatt

SEQ ID NO: 827845 - DNA, 15 bp, Homo sapiens
tttgattcaaaatat

SEQ ID NO: 827846 - DNA, 15 bp, Homo sapiens
atttgattcaaaata

SEQ ID NO: 827847 - DNA, 15 bp, Homo sapiens
catttgattcaaaat

SEQ ID NO: 827848 - DNA, 15 bp, Homo sapiens
tcatttgattcaaaa

SEQ ID NO: 827849 - DNA, 15 bp, Homo sapiens
ctcatttgattcaaa

SEQ ID NO: 827850 - DNA, 15 bp, Homo sapiens
actcatttgattcaa

SEQ ID NO: 827851 - DNA, 15 bp, Homo sapiens
aactcatttgattca

SEQ ID NO: 827852 - DNA, 15 bp, Homo sapiens
taactcatttgattc

SEQ ID NO: 827853 - DNA, 15 bp, Homo sapiens
ttaactcatttgatt

SEQ ID NO: 827854 - DNA, 15 bp, Homo sapiens
attaactcatttgat

SEQ ID NO: 827855 - DNA, 15 bp, Homo sapiens
tattaactcatttga

SEQ ID NO: 827856 - DNA, 15 bp, Homo sapiens
ctattaactcatttg

SEQ ID NO: 827857 - DNA, 15 bp, Homo sapiens
tctattaactcattt

SEQ ID NO: 827858 - DNA, 15 bp, Homo sapiens
ttctattaactcatt

SEQ ID NO: 827859 - DNA, 15 bp, Homo sapiens
attctattaactcat

SEQ ID NO: 827860 - DNA, 15 bp, Homo sapiens
gattctattaactca

SEQ ID NO: 827861 - DNA, 15 bp, Homo sapiens
agattctattaactc

SEQ ID NO: 827862 - DNA, 15 bp, Homo sapiens
aagattctattaact

SEQ ID NO: 827863 - DNA, 15 bp, Homo sapiens
aaagattctattaac

SEQ ID NO: 827864 - DNA, 15 bp, Homo sapiens
taaagattctattaa

SEQ ID NO: 827865 - DNA, 15 bp, Homo sapiens
gtaaagattctatta

SEQ ID NO: 827866 - DNA, 15 bp, Homo sapiens
tgtaaagattctatt

SEQ ID NO: 827867 - DNA, 15 bp, Homo sapiens
ttgtaaagattctat

SEQ ID NO: 827868 - DNA, 15 bp, Homo sapiens
tttgtaaagattcta

SEQ ID NO: 827869 - DNA, 15 bp, Homo sapiens
atttgtaaagattct

SEQ ID NO: 827870 - DNA, 15 bp, Homo sapiens
tatttgtaaagattc

SEQ ID NO: 827871 - DNA, 15 bp, Homo sapiens
ttatttgtaaagatt

SEQ ID NO: 827872 - DNA, 15 bp, Homo sapiens
cttatttgtaaagat

SEQ ID NO: 827873 - DNA, 15 bp, Homo sapiens
tcttatttgtaaaga

SEQ ID NO: 827874 - DNA, 15 bp, Homo sapiens
ttcttatttgtaaag

SEQ ID NO: 827875 - DNA, 15 bp, Homo sapiens
attcttatttgtaaa

SEQ ID NO: 827876 - DNA, 15 bp, Homo sapiens
tattcttatttgtaa

SEQ ID NO: 827877 - DNA, 15 bp, Homo sapiens
atattcttatttgta

SEQ ID NO: 827878 - DNA, 15 bp, Homo sapiens
tatattcttatttgt

SEQ ID NO: 827879 - DNA, 15 bp, Homo sapiens
gtatattcttatttg

SEQ ID NO: 827880 - DNA, 15 bp, Homo sapiens
tgtatattcttattt

SEQ ID NO: 827881 - DNA, 15 bp, Homo sapiens
gtgtatattcttatt

SEQ ID NO: 827882 - DNA, 15 bp, Homo sapiens
agtgtatattcttat

SEQ ID NO: 827883 - DNA, 15 bp, Homo sapiens
aagtgtatattctta

SEQ ID NO: 827884 - DNA, 15 bp, Homo sapiens
gaagtgtatattctt

SEQ ID NO: 827885 - DNA, 15 bp, Homo sapiens
agaagtgtatattct

SEQ ID NO: 827886 - DNA, 15 bp, Homo sapiens
cagaagtgtatattc

SEQ ID NO: 827887 - DNA, 15 bp, Homo sapiens
gcagaagtgtatatt

SEQ ID NO: 827888 - DNA, 15 bp, Homo sapiens
agcagaagtgtatat

SEQ ID NO: 827889 - DNA, 15 bp, Homo sapiens
aagcagaagtgtata

SEQ ID NO: 827890 - DNA, 15 bp, Homo sapiens
taagcagaagtgtat

SEQ ID NO: 827891 - DNA, 15 bp, Homo sapiens
ctaagcagaagtgta

SEQ ID NO: 827892 - DNA, 15 bp, Homo sapiens
cctaagcagaagtgt

SEQ ID NO: 827893 - DNA, 15 bp, Homo sapiens
tcctaagcagaagtg

SEQ ID NO: 827894 - DNA, 15 bp, Homo sapiens
atcctaagcagaagt

SEQ ID NO: 827895 - DNA, 15 bp, Homo sapiens
catcctaagcagaag

SEQ ID NO: 827896 - DNA, 15 bp, Homo sapiens
tcatcctaagcagaa

SEQ ID NO: 827897 - DNA, 15 bp, Homo sapiens
atcatcctaagcaga

SEQ ID NO: 827898 - DNA, 15 bp, Homo sapiens
tatcatcctaagcag

SEQ ID NO: 827899 - DNA, 15 bp, Homo sapiens
ttatcatcctaagca

SEQ ID NO: 827900 - DNA, 15 bp, Homo sapiens
attatcatcctaagc

SEQ ID NO: 827901 - DNA, 15 bp, Homo sapiens
aattatcatcctaag

SEQ ID NO: 827902 - DNA, 15 bp, Homo sapiens
caattatcatcctaa

SEQ ID NO: 827903 - DNA, 15 bp, Homo sapiens
ccaattatcatccta

SEQ ID NO: 827904 - DNA, 15 bp, Homo sapiens
tccaattatcatcct

SEQ ID NO: 827905 - DNA, 15 bp, Homo sapiens
ctccaattatcatcc

SEQ ID NO: 827906 - DNA, 15 bp, Homo sapiens
cctccaattatcatc

SEQ ID NO: 827907 - DNA, 15 bp, Homo sapiens
gcctccaattatcat

SEQ ID NO: 827908 - DNA, 15 bp, Homo sapiens
tgcctccaattatca

SEQ ID NO: 827909 - DNA, 15 bp, Homo sapiens
ttgcctccaattatc

SEQ ID NO: 827910 - DNA, 15 bp, Homo sapiens
cttgcctccaattat

SEQ ID NO: 827911 - DNA, 15 bp, Homo sapiens
acttgcctccaatta

SEQ ID NO: 827912 - DNA, 15 bp, Homo sapiens
cacttgcctccaatt

SEQ ID NO: 827913 - DNA, 15 bp, Homo sapiens
tcacttgcctccaat

SEQ ID NO: 827914 - DNA, 15 bp, Homo sapiens
ttcacttgcctccaa

SEQ ID NO: 827915 - DNA, 15 bp, Homo sapiens
attcacttgcctcca

SEQ ID NO: 827916 - DNA, 15 bp, Homo sapiens
gattcacttgcctcc

SEQ ID NO: 827917 - DNA, 15 bp, Homo sapiens
ggattcacttgcctc

SEQ ID NO: 827918 - DNA, 15 bp, Homo sapiens
aggattcacttgcct

SEQ ID NO: 827919 - DNA, 15 bp, Homo sapiens
caggattcacttgcc

SEQ ID NO: 827920 - DNA, 15 bp, Homo sapiens
tcaggattcacttgc

SEQ ID NO: 827921 - DNA, 15 bp, Homo sapiens
ctcaggattcacttg

SEQ ID NO: 827922 - DNA, 15 bp, Homo sapiens
gctcaggattcactt

SEQ ID NO: 827923 - DNA, 15 bp, Homo sapiens
cgctcaggattcact

SEQ ID NO: 827924 - DNA, 15 bp, Homo sapiens
acgctcaggattcac

SEQ ID NO: 827925 - DNA, 15 bp, Homo sapiens
cacgctcaggattca

SEQ ID NO: 827926 - DNA, 15 bp, Homo sapiens
tcacgctcaggattc

SEQ ID NO: 827927 - DNA, 15 bp, Homo sapiens
atcacgctcaggatt

SEQ ID NO: 827928 - DNA, 15 bp, Homo sapiens
aatcacgctcaggat

SEQ ID NO: 827929 - DNA, 15 bp, Homo sapiens
aaatcacgctcagga

SEQ ID NO: 827930 - DNA, 15 bp, Homo sapiens
caaatcacgctcagg

SEQ ID NO: 827931 - DNA, 15 bp, Homo sapiens
tcaaatcacgctcag

SEQ ID NO: 827932 - DNA, 15 bp, Homo sapiens
atcaaatcacgctca

SEQ ID NO: 827933 - DNA, 15 bp, Homo sapiens
tatcaaatcacgctc

SEQ ID NO: 827934 - DNA, 15 bp, Homo sapiens
ttatcaaatcacgct

SEQ ID NO: 827935 - DNA, 15 bp, Homo sapiens
attatcaaatcacgc

SEQ ID NO: 827936 - DNA, 15 bp, Homo sapiens
cattatcaaatcacg

SEQ ID NO: 827937 - DNA, 15 bp, Homo sapiens
tcattatcaaatcac

SEQ ID NO: 827938 - DNA, 15 bp, Homo sapiens
gtcattatcaaatca

SEQ ID NO: 827939 - DNA, 15 bp, Homo sapiens
ggtcattatcaaatc

SEQ ID NO: 827940 - DNA, 15 bp, Homo sapiens
aggtcattatcaaat

SEQ ID NO: 827941 - DNA, 15 bp, Homo sapiens
taggtcattatcaaa

SEQ ID NO: 827942 - DNA, 15 bp, Homo sapiens
ttaggtcattatcaa

SEQ ID NO: 827943 - DNA, 15 bp, Homo sapiens
attaggtcattatca

SEQ ID NO: 827944 - DNA, 15 bp, Homo sapiens
tattaggtcattatc

SEQ ID NO: 827945 - DNA, 15 bp, Homo sapiens
ttattaggtcattat

SEQ ID NO: 827946 - DNA, 15 bp, Homo sapiens
attattaggtcatta

SEQ ID NO: 827947 - DNA, 15 bp, Homo sapiens
cattattaggtcatt

SEQ ID NO: 827948 - DNA, 15 bp, Homo sapiens
tcattattaggtcat

SEQ ID NO: 827949 - DNA, 15 bp, Homo sapiens
atcattattaggtca

SEQ ID NO: 827950 - DNA, 15 bp, Homo sapiens
catcattattaggtc

SEQ ID NO: 827951 - DNA, 15 bp, Homo sapiens
ccatcattattaggt

SEQ ID NO: 827952 - DNA, 15 bp, Homo sapiens
cccatcattattagg

SEQ ID NO: 827953 - DNA, 15 bp, Homo sapiens
acccatcattattag

SEQ ID NO: 827954 - DNA, 15 bp, Homo sapiens
aacccatcattatta

SEQ ID NO: 827955 - DNA, 15 bp, Homo sapiens
aaacccatcattatt

SEQ ID NO: 827956 - DNA, 15 bp, Homo sapiens
aaaacccatcattat

SEQ ID NO: 827957 - DNA, 15 bp, Homo sapiens
taaaacccatcatta

SEQ ID NO: 827958 - DNA, 15 bp, Homo sapiens
ataaaacccatcatt

SEQ ID NO: 827959 - DNA, 15 bp, Homo sapiens
aataaaacccatcat

SEQ ID NO: 827960 - DNA, 15 bp, Homo sapiens
aaataaaacccatca

SEQ ID NO: 827961 - DNA, 15 bp, Homo sapiens
gaaataaaacccatc

SEQ ID NO: 827962 - DNA, 15 bp, Homo sapiens
ggaaataaaacccat

SEQ ID NO: 827963 - DNA, 15 bp, Homo sapiens
tggaaataaaaccca

SEQ ID NO: 827964 - DNA, 15 bp, Homo sapiens
ctggaaataaaaccc

SEQ ID NO: 827965 - DNA, 15 bp, Homo sapiens
tctggaaataaaacc

SEQ ID NO: 827966 - DNA, 15 bp, Homo sapiens
gtctggaaataaaac

SEQ ID NO: 827967 - DNA, 15 bp, Homo sapiens
agtctggaaataaaa

SEQ ID NO: 827968 - DNA, 15 bp, Homo sapiens
aagtctggaaataaa

SEQ ID NO: 827969 - DNA, 15 bp, Homo sapiens
gaagtctggaaataa

SEQ ID NO: 827970 - DNA, 15 bp, Homo sapiens
tgaagtctggaaata

SEQ ID NO: 827971 - DNA, 15 bp, Homo sapiens
gtgaagtctggaaat

SEQ ID NO: 827972 - DNA, 15 bp, Homo sapiens
agtgaagtctggaaa

SEQ ID NO: 827973 - DNA, 15 bp, Homo sapiens
aagtgaagtctggaa

SEQ ID NO: 827974 - DNA, 15 bp, Homo sapiens
gaagtgaagtctgga

SEQ ID NO: 827975 - DNA, 15 bp, Homo sapiens
agaagtgaagtctgg

SEQ ID NO: 827976 - DNA, 15 bp, Homo sapiens
tagaagtgaagtctg

SEQ ID NO: 827977 - DNA, 15 bp, Homo sapiens
ttagaagtgaagtct

SEQ ID NO: 827978 - DNA, 15 bp, Homo sapiens
attagaagtgaagtc

SEQ ID NO: 827979 - DNA, 15 bp, Homo sapiens
cattagaagtgaagt

SEQ ID NO: 827980 - DNA, 15 bp, Homo sapiens
ccattagaagtgaag

SEQ ID NO: 827981 - DNA, 15 bp, Homo sapiens
accattagaagtgaa

SEQ ID NO: 827982 - DNA, 15 bp, Homo sapiens
caccattagaagtga

SEQ ID NO: 827983 - DNA, 15 bp, Homo sapiens
tcaccattagaagtg

SEQ ID NO: 827984 - DNA, 15 bp, Homo sapiens
aatcaccattagaag

SEQ ID NO: 827985 - DNA, 15 bp, Homo sapiens
taatcaccattagaa

SEQ ID NO: 827986 - DNA, 15 bp, Homo sapiens
ataatcaccattaga

SEQ ID NO: 827987 - DNA, 15 bp, Homo sapiens
cataatcaccattag

SEQ ID NO: 827988 - DNA, 15 bp, Homo sapiens
ccataatcaccatta

SEQ ID NO: 827989 - DNA, 15 bp, Homo sapiens
cccataatcaccatt

SEQ ID NO: 827990 - DNA, 15 bp, Homo sapiens
tcccataatcaccat

SEQ ID NO: 827991 - DNA, 15 bp, Homo sapiens
ctcccataatcacca

SEQ ID NO: 827992 - DNA, 15 bp, Homo sapiens
tctcccataatcacc

SEQ ID NO: 827993 - DNA, 15 bp, Homo sapiens
ttctcccataatcac

SEQ ID NO: 827994 - DNA, 15 bp, Homo sapiens
gttctcccataatca

SEQ ID NO: 827995 - DNA, 15 bp, Homo sapiens
agttctcccataatc

SEQ ID NO: 827996 - DNA, 15 bp, Homo sapiens
cagttctcccataat

SEQ ID NO: 827997 - DNA, 15 bp, Homo sapiens
ccagttctcccataa

SEQ ID NO: 827998 - DNA, 15 bp, Homo sapiens
tccagttctcccata

SEQ ID NO: 827999 - DNA, 15 bp, Homo sapiens
ctccagttctcccat

SEQ ID NO: 828000 - DNA, 15 bp, Homo sapiens
gctccagttctccca

SEQ ID NO: 828001 - DNA, 15 bp, Homo sapiens
ggctccagttctccc

SEQ ID NO: 828002 - DNA, 15 bp, Homo sapiens
aggctccagttctcc

SEQ ID NO: 828003 - DNA, 15 bp, Homo sapiens
aaggctccagttctc

SEQ ID NO: 828004 - DNA, 15 bp, Homo sapiens
gaaggctccagttct

SEQ ID NO: 828005 - DNA, 15 bp, Homo sapiens
tgaaggctccagttc

SEQ ID NO: 828006 - DNA, 15 bp, Homo sapiens
ctgaaggctccagtt

SEQ ID NO: 828007 - DNA, 15 bp, Homo sapiens
tctgaaggctccagt

SEQ ID NO: 828008 - DNA, 15 bp, Homo sapiens
ctctgaaggctccag

SEQ ID NO: 828009 - DNA, 15 bp, Homo sapiens
cctctgaaggctcca

SEQ ID NO: 828010 - DNA, 15 bp, Homo sapiens
ccctctgaaggctcc

SEQ ID NO: 828011 - DNA, 15 bp, Homo sapiens
accctctgaaggctc

SEQ ID NO: 828012 - DNA, 15 bp, Homo sapiens
taccctctgaaggct

SEQ ID NO: 828013 - DNA, 15 bp, Homo sapiens
ttaccctctgaaggc

SEQ ID NO: 828014 - DNA, 15 bp, Homo sapiens
tttaccctctgaagg

SEQ ID NO: 828015 - DNA, 15 bp, Homo sapiens
ttttaccctctgaag

SEQ ID NO: 828016 - DNA, 15 bp, Homo sapiens
attttaccctctgaa

SEQ ID NO: 828017 - DNA, 15 bp, Homo sapiens
aattttaccctctga

SEQ ID NO: 828018 - DNA, 15 bp, Homo sapiens
taattttaccctctg

SEQ ID NO: 828019 - DNA, 15 bp, Homo sapiens
ttaattttaccctct

SEQ ID NO: 828020 - DNA, 15 bp, Homo sapiens
cttaattttaccctc

SEQ ID NO: 828021 - DNA, 15 bp, Homo sapiens
gcttaattttaccct

SEQ ID NO: 828022 - DNA, 15 bp, Homo sapiens
tgcttaattttaccc

SEQ ID NO: 828023 - DNA, 15 bp, Homo sapiens
gtgcttaattttacc

SEQ ID NO: 828024 - DNA, 15 bp, Homo sapiens
tgtgcttaattttac

SEQ ID NO: 828025 - DNA, 15 bp, Homo sapiens
ctgtgcttaatttta

SEQ ID NO: 828026 - DNA, 15 bp, Homo sapiens
actgtgcttaatttt

SEQ ID NO: 828027 - DNA, 15 bp, Homo sapiens
cactgtgcttaattt

SEQ ID NO: 828028 - DNA, 15 bp, Homo sapiens
ccactgtgcttaatt

SEQ ID NO: 828029 - DNA, 15 bp, Homo sapiens
tccactgtgcttaat

SEQ ID NO: 828030 - DNA, 15 bp, Homo sapiens
ttccactgtgcttaa

SEQ ID NO: 828031 - DNA, 15 bp, Homo sapiens
cttccactgtgctta

SEQ ID NO: 828032 - DNA, 15 bp, Homo sapiens
tcttccactgtgctt

SEQ ID NO: 828033 - DNA, 15 bp, Homo sapiens
ttcttccactgtgct

SEQ ID NO: 828034 - DNA, 15 bp, Homo sapiens
attcttccactgtgc

SEQ ID NO: 828035 - DNA, 15 bp, Homo sapiens
aattcttccactgtg

SEQ ID NO: 828036 - DNA, 15 bp, Homo sapiens
aaattcttccactgt

SEQ ID NO: 828037 - DNA, 15 bp, Homo sapiens
gaaattcttccactg

SEQ ID NO: 828038 - DNA, 15 bp, Homo sapiens
tgaaattcttccact

SEQ ID NO: 828039 - DNA, 15 bp, Homo sapiens
atgaaattcttccac

SEQ ID NO: 828040 - DNA, 15 bp, Homo sapiens
aatgaaattcttcca

SEQ ID NO: 828041 - DNA, 15 bp, Homo sapiens
gaatgaaattcttcc

SEQ ID NO: 828042 - DNA, 15 bp, Homo sapiens
agaatgaaattcttc

SEQ ID NO: 828043 - DNA, 15 bp, Homo sapiens
cagaatgaaattctt

SEQ ID NO: 828044 - DNA, 15 bp, Homo sapiens
acagaatgaaattct

SEQ ID NO: 828045 - DNA, 15 bp, Homo sapiens
aacagaatgaaattc

SEQ ID NO: 828046 - DNA, 15 bp, Homo sapiens
gaacagaatgaaatt

SEQ ID NO: 828047 - DNA, 15 bp, Homo sapiens
agaacagaatgaaat

SEQ ID NO: 828048 - DNA, 15 bp, Homo sapiens
gagaacagaatgaaa

SEQ ID NO: 828049 - DNA, 15 bp, Homo sapiens
tgagaacagaatgaa

SEQ ID NO: 828050 - DNA, 15 bp, Homo sapiens
ctgagaacagaatga

SEQ ID NO: 828051 - DNA, 15 bp, Homo sapiens
actgagaacagaatg

SEQ ID NO: 828052 - DNA, 15 bp, Homo sapiens
aactgagaacagaat

SEQ ID NO: 828053 - DNA, 15 bp, Homo sapiens
aaactgagaacagaa

SEQ ID NO: 828054 - DNA, 15 bp, Homo sapiens
aaaactgagaacaga

SEQ ID NO: 828055 - DNA, 15 bp, Homo sapiens
gaaaactgagaacag

SEQ ID NO: 828056 - DNA, 15 bp, Homo sapiens
ggaaaactgagaaca

SEQ ID NO: 828057 - DNA, 15 bp, Homo sapiens
aggaaaactgagaac

SEQ ID NO: 828058 - DNA, 15 bp, Homo sapiens
caggaaaactgagaa

SEQ ID NO: 828059 - DNA, 15 bp, Homo sapiens
ccaggaaaactgaga

SEQ ID NO: 828060 - DNA, 15 bp, Homo sapiens
tccaggaaaactgag

SEQ ID NO: 828061 - DNA, 15 bp, Homo sapiens
atccaggaaaactga

SEQ ID NO: 828062 - DNA, 15 bp, Homo sapiens
aatccaggaaaactg

SEQ ID NO: 828063 - DNA, 15 bp, Homo sapiens
taatccaggaaaact

SEQ ID NO: 828064 - DNA, 15 bp, Homo sapiens
ataatccaggaaaac

SEQ ID NO: 828065 - DNA, 15 bp, Homo sapiens
cataatccaggaaaa

SEQ ID NO: 828066 - DNA, 15 bp, Homo sapiens
gcataatccaggaaa

SEQ ID NO: 828067 - DNA, 15 bp, Homo sapiens
ggcataatccaggaa

SEQ ID NO: 828068 - DNA, 15 bp, Homo sapiens
aggcataatccagga

SEQ ID NO: 828069 - DNA, 15 bp, Homo sapiens
caggcataatccagg

SEQ ID NO: 828070 - DNA, 15 bp, Homo sapiens
ccaggcataatccag

SEQ ID NO: 828071 - DNA, 15 bp, Homo sapiens
gccaggcataatcca

SEQ ID NO: 828072 - DNA, 15 bp, Homo sapiens
tgccaggcataatcc

SEQ ID NO: 828073 - DNA, 15 bp, Homo sapiens
gtgccaggcataatc

SEQ ID NO: 828074 - DNA, 15 bp, Homo sapiens
ggtgccaggcataat

SEQ ID NO: 828075 - DNA, 15 bp, Homo sapiens
tggtgccaggcataa

SEQ ID NO: 828076 - DNA, 15 bp, Homo sapiens
atggtgccaggcata

SEQ ID NO: 828077 - DNA, 15 bp, Homo sapiens
aatggtgccaggcat

SEQ ID NO: 828078 - DNA, 15 bp, Homo sapiens
taatggtgccaggca

SEQ ID NO: 828079 - DNA, 15 bp, Homo sapiens
ttaatggtgccaggc

SEQ ID NO: 828080 - DNA, 15 bp, Homo sapiens
tttaatggtgccagg

SEQ ID NO: 828081 - DNA, 15 bp, Homo sapiens
ctttaatggtgccag

SEQ ID NO: 828082 - DNA, 15 bp, Homo sapiens
tctttaatggtgcca

SEQ ID NO: 828083 - DNA, 15 bp, Homo sapiens
ttctttaatggtgcc

SEQ ID NO: 828084 - DNA, 15 bp, Homo sapiens
tttctttaatggtgc

SEQ ID NO: 828085 - DNA, 15 bp, Homo sapiens
ttttctttaatggtg

SEQ ID NO: 828086 - DNA, 15 bp, Homo sapiens
attttctttaatggt

SEQ ID NO: 828087 - DNA, 15 bp, Homo sapiens
tattttctttaatgg

SEQ ID NO: 828088 - DNA, 15 bp, Homo sapiens
atattttctttaatg

SEQ ID NO: 828089 - DNA, 15 bp, Homo sapiens
gatattttctttaat

SEQ ID NO: 828090 - DNA, 15 bp, Homo sapiens
tgatattttctttaa

SEQ ID NO: 828091 - DNA, 15 bp, Homo sapiens
atgatattttcttta

SEQ ID NO: 828092 - DNA, 15 bp, Homo sapiens
gatgatattttcttt

SEQ ID NO: 828093 - DNA, 15 bp, Homo sapiens
agatgatattttctt

SEQ ID NO: 828094 - DNA, 15 bp, Homo sapiens
aagatgatattttct

SEQ ID NO: 828095 - DNA, 15 bp, Homo sapiens
aaagatgatattttc

SEQ ID NO: 828096 - DNA, 15 bp, Homo sapiens
caaagatgatatttt

SEQ ID NO: 828097 - DNA, 15 bp, Homo sapiens
ccaaagatgatattt

SEQ ID NO: 828098 - DNA, 15 bp, Homo sapiens
accaaagatgatatt

SEQ ID NO: 828099 - DNA, 15 bp, Homo sapiens
caccaaagatgatat

SEQ ID NO: 828100 - DNA, 15 bp, Homo sapiens
acaccaaagatgata

SEQ ID NO: 828101 - DNA, 15 bp, Homo sapiens
aacaccaaagatgat

SEQ ID NO: 828102 - DNA, 15 bp, Homo sapiens
aaacaccaaagatga

SEQ ID NO: 828103 - DNA, 15 bp, Homo sapiens
gaaacaccaaagatg

SEQ ID NO: 828104 - DNA, 15 bp, Homo sapiens
ggaaacaccaaagat

SEQ ID NO: 828105 - DNA, 15 bp, Homo sapiens
aggaaacaccaaaga

SEQ ID NO: 828106 - DNA, 15 bp, Homo sapiens
taggaaacaccaaag

SEQ ID NO: 828107 - DNA, 15 bp, Homo sapiens
ataggaaacaccaaa

SEQ ID NO: 828108 - DNA, 15 bp, Homo sapiens
cataggaaacaccaa

SEQ ID NO: 828109 - DNA, 15 bp, Homo sapiens
tcataggaaacacca

SEQ ID NO: 828110 - DNA, 15 bp, Homo sapiens
atcataggaaacacc

SEQ ID NO: 828111 - DNA, 15 bp, Homo sapiens
catcataggaaacac

SEQ ID NO: 828112 - DNA, 15 bp, Homo sapiens
tcatcataggaaaca

SEQ ID NO: 828113 - DNA, 15 bp, Homo sapiens
ttcatcataggaaac

SEQ ID NO: 828114 - DNA, 15 bp, Homo sapiens
attcatcataggaaa

SEQ ID NO: 828115 - DNA, 15 bp, Homo sapiens
tattcatcataggaa

SEQ ID NO: 828116 - DNA, 15 bp, Homo sapiens
atattcatcatagga

SEQ ID NO: 828117 - DNA, 15 bp, Homo sapiens
tatattcatcatagg

SEQ ID NO: 828118 - DNA, 15 bp, Homo sapiens
ctatattcatcatag

SEQ ID NO: 828119 - DNA, 15 bp, Homo sapiens
tctatattcatcata

SEQ ID NO: 828120 - DNA, 15 bp, Homo sapiens
atctatattcatcat

SEQ ID NO: 828121 - DNA, 15 bp, Homo sapiens
tatctatattcatca

SEQ ID NO: 828122 - DNA, 15 bp, Homo sapiens
gtatctatattcatc

SEQ ID NO: 828123 - DNA, 15 bp, Homo sapiens
tgtatctatattcat

SEQ ID NO: 828124 - DNA, 15 bp, Homo sapiens
ctgtatctatattca

SEQ ID NO: 828125 - DNA, 15 bp, Homo sapiens
tctgtatctatattc

SEQ ID NO: 828126 - DNA, 15 bp, Homo sapiens
ttctgtatctatatt

SEQ ID NO: 828127 - DNA, 15 bp, Homo sapiens
cttctgtatctatat

SEQ ID NO: 828128 - DNA, 15 bp, Homo sapiens
gcttctgtatctata

SEQ ID NO: 828129 - DNA, 15 bp, Homo sapiens
cgcttctgtatctat

SEQ ID NO: 828130 - DNA, 15 bp, Homo sapiens
acgcttctgtatcta

SEQ ID NO: 828131 - DNA, 15 bp, Homo sapiens
gacgcttctgtatct

SEQ ID NO: 828132 - DNA, 15 bp, Homo sapiens
tgacgcttctgtatc

SEQ ID NO: 828133 - DNA, 15 bp, Homo sapiens
atgacgcttctgtat

SEQ ID NO: 828134 - DNA, 15 bp, Homo sapiens
gatgacgcttctgta

SEQ ID NO: 828135 - DNA, 15 bp, Homo sapiens
tgatgacgcttctgt

SEQ ID NO: 828136 - DNA, 15 bp, Homo sapiens
ttgatgacgcttctg

SEQ ID NO: 828137 - DNA, 15 bp, Homo sapiens
tttgatgacgcttct

SEQ ID NO: 828138 - DNA, 15 bp, Homo sapiens
ctttgatgacgcttc

SEQ ID NO: 828139 - DNA, 15 bp, Homo sapiens
gctttgatgacgctt

SEQ ID NO: 828140 - DNA, 15 bp, Homo sapiens
tgctttgatgacgct

SEQ ID NO: 828141 - DNA, 15 bp, Homo sapiens
atgctttgatgacgc

SEQ ID NO: 828142 - DNA, 15 bp, Homo sapiens
catgctttgatgacg

SEQ ID NO: 828143 - DNA, 15 bp, Homo sapiens
gcatgctttgatgac

SEQ ID NO: 828144 - DNA, 15 bp, Homo sapiens
ggcatgctttgatga

SEQ ID NO: 828145 - DNA, 15 bp, Homo sapiens
tggcatgctttgatg

SEQ ID NO: 828146 - DNA, 15 bp, Homo sapiens
ttggcatgctttgat

SEQ ID NO: 828147 - DNA, 15 bp, Homo sapiens
gttggcatgctttga

SEQ ID NO: 828148 - DNA, 15 bp, Homo sapiens
agttggcatgctttg

SEQ ID NO: 828149 - DNA, 15 bp, Homo sapiens
tagttggcatgcttt

SEQ ID NO: 828150 - DNA, 15 bp, Homo sapiens
ctagttggcatgctt

SEQ ID NO: 828151 - DNA, 15 bp, Homo sapiens
tctagttggcatgct

SEQ ID NO: 828152 - DNA, 15 bp, Homo sapiens
ttctagttggcatgc

SEQ ID NO: 828153 - DNA, 15 bp, Homo sapiens
cttctagttggcatg

SEQ ID NO: 828154 - DNA, 15 bp, Homo sapiens
tcttctagttggcat

SEQ ID NO: 828155 - DNA, 15 bp, Homo sapiens
ctcttctagttggca

SEQ ID NO: 828156 - DNA, 15 bp, Homo sapiens
cctcttctagttggc

SEQ ID NO: 828157 - DNA, 15 bp, Homo sapiens
acctcttctagttgg

SEQ ID NO: 828158 - DNA, 15 bp, Homo sapiens
tacctcttctagttg

SEQ ID NO: 828159 - DNA, 15 bp, Homo sapiens
ttacctcttctagtt

SEQ ID NO: 828160 - DNA, 15 bp, Homo sapiens
cttacctcttctagt

SEQ ID NO: 828161 - DNA, 15 bp, Homo sapiens
tcttacctcttctag

SEQ ID NO: 828162 - DNA, 15 bp, Homo sapiens
ttcttacctcttcta

SEQ ID NO: 828163 - DNA, 15 bp, Homo sapiens
tttcttacctcttct

SEQ ID NO: 828164 - DNA, 15 bp, Homo sapiens
gtttcttacctcttc

SEQ ID NO: 828165 - DNA, 15 bp, Homo sapiens
agtttcttacctctt

SEQ ID NO: 828166 - DNA, 15 bp, Homo sapiens
tagtttcttacctct

SEQ ID NO: 828167 - DNA, 15 bp, Homo sapiens
atagtttcttacctc

SEQ ID NO: 828168 - DNA, 15 bp, Homo sapiens
catagtttcttacct

SEQ ID NO: 828169 - DNA, 15 bp, Homo sapiens
acatagtttcttacc

SEQ ID NO: 828170 - DNA, 15 bp, Homo sapiens
cacatagtttcttac

SEQ ID NO: 828171 - DNA, 15 bp, Homo sapiens
tcacatagtttctta

SEQ ID NO: 828172 - DNA, 15 bp, Homo sapiens
ttcacatagtttctt

SEQ ID NO: 828173 - DNA, 15 bp, Homo sapiens
tttcacatagtttct

SEQ ID NO: 828174 - DNA, 15 bp, Homo sapiens
ttttcacatagtttc

SEQ ID NO: 828175 - DNA, 15 bp, Homo sapiens
gttttcacatagttt

SEQ ID NO: 828176 - DNA, 15 bp, Homo sapiens
agttttcacatagtt

SEQ ID NO: 828177 - DNA, 15 bp, Homo sapiens
aagttttcacatagt

SEQ ID NO: 828178 - DNA, 15 bp, Homo sapiens
aaagttttcacatag

SEQ ID NO: 828179 - DNA, 15 bp, Homo sapiens
aaaagttttcacata

SEQ ID NO: 828180 - DNA, 15 bp, Homo sapiens
aaaaagttttcacat

SEQ ID NO: 828181 - DNA, 15 bp, Homo sapiens
caaaaagttttcaca

SEQ ID NO: 828182 - DNA, 15 bp, Homo sapiens
tcaaaaagttttcac

SEQ ID NO: 828183 - DNA, 15 bp, Homo sapiens
atcaaaaagttttca

SEQ ID NO: 828184 - DNA, 15 bp, Homo sapiens
aatcaaaaagttttc

SEQ ID NO: 828185 - DNA, 15 bp, Homo sapiens
taatcaaaaagtttt

SEQ ID NO: 828186 - DNA, 15 bp, Homo sapiens
ataatcaaaaagttt

SEQ ID NO: 828187 - DNA, 15 bp, Homo sapiens
cataatcaaaaagtt

SEQ ID NO: 828188 - DNA, 15 bp, Homo sapiens
gcataatcaaaaagt

SEQ ID NO: 828189 - DNA, 15 bp, Homo sapiens
tgcataatcaaaaag

SEQ ID NO: 828190 - DNA, 15 bp, Homo sapiens
atgcataatcaaaaa

SEQ ID NO: 828191 - DNA, 15 bp, Homo sapiens
tatgcataatcaaaa

SEQ ID NO: 828192 - DNA, 15 bp, Homo sapiens
atatgcataatcaaa

SEQ ID NO: 828193 - DNA, 15 bp, Homo sapiens
catatgcataatcaa

SEQ ID NO: 828194 - DNA, 15 bp, Homo sapiens
tcatatgcataatca

SEQ ID NO: 828195 - DNA, 15 bp, Homo sapiens
ttcatatgcataatc

SEQ ID NO: 828196 - DNA, 15 bp, Homo sapiens
gttcatatgcataat

SEQ ID NO: 828197 - DNA, 15 bp, Homo sapiens
ggttcatatgcataa

SEQ ID NO: 828198 - DNA, 15 bp, Homo sapiens
gggttcatatgcata

SEQ ID NO: 828199 - DNA, 15 bp, Homo sapiens
agggttcatatgcat

SEQ ID NO: 828200 - DNA, 15 bp, Homo sapiens
aagggttcatatgca

SEQ ID NO: 828201 - DNA, 15 bp, Homo sapiens
gaagggttcatatgc

SEQ ID NO: 828202 - DNA, 15 bp, Homo sapiens
tgaagggttcatatg

SEQ ID NO: 828203 - DNA, 15 bp, Homo sapiens
gtgaagggttcatat

SEQ ID NO: 828204 - DNA, 15 bp, Homo sapiens
tgtgaagggttcata

SEQ ID NO: 828205 - DNA, 15 bp, Homo sapiens
gtgtgaagggttcat

SEQ ID NO: 828206 - DNA, 15 bp, Homo sapiens
agtgtgaagggttca

SEQ ID NO: 828207 - DNA, 15 bp, Homo sapiens
tagtgtgaagggttc

SEQ ID NO: 828208 - DNA, 15 bp, Homo sapiens
gtagtgtgaagggtt

SEQ ID NO: 828209 - DNA, 15 bp, Homo sapiens
ggtagtgtgaagggt

SEQ ID NO: 828210 - DNA, 15 bp, Homo sapiens
gggtagtgtgaaggg

SEQ ID NO: 828211 - DNA, 15 bp, Homo sapiens
tgggtagtgtgaagg

SEQ ID NO: 828212 - DNA, 15 bp, Homo sapiens
ttgggtagtgtgaag

SEQ ID NO: 828213 - DNA, 15 bp, Homo sapiens
tttgggtagtgtgaa

SEQ ID NO: 828214 - DNA, 15 bp, Homo sapiens
atttgggtagtgtga

SEQ ID NO: 828215 - DNA, 15 bp, Homo sapiens
aatttgggtagtgtg

SEQ ID NO: 828216 - DNA, 15 bp, Homo sapiens
taatttgggtagtgt

SEQ ID NO: 828217 - DNA, 15 bp, Homo sapiens
ataatttgggtagtg

SEQ ID NO: 828218 - DNA, 15 bp, Homo sapiens
tataatttgggtagt

SEQ ID NO: 828219 - DNA, 15 bp, Homo sapiens
atataatttgggtag

SEQ ID NO: 828220 - DNA, 15 bp, Homo sapiens
tatataatttgggta

SEQ ID NO: 828221 - DNA, 15 bp, Homo sapiens
atatataatttgggt

SEQ ID NO: 828222 - DNA, 15 bp, Homo sapiens
aatatataatttggg

SEQ ID NO: 828223 - DNA, 15 bp, Homo sapiens
aaatatataatttgg

SEQ ID NO: 828224 - DNA, 15 bp, Homo sapiens
caaatatataatttg

SEQ ID NO: 828225 - DNA, 15 bp, Homo sapiens
ccaaatatataattt

SEQ ID NO: 828226 - DNA, 15 bp, Homo sapiens
gccaaatatataatt

SEQ ID NO: 828227 - DNA, 15 bp, Homo sapiens
agccaaatatataat

SEQ ID NO: 828228 - DNA, 15 bp, Homo sapiens
gagccaaatatataa

SEQ ID NO: 828229 - DNA, 15 bp, Homo sapiens
ggagccaaatatata

SEQ ID NO: 828230 - DNA, 15 bp, Homo sapiens
tggagccaaatatat

SEQ ID NO: 828231 - DNA, 15 bp, Homo sapiens
atggagccaaatata

SEQ ID NO: 828232 - DNA, 15 bp, Homo sapiens
tatggagccaaatat

SEQ ID NO: 828233 - DNA, 15 bp, Homo sapiens
atatggagccaaata

SEQ ID NO: 828234 - DNA, 15 bp, Homo sapiens
aatatggagccaaat

SEQ ID NO: 828235 - DNA, 15 bp, Homo sapiens
gaatatggagccaaa

SEQ ID NO: 828236 - DNA, 15 bp, Homo sapiens
tgaatatggagccaa

SEQ ID NO: 828237 - DNA, 15 bp, Homo sapiens
ttgaatatggagcca

SEQ ID NO: 828238 - DNA, 15 bp, Homo sapiens
attgaatatggagcc

SEQ ID NO: 828239 - DNA, 15 bp, Homo sapiens
gattgaatatggagc

SEQ ID NO: 828240 - DNA, 15 bp, Homo sapiens
cgattgaatatggag

SEQ ID NO: 828241 - DNA, 15 bp, Homo sapiens
ccgattgaatatgga

SEQ ID NO: 828242 - DNA, 15 bp, Homo sapiens
accgattgaatatgg

SEQ ID NO: 828243 - DNA, 15 bp, Homo sapiens
aaccgattgaatatg

SEQ ID NO: 828244 - DNA, 15 bp, Homo sapiens
taaccgattgaatat

SEQ ID NO: 828245 - DNA, 15 bp, Homo sapiens
ctaaccgattgaata

SEQ ID NO: 828246 - DNA, 15 bp, Homo sapiens
actaaccgattgaat

SEQ ID NO: 828247 - DNA, 15 bp, Homo sapiens
gactaaccgattgaa

SEQ ID NO: 828248 - DNA, 15 bp, Homo sapiens
agactaaccgattga

SEQ ID NO: 828249 - DNA, 15 bp, Homo sapiens
tagactaaccgattg

SEQ ID NO: 828250 - DNA, 15 bp, Homo sapiens
gtagactaaccgatt

SEQ ID NO: 828251 - DNA, 15 bp, Homo sapiens
tgtagactaaccgat

SEQ ID NO: 828252 - DNA, 15 bp, Homo sapiens
atgtagactaaccga

SEQ ID NO: 828253 - DNA, 15 bp, Homo sapiens
tatgtagactaaccg

SEQ ID NO: 828254 - DNA, 15 bp, Homo sapiens
atatgtagactaacc

SEQ ID NO: 828255 - DNA, 15 bp, Homo sapiens
tatatgtagactaac

SEQ ID NO: 828256 - DNA, 15 bp, Homo sapiens
atatatgtagactaa

SEQ ID NO: 828257 - DNA, 15 bp, Homo sapiens
aatatatgtagacta

SEQ ID NO: 828258 - DNA, 15 bp, Homo sapiens
aaatatatgtagact

SEQ ID NO: 828259 - DNA, 15 bp, Homo sapiens
taaatatatgtagac

SEQ ID NO: 828260 - DNA, 15 bp, Homo sapiens
ataaatatatgtaga

SEQ ID NO: 828261 - DNA, 15 bp, Homo sapiens
cataaatatatgtag

SEQ ID NO: 828262 - DNA, 15 bp, Homo sapiens
acataaatatatgta

SEQ ID NO: 828263 - DNA, 15 bp, Homo sapiens
aacataaatatatgt

SEQ ID NO: 828264 - DNA, 15 bp, Homo sapiens
aaacataaatatatg

SEQ ID NO: 828265 - DNA, 15 bp, Homo sapiens
gaaacataaatatat

SEQ ID NO: 828266 - DNA, 15 bp, Homo sapiens
ggaaacataaatata

SEQ ID NO: 828267 - DNA, 15 bp, Homo sapiens
aggaaacataaatat

SEQ ID NO: 828268 - DNA, 15 bp, Homo sapiens
gaggaaacataaata

SEQ ID NO: 828269 - DNA, 15 bp, Homo sapiens
agaggaaacataaat

SEQ ID NO: 828270 - DNA, 15 bp, Homo sapiens
tagaggaaacataaa

SEQ ID NO: 828271 - DNA, 15 bp, Homo sapiens
atagaggaaacataa

SEQ ID NO: 828272 - DNA, 15 bp, Homo sapiens
catagaggaaacata

SEQ ID NO: 828273 - DNA, 15 bp, Homo sapiens
ccatagaggaaacat

SEQ ID NO: 828274 - DNA, 15 bp, Homo sapiens
cccatagaggaaaca

SEQ ID NO: 828275 - DNA, 15 bp, Homo sapiens
acccatagaggaaac

SEQ ID NO: 828276 - DNA, 15 bp, Homo sapiens
tacccatagaggaaa

SEQ ID NO: 828277 - DNA, 15 bp, Homo sapiens
ttacccatagaggaa

SEQ ID NO: 828278 - DNA, 15 bp, Homo sapiens
cttacccatagagga

SEQ ID NO: 828279 - DNA, 15 bp, Homo sapiens
gcttacccatagagg

SEQ ID NO: 828280 - DNA, 15 bp, Homo sapiens
agcttacccatagag

SEQ ID NO: 828281 - DNA, 15 bp, Homo sapiens
tagcttacccataga

SEQ ID NO: 828282 - DNA, 15 bp, Homo sapiens
gtagcttacccatag

SEQ ID NO: 828283 - DNA, 15 bp, Homo sapiens
agtagcttacccata

SEQ ID NO: 828284 - DNA, 15 bp, Homo sapiens
cagtagcttacccat

SEQ ID NO: 828285 - DNA, 15 bp, Homo sapiens
acagtagcttaccca

SEQ ID NO: 828286 - DNA, 15 bp, Homo sapiens
cacagtagcttaccc

SEQ ID NO: 828287 - DNA, 15 bp, Homo sapiens
tcacagtagcttacc

SEQ ID NO: 828288 - DNA, 15 bp, Homo sapiens
ttcacagtagcttac

SEQ ID NO: 828289 - DNA, 15 bp, Homo sapiens
attcacagtagctta

SEQ ID NO: 828290 - DNA, 15 bp, Homo sapiens
cattcacagtagctt

SEQ ID NO: 828291 - DNA, 15 bp, Homo sapiens
ccattcacagtagct

SEQ ID NO: 828292 - DNA, 15 bp, Homo sapiens
tccattcacagtagc

SEQ ID NO: 828293 - DNA, 15 bp, Homo sapiens
atccattcacagtag

SEQ ID NO: 828294 - DNA, 15 bp, Homo sapiens
gatccattcacagta

SEQ ID NO: 828295 - DNA, 15 bp, Homo sapiens
tgatccattcacagt

SEQ ID NO: 828296 - DNA, 15 bp, Homo sapiens
ttgatccattcacag

SEQ ID NO: 828297 - DNA, 15 bp, Homo sapiens
attgatccattcaca

SEQ ID NO: 828298 - DNA, 15 bp, Homo sapiens
aattgatccattcac

SEQ ID NO: 828299 - DNA, 15 bp, Homo sapiens
taattgatccattca

SEQ ID NO: 828300 - DNA, 15 bp, Homo sapiens
ttaattgatccattc

SEQ ID NO: 828301 - DNA, 15 bp, Homo sapiens
attaattgatccatt

SEQ ID NO: 828302 - DNA, 15 bp, Homo sapiens
tattaattgatccat

SEQ ID NO: 828303 - DNA, 15 bp, Homo sapiens
ttattaattgatcca

SEQ ID NO: 828304 - DNA, 15 bp, Homo sapiens
tttattaattgatcc

SEQ ID NO: 828305 - DNA, 15 bp, Homo sapiens
ttttattaattgatc

SEQ ID NO: 828306 - DNA, 15 bp, Homo sapiens
gttttattaattgat

SEQ ID NO: 828307 - DNA, 15 bp, Homo sapiens
tgttttattaattga

SEQ ID NO: 828308 - DNA, 15 bp, Homo sapiens
gtgttttattaattg

SEQ ID NO: 828309 - DNA, 15 bp, Homo sapiens
tgtgttttattaatt

SEQ ID NO: 828310 - DNA, 15 bp, Homo sapiens
atgtgttttattaat

SEQ ID NO: 828311 - DNA, 15 bp, Homo sapiens
catgtgttttattaa

SEQ ID NO: 828312 - DNA, 15 bp, Homo sapiens
tcatgtgttttatta

SEQ ID NO: 828313 - DNA, 15 bp, Homo sapiens
gtcatgtgttttatt

SEQ ID NO: 828314 - DNA, 15 bp, Homo sapiens
ggtcatgtgttttat

SEQ ID NO: 828315 - DNA, 15 bp, Homo sapiens
aggtcatgtgtttta

SEQ ID NO: 828316 - DNA, 15 bp, Homo sapiens
taggtcatgtgtttt

SEQ ID NO: 828317 - DNA, 15 bp, Homo sapiens
ataggtcatgtgttt

SEQ ID NO: 828318 - DNA, 15 bp, Homo sapiens
cataggtcatgtgtt

SEQ ID NO: 828319 - DNA, 15 bp, Homo sapiens
gcataggtcatgtgt

SEQ ID NO: 828320 - DNA, 15 bp, Homo sapiens
agcataggtcatgtg

SEQ ID NO: 828321 - DNA, 15 bp, Homo sapiens
aagcataggtcatgt

SEQ ID NO: 828322 - DNA, 15 bp, Homo sapiens
aaagcataggtcatg

SEQ ID NO: 828323 - DNA, 15 bp, Homo sapiens
taaagcataggtcat

SEQ ID NO: 828324 - DNA, 15 bp, Homo sapiens
ttaaagcataggtca

SEQ ID NO: 828325 - DNA, 15 bp, Homo sapiens
cttaaagcataggtc

SEQ ID NO: 828326 - DNA, 15 bp, Homo sapiens
tcttaaagcataggt

SEQ ID NO: 828327 - DNA, 15 bp, Homo sapiens
ttcttaaagcatagg

SEQ ID NO: 828328 - DNA, 15 bp, Homo sapiens
cttcttaaagcatag

SEQ ID NO: 828329 - DNA, 15 bp, Homo sapiens
gcttcttaaagcata

SEQ ID NO: 828330 - DNA, 15 bp, Homo sapiens
agcttcttaaagcat

SEQ ID NO: 828331 - DNA, 15 bp, Homo sapiens
aagcttcttaaagca

SEQ ID NO: 828332 - DNA, 15 bp, Homo sapiens
caagcttcttaaagc

SEQ ID NO: 828333 - DNA, 15 bp, Homo sapiens
gcaagcttcttaaag

SEQ ID NO: 828334 - DNA, 15 bp, Homo sapiens
tgcaagcttcttaaa

SEQ ID NO: 828335 - DNA, 15 bp, Homo sapiens
ttgcaagcttcttaa

SEQ ID NO: 828336 - DNA, 15 bp, Homo sapiens
tttgcaagcttctta

SEQ ID NO: 828337 - DNA, 15 bp, Homo sapiens
gtttgcaagcttctt

SEQ ID NO: 828338 - DNA, 15 bp, Homo sapiens
tgtttgcaagcttct

SEQ ID NO: 828339 - DNA, 15 bp, Homo sapiens
gtgtttgcaagcttc

SEQ ID NO: 828340 - DNA, 15 bp, Homo sapiens
tgtgtttgcaagctt

SEQ ID NO: 828341 - DNA, 15 bp, Homo sapiens
atgtgtttgcaagct

SEQ ID NO: 828342 - DNA, 15 bp, Homo sapiens
catgtgtttgcaagc

SEQ ID NO: 828343 - DNA, 15 bp, Homo sapiens
tcatgtgtttgcaag

SEQ ID NO: 828344 - DNA, 15 bp, Homo sapiens
ttcatgtgtttgcaa

SEQ ID NO: 828345 - DNA, 15 bp, Homo sapiens
tttcatgtgtttgca

SEQ ID NO: 828346 - DNA, 15 bp, Homo sapiens
atttcatgtgtttgc

SEQ ID NO: 828347 - DNA, 15 bp, Homo sapiens
tatttcatgtgtttg

SEQ ID NO: 828348 - DNA, 15 bp, Homo sapiens
ttatttcatgtgttt

SEQ ID NO: 828349 - DNA, 15 bp, Homo sapiens
tttatttcatgtgtt

SEQ ID NO: 828350 - DNA, 15 bp, Homo sapiens
atttatttcatgtgt

SEQ ID NO: 828351 - DNA, 15 bp, Homo sapiens
catttatttcatgtg

SEQ ID NO: 828352 - DNA, 15 bp, Homo sapiens
gcatttatttcatgt

SEQ ID NO: 828353 - DNA, 15 bp, Homo sapiens
tgcatttatttcatg

SEQ ID NO: 828354 - DNA, 15 bp, Homo sapiens
ttgcatttatttcat

SEQ ID NO: 828355 - DNA, 15 bp, Homo sapiens
attgcatttatttca

SEQ ID NO: 828356 - DNA, 15 bp, Homo sapiens
aattgcatttatttc

SEQ ID NO: 828357 - DNA, 15 bp, Homo sapiens
aaattgcatttattt

SEQ ID NO: 828358 - DNA, 15 bp, Homo sapiens
taaattgcatttatt

SEQ ID NO: 828359 - DNA, 15 bp, Homo sapiens
ataaattgcatttat

SEQ ID NO: 828360 - DNA, 15 bp, Homo sapiens
aataaattgcattta

SEQ ID NO: 828361 - DNA, 15 bp, Homo sapiens
aaataaattgcattt

SEQ ID NO: 828362 - DNA, 15 bp, Homo sapiens
aaaataaattgcatt

SEQ ID NO: 828363 - DNA, 15 bp, Homo sapiens
aaaaataaattgcat

SEQ ID NO: 828364 - DNA, 15 bp, Homo sapiens
aaaaaataaattgca

SEQ ID NO: 828365 - DNA, 15 bp, Homo sapiens
taaaaaataaattgc

SEQ ID NO: 828366 - DNA, 15 bp, Homo sapiens
ttaaaaaataaattg

SEQ ID NO: 828367 - DNA, 15 bp, Homo sapiens
tttaaaaaataaatt

SEQ ID NO: 828368 - DNA, 15 bp, Homo sapiens
atttaaaaaataaat

SEQ ID NO: 828369 - DNA, 15 bp, Homo sapiens
tatttaaaaaataaa

SEQ ID NO: 828370 - DNA, 15 bp, Homo sapiens
ttatttaaaaaataa

SEQ ID NO: 828371 - DNA, 15 bp, Homo sapiens
attatttaaaaaata

SEQ ID NO: 828372 - DNA, 15 bp, Homo sapiens
cattatttaaaaaat

SEQ ID NO: 828373 - DNA, 15 bp, Homo sapiens
ccattatttaaaaaa

SEQ ID NO: 828374 - DNA, 15 bp, Homo sapiens
cccattatttaaaaa

SEQ ID NO: 828375 - DNA, 15 bp, Homo sapiens
acccattatttaaaa

SEQ ID NO: 828376 - DNA, 15 bp, Homo sapiens
aacccattatttaaa

SEQ ID NO: 828377 - DNA, 15 bp, Homo sapiens
gaacccattatttaa

SEQ ID NO: 828378 - DNA, 15 bp, Homo sapiens
tgaacccattattta

SEQ ID NO: 828379 - DNA, 15 bp, Homo sapiens
atgaacccattattt

SEQ ID NO: 828380 - DNA, 15 bp, Homo sapiens
aatgaacccattatt

SEQ ID NO: 828381 - DNA, 15 bp, Homo sapiens
aaatgaacccattat

SEQ ID NO: 828382 - DNA, 15 bp, Homo sapiens
caaatgaacccatta

SEQ ID NO: 828383 - DNA, 15 bp, Homo sapiens
tcaaatgaacccatt

SEQ ID NO: 828384 - DNA, 15 bp, Homo sapiens
atcaaatgaacccat

SEQ ID NO: 828385 - DNA, 15 bp, Homo sapiens
gatcaaatgaaccca

SEQ ID NO: 828386 - DNA, 15 bp, Homo sapiens
tgatcaaatgaaccc

SEQ ID NO: 828387 - DNA, 15 bp, Homo sapiens
gtgatcaaatgaacc

SEQ ID NO: 828388 - DNA, 15 bp, Homo sapiens
tgtgatcaaatgaac

SEQ ID NO: 828389 - DNA, 15 bp, Homo sapiens
ttgtgatcaaatgaa

SEQ ID NO: 828390 - DNA, 15 bp, Homo sapiens
attgtgatcaaatga

SEQ ID NO: 828391 - DNA, 15 bp, Homo sapiens
tattgtgatcaaatg

SEQ ID NO: 828392 - DNA, 15 bp, Homo sapiens
ttattgtgatcaaat

SEQ ID NO: 828393 - DNA, 15 bp, Homo sapiens
tttattgtgatcaaa

SEQ ID NO: 828394 - DNA, 15 bp, Homo sapiens
atttattgtgatcaa

SEQ ID NO: 828395 - DNA, 15 bp, Homo sapiens
catttattgtgatca

SEQ ID NO: 828396 - DNA, 15 bp, Homo sapiens
gcatttattgtgatc

SEQ ID NO: 828397 - DNA, 15 bp, Homo sapiens
tgcatttattgtgat

SEQ ID NO: 828398 - DNA, 15 bp, Homo sapiens
atgcatttattgtga

SEQ ID NO: 828399 - DNA, 15 bp, Homo sapiens
aatgcatttattgtg

SEQ ID NO: 828400 - DNA, 15 bp, Homo sapiens
aaatgcatttattgt

SEQ ID NO: 828401 - DNA, 15 bp, Homo sapiens
aaaatgcatttattg

SEQ ID NO: 828402 - DNA, 15 bp, Homo sapiens
taaaatgcatttatt

SEQ ID NO: 828403 - DNA, 15 bp, Homo sapiens
ataaaatgcatttat

SEQ ID NO: 828404 - DNA, 15 bp, Homo sapiens
cataaaatgcattta

SEQ ID NO: 828405 - DNA, 15 bp, Homo sapiens
tcataaaatgcattt

SEQ ID NO: 828406 - DNA, 15 bp, Homo sapiens
ttcataaaatgcatt

SEQ ID NO: 828407 - DNA, 15 bp, Homo sapiens
tttcataaaatgcat

SEQ ID NO: 828408 - DNA, 15 bp, Homo sapiens
atttcataaaatgca

SEQ ID NO: 828409 - DNA, 15 bp, Homo sapiens
catttcataaaatgc

SEQ ID NO: 828410 - DNA, 15 bp, Homo sapiens
ccatttcataaaatg

SEQ ID NO: 828411 - DNA, 15 bp, Homo sapiens
accatttcataaaat

SEQ ID NO: 828412 - DNA, 15 bp, Homo sapiens
caccatttcataaaa

SEQ ID NO: 828413 - DNA, 15 bp, Homo sapiens
tcaccatttcataaa

SEQ ID NO: 828414 - DNA, 15 bp, Homo sapiens
ctcaccatttcataa

SEQ ID NO: 828415 - DNA, 15 bp, Homo sapiens
tctcaccatttcata

SEQ ID NO: 828416 - DNA, 15 bp, Homo sapiens
ttctcaccatttcat

SEQ ID NO: 828417 - DNA, 15 bp, Homo sapiens
attctcaccatttca

SEQ ID NO: 828418 - DNA, 15 bp, Homo sapiens
aattctcaccatttc

SEQ ID NO: 828419 - DNA, 15 bp, Homo sapiens
aaattctcaccattt

SEQ ID NO: 828420 - DNA, 15 bp, Homo sapiens
aaaattctcaccatt

SEQ ID NO: 828421 - DNA, 15 bp, Homo sapiens
caaaattctcaccat

SEQ ID NO: 828422 - DNA, 15 bp, Homo sapiens
acaaaattctcacca

SEQ ID NO: 828423 - DNA, 15 bp, Homo sapiens
aacaaaattctcacc

SEQ ID NO: 828424 - DNA, 15 bp, Homo sapiens
gaacaaaattctcac

SEQ ID NO: 828425 - DNA, 15 bp, Homo sapiens
tgaacaaaattctca

SEQ ID NO: 828426 - DNA, 15 bp, Homo sapiens
gtgaacaaaattctc

SEQ ID NO: 828427 - DNA, 15 bp, Homo sapiens
agtgaacaaaattct

SEQ ID NO: 828428 - DNA, 15 bp, Homo sapiens
gagtgaacaaaattc

SEQ ID NO: 828429 - DNA, 15 bp, Homo sapiens
tgagtgaacaaaatt

SEQ ID NO: 828430 - DNA, 15 bp, Homo sapiens
atgagtgaacaaaat

SEQ ID NO: 828431 - DNA, 15 bp, Homo sapiens
aatgagtgaacaaaa

SEQ ID NO: 828432 - DNA, 15 bp, Homo sapiens
taatgagtgaacaaa

SEQ ID NO: 828433 - DNA, 15 bp, Homo sapiens
ctaatgagtgaacaa

SEQ ID NO: 828434 - DNA, 15 bp, Homo sapiens
actaatgagtgaaca

SEQ ID NO: 828435 - DNA, 15 bp, Homo sapiens
cactaatgagtgaac

SEQ ID NO: 828436 - DNA, 15 bp, Homo sapiens
tcactaatgagtgaa

SEQ ID NO: 828437 - DNA, 15 bp, Homo sapiens
ctcactaatgagtga

SEQ ID NO: 828438 - DNA, 15 bp, Homo sapiens
tctcactaatgagtg

SEQ ID NO: 828439 - DNA, 15 bp, Homo sapiens
gtctcactaatgagt

SEQ ID NO: 828440 - DNA, 15 bp, Homo sapiens
tgtctcactaatgag

SEQ ID NO: 828441 - DNA, 15 bp, Homo sapiens
ttgtctcactaatga

SEQ ID NO: 828442 - DNA, 15 bp, Homo sapiens
tttgtctcactaatg

SEQ ID NO: 828443 - DNA, 15 bp, Homo sapiens
gtttgtctcactaat

SEQ ID NO: 828444 - DNA, 15 bp, Homo sapiens
cgtttgtctcactaa

SEQ ID NO: 828445 - DNA, 15 bp, Homo sapiens
acgtttgtctcacta

SEQ ID NO: 828446 - DNA, 15 bp, Homo sapiens
gacgtttgtctcact

SEQ ID NO: 828447 - DNA, 15 bp, Homo sapiens
ggacgtttgtctcac

SEQ ID NO: 828448 - DNA, 15 bp, Homo sapiens
aggacgtttgtctca

SEQ ID NO: 828449 - DNA, 15 bp, Homo sapiens
gaggacgtttgtctc

SEQ ID NO: 828450 - DNA, 15 bp, Homo sapiens
tgaggacgtttgtct

SEQ ID NO: 828451 - DNA, 15 bp, Homo sapiens
ttgaggacgtttgtc

SEQ ID NO: 828452 - DNA, 15 bp, Homo sapiens
attgaggacgtttgt

SEQ ID NO: 828453 - DNA, 15 bp, Homo sapiens
cattgaggacgtttg

SEQ ID NO: 828454 - DNA, 15 bp, Homo sapiens
ccattgaggacgttt

SEQ ID NO: 828455 - DNA, 15 bp, Homo sapiens
accattgaggacgtt

SEQ ID NO: 828456 - DNA, 15 bp, Homo sapiens
aaccattgaggacgt

SEQ ID NO: 828457 - DNA, 15 bp, Homo sapiens
taaccattgaggacg

SEQ ID NO: 828458 - DNA, 15 bp, Homo sapiens
ataaccattgaggac

SEQ ID NO: 828459 - DNA, 15 bp, Homo sapiens
aataaccattgagga

SEQ ID NO: 828460 - DNA, 15 bp, Homo sapiens
aaataaccattgagg

SEQ ID NO: 828461 - DNA, 15 bp, Homo sapiens
taaataaccattgag

SEQ ID NO: 828462 - DNA, 15 bp, Homo sapiens
ataaataaccattga

SEQ ID NO: 828463 - DNA, 15 bp, Homo sapiens
tataaataaccattg

SEQ ID NO: 828464 - DNA, 15 bp, Homo sapiens
atataaataaccatt

SEQ ID NO: 828465 - DNA, 15 bp, Homo sapiens
catataaataaccat

SEQ ID NO: 828466 - DNA, 15 bp, Homo sapiens
ccatataaataacca

SEQ ID NO: 828467 - DNA, 15 bp, Homo sapiens
gccatataaataacc

SEQ ID NO: 828468 - DNA, 15 bp, Homo sapiens
tgccatataaataac

SEQ ID NO: 828469 - DNA, 15 bp, Homo sapiens
atgccatataaataa

SEQ ID NO: 828470 - DNA, 15 bp, Homo sapiens
catgccatataaata

SEQ ID NO: 828471 - DNA, 15 bp, Homo sapiens
gcatgccatataaat

SEQ ID NO: 828472 - DNA, 15 bp, Homo sapiens
tgcatgccatataaa

SEQ ID NO: 828473 - DNA, 15 bp, Homo sapiens
atgcatgccatataa

SEQ ID NO: 828474 - DNA, 15 bp, Homo sapiens
tatgcatgccatata

SEQ ID NO: 828475 - DNA, 15 bp, Homo sapiens
atatgcatgccatat

SEQ ID NO: 828476 - DNA, 15 bp, Homo sapiens
tatatgcatgccata

SEQ ID NO: 828477 - DNA, 15 bp, Homo sapiens
ttatatgcatgccat

SEQ ID NO: 828478 - DNA, 15 bp, Homo sapiens
cttatatgcatgcca

SEQ ID NO: 828479 - DNA, 15 bp, Homo sapiens
acttatatgcatgcc

SEQ ID NO: 828480 - DNA, 15 bp, Homo sapiens
cacttatatgcatgc

SEQ ID NO: 828481 - DNA, 15 bp, Homo sapiens
tcacttatatgcatg

SEQ ID NO: 828482 - DNA, 15 bp, Homo sapiens
atcacttatatgcat

SEQ ID NO: 828483 - DNA, 15 bp, Homo sapiens
tatcacttatatgca

SEQ ID NO: 828484 - DNA, 15 bp, Homo sapiens
atatcacttatatgc

SEQ ID NO: 828485 - DNA, 15 bp, Homo sapiens
catatcacttatatg

SEQ ID NO: 828486 - DNA, 15 bp, Homo sapiens
acatatcacttatat

SEQ ID NO: 828487 - DNA, 15 bp, Homo sapiens
cacatatcacttata

SEQ ID NO: 828488 - DNA, 15 bp, Homo sapiens
ccacatatcacttat

SEQ ID NO: 828489 - DNA, 15 bp, Homo sapiens
accacatatcactta

SEQ ID NO: 828490 - DNA, 15 bp, Homo sapiens
taccacatatcactt

SEQ ID NO: 828491 - DNA, 15 bp, Homo sapiens
ataccacatatcact

SEQ ID NO: 828492 - DNA, 15 bp, Homo sapiens
gataccacatatcac

SEQ ID NO: 828493 - DNA, 15 bp, Homo sapiens
agataccacatatca

SEQ ID NO: 828494 - DNA, 15 bp, Homo sapiens
aagataccacatatc

SEQ ID NO: 828495 - DNA, 15 bp, Homo sapiens
aaagataccacatat

SEQ ID NO: 828496 - DNA, 15 bp, Homo sapiens
aaaagataccacata

SEQ ID NO: 828497 - DNA, 15 bp, Homo sapiens
aaaaagataccacat

SEQ ID NO: 828498 - DNA, 15 bp, Homo sapiens
taaaaagataccaca

SEQ ID NO: 828499 - DNA, 15 bp, Homo sapiens
ttaaaaagataccac

SEQ ID NO: 828500 - DNA, 15 bp, Homo sapiens
tttaaaaagatacca

SEQ ID NO: 828501 - DNA, 15 bp, Homo sapiens
ttttaaaaagatacc

SEQ ID NO: 828502 - DNA, 15 bp, Homo sapiens
cttttaaaaagatac

SEQ ID NO: 828503 - DNA, 15 bp, Homo sapiens
tcttttaaaaagata

SEQ ID NO: 828504 - DNA, 15 bp, Homo sapiens
atcttttaaaaagat

SEQ ID NO: 828505 - DNA, 15 bp, Homo sapiens
tatcttttaaaaaga

SEQ ID NO: 828506 - DNA, 15 bp, Homo sapiens
gtatcttttaaaaag

SEQ ID NO: 828507 - DNA, 15 bp, Homo sapiens
ggtatcttttaaaaa

SEQ ID NO: 828508 - DNA, 15 bp, Homo sapiens
tggtatcttttaaaa

SEQ ID NO: 828509 - DNA, 15 bp, Homo sapiens
gtggtatcttttaaa

SEQ ID NO: 828510 - DNA, 15 bp, Homo sapiens
tgtggtatcttttaa

SEQ ID NO: 828511 - DNA, 15 bp, Homo sapiens
ttgtggtatctttta

SEQ ID NO: 828512 - DNA, 15 bp, Homo sapiens
tttgtggtatctttt

SEQ ID NO: 828513 - DNA, 15 bp, Homo sapiens
ttttgtggtatcttt

SEQ ID NO: 828514 - DNA, 15 bp, Homo sapiens
attttgtggtatctt

SEQ ID NO: 828515 - DNA, 15 bp, Homo sapiens
tattttgtggtatct

SEQ ID NO: 828516 - DNA, 15 bp, Homo sapiens
atattttgtggtatc

SEQ ID NO: 828517 - DNA, 15 bp, Homo sapiens
catattttgtggtat

SEQ ID NO: 828518 - DNA, 15 bp, Homo sapiens
gcatattttgtggta

SEQ ID NO: 828519 - DNA, 15 bp, Homo sapiens
tgcatattttgtggt

SEQ ID NO: 828520 - DNA, 15 bp, Homo sapiens
atgcatattttgtgg

SEQ ID NO: 828521 - DNA, 15 bp, Homo sapiens
gatgcatattttgtg

SEQ ID NO: 828522 - DNA, 15 bp, Homo sapiens
agatgcatattttgt

SEQ ID NO: 828523 - DNA, 15 bp, Homo sapiens
aagatgcatattttg

SEQ ID NO: 828524 - DNA, 15 bp, Homo sapiens
aaagatgcatatttt

SEQ ID NO: 828525 - DNA, 15 bp, Homo sapiens
taaagatgcatattt

SEQ ID NO: 828526 - DNA, 15 bp, Homo sapiens
ttaaagatgcatatt

SEQ ID NO: 828527 - DNA, 15 bp, Homo sapiens
tttaaagatgcatat

SEQ ID NO: 828528 - DNA, 15 bp, Homo sapiens
ttttaaagatgcata

SEQ ID NO: 828529 - DNA, 15 bp, Homo sapiens
tttttaaagatgcat

SEQ ID NO: 828530 - DNA, 15 bp, Homo sapiens
atttttaaagatgca

SEQ ID NO: 828531 - DNA, 15 bp, Homo sapiens
tatttttaaagatgc

SEQ ID NO: 828532 - DNA, 15 bp, Homo sapiens
atatttttaaagatg

SEQ ID NO: 828533 - DNA, 15 bp, Homo sapiens
tatatttttaaagat

SEQ ID NO: 828534 - DNA, 15 bp, Homo sapiens
gtatatttttaaaga

SEQ ID NO: 828535 - DNA, 15 bp, Homo sapiens
agtatatttttaaag

SEQ ID NO: 828536 - DNA, 15 bp, Homo sapiens
gagtatatttttaaa

SEQ ID NO: 828537 - DNA, 15 bp, Homo sapiens
ggagtatatttttaa

SEQ ID NO: 828538 - DNA, 15 bp, Homo sapiens
tggagtatattttta

SEQ ID NO: 828539 - DNA, 15 bp, Homo sapiens
ttggagtatattttt

SEQ ID NO: 828540 - DNA, 15 bp, Homo sapiens
tttggagtatatttt

SEQ ID NO: 828541 - DNA, 15 bp, Homo sapiens
ttttggagtatattt

SEQ ID NO: 828542 - DNA, 15 bp, Homo sapiens
tttttggagtatatt

SEQ ID NO: 828543 - DNA, 15 bp, Homo sapiens
atttttggagtatat

SEQ ID NO: 828544 - DNA, 15 bp, Homo sapiens
aatttttggagtata

SEQ ID NO: 828545 - DNA, 15 bp, Homo sapiens
taatttttggagtat

SEQ ID NO: 828546 - DNA, 15 bp, Homo sapiens
ataatttttggagta

SEQ ID NO: 828547 - DNA, 15 bp, Homo sapiens
aataatttttggagt

SEQ ID NO: 828548 - DNA, 15 bp, Homo sapiens
taataatttttggag

SEQ ID NO: 828549 - DNA, 15 bp, Homo sapiens
ttaataatttttgga

SEQ ID NO: 828550 - DNA, 15 bp, Homo sapiens
cttaataatttttgg

SEQ ID NO: 828551 - DNA, 15 bp, Homo sapiens
tcttaataatttttg

SEQ ID NO: 828552 - DNA, 15 bp, Homo sapiens
atcttaataattttt

SEQ ID NO: 828553 - DNA, 15 bp, Homo sapiens
aatcttaataatttt

SEQ ID NO: 828554 - DNA, 15 bp, Homo sapiens
taatcttaataattt

SEQ ID NO: 828555 - DNA, 15 bp, Homo sapiens
ataatcttaataatt

SEQ ID NO: 828556 - DNA, 15 bp, Homo sapiens
aataatcttaataat

SEQ ID NO: 828557 - DNA, 15 bp, Homo sapiens
aaataatcttaataa

SEQ ID NO: 828558 - DNA, 15 bp, Homo sapiens
aaaataatcttaata

SEQ ID NO: 828559 - DNA, 15 bp, Homo sapiens
taaaataatcttaat

SEQ ID NO: 828560 - DNA, 15 bp, Homo sapiens
ttaaaataatcttaa

SEQ ID NO: 828561 - DNA, 15 bp, Homo sapiens
attaaaataatctta

SEQ ID NO: 828562 - DNA, 15 bp, Homo sapiens
tattaaaataatctt

SEQ ID NO: 828563 - DNA, 15 bp, Homo sapiens
ttattaaaataatct

SEQ ID NO: 828564 - DNA, 15 bp, Homo sapiens
attattaaaataatc

SEQ ID NO: 828565 - DNA, 15 bp, Homo sapiens
aattattaaaataat

SEQ ID NO: 828566 - DNA, 15 bp, Homo sapiens
aaattattaaaataa

SEQ ID NO: 828567 - DNA, 15 bp, Homo sapiens
aaaattattaaaata

SEQ ID NO: 828568 - DNA, 15 bp, Homo sapiens
taaaattattaaaat

SEQ ID NO: 828569 - DNA, 15 bp, Homo sapiens
ttaaaattattaaaa

SEQ ID NO: 828570 - DNA, 15 bp, Homo sapiens
attaaaattattaaa

SEQ ID NO: 828571 - DNA, 15 bp, Homo sapiens
tattaaaattattaa

SEQ ID NO: 828572 - DNA, 15 bp, Homo sapiens
ttattaaaattatta

SEQ ID NO: 828573 - DNA, 15 bp, Homo sapiens
attattaaaattatt

SEQ ID NO: 828574 - DNA, 15 bp, Homo sapiens
tattattaaaattat

SEQ ID NO: 828575 - DNA, 15 bp, Homo sapiens
gtattattaaaatta

SEQ ID NO: 828576 - DNA, 15 bp, Homo sapiens
agtattattaaaatt

SEQ ID NO: 828577 - DNA, 15 bp, Homo sapiens
tagtattattaaaat

SEQ ID NO: 828578 - DNA, 15 bp, Homo sapiens
atagtattattaaaa

SEQ ID NO: 828579 - DNA, 15 bp, Homo sapiens
tatagtattattaaa

SEQ ID NO: 828580 - DNA, 15 bp, Homo sapiens
ctatagtattattaa

SEQ ID NO: 828581 - DNA, 15 bp, Homo sapiens
gctatagtattatta

SEQ ID NO: 828582 - DNA, 15 bp, Homo sapiens
ggctatagtattatt

SEQ ID NO: 828583 - DNA, 15 bp, Homo sapiens
aggctatagtattat

SEQ ID NO: 828584 - DNA, 15 bp, Homo sapiens
taggctatagtatta

SEQ ID NO: 828585 - DNA, 15 bp, Homo sapiens
ttaggctatagtatt

SEQ ID NO: 828586 - DNA, 15 bp, Homo sapiens
attaggctatagtat

SEQ ID NO: 828587 - DNA, 15 bp, Homo sapiens
cattaggctatagta

SEQ ID NO: 828588 - DNA, 15 bp, Homo sapiens
ccattaggctatagt

SEQ ID NO: 828589 - DNA, 15 bp, Homo sapiens
tccattaggctatag

SEQ ID NO: 828590 - DNA, 15 bp, Homo sapiens
ttccattaggctata

SEQ ID NO: 828591 - DNA, 15 bp, Homo sapiens
attccattaggctat

SEQ ID NO: 828592 - DNA, 15 bp, Homo sapiens
cattccattaggcta

SEQ ID NO: 828593 - DNA, 15 bp, Homo sapiens
tcattccattaggct

SEQ ID NO: 828594 - DNA, 15 bp, Homo sapiens
ctcattccattaggc

SEQ ID NO: 828595 - DNA, 15 bp, Homo sapiens
gctcattccattagg

SEQ ID NO: 828596 - DNA, 15 bp, Homo sapiens
tgctcattccattag

SEQ ID NO: 828597 - DNA, 15 bp, Homo sapiens
atgctcattccatta

SEQ ID NO: 828598 - DNA, 15 bp, Homo sapiens
aatgctcattccatt

SEQ ID NO: 828599 - DNA, 15 bp, Homo sapiens
caatgctcattccat

SEQ ID NO: 828600 - DNA, 15 bp, Homo sapiens
tcaatgctcattcca

SEQ ID NO: 828601 - DNA, 15 bp, Homo sapiens
atcaatgctcattcc

SEQ ID NO: 828602 - DNA, 15 bp, Homo sapiens
gatcaatgctcattc

SEQ ID NO: 828603 - DNA, 15 bp, Homo sapiens
agatcaatgctcatt

SEQ ID NO: 828604 - DNA, 15 bp, Homo sapiens
cagatcaatgctcat

SEQ ID NO: 828605 - DNA, 15 bp, Homo sapiens
gcagatcaatgctca

SEQ ID NO: 828606 - DNA, 15 bp, Homo sapiens
ggcagatcaatgctc

SEQ ID NO: 828607 - DNA, 15 bp, Homo sapiens
tggcagatcaatgct

SEQ ID NO: 828608 - DNA, 15 bp, Homo sapiens
ctggcagatcaatgc

SEQ ID NO: 828609 - DNA, 15 bp, Homo sapiens
gctggcagatcaatg

SEQ ID NO: 828610 - DNA, 15 bp, Homo sapiens
tgctggcagatcaat

SEQ ID NO: 828611 - DNA, 15 bp, Homo sapiens
ctgctggcagatcaa

SEQ ID NO: 828612 - DNA, 15 bp, Homo sapiens
tctgctggcagatca

SEQ ID NO: 828613 - DNA, 15 bp, Homo sapiens
ctctgctggcagatc

SEQ ID NO: 828614 - DNA, 15 bp, Homo sapiens
tctctgctggcagat

SEQ ID NO: 828615 - DNA, 15 bp, Homo sapiens
ttctctgctggcaga

SEQ ID NO: 828616 - DNA, 15 bp, Homo sapiens
attctctgctggcag

SEQ ID NO: 828617 - DNA, 15 bp, Homo sapiens
aattctctgctggca

SEQ ID NO: 828618 - DNA, 15 bp, Homo sapiens
taattctctgctggc

SEQ ID NO: 828619 - DNA, 15 bp, Homo sapiens
ctaattctctgctgg

SEQ ID NO: 828620 - DNA, 15 bp, Homo sapiens
tctaattctctgctg

SEQ ID NO: 828621 - DNA, 15 bp, Homo sapiens
ctctaattctctgct

SEQ ID NO: 828622 - DNA, 15 bp, Homo sapiens
cctctaattctctgc

SEQ ID NO: 828623 - DNA, 15 bp, Homo sapiens
ccctctaattctctg

SEQ ID NO: 828624 - DNA, 15 bp, Homo sapiens
cccctctaattctct

SEQ ID NO: 828625 - DNA, 15 bp, Homo sapiens
acccctctaattctc

SEQ ID NO: 828626 - DNA, 15 bp, Homo sapiens
tacccctctaattct

SEQ ID NO: 828627 - DNA, 15 bp, Homo sapiens
ttacccctctaattc

SEQ ID NO: 828628 - DNA, 15 bp, Homo sapiens
tttacccctctaatt

SEQ ID NO: 828629 - DNA, 15 bp, Homo sapiens
ttttacccctctaat

SEQ ID NO: 828630 - DNA, 15 bp, Homo sapiens
attttacccctctaa

SEQ ID NO: 828631 - DNA, 15 bp, Homo sapiens
aattttacccctcta

SEQ ID NO: 828632 - DNA, 15 bp, Homo sapiens
caattttacccctct

SEQ ID NO: 828633 - DNA, 15 bp, Homo sapiens
acaattttacccctc

SEQ ID NO: 828634 - DNA, 15 bp, Homo sapiens
cacaattttacccct

SEQ ID NO: 828635 - DNA, 15 bp, Homo sapiens
tcacaattttacccc

SEQ ID NO: 828636 - DNA, 15 bp, Homo sapiens
ttcacaattttaccc

SEQ ID NO: 828637 - DNA, 15 bp, Homo sapiens
cttcacaattttacc

SEQ ID NO: 828638 - DNA, 15 bp, Homo sapiens
tcttcacaattttac

SEQ ID NO: 828639 - DNA, 15 bp, Homo sapiens
atcttcacaatttta

SEQ ID NO: 828640 - DNA, 15 bp, Homo sapiens
tatcttcacaatttt

SEQ ID NO: 828641 - DNA, 15 bp, Homo sapiens
atatcttcacaattt

SEQ ID NO: 828642 - DNA, 15 bp, Homo sapiens
aatatcttcacaatt

SEQ ID NO: 828643 - DNA, 15 bp, Homo sapiens
caatatcttcacaat

SEQ ID NO: 828644 - DNA, 15 bp, Homo sapiens
acaatatcttcacaa

SEQ ID NO: 828645 - DNA, 15 bp, Homo sapiens
tacaatatcttcaca

SEQ ID NO: 828646 - DNA, 15 bp, Homo sapiens
atacaatatcttcac

SEQ ID NO: 828647 - DNA, 15 bp, Homo sapiens
gatacaatatcttca

SEQ ID NO: 828648 - DNA, 15 bp, Homo sapiens
ggatacaatatcttc

SEQ ID NO: 828649 - DNA, 15 bp, Homo sapiens
gggatacaatatctt

SEQ ID NO: 828650 - DNA, 15 bp, Homo sapiens
agggatacaatatct

SEQ ID NO: 828651 - DNA, 15 bp, Homo sapiens
cagggatacaatatc

SEQ ID NO: 828652 - DNA, 15 bp, Homo sapiens
ccagggatacaatat

SEQ ID NO: 828653 - DNA, 15 bp, Homo sapiens
gccagggatacaata

SEQ ID NO: 828654 - DNA, 15 bp, Homo sapiens
agccagggatacaat

SEQ ID NO: 828655 - DNA, 15 bp, Homo sapiens
aagccagggatacaa

SEQ ID NO: 828656 - DNA, 15 bp, Homo sapiens
aaagccagggataca

SEQ ID NO: 828657 - DNA, 15 bp, Homo sapiens
caaagccagggatac

SEQ ID NO: 828658 - DNA, 15 bp, Homo sapiens
tcaaagccagggata

SEQ ID NO: 828659 - DNA, 15 bp, Homo sapiens
ttcaaagccagggat

SEQ ID NO: 828660 - DNA, 15 bp, Homo sapiens
gttcaaagccaggga

SEQ ID NO: 828661 - DNA, 15 bp, Homo sapiens
tgttcaaagccaggg

SEQ ID NO: 828662 - DNA, 15 bp, Homo sapiens
ttgttcaaagccagg

SEQ ID NO: 828663 - DNA, 15 bp, Homo sapiens
tttgttcaaagccag

SEQ ID NO: 828664 - DNA, 15 bp, Homo sapiens
atttgttcaaagcca

SEQ ID NO: 828665 - DNA, 15 bp, Homo sapiens
tatttgttcaaagcc

SEQ ID NO: 828666 - DNA, 15 bp, Homo sapiens
gtatttgttcaaagc

SEQ ID NO: 828667 - DNA, 15 bp, Homo sapiens
ggtatttgttcaaag

SEQ ID NO: 828668 - DNA, 15 bp, Homo sapiens
tggtatttgttcaaa

SEQ ID NO: 828669 - DNA, 15 bp, Homo sapiens
atggtatttgttcaa

SEQ ID NO: 828670 - DNA, 15 bp, Homo sapiens
tatggtatttgttca

SEQ ID NO: 828671 - DNA, 15 bp, Homo sapiens
atatggtatttgttc

SEQ ID NO: 828672 - DNA, 15 bp, Homo sapiens
tatatggtatttgtt

SEQ ID NO: 828673 - DNA, 15 bp, Homo sapiens
ttatatggtatttgt

SEQ ID NO: 828674 - DNA, 15 bp, Homo sapiens
gttatatggtatttg

SEQ ID NO: 828675 - DNA, 15 bp, Homo sapiens
agttatatggtattt

SEQ ID NO: 828676 - DNA, 15 bp, Homo sapiens
aagttatatggtatt

SEQ ID NO: 828677 - DNA, 15 bp, Homo sapiens
gaagttatatggtat

SEQ ID NO: 828678 - DNA, 15 bp, Homo sapiens
agaagttatatggta

SEQ ID NO: 828679 - DNA, 15 bp, Homo sapiens
tagaagttatatggt

SEQ ID NO: 828680 - DNA, 15 bp, Homo sapiens
ctagaagttatatgg

SEQ ID NO: 828681 - DNA, 15 bp, Homo sapiens
actagaagttatatg

SEQ ID NO: 828682 - DNA, 15 bp, Homo sapiens
cactagaagttatat

SEQ ID NO: 828683 - DNA, 15 bp, Homo sapiens
tcactagaagttata

SEQ ID NO: 828684 - DNA, 15 bp, Homo sapiens
gtcactagaagttat

SEQ ID NO: 828685 - DNA, 15 bp, Homo sapiens
agtcactagaagtta

SEQ ID NO: 828686 - DNA, 15 bp, Homo sapiens
cagtcactagaagtt

SEQ ID NO: 828687 - DNA, 15 bp, Homo sapiens
gcagtcactagaagt

SEQ ID NO: 828688 - DNA, 15 bp, Homo sapiens
tgcagtcactagaag

SEQ ID NO: 828689 - DNA, 15 bp, Homo sapiens
ttgcagtcactagaa

SEQ ID NO: 828690 - DNA, 15 bp, Homo sapiens
attgcagtcactaga

SEQ ID NO: 828691 - DNA, 15 bp, Homo sapiens
aattgcagtcactag

SEQ ID NO: 828692 - DNA, 15 bp, Homo sapiens
gaattgcagtcacta

SEQ ID NO: 828693 - DNA, 15 bp, Homo sapiens
agaattgcagtcact

SEQ ID NO: 828694 - DNA, 15 bp, Homo sapiens
aagaattgcagtcac

SEQ ID NO: 828695 - DNA, 15 bp, Homo sapiens
aaagaattgcagtca

SEQ ID NO: 828696 - DNA, 15 bp, Homo sapiens
caaagaattgcagtc

SEQ ID NO: 828697 - DNA, 15 bp, Homo sapiens
tcaaagaattgcagt

SEQ ID NO: 828698 - DNA, 15 bp, Homo sapiens
atcaaagaattgcag

SEQ ID NO: 828699 - DNA, 15 bp, Homo sapiens
catcaaagaattgca

SEQ ID NO: 828700 - DNA, 15 bp, Homo sapiens
gcatcaaagaattgc

SEQ ID NO: 828701 - DNA, 15 bp, Homo sapiens
tgcatcaaagaattg

SEQ ID NO: 828702 - DNA, 15 bp, Homo sapiens
ctgcatcaaagaatt

SEQ ID NO: 828703 - DNA, 15 bp, Homo sapiens
tctgcatcaaagaat

SEQ ID NO: 828704 - DNA, 15 bp, Homo sapiens
ctctgcatcaaagaa

SEQ ID NO: 828705 - DNA, 15 bp, Homo sapiens
cctctgcatcaaaga

SEQ ID NO: 828706 - DNA, 15 bp, Homo sapiens
gcctctgcatcaaag

SEQ ID NO: 828707 - DNA, 15 bp, Homo sapiens
tgcctctgcatcaaa

SEQ ID NO: 828708 - DNA, 15 bp, Homo sapiens
ttgcctctgcatcaa

SEQ ID NO: 828709 - DNA, 15 bp, Homo sapiens
tttgcctctgcatca

SEQ ID NO: 828710 - DNA, 15 bp, Homo sapiens
ttttgcctctgcatc

SEQ ID NO: 828711 - DNA, 15 bp, Homo sapiens
attttgcctctgcat

SEQ ID NO: 828712 - DNA, 15 bp, Homo sapiens
cattttgcctctgca

SEQ ID NO: 828713 - DNA, 15 bp, Homo sapiens
tcattttgcctctgc

SEQ ID NO: 828714 - DNA, 15 bp, Homo sapiens
ttcattttgcctctg

SEQ ID NO: 828715 - DNA, 15 bp, Homo sapiens
cttcattttgcctct

SEQ ID NO: 828716 - DNA, 15 bp, Homo sapiens
tcttcattttgcctc

SEQ ID NO: 828717 - DNA, 15 bp, Homo sapiens
atcttcattttgcct

SEQ ID NO: 828718 - DNA, 15 bp, Homo sapiens
catcttcattttgcc

SEQ ID NO: 828719 - DNA, 15 bp, Homo sapiens
tcatcttcattttgc

SEQ ID NO: 828720 - DNA, 15 bp, Homo sapiens
atcatcttcattttg

SEQ ID NO: 828721 - DNA, 15 bp, Homo sapiens
catcatcttcatttt

SEQ ID NO: 828722 - DNA, 15 bp, Homo sapiens
acatcatcttcattt

SEQ ID NO: 828723 - DNA, 15 bp, Homo sapiens
gacatcatcttcatt

SEQ ID NO: 828724 - DNA, 15 bp, Homo sapiens
tgacatcatcttcat

SEQ ID NO: 828725 - DNA, 15 bp, Homo sapiens
atgacatcatcttca

SEQ ID NO: 828726 - DNA, 15 bp, Homo sapiens
aatgacatcatcttc

SEQ ID NO: 828727 - DNA, 15 bp, Homo sapiens
taatgacatcatctt

SEQ ID NO: 828728 - DNA, 15 bp, Homo sapiens
gtaatgacatcatct

SEQ ID NO: 828729 - DNA, 15 bp, Homo sapiens
agtaatgacatcatc

SEQ ID NO: 828730 - DNA, 15 bp, Homo sapiens
gagtaatgacatcat

SEQ ID NO: 828731 - DNA, 15 bp, Homo sapiens
tgagtaatgacatca

SEQ ID NO: 828732 - DNA, 15 bp, Homo sapiens
atgagtaatgacatc

SEQ ID NO: 828733 - DNA, 15 bp, Homo sapiens
aatgagtaatgacat

SEQ ID NO: 828734 - DNA, 15 bp, Homo sapiens
aaatgagtaatgaca

SEQ ID NO: 828735 - DNA, 15 bp, Homo sapiens
gaaatgagtaatgac

SEQ ID NO: 828736 - DNA, 15 bp, Homo sapiens
tgaaatgagtaatga

SEQ ID NO: 828737 - DNA, 15 bp, Homo sapiens
gtgaaatgagtaatg

SEQ ID NO: 828738 - DNA, 15 bp, Homo sapiens
tgtgaaatgagtaat

SEQ ID NO: 828739 - DNA, 15 bp, Homo sapiens
ttgtgaaatgagtaa

SEQ ID NO: 828740 - DNA, 15 bp, Homo sapiens
gttgtgaaatgagta

SEQ ID NO: 828741 - DNA, 15 bp, Homo sapiens
tgttgtgaaatgagt

SEQ ID NO: 828742 - DNA, 15 bp, Homo sapiens
ttgttgtgaaatgag

SEQ ID NO: 828743 - DNA, 15 bp, Homo sapiens
attgttgtgaaatga

SEQ ID NO: 828744 - DNA, 15 bp, Homo sapiens
tattgttgtgaaatg

SEQ ID NO: 828745 - DNA, 15 bp, Homo sapiens
atattgttgtgaaat

SEQ ID NO: 828746 - DNA, 15 bp, Homo sapiens
aatattgttgtgaaa

SEQ ID NO: 828747 - DNA, 15 bp, Homo sapiens
caatattgttgtgaa

SEQ ID NO: 828748 - DNA, 15 bp, Homo sapiens
ccaatattgttgtga

SEQ ID NO: 828749 - DNA, 15 bp, Homo sapiens
tccaatattgttgtg

SEQ ID NO: 828750 - DNA, 15 bp, Homo sapiens
ctccaatattgttgt

SEQ ID NO: 828751 - DNA, 15 bp, Homo sapiens
tctccaatattgttg

SEQ ID NO: 828752 - DNA, 15 bp, Homo sapiens
ttctccaatattgtt

SEQ ID NO: 828753 - DNA, 15 bp, Homo sapiens
attctccaatattgt

SEQ ID NO: 828754 - DNA, 15 bp, Homo sapiens
cattctccaatattg

SEQ ID NO: 828755 - DNA, 15 bp, Homo sapiens
tcattctccaatatt

SEQ ID NO: 828756 - DNA, 15 bp, Homo sapiens
ctcattctccaatat

SEQ ID NO: 828757 - DNA, 15 bp, Homo sapiens
gctcattctccaata

SEQ ID NO: 828758 - DNA, 15 bp, Homo sapiens
agctcattctccaat

SEQ ID NO: 828759 - DNA, 15 bp, Homo sapiens
tagctcattctccaa

SEQ ID NO: 828760 - DNA, 15 bp, Homo sapiens
ttagctcattctcca

SEQ ID NO: 828761 - DNA, 15 bp, Homo sapiens
attagctcattctcc

SEQ ID NO: 828762 - DNA, 15 bp, Homo sapiens
aattagctcattctc

SEQ ID NO: 828763 - DNA, 15 bp, Homo sapiens
taattagctcattct

SEQ ID NO: 828764 - DNA, 15 bp, Homo sapiens
ataattagctcattc

SEQ ID NO: 828765 - DNA, 15 bp, Homo sapiens
gataattagctcatt

SEQ ID NO: 828766 - DNA, 15 bp, Homo sapiens
agataattagctcat

SEQ ID NO: 828767 - DNA, 15 bp, Homo sapiens
cagataattagctca

SEQ ID NO: 828768 - DNA, 15 bp, Homo sapiens
tcagataattagctc

SEQ ID NO: 828769 - DNA, 15 bp, Homo sapiens
ttcagataattagct

SEQ ID NO: 828770 - DNA, 15 bp, Homo sapiens
tttcagataattagc

SEQ ID NO: 828771 - DNA, 15 bp, Homo sapiens
ttttcagataattag

SEQ ID NO: 828772 - DNA, 15 bp, Homo sapiens
attttcagataatta

SEQ ID NO: 828773 - DNA, 15 bp, Homo sapiens
aattttcagataatt

SEQ ID NO: 828774 - DNA, 15 bp, Homo sapiens
taattttcagataat

SEQ ID NO: 828775 - DNA, 15 bp, Homo sapiens
gtaattttcagataa

SEQ ID NO: 828776 - DNA, 15 bp, Homo sapiens
tgtaattttcagata

SEQ ID NO: 828777 - DNA, 15 bp, Homo sapiens
atgtaattttcagat

SEQ ID NO: 828778 - DNA, 15 bp, Homo sapiens
catgtaattttcaga

SEQ ID NO: 828779 - DNA, 15 bp, Homo sapiens
tcatgtaattttcag

SEQ ID NO: 828780 - DNA, 15 bp, Homo sapiens
ttcatgtaattttca

SEQ ID NO: 828781 - DNA, 15 bp, Homo sapiens
cttcatgtaattttc

SEQ ID NO: 828782 - DNA, 15 bp, Homo sapiens
acttcatgtaatttt

SEQ ID NO: 828783 - DNA, 15 bp, Homo sapiens
tacttcatgtaattt

SEQ ID NO: 828784 - DNA, 15 bp, Homo sapiens
atacttcatgtaatt

SEQ ID NO: 828785 - DNA, 15 bp, Homo sapiens
aatacttcatgtaat

SEQ ID NO: 828786 - DNA, 15 bp, Homo sapiens
gaatacttcatgtaa

SEQ ID NO: 828787 - DNA, 15 bp, Homo sapiens
ggaatacttcatgta

SEQ ID NO: 828788 - DNA, 15 bp, Homo sapiens
tggaatacttcatgt

SEQ ID NO: 828789 - DNA, 15 bp, Homo sapiens
ttggaatacttcatg

SEQ ID NO: 828790 - DNA, 15 bp, Homo sapiens
cttggaatacttcat

SEQ ID NO: 828791 - DNA, 15 bp, Homo sapiens
tcttggaatacttca

SEQ ID NO: 828792 - DNA, 15 bp, Homo sapiens
ctcttggaatacttc

SEQ ID NO: 828793 - DNA, 15 bp, Homo sapiens
tctcttggaatactt

SEQ ID NO: 828794 - DNA, 15 bp, Homo sapiens
ttctcttggaatact

SEQ ID NO: 828795 - DNA, 15 bp, Homo sapiens
tttctcttggaatac

SEQ ID NO: 828796 - DNA, 15 bp, Homo sapiens
gtttctcttggaata

SEQ ID NO: 828797 - DNA, 15 bp, Homo sapiens
ggtttctcttggaat

SEQ ID NO: 828798 - DNA, 15 bp, Homo sapiens
tggtttctcttggaa

SEQ ID NO: 828799 - DNA, 15 bp, Homo sapiens
ctggtttctcttgga

SEQ ID NO: 828800 - DNA, 15 bp, Homo sapiens
actggtttctcttgg

SEQ ID NO: 828801 - DNA, 15 bp, Homo sapiens
tactggtttctcttg

SEQ ID NO: 828802 - DNA, 15 bp, Homo sapiens
atactggtttctctt

SEQ ID NO: 828803 - DNA, 15 bp, Homo sapiens
tatactggtttctct

SEQ ID NO: 828804 - DNA, 15 bp, Homo sapiens
atatactggtttctc

SEQ ID NO: 828805 - DNA, 15 bp, Homo sapiens
catatactggtttct

SEQ ID NO: 828806 - DNA, 15 bp, Homo sapiens
ccatatactggtttc

SEQ ID NO: 828807 - DNA, 15 bp, Homo sapiens
tccatatactggttt

SEQ ID NO: 828808 - DNA, 15 bp, Homo sapiens
atccatatactggtt

SEQ ID NO: 828809 - DNA, 15 bp, Homo sapiens
gatccatatactggt

SEQ ID NO: 828810 - DNA, 15 bp, Homo sapiens
agatccatatactgg

SEQ ID NO: 828811 - DNA, 15 bp, Homo sapiens
aagatccatatactg

SEQ ID NO: 828812 - DNA, 15 bp, Homo sapiens
caagatccatatact

SEQ ID NO: 828813 - DNA, 15 bp, Homo sapiens
acaagatccatatac

SEQ ID NO: 828814 - DNA, 15 bp, Homo sapiens
cacaagatccatata

SEQ ID NO: 828815 - DNA, 15 bp, Homo sapiens
gcacaagatccatat

SEQ ID NO: 828816 - DNA, 15 bp, Homo sapiens
agcacaagatccata

SEQ ID NO: 828817 - DNA, 15 bp, Homo sapiens
cagcacaagatccat

SEQ ID NO: 828818 - DNA, 15 bp, Homo sapiens
acagcacaagatcca

SEQ ID NO: 828819 - DNA, 15 bp, Homo sapiens
aacagcacaagatcc

SEQ ID NO: 828820 - DNA, 15 bp, Homo sapiens
gaacagcacaagatc

SEQ ID NO: 828821 - DNA, 15 bp, Homo sapiens
tgaacagcacaagat

SEQ ID NO: 828822 - DNA, 15 bp, Homo sapiens
gtgaacagcacaaga

SEQ ID NO: 828823 - DNA, 15 bp, Homo sapiens
agtgaacagcacaag

SEQ ID NO: 828824 - DNA, 15 bp, Homo sapiens
tagtgaacagcacaa

SEQ ID NO: 828825 - DNA, 15 bp, Homo sapiens
atagtgaacagcaca

SEQ ID NO: 828826 - DNA, 15 bp, Homo sapiens
catagtgaacagcac

SEQ ID NO: 828827 - DNA, 15 bp, Homo sapiens
acatagtgaacagca

SEQ ID NO: 828828 - DNA, 15 bp, Homo sapiens
tacatagtgaacagc

SEQ ID NO: 828829 - DNA, 15 bp, Homo sapiens
ttacatagtgaacag

SEQ ID NO: 828830 - DNA, 15 bp, Homo sapiens
tttacatagtgaaca

SEQ ID NO: 828831 - DNA, 15 bp, Homo sapiens
atttacatagtgaac

SEQ ID NO: 828832 - DNA, 15 bp, Homo sapiens
aatttacatagtgaa

SEQ ID NO: 828833 - DNA, 15 bp, Homo sapiens
caatttacatagtga

SEQ ID NO: 828834 - DNA, 15 bp, Homo sapiens
acaatttacatagtg

SEQ ID NO: 828835 - DNA, 15 bp, Homo sapiens
cacaatttacatagt

SEQ ID NO: 828836 - DNA, 15 bp, Homo sapiens
acacaatttacatag

SEQ ID NO: 828837 - DNA, 15 bp, Homo sapiens
cacacaatttacata

SEQ ID NO: 828838 - DNA, 15 bp, Homo sapiens
tcacacaatttacat

SEQ ID NO: 828839 - DNA, 15 bp, Homo sapiens
atcacacaatttaca

SEQ ID NO: 828840 - DNA, 15 bp, Homo sapiens
catcacacaatttac

SEQ ID NO: 828841 - DNA, 15 bp, Homo sapiens
ccatcacacaattta

SEQ ID NO: 828842 - DNA, 15 bp, Homo sapiens
accatcacacaattt

SEQ ID NO: 828843 - DNA, 15 bp, Homo sapiens
caccatcacacaatt

SEQ ID NO: 828844 - DNA, 15 bp, Homo sapiens
ccaccatcacacaat

SEQ ID NO: 828845 - DNA, 15 bp, Homo sapiens
cccaccatcacacaa

SEQ ID NO: 828846 - DNA, 15 bp, Homo sapiens
acccaccatcacaca

SEQ ID NO: 828847 - DNA, 15 bp, Homo sapiens
aacccaccatcacac

SEQ ID NO: 828848 - DNA, 15 bp, Homo sapiens
gaacccaccatcaca

SEQ ID NO: 828849 - DNA, 15 bp, Homo sapiens
tgaacccaccatcac

SEQ ID NO: 828850 - DNA, 15 bp, Homo sapiens
ctgaacccaccatca

SEQ ID NO: 828851 - DNA, 15 bp, Homo sapiens
actgaacccaccatc

SEQ ID NO: 828852 - DNA, 15 bp, Homo sapiens
tactgaacccaccat

SEQ ID NO: 828853 - DNA, 15 bp, Homo sapiens
ctactgaacccacca

SEQ ID NO: 828854 - DNA, 15 bp, Homo sapiens
actactgaacccacc

SEQ ID NO: 828855 - DNA, 15 bp, Homo sapiens
aactactgaacccac

SEQ ID NO: 828856 - DNA, 15 bp, Homo sapiens
taactactgaaccca

SEQ ID NO: 828857 - DNA, 15 bp, Homo sapiens
ataactactgaaccc

SEQ ID NO: 828858 - DNA, 15 bp, Homo sapiens
aataactactgaacc

SEQ ID NO: 828859 - DNA, 15 bp, Homo sapiens
caataactactgaac

SEQ ID NO: 828860 - DNA, 15 bp, Homo sapiens
gcaataactactgaa

SEQ ID NO: 828861 - DNA, 15 bp, Homo sapiens
agcaataactactga

SEQ ID NO: 828862 - DNA, 15 bp, Homo sapiens
cagcaataactactg

SEQ ID NO: 828863 - DNA, 15 bp, Homo sapiens
acagcaataactact

SEQ ID NO: 828864 - DNA, 15 bp, Homo sapiens
tacagcaataactac

SEQ ID NO: 828865 - DNA, 15 bp, Homo sapiens
ttacagcaataacta

SEQ ID NO: 828866 - DNA, 15 bp, Homo sapiens
tttacagcaataact

SEQ ID NO: 828867 - DNA, 15 bp, Homo sapiens
atttacagcaataac

SEQ ID NO: 828868 - DNA, 15 bp, Homo sapiens
catttacagcaataa

SEQ ID NO: 828869 - DNA, 15 bp, Homo sapiens
acatttacagcaata

SEQ ID NO: 828870 - DNA, 15 bp, Homo sapiens
aacatttacagcaat

SEQ ID NO: 828871 - DNA, 15 bp, Homo sapiens
taacatttacagcaa

SEQ ID NO: 828872 - DNA, 15 bp, Homo sapiens
ctaacatttacagca

SEQ ID NO: 828873 - DNA, 15 bp, Homo sapiens
cctaacatttacagc

SEQ ID NO: 828874 - DNA, 15 bp, Homo sapiens
ccctaacatttacag

SEQ ID NO: 828875 - DNA, 15 bp, Homo sapiens
gccctaacatttaca

SEQ ID NO: 828876 - DNA, 15 bp, Homo sapiens
tgccctaacatttac

SEQ ID NO: 828877 - DNA, 15 bp, Homo sapiens
ctgccctaacattta

SEQ ID NO: 828878 - DNA, 15 bp, Homo sapiens
cctgccctaacattt

SEQ ID NO: 828879 - DNA, 15 bp, Homo sapiens
ccctgccctaacatt

SEQ ID NO: 828880 - DNA, 15 bp, Homo sapiens
tccctgccctaacat

SEQ ID NO: 828881 - DNA, 15 bp, Homo sapiens
ttccctgccctaaca

SEQ ID NO: 828882 - DNA, 15 bp, Homo sapiens
attccctgccctaac

SEQ ID NO: 828883 - DNA, 15 bp, Homo sapiens
tattccctgccctaa

SEQ ID NO: 828884 - DNA, 15 bp, Homo sapiens
atattccctgcccta

SEQ ID NO: 828885 - DNA, 15 bp, Homo sapiens
catattccctgccct

SEQ ID NO: 828886 - DNA, 15 bp, Homo sapiens
acatattccctgccc

SEQ ID NO: 828887 - DNA, 15 bp, Homo sapiens
aacatattccctgcc

SEQ ID NO: 828888 - DNA, 15 bp, Homo sapiens
taacatattccctgc

SEQ ID NO: 828889 - DNA, 15 bp, Homo sapiens
gtaacatattccctg

SEQ ID NO: 828890 - DNA, 15 bp, Homo sapiens
agtaacatattccct

SEQ ID NO: 828891 - DNA, 15 bp, Homo sapiens
tagtaacatattccc

SEQ ID NO: 828892 - DNA, 15 bp, Homo sapiens
atagtaacatattcc

SEQ ID NO: 828893 - DNA, 15 bp, Homo sapiens
catagtaacatattc

SEQ ID NO: 828894 - DNA, 15 bp, Homo sapiens
tcatagtaacatatt

SEQ ID NO: 828895 - DNA, 15 bp, Homo sapiens
ttcatagtaacatat

SEQ ID NO: 828896 - DNA, 15 bp, Homo sapiens
cttcatagtaacata

SEQ ID NO: 828897 - DNA, 15 bp, Homo sapiens
acttcatagtaacat

SEQ ID NO: 828898 - DNA, 15 bp, Homo sapiens
aacttcatagtaaca

SEQ ID NO: 828899 - DNA, 15 bp, Homo sapiens
aaacttcatagtaac

SEQ ID NO: 828900 - DNA, 15 bp, Homo sapiens
taaacttcatagtaa

SEQ ID NO: 828901 - DNA, 15 bp, Homo sapiens
ataaacttcatagta

SEQ ID NO: 828902 - DNA, 15 bp, Homo sapiens
aataaacttcatagt

SEQ ID NO: 828903 - DNA, 15 bp, Homo sapiens
caataaacttcatag

SEQ ID NO: 828904 - DNA, 15 bp, Homo sapiens
tcaataaacttcata

SEQ ID NO: 828905 - DNA, 15 bp, Homo sapiens
gtcaataaacttcat

SEQ ID NO: 828906 - DNA, 15 bp, Homo sapiens
tgtcaataaacttca

SEQ ID NO: 828907 - DNA, 15 bp, Homo sapiens
ctgtcaataaacttc

SEQ ID NO: 828908 - DNA, 15 bp, Homo sapiens
actgtcaataaactt

SEQ ID NO: 828909 - DNA, 15 bp, Homo sapiens
tactgtcaataaact

SEQ ID NO: 828910 - DNA, 15 bp, Homo sapiens
atactgtcaataaac

SEQ ID NO: 828911 - DNA, 15 bp, Homo sapiens
tatactgtcaataaa

SEQ ID NO: 828912 - DNA, 15 bp, Homo sapiens
gtatactgtcaataa

SEQ ID NO: 828913 - DNA, 15 bp, Homo sapiens
agtatactgtcaata

SEQ ID NO: 828914 - DNA, 15 bp, Homo sapiens
gagtatactgtcaat

SEQ ID NO: 828915 - DNA, 15 bp, Homo sapiens
ggagtatactgtcaa

SEQ ID NO: 828916 - DNA, 15 bp, Homo sapiens
tggagtatactgtca

SEQ ID NO: 828917 - DNA, 15 bp, Homo sapiens
ttggagtatactgtc

SEQ ID NO: 828918 - DNA, 15 bp, Homo sapiens
tttggagtatactgt

SEQ ID NO: 828919 - DNA, 15 bp, Homo sapiens
atttggagtatactg

SEQ ID NO: 828920 - DNA, 15 bp, Homo sapiens
tatttggagtatact

SEQ ID NO: 828921 - DNA, 15 bp, Homo sapiens
ctatttggagtatac

SEQ ID NO: 828922 - DNA, 15 bp, Homo sapiens
actatttggagtata

SEQ ID NO: 828923 - DNA, 15 bp, Homo sapiens
cactatttggagtat

SEQ ID NO: 828924 - DNA, 15 bp, Homo sapiens
acactatttggagta

SEQ ID NO: 828925 - DNA, 15 bp, Homo sapiens
aacactatttggagt

SEQ ID NO: 828926 - DNA, 15 bp, Homo sapiens
aaacactatttggag

SEQ ID NO: 828927 - DNA, 15 bp, Homo sapiens
caaacactatttgga

SEQ ID NO: 828928 - DNA, 15 bp, Homo sapiens
acaaacactatttgg

SEQ ID NO: 828929 - DNA, 15 bp, Homo sapiens
cacaaacactatttg

SEQ ID NO: 828930 - DNA, 15 bp, Homo sapiens
tcacaaacactattt

SEQ ID NO: 828931 - DNA, 15 bp, Homo sapiens
atcacaaacactatt

SEQ ID NO: 828932 - DNA, 15 bp, Homo sapiens
aatcacaaacactat

SEQ ID NO: 828933 - DNA, 15 bp, Homo sapiens
gaatcacaaacacta

SEQ ID NO: 828934 - DNA, 15 bp, Homo sapiens
tgaatcacaaacact

SEQ ID NO: 828935 - DNA, 15 bp, Homo sapiens
ttgaatcacaaacac

SEQ ID NO: 828936 - DNA, 15 bp, Homo sapiens
tttgaatcacaaaca

SEQ ID NO: 828937 - DNA, 15 bp, Homo sapiens
ttttgaatcacaaac

SEQ ID NO: 828938 - DNA, 15 bp, Homo sapiens
cttttgaatcacaaa

SEQ ID NO: 828939 - DNA, 15 bp, Homo sapiens
gcttttgaatcacaa

SEQ ID NO: 828940 - DNA, 15 bp, Homo sapiens
tgcttttgaatcaca

SEQ ID NO: 828941 - DNA, 15 bp, Homo sapiens
ttgcttttgaatcac

SEQ ID NO: 828942 - DNA, 15 bp, Homo sapiens
attgcttttgaatca

SEQ ID NO: 828943 - DNA, 15 bp, Homo sapiens
tattgcttttgaatc

SEQ ID NO: 828944 - DNA, 15 bp, Homo sapiens
atattgcttttgaat

SEQ ID NO: 828945 - DNA, 15 bp, Homo sapiens
gatattgcttttgaa

SEQ ID NO: 828946 - DNA, 15 bp, Homo sapiens
agatattgcttttga

SEQ ID NO: 828947 - DNA, 15 bp, Homo sapiens
aagatattgcttttg

SEQ ID NO: 828948 - DNA, 15 bp, Homo sapiens
aaagatattgctttt

SEQ ID NO: 828949 - DNA, 15 bp, Homo sapiens
caaagatattgcttt

SEQ ID NO: 828950 - DNA, 15 bp, Homo sapiens
tcaaagatattgctt

SEQ ID NO: 828951 - DNA, 15 bp, Homo sapiens
atcaaagatattgct

SEQ ID NO: 828952 - DNA, 15 bp, Homo sapiens
tatcaaagatattgc

SEQ ID NO: 828953 - DNA, 15 bp, Homo sapiens
ctatcaaagatattg

SEQ ID NO: 828954 - DNA, 15 bp, Homo sapiens
actatcaaagatatt

SEQ ID NO: 828955 - DNA, 15 bp, Homo sapiens
aactatcaaagatat

SEQ ID NO: 828956 - DNA, 15 bp, Homo sapiens
caactatcaaagata

SEQ ID NO: 828957 - DNA, 15 bp, Homo sapiens
ccaactatcaaagat

SEQ ID NO: 828958 - DNA, 15 bp, Homo sapiens
gccaactatcaaaga

SEQ ID NO: 828959 - DNA, 15 bp, Homo sapiens
tgccaactatcaaag

SEQ ID NO: 828960 - DNA, 15 bp, Homo sapiens
atgccaactatcaaa

SEQ ID NO: 828961 - DNA, 15 bp, Homo sapiens
aatgccaactatcaa

SEQ ID NO: 828962 - DNA, 15 bp, Homo sapiens
aaatgccaactatca

SEQ ID NO: 828963 - DNA, 15 bp, Homo sapiens
caaatgccaactatc

SEQ ID NO: 828964 - DNA, 15 bp, Homo sapiens
gcaaatgccaactat

SEQ ID NO: 828965 - DNA, 15 bp, Homo sapiens
tgcaaatgccaacta

SEQ ID NO: 828966 - DNA, 15 bp, Homo sapiens
ttgcaaatgccaact

SEQ ID NO: 828967 - DNA, 15 bp, Homo sapiens
attgcaaatgccaac

SEQ ID NO: 828968 - DNA, 15 bp, Homo sapiens
aattgcaaatgccaa

SEQ ID NO: 828969 - DNA, 15 bp, Homo sapiens
gaattgcaaatgcca

SEQ ID NO: 828970 - DNA, 15 bp, Homo sapiens
ggaattgcaaatgcc

SEQ ID NO: 828971 - DNA, 15 bp, Homo sapiens
aggaattgcaaatgc

SEQ ID NO: 828972 - DNA, 15 bp, Homo sapiens
aaggaattgcaaatg

SEQ ID NO: 828973 - DNA, 15 bp, Homo sapiens
aaaggaattgcaaat

SEQ ID NO: 828974 - DNA, 15 bp, Homo sapiens
taaaggaattgcaaa

SEQ ID NO: 828975 - DNA, 15 bp, Homo sapiens
ataaaggaattgcaa

SEQ ID NO: 828976 - DNA, 15 bp, Homo sapiens
tataaaggaattgca

SEQ ID NO: 828977 - DNA, 15 bp, Homo sapiens
atataaaggaattgc

SEQ ID NO: 828978 - DNA, 15 bp, Homo sapiens
tatataaaggaattg

SEQ ID NO: 828979 - DNA, 15 bp, Homo sapiens
ttatataaaggaatt

SEQ ID NO: 828980 - DNA, 15 bp, Homo sapiens
attatataaaggaat

SEQ ID NO: 828981 - DNA, 15 bp, Homo sapiens
gattatataaaggaa

SEQ ID NO: 828982 - DNA, 15 bp, Homo sapiens
agattatataaagga

SEQ ID NO: 828983 - DNA, 15 bp, Homo sapiens
aagattatataaagg

SEQ ID NO: 828984 - DNA, 15 bp, Homo sapiens
aaagattatataaag

SEQ ID NO: 828985 - DNA, 15 bp, Homo sapiens
aaaagattatataaa

SEQ ID NO: 828986 - DNA, 15 bp, Homo sapiens
taaaagattatataa

SEQ ID NO: 828987 - DNA, 15 bp, Homo sapiens
ataaaagattatata

SEQ ID NO: 828988 - DNA, 15 bp, Homo sapiens
cataaaagattatat

SEQ ID NO: 828989 - DNA, 15 bp, Homo sapiens
tcataaaagattata

SEQ ID NO: 828990 - DNA, 15 bp, Homo sapiens
ttcataaaagattat

SEQ ID NO: 828991 - DNA, 15 bp, Homo sapiens
tttcataaaagatta

SEQ ID NO: 828992 - DNA, 15 bp, Homo sapiens
ttttcataaaagatt

SEQ ID NO: 828993 - DNA, 15 bp, Homo sapiens
tttttcataaaagat

SEQ ID NO: 828994 - DNA, 15 bp, Homo sapiens
ttttttcataaaaga

SEQ ID NO: 828995 - DNA, 15 bp, Homo sapiens
atttttttcataaaa

SEQ ID NO: 828996 - DNA, 15 bp, Homo sapiens
aatttttttcataaa

SEQ ID NO: 828997 - DNA, 15 bp, Homo sapiens
caatttttttcataa

SEQ ID NO: 828998 - DNA, 15 bp, Homo sapiens
gcaatttttttcata

SEQ ID NO: 828999 - DNA, 15 bp, Homo sapiens
tgcaatttttttcat

SEQ ID NO: 829000 - DNA, 15 bp, Homo sapiens
ctgcaatttttttca

SEQ ID NO: 829001 - DNA, 15 bp, Homo sapiens
tctgcaatttttttc

SEQ ID NO: 829002 - DNA, 15 bp, Homo sapiens
ctctgcaattttttt

SEQ ID NO: 829003 - DNA, 15 bp, Homo sapiens
tctctgcaatttttt

SEQ ID NO: 829004 - DNA, 15 bp, Homo sapiens
ttctctgcaattttt

SEQ ID NO: 829005 - DNA, 15 bp, Homo sapiens
tttctctgcaatttt

SEQ ID NO: 829006 - DNA, 15 bp, Homo sapiens
ctttctctgcaattt

SEQ ID NO: 829007 - DNA, 15 bp, Homo sapiens
actttctctgcaatt

SEQ ID NO: 829008 - DNA, 15 bp, Homo sapiens
tactttctctgcaat

SEQ ID NO: 829009 - DNA, 15 bp, Homo sapiens
ttactttctctgcaa

SEQ ID NO: 829010 - DNA, 15 bp, Homo sapiens
tttactttctctgca

SEQ ID NO: 829011 - DNA, 15 bp, Homo sapiens
ttttactttctctgc

SEQ ID NO: 829012 - DNA, 15 bp, Homo sapiens
attttactttctctg

SEQ ID NO: 829013 - DNA, 15 bp, Homo sapiens
cattttactttctct

SEQ ID NO: 829014 - DNA, 15 bp, Homo sapiens
acattttactttctc

SEQ ID NO: 829015 - DNA, 15 bp, Homo sapiens
tacattttactttct

SEQ ID NO: 829016 - DNA, 15 bp, Homo sapiens
ctacattttactttc

SEQ ID NO: 829017 - DNA, 15 bp, Homo sapiens
gctacattttacttt

SEQ ID NO: 829018 - DNA, 15 bp, Homo sapiens
agctacattttactt

SEQ ID NO: 829019 - DNA, 15 bp, Homo sapiens
aagctacattttact

SEQ ID NO: 829020 - DNA, 15 bp, Homo sapiens
taagctacattttac

SEQ ID NO: 829021 - DNA, 15 bp, Homo sapiens
ttaagctacatttta

SEQ ID NO: 829022 - DNA, 15 bp, Homo sapiens
tttaagctacatttt

SEQ ID NO: 829023 - DNA, 15 bp, Homo sapiens
ttttaagctacattt

SEQ ID NO: 829024 - DNA, 15 bp, Homo sapiens
attttaagctacatt

SEQ ID NO: 829025 - DNA, 15 bp, Homo sapiens
tattttaagctacat

SEQ ID NO: 829026 - DNA, 15 bp, Homo sapiens
gtattttaagctaca

SEQ ID NO: 829027 - DNA, 15 bp, Homo sapiens
tgtattttaagctac

SEQ ID NO: 829028 - DNA, 15 bp, Homo sapiens
ctgtattttaagcta

SEQ ID NO: 829029 - DNA, 15 bp, Homo sapiens
actgtattttaagct

SEQ ID NO: 829030 - DNA, 15 bp, Homo sapiens
tactgtattttaagc

SEQ ID NO: 829031 - DNA, 15 bp, Homo sapiens
atactgtattttaag

SEQ ID NO: 829032 - DNA, 15 bp, Homo sapiens
gatactgtattttaa

SEQ ID NO: 829033 - DNA, 15 bp, Homo sapiens
ggatactgtatttta

SEQ ID NO: 829034 - DNA, 15 bp, Homo sapiens
tggatactgtatttt

SEQ ID NO: 829035 - DNA, 15 bp, Homo sapiens
ttggatactgtattt

SEQ ID NO: 829036 - DNA, 15 bp, Homo sapiens
tttggatactgtatt

SEQ ID NO: 829037 - DNA, 15 bp, Homo sapiens
ttttggatactgtat

SEQ ID NO: 829038 - DNA, 15 bp, Homo sapiens
tttttggatactgta

SEQ ID NO: 829039 - DNA, 15 bp, Homo sapiens
ttttttggatactgt

SEQ ID NO: 829040 - DNA, 15 bp, Homo sapiens
tttttttggatactg

SEQ ID NO: 829041 - DNA, 15 bp, Homo sapiens
atttttttggatact

SEQ ID NO: 829042 - DNA, 15 bp, Homo sapiens
catttttttggatac

SEQ ID NO: 829043 - DNA, 15 bp, Homo sapiens
ccatttttttggata

SEQ ID NO: 829044 - DNA, 15 bp, Homo sapiens
tccatttttttggat

SEQ ID NO: 829045 - DNA, 15 bp, Homo sapiens
ttccatttttttgga

SEQ ID NO: 829046 - DNA, 15 bp, Homo sapiens
tttccatttttttgg

SEQ ID NO: 829047 - DNA, 15 bp, Homo sapiens
ttttccatttttttg

SEQ ID NO: 829048 - DNA, 15 bp, Homo sapiens
cttttccattttttt

SEQ ID NO: 829049 - DNA, 15 bp, Homo sapiens
ccttttccatttttt

SEQ ID NO: 829050 - DNA, 15 bp, Homo sapiens
cccttttccattttt

SEQ ID NO: 829051 - DNA, 15 bp, Homo sapiens
gcccttttccatttt

SEQ ID NO: 829052 - DNA, 15 bp, Homo sapiens
tgcccttttccattt

SEQ ID NO: 829053 - DNA, 15 bp, Homo sapiens
ttgcccttttccatt

SEQ ID NO: 829054 - DNA, 15 bp, Homo sapiens
tttgcccttttccat

SEQ ID NO: 829055 - DNA, 15 bp, Homo sapiens
gtttgcccttttcca

SEQ ID NO: 829056 - DNA, 15 bp, Homo sapiens
ggtttgcccttttcc

SEQ ID NO: 829057 - DNA, 15 bp, Homo sapiens
cggtttgcccttttc

SEQ ID NO: 829058 - DNA, 15 bp, Homo sapiens
acggtttgccctttt

SEQ ID NO: 829059 - DNA, 15 bp, Homo sapiens
cacggtttgcccttt

SEQ ID NO: 829060 - DNA, 15 bp, Homo sapiens
ccacggtttgccctt

SEQ ID NO: 829061 - DNA, 15 bp, Homo sapiens
tccacggtttgccct

SEQ ID NO: 829062 - DNA, 15 bp, Homo sapiens
atccacggtttgccc

SEQ ID NO: 829063 - DNA, 15 bp, Homo sapiens
aatccacggtttgcc

SEQ ID NO: 829064 - DNA, 15 bp, Homo sapiens
taatccacggtttgc

SEQ ID NO: 829065 - DNA, 15 bp, Homo sapiens
ctaatccacggtttg

SEQ ID NO: 829066 - DNA, 15 bp, Homo sapiens
tctaatccacggttt

SEQ ID NO: 829067 - DNA, 15 bp, Homo sapiens
atctaatccacggtt

SEQ ID NO: 829068 - DNA, 15 bp, Homo sapiens
tatctaatccacggt

SEQ ID NO: 829069 - DNA, 15 bp, Homo sapiens
ctatctaatccacgg

SEQ ID NO: 829070 - DNA, 15 bp, Homo sapiens
tctatctaatccacg

SEQ ID NO: 829071 - DNA, 15 bp, Homo sapiens
ttctatctaatccac

SEQ ID NO: 829072 - DNA, 15 bp, Homo sapiens
tttctatctaatcca

SEQ ID NO: 829073 - DNA, 15 bp, Homo sapiens
atttctatctaatcc

SEQ ID NO: 829074 - DNA, 15 bp, Homo sapiens
catttctatctaatc

SEQ ID NO: 829075 - DNA, 15 bp, Homo sapiens
ccatttctatctaat

SEQ ID NO: 829076 - DNA, 15 bp, Homo sapiens
gccatttctatctaa

SEQ ID NO: 829077 - DNA, 15 bp, Homo sapiens
tgccatttctatcta

SEQ ID NO: 829078 - DNA, 15 bp, Homo sapiens
ttgccatttctatct

SEQ ID NO: 829079 - DNA, 15 bp, Homo sapiens
attgccatttctatc

SEQ ID NO: 829080 - DNA, 15 bp, Homo sapiens
aattgccatttctat

SEQ ID NO: 829081 - DNA, 15 bp, Homo sapiens
gaattgccatttcta

SEQ ID NO: 829082 - DNA, 15 bp, Homo sapiens
agaattgccatttct

SEQ ID NO: 829083 - DNA, 15 bp, Homo sapiens
aagaattgccatttc

SEQ ID NO: 829084 - DNA, 15 bp, Homo sapiens
taagaattgccattt

SEQ ID NO: 829085 - DNA, 15 bp, Homo sapiens
ataagaattgccatt

SEQ ID NO: 829086 - DNA, 15 bp, Homo sapiens
tataagaattgccat

SEQ ID NO: 829087 - DNA, 15 bp, Homo sapiens
ttataagaattgcca

SEQ ID NO: 829088 - DNA, 15 bp, Homo sapiens
tttataagaattgcc

SEQ ID NO: 829089 - DNA, 15 bp, Homo sapiens
ttttataagaattgc

SEQ ID NO: 829090 - DNA, 15 bp, Homo sapiens
tttttataagaattg

SEQ ID NO: 829091 - DNA, 15 bp, Homo sapiens
ctttttataagaatt

SEQ ID NO: 829092 - DNA, 15 bp, Homo sapiens
cctttttataagaat

SEQ ID NO: 829093 - DNA, 15 bp, Homo sapiens
ccctttttataagaa

SEQ ID NO: 829094 - DNA, 15 bp, Homo sapiens
accctttttataaga

SEQ ID NO: 829095 - DNA, 15 bp, Homo sapiens
aaccctttttataag

SEQ ID NO: 829096 - DNA, 15 bp, Homo sapiens
caaccctttttataa

SEQ ID NO: 829097 - DNA, 15 bp, Homo sapiens
gcaaccctttttata

SEQ ID NO: 829098 - DNA, 15 bp, Homo sapiens
tgcaaccctttttat

SEQ ID NO: 829099 - DNA, 15 bp, Homo sapiens
atgcaacccttttta

SEQ ID NO: 829100 - DNA, 15 bp, Homo sapiens
catgcaacccttttt

SEQ ID NO: 829101 - DNA, 15 bp, Homo sapiens
gcatgcaaccctttt

SEQ ID NO: 829102 - DNA, 15 bp, Homo sapiens
agcatgcaacccttt

SEQ ID NO: 829103 - DNA, 15 bp, Homo sapiens
aagcatgcaaccctt

SEQ ID NO: 829104 - DNA, 15 bp, Homo sapiens
taagcatgcaaccct

SEQ ID NO: 829105 - DNA, 15 bp, Homo sapiens
gtaagcatgcaaccc

SEQ ID NO: 829106 - DNA, 15 bp, Homo sapiens
tgtaagcatgcaacc

SEQ ID NO: 829107 - DNA, 15 bp, Homo sapiens
atgtaagcatgcaac

SEQ ID NO: 829108 - DNA, 15 bp, Homo sapiens
catgtaagcatgcaa

SEQ ID NO: 829109 - DNA, 15 bp, Homo sapiens
tcatgtaagcatgca

SEQ ID NO: 829110 - DNA, 15 bp, Homo sapiens
ttcatgtaagcatgc

SEQ ID NO: 829111 - DNA, 15 bp, Homo sapiens
attcatgtaagcatg

SEQ ID NO: 829112 - DNA, 15 bp, Homo sapiens
cattcatgtaagcat

SEQ ID NO: 829113 - DNA, 15 bp, Homo sapiens
ccattcatgtaagca

SEQ ID NO: 829114 - DNA, 15 bp, Homo sapiens
gccattcatgtaagc

SEQ ID NO: 829115 - DNA, 15 bp, Homo sapiens
agccattcatgtaag

SEQ ID NO: 829116 - DNA, 15 bp, Homo sapiens
aagccattcatgtaa

SEQ ID NO: 829117 - DNA, 15 bp, Homo sapiens
aaagccattcatgta

SEQ ID NO: 829118 - DNA, 15 bp, Homo sapiens
gaaagccattcatgt

SEQ ID NO: 829119 - DNA, 15 bp, Homo sapiens
ggaaagccattcatg

SEQ ID NO: 829120 - DNA, 15 bp, Homo sapiens
tggaaagccattcat

SEQ ID NO: 829121 - DNA, 15 bp, Homo sapiens
atggaaagccattca

SEQ ID NO: 829122 - DNA, 15 bp, Homo sapiens
catggaaagccattc

SEQ ID NO: 829123 - DNA, 15 bp, Homo sapiens
acatggaaagccatt

SEQ ID NO: 829124 - DNA, 15 bp, Homo sapiens
tacatggaaagccat

SEQ ID NO: 829125 - DNA, 15 bp, Homo sapiens
atacatggaaagcca

SEQ ID NO: 829126 - DNA, 15 bp, Homo sapiens
tatacatggaaagcc

SEQ ID NO: 829127 - DNA, 15 bp, Homo sapiens
atatacatggaaagc

SEQ ID NO: 829128 - DNA, 15 bp, Homo sapiens
tatatacatggaaag

SEQ ID NO: 829129 - DNA, 15 bp, Homo sapiens
gtatatacatggaaa

SEQ ID NO: 829130 - DNA, 15 bp, Homo sapiens
agtatatacatggaa

SEQ ID NO: 829131 - DNA, 15 bp, Homo sapiens
gagtatatacatgga

SEQ ID NO: 829132 - DNA, 15 bp, Homo sapiens
tgagtatatacatgg

SEQ ID NO: 829133 - DNA, 15 bp, Homo sapiens
ctgagtatatacatg

SEQ ID NO: 829134 - DNA, 15 bp, Homo sapiens
actgagtatatacat

SEQ ID NO: 829135 - DNA, 15 bp, Homo sapiens
gactgagtatataca

SEQ ID NO: 829136 - DNA, 15 bp, Homo sapiens
tgactgagtatatac

SEQ ID NO: 829137 - DNA, 15 bp, Homo sapiens
atgactgagtatata

SEQ ID NO: 829138 - DNA, 15 bp, Homo sapiens
aatgactgagtatat

SEQ ID NO: 829139 - DNA, 15 bp, Homo sapiens
gaatgactgagtata

SEQ ID NO: 829140 - DNA, 15 bp, Homo sapiens
tgaatgactgagtat

SEQ ID NO: 829141 - DNA, 15 bp, Homo sapiens
ttgaatgactgagta

SEQ ID NO: 829142 - DNA, 15 bp, Homo sapiens
gttgaatgactgagt

SEQ ID NO: 829143 - DNA, 15 bp, Homo sapiens
tgttgaatgactgag

SEQ ID NO: 829144 - DNA, 15 bp, Homo sapiens
ctgttgaatgactga

SEQ ID NO: 829145 - DNA, 15 bp, Homo sapiens
actgttgaatgactg

SEQ ID NO: 829146 - DNA, 15 bp, Homo sapiens
aactgttgaatgact

SEQ ID NO: 829147 - DNA, 15 bp, Homo sapiens
aaactgttgaatgac

SEQ ID NO: 829148 - DNA, 15 bp, Homo sapiens
aaaactgttgaatga

SEQ ID NO: 829149 - DNA, 15 bp, Homo sapiens
aaaaactgttgaatg

SEQ ID NO: 829150 - DNA, 15 bp, Homo sapiens
aaaaaactgttgaat

SEQ ID NO: 829151 - DNA, 15 bp, Homo sapiens
aaaaaaactgttgaa

SEQ ID NO: 829152 - DNA, 15 bp, Homo sapiens
aaaaaaaactgttga

SEQ ID NO: 829153 - DNA, 15 bp, Homo sapiens
aaaaaaaaactgttg

SEQ ID NO: 829154 - DNA, 15 bp, Homo sapiens
aaaaaaaaaactgtt

SEQ ID NO: 829155 - DNA, 15 bp, Homo sapiens
taaaaaaaaaactgt

SEQ ID NO: 829156 - DNA, 15 bp, Homo sapiens
ctaaaaaaaaaactg

SEQ ID NO: 829157 - DNA, 15 bp, Homo sapiens
tctaaaaaaaaaact

SEQ ID NO: 829158 - DNA, 15 bp, Homo sapiens
ctctaaaaaaaaaac

SEQ ID NO: 829159 - DNA, 15 bp, Homo sapiens
gctctaaaaaaaaaa

SEQ ID NO: 829160 - DNA, 15 bp, Homo sapiens
ggctctaaaaaaaaa

SEQ ID NO: 829161 - DNA, 15 bp, Homo sapiens
gggctctaaaaaaaa

SEQ ID NO: 829162 - DNA, 15 bp, Homo sapiens
ggggctctaaaaaaa

SEQ ID NO: 829163 - DNA, 15 bp, Homo sapiens
tggggctctaaaaaa

SEQ ID NO: 829164 - DNA, 15 bp, Homo sapiens
atggggctctaaaaa

SEQ ID NO: 829165 - DNA, 15 bp, Homo sapiens
aatggggctctaaaa

SEQ ID NO: 829166 - DNA, 15 bp, Homo sapiens
gaatggggctctaaa

SEQ ID NO: 829167 - DNA, 15 bp, Homo sapiens
agaatggggctctaa

SEQ ID NO: 829168 - DNA, 15 bp, Homo sapiens
aagaatggggctcta

SEQ ID NO: 829169 - DNA, 15 bp, Homo sapiens
taagaatggggctct

SEQ ID NO: 829170 - DNA, 15 bp, Homo sapiens
ataagaatggggctc

SEQ ID NO: 829171 - DNA, 15 bp, Homo sapiens
aataagaatggggct

SEQ ID NO: 829172 - DNA, 15 bp, Homo sapiens
aaataagaatggggc

SEQ ID NO: 829173 - DNA, 15 bp, Homo sapiens
aaaataagaatgggg

SEQ ID NO: 829174 - DNA, 15 bp, Homo sapiens
aaaaataagaatggg

SEQ ID NO: 829175 - DNA, 15 bp, Homo sapiens
aaaaaataagaatgg

SEQ ID NO: 829176 - DNA, 15 bp, Homo sapiens
taaaaaataagaatg

SEQ ID NO: 829177 - DNA, 15 bp, Homo sapiens
ataaaaaataagaat

SEQ ID NO: 829178 - DNA, 15 bp, Homo sapiens
tataaaaaataagaa

SEQ ID NO: 829179 - DNA, 15 bp, Homo sapiens
gtataaaaaataaga

SEQ ID NO: 829180 - DNA, 15 bp, Homo sapiens
tgtataaaaaataag

SEQ ID NO: 829181 - DNA, 15 bp, Homo sapiens
gtgtataaaaaataa

SEQ ID NO: 829182 - DNA, 15 bp, Homo sapiens
agtgtataaaaaata

SEQ ID NO: 829183 - DNA, 15 bp, Homo sapiens
aagtgtataaaaaat

SEQ ID NO: 829184 - DNA, 15 bp, Homo sapiens
aaagtgtataaaaaa

SEQ ID NO: 829185 - DNA, 15 bp, Homo sapiens
caaagtgtataaaaa

SEQ ID NO: 829186 - DNA, 15 bp, Homo sapiens
tcaaagtgtataaaa

SEQ ID NO: 829187 - DNA, 15 bp, Homo sapiens
ctcaaagtgtataaa

SEQ ID NO: 829188 - DNA, 15 bp, Homo sapiens
tctcaaagtgtataa

SEQ ID NO: 829189 - DNA, 15 bp, Homo sapiens
ctctcaaagtgtata

SEQ ID NO: 829190 - DNA, 15 bp, Homo sapiens
gctctcaaagtgtat

SEQ ID NO: 829191 - DNA, 15 bp, Homo sapiens
tgctctcaaagtgta

SEQ ID NO: 829192 - DNA, 15 bp, Homo sapiens
atgctctcaaagtgt

SEQ ID NO: 829193 - DNA, 15 bp, Homo sapiens
tatgctctcaaagtg

SEQ ID NO: 829194 - DNA, 15 bp, Homo sapiens
ttatgctctcaaagt

SEQ ID NO: 829195 - DNA, 15 bp, Homo sapiens
attatgctctcaaag

SEQ ID NO: 829196 - DNA, 15 bp, Homo sapiens
cattatgctctcaaa

SEQ ID NO: 829197 - DNA, 15 bp, Homo sapiens
tcattatgctctcaa

SEQ ID NO: 829198 - DNA, 15 bp, Homo sapiens
ttcattatgctctca

SEQ ID NO: 829199 - DNA, 15 bp, Homo sapiens
tttcattatgctctc

SEQ ID NO: 829200 - DNA, 15 bp, Homo sapiens
ttttcattatgctct

SEQ ID NO: 829201 - DNA, 15 bp, Homo sapiens
cttttcattatgctc

SEQ ID NO: 829202 - DNA, 15 bp, Homo sapiens
tcttttcattatgct

SEQ ID NO: 829203 - DNA, 15 bp, Homo sapiens
ttcttttcattatgc

SEQ ID NO: 829204 - DNA, 15 bp, Homo sapiens
tttcttttcattatg

SEQ ID NO: 829205 - DNA, 15 bp, Homo sapiens
ttttcttttcattat

SEQ ID NO: 829206 - DNA, 15 bp, Homo sapiens
cttttcttttcatta

SEQ ID NO: 829207 - DNA, 15 bp, Homo sapiens
gcttttcttttcatt

SEQ ID NO: 829208 - DNA, 15 bp, Homo sapiens
agcttttcttttcat

SEQ ID NO: 829209 - DNA, 15 bp, Homo sapiens
tagcttttcttttca

SEQ ID NO: 829210 - DNA, 15 bp, Homo sapiens
gtagcttttcttttc

SEQ ID NO: 829211 - DNA, 15 bp, Homo sapiens
ggtagcttttctttt

SEQ ID NO: 829212 - DNA, 15 bp, Homo sapiens
aggtagcttttcttt

SEQ ID NO: 829213 - DNA, 15 bp, Homo sapiens
caggtagcttttctt

SEQ ID NO: 829214 - DNA, 15 bp, Homo sapiens
gcaggtagcttttct

SEQ ID NO: 829215 - DNA, 15 bp, Homo sapiens
tgcaggtagcttttc

SEQ ID NO: 829216 - DNA, 15 bp, Homo sapiens
ttgcaggtagctttt

SEQ ID NO: 829217 - DNA, 15 bp, Homo sapiens
tttgcaggtagcttt

SEQ ID NO: 829218 - DNA, 15 bp, Homo sapiens
ttttgcaggtagctt

SEQ ID NO: 829219 - DNA, 15 bp, Homo sapiens
cttttgcaggtagct

SEQ ID NO: 829220 - DNA, 15 bp, Homo sapiens
acttttgcaggtagc

SEQ ID NO: 829221 - DNA, 15 bp, Homo sapiens
aacttttgcaggtag

SEQ ID NO: 829222 - DNA, 15 bp, Homo sapiens
aaacttttgcaggta

SEQ ID NO: 829223 - DNA, 15 bp, Homo sapiens
aaaacttttgcaggt

SEQ ID NO: 829224 - DNA, 15 bp, Homo sapiens
caaaacttttgcagg

SEQ ID NO: 829225 - DNA, 15 bp, Homo sapiens
ccaaaacttttgcag

SEQ ID NO: 829226 - DNA, 15 bp, Homo sapiens
tccaaaacttttgca

SEQ ID NO: 829227 - DNA, 15 bp, Homo sapiens
gtccaaaacttttgc

SEQ ID NO: 829228 - DNA, 15 bp, Homo sapiens
agtccaaaacttttg

SEQ ID NO: 829229 - DNA, 15 bp, Homo sapiens
aagtccaaaactttt

SEQ ID NO: 829230 - DNA, 15 bp, Homo sapiens
taagtccaaaacttt

SEQ ID NO: 829231 - DNA, 15 bp, Homo sapiens
gtaagtccaaaactt

SEQ ID NO: 829232 - DNA, 15 bp, Homo sapiens
ggtaagtccaaaact

SEQ ID NO: 829233 - DNA, 15 bp, Homo sapiens
aggtaagtccaaaac

SEQ ID NO: 829234 - DNA, 15 bp, Homo sapiens
gaggtaagtccaaaa

SEQ ID NO: 829235 - DNA, 15 bp, Homo sapiens
tgaggtaagtccaaa

SEQ ID NO: 829236 - DNA, 15 bp, Homo sapiens
ttgaggtaagtccaa

SEQ ID NO: 829237 - DNA, 15 bp, Homo sapiens
tttgaggtaagtcca

SEQ ID NO: 829238 - DNA, 15 bp, Homo sapiens
ctttgaggtaagtcc

SEQ ID NO: 829239 - DNA, 15 bp, Homo sapiens
tctttgaggtaagtc

SEQ ID NO: 829240 - DNA, 15 bp, Homo sapiens
ctctttgaggtaagt

SEQ ID NO: 829241 - DNA, 15 bp, Homo sapiens
cctctttgaggtaag

SEQ ID NO: 829242 - DNA, 15 bp, Homo sapiens
tcctctttgaggtaa

SEQ ID NO: 829243 - DNA, 15 bp, Homo sapiens
atcctctttgaggta

SEQ ID NO: 829244 - DNA, 15 bp, Homo sapiens
tatcctctttgaggt

SEQ ID NO: 829245 - DNA, 15 bp, Homo sapiens
atatcctctttgagg

SEQ ID NO: 829246 - DNA, 15 bp, Homo sapiens
tatatcctctttgag

SEQ ID NO: 829247 - DNA, 15 bp, Homo sapiens
gtatatcctctttga

SEQ ID NO: 829248 - DNA, 15 bp, Homo sapiens
agtatatcctctttg

SEQ ID NO: 829249 - DNA, 15 bp, Homo sapiens
aagtatatcctcttt

SEQ ID NO: 829250 - DNA, 15 bp, Homo sapiens
gaagtatatcctctt

SEQ ID NO: 829251 - DNA, 15 bp, Homo sapiens
tgaagtatatcctct

SEQ ID NO: 829252 - DNA, 15 bp, Homo sapiens
atgaagtatatcctc

SEQ ID NO: 829253 - DNA, 15 bp, Homo sapiens
aatgaagtatatcct

SEQ ID NO: 829254 - DNA, 15 bp, Homo sapiens
gaatgaagtatatcc

SEQ ID NO: 829255 - DNA, 15 bp, Homo sapiens
ggaatgaagtatatc

SEQ ID NO: 829256 - DNA, 15 bp, Homo sapiens
aggaatgaagtatat

SEQ ID NO: 829257 - DNA, 15 bp, Homo sapiens
gaggaatgaagtata

SEQ ID NO: 829258 - DNA, 15 bp, Homo sapiens
tgaggaatgaagtat

SEQ ID NO: 829259 - DNA, 15 bp, Homo sapiens
ttgaggaatgaagta

SEQ ID NO: 829260 - DNA, 15 bp, Homo sapiens
tttgaggaatgaagt

SEQ ID NO: 829261 - DNA, 15 bp, Homo sapiens
ttttgaggaatgaag

SEQ ID NO: 829262 - DNA, 15 bp, Homo sapiens
cttttgaggaatgaa

SEQ ID NO: 829263 - DNA, 15 bp, Homo sapiens
ccttttgaggaatga

SEQ ID NO: 829264 - DNA, 15 bp, Homo sapiens
gccttttgaggaatg

SEQ ID NO: 829265 - DNA, 15 bp, Homo sapiens
ggccttttgaggaat

SEQ ID NO: 829266 - DNA, 15 bp, Homo sapiens
aggccttttgaggaa

SEQ ID NO: 829267 - DNA, 15 bp, Homo sapiens
aaggccttttgagga

SEQ ID NO: 829268 - DNA, 15 bp, Homo sapiens
gaaggccttttgagg

SEQ ID NO: 829269 - DNA, 15 bp, Homo sapiens
agaaggccttttgag

SEQ ID NO: 829270 - DNA, 15 bp, Homo sapiens
aagaaggccttttga

SEQ ID NO: 829271 - DNA, 15 bp, Homo sapiens
gaagaaggccttttg

SEQ ID NO: 829272 - DNA, 15 bp, Homo sapiens
ggaagaaggcctttt

SEQ ID NO: 829273 - DNA, 15 bp, Homo sapiens
tggaagaaggccttt

SEQ ID NO: 829274 - DNA, 15 bp, Homo sapiens
ctggaagaaggcctt

SEQ ID NO: 829275 - DNA, 15 bp, Homo sapiens
cctggaagaaggcct

SEQ ID NO: 829276 - DNA, 15 bp, Homo sapiens
tcctggaagaaggcc

SEQ ID NO: 829277 - DNA, 15 bp, Homo sapiens
ttcctggaagaaggc

SEQ ID NO: 829278 - DNA, 15 bp, Homo sapiens
attcctggaagaagg

SEQ ID NO: 829279 - DNA, 15 bp, Homo sapiens
tattcctggaagaag

SEQ ID NO: 829280 - DNA, 15 bp, Homo sapiens
ctattcctggaagaa

SEQ ID NO: 829281 - DNA, 15 bp, Homo sapiens
actattcctggaaga

SEQ ID NO: 829282 - DNA, 15 bp, Homo sapiens
tactattcctggaag

SEQ ID NO: 829283 - DNA, 15 bp, Homo sapiens
atactattcctggaa

SEQ ID NO: 829284 - DNA, 15 bp, Homo sapiens
aatactattcctgga

SEQ ID NO: 829285 - DNA, 15 bp, Homo sapiens
aaatactattcctgg

SEQ ID NO: 829286 - DNA, 15 bp, Homo sapiens
gaaatactattcctg

SEQ ID NO: 829287 - DNA, 15 bp, Homo sapiens
tgaaatactattcct

SEQ ID NO: 829288 - DNA, 15 bp, Homo sapiens
atgaaatactattcc

SEQ ID NO: 829289 - DNA, 15 bp, Homo sapiens
tatgaaatactattc

SEQ ID NO: 829290 - DNA, 15 bp, Homo sapiens
ttatgaaatactatt

SEQ ID NO: 829291 - DNA, 15 bp, Homo sapiens
gttatgaaatactat

SEQ ID NO: 829292 - DNA, 15 bp, Homo sapiens
ggttatgaaatacta

SEQ ID NO: 829293 - DNA, 15 bp, Homo sapiens
aggttatgaaatact

SEQ ID NO: 829294 - DNA, 15 bp, Homo sapiens
caggttatgaaatac

SEQ ID NO: 829295 - DNA, 15 bp, Homo sapiens
ccaggttatgaaata

SEQ ID NO: 829296 - DNA, 15 bp, Homo sapiens
tccaggttatgaaat

SEQ ID NO: 829297 - DNA, 15 bp, Homo sapiens
ctccaggttatgaaa

SEQ ID NO: 829298 - DNA, 15 bp, Homo sapiens
cctccaggttatgaa

SEQ ID NO: 829299 - DNA, 15 bp, Homo sapiens
acctccaggttatga

SEQ ID NO: 829300 - DNA, 15 bp, Homo sapiens
aacctccaggttatg

SEQ ID NO: 829301 - DNA, 15 bp, Homo sapiens
caacctccaggttat

SEQ ID NO: 829302 - DNA, 15 bp, Homo sapiens
ccaacctccaggtta

SEQ ID NO: 829303 - DNA, 15 bp, Homo sapiens
tccaacctccaggtt

SEQ ID NO: 829304 - DNA, 15 bp, Homo sapiens
ttccaacctccaggt

SEQ ID NO: 829305 - DNA, 15 bp, Homo sapiens
tttccaacctccagg

SEQ ID NO: 829306 - DNA, 15 bp, Homo sapiens
ttttccaacctccag

SEQ ID NO: 829307 - DNA, 15 bp, Homo sapiens
tttttccaacctcca

SEQ ID NO: 829308 - DNA, 15 bp, Homo sapiens
atttttccaacctcc

SEQ ID NO: 829309 - DNA, 15 bp, Homo sapiens
gatttttccaacctc

SEQ ID NO: 829310 - DNA, 15 bp, Homo sapiens
agatttttccaacct

SEQ ID NO: 829311 - DNA, 15 bp, Homo sapiens
cagatttttccaacc

SEQ ID NO: 829312 - DNA, 15 bp, Homo sapiens
ccagatttttccaac

SEQ ID NO: 829313 - DNA, 15 bp, Homo sapiens
tccagatttttccaa

SEQ ID NO: 829314 - DNA, 15 bp, Homo sapiens
atccagatttttcca

SEQ ID NO: 829315 - DNA, 15 bp, Homo sapiens
aatccagatttttcc

SEQ ID NO: 829316 - DNA, 15 bp, Homo sapiens
aaatccagatttttc

SEQ ID NO: 829317 - DNA, 15 bp, Homo sapiens
caaatccagattttt

SEQ ID NO: 829318 - DNA, 15 bp, Homo sapiens
acaaatccagatttt

SEQ ID NO: 829319 - DNA, 15 bp, Homo sapiens
aacaaatccagattt

SEQ ID NO: 829320 - DNA, 15 bp, Homo sapiens
taacaaatccagatt

SEQ ID NO: 829321 - DNA, 15 bp, Homo sapiens
gtaacaaatccagat

SEQ ID NO: 829322 - DNA, 15 bp, Homo sapiens
tgtaacaaatccaga

SEQ ID NO: 829323 - DNA, 15 bp, Homo sapiens
ttgtaacaaatccag

SEQ ID NO: 829324 - DNA, 15 bp, Homo sapiens
tttgtaacaaatcca

SEQ ID NO: 829325 - DNA, 15 bp, Homo sapiens
ttttgtaacaaatcc

SEQ ID NO: 829326 - DNA, 15 bp, Homo sapiens
tttttgtaacaaatc

SEQ ID NO: 829327 - DNA, 15 bp, Homo sapiens
ttttttgtaacaaat

SEQ ID NO: 829328 - DNA, 15 bp, Homo sapiens
tttttttgtaacaaa

SEQ ID NO: 829329 - DNA, 15 bp, Homo sapiens
atttttttgtaacaa

SEQ ID NO: 829330 - DNA, 15 bp, Homo sapiens
gatttttttgtaaca

SEQ ID NO: 829331 - DNA, 15 bp, Homo sapiens
agatttttttgtaac

SEQ ID NO: 829332 - DNA, 15 bp, Homo sapiens
cagatttttttgtaa

SEQ ID NO: 829333 - DNA, 15 bp, Homo sapiens
tcagatttttttgta

SEQ ID NO: 829334 - DNA, 15 bp, Homo sapiens
ctcagatttttttgt

SEQ ID NO: 829335 - DNA, 15 bp, Homo sapiens
actcagatttttttg

SEQ ID NO: 829336 - DNA, 15 bp, Homo sapiens
cactcagattttttt

SEQ ID NO: 829337 - DNA, 15 bp, Homo sapiens
acactcagatttttt

SEQ ID NO: 829338 - DNA, 15 bp, Homo sapiens
aacactcagattttt

SEQ ID NO: 829339 - DNA, 15 bp, Homo sapiens
aaacactcagatttt

SEQ ID NO: 829340 - DNA, 15 bp, Homo sapiens
gaaacactcagattt

SEQ ID NO: 829341 - DNA, 15 bp, Homo sapiens
agaaacactcagatt

SEQ ID NO: 829342 - DNA, 15 bp, Homo sapiens
tagaaacactcagat

SEQ ID NO: 829343 - DNA, 15 bp, Homo sapiens
ctagaaacactcaga

SEQ ID NO: 829344 - DNA, 15 bp, Homo sapiens
gctagaaacactcag

SEQ ID NO: 829345 - DNA, 15 bp, Homo sapiens
cgctagaaacactca

SEQ ID NO: 829346 - DNA, 15 bp, Homo sapiens
ccgctagaaacactc

SEQ ID NO: 829347 - DNA, 15 bp, Homo sapiens
tccgctagaaacact

SEQ ID NO: 829348 - DNA, 15 bp, Homo sapiens
gtccgctagaaacac

SEQ ID NO: 829349 - DNA, 15 bp, Homo sapiens
tgtccgctagaaaca

SEQ ID NO: 829350 - DNA, 15 bp, Homo sapiens
gtgtccgctagaaac

SEQ ID NO: 829351 - DNA, 15 bp, Homo sapiens
tgtgtccgctagaaa

SEQ ID NO: 829352 - DNA, 15 bp, Homo sapiens
ctgtgtccgctagaa

SEQ ID NO: 829353 - DNA, 15 bp, Homo sapiens
tctgtgtccgctaga

SEQ ID NO: 829354 - DNA, 15 bp, Homo sapiens
atctgtgtccgctag

SEQ ID NO: 829355 - DNA, 15 bp, Homo sapiens
tatctgtgtccgcta

SEQ ID NO: 829356 - DNA, 15 bp, Homo sapiens
atatctgtgtccgct

SEQ ID NO: 829357 - DNA, 15 bp, Homo sapiens
aatatctgtgtccgc

SEQ ID NO: 829358 - DNA, 15 bp, Homo sapiens
aaatatctgtgtccg

SEQ ID NO: 829359 - DNA, 15 bp, Homo sapiens
caaatatctgtgtcc

SEQ ID NO: 829360 - DNA, 15 bp, Homo sapiens
acaaatatctgtgtc

SEQ ID NO: 829361 - DNA, 15 bp, Homo sapiens
gacaaatatctgtgt

SEQ ID NO: 829362 - DNA, 15 bp, Homo sapiens
agacaaatatctgtg

SEQ ID NO: 829363 - DNA, 15 bp, Homo sapiens
tagacaaatatctgt

SEQ ID NO: 829364 - DNA, 15 bp, Homo sapiens
ctagacaaatatctg

SEQ ID NO: 829365 - DNA, 15 bp, Homo sapiens
cctagacaaatatct

SEQ ID NO: 829366 - DNA, 15 bp, Homo sapiens
tcctagacaaatatc

SEQ ID NO: 829367 - DNA, 15 bp, Homo sapiens
ctcctagacaaatat

SEQ ID NO: 829368 - DNA, 15 bp, Homo sapiens
cctcctagacaaata

SEQ ID NO: 829369 - DNA, 15 bp, Homo sapiens
ccctcctagacaaat

SEQ ID NO: 829370 - DNA, 15 bp, Homo sapiens
cccctcctagacaaa

SEQ ID NO: 829371 - DNA, 15 bp, Homo sapiens
tcccctcctagacaa

SEQ ID NO: 829372 - DNA, 15 bp, Homo sapiens
gtcccctcctagaca

SEQ ID NO: 829373 - DNA, 15 bp, Homo sapiens
agtcccctcctagac

SEQ ID NO: 829374 - DNA, 15 bp, Homo sapiens
tagtcccctcctaga

SEQ ID NO: 829375 - DNA, 15 bp, Homo sapiens
ctagtcccctcctag

SEQ ID NO: 829376 - DNA, 15 bp, Homo sapiens
cctagtcccctccta

SEQ ID NO: 829377 - DNA, 15 bp, Homo sapiens
acctagtcccctcct

SEQ ID NO: 829378 - DNA, 15 bp, Homo sapiens
aacctagtcccctcc

SEQ ID NO: 829379 - DNA, 15 bp, Homo sapiens
caacctagtcccctc

SEQ ID NO: 829380 - DNA, 15 bp, Homo sapiens
acaacctagtcccct

SEQ ID NO: 829381 - DNA, 15 bp, Homo sapiens
tacaacctagtcccc

SEQ ID NO: 829382 - DNA, 15 bp, Homo sapiens
ctacaacctagtccc

SEQ ID NO: 829383 - DNA, 15 bp, Homo sapiens
gctacaacctagtcc

SEQ ID NO: 829384 - DNA, 15 bp, Homo sapiens
tgctacaacctagtc

SEQ ID NO: 829385 - DNA, 15 bp, Homo sapiens
ctgctacaacctagt

SEQ ID NO: 829386 - DNA, 15 bp, Homo sapiens
actgctacaacctag

SEQ ID NO: 829387 - DNA, 15 bp, Homo sapiens
cactgctacaaccta

SEQ ID NO: 829388 - DNA, 15 bp, Homo sapiens
ccactgctacaacct

SEQ ID NO: 829389 - DNA, 15 bp, Homo sapiens
accactgctacaacc

SEQ ID NO: 829390 - DNA, 15 bp, Homo sapiens
taccactgctacaac

SEQ ID NO: 829391 - DNA, 15 bp, Homo sapiens
ctaccactgctacaa

SEQ ID NO: 829392 - DNA, 15 bp, Homo sapiens
actaccactgctaca

SEQ ID NO: 829393 - DNA, 15 bp, Homo sapiens
cactaccactgctac

SEQ ID NO: 829394 - DNA, 15 bp, Homo sapiens
gcactaccactgcta

SEQ ID NO: 829395 - DNA, 15 bp, Homo sapiens
ggcactaccactgct

SEQ ID NO: 829396 - DNA, 15 bp, Homo sapiens
aggcactaccactgc

SEQ ID NO: 829397 - DNA, 15 bp, Homo sapiens
aaggcactaccactg

SEQ ID NO: 829398 - DNA, 15 bp, Homo sapiens
taaggcactaccact

SEQ ID NO: 829399 - DNA, 15 bp, Homo sapiens
gtaaggcactaccac

SEQ ID NO: 829400 - DNA, 15 bp, Homo sapiens
tgtaaggcactacca

SEQ ID NO: 829401 - DNA, 15 bp, Homo sapiens
ttgtaaggcactacc

SEQ ID NO: 829402 - DNA, 15 bp, Homo sapiens
cttgtaaggcactac

SEQ ID NO: 829403 - DNA, 15 bp, Homo sapiens
tcttgtaaggcacta

SEQ ID NO: 829404 - DNA, 15 bp, Homo sapiens
atcttgtaaggcact

SEQ ID NO: 829405 - DNA, 15 bp, Homo sapiens
tatcttgtaaggcac

SEQ ID NO: 829406 - DNA, 15 bp, Homo sapiens
ttatcttgtaaggca

SEQ ID NO: 829407 - DNA, 15 bp, Homo sapiens
tttatcttgtaaggc

SEQ ID NO: 829408 - DNA, 15 bp, Homo sapiens
atttatcttgtaagg

SEQ ID NO: 829409 - DNA, 15 bp, Homo sapiens
gatttatcttgtaag

SEQ ID NO: 829410 - DNA, 15 bp, Homo sapiens
tgatttatcttgtaa

SEQ ID NO: 829411 - DNA, 15 bp, Homo sapiens
atgatttatcttgta

SEQ ID NO: 829412 - DNA, 15 bp, Homo sapiens
catgatttatcttgt

SEQ ID NO: 829413 - DNA, 15 bp, Homo sapiens
ccatgatttatcttg

SEQ ID NO: 829414 - DNA, 15 bp, Homo sapiens
cccatgatttatctt

SEQ ID NO: 829415 - DNA, 15 bp, Homo sapiens
gcccatgatttatct

SEQ ID NO: 829416 - DNA, 15 bp, Homo sapiens
agcccatgatttatc

SEQ ID NO: 829417 - DNA, 15 bp, Homo sapiens
aagcccatgatttat

SEQ ID NO: 829418 - DNA, 15 bp, Homo sapiens
aaagcccatgattta

SEQ ID NO: 829419 - DNA, 15 bp, Homo sapiens
taaagcccatgattt

SEQ ID NO: 829420 - DNA, 15 bp, Homo sapiens
ataaagcccatgatt

SEQ ID NO: 829421 - DNA, 15 bp, Homo sapiens
aataaagcccatgat

SEQ ID NO: 829422 - DNA, 15 bp, Homo sapiens
aaataaagcccatga

SEQ ID NO: 829423 - DNA, 15 bp, Homo sapiens
taaataaagcccatg

SEQ ID NO: 829424 - DNA, 15 bp, Homo sapiens
gtaaataaagcccat

SEQ ID NO: 829425 - DNA, 15 bp, Homo sapiens
agtaaataaagccca

SEQ ID NO: 829426 - DNA, 15 bp, Homo sapiens
aagtaaataaagccc

SEQ ID NO: 829427 - DNA, 15 bp, Homo sapiens
taagtaaataaagcc

SEQ ID NO: 829428 - DNA, 15 bp, Homo sapiens
gtaagtaaataaagc

SEQ ID NO: 829429 - DNA, 15 bp, Homo sapiens
cgtaagtaaataaag

SEQ ID NO: 829430 - DNA, 15 bp, Homo sapiens
tcgtaagtaaataaa

SEQ ID NO: 829431 - DNA, 15 bp, Homo sapiens
ctcgtaagtaaataa

SEQ ID NO: 829432 - DNA, 15 bp, Homo sapiens
actcgtaagtaaata

SEQ ID NO: 829433 - DNA, 15 bp, Homo sapiens
cactcgtaagtaaat

SEQ ID NO: 829434 - DNA, 15 bp, Homo sapiens
ccactcgtaagtaaa

SEQ ID NO: 829435 - DNA, 15 bp, Homo sapiens
tccactcgtaagtaa

SEQ ID NO: 829436 - DNA, 15 bp, Homo sapiens
ttccactcgtaagta

SEQ ID NO: 829437 - DNA, 15 bp, Homo sapiens
tttccactcgtaagt

SEQ ID NO: 829438 - DNA, 15 bp, Homo sapiens
ttttccactcgtaag

SEQ ID NO: 829439 - DNA, 15 bp, Homo sapiens
cttttccactcgtaa

SEQ ID NO: 829440 - DNA, 15 bp, Homo sapiens
acttttccactcgta

SEQ ID NO: 829441 - DNA, 15 bp, Homo sapiens
aacttttccactcgt

SEQ ID NO: 829442 - DNA, 15 bp, Homo sapiens
caacttttccactcg

SEQ ID NO: 829443 - DNA, 15 bp, Homo sapiens
gcaacttttccactc

SEQ ID NO: 829444 - DNA, 15 bp, Homo sapiens
cgcaacttttccact

SEQ ID NO: 829445 - DNA, 15 bp, Homo sapiens
ccgcaacttttccac

SEQ ID NO: 829446 - DNA, 15 bp, Homo sapiens
tccgcaacttttcca

SEQ ID NO: 829447 - DNA, 15 bp, Homo sapiens
ttccgcaacttttcc

SEQ ID NO: 829448 - DNA, 15 bp, Homo sapiens
cttccgcaacttttc

SEQ ID NO: 829449 - DNA, 15 bp, Homo sapiens
ccttccgcaactttt

SEQ ID NO: 829450 - DNA, 15 bp, Homo sapiens
accttccgcaacttt

SEQ ID NO: 829451 - DNA, 15 bp, Homo sapiens
caccttccgcaactt

SEQ ID NO: 829452 - DNA, 15 bp, Homo sapiens
gcaccttccgcaact

SEQ ID NO: 829453 - DNA, 15 bp, Homo sapiens
ggcaccttccgcaac

SEQ ID NO: 829454 - DNA, 15 bp, Homo sapiens
aggcaccttccgcaa

SEQ ID NO: 829455 - DNA, 15 bp, Homo sapiens
aaggcaccttccgca

SEQ ID NO: 829456 - DNA, 15 bp, Homo sapiens
taaggcaccttccgc

SEQ ID NO: 829457 - DNA, 15 bp, Homo sapiens
gtaaggcaccttccg

SEQ ID NO: 829458 - DNA, 15 bp, Homo sapiens
tgtaaggcaccttcc

SEQ ID NO: 829459 - DNA, 15 bp, Homo sapiens
ctgtaaggcaccttc

SEQ ID NO: 829460 - DNA, 15 bp, Homo sapiens
tctgtaaggcacctt

SEQ ID NO: 829461 - DNA, 15 bp, Homo sapiens
gtctgtaaggcacct

SEQ ID NO: 829462 - DNA, 15 bp, Homo sapiens
agtctgtaaggcacc

SEQ ID NO: 829463 - DNA, 15 bp, Homo sapiens
aagtctgtaaggcac

SEQ ID NO: 829464 - DNA, 15 bp, Homo sapiens
aaagtctgtaaggca

SEQ ID NO: 829465 - DNA, 15 bp, Homo sapiens
aaaagtctgtaaggc

SEQ ID NO: 829466 - DNA, 15 bp, Homo sapiens
aaaaagtctgtaagg

SEQ ID NO: 829467 - DNA, 15 bp, Homo sapiens
aaaaaagtctgtaag

SEQ ID NO: 829468 - DNA, 15 bp, Homo sapiens
aaaaaaagtctgtaa

SEQ ID NO: 829469 - DNA, 15 bp, Homo sapiens
aaaaaaaagtctgta

SEQ ID NO: 829470 - DNA, 15 bp, Homo sapiens
aaaaaaaaagtctgt

SEQ ID NO: 829471 - DNA, 15 bp, Homo sapiens
caaaaaaaaagtctg

SEQ ID NO: 829472 - DNA, 15 bp, Homo sapiens
gcaaaaaaaaagtct

SEQ ID NO: 829473 - DNA, 15 bp, Homo sapiens
cgcaaaaaaaaagtc

SEQ ID NO: 829474 - DNA, 15 bp, Homo sapiens
acgcaaaaaaaaagt

SEQ ID NO: 829475 - DNA, 15 bp, Homo sapiens
aacgcaaaaaaaaag

SEQ ID NO: 829476 - DNA, 15 bp, Homo sapiens
taacgcaaaaaaaaa

SEQ ID NO: 829477 - DNA, 15 bp, Homo sapiens
ttaacgcaaaaaaaa

SEQ ID NO: 829478 - DNA, 15 bp, Homo sapiens
cttaacgcaaaaaaa

SEQ ID NO: 829479 - DNA, 15 bp, Homo sapiens
acttaacgcaaaaaa

SEQ ID NO: 829480 - DNA, 15 bp, Homo sapiens
tacttaacgcaaaaa

SEQ ID NO: 829481 - DNA, 15 bp, Homo sapiens
atacttaacgcaaaa

SEQ ID NO: 829482 - DNA, 15 bp, Homo sapiens
catacttaacgcaaa

SEQ ID NO: 829483 - DNA, 15 bp, Homo sapiens
acatacttaacgcaa

SEQ ID NO: 829484 - DNA, 15 bp, Homo sapiens
cacatacttaacgca

SEQ ID NO: 829485 - DNA, 15 bp, Homo sapiens
acacatacttaacgc

SEQ ID NO: 829486 - DNA, 15 bp, Homo sapiens
aacacatacttaacg

SEQ ID NO: 829487 - DNA, 15 bp, Homo sapiens
aaacacatacttaac

SEQ ID NO: 829488 - DNA, 15 bp, Homo sapiens
aaaacacatacttaa

SEQ ID NO: 829489 - DNA, 15 bp, Homo sapiens
gaaaacacatactta

SEQ ID NO: 829490 - DNA, 15 bp, Homo sapiens
ggaaaacacatactt

SEQ ID NO: 829491 - DNA, 15 bp, Homo sapiens
gggaaaacacatact

SEQ ID NO: 829492 - DNA, 15 bp, Homo sapiens
tgggaaaacacatac

SEQ ID NO: 829493 - DNA, 15 bp, Homo sapiens
atgggaaaacacata

SEQ ID NO: 829494 - DNA, 15 bp, Homo sapiens
tatgggaaaacacat

SEQ ID NO: 829495 - DNA, 15 bp, Homo sapiens
ctatgggaaaacaca

SEQ ID NO: 829496 - DNA, 15 bp, Homo sapiens
cctatgggaaaacac

SEQ ID NO: 829497 - DNA, 15 bp, Homo sapiens
tcctatgggaaaaca

SEQ ID NO: 829498 - DNA, 15 bp, Homo sapiens
ttcctatgggaaaac

SEQ ID NO: 829499 - DNA, 15 bp, Homo sapiens
attcctatgggaaaa

SEQ ID NO: 829500 - DNA, 15 bp, Homo sapiens
aattcctatgggaaa

SEQ ID NO: 829501 - DNA, 15 bp, Homo sapiens
taattcctatgggaa

SEQ ID NO: 829502 - DNA, 15 bp, Homo sapiens
ttaattcctatggga

SEQ ID NO: 829503 - DNA, 15 bp, Homo sapiens
attaattcctatggg

SEQ ID NO: 829504 - DNA, 15 bp, Homo sapiens
aattaattcctatgg

SEQ ID NO: 829505 - DNA, 15 bp, Homo sapiens
aaattaattcctatg

SEQ ID NO: 829506 - DNA, 15 bp, Homo sapiens
taaattaattcctat

SEQ ID NO: 829507 - DNA, 15 bp, Homo sapiens
ataaattaattccta

SEQ ID NO: 829508 - DNA, 15 bp, Homo sapiens
tataaattaattcct

SEQ ID NO: 829509 - DNA, 15 bp, Homo sapiens
ttataaattaattcc

SEQ ID NO: 829510 - DNA, 15 bp, Homo sapiens
tttataaattaattc

SEQ ID NO: 829511 - DNA, 15 bp, Homo sapiens
atttataaattaatt

SEQ ID NO: 829512 - DNA, 15 bp, Homo sapiens
catttataaattaat

SEQ ID NO: 829513 - DNA, 15 bp, Homo sapiens
ccatttataaattaa

SEQ ID NO: 829514 - DNA, 15 bp, Homo sapiens
accatttataaatta

SEQ ID NO: 829515 - DNA, 15 bp, Homo sapiens
caccatttataaatt

SEQ ID NO: 829516 - DNA, 15 bp, Homo sapiens
ccaccatttataaat

SEQ ID NO: 829517 - DNA, 15 bp, Homo sapiens
accaccatttataaa

SEQ ID NO: 829518 - DNA, 15 bp, Homo sapiens
aaccaccatttataa

SEQ ID NO: 829519 - DNA, 15 bp, Homo sapiens
aaaccaccatttata

SEQ ID NO: 829520 - DNA, 15 bp, Homo sapiens
caaaccaccatttat

SEQ ID NO: 829521 - DNA, 15 bp, Homo sapiens
tcaaaccaccattta

SEQ ID NO: 829522 - DNA, 15 bp, Homo sapiens
atcaaaccaccattt

SEQ ID NO: 829523 - DNA, 15 bp, Homo sapiens
aatcaaaccaccatt

SEQ ID NO: 829524 - DNA, 15 bp, Homo sapiens
aaatcaaaccaccat

SEQ ID NO: 829525 - DNA, 15 bp, Homo sapiens
gaaatcaaaccacca

SEQ ID NO: 829526 - DNA, 15 bp, Homo sapiens
ggaaatcaaaccacc

SEQ ID NO: 829527 - DNA, 15 bp, Homo sapiens
aggaaatcaaaccac

SEQ ID NO: 829528 - DNA, 15 bp, Homo sapiens
gaggaaatcaaacca

SEQ ID NO: 829529 - DNA, 15 bp, Homo sapiens
tgaggaaatcaaacc

SEQ ID NO: 829530 - DNA, 15 bp, Homo sapiens
ttgaggaaatcaaac

SEQ ID NO: 829531 - DNA, 15 bp, Homo sapiens
cttgaggaaatcaaa

SEQ ID NO: 829532 - DNA, 15 bp, Homo sapiens
acttgaggaaatcaa

SEQ ID NO: 829533 - DNA, 15 bp, Homo sapiens
gacttgaggaaatca

SEQ ID NO: 829534 - DNA, 15 bp, Homo sapiens
tgacttgaggaaatc

SEQ ID NO: 829535 - DNA, 15 bp, Homo sapiens
ttgacttgaggaaat

SEQ ID NO: 829536 - DNA, 15 bp, Homo sapiens
gttgacttgaggaaa

SEQ ID NO: 829537 - DNA, 15 bp, Homo sapiens
ggttgacttgaggaa

SEQ ID NO: 829538 - DNA, 15 bp, Homo sapiens
aggttgacttgagga

SEQ ID NO: 829539 - DNA, 15 bp, Homo sapiens
aaggttgacttgagg

SEQ ID NO: 829540 - DNA, 15 bp, Homo sapiens
aaaggttgacttgag

SEQ ID NO: 829541 - DNA, 15 bp, Homo sapiens
taaaggttgacttga

SEQ ID NO: 829542 - DNA, 15 bp, Homo sapiens
ttaaaggttgacttg

SEQ ID NO: 829543 - DNA, 15 bp, Homo sapiens
tttaaaggttgactt

SEQ ID NO: 829544 - DNA, 15 bp, Homo sapiens
ttttaaaggttgact

SEQ ID NO: 829545 - DNA, 15 bp, Homo sapiens
cttttaaaggttgac

SEQ ID NO: 829546 - DNA, 15 bp, Homo sapiens
acttttaaaggttga

SEQ ID NO: 829547 - DNA, 15 bp, Homo sapiens
tacttttaaaggttg

SEQ ID NO: 829548 - DNA, 15 bp, Homo sapiens
atacttttaaaggtt

SEQ ID NO: 829549 - DNA, 15 bp, Homo sapiens
tatacttttaaaggt

SEQ ID NO: 829550 - DNA, 15 bp, Homo sapiens
atatacttttaaagg

SEQ ID NO: 829551 - DNA, 15 bp, Homo sapiens
aatatacttttaaag

SEQ ID NO: 829552 - DNA, 15 bp, Homo sapiens
aaatatacttttaaa

SEQ ID NO: 829553 - DNA, 15 bp, Homo sapiens
taaatatacttttaa

SEQ ID NO: 829554 - DNA, 15 bp, Homo sapiens
ctaaatatactttta

SEQ ID NO: 829555 - DNA, 15 bp, Homo sapiens
gctaaatatactttt

SEQ ID NO: 829556 - DNA, 15 bp, Homo sapiens
ggctaaatatacttt

SEQ ID NO: 829557 - DNA, 15 bp, Homo sapiens
tggctaaatatactt

SEQ ID NO: 829558 - DNA, 15 bp, Homo sapiens
ttggctaaatatact

SEQ ID NO: 829559 - DNA, 15 bp, Homo sapiens
tttggctaaatatac

SEQ ID NO: 829560 - DNA, 15 bp, Homo sapiens
ttttggctaaatata

SEQ ID NO: 829561 - DNA, 15 bp, Homo sapiens
attttggctaaatat

SEQ ID NO: 829562 - DNA, 15 bp, Homo sapiens
tattttggctaaata

SEQ ID NO: 829563 - DNA, 15 bp, Homo sapiens
atattttggctaaat

SEQ ID NO: 829564 - DNA, 15 bp, Homo sapiens
tatattttggctaaa

SEQ ID NO: 829565 - DNA, 15 bp, Homo sapiens
ctatattttggctaa

SEQ ID NO: 829566 - DNA, 15 bp, Homo sapiens
gctatattttggcta

SEQ ID NO: 829567 - DNA, 15 bp, Homo sapiens
agctatattttggct

SEQ ID NO: 829568 - DNA, 15 bp, Homo sapiens
aagctatattttggc

SEQ ID NO: 829569 - DNA, 15 bp, Homo sapiens
taagctatattttgg

SEQ ID NO: 829570 - DNA, 15 bp, Homo sapiens
ttaagctatattttg

SEQ ID NO: 829571 - DNA, 15 bp, Homo sapiens
tttaagctatatttt

SEQ ID NO: 829572 - DNA, 15 bp, Homo sapiens
atttaagctatattt

SEQ ID NO: 829573 - DNA, 15 bp, Homo sapiens
tatttaagctatatt

SEQ ID NO: 829574 - DNA, 15 bp, Homo sapiens
atatttaagctatat

SEQ ID NO: 829575 - DNA, 15 bp, Homo sapiens
tatatttaagctata

SEQ ID NO: 829576 - DNA, 15 bp, Homo sapiens
atatatttaagctat

SEQ ID NO: 829577 - DNA, 15 bp, Homo sapiens
aatatatttaagcta

SEQ ID NO: 829578 - DNA, 15 bp, Homo sapiens
taatatatttaagct

SEQ ID NO: 829579 - DNA, 15 bp, Homo sapiens
gtaatatatttaagc

SEQ ID NO: 829580 - DNA, 15 bp, Homo sapiens
agtaatatatttaag

SEQ ID NO: 829581 - DNA, 15 bp, Homo sapiens
tagtaatatatttaa

SEQ ID NO: 829582 - DNA, 15 bp, Homo sapiens
ctagtaatatattta

SEQ ID NO: 829583 - DNA, 15 bp, Homo sapiens
actagtaatatattt

SEQ ID NO: 829584 - DNA, 15 bp, Homo sapiens
tactagtaatatatt

SEQ ID NO: 829585 - DNA, 15 bp, Homo sapiens
ttactagtaatatat

SEQ ID NO: 829586 - DNA, 15 bp, Homo sapiens
attactagtaatata

SEQ ID NO: 829587 - DNA, 15 bp, Homo sapiens
tattactagtaatat

SEQ ID NO: 829588 - DNA, 15 bp, Homo sapiens
ttattactagtaata

SEQ ID NO: 829589 - DNA, 15 bp, Homo sapiens
tttattactagtaat

SEQ ID NO: 829590 - DNA, 15 bp, Homo sapiens
atttattactagtaa

SEQ ID NO: 829591 - DNA, 15 bp, Homo sapiens
aatttattactagta

SEQ ID NO: 829592 - DNA, 15 bp, Homo sapiens
aaatttattactagt

SEQ ID NO: 829593 - DNA, 15 bp, Homo sapiens
taaatttattactag

SEQ ID NO: 829594 - DNA, 15 bp, Homo sapiens
ctaaatttattacta

SEQ ID NO: 829595 - DNA, 15 bp, Homo sapiens
actaaatttattact

SEQ ID NO: 829596 - DNA, 15 bp, Homo sapiens
tactaaatttattac

SEQ ID NO: 829597 - DNA, 15 bp, Homo sapiens
gtactaaatttatta

SEQ ID NO: 829598 - DNA, 15 bp, Homo sapiens
agtactaaatttatt

SEQ ID NO: 829599 - DNA, 15 bp, Homo sapiens
cagtactaaatttat

SEQ ID NO: 829600 - DNA, 15 bp, Homo sapiens
acagtactaaattta

SEQ ID NO: 829601 - DNA, 15 bp, Homo sapiens
cacagtactaaattt

SEQ ID NO: 829602 - DNA, 15 bp, Homo sapiens
ccacagtactaaatt

SEQ ID NO: 829603 - DNA, 15 bp, Homo sapiens
cccacagtactaaat

SEQ ID NO: 829604 - DNA, 15 bp, Homo sapiens
acccacagtactaaa

SEQ ID NO: 829605 - DNA, 15 bp, Homo sapiens
gacccacagtactaa

SEQ ID NO: 829606 - DNA, 15 bp, Homo sapiens
agacccacagtacta

SEQ ID NO: 829607 - DNA, 15 bp, Homo sapiens
gagacccacagtact

SEQ ID NO: 829608 - DNA, 15 bp, Homo sapiens
agagacccacagtac

SEQ ID NO: 829609 - DNA, 15 bp, Homo sapiens
gagagacccacagta

SEQ ID NO: 829610 - DNA, 15 bp, Homo sapiens
tgagagacccacagt

SEQ ID NO: 829611 - DNA, 15 bp, Homo sapiens
atgagagacccacag

SEQ ID NO: 829612 - DNA, 15 bp, Homo sapiens
aatgagagacccaca

SEQ ID NO: 829613 - DNA, 15 bp, Homo sapiens
gaatgagagacccac

SEQ ID NO: 829614 - DNA, 15 bp, Homo sapiens
agaatgagagaccca

SEQ ID NO: 829615 - DNA, 15 bp, Homo sapiens
gagaatgagagaccc

SEQ ID NO: 829616 - DNA, 15 bp, Homo sapiens
tgagaatgagagacc

SEQ ID NO: 829617 - DNA, 15 bp, Homo sapiens
ttgagaatgagagac

SEQ ID NO: 829618 - DNA, 15 bp, Homo sapiens
tttgagaatgagaga

SEQ ID NO: 829619 - DNA, 15 bp, Homo sapiens
ttttgagaatgagag

SEQ ID NO: 829620 - DNA, 15 bp, Homo sapiens
attttgagaatgaga

SEQ ID NO: 829621 - DNA, 15 bp, Homo sapiens
cattttgagaatgag

SEQ ID NO: 829622 - DNA, 15 bp, Homo sapiens
tcattttgagaatga

SEQ ID NO: 829623 - DNA, 15 bp, Homo sapiens
ctcattttgagaatg

SEQ ID NO: 829624 - DNA, 15 bp, Homo sapiens
gctcattttgagaat

SEQ ID NO: 829625 - DNA, 15 bp, Homo sapiens
tgctcattttgagaa

SEQ ID NO: 829626 - DNA, 15 bp, Homo sapiens
atgctcattttgaga

SEQ ID NO: 829627 - DNA, 15 bp, Homo sapiens
aatgctcattttgag

SEQ ID NO: 829628 - DNA, 15 bp, Homo sapiens
aaatgctcattttga

SEQ ID NO: 829629 - DNA, 15 bp, Homo sapiens
taaatgctcattttg

SEQ ID NO: 829630 - DNA, 15 bp, Homo sapiens
gtaaatgctcatttt

SEQ ID NO: 829631 - DNA, 15 bp, Homo sapiens
agtaaatgctcattt

SEQ ID NO: 829632 - DNA, 15 bp, Homo sapiens
tagtaaatgctcatt

SEQ ID NO: 829633 - DNA, 15 bp, Homo sapiens
ttagtaaatgctcat

SEQ ID NO: 829634 - DNA, 15 bp, Homo sapiens
attagtaaatgctca

SEQ ID NO: 829635 - DNA, 15 bp, Homo sapiens
aattagtaaatgctc

SEQ ID NO: 829636 - DNA, 15 bp, Homo sapiens
aaattagtaaatgct

SEQ ID NO: 829637 - DNA, 15 bp, Homo sapiens
gaaattagtaaatgc

SEQ ID NO: 829638 - DNA, 15 bp, Homo sapiens
agaaattagtaaatg

SEQ ID NO: 829639 - DNA, 15 bp, Homo sapiens
cagaaattagtaaat

SEQ ID NO: 829640 - DNA, 15 bp, Homo sapiens
tcagaaattagtaaa

SEQ ID NO: 829641 - DNA, 15 bp, Homo sapiens
ttcagaaattagtaa

SEQ ID NO: 829642 - DNA, 15 bp, Homo sapiens
gttcagaaattagta

SEQ ID NO: 829643 - DNA, 15 bp, Homo sapiens
tgttcagaaattagt

SEQ ID NO: 829644 - DNA, 15 bp, Homo sapiens
gtgttcagaaattag

SEQ ID NO: 829645 - DNA, 15 bp, Homo sapiens
agtgttcagaaatta

SEQ ID NO: 829646 - DNA, 15 bp, Homo sapiens
cagtgttcagaaatt

SEQ ID NO: 829647 - DNA, 15 bp, Homo sapiens
acagtgttcagaaat

SEQ ID NO: 829648 - DNA, 15 bp, Homo sapiens
cacagtgttcagaaa

SEQ ID NO: 829649 - DNA, 15 bp, Homo sapiens
gcacagtgttcagaa

SEQ ID NO: 829650 - DNA, 15 bp, Homo sapiens
agcacagtgttcaga

SEQ ID NO: 829651 - DNA, 15 bp, Homo sapiens
tagcacagtgttcag

SEQ ID NO: 829652 - DNA, 15 bp, Homo sapiens
ctagcacagtgttca

SEQ ID NO: 829653 - DNA, 15 bp, Homo sapiens
cctagcacagtgttc

SEQ ID NO: 829654 - DNA, 15 bp, Homo sapiens
acctagcacagtgtt

SEQ ID NO: 829655 - DNA, 15 bp, Homo sapiens
gacctagcacagtgt

SEQ ID NO: 829656 - DNA, 15 bp, Homo sapiens
ggacctagcacagtg

SEQ ID NO: 829657 - DNA, 15 bp, Homo sapiens
aggacctagcacagt

SEQ ID NO: 829658 - DNA, 15 bp, Homo sapiens
caggacctagcacag

SEQ ID NO: 829659 - DNA, 15 bp, Homo sapiens
ccaggacctagcaca

SEQ ID NO: 829660 - DNA, 15 bp, Homo sapiens
cccaggacctagcac

SEQ ID NO: 829661 - DNA, 15 bp, Homo sapiens
tcccaggacctagca

SEQ ID NO: 829662 - DNA, 15 bp, Homo sapiens
ttcccaggacctagc

SEQ ID NO: 829663 - DNA, 15 bp, Homo sapiens
attcccaggacctag

SEQ ID NO: 829664 - DNA, 15 bp, Homo sapiens
tattcccaggaccta

SEQ ID NO: 829665 - DNA, 15 bp, Homo sapiens
gtattcccaggacct

SEQ ID NO: 829666 - DNA, 15 bp, Homo sapiens
ggtattcccaggacc

SEQ ID NO: 829667 - DNA, 15 bp, Homo sapiens
tggtattcccaggac

SEQ ID NO: 829668 - DNA, 15 bp, Homo sapiens
ttggtattcccagga

SEQ ID NO: 829669 - DNA, 15 bp, Homo sapiens
tttggtattcccagg

SEQ ID NO: 829670 - DNA, 15 bp, Homo sapiens
atttggtattcccag

SEQ ID NO: 829671 - DNA, 15 bp, Homo sapiens
aatttggtattccca

SEQ ID NO: 829672 - DNA, 15 bp, Homo sapiens
caatttggtattccc

SEQ ID NO: 829673 - DNA, 15 bp, Homo sapiens
tcaatttggtattcc

SEQ ID NO: 829674 - DNA, 15 bp, Homo sapiens
ttcaatttggtattc

SEQ ID NO: 829675 - DNA, 15 bp, Homo sapiens
attcaatttggtatt

SEQ ID NO: 829676 - DNA, 15 bp, Homo sapiens
tattcaatttggtat

SEQ ID NO: 829677 - DNA, 15 bp, Homo sapiens
ttattcaatttggta

SEQ ID NO: 829678 - DNA, 15 bp, Homo sapiens
cttattcaatttggt

SEQ ID NO: 829679 - DNA, 15 bp, Homo sapiens
tcttattcaatttgg

SEQ ID NO: 829680 - DNA, 15 bp, Homo sapiens
gtcttattcaatttg

SEQ ID NO: 829681 - DNA, 15 bp, Homo sapiens
tgtcttattcaattt

SEQ ID NO: 829682 - DNA, 15 bp, Homo sapiens
atgtcttattcaatt

SEQ ID NO: 829683 - DNA, 15 bp, Homo sapiens
tatgtcttattcaat

SEQ ID NO: 829684 - DNA, 15 bp, Homo sapiens
ctatgtcttattcaa

SEQ ID NO: 829685 - DNA, 15 bp, Homo sapiens
actatgtcttattca

SEQ ID NO: 829686 - DNA, 15 bp, Homo sapiens
gactatgtcttattc

SEQ ID NO: 829687 - DNA, 15 bp, Homo sapiens
agactatgtcttatt

SEQ ID NO: 829688 - DNA, 15 bp, Homo sapiens
tagactatgtcttat

SEQ ID NO: 829689 - DNA, 15 bp, Homo sapiens
atagactatgtctta

SEQ ID NO: 829690 - DNA, 15 bp, Homo sapiens
aatagactatgtctt

SEQ ID NO: 829691 - DNA, 15 bp, Homo sapiens
aaatagactatgtct

SEQ ID NO: 829692 - DNA, 15 bp, Homo sapiens
aaaatagactatgtc

SEQ ID NO: 829693 - DNA, 15 bp, Homo sapiens
aaaaatagactatgt

SEQ ID NO: 829694 - DNA, 15 bp, Homo sapiens
gaaaaatagactatg

SEQ ID NO: 829695 - DNA, 15 bp, Homo sapiens
agaaaaatagactat

SEQ ID NO: 829696 - DNA, 15 bp, Homo sapiens
cagaaaaatagacta

SEQ ID NO: 829697 - DNA, 15 bp, Homo sapiens
tcagaaaaatagact

SEQ ID NO: 829698 - DNA, 15 bp, Homo sapiens
ttcagaaaaatagac

SEQ ID NO: 829699 - DNA, 15 bp, Homo sapiens
cttcagaaaaataga

SEQ ID NO: 829700 - DNA, 15 bp, Homo sapiens
ccttcagaaaaatag

SEQ ID NO: 829701 - DNA, 15 bp, Homo sapiens
cccttcagaaaaata

SEQ ID NO: 829702 - DNA, 15 bp, Homo sapiens
acccttcagaaaaat

SEQ ID NO: 829703 - DNA, 15 bp, Homo sapiens
aacccttcagaaaaa

SEQ ID NO: 829704 - DNA, 15 bp, Homo sapiens
aaacccttcagaaaa

SEQ ID NO: 829705 - DNA, 15 bp, Homo sapiens
taaacccttcagaaa

SEQ ID NO: 829706 - DNA, 15 bp, Homo sapiens
ataaacccttcagaa

SEQ ID NO: 829707 - DNA, 15 bp, Homo sapiens
tataaacccttcaga

SEQ ID NO: 829708 - DNA, 15 bp, Homo sapiens
ctataaacccttcag

SEQ ID NO: 829709 - DNA, 15 bp, Homo sapiens
gctataaacccttca

SEQ ID NO: 829710 - DNA, 15 bp, Homo sapiens
tgctataaacccttc

SEQ ID NO: 829711 - DNA, 15 bp, Homo sapiens
ctgctataaaccctt

SEQ ID NO: 829712 - DNA, 15 bp, Homo sapiens
tctgctataaaccct

SEQ ID NO: 829713 - DNA, 15 bp, Homo sapiens
ctctgctataaaccc

SEQ ID NO: 829714 - DNA, 15 bp, Homo sapiens
actctgctataaacc

SEQ ID NO: 829715 - DNA, 15 bp, Homo sapiens
gactctgctataaac

SEQ ID NO: 829716 - DNA, 15 bp, Homo sapiens
ggactctgctataaa

SEQ ID NO: 829717 - DNA, 15 bp, Homo sapiens
gggactctgctataa

SEQ ID NO: 829718 - DNA, 15 bp, Homo sapiens
ggggactctgctata

SEQ ID NO: 829719 - DNA, 15 bp, Homo sapiens
aggggactctgctat

SEQ ID NO: 829720 - DNA, 15 bp, Homo sapiens
caggggactctgcta

SEQ ID NO: 829721 - DNA, 15 bp, Homo sapiens
acaggggactctgct

SEQ ID NO: 829722 - DNA, 15 bp, Homo sapiens
cacaggggactctgc

SEQ ID NO: 829723 - DNA, 15 bp, Homo sapiens
acacaggggactctg

SEQ ID NO: 829724 - DNA, 15 bp, Homo sapiens
aacacaggggactct

SEQ ID NO: 829725 - DNA, 15 bp, Homo sapiens
taacacaggggactc

SEQ ID NO: 829726 - DNA, 15 bp, Homo sapiens
ttaacacaggggact

SEQ ID NO: 829727 - DNA, 15 bp, Homo sapiens
attaacacaggggac

SEQ ID NO: 829728 - DNA, 15 bp, Homo sapiens
tattaacacagggga

SEQ ID NO: 829729 - DNA, 15 bp, Homo sapiens
ttattaacacagggg

SEQ ID NO: 829730 - DNA, 15 bp, Homo sapiens
attattaacacaggg

SEQ ID NO: 829731 - DNA, 15 bp, Homo sapiens
cattattaacacagg

SEQ ID NO: 829732 - DNA, 15 bp, Homo sapiens
tcattattaacacag

SEQ ID NO: 829733 - DNA, 15 bp, Homo sapiens
ttcattattaacaca

SEQ ID NO: 829734 - DNA, 15 bp, Homo sapiens
cttcattattaacac

SEQ ID NO: 829735 - DNA, 15 bp, Homo sapiens
ccttcattattaaca

SEQ ID NO: 829736 - DNA, 15 bp, Homo sapiens
tccttcattattaac

SEQ ID NO: 829737 - DNA, 15 bp, Homo sapiens
ctccttcattattaa

SEQ ID NO: 829738 - DNA, 15 bp, Homo sapiens
actccttcattatta

SEQ ID NO: 829739 - DNA, 15 bp, Homo sapiens
cactccttcattatt

SEQ ID NO: 829740 - DNA, 15 bp, Homo sapiens
acactccttcattat

SEQ ID NO: 829741 - DNA, 15 bp, Homo sapiens
cacactccttcatta

SEQ ID NO: 829742 - DNA, 15 bp, Homo sapiens
acacactccttcatt

SEQ ID NO: 829743 - DNA, 15 bp, Homo sapiens
cacacactccttcat

SEQ ID NO: 829744 - DNA, 15 bp, Homo sapiens
ccacacactccttca

SEQ ID NO: 829745 - DNA, 15 bp, Homo sapiens
accacacactccttc

SEQ ID NO: 829746 - DNA, 15 bp, Homo sapiens
taccacacactcctt

SEQ ID NO: 829747 - DNA, 15 bp, Homo sapiens
ataccacacactcct

SEQ ID NO: 829748 - DNA, 15 bp, Homo sapiens
cataccacacactcc

SEQ ID NO: 829749 - DNA, 15 bp, Homo sapiens
acataccacacactc

SEQ ID NO: 829750 - DNA, 15 bp, Homo sapiens
cacataccacacact

SEQ ID NO: 829751 - DNA, 15 bp, Homo sapiens
tcacataccacacac

SEQ ID NO: 829752 - DNA, 15 bp, Homo sapiens
ttcacataccacaca

SEQ ID NO: 829753 - DNA, 15 bp, Homo sapiens
attcacataccacac

SEQ ID NO: 829754 - DNA, 15 bp, Homo sapiens
gattcacataccaca

SEQ ID NO: 829755 - DNA, 15 bp, Homo sapiens
tgattcacataccac

SEQ ID NO: 829756 - DNA, 15 bp, Homo sapiens
atgattcacatacca

SEQ ID NO: 829757 - DNA, 15 bp, Homo sapiens
tatgattcacatacc

SEQ ID NO: 829758 - DNA, 15 bp, Homo sapiens
atatgattcacatac

SEQ ID NO: 829759 - DNA, 15 bp, Homo sapiens
tatatgattcacata

SEQ ID NO: 829760 - DNA, 15 bp, Homo sapiens
atatatgattcacat

SEQ ID NO: 829761 - DNA, 15 bp, Homo sapiens
gatatatgattcaca

SEQ ID NO: 829762 - DNA, 15 bp, Homo sapiens
tgatatatgattcac

SEQ ID NO: 829763 - DNA, 15 bp, Homo sapiens
ttgatatatgattca

SEQ ID NO: 829764 - DNA, 15 bp, Homo sapiens
attgatatatgattc

SEQ ID NO: 829765 - DNA, 15 bp, Homo sapiens
tattgatatatgatt

SEQ ID NO: 829766 - DNA, 15 bp, Homo sapiens
ctattgatatatgat

SEQ ID NO: 829767 - DNA, 15 bp, Homo sapiens
cctattgatatatga

SEQ ID NO: 829768 - DNA, 15 bp, Homo sapiens
ccctattgatatatg

SEQ ID NO: 829769 - DNA, 15 bp, Homo sapiens
accctattgatatat

SEQ ID NO: 829770 - DNA, 15 bp, Homo sapiens
aaccctattgatata

SEQ ID NO: 829771 - DNA, 15 bp, Homo sapiens
caaccctattgatat

SEQ ID NO: 829772 - DNA, 15 bp, Homo sapiens
acaaccctattgata

SEQ ID NO: 829773 - DNA, 15 bp, Homo sapiens
aacaaccctattgat

SEQ ID NO: 829774 - DNA, 15 bp, Homo sapiens
taacaaccctattga

SEQ ID NO: 829775 - DNA, 15 bp, Homo sapiens
ttaacaaccctattg

SEQ ID NO: 829776 - DNA, 15 bp, Homo sapiens
tttaacaaccctatt

SEQ ID NO: 829777 - DNA, 15 bp, Homo sapiens
ttttaacaaccctat

SEQ ID NO: 829778 - DNA, 15 bp, Homo sapiens
tttttaacaacccta

SEQ ID NO: 829779 - DNA, 15 bp, Homo sapiens
atttttaacaaccct

SEQ ID NO: 829780 - DNA, 15 bp, Homo sapiens
tatttttaacaaccc

SEQ ID NO: 829781 - DNA, 15 bp, Homo sapiens
ttatttttaacaacc

SEQ ID NO: 829782 - DNA, 15 bp, Homo sapiens
attatttttaacaac

SEQ ID NO: 829783 - DNA, 15 bp, Homo sapiens
cattatttttaacaa

SEQ ID NO: 829784 - DNA, 15 bp, Homo sapiens
tcattatttttaaca

SEQ ID NO: 829785 - DNA, 15 bp, Homo sapiens
ttcattatttttaac

SEQ ID NO: 829786 - DNA, 15 bp, Homo sapiens
tttcattatttttaa

SEQ ID NO: 829787 - DNA, 15 bp, Homo sapiens
ttttcattattttta

SEQ ID NO: 829788 - DNA, 15 bp, Homo sapiens
tttttcattattttt

SEQ ID NO: 829789 - DNA, 15 bp, Homo sapiens
ttttttcattatttt

SEQ ID NO: 829790 - DNA, 15 bp, Homo sapiens
cttttttcattattt

SEQ ID NO: 829791 - DNA, 15 bp, Homo sapiens
ccttttttcattatt

SEQ ID NO: 829792 - DNA, 15 bp, Homo sapiens
tccttttttcattat

SEQ ID NO: 829793 - DNA, 15 bp, Homo sapiens
ctccttttttcatta

SEQ ID NO: 829794 - DNA, 15 bp, Homo sapiens
tctccttttttcatt

SEQ ID NO: 829795 - DNA, 15 bp, Homo sapiens
ttctccttttttcat

SEQ ID NO: 829796 - DNA, 15 bp, Homo sapiens
cttctccttttttca

SEQ ID NO: 829797 - DNA, 15 bp, Homo sapiens
tcttctccttttttc

SEQ ID NO: 829798 - DNA, 15 bp, Homo sapiens
ctcttctcctttttt

SEQ ID NO: 829799 - DNA, 15 bp, Homo sapiens
cctcttctccttttt

SEQ ID NO: 829800 - DNA, 15 bp, Homo sapiens
tcctcttctcctttt

SEQ ID NO: 829801 - DNA, 15 bp, Homo sapiens
ttcctcttctccttt

SEQ ID NO: 829802 - DNA, 15 bp, Homo sapiens
cttcctcttctcctt

SEQ ID NO: 829803 - DNA, 15 bp, Homo sapiens
tcttcctcttctcct

SEQ ID NO: 829804 - DNA, 15 bp, Homo sapiens
ttcttcctcttctcc

SEQ ID NO: 829805 - DNA, 15 bp, Homo sapiens
gttcttcctcttctc

SEQ ID NO: 829806 - DNA, 15 bp, Homo sapiens
tgttcttcctcttct

SEQ ID NO: 829807 - DNA, 15 bp, Homo sapiens
atgttcttcctcttc

SEQ ID NO: 829808 - DNA, 15 bp, Homo sapiens
gatgttcttcctctt

SEQ ID NO: 829809 - DNA, 15 bp, Homo sapiens
agatgttcttcctct

SEQ ID NO: 829810 - DNA, 15 bp, Homo sapiens
aagatgttcttcctc

SEQ ID NO: 829811 - DNA, 15 bp, Homo sapiens
aaagatgttcttcct

SEQ ID NO: 829812 - DNA, 15 bp, Homo sapiens
aaaagatgttcttcc

SEQ ID NO: 829813 - DNA, 15 bp, Homo sapiens
aaaaagatgttcttc

SEQ ID NO: 829814 - DNA, 15 bp, Homo sapiens
aaaaaagatgttctt

SEQ ID NO: 829815 - DNA, 15 bp, Homo sapiens
aaaaaaagatgttct

SEQ ID NO: 829816 - DNA, 15 bp, Homo sapiens
aaaaaaaagatgttc

SEQ ID NO: 829817 - DNA, 15 bp, Homo sapiens
aaaaaaaaagatgtt

SEQ ID NO: 829818 - DNA, 15 bp, Homo sapiens
aaaaaaaaaagatgt

SEQ ID NO: 829819 - DNA, 15 bp, Homo sapiens
gaaaaaaaaaagatg

SEQ ID NO: 829820 - DNA, 15 bp, Homo sapiens
agaaaaaaaaaagat

SEQ ID NO: 829821 - DNA, 15 bp, Homo sapiens
cagaaaaaaaaaaga

SEQ ID NO: 829822 - DNA, 15 bp, Homo sapiens
tcagaaaaaaaaaag

SEQ ID NO: 829823 - DNA, 15 bp, Homo sapiens
atcagaaaaaaaaaa

SEQ ID NO: 829824 - DNA, 15 bp, Homo sapiens
aatcagaaaaaaaaa

SEQ ID NO: 829825 - DNA, 15 bp, Homo sapiens
caatcagaaaaaaaa

SEQ ID NO: 829826 - DNA, 15 bp, Homo sapiens
gcaatcagaaaaaaa

SEQ ID NO: 829827 - DNA, 15 bp, Homo sapiens
tgcaatcagaaaaaa

SEQ ID NO: 829828 - DNA, 15 bp, Homo sapiens
gtgcaatcagaaaaa

SEQ ID NO: 829829 - DNA, 15 bp, Homo sapiens
cgtgcaatcagaaaa

SEQ ID NO: 829830 - DNA, 15 bp, Homo sapiens
ccgtgcaatcagaaa

SEQ ID NO: 829831 - DNA, 15 bp, Homo sapiens
cccgtgcaatcagaa

SEQ ID NO: 829832 - DNA, 15 bp, Homo sapiens
gcccgtgcaatcaga

SEQ ID NO: 829833 - DNA, 15 bp, Homo sapiens
tgcccgtgcaatcag

SEQ ID NO: 829834 - DNA, 15 bp, Homo sapiens
ctgcccgtgcaatca

SEQ ID NO: 829835 - DNA, 15 bp, Homo sapiens
gctgcccgtgcaatc

SEQ ID NO: 829836 - DNA, 15 bp, Homo sapiens
ggctgcccgtgcaat

SEQ ID NO: 829837 - DNA, 15 bp, Homo sapiens
aggctgcccgtgcaa

SEQ ID NO: 829838 - DNA, 15 bp, Homo sapiens
aaggctgcccgtgca

SEQ ID NO: 829839 - DNA, 15 bp, Homo sapiens
taaggctgcccgtgc

SEQ ID NO: 829840 - DNA, 15 bp, Homo sapiens
ttaaggctgcccgtg

SEQ ID NO: 829841 - DNA, 15 bp, Homo sapiens
tttaaggctgcccgt

SEQ ID NO: 829842 - DNA, 15 bp, Homo sapiens
ttttaaggctgcccg

SEQ ID NO: 829843 - DNA, 15 bp, Homo sapiens
attttaaggctgccc

SEQ ID NO: 829844 - DNA, 15 bp, Homo sapiens
aattttaaggctgcc

SEQ ID NO: 829845 - DNA, 15 bp, Homo sapiens
taattttaaggctgc

SEQ ID NO: 829846 - DNA, 15 bp, Homo sapiens
ataattttaaggctg

SEQ ID NO: 829847 - DNA, 15 bp, Homo sapiens
aataattttaaggct

SEQ ID NO: 829848 - DNA, 15 bp, Homo sapiens
aaataattttaaggc

SEQ ID NO: 829849 - DNA, 15 bp, Homo sapiens
aaaataattttaagg

SEQ ID NO: 829850 - DNA, 15 bp, Homo sapiens
aaaaataattttaag

SEQ ID NO: 829851 - DNA, 15 bp, Homo sapiens
caaaaataattttaa

SEQ ID NO: 829852 - DNA, 15 bp, Homo sapiens
tcaaaaataatttta

SEQ ID NO: 829853 - DNA, 15 bp, Homo sapiens
ttcaaaaataatttt

SEQ ID NO: 829854 - DNA, 15 bp, Homo sapiens
cttcaaaaataattt

SEQ ID NO: 829855 - DNA, 15 bp, Homo sapiens
acttcaaaaataatt

SEQ ID NO: 829856 - DNA, 15 bp, Homo sapiens
cacttcaaaaataat

SEQ ID NO: 829857 - DNA, 15 bp, Homo sapiens
acacttcaaaaataa

SEQ ID NO: 829858 - DNA, 15 bp, Homo sapiens
tacacttcaaaaata

SEQ ID NO: 829859 - DNA, 15 bp, Homo sapiens
gtacacttcaaaaat

SEQ ID NO: 829860 - DNA, 15 bp, Homo sapiens
tgtacacttcaaaaa

SEQ ID NO: 829861 - DNA, 15 bp, Homo sapiens
ttgtacacttcaaaa

SEQ ID NO: 829862 - DNA, 15 bp, Homo sapiens
attgtacacttcaaa

SEQ ID NO: 829863 - DNA, 15 bp, Homo sapiens
aattgtacacttcaa

SEQ ID NO: 829864 - DNA, 15 bp, Homo sapiens
gaattgtacacttca

SEQ ID NO: 829865 - DNA, 15 bp, Homo sapiens
tgaattgtacacttc

SEQ ID NO: 829866 - DNA, 15 bp, Homo sapiens
ctgaattgtacactt

SEQ ID NO: 829867 - DNA, 15 bp, Homo sapiens
actgaattgtacact

SEQ ID NO: 829868 - DNA, 15 bp, Homo sapiens
cactgaattgtacac

SEQ ID NO: 829869 - DNA, 15 bp, Homo sapiens
acactgaattgtaca

SEQ ID NO: 829870 - DNA, 15 bp, Homo sapiens
aacactgaattgtac

SEQ ID NO: 829871 - DNA, 15 bp, Homo sapiens
aaacactgaattgta

SEQ ID NO: 829872 - DNA, 15 bp, Homo sapiens
aaaacactgaattgt

SEQ ID NO: 829873 - DNA, 15 bp, Homo sapiens
aaaaacactgaattg

SEQ ID NO: 829874 - DNA, 15 bp, Homo sapiens
aaaaaacactgaatt

SEQ ID NO: 829875 - DNA, 15 bp, Homo sapiens
aaaaaaacactgaat

SEQ ID NO: 829876 - DNA, 15 bp, Homo sapiens
taaaaaaacactgaa

SEQ ID NO: 829877 - DNA, 15 bp, Homo sapiens
ctaaaaaaacactga

SEQ ID NO: 829878 - DNA, 15 bp, Homo sapiens
gctaaaaaaacactg

SEQ ID NO: 829879 - DNA, 15 bp, Homo sapiens
tgctaaaaaaacact

SEQ ID NO: 829880 - DNA, 15 bp, Homo sapiens
atgctaaaaaaacac

SEQ ID NO: 829881 - DNA, 15 bp, Homo sapiens
tatgctaaaaaaaca

SEQ ID NO: 829882 - DNA, 15 bp, Homo sapiens
atatgctaaaaaaac

SEQ ID NO: 829883 - DNA, 15 bp, Homo sapiens
aatatgctaaaaaaa

SEQ ID NO: 829884 - DNA, 15 bp, Homo sapiens
gaatatgctaaaaaa

SEQ ID NO: 829885 - DNA, 15 bp, Homo sapiens
tgaatatgctaaaaa

SEQ ID NO: 829886 - DNA, 15 bp, Homo sapiens
gtgaatatgctaaaa

SEQ ID NO: 829887 - DNA, 15 bp, Homo sapiens
tgtgaatatgctaaa

SEQ ID NO: 829888 - DNA, 15 bp, Homo sapiens
ctgtgaatatgctaa

SEQ ID NO: 829889 - DNA, 15 bp, Homo sapiens
cctgtgaatatgcta

SEQ ID NO: 829890 - DNA, 15 bp, Homo sapiens
ccctgtgaatatgct

SEQ ID NO: 829891 - DNA, 15 bp, Homo sapiens
accctgtgaatatgc

SEQ ID NO: 829892 - DNA, 15 bp, Homo sapiens
aaccctgtgaatatg

SEQ ID NO: 829893 - DNA, 15 bp, Homo sapiens
caaccctgtgaatat

SEQ ID NO: 829894 - DNA, 15 bp, Homo sapiens
acaaccctgtgaata

SEQ ID NO: 829895 - DNA, 15 bp, Homo sapiens
tacaaccctgtgaat

SEQ ID NO: 829896 - DNA, 15 bp, Homo sapiens
atacaaccctgtgaa

SEQ ID NO: 829897 - DNA, 15 bp, Homo sapiens
aatacaaccctgtga

SEQ ID NO: 829898 - DNA, 15 bp, Homo sapiens
taatacaaccctgtg

SEQ ID NO: 829899 - DNA, 15 bp, Homo sapiens
ataatacaaccctgt

SEQ ID NO: 829900 - DNA, 15 bp, Homo sapiens
gataatacaaccctg

SEQ ID NO: 829901 - DNA, 15 bp, Homo sapiens
tgataatacaaccct

SEQ ID NO: 829902 - DNA, 15 bp, Homo sapiens
atgataatacaaccc

SEQ ID NO: 829903 - DNA, 15 bp, Homo sapiens
gatgataatacaacc

SEQ ID NO: 829904 - DNA, 15 bp, Homo sapiens
tgatgataatacaac

SEQ ID NO: 829905 - DNA, 15 bp, Homo sapiens
gtgatgataatacaa

SEQ ID NO: 829906 - DNA, 15 bp, Homo sapiens
ggtgatgataataca

SEQ ID NO: 829907 - DNA, 15 bp, Homo sapiens
tggtgatgataatac

SEQ ID NO: 829908 - DNA, 15 bp, Homo sapiens
atggtgatgataata

SEQ ID NO: 829909 - DNA, 15 bp, Homo sapiens
tatggtgatgataat

SEQ ID NO: 829910 - DNA, 15 bp, Homo sapiens
atatggtgatgataa

SEQ ID NO: 829911 - DNA, 15 bp, Homo sapiens
aatatggtgatgata

SEQ ID NO: 829912 - DNA, 15 bp, Homo sapiens
aaatatggtgatgat

SEQ ID NO: 829913 - DNA, 15 bp, Homo sapiens
aaaatatggtgatga

SEQ ID NO: 829914 - DNA, 15 bp, Homo sapiens
aaaaatatggtgatg

SEQ ID NO: 829915 - DNA, 15 bp, Homo sapiens
caaaaatatggtgat

SEQ ID NO: 829916 - DNA, 15 bp, Homo sapiens
ccaaaaatatggtga

SEQ ID NO: 829917 - DNA, 15 bp, Homo sapiens
gccaaaaatatggtg

SEQ ID NO: 829918 - DNA, 15 bp, Homo sapiens
ggccaaaaatatggt

SEQ ID NO: 829919 - DNA, 15 bp, Homo sapiens
aggccaaaaatatgg

SEQ ID NO: 829920 - DNA, 15 bp, Homo sapiens
gaggccaaaaatatg

SEQ ID NO: 829921 - DNA, 15 bp, Homo sapiens
agaggccaaaaatat

SEQ ID NO: 829922 - DNA, 15 bp, Homo sapiens
aagaggccaaaaata

SEQ ID NO: 829923 - DNA, 15 bp, Homo sapiens
caagaggccaaaaat

SEQ ID NO: 829924 - DNA, 15 bp, Homo sapiens
tcaagaggccaaaaa

SEQ ID NO: 829925 - DNA, 15 bp, Homo sapiens
ttcaagaggccaaaa

SEQ ID NO: 829926 - DNA, 15 bp, Homo sapiens
tttcaagaggccaaa

SEQ ID NO: 829927 - DNA, 15 bp, Homo sapiens
ttttcaagaggccaa

SEQ ID NO: 829928 - DNA, 15 bp, Homo sapiens
cttttcaagaggcca

SEQ ID NO: 829929 - DNA, 15 bp, Homo sapiens
tcttttcaagaggcc

SEQ ID NO: 829930 - DNA, 15 bp, Homo sapiens
ttcttttcaagaggc

SEQ ID NO: 829931 - DNA, 15 bp, Homo sapiens
tttcttttcaagagg

SEQ ID NO: 829932 - DNA, 15 bp, Homo sapiens
atttcttttcaagag

SEQ ID NO: 829933 - DNA, 15 bp, Homo sapiens
gatttcttttcaaga

SEQ ID NO: 829934 - DNA, 15 bp, Homo sapiens
ggatttcttttcaag

SEQ ID NO: 829935 - DNA, 15 bp, Homo sapiens
aggatttcttttcaa

SEQ ID NO: 829936 - DNA, 15 bp, Homo sapiens
caggatttcttttca

SEQ ID NO: 829937 - DNA, 15 bp, Homo sapiens
acaggatttcttttc

SEQ ID NO: 829938 - DNA, 15 bp, Homo sapiens
cacaggatttctttt

SEQ ID NO: 829939 - DNA, 15 bp, Homo sapiens
gcacaggatttcttt

SEQ ID NO: 829940 - DNA, 15 bp, Homo sapiens
ggcacaggatttctt

SEQ ID NO: 829941 - DNA, 15 bp, Homo sapiens
aggcacaggatttct

SEQ ID NO: 829942 - DNA, 15 bp, Homo sapiens
taggcacaggatttc

SEQ ID NO: 829943 - DNA, 15 bp, Homo sapiens
ataggcacaggattt

SEQ ID NO: 829944 - DNA, 15 bp, Homo sapiens
aataggcacaggatt

SEQ ID NO: 829945 - DNA, 15 bp, Homo sapiens
taataggcacaggat

SEQ ID NO: 829946 - DNA, 15 bp, Homo sapiens
ctaataggcacagga

SEQ ID NO: 829947 - DNA, 15 bp, Homo sapiens
gctaataggcacagg

SEQ ID NO: 829948 - DNA, 15 bp, Homo sapiens
tgctaataggcacag

SEQ ID NO: 829949 - DNA, 15 bp, Homo sapiens
atgctaataggcaca

SEQ ID NO: 829950 - DNA, 15 bp, Homo sapiens
gatgctaataggcac

SEQ ID NO: 829951 - DNA, 15 bp, Homo sapiens
ggatgctaataggca

SEQ ID NO: 829952 - DNA, 15 bp, Homo sapiens
tggatgctaataggc

SEQ ID NO: 829953 - DNA, 15 bp, Homo sapiens
ttggatgctaatagg

SEQ ID NO: 829954 - DNA, 15 bp, Homo sapiens
attggatgctaatag

SEQ ID NO: 829955 - DNA, 15 bp, Homo sapiens
aattggatgctaata

SEQ ID NO: 829956 - DNA, 15 bp, Homo sapiens
taattggatgctaat

SEQ ID NO: 829957 - DNA, 15 bp, Homo sapiens
gtaattggatgctaa

SEQ ID NO: 829958 - DNA, 15 bp, Homo sapiens
ggtaattggatgcta

SEQ ID NO: 829959 - DNA, 15 bp, Homo sapiens
cggtaattggatgct

SEQ ID NO: 829960 - DNA, 15 bp, Homo sapiens
acggtaattggatgc

SEQ ID NO: 829961 - DNA, 15 bp, Homo sapiens
aacggtaattggatg

SEQ ID NO: 829962 - DNA, 15 bp, Homo sapiens
gaacggtaattggat

SEQ ID NO: 829963 - DNA, 15 bp, Homo sapiens
ggaacggtaattgga

SEQ ID NO: 829964 - DNA, 15 bp, Homo sapiens
aggaacggtaattgg

SEQ ID NO: 829965 - DNA, 15 bp, Homo sapiens
aaggaacggtaattg

SEQ ID NO: 829966 - DNA, 15 bp, Homo sapiens
aaaggaacggtaatt

SEQ ID NO: 829967 - DNA, 15 bp, Homo sapiens
caaaggaacggtaat

SEQ ID NO: 829968 - DNA, 15 bp, Homo sapiens
acaaaggaacggtaa

SEQ ID NO: 829969 - DNA, 15 bp, Homo sapiens
tacaaaggaacggta

SEQ ID NO: 829970 - DNA, 15 bp, Homo sapiens
ctacaaaggaacggt

SEQ ID NO: 829971 - DNA, 15 bp, Homo sapiens
gctacaaaggaacgg

SEQ ID NO: 829972 - DNA, 15 bp, Homo sapiens
agctacaaaggaacg

SEQ ID NO: 829973 - DNA, 15 bp, Homo sapiens
tagctacaaaggaac

SEQ ID NO: 829974 - DNA, 15 bp, Homo sapiens
ttagctacaaaggaa

SEQ ID NO: 829975 - DNA, 15 bp, Homo sapiens
cttagctacaaagga

SEQ ID NO: 829976 - DNA, 15 bp, Homo sapiens
acttagctacaaagg

SEQ ID NO: 829977 - DNA, 15 bp, Homo sapiens
gacttagctacaaag

SEQ ID NO: 829978 - DNA, 15 bp, Homo sapiens
agacttagctacaaa

SEQ ID NO: 829979 - DNA, 15 bp, Homo sapiens
gagacttagctacaa

SEQ ID NO: 829980 - DNA, 15 bp, Homo sapiens
ggagacttagctaca

SEQ ID NO: 829981 - DNA, 15 bp, Homo sapiens
gggagacttagctac

SEQ ID NO: 829982 - DNA, 15 bp, Homo sapiens
ggggagacttagcta

SEQ ID NO: 829983 - DNA, 15 bp, Homo sapiens
gggggagacttagct

SEQ ID NO: 829984 - DNA, 15 bp, Homo sapiens
tgggggagacttagc

SEQ ID NO: 829985 - DNA, 15 bp, Homo sapiens
atgggggagacttag

SEQ ID NO: 829986 - DNA, 15 bp, Homo sapiens
aatgggggagactta

SEQ ID NO: 829987 - DNA, 15 bp, Homo sapiens
gaatgggggagactt

SEQ ID NO: 829988 - DNA, 15 bp, Homo sapiens
ggaatgggggagact

SEQ ID NO: 829989 - DNA, 15 bp, Homo sapiens
tggaatgggggagac

SEQ ID NO: 829990 - DNA, 15 bp, Homo sapiens
ctggaatgggggaga

SEQ ID NO: 829991 - DNA, 15 bp, Homo sapiens
gctggaatgggggag

SEQ ID NO: 829992 - DNA, 15 bp, Homo sapiens
agctggaatggggga

SEQ ID NO: 829993 - DNA, 15 bp, Homo sapiens
aagctggaatggggg

SEQ ID NO: 829994 - DNA, 15 bp, Homo sapiens
aaagctggaatgggg

SEQ ID NO: 829995 - DNA, 15 bp, Homo sapiens
taaagctggaatggg

SEQ ID NO: 829996 - DNA, 15 bp, Homo sapiens
ttaaagctggaatgg

SEQ ID NO: 829997 - DNA, 15 bp, Homo sapiens
tttaaagctggaatg

SEQ ID NO: 829998 - DNA, 15 bp, Homo sapiens
gtttaaagctggaat

SEQ ID NO: 829999 - DNA, 15 bp, Homo sapiens
tgtttaaagctggaa

SEQ ID NO: 830000 - DNA, 15 bp, Homo sapiens
ttgtttaaagctgga

SEQ ID NO: 830001 - DNA, 15 bp, Homo sapiens
attgtttaaagctgg

SEQ ID NO: 830002 - DNA, 15 bp, Homo sapiens
gattgtttaaagctg

SEQ ID NO: 830003 - DNA, 15 bp, Homo sapiens
tgattgtttaaagct

SEQ ID NO: 830004 - DNA, 15 bp, Homo sapiens
gtgattgtttaaagc

SEQ ID NO: 830005 - DNA, 15 bp, Homo sapiens
ggtgattgtttaaag

SEQ ID NO: 830006 - DNA, 15 bp, Homo sapiens
gggtgattgtttaaa

SEQ ID NO: 830007 - DNA, 15 bp, Homo sapiens
tgggtgattgtttaa

SEQ ID NO: 830008 - DNA, 15 bp, Homo sapiens
atgggtgattgttta

SEQ ID NO: 830009 - DNA, 15 bp, Homo sapiens
gatgggtgattgttt

SEQ ID NO: 830010 - DNA, 15 bp, Homo sapiens
agatgggtgattgtt

SEQ ID NO: 830011 - DNA, 15 bp, Homo sapiens
tagatgggtgattgt

SEQ ID NO: 830012 - DNA, 15 bp, Homo sapiens
gtagatgggtgattg

SEQ ID NO: 830013 - DNA, 15 bp, Homo sapiens
agtagatgggtgatt

SEQ ID NO: 830014 - DNA, 15 bp, Homo sapiens
aagtagatgggtgat

SEQ ID NO: 830015 - DNA, 15 bp, Homo sapiens
aaagtagatgggtga

SEQ ID NO: 830016 - DNA, 15 bp, Homo sapiens
gaaagtagatgggtg

SEQ ID NO: 830017 - DNA, 15 bp, Homo sapiens
agaaagtagatgggt

SEQ ID NO: 830018 - DNA, 15 bp, Homo sapiens
cagaaagtagatggg

SEQ ID NO: 830019 - DNA, 15 bp, Homo sapiens
acagaaagtagatgg

SEQ ID NO: 830020 - DNA, 15 bp, Homo sapiens
gacagaaagtagatg

SEQ ID NO: 830021 - DNA, 15 bp, Homo sapiens
agacagaaagtagat

SEQ ID NO: 830022 - DNA, 15 bp, Homo sapiens
gagacagaaagtaga

SEQ ID NO: 830023 - DNA, 15 bp, Homo sapiens
agagacagaaagtag

SEQ ID NO: 830024 - DNA, 15 bp, Homo sapiens
tagagacagaaagta

SEQ ID NO: 830025 - DNA, 15 bp, Homo sapiens
atagagacagaaagt

SEQ ID NO: 830026 - DNA, 15 bp, Homo sapiens
tatagagacagaaag

SEQ ID NO: 830027 - DNA, 15 bp, Homo sapiens
ttatagagacagaaa

SEQ ID NO: 830028 - DNA, 15 bp, Homo sapiens
tttatagagacagaa

SEQ ID NO: 830029 - DNA, 15 bp, Homo sapiens
atttatagagacaga

SEQ ID NO: 830030 - DNA, 15 bp, Homo sapiens
aatttatagagacag

SEQ ID NO: 830031 - DNA, 15 bp, Homo sapiens
aaatttatagagaca

SEQ ID NO: 830032 - DNA, 15 bp, Homo sapiens
caaatttatagagac

SEQ ID NO: 830033 - DNA, 15 bp, Homo sapiens
acaaatttatagaga

SEQ ID NO: 830034 - DNA, 15 bp, Homo sapiens
gacaaatttatagag

SEQ ID NO: 830035 - DNA, 15 bp, Homo sapiens
agacaaatttataga

SEQ ID NO: 830036 - DNA, 15 bp, Homo sapiens
gagacaaatttatag

SEQ ID NO: 830037 - DNA, 15 bp, Homo sapiens
agagacaaatttata

SEQ ID NO: 830038 - DNA, 15 bp, Homo sapiens
aagagacaaatttat

SEQ ID NO: 830039 - DNA, 15 bp, Homo sapiens
aaagagacaaattta

SEQ ID NO: 830040 - DNA, 15 bp, Homo sapiens
aaaagagacaaattt

SEQ ID NO: 830041 - DNA, 15 bp, Homo sapiens
caaaagagacaaatt

SEQ ID NO: 830042 - DNA, 15 bp, Homo sapiens
ccaaaagagacaaat

SEQ ID NO: 830043 - DNA, 15 bp, Homo sapiens
tccaaaagagacaaa

SEQ ID NO: 830044 - DNA, 15 bp, Homo sapiens
gtccaaaagagacaa

SEQ ID NO: 830045 - DNA, 15 bp, Homo sapiens
tgtccaaaagagaca

SEQ ID NO: 830046 - DNA, 15 bp, Homo sapiens
atgtccaaaagagac

SEQ ID NO: 830047 - DNA, 15 bp, Homo sapiens
aatgtccaaaagaga

SEQ ID NO: 830048 - DNA, 15 bp, Homo sapiens
aaatgtccaaaagag

SEQ ID NO: 830049 - DNA, 15 bp, Homo sapiens
gaaatgtccaaaaga

SEQ ID NO: 830050 - DNA, 15 bp, Homo sapiens
tgaaatgtccaaaag

SEQ ID NO: 830051 - DNA, 15 bp, Homo sapiens
gtgaaatgtccaaaa

SEQ ID NO: 830052 - DNA, 15 bp, Homo sapiens
tgtgaaatgtccaaa

SEQ ID NO: 830053 - DNA, 15 bp, Homo sapiens
atgtgaaatgtccaa

SEQ ID NO: 830054 - DNA, 15 bp, Homo sapiens
tatgtgaaatgtcca

SEQ ID NO: 830055 - DNA, 15 bp, Homo sapiens
ttatgtgaaatgtcc

SEQ ID NO: 830056 - DNA, 15 bp, Homo sapiens
tttatgtgaaatgtc

SEQ ID NO: 830057 - DNA, 15 bp, Homo sapiens
atttatgtgaaatgt

SEQ ID NO: 830058 - DNA, 15 bp, Homo sapiens
catttatgtgaaatg

SEQ ID NO: 830059 - DNA, 15 bp, Homo sapiens
tcatttatgtgaaat

SEQ ID NO: 830060 - DNA, 15 bp, Homo sapiens
ttcatttatgtgaaa

SEQ ID NO: 830061 - DNA, 15 bp, Homo sapiens
tttcatttatgtgaa

SEQ ID NO: 830062 - DNA, 15 bp, Homo sapiens
atttcatttatgtga

SEQ ID NO: 830063 - DNA, 15 bp, Homo sapiens
tatttcatttatgtg

SEQ ID NO: 830064 - DNA, 15 bp, Homo sapiens
ttatttcatttatgt

SEQ ID NO: 830065 - DNA, 15 bp, Homo sapiens
attatttcatttatg

SEQ ID NO: 830066 - DNA, 15 bp, Homo sapiens
tattatttcatttat

SEQ ID NO: 830067 - DNA, 15 bp, Homo sapiens
atattatttcattta

SEQ ID NO: 830068 - DNA, 15 bp, Homo sapiens
tatattatttcattt

SEQ ID NO: 830069 - DNA, 15 bp, Homo sapiens
ttatattatttcatt

SEQ ID NO: 830070 - DNA, 15 bp, Homo sapiens
attatattatttcat

SEQ ID NO: 830071 - DNA, 15 bp, Homo sapiens
tattatattatttca

SEQ ID NO: 830072 - DNA, 15 bp, Homo sapiens
ctattatattatttc

SEQ ID NO: 830073 - DNA, 15 bp, Homo sapiens
cctattatattattt

SEQ ID NO: 830074 - DNA, 15 bp, Homo sapiens
ccctattatattatt

SEQ ID NO: 830075 - DNA, 15 bp, Homo sapiens
accctattatattat

SEQ ID NO: 830076 - DNA, 15 bp, Homo sapiens
aaccctattatatta

SEQ ID NO: 830077 - DNA, 15 bp, Homo sapiens
aaaccctattatatt

SEQ ID NO: 830078 - DNA, 15 bp, Homo sapiens
aaaaccctattatat

SEQ ID NO: 830079 - DNA, 15 bp, Homo sapiens
aaaaaccctattata

SEQ ID NO: 830080 - DNA, 15 bp, Homo sapiens
aaaaaaccctattat

SEQ ID NO: 830081 - DNA, 15 bp, Homo sapiens
caaaaaaccctatta

SEQ ID NO: 830082 - DNA, 15 bp, Homo sapiens
acaaaaaaccctatt

SEQ ID NO: 830083 - DNA, 15 bp, Homo sapiens
cacaaaaaaccctat

SEQ ID NO: 830084 - DNA, 15 bp, Homo sapiens
gcacaaaaaacccta

SEQ ID NO: 830085 - DNA, 15 bp, Homo sapiens
ggcacaaaaaaccct

SEQ ID NO: 830086 - DNA, 15 bp, Homo sapiens
aggcacaaaaaaccc

SEQ ID NO: 830087 - DNA, 15 bp, Homo sapiens
taggcacaaaaaacc

SEQ ID NO: 830088 - DNA, 15 bp, Homo sapiens
ttaggcacaaaaaac

SEQ ID NO: 830089 - DNA, 15 bp, Homo sapiens
tttaggcacaaaaaa

SEQ ID NO: 830090 - DNA, 15 bp, Homo sapiens
atttaggcacaaaaa

SEQ ID NO: 830091 - DNA, 15 bp, Homo sapiens
tatttaggcacaaaa

SEQ ID NO: 830092 - DNA, 15 bp, Homo sapiens
ttatttaggcacaaa

SEQ ID NO: 830093 - DNA, 15 bp, Homo sapiens
cttatttaggcacaa

SEQ ID NO: 830094 - DNA, 15 bp, Homo sapiens
gcttatttaggcaca

SEQ ID NO: 830095 - DNA, 15 bp, Homo sapiens
agcttatttaggcac

SEQ ID NO: 830096 - DNA, 15 bp, Homo sapiens
aagcttatttaggca

SEQ ID NO: 830097 - DNA, 15 bp, Homo sapiens
gaagcttatttaggc

SEQ ID NO: 830098 - DNA, 15 bp, Homo sapiens
agaagcttatttagg

SEQ ID NO: 830099 - DNA, 15 bp, Homo sapiens
tagaagcttatttag

SEQ ID NO: 830100 - DNA, 15 bp, Homo sapiens
ttagaagcttattta

SEQ ID NO: 830101 - DNA, 15 bp, Homo sapiens
tttagaagcttattt

SEQ ID NO: 830102 - DNA, 15 bp, Homo sapiens
ctttagaagcttatt

SEQ ID NO: 830103 - DNA, 15 bp, Homo sapiens
tctttagaagcttat

SEQ ID NO: 830104 - DNA, 15 bp, Homo sapiens
ttctttagaagctta

SEQ ID NO: 830105 - DNA, 15 bp, Homo sapiens
cttctttagaagctt

SEQ ID NO: 830106 - DNA, 15 bp, Homo sapiens
tcttctttagaagct

SEQ ID NO: 830107 - DNA, 15 bp, Homo sapiens
ttcttctttagaagc

SEQ ID NO: 830108 - DNA, 15 bp, Homo sapiens
attcttctttagaag

SEQ ID NO: 830109 - DNA, 15 bp, Homo sapiens
tattcttctttagaa

SEQ ID NO: 830110 - DNA, 15 bp, Homo sapiens
ttattcttctttaga

SEQ ID NO: 830111 - DNA, 15 bp, Homo sapiens
cttattcttctttag

SEQ ID NO: 830112 - DNA, 15 bp, Homo sapiens
ccttattcttcttta

SEQ ID NO: 830113 - DNA, 15 bp, Homo sapiens
accttattcttcttt

SEQ ID NO: 830114 - DNA, 15 bp, Homo sapiens
taccttattcttctt

SEQ ID NO: 830115 - DNA, 15 bp, Homo sapiens
ttaccttattcttct

SEQ ID NO: 830116 - DNA, 15 bp, Homo sapiens
cttaccttattcttc

SEQ ID NO: 830117 - DNA, 15 bp, Homo sapiens
ccttaccttattctt

SEQ ID NO: 830118 - DNA, 15 bp, Homo sapiens
tccttaccttattct

SEQ ID NO: 830119 - DNA, 15 bp, Homo sapiens
ttccttaccttattc

SEQ ID NO: 830120 - DNA, 15 bp, Homo sapiens
attccttaccttatt

SEQ ID NO: 830121 - DNA, 15 bp, Homo sapiens
gattccttaccttat

SEQ ID NO: 830122 - DNA, 15 bp, Homo sapiens
tgattccttacctta

SEQ ID NO: 830123 - DNA, 15 bp, Homo sapiens
atgattccttacctt

SEQ ID NO: 830124 - DNA, 15 bp, Homo sapiens
gatgattccttacct

SEQ ID NO: 830125 - DNA, 15 bp, Homo sapiens
tgatgattccttacc

SEQ ID NO: 830126 - DNA, 15 bp, Homo sapiens
atgatgattccttac

SEQ ID NO: 830127 - DNA, 15 bp, Homo sapiens
aatgatgattcctta

SEQ ID NO: 830128 - DNA, 15 bp, Homo sapiens
gaatgatgattcctt

SEQ ID NO: 830129 - DNA, 15 bp, Homo sapiens
tgaatgatgattcct

SEQ ID NO: 830130 - DNA, 15 bp, Homo sapiens
ctgaatgatgattcc

SEQ ID NO: 830131 - DNA, 15 bp, Homo sapiens
gctgaatgatgattc

SEQ ID NO: 830132 - DNA, 15 bp, Homo sapiens
tgctgaatgatgatt

SEQ ID NO: 830133 - DNA, 15 bp, Homo sapiens
ttgctgaatgatgat

SEQ ID NO: 830134 - DNA, 15 bp, Homo sapiens
tttgctgaatgatga

SEQ ID NO: 830135 - DNA, 15 bp, Homo sapiens
atttgctgaatgatg

SEQ ID NO: 830136 - DNA, 15 bp, Homo sapiens
tatttgctgaatgat

SEQ ID NO: 830137 - DNA, 15 bp, Homo sapiens
atatttgctgaatga

SEQ ID NO: 830138 - DNA, 15 bp, Homo sapiens
aatatttgctgaatg

SEQ ID NO: 830139 - DNA, 15 bp, Homo sapiens
aaatatttgctgaat

SEQ ID NO: 830140 - DNA, 15 bp, Homo sapiens
taaatatttgctgaa

SEQ ID NO: 830141 - DNA, 15 bp, Homo sapiens
ataaatatttgctga

SEQ ID NO: 830142 - DNA, 15 bp, Homo sapiens
aataaatatttgctg

SEQ ID NO: 830143 - DNA, 15 bp, Homo sapiens
taataaatatttgct

SEQ ID NO: 830144 - DNA, 15 bp, Homo sapiens
ttaataaatatttgc

SEQ ID NO: 830145 - DNA, 15 bp, Homo sapiens
cttaataaatatttg

SEQ ID NO: 830146 - DNA, 15 bp, Homo sapiens
tcttaataaatattt

SEQ ID NO: 830147 - DNA, 15 bp, Homo sapiens
gtcttaataaatatt

SEQ ID NO: 830148 - DNA, 15 bp, Homo sapiens
agtcttaataaatat

SEQ ID NO: 830149 - DNA, 15 bp, Homo sapiens
aagtcttaataaata

SEQ ID NO: 830150 - DNA, 15 bp, Homo sapiens
caagtcttaataaat

SEQ ID NO: 830151 - DNA, 15 bp, Homo sapiens
gcaagtcttaataaa

SEQ ID NO: 830152 - DNA, 15 bp, Homo sapiens
agcaagtcttaataa

SEQ ID NO: 830153 - DNA, 15 bp, Homo sapiens
aagcaagtcttaata

SEQ ID NO: 830154 - DNA, 15 bp, Homo sapiens
aaagcaagtcttaat

SEQ ID NO: 830155 - DNA, 15 bp, Homo sapiens
taaagcaagtcttaa

SEQ ID NO: 830156 - DNA, 15 bp, Homo sapiens
ataaagcaagtctta

SEQ ID NO: 830157 - DNA, 15 bp, Homo sapiens
aataaagcaagtctt

SEQ ID NO: 830158 - DNA, 15 bp, Homo sapiens
aaataaagcaagtct

SEQ ID NO: 830159 - DNA, 15 bp, Homo sapiens
aaaataaagcaagtc

SEQ ID NO: 830160 - DNA, 15 bp, Homo sapiens
taaaataaagcaagt

SEQ ID NO: 830161 - DNA, 15 bp, Homo sapiens
ataaaataaagcaag

SEQ ID NO: 830162 - DNA, 15 bp, Homo sapiens
tataaaataaagcaa

SEQ ID NO: 830163 - DNA, 15 bp, Homo sapiens
gtataaaataaagca

SEQ ID NO: 830164 - DNA, 15 bp, Homo sapiens
tgtataaaataaagc

SEQ ID NO: 830165 - DNA, 15 bp, Homo sapiens
ctgtataaaataaag

SEQ ID NO: 830166 - DNA, 15 bp, Homo sapiens
actgtataaaataaa

SEQ ID NO: 830167 - DNA, 15 bp, Homo sapiens
cactgtataaaataa

SEQ ID NO: 830168 - DNA, 15 bp, Homo sapiens
acactgtataaaata

SEQ ID NO: 830169 - DNA, 15 bp, Homo sapiens
tacactgtataaaat

SEQ ID NO: 830170 - DNA, 15 bp, Homo sapiens
gtacactgtataaaa

SEQ ID NO: 830171 - DNA, 15 bp, Homo sapiens
agtacactgtataaa

SEQ ID NO: 830172 - DNA, 15 bp, Homo sapiens
tagtacactgtataa

SEQ ID NO: 830173 - DNA, 15 bp, Homo sapiens
ctagtacactgtata

SEQ ID NO: 830174 - DNA, 15 bp, Homo sapiens
cctagtacactgtat

SEQ ID NO: 830175 - DNA, 15 bp, Homo sapiens
tcctagtacactgta

SEQ ID NO: 830176 - DNA, 15 bp, Homo sapiens
ctcctagtacactgt

SEQ ID NO: 830177 - DNA, 15 bp, Homo sapiens
gctcctagtacactg

SEQ ID NO: 830178 - DNA, 15 bp, Homo sapiens
agctcctagtacact

SEQ ID NO: 830179 - DNA, 15 bp, Homo sapiens
cagctcctagtacac

SEQ ID NO: 830180 - DNA, 15 bp, Homo sapiens
ccagctcctagtaca

SEQ ID NO: 830181 - DNA, 15 bp, Homo sapiens
tccagctcctagtac

SEQ ID NO: 830182 - DNA, 15 bp, Homo sapiens
ctccagctcctagta

SEQ ID NO: 830183 - DNA, 15 bp, Homo sapiens
tctccagctcctagt

SEQ ID NO: 830184 - DNA, 15 bp, Homo sapiens
atctccagctcctag

SEQ ID NO: 830185 - DNA, 15 bp, Homo sapiens
catctccagctccta

SEQ ID NO: 830186 - DNA, 15 bp, Homo sapiens
tcatctccagctcct

SEQ ID NO: 830187 - DNA, 15 bp, Homo sapiens
ttcatctccagctcc

SEQ ID NO: 830188 - DNA, 15 bp, Homo sapiens
tttcatctccagctc

SEQ ID NO: 830189 - DNA, 15 bp, Homo sapiens
ttttcatctccagct

SEQ ID NO: 830190 - DNA, 15 bp, Homo sapiens
attttcatctccagc

SEQ ID NO: 830191 - DNA, 15 bp, Homo sapiens
tattttcatctccag

SEQ ID NO: 830192 - DNA, 15 bp, Homo sapiens
atattttcatctcca

SEQ ID NO: 830193 - DNA, 15 bp, Homo sapiens
catattttcatctcc

SEQ ID NO: 830194 - DNA, 15 bp, Homo sapiens
acatattttcatctc

SEQ ID NO: 830195 - DNA, 15 bp, Homo sapiens
cacatattttcatct

SEQ ID NO: 830196 - DNA, 15 bp, Homo sapiens
acacatattttcatc

SEQ ID NO: 830197 - DNA, 15 bp, Homo sapiens
tacacatattttcat

SEQ ID NO: 830198 - DNA, 15 bp, Homo sapiens
ctacacatattttca

SEQ ID NO: 830199 - DNA, 15 bp, Homo sapiens
tctacacatattttc

SEQ ID NO: 830200 - DNA, 15 bp, Homo sapiens
ttctacacatatttt

SEQ ID NO: 830201 - DNA, 15 bp, Homo sapiens
gttctacacatattt

SEQ ID NO: 830202 - DNA, 15 bp, Homo sapiens
tgttctacacatatt

SEQ ID NO: 830203 - DNA, 15 bp, Homo sapiens
atgttctacacatat

SEQ ID NO: 830204 - DNA, 15 bp, Homo sapiens
catgttctacacata

SEQ ID NO: 830205 - DNA, 15 bp, Homo sapiens
tcatgttctacacat

SEQ ID NO: 830206 - DNA, 15 bp, Homo sapiens
ttcatgttctacaca

SEQ ID NO: 830207 - DNA, 15 bp, Homo sapiens
attcatgttctacac

SEQ ID NO: 830208 - DNA, 15 bp, Homo sapiens
gattcatgttctaca

SEQ ID NO: 830209 - DNA, 15 bp, Homo sapiens
tgattcatgttctac

SEQ ID NO: 830210 - DNA, 15 bp, Homo sapiens
atgattcatgttcta

SEQ ID NO: 830211 - DNA, 15 bp, Homo sapiens
tatgattcatgttct

SEQ ID NO: 830212 - DNA, 15 bp, Homo sapiens
atatgattcatgttc

SEQ ID NO: 830213 - DNA, 15 bp, Homo sapiens
tatatgattcatgtt

SEQ ID NO: 830214 - DNA, 15 bp, Homo sapiens
gtatatgattcatgt

SEQ ID NO: 830215 - DNA, 15 bp, Homo sapiens
agtatatgattcatg

SEQ ID NO: 830216 - DNA, 15 bp, Homo sapiens
aagtatatgattcat

SEQ ID NO: 830217 - DNA, 15 bp, Homo sapiens
gaagtatatgattca

SEQ ID NO: 830218 - DNA, 15 bp, Homo sapiens
cgaagtatatgattc

SEQ ID NO: 830219 - DNA, 15 bp, Homo sapiens
ccgaagtatatgatt

SEQ ID NO: 830220 - DNA, 15 bp, Homo sapiens
cccgaagtatatgat

SEQ ID NO: 830221 - DNA, 15 bp, Homo sapiens
tcccgaagtatatga

SEQ ID NO: 830222 - DNA, 15 bp, Homo sapiens
ttcccgaagtatatg

SEQ ID NO: 830223 - DNA, 15 bp, Homo sapiens
attcccgaagtatat

SEQ ID NO: 830224 - DNA, 15 bp, Homo sapiens
aattcccgaagtata

SEQ ID NO: 830225 - DNA, 15 bp, Homo sapiens
aaattcccgaagtat

SEQ ID NO: 830226 - DNA, 15 bp, Homo sapiens
caaattcccgaagta

SEQ ID NO: 830227 - DNA, 15 bp, Homo sapiens
acaaattcccgaagt

SEQ ID NO: 830228 - DNA, 15 bp, Homo sapiens
cacaaattcccgaag

SEQ ID NO: 830229 - DNA, 15 bp, Homo sapiens
ccacaaattcccgaa

SEQ ID NO: 830230 - DNA, 15 bp, Homo sapiens
tccacaaattcccga

SEQ ID NO: 830231 - DNA, 15 bp, Homo sapiens
gtccacaaattcccg

SEQ ID NO: 830232 - DNA, 15 bp, Homo sapiens
agtccacaaattccc

SEQ ID NO: 830233 - DNA, 15 bp, Homo sapiens
tagtccacaaattcc

SEQ ID NO: 830234 - DNA, 15 bp, Homo sapiens
ctagtccacaaattc

SEQ ID NO: 830235 - DNA, 15 bp, Homo sapiens
actagtccacaaatt

SEQ ID NO: 830236 - DNA, 15 bp, Homo sapiens
cactagtccacaaat

SEQ ID NO: 830237 - DNA, 15 bp, Homo sapiens
ccactagtccacaaa

SEQ ID NO: 830238 - DNA, 15 bp, Homo sapiens
cccactagtccacaa

SEQ ID NO: 830239 - DNA, 15 bp, Homo sapiens
tcccactagtccaca

SEQ ID NO: 830240 - DNA, 15 bp, Homo sapiens
ttcccactagtccac

SEQ ID NO: 830241 - DNA, 15 bp, Homo sapiens
tttcccactagtcca

SEQ ID NO: 830242 - DNA, 15 bp, Homo sapiens
ctttcccactagtcc

SEQ ID NO: 830243 - DNA, 15 bp, Homo sapiens
tctttcccactagtc

SEQ ID NO: 830244 - DNA, 15 bp, Homo sapiens
atctttcccactagt

SEQ ID NO: 830245 - DNA, 15 bp, Homo sapiens
aatctttcccactag

SEQ ID NO: 830246 - DNA, 15 bp, Homo sapiens
caatctttcccacta

SEQ ID NO: 830247 - DNA, 15 bp, Homo sapiens
tcaatctttcccact

SEQ ID NO: 830248 - DNA, 15 bp, Homo sapiens
gtcaatctttcccac

SEQ ID NO: 830249 - DNA, 15 bp, Homo sapiens
tgtcaatctttccca

SEQ ID NO: 830250 - DNA, 15 bp, Homo sapiens
atgtcaatctttccc

SEQ ID NO: 830251 - DNA, 15 bp, Homo sapiens
tatgtcaatctttcc

SEQ ID NO: 830252 - DNA, 15 bp, Homo sapiens
atatgtcaatctttc

SEQ ID NO: 830253 - DNA, 15 bp, Homo sapiens
gatatgtcaatcttt

SEQ ID NO: 830254 - DNA, 15 bp, Homo sapiens
tgatatgtcaatctt

SEQ ID NO: 830255 - DNA, 15 bp, Homo sapiens
ttgatatgtcaatct

SEQ ID NO: 830256 - DNA, 15 bp, Homo sapiens
attgatatgtcaatc

SEQ ID NO: 830257 - DNA, 15 bp, Homo sapiens
tattgatatgtcaat

SEQ ID NO: 830258 - DNA, 15 bp, Homo sapiens
ttattgatatgtcaa

SEQ ID NO: 830259 - DNA, 15 bp, Homo sapiens
gttattgatatgtca

SEQ ID NO: 830260 - DNA, 15 bp, Homo sapiens
tgttattgatatgtc

SEQ ID NO: 830261 - DNA, 15 bp, Homo sapiens
ttgttattgatatgt

SEQ ID NO: 830262 - DNA, 15 bp, Homo sapiens
tttgttattgatatg

SEQ ID NO: 830263 - DNA, 15 bp, Homo sapiens
atttgttattgatat

SEQ ID NO: 830264 - DNA, 15 bp, Homo sapiens
gatttgttattgata

SEQ ID NO: 830265 - DNA, 15 bp, Homo sapiens
cgatttgttattgat

SEQ ID NO: 830266 - DNA, 15 bp, Homo sapiens
tcgatttgttattga

SEQ ID NO: 830267 - DNA, 15 bp, Homo sapiens
ttcgatttgttattg

SEQ ID NO: 830268 - DNA, 15 bp, Homo sapiens
attcgatttgttatt

SEQ ID NO: 830269 - DNA, 15 bp, Homo sapiens
aattcgatttgttat

SEQ ID NO: 830270 - DNA, 15 bp, Homo sapiens
taattcgatttgtta

SEQ ID NO: 830271 - DNA, 15 bp, Homo sapiens
ctaattcgatttgtt

SEQ ID NO: 830272 - DNA, 15 bp, Homo sapiens
actaattcgatttgt

SEQ ID NO: 830273 - DNA, 15 bp, Homo sapiens
cactaattcgatttg

SEQ ID NO: 830274 - DNA, 15 bp, Homo sapiens
tcactaattcgattt

SEQ ID NO: 830275 - DNA, 15 bp, Homo sapiens
atcactaattcgatt

SEQ ID NO: 830276 - DNA, 15 bp, Homo sapiens
catcactaattcgat

SEQ ID NO: 830277 - DNA, 15 bp, Homo sapiens
acatcactaattcga

SEQ ID NO: 830278 - DNA, 15 bp, Homo sapiens
tacatcactaattcg

SEQ ID NO: 830279 - DNA, 15 bp, Homo sapiens
ttacatcactaattc

SEQ ID NO: 830280 - DNA, 15 bp, Homo sapiens
attacatcactaatt

SEQ ID NO: 830281 - DNA, 15 bp, Homo sapiens
tattacatcactaat

SEQ ID NO: 830282 - DNA, 15 bp, Homo sapiens
ctattacatcactaa

SEQ ID NO: 830283 - DNA, 15 bp, Homo sapiens
tctattacatcacta

SEQ ID NO: 830284 - DNA, 15 bp, Homo sapiens
ctctattacatcact

SEQ ID NO: 830285 - DNA, 15 bp, Homo sapiens
cctctattacatcac

SEQ ID NO: 830286 - DNA, 15 bp, Homo sapiens
gcctctattacatca

SEQ ID NO: 830287 - DNA, 15 bp, Homo sapiens
tgcctctattacatc

SEQ ID NO: 830288 - DNA, 15 bp, Homo sapiens
atgcctctattacat

SEQ ID NO: 830289 - DNA, 15 bp, Homo sapiens
aatgcctctattaca

SEQ ID NO: 830290 - DNA, 15 bp, Homo sapiens
aaatgcctctattac

SEQ ID NO: 830291 - DNA, 15 bp, Homo sapiens
aaaatgcctctatta

SEQ ID NO: 830292 - DNA, 15 bp, Homo sapiens
aaaaatgcctctatt

SEQ ID NO: 830293 - DNA, 15 bp, Homo sapiens
taaaaatgcctctat

SEQ ID NO: 830294 - DNA, 15 bp, Homo sapiens
gtaaaaatgcctcta

SEQ ID NO: 830295 - DNA, 15 bp, Homo sapiens
tgtaaaaatgcctct

SEQ ID NO: 830296 - DNA, 15 bp, Homo sapiens
ctgtaaaaatgcctc

SEQ ID NO: 830297 - DNA, 15 bp, Homo sapiens
cctgtaaaaatgcct

SEQ ID NO: 830298 - DNA, 15 bp, Homo sapiens
tcctgtaaaaatgcc

SEQ ID NO: 830299 - DNA, 15 bp, Homo sapiens
ctcctgtaaaaatgc

SEQ ID NO: 830300 - DNA, 15 bp, Homo sapiens
actcctgtaaaaatg

SEQ ID NO: 830301 - DNA, 15 bp, Homo sapiens
tactcctgtaaaaat

SEQ ID NO: 830302 - DNA, 15 bp, Homo sapiens
ttactcctgtaaaaa

SEQ ID NO: 830303 - DNA, 15 bp, Homo sapiens
tttactcctgtaaaa

SEQ ID NO: 830304 - DNA, 15 bp, Homo sapiens
ttttactcctgtaaa

SEQ ID NO: 830305 - DNA, 15 bp, Homo sapiens
attttactcctgtaa

SEQ ID NO: 830306 - DNA, 15 bp, Homo sapiens
cattttactcctgta

SEQ ID NO: 830307 - DNA, 15 bp, Homo sapiens
tcattttactcctgt

SEQ ID NO: 830308 - DNA, 15 bp, Homo sapiens
ctcattttactcctg

SEQ ID NO: 830309 - DNA, 15 bp, Homo sapiens
cctcattttactcct

SEQ ID NO: 830310 - DNA, 15 bp, Homo sapiens
acctcattttactcc

SEQ ID NO: 830311 - DNA, 15 bp, Homo sapiens
tacctcattttactc

SEQ ID NO: 830312 - DNA, 15 bp, Homo sapiens
ctacctcattttact

SEQ ID NO: 830313 - DNA, 15 bp, Homo sapiens
gctacctcattttac

SEQ ID NO: 830314 - DNA, 15 bp, Homo sapiens
tgctacctcatttta

SEQ ID NO: 830315 - DNA, 15 bp, Homo sapiens
atgctacctcatttt

SEQ ID NO: 830316 - DNA, 15 bp, Homo sapiens
catgctacctcattt

SEQ ID NO: 830317 - DNA, 15 bp, Homo sapiens
ccatgctacctcatt

SEQ ID NO: 830318 - DNA, 15 bp, Homo sapiens
tccatgctacctcat

SEQ ID NO: 830319 - DNA, 15 bp, Homo sapiens
gtccatgctacctca

SEQ ID NO: 830320 - DNA, 15 bp, Homo sapiens
agtccatgctacctc

SEQ ID NO: 830321 - DNA, 15 bp, Homo sapiens
gagtccatgctacct

SEQ ID NO: 830322 - DNA, 15 bp, Homo sapiens
agagtccatgctacc

SEQ ID NO: 830323 - DNA, 15 bp, Homo sapiens
tagagtccatgctac

SEQ ID NO: 830324 - DNA, 15 bp, Homo sapiens
atagagtccatgcta

SEQ ID NO: 830325 - DNA, 15 bp, Homo sapiens
gatagagtccatgct

SEQ ID NO: 830326 - DNA, 15 bp, Homo sapiens
agatagagtccatgc

SEQ ID NO: 830327 - DNA, 15 bp, Homo sapiens
cagatagagtccatg

SEQ ID NO: 830328 - DNA, 15 bp, Homo sapiens
ccagatagagtccat

SEQ ID NO: 830329 - DNA, 15 bp, Homo sapiens
cccagatagagtcca

SEQ ID NO: 830330 - DNA, 15 bp, Homo sapiens
acccagatagagtcc

SEQ ID NO: 830331 - DNA, 15 bp, Homo sapiens
gacccagatagagtc

SEQ ID NO: 830332 - DNA, 15 bp, Homo sapiens
agacccagatagagt

SEQ ID NO: 830333 - DNA, 15 bp, Homo sapiens
cagacccagatagag

SEQ ID NO: 830334 - DNA, 15 bp, Homo sapiens
tcagacccagataga

SEQ ID NO: 830335 - DNA, 15 bp, Homo sapiens
ttcagacccagatag

SEQ ID NO: 830336 - DNA, 15 bp, Homo sapiens
attcagacccagata

SEQ ID NO: 830337 - DNA, 15 bp, Homo sapiens
tattcagacccagat

SEQ ID NO: 830338 - DNA, 15 bp, Homo sapiens
ttattcagacccaga

SEQ ID NO: 830339 - DNA, 15 bp, Homo sapiens
attattcagacccag

SEQ ID NO: 830340 - DNA, 15 bp, Homo sapiens
cattattcagaccca

SEQ ID NO: 830341 - DNA, 15 bp, Homo sapiens
acattattcagaccc

SEQ ID NO: 830342 - DNA, 15 bp, Homo sapiens
cacattattcagacc

SEQ ID NO: 830343 - DNA, 15 bp, Homo sapiens
tcacattattcagac

SEQ ID NO: 830344 - DNA, 15 bp, Homo sapiens
ctcacattattcaga

SEQ ID NO: 830345 - DNA, 15 bp, Homo sapiens
cctcacattattcag

SEQ ID NO: 830346 - DNA, 15 bp, Homo sapiens
tcctcacattattca

SEQ ID NO: 830347 - DNA, 15 bp, Homo sapiens
ctcctcacattattc

SEQ ID NO: 830348 - DNA, 15 bp, Homo sapiens
actcctcacattatt

SEQ ID NO: 830349 - DNA, 15 bp, Homo sapiens
tactcctcacattat

SEQ ID NO: 830350 - DNA, 15 bp, Homo sapiens
ttactcctcacatta

SEQ ID NO: 830351 - DNA, 15 bp, Homo sapiens
gttactcctcacatt

SEQ ID NO: 830352 - DNA, 15 bp, Homo sapiens
ggttactcctcacat

SEQ ID NO: 830353 - DNA, 15 bp, Homo sapiens
aggttactcctcaca

SEQ ID NO: 830354 - DNA, 15 bp, Homo sapiens
gaggttactcctcac

SEQ ID NO: 830355 - DNA, 15 bp, Homo sapiens
ggaggttactcctca

SEQ ID NO: 830356 - DNA, 15 bp, Homo sapiens
aggaggttactcctc

SEQ ID NO: 830357 - DNA, 15 bp, Homo sapiens
aaggaggttactcct

SEQ ID NO: 830358 - DNA, 15 bp, Homo sapiens
taaggaggttactcc

SEQ ID NO: 830359 - DNA, 15 bp, Homo sapiens
gtaaggaggttactc

SEQ ID NO: 830360 - DNA, 15 bp, Homo sapiens
tgtaaggaggttact

SEQ ID NO: 830361 - DNA, 15 bp, Homo sapiens
gtgtaaggaggttac

SEQ ID NO: 830362 - DNA, 15 bp, Homo sapiens
tgtgtaaggaggtta

SEQ ID NO: 830363 - DNA, 15 bp, Homo sapiens
ttgtgtaaggaggtt

SEQ ID NO: 830364 - DNA, 15 bp, Homo sapiens
tttgtgtaaggaggt

SEQ ID NO: 830365 - DNA, 15 bp, Homo sapiens
ctttgtgtaaggagg

SEQ ID NO: 830366 - DNA, 15 bp, Homo sapiens
tctttgtgtaaggag

SEQ ID NO: 830367 - DNA, 15 bp, Homo sapiens
ctctttgtgtaagga

SEQ ID NO: 830368 - DNA, 15 bp, Homo sapiens
cctctttgtgtaagg

SEQ ID NO: 830369 - DNA, 15 bp, Homo sapiens
gcctctttgtgtaag

SEQ ID NO: 830370 - DNA, 15 bp, Homo sapiens
tgcctctttgtgtaa

SEQ ID NO: 830371 - DNA, 15 bp, Homo sapiens
gtgcctctttgtgta

SEQ ID NO: 830372 - DNA, 15 bp, Homo sapiens
tgtgcctctttgtgt

SEQ ID NO: 830373 - DNA, 15 bp, Homo sapiens
ttgtgcctctttgtg

SEQ ID NO: 830374 - DNA, 15 bp, Homo sapiens
cttgtgcctctttgt

SEQ ID NO: 830375 - DNA, 15 bp, Homo sapiens
ccttgtgcctctttg

SEQ ID NO: 830376 - DNA, 15 bp, Homo sapiens
gccttgtgcctcttt

SEQ ID NO: 830377 - DNA, 15 bp, Homo sapiens
agccttgtgcctctt

SEQ ID NO: 830378 - DNA, 15 bp, Homo sapiens
tagccttgtgcctct

SEQ ID NO: 830379 - DNA, 15 bp, Homo sapiens
ttagccttgtgcctc

SEQ ID NO: 830380 - DNA, 15 bp, Homo sapiens
attagccttgtgcct

SEQ ID NO: 830381 - DNA, 15 bp, Homo sapiens
cattagccttgtgcc

SEQ ID NO: 830382 - DNA, 15 bp, Homo sapiens
acattagccttgtgc

SEQ ID NO: 830383 - DNA, 15 bp, Homo sapiens
gacattagccttgtg

SEQ ID NO: 830384 - DNA, 15 bp, Homo sapiens
ggacattagccttgt

SEQ ID NO: 830385 - DNA, 15 bp, Homo sapiens
aggacattagccttg

SEQ ID NO: 830386 - DNA, 15 bp, Homo sapiens
gaggacattagcctt

SEQ ID NO: 830387 - DNA, 15 bp, Homo sapiens
agaggacattagcct

SEQ ID NO: 830388 - DNA, 15 bp, Homo sapiens
cagaggacattagcc

SEQ ID NO: 830389 - DNA, 15 bp, Homo sapiens
tcagaggacattagc

SEQ ID NO: 830390 - DNA, 15 bp, Homo sapiens
atcagaggacattag

SEQ ID NO: 830391 - DNA, 15 bp, Homo sapiens
catcagaggacatta

SEQ ID NO: 830392 - DNA, 15 bp, Homo sapiens
ccatcagaggacatt

SEQ ID NO: 830393 - DNA, 15 bp, Homo sapiens
tccatcagaggacat

SEQ ID NO: 830394 - DNA, 15 bp, Homo sapiens
ttccatcagaggaca

SEQ ID NO: 830395 - DNA, 15 bp, Homo sapiens
attccatcagaggac

SEQ ID NO: 830396 - DNA, 15 bp, Homo sapiens
cattccatcagagga

SEQ ID NO: 830397 - DNA, 15 bp, Homo sapiens
tcattccatcagagg

SEQ ID NO: 830398 - DNA, 15 bp, Homo sapiens
atcattccatcagag

SEQ ID NO: 830399 - DNA, 15 bp, Homo sapiens
aatcattccatcaga

SEQ ID NO: 830400 - DNA, 15 bp, Homo sapiens
gaatcattccatcag

SEQ ID NO: 830401 - DNA, 15 bp, Homo sapiens
tgaatcattccatca

SEQ ID NO: 830402 - DNA, 15 bp, Homo sapiens
gtgaatcattccatc

SEQ ID NO: 830403 - DNA, 15 bp, Homo sapiens
ggtgaatcattccat

SEQ ID NO: 830404 - DNA, 15 bp, Homo sapiens
tggtgaatcattcca

SEQ ID NO: 830405 - DNA, 15 bp, Homo sapiens
atggtgaatcattcc

SEQ ID NO: 830406 - DNA, 15 bp, Homo sapiens
catggtgaatcattc

SEQ ID NO: 830407 - DNA, 15 bp, Homo sapiens
gcatggtgaatcatt

SEQ ID NO: 830408 - DNA, 15 bp, Homo sapiens
tgcatggtgaatcat

SEQ ID NO: 830409 - DNA, 15 bp, Homo sapiens
ttgcatggtgaatca

SEQ ID NO: 830410 - DNA, 15 bp, Homo sapiens
attgcatggtgaatc

SEQ ID NO: 830411 - DNA, 15 bp, Homo sapiens
aattgcatggtgaat

SEQ ID NO: 830412 - DNA, 15 bp, Homo sapiens
gaattgcatggtgaa

SEQ ID NO: 830413 - DNA, 15 bp, Homo sapiens
agaattgcatggtga

SEQ ID NO: 830414 - DNA, 15 bp, Homo sapiens
tagaattgcatggtg

SEQ ID NO: 830415 - DNA, 15 bp, Homo sapiens
ttagaattgcatggt

SEQ ID NO: 830416 - DNA, 15 bp, Homo sapiens
cttagaattgcatgg

SEQ ID NO: 830417 - DNA, 15 bp, Homo sapiens
ccttagaattgcatg

SEQ ID NO: 830418 - DNA, 15 bp, Homo sapiens
cccttagaattgcat

SEQ ID NO: 830419 - DNA, 15 bp, Homo sapiens
acccttagaattgca

SEQ ID NO: 830420 - DNA, 15 bp, Homo sapiens
cacccttagaattgc

SEQ ID NO: 830421 - DNA, 15 bp, Homo sapiens
tcacccttagaattg

SEQ ID NO: 830422 - DNA, 15 bp, Homo sapiens
gtcacccttagaatt

SEQ ID NO: 830423 - DNA, 15 bp, Homo sapiens
tgtcacccttagaat

SEQ ID NO: 830424 - DNA, 15 bp, Homo sapiens
ttgtcacccttagaa

SEQ ID NO: 830425 - DNA, 15 bp, Homo sapiens
cttgtcacccttaga

SEQ ID NO: 830426 - DNA, 15 bp, Homo sapiens
tcttgtcacccttag

SEQ ID NO: 830427 - DNA, 15 bp, Homo sapiens
ttcttgtcaccctta

SEQ ID NO: 830428 - DNA, 15 bp, Homo sapiens
attcttgtcaccctt

SEQ ID NO: 830429 - DNA, 15 bp, Homo sapiens
cattcttgtcaccct

SEQ ID NO: 830430 - DNA, 15 bp, Homo sapiens
tcattcttgtcaccc

SEQ ID NO: 830431 - DNA, 15 bp, Homo sapiens
ttcattcttgtcacc

SEQ ID NO: 830432 - DNA, 15 bp, Homo sapiens
tttcattcttgtcac

SEQ ID NO: 830433 - DNA, 15 bp, Homo sapiens
ctttcattcttgtca

SEQ ID NO: 830434 - DNA, 15 bp, Homo sapiens
actttcattcttgtc

SEQ ID NO: 830435 - DNA, 15 bp, Homo sapiens
aactttcattcttgt

SEQ ID NO: 830436 - DNA, 15 bp, Homo sapiens
taactttcattcttg

SEQ ID NO: 830437 - DNA, 15 bp, Homo sapiens
ctaactttcattctt

SEQ ID NO: 830438 - DNA, 15 bp, Homo sapiens
cctaactttcattct

SEQ ID NO: 830439 - DNA, 15 bp, Homo sapiens
ccctaactttcattc

SEQ ID NO: 830440 - DNA, 15 bp, Homo sapiens
gccctaactttcatt

SEQ ID NO: 830441 - DNA, 15 bp, Homo sapiens
ggccctaactttcat

SEQ ID NO: 830442 - DNA, 15 bp, Homo sapiens
aggccctaactttca

SEQ ID NO: 830443 - DNA, 15 bp, Homo sapiens
aaggccctaactttc

SEQ ID NO: 830444 - DNA, 15 bp, Homo sapiens
caaggccctaacttt

SEQ ID NO: 830445 - DNA, 15 bp, Homo sapiens
tcaaggccctaactt

SEQ ID NO: 830446 - DNA, 15 bp, Homo sapiens
ttcaaggccctaact

SEQ ID NO: 830447 - DNA, 15 bp, Homo sapiens
cttcaaggccctaac

SEQ ID NO: 830448 - DNA, 15 bp, Homo sapiens
tcttcaaggccctaa

SEQ ID NO: 830449 - DNA, 15 bp, Homo sapiens
ttcttcaaggcccta

SEQ ID NO: 830450 - DNA, 15 bp, Homo sapiens
tttcttcaaggccct

SEQ ID NO: 830451 - DNA, 15 bp, Homo sapiens
atttcttcaaggccc

SEQ ID NO: 830452 - DNA, 15 bp, Homo sapiens
tatttcttcaaggcc

SEQ ID NO: 830453 - DNA, 15 bp, Homo sapiens
atatttcttcaaggc

SEQ ID NO: 830454 - DNA, 15 bp, Homo sapiens
aatatttcttcaagg

SEQ ID NO: 830455 - DNA, 15 bp, Homo sapiens
aaatatttcttcaag

SEQ ID NO: 830456 - DNA, 15 bp, Homo sapiens
aaaatatttcttcaa

SEQ ID NO: 830457 - DNA, 15 bp, Homo sapiens
caaaatatttcttca

SEQ ID NO: 830458 - DNA, 15 bp, Homo sapiens
tcaaaatatttcttc

SEQ ID NO: 830459 - DNA, 15 bp, Homo sapiens
atcaaaatatttctt

SEQ ID NO: 830460 - DNA, 15 bp, Homo sapiens
aatcaaaatatttct

SEQ ID NO: 830461 - DNA, 15 bp, Homo sapiens
taatcaaaatatttc

SEQ ID NO: 830462 - DNA, 15 bp, Homo sapiens
ttaatcaaaatattt

SEQ ID NO: 830463 - DNA, 15 bp, Homo sapiens
cttaatcaaaatatt

SEQ ID NO: 830464 - DNA, 15 bp, Homo sapiens
tcttaatcaaaatat

SEQ ID NO: 830465 - DNA, 15 bp, Homo sapiens
ctcttaatcaaaata

SEQ ID NO: 830466 - DNA, 15 bp, Homo sapiens
gctcttaatcaaaat

SEQ ID NO: 830467 - DNA, 15 bp, Homo sapiens
agctcttaatcaaaa

SEQ ID NO: 830468 - DNA, 15 bp, Homo sapiens
cagctcttaatcaaa

SEQ ID NO: 830469 - DNA, 15 bp, Homo sapiens
gcagctcttaatcaa

SEQ ID NO: 830470 - DNA, 15 bp, Homo sapiens
ggcagctcttaatca

SEQ ID NO: 830471 - DNA, 15 bp, Homo sapiens
tggcagctcttaatc

SEQ ID NO: 830472 - DNA, 15 bp, Homo sapiens
ttggcagctcttaat

SEQ ID NO: 830473 - DNA, 15 bp, Homo sapiens
attggcagctcttaa

SEQ ID NO: 830474 - DNA, 15 bp, Homo sapiens
tattggcagctctta

SEQ ID NO: 830475 - DNA, 15 bp, Homo sapiens
ttattggcagctctt

SEQ ID NO: 830476 - DNA, 15 bp, Homo sapiens
tttattggcagctct

SEQ ID NO: 830477 - DNA, 15 bp, Homo sapiens
ctttattggcagctc

SEQ ID NO: 830478 - DNA, 15 bp, Homo sapiens
actttattggcagct

SEQ ID NO: 830479 - DNA, 15 bp, Homo sapiens
tactttattggcagc

SEQ ID NO: 830480 - DNA, 15 bp, Homo sapiens
ctactttattggcag

SEQ ID NO: 830481 - DNA, 15 bp, Homo sapiens
tctactttattggca

SEQ ID NO: 830482 - DNA, 15 bp, Homo sapiens
ctctactttattggc

SEQ ID NO: 830483 - DNA, 15 bp, Homo sapiens
actctactttattgg

SEQ ID NO: 830484 - DNA, 15 bp, Homo sapiens
tactctactttattg

SEQ ID NO: 830485 - DNA, 15 bp, Homo sapiens
ttactctactttatt

SEQ ID NO: 830486 - DNA, 15 bp, Homo sapiens
tttactctactttat

SEQ ID NO: 830487 - DNA, 15 bp, Homo sapiens
ctttactctacttta

SEQ ID NO: 830488 - DNA, 15 bp, Homo sapiens
tctttactctacttt

SEQ ID NO: 830489 - DNA, 15 bp, Homo sapiens
atctttactctactt

SEQ ID NO: 830490 - DNA, 15 bp, Homo sapiens
aatctttactctact

SEQ ID NO: 830491 - DNA, 15 bp, Homo sapiens
taatctttactctac

SEQ ID NO: 830492 - DNA, 15 bp, Homo sapiens
ctaatctttactcta

SEQ ID NO: 830493 - DNA, 15 bp, Homo sapiens
tctaatctttactct

SEQ ID NO: 830494 - DNA, 15 bp, Homo sapiens
atctaatctttactc

SEQ ID NO: 830495 - DNA, 15 bp, Homo sapiens
aatctaatctttact

SEQ ID NO: 830496 - DNA, 15 bp, Homo sapiens
caatctaatctttac

SEQ ID NO: 830497 - DNA, 15 bp, Homo sapiens
tcaatctaatcttta

SEQ ID NO: 830498 - DNA, 15 bp, Homo sapiens
atcaatctaatcttt

SEQ ID NO: 830499 - DNA, 15 bp, Homo sapiens
catcaatctaatctt

SEQ ID NO: 830500 - DNA, 15 bp, Homo sapiens
acatcaatctaatct

SEQ ID NO: 830501 - DNA, 15 bp, Homo sapiens
cacatcaatctaatc

SEQ ID NO: 830502 - DNA, 15 bp, Homo sapiens
tcacatcaatctaat

SEQ ID NO: 830503 - DNA, 15 bp, Homo sapiens
ttcacatcaatctaa

SEQ ID NO: 830504 - DNA, 15 bp, Homo sapiens
cttcacatcaatcta

SEQ ID NO: 830505 - DNA, 15 bp, Homo sapiens
tcttcacatcaatct

SEQ ID NO: 830506 - DNA, 15 bp, Homo sapiens
ttcttcacatcaatc

SEQ ID NO: 830507 - DNA, 15 bp, Homo sapiens
cttcttcacatcaat

SEQ ID NO: 830508 - DNA, 15 bp, Homo sapiens
acttcttcacatcaa

SEQ ID NO: 830509 - DNA, 15 bp, Homo sapiens
cacttcttcacatca

SEQ ID NO: 830510 - DNA, 15 bp, Homo sapiens
ccacttcttcacatc

SEQ ID NO: 830511 - DNA, 15 bp, Homo sapiens
cccacttcttcacat

SEQ ID NO: 830512 - DNA, 15 bp, Homo sapiens
tcccacttcttcaca

SEQ ID NO: 830513 - DNA, 15 bp, Homo sapiens
ctcccacttcttcac

SEQ ID NO: 830514 - DNA, 15 bp, Homo sapiens
tctcccacttcttca

SEQ ID NO: 830515 - DNA, 15 bp, Homo sapiens
atctcccacttcttc

SEQ ID NO: 830516 - DNA, 15 bp, Homo sapiens
aatctcccacttctt

SEQ ID NO: 830517 - DNA, 15 bp, Homo sapiens
taatctcccacttct

SEQ ID NO: 830518 - DNA, 15 bp, Homo sapiens
ttaatctcccacttc

SEQ ID NO: 830519 - DNA, 15 bp, Homo sapiens
attaatctcccactt

SEQ ID NO: 830520 - DNA, 15 bp, Homo sapiens
cattaatctcccact

SEQ ID NO: 830521 - DNA, 15 bp, Homo sapiens
tcattaatctcccac

SEQ ID NO: 830522 - DNA, 15 bp, Homo sapiens
ctcattaatctccca

SEQ ID NO: 830523 - DNA, 15 bp, Homo sapiens
actcattaatctccc

SEQ ID NO: 830524 - DNA, 15 bp, Homo sapiens
tactcattaatctcc

SEQ ID NO: 830525 - DNA, 15 bp, Homo sapiens
ttactcattaatctc

SEQ ID NO: 830526 - DNA, 15 bp, Homo sapiens
tttactcattaatct

SEQ ID NO: 830527 - DNA, 15 bp, Homo sapiens
atttactcattaatc

SEQ ID NO: 830528 - DNA, 15 bp, Homo sapiens
catttactcattaat

SEQ ID NO: 830529 - DNA, 15 bp, Homo sapiens
ccatttactcattaa

SEQ ID NO: 830530 - DNA, 15 bp, Homo sapiens
accatttactcatta

SEQ ID NO: 830531 - DNA, 15 bp, Homo sapiens
gaccatttactcatt

SEQ ID NO: 830532 - DNA, 15 bp, Homo sapiens
tgaccatttactcat

SEQ ID NO: 830533 - DNA, 15 bp, Homo sapiens
gtgaccatttactca

SEQ ID NO: 830534 - DNA, 15 bp, Homo sapiens
agtgaccatttactc

SEQ ID NO: 830535 - DNA, 15 bp, Homo sapiens
cagtgaccatttact

SEQ ID NO: 830536 - DNA, 15 bp, Homo sapiens
ccagtgaccatttac

SEQ ID NO: 830537 - DNA, 15 bp, Homo sapiens
gccagtgaccattta

SEQ ID NO: 830538 - DNA, 15 bp, Homo sapiens
agccagtgaccattt

SEQ ID NO: 830539 - DNA, 15 bp, Homo sapiens
aagccagtgaccatt

SEQ ID NO: 830540 - DNA, 15 bp, Homo sapiens
caagccagtgaccat

SEQ ID NO: 830541 - DNA, 15 bp, Homo sapiens
acaagccagtgacca

SEQ ID NO: 830542 - DNA, 15 bp, Homo sapiens
aacaagccagtgacc

SEQ ID NO: 830543 - DNA, 15 bp, Homo sapiens
caacaagccagtgac

SEQ ID NO: 830544 - DNA, 15 bp, Homo sapiens
tcaacaagccagtga

SEQ ID NO: 830545 - DNA, 15 bp, Homo sapiens
ctcaacaagccagtg

SEQ ID NO: 830546 - DNA, 15 bp, Homo sapiens
tctcaacaagccagt

SEQ ID NO: 830547 - DNA, 15 bp, Homo sapiens
ttctcaacaagccag

SEQ ID NO: 830548 - DNA, 15 bp, Homo sapiens
cttctcaacaagcca

SEQ ID NO: 830549 - DNA, 15 bp, Homo sapiens
tcttctcaacaagcc

SEQ ID NO: 830550 - DNA, 15 bp, Homo sapiens
atcttctcaacaagc

SEQ ID NO: 830551 - DNA, 15 bp, Homo sapiens
aatcttctcaacaag

SEQ ID NO: 830552 - DNA, 15 bp, Homo sapiens
taatcttctcaacaa

SEQ ID NO: 830553 - DNA, 15 bp, Homo sapiens
ttaatcttctcaaca

SEQ ID NO: 830554 - DNA, 15 bp, Homo sapiens
tttaatcttctcaac

SEQ ID NO: 830555 - DNA, 15 bp, Homo sapiens
atttaatcttctcaa

SEQ ID NO: 830556 - DNA, 15 bp, Homo sapiens
catttaatcttctca

SEQ ID NO: 830557 - DNA, 15 bp, Homo sapiens
tcatttaatcttctc

SEQ ID NO: 830558 - DNA, 15 bp, Homo sapiens
ctcatttaatcttct

SEQ ID NO: 830559 - DNA, 15 bp, Homo sapiens
tctcatttaatcttc

SEQ ID NO: 830560 - DNA, 15 bp, Homo sapiens
atctcatttaatctt

SEQ ID NO: 830561 - DNA, 15 bp, Homo sapiens
catctcatttaatct

SEQ ID NO: 830562 - DNA, 15 bp, Homo sapiens
acatctcatttaatc

SEQ ID NO: 830563 - DNA, 15 bp, Homo sapiens
tacatctcatttaat

SEQ ID NO: 830564 - DNA, 15 bp, Homo sapiens
gtacatctcatttaa

SEQ ID NO: 830565 - DNA, 15 bp, Homo sapiens
tgtacatctcattta

SEQ ID NO: 830566 - DNA, 15 bp, Homo sapiens
atgtacatctcattt

SEQ ID NO: 830567 - DNA, 15 bp, Homo sapiens
catgtacatctcatt

SEQ ID NO: 830568 - DNA, 15 bp, Homo sapiens
acatgtacatctcat

SEQ ID NO: 830569 - DNA, 15 bp, Homo sapiens
tacatgtacatctca

SEQ ID NO: 830570 - DNA, 15 bp, Homo sapiens
ttacatgtacatctc

SEQ ID NO: 830571 - DNA, 15 bp, Homo sapiens
attacatgtacatct

SEQ ID NO: 830572 - DNA, 15 bp, Homo sapiens
cattacatgtacatc

SEQ ID NO: 830573 - DNA, 15 bp, Homo sapiens
acattacatgtacat

SEQ ID NO: 830574 - DNA, 15 bp, Homo sapiens
tacattacatgtaca

SEQ ID NO: 830575 - DNA, 15 bp, Homo sapiens
gtacattacatgtac

SEQ ID NO: 830576 - DNA, 15 bp, Homo sapiens
ggtacattacatgta

SEQ ID NO: 830577 - DNA, 15 bp, Homo sapiens
aggtacattacatgt

SEQ ID NO: 830578 - DNA, 15 bp, Homo sapiens
taggtacattacatg

SEQ ID NO: 830579 - DNA, 15 bp, Homo sapiens
ttaggtacattacat

SEQ ID NO: 830580 - DNA, 15 bp, Homo sapiens
gttaggtacattaca

SEQ ID NO: 830581 - DNA, 15 bp, Homo sapiens
tgttaggtacattac

SEQ ID NO: 830582 - DNA, 15 bp, Homo sapiens
gtgttaggtacatta

SEQ ID NO: 830583 - DNA, 15 bp, Homo sapiens
tgtgttaggtacatt

SEQ ID NO: 830584 - DNA, 15 bp, Homo sapiens
ttgtgttaggtacat

SEQ ID NO: 830585 - DNA, 15 bp, Homo sapiens
gttgtgttaggtaca

SEQ ID NO: 830586 - DNA, 15 bp, Homo sapiens
cgttgtgttaggtac

SEQ ID NO: 830587 - DNA, 15 bp, Homo sapiens
acgttgtgttaggta

SEQ ID NO: 830588 - DNA, 15 bp, Homo sapiens
gacgttgtgttaggt

SEQ ID NO: 830589 - DNA, 15 bp, Homo sapiens
agacgttgtgttagg

SEQ ID NO: 830590 - DNA, 15 bp, Homo sapiens
aagacgttgtgttag

SEQ ID NO: 830591 - DNA, 15 bp, Homo sapiens
caagacgttgtgtta

SEQ ID NO: 830592 - DNA, 15 bp, Homo sapiens
acaagacgttgtgtt

SEQ ID NO: 830593 - DNA, 15 bp, Homo sapiens
tacaagacgttgtgt

SEQ ID NO: 830594 - DNA, 15 bp, Homo sapiens
gtacaagacgttgtg

SEQ ID NO: 830595 - DNA, 15 bp, Homo sapiens
tgtacaagacgttgt

SEQ ID NO: 830596 - DNA, 15 bp, Homo sapiens
ttgtacaagacgttg

SEQ ID NO: 830597 - DNA, 15 bp, Homo sapiens
tttgtacaagacgtt

SEQ ID NO: 830598 - DNA, 15 bp, Homo sapiens
ctttgtacaagacgt

SEQ ID NO: 830599 - DNA, 15 bp, Homo sapiens
actttgtacaagacg

SEQ ID NO: 830600 - DNA, 15 bp, Homo sapiens
tactttgtacaagac

SEQ ID NO: 830601 - DNA, 15 bp, Homo sapiens
ctactttgtacaaga

SEQ ID NO: 830602 - DNA, 15 bp, Homo sapiens
gctactttgtacaag

SEQ ID NO: 830603 - DNA, 15 bp, Homo sapiens
ggctactttgtacaa

SEQ ID NO: 830604 - DNA, 15 bp, Homo sapiens
tggctactttgtaca

SEQ ID NO: 830605 - DNA, 15 bp, Homo sapiens
atggctactttgtac

SEQ ID NO: 830606 - DNA, 15 bp, Homo sapiens
aatggctactttgta

SEQ ID NO: 830607 - DNA, 15 bp, Homo sapiens
gaatggctactttgt

SEQ ID NO: 830608 - DNA, 15 bp, Homo sapiens
tgaatggctactttg

SEQ ID NO: 830609 - DNA, 15 bp, Homo sapiens
ctgaatggctacttt

SEQ ID NO: 830610 - DNA, 15 bp, Homo sapiens
actgaatggctactt

SEQ ID NO: 830611 - DNA, 15 bp, Homo sapiens
tactgaatggctact

SEQ ID NO: 830612 - DNA, 15 bp, Homo sapiens
ctactgaatggctac

SEQ ID NO: 830613 - DNA, 15 bp, Homo sapiens
tctactgaatggcta

SEQ ID NO: 830614 - DNA, 15 bp, Homo sapiens
ctctactgaatggct

SEQ ID NO: 830615 - DNA, 15 bp, Homo sapiens
tctctactgaatggc

SEQ ID NO: 830616 - DNA, 15 bp, Homo sapiens
gtctctactgaatgg

SEQ ID NO: 830617 - DNA, 15 bp, Homo sapiens
agtctctactgaatg

SEQ ID NO: 830618 - DNA, 15 bp, Homo sapiens
tagtctctactgaat

SEQ ID NO: 830619 - DNA, 15 bp, Homo sapiens
ctagtctctactgaa

SEQ ID NO: 830620 - DNA, 15 bp, Homo sapiens
gctagtctctactga

SEQ ID NO: 830621 - DNA, 15 bp, Homo sapiens
agctagtctctactg

SEQ ID NO: 830622 - DNA, 15 bp, Homo sapiens
aagctagtctctact

SEQ ID NO: 830623 - DNA, 15 bp, Homo sapiens
caagctagtctctac

SEQ ID NO: 830624 - DNA, 15 bp, Homo sapiens
acaagctagtctcta

SEQ ID NO: 830625 - DNA, 15 bp, Homo sapiens
tacaagctagtctct

SEQ ID NO: 830626 - DNA, 15 bp, Homo sapiens
atacaagctagtctc

SEQ ID NO: 830627 - DNA, 15 bp, Homo sapiens
aatacaagctagtct

SEQ ID NO: 830628 - DNA, 15 bp, Homo sapiens
taatacaagctagtc

SEQ ID NO: 830629 - DNA, 15 bp, Homo sapiens
ataatacaagctagt

SEQ ID NO: 830630 - DNA, 15 bp, Homo sapiens
gataatacaagctag

SEQ ID NO: 830631 - DNA, 15 bp, Homo sapiens
agataatacaagcta

SEQ ID NO: 830632 - DNA, 15 bp, Homo sapiens
gagataatacaagct

SEQ ID NO: 830633 - DNA, 15 bp, Homo sapiens
ggagataatacaagc

SEQ ID NO: 830634 - DNA, 15 bp, Homo sapiens
gggagataatacaag

SEQ ID NO: 830635 - DNA, 15 bp, Homo sapiens
agggagataatacaa

SEQ ID NO: 830636 - DNA, 15 bp, Homo sapiens
aagggagataataca

SEQ ID NO: 830637 - DNA, 15 bp, Homo sapiens
aaagggagataatac

SEQ ID NO: 830638 - DNA, 15 bp, Homo sapiens
caaagggagataata

SEQ ID NO: 830639 - DNA, 15 bp, Homo sapiens
tcaaagggagataat

SEQ ID NO: 830640 - DNA, 15 bp, Homo sapiens
ctcaaagggagataa

SEQ ID NO: 830641 - DNA, 15 bp, Homo sapiens
cctcaaagggagata

SEQ ID NO: 830642 - DNA, 15 bp, Homo sapiens
acctcaaagggagat

SEQ ID NO: 830643 - DNA, 15 bp, Homo sapiens
tacctcaaagggaga

SEQ ID NO: 830644 - DNA, 15 bp, Homo sapiens
ttacctcaaagggag

SEQ ID NO: 830645 - DNA, 15 bp, Homo sapiens
tttacctcaaaggga

SEQ ID NO: 830646 - DNA, 15 bp, Homo sapiens
ctttacctcaaaggg

SEQ ID NO: 830647 - DNA, 15 bp, Homo sapiens
tctttacctcaaagg

SEQ ID NO: 830648 - DNA, 15 bp, Homo sapiens
ttctttacctcaaag

SEQ ID NO: 830649 - DNA, 15 bp, Homo sapiens
tttctttacctcaaa

SEQ ID NO: 830650 - DNA, 15 bp, Homo sapiens
ttttctttacctcaa

SEQ ID NO: 830651 - DNA, 15 bp, Homo sapiens
gttttctttacctca

SEQ ID NO: 830652 - DNA, 15 bp, Homo sapiens
agttttctttacctc

SEQ ID NO: 830653 - DNA, 15 bp, Homo sapiens
cagttttctttacct

SEQ ID NO: 830654 - DNA, 15 bp, Homo sapiens
acagttttctttacc

SEQ ID NO: 830655 - DNA, 15 bp, Homo sapiens
aacagttttctttac

SEQ ID NO: 830656 - DNA, 15 bp, Homo sapiens
taacagttttcttta

SEQ ID NO: 830657 - DNA, 15 bp, Homo sapiens
ctaacagttttcttt

SEQ ID NO: 830658 - DNA, 15 bp, Homo sapiens
tctaacagttttctt

SEQ ID NO: 830659 - DNA, 15 bp, Homo sapiens
ttctaacagttttct

SEQ ID NO: 830660 - DNA, 15 bp, Homo sapiens
tttctaacagttttc

SEQ ID NO: 830661 - DNA, 15 bp, Homo sapiens
atttctaacagtttt

SEQ ID NO: 830662 - DNA, 15 bp, Homo sapiens
tatttctaacagttt

SEQ ID NO: 830663 - DNA, 15 bp, Homo sapiens
ctatttctaacagtt

SEQ ID NO: 830664 - DNA, 15 bp, Homo sapiens
actatttctaacagt

SEQ ID NO: 830665 - DNA, 15 bp, Homo sapiens
tactatttctaacag

SEQ ID NO: 830666 - DNA, 15 bp, Homo sapiens
atactatttctaaca

SEQ ID NO: 830667 - DNA, 15 bp, Homo sapiens
aatactatttctaac

SEQ ID NO: 830668 - DNA, 15 bp, Homo sapiens
aaatactatttctaa

SEQ ID NO: 830669 - DNA, 15 bp, Homo sapiens
gaaatactatttcta

SEQ ID NO: 830670 - DNA, 15 bp, Homo sapiens
agaaatactatttct

SEQ ID NO: 830671 - DNA, 15 bp, Homo sapiens
tagaaatactatttc

SEQ ID NO: 830672 - DNA, 15 bp, Homo sapiens
gtagaaatactattt

SEQ ID NO: 830673 - DNA, 15 bp, Homo sapiens
agtagaaatactatt

SEQ ID NO: 830674 - DNA, 15 bp, Homo sapiens
tagtagaaatactat

SEQ ID NO: 830675 - DNA, 15 bp, Homo sapiens
gtagtagaaatacta

SEQ ID NO: 830676 - DNA, 15 bp, Homo sapiens
agtagtagaaatact

SEQ ID NO: 830677 - DNA, 15 bp, Homo sapiens
cagtagtagaaatac

SEQ ID NO: 830678 - DNA, 15 bp, Homo sapiens
tcagtagtagaaata

SEQ ID NO: 830679 - DNA, 15 bp, Homo sapiens
atcagtagtagaaat

SEQ ID NO: 830680 - DNA, 15 bp, Homo sapiens
tatcagtagtagaaa

SEQ ID NO: 830681 - DNA, 15 bp, Homo sapiens
ctatcagtagtagaa

SEQ ID NO: 830682 - DNA, 15 bp, Homo sapiens
actatcagtagtaga

SEQ ID NO: 830683 - DNA, 15 bp, Homo sapiens
tactatcagtagtag

SEQ ID NO: 830684 - DNA, 15 bp, Homo sapiens
atactatcagtagta

SEQ ID NO: 830685 - DNA, 15 bp, Homo sapiens
aatactatcagtagt

SEQ ID NO: 830686 - DNA, 15 bp, Homo sapiens
aaatactatcagtag

SEQ ID NO: 830687 - DNA, 15 bp, Homo sapiens
gaaatactatcagta

SEQ ID NO: 830688 - DNA, 15 bp, Homo sapiens
agaaatactatcagt

SEQ ID NO: 830689 - DNA, 15 bp, Homo sapiens
aagaaatactatcag

SEQ ID NO: 830690 - DNA, 15 bp, Homo sapiens
gaagaaatactatca

SEQ ID NO: 830691 - DNA, 15 bp, Homo sapiens
agaagaaatactatc

SEQ ID NO: 830692 - DNA, 15 bp, Homo sapiens
tagaagaaatactat

SEQ ID NO: 830693 - DNA, 15 bp, Homo sapiens
gtagaagaaatacta

SEQ ID NO: 830694 - DNA, 15 bp, Homo sapiens
agtagaagaaatact

SEQ ID NO: 830695 - DNA, 15 bp, Homo sapiens
aagtagaagaaatac

SEQ ID NO: 830696 - DNA, 15 bp, Homo sapiens
taagtagaagaaata

SEQ ID NO: 830697 - DNA, 15 bp, Homo sapiens
ataagtagaagaaat

SEQ ID NO: 830698 - DNA, 15 bp, Homo sapiens
cataagtagaagaaa

SEQ ID NO: 830699 - DNA, 15 bp, Homo sapiens
gcataagtagaagaa

SEQ ID NO: 830700 - DNA, 15 bp, Homo sapiens
ggcataagtagaaga

SEQ ID NO: 830701 - DNA, 15 bp, Homo sapiens
aggcataagtagaag

SEQ ID NO: 830702 - DNA, 15 bp, Homo sapiens
gaggcataagtagaa

SEQ ID NO: 830703 - DNA, 15 bp, Homo sapiens
ggaggcataagtaga

SEQ ID NO: 830704 - DNA, 15 bp, Homo sapiens
gggaggcataagtag

SEQ ID NO: 830705 - DNA, 15 bp, Homo sapiens
agggaggcataagta

SEQ ID NO: 830706 - DNA, 15 bp, Homo sapiens
aagggaggcataagt

SEQ ID NO: 830707 - DNA, 15 bp, Homo sapiens
aaagggaggcataag

SEQ ID NO: 830708 - DNA, 15 bp, Homo sapiens
caaagggaggcataa

SEQ ID NO: 830709 - DNA, 15 bp, Homo sapiens
tcaaagggaggcata

SEQ ID NO: 830710 - DNA, 15 bp, Homo sapiens
ctcaaagggaggcat

SEQ ID NO: 830711 - DNA, 15 bp, Homo sapiens
cctcaaagggaggca

SEQ ID NO: 830712 - DNA, 15 bp, Homo sapiens
acctcaaagggaggc

SEQ ID NO: 830713 - DNA, 15 bp, Homo sapiens
cacctcaaagggagg

SEQ ID NO: 830714 - DNA, 15 bp, Homo sapiens
tcacctcaaagggag

SEQ ID NO: 830715 - DNA, 15 bp, Homo sapiens
ttcacctcaaaggga

SEQ ID NO: 830716 - DNA, 15 bp, Homo sapiens
cttcacctcaaaggg

SEQ ID NO: 830717 - DNA, 15 bp, Homo sapiens
tcttcacctcaaagg

SEQ ID NO: 830718 - DNA, 15 bp, Homo sapiens
ttcttcacctcaaag

SEQ ID NO: 830719 - DNA, 15 bp, Homo sapiens
attcttcacctcaaa

SEQ ID NO: 830720 - DNA, 15 bp, Homo sapiens
tattcttcacctcaa

SEQ ID NO: 830721 - DNA, 15 bp, Homo sapiens
gtattcttcacctca

SEQ ID NO: 830722 - DNA, 15 bp, Homo sapiens
agtattcttcacctc

SEQ ID NO: 830723 - DNA, 15 bp, Homo sapiens
cagtattcttcacct

SEQ ID NO: 830724 - DNA, 15 bp, Homo sapiens
acagtattcttcacc

SEQ ID NO: 830725 - DNA, 15 bp, Homo sapiens
aacagtattcttcac

SEQ ID NO: 830726 - DNA, 15 bp, Homo sapiens
taacagtattcttca

SEQ ID NO: 830727 - DNA, 15 bp, Homo sapiens
ctaacagtattcttc

SEQ ID NO: 830728 - DNA, 15 bp, Homo sapiens
tctaacagtattctt

SEQ ID NO: 830729 - DNA, 15 bp, Homo sapiens
ttctaacagtattct

SEQ ID NO: 830730 - DNA, 15 bp, Homo sapiens
tttctaacagtattc

SEQ ID NO: 830731 - DNA, 15 bp, Homo sapiens
ttttctaacagtatt

SEQ ID NO: 830732 - DNA, 15 bp, Homo sapiens
gttttctaacagtat

SEQ ID NO: 830733 - DNA, 15 bp, Homo sapiens
tgttttctaacagta

SEQ ID NO: 830734 - DNA, 15 bp, Homo sapiens
atgttttctaacagt

SEQ ID NO: 830735 - DNA, 15 bp, Homo sapiens
catgttttctaacag

SEQ ID NO: 830736 - DNA, 15 bp, Homo sapiens
tcatgttttctaaca

SEQ ID NO: 830737 - DNA, 15 bp, Homo sapiens
gtcatgttttctaac

SEQ ID NO: 830738 - DNA, 15 bp, Homo sapiens
tgtcatgttttctaa

SEQ ID NO: 830739 - DNA, 15 bp, Homo sapiens
atgtcatgttttcta

SEQ ID NO: 830740 - DNA, 15 bp, Homo sapiens
tatgtcatgttttct

SEQ ID NO: 830741 - DNA, 15 bp, Homo sapiens
ctatgtcatgttttc

SEQ ID NO: 830742 - DNA, 15 bp, Homo sapiens
cctatgtcatgtttt

SEQ ID NO: 830743 - DNA, 15 bp, Homo sapiens
tcctatgtcatgttt

SEQ ID NO: 830744 - DNA, 15 bp, Homo sapiens
ctcctatgtcatgtt

SEQ ID NO: 830745 - DNA, 15 bp, Homo sapiens
tctcctatgtcatgt

SEQ ID NO: 830746 - DNA, 15 bp, Homo sapiens
ttctcctatgtcatg

SEQ ID NO: 830747 - DNA, 15 bp, Homo sapiens
tttctcctatgtcat

SEQ ID NO: 830748 - DNA, 15 bp, Homo sapiens
atttctcctatgtca

SEQ ID NO: 830749 - DNA, 15 bp, Homo sapiens
tatttctcctatgtc

SEQ ID NO: 830750 - DNA, 15 bp, Homo sapiens
gtatttctcctatgt

SEQ ID NO: 830751 - DNA, 15 bp, Homo sapiens
ggtatttctcctatg

SEQ ID NO: 830752 - DNA, 15 bp, Homo sapiens
gggtatttctcctat

SEQ ID NO: 830753 - DNA, 15 bp, Homo sapiens
ggggtatttctccta

SEQ ID NO: 830754 - DNA, 15 bp, Homo sapiens
aggggtatttctcct

SEQ ID NO: 830755 - DNA, 15 bp, Homo sapiens
caggggtatttctcc

SEQ ID NO: 830756 - DNA, 15 bp, Homo sapiens
tcaggggtatttctc

SEQ ID NO: 830757 - DNA, 15 bp, Homo sapiens
ctcaggggtatttct

SEQ ID NO: 830758 - DNA, 15 bp, Homo sapiens
tctcaggggtatttc

SEQ ID NO: 830759 - DNA, 15 bp, Homo sapiens
ctctcaggggtattt

SEQ ID NO: 830760 - DNA, 15 bp, Homo sapiens
tctctcaggggtatt

SEQ ID NO: 830761 - DNA, 15 bp, Homo sapiens
gtctctcaggggtat

SEQ ID NO: 830762 - DNA, 15 bp, Homo sapiens
tgtctctcaggggta

SEQ ID NO: 830763 - DNA, 15 bp, Homo sapiens
ctgtctctcaggggt

SEQ ID NO: 830764 - DNA, 15 bp, Homo sapiens
actgtctctcagggg

SEQ ID NO: 830765 - DNA, 15 bp, Homo sapiens
aactgtctctcaggg

SEQ ID NO: 830766 - DNA, 15 bp, Homo sapiens
gaactgtctctcagg

SEQ ID NO: 830767 - DNA, 15 bp, Homo sapiens
agaactgtctctcag

SEQ ID NO: 830768 - DNA, 15 bp, Homo sapiens
aagaactgtctctca

SEQ ID NO: 830769 - DNA, 15 bp, Homo sapiens
taagaactgtctctc

SEQ ID NO: 830770 - DNA, 15 bp, Homo sapiens
ataagaactgtctct

SEQ ID NO: 830771 - DNA, 15 bp, Homo sapiens
aataagaactgtctc

SEQ ID NO: 830772 - DNA, 15 bp, Homo sapiens
taataagaactgtct

SEQ ID NO: 830773 - DNA, 15 bp, Homo sapiens
ctaataagaactgtc

SEQ ID NO: 830774 - DNA, 15 bp, Homo sapiens
actaataagaactgt

SEQ ID NO: 830775 - DNA, 15 bp, Homo sapiens
cactaataagaactg

SEQ ID NO: 830776 - DNA, 15 bp, Homo sapiens
tcactaataagaact

SEQ ID NO: 830777 - DNA, 15 bp, Homo sapiens
gtcactaataagaac

SEQ ID NO: 830778 - DNA, 15 bp, Homo sapiens
agtcactaataagaa

SEQ ID NO: 830779 - DNA, 15 bp, Homo sapiens
tagtcactaataaga

SEQ ID NO: 830780 - DNA, 15 bp, Homo sapiens
gtagtcactaataag

SEQ ID NO: 830781 - DNA, 15 bp, Homo sapiens
agtagtcactaataa

SEQ ID NO: 830782 - DNA, 15 bp, Homo sapiens
cagtagtcactaata

SEQ ID NO: 830783 - DNA, 15 bp, Homo sapiens
acagtagtcactaat

SEQ ID NO: 830784 - DNA, 15 bp, Homo sapiens
cacagtagtcactaa

SEQ ID NO: 830785 - DNA, 15 bp, Homo sapiens
gcacagtagtcacta

SEQ ID NO: 830786 - DNA, 15 bp, Homo sapiens
tgcacagtagtcact

SEQ ID NO: 830787 - DNA, 15 bp, Homo sapiens
ctgcacagtagtcac

SEQ ID NO: 830788 - DNA, 15 bp, Homo sapiens
tctgcacagtagtca

SEQ ID NO: 830789 - DNA, 15 bp, Homo sapiens
ttctgcacagtagtc

SEQ ID NO: 830790 - DNA, 15 bp, Homo sapiens
tttctgcacagtagt

SEQ ID NO: 830791 - DNA, 15 bp, Homo sapiens
ttttctgcacagtag

SEQ ID NO: 830792 - DNA, 15 bp, Homo sapiens
cttttctgcacagta

SEQ ID NO: 830793 - DNA, 15 bp, Homo sapiens
tcttttctgcacagt

SEQ ID NO: 830794 - DNA, 15 bp, Homo sapiens
atcttttctgcacag

SEQ ID NO: 830795 - DNA, 15 bp, Homo sapiens
catcttttctgcaca

SEQ ID NO: 830796 - DNA, 15 bp, Homo sapiens
ccatcttttctgcac

SEQ ID NO: 830797 - DNA, 15 bp, Homo sapiens
tccatcttttctgca

SEQ ID NO: 830798 - DNA, 15 bp, Homo sapiens
ctccatcttttctgc

SEQ ID NO: 830799 - DNA, 15 bp, Homo sapiens
cctccatcttttctg

SEQ ID NO: 830800 - DNA, 15 bp, Homo sapiens
acctccatcttttct

SEQ ID NO: 830801 - DNA, 15 bp, Homo sapiens
aacctccatcttttc

SEQ ID NO: 830802 - DNA, 15 bp, Homo sapiens
caacctccatctttt

SEQ ID NO: 830803 - DNA, 15 bp, Homo sapiens
ccaacctccatcttt

SEQ ID NO: 830804 - DNA, 15 bp, Homo sapiens
accaacctccatctt

SEQ ID NO: 830805 - DNA, 15 bp, Homo sapiens
caccaacctccatct

SEQ ID NO: 830806 - DNA, 15 bp, Homo sapiens
acaccaacctccatc

SEQ ID NO: 830807 - DNA, 15 bp, Homo sapiens
tacaccaacctccat

SEQ ID NO: 830808 - DNA, 15 bp, Homo sapiens
ttacaccaacctcca

SEQ ID NO: 830809 - DNA, 15 bp, Homo sapiens
attacaccaacctcc

SEQ ID NO: 830810 - DNA, 15 bp, Homo sapiens
aattacaccaacctc

SEQ ID NO: 830811 - DNA, 15 bp, Homo sapiens
taattacaccaacct

SEQ ID NO: 830812 - DNA, 15 bp, Homo sapiens
ttaattacaccaacc

SEQ ID NO: 830813 - DNA, 15 bp, Homo sapiens
cttaattacaccaac

SEQ ID NO: 830814 - DNA, 15 bp, Homo sapiens
ccttaattacaccaa

SEQ ID NO: 830815 - DNA, 15 bp, Homo sapiens
tccttaattacacca

SEQ ID NO: 830816 - DNA, 15 bp, Homo sapiens
ctccttaattacacc

SEQ ID NO: 830817 - DNA, 15 bp, Homo sapiens
tctccttaattacac

SEQ ID NO: 830818 - DNA, 15 bp, Homo sapiens
ttctccttaattaca

SEQ ID NO: 830819 - DNA, 15 bp, Homo sapiens
cttctccttaattac

SEQ ID NO: 830820 - DNA, 15 bp, Homo sapiens
ccttctccttaatta

SEQ ID NO: 830821 - DNA, 15 bp, Homo sapiens
tccttctccttaatt

SEQ ID NO: 830822 - DNA, 15 bp, Homo sapiens
ttccttctccttaat

SEQ ID NO: 830823 - DNA, 15 bp, Homo sapiens
tttccttctccttaa

SEQ ID NO: 830824 - DNA, 15 bp, Homo sapiens
ctttccttctcctta

SEQ ID NO: 830825 - DNA, 15 bp, Homo sapiens
gctttccttctcctt

SEQ ID NO: 830826 - DNA, 15 bp, Homo sapiens
ggctttccttctcct

SEQ ID NO: 830827 - DNA, 15 bp, Homo sapiens
tggctttccttctcc

SEQ ID NO: 830828 - DNA, 15 bp, Homo sapiens
atggctttccttctc

SEQ ID NO: 830829 - DNA, 15 bp, Homo sapiens
catggctttccttct

SEQ ID NO: 830830 - DNA, 15 bp, Homo sapiens
tcatggctttccttc

SEQ ID NO: 830831 - DNA, 15 bp, Homo sapiens
ttcatggctttcctt

SEQ ID NO: 830832 - DNA, 15 bp, Homo sapiens
cttcatggctttcct

SEQ ID NO: 830833 - DNA, 15 bp, Homo sapiens
gcttcatggctttcc

SEQ ID NO: 830834 - DNA, 15 bp, Homo sapiens
ggcttcatggctttc

SEQ ID NO: 830835 - DNA, 15 bp, Homo sapiens
tggcttcatggcttt

SEQ ID NO: 830836 - DNA, 15 bp, Homo sapiens
ttggcttcatggctt

SEQ ID NO: 830837 - DNA, 15 bp, Homo sapiens
tttggcttcatggct

SEQ ID NO: 830838 - DNA, 15 bp, Homo sapiens
ctttggcttcatggc

SEQ ID NO: 830839 - DNA, 15 bp, Homo sapiens
actttggcttcatgg

SEQ ID NO: 830840 - DNA, 15 bp, Homo sapiens
tactttggcttcatg

SEQ ID NO: 830841 - DNA, 15 bp, Homo sapiens
atactttggcttcat

SEQ ID NO: 830842 - DNA, 15 bp, Homo sapiens
aatactttggcttca

SEQ ID NO: 830843 - DNA, 15 bp, Homo sapiens
taatactttggcttc

SEQ ID NO: 830844 - DNA, 15 bp, Homo sapiens
ataatactttggctt

SEQ ID NO: 830845 - DNA, 15 bp, Homo sapiens
cataatactttggct

SEQ ID NO: 830846 - DNA, 15 bp, Homo sapiens
tcataatactttggc

SEQ ID NO: 830847 - DNA, 15 bp, Homo sapiens
ttcataatactttgg

SEQ ID NO: 830848 - DNA, 15 bp, Homo sapiens
tttcataatactttg

SEQ ID NO: 830849 - DNA, 15 bp, Homo sapiens
ttttcataatacttt

SEQ ID NO: 830850 - DNA, 15 bp, Homo sapiens
tttttcataatactt

SEQ ID NO: 830851 - DNA, 15 bp, Homo sapiens
ctttttcataatact

SEQ ID NO: 830852 - DNA, 15 bp, Homo sapiens
gctttttcataatac

SEQ ID NO: 830853 - DNA, 15 bp, Homo sapiens
tgctttttcataata

SEQ ID NO: 830854 - DNA, 15 bp, Homo sapiens
atgctttttcataat

SEQ ID NO: 830855 - DNA, 15 bp, Homo sapiens
gatgctttttcataa

SEQ ID NO: 830856 - DNA, 15 bp, Homo sapiens
tgatgctttttcata

SEQ ID NO: 830857 - DNA, 15 bp, Homo sapiens
ttgatgctttttcat

SEQ ID NO: 830858 - DNA, 15 bp, Homo sapiens
attgatgctttttca

SEQ ID NO: 830859 - DNA, 15 bp, Homo sapiens
tattgatgctttttc

SEQ ID NO: 830860 - DNA, 15 bp, Homo sapiens
atattgatgcttttt

SEQ ID NO: 830861 - DNA, 15 bp, Homo sapiens
catattgatgctttt

SEQ ID NO: 830862 - DNA, 15 bp, Homo sapiens
tcatattgatgcttt

SEQ ID NO: 830863 - DNA, 15 bp, Homo sapiens
ttcatattgatgctt

SEQ ID NO: 830864 - DNA, 15 bp, Homo sapiens
attcatattgatgct

SEQ ID NO: 830865 - DNA, 15 bp, Homo sapiens
aattcatattgatgc

SEQ ID NO: 830866 - DNA, 15 bp, Homo sapiens
aaattcatattgatg

SEQ ID NO: 830867 - DNA, 15 bp, Homo sapiens
aaaattcatattgat

SEQ ID NO: 830868 - DNA, 15 bp, Homo sapiens
gaaaattcatattga

SEQ ID NO: 830869 - DNA, 15 bp, Homo sapiens
tgaaaattcatattg

SEQ ID NO: 830870 - DNA, 15 bp, Homo sapiens
atgaaaattcatatt

SEQ ID NO: 830871 - DNA, 15 bp, Homo sapiens
catgaaaattcatat

SEQ ID NO: 830872 - DNA, 15 bp, Homo sapiens
acatgaaaattcata

SEQ ID NO: 830873 - DNA, 15 bp, Homo sapiens
aacatgaaaattcat

SEQ ID NO: 830874 - DNA, 15 bp, Homo sapiens
caacatgaaaattca

SEQ ID NO: 830875 - DNA, 15 bp, Homo sapiens
tcaacatgaaaattc

SEQ ID NO: 830876 - DNA, 15 bp, Homo sapiens
gtcaacatgaaaatt

SEQ ID NO: 830877 - DNA, 15 bp, Homo sapiens
tgtcaacatgaaaat

SEQ ID NO: 830878 - DNA, 15 bp, Homo sapiens
ttgtcaacatgaaaa

SEQ ID NO: 830879 - DNA, 15 bp, Homo sapiens
tttgtcaacatgaaa

SEQ ID NO: 830880 - DNA, 15 bp, Homo sapiens
ctttgtcaacatgaa

SEQ ID NO: 830881 - DNA, 15 bp, Homo sapiens
actttgtcaacatga

SEQ ID NO: 830882 - DNA, 15 bp, Homo sapiens
cactttgtcaacatg

SEQ ID NO: 830883 - DNA, 15 bp, Homo sapiens
ccactttgtcaacat

SEQ ID NO: 830884 - DNA, 15 bp, Homo sapiens
accactttgtcaaca

SEQ ID NO: 830885 - DNA, 15 bp, Homo sapiens
taccactttgtcaac

SEQ ID NO: 830886 - DNA, 15 bp, Homo sapiens
ataccactttgtcaa

SEQ ID NO: 830887 - DNA, 15 bp, Homo sapiens
tataccactttgtca

SEQ ID NO: 830888 - DNA, 15 bp, Homo sapiens
ttataccactttgtc

SEQ ID NO: 830889 - DNA, 15 bp, Homo sapiens
tttataccactttgt

SEQ ID NO: 830890 - DNA, 15 bp, Homo sapiens
ttttataccactttg

SEQ ID NO: 830891 - DNA, 15 bp, Homo sapiens
cttttataccacttt

SEQ ID NO: 830892 - DNA, 15 bp, Homo sapiens
tcttttataccactt

SEQ ID NO: 830893 - DNA, 15 bp, Homo sapiens
atcttttataccact

SEQ ID NO: 830894 - DNA, 15 bp, Homo sapiens
tatcttttataccac

SEQ ID NO: 830895 - DNA, 15 bp, Homo sapiens
ttatcttttatacca

SEQ ID NO: 830896 - DNA, 15 bp, Homo sapiens
attatcttttatacc

SEQ ID NO: 830897 - DNA, 15 bp, Homo sapiens
aattatcttttatac

SEQ ID NO: 830898 - DNA, 15 bp, Homo sapiens
taattatcttttata

SEQ ID NO: 830899 - DNA, 15 bp, Homo sapiens
ataattatcttttat

SEQ ID NO: 830900 - DNA, 15 bp, Homo sapiens
tataattatctttta

SEQ ID NO: 830901 - DNA, 15 bp, Homo sapiens
ttataattatctttt

SEQ ID NO: 830902 - DNA, 15 bp, Homo sapiens
tttataattatcttt

SEQ ID NO: 830903 - DNA, 15 bp, Homo sapiens
ctttataattatctt

SEQ ID NO: 830904 - DNA, 15 bp, Homo sapiens
tctttataattatct

SEQ ID NO: 830905 - DNA, 15 bp, Homo sapiens
atctttataattatc

SEQ ID NO: 830906 - DNA, 15 bp, Homo sapiens
catctttataattat

SEQ ID NO: 830907 - DNA, 15 bp, Homo sapiens
ccatctttataatta

SEQ ID NO: 830908 - DNA, 15 bp, Homo sapiens
accatctttataatt

SEQ ID NO: 830909 - DNA, 15 bp, Homo sapiens
gaccatctttataat

SEQ ID NO: 830910 - DNA, 15 bp, Homo sapiens
tgaccatctttataa

SEQ ID NO: 830911 - DNA, 15 bp, Homo sapiens
gtgaccatctttata

SEQ ID NO: 830912 - DNA, 15 bp, Homo sapiens
agtgaccatctttat

SEQ ID NO: 830913 - DNA, 15 bp, Homo sapiens
aagtgaccatcttta

SEQ ID NO: 830914 - DNA, 15 bp, Homo sapiens
taagtgaccatcttt

SEQ ID NO: 830915 - DNA, 15 bp, Homo sapiens
ataagtgaccatctt

SEQ ID NO: 830916 - DNA, 15 bp, Homo sapiens
tataagtgaccatct

SEQ ID NO: 830917 - DNA, 15 bp, Homo sapiens
ttataagtgaccatc

SEQ ID NO: 830918 - DNA, 15 bp, Homo sapiens
tttataagtgaccat

SEQ ID NO: 830919 - DNA, 15 bp, Homo sapiens
atttataagtgacca

SEQ ID NO: 830920 - DNA, 15 bp, Homo sapiens
tatttataagtgacc

SEQ ID NO: 830921 - DNA, 15 bp, Homo sapiens
gtatttataagtgac

SEQ ID NO: 830922 - DNA, 15 bp, Homo sapiens
cgtatttataagtga

SEQ ID NO: 830923 - DNA, 15 bp, Homo sapiens
ccgtatttataagtg

SEQ ID NO: 830924 - DNA, 15 bp, Homo sapiens
accgtatttataagt

SEQ ID NO: 830925 - DNA, 15 bp, Homo sapiens
taccgtatttataag

SEQ ID NO: 830926 - DNA, 15 bp, Homo sapiens
ctaccgtatttataa

SEQ ID NO: 830927 - DNA, 15 bp, Homo sapiens
actaccgtatttata

SEQ ID NO: 830928 - DNA, 15 bp, Homo sapiens
aactaccgtatttat

SEQ ID NO: 830929 - DNA, 15 bp, Homo sapiens
gaactaccgtattta

SEQ ID NO: 830930 - DNA, 15 bp, Homo sapiens
agaactaccgtattt

SEQ ID NO: 830931 - DNA, 15 bp, Homo sapiens
cagaactaccgtatt

SEQ ID NO: 830932 - DNA, 15 bp, Homo sapiens
acagaactaccgtat

SEQ ID NO: 830933 - DNA, 15 bp, Homo sapiens
cacagaactaccgta

SEQ ID NO: 830934 - DNA, 15 bp, Homo sapiens
acacagaactaccgt

SEQ ID NO: 830935 - DNA, 15 bp, Homo sapiens
cacacagaactaccg

SEQ ID NO: 830936 - DNA, 15 bp, Homo sapiens
tcacacagaactacc

SEQ ID NO: 830937 - DNA, 15 bp, Homo sapiens
gtcacacagaactac

SEQ ID NO: 830938 - DNA, 15 bp, Homo sapiens
tgtcacacagaacta

SEQ ID NO: 830939 - DNA, 15 bp, Homo sapiens
gtgtcacacagaact

SEQ ID NO: 830940 - DNA, 15 bp, Homo sapiens
tgtgtcacacagaac

SEQ ID NO: 830941 - DNA, 15 bp, Homo sapiens
ttgtgtcacacagaa

SEQ ID NO: 830942 - DNA, 15 bp, Homo sapiens
attgtgtcacacaga

SEQ ID NO: 830943 - DNA, 15 bp, Homo sapiens
aattgtgtcacacag

SEQ ID NO: 830944 - DNA, 15 bp, Homo sapiens
aaattgtgtcacaca

SEQ ID NO: 830945 - DNA, 15 bp, Homo sapiens
taaattgtgtcacac

SEQ ID NO: 830946 - DNA, 15 bp, Homo sapiens
gtaaattgtgtcaca

SEQ ID NO: 830947 - DNA, 15 bp, Homo sapiens
tgtaaattgtgtcac

SEQ ID NO: 830948 - DNA, 15 bp, Homo sapiens
ctgtaaattgtgtca

SEQ ID NO: 830949 - DNA, 15 bp, Homo sapiens
tctgtaaattgtgtc

SEQ ID NO: 830950 - DNA, 15 bp, Homo sapiens
ttctgtaaattgtgt

SEQ ID NO: 830951 - DNA, 15 bp, Homo sapiens
cttctgtaaattgtg

SEQ ID NO: 830952 - DNA, 15 bp, Homo sapiens
acttctgtaaattgt

SEQ ID NO: 830953 - DNA, 15 bp, Homo sapiens
aacttctgtaaattg

SEQ ID NO: 830954 - DNA, 15 bp, Homo sapiens
caacttctgtaaatt

SEQ ID NO: 830955 - DNA, 15 bp, Homo sapiens
ccaacttctgtaaat

SEQ ID NO: 830956 - DNA, 15 bp, Homo sapiens
accaacttctgtaaa

SEQ ID NO: 830957 - DNA, 15 bp, Homo sapiens
taccaacttctgtaa

SEQ ID NO: 830958 - DNA, 15 bp, Homo sapiens
ataccaacttctgta

SEQ ID NO: 830959 - DNA, 15 bp, Homo sapiens
tataccaacttctgt

SEQ ID NO: 830960 - DNA, 15 bp, Homo sapiens
atataccaacttctg

SEQ ID NO: 830961 - DNA, 15 bp, Homo sapiens
gatataccaacttct

SEQ ID NO: 830962 - DNA, 15 bp, Homo sapiens
cgatataccaacttc

SEQ ID NO: 830963 - DNA, 15 bp, Homo sapiens
acgatataccaactt

SEQ ID NO: 830964 - DNA, 15 bp, Homo sapiens
cacgatataccaact

SEQ ID NO: 830965 - DNA, 15 bp, Homo sapiens
acacgatataccaac

SEQ ID NO: 830966 - DNA, 15 bp, Homo sapiens
cacacgatataccaa

SEQ ID NO: 830967 - DNA, 15 bp, Homo sapiens
ccacacgatatacca

SEQ ID NO: 830968 - DNA, 15 bp, Homo sapiens
tccacacgatatacc

SEQ ID NO: 830969 - DNA, 15 bp, Homo sapiens
ttccacacgatatac

SEQ ID NO: 830970 - DNA, 15 bp, Homo sapiens
cttccacacgatata

SEQ ID NO: 830971 - DNA, 15 bp, Homo sapiens
tcttccacacgatat

SEQ ID NO: 830972 - DNA, 15 bp, Homo sapiens
ttcttccacacgata

SEQ ID NO: 830973 - DNA, 15 bp, Homo sapiens
tttcttccacacgat

SEQ ID NO: 830974 - DNA, 15 bp, Homo sapiens
ttttcttccacacga

SEQ ID NO: 830975 - DNA, 15 bp, Homo sapiens
gttttcttccacacg

SEQ ID NO: 830976 - DNA, 15 bp, Homo sapiens
tgttttcttccacac

SEQ ID NO: 830977 - DNA, 15 bp, Homo sapiens
ctgttttcttccaca

SEQ ID NO: 830978 - DNA, 15 bp, Homo sapiens
gctgttttcttccac

SEQ ID NO: 830979 - DNA, 15 bp, Homo sapiens
tgctgttttcttcca

SEQ ID NO: 830980 - DNA, 15 bp, Homo sapiens
atgctgttttcttcc

SEQ ID NO: 830981 - DNA, 15 bp, Homo sapiens
tatgctgttttcttc

SEQ ID NO: 830982 - DNA, 15 bp, Homo sapiens
ttatgctgttttctt

SEQ ID NO: 830983 - DNA, 15 bp, Homo sapiens
cttatgctgttttct

SEQ ID NO: 830984 - DNA, 15 bp, Homo sapiens
tcttatgctgttttc

SEQ ID NO: 830985 - DNA, 15 bp, Homo sapiens
atcttatgctgtttt

SEQ ID NO: 830986 - DNA, 15 bp, Homo sapiens
gatcttatgctgttt

SEQ ID NO: 830987 - DNA, 15 bp, Homo sapiens
ggatcttatgctgtt

SEQ ID NO: 830988 - DNA, 15 bp, Homo sapiens
aggatcttatgctgt

SEQ ID NO: 830989 - DNA, 15 bp, Homo sapiens
caggatcttatgctg

SEQ ID NO: 830990 - DNA, 15 bp, Homo sapiens
tcaggatcttatgct

SEQ ID NO: 830991 - DNA, 15 bp, Homo sapiens
ttcaggatcttatgc

SEQ ID NO: 830992 - DNA, 15 bp, Homo sapiens
cttcaggatcttatg

SEQ ID NO: 830993 - DNA, 15 bp, Homo sapiens
ccttcaggatcttat

SEQ ID NO: 830994 - DNA, 15 bp, Homo sapiens
accttcaggatctta

SEQ ID NO: 830995 - DNA, 15 bp, Homo sapiens
aaccttcaggatctt

SEQ ID NO: 830996 - DNA, 15 bp, Homo sapiens
aaaccttcaggatct

SEQ ID NO: 830997 - DNA, 15 bp, Homo sapiens
caaaccttcaggatc

SEQ ID NO: 830998 - DNA, 15 bp, Homo sapiens
tcaaaccttcaggat

SEQ ID NO: 830999 - DNA, 15 bp, Homo sapiens
ttcaaaccttcagga

SEQ ID NO: 831000 - DNA, 15 bp, Homo sapiens
gttcaaaccttcagg

SEQ ID NO: 831001 - DNA, 15 bp, Homo sapiens
agttcaaaccttcag

SEQ ID NO: 831002 - DNA, 15 bp, Homo sapiens
cagttcaaaccttca

SEQ ID NO: 831003 - DNA, 15 bp, Homo sapiens
acagttcaaaccttc

SEQ ID NO: 831004 - DNA, 15 bp, Homo sapiens
cacagttcaaacctt

SEQ ID NO: 831005 - DNA, 15 bp, Homo sapiens
ccacagttcaaacct

SEQ ID NO: 831006 - DNA, 15 bp, Homo sapiens
cccacagttcaaacc

SEQ ID NO: 831007 - DNA, 15 bp, Homo sapiens
gcccacagttcaaac

SEQ ID NO: 831008 - DNA, 15 bp, Homo sapiens
tgcccacagttcaaa

SEQ ID NO: 831009 - DNA, 15 bp, Homo sapiens
gtgcccacagttcaa

SEQ ID NO: 831010 - DNA, 15 bp, Homo sapiens
tgtgcccacagttca

SEQ ID NO: 831011 - DNA, 15 bp, Homo sapiens
atgtgcccacagttc

SEQ ID NO: 831012 - DNA, 15 bp, Homo sapiens
aatgtgcccacagtt

SEQ ID NO: 831013 - DNA, 15 bp, Homo sapiens
caatgtgcccacagt

SEQ ID NO: 831014 - DNA, 15 bp, Homo sapiens
ccaatgtgcccacag

SEQ ID NO: 831015 - DNA, 15 bp, Homo sapiens
gccaatgtgcccaca

SEQ ID NO: 831016 - DNA, 15 bp, Homo sapiens
agccaatgtgcccac

SEQ ID NO: 831017 - DNA, 15 bp, Homo sapiens
gagccaatgtgccca

SEQ ID NO: 831018 - DNA, 15 bp, Homo sapiens
ggagccaatgtgccc

SEQ ID NO: 831019 - DNA, 15 bp, Homo sapiens
tggagccaatgtgcc

SEQ ID NO: 831020 - DNA, 15 bp, Homo sapiens
atggagccaatgtgc

SEQ ID NO: 831021 - DNA, 15 bp, Homo sapiens
catggagccaatgtg

SEQ ID NO: 831022 - DNA, 15 bp, Homo sapiens
gcatggagccaatgt

SEQ ID NO: 831023 - DNA, 15 bp, Homo sapiens
agcatggagccaatg

SEQ ID NO: 831024 - DNA, 15 bp, Homo sapiens
gagcatggagccaat

SEQ ID NO: 831025 - DNA, 15 bp, Homo sapiens
tgagcatggagccaa

SEQ ID NO: 831026 - DNA, 15 bp, Homo sapiens
ctgagcatggagcca

SEQ ID NO: 831027 - DNA, 15 bp, Homo sapiens
cctgagcatggagcc

SEQ ID NO: 831028 - DNA, 15 bp, Homo sapiens
tcctgagcatggagc

SEQ ID NO: 831029 - DNA, 15 bp, Homo sapiens
ttcctgagcatggag

SEQ ID NO: 831030 - DNA, 15 bp, Homo sapiens
tttcctgagcatgga

SEQ ID NO: 831031 - DNA, 15 bp, Homo sapiens
atttcctgagcatgg

SEQ ID NO: 831032 - DNA, 15 bp, Homo sapiens
catttcctgagcatg

SEQ ID NO: 831033 - DNA, 15 bp, Homo sapiens
ccatttcctgagcat

SEQ ID NO: 831034 - DNA, 15 bp, Homo sapiens
gccatttcctgagca

SEQ ID NO: 831035 - DNA, 15 bp, Homo sapiens
tgccatttcctgagc

SEQ ID NO: 831036 - DNA, 15 bp, Homo sapiens
ttgccatttcctgag

SEQ ID NO: 831037 - DNA, 15 bp, Homo sapiens
attgccatttcctga

SEQ ID NO: 831038 - DNA, 15 bp, Homo sapiens
cattgccatttcctg

SEQ ID NO: 831039 - DNA, 15 bp, Homo sapiens
ccattgccatttcct

SEQ ID NO: 831040 - DNA, 15 bp, Homo sapiens
cccattgccatttcc

SEQ ID NO: 831041 - DNA, 15 bp, Homo sapiens
ccccattgccatttc

SEQ ID NO: 831042 - DNA, 15 bp, Homo sapiens
accccattgccattt

SEQ ID NO: 831043 - DNA, 15 bp, Homo sapiens
aaccccattgccatt

SEQ ID NO: 831044 - DNA, 15 bp, Homo sapiens
caaccccattgccat

SEQ ID NO: 831045 - DNA, 15 bp, Homo sapiens
ccaaccccattgcca

SEQ ID NO: 831046 - DNA, 15 bp, Homo sapiens
cccaaccccattgcc

SEQ ID NO: 831047 - DNA, 15 bp, Homo sapiens
tcccaaccccattgc

SEQ ID NO: 831048 - DNA, 15 bp, Homo sapiens
ttcccaaccccattg

SEQ ID NO: 831049 - DNA, 15 bp, Homo sapiens
cttcccaaccccatt

SEQ ID NO: 831050 - DNA, 15 bp, Homo sapiens
acttcccaaccccat

SEQ ID NO: 831051 - DNA, 15 bp, Homo sapiens
cacttcccaacccca

SEQ ID NO: 831052 - DNA, 15 bp, Homo sapiens
tcacttcccaacccc

SEQ ID NO: 831053 - DNA, 15 bp, Homo sapiens
atcacttcccaaccc

SEQ ID NO: 831054 - DNA, 15 bp, Homo sapiens
aatcacttcccaacc

SEQ ID NO: 831055 - DNA, 15 bp, Homo sapiens
gaatcacttcccaac

SEQ ID NO: 831056 - DNA, 15 bp, Homo sapiens
ggaatcacttcccaa

SEQ ID NO: 831057 - DNA, 15 bp, Homo sapiens
tggaatcacttccca

SEQ ID NO: 831058 - DNA, 15 bp, Homo sapiens
gtggaatcacttccc

SEQ ID NO: 831059 - DNA, 15 bp, Homo sapiens
agtggaatcacttcc

SEQ ID NO: 831060 - DNA, 15 bp, Homo sapiens
aagtggaatcacttc

SEQ ID NO: 831061 - DNA, 15 bp, Homo sapiens
aaagtggaatcactt

SEQ ID NO: 831062 - DNA, 15 bp, Homo sapiens
taaagtggaatcact

SEQ ID NO: 831063 - DNA, 15 bp, Homo sapiens
ataaagtggaatcac

SEQ ID NO: 831064 - DNA, 15 bp, Homo sapiens
cataaagtggaatca

SEQ ID NO: 831065 - DNA, 15 bp, Homo sapiens
acataaagtggaatc

SEQ ID NO: 831066 - DNA, 15 bp, Homo sapiens
gacataaagtggaat

SEQ ID NO: 831067 - DNA, 15 bp, Homo sapiens
ggacataaagtggaa

SEQ ID NO: 831068 - DNA, 15 bp, Homo sapiens
gggacataaagtgga

SEQ ID NO: 831069 - DNA, 15 bp, Homo sapiens
agggacataaagtgg

SEQ ID NO: 831070 - DNA, 15 bp, Homo sapiens
aagggacataaagtg

SEQ ID NO: 831071 - DNA, 15 bp, Homo sapiens
aaagggacataaagt

SEQ ID NO: 831072 - DNA, 15 bp, Homo sapiens
gaaagggacataaag

SEQ ID NO: 831073 - DNA, 15 bp, Homo sapiens
tgaaagggacataaa

SEQ ID NO: 831074 - DNA, 15 bp, Homo sapiens
ctgaaagggacataa

SEQ ID NO: 831075 - DNA, 15 bp, Homo sapiens
tctgaaagggacata

SEQ ID NO: 831076 - DNA, 15 bp, Homo sapiens
gtctgaaagggacat

SEQ ID NO: 831077 - DNA, 15 bp, Homo sapiens
tgtctgaaagggaca

SEQ ID NO: 831078 - DNA, 15 bp, Homo sapiens
gtgtctgaaagggac

SEQ ID NO: 831079 - DNA, 15 bp, Homo sapiens
tgtgtctgaaaggga

SEQ ID NO: 831080 - DNA, 15 bp, Homo sapiens
atgtgtctgaaaggg

SEQ ID NO: 831081 - DNA, 15 bp, Homo sapiens
tatgtgtctgaaagg

SEQ ID NO: 831082 - DNA, 15 bp, Homo sapiens
ttatgtgtctgaaag

SEQ ID NO: 831083 - DNA, 15 bp, Homo sapiens
tttatgtgtctgaaa

SEQ ID NO: 831084 - DNA, 15 bp, Homo sapiens
ttttatgtgtctgaa

SEQ ID NO: 831085 - DNA, 15 bp, Homo sapiens
tttttatgtgtctga

SEQ ID NO: 831086 - DNA, 15 bp, Homo sapiens
atttttatgtgtctg

SEQ ID NO: 831087 - DNA, 15 bp, Homo sapiens
aatttttatgtgtct

SEQ ID NO: 831088 - DNA, 15 bp, Homo sapiens
taatttttatgtgtc

SEQ ID NO: 831089 - DNA, 15 bp, Homo sapiens
gtaatttttatgtgt

SEQ ID NO: 831090 - DNA, 15 bp, Homo sapiens
agtaatttttatgtg

SEQ ID NO: 831091 - DNA, 15 bp, Homo sapiens
aagtaatttttatgt

SEQ ID NO: 831092 - DNA, 15 bp, Homo sapiens
caagtaatttttatg

SEQ ID NO: 831093 - DNA, 15 bp, Homo sapiens
acaagtaatttttat

SEQ ID NO: 831094 - DNA, 15 bp, Homo sapiens
cacaagtaattttta

SEQ ID NO: 831095 - DNA, 15 bp, Homo sapiens
acacaagtaattttt

SEQ ID NO: 831096 - DNA, 15 bp, Homo sapiens
cacacaagtaatttt

SEQ ID NO: 831097 - DNA, 15 bp, Homo sapiens
tcacacaagtaattt

SEQ ID NO: 831098 - DNA, 15 bp, Homo sapiens
ctcacacaagtaatt

SEQ ID NO: 831099 - DNA, 15 bp, Homo sapiens
actcacacaagtaat

SEQ ID NO: 831100 - DNA, 15 bp, Homo sapiens
tactcacacaagtaa

SEQ ID NO: 831101 - DNA, 15 bp, Homo sapiens
atactcacacaagta

SEQ ID NO: 831102 - DNA, 15 bp, Homo sapiens
gatactcacacaagt

SEQ ID NO: 831103 - DNA, 15 bp, Homo sapiens
agatactcacacaag

SEQ ID NO: 831104 - DNA, 15 bp, Homo sapiens
aagatactcacacaa

SEQ ID NO: 831105 - DNA, 15 bp, Homo sapiens
taagatactcacaca

SEQ ID NO: 831106 - DNA, 15 bp, Homo sapiens
ataagatactcacac

SEQ ID NO: 831107 - DNA, 15 bp, Homo sapiens
cataagatactcaca

SEQ ID NO: 831108 - DNA, 15 bp, Homo sapiens
gcataagatactcac

SEQ ID NO: 831109 - DNA, 15 bp, Homo sapiens
ggcataagatactca

SEQ ID NO: 831110 - DNA, 15 bp, Homo sapiens
tggcataagatactc

SEQ ID NO: 831111 - DNA, 15 bp, Homo sapiens
ctggcataagatact

SEQ ID NO: 831112 - DNA, 15 bp, Homo sapiens
tctggcataagatac

SEQ ID NO: 831113 - DNA, 15 bp, Homo sapiens
gtctggcataagata

SEQ ID NO: 831114 - DNA, 15 bp, Homo sapiens
tgtctggcataagat

SEQ ID NO: 831115 - DNA, 15 bp, Homo sapiens
gtgtctggcataaga

SEQ ID NO: 831116 - DNA, 15 bp, Homo sapiens
agtgtctggcataag

SEQ ID NO: 831117 - DNA, 15 bp, Homo sapiens
tagtgtctggcataa

SEQ ID NO: 831118 - DNA, 15 bp, Homo sapiens
atagtgtctggcata

SEQ ID NO: 831119 - DNA, 15 bp, Homo sapiens
aatagtgtctggcat

SEQ ID NO: 831120 - DNA, 15 bp, Homo sapiens
gaatagtgtctggca

SEQ ID NO: 831121 - DNA, 15 bp, Homo sapiens
tgaatagtgtctggc

SEQ ID NO: 831122 - DNA, 15 bp, Homo sapiens
gtgaatagtgtctgg

SEQ ID NO: 831123 - DNA, 15 bp, Homo sapiens
agtgaatagtgtctg

SEQ ID NO: 831124 - DNA, 15 bp, Homo sapiens
cagtgaatagtgtct

SEQ ID NO: 831125 - DNA, 15 bp, Homo sapiens
acagtgaatagtgtc

SEQ ID NO: 831126 - DNA, 15 bp, Homo sapiens
cacagtgaatagtgt

SEQ ID NO: 831127 - DNA, 15 bp, Homo sapiens
acacagtgaatagtg

SEQ ID NO: 831128 - DNA, 15 bp, Homo sapiens
tacacagtgaatagt

SEQ ID NO: 831129 - DNA, 15 bp, Homo sapiens
ctacacagtgaatag

SEQ ID NO: 831130 - DNA, 15 bp, Homo sapiens
actacacagtgaata

SEQ ID NO: 831131 - DNA, 15 bp, Homo sapiens
cactacacagtgaat

SEQ ID NO: 831132 - DNA, 15 bp, Homo sapiens
tcactacacagtgaa

SEQ ID NO: 831133 - DNA, 15 bp, Homo sapiens
ctcactacacagtga

SEQ ID NO: 831134 - DNA, 15 bp, Homo sapiens
gctcactacacagtg

SEQ ID NO: 831135 - DNA, 15 bp, Homo sapiens
tgctcactacacagt

SEQ ID NO: 831136 - DNA, 15 bp, Homo sapiens
atgctcactacacag

SEQ ID NO: 831137 - DNA, 15 bp, Homo sapiens
catgctcactacaca

SEQ ID NO: 831138 - DNA, 15 bp, Homo sapiens
ccatgctcactacac

SEQ ID NO: 831139 - DNA, 15 bp, Homo sapiens
accatgctcactaca

SEQ ID NO: 831140 - DNA, 15 bp, Homo sapiens
caccatgctcactac

SEQ ID NO: 831141 - DNA, 15 bp, Homo sapiens
ccaccatgctcacta

SEQ ID NO: 831142 - DNA, 15 bp, Homo sapiens
cccaccatgctcact

SEQ ID NO: 831143 - DNA, 15 bp, Homo sapiens
acccaccatgctcac

SEQ ID NO: 831144 - DNA, 15 bp, Homo sapiens
tacccaccatgctca

SEQ ID NO: 831145 - DNA, 15 bp, Homo sapiens
atacccaccatgctc

SEQ ID NO: 831146 - DNA, 15 bp, Homo sapiens
catacccaccatgct

SEQ ID NO: 831147 - DNA, 15 bp, Homo sapiens
tcatacccaccatgc

SEQ ID NO: 831148 - DNA, 15 bp, Homo sapiens
ttcatacccaccatg

SEQ ID NO: 831149 - DNA, 15 bp, Homo sapiens
tttcatacccaccat

SEQ ID NO: 831150 - DNA, 15 bp, Homo sapiens
atttcatacccacca

SEQ ID NO: 831151 - DNA, 15 bp, Homo sapiens
catttcatacccacc

SEQ ID NO: 831152 - DNA, 15 bp, Homo sapiens
tcatttcatacccac

SEQ ID NO: 831153 - DNA, 15 bp, Homo sapiens
gtcatttcataccca

SEQ ID NO: 831154 - DNA, 15 bp, Homo sapiens
tgtcatttcataccc

SEQ ID NO: 831155 - DNA, 15 bp, Homo sapiens
ttgtcatttcatacc

SEQ ID NO: 831156 - DNA, 15 bp, Homo sapiens
gttgtcatttcatac

SEQ ID NO: 831157 - DNA, 15 bp, Homo sapiens
agttgtcatttcata

SEQ ID NO: 831158 - DNA, 15 bp, Homo sapiens
aagttgtcatttcat

SEQ ID NO: 831159 - DNA, 15 bp, Homo sapiens
aaagttgtcatttca

SEQ ID NO: 831160 - DNA, 15 bp, Homo sapiens
taaagttgtcatttc

SEQ ID NO: 831161 - DNA, 15 bp, Homo sapiens
ataaagttgtcattt

SEQ ID NO: 831162 - DNA, 15 bp, Homo sapiens
aataaagttgtcatt

SEQ ID NO: 831163 - DNA, 15 bp, Homo sapiens
caataaagttgtcat

SEQ ID NO: 831164 - DNA, 15 bp, Homo sapiens
acaataaagttgtca

SEQ ID NO: 831165 - DNA, 15 bp, Homo sapiens
gacaataaagttgtc

SEQ ID NO: 831166 - DNA, 15 bp, Homo sapiens
agacaataaagttgt

SEQ ID NO: 831167 - DNA, 15 bp, Homo sapiens
aagacaataaagttg

SEQ ID NO: 831168 - DNA, 15 bp, Homo sapiens
aaagacaataaagtt

SEQ ID NO: 831169 - DNA, 15 bp, Homo sapiens
gaaagacaataaagt

SEQ ID NO: 831170 - DNA, 15 bp, Homo sapiens
ggaaagacaataaag

SEQ ID NO: 831171 - DNA, 15 bp, Homo sapiens
aggaaagacaataaa

SEQ ID NO: 831172 - DNA, 15 bp, Homo sapiens
caggaaagacaataa

SEQ ID NO: 831173 - DNA, 15 bp, Homo sapiens
acaggaaagacaata

SEQ ID NO: 831174 - DNA, 15 bp, Homo sapiens
gacaggaaagacaat

SEQ ID NO: 831175 - DNA, 15 bp, Homo sapiens
tgacaggaaagacaa

SEQ ID NO: 831176 - DNA, 15 bp, Homo sapiens
ttgacaggaaagaca

SEQ ID NO: 831177 - DNA, 15 bp, Homo sapiens
tttgacaggaaagac

SEQ ID NO: 831178 - DNA, 15 bp, Homo sapiens
ctttgacaggaaaga

SEQ ID NO: 831179 - DNA, 15 bp, Homo sapiens
tctttgacaggaaag

SEQ ID NO: 831180 - DNA, 15 bp, Homo sapiens
ttctttgacaggaaa

SEQ ID NO: 831181 - DNA, 15 bp, Homo sapiens
gttctttgacaggaa

SEQ ID NO: 831182 - DNA, 15 bp, Homo sapiens
agttctttgacagga

SEQ ID NO: 831183 - DNA, 15 bp, Homo sapiens
aagttctttgacagg

SEQ ID NO: 831184 - DNA, 15 bp, Homo sapiens
caagttctttgacag

SEQ ID NO: 831185 - DNA, 15 bp, Homo sapiens
acaagttctttgaca

SEQ ID NO: 831186 - DNA, 15 bp, Homo sapiens
tacaagttctttgac

SEQ ID NO: 831187 - DNA, 15 bp, Homo sapiens
ctacaagttctttga

SEQ ID NO: 831188 - DNA, 15 bp, Homo sapiens
cctacaagttctttg

SEQ ID NO: 831189 - DNA, 15 bp, Homo sapiens
gcctacaagttcttt

SEQ ID NO: 831190 - DNA, 15 bp, Homo sapiens
agcctacaagttctt

SEQ ID NO: 831191 - DNA, 15 bp, Homo sapiens
cagcctacaagttct

SEQ ID NO: 831192 - DNA, 15 bp, Homo sapiens
ccagcctacaagttc

SEQ ID NO: 831193 - DNA, 15 bp, Homo sapiens
accagcctacaagtt

SEQ ID NO: 831194 - DNA, 15 bp, Homo sapiens
aaccagcctacaagt

SEQ ID NO: 831195 - DNA, 15 bp, Homo sapiens
caaccagcctacaag

SEQ ID NO: 831196 - DNA, 15 bp, Homo sapiens
ccaaccagcctacaa

SEQ ID NO: 831197 - DNA, 15 bp, Homo sapiens
cccaaccagcctaca

SEQ ID NO: 831198 - DNA, 15 bp, Homo sapiens
ccccaaccagcctac

SEQ ID NO: 831199 - DNA, 15 bp, Homo sapiens
cccccaaccagccta

SEQ ID NO: 831200 - DNA, 15 bp, Homo sapiens
tcccccaaccagcct

SEQ ID NO: 831201 - DNA, 15 bp, Homo sapiens
ttcccccaaccagcc

SEQ ID NO: 831202 - DNA, 15 bp, Homo sapiens
tttcccccaaccagc

SEQ ID NO: 831203 - DNA, 15 bp, Homo sapiens
ctttcccccaaccag

SEQ ID NO: 831204 - DNA, 15 bp, Homo sapiens
tctttcccccaacca

SEQ ID NO: 831205 - DNA, 15 bp, Homo sapiens
ctctttcccccaacc

SEQ ID NO: 831206 - DNA, 15 bp, Homo sapiens
tctctttcccccaac

SEQ ID NO: 831207 - DNA, 15 bp, Homo sapiens
gtctctttcccccaa

SEQ ID NO: 831208 - DNA, 15 bp, Homo sapiens
ggtctctttccccca

SEQ ID NO: 831209 - DNA, 15 bp, Homo sapiens
tggtctctttccccc

SEQ ID NO: 831210 - DNA, 15 bp, Homo sapiens
atggtctctttcccc

SEQ ID NO: 831211 - DNA, 15 bp, Homo sapiens
aatggtctctttccc

SEQ ID NO: 831212 - DNA, 15 bp, Homo sapiens
aaatggtctctttcc

SEQ ID NO: 831213 - DNA, 15 bp, Homo sapiens
gaaatggtctctttc

SEQ ID NO: 831214 - DNA, 15 bp, Homo sapiens
tgaaatggtctcttt

SEQ ID NO: 831215 - DNA, 15 bp, Homo sapiens
ttgaaatggtctctt

SEQ ID NO: 831216 - DNA, 15 bp, Homo sapiens
attgaaatggtctct

SEQ ID NO: 831217 - DNA, 15 bp, Homo sapiens
tattgaaatggtctc

SEQ ID NO: 831218 - DNA, 15 bp, Homo sapiens
atattgaaatggtct

SEQ ID NO: 831219 - DNA, 15 bp, Homo sapiens
catattgaaatggtc

SEQ ID NO: 831220 - DNA, 15 bp, Homo sapiens
tcatattgaaatggt

SEQ ID NO: 831221 - DNA, 15 bp, Homo sapiens
ttcatattgaaatgg

SEQ ID NO: 831222 - DNA, 15 bp, Homo sapiens
cttcatattgaaatg

SEQ ID NO: 831223 - DNA, 15 bp, Homo sapiens
acttcatattgaaat

SEQ ID NO: 831224 - DNA, 15 bp, Homo sapiens
cacttcatattgaaa

SEQ ID NO: 831225 - DNA, 15 bp, Homo sapiens
gcacttcatattgaa

SEQ ID NO: 831226 - DNA, 15 bp, Homo sapiens
agcacttcatattga

SEQ ID NO: 831227 - DNA, 15 bp, Homo sapiens
cagcacttcatattg

SEQ ID NO: 831228 - DNA, 15 bp, Homo sapiens
tcagcacttcatatt

SEQ ID NO: 831229 - DNA, 15 bp, Homo sapiens
ctcagcacttcatat

SEQ ID NO: 831230 - DNA, 15 bp, Homo sapiens
gctcagcacttcata

SEQ ID NO: 831231 - DNA, 15 bp, Homo sapiens
agctcagcacttcat

SEQ ID NO: 831232 - DNA, 15 bp, Homo sapiens
tagctcagcacttca

SEQ ID NO: 831233 - DNA, 15 bp, Homo sapiens
ctagctcagcacttc

SEQ ID NO: 831234 - DNA, 15 bp, Homo sapiens
tctagctcagcactt

SEQ ID NO: 831235 - DNA, 15 bp, Homo sapiens
ctctagctcagcact

SEQ ID NO: 831236 - DNA, 15 bp, Homo sapiens
cctctagctcagcac

SEQ ID NO: 831237 - DNA, 15 bp, Homo sapiens
acctctagctcagca

SEQ ID NO: 831238 - DNA, 15 bp, Homo sapiens
tacctctagctcagc

SEQ ID NO: 831239 - DNA, 15 bp, Homo sapiens
gtacctctagctcag

SEQ ID NO: 831240 - DNA, 15 bp, Homo sapiens
ggtacctctagctca

SEQ ID NO: 831241 - DNA, 15 bp, Homo sapiens
gggtacctctagctc

SEQ ID NO: 831242 - DNA, 15 bp, Homo sapiens
agggtacctctagct

SEQ ID NO: 831243 - DNA, 15 bp, Homo sapiens
aagggtacctctagc

SEQ ID NO: 831244 - DNA, 15 bp, Homo sapiens
taagggtacctctag

SEQ ID NO: 831245 - DNA, 15 bp, Homo sapiens
ctaagggtacctcta

SEQ ID NO: 831246 - DNA, 15 bp, Homo sapiens
cctaagggtacctct

SEQ ID NO: 831247 - DNA, 15 bp, Homo sapiens
ccctaagggtacctc

SEQ ID NO: 831248 - DNA, 15 bp, Homo sapiens
gccctaagggtacct

SEQ ID NO: 831249 - DNA, 15 bp, Homo sapiens
tgccctaagggtacc

SEQ ID NO: 831250 - DNA, 15 bp, Homo sapiens
gtgccctaagggtac

SEQ ID NO: 831251 - DNA, 15 bp, Homo sapiens
agtgccctaagggta

SEQ ID NO: 831252 - DNA, 15 bp, Homo sapiens
tagtgccctaagggt

SEQ ID NO: 831253 - DNA, 15 bp, Homo sapiens
gtagtgccctaaggg

SEQ ID NO: 831254 - DNA, 15 bp, Homo sapiens
tgtagtgccctaagg

SEQ ID NO: 831255 - DNA, 15 bp, Homo sapiens
ctgtagtgccctaag

SEQ ID NO: 831256 - DNA, 15 bp, Homo sapiens
tctgtagtgccctaa

SEQ ID NO: 831257 - DNA, 15 bp, Homo sapiens
ttctgtagtgcccta

SEQ ID NO: 831258 - DNA, 15 bp, Homo sapiens
cttctgtagtgccct

SEQ ID NO: 831259 - DNA, 15 bp, Homo sapiens
gcttctgtagtgccc

SEQ ID NO: 831260 - DNA, 15 bp, Homo sapiens
ggcttctgtagtgcc

SEQ ID NO: 831261 - DNA, 15 bp, Homo sapiens
aggcttctgtagtgc

SEQ ID NO: 831262 - DNA, 15 bp, Homo sapiens
taggcttctgtagtg

SEQ ID NO: 831263 - DNA, 15 bp, Homo sapiens
ctaggcttctgtagt

SEQ ID NO: 831264 - DNA, 15 bp, Homo sapiens
gctaggcttctgtag

SEQ ID NO: 831265 - DNA, 15 bp, Homo sapiens
agctaggcttctgta

SEQ ID NO: 831266 - DNA, 15 bp, Homo sapiens
cagctaggcttctgt

SEQ ID NO: 831267 - DNA, 15 bp, Homo sapiens
tcagctaggcttctg

SEQ ID NO: 831268 - DNA, 15 bp, Homo sapiens
atcagctaggcttct

SEQ ID NO: 831269 - DNA, 15 bp, Homo sapiens
catcagctaggcttc

SEQ ID NO: 831270 - DNA, 15 bp, Homo sapiens
ccatcagctaggctt

SEQ ID NO: 831271 - DNA, 15 bp, Homo sapiens
gccatcagctaggct

SEQ ID NO: 831272 - DNA, 15 bp, Homo sapiens
agccatcagctaggc

SEQ ID NO: 831273 - DNA, 15 bp, Homo sapiens
aagccatcagctagg

SEQ ID NO: 831274 - DNA, 15 bp, Homo sapiens
aaagccatcagctag

SEQ ID NO: 831275 - DNA, 15 bp, Homo sapiens
aaaagccatcagcta

SEQ ID NO: 831276 - DNA, 15 bp, Homo sapiens
taaaagccatcagct

SEQ ID NO: 831277 - DNA, 15 bp, Homo sapiens
ctaaaagccatcagc

SEQ ID NO: 831278 - DNA, 15 bp, Homo sapiens
gctaaaagccatcag

SEQ ID NO: 831279 - DNA, 15 bp, Homo sapiens
ggctaaaagccatca

SEQ ID NO: 831280 - DNA, 15 bp, Homo sapiens
aggctaaaagccatc

SEQ ID NO: 831281 - DNA, 15 bp, Homo sapiens
caggctaaaagccat

SEQ ID NO: 831282 - DNA, 15 bp, Homo sapiens
ccaggctaaaagcca

SEQ ID NO: 831283 - DNA, 15 bp, Homo sapiens
gccaggctaaaagcc

SEQ ID NO: 831284 - DNA, 15 bp, Homo sapiens
agccaggctaaaagc

SEQ ID NO: 831285 - DNA, 15 bp, Homo sapiens
tagccaggctaaaag

SEQ ID NO: 831286 - DNA, 15 bp, Homo sapiens
ctagccaggctaaaa

SEQ ID NO: 831287 - DNA, 15 bp, Homo sapiens
tctagccaggctaaa

SEQ ID NO: 831288 - DNA, 15 bp, Homo sapiens
gtctagccaggctaa

SEQ ID NO: 831289 - DNA, 15 bp, Homo sapiens
tgtctagccaggcta

SEQ ID NO: 831290 - DNA, 15 bp, Homo sapiens
ctgtctagccaggct

SEQ ID NO: 831291 - DNA, 15 bp, Homo sapiens
actgtctagccaggc

SEQ ID NO: 831292 - DNA, 15 bp, Homo sapiens
aactgtctagccagg

SEQ ID NO: 831293 - DNA, 15 bp, Homo sapiens
gaactgtctagccag

SEQ ID NO: 831294 - DNA, 15 bp, Homo sapiens
tgaactgtctagcca

SEQ ID NO: 831295 - DNA, 15 bp, Homo sapiens
ctgaactgtctagcc

SEQ ID NO: 831296 - DNA, 15 bp, Homo sapiens
cctgaactgtctagc

SEQ ID NO: 831297 - DNA, 15 bp, Homo sapiens
tcctgaactgtctag

SEQ ID NO: 831298 - DNA, 15 bp, Homo sapiens
atcctgaactgtcta

SEQ ID NO: 831299 - DNA, 15 bp, Homo sapiens
gatcctgaactgtct

SEQ ID NO: 831300 - DNA, 15 bp, Homo sapiens
agatcctgaactgtc

SEQ ID NO: 831301 - DNA, 15 bp, Homo sapiens
gagatcctgaactgt

SEQ ID NO: 831302 - DNA, 15 bp, Homo sapiens
agagatcctgaactg

SEQ ID NO: 831303 - DNA, 15 bp, Homo sapiens
tagagatcctgaact

SEQ ID NO: 831304 - DNA, 15 bp, Homo sapiens
ttagagatcctgaac

SEQ ID NO: 831305 - DNA, 15 bp, Homo sapiens
tttagagatcctgaa

SEQ ID NO: 831306 - DNA, 15 bp, Homo sapiens
ttttagagatcctga

SEQ ID NO: 831307 - DNA, 15 bp, Homo sapiens
cttttagagatcctg

SEQ ID NO: 831308 - DNA, 15 bp, Homo sapiens
gcttttagagatcct

SEQ ID NO: 831309 - DNA, 15 bp, Homo sapiens
tgcttttagagatcc

SEQ ID NO: 831310 - DNA, 15 bp, Homo sapiens
ctgcttttagagatc

SEQ ID NO: 831311 - DNA, 15 bp, Homo sapiens
cctgcttttagagat

SEQ ID NO: 831312 - DNA, 15 bp, Homo sapiens
acctgcttttagaga

SEQ ID NO: 831313 - DNA, 15 bp, Homo sapiens
cacctgcttttagag

SEQ ID NO: 831314 - DNA, 15 bp, Homo sapiens
gcacctgcttttaga

SEQ ID NO: 831315 - DNA, 15 bp, Homo sapiens
ggcacctgcttttag

SEQ ID NO: 831316 - DNA, 15 bp, Homo sapiens
aggcacctgctttta

SEQ ID NO: 831317 - DNA, 15 bp, Homo sapiens
aaggcacctgctttt

SEQ ID NO: 831318 - DNA, 15 bp, Homo sapiens
caaggcacctgcttt

SEQ ID NO: 831319 - DNA, 15 bp, Homo sapiens
tcaaggcacctgctt

SEQ ID NO: 831320 - DNA, 15 bp, Homo sapiens
ttcaaggcacctgct

SEQ ID NO: 831321 - DNA, 15 bp, Homo sapiens
cttcaaggcacctgc

SEQ ID NO: 831322 - DNA, 15 bp, Homo sapiens
ccttcaaggcacctg

SEQ ID NO: 831323 - DNA, 15 bp, Homo sapiens
gccttcaaggcacct

SEQ ID NO: 831324 - DNA, 15 bp, Homo sapiens
agccttcaaggcacc

SEQ ID NO: 831325 - DNA, 15 bp, Homo sapiens
cagccttcaaggcac

SEQ ID NO: 831326 - DNA, 15 bp, Homo sapiens
tcagccttcaaggca

SEQ ID NO: 831327 - DNA, 15 bp, Homo sapiens
ctcagccttcaaggc

SEQ ID NO: 831328 - DNA, 15 bp, Homo sapiens
actcagccttcaagg

SEQ ID NO: 831329 - DNA, 15 bp, Homo sapiens
gactcagccttcaag

SEQ ID NO: 831330 - DNA, 15 bp, Homo sapiens
tgactcagccttcaa

SEQ ID NO: 831331 - DNA, 15 bp, Homo sapiens
ttgactcagccttca

SEQ ID NO: 831332 - DNA, 15 bp, Homo sapiens
tttgactcagccttc

SEQ ID NO: 831333 - DNA, 15 bp, Homo sapiens
atttgactcagcctt

SEQ ID NO: 831334 - DNA, 15 bp, Homo sapiens
tatttgactcagcct

SEQ ID NO: 831335 - DNA, 15 bp, Homo sapiens
gtatttgactcagcc

SEQ ID NO: 831336 - DNA, 15 bp, Homo sapiens
tgtatttgactcagc

SEQ ID NO: 831337 - DNA, 15 bp, Homo sapiens
ttgtatttgactcag

SEQ ID NO: 831338 - DNA, 15 bp, Homo sapiens
tttgtatttgactca

SEQ ID NO: 831339 - DNA, 15 bp, Homo sapiens
ttttgtatttgactc

SEQ ID NO: 831340 - DNA, 15 bp, Homo sapiens
tttttgtatttgact

SEQ ID NO: 831341 - DNA, 15 bp, Homo sapiens
atttttgtatttgac

SEQ ID NO: 831342 - DNA, 15 bp, Homo sapiens
catttttgtatttga

SEQ ID NO: 831343 - DNA, 15 bp, Homo sapiens
acatttttgtatttg

SEQ ID NO: 831344 - DNA, 15 bp, Homo sapiens
tacatttttgtattt

SEQ ID NO: 831345 - DNA, 15 bp, Homo sapiens
atacatttttgtatt

SEQ ID NO: 831346 - DNA, 15 bp, Homo sapiens
aatacatttttgtat

SEQ ID NO: 831347 - DNA, 15 bp, Homo sapiens
aaatacatttttgta

SEQ ID NO: 831348 - DNA, 15 bp, Homo sapiens
aaaatacatttttgt

SEQ ID NO: 831349 - DNA, 15 bp, Homo sapiens
caaaatacatttttg

SEQ ID NO: 831350 - DNA, 15 bp, Homo sapiens
ccaaaatacattttt

SEQ ID NO: 831351 - DNA, 15 bp, Homo sapiens
tccaaaatacatttt

SEQ ID NO: 831352 - DNA, 15 bp, Homo sapiens
gtccaaaatacattt

SEQ ID NO: 831353 - DNA, 15 bp, Homo sapiens
tgtccaaaatacatt

SEQ ID NO: 831354 - DNA, 15 bp, Homo sapiens
ctgtccaaaatacat

SEQ ID NO: 831355 - DNA, 15 bp, Homo sapiens
tctgtccaaaataca

SEQ ID NO: 831356 - DNA, 15 bp, Homo sapiens
ctctgtccaaaatac

SEQ ID NO: 831357 - DNA, 15 bp, Homo sapiens
cctctgtccaaaata

SEQ ID NO: 831358 - DNA, 15 bp, Homo sapiens
tcctctgtccaaaat

SEQ ID NO: 831359 - DNA, 15 bp, Homo sapiens
ttcctctgtccaaaa

SEQ ID NO: 831360 - DNA, 15 bp, Homo sapiens
tttcctctgtccaaa

SEQ ID NO: 831361 - DNA, 15 bp, Homo sapiens
atttcctctgtccaa

SEQ ID NO: 831362 - DNA, 15 bp, Homo sapiens
aatttcctctgtcca

SEQ ID NO: 831363 - DNA, 15 bp, Homo sapiens
caatttcctctgtcc

SEQ ID NO: 831364 - DNA, 15 bp, Homo sapiens
acaatttcctctgtc

SEQ ID NO: 831365 - DNA, 15 bp, Homo sapiens
tacaatttcctctgt

SEQ ID NO: 831366 - DNA, 15 bp, Homo sapiens
atacaatttcctctg

SEQ ID NO: 831367 - DNA, 15 bp, Homo sapiens
catacaatttcctct

SEQ ID NO: 831368 - DNA, 15 bp, Homo sapiens
tcatacaatttcctc

SEQ ID NO: 831369 - DNA, 15 bp, Homo sapiens
ttcatacaatttcct

SEQ ID NO: 831370 - DNA, 15 bp, Homo sapiens
gttcatacaatttcc

SEQ ID NO: 831371 - DNA, 15 bp, Homo sapiens
tgttcatacaatttc

SEQ ID NO: 831372 - DNA, 15 bp, Homo sapiens
ctgttcatacaattt

SEQ ID NO: 831373 - DNA, 15 bp, Homo sapiens
tctgttcatacaatt

SEQ ID NO: 831374 - DNA, 15 bp, Homo sapiens
ttctgttcatacaat

SEQ ID NO: 831375 - DNA, 15 bp, Homo sapiens
tttctgttcatacaa

SEQ ID NO: 831376 - DNA, 15 bp, Homo sapiens
gtttctgttcataca

SEQ ID NO: 831377 - DNA, 15 bp, Homo sapiens
tgtttctgttcatac

SEQ ID NO: 831378 - DNA, 15 bp, Homo sapiens
gtgtttctgttcata

SEQ ID NO: 831379 - DNA, 15 bp, Homo sapiens
tgtgtttctgttcat

SEQ ID NO: 831380 - DNA, 15 bp, Homo sapiens
ctgtgtttctgttca

SEQ ID NO: 831381 - DNA, 15 bp, Homo sapiens
tctgtgtttctgttc

SEQ ID NO: 831382 - DNA, 15 bp, Homo sapiens
ttctgtgtttctgtt

SEQ ID NO: 831383 - DNA, 15 bp, Homo sapiens
gttctgtgtttctgt

SEQ ID NO: 831384 - DNA, 15 bp, Homo sapiens
tgttctgtgtttctg

SEQ ID NO: 831385 - DNA, 15 bp, Homo sapiens
atgttctgtgtttct

SEQ ID NO: 831386 - DNA, 15 bp, Homo sapiens
catgttctgtgtttc

SEQ ID NO: 831387 - DNA, 15 bp, Homo sapiens
tcatgttctgtgttt

SEQ ID NO: 831388 - DNA, 15 bp, Homo sapiens
ttcatgttctgtgtt

SEQ ID NO: 831389 - DNA, 15 bp, Homo sapiens
tttcatgttctgtgt

SEQ ID NO: 831390 - DNA, 15 bp, Homo sapiens
gtttcatgttctgtg

SEQ ID NO: 831391 - DNA, 15 bp, Homo sapiens
agtttcatgttctgt

SEQ ID NO: 831392 - DNA, 15 bp, Homo sapiens
tagtttcatgttctg

SEQ ID NO: 831393 - DNA, 15 bp, Homo sapiens
gtagtttcatgttct

SEQ ID NO: 831394 - DNA, 15 bp, Homo sapiens
agtagtttcatgttc

SEQ ID NO: 831395 - DNA, 15 bp, Homo sapiens
aagtagtttcatgtt

SEQ ID NO: 831396 - DNA, 15 bp, Homo sapiens
caagtagtttcatgt

SEQ ID NO: 831397 - DNA, 15 bp, Homo sapiens
ccaagtagtttcatg

SEQ ID NO: 831398 - DNA, 15 bp, Homo sapiens
accaagtagtttcat

SEQ ID NO: 831399 - DNA, 15 bp, Homo sapiens
aaccaagtagtttca

SEQ ID NO: 831400 - DNA, 15 bp, Homo sapiens
caaccaagtagtttc

SEQ ID NO: 831401 - DNA, 15 bp, Homo sapiens
ccaaccaagtagttt

SEQ ID NO: 831402 - DNA, 15 bp, Homo sapiens
accaaccaagtagtt

SEQ ID NO: 831403 - DNA, 15 bp, Homo sapiens
caccaaccaagtagt

SEQ ID NO: 831404 - DNA, 15 bp, Homo sapiens
gcaccaaccaagtag

SEQ ID NO: 831405 - DNA, 15 bp, Homo sapiens
tgcaccaaccaagta

SEQ ID NO: 831406 - DNA, 15 bp, Homo sapiens
ctgcaccaaccaagt

SEQ ID NO: 831407 - DNA, 15 bp, Homo sapiens
cctgcaccaaccaag

SEQ ID NO: 831408 - DNA, 15 bp, Homo sapiens
ccctgcaccaaccaa

SEQ ID NO: 831409 - DNA, 15 bp, Homo sapiens
accctgcaccaacca

SEQ ID NO: 831410 - DNA, 15 bp, Homo sapiens
taccctgcaccaacc

SEQ ID NO: 831411 - DNA, 15 bp, Homo sapiens
ataccctgcaccaac

SEQ ID NO: 831412 - DNA, 15 bp, Homo sapiens
gataccctgcaccaa

SEQ ID NO: 831413 - DNA, 15 bp, Homo sapiens
tgataccctgcacca

SEQ ID NO: 831414 - DNA, 15 bp, Homo sapiens
atgataccctgcacc

SEQ ID NO: 831415 - DNA, 15 bp, Homo sapiens
gatgataccctgcac

SEQ ID NO: 831416 - DNA, 15 bp, Homo sapiens
tgatgataccctgca

SEQ ID NO: 831417 - DNA, 15 bp, Homo sapiens
ctgatgataccctgc

SEQ ID NO: 831418 - DNA, 15 bp, Homo sapiens
gctgatgataccctg

SEQ ID NO: 831419 - DNA, 15 bp, Homo sapiens
tgctgatgataccct

SEQ ID NO: 831420 - DNA, 15 bp, Homo sapiens
atgctgatgataccc

SEQ ID NO: 831421 - DNA, 15 bp, Homo sapiens
tatgctgatgatacc

SEQ ID NO: 831422 - DNA, 15 bp, Homo sapiens
ctatgctgatgatac

SEQ ID NO: 831423 - DNA, 15 bp, Homo sapiens
tctatgctgatgata

SEQ ID NO: 831424 - DNA, 15 bp, Homo sapiens
ttctatgctgatgat

SEQ ID NO: 831425 - DNA, 15 bp, Homo sapiens
gttctatgctgatga

SEQ ID NO: 831426 - DNA, 15 bp, Homo sapiens
ggttctatgctgatg

SEQ ID NO: 831427 - DNA, 15 bp, Homo sapiens
tggttctatgctgat

SEQ ID NO: 831428 - DNA, 15 bp, Homo sapiens
ctggttctatgctga

SEQ ID NO: 831429 - DNA, 15 bp, Homo sapiens
tctggttctatgctg

SEQ ID NO: 831430 - DNA, 15 bp, Homo sapiens
gtctggttctatgct

SEQ ID NO: 831431 - DNA, 15 bp, Homo sapiens
tgtctggttctatgc

SEQ ID NO: 831432 - DNA, 15 bp, Homo sapiens
ctgtctggttctatg

SEQ ID NO: 831433 - DNA, 15 bp, Homo sapiens
tctgtctggttctat

SEQ ID NO: 831434 - DNA, 15 bp, Homo sapiens
ttctgtctggttcta

SEQ ID NO: 831435 - DNA, 15 bp, Homo sapiens
gttctgtctggttct

SEQ ID NO: 831436 - DNA, 15 bp, Homo sapiens
ggttctgtctggttc

SEQ ID NO: 831437 - DNA, 15 bp, Homo sapiens
tggttctgtctggtt

SEQ ID NO: 831438 - DNA, 15 bp, Homo sapiens
ctggttctgtctggt

SEQ ID NO: 831439 - DNA, 15 bp, Homo sapiens
tctggttctgtctgg

SEQ ID NO: 831440 - DNA, 15 bp, Homo sapiens
ctctggttctgtctg

SEQ ID NO: 831441 - DNA, 15 bp, Homo sapiens
actctggttctgtct

SEQ ID NO: 831442 - DNA, 15 bp, Homo sapiens
cactctggttctgtc

SEQ ID NO: 831443 - DNA, 15 bp, Homo sapiens
acactctggttctgt

SEQ ID NO: 831444 - DNA, 15 bp, Homo sapiens
tacactctggttctg

SEQ ID NO: 831445 - DNA, 15 bp, Homo sapiens
ttacactctggttct

SEQ ID NO: 831446 - DNA, 15 bp, Homo sapiens
tttacactctggttc

SEQ ID NO: 831447 - DNA, 15 bp, Homo sapiens
atttacactctggtt

SEQ ID NO: 831448 - DNA, 15 bp, Homo sapiens
tatttacactctggt

SEQ ID NO: 831449 - DNA, 15 bp, Homo sapiens
ttatttacactctgg

SEQ ID NO: 831450 - DNA, 15 bp, Homo sapiens
cttatttacactctg

SEQ ID NO: 831451 - DNA, 15 bp, Homo sapiens
gcttatttacactct

SEQ ID NO: 831452 - DNA, 15 bp, Homo sapiens
ggcttatttacactc

SEQ ID NO: 831453 - DNA, 15 bp, Homo sapiens
tggcttatttacact

SEQ ID NO: 831454 - DNA, 15 bp, Homo sapiens
ctggcttatttacac

SEQ ID NO: 831455 - DNA, 15 bp, Homo sapiens
tctggcttatttaca

SEQ ID NO: 831456 - DNA, 15 bp, Homo sapiens
ttctggcttatttac

SEQ ID NO: 831457 - DNA, 15 bp, Homo sapiens
cttctggcttattta

SEQ ID NO: 831458 - DNA, 15 bp, Homo sapiens
ccttctggcttattt

SEQ ID NO: 831459 - DNA, 15 bp, Homo sapiens
gccttctggcttatt

SEQ ID NO: 831460 - DNA, 15 bp, Homo sapiens
ggccttctggcttat

SEQ ID NO: 831461 - DNA, 15 bp, Homo sapiens
tggccttctggctta

SEQ ID NO: 831462 - DNA, 15 bp, Homo sapiens
atggccttctggctt

SEQ ID NO: 831463 - DNA, 15 bp, Homo sapiens
catggccttctggct

SEQ ID NO: 831464 - DNA, 15 bp, Homo sapiens
acatggccttctggc

SEQ ID NO: 831465 - DNA, 15 bp, Homo sapiens
gacatggccttctgg

SEQ ID NO: 831466 - DNA, 15 bp, Homo sapiens
tgacatggccttctg

SEQ ID NO: 831467 - DNA, 15 bp, Homo sapiens
atgacatggccttct

SEQ ID NO: 831468 - DNA, 15 bp, Homo sapiens
catgacatggccttc

SEQ ID NO: 831469 - DNA, 15 bp, Homo sapiens
ccatgacatggcctt

SEQ ID NO: 831470 - DNA, 15 bp, Homo sapiens
tccatgacatggcct

SEQ ID NO: 831471 - DNA, 15 bp, Homo sapiens
ctccatgacatggcc

SEQ ID NO: 831472 - DNA, 15 bp, Homo sapiens
cctccatgacatggc

SEQ ID NO: 831473 - DNA, 15 bp, Homo sapiens
gcctccatgacatgg

SEQ ID NO: 831474 - DNA, 15 bp, Homo sapiens
ggcctccatgacatg

SEQ ID NO: 831475 - DNA, 15 bp, Homo sapiens
aggcctccatgacat

SEQ ID NO: 831476 - DNA, 15 bp, Homo sapiens
aaggcctccatgaca

SEQ ID NO: 831477 - DNA, 15 bp, Homo sapiens
caaggcctccatgac

SEQ ID NO: 831478 - DNA, 15 bp, Homo sapiens
acaaggcctccatga

SEQ ID NO: 831479 - DNA, 15 bp, Homo sapiens
tacaaggcctccatg

SEQ ID NO: 831480 - DNA, 15 bp, Homo sapiens
atacaaggcctccat

SEQ ID NO: 831481 - DNA, 15 bp, Homo sapiens
tatacaaggcctcca

SEQ ID NO: 831482 - DNA, 15 bp, Homo sapiens
gtatacaaggcctcc

SEQ ID NO: 831483 - DNA, 15 bp, Homo sapiens
ggtatacaaggcctc

SEQ ID NO: 831484 - DNA, 15 bp, Homo sapiens
tggtatacaaggcct

SEQ ID NO: 831485 - DNA, 15 bp, Homo sapiens
ctggtatacaaggcc

SEQ ID NO: 831486 - DNA, 15 bp, Homo sapiens
actggtatacaaggc

SEQ ID NO: 831487 - DNA, 15 bp, Homo sapiens
gactggtatacaagg

SEQ ID NO: 831488 - DNA, 15 bp, Homo sapiens
agactggtatacaag

SEQ ID NO: 831489 - DNA, 15 bp, Homo sapiens
gagactggtatacaa

SEQ ID NO: 831490 - DNA, 15 bp, Homo sapiens
tgagactggtataca

SEQ ID NO: 831491 - DNA, 15 bp, Homo sapiens
ctgagactggtatac

SEQ ID NO: 831492 - DNA, 15 bp, Homo sapiens
cctgagactggtata

SEQ ID NO: 831493 - DNA, 15 bp, Homo sapiens
tcctgagactggtat

SEQ ID NO: 831494 - DNA, 15 bp, Homo sapiens
ttcctgagactggta

SEQ ID NO: 831495 - DNA, 15 bp, Homo sapiens
attcctgagactggt

SEQ ID NO: 831496 - DNA, 15 bp, Homo sapiens
aattcctgagactgg

SEQ ID NO: 831497 - DNA, 15 bp, Homo sapiens
aaattcctgagactg

SEQ ID NO: 831498 - DNA, 15 bp, Homo sapiens
caaattcctgagact

SEQ ID NO: 831499 - DNA, 15 bp, Homo sapiens
ccaaattcctgagac

SEQ ID NO: 831500 - DNA, 15 bp, Homo sapiens
accaaattcctgaga

SEQ ID NO: 831501 - DNA, 15 bp, Homo sapiens
aaccaaattcctgag

SEQ ID NO: 831502 - DNA, 15 bp, Homo sapiens
caaccaaattcctga

SEQ ID NO: 831503 - DNA, 15 bp, Homo sapiens
acaaccaaattcctg

SEQ ID NO: 831504 - DNA, 15 bp, Homo sapiens
cacaaccaaattcct

SEQ ID NO: 831505 - DNA, 15 bp, Homo sapiens
ccacaaccaaattcc

SEQ ID NO: 831506 - DNA, 15 bp, Homo sapiens
tccacaaccaaattc

SEQ ID NO: 831507 - DNA, 15 bp, Homo sapiens
ctccacaaccaaatt

SEQ ID NO: 831508 - DNA, 15 bp, Homo sapiens
tctccacaaccaaat

SEQ ID NO: 831509 - DNA, 15 bp, Homo sapiens
ctctccacaaccaaa

SEQ ID NO: 831510 - DNA, 15 bp, Homo sapiens
gctctccacaaccaa

SEQ ID NO: 831511 - DNA, 15 bp, Homo sapiens
agctctccacaacca

SEQ ID NO: 831512 - DNA, 15 bp, Homo sapiens
aagctctccacaacc

SEQ ID NO: 831513 - DNA, 15 bp, Homo sapiens
aaagctctccacaac

SEQ ID NO: 831514 - DNA, 15 bp, Homo sapiens
gaaagctctccacaa

SEQ ID NO: 831515 - DNA, 15 bp, Homo sapiens
tgaaagctctccaca

SEQ ID NO: 831516 - DNA, 15 bp, Homo sapiens
atgaaagctctccac

SEQ ID NO: 831517 - DNA, 15 bp, Homo sapiens
gatgaaagctctcca

SEQ ID NO: 831518 - DNA, 15 bp, Homo sapiens
tgatgaaagctctcc

SEQ ID NO: 831519 - DNA, 15 bp, Homo sapiens
ctgatgaaagctctc

SEQ ID NO: 831520 - DNA, 15 bp, Homo sapiens
cctgatgaaagctct

SEQ ID NO: 831521 - DNA, 15 bp, Homo sapiens
ccctgatgaaagctc

SEQ ID NO: 831522 - DNA, 15 bp, Homo sapiens
cccctgatgaaagct

SEQ ID NO: 831523 - DNA, 15 bp, Homo sapiens
tcccctgatgaaagc

SEQ ID NO: 831524 - DNA, 15 bp, Homo sapiens
ttcccctgatgaaag

SEQ ID NO: 831525 - DNA, 15 bp, Homo sapiens
attcccctgatgaaa

SEQ ID NO: 831526 - DNA, 15 bp, Homo sapiens
cattcccctgatgaa

SEQ ID NO: 831527 - DNA, 15 bp, Homo sapiens
tcattcccctgatga

SEQ ID NO: 831528 - DNA, 15 bp, Homo sapiens
atcattcccctgatg

SEQ ID NO: 831529 - DNA, 15 bp, Homo sapiens
catcattcccctgat

SEQ ID NO: 831530 - DNA, 15 bp, Homo sapiens
acatcattcccctga

SEQ ID NO: 831531 - DNA, 15 bp, Homo sapiens
tacatcattcccctg

SEQ ID NO: 831532 - DNA, 15 bp, Homo sapiens
ttacatcattcccct

SEQ ID NO: 831533 - DNA, 15 bp, Homo sapiens
attacatcattcccc

SEQ ID NO: 831534 - DNA, 15 bp, Homo sapiens
gattacatcattccc

SEQ ID NO: 831535 - DNA, 15 bp, Homo sapiens
tgattacatcattcc

SEQ ID NO: 831536 - DNA, 15 bp, Homo sapiens
ctgattacatcattc

SEQ ID NO: 831537 - DNA, 15 bp, Homo sapiens
gctgattacatcatt

SEQ ID NO: 831538 - DNA, 15 bp, Homo sapiens
agctgattacatcat

SEQ ID NO: 831539 - DNA, 15 bp, Homo sapiens
aagctgattacatca

SEQ ID NO: 831540 - DNA, 15 bp, Homo sapiens
caagctgattacatc

SEQ ID NO: 831541 - DNA, 15 bp, Homo sapiens
ccaagctgattacat

SEQ ID NO: 831542 - DNA, 15 bp, Homo sapiens
tccaagctgattaca

SEQ ID NO: 831543 - DNA, 15 bp, Homo sapiens
ttccaagctgattac

SEQ ID NO: 831544 - DNA, 15 bp, Homo sapiens
tttccaagctgatta

SEQ ID NO: 831545 - DNA, 15 bp, Homo sapiens
atttccaagctgatt

SEQ ID NO: 831546 - DNA, 15 bp, Homo sapiens
catttccaagctgat

SEQ ID NO: 831547 - DNA, 15 bp, Homo sapiens
acatttccaagctga

SEQ ID NO: 831548 - DNA, 15 bp, Homo sapiens
tacatttccaagctg

SEQ ID NO: 831549 - DNA, 15 bp, Homo sapiens
ctacatttccaagct

SEQ ID NO: 831550 - DNA, 15 bp, Homo sapiens
tctacatttccaagc

SEQ ID NO: 831551 - DNA, 15 bp, Homo sapiens
atctacatttccaag

SEQ ID NO: 831552 - DNA, 15 bp, Homo sapiens
tatctacatttccaa

SEQ ID NO: 831553 - DNA, 15 bp, Homo sapiens
atatctacatttcca

SEQ ID NO: 831554 - DNA, 15 bp, Homo sapiens
tatatctacatttcc

SEQ ID NO: 831555 - DNA, 15 bp, Homo sapiens
atatatctacatttc

SEQ ID NO: 831556 - DNA, 15 bp, Homo sapiens
gatatatctacattt

SEQ ID NO: 831557 - DNA, 15 bp, Homo sapiens
tgatatatctacatt

SEQ ID NO: 831558 - DNA, 15 bp, Homo sapiens
gtgatatatctacat

SEQ ID NO: 831559 - DNA, 15 bp, Homo sapiens
agtgatatatctaca

SEQ ID NO: 831560 - DNA, 15 bp, Homo sapiens
cagtgatatatctac

SEQ ID NO: 831561 - DNA, 15 bp, Homo sapiens
tcagtgatatatcta

SEQ ID NO: 831562 - DNA, 15 bp, Homo sapiens
gtcagtgatatatct

SEQ ID NO: 831563 - DNA, 15 bp, Homo sapiens
agtcagtgatatatc

SEQ ID NO: 831564 - DNA, 15 bp, Homo sapiens
cagtcagtgatatat

SEQ ID NO: 831565 - DNA, 15 bp, Homo sapiens
acagtcagtgatata

SEQ ID NO: 831566 - DNA, 15 bp, Homo sapiens
cacagtcagtgatat

SEQ ID NO: 831567 - DNA, 15 bp, Homo sapiens
tcacagtcagtgata

SEQ ID NO: 831568 - DNA, 15 bp, Homo sapiens
atcacagtcagtgat

SEQ ID NO: 831569 - DNA, 15 bp, Homo sapiens
tatcacagtcagtga

SEQ ID NO: 831570 - DNA, 15 bp, Homo sapiens
ctatcacagtcagtg

SEQ ID NO: 831571 - DNA, 15 bp, Homo sapiens
actatcacagtcagt

SEQ ID NO: 831572 - DNA, 15 bp, Homo sapiens
cactatcacagtcag

SEQ ID NO: 831573 - DNA, 15 bp, Homo sapiens
tcactatcacagtca

SEQ ID NO: 831574 - DNA, 15 bp, Homo sapiens
ctcactatcacagtc

SEQ ID NO: 831575 - DNA, 15 bp, Homo sapiens
cctcactatcacagt

SEQ ID NO: 831576 - DNA, 15 bp, Homo sapiens
tcctcactatcacag

SEQ ID NO: 831577 - DNA, 15 bp, Homo sapiens
ctcctcactatcaca

SEQ ID NO: 831578 - DNA, 15 bp, Homo sapiens
gctcctcactatcac

SEQ ID NO: 831579 - DNA, 15 bp, Homo sapiens
tgctcctcactatca

SEQ ID NO: 831580 - DNA, 15 bp, Homo sapiens
ctgctcctcactatc

SEQ ID NO: 831581 - DNA, 15 bp, Homo sapiens
tctgctcctcactat

SEQ ID NO: 831582 - DNA, 15 bp, Homo sapiens
ttctgctcctcacta

SEQ ID NO: 831583 - DNA, 15 bp, Homo sapiens
attctgctcctcact

SEQ ID NO: 831584 - DNA, 15 bp, Homo sapiens
aattctgctcctcac

SEQ ID NO: 831585 - DNA, 15 bp, Homo sapiens
taattctgctcctca

SEQ ID NO: 831586 - DNA, 15 bp, Homo sapiens
ttaattctgctcctc

SEQ ID NO: 831587 - DNA, 15 bp, Homo sapiens
cttaattctgctcct

SEQ ID NO: 831588 - DNA, 15 bp, Homo sapiens
ccttaattctgctcc

SEQ ID NO: 831589 - DNA, 15 bp, Homo sapiens
accttaattctgctc

SEQ ID NO: 831590 - DNA, 15 bp, Homo sapiens
caccttaattctgct

SEQ ID NO: 831591 - DNA, 15 bp, Homo sapiens
ccaccttaattctgc

SEQ ID NO: 831592 - DNA, 15 bp, Homo sapiens
tccaccttaattctg

SEQ ID NO: 831593 - DNA, 15 bp, Homo sapiens
gtccaccttaattct

SEQ ID NO: 831594 - DNA, 15 bp, Homo sapiens
cgtccaccttaattc

SEQ ID NO: 831595 - DNA, 15 bp, Homo sapiens
acgtccaccttaatt

SEQ ID NO: 831596 - DNA, 15 bp, Homo sapiens
cacgtccaccttaat

SEQ ID NO: 831597 - DNA, 15 bp, Homo sapiens
tcacgtccaccttaa

SEQ ID NO: 831598 - DNA, 15 bp, Homo sapiens
atcacgtccacctta

SEQ ID NO: 831599 - DNA, 15 bp, Homo sapiens
aatcacgtccacctt

SEQ ID NO: 831600 - DNA, 15 bp, Homo sapiens
taatcacgtccacct

SEQ ID NO: 831601 - DNA, 15 bp, Homo sapiens
ctaatcacgtccacc

SEQ ID NO: 831602 - DNA, 15 bp, Homo sapiens
tctaatcacgtccac

SEQ ID NO: 831603 - DNA, 15 bp, Homo sapiens
ttctaatcacgtcca

SEQ ID NO: 831604 - DNA, 15 bp, Homo sapiens
cttctaatcacgtcc

SEQ ID NO: 831605 - DNA, 15 bp, Homo sapiens
gcttctaatcacgtc

SEQ ID NO: 831606 - DNA, 15 bp, Homo sapiens
agcttctaatcacgt

SEQ ID NO: 831607 - DNA, 15 bp, Homo sapiens
aagcttctaatcacg

SEQ ID NO: 831608 - DNA, 15 bp, Homo sapiens
aaagcttctaatcac

SEQ ID NO: 831609 - DNA, 15 bp, Homo sapiens
caaagcttctaatca

SEQ ID NO: 831610 - DNA, 15 bp, Homo sapiens
acaaagcttctaatc

SEQ ID NO: 831611 - DNA, 15 bp, Homo sapiens
cacaaagcttctaat

SEQ ID NO: 831612 - DNA, 15 bp, Homo sapiens
tcacaaagcttctaa

SEQ ID NO: 831613 - DNA, 15 bp, Homo sapiens
ttcacaaagcttcta

SEQ ID NO: 831614 - DNA, 15 bp, Homo sapiens
attcacaaagcttct

SEQ ID NO: 831615 - DNA, 15 bp, Homo sapiens
tattcacaaagcttc

SEQ ID NO: 831616 - DNA, 15 bp, Homo sapiens
ctattcacaaagctt

SEQ ID NO: 831617 - DNA, 15 bp, Homo sapiens
gctattcacaaagct

SEQ ID NO: 831618 - DNA, 15 bp, Homo sapiens
tgctattcacaaagc

SEQ ID NO: 831619 - DNA, 15 bp, Homo sapiens
ctgctattcacaaag

SEQ ID NO: 831620 - DNA, 15 bp, Homo sapiens
tctgctattcacaaa

SEQ ID NO: 831621 - DNA, 15 bp, Homo sapiens
ttctgctattcacaa

SEQ ID NO: 831622 - DNA, 15 bp, Homo sapiens
tttctgctattcaca

SEQ ID NO: 831623 - DNA, 15 bp, Homo sapiens
ctttctgctattcac

SEQ ID NO: 831624 - DNA, 15 bp, Homo sapiens
tctttctgctattca

SEQ ID NO: 831625 - DNA, 15 bp, Homo sapiens
ttctttctgctattc

SEQ ID NO: 831626 - DNA, 15 bp, Homo sapiens
gttctttctgctatt

SEQ ID NO: 831627 - DNA, 15 bp, Homo sapiens
tgttctttctgctat

SEQ ID NO: 831628 - DNA, 15 bp, Homo sapiens
atgttctttctgcta

SEQ ID NO: 831629 - DNA, 15 bp, Homo sapiens
tatgttctttctgct

SEQ ID NO: 831630 - DNA, 15 bp, Homo sapiens
ctatgttctttctgc

SEQ ID NO: 831631 - DNA, 15 bp, Homo sapiens
tctatgttctttctg

SEQ ID NO: 831632 - DNA, 15 bp, Homo sapiens
atctatgttctttct

SEQ ID NO: 831633 - DNA, 15 bp, Homo sapiens
aatctatgttctttc

SEQ ID NO: 831634 - DNA, 15 bp, Homo sapiens
aaatctatgttcttt

SEQ ID NO: 831635 - DNA, 15 bp, Homo sapiens
aaaatctatgttctt

SEQ ID NO: 831636 - DNA, 15 bp, Homo sapiens
caaaatctatgttct

SEQ ID NO: 831637 - DNA, 15 bp, Homo sapiens
tcaaaatctatgttc

SEQ ID NO: 831638 - DNA, 15 bp, Homo sapiens
ttcaaaatctatgtt

SEQ ID NO: 831639 - DNA, 15 bp, Homo sapiens
tttcaaaatctatgt

SEQ ID NO: 831640 - DNA, 15 bp, Homo sapiens
ctttcaaaatctatg

SEQ ID NO: 831641 - DNA, 15 bp, Homo sapiens
gctttcaaaatctat

SEQ ID NO: 831642 - DNA, 15 bp, Homo sapiens
agctttcaaaatcta

SEQ ID NO: 831643 - DNA, 15 bp, Homo sapiens
cagctttcaaaatct

SEQ ID NO: 831644 - DNA, 15 bp, Homo sapiens
ccagctttcaaaatc

SEQ ID NO: 831645 - DNA, 15 bp, Homo sapiens
gccagctttcaaaat

SEQ ID NO: 831646 - DNA, 15 bp, Homo sapiens
tgccagctttcaaaa

SEQ ID NO: 831647 - DNA, 15 bp, Homo sapiens
ctgccagctttcaaa

SEQ ID NO: 831648 - DNA, 15 bp, Homo sapiens
tctgccagctttcaa

SEQ ID NO: 831649 - DNA, 15 bp, Homo sapiens
gtctgccagctttca

SEQ ID NO: 831650 - DNA, 15 bp, Homo sapiens
cgtctgccagctttc

SEQ ID NO: 831651 - DNA, 15 bp, Homo sapiens
acgtctgccagcttt

SEQ ID NO: 831652 - DNA, 15 bp, Homo sapiens
tacgtctgccagctt

SEQ ID NO: 831653 - DNA, 15 bp, Homo sapiens
ctacgtctgccagct

SEQ ID NO: 831654 - DNA, 15 bp, Homo sapiens
cctacgtctgccagc

SEQ ID NO: 831655 - DNA, 15 bp, Homo sapiens
acctacgtctgccag

SEQ ID NO: 831656 - DNA, 15 bp, Homo sapiens
aacctacgtctgcca

SEQ ID NO: 831657 - DNA, 15 bp, Homo sapiens
taacctacgtctgcc

SEQ ID NO: 831658 - DNA, 15 bp, Homo sapiens
gtaacctacgtctgc

SEQ ID NO: 831659 - DNA, 15 bp, Homo sapiens
agtaacctacgtctg

SEQ ID NO: 831660 - DNA, 15 bp, Homo sapiens
cagtaacctacgtct

SEQ ID NO: 831661 - DNA, 15 bp, Homo sapiens
tcagtaacctacgtc

SEQ ID NO: 831662 - DNA, 15 bp, Homo sapiens
ttcagtaacctacgt

SEQ ID NO: 831663 - DNA, 15 bp, Homo sapiens
cttcagtaacctacg

SEQ ID NO: 831664 - DNA, 15 bp, Homo sapiens
tcttcagtaacctac

SEQ ID NO: 831665 - DNA, 15 bp, Homo sapiens
ttcttcagtaaccta

SEQ ID NO: 831666 - DNA, 15 bp, Homo sapiens
tttcttcagtaacct

SEQ ID NO: 831667 - DNA, 15 bp, Homo sapiens
ctttcttcagtaacc

SEQ ID NO: 831668 - DNA, 15 bp, Homo sapiens
actttcttcagtaac

SEQ ID NO: 831669 - DNA, 15 bp, Homo sapiens
aactttcttcagtaa

SEQ ID NO: 831670 - DNA, 15 bp, Homo sapiens
taactttcttcagta

SEQ ID NO: 831671 - DNA, 15 bp, Homo sapiens
gtaactttcttcagt

SEQ ID NO: 831672 - DNA, 15 bp, Homo sapiens
agtaactttcttcag

SEQ ID NO: 831673 - DNA, 15 bp, Homo sapiens
aagtaactttcttca

SEQ ID NO: 831674 - DNA, 15 bp, Homo sapiens
taagtaactttcttc

SEQ ID NO: 831675 - DNA, 15 bp, Homo sapiens
ttaagtaactttctt

SEQ ID NO: 831676 - DNA, 15 bp, Homo sapiens
gttaagtaactttct

SEQ ID NO: 831677 - DNA, 15 bp, Homo sapiens
ggttaagtaactttc

SEQ ID NO: 831678 - DNA, 15 bp, Homo sapiens
aggttaagtaacttt

SEQ ID NO: 831679 - DNA, 15 bp, Homo sapiens
caaggttaagtaact

SEQ ID NO: 831680 - DNA, 15 bp, Homo sapiens
gcaaggttaagtaac

SEQ ID NO: 831681 - DNA, 15 bp, Homo sapiens
agcaaggttaagtaa

SEQ ID NO: 831682 - DNA, 15 bp, Homo sapiens
tagcaaggttaagta

SEQ ID NO: 831683 - DNA, 15 bp, Homo sapiens
atagcaaggttaagt

SEQ ID NO: 831684 - DNA, 15 bp, Homo sapiens
catagcaaggttaag

SEQ ID NO: 831685 - DNA, 15 bp, Homo sapiens
acatagcaaggttaa

SEQ ID NO: 831686 - DNA, 15 bp, Homo sapiens
gacatagcaaggtta

SEQ ID NO: 831687 - DNA, 15 bp, Homo sapiens
agacatagcaaggtt

SEQ ID NO: 831688 - DNA, 15 bp, Homo sapiens
aagacatagcaaggt

SEQ ID NO: 831689 - DNA, 15 bp, Homo sapiens
aaagacatagcaagg

SEQ ID NO: 831690 - DNA, 15 bp, Homo sapiens
taaagacatagcaag

SEQ ID NO: 831691 - DNA, 15 bp, Homo sapiens
ctaaagacatagcaa

SEQ ID NO: 831692 - DNA, 15 bp, Homo sapiens
actaaagacatagca

SEQ ID NO: 831693 - DNA, 15 bp, Homo sapiens
aactaaagacatagc

SEQ ID NO: 831694 - DNA, 15 bp, Homo sapiens
aaactaaagacatag

SEQ ID NO: 831695 - DNA, 15 bp, Homo sapiens
aaaactaaagacata

SEQ ID NO: 831696 - DNA, 15 bp, Homo sapiens
taaaactaaagacat

SEQ ID NO: 831697 - DNA, 15 bp, Homo sapiens
ataaaactaaagaca

SEQ ID NO: 831698 - DNA, 15 bp, Homo sapiens
gataaaactaaagac

SEQ ID NO: 831699 - DNA, 15 bp, Homo sapiens
ggataaaactaaaga

SEQ ID NO: 831700 - DNA, 15 bp, Homo sapiens
aggataaaactaaag

SEQ ID NO: 831701 - DNA, 15 bp, Homo sapiens
gaggataaaactaaa

SEQ ID NO: 831702 - DNA, 15 bp, Homo sapiens
agaggataaaactaa

SEQ ID NO: 831703 - DNA, 15 bp, Homo sapiens
cagaggataaaacta

SEQ ID NO: 831704 - DNA, 15 bp, Homo sapiens
gcagaggataaaact

SEQ ID NO: 831705 - DNA, 15 bp, Homo sapiens
tgcagaggataaaac

SEQ ID NO: 831706 - DNA, 15 bp, Homo sapiens
ttgcagaggataaaa

SEQ ID NO: 831707 - DNA, 15 bp, Homo sapiens
attgcagaggataaa

SEQ ID NO: 831708 - DNA, 15 bp, Homo sapiens
tattgcagaggataa

SEQ ID NO: 831709 - DNA, 15 bp, Homo sapiens
atattgcagaggata

SEQ ID NO: 831710 - DNA, 15 bp, Homo sapiens
catattgcagaggat

SEQ ID NO: 831711 - DNA, 15 bp, Homo sapiens
ccatattgcagagga

SEQ ID NO: 831712 - DNA, 15 bp, Homo sapiens
cccatattgcagagg

SEQ ID NO: 831713 - DNA, 15 bp, Homo sapiens
ccccatattgcagag

SEQ ID NO: 831714 - DNA, 15 bp, Homo sapiens
tccccatattgcaga

SEQ ID NO: 831715 - DNA, 15 bp, Homo sapiens
atccccatattgcag

SEQ ID NO: 831716 - DNA, 15 bp, Homo sapiens
tatccccatattgca

SEQ ID NO: 831717 - DNA, 15 bp, Homo sapiens
ttatccccatattgc

SEQ ID NO: 831718 - DNA, 15 bp, Homo sapiens
attatccccatattg

SEQ ID NO: 831719 - DNA, 15 bp, Homo sapiens
tattatccccatatt

SEQ ID NO: 831720 - DNA, 15 bp, Homo sapiens
gtattatccccatat

SEQ ID NO: 831721 - DNA, 15 bp, Homo sapiens
agtattatccccata

SEQ ID NO: 831722 - DNA, 15 bp, Homo sapiens
cagtattatccccat

SEQ ID NO: 831723 - DNA, 15 bp, Homo sapiens
gcagtattatcccca

SEQ ID NO: 831724 - DNA, 15 bp, Homo sapiens
ggcagtattatcccc

SEQ ID NO: 831725 - DNA, 15 bp, Homo sapiens
aggcagtattatccc

SEQ ID NO: 831726 - DNA, 15 bp, Homo sapiens
taggcagtattatcc

SEQ ID NO: 831727 - DNA, 15 bp, Homo sapiens
ataggcagtattatc

SEQ ID NO: 831728 - DNA, 15 bp, Homo sapiens
aataggcagtattat

SEQ ID NO: 831729 - DNA, 15 bp, Homo sapiens
aaataggcagtatta

SEQ ID NO: 831730 - DNA, 15 bp, Homo sapiens
aaaataggcagtatt

SEQ ID NO: 831731 - DNA, 15 bp, Homo sapiens
caaaataggcagtat

SEQ ID NO: 831732 - DNA, 15 bp, Homo sapiens
acaaaataggcagta

SEQ ID NO: 831733 - DNA, 15 bp, Homo sapiens
tacaaaataggcagt

SEQ ID NO: 831734 - DNA, 15 bp, Homo sapiens
ctacaaaataggcag

SEQ ID NO: 831735 - DNA, 15 bp, Homo sapiens
tctacaaaataggca

SEQ ID NO: 831736 - DNA, 15 bp, Homo sapiens
ctctacaaaataggc

SEQ ID NO: 831737 - DNA, 15 bp, Homo sapiens
actctacaaaatagg

SEQ ID NO: 831738 - DNA, 15 bp, Homo sapiens
gactctacaaaatag

SEQ ID NO: 831739 - DNA, 15 bp, Homo sapiens
agactctacaaaata

SEQ ID NO: 831740 - DNA, 15 bp, Homo sapiens
aagactctacaaaat

SEQ ID NO: 831741 - DNA, 15 bp, Homo sapiens
caagactctacaaaa

SEQ ID NO: 831742 - DNA, 15 bp, Homo sapiens
acaagactctacaaa

SEQ ID NO: 831743 - DNA, 15 bp, Homo sapiens
cacaagactctacaa

SEQ ID NO: 831744 - DNA, 15 bp, Homo sapiens
ccacaagactctaca

SEQ ID NO: 831745 - DNA, 15 bp, Homo sapiens
tccacaagactctac

SEQ ID NO: 831746 - DNA, 15 bp, Homo sapiens
atccacaagactcta

SEQ ID NO: 831747 - DNA, 15 bp, Homo sapiens
aatccacaagactct

SEQ ID NO: 831748 - DNA, 15 bp, Homo sapiens
gaatccacaagactc

SEQ ID NO: 831749 - DNA, 15 bp, Homo sapiens
agaatccacaagact

SEQ ID NO: 831750 - DNA, 15 bp, Homo sapiens
aagaatccacaagac

SEQ ID NO: 831751 - DNA, 15 bp, Homo sapiens
gaagaatccacaaga

SEQ ID NO: 831752 - DNA, 15 bp, Homo sapiens
agaagaatccacaag

SEQ ID NO: 831753 - DNA, 15 bp, Homo sapiens
cagaagaatccacaa

SEQ ID NO: 831754 - DNA, 15 bp, Homo sapiens
ccagaagaatccaca

SEQ ID NO: 831755 - DNA, 15 bp, Homo sapiens
gccagaagaatccac

SEQ ID NO: 831756 - DNA, 15 bp, Homo sapiens
tgccagaagaatcca

SEQ ID NO: 831757 - DNA, 15 bp, Homo sapiens
atgccagaagaatcc

SEQ ID NO: 831758 - DNA, 15 bp, Homo sapiens
tatgccagaagaatc

SEQ ID NO: 831759 - DNA, 15 bp, Homo sapiens
atatgccagaagaat

SEQ ID NO: 831760 - DNA, 15 bp, Homo sapiens
tatatgccagaagaa

SEQ ID NO: 831761 - DNA, 15 bp, Homo sapiens
atatatgccagaaga

SEQ ID NO: 831762 - DNA, 15 bp, Homo sapiens
tatatatgccagaag

SEQ ID NO: 831763 - DNA, 15 bp, Homo sapiens
ttatatatgccagaa

SEQ ID NO: 831764 - DNA, 15 bp, Homo sapiens
attatatatgccaga

SEQ ID NO: 831765 - DNA, 15 bp, Homo sapiens
tattatatatgccag

SEQ ID NO: 831766 - DNA, 15 bp, Homo sapiens
ctattatatatgcca

SEQ ID NO: 831767 - DNA, 15 bp, Homo sapiens
tctattatatatgcc

SEQ ID NO: 831768 - DNA, 15 bp, Homo sapiens
ttctattatatatgc

SEQ ID NO: 831769 - DNA, 15 bp, Homo sapiens
tttctattatatatg

SEQ ID NO: 831770 - DNA, 15 bp, Homo sapiens
ttttctattatatat

SEQ ID NO: 831771 - DNA, 15 bp, Homo sapiens
attttctattatata

SEQ ID NO: 831772 - DNA, 15 bp, Homo sapiens
tattttctattatat

SEQ ID NO: 831773 - DNA, 15 bp, Homo sapiens
ttattttctattata

SEQ ID NO: 831774 - DNA, 15 bp, Homo sapiens
tttattttctattat

SEQ ID NO: 831775 - DNA, 15 bp, Homo sapiens
ttttattttctatta

SEQ ID NO: 831776 - DNA, 15 bp, Homo sapiens
gttttattttctatt

SEQ ID NO: 831777 - DNA, 15 bp, Homo sapiens
tgttttattttctat

SEQ ID NO: 831778 - DNA, 15 bp, Homo sapiens
ctgttttattttcta

SEQ ID NO: 831779 - DNA, 15 bp, Homo sapiens
gctgttttattttct

SEQ ID NO: 831780 - DNA, 15 bp, Homo sapiens
agctgttttattttc

SEQ ID NO: 831781 - DNA, 15 bp, Homo sapiens
tagctgttttatttt

SEQ ID NO: 831782 - DNA, 15 bp, Homo sapiens
atagctgttttattt

SEQ ID NO: 831783 - DNA, 15 bp, Homo sapiens
aatagctgttttatt

SEQ ID NO: 831784 - DNA, 15 bp, Homo sapiens
taatagctgttttat

SEQ ID NO: 831785 - DNA, 15 bp, Homo sapiens
ataatagctgtttta

SEQ ID NO: 831786 - DNA, 15 bp, Homo sapiens
aataatagctgtttt

SEQ ID NO: 831787 - DNA, 15 bp, Homo sapiens
taataatagctgttt

SEQ ID NO: 831788 - DNA, 15 bp, Homo sapiens
ataataatagctgtt

SEQ ID NO: 831789 - DNA, 15 bp, Homo sapiens
aataataatagctgt

SEQ ID NO: 831790 - DNA, 15 bp, Homo sapiens
taataataatagctg

SEQ ID NO: 831791 - DNA, 15 bp, Homo sapiens
ataataataatagct

SEQ ID NO: 831792 - DNA, 15 bp, Homo sapiens
aataataataatagc

SEQ ID NO: 831793 - DNA, 15 bp, Homo sapiens
caataataataatag

SEQ ID NO: 831794 - DNA, 15 bp, Homo sapiens
acaataataataata

SEQ ID NO: 831795 - DNA, 15 bp, Homo sapiens
aacaataataataat

SEQ ID NO: 831796 - DNA, 15 bp, Homo sapiens
caacaataataataa

SEQ ID NO: 831797 - DNA, 15 bp, Homo sapiens
tcaacaataataata

SEQ ID NO: 831798 - DNA, 15 bp, Homo sapiens
atcaacaataataat

SEQ ID NO: 831799 - DNA, 15 bp, Homo sapiens
catcaacaataataa

SEQ ID NO: 831800 - DNA, 15 bp, Homo sapiens
ccatcaacaataata

SEQ ID NO: 831801 - DNA, 15 bp, Homo sapiens
accatcaacaataat

SEQ ID NO: 831802 - DNA, 15 bp, Homo sapiens
taccatcaacaataa

SEQ ID NO: 831803 - DNA, 15 bp, Homo sapiens
gtaccatcaacaata

SEQ ID NO: 831804 - DNA, 15 bp, Homo sapiens
agtaccatcaacaat

SEQ ID NO: 831805 - DNA, 15 bp, Homo sapiens
tagtaccatcaacaa

SEQ ID NO: 831806 - DNA, 15 bp, Homo sapiens
atagtaccatcaaca

SEQ ID NO: 831807 - DNA, 15 bp, Homo sapiens
aatagtaccatcaac

SEQ ID NO: 831808 - DNA, 15 bp, Homo sapiens
aaatagtaccatcaa

SEQ ID NO: 831809 - DNA, 15 bp, Homo sapiens
caaatagtaccatca

SEQ ID NO: 831810 - DNA, 15 bp, Homo sapiens
gcaaatagtaccatc

SEQ ID NO: 831811 - DNA, 15 bp, Homo sapiens
agcaaatagtaccat

SEQ ID NO: 831812 - DNA, 15 bp, Homo sapiens
tagcaaatagtacca

SEQ ID NO: 831813 - DNA, 15 bp, Homo sapiens
atagcaaatagtacc

SEQ ID NO: 831814 - DNA, 15 bp, Homo sapiens
tatagcaaatagtac

SEQ ID NO: 831815 - DNA, 15 bp, Homo sapiens
atatagcaaatagta

SEQ ID NO: 831816 - DNA, 15 bp, Homo sapiens
gatatagcaaatagt

SEQ ID NO: 831817 - DNA, 15 bp, Homo sapiens
agatatagcaaatag

SEQ ID NO: 831818 - DNA, 15 bp, Homo sapiens
cagatatagcaaata

SEQ ID NO: 831819 - DNA, 15 bp, Homo sapiens
tcagatatagcaaat

SEQ ID NO: 831820 - DNA, 15 bp, Homo sapiens
gtcagatatagcaaa

SEQ ID NO: 831821 - DNA, 15 bp, Homo sapiens
agtcagatatagcaa

SEQ ID NO: 831822 - DNA, 15 bp, Homo sapiens
tagtcagatatagca

SEQ ID NO: 831823 - DNA, 15 bp, Homo sapiens
gtagtcagatatagc

SEQ ID NO: 831824 - DNA, 15 bp, Homo sapiens
tgtagtcagatatag

SEQ ID NO: 831825 - DNA, 15 bp, Homo sapiens
ttgtagtcagatata

SEQ ID NO: 831826 - DNA, 15 bp, Homo sapiens
cttgtagtcagatat

SEQ ID NO: 831827 - DNA, 15 bp, Homo sapiens
ccttgtagtcagata

SEQ ID NO: 831828 - DNA, 15 bp, Homo sapiens
tccttgtagtcagat

SEQ ID NO: 831829 - DNA, 15 bp, Homo sapiens
ctccttgtagtcaga

SEQ ID NO: 831830 - DNA, 15 bp, Homo sapiens
tctccttgtagtcag

SEQ ID NO: 831831 - DNA, 15 bp, Homo sapiens
ttctccttgtagtca

SEQ ID NO: 831832 - DNA, 15 bp, Homo sapiens
tttctccttgtagtc

SEQ ID NO: 831833 - DNA, 15 bp, Homo sapiens
ctttctccttgtagt

SEQ ID NO: 831834 - DNA, 15 bp, Homo sapiens
tctttctccttgtag

SEQ ID NO: 831835 - DNA, 15 bp, Homo sapiens
gtctttctccttgta

SEQ ID NO: 831836 - DNA, 15 bp, Homo sapiens
agtctttctccttgt

SEQ ID NO: 831837 - DNA, 15 bp, Homo sapiens
tagtctttctccttg

SEQ ID NO: 831838 - DNA, 15 bp, Homo sapiens
ttagtctttctcctt

SEQ ID NO: 831839 - DNA, 15 bp, Homo sapiens
attagtctttctcct

SEQ ID NO: 831840 - DNA, 15 bp, Homo sapiens
tattagtctttctcc

SEQ ID NO: 831841 - DNA, 15 bp, Homo sapiens
ctattagtctttctc

SEQ ID NO: 831842 - DNA, 15 bp, Homo sapiens
cctattagtctttct

SEQ ID NO: 831843 - DNA, 15 bp, Homo sapiens
tcctattagtctttc

SEQ ID NO: 831844 - DNA, 15 bp, Homo sapiens
ttcctattagtcttt

SEQ ID NO: 831845 - DNA, 15 bp, Homo sapiens
tttcctattagtctt

SEQ ID NO: 831846 - DNA, 15 bp, Homo sapiens
gtttcctattagtct

SEQ ID NO: 831847 - DNA, 15 bp, Homo sapiens
ggtttcctattagtc

SEQ ID NO: 831848 - DNA, 15 bp, Homo sapiens
tggtttcctattagt

SEQ ID NO: 831849 - DNA, 15 bp, Homo sapiens
atggtttcctattag

SEQ ID NO: 831850 - DNA, 15 bp, Homo sapiens
aatggtttcctatta

SEQ ID NO: 831851 - DNA, 15 bp, Homo sapiens
aaatggtttcctatt

SEQ ID NO: 831852 - DNA, 15 bp, Homo sapiens
gaaatggtttcctat

SEQ ID NO: 831853 - DNA, 15 bp, Homo sapiens
tgaaatggtttccta

SEQ ID NO: 831854 - DNA, 15 bp, Homo sapiens
ctgaaatggtttcct

SEQ ID NO: 831855 - DNA, 15 bp, Homo sapiens
cctgaaatggtttcc

SEQ ID NO: 831856 - DNA, 15 bp, Homo sapiens
tcctgaaatggtttc

SEQ ID NO: 831857 - DNA, 15 bp, Homo sapiens
ttcctgaaatggttt

SEQ ID NO: 831858 - DNA, 15 bp, Homo sapiens
attcctgaaatggtt

SEQ ID NO: 831859 - DNA, 15 bp, Homo sapiens
gattcctgaaatggt

SEQ ID NO: 831860 - DNA, 15 bp, Homo sapiens
ggattcctgaaatgg

SEQ ID NO: 831861 - DNA, 15 bp, Homo sapiens
tggattcctgaaatg

SEQ ID NO: 831862 - DNA, 15 bp, Homo sapiens
ctggattcctgaaat

SEQ ID NO: 831863 - DNA, 15 bp, Homo sapiens
tctggattcctgaaa

SEQ ID NO: 831864 - DNA, 15 bp, Homo sapiens
atctggattcctgaa

SEQ ID NO: 831865 - DNA, 15 bp, Homo sapiens
tatctggattcctga

SEQ ID NO: 831866 - DNA, 15 bp, Homo sapiens
atatctggattcctg

SEQ ID NO: 831867 - DNA, 15 bp, Homo sapiens
catatctggattcct

SEQ ID NO: 831868 - DNA, 15 bp, Homo sapiens
ccatatctggattcc

SEQ ID NO: 831869 - DNA, 15 bp, Homo sapiens
accatatctggattc

SEQ ID NO: 831870 - DNA, 15 bp, Homo sapiens
gaccatatctggatt

SEQ ID NO: 831871 - DNA, 15 bp, Homo sapiens
tgaccatatctggat

SEQ ID NO: 831872 - DNA, 15 bp, Homo sapiens
atgaccatatctgga

SEQ ID NO: 831873 - DNA, 15 bp, Homo sapiens
catgaccatatctgg

SEQ ID NO: 831874 - DNA, 15 bp, Homo sapiens
tcatgaccatatctg

SEQ ID NO: 831875 - DNA, 15 bp, Homo sapiens
atcatgaccatatct

SEQ ID NO: 831876 - DNA, 15 bp, Homo sapiens
catcatgaccatatc

SEQ ID NO: 831877 - DNA, 15 bp, Homo sapiens
ccatcatgaccatat

SEQ ID NO: 831878 - DNA, 15 bp, Homo sapiens
tccatcatgaccata

SEQ ID NO: 831879 - DNA, 15 bp, Homo sapiens
gtccatcatgaccat

SEQ ID NO: 831880 - DNA, 15 bp, Homo sapiens
tgtccatcatgacca

SEQ ID NO: 831881 - DNA, 15 bp, Homo sapiens
ctgtccatcatgacc

SEQ ID NO: 831882 - DNA, 15 bp, Homo sapiens
cctgtccatcatgac

SEQ ID NO: 831883 - DNA, 15 bp, Homo sapiens
tcctgtccatcatga

SEQ ID NO: 831884 - DNA, 15 bp, Homo sapiens
ttcctgtccatcatg

SEQ ID NO: 831885 - DNA, 15 bp, Homo sapiens
cttcctgtccatcat

SEQ ID NO: 831886 - DNA, 15 bp, Homo sapiens
tcttcctgtccatca

SEQ ID NO: 831887 - DNA, 15 bp, Homo sapiens
ctcttcctgtccatc

SEQ ID NO: 831888 - DNA, 15 bp, Homo sapiens
tctcttcctgtccat

SEQ ID NO: 831889 - DNA, 15 bp, Homo sapiens
gtctcttcctgtcca

SEQ ID NO: 831890 - DNA, 15 bp, Homo sapiens
tgtctcttcctgtcc

SEQ ID NO: 831891 - DNA, 15 bp, Homo sapiens
ttgtctcttcctgtc

SEQ ID NO: 831892 - DNA, 15 bp, Homo sapiens
cttgtctcttcctgt

SEQ ID NO: 831893 - DNA, 15 bp, Homo sapiens
tcttgtctcttcctg

SEQ ID NO: 831894 - DNA, 15 bp, Homo sapiens
ctcttgtctcttcct

SEQ ID NO: 831895 - DNA, 15 bp, Homo sapiens
actcttgtctcttcc

SEQ ID NO: 831896 - DNA, 15 bp, Homo sapiens
aactcttgtctcttc

SEQ ID NO: 831897 - DNA, 15 bp, Homo sapiens
taactcttgtctctt

SEQ ID NO: 831898 - DNA, 15 bp, Homo sapiens
gtaactcttgtctct

SEQ ID NO: 831899 - DNA, 15 bp, Homo sapiens
tgtaactcttgtctc

SEQ ID NO: 831900 - DNA, 15 bp, Homo sapiens
atgtaactcttgtct

SEQ ID NO: 831901 - DNA, 15 bp, Homo sapiens
tatgtaactcttgtc

SEQ ID NO: 831902 - DNA, 15 bp, Homo sapiens
ctatgtaactcttgt

SEQ ID NO: 831903 - DNA, 15 bp, Homo sapiens
tctatgtaactcttg

SEQ ID NO: 831904 - DNA, 15 bp, Homo sapiens
ctctatgtaactctt

SEQ ID NO: 831905 - DNA, 15 bp, Homo sapiens
cctctatgtaactct

SEQ ID NO: 831906 - DNA, 15 bp, Homo sapiens
tcctctatgtaactc

SEQ ID NO: 831907 - DNA, 15 bp, Homo sapiens
ttcctctatgtaact

SEQ ID NO: 831908 - DNA, 15 bp, Homo sapiens
attcctctatgtaac

SEQ ID NO: 831909 - DNA, 15 bp, Homo sapiens
aattcctctatgtaa

SEQ ID NO: 831910 - DNA, 15 bp, Homo sapiens
gaattcctctatgta

SEQ ID NO: 831911 - DNA, 15 bp, Homo sapiens
agaattcctctatgt

SEQ ID NO: 831912 - DNA, 15 bp, Homo sapiens
cagaattcctctatg

SEQ ID NO: 831913 - DNA, 15 bp, Homo sapiens
ccagaattcctctat

SEQ ID NO: 831914 - DNA, 15 bp, Homo sapiens
cccagaattcctcta

SEQ ID NO: 831915 - DNA, 15 bp, Homo sapiens
tcccagaattcctct

SEQ ID NO: 831916 - DNA, 15 bp, Homo sapiens
ttcccagaattcctc

SEQ ID NO: 831917 - DNA, 15 bp, Homo sapiens
cttcccagaattcct

SEQ ID NO: 831918 - DNA, 15 bp, Homo sapiens
tcttcccagaattcc

SEQ ID NO: 831919 - DNA, 15 bp, Homo sapiens
atcttcccagaattc

SEQ ID NO: 831920 - DNA, 15 bp, Homo sapiens
tatcttcccagaatt

SEQ ID NO: 831921 - DNA, 15 bp, Homo sapiens
ttatcttcccagaat

SEQ ID NO: 831922 - DNA, 15 bp, Homo sapiens
cttatcttcccagaa

SEQ ID NO: 831923 - DNA, 15 bp, Homo sapiens
tcttatcttcccaga

SEQ ID NO: 831924 - DNA, 15 bp, Homo sapiens
ttcttatcttcccag

SEQ ID NO: 831925 - DNA, 15 bp, Homo sapiens
tttcttatcttccca

SEQ ID NO: 831926 - DNA, 15 bp, Homo sapiens
atttcttatcttccc

SEQ ID NO: 831927 - DNA, 15 bp, Homo sapiens
catttcttatcttcc

SEQ ID NO: 831928 - DNA, 15 bp, Homo sapiens
acatttcttatcttc

SEQ ID NO: 831929 - DNA, 15 bp, Homo sapiens
gacatttcttatctt

SEQ ID NO: 831930 - DNA, 15 bp, Homo sapiens
tgacatttcttatct

SEQ ID NO: 831931 - DNA, 15 bp, Homo sapiens
atgacatttcttatc

SEQ ID NO: 831932 - DNA, 15 bp, Homo sapiens
aatgacatttcttat

SEQ ID NO: 831933 - DNA, 15 bp, Homo sapiens
aaatgacatttctta

SEQ ID NO: 831934 - DNA, 15 bp, Homo sapiens
aaaatgacatttctt

SEQ ID NO: 831935 - DNA, 15 bp, Homo sapiens
aaaaatgacatttct

SEQ ID NO: 831936 - DNA, 15 bp, Homo sapiens
taaaaatgacatttc

SEQ ID NO: 831937 - DNA, 15 bp, Homo sapiens
ataaaaatgacattt

SEQ ID NO: 831938 - DNA, 15 bp, Homo sapiens
cataaaaatgacatt

SEQ ID NO: 831939 - DNA, 15 bp, Homo sapiens
acataaaaatgacat

SEQ ID NO: 831940 - DNA, 15 bp, Homo sapiens
tacataaaaatgaca

SEQ ID NO: 831941 - DNA, 15 bp, Homo sapiens
gtacataaaaatgac

SEQ ID NO: 831942 - DNA, 15 bp, Homo sapiens
agtacataaaaatga

SEQ ID NO: 831943 - DNA, 15 bp, Homo sapiens
cagtacataaaaatg

SEQ ID NO: 831944 - DNA, 15 bp, Homo sapiens
acagtacataaaaat

SEQ ID NO: 831945 - DNA, 15 bp, Homo sapiens
aacagtacataaaaa

SEQ ID NO: 831946 - DNA, 15 bp, Homo sapiens
aaacagtacataaaa

SEQ ID NO: 831947 - DNA, 15 bp, Homo sapiens
caaacagtacataaa

SEQ ID NO: 831948 - DNA, 15 bp, Homo sapiens
gcaaacagtacataa

SEQ ID NO: 831949 - DNA, 15 bp, Homo sapiens
tgcaaacagtacata

SEQ ID NO: 831950 - DNA, 15 bp, Homo sapiens
atgcaaacagtacat

SEQ ID NO: 831951 - DNA, 15 bp, Homo sapiens
gatgcaaacagtaca

SEQ ID NO: 831952 - DNA, 15 bp, Homo sapiens
ggatgcaaacagtac

SEQ ID NO: 831953 - DNA, 15 bp, Homo sapiens
tggatgcaaacagta

SEQ ID NO: 831954 - DNA, 15 bp, Homo sapiens
atggatgcaaacagt

SEQ ID NO: 831955 - DNA, 15 bp, Homo sapiens
gatggatgcaaacag

SEQ ID NO: 831956 - DNA, 15 bp, Homo sapiens
tgatggatgcaaaca

SEQ ID NO: 831957 - DNA, 15 bp, Homo sapiens
ctgatggatgcaaac

SEQ ID NO: 831958 - DNA, 15 bp, Homo sapiens
tctgatggatgcaaa

SEQ ID NO: 831959 - DNA, 15 bp, Homo sapiens
gtctgatggatgcaa

SEQ ID NO: 831960 - DNA, 15 bp, Homo sapiens
tgtctgatggatgca

SEQ ID NO: 831961 - DNA, 15 bp, Homo sapiens
ttgtctgatggatgc

SEQ ID NO: 831962 - DNA, 15 bp, Homo sapiens
cttgtctgatggatg

SEQ ID NO: 831963 - DNA, 15 bp, Homo sapiens
ccttgtctgatggat

SEQ ID NO: 831964 - DNA, 15 bp, Homo sapiens
gccttgtctgatgga

SEQ ID NO: 831965 - DNA, 15 bp, Homo sapiens
tgccttgtctgatgg

SEQ ID NO: 831966 - DNA, 15 bp, Homo sapiens
atgccttgtctgatg

SEQ ID NO: 831967 - DNA, 15 bp, Homo sapiens
gatgccttgtctgat

SEQ ID NO: 831968 - DNA, 15 bp, Homo sapiens
tgatgccttgtctga

SEQ ID NO: 831969 - DNA, 15 bp, Homo sapiens
ctgatgccttgtctg

SEQ ID NO: 831970 - DNA, 15 bp, Homo sapiens
cctgatgccttgtct

SEQ ID NO: 831971 - DNA, 15 bp, Homo sapiens
tcctgatgccttgtc

SEQ ID NO: 831972 - DNA, 15 bp, Homo sapiens
ttcctgatgccttgt

SEQ ID NO: 831973 - DNA, 15 bp, Homo sapiens
tttcctgatgccttg

SEQ ID NO: 831974 - DNA, 15 bp, Homo sapiens
ttttcctgatgcctt

SEQ ID NO: 831975 - DNA, 15 bp, Homo sapiens
tttttcctgatgcct

SEQ ID NO: 831976 - DNA, 15 bp, Homo sapiens
atttttcctgatgcc

SEQ ID NO: 831977 - DNA, 15 bp, Homo sapiens
catttttcctgatgc

SEQ ID NO: 831978 - DNA, 15 bp, Homo sapiens
tcatttttcctgatg

SEQ ID NO: 831979 - DNA, 15 bp, Homo sapiens
atcatttttcctgat

SEQ ID NO: 831980 - DNA, 15 bp, Homo sapiens
gatcatttttcctga

SEQ ID NO: 831981 - DNA, 15 bp, Homo sapiens
ggatcatttttcctg

SEQ ID NO: 831982 - DNA, 15 bp, Homo sapiens
aggatcatttttcct

SEQ ID NO: 831983 - DNA, 15 bp, Homo sapiens
aaggatcatttttcc

SEQ ID NO: 831984 - DNA, 15 bp, Homo sapiens
gaaggatcatttttc

SEQ ID NO: 831985 - DNA, 15 bp, Homo sapiens
tgaaggatcattttt

SEQ ID NO: 831986 - DNA, 15 bp, Homo sapiens
ctgaaggatcatttt

SEQ ID NO: 831987 - DNA, 15 bp, Homo sapiens
cctgaaggatcattt

SEQ ID NO: 831988 - DNA, 15 bp, Homo sapiens
tcctgaaggatcatt

SEQ ID NO: 831989 - DNA, 15 bp, Homo sapiens
ttcctgaaggatcat

SEQ ID NO: 831990 - DNA, 15 bp, Homo sapiens
tttcctgaaggatca

SEQ ID NO: 831991 - DNA, 15 bp, Homo sapiens
ctttcctgaaggatc

SEQ ID NO: 831992 - DNA, 15 bp, Homo sapiens
tctttcctgaaggat

SEQ ID NO: 831993 - DNA, 15 bp, Homo sapiens
ctctttcctgaagga

SEQ ID NO: 831994 - DNA, 15 bp, Homo sapiens
actctttcctgaagg

SEQ ID NO: 831995 - DNA, 15 bp, Homo sapiens
cactctttcctgaag

SEQ ID NO: 831996 - DNA, 15 bp, Homo sapiens
tcactctttcctgaa

SEQ ID NO: 831997 - DNA, 15 bp, Homo sapiens
atcactctttcctga

SEQ ID NO: 831998 - DNA, 15 bp, Homo sapiens
aatcactctttcctg

SEQ ID NO: 831999 - DNA, 15 bp, Homo sapiens
aaatcactctttcct

SEQ ID NO: 832000 - DNA, 15 bp, Homo sapiens
aaaatcactctttcc

SEQ ID NO: 832001 - DNA, 15 bp, Homo sapiens
aaaaatcactctttc

SEQ ID NO: 832002 - DNA, 15 bp, Homo sapiens
aaaaaatcactcttt

SEQ ID NO: 832003 - DNA, 15 bp, Homo sapiens
aaaaaaatcactctt

SEQ ID NO: 832004 - DNA, 15 bp, Homo sapiens
aaaaaaaatcactct

SEQ ID NO: 832005 - DNA, 15 bp, Homo sapiens
gaaaaaaaatcactc

SEQ ID NO: 832006 - DNA, 15 bp, Homo sapiens
agaaaaaaaatcact

SEQ ID NO: 832007 - DNA, 15 bp, Homo sapiens
aagaaaaaaaatcac

SEQ ID NO: 832008 - DNA, 15 bp, Homo sapiens
gaagaaaaaaaatca

SEQ ID NO: 832009 - DNA, 15 bp, Homo sapiens
tgaagaaaaaaaatc

SEQ ID NO: 832010 - DNA, 15 bp, Homo sapiens
ttgaagaaaaaaaat

SEQ ID NO: 832011 - DNA, 15 bp, Homo sapiens
cttgaagaaaaaaaa

SEQ ID NO: 832012 - DNA, 15 bp, Homo sapiens
tcttgaagaaaaaaa

SEQ ID NO: 832013 - DNA, 15 bp, Homo sapiens
ttcttgaagaaaaaa

SEQ ID NO: 832014 - DNA, 15 bp, Homo sapiens
tttcttgaagaaaaa

SEQ ID NO: 832015 - DNA, 15 bp, Homo sapiens
atttcttgaagaaaa

SEQ ID NO: 832016 - DNA, 15 bp, Homo sapiens
aatttcttgaagaaa

SEQ ID NO: 832017 - DNA, 15 bp, Homo sapiens
taatttcttgaagaa

SEQ ID NO: 832018 - DNA, 15 bp, Homo sapiens
ctaatttcttgaaga

SEQ ID NO: 832019 - DNA, 15 bp, Homo sapiens
tctaatttcttgaag

SEQ ID NO: 832020 - DNA, 15 bp, Homo sapiens
ttctaatttcttgaa

SEQ ID NO: 832021 - DNA, 15 bp, Homo sapiens
cttctaatttcttga

SEQ ID NO: 832022 - DNA, 15 bp, Homo sapiens
tcttctaatttcttg

SEQ ID NO: 832023 - DNA, 15 bp, Homo sapiens
ctcttctaatttctt

SEQ ID NO: 832024 - DNA, 15 bp, Homo sapiens
cctcttctaatttct

SEQ ID NO: 832025 - DNA, 15 bp, Homo sapiens
ccctcttctaatttc

SEQ ID NO: 832026 - DNA, 15 bp, Homo sapiens
cccctcttctaattt

SEQ ID NO: 832027 - DNA, 15 bp, Homo sapiens
tcccctcttctaatt

SEQ ID NO: 832028 - DNA, 15 bp, Homo sapiens
ctcccctcttctaat

SEQ ID NO: 832029 - DNA, 15 bp, Homo sapiens
tctcccctcttctaa

SEQ ID NO: 832030 - DNA, 15 bp, Homo sapiens
ttctcccctcttcta

SEQ ID NO: 832031 - DNA, 15 bp, Homo sapiens
tttctcccctcttct

SEQ ID NO: 832032 - DNA, 15 bp, Homo sapiens
atttctcccctcttc

SEQ ID NO: 832033 - DNA, 15 bp, Homo sapiens
aatttctcccctctt

SEQ ID NO: 832034 - DNA, 15 bp, Homo sapiens
caatttctcccctct

SEQ ID NO: 832035 - DNA, 15 bp, Homo sapiens
ccaatttctcccctc

SEQ ID NO: 832036 - DNA, 15 bp, Homo sapiens
accaatttctcccct

SEQ ID NO: 832037 - DNA, 15 bp, Homo sapiens
aaccaatttctcccc

SEQ ID NO: 832038 - DNA, 15 bp, Homo sapiens
aaaccaatttctccc

SEQ ID NO: 832039 - DNA, 15 bp, Homo sapiens
taaaccaatttctcc

SEQ ID NO: 832040 - DNA, 15 bp, Homo sapiens
ttaaaccaatttctc

SEQ ID NO: 832041 - DNA, 15 bp, Homo sapiens
cttaaaccaatttct

SEQ ID NO: 832042 - DNA, 15 bp, Homo sapiens
tcttaaaccaatttc

SEQ ID NO: 832043 - DNA, 15 bp, Homo sapiens
atcttaaaccaattt

SEQ ID NO: 832044 - DNA, 15 bp, Homo sapiens
aatcttaaaccaatt

SEQ ID NO: 832045 - DNA, 15 bp, Homo sapiens
taatcttaaaccaat

SEQ ID NO: 832046 - DNA, 15 bp, Homo sapiens
ttaatcttaaaccaa

SEQ ID NO: 832047 - DNA, 15 bp, Homo sapiens
cttaatcttaaacca

SEQ ID NO: 832048 - DNA, 15 bp, Homo sapiens
ccttaatcttaaacc

SEQ ID NO: 832049 - DNA, 15 bp, Homo sapiens
tccttaatcttaaac

SEQ ID NO: 832050 - DNA, 15 bp, Homo sapiens
gtccttaatcttaaa

SEQ ID NO: 832051 - DNA, 15 bp, Homo sapiens
agtccttaatcttaa

SEQ ID NO: 832052 - DNA, 15 bp, Homo sapiens
gagtccttaatctta

SEQ ID NO: 832053 - DNA, 15 bp, Homo sapiens
ggagtccttaatctt

SEQ ID NO: 832054 - DNA, 15 bp, Homo sapiens
tggagtccttaatct

SEQ ID NO: 832055 - DNA, 15 bp, Homo sapiens
atggagtccttaatc

SEQ ID NO: 832056 - DNA, 15 bp, Homo sapiens
catggagtccttaat

SEQ ID NO: 832057 - DNA, 15 bp, Homo sapiens
gcatggagtccttaa

SEQ ID NO: 832058 - DNA, 15 bp, Homo sapiens
tgcatggagtcctta

SEQ ID NO: 832059 - DNA, 15 bp, Homo sapiens
atgcatggagtcctt

SEQ ID NO: 832060 - DNA, 15 bp, Homo sapiens
tatgcatggagtcct

SEQ ID NO: 832061 - DNA, 15 bp, Homo sapiens
ttatgcatggagtcc

SEQ ID NO: 832062 - DNA, 15 bp, Homo sapiens
cttatgcatggagtc

SEQ ID NO: 832063 - DNA, 15 bp, Homo sapiens
tcttatgcatggagt

SEQ ID NO: 832064 - DNA, 15 bp, Homo sapiens
ctcttatgcatggag

SEQ ID NO: 832065 - DNA, 15 bp, Homo sapiens
tctcttatgcatgga

SEQ ID NO: 832066 - DNA, 15 bp, Homo sapiens
ttctcttatgcatgg

SEQ ID NO: 832067 - DNA, 15 bp, Homo sapiens
tttctcttatgcatg

SEQ ID NO: 832068 - DNA, 15 bp, Homo sapiens
gtttctcttatgcat

SEQ ID NO: 832069 - DNA, 15 bp, Homo sapiens
agtttctcttatgca

SEQ ID NO: 832070 - DNA, 15 bp, Homo sapiens
cagtttctcttatgc

SEQ ID NO: 832071 - DNA, 15 bp, Homo sapiens
ccagtttctcttatg

SEQ ID NO: 832072 - DNA, 15 bp, Homo sapiens
cccagtttctcttat

SEQ ID NO: 832073 - DNA, 15 bp, Homo sapiens
tcccagtttctctta

SEQ ID NO: 832074 - DNA, 15 bp, Homo sapiens
ctcccagtttctctt

SEQ ID NO: 832075 - DNA, 15 bp, Homo sapiens
cctcccagtttctct

SEQ ID NO: 832076 - DNA, 15 bp, Homo sapiens
ccctcccagtttctc

SEQ ID NO: 832077 - DNA, 15 bp, Homo sapiens
tccctcccagtttct

SEQ ID NO: 832078 - DNA, 15 bp, Homo sapiens
ttccctcccagtttc

SEQ ID NO: 832079 - DNA, 15 bp, Homo sapiens
cttccctcccagttt

SEQ ID NO: 832080 - DNA, 15 bp, Homo sapiens
tcttccctcccagtt

SEQ ID NO: 832081 - DNA, 15 bp, Homo sapiens
gtcttccctcccagt

SEQ ID NO: 832082 - DNA, 15 bp, Homo sapiens
tgtcttccctcccag

SEQ ID NO: 832083 - DNA, 15 bp, Homo sapiens
ctgtcttccctccca

SEQ ID NO: 832084 - DNA, 15 bp, Homo sapiens
cctgtcttccctccc

SEQ ID NO: 832085 - DNA, 15 bp, Homo sapiens
acctgtcttccctcc

SEQ ID NO: 832086 - DNA, 15 bp, Homo sapiens
tacctgtcttccctc

SEQ ID NO: 832087 - DNA, 15 bp, Homo sapiens
ctacctgtcttccct

SEQ ID NO: 832088 - DNA, 15 bp, Homo sapiens
tctacctgtcttccc

SEQ ID NO: 832089 - DNA, 15 bp, Homo sapiens
ttctacctgtcttcc

SEQ ID NO: 832090 - DNA, 15 bp, Homo sapiens
tttctacctgtcttc

SEQ ID NO: 832091 - DNA, 15 bp, Homo sapiens
atttctacctgtctt

SEQ ID NO: 832092 - DNA, 15 bp, Homo sapiens
catttctacctgtct

SEQ ID NO: 832093 - DNA, 15 bp, Homo sapiens
gcatttctacctgtc

SEQ ID NO: 832094 - DNA, 15 bp, Homo sapiens
agcatttctacctgt

SEQ ID NO: 832095 - DNA, 15 bp, Homo sapiens
tagcatttctacctg

SEQ ID NO: 832096 - DNA, 15 bp, Homo sapiens
atagcatttctacct

SEQ ID NO: 832097 - DNA, 15 bp, Homo sapiens
catagcatttctacc

SEQ ID NO: 832098 - DNA, 15 bp, Homo sapiens
ccatagcatttctac

SEQ ID NO: 832099 - DNA, 15 bp, Homo sapiens
cccatagcatttcta

SEQ ID NO: 832100 - DNA, 15 bp, Homo sapiens
ccccatagcatttct

SEQ ID NO: 832101 - DNA, 15 bp, Homo sapiens
accccatagcatttc

SEQ ID NO: 832102 - DNA, 15 bp, Homo sapiens
aaccccatagcattt

SEQ ID NO: 832103 - DNA, 15 bp, Homo sapiens
taaccccatagcatt

SEQ ID NO: 832104 - DNA, 15 bp, Homo sapiens
ctaaccccatagcat

SEQ ID NO: 832105 - DNA, 15 bp, Homo sapiens
cctaaccccatagca

SEQ ID NO: 832106 - DNA, 15 bp, Homo sapiens
tcctaaccccatagc

SEQ ID NO: 832107 - DNA, 15 bp, Homo sapiens
ttcctaaccccatag

SEQ ID NO: 832108 - DNA, 15 bp, Homo sapiens
cttcctaaccccata

SEQ ID NO: 832109 - DNA, 15 bp, Homo sapiens
ccttcctaaccccat

SEQ ID NO: 832110 - DNA, 15 bp, Homo sapiens
tccttcctaacccca

SEQ ID NO: 832111 - DNA, 15 bp, Homo sapiens
ttccttcctaacccc

SEQ ID NO: 832112 - DNA, 15 bp, Homo sapiens
cttccttcctaaccc

SEQ ID NO: 832113 - DNA, 15 bp, Homo sapiens
tcttccttcctaacc

SEQ ID NO: 832114 - DNA, 15 bp, Homo sapiens
ttcttccttcctaac

SEQ ID NO: 832115 - DNA, 15 bp, Homo sapiens
attcttccttcctaa

SEQ ID NO: 832116 - DNA, 15 bp, Homo sapiens
cattcttccttccta

SEQ ID NO: 832117 - DNA, 15 bp, Homo sapiens
gcattcttccttcct

SEQ ID NO: 832118 - DNA, 15 bp, Homo sapiens
tgcattcttccttcc

SEQ ID NO: 832119 - DNA, 15 bp, Homo sapiens
ctgcattcttccttc

SEQ ID NO: 832120 - DNA, 15 bp, Homo sapiens
tctgcattcttcctt

SEQ ID NO: 832121 - DNA, 15 bp, Homo sapiens
ctctgcattcttcct

SEQ ID NO: 832122 - DNA, 15 bp, Homo sapiens
cctctgcattcttcc

SEQ ID NO: 832123 - DNA, 15 bp, Homo sapiens
acctctgcattcttc

SEQ ID NO: 832124 - DNA, 15 bp, Homo sapiens
cacctctgcattctt

SEQ ID NO: 832125 - DNA, 15 bp, Homo sapiens
ccacctctgcattct

SEQ ID NO: 832126 - DNA, 15 bp, Homo sapiens
tccacctctgcattc

SEQ ID NO: 832127 - DNA, 15 bp, Homo sapiens
atccacctctgcatt

SEQ ID NO: 832128 - DNA, 15 bp, Homo sapiens
aatccacctctgcat

SEQ ID NO: 832129 - DNA, 15 bp, Homo sapiens
taatccacctctgca

SEQ ID NO: 832130 - DNA, 15 bp, Homo sapiens
gtaatccacctctgc

SEQ ID NO: 832131 - DNA, 15 bp, Homo sapiens
agtaatccacctctg

SEQ ID NO: 832132 - DNA, 15 bp, Homo sapiens
aagtaatccacctct

SEQ ID NO: 832133 - DNA, 15 bp, Homo sapiens
taagtaatccacctc

SEQ ID NO: 832134 - DNA, 15 bp, Homo sapiens
ctaagtaatccacct

SEQ ID NO: 832135 - DNA, 15 bp, Homo sapiens
tctaagtaatccacc

SEQ ID NO: 832136 - DNA, 15 bp, Homo sapiens
ttctaagtaatccac

SEQ ID NO: 832137 - DNA, 15 bp, Homo sapiens
attctaagtaatcca

SEQ ID NO: 832138 - DNA, 15 bp, Homo sapiens
aattctaagtaatcc

SEQ ID NO: 832139 - DNA, 15 bp, Homo sapiens
caattctaagtaatc

SEQ ID NO: 832140 - DNA, 15 bp, Homo sapiens
tcaattctaagtaat

SEQ ID NO: 832141 - DNA, 15 bp, Homo sapiens
ctcaattctaagtaa

SEQ ID NO: 832142 - DNA, 15 bp, Homo sapiens
tctcaattctaagta

SEQ ID NO: 832143 - DNA, 15 bp, Homo sapiens
gtctcaattctaagt

SEQ ID NO: 832144 - DNA, 15 bp, Homo sapiens
tgtctcaattctaag

SEQ ID NO: 832145 - DNA, 15 bp, Homo sapiens
atgtctcaattctaa

SEQ ID NO: 832146 - DNA, 15 bp, Homo sapiens
gatgtctcaattcta

SEQ ID NO: 832147 - DNA, 15 bp, Homo sapiens
agatgtctcaattct

SEQ ID NO: 832148 - DNA, 15 bp, Homo sapiens
cagatgtctcaattc

SEQ ID NO: 832149 - DNA, 15 bp, Homo sapiens
tcagatgtctcaatt

SEQ ID NO: 832150 - DNA, 15 bp, Homo sapiens
atcagatgtctcaat

SEQ ID NO: 832151 - DNA, 15 bp, Homo sapiens
gatcagatgtctcaa

SEQ ID NO: 832152 - DNA, 15 bp, Homo sapiens
tgatcagatgtctca

SEQ ID NO: 832153 - DNA, 15 bp, Homo sapiens
ttgatcagatgtctc

SEQ ID NO: 832154 - DNA, 15 bp, Homo sapiens
cttgatcagatgtct

SEQ ID NO: 832155 - DNA, 15 bp, Homo sapiens
tcttgatcagatgtc

SEQ ID NO: 832156 - DNA, 15 bp, Homo sapiens
gtcttgatcagatgt

SEQ ID NO: 832157 - DNA, 15 bp, Homo sapiens
tgtcttgatcagatg

SEQ ID NO: 832158 - DNA, 15 bp, Homo sapiens
ctgtcttgatcagat

SEQ ID NO: 832159 - DNA, 15 bp, Homo sapiens
tctgtcttgatcaga

SEQ ID NO: 832160 - DNA, 15 bp, Homo sapiens
ctctgtcttgatcag

SEQ ID NO: 832161 - DNA, 15 bp, Homo sapiens
cctctgtcttgatca

SEQ ID NO: 832162 - DNA, 15 bp, Homo sapiens
ccctctgtcttgatc

SEQ ID NO: 832163 - DNA, 15 bp, Homo sapiens
tccctctgtcttgat

SEQ ID NO: 832164 - DNA, 15 bp, Homo sapiens
atccctctgtcttga

SEQ ID NO: 832165 - DNA, 15 bp, Homo sapiens
gatccctctgtcttg

SEQ ID NO: 832166 - DNA, 15 bp, Homo sapiens
tgatccctctgtctt

SEQ ID NO: 832167 - DNA, 15 bp, Homo sapiens
gtgatccctctgtct

SEQ ID NO: 832168 - DNA, 15 bp, Homo sapiens
tgtgatccctctgtc

SEQ ID NO: 832169 - DNA, 15 bp, Homo sapiens
ctgtgatccctctgt

SEQ ID NO: 832170 - DNA, 15 bp, Homo sapiens
gctgtgatccctctg

SEQ ID NO: 832171 - DNA, 15 bp, Homo sapiens
agctgtgatccctct

SEQ ID NO: 832172 - DNA, 15 bp, Homo sapiens
aagctgtgatccctc

SEQ ID NO: 832173 - DNA, 15 bp, Homo sapiens
aaagctgtgatccct

SEQ ID NO: 832174 - DNA, 15 bp, Homo sapiens
aaaagctgtgatccc

SEQ ID NO: 832175 - DNA, 15 bp, Homo sapiens
caaaagctgtgatcc

SEQ ID NO: 832176 - DNA, 15 bp, Homo sapiens
gcaaaagctgtgatc

SEQ ID NO: 832177 - DNA, 15 bp, Homo sapiens
agcaaaagctgtgat

SEQ ID NO: 832178 - DNA, 15 bp, Homo sapiens
tagcaaaagctgtga

SEQ ID NO: 832179 - DNA, 15 bp, Homo sapiens
ttagcaaaagctgtg

SEQ ID NO: 832180 - DNA, 15 bp, Homo sapiens
gttagcaaaagctgt

SEQ ID NO: 832181 - DNA, 15 bp, Homo sapiens
tgttagcaaaagctg

SEQ ID NO: 832182 - DNA, 15 bp, Homo sapiens
ttgttagcaaaagct

SEQ ID NO: 832183 - DNA, 15 bp, Homo sapiens
tttgttagcaaaagc

SEQ ID NO: 832184 - DNA, 15 bp, Homo sapiens
ctttgttagcaaaag

SEQ ID NO: 832185 - DNA, 15 bp, Homo sapiens
actttgttagcaaaa

SEQ ID NO: 832186 - DNA, 15 bp, Homo sapiens
tactttgttagcaaa

SEQ ID NO: 832187 - DNA, 15 bp, Homo sapiens
gtactttgttagcaa

SEQ ID NO: 832188 - DNA, 15 bp, Homo sapiens
agtactttgttagca

SEQ ID NO: 832189 - DNA, 15 bp, Homo sapiens
tagtactttgttagc

SEQ ID NO: 832190 - DNA, 15 bp, Homo sapiens
ctagtactttgttag

SEQ ID NO: 832191 - DNA, 15 bp, Homo sapiens
actagtactttgtta

SEQ ID NO: 832192 - DNA, 15 bp, Homo sapiens
cactagtactttgtt

SEQ ID NO: 832193 - DNA, 15 bp, Homo sapiens
ccactagtactttgt

SEQ ID NO: 832194 - DNA, 15 bp, Homo sapiens
tccactagtactttg

SEQ ID NO: 832195 - DNA, 15 bp, Homo sapiens
ctccactagtacttt

SEQ ID NO: 832196 - DNA, 15 bp, Homo sapiens
cctccactagtactt

SEQ ID NO: 832197 - DNA, 15 bp, Homo sapiens
tcctccactagtact

SEQ ID NO: 832198 - DNA, 15 bp, Homo sapiens
atcctccactagtac

SEQ ID NO: 832199 - DNA, 15 bp, Homo sapiens
catcctccactagta

SEQ ID NO: 832200 - DNA, 15 bp, Homo sapiens
gcatcctccactagt

SEQ ID NO: 832201 - DNA, 15 bp, Homo sapiens
ggcatcctccactag

SEQ ID NO: 832202 - DNA, 15 bp, Homo sapiens
tggcatcctccacta

SEQ ID NO: 832203 - DNA, 15 bp, Homo sapiens
gtggcatcctccact

SEQ ID NO: 832204 - DNA, 15 bp, Homo sapiens
agtggcatcctccac

SEQ ID NO: 832205 - DNA, 15 bp, Homo sapiens
tagtggcatcctcca

SEQ ID NO: 832206 - DNA, 15 bp, Homo sapiens
ctagtggcatcctcc

SEQ ID NO: 832207 - DNA, 15 bp, Homo sapiens
cctagtggcatcctc

SEQ ID NO: 832208 - DNA, 15 bp, Homo sapiens
acctagtggcatcct

SEQ ID NO: 832209 - DNA, 15 bp, Homo sapiens
cacctagtggcatcc

SEQ ID NO: 832210 - DNA, 15 bp, Homo sapiens
tcacctagtggcatc

SEQ ID NO: 832211 - DNA, 15 bp, Homo sapiens
ctcacctagtggcat

SEQ ID NO: 832212 - DNA, 15 bp, Homo sapiens
cctcacctagtggca

SEQ ID NO: 832213 - DNA, 15 bp, Homo sapiens
acctcacctagtggc

SEQ ID NO: 832214 - DNA, 15 bp, Homo sapiens
aacctcacctagtgg

SEQ ID NO: 832215 - DNA, 15 bp, Homo sapiens
aaacctcacctagtg

SEQ ID NO: 832216 - DNA, 15 bp, Homo sapiens
taaacctcacctagt

SEQ ID NO: 832217 - DNA, 15 bp, Homo sapiens
ttaaacctcacctag

SEQ ID NO: 832218 - DNA, 15 bp, Homo sapiens
attaaacctcaccta

SEQ ID NO: 832219 - DNA, 15 bp, Homo sapiens
tattaaacctcacct

SEQ ID NO: 832220 - DNA, 15 bp, Homo sapiens
ttattaaacctcacc

SEQ ID NO: 832221 - DNA, 15 bp, Homo sapiens
tttattaaacctcac

SEQ ID NO: 832222 - DNA, 15 bp, Homo sapiens
atttattaaacctca

SEQ ID NO: 832223 - DNA, 15 bp, Homo sapiens
tatttattaaacctc

SEQ ID NO: 832224 - DNA, 15 bp, Homo sapiens
ttatttattaaacct

SEQ ID NO: 832225 - DNA, 15 bp, Homo sapiens
attatttattaaacc

SEQ ID NO: 832226 - DNA, 15 bp, Homo sapiens
aattatttattaaac

SEQ ID NO: 832227 - DNA, 15 bp, Homo sapiens
caattatttattaaa

SEQ ID NO: 832228 - DNA, 15 bp, Homo sapiens
acaattatttattaa

SEQ ID NO: 832229 - DNA, 15 bp, Homo sapiens
aacaattatttatta

SEQ ID NO: 832230 - DNA, 15 bp, Homo sapiens
caacaattatttatt

SEQ ID NO: 832231 - DNA, 15 bp, Homo sapiens
tcaacaattatttat

SEQ ID NO: 832232 - DNA, 15 bp, Homo sapiens
gtcaacaattattta

SEQ ID NO: 832233 - DNA, 15 bp, Homo sapiens
tgtcaacaattattt

SEQ ID NO: 832234 - DNA, 15 bp, Homo sapiens
ttgtcaacaattatt

SEQ ID NO: 832235 - DNA, 15 bp, Homo sapiens
attgtcaacaattat

SEQ ID NO: 832236 - DNA, 15 bp, Homo sapiens
tattgtcaacaatta

SEQ ID NO: 832237 - DNA, 15 bp, Homo sapiens
ttattgtcaacaatt

SEQ ID NO: 832238 - DNA, 15 bp, Homo sapiens
cttattgtcaacaat

SEQ ID NO: 832239 - DNA, 15 bp, Homo sapiens
acttattgtcaacaa

SEQ ID NO: 832240 - DNA, 15 bp, Homo sapiens
aacttattgtcaaca

SEQ ID NO: 832241 - DNA, 15 bp, Homo sapiens
gaacttattgtcaac

SEQ ID NO: 832242 - DNA, 15 bp, Homo sapiens
ggaacttattgtcaa

SEQ ID NO: 832243 - DNA, 15 bp, Homo sapiens
tggaacttattgtca

SEQ ID NO: 832244 - DNA, 15 bp, Homo sapiens
atggaacttattgtc

SEQ ID NO: 832245 - DNA, 15 bp, Homo sapiens
aatggaacttattgt

SEQ ID NO: 832246 - DNA, 15 bp, Homo sapiens
aaatggaacttattg

SEQ ID NO: 832247 - DNA, 15 bp, Homo sapiens
taaatggaacttatt

SEQ ID NO: 832248 - DNA, 15 bp, Homo sapiens
ttaaatggaacttat

SEQ ID NO: 832249 - DNA, 15 bp, Homo sapiens
tttaaatggaactta

SEQ ID NO: 832250 - DNA, 15 bp, Homo sapiens
ttttaaatggaactt

SEQ ID NO: 832251 - DNA, 15 bp, Homo sapiens
tttttaaatggaact

SEQ ID NO: 832252 - DNA, 15 bp, Homo sapiens
ttttttaaatggaac

SEQ ID NO: 832253 - DNA, 15 bp, Homo sapiens
attttttaaatggaa

SEQ ID NO: 832254 - DNA, 15 bp, Homo sapiens
tattttttaaatgga

SEQ ID NO: 832255 - DNA, 15 bp, Homo sapiens
ttattttttaaatgg

SEQ ID NO: 832256 - DNA, 15 bp, Homo sapiens
tttattttttaaatg

SEQ ID NO: 832257 - DNA, 15 bp, Homo sapiens
gtttattttttaaat

SEQ ID NO: 832258 - DNA, 15 bp, Homo sapiens
tgtttattttttaaa

SEQ ID NO: 832259 - DNA, 15 bp, Homo sapiens
ttgtttattttttaa

SEQ ID NO: 832260 - DNA, 15 bp, Homo sapiens
attgtttatttttta

SEQ ID NO: 832261 - DNA, 15 bp, Homo sapiens
aattgtttatttttt

SEQ ID NO: 832262 - DNA, 15 bp, Homo sapiens
aaattgtttattttt

SEQ ID NO: 832263 - DNA, 15 bp, Homo sapiens
taaattgtttatttt

SEQ ID NO: 832264 - DNA, 15 bp, Homo sapiens
ataaattgtttattt

SEQ ID NO: 832265 - DNA, 15 bp, Homo sapiens
cataaattgtttatt

SEQ ID NO: 832266 - DNA, 15 bp, Homo sapiens
gcataaattgtttat

SEQ ID NO: 832267 - DNA, 15 bp, Homo sapiens
agcataaattgttta

SEQ ID NO: 832268 - DNA, 15 bp, Homo sapiens
aagcataaattgttt

SEQ ID NO: 832269 - DNA, 15 bp, Homo sapiens
gaagcataaattgtt

SEQ ID NO: 832270 - DNA, 15 bp, Homo sapiens
agaagcataaattgt

SEQ ID NO: 832271 - DNA, 15 bp, Homo sapiens
aagaagcataaattg

SEQ ID NO: 832272 - DNA, 15 bp, Homo sapiens
gaagaagcataaatt

SEQ ID NO: 832273 - DNA, 15 bp, Homo sapiens
agaagaagcataaat

SEQ ID NO: 832274 - DNA, 15 bp, Homo sapiens
aagaagaagcataaa

SEQ ID NO: 832275 - DNA, 15 bp, Homo sapiens
aaagaagaagcataa

SEQ ID NO: 832276 - DNA, 15 bp, Homo sapiens
caaagaagaagcata

SEQ ID NO: 832277 - DNA, 15 bp, Homo sapiens
gcaaagaagaagcat

SEQ ID NO: 832278 - DNA, 15 bp, Homo sapiens
ggcaaagaagaagca

SEQ ID NO: 832279 - DNA, 15 bp, Homo sapiens
aggcaaagaagaagc

SEQ ID NO: 832280 - DNA, 15 bp, Homo sapiens
taggcaaagaagaag

SEQ ID NO: 832281 - DNA, 15 bp, Homo sapiens
ttaggcaaagaagaa

SEQ ID NO: 832282 - DNA, 15 bp, Homo sapiens
cttaggcaaagaaga

SEQ ID NO: 832283 - DNA, 15 bp, Homo sapiens
acttaggcaaagaag

SEQ ID NO: 832284 - DNA, 15 bp, Homo sapiens
cacttaggcaaagaa

SEQ ID NO: 832285 - DNA, 15 bp, Homo sapiens
acacttaggcaaaga

SEQ ID NO: 832286 - DNA, 15 bp, Homo sapiens
gacacttaggcaaag

SEQ ID NO: 832287 - DNA, 15 bp, Homo sapiens
tgacacttaggcaaa

SEQ ID NO: 832288 - DNA, 15 bp, Homo sapiens
ttgacacttaggcaa

SEQ ID NO: 832289 - DNA, 15 bp, Homo sapiens
tttgacacttaggca

SEQ ID NO: 832290 - DNA, 15 bp, Homo sapiens
atttgacacttaggc

SEQ ID NO: 832291 - DNA, 15 bp, Homo sapiens
tatttgacacttagg

SEQ ID NO: 832292 - DNA, 15 bp, Homo sapiens
ttatttgacacttag

SEQ ID NO: 832293 - DNA, 15 bp, Homo sapiens
tttatttgacactta

SEQ ID NO: 832294 - DNA, 15 bp, Homo sapiens
ttttatttgacactt

SEQ ID NO: 832295 - DNA, 15 bp, Homo sapiens
gttttatttgacact

SEQ ID NO: 832296 - DNA, 15 bp, Homo sapiens
tgttttatttgacac

SEQ ID NO: 832297 - DNA, 15 bp, Homo sapiens
atgttttatttgaca

SEQ ID NO: 832298 - DNA, 15 bp, Homo sapiens
aatgttttatttgac

SEQ ID NO: 832299 - DNA, 15 bp, Homo sapiens
gaatgttttatttga

SEQ ID NO: 832300 - DNA, 15 bp, Homo sapiens
tgaatgttttatttg

SEQ ID NO: 832301 - DNA, 15 bp, Homo sapiens
ctgaatgttttattt

SEQ ID NO: 832302 - DNA, 15 bp, Homo sapiens
tctgaatgttttatt

SEQ ID NO: 832303 - DNA, 15 bp, Homo sapiens
atctgaatgttttat

SEQ ID NO: 832304 - DNA, 15 bp, Homo sapiens
aatctgaatgtttta

SEQ ID NO: 832305 - DNA, 15 bp, Homo sapiens
aaatctgaatgtttt

SEQ ID NO: 832306 - DNA, 15 bp, Homo sapiens
aaaatctgaatgttt

SEQ ID NO: 832307 - DNA, 15 bp, Homo sapiens
aaaaatctgaatgtt

SEQ ID NO: 832308 - DNA, 15 bp, Homo sapiens
taaaaatctgaatgt

SEQ ID NO: 832309 - DNA, 15 bp, Homo sapiens
ataaaaatctgaatg

SEQ ID NO: 832310 - DNA, 15 bp, Homo sapiens
aataaaaatctgaat

SEQ ID NO: 832311 - DNA, 15 bp, Homo sapiens
aaataaaaatctgaa

SEQ ID NO: 832312 - DNA, 15 bp, Homo sapiens
gaaataaaaatctga

SEQ ID NO: 832313 - DNA, 15 bp, Homo sapiens
tgaaataaaaatctg

SEQ ID NO: 832314 - DNA, 15 bp, Homo sapiens
ttgaaataaaaatct

SEQ ID NO: 832315 - DNA, 15 bp, Homo sapiens
tttgaaataaaaatc

SEQ ID NO: 832316 - DNA, 15 bp, Homo sapiens
ctttgaaataaaaat

SEQ ID NO: 832317 - DNA, 15 bp, Homo sapiens
actttgaaataaaaa

SEQ ID NO: 832318 - DNA, 15 bp, Homo sapiens
tactttgaaataaaa

SEQ ID NO: 832319 - DNA, 15 bp, Homo sapiens
atactttgaaataaa

SEQ ID NO: 832320 - DNA, 15 bp, Homo sapiens
gatactttgaaataa

SEQ ID NO: 832321 - DNA, 15 bp, Homo sapiens
ggatactttgaaata

SEQ ID NO: 832322 - DNA, 15 bp, Homo sapiens
gggatactttgaaat

SEQ ID NO: 832323 - DNA, 15 bp, Homo sapiens
agggatactttgaaa

SEQ ID NO: 832324 - DNA, 15 bp, Homo sapiens
cagggatactttgaa

SEQ ID NO: 832325 - DNA, 15 bp, Homo sapiens
tcagggatactttga

SEQ ID NO: 832326 - DNA, 15 bp, Homo sapiens
ctcagggatactttg

SEQ ID NO: 832327 - DNA, 15 bp, Homo sapiens
actcagggatacttt

SEQ ID NO: 832328 - DNA, 15 bp, Homo sapiens
gactcagggatactt

SEQ ID NO: 832329 - DNA, 15 bp, Homo sapiens
ggactcagggatact

SEQ ID NO: 832330 - DNA, 15 bp, Homo sapiens
gggactcagggatac

SEQ ID NO: 832331 - DNA, 15 bp, Homo sapiens
agggactcagggata

SEQ ID NO: 832332 - DNA, 15 bp, Homo sapiens
cagggactcagggat

SEQ ID NO: 832333 - DNA, 15 bp, Homo sapiens
acagggactcaggga

SEQ ID NO: 832334 - DNA, 15 bp, Homo sapiens
aacagggactcaggg

SEQ ID NO: 832335 - DNA, 15 bp, Homo sapiens
gaacagggactcagg

SEQ ID NO: 832336 - DNA, 15 bp, Homo sapiens
ggaacagggactcag

SEQ ID NO: 832337 - DNA, 15 bp, Homo sapiens
gggaacagggactca

SEQ ID NO: 832338 - DNA, 15 bp, Homo sapiens
agggaacagggactc

SEQ ID NO: 832339 - DNA, 15 bp, Homo sapiens
aagggaacagggact

SEQ ID NO: 832340 - DNA, 15 bp, Homo sapiens
aaagggaacagggac

SEQ ID NO: 832341 - DNA, 15 bp, Homo sapiens
aaaagggaacaggga

SEQ ID NO: 832342 - DNA, 15 bp, Homo sapiens
aaaaagggaacaggg

SEQ ID NO: 832343 - DNA, 15 bp, Homo sapiens
aaaaaagggaacagg

SEQ ID NO: 832344 - DNA, 15 bp, Homo sapiens
caaaaaagggaacag

SEQ ID NO: 832345 - DNA, 15 bp, Homo sapiens
acaaaaaagggaaca

SEQ ID NO: 832346 - DNA, 15 bp, Homo sapiens
gacaaaaaagggaac

SEQ ID NO: 832347 - DNA, 15 bp, Homo sapiens
ggacaaaaaagggaa

SEQ ID NO: 832348 - DNA, 15 bp, Homo sapiens
aggacaaaaaaggga

SEQ ID NO: 832349 - DNA, 15 bp, Homo sapiens
caggacaaaaaaggg

SEQ ID NO: 832350 - DNA, 15 bp, Homo sapiens
gcaggacaaaaaagg

SEQ ID NO: 832351 - DNA, 15 bp, Homo sapiens
agcaggacaaaaaag

SEQ ID NO: 832352 - DNA, 15 bp, Homo sapiens
cagcaggacaaaaaa

SEQ ID NO: 832353 - DNA, 15 bp, Homo sapiens
tcagcaggacaaaaa

SEQ ID NO: 832354 - DNA, 15 bp, Homo sapiens
gtcagcaggacaaaa

SEQ ID NO: 832355 - DNA, 15 bp, Homo sapiens
agtcagcaggacaaa

SEQ ID NO: 832356 - DNA, 15 bp, Homo sapiens
aagtcagcaggacaa

SEQ ID NO: 832357 - DNA, 15 bp, Homo sapiens
aaagtcagcaggaca

SEQ ID NO: 832358 - DNA, 15 bp, Homo sapiens
aaaagtcagcaggac

SEQ ID NO: 832359 - DNA, 15 bp, Homo sapiens
caaaagtcagcagga

SEQ ID NO: 832360 - DNA, 15 bp, Homo sapiens
ccaaaagtcagcagg

SEQ ID NO: 832361 - DNA, 15 bp, Homo sapiens
tccaaaagtcagcag

SEQ ID NO: 832362 - DNA, 15 bp, Homo sapiens
ttccaaaagtcagca

SEQ ID NO: 832363 - DNA, 15 bp, Homo sapiens
gttccaaaagtcagc

SEQ ID NO: 832364 - DNA, 15 bp, Homo sapiens
agttccaaaagtcag

SEQ ID NO: 832365 - DNA, 15 bp, Homo sapiens
cagttccaaaagtca

SEQ ID NO: 832366 - DNA, 15 bp, Homo sapiens
tcagttccaaaagtc

SEQ ID NO: 832367 - DNA, 15 bp, Homo sapiens
atcagttccaaaagt

SEQ ID NO: 832368 - DNA, 15 bp, Homo sapiens
aatcagttccaaaag

SEQ ID NO: 832369 - DNA, 15 bp, Homo sapiens
aaatcagttccaaaa

SEQ ID NO: 832370 - DNA, 15 bp, Homo sapiens
taaatcagttccaaa

SEQ ID NO: 832371 - DNA, 15 bp, Homo sapiens
ctaaatcagttccaa

SEQ ID NO: 832372 - DNA, 15 bp, Homo sapiens
cctaaatcagttcca

SEQ ID NO: 832373 - DNA, 15 bp, Homo sapiens
gcctaaatcagttcc

SEQ ID NO: 832374 - DNA, 15 bp, Homo sapiens
agcctaaatcagttc

SEQ ID NO: 832375 - DNA, 15 bp, Homo sapiens
aagcctaaatcagtt

SEQ ID NO: 832376 - DNA, 15 bp, Homo sapiens
gaagcctaaatcagt

SEQ ID NO: 832377 - DNA, 15 bp, Homo sapiens
ggaagcctaaatcag

SEQ ID NO: 832378 - DNA, 15 bp, Homo sapiens
aggaagcctaaatca

SEQ ID NO: 832379 - DNA, 15 bp, Homo sapiens
aaggaagcctaaatc

SEQ ID NO: 832380 - DNA, 15 bp, Homo sapiens
taaggaagcctaaat

SEQ ID NO: 832381 - DNA, 15 bp, Homo sapiens
ctaaggaagcctaaa

SEQ ID NO: 832382 - DNA, 15 bp, Homo sapiens
actaaggaagcctaa

SEQ ID NO: 832383 - DNA, 15 bp, Homo sapiens
gactaaggaagccta

SEQ ID NO: 832384 - DNA, 15 bp, Homo sapiens
tgactaaggaagcct

SEQ ID NO: 832385 - DNA, 15 bp, Homo sapiens
atgactaaggaagcc

SEQ ID NO: 832386 - DNA, 15 bp, Homo sapiens
gatgactaaggaagc

SEQ ID NO: 832387 - DNA, 15 bp, Homo sapiens
agatgactaaggaag

SEQ ID NO: 832388 - DNA, 15 bp, Homo sapiens
gagatgactaaggaa

SEQ ID NO: 832389 - DNA, 15 bp, Homo sapiens
tgagatgactaagga

SEQ ID NO: 832390 - DNA, 15 bp, Homo sapiens
atgagatgactaagg

SEQ ID NO: 832391 - DNA, 15 bp, Homo sapiens
tatgagatgactaag

SEQ ID NO: 832392 - DNA, 15 bp, Homo sapiens
ttatgagatgactaa

SEQ ID NO: 832393 - DNA, 15 bp, Homo sapiens
attatgagatgacta

SEQ ID NO: 832394 - DNA, 15 bp, Homo sapiens
tattatgagatgact

SEQ ID NO: 832395 - DNA, 15 bp, Homo sapiens
ctattatgagatgac

SEQ ID NO: 832396 - DNA, 15 bp, Homo sapiens
tctattatgagatga

SEQ ID NO: 832397 - DNA, 15 bp, Homo sapiens
ttctattatgagatg

SEQ ID NO: 832398 - DNA, 15 bp, Homo sapiens
tttctattatgagat

SEQ ID NO: 832399 - DNA, 15 bp, Homo sapiens
ttttctattatgaga

SEQ ID NO: 832400 - DNA, 15 bp, Homo sapiens
tttttctattatgag

SEQ ID NO: 832401 - DNA, 15 bp, Homo sapiens
ttttttctattatga

SEQ ID NO: 832402 - DNA, 15 bp, Homo sapiens
attttttctattatg

SEQ ID NO: 832403 - DNA, 15 bp, Homo sapiens
gattttttctattat

SEQ ID NO: 832404 - DNA, 15 bp, Homo sapiens
tgattttttctatta

SEQ ID NO: 832405 - DNA, 15 bp, Homo sapiens
ctgattttttctatt

SEQ ID NO: 832406 - DNA, 15 bp, Homo sapiens
gctgattttttctat

SEQ ID NO: 832407 - DNA, 15 bp, Homo sapiens
ggctgattttttcta

SEQ ID NO: 832408 - DNA, 15 bp, Homo sapiens
tggctgattttttct

SEQ ID NO: 832409 - DNA, 15 bp, Homo sapiens
ctggctgattttttc

SEQ ID NO: 832410 - DNA, 15 bp, Homo sapiens
cctggctgatttttt

SEQ ID NO: 832411 - DNA, 15 bp, Homo sapiens
tacctggctgatttt

SEQ ID NO: 832412 - DNA, 15 bp, Homo sapiens
atacctggctgattt

SEQ ID NO: 832413 - DNA, 15 bp, Homo sapiens
aatacctggctgatt

SEQ ID NO: 832414 - DNA, 15 bp, Homo sapiens
aaatacctggctgat

SEQ ID NO: 832415 - DNA, 15 bp, Homo sapiens
gaaatacctggctga

SEQ ID NO: 832416 - DNA, 15 bp, Homo sapiens
ggaaatacctggctg

SEQ ID NO: 832417 - DNA, 15 bp, Homo sapiens
aggaaatacctggct

SEQ ID NO: 832418 - DNA, 15 bp, Homo sapiens
taggaaatacctggc

SEQ ID NO: 832419 - DNA, 15 bp, Homo sapiens
gtaggaaatacctgg

SEQ ID NO: 832420 - DNA, 15 bp, Homo sapiens
tgtaggaaatacctg

SEQ ID NO: 832421 - DNA, 15 bp, Homo sapiens
atgtaggaaatacct

SEQ ID NO: 832422 - DNA, 15 bp, Homo sapiens
aatgtaggaaatacc

SEQ ID NO: 832423 - DNA, 15 bp, Homo sapiens
aaatgtaggaaatac

SEQ ID NO: 832424 - DNA, 15 bp, Homo sapiens
gaaatgtaggaaata

SEQ ID NO: 832425 - DNA, 15 bp, Homo sapiens
agaaatgtaggaaat

SEQ ID NO: 832426 - DNA, 15 bp, Homo sapiens
aagaaatgtaggaaa

SEQ ID NO: 832427 - DNA, 15 bp, Homo sapiens
caagaaatgtaggaa

SEQ ID NO: 832428 - DNA, 15 bp, Homo sapiens
acaagaaatgtagga

SEQ ID NO: 832429 - DNA, 15 bp, Homo sapiens
tacaagaaatgtagg

SEQ ID NO: 832430 - DNA, 15 bp, Homo sapiens
atacaagaaatgtag

SEQ ID NO: 832431 - DNA, 15 bp, Homo sapiens
aatacaagaaatgta

SEQ ID NO: 832432 - DNA, 15 bp, Homo sapiens
aaatacaagaaatgt

SEQ ID NO: 832433 - DNA, 15 bp, Homo sapiens
aaaatacaagaaatg

SEQ ID NO: 832434 - DNA, 15 bp, Homo sapiens
taaaatacaagaaat

SEQ ID NO: 832435 - DNA, 15 bp, Homo sapiens
ttaaaatacaagaaa

SEQ ID NO: 832436 - DNA, 15 bp, Homo sapiens
tttaaaatacaagaa

SEQ ID NO: 832437 - DNA, 15 bp, Homo sapiens
ttttaaaatacaaga

SEQ ID NO: 832438 - DNA, 15 bp, Homo sapiens
tttttaaaatacaag

SEQ ID NO: 832439 - DNA, 15 bp, Homo sapiens
ttttttaaaatacaa

SEQ ID NO: 832440 - DNA, 15 bp, Homo sapiens
tttttttaaaataca

SEQ ID NO: 832441 - DNA, 15 bp, Homo sapiens
atttttttaaaatac

SEQ ID NO: 832442 - DNA, 15 bp, Homo sapiens
catttttttaaaata

SEQ ID NO: 832443 - DNA, 15 bp, Homo sapiens
acatttttttaaaat

SEQ ID NO: 832444 - DNA, 15 bp, Homo sapiens
tacatttttttaaaa

SEQ ID NO: 832445 - DNA, 15 bp, Homo sapiens
ttacatttttttaaa

SEQ ID NO: 832446 - DNA, 15 bp, Homo sapiens
attacatttttttaa

SEQ ID NO: 832447 - DNA, 15 bp, Homo sapiens
cattacattttttta

SEQ ID NO: 832448 - DNA, 15 bp, Homo sapiens
ccattacattttttt

SEQ ID NO: 832449 - DNA, 15 bp, Homo sapiens
tccattacatttttt

SEQ ID NO: 832450 - DNA, 15 bp, Homo sapiens
atccattacattttt

SEQ ID NO: 832451 - DNA, 15 bp, Homo sapiens
catccattacatttt

SEQ ID NO: 832452 - DNA, 15 bp, Homo sapiens
acatccattacattt

SEQ ID NO: 832453 - DNA, 15 bp, Homo sapiens
tacatccattacatt

SEQ ID NO: 832454 - DNA, 15 bp, Homo sapiens
ttacatccattacat

SEQ ID NO: 832455 - DNA, 15 bp, Homo sapiens
attacatccattaca

SEQ ID NO: 832456 - DNA, 15 bp, Homo sapiens
cattacatccattac

SEQ ID NO: 832457 - DNA, 15 bp, Homo sapiens
tcattacatccatta

SEQ ID NO: 832458 - DNA, 15 bp, Homo sapiens
ttcattacatccatt

SEQ ID NO: 832459 - DNA, 15 bp, Homo sapiens
attcattacatccat

SEQ ID NO: 832460 - DNA, 15 bp, Homo sapiens
aattcattacatcca

SEQ ID NO: 832461 - DNA, 15 bp, Homo sapiens
aaattcattacatcc

SEQ ID NO: 832462 - DNA, 15 bp, Homo sapiens
aaaattcattacatc

SEQ ID NO: 832463 - DNA, 15 bp, Homo sapiens
taaaattcattacat

SEQ ID NO: 832464 - DNA, 15 bp, Homo sapiens
ttaaaattcattaca

SEQ ID NO: 832465 - DNA, 15 bp, Homo sapiens
cttaaaattcattac

SEQ ID NO: 832466 - DNA, 15 bp, Homo sapiens
gcttaaaattcatta

SEQ ID NO: 832467 - DNA, 15 bp, Homo sapiens
tgcttaaaattcatt

SEQ ID NO: 832468 - DNA, 15 bp, Homo sapiens
ttgcttaaaattcat

SEQ ID NO: 832469 - DNA, 15 bp, Homo sapiens
tttgcttaaaattca

SEQ ID NO: 832470 - DNA, 15 bp, Homo sapiens
atttgcttaaaattc

SEQ ID NO: 832471 - DNA, 15 bp, Homo sapiens
catttgcttaaaatt

SEQ ID NO: 832472 - DNA, 15 bp, Homo sapiens
acatttgcttaaaat

SEQ ID NO: 832473 - DNA, 15 bp, Homo sapiens
tacatttgcttaaaa

SEQ ID NO: 832474 - DNA, 15 bp, Homo sapiens
ttacatttgcttaaa

SEQ ID NO: 832475 - DNA, 15 bp, Homo sapiens
attacatttgcttaa

SEQ ID NO: 832476 - DNA, 15 bp, Homo sapiens
cattacatttgctta

SEQ ID NO: 832477 - DNA, 15 bp, Homo sapiens
tcattacatttgctt

SEQ ID NO: 832478 - DNA, 15 bp, Homo sapiens
ttcattacatttgct

SEQ ID NO: 832479 - DNA, 15 bp, Homo sapiens
attcattacatttgc

SEQ ID NO: 832480 - DNA, 15 bp, Homo sapiens
tattcattacatttg

SEQ ID NO: 832481 - DNA, 15 bp, Homo sapiens
gtattcattacattt

SEQ ID NO: 832482 - DNA, 15 bp, Homo sapiens
tgtattcattacatt

SEQ ID NO: 832483 - DNA, 15 bp, Homo sapiens
ttgtattcattacat

SEQ ID NO: 832484 - DNA, 15 bp, Homo sapiens
attgtattcattaca

SEQ ID NO: 832485 - DNA, 15 bp, Homo sapiens
tattgtattcattac

SEQ ID NO: 832486 - DNA, 15 bp, Homo sapiens
ttattgtattcatta

SEQ ID NO: 832487 - DNA, 15 bp, Homo sapiens
cttattgtattcatt

SEQ ID NO: 832488 - DNA, 15 bp, Homo sapiens
acttattgtattcat

SEQ ID NO: 832489 - DNA, 15 bp, Homo sapiens
tacttattgtattca

SEQ ID NO: 832490 - DNA, 15 bp, Homo sapiens
ttacttattgtattc

SEQ ID NO: 832491 - DNA, 15 bp, Homo sapiens
gttacttattgtatt

SEQ ID NO: 832492 - DNA, 15 bp, Homo sapiens
agttacttattgtat

SEQ ID NO: 832493 - DNA, 15 bp, Homo sapiens
aagttacttattgta

SEQ ID NO: 832494 - DNA, 15 bp, Homo sapiens
taagttacttattgt

SEQ ID NO: 832495 - DNA, 15 bp, Homo sapiens
ctaagttacttattg

SEQ ID NO: 832496 - DNA, 15 bp, Homo sapiens
actaagttacttatt

SEQ ID NO: 832497 - DNA, 15 bp, Homo sapiens
tactaagttacttat

SEQ ID NO: 832498 - DNA, 15 bp, Homo sapiens
atactaagttactta

SEQ ID NO: 832499 - DNA, 15 bp, Homo sapiens
tatactaagttactt

SEQ ID NO: 832500 - DNA, 15 bp, Homo sapiens
atatactaagttact

SEQ ID NO: 832501 - DNA, 15 bp, Homo sapiens
catatactaagttac

SEQ ID NO: 832502 - DNA, 15 bp, Homo sapiens
gcatatactaagtta

SEQ ID NO: 832503 - DNA, 15 bp, Homo sapiens
agcatatactaagtt

SEQ ID NO: 832504 - DNA, 15 bp, Homo sapiens
cagcatatactaagt

SEQ ID NO: 832505 - DNA, 15 bp, Homo sapiens
acagcatatactaag

SEQ ID NO: 832506 - DNA, 15 bp, Homo sapiens
aacagcatatactaa

SEQ ID NO: 832507 - DNA, 15 bp, Homo sapiens
aaacagcatatacta

SEQ ID NO: 832508 - DNA, 15 bp, Homo sapiens
aaaacagcatatact

SEQ ID NO: 832509 - DNA, 15 bp, Homo sapiens
gaaaacagcatatac

SEQ ID NO: 832510 - DNA, 15 bp, Homo sapiens
agaaaacagcatata

SEQ ID NO: 832511 - DNA, 15 bp, Homo sapiens
aagaaaacagcatat

SEQ ID NO: 832512 - DNA, 15 bp, Homo sapiens
gaagaaaacagcata

SEQ ID NO: 832513 - DNA, 15 bp, Homo sapiens
agaagaaaacagcat

SEQ ID NO: 832514 - DNA, 15 bp, Homo sapiens
gagaagaaaacagca

SEQ ID NO: 832515 - DNA, 15 bp, Homo sapiens
agagaagaaaacagc

SEQ ID NO: 832516 - DNA, 15 bp, Homo sapiens
tagagaagaaaacag

SEQ ID NO: 832517 - DNA, 15 bp, Homo sapiens
atagagaagaaaaca

SEQ ID NO: 832518 - DNA, 15 bp, Homo sapiens
catagagaagaaaac

SEQ ID NO: 832519 - DNA, 15 bp, Homo sapiens
gcatagagaagaaaa

SEQ ID NO: 832520 - DNA, 15 bp, Homo sapiens
agcatagagaagaaa

SEQ ID NO: 832521 - DNA, 15 bp, Homo sapiens
cagcatagagaagaa

SEQ ID NO: 832522 - DNA, 15 bp, Homo sapiens
tcagcatagagaaga

SEQ ID NO: 832523 - DNA, 15 bp, Homo sapiens
ttcagcatagagaag

SEQ ID NO: 832524 - DNA, 15 bp, Homo sapiens
attcagcatagagaa

SEQ ID NO: 832525 - DNA, 15 bp, Homo sapiens
cattcagcatagaga

SEQ ID NO: 832526 - DNA, 15 bp, Homo sapiens
acattcagcatagag

SEQ ID NO: 832527 - DNA, 15 bp, Homo sapiens
aacattcagcataga

SEQ ID NO: 832528 - DNA, 15 bp, Homo sapiens
aaacattcagcatag

SEQ ID NO: 832529 - DNA, 15 bp, Homo sapiens
gaaacattcagcata

SEQ ID NO: 832530 - DNA, 15 bp, Homo sapiens
tgaaacattcagcat

SEQ ID NO: 832531 - DNA, 15 bp, Homo sapiens
atgaaacattcagca

SEQ ID NO: 832532 - DNA, 15 bp, Homo sapiens
tatgaaacattcagc

SEQ ID NO: 832533 - DNA, 15 bp, Homo sapiens
gtatgaaacattcag

SEQ ID NO: 832534 - DNA, 15 bp, Homo sapiens
tgtatgaaacattca

SEQ ID NO: 832535 - DNA, 15 bp, Homo sapiens
atgtatgaaacattc

SEQ ID NO: 832536 - DNA, 15 bp, Homo sapiens
catgtatgaaacatt

SEQ ID NO: 832537 - DNA, 15 bp, Homo sapiens
acatgtatgaaacat

SEQ ID NO: 832538 - DNA, 15 bp, Homo sapiens
aacatgtatgaaaca

SEQ ID NO: 832539 - DNA, 15 bp, Homo sapiens
taacatgtatgaaac

SEQ ID NO: 832540 - DNA, 15 bp, Homo sapiens
ataacatgtatgaaa

SEQ ID NO: 832541 - DNA, 15 bp, Homo sapiens
aataacatgtatgaa

SEQ ID NO: 832542 - DNA, 15 bp, Homo sapiens
aaataacatgtatga

SEQ ID NO: 832543 - DNA, 15 bp, Homo sapiens
aaaataacatgtatg

SEQ ID NO: 832544 - DNA, 15 bp, Homo sapiens
gaaaataacatgtat

SEQ ID NO: 832545 - DNA, 15 bp, Homo sapiens
agaaaataacatgta

SEQ ID NO: 832546 - DNA, 15 bp, Homo sapiens
tagaaaataacatgt

SEQ ID NO: 832547 - DNA, 15 bp, Homo sapiens
atagaaaataacatg

SEQ ID NO: 832548 - DNA, 15 bp, Homo sapiens
tatagaaaataacat

SEQ ID NO: 832549 - DNA, 15 bp, Homo sapiens
gtatagaaaataaca

SEQ ID NO: 832550 - DNA, 15 bp, Homo sapiens
tgtatagaaaataac

SEQ ID NO: 832551 - DNA, 15 bp, Homo sapiens
ttgtatagaaaataa

SEQ ID NO: 832552 - DNA, 15 bp, Homo sapiens
gttgtatagaaaata

SEQ ID NO: 832553 - DNA, 15 bp, Homo sapiens
agttgtatagaaaat

SEQ ID NO: 832554 - DNA, 15 bp, Homo sapiens
tagttgtatagaaaa

SEQ ID NO: 832555 - DNA, 15 bp, Homo sapiens
gtagttgtatagaaa

SEQ ID NO: 832556 - DNA, 15 bp, Homo sapiens
tgtagttgtatagaa

SEQ ID NO: 832557 - DNA, 15 bp, Homo sapiens
atgtagttgtataga

SEQ ID NO: 832558 - DNA, 15 bp, Homo sapiens
catgtagttgtatag

SEQ ID NO: 832559 - DNA, 15 bp, Homo sapiens
ccatgtagttgtata

SEQ ID NO: 832560 - DNA, 15 bp, Homo sapiens
accatgtagttgtat

SEQ ID NO: 832561 - DNA, 15 bp, Homo sapiens
gaccatgtagttgta

SEQ ID NO: 832562 - DNA, 15 bp, Homo sapiens
tgaccatgtagttgt

SEQ ID NO: 832563 - DNA, 15 bp, Homo sapiens
ttgaccatgtagttg

SEQ ID NO: 832564 - DNA, 15 bp, Homo sapiens
attgaccatgtagtt

SEQ ID NO: 832565 - DNA, 15 bp, Homo sapiens
aattgaccatgtagt

SEQ ID NO: 832566 - DNA, 15 bp, Homo sapiens
gaattgaccatgtag

SEQ ID NO: 832567 - DNA, 15 bp, Homo sapiens
ggaattgaccatgta

SEQ ID NO: 832568 - DNA, 15 bp, Homo sapiens
aggaattgaccatgt

SEQ ID NO: 832569 - DNA, 15 bp, Homo sapiens
aaggaattgaccatg

SEQ ID NO: 832570 - DNA, 15 bp, Homo sapiens
caaggaattgaccat

SEQ ID NO: 832571 - DNA, 15 bp, Homo sapiens
tcaaggaattgacca

SEQ ID NO: 832572 - DNA, 15 bp, Homo sapiens
ttcaaggaattgacc

SEQ ID NO: 832573 - DNA, 15 bp, Homo sapiens
tttcaaggaattgac

SEQ ID NO: 832574 - DNA, 15 bp, Homo sapiens
ttttcaaggaattga

SEQ ID NO: 832575 - DNA, 15 bp, Homo sapiens
attttcaaggaattg

SEQ ID NO: 832576 - DNA, 15 bp, Homo sapiens
tattttcaaggaatt

SEQ ID NO: 832577 - DNA, 15 bp, Homo sapiens
atattttcaaggaat

SEQ ID NO: 832578 - DNA, 15 bp, Homo sapiens
gatattttcaaggaa

SEQ ID NO: 832579 - DNA, 15 bp, Homo sapiens
tgatattttcaagga

SEQ ID NO: 832580 - DNA, 15 bp, Homo sapiens
ttgatattttcaagg

SEQ ID NO: 832581 - DNA, 15 bp, Homo sapiens
gttgatattttcaag

SEQ ID NO: 832582 - DNA, 15 bp, Homo sapiens
agttgatattttcaa

SEQ ID NO: 832583 - DNA, 15 bp, Homo sapiens
gagttgatattttca

SEQ ID NO: 832584 - DNA, 15 bp, Homo sapiens
ggagttgatattttc

SEQ ID NO: 832585 - DNA, 15 bp, Homo sapiens
tggagttgatatttt

SEQ ID NO: 832586 - DNA, 15 bp, Homo sapiens
ttggagttgatattt

SEQ ID NO: 832587 - DNA, 15 bp, Homo sapiens
tttggagttgatatt

SEQ ID NO: 832588 - DNA, 15 bp, Homo sapiens
ttttggagttgatat

SEQ ID NO: 832589 - DNA, 15 bp, Homo sapiens
attttggagttgata

SEQ ID NO: 832590 - DNA, 15 bp, Homo sapiens
gattttggagttgat

SEQ ID NO: 832591 - DNA, 15 bp, Homo sapiens
agattttggagttga

SEQ ID NO: 832592 - DNA, 15 bp, Homo sapiens
aagattttggagttg

SEQ ID NO: 832593 - DNA, 15 bp, Homo sapiens
aaagattttggagtt

SEQ ID NO: 832594 - DNA, 15 bp, Homo sapiens
taaagattttggagt

SEQ ID NO: 832595 - DNA, 15 bp, Homo sapiens
ataaagattttggag

SEQ ID NO: 832596 - DNA, 15 bp, Homo sapiens
aataaagattttgga

SEQ ID NO: 832597 - DNA, 15 bp, Homo sapiens
aaataaagattttgg

SEQ ID NO: 832598 - DNA, 15 bp, Homo sapiens
aaaataaagattttg

SEQ ID NO: 832599 - DNA, 15 bp, Homo sapiens
caaaataaagatttt

SEQ ID NO: 832600 - DNA, 15 bp, Homo sapiens
ccaaaataaagattt

SEQ ID NO: 832601 - DNA, 15 bp, Homo sapiens
accaaaataaagatt

SEQ ID NO: 832602 - DNA, 15 bp, Homo sapiens
taccaaaataaagat

SEQ ID NO: 832603 - DNA, 15 bp, Homo sapiens
ataccaaaataaaga

SEQ ID NO: 832604 - DNA, 15 bp, Homo sapiens
tataccaaaataaag

SEQ ID NO: 832605 - DNA, 15 bp, Homo sapiens
gtataccaaaataaa

SEQ ID NO: 832606 - DNA, 15 bp, Homo sapiens
agtataccaaaataa

SEQ ID NO: 832607 - DNA, 15 bp, Homo sapiens
gagtataccaaaata

SEQ ID NO: 832608 - DNA, 15 bp, Homo sapiens
ggagtataccaaaat

SEQ ID NO: 832609 - DNA, 15 bp, Homo sapiens
tggagtataccaaaa

SEQ ID NO: 832610 - DNA, 15 bp, Homo sapiens
gtggagtataccaaa

SEQ ID NO: 832611 - DNA, 15 bp, Homo sapiens
cgtggagtataccaa

SEQ ID NO: 832612 - DNA, 15 bp, Homo sapiens
acgtggagtatacca

SEQ ID NO: 832613 - DNA, 15 bp, Homo sapiens
tacgtggagtatacc

SEQ ID NO: 832614 - DNA, 15 bp, Homo sapiens
ctacgtggagtatac

SEQ ID NO: 832615 - DNA, 15 bp, Homo sapiens
gctacgtggagtata

SEQ ID NO: 832616 - DNA, 15 bp, Homo sapiens
tgctacgtggagtat

SEQ ID NO: 832617 - DNA, 15 bp, Homo sapiens
gtgctacgtggagta

SEQ ID NO: 832618 - DNA, 15 bp, Homo sapiens
tgtgctacgtggagt

SEQ ID NO: 832619 - DNA, 15 bp, Homo sapiens
atgtgctacgtggag

SEQ ID NO: 832620 - DNA, 15 bp, Homo sapiens
aatgtgctacgtgga

SEQ ID NO: 832621 - DNA, 15 bp, Homo sapiens
caatgtgctacgtgg

SEQ ID NO: 832622 - DNA, 15 bp, Homo sapiens
tcaatgtgctacgtg

SEQ ID NO: 832623 - DNA, 15 bp, Homo sapiens
ctcaatgtgctacgt

SEQ ID NO: 832624 - DNA, 15 bp, Homo sapiens
tctcaatgtgctacg

SEQ ID NO: 832625 - DNA, 15 bp, Homo sapiens
ctctcaatgtgctac

SEQ ID NO: 832626 - DNA, 15 bp, Homo sapiens
tctctcaatgtgcta

SEQ ID NO: 832627 - DNA, 15 bp, Homo sapiens
ctctctcaatgtgct

SEQ ID NO: 832628 - DNA, 15 bp, Homo sapiens
actctctcaatgtgc

SEQ ID NO: 832629 - DNA, 15 bp, Homo sapiens
aactctctcaatgtg

SEQ ID NO: 832630 - DNA, 15 bp, Homo sapiens
aaactctctcaatgt

SEQ ID NO: 832631 - DNA, 15 bp, Homo sapiens
aaaactctctcaatg

SEQ ID NO: 832632 - DNA, 15 bp, Homo sapiens
taaaactctctcaat

SEQ ID NO: 832633 - DNA, 15 bp, Homo sapiens
ttaaaactctctcaa

SEQ ID NO: 832634 - DNA, 15 bp, Homo sapiens
tttaaaactctctca

SEQ ID NO: 832635 - DNA, 15 bp, Homo sapiens
gtttaaaactctctc

SEQ ID NO: 832636 - DNA, 15 bp, Homo sapiens
agtttaaaactctct

SEQ ID NO: 832637 - DNA, 15 bp, Homo sapiens
gagtttaaaactctc

SEQ ID NO: 832638 - DNA, 15 bp, Homo sapiens
agagtttaaaactct

SEQ ID NO: 832639 - DNA, 15 bp, Homo sapiens
aagagtttaaaactc

SEQ ID NO: 832640 - DNA, 15 bp, Homo sapiens
caagagtttaaaact

SEQ ID NO: 832641 - DNA, 15 bp, Homo sapiens
acaagagtttaaaac

SEQ ID NO: 832642 - DNA, 15 bp, Homo sapiens
aacaagagtttaaaa

SEQ ID NO: 832643 - DNA, 15 bp, Homo sapiens
caacaagagtttaaa

SEQ ID NO: 832644 - DNA, 15 bp, Homo sapiens
ccaacaagagtttaa

SEQ ID NO: 832645 - DNA, 15 bp, Homo sapiens
tccaacaagagttta

SEQ ID NO: 832646 - DNA, 15 bp, Homo sapiens
atccaacaagagttt

SEQ ID NO: 832647 - DNA, 15 bp, Homo sapiens
catccaacaagagtt

SEQ ID NO: 832648 - DNA, 15 bp, Homo sapiens
tcatccaacaagagt

SEQ ID NO: 832649 - DNA, 15 bp, Homo sapiens
gtcatccaacaagag

SEQ ID NO: 832650 - DNA, 15 bp, Homo sapiens
agtcatccaacaaga

SEQ ID NO: 832651 - DNA, 15 bp, Homo sapiens
cagtcatccaacaag

SEQ ID NO: 832652 - DNA, 15 bp, Homo sapiens
acagtcatccaacaa

SEQ ID NO: 832653 - DNA, 15 bp, Homo sapiens
aacagtcatccaaca

SEQ ID NO: 832654 - DNA, 15 bp, Homo sapiens
aaacagtcatccaac

SEQ ID NO: 832655 - DNA, 15 bp, Homo sapiens
gaaacagtcatccaa

SEQ ID NO: 832656 - DNA, 15 bp, Homo sapiens
tgaaacagtcatcca

SEQ ID NO: 832657 - DNA, 15 bp, Homo sapiens
ttgaaacagtcatcc

SEQ ID NO: 832658 - DNA, 15 bp, Homo sapiens
tttgaaacagtcatc

SEQ ID NO: 832659 - DNA, 15 bp, Homo sapiens
ttttgaaacagtcat

SEQ ID NO: 832660 - DNA, 15 bp, Homo sapiens
cttttgaaacagtca

SEQ ID NO: 832661 - DNA, 15 bp, Homo sapiens
acttttgaaacagtc

SEQ ID NO: 832662 - DNA, 15 bp, Homo sapiens
cacttttgaaacagt

SEQ ID NO: 832663 - DNA, 15 bp, Homo sapiens
acacttttgaaacag

SEQ ID NO: 832664 - DNA, 15 bp, Homo sapiens
aacacttttgaaaca

SEQ ID NO: 832665 - DNA, 15 bp, Homo sapiens
aaacacttttgaaac

SEQ ID NO: 832666 - DNA, 15 bp, Homo sapiens
aaaacacttttgaaa

SEQ ID NO: 832667 - DNA, 15 bp, Homo sapiens
caaaacacttttgaa

SEQ ID NO: 832668 - DNA, 15 bp, Homo sapiens
tcaaaacacttttga

SEQ ID NO: 832669 - DNA, 15 bp, Homo sapiens
ttcaaaacacttttg

SEQ ID NO: 832670 - DNA, 15 bp, Homo sapiens
cttcaaaacactttt

SEQ ID NO: 832671 - DNA, 15 bp, Homo sapiens
acttcaaaacacttt

SEQ ID NO: 832672 - DNA, 15 bp, Homo sapiens
tacttcaaaacactt

SEQ ID NO: 832673 - DNA, 15 bp, Homo sapiens
ctacttcaaaacact

SEQ ID NO: 832674 - DNA, 15 bp, Homo sapiens
cctacttcaaaacac

SEQ ID NO: 832675 - DNA, 15 bp, Homo sapiens
gcctacttcaaaaca

SEQ ID NO: 832676 - DNA, 15 bp, Homo sapiens
tgcctacttcaaaac

SEQ ID NO: 832677 - DNA, 15 bp, Homo sapiens
atgcctacttcaaaa

SEQ ID NO: 832678 - DNA, 15 bp, Homo sapiens
catgcctacttcaaa

SEQ ID NO: 832679 - DNA, 15 bp, Homo sapiens
acatgcctacttcaa

SEQ ID NO: 832680 - DNA, 15 bp, Homo sapiens
gacatgcctacttca

SEQ ID NO: 832681 - DNA, 15 bp, Homo sapiens
tgacatgcctacttc

SEQ ID NO: 832682 - DNA, 15 bp, Homo sapiens
ctgacatgcctactt

SEQ ID NO: 832683 - DNA, 15 bp, Homo sapiens
actgacatgcctact

SEQ ID NO: 832684 - DNA, 15 bp, Homo sapiens
aactgacatgcctac

SEQ ID NO: 832685 - DNA, 15 bp, Homo sapiens
caactgacatgccta

SEQ ID NO: 832686 - DNA, 15 bp, Homo sapiens
gcaactgacatgcct

SEQ ID NO: 832687 - DNA, 15 bp, Homo sapiens
tgcaactgacatgcc

SEQ ID NO: 832688 - DNA, 15 bp, Homo sapiens
ttgcaactgacatgc

SEQ ID NO: 832689 - DNA, 15 bp, Homo sapiens
tttgcaactgacatg

SEQ ID NO: 832690 - DNA, 15 bp, Homo sapiens
ttttgcaactgacat

SEQ ID NO: 832691 - DNA, 15 bp, Homo sapiens
tttttgcaactgaca

SEQ ID NO: 832692 - DNA, 15 bp, Homo sapiens
ctttttgcaactgac

SEQ ID NO: 832693 - DNA, 15 bp, Homo sapiens
actttttgcaactga

SEQ ID NO: 832694 - DNA, 15 bp, Homo sapiens
aactttttgcaactg

SEQ ID NO: 832695 - DNA, 15 bp, Homo sapiens
aaactttttgcaact

SEQ ID NO: 832696 - DNA, 15 bp, Homo sapiens
caaactttttgcaac

SEQ ID NO: 832697 - DNA, 15 bp, Homo sapiens
gcaaactttttgcaa

SEQ ID NO: 832698 - DNA, 15 bp, Homo sapiens
agcaaactttttgca

SEQ ID NO: 832699 - DNA, 15 bp, Homo sapiens
gagcaaactttttgc

SEQ ID NO: 832700 - DNA, 15 bp, Homo sapiens
tgagcaaactttttg

SEQ ID NO: 832701 - DNA, 15 bp, Homo sapiens
ctgagcaaacttttt

SEQ ID NO: 832702 - DNA, 15 bp, Homo sapiens
gctgagcaaactttt

SEQ ID NO: 832703 - DNA, 15 bp, Homo sapiens
tgctgagcaaacttt

SEQ ID NO: 832704 - DNA, 15 bp, Homo sapiens
ttgctgagcaaactt

SEQ ID NO: 832705 - DNA, 15 bp, Homo sapiens
tttgctgagcaaact

SEQ ID NO: 832706 - DNA, 15 bp, Homo sapiens
atttgctgagcaaac

SEQ ID NO: 832707 - DNA, 15 bp, Homo sapiens
catttgctgagcaaa

SEQ ID NO: 832708 - DNA, 15 bp, Homo sapiens
acatttgctgagcaa

SEQ ID NO: 832709 - DNA, 15 bp, Homo sapiens
aacatttgctgagca

SEQ ID NO: 832710 - DNA, 15 bp, Homo sapiens
caacatttgctgagc

SEQ ID NO: 832711 - DNA, 15 bp, Homo sapiens
acaacatttgctgag

SEQ ID NO: 832712 - DNA, 15 bp, Homo sapiens
aacaacatttgctga

SEQ ID NO: 832713 - DNA, 15 bp, Homo sapiens
gaacaacatttgctg

SEQ ID NO: 832714 - DNA, 15 bp, Homo sapiens
agaacaacatttgct

SEQ ID NO: 832715 - DNA, 15 bp, Homo sapiens
cagaacaacatttgc

SEQ ID NO: 832716 - DNA, 15 bp, Homo sapiens
acagaacaacatttg

SEQ ID NO: 832717 - DNA, 15 bp, Homo sapiens
gacagaacaacattt

SEQ ID NO: 832718 - DNA, 15 bp, Homo sapiens
agacagaacaacatt

SEQ ID NO: 832719 - DNA, 15 bp, Homo sapiens
gagacagaacaacat

SEQ ID NO: 832720 - DNA, 15 bp, Homo sapiens
tgagacagaacaaca

SEQ ID NO: 832721 - DNA, 15 bp, Homo sapiens
gtgagacagaacaac

SEQ ID NO: 832722 - DNA, 15 bp, Homo sapiens
tgtgagacagaacaa

SEQ ID NO: 832723 - DNA, 15 bp, Homo sapiens
ctgtgagacagaaca

SEQ ID NO: 832724 - DNA, 15 bp, Homo sapiens
actgtgagacagaac

SEQ ID NO: 832725 - DNA, 15 bp, Homo sapiens
gactgtgagacagaa

SEQ ID NO: 832726 - DNA, 15 bp, Homo sapiens
agactgtgagacaga

SEQ ID NO: 832727 - DNA, 15 bp, Homo sapiens
gagactgtgagacag

SEQ ID NO: 832728 - DNA, 15 bp, Homo sapiens
tgagactgtgagaca

SEQ ID NO: 832729 - DNA, 15 bp, Homo sapiens
ctgagactgtgagac

SEQ ID NO: 832730 - DNA, 15 bp, Homo sapiens
tctgagactgtgaga

SEQ ID NO: 832731 - DNA, 15 bp, Homo sapiens
gtctgagactgtgag

SEQ ID NO: 832732 - DNA, 15 bp, Homo sapiens
tgtctgagactgtga

SEQ ID NO: 832733 - DNA, 15 bp, Homo sapiens
atgtctgagactgtg

SEQ ID NO: 832734 - DNA, 15 bp, Homo sapiens
aatgtctgagactgt

SEQ ID NO: 832735 - DNA, 15 bp, Homo sapiens
caatgtctgagactg

SEQ ID NO: 832736 - DNA, 15 bp, Homo sapiens
tcaatgtctgagact

SEQ ID NO: 832737 - DNA, 15 bp, Homo sapiens
ctcaatgtctgagac

SEQ ID NO: 832738 - DNA, 15 bp, Homo sapiens
gctcaatgtctgaga

SEQ ID NO: 832739 - DNA, 15 bp, Homo sapiens
tgctcaatgtctgag

SEQ ID NO: 832740 - DNA, 15 bp, Homo sapiens
ctgctcaatgtctga

SEQ ID NO: 832741 - DNA, 15 bp, Homo sapiens
tctgctcaatgtctg

SEQ ID NO: 832742 - DNA, 15 bp, Homo sapiens
atctgctcaatgtct

SEQ ID NO: 832743 - DNA, 15 bp, Homo sapiens
catctgctcaatgtc

SEQ ID NO: 832744 - DNA, 15 bp, Homo sapiens
tcatctgctcaatgt

SEQ ID NO: 832745 - DNA, 15 bp, Homo sapiens
atcatctgctcaatg

SEQ ID NO: 832746 - DNA, 15 bp, Homo sapiens
aatcatctgctcaat

SEQ ID NO: 832747 - DNA, 15 bp, Homo sapiens
taatcatctgctcaa

SEQ ID NO: 832748 - DNA, 15 bp, Homo sapiens
gtaatcatctgctca

SEQ ID NO: 832749 - DNA, 15 bp, Homo sapiens
tgtaatcatctgctc

SEQ ID NO: 832750 - DNA, 15 bp, Homo sapiens
atgtaatcatctgct

SEQ ID NO: 832751 - DNA, 15 bp, Homo sapiens
catgtaatcatctgc

SEQ ID NO: 832752 - DNA, 15 bp, Homo sapiens
tcatgtaatcatctg

SEQ ID NO: 832753 - DNA, 15 bp, Homo sapiens
gtcatgtaatcatct

SEQ ID NO: 832754 - DNA, 15 bp, Homo sapiens
tgtcatgtaatcatc

SEQ ID NO: 832755 - DNA, 15 bp, Homo sapiens
ctgtcatgtaatcat

SEQ ID NO: 832756 - DNA, 15 bp, Homo sapiens
gctgtcatgtaatca

SEQ ID NO: 832757 - DNA, 15 bp, Homo sapiens
tgctgtcatgtaatc

SEQ ID NO: 832758 - DNA, 15 bp, Homo sapiens
gtgctgtcatgtaat

SEQ ID NO: 832759 - DNA, 15 bp, Homo sapiens
cgtgctgtcatgtaa

SEQ ID NO: 832760 - DNA, 15 bp, Homo sapiens
acgtgctgtcatgta

SEQ ID NO: 832761 - DNA, 15 bp, Homo sapiens
cacgtgctgtcatgt

SEQ ID NO: 832762 - DNA, 15 bp, Homo sapiens
tcacgtgctgtcatg

SEQ ID NO: 832763 - DNA, 15 bp, Homo sapiens
atcacgtgctgtcat

SEQ ID NO: 832764 - DNA, 15 bp, Homo sapiens
aatcacgtgctgtca

SEQ ID NO: 832765 - DNA, 15 bp, Homo sapiens
caatcacgtgctgtc

SEQ ID NO: 832766 - DNA, 15 bp, Homo sapiens
gcaatcacgtgctgt

SEQ ID NO: 832767 - DNA, 15 bp, Homo sapiens
agcaatcacgtgctg

SEQ ID NO: 832768 - DNA, 15 bp, Homo sapiens
cagcaatcacgtgct

SEQ ID NO: 832769 - DNA, 15 bp, Homo sapiens
ccagcaatcacgtgc

SEQ ID NO: 832770 - DNA, 15 bp, Homo sapiens
cccagcaatcacgtg

SEQ ID NO: 832771 - DNA, 15 bp, Homo sapiens
tcccagcaatcacgt

SEQ ID NO: 832772 - DNA, 15 bp, Homo sapiens
ctcccagcaatcacg

SEQ ID NO: 832773 - DNA, 15 bp, Homo sapiens
actcccagcaatcac

SEQ ID NO: 832774 - DNA, 15 bp, Homo sapiens
tactcccagcaatca

SEQ ID NO: 832775 - DNA, 15 bp, Homo sapiens
ttactcccagcaatc

SEQ ID NO: 832776 - DNA, 15 bp, Homo sapiens
gttactcccagcaat

SEQ ID NO: 832777 - DNA, 15 bp, Homo sapiens
tgttactcccagcaa

SEQ ID NO: 832778 - DNA, 15 bp, Homo sapiens
ctgttactcccagca

SEQ ID NO: 832779 - DNA, 15 bp, Homo sapiens
tctgttactcccagc

SEQ ID NO: 832780 - DNA, 15 bp, Homo sapiens
gtctgttactcccag

SEQ ID NO: 832781 - DNA, 15 bp, Homo sapiens
tgtctgttactccca

SEQ ID NO: 832782 - DNA, 15 bp, Homo sapiens
ttgtctgttactccc

SEQ ID NO: 832783 - DNA, 15 bp, Homo sapiens
tttgtctgttactcc

SEQ ID NO: 832784 - DNA, 15 bp, Homo sapiens
ttttgtctgttactc

SEQ ID NO: 832785 - DNA, 15 bp, Homo sapiens
cttttgtctgttact

SEQ ID NO: 832786 - DNA, 15 bp, Homo sapiens
acttttgtctgttac

SEQ ID NO: 832787 - DNA, 15 bp, Homo sapiens
tacttttgtctgtta

SEQ ID NO: 832788 - DNA, 15 bp, Homo sapiens
ttacttttgtctgtt

SEQ ID NO: 832789 - DNA, 15 bp, Homo sapiens
gttacttttgtctgt

SEQ ID NO: 832790 - DNA, 15 bp, Homo sapiens
agttacttttgtctg

SEQ ID NO: 832791 - DNA, 15 bp, Homo sapiens
cagttacttttgtct

SEQ ID NO: 832792 - DNA, 15 bp, Homo sapiens
tcagttacttttgtc

SEQ ID NO: 832793 - DNA, 15 bp, Homo sapiens
ttcagttacttttgt

SEQ ID NO: 832794 - DNA, 15 bp, Homo sapiens
tttcagttacttttg

SEQ ID NO: 832795 - DNA, 15 bp, Homo sapiens
ctttcagttactttt

SEQ ID NO: 832796 - DNA, 15 bp, Homo sapiens
actttcagttacttt

SEQ ID NO: 832797 - DNA, 15 bp, Homo sapiens
cactttcagttactt

SEQ ID NO: 832798 - DNA, 15 bp, Homo sapiens
gcactttcagttact

SEQ ID NO: 832799 - DNA, 15 bp, Homo sapiens
agcactttcagttac

SEQ ID NO: 832800 - DNA, 15 bp, Homo sapiens
gagcactttcagtta

SEQ ID NO: 832801 - DNA, 15 bp, Homo sapiens
cgagcactttcagtt

SEQ ID NO: 832802 - DNA, 15 bp, Homo sapiens
ccgagcactttcagt

SEQ ID NO: 832803 - DNA, 15 bp, Homo sapiens
accgagcactttcag

SEQ ID NO: 832804 - DNA, 15 bp, Homo sapiens
aaccgagcactttca

SEQ ID NO: 832805 - DNA, 15 bp, Homo sapiens
taaccgagcactttc

SEQ ID NO: 832806 - DNA, 15 bp, Homo sapiens
ataaccgagcacttt

SEQ ID NO: 832807 - DNA, 15 bp, Homo sapiens
gataaccgagcactt

SEQ ID NO: 832808 - DNA, 15 bp, Homo sapiens
agataaccgagcact

SEQ ID NO: 832809 - DNA, 15 bp, Homo sapiens
aagataaccgagcac

SEQ ID NO: 832810 - DNA, 15 bp, Homo sapiens
caagataaccgagca

SEQ ID NO: 832811 - DNA, 15 bp, Homo sapiens
tcaagataaccgagc

SEQ ID NO: 832812 - DNA, 15 bp, Homo sapiens
gtcaagataaccgag

SEQ ID NO: 832813 - DNA, 15 bp, Homo sapiens
tgtcaagataaccga

SEQ ID NO: 832814 - DNA, 15 bp, Homo sapiens
ctgtcaagataaccg

SEQ ID NO: 832815 - DNA, 15 bp, Homo sapiens
actgtcaagataacc

SEQ ID NO: 832816 - DNA, 15 bp, Homo sapiens
gactgtcaagataac

SEQ ID NO: 832817 - DNA, 15 bp, Homo sapiens
tgactgtcaagataa

SEQ ID NO: 832818 - DNA, 15 bp, Homo sapiens
ttgactgtcaagata

SEQ ID NO: 832819 - DNA, 15 bp, Homo sapiens
tttgactgtcaagat

SEQ ID NO: 832820 - DNA, 15 bp, Homo sapiens
ttttgactgtcaaga

SEQ ID NO: 832821 - DNA, 15 bp, Homo sapiens
attttgactgtcaag

SEQ ID NO: 832822 - DNA, 15 bp, Homo sapiens
gattttgactgtcaa

SEQ ID NO: 832823 - DNA, 15 bp, Homo sapiens
tgattttgactgtca

SEQ ID NO: 832824 - DNA, 15 bp, Homo sapiens
ttgattttgactgtc

SEQ ID NO: 832825 - DNA, 15 bp, Homo sapiens
tttgattttgactgt

SEQ ID NO: 832826 - DNA, 15 bp, Homo sapiens
ttttgattttgactg

SEQ ID NO: 832827 - DNA, 15 bp, Homo sapiens
cttttgattttgact

SEQ ID NO: 832828 - DNA, 15 bp, Homo sapiens
acttttgattttgac

SEQ ID NO: 832829 - DNA, 15 bp, Homo sapiens
cacttttgattttga

SEQ ID NO: 832830 - DNA, 15 bp, Homo sapiens
acacttttgattttg

SEQ ID NO: 832831 - DNA, 15 bp, Homo sapiens
gacacttttgatttt

SEQ ID NO: 832832 - DNA, 15 bp, Homo sapiens
ggacacttttgattt

SEQ ID NO: 832833 - DNA, 15 bp, Homo sapiens
gggacacttttgatt

SEQ ID NO: 832834 - DNA, 15 bp, Homo sapiens
ggggacacttttgat

SEQ ID NO: 832835 - DNA, 15 bp, Homo sapiens
aggggacacttttga

SEQ ID NO: 832836 - DNA, 15 bp, Homo sapiens
taggggacacttttg

SEQ ID NO: 832837 - DNA, 15 bp, Homo sapiens
ataggggacactttt

SEQ ID NO: 832838 - DNA, 15 bp, Homo sapiens
aataggggacacttt

SEQ ID NO: 832839 - DNA, 15 bp, Homo sapiens
aaataggggacactt

SEQ ID NO: 832840 - DNA, 15 bp, Homo sapiens
aaaataggggacact

SEQ ID NO: 832841 - DNA, 15 bp, Homo sapiens
gaaaataggggacac

SEQ ID NO: 832842 - DNA, 15 bp, Homo sapiens
tgaaaataggggaca

SEQ ID NO: 832843 - DNA, 15 bp, Homo sapiens
ctgaaaataggggac

SEQ ID NO: 832844 - DNA, 15 bp, Homo sapiens
actgaaaatagggga

SEQ ID NO: 832845 - DNA, 15 bp, Homo sapiens
cactgaaaatagggg

SEQ ID NO: 832846 - DNA, 15 bp, Homo sapiens
tcactgaaaataggg

SEQ ID NO: 832847 - DNA, 15 bp, Homo sapiens
gtcactgaaaatagg

SEQ ID NO: 832848 - DNA, 15 bp, Homo sapiens
ggtcactgaaaatag

SEQ ID NO: 832849 - DNA, 15 bp, Homo sapiens
aggtcactgaaaata

SEQ ID NO: 832850 - DNA, 15 bp, Homo sapiens
taggtcactgaaaat

SEQ ID NO: 832851 - DNA, 15 bp, Homo sapiens
ttaggtcactgaaaa

SEQ ID NO: 832852 - DNA, 15 bp, Homo sapiens
cttaggtcactgaaa

SEQ ID NO: 832853 - DNA, 15 bp, Homo sapiens
tcttaggtcactgaa

SEQ ID NO: 832854 - DNA, 15 bp, Homo sapiens
ctcttaggtcactga

SEQ ID NO: 832855 - DNA, 15 bp, Homo sapiens
actcttaggtcactg

SEQ ID NO: 832856 - DNA, 15 bp, Homo sapiens
aactcttaggtcact

SEQ ID NO: 832857 - DNA, 15 bp, Homo sapiens
aaactcttaggtcac

SEQ ID NO: 832858 - DNA, 15 bp, Homo sapiens
gaaactcttaggtca

SEQ ID NO: 832859 - DNA, 15 bp, Homo sapiens
agaaactcttaggtc

SEQ ID NO: 832860 - DNA, 15 bp, Homo sapiens
aagaaactcttaggt

SEQ ID NO: 832861 - DNA, 15 bp, Homo sapiens
aaagaaactcttagg

SEQ ID NO: 832862 - DNA, 15 bp, Homo sapiens
aaaagaaactcttag

SEQ ID NO: 832863 - DNA, 15 bp, Homo sapiens
aaaaagaaactctta

SEQ ID NO: 832864 - DNA, 15 bp, Homo sapiens
caaaaagaaactctt

SEQ ID NO: 832865 - DNA, 15 bp, Homo sapiens
acaaaaagaaactct

SEQ ID NO: 832866 - DNA, 15 bp, Homo sapiens
cacaaaaagaaactc

SEQ ID NO: 832867 - DNA, 15 bp, Homo sapiens
acacaaaaagaaact

SEQ ID NO: 832868 - DNA, 15 bp, Homo sapiens
aacacaaaaagaaac

SEQ ID NO: 832869 - DNA, 15 bp, Homo sapiens
aaacacaaaaagaaa

SEQ ID NO: 832870 - DNA, 15 bp, Homo sapiens
aaaacacaaaaagaa

SEQ ID NO: 832871 - DNA, 15 bp, Homo sapiens
aaaaacacaaaaaga

SEQ ID NO: 832872 - DNA, 15 bp, Homo sapiens
caaaaacacaaaaag

SEQ ID NO: 832873 - DNA, 15 bp, Homo sapiens
ccaaaaacacaaaaa

SEQ ID NO: 832874 - DNA, 15 bp, Homo sapiens
accaaaaacacaaaa

SEQ ID NO: 832875 - DNA, 15 bp, Homo sapiens
taccaaaaacacaaa

SEQ ID NO: 832876 - DNA, 15 bp, Homo sapiens
ataccaaaaacacaa

SEQ ID NO: 832877 - DNA, 15 bp, Homo sapiens
aataccaaaaacaca

SEQ ID NO: 832878 - DNA, 15 bp, Homo sapiens
caataccaaaaacac

SEQ ID NO: 832879 - DNA, 15 bp, Homo sapiens
acaataccaaaaaca

SEQ ID NO: 832880 - DNA, 15 bp, Homo sapiens
aacaataccaaaaac

SEQ ID NO: 832881 - DNA, 15 bp, Homo sapiens
caacaataccaaaaa

SEQ ID NO: 832882 - DNA, 15 bp, Homo sapiens
acaacaataccaaaa

SEQ ID NO: 832883 - DNA, 15 bp, Homo sapiens
aacaacaataccaaa

SEQ ID NO: 832884 - DNA, 15 bp, Homo sapiens
taacaacaataccaa

SEQ ID NO: 832885 - DNA, 15 bp, Homo sapiens
ttaacaacaatacca

SEQ ID NO: 832886 - DNA, 15 bp, Homo sapiens
tttaacaacaatacc

SEQ ID NO: 832887 - DNA, 15 bp, Homo sapiens
atttaacaacaatac

SEQ ID NO: 832888 - DNA, 15 bp, Homo sapiens
tatttaacaacaata

SEQ ID NO: 832889 - DNA, 15 bp, Homo sapiens
ttatttaacaacaat

SEQ ID NO: 832890 - DNA, 15 bp, Homo sapiens
cttatttaacaacaa

SEQ ID NO: 832891 - DNA, 15 bp, Homo sapiens
acttatttaacaaca

SEQ ID NO: 832892 - DNA, 15 bp, Homo sapiens
cacttatttaacaac

SEQ ID NO: 832893 - DNA, 15 bp, Homo sapiens
acacttatttaacaa

SEQ ID NO: 832894 - DNA, 15 bp, Homo sapiens
aacacttatttaaca

SEQ ID NO: 832895 - DNA, 15 bp, Homo sapiens
gaacacttatttaac

SEQ ID NO: 832896 - DNA, 15 bp, Homo sapiens
agaacacttatttaa

SEQ ID NO: 832897 - DNA, 15 bp, Homo sapiens
gagaacacttattta

SEQ ID NO: 832898 - DNA, 15 bp, Homo sapiens
tgagaacacttattt

SEQ ID NO: 832899 - DNA, 15 bp, Homo sapiens
gtgagaacacttatt

SEQ ID NO: 832900 - DNA, 15 bp, Homo sapiens
ggtgagaacacttat

SEQ ID NO: 832901 - DNA, 15 bp, Homo sapiens
aggtgagaacactta

SEQ ID NO: 832902 - DNA, 15 bp, Homo sapiens
aaggtgagaacactt

SEQ ID NO: 832903 - DNA, 15 bp, Homo sapiens
aaaggtgagaacact

SEQ ID NO: 832904 - DNA, 15 bp, Homo sapiens
caaaggtgagaacac

SEQ ID NO: 832905 - DNA, 15 bp, Homo sapiens
tcaaaggtgagaaca

SEQ ID NO: 832906 - DNA, 15 bp, Homo sapiens
ttcaaaggtgagaac

SEQ ID NO: 832907 - DNA, 15 bp, Homo sapiens
tttcaaaggtgagaa

SEQ ID NO: 832908 - DNA, 15 bp, Homo sapiens
ttttcaaaggtgaga

SEQ ID NO: 832909 - DNA, 15 bp, Homo sapiens
cttttcaaaggtgag

SEQ ID NO: 832910 - DNA, 15 bp, Homo sapiens
ccttttcaaaggtga

SEQ ID NO: 832911 - DNA, 15 bp, Homo sapiens
accttttcaaaggtg

SEQ ID NO: 832912 - DNA, 15 bp, Homo sapiens
gaccttttcaaaggt

SEQ ID NO: 832913 - DNA, 15 bp, Homo sapiens
tgaccttttcaaagg

SEQ ID NO: 832914 - DNA, 15 bp, Homo sapiens
ttgaccttttcaaag

SEQ ID NO: 832915 - DNA, 15 bp, Homo sapiens
attgaccttttcaaa

SEQ ID NO: 832916 - DNA, 15 bp, Homo sapiens
tattgaccttttcaa

SEQ ID NO: 832917 - DNA, 15 bp, Homo sapiens
ttattgaccttttca

SEQ ID NO: 832918 - DNA, 15 bp, Homo sapiens
cttattgaccttttc

SEQ ID NO: 832919 - DNA, 15 bp, Homo sapiens
tcttattgacctttt

SEQ ID NO: 832920 - DNA, 15 bp, Homo sapiens
ttcttattgaccttt

SEQ ID NO: 832921 - DNA, 15 bp, Homo sapiens
attcttattgacctt

SEQ ID NO: 832922 - DNA, 15 bp, Homo sapiens
aattcttattgacct

SEQ ID NO: 832923 - DNA, 15 bp, Homo sapiens
gaattcttattgacc

SEQ ID NO: 832924 - DNA, 15 bp, Homo sapiens
tgaattcttattgac

SEQ ID NO: 832925 - DNA, 15 bp, Homo sapiens
ttgaattcttattga

SEQ ID NO: 832926 - DNA, 15 bp, Homo sapiens
attgaattcttattg

SEQ ID NO: 832927 - DNA, 15 bp, Homo sapiens
tattgaattcttatt

SEQ ID NO: 832928 - DNA, 15 bp, Homo sapiens
gtattgaattcttat

SEQ ID NO: 832929 - DNA, 15 bp, Homo sapiens
tgtattgaattctta

SEQ ID NO: 832930 - DNA, 15 bp, Homo sapiens
ctgtattgaattctt

SEQ ID NO: 832931 - DNA, 15 bp, Homo sapiens
actgtattgaattct

SEQ ID NO: 832932 - DNA, 15 bp, Homo sapiens
tactgtattgaattc

SEQ ID NO: 832933 - DNA, 15 bp, Homo sapiens
atactgtattgaatt

SEQ ID NO: 832934 - DNA, 15 bp, Homo sapiens
tatactgtattgaat

SEQ ID NO: 832935 - DNA, 15 bp, Homo sapiens
ttatactgtattgaa

SEQ ID NO: 832936 - DNA, 15 bp, Homo sapiens
attatactgtattga

SEQ ID NO: 832937 - DNA, 15 bp, Homo sapiens
cattatactgtattg

SEQ ID NO: 832938 - DNA, 15 bp, Homo sapiens
acattatactgtatt

SEQ ID NO: 832939 - DNA, 15 bp, Homo sapiens
gacattatactgtat

SEQ ID NO: 832940 - DNA, 15 bp, Homo sapiens
agacattatactgta

SEQ ID NO: 832941 - DNA, 15 bp, Homo sapiens
cagacattatactgt

SEQ ID NO: 832942 - DNA, 15 bp, Homo sapiens
acagacattatactg

SEQ ID NO: 832943 - DNA, 15 bp, Homo sapiens
cacagacattatact

SEQ ID NO: 832944 - DNA, 15 bp, Homo sapiens
acacagacattatac

SEQ ID NO: 832945 - DNA, 15 bp, Homo sapiens
cacacagacattata

SEQ ID NO: 832946 - DNA, 15 bp, Homo sapiens
gcacacagacattat

SEQ ID NO: 832947 - DNA, 15 bp, Homo sapiens
ggcacacagacatta

SEQ ID NO: 832948 - DNA, 15 bp, Homo sapiens
tggcacacagacatt

SEQ ID NO: 832949 - DNA, 15 bp, Homo sapiens
ttggcacacagacat

SEQ ID NO: 832950 - DNA, 15 bp, Homo sapiens
tttggcacacagaca

SEQ ID NO: 832951 - DNA, 15 bp, Homo sapiens
atttggcacacagac

SEQ ID NO: 832952 - DNA, 15 bp, Homo sapiens
catttggcacacaga

SEQ ID NO: 832953 - DNA, 15 bp, Homo sapiens
tcatttggcacacag

SEQ ID NO: 832954 - DNA, 15 bp, Homo sapiens
ttcatttggcacaca

SEQ ID NO: 832955 - DNA, 15 bp, Homo sapiens
cttcatttggcacac

SEQ ID NO: 832956 - DNA, 15 bp, Homo sapiens
ccttcatttggcaca

SEQ ID NO: 832957 - DNA, 15 bp, Homo sapiens
accttcatttggcac

SEQ ID NO: 832958 - DNA, 15 bp, Homo sapiens
caccttcatttggca

SEQ ID NO: 832959 - DNA, 15 bp, Homo sapiens
gcaccttcatttggc

SEQ ID NO: 832960 - DNA, 15 bp, Homo sapiens
ggcaccttcatttgg

SEQ ID NO: 832961 - DNA, 15 bp, Homo sapiens
gggcaccttcatttg

SEQ ID NO: 832962 - DNA, 15 bp, Homo sapiens
ggggcaccttcattt

SEQ ID NO: 832963 - DNA, 15 bp, Homo sapiens
aggggcaccttcatt

SEQ ID NO: 832964 - DNA, 15 bp, Homo sapiens
aaggggcaccttcat

SEQ ID NO: 832965 - DNA, 15 bp, Homo sapiens
taaggggcaccttca

SEQ ID NO: 832966 - DNA, 15 bp, Homo sapiens
ataaggggcaccttc

SEQ ID NO: 832967 - DNA, 15 bp, Homo sapiens
aataaggggcacctt

SEQ ID NO: 832968 - DNA, 15 bp, Homo sapiens
aaataaggggcacct

SEQ ID NO: 832969 - DNA, 15 bp, Homo sapiens
aaaataaggggcacc

SEQ ID NO: 832970 - DNA, 15 bp, Homo sapiens
aaaaataaggggcac

SEQ ID NO: 832971 - DNA, 15 bp, Homo sapiens
taaaaataaggggca

SEQ ID NO: 832972 - DNA, 15 bp, Homo sapiens
ttaaaaataaggggc

SEQ ID NO: 832973 - DNA, 15 bp, Homo sapiens
cttaaaaataagggg

SEQ ID NO: 832974 - DNA, 15 bp, Homo sapiens
acttaaaaataaggg

SEQ ID NO: 832975 - DNA, 15 bp, Homo sapiens
cacttaaaaataagg

SEQ ID NO: 832976 - DNA, 15 bp, Homo sapiens
acacttaaaaataag

SEQ ID NO: 832977 - DNA, 15 bp, Homo sapiens
cacacttaaaaataa

SEQ ID NO: 832978 - DNA, 15 bp, Homo sapiens
ccacacttaaaaata

SEQ ID NO: 832979 - DNA, 15 bp, Homo sapiens
tccacacttaaaaat

SEQ ID NO: 832980 - DNA, 15 bp, Homo sapiens
ctccacacttaaaaa

SEQ ID NO: 832981 - DNA, 15 bp, Homo sapiens
cctccacacttaaaa

SEQ ID NO: 832982 - DNA, 15 bp, Homo sapiens
tcctccacacttaaa

SEQ ID NO: 832983 - DNA, 15 bp, Homo sapiens
ctcctccacacttaa

SEQ ID NO: 832984 - DNA, 15 bp, Homo sapiens
actcctccacactta

SEQ ID NO: 832985 - DNA, 15 bp, Homo sapiens
aactcctccacactt

SEQ ID NO: 832986 - DNA, 15 bp, Homo sapiens
aaactcctccacact

SEQ ID NO: 832987 - DNA, 15 bp, Homo sapiens
aaaactcctccacac

SEQ ID NO: 832988 - DNA, 15 bp, Homo sapiens
caaaactcctccaca

SEQ ID NO: 832989 - DNA, 15 bp, Homo sapiens
tcaaaactcctccac

SEQ ID NO: 832990 - DNA, 15 bp, Homo sapiens
atcaaaactcctcca

SEQ ID NO: 832991 - DNA, 15 bp, Homo sapiens
gatcaaaactcctcc

SEQ ID NO: 832992 - DNA, 15 bp, Homo sapiens
tgatcaaaactcctc

SEQ ID NO: 832993 - DNA, 15 bp, Homo sapiens
atgatcaaaactcct

SEQ ID NO: 832994 - DNA, 15 bp, Homo sapiens
tatgatcaaaactcc

SEQ ID NO: 832995 - DNA, 15 bp, Homo sapiens
ttatgatcaaaactc

SEQ ID NO: 832996 - DNA, 15 bp, Homo sapiens
cttatgatcaaaact

SEQ ID NO: 832997 - DNA, 15 bp, Homo sapiens
tcttatgatcaaaac

SEQ ID NO: 832998 - DNA, 15 bp, Homo sapiens
ttcttatgatcaaaa

SEQ ID NO: 832999 - DNA, 15 bp, Homo sapiens
gttcttatgatcaaa

SEQ ID NO: 833000 - DNA, 15 bp, Homo sapiens
agttcttatgatcaa

SEQ ID NO: 833001 - DNA, 15 bp, Homo sapiens
aagttcttatgatca

SEQ ID NO: 833002 - DNA, 15 bp, Homo sapiens
caagttcttatgatc

SEQ ID NO: 833003 - DNA, 15 bp, Homo sapiens
tcaagttcttatgat

SEQ ID NO: 833004 - DNA, 15 bp, Homo sapiens
ttcaagttcttatga

SEQ ID NO: 833005 - DNA, 15 bp, Homo sapiens
tttcaagttcttatg

SEQ ID NO: 833006 - DNA, 15 bp, Homo sapiens
atttcaagttcttat

SEQ ID NO: 833007 - DNA, 15 bp, Homo sapiens
tatttcaagttctta

SEQ ID NO: 833008 - DNA, 15 bp, Homo sapiens
gtatttcaagttctt

SEQ ID NO: 833009 - DNA, 15 bp, Homo sapiens
ggtatttcaagttct

SEQ ID NO: 833010 - DNA, 15 bp, Homo sapiens
aggtatttcaagttc

SEQ ID NO: 833011 - DNA, 15 bp, Homo sapiens
taggtatttcaagtt

SEQ ID NO: 833012 - DNA, 15 bp, Homo sapiens
gtaggtatttcaagt

SEQ ID NO: 833013 - DNA, 15 bp, Homo sapiens
tgtaggtatttcaag

SEQ ID NO: 833014 - DNA, 15 bp, Homo sapiens
ctgtaggtatttcaa

SEQ ID NO: 833015 - DNA, 15 bp, Homo sapiens
tctgtaggtatttca

SEQ ID NO: 833016 - DNA, 15 bp, Homo sapiens
ttctgtaggtatttc

SEQ ID NO: 833017 - DNA, 15 bp, Homo sapiens
attctgtaggtattt

SEQ ID NO: 833018 - DNA, 15 bp, Homo sapiens
gattctgtaggtatt

SEQ ID NO: 833019 - DNA, 15 bp, Homo sapiens
ggattctgtaggtat

SEQ ID NO: 833020 - DNA, 15 bp, Homo sapiens
aggattctgtaggta

SEQ ID NO: 833021 - DNA, 15 bp, Homo sapiens
aaggattctgtaggt

SEQ ID NO: 833022 - DNA, 15 bp, Homo sapiens
caaggattctgtagg

SEQ ID NO: 833023 - DNA, 15 bp, Homo sapiens
tcaaggattctgtag

SEQ ID NO: 833024 - DNA, 15 bp, Homo sapiens
atcaaggattctgta

SEQ ID NO: 833025 - DNA, 15 bp, Homo sapiens
catcaaggattctgt

SEQ ID NO: 833026 - DNA, 15 bp, Homo sapiens
ccatcaaggattctg

SEQ ID NO: 833027 - DNA, 15 bp, Homo sapiens
accatcaaggattct

SEQ ID NO: 833028 - DNA, 15 bp, Homo sapiens
aaccatcaaggattc

SEQ ID NO: 833029 - DNA, 15 bp, Homo sapiens
taaccatcaaggatt

SEQ ID NO: 833030 - DNA, 15 bp, Homo sapiens
ttaaccatcaaggat

SEQ ID NO: 833031 - DNA, 15 bp, Homo sapiens
cttaaccatcaagga

SEQ ID NO: 833032 - DNA, 15 bp, Homo sapiens
gcttaaccatcaagg

SEQ ID NO: 833033 - DNA, 15 bp, Homo sapiens
tgcttaaccatcaag

SEQ ID NO: 833034 - DNA, 15 bp, Homo sapiens
ctgcttaaccatcaa

SEQ ID NO: 833035 - DNA, 15 bp, Homo sapiens
gctgcttaaccatca

SEQ ID NO: 833036 - DNA, 15 bp, Homo sapiens
agctgcttaaccatc

SEQ ID NO: 833037 - DNA, 15 bp, Homo sapiens
cagctgcttaaccat

SEQ ID NO: 833038 - DNA, 15 bp, Homo sapiens
ccagctgcttaacca

SEQ ID NO: 833039 - DNA, 15 bp, Homo sapiens
accagctgcttaacc

SEQ ID NO: 833040 - DNA, 15 bp, Homo sapiens
caccagctgcttaac

SEQ ID NO: 833041 - DNA, 15 bp, Homo sapiens
gcaccagctgcttaa

SEQ ID NO: 833042 - DNA, 15 bp, Homo sapiens
ggcaccagctgctta

SEQ ID NO: 833043 - DNA, 15 bp, Homo sapiens
tggcaccagctgctt

SEQ ID NO: 833044 - DNA, 15 bp, Homo sapiens
ctggcaccagctgct

SEQ ID NO: 833045 - DNA, 15 bp, Homo sapiens
gctggcaccagctgc

SEQ ID NO: 833046 - DNA, 15 bp, Homo sapiens
tgctggcaccagctg

SEQ ID NO: 833047 - DNA, 15 bp, Homo sapiens
gtgctggcaccagct

SEQ ID NO: 833048 - DNA, 15 bp, Homo sapiens
tgtgctggcaccagc

SEQ ID NO: 833049 - DNA, 15 bp, Homo sapiens
ttgtgctggcaccag

SEQ ID NO: 833050 - DNA, 15 bp, Homo sapiens
cttgtgctggcacca

SEQ ID NO: 833051 - DNA, 15 bp, Homo sapiens
tcttgtgctggcacc

SEQ ID NO: 833052 - DNA, 15 bp, Homo sapiens
ttcttgtgctggcac

SEQ ID NO: 833053 - DNA, 15 bp, Homo sapiens
attcttgtgctggca

SEQ ID NO: 833054 - DNA, 15 bp, Homo sapiens
gattcttgtgctggc

SEQ ID NO: 833055 - DNA, 15 bp, Homo sapiens
ggattcttgtgctgg

SEQ ID NO: 833056 - DNA, 15 bp, Homo sapiens
gggattcttgtgctg

SEQ ID NO: 833057 - DNA, 15 bp, Homo sapiens
agggattcttgtgct

SEQ ID NO: 833058 - DNA, 15 bp, Homo sapiens
gagggattcttgtgc

SEQ ID NO: 833059 - DNA, 15 bp, Homo sapiens
tgagggattcttgtg

SEQ ID NO: 833060 - DNA, 15 bp, Homo sapiens
ttgagggattcttgt

SEQ ID NO: 833061 - DNA, 15 bp, Homo sapiens
attgagggattcttg

SEQ ID NO: 833062 - DNA, 15 bp, Homo sapiens
tattgagggattctt

SEQ ID NO: 833063 - DNA, 15 bp, Homo sapiens
atattgagggattct

SEQ ID NO: 833064 - DNA, 15 bp, Homo sapiens
catattgagggattc

SEQ ID NO: 833065 - DNA, 15 bp, Homo sapiens
acatattgagggatt

SEQ ID NO: 833066 - DNA, 15 bp, Homo sapiens
aacatattgagggat

SEQ ID NO: 833067 - DNA, 15 bp, Homo sapiens
gaacatattgaggga

SEQ ID NO: 833068 - DNA, 15 bp, Homo sapiens
agaacatattgaggg

SEQ ID NO: 833069 - DNA, 15 bp, Homo sapiens
gagaacatattgagg

SEQ ID NO: 833070 - DNA, 15 bp, Homo sapiens
agagaacatattgag

SEQ ID NO: 833071 - DNA, 15 bp, Homo sapiens
tagagaacatattga

SEQ ID NO: 833072 - DNA, 15 bp, Homo sapiens
atagagaacatattg

SEQ ID NO: 833073 - DNA, 15 bp, Homo sapiens
catagagaacatatt

SEQ ID NO: 833074 - DNA, 15 bp, Homo sapiens
tcatagagaacatat

SEQ ID NO: 833075 - DNA, 15 bp, Homo sapiens
ttcatagagaacata

SEQ ID NO: 833076 - DNA, 15 bp, Homo sapiens
cttcatagagaacat

SEQ ID NO: 833077 - DNA, 15 bp, Homo sapiens
gcttcatagagaaca

SEQ ID NO: 833078 - DNA, 15 bp, Homo sapiens
ggcttcatagagaac

SEQ ID NO: 833079 - DNA, 15 bp, Homo sapiens
gggcttcatagagaa

SEQ ID NO: 833080 - DNA, 15 bp, Homo sapiens
ggggcttcatagaga

SEQ ID NO: 833081 - DNA, 15 bp, Homo sapiens
cggggcttcatagag

SEQ ID NO: 833082 - DNA, 15 bp, Homo sapiens
tcggggcttcataga

SEQ ID NO: 833083 - DNA, 15 bp, Homo sapiens
atcggggcttcatag

SEQ ID NO: 833084 - DNA, 15 bp, Homo sapiens
gatcggggcttcata

SEQ ID NO: 833085 - DNA, 15 bp, Homo sapiens
tgatcggggcttcat

SEQ ID NO: 833086 - DNA, 15 bp, Homo sapiens
gtgatcggggcttca

SEQ ID NO: 833087 - DNA, 15 bp, Homo sapiens
ggtgatcggggcttc

SEQ ID NO: 833088 - DNA, 15 bp, Homo sapiens
tggtgatcggggctt

SEQ ID NO: 833089 - DNA, 15 bp, Homo sapiens
ttggtgatcggggct

SEQ ID NO: 833090 - DNA, 15 bp, Homo sapiens
tttggtgatcggggc

SEQ ID NO: 833091 - DNA, 15 bp, Homo sapiens
atttggtgatcgggg

SEQ ID NO: 833092 - DNA, 15 bp, Homo sapiens
catttggtgatcggg

SEQ ID NO: 833093 - DNA, 15 bp, Homo sapiens
gcatttggtgatcgg

SEQ ID NO: 833094 - DNA, 15 bp, Homo sapiens
tgcatttggtgatcg

SEQ ID NO: 833095 - DNA, 15 bp, Homo sapiens
ttgcatttggtgatc

SEQ ID NO: 833096 - DNA, 15 bp, Homo sapiens
tttgcatttggtgat

SEQ ID NO: 833097 - DNA, 15 bp, Homo sapiens
gtttgcatttggtga

SEQ ID NO: 833098 - DNA, 15 bp, Homo sapiens
tgtttgcatttggtg

SEQ ID NO: 833099 - DNA, 15 bp, Homo sapiens
atgtttgcatttggt

SEQ ID NO: 833100 - DNA, 15 bp, Homo sapiens
aatgtttgcatttgg

SEQ ID NO: 833101 - DNA, 15 bp, Homo sapiens
gaatgtttgcatttg

SEQ ID NO: 833102 - DNA, 15 bp, Homo sapiens
tgaatgtttgcattt

SEQ ID NO: 833103 - DNA, 15 bp, Homo sapiens
atgaatgtttgcatt

SEQ ID NO: 833104 - DNA, 15 bp, Homo sapiens
catgaatgtttgcat

SEQ ID NO: 833105 - DNA, 15 bp, Homo sapiens
tcatgaatgtttgca

SEQ ID NO: 833106 - DNA, 15 bp, Homo sapiens
atcatgaatgtttgc

SEQ ID NO: 833107 - DNA, 15 bp, Homo sapiens
aatcatgaatgtttg

SEQ ID NO: 833108 - DNA, 15 bp, Homo sapiens
gaatcatgaatgttt

SEQ ID NO: 833109 - DNA, 15 bp, Homo sapiens
tgaatcatgaatgtt

SEQ ID NO: 833110 - DNA, 15 bp, Homo sapiens
ctgaatcatgaatgt

SEQ ID NO: 833111 - DNA, 15 bp, Homo sapiens
actgaatcatgaatg

SEQ ID NO: 833112 - DNA, 15 bp, Homo sapiens
tactgaatcatgaat

SEQ ID NO: 833113 - DNA, 15 bp, Homo sapiens
atactgaatcatgaa

SEQ ID NO: 833114 - DNA, 15 bp, Homo sapiens
tatactgaatcatga

SEQ ID NO: 833115 - DNA, 15 bp, Homo sapiens
atatactgaatcatg

SEQ ID NO: 833116 - DNA, 15 bp, Homo sapiens
aatatactgaatcat

SEQ ID NO: 833117 - DNA, 15 bp, Homo sapiens
aaatatactgaatca

SEQ ID NO: 833118 - DNA, 15 bp, Homo sapiens
aaaatatactgaatc

SEQ ID NO: 833119 - DNA, 15 bp, Homo sapiens
gaaaatatactgaat

SEQ ID NO: 833120 - DNA, 15 bp, Homo sapiens
tgaaaatatactgaa

SEQ ID NO: 833121 - DNA, 15 bp, Homo sapiens
atgaaaatatactga

SEQ ID NO: 833122 - DNA, 15 bp, Homo sapiens
gatgaaaatatactg

SEQ ID NO: 833123 - DNA, 15 bp, Homo sapiens
agatgaaaatatact

SEQ ID NO: 833124 - DNA, 15 bp, Homo sapiens
aagatgaaaatatac

SEQ ID NO: 833125 - DNA, 15 bp, Homo sapiens
caagatgaaaatata

SEQ ID NO: 833126 - DNA, 15 bp, Homo sapiens
tcaagatgaaaatat

SEQ ID NO: 833127 - DNA, 15 bp, Homo sapiens
gtcaagatgaaaata

SEQ ID NO: 833128 - DNA, 15 bp, Homo sapiens
agtcaagatgaaaat

SEQ ID NO: 833129 - DNA, 15 bp, Homo sapiens
cagtcaagatgaaaa

SEQ ID NO: 833130 - DNA, 15 bp, Homo sapiens
gcagtcaagatgaaa

SEQ ID NO: 833131 - DNA, 15 bp, Homo sapiens
ggcagtcaagatgaa

SEQ ID NO: 833132 - DNA, 15 bp, Homo sapiens
tggcagtcaagatga

SEQ ID NO: 833133 - DNA, 15 bp, Homo sapiens
ttggcagtcaagatg

SEQ ID NO: 833134 - DNA, 15 bp, Homo sapiens
tttggcagtcaagat

SEQ ID NO: 833135 - DNA, 15 bp, Homo sapiens
ctttggcagtcaaga

SEQ ID NO: 833136 - DNA, 15 bp, Homo sapiens
actttggcagtcaag

SEQ ID NO: 833137 - DNA, 15 bp, Homo sapiens
aactttggcagtcaa

SEQ ID NO: 833138 - DNA, 15 bp, Homo sapiens
caactttggcagtca

SEQ ID NO: 833139 - DNA, 15 bp, Homo sapiens
tcaactttggcagtc

SEQ ID NO: 833140 - DNA, 15 bp, Homo sapiens
atcaactttggcagt

SEQ ID NO: 833141 - DNA, 15 bp, Homo sapiens
gatcaactttggcag

SEQ ID NO: 833142 - DNA, 15 bp, Homo sapiens
agatcaactttggca

SEQ ID NO: 833143 - DNA, 15 bp, Homo sapiens
cagatcaactttggc

SEQ ID NO: 833144 - DNA, 15 bp, Homo sapiens
acagatcaactttgg

SEQ ID NO: 833145 - DNA, 15 bp, Homo sapiens
aacagatcaactttg

SEQ ID NO: 833146 - DNA, 15 bp, Homo sapiens
aaacagatcaacttt

SEQ ID NO: 833147 - DNA, 15 bp, Homo sapiens
gaaacagatcaactt

SEQ ID NO: 833148 - DNA, 15 bp, Homo sapiens
agaaacagatcaact

SEQ ID NO: 833149 - DNA, 15 bp, Homo sapiens
aagaaacagatcaac

SEQ ID NO: 833150 - DNA, 15 bp, Homo sapiens
taagaaacagatcaa

SEQ ID NO: 833151 - DNA, 15 bp, Homo sapiens
ttaagaaacagatca

SEQ ID NO: 833152 - DNA, 15 bp, Homo sapiens
attaagaaacagatc

SEQ ID NO: 833153 - DNA, 15 bp, Homo sapiens
tattaagaaacagat

SEQ ID NO: 833154 - DNA, 15 bp, Homo sapiens
atattaagaaacaga

SEQ ID NO: 833155 - DNA, 15 bp, Homo sapiens
tatattaagaaacag

SEQ ID NO: 833156 - DNA, 15 bp, Homo sapiens
atatattaagaaaca

SEQ ID NO: 833157 - DNA, 15 bp, Homo sapiens
aatatattaagaaac

SEQ ID NO: 833158 - DNA, 15 bp, Homo sapiens
taatatattaagaaa

SEQ ID NO: 833159 - DNA, 15 bp, Homo sapiens
gtaatatattaagaa

SEQ ID NO: 833160 - DNA, 15 bp, Homo sapiens
tgtaatatattaaga

SEQ ID NO: 833161 - DNA, 15 bp, Homo sapiens
atgtaatatattaag

SEQ ID NO: 833162 - DNA, 15 bp, Homo sapiens
gatgtaatatattaa

SEQ ID NO: 833163 - DNA, 15 bp, Homo sapiens
agatgtaatatatta

SEQ ID NO: 833164 - DNA, 15 bp, Homo sapiens
tagatgtaatatatt

SEQ ID NO: 833165 - DNA, 15 bp, Homo sapiens
ctagatgtaatatat

SEQ ID NO: 833166 - DNA, 15 bp, Homo sapiens
tctagatgtaatata

SEQ ID NO: 833167 - DNA, 15 bp, Homo sapiens
gtctagatgtaatat

SEQ ID NO: 833168 - DNA, 15 bp, Homo sapiens
agtctagatgtaata

SEQ ID NO: 833169 - DNA, 15 bp, Homo sapiens
aagtctagatgtaat

SEQ ID NO: 833170 - DNA, 15 bp, Homo sapiens
caagtctagatgtaa

SEQ ID NO: 833171 - DNA, 15 bp, Homo sapiens
ccaagtctagatgta

SEQ ID NO: 833172 - DNA, 15 bp, Homo sapiens
tccaagtctagatgt

SEQ ID NO: 833173 - DNA, 15 bp, Homo sapiens
ttccaagtctagatg

SEQ ID NO: 833174 - DNA, 15 bp, Homo sapiens
gttccaagtctagat

SEQ ID NO: 833175 - DNA, 15 bp, Homo sapiens
agttccaagtctaga

SEQ ID NO: 833176 - DNA, 15 bp, Homo sapiens
cagttccaagtctag

SEQ ID NO: 833177 - DNA, 15 bp, Homo sapiens
ccagttccaagtcta

SEQ ID NO: 833178 - DNA, 15 bp, Homo sapiens
tccagttccaagtct

SEQ ID NO: 833179 - DNA, 15 bp, Homo sapiens
ctccagttccaagtc

SEQ ID NO: 833180 - DNA, 15 bp, Homo sapiens
tctccagttccaagt

SEQ ID NO: 833181 - DNA, 15 bp, Homo sapiens
atctccagttccaag

SEQ ID NO: 833182 - DNA, 15 bp, Homo sapiens
catctccagttccaa

SEQ ID NO: 833183 - DNA, 15 bp, Homo sapiens
tcatctccagttcca

SEQ ID NO: 833184 - DNA, 15 bp, Homo sapiens
ctcatctccagttcc

SEQ ID NO: 833185 - DNA, 15 bp, Homo sapiens
tctcatctccagttc

SEQ ID NO: 833186 - DNA, 15 bp, Homo sapiens
ttctcatctccagtt

SEQ ID NO: 833187 - DNA, 15 bp, Homo sapiens
gttctcatctccagt

SEQ ID NO: 833188 - DNA, 15 bp, Homo sapiens
tgttctcatctccag

SEQ ID NO: 833189 - DNA, 15 bp, Homo sapiens
ctgttctcatctcca

SEQ ID NO: 833190 - DNA, 15 bp, Homo sapiens
tctgttctcatctcc

SEQ ID NO: 833191 - DNA, 15 bp, Homo sapiens
ttctgttctcatctc

SEQ ID NO: 833192 - DNA, 15 bp, Homo sapiens
attctgttctcatct

SEQ ID NO: 833193 - DNA, 15 bp, Homo sapiens
tattctgttctcatc

SEQ ID NO: 833194 - DNA, 15 bp, Homo sapiens
atattctgttctcat

SEQ ID NO: 833195 - DNA, 15 bp, Homo sapiens
aatattctgttctca

SEQ ID NO: 833196 - DNA, 15 bp, Homo sapiens
taatattctgttctc

SEQ ID NO: 833197 - DNA, 15 bp, Homo sapiens
ataatattctgttct

SEQ ID NO: 833198 - DNA, 15 bp, Homo sapiens
gataatattctgttc

SEQ ID NO: 833199 - DNA, 15 bp, Homo sapiens
agataatattctgtt

SEQ ID NO: 833200 - DNA, 15 bp, Homo sapiens
aagataatattctgt

SEQ ID NO: 833201 - DNA, 15 bp, Homo sapiens
gaagataatattctg

SEQ ID NO: 833202 - DNA, 15 bp, Homo sapiens
ggaagataatattct

SEQ ID NO: 833203 - DNA, 15 bp, Homo sapiens
aggaagataatattc

SEQ ID NO: 833204 - DNA, 15 bp, Homo sapiens
gaggaagataatatt

SEQ ID NO: 833205 - DNA, 15 bp, Homo sapiens
tgaggaagataatat

SEQ ID NO: 833206 - DNA, 15 bp, Homo sapiens
atgaggaagataata

SEQ ID NO: 833207 - DNA, 15 bp, Homo sapiens
aatgaggaagataat

SEQ ID NO: 833208 - DNA, 15 bp, Homo sapiens
aaatgaggaagataa

SEQ ID NO: 833209 - DNA, 15 bp, Homo sapiens
aaaatgaggaagata

SEQ ID NO: 833210 - DNA, 15 bp, Homo sapiens
aaaaatgaggaagat

SEQ ID NO: 833211 - DNA, 15 bp, Homo sapiens
caaaaatgaggaaga

SEQ ID NO: 833212 - DNA, 15 bp, Homo sapiens
acaaaaatgaggaag

SEQ ID NO: 833213 - DNA, 15 bp, Homo sapiens
cacaaaaatgaggaa

SEQ ID NO: 833214 - DNA, 15 bp, Homo sapiens
acacaaaaatgagga

SEQ ID NO: 833215 - DNA, 15 bp, Homo sapiens
aacacaaaaatgagg

SEQ ID NO: 833216 - DNA, 15 bp, Homo sapiens
aaacacaaaaatgag

SEQ ID NO: 833217 - DNA, 15 bp, Homo sapiens
aaaacacaaaaatga

SEQ ID NO: 833218 - DNA, 15 bp, Homo sapiens
aaaaacacaaaaatg

SEQ ID NO: 833219 - DNA, 15 bp, Homo sapiens
caaaaacacaaaaat

SEQ ID NO: 833220 - DNA, 15 bp, Homo sapiens
acaaaaacacaaaaa

SEQ ID NO: 833221 - DNA, 15 bp, Homo sapiens
aacaaaaacacaaaa

SEQ ID NO: 833222 - DNA, 15 bp, Homo sapiens
gaacaaaaacacaaa

SEQ ID NO: 833223 - DNA, 15 bp, Homo sapiens
tgaacaaaaacacaa

SEQ ID NO: 833224 - DNA, 15 bp, Homo sapiens
ttgaacaaaaacaca

SEQ ID NO: 833225 - DNA, 15 bp, Homo sapiens
gttgaacaaaaacac

SEQ ID NO: 833226 - DNA, 15 bp, Homo sapiens
agttgaacaaaaaca

SEQ ID NO: 833227 - DNA, 15 bp, Homo sapiens
gagttgaacaaaaac

SEQ ID NO: 833228 - DNA, 15 bp, Homo sapiens
agagttgaacaaaaa

SEQ ID NO: 833229 - DNA, 15 bp, Homo sapiens
tagagttgaacaaaa

SEQ ID NO: 833230 - DNA, 15 bp, Homo sapiens
ttagagttgaacaaa

SEQ ID NO: 833231 - DNA, 15 bp, Homo sapiens
attagagttgaacaa

SEQ ID NO: 833232 - DNA, 15 bp, Homo sapiens
cattagagttgaaca

SEQ ID NO: 833233 - DNA, 15 bp, Homo sapiens
acattagagttgaac

SEQ ID NO: 833234 - DNA, 15 bp, Homo sapiens
gacattagagttgaa

SEQ ID NO: 833235 - DNA, 15 bp, Homo sapiens
agacattagagttga

SEQ ID NO: 833236 - DNA, 15 bp, Homo sapiens
cagacattagagttg

SEQ ID NO: 833237 - DNA, 15 bp, Homo sapiens
gcagacattagagtt

SEQ ID NO: 833238 - DNA, 15 bp, Homo sapiens
tgcagacattagagt

SEQ ID NO: 833239 - DNA, 15 bp, Homo sapiens
ttgcagacattagag

SEQ ID NO: 833240 - DNA, 15 bp, Homo sapiens
tttgcagacattaga

SEQ ID NO: 833241 - DNA, 15 bp, Homo sapiens
ctttgcagacattag

SEQ ID NO: 833242 - DNA, 15 bp, Homo sapiens
gctttgcagacatta

SEQ ID NO: 833243 - DNA, 15 bp, Homo sapiens
tgctttgcagacatt

SEQ ID NO: 833244 - DNA, 15 bp, Homo sapiens
gtgctttgcagacat

SEQ ID NO: 833245 - DNA, 15 bp, Homo sapiens
agtgctttgcagaca

SEQ ID NO: 833246 - DNA, 15 bp, Homo sapiens
aagtgctttgcagac

SEQ ID NO: 833247 - DNA, 15 bp, Homo sapiens
caagtgctttgcaga

SEQ ID NO: 833248 - DNA, 15 bp, Homo sapiens
gcaagtgctttgcag

SEQ ID NO: 833249 - DNA, 15 bp, Homo sapiens
cgcaagtgctttgca

SEQ ID NO: 833250 - DNA, 15 bp, Homo sapiens
acgcaagtgctttgc

SEQ ID NO: 833251 - DNA, 15 bp, Homo sapiens
tacgcaagtgctttg

SEQ ID NO: 833252 - DNA, 15 bp, Homo sapiens
atacgcaagtgcttt

SEQ ID NO: 833253 - DNA, 15 bp, Homo sapiens
catacgcaagtgctt

SEQ ID NO: 833254 - DNA, 15 bp, Homo sapiens
acatacgcaagtgct

SEQ ID NO: 833255 - DNA, 15 bp, Homo sapiens
tacatacgcaagtgc

SEQ ID NO: 833256 - DNA, 15 bp, Homo sapiens
ttacatacgcaagtg

SEQ ID NO: 833257 - DNA, 15 bp, Homo sapiens
attacatacgcaagt

SEQ ID NO: 833258 - DNA, 15 bp, Homo sapiens
cattacatacgcaag

SEQ ID NO: 833259 - DNA, 15 bp, Homo sapiens
tcattacatacgcaa

SEQ ID NO: 833260 - DNA, 15 bp, Homo sapiens
atcattacatacgca

SEQ ID NO: 833261 - DNA, 15 bp, Homo sapiens
catcattacatacgc

SEQ ID NO: 833262 - DNA, 15 bp, Homo sapiens
gcatcattacatacg

SEQ ID NO: 833263 - DNA, 15 bp, Homo sapiens
agcatcattacatac

SEQ ID NO: 833264 - DNA, 15 bp, Homo sapiens
gagcatcattacata

SEQ ID NO: 833265 - DNA, 15 bp, Homo sapiens
tgagcatcattacat

SEQ ID NO: 833266 - DNA, 15 bp, Homo sapiens
ctgagcatcattaca

SEQ ID NO: 833267 - DNA, 15 bp, Homo sapiens
actgagcatcattac

SEQ ID NO: 833268 - DNA, 15 bp, Homo sapiens
cactgagcatcatta

SEQ ID NO: 833269 - DNA, 15 bp, Homo sapiens
acactgagcatcatt

SEQ ID NO: 833270 - DNA, 15 bp, Homo sapiens
gacactgagcatcat

SEQ ID NO: 833271 - DNA, 15 bp, Homo sapiens
tgacactgagcatca

SEQ ID NO: 833272 - DNA, 15 bp, Homo sapiens
atgacactgagcatc

SEQ ID NO: 833273 - DNA, 15 bp, Homo sapiens
tatgacactgagcat

SEQ ID NO: 833274 - DNA, 15 bp, Homo sapiens
ctatgacactgagca

SEQ ID NO: 833275 - DNA, 15 bp, Homo sapiens
cctatgacactgagc

SEQ ID NO: 833276 - DNA, 15 bp, Homo sapiens
tcctatgacactgag

SEQ ID NO: 833277 - DNA, 15 bp, Homo sapiens
ctcctatgacactga

SEQ ID NO: 833278 - DNA, 15 bp, Homo sapiens
gctcctatgacactg

SEQ ID NO: 833279 - DNA, 15 bp, Homo sapiens
tgctcctatgacact

SEQ ID NO: 833280 - DNA, 15 bp, Homo sapiens
ctgctcctatgacac

SEQ ID NO: 833281 - DNA, 15 bp, Homo sapiens
cctgctcctatgaca

SEQ ID NO: 833282 - DNA, 15 bp, Homo sapiens
gcctgctcctatgac

SEQ ID NO: 833283 - DNA, 15 bp, Homo sapiens
tgcctgctcctatga

SEQ ID NO: 833284 - DNA, 15 bp, Homo sapiens
ctgcctgctcctatg

SEQ ID NO: 833285 - DNA, 15 bp, Homo sapiens
cctgcctgctcctat

SEQ ID NO: 833286 - DNA, 15 bp, Homo sapiens
acctgcctgctccta

SEQ ID NO: 833287 - DNA, 15 bp, Homo sapiens
tacctgcctgctcct

SEQ ID NO: 833288 - DNA, 15 bp, Homo sapiens
ttacctgcctgctcc

SEQ ID NO: 833289 - DNA, 15 bp, Homo sapiens
cttacctgcctgctc

SEQ ID NO: 833290 - DNA, 15 bp, Homo sapiens
acttacctgcctgct

SEQ ID NO: 833291 - DNA, 15 bp, Homo sapiens
cacttacctgcctgc

SEQ ID NO: 833292 - DNA, 15 bp, Homo sapiens
acacttacctgcctg

SEQ ID NO: 833293 - DNA, 15 bp, Homo sapiens
tacacttacctgcct

SEQ ID NO: 833294 - DNA, 15 bp, Homo sapiens
ttacacttacctgcc

SEQ ID NO: 833295 - DNA, 15 bp, Homo sapiens
tttacacttacctgc

SEQ ID NO: 833296 - DNA, 15 bp, Homo sapiens
atttacacttacctg

SEQ ID NO: 833297 - DNA, 15 bp, Homo sapiens
aatttacacttacct

SEQ ID NO: 833298 - DNA, 15 bp, Homo sapiens
aaatttacacttacc

SEQ ID NO: 833299 - DNA, 15 bp, Homo sapiens
caaatttacacttac

SEQ ID NO: 833300 - DNA, 15 bp, Homo sapiens
acaaatttacactta

SEQ ID NO: 833301 - DNA, 15 bp, Homo sapiens
gacaaatttacactt

SEQ ID NO: 833302 - DNA, 15 bp, Homo sapiens
agacaaatttacact

SEQ ID NO: 833303 - DNA, 15 bp, Homo sapiens
cagacaaatttacac

SEQ ID NO: 833304 - DNA, 15 bp, Homo sapiens
ccagacaaatttaca

SEQ ID NO: 833305 - DNA, 15 bp, Homo sapiens
tccagacaaatttac

SEQ ID NO: 833306 - DNA, 15 bp, Homo sapiens
atccagacaaattta

SEQ ID NO: 833307 - DNA, 15 bp, Homo sapiens
tatccagacaaattt

SEQ ID NO: 833308 - DNA, 15 bp, Homo sapiens
ctatccagacaaatt

SEQ ID NO: 833309 - DNA, 15 bp, Homo sapiens
cctatccagacaaat

SEQ ID NO: 833310 - DNA, 15 bp, Homo sapiens
tcctatccagacaaa

SEQ ID NO: 833311 - DNA, 15 bp, Homo sapiens
ctcctatccagacaa

SEQ ID NO: 833312 - DNA, 15 bp, Homo sapiens
tctcctatccagaca

SEQ ID NO: 833313 - DNA, 15 bp, Homo sapiens
ttctcctatccagac

SEQ ID NO: 833314 - DNA, 15 bp, Homo sapiens
tttctcctatccaga

SEQ ID NO: 833315 - DNA, 15 bp, Homo sapiens
ctttctcctatccag

SEQ ID NO: 833316 - DNA, 15 bp, Homo sapiens
gctttctcctatcca

SEQ ID NO: 833317 - DNA, 15 bp, Homo sapiens
tgctttctcctatcc

SEQ ID NO: 833318 - DNA, 15 bp, Homo sapiens
atgctttctcctatc

SEQ ID NO: 833319 - DNA, 15 bp, Homo sapiens
catgctttctcctat

SEQ ID NO: 833320 - DNA, 15 bp, Homo sapiens
gcatgctttctccta

SEQ ID NO: 833321 - DNA, 15 bp, Homo sapiens
tgcatgctttctcct

SEQ ID NO: 833322 - DNA, 15 bp, Homo sapiens
gtgcatgctttctcc

SEQ ID NO: 833323 - DNA, 15 bp, Homo sapiens
tgtgcatgctttctc

SEQ ID NO: 833324 - DNA, 15 bp, Homo sapiens
ttgtgcatgctttct

SEQ ID NO: 833325 - DNA, 15 bp, Homo sapiens
gttgtgcatgctttc

SEQ ID NO: 833326 - DNA, 15 bp, Homo sapiens
tgttgtgcatgcttt

SEQ ID NO: 833327 - DNA, 15 bp, Homo sapiens
atgttgtgcatgctt

SEQ ID NO: 833328 - DNA, 15 bp, Homo sapiens
tatgttgtgcatgct

SEQ ID NO: 833329 - DNA, 15 bp, Homo sapiens
atatgttgtgcatgc

SEQ ID NO: 833330 - DNA, 15 bp, Homo sapiens
aatatgttgtgcatg

SEQ ID NO: 833331 - DNA, 15 bp, Homo sapiens
aaatatgttgtgcat

SEQ ID NO: 833332 - DNA, 15 bp, Homo sapiens
gaaatatgttgtgca

SEQ ID NO: 833333 - DNA, 15 bp, Homo sapiens
tgaaatatgttgtgc

SEQ ID NO: 833334 - DNA, 15 bp, Homo sapiens
gtgaaatatgttgtg

SEQ ID NO: 833335 - DNA, 15 bp, Homo sapiens
tgtgaaatatgttgt

SEQ ID NO: 833336 - DNA, 15 bp, Homo sapiens
atgtgaaatatgttg

SEQ ID NO: 833337 - DNA, 15 bp, Homo sapiens
tatgtgaaatatgtt

SEQ ID NO: 833338 - DNA, 15 bp, Homo sapiens
ctatgtgaaatatgt

SEQ ID NO: 833339 - DNA, 15 bp, Homo sapiens
actatgtgaaatatg

SEQ ID NO: 833340 - DNA, 15 bp, Homo sapiens
aactatgtgaaatat

SEQ ID NO: 833341 - DNA, 15 bp, Homo sapiens
aaactatgtgaaata

SEQ ID NO: 833342 - DNA, 15 bp, Homo sapiens
aaaactatgtgaaat

SEQ ID NO: 833343 - DNA, 15 bp, Homo sapiens
gaaaactatgtgaaa

SEQ ID NO: 833344 - DNA, 15 bp, Homo sapiens
agaaaactatgtgaa

SEQ ID NO: 833345 - DNA, 15 bp, Homo sapiens
cagaaaactatgtga

SEQ ID NO: 833346 - DNA, 15 bp, Homo sapiens
tcagaaaactatgtg

SEQ ID NO: 833347 - DNA, 15 bp, Homo sapiens
atcagaaaactatgt

SEQ ID NO: 833348 - DNA, 15 bp, Homo sapiens
aatcagaaaactatg

SEQ ID NO: 833349 - DNA, 15 bp, Homo sapiens
aaatcagaaaactat

SEQ ID NO: 833350 - DNA, 15 bp, Homo sapiens
gaaatcagaaaacta

SEQ ID NO: 833351 - DNA, 15 bp, Homo sapiens
tgaaatcagaaaact

SEQ ID NO: 833352 - DNA, 15 bp, Homo sapiens
ctgaaatcagaaaac

SEQ ID NO: 833353 - DNA, 15 bp, Homo sapiens
actgaaatcagaaaa

SEQ ID NO: 833354 - DNA, 15 bp, Homo sapiens
aactgaaatcagaaa

SEQ ID NO: 833355 - DNA, 15 bp, Homo sapiens
aaactgaaatcagaa

SEQ ID NO: 833356 - DNA, 15 bp, Homo sapiens
caaactgaaatcaga

SEQ ID NO: 833357 - DNA, 15 bp, Homo sapiens
acaaactgaaatcag

SEQ ID NO: 833358 - DNA, 15 bp, Homo sapiens
aacaaactgaaatca

SEQ ID NO: 833359 - DNA, 15 bp, Homo sapiens
aaacaaactgaaatc

SEQ ID NO: 833360 - DNA, 15 bp, Homo sapiens
aaaacaaactgaaat

SEQ ID NO: 833361 - DNA, 15 bp, Homo sapiens
aaaaacaaactgaaa

SEQ ID NO: 833362 - DNA, 15 bp, Homo sapiens
caaaaacaaactgaa

SEQ ID NO: 833363 - DNA, 15 bp, Homo sapiens
gcaaaaacaaactga

SEQ ID NO: 833364 - DNA, 15 bp, Homo sapiens
tgcaaaaacaaactg

SEQ ID NO: 833365 - DNA, 15 bp, Homo sapiens
ttgcaaaaacaaact

SEQ ID NO: 833366 - DNA, 15 bp, Homo sapiens
tttgcaaaaacaaac

SEQ ID NO: 833367 - DNA, 15 bp, Homo sapiens
atttgcaaaaacaaa

SEQ ID NO: 833368 - DNA, 15 bp, Homo sapiens
aatttgcaaaaacaa

SEQ ID NO: 833369 - DNA, 15 bp, Homo sapiens
taatttgcaaaaaca

SEQ ID NO: 833370 - DNA, 15 bp, Homo sapiens
ataatttgcaaaaac

SEQ ID NO: 833371 - DNA, 15 bp, Homo sapiens
aataatttgcaaaaa

SEQ ID NO: 833372 - DNA, 15 bp, Homo sapiens
gaataatttgcaaaa

SEQ ID NO: 833373 - DNA, 15 bp, Homo sapiens
tgaataatttgcaaa

SEQ ID NO: 833374 - DNA, 15 bp, Homo sapiens
gtgaataatttgcaa

SEQ ID NO: 833375 - DNA, 15 bp, Homo sapiens
agtgaataatttgca

SEQ ID NO: 833376 - DNA, 15 bp, Homo sapiens
gagtgaataatttgc

SEQ ID NO: 833377 - DNA, 15 bp, Homo sapiens
tgagtgaataatttg

SEQ ID NO: 833378 - DNA, 15 bp, Homo sapiens
ctgagtgaataattt

SEQ ID NO: 833379 - DNA, 15 bp, Homo sapiens
actgagtgaataatt

SEQ ID NO: 833380 - DNA, 15 bp, Homo sapiens
cactgagtgaataat

SEQ ID NO: 833381 - DNA, 15 bp, Homo sapiens
tcactgagtgaataa

SEQ ID NO: 833382 - DNA, 15 bp, Homo sapiens
ctcactgagtgaata

SEQ ID NO: 833383 - DNA, 15 bp, Homo sapiens
tctcactgagtgaat

SEQ ID NO: 833384 - DNA, 15 bp, Homo sapiens
atctcactgagtgaa

SEQ ID NO: 833385 - DNA, 15 bp, Homo sapiens
tatctcactgagtga

SEQ ID NO: 833386 - DNA, 15 bp, Homo sapiens
ctatctcactgagtg

SEQ ID NO: 833387 - DNA, 15 bp, Homo sapiens
gctatctcactgagt

SEQ ID NO: 833388 - DNA, 15 bp, Homo sapiens
agctatctcactgag

SEQ ID NO: 833389 - DNA, 15 bp, Homo sapiens
aagctatctcactga

SEQ ID NO: 833390 - DNA, 15 bp, Homo sapiens
taagctatctcactg

SEQ ID NO: 833391 - DNA, 15 bp, Homo sapiens
ttaagctatctcact

SEQ ID NO: 833392 - DNA, 15 bp, Homo sapiens
tttaagctatctcac

SEQ ID NO: 833393 - DNA, 15 bp, Homo sapiens
ctttaagctatctca

SEQ ID NO: 833394 - DNA, 15 bp, Homo sapiens
tctttaagctatctc

SEQ ID NO: 833395 - DNA, 15 bp, Homo sapiens
gtctttaagctatct

SEQ ID NO: 833396 - DNA, 15 bp, Homo sapiens
cgtctttaagctatc

SEQ ID NO: 833397 - DNA, 15 bp, Homo sapiens
acgtctttaagctat

SEQ ID NO: 833398 - DNA, 15 bp, Homo sapiens
aacgtctttaagcta

SEQ ID NO: 833399 - DNA, 15 bp, Homo sapiens
taacgtctttaagct

SEQ ID NO: 833400 - DNA, 15 bp, Homo sapiens
ataacgtctttaagc

SEQ ID NO: 833401 - DNA, 15 bp, Homo sapiens
gataacgtctttaag

SEQ ID NO: 833402 - DNA, 15 bp, Homo sapiens
tgataacgtctttaa

SEQ ID NO: 833403 - DNA, 15 bp, Homo sapiens
gtgataacgtcttta

SEQ ID NO: 833404 - DNA, 15 bp, Homo sapiens
tgtgataacgtcttt

SEQ ID NO: 833405 - DNA, 15 bp, Homo sapiens
ctgtgataacgtctt

SEQ ID NO: 833406 - DNA, 15 bp, Homo sapiens
cctgtgataacgtct

SEQ ID NO: 833407 - DNA, 15 bp, Homo sapiens
ccctgtgataacgtc

SEQ ID NO: 833408 - DNA, 15 bp, Homo sapiens
tccctgtgataacgt

SEQ ID NO: 833409 - DNA, 15 bp, Homo sapiens
ttccctgtgataacg

SEQ ID NO: 833410 - DNA, 15 bp, Homo sapiens
tttccctgtgataac

SEQ ID NO: 833411 - DNA, 15 bp, Homo sapiens
ctttccctgtgataa

SEQ ID NO: 833412 - DNA, 15 bp, Homo sapiens
cctttccctgtgata

SEQ ID NO: 833413 - DNA, 15 bp, Homo sapiens
gcctttccctgtgat

SEQ ID NO: 833414 - DNA, 15 bp, Homo sapiens
tgcctttccctgtga

SEQ ID NO: 833415 - DNA, 15 bp, Homo sapiens
atgcctttccctgtg

SEQ ID NO: 833416 - DNA, 15 bp, Homo sapiens
catgcctttccctgt

SEQ ID NO: 833417 - DNA, 15 bp, Homo sapiens
ccatgcctttccctg

SEQ ID NO: 833418 - DNA, 15 bp, Homo sapiens
tccatgcctttccct

SEQ ID NO: 833419 - DNA, 15 bp, Homo sapiens
ctccatgcctttccc

SEQ ID NO: 833420 - DNA, 15 bp, Homo sapiens
tctccatgcctttcc

SEQ ID NO: 833421 - DNA, 15 bp, Homo sapiens
atctccatgcctttc

SEQ ID NO: 833422 - DNA, 15 bp, Homo sapiens
tatctccatgccttt

SEQ ID NO: 833423 - DNA, 15 bp, Homo sapiens
ctatctccatgcctt

SEQ ID NO: 833424 - DNA, 15 bp, Homo sapiens
actatctccatgcct

SEQ ID NO: 833425 - DNA, 15 bp, Homo sapiens
aactatctccatgcc

SEQ ID NO: 833426 - DNA, 15 bp, Homo sapiens
gaactatctccatgc

SEQ ID NO: 833427 - DNA, 15 bp, Homo sapiens
agaactatctccatg

SEQ ID NO: 833428 - DNA, 15 bp, Homo sapiens
cagaactatctccat

SEQ ID NO: 833429 - DNA, 15 bp, Homo sapiens
acagaactatctcca

SEQ ID NO: 833430 - DNA, 15 bp, Homo sapiens
cacagaactatctcc

SEQ ID NO: 833431 - DNA, 15 bp, Homo sapiens
acacagaactatctc

SEQ ID NO: 833432 - DNA, 15 bp, Homo sapiens
aacacagaactatct

SEQ ID NO: 833433 - DNA, 15 bp, Homo sapiens
caacacagaactatc

SEQ ID NO: 833434 - DNA, 15 bp, Homo sapiens
tcaacacagaactat

SEQ ID NO: 833435 - DNA, 15 bp, Homo sapiens
atcaacacagaacta

SEQ ID NO: 833436 - DNA, 15 bp, Homo sapiens
tatcaacacagaact

SEQ ID NO: 833437 - DNA, 15 bp, Homo sapiens
ctatcaacacagaac

SEQ ID NO: 833438 - DNA, 15 bp, Homo sapiens
tctatcaacacagaa

SEQ ID NO: 833439 - DNA, 15 bp, Homo sapiens
ttctatcaacacaga

SEQ ID NO: 833440 - DNA, 15 bp, Homo sapiens
tttctatcaacacag

SEQ ID NO: 833441 - DNA, 15 bp, Homo sapiens
ttttctatcaacaca

SEQ ID NO: 833442 - DNA, 15 bp, Homo sapiens
gttttctatcaacac

SEQ ID NO: 833443 - DNA, 15 bp, Homo sapiens
agttttctatcaaca

SEQ ID NO: 833444 - DNA, 15 bp, Homo sapiens
aagttttctatcaac

SEQ ID NO: 833445 - DNA, 15 bp, Homo sapiens
caagttttctatcaa

SEQ ID NO: 833446 - DNA, 15 bp, Homo sapiens
acaagttttctatca

SEQ ID NO: 833447 - DNA, 15 bp, Homo sapiens
tacaagttttctatc

SEQ ID NO: 833448 - DNA, 15 bp, Homo sapiens
ttacaagttttctat

SEQ ID NO: 833449 - DNA, 15 bp, Homo sapiens
attacaagttttcta

SEQ ID NO: 833450 - DNA, 15 bp, Homo sapiens
cattacaagttttct

SEQ ID NO: 833451 - DNA, 15 bp, Homo sapiens
acattacaagttttc

SEQ ID NO: 833452 - DNA, 15 bp, Homo sapiens
tacattacaagtttt

SEQ ID NO: 833453 - DNA, 15 bp, Homo sapiens
gtacattacaagttt

SEQ ID NO: 833454 - DNA, 15 bp, Homo sapiens
tgtacattacaagtt

SEQ ID NO: 833455 - DNA, 15 bp, Homo sapiens
ctgtacattacaagt

SEQ ID NO: 833456 - DNA, 15 bp, Homo sapiens
gctgtacattacaag

SEQ ID NO: 833457 - DNA, 15 bp, Homo sapiens
ggctgtacattacaa

SEQ ID NO: 833458 - DNA, 15 bp, Homo sapiens
tggctgtacattaca

SEQ ID NO: 833459 - DNA, 15 bp, Homo sapiens
atggctgtacattac

SEQ ID NO: 833460 - DNA, 15 bp, Homo sapiens
catggctgtacatta

SEQ ID NO: 833461 - DNA, 15 bp, Homo sapiens
tcatggctgtacatt

SEQ ID NO: 833462 - DNA, 15 bp, Homo sapiens
ctcatggctgtacat

SEQ ID NO: 833463 - DNA, 15 bp, Homo sapiens
actcatggctgtaca

SEQ ID NO: 833464 - DNA, 15 bp, Homo sapiens
cactcatggctgtac

SEQ ID NO: 833465 - DNA, 15 bp, Homo sapiens
tcactcatggctgta

SEQ ID NO: 833466 - DNA, 15 bp, Homo sapiens
ctcactcatggctgt

SEQ ID NO: 833467 - DNA, 15 bp, Homo sapiens
tctcactcatggctg

SEQ ID NO: 833468 - DNA, 15 bp, Homo sapiens
ttctcactcatggct

SEQ ID NO: 833469 - DNA, 15 bp, Homo sapiens
cttctcactcatggc

SEQ ID NO: 833470 - DNA, 15 bp, Homo sapiens
acttctcactcatgg

SEQ ID NO: 833471 - DNA, 15 bp, Homo sapiens
gacttctcactcatg

SEQ ID NO: 833472 - DNA, 15 bp, Homo sapiens
tgacttctcactcat

SEQ ID NO: 833473 - DNA, 15 bp, Homo sapiens
ctgacttctcactca

SEQ ID NO: 833474 - DNA, 15 bp, Homo sapiens
cctgacttctcactc

SEQ ID NO: 833475 - DNA, 15 bp, Homo sapiens
acctgacttctcact

SEQ ID NO: 833476 - DNA, 15 bp, Homo sapiens
aacctgacttctcac

SEQ ID NO: 833477 - DNA, 15 bp, Homo sapiens
gaacctgacttctca

SEQ ID NO: 833478 - DNA, 15 bp, Homo sapiens
tgaacctgacttctc

SEQ ID NO: 833479 - DNA, 15 bp, Homo sapiens
ctgaacctgacttct

SEQ ID NO: 833480 - DNA, 15 bp, Homo sapiens
tctgaacctgacttc

SEQ ID NO: 833481 - DNA, 15 bp, Homo sapiens
atctgaacctgactt

SEQ ID NO: 833482 - DNA, 15 bp, Homo sapiens
aatctgaacctgact

SEQ ID NO: 833483 - DNA, 15 bp, Homo sapiens
gaatctgaacctgac

SEQ ID NO: 833484 - DNA, 15 bp, Homo sapiens
agaatctgaacctga

SEQ ID NO: 833485 - DNA, 15 bp, Homo sapiens
aagaatctgaacctg

SEQ ID NO: 833486 - DNA, 15 bp, Homo sapiens
gaagaatctgaacct

SEQ ID NO: 833487 - DNA, 15 bp, Homo sapiens
tgaagaatctgaacc

SEQ ID NO: 833488 - DNA, 15 bp, Homo sapiens
gtgaagaatctgaac

SEQ ID NO: 833489 - DNA, 15 bp, Homo sapiens
ggtgaagaatctgaa

SEQ ID NO: 833490 - DNA, 15 bp, Homo sapiens
aggtgaagaatctga

SEQ ID NO: 833491 - DNA, 15 bp, Homo sapiens
aaggtgaagaatctg

SEQ ID NO: 833492 - DNA, 15 bp, Homo sapiens
gaaggtgaagaatct

SEQ ID NO: 833493 - DNA, 15 bp, Homo sapiens
tgaaggtgaagaatc

SEQ ID NO: 833494 - DNA, 15 bp, Homo sapiens
ctgaaggtgaagaat

SEQ ID NO: 833495 - DNA, 15 bp, Homo sapiens
actgaaggtgaagaa

SEQ ID NO: 833496 - DNA, 15 bp, Homo sapiens
gactgaaggtgaaga

SEQ ID NO: 833497 - DNA, 15 bp, Homo sapiens
ggactgaaggtgaag

SEQ ID NO: 833498 - DNA, 15 bp, Homo sapiens
aggactgaaggtgaa

SEQ ID NO: 833499 - DNA, 15 bp, Homo sapiens
gaggactgaaggtga

SEQ ID NO: 833500 - DNA, 15 bp, Homo sapiens
ggaggactgaaggtg

SEQ ID NO: 833501 - DNA, 15 bp, Homo sapiens
aggaggactgaaggt

SEQ ID NO: 833502 - DNA, 15 bp, Homo sapiens
gaggaggactgaagg

SEQ ID NO: 833503 - DNA, 15 bp, Homo sapiens
agaggaggactgaag

SEQ ID NO: 833504 - DNA, 15 bp, Homo sapiens
aagaggaggactgaa

SEQ ID NO: 833505 - DNA, 15 bp, Homo sapiens
aaagaggaggactga

SEQ ID NO: 833506 - DNA, 15 bp, Homo sapiens
gaaagaggaggactg

SEQ ID NO: 833507 - DNA, 15 bp, Homo sapiens
tgaaagaggaggact

SEQ ID NO: 833508 - DNA, 15 bp, Homo sapiens
atgaaagaggaggac

SEQ ID NO: 833509 - DNA, 15 bp, Homo sapiens
tatgaaagaggagga

SEQ ID NO: 833510 - DNA, 15 bp, Homo sapiens
ttatgaaagaggagg

SEQ ID NO: 833511 - DNA, 15 bp, Homo sapiens
tttatgaaagaggag

SEQ ID NO: 833512 - DNA, 15 bp, Homo sapiens
gtttatgaaagagga

SEQ ID NO: 833513 - DNA, 15 bp, Homo sapiens
tgtttatgaaagagg

SEQ ID NO: 833514 - DNA, 15 bp, Homo sapiens
ctgtttatgaaagag

SEQ ID NO: 833515 - DNA, 15 bp, Homo sapiens
gctgtttatgaaaga

SEQ ID NO: 833516 - DNA, 15 bp, Homo sapiens
agctgtttatgaaag

SEQ ID NO: 833517 - DNA, 15 bp, Homo sapiens
gagctgtttatgaaa

SEQ ID NO: 833518 - DNA, 15 bp, Homo sapiens
ggagctgtttatgaa

SEQ ID NO: 833519 - DNA, 15 bp, Homo sapiens
tggagctgtttatga

SEQ ID NO: 833520 - DNA, 15 bp, Homo sapiens
atggagctgtttatg

SEQ ID NO: 833521 - DNA, 15 bp, Homo sapiens
catggagctgtttat

SEQ ID NO: 833522 - DNA, 15 bp, Homo sapiens
acatggagctgttta

SEQ ID NO: 833523 - DNA, 15 bp, Homo sapiens
gacatggagctgttt

SEQ ID NO: 833524 - DNA, 15 bp, Homo sapiens
ggacatggagctgtt

SEQ ID NO: 833525 - DNA, 15 bp, Homo sapiens
aggacatggagctgt

SEQ ID NO: 833526 - DNA, 15 bp, Homo sapiens
taggacatggagctg

SEQ ID NO: 833527 - DNA, 15 bp, Homo sapiens
ataggacatggagct

SEQ ID NO: 833528 - DNA, 15 bp, Homo sapiens
aataggacatggagc

SEQ ID NO: 833529 - DNA, 15 bp, Homo sapiens
aaataggacatggag

SEQ ID NO: 833530 - DNA, 15 bp, Homo sapiens
aaaataggacatgga

SEQ ID NO: 833531 - DNA, 15 bp, Homo sapiens
taaaataggacatgg

SEQ ID NO: 833532 - DNA, 15 bp, Homo sapiens
gtaaaataggacatg

SEQ ID NO: 833533 - DNA, 15 bp, Homo sapiens
tgtaaaataggacat

SEQ ID NO: 833534 - DNA, 15 bp, Homo sapiens
atgtaaaataggaca

SEQ ID NO: 833535 - DNA, 15 bp, Homo sapiens
tatgtaaaataggac

SEQ ID NO: 833536 - DNA, 15 bp, Homo sapiens
atatgtaaaatagga

SEQ ID NO: 833537 - DNA, 15 bp, Homo sapiens
gatatgtaaaatagg

SEQ ID NO: 833538 - DNA, 15 bp, Homo sapiens
ggatatgtaaaatag

SEQ ID NO: 833539 - DNA, 15 bp, Homo sapiens
aggatatgtaaaata

SEQ ID NO: 833540 - DNA, 15 bp, Homo sapiens
taggatatgtaaaat

SEQ ID NO: 833541 - DNA, 15 bp, Homo sapiens
gtaggatatgtaaaa

SEQ ID NO: 833542 - DNA, 15 bp, Homo sapiens
agtaggatatgtaaa

SEQ ID NO: 833543 - DNA, 15 bp, Homo sapiens
aagtaggatatgtaa

SEQ ID NO: 833544 - DNA, 15 bp, Homo sapiens
aaagtaggatatgta

SEQ ID NO: 833545 - DNA, 15 bp, Homo sapiens
taaagtaggatatgt

SEQ ID NO: 833546 - DNA, 15 bp, Homo sapiens
ttaaagtaggatatg

SEQ ID NO: 833547 - DNA, 15 bp, Homo sapiens
tttaaagtaggatat

SEQ ID NO: 833548 - DNA, 15 bp, Homo sapiens
ttttaaagtaggata

SEQ ID NO: 833549 - DNA, 15 bp, Homo sapiens
gttttaaagtaggat

SEQ ID NO: 833550 - DNA, 15 bp, Homo sapiens
cgttttaaagtagga

SEQ ID NO: 833551 - DNA, 15 bp, Homo sapiens
tcgttttaaagtagg

SEQ ID NO: 833552 - DNA, 15 bp, Homo sapiens
ctcgttttaaagtag

SEQ ID NO: 833553 - DNA, 15 bp, Homo sapiens
tctcgttttaaagta

SEQ ID NO: 833554 - DNA, 15 bp, Homo sapiens
atctcgttttaaagt

SEQ ID NO: 833555 - DNA, 15 bp, Homo sapiens
aatctcgttttaaag

SEQ ID NO: 833556 - DNA, 15 bp, Homo sapiens
taatctcgttttaaa

SEQ ID NO: 833557 - DNA, 15 bp, Homo sapiens
ataatctcgttttaa

SEQ ID NO: 833558 - DNA, 15 bp, Homo sapiens
tataatctcgtttta

SEQ ID NO: 833559 - DNA, 15 bp, Homo sapiens
ctataatctcgtttt

SEQ ID NO: 833560 - DNA, 15 bp, Homo sapiens
tctataatctcgttt

SEQ ID NO: 833561 - DNA, 15 bp, Homo sapiens
ttctataatctcgtt

SEQ ID NO: 833562 - DNA, 15 bp, Homo sapiens
cttctataatctcgt

SEQ ID NO: 833563 - DNA, 15 bp, Homo sapiens
tcttctataatctcg

SEQ ID NO: 833564 - DNA, 15 bp, Homo sapiens
ttcttctataatctc

SEQ ID NO: 833565 - DNA, 15 bp, Homo sapiens
attcttctataatct

SEQ ID NO: 833566 - DNA, 15 bp, Homo sapiens
cattcttctataatc

SEQ ID NO: 833567 - DNA, 15 bp, Homo sapiens
tcattcttctataat

SEQ ID NO: 833568 - DNA, 15 bp, Homo sapiens
ttcattcttctataa

SEQ ID NO: 833569 - DNA, 15 bp, Homo sapiens
attcattcttctata

SEQ ID NO: 833570 - DNA, 15 bp, Homo sapiens
aattcattcttctat

SEQ ID NO: 833571 - DNA, 15 bp, Homo sapiens
aaattcattcttcta

SEQ ID NO: 833572 - DNA, 15 bp, Homo sapiens
gaaattcattcttct

SEQ ID NO: 833573 - DNA, 15 bp, Homo sapiens
agaaattcattcttc

SEQ ID NO: 833574 - DNA, 15 bp, Homo sapiens
tagaaattcattctt

SEQ ID NO: 833575 - DNA, 15 bp, Homo sapiens
ctagaaattcattct

SEQ ID NO: 833576 - DNA, 15 bp, Homo sapiens
cctagaaattcattc

SEQ ID NO: 833577 - DNA, 15 bp, Homo sapiens
gcctagaaattcatt

SEQ ID NO: 833578 - DNA, 15 bp, Homo sapiens
tgcctagaaattcat

SEQ ID NO: 833579 - DNA, 15 bp, Homo sapiens
ttgcctagaaattca

SEQ ID NO: 833580 - DNA, 15 bp, Homo sapiens
tttgcctagaaattc

SEQ ID NO: 833581 - DNA, 15 bp, Homo sapiens
ctttgcctagaaatt

SEQ ID NO: 833582 - DNA, 15 bp, Homo sapiens
actttgcctagaaat

SEQ ID NO: 833583 - DNA, 15 bp, Homo sapiens
cactttgcctagaaa

SEQ ID NO: 833584 - DNA, 15 bp, Homo sapiens
tcactttgcctagaa

SEQ ID NO: 833585 - DNA, 15 bp, Homo sapiens
gtcactttgcctaga

SEQ ID NO: 833586 - DNA, 15 bp, Homo sapiens
tgtcactttgcctag

SEQ ID NO: 833587 - DNA, 15 bp, Homo sapiens
gtgtcactttgccta

SEQ ID NO: 833588 - DNA, 15 bp, Homo sapiens
agtgtcactttgcct

SEQ ID NO: 833589 - DNA, 15 bp, Homo sapiens
aagtgtcactttgcc

SEQ ID NO: 833590 - DNA, 15 bp, Homo sapiens
taagtgtcactttgc

SEQ ID NO: 833591 - DNA, 15 bp, Homo sapiens
ataagtgtcactttg

SEQ ID NO: 833592 - DNA, 15 bp, Homo sapiens
aataagtgtcacttt

SEQ ID NO: 833593 - DNA, 15 bp, Homo sapiens
aaataagtgtcactt

SEQ ID NO: 833594 - DNA, 15 bp, Homo sapiens
aaaataagtgtcact

SEQ ID NO: 833595 - DNA, 15 bp, Homo sapiens
taaaataagtgtcac

SEQ ID NO: 833596 - DNA, 15 bp, Homo sapiens
ttaaaataagtgtca

SEQ ID NO: 833597 - DNA, 15 bp, Homo sapiens
tttaaaataagtgtc

SEQ ID NO: 833598 - DNA, 15 bp, Homo sapiens
ttttaaaataagtgt

SEQ ID NO: 833599 - DNA, 15 bp, Homo sapiens
attttaaaataagtg

SEQ ID NO: 833600 - DNA, 15 bp, Homo sapiens
tattttaaaataagt

SEQ ID NO: 833601 - DNA, 15 bp, Homo sapiens
gtattttaaaataag

SEQ ID NO: 833602 - DNA, 15 bp, Homo sapiens
agtattttaaaataa

SEQ ID NO: 833603 - DNA, 15 bp, Homo sapiens
tagtattttaaaata

SEQ ID NO: 833604 - DNA, 15 bp, Homo sapiens
atagtattttaaaat

SEQ ID NO: 833605 - DNA, 15 bp, Homo sapiens
aatagtattttaaaa

SEQ ID NO: 833606 - DNA, 15 bp, Homo sapiens
taatagtattttaaa

SEQ ID NO: 833607 - DNA, 15 bp, Homo sapiens
gtaatagtattttaa

SEQ ID NO: 833608 - DNA, 15 bp, Homo sapiens
cgtaatagtatttta

SEQ ID NO: 833609 - DNA, 15 bp, Homo sapiens
acgtaatagtatttt

SEQ ID NO: 833610 - DNA, 15 bp, Homo sapiens
tacgtaatagtattt

SEQ ID NO: 833611 - DNA, 15 bp, Homo sapiens
atacgtaatagtatt

SEQ ID NO: 833612 - DNA, 15 bp, Homo sapiens
gatacgtaatagtat

SEQ ID NO: 833613 - DNA, 15 bp, Homo sapiens
ggatacgtaatagta

SEQ ID NO: 833614 - DNA, 15 bp, Homo sapiens
gggatacgtaatagt

SEQ ID NO: 833615 - DNA, 15 bp, Homo sapiens
agggatacgtaatag

SEQ ID NO: 833616 - DNA, 15 bp, Homo sapiens
cagggatacgtaata

SEQ ID NO: 833617 - DNA, 15 bp, Homo sapiens
acagggatacgtaat

SEQ ID NO: 833618 - DNA, 15 bp, Homo sapiens
cacagggatacgtaa

SEQ ID NO: 833619 - DNA, 15 bp, Homo sapiens
gcacagggatacgta

SEQ ID NO: 833620 - DNA, 15 bp, Homo sapiens
ggcacagggatacgt

SEQ ID NO: 833621 - DNA, 15 bp, Homo sapiens
gggcacagggatacg

SEQ ID NO: 833622 - DNA, 15 bp, Homo sapiens
tgggcacagggatac

SEQ ID NO: 833623 - DNA, 15 bp, Homo sapiens
atgggcacagggata

SEQ ID NO: 833624 - DNA, 15 bp, Homo sapiens
aatgggcacagggat

SEQ ID NO: 833625 - DNA, 15 bp, Homo sapiens
taatgggcacaggga

SEQ ID NO: 833626 - DNA, 15 bp, Homo sapiens
ttaatgggcacaggg

SEQ ID NO: 833627 - DNA, 15 bp, Homo sapiens
gttaatgggcacagg

SEQ ID NO: 833628 - DNA, 15 bp, Homo sapiens
agttaatgggcacag

SEQ ID NO: 833629 - DNA, 15 bp, Homo sapiens
aagttaatgggcaca

SEQ ID NO: 833630 - DNA, 15 bp, Homo sapiens
taagttaatgggcac

SEQ ID NO: 833631 - DNA, 15 bp, Homo sapiens
ataagttaatgggca

SEQ ID NO: 833632 - DNA, 15 bp, Homo sapiens
gataagttaatgggc

SEQ ID NO: 833633 - DNA, 15 bp, Homo sapiens
ggataagttaatggg

SEQ ID NO: 833634 - DNA, 15 bp, Homo sapiens
aggataagttaatgg

SEQ ID NO: 833635 - DNA, 15 bp, Homo sapiens
taggataagttaatg

SEQ ID NO: 833636 - DNA, 15 bp, Homo sapiens
gtaggataagttaat

SEQ ID NO: 833637 - DNA, 15 bp, Homo sapiens
ggtaggataagttaa

SEQ ID NO: 833638 - DNA, 15 bp, Homo sapiens
tggtaggataagtta

SEQ ID NO: 833639 - DNA, 15 bp, Homo sapiens
atggtaggataagtt

SEQ ID NO: 833640 - DNA, 15 bp, Homo sapiens
aatggtaggataagt

SEQ ID NO: 833641 - DNA, 15 bp, Homo sapiens
aaatggtaggataag

SEQ ID NO: 833642 - DNA, 15 bp, Homo sapiens
aaaatggtaggataa

SEQ ID NO: 833643 - DNA, 15 bp, Homo sapiens
aaaaatggtaggata

SEQ ID NO: 833644 - DNA, 15 bp, Homo sapiens
gaaaaatggtaggat

SEQ ID NO: 833645 - DNA, 15 bp, Homo sapiens
agaaaaatggtagga

SEQ ID NO: 833646 - DNA, 15 bp, Homo sapiens
aagaaaaatggtagg

SEQ ID NO: 833647 - DNA, 15 bp, Homo sapiens
gaagaaaaatggtag

SEQ ID NO: 833648 - DNA, 15 bp, Homo sapiens
ggaagaaaaatggta

SEQ ID NO: 833649 - DNA, 15 bp, Homo sapiens
gggaagaaaaatggt

SEQ ID NO: 833650 - DNA, 15 bp, Homo sapiens
ggggaagaaaaatgg

SEQ ID NO: 833651 - DNA, 15 bp, Homo sapiens
aggggaagaaaaatg

SEQ ID NO: 833652 - DNA, 15 bp, Homo sapiens
caggggaagaaaaat

SEQ ID NO: 833653 - DNA, 15 bp, Homo sapiens
acaggggaagaaaaa

SEQ ID NO: 833654 - DNA, 15 bp, Homo sapiens
cacaggggaagaaaa

SEQ ID NO: 833655 - DNA, 15 bp, Homo sapiens
acacaggggaagaaa

SEQ ID NO: 833656 - DNA, 15 bp, Homo sapiens
gacacaggggaagaa

SEQ ID NO: 833657 - DNA, 15 bp, Homo sapiens
ggacacaggggaaga

SEQ ID NO: 833658 - DNA, 15 bp, Homo sapiens
tggacacaggggaag

SEQ ID NO: 833659 - DNA, 15 bp, Homo sapiens
ttggacacaggggaa

SEQ ID NO: 833660 - DNA, 15 bp, Homo sapiens
tttggacacagggga

SEQ ID NO: 833661 - DNA, 15 bp, Homo sapiens
gtttggacacagggg

SEQ ID NO: 833662 - DNA, 15 bp, Homo sapiens
ggtttggacacaggg

SEQ ID NO: 833663 - DNA, 15 bp, Homo sapiens
tggtttggacacagg

SEQ ID NO: 833664 - DNA, 15 bp, Homo sapiens
gtggtttggacacag

SEQ ID NO: 833665 - DNA, 15 bp, Homo sapiens
ggtggtttggacaca

SEQ ID NO: 833666 - DNA, 15 bp, Homo sapiens
aggtggtttggacac

SEQ ID NO: 833667 - DNA, 15 bp, Homo sapiens
aaggtggtttggaca

SEQ ID NO: 833668 - DNA, 15 bp, Homo sapiens
aaaggtggtttggac

SEQ ID NO: 833669 - DNA, 15 bp, Homo sapiens
taaaggtggtttgga

SEQ ID NO: 833670 - DNA, 15 bp, Homo sapiens
ctaaaggtggtttgg

SEQ ID NO: 833671 - DNA, 15 bp, Homo sapiens
tctaaaggtggtttg

SEQ ID NO: 833672 - DNA, 15 bp, Homo sapiens
ttctaaaggtggttt

SEQ ID NO: 833673 - DNA, 15 bp, Homo sapiens
attctaaaggtggtt

SEQ ID NO: 833674 - DNA, 15 bp, Homo sapiens
gattctaaaggtggt

SEQ ID NO: 833675 - DNA, 15 bp, Homo sapiens
agattctaaaggtgg

SEQ ID NO: 833676 - DNA, 15 bp, Homo sapiens
gagattctaaaggtg

SEQ ID NO: 833677 - DNA, 15 bp, Homo sapiens
ggagattctaaaggt

SEQ ID NO: 833678 - DNA, 15 bp, Homo sapiens
aggagattctaaagg

SEQ ID NO: 833679 - DNA, 15 bp, Homo sapiens
taggagattctaaag

SEQ ID NO: 833680 - DNA, 15 bp, Homo sapiens
ttaggagattctaaa

SEQ ID NO: 833681 - DNA, 15 bp, Homo sapiens
tttaggagattctaa

SEQ ID NO: 833682 - DNA, 15 bp, Homo sapiens
atttaggagattcta

SEQ ID NO: 833683 - DNA, 15 bp, Homo sapiens
tatttaggagattct

SEQ ID NO: 833684 - DNA, 15 bp, Homo sapiens
atatttaggagattc

SEQ ID NO: 833685 - DNA, 15 bp, Homo sapiens
aatatttaggagatt

SEQ ID NO: 833686 - DNA, 15 bp, Homo sapiens
aaatatttaggagat

SEQ ID NO: 833687 - DNA, 15 bp, Homo sapiens
caaatatttaggaga

SEQ ID NO: 833688 - DNA, 15 bp, Homo sapiens
acaaatatttaggag

SEQ ID NO: 833689 - DNA, 15 bp, Homo sapiens
tacaaatatttagga

SEQ ID NO: 833690 - DNA, 15 bp, Homo sapiens
ctacaaatatttagg

SEQ ID NO: 833691 - DNA, 15 bp, Homo sapiens
gctacaaatatttag

SEQ ID NO: 833692 - DNA, 15 bp, Homo sapiens
agctacaaatattta

SEQ ID NO: 833693 - DNA, 15 bp, Homo sapiens
tagctacaaatattt

SEQ ID NO: 833694 - DNA, 15 bp, Homo sapiens
atagctacaaatatt

SEQ ID NO: 833695 - DNA, 15 bp, Homo sapiens
aatagctacaaatat

SEQ ID NO: 833696 - DNA, 15 bp, Homo sapiens
caatagctacaaata

SEQ ID NO: 833697 - DNA, 15 bp, Homo sapiens
acaatagctacaaat

SEQ ID NO: 833698 - DNA, 15 bp, Homo sapiens
tacaatagctacaaa

SEQ ID NO: 833699 - DNA, 15 bp, Homo sapiens
ttacaatagctacaa

SEQ ID NO: 833700 - DNA, 15 bp, Homo sapiens
tttacaatagctaca

SEQ ID NO: 833701 - DNA, 15 bp, Homo sapiens
gtttacaatagctac

SEQ ID NO: 833702 - DNA, 15 bp, Homo sapiens
tgtttacaatagcta

SEQ ID NO: 833703 - DNA, 15 bp, Homo sapiens
ctgtttacaatagct

SEQ ID NO: 833704 - DNA, 15 bp, Homo sapiens
gctgtttacaatagc

SEQ ID NO: 833705 - DNA, 15 bp, Homo sapiens
tgctgtttacaatag

SEQ ID NO: 833706 - DNA, 15 bp, Homo sapiens
gtgctgtttacaata

SEQ ID NO: 833707 - DNA, 15 bp, Homo sapiens
agtgctgtttacaat

SEQ ID NO: 833708 - DNA, 15 bp, Homo sapiens
cagtgctgtttacaa

SEQ ID NO: 833709 - DNA, 15 bp, Homo sapiens
ccagtgctgtttaca

SEQ ID NO: 833710 - DNA, 15 bp, Homo sapiens
tccagtgctgtttac

SEQ ID NO: 833711 - DNA, 15 bp, Homo sapiens
ctccagtgctgttta

SEQ ID NO: 833712 - DNA, 15 bp, Homo sapiens
tctccagtgctgttt

SEQ ID NO: 833713 - DNA, 15 bp, Homo sapiens
gtctccagtgctgtt

SEQ ID NO: 833714 - DNA, 15 bp, Homo sapiens
agtctccagtgctgt

SEQ ID NO: 833715 - DNA, 15 bp, Homo sapiens
aagtctccagtgctg

SEQ ID NO: 833716 - DNA, 15 bp, Homo sapiens
aaagtctccagtgct

SEQ ID NO: 833717 - DNA, 15 bp, Homo sapiens
caaagtctccagtgc

SEQ ID NO: 833718 - DNA, 15 bp, Homo sapiens
gcaaagtctccagtg

SEQ ID NO: 833719 - DNA, 15 bp, Homo sapiens
agcaaagtctccagt

SEQ ID NO: 833720 - DNA, 15 bp, Homo sapiens
tagcaaagtctccag

SEQ ID NO: 833721 - DNA, 15 bp, Homo sapiens
ctagcaaagtctcca

SEQ ID NO: 833722 - DNA, 15 bp, Homo sapiens
actagcaaagtctcc

SEQ ID NO: 833723 - DNA, 15 bp, Homo sapiens
aactagcaaagtctc

SEQ ID NO: 833724 - DNA, 15 bp, Homo sapiens
aaactagcaaagtct

SEQ ID NO: 833725 - DNA, 15 bp, Homo sapiens
taaactagcaaagtc

SEQ ID NO: 833726 - DNA, 15 bp, Homo sapiens
ttaaactagcaaagt

SEQ ID NO: 833727 - DNA, 15 bp, Homo sapiens
tttaaactagcaaag

SEQ ID NO: 833728 - DNA, 15 bp, Homo sapiens
ttttaaactagcaaa

SEQ ID NO: 833729 - DNA, 15 bp, Homo sapiens
cttttaaactagcaa

SEQ ID NO: 833730 - DNA, 15 bp, Homo sapiens
ccttttaaactagca

SEQ ID NO: 833731 - DNA, 15 bp, Homo sapiens
tccttttaaactagc

SEQ ID NO: 833732 - DNA, 15 bp, Homo sapiens
ctccttttaaactag

SEQ ID NO: 833733 - DNA, 15 bp, Homo sapiens
tctccttttaaacta

SEQ ID NO: 833734 - DNA, 15 bp, Homo sapiens
ttctccttttaaact

SEQ ID NO: 833735 - DNA, 15 bp, Homo sapiens
tttctccttttaaac

SEQ ID NO: 833736 - DNA, 15 bp, Homo sapiens
atttctccttttaaa

SEQ ID NO: 833737 - DNA, 15 bp, Homo sapiens
gatttctccttttaa

SEQ ID NO: 833738 - DNA, 15 bp, Homo sapiens
tgatttctcctttta

SEQ ID NO: 833739 - DNA, 15 bp, Homo sapiens
ttgatttctcctttt

SEQ ID NO: 833740 - DNA, 15 bp, Homo sapiens
gttgatttctccttt

SEQ ID NO: 833741 - DNA, 15 bp, Homo sapiens
cgttgatttctcctt

SEQ ID NO: 833742 - DNA, 15 bp, Homo sapiens
gcgttgatttctcct

SEQ ID NO: 833743 - DNA, 15 bp, Homo sapiens
tgcgttgatttctcc

SEQ ID NO: 833744 - DNA, 15 bp, Homo sapiens
ttgcgttgatttctc

SEQ ID NO: 833745 - DNA, 15 bp, Homo sapiens
attgcgttgatttct

SEQ ID NO: 833746 - DNA, 15 bp, Homo sapiens
aattgcgttgatttc

SEQ ID NO: 833747 - DNA, 15 bp, Homo sapiens
taattgcgttgattt

SEQ ID NO: 833748 - DNA, 15 bp, Homo sapiens
ttaattgcgttgatt

SEQ ID NO: 833749 - DNA, 15 bp, Homo sapiens
cttaattgcgttgat

SEQ ID NO: 833750 - DNA, 15 bp, Homo sapiens
gcttaattgcgttga

SEQ ID NO: 833751 - DNA, 15 bp, Homo sapiens
ggcttaattgcgttg

SEQ ID NO: 833752 - DNA, 15 bp, Homo sapiens
gggcttaattgcgtt

SEQ ID NO: 833753 - DNA, 15 bp, Homo sapiens
agggcttaattgcgt

SEQ ID NO: 833754 - DNA, 15 bp, Homo sapiens
tagggcttaattgcg

SEQ ID NO: 833755 - DNA, 15 bp, Homo sapiens
ctagggcttaattgc

SEQ ID NO: 833756 - DNA, 15 bp, Homo sapiens
actagggcttaattg

SEQ ID NO: 833757 - DNA, 15 bp, Homo sapiens
aactagggcttaatt

SEQ ID NO: 833758 - DNA, 15 bp, Homo sapiens
taactagggcttaat

SEQ ID NO: 833759 - DNA, 15 bp, Homo sapiens
ttaactagggcttaa

SEQ ID NO: 833760 - DNA, 15 bp, Homo sapiens
attaactagggctta

SEQ ID NO: 833761 - DNA, 15 bp, Homo sapiens
aattaactagggctt

SEQ ID NO: 833762 - DNA, 15 bp, Homo sapiens
aaattaactagggct

SEQ ID NO: 833763 - DNA, 15 bp, Homo sapiens
taaattaactagggc

SEQ ID NO: 833764 - DNA, 15 bp, Homo sapiens
gtaaattaactaggg

SEQ ID NO: 833765 - DNA, 15 bp, Homo sapiens
agtaaattaactagg

SEQ ID NO: 833766 - DNA, 15 bp, Homo sapiens
aagtaaattaactag

SEQ ID NO: 833767 - DNA, 15 bp, Homo sapiens
taagtaaattaacta

SEQ ID NO: 833768 - DNA, 15 bp, Homo sapiens
ataagtaaattaact

SEQ ID NO: 833769 - DNA, 15 bp, Homo sapiens
gataagtaaattaac

SEQ ID NO: 833770 - DNA, 15 bp, Homo sapiens
ggataagtaaattaa

SEQ ID NO: 833771 - DNA, 15 bp, Homo sapiens
gggataagtaaatta

SEQ ID NO: 833772 - DNA, 15 bp, Homo sapiens
agggataagtaaatt

SEQ ID NO: 833773 - DNA, 15 bp, Homo sapiens
aagggataagtaaat

SEQ ID NO: 833774 - DNA, 15 bp, Homo sapiens
taagggataagtaaa

SEQ ID NO: 833775 - DNA, 15 bp, Homo sapiens
ataagggataagtaa

SEQ ID NO: 833776 - DNA, 15 bp, Homo sapiens
cataagggataagta

SEQ ID NO: 833777 - DNA, 15 bp, Homo sapiens
tcataagggataagt

SEQ ID NO: 833778 - DNA, 15 bp, Homo sapiens
ctcataagggataag

SEQ ID NO: 833779 - DNA, 15 bp, Homo sapiens
tctcataagggataa

SEQ ID NO: 833780 - DNA, 15 bp, Homo sapiens
atctcataagggata

SEQ ID NO: 833781 - DNA, 15 bp, Homo sapiens
aatctcataagggat

SEQ ID NO: 833782 - DNA, 15 bp, Homo sapiens
taatctcataaggga

SEQ ID NO: 833783 - DNA, 15 bp, Homo sapiens
ataatctcataaggg

SEQ ID NO: 833784 - DNA, 15 bp, Homo sapiens
tataatctcataagg

SEQ ID NO: 833785 - DNA, 15 bp, Homo sapiens
ttataatctcataag

SEQ ID NO: 833786 - DNA, 15 bp, Homo sapiens
attataatctcataa

SEQ ID NO: 833787 - DNA, 15 bp, Homo sapiens
aattataatctcata

SEQ ID NO: 833788 - DNA, 15 bp, Homo sapiens
caattataatctcat

SEQ ID NO: 833789 - DNA, 15 bp, Homo sapiens
acaattataatctca

SEQ ID NO: 833790 - DNA, 15 bp, Homo sapiens
tacaattataatctc

SEQ ID NO: 833791 - DNA, 15 bp, Homo sapiens
atacaattataatct

SEQ ID NO: 833792 - DNA, 15 bp, Homo sapiens
aatacaattataatc

SEQ ID NO: 833793 - DNA, 15 bp, Homo sapiens
aaatacaattataat

SEQ ID NO: 833794 - DNA, 15 bp, Homo sapiens
aaaatacaattataa

SEQ ID NO: 833795 - DNA, 15 bp, Homo sapiens
caaaatacaattata

SEQ ID NO: 833796 - DNA, 15 bp, Homo sapiens
acaaaatacaattat

SEQ ID NO: 833797 - DNA, 15 bp, Homo sapiens
aacaaaatacaatta

SEQ ID NO: 833798 - DNA, 15 bp, Homo sapiens
taacaaaatacaatt

SEQ ID NO: 833799 - DNA, 15 bp, Homo sapiens
ataacaaaatacaat

SEQ ID NO: 833800 - DNA, 15 bp, Homo sapiens
aataacaaaatacaa

SEQ ID NO: 833801 - DNA, 15 bp, Homo sapiens
taataacaaaataca

SEQ ID NO: 833802 - DNA, 15 bp, Homo sapiens
ttaataacaaaatac

SEQ ID NO: 833803 - DNA, 15 bp, Homo sapiens
tttaataacaaaata

SEQ ID NO: 833804 - DNA, 15 bp, Homo sapiens
ttttaataacaaaat

SEQ ID NO: 833805 - DNA, 15 bp, Homo sapiens
cttttaataacaaaa

SEQ ID NO: 833806 - DNA, 15 bp, Homo sapiens
ccttttaataacaaa

SEQ ID NO: 833807 - DNA, 15 bp, Homo sapiens
cccttttaataacaa

SEQ ID NO: 833808 - DNA, 15 bp, Homo sapiens
ccccttttaataaca

SEQ ID NO: 833809 - DNA, 15 bp, Homo sapiens
cccccttttaataac

SEQ ID NO: 833810 - DNA, 15 bp, Homo sapiens
tcccccttttaataa

SEQ ID NO: 833811 - DNA, 15 bp, Homo sapiens
gtcccccttttaata

SEQ ID NO: 833812 - DNA, 15 bp, Homo sapiens
tgtcccccttttaat

SEQ ID NO: 833813 - DNA, 15 bp, Homo sapiens
ctgtcccccttttaa

SEQ ID NO: 833814 - DNA, 15 bp, Homo sapiens
tctgtccccctttta

SEQ ID NO: 833815 - DNA, 15 bp, Homo sapiens
ctctgtccccctttt

SEQ ID NO: 833816 - DNA, 15 bp, Homo sapiens
actctgtcccccttt

SEQ ID NO: 833817 - DNA, 15 bp, Homo sapiens
tactctgtccccctt

SEQ ID NO: 833818 - DNA, 15 bp, Homo sapiens
gtactctgtccccct

SEQ ID NO: 833819 - DNA, 15 bp, Homo sapiens
tgtactctgtccccc

SEQ ID NO: 833820 - DNA, 15 bp, Homo sapiens
gtgtactctgtcccc

SEQ ID NO: 833821 - DNA, 15 bp, Homo sapiens
agtgtactctgtccc

SEQ ID NO: 833822 - DNA, 15 bp, Homo sapiens
cagtgtactctgtcc

SEQ ID NO: 833823 - DNA, 15 bp, Homo sapiens
acagtgtactctgtc

SEQ ID NO: 833824 - DNA, 15 bp, Homo sapiens
aacagtgtactctgt

SEQ ID NO: 833825 - DNA, 15 bp, Homo sapiens
gaacagtgtactctg

SEQ ID NO: 833826 - DNA, 15 bp, Homo sapiens
agaacagtgtactct

SEQ ID NO: 833827 - DNA, 15 bp, Homo sapiens
gagaacagtgtactc

SEQ ID NO: 833828 - DNA, 15 bp, Homo sapiens
agagaacagtgtact

SEQ ID NO: 833829 - DNA, 15 bp, Homo sapiens
aagagaacagtgtac

SEQ ID NO: 833830 - DNA, 15 bp, Homo sapiens
caagagaacagtgta

SEQ ID NO: 833831 - DNA, 15 bp, Homo sapiens
gcaagagaacagtgt

SEQ ID NO: 833832 - DNA, 15 bp, Homo sapiens
ggcaagagaacagtg

SEQ ID NO: 833833 - DNA, 15 bp, Homo sapiens
aggcaagagaacagt

SEQ ID NO: 833834 - DNA, 15 bp, Homo sapiens
aaggcaagagaacag

SEQ ID NO: 833835 - DNA, 15 bp, Homo sapiens
aaaggcaagagaaca

SEQ ID NO: 833836 - DNA, 15 bp, Homo sapiens
aaaaggcaagagaac

SEQ ID NO: 833837 - DNA, 15 bp, Homo sapiens
aaaaaggcaagagaa

SEQ ID NO: 833838 - DNA, 15 bp, Homo sapiens
taaaaaggcaagaga

SEQ ID NO: 833839 - DNA, 15 bp, Homo sapiens
ttaaaaaggcaagag

SEQ ID NO: 833840 - DNA, 15 bp, Homo sapiens
attaaaaaggcaaga

SEQ ID NO: 833841 - DNA, 15 bp, Homo sapiens
aattaaaaaggcaag

SEQ ID NO: 833842 - DNA, 15 bp, Homo sapiens
aaattaaaaaggcaa

SEQ ID NO: 833843 - DNA, 15 bp, Homo sapiens
gaaattaaaaaggca

SEQ ID NO: 833844 - DNA, 15 bp, Homo sapiens
ggaaattaaaaaggc

SEQ ID NO: 833845 - DNA, 15 bp, Homo sapiens
tggaaattaaaaagg

SEQ ID NO: 833846 - DNA, 15 bp, Homo sapiens
ctggaaattaaaaag

SEQ ID NO: 833847 - DNA, 15 bp, Homo sapiens
tctggaaattaaaaa

SEQ ID NO: 833848 - DNA, 15 bp, Homo sapiens
gtctggaaattaaaa

SEQ ID NO: 833849 - DNA, 15 bp, Homo sapiens
agtctggaaattaaa

SEQ ID NO: 833850 - DNA, 15 bp, Homo sapiens
tagtctggaaattaa

SEQ ID NO: 833851 - DNA, 15 bp, Homo sapiens
gtagtctggaaatta

SEQ ID NO: 833852 - DNA, 15 bp, Homo sapiens
ggtagtctggaaatt

SEQ ID NO: 833853 - DNA, 15 bp, Homo sapiens
tggtagtctggaaat

SEQ ID NO: 833854 - DNA, 15 bp, Homo sapiens
gtggtagtctggaaa

SEQ ID NO: 833855 - DNA, 15 bp, Homo sapiens
agtggtagtctggaa

SEQ ID NO: 833856 - DNA, 15 bp, Homo sapiens
aagtggtagtctgga

SEQ ID NO: 833857 - DNA, 15 bp, Homo sapiens
gaagtggtagtctgg

SEQ ID NO: 833858 - DNA, 15 bp, Homo sapiens
agaagtggtagtctg

SEQ ID NO: 833859 - DNA, 15 bp, Homo sapiens
gagaagtggtagtct

SEQ ID NO: 833860 - DNA, 15 bp, Homo sapiens
ggagaagtggtagtc

SEQ ID NO: 833861 - DNA, 15 bp, Homo sapiens
aggagaagtggtagt

SEQ ID NO: 833862 - DNA, 15 bp, Homo sapiens
caggagaagtggtag

SEQ ID NO: 833863 - DNA, 15 bp, Homo sapiens
gcaggagaagtggta

SEQ ID NO: 833864 - DNA, 15 bp, Homo sapiens
tgcaggagaagtggt

SEQ ID NO: 833865 - DNA, 15 bp, Homo sapiens
gtgcaggagaagtgg

SEQ ID NO: 833866 - DNA, 15 bp, Homo sapiens
agtgcaggagaagtg

SEQ ID NO: 833867 - DNA, 15 bp, Homo sapiens
aagtgcaggagaagt

SEQ ID NO: 833868 - DNA, 15 bp, Homo sapiens
caagtgcaggagaag

SEQ ID NO: 833869 - DNA, 15 bp, Homo sapiens
tcaagtgcaggagaa

SEQ ID NO: 833870 - DNA, 15 bp, Homo sapiens
gtcaagtgcaggaga

SEQ ID NO: 833871 - DNA, 15 bp, Homo sapiens
tgtcaagtgcaggag

SEQ ID NO: 833872 - DNA, 15 bp, Homo sapiens
ttgtcaagtgcagga

SEQ ID NO: 833873 - DNA, 15 bp, Homo sapiens
attgtcaagtgcagg

SEQ ID NO: 833874 - DNA, 15 bp, Homo sapiens
tattgtcaagtgcag

SEQ ID NO: 833875 - DNA, 15 bp, Homo sapiens
gtattgtcaagtgca

SEQ ID NO: 833876 - DNA, 15 bp, Homo sapiens
ggtattgtcaagtgc

SEQ ID NO: 833877 - DNA, 15 bp, Homo sapiens
cggtattgtcaagtg

SEQ ID NO: 833878 - DNA, 15 bp, Homo sapiens
gcggtattgtcaagt

SEQ ID NO: 833879 - DNA, 15 bp, Homo sapiens
tgcggtattgtcaag

SEQ ID NO: 833880 - DNA, 15 bp, Homo sapiens
ctgcggtattgtcaa

SEQ ID NO: 833881 - DNA, 15 bp, Homo sapiens
actgcggtattgtca

SEQ ID NO: 833882 - DNA, 15 bp, Homo sapiens
gactgcggtattgtc

SEQ ID NO: 833883 - DNA, 15 bp, Homo sapiens
agactgcggtattgt

SEQ ID NO: 833884 - DNA, 15 bp, Homo sapiens
tagactgcggtattg

SEQ ID NO: 833885 - DNA, 15 bp, Homo sapiens
gtagactgcggtatt

SEQ ID NO: 833886 - DNA, 15 bp, Homo sapiens
ggtagactgcggtat

SEQ ID NO: 833887 - DNA, 15 bp, Homo sapiens
tggtagactgcggta

SEQ ID NO: 833888 - DNA, 15 bp, Homo sapiens
gtggtagactgcggt

SEQ ID NO: 833889 - DNA, 15 bp, Homo sapiens
cgtggtagactgcgg

SEQ ID NO: 833890 - DNA, 15 bp, Homo sapiens
acgtggtagactgcg

SEQ ID NO: 833891 - DNA, 15 bp, Homo sapiens
tacgtggtagactgc

SEQ ID NO: 833892 - DNA, 15 bp, Homo sapiens
ctacgtggtagactg

SEQ ID NO: 833893 - DNA, 15 bp, Homo sapiens
actacgtggtagact

SEQ ID NO: 833894 - DNA, 15 bp, Homo sapiens
gactacgtggtagac

SEQ ID NO: 833895 - DNA, 15 bp, Homo sapiens
ggactacgtggtaga

SEQ ID NO: 833896 - DNA, 15 bp, Homo sapiens
gggactacgtggtag

SEQ ID NO: 833897 - DNA, 15 bp, Homo sapiens
tgggactacgtggta

SEQ ID NO: 833898 - DNA, 15 bp, Homo sapiens
atgggactacgtggt

SEQ ID NO: 833899 - DNA, 15 bp, Homo sapiens
catgggactacgtgg

SEQ ID NO: 833900 - DNA, 15 bp, Homo sapiens
ccatgggactacgtg

SEQ ID NO: 833901 - DNA, 15 bp, Homo sapiens
gccatgggactacgt

SEQ ID NO: 833902 - DNA, 15 bp, Homo sapiens
agccatgggactacg

SEQ ID NO: 833903 - DNA, 15 bp, Homo sapiens
cagccatgggactac

SEQ ID NO: 833904 - DNA, 15 bp, Homo sapiens
tcagccatgggacta

SEQ ID NO: 833905 - DNA, 15 bp, Homo sapiens
gtcagccatgggact

SEQ ID NO: 833906 - DNA, 15 bp, Homo sapiens
tgtcagccatgggac

SEQ ID NO: 833907 - DNA, 15 bp, Homo sapiens
ctgtcagccatggga

SEQ ID NO: 833908 - DNA, 15 bp, Homo sapiens
cctgtcagccatggg

SEQ ID NO: 833909 - DNA, 15 bp, Homo sapiens
tcctgtcagccatgg

SEQ ID NO: 833910 - DNA, 15 bp, Homo sapiens
ctcctgtcagccatg

SEQ ID NO: 833911 - DNA, 15 bp, Homo sapiens
cctcctgtcagccat

SEQ ID NO: 833912 - DNA, 15 bp, Homo sapiens
tcctcctgtcagcca

SEQ ID NO: 833913 - DNA, 15 bp, Homo sapiens
ctcctcctgtcagcc

SEQ ID NO: 833914 - DNA, 15 bp, Homo sapiens
tctcctcctgtcagc

SEQ ID NO: 833915 - DNA, 15 bp, Homo sapiens
ttctcctcctgtcag

SEQ ID NO: 833916 - DNA, 15 bp, Homo sapiens
attctcctcctgtca

SEQ ID NO: 833917 - DNA, 15 bp, Homo sapiens
aattctcctcctgtc

SEQ ID NO: 833918 - DNA, 15 bp, Homo sapiens
gaattctcctcctgt

SEQ ID NO: 833919 - DNA, 15 bp, Homo sapiens
agaattctcctcctg

SEQ ID NO: 833920 - DNA, 15 bp, Homo sapiens
tagaattctcctcct

SEQ ID NO: 833921 - DNA, 15 bp, Homo sapiens
ctagaattctcctcc

SEQ ID NO: 833922 - DNA, 15 bp, Homo sapiens
cctagaattctcctc

SEQ ID NO: 833923 - DNA, 15 bp, Homo sapiens
gcctagaattctcct

SEQ ID NO: 833924 - DNA, 15 bp, Homo sapiens
tgcctagaattctcc

SEQ ID NO: 833925 - DNA, 15 bp, Homo sapiens
ctgcctagaattctc

SEQ ID NO: 833926 - DNA, 15 bp, Homo sapiens
cctgcctagaattct

SEQ ID NO: 833927 - DNA, 15 bp, Homo sapiens
gcctgcctagaattc

SEQ ID NO: 833928 - DNA, 15 bp, Homo sapiens
ggcctgcctagaatt

SEQ ID NO: 833929 - DNA, 15 bp, Homo sapiens
tggcctgcctagaat

SEQ ID NO: 833930 - DNA, 15 bp, Homo sapiens
ctggcctgcctagaa

SEQ ID NO: 833931 - DNA, 15 bp, Homo sapiens
actggcctgcctaga

SEQ ID NO: 833932 - DNA, 15 bp, Homo sapiens
cactggcctgcctag

SEQ ID NO: 833933 - DNA, 15 bp, Homo sapiens
acactggcctgccta

SEQ ID NO: 833934 - DNA, 15 bp, Homo sapiens
aacactggcctgcct

SEQ ID NO: 833935 - DNA, 15 bp, Homo sapiens
aaacactggcctgcc

SEQ ID NO: 833936 - DNA, 15 bp, Homo sapiens
caaacactggcctgc

SEQ ID NO: 833937 - DNA, 15 bp, Homo sapiens
tcaaacactggcctg

SEQ ID NO: 833938 - DNA, 15 bp, Homo sapiens
ctcaaacactggcct

SEQ ID NO: 833939 - DNA, 15 bp, Homo sapiens
actcaaacactggcc

SEQ ID NO: 833940 - DNA, 15 bp, Homo sapiens
tactcaaacactggc

SEQ ID NO: 833941 - DNA, 15 bp, Homo sapiens
ctactcaaacactgg

SEQ ID NO: 833942 - DNA, 15 bp, Homo sapiens
actactcaaacactg

SEQ ID NO: 833943 - DNA, 15 bp, Homo sapiens
cactactcaaacact

SEQ ID NO: 833944 - DNA, 15 bp, Homo sapiens
tcactactcaaacac

SEQ ID NO: 833945 - DNA, 15 bp, Homo sapiens
ctcactactcaaaca

SEQ ID NO: 833946 - DNA, 15 bp, Homo sapiens
actcactactcaaac

SEQ ID NO: 833947 - DNA, 15 bp, Homo sapiens
tactcactactcaaa

SEQ ID NO: 833948 - DNA, 15 bp, Homo sapiens
ttactcactactcaa

SEQ ID NO: 833949 - DNA, 15 bp, Homo sapiens
attactcactactca

SEQ ID NO: 833950 - DNA, 15 bp, Homo sapiens
aattactcactactc

SEQ ID NO: 833951 - DNA, 15 bp, Homo sapiens
caattactcactact

SEQ ID NO: 833952 - DNA, 15 bp, Homo sapiens
ccaattactcactac

SEQ ID NO: 833953 - DNA, 15 bp, Homo sapiens
tccaattactcacta

SEQ ID NO: 833954 - DNA, 15 bp, Homo sapiens
gtccaattactcact

SEQ ID NO: 833955 - DNA, 15 bp, Homo sapiens
agtccaattactcac

SEQ ID NO: 833956 - DNA, 15 bp, Homo sapiens
cagtccaattactca

SEQ ID NO: 833957 - DNA, 15 bp, Homo sapiens
acagtccaattactc

SEQ ID NO: 833958 - DNA, 15 bp, Homo sapiens
gacagtccaattact

SEQ ID NO: 833959 - DNA, 15 bp, Homo sapiens
agacagtccaattac

SEQ ID NO: 833960 - DNA, 15 bp, Homo sapiens
aagacagtccaatta

SEQ ID NO: 833961 - DNA, 15 bp, Homo sapiens
aaagacagtccaatt

SEQ ID NO: 833962 - DNA, 15 bp, Homo sapiens
taaagacagtccaat

SEQ ID NO: 833963 - DNA, 15 bp, Homo sapiens
gtaaagacagtccaa

SEQ ID NO: 833964 - DNA, 15 bp, Homo sapiens
ggtaaagacagtcca

SEQ ID NO: 833965 - DNA, 15 bp, Homo sapiens
gggtaaagacagtcc

SEQ ID NO: 833966 - DNA, 15 bp, Homo sapiens
tgggtaaagacagtc

SEQ ID NO: 833967 - DNA, 15 bp, Homo sapiens
ctgggtaaagacagt

SEQ ID NO: 833968 - DNA, 15 bp, Homo sapiens
gctgggtaaagacag

SEQ ID NO: 833969 - DNA, 15 bp, Homo sapiens
tgctgggtaaagaca

SEQ ID NO: 833970 - DNA, 15 bp, Homo sapiens
ttgctgggtaaagac

SEQ ID NO: 833971 - DNA, 15 bp, Homo sapiens
gttgctgggtaaaga

SEQ ID NO: 833972 - DNA, 15 bp, Homo sapiens
agttgctgggtaaag

SEQ ID NO: 833973 - DNA, 15 bp, Homo sapiens
gagttgctgggtaaa

SEQ ID NO: 833974 - DNA, 15 bp, Homo sapiens
tgagttgctgggtaa

SEQ ID NO: 833975 - DNA, 15 bp, Homo sapiens
gtgagttgctgggta

SEQ ID NO: 833976 - DNA, 15 bp, Homo sapiens
agtgagttgctgggt

SEQ ID NO: 833977 - DNA, 15 bp, Homo sapiens
cagtgagttgctggg

SEQ ID NO: 833978 - DNA, 15 bp, Homo sapiens
acagtgagttgctgg

SEQ ID NO: 833979 - DNA, 15 bp, Homo sapiens
aacagtgagttgctg

SEQ ID NO: 833980 - DNA, 15 bp, Homo sapiens
aaacagtgagttgct

SEQ ID NO: 833981 - DNA, 15 bp, Homo sapiens
aaaacagtgagttgc

SEQ ID NO: 833982 - DNA, 15 bp, Homo sapiens
caaaacagtgagttg

SEQ ID NO: 833983 - DNA, 15 bp, Homo sapiens
acaaaacagtgagtt

SEQ ID NO: 833984 - DNA, 15 bp, Homo sapiens
tacaaaacagtgagt

SEQ ID NO: 833985 - DNA, 15 bp, Homo sapiens
ttacaaaacagtgag

SEQ ID NO: 833986 - DNA, 15 bp, Homo sapiens
tttacaaaacagtga

SEQ ID NO: 833987 - DNA, 15 bp, Homo sapiens
atttacaaaacagtg

SEQ ID NO: 833988 - DNA, 15 bp, Homo sapiens
catttacaaaacagt

SEQ ID NO: 833989 - DNA, 15 bp, Homo sapiens
acatttacaaaacag

SEQ ID NO: 833990 - DNA, 15 bp, Homo sapiens
tacatttacaaaaca

SEQ ID NO: 833991 - DNA, 15 bp, Homo sapiens
gtacatttacaaaac

SEQ ID NO: 833992 - DNA, 15 bp, Homo sapiens
ggtacatttacaaaa

SEQ ID NO: 833993 - DNA, 15 bp, Homo sapiens
aggtacatttacaaa

SEQ ID NO: 833994 - DNA, 15 bp, Homo sapiens
caggtacatttacaa

SEQ ID NO: 833995 - DNA, 15 bp, Homo sapiens
tcaggtacatttaca

SEQ ID NO: 833996 - DNA, 15 bp, Homo sapiens
ctcaggtacatttac

SEQ ID NO: 833997 - DNA, 15 bp, Homo sapiens
actcaggtacattta

SEQ ID NO: 833998 - DNA, 15 bp, Homo sapiens
aactcaggtacattt

SEQ ID NO: 833999 - DNA, 15 bp, Homo sapiens
aaactcaggtacatt

SEQ ID NO: 834000 - DNA, 15 bp, Homo sapiens
caaactcaggtacat

SEQ ID NO: 834001 - DNA, 15 bp, Homo sapiens
ccaaactcaggtaca

SEQ ID NO: 834002 - DNA, 15 bp, Homo sapiens
tccaaactcaggtac

SEQ ID NO: 834003 - DNA, 15 bp, Homo sapiens
ctccaaactcaggta

SEQ ID NO: 834004 - DNA, 15 bp, Homo sapiens
tctccaaactcaggt

SEQ ID NO: 834005 - DNA, 15 bp, Homo sapiens
ttctccaaactcagg

SEQ ID NO: 834006 - DNA, 15 bp, Homo sapiens
cttctccaaactcag

SEQ ID NO: 834007 - DNA, 15 bp, Homo sapiens
acttctccaaactca

SEQ ID NO: 834008 - DNA, 15 bp, Homo sapiens
tacttctccaaactc

SEQ ID NO: 834009 - DNA, 15 bp, Homo sapiens
ttacttctccaaact

SEQ ID NO: 834010 - DNA, 15 bp, Homo sapiens
attacttctccaaac

SEQ ID NO: 834011 - DNA, 15 bp, Homo sapiens
aattacttctccaaa

SEQ ID NO: 834012 - DNA, 15 bp, Homo sapiens
caattacttctccaa

SEQ ID NO: 834013 - DNA, 15 bp, Homo sapiens
ccaattacttctcca

SEQ ID NO: 834014 - DNA, 15 bp, Homo sapiens
gccaattacttctcc

SEQ ID NO: 834015 - DNA, 15 bp, Homo sapiens
agccaattacttctc

SEQ ID NO: 834016 - DNA, 15 bp, Homo sapiens
aagccaattacttct

SEQ ID NO: 834017 - DNA, 15 bp, Homo sapiens
aaagccaattacttc

SEQ ID NO: 834018 - DNA, 15 bp, Homo sapiens
aaaagccaattactt

SEQ ID NO: 834019 - DNA, 15 bp, Homo sapiens
taaaagccaattact

SEQ ID NO: 834020 - DNA, 15 bp, Homo sapiens
ataaaagccaattac

SEQ ID NO: 834021 - DNA, 15 bp, Homo sapiens
tataaaagccaatta

SEQ ID NO: 834022 - DNA, 15 bp, Homo sapiens
ttataaaagccaatt

SEQ ID NO: 834023 - DNA, 15 bp, Homo sapiens
cttataaaagccaat

SEQ ID NO: 834024 - DNA, 15 bp, Homo sapiens
ccttataaaagccaa

SEQ ID NO: 834025 - DNA, 15 bp, Homo sapiens
cccttataaaagcca

SEQ ID NO: 834026 - DNA, 15 bp, Homo sapiens
ccccttataaaagcc

SEQ ID NO: 834027 - DNA, 15 bp, Homo sapiens
accccttataaaagc

SEQ ID NO: 834028 - DNA, 15 bp, Homo sapiens
caccccttataaaag

SEQ ID NO: 834029 - DNA, 15 bp, Homo sapiens
gcaccccttataaaa

SEQ ID NO: 834030 - DNA, 15 bp, Homo sapiens
cgcaccccttataaa

SEQ ID NO: 834031 - DNA, 15 bp, Homo sapiens
ccgcaccccttataa

SEQ ID NO: 834032 - DNA, 15 bp, Homo sapiens
cccgcaccccttata

SEQ ID NO: 834033 - DNA, 15 bp, Homo sapiens
ccccgcaccccttat

SEQ ID NO: 834034 - DNA, 15 bp, Homo sapiens
accccgcacccctta

SEQ ID NO: 834035 - DNA, 15 bp, Homo sapiens
caccccgcacccctt

SEQ ID NO: 834036 - DNA, 15 bp, Homo sapiens
ccaccccgcacccct

SEQ ID NO: 834037 - DNA, 15 bp, Homo sapiens
tccaccccgcacccc

SEQ ID NO: 834038 - DNA, 15 bp, Homo sapiens
ctccaccccgcaccc

SEQ ID NO: 834039 - DNA, 15 bp, Homo sapiens
cctccaccccgcacc

SEQ ID NO: 834040 - DNA, 15 bp, Homo sapiens
ccctccaccccgcac

SEQ ID NO: 834041 - DNA, 15 bp, Homo sapiens
accctccaccccgca

SEQ ID NO: 834042 - DNA, 15 bp, Homo sapiens
aaccctccaccccgc

SEQ ID NO: 834043 - DNA, 15 bp, Homo sapiens
caaccctccaccccg

SEQ ID NO: 834044 - DNA, 15 bp, Homo sapiens
ccaaccctccacccc

SEQ ID NO: 834045 - DNA, 15 bp, Homo sapiens
cccaaccctccaccc

SEQ ID NO: 834046 - DNA, 15 bp, Homo sapiens
ccccaaccctccacc

SEQ ID NO: 834047 - DNA, 15 bp, Homo sapiens
accccaaccctccac

SEQ ID NO: 834048 - DNA, 15 bp, Homo sapiens
caccccaaccctcca

SEQ ID NO: 834049 - DNA, 15 bp, Homo sapiens
ccaccccaaccctcc

SEQ ID NO: 834050 - DNA, 15 bp, Homo sapiens
cccaccccaaccctc

SEQ ID NO: 834051 - DNA, 15 bp, Homo sapiens
ccccaccccaaccct

SEQ ID NO: 834052 - DNA, 15 bp, Homo sapiens
tccccaccccaaccc

SEQ ID NO: 834053 - DNA, 15 bp, Homo sapiens
ctccccaccccaacc

SEQ ID NO: 834054 - DNA, 15 bp, Homo sapiens
tctccccaccccaac

SEQ ID NO: 834055 - DNA, 15 bp, Homo sapiens
ctctccccaccccaa

SEQ ID NO: 834056 - DNA, 15 bp, Homo sapiens
actctccccacccca

SEQ ID NO: 834057 - DNA, 15 bp, Homo sapiens
cactctccccacccc

SEQ ID NO: 834058 - DNA, 15 bp, Homo sapiens
tcactctccccaccc

SEQ ID NO: 834059 - DNA, 15 bp, Homo sapiens
ctcactctccccacc

SEQ ID NO: 834060 - DNA, 15 bp, Homo sapiens
tctcactctccccac

SEQ ID NO: 834061 - DNA, 15 bp, Homo sapiens
ttctcactctcccca

SEQ ID NO: 834062 - DNA, 15 bp, Homo sapiens
cttctcactctcccc

SEQ ID NO: 834063 - DNA, 15 bp, Homo sapiens
ccttctcactctccc

SEQ ID NO: 834064 - DNA, 15 bp, Homo sapiens
tccttctcactctcc

SEQ ID NO: 834065 - DNA, 15 bp, Homo sapiens
ctccttctcactctc

SEQ ID NO: 834066 - DNA, 15 bp, Homo sapiens
cctccttctcactct

SEQ ID NO: 834067 - DNA, 15 bp, Homo sapiens
acctccttctcactc

SEQ ID NO: 834068 - DNA, 15 bp, Homo sapiens
gacctccttctcact

SEQ ID NO: 834069 - DNA, 15 bp, Homo sapiens
tgacctccttctcac

SEQ ID NO: 834070 - DNA, 15 bp, Homo sapiens
ctgacctccttctca

SEQ ID NO: 834071 - DNA, 15 bp, Homo sapiens
tctgacctccttctc

SEQ ID NO: 834072 - DNA, 15 bp, Homo sapiens
ctctgacctccttct

SEQ ID NO: 834073 - DNA, 15 bp, Homo sapiens
gctctgacctccttc

SEQ ID NO: 834074 - DNA, 15 bp, Homo sapiens
agctctgacctcctt

SEQ ID NO: 834075 - DNA, 15 bp, Homo sapiens
aagctctgacctcct

SEQ ID NO: 834076 - DNA, 15 bp, Homo sapiens
aaagctctgacctcc

SEQ ID NO: 834077 - DNA, 15 bp, Homo sapiens
taaagctctgacctc

SEQ ID NO: 834078 - DNA, 15 bp, Homo sapiens
ctaaagctctgacct

SEQ ID NO: 834079 - DNA, 15 bp, Homo sapiens
cctaaagctctgacc

SEQ ID NO: 834080 - DNA, 15 bp, Homo sapiens
tcctaaagctctgac

SEQ ID NO: 834081 - DNA, 15 bp, Homo sapiens
atcctaaagctctga

SEQ ID NO: 834082 - DNA, 15 bp, Homo sapiens
tatcctaaagctctg

SEQ ID NO: 834083 - DNA, 15 bp, Homo sapiens
atatcctaaagctct

SEQ ID NO: 834084 - DNA, 15 bp, Homo sapiens
tatatcctaaagctc

SEQ ID NO: 834085 - DNA, 15 bp, Homo sapiens
atatatcctaaagct

SEQ ID NO: 834086 - DNA, 15 bp, Homo sapiens
tatatatcctaaagc

SEQ ID NO: 834087 - DNA, 15 bp, Homo sapiens
ttatatatcctaaag

SEQ ID NO: 834088 - DNA, 15 bp, Homo sapiens
attatatatcctaaa

SEQ ID NO: 834089 - DNA, 15 bp, Homo sapiens
aattatatatcctaa

SEQ ID NO: 834090 - DNA, 15 bp, Homo sapiens
caattatatatccta

SEQ ID NO: 834091 - DNA, 15 bp, Homo sapiens
ccaattatatatcct

SEQ ID NO: 834092 - DNA, 15 bp, Homo sapiens
accaattatatatcc

SEQ ID NO: 834093 - DNA, 15 bp, Homo sapiens
gaccaattatatatc

SEQ ID NO: 834094 - DNA, 15 bp, Homo sapiens
agaccaattatatat

SEQ ID NO: 834095 - DNA, 15 bp, Homo sapiens
gagaccaattatata

SEQ ID NO: 834096 - DNA, 15 bp, Homo sapiens
ggagaccaattatat

SEQ ID NO: 834097 - DNA, 15 bp, Homo sapiens
tggagaccaattata

SEQ ID NO: 834098 - DNA, 15 bp, Homo sapiens
gtggagaccaattat

SEQ ID NO: 834099 - DNA, 15 bp, Homo sapiens
tgtggagaccaatta

SEQ ID NO: 834100 - DNA, 15 bp, Homo sapiens
ttgtggagaccaatt

SEQ ID NO: 834101 - DNA, 15 bp, Homo sapiens
tttgtggagaccaat

SEQ ID NO: 834102 - DNA, 15 bp, Homo sapiens
ctttgtggagaccaa

SEQ ID NO: 834103 - DNA, 15 bp, Homo sapiens
actttgtggagacca

SEQ ID NO: 834104 - DNA, 15 bp, Homo sapiens
aactttgtggagacc

SEQ ID NO: 834105 - DNA, 15 bp, Homo sapiens
caactttgtggagac

SEQ ID NO: 834106 - DNA, 15 bp, Homo sapiens
acaactttgtggaga

SEQ ID NO: 834107 - DNA, 15 bp, Homo sapiens
aacaactttgtggag

SEQ ID NO: 834108 - DNA, 15 bp, Homo sapiens
caacaactttgtgga

SEQ ID NO: 834109 - DNA, 15 bp, Homo sapiens
acaacaactttgtgg

SEQ ID NO: 834110 - DNA, 15 bp, Homo sapiens
cacaacaactttgtg

SEQ ID NO: 834111 - DNA, 15 bp, Homo sapiens
tcacaacaactttgt

SEQ ID NO: 834112 - DNA, 15 bp, Homo sapiens
atcacaacaactttg

SEQ ID NO: 834113 - DNA, 15 bp, Homo sapiens
tatcacaacaacttt

SEQ ID NO: 834114 - DNA, 15 bp, Homo sapiens
gtatcacaacaactt

SEQ ID NO: 834115 - DNA, 15 bp, Homo sapiens
agtatcacaacaact

SEQ ID NO: 834116 - DNA, 15 bp, Homo sapiens
aagtatcacaacaac

SEQ ID NO: 834117 - DNA, 15 bp, Homo sapiens
aaagtatcacaacaa

SEQ ID NO: 834118 - DNA, 15 bp, Homo sapiens
aaaagtatcacaaca

SEQ ID NO: 834119 - DNA, 15 bp, Homo sapiens
caaaagtatcacaac

SEQ ID NO: 834120 - DNA, 15 bp, Homo sapiens
ccaaaagtatcacaa

SEQ ID NO: 834121 - DNA, 15 bp, Homo sapiens
tccaaaagtatcaca

SEQ ID NO: 834122 - DNA, 15 bp, Homo sapiens
ttccaaaagtatcac

SEQ ID NO: 834123 - DNA, 15 bp, Homo sapiens
gttccaaaagtatca

SEQ ID NO: 834124 - DNA, 15 bp, Homo sapiens
ggttccaaaagtatc

SEQ ID NO: 834125 - DNA, 15 bp, Homo sapiens
tggttccaaaagtat

SEQ ID NO: 834126 - DNA, 15 bp, Homo sapiens
gtggttccaaaagta

SEQ ID NO: 834127 - DNA, 15 bp, Homo sapiens
cgtggttccaaaagt

SEQ ID NO: 834128 - DNA, 15 bp, Homo sapiens
acgtggttccaaaag

SEQ ID NO: 834129 - DNA, 15 bp, Homo sapiens
tacgtggttccaaaa

SEQ ID NO: 834130 - DNA, 15 bp, Homo sapiens
ttacgtggttccaaa

SEQ ID NO: 834131 - DNA, 15 bp, Homo sapiens
attacgtggttccaa

SEQ ID NO: 834132 - DNA, 15 bp, Homo sapiens
cattacgtggttcca

SEQ ID NO: 834133 - DNA, 15 bp, Homo sapiens
ccattacgtggttcc

SEQ ID NO: 834134 - DNA, 15 bp, Homo sapiens
accattacgtggttc

SEQ ID NO: 834135 - DNA, 15 bp, Homo sapiens
gaccattacgtggtt

SEQ ID NO: 834136 - DNA, 15 bp, Homo sapiens
agaccattacgtggt

SEQ ID NO: 834137 - DNA, 15 bp, Homo sapiens
aagaccattacgtgg

SEQ ID NO: 834138 - DNA, 15 bp, Homo sapiens
gaagaccattacgtg

SEQ ID NO: 834139 - DNA, 15 bp, Homo sapiens
tgaagaccattacgt

SEQ ID NO: 834140 - DNA, 15 bp, Homo sapiens
atgaagaccattacg

SEQ ID NO: 834141 - DNA, 15 bp, Homo sapiens
aatgaagaccattac

SEQ ID NO: 834142 - DNA, 15 bp, Homo sapiens
taatgaagaccatta

SEQ ID NO: 834143 - DNA, 15 bp, Homo sapiens
ttaatgaagaccatt

SEQ ID NO: 834144 - DNA, 15 bp, Homo sapiens
gttaatgaagaccat

SEQ ID NO: 834145 - DNA, 15 bp, Homo sapiens
agttaatgaagacca

SEQ ID NO: 834146 - DNA, 15 bp, Homo sapiens
tagttaatgaagacc

SEQ ID NO: 834147 - DNA, 15 bp, Homo sapiens
ttagttaatgaagac

SEQ ID NO: 834148 - DNA, 15 bp, Homo sapiens
cttagttaatgaaga

SEQ ID NO: 834149 - DNA, 15 bp, Homo sapiens
acttagttaatgaag

SEQ ID NO: 834150 - DNA, 15 bp, Homo sapiens
cacttagttaatgaa

SEQ ID NO: 834151 - DNA, 15 bp, Homo sapiens
acacttagttaatga

SEQ ID NO: 834152 - DNA, 15 bp, Homo sapiens
gacacttagttaatg

SEQ ID NO: 834153 - DNA, 15 bp, Homo sapiens
agacacttagttaat

SEQ ID NO: 834154 - DNA, 15 bp, Homo sapiens
cagacacttagttaa

SEQ ID NO: 834155 - DNA, 15 bp, Homo sapiens
acagacacttagtta

SEQ ID NO: 834156 - DNA, 15 bp, Homo sapiens
gacagacacttagtt

SEQ ID NO: 834157 - DNA, 15 bp, Homo sapiens
tgacagacacttagt

SEQ ID NO: 834158 - DNA, 15 bp, Homo sapiens
atgacagacacttag

SEQ ID NO: 834159 - DNA, 15 bp, Homo sapiens
catgacagacactta

SEQ ID NO: 834160 - DNA, 15 bp, Homo sapiens
tcatgacagacactt

SEQ ID NO: 834161 - DNA, 15 bp, Homo sapiens
gtcatgacagacact

SEQ ID NO: 834162 - DNA, 15 bp, Homo sapiens
tgtcatgacagacac

SEQ ID NO: 834163 - DNA, 15 bp, Homo sapiens
ctgtcatgacagaca

SEQ ID NO: 834164 - DNA, 15 bp, Homo sapiens
gctgtcatgacagac

SEQ ID NO: 834165 - DNA, 15 bp, Homo sapiens
ggctgtcatgacaga

SEQ ID NO: 834166 - DNA, 15 bp, Homo sapiens
tggctgtcatgacag

SEQ ID NO: 834167 - DNA, 15 bp, Homo sapiens
atggctgtcatgaca

SEQ ID NO: 834168 - DNA, 15 bp, Homo sapiens
aatggctgtcatgac

SEQ ID NO: 834169 - DNA, 15 bp, Homo sapiens
taatggctgtcatga

SEQ ID NO: 834170 - DNA, 15 bp, Homo sapiens
gtaatggctgtcatg

SEQ ID NO: 834171 - DNA, 15 bp, Homo sapiens
tgtaatggctgtcat

SEQ ID NO: 834172 - DNA, 15 bp, Homo sapiens
atgtaatggctgtca

SEQ ID NO: 834173 - DNA, 15 bp, Homo sapiens
tatgtaatggctgtc

SEQ ID NO: 834174 - DNA, 15 bp, Homo sapiens
atatgtaatggctgt

SEQ ID NO: 834175 - DNA, 15 bp, Homo sapiens
catatgtaatggctg

SEQ ID NO: 834176 - DNA, 15 bp, Homo sapiens
gcatatgtaatggct

SEQ ID NO: 834177 - DNA, 15 bp, Homo sapiens
tgcatatgtaatggc

SEQ ID NO: 834178 - DNA, 15 bp, Homo sapiens
atgcatatgtaatgg

SEQ ID NO: 834179 - DNA, 15 bp, Homo sapiens
aatgcatatgtaatg

SEQ ID NO: 834180 - DNA, 15 bp, Homo sapiens
taatgcatatgtaat

SEQ ID NO: 834181 - DNA, 15 bp, Homo sapiens
ataatgcatatgtaa

SEQ ID NO: 834182 - DNA, 15 bp, Homo sapiens
tataatgcatatgta

SEQ ID NO: 834183 - DNA, 15 bp, Homo sapiens
ttataatgcatatgt

SEQ ID NO: 834184 - DNA, 15 bp, Homo sapiens
attataatgcatatg

SEQ ID NO: 834185 - DNA, 15 bp, Homo sapiens
tattataatgcatat

SEQ ID NO: 834186 - DNA, 15 bp, Homo sapiens
ttattataatgcata

SEQ ID NO: 834187 - DNA, 15 bp, Homo sapiens
tttattataatgcat

SEQ ID NO: 834188 - DNA, 15 bp, Homo sapiens
ttttattataatgca

SEQ ID NO: 834189 - DNA, 15 bp, Homo sapiens
tttttattataatgc

SEQ ID NO: 834190 - DNA, 15 bp, Homo sapiens
atttttattataatg

SEQ ID NO: 834191 - DNA, 15 bp, Homo sapiens
aatttttattataat

SEQ ID NO: 834192 - DNA, 15 bp, Homo sapiens
aaatttttattataa

SEQ ID NO: 834193 - DNA, 15 bp, Homo sapiens
taaatttttattata

SEQ ID NO: 834194 - DNA, 15 bp, Homo sapiens
ataaatttttattat

SEQ ID NO: 834195 - DNA, 15 bp, Homo sapiens
aataaatttttatta

SEQ ID NO: 834196 - DNA, 15 bp, Homo sapiens
aaataaatttttatt

SEQ ID NO: 834197 - DNA, 15 bp, Homo sapiens
taaataaatttttat

SEQ ID NO: 834198 - DNA, 15 bp, Homo sapiens
gtaaataaattttta

SEQ ID NO: 834199 - DNA, 15 bp, Homo sapiens
tgtaaataaattttt

SEQ ID NO: 834200 - DNA, 15 bp, Homo sapiens
ctgtaaataaatttt

SEQ ID NO: 834201 - DNA, 15 bp, Homo sapiens
actgtaaataaattt

SEQ ID NO: 834202 - DNA, 15 bp, Homo sapiens
cactgtaaataaatt

SEQ ID NO: 834203 - DNA, 15 bp, Homo sapiens
acactgtaaataaat

SEQ ID NO: 834204 - DNA, 15 bp, Homo sapiens
tacactgtaaataaa

SEQ ID NO: 834205 - DNA, 15 bp, Homo sapiens
ttacactgtaaataa

SEQ ID NO: 834206 - DNA, 15 bp, Homo sapiens
cttacactgtaaata

SEQ ID NO: 834207 - DNA, 15 bp, Homo sapiens
acttacactgtaaat

SEQ ID NO: 834208 - DNA, 15 bp, Homo sapiens
aacttacactgtaaa

SEQ ID NO: 834209 - DNA, 15 bp, Homo sapiens
caacttacactgtaa

SEQ ID NO: 834210 - DNA, 15 bp, Homo sapiens
tcaacttacactgta

SEQ ID NO: 834211 - DNA, 15 bp, Homo sapiens
ttcaacttacactgt

SEQ ID NO: 834212 - DNA, 15 bp, Homo sapiens
cttcaacttacactg

SEQ ID NO: 834213 - DNA, 15 bp, Homo sapiens
tcttcaacttacact

SEQ ID NO: 834214 - DNA, 15 bp, Homo sapiens
ttcttcaacttacac

SEQ ID NO: 834215 - DNA, 15 bp, Homo sapiens
cttcttcaacttaca

SEQ ID NO: 834216 - DNA, 15 bp, Homo sapiens
ccttcttcaacttac

SEQ ID NO: 834217 - DNA, 15 bp, Homo sapiens
accttcttcaactta

SEQ ID NO: 834218 - DNA, 15 bp, Homo sapiens
taccttcttcaactt

SEQ ID NO: 834219 - DNA, 15 bp, Homo sapiens
ttaccttcttcaact

SEQ ID NO: 834220 - DNA, 15 bp, Homo sapiens
tttaccttcttcaac

SEQ ID NO: 834221 - DNA, 15 bp, Homo sapiens
ttttaccttcttcaa

SEQ ID NO: 834222 - DNA, 15 bp, Homo sapiens
attttaccttcttca

SEQ ID NO: 834223 - DNA, 15 bp, Homo sapiens
gattttaccttcttc

SEQ ID NO: 834224 - DNA, 15 bp, Homo sapiens
agattttaccttctt

SEQ ID NO: 834225 - DNA, 15 bp, Homo sapiens
cagattttaccttct

SEQ ID NO: 834226 - DNA, 15 bp, Homo sapiens
ccagattttaccttc

SEQ ID NO: 834227 - DNA, 15 bp, Homo sapiens
tccagattttacctt

SEQ ID NO: 834228 - DNA, 15 bp, Homo sapiens
atccagattttacct

SEQ ID NO: 834229 - DNA, 15 bp, Homo sapiens
catccagattttacc

SEQ ID NO: 834230 - DNA, 15 bp, Homo sapiens
acatccagattttac

SEQ ID NO: 834231 - DNA, 15 bp, Homo sapiens
tacatccagatttta

SEQ ID NO: 834232 - DNA, 15 bp, Homo sapiens
ctacatccagatttt

SEQ ID NO: 834233 - DNA, 15 bp, Homo sapiens
actacatccagattt

SEQ ID NO: 834234 - DNA, 15 bp, Homo sapiens
aactacatccagatt

SEQ ID NO: 834235 - DNA, 15 bp, Homo sapiens
aaactacatccagat

SEQ ID NO: 834236 - DNA, 15 bp, Homo sapiens
gaaactacatccaga

SEQ ID NO: 834237 - DNA, 15 bp, Homo sapiens
agaaactacatccag

SEQ ID NO: 834238 - DNA, 15 bp, Homo sapiens
tagaaactacatcca

SEQ ID NO: 834239 - DNA, 15 bp, Homo sapiens
ttagaaactacatcc

SEQ ID NO: 834240 - DNA, 15 bp, Homo sapiens
tttagaaactacatc

SEQ ID NO: 834241 - DNA, 15 bp, Homo sapiens
gtttagaaactacat

SEQ ID NO: 834242 - DNA, 15 bp, Homo sapiens
agtttagaaactaca

SEQ ID NO: 834243 - DNA, 15 bp, Homo sapiens
gagtttagaaactac

SEQ ID NO: 834244 - DNA, 15 bp, Homo sapiens
agagtttagaaacta

SEQ ID NO: 834245 - DNA, 15 bp, Homo sapiens
cagagtttagaaact

SEQ ID NO: 834246 - DNA, 15 bp, Homo sapiens
gcagagtttagaaac

SEQ ID NO: 834247 - DNA, 15 bp, Homo sapiens
agcagagtttagaaa

SEQ ID NO: 834248 - DNA, 15 bp, Homo sapiens
aagcagagtttagaa

SEQ ID NO: 834249 - DNA, 15 bp, Homo sapiens
caagcagagtttaga

SEQ ID NO: 834250 - DNA, 15 bp, Homo sapiens
ccaagcagagtttag

SEQ ID NO: 834251 - DNA, 15 bp, Homo sapiens
gccaagcagagttta

SEQ ID NO: 834252 - DNA, 15 bp, Homo sapiens
tgccaagcagagttt

SEQ ID NO: 834253 - DNA, 15 bp, Homo sapiens
ctgccaagcagagtt

SEQ ID NO: 834254 - DNA, 15 bp, Homo sapiens
actgccaagcagagt

SEQ ID NO: 834255 - DNA, 15 bp, Homo sapiens
aactgccaagcagag

SEQ ID NO: 834256 - DNA, 15 bp, Homo sapiens
aaactgccaagcaga

SEQ ID NO: 834257 - DNA, 15 bp, Homo sapiens
aaaactgccaagcag

SEQ ID NO: 834258 - DNA, 15 bp, Homo sapiens
gaaaactgccaagca

SEQ ID NO: 834259 - DNA, 15 bp, Homo sapiens
tgaaaactgccaagc

SEQ ID NO: 834260 - DNA, 15 bp, Homo sapiens
atgaaaactgccaag

SEQ ID NO: 834261 - DNA, 15 bp, Homo sapiens
tatgaaaactgccaa

SEQ ID NO: 834262 - DNA, 15 bp, Homo sapiens
atatgaaaactgcca

SEQ ID NO: 834263 - DNA, 15 bp, Homo sapiens
aatatgaaaactgcc

SEQ ID NO: 834264 - DNA, 15 bp, Homo sapiens
aaatatgaaaactgc

SEQ ID NO: 834265 - DNA, 15 bp, Homo sapiens
taaatatgaaaactg

SEQ ID NO: 834266 - DNA, 15 bp, Homo sapiens
ttaaatatgaaaact

SEQ ID NO: 834267 - DNA, 15 bp, Homo sapiens
cttaaatatgaaaac

SEQ ID NO: 834268 - DNA, 15 bp, Homo sapiens
gcttaaatatgaaaa

SEQ ID NO: 834269 - DNA, 15 bp, Homo sapiens
ggcttaaatatgaaa

SEQ ID NO: 834270 - DNA, 15 bp, Homo sapiens
tggcttaaatatgaa

SEQ ID NO: 834271 - DNA, 15 bp, Homo sapiens
gtggcttaaatatga

SEQ ID NO: 834272 - DNA, 15 bp, Homo sapiens
agtggcttaaatatg

SEQ ID NO: 834273 - DNA, 15 bp, Homo sapiens
tagtggcttaaatat

SEQ ID NO: 834274 - DNA, 15 bp, Homo sapiens
ctagtggcttaaata

SEQ ID NO: 834275 - DNA, 15 bp, Homo sapiens
tctagtggcttaaat

SEQ ID NO: 834276 - DNA, 15 bp, Homo sapiens
ttctagtggcttaaa

SEQ ID NO: 834277 - DNA, 15 bp, Homo sapiens
cttctagtggcttaa

SEQ ID NO: 834278 - DNA, 15 bp, Homo sapiens
tcttctagtggctta

SEQ ID NO: 834279 - DNA, 15 bp, Homo sapiens
ttcttctagtggctt

SEQ ID NO: 834280 - DNA, 15 bp, Homo sapiens
tttcttctagtggct

SEQ ID NO: 834281 - DNA, 15 bp, Homo sapiens
ttttcttctagtggc

SEQ ID NO: 834282 - DNA, 15 bp, Homo sapiens
tttttcttctagtgg

SEQ ID NO: 834283 - DNA, 15 bp, Homo sapiens
ttttttcttctagtg

SEQ ID NO: 834284 - DNA, 15 bp, Homo sapiens
tttttttcttctagt

SEQ ID NO: 834285 - DNA, 15 bp, Homo sapiens
atttttttcttctag

SEQ ID NO: 834286 - DNA, 15 bp, Homo sapiens
aatttttttcttcta

SEQ ID NO: 834287 - DNA, 15 bp, Homo sapiens
caatttttttcttct

SEQ ID NO: 834288 - DNA, 15 bp, Homo sapiens
ccaatttttttcttc

SEQ ID NO: 834289 - DNA, 15 bp, Homo sapiens
cccaatttttttctt

SEQ ID NO: 834290 - DNA, 15 bp, Homo sapiens
tcccaatttttttct

SEQ ID NO: 834291 - DNA, 15 bp, Homo sapiens
ctcccaatttttttc

SEQ ID NO: 834292 - DNA, 15 bp, Homo sapiens
cctcccaattttttt

SEQ ID NO: 834293 - DNA, 15 bp, Homo sapiens
ccctcccaatttttt

SEQ ID NO: 834294 - DNA, 15 bp, Homo sapiens
tccctcccaattttt

SEQ ID NO: 834295 - DNA, 15 bp, Homo sapiens
ttccctcccaatttt

SEQ ID NO: 834296 - DNA, 15 bp, Homo sapiens
cttccctcccaattt

SEQ ID NO: 834297 - DNA, 15 bp, Homo sapiens
gcttccctcccaatt

SEQ ID NO: 834298 - DNA, 15 bp, Homo sapiens
agcttccctcccaat

SEQ ID NO: 834299 - DNA, 15 bp, Homo sapiens
cagcttccctcccaa

SEQ ID NO: 834300 - DNA, 15 bp, Homo sapiens
tcagcttccctccca

SEQ ID NO: 834301 - DNA, 15 bp, Homo sapiens
ctcagcttccctccc

SEQ ID NO: 834302 - DNA, 15 bp, Homo sapiens
tctcagcttccctcc

SEQ ID NO: 834303 - DNA, 15 bp, Homo sapiens
ttctcagcttccctc

SEQ ID NO: 834304 - DNA, 15 bp, Homo sapiens
cttctcagcttccct

SEQ ID NO: 834305 - DNA, 15 bp, Homo sapiens
tcttctcagcttccc

SEQ ID NO: 834306 - DNA, 15 bp, Homo sapiens
ttcttctcagcttcc

SEQ ID NO: 834307 - DNA, 15 bp, Homo sapiens
attcttctcagcttc

SEQ ID NO: 834308 - DNA, 15 bp, Homo sapiens
aattcttctcagctt

SEQ ID NO: 834309 - DNA, 15 bp, Homo sapiens
aaattcttctcagct

SEQ ID NO: 834310 - DNA, 15 bp, Homo sapiens
taaattcttctcagc

SEQ ID NO: 834311 - DNA, 15 bp, Homo sapiens
gtaaattcttctcag

SEQ ID NO: 834312 - DNA, 15 bp, Homo sapiens
agtaaattcttctca

SEQ ID NO: 834313 - DNA, 15 bp, Homo sapiens
cagtaaattcttctc

SEQ ID NO: 834314 - DNA, 15 bp, Homo sapiens
tcagtaaattcttct

SEQ ID NO: 834315 - DNA, 15 bp, Homo sapiens
ttcagtaaattcttc

SEQ ID NO: 834316 - DNA, 15 bp, Homo sapiens
tttcagtaaattctt

SEQ ID NO: 834317 - DNA, 15 bp, Homo sapiens
ctttcagtaaattct

SEQ ID NO: 834318 - DNA, 15 bp, Homo sapiens
tctttcagtaaattc

SEQ ID NO: 834319 - DNA, 15 bp, Homo sapiens
ttctttcagtaaatt

SEQ ID NO: 834320 - DNA, 15 bp, Homo sapiens
tttctttcagtaaat

SEQ ID NO: 834321 - DNA, 15 bp, Homo sapiens
ttttctttcagtaaa

SEQ ID NO: 834322 - DNA, 15 bp, Homo sapiens
tttttctttcagtaa

SEQ ID NO: 834323 - DNA, 15 bp, Homo sapiens
ttttttctttcagta

SEQ ID NO: 834324 - DNA, 15 bp, Homo sapiens
tttttttctttcagt

SEQ ID NO: 834325 - DNA, 15 bp, Homo sapiens
atttttttctttcag

SEQ ID NO: 834326 - DNA, 15 bp, Homo sapiens
tatttttttctttca

SEQ ID NO: 834327 - DNA, 15 bp, Homo sapiens
gtatttttttctttc

SEQ ID NO: 834328 - DNA, 15 bp, Homo sapiens
agtatttttttcttt

SEQ ID NO: 834329 - DNA, 15 bp, Homo sapiens
aagtatttttttctt

SEQ ID NO: 834330 - DNA, 15 bp, Homo sapiens
caagtatttttttct

SEQ ID NO: 834331 - DNA, 15 bp, Homo sapiens
ccaagtatttttttc

SEQ ID NO: 834332 - DNA, 15 bp, Homo sapiens
cccaagtattttttt

SEQ ID NO: 834333 - DNA, 15 bp, Homo sapiens
tcccaagtatttttt

SEQ ID NO: 834334 - DNA, 15 bp, Homo sapiens
ctcccaagtattttt

SEQ ID NO: 834335 - DNA, 15 bp, Homo sapiens
cctcccaagtatttt

SEQ ID NO: 834336 - DNA, 15 bp, Homo sapiens
ccctcccaagtattt

SEQ ID NO: 834337 - DNA, 15 bp, Homo sapiens
tccctcccaagtatt

SEQ ID NO: 834338 - DNA, 15 bp, Homo sapiens
ttccctcccaagtat

SEQ ID NO: 834339 - DNA, 15 bp, Homo sapiens
tttccctcccaagta

SEQ ID NO: 834340 - DNA, 15 bp, Homo sapiens
atttccctcccaagt

SEQ ID NO: 834341 - DNA, 15 bp, Homo sapiens
aatttccctcccaag

SEQ ID NO: 834342 - DNA, 15 bp, Homo sapiens
caatttccctcccaa

SEQ ID NO: 834343 - DNA, 15 bp, Homo sapiens
ccaatttccctccca

SEQ ID NO: 834344 - DNA, 15 bp, Homo sapiens
gccaatttccctccc

SEQ ID NO: 834345 - DNA, 15 bp, Homo sapiens
tgccaatttccctcc

SEQ ID NO: 834346 - DNA, 15 bp, Homo sapiens
ttgccaatttccctc

SEQ ID NO: 834347 - DNA, 15 bp, Homo sapiens
cttgccaatttccct

SEQ ID NO: 834348 - DNA, 15 bp, Homo sapiens
tcttgccaatttccc

SEQ ID NO: 834349 - DNA, 15 bp, Homo sapiens
ttcttgccaatttcc

SEQ ID NO: 834350 - DNA, 15 bp, Homo sapiens
cttcttgccaatttc

SEQ ID NO: 834351 - DNA, 15 bp, Homo sapiens
acttcttgccaattt

SEQ ID NO: 834352 - DNA, 15 bp, Homo sapiens
tacttcttgccaatt

SEQ ID NO: 834353 - DNA, 15 bp, Homo sapiens
atacttcttgccaat

SEQ ID NO: 834354 - DNA, 15 bp, Homo sapiens
catacttcttgccaa

SEQ ID NO: 834355 - DNA, 15 bp, Homo sapiens
tcatacttcttgcca

SEQ ID NO: 834356 - DNA, 15 bp, Homo sapiens
ttcatacttcttgcc

SEQ ID NO: 834357 - DNA, 15 bp, Homo sapiens
tttcatacttcttgc

SEQ ID NO: 834358 - DNA, 15 bp, Homo sapiens
ttttcatacttcttg

SEQ ID NO: 834359 - DNA, 15 bp, Homo sapiens
tttttcatacttctt

SEQ ID NO: 834360 - DNA, 15 bp, Homo sapiens
ctttttcatacttct

SEQ ID NO: 834361 - DNA, 15 bp, Homo sapiens
gctttttcatacttc

SEQ ID NO: 834362 - DNA, 15 bp, Homo sapiens
agctttttcatactt

SEQ ID NO: 834363 - DNA, 15 bp, Homo sapiens
aagctttttcatact

SEQ ID NO: 834364 - DNA, 15 bp, Homo sapiens
caagctttttcatac

SEQ ID NO: 834365 - DNA, 15 bp, Homo sapiens
ccaagctttttcata

SEQ ID NO: 834366 - DNA, 15 bp, Homo sapiens
cccaagctttttcat

SEQ ID NO: 834367 - DNA, 15 bp, Homo sapiens
tcccaagctttttca

SEQ ID NO: 834368 - DNA, 15 bp, Homo sapiens
ctcccaagctttttc

SEQ ID NO: 834369 - DNA, 15 bp, Homo sapiens
cctcccaagcttttt

SEQ ID NO: 834370 - DNA, 15 bp, Homo sapiens
ccctcccaagctttt

SEQ ID NO: 834371 - DNA, 15 bp, Homo sapiens
tccctcccaagcttt

SEQ ID NO: 834372 - DNA, 15 bp, Homo sapiens
ttccctcccaagctt

SEQ ID NO: 834373 - DNA, 15 bp, Homo sapiens
cttccctcccaagct

SEQ ID NO: 834374 - DNA, 15 bp, Homo sapiens
acttccctcccaagc

SEQ ID NO: 834375 - DNA, 15 bp, Homo sapiens
tacttccctcccaag

SEQ ID NO: 834376 - DNA, 15 bp, Homo sapiens
ttacttccctcccaa

SEQ ID NO: 834377 - DNA, 15 bp, Homo sapiens
cttacttccctccca

SEQ ID NO: 834378 - DNA, 15 bp, Homo sapiens
gcttacttccctccc

SEQ ID NO: 834379 - DNA, 15 bp, Homo sapiens
tgcttacttccctcc

SEQ ID NO: 834380 - DNA, 15 bp, Homo sapiens
ttgcttacttccctc

SEQ ID NO: 834381 - DNA, 15 bp, Homo sapiens
tttgcttacttccct

SEQ ID NO: 834382 - DNA, 15 bp, Homo sapiens
atttgcttacttccc

SEQ ID NO: 834383 - DNA, 15 bp, Homo sapiens
tatttgcttacttcc

SEQ ID NO: 834384 - DNA, 15 bp, Homo sapiens
ttatttgcttacttc

SEQ ID NO: 834385 - DNA, 15 bp, Homo sapiens
tttatttgcttactt

SEQ ID NO: 834386 - DNA, 15 bp, Homo sapiens
atttatttgcttact

SEQ ID NO: 834387 - DNA, 15 bp, Homo sapiens
catttatttgcttac

SEQ ID NO: 834388 - DNA, 15 bp, Homo sapiens
tcatttatttgctta

SEQ ID NO: 834389 - DNA, 15 bp, Homo sapiens
ctcatttatttgctt

SEQ ID NO: 834390 - DNA, 15 bp, Homo sapiens
actcatttatttgct

SEQ ID NO: 834391 - DNA, 15 bp, Homo sapiens
aactcatttatttgc

SEQ ID NO: 834392 - DNA, 15 bp, Homo sapiens
taactcatttatttg

SEQ ID NO: 834393 - DNA, 15 bp, Homo sapiens
ttaactcatttattt

SEQ ID NO: 834394 - DNA, 15 bp, Homo sapiens
attaactcatttatt

SEQ ID NO: 834395 - DNA, 15 bp, Homo sapiens
cattaactcatttat

SEQ ID NO: 834396 - DNA, 15 bp, Homo sapiens
tcattaactcattta

SEQ ID NO: 834397 - DNA, 15 bp, Homo sapiens
gtcattaactcattt

SEQ ID NO: 834398 - DNA, 15 bp, Homo sapiens
agtcattaactcatt

SEQ ID NO: 834399 - DNA, 15 bp, Homo sapiens
cagtcattaactcat

SEQ ID NO: 834400 - DNA, 15 bp, Homo sapiens
acagtcattaactca

SEQ ID NO: 834401 - DNA, 15 bp, Homo sapiens
aacagtcattaactc

SEQ ID NO: 834402 - DNA, 15 bp, Homo sapiens
gaacagtcattaact

SEQ ID NO: 834403 - DNA, 15 bp, Homo sapiens
agaacagtcattaac

SEQ ID NO: 834404 - DNA, 15 bp, Homo sapiens
cagaacagtcattaa

SEQ ID NO: 834405 - DNA, 15 bp, Homo sapiens
ccagaacagtcatta

SEQ ID NO: 834406 - DNA, 15 bp, Homo sapiens
tccagaacagtcatt

SEQ ID NO: 834407 - DNA, 15 bp, Homo sapiens
ttccagaacagtcat

SEQ ID NO: 834408 - DNA, 15 bp, Homo sapiens
tttccagaacagtca

SEQ ID NO: 834409 - DNA, 15 bp, Homo sapiens
ttttccagaacagtc

SEQ ID NO: 834410 - DNA, 15 bp, Homo sapiens
attttccagaacagt

SEQ ID NO: 834411 - DNA, 15 bp, Homo sapiens
tattttccagaacag

SEQ ID NO: 834412 - DNA, 15 bp, Homo sapiens
ttattttccagaaca

SEQ ID NO: 834413 - DNA, 15 bp, Homo sapiens
tttattttccagaac

SEQ ID NO: 834414 - DNA, 15 bp, Homo sapiens
gtttattttccagaa

SEQ ID NO: 834415 - DNA, 15 bp, Homo sapiens
agtttattttccaga

SEQ ID NO: 834416 - DNA, 15 bp, Homo sapiens
gagtttattttccag

SEQ ID NO: 834417 - DNA, 15 bp, Homo sapiens
agagtttattttcca

SEQ ID NO: 834418 - DNA, 15 bp, Homo sapiens
tagagtttattttcc

SEQ ID NO: 834419 - DNA, 15 bp, Homo sapiens
atagagtttattttc

SEQ ID NO: 834420 - DNA, 15 bp, Homo sapiens
gatagagtttatttt

SEQ ID NO: 834421 - DNA, 15 bp, Homo sapiens
tgatagagtttattt

SEQ ID NO: 834422 - DNA, 15 bp, Homo sapiens
atgatagagtttatt

SEQ ID NO: 834423 - DNA, 15 bp, Homo sapiens
catgatagagtttat

SEQ ID NO: 834424 - DNA, 15 bp, Homo sapiens
gcatgatagagttta

SEQ ID NO: 834425 - DNA, 15 bp, Homo sapiens
tgcatgatagagttt

SEQ ID NO: 834426 - DNA, 15 bp, Homo sapiens
ctgcatgatagagtt

SEQ ID NO: 834427 - DNA, 15 bp, Homo sapiens
tctgcatgatagagt

SEQ ID NO: 834428 - DNA, 15 bp, Homo sapiens
atctgcatgatagag

SEQ ID NO: 834429 - DNA, 15 bp, Homo sapiens
tatctgcatgataga

SEQ ID NO: 834430 - DNA, 15 bp, Homo sapiens
atatctgcatgatag

SEQ ID NO: 834431 - DNA, 15 bp, Homo sapiens
gatatctgcatgata

SEQ ID NO: 834432 - DNA, 15 bp, Homo sapiens
tgatatctgcatgat

SEQ ID NO: 834433 - DNA, 15 bp, Homo sapiens
gtgatatctgcatga

SEQ ID NO: 834434 - DNA, 15 bp, Homo sapiens
tgtgatatctgcatg

SEQ ID NO: 834435 - DNA, 15 bp, Homo sapiens
atgtgatatctgcat

SEQ ID NO: 834436 - DNA, 15 bp, Homo sapiens
catgtgatatctgca

SEQ ID NO: 834437 - DNA, 15 bp, Homo sapiens
tcatgtgatatctgc

SEQ ID NO: 834438 - DNA, 15 bp, Homo sapiens
gtcatgtgatatctg

SEQ ID NO: 834439 - DNA, 15 bp, Homo sapiens
agtcatgtgatatct

SEQ ID NO: 834440 - DNA, 15 bp, Homo sapiens
cagtcatgtgatatc

SEQ ID NO: 834441 - DNA, 15 bp, Homo sapiens
tcagtcatgtgatat

SEQ ID NO: 834442 - DNA, 15 bp, Homo sapiens
atcagtcatgtgata

SEQ ID NO: 834443 - DNA, 15 bp, Homo sapiens
aatcagtcatgtgat

SEQ ID NO: 834444 - DNA, 15 bp, Homo sapiens
taatcagtcatgtga

SEQ ID NO: 834445 - DNA, 15 bp, Homo sapiens
ttaatcagtcatgtg

SEQ ID NO: 834446 - DNA, 15 bp, Homo sapiens
tttaatcagtcatgt

SEQ ID NO: 834447 - DNA, 15 bp, Homo sapiens
atttaatcagtcatg

SEQ ID NO: 834448 - DNA, 15 bp, Homo sapiens
aatttaatcagtcat

SEQ ID NO: 834449 - DNA, 15 bp, Homo sapiens
aaatttaatcagtca

SEQ ID NO: 834450 - DNA, 15 bp, Homo sapiens
caaatttaatcagtc

SEQ ID NO: 834451 - DNA, 15 bp, Homo sapiens
tcaaatttaatcagt

SEQ ID NO: 834452 - DNA, 15 bp, Homo sapiens
ttcaaatttaatcag

SEQ ID NO: 834453 - DNA, 15 bp, Homo sapiens
attcaaatttaatca

SEQ ID NO: 834454 - DNA, 15 bp, Homo sapiens
aattcaaatttaatc

SEQ ID NO: 834455 - DNA, 15 bp, Homo sapiens
aaattcaaatttaat

SEQ ID NO: 834456 - DNA, 15 bp, Homo sapiens
caaattcaaatttaa

SEQ ID NO: 834457 - DNA, 15 bp, Homo sapiens
tcaaattcaaattta

SEQ ID NO: 834458 - DNA, 15 bp, Homo sapiens
gtcaaattcaaattt

SEQ ID NO: 834459 - DNA, 15 bp, Homo sapiens
ggtcaaattcaaatt

SEQ ID NO: 834460 - DNA, 15 bp, Homo sapiens
aggtcaaattcaaat

SEQ ID NO: 834461 - DNA, 15 bp, Homo sapiens
gaggtcaaattcaaa

SEQ ID NO: 834462 - DNA, 15 bp, Homo sapiens
ggaggtcaaattcaa

SEQ ID NO: 834463 - DNA, 15 bp, Homo sapiens
aggaggtcaaattca

SEQ ID NO: 834464 - DNA, 15 bp, Homo sapiens
caggaggtcaaattc

SEQ ID NO: 834465 - DNA, 15 bp, Homo sapiens
gcaggaggtcaaatt

SEQ ID NO: 834466 - DNA, 15 bp, Homo sapiens
agcaggaggtcaaat

SEQ ID NO: 834467 - DNA, 15 bp, Homo sapiens
aagcaggaggtcaaa

SEQ ID NO: 834468 - DNA, 15 bp, Homo sapiens
aaagcaggaggtcaa

SEQ ID NO: 834469 - DNA, 15 bp, Homo sapiens
gaaagcaggaggtca

SEQ ID NO: 834470 - DNA, 15 bp, Homo sapiens
ggaaagcaggaggtc

SEQ ID NO: 834471 - DNA, 15 bp, Homo sapiens
tggaaagcaggaggt

SEQ ID NO: 834472 - DNA, 15 bp, Homo sapiens
ctggaaagcaggagg

SEQ ID NO: 834473 - DNA, 15 bp, Homo sapiens
cctggaaagcaggag

SEQ ID NO: 834474 - DNA, 15 bp, Homo sapiens
acctggaaagcagga

SEQ ID NO: 834475 - DNA, 15 bp, Homo sapiens
gacctggaaagcagg

SEQ ID NO: 834476 - DNA, 15 bp, Homo sapiens
agacctggaaagcag

SEQ ID NO: 834477 - DNA, 15 bp, Homo sapiens
cagacctggaaagca

SEQ ID NO: 834478 - DNA, 15 bp, Homo sapiens
ccagacctggaaagc

SEQ ID NO: 834479 - DNA, 15 bp, Homo sapiens
accagacctggaaag

SEQ ID NO: 834480 - DNA, 15 bp, Homo sapiens
taccagacctggaaa

SEQ ID NO: 834481 - DNA, 15 bp, Homo sapiens
ttaccagacctggaa

SEQ ID NO: 834482 - DNA, 15 bp, Homo sapiens
tttaccagacctgga

SEQ ID NO: 834483 - DNA, 15 bp, Homo sapiens
ttttaccagacctgg

SEQ ID NO: 834484 - DNA, 15 bp, Homo sapiens
tttttaccagacctg

SEQ ID NO: 834485 - DNA, 15 bp, Homo sapiens
gtttttaccagacct

SEQ ID NO: 834486 - DNA, 15 bp, Homo sapiens
agtttttaccagacc

SEQ ID NO: 834487 - DNA, 15 bp, Homo sapiens
tagtttttaccagac

SEQ ID NO: 834488 - DNA, 15 bp, Homo sapiens
ttagtttttaccaga

SEQ ID NO: 834489 - DNA, 15 bp, Homo sapiens
gttagtttttaccag

SEQ ID NO: 834490 - DNA, 15 bp, Homo sapiens
ggttagtttttacca

SEQ ID NO: 834491 - DNA, 15 bp, Homo sapiens
aggttagtttttacc

SEQ ID NO: 834492 - DNA, 15 bp, Homo sapiens
caggttagtttttac

SEQ ID NO: 834493 - DNA, 15 bp, Homo sapiens
acaggttagttttta

SEQ ID NO: 834494 - DNA, 15 bp, Homo sapiens
tacaggttagttttt

SEQ ID NO: 834495 - DNA, 15 bp, Homo sapiens
ttacaggttagtttt

SEQ ID NO: 834496 - DNA, 15 bp, Homo sapiens
cttacaggttagttt

SEQ ID NO: 834497 - DNA, 15 bp, Homo sapiens
tcttacaggttagtt

SEQ ID NO: 834498 - DNA, 15 bp, Homo sapiens
ttcttacaggttagt

SEQ ID NO: 834499 - DNA, 15 bp, Homo sapiens
gttcttacaggttag

SEQ ID NO: 834500 - DNA, 15 bp, Homo sapiens
agttcttacaggtta

SEQ ID NO: 834501 - DNA, 15 bp, Homo sapiens
aagttcttacaggtt

SEQ ID NO: 834502 - DNA, 15 bp, Homo sapiens
caagttcttacaggt

SEQ ID NO: 834503 - DNA, 15 bp, Homo sapiens
tcaagttcttacagg

SEQ ID NO: 834504 - DNA, 15 bp, Homo sapiens
ttcaagttcttacag

SEQ ID NO: 834505 - DNA, 15 bp, Homo sapiens
tttcaagttcttaca

SEQ ID NO: 834506 - DNA, 15 bp, Homo sapiens
gtttcaagttcttac

SEQ ID NO: 834507 - DNA, 15 bp, Homo sapiens
agtttcaagttctta

SEQ ID NO: 834508 - DNA, 15 bp, Homo sapiens
aagtttcaagttctt

SEQ ID NO: 834509 - DNA, 15 bp, Homo sapiens
taagtttcaagttct

SEQ ID NO: 834510 - DNA, 15 bp, Homo sapiens
ctaagtttcaagttc

SEQ ID NO: 834511 - DNA, 15 bp, Homo sapiens
gctaagtttcaagtt

SEQ ID NO: 834512 - DNA, 15 bp, Homo sapiens
ggctaagtttcaagt

SEQ ID NO: 834513 - DNA, 15 bp, Homo sapiens
aggctaagtttcaag

SEQ ID NO: 834514 - DNA, 15 bp, Homo sapiens
aaggctaagtttcaa

SEQ ID NO: 834515 - DNA, 15 bp, Homo sapiens
aaaggctaagtttca

SEQ ID NO: 834516 - DNA, 15 bp, Homo sapiens
caaaggctaagtttc

SEQ ID NO: 834517 - DNA, 15 bp, Homo sapiens
tcaaaggctaagttt

SEQ ID NO: 834518 - DNA, 15 bp, Homo sapiens
ttcaaaggctaagtt

SEQ ID NO: 834519 - DNA, 15 bp, Homo sapiens
attcaaaggctaagt

SEQ ID NO: 834520 - DNA, 15 bp, Homo sapiens
cattcaaaggctaag

SEQ ID NO: 834521 - DNA, 15 bp, Homo sapiens
ccattcaaaggctaa

SEQ ID NO: 834522 - DNA, 15 bp, Homo sapiens
accattcaaaggcta

SEQ ID NO: 834523 - DNA, 15 bp, Homo sapiens
gaccattcaaaggct

SEQ ID NO: 834524 - DNA, 15 bp, Homo sapiens
tgaccattcaaaggc

SEQ ID NO: 834525 - DNA, 15 bp, Homo sapiens
ttgaccattcaaagg

SEQ ID NO: 834526 - DNA, 15 bp, Homo sapiens
attgaccattcaaag

SEQ ID NO: 834527 - DNA, 15 bp, Homo sapiens
gattgaccattcaaa

SEQ ID NO: 834528 - DNA, 15 bp, Homo sapiens
ggattgaccattcaa

SEQ ID NO: 834529 - DNA, 15 bp, Homo sapiens
tggattgaccattca

SEQ ID NO: 834530 - DNA, 15 bp, Homo sapiens
gtggattgaccattc

SEQ ID NO: 834531 - DNA, 15 bp, Homo sapiens
ggtggattgaccatt

SEQ ID NO: 834532 - DNA, 15 bp, Homo sapiens
tggtggattgaccat

SEQ ID NO: 834533 - DNA, 15 bp, Homo sapiens
gtggtggattgacca

SEQ ID NO: 834534 - DNA, 15 bp, Homo sapiens
agtggtggattgacc

SEQ ID NO: 834535 - DNA, 15 bp, Homo sapiens
cagtggtggattgac

SEQ ID NO: 834536 - DNA, 15 bp, Homo sapiens
acagtggtggattga

SEQ ID NO: 834537 - DNA, 15 bp, Homo sapiens
tacagtggtggattg

SEQ ID NO: 834538 - DNA, 15 bp, Homo sapiens
ctacagtggtggatt

SEQ ID NO: 834539 - DNA, 15 bp, Homo sapiens
cctacagtggtggat

SEQ ID NO: 834540 - DNA, 15 bp, Homo sapiens
tcctacagtggtgga

SEQ ID NO: 834541 - DNA, 15 bp, Homo sapiens
ctcctacagtggtgg

SEQ ID NO: 834542 - DNA, 15 bp, Homo sapiens
tctcctacagtggtg

SEQ ID NO: 834543 - DNA, 15 bp, Homo sapiens
ttctcctacagtggt

SEQ ID NO: 834544 - DNA, 15 bp, Homo sapiens
attctcctacagtgg

SEQ ID NO: 834545 - DNA, 15 bp, Homo sapiens
aattctcctacagtg

SEQ ID NO: 834546 - DNA, 15 bp, Homo sapiens
aaattctcctacagt

SEQ ID NO: 834547 - DNA, 15 bp, Homo sapiens
taaattctcctacag

SEQ ID NO: 834548 - DNA, 15 bp, Homo sapiens
ataaattctcctaca

SEQ ID NO: 834549 - DNA, 15 bp, Homo sapiens
cataaattctcctac

SEQ ID NO: 834550 - DNA, 15 bp, Homo sapiens
tcataaattctccta

SEQ ID NO: 834551 - DNA, 15 bp, Homo sapiens
ttcataaattctcct

SEQ ID NO: 834552 - DNA, 15 bp, Homo sapiens
attcataaattctcc

SEQ ID NO: 834553 - DNA, 15 bp, Homo sapiens
cattcataaattctc

SEQ ID NO: 834554 - DNA, 15 bp, Homo sapiens
acattcataaattct

SEQ ID NO: 834555 - DNA, 15 bp, Homo sapiens
aacattcataaattc

SEQ ID NO: 834556 - DNA, 15 bp, Homo sapiens
gaacattcataaatt

SEQ ID NO: 834557 - DNA, 15 bp, Homo sapiens
tgaacattcataaat

SEQ ID NO: 834558 - DNA, 15 bp, Homo sapiens
ctgaacattcataaa

SEQ ID NO: 834559 - DNA, 15 bp, Homo sapiens
actgaacattcataa

SEQ ID NO: 834560 - DNA, 15 bp, Homo sapiens
aactgaacattcata

SEQ ID NO: 834561 - DNA, 15 bp, Homo sapiens
caactgaacattcat

SEQ ID NO: 834562 - DNA, 15 bp, Homo sapiens
tcaactgaacattca

SEQ ID NO: 834563 - DNA, 15 bp, Homo sapiens
ctcaactgaacattc

SEQ ID NO: 834564 - DNA, 15 bp, Homo sapiens
tctcaactgaacatt

SEQ ID NO: 834565 - DNA, 15 bp, Homo sapiens
ctctcaactgaacat

SEQ ID NO: 834566 - DNA, 15 bp, Homo sapiens
tctctcaactgaaca

SEQ ID NO: 834567 - DNA, 15 bp, Homo sapiens
ttctctcaactgaac

SEQ ID NO: 834568 - DNA, 15 bp, Homo sapiens
gttctctcaactgaa

SEQ ID NO: 834569 - DNA, 15 bp, Homo sapiens
agttctctcaactga

SEQ ID NO: 834570 - DNA, 15 bp, Homo sapiens
cagttctctcaactg

SEQ ID NO: 834571 - DNA, 15 bp, Homo sapiens
tcagttctctcaact

SEQ ID NO: 834572 - DNA, 15 bp, Homo sapiens
ttcagttctctcaac

SEQ ID NO: 834573 - DNA, 15 bp, Homo sapiens
tttcagttctctcaa

SEQ ID NO: 834574 - DNA, 15 bp, Homo sapiens
ttttcagttctctca

SEQ ID NO: 834575 - DNA, 15 bp, Homo sapiens
attttcagttctctc

SEQ ID NO: 834576 - DNA, 15 bp, Homo sapiens
tattttcagttctct

SEQ ID NO: 834577 - DNA, 15 bp, Homo sapiens
ttattttcagttctc

SEQ ID NO: 834578 - DNA, 15 bp, Homo sapiens
tttattttcagttct

SEQ ID NO: 834579 - DNA, 15 bp, Homo sapiens
ctttattttcagttc

SEQ ID NO: 834580 - DNA, 15 bp, Homo sapiens
tctttattttcagtt

SEQ ID NO: 834581 - DNA, 15 bp, Homo sapiens
ttctttattttcagt

SEQ ID NO: 834582 - DNA, 15 bp, Homo sapiens
cttctttattttcag

SEQ ID NO: 834583 - DNA, 15 bp, Homo sapiens
acttctttattttca

SEQ ID NO: 834584 - DNA, 15 bp, Homo sapiens
tacttctttattttc

SEQ ID NO: 834585 - DNA, 15 bp, Homo sapiens
gtacttctttatttt

SEQ ID NO: 834586 - DNA, 15 bp, Homo sapiens
ggtacttctttattt

SEQ ID NO: 834587 - DNA, 15 bp, Homo sapiens
tggtacttctttatt

SEQ ID NO: 834588 - DNA, 15 bp, Homo sapiens
atggtacttctttat

SEQ ID NO: 834589 - DNA, 15 bp, Homo sapiens
tatggtacttcttta

SEQ ID NO: 834590 - DNA, 15 bp, Homo sapiens
ctatggtacttcttt

SEQ ID NO: 834591 - DNA, 15 bp, Homo sapiens
cctatggtacttctt

SEQ ID NO: 834592 - DNA, 15 bp, Homo sapiens
tcctatggtacttct

SEQ ID NO: 834593 - DNA, 15 bp, Homo sapiens
ttcctatggtacttc

SEQ ID NO: 834594 - DNA, 15 bp, Homo sapiens
attcctatggtactt

SEQ ID NO: 834595 - DNA, 15 bp, Homo sapiens
aattcctatggtact

SEQ ID NO: 834596 - DNA, 15 bp, Homo sapiens
taattcctatggtac

SEQ ID NO: 834597 - DNA, 15 bp, Homo sapiens
ttaattcctatggta

SEQ ID NO: 834598 - DNA, 15 bp, Homo sapiens
gttaattcctatggt

SEQ ID NO: 834599 - DNA, 15 bp, Homo sapiens
tgttaattcctatgg

SEQ ID NO: 834600 - DNA, 15 bp, Homo sapiens
atgttaattcctatg

SEQ ID NO: 834601 - DNA, 15 bp, Homo sapiens
aatgttaattcctat

SEQ ID NO: 834602 - DNA, 15 bp, Homo sapiens
aaatgttaattccta

SEQ ID NO: 834603 - DNA, 15 bp, Homo sapiens
caaatgttaattcct

SEQ ID NO: 834604 - DNA, 15 bp, Homo sapiens
gcaaatgttaattcc

SEQ ID NO: 834605 - DNA, 15 bp, Homo sapiens
tgcaaatgttaattc

SEQ ID NO: 834606 - DNA, 15 bp, Homo sapiens
atgcaaatgttaatt

SEQ ID NO: 834607 - DNA, 15 bp, Homo sapiens
aatgcaaatgttaat

SEQ ID NO: 834608 - DNA, 15 bp, Homo sapiens
gaatgcaaatgttaa

SEQ ID NO: 834609 - DNA, 15 bp, Homo sapiens
tgaatgcaaatgtta

SEQ ID NO: 834610 - DNA, 15 bp, Homo sapiens
ctgaatgcaaatgtt

SEQ ID NO: 834611 - DNA, 15 bp, Homo sapiens
actgaatgcaaatgt

SEQ ID NO: 834612 - DNA, 15 bp, Homo sapiens
tactgaatgcaaatg

SEQ ID NO: 834613 - DNA, 15 bp, Homo sapiens
ctactgaatgcaaat

SEQ ID NO: 834614 - DNA, 15 bp, Homo sapiens
gctactgaatgcaaa

SEQ ID NO: 834615 - DNA, 15 bp, Homo sapiens
ggctactgaatgcaa

SEQ ID NO: 834616 - DNA, 15 bp, Homo sapiens
tggctactgaatgca

SEQ ID NO: 834617 - DNA, 15 bp, Homo sapiens
ttggctactgaatgc

SEQ ID NO: 834618 - DNA, 15 bp, Homo sapiens
cttggctactgaatg

SEQ ID NO: 834619 - DNA, 15 bp, Homo sapiens
tcttggctactgaat

SEQ ID NO: 834620 - DNA, 15 bp, Homo sapiens
atcttggctactgaa

SEQ ID NO: 834621 - DNA, 15 bp, Homo sapiens
tatcttggctactga

SEQ ID NO: 834622 - DNA, 15 bp, Homo sapiens
atatcttggctactg

SEQ ID NO: 834623 - DNA, 15 bp, Homo sapiens
tatatcttggctact

SEQ ID NO: 834624 - DNA, 15 bp, Homo sapiens
ttatatcttggctac

SEQ ID NO: 834625 - DNA, 15 bp, Homo sapiens
attatatcttggcta

SEQ ID NO: 834626 - DNA, 15 bp, Homo sapiens
cattatatcttggct

SEQ ID NO: 834627 - DNA, 15 bp, Homo sapiens
ccattatatcttggc

SEQ ID NO: 834628 - DNA, 15 bp, Homo sapiens
tccattatatcttgg

SEQ ID NO: 834629 - DNA, 15 bp, Homo sapiens
gtccattatatcttg

SEQ ID NO: 834630 - DNA, 15 bp, Homo sapiens
tgtccattatatctt

SEQ ID NO: 834631 - DNA, 15 bp, Homo sapiens
atgtccattatatct

SEQ ID NO: 834632 - DNA, 15 bp, Homo sapiens
gatgtccattatatc

SEQ ID NO: 834633 - DNA, 15 bp, Homo sapiens
agatgtccattatat

SEQ ID NO: 834634 - DNA, 15 bp, Homo sapiens
cagatgtccattata

SEQ ID NO: 834635 - DNA, 15 bp, Homo sapiens
tcagatgtccattat

SEQ ID NO: 834636 - DNA, 15 bp, Homo sapiens
ttcagatgtccatta

SEQ ID NO: 834637 - DNA, 15 bp, Homo sapiens
tttcagatgtccatt

SEQ ID NO: 834638 - DNA, 15 bp, Homo sapiens
gtttcagatgtccat

SEQ ID NO: 834639 - DNA, 15 bp, Homo sapiens
tgtttcagatgtcca

SEQ ID NO: 834640 - DNA, 15 bp, Homo sapiens
ctgtttcagatgtcc

SEQ ID NO: 834641 - DNA, 15 bp, Homo sapiens
cctgtttcagatgtc

SEQ ID NO: 834642 - DNA, 15 bp, Homo sapiens
acctgtttcagatgt

SEQ ID NO: 834643 - DNA, 15 bp, Homo sapiens
tacctgtttcagatg

SEQ ID NO: 834644 - DNA, 15 bp, Homo sapiens
atacctgtttcagat

SEQ ID NO: 834645 - DNA, 15 bp, Homo sapiens
aatacctgtttcaga

SEQ ID NO: 834646 - DNA, 15 bp, Homo sapiens
aaatacctgtttcag

SEQ ID NO: 834647 - DNA, 15 bp, Homo sapiens
caaatacctgtttca

SEQ ID NO: 834648 - DNA, 15 bp, Homo sapiens
tcaaatacctgtttc

SEQ ID NO: 834649 - DNA, 15 bp, Homo sapiens
ctcaaatacctgttt

SEQ ID NO: 834650 - DNA, 15 bp, Homo sapiens
cctcaaatacctgtt

SEQ ID NO: 834651 - DNA, 15 bp, Homo sapiens
gcctcaaatacctgt

SEQ ID NO: 834652 - DNA, 15 bp, Homo sapiens
ggcctcaaatacctg

SEQ ID NO: 834653 - DNA, 15 bp, Homo sapiens
tggcctcaaatacct

SEQ ID NO: 834654 - DNA, 15 bp, Homo sapiens
ctggcctcaaatacc

SEQ ID NO: 834655 - DNA, 15 bp, Homo sapiens
cctggcctcaaatac

SEQ ID NO: 834656 - DNA, 15 bp, Homo sapiens
gcctggcctcaaata

SEQ ID NO: 834657 - DNA, 15 bp, Homo sapiens
cgcctggcctcaaat

SEQ ID NO: 834658 - DNA, 15 bp, Homo sapiens
acgcctggcctcaaa

SEQ ID NO: 834659 - DNA, 15 bp, Homo sapiens
cacgcctggcctcaa

SEQ ID NO: 834660 - DNA, 15 bp, Homo sapiens
ccacgcctggcctca

SEQ ID NO: 834661 - DNA, 15 bp, Homo sapiens
accacgcctggcctc

SEQ ID NO: 834662 - DNA, 15 bp, Homo sapiens
caccacgcctggcct

SEQ ID NO: 834663 - DNA, 15 bp, Homo sapiens
acaccacgcctggcc

SEQ ID NO: 834664 - DNA, 15 bp, Homo sapiens
gacaccacgcctggc

SEQ ID NO: 834665 - DNA, 15 bp, Homo sapiens
agacaccacgcctgg

SEQ ID NO: 834666 - DNA, 15 bp, Homo sapiens
gagacaccacgcctg

SEQ ID NO: 834667 - DNA, 15 bp, Homo sapiens
tgagacaccacgcct

SEQ ID NO: 834668 - DNA, 15 bp, Homo sapiens
atgagacaccacgcc

SEQ ID NO: 834669 - DNA, 15 bp, Homo sapiens
catgagacaccacgc

SEQ ID NO: 834670 - DNA, 15 bp, Homo sapiens
gcatgagacaccacg

SEQ ID NO: 834671 - DNA, 15 bp, Homo sapiens
ggcatgagacaccac

SEQ ID NO: 834672 - DNA, 15 bp, Homo sapiens
aggcatgagacacca

SEQ ID NO: 834673 - DNA, 15 bp, Homo sapiens
caggcatgagacacc

SEQ ID NO: 834674 - DNA, 15 bp, Homo sapiens
acaggcatgagacac

SEQ ID NO: 834675 - DNA, 15 bp, Homo sapiens
tacaggcatgagaca

SEQ ID NO: 834676 - DNA, 15 bp, Homo sapiens
ttacaggcatgagac

SEQ ID NO: 834677 - DNA, 15 bp, Homo sapiens
attacaggcatgaga

SEQ ID NO: 834678 - DNA, 15 bp, Homo sapiens
tattacaggcatgag

SEQ ID NO: 834679 - DNA, 15 bp, Homo sapiens
ttattacaggcatga

SEQ ID NO: 834680 - DNA, 15 bp, Homo sapiens
attattacaggcatg

SEQ ID NO: 834681 - DNA, 15 bp, Homo sapiens
tattattacaggcat

SEQ ID NO: 834682 - DNA, 15 bp, Homo sapiens
ctattattacaggca

SEQ ID NO: 834683 - DNA, 15 bp, Homo sapiens
gctattattacaggc

SEQ ID NO: 834684 - DNA, 15 bp, Homo sapiens
tgctattattacagg

SEQ ID NO: 834685 - DNA, 15 bp, Homo sapiens
gtgctattattacag

SEQ ID NO: 834686 - DNA, 15 bp, Homo sapiens
agtgctattattaca

SEQ ID NO: 834687 - DNA, 15 bp, Homo sapiens
aagtgctattattac

SEQ ID NO: 834688 - DNA, 15 bp, Homo sapiens
aaagtgctattatta

SEQ ID NO: 834689 - DNA, 15 bp, Homo sapiens
caaagtgctattatt

SEQ ID NO: 834690 - DNA, 15 bp, Homo sapiens
ccaaagtgctattat

SEQ ID NO: 834691 - DNA, 15 bp, Homo sapiens
cccaaagtgctatta

SEQ ID NO: 834692 - DNA, 15 bp, Homo sapiens
tcccaaagtgctatt

SEQ ID NO: 834693 - DNA, 15 bp, Homo sapiens
ctcccaaagtgctat

SEQ ID NO: 834694 - DNA, 15 bp, Homo sapiens
cctcccaaagtgcta

SEQ ID NO: 834695 - DNA, 15 bp, Homo sapiens
acccacctcggcctc

SEQ ID NO: 834696 - DNA, 15 bp, Homo sapiens
cacccacctcggcct

SEQ ID NO: 834697 - DNA, 15 bp, Homo sapiens
ccacccacctcggcc

SEQ ID NO: 834698 - DNA, 15 bp, Homo sapiens
tccacccacctcggc

SEQ ID NO: 834699 - DNA, 15 bp, Homo sapiens
atccacccacctcgg

SEQ ID NO: 834700 - DNA, 15 bp, Homo sapiens
gatccacccacctcg

SEQ ID NO: 834701 - DNA, 15 bp, Homo sapiens
tgatccacccacctc

SEQ ID NO: 834702 - DNA, 15 bp, Homo sapiens
gtgatccacccacct

SEQ ID NO: 834703 - DNA, 15 bp, Homo sapiens
tgtgatccacccacc

SEQ ID NO: 834704 - DNA, 15 bp, Homo sapiens
ctgtgatccacccac

SEQ ID NO: 834705 - DNA, 15 bp, Homo sapiens
cctgtgatccaccca

SEQ ID NO: 834706 - DNA, 15 bp, Homo sapiens
tcctgtgatccaccc

SEQ ID NO: 834707 - DNA, 15 bp, Homo sapiens
ctcctgtgatccacc

SEQ ID NO: 834708 - DNA, 15 bp, Homo sapiens
cctcctgtgatccac

SEQ ID NO: 834709 - DNA, 15 bp, Homo sapiens
gcctcctgtgatcca

SEQ ID NO: 834710 - DNA, 15 bp, Homo sapiens
ggcctcctgtgatcc

SEQ ID NO: 834711 - DNA, 15 bp, Homo sapiens
tggcctcctgtgatc

SEQ ID NO: 834712 - DNA, 15 bp, Homo sapiens
ctggcctcctgtgat

SEQ ID NO: 834713 - DNA, 15 bp, Homo sapiens
cctggcctcctgtga

SEQ ID NO: 834714 - DNA, 15 bp, Homo sapiens
tcctggcctcctgtg

SEQ ID NO: 834715 - DNA, 15 bp, Homo sapiens
ctcctggcctcctgt

SEQ ID NO: 834716 - DNA, 15 bp, Homo sapiens
actcctggcctcctg

SEQ ID NO: 834717 - DNA, 15 bp, Homo sapiens
aactcctggcctcct

SEQ ID NO: 834718 - DNA, 15 bp, Homo sapiens
gaactcctggcctcc

SEQ ID NO: 834719 - DNA, 15 bp, Homo sapiens
tgaactcctggcctc

SEQ ID NO: 834720 - DNA, 15 bp, Homo sapiens
ttgaactcctggcct

SEQ ID NO: 834721 - DNA, 15 bp, Homo sapiens
cttgaactcctggcc

SEQ ID NO: 834722 - DNA, 15 bp, Homo sapiens
tcttgaactcctggc

SEQ ID NO: 834723 - DNA, 15 bp, Homo sapiens
gtcttgaactcctgg

SEQ ID NO: 834724 - DNA, 15 bp, Homo sapiens
taggctggtcttgaa

SEQ ID NO: 834725 - DNA, 15 bp, Homo sapiens
gtaggctggtcttga

SEQ ID NO: 834726 - DNA, 15 bp, Homo sapiens
agtaggctggtcttg

SEQ ID NO: 834727 - DNA, 15 bp, Homo sapiens
tagtaggctggtctt

SEQ ID NO: 834728 - DNA, 15 bp, Homo sapiens
ttagtaggctggtct

SEQ ID NO: 834729 - DNA, 15 bp, Homo sapiens
tttagtaggctggtc

SEQ ID NO: 834730 - DNA, 15 bp, Homo sapiens
ttttagtaggctggt

SEQ ID NO: 834731 - DNA, 15 bp, Homo sapiens
gttttagtaggctgg

SEQ ID NO: 834732 - DNA, 15 bp, Homo sapiens
tgttttagtaggctg

SEQ ID NO: 834733 - DNA, 15 bp, Homo sapiens
gtgttttagtaggct

SEQ ID NO: 834734 - DNA, 15 bp, Homo sapiens
tgtgttttagtaggc

SEQ ID NO: 834735 - DNA, 15 bp, Homo sapiens
gtgtgttttagtagg

SEQ ID NO: 834736 - DNA, 15 bp, Homo sapiens
tgtgtgttttagtag

SEQ ID NO: 834737 - DNA, 15 bp, Homo sapiens
gtgtgtgttttagta

SEQ ID NO: 834738 - DNA, 15 bp, Homo sapiens
tgtgtgtgttttagt

SEQ ID NO: 834739 - DNA, 15 bp, Homo sapiens
gtgtgtgtgttttag

SEQ ID NO: 834740 - DNA, 15 bp, Homo sapiens
tgtgtgtgtgtttta

SEQ ID NO: 834741 - DNA, 15 bp, Homo sapiens
gtgtgtgtgtgtttt

SEQ ID NO: 834742 - DNA, 15 bp, Homo sapiens
tgtgtgtgtgtgttt

SEQ ID NO: 834743 - DNA, 15 bp, Homo sapiens
gtgtgtgtgtgtgtt

SEQ ID NO: 834744 - DNA, 15 bp, Homo sapiens
agtgtgtgtgtgtgt

SEQ ID NO: 834745 - DNA, 15 bp, Homo sapiens
tagtgtgtgtgtgtg

SEQ ID NO: 834746 - DNA, 15 bp, Homo sapiens
ctagtgtgtgtgtgt

SEQ ID NO: 834747 - DNA, 15 bp, Homo sapiens
gctagtgtgtgtgtg

SEQ ID NO: 834748 - DNA, 15 bp, Homo sapiens
ggctagtgtgtgtgt

SEQ ID NO: 834749 - DNA, 15 bp, Homo sapiens
tggctagtgtgtgtg

SEQ ID NO: 834750 - DNA, 15 bp, Homo sapiens
ctggctagtgtgtgt

SEQ ID NO: 834751 - DNA, 15 bp, Homo sapiens
cctggctagtgtgtg

SEQ ID NO: 834752 - DNA, 15 bp, Homo sapiens
gcctggctagtgtgt

SEQ ID NO: 834753 - DNA, 15 bp, Homo sapiens
cgcctggctagtgtg

SEQ ID NO: 834754 - DNA, 15 bp, Homo sapiens
acgcctggctagtgt

SEQ ID NO: 834755 - DNA, 15 bp, Homo sapiens
cacgcctggctagtg

SEQ ID NO: 834756 - DNA, 15 bp, Homo sapiens
ccacgcctggctagt

SEQ ID NO: 834757 - DNA, 15 bp, Homo sapiens
accacgcctggctag

SEQ ID NO: 834758 - DNA, 15 bp, Homo sapiens
caccacgcctggcta

SEQ ID NO: 834759 - DNA, 15 bp, Homo sapiens
ccaccacgcctggct

SEQ ID NO: 834760 - DNA, 15 bp, Homo sapiens
accaccacgcctggc

SEQ ID NO: 834761 - DNA, 15 bp, Homo sapiens
caccaccacgcctgg

SEQ ID NO: 834762 - DNA, 15 bp, Homo sapiens
gcaccaccacgcctg

SEQ ID NO: 834763 - DNA, 15 bp, Homo sapiens
tgcaccaccacgcct

SEQ ID NO: 834764 - DNA, 15 bp, Homo sapiens
gtgcaccaccacgcc

SEQ ID NO: 834765 - DNA, 15 bp, Homo sapiens
cgtgcaccaccacgc

SEQ ID NO: 834766 - DNA, 15 bp, Homo sapiens
acgtgcaccaccacg

SEQ ID NO: 834767 - DNA, 15 bp, Homo sapiens
aacgtgcaccaccac

SEQ ID NO: 834768 - DNA, 15 bp, Homo sapiens
aaacgtgcaccacca

SEQ ID NO: 834769 - DNA, 15 bp, Homo sapiens
caaacgtgcaccacc

SEQ ID NO: 834770 - DNA, 15 bp, Homo sapiens
acaaacgtgcaccac

SEQ ID NO: 834771 - DNA, 15 bp, Homo sapiens
tacaaacgtgcacca

SEQ ID NO: 834772 - DNA, 15 bp, Homo sapiens
ctacaaacgtgcacc

SEQ ID NO: 834773 - DNA, 15 bp, Homo sapiens
actacaaacgtgcac

SEQ ID NO: 834774 - DNA, 15 bp, Homo sapiens
gactacaaacgtgca

SEQ ID NO: 834775 - DNA, 15 bp, Homo sapiens
ggactacaaacgtgc

SEQ ID NO: 834776 - DNA, 15 bp, Homo sapiens
tggactacaaacgtg

SEQ ID NO: 834777 - DNA, 15 bp, Homo sapiens
ttggactacaaacgt

SEQ ID NO: 834778 - DNA, 15 bp, Homo sapiens
cttggactacaaacg

SEQ ID NO: 834779 - DNA, 15 bp, Homo sapiens
gcttggactacaaac

SEQ ID NO: 834780 - DNA, 15 bp, Homo sapiens
agcttggactacaaa

SEQ ID NO: 834781 - DNA, 15 bp, Homo sapiens
tagcttggactacaa

SEQ ID NO: 834782 - DNA, 15 bp, Homo sapiens
gtagcttggactaca

SEQ ID NO: 834783 - DNA, 15 bp, Homo sapiens
agtagcttggactac

SEQ ID NO: 834784 - DNA, 15 bp, Homo sapiens
aagtagcttggacta

SEQ ID NO: 834785 - DNA, 15 bp, Homo sapiens
caagtagcttggact

SEQ ID NO: 834786 - DNA, 15 bp, Homo sapiens
ccaagtagcttggac

SEQ ID NO: 834787 - DNA, 15 bp, Homo sapiens
cccaagtagcttgga

SEQ ID NO: 834788 - DNA, 15 bp, Homo sapiens
tcccaagtagcttgg

SEQ ID NO: 834789 - DNA, 15 bp, Homo sapiens
ctcccaagtagcttg

SEQ ID NO: 834790 - DNA, 15 bp, Homo sapiens
cctcccaagtagctt

SEQ ID NO: 834791 - DNA, 15 bp, Homo sapiens
atgcctcagcctccc

SEQ ID NO: 834792 - DNA, 15 bp, Homo sapiens
catgcctcagcctcc

SEQ ID NO: 834793 - DNA, 15 bp, Homo sapiens
tcatgcctcagcctc

SEQ ID NO: 834794 - DNA, 15 bp, Homo sapiens
ctcatgcctcagcct

SEQ ID NO: 834795 - DNA, 15 bp, Homo sapiens
tctcatgcctcagcc

SEQ ID NO: 834796 - DNA, 15 bp, Homo sapiens
ttctcatgcctcagc

SEQ ID NO: 834797 - DNA, 15 bp, Homo sapiens
attctcatgcctcag

SEQ ID NO: 834798 - DNA, 15 bp, Homo sapiens
tattctcatgcctca

SEQ ID NO: 834799 - DNA, 15 bp, Homo sapiens
ctattctcatgcctc

SEQ ID NO: 834800 - DNA, 15 bp, Homo sapiens
gctattctcatgcct

SEQ ID NO: 834801 - DNA, 15 bp, Homo sapiens
agctattctcatgcc

SEQ ID NO: 834802 - DNA, 15 bp, Homo sapiens
aagctattctcatgc

SEQ ID NO: 834803 - DNA, 15 bp, Homo sapiens
caagctattctcatg

SEQ ID NO: 834804 - DNA, 15 bp, Homo sapiens
tcaagctattctcat

SEQ ID NO: 834805 - DNA, 15 bp, Homo sapiens
ttcaagctattctca

SEQ ID NO: 834806 - DNA, 15 bp, Homo sapiens
gggttcaagctattc

SEQ ID NO: 834807 - DNA, 15 bp, Homo sapiens
tgggttcaagctatt

SEQ ID NO: 834808 - DNA, 15 bp, Homo sapiens
ctgggttcaagctat

SEQ ID NO: 834809 - DNA, 15 bp, Homo sapiens
tctgggttcaagcta

SEQ ID NO: 834810 - DNA, 15 bp, Homo sapiens
ttctgggttcaagct

SEQ ID NO: 834811 - DNA, 15 bp, Homo sapiens
cttctgggttcaagc

SEQ ID NO: 834812 - DNA, 15 bp, Homo sapiens
ccttctgggttcaag

SEQ ID NO: 834813 - DNA, 15 bp, Homo sapiens
gccttctgggttcaa

SEQ ID NO: 834814 - DNA, 15 bp, Homo sapiens
cgccttctgggttca

SEQ ID NO: 834815 - DNA, 15 bp, Homo sapiens
ccgccttctgggttc

SEQ ID NO: 834816 - DNA, 15 bp, Homo sapiens
tccgccttctgggtt

SEQ ID NO: 834817 - DNA, 15 bp, Homo sapiens
ctccgccttctgggt

SEQ ID NO: 834818 - DNA, 15 bp, Homo sapiens
cctccgccttctggg

SEQ ID NO: 834819 - DNA, 15 bp, Homo sapiens
acctccgccttctgg

SEQ ID NO: 834820 - DNA, 15 bp, Homo sapiens
aacctccgccttctg

SEQ ID NO: 834821 - DNA, 15 bp, Homo sapiens
caacctccgccttct

SEQ ID NO: 834822 - DNA, 15 bp, Homo sapiens
gcaacctccgccttc

SEQ ID NO: 834823 - DNA, 15 bp, Homo sapiens
agcaacctccgcctt

SEQ ID NO: 834824 - DNA, 15 bp, Homo sapiens
cagcaacctccgcct

SEQ ID NO: 834825 - DNA, 15 bp, Homo sapiens
acagcaacctccgcc

SEQ ID NO: 834826 - DNA, 15 bp, Homo sapiens
cacagcaacctccgc

SEQ ID NO: 834827 - DNA, 15 bp, Homo sapiens
tcacagcaacctccg

SEQ ID NO: 834828 - DNA, 15 bp, Homo sapiens
ctcacagcaacctcc

SEQ ID NO: 834829 - DNA, 15 bp, Homo sapiens
gctcacagcaacctc

SEQ ID NO: 834830 - DNA, 15 bp, Homo sapiens
agctcacagcaacct

SEQ ID NO: 834831 - DNA, 15 bp, Homo sapiens
cagctcacagcaacc

SEQ ID NO: 834832 - DNA, 15 bp, Homo sapiens
tcagctcacagcaac

SEQ ID NO: 834833 - DNA, 15 bp, Homo sapiens
ctcagctcacagcaa

SEQ ID NO: 834834 - DNA, 15 bp, Homo sapiens
tctcagctcacagca

SEQ ID NO: 834835 - DNA, 15 bp, Homo sapiens
atctcagctcacagc

SEQ ID NO: 834836 - DNA, 15 bp, Homo sapiens
aatctcagctcacag

SEQ ID NO: 834837 - DNA, 15 bp, Homo sapiens
caatctcagctcaca

SEQ ID NO: 834838 - DNA, 15 bp, Homo sapiens
gtggcgcaatctcag

SEQ ID NO: 834839 - DNA, 15 bp, Homo sapiens
agtggcgcaatctca

SEQ ID NO: 834840 - DNA, 15 bp, Homo sapiens
cagtggcgcaatctc

SEQ ID NO: 834841 - DNA, 15 bp, Homo sapiens
gcagtggcgcaatct

SEQ ID NO: 834842 - DNA, 15 bp, Homo sapiens
tgcagtggcgcaatc

SEQ ID NO: 834843 - DNA, 15 bp, Homo sapiens
gtgcagtggcgcaat

SEQ ID NO: 834844 - DNA, 15 bp, Homo sapiens
agtgcagtggcgcaa

SEQ ID NO: 834845 - DNA, 15 bp, Homo sapiens
gagtgcagtggcgca

SEQ ID NO: 834846 - DNA, 15 bp, Homo sapiens
tgagacagagtctca

SEQ ID NO: 834847 - DNA, 15 bp, Homo sapiens
ttgagacagagtctc

SEQ ID NO: 834848 - DNA, 15 bp, Homo sapiens
tttgagacagagtct

SEQ ID NO: 834849 - DNA, 15 bp, Homo sapiens
ttttgagacagagtc

SEQ ID NO: 834850 - DNA, 15 bp, Homo sapiens
atttttgagacagag

SEQ ID NO: 834851 - DNA, 15 bp, Homo sapiens
tatttttgagacaga

SEQ ID NO: 834852 - DNA, 15 bp, Homo sapiens
ttatttttgagacag

SEQ ID NO: 834853 - DNA, 15 bp, Homo sapiens
tttatttttgagaca

SEQ ID NO: 834854 - DNA, 15 bp, Homo sapiens
ttttatttttgagac

SEQ ID NO: 834855 - DNA, 15 bp, Homo sapiens
attttatttttgaga

SEQ ID NO: 834856 - DNA, 15 bp, Homo sapiens
tattttatttttgag

SEQ ID NO: 834857 - DNA, 15 bp, Homo sapiens
ttattttatttttga

SEQ ID NO: 834858 - DNA, 15 bp, Homo sapiens
tttattttatttttg

SEQ ID NO: 834859 - DNA, 15 bp, Homo sapiens
ttttattttattttt

SEQ ID NO: 834860 - DNA, 15 bp, Homo sapiens
gttttattttatttt

SEQ ID NO: 834861 - DNA, 15 bp, Homo sapiens
tgttttattttattt

SEQ ID NO: 834862 - DNA, 15 bp, Homo sapiens
atgttttattttatt

SEQ ID NO: 834863 - DNA, 15 bp, Homo sapiens
tatgttttattttat

SEQ ID NO: 834864 - DNA, 15 bp, Homo sapiens
atatgttttatttta

SEQ ID NO: 834865 - DNA, 15 bp, Homo sapiens
tatatgttttatttt

SEQ ID NO: 834866 - DNA, 15 bp, Homo sapiens
atatatgttttattt

SEQ ID NO: 834867 - DNA, 15 bp, Homo sapiens
aatatatgttttatt

SEQ ID NO: 834868 - DNA, 15 bp, Homo sapiens
aaatatatgttttat

SEQ ID NO: 834869 - DNA, 15 bp, Homo sapiens
caaatatatgtttta

SEQ ID NO: 834870 - DNA, 15 bp, Homo sapiens
tcaaatatatgtttt

SEQ ID NO: 834871 - DNA, 15 bp, Homo sapiens
ttcaaatatatgttt

SEQ ID NO: 834872 - DNA, 15 bp, Homo sapiens
tttcaaatatatgtt

SEQ ID NO: 834873 - DNA, 15 bp, Homo sapiens
gtttcaaatatatgt

SEQ ID NO: 834874 - DNA, 15 bp, Homo sapiens
tgtttcaaatatatg

SEQ ID NO: 834875 - DNA, 15 bp, Homo sapiens
gtgtttcaaatatat

SEQ ID NO: 834876 - DNA, 15 bp, Homo sapiens
tgtgtttcaaatata

SEQ ID NO: 834877 - DNA, 15 bp, Homo sapiens
atgtgtttcaaatat

SEQ ID NO: 834878 - DNA, 15 bp, Homo sapiens
aatgtgtttcaaata

SEQ ID NO: 834879 - DNA, 15 bp, Homo sapiens
caatgtgtttcaaat

SEQ ID NO: 834880 - DNA, 15 bp, Homo sapiens
tcaatgtgtttcaaa

SEQ ID NO: 834881 - DNA, 15 bp, Homo sapiens
ttcaatgtgtttcaa

SEQ ID NO: 834882 - DNA, 15 bp, Homo sapiens
attcaatgtgtttca

SEQ ID NO: 834883 - DNA, 15 bp, Homo sapiens
aattcaatgtgtttc

SEQ ID NO: 834884 - DNA, 15 bp, Homo sapiens
taattcaatgtgttt

SEQ ID NO: 834885 - DNA, 15 bp, Homo sapiens
ataattcaatgtgtt

SEQ ID NO: 834886 - DNA, 15 bp, Homo sapiens
cataattcaatgtgt

SEQ ID NO: 834887 - DNA, 15 bp, Homo sapiens
acataattcaatgtg

SEQ ID NO: 834888 - DNA, 15 bp, Homo sapiens
gacataattcaatgt

SEQ ID NO: 834889 - DNA, 15 bp, Homo sapiens
ggacataattcaatg

SEQ ID NO: 834890 - DNA, 15 bp, Homo sapiens
gggacataattcaat

SEQ ID NO: 834891 - DNA, 15 bp, Homo sapiens
agggacataattcaa

SEQ ID NO: 834892 - DNA, 15 bp, Homo sapiens
aagggacataattca

SEQ ID NO: 834893 - DNA, 15 bp, Homo sapiens
taagggacataattc

SEQ ID NO: 834894 - DNA, 15 bp, Homo sapiens
ttaagggacataatt

SEQ ID NO: 834895 - DNA, 15 bp, Homo sapiens
tttaagggacataat

SEQ ID NO: 834896 - DNA, 15 bp, Homo sapiens
gtttaagggacataa

SEQ ID NO: 834897 - DNA, 15 bp, Homo sapiens
tgtttaagggacata

SEQ ID NO: 834898 - DNA, 15 bp, Homo sapiens
ttgtttaagggacat

SEQ ID NO: 834899 - DNA, 15 bp, Homo sapiens
cttgtttaagggaca

SEQ ID NO: 834900 - DNA, 15 bp, Homo sapiens
tcttgtttaagggac

SEQ ID NO: 834901 - DNA, 15 bp, Homo sapiens
ttcttgtttaaggga

SEQ ID NO: 834902 - DNA, 15 bp, Homo sapiens
attcttgtttaaggg

SEQ ID NO: 834903 - DNA, 15 bp, Homo sapiens
tattcttgtttaagg

SEQ ID NO: 834904 - DNA, 15 bp, Homo sapiens
ttattcttgtttaag

SEQ ID NO: 834905 - DNA, 15 bp, Homo sapiens
tttattcttgtttaa

SEQ ID NO: 834906 - DNA, 15 bp, Homo sapiens
gtttattcttgttta

SEQ ID NO: 834907 - DNA, 15 bp, Homo sapiens
tgtttattcttgttt

SEQ ID NO: 834908 - DNA, 15 bp, Homo sapiens
atgtttattcttgtt

SEQ ID NO: 834909 - DNA, 15 bp, Homo sapiens
gatgtttattcttgt

SEQ ID NO: 834910 - DNA, 15 bp, Homo sapiens
tgatgtttattcttg

SEQ ID NO: 834911 - DNA, 15 bp, Homo sapiens
gtgatgtttattctt

SEQ ID NO: 834912 - DNA, 15 bp, Homo sapiens
agtgatgtttattct

SEQ ID NO: 834913 - DNA, 15 bp, Homo sapiens
tagtgatgtttattc

SEQ ID NO: 834914 - DNA, 15 bp, Homo sapiens
ttagtgatgtttatt

SEQ ID NO: 834915 - DNA, 15 bp, Homo sapiens
tttagtgatgtttat

SEQ ID NO: 834916 - DNA, 15 bp, Homo sapiens
atttagtgatgttta

SEQ ID NO: 834917 - DNA, 15 bp, Homo sapiens
catttagtgatgttt

SEQ ID NO: 834918 - DNA, 15 bp, Homo sapiens
tcatttagtgatgtt

SEQ ID NO: 834919 - DNA, 15 bp, Homo sapiens
gtcatttagtgatgt

SEQ ID NO: 834920 - DNA, 15 bp, Homo sapiens
agtcatttagtgatg

SEQ ID NO: 834921 - DNA, 15 bp, Homo sapiens
cagtcatttagtgat

SEQ ID NO: 834922 - DNA, 15 bp, Homo sapiens
acagtcatttagtga

SEQ ID NO: 834923 - DNA, 15 bp, Homo sapiens
tacagtcatttagtg

SEQ ID NO: 834924 - DNA, 15 bp, Homo sapiens
gtacagtcatttagt

SEQ ID NO: 834925 - DNA, 15 bp, Homo sapiens
ggtacagtcatttag

SEQ ID NO: 834926 - DNA, 15 bp, Homo sapiens
aggtacagtcattta

SEQ ID NO: 834927 - DNA, 15 bp, Homo sapiens
aaggtacagtcattt

SEQ ID NO: 834928 - DNA, 15 bp, Homo sapiens
caaggtacagtcatt

SEQ ID NO: 834929 - DNA, 15 bp, Homo sapiens
tcaaggtacagtcat

SEQ ID NO: 834930 - DNA, 15 bp, Homo sapiens
ttcaaggtacagtca

SEQ ID NO: 834931 - DNA, 15 bp, Homo sapiens
gttcaaggtacagtc

SEQ ID NO: 834932 - DNA, 15 bp, Homo sapiens
agttcaaggtacagt

SEQ ID NO: 834933 - DNA, 15 bp, Homo sapiens
tagttcaaggtacag

SEQ ID NO: 834934 - DNA, 15 bp, Homo sapiens
gtagttcaaggtaca

SEQ ID NO: 834935 - DNA, 15 bp, Homo sapiens
ggtagttcaaggtac

SEQ ID NO: 834936 - DNA, 15 bp, Homo sapiens
aggtagttcaaggta

SEQ ID NO: 834937 - DNA, 15 bp, Homo sapiens
caggtagttcaaggt

SEQ ID NO: 834938 - DNA, 15 bp, Homo sapiens
acaggtagttcaagg

SEQ ID NO: 834939 - DNA, 15 bp, Homo sapiens
tacaggtagttcaag

SEQ ID NO: 834940 - DNA, 15 bp, Homo sapiens
ttacaggtagttcaa

SEQ ID NO: 834941 - DNA, 15 bp, Homo sapiens
attacaggtagttca

SEQ ID NO: 834942 - DNA, 15 bp, Homo sapiens
aattacaggtagttc

SEQ ID NO: 834943 - DNA, 15 bp, Homo sapiens
aaattacaggtagtt

SEQ ID NO: 834944 - DNA, 15 bp, Homo sapiens
aaaattacaggtagt

SEQ ID NO: 834945 - DNA, 15 bp, Homo sapiens
gaaaattacaggtag

SEQ ID NO: 834946 - DNA, 15 bp, Homo sapiens
agaaaattacaggta

SEQ ID NO: 834947 - DNA, 15 bp, Homo sapiens
gagaaaattacaggt

SEQ ID NO: 834948 - DNA, 15 bp, Homo sapiens
ggagaaaattacagg

SEQ ID NO: 834949 - DNA, 15 bp, Homo sapiens
aggagaaaattacag

SEQ ID NO: 834950 - DNA, 15 bp, Homo sapiens
caggagaaaattaca

SEQ ID NO: 834951 - DNA, 15 bp, Homo sapiens
tcaggagaaaattac

SEQ ID NO: 834952 - DNA, 15 bp, Homo sapiens
atcaggagaaaatta

SEQ ID NO: 834953 - DNA, 15 bp, Homo sapiens
tatcaggagaaaatt

SEQ ID NO: 834954 - DNA, 15 bp, Homo sapiens
ctatcaggagaaaat

SEQ ID NO: 834955 - DNA, 15 bp, Homo sapiens
cctatcaggagaaaa

SEQ ID NO: 834956 - DNA, 15 bp, Homo sapiens
acctatcaggagaaa

SEQ ID NO: 834957 - DNA, 15 bp, Homo sapiens
tacctatcaggagaa

SEQ ID NO: 834958 - DNA, 15 bp, Homo sapiens
ttacctatcaggaga

SEQ ID NO: 834959 - DNA, 15 bp, Homo sapiens
attacctatcaggag

SEQ ID NO: 834960 - DNA, 15 bp, Homo sapiens
aattacctatcagga

SEQ ID NO: 834961 - DNA, 15 bp, Homo sapiens
taattacctatcagg

SEQ ID NO: 834962 - DNA, 15 bp, Homo sapiens
ttaattacctatcag

SEQ ID NO: 834963 - DNA, 15 bp, Homo sapiens
cttaattacctatca

SEQ ID NO: 834964 - DNA, 15 bp, Homo sapiens
gcttaattacctatc

SEQ ID NO: 834965 - DNA, 15 bp, Homo sapiens
agcttaattacctat

SEQ ID NO: 834966 - DNA, 15 bp, Homo sapiens
aagcttaattaccta

SEQ ID NO: 834967 - DNA, 15 bp, Homo sapiens
gaagcttaattacct

SEQ ID NO: 834968 - DNA, 15 bp, Homo sapiens
tgaagcttaattacc

SEQ ID NO: 834969 - DNA, 15 bp, Homo sapiens
ttgaagcttaattac

SEQ ID NO: 834970 - DNA, 15 bp, Homo sapiens
tttgaagcttaatta

SEQ ID NO: 834971 - DNA, 15 bp, Homo sapiens
ctttgaagcttaatt

SEQ ID NO: 834972 - DNA, 15 bp, Homo sapiens
actttgaagcttaat

SEQ ID NO: 834973 - DNA, 15 bp, Homo sapiens
tactttgaagcttaa

SEQ ID NO: 834974 - DNA, 15 bp, Homo sapiens
gtactttgaagctta

SEQ ID NO: 834975 - DNA, 15 bp, Homo sapiens
agtactttgaagctt

SEQ ID NO: 834976 - DNA, 15 bp, Homo sapiens
cagtactttgaagct

SEQ ID NO: 834977 - DNA, 15 bp, Homo sapiens
tcagtactttgaagc

SEQ ID NO: 834978 - DNA, 15 bp, Homo sapiens
gtcagtactttgaag

SEQ ID NO: 834979 - DNA, 15 bp, Homo sapiens
tgtcagtactttgaa

SEQ ID NO: 834980 - DNA, 15 bp, Homo sapiens
gtgtcagtactttga

SEQ ID NO: 834981 - DNA, 15 bp, Homo sapiens
agtgtcagtactttg

SEQ ID NO: 834982 - DNA, 15 bp, Homo sapiens
aagtgtcagtacttt

SEQ ID NO: 834983 - DNA, 15 bp, Homo sapiens
taagtgtcagtactt

SEQ ID NO: 834984 - DNA, 15 bp, Homo sapiens
ataagtgtcagtact

SEQ ID NO: 834985 - DNA, 15 bp, Homo sapiens
aataagtgtcagtac

SEQ ID NO: 834986 - DNA, 15 bp, Homo sapiens
aaataagtgtcagta

SEQ ID NO: 834987 - DNA, 15 bp, Homo sapiens
taaataagtgtcagt

SEQ ID NO: 834988 - DNA, 15 bp, Homo sapiens
gtaaataagtgtcag

SEQ ID NO: 834989 - DNA, 15 bp, Homo sapiens
agtaaataagtgtca

SEQ ID NO: 834990 - DNA, 15 bp, Homo sapiens
cagtaaataagtgtc

SEQ ID NO: 834991 - DNA, 15 bp, Homo sapiens
acagtaaataagtgt

SEQ ID NO: 834992 - DNA, 15 bp, Homo sapiens
tacagtaaataagtg

SEQ ID NO: 834993 - DNA, 15 bp, Homo sapiens
ttacagtaaataagt

SEQ ID NO: 834994 - DNA, 15 bp, Homo sapiens
attacagtaaataag

SEQ ID NO: 834995 - DNA, 15 bp, Homo sapiens
tattacagtaaataa

SEQ ID NO: 834996 - DNA, 15 bp, Homo sapiens
atattacagtaaata

SEQ ID NO: 834997 - DNA, 15 bp, Homo sapiens
catattacagtaaat

SEQ ID NO: 834998 - DNA, 15 bp, Homo sapiens
tcatattacagtaaa

SEQ ID NO: 834999 - DNA, 15 bp, Homo sapiens
ttcatattacagtaa

SEQ ID NO: 835000 - DNA, 15 bp, Homo sapiens
cttcatattacagta

SEQ ID NO: 835001 - DNA, 15 bp, Homo sapiens
gcttcatattacagt

SEQ ID NO: 835002 - DNA, 15 bp, Homo sapiens
tgcttcatattacag

SEQ ID NO: 835003 - DNA, 15 bp, Homo sapiens
ttgcttcatattaca

SEQ ID NO: 835004 - DNA, 15 bp, Homo sapiens
attgcttcatattac

SEQ ID NO: 835005 - DNA, 15 bp, Homo sapiens
tattgcttcatatta

SEQ ID NO: 835006 - DNA, 15 bp, Homo sapiens
ttattgcttcatatt

SEQ ID NO: 835007 - DNA, 15 bp, Homo sapiens
gttattgcttcatat

SEQ ID NO: 835008 - DNA, 15 bp, Homo sapiens
agttattgcttcata

SEQ ID NO: 835009 - DNA, 15 bp, Homo sapiens
aagttattgcttcat

SEQ ID NO: 835010 - DNA, 15 bp, Homo sapiens
taagttattgcttca

SEQ ID NO: 835011 - DNA, 15 bp, Homo sapiens
ttaagttattgcttc

SEQ ID NO: 835012 - DNA, 15 bp, Homo sapiens
tttaagttattgctt

SEQ ID NO: 835013 - DNA, 15 bp, Homo sapiens
ttttaagttattgct

SEQ ID NO: 835014 - DNA, 15 bp, Homo sapiens
tttttaagttattgc

SEQ ID NO: 835015 - DNA, 15 bp, Homo sapiens
ttttttaagttattg

SEQ ID NO: 835016 - DNA, 15 bp, Homo sapiens
tttttttaagttatt

SEQ ID NO: 835017 - DNA, 15 bp, Homo sapiens
ttttttttaagttat

SEQ ID NO: 835018 - DNA, 15 bp, Homo sapiens
tttttttttaagtta

SEQ ID NO: 835019 - DNA, 15 bp, Homo sapiens
ttttttttttaagtt

SEQ ID NO: 835020 - DNA, 15 bp, Homo sapiens
tttttttttttaagt

SEQ ID NO: 835021 - DNA, 15 bp, Homo sapiens
ttttttttttttaag

SEQ ID NO: 835022 - DNA, 15 bp, Homo sapiens
tttttttttttttaa

SEQ ID NO: 835023 - DNA, 15 bp, Homo sapiens
agttttttttttttt

SEQ ID NO: 835024 - DNA, 15 bp, Homo sapiens
tagtttttttttttt

SEQ ID NO: 835025 - DNA, 15 bp, Homo sapiens
atagttttttttttt

SEQ ID NO: 835026 - DNA, 15 bp, Homo sapiens
aatagtttttttttt

SEQ ID NO: 835027 - DNA, 15 bp, Homo sapiens
caatagttttttttt

SEQ ID NO: 835028 - DNA, 15 bp, Homo sapiens
tcaatagtttttttt

SEQ ID NO: 835029 - DNA, 15 bp, Homo sapiens
ttcaatagttttttt

SEQ ID NO: 835030 - DNA, 15 bp, Homo sapiens
gttcaatagtttttt

SEQ ID NO: 835031 - DNA, 15 bp, Homo sapiens
ggttcaatagttttt

SEQ ID NO: 835032 - DNA, 15 bp, Homo sapiens
tggttcaatagtttt

SEQ ID NO: 835033 - DNA, 15 bp, Homo sapiens
ctggttcaatagttt

SEQ ID NO: 835034 - DNA, 15 bp, Homo sapiens
tctggttcaatagtt

SEQ ID NO: 835035 - DNA, 15 bp, Homo sapiens
ttctggttcaatagt

SEQ ID NO: 835036 - DNA, 15 bp, Homo sapiens
gttctggttcaatag

SEQ ID NO: 835037 - DNA, 15 bp, Homo sapiens
ggttctggttcaata

SEQ ID NO: 835038 - DNA, 15 bp, Homo sapiens
tggttctggttcaat

SEQ ID NO: 835039 - DNA, 15 bp, Homo sapiens
ttggttctggttcaa

SEQ ID NO: 835040 - DNA, 15 bp, Homo sapiens
tttggttctggttca

SEQ ID NO: 835041 - DNA, 15 bp, Homo sapiens
gtttggttctggttc

SEQ ID NO: 835042 - DNA, 15 bp, Homo sapiens
tgtttggttctggtt

SEQ ID NO: 835043 - DNA, 15 bp, Homo sapiens
ctgtttggttctggt

SEQ ID NO: 835044 - DNA, 15 bp, Homo sapiens
cctgtttggttctgg

SEQ ID NO: 835045 - DNA, 15 bp, Homo sapiens
tcctgtttggttctg

SEQ ID NO: 835046 - DNA, 15 bp, Homo sapiens
ttcctgtttggttct

SEQ ID NO: 835047 - DNA, 15 bp, Homo sapiens
attcctgtttggttc

SEQ ID NO: 835048 - DNA, 15 bp, Homo sapiens
cattcctgtttggtt

SEQ ID NO: 835049 - DNA, 15 bp, Homo sapiens
gcattcctgtttggt

SEQ ID NO: 835050 - DNA, 15 bp, Homo sapiens
ggcattcctgtttgg

SEQ ID NO: 835051 - DNA, 15 bp, Homo sapiens
tggcattcctgtttg

SEQ ID NO: 835052 - DNA, 15 bp, Homo sapiens
atggcattcctgttt

SEQ ID NO: 835053 - DNA, 15 bp, Homo sapiens
tatggcattcctgtt

SEQ ID NO: 835054 - DNA, 15 bp, Homo sapiens
ctatggcattcctgt

SEQ ID NO: 835055 - DNA, 15 bp, Homo sapiens
gctatggcattcctg

SEQ ID NO: 835056 - DNA, 15 bp, Homo sapiens
tgctatggcattcct

SEQ ID NO: 835057 - DNA, 15 bp, Homo sapiens
atgctatggcattcc

SEQ ID NO: 835058 - DNA, 15 bp, Homo sapiens
aatgctatggcattc

SEQ ID NO: 835059 - DNA, 15 bp, Homo sapiens
aaatgctatggcatt

SEQ ID NO: 835060 - DNA, 15 bp, Homo sapiens
aaaatgctatggcat

SEQ ID NO: 835061 - DNA, 15 bp, Homo sapiens
caaaatgctatggca

SEQ ID NO: 835062 - DNA, 15 bp, Homo sapiens
acaaaatgctatggc

SEQ ID NO: 835063 - DNA, 15 bp, Homo sapiens
tacaaaatgctatgg

SEQ ID NO: 835064 - DNA, 15 bp, Homo sapiens
ttacaaaatgctatg

SEQ ID NO: 835065 - DNA, 15 bp, Homo sapiens
tttacaaaatgctat

SEQ ID NO: 835066 - DNA, 15 bp, Homo sapiens
gtttacaaaatgcta

SEQ ID NO: 835067 - DNA, 15 bp, Homo sapiens
agtttacaaaatgct

SEQ ID NO: 835068 - DNA, 15 bp, Homo sapiens
tagtttacaaaatgc

SEQ ID NO: 835069 - DNA, 15 bp, Homo sapiens
ttagtttacaaaatg

SEQ ID NO: 835070 - DNA, 15 bp, Homo sapiens
tttagtttacaaaat

SEQ ID NO: 835071 - DNA, 15 bp, Homo sapiens
gtttagtttacaaaa

SEQ ID NO: 835072 - DNA, 15 bp, Homo sapiens
agtttagtttacaaa

SEQ ID NO: 835073 - DNA, 15 bp, Homo sapiens
cagtttagtttacaa

SEQ ID NO: 835074 - DNA, 15 bp, Homo sapiens
gcagtttagtttaca

SEQ ID NO: 835075 - DNA, 15 bp, Homo sapiens
agcagtttagtttac

SEQ ID NO: 835076 - DNA, 15 bp, Homo sapiens
tagcagtttagttta

SEQ ID NO: 835077 - DNA, 15 bp, Homo sapiens
atagcagtttagttt

SEQ ID NO: 835078 - DNA, 15 bp, Homo sapiens
aatagcagtttagtt

SEQ ID NO: 835079 - DNA, 15 bp, Homo sapiens
aaatagcagtttagt

SEQ ID NO: 835080 - DNA, 15 bp, Homo sapiens
gaaatagcagtttag

SEQ ID NO: 835081 - DNA, 15 bp, Homo sapiens
tgaaatagcagttta

SEQ ID NO: 835082 - DNA, 15 bp, Homo sapiens
atgaaatagcagttt

SEQ ID NO: 835083 - DNA, 15 bp, Homo sapiens
aatgaaatagcagtt

SEQ ID NO: 835084 - DNA, 15 bp, Homo sapiens
aaatgaaatagcagt

SEQ ID NO: 835085 - DNA, 15 bp, Homo sapiens
gaaatgaaatagcag

SEQ ID NO: 835086 - DNA, 15 bp, Homo sapiens
tgaaatgaaatagca

SEQ ID NO: 835087 - DNA, 15 bp, Homo sapiens
atgaaatgaaatagc

SEQ ID NO: 835088 - DNA, 15 bp, Homo sapiens
aatgaaatgaaatag

SEQ ID NO: 835089 - DNA, 15 bp, Homo sapiens
aaatgaaatgaaata

SEQ ID NO: 835090 - DNA, 15 bp, Homo sapiens
caaatgaaatgaaat

SEQ ID NO: 835091 - DNA, 15 bp, Homo sapiens
tcaaatgaaatgaaa

SEQ ID NO: 835092 - DNA, 15 bp, Homo sapiens
ctcaaatgaaatgaa

SEQ ID NO: 835093 - DNA, 15 bp, Homo sapiens
gctcaaatgaaatga

SEQ ID NO: 835094 - DNA, 15 bp, Homo sapiens
ggctcaaatgaaatg

SEQ ID NO: 835095 - DNA, 15 bp, Homo sapiens
gggctcaaatgaaat

SEQ ID NO: 835096 - DNA, 15 bp, Homo sapiens
agggctcaaatgaaa

SEQ ID NO: 835097 - DNA, 15 bp, Homo sapiens
cagggctcaaatgaa

SEQ ID NO: 835098 - DNA, 15 bp, Homo sapiens
ccagggctcaaatga

SEQ ID NO: 835099 - DNA, 15 bp, Homo sapiens
tccagggctcaaatg

SEQ ID NO: 835100 - DNA, 15 bp, Homo sapiens
ttccagggctcaaat

SEQ ID NO: 835101 - DNA, 15 bp, Homo sapiens
gttccagggctcaaa

SEQ ID NO: 835102 - DNA, 15 bp, Homo sapiens
agttccagggctcaa

SEQ ID NO: 835103 - DNA, 15 bp, Homo sapiens
aagttccagggctca

SEQ ID NO: 835104 - DNA, 15 bp, Homo sapiens
caagttccagggctc

SEQ ID NO: 835105 - DNA, 15 bp, Homo sapiens
tcaagttccagggct

SEQ ID NO: 835106 - DNA, 15 bp, Homo sapiens
ttcaagttccagggc

SEQ ID NO: 835107 - DNA, 15 bp, Homo sapiens
tttcaagttccaggg

SEQ ID NO: 835108 - DNA, 15 bp, Homo sapiens
ttttcaagttccagg

SEQ ID NO: 835109 - DNA, 15 bp, Homo sapiens
attttcaagttccag

SEQ ID NO: 835110 - DNA, 15 bp, Homo sapiens
tattttcaagttcca

SEQ ID NO: 835111 - DNA, 15 bp, Homo sapiens
ttattttcaagttcc

SEQ ID NO: 835112 - DNA, 15 bp, Homo sapiens
tttattttcaagttc

SEQ ID NO: 835113 - DNA, 15 bp, Homo sapiens
atttattttcaagtt

SEQ ID NO: 835114 - DNA, 15 bp, Homo sapiens
catttattttcaagt

SEQ ID NO: 835115 - DNA, 15 bp, Homo sapiens
gcatttattttcaag

SEQ ID NO: 835116 - DNA, 15 bp, Homo sapiens
agcatttattttcaa

SEQ ID NO: 835117 - DNA, 15 bp, Homo sapiens
tagcatttattttca

SEQ ID NO: 835118 - DNA, 15 bp, Homo sapiens
ctagcatttattttc

SEQ ID NO: 835119 - DNA, 15 bp, Homo sapiens
gctagcatttatttt

SEQ ID NO: 835120 - DNA, 15 bp, Homo sapiens
agctagcatttattt

SEQ ID NO: 835121 - DNA, 15 bp, Homo sapiens
tagctagcatttatt

SEQ ID NO: 835122 - DNA, 15 bp, Homo sapiens
ttagctagcatttat

SEQ ID NO: 835123 - DNA, 15 bp, Homo sapiens
gttagctagcattta

SEQ ID NO: 835124 - DNA, 15 bp, Homo sapiens
tgttagctagcattt

SEQ ID NO: 835125 - DNA, 15 bp, Homo sapiens
atgttagctagcatt

SEQ ID NO: 835126 - DNA, 15 bp, Homo sapiens
gatgttagctagcat

SEQ ID NO: 835127 - DNA, 15 bp, Homo sapiens
agatgttagctagca

SEQ ID NO: 835128 - DNA, 15 bp, Homo sapiens
cagatgttagctagc

SEQ ID NO: 835129 - DNA, 15 bp, Homo sapiens
acagatgttagctag

SEQ ID NO: 835130 - DNA, 15 bp, Homo sapiens
cacagatgttagcta

SEQ ID NO: 835131 - DNA, 15 bp, Homo sapiens
tcacagatgttagct

SEQ ID NO: 835132 - DNA, 15 bp, Homo sapiens
ttcacagatgttagc

SEQ ID NO: 835133 - DNA, 15 bp, Homo sapiens
gttcacagatgttag

SEQ ID NO: 835134 - DNA, 15 bp, Homo sapiens
tgttcacagatgtta

SEQ ID NO: 835135 - DNA, 15 bp, Homo sapiens
ctgttcacagatgtt

SEQ ID NO: 835136 - DNA, 15 bp, Homo sapiens
tctgttcacagatgt

SEQ ID NO: 835137 - DNA, 15 bp, Homo sapiens
ttctgttcacagatg

SEQ ID NO: 835138 - DNA, 15 bp, Homo sapiens
gttctgttcacagat

SEQ ID NO: 835139 - DNA, 15 bp, Homo sapiens
tgttctgttcacaga

SEQ ID NO: 835140 - DNA, 15 bp, Homo sapiens
atgttctgttcacag

SEQ ID NO: 835141 - DNA, 15 bp, Homo sapiens
tatgttctgttcaca

SEQ ID NO: 835142 - DNA, 15 bp, Homo sapiens
gtatgttctgttcac

SEQ ID NO: 835143 - DNA, 15 bp, Homo sapiens
ggtatgttctgttca

SEQ ID NO: 835144 - DNA, 15 bp, Homo sapiens
gggtatgttctgttc

SEQ ID NO: 835145 - DNA, 15 bp, Homo sapiens
tgggtatgttctgtt

SEQ ID NO: 835146 - DNA, 15 bp, Homo sapiens
atgggtatgttctgt

SEQ ID NO: 835147 - DNA, 15 bp, Homo sapiens
gatgggtatgttctg

SEQ ID NO: 835148 - DNA, 15 bp, Homo sapiens
tgatgggtatgttct

SEQ ID NO: 835149 - DNA, 15 bp, Homo sapiens
ctgatgggtatgttc

SEQ ID NO: 835150 - DNA, 15 bp, Homo sapiens
actgatgggtatgtt

SEQ ID NO: 835151 - DNA, 15 bp, Homo sapiens
tactgatgggtatgt

SEQ ID NO: 835152 - DNA, 15 bp, Homo sapiens
gtactgatgggtatg

SEQ ID NO: 835153 - DNA, 15 bp, Homo sapiens
agtactgatgggtat

SEQ ID NO: 835154 - DNA, 15 bp, Homo sapiens
cagtactgatgggta

SEQ ID NO: 835155 - DNA, 15 bp, Homo sapiens
acagtactgatgggt

SEQ ID NO: 835156 - DNA, 15 bp, Homo sapiens
cacagtactgatggg

SEQ ID NO: 835157 - DNA, 15 bp, Homo sapiens
gcacagtactgatgg

SEQ ID NO: 835158 - DNA, 15 bp, Homo sapiens
agcacagtactgatg

SEQ ID NO: 835159 - DNA, 15 bp, Homo sapiens
tagcacagtactgat

SEQ ID NO: 835160 - DNA, 15 bp, Homo sapiens
ttagcacagtactga

SEQ ID NO: 835161 - DNA, 15 bp, Homo sapiens
cttagcacagtactg

SEQ ID NO: 835162 - DNA, 15 bp, Homo sapiens
gcttagcacagtact

SEQ ID NO: 835163 - DNA, 15 bp, Homo sapiens
tgcttagcacagtac

SEQ ID NO: 835164 - DNA, 15 bp, Homo sapiens
gtgcttagcacagta

SEQ ID NO: 835165 - DNA, 15 bp, Homo sapiens
ggtgcttagcacagt

SEQ ID NO: 835166 - DNA, 15 bp, Homo sapiens
aggtgcttagcacag

SEQ ID NO: 835167 - DNA, 15 bp, Homo sapiens
aaggtgcttagcaca

SEQ ID NO: 835168 - DNA, 15 bp, Homo sapiens
aaaggtgcttagcac

SEQ ID NO: 835169 - DNA, 15 bp, Homo sapiens
gaaaggtgcttagca

SEQ ID NO: 835170 - DNA, 15 bp, Homo sapiens
tgaaaggtgcttagc

SEQ ID NO: 835171 - DNA, 15 bp, Homo sapiens
atgaaaggtgcttag

SEQ ID NO: 835172 - DNA, 15 bp, Homo sapiens
catgaaaggtgctta

SEQ ID NO: 835173 - DNA, 15 bp, Homo sapiens
tcatgaaaggtgctt

SEQ ID NO: 835174 - DNA, 15 bp, Homo sapiens
ttcatgaaaggtgct

SEQ ID NO: 835175 - DNA, 15 bp, Homo sapiens
gttcatgaaaggtgc

SEQ ID NO: 835176 - DNA, 15 bp, Homo sapiens
agttcatgaaaggtg

SEQ ID NO: 835177 - DNA, 15 bp, Homo sapiens
cagttcatgaaaggt

SEQ ID NO: 835178 - DNA, 15 bp, Homo sapiens
ccagttcatgaaagg

SEQ ID NO: 835179 - DNA, 15 bp, Homo sapiens
accagttcatgaaag

SEQ ID NO: 835180 - DNA, 15 bp, Homo sapiens
gaccagttcatgaaa

SEQ ID NO: 835181 - DNA, 15 bp, Homo sapiens
tgaccagttcatgaa

SEQ ID NO: 835182 - DNA, 15 bp, Homo sapiens
atgaccagttcatga

SEQ ID NO: 835183 - DNA, 15 bp, Homo sapiens
aatgaccagttcatg

SEQ ID NO: 835184 - DNA, 15 bp, Homo sapiens
taatgaccagttcat

SEQ ID NO: 835185 - DNA, 15 bp, Homo sapiens
ttaatgaccagttca

SEQ ID NO: 835186 - DNA, 15 bp, Homo sapiens
tttaatgaccagttc

SEQ ID NO: 835187 - DNA, 15 bp, Homo sapiens
atttaatgaccagtt

SEQ ID NO: 835188 - DNA, 15 bp, Homo sapiens
gatttaatgaccagt

SEQ ID NO: 835189 - DNA, 15 bp, Homo sapiens
ggatttaatgaccag

SEQ ID NO: 835190 - DNA, 15 bp, Homo sapiens
aggatttaatgacca

SEQ ID NO: 835191 - DNA, 15 bp, Homo sapiens
gaggatttaatgacc

SEQ ID NO: 835192 - DNA, 15 bp, Homo sapiens
tgaggatttaatgac

SEQ ID NO: 835193 - DNA, 15 bp, Homo sapiens
gtgaggatttaatga

SEQ ID NO: 835194 - DNA, 15 bp, Homo sapiens
agtgaggatttaatg

SEQ ID NO: 835195 - DNA, 15 bp, Homo sapiens
aagtgaggatttaat

SEQ ID NO: 835196 - DNA, 15 bp, Homo sapiens
aaagtgaggatttaa

SEQ ID NO: 835197 - DNA, 15 bp, Homo sapiens
gaaagtgaggattta

SEQ ID NO: 835198 - DNA, 15 bp, Homo sapiens
ggaaagtgaggattt

SEQ ID NO: 835199 - DNA, 15 bp, Homo sapiens
tggaaagtgaggatt

SEQ ID NO: 835200 - DNA, 15 bp, Homo sapiens
atggaaagtgaggat

SEQ ID NO: 835201 - DNA, 15 bp, Homo sapiens
aatggaaagtgagga

SEQ ID NO: 835202 - DNA, 15 bp, Homo sapiens
aaatggaaagtgagg

SEQ ID NO: 835203 - DNA, 15 bp, Homo sapiens
taaatggaaagtgag

SEQ ID NO: 835204 - DNA, 15 bp, Homo sapiens
ataaatggaaagtga

SEQ ID NO: 835205 - DNA, 15 bp, Homo sapiens
aataaatggaaagtg

SEQ ID NO: 835206 - DNA, 15 bp, Homo sapiens
aaataaatggaaagt

SEQ ID NO: 835207 - DNA, 15 bp, Homo sapiens
taaataaatggaaag

SEQ ID NO: 835208 - DNA, 15 bp, Homo sapiens
ctaaataaatggaaa

SEQ ID NO: 835209 - DNA, 15 bp, Homo sapiens
actaaataaatggaa

SEQ ID NO: 835210 - DNA, 15 bp, Homo sapiens
cactaaataaatgga

SEQ ID NO: 835211 - DNA, 15 bp, Homo sapiens
tcactaaataaatgg

SEQ ID NO: 835212 - DNA, 15 bp, Homo sapiens
gtcactaaataaatg

SEQ ID NO: 835213 - DNA, 15 bp, Homo sapiens
tgtcactaaataaat

SEQ ID NO: 835214 - DNA, 15 bp, Homo sapiens
ttgtcactaaataaa

SEQ ID NO: 835215 - DNA, 15 bp, Homo sapiens
gttgtcactaaataa

SEQ ID NO: 835216 - DNA, 15 bp, Homo sapiens
agttgtcactaaata

SEQ ID NO: 835217 - DNA, 15 bp, Homo sapiens
aagttgtcactaaat

SEQ ID NO: 835218 - DNA, 15 bp, Homo sapiens
gaagttgtcactaaa

SEQ ID NO: 835219 - DNA, 15 bp, Homo sapiens
tgaagttgtcactaa

SEQ ID NO: 835220 - DNA, 15 bp, Homo sapiens
gtgaagttgtcacta

SEQ ID NO: 835221 - DNA, 15 bp, Homo sapiens
ggtgaagttgtcact

SEQ ID NO: 835222 - DNA, 15 bp, Homo sapiens
gggtgaagttgtcac

SEQ ID NO: 835223 - DNA, 15 bp, Homo sapiens
tgggtgaagttgtca

SEQ ID NO: 835224 - DNA, 15 bp, Homo sapiens
ctgggtgaagttgtc

SEQ ID NO: 835225 - DNA, 15 bp, Homo sapiens
tctgggtgaagttgt

SEQ ID NO: 835226 - DNA, 15 bp, Homo sapiens
ctctgggtgaagttg

SEQ ID NO: 835227 - DNA, 15 bp, Homo sapiens
actctgggtgaagtt

SEQ ID NO: 835228 - DNA, 15 bp, Homo sapiens
aactctgggtgaagt

SEQ ID NO: 835229 - DNA, 15 bp, Homo sapiens
aaactctgggtgaag

SEQ ID NO: 835230 - DNA, 15 bp, Homo sapiens
caaactctgggtgaa

SEQ ID NO: 835231 - DNA, 15 bp, Homo sapiens
gcaaactctgggtga

SEQ ID NO: 835232 - DNA, 15 bp, Homo sapiens
tgcaaactctgggtg

SEQ ID NO: 835233 - DNA, 15 bp, Homo sapiens
ctgcaaactctgggt

SEQ ID NO: 835234 - DNA, 15 bp, Homo sapiens
actgcaaactctggg

SEQ ID NO: 835235 - DNA, 15 bp, Homo sapiens
gactgcaaactctgg

SEQ ID NO: 835236 - DNA, 15 bp, Homo sapiens
tgactgcaaactctg

SEQ ID NO: 835237 - DNA, 15 bp, Homo sapiens
ttgactgcaaactct

SEQ ID NO: 835238 - DNA, 15 bp, Homo sapiens
tttgactgcaaactc

SEQ ID NO: 835239 - DNA, 15 bp, Homo sapiens
ctttgactgcaaact

SEQ ID NO: 835240 - DNA, 15 bp, Homo sapiens
actttgactgcaaac

SEQ ID NO: 835241 - DNA, 15 bp, Homo sapiens
cactttgactgcaaa

SEQ ID NO: 835242 - DNA, 15 bp, Homo sapiens
tcactttgactgcaa

SEQ ID NO: 835243 - DNA, 15 bp, Homo sapiens
ttcactttgactgca

SEQ ID NO: 835244 - DNA, 15 bp, Homo sapiens
tttcactttgactgc

SEQ ID NO: 835245 - DNA, 15 bp, Homo sapiens
ttttcactttgactg

SEQ ID NO: 835246 - DNA, 15 bp, Homo sapiens
attttcactttgact

SEQ ID NO: 835247 - DNA, 15 bp, Homo sapiens
cattttcactttgac

SEQ ID NO: 835248 - DNA, 15 bp, Homo sapiens
acattttcactttga

SEQ ID NO: 835249 - DNA, 15 bp, Homo sapiens
cacattttcactttg

SEQ ID NO: 835250 - DNA, 15 bp, Homo sapiens
gcacattttcacttt

SEQ ID NO: 835251 - DNA, 15 bp, Homo sapiens
agcacattttcactt

SEQ ID NO: 835252 - DNA, 15 bp, Homo sapiens
cagcacattttcact

SEQ ID NO: 835253 - DNA, 15 bp, Homo sapiens
tcagcacattttcac

SEQ ID NO: 835254 - DNA, 15 bp, Homo sapiens
ttcagcacattttca

SEQ ID NO: 835255 - DNA, 15 bp, Homo sapiens
attcagcacattttc

SEQ ID NO: 835256 - DNA, 15 bp, Homo sapiens
aattcagcacatttt

SEQ ID NO: 835257 - DNA, 15 bp, Homo sapiens
gaattcagcacattt

SEQ ID NO: 835258 - DNA, 15 bp, Homo sapiens
ggaattcagcacatt

SEQ ID NO: 835259 - DNA, 15 bp, Homo sapiens
tggaattcagcacat

SEQ ID NO: 835260 - DNA, 15 bp, Homo sapiens
ttggaattcagcaca

SEQ ID NO: 835261 - DNA, 15 bp, Homo sapiens
tttggaattcagcac

SEQ ID NO: 835262 - DNA, 15 bp, Homo sapiens
ttttggaattcagca

SEQ ID NO: 835263 - DNA, 15 bp, Homo sapiens
cttttggaattcagc

SEQ ID NO: 835264 - DNA, 15 bp, Homo sapiens
acttttggaattcag

SEQ ID NO: 835265 - DNA, 15 bp, Homo sapiens
cacttttggaattca

SEQ ID NO: 835266 - DNA, 15 bp, Homo sapiens
acacttttggaattc

SEQ ID NO: 835267 - DNA, 15 bp, Homo sapiens
cacacttttggaatt

SEQ ID NO: 835268 - DNA, 15 bp, Homo sapiens
tcacacttttggaat

SEQ ID NO: 835269 - DNA, 15 bp, Homo sapiens
ctcacacttttggaa

SEQ ID NO: 835270 - DNA, 15 bp, Homo sapiens
gctcacacttttgga

SEQ ID NO: 835271 - DNA, 15 bp, Homo sapiens
agctcacacttttgg

SEQ ID NO: 835272 - DNA, 15 bp, Homo sapiens
tagctcacacttttg

SEQ ID NO: 835273 - DNA, 15 bp, Homo sapiens
ctagctcacactttt

SEQ ID NO: 835274 - DNA, 15 bp, Homo sapiens
cctagctcacacttt

SEQ ID NO: 835275 - DNA, 15 bp, Homo sapiens
acctagctcacactt

SEQ ID NO: 835276 - DNA, 15 bp, Homo sapiens
aacctagctcacact

SEQ ID NO: 835277 - DNA, 15 bp, Homo sapiens
aaacctagctcacac

SEQ ID NO: 835278 - DNA, 15 bp, Homo sapiens
aaaacctagctcaca

SEQ ID NO: 835279 - DNA, 15 bp, Homo sapiens
taaaacctagctcac

SEQ ID NO: 835280 - DNA, 15 bp, Homo sapiens
ctaaaacctagctca

SEQ ID NO: 835281 - DNA, 15 bp, Homo sapiens
tctaaaacctagctc

SEQ ID NO: 835282 - DNA, 15 bp, Homo sapiens
ttctaaaacctagct

SEQ ID NO: 835283 - DNA, 15 bp, Homo sapiens
cttctaaaacctagc

SEQ ID NO: 835284 - DNA, 15 bp, Homo sapiens
ttaggacaggataaa

SEQ ID NO: 835285 - DNA, 15 bp, Homo sapiens
tttaggacaggataa

SEQ ID NO: 835286 - DNA, 15 bp, Homo sapiens
ctttaggacaggata

SEQ ID NO: 835287 - DNA, 15 bp, Homo sapiens
actttaggacaggat

SEQ ID NO: 835288 - DNA, 15 bp, Homo sapiens
aactttaggacagga

SEQ ID NO: 835289 - DNA, 15 bp, Homo sapiens
aaactttaggacagg

SEQ ID NO: 835290 - DNA, 15 bp, Homo sapiens
taaactttaggacag

SEQ ID NO: 835291 - DNA, 15 bp, Homo sapiens
ttaaactttaggaca

SEQ ID NO: 835292 - DNA, 15 bp, Homo sapiens
tttaaactttaggac

SEQ ID NO: 835293 - DNA, 15 bp, Homo sapiens
ttttaaactttagga

SEQ ID NO: 835294 - DNA, 15 bp, Homo sapiens
tttttaaactttagg

SEQ ID NO: 835295 - DNA, 15 bp, Homo sapiens
ctttttaaactttag

SEQ ID NO: 835296 - DNA, 15 bp, Homo sapiens
tctttttaaacttta

SEQ ID NO: 835297 - DNA, 15 bp, Homo sapiens
ttctttttaaacttt

SEQ ID NO: 835298 - DNA, 15 bp, Homo sapiens
tttctttttaaactt

SEQ ID NO: 835299 - DNA, 15 bp, Homo sapiens
ttttctttttaaact

SEQ ID NO: 835300 - DNA, 15 bp, Homo sapiens
tttttctttttaaac

SEQ ID NO: 835301 - DNA, 15 bp, Homo sapiens
ttttttctttttaaa

SEQ ID NO: 835302 - DNA, 15 bp, Homo sapiens
tttttttctttttaa

SEQ ID NO: 835303 - DNA, 15 bp, Homo sapiens
ttttttttcttttta

SEQ ID NO: 835304 - DNA, 15 bp, Homo sapiens
ttttttttttctttt

SEQ ID NO: 835305 - DNA, 15 bp, Homo sapiens
cttttttttttcttt

SEQ ID NO: 835306 - DNA, 15 bp, Homo sapiens
ccttttttttttctt

SEQ ID NO: 835307 - DNA, 15 bp, Homo sapiens
tccttttttttttct

SEQ ID NO: 835308 - DNA, 15 bp, Homo sapiens
ttccttttttttttc

SEQ ID NO: 835309 - DNA, 15 bp, Homo sapiens
cttcctttttttttt

SEQ ID NO: 835310 - DNA, 15 bp, Homo sapiens
tcttccttttttttt

SEQ ID NO: 835311 - DNA, 15 bp, Homo sapiens
ttcttcctttttttt

SEQ ID NO: 835312 - DNA, 15 bp, Homo sapiens
cttcttccttttttt

SEQ ID NO: 835313 - DNA, 15 bp, Homo sapiens
ccttcttcctttttt

SEQ ID NO: 835314 - DNA, 15 bp, Homo sapiens
tccttcttccttttt

SEQ ID NO: 835315 - DNA, 15 bp, Homo sapiens
ttccttcttcctttt

SEQ ID NO: 835316 - DNA, 15 bp, Homo sapiens
attccttcttccttt

SEQ ID NO: 835317 - DNA, 15 bp, Homo sapiens
aattccttcttcctt

SEQ ID NO: 835318 - DNA, 15 bp, Homo sapiens
taattccttcttcct

SEQ ID NO: 835319 - DNA, 15 bp, Homo sapiens
ttaattccttcttcc

SEQ ID NO: 835320 - DNA, 15 bp, Homo sapiens
tttaattccttcttc

SEQ ID NO: 835321 - DNA, 15 bp, Homo sapiens
ttttaattccttctt

SEQ ID NO: 835322 - DNA, 15 bp, Homo sapiens
tttttaattccttct

SEQ ID NO: 835323 - DNA, 15 bp, Homo sapiens
atttttaattccttc

SEQ ID NO: 835324 - DNA, 15 bp, Homo sapiens
gatttttaattcctt

SEQ ID NO: 835325 - DNA, 15 bp, Homo sapiens
ggatttttaattcct

SEQ ID NO: 835326 - DNA, 15 bp, Homo sapiens
tggatttttaattcc

SEQ ID NO: 835327 - DNA, 15 bp, Homo sapiens
ttggatttttaattc

SEQ ID NO: 835328 - DNA, 15 bp, Homo sapiens
tttggatttttaatt

SEQ ID NO: 835329 - DNA, 15 bp, Homo sapiens
ctttggatttttaat

SEQ ID NO: 835330 - DNA, 15 bp, Homo sapiens
tctttggatttttaa

SEQ ID NO: 835331 - DNA, 15 bp, Homo sapiens
ttctttggattttta

SEQ ID NO: 835332 - DNA, 15 bp, Homo sapiens
tttctttggattttt

SEQ ID NO: 835333 - DNA, 15 bp, Homo sapiens
ttttctttggatttt

SEQ ID NO: 835334 - DNA, 15 bp, Homo sapiens
attttctttggattt

SEQ ID NO: 835335 - DNA, 15 bp, Homo sapiens
aattttctttggatt

SEQ ID NO: 835336 - DNA, 15 bp, Homo sapiens
taattttctttggat

SEQ ID NO: 835337 - DNA, 15 bp, Homo sapiens
ataattttctttgga

SEQ ID NO: 835338 - DNA, 15 bp, Homo sapiens
cataattttctttgg

SEQ ID NO: 835339 - DNA, 15 bp, Homo sapiens
acataattttctttg

SEQ ID NO: 835340 - DNA, 15 bp, Homo sapiens
aacataattttcttt

SEQ ID NO: 835341 - DNA, 15 bp, Homo sapiens
aaacataattttctt

SEQ ID NO: 835342 - DNA, 15 bp, Homo sapiens
caaacataattttct

SEQ ID NO: 835343 - DNA, 15 bp, Homo sapiens
acaaacataattttc

SEQ ID NO: 835344 - DNA, 15 bp, Homo sapiens
aacaaacataatttt

SEQ ID NO: 835345 - DNA, 15 bp, Homo sapiens
aaacaaacataattt

SEQ ID NO: 835346 - DNA, 15 bp, Homo sapiens
caaacaaacataatt

SEQ ID NO: 835347 - DNA, 15 bp, Homo sapiens
gcaaacaaacataat

SEQ ID NO: 835348 - DNA, 15 bp, Homo sapiens
agcaaacaaacataa

SEQ ID NO: 835349 - DNA, 15 bp, Homo sapiens
aagcaaacaaacata

SEQ ID NO: 835350 - DNA, 15 bp, Homo sapiens
aaagcaaacaaacat

SEQ ID NO: 835351 - DNA, 15 bp, Homo sapiens
aaaagcaaacaaaca

SEQ ID NO: 835352 - DNA, 15 bp, Homo sapiens
gaaaagcaaacaaac

SEQ ID NO: 835353 - DNA, 15 bp, Homo sapiens
agaaaagcaaacaaa

SEQ ID NO: 835354 - DNA, 15 bp, Homo sapiens
cagaaaagcaaacaa

SEQ ID NO: 835355 - DNA, 15 bp, Homo sapiens
acagaaaagcaaaca

SEQ ID NO: 835356 - DNA, 15 bp, Homo sapiens
aacagaaaagcaaac

SEQ ID NO: 835357 - DNA, 15 bp, Homo sapiens
aaacagaaaagcaaa

SEQ ID NO: 835358 - DNA, 15 bp, Homo sapiens
aaaacagaaaagcaa

SEQ ID NO: 835359 - DNA, 15 bp, Homo sapiens
aaaaacagaaaagca

SEQ ID NO: 835360 - DNA, 15 bp, Homo sapiens
aaaaaacagaaaagc

SEQ ID NO: 835361 - DNA, 15 bp, Homo sapiens
aaaaaaacagaaaag

SEQ ID NO: 835362 - DNA, 15 bp, Homo sapiens
gaaaaaaacagaaaa

SEQ ID NO: 835363 - DNA, 15 bp, Homo sapiens
agaaaaaaacagaaa

SEQ ID NO: 835364 - DNA, 15 bp, Homo sapiens
aagaaaaaaacagaa

SEQ ID NO: 835365 - DNA, 15 bp, Homo sapiens
gaagaaaaaaacaga

SEQ ID NO: 835366 - DNA, 15 bp, Homo sapiens
ggaagaaaaaaacag

SEQ ID NO: 835367 - DNA, 15 bp, Homo sapiens
aggaagaaaaaaaca

SEQ ID NO: 835368 - DNA, 15 bp, Homo sapiens
aaggaagaaaaaaac

SEQ ID NO: 835369 - DNA, 15 bp, Homo sapiens
gaaggaagaaaaaaa

SEQ ID NO: 835370 - DNA, 15 bp, Homo sapiens
ggaaggaagaaaaaa

SEQ ID NO: 835371 - DNA, 15 bp, Homo sapiens
tggaaggaagaaaaa

SEQ ID NO: 835372 - DNA, 15 bp, Homo sapiens
ttggaaggaagaaaa

SEQ ID NO: 835373 - DNA, 15 bp, Homo sapiens
gttggaaggaagaaa

SEQ ID NO: 835374 - DNA, 15 bp, Homo sapiens
agttggaaggaagaa

SEQ ID NO: 835375 - DNA, 15 bp, Homo sapiens
gagttggaaggaaga

SEQ ID NO: 835376 - DNA, 15 bp, Homo sapiens
ggagttggaaggaag

SEQ ID NO: 835377 - DNA, 15 bp, Homo sapiens
cggagttggaaggaa

SEQ ID NO: 835378 - DNA, 15 bp, Homo sapiens
tcggagttggaagga

SEQ ID NO: 835379 - DNA, 15 bp, Homo sapiens
ctcggagttggaagg

SEQ ID NO: 835380 - DNA, 15 bp, Homo sapiens
tctcggagttggaag

SEQ ID NO: 835381 - DNA, 15 bp, Homo sapiens
gtctcggagttggaa

SEQ ID NO: 835382 - DNA, 15 bp, Homo sapiens
agtctcggagttgga

SEQ ID NO: 835383 - DNA, 15 bp, Homo sapiens
aagtctcggagttgg

SEQ ID NO: 835384 - DNA, 15 bp, Homo sapiens
aaagtctcggagttg

SEQ ID NO: 835385 - DNA, 15 bp, Homo sapiens
caaagtctcggagtt

SEQ ID NO: 835386 - DNA, 15 bp, Homo sapiens
gcaaagtctcggagt

SEQ ID NO: 835387 - DNA, 15 bp, Homo sapiens
tgcaaagtctcggag

SEQ ID NO: 835388 - DNA, 15 bp, Homo sapiens
ttgcaaagtctcgga

SEQ ID NO: 835389 - DNA, 15 bp, Homo sapiens
cttgcaaagtctcgg

SEQ ID NO: 835390 - DNA, 15 bp, Homo sapiens
ccttgcaaagtctcg

SEQ ID NO: 835391 - DNA, 15 bp, Homo sapiens
cccttgcaaagtctc

SEQ ID NO: 835392 - DNA, 15 bp, Homo sapiens
gcccttgcaaagtct

SEQ ID NO: 835393 - DNA, 15 bp, Homo sapiens
tgcccttgcaaagtc

SEQ ID NO: 835394 - DNA, 15 bp, Homo sapiens
atgcccttgcaaagt

SEQ ID NO: 835395 - DNA, 15 bp, Homo sapiens
tatgcccttgcaaag

SEQ ID NO: 835396 - DNA, 15 bp, Homo sapiens
ctatgcccttgcaaa

SEQ ID NO: 835397 - DNA, 15 bp, Homo sapiens
actatgcccttgcaa

SEQ ID NO: 835398 - DNA, 15 bp, Homo sapiens
aactatgcccttgca

SEQ ID NO: 835399 - DNA, 15 bp, Homo sapiens
gaactatgcccttgc

SEQ ID NO: 835400 - DNA, 15 bp, Homo sapiens
agaactatgcccttg

SEQ ID NO: 835401 - DNA, 15 bp, Homo sapiens
cagaactatgccctt

SEQ ID NO: 835402 - DNA, 15 bp, Homo sapiens
tcagaactatgccct

SEQ ID NO: 835403 - DNA, 15 bp, Homo sapiens
ttcagaactatgccc

SEQ ID NO: 835404 - DNA, 15 bp, Homo sapiens
cttcagaactatgcc

SEQ ID NO: 835405 - DNA, 15 bp, Homo sapiens
tcttcagaactatgc

SEQ ID NO: 835406 - DNA, 15 bp, Homo sapiens
atcttcagaactatg

SEQ ID NO: 835407 - DNA, 15 bp, Homo sapiens
gatcttcagaactat

SEQ ID NO: 835408 - DNA, 15 bp, Homo sapiens
agatcttcagaacta

SEQ ID NO: 835409 - DNA, 15 bp, Homo sapiens
gagatcttcagaact

SEQ ID NO: 835410 - DNA, 15 bp, Homo sapiens
agagatcttcagaac

SEQ ID NO: 835411 - DNA, 15 bp, Homo sapiens
cagagatcttcagaa

SEQ ID NO: 835412 - DNA, 15 bp, Homo sapiens
tcagagatcttcaga

SEQ ID NO: 835413 - DNA, 15 bp, Homo sapiens
gtcagagatcttcag

SEQ ID NO: 835414 - DNA, 15 bp, Homo sapiens
tgtcagagatcttca

SEQ ID NO: 835415 - DNA, 15 bp, Homo sapiens
gtgtcagagatcttc

SEQ ID NO: 835416 - DNA, 15 bp, Homo sapiens
agtgtcagagatctt

SEQ ID NO: 835417 - DNA, 15 bp, Homo sapiens
cagtgtcagagatct

SEQ ID NO: 835418 - DNA, 15 bp, Homo sapiens
tcagtgtcagagatc

SEQ ID NO: 835419 - DNA, 15 bp, Homo sapiens
ctcagtgtcagagat

SEQ ID NO: 835420 - DNA, 15 bp, Homo sapiens
tctcagtgtcagaga

SEQ ID NO: 835421 - DNA, 15 bp, Homo sapiens
gtctcagtgtcagag

SEQ ID NO: 835422 - DNA, 15 bp, Homo sapiens
tgtctcagtgtcaga

SEQ ID NO: 835423 - DNA, 15 bp, Homo sapiens
atgtctcagtgtcag

SEQ ID NO: 835424 - DNA, 15 bp, Homo sapiens
aatgtctcagtgtca

SEQ ID NO: 835425 - DNA, 15 bp, Homo sapiens
taatgtctcagtgtc

SEQ ID NO: 835426 - DNA, 15 bp, Homo sapiens
ctaatgtctcagtgt

SEQ ID NO: 835427 - DNA, 15 bp, Homo sapiens
tctaatgtctcagtg

SEQ ID NO: 835428 - DNA, 15 bp, Homo sapiens
ctctaatgtctcagt

SEQ ID NO: 835429 - DNA, 15 bp, Homo sapiens
tctctaatgtctcag

SEQ ID NO: 835430 - DNA, 15 bp, Homo sapiens
atctctaatgtctca

SEQ ID NO: 835431 - DNA, 15 bp, Homo sapiens
gatctctaatgtctc

SEQ ID NO: 835432 - DNA, 15 bp, Homo sapiens
agatctctaatgtct

SEQ ID NO: 835433 - DNA, 15 bp, Homo sapiens
gagatctctaatgtc

SEQ ID NO: 835434 - DNA, 15 bp, Homo sapiens
agagatctctaatgt

SEQ ID NO: 835435 - DNA, 15 bp, Homo sapiens
cagagatctctaatg

SEQ ID NO: 835436 - DNA, 15 bp, Homo sapiens
acagagatctctaat

SEQ ID NO: 835437 - DNA, 15 bp, Homo sapiens
tacagagatctctaa

SEQ ID NO: 835438 - DNA, 15 bp, Homo sapiens
atacagagatctcta

SEQ ID NO: 835439 - DNA, 15 bp, Homo sapiens
gatacagagatctct

SEQ ID NO: 835440 - DNA, 15 bp, Homo sapiens
tgatacagagatctc

SEQ ID NO: 835441 - DNA, 15 bp, Homo sapiens
ttgatacagagatct

SEQ ID NO: 835442 - DNA, 15 bp, Homo sapiens
attgatacagagatc

SEQ ID NO: 835443 - DNA, 15 bp, Homo sapiens
cattgatacagagat

SEQ ID NO: 835444 - DNA, 15 bp, Homo sapiens
ccattgatacagaga

SEQ ID NO: 835445 - DNA, 15 bp, Homo sapiens
tccattgatacagag

SEQ ID NO: 835446 - DNA, 15 bp, Homo sapiens
atccattgatacaga

SEQ ID NO: 835447 - DNA, 15 bp, Homo sapiens
gatccattgatacag

SEQ ID NO: 835448 - DNA, 15 bp, Homo sapiens
tgatccattgataca

SEQ ID NO: 835449 - DNA, 15 bp, Homo sapiens
atgatccattgatac

SEQ ID NO: 835450 - DNA, 15 bp, Homo sapiens
aatgatccattgata

SEQ ID NO: 835451 - DNA, 15 bp, Homo sapiens
aaatgatccattgat

SEQ ID NO: 835452 - DNA, 15 bp, Homo sapiens
caaatgatccattga

SEQ ID NO: 835453 - DNA, 15 bp, Homo sapiens
acaaatgatccattg

SEQ ID NO: 835454 - DNA, 15 bp, Homo sapiens
aacaaatgatccatt

SEQ ID NO: 835455 - DNA, 15 bp, Homo sapiens
aaacaaatgatccat

SEQ ID NO: 835456 - DNA, 15 bp, Homo sapiens
aaaacaaatgatcca

SEQ ID NO: 835457 - DNA, 15 bp, Homo sapiens
gaaaacaaatgatcc

SEQ ID NO: 835458 - DNA, 15 bp, Homo sapiens
tgaaaacaaatgatc

SEQ ID NO: 835459 - DNA, 15 bp, Homo sapiens
ctgaaaacaaatgat

SEQ ID NO: 835460 - DNA, 15 bp, Homo sapiens
tctgaaaacaaatga

SEQ ID NO: 835461 - DNA, 15 bp, Homo sapiens
gtctgaaaacaaatg

SEQ ID NO: 835462 - DNA, 15 bp, Homo sapiens
tgtctgaaaacaaat

SEQ ID NO: 835463 - DNA, 15 bp, Homo sapiens
atgtctgaaaacaaa

SEQ ID NO: 835464 - DNA, 15 bp, Homo sapiens
tatgtctgaaaacaa

SEQ ID NO: 835465 - DNA, 15 bp, Homo sapiens
atatgtctgaaaaca

SEQ ID NO: 835466 - DNA, 15 bp, Homo sapiens
catatgtctgaaaac

SEQ ID NO: 835467 - DNA, 15 bp, Homo sapiens
tcatatgtctgaaaa

SEQ ID NO: 835468 - DNA, 15 bp, Homo sapiens
ttcatatgtctgaaa

SEQ ID NO: 835469 - DNA, 15 bp, Homo sapiens
tttcatatgtctgaa

SEQ ID NO: 835470 - DNA, 15 bp, Homo sapiens
gtttcatatgtctga

SEQ ID NO: 835471 - DNA, 15 bp, Homo sapiens
tgtttcatatgtctg

SEQ ID NO: 835472 - DNA, 15 bp, Homo sapiens
ctgtttcatatgtct

SEQ ID NO: 835473 - DNA, 15 bp, Homo sapiens
cctgtttcatatgtc

SEQ ID NO: 835474 - DNA, 15 bp, Homo sapiens
tcctgtttcatatgt

SEQ ID NO: 835475 - DNA, 15 bp, Homo sapiens
ttcctgtttcatatg

SEQ ID NO: 835476 - DNA, 15 bp, Homo sapiens
gttcctgtttcatat

SEQ ID NO: 835477 - DNA, 15 bp, Homo sapiens
agttcctgtttcata

SEQ ID NO: 835478 - DNA, 15 bp, Homo sapiens
aagttcctgtttcat

SEQ ID NO: 835479 - DNA, 15 bp, Homo sapiens
aaagttcctgtttca

SEQ ID NO: 835480 - DNA, 15 bp, Homo sapiens
caaagttcctgtttc

SEQ ID NO: 835481 - DNA, 15 bp, Homo sapiens
tcaaagttcctgttt

SEQ ID NO: 835482 - DNA, 15 bp, Homo sapiens
ttcaaagttcctgtt

SEQ ID NO: 835483 - DNA, 15 bp, Homo sapiens
gttcaaagttcctgt

SEQ ID NO: 835484 - DNA, 15 bp, Homo sapiens
tgttcaaagttcctg

SEQ ID NO: 835485 - DNA, 15 bp, Homo sapiens
ttgttcaaagttcct

SEQ ID NO: 835486 - DNA, 15 bp, Homo sapiens
cttgttcaaagttcc

SEQ ID NO: 835487 - DNA, 15 bp, Homo sapiens
tcttgttcaaagttc

SEQ ID NO: 835488 - DNA, 15 bp, Homo sapiens
ttcttgttcaaagtt

SEQ ID NO: 835489 - DNA, 15 bp, Homo sapiens
tttcttgttcaaagt

SEQ ID NO: 835490 - DNA, 15 bp, Homo sapiens
atttcttgttcaaag

SEQ ID NO: 835491 - DNA, 15 bp, Homo sapiens
aatttcttgttcaaa

SEQ ID NO: 835492 - DNA, 15 bp, Homo sapiens
aaatttcttgttcaa

SEQ ID NO: 835493 - DNA, 15 bp, Homo sapiens
gaaatttcttgttca

SEQ ID NO: 835494 - DNA, 15 bp, Homo sapiens
ggaaatttcttgttc

SEQ ID NO: 835495 - DNA, 15 bp, Homo sapiens
gggaaatttcttgtt

SEQ ID NO: 835496 - DNA, 15 bp, Homo sapiens
ggggaaatttcttgt

SEQ ID NO: 835497 - DNA, 15 bp, Homo sapiens
aggggaaatttcttg

SEQ ID NO: 835498 - DNA, 15 bp, Homo sapiens
gaggggaaatttctt

SEQ ID NO: 835499 - DNA, 15 bp, Homo sapiens
agaggggaaatttct

SEQ ID NO: 835500 - DNA, 15 bp, Homo sapiens
aagaggggaaatttc

SEQ ID NO: 835501 - DNA, 15 bp, Homo sapiens
aaagaggggaaattt

SEQ ID NO: 835502 - DNA, 15 bp, Homo sapiens
aaaagaggggaaatt

SEQ ID NO: 835503 - DNA, 15 bp, Homo sapiens
aaaaagaggggaaat

SEQ ID NO: 835504 - DNA, 15 bp, Homo sapiens
gaaaaagaggggaaa

SEQ ID NO: 835505 - DNA, 15 bp, Homo sapiens
agaaaaagaggggaa

SEQ ID NO: 835506 - DNA, 15 bp, Homo sapiens
gagaaaaagagggga

SEQ ID NO: 835507 - DNA, 15 bp, Homo sapiens
tgagaaaaagagggg

SEQ ID NO: 835508 - DNA, 15 bp, Homo sapiens
atgagaaaaagaggg

SEQ ID NO: 835509 - DNA, 15 bp, Homo sapiens
tatgagaaaaagagg

SEQ ID NO: 835510 - DNA, 15 bp, Homo sapiens
ctatgagaaaaagag

SEQ ID NO: 835511 - DNA, 15 bp, Homo sapiens
actatgagaaaaaga

SEQ ID NO: 835512 - DNA, 15 bp, Homo sapiens
cactatgagaaaaag

SEQ ID NO: 835513 - DNA, 15 bp, Homo sapiens
tcactatgagaaaaa

SEQ ID NO: 835514 - DNA, 15 bp, Homo sapiens
atcactatgagaaaa

SEQ ID NO: 835515 - DNA, 15 bp, Homo sapiens
gatcactatgagaaa

SEQ ID NO: 835516 - DNA, 15 bp, Homo sapiens
ggatcactatgagaa

SEQ ID NO: 835517 - DNA, 15 bp, Homo sapiens
aggatcactatgaga

SEQ ID NO: 835518 - DNA, 15 bp, Homo sapiens
caggatcactatgag

SEQ ID NO: 835519 - DNA, 15 bp, Homo sapiens
tcaggatcactatga

SEQ ID NO: 835520 - DNA, 15 bp, Homo sapiens
ctcaggatcactatg

SEQ ID NO: 835521 - DNA, 15 bp, Homo sapiens
tctcaggatcactat

SEQ ID NO: 835522 - DNA, 15 bp, Homo sapiens
gtctcaggatcacta

SEQ ID NO: 835523 - DNA, 15 bp, Homo sapiens
tgtctcaggatcact

SEQ ID NO: 835524 - DNA, 15 bp, Homo sapiens
atgtctcaggatcac

SEQ ID NO: 835525 - DNA, 15 bp, Homo sapiens
gatgtctcaggatca

SEQ ID NO: 835526 - DNA, 15 bp, Homo sapiens
tgatgtctcaggatc

SEQ ID NO: 835527 - DNA, 15 bp, Homo sapiens
ctgatgtctcaggat

SEQ ID NO: 835528 - DNA, 15 bp, Homo sapiens
gctgatgtctcagga

SEQ ID NO: 835529 - DNA, 15 bp, Homo sapiens
agctgatgtctcagg

SEQ ID NO: 835530 - DNA, 15 bp, Homo sapiens
cagctgatgtctcag

SEQ ID NO: 835531 - DNA, 15 bp, Homo sapiens
acagctgatgtctca

SEQ ID NO: 835532 - DNA, 15 bp, Homo sapiens
cacagctgatgtctc

SEQ ID NO: 835533 - DNA, 15 bp, Homo sapiens
ccacagctgatgtct

SEQ ID NO: 835534 - DNA, 15 bp, Homo sapiens
tccacagctgatgtc

SEQ ID NO: 835535 - DNA, 15 bp, Homo sapiens
ttccacagctgatgt

SEQ ID NO: 835536 - DNA, 15 bp, Homo sapiens
attccacagctgatg

SEQ ID NO: 835537 - DNA, 15 bp, Homo sapiens
gattccacagctgat

SEQ ID NO: 835538 - DNA, 15 bp, Homo sapiens
tgattccacagctga

SEQ ID NO: 835539 - DNA, 15 bp, Homo sapiens
gtgattccacagctg

SEQ ID NO: 835540 - DNA, 15 bp, Homo sapiens
tgtgattccacagct

SEQ ID NO: 835541 - DNA, 15 bp, Homo sapiens
ttgtgattccacagc

SEQ ID NO: 835542 - DNA, 15 bp, Homo sapiens
gttgtgattccacag

SEQ ID NO: 835543 - DNA, 15 bp, Homo sapiens
tgttgtgattccaca

SEQ ID NO: 835544 - DNA, 15 bp, Homo sapiens
gtgttgtgattccac

SEQ ID NO: 835545 - DNA, 15 bp, Homo sapiens
cgtgttgtgattcca

SEQ ID NO: 835546 - DNA, 15 bp, Homo sapiens
acgtgttgtgattcc

SEQ ID NO: 835547 - DNA, 15 bp, Homo sapiens
gacgtgttgtgattc

SEQ ID NO: 835548 - DNA, 15 bp, Homo sapiens
tgacgtgttgtgatt

SEQ ID NO: 835549 - DNA, 15 bp, Homo sapiens
atgacgtgttgtgat

SEQ ID NO: 835550 - DNA, 15 bp, Homo sapiens
aatgacgtgttgtga

SEQ ID NO: 835551 - DNA, 15 bp, Homo sapiens
taatgacgtgttgtg

SEQ ID NO: 835552 - DNA, 15 bp, Homo sapiens
ctaatgacgtgttgt

SEQ ID NO: 835553 - DNA, 15 bp, Homo sapiens
actaatgacgtgttg

SEQ ID NO: 835554 - DNA, 15 bp, Homo sapiens
aactaatgacgtgtt

SEQ ID NO: 835555 - DNA, 15 bp, Homo sapiens
aaactaatgacgtgt

SEQ ID NO: 835556 - DNA, 15 bp, Homo sapiens
aaaactaatgacgtg

SEQ ID NO: 835557 - DNA, 15 bp, Homo sapiens
caaaactaatgacgt

SEQ ID NO: 835558 - DNA, 15 bp, Homo sapiens
ccaaaactaatgacg

SEQ ID NO: 835559 - DNA, 15 bp, Homo sapiens
gccaaaactaatgac

SEQ ID NO: 835560 - DNA, 15 bp, Homo sapiens
tgccaaaactaatga

SEQ ID NO: 835561 - DNA, 15 bp, Homo sapiens
ctgccaaaactaatg

SEQ ID NO: 835562 - DNA, 15 bp, Homo sapiens
cctgccaaaactaat

SEQ ID NO: 835563 - DNA, 15 bp, Homo sapiens
acctgccaaaactaa

SEQ ID NO: 835564 - DNA, 15 bp, Homo sapiens
gacctgccaaaacta

SEQ ID NO: 835565 - DNA, 15 bp, Homo sapiens
ggacctgccaaaact

SEQ ID NO: 835566 - DNA, 15 bp, Homo sapiens
aggacctgccaaaac

SEQ ID NO: 835567 - DNA, 15 bp, Homo sapiens
aaggacctgccaaaa

SEQ ID NO: 835568 - DNA, 15 bp, Homo sapiens
caaggacctgccaaa

SEQ ID NO: 835569 - DNA, 15 bp, Homo sapiens
gcaaggacctgccaa

SEQ ID NO: 835570 - DNA, 15 bp, Homo sapiens
tgcaaggacctgcca

SEQ ID NO: 835571 - DNA, 15 bp, Homo sapiens
ctgcaaggacctgcc

SEQ ID NO: 835572 - DNA, 15 bp, Homo sapiens
cctgcaaggacctgc

SEQ ID NO: 835573 - DNA, 15 bp, Homo sapiens
acctgcaaggacctg

SEQ ID NO: 835574 - DNA, 15 bp, Homo sapiens
cacctgcaaggacct

SEQ ID NO: 835575 - DNA, 15 bp, Homo sapiens
acacctgcaaggacc

SEQ ID NO: 835576 - DNA, 15 bp, Homo sapiens
aacacctgcaaggac

SEQ ID NO: 835577 - DNA, 15 bp, Homo sapiens
aaacacctgcaagga

SEQ ID NO: 835578 - DNA, 15 bp, Homo sapiens
aaaacacctgcaagg

SEQ ID NO: 835579 - DNA, 15 bp, Homo sapiens
caaaacacctgcaag

SEQ ID NO: 835580 - DNA, 15 bp, Homo sapiens
acaaaacacctgcaa

SEQ ID NO: 835581 - DNA, 15 bp, Homo sapiens
aacaaaacacctgca

SEQ ID NO: 835582 - DNA, 15 bp, Homo sapiens
aaacaaaacacctgc

SEQ ID NO: 835583 - DNA, 15 bp, Homo sapiens
aaaacaaaacacctg

SEQ ID NO: 835584 - DNA, 15 bp, Homo sapiens
caaaacaaaacacct

SEQ ID NO: 835585 - DNA, 15 bp, Homo sapiens
acaaaacaaaacacc

SEQ ID NO: 835586 - DNA, 15 bp, Homo sapiens
aacaaaacaaaacac

SEQ ID NO: 835587 - DNA, 15 bp, Homo sapiens
taaaacaaaacaaaa

SEQ ID NO: 835588 - DNA, 15 bp, Homo sapiens
ataaaacaaaacaaa

SEQ ID NO: 835589 - DNA, 15 bp, Homo sapiens
aataaaacaaaacaa

SEQ ID NO: 835590 - DNA, 15 bp, Homo sapiens
taataaaacaaaaca

SEQ ID NO: 835591 - DNA, 15 bp, Homo sapiens
ttaataaaacaaaac

SEQ ID NO: 835592 - DNA, 15 bp, Homo sapiens
attaataaaacaaaa

SEQ ID NO: 835593 - DNA, 15 bp, Homo sapiens
cattaataaaacaaa

SEQ ID NO: 835594 - DNA, 15 bp, Homo sapiens
acattaataaaacaa

SEQ ID NO: 835595 - DNA, 15 bp, Homo sapiens
aacattaataaaaca

SEQ ID NO: 835596 - DNA, 15 bp, Homo sapiens
gaacattaataaaac

SEQ ID NO: 835597 - DNA, 15 bp, Homo sapiens
agaacattaataaaa

SEQ ID NO: 835598 - DNA, 15 bp, Homo sapiens
aagaacattaataaa

SEQ ID NO: 835599 - DNA, 15 bp, Homo sapiens
gaagaacattaataa

SEQ ID NO: 835600 - DNA, 15 bp, Homo sapiens
ggaagaacattaata

SEQ ID NO: 835601 - DNA, 15 bp, Homo sapiens
gggaagaacattaat

SEQ ID NO: 835602 - DNA, 15 bp, Homo sapiens
agggaagaacattaa

SEQ ID NO: 835603 - DNA, 15 bp, Homo sapiens
gagggaagaacatta

SEQ ID NO: 835604 - DNA, 15 bp, Homo sapiens
ggagggaagaacatt

SEQ ID NO: 835605 - DNA, 15 bp, Homo sapiens
aggagggaagaacat

SEQ ID NO: 835606 - DNA, 15 bp, Homo sapiens
caggagggaagaaca

SEQ ID NO: 835607 - DNA, 15 bp, Homo sapiens
acaggagggaagaac

SEQ ID NO: 835608 - DNA, 15 bp, Homo sapiens
tacaggagggaagaa

SEQ ID NO: 835609 - DNA, 15 bp, Homo sapiens
ctacaggagggaaga

SEQ ID NO: 835610 - DNA, 15 bp, Homo sapiens
gctacaggagggaag

SEQ ID NO: 835611 - DNA, 15 bp, Homo sapiens
agctacaggagggaa

SEQ ID NO: 835612 - DNA, 15 bp, Homo sapiens
tagctacaggaggga

SEQ ID NO: 835613 - DNA, 15 bp, Homo sapiens
ctagctacaggaggg

SEQ ID NO: 835614 - DNA, 15 bp, Homo sapiens
tctagctacaggagg

SEQ ID NO: 835615 - DNA, 15 bp, Homo sapiens
gtctagctacaggag

SEQ ID NO: 835616 - DNA, 15 bp, Homo sapiens
tgtctagctacagga

SEQ ID NO: 835617 - DNA, 15 bp, Homo sapiens
ctgtctagctacagg

SEQ ID NO: 835618 - DNA, 15 bp, Homo sapiens
gctgtctagctacag

SEQ ID NO: 835619 - DNA, 15 bp, Homo sapiens
tgctgtctagctaca

SEQ ID NO: 835620 - DNA, 15 bp, Homo sapiens
ttgctgtctagctac

SEQ ID NO: 835621 - DNA, 15 bp, Homo sapiens
attgctgtctagcta

SEQ ID NO: 835622 - DNA, 15 bp, Homo sapiens
gattgctgtctagct

SEQ ID NO: 835623 - DNA, 15 bp, Homo sapiens
agattgctgtctagc

SEQ ID NO: 835624 - DNA, 15 bp, Homo sapiens
aagattgctgtctag

SEQ ID NO: 835625 - DNA, 15 bp, Homo sapiens
caagattgctgtcta

SEQ ID NO: 835626 - DNA, 15 bp, Homo sapiens
ccaagattgctgtct

SEQ ID NO: 835627 - DNA, 15 bp, Homo sapiens
tccaagattgctgtc

SEQ ID NO: 835628 - DNA, 15 bp, Homo sapiens
ctccaagattgctgt

SEQ ID NO: 835629 - DNA, 15 bp, Homo sapiens
tctccaagattgctg

SEQ ID NO: 835630 - DNA, 15 bp, Homo sapiens
ttctccaagattgct

SEQ ID NO: 835631 - DNA, 15 bp, Homo sapiens
attctccaagattgc

SEQ ID NO: 835632 - DNA, 15 bp, Homo sapiens
gattctccaagattg

SEQ ID NO: 835633 - DNA, 15 bp, Homo sapiens
agattctccaagatt

SEQ ID NO: 835634 - DNA, 15 bp, Homo sapiens
cagattctccaagat

SEQ ID NO: 835635 - DNA, 15 bp, Homo sapiens
gcagattctccaaga

SEQ ID NO: 835636 - DNA, 15 bp, Homo sapiens
ggcagattctccaag

SEQ ID NO: 835637 - DNA, 15 bp, Homo sapiens
tggcagattctccaa

SEQ ID NO: 835638 - DNA, 15 bp, Homo sapiens
ctggcagattctcca

SEQ ID NO: 835639 - DNA, 15 bp, Homo sapiens
gctggcagattctcc

SEQ ID NO: 835640 - DNA, 15 bp, Homo sapiens
agctggcagattctc

SEQ ID NO: 835641 - DNA, 15 bp, Homo sapiens
aagctggcagattct

SEQ ID NO: 835642 - DNA, 15 bp, Homo sapiens
caagctggcagattc

SEQ ID NO: 835643 - DNA, 15 bp, Homo sapiens
ccaagctggcagatt

SEQ ID NO: 835644 - DNA, 15 bp, Homo sapiens
tccaagctggcagat

SEQ ID NO: 835645 - DNA, 15 bp, Homo sapiens
ttccaagctggcaga

SEQ ID NO: 835646 - DNA, 15 bp, Homo sapiens
cttccaagctggcag

SEQ ID NO: 835647 - DNA, 15 bp, Homo sapiens
tcttccaagctggca

SEQ ID NO: 835648 - DNA, 15 bp, Homo sapiens
gtcttccaagctggc

SEQ ID NO: 835649 - DNA, 15 bp, Homo sapiens
agtcttccaagctgg

SEQ ID NO: 835650 - DNA, 15 bp, Homo sapiens
tagtcttccaagctg

SEQ ID NO: 835651 - DNA, 15 bp, Homo sapiens
atagtcttccaagct

SEQ ID NO: 835652 - DNA, 15 bp, Homo sapiens
aatagtcttccaagc

SEQ ID NO: 835653 - DNA, 15 bp, Homo sapiens
caatagtcttccaag

SEQ ID NO: 835654 - DNA, 15 bp, Homo sapiens
acaatagtcttccaa

SEQ ID NO: 835655 - DNA, 15 bp, Homo sapiens
cacaatagtcttcca

SEQ ID NO: 835656 - DNA, 15 bp, Homo sapiens
acacaatagtcttcc

SEQ ID NO: 835657 - DNA, 15 bp, Homo sapiens
tacacaatagtcttc

SEQ ID NO: 835658 - DNA, 15 bp, Homo sapiens
ttacacaatagtctt

SEQ ID NO: 835659 - DNA, 15 bp, Homo sapiens
tttacacaatagtct

SEQ ID NO: 835660 - DNA, 15 bp, Homo sapiens
atttacacaatagtc

SEQ ID NO: 835661 - DNA, 15 bp, Homo sapiens
aatttacacaatagt

SEQ ID NO: 835662 - DNA, 15 bp, Homo sapiens
aaatttacacaatag

SEQ ID NO: 835663 - DNA, 15 bp, Homo sapiens
gaaatttacacaata

SEQ ID NO: 835664 - DNA, 15 bp, Homo sapiens
tgaaatttacacaat

SEQ ID NO: 835665 - DNA, 15 bp, Homo sapiens
ttgaaatttacacaa

SEQ ID NO: 835666 - DNA, 15 bp, Homo sapiens
cttgaaatttacaca

SEQ ID NO: 835667 - DNA, 15 bp, Homo sapiens
ccttgaaatttacac

SEQ ID NO: 835668 - DNA, 15 bp, Homo sapiens
accttgaaatttaca

SEQ ID NO: 835669 - DNA, 15 bp, Homo sapiens
caccttgaaatttac

SEQ ID NO: 835670 - DNA, 15 bp, Homo sapiens
ccaccttgaaattta

SEQ ID NO: 835671 - DNA, 15 bp, Homo sapiens
tccaccttgaaattt

SEQ ID NO: 835672 - DNA, 15 bp, Homo sapiens
ctccaccttgaaatt

SEQ ID NO: 835673 - DNA, 15 bp, Homo sapiens
gctccaccttgaaat

SEQ ID NO: 835674 - DNA, 15 bp, Homo sapiens
ggctccaccttgaaa

SEQ ID NO: 835675 - DNA, 15 bp, Homo sapiens
aggctccaccttgaa

SEQ ID NO: 835676 - DNA, 15 bp, Homo sapiens
gaggctccaccttga

SEQ ID NO: 835677 - DNA, 15 bp, Homo sapiens
ggaggctccaccttg

SEQ ID NO: 835678 - DNA, 15 bp, Homo sapiens
aggaggctccacctt

SEQ ID NO: 835679 - DNA, 15 bp, Homo sapiens
aaggaggctccacct

SEQ ID NO: 835680 - DNA, 15 bp, Homo sapiens
aaaggaggctccacc

SEQ ID NO: 835681 - DNA, 15 bp, Homo sapiens
taaaggaggctccac

SEQ ID NO: 835682 - DNA, 15 bp, Homo sapiens
ttaaaggaggctcca

SEQ ID NO: 835683 - DNA, 15 bp, Homo sapiens
attaaaggaggctcc

SEQ ID NO: 835684 - DNA, 15 bp, Homo sapiens
aattaaaggaggctc

SEQ ID NO: 835685 - DNA, 15 bp, Homo sapiens
aaattaaaggaggct

SEQ ID NO: 835686 - DNA, 15 bp, Homo sapiens
caaattaaaggaggc

SEQ ID NO: 835687 - DNA, 15 bp, Homo sapiens
acaaattaaaggagg

SEQ ID NO: 835688 - DNA, 15 bp, Homo sapiens
aacaaattaaaggag

SEQ ID NO: 835689 - DNA, 15 bp, Homo sapiens
gaacaaattaaagga

SEQ ID NO: 835690 - DNA, 15 bp, Homo sapiens
agaacaaattaaagg

SEQ ID NO: 835691 - DNA, 15 bp, Homo sapiens
cagaacaaattaaag

SEQ ID NO: 835692 - DNA, 15 bp, Homo sapiens
acagaacaaattaaa

SEQ ID NO: 835693 - DNA, 15 bp, Homo sapiens
cacagaacaaattaa

SEQ ID NO: 835694 - DNA, 15 bp, Homo sapiens
acacagaacaaatta

SEQ ID NO: 835695 - DNA, 15 bp, Homo sapiens
aacacagaacaaatt

SEQ ID NO: 835696 - DNA, 15 bp, Homo sapiens
taacacagaacaaat

SEQ ID NO: 835697 - DNA, 15 bp, Homo sapiens
gtaacacagaacaaa

SEQ ID NO: 835698 - DNA, 15 bp, Homo sapiens
ggtaacacagaacaa

SEQ ID NO: 835699 - DNA, 15 bp, Homo sapiens
aggtaacacagaaca

SEQ ID NO: 835700 - DNA, 15 bp, Homo sapiens
caggtaacacagaac

SEQ ID NO: 835701 - DNA, 15 bp, Homo sapiens
acaggtaacacagaa

SEQ ID NO: 835702 - DNA, 15 bp, Homo sapiens
cacaggtaacacaga

SEQ ID NO: 835703 - DNA, 15 bp, Homo sapiens
tcacaggtaacacag

SEQ ID NO: 835704 - DNA, 15 bp, Homo sapiens
ctcacaggtaacaca

SEQ ID NO: 835705 - DNA, 15 bp, Homo sapiens
gctcacaggtaacac

SEQ ID NO: 835706 - DNA, 15 bp, Homo sapiens
agctcacaggtaaca

SEQ ID NO: 835707 - DNA, 15 bp, Homo sapiens
cagctcacaggtaac

SEQ ID NO: 835708 - DNA, 15 bp, Homo sapiens
acagctcacaggtaa

SEQ ID NO: 835709 - DNA, 15 bp, Homo sapiens
cacagctcacaggta

SEQ ID NO: 835710 - DNA, 15 bp, Homo sapiens
tcacagctcacaggt

SEQ ID NO: 835711 - DNA, 15 bp, Homo sapiens
ctcacagctcacagg

SEQ ID NO: 835712 - DNA, 15 bp, Homo sapiens
cctcacagctcacag

SEQ ID NO: 835713 - DNA, 15 bp, Homo sapiens
acctcacagctcaca

SEQ ID NO: 835714 - DNA, 15 bp, Homo sapiens
gacctcacagctcac

SEQ ID NO: 835715 - DNA, 15 bp, Homo sapiens
tgacctcacagctca

SEQ ID NO: 835716 - DNA, 15 bp, Homo sapiens
atgacctcacagctc

SEQ ID NO: 835717 - DNA, 15 bp, Homo sapiens
catgacctcacagct

SEQ ID NO: 835718 - DNA, 15 bp, Homo sapiens
tcatgacctcacagc

SEQ ID NO: 835719 - DNA, 15 bp, Homo sapiens
ttcatgacctcacag

SEQ ID NO: 835720 - DNA, 15 bp, Homo sapiens
cttcatgacctcaca

SEQ ID NO: 835721 - DNA, 15 bp, Homo sapiens
tcttcatgacctcac

SEQ ID NO: 835722 - DNA, 15 bp, Homo sapiens
ctcttcatgacctca

SEQ ID NO: 835723 - DNA, 15 bp, Homo sapiens
cctcttcatgacctc

SEQ ID NO: 835724 - DNA, 15 bp, Homo sapiens
tcctcttcatgacct

SEQ ID NO: 835725 - DNA, 15 bp, Homo sapiens
ctcctcttcatgacc

SEQ ID NO: 835726 - DNA, 15 bp, Homo sapiens
tctcctcttcatgac

SEQ ID NO: 835727 - DNA, 15 bp, Homo sapiens
gtctcctcttcatga

SEQ ID NO: 835728 - DNA, 15 bp, Homo sapiens
tgtctcctcttcatg

SEQ ID NO: 835729 - DNA, 15 bp, Homo sapiens
ttgtctcctcttcat

SEQ ID NO: 835730 - DNA, 15 bp, Homo sapiens
attgtctcctcttca

SEQ ID NO: 835731 - DNA, 15 bp, Homo sapiens
cattgtctcctcttc

SEQ ID NO: 835732 - DNA, 15 bp, Homo sapiens
tcattgtctcctctt

SEQ ID NO: 835733 - DNA, 15 bp, Homo sapiens
ctcattgtctcctct

SEQ ID NO: 835734 - DNA, 15 bp, Homo sapiens
cctcattgtctcctc

SEQ ID NO: 835735 - DNA, 15 bp, Homo sapiens
gcctcattgtctcct

SEQ ID NO: 835736 - DNA, 15 bp, Homo sapiens
agcctcattgtctcc

SEQ ID NO: 835737 - DNA, 15 bp, Homo sapiens
tagcctcattgtctc

SEQ ID NO: 835738 - DNA, 15 bp, Homo sapiens
ttagcctcattgtct

SEQ ID NO: 835739 - DNA, 15 bp, Homo sapiens
attagcctcattgtc

SEQ ID NO: 835740 - DNA, 15 bp, Homo sapiens
gattagcctcattgt

SEQ ID NO: 835741 - DNA, 15 bp, Homo sapiens
tgattagcctcattg

SEQ ID NO: 835742 - DNA, 15 bp, Homo sapiens
atgattagcctcatt

SEQ ID NO: 835743 - DNA, 15 bp, Homo sapiens
catgattagcctcat

SEQ ID NO: 835744 - DNA, 15 bp, Homo sapiens
tcatgattagcctca

SEQ ID NO: 835745 - DNA, 15 bp, Homo sapiens
ctcatgattagcctc

SEQ ID NO: 835746 - DNA, 15 bp, Homo sapiens
tctcatgattagcct

SEQ ID NO: 835747 - DNA, 15 bp, Homo sapiens
ctctcatgattagcc

SEQ ID NO: 835748 - DNA, 15 bp, Homo sapiens
gctctcatgattagc

SEQ ID NO: 835749 - DNA, 15 bp, Homo sapiens
ggctctcatgattag

SEQ ID NO: 835750 - DNA, 15 bp, Homo sapiens
gggctctcatgatta

SEQ ID NO: 835751 - DNA, 15 bp, Homo sapiens
ggggctctcatgatt

SEQ ID NO: 835752 - DNA, 15 bp, Homo sapiens
tggggctctcatgat

SEQ ID NO: 835753 - DNA, 15 bp, Homo sapiens
atggggctctcatga

SEQ ID NO: 835754 - DNA, 15 bp, Homo sapiens
aatggggctctcatg

SEQ ID NO: 835755 - DNA, 15 bp, Homo sapiens
caatggggctctcat

SEQ ID NO: 835756 - DNA, 15 bp, Homo sapiens
ccaatggggctctca

SEQ ID NO: 835757 - DNA, 15 bp, Homo sapiens
accaatggggctctc

SEQ ID NO: 835758 - DNA, 15 bp, Homo sapiens
aaccaatggggctct

SEQ ID NO: 835759 - DNA, 15 bp, Homo sapiens
aaaccaatggggctc

SEQ ID NO: 835760 - DNA, 15 bp, Homo sapiens
taaaccaatggggct

SEQ ID NO: 835761 - DNA, 15 bp, Homo sapiens
ctaaaccaatggggc

SEQ ID NO: 835762 - DNA, 15 bp, Homo sapiens
cctaaaccaatgggg

SEQ ID NO: 835763 - DNA, 15 bp, Homo sapiens
gcctaaaccaatggg

SEQ ID NO: 835764 - DNA, 15 bp, Homo sapiens
tgcctaaaccaatgg

SEQ ID NO: 835765 - DNA, 15 bp, Homo sapiens
ttgcctaaaccaatg

SEQ ID NO: 835766 - DNA, 15 bp, Homo sapiens
attgcctaaaccaat

SEQ ID NO: 835767 - DNA, 15 bp, Homo sapiens
aattgcctaaaccaa

SEQ ID NO: 835768 - DNA, 15 bp, Homo sapiens
taattgcctaaacca

SEQ ID NO: 835769 - DNA, 15 bp, Homo sapiens
ctaattgcctaaacc

SEQ ID NO: 835770 - DNA, 15 bp, Homo sapiens
tctaattgcctaaac

SEQ ID NO: 835771 - DNA, 15 bp, Homo sapiens
ttctaattgcctaaa

SEQ ID NO: 835772 - DNA, 15 bp, Homo sapiens
gttctaattgcctaa

SEQ ID NO: 835773 - DNA, 15 bp, Homo sapiens
tgttctaattgccta

SEQ ID NO: 835774 - DNA, 15 bp, Homo sapiens
ttgttctaattgcct

SEQ ID NO: 835775 - DNA, 15 bp, Homo sapiens
gttgttctaattgcc

SEQ ID NO: 835776 - DNA, 15 bp, Homo sapiens
tgttgttctaattgc

SEQ ID NO: 835777 - DNA, 15 bp, Homo sapiens
ttgttgttctaattg

SEQ ID NO: 835778 - DNA, 15 bp, Homo sapiens
cttgttgttctaatt

SEQ ID NO: 835779 - DNA, 15 bp, Homo sapiens
tcttgttgttctaat

SEQ ID NO: 835780 - DNA, 15 bp, Homo sapiens
atcttgttgttctaa

SEQ ID NO: 835781 - DNA, 15 bp, Homo sapiens
gatcttgttgttcta

SEQ ID NO: 835782 - DNA, 15 bp, Homo sapiens
agatcttgttgttct

SEQ ID NO: 835783 - DNA, 15 bp, Homo sapiens
tagatcttgttgttc

SEQ ID NO: 835784 - DNA, 15 bp, Homo sapiens
ttagatcttgttgtt

SEQ ID NO: 835785 - DNA, 15 bp, Homo sapiens
tttagatcttgttgt

SEQ ID NO: 835786 - DNA, 15 bp, Homo sapiens
ttttagatcttgttg

SEQ ID NO: 835787 - DNA, 15 bp, Homo sapiens
attttagatcttgtt

SEQ ID NO: 835788 - DNA, 15 bp, Homo sapiens
cattttagatcttgt

SEQ ID NO: 835789 - DNA, 15 bp, Homo sapiens
ccattttagatcttg

SEQ ID NO: 835790 - DNA, 15 bp, Homo sapiens
accattttagatctt

SEQ ID NO: 835791 - DNA, 15 bp, Homo sapiens
aaccattttagatct

SEQ ID NO: 835792 - DNA, 15 bp, Homo sapiens
aaaccattttagatc

SEQ ID NO: 835793 - DNA, 15 bp, Homo sapiens
taaaccattttagat

SEQ ID NO: 835794 - DNA, 15 bp, Homo sapiens
ataaaccattttaga

SEQ ID NO: 835795 - DNA, 15 bp, Homo sapiens
aataaaccattttag

SEQ ID NO: 835796 - DNA, 15 bp, Homo sapiens
taataaaccatttta

SEQ ID NO: 835797 - DNA, 15 bp, Homo sapiens
ctaataaaccatttt

SEQ ID NO: 835798 - DNA, 15 bp, Homo sapiens
gctaataaaccattt

SEQ ID NO: 835799 - DNA, 15 bp, Homo sapiens
ggctaataaaccatt

SEQ ID NO: 835800 - DNA, 15 bp, Homo sapiens
aggctaataaaccat

SEQ ID NO: 835801 - DNA, 15 bp, Homo sapiens
aaggctaataaacca

SEQ ID NO: 835802 - DNA, 15 bp, Homo sapiens
caaggctaataaacc

SEQ ID NO: 835803 - DNA, 15 bp, Homo sapiens
tcaaggctaataaac

SEQ ID NO: 835804 - DNA, 15 bp, Homo sapiens
ttcaaggctaataaa

SEQ ID NO: 835805 - DNA, 15 bp, Homo sapiens
attcaaggctaataa

SEQ ID NO: 835806 - DNA, 15 bp, Homo sapiens
aattcaaggctaata

SEQ ID NO: 835807 - DNA, 15 bp, Homo sapiens
caattcaaggctaat

SEQ ID NO: 835808 - DNA, 15 bp, Homo sapiens
acaattcaaggctaa

SEQ ID NO: 835809 - DNA, 15 bp, Homo sapiens
cacaattcaaggcta

SEQ ID NO: 835810 - DNA, 15 bp, Homo sapiens
acacaattcaaggct

SEQ ID NO: 835811 - DNA, 15 bp, Homo sapiens
aacacaattcaaggc

SEQ ID NO: 835812 - DNA, 15 bp, Homo sapiens
taacacaattcaagg

SEQ ID NO: 835813 - DNA, 15 bp, Homo sapiens
ttaacacaattcaag

SEQ ID NO: 835814 - DNA, 15 bp, Homo sapiens
cttaacacaattcaa

SEQ ID NO: 835815 - DNA, 15 bp, Homo sapiens
gcttaacacaattca

SEQ ID NO: 835816 - DNA, 15 bp, Homo sapiens
tgcttaacacaattc

SEQ ID NO: 835817 - DNA, 15 bp, Homo sapiens
gtgcttaacacaatt

SEQ ID NO: 835818 - DNA, 15 bp, Homo sapiens
tgtgcttaacacaat

SEQ ID NO: 835819 - DNA, 15 bp, Homo sapiens
atgtgcttaacacaa

SEQ ID NO: 835820 - DNA, 15 bp, Homo sapiens
tatgtgcttaacaca

SEQ ID NO: 835821 - DNA, 15 bp, Homo sapiens
ttatgtgcttaacac

SEQ ID NO: 835822 - DNA, 15 bp, Homo sapiens
attatgtgcttaaca

SEQ ID NO: 835823 - DNA, 15 bp, Homo sapiens
aattatgtgcttaac

SEQ ID NO: 835824 - DNA, 15 bp, Homo sapiens
gaattatgtgcttaa

SEQ ID NO: 835825 - DNA, 15 bp, Homo sapiens
tgaattatgtgctta

SEQ ID NO: 835826 - DNA, 15 bp, Homo sapiens
atgaattatgtgctt

SEQ ID NO: 835827 - DNA, 15 bp, Homo sapiens
tatgaattatgtgct

SEQ ID NO: 835828 - DNA, 15 bp, Homo sapiens
ttatgaattatgtgc

SEQ ID NO: 835829 - DNA, 15 bp, Homo sapiens
tttatgaattatgtg

SEQ ID NO: 835830 - DNA, 15 bp, Homo sapiens
ttttatgaattatgt

SEQ ID NO: 835831 - DNA, 15 bp, Homo sapiens
tttttatgaattatg

SEQ ID NO: 835832 - DNA, 15 bp, Homo sapiens
ttttttatgaattat

SEQ ID NO: 835833 - DNA, 15 bp, Homo sapiens
gttttttatgaatta

SEQ ID NO: 835834 - DNA, 15 bp, Homo sapiens
tgttttttatgaatt

SEQ ID NO: 835835 - DNA, 15 bp, Homo sapiens
ctgttttttatgaat

SEQ ID NO: 835836 - DNA, 15 bp, Homo sapiens
tctgttttttatgaa

SEQ ID NO: 835837 - DNA, 15 bp, Homo sapiens
ttctgttttttatga

SEQ ID NO: 835838 - DNA, 15 bp, Homo sapiens
tttctgttttttatg

SEQ ID NO: 835839 - DNA, 15 bp, Homo sapiens
ttttctgttttttat

SEQ ID NO: 835840 - DNA, 15 bp, Homo sapiens
tttttctgtttttta

SEQ ID NO: 835841 - DNA, 15 bp, Homo sapiens
ttttttctgtttttt

SEQ ID NO: 835842 - DNA, 15 bp, Homo sapiens
attttttctgttttt

SEQ ID NO: 835843 - DNA, 15 bp, Homo sapiens
tattttttctgtttt

SEQ ID NO: 835844 - DNA, 15 bp, Homo sapiens
atattttttctgttt

SEQ ID NO: 835845 - DNA, 15 bp, Homo sapiens
aatattttttctgtt

SEQ ID NO: 835846 - DNA, 15 bp, Homo sapiens
aaatattttttctgt

SEQ ID NO: 835847 - DNA, 15 bp, Homo sapiens
aaaatattttttctg

SEQ ID NO: 835848 - DNA, 15 bp, Homo sapiens
aaaaatattttttct

SEQ ID NO: 835849 - DNA, 15 bp, Homo sapiens
taaaaatattttttc

SEQ ID NO: 835850 - DNA, 15 bp, Homo sapiens
ttaaaaatatttttt

SEQ ID NO: 835851 - DNA, 15 bp, Homo sapiens
tttaaaaatattttt

SEQ ID NO: 835852 - DNA, 15 bp, Homo sapiens
atttaaaaatatttt

SEQ ID NO: 835853 - DNA, 15 bp, Homo sapiens
catttaaaaatattt

SEQ ID NO: 835854 - DNA, 15 bp, Homo sapiens
acatttaaaaatatt

SEQ ID NO: 835855 - DNA, 15 bp, Homo sapiens
tacatttaaaaatat

SEQ ID NO: 835856 - DNA, 15 bp, Homo sapiens
atacatttaaaaata

SEQ ID NO: 835857 - DNA, 15 bp, Homo sapiens
catacatttaaaaat

SEQ ID NO: 835858 - DNA, 15 bp, Homo sapiens
acatacatttaaaaa

SEQ ID NO: 835859 - DNA, 15 bp, Homo sapiens
gacatacatttaaaa

SEQ ID NO: 835860 - DNA, 15 bp, Homo sapiens
agacatacatttaaa

SEQ ID NO: 835861 - DNA, 15 bp, Homo sapiens
tagacatacatttaa

SEQ ID NO: 835862 - DNA, 15 bp, Homo sapiens
ttagacatacattta

SEQ ID NO: 835863 - DNA, 15 bp, Homo sapiens
tttagacatacattt

SEQ ID NO: 835864 - DNA, 15 bp, Homo sapiens
atttagacatacatt

SEQ ID NO: 835865 - DNA, 15 bp, Homo sapiens
gatttagacatacat

SEQ ID NO: 835866 - DNA, 15 bp, Homo sapiens
agatttagacataca

SEQ ID NO: 835867 - DNA, 15 bp, Homo sapiens
aagatttagacatac

SEQ ID NO: 835868 - DNA, 15 bp, Homo sapiens
gaagatttagacata

SEQ ID NO: 835869 - DNA, 15 bp, Homo sapiens
tgaagatttagacat

SEQ ID NO: 835870 - DNA, 15 bp, Homo sapiens
ctgaagatttagaca

SEQ ID NO: 835871 - DNA, 15 bp, Homo sapiens
actgaagatttagac

SEQ ID NO: 835872 - DNA, 15 bp, Homo sapiens
aactgaagatttaga

SEQ ID NO: 835873 - DNA, 15 bp, Homo sapiens
taactgaagatttag

SEQ ID NO: 835874 - DNA, 15 bp, Homo sapiens
gtaactgaagattta

SEQ ID NO: 835875 - DNA, 15 bp, Homo sapiens
tgtaactgaagattt

SEQ ID NO: 835876 - DNA, 15 bp, Homo sapiens
ttgtaactgaagatt

SEQ ID NO: 835877 - DNA, 15 bp, Homo sapiens
cttgtaactgaagat

SEQ ID NO: 835878 - DNA, 15 bp, Homo sapiens
acttgtaactgaaga

SEQ ID NO: 835879 - DNA, 15 bp, Homo sapiens
aacttgtaactgaag

SEQ ID NO: 835880 - DNA, 15 bp, Homo sapiens
aaacttgtaactgaa

SEQ ID NO: 835881 - DNA, 15 bp, Homo sapiens
caaacttgtaactga

SEQ ID NO: 835882 - DNA, 15 bp, Homo sapiens
tcaaacttgtaactg

SEQ ID NO: 835883 - DNA, 15 bp, Homo sapiens
ttcaaacttgtaact

SEQ ID NO: 835884 - DNA, 15 bp, Homo sapiens
tttcaaacttgtaac

SEQ ID NO: 835885 - DNA, 15 bp, Homo sapiens
ctttcaaacttgtaa

SEQ ID NO: 835886 - DNA, 15 bp, Homo sapiens
cctttcaaacttgta

SEQ ID NO: 835887 - DNA, 15 bp, Homo sapiens
acctttcaaacttgt

SEQ ID NO: 835888 - DNA, 15 bp, Homo sapiens
cacctttcaaacttg

SEQ ID NO: 835889 - DNA, 15 bp, Homo sapiens
tcacctttcaaactt

SEQ ID NO: 835890 - DNA, 15 bp, Homo sapiens
gtcacctttcaaact

SEQ ID NO: 835891 - DNA, 15 bp, Homo sapiens
tgtcacctttcaaac

SEQ ID NO: 835892 - DNA, 15 bp, Homo sapiens
ttgtcacctttcaaa

SEQ ID NO: 835893 - DNA, 15 bp, Homo sapiens
tttgtcacctttcaa

SEQ ID NO: 835894 - DNA, 15 bp, Homo sapiens
gtttgtcacctttca

SEQ ID NO: 835895 - DNA, 15 bp, Homo sapiens
agtttgtcacctttc

SEQ ID NO: 835896 - DNA, 15 bp, Homo sapiens
tagtttgtcaccttt

SEQ ID NO: 835897 - DNA, 15 bp, Homo sapiens
atagtttgtcacctt

SEQ ID NO: 835898 - DNA, 15 bp, Homo sapiens
aatagtttgtcacct

SEQ ID NO: 835899 - DNA, 15 bp, Homo sapiens
gaatagtttgtcacc

SEQ ID NO: 835900 - DNA, 15 bp, Homo sapiens
agaatagtttgtcac

SEQ ID NO: 835901 - DNA, 15 bp, Homo sapiens
cagaatagtttgtca

SEQ ID NO: 835902 - DNA, 15 bp, Homo sapiens
tcagaatagtttgtc

SEQ ID NO: 835903 - DNA, 15 bp, Homo sapiens
ctcagaatagtttgt

SEQ ID NO: 835904 - DNA, 15 bp, Homo sapiens
cctcagaatagtttg

SEQ ID NO: 835905 - DNA, 15 bp, Homo sapiens
tcctcagaatagttt

SEQ ID NO: 835906 - DNA, 15 bp, Homo sapiens
ttcctcagaatagtt

SEQ ID NO: 835907 - DNA, 15 bp, Homo sapiens
tttcctcagaatagt

SEQ ID NO: 835908 - DNA, 15 bp, Homo sapiens
atttcctcagaatag

SEQ ID NO: 835909 - DNA, 15 bp, Homo sapiens
catttcctcagaata

SEQ ID NO: 835910 - DNA, 15 bp, Homo sapiens
tcatttcctcagaat

SEQ ID NO: 835911 - DNA, 15 bp, Homo sapiens
atcatttcctcagaa

SEQ ID NO: 835912 - DNA, 15 bp, Homo sapiens
aatcatttcctcaga

SEQ ID NO: 835913 - DNA, 15 bp, Homo sapiens
taatcatttcctcag

SEQ ID NO: 835914 - DNA, 15 bp, Homo sapiens
ctaatcatttcctca

SEQ ID NO: 835915 - DNA, 15 bp, Homo sapiens
cctaatcatttcctc

SEQ ID NO: 835916 - DNA, 15 bp, Homo sapiens
gcctaatcatttcct

SEQ ID NO: 835917 - DNA, 15 bp, Homo sapiens
ggcctaatcatttcc

SEQ ID NO: 835918 - DNA, 15 bp, Homo sapiens
aggcctaatcatttc

SEQ ID NO: 835919 - DNA, 15 bp, Homo sapiens
taggcctaatcattt

SEQ ID NO: 835920 - DNA, 15 bp, Homo sapiens
ataggcctaatcatt

SEQ ID NO: 835921 - DNA, 15 bp, Homo sapiens
aataggcctaatcat

SEQ ID NO: 835922 - DNA, 15 bp, Homo sapiens
gaataggcctaatca

SEQ ID NO: 835923 - DNA, 15 bp, Homo sapiens
agaataggcctaatc

SEQ ID NO: 835924 - DNA, 15 bp, Homo sapiens
aagaataggcctaat

SEQ ID NO: 835925 - DNA, 15 bp, Homo sapiens
caagaataggcctaa

SEQ ID NO: 835926 - DNA, 15 bp, Homo sapiens
gcaagaataggccta

SEQ ID NO: 835927 - DNA, 15 bp, Homo sapiens
tgcaagaataggcct

SEQ ID NO: 835928 - DNA, 15 bp, Homo sapiens
ttgcaagaataggcc

SEQ ID NO: 835929 - DNA, 15 bp, Homo sapiens
gttgcaagaataggc

SEQ ID NO: 835930 - DNA, 15 bp, Homo sapiens
cgttgcaagaatagg

SEQ ID NO: 835931 - DNA, 15 bp, Homo sapiens
tcgttgcaagaatag

SEQ ID NO: 835932 - DNA, 15 bp, Homo sapiens
ctcgttgcaagaata

SEQ ID NO: 835933 - DNA, 15 bp, Homo sapiens
actcgttgcaagaat

SEQ ID NO: 835934 - DNA, 15 bp, Homo sapiens
gactcgttgcaagaa

SEQ ID NO: 835935 - DNA, 15 bp, Homo sapiens
agactcgttgcaaga

SEQ ID NO: 835936 - DNA, 15 bp, Homo sapiens
aagactcgttgcaag

SEQ ID NO: 835937 - DNA, 15 bp, Homo sapiens
aaagactcgttgcaa

SEQ ID NO: 835938 - DNA, 15 bp, Homo sapiens
taaagactcgttgca

SEQ ID NO: 835939 - DNA, 15 bp, Homo sapiens
ataaagactcgttgc

SEQ ID NO: 835940 - DNA, 15 bp, Homo sapiens
cataaagactcgttg

SEQ ID NO: 835941 - DNA, 15 bp, Homo sapiens
tcataaagactcgtt

SEQ ID NO: 835942 - DNA, 15 bp, Homo sapiens
atcataaagactcgt

SEQ ID NO: 835943 - DNA, 15 bp, Homo sapiens
gatcataaagactcg

SEQ ID NO: 835944 - DNA, 15 bp, Homo sapiens
agatcataaagactc

SEQ ID NO: 835945 - DNA, 15 bp, Homo sapiens
cagatcataaagact

SEQ ID NO: 835946 - DNA, 15 bp, Homo sapiens
tcagatcataaagac

SEQ ID NO: 835947 - DNA, 15 bp, Homo sapiens
ttcagatcataaaga

SEQ ID NO: 835948 - DNA, 15 bp, Homo sapiens
tttcagatcataaag

SEQ ID NO: 835949 - DNA, 15 bp, Homo sapiens
ttttcagatcataaa

SEQ ID NO: 835950 - DNA, 15 bp, Homo sapiens
cttttcagatcataa

SEQ ID NO: 835951 - DNA, 15 bp, Homo sapiens
tcttttcagatcata

SEQ ID NO: 835952 - DNA, 15 bp, Homo sapiens
ttcttttcagatcat

SEQ ID NO: 835953 - DNA, 15 bp, Homo sapiens
attcttttcagatca

SEQ ID NO: 835954 - DNA, 15 bp, Homo sapiens
gattcttttcagatc

SEQ ID NO: 835955 - DNA, 15 bp, Homo sapiens
agattcttttcagat

SEQ ID NO: 835956 - DNA, 15 bp, Homo sapiens
tagattcttttcaga

SEQ ID NO: 835957 - DNA, 15 bp, Homo sapiens
atagattcttttcag

SEQ ID NO: 835958 - DNA, 15 bp, Homo sapiens
catagattcttttca

SEQ ID NO: 835959 - DNA, 15 bp, Homo sapiens
acatagattcttttc

SEQ ID NO: 835960 - DNA, 15 bp, Homo sapiens
gacatagattctttt

SEQ ID NO: 835961 - DNA, 15 bp, Homo sapiens
ggacatagattcttt

SEQ ID NO: 835962 - DNA, 15 bp, Homo sapiens
tggacatagattctt

SEQ ID NO: 835963 - DNA, 15 bp, Homo sapiens
gtggacatagattct

SEQ ID NO: 835964 - DNA, 15 bp, Homo sapiens
tgtggacatagattc

SEQ ID NO: 835965 - DNA, 15 bp, Homo sapiens
gtgtggacatagatt

SEQ ID NO: 835966 - DNA, 15 bp, Homo sapiens
tgtgtggacatagat

SEQ ID NO: 835967 - DNA, 15 bp, Homo sapiens
atgtgtggacataga

SEQ ID NO: 835968 - DNA, 15 bp, Homo sapiens
tatgtgtggacatag

SEQ ID NO: 835969 - DNA, 15 bp, Homo sapiens
ttatgtgtggacata

SEQ ID NO: 835970 - DNA, 15 bp, Homo sapiens
gttatgtgtggacat

SEQ ID NO: 835971 - DNA, 15 bp, Homo sapiens
agttatgtgtggaca

SEQ ID NO: 835972 - DNA, 15 bp, Homo sapiens
gagttatgtgtggac

SEQ ID NO: 835973 - DNA, 15 bp, Homo sapiens
ggagttatgtgtgga

SEQ ID NO: 835974 - DNA, 15 bp, Homo sapiens
gggagttatgtgtgg

SEQ ID NO: 835975 - DNA, 15 bp, Homo sapiens
tgggagttatgtgtg

SEQ ID NO: 835976 - DNA, 15 bp, Homo sapiens
gtgggagttatgtgt

SEQ ID NO: 835977 - DNA, 15 bp, Homo sapiens
ggtgggagttatgtg

SEQ ID NO: 835978 - DNA, 15 bp, Homo sapiens
aggtgggagttatgt

SEQ ID NO: 835979 - DNA, 15 bp, Homo sapiens
gaggtgggagttatg

SEQ ID NO: 835980 - DNA, 15 bp, Homo sapiens
tgaggtgggagttat

SEQ ID NO: 835981 - DNA, 15 bp, Homo sapiens
ttgaggtgggagtta

SEQ ID NO: 835982 - DNA, 15 bp, Homo sapiens
tttgaggtgggagtt

SEQ ID NO: 835983 - DNA, 15 bp, Homo sapiens
ctttgaggtgggagt

SEQ ID NO: 835984 - DNA, 15 bp, Homo sapiens
tctttgaggtgggag

SEQ ID NO: 835985 - DNA, 15 bp, Homo sapiens
atctttgaggtggga

SEQ ID NO: 835986 - DNA, 15 bp, Homo sapiens
catctttgaggtggg

SEQ ID NO: 835987 - DNA, 15 bp, Homo sapiens
ccatctttgaggtgg

SEQ ID NO: 835988 - DNA, 15 bp, Homo sapiens
cccatctttgaggtg

SEQ ID NO: 835989 - DNA, 15 bp, Homo sapiens
ccccatctttgaggt

SEQ ID NO: 835990 - DNA, 15 bp, Homo sapiens
gccccatctttgagg

SEQ ID NO: 835991 - DNA, 15 bp, Homo sapiens
tgccccatctttgag

SEQ ID NO: 835992 - DNA, 15 bp, Homo sapiens
atgccccatctttga

SEQ ID NO: 835993 - DNA, 15 bp, Homo sapiens
gatgccccatctttg

SEQ ID NO: 835994 - DNA, 15 bp, Homo sapiens
agatgccccatcttt

SEQ ID NO: 835995 - DNA, 15 bp, Homo sapiens
aagatgccccatctt

SEQ ID NO: 835996 - DNA, 15 bp, Homo sapiens
aaagatgccccatct

SEQ ID NO: 835997 - DNA, 15 bp, Homo sapiens
aaaagatgccccatc

SEQ ID NO: 835998 - DNA, 15 bp, Homo sapiens
caaaagatgccccat

SEQ ID NO: 835999 - DNA, 15 bp, Homo sapiens
gcaaaagatgcccca

SEQ ID NO: 836000 - DNA, 15 bp, Homo sapiens
agcaaaagatgcccc

SEQ ID NO: 836001 - DNA, 15 bp, Homo sapiens
gagcaaaagatgccc

SEQ ID NO: 836002 - DNA, 15 bp, Homo sapiens
agagcaaaagatgcc

SEQ ID NO: 836003 - DNA, 15 bp, Homo sapiens
cagagcaaaagatgc

SEQ ID NO: 836004 - DNA, 15 bp, Homo sapiens
ccagagcaaaagatg

SEQ ID NO: 836005 - DNA, 15 bp, Homo sapiens
cccagagcaaaagat

SEQ ID NO: 836006 - DNA, 15 bp, Homo sapiens
tcccagagcaaaaga

SEQ ID NO: 836007 - DNA, 15 bp, Homo sapiens
ctcccagagcaaaag

SEQ ID NO: 836008 - DNA, 15 bp, Homo sapiens
tctcccagagcaaaa

SEQ ID NO: 836009 - DNA, 15 bp, Homo sapiens
atctcccagagcaaa

SEQ ID NO: 836010 - DNA, 15 bp, Homo sapiens
tatctcccagagcaa

SEQ ID NO: 836011 - DNA, 15 bp, Homo sapiens
atatctcccagagca

SEQ ID NO: 836012 - DNA, 15 bp, Homo sapiens
gatatctcccagagc

SEQ ID NO: 836013 - DNA, 15 bp, Homo sapiens
tgatatctcccagag

SEQ ID NO: 836014 - DNA, 15 bp, Homo sapiens
ttgatatctcccaga

SEQ ID NO: 836015 - DNA, 15 bp, Homo sapiens
tttgatatctcccag

SEQ ID NO: 836016 - DNA, 15 bp, Homo sapiens
atttgatatctccca

SEQ ID NO: 836017 - DNA, 15 bp, Homo sapiens
catttgatatctccc

SEQ ID NO: 836018 - DNA, 15 bp, Homo sapiens
gcatttgatatctcc

SEQ ID NO: 836019 - DNA, 15 bp, Homo sapiens
cgcatttgatatctc

SEQ ID NO: 836020 - DNA, 15 bp, Homo sapiens
tcgcatttgatatct

SEQ ID NO: 836021 - DNA, 15 bp, Homo sapiens
gtcgcatttgatatc

SEQ ID NO: 836022 - DNA, 15 bp, Homo sapiens
ggtcgcatttgatat

SEQ ID NO: 836023 - DNA, 15 bp, Homo sapiens
tggtcgcatttgata

SEQ ID NO: 836024 - DNA, 15 bp, Homo sapiens
ttggtcgcatttgat

SEQ ID NO: 836025 - DNA, 15 bp, Homo sapiens
tttggtcgcatttga

SEQ ID NO: 836026 - DNA, 15 bp, Homo sapiens
ttttggtcgcatttg

SEQ ID NO: 836027 - DNA, 15 bp, Homo sapiens
gttttggtcgcattt

SEQ ID NO: 836028 - DNA, 15 bp, Homo sapiens
tgttttggtcgcatt

SEQ ID NO: 836029 - DNA, 15 bp, Homo sapiens
ttgttttggtcgcat

SEQ ID NO: 836030 - DNA, 15 bp, Homo sapiens
cttgttttggtcgca

SEQ ID NO: 836031 - DNA, 15 bp, Homo sapiens
acttgttttggtcgc

SEQ ID NO: 836032 - DNA, 15 bp, Homo sapiens
cacttgttttggtcg

SEQ ID NO: 836033 - DNA, 15 bp, Homo sapiens
acacttgttttggtc

SEQ ID NO: 836034 - DNA, 15 bp, Homo sapiens
aacacttgttttggt

SEQ ID NO: 836035 - DNA, 15 bp, Homo sapiens
aaacacttgttttgg

SEQ ID NO: 836036 - DNA, 15 bp, Homo sapiens
caaacacttgttttg

SEQ ID NO: 836037 - DNA, 15 bp, Homo sapiens
acaaacacttgtttt

SEQ ID NO: 836038 - DNA, 15 bp, Homo sapiens
tacaaacacttgttt

SEQ ID NO: 836039 - DNA, 15 bp, Homo sapiens
ctacaaacacttgtt

SEQ ID NO: 836040 - DNA, 15 bp, Homo sapiens
tctacaaacacttgt

SEQ ID NO: 836041 - DNA, 15 bp, Homo sapiens
atctacaaacacttg

SEQ ID NO: 836042 - DNA, 15 bp, Homo sapiens
aatctacaaacactt

SEQ ID NO: 836043 - DNA, 15 bp, Homo sapiens
aaatctacaaacact

SEQ ID NO: 836044 - DNA, 15 bp, Homo sapiens
caaatctacaaacac

SEQ ID NO: 836045 - DNA, 15 bp, Homo sapiens
tcaaatctacaaaca

SEQ ID NO: 836046 - DNA, 15 bp, Homo sapiens
ttcaaatctacaaac

SEQ ID NO: 836047 - DNA, 15 bp, Homo sapiens
attcaaatctacaaa

SEQ ID NO: 836048 - DNA, 15 bp, Homo sapiens
cattcaaatctacaa

SEQ ID NO: 836049 - DNA, 15 bp, Homo sapiens
tcattcaaatctaca

SEQ ID NO: 836050 - DNA, 15 bp, Homo sapiens
atcattcaaatctac

SEQ ID NO: 836051 - DNA, 15 bp, Homo sapiens
catcattcaaatcta

SEQ ID NO: 836052 - DNA, 15 bp, Homo sapiens
tcatcattcaaatct

SEQ ID NO: 836053 - DNA, 15 bp, Homo sapiens
atcatcattcaaatc

SEQ ID NO: 836054 - DNA, 15 bp, Homo sapiens
aatcatcattcaaat

SEQ ID NO: 836055 - DNA, 15 bp, Homo sapiens
gaatcatcattcaaa

SEQ ID NO: 836056 - DNA, 15 bp, Homo sapiens
tgaatcatcattcaa

SEQ ID NO: 836057 - DNA, 15 bp, Homo sapiens
ctgaatcatcattca

SEQ ID NO: 836058 - DNA, 15 bp, Homo sapiens
gctgaatcatcattc

SEQ ID NO: 836059 - DNA, 15 bp, Homo sapiens
tgctgaatcatcatt

SEQ ID NO: 836060 - DNA, 15 bp, Homo sapiens
ctgctgaatcatcat

SEQ ID NO: 836061 - DNA, 15 bp, Homo sapiens
actgctgaatcatca

SEQ ID NO: 836062 - DNA, 15 bp, Homo sapiens
cactgctgaatcatc

SEQ ID NO: 836063 - DNA, 15 bp, Homo sapiens
acactgctgaatcat

SEQ ID NO: 836064 - DNA, 15 bp, Homo sapiens
tacactgctgaatca

SEQ ID NO: 836065 - DNA, 15 bp, Homo sapiens
ctacactgctgaatc

SEQ ID NO: 836066 - DNA, 15 bp, Homo sapiens
gctacactgctgaat

SEQ ID NO: 836067 - DNA, 15 bp, Homo sapiens
tgctacactgctgaa

SEQ ID NO: 836068 - DNA, 15 bp, Homo sapiens
ctgctacactgctga

SEQ ID NO: 836069 - DNA, 15 bp, Homo sapiens
actgctacactgctg

SEQ ID NO: 836070 - DNA, 15 bp, Homo sapiens
aactgctacactgct

SEQ ID NO: 836071 - DNA, 15 bp, Homo sapiens
gaactgctacactgc

SEQ ID NO: 836072 - DNA, 15 bp, Homo sapiens
agaactgctacactg

SEQ ID NO: 836073 - DNA, 15 bp, Homo sapiens
gagaactgctacact

SEQ ID NO: 836074 - DNA, 15 bp, Homo sapiens
tgagaactgctacac

SEQ ID NO: 836075 - DNA, 15 bp, Homo sapiens
gtgagaactgctaca

SEQ ID NO: 836076 - DNA, 15 bp, Homo sapiens
agtgagaactgctac

SEQ ID NO: 836077 - DNA, 15 bp, Homo sapiens
gagtgagaactgcta

SEQ ID NO: 836078 - DNA, 15 bp, Homo sapiens
tgagtgagaactgct

SEQ ID NO: 836079 - DNA, 15 bp, Homo sapiens
atgagtgagaactgc

SEQ ID NO: 836080 - DNA, 15 bp, Homo sapiens
aatgagtgagaactg

SEQ ID NO: 836081 - DNA, 15 bp, Homo sapiens
aaatgagtgagaact

SEQ ID NO: 836082 - DNA, 15 bp, Homo sapiens
aaaatgagtgagaac

SEQ ID NO: 836083 - DNA, 15 bp, Homo sapiens
taaaatgagtgagaa

SEQ ID NO: 836084 - DNA, 15 bp, Homo sapiens
ataaaatgagtgaga

SEQ ID NO: 836085 - DNA, 15 bp, Homo sapiens
tataaaatgagtgag

SEQ ID NO: 836086 - DNA, 15 bp, Homo sapiens
ttataaaatgagtga

SEQ ID NO: 836087 - DNA, 15 bp, Homo sapiens
attataaaatgagtg

SEQ ID NO: 836088 - DNA, 15 bp, Homo sapiens
tattataaaatgagt

SEQ ID NO: 836089 - DNA, 15 bp, Homo sapiens
ttattataaaatgag

SEQ ID NO: 836090 - DNA, 15 bp, Homo sapiens
attattataaaatga

SEQ ID NO: 836091 - DNA, 15 bp, Homo sapiens
aattattataaaatg

SEQ ID NO: 836092 - DNA, 15 bp, Homo sapiens
taattattataaaat

SEQ ID NO: 836093 - DNA, 15 bp, Homo sapiens
ttaattattataaaa

SEQ ID NO: 836094 - DNA, 15 bp, Homo sapiens
gttaattattataaa

SEQ ID NO: 836095 - DNA, 15 bp, Homo sapiens
tgttaattattataa

SEQ ID NO: 836096 - DNA, 15 bp, Homo sapiens
ttgttaattattata

SEQ ID NO: 836097 - DNA, 15 bp, Homo sapiens
gttgttaattattat

SEQ ID NO: 836098 - DNA, 15 bp, Homo sapiens
agttgttaattatta

SEQ ID NO: 836099 - DNA, 15 bp, Homo sapiens
aagttgttaattatt

SEQ ID NO: 836100 - DNA, 15 bp, Homo sapiens
taagttgttaattat

SEQ ID NO: 836101 - DNA, 15 bp, Homo sapiens
ttaagttgttaatta

SEQ ID NO: 836102 - DNA, 15 bp, Homo sapiens
attaagttgttaatt

SEQ ID NO: 836103 - DNA, 15 bp, Homo sapiens
tattaagttgttaat

SEQ ID NO: 836104 - DNA, 15 bp, Homo sapiens
ttattaagttgttaa

SEQ ID NO: 836105 - DNA, 15 bp, Homo sapiens
attattaagttgtta

SEQ ID NO: 836106 - DNA, 15 bp, Homo sapiens
aattattaagttgtt

SEQ ID NO: 836107 - DNA, 15 bp, Homo sapiens
taattattaagttgt

SEQ ID NO: 836108 - DNA, 15 bp, Homo sapiens
ttaattattaagttg

SEQ ID NO: 836109 - DNA, 15 bp, Homo sapiens
attaattattaagtt

SEQ ID NO: 836110 - DNA, 15 bp, Homo sapiens
aattaattattaagt

SEQ ID NO: 836111 - DNA, 15 bp, Homo sapiens
taattaattattaag

SEQ ID NO: 836112 - DNA, 15 bp, Homo sapiens
ataattaattattaa

SEQ ID NO: 836113 - DNA, 15 bp, Homo sapiens
aataattaattatta

SEQ ID NO: 836114 - DNA, 15 bp, Homo sapiens
taataattaattatt

SEQ ID NO: 836115 - DNA, 15 bp, Homo sapiens
ttaataattaattat

SEQ ID NO: 836116 - DNA, 15 bp, Homo sapiens
tttaataattaatta

SEQ ID NO: 836117 - DNA, 15 bp, Homo sapiens
gtttaataattaatt

SEQ ID NO: 836118 - DNA, 15 bp, Homo sapiens
agtttaataattaat

SEQ ID NO: 836119 - DNA, 15 bp, Homo sapiens
gagtttaataattaa

SEQ ID NO: 836120 - DNA, 15 bp, Homo sapiens
ggagtttaataatta

SEQ ID NO: 836121 - DNA, 15 bp, Homo sapiens
aggagtttaataatt

SEQ ID NO: 836122 - DNA, 15 bp, Homo sapiens
taggagtttaataat

SEQ ID NO: 836123 - DNA, 15 bp, Homo sapiens
gtaggagtttaataa

SEQ ID NO: 836124 - DNA, 15 bp, Homo sapiens
tgtaggagtttaata

SEQ ID NO: 836125 - DNA, 15 bp, Homo sapiens
atgtaggagtttaat

SEQ ID NO: 836126 - DNA, 15 bp, Homo sapiens
catgtaggagtttaa

SEQ ID NO: 836127 - DNA, 15 bp, Homo sapiens
gcatgtaggagttta

SEQ ID NO: 836128 - DNA, 15 bp, Homo sapiens
agcatgtaggagttt

SEQ ID NO: 836129 - DNA, 15 bp, Homo sapiens
aagcatgtaggagtt

SEQ ID NO: 836130 - DNA, 15 bp, Homo sapiens
taagcatgtaggagt

SEQ ID NO: 836131 - DNA, 15 bp, Homo sapiens
ttaagcatgtaggag

SEQ ID NO: 836132 - DNA, 15 bp, Homo sapiens
gttaagcatgtagga

SEQ ID NO: 836133 - DNA, 15 bp, Homo sapiens
tgttaagcatgtagg

SEQ ID NO: 836134 - DNA, 15 bp, Homo sapiens
atgttaagcatgtag

SEQ ID NO: 836135 - DNA, 15 bp, Homo sapiens
aatgttaagcatgta

SEQ ID NO: 836136 - DNA, 15 bp, Homo sapiens
taatgttaagcatgt

SEQ ID NO: 836137 - DNA, 15 bp, Homo sapiens
ataatgttaagcatg

SEQ ID NO: 836138 - DNA, 15 bp, Homo sapiens
tataatgttaagcat

SEQ ID NO: 836139 - DNA, 15 bp, Homo sapiens
ttataatgttaagca

SEQ ID NO: 836140 - DNA, 15 bp, Homo sapiens
cttataatgttaagc

SEQ ID NO: 836141 - DNA, 15 bp, Homo sapiens
acttataatgttaag

SEQ ID NO: 836142 - DNA, 15 bp, Homo sapiens
tacttataatgttaa

SEQ ID NO: 836143 - DNA, 15 bp, Homo sapiens
atacttataatgtta

SEQ ID NO: 836144 - DNA, 15 bp, Homo sapiens
catacttataatgtt

SEQ ID NO: 836145 - DNA, 15 bp, Homo sapiens
tcatacttataatgt

SEQ ID NO: 836146 - DNA, 15 bp, Homo sapiens
atcatacttataatg

SEQ ID NO: 836147 - DNA, 15 bp, Homo sapiens
tatcatacttataat

SEQ ID NO: 836148 - DNA, 15 bp, Homo sapiens
ttatcatacttataa

SEQ ID NO: 836149 - DNA, 15 bp, Homo sapiens
gttatcatacttata

SEQ ID NO: 836150 - DNA, 15 bp, Homo sapiens
agttatcatacttat

SEQ ID NO: 836151 - DNA, 15 bp, Homo sapiens
aagttatcatactta

SEQ ID NO: 836152 - DNA, 15 bp, Homo sapiens
gaagttatcatactt

SEQ ID NO: 836153 - DNA, 15 bp, Homo sapiens
agaagttatcatact

SEQ ID NO: 836154 - DNA, 15 bp, Homo sapiens
cagaagttatcatac

SEQ ID NO: 836155 - DNA, 15 bp, Homo sapiens
acagaagttatcata

SEQ ID NO: 836156 - DNA, 15 bp, Homo sapiens
cacagaagttatcat

SEQ ID NO: 836157 - DNA, 15 bp, Homo sapiens
ccacagaagttatca

SEQ ID NO: 836158 - DNA, 15 bp, Homo sapiens
accacagaagttatc

SEQ ID NO: 836159 - DNA, 15 bp, Homo sapiens
aaccacagaagttat

SEQ ID NO: 836160 - DNA, 15 bp, Homo sapiens
taaccacagaagtta

SEQ ID NO: 836161 - DNA, 15 bp, Homo sapiens
gtaaccacagaagtt

SEQ ID NO: 836162 - DNA, 15 bp, Homo sapiens
tgtaaccacagaagt

SEQ ID NO: 836163 - DNA, 15 bp, Homo sapiens
atgtaaccacagaag

SEQ ID NO: 836164 - DNA, 15 bp, Homo sapiens
tatgtaaccacagaa

SEQ ID NO: 836165 - DNA, 15 bp, Homo sapiens
ttatgtaaccacaga

SEQ ID NO: 836166 - DNA, 15 bp, Homo sapiens
tttatgtaaccacag

SEQ ID NO: 836167 - DNA, 15 bp, Homo sapiens
ttttatgtaaccaca

SEQ ID NO: 836168 - DNA, 15 bp, Homo sapiens
cttttatgtaaccac

SEQ ID NO: 836169 - DNA, 15 bp, Homo sapiens
tcttttatgtaacca

SEQ ID NO: 836170 - DNA, 15 bp, Homo sapiens
atcttttatgtaacc

SEQ ID NO: 836171 - DNA, 15 bp, Homo sapiens
tatcttttatgtaac

SEQ ID NO: 836172 - DNA, 15 bp, Homo sapiens
atatcttttatgtaa

SEQ ID NO: 836173 - DNA, 15 bp, Homo sapiens
tatatcttttatgta

SEQ ID NO: 836174 - DNA, 15 bp, Homo sapiens
gtatatcttttatgt

SEQ ID NO: 836175 - DNA, 15 bp, Homo sapiens
tgtatatcttttatg

SEQ ID NO: 836176 - DNA, 15 bp, Homo sapiens
atgtatatcttttat

SEQ ID NO: 836177 - DNA, 15 bp, Homo sapiens
tatgtatatctttta

SEQ ID NO: 836178 - DNA, 15 bp, Homo sapiens
ctatgtatatctttt

SEQ ID NO: 836179 - DNA, 15 bp, Homo sapiens
gctatgtatatcttt

SEQ ID NO: 836180 - DNA, 15 bp, Homo sapiens
tgctatgtatatctt

SEQ ID NO: 836181 - DNA, 15 bp, Homo sapiens
gtgctatgtatatct

SEQ ID NO: 836182 - DNA, 15 bp, Homo sapiens
agtgctatgtatatc

SEQ ID NO: 836183 - DNA, 15 bp, Homo sapiens
aagtgctatgtatat

SEQ ID NO: 836184 - DNA, 15 bp, Homo sapiens
caagtgctatgtata

SEQ ID NO: 836185 - DNA, 15 bp, Homo sapiens
acaagtgctatgtat

SEQ ID NO: 836186 - DNA, 15 bp, Homo sapiens
gacaagtgctatgta

SEQ ID NO: 836187 - DNA, 15 bp, Homo sapiens
ggacaagtgctatgt

SEQ ID NO: 836188 - DNA, 15 bp, Homo sapiens
aggacaagtgctatg

SEQ ID NO: 836189 - DNA, 15 bp, Homo sapiens
aaggacaagtgctat

SEQ ID NO: 836190 - DNA, 15 bp, Homo sapiens
caaggacaagtgcta

SEQ ID NO: 836191 - DNA, 15 bp, Homo sapiens
tcaaggacaagtgct

SEQ ID NO: 836192 - DNA, 15 bp, Homo sapiens
atcaaggacaagtgc

SEQ ID NO: 836193 - DNA, 15 bp, Homo sapiens
gatcaaggacaagtg

SEQ ID NO: 836194 - DNA, 15 bp, Homo sapiens
agatcaaggacaagt

SEQ ID NO: 836195 - DNA, 15 bp, Homo sapiens
cagatcaaggacaag

SEQ ID NO: 836196 - DNA, 15 bp, Homo sapiens
acagatcaaggacaa

SEQ ID NO: 836197 - DNA, 15 bp, Homo sapiens
gacagatcaaggaca

SEQ ID NO: 836198 - DNA, 15 bp, Homo sapiens
tgacagatcaaggac

SEQ ID NO: 836199 - DNA, 15 bp, Homo sapiens
gtgacagatcaagga

SEQ ID NO: 836200 - DNA, 15 bp, Homo sapiens
tgtgacagatcaagg

SEQ ID NO: 836201 - DNA, 15 bp, Homo sapiens
ctgtgacagatcaag

SEQ ID NO: 836202 - DNA, 15 bp, Homo sapiens
actgtgacagatcaa

SEQ ID NO: 836203 - DNA, 15 bp, Homo sapiens
cactgtgacagatca

SEQ ID NO: 836204 - DNA, 15 bp, Homo sapiens
tcactgtgacagatc

SEQ ID NO: 836205 - DNA, 15 bp, Homo sapiens
ctcactgtgacagat

SEQ ID NO: 836206 - DNA, 15 bp, Homo sapiens
cctcactgtgacaga

SEQ ID NO: 836207 - DNA, 15 bp, Homo sapiens
acctcactgtgacag

SEQ ID NO: 836208 - DNA, 15 bp, Homo sapiens
gacctcactgtgaca

SEQ ID NO: 836209 - DNA, 15 bp, Homo sapiens
ggacctcactgtgac

SEQ ID NO: 836210 - DNA, 15 bp, Homo sapiens
gggacctcactgtga

SEQ ID NO: 836211 - DNA, 15 bp, Homo sapiens
tgggacctcactgtg

SEQ ID NO: 836212 - DNA, 15 bp, Homo sapiens
ttgggacctcactgt

SEQ ID NO: 836213 - DNA, 15 bp, Homo sapiens
attgggacctcactg

SEQ ID NO: 836214 - DNA, 15 bp, Homo sapiens
gattgggacctcact

SEQ ID NO: 836215 - DNA, 15 bp, Homo sapiens
ggattgggacctcac

SEQ ID NO: 836216 - DNA, 15 bp, Homo sapiens
tggattgggacctca

SEQ ID NO: 836217 - DNA, 15 bp, Homo sapiens
ttggattgggacctc

SEQ ID NO: 836218 - DNA, 15 bp, Homo sapiens
gttggattgggacct

SEQ ID NO: 836219 - DNA, 15 bp, Homo sapiens
ggttggattgggacc

SEQ ID NO: 836220 - DNA, 15 bp, Homo sapiens
aggttggattgggac

SEQ ID NO: 836221 - DNA, 15 bp, Homo sapiens
taggttggattggga

SEQ ID NO: 836222 - DNA, 15 bp, Homo sapiens
ataggttggattggg

SEQ ID NO: 836223 - DNA, 15 bp, Homo sapiens
cataggttggattgg

SEQ ID NO: 836224 - DNA, 15 bp, Homo sapiens
tcataggttggattg

SEQ ID NO: 836225 - DNA, 15 bp, Homo sapiens
ctcataggttggatt

SEQ ID NO: 836226 - DNA, 15 bp, Homo sapiens
gctcataggttggat

SEQ ID NO: 836227 - DNA, 15 bp, Homo sapiens
agctcataggttgga

SEQ ID NO: 836228 - DNA, 15 bp, Homo sapiens
aagctcataggttgg

SEQ ID NO: 836229 - DNA, 15 bp, Homo sapiens
gaagctcataggttg

SEQ ID NO: 836230 - DNA, 15 bp, Homo sapiens
tgaagctcataggtt

SEQ ID NO: 836231 - DNA, 15 bp, Homo sapiens
ttgaagctcataggt

SEQ ID NO: 836232 - DNA, 15 bp, Homo sapiens
tttgaagctcatagg

SEQ ID NO: 836233 - DNA, 15 bp, Homo sapiens
atttgaagctcatag

SEQ ID NO: 836234 - DNA, 15 bp, Homo sapiens
catttgaagctcata

SEQ ID NO: 836235 - DNA, 15 bp, Homo sapiens
tcatttgaagctcat

SEQ ID NO: 836236 - DNA, 15 bp, Homo sapiens
ttcatttgaagctca

SEQ ID NO: 836237 - DNA, 15 bp, Homo sapiens
tttcatttgaagctc

SEQ ID NO: 836238 - DNA, 15 bp, Homo sapiens
ttttcatttgaagct

SEQ ID NO: 836239 - DNA, 15 bp, Homo sapiens
cttttcatttgaagc

SEQ ID NO: 836240 - DNA, 15 bp, Homo sapiens
acttttcatttgaag

SEQ ID NO: 836241 - DNA, 15 bp, Homo sapiens
aacttttcatttgaa

SEQ ID NO: 836242 - DNA, 15 bp, Homo sapiens
gaacttttcatttga

SEQ ID NO: 836243 - DNA, 15 bp, Homo sapiens
tgaacttttcatttg

SEQ ID NO: 836244 - DNA, 15 bp, Homo sapiens
ttgaacttttcattt

SEQ ID NO: 836245 - DNA, 15 bp, Homo sapiens
tttgaacttttcatt

SEQ ID NO: 836246 - DNA, 15 bp, Homo sapiens
ttttgaacttttcat

SEQ ID NO: 836247 - DNA, 15 bp, Homo sapiens
attttgaacttttca

SEQ ID NO: 836248 - DNA, 15 bp, Homo sapiens
aattttgaacttttc

SEQ ID NO: 836249 - DNA, 15 bp, Homo sapiens
taattttgaactttt

SEQ ID NO: 836250 - DNA, 15 bp, Homo sapiens
gtaattttgaacttt

SEQ ID NO: 836251 - DNA, 15 bp, Homo sapiens
tgtaattttgaactt

SEQ ID NO: 836252 - DNA, 15 bp, Homo sapiens
gtgtaattttgaact

SEQ ID NO: 836253 - DNA, 15 bp, Homo sapiens
agtgtaattttgaac

SEQ ID NO: 836254 - DNA, 15 bp, Homo sapiens
gagtgtaattttgaa

SEQ ID NO: 836255 - DNA, 15 bp, Homo sapiens
tgagtgtaattttga

SEQ ID NO: 836256 - DNA, 15 bp, Homo sapiens
atgagtgtaattttg

SEQ ID NO: 836257 - DNA, 15 bp, Homo sapiens
aatgagtgtaatttt

SEQ ID NO: 836258 - DNA, 15 bp, Homo sapiens
caatgagtgtaattt

SEQ ID NO: 836259 - DNA, 15 bp, Homo sapiens
acaatgagtgtaatt

SEQ ID NO: 836260 - DNA, 15 bp, Homo sapiens
gacaatgagtgtaat

SEQ ID NO: 836261 - DNA, 15 bp, Homo sapiens
tgacaatgagtgtaa

SEQ ID NO: 836262 - DNA, 15 bp, Homo sapiens
atgacaatgagtgta

SEQ ID NO: 836263 - DNA, 15 bp, Homo sapiens
tatgacaatgagtgt

SEQ ID NO: 836264 - DNA, 15 bp, Homo sapiens
ttatgacaatgagtg

SEQ ID NO: 836265 - DNA, 15 bp, Homo sapiens
cttatgacaatgagt

SEQ ID NO: 836266 - DNA, 15 bp, Homo sapiens
acttatgacaatgag

SEQ ID NO: 836267 - DNA, 15 bp, Homo sapiens
gacttatgacaatga

SEQ ID NO: 836268 - DNA, 15 bp, Homo sapiens
tgacttatgacaatg

SEQ ID NO: 836269 - DNA, 15 bp, Homo sapiens
ctgacttatgacaat

SEQ ID NO: 836270 - DNA, 15 bp, Homo sapiens
tctgacttatgacaa

SEQ ID NO: 836271 - DNA, 15 bp, Homo sapiens
ctctgacttatgaca

SEQ ID NO: 836272 - DNA, 15 bp, Homo sapiens
tctctgacttatgac

SEQ ID NO: 836273 - DNA, 15 bp, Homo sapiens
atctctgacttatga

SEQ ID NO: 836274 - DNA, 15 bp, Homo sapiens
gatctctgacttatg

SEQ ID NO: 836275 - DNA, 15 bp, Homo sapiens
tgatctctgacttat

SEQ ID NO: 836276 - DNA, 15 bp, Homo sapiens
ttgatctctgactta

SEQ ID NO: 836277 - DNA, 15 bp, Homo sapiens
tttgatctctgactt

SEQ ID NO: 836278 - DNA, 15 bp, Homo sapiens
ctttgatctctgact

SEQ ID NO: 836279 - DNA, 15 bp, Homo sapiens
cctttgatctctgac

SEQ ID NO: 836280 - DNA, 15 bp, Homo sapiens
tcctttgatctctga

SEQ ID NO: 836281 - DNA, 15 bp, Homo sapiens
ttcctttgatctctg

SEQ ID NO: 836282 - DNA, 15 bp, Homo sapiens
cttcctttgatctct

SEQ ID NO: 836283 - DNA, 15 bp, Homo sapiens
tcttcctttgatctc

SEQ ID NO: 836284 - DNA, 15 bp, Homo sapiens
ttcttcctttgatct

SEQ ID NO: 836285 - DNA, 15 bp, Homo sapiens
tttcttcctttgatc

SEQ ID NO: 836286 - DNA, 15 bp, Homo sapiens
ctttcttcctttgat

SEQ ID NO: 836287 - DNA, 15 bp, Homo sapiens
cctttcttcctttga

SEQ ID NO: 836288 - DNA, 15 bp, Homo sapiens
tcctttcttcctttg

SEQ ID NO: 836289 - DNA, 15 bp, Homo sapiens
atcctttcttccttt

SEQ ID NO: 836290 - DNA, 15 bp, Homo sapiens
aatcctttcttcctt

SEQ ID NO: 836291 - DNA, 15 bp, Homo sapiens
aaatcctttcttcct

SEQ ID NO: 836292 - DNA, 15 bp, Homo sapiens
taaatcctttcttcc

SEQ ID NO: 836293 - DNA, 15 bp, Homo sapiens
ttaaatcctttcttc

SEQ ID NO: 836294 - DNA, 15 bp, Homo sapiens
gttaaatcctttctt

SEQ ID NO: 836295 - DNA, 15 bp, Homo sapiens
ggttaaatcctttct

SEQ ID NO: 836296 - DNA, 15 bp, Homo sapiens
tggttaaatcctttc

SEQ ID NO: 836297 - DNA, 15 bp, Homo sapiens
ttggttaaatccttt

SEQ ID NO: 836298 - DNA, 15 bp, Homo sapiens
tttggttaaatcctt

SEQ ID NO: 836299 - DNA, 15 bp, Homo sapiens
ttttggttaaatcct

SEQ ID NO: 836300 - DNA, 15 bp, Homo sapiens
attttggttaaatcc

SEQ ID NO: 836301 - DNA, 15 bp, Homo sapiens
cattttggttaaatc

SEQ ID NO: 836302 - DNA, 15 bp, Homo sapiens
tcattttggttaaat

SEQ ID NO: 836303 - DNA, 15 bp, Homo sapiens
atcattttggttaaa

SEQ ID NO: 836304 - DNA, 15 bp, Homo sapiens
tatcattttggttaa

SEQ ID NO: 836305 - DNA, 15 bp, Homo sapiens
ttatcattttggtta

SEQ ID NO: 836306 - DNA, 15 bp, Homo sapiens
tttatcattttggtt

SEQ ID NO: 836307 - DNA, 15 bp, Homo sapiens
atttatcattttggt

SEQ ID NO: 836308 - DNA, 15 bp, Homo sapiens
aatttatcattttgg

SEQ ID NO: 836309 - DNA, 15 bp, Homo sapiens
taatttatcattttg

SEQ ID NO: 836310 - DNA, 15 bp, Homo sapiens
ttaatttatcatttt

SEQ ID NO: 836311 - DNA, 15 bp, Homo sapiens
tttaatttatcattt

SEQ ID NO: 836312 - DNA, 15 bp, Homo sapiens
atttaatttatcatt

SEQ ID NO: 836313 - DNA, 15 bp, Homo sapiens
tatttaatttatcat

SEQ ID NO: 836314 - DNA, 15 bp, Homo sapiens
atatttaatttatca

SEQ ID NO: 836315 - DNA, 15 bp, Homo sapiens
tatatttaatttatc

SEQ ID NO: 836316 - DNA, 15 bp, Homo sapiens
ctatatttaatttat

SEQ ID NO: 836317 - DNA, 15 bp, Homo sapiens
cctatatttaattta

SEQ ID NO: 836318 - DNA, 15 bp, Homo sapiens
acctatatttaattt

SEQ ID NO: 836319 - DNA, 15 bp, Homo sapiens
cacctatatttaatt

SEQ ID NO: 836320 - DNA, 15 bp, Homo sapiens
tcacctatatttaat

SEQ ID NO: 836321 - DNA, 15 bp, Homo sapiens
atcacctatatttaa

SEQ ID NO: 836322 - DNA, 15 bp, Homo sapiens
aatcacctatattta

SEQ ID NO: 836323 - DNA, 15 bp, Homo sapiens
taatcacctatattt

SEQ ID NO: 836324 - DNA, 15 bp, Homo sapiens
ttaatcacctatatt

SEQ ID NO: 836325 - DNA, 15 bp, Homo sapiens
tttaatcacctatat

SEQ ID NO: 836326 - DNA, 15 bp, Homo sapiens
atttaatcacctata

SEQ ID NO: 836327 - DNA, 15 bp, Homo sapiens
tatttaatcacctat

SEQ ID NO: 836328 - DNA, 15 bp, Homo sapiens
atatttaatcaccta

SEQ ID NO: 836329 - DNA, 15 bp, Homo sapiens
tatatttaatcacct

SEQ ID NO: 836330 - DNA, 15 bp, Homo sapiens
ctatatttaatcacc

SEQ ID NO: 836331 - DNA, 15 bp, Homo sapiens
actatatttaatcac

SEQ ID NO: 836332 - DNA, 15 bp, Homo sapiens
gactatatttaatca

SEQ ID NO: 836333 - DNA, 15 bp, Homo sapiens
tgactatatttaatc

SEQ ID NO: 836334 - DNA, 15 bp, Homo sapiens
atgactatatttaat

SEQ ID NO: 836335 - DNA, 15 bp, Homo sapiens
catgactatatttaa

SEQ ID NO: 836336 - DNA, 15 bp, Homo sapiens
ccatgactatattta

SEQ ID NO: 836337 - DNA, 15 bp, Homo sapiens
accatgactatattt

SEQ ID NO: 836338 - DNA, 15 bp, Homo sapiens
aaccatgactatatt

SEQ ID NO: 836339 - DNA, 15 bp, Homo sapiens
gaaccatgactatat

SEQ ID NO: 836340 - DNA, 15 bp, Homo sapiens
tgaaccatgactata

SEQ ID NO: 836341 - DNA, 15 bp, Homo sapiens
ttgaaccatgactat

SEQ ID NO: 836342 - DNA, 15 bp, Homo sapiens
cttgaaccatgacta

SEQ ID NO: 836343 - DNA, 15 bp, Homo sapiens
ccttgaaccatgact

SEQ ID NO: 836344 - DNA, 15 bp, Homo sapiens
gccttgaaccatgac

SEQ ID NO: 836345 - DNA, 15 bp, Homo sapiens
tgccttgaaccatga

SEQ ID NO: 836346 - DNA, 15 bp, Homo sapiens
atgccttgaaccatg

SEQ ID NO: 836347 - DNA, 15 bp, Homo sapiens
catgccttgaaccat

SEQ ID NO: 836348 - DNA, 15 bp, Homo sapiens
ccatgccttgaacca

SEQ ID NO: 836349 - DNA, 15 bp, Homo sapiens
cccatgccttgaacc

SEQ ID NO: 836350 - DNA, 15 bp, Homo sapiens
gcccatgccttgaac

SEQ ID NO: 836351 - DNA, 15 bp, Homo sapiens
ggcccatgccttgaa

SEQ ID NO: 836352 - DNA, 15 bp, Homo sapiens
tggcccatgccttga

SEQ ID NO: 836353 - DNA, 15 bp, Homo sapiens
ctggcccatgccttg

SEQ ID NO: 836354 - DNA, 15 bp, Homo sapiens
actggcccatgcctt

SEQ ID NO: 836355 - DNA, 15 bp, Homo sapiens
aactggcccatgcct

SEQ ID NO: 836356 - DNA, 15 bp, Homo sapiens
taactggcccatgcc

SEQ ID NO: 836357 - DNA, 15 bp, Homo sapiens
ctaactggcccatgc

SEQ ID NO: 836358 - DNA, 15 bp, Homo sapiens
cctaactggcccatg

SEQ ID NO: 836359 - DNA, 15 bp, Homo sapiens
ccctaactggcccat

SEQ ID NO: 836360 - DNA, 15 bp, Homo sapiens
tccctaactggccca

SEQ ID NO: 836361 - DNA, 15 bp, Homo sapiens
ctccctaactggccc

SEQ ID NO: 836362 - DNA, 15 bp, Homo sapiens
actccctaactggcc

SEQ ID NO: 836363 - DNA, 15 bp, Homo sapiens
cactccctaactggc

SEQ ID NO: 836364 - DNA, 15 bp, Homo sapiens
acactccctaactgg

SEQ ID NO: 836365 - DNA, 15 bp, Homo sapiens
cacactccctaactg

SEQ ID NO: 836366 - DNA, 15 bp, Homo sapiens
tcacactccctaact

SEQ ID NO: 836367 - DNA, 15 bp, Homo sapiens
atcacactccctaac

SEQ ID NO: 836368 - DNA, 15 bp, Homo sapiens
catcacactccctaa

SEQ ID NO: 836369 - DNA, 15 bp, Homo sapiens
acatcacactcccta

SEQ ID NO: 836370 - DNA, 15 bp, Homo sapiens
cacatcacactccct

SEQ ID NO: 836371 - DNA, 15 bp, Homo sapiens
ccacatcacactccc

SEQ ID NO: 836372 - DNA, 15 bp, Homo sapiens
cccacatcacactcc

SEQ ID NO: 836373 - DNA, 15 bp, Homo sapiens
acccacatcacactc

SEQ ID NO: 836374 - DNA, 15 bp, Homo sapiens
tacccacatcacact

SEQ ID NO: 836375 - DNA, 15 bp, Homo sapiens
ttacccacatcacac

SEQ ID NO: 836376 - DNA, 15 bp, Homo sapiens
attacccacatcaca

SEQ ID NO: 836377 - DNA, 15 bp, Homo sapiens
aattacccacatcac

SEQ ID NO: 836378 - DNA, 15 bp, Homo sapiens
taattacccacatca

SEQ ID NO: 836379 - DNA, 15 bp, Homo sapiens
ataattacccacatc

SEQ ID NO: 836380 - DNA, 15 bp, Homo sapiens
cataattacccacat

SEQ ID NO: 836381 - DNA, 15 bp, Homo sapiens
tcataattacccaca

SEQ ID NO: 836382 - DNA, 15 bp, Homo sapiens
ttcataattacccac

SEQ ID NO: 836383 - DNA, 15 bp, Homo sapiens
tttcataattaccca

SEQ ID NO: 836384 - DNA, 15 bp, Homo sapiens
ctttcataattaccc

SEQ ID NO: 836385 - DNA, 15 bp, Homo sapiens
cctttcataattacc

SEQ ID NO: 836386 - DNA, 15 bp, Homo sapiens
gcctttcataattac

SEQ ID NO: 836387 - DNA, 15 bp, Homo sapiens
ggcctttcataatta

SEQ ID NO: 836388 - DNA, 15 bp, Homo sapiens
tggcctttcataatt

SEQ ID NO: 836389 - DNA, 15 bp, Homo sapiens
ctggcctttcataat

SEQ ID NO: 836390 - DNA, 15 bp, Homo sapiens
gctggcctttcataa

SEQ ID NO: 836391 - DNA, 15 bp, Homo sapiens
agctggcctttcata

SEQ ID NO: 836392 - DNA, 15 bp, Homo sapiens
gagctggcctttcat

SEQ ID NO: 836393 - DNA, 15 bp, Homo sapiens
ggagctggcctttca

SEQ ID NO: 836394 - DNA, 15 bp, Homo sapiens
gggagctggcctttc

SEQ ID NO: 836395 - DNA, 15 bp, Homo sapiens
tgggagctggccttt

SEQ ID NO: 836396 - DNA, 15 bp, Homo sapiens
ttgggagctggcctt

SEQ ID NO: 836397 - DNA, 15 bp, Homo sapiens
cttgggagctggcct

SEQ ID NO: 836398 - DNA, 15 bp, Homo sapiens
gcttgggagctggcc

SEQ ID NO: 836399 - DNA, 15 bp, Homo sapiens
ggcttgggagctggc

SEQ ID NO: 836400 - DNA, 15 bp, Homo sapiens
gggcttgggagctgg

SEQ ID NO: 836401 - DNA, 15 bp, Homo sapiens
agggcttgggagctg

SEQ ID NO: 836402 - DNA, 15 bp, Homo sapiens
cagggcttgggagct

SEQ ID NO: 836403 - DNA, 15 bp, Homo sapiens
acagggcttgggagc

SEQ ID NO: 836404 - DNA, 15 bp, Homo sapiens
aacagggcttgggag

SEQ ID NO: 836405 - DNA, 15 bp, Homo sapiens
caacagggcttggga

SEQ ID NO: 836406 - DNA, 15 bp, Homo sapiens
acaacagggcttggg

SEQ ID NO: 836407 - DNA, 15 bp, Homo sapiens
aacaacagggcttgg

SEQ ID NO: 836408 - DNA, 15 bp, Homo sapiens
caacaacagggcttg

SEQ ID NO: 836409 - DNA, 15 bp, Homo sapiens
gcaacaacagggctt

SEQ ID NO: 836410 - DNA, 15 bp, Homo sapiens
agcaacaacagggct

SEQ ID NO: 836411 - DNA, 15 bp, Homo sapiens
tagcaacaacagggc

SEQ ID NO: 836412 - DNA, 15 bp, Homo sapiens
gtagcaacaacaggg

SEQ ID NO: 836413 - DNA, 15 bp, Homo sapiens
agtagcaacaacagg

SEQ ID NO: 836414 - DNA, 15 bp, Homo sapiens
gagtagcaacaacag

SEQ ID NO: 836415 - DNA, 15 bp, Homo sapiens
ggagtagcaacaaca

SEQ ID NO: 836416 - DNA, 15 bp, Homo sapiens
gggagtagcaacaac

SEQ ID NO: 836417 - DNA, 15 bp, Homo sapiens
ggggagtagcaacaa

SEQ ID NO: 836418 - DNA, 15 bp, Homo sapiens
gggggagtagcaaca

SEQ ID NO: 836419 - DNA, 15 bp, Homo sapiens
tgggggagtagcaac

SEQ ID NO: 836420 - DNA, 15 bp, Homo sapiens
gtgggggagtagcaa

SEQ ID NO: 836421 - DNA, 15 bp, Homo sapiens
tgtgggggagtagca

SEQ ID NO: 836422 - DNA, 15 bp, Homo sapiens
atgtgggggagtagc

SEQ ID NO: 836423 - DNA, 15 bp, Homo sapiens
gatgtgggggagtag

SEQ ID NO: 836424 - DNA, 15 bp, Homo sapiens
tgatgtgggggagta

SEQ ID NO: 836425 - DNA, 15 bp, Homo sapiens
ctgatgtgggggagt

SEQ ID NO: 836426 - DNA, 15 bp, Homo sapiens
actgatgtgggggag

SEQ ID NO: 836427 - DNA, 15 bp, Homo sapiens
gactgatgtggggga

SEQ ID NO: 836428 - DNA, 15 bp, Homo sapiens
tgactgatgtggggg

SEQ ID NO: 836429 - DNA, 15 bp, Homo sapiens
atgactgatgtgggg

SEQ ID NO: 836430 - DNA, 15 bp, Homo sapiens
gatgactgatgtggg

SEQ ID NO: 836431 - DNA, 15 bp, Homo sapiens
ggatgactgatgtgg

SEQ ID NO: 836432 - DNA, 15 bp, Homo sapiens
aggatgactgatgtg

SEQ ID NO: 836433 - DNA, 15 bp, Homo sapiens
aaggatgactgatgt

SEQ ID NO: 836434 - DNA, 15 bp, Homo sapiens
gaaggatgactgatg

SEQ ID NO: 836435 - DNA, 15 bp, Homo sapiens
ggaaggatgactgat

SEQ ID NO: 836436 - DNA, 15 bp, Homo sapiens
aggaaggatgactga

SEQ ID NO: 836437 - DNA, 15 bp, Homo sapiens
aaggaaggatgactg

SEQ ID NO: 836438 - DNA, 15 bp, Homo sapiens
aaaggaaggatgact

SEQ ID NO: 836439 - DNA, 15 bp, Homo sapiens
aaaaggaaggatgac

SEQ ID NO: 836440 - DNA, 15 bp, Homo sapiens
aaaaaggaaggatga

SEQ ID NO: 836441 - DNA, 15 bp, Homo sapiens
aaaaaaggaaggatg

SEQ ID NO: 836442 - DNA, 15 bp, Homo sapiens
aaaaaaaggaaggat

SEQ ID NO: 836443 - DNA, 15 bp, Homo sapiens
gaaaaaaaggaagga

SEQ ID NO: 836444 - DNA, 15 bp, Homo sapiens
agaaaaaaaggaagg

SEQ ID NO: 836445 - DNA, 15 bp, Homo sapiens
tagaaaaaaaggaag

SEQ ID NO: 836446 - DNA, 15 bp, Homo sapiens
gtagaaaaaaaggaa

SEQ ID NO: 836447 - DNA, 15 bp, Homo sapiens
agtagaaaaaaagga

SEQ ID NO: 836448 - DNA, 15 bp, Homo sapiens
aagtagaaaaaaagg

SEQ ID NO: 836449 - DNA, 15 bp, Homo sapiens
gaagtagaaaaaaag

SEQ ID NO: 836450 - DNA, 15 bp, Homo sapiens
agaagtagaaaaaaa

SEQ ID NO: 836451 - DNA, 15 bp, Homo sapiens
tagaagtagaaaaaa

SEQ ID NO: 836452 - DNA, 15 bp, Homo sapiens
gtagaagtagaaaaa

SEQ ID NO: 836453 - DNA, 15 bp, Homo sapiens
agtagaagtagaaaa

SEQ ID NO: 836454 - DNA, 15 bp, Homo sapiens
cagtagaagtagaaa

SEQ ID NO: 836455 - DNA, 15 bp, Homo sapiens
gcagtagaagtagaa

SEQ ID NO: 836456 - DNA, 15 bp, Homo sapiens
tgcagtagaagtaga

SEQ ID NO: 836457 - DNA, 15 bp, Homo sapiens
ctgcagtagaagtag

SEQ ID NO: 836458 - DNA, 15 bp, Homo sapiens
actgcagtagaagta

SEQ ID NO: 836459 - DNA, 15 bp, Homo sapiens
cactgcagtagaagt

SEQ ID NO: 836460 - DNA, 15 bp, Homo sapiens
gcactgcagtagaag

SEQ ID NO: 836461 - DNA, 15 bp, Homo sapiens
ggcactgcagtagaa

SEQ ID NO: 836462 - DNA, 15 bp, Homo sapiens
aggcactgcagtaga

SEQ ID NO: 836463 - DNA, 15 bp, Homo sapiens
aaggcactgcagtag

SEQ ID NO: 836464 - DNA, 15 bp, Homo sapiens
gaaggcactgcagta

SEQ ID NO: 836465 - DNA, 15 bp, Homo sapiens
ggaaggcactgcagt

SEQ ID NO: 836466 - DNA, 15 bp, Homo sapiens
aggaaggcactgcag

SEQ ID NO: 836467 - DNA, 15 bp, Homo sapiens
gaggaaggcactgca

SEQ ID NO: 836468 - DNA, 15 bp, Homo sapiens
tgaggaaggcactgc

SEQ ID NO: 836469 - DNA, 15 bp, Homo sapiens
atgaggaaggcactg

SEQ ID NO: 836470 - DNA, 15 bp, Homo sapiens
gatgaggaaggcact

SEQ ID NO: 836471 - DNA, 15 bp, Homo sapiens
agatgaggaaggcac

SEQ ID NO: 836472 - DNA, 15 bp, Homo sapiens
aagatgaggaaggca

SEQ ID NO: 836473 - DNA, 15 bp, Homo sapiens
aaagatgaggaaggc

SEQ ID NO: 836474 - DNA, 15 bp, Homo sapiens
aaaagatgaggaagg

SEQ ID NO: 836475 - DNA, 15 bp, Homo sapiens
gaaaagatgaggaag

SEQ ID NO: 836476 - DNA, 15 bp, Homo sapiens
ggaaaagatgaggaa

SEQ ID NO: 836477 - DNA, 15 bp, Homo sapiens
gggaaaagatgagga

SEQ ID NO: 836478 - DNA, 15 bp, Homo sapiens
agggaaaagatgagg

SEQ ID NO: 836479 - DNA, 15 bp, Homo sapiens
aagggaaaagatgag

SEQ ID NO: 836480 - DNA, 15 bp, Homo sapiens
caagggaaaagatga

SEQ ID NO: 836481 - DNA, 15 bp, Homo sapiens
gcaagggaaaagatg

SEQ ID NO: 836482 - DNA, 15 bp, Homo sapiens
tgcaagggaaaagat

SEQ ID NO: 836483 - DNA, 15 bp, Homo sapiens
atgcaagggaaaaga

SEQ ID NO: 836484 - DNA, 15 bp, Homo sapiens
gatgcaagggaaaag

SEQ ID NO: 836485 - DNA, 15 bp, Homo sapiens
ggatgcaagggaaaa

SEQ ID NO: 836486 - DNA, 15 bp, Homo sapiens
gggatgcaagggaaa

SEQ ID NO: 836487 - DNA, 15 bp, Homo sapiens
agggatgcaagggaa

SEQ ID NO: 836488 - DNA, 15 bp, Homo sapiens
gagggatgcaaggga

SEQ ID NO: 836489 - DNA, 15 bp, Homo sapiens
ggagggatgcaaggg

SEQ ID NO: 836490 - DNA, 15 bp, Homo sapiens
tggagggatgcaagg

SEQ ID NO: 836491 - DNA, 15 bp, Homo sapiens
atggagggatgcaag

SEQ ID NO: 836492 - DNA, 15 bp, Homo sapiens
aatggagggatgcaa

SEQ ID NO: 836493 - DNA, 15 bp, Homo sapiens
taatggagggatgca

SEQ ID NO: 836494 - DNA, 15 bp, Homo sapiens
ataatggagggatgc

SEQ ID NO: 836495 - DNA, 15 bp, Homo sapiens
tataatggagggatg

SEQ ID NO: 836496 - DNA, 15 bp, Homo sapiens
atataatggagggat

SEQ ID NO: 836497 - DNA, 15 bp, Homo sapiens
catataatggaggga

SEQ ID NO: 836498 - DNA, 15 bp, Homo sapiens
tcatataatggaggg

SEQ ID NO: 836499 - DNA, 15 bp, Homo sapiens
ctcatataatggagg

SEQ ID NO: 836500 - DNA, 15 bp, Homo sapiens
actcatataatggag

SEQ ID NO: 836501 - DNA, 15 bp, Homo sapiens
gactcatataatgga

SEQ ID NO: 836502 - DNA, 15 bp, Homo sapiens
tgactcatataatgg

SEQ ID NO: 836503 - DNA, 15 bp, Homo sapiens
atgactcatataatg

SEQ ID NO: 836504 - DNA, 15 bp, Homo sapiens
tatgactcatataat

SEQ ID NO: 836505 - DNA, 15 bp, Homo sapiens
gtatgactcatataa

SEQ ID NO: 836506 - DNA, 15 bp, Homo sapiens
tgtatgactcatata

SEQ ID NO: 836507 - DNA, 15 bp, Homo sapiens
ttgtatgactcatat

SEQ ID NO: 836508 - DNA, 15 bp, Homo sapiens
tttgtatgactcata

SEQ ID NO: 836509 - DNA, 15 bp, Homo sapiens
atttgtatgactcat

SEQ ID NO: 836510 - DNA, 15 bp, Homo sapiens
aatttgtatgactca

SEQ ID NO: 836511 - DNA, 15 bp, Homo sapiens
taatttgtatgactc

SEQ ID NO: 836512 - DNA, 15 bp, Homo sapiens
ctaatttgtatgact

SEQ ID NO: 836513 - DNA, 15 bp, Homo sapiens
tctaatttgtatgac

SEQ ID NO: 836514 - DNA, 15 bp, Homo sapiens
gtctaatttgtatga

SEQ ID NO: 836515 - DNA, 15 bp, Homo sapiens
agtctaatttgtatg

SEQ ID NO: 836516 - DNA, 15 bp, Homo sapiens
aagtctaatttgtat

SEQ ID NO: 836517 - DNA, 15 bp, Homo sapiens
aaagtctaatttgta

SEQ ID NO: 836518 - DNA, 15 bp, Homo sapiens
aaaagtctaatttgt

SEQ ID NO: 836519 - DNA, 15 bp, Homo sapiens
gaaaagtctaatttg

SEQ ID NO: 836520 - DNA, 15 bp, Homo sapiens
tgaaaagtctaattt

SEQ ID NO: 836521 - DNA, 15 bp, Homo sapiens
ttgaaaagtctaatt

SEQ ID NO: 836522 - DNA, 15 bp, Homo sapiens
tttgaaaagtctaat

SEQ ID NO: 836523 - DNA, 15 bp, Homo sapiens
ctttgaaaagtctaa

SEQ ID NO: 836524 - DNA, 15 bp, Homo sapiens
gctttgaaaagtcta

SEQ ID NO: 836525 - DNA, 15 bp, Homo sapiens
tgctttgaaaagtct

SEQ ID NO: 836526 - DNA, 15 bp, Homo sapiens
ttgctttgaaaagtc

SEQ ID NO: 836527 - DNA, 15 bp, Homo sapiens
gttgctttgaaaagt

SEQ ID NO: 836528 - DNA, 15 bp, Homo sapiens
tgttgctttgaaaag

SEQ ID NO: 836529 - DNA, 15 bp, Homo sapiens
atgttgctttgaaaa

SEQ ID NO: 836530 - DNA, 15 bp, Homo sapiens
aatgttgctttgaaa

SEQ ID NO: 836531 - DNA, 15 bp, Homo sapiens
taatgttgctttgaa

SEQ ID NO: 836532 - DNA, 15 bp, Homo sapiens
ttaatgttgctttga

SEQ ID NO: 836533 - DNA, 15 bp, Homo sapiens
gttaatgttgctttg

SEQ ID NO: 836534 - DNA, 15 bp, Homo sapiens
tgttaatgttgcttt

SEQ ID NO: 836535 - DNA, 15 bp, Homo sapiens
atgttaatgttgctt

SEQ ID NO: 836536 - DNA, 15 bp, Homo sapiens
aatgttaatgttgct

SEQ ID NO: 836537 - DNA, 15 bp, Homo sapiens
caatgttaatgttgc

SEQ ID NO: 836538 - DNA, 15 bp, Homo sapiens
acaatgttaatgttg

SEQ ID NO: 836539 - DNA, 15 bp, Homo sapiens
cacaatgttaatgtt

SEQ ID NO: 836540 - DNA, 15 bp, Homo sapiens
acacaatgttaatgt

SEQ ID NO: 836541 - DNA, 15 bp, Homo sapiens
cacacaatgttaatg

SEQ ID NO: 836542 - DNA, 15 bp, Homo sapiens
tcacacaatgttaat

SEQ ID NO: 836543 - DNA, 15 bp, Homo sapiens
ttcacacaatgttaa

SEQ ID NO: 836544 - DNA, 15 bp, Homo sapiens
attcacacaatgtta

SEQ ID NO: 836545 - DNA, 15 bp, Homo sapiens
aattcacacaatgtt

SEQ ID NO: 836546 - DNA, 15 bp, Homo sapiens
aaattcacacaatgt

SEQ ID NO: 836547 - DNA, 15 bp, Homo sapiens
caaattcacacaatg

SEQ ID NO: 836548 - DNA, 15 bp, Homo sapiens
ccaaattcacacaat

SEQ ID NO: 836549 - DNA, 15 bp, Homo sapiens
cccaaattcacacaa

SEQ ID NO: 836550 - DNA, 15 bp, Homo sapiens
ccccaaattcacaca

SEQ ID NO: 836551 - DNA, 15 bp, Homo sapiens
accccaaattcacac

SEQ ID NO: 836552 - DNA, 15 bp, Homo sapiens
aaccccaaattcaca

SEQ ID NO: 836553 - DNA, 15 bp, Homo sapiens
aaaccccaaattcac

SEQ ID NO: 836554 - DNA, 15 bp, Homo sapiens
aaaaccccaaattca

SEQ ID NO: 836555 - DNA, 15 bp, Homo sapiens
aaaaaccccaaattc

SEQ ID NO: 836556 - DNA, 15 bp, Homo sapiens
caaaaaccccaaatt

SEQ ID NO: 836557 - DNA, 15 bp, Homo sapiens
tcaaaaaccccaaat

SEQ ID NO: 836558 - DNA, 15 bp, Homo sapiens
gtcaaaaaccccaaa

SEQ ID NO: 836559 - DNA, 15 bp, Homo sapiens
agtcaaaaaccccaa

SEQ ID NO: 836560 - DNA, 15 bp, Homo sapiens
tagtcaaaaacccca

SEQ ID NO: 836561 - DNA, 15 bp, Homo sapiens
ttagtcaaaaacccc

SEQ ID NO: 836562 - DNA, 15 bp, Homo sapiens
attagtcaaaaaccc

SEQ ID NO: 836563 - DNA, 15 bp, Homo sapiens
gattagtcaaaaacc

SEQ ID NO: 836564 - DNA, 15 bp, Homo sapiens
ggattagtcaaaaac

SEQ ID NO: 836565 - DNA, 15 bp, Homo sapiens
gggattagtcaaaaa

SEQ ID NO: 836566 - DNA, 15 bp, Homo sapiens
tgggattagtcaaaa

SEQ ID NO: 836567 - DNA, 15 bp, Homo sapiens
ttgggattagtcaaa

SEQ ID NO: 836568 - DNA, 15 bp, Homo sapiens
gttgggattagtcaa

SEQ ID NO: 836569 - DNA, 15 bp, Homo sapiens
tgttgggattagtca

SEQ ID NO: 836570 - DNA, 15 bp, Homo sapiens
atgttgggattagtc

SEQ ID NO: 836571 - DNA, 15 bp, Homo sapiens
aatgttgggattagt

SEQ ID NO: 836572 - DNA, 15 bp, Homo sapiens
gaatgttgggattag

SEQ ID NO: 836573 - DNA, 15 bp, Homo sapiens
ggaatgttgggatta

SEQ ID NO: 836574 - DNA, 15 bp, Homo sapiens
tggaatgttgggatt

SEQ ID NO: 836575 - DNA, 15 bp, Homo sapiens
gtggaatgttgggat

SEQ ID NO: 836576 - DNA, 15 bp, Homo sapiens
ggtggaatgttggga

SEQ ID NO: 836577 - DNA, 15 bp, Homo sapiens
gggtggaatgttggg

SEQ ID NO: 836578 - DNA, 15 bp, Homo sapiens
ggggtggaatgttgg

SEQ ID NO: 836579 - DNA, 15 bp, Homo sapiens
gggggtggaatgttg

SEQ ID NO: 836580 - DNA, 15 bp, Homo sapiens
tgggggtggaatgtt

SEQ ID NO: 836581 - DNA, 15 bp, Homo sapiens
gtgggggtggaatgt

SEQ ID NO: 836582 - DNA, 15 bp, Homo sapiens
tgtgggggtggaatg

SEQ ID NO: 836583 - DNA, 15 bp, Homo sapiens
atgtgggggtggaat

SEQ ID NO: 836584 - DNA, 15 bp, Homo sapiens
aatgtgggggtggaa

SEQ ID NO: 836585 - DNA, 15 bp, Homo sapiens
gaatgtgggggtgga

SEQ ID NO: 836586 - DNA, 15 bp, Homo sapiens
ggaatgtgggggtgg

SEQ ID NO: 836587 - DNA, 15 bp, Homo sapiens
tggaatgtgggggtg

SEQ ID NO: 836588 - DNA, 15 bp, Homo sapiens
ctggaatgtgggggt

SEQ ID NO: 836589 - DNA, 15 bp, Homo sapiens
actggaatgtggggg

SEQ ID NO: 836590 - DNA, 15 bp, Homo sapiens
gactggaatgtgggg

SEQ ID NO: 836591 - DNA, 15 bp, Homo sapiens
ggactggaatgtggg

SEQ ID NO: 836592 - DNA, 15 bp, Homo sapiens
gggactggaatgtgg

SEQ ID NO: 836593 - DNA, 15 bp, Homo sapiens
tgggactggaatgtg

SEQ ID NO: 836594 - DNA, 15 bp, Homo sapiens
gtgggactggaatgt

SEQ ID NO: 836595 - DNA, 15 bp, Homo sapiens
tgtgggactggaatg

SEQ ID NO: 836596 - DNA, 15 bp, Homo sapiens
atgtgggactggaat

SEQ ID NO: 836597 - DNA, 15 bp, Homo sapiens
catgtgggactggaa

SEQ ID NO: 836598 - DNA, 15 bp, Homo sapiens
ccatgtgggactgga

SEQ ID NO: 836599 - DNA, 15 bp, Homo sapiens
cccatgtgggactgg

SEQ ID NO: 836600 - DNA, 15 bp, Homo sapiens
tcccatgtgggactg

SEQ ID NO: 836601 - DNA, 15 bp, Homo sapiens
atcccatgtgggact

SEQ ID NO: 836602 - DNA, 15 bp, Homo sapiens
aatcccatgtgggac

SEQ ID NO: 836603 - DNA, 15 bp, Homo sapiens
aaatcccatgtggga

SEQ ID NO: 836604 - DNA, 15 bp, Homo sapiens
caaatcccatgtggg

SEQ ID NO: 836605 - DNA, 15 bp, Homo sapiens
ccaaatcccatgtgg

SEQ ID NO: 836606 - DNA, 15 bp, Homo sapiens
tccaaatcccatgtg

SEQ ID NO: 836607 - DNA, 15 bp, Homo sapiens
ctccaaatcccatgt

SEQ ID NO: 836608 - DNA, 15 bp, Homo sapiens
gctccaaatcccatg

SEQ ID NO: 836609 - DNA, 15 bp, Homo sapiens
ggctccaaatcccat

SEQ ID NO: 836610 - DNA, 15 bp, Homo sapiens
aggctccaaatccca

SEQ ID NO: 836611 - DNA, 15 bp, Homo sapiens
aaggctccaaatccc

SEQ ID NO: 836612 - DNA, 15 bp, Homo sapiens
caaggctccaaatcc

SEQ ID NO: 836613 - DNA, 15 bp, Homo sapiens
acaaggctccaaatc

SEQ ID NO: 836614 - DNA, 15 bp, Homo sapiens
aacaaggctccaaat

SEQ ID NO: 836615 - DNA, 15 bp, Homo sapiens
aaacaaggctccaaa

SEQ ID NO: 836616 - DNA, 15 bp, Homo sapiens
taaacaaggctccaa

SEQ ID NO: 836617 - DNA, 15 bp, Homo sapiens
ataaacaaggctcca

SEQ ID NO: 836618 - DNA, 15 bp, Homo sapiens
tataaacaaggctcc

SEQ ID NO: 836619 - DNA, 15 bp, Homo sapiens
ttataaacaaggctc

SEQ ID NO: 836620 - DNA, 15 bp, Homo sapiens
tttataaacaaggct

SEQ ID NO: 836621 - DNA, 15 bp, Homo sapiens
gtttataaacaaggc

SEQ ID NO: 836622 - DNA, 15 bp, Homo sapiens
ggtttataaacaagg

SEQ ID NO: 836623 - DNA, 15 bp, Homo sapiens
aggtttataaacaag

SEQ ID NO: 836624 - DNA, 15 bp, Homo sapiens
caggtttataaacaa

SEQ ID NO: 836625 - DNA, 15 bp, Homo sapiens
ccaggtttataaaca

SEQ ID NO: 836626 - DNA, 15 bp, Homo sapiens
gccaggtttataaac

SEQ ID NO: 836627 - DNA, 15 bp, Homo sapiens
tgccaggtttataaa

SEQ ID NO: 836628 - DNA, 15 bp, Homo sapiens
gtgccaggtttataa

SEQ ID NO: 836629 - DNA, 15 bp, Homo sapiens
agtgccaggtttata

SEQ ID NO: 836630 - DNA, 15 bp, Homo sapiens
aagtgccaggtttat

SEQ ID NO: 836631 - DNA, 15 bp, Homo sapiens
gaagtgccaggttta

SEQ ID NO: 836632 - DNA, 15 bp, Homo sapiens
agaagtgccaggttt

SEQ ID NO: 836633 - DNA, 15 bp, Homo sapiens
tagaagtgccaggtt

SEQ ID NO: 836634 - DNA, 15 bp, Homo sapiens
ttagaagtgccaggt

SEQ ID NO: 836635 - DNA, 15 bp, Homo sapiens
attagaagtgccagg

SEQ ID NO: 836636 - DNA, 15 bp, Homo sapiens
tattagaagtgccag

SEQ ID NO: 836637 - DNA, 15 bp, Homo sapiens
atattagaagtgcca

SEQ ID NO: 836638 - DNA, 15 bp, Homo sapiens
tatattagaagtgcc

SEQ ID NO: 836639 - DNA, 15 bp, Homo sapiens
atatattagaagtgc

SEQ ID NO: 836640 - DNA, 15 bp, Homo sapiens
gatatattagaagtg

SEQ ID NO: 836641 - DNA, 15 bp, Homo sapiens
agatatattagaagt

SEQ ID NO: 836642 - DNA, 15 bp, Homo sapiens
aagatatattagaag

SEQ ID NO: 836643 - DNA, 15 bp, Homo sapiens
taagatatattagaa

SEQ ID NO: 836644 - DNA, 15 bp, Homo sapiens
ataagatatattaga

SEQ ID NO: 836645 - DNA, 15 bp, Homo sapiens
gataagatatattag

SEQ ID NO: 836646 - DNA, 15 bp, Homo sapiens
agataagatatatta

SEQ ID NO: 836647 - DNA, 15 bp, Homo sapiens
aagataagatatatt

SEQ ID NO: 836648 - DNA, 15 bp, Homo sapiens
taagataagatatat

SEQ ID NO: 836649 - DNA, 15 bp, Homo sapiens
ctaagataagatata

SEQ ID NO: 836650 - DNA, 15 bp, Homo sapiens
tctaagataagatat

SEQ ID NO: 836651 - DNA, 15 bp, Homo sapiens
ctctaagataagata

SEQ ID NO: 836652 - DNA, 15 bp, Homo sapiens
actctaagataagat

SEQ ID NO: 836653 - DNA, 15 bp, Homo sapiens
tactctaagataaga

SEQ ID NO: 836654 - DNA, 15 bp, Homo sapiens
ttactctaagataag

SEQ ID NO: 836655 - DNA, 15 bp, Homo sapiens
attactctaagataa

SEQ ID NO: 836656 - DNA, 15 bp, Homo sapiens
gattactctaagata

SEQ ID NO: 836657 - DNA, 15 bp, Homo sapiens
ggattactctaagat

SEQ ID NO: 836658 - DNA, 15 bp, Homo sapiens
aggattactctaaga

SEQ ID NO: 836659 - DNA, 15 bp, Homo sapiens
aaggattactctaag

SEQ ID NO: 836660 - DNA, 15 bp, Homo sapiens
caaggattactctaa

SEQ ID NO: 836661 - DNA, 15 bp, Homo sapiens
acaaggattactcta

SEQ ID NO: 836662 - DNA, 15 bp, Homo sapiens
tacaaggattactct

SEQ ID NO: 836663 - DNA, 15 bp, Homo sapiens
atacaaggattactc

SEQ ID NO: 836664 - DNA, 15 bp, Homo sapiens
aatacaaggattact

SEQ ID NO: 836665 - DNA, 15 bp, Homo sapiens
aaatacaaggattac

SEQ ID NO: 836666 - DNA, 15 bp, Homo sapiens
caaatacaaggatta

SEQ ID NO: 836667 - DNA, 15 bp, Homo sapiens
acaaatacaaggatt

SEQ ID NO: 836668 - DNA, 15 bp, Homo sapiens
aacaaatacaaggat

SEQ ID NO: 836669 - DNA, 15 bp, Homo sapiens
aaacaaatacaagga

SEQ ID NO: 836670 - DNA, 15 bp, Homo sapiens
taaacaaatacaagg

SEQ ID NO: 836671 - DNA, 15 bp, Homo sapiens
ttaaacaaatacaag

SEQ ID NO: 836672 - DNA, 15 bp, Homo sapiens
attaaacaaatacaa

SEQ ID NO: 836673 - DNA, 15 bp, Homo sapiens
aattaaacaaataca

SEQ ID NO: 836674 - DNA, 15 bp, Homo sapiens
aaattaaacaaatac

SEQ ID NO: 836675 - DNA, 15 bp, Homo sapiens
gaaattaaacaaata

SEQ ID NO: 836676 - DNA, 15 bp, Homo sapiens
ggaaattaaacaaat

SEQ ID NO: 836677 - DNA, 15 bp, Homo sapiens
tggaaattaaacaaa

SEQ ID NO: 836678 - DNA, 15 bp, Homo sapiens
gtggaaattaaacaa

SEQ ID NO: 836679 - DNA, 15 bp, Homo sapiens
agtggaaattaaaca

SEQ ID NO: 836680 - DNA, 15 bp, Homo sapiens
aagtggaaattaaac

SEQ ID NO: 836681 - DNA, 15 bp, Homo sapiens
taagtggaaattaaa

SEQ ID NO: 836682 - DNA, 15 bp, Homo sapiens
ctaagtggaaattaa

SEQ ID NO: 836683 - DNA, 15 bp, Homo sapiens
gctaagtggaaatta

SEQ ID NO: 836684 - DNA, 15 bp, Homo sapiens
tgctaagtggaaatt

SEQ ID NO: 836685 - DNA, 15 bp, Homo sapiens
atgctaagtggaaat

SEQ ID NO: 836686 - DNA, 15 bp, Homo sapiens
aatgctaagtggaaa

SEQ ID NO: 836687 - DNA, 15 bp, Homo sapiens
caatgctaagtggaa

SEQ ID NO: 836688 - DNA, 15 bp, Homo sapiens
acaatgctaagtgga

SEQ ID NO: 836689 - DNA, 15 bp, Homo sapiens
tacaatgctaagtgg

SEQ ID NO: 836690 - DNA, 15 bp, Homo sapiens
ttacaatgctaagtg

SEQ ID NO: 836691 - DNA, 15 bp, Homo sapiens
tttacaatgctaagt

SEQ ID NO: 836692 - DNA, 15 bp, Homo sapiens
atttacaatgctaag

SEQ ID NO: 836693 - DNA, 15 bp, Homo sapiens
tatttacaatgctaa

SEQ ID NO: 836694 - DNA, 15 bp, Homo sapiens
gtatttacaatgcta

SEQ ID NO: 836695 - DNA, 15 bp, Homo sapiens
agtatttacaatgct

SEQ ID NO: 836696 - DNA, 15 bp, Homo sapiens
aagtatttacaatgc

SEQ ID NO: 836697 - DNA, 15 bp, Homo sapiens
caagtatttacaatg

SEQ ID NO: 836698 - DNA, 15 bp, Homo sapiens
gcaagtatttacaat

SEQ ID NO: 836699 - DNA, 15 bp, Homo sapiens
tgcaagtatttacaa

SEQ ID NO: 836700 - DNA, 15 bp, Homo sapiens
ctgcaagtatttaca

SEQ ID NO: 836701 - DNA, 15 bp, Homo sapiens
cctgcaagtatttac

SEQ ID NO: 836702 - DNA, 15 bp, Homo sapiens
acctgcaagtattta

SEQ ID NO: 836703 - DNA, 15 bp, Homo sapiens
tacctgcaagtattt

SEQ ID NO: 836704 - DNA, 15 bp, Homo sapiens
atacctgcaagtatt

SEQ ID NO: 836705 - DNA, 15 bp, Homo sapiens
gatacctgcaagtat

SEQ ID NO: 836706 - DNA, 15 bp, Homo sapiens
ggatacctgcaagta

SEQ ID NO: 836707 - DNA, 15 bp, Homo sapiens
aggatacctgcaagt

SEQ ID NO: 836708 - DNA, 15 bp, Homo sapiens
taggatacctgcaag

SEQ ID NO: 836709 - DNA, 15 bp, Homo sapiens
ctaggatacctgcaa

SEQ ID NO: 836710 - DNA, 15 bp, Homo sapiens
actaggatacctgca

SEQ ID NO: 836711 - DNA, 15 bp, Homo sapiens
aactaggatacctgc

SEQ ID NO: 836712 - DNA, 15 bp, Homo sapiens
taactaggatacctg

SEQ ID NO: 836713 - DNA, 15 bp, Homo sapiens
ttaactaggatacct

SEQ ID NO: 836714 - DNA, 15 bp, Homo sapiens
cttaactaggatacc

SEQ ID NO: 836715 - DNA, 15 bp, Homo sapiens
tcttaactaggatac

SEQ ID NO: 836716 - DNA, 15 bp, Homo sapiens
ttcttaactaggata

SEQ ID NO: 836717 - DNA, 15 bp, Homo sapiens
tttcttaactaggat

SEQ ID NO: 836718 - DNA, 15 bp, Homo sapiens
ctttcttaactagga

SEQ ID NO: 836719 - DNA, 15 bp, Homo sapiens
gctttcttaactagg

SEQ ID NO: 836720 - DNA, 15 bp, Homo sapiens
tgctttcttaactag

SEQ ID NO: 836721 - DNA, 15 bp, Homo sapiens
ttgctttcttaacta

SEQ ID NO: 836722 - DNA, 15 bp, Homo sapiens
cttgctttcttaact

SEQ ID NO: 836723 - DNA, 15 bp, Homo sapiens
ccttgctttcttaac

SEQ ID NO: 836724 - DNA, 15 bp, Homo sapiens
accttgctttcttaa

SEQ ID NO: 836725 - DNA, 15 bp, Homo sapiens
aaccttgctttctta

SEQ ID NO: 836726 - DNA, 15 bp, Homo sapiens
aaaccttgctttctt

SEQ ID NO: 836727 - DNA, 15 bp, Homo sapiens
taaaccttgctttct

SEQ ID NO: 836728 - DNA, 15 bp, Homo sapiens
ttaaaccttgctttc

SEQ ID NO: 836729 - DNA, 15 bp, Homo sapiens
tttaaaccttgcttt

SEQ ID NO: 836730 - DNA, 15 bp, Homo sapiens
gtttaaaccttgctt

SEQ ID NO: 836731 - DNA, 15 bp, Homo sapiens
tgtttaaaccttgct

SEQ ID NO: 836732 - DNA, 15 bp, Homo sapiens
gtgtttaaaccttgc

SEQ ID NO: 836733 - DNA, 15 bp, Homo sapiens
tgtgtttaaaccttg

SEQ ID NO: 836734 - DNA, 15 bp, Homo sapiens
ttgtgtttaaacctt

SEQ ID NO: 836735 - DNA, 15 bp, Homo sapiens
tttgtgtttaaacct

SEQ ID NO: 836736 - DNA, 15 bp, Homo sapiens
ttttgtgtttaaacc

SEQ ID NO: 836737 - DNA, 15 bp, Homo sapiens
attttgtgtttaaac

SEQ ID NO: 836738 - DNA, 15 bp, Homo sapiens
gattttgtgtttaaa

SEQ ID NO: 836739 - DNA, 15 bp, Homo sapiens
tgattttgtgtttaa

SEQ ID NO: 836740 - DNA, 15 bp, Homo sapiens
atgattttgtgttta

SEQ ID NO: 836741 - DNA, 15 bp, Homo sapiens
gatgattttgtgttt

SEQ ID NO: 836742 - DNA, 15 bp, Homo sapiens
tgatgattttgtgtt

SEQ ID NO: 836743 - DNA, 15 bp, Homo sapiens
gtgatgattttgtgt

SEQ ID NO: 836744 - DNA, 15 bp, Homo sapiens
ggtgatgattttgtg

SEQ ID NO: 836745 - DNA, 15 bp, Homo sapiens
tggtgatgattttgt

SEQ ID NO: 836746 - DNA, 15 bp, Homo sapiens
ttggtgatgattttg

SEQ ID NO: 836747 - DNA, 15 bp, Homo sapiens
attggtgatgatttt

SEQ ID NO: 836748 - DNA, 15 bp, Homo sapiens
aattggtgatgattt

SEQ ID NO: 836749 - DNA, 15 bp, Homo sapiens
taattggtgatgatt

SEQ ID NO: 836750 - DNA, 15 bp, Homo sapiens
ttaattggtgatgat

SEQ ID NO: 836751 - DNA, 15 bp, Homo sapiens
tttaattggtgatga

SEQ ID NO: 836752 - DNA, 15 bp, Homo sapiens
ctttaattggtgatg

SEQ ID NO: 836753 - DNA, 15 bp, Homo sapiens
gctttaattggtgat

SEQ ID NO: 836754 - DNA, 15 bp, Homo sapiens
tgctttaattggtga

SEQ ID NO: 836755 - DNA, 15 bp, Homo sapiens
ctgctttaattggtg

SEQ ID NO: 836756 - DNA, 15 bp, Homo sapiens
cctgctttaattggt

SEQ ID NO: 836757 - DNA, 15 bp, Homo sapiens
gcctgctttaattgg

SEQ ID NO: 836758 - DNA, 15 bp, Homo sapiens
agcctgctttaattg

SEQ ID NO: 836759 - DNA, 15 bp, Homo sapiens
tagcctgctttaatt

SEQ ID NO: 836760 - DNA, 15 bp, Homo sapiens
ctagcctgctttaat

SEQ ID NO: 836761 - DNA, 15 bp, Homo sapiens
tctagcctgctttaa

SEQ ID NO: 836762 - DNA, 15 bp, Homo sapiens
atctagcctgcttta

SEQ ID NO: 836763 - DNA, 15 bp, Homo sapiens
tatctagcctgcttt

SEQ ID NO: 836764 - DNA, 15 bp, Homo sapiens
ttatctagcctgctt

SEQ ID NO: 836765 - DNA, 15 bp, Homo sapiens
tttatctagcctgct

SEQ ID NO: 836766 - DNA, 15 bp, Homo sapiens
ctttatctagcctgc

SEQ ID NO: 836767 - DNA, 15 bp, Homo sapiens
tctttatctagcctg

SEQ ID NO: 836768 - DNA, 15 bp, Homo sapiens
ttctttatctagcct

SEQ ID NO: 836769 - DNA, 15 bp, Homo sapiens
attctttatctagcc

SEQ ID NO: 836770 - DNA, 15 bp, Homo sapiens
cattctttatctagc

SEQ ID NO: 836771 - DNA, 15 bp, Homo sapiens
acattctttatctag

SEQ ID NO: 836772 - DNA, 15 bp, Homo sapiens
tacattctttatcta

SEQ ID NO: 836773 - DNA, 15 bp, Homo sapiens
ttacattctttatct

SEQ ID NO: 836774 - DNA, 15 bp, Homo sapiens
attacattctttatc

SEQ ID NO: 836775 - DNA, 15 bp, Homo sapiens
tattacattctttat

SEQ ID NO: 836776 - DNA, 15 bp, Homo sapiens
ctattacattcttta

SEQ ID NO: 836777 - DNA, 15 bp, Homo sapiens
tctattacattcttt

SEQ ID NO: 836778 - DNA, 15 bp, Homo sapiens
ttctattacattctt

SEQ ID NO: 836779 - DNA, 15 bp, Homo sapiens
tttctattacattct

SEQ ID NO: 836780 - DNA, 15 bp, Homo sapiens
atttctattacattc

SEQ ID NO: 836781 - DNA, 15 bp, Homo sapiens
catttctattacatt

SEQ ID NO: 836782 - DNA, 15 bp, Homo sapiens
gcatttctattacat

SEQ ID NO: 836783 - DNA, 15 bp, Homo sapiens
agcatttctattaca

SEQ ID NO: 836784 - DNA, 15 bp, Homo sapiens
tagcatttctattac

SEQ ID NO: 836785 - DNA, 15 bp, Homo sapiens
ctagcatttctatta

SEQ ID NO: 836786 - DNA, 15 bp, Homo sapiens
tctagcatttctatt

SEQ ID NO: 836787 - DNA, 15 bp, Homo sapiens
atctagcatttctat

SEQ ID NO: 836788 - DNA, 15 bp, Homo sapiens
tatctagcatttcta

SEQ ID NO: 836789 - DNA, 15 bp, Homo sapiens
ttatctagcatttct

SEQ ID NO: 836790 - DNA, 15 bp, Homo sapiens
tttatctagcatttc

SEQ ID NO: 836791 - DNA, 15 bp, Homo sapiens
ttttatctagcattt

SEQ ID NO: 836792 - DNA, 15 bp, Homo sapiens
gttttatctagcatt

SEQ ID NO: 836793 - DNA, 15 bp, Homo sapiens
tgttttatctagcat

SEQ ID NO: 836794 - DNA, 15 bp, Homo sapiens
ctgttttatctagca

SEQ ID NO: 836795 - DNA, 15 bp, Homo sapiens
tctgttttatctagc

SEQ ID NO: 836796 - DNA, 15 bp, Homo sapiens
atctgttttatctag

SEQ ID NO: 836797 - DNA, 15 bp, Homo sapiens
aatctgttttatcta

SEQ ID NO: 836798 - DNA, 15 bp, Homo sapiens
aaatctgttttatct

SEQ ID NO: 836799 - DNA, 15 bp, Homo sapiens
aaaatctgttttatc

SEQ ID NO: 836800 - DNA, 15 bp, Homo sapiens
aaaaatctgttttat

SEQ ID NO: 836801 - DNA, 15 bp, Homo sapiens
aaaaaatctgtttta

SEQ ID NO: 836802 - DNA, 15 bp, Homo sapiens
gaaaaaatctgtttt

SEQ ID NO: 836803 - DNA, 15 bp, Homo sapiens
agaaaaaatctgttt

SEQ ID NO: 836804 - DNA, 15 bp, Homo sapiens
aagaaaaaatctgtt

SEQ ID NO: 836805 - DNA, 15 bp, Homo sapiens
taagaaaaaatctgt

SEQ ID NO: 836806 - DNA, 15 bp, Homo sapiens
gtaagaaaaaatctg

SEQ ID NO: 836807 - DNA, 15 bp, Homo sapiens
agtaagaaaaaatct

SEQ ID NO: 836808 - DNA, 15 bp, Homo sapiens
tagtaagaaaaaatc

SEQ ID NO: 836809 - DNA, 15 bp, Homo sapiens
ttagtaagaaaaaat

SEQ ID NO: 836810 - DNA, 15 bp, Homo sapiens
cttagtaagaaaaaa

SEQ ID NO: 836811 - DNA, 15 bp, Homo sapiens
acttagtaagaaaaa

SEQ ID NO: 836812 - DNA, 15 bp, Homo sapiens
aacttagtaagaaaa

SEQ ID NO: 836813 - DNA, 15 bp, Homo sapiens
aaacttagtaagaaa

SEQ ID NO: 836814 - DNA, 15 bp, Homo sapiens
aaaacttagtaagaa

SEQ ID NO: 836815 - DNA, 15 bp, Homo sapiens
gaaaacttagtaaga

SEQ ID NO: 836816 - DNA, 15 bp, Homo sapiens
agaaaacttagtaag

SEQ ID NO: 836817 - DNA, 15 bp, Homo sapiens
cagaaaacttagtaa

SEQ ID NO: 836818 - DNA, 15 bp, Homo sapiens
acagaaaacttagta

SEQ ID NO: 836819 - DNA, 15 bp, Homo sapiens
gacagaaaacttagt

SEQ ID NO: 836820 - DNA, 15 bp, Homo sapiens
ggacagaaaacttag

SEQ ID NO: 836821 - DNA, 15 bp, Homo sapiens
gggacagaaaactta

SEQ ID NO: 836822 - DNA, 15 bp, Homo sapiens
agggacagaaaactt

SEQ ID NO: 836823 - DNA, 15 bp, Homo sapiens
aagggacagaaaact

SEQ ID NO: 836824 - DNA, 15 bp, Homo sapiens
taagggacagaaaac

SEQ ID NO: 836825 - DNA, 15 bp, Homo sapiens
ataagggacagaaaa

SEQ ID NO: 836826 - DNA, 15 bp, Homo sapiens
tataagggacagaaa

SEQ ID NO: 836827 - DNA, 15 bp, Homo sapiens
ctataagggacagaa

SEQ ID NO: 836828 - DNA, 15 bp, Homo sapiens
tctataagggacaga

SEQ ID NO: 836829 - DNA, 15 bp, Homo sapiens
ctctataagggacag

SEQ ID NO: 836830 - DNA, 15 bp, Homo sapiens
actctataagggaca

SEQ ID NO: 836831 - DNA, 15 bp, Homo sapiens
cactctataagggac

SEQ ID NO: 836832 - DNA, 15 bp, Homo sapiens
gcactctataaggga

SEQ ID NO: 836833 - DNA, 15 bp, Homo sapiens
tgcactctataaggg

SEQ ID NO: 836834 - DNA, 15 bp, Homo sapiens
atgcactctataagg

SEQ ID NO: 836835 - DNA, 15 bp, Homo sapiens
tatgcactctataag

SEQ ID NO: 836836 - DNA, 15 bp, Homo sapiens
ttatgcactctataa

SEQ ID NO: 836837 - DNA, 15 bp, Homo sapiens
gttatgcactctata

SEQ ID NO: 836838 - DNA, 15 bp, Homo sapiens
tgttatgcactctat

SEQ ID NO: 836839 - DNA, 15 bp, Homo sapiens
gtgttatgcactcta

SEQ ID NO: 836840 - DNA, 15 bp, Homo sapiens
tgtgttatgcactct

SEQ ID NO: 836841 - DNA, 15 bp, Homo sapiens
ttgtgttatgcactc

SEQ ID NO: 836842 - DNA, 15 bp, Homo sapiens
attgtgttatgcact

SEQ ID NO: 836843 - DNA, 15 bp, Homo sapiens
tattgtgttatgcac

SEQ ID NO: 836844 - DNA, 15 bp, Homo sapiens
ttattgtgttatgca

SEQ ID NO: 836845 - DNA, 15 bp, Homo sapiens
gttattgtgttatgc

SEQ ID NO: 836846 - DNA, 15 bp, Homo sapiens
agttattgtgttatg

SEQ ID NO: 836847 - DNA, 15 bp, Homo sapiens
aagttattgtgttat

SEQ ID NO: 836848 - DNA, 15 bp, Homo sapiens
caagttattgtgtta

SEQ ID NO: 836849 - DNA, 15 bp, Homo sapiens
gcaagttattgtgtt

SEQ ID NO: 836850 - DNA, 15 bp, Homo sapiens
agcaagttattgtgt

SEQ ID NO: 836851 - DNA, 15 bp, Homo sapiens
aagcaagttattgtg

SEQ ID NO: 836852 - DNA, 15 bp, Homo sapiens
caagcaagttattgt

SEQ ID NO: 836853 - DNA, 15 bp, Homo sapiens
tcaagcaagttattg

SEQ ID NO: 836854 - DNA, 15 bp, Homo sapiens
atcaagcaagttatt

SEQ ID NO: 836855 - DNA, 15 bp, Homo sapiens
tatcaagcaagttat

SEQ ID NO: 836856 - DNA, 15 bp, Homo sapiens
ttatcaagcaagtta

SEQ ID NO: 836857 - DNA, 15 bp, Homo sapiens
cttatcaagcaagtt

SEQ ID NO: 836858 - DNA, 15 bp, Homo sapiens
tcttatcaagcaagt

SEQ ID NO: 836859 - DNA, 15 bp, Homo sapiens
ttcttatcaagcaag

SEQ ID NO: 836860 - DNA, 15 bp, Homo sapiens
attcttatcaagcaa

SEQ ID NO: 836861 - DNA, 15 bp, Homo sapiens
aattcttatcaagca

SEQ ID NO: 836862 - DNA, 15 bp, Homo sapiens
gaattcttatcaagc

SEQ ID NO: 836863 - DNA, 15 bp, Homo sapiens
tgaattcttatcaag

SEQ ID NO: 836864 - DNA, 15 bp, Homo sapiens
ttgaattcttatcaa

SEQ ID NO: 836865 - DNA, 15 bp, Homo sapiens
attgaattcttatca

SEQ ID NO: 836866 - DNA, 15 bp, Homo sapiens
cattgaattcttatc

SEQ ID NO: 836867 - DNA, 15 bp, Homo sapiens
acattgaattcttat

SEQ ID NO: 836868 - DNA, 15 bp, Homo sapiens
tacattgaattctta

SEQ ID NO: 836869 - DNA, 15 bp, Homo sapiens
gtacattgaattctt

SEQ ID NO: 836870 - DNA, 15 bp, Homo sapiens
tgtacattgaattct

SEQ ID NO: 836871 - DNA, 15 bp, Homo sapiens
atgtacattgaattc

SEQ ID NO: 836872 - DNA, 15 bp, Homo sapiens
aatgtacattgaatt

SEQ ID NO: 836873 - DNA, 15 bp, Homo sapiens
caatgtacattgaat

SEQ ID NO: 836874 - DNA, 15 bp, Homo sapiens
acaatgtacattgaa

SEQ ID NO: 836875 - DNA, 15 bp, Homo sapiens
aacaatgtacattga

SEQ ID NO: 836876 - DNA, 15 bp, Homo sapiens
aaacaatgtacattg

SEQ ID NO: 836877 - DNA, 15 bp, Homo sapiens
aaaacaatgtacatt

SEQ ID NO: 836878 - DNA, 15 bp, Homo sapiens
caaaacaatgtacat

SEQ ID NO: 836879 - DNA, 15 bp, Homo sapiens
acaaaacaatgtaca

SEQ ID NO: 836880 - DNA, 15 bp, Homo sapiens
cacaaaacaatgtac

SEQ ID NO: 836881 - DNA, 15 bp, Homo sapiens
gcacaaaacaatgta

SEQ ID NO: 836882 - DNA, 15 bp, Homo sapiens
agcacaaaacaatgt

SEQ ID NO: 836883 - DNA, 15 bp, Homo sapiens
cagcacaaaacaatg

SEQ ID NO: 836884 - DNA, 15 bp, Homo sapiens
tcagcacaaaacaat

SEQ ID NO: 836885 - DNA, 15 bp, Homo sapiens
ttcagcacaaaacaa

SEQ ID NO: 836886 - DNA, 15 bp, Homo sapiens
attcagcacaaaaca

SEQ ID NO: 836887 - DNA, 15 bp, Homo sapiens
gattcagcacaaaac

SEQ ID NO: 836888 - DNA, 15 bp, Homo sapiens
tgattcagcacaaaa

SEQ ID NO: 836889 - DNA, 15 bp, Homo sapiens
gtgattcagcacaaa

SEQ ID NO: 836890 - DNA, 15 bp, Homo sapiens
agtgattcagcacaa

SEQ ID NO: 836891 - DNA, 15 bp, Homo sapiens
tagtgattcagcaca

SEQ ID NO: 836892 - DNA, 15 bp, Homo sapiens
ttagtgattcagcac

SEQ ID NO: 836893 - DNA, 15 bp, Homo sapiens
tttagtgattcagca

SEQ ID NO: 836894 - DNA, 15 bp, Homo sapiens
atttagtgattcagc

SEQ ID NO: 836895 - DNA, 15 bp, Homo sapiens
catttagtgattcag

SEQ ID NO: 836896 - DNA, 15 bp, Homo sapiens
gcatttagtgattca

SEQ ID NO: 836897 - DNA, 15 bp, Homo sapiens
agcatttagtgattc

SEQ ID NO: 836898 - DNA, 15 bp, Homo sapiens
aagcatttagtgatt

SEQ ID NO: 836899 - DNA, 15 bp, Homo sapiens
caagcatttagtgat

SEQ ID NO: 836900 - DNA, 15 bp, Homo sapiens
tcaagcatttagtga

SEQ ID NO: 836901 - DNA, 15 bp, Homo sapiens
atcaagcatttagtg

SEQ ID NO: 836902 - DNA, 15 bp, Homo sapiens
aatcaagcatttagt

SEQ ID NO: 836903 - DNA, 15 bp, Homo sapiens
aaatcaagcatttag

SEQ ID NO: 836904 - DNA, 15 bp, Homo sapiens
gaaatcaagcattta

SEQ ID NO: 836905 - DNA, 15 bp, Homo sapiens
agaaatcaagcattt

SEQ ID NO: 836906 - DNA, 15 bp, Homo sapiens
cagaaatcaagcatt

SEQ ID NO: 836907 - DNA, 15 bp, Homo sapiens
acagaaatcaagcat

SEQ ID NO: 836908 - DNA, 15 bp, Homo sapiens
tacagaaatcaagca

SEQ ID NO: 836909 - DNA, 15 bp, Homo sapiens
ttacagaaatcaagc

SEQ ID NO: 836910 - DNA, 15 bp, Homo sapiens
gttacagaaatcaag

SEQ ID NO: 836911 - DNA, 15 bp, Homo sapiens
tgttacagaaatcaa

SEQ ID NO: 836912 - DNA, 15 bp, Homo sapiens
ttgttacagaaatca

SEQ ID NO: 836913 - DNA, 15 bp, Homo sapiens
cttgttacagaaatc

SEQ ID NO: 836914 - DNA, 15 bp, Homo sapiens
tcttgttacagaaat

SEQ ID NO: 836915 - DNA, 15 bp, Homo sapiens
ctcttgttacagaaa

SEQ ID NO: 836916 - DNA, 15 bp, Homo sapiens
tctcttgttacagaa

SEQ ID NO: 836917 - DNA, 15 bp, Homo sapiens
atctcttgttacaga

SEQ ID NO: 836918 - DNA, 15 bp, Homo sapiens
aatctcttgttacag

SEQ ID NO: 836919 - DNA, 15 bp, Homo sapiens
caatctcttgttaca

SEQ ID NO: 836920 - DNA, 15 bp, Homo sapiens
acaatctcttgttac

SEQ ID NO: 836921 - DNA, 15 bp, Homo sapiens
cacaatctcttgtta

SEQ ID NO: 836922 - DNA, 15 bp, Homo sapiens
ccacaatctcttgtt

SEQ ID NO: 836923 - DNA, 15 bp, Homo sapiens
accacaatctcttgt

SEQ ID NO: 836924 - DNA, 15 bp, Homo sapiens
aaccacaatctcttg

SEQ ID NO: 836925 - DNA, 15 bp, Homo sapiens
gaaccacaatctctt

SEQ ID NO: 836926 - DNA, 15 bp, Homo sapiens
ggaaccacaatctct

SEQ ID NO: 836927 - DNA, 15 bp, Homo sapiens
tggaaccacaatctc

SEQ ID NO: 836928 - DNA, 15 bp, Homo sapiens
atggaaccacaatct

SEQ ID NO: 836929 - DNA, 15 bp, Homo sapiens
gatggaaccacaatc

SEQ ID NO: 836930 - DNA, 15 bp, Homo sapiens
tgatggaaccacaat

SEQ ID NO: 836931 - DNA, 15 bp, Homo sapiens
ctgatggaaccacaa

SEQ ID NO: 836932 - DNA, 15 bp, Homo sapiens
actgatggaaccaca

SEQ ID NO: 836933 - DNA, 15 bp, Homo sapiens
tactgatggaaccac

SEQ ID NO: 836934 - DNA, 15 bp, Homo sapiens
atactgatggaacca

SEQ ID NO: 836935 - DNA, 15 bp, Homo sapiens
gatactgatggaacc

SEQ ID NO: 836936 - DNA, 15 bp, Homo sapiens
agatactgatggaac

SEQ ID NO: 836937 - DNA, 15 bp, Homo sapiens
cagatactgatggaa

SEQ ID NO: 836938 - DNA, 15 bp, Homo sapiens
ccagatactgatgga

SEQ ID NO: 836939 - DNA, 15 bp, Homo sapiens
tccagatactgatgg

SEQ ID NO: 836940 - DNA, 15 bp, Homo sapiens
atccagatactgatg

SEQ ID NO: 836941 - DNA, 15 bp, Homo sapiens
aatccagatactgat

SEQ ID NO: 836942 - DNA, 15 bp, Homo sapiens
aaatccagatactga

SEQ ID NO: 836943 - DNA, 15 bp, Homo sapiens
aaaatccagatactg

SEQ ID NO: 836944 - DNA, 15 bp, Homo sapiens
taaaatccagatact

SEQ ID NO: 836945 - DNA, 15 bp, Homo sapiens
ctaaaatccagatac

SEQ ID NO: 836946 - DNA, 15 bp, Homo sapiens
actaaaatccagata

SEQ ID NO: 836947 - DNA, 15 bp, Homo sapiens
gactaaaatccagat

SEQ ID NO: 836948 - DNA, 15 bp, Homo sapiens
agactaaaatccaga

SEQ ID NO: 836949 - DNA, 15 bp, Homo sapiens
cagactaaaatccag

SEQ ID NO: 836950 - DNA, 15 bp, Homo sapiens
acagactaaaatcca

SEQ ID NO: 836951 - DNA, 15 bp, Homo sapiens
cacagactaaaatcc

SEQ ID NO: 836952 - DNA, 15 bp, Homo sapiens
acacagactaaaatc

SEQ ID NO: 836953 - DNA, 15 bp, Homo sapiens
tacacagactaaaat

SEQ ID NO: 836954 - DNA, 15 bp, Homo sapiens
ttacacagactaaaa

SEQ ID NO: 836955 - DNA, 15 bp, Homo sapiens
attacacagactaaa

SEQ ID NO: 836956 - DNA, 15 bp, Homo sapiens
gattacacagactaa

SEQ ID NO: 836957 - DNA, 15 bp, Homo sapiens
agattacacagacta

SEQ ID NO: 836958 - DNA, 15 bp, Homo sapiens
aagattacacagact

SEQ ID NO: 836959 - DNA, 15 bp, Homo sapiens
taagattacacagac

SEQ ID NO: 836960 - DNA, 15 bp, Homo sapiens
ctaagattacacaga

SEQ ID NO: 836961 - DNA, 15 bp, Homo sapiens
cctaagattacacag

SEQ ID NO: 836962 - DNA, 15 bp, Homo sapiens
gcctaagattacaca

SEQ ID NO: 836963 - DNA, 15 bp, Homo sapiens
tgcctaagattacac

SEQ ID NO: 836964 - DNA, 15 bp, Homo sapiens
ttgcctaagattaca

SEQ ID NO: 836965 - DNA, 15 bp, Homo sapiens
cttgcctaagattac

SEQ ID NO: 836966 - DNA, 15 bp, Homo sapiens
acttgcctaagatta

SEQ ID NO: 836967 - DNA, 15 bp, Homo sapiens
aacttgcctaagatt

SEQ ID NO: 836968 - DNA, 15 bp, Homo sapiens
taacttgcctaagat

SEQ ID NO: 836969 - DNA, 15 bp, Homo sapiens
ataacttgcctaaga

SEQ ID NO: 836970 - DNA, 15 bp, Homo sapiens
aataacttgcctaag

SEQ ID NO: 836971 - DNA, 15 bp, Homo sapiens
aaataacttgcctaa

SEQ ID NO: 836972 - DNA, 15 bp, Homo sapiens
caaataacttgccta

SEQ ID NO: 836973 - DNA, 15 bp, Homo sapiens
tcaaataacttgcct

SEQ ID NO: 836974 - DNA, 15 bp, Homo sapiens
atcaaataacttgcc

SEQ ID NO: 836975 - DNA, 15 bp, Homo sapiens
aatcaaataacttgc

SEQ ID NO: 836976 - DNA, 15 bp, Homo sapiens
aaatcaaataacttg

SEQ ID NO: 836977 - DNA, 15 bp, Homo sapiens
gaaatcaaataactt

SEQ ID NO: 836978 - DNA, 15 bp, Homo sapiens
agaaatcaaataact

SEQ ID NO: 836979 - DNA, 15 bp, Homo sapiens
gagaaatcaaataac

SEQ ID NO: 836980 - DNA, 15 bp, Homo sapiens
agagaaatcaaataa

SEQ ID NO: 836981 - DNA, 15 bp, Homo sapiens
cagagaaatcaaata

SEQ ID NO: 836982 - DNA, 15 bp, Homo sapiens
acagagaaatcaaat

SEQ ID NO: 836983 - DNA, 15 bp, Homo sapiens
cacagagaaatcaaa

SEQ ID NO: 836984 - DNA, 15 bp, Homo sapiens
gcacagagaaatcaa

SEQ ID NO: 836985 - DNA, 15 bp, Homo sapiens
ggcacagagaaatca

SEQ ID NO: 836986 - DNA, 15 bp, Homo sapiens
aggcacagagaaatc

SEQ ID NO: 836987 - DNA, 15 bp, Homo sapiens
gaggcacagagaaat

SEQ ID NO: 836988 - DNA, 15 bp, Homo sapiens
agaggcacagagaaa

SEQ ID NO: 836989 - DNA, 15 bp, Homo sapiens
cagaggcacagagaa

SEQ ID NO: 836990 - DNA, 15 bp, Homo sapiens
acagaggcacagaga

SEQ ID NO: 836991 - DNA, 15 bp, Homo sapiens
aacagaggcacagag

SEQ ID NO: 836992 - DNA, 15 bp, Homo sapiens
aaacagaggcacaga

SEQ ID NO: 836993 - DNA, 15 bp, Homo sapiens
aaaacagaggcacag

SEQ ID NO: 836994 - DNA, 15 bp, Homo sapiens
gaaaacagaggcaca

SEQ ID NO: 836995 - DNA, 15 bp, Homo sapiens
agaaaacagaggcac

SEQ ID NO: 836996 - DNA, 15 bp, Homo sapiens
aagaaaacagaggca

SEQ ID NO: 836997 - DNA, 15 bp, Homo sapiens
caagaaaacagaggc

SEQ ID NO: 836998 - DNA, 15 bp, Homo sapiens
acaagaaaacagagg

SEQ ID NO: 836999 - DNA, 15 bp, Homo sapiens
gacaagaaaacagag

SEQ ID NO: 837000 - DNA, 15 bp, Homo sapiens
agacaagaaaacaga

SEQ ID NO: 837001 - DNA, 15 bp, Homo sapiens
cagacaagaaaacag

SEQ ID NO: 837002 - DNA, 15 bp, Homo sapiens
acagacaagaaaaca

SEQ ID NO: 837003 - DNA, 15 bp, Homo sapiens
tacagacaagaaaac

SEQ ID NO: 837004 - DNA, 15 bp, Homo sapiens
ttacagacaagaaaa

SEQ ID NO: 837005 - DNA, 15 bp, Homo sapiens
tttacagacaagaaa

SEQ ID NO: 837006 - DNA, 15 bp, Homo sapiens
ttttacagacaagaa

SEQ ID NO: 837007 - DNA, 15 bp, Homo sapiens
attttacagacaaga

SEQ ID NO: 837008 - DNA, 15 bp, Homo sapiens
cattttacagacaag

SEQ ID NO: 837009 - DNA, 15 bp, Homo sapiens
tcattttacagacaa

SEQ ID NO: 837010 - DNA, 15 bp, Homo sapiens
ctcattttacagaca

SEQ ID NO: 837011 - DNA, 15 bp, Homo sapiens
actcattttacagac

SEQ ID NO: 837012 - DNA, 15 bp, Homo sapiens
tactcattttacaga

SEQ ID NO: 837013 - DNA, 15 bp, Homo sapiens
atactcattttacag

SEQ ID NO: 837014 - DNA, 15 bp, Homo sapiens
tatactcattttaca

SEQ ID NO: 837015 - DNA, 15 bp, Homo sapiens
ttatactcattttac

SEQ ID NO: 837016 - DNA, 15 bp, Homo sapiens
attatactcatttta

SEQ ID NO: 837017 - DNA, 15 bp, Homo sapiens
cattatactcatttt

SEQ ID NO: 837018 - DNA, 15 bp, Homo sapiens
ccattatactcattt

SEQ ID NO: 837019 - DNA, 15 bp, Homo sapiens
accattatactcatt

SEQ ID NO: 837020 - DNA, 15 bp, Homo sapiens
taccattatactcat

SEQ ID NO: 837021 - DNA, 15 bp, Homo sapiens
ctaccattatactca

SEQ ID NO: 837022 - DNA, 15 bp, Homo sapiens
actaccattatactc

SEQ ID NO: 837023 - DNA, 15 bp, Homo sapiens
tactaccattatact

SEQ ID NO: 837024 - DNA, 15 bp, Homo sapiens
ttactaccattatac

SEQ ID NO: 837025 - DNA, 15 bp, Homo sapiens
gttactaccattata

SEQ ID NO: 837026 - DNA, 15 bp, Homo sapiens
agttactaccattat

SEQ ID NO: 837027 - DNA, 15 bp, Homo sapiens
tagttactaccatta

SEQ ID NO: 837028 - DNA, 15 bp, Homo sapiens
ttagttactaccatt

SEQ ID NO: 837029 - DNA, 15 bp, Homo sapiens
attagttactaccat

SEQ ID NO: 837030 - DNA, 15 bp, Homo sapiens
aattagttactacca

SEQ ID NO: 837031 - DNA, 15 bp, Homo sapiens
gaattagttactacc

SEQ ID NO: 837032 - DNA, 15 bp, Homo sapiens
tgaattagttactac

SEQ ID NO: 837033 - DNA, 15 bp, Homo sapiens
atgaattagttacta

SEQ ID NO: 837034 - DNA, 15 bp, Homo sapiens
aatgaattagttact

SEQ ID NO: 837035 - DNA, 15 bp, Homo sapiens
caatgaattagttac

SEQ ID NO: 837036 - DNA, 15 bp, Homo sapiens
acaatgaattagtta

SEQ ID NO: 837037 - DNA, 15 bp, Homo sapiens
cacaatgaattagtt

SEQ ID NO: 837038 - DNA, 15 bp, Homo sapiens
acacaatgaattagt

SEQ ID NO: 837039 - DNA, 15 bp, Homo sapiens
aacacaatgaattag

SEQ ID NO: 837040 - DNA, 15 bp, Homo sapiens
aaacacaatgaatta

SEQ ID NO: 837041 - DNA, 15 bp, Homo sapiens
aaaacacaatgaatt

SEQ ID NO: 837042 - DNA, 15 bp, Homo sapiens
aaaaacacaatgaat

SEQ ID NO: 837043 - DNA, 15 bp, Homo sapiens
caaaaacacaatgaa

SEQ ID NO: 837044 - DNA, 15 bp, Homo sapiens
acaaaaacacaatga

SEQ ID NO: 837045 - DNA, 15 bp, Homo sapiens
cacaaaaacacaatg

SEQ ID NO: 837046 - DNA, 15 bp, Homo sapiens
tcacaaaaacacaat

SEQ ID NO: 837047 - DNA, 15 bp, Homo sapiens
ctcacaaaaacacaa

SEQ ID NO: 837048 - DNA, 15 bp, Homo sapiens
cctcacaaaaacaca

SEQ ID NO: 837049 - DNA, 15 bp, Homo sapiens
tcctcacaaaaacac

SEQ ID NO: 837050 - DNA, 15 bp, Homo sapiens
atcctcacaaaaaca

SEQ ID NO: 837051 - DNA, 15 bp, Homo sapiens
aatcctcacaaaaac

SEQ ID NO: 837052 - DNA, 15 bp, Homo sapiens
taatcctcacaaaaa

SEQ ID NO: 837053 - DNA, 15 bp, Homo sapiens
ttaatcctcacaaaa

SEQ ID NO: 837054 - DNA, 15 bp, Homo sapiens
tttaatcctcacaaa

SEQ ID NO: 837055 - DNA, 15 bp, Homo sapiens
atttaatcctcacaa

SEQ ID NO: 837056 - DNA, 15 bp, Homo sapiens
catttaatcctcaca

SEQ ID NO: 837057 - DNA, 15 bp, Homo sapiens
tcatttaatcctcac

SEQ ID NO: 837058 - DNA, 15 bp, Homo sapiens
ctcatttaatcctca

SEQ ID NO: 837059 - DNA, 15 bp, Homo sapiens
actcatttaatcctc

SEQ ID NO: 837060 - DNA, 15 bp, Homo sapiens
aactcatttaatcct

SEQ ID NO: 837061 - DNA, 15 bp, Homo sapiens
taactcatttaatcc

SEQ ID NO: 837062 - DNA, 15 bp, Homo sapiens
ttaactcatttaatc

SEQ ID NO: 837063 - DNA, 15 bp, Homo sapiens
attaactcatttaat

SEQ ID NO: 837064 - DNA, 15 bp, Homo sapiens
tattaactcatttaa

SEQ ID NO: 837065 - DNA, 15 bp, Homo sapiens
ttattaactcattta

SEQ ID NO: 837066 - DNA, 15 bp, Homo sapiens
gttattaactcattt

SEQ ID NO: 837067 - DNA, 15 bp, Homo sapiens
agttattaactcatt

SEQ ID NO: 837068 - DNA, 15 bp, Homo sapiens
tagttattaactcat

SEQ ID NO: 837069 - DNA, 15 bp, Homo sapiens
ctagttattaactca

SEQ ID NO: 837070 - DNA, 15 bp, Homo sapiens
actagttattaactc

SEQ ID NO: 837071 - DNA, 15 bp, Homo sapiens
tactagttattaact

SEQ ID NO: 837072 - DNA, 15 bp, Homo sapiens
gtactagttattaac

SEQ ID NO: 837073 - DNA, 15 bp, Homo sapiens
agtactagttattaa

SEQ ID NO: 837074 - DNA, 15 bp, Homo sapiens
gagtactagttatta

SEQ ID NO: 837075 - DNA, 15 bp, Homo sapiens
ggagtactagttatt

SEQ ID NO: 837076 - DNA, 15 bp, Homo sapiens
aggagtactagttat

SEQ ID NO: 837077 - DNA, 15 bp, Homo sapiens
gaggagtactagtta

SEQ ID NO: 837078 - DNA, 15 bp, Homo sapiens
ggaggagtactagtt

SEQ ID NO: 837079 - DNA, 15 bp, Homo sapiens
gggaggagtactagt

SEQ ID NO: 837080 - DNA, 15 bp, Homo sapiens
agggaggagtactag

SEQ ID NO: 837081 - DNA, 15 bp, Homo sapiens
cagggaggagtacta

SEQ ID NO: 837082 - DNA, 15 bp, Homo sapiens
ccagggaggagtact

SEQ ID NO: 837083 - DNA, 15 bp, Homo sapiens
gccagggaggagtac

SEQ ID NO: 837084 - DNA, 15 bp, Homo sapiens
tgccagggaggagta

SEQ ID NO: 837085 - DNA, 15 bp, Homo sapiens
gtgccagggaggagt

SEQ ID NO: 837086 - DNA, 15 bp, Homo sapiens
tgtgccagggaggag

SEQ ID NO: 837087 - DNA, 15 bp, Homo sapiens
atgtgccagggagga

SEQ ID NO: 837088 - DNA, 15 bp, Homo sapiens
tatgtgccagggagg

SEQ ID NO: 837089 - DNA, 15 bp, Homo sapiens
ctatgtgccagggag

SEQ ID NO: 837090 - DNA, 15 bp, Homo sapiens
actatgtgccaggga

SEQ ID NO: 837091 - DNA, 15 bp, Homo sapiens
tactatgtgccaggg

SEQ ID NO: 837092 - DNA, 15 bp, Homo sapiens
ttactatgtgccagg

SEQ ID NO: 837093 - DNA, 15 bp, Homo sapiens
cttactatgtgccag

SEQ ID NO: 837094 - DNA, 15 bp, Homo sapiens
acttactatgtgcca

SEQ ID NO: 837095 - DNA, 15 bp, Homo sapiens
tacttactatgtgcc

SEQ ID NO: 837096 - DNA, 15 bp, Homo sapiens
gtacttactatgtgc

SEQ ID NO: 837097 - DNA, 15 bp, Homo sapiens
tgtacttactatgtg

SEQ ID NO: 837098 - DNA, 15 bp, Homo sapiens
ttgtacttactatgt

SEQ ID NO: 837099 - DNA, 15 bp, Homo sapiens
attgtacttactatg

SEQ ID NO: 837100 - DNA, 15 bp, Homo sapiens
tattgtacttactat

SEQ ID NO: 837101 - DNA, 15 bp, Homo sapiens
atattgtacttacta

SEQ ID NO: 837102 - DNA, 15 bp, Homo sapiens
catattgtacttact

SEQ ID NO: 837103 - DNA, 15 bp, Homo sapiens
gcatattgtacttac

SEQ ID NO: 837104 - DNA, 15 bp, Homo sapiens
agcatattgtactta

SEQ ID NO: 837105 - DNA, 15 bp, Homo sapiens
cagcatattgtactt

SEQ ID NO: 837106 - DNA, 15 bp, Homo sapiens
acagcatattgtact

SEQ ID NO: 837107 - DNA, 15 bp, Homo sapiens
cacagcatattgtac

SEQ ID NO: 837108 - DNA, 15 bp, Homo sapiens
gcacagcatattgta

SEQ ID NO: 837109 - DNA, 15 bp, Homo sapiens
agcacagcatattgt

SEQ ID NO: 837110 - DNA, 15 bp, Homo sapiens
cagcacagcatattg

SEQ ID NO: 837111 - DNA, 15 bp, Homo sapiens
acagcacagcatatt

SEQ ID NO: 837112 - DNA, 15 bp, Homo sapiens
cacagcacagcatat

SEQ ID NO: 837113 - DNA, 15 bp, Homo sapiens
ccacagcacagcata

SEQ ID NO: 837114 - DNA, 15 bp, Homo sapiens
accacagcacagcat

SEQ ID NO: 837115 - DNA, 15 bp, Homo sapiens
caccacagcacagca

SEQ ID NO: 837116 - DNA, 15 bp, Homo sapiens
ccaccacagcacagc

SEQ ID NO: 837117 - DNA, 15 bp, Homo sapiens
accaccacagcacag

SEQ ID NO: 837118 - DNA, 15 bp, Homo sapiens
aaccaccacagcaca

SEQ ID NO: 837119 - DNA, 15 bp, Homo sapiens
caaccaccacagcac

SEQ ID NO: 837120 - DNA, 15 bp, Homo sapiens
acaaccaccacagca

SEQ ID NO: 837121 - DNA, 15 bp, Homo sapiens
aacaaccaccacagc

SEQ ID NO: 837122 - DNA, 15 bp, Homo sapiens
taacaaccaccacag

SEQ ID NO: 837123 - DNA, 15 bp, Homo sapiens
ataacaaccaccaca

SEQ ID NO: 837124 - DNA, 15 bp, Homo sapiens
aataacaaccaccac

SEQ ID NO: 837125 - DNA, 15 bp, Homo sapiens
taataacaaccacca

SEQ ID NO: 837126 - DNA, 15 bp, Homo sapiens
ataataacaaccacc

SEQ ID NO: 837127 - DNA, 15 bp, Homo sapiens
aataataacaaccac

SEQ ID NO: 837128 - DNA, 15 bp, Homo sapiens
aaataataacaacca

SEQ ID NO: 837129 - DNA, 15 bp, Homo sapiens
aaaataataacaacc

SEQ ID NO: 837130 - DNA, 15 bp, Homo sapiens
aaaaataataacaac

SEQ ID NO: 837131 - DNA, 15 bp, Homo sapiens
aaaaaataataacaa

SEQ ID NO: 837132 - DNA, 15 bp, Homo sapiens
taaaaaataataaca

SEQ ID NO: 837133 - DNA, 15 bp, Homo sapiens
ataaaaaataataac

SEQ ID NO: 837134 - DNA, 15 bp, Homo sapiens
tataaaaaataataa

SEQ ID NO: 837135 - DNA, 15 bp, Homo sapiens
ctataaaaaataata

SEQ ID NO: 837136 - DNA, 15 bp, Homo sapiens
actataaaaaataat

SEQ ID NO: 837137 - DNA, 15 bp, Homo sapiens
aactataaaaaataa

SEQ ID NO: 837138 - DNA, 15 bp, Homo sapiens
gaactataaaaaata

SEQ ID NO: 837139 - DNA, 15 bp, Homo sapiens
ggaactataaaaaat

SEQ ID NO: 837140 - DNA, 15 bp, Homo sapiens
aggaactataaaaaa

SEQ ID NO: 837141 - DNA, 15 bp, Homo sapiens
aaggaactataaaaa

SEQ ID NO: 837142 - DNA, 15 bp, Homo sapiens
caaggaactataaaa

SEQ ID NO: 837143 - DNA, 15 bp, Homo sapiens
tcaaggaactataaa

SEQ ID NO: 837144 - DNA, 15 bp, Homo sapiens
ctcaaggaactataa

SEQ ID NO: 837145 - DNA, 15 bp, Homo sapiens
gctcaaggaactata

SEQ ID NO: 837146 - DNA, 15 bp, Homo sapiens
tgctcaaggaactat

SEQ ID NO: 837147 - DNA, 15 bp, Homo sapiens
ttgctcaaggaacta

SEQ ID NO: 837148 - DNA, 15 bp, Homo sapiens
tttgctcaaggaact

SEQ ID NO: 837149 - DNA, 15 bp, Homo sapiens
ttttgctcaaggaac

SEQ ID NO: 837150 - DNA, 15 bp, Homo sapiens
cttttgctcaaggaa

SEQ ID NO: 837151 - DNA, 15 bp, Homo sapiens
tcttttgctcaagga

SEQ ID NO: 837152 - DNA, 15 bp, Homo sapiens
ttcttttgctcaagg

SEQ ID NO: 837153 - DNA, 15 bp, Homo sapiens
tttcttttgctcaag

SEQ ID NO: 837154 - DNA, 15 bp, Homo sapiens
atttcttttgctcaa

SEQ ID NO: 837155 - DNA, 15 bp, Homo sapiens
tatttcttttgctca

SEQ ID NO: 837156 - DNA, 15 bp, Homo sapiens
ttatttcttttgctc

SEQ ID NO: 837157 - DNA, 15 bp, Homo sapiens
attatttcttttgct

SEQ ID NO: 837158 - DNA, 15 bp, Homo sapiens
cattatttcttttgc

SEQ ID NO: 837159 - DNA, 15 bp, Homo sapiens
acattatttcttttg

SEQ ID NO: 837160 - DNA, 15 bp, Homo sapiens
gacattatttctttt

SEQ ID NO: 837161 - DNA, 15 bp, Homo sapiens
ggacattatttcttt

SEQ ID NO: 837162 - DNA, 15 bp, Homo sapiens
gggacattatttctt

SEQ ID NO: 837163 - DNA, 15 bp, Homo sapiens
ggggacattatttct

SEQ ID NO: 837164 - DNA, 15 bp, Homo sapiens
tggggacattatttc

SEQ ID NO: 837165 - DNA, 15 bp, Homo sapiens
atggggacattattt

SEQ ID NO: 837166 - DNA, 15 bp, Homo sapiens
gatggggacattatt

SEQ ID NO: 837167 - DNA, 15 bp, Homo sapiens
agatggggacattat

SEQ ID NO: 837168 - DNA, 15 bp, Homo sapiens
aagatggggacatta

SEQ ID NO: 837169 - DNA, 15 bp, Homo sapiens
taagatggggacatt

SEQ ID NO: 837170 - DNA, 15 bp, Homo sapiens
ctaagatggggacat

SEQ ID NO: 837171 - DNA, 15 bp, Homo sapiens
actaagatggggaca

SEQ ID NO: 837172 - DNA, 15 bp, Homo sapiens
tactaagatggggac

SEQ ID NO: 837173 - DNA, 15 bp, Homo sapiens
atactaagatgggga

SEQ ID NO: 837174 - DNA, 15 bp, Homo sapiens
tatactaagatgggg

SEQ ID NO: 837175 - DNA, 15 bp, Homo sapiens
ttatactaagatggg

SEQ ID NO: 837176 - DNA, 15 bp, Homo sapiens
attatactaagatgg

SEQ ID NO: 837177 - DNA, 15 bp, Homo sapiens
tattatactaagatg

SEQ ID NO: 837178 - DNA, 15 bp, Homo sapiens
atattatactaagat

SEQ ID NO: 837179 - DNA, 15 bp, Homo sapiens
aatattatactaaga

SEQ ID NO: 837180 - DNA, 15 bp, Homo sapiens
caatattatactaag

SEQ ID NO: 837181 - DNA, 15 bp, Homo sapiens
ccaatattatactaa

SEQ ID NO: 837182 - DNA, 15 bp, Homo sapiens
tccaatattatacta

SEQ ID NO: 837183 - DNA, 15 bp, Homo sapiens
ctccaatattatact

SEQ ID NO: 837184 - DNA, 15 bp, Homo sapiens
cctccaatattatac

SEQ ID NO: 837185 - DNA, 15 bp, Homo sapiens
acctccaatattata

SEQ ID NO: 837186 - DNA, 15 bp, Homo sapiens
tacctccaatattat

SEQ ID NO: 837187 - DNA, 15 bp, Homo sapiens
atacctccaatatta

SEQ ID NO: 837188 - DNA, 15 bp, Homo sapiens
tatacctccaatatt

SEQ ID NO: 837189 - DNA, 15 bp, Homo sapiens
atatacctccaatat

SEQ ID NO: 837190 - DNA, 15 bp, Homo sapiens
tatatacctccaata

SEQ ID NO: 837191 - DNA, 15 bp, Homo sapiens
gtatatacctccaat

SEQ ID NO: 837192 - DNA, 15 bp, Homo sapiens
ggtatatacctccaa

SEQ ID NO: 837193 - DNA, 15 bp, Homo sapiens
tggtatatacctcca

SEQ ID NO: 837194 - DNA, 15 bp, Homo sapiens
atggtatatacctcc

SEQ ID NO: 837195 - DNA, 15 bp, Homo sapiens
tatggtatatacctc

SEQ ID NO: 837196 - DNA, 15 bp, Homo sapiens
ctatggtatatacct

SEQ ID NO: 837197 - DNA, 15 bp, Homo sapiens
tctatggtatatacc

SEQ ID NO: 837198 - DNA, 15 bp, Homo sapiens
ttctatggtatatac

SEQ ID NO: 837199 - DNA, 15 bp, Homo sapiens
cttctatggtatata

SEQ ID NO: 837200 - DNA, 15 bp, Homo sapiens
acttctatggtatat

SEQ ID NO: 837201 - DNA, 15 bp, Homo sapiens
cacttctatggtata

SEQ ID NO: 837202 - DNA, 15 bp, Homo sapiens
tcacttctatggtat

SEQ ID NO: 837203 - DNA, 15 bp, Homo sapiens
ttcacttctatggta

SEQ ID NO: 837204 - DNA, 15 bp, Homo sapiens
gttcacttctatggt

SEQ ID NO: 837205 - DNA, 15 bp, Homo sapiens
tgttcacttctatgg

SEQ ID NO: 837206 - DNA, 15 bp, Homo sapiens
ttgttcacttctatg

SEQ ID NO: 837207 - DNA, 15 bp, Homo sapiens
tttgttcacttctat

SEQ ID NO: 837208 - DNA, 15 bp, Homo sapiens
ttttgttcacttcta

SEQ ID NO: 837209 - DNA, 15 bp, Homo sapiens
cttttgttcacttct

SEQ ID NO: 837210 - DNA, 15 bp, Homo sapiens
tcttttgttcacttc

SEQ ID NO: 837211 - DNA, 15 bp, Homo sapiens
ttcttttgttcactt

SEQ ID NO: 837212 - DNA, 15 bp, Homo sapiens
attcttttgttcact

SEQ ID NO: 837213 - DNA, 15 bp, Homo sapiens
tattcttttgttcac

SEQ ID NO: 837214 - DNA, 15 bp, Homo sapiens
atattcttttgttca

SEQ ID NO: 837215 - DNA, 15 bp, Homo sapiens
tatattcttttgttc

SEQ ID NO: 837216 - DNA, 15 bp, Homo sapiens
ctatattcttttgtt

SEQ ID NO: 837217 - DNA, 15 bp, Homo sapiens
actatattcttttgt

SEQ ID NO: 837218 - DNA, 15 bp, Homo sapiens
aactatattcttttg

SEQ ID NO: 837219 - DNA, 15 bp, Homo sapiens
aaactatattctttt

SEQ ID NO: 837220 - DNA, 15 bp, Homo sapiens
gaaactatattcttt

SEQ ID NO: 837221 - DNA, 15 bp, Homo sapiens
tgaaactatattctt

SEQ ID NO: 837222 - DNA, 15 bp, Homo sapiens
gtgaaactatattct

SEQ ID NO: 837223 - DNA, 15 bp, Homo sapiens
tgtgaaactatattc

SEQ ID NO: 837224 - DNA, 15 bp, Homo sapiens
ttgtgaaactatatt

SEQ ID NO: 837225 - DNA, 15 bp, Homo sapiens
tttgtgaaactatat

SEQ ID NO: 837226 - DNA, 15 bp, Homo sapiens
ctttgtgaaactata

SEQ ID NO: 837227 - DNA, 15 bp, Homo sapiens
tctttgtgaaactat

SEQ ID NO: 837228 - DNA, 15 bp, Homo sapiens
ttctttgtgaaacta

SEQ ID NO: 837229 - DNA, 15 bp, Homo sapiens
tttctttgtgaaact

SEQ ID NO: 837230 - DNA, 15 bp, Homo sapiens
ctttctttgtgaaac

SEQ ID NO: 837231 - DNA, 15 bp, Homo sapiens
actttctttgtgaaa

SEQ ID NO: 837232 - DNA, 15 bp, Homo sapiens
cactttctttgtgaa

SEQ ID NO: 837233 - DNA, 15 bp, Homo sapiens
tcactttctttgtga

SEQ ID NO: 837234 - DNA, 15 bp, Homo sapiens
atcactttctttgtg

SEQ ID NO: 837235 - DNA, 15 bp, Homo sapiens
tatcactttctttgt

SEQ ID NO: 837236 - DNA, 15 bp, Homo sapiens
ttatcactttctttg

SEQ ID NO: 837237 - DNA, 15 bp, Homo sapiens
attatcactttcttt

SEQ ID NO: 837238 - DNA, 15 bp, Homo sapiens
aattatcactttctt

SEQ ID NO: 837239 - DNA, 15 bp, Homo sapiens
taattatcactttct

SEQ ID NO: 837240 - DNA, 15 bp, Homo sapiens
ttaattatcactttc

SEQ ID NO: 837241 - DNA, 15 bp, Homo sapiens
cttaattatcacttt

SEQ ID NO: 837242 - DNA, 15 bp, Homo sapiens
ccttaattatcactt

SEQ ID NO: 837243 - DNA, 15 bp, Homo sapiens
gccttaattatcact

SEQ ID NO: 837244 - DNA, 15 bp, Homo sapiens
cgccttaattatcac

SEQ ID NO: 837245 - DNA, 15 bp, Homo sapiens
ccgccttaattatca

SEQ ID NO: 837246 - DNA, 15 bp, Homo sapiens
accgccttaattatc

SEQ ID NO: 837247 - DNA, 15 bp, Homo sapiens
aaccgccttaattat

SEQ ID NO: 837248 - DNA, 15 bp, Homo sapiens
gaaccgccttaatta

SEQ ID NO: 837249 - DNA, 15 bp, Homo sapiens
tgaaccgccttaatt

SEQ ID NO: 837250 - DNA, 15 bp, Homo sapiens
atgaaccgccttaat

SEQ ID NO: 837251 - DNA, 15 bp, Homo sapiens
tatgaaccgccttaa

SEQ ID NO: 837252 - DNA, 15 bp, Homo sapiens
ttatgaaccgcctta

SEQ ID NO: 837253 - DNA, 15 bp, Homo sapiens
tttatgaaccgcctt

SEQ ID NO: 837254 - DNA, 15 bp, Homo sapiens
ctttatgaaccgcct

SEQ ID NO: 837255 - DNA, 15 bp, Homo sapiens
cctttatgaaccgcc

SEQ ID NO: 837256 - DNA, 15 bp, Homo sapiens
ccctttatgaaccgc

SEQ ID NO: 837257 - DNA, 15 bp, Homo sapiens
accctttatgaaccg

SEQ ID NO: 837258 - DNA, 15 bp, Homo sapiens
gaccctttatgaacc

SEQ ID NO: 837259 - DNA, 15 bp, Homo sapiens
tgaccctttatgaac

SEQ ID NO: 837260 - DNA, 15 bp, Homo sapiens
atgaccctttatgaa

SEQ ID NO: 837261 - DNA, 15 bp, Homo sapiens
tatgaccctttatga

SEQ ID NO: 837262 - DNA, 15 bp, Homo sapiens
ttatgaccctttatg

SEQ ID NO: 837263 - DNA, 15 bp, Homo sapiens
tttatgaccctttat

SEQ ID NO: 837264 - DNA, 15 bp, Homo sapiens
ctttatgacccttta

SEQ ID NO: 837265 - DNA, 15 bp, Homo sapiens
gctttatgacccttt

SEQ ID NO: 837266 - DNA, 15 bp, Homo sapiens
agctttatgaccctt

SEQ ID NO: 837267 - DNA, 15 bp, Homo sapiens
aagctttatgaccct

SEQ ID NO: 837268 - DNA, 15 bp, Homo sapiens
caagctttatgaccc

SEQ ID NO: 837269 - DNA, 15 bp, Homo sapiens
acaagctttatgacc

SEQ ID NO: 837270 - DNA, 15 bp, Homo sapiens
tacaagctttatgac

SEQ ID NO: 837271 - DNA, 15 bp, Homo sapiens
ctacaagctttatga

SEQ ID NO: 837272 - DNA, 15 bp, Homo sapiens
tctacaagctttatg

SEQ ID NO: 837273 - DNA, 15 bp, Homo sapiens
atctacaagctttat

SEQ ID NO: 837274 - DNA, 15 bp, Homo sapiens
aatctacaagcttta

SEQ ID NO: 837275 - DNA, 15 bp, Homo sapiens
aaatctacaagcttt

SEQ ID NO: 837276 - DNA, 15 bp, Homo sapiens
aaaatctacaagctt

SEQ ID NO: 837277 - DNA, 15 bp, Homo sapiens
taaaatctacaagct

SEQ ID NO: 837278 - DNA, 15 bp, Homo sapiens
ctaaaatctacaagc

SEQ ID NO: 837279 - DNA, 15 bp, Homo sapiens
tctaaaatctacaag

SEQ ID NO: 837280 - DNA, 15 bp, Homo sapiens
ttctaaaatctacaa

SEQ ID NO: 837281 - DNA, 15 bp, Homo sapiens
tttctaaaatctaca

SEQ ID NO: 837282 - DNA, 15 bp, Homo sapiens
atttctaaaatctac

SEQ ID NO: 837283 - DNA, 15 bp, Homo sapiens
catttctaaaatcta

SEQ ID NO: 837284 - DNA, 15 bp, Homo sapiens
acatttctaaaatct

SEQ ID NO: 837285 - DNA, 15 bp, Homo sapiens
cacatttctaaaatc

SEQ ID NO: 837286 - DNA, 15 bp, Homo sapiens
ccacatttctaaaat

SEQ ID NO: 837287 - DNA, 15 bp, Homo sapiens
cccacatttctaaaa

SEQ ID NO: 837288 - DNA, 15 bp, Homo sapiens
ccccacatttctaaa

SEQ ID NO: 837289 - DNA, 15 bp, Homo sapiens
cccccacatttctaa

SEQ ID NO: 837290 - DNA, 15 bp, Homo sapiens
gcccccacatttcta

SEQ ID NO: 837291 - DNA, 15 bp, Homo sapiens
tgcccccacatttct

SEQ ID NO: 837292 - DNA, 15 bp, Homo sapiens
atgcccccacatttc

SEQ ID NO: 837293 - DNA, 15 bp, Homo sapiens
catgcccccacattt

SEQ ID NO: 837294 - DNA, 15 bp, Homo sapiens
tcatgcccccacatt

SEQ ID NO: 837295 - DNA, 15 bp, Homo sapiens
ctcatgcccccacat

SEQ ID NO: 837296 - DNA, 15 bp, Homo sapiens
cctcatgcccccaca

SEQ ID NO: 837297 - DNA, 15 bp, Homo sapiens
tcctcatgcccccac

SEQ ID NO: 837298 - DNA, 15 bp, Homo sapiens
atcctcatgccccca

SEQ ID NO: 837299 - DNA, 15 bp, Homo sapiens
catcctcatgccccc

SEQ ID NO: 837300 - DNA, 15 bp, Homo sapiens
acatcctcatgcccc

SEQ ID NO: 837301 - DNA, 15 bp, Homo sapiens
cacatcctcatgccc

SEQ ID NO: 837302 - DNA, 15 bp, Homo sapiens
ccacatcctcatgcc

SEQ ID NO: 837303 - DNA, 15 bp, Homo sapiens
tccacatcctcatgc

SEQ ID NO: 837304 - DNA, 15 bp, Homo sapiens
ctccacatcctcatg

SEQ ID NO: 837305 - DNA, 15 bp, Homo sapiens
tctccacatcctcat

SEQ ID NO: 837306 - DNA, 15 bp, Homo sapiens
ctctccacatcctca

SEQ ID NO: 837307 - DNA, 15 bp, Homo sapiens
cctctccacatcctc

SEQ ID NO: 837308 - DNA, 15 bp, Homo sapiens
ccctctccacatcct

SEQ ID NO: 837309 - DNA, 15 bp, Homo sapiens
accctctccacatcc

SEQ ID NO: 837310 - DNA, 15 bp, Homo sapiens
taccctctccacatc

SEQ ID NO: 837311 - DNA, 15 bp, Homo sapiens
ataccctctccacat

SEQ ID NO: 837312 - DNA, 15 bp, Homo sapiens
aataccctctccaca

SEQ ID NO: 837313 - DNA, 15 bp, Homo sapiens
gaataccctctccac

SEQ ID NO: 837314 - DNA, 15 bp, Homo sapiens
ggaataccctctcca

SEQ ID NO: 837315 - DNA, 15 bp, Homo sapiens
tggaataccctctcc

SEQ ID NO: 837316 - DNA, 15 bp, Homo sapiens
ctggaataccctctc

SEQ ID NO: 837317 - DNA, 15 bp, Homo sapiens
cctggaataccctct

SEQ ID NO: 837318 - DNA, 15 bp, Homo sapiens
tcctggaataccctc

SEQ ID NO: 837319 - DNA, 15 bp, Homo sapiens
atcctggaataccct

SEQ ID NO: 837320 - DNA, 15 bp, Homo sapiens
catcctggaataccc

SEQ ID NO: 837321 - DNA, 15 bp, Homo sapiens
gcatcctggaatacc

SEQ ID NO: 837322 - DNA, 15 bp, Homo sapiens
ggcatcctggaatac

SEQ ID NO: 837323 - DNA, 15 bp, Homo sapiens
tggcatcctggaata

SEQ ID NO: 837324 - DNA, 15 bp, Homo sapiens
ctggcatcctggaat

SEQ ID NO: 837325 - DNA, 15 bp, Homo sapiens
tctggcatcctggaa

SEQ ID NO: 837326 - DNA, 15 bp, Homo sapiens
gtctggcatcctgga

SEQ ID NO: 837327 - DNA, 15 bp, Homo sapiens
tgtctggcatcctgg

SEQ ID NO: 837328 - DNA, 15 bp, Homo sapiens
ctgtctggcatcctg

SEQ ID NO: 837329 - DNA, 15 bp, Homo sapiens
cctgtctggcatcct

SEQ ID NO: 837330 - DNA, 15 bp, Homo sapiens
ccctgtctggcatcc

SEQ ID NO: 837331 - DNA, 15 bp, Homo sapiens
tccctgtctggcatc

SEQ ID NO: 837332 - DNA, 15 bp, Homo sapiens
ctccctgtctggcat

SEQ ID NO: 837333 - DNA, 15 bp, Homo sapiens
tctccctgtctggca

SEQ ID NO: 837334 - DNA, 15 bp, Homo sapiens
atctccctgtctggc

SEQ ID NO: 837335 - DNA, 15 bp, Homo sapiens
aatctccctgtctgg

SEQ ID NO: 837336 - DNA, 15 bp, Homo sapiens
taatctccctgtctg

SEQ ID NO: 837337 - DNA, 15 bp, Homo sapiens
ataatctccctgtct

SEQ ID NO: 837338 - DNA, 15 bp, Homo sapiens
cataatctccctgtc

SEQ ID NO: 837339 - DNA, 15 bp, Homo sapiens
ccataatctccctgt

SEQ ID NO: 837340 - DNA, 15 bp, Homo sapiens
tccataatctccctg

SEQ ID NO: 837341 - DNA, 15 bp, Homo sapiens
atccataatctccct

SEQ ID NO: 837342 - DNA, 15 bp, Homo sapiens
catccataatctccc

SEQ ID NO: 837343 - DNA, 15 bp, Homo sapiens
tcatccataatctcc

SEQ ID NO: 837344 - DNA, 15 bp, Homo sapiens
ctcatccataatctc

SEQ ID NO: 837345 - DNA, 15 bp, Homo sapiens
actcatccataatct

SEQ ID NO: 837346 - DNA, 15 bp, Homo sapiens
tactcatccataatc

SEQ ID NO: 837347 - DNA, 15 bp, Homo sapiens
gtactcatccataat

SEQ ID NO: 837348 - DNA, 15 bp, Homo sapiens
agtactcatccataa

SEQ ID NO: 837349 - DNA, 15 bp, Homo sapiens
tagtactcatccata

SEQ ID NO: 837350 - DNA, 15 bp, Homo sapiens
ttagtactcatccat

SEQ ID NO: 837351 - DNA, 15 bp, Homo sapiens
cttagtactcatcca

SEQ ID NO: 837352 - DNA, 15 bp, Homo sapiens
tcttagtactcatcc

SEQ ID NO: 837353 - DNA, 15 bp, Homo sapiens
atcttagtactcatc

SEQ ID NO: 837354 - DNA, 15 bp, Homo sapiens
catcttagtactcat

SEQ ID NO: 837355 - DNA, 15 bp, Homo sapiens
tcatcttagtactca

SEQ ID NO: 837356 - DNA, 15 bp, Homo sapiens
ctcatcttagtactc

SEQ ID NO: 837357 - DNA, 15 bp, Homo sapiens
tctcatcttagtact

SEQ ID NO: 837358 - DNA, 15 bp, Homo sapiens
ttctcatcttagtac

SEQ ID NO: 837359 - DNA, 15 bp, Homo sapiens
gttctcatcttagta

SEQ ID NO: 837360 - DNA, 15 bp, Homo sapiens
agttctcatcttagt

SEQ ID NO: 837361 - DNA, 15 bp, Homo sapiens
tagttctcatcttag

SEQ ID NO: 837362 - DNA, 15 bp, Homo sapiens
ctagttctcatctta

SEQ ID NO: 837363 - DNA, 15 bp, Homo sapiens
tctagttctcatctt

SEQ ID NO: 837364 - DNA, 15 bp, Homo sapiens
ttctagttctcatct

SEQ ID NO: 837365 - DNA, 15 bp, Homo sapiens
tttctagttctcatc

SEQ ID NO: 837366 - DNA, 15 bp, Homo sapiens
ttttctagttctcat

SEQ ID NO: 837367 - DNA, 15 bp, Homo sapiens
tttttctagttctca

SEQ ID NO: 837368 - DNA, 15 bp, Homo sapiens
ctttttctagttctc

SEQ ID NO: 837369 - DNA, 15 bp, Homo sapiens
gctttttctagttct

SEQ ID NO: 837370 - DNA, 15 bp, Homo sapiens
agctttttctagttc

SEQ ID NO: 837371 - DNA, 15 bp, Homo sapiens
cagctttttctagtt

SEQ ID NO: 837372 - DNA, 15 bp, Homo sapiens
tcagctttttctagt

SEQ ID NO: 837373 - DNA, 15 bp, Homo sapiens
ctcagctttttctag

SEQ ID NO: 837374 - DNA, 15 bp, Homo sapiens
cctcagctttttcta

SEQ ID NO: 837375 - DNA, 15 bp, Homo sapiens
ccctcagctttttct

SEQ ID NO: 837376 - DNA, 15 bp, Homo sapiens
cccctcagctttttc

SEQ ID NO: 837377 - DNA, 15 bp, Homo sapiens
gcccctcagcttttt

SEQ ID NO: 837378 - DNA, 15 bp, Homo sapiens
tgcccctcagctttt

SEQ ID NO: 837379 - DNA, 15 bp, Homo sapiens
ttgcccctcagcttt

SEQ ID NO: 837380 - DNA, 15 bp, Homo sapiens
tttgcccctcagctt

SEQ ID NO: 837381 - DNA, 15 bp, Homo sapiens
ttttgcccctcagct

SEQ ID NO: 837382 - DNA, 15 bp, Homo sapiens
cttttgcccctcagc

SEQ ID NO: 837383 - DNA, 15 bp, Homo sapiens
ccttttgcccctcag

SEQ ID NO: 837384 - DNA, 15 bp, Homo sapiens
accttttgcccctca

SEQ ID NO: 837385 - DNA, 15 bp, Homo sapiens
gaccttttgcccctc

SEQ ID NO: 837386 - DNA, 15 bp, Homo sapiens
tgaccttttgcccct

SEQ ID NO: 837387 - DNA, 15 bp, Homo sapiens
ctgaccttttgcccc

SEQ ID NO: 837388 - DNA, 15 bp, Homo sapiens
tctgaccttttgccc

SEQ ID NO: 837389 - DNA, 15 bp, Homo sapiens
ctctgaccttttgcc

SEQ ID NO: 837390 - DNA, 15 bp, Homo sapiens
cctctgaccttttgc

SEQ ID NO: 837391 - DNA, 15 bp, Homo sapiens
tcctctgaccttttg

SEQ ID NO: 837392 - DNA, 15 bp, Homo sapiens
ctcctctgacctttt

SEQ ID NO: 837393 - DNA, 15 bp, Homo sapiens
cctcctctgaccttt

SEQ ID NO: 837394 - DNA, 15 bp, Homo sapiens
gcctcctctgacctt

SEQ ID NO: 837395 - DNA, 15 bp, Homo sapiens
ggcctcctctgacct

SEQ ID NO: 837396 - DNA, 15 bp, Homo sapiens
tggcctcctctgacc

SEQ ID NO: 837397 - DNA, 15 bp, Homo sapiens
gtggcctcctctgac

SEQ ID NO: 837398 - DNA, 15 bp, Homo sapiens
tgtggcctcctctga

SEQ ID NO: 837399 - DNA, 15 bp, Homo sapiens
ttgtggcctcctctg

SEQ ID NO: 837400 - DNA, 15 bp, Homo sapiens
cttgtggcctcctct

SEQ ID NO: 837401 - DNA, 15 bp, Homo sapiens
acttgtggcctcctc

SEQ ID NO: 837402 - DNA, 15 bp, Homo sapiens
aacttgtggcctcct

SEQ ID NO: 837403 - DNA, 15 bp, Homo sapiens
taacttgtggcctcc

SEQ ID NO: 837404 - DNA, 15 bp, Homo sapiens
ctaacttgtggcctc

SEQ ID NO: 837405 - DNA, 15 bp, Homo sapiens
cctaacttgtggcct

SEQ ID NO: 837406 - DNA, 15 bp, Homo sapiens
ccctaacttgtggcc

SEQ ID NO: 837407 - DNA, 15 bp, Homo sapiens
tccctaacttgtggc

SEQ ID NO: 837408 - DNA, 15 bp, Homo sapiens
ctccctaacttgtgg

SEQ ID NO: 837409 - DNA, 15 bp, Homo sapiens
actccctaacttgtg

SEQ ID NO: 837410 - DNA, 15 bp, Homo sapiens
tactccctaacttgt

SEQ ID NO: 837411 - DNA, 15 bp, Homo sapiens
atactccctaacttg

SEQ ID NO: 837412 - DNA, 15 bp, Homo sapiens
aatactccctaactt

SEQ ID NO: 837413 - DNA, 15 bp, Homo sapiens
taatactccctaact

SEQ ID NO: 837414 - DNA, 15 bp, Homo sapiens
ctaatactccctaac

SEQ ID NO: 837415 - DNA, 15 bp, Homo sapiens
cctaatactccctaa

SEQ ID NO: 837416 - DNA, 15 bp, Homo sapiens
tcctaatactcccta

SEQ ID NO: 837417 - DNA, 15 bp, Homo sapiens
ttcctaatactccct

SEQ ID NO: 837418 - DNA, 15 bp, Homo sapiens
tttcctaatactccc

SEQ ID NO: 837419 - DNA, 15 bp, Homo sapiens
ttttcctaatactcc

SEQ ID NO: 837420 - DNA, 15 bp, Homo sapiens
tttttcctaatactc

SEQ ID NO: 837421 - DNA, 15 bp, Homo sapiens
ctttttcctaatact

SEQ ID NO: 837422 - DNA, 15 bp, Homo sapiens
tctttttcctaatac

SEQ ID NO: 837423 - DNA, 15 bp, Homo sapiens
ttctttttcctaata

SEQ ID NO: 837424 - DNA, 15 bp, Homo sapiens
cttctttttcctaat

SEQ ID NO: 837425 - DNA, 15 bp, Homo sapiens
acttctttttcctaa

SEQ ID NO: 837426 - DNA, 15 bp, Homo sapiens
aacttctttttccta

SEQ ID NO: 837427 - DNA, 15 bp, Homo sapiens
taacttctttttcct

SEQ ID NO: 837428 - DNA, 15 bp, Homo sapiens
ttaacttctttttcc

SEQ ID NO: 837429 - DNA, 15 bp, Homo sapiens
attaacttctttttc

SEQ ID NO: 837430 - DNA, 15 bp, Homo sapiens
tattaacttcttttt

SEQ ID NO: 837431 - DNA, 15 bp, Homo sapiens
gtattaacttctttt

SEQ ID NO: 837432 - DNA, 15 bp, Homo sapiens
agtattaacttcttt

SEQ ID NO: 837433 - DNA, 15 bp, Homo sapiens
aagtattaacttctt

SEQ ID NO: 837434 - DNA, 15 bp, Homo sapiens
caagtattaacttct

SEQ ID NO: 837435 - DNA, 15 bp, Homo sapiens
tcaagtattaacttc

SEQ ID NO: 837436 - DNA, 15 bp, Homo sapiens
gtcaagtattaactt

SEQ ID NO: 837437 - DNA, 15 bp, Homo sapiens
tgtcaagtattaact

SEQ ID NO: 837438 - DNA, 15 bp, Homo sapiens
ttgtcaagtattaac

SEQ ID NO: 837439 - DNA, 15 bp, Homo sapiens
cttgtcaagtattaa

SEQ ID NO: 837440 - DNA, 15 bp, Homo sapiens
acttgtcaagtatta

SEQ ID NO: 837441 - DNA, 15 bp, Homo sapiens
cacttgtcaagtatt

SEQ ID NO: 837442 - DNA, 15 bp, Homo sapiens
gcacttgtcaagtat

SEQ ID NO: 837443 - DNA, 15 bp, Homo sapiens
ggcacttgtcaagta

SEQ ID NO: 837444 - DNA, 15 bp, Homo sapiens
tggcacttgtcaagt

SEQ ID NO: 837445 - DNA, 15 bp, Homo sapiens
ttggcacttgtcaag

SEQ ID NO: 837446 - DNA, 15 bp, Homo sapiens
gttggcacttgtcaa

SEQ ID NO: 837447 - DNA, 15 bp, Homo sapiens
tgttggcacttgtca

SEQ ID NO: 837448 - DNA, 15 bp, Homo sapiens
atgttggcacttgtc

SEQ ID NO: 837449 - DNA, 15 bp, Homo sapiens
catgttggcacttgt

SEQ ID NO: 837450 - DNA, 15 bp, Homo sapiens
ccatgttggcacttg

SEQ ID NO: 837451 - DNA, 15 bp, Homo sapiens
gccatgttggcactt

SEQ ID NO: 837452 - DNA, 15 bp, Homo sapiens
agccatgttggcact

SEQ ID NO: 837453 - DNA, 15 bp, Homo sapiens
aagccatgttggcac

SEQ ID NO: 837454 - DNA, 15 bp, Homo sapiens
gaagccatgttggca

SEQ ID NO: 837455 - DNA, 15 bp, Homo sapiens
tgaagccatgttggc

SEQ ID NO: 837456 - DNA, 15 bp, Homo sapiens
gtgaagccatgttgg

SEQ ID NO: 837457 - DNA, 15 bp, Homo sapiens
cgtgaagccatgttg

SEQ ID NO: 837458 - DNA, 15 bp, Homo sapiens
tcgtgaagccatgtt

SEQ ID NO: 837459 - DNA, 15 bp, Homo sapiens
ctcgtgaagccatgt

SEQ ID NO: 837460 - DNA, 15 bp, Homo sapiens
cctcgtgaagccatg

SEQ ID NO: 837461 - DNA, 15 bp, Homo sapiens
tcctcgtgaagccat

SEQ ID NO: 837462 - DNA, 15 bp, Homo sapiens
ttcctcgtgaagcca

SEQ ID NO: 837463 - DNA, 15 bp, Homo sapiens
attcctcgtgaagcc

SEQ ID NO: 837464 - DNA, 15 bp, Homo sapiens
cattcctcgtgaagc

SEQ ID NO: 837465 - DNA, 15 bp, Homo sapiens
ccattcctcgtgaag

SEQ ID NO: 837466 - DNA, 15 bp, Homo sapiens
cccattcctcgtgaa

SEQ ID NO: 837467 - DNA, 15 bp, Homo sapiens
acccattcctcgtga

SEQ ID NO: 837468 - DNA, 15 bp, Homo sapiens
aacccattcctcgtg

SEQ ID NO: 837469 - DNA, 15 bp, Homo sapiens
caacccattcctcgt

SEQ ID NO: 837470 - DNA, 15 bp, Homo sapiens
ccaacccattcctcg

SEQ ID NO: 837471 - DNA, 15 bp, Homo sapiens
cccaacccattcctc

SEQ ID NO: 837472 - DNA, 15 bp, Homo sapiens
gcccaacccattcct

SEQ ID NO: 837473 - DNA, 15 bp, Homo sapiens
ggcccaacccattcc

SEQ ID NO: 837474 - DNA, 15 bp, Homo sapiens
aggcccaacccattc

SEQ ID NO: 837475 - DNA, 15 bp, Homo sapiens
aaggcccaacccatt

SEQ ID NO: 837476 - DNA, 15 bp, Homo sapiens
aaaggcccaacccat

SEQ ID NO: 837477 - DNA, 15 bp, Homo sapiens
aaaaggcccaaccca

SEQ ID NO: 837478 - DNA, 15 bp, Homo sapiens
aaaaaggcccaaccc

SEQ ID NO: 837479 - DNA, 15 bp, Homo sapiens
caaaaaggcccaacc

SEQ ID NO: 837480 - DNA, 15 bp, Homo sapiens
tcaaaaaggcccaac

SEQ ID NO: 837481 - DNA, 15 bp, Homo sapiens
ctcaaaaaggcccaa

SEQ ID NO: 837482 - DNA, 15 bp, Homo sapiens
actcaaaaaggccca

SEQ ID NO: 837483 - DNA, 15 bp, Homo sapiens
cactcaaaaaggccc

SEQ ID NO: 837484 - DNA, 15 bp, Homo sapiens
tcactcaaaaaggcc

SEQ ID NO: 837485 - DNA, 15 bp, Homo sapiens
ctcactcaaaaaggc

SEQ ID NO: 837486 - DNA, 15 bp, Homo sapiens
cctcactcaaaaagg

SEQ ID NO: 837487 - DNA, 15 bp, Homo sapiens
tcctcactcaaaaag

SEQ ID NO: 837488 - DNA, 15 bp, Homo sapiens
ttcctcactcaaaaa

SEQ ID NO: 837489 - DNA, 15 bp, Homo sapiens
cttcctcactcaaaa

SEQ ID NO: 837490 - DNA, 15 bp, Homo sapiens
tcttcctcactcaaa

SEQ ID NO: 837491 - DNA, 15 bp, Homo sapiens
ctcttcctcactcaa

SEQ ID NO: 837492 - DNA, 15 bp, Homo sapiens
cctcttcctcactca

SEQ ID NO: 837493 - DNA, 15 bp, Homo sapiens
gcctcttcctcactc

SEQ ID NO: 837494 - DNA, 15 bp, Homo sapiens
agcctcttcctcact

SEQ ID NO: 837495 - DNA, 15 bp, Homo sapiens
cagcctcttcctcac

SEQ ID NO: 837496 - DNA, 15 bp, Homo sapiens
ccagcctcttcctca

SEQ ID NO: 837497 - DNA, 15 bp, Homo sapiens
accagcctcttcctc

SEQ ID NO: 837498 - DNA, 15 bp, Homo sapiens
caccagcctcttcct

SEQ ID NO: 837499 - DNA, 15 bp, Homo sapiens
tcaccagcctcttcc

SEQ ID NO: 837500 - DNA, 15 bp, Homo sapiens
ttcaccagcctcttc

SEQ ID NO: 837501 - DNA, 15 bp, Homo sapiens
tttcaccagcctctt

SEQ ID NO: 837502 - DNA, 15 bp, Homo sapiens
ctttcaccagcctct

SEQ ID NO: 837503 - DNA, 15 bp, Homo sapiens
cctttcaccagcctc

SEQ ID NO: 837504 - DNA, 15 bp, Homo sapiens
ccctttcaccagcct

SEQ ID NO: 837505 - DNA, 15 bp, Homo sapiens
accctttcaccagcc

SEQ ID NO: 837506 - DNA, 15 bp, Homo sapiens
caccctttcaccagc

SEQ ID NO: 837507 - DNA, 15 bp, Homo sapiens
ccaccctttcaccag

SEQ ID NO: 837508 - DNA, 15 bp, Homo sapiens
accaccctttcacca

SEQ ID NO: 837509 - DNA, 15 bp, Homo sapiens
caccaccctttcacc

SEQ ID NO: 837510 - DNA, 15 bp, Homo sapiens
ccaccaccctttcac

SEQ ID NO: 837511 - DNA, 15 bp, Homo sapiens
tccaccaccctttca

SEQ ID NO: 837512 - DNA, 15 bp, Homo sapiens
ctccaccaccctttc

SEQ ID NO: 837513 - DNA, 15 bp, Homo sapiens
cctccaccacccttt

SEQ ID NO: 837514 - DNA, 15 bp, Homo sapiens
tcctccaccaccctt

SEQ ID NO: 837515 - DNA, 15 bp, Homo sapiens
gtcctccaccaccct

SEQ ID NO: 837516 - DNA, 15 bp, Homo sapiens
tgtcctccaccaccc

SEQ ID NO: 837517 - DNA, 15 bp, Homo sapiens
gtgtcctccaccacc

SEQ ID NO: 837518 - DNA, 15 bp, Homo sapiens
agtgtcctccaccac

SEQ ID NO: 837519 - DNA, 15 bp, Homo sapiens
cagtgtcctccacca

SEQ ID NO: 837520 - DNA, 15 bp, Homo sapiens
gcagtgtcctccacc

SEQ ID NO: 837521 - DNA, 15 bp, Homo sapiens
agcagtgtcctccac

SEQ ID NO: 837522 - DNA, 15 bp, Homo sapiens
cagcagtgtcctcca

SEQ ID NO: 837523 - DNA, 15 bp, Homo sapiens
gcagcagtgtcctcc

SEQ ID NO: 837524 - DNA, 15 bp, Homo sapiens
agcagcagtgtcctc

SEQ ID NO: 837525 - DNA, 15 bp, Homo sapiens
cagcagcagtgtcct

SEQ ID NO: 837526 - DNA, 15 bp, Homo sapiens
gcagcagcagtgtcc

SEQ ID NO: 837527 - DNA, 15 bp, Homo sapiens
agcagcagcagtgtc

SEQ ID NO: 837528 - DNA, 15 bp, Homo sapiens
cagcagcagcagtgt

SEQ ID NO: 837529 - DNA, 15 bp, Homo sapiens
tcagcagcagcagtg

SEQ ID NO: 837530 - DNA, 15 bp, Homo sapiens
atcagcagcagcagt

SEQ ID NO: 837531 - DNA, 15 bp, Homo sapiens
catcagcagcagcag

SEQ ID NO: 837532 - DNA, 15 bp, Homo sapiens
ccatcagcagcagca

SEQ ID NO: 837533 - DNA, 15 bp, Homo sapiens
gccatcagcagcagc

SEQ ID NO: 837534 - DNA, 15 bp, Homo sapiens
tgccatcagcagcag

SEQ ID NO: 837535 - DNA, 15 bp, Homo sapiens
atgccatcagcagca

SEQ ID NO: 837536 - DNA, 15 bp, Homo sapiens
catgccatcagcagc

SEQ ID NO: 837537 - DNA, 15 bp, Homo sapiens
ccatgccatcagcag

SEQ ID NO: 837538 - DNA, 15 bp, Homo sapiens
cccatgccatcagca

SEQ ID NO: 837539 - DNA, 15 bp, Homo sapiens
ccccatgccatcagc

SEQ ID NO: 837540 - DNA, 15 bp, Homo sapiens
accccatgccatcag

SEQ ID NO: 837541 - DNA, 15 bp, Homo sapiens
caccccatgccatca

SEQ ID NO: 837542 - DNA, 15 bp, Homo sapiens
acaccccatgccatc

SEQ ID NO: 837543 - DNA, 15 bp, Homo sapiens
tacaccccatgccat

SEQ ID NO: 837544 - DNA, 15 bp, Homo sapiens
ctacaccccatgcca

SEQ ID NO: 837545 - DNA, 15 bp, Homo sapiens
cctacaccccatgcc

SEQ ID NO: 837546 - DNA, 15 bp, Homo sapiens
acctacaccccatgc

SEQ ID NO: 837547 - DNA, 15 bp, Homo sapiens
cacctacaccccatg

SEQ ID NO: 837548 - DNA, 15 bp, Homo sapiens
ccacctacaccccat

SEQ ID NO: 837549 - DNA, 15 bp, Homo sapiens
gccacctacacccca

SEQ ID NO: 837550 - DNA, 15 bp, Homo sapiens
tgccacctacacccc

SEQ ID NO: 837551 - DNA, 15 bp, Homo sapiens
ctgccacctacaccc

SEQ ID NO: 837552 - DNA, 15 bp, Homo sapiens
cctgccacctacacc

SEQ ID NO: 837553 - DNA, 15 bp, Homo sapiens
tcctgccacctacac

SEQ ID NO: 837554 - DNA, 15 bp, Homo sapiens
ctcctgccacctaca

SEQ ID NO: 837555 - DNA, 15 bp, Homo sapiens
tctcctgccacctac

SEQ ID NO: 837556 - DNA, 15 bp, Homo sapiens
ctctcctgccaccta

SEQ ID NO: 837557 - DNA, 15 bp, Homo sapiens
cctctcctgccacct

SEQ ID NO: 837558 - DNA, 15 bp, Homo sapiens
gcctctcctgccacc

SEQ ID NO: 837559 - DNA, 15 bp, Homo sapiens
tgcctctcctgccac

SEQ ID NO: 837560 - DNA, 15 bp, Homo sapiens
ctgcctctcctgcca

SEQ ID NO: 837561 - DNA, 15 bp, Homo sapiens
cctgcctctcctgcc

SEQ ID NO: 837562 - DNA, 15 bp, Homo sapiens
ccctgcctctcctgc

SEQ ID NO: 837563 - DNA, 15 bp, Homo sapiens
tccctgcctctcctg

SEQ ID NO: 837564 - DNA, 15 bp, Homo sapiens
gtccctgcctctcct

SEQ ID NO: 837565 - DNA, 15 bp, Homo sapiens
tgtccctgcctctcc

SEQ ID NO: 837566 - DNA, 15 bp, Homo sapiens
atgtccctgcctctc

SEQ ID NO: 837567 - DNA, 15 bp, Homo sapiens
catgtccctgcctct

SEQ ID NO: 837568 - DNA, 15 bp, Homo sapiens
tcatgtccctgcctc

SEQ ID NO: 837569 - DNA, 15 bp, Homo sapiens
ctcatgtccctgcct

SEQ ID NO: 837570 - DNA, 15 bp, Homo sapiens
gctcatgtccctgcc

SEQ ID NO: 837571 - DNA, 15 bp, Homo sapiens
agctcatgtccctgc

SEQ ID NO: 837572 - DNA, 15 bp, Homo sapiens
tagctcatgtccctg

SEQ ID NO: 837573 - DNA, 15 bp, Homo sapiens
ctagctcatgtccct

SEQ ID NO: 837574 - DNA, 15 bp, Homo sapiens
cctagctcatgtccc

SEQ ID NO: 837575 - DNA, 15 bp, Homo sapiens
tcctagctcatgtcc

SEQ ID NO: 837576 - DNA, 15 bp, Homo sapiens
ttcctagctcatgtc

SEQ ID NO: 837577 - DNA, 15 bp, Homo sapiens
tttcctagctcatgt

SEQ ID NO: 837578 - DNA, 15 bp, Homo sapiens
gtttcctagctcatg

SEQ ID NO: 837579 - DNA, 15 bp, Homo sapiens
agtttcctagctcat

SEQ ID NO: 837580 - DNA, 15 bp, Homo sapiens
gagtttcctagctca

SEQ ID NO: 837581 - DNA, 15 bp, Homo sapiens
agagtttcctagctc

SEQ ID NO: 837582 - DNA, 15 bp, Homo sapiens
gagagtttcctagct

SEQ ID NO: 837583 - DNA, 15 bp, Homo sapiens
ggagagtttcctagc

SEQ ID NO: 837584 - DNA, 15 bp, Homo sapiens
tggagagtttcctag

SEQ ID NO: 837585 - DNA, 15 bp, Homo sapiens
ctggagagtttccta

SEQ ID NO: 837586 - DNA, 15 bp, Homo sapiens
gctggagagtttcct

SEQ ID NO: 837587 - DNA, 15 bp, Homo sapiens
agctggagagtttcc

SEQ ID NO: 837588 - DNA, 15 bp, Homo sapiens
tagctggagagtttc

SEQ ID NO: 837589 - DNA, 15 bp, Homo sapiens
atagctggagagttt

SEQ ID NO: 837590 - DNA, 15 bp, Homo sapiens
catagctggagagtt

SEQ ID NO: 837591 - DNA, 15 bp, Homo sapiens
tcatagctggagagt

SEQ ID NO: 837592 - DNA, 15 bp, Homo sapiens
ttcatagctggagag

SEQ ID NO: 837593 - DNA, 15 bp, Homo sapiens
cttcatagctggaga

SEQ ID NO: 837594 - DNA, 15 bp, Homo sapiens
acttcatagctggag

SEQ ID NO: 837595 - DNA, 15 bp, Homo sapiens
cacttcatagctgga

SEQ ID NO: 837596 - DNA, 15 bp, Homo sapiens
tcacttcatagctgg

SEQ ID NO: 837597 - DNA, 15 bp, Homo sapiens
atcacttcatagctg

SEQ ID NO: 837598 - DNA, 15 bp, Homo sapiens
catcacttcatagct

SEQ ID NO: 837599 - DNA, 15 bp, Homo sapiens
tcatcacttcatagc

SEQ ID NO: 837600 - DNA, 15 bp, Homo sapiens
ctcatcacttcatag

SEQ ID NO: 837601 - DNA, 15 bp, Homo sapiens
actcatcacttcata

SEQ ID NO: 837602 - DNA, 15 bp, Homo sapiens
gactcatcacttcat

SEQ ID NO: 837603 - DNA, 15 bp, Homo sapiens
agactcatcacttca

SEQ ID NO: 837604 - DNA, 15 bp, Homo sapiens
cagactcatcacttc

SEQ ID NO: 837605 - DNA, 15 bp, Homo sapiens
ccagactcatcactt

SEQ ID NO: 837606 - DNA, 15 bp, Homo sapiens
tccagactcatcact

SEQ ID NO: 837607 - DNA, 15 bp, Homo sapiens
ctccagactcatcac

SEQ ID NO: 837608 - DNA, 15 bp, Homo sapiens
actccagactcatca

SEQ ID NO: 837609 - DNA, 15 bp, Homo sapiens
tactccagactcatc

SEQ ID NO: 837610 - DNA, 15 bp, Homo sapiens
ttactccagactcat

SEQ ID NO: 837611 - DNA, 15 bp, Homo sapiens
attactccagactca

SEQ ID NO: 837612 - DNA, 15 bp, Homo sapiens
tattactccagactc

SEQ ID NO: 837613 - DNA, 15 bp, Homo sapiens
atattactccagact

SEQ ID NO: 837614 - DNA, 15 bp, Homo sapiens
tatattactccagac

SEQ ID NO: 837615 - DNA, 15 bp, Homo sapiens
ttatattactccaga

SEQ ID NO: 837616 - DNA, 15 bp, Homo sapiens
cttatattactccag

SEQ ID NO: 837617 - DNA, 15 bp, Homo sapiens
ccttatattactcca

SEQ ID NO: 837618 - DNA, 15 bp, Homo sapiens
tccttatattactcc

SEQ ID NO: 837619 - DNA, 15 bp, Homo sapiens
gtccttatattactc

SEQ ID NO: 837620 - DNA, 15 bp, Homo sapiens
tgtccttatattact

SEQ ID NO: 837621 - DNA, 15 bp, Homo sapiens
ctgtccttatattac

SEQ ID NO: 837622 - DNA, 15 bp, Homo sapiens
actgtccttatatta

SEQ ID NO: 837623 - DNA, 15 bp, Homo sapiens
tactgtccttatatt

SEQ ID NO: 837624 - DNA, 15 bp, Homo sapiens
ctactgtccttatat

SEQ ID NO: 837625 - DNA, 15 bp, Homo sapiens
cctactgtccttata

SEQ ID NO: 837626 - DNA, 15 bp, Homo sapiens
ccctactgtccttat

SEQ ID NO: 837627 - DNA, 15 bp, Homo sapiens
cccctactgtcctta

SEQ ID NO: 837628 - DNA, 15 bp, Homo sapiens
acccctactgtcctt

SEQ ID NO: 837629 - DNA, 15 bp, Homo sapiens
cacccctactgtcct

SEQ ID NO: 837630 - DNA, 15 bp, Homo sapiens
ccacccctactgtcc

SEQ ID NO: 837631 - DNA, 15 bp, Homo sapiens
tccacccctactgtc

SEQ ID NO: 837632 - DNA, 15 bp, Homo sapiens
ctccacccctactgt

SEQ ID NO: 837633 - DNA, 15 bp, Homo sapiens
actccacccctactg

SEQ ID NO: 837634 - DNA, 15 bp, Homo sapiens
cactccacccctact

SEQ ID NO: 837635 - DNA, 15 bp, Homo sapiens
gcactccacccctac

SEQ ID NO: 837636 - DNA, 15 bp, Homo sapiens
agcactccaccccta

SEQ ID NO: 837637 - DNA, 15 bp, Homo sapiens
cagcactccacccct

SEQ ID NO: 837638 - DNA, 15 bp, Homo sapiens
tcagcactccacccc

SEQ ID NO: 837639 - DNA, 15 bp, Homo sapiens
ttcagcactccaccc

SEQ ID NO: 837640 - DNA, 15 bp, Homo sapiens
gttcagcactccacc

SEQ ID NO: 837641 - DNA, 15 bp, Homo sapiens
agttcagcactccac

SEQ ID NO: 837642 - DNA, 15 bp, Homo sapiens
aagttcagcactcca

SEQ ID NO: 837643 - DNA, 15 bp, Homo sapiens
taagttcagcactcc

SEQ ID NO: 837644 - DNA, 15 bp, Homo sapiens
ttaagttcagcactc

SEQ ID NO: 837645 - DNA, 15 bp, Homo sapiens
cttaagttcagcact

SEQ ID NO: 837646 - DNA, 15 bp, Homo sapiens
ccttaagttcagcac

SEQ ID NO: 837647 - DNA, 15 bp, Homo sapiens
cccttaagttcagca

SEQ ID NO: 837648 - DNA, 15 bp, Homo sapiens
tcccttaagttcagc

SEQ ID NO: 837649 - DNA, 15 bp, Homo sapiens
ctcccttaagttcag

SEQ ID NO: 837650 - DNA, 15 bp, Homo sapiens
cctcccttaagttca

SEQ ID NO: 837651 - DNA, 15 bp, Homo sapiens
tcctcccttaagttc

SEQ ID NO: 837652 - DNA, 15 bp, Homo sapiens
ctcctcccttaagtt

SEQ ID NO: 837653 - DNA, 15 bp, Homo sapiens
tctcctcccttaagt

SEQ ID NO: 837654 - DNA, 15 bp, Homo sapiens
ctctcctcccttaag

SEQ ID NO: 837655 - DNA, 15 bp, Homo sapiens
tctctcctcccttaa

SEQ ID NO: 837656 - DNA, 15 bp, Homo sapiens
ttctctcctccctta

SEQ ID NO: 837657 - DNA, 15 bp, Homo sapiens
tttctctcctccctt

SEQ ID NO: 837658 - DNA, 15 bp, Homo sapiens
ttttctctcctccct

SEQ ID NO: 837659 - DNA, 15 bp, Homo sapiens
tttttctctcctccc

SEQ ID NO: 837660 - DNA, 15 bp, Homo sapiens
atttttctctcctcc

SEQ ID NO: 837661 - DNA, 15 bp, Homo sapiens
tatttttctctcctc

SEQ ID NO: 837662 - DNA, 15 bp, Homo sapiens
ttatttttctctcct

SEQ ID NO: 837663 - DNA, 15 bp, Homo sapiens
attatttttctctcc

SEQ ID NO: 837664 - DNA, 15 bp, Homo sapiens
aattatttttctctc

SEQ ID NO: 837665 - DNA, 15 bp, Homo sapiens
caattatttttctct

SEQ ID NO: 837666 - DNA, 15 bp, Homo sapiens
ccaattatttttctc

SEQ ID NO: 837667 - DNA, 15 bp, Homo sapiens
accaattatttttct

SEQ ID NO: 837668 - DNA, 15 bp, Homo sapiens
taccaattatttttc

SEQ ID NO: 837669 - DNA, 15 bp, Homo sapiens
ataccaattattttt

SEQ ID NO: 837670 - DNA, 15 bp, Homo sapiens
cataccaattatttt

SEQ ID NO: 837671 - DNA, 15 bp, Homo sapiens
ccataccaattattt

SEQ ID NO: 837672 - DNA, 15 bp, Homo sapiens
tccataccaattatt

SEQ ID NO: 837673 - DNA, 15 bp, Homo sapiens
ttccataccaattat

SEQ ID NO: 837674 - DNA, 15 bp, Homo sapiens
cttccataccaatta

SEQ ID NO: 837675 - DNA, 15 bp, Homo sapiens
acttccataccaatt

SEQ ID NO: 837676 - DNA, 15 bp, Homo sapiens
tacttccataccaat

SEQ ID NO: 837677 - DNA, 15 bp, Homo sapiens
ctacttccataccaa

SEQ ID NO: 837678 - DNA, 15 bp, Homo sapiens
cctacttccatacca

SEQ ID NO: 837679 - DNA, 15 bp, Homo sapiens
acctacttccatacc

SEQ ID NO: 837680 - DNA, 15 bp, Homo sapiens
tacctacttccatac

SEQ ID NO: 837681 - DNA, 15 bp, Homo sapiens
gtacctacttccata

SEQ ID NO: 837682 - DNA, 15 bp, Homo sapiens
tgtacctacttccat

SEQ ID NO: 837683 - DNA, 15 bp, Homo sapiens
ttgtacctacttcca

SEQ ID NO: 837684 - DNA, 15 bp, Homo sapiens
attgtacctacttcc

SEQ ID NO: 837685 - DNA, 15 bp, Homo sapiens
cattgtacctacttc

SEQ ID NO: 837686 - DNA, 15 bp, Homo sapiens
gcattgtacctactt

SEQ ID NO: 837687 - DNA, 15 bp, Homo sapiens
tgcattgtacctact

SEQ ID NO: 837688 - DNA, 15 bp, Homo sapiens
ttgcattgtacctac

SEQ ID NO: 837689 - DNA, 15 bp, Homo sapiens
attgcattgtaccta

SEQ ID NO: 837690 - DNA, 15 bp, Homo sapiens
aattgcattgtacct

SEQ ID NO: 837691 - DNA, 15 bp, Homo sapiens
aaattgcattgtacc

SEQ ID NO: 837692 - DNA, 15 bp, Homo sapiens
aaaattgcattgtac

SEQ ID NO: 837693 - DNA, 15 bp, Homo sapiens
taaaattgcattgta

SEQ ID NO: 837694 - DNA, 15 bp, Homo sapiens
ataaaattgcattgt

SEQ ID NO: 837695 - DNA, 15 bp, Homo sapiens
aataaaattgcattg

SEQ ID NO: 837696 - DNA, 15 bp, Homo sapiens
taataaaattgcatt

SEQ ID NO: 837697 - DNA, 15 bp, Homo sapiens
ataataaaattgcat

SEQ ID NO: 837698 - DNA, 15 bp, Homo sapiens
aataataaaattgca

SEQ ID NO: 837699 - DNA, 15 bp, Homo sapiens
aaataataaaattgc

SEQ ID NO: 837700 - DNA, 15 bp, Homo sapiens
gaaataataaaattg

SEQ ID NO: 837701 - DNA, 15 bp, Homo sapiens
agaaataataaaatt

SEQ ID NO: 837702 - DNA, 15 bp, Homo sapiens
cagaaataataaaat

SEQ ID NO: 837703 - DNA, 15 bp, Homo sapiens
tcagaaataataaaa

SEQ ID NO: 837704 - DNA, 15 bp, Homo sapiens
ctcagaaataataaa

SEQ ID NO: 837705 - DNA, 15 bp, Homo sapiens
gctcagaaataataa

SEQ ID NO: 837706 - DNA, 15 bp, Homo sapiens
ggctcagaaataata

SEQ ID NO: 837707 - DNA, 15 bp, Homo sapiens
aggctcagaaataat

SEQ ID NO: 837708 - DNA, 15 bp, Homo sapiens
taggctcagaaataa

SEQ ID NO: 837709 - DNA, 15 bp, Homo sapiens
ttaggctcagaaata

SEQ ID NO: 837710 - DNA, 15 bp, Homo sapiens
tttaggctcagaaat

SEQ ID NO: 837711 - DNA, 15 bp, Homo sapiens
ttttaggctcagaaa

SEQ ID NO: 837712 - DNA, 15 bp, Homo sapiens
tttttaggctcagaa

SEQ ID NO: 837713 - DNA, 15 bp, Homo sapiens
atttttaggctcaga

SEQ ID NO: 837714 - DNA, 15 bp, Homo sapiens
catttttaggctcag

SEQ ID NO: 837715 - DNA, 15 bp, Homo sapiens
acatttttaggctca

SEQ ID NO: 837716 - DNA, 15 bp, Homo sapiens
cacatttttaggctc

SEQ ID NO: 837717 - DNA, 15 bp, Homo sapiens
tcacatttttaggct

SEQ ID NO: 837718 - DNA, 15 bp, Homo sapiens
ttcacatttttaggc

SEQ ID NO: 837719 - DNA, 15 bp, Homo sapiens
tttcacatttttagg

SEQ ID NO: 837720 - DNA, 15 bp, Homo sapiens
atttcacatttttag

SEQ ID NO: 837721 - DNA, 15 bp, Homo sapiens
aatttcacattttta

SEQ ID NO: 837722 - DNA, 15 bp, Homo sapiens
aaatttcacattttt

SEQ ID NO: 837723 - DNA, 15 bp, Homo sapiens
aaaatttcacatttt

SEQ ID NO: 837724 - DNA, 15 bp, Homo sapiens
aaaaatttcacattt

SEQ ID NO: 837725 - DNA, 15 bp, Homo sapiens
caaaaatttcacatt

SEQ ID NO: 837726 - DNA, 15 bp, Homo sapiens
tcaaaaatttcacat

SEQ ID NO: 837727 - DNA, 15 bp, Homo sapiens
atcaaaaatttcaca

SEQ ID NO: 837728 - DNA, 15 bp, Homo sapiens
aatcaaaaatttcac

SEQ ID NO: 837729 - DNA, 15 bp, Homo sapiens
taatcaaaaatttca

SEQ ID NO: 837730 - DNA, 15 bp, Homo sapiens
ataatcaaaaatttc

SEQ ID NO: 837731 - DNA, 15 bp, Homo sapiens
aataatcaaaaattt

SEQ ID NO: 837732 - DNA, 15 bp, Homo sapiens
aaataatcaaaaatt

SEQ ID NO: 837733 - DNA, 15 bp, Homo sapiens
caaataatcaaaaat

SEQ ID NO: 837734 - DNA, 15 bp, Homo sapiens
ccaaataatcaaaaa

SEQ ID NO: 837735 - DNA, 15 bp, Homo sapiens
accaaataatcaaaa

SEQ ID NO: 837736 - DNA, 15 bp, Homo sapiens
gaccaaataatcaaa

SEQ ID NO: 837737 - DNA, 15 bp, Homo sapiens
tgaccaaataatcaa

SEQ ID NO: 837738 - DNA, 15 bp, Homo sapiens
ctgaccaaataatca

SEQ ID NO: 837739 - DNA, 15 bp, Homo sapiens
tctgaccaaataatc

SEQ ID NO: 837740 - DNA, 15 bp, Homo sapiens
gtctgaccaaataat

SEQ ID NO: 837741 - DNA, 15 bp, Homo sapiens
ggtctgaccaaataa

SEQ ID NO: 837742 - DNA, 15 bp, Homo sapiens
tggtctgaccaaata

SEQ ID NO: 837743 - DNA, 15 bp, Homo sapiens
ctggtctgaccaaat

SEQ ID NO: 837744 - DNA, 15 bp, Homo sapiens
cctggtctgaccaaa

SEQ ID NO: 837745 - DNA, 15 bp, Homo sapiens
ccctggtctgaccaa

SEQ ID NO: 837746 - DNA, 15 bp, Homo sapiens
tccctggtctgacca

SEQ ID NO: 837747 - DNA, 15 bp, Homo sapiens
ttccctggtctgacc

SEQ ID NO: 837748 - DNA, 15 bp, Homo sapiens
cttccctggtctgac

SEQ ID NO: 837749 - DNA, 15 bp, Homo sapiens
acttccctggtctga

SEQ ID NO: 837750 - DNA, 15 bp, Homo sapiens
tacttccctggtctg

SEQ ID NO: 837751 - DNA, 15 bp, Homo sapiens
atacttccctggtct

SEQ ID NO: 837752 - DNA, 15 bp, Homo sapiens
aatacttccctggtc

SEQ ID NO: 837753 - DNA, 15 bp, Homo sapiens
aaatacttccctggt

SEQ ID NO: 837754 - DNA, 15 bp, Homo sapiens
aaaatacttccctgg

SEQ ID NO: 837755 - DNA, 15 bp, Homo sapiens
gaaaatacttccctg

SEQ ID NO: 837756 - DNA, 15 bp, Homo sapiens
agaaaatacttccct

SEQ ID NO: 837757 - DNA, 15 bp, Homo sapiens
aagaaaatacttccc

SEQ ID NO: 837758 - DNA, 15 bp, Homo sapiens
aaagaaaatacttcc

SEQ ID NO: 837759 - DNA, 15 bp, Homo sapiens
aaaagaaaatacttc

SEQ ID NO: 837760 - DNA, 15 bp, Homo sapiens
taaaagaaaatactt

SEQ ID NO: 837761 - DNA, 15 bp, Homo sapiens
ataaaagaaaatact

SEQ ID NO: 837762 - DNA, 15 bp, Homo sapiens
cataaaagaaaatac

SEQ ID NO: 837763 - DNA, 15 bp, Homo sapiens
gcataaaagaaaata

SEQ ID NO: 837764 - DNA, 15 bp, Homo sapiens
agcataaaagaaaat

SEQ ID NO: 837765 - DNA, 15 bp, Homo sapiens
tagcataaaagaaaa

SEQ ID NO: 837766 - DNA, 15 bp, Homo sapiens
atagcataaaagaaa

SEQ ID NO: 837767 - DNA, 15 bp, Homo sapiens
gatagcataaaagaa

SEQ ID NO: 837768 - DNA, 15 bp, Homo sapiens
agatagcataaaaga

SEQ ID NO: 837769 - DNA, 15 bp, Homo sapiens
gagatagcataaaag

SEQ ID NO: 837770 - DNA, 15 bp, Homo sapiens
agagatagcataaaa

SEQ ID NO: 837771 - DNA, 15 bp, Homo sapiens
cagagatagcataaa

SEQ ID NO: 837772 - DNA, 15 bp, Homo sapiens
tcagagatagcataa

SEQ ID NO: 837773 - DNA, 15 bp, Homo sapiens
ttcagagatagcata

SEQ ID NO: 837774 - DNA, 15 bp, Homo sapiens
tttcagagatagcat

SEQ ID NO: 837775 - DNA, 15 bp, Homo sapiens
ttttcagagatagca

SEQ ID NO: 837776 - DNA, 15 bp, Homo sapiens
attttcagagatagc

SEQ ID NO: 837777 - DNA, 15 bp, Homo sapiens
cattttcagagatag

SEQ ID NO: 837778 - DNA, 15 bp, Homo sapiens
acattttcagagata

SEQ ID NO: 837779 - DNA, 15 bp, Homo sapiens
tacattttcagagat

SEQ ID NO: 837780 - DNA, 15 bp, Homo sapiens
atacattttcagaga

SEQ ID NO: 837781 - DNA, 15 bp, Homo sapiens
tatacattttcagag

SEQ ID NO: 837782 - DNA, 15 bp, Homo sapiens
gtatacattttcaga

SEQ ID NO: 837783 - DNA, 15 bp, Homo sapiens
tgtatacattttcag

SEQ ID NO: 837784 - DNA, 15 bp, Homo sapiens
gtgtatacattttca

SEQ ID NO: 837785 - DNA, 15 bp, Homo sapiens
agtgtatacattttc

SEQ ID NO: 837786 - DNA, 15 bp, Homo sapiens
tagtgtatacatttt

SEQ ID NO: 837787 - DNA, 15 bp, Homo sapiens
ttagtgtatacattt

SEQ ID NO: 837788 - DNA, 15 bp, Homo sapiens
tttagtgtatacatt

SEQ ID NO: 837789 - DNA, 15 bp, Homo sapiens
ttttagtgtatacat

SEQ ID NO: 837790 - DNA, 15 bp, Homo sapiens
tttttagtgtataca

SEQ ID NO: 837791 - DNA, 15 bp, Homo sapiens
ctttttagtgtatac

SEQ ID NO: 837792 - DNA, 15 bp, Homo sapiens
actttttagtgtata

SEQ ID NO: 837793 - DNA, 15 bp, Homo sapiens
aactttttagtgtat

SEQ ID NO: 837794 - DNA, 15 bp, Homo sapiens
caactttttagtgta

SEQ ID NO: 837795 - DNA, 15 bp, Homo sapiens
acaactttttagtgt

SEQ ID NO: 837796 - DNA, 15 bp, Homo sapiens
tacaactttttagtg

SEQ ID NO: 837797 - DNA, 15 bp, Homo sapiens
ctacaactttttagt

SEQ ID NO: 837798 - DNA, 15 bp, Homo sapiens
actacaactttttag

SEQ ID NO: 837799 - DNA, 15 bp, Homo sapiens
tactacaacttttta

SEQ ID NO: 837800 - DNA, 15 bp, Homo sapiens
atactacaacttttt

SEQ ID NO: 837801 - DNA, 15 bp, Homo sapiens
tatactacaactttt

SEQ ID NO: 837802 - DNA, 15 bp, Homo sapiens
ttatactacaacttt

SEQ ID NO: 837803 - DNA, 15 bp, Homo sapiens
tttatactacaactt

SEQ ID NO: 837804 - DNA, 15 bp, Homo sapiens
ttttatactacaact

SEQ ID NO: 837805 - DNA, 15 bp, Homo sapiens
tttttatactacaac

SEQ ID NO: 837806 - DNA, 15 bp, Homo sapiens
ctttttatactacaa

SEQ ID NO: 837807 - DNA, 15 bp, Homo sapiens
cctttttatactaca

SEQ ID NO: 837808 - DNA, 15 bp, Homo sapiens
acctttttatactac

SEQ ID NO: 837809 - DNA, 15 bp, Homo sapiens
aacctttttatacta

SEQ ID NO: 837810 - DNA, 15 bp, Homo sapiens
caacctttttatact

SEQ ID NO: 837811 - DNA, 15 bp, Homo sapiens
acaacctttttatac

SEQ ID NO: 837812 - DNA, 15 bp, Homo sapiens
tacaacctttttata

SEQ ID NO: 837813 - DNA, 15 bp, Homo sapiens
ttacaacctttttat

SEQ ID NO: 837814 - DNA, 15 bp, Homo sapiens
tttacaaccttttta

SEQ ID NO: 837815 - DNA, 15 bp, Homo sapiens
ctttacaaccttttt

SEQ ID NO: 837816 - DNA, 15 bp, Homo sapiens
gctttacaacctttt

SEQ ID NO: 837817 - DNA, 15 bp, Homo sapiens
tgctttacaaccttt

SEQ ID NO: 837818 - DNA, 15 bp, Homo sapiens
atgctttacaacctt

SEQ ID NO: 837819 - DNA, 15 bp, Homo sapiens
aatgctttacaacct

SEQ ID NO: 837820 - DNA, 15 bp, Homo sapiens
taatgctttacaacc

SEQ ID NO: 837821 - DNA, 15 bp, Homo sapiens
ttaatgctttacaac

SEQ ID NO: 837822 - DNA, 15 bp, Homo sapiens
cttaatgctttacaa

SEQ ID NO: 837823 - DNA, 15 bp, Homo sapiens
acttaatgctttaca

SEQ ID NO: 837824 - DNA, 15 bp, Homo sapiens
tacttaatgctttac

SEQ ID NO: 837825 - DNA, 15 bp, Homo sapiens
ttacttaatgcttta

SEQ ID NO: 837826 - DNA, 15 bp, Homo sapiens
attacttaatgcttt

SEQ ID NO: 837827 - DNA, 15 bp, Homo sapiens
aattacttaatgctt

SEQ ID NO: 837828 - DNA, 15 bp, Homo sapiens
aaattacttaatgct

SEQ ID NO: 837829 - DNA, 15 bp, Homo sapiens
aaaattacttaatgc

SEQ ID NO: 837830 - DNA, 15 bp, Homo sapiens
taaaattacttaatg

SEQ ID NO: 837831 - DNA, 15 bp, Homo sapiens
ctaaaattacttaat

SEQ ID NO: 837832 - DNA, 15 bp, Homo sapiens
tctaaaattacttaa

SEQ ID NO: 837833 - DNA, 15 bp, Homo sapiens
ctctaaaattactta

SEQ ID NO: 837834 - DNA, 15 bp, Homo sapiens
cctctaaaattactt

SEQ ID NO: 837835 - DNA, 15 bp, Homo sapiens
tcctctaaaattact

SEQ ID NO: 837836 - DNA, 15 bp, Homo sapiens
ttcctctaaaattac

SEQ ID NO: 837837 - DNA, 15 bp, Homo sapiens
tttcctctaaaatta

SEQ ID NO: 837838 - DNA, 15 bp, Homo sapiens
gtttcctctaaaatt

SEQ ID NO: 837839 - DNA, 15 bp, Homo sapiens
tgtttcctctaaaat

SEQ ID NO: 837840 - DNA, 15 bp, Homo sapiens
ttgtttcctctaaaa

SEQ ID NO: 837841 - DNA, 15 bp, Homo sapiens
attgtttcctctaaa

SEQ ID NO: 837842 - DNA, 15 bp, Homo sapiens
tattgtttcctctaa

SEQ ID NO: 837843 - DNA, 15 bp, Homo sapiens
ttattgtttcctcta

SEQ ID NO: 837844 - DNA, 15 bp, Homo sapiens
attattgtttcctct

SEQ ID NO: 837845 - DNA, 15 bp, Homo sapiens
aattattgtttcctc

SEQ ID NO: 837846 - DNA, 15 bp, Homo sapiens
aaattattgtttcct

SEQ ID NO: 837847 - DNA, 15 bp, Homo sapiens
caaattattgtttcc

SEQ ID NO: 837848 - DNA, 15 bp, Homo sapiens
ccaaattattgtttc

SEQ ID NO: 837849 - DNA, 15 bp, Homo sapiens
tccaaattattgttt

SEQ ID NO: 837850 - DNA, 15 bp, Homo sapiens
atccaaattattgtt

SEQ ID NO: 837851 - DNA, 15 bp, Homo sapiens
tatccaaattattgt

SEQ ID NO: 837852 - DNA, 15 bp, Homo sapiens
atatccaaattattg

SEQ ID NO: 837853 - DNA, 15 bp, Homo sapiens
aatatccaaattatt

SEQ ID NO: 837854 - DNA, 15 bp, Homo sapiens
aaatatccaaattat

SEQ ID NO: 837855 - DNA, 15 bp, Homo sapiens
aaaatatccaaatta

SEQ ID NO: 837856 - DNA, 15 bp, Homo sapiens
taaaatatccaaatt

SEQ ID NO: 837857 - DNA, 15 bp, Homo sapiens
gtaaaatatccaaat

SEQ ID NO: 837858 - DNA, 15 bp, Homo sapiens
tgtaaaatatccaaa

SEQ ID NO: 837859 - DNA, 15 bp, Homo sapiens
atgtaaaatatccaa

SEQ ID NO: 837860 - DNA, 15 bp, Homo sapiens
catgtaaaatatcca

SEQ ID NO: 837861 - DNA, 15 bp, Homo sapiens
gcatgtaaaatatcc

SEQ ID NO: 837862 - DNA, 15 bp, Homo sapiens
tgcatgtaaaatatc

SEQ ID NO: 837863 - DNA, 15 bp, Homo sapiens
ttgcatgtaaaatat

SEQ ID NO: 837864 - DNA, 15 bp, Homo sapiens
attgcatgtaaaata

SEQ ID NO: 837865 - DNA, 15 bp, Homo sapiens
gattgcatgtaaaat

SEQ ID NO: 837866 - DNA, 15 bp, Homo sapiens
tgattgcatgtaaaa

SEQ ID NO: 837867 - DNA, 15 bp, Homo sapiens
atgattgcatgtaaa

SEQ ID NO: 837868 - DNA, 15 bp, Homo sapiens
aatgattgcatgtaa

SEQ ID NO: 837869 - DNA, 15 bp, Homo sapiens
aaatgattgcatgta

SEQ ID NO: 837870 - DNA, 15 bp, Homo sapiens
taaatgattgcatgt

SEQ ID NO: 837871 - DNA, 15 bp, Homo sapiens
ataaatgattgcatg

SEQ ID NO: 837872 - DNA, 15 bp, Homo sapiens
tataaatgattgcat

SEQ ID NO: 837873 - DNA, 15 bp, Homo sapiens
atataaatgattgca

SEQ ID NO: 837874 - DNA, 15 bp, Homo sapiens
catataaatgattgc

SEQ ID NO: 837875 - DNA, 15 bp, Homo sapiens
gcatataaatgattg

SEQ ID NO: 837876 - DNA, 15 bp, Homo sapiens
tgcatataaatgatt

SEQ ID NO: 837877 - DNA, 15 bp, Homo sapiens
ttgcatataaatgat

SEQ ID NO: 837878 - DNA, 15 bp, Homo sapiens
tttgcatataaatga

SEQ ID NO: 837879 - DNA, 15 bp, Homo sapiens
atttgcatataaatg

SEQ ID NO: 837880 - DNA, 15 bp, Homo sapiens
tatttgcatataaat

SEQ ID NO: 837881 - DNA, 15 bp, Homo sapiens
atatttgcatataaa

SEQ ID NO: 837882 - DNA, 15 bp, Homo sapiens
tatatttgcatataa

SEQ ID NO: 837883 - DNA, 15 bp, Homo sapiens
atatatttgcatata

SEQ ID NO: 837884 - DNA, 15 bp, Homo sapiens
catatatttgcatat

SEQ ID NO: 837885 - DNA, 15 bp, Homo sapiens
acatatatttgcata

SEQ ID NO: 837886 - DNA, 15 bp, Homo sapiens
tacatatatttgcat

SEQ ID NO: 837887 - DNA, 15 bp, Homo sapiens
ttacatatatttgca

SEQ ID NO: 837888 - DNA, 15 bp, Homo sapiens
tttacatatatttgc

SEQ ID NO: 837889 - DNA, 15 bp, Homo sapiens
atttacatatatttg

SEQ ID NO: 837890 - DNA, 15 bp, Homo sapiens
tatttacatatattt

SEQ ID NO: 837891 - DNA, 15 bp, Homo sapiens
atatttacatatatt

SEQ ID NO: 837892 - DNA, 15 bp, Homo sapiens
aatatttacatatat

SEQ ID NO: 837893 - DNA, 15 bp, Homo sapiens
taatatttacatata

SEQ ID NO: 837894 - DNA, 15 bp, Homo sapiens
gtaatatttacatat

SEQ ID NO: 837895 - DNA, 15 bp, Homo sapiens
tgtaatatttacata

SEQ ID NO: 837896 - DNA, 15 bp, Homo sapiens
ttgtaatatttacat

SEQ ID NO: 837897 - DNA, 15 bp, Homo sapiens
tttgtaatatttaca

SEQ ID NO: 837898 - DNA, 15 bp, Homo sapiens
ttttgtaatatttac

SEQ ID NO: 837899 - DNA, 15 bp, Homo sapiens
attttgtaatattta

SEQ ID NO: 837900 - DNA, 15 bp, Homo sapiens
aattttgtaatattt

SEQ ID NO: 837901 - DNA, 15 bp, Homo sapiens
taattttgtaatatt

SEQ ID NO: 837902 - DNA, 15 bp, Homo sapiens
ataattttgtaatat

SEQ ID NO: 837903 - DNA, 15 bp, Homo sapiens
aataattttgtaata

SEQ ID NO: 837904 - DNA, 15 bp, Homo sapiens
gaataattttgtaat

SEQ ID NO: 837905 - DNA, 15 bp, Homo sapiens
agaataattttgtaa

SEQ ID NO: 837906 - DNA, 15 bp, Homo sapiens
gagaataattttgta

SEQ ID NO: 837907 - DNA, 15 bp, Homo sapiens
agagaataattttgt

SEQ ID NO: 837908 - DNA, 15 bp, Homo sapiens
tagagaataattttg

SEQ ID NO: 837909 - DNA, 15 bp, Homo sapiens
atagagaataatttt

SEQ ID NO: 837910 - DNA, 15 bp, Homo sapiens
aatagagaataattt

SEQ ID NO: 837911 - DNA, 15 bp, Homo sapiens
aaatagagaataatt

SEQ ID NO: 837912 - DNA, 15 bp, Homo sapiens
caaatagagaataat

SEQ ID NO: 837913 - DNA, 15 bp, Homo sapiens
acaaatagagaataa

SEQ ID NO: 837914 - DNA, 15 bp, Homo sapiens
aacaaatagagaata

SEQ ID NO: 837915 - DNA, 15 bp, Homo sapiens
taacaaatagagaat

SEQ ID NO: 837916 - DNA, 15 bp, Homo sapiens
gtaacaaatagagaa

SEQ ID NO: 837917 - DNA, 15 bp, Homo sapiens
tgtaacaaatagaga

SEQ ID NO: 837918 - DNA, 15 bp, Homo sapiens
ttgtaacaaatagag

SEQ ID NO: 837919 - DNA, 15 bp, Homo sapiens
tttgtaacaaataga

SEQ ID NO: 837920 - DNA, 15 bp, Homo sapiens
gtttgtaacaaatag

SEQ ID NO: 837921 - DNA, 15 bp, Homo sapiens
ggtttgtaacaaata

SEQ ID NO: 837922 - DNA, 15 bp, Homo sapiens
aggtttgtaacaaat

SEQ ID NO: 837923 - DNA, 15 bp, Homo sapiens
aaggtttgtaacaaa

SEQ ID NO: 837924 - DNA, 15 bp, Homo sapiens
taaggtttgtaacaa

SEQ ID NO: 837925 - DNA, 15 bp, Homo sapiens
ttaaggtttgtaaca

SEQ ID NO: 837926 - DNA, 15 bp, Homo sapiens
tttaaggtttgtaac

SEQ ID NO: 837927 - DNA, 15 bp, Homo sapiens
atttaaggtttgtaa

SEQ ID NO: 837928 - DNA, 15 bp, Homo sapiens
tatttaaggtttgta

SEQ ID NO: 837929 - DNA, 15 bp, Homo sapiens
atatttaaggtttgt

SEQ ID NO: 837930 - DNA, 15 bp, Homo sapiens
aatatttaaggtttg

SEQ ID NO: 837931 - DNA, 15 bp, Homo sapiens
aaatatttaaggttt

SEQ ID NO: 837932 - DNA, 15 bp, Homo sapiens
aaaatatttaaggtt

SEQ ID NO: 837933 - DNA, 15 bp, Homo sapiens
aaaaatatttaaggt

SEQ ID NO: 837934 - DNA, 15 bp, Homo sapiens
caaaaatatttaagg

SEQ ID NO: 837935 - DNA, 15 bp, Homo sapiens
tcaaaaatatttaag

SEQ ID NO: 837936 - DNA, 15 bp, Homo sapiens
gtcaaaaatatttaa

SEQ ID NO: 837937 - DNA, 15 bp, Homo sapiens
agtcaaaaatattta

SEQ ID NO: 837938 - DNA, 15 bp, Homo sapiens
cagtcaaaaatattt

SEQ ID NO: 837939 - DNA, 15 bp, Homo sapiens
tcagtcaaaaatatt

SEQ ID NO: 837940 - DNA, 15 bp, Homo sapiens
ctcagtcaaaaatat

SEQ ID NO: 837941 - DNA, 15 bp, Homo sapiens
cctcagtcaaaaata

SEQ ID NO: 837942 - DNA, 15 bp, Homo sapiens
tcctcagtcaaaaat

SEQ ID NO: 837943 - DNA, 15 bp, Homo sapiens
ttcctcagtcaaaaa

SEQ ID NO: 837944 - DNA, 15 bp, Homo sapiens
attcctcagtcaaaa

SEQ ID NO: 837945 - DNA, 15 bp, Homo sapiens
tattcctcagtcaaa

SEQ ID NO: 837946 - DNA, 15 bp, Homo sapiens
atattcctcagtcaa

SEQ ID NO: 837947 - DNA, 15 bp, Homo sapiens
aatattcctcagtca

SEQ ID NO: 837948 - DNA, 15 bp, Homo sapiens
aaatattcctcagtc

SEQ ID NO: 837949 - DNA, 15 bp, Homo sapiens
aaaatattcctcagt

SEQ ID NO: 837950 - DNA, 15 bp, Homo sapiens
taaaatattcctcag

SEQ ID NO: 837951 - DNA, 15 bp, Homo sapiens
ataaaatattcctca

SEQ ID NO: 837952 - DNA, 15 bp, Homo sapiens
aataaaatattcctc

SEQ ID NO: 837953 - DNA, 15 bp, Homo sapiens
gaataaaatattcct

SEQ ID NO: 837954 - DNA, 15 bp, Homo sapiens
tgaataaaatattcc

SEQ ID NO: 837955 - DNA, 15 bp, Homo sapiens
atgaataaaatattc

SEQ ID NO: 837956 - DNA, 15 bp, Homo sapiens
gatgaataaaatatt

SEQ ID NO: 837957 - DNA, 15 bp, Homo sapiens
agatgaataaaatat

SEQ ID NO: 837958 - DNA, 15 bp, Homo sapiens
tagatgaataaaata

SEQ ID NO: 837959 - DNA, 15 bp, Homo sapiens
ttagatgaataaaat

SEQ ID NO: 837960 - DNA, 15 bp, Homo sapiens
attagatgaataaaa

SEQ ID NO: 837961 - DNA, 15 bp, Homo sapiens
aattagatgaataaa

SEQ ID NO: 837962 - DNA, 15 bp, Homo sapiens
taattagatgaataa

SEQ ID NO: 837963 - DNA, 15 bp, Homo sapiens
ataattagatgaata

SEQ ID NO: 837964 - DNA, 15 bp, Homo sapiens
tataattagatgaat

SEQ ID NO: 837965 - DNA, 15 bp, Homo sapiens
ctataattagatgaa

SEQ ID NO: 837966 - DNA, 15 bp, Homo sapiens
gctataattagatga

SEQ ID NO: 837967 - DNA, 15 bp, Homo sapiens
agctataattagatg

SEQ ID NO: 837968 - DNA, 15 bp, Homo sapiens
tagctataattagat

SEQ ID NO: 837969 - DNA, 15 bp, Homo sapiens
gtagctataattaga

SEQ ID NO: 837970 - DNA, 15 bp, Homo sapiens
agtagctataattag

SEQ ID NO: 837971 - DNA, 15 bp, Homo sapiens
aagtagctataatta

SEQ ID NO: 837972 - DNA, 15 bp, Homo sapiens
aaagtagctataatt

SEQ ID NO: 837973 - DNA, 15 bp, Homo sapiens
caaagtagctataat

SEQ ID NO: 837974 - DNA, 15 bp, Homo sapiens
acaaagtagctataa

SEQ ID NO: 837975 - DNA, 15 bp, Homo sapiens
aacaaagtagctata

SEQ ID NO: 837976 - DNA, 15 bp, Homo sapiens
gaacaaagtagctat

SEQ ID NO: 837977 - DNA, 15 bp, Homo sapiens
agaacaaagtagcta

SEQ ID NO: 837978 - DNA, 15 bp, Homo sapiens
tagaacaaagtagct

SEQ ID NO: 837979 - DNA, 15 bp, Homo sapiens
ttagaacaaagtagc

SEQ ID NO: 837980 - DNA, 15 bp, Homo sapiens
gttagaacaaagtag

SEQ ID NO: 837981 - DNA, 15 bp, Homo sapiens
agttagaacaaagta

SEQ ID NO: 837982 - DNA, 15 bp, Homo sapiens
tagttagaacaaagt

SEQ ID NO: 837983 - DNA, 15 bp, Homo sapiens
ttagttagaacaaag

SEQ ID NO: 837984 - DNA, 15 bp, Homo sapiens
attagttagaacaaa

SEQ ID NO: 837985 - DNA, 15 bp, Homo sapiens
tattagttagaacaa

SEQ ID NO: 837986 - DNA, 15 bp, Homo sapiens
ctattagttagaaca

SEQ ID NO: 837987 - DNA, 15 bp, Homo sapiens
tctattagttagaac

SEQ ID NO: 837988 - DNA, 15 bp, Homo sapiens
atctattagttagaa

SEQ ID NO: 837989 - DNA, 15 bp, Homo sapiens
tatctattagttaga

SEQ ID NO: 837990 - DNA, 15 bp, Homo sapiens
atatctattagttag

SEQ ID NO: 837991 - DNA, 15 bp, Homo sapiens
aatatctattagtta

SEQ ID NO: 837992 - DNA, 15 bp, Homo sapiens
gaatatctattagtt

SEQ ID NO: 837993 - DNA, 15 bp, Homo sapiens
agaatatctattagt

SEQ ID NO: 837994 - DNA, 15 bp, Homo sapiens
aagaatatctattag

SEQ ID NO: 837995 - DNA, 15 bp, Homo sapiens
caagaatatctatta

SEQ ID NO: 837996 - DNA, 15 bp, Homo sapiens
tcaagaatatctatt

SEQ ID NO: 837997 - DNA, 15 bp, Homo sapiens
ttcaagaatatctat

SEQ ID NO: 837998 - DNA, 15 bp, Homo sapiens
tttcaagaatatcta

SEQ ID NO: 837999 - DNA, 15 bp, Homo sapiens
ttttcaagaatatct

SEQ ID NO: 838000 - DNA, 15 bp, Homo sapiens
gttttcaagaatatc

SEQ ID NO: 838001 - DNA, 15 bp, Homo sapiens
tgttttcaagaatat

SEQ ID NO: 838002 - DNA, 15 bp, Homo sapiens
ttgttttcaagaata

SEQ ID NO: 838003 - DNA, 15 bp, Homo sapiens
tttgttttcaagaat

SEQ ID NO: 838004 - DNA, 15 bp, Homo sapiens
ctttgttttcaagaa

SEQ ID NO: 838005 - DNA, 15 bp, Homo sapiens
gctttgttttcaaga

SEQ ID NO: 838006 - DNA, 15 bp, Homo sapiens
tgctttgttttcaag

SEQ ID NO: 838007 - DNA, 15 bp, Homo sapiens
ttgctttgttttcaa

SEQ ID NO: 838008 - DNA, 15 bp, Homo sapiens
gttgctttgttttca

SEQ ID NO: 838009 - DNA, 15 bp, Homo sapiens
tgttgctttgttttc

SEQ ID NO: 838010 - DNA, 15 bp, Homo sapiens
gtgttgctttgtttt

SEQ ID NO: 838011 - DNA, 15 bp, Homo sapiens
agtgttgctttgttt

SEQ ID NO: 838012 - DNA, 15 bp, Homo sapiens
aagtgttgctttgtt

SEQ ID NO: 838013 - DNA, 15 bp, Homo sapiens
aaagtgttgctttgt

SEQ ID NO: 838014 - DNA, 15 bp, Homo sapiens
aaaagtgttgctttg

SEQ ID NO: 838015 - DNA, 15 bp, Homo sapiens
aaaaagtgttgcttt

SEQ ID NO: 838016 - DNA, 15 bp, Homo sapiens
aaaaaagtgttgctt

SEQ ID NO: 838017 - DNA, 15 bp, Homo sapiens
caaaaaagtgttgct

SEQ ID NO: 838018 - DNA, 15 bp, Homo sapiens
ccaaaaaagtgttgc

SEQ ID NO: 838019 - DNA, 15 bp, Homo sapiens
tccaaaaaagtgttg

SEQ ID NO: 838020 - DNA, 15 bp, Homo sapiens
ctccaaaaaagtgtt

SEQ ID NO: 838021 - DNA, 15 bp, Homo sapiens
tctccaaaaaagtgt

SEQ ID NO: 838022 - DNA, 15 bp, Homo sapiens
gtctccaaaaaagtg

SEQ ID NO: 838023 - DNA, 15 bp, Homo sapiens
tgtctccaaaaaagt

SEQ ID NO: 838024 - DNA, 15 bp, Homo sapiens
ctgtctccaaaaaag

SEQ ID NO: 838025 - DNA, 15 bp, Homo sapiens
tctgtctccaaaaaa

SEQ ID NO: 838026 - DNA, 15 bp, Homo sapiens
ctctgtctccaaaaa

SEQ ID NO: 838027 - DNA, 15 bp, Homo sapiens
actctgtctccaaaa

SEQ ID NO: 838028 - DNA, 15 bp, Homo sapiens
gactctgtctccaaa

SEQ ID NO: 838029 - DNA, 15 bp, Homo sapiens
agactctgtctccaa

SEQ ID NO: 838030 - DNA, 15 bp, Homo sapiens
aagactctgtctcca

SEQ ID NO: 838031 - DNA, 15 bp, Homo sapiens
caagactctgtctcc

SEQ ID NO: 838032 - DNA, 15 bp, Homo sapiens
tgcaagactctgtct

SEQ ID NO: 838033 - DNA, 15 bp, Homo sapiens
gtgcaagactctgtc

SEQ ID NO: 838034 - DNA, 15 bp, Homo sapiens
agtgcaagactctgt

SEQ ID NO: 838035 - DNA, 15 bp, Homo sapiens
cagtgcaagactctg

SEQ ID NO: 838036 - DNA, 15 bp, Homo sapiens
acagtgcaagactct

SEQ ID NO: 838037 - DNA, 15 bp, Homo sapiens
gacagtgcaagactc

SEQ ID NO: 838038 - DNA, 15 bp, Homo sapiens
tgacagtgcaagact

SEQ ID NO: 838039 - DNA, 15 bp, Homo sapiens
gtgacagtgcaagac

SEQ ID NO: 838040 - DNA, 15 bp, Homo sapiens
ggtgacagtgcaaga

SEQ ID NO: 838041 - DNA, 15 bp, Homo sapiens
aggtgacagtgcaag

SEQ ID NO: 838042 - DNA, 15 bp, Homo sapiens
taggtgacagtgcaa

SEQ ID NO: 838043 - DNA, 15 bp, Homo sapiens
ctaggtgacagtgca

SEQ ID NO: 838044 - DNA, 15 bp, Homo sapiens
tctaggtgacagtgc

SEQ ID NO: 838045 - DNA, 15 bp, Homo sapiens
gtctaggtgacagtg

SEQ ID NO: 838046 - DNA, 15 bp, Homo sapiens
agtctaggtgacagt

SEQ ID NO: 838047 - DNA, 15 bp, Homo sapiens
aagtctaggtgacag

SEQ ID NO: 838048 - DNA, 15 bp, Homo sapiens
caagtctaggtgaca

SEQ ID NO: 838049 - DNA, 15 bp, Homo sapiens
tcaagtctaggtgac

SEQ ID NO: 838050 - DNA, 15 bp, Homo sapiens
ctcaagtctaggtga

SEQ ID NO: 838051 - DNA, 15 bp, Homo sapiens
actcaagtctaggtg

SEQ ID NO: 838052 - DNA, 15 bp, Homo sapiens
cactcaagtctaggt

SEQ ID NO: 838053 - DNA, 15 bp, Homo sapiens
acactcaagtctagg

SEQ ID NO: 838054 - DNA, 15 bp, Homo sapiens
cacactcaagtctag

SEQ ID NO: 838055 - DNA, 15 bp, Homo sapiens
acacactcaagtcta

SEQ ID NO: 838056 - DNA, 15 bp, Homo sapiens
aacacactcaagtct

SEQ ID NO: 838057 - DNA, 15 bp, Homo sapiens
taacacactcaagtc

SEQ ID NO: 838058 - DNA, 15 bp, Homo sapiens
gtaacacactcaagt

SEQ ID NO: 838059 - DNA, 15 bp, Homo sapiens
ggtaacacactcaag

SEQ ID NO: 838060 - DNA, 15 bp, Homo sapiens
aggtaacacactcaa

SEQ ID NO: 838061 - DNA, 15 bp, Homo sapiens
aaggtaacacactca

SEQ ID NO: 838062 - DNA, 15 bp, Homo sapiens
caaggtaacacactc

SEQ ID NO: 838063 - DNA, 15 bp, Homo sapiens
tcaaggtaacacact

SEQ ID NO: 838064 - DNA, 15 bp, Homo sapiens
ttcaaggtaacacac

SEQ ID NO: 838065 - DNA, 15 bp, Homo sapiens
gttcaaggtaacaca

SEQ ID NO: 838066 - DNA, 15 bp, Homo sapiens
agttcaaggtaacac

SEQ ID NO: 838067 - DNA, 15 bp, Homo sapiens
gagttcaaggtaaca

SEQ ID NO: 838068 - DNA, 15 bp, Homo sapiens
ggagttcaaggtaac

SEQ ID NO: 838069 - DNA, 15 bp, Homo sapiens
tggagttcaaggtaa

SEQ ID NO: 838070 - DNA, 15 bp, Homo sapiens
ctggagttcaaggta

SEQ ID NO: 838071 - DNA, 15 bp, Homo sapiens
cctggagttcaaggt

SEQ ID NO: 838072 - DNA, 15 bp, Homo sapiens
ccctggagttcaagg

SEQ ID NO: 838073 - DNA, 15 bp, Homo sapiens
gccctggagttcaag

SEQ ID NO: 838074 - DNA, 15 bp, Homo sapiens
agccctggagttcaa

SEQ ID NO: 838075 - DNA, 15 bp, Homo sapiens
gagccctggagttca

SEQ ID NO: 838076 - DNA, 15 bp, Homo sapiens
ggagccctggagttc

SEQ ID NO: 838077 - DNA, 15 bp, Homo sapiens
tggagccctggagtt

SEQ ID NO: 838078 - DNA, 15 bp, Homo sapiens
ctggagccctggagt

SEQ ID NO: 838079 - DNA, 15 bp, Homo sapiens
actggagccctggag

SEQ ID NO: 838080 - DNA, 15 bp, Homo sapiens
cactggagccctgga

SEQ ID NO: 838081 - DNA, 15 bp, Homo sapiens
tcactggagccctgg

SEQ ID NO: 838082 - DNA, 15 bp, Homo sapiens
atcactggagccctg

SEQ ID NO: 838083 - DNA, 15 bp, Homo sapiens
gatcactggagccct

SEQ ID NO: 838084 - DNA, 15 bp, Homo sapiens
ggatcactggagccc

SEQ ID NO: 838085 - DNA, 15 bp, Homo sapiens
aggatcactggagcc

SEQ ID NO: 838086 - DNA, 15 bp, Homo sapiens
gaggatcactggagc

SEQ ID NO: 838087 - DNA, 15 bp, Homo sapiens
ggaggatcactggag

SEQ ID NO: 838088 - DNA, 15 bp, Homo sapiens
gggaggatcactgga

SEQ ID NO: 838089 - DNA, 15 bp, Homo sapiens
tgggaggatcactgg

SEQ ID NO: 838090 - DNA, 15 bp, Homo sapiens
gtgggaggatcactg

SEQ ID NO: 838091 - DNA, 15 bp, Homo sapiens
ctgaggtgggaggat

SEQ ID NO: 838092 - DNA, 15 bp, Homo sapiens
agagactgaggtggg

SEQ ID NO: 838093 - DNA, 15 bp, Homo sapiens
aagagactgaggtgg

SEQ ID NO: 838094 - DNA, 15 bp, Homo sapiens
caagagactgaggtg

SEQ ID NO: 838095 - DNA, 15 bp, Homo sapiens
ccaagagactgaggt

SEQ ID NO: 838096 - DNA, 15 bp, Homo sapiens
cccaagagactgagg

SEQ ID NO: 838097 - DNA, 15 bp, Homo sapiens
acccaagagactgag

SEQ ID NO: 838098 - DNA, 15 bp, Homo sapiens
tacccaagagactga

SEQ ID NO: 838099 - DNA, 15 bp, Homo sapiens
ctacccaagagactg

SEQ ID NO: 838100 - DNA, 15 bp, Homo sapiens
cctacccaagagact

SEQ ID NO: 838101 - DNA, 15 bp, Homo sapiens
acctacccaagagac

SEQ ID NO: 838102 - DNA, 15 bp, Homo sapiens
cacctacccaagaga

SEQ ID NO: 838103 - DNA, 15 bp, Homo sapiens
ccacctacccaagag

SEQ ID NO: 838104 - DNA, 15 bp, Homo sapiens
tccacctacccaaga

SEQ ID NO: 838105 - DNA, 15 bp, Homo sapiens
atccacctacccaag

SEQ ID NO: 838106 - DNA, 15 bp, Homo sapiens
aatccacctacccaa

SEQ ID NO: 838107 - DNA, 15 bp, Homo sapiens
taatccacctaccca

SEQ ID NO: 838108 - DNA, 15 bp, Homo sapiens
gtaatccacctaccc

SEQ ID NO: 838109 - DNA, 15 bp, Homo sapiens
tgtaatccacctacc

SEQ ID NO: 838110 - DNA, 15 bp, Homo sapiens
ctgtaatccacctac

SEQ ID NO: 838111 - DNA, 15 bp, Homo sapiens
cctgtaatccaccta

SEQ ID NO: 838112 - DNA, 15 bp, Homo sapiens
gcctgtaatccacct

SEQ ID NO: 838113 - DNA, 15 bp, Homo sapiens
ggcctgtaatccacc

SEQ ID NO: 838114 - DNA, 15 bp, Homo sapiens
gggcctgtaatccac

SEQ ID NO: 838115 - DNA, 15 bp, Homo sapiens
tgggcctgtaatcca

SEQ ID NO: 838116 - DNA, 15 bp, Homo sapiens
gtgggcctgtaatcc

SEQ ID NO: 838117 - DNA, 15 bp, Homo sapiens
tgtgggcctgtaatc

SEQ ID NO: 838118 - DNA, 15 bp, Homo sapiens
gtgtgggcctgtaat

SEQ ID NO: 838119 - DNA, 15 bp, Homo sapiens
agtgtgggcctgtaa

SEQ ID NO: 838120 - DNA, 15 bp, Homo sapiens
tagtgtgggcctgta

SEQ ID NO: 838121 - DNA, 15 bp, Homo sapiens
gtagtgtgggcctgt

SEQ ID NO: 838122 - DNA, 15 bp, Homo sapiens
ggtagtgtgggcctg

SEQ ID NO: 838123 - DNA, 15 bp, Homo sapiens
tggtagtgtgggcct

SEQ ID NO: 838124 - DNA, 15 bp, Homo sapiens
atggtagtgtgggcc

SEQ ID NO: 838125 - DNA, 15 bp, Homo sapiens
catggtagtgtgggc

SEQ ID NO: 838126 - DNA, 15 bp, Homo sapiens
gcatggtagtgtggg

SEQ ID NO: 838127 - DNA, 15 bp, Homo sapiens
ggcatggtagtgtgg

SEQ ID NO: 838128 - DNA, 15 bp, Homo sapiens
gggcatggtagtgtg

SEQ ID NO: 838129 - DNA, 15 bp, Homo sapiens
tgggcatggtagtgt

SEQ ID NO: 838130 - DNA, 15 bp, Homo sapiens
ctgggcatggtagtg

SEQ ID NO: 838131 - DNA, 15 bp, Homo sapiens
gctgggcatggtagt

SEQ ID NO: 838132 - DNA, 15 bp, Homo sapiens
cagctgggcatggta

SEQ ID NO: 838133 - DNA, 15 bp, Homo sapiens
acagctgggcatggt

SEQ ID NO: 838134 - DNA, 15 bp, Homo sapiens
tacagctgggcatgg

SEQ ID NO: 838135 - DNA, 15 bp, Homo sapiens
atacagctgggcatg

SEQ ID NO: 838136 - DNA, 15 bp, Homo sapiens
aatacagctgggcat

SEQ ID NO: 838137 - DNA, 15 bp, Homo sapiens
taatacagctgggca

SEQ ID NO: 838138 - DNA, 15 bp, Homo sapiens
ctaatacagctgggc

SEQ ID NO: 838139 - DNA, 15 bp, Homo sapiens
actaatacagctggg

SEQ ID NO: 838140 - DNA, 15 bp, Homo sapiens
gactaatacagctgg

SEQ ID NO: 838141 - DNA, 15 bp, Homo sapiens
ggactaatacagctg

SEQ ID NO: 838142 - DNA, 15 bp, Homo sapiens
tggactaatacagct

SEQ ID NO: 838143 - DNA, 15 bp, Homo sapiens
atggactaatacagc

SEQ ID NO: 838144 - DNA, 15 bp, Homo sapiens
gatggactaatacag

SEQ ID NO: 838145 - DNA, 15 bp, Homo sapiens
ggatggactaataca

SEQ ID NO: 838146 - DNA, 15 bp, Homo sapiens
aggatggactaatac

SEQ ID NO: 838147 - DNA, 15 bp, Homo sapiens
aaggatggactaata

SEQ ID NO: 838148 - DNA, 15 bp, Homo sapiens
aaaggatggactaat

SEQ ID NO: 838149 - DNA, 15 bp, Homo sapiens
gaaaggatggactaa

SEQ ID NO: 838150 - DNA, 15 bp, Homo sapiens
tgaaaggatggacta

SEQ ID NO: 838151 - DNA, 15 bp, Homo sapiens
atgaaaggatggact

SEQ ID NO: 838152 - DNA, 15 bp, Homo sapiens
aatgaaaggatggac

SEQ ID NO: 838153 - DNA, 15 bp, Homo sapiens
caatgaaaggatgga

SEQ ID NO: 838154 - DNA, 15 bp, Homo sapiens
gcaatgaaaggatgg

SEQ ID NO: 838155 - DNA, 15 bp, Homo sapiens
agcaatgaaaggatg

SEQ ID NO: 838156 - DNA, 15 bp, Homo sapiens
tagcaatgaaaggat

SEQ ID NO: 838157 - DNA, 15 bp, Homo sapiens
atagcaatgaaagga

SEQ ID NO: 838158 - DNA, 15 bp, Homo sapiens
tatagcaatgaaagg

SEQ ID NO: 838159 - DNA, 15 bp, Homo sapiens
ttatagcaatgaaag

SEQ ID NO: 838160 - DNA, 15 bp, Homo sapiens
tttatagcaatgaaa

SEQ ID NO: 838161 - DNA, 15 bp, Homo sapiens
ctttatagcaatgaa

SEQ ID NO: 838162 - DNA, 15 bp, Homo sapiens
tctttatagcaatga

SEQ ID NO: 838163 - DNA, 15 bp, Homo sapiens
ttctttatagcaatg

SEQ ID NO: 838164 - DNA, 15 bp, Homo sapiens
tttctttatagcaat

SEQ ID NO: 838165 - DNA, 15 bp, Homo sapiens
atttctttatagcaa

SEQ ID NO: 838166 - DNA, 15 bp, Homo sapiens
tatttctttatagca

SEQ ID NO: 838167 - DNA, 15 bp, Homo sapiens
gtatttctttatagc

SEQ ID NO: 838168 - DNA, 15 bp, Homo sapiens
ggtatttctttatag

SEQ ID NO: 838169 - DNA, 15 bp, Homo sapiens
cggtatttctttata

SEQ ID NO: 838170 - DNA, 15 bp, Homo sapiens
ccggtatttctttat

SEQ ID NO: 838171 - DNA, 15 bp, Homo sapiens
tccggtatttcttta

SEQ ID NO: 838172 - DNA, 15 bp, Homo sapiens
ttccggtatttcttt

SEQ ID NO: 838173 - DNA, 15 bp, Homo sapiens
tttccggtatttctt

SEQ ID NO: 838174 - DNA, 15 bp, Homo sapiens
gtttccggtatttct

SEQ ID NO: 838175 - DNA, 15 bp, Homo sapiens
agtttccggtatttc

SEQ ID NO: 838176 - DNA, 15 bp, Homo sapiens
cagtttccggtattt

SEQ ID NO: 838177 - DNA, 15 bp, Homo sapiens
ccagtttccggtatt

SEQ ID NO: 838178 - DNA, 15 bp, Homo sapiens
cccagtttccggtat

SEQ ID NO: 838179 - DNA, 15 bp, Homo sapiens
acccagtttccggta

SEQ ID NO: 838180 - DNA, 15 bp, Homo sapiens
tacccagtttccggt

SEQ ID NO: 838181 - DNA, 15 bp, Homo sapiens
ttacccagtttccgg

SEQ ID NO: 838182 - DNA, 15 bp, Homo sapiens
attacccagtttccg

SEQ ID NO: 838183 - DNA, 15 bp, Homo sapiens
aattacccagtttcc

SEQ ID NO: 838184 - DNA, 15 bp, Homo sapiens
aaattacccagtttc

SEQ ID NO: 838185 - DNA, 15 bp, Homo sapiens
taaattacccagttt

SEQ ID NO: 838186 - DNA, 15 bp, Homo sapiens
ataaattacccagtt

SEQ ID NO: 838187 - DNA, 15 bp, Homo sapiens
tataaattacccagt

SEQ ID NO: 838188 - DNA, 15 bp, Homo sapiens
ttataaattacccag

SEQ ID NO: 838189 - DNA, 15 bp, Homo sapiens
tttataaattaccca

SEQ ID NO: 838190 - DNA, 15 bp, Homo sapiens
ctttataaattaccc

SEQ ID NO: 838191 - DNA, 15 bp, Homo sapiens
tctttataaattacc

SEQ ID NO: 838192 - DNA, 15 bp, Homo sapiens
ttctttataaattac

SEQ ID NO: 838193 - DNA, 15 bp, Homo sapiens
tttctttataaatta

SEQ ID NO: 838194 - DNA, 15 bp, Homo sapiens
ttttctttataaatt

SEQ ID NO: 838195 - DNA, 15 bp, Homo sapiens
attttctttataaat

SEQ ID NO: 838196 - DNA, 15 bp, Homo sapiens
tattttctttataaa

SEQ ID NO: 838197 - DNA, 15 bp, Homo sapiens
ttattttctttataa

SEQ ID NO: 838198 - DNA, 15 bp, Homo sapiens
tttattttctttata

SEQ ID NO: 838199 - DNA, 15 bp, Homo sapiens
atttattttctttat

SEQ ID NO: 838200 - DNA, 15 bp, Homo sapiens
catttattttcttta

SEQ ID NO: 838201 - DNA, 15 bp, Homo sapiens
acatttattttcttt

SEQ ID NO: 838202 - DNA, 15 bp, Homo sapiens
tacatttattttctt

SEQ ID NO: 838203 - DNA, 15 bp, Homo sapiens
ttacatttattttct

SEQ ID NO: 838204 - DNA, 15 bp, Homo sapiens
gttacatttattttc

SEQ ID NO: 838205 - DNA, 15 bp, Homo sapiens
agttacatttatttt

SEQ ID NO: 838206 - DNA, 15 bp, Homo sapiens
cagttacatttattt

SEQ ID NO: 838207 - DNA, 15 bp, Homo sapiens
ccagttacatttatt

SEQ ID NO: 838208 - DNA, 15 bp, Homo sapiens
gccagttacatttat

SEQ ID NO: 838209 - DNA, 15 bp, Homo sapiens
agccagttacattta

SEQ ID NO: 838210 - DNA, 15 bp, Homo sapiens
gagccagttacattt

SEQ ID NO: 838211 - DNA, 15 bp, Homo sapiens
tgagccagttacatt

SEQ ID NO: 838212 - DNA, 15 bp, Homo sapiens
gtgagccagttacat

SEQ ID NO: 838213 - DNA, 15 bp, Homo sapiens
cgtgagccagttaca

SEQ ID NO: 838214 - DNA, 15 bp, Homo sapiens
ccgtgagccagttac

SEQ ID NO: 838215 - DNA, 15 bp, Homo sapiens
accgtgagccagtta

SEQ ID NO: 838216 - DNA, 15 bp, Homo sapiens
aaccgtgagccagtt

SEQ ID NO: 838217 - DNA, 15 bp, Homo sapiens
gaaccgtgagccagt

SEQ ID NO: 838218 - DNA, 15 bp, Homo sapiens
agaaccgtgagccag

SEQ ID NO: 838219 - DNA, 15 bp, Homo sapiens
aagaaccgtgagcca

SEQ ID NO: 838220 - DNA, 15 bp, Homo sapiens
gaagaaccgtgagcc

SEQ ID NO: 838221 - DNA, 15 bp, Homo sapiens
tgaagaaccgtgagc

SEQ ID NO: 838222 - DNA, 15 bp, Homo sapiens
ctgaagaaccgtgag

SEQ ID NO: 838223 - DNA, 15 bp, Homo sapiens
cctgaagaaccgtga

SEQ ID NO: 838224 - DNA, 15 bp, Homo sapiens
gcctgaagaaccgtg

SEQ ID NO: 838225 - DNA, 15 bp, Homo sapiens
agcctgaagaaccgt

SEQ ID NO: 838226 - DNA, 15 bp, Homo sapiens
cagcctgaagaaccg

SEQ ID NO: 838227 - DNA, 15 bp, Homo sapiens
acagcctgaagaacc

SEQ ID NO: 838228 - DNA, 15 bp, Homo sapiens
tacagcctgaagaac

SEQ ID NO: 838229 - DNA, 15 bp, Homo sapiens
gtacagcctgaagaa

SEQ ID NO: 838230 - DNA, 15 bp, Homo sapiens
cgtacagcctgaaga

SEQ ID NO: 838231 - DNA, 15 bp, Homo sapiens
ccgtacagcctgaag

SEQ ID NO: 838232 - DNA, 15 bp, Homo sapiens
cccgtacagcctgaa

SEQ ID NO: 838233 - DNA, 15 bp, Homo sapiens
tcccgtacagcctga

SEQ ID NO: 838234 - DNA, 15 bp, Homo sapiens
ttcccgtacagcctg

SEQ ID NO: 838235 - DNA, 15 bp, Homo sapiens
cttcccgtacagcct

SEQ ID NO: 838236 - DNA, 15 bp, Homo sapiens
gcttcccgtacagcc

SEQ ID NO: 838237 - DNA, 15 bp, Homo sapiens
tgcttcccgtacagc

SEQ ID NO: 838238 - DNA, 15 bp, Homo sapiens
atgcttcccgtacag

SEQ ID NO: 838239 - DNA, 15 bp, Homo sapiens
tatgcttcccgtaca

SEQ ID NO: 838240 - DNA, 15 bp, Homo sapiens
ctatgcttcccgtac

SEQ ID NO: 838241 - DNA, 15 bp, Homo sapiens
gctatgcttcccgta

SEQ ID NO: 838242 - DNA, 15 bp, Homo sapiens
tgctatgcttcccgt

SEQ ID NO: 838243 - DNA, 15 bp, Homo sapiens
ctgctatgcttcccg

SEQ ID NO: 838244 - DNA, 15 bp, Homo sapiens
gctgctatgcttccc

SEQ ID NO: 838245 - DNA, 15 bp, Homo sapiens
tgctgctatgcttcc

SEQ ID NO: 838246 - DNA, 15 bp, Homo sapiens
atgctgctatgcttc

SEQ ID NO: 838247 - DNA, 15 bp, Homo sapiens
gatgctgctatgctt

SEQ ID NO: 838248 - DNA, 15 bp, Homo sapiens
agatgctgctatgct

SEQ ID NO: 838249 - DNA, 15 bp, Homo sapiens
cagatgctgctatgc

SEQ ID NO: 838250 - DNA, 15 bp, Homo sapiens
gcagatgctgctatg

SEQ ID NO: 838251 - DNA, 15 bp, Homo sapiens
agcagatgctgctat

SEQ ID NO: 838252 - DNA, 15 bp, Homo sapiens
aagcagatgctgcta

SEQ ID NO: 838253 - DNA, 15 bp, Homo sapiens
gaagcagatgctgct

SEQ ID NO: 838254 - DNA, 15 bp, Homo sapiens
agaagcagatgctgc

SEQ ID NO: 838255 - DNA, 15 bp, Homo sapiens
cagaagcagatgctg

SEQ ID NO: 838256 - DNA, 15 bp, Homo sapiens
tcagaagcagatgct

SEQ ID NO: 838257 - DNA, 15 bp, Homo sapiens
ctcagaagcagatgc

SEQ ID NO: 838258 - DNA, 15 bp, Homo sapiens
cctcagaagcagatg

SEQ ID NO: 838259 - DNA, 15 bp, Homo sapiens
tcctcagaagcagat

SEQ ID NO: 838260 - DNA, 15 bp, Homo sapiens
ctcctcagaagcaga

SEQ ID NO: 838261 - DNA, 15 bp, Homo sapiens
cctcctcagaagcag

SEQ ID NO: 838262 - DNA, 15 bp, Homo sapiens
gcctcctcagaagca

SEQ ID NO: 838263 - DNA, 15 bp, Homo sapiens
ggcctcctcagaagc

SEQ ID NO: 838264 - DNA, 15 bp, Homo sapiens
aggcctcctcagaag

SEQ ID NO: 838265 - DNA, 15 bp, Homo sapiens
gaggcctcctcagaa

SEQ ID NO: 838266 - DNA, 15 bp, Homo sapiens
tgaggcctcctcaga

SEQ ID NO: 838267 - DNA, 15 bp, Homo sapiens
ctgaggcctcctcag

SEQ ID NO: 838268 - DNA, 15 bp, Homo sapiens
cctgaggcctcctca

SEQ ID NO: 838269 - DNA, 15 bp, Homo sapiens
tcctgaggcctcctc

SEQ ID NO: 838270 - DNA, 15 bp, Homo sapiens
ttcctgaggcctcct

SEQ ID NO: 838271 - DNA, 15 bp, Homo sapiens
cttcctgaggcctcc

SEQ ID NO: 838272 - DNA, 15 bp, Homo sapiens
acttcctgaggcctc

SEQ ID NO: 838273 - DNA, 15 bp, Homo sapiens
aacttcctgaggcct

SEQ ID NO: 838274 - DNA, 15 bp, Homo sapiens
aaacttcctgaggcc

SEQ ID NO: 838275 - DNA, 15 bp, Homo sapiens
aaaacttcctgaggc

SEQ ID NO: 838276 - DNA, 15 bp, Homo sapiens
gaaaacttcctgagg

SEQ ID NO: 838277 - DNA, 15 bp, Homo sapiens
tgaaaacttcctgag

SEQ ID NO: 838278 - DNA, 15 bp, Homo sapiens
ttgaaaacttcctga

SEQ ID NO: 838279 - DNA, 15 bp, Homo sapiens
attgaaaacttcctg

SEQ ID NO: 838280 - DNA, 15 bp, Homo sapiens
gattgaaaacttcct

SEQ ID NO: 838281 - DNA, 15 bp, Homo sapiens
tgattgaaaacttcc

SEQ ID NO: 838282 - DNA, 15 bp, Homo sapiens
atgattgaaaacttc

SEQ ID NO: 838283 - DNA, 15 bp, Homo sapiens
catgattgaaaactt

SEQ ID NO: 838284 - DNA, 15 bp, Homo sapiens
ccatgattgaaaact

SEQ ID NO: 838285 - DNA, 15 bp, Homo sapiens
accatgattgaaaac

SEQ ID NO: 838286 - DNA, 15 bp, Homo sapiens
caccatgattgaaaa

SEQ ID NO: 838287 - DNA, 15 bp, Homo sapiens
ccaccatgattgaaa

SEQ ID NO: 838288 - DNA, 15 bp, Homo sapiens
tccaccatgattgaa

SEQ ID NO: 838289 - DNA, 15 bp, Homo sapiens
ttccaccatgattga

SEQ ID NO: 838290 - DNA, 15 bp, Homo sapiens
cttccaccatgattg

SEQ ID NO: 838291 - DNA, 15 bp, Homo sapiens
ccttccaccatgatt

SEQ ID NO: 838292 - DNA, 15 bp, Homo sapiens
gccttccaccatgat

SEQ ID NO: 838293 - DNA, 15 bp, Homo sapiens
tgccttccaccatga

SEQ ID NO: 838294 - DNA, 15 bp, Homo sapiens
ttgccttccaccatg

SEQ ID NO: 838295 - DNA, 15 bp, Homo sapiens
tttgccttccaccat

SEQ ID NO: 838296 - DNA, 15 bp, Homo sapiens
atttgccttccacca

SEQ ID NO: 838297 - DNA, 15 bp, Homo sapiens
tatttgccttccacc

SEQ ID NO: 838298 - DNA, 15 bp, Homo sapiens
ttatttgccttccac

SEQ ID NO: 838299 - DNA, 15 bp, Homo sapiens
cttatttgccttcca

SEQ ID NO: 838300 - DNA, 15 bp, Homo sapiens
tcttatttgccttcc

SEQ ID NO: 838301 - DNA, 15 bp, Homo sapiens
ttcttatttgccttc

SEQ ID NO: 838302 - DNA, 15 bp, Homo sapiens
cttcttatttgcctt

SEQ ID NO: 838303 - DNA, 15 bp, Homo sapiens
gcttcttatttgcct

SEQ ID NO: 838304 - DNA, 15 bp, Homo sapiens
tgcttcttatttgcc

SEQ ID NO: 838305 - DNA, 15 bp, Homo sapiens
ctgcttcttatttgc

SEQ ID NO: 838306 - DNA, 15 bp, Homo sapiens
cctgcttcttatttg

SEQ ID NO: 838307 - DNA, 15 bp, Homo sapiens
gcctgcttcttattt

SEQ ID NO: 838308 - DNA, 15 bp, Homo sapiens
tgcctgcttcttatt

SEQ ID NO: 838309 - DNA, 15 bp, Homo sapiens
atgcctgcttcttat

SEQ ID NO: 838310 - DNA, 15 bp, Homo sapiens
catgcctgcttctta

SEQ ID NO: 838311 - DNA, 15 bp, Homo sapiens
acatgcctgcttctt

SEQ ID NO: 838312 - DNA, 15 bp, Homo sapiens
aacatgcctgcttct

SEQ ID NO: 838313 - DNA, 15 bp, Homo sapiens
taacatgcctgcttc

SEQ ID NO: 838314 - DNA, 15 bp, Homo sapiens
gtaacatgcctgctt

SEQ ID NO: 838315 - DNA, 15 bp, Homo sapiens
tgtaacatgcctgct

SEQ ID NO: 838316 - DNA, 15 bp, Homo sapiens
gtgtaacatgcctgc

SEQ ID NO: 838317 - DNA, 15 bp, Homo sapiens
cgtgtaacatgcctg

SEQ ID NO: 838318 - DNA, 15 bp, Homo sapiens
tcgtgtaacatgcct

SEQ ID NO: 838319 - DNA, 15 bp, Homo sapiens
gtcgtgtaacatgcc

SEQ ID NO: 838320 - DNA, 15 bp, Homo sapiens
cgtcgtgtaacatgc

SEQ ID NO: 838321 - DNA, 15 bp, Homo sapiens
tcgtcgtgtaacatg

SEQ ID NO: 838322 - DNA, 15 bp, Homo sapiens
ttcgtcgtgtaacat

SEQ ID NO: 838323 - DNA, 15 bp, Homo sapiens
attcgtcgtgtaaca

SEQ ID NO: 838324 - DNA, 15 bp, Homo sapiens
gattcgtcgtgtaac

SEQ ID NO: 838325 - DNA, 15 bp, Homo sapiens
tgattcgtcgtgtaa

SEQ ID NO: 838326 - DNA, 15 bp, Homo sapiens
ctgattcgtcgtgta

SEQ ID NO: 838327 - DNA, 15 bp, Homo sapiens
cctgattcgtcgtgt

SEQ ID NO: 838328 - DNA, 15 bp, Homo sapiens
tcctgattcgtcgtg

SEQ ID NO: 838329 - DNA, 15 bp, Homo sapiens
ctcctgattcgtcgt

SEQ ID NO: 838330 - DNA, 15 bp, Homo sapiens
gctcctgattcgtcg

SEQ ID NO: 838331 - DNA, 15 bp, Homo sapiens
tgctcctgattcgtc

SEQ ID NO: 838332 - DNA, 15 bp, Homo sapiens
ttgctcctgattcgt

SEQ ID NO: 838333 - DNA, 15 bp, Homo sapiens
cttgctcctgattcg

SEQ ID NO: 838334 - DNA, 15 bp, Homo sapiens
tcttgctcctgattc

SEQ ID NO: 838335 - DNA, 15 bp, Homo sapiens
gtcttgctcctgatt

SEQ ID NO: 838336 - DNA, 15 bp, Homo sapiens
tgtcttgctcctgat

SEQ ID NO: 838337 - DNA, 15 bp, Homo sapiens
ttgtcttgctcctga

SEQ ID NO: 838338 - DNA, 15 bp, Homo sapiens
tttgtcttgctcctg

SEQ ID NO: 838339 - DNA, 15 bp, Homo sapiens
ctttgtcttgctcct

SEQ ID NO: 838340 - DNA, 15 bp, Homo sapiens
actttgtcttgctcc

SEQ ID NO: 838341 - DNA, 15 bp, Homo sapiens
cactttgtcttgctc

SEQ ID NO: 838342 - DNA, 15 bp, Homo sapiens
tcactttgtcttgct

SEQ ID NO: 838343 - DNA, 15 bp, Homo sapiens
ctcactttgtcttgc

SEQ ID NO: 838344 - DNA, 15 bp, Homo sapiens
cctcactttgtcttg

SEQ ID NO: 838345 - DNA, 15 bp, Homo sapiens
ccctcactttgtctt

SEQ ID NO: 838346 - DNA, 15 bp, Homo sapiens
tccctcactttgtct

SEQ ID NO: 838347 - DNA, 15 bp, Homo sapiens
ctccctcactttgtc

SEQ ID NO: 838348 - DNA, 15 bp, Homo sapiens
cctccctcactttgt

SEQ ID NO: 838349 - DNA, 15 bp, Homo sapiens
tcctccctcactttg

SEQ ID NO: 838350 - DNA, 15 bp, Homo sapiens
ctcctccctcacttt

SEQ ID NO: 838351 - DNA, 15 bp, Homo sapiens
cctcctccctcactt

SEQ ID NO: 838352 - DNA, 15 bp, Homo sapiens
acctcctccctcact

SEQ ID NO: 838353 - DNA, 15 bp, Homo sapiens
cacctcctccctcac

SEQ ID NO: 838354 - DNA, 15 bp, Homo sapiens
gcacctcctccctca

SEQ ID NO: 838355 - DNA, 15 bp, Homo sapiens
ggcacctcctccctc

SEQ ID NO: 838356 - DNA, 15 bp, Homo sapiens
tggcacctcctccct

SEQ ID NO: 838357 - DNA, 15 bp, Homo sapiens
gtggcacctcctccc

SEQ ID NO: 838358 - DNA, 15 bp, Homo sapiens
tgtggcacctcctcc

SEQ ID NO: 838359 - DNA, 15 bp, Homo sapiens
gtgtggcacctcctc

SEQ ID NO: 838360 - DNA, 15 bp, Homo sapiens
tgtgtggcacctcct

SEQ ID NO: 838361 - DNA, 15 bp, Homo sapiens
gtgtgtggcacctcc

SEQ ID NO: 838362 - DNA, 15 bp, Homo sapiens
agtgtgtggcacctc

SEQ ID NO: 838363 - DNA, 15 bp, Homo sapiens
aagtgtgtggcacct

SEQ ID NO: 838364 - DNA, 15 bp, Homo sapiens
aaagtgtgtggcacc

SEQ ID NO: 838365 - DNA, 15 bp, Homo sapiens
caaagtgtgtggcac

SEQ ID NO: 838366 - DNA, 15 bp, Homo sapiens
tcaaagtgtgtggca

SEQ ID NO: 838367 - DNA, 15 bp, Homo sapiens
ttcaaagtgtgtggc

SEQ ID NO: 838368 - DNA, 15 bp, Homo sapiens
tttcaaagtgtgtgg

SEQ ID NO: 838369 - DNA, 15 bp, Homo sapiens
atttcaaagtgtgtg

SEQ ID NO: 838370 - DNA, 15 bp, Homo sapiens
catttcaaagtgtgt

SEQ ID NO: 838371 - DNA, 15 bp, Homo sapiens
tcatttcaaagtgtg

SEQ ID NO: 838372 - DNA, 15 bp, Homo sapiens
ctcatttcaaagtgt

SEQ ID NO: 838373 - DNA, 15 bp, Homo sapiens
gctcatttcaaagtg

SEQ ID NO: 838374 - DNA, 15 bp, Homo sapiens
tgctcatttcaaagt

SEQ ID NO: 838375 - DNA, 15 bp, Homo sapiens
ctgctcatttcaaag

SEQ ID NO: 838376 - DNA, 15 bp, Homo sapiens
tctgctcatttcaaa

SEQ ID NO: 838377 - DNA, 15 bp, Homo sapiens
atctgctcatttcaa

SEQ ID NO: 838378 - DNA, 15 bp, Homo sapiens
gatctgctcatttca

SEQ ID NO: 838379 - DNA, 15 bp, Homo sapiens
agatctgctcatttc

SEQ ID NO: 838380 - DNA, 15 bp, Homo sapiens
gagatctgctcattt

SEQ ID NO: 838381 - DNA, 15 bp, Homo sapiens
tgagatctgctcatt

SEQ ID NO: 838382 - DNA, 15 bp, Homo sapiens
atgagatctgctcat

SEQ ID NO: 838383 - DNA, 15 bp, Homo sapiens
catgagatctgctca

SEQ ID NO: 838384 - DNA, 15 bp, Homo sapiens
tcatgagatctgctc

SEQ ID NO: 838385 - DNA, 15 bp, Homo sapiens
ctcatgagatctgct

SEQ ID NO: 838386 - DNA, 15 bp, Homo sapiens
tctcatgagatctgc

SEQ ID NO: 838387 - DNA, 15 bp, Homo sapiens
ttctcatgagatctg

SEQ ID NO: 838388 - DNA, 15 bp, Homo sapiens
gttctcatgagatct

SEQ ID NO: 838389 - DNA, 15 bp, Homo sapiens
tgttctcatgagatc

SEQ ID NO: 838390 - DNA, 15 bp, Homo sapiens
ctgttctcatgagat

SEQ ID NO: 838391 - DNA, 15 bp, Homo sapiens
gctgttctcatgaga

SEQ ID NO: 838392 - DNA, 15 bp, Homo sapiens
cgctgttctcatgag

SEQ ID NO: 838393 - DNA, 15 bp, Homo sapiens
gcgctgttctcatga

SEQ ID NO: 838394 - DNA, 15 bp, Homo sapiens
ggcgctgttctcatg

SEQ ID NO: 838395 - DNA, 15 bp, Homo sapiens
tggcgctgttctcat

SEQ ID NO: 838396 - DNA, 15 bp, Homo sapiens
ttggcgctgttctca

SEQ ID NO: 838397 - DNA, 15 bp, Homo sapiens
cttggcgctgttctc

SEQ ID NO: 838398 - DNA, 15 bp, Homo sapiens
tcttggcgctgttct

SEQ ID NO: 838399 - DNA, 15 bp, Homo sapiens
ctcttggcgctgttc

SEQ ID NO: 838400 - DNA, 15 bp, Homo sapiens
cctcttggcgctgtt

SEQ ID NO: 838401 - DNA, 15 bp, Homo sapiens
tcctcttggcgctgt

SEQ ID NO: 838402 - DNA, 15 bp, Homo sapiens
atcctcttggcgctg

SEQ ID NO: 838403 - DNA, 15 bp, Homo sapiens
catcctcttggcgct

SEQ ID NO: 838404 - DNA, 15 bp, Homo sapiens
ccatcctcttggcgc

SEQ ID NO: 838405 - DNA, 15 bp, Homo sapiens
accatcctcttggcg

SEQ ID NO: 838406 - DNA, 15 bp, Homo sapiens
caccatcctcttggc

SEQ ID NO: 838407 - DNA, 15 bp, Homo sapiens
gcaccatcctcttgg

SEQ ID NO: 838408 - DNA, 15 bp, Homo sapiens
agcaccatcctcttg

SEQ ID NO: 838409 - DNA, 15 bp, Homo sapiens
tagcaccatcctctt

SEQ ID NO: 838410 - DNA, 15 bp, Homo sapiens
atagcaccatcctct

SEQ ID NO: 838411 - DNA, 15 bp, Homo sapiens
tatagcaccatcctc

SEQ ID NO: 838412 - DNA, 15 bp, Homo sapiens
gtatagcaccatcct

SEQ ID NO: 838413 - DNA, 15 bp, Homo sapiens
ggtatagcaccatcc

SEQ ID NO: 838414 - DNA, 15 bp, Homo sapiens
cggtatagcaccatc

SEQ ID NO: 838415 - DNA, 15 bp, Homo sapiens
acggtatagcaccat

SEQ ID NO: 838416 - DNA, 15 bp, Homo sapiens
aacggtatagcacca

SEQ ID NO: 838417 - DNA, 15 bp, Homo sapiens
gaacggtatagcacc

SEQ ID NO: 838418 - DNA, 15 bp, Homo sapiens
tgaacggtatagcac

SEQ ID NO: 838419 - DNA, 15 bp, Homo sapiens
atgaacggtatagca

SEQ ID NO: 838420 - DNA, 15 bp, Homo sapiens
catgaacggtatagc

SEQ ID NO: 838421 - DNA, 15 bp, Homo sapiens
tcatgaacggtatag

SEQ ID NO: 838422 - DNA, 15 bp, Homo sapiens
ctcatgaacggtata

SEQ ID NO: 838423 - DNA, 15 bp, Homo sapiens
tctcatgaacggtat

SEQ ID NO: 838424 - DNA, 15 bp, Homo sapiens
ttctcatgaacggta

SEQ ID NO: 838425 - DNA, 15 bp, Homo sapiens
tttctcatgaacggt

SEQ ID NO: 838426 - DNA, 15 bp, Homo sapiens
atttctcatgaacgg

SEQ ID NO: 838427 - DNA, 15 bp, Homo sapiens
gatttctcatgaacg

SEQ ID NO: 838428 - DNA, 15 bp, Homo sapiens
ggatttctcatgaac

SEQ ID NO: 838429 - DNA, 15 bp, Homo sapiens
tggatttctcatgaa

SEQ ID NO: 838430 - DNA, 15 bp, Homo sapiens
gtggatttctcatga

SEQ ID NO: 838431 - DNA, 15 bp, Homo sapiens
ggtggatttctcatg

SEQ ID NO: 838432 - DNA, 15 bp, Homo sapiens
gggtggatttctcat

SEQ ID NO: 838433 - DNA, 15 bp, Homo sapiens
ggggtggatttctca

SEQ ID NO: 838434 - DNA, 15 bp, Homo sapiens
gggggtggatttctc

SEQ ID NO: 838435 - DNA, 15 bp, Homo sapiens
tgggggtggatttct

SEQ ID NO: 838436 - DNA, 15 bp, Homo sapiens
atgggggtggatttc

SEQ ID NO: 838437 - DNA, 15 bp, Homo sapiens
catgggggtggattt

SEQ ID NO: 838438 - DNA, 15 bp, Homo sapiens
tcatgggggtggatt

SEQ ID NO: 838439 - DNA, 15 bp, Homo sapiens
atcatgggggtggat

SEQ ID NO: 838440 - DNA, 15 bp, Homo sapiens
gatcatgggggtgga

SEQ ID NO: 838441 - DNA, 15 bp, Homo sapiens
ggatcatgggggtgg

SEQ ID NO: 838442 - DNA, 15 bp, Homo sapiens
tggatcatgggggtg

SEQ ID NO: 838443 - DNA, 15 bp, Homo sapiens
ctggatcatgggggt

SEQ ID NO: 838444 - DNA, 15 bp, Homo sapiens
actggatcatggggg

SEQ ID NO: 838445 - DNA, 15 bp, Homo sapiens
aactggatcatgggg

SEQ ID NO: 838446 - DNA, 15 bp, Homo sapiens
taactggatcatggg

SEQ ID NO: 838447 - DNA, 15 bp, Homo sapiens
gtaactggatcatgg

SEQ ID NO: 838448 - DNA, 15 bp, Homo sapiens
ggtaactggatcatg

SEQ ID NO: 838449 - DNA, 15 bp, Homo sapiens
aggtaactggatcat

SEQ ID NO: 838450 - DNA, 15 bp, Homo sapiens
gaggtaactggatca

SEQ ID NO: 838451 - DNA, 15 bp, Homo sapiens
ggaggtaactggatc

SEQ ID NO: 838452 - DNA, 15 bp, Homo sapiens
gggaggtaactggat

SEQ ID NO: 838453 - DNA, 15 bp, Homo sapiens
tgggaggtaactgga

SEQ ID NO: 838454 - DNA, 15 bp, Homo sapiens
gtgggaggtaactgg

SEQ ID NO: 838455 - DNA, 15 bp, Homo sapiens
ggtgggaggtaactg

SEQ ID NO: 838456 - DNA, 15 bp, Homo sapiens
tggtgggaggtaact

SEQ ID NO: 838457 - DNA, 15 bp, Homo sapiens
ctggtgggaggtaac

SEQ ID NO: 838458 - DNA, 15 bp, Homo sapiens
cctggtgggaggtaa

SEQ ID NO: 838459 - DNA, 15 bp, Homo sapiens
gcctggtgggaggta

SEQ ID NO: 838460 - DNA, 15 bp, Homo sapiens
ggcctggtgggaggt

SEQ ID NO: 838461 - DNA, 15 bp, Homo sapiens
gggcctggtgggagg

SEQ ID NO: 838462 - DNA, 15 bp, Homo sapiens
ggggcctggtgggag

SEQ ID NO: 838463 - DNA, 15 bp, Homo sapiens
cggggcctggtggga

SEQ ID NO: 838464 - DNA, 15 bp, Homo sapiens
gcggggcctggtggg

SEQ ID NO: 838465 - DNA, 15 bp, Homo sapiens
ggcggggcctggtgg

SEQ ID NO: 838466 - DNA, 15 bp, Homo sapiens
aggcggggcctggtg

SEQ ID NO: 838467 - DNA, 15 bp, Homo sapiens
gaggcggggcctggt

SEQ ID NO: 838468 - DNA, 15 bp, Homo sapiens
ggaggcggggcctgg

SEQ ID NO: 838469 - DNA, 15 bp, Homo sapiens
tggaggcggggcctg

SEQ ID NO: 838470 - DNA, 15 bp, Homo sapiens
ttggaggcggggcct

SEQ ID NO: 838471 - DNA, 15 bp, Homo sapiens
gttggaggcggggcc

SEQ ID NO: 838472 - DNA, 15 bp, Homo sapiens
tgttggaggcggggc

SEQ ID NO: 838473 - DNA, 15 bp, Homo sapiens
gtgttggaggcgggg

SEQ ID NO: 838474 - DNA, 15 bp, Homo sapiens
agtgttggaggcggg

SEQ ID NO: 838475 - DNA, 15 bp, Homo sapiens
cagtgttggaggcgg

SEQ ID NO: 838476 - DNA, 15 bp, Homo sapiens
ccagtgttggaggcg

SEQ ID NO: 838477 - DNA, 15 bp, Homo sapiens
cccagtgttggaggc

SEQ ID NO: 838478 - DNA, 15 bp, Homo sapiens
tcccagtgttggagg

SEQ ID NO: 838479 - DNA, 15 bp, Homo sapiens
ttcccagtgttggag

SEQ ID NO: 838480 - DNA, 15 bp, Homo sapiens
attcccagtgttgga

SEQ ID NO: 838481 - DNA, 15 bp, Homo sapiens
aattcccagtgttgg

SEQ ID NO: 838482 - DNA, 15 bp, Homo sapiens
taattcccagtgttg

SEQ ID NO: 838483 - DNA, 15 bp, Homo sapiens
gtaattcccagtgtt

SEQ ID NO: 838484 - DNA, 15 bp, Homo sapiens
tgtaattcccagtgt

SEQ ID NO: 838485 - DNA, 15 bp, Homo sapiens
ttgtaattcccagtg

SEQ ID NO: 838486 - DNA, 15 bp, Homo sapiens
attgtaattcccagt

SEQ ID NO: 838487 - DNA, 15 bp, Homo sapiens
aattgtaattcccag

SEQ ID NO: 838488 - DNA, 15 bp, Homo sapiens
gaattgtaattccca

SEQ ID NO: 838489 - DNA, 15 bp, Homo sapiens
tgaattgtaattccc

SEQ ID NO: 838490 - DNA, 15 bp, Homo sapiens
ttgaattgtaattcc

SEQ ID NO: 838491 - DNA, 15 bp, Homo sapiens
gttgaattgtaattc

SEQ ID NO: 838492 - DNA, 15 bp, Homo sapiens
tgttgaattgtaatt

SEQ ID NO: 838493 - DNA, 15 bp, Homo sapiens
atgttgaattgtaat

SEQ ID NO: 838494 - DNA, 15 bp, Homo sapiens
catgttgaattgtaa

SEQ ID NO: 838495 - DNA, 15 bp, Homo sapiens
tcatgttgaattgta

SEQ ID NO: 838496 - DNA, 15 bp, Homo sapiens
ctcatgttgaattgt

SEQ ID NO: 838497 - DNA, 15 bp, Homo sapiens
tctcatgttgaattg

SEQ ID NO: 838498 - DNA, 15 bp, Homo sapiens
atctcatgttgaatt

SEQ ID NO: 838499 - DNA, 15 bp, Homo sapiens
aatctcatgttgaat

SEQ ID NO: 838500 - DNA, 15 bp, Homo sapiens
aaatctcatgttgaa

SEQ ID NO: 838501 - DNA, 15 bp, Homo sapiens
caaatctcatgttga

SEQ ID NO: 838502 - DNA, 15 bp, Homo sapiens
ccaaatctcatgttg

SEQ ID NO: 838503 - DNA, 15 bp, Homo sapiens
cccaaatctcatgtt

SEQ ID NO: 838504 - DNA, 15 bp, Homo sapiens
gcccaaatctcatgt

SEQ ID NO: 838505 - DNA, 15 bp, Homo sapiens
tgcccaaatctcatg

SEQ ID NO: 838506 - DNA, 15 bp, Homo sapiens
ctgcccaaatctcat

SEQ ID NO: 838507 - DNA, 15 bp, Homo sapiens
tctgcccaaatctca

SEQ ID NO: 838508 - DNA, 15 bp, Homo sapiens
ctctgcccaaatctc

SEQ ID NO: 838509 - DNA, 15 bp, Homo sapiens
tctctgcccaaatct

SEQ ID NO: 838510 - DNA, 15 bp, Homo sapiens
gtctctgcccaaatc

SEQ ID NO: 838511 - DNA, 15 bp, Homo sapiens
tgtctctgcccaaat

SEQ ID NO: 838512 - DNA, 15 bp, Homo sapiens
gtgtctctgcccaaa

SEQ ID NO: 838513 - DNA, 15 bp, Homo sapiens
tgtgtctctgcccaa

SEQ ID NO: 838514 - DNA, 15 bp, Homo sapiens
ctgtgtctctgccca

SEQ ID NO: 838515 - DNA, 15 bp, Homo sapiens
tctgtgtctctgccc

SEQ ID NO: 838516 - DNA, 15 bp, Homo sapiens
atctgtgtctctgcc

SEQ ID NO: 838517 - DNA, 15 bp, Homo sapiens
gatctgtgtctctgc

SEQ ID NO: 838518 - DNA, 15 bp, Homo sapiens
ggatctgtgtctctg

SEQ ID NO: 838519 - DNA, 15 bp, Homo sapiens
tggatctgtgtctct

SEQ ID NO: 838520 - DNA, 15 bp, Homo sapiens
ttggatctgtgtctc

SEQ ID NO: 838521 - DNA, 15 bp, Homo sapiens
tttggatctgtgtct

SEQ ID NO: 838522 - DNA, 15 bp, Homo sapiens
gtttggatctgtgtc

SEQ ID NO: 838523 - DNA, 15 bp, Homo sapiens
ggtttggatctgtgt

SEQ ID NO: 838524 - DNA, 15 bp, Homo sapiens
tggtttggatctgtg

SEQ ID NO: 838525 - DNA, 15 bp, Homo sapiens
atggtttggatctgt

SEQ ID NO: 838526 - DNA, 15 bp, Homo sapiens
tatggtttggatctg

SEQ ID NO: 838527 - DNA, 15 bp, Homo sapiens
gtatggtttggatct

SEQ ID NO: 838528 - DNA, 15 bp, Homo sapiens
ggtatggtttggatc

SEQ ID NO: 838529 - DNA, 15 bp, Homo sapiens
tggtatggtttggat

SEQ ID NO: 838530 - DNA, 15 bp, Homo sapiens
gtggtatggtttgga

SEQ ID NO: 838531 - DNA, 15 bp, Homo sapiens
ggtggtatggtttgg

SEQ ID NO: 838532 - DNA, 15 bp, Homo sapiens
tggtggtatggtttg

SEQ ID NO: 838533 - DNA, 15 bp, Homo sapiens
ctggtggtatggttt

SEQ ID NO: 838534 - DNA, 15 bp, Homo sapiens
gctggtggtatggtt

SEQ ID NO: 838535 - DNA, 15 bp, Homo sapiens
agctggtggtatggt

SEQ ID NO: 838536 - DNA, 15 bp, Homo sapiens
tagctggtggtatgg

SEQ ID NO: 838537 - DNA, 15 bp, Homo sapiens
ttagctggtggtatg

SEQ ID NO: 838538 - DNA, 15 bp, Homo sapiens
attagctggtggtat

SEQ ID NO: 838539 - DNA, 15 bp, Homo sapiens
tattagctggtggta

SEQ ID NO: 838540 - DNA, 15 bp, Homo sapiens
gtattagctggtggt

SEQ ID NO: 838541 - DNA, 15 bp, Homo sapiens
ggtattagctggtgg

SEQ ID NO: 838542 - DNA, 15 bp, Homo sapiens
tggtattagctggtg

SEQ ID NO: 838543 - DNA, 15 bp, Homo sapiens
ttggtattagctggt

SEQ ID NO: 838544 - DNA, 15 bp, Homo sapiens
tttggtattagctgg

SEQ ID NO: 838545 - DNA, 15 bp, Homo sapiens
ttttggtattagctg

SEQ ID NO: 838546 - DNA, 15 bp, Homo sapiens
tttttggtattagct

SEQ ID NO: 838547 - DNA, 15 bp, Homo sapiens
ttttttggtattagc

SEQ ID NO: 838548 - DNA, 15 bp, Homo sapiens
tttttttggtattag

SEQ ID NO: 838549 - DNA, 15 bp, Homo sapiens
ttttttttggtatta

SEQ ID NO: 838550 - DNA, 15 bp, Homo sapiens
tttttttttggtatt

SEQ ID NO: 838551 - DNA, 15 bp, Homo sapiens
ttttttttttggtat

SEQ ID NO: 838552 - DNA, 15 bp, Homo sapiens
tttttttttttggta

SEQ ID NO: 838553 - DNA, 15 bp, Homo sapiens
ttttttttttttggt

SEQ ID NO: 838554 - DNA, 15 bp, Homo sapiens
tttttttttttttgg

SEQ ID NO: 838555 - DNA, 15 bp, Homo sapiens
aaatttttttttttt

SEQ ID NO: 838556 - DNA, 15 bp, Homo sapiens
aaaattttttttttt

SEQ ID NO: 838557 - DNA, 15 bp, Homo sapiens
aaaaatttttttttt

SEQ ID NO: 838558 - DNA, 15 bp, Homo sapiens
aaaaaattttttttt

SEQ ID NO: 838559 - DNA, 15 bp, Homo sapiens
aaaaaaatttttttt

SEQ ID NO: 838560 - DNA, 15 bp, Homo sapiens
aaaaaaaattttttt

SEQ ID NO: 838561 - DNA, 15 bp, Homo sapiens
aaaaaaaaatttttt

SEQ ID NO: 838562 - DNA, 15 bp, Homo sapiens
aaaaaaaaaattttt

SEQ ID NO: 838563 - DNA, 15 bp, Homo sapiens
taaaaaaaaaatttt

SEQ ID NO: 838564 - DNA, 15 bp, Homo sapiens
ttaaaaaaaaaattt

SEQ ID NO: 838565 - DNA, 15 bp, Homo sapiens
cttaaaaaaaaaatt

SEQ ID NO: 838566 - DNA, 15 bp, Homo sapiens
tcttaaaaaaaaaat

SEQ ID NO: 838567 - DNA, 15 bp, Homo sapiens
atgtcttaaaaaaaa

SEQ ID NO: 838568 - DNA, 15 bp, Homo sapiens
catgtcttaaaaaaa

SEQ ID NO: 838569 - DNA, 15 bp, Homo sapiens
ccatgtcttaaaaaa

SEQ ID NO: 838570 - DNA, 15 bp, Homo sapiens
accatgtcttaaaaa

SEQ ID NO: 838571 - DNA, 15 bp, Homo sapiens
gaccatgtcttaaaa

SEQ ID NO: 838572 - DNA, 15 bp, Homo sapiens
agaccatgtcttaaa

SEQ ID NO: 838573 - DNA, 15 bp, Homo sapiens
aagaccatgtcttaa

SEQ ID NO: 838574 - DNA, 15 bp, Homo sapiens
taagaccatgtctta

SEQ ID NO: 838575 - DNA, 15 bp, Homo sapiens
gtaagaccatgtctt

SEQ ID NO: 838576 - DNA, 15 bp, Homo sapiens
agtaagaccatgtct

SEQ ID NO: 838577 - DNA, 15 bp, Homo sapiens
tagtaagaccatgtc

SEQ ID NO: 838578 - DNA, 15 bp, Homo sapiens
atagtaagaccatgt

SEQ ID NO: 838579 - DNA, 15 bp, Homo sapiens
catagtaagaccatg

SEQ ID NO: 838580 - DNA, 15 bp, Homo sapiens
acatagtaagaccat

SEQ ID NO: 838581 - DNA, 15 bp, Homo sapiens
aacatagtaagacca

SEQ ID NO: 838582 - DNA, 15 bp, Homo sapiens
gaacatagtaagacc

SEQ ID NO: 838583 - DNA, 15 bp, Homo sapiens
agaacatagtaagac

SEQ ID NO: 838584 - DNA, 15 bp, Homo sapiens
tagaacatagtaaga

SEQ ID NO: 838585 - DNA, 15 bp, Homo sapiens
gtagaacatagtaag

SEQ ID NO: 838586 - DNA, 15 bp, Homo sapiens
tgtagaacatagtaa

SEQ ID NO: 838587 - DNA, 15 bp, Homo sapiens
ctgtagaacatagta

SEQ ID NO: 838588 - DNA, 15 bp, Homo sapiens
cctgtagaacatagt

SEQ ID NO: 838589 - DNA, 15 bp, Homo sapiens
gcctgtagaacatag

SEQ ID NO: 838590 - DNA, 15 bp, Homo sapiens
agcctgtagaacata

SEQ ID NO: 838591 - DNA, 15 bp, Homo sapiens
cagcctgtagaacat

SEQ ID NO: 838592 - DNA, 15 bp, Homo sapiens
ccagcctgtagaaca

SEQ ID NO: 838593 - DNA, 15 bp, Homo sapiens
accagcctgtagaac

SEQ ID NO: 838594 - DNA, 15 bp, Homo sapiens
gaccagcctgtagaa

SEQ ID NO: 838595 - DNA, 15 bp, Homo sapiens
agaccagcctgtaga

SEQ ID NO: 838596 - DNA, 15 bp, Homo sapiens
aagaccagcctgtag

SEQ ID NO: 838597 - DNA, 15 bp, Homo sapiens
taagaccagcctgta

SEQ ID NO: 838598 - DNA, 15 bp, Homo sapiens
ttaagaccagcctgt

SEQ ID NO: 838599 - DNA, 15 bp, Homo sapiens
ccaggagtttaagac

SEQ ID NO: 838600 - DNA, 15 bp, Homo sapiens
gccaggagtttaaga

SEQ ID NO: 838601 - DNA, 15 bp, Homo sapiens
ggccaggagtttaag

SEQ ID NO: 838602 - DNA, 15 bp, Homo sapiens
aggccaggagtttaa

SEQ ID NO: 838603 - DNA, 15 bp, Homo sapiens
gaggccaggagttta

SEQ ID NO: 838604 - DNA, 15 bp, Homo sapiens
aaggtgggaggatca

SEQ ID NO: 838605 - DNA, 15 bp, Homo sapiens
caaggtgggaggatc

SEQ ID NO: 838606 - DNA, 15 bp, Homo sapiens
ccaaggtgggaggat

SEQ ID NO: 838607 - DNA, 15 bp, Homo sapiens
gccaaggtgggagga

SEQ ID NO: 838608 - DNA, 15 bp, Homo sapiens
ggccaaggtgggagg

SEQ ID NO: 838609 - DNA, 15 bp, Homo sapiens
aggccaaggtgggag

SEQ ID NO: 838610 - DNA, 15 bp, Homo sapiens
gaggccaaggtggga

SEQ ID NO: 838611 - DNA, 15 bp, Homo sapiens
tgctttgggaggcca

SEQ ID NO: 838612 - DNA, 15 bp, Homo sapiens
gtgctttgggaggcc

SEQ ID NO: 838613 - DNA, 15 bp, Homo sapiens
agtgctttgggaggc

SEQ ID NO: 838614 - DNA, 15 bp, Homo sapiens
cagtgctttgggagg

SEQ ID NO: 838615 - DNA, 15 bp, Homo sapiens
ccagtgctttgggag

SEQ ID NO: 838616 - DNA, 15 bp, Homo sapiens
cccagtgctttggga

SEQ ID NO: 838617 - DNA, 15 bp, Homo sapiens
tcccagtgctttggg

SEQ ID NO: 838618 - DNA, 15 bp, Homo sapiens
ttcccagtgctttgg

SEQ ID NO: 838619 - DNA, 15 bp, Homo sapiens
attcccagtgctttg

SEQ ID NO: 838620 - DNA, 15 bp, Homo sapiens
aattcccagtgcttt

SEQ ID NO: 838621 - DNA, 15 bp, Homo sapiens
gaattcccagtgctt

SEQ ID NO: 838622 - DNA, 15 bp, Homo sapiens
tgaattcccagtgct

SEQ ID NO: 838623 - DNA, 15 bp, Homo sapiens
ctgaattcccagtgc

SEQ ID NO: 838624 - DNA, 15 bp, Homo sapiens
tctgaattcccagtg

SEQ ID NO: 838625 - DNA, 15 bp, Homo sapiens
gtctgaattcccagt

SEQ ID NO: 838626 - DNA, 15 bp, Homo sapiens
tgtctgaattcccag

SEQ ID NO: 838627 - DNA, 15 bp, Homo sapiens
atgtctgaattccca

SEQ ID NO: 838628 - DNA, 15 bp, Homo sapiens
catgtctgaattccc

SEQ ID NO: 838629 - DNA, 15 bp, Homo sapiens
tcatgtctgaattcc

SEQ ID NO: 838630 - DNA, 15 bp, Homo sapiens
ctcatgtctgaattc

SEQ ID NO: 838631 - DNA, 15 bp, Homo sapiens
actcatgtctgaatt

SEQ ID NO: 838632 - DNA, 15 bp, Homo sapiens
tactcatgtctgaat

SEQ ID NO: 838633 - DNA, 15 bp, Homo sapiens
ttactcatgtctgaa

SEQ ID NO: 838634 - DNA, 15 bp, Homo sapiens
gttactcatgtctga

SEQ ID NO: 838635 - DNA, 15 bp, Homo sapiens
tgttactcatgtctg

SEQ ID NO: 838636 - DNA, 15 bp, Homo sapiens
ctgttactcatgtct

SEQ ID NO: 838637 - DNA, 15 bp, Homo sapiens
actgttactcatgtc

SEQ ID NO: 838638 - DNA, 15 bp, Homo sapiens
cactgttactcatgt

SEQ ID NO: 838639 - DNA, 15 bp, Homo sapiens
gcactgttactcatg

SEQ ID NO: 838640 - DNA, 15 bp, Homo sapiens
ggcactgttactcat

SEQ ID NO: 838641 - DNA, 15 bp, Homo sapiens
aggcactgttactca

SEQ ID NO: 838642 - DNA, 15 bp, Homo sapiens
caggcactgttactc

SEQ ID NO: 838643 - DNA, 15 bp, Homo sapiens
ccaggcactgttact

SEQ ID NO: 838644 - DNA, 15 bp, Homo sapiens
gccaggcactgttac

SEQ ID NO: 838645 - DNA, 15 bp, Homo sapiens
ggccaggcactgtta

SEQ ID NO: 838646 - DNA, 15 bp, Homo sapiens
tggccaggcactgtt

SEQ ID NO: 838647 - DNA, 15 bp, Homo sapiens
ttggccaggcactgt

SEQ ID NO: 838648 - DNA, 15 bp, Homo sapiens
attggccaggcactg

SEQ ID NO: 838649 - DNA, 15 bp, Homo sapiens
tattggccaggcact

SEQ ID NO: 838650 - DNA, 15 bp, Homo sapiens
gtattggccaggcac

SEQ ID NO: 838651 - DNA, 15 bp, Homo sapiens
agtattggccaggca

SEQ ID NO: 838652 - DNA, 15 bp, Homo sapiens
aagtattggccaggc

SEQ ID NO: 838653 - DNA, 15 bp, Homo sapiens
taagtattggccagg

SEQ ID NO: 838654 - DNA, 15 bp, Homo sapiens
ataagtattggccag

SEQ ID NO: 838655 - DNA, 15 bp, Homo sapiens
aataagtattggcca

SEQ ID NO: 838656 - DNA, 15 bp, Homo sapiens
aaataagtattggcc

SEQ ID NO: 838657 - DNA, 15 bp, Homo sapiens
aaaataagtattggc

SEQ ID NO: 838658 - DNA, 15 bp, Homo sapiens
aaaaataagtattgg

SEQ ID NO: 838659 - DNA, 15 bp, Homo sapiens
taaaaataagtattg

SEQ ID NO: 838660 - DNA, 15 bp, Homo sapiens
ttaaaaataagtatt

SEQ ID NO: 838661 - DNA, 15 bp, Homo sapiens
tttaaaaataagtat

SEQ ID NO: 838662 - DNA, 15 bp, Homo sapiens
gtttaaaaataagta

SEQ ID NO: 838663 - DNA, 15 bp, Homo sapiens
tgtttaaaaataagt

SEQ ID NO: 838664 - DNA, 15 bp, Homo sapiens
atgtttaaaaataag

SEQ ID NO: 838665 - DNA, 15 bp, Homo sapiens
aatgtttaaaaataa

SEQ ID NO: 838666 - DNA, 15 bp, Homo sapiens
gaatgtttaaaaata

SEQ ID NO: 838667 - DNA, 15 bp, Homo sapiens
agaatgtttaaaaat

SEQ ID NO: 838668 - DNA, 15 bp, Homo sapiens
gagaatgtttaaaaa

SEQ ID NO: 838669 - DNA, 15 bp, Homo sapiens
agagaatgtttaaaa

SEQ ID NO: 838670 - DNA, 15 bp, Homo sapiens
tagagaatgtttaaa

SEQ ID NO: 838671 - DNA, 15 bp, Homo sapiens
gtagagaatgtttaa

SEQ ID NO: 838672 - DNA, 15 bp, Homo sapiens
ggtagagaatgttta

SEQ ID NO: 838673 - DNA, 15 bp, Homo sapiens
tggtagagaatgttt

SEQ ID NO: 838674 - DNA, 15 bp, Homo sapiens
atggtagagaatgtt

SEQ ID NO: 838675 - DNA, 15 bp, Homo sapiens
tatggtagagaatgt

SEQ ID NO: 838676 - DNA, 15 bp, Homo sapiens
ttatggtagagaatg

SEQ ID NO: 838677 - DNA, 15 bp, Homo sapiens
tttatggtagagaat

SEQ ID NO: 838678 - DNA, 15 bp, Homo sapiens
gtttatggtagagaa

SEQ ID NO: 838679 - DNA, 15 bp, Homo sapiens
agtttatggtagaga

SEQ ID NO: 838680 - DNA, 15 bp, Homo sapiens
aagtttatggtagag

SEQ ID NO: 838681 - DNA, 15 bp, Homo sapiens
taagtttatggtaga

SEQ ID NO: 838682 - DNA, 15 bp, Homo sapiens
ctaagtttatggtag

SEQ ID NO: 838683 - DNA, 15 bp, Homo sapiens
cctaagtttatggta

SEQ ID NO: 838684 - DNA, 15 bp, Homo sapiens
tcctaagtttatggt

SEQ ID NO: 838685 - DNA, 15 bp, Homo sapiens
atcctaagtttatgg

SEQ ID NO: 838686 - DNA, 15 bp, Homo sapiens
gatcctaagtttatg

SEQ ID NO: 838687 - DNA, 15 bp, Homo sapiens
agatcctaagtttat

SEQ ID NO: 838688 - DNA, 15 bp, Homo sapiens
aagatcctaagttta

SEQ ID NO: 838689 - DNA, 15 bp, Homo sapiens
caagatcctaagttt

SEQ ID NO: 838690 - DNA, 15 bp, Homo sapiens
tcaagatcctaagtt

SEQ ID NO: 838691 - DNA, 15 bp, Homo sapiens
atcaagatcctaagt

SEQ ID NO: 838692 - DNA, 15 bp, Homo sapiens
aatcaagatcctaag

SEQ ID NO: 838693 - DNA, 15 bp, Homo sapiens
aaatcaagatcctaa

SEQ ID NO: 838694 - DNA, 15 bp, Homo sapiens
caaatcaagatccta

SEQ ID NO: 838695 - DNA, 15 bp, Homo sapiens
acaaatcaagatcct

SEQ ID NO: 838696 - DNA, 15 bp, Homo sapiens
aacaaatcaagatcc

SEQ ID NO: 838697 - DNA, 15 bp, Homo sapiens
gaacaaatcaagatc

SEQ ID NO: 838698 - DNA, 15 bp, Homo sapiens
tgaacaaatcaagat

SEQ ID NO: 838699 - DNA, 15 bp, Homo sapiens
gtgaacaaatcaaga

SEQ ID NO: 838700 - DNA, 15 bp, Homo sapiens
tgtgaacaaatcaag

SEQ ID NO: 838701 - DNA, 15 bp, Homo sapiens
atgtgaacaaatcaa

SEQ ID NO: 838702 - DNA, 15 bp, Homo sapiens
aatgtgaacaaatca

SEQ ID NO: 838703 - DNA, 15 bp, Homo sapiens
caatgtgaacaaatc

SEQ ID NO: 838704 - DNA, 15 bp, Homo sapiens
tcaatgtgaacaaat

SEQ ID NO: 838705 - DNA, 15 bp, Homo sapiens
ttcaatgtgaacaaa

SEQ ID NO: 838706 - DNA, 15 bp, Homo sapiens
gttcaatgtgaacaa

SEQ ID NO: 838707 - DNA, 15 bp, Homo sapiens
tgttcaatgtgaaca

SEQ ID NO: 838708 - DNA, 15 bp, Homo sapiens
ctgttcaatgtgaac

SEQ ID NO: 838709 - DNA, 15 bp, Homo sapiens
tctgttcaatgtgaa

SEQ ID NO: 838710 - DNA, 15 bp, Homo sapiens
atctgttcaatgtga

SEQ ID NO: 838711 - DNA, 15 bp, Homo sapiens
aatctgttcaatgtg

SEQ ID NO: 838712 - DNA, 15 bp, Homo sapiens
aaatctgttcaatgt

SEQ ID NO: 838713 - DNA, 15 bp, Homo sapiens
aaaatctgttcaatg

SEQ ID NO: 838714 - DNA, 15 bp, Homo sapiens
aaaaatctgttcaat

SEQ ID NO: 838715 - DNA, 15 bp, Homo sapiens
taaaaatctgttcaa

SEQ ID NO: 838716 - DNA, 15 bp, Homo sapiens
ataaaaatctgttca

SEQ ID NO: 838717 - DNA, 15 bp, Homo sapiens
aataaaaatctgttc

SEQ ID NO: 838718 - DNA, 15 bp, Homo sapiens
taataaaaatctgtt

SEQ ID NO: 838719 - DNA, 15 bp, Homo sapiens
ataataaaaatctgt

SEQ ID NO: 838720 - DNA, 15 bp, Homo sapiens
tataataaaaatctg

SEQ ID NO: 838721 - DNA, 15 bp, Homo sapiens
gtataataaaaatct

SEQ ID NO: 838722 - DNA, 15 bp, Homo sapiens
tgtataataaaaatc

SEQ ID NO: 838723 - DNA, 15 bp, Homo sapiens
ctgtataataaaaat

SEQ ID NO: 838724 - DNA, 15 bp, Homo sapiens
tctgtataataaaaa

SEQ ID NO: 838725 - DNA, 15 bp, Homo sapiens
atctgtataataaaa

SEQ ID NO: 838726 - DNA, 15 bp, Homo sapiens
aatctgtataataaa

SEQ ID NO: 838727 - DNA, 15 bp, Homo sapiens
caatctgtataataa

SEQ ID NO: 838728 - DNA, 15 bp, Homo sapiens
tcaatctgtataata

SEQ ID NO: 838729 - DNA, 15 bp, Homo sapiens
ttcaatctgtataat

SEQ ID NO: 838730 - DNA, 15 bp, Homo sapiens
attcaatctgtataa

SEQ ID NO: 838731 - DNA, 15 bp, Homo sapiens
aattcaatctgtata

SEQ ID NO: 838732 - DNA, 15 bp, Homo sapiens
aaattcaatctgtat

SEQ ID NO: 838733 - DNA, 15 bp, Homo sapiens
taaattcaatctgta

SEQ ID NO: 838734 - DNA, 15 bp, Homo sapiens
ataaattcaatctgt

SEQ ID NO: 838735 - DNA, 15 bp, Homo sapiens
tataaattcaatctg

SEQ ID NO: 838736 - DNA, 15 bp, Homo sapiens
ttataaattcaatct

SEQ ID NO: 838737 - DNA, 15 bp, Homo sapiens
cttataaattcaatc

SEQ ID NO: 838738 - DNA, 15 bp, Homo sapiens
tcttataaattcaat

SEQ ID NO: 838739 - DNA, 15 bp, Homo sapiens
ttcttataaattcaa

SEQ ID NO: 838740 - DNA, 15 bp, Homo sapiens
tttcttataaattca

SEQ ID NO: 838741 - DNA, 15 bp, Homo sapiens
ttttcttataaattc

SEQ ID NO: 838742 - DNA, 15 bp, Homo sapiens
attttcttataaatt

SEQ ID NO: 838743 - DNA, 15 bp, Homo sapiens
cattttcttataaat

SEQ ID NO: 838744 - DNA, 15 bp, Homo sapiens
acattttcttataaa

SEQ ID NO: 838745 - DNA, 15 bp, Homo sapiens
aacattttcttataa

SEQ ID NO: 838746 - DNA, 15 bp, Homo sapiens
caacattttcttata

SEQ ID NO: 838747 - DNA, 15 bp, Homo sapiens
gcaacattttcttat

SEQ ID NO: 838748 - DNA, 15 bp, Homo sapiens
tgcaacattttctta

SEQ ID NO: 838749 - DNA, 15 bp, Homo sapiens
ctgcaacattttctt

SEQ ID NO: 838750 - DNA, 15 bp, Homo sapiens
tctgcaacattttct

SEQ ID NO: 838751 - DNA, 15 bp, Homo sapiens
gtctgcaacattttc

SEQ ID NO: 838752 - DNA, 15 bp, Homo sapiens
tgtctgcaacatttt

SEQ ID NO: 838753 - DNA, 15 bp, Homo sapiens
atgtctgcaacattt

SEQ ID NO: 838754 - DNA, 15 bp, Homo sapiens
aatgtctgcaacatt

SEQ ID NO: 838755 - DNA, 15 bp, Homo sapiens
caatgtctgcaacat

SEQ ID NO: 838756 - DNA, 15 bp, Homo sapiens
acaatgtctgcaaca

SEQ ID NO: 838757 - DNA, 15 bp, Homo sapiens
gacaatgtctgcaac

SEQ ID NO: 838758 - DNA, 15 bp, Homo sapiens
tgacaatgtctgcaa

SEQ ID NO: 838759 - DNA, 15 bp, Homo sapiens
ttgacaatgtctgca

SEQ ID NO: 838760 - DNA, 15 bp, Homo sapiens
tttgacaatgtctgc

SEQ ID NO: 838761 - DNA, 15 bp, Homo sapiens
ttttgacaatgtctg

SEQ ID NO: 838762 - DNA, 15 bp, Homo sapiens
tttttgacaatgtct

SEQ ID NO: 838763 - DNA, 15 bp, Homo sapiens
ctttttgacaatgtc

SEQ ID NO: 838764 - DNA, 15 bp, Homo sapiens
cctttttgacaatgt

SEQ ID NO: 838765 - DNA, 15 bp, Homo sapiens
ccctttttgacaatg

SEQ ID NO: 838766 - DNA, 15 bp, Homo sapiens
tccctttttgacaat

SEQ ID NO: 838767 - DNA, 15 bp, Homo sapiens
gtccctttttgacaa

SEQ ID NO: 838768 - DNA, 15 bp, Homo sapiens
cgtccctttttgaca

SEQ ID NO: 838769 - DNA, 15 bp, Homo sapiens
acgtccctttttgac

SEQ ID NO: 838770 - DNA, 15 bp, Homo sapiens
gacgtccctttttga

SEQ ID NO: 838771 - DNA, 15 bp, Homo sapiens
ggacgtccctttttg

SEQ ID NO: 838772 - DNA, 15 bp, Homo sapiens
tggacgtcccttttt

SEQ ID NO: 838773 - DNA, 15 bp, Homo sapiens
ttggacgtccctttt

SEQ ID NO: 838774 - DNA, 15 bp, Homo sapiens
tttggacgtcccttt

SEQ ID NO: 838775 - DNA, 15 bp, Homo sapiens
gtttggacgtccctt

SEQ ID NO: 838776 - DNA, 15 bp, Homo sapiens
ggtttggacgtccct

SEQ ID NO: 838777 - DNA, 15 bp, Homo sapiens
tggtttggacgtccc

SEQ ID NO: 838778 - DNA, 15 bp, Homo sapiens
gtggtttggacgtcc

SEQ ID NO: 838779 - DNA, 15 bp, Homo sapiens
agtggtttggacgtc

SEQ ID NO: 838780 - DNA, 15 bp, Homo sapiens
cagtggtttggacgt

SEQ ID NO: 838781 - DNA, 15 bp, Homo sapiens
acagtggtttggacg

SEQ ID NO: 838782 - DNA, 15 bp, Homo sapiens
cacagtggtttggac

SEQ ID NO: 838783 - DNA, 15 bp, Homo sapiens
tcacagtggtttgga

SEQ ID NO: 838784 - DNA, 15 bp, Homo sapiens
atcacagtggtttgg

SEQ ID NO: 838785 - DNA, 15 bp, Homo sapiens
tatcacagtggtttg

SEQ ID NO: 838786 - DNA, 15 bp, Homo sapiens
atatcacagtggttt

SEQ ID NO: 838787 - DNA, 15 bp, Homo sapiens
aatatcacagtggtt

SEQ ID NO: 838788 - DNA, 15 bp, Homo sapiens
aaatatcacagtggt

SEQ ID NO: 838789 - DNA, 15 bp, Homo sapiens
taaatatcacagtgg

SEQ ID NO: 838790 - DNA, 15 bp, Homo sapiens
ataaatatcacagtg

SEQ ID NO: 838791 - DNA, 15 bp, Homo sapiens
tataaatatcacagt

SEQ ID NO: 838792 - DNA, 15 bp, Homo sapiens
ttataaatatcacag

SEQ ID NO: 838793 - DNA, 15 bp, Homo sapiens
cttataaatatcaca

SEQ ID NO: 838794 - DNA, 15 bp, Homo sapiens
gcttataaatatcac

SEQ ID NO: 838795 - DNA, 15 bp, Homo sapiens
tgcttataaatatca

SEQ ID NO: 838796 - DNA, 15 bp, Homo sapiens
atgcttataaatatc

SEQ ID NO: 838797 - DNA, 15 bp, Homo sapiens
aatgcttataaatat

SEQ ID NO: 838798 - DNA, 15 bp, Homo sapiens
aaatgcttataaata

SEQ ID NO: 838799 - DNA, 15 bp, Homo sapiens
caaatgcttataaat

SEQ ID NO: 838800 - DNA, 15 bp, Homo sapiens
ccaaatgcttataaa

SEQ ID NO: 838801 - DNA, 15 bp, Homo sapiens
cccaaatgcttataa

SEQ ID NO: 838802 - DNA, 15 bp, Homo sapiens
gcccaaatgcttata

SEQ ID NO: 838803 - DNA, 15 bp, Homo sapiens
ggcccaaatgcttat

SEQ ID NO: 838804 - DNA, 15 bp, Homo sapiens
tggcccaaatgctta

SEQ ID NO: 838805 - DNA, 15 bp, Homo sapiens
gtggcccaaatgctt

SEQ ID NO: 838806 - DNA, 15 bp, Homo sapiens
tgtggcccaaatgct

SEQ ID NO: 838807 - DNA, 15 bp, Homo sapiens
atgtggcccaaatgc

SEQ ID NO: 838808 - DNA, 15 bp, Homo sapiens
aatgtggcccaaatg

SEQ ID NO: 838809 - DNA, 15 bp, Homo sapiens
aaatgtggcccaaat

SEQ ID NO: 838810 - DNA, 15 bp, Homo sapiens
aaaatgtggcccaaa

SEQ ID NO: 838811 - DNA, 15 bp, Homo sapiens
caaaatgtggcccaa

SEQ ID NO: 838812 - DNA, 15 bp, Homo sapiens
tcaaaatgtggccca

SEQ ID NO: 838813 - DNA, 15 bp, Homo sapiens
atcaaaatgtggccc

SEQ ID NO: 838814 - DNA, 15 bp, Homo sapiens
tatcaaaatgtggcc

SEQ ID NO: 838815 - DNA, 15 bp, Homo sapiens
ctatcaaaatgtggc

SEQ ID NO: 838816 - DNA, 15 bp, Homo sapiens
tctatcaaaatgtgg

SEQ ID NO: 838817 - DNA, 15 bp, Homo sapiens
ttctatcaaaatgtg

SEQ ID NO: 838818 - DNA, 15 bp, Homo sapiens
gttctatcaaaatgt

SEQ ID NO: 838819 - DNA, 15 bp, Homo sapiens
agttctatcaaaatg

SEQ ID NO: 838820 - DNA, 15 bp, Homo sapiens
tagttctatcaaaat

SEQ ID NO: 838821 - DNA, 15 bp, Homo sapiens
atagttctatcaaaa

SEQ ID NO: 838822 - DNA, 15 bp, Homo sapiens
tatagttctatcaaa

SEQ ID NO: 838823 - DNA, 15 bp, Homo sapiens
gtatagttctatcaa

SEQ ID NO: 838824 - DNA, 15 bp, Homo sapiens
tgtatagttctatca

SEQ ID NO: 838825 - DNA, 15 bp, Homo sapiens
gtgtatagttctatc

SEQ ID NO: 838826 - DNA, 15 bp, Homo sapiens
cgtgtatagttctat

SEQ ID NO: 838827 - DNA, 15 bp, Homo sapiens
ccgtgtatagttcta

SEQ ID NO: 838828 - DNA, 15 bp, Homo sapiens
tccgtgtatagttct

SEQ ID NO: 838829 - DNA, 15 bp, Homo sapiens
ctccgtgtatagttc

SEQ ID NO: 838830 - DNA, 15 bp, Homo sapiens
actccgtgtatagtt

SEQ ID NO: 838831 - DNA, 15 bp, Homo sapiens
cactccgtgtatagt

SEQ ID NO: 838832 - DNA, 15 bp, Homo sapiens
acactccgtgtatag

SEQ ID NO: 838833 - DNA, 15 bp, Homo sapiens
cacactccgtgtata

SEQ ID NO: 838834 - DNA, 15 bp, Homo sapiens
acacactccgtgtat

SEQ ID NO: 838835 - DNA, 15 bp, Homo sapiens
cacacactccgtgta

SEQ ID NO: 838836 - DNA, 15 bp, Homo sapiens
acacacactccgtgt

SEQ ID NO: 838837 - DNA, 15 bp, Homo sapiens
cacacacactccgtg

SEQ ID NO: 838838 - DNA, 15 bp, Homo sapiens
acacacacactccgt

SEQ ID NO: 838839 - DNA, 15 bp, Homo sapiens
cacacacacactccg

SEQ ID NO: 838840 - DNA, 15 bp, Homo sapiens
acacacacacactcc

SEQ ID NO: 838841 - DNA, 15 bp, Homo sapiens
cacacacacacactc

SEQ ID NO: 838842 - DNA, 15 bp, Homo sapiens
acacacacacacact

SEQ ID NO: 838843 - DNA, 15 bp, Homo sapiens
tatacacacacacac

SEQ ID NO: 838844 - DNA, 15 bp, Homo sapiens
atatacacacacaca

SEQ ID NO: 838845 - DNA, 15 bp, Homo sapiens
tatatacacacacac

SEQ ID NO: 838846 - DNA, 15 bp, Homo sapiens
atatatacacacaca

SEQ ID NO: 838847 - DNA, 15 bp, Homo sapiens
tatatatacacacac

SEQ ID NO: 838848 - DNA, 15 bp, Homo sapiens
atatatatacacaca

SEQ ID NO: 838849 - DNA, 15 bp, Homo sapiens
tatatatatacacac

SEQ ID NO: 838850 - DNA, 15 bp, Homo sapiens
atatatatatacaca

SEQ ID NO: 838851 - DNA, 15 bp, Homo sapiens
tatatatatatacac

SEQ ID NO: 838852 - DNA, 15 bp, Homo sapiens
gtatatatatataca

SEQ ID NO: 838853 - DNA, 15 bp, Homo sapiens
tgtatatatatatac

SEQ ID NO: 838854 - DNA, 15 bp, Homo sapiens
aatgtgtgtgtgtat

SEQ ID NO: 838855 - DNA, 15 bp, Homo sapiens
taatgtgtgtgtgta

SEQ ID NO: 838856 - DNA, 15 bp, Homo sapiens
ataatgtgtgtgtgt

SEQ ID NO: 838857 - DNA, 15 bp, Homo sapiens
aataatgtgtgtgtg

SEQ ID NO: 838858 - DNA, 15 bp, Homo sapiens
aaataatgtgtgtgt

SEQ ID NO: 838859 - DNA, 15 bp, Homo sapiens
taaataatgtgtgtg

SEQ ID NO: 838860 - DNA, 15 bp, Homo sapiens
ataaataatgtgtgt

SEQ ID NO: 838861 - DNA, 15 bp, Homo sapiens
tataaataatgtgtg

SEQ ID NO: 838862 - DNA, 15 bp, Homo sapiens
atataaataatgtgt

SEQ ID NO: 838863 - DNA, 15 bp, Homo sapiens
tatataaataatgtg

SEQ ID NO: 838864 - DNA, 15 bp, Homo sapiens
atatataaataatgt

SEQ ID NO: 838865 - DNA, 15 bp, Homo sapiens
tatatataaataatg

SEQ ID NO: 838866 - DNA, 15 bp, Homo sapiens
atatatataaataat

SEQ ID NO: 838867 - DNA, 15 bp, Homo sapiens
catatatataaataa

SEQ ID NO: 838868 - DNA, 15 bp, Homo sapiens
acatatatataaata

SEQ ID NO: 838869 - DNA, 15 bp, Homo sapiens
tacatatatataaat

SEQ ID NO: 838870 - DNA, 15 bp, Homo sapiens
atacatatatataaa

SEQ ID NO: 838871 - DNA, 15 bp, Homo sapiens
tatacatatatataa

SEQ ID NO: 838872 - DNA, 15 bp, Homo sapiens
catatatacatatat

SEQ ID NO: 838873 - DNA, 15 bp, Homo sapiens
catatatatatatac

SEQ ID NO: 838874 - DNA, 15 bp, Homo sapiens
aatacatatatatat

SEQ ID NO: 838875 - DNA, 15 bp, Homo sapiens
aaatacatatatata

SEQ ID NO: 838876 - DNA, 15 bp, Homo sapiens
taaatacatatatat

SEQ ID NO: 838877 - DNA, 15 bp, Homo sapiens
ataaatacatatata

SEQ ID NO: 838878 - DNA, 15 bp, Homo sapiens
tataaatacatatat

SEQ ID NO: 838879 - DNA, 15 bp, Homo sapiens
atataaatacatata

SEQ ID NO: 838880 - DNA, 15 bp, Homo sapiens
tatataaatacatat

SEQ ID NO: 838881 - DNA, 15 bp, Homo sapiens
atatataaatacata

SEQ ID NO: 838882 - DNA, 15 bp, Homo sapiens
tatatataaatacat

SEQ ID NO: 838883 - DNA, 15 bp, Homo sapiens
atatatataaataca

SEQ ID NO: 838884 - DNA, 15 bp, Homo sapiens
tatatatataaatac

SEQ ID NO: 838885 - DNA, 15 bp, Homo sapiens
atatatatataaata

SEQ ID NO: 838886 - DNA, 15 bp, Homo sapiens
catatatatataaat

SEQ ID NO: 838887 - DNA, 15 bp, Homo sapiens
acatatatatataaa

SEQ ID NO: 838888 - DNA, 15 bp, Homo sapiens
cacatatatatataa

SEQ ID NO: 838889 - DNA, 15 bp, Homo sapiens
tacacatatatatat

SEQ ID NO: 838890 - DNA, 15 bp, Homo sapiens
atacacatatatata

SEQ ID NO: 838891 - DNA, 15 bp, Homo sapiens
tatacacatatatat

SEQ ID NO: 838892 - DNA, 15 bp, Homo sapiens
atatacacatatata

SEQ ID NO: 838893 - DNA, 15 bp, Homo sapiens
catatacacatatat

SEQ ID NO: 838894 - DNA, 15 bp, Homo sapiens
acatatacacatata

SEQ ID NO: 838895 - DNA, 15 bp, Homo sapiens
tacatatacacatat

SEQ ID NO: 838896 - DNA, 15 bp, Homo sapiens
atacatatacacata

SEQ ID NO: 838897 - DNA, 15 bp, Homo sapiens
catacatatacacat

SEQ ID NO: 838898 - DNA, 15 bp, Homo sapiens
acatacatatacaca

SEQ ID NO: 838899 - DNA, 15 bp, Homo sapiens
tacatacatatacac

SEQ ID NO: 838900 - DNA, 15 bp, Homo sapiens
gtacatacatataca

SEQ ID NO: 838901 - DNA, 15 bp, Homo sapiens
tgtacatacatatac

SEQ ID NO: 838902 - DNA, 15 bp, Homo sapiens
gtgtacatacatata

SEQ ID NO: 838903 - DNA, 15 bp, Homo sapiens
tgtgtacatacatat

SEQ ID NO: 838904 - DNA, 15 bp, Homo sapiens
atgtgtacatacata

SEQ ID NO: 838905 - DNA, 15 bp, Homo sapiens
aatgtgtacatacat

SEQ ID NO: 838906 - DNA, 15 bp, Homo sapiens
taatgtgtacataca

SEQ ID NO: 838907 - DNA, 15 bp, Homo sapiens
ataatgtgtacatac

SEQ ID NO: 838908 - DNA, 15 bp, Homo sapiens
aataatgtgtacata

SEQ ID NO: 838909 - DNA, 15 bp, Homo sapiens
aaataatgtgtacat

SEQ ID NO: 838910 - DNA, 15 bp, Homo sapiens
taaataatgtgtaca

SEQ ID NO: 838911 - DNA, 15 bp, Homo sapiens
gtaaataatgtgtac

SEQ ID NO: 838912 - DNA, 15 bp, Homo sapiens
ggtaaataatgtgta

SEQ ID NO: 838913 - DNA, 15 bp, Homo sapiens
aggtaaataatgtgt

SEQ ID NO: 838914 - DNA, 15 bp, Homo sapiens
taggtaaataatgtg

SEQ ID NO: 838915 - DNA, 15 bp, Homo sapiens
gtaggtaaataatgt

SEQ ID NO: 838916 - DNA, 15 bp, Homo sapiens
ggtaggtaaataatg

SEQ ID NO: 838917 - DNA, 15 bp, Homo sapiens
aggtaggtaaataat

SEQ ID NO: 838918 - DNA, 15 bp, Homo sapiens
taggtaggtaaataa

SEQ ID NO: 838919 - DNA, 15 bp, Homo sapiens
gtaggtaggtaaata

SEQ ID NO: 838920 - DNA, 15 bp, Homo sapiens
agtaggtaggtaaat

SEQ ID NO: 838921 - DNA, 15 bp, Homo sapiens
cagtaggtaggtaaa

SEQ ID NO: 838922 - DNA, 15 bp, Homo sapiens
acagtaggtaggtaa

SEQ ID NO: 838923 - DNA, 15 bp, Homo sapiens
cacagtaggtaggta

SEQ ID NO: 838924 - DNA, 15 bp, Homo sapiens
acacagtaggtaggt

SEQ ID NO: 838925 - DNA, 15 bp, Homo sapiens
cacacagtaggtagg

SEQ ID NO: 838926 - DNA, 15 bp, Homo sapiens
tcacacagtaggtag

SEQ ID NO: 838927 - DNA, 15 bp, Homo sapiens
ctcacacagtaggta

SEQ ID NO: 838928 - DNA, 15 bp, Homo sapiens
actcacacagtaggt

SEQ ID NO: 838929 - DNA, 15 bp, Homo sapiens
cactcacacagtagg

SEQ ID NO: 838930 - DNA, 15 bp, Homo sapiens
acactcacacagtag

SEQ ID NO: 838931 - DNA, 15 bp, Homo sapiens
cacactcacacagta

SEQ ID NO: 838932 - DNA, 15 bp, Homo sapiens
acacactcacacagt

SEQ ID NO: 838933 - DNA, 15 bp, Homo sapiens
cacacactcacacag

SEQ ID NO: 838934 - DNA, 15 bp, Homo sapiens
gcacacactcacaca

SEQ ID NO: 838935 - DNA, 15 bp, Homo sapiens
tgcacacactcacac

SEQ ID NO: 838936 - DNA, 15 bp, Homo sapiens
atgcacacactcaca

SEQ ID NO: 838937 - DNA, 15 bp, Homo sapiens
tatgcacacactcac

SEQ ID NO: 838938 - DNA, 15 bp, Homo sapiens
atatgcacacactca

SEQ ID NO: 838939 - DNA, 15 bp, Homo sapiens
tatatgcacacactc

SEQ ID NO: 838940 - DNA, 15 bp, Homo sapiens
atatatgcacacact

SEQ ID NO: 838941 - DNA, 15 bp, Homo sapiens
tatatatgcacacac

SEQ ID NO: 838942 - DNA, 15 bp, Homo sapiens
gtatatatgcacaca

SEQ ID NO: 838943 - DNA, 15 bp, Homo sapiens
tgtatatatgcacac

SEQ ID NO: 838944 - DNA, 15 bp, Homo sapiens
gtgtatatatgcaca

SEQ ID NO: 838945 - DNA, 15 bp, Homo sapiens
cgtgtatatatgcac

SEQ ID NO: 838946 - DNA, 15 bp, Homo sapiens
gcgtgtatatatgca

SEQ ID NO: 838947 - DNA, 15 bp, Homo sapiens
tgcgtgtatatatgc

SEQ ID NO: 838948 - DNA, 15 bp, Homo sapiens
gtgcgtgtatatatg

SEQ ID NO: 838949 - DNA, 15 bp, Homo sapiens
tgtgcgtgtatatat

SEQ ID NO: 838950 - DNA, 15 bp, Homo sapiens
gtgtgcgtgtatata

SEQ ID NO: 838951 - DNA, 15 bp, Homo sapiens
tgtgtgcgtgtatat

SEQ ID NO: 838952 - DNA, 15 bp, Homo sapiens
gtgtgtgcgtgtata

SEQ ID NO: 838953 - DNA, 15 bp, Homo sapiens
tgtgtgtgcgtgtat

SEQ ID NO: 838954 - DNA, 15 bp, Homo sapiens
gtgtgtgtgcgtgta

SEQ ID NO: 838955 - DNA, 15 bp, Homo sapiens
tgtgtgtgtgcgtgt

SEQ ID NO: 838956 - DNA, 15 bp, Homo sapiens
gtgtgtgtgtgcgtg

SEQ ID NO: 838957 - DNA, 15 bp, Homo sapiens
tgtgtgtgtgtgcgt

SEQ ID NO: 838958 - DNA, 15 bp, Homo sapiens
gtgtgtgtgtgtgcg

SEQ ID NO: 838959 - DNA, 15 bp, Homo sapiens
tgtgtgtgtgtgtgc

SEQ ID NO: 838960 - DNA, 15 bp, Homo sapiens
atttgtgtgtgtgtg

SEQ ID NO: 838961 - DNA, 15 bp, Homo sapiens
tatttgtgtgtgtgt

SEQ ID NO: 838962 - DNA, 15 bp, Homo sapiens
atatttgtgtgtgtg

SEQ ID NO: 838963 - DNA, 15 bp, Homo sapiens
tatatttgtgtgtgt

SEQ ID NO: 838964 - DNA, 15 bp, Homo sapiens
atatatttgtgtgtg

SEQ ID NO: 838965 - DNA, 15 bp, Homo sapiens
tatatatttgtgtgt

SEQ ID NO: 838966 - DNA, 15 bp, Homo sapiens
atatatatttgtgtg

SEQ ID NO: 838967 - DNA, 15 bp, Homo sapiens
tatatatatttgtgt

SEQ ID NO: 838968 - DNA, 15 bp, Homo sapiens
atatatatatttgtg

SEQ ID NO: 838969 - DNA, 15 bp, Homo sapiens
aatatatatatttgt

SEQ ID NO: 838970 - DNA, 15 bp, Homo sapiens
aaatatatatatttg

SEQ ID NO: 838971 - DNA, 15 bp, Homo sapiens
gaaatatatatattt

SEQ ID NO: 838972 - DNA, 15 bp, Homo sapiens
ggaaatatatatatt

SEQ ID NO: 838973 - DNA, 15 bp, Homo sapiens
gggaaatatatatat

SEQ ID NO: 838974 - DNA, 15 bp, Homo sapiens
agggaaatatatata

SEQ ID NO: 838975 - DNA, 15 bp, Homo sapiens
aagggaaatatatat

SEQ ID NO: 838976 - DNA, 15 bp, Homo sapiens
gaagggaaatatata

SEQ ID NO: 838977 - DNA, 15 bp, Homo sapiens
agaagggaaatatat

SEQ ID NO: 838978 - DNA, 15 bp, Homo sapiens
cagaagggaaatata

SEQ ID NO: 838979 - DNA, 15 bp, Homo sapiens
tcagaagggaaatat

SEQ ID NO: 838980 - DNA, 15 bp, Homo sapiens
ctcagaagggaaata

SEQ ID NO: 838981 - DNA, 15 bp, Homo sapiens
tctcagaagggaaat

SEQ ID NO: 838982 - DNA, 15 bp, Homo sapiens
gtctcagaagggaaa

SEQ ID NO: 838983 - DNA, 15 bp, Homo sapiens
tgtctcagaagggaa

SEQ ID NO: 838984 - DNA, 15 bp, Homo sapiens
ttgtctcagaaggga

SEQ ID NO: 838985 - DNA, 15 bp, Homo sapiens
tttgtctcagaaggg

SEQ ID NO: 838986 - DNA, 15 bp, Homo sapiens
ctttgtctcagaagg

SEQ ID NO: 838987 - DNA, 15 bp, Homo sapiens
gctttgtctcagaag

SEQ ID NO: 838988 - DNA, 15 bp, Homo sapiens
ggctttgtctcagaa

SEQ ID NO: 838989 - DNA, 15 bp, Homo sapiens
tggctttgtctcaga

SEQ ID NO: 838990 - DNA, 15 bp, Homo sapiens
ttggctttgtctcag

SEQ ID NO: 838991 - DNA, 15 bp, Homo sapiens
tttggctttgtctca

SEQ ID NO: 838992 - DNA, 15 bp, Homo sapiens
gtttggctttgtctc

SEQ ID NO: 838993 - DNA, 15 bp, Homo sapiens
tgtttggctttgtct

SEQ ID NO: 838994 - DNA, 15 bp, Homo sapiens
ctgtttggctttgtc

SEQ ID NO: 838995 - DNA, 15 bp, Homo sapiens
gctgtttggctttgt

SEQ ID NO: 838996 - DNA, 15 bp, Homo sapiens
tgctgtttggctttg

SEQ ID NO: 838997 - DNA, 15 bp, Homo sapiens
gtgctgtttggcttt

SEQ ID NO: 838998 - DNA, 15 bp, Homo sapiens
agtgctgtttggctt

SEQ ID NO: 838999 - DNA, 15 bp, Homo sapiens
cagtgctgtttggct

SEQ ID NO: 839000 - DNA, 15 bp, Homo sapiens
acagtgctgtttggc

SEQ ID NO: 839001 - DNA, 15 bp, Homo sapiens
tacagtgctgtttgg

SEQ ID NO: 839002 - DNA, 15 bp, Homo sapiens
atacagtgctgtttg

SEQ ID NO: 839003 - DNA, 15 bp, Homo sapiens
catacagtgctgttt

SEQ ID NO: 839004 - DNA, 15 bp, Homo sapiens
gcatacagtgctgtt

SEQ ID NO: 839005 - DNA, 15 bp, Homo sapiens
agcatacagtgctgt

SEQ ID NO: 839006 - DNA, 15 bp, Homo sapiens
aagcatacagtgctg

SEQ ID NO: 839007 - DNA, 15 bp, Homo sapiens
taagcatacagtgct

SEQ ID NO: 839008 - DNA, 15 bp, Homo sapiens
ttaagcatacagtgc

SEQ ID NO: 839009 - DNA, 15 bp, Homo sapiens
tttaagcatacagtg

SEQ ID NO: 839010 - DNA, 15 bp, Homo sapiens
ctttaagcatacagt

SEQ ID NO: 839011 - DNA, 15 bp, Homo sapiens
tctttaagcatacag

SEQ ID NO: 839012 - DNA, 15 bp, Homo sapiens
ttctttaagcataca

SEQ ID NO: 839013 - DNA, 15 bp, Homo sapiens
tttctttaagcatac

SEQ ID NO: 839014 - DNA, 15 bp, Homo sapiens
ttttctttaagcata

SEQ ID NO: 839015 - DNA, 15 bp, Homo sapiens
tttttctttaagcat

SEQ ID NO: 839016 - DNA, 15 bp, Homo sapiens
gtttttctttaagca

SEQ ID NO: 839017 - DNA, 15 bp, Homo sapiens
tgtttttctttaagc

SEQ ID NO: 839018 - DNA, 15 bp, Homo sapiens
ctgtttttctttaag

SEQ ID NO: 839019 - DNA, 15 bp, Homo sapiens
actgtttttctttaa

SEQ ID NO: 839020 - DNA, 15 bp, Homo sapiens
gactgtttttcttta

SEQ ID NO: 839021 - DNA, 15 bp, Homo sapiens
tgactgtttttcttt

SEQ ID NO: 839022 - DNA, 15 bp, Homo sapiens
gtgactgtttttctt

SEQ ID NO: 839023 - DNA, 15 bp, Homo sapiens
tgtgactgtttttct

SEQ ID NO: 839024 - DNA, 15 bp, Homo sapiens
gtgtgactgtttttc

SEQ ID NO: 839025 - DNA, 15 bp, Homo sapiens
agtgtgactgttttt

SEQ ID NO: 839026 - DNA, 15 bp, Homo sapiens
aagtgtgactgtttt

SEQ ID NO: 839027 - DNA, 15 bp, Homo sapiens
gaagtgtgactgttt

SEQ ID NO: 839028 - DNA, 15 bp, Homo sapiens
ggaagtgtgactgtt

SEQ ID NO: 839029 - DNA, 15 bp, Homo sapiens
gggaagtgtgactgt

SEQ ID NO: 839030 - DNA, 15 bp, Homo sapiens
tgggaagtgtgactg

SEQ ID NO: 839031 - DNA, 15 bp, Homo sapiens
gtgggaagtgtgact

SEQ ID NO: 839032 - DNA, 15 bp, Homo sapiens
agtgggaagtgtgac

SEQ ID NO: 839033 - DNA, 15 bp, Homo sapiens
aagtgggaagtgtga

SEQ ID NO: 839034 - DNA, 15 bp, Homo sapiens
taagtgggaagtgtg

SEQ ID NO: 839035 - DNA, 15 bp, Homo sapiens
ataagtgggaagtgt

SEQ ID NO: 839036 - DNA, 15 bp, Homo sapiens
cataagtgggaagtg

SEQ ID NO: 839037 - DNA, 15 bp, Homo sapiens
acataagtgggaagt

SEQ ID NO: 839038 - DNA, 15 bp, Homo sapiens
tacataagtgggaag

SEQ ID NO: 839039 - DNA, 15 bp, Homo sapiens
ttacataagtgggaa

SEQ ID NO: 839040 - DNA, 15 bp, Homo sapiens
attacataagtggga

SEQ ID NO: 839041 - DNA, 15 bp, Homo sapiens
aattacataagtggg

SEQ ID NO: 839042 - DNA, 15 bp, Homo sapiens
aaattacataagtgg

SEQ ID NO: 839043 - DNA, 15 bp, Homo sapiens
taaattacataagtg

SEQ ID NO: 839044 - DNA, 15 bp, Homo sapiens
ataaattacataagt

SEQ ID NO: 839045 - DNA, 15 bp, Homo sapiens
tataaattacataag

SEQ ID NO: 839046 - DNA, 15 bp, Homo sapiens
atataaattacataa

SEQ ID NO: 839047 - DNA, 15 bp, Homo sapiens
aatataaattacata

SEQ ID NO: 839048 - DNA, 15 bp, Homo sapiens
taatataaattacat

SEQ ID NO: 839049 - DNA, 15 bp, Homo sapiens
gtaatataaattaca

SEQ ID NO: 839050 - DNA, 15 bp, Homo sapiens
tgtaatataaattac

SEQ ID NO: 839051 - DNA, 15 bp, Homo sapiens
atgtaatataaatta

SEQ ID NO: 839052 - DNA, 15 bp, Homo sapiens
gatgtaatataaatt

SEQ ID NO: 839053 - DNA, 15 bp, Homo sapiens
ggatgtaatataaat

SEQ ID NO: 839054 - DNA, 15 bp, Homo sapiens
tggatgtaatataaa

SEQ ID NO: 839055 - DNA, 15 bp, Homo sapiens
ctggatgtaatataa

SEQ ID NO: 839056 - DNA, 15 bp, Homo sapiens
actggatgtaatata

SEQ ID NO: 839057 - DNA, 15 bp, Homo sapiens
gactggatgtaatat

SEQ ID NO: 839058 - DNA, 15 bp, Homo sapiens
tgactggatgtaata

SEQ ID NO: 839059 - DNA, 15 bp, Homo sapiens
gtgactggatgtaat

SEQ ID NO: 839060 - DNA, 15 bp, Homo sapiens
ggtgactggatgtaa

SEQ ID NO: 839061 - DNA, 15 bp, Homo sapiens
tggtgactggatgta

SEQ ID NO: 839062 - DNA, 15 bp, Homo sapiens
gtggtgactggatgt

SEQ ID NO: 839063 - DNA, 15 bp, Homo sapiens
tgtggtgactggatg

SEQ ID NO: 839064 - DNA, 15 bp, Homo sapiens
gtgtggtgactggat

SEQ ID NO: 839065 - DNA, 15 bp, Homo sapiens
ggtgtggtgactgga

SEQ ID NO: 839066 - DNA, 15 bp, Homo sapiens
tggtgtggtgactgg

SEQ ID NO: 839067 - DNA, 15 bp, Homo sapiens
ctggtgtggtgactg

SEQ ID NO: 839068 - DNA, 15 bp, Homo sapiens
gctggtgtggtgact

SEQ ID NO: 839069 - DNA, 15 bp, Homo sapiens
ggctggtgtggtgac

SEQ ID NO: 839070 - DNA, 15 bp, Homo sapiens
tggctggtgtggtga

SEQ ID NO: 839071 - DNA, 15 bp, Homo sapiens
ttggctggtgtggtg

SEQ ID NO: 839072 - DNA, 15 bp, Homo sapiens
tttggctggtgtggt

SEQ ID NO: 839073 - DNA, 15 bp, Homo sapiens
gtttggctggtgtgg

SEQ ID NO: 839074 - DNA, 15 bp, Homo sapiens
agtttggctggtgtg

SEQ ID NO: 839075 - DNA, 15 bp, Homo sapiens
cagtttggctggtgt

SEQ ID NO: 839076 - DNA, 15 bp, Homo sapiens
gcagtttggctggtg

SEQ ID NO: 839077 - DNA, 15 bp, Homo sapiens
agcagtttggctggt

SEQ ID NO: 839078 - DNA, 15 bp, Homo sapiens
aagcagtttggctgg

SEQ ID NO: 839079 - DNA, 15 bp, Homo sapiens
aaagcagtttggctg

SEQ ID NO: 839080 - DNA, 15 bp, Homo sapiens
taaagcagtttggct

SEQ ID NO: 839081 - DNA, 15 bp, Homo sapiens
ataaagcagtttggc

SEQ ID NO: 839082 - DNA, 15 bp, Homo sapiens
aataaagcagtttgg

SEQ ID NO: 839083 - DNA, 15 bp, Homo sapiens
caataaagcagtttg

SEQ ID NO: 839084 - DNA, 15 bp, Homo sapiens
acaataaagcagttt

SEQ ID NO: 839085 - DNA, 15 bp, Homo sapiens
aacaataaagcagtt

SEQ ID NO: 839086 - DNA, 15 bp, Homo sapiens
aaacaataaagcagt

SEQ ID NO: 839087 - DNA, 15 bp, Homo sapiens
aaaacaataaagcag

SEQ ID NO: 839088 - DNA, 15 bp, Homo sapiens
aaaaacaataaagca

SEQ ID NO: 839089 - DNA, 15 bp, Homo sapiens
aaaaaacaataaagc

SEQ ID NO: 839090 - DNA, 15 bp, Homo sapiens
caaaaaacaataaag

SEQ ID NO: 839091 - DNA, 15 bp, Homo sapiens
acaaaaaacaataaa

SEQ ID NO: 839092 - DNA, 15 bp, Homo sapiens
aacaaaaaacaataa

SEQ ID NO: 839093 - DNA, 15 bp, Homo sapiens
aaacaaaaaacaata

SEQ ID NO: 839094 - DNA, 15 bp, Homo sapiens
caaacaaaaaacaat

SEQ ID NO: 839095 - DNA, 15 bp, Homo sapiens
tcaaacaaaaaacaa

SEQ ID NO: 839096 - DNA, 15 bp, Homo sapiens
gtcaaacaaaaaaca

SEQ ID NO: 839097 - DNA, 15 bp, Homo sapiens
tgtcaaacaaaaaac

SEQ ID NO: 839098 - DNA, 15 bp, Homo sapiens
atgtcaaacaaaaaa

SEQ ID NO: 839099 - DNA, 15 bp, Homo sapiens
gatgtcaaacaaaaa

SEQ ID NO: 839100 - DNA, 15 bp, Homo sapiens
ggatgtcaaacaaaa

SEQ ID NO: 839101 - DNA, 15 bp, Homo sapiens
tggatgtcaaacaaa

SEQ ID NO: 839102 - DNA, 15 bp, Homo sapiens
ttggatgtcaaacaa

SEQ ID NO: 839103 - DNA, 15 bp, Homo sapiens
attggatgtcaaaca

SEQ ID NO: 839104 - DNA, 15 bp, Homo sapiens
cattggatgtcaaac

SEQ ID NO: 839105 - DNA, 15 bp, Homo sapiens
gcattggatgtcaaa

SEQ ID NO: 839106 - DNA, 15 bp, Homo sapiens
agcattggatgtcaa

SEQ ID NO: 839107 - DNA, 15 bp, Homo sapiens
tagcattggatgtca

SEQ ID NO: 839108 - DNA, 15 bp, Homo sapiens
ttagcattggatgtc

SEQ ID NO: 839109 - DNA, 15 bp, Homo sapiens
tttagcattggatgt

SEQ ID NO: 839110 - DNA, 15 bp, Homo sapiens
ctttagcattggatg

SEQ ID NO: 839111 - DNA, 15 bp, Homo sapiens
gctttagcattggat

SEQ ID NO: 839112 - DNA, 15 bp, Homo sapiens
tgctttagcattgga

SEQ ID NO: 839113 - DNA, 15 bp, Homo sapiens
atgctttagcattgg

SEQ ID NO: 839114 - DNA, 15 bp, Homo sapiens
tatgctttagcattg

SEQ ID NO: 839115 - DNA, 15 bp, Homo sapiens
ttatgctttagcatt

SEQ ID NO: 839116 - DNA, 15 bp, Homo sapiens
attatgctttagcat

SEQ ID NO: 839117 - DNA, 15 bp, Homo sapiens
cattatgctttagca

SEQ ID NO: 839118 - DNA, 15 bp, Homo sapiens
gcattatgctttagc

SEQ ID NO: 839119 - DNA, 15 bp, Homo sapiens
ggcattatgctttag

SEQ ID NO: 839120 - DNA, 15 bp, Homo sapiens
aggcattatgcttta

SEQ ID NO: 839121 - DNA, 15 bp, Homo sapiens
caggcattatgcttt

SEQ ID NO: 839122 - DNA, 15 bp, Homo sapiens
acaggcattatgctt

SEQ ID NO: 839123 - DNA, 15 bp, Homo sapiens
aacaggcattatgct

SEQ ID NO: 839124 - DNA, 15 bp, Homo sapiens
caacaggcattatgc

SEQ ID NO: 839125 - DNA, 15 bp, Homo sapiens
gcaacaggcattatg

SEQ ID NO: 839126 - DNA, 15 bp, Homo sapiens
tgcaacaggcattat

SEQ ID NO: 839127 - DNA, 15 bp, Homo sapiens
ctgcaacaggcatta

SEQ ID NO: 839128 - DNA, 15 bp, Homo sapiens
actgcaacaggcatt

SEQ ID NO: 839129 - DNA, 15 bp, Homo sapiens
cactgcaacaggcat

SEQ ID NO: 839130 - DNA, 15 bp, Homo sapiens
tcactgcaacaggca

SEQ ID NO: 839131 - DNA, 15 bp, Homo sapiens
ttcactgcaacaggc

SEQ ID NO: 839132 - DNA, 15 bp, Homo sapiens
tttcactgcaacagg

SEQ ID NO: 839133 - DNA, 15 bp, Homo sapiens
atttcactgcaacag

SEQ ID NO: 839134 - DNA, 15 bp, Homo sapiens
tatttcactgcaaca

SEQ ID NO: 839135 - DNA, 15 bp, Homo sapiens
atatttcactgcaac

SEQ ID NO: 839136 - DNA, 15 bp, Homo sapiens
tatatttcactgcaa

SEQ ID NO: 839137 - DNA, 15 bp, Homo sapiens
gtatatttcactgca

SEQ ID NO: 839138 - DNA, 15 bp, Homo sapiens
tgtatatttcactgc

SEQ ID NO: 839139 - DNA, 15 bp, Homo sapiens
atgtatatttcactg

SEQ ID NO: 839140 - DNA, 15 bp, Homo sapiens
catgtatatttcact

SEQ ID NO: 839141 - DNA, 15 bp, Homo sapiens
tcatgtatatttcac

SEQ ID NO: 839142 - DNA, 15 bp, Homo sapiens
ctcatgtatatttca

SEQ ID NO: 839143 - DNA, 15 bp, Homo sapiens
gctcatgtatatttc

SEQ ID NO: 839144 - DNA, 15 bp, Homo sapiens
tgctcatgtatattt

SEQ ID NO: 839145 - DNA, 15 bp, Homo sapiens
ttgctcatgtatatt

SEQ ID NO: 839146 - DNA, 15 bp, Homo sapiens
gttgctcatgtatat

SEQ ID NO: 839147 - DNA, 15 bp, Homo sapiens
ggttgctcatgtata

SEQ ID NO: 839148 - DNA, 15 bp, Homo sapiens
gggttgctcatgtat

SEQ ID NO: 839149 - DNA, 15 bp, Homo sapiens
agggttgctcatgta

SEQ ID NO: 839150 - DNA, 15 bp, Homo sapiens
cagggttgctcatgt

SEQ ID NO: 839151 - DNA, 15 bp, Homo sapiens
tcagggttgctcatg

SEQ ID NO: 839152 - DNA, 15 bp, Homo sapiens
ctcagggttgctcat

SEQ ID NO: 839153 - DNA, 15 bp, Homo sapiens
tctcagggttgctca

SEQ ID NO: 839154 - DNA, 15 bp, Homo sapiens
ttctcagggttgctc

SEQ ID NO: 839155 - DNA, 15 bp, Homo sapiens
gttctcagggttgct

SEQ ID NO: 839156 - DNA, 15 bp, Homo sapiens
agttctcagggttgc

SEQ ID NO: 839157 - DNA, 15 bp, Homo sapiens
gagttctcagggttg

SEQ ID NO: 839158 - DNA, 15 bp, Homo sapiens
tgagttctcagggtt

SEQ ID NO: 839159 - DNA, 15 bp, Homo sapiens
ttgagttctcagggt

SEQ ID NO: 839160 - DNA, 15 bp, Homo sapiens
attgagttctcaggg

SEQ ID NO: 839161 - DNA, 15 bp, Homo sapiens
tattgagttctcagg

SEQ ID NO: 839162 - DNA, 15 bp, Homo sapiens
atattgagttctcag

SEQ ID NO: 839163 - DNA, 15 bp, Homo sapiens
tatattgagttctca

SEQ ID NO: 839164 - DNA, 15 bp, Homo sapiens
ctatattgagttctc

SEQ ID NO: 839165 - DNA, 15 bp, Homo sapiens
gctatattgagttct

SEQ ID NO: 839166 - DNA, 15 bp, Homo sapiens
ggctatattgagttc

SEQ ID NO: 839167 - DNA, 15 bp, Homo sapiens
aggctatattgagtt

SEQ ID NO: 839168 - DNA, 15 bp, Homo sapiens
gaggctatattgagt

SEQ ID NO: 839169 - DNA, 15 bp, Homo sapiens
tgaggctatattgag

SEQ ID NO: 839170 - DNA, 15 bp, Homo sapiens
gtgaggctatattga

SEQ ID NO: 839171 - DNA, 15 bp, Homo sapiens
cgtgaggctatattg

SEQ ID NO: 839172 - DNA, 15 bp, Homo sapiens
acgtgaggctatatt

SEQ ID NO: 839173 - DNA, 15 bp, Homo sapiens
cacgtgaggctatat

SEQ ID NO: 839174 - DNA, 15 bp, Homo sapiens
acacgtgaggctata

SEQ ID NO: 839175 - DNA, 15 bp, Homo sapiens
aacacgtgaggctat

SEQ ID NO: 839176 - DNA, 15 bp, Homo sapiens
caacacgtgaggcta

SEQ ID NO: 839177 - DNA, 15 bp, Homo sapiens
gcaacacgtgaggct

SEQ ID NO: 839178 - DNA, 15 bp, Homo sapiens
ggcaacacgtgaggc

SEQ ID NO: 839179 - DNA, 15 bp, Homo sapiens
tggcaacacgtgagg

SEQ ID NO: 839180 - DNA, 15 bp, Homo sapiens
gtggcaacacgtgag

SEQ ID NO: 839181 - DNA, 15 bp, Homo sapiens
agtggcaacacgtga

SEQ ID NO: 839182 - DNA, 15 bp, Homo sapiens
cagtggcaacacgtg

SEQ ID NO: 839183 - DNA, 15 bp, Homo sapiens
tcagtggcaacacgt

SEQ ID NO: 839184 - DNA, 15 bp, Homo sapiens
ctcagtggcaacacg

SEQ ID NO: 839185 - DNA, 15 bp, Homo sapiens
actcagtggcaacac

SEQ ID NO: 839186 - DNA, 15 bp, Homo sapiens
aactcagtggcaaca

SEQ ID NO: 839187 - DNA, 15 bp, Homo sapiens
caactcagtggcaac

SEQ ID NO: 839188 - DNA, 15 bp, Homo sapiens
tcaactcagtggcaa

SEQ ID NO: 839189 - DNA, 15 bp, Homo sapiens
ctcaactcagtggca

SEQ ID NO: 839190 - DNA, 15 bp, Homo sapiens
actcaactcagtggc

SEQ ID NO: 839191 - DNA, 15 bp, Homo sapiens
aactcaactcagtgg

SEQ ID NO: 839192 - DNA, 15 bp, Homo sapiens
caactcaactcagtg

SEQ ID NO: 839193 - DNA, 15 bp, Homo sapiens
tcaactcaactcagt

SEQ ID NO: 839194 - DNA, 15 bp, Homo sapiens
ctcaactcaactcag

SEQ ID NO: 839195 - DNA, 15 bp, Homo sapiens
cctcaactcaactca

SEQ ID NO: 839196 - DNA, 15 bp, Homo sapiens
tcctcaactcaactc

SEQ ID NO: 839197 - DNA, 15 bp, Homo sapiens
ctcctcaactcaact

SEQ ID NO: 839198 - DNA, 15 bp, Homo sapiens
actcctcaactcaac

SEQ ID NO: 839199 - DNA, 15 bp, Homo sapiens
gactcctcaactcaa

SEQ ID NO: 839200 - DNA, 15 bp, Homo sapiens
tgactcctcaactca

SEQ ID NO: 839201 - DNA, 15 bp, Homo sapiens
ttgactcctcaactc

SEQ ID NO: 839202 - DNA, 15 bp, Homo sapiens
cttgactcctcaact

SEQ ID NO: 839203 - DNA, 15 bp, Homo sapiens
gcttgactcctcaac

SEQ ID NO: 839204 - DNA, 15 bp, Homo sapiens
agcttgactcctcaa

SEQ ID NO: 839205 - DNA, 15 bp, Homo sapiens
cagcttgactcctca

SEQ ID NO: 839206 - DNA, 15 bp, Homo sapiens
acagcttgactcctc

SEQ ID NO: 839207 - DNA, 15 bp, Homo sapiens
tacagcttgactcct

SEQ ID NO: 839208 - DNA, 15 bp, Homo sapiens
ctacagcttgactcc

SEQ ID NO: 839209 - DNA, 15 bp, Homo sapiens
gctacagcttgactc

SEQ ID NO: 839210 - DNA, 15 bp, Homo sapiens
tgctacagcttgact

SEQ ID NO: 839211 - DNA, 15 bp, Homo sapiens
ttgctacagcttgac

SEQ ID NO: 839212 - DNA, 15 bp, Homo sapiens
tttgctacagcttga

SEQ ID NO: 839213 - DNA, 15 bp, Homo sapiens
ttttgctacagcttg

SEQ ID NO: 839214 - DNA, 15 bp, Homo sapiens
tttttgctacagctt

SEQ ID NO: 839215 - DNA, 15 bp, Homo sapiens
ctttttgctacagct

SEQ ID NO: 839216 - DNA, 15 bp, Homo sapiens
cctttttgctacagc

SEQ ID NO: 839217 - DNA, 15 bp, Homo sapiens
acctttttgctacag

SEQ ID NO: 839218 - DNA, 15 bp, Homo sapiens
aacctttttgctaca

SEQ ID NO: 839219 - DNA, 15 bp, Homo sapiens
aaacctttttgctac

SEQ ID NO: 839220 - DNA, 15 bp, Homo sapiens
caaacctttttgcta

SEQ ID NO: 839221 - DNA, 15 bp, Homo sapiens
acaaacctttttgct

SEQ ID NO: 839222 - DNA, 15 bp, Homo sapiens
gacaaacctttttgc

SEQ ID NO: 839223 - DNA, 15 bp, Homo sapiens
tgacaaacctttttg

SEQ ID NO: 839224 - DNA, 15 bp, Homo sapiens
gtgacaaaccttttt

SEQ ID NO: 839225 - DNA, 15 bp, Homo sapiens
ggtgacaaacctttt

SEQ ID NO: 839226 - DNA, 15 bp, Homo sapiens
cggtgacaaaccttt

SEQ ID NO: 839227 - DNA, 15 bp, Homo sapiens
ccggtgacaaacctt

SEQ ID NO: 839228 - DNA, 15 bp, Homo sapiens
cccggtgacaaacct

SEQ ID NO: 839229 - DNA, 15 bp, Homo sapiens
acccggtgacaaacc

SEQ ID NO: 839230 - DNA, 15 bp, Homo sapiens
cacccggtgacaaac

SEQ ID NO: 839231 - DNA, 15 bp, Homo sapiens
tcacccggtgacaaa

SEQ ID NO: 839232 - DNA, 15 bp, Homo sapiens
ctcacccggtgacaa

SEQ ID NO: 839233 - DNA, 15 bp, Homo sapiens
actcacccggtgaca

SEQ ID NO: 839234 - DNA, 15 bp, Homo sapiens
tactcacccggtgac

SEQ ID NO: 839235 - DNA, 15 bp, Homo sapiens
ttactcacccggtga

SEQ ID NO: 839236 - DNA, 15 bp, Homo sapiens
attactcacccggtg

SEQ ID NO: 839237 - DNA, 15 bp, Homo sapiens
cattactcacccggt

SEQ ID NO: 839238 - DNA, 15 bp, Homo sapiens
ccattactcacccgg

SEQ ID NO: 839239 - DNA, 15 bp, Homo sapiens
accattactcacccg

SEQ ID NO: 839240 - DNA, 15 bp, Homo sapiens
caccattactcaccc

SEQ ID NO: 839241 - DNA, 15 bp, Homo sapiens
gcaccattactcacc

SEQ ID NO: 839242 - DNA, 15 bp, Homo sapiens
agcaccattactcac

SEQ ID NO: 839243 - DNA, 15 bp, Homo sapiens
gagcaccattactca

SEQ ID NO: 839244 - DNA, 15 bp, Homo sapiens
agagcaccattactc

SEQ ID NO: 839245 - DNA, 15 bp, Homo sapiens
aagagcaccattact

SEQ ID NO: 839246 - DNA, 15 bp, Homo sapiens
taagagcaccattac

SEQ ID NO: 839247 - DNA, 15 bp, Homo sapiens
ataagagcaccatta

SEQ ID NO: 839248 - DNA, 15 bp, Homo sapiens
aataagagcaccatt

SEQ ID NO: 839249 - DNA, 15 bp, Homo sapiens
aaataagagcaccat

SEQ ID NO: 839250 - DNA, 15 bp, Homo sapiens
aaaataagagcacca

SEQ ID NO: 839251 - DNA, 15 bp, Homo sapiens
aaaaataagagcacc

SEQ ID NO: 839252 - DNA, 15 bp, Homo sapiens
gaaaaataagagcac

SEQ ID NO: 839253 - DNA, 15 bp, Homo sapiens
agaaaaataagagca

SEQ ID NO: 839254 - DNA, 15 bp, Homo sapiens
gagaaaaataagagc

SEQ ID NO: 839255 - DNA, 15 bp, Homo sapiens
agagaaaaataagag

SEQ ID NO: 839256 - DNA, 15 bp, Homo sapiens
cagagaaaaataaga

SEQ ID NO: 839257 - DNA, 15 bp, Homo sapiens
ccagagaaaaataag

SEQ ID NO: 839258 - DNA, 15 bp, Homo sapiens
cccagagaaaaataa

SEQ ID NO: 839259 - DNA, 15 bp, Homo sapiens
acccagagaaaaata

SEQ ID NO: 839260 - DNA, 15 bp, Homo sapiens
gacccagagaaaaat

SEQ ID NO: 839261 - DNA, 15 bp, Homo sapiens
agacccagagaaaaa

SEQ ID NO: 839262 - DNA, 15 bp, Homo sapiens
gagacccagagaaaa

SEQ ID NO: 839263 - DNA, 15 bp, Homo sapiens
tgagacccagagaaa

SEQ ID NO: 839264 - DNA, 15 bp, Homo sapiens
ttgagacccagagaa

SEQ ID NO: 839265 - DNA, 15 bp, Homo sapiens
cttgagacccagaga

SEQ ID NO: 839266 - DNA, 15 bp, Homo sapiens
tcttgagacccagag

SEQ ID NO: 839267 - DNA, 15 bp, Homo sapiens
ttcttgagacccaga

SEQ ID NO: 839268 - DNA, 15 bp, Homo sapiens
cttcttgagacccag

SEQ ID NO: 839269 - DNA, 15 bp, Homo sapiens
acttcttgagaccca

SEQ ID NO: 839270 - DNA, 15 bp, Homo sapiens
cacttcttgagaccc

SEQ ID NO: 839271 - DNA, 15 bp, Homo sapiens
gcacttcttgagacc

SEQ ID NO: 839272 - DNA, 15 bp, Homo sapiens
agcacttcttgagac

SEQ ID NO: 839273 - DNA, 15 bp, Homo sapiens
gagcacttcttgaga

SEQ ID NO: 839274 - DNA, 15 bp, Homo sapiens
ctgatttagtgatct

SEQ ID NO: 839275 - DNA, 15 bp, Homo sapiens
tctgatttagtgatc

SEQ ID NO: 839276 - DNA, 15 bp, Homo sapiens
atctgatttagtgat

SEQ ID NO: 839277 - DNA, 15 bp, Homo sapiens
catctgatttagtga

SEQ ID NO: 839278 - DNA, 15 bp, Homo sapiens
tcatctgatttagtg

SEQ ID NO: 839279 - DNA, 15 bp, Homo sapiens
atcatctgatttagt

SEQ ID NO: 839280 - DNA, 15 bp, Homo sapiens
gatcatctgatttag

SEQ ID NO: 839281 - DNA, 15 bp, Homo sapiens
agatcatctgattta

SEQ ID NO: 839282 - DNA, 15 bp, Homo sapiens
gagatcatctgattt

SEQ ID NO: 839283 - DNA, 15 bp, Homo sapiens
agagatcatctgatt

SEQ ID NO: 839284 - DNA, 15 bp, Homo sapiens
tagagatcatctgat

SEQ ID NO: 839285 - DNA, 15 bp, Homo sapiens
ctagagatcatctga

SEQ ID NO: 839286 - DNA, 15 bp, Homo sapiens
gctagagatcatctg

SEQ ID NO: 839287 - DNA, 15 bp, Homo sapiens
tgctagagatcatct

SEQ ID NO: 839288 - DNA, 15 bp, Homo sapiens
ttgctagagatcatc

SEQ ID NO: 839289 - DNA, 15 bp, Homo sapiens
attgctagagatcat

SEQ ID NO: 839290 - DNA, 15 bp, Homo sapiens
aattgctagagatca

SEQ ID NO: 839291 - DNA, 15 bp, Homo sapiens
aaattgctagagatc

SEQ ID NO: 839292 - DNA, 15 bp, Homo sapiens
gaaattgctagagat

SEQ ID NO: 839293 - DNA, 15 bp, Homo sapiens
ggaaattgctagaga

SEQ ID NO: 839294 - DNA, 15 bp, Homo sapiens
aggaaattgctagag

SEQ ID NO: 839295 - DNA, 15 bp, Homo sapiens
caggaaattgctaga

SEQ ID NO: 839296 - DNA, 15 bp, Homo sapiens
acaggaaattgctag

SEQ ID NO: 839297 - DNA, 15 bp, Homo sapiens
aacaggaaattgcta

SEQ ID NO: 839298 - DNA, 15 bp, Homo sapiens
aaacaggaaattgct

SEQ ID NO: 839299 - DNA, 15 bp, Homo sapiens
caaacaggaaattgc

SEQ ID NO: 839300 - DNA, 15 bp, Homo sapiens
acaaacaggaaattg

SEQ ID NO: 839301 - DNA, 15 bp, Homo sapiens
aacaaacaggaaatt

SEQ ID NO: 839302 - DNA, 15 bp, Homo sapiens
aaacaaacaggaaat

SEQ ID NO: 839303 - DNA, 15 bp, Homo sapiens
caaacaaacaggaaa

SEQ ID NO: 839304 - DNA, 15 bp, Homo sapiens
acaaacaaacaggaa

SEQ ID NO: 839305 - DNA, 15 bp, Homo sapiens
aacaaacaaacagga

SEQ ID NO: 839306 - DNA, 15 bp, Homo sapiens
aaacaaacaaacagg

SEQ ID NO: 839307 - DNA, 15 bp, Homo sapiens
aaaacaaacaaacag

SEQ ID NO: 839308 - DNA, 15 bp, Homo sapiens
aaaaaacaaacaaac

SEQ ID NO: 839309 - DNA, 15 bp, Homo sapiens
caaaaaacaaacaaa

SEQ ID NO: 839310 - DNA, 15 bp, Homo sapiens
gcaaaaaacaaacaa

SEQ ID NO: 839311 - DNA, 15 bp, Homo sapiens
ggcaaaaaacaaaca

SEQ ID NO: 839312 - DNA, 15 bp, Homo sapiens
gggcaaaaaacaaac

SEQ ID NO: 839313 - DNA, 15 bp, Homo sapiens
tgggcaaaaaacaaa

SEQ ID NO: 839314 - DNA, 15 bp, Homo sapiens
atgggcaaaaaacaa

SEQ ID NO: 839315 - DNA, 15 bp, Homo sapiens
tatgggcaaaaaaca

SEQ ID NO: 839316 - DNA, 15 bp, Homo sapiens
ctatgggcaaaaaac

SEQ ID NO: 839317 - DNA, 15 bp, Homo sapiens
actatgggcaaaaaa

SEQ ID NO: 839318 - DNA, 15 bp, Homo sapiens
cactatgggcaaaaa

SEQ ID NO: 839319 - DNA, 15 bp, Homo sapiens
gcactatgggcaaaa

SEQ ID NO: 839320 - DNA, 15 bp, Homo sapiens
agcactatgggcaaa

SEQ ID NO: 839321 - DNA, 15 bp, Homo sapiens
aagcactatgggcaa

SEQ ID NO: 839322 - DNA, 15 bp, Homo sapiens
taagcactatgggca

SEQ ID NO: 839323 - DNA, 15 bp, Homo sapiens
ataagcactatgggc

SEQ ID NO: 839324 - DNA, 15 bp, Homo sapiens
gataagcactatggg

SEQ ID NO: 839325 - DNA, 15 bp, Homo sapiens
agataagcactatgg

SEQ ID NO: 839326 - DNA, 15 bp, Homo sapiens
gagataagcactatg

SEQ ID NO: 839327 - DNA, 15 bp, Homo sapiens
agagataagcactat

SEQ ID NO: 839328 - DNA, 15 bp, Homo sapiens
aagagataagcacta

SEQ ID NO: 839329 - DNA, 15 bp, Homo sapiens
aaagagataagcact

SEQ ID NO: 839330 - DNA, 15 bp, Homo sapiens
caaagagataagcac

SEQ ID NO: 839331 - DNA, 15 bp, Homo sapiens
tcaaagagataagca

SEQ ID NO: 839332 - DNA, 15 bp, Homo sapiens
ttcaaagagataagc

SEQ ID NO: 839333 - DNA, 15 bp, Homo sapiens
gttcaaagagataag

SEQ ID NO: 839334 - DNA, 15 bp, Homo sapiens
tgttcaaagagataa

SEQ ID NO: 839335 - DNA, 15 bp, Homo sapiens
ctgttcaaagagata

SEQ ID NO: 839336 - DNA, 15 bp, Homo sapiens
actgttcaaagagat

SEQ ID NO: 839337 - DNA, 15 bp, Homo sapiens
tactgttcaaagaga

SEQ ID NO: 839338 - DNA, 15 bp, Homo sapiens
ttactgttcaaagag

SEQ ID NO: 839339 - DNA, 15 bp, Homo sapiens
attactgttcaaaga

SEQ ID NO: 839340 - DNA, 15 bp, Homo sapiens
aattactgttcaaag

SEQ ID NO: 839341 - DNA, 15 bp, Homo sapiens
aaattactgttcaaa

SEQ ID NO: 839342 - DNA, 15 bp, Homo sapiens
aaaattactgttcaa

SEQ ID NO: 839343 - DNA, 15 bp, Homo sapiens
gaaaattactgttca

SEQ ID NO: 839344 - DNA, 15 bp, Homo sapiens
ggaaaattactgttc

SEQ ID NO: 839345 - DNA, 15 bp, Homo sapiens
tggaaaattactgtt

SEQ ID NO: 839346 - DNA, 15 bp, Homo sapiens
gtggaaaattactgt

SEQ ID NO: 839347 - DNA, 15 bp, Homo sapiens
agtggaaaattactg

SEQ ID NO: 839348 - DNA, 15 bp, Homo sapiens
aagtggaaaattact

SEQ ID NO: 839349 - DNA, 15 bp, Homo sapiens
taagtggaaaattac

SEQ ID NO: 839350 - DNA, 15 bp, Homo sapiens
gtaagtggaaaatta

SEQ ID NO: 839351 - DNA, 15 bp, Homo sapiens
agtaagtggaaaatt

SEQ ID NO: 839352 - DNA, 15 bp, Homo sapiens
tagtaagtggaaaat

SEQ ID NO: 839353 - DNA, 15 bp, Homo sapiens
atagtaagtggaaaa

SEQ ID NO: 839354 - DNA, 15 bp, Homo sapiens
aatagtaagtggaaa

SEQ ID NO: 839355 - DNA, 15 bp, Homo sapiens
aaatagtaagtggaa

SEQ ID NO: 839356 - DNA, 15 bp, Homo sapiens
aaaatagtaagtgga

SEQ ID NO: 839357 - DNA, 15 bp, Homo sapiens
aaaaatagtaagtgg

SEQ ID NO: 839358 - DNA, 15 bp, Homo sapiens
gaaaaatagtaagtg

SEQ ID NO: 839359 - DNA, 15 bp, Homo sapiens
agaaaaatagtaagt

SEQ ID NO: 839360 - DNA, 15 bp, Homo sapiens
gagaaaaatagtaag

SEQ ID NO: 839361 - DNA, 15 bp, Homo sapiens
ggagaaaaatagtaa

SEQ ID NO: 839362 - DNA, 15 bp, Homo sapiens
gggagaaaaatagta

SEQ ID NO: 839363 - DNA, 15 bp, Homo sapiens
ggggagaaaaatagt

SEQ ID NO: 839364 - DNA, 15 bp, Homo sapiens
aggggagaaaaatag

SEQ ID NO: 839365 - DNA, 15 bp, Homo sapiens
aaggggagaaaaata

SEQ ID NO: 839366 - DNA, 15 bp, Homo sapiens
aaaggggagaaaaat

SEQ ID NO: 839367 - DNA, 15 bp, Homo sapiens
aaaaggggagaaaaa

SEQ ID NO: 839368 - DNA, 15 bp, Homo sapiens
caaaaggggagaaaa

SEQ ID NO: 839369 - DNA, 15 bp, Homo sapiens
ccaaaaggggagaaa

SEQ ID NO: 839370 - DNA, 15 bp, Homo sapiens
tccaaaaggggagaa

SEQ ID NO: 839371 - DNA, 15 bp, Homo sapiens
gtccaaaaggggaga

SEQ ID NO: 839372 - DNA, 15 bp, Homo sapiens
ggtccaaaaggggag

SEQ ID NO: 839373 - DNA, 15 bp, Homo sapiens
tggtccaaaagggga

SEQ ID NO: 839374 - DNA, 15 bp, Homo sapiens
atggtccaaaagggg

SEQ ID NO: 839375 - DNA, 15 bp, Homo sapiens
tatggtccaaaaggg

SEQ ID NO: 839376 - DNA, 15 bp, Homo sapiens
ttatggtccaaaagg

SEQ ID NO: 839377 - DNA, 15 bp, Homo sapiens
attatggtccaaaag

SEQ ID NO: 839378 - DNA, 15 bp, Homo sapiens
aattatggtccaaaa

SEQ ID NO: 839379 - DNA, 15 bp, Homo sapiens
aaattatggtccaaa

SEQ ID NO: 839380 - DNA, 15 bp, Homo sapiens
gaaattatggtccaa

SEQ ID NO: 839381 - DNA, 15 bp, Homo sapiens
ggaaattatggtcca

SEQ ID NO: 839382 - DNA, 15 bp, Homo sapiens
aggaaattatggtcc

SEQ ID NO: 839383 - DNA, 15 bp, Homo sapiens
aaggaaattatggtc

SEQ ID NO: 839384 - DNA, 15 bp, Homo sapiens
aaaggaaattatggt

SEQ ID NO: 839385 - DNA, 15 bp, Homo sapiens
taaaggaaattatgg

SEQ ID NO: 839386 - DNA, 15 bp, Homo sapiens
ttaaaggaaattatg

SEQ ID NO: 839387 - DNA, 15 bp, Homo sapiens
cttaaaggaaattat

SEQ ID NO: 839388 - DNA, 15 bp, Homo sapiens
ccttaaaggaaatta

SEQ ID NO: 839389 - DNA, 15 bp, Homo sapiens
gccttaaaggaaatt

SEQ ID NO: 839390 - DNA, 15 bp, Homo sapiens
tgccttaaaggaaat

SEQ ID NO: 839391 - DNA, 15 bp, Homo sapiens
ctgccttaaaggaaa

SEQ ID NO: 839392 - DNA, 15 bp, Homo sapiens
tctgccttaaaggaa

SEQ ID NO: 839393 - DNA, 15 bp, Homo sapiens
ctctgccttaaagga

SEQ ID NO: 839394 - DNA, 15 bp, Homo sapiens
gctctgccttaaagg

SEQ ID NO: 839395 - DNA, 15 bp, Homo sapiens
ggctctgccttaaag

SEQ ID NO: 839396 - DNA, 15 bp, Homo sapiens
aggctctgccttaaa

SEQ ID NO: 839397 - DNA, 15 bp, Homo sapiens
gaggctctgccttaa

SEQ ID NO: 839398 - DNA, 15 bp, Homo sapiens
ggaggctctgcctta

SEQ ID NO: 839399 - DNA, 15 bp, Homo sapiens
aggaggctctgcctt

SEQ ID NO: 839400 - DNA, 15 bp, Homo sapiens
caggaggctctgcct

SEQ ID NO: 839401 - DNA, 15 bp, Homo sapiens
acaggaggctctgcc

SEQ ID NO: 839402 - DNA, 15 bp, Homo sapiens
aacaggaggctctgc

SEQ ID NO: 839403 - DNA, 15 bp, Homo sapiens
taacaggaggctctg

SEQ ID NO: 839404 - DNA, 15 bp, Homo sapiens
gtaacaggaggctct

SEQ ID NO: 839405 - DNA, 15 bp, Homo sapiens
agtaacaggaggctc

SEQ ID NO: 839406 - DNA, 15 bp, Homo sapiens
gagtaacaggaggct

SEQ ID NO: 839407 - DNA, 15 bp, Homo sapiens
tgagtaacaggaggc

SEQ ID NO: 839408 - DNA, 15 bp, Homo sapiens
atgagtaacaggagg

SEQ ID NO: 839409 - DNA, 15 bp, Homo sapiens
gatgagtaacaggag

SEQ ID NO: 839410 - DNA, 15 bp, Homo sapiens
agatgagtaacagga

SEQ ID NO: 839411 - DNA, 15 bp, Homo sapiens
aagatgagtaacagg

SEQ ID NO: 839412 - DNA, 15 bp, Homo sapiens
aaagatgagtaacag

SEQ ID NO: 839413 - DNA, 15 bp, Homo sapiens
caaagatgagtaaca

SEQ ID NO: 839414 - DNA, 15 bp, Homo sapiens
tcaaagatgagtaac

SEQ ID NO: 839415 - DNA, 15 bp, Homo sapiens
ttcaaagatgagtaa

SEQ ID NO: 839416 - DNA, 15 bp, Homo sapiens
attcaaagatgagta

SEQ ID NO: 839417 - DNA, 15 bp, Homo sapiens
gattcaaagatgagt

SEQ ID NO: 839418 - DNA, 15 bp, Homo sapiens
agattcaaagatgag

SEQ ID NO: 839419 - DNA, 15 bp, Homo sapiens
cagattcaaagatga

SEQ ID NO: 839420 - DNA, 15 bp, Homo sapiens
ccagattcaaagatg

SEQ ID NO: 839421 - DNA, 15 bp, Homo sapiens
cccagattcaaagat

SEQ ID NO: 839422 - DNA, 15 bp, Homo sapiens
ccccagattcaaaga

SEQ ID NO: 839423 - DNA, 15 bp, Homo sapiens
accccagattcaaag

SEQ ID NO: 839424 - DNA, 15 bp, Homo sapiens
gaccccagattcaaa

SEQ ID NO: 839425 - DNA, 15 bp, Homo sapiens
agaccccagattcaa

SEQ ID NO: 839426 - DNA, 15 bp, Homo sapiens
cagaccccagattca

SEQ ID NO: 839427 - DNA, 15 bp, Homo sapiens
acagaccccagattc

SEQ ID NO: 839428 - DNA, 15 bp, Homo sapiens
gacagaccccagatt

SEQ ID NO: 839429 - DNA, 15 bp, Homo sapiens
tgacagaccccagat

SEQ ID NO: 839430 - DNA, 15 bp, Homo sapiens
ctgacagaccccaga

SEQ ID NO: 839431 - DNA, 15 bp, Homo sapiens
tctgacagaccccag

SEQ ID NO: 839432 - DNA, 15 bp, Homo sapiens
ctctgacagacccca

SEQ ID NO: 839433 - DNA, 15 bp, Homo sapiens
actctgacagacccc

SEQ ID NO: 839434 - DNA, 15 bp, Homo sapiens
tactctgacagaccc

SEQ ID NO: 839435 - DNA, 15 bp, Homo sapiens
gtactctgacagacc

SEQ ID NO: 839436 - DNA, 15 bp, Homo sapiens
ggtactctgacagac

SEQ ID NO: 839437 - DNA, 15 bp, Homo sapiens
aggtactctgacaga

SEQ ID NO: 839438 - DNA, 15 bp, Homo sapiens
taggtactctgacag

SEQ ID NO: 839439 - DNA, 15 bp, Homo sapiens
ctaggtactctgaca

SEQ ID NO: 839440 - DNA, 15 bp, Homo sapiens
tctaggtactctgac

SEQ ID NO: 839441 - DNA, 15 bp, Homo sapiens
ttctaggtactctga

SEQ ID NO: 839442 - DNA, 15 bp, Homo sapiens
attctaggtactctg

SEQ ID NO: 839443 - DNA, 15 bp, Homo sapiens
aattctaggtactct

SEQ ID NO: 839444 - DNA, 15 bp, Homo sapiens
aaattctaggtactc

SEQ ID NO: 839445 - DNA, 15 bp, Homo sapiens
taaattctaggtact

SEQ ID NO: 839446 - DNA, 15 bp, Homo sapiens
ttaaattctaggtac

SEQ ID NO: 839447 - DNA, 15 bp, Homo sapiens
attaaattctaggta

SEQ ID NO: 839448 - DNA, 15 bp, Homo sapiens
tattaaattctaggt

SEQ ID NO: 839449 - DNA, 15 bp, Homo sapiens
ttattaaattctagg

SEQ ID NO: 839450 - DNA, 15 bp, Homo sapiens
tttattaaattctag

SEQ ID NO: 839451 - DNA, 15 bp, Homo sapiens
gtttattaaattcta

SEQ ID NO: 839452 - DNA, 15 bp, Homo sapiens
agtttattaaattct

SEQ ID NO: 839453 - DNA, 15 bp, Homo sapiens
gagtttattaaattc

SEQ ID NO: 839454 - DNA, 15 bp, Homo sapiens
agagtttattaaatt

SEQ ID NO: 839455 - DNA, 15 bp, Homo sapiens
gagagtttattaaat

SEQ ID NO: 839456 - DNA, 15 bp, Homo sapiens
tgagagtttattaaa

SEQ ID NO: 839457 - DNA, 15 bp, Homo sapiens
atgagagtttattaa

SEQ ID NO: 839458 - DNA, 15 bp, Homo sapiens
aatgagagtttatta

SEQ ID NO: 839459 - DNA, 15 bp, Homo sapiens
taatgagagtttatt

SEQ ID NO: 839460 - DNA, 15 bp, Homo sapiens
ttaatgagagtttat

SEQ ID NO: 839461 - DNA, 15 bp, Homo sapiens
cttaatgagagttta

SEQ ID NO: 839462 - DNA, 15 bp, Homo sapiens
tcttaatgagagttt

SEQ ID NO: 839463 - DNA, 15 bp, Homo sapiens
ctcttaatgagagtt

SEQ ID NO: 839464 - DNA, 15 bp, Homo sapiens
gctcttaatgagagt

SEQ ID NO: 839465 - DNA, 15 bp, Homo sapiens
ggctcttaatgagag

SEQ ID NO: 839466 - DNA, 15 bp, Homo sapiens
tggctcttaatgaga

SEQ ID NO: 839467 - DNA, 15 bp, Homo sapiens
ctggctcttaatgag

SEQ ID NO: 839468 - DNA, 15 bp, Homo sapiens
actggctcttaatga

SEQ ID NO: 839469 - DNA, 15 bp, Homo sapiens
aactggctcttaatg

SEQ ID NO: 839470 - DNA, 15 bp, Homo sapiens
caactggctcttaat

SEQ ID NO: 839471 - DNA, 15 bp, Homo sapiens
tcaactggctcttaa

SEQ ID NO: 839472 - DNA, 15 bp, Homo sapiens
ttcaactggctctta

SEQ ID NO: 839473 - DNA, 15 bp, Homo sapiens
tttcaactggctctt

SEQ ID NO: 839474 - DNA, 15 bp, Homo sapiens
ctttcaactggctct

SEQ ID NO: 839475 - DNA, 15 bp, Homo sapiens
tctttcaactggctc

SEQ ID NO: 839476 - DNA, 15 bp, Homo sapiens
ttctttcaactggct

SEQ ID NO: 839477 - DNA, 15 bp, Homo sapiens
attctttcaactggc

SEQ ID NO: 839478 - DNA, 15 bp, Homo sapiens
tattctttcaactgg

SEQ ID NO: 839479 - DNA, 15 bp, Homo sapiens
atattctttcaactg

SEQ ID NO: 839480 - DNA, 15 bp, Homo sapiens
tatattctttcaact

SEQ ID NO: 839481 - DNA, 15 bp, Homo sapiens
atatattctttcaac

SEQ ID NO: 839482 - DNA, 15 bp, Homo sapiens
catatattctttcaa

SEQ ID NO: 839483 - DNA, 15 bp, Homo sapiens
tcatatattctttca

SEQ ID NO: 839484 - DNA, 15 bp, Homo sapiens
gtcatatattctttc

SEQ ID NO: 839485 - DNA, 15 bp, Homo sapiens
agtcatatattcttt

SEQ ID NO: 839486 - DNA, 15 bp, Homo sapiens
tagtcatatattctt

SEQ ID NO: 839487 - DNA, 15 bp, Homo sapiens
ttagtcatatattct

SEQ ID NO: 839488 - DNA, 15 bp, Homo sapiens
cttagtcatatattc

SEQ ID NO: 839489 - DNA, 15 bp, Homo sapiens
gcttagtcatatatt

SEQ ID NO: 839490 - DNA, 15 bp, Homo sapiens
tgcttagtcatatat

SEQ ID NO: 839491 - DNA, 15 bp, Homo sapiens
ctgcttagtcatata

SEQ ID NO: 839492 - DNA, 15 bp, Homo sapiens
actgcttagtcatat

SEQ ID NO: 839493 - DNA, 15 bp, Homo sapiens
gactgcttagtcata

SEQ ID NO: 839494 - DNA, 15 bp, Homo sapiens
tgactgcttagtcat

SEQ ID NO: 839495 - DNA, 15 bp, Homo sapiens
atgactgcttagtca

SEQ ID NO: 839496 - DNA, 15 bp, Homo sapiens
aatgactgcttagtc

SEQ ID NO: 839497 - DNA, 15 bp, Homo sapiens
aaatgactgcttagt

SEQ ID NO: 839498 - DNA, 15 bp, Homo sapiens
taaatgactgcttag

SEQ ID NO: 839499 - DNA, 15 bp, Homo sapiens
gtaaatgactgctta

SEQ ID NO: 839500 - DNA, 15 bp, Homo sapiens
tgtaaatgactgctt

SEQ ID NO: 839501 - DNA, 15 bp, Homo sapiens
atgtaaatgactgct

SEQ ID NO: 839502 - DNA, 15 bp, Homo sapiens
gatgtaaatgactgc

SEQ ID NO: 839503 - DNA, 15 bp, Homo sapiens
ggatgtaaatgactg

SEQ ID NO: 839504 - DNA, 15 bp, Homo sapiens
tggatgtaaatgact

SEQ ID NO: 839505 - DNA, 15 bp, Homo sapiens
ttggatgtaaatgac

SEQ ID NO: 839506 - DNA, 15 bp, Homo sapiens
tttggatgtaaatga

SEQ ID NO: 839507 - DNA, 15 bp, Homo sapiens
ttttggatgtaaatg

SEQ ID NO: 839508 - DNA, 15 bp, Homo sapiens
cttttggatgtaaat

SEQ ID NO: 839509 - DNA, 15 bp, Homo sapiens
tcttttggatgtaaa

SEQ ID NO: 839510 - DNA, 15 bp, Homo sapiens
atcttttggatgtaa

SEQ ID NO: 839511 - DNA, 15 bp, Homo sapiens
gatcttttggatgta

SEQ ID NO: 839512 - DNA, 15 bp, Homo sapiens
ggatcttttggatgt

SEQ ID NO: 839513 - DNA, 15 bp, Homo sapiens
cggatcttttggatg

SEQ ID NO: 839514 - DNA, 15 bp, Homo sapiens
acggatcttttggat

SEQ ID NO: 839515 - DNA, 15 bp, Homo sapiens
tacggatcttttgga

SEQ ID NO: 839516 - DNA, 15 bp, Homo sapiens
ctacggatcttttgg

SEQ ID NO: 839517 - DNA, 15 bp, Homo sapiens
cctacggatcttttg

SEQ ID NO: 839518 - DNA, 15 bp, Homo sapiens
tcctacggatctttt

SEQ ID NO: 839519 - DNA, 15 bp, Homo sapiens
ctcctacggatcttt

SEQ ID NO: 839520 - DNA, 15 bp, Homo sapiens
tctcctacggatctt

SEQ ID NO: 839521 - DNA, 15 bp, Homo sapiens
ttctcctacggatct

SEQ ID NO: 839522 - DNA, 15 bp, Homo sapiens
attctcctacggatc

SEQ ID NO: 839523 - DNA, 15 bp, Homo sapiens
aattctcctacggat

SEQ ID NO: 839524 - DNA, 15 bp, Homo sapiens
gaattctcctacgga

SEQ ID NO: 839525 - DNA, 15 bp, Homo sapiens
agaattctcctacgg

SEQ ID NO: 839526 - DNA, 15 bp, Homo sapiens
aagaattctcctacg

SEQ ID NO: 839527 - DNA, 15 bp, Homo sapiens
taagaattctcctac

SEQ ID NO: 839528 - DNA, 15 bp, Homo sapiens
ataagaattctccta

SEQ ID NO: 839529 - DNA, 15 bp, Homo sapiens
gataagaattctcct

SEQ ID NO: 839530 - DNA, 15 bp, Homo sapiens
tgataagaattctcc

SEQ ID NO: 839531 - DNA, 15 bp, Homo sapiens
ctgataagaattctc

SEQ ID NO: 839532 - DNA, 15 bp, Homo sapiens
gctgataagaattct

SEQ ID NO: 839533 - DNA, 15 bp, Homo sapiens
tgctgataagaattc

SEQ ID NO: 839534 - DNA, 15 bp, Homo sapiens
gtgctgataagaatt

SEQ ID NO: 839535 - DNA, 15 bp, Homo sapiens
tgtgctgataagaat

SEQ ID NO: 839536 - DNA, 15 bp, Homo sapiens
atgtgctgataagaa

SEQ ID NO: 839537 - DNA, 15 bp, Homo sapiens
catgtgctgataaga

SEQ ID NO: 839538 - DNA, 15 bp, Homo sapiens
acatgtgctgataag

SEQ ID NO: 839539 - DNA, 15 bp, Homo sapiens
cacatgtgctgataa

SEQ ID NO: 839540 - DNA, 15 bp, Homo sapiens
tcacatgtgctgata

SEQ ID NO: 839541 - DNA, 15 bp, Homo sapiens
atcacatgtgctgat

SEQ ID NO: 839542 - DNA, 15 bp, Homo sapiens
aatcacatgtgctga

SEQ ID NO: 839543 - DNA, 15 bp, Homo sapiens
caatcacatgtgctg

SEQ ID NO: 839544 - DNA, 15 bp, Homo sapiens
ccaatcacatgtgct

SEQ ID NO: 839545 - DNA, 15 bp, Homo sapiens
accaatcacatgtgc

SEQ ID NO: 839546 - DNA, 15 bp, Homo sapiens
taccaatcacatgtg

SEQ ID NO: 839547 - DNA, 15 bp, Homo sapiens
ttaccaatcacatgt

SEQ ID NO: 839548 - DNA, 15 bp, Homo sapiens
gttaccaatcacatg

SEQ ID NO: 839549 - DNA, 15 bp, Homo sapiens
tgttaccaatcacat

SEQ ID NO: 839550 - DNA, 15 bp, Homo sapiens
ttgttaccaatcaca

SEQ ID NO: 839551 - DNA, 15 bp, Homo sapiens
attgttaccaatcac

SEQ ID NO: 839552 - DNA, 15 bp, Homo sapiens
tattgttaccaatca

SEQ ID NO: 839553 - DNA, 15 bp, Homo sapiens
ttattgttaccaatc

SEQ ID NO: 839554 - DNA, 15 bp, Homo sapiens
gttattgttaccaat

SEQ ID NO: 839555 - DNA, 15 bp, Homo sapiens
agttattgttaccaa

SEQ ID NO: 839556 - DNA, 15 bp, Homo sapiens
aagttattgttacca

SEQ ID NO: 839557 - DNA, 15 bp, Homo sapiens
aaagttattgttacc

SEQ ID NO: 839558 - DNA, 15 bp, Homo sapiens
caaagttattgttac

SEQ ID NO: 839559 - DNA, 15 bp, Homo sapiens
acaaagttattgtta

SEQ ID NO: 839560 - DNA, 15 bp, Homo sapiens
tacaaagttattgtt

SEQ ID NO: 839561 - DNA, 15 bp, Homo sapiens
gtacaaagttattgt

SEQ ID NO: 839562 - DNA, 15 bp, Homo sapiens
agtacaaagttattg

SEQ ID NO: 839563 - DNA, 15 bp, Homo sapiens
aagtacaaagttatt

SEQ ID NO: 839564 - DNA, 15 bp, Homo sapiens
aaagtacaaagttat

SEQ ID NO: 839565 - DNA, 15 bp, Homo sapiens
aaaagtacaaagtta

SEQ ID NO: 839566 - DNA, 15 bp, Homo sapiens
gaaaagtacaaagtt

SEQ ID NO: 839567 - DNA, 15 bp, Homo sapiens
tgaaaagtacaaagt

SEQ ID NO: 839568 - DNA, 15 bp, Homo sapiens
ttgaaaagtacaaag

SEQ ID NO: 839569 - DNA, 15 bp, Homo sapiens
tttgaaaagtacaaa

SEQ ID NO: 839570 - DNA, 15 bp, Homo sapiens
ttttgaaaagtacaa

SEQ ID NO: 839571 - DNA, 15 bp, Homo sapiens
tttttgaaaagtaca

SEQ ID NO: 839572 - DNA, 15 bp, Homo sapiens
gtttttgaaaagtac

SEQ ID NO: 839573 - DNA, 15 bp, Homo sapiens
tgtttttgaaaagta

SEQ ID NO: 839574 - DNA, 15 bp, Homo sapiens
ttgtttttgaaaagt

SEQ ID NO: 839575 - DNA, 15 bp, Homo sapiens
attgtttttgaaaag

SEQ ID NO: 839576 - DNA, 15 bp, Homo sapiens
aattgtttttgaaaa

SEQ ID NO: 839577 - DNA, 15 bp, Homo sapiens
taattgtttttgaaa

SEQ ID NO: 839578 - DNA, 15 bp, Homo sapiens
gtaattgtttttgaa

SEQ ID NO: 839579 - DNA, 15 bp, Homo sapiens
agtaattgtttttga

SEQ ID NO: 839580 - DNA, 15 bp, Homo sapiens
tagtaattgtttttg

SEQ ID NO: 839581 - DNA, 15 bp, Homo sapiens
ttagtaattgttttt

SEQ ID NO: 839582 - DNA, 15 bp, Homo sapiens
attagtaattgtttt

SEQ ID NO: 839583 - DNA, 15 bp, Homo sapiens
gattagtaattgttt

SEQ ID NO: 839584 - DNA, 15 bp, Homo sapiens
agattagtaattgtt

SEQ ID NO: 839585 - DNA, 15 bp, Homo sapiens
tagattagtaattgt

SEQ ID NO: 839586 - DNA, 15 bp, Homo sapiens
atagattagtaattg

SEQ ID NO: 839587 - DNA, 15 bp, Homo sapiens
gatagattagtaatt

SEQ ID NO: 839588 - DNA, 15 bp, Homo sapiens
agatagattagtaat

SEQ ID NO: 839589 - DNA, 15 bp, Homo sapiens
aagatagattagtaa

SEQ ID NO: 839590 - DNA, 15 bp, Homo sapiens
caagatagattagta

SEQ ID NO: 839591 - DNA, 15 bp, Homo sapiens
gcaagatagattagt

SEQ ID NO: 839592 - DNA, 15 bp, Homo sapiens
agcaagatagattag

SEQ ID NO: 839593 - DNA, 15 bp, Homo sapiens
aagcaagatagatta

SEQ ID NO: 839594 - DNA, 15 bp, Homo sapiens
aaagcaagatagatt

SEQ ID NO: 839595 - DNA, 15 bp, Homo sapiens
gaaagcaagatagat

SEQ ID NO: 839596 - DNA, 15 bp, Homo sapiens
ggaaagcaagataga

SEQ ID NO: 839597 - DNA, 15 bp, Homo sapiens
tggaaagcaagatag

SEQ ID NO: 839598 - DNA, 15 bp, Homo sapiens
atggaaagcaagata

SEQ ID NO: 839599 - DNA, 15 bp, Homo sapiens
aatggaaagcaagat

SEQ ID NO: 839600 - DNA, 15 bp, Homo sapiens
taatggaaagcaaga

SEQ ID NO: 839601 - DNA, 15 bp, Homo sapiens
ataatggaaagcaag

SEQ ID NO: 839602 - DNA, 15 bp, Homo sapiens
gataatggaaagcaa

SEQ ID NO: 839603 - DNA, 15 bp, Homo sapiens
agataatggaaagca

SEQ ID NO: 839604 - DNA, 15 bp, Homo sapiens
gagataatggaaagc

SEQ ID NO: 839605 - DNA, 15 bp, Homo sapiens
tgagataatggaaag

SEQ ID NO: 839606 - DNA, 15 bp, Homo sapiens
gtgagataatggaaa

SEQ ID NO: 839607 - DNA, 15 bp, Homo sapiens
ggtgagataatggaa

SEQ ID NO: 839608 - DNA, 15 bp, Homo sapiens
tggtgagataatgga

SEQ ID NO: 839609 - DNA, 15 bp, Homo sapiens
ttggtgagataatgg

SEQ ID NO: 839610 - DNA, 15 bp, Homo sapiens
tttggtgagataatg

SEQ ID NO: 839611 - DNA, 15 bp, Homo sapiens
ttttggtgagataat

SEQ ID NO: 839612 - DNA, 15 bp, Homo sapiens
gttttggtgagataa

SEQ ID NO: 839613 - DNA, 15 bp, Homo sapiens
ggttttggtgagata

SEQ ID NO: 839614 - DNA, 15 bp, Homo sapiens
aggttttggtgagat

SEQ ID NO: 839615 - DNA, 15 bp, Homo sapiens
taggttttggtgaga

SEQ ID NO: 839616 - DNA, 15 bp, Homo sapiens
ataggttttggtgag

SEQ ID NO: 839617 - DNA, 15 bp, Homo sapiens
aataggttttggtga

SEQ ID NO: 839618 - DNA, 15 bp, Homo sapiens
taataggttttggtg

SEQ ID NO: 839619 - DNA, 15 bp, Homo sapiens
ctaataggttttggt

SEQ ID NO: 839620 - DNA, 15 bp, Homo sapiens
gctaataggttttgg

SEQ ID NO: 839621 - DNA, 15 bp, Homo sapiens
tgctaataggttttg

SEQ ID NO: 839622 - DNA, 15 bp, Homo sapiens
atgctaataggtttt

SEQ ID NO: 839623 - DNA, 15 bp, Homo sapiens
catgctaataggttt

SEQ ID NO: 839624 - DNA, 15 bp, Homo sapiens
acatgctaataggtt

SEQ ID NO: 839625 - DNA, 15 bp, Homo sapiens
gacatgctaataggt

SEQ ID NO: 839626 - DNA, 15 bp, Homo sapiens
agacatgctaatagg

SEQ ID NO: 839627 - DNA, 15 bp, Homo sapiens
cagacatgctaatag

SEQ ID NO: 839628 - DNA, 15 bp, Homo sapiens
ccagacatgctaata

SEQ ID NO: 839629 - DNA, 15 bp, Homo sapiens
gccagacatgctaat

SEQ ID NO: 839630 - DNA, 15 bp, Homo sapiens
tgccagacatgctaa

SEQ ID NO: 839631 - DNA, 15 bp, Homo sapiens
ctgccagacatgcta

SEQ ID NO: 839632 - DNA, 15 bp, Homo sapiens
tctgccagacatgct

SEQ ID NO: 839633 - DNA, 15 bp, Homo sapiens
ttctgccagacatgc

SEQ ID NO: 839634 - DNA, 15 bp, Homo sapiens
tttctgccagacatg

SEQ ID NO: 839635 - DNA, 15 bp, Homo sapiens
ttttctgccagacat

SEQ ID NO: 839636 - DNA, 15 bp, Homo sapiens
attttctgccagaca

SEQ ID NO: 839637 - DNA, 15 bp, Homo sapiens
tattttctgccagac

SEQ ID NO: 839638 - DNA, 15 bp, Homo sapiens
ctattttctgccaga

SEQ ID NO: 839639 - DNA, 15 bp, Homo sapiens
tctattttctgccag

SEQ ID NO: 839640 - DNA, 15 bp, Homo sapiens
atctattttctgcca

SEQ ID NO: 839641 - DNA, 15 bp, Homo sapiens
tatctattttctgcc

SEQ ID NO: 839642 - DNA, 15 bp, Homo sapiens
gtatctattttctgc

SEQ ID NO: 839643 - DNA, 15 bp, Homo sapiens
agtatctattttctg

SEQ ID NO: 839644 - DNA, 15 bp, Homo sapiens
aagtatctattttct

SEQ ID NO: 839645 - DNA, 15 bp, Homo sapiens
taagtatctattttc

SEQ ID NO: 839646 - DNA, 15 bp, Homo sapiens
ttaagtatctatttt

SEQ ID NO: 839647 - DNA, 15 bp, Homo sapiens
attaagtatctattt

SEQ ID NO: 839648 - DNA, 15 bp, Homo sapiens
tattaagtatctatt

SEQ ID NO: 839649 - DNA, 15 bp, Homo sapiens
ttattaagtatctat

SEQ ID NO: 839650 - DNA, 15 bp, Homo sapiens
tttattaagtatcta

SEQ ID NO: 839651 - DNA, 15 bp, Homo sapiens
atttattaagtatct

SEQ ID NO: 839652 - DNA, 15 bp, Homo sapiens
aatttattaagtatc

SEQ ID NO: 839653 - DNA, 15 bp, Homo sapiens
aaatttattaagtat

SEQ ID NO: 839654 - DNA, 15 bp, Homo sapiens
gaaatttattaagta

SEQ ID NO: 839655 - DNA, 15 bp, Homo sapiens
agaaatttattaagt

SEQ ID NO: 839656 - DNA, 15 bp, Homo sapiens
aagaaatttattaag

SEQ ID NO: 839657 - DNA, 15 bp, Homo sapiens
taagaaatttattaa

SEQ ID NO: 839658 - DNA, 15 bp, Homo sapiens
ttaagaaatttatta

SEQ ID NO: 839659 - DNA, 15 bp, Homo sapiens
tttaagaaatttatt

SEQ ID NO: 839660 - DNA, 15 bp, Homo sapiens
atttaagaaatttat

SEQ ID NO: 839661 - DNA, 15 bp, Homo sapiens
catttaagaaattta

SEQ ID NO: 839662 - DNA, 15 bp, Homo sapiens
acatttaagaaattt

SEQ ID NO: 839663 - DNA, 15 bp, Homo sapiens
aacatttaagaaatt

SEQ ID NO: 839664 - DNA, 15 bp, Homo sapiens
aaacatttaagaaat

SEQ ID NO: 839665 - DNA, 15 bp, Homo sapiens
taaacatttaagaaa

SEQ ID NO: 839666 - DNA, 15 bp, Homo sapiens
gtaaacatttaagaa

SEQ ID NO: 839667 - DNA, 15 bp, Homo sapiens
agtaaacatttaaga

SEQ ID NO: 839668 - DNA, 15 bp, Homo sapiens
cagtaaacatttaag

SEQ ID NO: 839669 - DNA, 15 bp, Homo sapiens
tcagtaaacatttaa

SEQ ID NO: 839670 - DNA, 15 bp, Homo sapiens
gtcagtaaacattta

SEQ ID NO: 839671 - DNA, 15 bp, Homo sapiens
agtcagtaaacattt

SEQ ID NO: 839672 - DNA, 15 bp, Homo sapiens
aagtcagtaaacatt

SEQ ID NO: 839673 - DNA, 15 bp, Homo sapiens
gaagtcagtaaacat

SEQ ID NO: 839674 - DNA, 15 bp, Homo sapiens
tgaagtcagtaaaca

SEQ ID NO: 839675 - DNA, 15 bp, Homo sapiens
ttgaagtcagtaaac

SEQ ID NO: 839676 - DNA, 15 bp, Homo sapiens
attgaagtcagtaaa

SEQ ID NO: 839677 - DNA, 15 bp, Homo sapiens
aattgaagtcagtaa

SEQ ID NO: 839678 - DNA, 15 bp, Homo sapiens
aaattgaagtcagta

SEQ ID NO: 839679 - DNA, 15 bp, Homo sapiens
aaaattgaagtcagt

SEQ ID NO: 839680 - DNA, 15 bp, Homo sapiens
taaaattgaagtcag

SEQ ID NO: 839681 - DNA, 15 bp, Homo sapiens
ttaaaattgaagtca

SEQ ID NO: 839682 - DNA, 15 bp, Homo sapiens
cttaaaattgaagtc

SEQ ID NO: 839683 - DNA, 15 bp, Homo sapiens
acttaaaattgaagt

SEQ ID NO: 839684 - DNA, 15 bp, Homo sapiens
aacttaaaattgaag

SEQ ID NO: 839685 - DNA, 15 bp, Homo sapiens
aaacttaaaattgaa

SEQ ID NO: 839686 - DNA, 15 bp, Homo sapiens
aaaacttaaaattga

SEQ ID NO: 839687 - DNA, 15 bp, Homo sapiens
taaaacttaaaattg

SEQ ID NO: 839688 - DNA, 15 bp, Homo sapiens
ataaaacttaaaatt

SEQ ID NO: 839689 - DNA, 15 bp, Homo sapiens
aataaaacttaaaat

SEQ ID NO: 839690 - DNA, 15 bp, Homo sapiens
taataaaacttaaaa

SEQ ID NO: 839691 - DNA, 15 bp, Homo sapiens
ttaataaaacttaaa

SEQ ID NO: 839692 - DNA, 15 bp, Homo sapiens
gttaataaaacttaa

SEQ ID NO: 839693 - DNA, 15 bp, Homo sapiens
agttaataaaactta

SEQ ID NO: 839694 - DNA, 15 bp, Homo sapiens
tagttaataaaactt

SEQ ID NO: 839695 - DNA, 15 bp, Homo sapiens
atagttaataaaact

SEQ ID NO: 839696 - DNA, 15 bp, Homo sapiens
catagttaataaaac

SEQ ID NO: 839697 - DNA, 15 bp, Homo sapiens
acatagttaataaaa

SEQ ID NO: 839698 - DNA, 15 bp, Homo sapiens
aacatagttaataaa

SEQ ID NO: 839699 - DNA, 15 bp, Homo sapiens
caacatagttaataa

SEQ ID NO: 839700 - DNA, 15 bp, Homo sapiens
tcaacatagttaata

SEQ ID NO: 839701 - DNA, 15 bp, Homo sapiens
gtcaacatagttaat

SEQ ID NO: 839702 - DNA, 15 bp, Homo sapiens
agtcaacatagttaa

SEQ ID NO: 839703 - DNA, 15 bp, Homo sapiens
aagtcaacatagtta

SEQ ID NO: 839704 - DNA, 15 bp, Homo sapiens
aaagtcaacatagtt

SEQ ID NO: 839705 - DNA, 15 bp, Homo sapiens
aaaagtcaacatagt

SEQ ID NO: 839706 - DNA, 15 bp, Homo sapiens
gaaaagtcaacatag

SEQ ID NO: 839707 - DNA, 15 bp, Homo sapiens
agaaaagtcaacata

SEQ ID NO: 839708 - DNA, 15 bp, Homo sapiens
gagaaaagtcaacat

SEQ ID NO: 839709 - DNA, 15 bp, Homo sapiens
agagaaaagtcaaca

SEQ ID NO: 839710 - DNA, 15 bp, Homo sapiens
tagagaaaagtcaac

SEQ ID NO: 839711 - DNA, 15 bp, Homo sapiens
ttagagaaaagtcaa

SEQ ID NO: 839712 - DNA, 15 bp, Homo sapiens
attagagaaaagtca

SEQ ID NO: 839713 - DNA, 15 bp, Homo sapiens
cattagagaaaagtc

SEQ ID NO: 839714 - DNA, 15 bp, Homo sapiens
tcattagagaaaagt

SEQ ID NO: 839715 - DNA, 15 bp, Homo sapiens
ttcattagagaaaag

SEQ ID NO: 839716 - DNA, 15 bp, Homo sapiens
cttcattagagaaaa

SEQ ID NO: 839717 - DNA, 15 bp, Homo sapiens
tcttcattagagaaa

SEQ ID NO: 839718 - DNA, 15 bp, Homo sapiens
atcttcattagagaa

SEQ ID NO: 839719 - DNA, 15 bp, Homo sapiens
catcttcattagaga

SEQ ID NO: 839720 - DNA, 15 bp, Homo sapiens
tcatcttcattagag

SEQ ID NO: 839721 - DNA, 15 bp, Homo sapiens
atcatcttcattaga

SEQ ID NO: 839722 - DNA, 15 bp, Homo sapiens
aatcatcttcattag

SEQ ID NO: 839723 - DNA, 15 bp, Homo sapiens
gaatcatcttcatta

SEQ ID NO: 839724 - DNA, 15 bp, Homo sapiens
agaatcatcttcatt

SEQ ID NO: 839725 - DNA, 15 bp, Homo sapiens
tagaatcatcttcat

SEQ ID NO: 839726 - DNA, 15 bp, Homo sapiens
ttagaatcatcttca

SEQ ID NO: 839727 - DNA, 15 bp, Homo sapiens
tttagaatcatcttc

SEQ ID NO: 839728 - DNA, 15 bp, Homo sapiens
ttttagaatcatctt

SEQ ID NO: 839729 - DNA, 15 bp, Homo sapiens
tttttagaatcatct

SEQ ID NO: 839730 - DNA, 15 bp, Homo sapiens
ctttttagaatcatc

SEQ ID NO: 839731 - DNA, 15 bp, Homo sapiens
gctttttagaatcat

SEQ ID NO: 839732 - DNA, 15 bp, Homo sapiens
agctttttagaatca

SEQ ID NO: 839733 - DNA, 15 bp, Homo sapiens
aagctttttagaatc

SEQ ID NO: 839734 - DNA, 15 bp, Homo sapiens
aaagctttttagaat

SEQ ID NO: 839735 - DNA, 15 bp, Homo sapiens
aaaagctttttagaa

SEQ ID NO: 839736 - DNA, 15 bp, Homo sapiens
aaaaagctttttaga

SEQ ID NO: 839737 - DNA, 15 bp, Homo sapiens
taaaaagctttttag

SEQ ID NO: 839738 - DNA, 15 bp, Homo sapiens
gtaaaaagcttttta

SEQ ID NO: 839739 - DNA, 15 bp, Homo sapiens
agtaaaaagcttttt

SEQ ID NO: 839740 - DNA, 15 bp, Homo sapiens
tagtaaaaagctttt

SEQ ID NO: 839741 - DNA, 15 bp, Homo sapiens
atagtaaaaagcttt

SEQ ID NO: 839742 - DNA, 15 bp, Homo sapiens
tatagtaaaaagctt

SEQ ID NO: 839743 - DNA, 15 bp, Homo sapiens
gtatagtaaaaagct

SEQ ID NO: 839744 - DNA, 15 bp, Homo sapiens
agtatagtaaaaagc

SEQ ID NO: 839745 - DNA, 15 bp, Homo sapiens
aagtatagtaaaaag

SEQ ID NO: 839746 - DNA, 15 bp, Homo sapiens
gaagtatagtaaaaa

SEQ ID NO: 839747 - DNA, 15 bp, Homo sapiens
tgaagtatagtaaaa

SEQ ID NO: 839748 - DNA, 15 bp, Homo sapiens
gtgaagtatagtaaa

SEQ ID NO: 839749 - DNA, 15 bp, Homo sapiens
tgtgaagtatagtaa

SEQ ID NO: 839750 - DNA, 15 bp, Homo sapiens
ctgtgaagtatagta

SEQ ID NO: 839751 - DNA, 15 bp, Homo sapiens
actgtgaagtatagt

SEQ ID NO: 839752 - DNA, 15 bp, Homo sapiens
cactgtgaagtatag

SEQ ID NO: 839753 - DNA, 15 bp, Homo sapiens
tcactgtgaagtata

SEQ ID NO: 839754 - DNA, 15 bp, Homo sapiens
ttcactgtgaagtat

SEQ ID NO: 839755 - DNA, 15 bp, Homo sapiens
attcactgtgaagta

SEQ ID NO: 839756 - DNA, 15 bp, Homo sapiens
tattcactgtgaagt

SEQ ID NO: 839757 - DNA, 15 bp, Homo sapiens
ttattcactgtgaag

SEQ ID NO: 839758 - DNA, 15 bp, Homo sapiens
tttattcactgtgaa

SEQ ID NO: 839759 - DNA, 15 bp, Homo sapiens
ttttattcactgtga

SEQ ID NO: 839760 - DNA, 15 bp, Homo sapiens
gttttattcactgtg

SEQ ID NO: 839761 - DNA, 15 bp, Homo sapiens
tgttttattcactgt

SEQ ID NO: 839762 - DNA, 15 bp, Homo sapiens
ctgttttattcactg

SEQ ID NO: 839763 - DNA, 15 bp, Homo sapiens
actgttttattcact

SEQ ID NO: 839764 - DNA, 15 bp, Homo sapiens
cactgttttattcac

SEQ ID NO: 839765 - DNA, 15 bp, Homo sapiens
tcactgttttattca

SEQ ID NO: 839766 - DNA, 15 bp, Homo sapiens
ctcactgttttattc

SEQ ID NO: 839767 - DNA, 15 bp, Homo sapiens
tctcactgttttatt

SEQ ID NO: 839768 - DNA, 15 bp, Homo sapiens
atctcactgttttat

SEQ ID NO: 839769 - DNA, 15 bp, Homo sapiens
tatctcactgtttta

SEQ ID NO: 839770 - DNA, 15 bp, Homo sapiens
ctatctcactgtttt

SEQ ID NO: 839771 - DNA, 15 bp, Homo sapiens
cctatctcactgttt

SEQ ID NO: 839772 - DNA, 15 bp, Homo sapiens
tcctatctcactgtt

SEQ ID NO: 839773 - DNA, 15 bp, Homo sapiens
ttcctatctcactgt

SEQ ID NO: 839774 - DNA, 15 bp, Homo sapiens
attcctatctcactg

SEQ ID NO: 839775 - DNA, 15 bp, Homo sapiens
tattcctatctcact

SEQ ID NO: 839776 - DNA, 15 bp, Homo sapiens
atattcctatctcac

SEQ ID NO: 839777 - DNA, 15 bp, Homo sapiens
aatattcctatctca

SEQ ID NO: 839778 - DNA, 15 bp, Homo sapiens
caatattcctatctc

SEQ ID NO: 839779 - DNA, 15 bp, Homo sapiens
gcaatattcctatct

SEQ ID NO: 839780 - DNA, 15 bp, Homo sapiens
tgcaatattcctatc

SEQ ID NO: 839781 - DNA, 15 bp, Homo sapiens
ttgcaatattcctat

SEQ ID NO: 839782 - DNA, 15 bp, Homo sapiens
tttgcaatattccta

SEQ ID NO: 839783 - DNA, 15 bp, Homo sapiens
ttttgcaatattcct

SEQ ID NO: 839784 - DNA, 15 bp, Homo sapiens
attttgcaatattcc

SEQ ID NO: 839785 - DNA, 15 bp, Homo sapiens
cattttgcaatattc

SEQ ID NO: 839786 - DNA, 15 bp, Homo sapiens
acattttgcaatatt

SEQ ID NO: 839787 - DNA, 15 bp, Homo sapiens
gacattttgcaatat

SEQ ID NO: 839788 - DNA, 15 bp, Homo sapiens
ggacattttgcaata

SEQ ID NO: 839789 - DNA, 15 bp, Homo sapiens
gggacattttgcaat

SEQ ID NO: 839790 - DNA, 15 bp, Homo sapiens
ggggacattttgcaa

SEQ ID NO: 839791 - DNA, 15 bp, Homo sapiens
aggggacattttgca

SEQ ID NO: 839792 - DNA, 15 bp, Homo sapiens
caggggacattttgc

SEQ ID NO: 839793 - DNA, 15 bp, Homo sapiens
acaggggacattttg

SEQ ID NO: 839794 - DNA, 15 bp, Homo sapiens
cacaggggacatttt

SEQ ID NO: 839795 - DNA, 15 bp, Homo sapiens
acacaggggacattt

SEQ ID NO: 839796 - DNA, 15 bp, Homo sapiens
aacacaggggacatt

SEQ ID NO: 839797 - DNA, 15 bp, Homo sapiens
caacacaggggacat

SEQ ID NO: 839798 - DNA, 15 bp, Homo sapiens
ccaacacaggggaca

SEQ ID NO: 839799 - DNA, 15 bp, Homo sapiens
accaacacaggggac

SEQ ID NO: 839800 - DNA, 15 bp, Homo sapiens
gaccaacacagggga

SEQ ID NO: 839801 - DNA, 15 bp, Homo sapiens
tgaccaacacagggg

SEQ ID NO: 839802 - DNA, 15 bp, Homo sapiens
ctgaccaacacaggg

SEQ ID NO: 839803 - DNA, 15 bp, Homo sapiens
actgaccaacacagg

SEQ ID NO: 839804 - DNA, 15 bp, Homo sapiens
gactgaccaacacag

SEQ ID NO: 839805 - DNA, 15 bp, Homo sapiens
agactgaccaacaca

SEQ ID NO: 839806 - DNA, 15 bp, Homo sapiens
aagactgaccaacac

SEQ ID NO: 839807 - DNA, 15 bp, Homo sapiens
taagactgaccaaca

SEQ ID NO: 839808 - DNA, 15 bp, Homo sapiens
ctaagactgaccaac

SEQ ID NO: 839809 - DNA, 15 bp, Homo sapiens
actaagactgaccaa

SEQ ID NO: 839810 - DNA, 15 bp, Homo sapiens
cactaagactgacca

SEQ ID NO: 839811 - DNA, 15 bp, Homo sapiens
acactaagactgacc

SEQ ID NO: 839812 - DNA, 15 bp, Homo sapiens
gacactaagactgac

SEQ ID NO: 839813 - DNA, 15 bp, Homo sapiens
tgacactaagactga

SEQ ID NO: 839814 - DNA, 15 bp, Homo sapiens
atgacactaagactg

SEQ ID NO: 839815 - DNA, 15 bp, Homo sapiens
aatgacactaagact

SEQ ID NO: 839816 - DNA, 15 bp, Homo sapiens
gaatgacactaagac

SEQ ID NO: 839817 - DNA, 15 bp, Homo sapiens
tgaatgacactaaga

SEQ ID NO: 839818 - DNA, 15 bp, Homo sapiens
atgaatgacactaag

SEQ ID NO: 839819 - DNA, 15 bp, Homo sapiens
aatgaatgacactaa

SEQ ID NO: 839820 - DNA, 15 bp, Homo sapiens
aaatgaatgacacta

SEQ ID NO: 839821 - DNA, 15 bp, Homo sapiens
aaaatgaatgacact

SEQ ID NO: 839822 - DNA, 15 bp, Homo sapiens
taaaatgaatgacac

SEQ ID NO: 839823 - DNA, 15 bp, Homo sapiens
ttaaaatgaatgaca

SEQ ID NO: 839824 - DNA, 15 bp, Homo sapiens
tttaaaatgaatgac

SEQ ID NO: 839825 - DNA, 15 bp, Homo sapiens
ttttaaaatgaatga

SEQ ID NO: 839826 - DNA, 15 bp, Homo sapiens
tttttaaaatgaatg

SEQ ID NO: 839827 - DNA, 15 bp, Homo sapiens
atttttaaaatgaat

SEQ ID NO: 839828 - DNA, 15 bp, Homo sapiens
aatttttaaaatgaa

SEQ ID NO: 839829 - DNA, 15 bp, Homo sapiens
gaatttttaaaatga

SEQ ID NO: 839830 - DNA, 15 bp, Homo sapiens
agaatttttaaaatg

SEQ ID NO: 839831 - DNA, 15 bp, Homo sapiens
cagaatttttaaaat

SEQ ID NO: 839832 - DNA, 15 bp, Homo sapiens
acagaatttttaaaa

SEQ ID NO: 839833 - DNA, 15 bp, Homo sapiens
aacagaatttttaaa

SEQ ID NO: 839834 - DNA, 15 bp, Homo sapiens
gaacagaatttttaa

SEQ ID NO: 839835 - DNA, 15 bp, Homo sapiens
agaacagaattttta

SEQ ID NO: 839836 - DNA, 15 bp, Homo sapiens
gagaacagaattttt

SEQ ID NO: 839837 - DNA, 15 bp, Homo sapiens
agagaacagaatttt

SEQ ID NO: 839838 - DNA, 15 bp, Homo sapiens
tagagaacagaattt

SEQ ID NO: 839839 - DNA, 15 bp, Homo sapiens
ttagagaacagaatt

SEQ ID NO: 839840 - DNA, 15 bp, Homo sapiens
tttagagaacagaat

SEQ ID NO: 839841 - DNA, 15 bp, Homo sapiens
atttagagaacagaa

SEQ ID NO: 839842 - DNA, 15 bp, Homo sapiens
tatttagagaacaga

SEQ ID NO: 839843 - DNA, 15 bp, Homo sapiens
atatttagagaacag

SEQ ID NO: 839844 - DNA, 15 bp, Homo sapiens
aatatttagagaaca

SEQ ID NO: 839845 - DNA, 15 bp, Homo sapiens
caatatttagagaac

SEQ ID NO: 839846 - DNA, 15 bp, Homo sapiens
tcaatatttagagaa

SEQ ID NO: 839847 - DNA, 15 bp, Homo sapiens
gtcaatatttagaga

SEQ ID NO: 839848 - DNA, 15 bp, Homo sapiens
tgtcaatatttagag

SEQ ID NO: 839849 - DNA, 15 bp, Homo sapiens
ctgtcaatatttaga

SEQ ID NO: 839850 - DNA, 15 bp, Homo sapiens
actgtcaatatttag

SEQ ID NO: 839851 - DNA, 15 bp, Homo sapiens
aactgtcaatattta

SEQ ID NO: 839852 - DNA, 15 bp, Homo sapiens
taactgtcaatattt

SEQ ID NO: 839853 - DNA, 15 bp, Homo sapiens
ataactgtcaatatt

SEQ ID NO: 839854 - DNA, 15 bp, Homo sapiens
tataactgtcaatat

SEQ ID NO: 839855 - DNA, 15 bp, Homo sapiens
atataactgtcaata

SEQ ID NO: 839856 - DNA, 15 bp, Homo sapiens
tatataactgtcaat

SEQ ID NO: 839857 - DNA, 15 bp, Homo sapiens
atatataactgtcaa

SEQ ID NO: 839858 - DNA, 15 bp, Homo sapiens
tatatataactgtca

SEQ ID NO: 839859 - DNA, 15 bp, Homo sapiens
ttatatataactgtc

SEQ ID NO: 839860 - DNA, 15 bp, Homo sapiens
tttatatataactgt

SEQ ID NO: 839861 - DNA, 15 bp, Homo sapiens
atttatatataactg

SEQ ID NO: 839862 - DNA, 15 bp, Homo sapiens
aatttatatataact

SEQ ID NO: 839863 - DNA, 15 bp, Homo sapiens
aaatttatatataac

SEQ ID NO: 839864 - DNA, 15 bp, Homo sapiens
taaatttatatataa

SEQ ID NO: 839865 - DNA, 15 bp, Homo sapiens
ataaatttatatata

SEQ ID NO: 839866 - DNA, 15 bp, Homo sapiens
cataaatttatatat

SEQ ID NO: 839867 - DNA, 15 bp, Homo sapiens
acataaatttatata

SEQ ID NO: 839868 - DNA, 15 bp, Homo sapiens
tacataaatttatat

SEQ ID NO: 839869 - DNA, 15 bp, Homo sapiens
ttacataaatttata

SEQ ID NO: 839870 - DNA, 15 bp, Homo sapiens
attacataaatttat

SEQ ID NO: 839871 - DNA, 15 bp, Homo sapiens
aattacataaattta

SEQ ID NO: 839872 - DNA, 15 bp, Homo sapiens
caattacataaattt

SEQ ID NO: 839873 - DNA, 15 bp, Homo sapiens
acaattacataaatt

SEQ ID NO: 839874 - DNA, 15 bp, Homo sapiens
aacaattacataaat

SEQ ID NO: 839875 - DNA, 15 bp, Homo sapiens
aaacaattacataaa

SEQ ID NO: 839876 - DNA, 15 bp, Homo sapiens
taaacaattacataa

SEQ ID NO: 839877 - DNA, 15 bp, Homo sapiens
gtaaacaattacata

SEQ ID NO: 839878 - DNA, 15 bp, Homo sapiens
agtaaacaattacat

SEQ ID NO: 839879 - DNA, 15 bp, Homo sapiens
aagtaaacaattaca

SEQ ID NO: 839880 - DNA, 15 bp, Homo sapiens
gaagtaaacaattac

SEQ ID NO: 839881 - DNA, 15 bp, Homo sapiens
agaagtaaacaatta

SEQ ID NO: 839882 - DNA, 15 bp, Homo sapiens
tagaagtaaacaatt

SEQ ID NO: 839883 - DNA, 15 bp, Homo sapiens
ttagaagtaaacaat

SEQ ID NO: 839884 - DNA, 15 bp, Homo sapiens
attagaagtaaacaa

SEQ ID NO: 839885 - DNA, 15 bp, Homo sapiens
tattagaagtaaaca

SEQ ID NO: 839886 - DNA, 15 bp, Homo sapiens
ttattagaagtaaac

SEQ ID NO: 839887 - DNA, 15 bp, Homo sapiens
tttattagaagtaaa

SEQ ID NO: 839888 - DNA, 15 bp, Homo sapiens
ctttattagaagtaa

SEQ ID NO: 839889 - DNA, 15 bp, Homo sapiens
tctttattagaagta

SEQ ID NO: 839890 - DNA, 15 bp, Homo sapiens
ttctttattagaagt

SEQ ID NO: 839891 - DNA, 15 bp, Homo sapiens
attctttattagaag

SEQ ID NO: 839892 - DNA, 15 bp, Homo sapiens
aattctttattagaa

SEQ ID NO: 839893 - DNA, 15 bp, Homo sapiens
aaattctttattaga

SEQ ID NO: 839894 - DNA, 15 bp, Homo sapiens
gaaattctttattag

SEQ ID NO: 839895 - DNA, 15 bp, Homo sapiens
tgaaattctttatta

SEQ ID NO: 839896 - DNA, 15 bp, Homo sapiens
atgaaattctttatt

SEQ ID NO: 839897 - DNA, 15 bp, Homo sapiens
gatgaaattctttat

SEQ ID NO: 839898 - DNA, 15 bp, Homo sapiens
agatgaaattcttta

SEQ ID NO: 839899 - DNA, 15 bp, Homo sapiens
cagatgaaattcttt

SEQ ID NO: 839900 - DNA, 15 bp, Homo sapiens
ccagatgaaattctt

SEQ ID NO: 839901 - DNA, 15 bp, Homo sapiens
cccagatgaaattct

SEQ ID NO: 839902 - DNA, 15 bp, Homo sapiens
ccccagatgaaattc

SEQ ID NO: 839903 - DNA, 15 bp, Homo sapiens
tccccagatgaaatt

SEQ ID NO: 839904 - DNA, 15 bp, Homo sapiens
ttccccagatgaaat

SEQ ID NO: 839905 - DNA, 15 bp, Homo sapiens
tttccccagatgaaa

SEQ ID NO: 839906 - DNA, 15 bp, Homo sapiens
ttttccccagatgaa

SEQ ID NO: 839907 - DNA, 15 bp, Homo sapiens
tttttccccagatga

SEQ ID NO: 839908 - DNA, 15 bp, Homo sapiens
gtttttccccagatg

SEQ ID NO: 839909 - DNA, 15 bp, Homo sapiens
tgtttttccccagat

SEQ ID NO: 839910 - DNA, 15 bp, Homo sapiens
atgtttttccccaga

SEQ ID NO: 839911 - DNA, 15 bp, Homo sapiens
tatgtttttccccag

SEQ ID NO: 839912 - DNA, 15 bp, Homo sapiens
gtatgtttttcccca

SEQ ID NO: 839913 - DNA, 15 bp, Homo sapiens
agtatgtttttcccc

SEQ ID NO: 839914 - DNA, 15 bp, Homo sapiens
aagtatgtttttccc

SEQ ID NO: 839915 - DNA, 15 bp, Homo sapiens
aaagtatgtttttcc

SEQ ID NO: 839916 - DNA, 15 bp, Homo sapiens
caaagtatgtttttc

SEQ ID NO: 839917 - DNA, 15 bp, Homo sapiens
gcaaagtatgttttt

SEQ ID NO: 839918 - DNA, 15 bp, Homo sapiens
agcaaagtatgtttt

SEQ ID NO: 839919 - DNA, 15 bp, Homo sapiens
gagcaaagtatgttt

SEQ ID NO: 839920 - DNA, 15 bp, Homo sapiens
tgagcaaagtatgtt

SEQ ID NO: 839921 - DNA, 15 bp, Homo sapiens
ctgagcaaagtatgt

SEQ ID NO: 839922 - DNA, 15 bp, Homo sapiens
gctgagcaaagtatg

SEQ ID NO: 839923 - DNA, 15 bp, Homo sapiens
agctgagcaaagtat

SEQ ID NO: 839924 - DNA, 15 bp, Homo sapiens
gagctgagcaaagta

SEQ ID NO: 839925 - DNA, 15 bp, Homo sapiens
agagctgagcaaagt

SEQ ID NO: 839926 - DNA, 15 bp, Homo sapiens
aagagctgagcaaag

SEQ ID NO: 839927 - DNA, 15 bp, Homo sapiens
aaagagctgagcaaa

SEQ ID NO: 839928 - DNA, 15 bp, Homo sapiens
caaagagctgagcaa

SEQ ID NO: 839929 - DNA, 15 bp, Homo sapiens
gcaaagagctgagca

SEQ ID NO: 839930 - DNA, 15 bp, Homo sapiens
ggcaaagagctgagc

SEQ ID NO: 839931 - DNA, 15 bp, Homo sapiens
tggcaaagagctgag

SEQ ID NO: 839932 - DNA, 15 bp, Homo sapiens
gtggcaaagagctga

SEQ ID NO: 839933 - DNA, 15 bp, Homo sapiens
tgtggcaaagagctg

SEQ ID NO: 839934 - DNA, 15 bp, Homo sapiens
ttgtggcaaagagct

SEQ ID NO: 839935 - DNA, 15 bp, Homo sapiens
cttgtggcaaagagc

SEQ ID NO: 839936 - DNA, 15 bp, Homo sapiens
acttgtggcaaagag

SEQ ID NO: 839937 - DNA, 15 bp, Homo sapiens
cacttgtggcaaaga

SEQ ID NO: 839938 - DNA, 15 bp, Homo sapiens
gcacttgtggcaaag

SEQ ID NO: 839939 - DNA, 15 bp, Homo sapiens
tgcacttgtggcaaa

SEQ ID NO: 839940 - DNA, 15 bp, Homo sapiens
ttgcacttgtggcaa

SEQ ID NO: 839941 - DNA, 15 bp, Homo sapiens
tttgcacttgtggca

SEQ ID NO: 839942 - DNA, 15 bp, Homo sapiens
ctttgcacttgtggc

SEQ ID NO: 839943 - DNA, 15 bp, Homo sapiens
actttgcacttgtgg

SEQ ID NO: 839944 - DNA, 15 bp, Homo sapiens
gactttgcacttgtg

SEQ ID NO: 839945 - DNA, 15 bp, Homo sapiens
agactttgcacttgt

SEQ ID NO: 839946 - DNA, 15 bp, Homo sapiens
tagactttgcacttg

SEQ ID NO: 839947 - DNA, 15 bp, Homo sapiens
ttagactttgcactt

SEQ ID NO: 839948 - DNA, 15 bp, Homo sapiens
cttagactttgcact

SEQ ID NO: 839949 - DNA, 15 bp, Homo sapiens
tcttagactttgcac

SEQ ID NO: 839950 - DNA, 15 bp, Homo sapiens
gtcttagactttgca

SEQ ID NO: 839951 - DNA, 15 bp, Homo sapiens
tgtcttagactttgc

SEQ ID NO: 839952 - DNA, 15 bp, Homo sapiens
ctgtcttagactttg

SEQ ID NO: 839953 - DNA, 15 bp, Homo sapiens
actgtcttagacttt

SEQ ID NO: 839954 - DNA, 15 bp, Homo sapiens
gactgtcttagactt

SEQ ID NO: 839955 - DNA, 15 bp, Homo sapiens
tgactgtcttagact

SEQ ID NO: 839956 - DNA, 15 bp, Homo sapiens
ttgactgtcttagac

SEQ ID NO: 839957 - DNA, 15 bp, Homo sapiens
tttgactgtcttaga

SEQ ID NO: 839958 - DNA, 15 bp, Homo sapiens
atttgactgtcttag

SEQ ID NO: 839959 - DNA, 15 bp, Homo sapiens
tatttgactgtctta

SEQ ID NO: 839960 - DNA, 15 bp, Homo sapiens
ctatttgactgtctt

SEQ ID NO: 839961 - DNA, 15 bp, Homo sapiens
gctatttgactgtct

SEQ ID NO: 839962 - DNA, 15 bp, Homo sapiens
agctatttgactgtc

SEQ ID NO: 839963 - DNA, 15 bp, Homo sapiens
aagctatttgactgt

SEQ ID NO: 839964 - DNA, 15 bp, Homo sapiens
aaagctatttgactg

SEQ ID NO: 839965 - DNA, 15 bp, Homo sapiens
gaaagctatttgact

SEQ ID NO: 839966 - DNA, 15 bp, Homo sapiens
ggaaagctatttgac

SEQ ID NO: 839967 - DNA, 15 bp, Homo sapiens
aggaaagctatttga

SEQ ID NO: 839968 - DNA, 15 bp, Homo sapiens
taggaaagctatttg

SEQ ID NO: 839969 - DNA, 15 bp, Homo sapiens
ctaggaaagctattt

SEQ ID NO: 839970 - DNA, 15 bp, Homo sapiens
actaggaaagctatt

SEQ ID NO: 839971 - DNA, 15 bp, Homo sapiens
tactaggaaagctat

SEQ ID NO: 839972 - DNA, 15 bp, Homo sapiens
gtactaggaaagcta

SEQ ID NO: 839973 - DNA, 15 bp, Homo sapiens
cgtactaggaaagct

SEQ ID NO: 839974 - DNA, 15 bp, Homo sapiens
ccgtactaggaaagc

SEQ ID NO: 839975 - DNA, 15 bp, Homo sapiens
gccgtactaggaaag

SEQ ID NO: 839976 - DNA, 15 bp, Homo sapiens
ggccgtactaggaaa

SEQ ID NO: 839977 - DNA, 15 bp, Homo sapiens
aggccgtactaggaa

SEQ ID NO: 839978 - DNA, 15 bp, Homo sapiens
aaggccgtactagga

SEQ ID NO: 839979 - DNA, 15 bp, Homo sapiens
taaggccgtactagg

SEQ ID NO: 839980 - DNA, 15 bp, Homo sapiens
ctaaggccgtactag

SEQ ID NO: 839981 - DNA, 15 bp, Homo sapiens
cctaaggccgtacta

SEQ ID NO: 839982 - DNA, 15 bp, Homo sapiens
tcctaaggccgtact

SEQ ID NO: 839983 - DNA, 15 bp, Homo sapiens
ttcctaaggccgtac

SEQ ID NO: 839984 - DNA, 15 bp, Homo sapiens
gttcctaaggccgta

SEQ ID NO: 839985 - DNA, 15 bp, Homo sapiens
agttcctaaggccgt

SEQ ID NO: 839986 - DNA, 15 bp, Homo sapiens
aagttcctaaggccg

SEQ ID NO: 839987 - DNA, 15 bp, Homo sapiens
taagttcctaaggcc

SEQ ID NO: 839988 - DNA, 15 bp, Homo sapiens
ctaagttcctaaggc

SEQ ID NO: 839989 - DNA, 15 bp, Homo sapiens
actaagttcctaagg

SEQ ID NO: 839990 - DNA, 15 bp, Homo sapiens
tactaagttcctaag

SEQ ID NO: 839991 - DNA, 15 bp, Homo sapiens
atactaagttcctaa

SEQ ID NO: 839992 - DNA, 15 bp, Homo sapiens
tatactaagttccta

SEQ ID NO: 839993 - DNA, 15 bp, Homo sapiens
atatactaagttcct

SEQ ID NO: 839994 - DNA, 15 bp, Homo sapiens
catatactaagttcc

SEQ ID NO: 839995 - DNA, 15 bp, Homo sapiens
tcatatactaagttc

SEQ ID NO: 839996 - DNA, 15 bp, Homo sapiens
gtcatatactaagtt

SEQ ID NO: 839997 - DNA, 15 bp, Homo sapiens
agtcatatactaagt

SEQ ID NO: 839998 - DNA, 15 bp, Homo sapiens
cagtcatatactaag

SEQ ID NO: 839999 - DNA, 15 bp, Homo sapiens
ccagtcatatactaa

SEQ ID NO: 840000 - DNA, 15 bp, Homo sapiens
accagtcatatacta

SEQ ID NO: 840001 - DNA, 15 bp, Homo sapiens
caccagtcatatact

SEQ ID NO: 840002 - DNA, 15 bp, Homo sapiens
acaccagtcatatac

SEQ ID NO: 840003 - DNA, 15 bp, Homo sapiens
cacaccagtcatata

SEQ ID NO: 840004 - DNA, 15 bp, Homo sapiens
tcacaccagtcatat

SEQ ID NO: 840005 - DNA, 15 bp, Homo sapiens
ttcacaccagtcata

SEQ ID NO: 840006 - DNA, 15 bp, Homo sapiens
attcacaccagtcat

SEQ ID NO: 840007 - DNA, 15 bp, Homo sapiens
gattcacaccagtca

SEQ ID NO: 840008 - DNA, 15 bp, Homo sapiens
agattcacaccagtc

SEQ ID NO: 840009 - DNA, 15 bp, Homo sapiens
tagattcacaccagt

SEQ ID NO: 840010 - DNA, 15 bp, Homo sapiens
ctagattcacaccag

SEQ ID NO: 840011 - DNA, 15 bp, Homo sapiens
tctagattcacacca

SEQ ID NO: 840012 - DNA, 15 bp, Homo sapiens
ctctagattcacacc

SEQ ID NO: 840013 - DNA, 15 bp, Homo sapiens
cctctagattcacac

SEQ ID NO: 840014 - DNA, 15 bp, Homo sapiens
ccctctagattcaca

SEQ ID NO: 840015 - DNA, 15 bp, Homo sapiens
tccctctagattcac

SEQ ID NO: 840016 - DNA, 15 bp, Homo sapiens
ctccctctagattca

SEQ ID NO: 840017 - DNA, 15 bp, Homo sapiens
gctccctctagattc

SEQ ID NO: 840018 - DNA, 15 bp, Homo sapiens
tgctccctctagatt

SEQ ID NO: 840019 - DNA, 15 bp, Homo sapiens
atgctccctctagat

SEQ ID NO: 840020 - DNA, 15 bp, Homo sapiens
tatgctccctctaga

SEQ ID NO: 840021 - DNA, 15 bp, Homo sapiens
gtatgctccctctag

SEQ ID NO: 840022 - DNA, 15 bp, Homo sapiens
agtatgctccctcta

SEQ ID NO: 840023 - DNA, 15 bp, Homo sapiens
cagtatgctccctct

SEQ ID NO: 840024 - DNA, 15 bp, Homo sapiens
gcagtatgctccctc

SEQ ID NO: 840025 - DNA, 15 bp, Homo sapiens
tgcagtatgctccct

SEQ ID NO: 840026 - DNA, 15 bp, Homo sapiens
atgcagtatgctccc

SEQ ID NO: 840027 - DNA, 15 bp, Homo sapiens
aatgcagtatgctcc

SEQ ID NO: 840028 - DNA, 15 bp, Homo sapiens
gaatgcagtatgctc

SEQ ID NO: 840029 - DNA, 15 bp, Homo sapiens
agaatgcagtatgct

SEQ ID NO: 840030 - DNA, 15 bp, Homo sapiens
cagaatgcagtatgc

SEQ ID NO: 840031 - DNA, 15 bp, Homo sapiens
tcagaatgcagtatg

SEQ ID NO: 840032 - DNA, 15 bp, Homo sapiens
gtcagaatgcagtat

SEQ ID NO: 840033 - DNA, 15 bp, Homo sapiens
ggtcagaatgcagta

SEQ ID NO: 840034 - DNA, 15 bp, Homo sapiens
tggtcagaatgcagt

SEQ ID NO: 840035 - DNA, 15 bp, Homo sapiens
ttggtcagaatgcag

SEQ ID NO: 840036 - DNA, 15 bp, Homo sapiens
tttggtcagaatgca

SEQ ID NO: 840037 - DNA, 15 bp, Homo sapiens
ttttggtcagaatgc

SEQ ID NO: 840038 - DNA, 15 bp, Homo sapiens
attttggtcagaatg

SEQ ID NO: 840039 - DNA, 15 bp, Homo sapiens
gattttggtcagaat

SEQ ID NO: 840040 - DNA, 15 bp, Homo sapiens
agattttggtcagaa

SEQ ID NO: 840041 - DNA, 15 bp, Homo sapiens
gagattttggtcaga

SEQ ID NO: 840042 - DNA, 15 bp, Homo sapiens
ggagattttggtcag

SEQ ID NO: 840043 - DNA, 15 bp, Homo sapiens
tggagattttggtca

SEQ ID NO: 840044 - DNA, 15 bp, Homo sapiens
gtggagattttggtc

SEQ ID NO: 840045 - DNA, 15 bp, Homo sapiens
ggtggagattttggt

SEQ ID NO: 840046 - DNA, 15 bp, Homo sapiens
gggtggagattttgg

SEQ ID NO: 840047 - DNA, 15 bp, Homo sapiens
agggtggagattttg

SEQ ID NO: 840048 - DNA, 15 bp, Homo sapiens
cagggtggagatttt

SEQ ID NO: 840049 - DNA, 15 bp, Homo sapiens
acagggtggagattt

SEQ ID NO: 840050 - DNA, 15 bp, Homo sapiens
aacagggtggagatt

SEQ ID NO: 840051 - DNA, 15 bp, Homo sapiens
tagtaacagggtgga

SEQ ID NO: 840052 - DNA, 15 bp, Homo sapiens
atagtaacagggtgg

SEQ ID NO: 840053 - DNA, 15 bp, Homo sapiens
catagtaacagggtg

SEQ ID NO: 840054 - DNA, 15 bp, Homo sapiens
ccatagtaacagggt

SEQ ID NO: 840055 - DNA, 15 bp, Homo sapiens
gccatagtaacaggg

SEQ ID NO: 840056 - DNA, 15 bp, Homo sapiens
ggccatagtaacagg

SEQ ID NO: 840057 - DNA, 15 bp, Homo sapiens
tggccatagtaacag

SEQ ID NO: 840058 - DNA, 15 bp, Homo sapiens
atggccatagtaaca

SEQ ID NO: 840059 - DNA, 15 bp, Homo sapiens
gatggccatagtaac

SEQ ID NO: 840060 - DNA, 15 bp, Homo sapiens
tgatggccatagtaa

SEQ ID NO: 840061 - DNA, 15 bp, Homo sapiens
gtgatggccatagta

SEQ ID NO: 840062 - DNA, 15 bp, Homo sapiens
agtgatggccatagt

SEQ ID NO: 840063 - DNA, 15 bp, Homo sapiens
tagtgatggccatag

SEQ ID NO: 840064 - DNA, 15 bp, Homo sapiens
ttagtgatggccata

SEQ ID NO: 840065 - DNA, 15 bp, Homo sapiens
gttagtgatggccat

SEQ ID NO: 840066 - DNA, 15 bp, Homo sapiens
agttagtgatggcca

SEQ ID NO: 840067 - DNA, 15 bp, Homo sapiens
aagttagtgatggcc

SEQ ID NO: 840068 - DNA, 15 bp, Homo sapiens
gaagttagtgatggc

SEQ ID NO: 840069 - DNA, 15 bp, Homo sapiens
cgaagttagtgatgg

SEQ ID NO: 840070 - DNA, 15 bp, Homo sapiens
gcgaagttagtgatg

SEQ ID NO: 840071 - DNA, 15 bp, Homo sapiens
tgcgaagttagtgat

SEQ ID NO: 840072 - DNA, 15 bp, Homo sapiens
ctgcgaagttagtga

SEQ ID NO: 840073 - DNA, 15 bp, Homo sapiens
actgcgaagttagtg

SEQ ID NO: 840074 - DNA, 15 bp, Homo sapiens
tactgcgaagttagt

SEQ ID NO: 840075 - DNA, 15 bp, Homo sapiens
atactgcgaagttag

SEQ ID NO: 840076 - DNA, 15 bp, Homo sapiens
aatactgcgaagtta

SEQ ID NO: 840077 - DNA, 15 bp, Homo sapiens
caatactgcgaagtt

SEQ ID NO: 840078 - DNA, 15 bp, Homo sapiens
gcaatactgcgaagt

SEQ ID NO: 840079 - DNA, 15 bp, Homo sapiens
tgcaatactgcgaag

SEQ ID NO: 840080 - DNA, 15 bp, Homo sapiens
ctgcaatactgcgaa

SEQ ID NO: 840081 - DNA, 15 bp, Homo sapiens
actgcaatactgcga

SEQ ID NO: 840082 - DNA, 15 bp, Homo sapiens
tactgcaatactgcg

SEQ ID NO: 840083 - DNA, 15 bp, Homo sapiens
gtactgcaatactgc

SEQ ID NO: 840084 - DNA, 15 bp, Homo sapiens
agtactgcaatactg

SEQ ID NO: 840085 - DNA, 15 bp, Homo sapiens
aagtactgcaatact

SEQ ID NO: 840086 - DNA, 15 bp, Homo sapiens
gaagtactgcaatac

SEQ ID NO: 840087 - DNA, 15 bp, Homo sapiens
ggaagtactgcaata

SEQ ID NO: 840088 - DNA, 15 bp, Homo sapiens
aggaagtactgcaat

SEQ ID NO: 840089 - DNA, 15 bp, Homo sapiens
caggaagtactgcaa

SEQ ID NO: 840090 - DNA, 15 bp, Homo sapiens
gcaggaagtactgca

SEQ ID NO: 840091 - DNA, 15 bp, Homo sapiens
agcaggaagtactgc

SEQ ID NO: 840092 - DNA, 15 bp, Homo sapiens
tagcaggaagtactg

SEQ ID NO: 840093 - DNA, 15 bp, Homo sapiens
ctagcaggaagtact

SEQ ID NO: 840094 - DNA, 15 bp, Homo sapiens
gctagcaggaagtac

SEQ ID NO: 840095 - DNA, 15 bp, Homo sapiens
agctagcaggaagta

SEQ ID NO: 840096 - DNA, 15 bp, Homo sapiens
aagctagcaggaagt

SEQ ID NO: 840097 - DNA, 15 bp, Homo sapiens
taagctagcaggaag

SEQ ID NO: 840098 - DNA, 15 bp, Homo sapiens
ctaagctagcaggaa

SEQ ID NO: 840099 - DNA, 15 bp, Homo sapiens
actaagctagcagga

SEQ ID NO: 840100 - DNA, 15 bp, Homo sapiens
aactaagctagcagg

SEQ ID NO: 840101 - DNA, 15 bp, Homo sapiens
gaactaagctagcag

SEQ ID NO: 840102 - DNA, 15 bp, Homo sapiens
ggaactaagctagca

SEQ ID NO: 840103 - DNA, 15 bp, Homo sapiens
gggaactaagctagc

SEQ ID NO: 840104 - DNA, 15 bp, Homo sapiens
tgggaactaagctag

SEQ ID NO: 840105 - DNA, 15 bp, Homo sapiens
ttgggaactaagcta

SEQ ID NO: 840106 - DNA, 15 bp, Homo sapiens
cttgggaactaagct

SEQ ID NO: 840107 - DNA, 15 bp, Homo sapiens
ccttgggaactaagc

SEQ ID NO: 840108 - DNA, 15 bp, Homo sapiens
gccttgggaactaag

SEQ ID NO: 840109 - DNA, 15 bp, Homo sapiens
tgccttgggaactaa

SEQ ID NO: 840110 - DNA, 15 bp, Homo sapiens
ttgccttgggaacta

SEQ ID NO: 840111 - DNA, 15 bp, Homo sapiens
gttgccttgggaact

SEQ ID NO: 840112 - DNA, 15 bp, Homo sapiens
agttgccttgggaac

SEQ ID NO: 840113 - DNA, 15 bp, Homo sapiens
aagttgccttgggaa

SEQ ID NO: 840114 - DNA, 15 bp, Homo sapiens
caagttgccttggga

SEQ ID NO: 840115 - DNA, 15 bp, Homo sapiens
acaagttgccttggg

SEQ ID NO: 840116 - DNA, 15 bp, Homo sapiens
cacaagttgccttgg

SEQ ID NO: 840117 - DNA, 15 bp, Homo sapiens
tcacaagttgccttg

SEQ ID NO: 840118 - DNA, 15 bp, Homo sapiens
ttcacaagttgcctt

SEQ ID NO: 840119 - DNA, 15 bp, Homo sapiens
cttcacaagttgcct

SEQ ID NO: 840120 - DNA, 15 bp, Homo sapiens
ccttcacaagttgcc

SEQ ID NO: 840121 - DNA, 15 bp, Homo sapiens
tccttcacaagttgc

SEQ ID NO: 840122 - DNA, 15 bp, Homo sapiens
ttccttcacaagttg

SEQ ID NO: 840123 - DNA, 15 bp, Homo sapiens
tttccttcacaagtt

SEQ ID NO: 840124 - DNA, 15 bp, Homo sapiens
ttttccttcacaagt

SEQ ID NO: 840125 - DNA, 15 bp, Homo sapiens
attttccttcacaag

SEQ ID NO: 840126 - DNA, 15 bp, Homo sapiens
aattttccttcacaa

SEQ ID NO: 840127 - DNA, 15 bp, Homo sapiens
aaattttccttcaca

SEQ ID NO: 840128 - DNA, 15 bp, Homo sapiens
aaaattttccttcac

SEQ ID NO: 840129 - DNA, 15 bp, Homo sapiens
aaaaattttccttca

SEQ ID NO: 840130 - DNA, 15 bp, Homo sapiens
taaaaattttccttc

SEQ ID NO: 840131 - DNA, 15 bp, Homo sapiens
gtaaaaattttcctt

SEQ ID NO: 840132 - DNA, 15 bp, Homo sapiens
tgtaaaaattttcct

SEQ ID NO: 840133 - DNA, 15 bp, Homo sapiens
ttgtaaaaattttcc

SEQ ID NO: 840134 - DNA, 15 bp, Homo sapiens
tttgtaaaaattttc

SEQ ID NO: 840135 - DNA, 15 bp, Homo sapiens
ctttgtaaaaatttt

SEQ ID NO: 840136 - DNA, 15 bp, Homo sapiens
gctttgtaaaaattt

SEQ ID NO: 840137 - DNA, 15 bp, Homo sapiens
agctttgtaaaaatt

SEQ ID NO: 840138 - DNA, 15 bp, Homo sapiens
cagctttgtaaaaat

SEQ ID NO: 840139 - DNA, 15 bp, Homo sapiens
acagctttgtaaaaa

SEQ ID NO: 840140 - DNA, 15 bp, Homo sapiens
aacagctttgtaaaa

SEQ ID NO: 840141 - DNA, 15 bp, Homo sapiens
caacagctttgtaaa

SEQ ID NO: 840142 - DNA, 15 bp, Homo sapiens
acaacagctttgtaa

SEQ ID NO: 840143 - DNA, 15 bp, Homo sapiens
gacaacagctttgta

SEQ ID NO: 840144 - DNA, 15 bp, Homo sapiens
tgacaacagctttgt

SEQ ID NO: 840145 - DNA, 15 bp, Homo sapiens
gtgacaacagctttg

SEQ ID NO: 840146 - DNA, 15 bp, Homo sapiens
tgtgacaacagcttt

SEQ ID NO: 840147 - DNA, 15 bp, Homo sapiens
gtgtgacaacagctt

SEQ ID NO: 840148 - DNA, 15 bp, Homo sapiens
tgtgtgacaacagct

SEQ ID NO: 840149 - DNA, 15 bp, Homo sapiens
ttgtgtgacaacagc

SEQ ID NO: 840150 - DNA, 15 bp, Homo sapiens
tttgtgtgacaacag

SEQ ID NO: 840151 - DNA, 15 bp, Homo sapiens
ctttgtgtgacaaca

SEQ ID NO: 840152 - DNA, 15 bp, Homo sapiens
cctttgtgtgacaac

SEQ ID NO: 840153 - DNA, 15 bp, Homo sapiens
acctttgtgtgacaa

SEQ ID NO: 840154 - DNA, 15 bp, Homo sapiens
tacctttgtgtgaca

SEQ ID NO: 840155 - DNA, 15 bp, Homo sapiens
ctacctttgtgtgac

SEQ ID NO: 840156 - DNA, 15 bp, Homo sapiens
actacctttgtgtga

SEQ ID NO: 840157 - DNA, 15 bp, Homo sapiens
cactacctttgtgtg

SEQ ID NO: 840158 - DNA, 15 bp, Homo sapiens
acactacctttgtgt

SEQ ID NO: 840159 - DNA, 15 bp, Homo sapiens
aacactacctttgtg

SEQ ID NO: 840160 - DNA, 15 bp, Homo sapiens
aaacactacctttgt

SEQ ID NO: 840161 - DNA, 15 bp, Homo sapiens
gaaacactacctttg

SEQ ID NO: 840162 - DNA, 15 bp, Homo sapiens
tgaaacactaccttt

SEQ ID NO: 840163 - DNA, 15 bp, Homo sapiens
ctgaaacactacctt

SEQ ID NO: 840164 - DNA, 15 bp, Homo sapiens
actgaaacactacct

SEQ ID NO: 840165 - DNA, 15 bp, Homo sapiens
aactgaaacactacc

SEQ ID NO: 840166 - DNA, 15 bp, Homo sapiens
gaactgaaacactac

SEQ ID NO: 840167 - DNA, 15 bp, Homo sapiens
ggaactgaaacacta

SEQ ID NO: 840168 - DNA, 15 bp, Homo sapiens
aggaactgaaacact

SEQ ID NO: 840169 - DNA, 15 bp, Homo sapiens
caggaactgaaacac

SEQ ID NO: 840170 - DNA, 15 bp, Homo sapiens
tcaggaactgaaaca

SEQ ID NO: 840171 - DNA, 15 bp, Homo sapiens
ctcaggaactgaaac

SEQ ID NO: 840172 - DNA, 15 bp, Homo sapiens
gctcaggaactgaaa

SEQ ID NO: 840173 - DNA, 15 bp, Homo sapiens
ggctcaggaactgaa

SEQ ID NO: 840174 - DNA, 15 bp, Homo sapiens
gggctcaggaactga

SEQ ID NO: 840175 - DNA, 15 bp, Homo sapiens
tgggctcaggaactg

SEQ ID NO: 840176 - DNA, 15 bp, Homo sapiens
atgggctcaggaact

SEQ ID NO: 840177 - DNA, 15 bp, Homo sapiens
catgggctcaggaac

SEQ ID NO: 840178 - DNA, 15 bp, Homo sapiens
acatgggctcaggaa

SEQ ID NO: 840179 - DNA, 15 bp, Homo sapiens
gacatgggctcagga

SEQ ID NO: 840180 - DNA, 15 bp, Homo sapiens
ggacatgggctcagg

SEQ ID NO: 840181 - DNA, 15 bp, Homo sapiens
aggacatgggctcag

SEQ ID NO: 840182 - DNA, 15 bp, Homo sapiens
aaggacatgggctca

SEQ ID NO: 840183 - DNA, 15 bp, Homo sapiens
caaggacatgggctc

SEQ ID NO: 840184 - DNA, 15 bp, Homo sapiens
ccaaggacatgggct

SEQ ID NO: 840185 - DNA, 15 bp, Homo sapiens
tccaaggacatgggc

SEQ ID NO: 840186 - DNA, 15 bp, Homo sapiens
ctccaaggacatggg

SEQ ID NO: 840187 - DNA, 15 bp, Homo sapiens
actccaaggacatgg

SEQ ID NO: 840188 - DNA, 15 bp, Homo sapiens
aactccaaggacatg

SEQ ID NO: 840189 - DNA, 15 bp, Homo sapiens
caactccaaggacat

SEQ ID NO: 840190 - DNA, 15 bp, Homo sapiens
gcaactccaaggaca

SEQ ID NO: 840191 - DNA, 15 bp, Homo sapiens
ggcaactccaaggac

SEQ ID NO: 840192 - DNA, 15 bp, Homo sapiens
gggcaactccaagga

SEQ ID NO: 840193 - DNA, 15 bp, Homo sapiens
tgggcaactccaagg

SEQ ID NO: 840194 - DNA, 15 bp, Homo sapiens
ctgggcaactccaag

SEQ ID NO: 840195 - DNA, 15 bp, Homo sapiens
cctgggcaactccaa

SEQ ID NO: 840196 - DNA, 15 bp, Homo sapiens
gcctgggcaactcca

SEQ ID NO: 840197 - DNA, 15 bp, Homo sapiens
agcctgggcaactcc

SEQ ID NO: 840198 - DNA, 15 bp, Homo sapiens
gagcctgggcaactc

SEQ ID NO: 840199 - DNA, 15 bp, Homo sapiens
ggagcctgggcaact

SEQ ID NO: 840200 - DNA, 15 bp, Homo sapiens
tggagcctgggcaac

SEQ ID NO: 840201 - DNA, 15 bp, Homo sapiens
ttggagcctgggcaa

SEQ ID NO: 840202 - DNA, 15 bp, Homo sapiens
attggagcctgggca

SEQ ID NO: 840203 - DNA, 15 bp, Homo sapiens
tattggagcctgggc

SEQ ID NO: 840204 - DNA, 15 bp, Homo sapiens
ttattggagcctggg

SEQ ID NO: 840205 - DNA, 15 bp, Homo sapiens
attattggagcctgg

SEQ ID NO: 840206 - DNA, 15 bp, Homo sapiens
tattattggagcctg

SEQ ID NO: 840207 - DNA, 15 bp, Homo sapiens
gtattattggagcct

SEQ ID NO: 840208 - DNA, 15 bp, Homo sapiens
agtattattggagcc

SEQ ID NO: 840209 - DNA, 15 bp, Homo sapiens
tagtattattggagc

SEQ ID NO: 840210 - DNA, 15 bp, Homo sapiens
ttagtattattggag

SEQ ID NO: 840211 - DNA, 15 bp, Homo sapiens
attagtattattgga

SEQ ID NO: 840212 - DNA, 15 bp, Homo sapiens
tattagtattattgg

SEQ ID NO: 840213 - DNA, 15 bp, Homo sapiens
ttattagtattattg

SEQ ID NO: 840214 - DNA, 15 bp, Homo sapiens
attattagtattatt

SEQ ID NO: 840215 - DNA, 15 bp, Homo sapiens
aattattagtattat

SEQ ID NO: 840216 - DNA, 15 bp, Homo sapiens
taattattagtatta

SEQ ID NO: 840217 - DNA, 15 bp, Homo sapiens
gtaattattagtatt

SEQ ID NO: 840218 - DNA, 15 bp, Homo sapiens
agtaattattagtat

SEQ ID NO: 840219 - DNA, 15 bp, Homo sapiens
cagtaattattagta

SEQ ID NO: 840220 - DNA, 15 bp, Homo sapiens
acagtaattattagt

SEQ ID NO: 840221 - DNA, 15 bp, Homo sapiens
tacagtaattattag

SEQ ID NO: 840222 - DNA, 15 bp, Homo sapiens
gtacagtaattatta

SEQ ID NO: 840223 - DNA, 15 bp, Homo sapiens
tgtacagtaattatt

SEQ ID NO: 840224 - DNA, 15 bp, Homo sapiens
atgtacagtaattat

SEQ ID NO: 840225 - DNA, 15 bp, Homo sapiens
aatgtacagtaatta

SEQ ID NO: 840226 - DNA, 15 bp, Homo sapiens
taatgtacagtaatt

SEQ ID NO: 840227 - DNA, 15 bp, Homo sapiens
ctaatgtacagtaat

SEQ ID NO: 840228 - DNA, 15 bp, Homo sapiens
cctaatgtacagtaa

SEQ ID NO: 840229 - DNA, 15 bp, Homo sapiens
acctaatgtacagta

SEQ ID NO: 840230 - DNA, 15 bp, Homo sapiens
tacctaatgtacagt

SEQ ID NO: 840231 - DNA, 15 bp, Homo sapiens
gtacctaatgtacag

SEQ ID NO: 840232 - DNA, 15 bp, Homo sapiens
agtacctaatgtaca

SEQ ID NO: 840233 - DNA, 15 bp, Homo sapiens
aagtacctaatgtac

SEQ ID NO: 840234 - DNA, 15 bp, Homo sapiens
taagtacctaatgta

SEQ ID NO: 840235 - DNA, 15 bp, Homo sapiens
gtaagtacctaatgt

SEQ ID NO: 840236 - DNA, 15 bp, Homo sapiens
ggtaagtacctaatg

SEQ ID NO: 840237 - DNA, 15 bp, Homo sapiens
tggtaagtacctaat

SEQ ID NO: 840238 - DNA, 15 bp, Homo sapiens
atggtaagtacctaa

SEQ ID NO: 840239 - DNA, 15 bp, Homo sapiens
catggtaagtaccta

SEQ ID NO: 840240 - DNA, 15 bp, Homo sapiens
acatggtaagtacct

SEQ ID NO: 840241 - DNA, 15 bp, Homo sapiens
cacatggtaagtacc

SEQ ID NO: 840242 - DNA, 15 bp, Homo sapiens
gcacatggtaagtac

SEQ ID NO: 840243 - DNA, 15 bp, Homo sapiens
ggcacatggtaagta

SEQ ID NO: 840244 - DNA, 15 bp, Homo sapiens
tggcacatggtaagt

SEQ ID NO: 840245 - DNA, 15 bp, Homo sapiens
atggcacatggtaag

SEQ ID NO: 840246 - DNA, 15 bp, Homo sapiens
tatggcacatggtaa

SEQ ID NO: 840247 - DNA, 15 bp, Homo sapiens
atatggcacatggta

SEQ ID NO: 840248 - DNA, 15 bp, Homo sapiens
aatatggcacatggt

SEQ ID NO: 840249 - DNA, 15 bp, Homo sapiens
gaatatggcacatgg

SEQ ID NO: 840250 - DNA, 15 bp, Homo sapiens
agaatatggcacatg

SEQ ID NO: 840251 - DNA, 15 bp, Homo sapiens
cagaatatggcacat

SEQ ID NO: 840252 - DNA, 15 bp, Homo sapiens
acagaatatggcaca

SEQ ID NO: 840253 - DNA, 15 bp, Homo sapiens
cacagaatatggcac

SEQ ID NO: 840254 - DNA, 15 bp, Homo sapiens
ccacagaatatggca

SEQ ID NO: 840255 - DNA, 15 bp, Homo sapiens
cccacagaatatggc

SEQ ID NO: 840256 - DNA, 15 bp, Homo sapiens
tcccacagaatatgg

SEQ ID NO: 840257 - DNA, 15 bp, Homo sapiens
ctcccacagaatatg

SEQ ID NO: 840258 - DNA, 15 bp, Homo sapiens
gctcccacagaatat

SEQ ID NO: 840259 - DNA, 15 bp, Homo sapiens
ggctcccacagaata

SEQ ID NO: 840260 - DNA, 15 bp, Homo sapiens
cggctcccacagaat

SEQ ID NO: 840261 - DNA, 15 bp, Homo sapiens
gcggctcccacagaa

SEQ ID NO: 840262 - DNA, 15 bp, Homo sapiens
agcggctcccacaga

SEQ ID NO: 840263 - DNA, 15 bp, Homo sapiens
aagcggctcccacag

SEQ ID NO: 840264 - DNA, 15 bp, Homo sapiens
aaagcggctcccaca

SEQ ID NO: 840265 - DNA, 15 bp, Homo sapiens
gaaagcggctcccac

SEQ ID NO: 840266 - DNA, 15 bp, Homo sapiens
ggaaagcggctccca

SEQ ID NO: 840267 - DNA, 15 bp, Homo sapiens
tggaaagcggctccc

SEQ ID NO: 840268 - DNA, 15 bp, Homo sapiens
gtggaaagcggctcc

SEQ ID NO: 840269 - DNA, 15 bp, Homo sapiens
tgtggaaagcggctc

SEQ ID NO: 840270 - DNA, 15 bp, Homo sapiens
ttgtggaaagcggct

SEQ ID NO: 840271 - DNA, 15 bp, Homo sapiens
tttgtggaaagcggc

SEQ ID NO: 840272 - DNA, 15 bp, Homo sapiens
atttgtggaaagcgg

SEQ ID NO: 840273 - DNA, 15 bp, Homo sapiens
aatttgtggaaagcg

SEQ ID NO: 840274 - DNA, 15 bp, Homo sapiens
taatttgtggaaagc

SEQ ID NO: 840275 - DNA, 15 bp, Homo sapiens
ataatttgtggaaag

SEQ ID NO: 840276 - DNA, 15 bp, Homo sapiens
gataatttgtggaaa

SEQ ID NO: 840277 - DNA, 15 bp, Homo sapiens
agataatttgtggaa

SEQ ID NO: 840278 - DNA, 15 bp, Homo sapiens
gagataatttgtgga

SEQ ID NO: 840279 - DNA, 15 bp, Homo sapiens
agagataatttgtgg

SEQ ID NO: 840280 - DNA, 15 bp, Homo sapiens
cagagataatttgtg

SEQ ID NO: 840281 - DNA, 15 bp, Homo sapiens
ccagagataatttgt

SEQ ID NO: 840282 - DNA, 15 bp, Homo sapiens
accagagataatttg

SEQ ID NO: 840283 - DNA, 15 bp, Homo sapiens
taccagagataattt

SEQ ID NO: 840284 - DNA, 15 bp, Homo sapiens
ttaccagagataatt

SEQ ID NO: 840285 - DNA, 15 bp, Homo sapiens
attaccagagataat

SEQ ID NO: 840286 - DNA, 15 bp, Homo sapiens
gattaccagagataa

SEQ ID NO: 840287 - DNA, 15 bp, Homo sapiens
ggattaccagagata

SEQ ID NO: 840288 - DNA, 15 bp, Homo sapiens
aggattaccagagat

SEQ ID NO: 840289 - DNA, 15 bp, Homo sapiens
aaggattaccagaga

SEQ ID NO: 840290 - DNA, 15 bp, Homo sapiens
caaggattaccagag

SEQ ID NO: 840291 - DNA, 15 bp, Homo sapiens
acaaggattaccaga

SEQ ID NO: 840292 - DNA, 15 bp, Homo sapiens
tacaaggattaccag

SEQ ID NO: 840293 - DNA, 15 bp, Homo sapiens
ttacaaggattacca

SEQ ID NO: 840294 - DNA, 15 bp, Homo sapiens
gttacaaggattacc

SEQ ID NO: 840295 - DNA, 15 bp, Homo sapiens
tgttacaaggattac

SEQ ID NO: 840296 - DNA, 15 bp, Homo sapiens
ttgttacaaggatta

SEQ ID NO: 840297 - DNA, 15 bp, Homo sapiens
gttgttacaaggatt

SEQ ID NO: 840298 - DNA, 15 bp, Homo sapiens
ggttgttacaaggat

SEQ ID NO: 840299 - DNA, 15 bp, Homo sapiens
gggttgttacaagga

SEQ ID NO: 840300 - DNA, 15 bp, Homo sapiens
agggttgttacaagg

SEQ ID NO: 840301 - DNA, 15 bp, Homo sapiens
aagggttgttacaag

SEQ ID NO: 840302 - DNA, 15 bp, Homo sapiens
aaagggttgttacaa

SEQ ID NO: 840303 - DNA, 15 bp, Homo sapiens
caaagggttgttaca

SEQ ID NO: 840304 - DNA, 15 bp, Homo sapiens
tcaaagggttgttac

SEQ ID NO: 840305 - DNA, 15 bp, Homo sapiens
gtcaaagggttgtta

SEQ ID NO: 840306 - DNA, 15 bp, Homo sapiens
tgtcaaagggttgtt

SEQ ID NO: 840307 - DNA, 15 bp, Homo sapiens
atgtcaaagggttgt

SEQ ID NO: 840308 - DNA, 15 bp, Homo sapiens
gatgtcaaagggttg

SEQ ID NO: 840309 - DNA, 15 bp, Homo sapiens
tgatgtcaaagggtt

SEQ ID NO: 840310 - DNA, 15 bp, Homo sapiens
ttgatgtcaaagggt

SEQ ID NO: 840311 - DNA, 15 bp, Homo sapiens
attgatgtcaaaggg

SEQ ID NO: 840312 - DNA, 15 bp, Homo sapiens
tattgatgtcaaagg

SEQ ID NO: 840313 - DNA, 15 bp, Homo sapiens
atattgatgtcaaag

SEQ ID NO: 840314 - DNA, 15 bp, Homo sapiens
aatattgatgtcaaa

SEQ ID NO: 840315 - DNA, 15 bp, Homo sapiens
taatattgatgtcaa

SEQ ID NO: 840316 - DNA, 15 bp, Homo sapiens
ataatattgatgtca

SEQ ID NO: 840317 - DNA, 15 bp, Homo sapiens
aataatattgatgtc

SEQ ID NO: 840318 - DNA, 15 bp, Homo sapiens
taataatattgatgt

SEQ ID NO: 840319 - DNA, 15 bp, Homo sapiens
ataataatattgatg

SEQ ID NO: 840320 - DNA, 15 bp, Homo sapiens
aataataatattgat

SEQ ID NO: 840321 - DNA, 15 bp, Homo sapiens
aaataataatattga

SEQ ID NO: 840322 - DNA, 15 bp, Homo sapiens
aaaataataatattg

SEQ ID NO: 840323 - DNA, 15 bp, Homo sapiens
gaaaataataatatt

SEQ ID NO: 840324 - DNA, 15 bp, Homo sapiens
agaaaataataatat

SEQ ID NO: 840325 - DNA, 15 bp, Homo sapiens
gagaaaataataata

SEQ ID NO: 840326 - DNA, 15 bp, Homo sapiens
ggagaaaataataat

SEQ ID NO: 840327 - DNA, 15 bp, Homo sapiens
tggagaaaataataa

SEQ ID NO: 840328 - DNA, 15 bp, Homo sapiens
atggagaaaataata

SEQ ID NO: 840329 - DNA, 15 bp, Homo sapiens
aatggagaaaataat

SEQ ID NO: 840330 - DNA, 15 bp, Homo sapiens
aaatggagaaaataa

SEQ ID NO: 840331 - DNA, 15 bp, Homo sapiens
aaaatggagaaaata

SEQ ID NO: 840332 - DNA, 15 bp, Homo sapiens
aaaaatggagaaaat

SEQ ID NO: 840333 - DNA, 15 bp, Homo sapiens
aaaaaatggagaaaa

SEQ ID NO: 840334 - DNA, 15 bp, Homo sapiens
aaaaaaatggagaaa

SEQ ID NO: 840335 - DNA, 15 bp, Homo sapiens
taaaaaaatggagaa

SEQ ID NO: 840336 - DNA, 15 bp, Homo sapiens
gtaaaaaaatggaga

SEQ ID NO: 840337 - DNA, 15 bp, Homo sapiens
tgtaaaaaaatggag

SEQ ID NO: 840338 - DNA, 15 bp, Homo sapiens
atgtaaaaaaatgga

SEQ ID NO: 840339 - DNA, 15 bp, Homo sapiens
tatgtaaaaaaatgg

SEQ ID NO: 840340 - DNA, 15 bp, Homo sapiens
atatgtaaaaaaatg

SEQ ID NO: 840341 - DNA, 15 bp, Homo sapiens
catatgtaaaaaaat

SEQ ID NO: 840342 - DNA, 15 bp, Homo sapiens
tcatatgtaaaaaaa

SEQ ID NO: 840343 - DNA, 15 bp, Homo sapiens
ctcatatgtaaaaaa

SEQ ID NO: 840344 - DNA, 15 bp, Homo sapiens
tctcatatgtaaaaa

SEQ ID NO: 840345 - DNA, 15 bp, Homo sapiens
atctcatatgtaaaa

SEQ ID NO: 840346 - DNA, 15 bp, Homo sapiens
tatctcatatgtaaa

SEQ ID NO: 840347 - DNA, 15 bp, Homo sapiens
ttatctcatatgtaa

SEQ ID NO: 840348 - DNA, 15 bp, Homo sapiens
tttatctcatatgta

SEQ ID NO: 840349 - DNA, 15 bp, Homo sapiens
atttatctcatatgt

SEQ ID NO: 840350 - DNA, 15 bp, Homo sapiens
catttatctcatatg

SEQ ID NO: 840351 - DNA, 15 bp, Homo sapiens
tcatttatctcatat

SEQ ID NO: 840352 - DNA, 15 bp, Homo sapiens
ctcatttatctcata

SEQ ID NO: 840353 - DNA, 15 bp, Homo sapiens
tctcatttatctcat

SEQ ID NO: 840354 - DNA, 15 bp, Homo sapiens
gtctcatttatctca

SEQ ID NO: 840355 - DNA, 15 bp, Homo sapiens
agtctcatttatctc

SEQ ID NO: 840356 - DNA, 15 bp, Homo sapiens
aagtctcatttatct

SEQ ID NO: 840357 - DNA, 15 bp, Homo sapiens
taagtctcatttatc

SEQ ID NO: 840358 - DNA, 15 bp, Homo sapiens
ttaagtctcatttat

SEQ ID NO: 840359 - DNA, 15 bp, Homo sapiens
tttaagtctcattta

SEQ ID NO: 840360 - DNA, 15 bp, Homo sapiens
ttttaagtctcattt

SEQ ID NO: 840361 - DNA, 15 bp, Homo sapiens
attttaagtctcatt

SEQ ID NO: 840362 - DNA, 15 bp, Homo sapiens
tattttaagtctcat

SEQ ID NO: 840363 - DNA, 15 bp, Homo sapiens
ttattttaagtctca

SEQ ID NO: 840364 - DNA, 15 bp, Homo sapiens
attattttaagtctc

SEQ ID NO: 840365 - DNA, 15 bp, Homo sapiens
cattattttaagtct

SEQ ID NO: 840366 - DNA, 15 bp, Homo sapiens
acattattttaagtc

SEQ ID NO: 840367 - DNA, 15 bp, Homo sapiens
cacattattttaagt

SEQ ID NO: 840368 - DNA, 15 bp, Homo sapiens
gcacattattttaag

SEQ ID NO: 840369 - DNA, 15 bp, Homo sapiens
ggcacattattttaa

SEQ ID NO: 840370 - DNA, 15 bp, Homo sapiens
aggcacattatttta

SEQ ID NO: 840371 - DNA, 15 bp, Homo sapiens
caggcacattatttt

SEQ ID NO: 840372 - DNA, 15 bp, Homo sapiens
tcaggcacattattt

SEQ ID NO: 840373 - DNA, 15 bp, Homo sapiens
atcaggcacattatt

SEQ ID NO: 840374 - DNA, 15 bp, Homo sapiens
tatcaggcacattat

SEQ ID NO: 840375 - DNA, 15 bp, Homo sapiens
atatcaggcacatta

SEQ ID NO: 840376 - DNA, 15 bp, Homo sapiens
gatatcaggcacatt

SEQ ID NO: 840377 - DNA, 15 bp, Homo sapiens
tgatatcaggcacat

SEQ ID NO: 840378 - DNA, 15 bp, Homo sapiens
atgatatcaggcaca

SEQ ID NO: 840379 - DNA, 15 bp, Homo sapiens
gatgatatcaggcac

SEQ ID NO: 840380 - DNA, 15 bp, Homo sapiens
tgatgatatcaggca

SEQ ID NO: 840381 - DNA, 15 bp, Homo sapiens
ctgatgatatcaggc

SEQ ID NO: 840382 - DNA, 15 bp, Homo sapiens
gctgatgatatcagg

SEQ ID NO: 840383 - DNA, 15 bp, Homo sapiens
tgctgatgatatcag

SEQ ID NO: 840384 - DNA, 15 bp, Homo sapiens
ttgctgatgatatca

SEQ ID NO: 840385 - DNA, 15 bp, Homo sapiens
tttgctgatgatatc

SEQ ID NO: 840386 - DNA, 15 bp, Homo sapiens
atttgctgatgatat

SEQ ID NO: 840387 - DNA, 15 bp, Homo sapiens
catttgctgatgata

SEQ ID NO: 840388 - DNA, 15 bp, Homo sapiens
tcatttgctgatgat

SEQ ID NO: 840389 - DNA, 15 bp, Homo sapiens
ctcatttgctgatga

SEQ ID NO: 840390 - DNA, 15 bp, Homo sapiens
gctcatttgctgatg

SEQ ID NO: 840391 - DNA, 15 bp, Homo sapiens
agctcatttgctgat

SEQ ID NO: 840392 - DNA, 15 bp, Homo sapiens
cagctcatttgctga

SEQ ID NO: 840393 - DNA, 15 bp, Homo sapiens
tcagctcatttgctg

SEQ ID NO: 840394 - DNA, 15 bp, Homo sapiens
ctcagctcatttgct

SEQ ID NO: 840395 - DNA, 15 bp, Homo sapiens
cctcagctcatttgc

SEQ ID NO: 840396 - DNA, 15 bp, Homo sapiens
tcctcagctcatttg

SEQ ID NO: 840397 - DNA, 15 bp, Homo sapiens
ctcctcagctcattt

SEQ ID NO: 840398 - DNA, 15 bp, Homo sapiens
cctcctcagctcatt

SEQ ID NO: 840399 - DNA, 15 bp, Homo sapiens
ccctcctcagctcat

SEQ ID NO: 840400 - DNA, 15 bp, Homo sapiens
gccctcctcagctca

SEQ ID NO: 840401 - DNA, 15 bp, Homo sapiens
tgccctcctcagctc

SEQ ID NO: 840402 - DNA, 15 bp, Homo sapiens
ctgccctcctcagct

SEQ ID NO: 840403 - DNA, 15 bp, Homo sapiens
tctgccctcctcagc

SEQ ID NO: 840404 - DNA, 15 bp, Homo sapiens
atctgccctcctcag

SEQ ID NO: 840405 - DNA, 15 bp, Homo sapiens
aatctgccctcctca

SEQ ID NO: 840406 - DNA, 15 bp, Homo sapiens
gaatctgccctcctc

SEQ ID NO: 840407 - DNA, 15 bp, Homo sapiens
tgaatctgccctcct

SEQ ID NO: 840408 - DNA, 15 bp, Homo sapiens
ttgaatctgccctcc

SEQ ID NO: 840409 - DNA, 15 bp, Homo sapiens
tttgaatctgccctc

SEQ ID NO: 840410 - DNA, 15 bp, Homo sapiens
ctttgaatctgccct

SEQ ID NO: 840411 - DNA, 15 bp, Homo sapiens
gctttgaatctgccc

SEQ ID NO: 840412 - DNA, 15 bp, Homo sapiens
agctttgaatctgcc

SEQ ID NO: 840413 - DNA, 15 bp, Homo sapiens
cagctttgaatctgc

SEQ ID NO: 840414 - DNA, 15 bp, Homo sapiens
tcagctttgaatctg

SEQ ID NO: 840415 - DNA, 15 bp, Homo sapiens
atcagctttgaatct

SEQ ID NO: 840416 - DNA, 15 bp, Homo sapiens
aatcagctttgaatc

SEQ ID NO: 840417 - DNA, 15 bp, Homo sapiens
caatcagctttgaat

SEQ ID NO: 840418 - DNA, 15 bp, Homo sapiens
acaatcagctttgaa

SEQ ID NO: 840419 - DNA, 15 bp, Homo sapiens
cacaatcagctttga

SEQ ID NO: 840420 - DNA, 15 bp, Homo sapiens
acacaatcagctttg

SEQ ID NO: 840421 - DNA, 15 bp, Homo sapiens
aacacaatcagcttt

SEQ ID NO: 840422 - DNA, 15 bp, Homo sapiens
aaacacaatcagctt

SEQ ID NO: 840423 - DNA, 15 bp, Homo sapiens
caaacacaatcagct

SEQ ID NO: 840424 - DNA, 15 bp, Homo sapiens
tcaaacacaatcagc

SEQ ID NO: 840425 - DNA, 15 bp, Homo sapiens
gtcaaacacaatcag

SEQ ID NO: 840426 - DNA, 15 bp, Homo sapiens
agtcaaacacaatca

SEQ ID NO: 840427 - DNA, 15 bp, Homo sapiens
gagtcaaacacaatc

SEQ ID NO: 840428 - DNA, 15 bp, Homo sapiens
agagtcaaacacaat

SEQ ID NO: 840429 - DNA, 15 bp, Homo sapiens
tagagtcaaacacaa

SEQ ID NO: 840430 - DNA, 15 bp, Homo sapiens
ctagagtcaaacaca

SEQ ID NO: 840431 - DNA, 15 bp, Homo sapiens
tctagagtcaaacac

SEQ ID NO: 840432 - DNA, 15 bp, Homo sapiens
ctctagagtcaaaca

SEQ ID NO: 840433 - DNA, 15 bp, Homo sapiens
gctctagagtcaaac

SEQ ID NO: 840434 - DNA, 15 bp, Homo sapiens
agctctagagtcaaa

SEQ ID NO: 840435 - DNA, 15 bp, Homo sapiens
cagctctagagtcaa

SEQ ID NO: 840436 - DNA, 15 bp, Homo sapiens
gcagctctagagtca

SEQ ID NO: 840437 - DNA, 15 bp, Homo sapiens
tgcagctctagagtc

SEQ ID NO: 840438 - DNA, 15 bp, Homo sapiens
ctgcagctctagagt

SEQ ID NO: 840439 - DNA, 15 bp, Homo sapiens
actgcagctctagag

SEQ ID NO: 840440 - DNA, 15 bp, Homo sapiens
gactgcagctctaga

SEQ ID NO: 840441 - DNA, 15 bp, Homo sapiens
agactgcagctctag

SEQ ID NO: 840442 - DNA, 15 bp, Homo sapiens
aagactgcagctcta

SEQ ID NO: 840443 - DNA, 15 bp, Homo sapiens
taagactgcagctct

SEQ ID NO: 840444 - DNA, 15 bp, Homo sapiens
ttaagactgcagctc

SEQ ID NO: 840445 - DNA, 15 bp, Homo sapiens
cttaagactgcagct

SEQ ID NO: 840446 - DNA, 15 bp, Homo sapiens
gcttaagactgcagc

SEQ ID NO: 840447 - DNA, 15 bp, Homo sapiens
ggcttaagactgcag

SEQ ID NO: 840448 - DNA, 15 bp, Homo sapiens
tggcttaagactgca

SEQ ID NO: 840449 - DNA, 15 bp, Homo sapiens
ctggcttaagactgc

SEQ ID NO: 840450 - DNA, 15 bp, Homo sapiens
tctggcttaagactg

SEQ ID NO: 840451 - DNA, 15 bp, Homo sapiens
gtctggcttaagact

SEQ ID NO: 840452 - DNA, 15 bp, Homo sapiens
ggtctggcttaagac

SEQ ID NO: 840453 - DNA, 15 bp, Homo sapiens
aggtctggcttaaga

SEQ ID NO: 840454 - DNA, 15 bp, Homo sapiens
aaggtctggcttaag

SEQ ID NO: 840455 - DNA, 15 bp, Homo sapiens
aaaggtctggcttaa

SEQ ID NO: 840456 - DNA, 15 bp, Homo sapiens
aaaaggtctggctta

SEQ ID NO: 840457 - DNA, 15 bp, Homo sapiens
gaaaaggtctggctt

SEQ ID NO: 840458 - DNA, 15 bp, Homo sapiens
agaaaaggtctggct

SEQ ID NO: 840459 - DNA, 15 bp, Homo sapiens
aagaaaaggtctggc

SEQ ID NO: 840460 - DNA, 15 bp, Homo sapiens
caagaaaaggtctgg

SEQ ID NO: 840461 - DNA, 15 bp, Homo sapiens
gcaagaaaaggtctg

SEQ ID NO: 840462 - DNA, 15 bp, Homo sapiens
agcaagaaaaggtct

SEQ ID NO: 840463 - DNA, 15 bp, Homo sapiens
cagcaagaaaaggtc

SEQ ID NO: 840464 - DNA, 15 bp, Homo sapiens
ccagcaagaaaaggt

SEQ ID NO: 840465 - DNA, 15 bp, Homo sapiens
accagcaagaaaagg

SEQ ID NO: 840466 - DNA, 15 bp, Homo sapiens
aaccagcaagaaaag

SEQ ID NO: 840467 - DNA, 15 bp, Homo sapiens
taaccagcaagaaaa

SEQ ID NO: 840468 - DNA, 15 bp, Homo sapiens
ttaaccagcaagaaa

SEQ ID NO: 840469 - DNA, 15 bp, Homo sapiens
attaaccagcaagaa

SEQ ID NO: 840470 - DNA, 15 bp, Homo sapiens
aattaaccagcaaga

SEQ ID NO: 840471 - DNA, 15 bp, Homo sapiens
aaattaaccagcaag

SEQ ID NO: 840472 - DNA, 15 bp, Homo sapiens
aaaattaaccagcaa

SEQ ID NO: 840473 - DNA, 15 bp, Homo sapiens
taaaattaaccagca

SEQ ID NO: 840474 - DNA, 15 bp, Homo sapiens
gtaaaattaaccagc

SEQ ID NO: 840475 - DNA, 15 bp, Homo sapiens
agtaaaattaaccag

SEQ ID NO: 840476 - DNA, 15 bp, Homo sapiens
cagtaaaattaacca

SEQ ID NO: 840477 - DNA, 15 bp, Homo sapiens
tcagtaaaattaacc

SEQ ID NO: 840478 - DNA, 15 bp, Homo sapiens
ttcagtaaaattaac

SEQ ID NO: 840479 - DNA, 15 bp, Homo sapiens
tttcagtaaaattaa

SEQ ID NO: 840480 - DNA, 15 bp, Homo sapiens
ttttcagtaaaatta

SEQ ID NO: 840481 - DNA, 15 bp, Homo sapiens
tttttcagtaaaatt

SEQ ID NO: 840482 - DNA, 15 bp, Homo sapiens
ttttttcagtaaaat

SEQ ID NO: 840483 - DNA, 15 bp, Homo sapiens
tttttttcagtaaaa

SEQ ID NO: 840484 - DNA, 15 bp, Homo sapiens
ttttttttcagtaaa

SEQ ID NO: 840485 - DNA, 15 bp, Homo sapiens
tttttttttcagtaa

SEQ ID NO: 840486 - DNA, 15 bp, Homo sapiens
ttttttttttcagta

SEQ ID NO: 840487 - DNA, 15 bp, Homo sapiens
tttttttttttcagt

SEQ ID NO: 840488 - DNA, 15 bp, Homo sapiens
ttttttttttttcag

SEQ ID NO: 840489 - DNA, 15 bp, Homo sapiens
gggtttttttttttt

SEQ ID NO: 840490 - DNA, 15 bp, Homo sapiens
agggttttttttttt

SEQ ID NO: 840491 - DNA, 15 bp, Homo sapiens
gagggtttttttttt

SEQ ID NO: 840492 - DNA, 15 bp, Homo sapiens
tgagggttttttttt

SEQ ID NO: 840493 - DNA, 15 bp, Homo sapiens
ttgagggtttttttt

SEQ ID NO: 840494 - DNA, 15 bp, Homo sapiens
tttgagggttttttt

SEQ ID NO: 840495 - DNA, 15 bp, Homo sapiens
atttgagggtttttt

SEQ ID NO: 840496 - DNA, 15 bp, Homo sapiens
tatttgagggttttt

SEQ ID NO: 840497 - DNA, 15 bp, Homo sapiens
gtatttgagggtttt

SEQ ID NO: 840498 - DNA, 15 bp, Homo sapiens
agtatttgagggttt

SEQ ID NO: 840499 - DNA, 15 bp, Homo sapiens
cagtatttgagggtt

SEQ ID NO: 840500 - DNA, 15 bp, Homo sapiens
gcagtatttgagggt

SEQ ID NO: 840501 - DNA, 15 bp, Homo sapiens
agcagtatttgaggg

SEQ ID NO: 840502 - DNA, 15 bp, Homo sapiens
cagcagtatttgagg

SEQ ID NO: 840503 - DNA, 15 bp, Homo sapiens
tcagcagtatttgag

SEQ ID NO: 840504 - DNA, 15 bp, Homo sapiens
atcagcagtatttga

SEQ ID NO: 840505 - DNA, 15 bp, Homo sapiens
aatcagcagtatttg

SEQ ID NO: 840506 - DNA, 15 bp, Homo sapiens
caatcagcagtattt

SEQ ID NO: 840507 - DNA, 15 bp, Homo sapiens
tcaatcagcagtatt

SEQ ID NO: 840508 - DNA, 15 bp, Homo sapiens
atcaatcagcagtat

SEQ ID NO: 840509 - DNA, 15 bp, Homo sapiens
gatcaatcagcagta

SEQ ID NO: 840510 - DNA, 15 bp, Homo sapiens
agatcaatcagcagt

SEQ ID NO: 840511 - DNA, 15 bp, Homo sapiens
tagatcaatcagcag

SEQ ID NO: 840512 - DNA, 15 bp, Homo sapiens
ttagatcaatcagca

SEQ ID NO: 840513 - DNA, 15 bp, Homo sapiens
tttagatcaatcagc

SEQ ID NO: 840514 - DNA, 15 bp, Homo sapiens
ctttagatcaatcag

SEQ ID NO: 840515 - DNA, 15 bp, Homo sapiens
actttagatcaatca

SEQ ID NO: 840516 - DNA, 15 bp, Homo sapiens
tactttagatcaatc

SEQ ID NO: 840517 - DNA, 15 bp, Homo sapiens
gtactttagatcaat

SEQ ID NO: 840518 - DNA, 15 bp, Homo sapiens
agtactttagatcaa

SEQ ID NO: 840519 - DNA, 15 bp, Homo sapiens
tagtactttagatca

SEQ ID NO: 840520 - DNA, 15 bp, Homo sapiens
ttagtactttagatc

SEQ ID NO: 840521 - DNA, 15 bp, Homo sapiens
gttagtactttagat

SEQ ID NO: 840522 - DNA, 15 bp, Homo sapiens
tgttagtactttaga

SEQ ID NO: 840523 - DNA, 15 bp, Homo sapiens
atgttagtactttag

SEQ ID NO: 840524 - DNA, 15 bp, Homo sapiens
aatgttagtacttta

SEQ ID NO: 840525 - DNA, 15 bp, Homo sapiens
aaatgttagtacttt

SEQ ID NO: 840526 - DNA, 15 bp, Homo sapiens
gaaatgttagtactt

SEQ ID NO: 840527 - DNA, 15 bp, Homo sapiens
agaaatgttagtact

SEQ ID NO: 840528 - DNA, 15 bp, Homo sapiens
tagaaatgttagtac

SEQ ID NO: 840529 - DNA, 15 bp, Homo sapiens
atagaaatgttagta

SEQ ID NO: 840530 - DNA, 15 bp, Homo sapiens
gatagaaatgttagt

SEQ ID NO: 840531 - DNA, 15 bp, Homo sapiens
tgatagaaatgttag

SEQ ID NO: 840532 - DNA, 15 bp, Homo sapiens
ctgatagaaatgtta

SEQ ID NO: 840533 - DNA, 15 bp, Homo sapiens
actgatagaaatgtt

SEQ ID NO: 840534 - DNA, 15 bp, Homo sapiens
cactgatagaaatgt

SEQ ID NO: 840535 - DNA, 15 bp, Homo sapiens
acactgatagaaatg

SEQ ID NO: 840536 - DNA, 15 bp, Homo sapiens
aacactgatagaaat

SEQ ID NO: 840537 - DNA, 15 bp, Homo sapiens
taacactgatagaaa

SEQ ID NO: 840538 - DNA, 15 bp, Homo sapiens
ctaacactgatagaa

SEQ ID NO: 840539 - DNA, 15 bp, Homo sapiens
cctaacactgataga

SEQ ID NO: 840540 - DNA, 15 bp, Homo sapiens
ccctaacactgatag

SEQ ID NO: 840541 - DNA, 15 bp, Homo sapiens
tccctaacactgata

SEQ ID NO: 840542 - DNA, 15 bp, Homo sapiens
ttccctaacactgat

SEQ ID NO: 840543 - DNA, 15 bp, Homo sapiens
tttccctaacactga

SEQ ID NO: 840544 - DNA, 15 bp, Homo sapiens
atttccctaacactg

SEQ ID NO: 840545 - DNA, 15 bp, Homo sapiens
aatttccctaacact

SEQ ID NO: 840546 - DNA, 15 bp, Homo sapiens
aaatttccctaacac

SEQ ID NO: 840547 - DNA, 15 bp, Homo sapiens
aaaatttccctaaca

SEQ ID NO: 840548 - DNA, 15 bp, Homo sapiens
taaaatttccctaac

SEQ ID NO: 840549 - DNA, 15 bp, Homo sapiens
ttaaaatttccctaa

SEQ ID NO: 840550 - DNA, 15 bp, Homo sapiens
attaaaatttcccta

SEQ ID NO: 840551 - DNA, 15 bp, Homo sapiens
aattaaaatttccct

SEQ ID NO: 840552 - DNA, 15 bp, Homo sapiens
aaattaaaatttccc

SEQ ID NO: 840553 - DNA, 15 bp, Homo sapiens
aaaattaaaatttcc

SEQ ID NO: 840554 - DNA, 15 bp, Homo sapiens
taaaattaaaatttc

SEQ ID NO: 840555 - DNA, 15 bp, Homo sapiens
ataaaattaaaattt

SEQ ID NO: 840556 - DNA, 15 bp, Homo sapiens
tataaaattaaaatt

SEQ ID NO: 840557 - DNA, 15 bp, Homo sapiens
ttataaaattaaaat

SEQ ID NO: 840558 - DNA, 15 bp, Homo sapiens
attataaaattaaaa

SEQ ID NO: 840559 - DNA, 15 bp, Homo sapiens
aattataaaattaaa

SEQ ID NO: 840560 - DNA, 15 bp, Homo sapiens
aaattataaaattaa

SEQ ID NO: 840561 - DNA, 15 bp, Homo sapiens
caaattataaaatta

SEQ ID NO: 840562 - DNA, 15 bp, Homo sapiens
tcaaattataaaatt

SEQ ID NO: 840563 - DNA, 15 bp, Homo sapiens
atcaaattataaaat

SEQ ID NO: 840564 - DNA, 15 bp, Homo sapiens
aatcaaattataaaa

SEQ ID NO: 840565 - DNA, 15 bp, Homo sapiens
aaatcaaattataaa

SEQ ID NO: 840566 - DNA, 15 bp, Homo sapiens
aaaatcaaattataa

SEQ ID NO: 840567 - DNA, 15 bp, Homo sapiens
caaaatcaaattata

SEQ ID NO: 840568 - DNA, 15 bp, Homo sapiens
acaaaatcaaattat

SEQ ID NO: 840569 - DNA, 15 bp, Homo sapiens
cacaaaatcaaatta

SEQ ID NO: 840570 - DNA, 15 bp, Homo sapiens
tcacaaaatcaaatt

SEQ ID NO: 840571 - DNA, 15 bp, Homo sapiens
ctcacaaaatcaaat

SEQ ID NO: 840572 - DNA, 15 bp, Homo sapiens
tctcacaaaatcaaa

SEQ ID NO: 840573 - DNA, 15 bp, Homo sapiens
atttctcacaaaatc

SEQ ID NO: 840574 - DNA, 15 bp, Homo sapiens
aatttctcacaaaat

SEQ ID NO: 840575 - DNA, 15 bp, Homo sapiens
aaatttctcacaaaa

SEQ ID NO: 840576 - DNA, 15 bp, Homo sapiens
taaatttctcacaaa

SEQ ID NO: 840577 - DNA, 15 bp, Homo sapiens
ataaatttctcacaa

SEQ ID NO: 840578 - DNA, 15 bp, Homo sapiens
tataaatttctcaca

SEQ ID NO: 840579 - DNA, 15 bp, Homo sapiens
ctataaatttctcac

SEQ ID NO: 840580 - DNA, 15 bp, Homo sapiens
gctataaatttctca

SEQ ID NO: 840581 - DNA, 15 bp, Homo sapiens
tgctataaatttctc

SEQ ID NO: 840582 - DNA, 15 bp, Homo sapiens
atgctataaatttct

SEQ ID NO: 840583 - DNA, 15 bp, Homo sapiens
gatgctataaatttc

SEQ ID NO: 840584 - DNA, 15 bp, Homo sapiens
agatgctataaattt

SEQ ID NO: 840585 - DNA, 15 bp, Homo sapiens
aagatgctataaatt

SEQ ID NO: 840586 - DNA, 15 bp, Homo sapiens
caagatgctataaat

SEQ ID NO: 840587 - DNA, 15 bp, Homo sapiens
tcaagatgctataaa

SEQ ID NO: 840588 - DNA, 15 bp, Homo sapiens
ttcaagatgctataa

SEQ ID NO: 840589 - DNA, 15 bp, Homo sapiens
attcaagatgctata

SEQ ID NO: 840590 - DNA, 15 bp, Homo sapiens
tattcaagatgctat

SEQ ID NO: 840591 - DNA, 15 bp, Homo sapiens
gtattcaagatgcta

SEQ ID NO: 840592 - DNA, 15 bp, Homo sapiens
agtattcaagatgct

SEQ ID NO: 840593 - DNA, 15 bp, Homo sapiens
gagtattcaagatgc

SEQ ID NO: 840594 - DNA, 15 bp, Homo sapiens
tgagtattcaagatg

SEQ ID NO: 840595 - DNA, 15 bp, Homo sapiens
gtgagtattcaagat

SEQ ID NO: 840596 - DNA, 15 bp, Homo sapiens
tgtgagtattcaaga

SEQ ID NO: 840597 - DNA, 15 bp, Homo sapiens
atgtgagtattcaag

SEQ ID NO: 840598 - DNA, 15 bp, Homo sapiens
catgtgagtattcaa

SEQ ID NO: 840599 - DNA, 15 bp, Homo sapiens
gcatgtgagtattca

SEQ ID NO: 840600 - DNA, 15 bp, Homo sapiens
tgcatgtgagtattc

SEQ ID NO: 840601 - DNA, 15 bp, Homo sapiens
ttgcatgtgagtatt

SEQ ID NO: 840602 - DNA, 15 bp, Homo sapiens
tttgcatgtgagtat

SEQ ID NO: 840603 - DNA, 15 bp, Homo sapiens
ctttgcatgtgagta

SEQ ID NO: 840604 - DNA, 15 bp, Homo sapiens
actttgcatgtgagt

SEQ ID NO: 840605 - DNA, 15 bp, Homo sapiens
cactttgcatgtgag

SEQ ID NO: 840606 - DNA, 15 bp, Homo sapiens
tcactttgcatgtga

SEQ ID NO: 840607 - DNA, 15 bp, Homo sapiens
atcactttgcatgtg

SEQ ID NO: 840608 - DNA, 15 bp, Homo sapiens
tatcactttgcatgt

SEQ ID NO: 840609 - DNA, 15 bp, Homo sapiens
atatcactttgcatg

SEQ ID NO: 840610 - DNA, 15 bp, Homo sapiens
catatcactttgcat

SEQ ID NO: 840611 - DNA, 15 bp, Homo sapiens
acatatcactttgca

SEQ ID NO: 840612 - DNA, 15 bp, Homo sapiens
gacatatcactttgc

SEQ ID NO: 840613 - DNA, 15 bp, Homo sapiens
agacatatcactttg

SEQ ID NO: 840614 - DNA, 15 bp, Homo sapiens
aagacatatcacttt

SEQ ID NO: 840615 - DNA, 15 bp, Homo sapiens
taagacatatcactt

SEQ ID NO: 840616 - DNA, 15 bp, Homo sapiens
ctaagacatatcact

SEQ ID NO: 840617 - DNA, 15 bp, Homo sapiens
tctaagacatatcac

SEQ ID NO: 840618 - DNA, 15 bp, Homo sapiens
tatctaagacatatc

SEQ ID NO: 840619 - DNA, 15 bp, Homo sapiens
ttatctaagacatat

SEQ ID NO: 840620 - DNA, 15 bp, Homo sapiens
gttatctaagacata

SEQ ID NO: 840621 - DNA, 15 bp, Homo sapiens
tgttatctaagacat

SEQ ID NO: 840622 - DNA, 15 bp, Homo sapiens
atgttatctaagaca

SEQ ID NO: 840623 - DNA, 15 bp, Homo sapiens
aatgttatctaagac

SEQ ID NO: 840624 - DNA, 15 bp, Homo sapiens
aaatgttatctaaga

SEQ ID NO: 840625 - DNA, 15 bp, Homo sapiens
aaaatgttatctaag

SEQ ID NO: 840626 - DNA, 15 bp, Homo sapiens
taaaatgttatctaa

SEQ ID NO: 840627 - DNA, 15 bp, Homo sapiens
gtaaaatgttatcta

SEQ ID NO: 840628 - DNA, 15 bp, Homo sapiens
tgtaaaatgttatct

SEQ ID NO: 840629 - DNA, 15 bp, Homo sapiens
ttgtaaaatgttatc

SEQ ID NO: 840630 - DNA, 15 bp, Homo sapiens
attgtaaaatgttat

SEQ ID NO: 840631 - DNA, 15 bp, Homo sapiens
cattgtaaaatgtta

SEQ ID NO: 840632 - DNA, 15 bp, Homo sapiens
ccattgtaaaatgtt

SEQ ID NO: 840633 - DNA, 15 bp, Homo sapiens
gccattgtaaaatgt

SEQ ID NO: 840634 - DNA, 15 bp, Homo sapiens
tgccattgtaaaatg

SEQ ID NO: 840635 - DNA, 15 bp, Homo sapiens
ctgccattgtaaaat

SEQ ID NO: 840636 - DNA, 15 bp, Homo sapiens
tctgccattgtaaaa

SEQ ID NO: 840637 - DNA, 15 bp, Homo sapiens
ctctgccattgtaaa

SEQ ID NO: 840638 - DNA, 15 bp, Homo sapiens
gctctgccattgtaa

SEQ ID NO: 840639 - DNA, 15 bp, Homo sapiens
agctctgccattgta

SEQ ID NO: 840640 - DNA, 15 bp, Homo sapiens
aagctctgccattgt

SEQ ID NO: 840641 - DNA, 15 bp, Homo sapiens
taagctctgccattg

SEQ ID NO: 840642 - DNA, 15 bp, Homo sapiens
ttaagctctgccatt

SEQ ID NO: 840643 - DNA, 15 bp, Homo sapiens
cttaagctctgccat

SEQ ID NO: 840644 - DNA, 15 bp, Homo sapiens
gcttaagctctgcca

SEQ ID NO: 840645 - DNA, 15 bp, Homo sapiens
ggcttaagctctgcc

SEQ ID NO: 840646 - DNA, 15 bp, Homo sapiens
tggcttaagctctgc

SEQ ID NO: 840647 - DNA, 15 bp, Homo sapiens
ctggcttaagctctg

SEQ ID NO: 840648 - DNA, 15 bp, Homo sapiens
actggcttaagctct

SEQ ID NO: 840649 - DNA, 15 bp, Homo sapiens
cactggcttaagctc

SEQ ID NO: 840650 - DNA, 15 bp, Homo sapiens
gcactggcttaagct

SEQ ID NO: 840651 - DNA, 15 bp, Homo sapiens
agcactggcttaagc

SEQ ID NO: 840652 - DNA, 15 bp, Homo sapiens
gagcactggcttaag

SEQ ID NO: 840653 - DNA, 15 bp, Homo sapiens
tgagcactggcttaa

SEQ ID NO: 840654 - DNA, 15 bp, Homo sapiens
ctgagcactggctta

SEQ ID NO: 840655 - DNA, 15 bp, Homo sapiens
actgagcactggctt

SEQ ID NO: 840656 - DNA, 15 bp, Homo sapiens
gactgagcactggct

SEQ ID NO: 840657 - DNA, 15 bp, Homo sapiens
tgactgagcactggc

SEQ ID NO: 840658 - DNA, 15 bp, Homo sapiens
atgactgagcactgg

SEQ ID NO: 840659 - DNA, 15 bp, Homo sapiens
aatgactgagcactg

SEQ ID NO: 840660 - DNA, 15 bp, Homo sapiens
gaatgactgagcact

SEQ ID NO: 840661 - DNA, 15 bp, Homo sapiens
tgaatgactgagcac

SEQ ID NO: 840662 - DNA, 15 bp, Homo sapiens
atgaatgactgagca

SEQ ID NO: 840663 - DNA, 15 bp, Homo sapiens
aatgaatgactgagc

SEQ ID NO: 840664 - DNA, 15 bp, Homo sapiens
gaatgaatgactgag

SEQ ID NO: 840665 - DNA, 15 bp, Homo sapiens
tgaatgaatgactga

SEQ ID NO: 840666 - DNA, 15 bp, Homo sapiens
atgaatgaatgactg

SEQ ID NO: 840667 - DNA, 15 bp, Homo sapiens
gatgaatgaatgact

SEQ ID NO: 840668 - DNA, 15 bp, Homo sapiens
ggatgaatgaatgac

SEQ ID NO: 840669 - DNA, 15 bp, Homo sapiens
aggatgaatgaatga

SEQ ID NO: 840670 - DNA, 15 bp, Homo sapiens
gaggatgaatgaatg

SEQ ID NO: 840671 - DNA, 15 bp, Homo sapiens
tgaggatgaatgaat

SEQ ID NO: 840672 - DNA, 15 bp, Homo sapiens
ttgaggatgaatgaa

SEQ ID NO: 840673 - DNA, 15 bp, Homo sapiens
cttgaggatgaatga

SEQ ID NO: 840674 - DNA, 15 bp, Homo sapiens
acttgaggatgaatg

SEQ ID NO: 840675 - DNA, 15 bp, Homo sapiens
aacttgaggatgaat

SEQ ID NO: 840676 - DNA, 15 bp, Homo sapiens
aaacttgaggatgaa

SEQ ID NO: 840677 - DNA, 15 bp, Homo sapiens
aaaacttgaggatga

SEQ ID NO: 840678 - DNA, 15 bp, Homo sapiens
caaaacttgaggatg

SEQ ID NO: 840679 - DNA, 15 bp, Homo sapiens
tcaaaacttgaggat

SEQ ID NO: 840680 - DNA, 15 bp, Homo sapiens
atcaaaacttgagga

SEQ ID NO: 840681 - DNA, 15 bp, Homo sapiens
aatcaaaacttgagg

SEQ ID NO: 840682 - DNA, 15 bp, Homo sapiens
gaatcaaaacttgag

SEQ ID NO: 840683 - DNA, 15 bp, Homo sapiens
tgaatcaaaacttga

SEQ ID NO: 840684 - DNA, 15 bp, Homo sapiens
atgaatcaaaacttg

SEQ ID NO: 840685 - DNA, 15 bp, Homo sapiens
aatgaatcaaaactt

SEQ ID NO: 840686 - DNA, 15 bp, Homo sapiens
aaatgaatcaaaact

SEQ ID NO: 840687 - DNA, 15 bp, Homo sapiens
taaatgaatcaaaac

SEQ ID NO: 840688 - DNA, 15 bp, Homo sapiens
ataaatgaatcaaaa

SEQ ID NO: 840689 - DNA, 15 bp, Homo sapiens
gataaatgaatcaaa

SEQ ID NO: 840690 - DNA, 15 bp, Homo sapiens
tgataaatgaatcaa

SEQ ID NO: 840691 - DNA, 15 bp, Homo sapiens
atgataaatgaatca

SEQ ID NO: 840692 - DNA, 15 bp, Homo sapiens
aatgataaatgaatc

SEQ ID NO: 840693 - DNA, 15 bp, Homo sapiens
gaatgataaatgaat

SEQ ID NO: 840694 - DNA, 15 bp, Homo sapiens
tgaatgataaatgaa

SEQ ID NO: 840695 - DNA, 15 bp, Homo sapiens
atgaatgataaatga

SEQ ID NO: 840696 - DNA, 15 bp, Homo sapiens
gatgaatgataaatg

SEQ ID NO: 840697 - DNA, 15 bp, Homo sapiens
tgatgaatgataaat

SEQ ID NO: 840698 - DNA, 15 bp, Homo sapiens
ttgatgaatgataaa

SEQ ID NO: 840699 - DNA, 15 bp, Homo sapiens
tttgatgaatgataa

SEQ ID NO: 840700 - DNA, 15 bp, Homo sapiens
ttttgatgaatgata

SEQ ID NO: 840701 - DNA, 15 bp, Homo sapiens
gttttgatgaatgat

SEQ ID NO: 840702 - DNA, 15 bp, Homo sapiens
agttttgatgaatga

SEQ ID NO: 840703 - DNA, 15 bp, Homo sapiens
gagttttgatgaatg

SEQ ID NO: 840704 - DNA, 15 bp, Homo sapiens
agagttttgatgaat

SEQ ID NO: 840705 - DNA, 15 bp, Homo sapiens
cagagttttgatgaa

SEQ ID NO: 840706 - DNA, 15 bp, Homo sapiens
acagagttttgatga

SEQ ID NO: 840707 - DNA, 15 bp, Homo sapiens
aacagagttttgatg

SEQ ID NO: 840708 - DNA, 15 bp, Homo sapiens
aaacagagttttgat

SEQ ID NO: 840709 - DNA, 15 bp, Homo sapiens
aaaacagagttttga

SEQ ID NO: 840710 - DNA, 15 bp, Homo sapiens
caaaacagagttttg

SEQ ID NO: 840711 - DNA, 15 bp, Homo sapiens
acaaaacagagtttt

SEQ ID NO: 840712 - DNA, 15 bp, Homo sapiens
aacaaaacagagttt

SEQ ID NO: 840713 - DNA, 15 bp, Homo sapiens
aaacaaaacagagtt

SEQ ID NO: 840714 - DNA, 15 bp, Homo sapiens
caaacaaaacagagt

SEQ ID NO: 840715 - DNA, 15 bp, Homo sapiens
ccaaacaaaacagag

SEQ ID NO: 840716 - DNA, 15 bp, Homo sapiens
gccaaacaaaacaga

SEQ ID NO: 840717 - DNA, 15 bp, Homo sapiens
ggccaaacaaaacag

SEQ ID NO: 840718 - DNA, 15 bp, Homo sapiens
tggccaaacaaaaca

SEQ ID NO: 840719 - DNA, 15 bp, Homo sapiens
gtggccaaacaaaac

SEQ ID NO: 840720 - DNA, 15 bp, Homo sapiens
ggtggccaaacaaaa

SEQ ID NO: 840721 - DNA, 15 bp, Homo sapiens
gggtggccaaacaaa

SEQ ID NO: 840722 - DNA, 15 bp, Homo sapiens
tgggtggccaaacaa

SEQ ID NO: 840723 - DNA, 15 bp, Homo sapiens
gtgggtggccaaaca

SEQ ID NO: 840724 - DNA, 15 bp, Homo sapiens
tgtgggtggccaaac

SEQ ID NO: 840725 - DNA, 15 bp, Homo sapiens
atgtgggtggccaaa

SEQ ID NO: 840726 - DNA, 15 bp, Homo sapiens
aatgtgggtggccaa

SEQ ID NO: 840727 - DNA, 15 bp, Homo sapiens
gaatgtgggtggcca

SEQ ID NO: 840728 - DNA, 15 bp, Homo sapiens
agaatgtgggtggcc

SEQ ID NO: 840729 - DNA, 15 bp, Homo sapiens
tagaatgtgggtggc

SEQ ID NO: 840730 - DNA, 15 bp, Homo sapiens
ctagaatgtgggtgg

SEQ ID NO: 840731 - DNA, 15 bp, Homo sapiens
cctagaatgtgggtg

SEQ ID NO: 840732 - DNA, 15 bp, Homo sapiens
tcctagaatgtgggt

SEQ ID NO: 840733 - DNA, 15 bp, Homo sapiens
ctcctagaatgtggg

SEQ ID NO: 840734 - DNA, 15 bp, Homo sapiens
gctcctagaatgtgg

SEQ ID NO: 840735 - DNA, 15 bp, Homo sapiens
agctcctagaatgtg

SEQ ID NO: 840736 - DNA, 15 bp, Homo sapiens
gagctcctagaatgt
